United States Patent Application Publication US 2007/0042381 A1 - sequence listing, part 89

SEQ ID NO: 4048819 - RNA, 14 nt, Respiratory syncytial virus
cauaguucaaaugg

SEQ ID NO: 4048820 - RNA, 22 nt, Respiratory syncytial virus
cauaucaucgugcuuauacaag

SEQ ID NO: 4048821 - RNA, 18 nt, Respiratory syncytial virus
cauccaaccaaacaucua

SEQ ID NO: 4048822 - RNA, 18 nt, Respiratory syncytial virus
caucucacuuacauuauu

SEQ ID NO: 4048823 - RNA, 16 nt, Respiratory syncytial virus
caucuggagccucaga

SEQ ID NO: 4048824 - RNA, 18 nt, Respiratory syncytial virus
caugaauuucaacacaag

SEQ ID NO: 4048825 - RNA, 16 nt, Respiratory syncytial virus
caugcagugcagucag

SEQ ID NO: 4048826 - RNA, 11 nt, Respiratory syncytial virus
ccaaacaaaaa

SEQ ID NO: 4048827 - RNA, 15 nt, Respiratory syncytial virus
ccaacaaaugagaca

SEQ ID NO: 4048828 - RNA, 12 nt, Respiratory syncytial virus
ccaacacaugac

SEQ ID NO: 4048829 - RNA, 19 nt, Respiratory syncytial virus
ccaacagaagaccaacaaa

SEQ ID NO: 4048830 - RNA, 14 nt, Respiratory syncytial virus
ccaacgcaccacca

SEQ ID NO: 4048831 - RNA, 15 nt, Respiratory syncytial virus
ccaauccaaaacuag

SEQ ID NO: 4048832 - RNA, 20 nt, Respiratory syncytial virus
ccaaucugauggcacaaaac

SEQ ID NO: 4048833 - RNA, 18 nt, Respiratory syncytial virus
ccaauuaucaaagaaaac

SEQ ID NO: 4048834 - RNA, 16 nt, Respiratory syncytial virus
ccaccaagcccacaaa

SEQ ID NO: 4048835 - RNA, 23 nt, Respiratory syncytial virus
ccagagacaucauaacacacaga

SEQ ID NO: 4048836 - RNA, 14 nt, Respiratory syncytial virus
ccaggcaaaaucaa

SEQ ID NO: 4048837 - RNA, 20 nt, Respiratory syncytial virus
ccaguggcauugcuguaucu

SEQ ID NO: 4048838 - RNA, 17 nt, Respiratory syncytial virus
ccaucacaaaugcaaaa

SEQ ID NO: 4048839 - RNA, 16 nt, Respiratory syncytial virus
ccaucuggagccucag

SEQ ID NO: 4048840 - RNA, 16 nt, Respiratory syncytial virus
ccauggacacaacaca

SEQ ID NO: 4048841 - RNA, 16 nt, Respiratory syncytial virus
ccuaagauccaucagu

SEQ ID NO: 4048842 - RNA, 17 nt, Respiratory syncytial virus
ccucaaaacaaaugcaa

SEQ ID NO: 4048843 - RNA, 15 nt, Respiratory syncytial virus
cgauaguuauuuaaa

SEQ ID NO: 4048844 - RNA, 14 nt, Respiratory syncytial virus
cuaauacacaugau

SEQ ID NO: 4048845 - RNA, 20 nt, Respiratory syncytial virus
cuaaucauaaucuccaucau

SEQ ID NO: 4048846 - RNA, 16 nt, Respiratory syncytial virus
cuaauggccuaauaga

SEQ ID NO: 4048847 - RNA, 16 nt, Respiratory syncytial virus
cuaccaccaagcccac

SEQ ID NO: 4048848 - RNA, 20 nt, Respiratory syncytial virus
cuagaggcuaucaaacauca

SEQ ID NO: 4048849 - RNA, 17 nt, Respiratory syncytial virus
cuagcaaaucaauguca

SEQ ID NO: 4048850 - RNA, 18 nt, Respiratory syncytial virus
cuaguaaguuucaaagaa

SEQ ID NO: 4048851 - RNA, 12 nt, Respiratory syncytial virus
cuauacaaagaa

SEQ ID NO: 4048852 - RNA, 20 nt, Respiratory syncytial virus
cucaaaccacaaaaccaaag

SEQ ID NO: 4048853 - RNA, 22 nt, Respiratory syncytial virus
cucaacagugaugacaucaaaa

SEQ ID NO: 4048854 - RNA, 16 nt, Respiratory syncytial virus
cucaauccaugaauuu

SEQ ID NO: 4048855 - RNA, 22 nt, Respiratory syncytial virus
cuccauaguucaaauggagccu

SEQ ID NO: 4048856 - RNA, 14 nt, Respiratory syncytial virus
cucggcaaaccaca

SEQ ID NO: 4048857 - RNA, 19 nt, Respiratory syncytial virus
cucucaucuauaaaccauc

SEQ ID NO: 4048858 - RNA, 13 nt, Respiratory syncytial virus
cucuuagcaaagu

SEQ ID NO: 4048859 - RNA, 16 nt, Respiratory syncytial virus
cugaaacuacaucaca

SEQ ID NO: 4048860 - RNA, 23 nt, Respiratory syncytial virus
cugaaauaacaacuucaugcaua

SEQ ID NO: 4048861 - RNA, 13 nt, Respiratory syncytial virus
cugacaaauuaau

SEQ ID NO: 4048862 - RNA, 21 nt, Respiratory syncytial virus
cuggucaacuaugaaaugaaa

SEQ ID NO: 4048863 - RNA, 19 nt, Respiratory syncytial virus
cuguagggaacaagcccaa

SEQ ID NO: 4048864 - RNA, 18 nt, Respiratory syncytial virus
cuuauauguuaacaaaua

SEQ ID NO: 4048865 - RNA, 13 nt, Respiratory syncytial virus
cuucaccaucaua

SEQ ID NO: 4048866 - RNA, 21 nt, Respiratory syncytial virus
cuucaccaucauaaucaccaa

SEQ ID NO: 4048867 - RNA, 13 nt, Respiratory syncytial virus
cuucacuucacca

SEQ ID NO: 4048868 - RNA, 21 nt, Respiratory syncytial virus
gaaacuacaucacaaaccacc

SEQ ID NO: 4048869 - RNA, 16 nt, Respiratory syncytial virus
gaaagaaaugaaauuu

SEQ ID NO: 4048870 - RNA, 14 nt, Respiratory syncytial virus
gaauacaacacaaa

SEQ ID NO: 4048871 - RNA, 21 nt, Respiratory syncytial virus
gaauuagauaaauauaaaagu

SEQ ID NO: 4048872 - RNA, 13 nt, Respiratory syncytial virus
gacacuagaaaag

SEQ ID NO: 4048873 - RNA, 18 nt, Respiratory syncytial virus
gacacucucaaucaucua

SEQ ID NO: 4048874 - RNA, 15 nt, Respiratory syncytial virus
gacauaagaugaaag

SEQ ID NO: 4048875 - RNA, 15 nt, Respiratory syncytial virus
gacaugauagaaaaa

SEQ ID NO: 4048876 - RNA, 22 nt, Respiratory syncytial virus
gacccugcaucacuuacaauau

SEQ ID NO: 4048877 - RNA, 16 nt, Respiratory syncytial virus
gagguagcuccagaau

SEQ ID NO: 4048878 - RNA, 20 nt, Respiratory syncytial virus
gagucacacaaucugaaaua

SEQ ID NO: 4048879 - RNA, 20 nt, Respiratory syncytial virus
gauaaaaauggggcaaauaa

SEQ ID NO: 4048880 - RNA, 19 nt, Respiratory syncytial virus
gauaaaaguuagauuacaa

SEQ ID NO: 4048881 - RNA, 15 nt, Respiratory syncytial virus
gauaaauauaaaagu

SEQ ID NO: 4048882 - RNA, 21 nt, Respiratory syncytial virus
gauagaaucuagaaaauccua

SEQ ID NO: 4048883 - RNA, 18 nt, Respiratory syncytial virus
gauauuaaugggaaagaa

SEQ ID NO: 4048884 - RNA, 21 nt, Respiratory syncytial virus
gaucucaaaccucaaaccaca

SEQ ID NO: 4048885 - RNA, 15 nt, Respiratory syncytial virus
gauuccuaguuuaua

SEQ ID NO: 4048886 - RNA, 13 nt, Respiratory syncytial virus
gcaaauaaaacau

SEQ ID NO: 4048887 - RNA, 13 nt, Respiratory syncytial virus
gcaaauacaaaaa

SEQ ID NO: 4048888 - RNA, 16 nt, Respiratory syncytial virus
gcaaaucaaugucacu

SEQ ID NO: 4048889 - RNA, 11 nt, Respiratory syncytial virus
gcaagcccacc

SEQ ID NO: 4048890 - RNA, 17 nt, Respiratory syncytial virus
gcaagcuggcauaugau

SEQ ID NO: 4048891 - RNA, 14 nt, Respiratory syncytial virus
gcaccuaaucaugu

SEQ ID NO: 4048892 - RNA, 13 nt, Respiratory syncytial virus
gcauaaugggaga

SEQ ID NO: 4048893 - RNA, 14 nt, Respiratory syncytial virus
gccuauaacaaaug

SEQ ID NO: 4048894 - RNA, 16 nt, Respiratory syncytial virus
gccucggcaaaccaca

SEQ ID NO: 4048895 - RNA, 17 nt, Respiratory syncytial virus
ggaaauucugcuaaugu

SEQ ID NO: 4048896 - RNA, 16 nt, Respiratory syncytial virus
ggagauaguauugaua

SEQ ID NO: 4048897 - RNA, 12 nt, Respiratory syncytial virus
ggcaaugcugcu

SEQ ID NO: 4048898 - RNA, 23 nt, Respiratory syncytial virus
guagaguuacuauguauaaucaa

SEQ ID NO: 4048899 - RNA, 13 nt, Respiratory syncytial virus
gucaacuaugaaa

SEQ ID NO: 4048900 - RNA, 23 nt, Respiratory syncytial virus
gucaagcuuaacaacugaaauuc

SEQ ID NO: 4048901 - RNA, 17 nt, Respiratory syncytial virus
gucauuguucaucagau

SEQ ID NO: 4048902 - RNA, 16 nt, Respiratory syncytial virus
guccuuggaugaaaga

SEQ ID NO: 4048903 - RNA, 16 nt, Respiratory syncytial virus
gucuauggauaaaagc

SEQ ID NO: 4048904 - RNA, 17 nt, Respiratory syncytial virus
gugcagaaacacaucaa

SEQ ID NO: 4048905 - RNA, 16 nt, Respiratory syncytial virus
gugcauguuauuacaa

SEQ ID NO: 4048906 - RNA, 15 nt, Respiratory syncytial virus
guuagauuacaaaau

SEQ ID NO: 4048907 - RNA, 23 nt, Respiratory syncytial virus
guugaaugauacacucaacaaag

SEQ ID NO: 4048908 - RNA, 22 nt, Respiratory syncytial virus
guuuaugaauuauacacucaac

SEQ ID NO: 4048909 - RNA, 17 nt, Respiratory syncytial virus
uaaauaucaacuagcaa

SEQ ID NO: 4048910 - RNA, 22 nt, Respiratory syncytial virus
uaaauucacuggguuaauaggu

SEQ ID NO: 4048911 - RNA, 19 nt, Respiratory syncytial virus
uaaguuaauaaaaauaucc

SEQ ID NO: 4048912 - RNA, 13 nt, Respiratory syncytial virus
uaauauaacagca

SEQ ID NO: 4048913 - RNA, 20 nt, Respiratory syncytial virus
uacacacuaacacuguauuc

SEQ ID NO: 4048914 - RNA, 18 nt, Respiratory syncytial virus
uacauaaagccacaaagu

SEQ ID NO: 4048915 - RNA, 16 nt, Respiratory syncytial virus
uacauagcauucacca

SEQ ID NO: 4048916 - RNA, 19 nt, Respiratory syncytial virus
uacauuuaacuaaugcauu

SEQ ID NO: 4048917 - RNA, 16 nt, Respiratory syncytial virus
uacuagcuucaacaac

SEQ ID NO: 4048918 - RNA, 18 nt, Respiratory syncytial virus
uacuagugaaacaaauau

SEQ ID NO: 4048919 - RNA, 12 nt, Respiratory syncytial virus
uacuugauaaau

SEQ ID NO: 4048920 - RNA, 14 nt, Respiratory syncytial virus
uagaggcuaucaaa

SEQ ID NO: 4048921 - RNA, 18 nt, Respiratory syncytial virus
uagcaaaucaaugucacu

SEQ ID NO: 4048922 - RNA, 20 nt, Respiratory syncytial virus
uagcuauucauaugaagaaa

SEQ ID NO: 4048923 - RNA, 13 nt, Respiratory syncytial virus
uagugaauuauua

SEQ ID NO: 4048924 - RNA, 22 nt, Respiratory syncytial virus
uaguucaaauggagccugaaaa

SEQ ID NO: 4048925 - RNA, 22 nt, Respiratory syncytial virus
uauaauaaauaucaacuagcaa

SEQ ID NO: 4048926 - RNA, 14 nt, Respiratory syncytial virus
uauaguaauuuaaa

SEQ ID NO: 4048927 - RNA, 14 nt, Respiratory syncytial virus
uauauauuaguguc

SEQ ID NO: 4048928 - RNA, 17 nt, Respiratory syncytial virus
uaugaaucaauuaucug

SEQ ID NO: 4048929 - RNA, 16 nt, Respiratory syncytial virus
uaugaucucaauccau

SEQ ID NO: 4048930 - RNA, 14 nt, Respiratory syncytial virus
uauuaaaaauuccc

SEQ ID NO: 4048931 - RNA, 16 nt, Respiratory syncytial virus
uauuaagacuaacaau

SEQ ID NO: 4048932 - RNA, 13 nt, Respiratory syncytial virus
ucaaaacaaccaa

SEQ ID NO: 4048933 - RNA, 16 nt, Respiratory syncytial virus
ucaaaccucaaaccac

SEQ ID NO: 4048934 - RNA, 14 nt, Respiratory syncytial virus
ucaacacacaacac

SEQ ID NO: 4048935 - RNA, 17 nt, Respiratory syncytial virus
ucaacuguuagugauau

SEQ ID NO: 4048936 - RNA, 22 nt, Respiratory syncytial virus
ucaagaccaaaaacacaacaac

SEQ ID NO: 4048937 - RNA, 13 nt, Respiratory syncytial virus
ucaaggaaaauaa

SEQ ID NO: 4048938 - RNA, 14 nt, Respiratory syncytial virus
ucaauccaacauca

SEQ ID NO: 4048939 - RNA, 17 nt, Respiratory syncytial virus
ucaauccaacaucagag

SEQ ID NO: 4048940 - RNA, 14 nt, Respiratory syncytial virus
ucaauccuaaugcu

SEQ ID NO: 4048941 - RNA, 18 nt, Respiratory syncytial virus
ucaaugucacuaacacca

SEQ ID NO: 4048942 - RNA, 18 nt, Respiratory syncytial virus
ucacauuauccauucugg

SEQ ID NO: 4048943 - RNA, 18 nt, Respiratory syncytial virus
ucacuaugaaaacacuca

SEQ ID NO: 4048944 - RNA, 20 nt, Respiratory syncytial virus
ucagagaaauugaacaaccu

SEQ ID NO: 4048945 - RNA, 13 nt, Respiratory syncytial virus
ucagaucauccca

SEQ ID NO: 4048946 - RNA, 11 nt, Respiratory syncytial virus
ucagugaguug

SEQ ID NO: 4048947 - RNA, 13 nt, Respiratory syncytial virus
ucauaucugcuca

SEQ ID NO: 4048948 - RNA, 18 nt, Respiratory syncytial virus
ucaucuauaaaccaucuc

SEQ ID NO: 4048949 - RNA, 13 nt, Respiratory syncytial virus
ucaugaauguaua

SEQ ID NO: 4048950 - RNA, 21 nt, Respiratory syncytial virus
uccacaagagcauaaccauca

SEQ ID NO: 4048951 - RNA, 17 nt, Respiratory syncytial virus
ucccauagcuacacacu

SEQ ID NO: 4048952 - RNA, 20 nt, Respiratory syncytial virus
uccugcaccuagaaggggaa

SEQ ID NO: 4048953 - RNA, 14 nt, Respiratory syncytial virus
ucuauaaaccaucu

SEQ ID NO: 4048954 - RNA, 22 nt, Respiratory syncytial virus
ucugaaacuacaucacaaacca

SEQ ID NO: 4048955 - RNA, 14 nt, Respiratory syncytial virus
ucuucacuucacca

SEQ ID NO: 4048956 - RNA, 19 nt, Respiratory syncytial virus
ugaaaauauaguaacauca

SEQ ID NO: 4048957 - RNA, 21 nt, Respiratory syncytial virus
ugaaacuacaucacaaaccac

SEQ ID NO: 4048958 - RNA, 14 nt, Respiratory syncytial virus
ugaaaucaaggcau

SEQ ID NO: 4048959 - RNA, 14 nt, Respiratory syncytial virus
ugaacuaauccuaa

SEQ ID NO: 4048960 - RNA, 19 nt, Respiratory syncytial virus
ugaacucaacagugaugac

SEQ ID NO: 4048961 - RNA, 23 nt, Respiratory syncytial virus
ugaaugauacacucaacaaagau

SEQ ID NO: 4048962 - RNA, 16 nt, Respiratory syncytial virus
ugacaauugugaaauu

SEQ ID NO: 4048963 - RNA, 14 nt, Respiratory syncytial virus
ugacaccacaccac

SEQ ID NO: 4048964 - RNA, 13 nt, Respiratory syncytial virus
ugauaacaacaau

SEQ ID NO: 4048965 - RNA, 17 nt, Respiratory syncytial virus
ugauaacaaugaagaag

SEQ ID NO: 4048966 - RNA, 22 nt, Respiratory syncytial virus
ugauaaguaccacuuaaauuua

SEQ ID NO: 4048967 - RNA, 20 nt, Respiratory syncytial virus
ugauacacucaacaaagauc

SEQ ID NO: 4048968 - RNA, 22 nt, Respiratory syncytial virus
ugauacauacaaucaaauugaa

SEQ ID NO: 4048969 - RNA, 16 nt, Respiratory syncytial virus
ugcaauacugaacaaa

SEQ ID NO: 4048970 - RNA, 13 nt, Respiratory syncytial virus
ugcagcaacaauc

SEQ ID NO: 4048971 - RNA, 20 nt, Respiratory syncytial virus
ugcauuuguaagugaacaac

SEQ ID NO: 4048972 - RNA, 22 nt, Respiratory syncytial virus
uggaaaauacauccauaacaau

SEQ ID NO: 4048973 - RNA, 11 nt, Respiratory syncytial virus
uggagccucag

SEQ ID NO: 4048974 - RNA, 15 nt, Respiratory syncytial virus
uggauguaacaacac

SEQ ID NO: 4048975 - RNA, 16 nt, Respiratory syncytial virus
uggauguaacaacaca

SEQ ID NO: 4048976 - RNA, 20 nt, Respiratory syncytial virus
uggcauuguauuugugcaug

SEQ ID NO: 4048977 - RNA, 19 nt, Respiratory syncytial virus
uguagaguuacuauguaua

SEQ ID NO: 4048978 - RNA, 14 nt, Respiratory syncytial virus
uguuauuacaagua

SEQ ID NO: 4048979 - RNA, 20 nt, Respiratory syncytial virus
uguuauuacaaguagugaua

SEQ ID NO: 4048980 - RNA, 19 nt, Respiratory syncytial virus
uuaaaaucugaacuucauc

SEQ ID NO: 4048981 - RNA, 22 nt, Respiratory syncytial virus
uuaacaacugaaauucaaauca

SEQ ID NO: 4048982 - RNA, 15 nt, Respiratory syncytial virus
uuauuaaucacagaa

SEQ ID NO: 4048983 - RNA, 13 nt, Respiratory syncytial virus
uucaaugaaaucc

SEQ ID NO: 4048984 - RNA, 16 nt, Respiratory syncytial virus
uucacaucaccuaaag

SEQ ID NO: 4048985 - RNA, 16 nt, Respiratory syncytial virus
uucauugaguaugaua

SEQ ID NO: 4048986 - RNA, 15 nt, Respiratory syncytial virus
uugauagacaaucau

SEQ ID NO: 4048987 - RNA, 15 nt, Respiratory syncytial virus
uugaucuaggaggaa

SEQ ID NO: 4048988 - RNA, 22 nt, Respiratory syncytial virus
uugcaaaaagccaugaccaaau

SEQ ID NO: 4048989 - RNA, 23 nt, Respiratory syncytial virus
uuggcuaaggcagugauacauac

SEQ ID NO: 4048990 - RNA, 11 nt, Respiratory syncytial virus
uuuaauaacuu

SEQ ID NO: 4048991 - RNA, 21 nt, Respiratory syncytial virus
uuucaaucaaaacaaccaaaa

SEQ ID NO: 4048992 - RNA, 22 nt, Respiratory syncytial virus
uuuuaauaacuuuuagugaacu

SEQ ID NO: 4048993 - RNA, 22 nt, Respiratory syncytial virus
uuuucaaaacuauacaaagaaa

SEQ ID NO: 4048994 - RNA, 20 nt, Reston Ebola virus (REBOV)
aaaauauuacugaugaaauu

SEQ ID NO: 4048995 - RNA, 17 nt, Reston Ebola virus (REBOV)
aauagcaaaguuaaauu

SEQ ID NO: 4048996 - RNA, 16 nt, Reston Ebola virus (REBOV)
agaucauuccaaacuu

SEQ ID NO: 4048997 - RNA, 15 nt, Reston Ebola virus (REBOV)
agcaauauucugaau

SEQ ID NO: 4048998 - RNA, 17 nt, Reston Ebola virus (REBOV)
aggaaacaaaagcgauc

SEQ ID NO: 4048999 - RNA, 24 nt, Reston Ebola virus (REBOV)
aggaaccagcccaggaagcgcagc

SEQ ID NO: 4049000 - RNA, 19 nt, Reston Ebola virus (REBOV)
aggguuacucuaaggagaa

SEQ ID NO: 4049001 - RNA, 14 nt, Reston Ebola virus (REBOV)
agugauaauguaaa

SEQ ID NO: 4049002 - RNA, 19 nt, Reston Ebola virus (REBOV)
aguuaagaucaaaugcaaa

SEQ ID NO: 4049003 - RNA, 21 nt, Reston Ebola virus (REBOV)
auagacuaaaaaucugauugu

SEQ ID NO: 4049004 - RNA, 21 nt, Reston Ebola virus (REBOV)
auccuaguauuuauuagaaug

SEQ ID NO: 4049005 - RNA, 14 nt, Reston Ebola virus (REBOV)
caaguaaucaugau

SEQ ID NO: 4049006 - RNA, 22 nt, Reston Ebola virus (REBOV)
ccacgccagcacccacaacauc

SEQ ID NO: 4049007 - RNA, 15 nt, Reston Ebola virus (REBOV)
cccaggcucuucaau

SEQ ID NO: 4049008 - RNA, 18 nt, Reston Ebola virus (REBOV)
cugaaaaugcuaagaaga

SEQ ID NO: 4049009 - RNA, 18 nt, Reston Ebola virus (REBOV)
cugaggaagauuaagaaa

SEQ ID NO: 4049010 - RNA, 13 nt, Reston Ebola virus (REBOV)
cugagucccacca

SEQ ID NO: 4049011 - RNA, 20 nt, Reston Ebola virus (REBOV)
cugauuguauagaauuauaa

SEQ ID NO: 4049012 - RNA, 15 nt, Reston Ebola virus (REBOV)
cuuaaaauaaguaca

SEQ ID NO: 4049013 - RNA, 16 nt, Reston Ebola virus (REBOV)
cuucaguuaaguaaca

SEQ ID NO: 4049014 - RNA, 15 nt, Reston Ebola virus (REBOV)
gagcccacagaccaa

SEQ ID NO: 4049015 - RNA, 21 nt, Reston Ebola virus (REBOV)
gauccaaggcucgaacaacuc

SEQ ID NO: 4049016 - RNA, 23 nt, Reston Ebola virus (REBOV)
gauucacugagucccaccaggaa

SEQ ID NO: 4049017 - RNA, 22 nt, Reston Ebola virus (REBOV)
gauuguauagaauuauaaaaga

SEQ ID NO: 4049018 - RNA, 14 nt, Reston Ebola virus (REBOV)
gcaauuaauaauau

SEQ ID NO: 4049019 - RNA, 12 nt, Reston Ebola virus (REBOV)
guuuuucugcuu

SEQ ID NO: 4049020 - RNA, 21 nt, Reston Ebola virus (REBOV)
uagcucuuugaauuggaagau

SEQ ID NO: 4049021 - RNA, 17 nt, Reston Ebola virus (REBOV)
uaugauauuucucuuaa

SEQ ID NO: 4049022 - RNA, 13 nt, Reston Ebola virus (REBOV)
aaaugauaaugau

SEQ ID NO: 4049023 - RNA, 15 nt, Reston Ebola virus (REBOV)
aaauguaacccagau

SEQ ID NO: 4049024 - RNA, 16 nt, Reston Ebola virus (REBOV)
aagcgagguugauaac

SEQ ID NO: 4049025 - RNA, 22 nt, Reston Ebola virus (REBOV)
aauuuaauuaaacuucaaagug

SEQ ID NO: 4049026 - RNA, 22 nt, Reston Ebola virus (REBOV)
acaacuccgcccagagcccaca

SEQ ID NO: 4049027 - RNA, 22 nt, Reston Ebola virus (REBOV)
acaauguaccaagugaacagcc

SEQ ID NO: 4049028 - RNA, 13 nt, Reston Ebola virus (REBOV)
acagcagcaaacc

SEQ ID NO: 4049029 - RNA, 15 nt, Reston Ebola virus (REBOV)
acauuauaagaaugu

SEQ ID NO: 4049030 - RNA, 18 nt, Reston Ebola virus (REBOV)
accaggaaccagcccagg

SEQ ID NO: 4049031 - RNA, 20 nt, Reston Ebola virus (REBOV)
accaggaaccagcccaggaa

SEQ ID NO: 4049032 - RNA, 20 nt, Reston Ebola virus (REBOV)
agacuugaccgauucaucua

SEQ ID NO: 4049033 - RNA, 19 nt, Reston Ebola virus (REBOV)
agccgaacaacacagcauc

SEQ ID NO: 4049034 - RNA, 17 nt, Reston Ebola virus (REBOV)
aggcaagccacaaccuu

SEQ ID NO: 4049035 - RNA, 19 nt, Reston Ebola virus (REBOV)
agucaaaaauaaugucaau

SEQ ID NO: 4049036 - RNA, 17 nt, Reston Ebola virus (REBOV)
auccccgaugacccagg

SEQ ID NO: 4049037 - RNA, 15 nt, Reston Ebola virus (REBOV)
auuaauuaugcauuu

SEQ ID NO: 4049038 - RNA, 22 nt, Reston Ebola virus (REBOV)
cagucuugaguaauaaucauuu

SEQ ID NO: 4049039 - RNA, 19 nt, Reston Ebola virus (REBOV)
caguuccuaucuuuaaaua

SEQ ID NO: 4049040 - RNA, 17 nt, Reston Ebola virus (REBOV)
cauuuaguaauaaugau

SEQ ID NO: 4049041 - RNA, 14 nt, Reston Ebola virus (REBOV)
ccaucggcaagcaa

SEQ ID NO: 4049042 - RNA, 21 nt, Reston Ebola virus (REBOV)
cuagcuuuaguaguuaagauc

SEQ ID NO: 4049043 - RNA, 14 nt, Reston Ebola virus (REBOV)
cuuuaaauaaugau

SEQ ID NO: 4049044 - RNA, 15 nt, Reston Ebola virus (REBOV)
gaauaagauaaugau

SEQ ID NO: 4049045 - RNA, 15 nt, Reston Ebola virus (REBOV)
gaguuuuuuaaucua

SEQ ID NO: 4049046 - RNA, 15 nt, Reston Ebola virus (REBOV)
gaugacccaggaccc

SEQ ID NO: 4049047 - RNA, 15 nt, Reston Ebola virus (REBOV)
gcagcaaaccaggaa

SEQ ID NO: 4049048 - RNA, 18 nt, Reston Ebola virus (REBOV)
gcuaguaauuuuaaucuc

SEQ ID NO: 4049049 - RNA, 19 nt, Reston Ebola virus (REBOV)
guaauaugagugauaaugu

SEQ ID NO: 4049050 - RNA, 21 nt, Reston Ebola virus (REBOV)
uaacauagacugaaaaugcua

SEQ ID NO: 4049051 - RNA, 12 nt, Reston Ebola virus (REBOV)
uacugaugaaau

SEQ ID NO: 4049052 - RNA, 14 nt, Reston Ebola virus (REBOV)
uagacugaaaaugc

SEQ ID NO: 4049053 - RNA, 16 nt, Reston Ebola virus (REBOV)
uagacugaaaaugcua

SEQ ID NO: 4049054 - RNA, 12 nt, Reston Ebola virus (REBOV)
uaugaauugugc

SEQ ID NO: 4049055 - RNA, 20 nt, Reston Ebola virus (REBOV)
uccaaggcucgaacaacucc

SEQ ID NO: 4049056 - RNA, 20 nt, Reston Ebola virus (REBOV)
ucgagcuauuauucugcuag

SEQ ID NO: 4049057 - RNA, 20 nt, Reston Ebola virus (REBOV)
ucucaggguuacucuaagga

SEQ ID NO: 4049058 - RNA, 14 nt, Reston Ebola virus (REBOV)
ucuucaguuaagua

SEQ ID NO: 4049059 - RNA, 16 nt, Reston Ebola virus (REBOV)
ugcauaaucagaaugg

SEQ ID NO: 4049060 - RNA, 17 nt, Reston Ebola virus (REBOV)
uucggaccugcagcaga

SEQ ID NO: 4049061 - RNA, 22 nt, Reston Ebola virus (REBOV)
aaauauaacaagugaugaagau

SEQ ID NO: 4049062 - RNA, 22 nt, Reston Ebola virus (REBOV)
aacuauugacgcuguugaugau

SEQ ID NO: 4049063 - RNA, 20 nt, Reston Ebola virus (REBOV)
aaguaagguagcugauucac

SEQ ID NO: 4049064 - RNA, 15 nt, Reston Ebola virus (REBOV)
acaugacuugaaugu

SEQ ID NO: 4049065 - RNA, 14 nt, Reston Ebola virus (REBOV)
acauuauaagaaug

SEQ ID NO: 4049066 - RNA, 15 nt, Reston Ebola virus (REBOV)
accaagugaacagcc

SEQ ID NO: 4049067 - RNA, 14 nt, Reston Ebola virus (REBOV)
accaggaaccagcc

SEQ ID NO: 4049068 - RNA, 17 nt, Reston Ebola virus (REBOV)
acccaaugacaaccacc

SEQ ID NO: 4049069 - RNA, 22 nt, Reston Ebola virus (REBOV)
aguccaaccaugacaagcgagg

SEQ ID NO: 4049070 - RNA, 16 nt, Reston Ebola virus (REBOV)
agugauucuuaaucua

SEQ ID NO: 4049071 - RNA, 23 nt, Reston Ebola virus (REBOV)
aucuuaaaauaaguacaugaaug

SEQ ID NO: 4049072 - RNA, 12 nt, Reston Ebola virus (REBOV)
augacccaggac

SEQ ID NO: 4049073 - RNA, 21 nt, Reston Ebola virus (REBOV)
augauuaauauauuaagaaaa

SEQ ID NO: 4049074 - RNA, 17 nt, Reston Ebola virus (REBOV)
auggcuaagauuucaau

SEQ ID NO: 4049075 - RNA, 22 nt, Reston Ebola virus (REBOV)
auuuacuugaaugcugaccacu

SEQ ID NO: 4049076 - RNA, 18 nt, Reston Ebola virus (REBOV)
auuuagaguguaugaauu

SEQ ID NO: 4049077 - RNA, 12 nt, Reston Ebola virus (REBOV)
caaaaauaaugu

SEQ ID NO: 4049078 - RNA, 19 nt, Reston Ebola virus (REBOV)
caagaccacgccagcaccc

SEQ ID NO: 4049079 - RNA, 14 nt, Reston Ebola virus (REBOV)
ccaacagcagcaaa

SEQ ID NO: 4049080 - RNA, 23 nt, Reston Ebola virus (REBOV)
gacaauggaucccggcuggaauu

SEQ ID NO: 4049081 - RNA, 12 nt, Reston Ebola virus (REBOV)
gagguauaacaa

SEQ ID NO: 4049082 - RNA, 21 nt, Reston Ebola virus (REBOV)
gauauuucucuuaauaaugau

SEQ ID NO: 4049083 - RNA, 16 nt, Reston Ebola virus (REBOV)
gauuggaguaaaagua

SEQ ID NO: 4049084 - RNA, 14 nt, Reston Ebola virus (REBOV)
gcuucuuugcuuga

SEQ ID NO: 4049085 - RNA, 14 nt, Reston Ebola virus (REBOV)
uccgauccaaggcu

SEQ ID NO: 4049086 - RNA, 14 nt, Reston Ebola virus (REBOV)
ucgggauagaacaa

SEQ ID NO: 4049087 - RNA, 18 nt, Reston Ebola virus (REBOV)
ucuauaagugauucuuaa

SEQ ID NO: 4049088 - RNA, 18 nt, Reston Ebola virus (REBOV)
ugaggaagauuaagaaaa

SEQ ID NO: 4049089 - RNA, 20 nt, Reston Ebola virus (REBOV)
uuaguaauaaugauucuuaa

SEQ ID NO: 4049090 - RNA, 15 nt, Reston Ebola virus (REBOV)
uucgagcuauuauuc

SEQ ID NO: 4049091 - RNA, 12 nt, Reston Ebola virus (REBOV)
uucuucuucaac

SEQ ID NO: 4049092 - RNA, 13 nt, Reston Ebola virus (REBOV)
uugccccaagucc

SEQ ID NO: 4049093 - RNA, 22 nt, Reston Ebola virus (REBOV)
uauuacuuauugauaagaauac

SEQ ID NO: 4049094 - RNA, 19 nt, Reston Ebola virus (REBOV)
ucaaagugauuaaaugaua

SEQ ID NO: 4049095 - RNA, 14 nt, Reston Ebola virus (REBOV)
uccgcccagagccc

SEQ ID NO: 4049096 - RNA, 15 nt, Reston Ebola virus (REBOV)
ucuauucuaaucaga

SEQ ID NO: 4049097 - RNA, 16 nt, Reston Ebola virus (REBOV)
ugaagacuccccccca

SEQ ID NO: 4049098 - RNA, 12 nt, Reston Ebola virus (REBOV)
ugcgagauuucc

SEQ ID NO: 4049099 - RNA, 21 nt, Reston Ebola virus (REBOV)
uguaacuuuauuuuaauaaca

SEQ ID NO: 4049100 - RNA, 24 nt, Reston Ebola virus (REBOV)
uguggauugacccauucugcuuaa

SEQ ID NO: 4049101 - RNA, 21 nt, Reston Ebola virus (REBOV)
uuauucugcuaguaauuccga

SEQ ID NO: 4049102 - RNA, 17 nt, Reston Ebola virus (REBOV)
uugacgcuguugaugau

SEQ ID NO: 4049103 - RNA, 20 nt, Reston Ebola virus (REBOV)
uuugaucaaguaaucaugau

SEQ ID NO: 4049104 - RNA, 10 nt, Reston Ebola virus (REBOV)
aaaccaggaa

SEQ ID NO: 4049105 - RNA, 16 nt, Reston Ebola virus (REBOV)
aacaagugaugaagau

SEQ ID NO: 4049106 - RNA, 19 nt, Reston Ebola virus (REBOV)
acagguuucaccgcgaacc

SEQ ID NO: 4049107 - RNA, 20 nt, Reston Ebola virus (REBOV)
acgccagcacccacaacauc

SEQ ID NO: 4049108 - RNA, 14 nt, Reston Ebola virus (REBOV)
agagacggccaaca

SEQ ID NO: 4049109 - RNA, 16 nt, Reston Ebola virus (REBOV)
agcaaucagaaauugg

SEQ ID NO: 4049110 - RNA, 21 nt, Reston Ebola virus (REBOV)
agguggucuuuuugaaaugga

SEQ ID NO: 4049111 - RNA, 23 nt, Reston Ebola virus (REBOV)
auaauuguuuaguaauaugagug

SEQ ID NO: 4049112 - RNA, 21 nt, Reston Ebola virus (REBOV)
augaaugagaauuaguugugg

SEQ ID NO: 4049113 - RNA, 12 nt, Reston Ebola virus (REBOV)
caagcaauauuc

SEQ ID NO: 4049114 - RNA, 14 nt, Reston Ebola virus (REBOV)
cacaacagaacuga

SEQ ID NO: 4049115 - RNA, 14 nt, Reston Ebola virus (REBOV)
ccagcccaggaagc

SEQ ID NO: 4049116 - RNA, 13 nt, Reston Ebola virus (REBOV)
cuaguaauuuuaa

SEQ ID NO: 4049117 - RNA, 23 nt, Reston Ebola virus (REBOV)
cucaggguuacucuaaggagaaa

SEQ ID NO: 4049118 - RNA, 15 nt, Reston Ebola virus (REBOV)
cuuuauuuuaauaac

SEQ ID NO: 4049119 - RNA, 23 nt, Reston Ebola virus (REBOV)
gaacuauugacgcuguugaugau

SEQ ID NO: 4049120 - RNA, 20 nt, Reston Ebola virus (REBOV)
uaacaauggcuaagauuuca

SEQ ID NO: 4049121 - RNA, 16 nt, Reston Ebola virus (REBOV)
uacucuaaggagaaau

SEQ ID NO: 4049122 - RNA, 19 nt, Reston Ebola virus (REBOV)
uagacuaaaaaucugauug

SEQ ID NO: 4049123 - RNA, 12 nt, Reston Ebola virus (REBOV)
uauccaaauguu

SEQ ID NO: 4049124 - RNA, 20 nt, Reston Ebola virus (REBOV)
uccccgaugacccaggaccc

SEQ ID NO: 4049125 - RNA, 18 nt, Reston Ebola virus (REBOV)
ugaacagccgaacaacac

SEQ ID NO: 4049126 - RNA, 16 nt, Reston Ebola virus (REBOV)
ugagucccaccaggaa

SEQ ID NO: 4049127 - RNA, 14 nt, Reston Ebola virus (REBOV)
uuaaauucuccuaa

SEQ ID NO: 4049128 - RNA, 14 nt, Reston Ebola virus (REBOV)
uuaaucuaauuuuc

SEQ ID NO: 4049129 - RNA, 20 nt, Reston Ebola virus (REBOV)
uuccauuuaguaauaaugau

SEQ ID NO: 4049130 - RNA, 20 nt, Reston Ebola virus (REBOV)
uugaugagggggcagcagua

SEQ ID NO: 4049131 - RNA, 23 nt, Reston Ebola virus (REBOV)
uugacaauccccuaccagaccac

SEQ ID NO: 4049132 - RNA, 16 nt, Reston Ebola virus [REBOV]
aacaaugccuaacuau

SEQ ID NO: 4049133 - RNA, 13 nt, Reston Ebola virus [REBOV]
aacagaaaagcua

SEQ ID NO: 4049134 - RNA, 19 nt, Reston Ebola virus [REBOV]
aacagcagcaaaccaggaa

SEQ ID NO: 4049135 - RNA, 16 nt, Reston Ebola virus [REBOV]
aacccaaugacaacca

SEQ ID NO: 4049136 - RNA, 16 nt, Reston Ebola virus [REBOV]
aagaccacgccagcac

SEQ ID NO: 4049137 - RNA, 17 nt, Reston Ebola virus [REBOV]
aagagacggccaacagc

SEQ ID NO: 4049138 - RNA, 12 nt, Reston Ebola virus [REBOV]
aagcuaaauaca

SEQ ID NO: 4049139 - RNA, 17 nt, Reston Ebola virus [REBOV]
aaguacaugaaugagaa

SEQ ID NO: 4049140 - RNA, 17 nt, Reston Ebola virus [REBOV]
aauugggauuauuggag

SEQ ID NO: 4049141 - RNA, 19 nt, Reston Ebola virus [REBOV]
aauuguuagagguaacaag

SEQ ID NO: 4049142 - RNA, 17 nt, Reston Ebola virus [REBOV]
acaauccccuaccagac

SEQ ID NO: 4049143 - RNA, 14 nt, Reston Ebola virus [REBOV]
accacgccagcacc

SEQ ID NO: 4049144 - RNA, 16 nt, Reston Ebola virus [REBOV]
acugagucccaccagg

SEQ ID NO: 4049145 - RNA, 20 nt, Reston Ebola virus [REBOV]
agagacggccaacagcagca

SEQ ID NO: 4049146 - RNA, 12 nt, Reston Ebola virus [REBOV]
agauaaauggac

SEQ ID NO: 4049147 - RNA, 22 nt, Reston Ebola virus [REBOV]
agauuuagaguguaugaauugu

SEQ ID NO: 4049148 - RNA, 14 nt, Reston Ebola virus [REBOV]
agcauccauugaag

SEQ ID NO: 4049149 - RNA, 16 nt, Reston Ebola virus [REBOV]
agcuaaauacacuuaa

SEQ ID NO: 4049150 - RNA, 14 nt, Reston Ebola virus [REBOV]
auaacaugucaaug

SEQ ID NO: 4049151 - RNA, 12 nt, Reston Ebola virus [REBOV]
aucuuuaaauaa

SEQ ID NO: 4049152 - RNA, 21 nt, Reston Ebola virus [REBOV]
augcaaacauuauaagaaugu

SEQ ID NO: 4049153 - RNA, 16 nt, Reston Ebola virus [REBOV]
augugaucuaauagau

SEQ ID NO: 4049154 - RNA, 22 nt, Reston Ebola virus [REBOV]
aaaaucugauuguauagaauua

SEQ ID NO: 4049155 - RNA, 23 nt, Reston Ebola virus [REBOV]
aaauuuacuugaaugcugaccac

SEQ ID NO: 4049156 - RNA, 19 nt, Reston Ebola virus [REBOV]
aacaacuccgcccagagcc

SEQ ID NO: 4049157 - RNA, 16 nt, Reston Ebola virus [REBOV]
aacaaucgcuaguaau

SEQ ID NO: 4049158 - RNA, 15 nt, Reston Ebola virus [REBOV]
aacacagcauccauu

SEQ ID NO: 4049159 - RNA, 13 nt, Reston Ebola virus [REBOV]
aacauagacugaa

SEQ ID NO: 4049160 - RNA, 22 nt, Reston Ebola virus [REBOV]
aacauccccgaugacccaggac

SEQ ID NO: 4049161 - RNA, 21 nt, Reston Ebola virus [REBOV]
aagagacggccaacagcagca

SEQ ID NO: 4049162 - RNA, 14 nt, Reston Ebola virus [REBOV]
aaucuaacacugaa

SEQ ID NO: 4049163 - RNA, 16 nt, Reston Ebola virus [REBOV]
aaugacaaccaccauu

SEQ ID NO: 4049164 - RNA, 18 nt, Reston Ebola virus [REBOV]
aauuggagauaaauggac

SEQ ID NO: 4049165 - RNA, 14 nt, Reston Ebola virus [REBOV]
acaaucacagguuu

SEQ ID NO: 4049166 - RNA, 20 nt, Reston Ebola virus [REBOV]
acagcagcaaaccaggaacc

SEQ ID NO: 4049167 - RNA, 16 nt, Reston Ebola virus [REBOV]
accaagucagcccgga

SEQ ID NO: 4049168 - RNA, 18 nt, Reston Ebola virus [REBOV]
accaggaaccagcccagg

SEQ ID NO: 4049169 - RNA, 18 nt, Reston Ebola virus [REBOV]
acugagucccaccaggaa

SEQ ID NO: 4049170 - RNA, 15 nt, Reston Ebola virus [REBOV]
acuuuauuuuaauaa

SEQ ID NO: 4049171 - RNA, 15 nt, Reston Ebola virus [REBOV]
agaucauuccaaacu

SEQ ID NO: 4049172 - RNA, 17 nt, Reston Ebola virus [REBOV]
agcacccacaacauccc

SEQ ID NO: 4049173 - RNA, 18 nt, Reston Ebola virus [REBOV]
agcgcagccggaccaagu

SEQ ID NO: 4049174 - RNA, 17 nt, Reston Ebola virus [REBOV]
aggaaccagcccaggaa

SEQ ID NO: 4049175 - RNA, 20 nt, Reston Ebola virus [REBOV]
aggaccaucuuguugcauug

SEQ ID NO: 4049176 - RNA, 22 nt, Reston Ebola virus [REBOV]
aggaccaucuuguugcauugag

SEQ ID NO: 4049177 - RNA, 19 nt, Reston Ebola virus [REBOV]
agguagcugauucacugag

SEQ ID NO: 4049178 - RNA, 18 nt, Reston Ebola virus [REBOV]
agguauuuugucuagagu

SEQ ID NO: 4049179 - RNA, 15 nt, Reston Ebola virus [REBOV]
auaagugauucuuaa

SEQ ID NO: 4049180 - RNA, 22 nt, Reston Ebola virus [REBOV]
auggucuuauuugaauaugaca

SEQ ID NO: 4049181 - RNA, 18 nt, Reston Ebola virus [REBOV]
aacaaucgcuaguaauuu

SEQ ID NO: 4049182 - RNA, 20 nt, Reston Ebola virus [REBOV]
aagaguuuaaguaauauaca

SEQ ID NO: 4049183 - RNA, 21 nt, Reston Ebola virus [REBOV]
acaacuccgcccagagcccac

SEQ ID NO: 4049184 - RNA, 18 nt, Reston Ebola virus [REBOV]
acagcagcaaaccaggaa

SEQ ID NO: 4049185 - RNA, 23 nt, Reston Ebola virus [REBOV]
accaccauugccccaaguccaac

SEQ ID NO: 4049186 - RNA, 13 nt, Reston Ebola virus [REBOV]
accaggaaccagc

SEQ ID NO: 4049187 - RNA, 17 nt, Reston Ebola virus [REBOV]
acggagaugaucuuaau

SEQ ID NO: 4049188 - RNA, 23 nt, Reston Ebola virus [REBOV]
acugaggacuuacucacuucuua

SEQ ID NO: 4049189 - RNA, 15 nt, Reston Ebola virus [REBOV]
acuuaucuuaaauga

SEQ ID NO: 4049190 - RNA, 20 nt, Reston Ebola virus [REBOV]
acuucaaagugauuaaauga

SEQ ID NO: 4049191 - RNA, 17 nt, Reston Ebola virus [REBOV]
agaaaagcuauugauuu

SEQ ID NO: 4049192 - RNA, 20 nt, Reston Ebola virus [REBOV]
agaguguaugaauugugcag

SEQ ID NO: 4049193 - RNA, 17 nt, Reston Ebola virus [REBOV]
agcagcaaaccaggaac

SEQ ID NO: 4049194 - RNA, 16 nt, Reston Ebola virus [REBOV]
agcccacagaccaaga

SEQ ID NO: 4049195 - RNA, 21 nt, Reston Ebola virus [REBOV]
agcuauuauucugcuaguaau

SEQ ID NO: 4049196 - RNA, 22 nt, Reston Ebola virus [REBOV]
agguggucuuuuugaaauggag

SEQ ID NO: 4049197 - RNA, 15 nt, Reston Ebola virus [REBOV]
aguaugccaaucuua

SEQ ID NO: 4049198 - RNA, 14 nt, Reston Ebola virus [REBOV]
auacuguuaagaga

SEQ ID NO: 4049199 - RNA, 19 nt, Reston Ebola virus [REBOV]
auauaauguaaauauaaca

SEQ ID NO: 4049200 - RNA, 17 nt, Reston Ebola virus [REBOV]
auaugaccucaagucaa

SEQ ID NO: 4049201 - RNA, 21 nt, Reston Ebola virus [REBOV]
auaugaccucaagucaaaaau

SEQ ID NO: 4049202 - RNA, 16 nt, Reston Ebola virus [REBOV]
auaugagugauaaugu

SEQ ID NO: 4049203 - RNA, 15 nt, Reston Ebola virus [REBOV]
auccgauccaaggcu

SEQ ID NO: 4049204 - RNA, 16 nt, Reston Ebola virus [REBOV]
aucuauggacagguug

SEQ ID NO: 4049205 - RNA, 16 nt, Reston Ebola virus [REBOV]
aucuucaguuaaguaa

SEQ ID NO: 4049206 - RNA, 18 nt, Reston Ebola virus [REBOV]
auguaaauauaacaagug

SEQ ID NO: 4049207 - RNA, 21 nt, Reston Ebola virus [REBOV]
auuaucagcauuucuuaaaug

SEQ ID NO: 4049208 - RNA, 14 nt, Reston Ebola virus [REBOV]
auugaagacucccc

SEQ ID NO: 4049209 - RNA, 23 nt, Reston Ebola virus [REBOV]
auugacaauccccuaccagacca

SEQ ID NO: 4049210 - RNA, 14 nt, Reston Ebola virus [REBOV]
auugccccaagucc

SEQ ID NO: 4049211 - RNA, 16 nt, Reston Ebola virus [REBOV]
auuuauuagaauguac

SEQ ID NO: 4049212 - RNA, 14 nt, Reston Ebola virus [REBOV]
auuucucuuaauaa

SEQ ID NO: 4049213 - RNA, 13 nt, Reston Ebola virus [REBOV]
auuugaacauagu

SEQ ID NO: 4049214 - RNA, 15 nt, Reston Ebola virus [REBOV]
caacuccgcccagag

SEQ ID NO: 4049215 - RNA, 18 nt, Reston Ebola virus [REBOV]
caaugaaacuacccaggc

SEQ ID NO: 4049216 - RNA, 17 nt, Reston Ebola virus [REBOV]
cacugagucccaccagg

SEQ ID NO: 4049217 - RNA, 21 nt, Reston Ebola virus [REBOV]
cacugagucccaccaggaaac

SEQ ID NO: 4049218 - RNA, 23 nt, Reston Ebola virus [REBOV]
cacuuuaucauagcguaacacau

SEQ ID NO: 4049219 - RNA, 22 nt, Reston Ebola virus [REBOV]
cagaacugaggacuuacucacu

SEQ ID NO: 4049220 - RNA, 17 nt, Reston Ebola virus [REBOV]
cagcagcaaaccaggaa

SEQ ID NO: 4049221 - RNA, 12 nt, Reston Ebola virus [REBOV]
caggcucuucaa

SEQ ID NO: 4049222 - RNA, 20 nt, Reston Ebola virus [REBOV]
caugacuuuauugacaaucc

SEQ ID NO: 4049223 - RNA, 14 nt, Reston Ebola virus [REBOV]
cauuuaaacaugcu

SEQ ID NO: 4049224 - RNA, 23 nt, Reston Ebola virus [REBOV]
ccaagugaacagccgaacaacac

SEQ ID NO: 4049225 - RNA, 14 nt, Reston Ebola virus [REBOV]
ccaggaaacaaaag

SEQ ID NO: 4049226 - RNA, 18 nt, Reston Ebola virus [REBOV]
cccaaguccaaccaugac

SEQ ID NO: 4049227 - RNA, 19 nt, Reston Ebola virus [REBOV]
cccacagaccaagaccacg

SEQ ID NO: 4049228 - RNA, 13 nt, Reston Ebola virus [REBOV]
ccgaugacccagg

SEQ ID NO: 4049229 - RNA, 14 nt, Reston Ebola virus [REBOV]
ccgaugacccagga

SEQ ID NO: 4049230 - RNA, 13 nt, Reston Ebola virus [REBOV]
ccuuaugcuucau

SEQ ID NO: 4049231 - RNA, 13 nt, Reston Ebola virus [REBOV]
cgaugacccagga

SEQ ID NO: 4049232 - RNA, 16 nt, Reston Ebola virus [REBOV]
cgaugacccaggaccc

SEQ ID NO: 4049233 - RNA, 15 nt, Reston Ebola virus [REBOV]
cgcaagagacggcca

SEQ ID NO: 4049234 - RNA, 16 nt, Reston Ebola virus [REBOV]
cgcccagagcccacag

SEQ ID NO: 4049235 - RNA, 17 nt, Reston Ebola virus [REBOV]
cuaaccucauauuuuga

SEQ ID NO: 4049236 - RNA, 23 nt, Reston Ebola virus [REBOV]
cuagccaaugaaacuacccaggc

SEQ ID NO: 4049237 - RNA, 17 nt, Reston Ebola virus [REBOV]
cugagucccaccaggaa

SEQ ID NO: 4049238 - RNA, 16 nt, Reston Ebola virus [REBOV]
cugcuucuuugcuuga

SEQ ID NO: 4049239 - RNA, 15 nt, Reston Ebola virus [REBOV]
gaccaagucagcccg

SEQ ID NO: 4049240 - RNA, 13 nt, Reston Ebola virus [REBOV]
gagcuucuacuau

SEQ ID NO: 4049241 - RNA, 20 nt, Reston Ebola virus [REBOV]
gaucuuaaucuauggacagg

SEQ ID NO: 4049242 - RNA, 16 nt, Reston Ebola virus [REBOV]
gaugacccaggacccg

SEQ ID NO: 4049243 - RNA, 21 nt, Reston Ebola virus [REBOV]
gcaaaccaggaaccagcccag

SEQ ID NO: 4049244 - RNA, 15 nt, Reston Ebola virus [REBOV]
gcacaagauguuaug

SEQ ID NO: 4049245 - RNA, 20 nt, Reston Ebola virus [REBOV]
gcuucauagguggucuuuuu

SEQ ID NO: 4049246 - RNA, 13 nt, Reston Ebola virus [REBOV]
ggaagauuaagaa

SEQ ID NO: 4049247 - RNA, 20 nt, Reston Ebola virus [REBOV]
ggaagcgcagccggaccaag

SEQ ID NO: 4049248 - RNA, 20 nt, Reston Ebola virus [REBOV]
ggagagacaaucacagguuu

SEQ ID NO: 4049249 - RNA, 21 nt, Reston Ebola virus [REBOV]
ggccacaacagaacugaggac

SEQ ID NO: 4049250 - RNA, 12 nt, Reston Ebola virus [REBOV]
ggcucgaacaac

SEQ ID NO: 4049251 - RNA, 18 nt, Reston Ebola virus [REBOV]
ggcuuccauuuuuacaug

SEQ ID NO: 4049252 - RNA, 16 nt, Reston Ebola virus [REBOV]
guaccaagugaacagc

SEQ ID NO: 4049253 - RNA, 21 nt, Reston Ebola virus [REBOV]
gucagcuagccaaugaaacua

SEQ ID NO: 4049254 - RNA, 14 nt, Reston Ebola virus [REBOV]
uacugaugaaauua

SEQ ID NO: 4049255 - RNA, 20 nt, Reston Ebola virus [REBOV]
uauuugaauaugacaacauc

SEQ ID NO: 4049256 - RNA, 15 nt, Reston Ebola virus [REBOV]
ucaaagugauuaaau

SEQ ID NO: 4049257 - RNA, 18 nt, Reston Ebola virus [REBOV]
uccaaggcucgaacaacu

SEQ ID NO: 4049258 - RNA, 17 nt, Reston Ebola virus [REBOV]
ucgcauuuaaacaugcu

SEQ ID NO: 4049259 - RNA, 18 nt, Reston Ebola virus [REBOV]
ugaacagccgaacaacac

SEQ ID NO: 4049260 - RNA, 14 nt, Reston Ebola virus [REBOV]
ugacccaggacccg

SEQ ID NO: 4049261 - RNA, 15 nt, Reston Ebola virus [REBOV]
ugauaacaauguacc

SEQ ID NO: 4049262 - RNA, 15 nt, Reston Ebola virus [REBOV]
ugaugaaauuaacca

SEQ ID NO: 4049263 - RNA, 15 nt, Reston Ebola virus [REBOV]
ugcauaaucagaaug

SEQ ID NO: 4049264 - RNA, 18 nt, Reston Ebola virus [REBOV]
uggagauuaucagcauuu

SEQ ID NO: 4049265 - RNA, 17 nt, Reston Ebola virus [REBOV]
uguaucacguuaaagau

SEQ ID NO: 4049266 - RNA, 21 nt, Reston Ebola virus [REBOV]
uguguugauuuauucugagau

SEQ ID NO: 4049267 - RNA, 23 nt, Reston Ebola virus [REBOV]
uguugcauugagccacaugauug

SEQ ID NO: 4049268 - RNA, 22 nt, Reston Ebola virus [REBOV]
uuaagaucaaaugcaaacauua

SEQ ID NO: 4049269 - RNA, 14 nt, Reston Ebola virus [REBOV]
uuacuugaaugcug

SEQ ID NO: 4049270 - RNA, 14 nt, Reston Ebola virus [REBOV]
uuucuuuuguaauu

SEQ ID NO: 4049271 - RNA, 20 nt, Reston Ebola virus [REBOV]
uuuuuacauguguauauaac

SEQ ID NO: 4049272 - RNA, 13 nt, Reston Ebola virus [REBOV]
aaaaaauauuacu

SEQ ID NO: 4049273 - RNA, 23 nt, Reston Ebola virus [REBOV]
aaaagcuauugauuuucuucuuc

SEQ ID NO: 4049274 - RNA, 17 nt, Reston Ebola virus [REBOV]
aaagcuauugauuuucu

SEQ ID NO: 4049275 - RNA, 18 nt, Reston Ebola virus [REBOV]
aacaacuccgcccagagc

SEQ ID NO: 4049276 - RNA, 21 nt, Reston Ebola virus [REBOV]
aacaugucaaugcuauacugu

SEQ ID NO: 4049277 - RNA, 19 nt, Reston Ebola virus [REBOV]
aaccaggaaccagcccagg

SEQ ID NO: 4049278 - RNA, 18 nt, Reston Ebola virus [REBOV]
aacuaaaccaagcaauau

SEQ ID NO: 4049279 - RNA, 13 nt, Reston Ebola virus [REBOV]
aacuacccaggcu

SEQ ID NO: 4049280 - RNA, 16 nt, Reston Ebola virus [REBOV]
aacuccgcccagagcc

SEQ ID NO: 4049281 - RNA, 17 nt, Reston Ebola virus [REBOV]
aagaccacgccagcacc

SEQ ID NO: 4049282 - RNA, 13 nt, Reston Ebola virus [REBOV]
aaucagaaauugg

SEQ ID NO: 4049283 - RNA, 24 nt, Reston Ebola virus [REBOV]
aaucgcuaguaauuuuaaucucca

SEQ ID NO: 4049284 - RNA, 14 nt, Reston Ebola virus [REBOV]
acaacacagcaucc

SEQ ID NO: 4049285 - RNA, 17 nt, Reston Ebola virus [REBOV]
accaggaaccagcccag

SEQ ID NO: 4049286 - RNA, 19 nt, Reston Ebola virus [REBOV]
accaggaaccagcccagga

SEQ ID NO: 4049287 - RNA, 19 nt, Reston Ebola virus [REBOV]
acuacccaggcucuucaau

SEQ ID NO: 4049288 - RNA, 20 nt, Reston Ebola virus [REBOV]
acuccgcccagagcccacag

SEQ ID NO: 4049289 - RNA, 11 nt, Reston Ebola virus [REBOV]
acuugaaugcu

SEQ ID NO: 4049290 - RNA, 16 nt, Reston Ebola virus [REBOV]
agacuauugaacuauu

SEQ ID NO: 4049291 - RNA, 14 nt, Reston Ebola virus [REBOV]
agcgcagccggacc

SEQ ID NO: 4049292 - RNA, 19 nt, Reston Ebola virus [REBOV]
agcuauuaguuauuacuua

SEQ ID NO: 4049293 - RNA, 21 nt, Reston Ebola virus [REBOV]
agcugauucacugagucccac

SEQ ID NO: 4049294 - RNA, 22 nt, Reston Ebola virus [REBOV]
aggacuuacucacuucuuaaca

SEQ ID NO: 4049295 - RNA, 17 nt, Reston Ebola virus [REBOV]
aggcucgaacaacuccg

SEQ ID NO: 4049296 - RNA, 15 nt, Reston Ebola virus [REBOV]
auaaauaauacuuua

SEQ ID NO: 4049297 - RNA, 17 nt, Reston Ebola virus [REBOV]
auccccgaugacccagg

SEQ ID NO: 4049298 - RNA, 20 nt, Reston Ebola virus [REBOV]
auccccgaugacccaggacc

SEQ ID NO: 4049299 - RNA, 14 nt, Reston Ebola virus [REBOV]
augaaacuacccag

SEQ ID NO: 4049300 - RNA, 12 nt, Reston Ebola virus [REBOV]
augacccaggac

SEQ ID NO: 4049301 - RNA, 13 nt, Reston Ebola virus [REBOV]
auuaagaguuuaa

SEQ ID NO: 4049302 - RNA, 18 nt, Reston Ebola virus [REBOV]
auuggaguaaaaguauaa

SEQ ID NO: 4049303 - RNA, 16 nt, Reston Ebola virus [REBOV]
caaauuaaacaugacu

SEQ ID NO: 4049304 - RNA, 16 nt, Reston Ebola virus [REBOV]
caacagcagcaaacca

SEQ ID NO: 4049305 - RNA, 20 nt, Reston Ebola virus [REBOV]
caagucagcccggacucacu

SEQ ID NO: 4049306 - RNA, 22 nt, Reston Ebola virus [REBOV]
caauagcaaaguuaaauucucc

SEQ ID NO: 4049307 - RNA, 20 nt, Reston Ebola virus [REBOV]
caaucacagguuucaccgcg

SEQ ID NO: 4049308 - RNA, 16 nt, Reston Ebola virus [REBOV]
cagagcccacagacca

SEQ ID NO: 4049309 - RNA, 19 nt, Reston Ebola virus [REBOV]
cagaucuuuacuauuggac

SEQ ID NO: 4049310 - RNA, 16 nt, Reston Ebola virus [REBOV]
cagcagcaaaccagga

SEQ ID NO: 4049311 - RNA, 20 nt, Reston Ebola virus [REBOV]
caggaagcgcagccggacca

SEQ ID NO: 4049312 - RNA, 23 nt, Reston Ebola virus [REBOV]
caucuuguugcauugagccacau

SEQ ID NO: 4049313 - RNA, 13 nt, Reston Ebola virus [REBOV]
ccaaucuuuuccu

SEQ ID NO: 4049314 - RNA, 12 nt, Reston Ebola virus [REBOV]
ccagcccaggaa

SEQ ID NO: 4049315 - RNA, 13 nt, Reston Ebola virus [REBOV]
ccauugccccaag

SEQ ID NO: 4049316 - RNA, 21 nt, Reston Ebola virus [REBOV]
ccauugccccaaguccaacca

SEQ ID NO: 4049317 - RNA, 14 nt, Reston Ebola virus [REBOV]
cccaaguccaacca

SEQ ID NO: 4049318 - RNA, 16 nt, Reston Ebola virus [REBOV]
cccgaugacccaggac

SEQ ID NO: 4049319 - RNA, 20 nt, Reston Ebola virus [REBOV]
cccgcaagagacggccaaca

SEQ ID NO: 4049320 - RNA, 23 nt, Reston Ebola virus [REBOV]
ccuaacuauugggcggcuuccau

SEQ ID NO: 4049321 - RNA, 14 nt, Reston Ebola virus [REBOV]
ccuaccagaccacg

SEQ ID NO: 4049322 - RNA, 20 nt, Reston Ebola virus [REBOV]
cgaacaacuccgcccagagc

SEQ ID NO: 4049323 - RNA, 14 nt, Reston Ebola virus [REBOV]
cggaccaagucagc

SEQ ID NO: 4049324 - RNA, 15 nt, Reston Ebola virus [REBOV]
cggaccugcagcaga

SEQ ID NO: 4049325 - RNA, 14 nt, Reston Ebola virus [REBOV]
auucugcuaguaau

SEQ ID NO: 4049326 - RNA, 18 nt, Reston Ebola virus [REBOV]
auucugcuaguaauuccg

SEQ ID NO: 4049327 - RNA, 14 nt, Reston Ebola virus [REBOV]
auugauaagaauac

SEQ ID NO: 4049328 - RNA, 14 nt, Reston Ebola virus [REBOV]
auugcauugagcac

SEQ ID NO: 4049329 - RNA, 15 nt, Reston Ebola virus [REBOV]
auuuauuuaacaagg

SEQ ID NO: 4049330 - RNA, 21 nt, Reston Ebola virus [REBOV]
caaccaccauugccccaaguc

SEQ ID NO: 4049331 - RNA, 22 nt, Reston Ebola virus [REBOV]
cagccgaacaacacagcaucca

SEQ ID NO: 4049332 - RNA, 17 nt, Reston Ebola virus [REBOV]
caggacccgcaagagac

SEQ ID NO: 4049333 - RNA, 15 nt, Reston Ebola virus [REBOV]
cagucaaaacuaaac

SEQ ID NO: 4049334 - RNA, 15 nt, Reston Ebola virus [REBOV]
ccaggaaccagccca

SEQ ID NO: 4049335 - RNA, 15 nt, Reston Ebola virus [REBOV]
ccccgaugacccagg

SEQ ID NO: 4049336 - RNA, 16 nt, Reston Ebola virus [REBOV]
cgacaaaacaccgcua

SEQ ID NO: 4049337 - RNA, 19 nt, Reston Ebola virus [REBOV]
cggaccaagucagcccgga

SEQ ID NO: 4049338 - RNA, 14 nt, Reston Ebola virus [REBOV]
cgggcuacgucagc

SEQ ID NO: 4049339 - RNA, 20 nt, Reston Ebola virus [REBOV]
cuaaucagagguauaacaau

SEQ ID NO: 4049340 - RNA, 14 nt, Reston Ebola virus [REBOV]
cuaaucuauuuucg

SEQ ID NO: 4049341 - RNA, 20 nt, Reston Ebola virus [REBOV]
cucaggguuacucuaaggag

SEQ ID NO: 4049342 - RNA, 14 nt, Reston Ebola virus [REBOV]
cugagguauuuugu

SEQ ID NO: 4049343 - RNA, 15 nt, Reston Ebola virus [REBOV]
cuuuuugaaauggag

SEQ ID NO: 4049344 - RNA, 16 nt, Reston Ebola virus [REBOV]
gaacaacuccgcccag

SEQ ID NO: 4049345 - RNA, 15 nt, Reston Ebola virus [REBOV]
gaacagccgaacaac

SEQ ID NO: 4049346 - RNA, 16 nt, Reston Ebola virus [REBOV]
gagagacaaucacagg

SEQ ID NO: 4049347 - RNA, 19 nt, Reston Ebola virus [REBOV]
gagcccacagaccaagacc

SEQ ID NO: 4049348 - RNA, 14 nt, Reston Ebola virus [REBOV]
gagggggcagcagu

SEQ ID NO: 4049349 - RNA, 15 nt, Reston Ebola virus [REBOV]
gcagcaaaccaggaa

SEQ ID NO: 4049350 - RNA, 15 nt, Reston Ebola virus [REBOV]
gcgggccacaacaga

SEQ ID NO: 4049351 - RNA, 15 nt, Reston Ebola virus [REBOV]
ggacagcuguugaug

SEQ ID NO: 4049352 - RNA, 13 nt, Reston Ebola virus [REBOV]
ggccacaacagaa

SEQ ID NO: 4049353 - RNA, 23 nt, Reston Ebola virus [REBOV]
ggguuacucuaaggagaaauauu

SEQ ID NO: 4049354 - RNA, 20 nt, Reston Ebola virus [REBOV]
gguguaaugcauaaucagaa

SEQ ID NO: 4049355 - RNA, 15 nt, Reston Ebola virus [REBOV]
guaaucaugauuuua

SEQ ID NO: 4049356 - RNA, 20 nt, Reston Ebola virus [REBOV]
guauauaaccaaucuuuucc

SEQ ID NO: 4049357 - RNA, 18 nt, Reston Ebola virus [REBOV]
uaacacaucauaacuuua

SEQ ID NO: 4049358 - RNA, 21 nt, Reston Ebola virus [REBOV]
uaacauagacugaaaaugcua

SEQ ID NO: 4049359 - RNA, 21 nt, Reston Ebola virus [REBOV]
uaagaagagauuggaguaaaa

SEQ ID NO: 4049360 - RNA, 14 nt, Reston Ebola virus [REBOV]
uaagaucaaaugca

SEQ ID NO: 4049361 - RNA, 23 nt, Reston Ebola virus [REBOV]
uaaucuaaggccauuaagaguuu

SEQ ID NO: 4049362 - RNA, 18 nt, Reston Ebola virus [REBOV]
uaaucuauggacagguug

SEQ ID NO: 4049363 - RNA, 14 nt, Reston Ebola virus [REBOV]
uacuauuggacagc

SEQ ID NO: 4049364 - RNA, 17 nt, Reston Ebola virus [REBOV]
uagaguauacucaaaau

SEQ ID NO: 4049365 - RNA, 23 nt, Reston Ebola virus [REBOV]
uaguuaagaucaaaugcaaacau

SEQ ID NO: 4049366 - RNA, 13 nt, Reston Ebola virus [REBOV]
uauuuaacaaggc

SEQ ID NO: 4049367 - RNA, 16 nt, Reston Ebola virus [REBOV]
ugagucccaccaggaa

SEQ ID NO: 4049368 - RNA, 21 nt, Reston Ebola virus [REBOV]
ugaucuuaaucuauggacagg

SEQ ID NO: 4049369 - RNA, 12 nt, Reston Ebola virus [REBOV]
ugcagcagaagg

SEQ ID NO: 4049370 - RNA, 17 nt, Reston Ebola virus [REBOV]
ugcuaauagguuuguau

SEQ ID NO: 4049371 - RNA, 13 nt, Reston Ebola virus [REBOV]
ugcuugauuuaca

SEQ ID NO: 4049372 - RNA, 17 nt, Reston Ebola virus [REBOV]
uugugggucuuaucuag

SEQ ID NO: 4049373 - RNA, 22 nt, Reston Ebola virus [REBOV]
auucacugagucccaccaggaa

SEQ ID NO: 4049374 - RNA, 19 nt, Reston Ebola virus [REBOV]
auugauuuucuucuucaac

SEQ ID NO: 4049375 - RNA, 14 nt, Reston Ebola virus [REBOV]
caauagacuaaaaa

SEQ ID NO: 4049376 - RNA, 18 nt, Reston Ebola virus [REBOV]
caaugacucguuaacaau

SEQ ID NO: 4049377 - RNA, 16 nt, Reston Ebola virus [REBOV]
caccauugccccaagu

SEQ ID NO: 4049378 - RNA, 14 nt, Reston Ebola virus [REBOV]
cagagcccacagac

SEQ ID NO: 4049379 - RNA, 13 nt, Reston Ebola virus [REBOV]
cagcacccacaac

SEQ ID NO: 4049380 - RNA, 20 nt, Reston Ebola virus [REBOV]
cagcagcaaaccaggaacca

SEQ ID NO: 4049381 - RNA, 15 nt, Reston Ebola virus [REBOV]
cagccggaccaaguc

SEQ ID NO: 4049382 - RNA, 14 nt, Reston Ebola virus [REBOV]
caggaaccagccca

SEQ ID NO: 4049383 - RNA, 16 nt, Reston Ebola virus [REBOV]
caggacccgcaagaga

SEQ ID NO: 4049384 - RNA, 14 nt, Reston Ebola virus [REBOV]
caguuaaguaacau

SEQ ID NO: 4049385 - RNA, 17 nt, Reston Ebola virus [REBOV]
cauagacugaaaaugcu

SEQ ID NO: 4049386 - RNA, 19 nt, Reston Ebola virus [REBOV]
cauccccgaugacccagga

SEQ ID NO: 4049387 - RNA, 21 nt, Reston Ebola virus [REBOV]
caugauuuuaugauaauucuu

SEQ ID NO: 4049388 - RNA, 17 nt, Reston Ebola virus [REBOV]
ccagagcccacagacca

SEQ ID NO: 4049389 - RNA, 19 nt, Reston Ebola virus [REBOV]
ccagcccaggaagcgcagc

SEQ ID NO: 4049390 - RNA, 15 nt, Reston Ebola virus [REBOV]
cccacagaccaagac

SEQ ID NO: 4049391 - RNA, 14 nt, Reston Ebola virus [REBOV]
cccaucggcaagca

SEQ ID NO: 4049392 - RNA, 19 nt, Reston Ebola virus [REBOV]
ccccgaugacccaggaccc

SEQ ID NO: 4049393 - RNA, 18 nt, Reston Ebola virus [REBOV]
ccugcagcagaaggcauc

SEQ ID NO: 4049394 - RNA, 14 nt, Reston Ebola virus [REBOV]
cgaugacccaggac

SEQ ID NO: 4049395 - RNA, 20 nt, Reston Ebola virus [REBOV]
cgcaagagacggccaacagc

SEQ ID NO: 4049396 - RNA, 14 nt, Reston Ebola virus [REBOV]
cggccaacagcagc

SEQ ID NO: 4049397 - RNA, 20 nt, Reston Ebola virus [REBOV]
cgggccacaacagaacugag

SEQ ID NO: 4049398 - RNA, 16 nt, Reston Ebola virus [REBOV]
cuccgcccagagccca

SEQ ID NO: 4049399 - RNA, 20 nt, Reston Ebola virus [REBOV]
cuccgcccagagcccacaga

SEQ ID NO: 4049400 - RNA, 20 nt, Reston Ebola virus [REBOV]
cuugaguaauaaucauuucu

SEQ ID NO: 4049401 - RNA, 19 nt, Reston Ebola virus [REBOV]
gaacccaaugacaaccacc

SEQ ID NO: 4049402 - RNA, 16 nt, Reston Ebola virus [REBOV]
gagagagaaaaaucuc

SEQ ID NO: 4049403 - RNA, 20 nt, Reston Ebola virus [REBOV]
gaucuuuacuauuggacagc

SEQ ID NO: 4049404 - RNA, 14 nt, Reston Ebola virus [REBOV]
gcuaaauacacuua

SEQ ID NO: 4049405 - RNA, 15 nt, Reston Ebola virus [REBOV]
ggucuuuuugaaaug

SEQ ID NO: 4049406 - RNA, 22 nt, Reston Ebola virus [REBOV]
guaagguagcugauucacugag

SEQ ID NO: 4049407 - RNA, 20 nt, Reston Ebola virus [REBOV]
guaauauacauauacacuua

SEQ ID NO: 4049408 - RNA, 17 nt, Reston Ebola virus [REBOV]
guacaugaaugagaauu

SEQ ID NO: 4049409 - RNA, 17 nt, Reston Ebola virus [REBOV]
guggucuuuuugaaaug

SEQ ID NO: 4049410 - RNA, 21 nt, Reston Ebola virus [REBOV]
uaaaaguauaaaauaaauuua

SEQ ID NO: 4049411 - RNA, 13 nt, Reston Ebola virus [REBOV]
uaaauaauacuuu

SEQ ID NO: 4049412 - RNA, 15 nt, Reston Ebola virus [REBOV]
uaagaauacacuuua

SEQ ID NO: 4049413 - RNA, 22 nt, Reston Ebola virus [REBOV]
uaaggaguuuuuuaaucuaauu

SEQ ID NO: 4049414 - RNA, 17 nt, Reston Ebola virus [REBOV]
uaauccuaguauuuauu

SEQ ID NO: 4049415 - RNA, 19 nt, Reston Ebola virus [REBOV]
uaauguaaauauaacaagu

SEQ ID NO: 4049416 - RNA, 14 nt, Reston Ebola virus [REBOV]
uacacuuaagacuu

SEQ ID NO: 4049417 - RNA, 17 nt, Reston Ebola virus [REBOV]
uacauguguauauaacc

SEQ ID NO: 4049418 - RNA, 22 nt, Reston Ebola virus [REBOV]
uacauugaggguguaaugcaua

SEQ ID NO: 4049419 - RNA, 18 nt, Reston Ebola virus [REBOV]
uagacuaaaaaucugauu

SEQ ID NO: 4049420 - RNA, 15 nt, Reston Ebola virus [REBOV]
uagcaaucagaaauu

SEQ ID NO: 4049421 - RNA, 13 nt, Reston Ebola virus [REBOV]
uauuaguaauuga

SEQ ID NO: 4049422 - RNA, 13 nt, Reston Ebola virus [REBOV]
uauuuuaauaaca

SEQ ID NO: 4049423 - RNA, 19 nt, Reston Ebola virus [REBOV]
ucuauccaagauguggcuc

SEQ ID NO: 4049424 - RNA, 14 nt, Reston Ebola virus [REBOV]
ucugauuguggauu

SEQ ID NO: 4049425 - RNA, 12 nt, Reston Ebola virus [REBOV]
ucugcuucuuug

SEQ ID NO: 4049426 - RNA, 17 nt, Reston Ebola virus [REBOV]
ugacuugaauguaauaa

SEQ ID NO: 4049427 - RNA, 17 nt, Reston Ebola virus [REBOV]
uggauccgauccaaggc

SEQ ID NO: 4049428 - RNA, 18 nt, Reston Ebola virus [REBOV]
ugucaaugcuauacuguu

SEQ ID NO: 4049429 - RNA, 21 nt, Reston Ebola virus [REBOV]
uuaagcgcacacaaaaacauu

SEQ ID NO: 4049430 - RNA, 22 nt, Reston Ebola virus [REBOV]
uuaagcgcacacaaaaacauua

SEQ ID NO: 4049431 - RNA, 18 nt, Reston Ebola virus [REBOV]
uuacgccuagauaacuaa

SEQ ID NO: 4049432 - RNA, 20 nt, Reston Ebola virus [REBOV]
uucaacccagucaaaacuaa

SEQ ID NO: 4049433 - RNA, 16 nt, Reston Ebola virus [REBOV]
cuaaucuauuuucgcu

SEQ ID NO: 4049434 - RNA, 18 nt, Reston Ebola virus [REBOV]
cuauuauucugcuaguaa

SEQ ID NO: 4049435 - RNA, 15 nt, Reston Ebola virus [REBOV]
cuccgcccagagccc

SEQ ID NO: 4049436 - RNA, 21 nt, Reston Ebola virus [REBOV]
cucguuaacaaucgcuaguaa

SEQ ID NO: 4049437 - RNA, 19 nt, Reston Ebola virus [REBOV]
cugucgaauccuaggacca

SEQ ID NO: 4049438 - RNA, 22 nt, Reston Ebola virus [REBOV]
cugucgaauccuaggaccaucu

SEQ ID NO: 4049439 - RNA, 15 nt, Reston Ebola virus [REBOV]
cuuugcuuauauugg

SEQ ID NO: 4049440 - RNA, 15 nt, Reston Ebola virus [REBOV]
cuuugcuugauuuac

SEQ ID NO: 4049441 - RNA, 14 nt, Reston Ebola virus [REBOV]
gaaccagcccagga

SEQ ID NO: 4049442 - RNA, 16 nt, Reston Ebola virus [REBOV]
gaaccagcccaggaag

SEQ ID NO: 4049443 - RNA, 18 nt, Reston Ebola virus [REBOV]
gacccaggacccgcaaga

SEQ ID NO: 4049444 - RNA, 14 nt, Reston Ebola virus [REBOV]
gagacaauuuacca

SEQ ID NO: 4049445 - RNA, 13 nt, Reston Ebola virus [REBOV]
gaugauaauauau

SEQ ID NO: 4049446 - RNA, 13 nt, Reston Ebola virus [REBOV]
gccagcacccaca

SEQ ID NO: 4049447 - RNA, 17 nt, Reston Ebola virus [REBOV]
gcucuauagucuauucu

SEQ ID NO: 4049448 - RNA, 19 nt, Reston Ebola virus [REBOV]
guaagauuuuguguugauu

SEQ ID NO: 4049449 - RNA, 13 nt, Reston Ebola virus [REBOV]
gucuuuuugaaau

SEQ ID NO: 4049450 - RNA, 12 nt, Reston Ebola virus [REBOV]
guuauuacuuau

SEQ ID NO: 4049451 - RNA, 20 nt, Reston Ebola virus [REBOV]
uaagaucaaaugcaaacauu

SEQ ID NO: 4049452 - RNA, 21 nt, Reston Ebola virus [REBOV]
uaagauuuuguguugauuuau

SEQ ID NO: 4049453 - RNA, 22 nt, Reston Ebola virus [REBOV]
uauauaaccaaucuuuuccuau

SEQ ID NO: 4049454 - RNA, 18 nt, Reston Ebola virus [REBOV]
uaucugcaguaaccagaa

SEQ ID NO: 4049455 - RNA, 14 nt, Reston Ebola virus [REBOV]
uauucuaaucagag

SEQ ID NO: 4049456 - RNA, 17 nt, Reston Ebola virus [REBOV]
ucaaagugauuaaauga

SEQ ID NO: 4049457 - RNA, 10 nt, Reston Ebola virus [REBOV]
ucacagguuu

SEQ ID NO: 4049458 - RNA, 20 nt, Reston Ebola virus [REBOV]
ucauauuuugaucaaguaau

SEQ ID NO: 4049459 - RNA, 15 nt, Reston Ebola virus [REBOV]
uccauuuaguaauaa

SEQ ID NO: 4049460 - RNA, 18 nt, Reston Ebola virus [REBOV]
uccccgaugacccaggac

SEQ ID NO: 4049461 - RNA, 15 nt, Reston Ebola virus [REBOV]
ucuauggacagguug

SEQ ID NO: 4049462 - RNA, 12 nt, Reston Ebola virus [REBOV]
ucuauucuaauc

SEQ ID NO: 4049463 - RNA, 23 nt, Reston Ebola virus [REBOV]
ucuucaauuauuucugcgggcca

SEQ ID NO: 4049464 - RNA, 16 nt, Reston Ebola virus [REBOV]
ugaauugugcagauuu

SEQ ID NO: 4049465 - RNA, 11 nt, Reston Ebola virus [REBOV]
ugacccaggac

SEQ ID NO: 4049466 - RNA, 14 nt, Reston Ebola virus [REBOV]
ugacgcuguugaug

SEQ ID NO: 4049467 - RNA, 20 nt, Reston Ebola virus [REBOV]
ugauuguguguauuaaauua

SEQ ID NO: 4049468 - RNA, 16 nt, Reston Ebola virus [REBOV]
ugcaauugucaagagu

SEQ ID NO: 4049469 - RNA, 18 nt, Reston Ebola virus [REBOV]
ugcuucuuugcuugauuu

SEQ ID NO: 4049470 - RNA, 15 nt, Reston Ebola virus [REBOV]
uuaagaucaaaugca

SEQ ID NO: 4049471 - RNA, 18 nt, Reston Ebola virus [REBOV]
uuauuuuuaaaauuuacu

SEQ ID NO: 4049472 - RNA, 19 nt, Reston Ebola virus [REBOV]
uucaccgcgaacccaauga

SEQ ID NO: 4049473 - RNA, 19 nt, Reston Ebola virus [REBOV]
uugaaauggagauuaucag

SEQ ID NO: 4049474 - RNA, 13 nt, Reston Ebola virus [REBOV]
uuguugaguuaac

SEQ ID NO: 4049475 - RNA, 13 nt, Reston Ebola virus [REBOV]
uuuuaaucuaauu

SEQ ID NO: 4049476 - RNA, 13 nt, Rubella virus
aaugacagcugcg

SEQ ID NO: 4049477 - RNA, 14 nt, Rubella virus
acacccccccgccc

SEQ ID NO: 4049478 - RNA, 16 nt, Rubella virus
acagagaccaggaccg

SEQ ID NO: 4049479 - RNA, 13 nt, Rubella virus
accagggcacuca

SEQ ID NO: 4049480 - RNA, 19 nt, Rubella virus
acccccugcugcgcacugc

SEQ ID NO: 4049481 - RNA, 19 nt, Rubella virus
acccgcacuaggccacuag

SEQ ID NO: 4049482 - RNA, 13 nt, Rubella virus
accgacugcugcg

SEQ ID NO: 4049483 - RNA, 17 nt, Rubella virus
accgaggcacccaccga

SEQ ID NO: 4049484 - RNA, 16 nt, Rubella virus
accgcccaguacccgc

SEQ ID NO: 4049485 - RNA, 21 nt, Rubella virus
accgggcgugggggcucugcc

SEQ ID NO: 4049486 - RNA, 16 nt, Rubella virus
accuccuacgcugccg

SEQ ID NO: 4049487 - RNA, 17 nt, Rubella virus
accuccuacgcugccgc

SEQ ID NO: 4049488 - RNA, 21 nt, Rubella virus
accuccuacgcugccgcagcc

SEQ ID NO: 4049489 - RNA, 22 nt, Rubella virus
accugcauuucaccaaccuggg

SEQ ID NO: 4049490 - RNA, 18 nt, Rubella virus
acgccuacuccucuggcg

SEQ ID NO: 4049491 - RNA, 14 nt, Rubella virus
acgcugccgcagcc

SEQ ID NO: 4049492 - RNA, 22 nt, Rubella virus
acucgacgaggacggccgcugg

SEQ ID NO: 4049493 - RNA, 15 nt, Rubella virus
acuucaacccuggcg

SEQ ID NO: 4049494 - RNA, 15 nt, Rubella virus
acuugcuccccagcc

SEQ ID NO: 4049495 - RNA, 11 nt, Rubella virus
agagcgccccc

SEQ ID NO: 4049496 - RNA, 15 nt, Rubella virus
agccaucgcgggcgc

SEQ ID NO: 4049497 - RNA, 18 nt, Rubella virus
agcccgaauugccacggc

SEQ ID NO: 4049498 - RNA, 18 nt, Rubella virus
agccucggcccucuggcu

SEQ ID NO: 4049499 - RNA, 15 nt, Rubella virus
agcgacgugcugccc

SEQ ID NO: 4049500 - RNA, 13 nt, Rubella virus
agcgcccccggcu

SEQ ID NO: 4049501 - RNA, 16 nt, Rubella virus
agcucacucugggcgc

SEQ ID NO: 4049502 - RNA, 22 nt, Rubella virus
aggccacuagauccccgcaccu

SEQ ID NO: 4049503 - RNA, 21 nt, Rubella virus
aggcuuucaccuaccucugca

SEQ ID NO: 4049504 - RNA, 15 nt, Rubella virus
auccacgcccacacc

SEQ ID NO: 4049505 - RNA, 17 nt, Rubella virus
augcgguggggccuucc

SEQ ID NO: 4049506 - RNA, 16 nt, Rubella virus
caacgucaccacugaa

SEQ ID NO: 4049507 - RNA, 16 nt, Rubella virus
caacucuccguugccg

SEQ ID NO: 4049508 - RNA, 18 nt, Rubella virus
caauggcgaggaccucgg

SEQ ID NO: 4049509 - RNA, 16 nt, Rubella virus
cacaccacugcugugu

SEQ ID NO: 4049510 - RNA, 14 nt, Rubella virus
caccaaccugggca

SEQ ID NO: 4049511 - RNA, 16 nt, Rubella virus
caccgaggcacccacc

SEQ ID NO: 4049512 - RNA, 21 nt, Rubella virus
caccgcccaguacccgccuac

SEQ ID NO: 4049513 - RNA, 18 nt, Rubella virus
caccgcgcgcgccgggcu

SEQ ID NO: 4049514 - RNA, 14 nt, Rubella virus
caccuaccucugca

SEQ ID NO: 4049515 - RNA, 22 nt, Rubella virus
cacgaccgccgccacccccgcc

SEQ ID NO: 4049516 - RNA, 20 nt, Rubella virus
cacuagauccccgcaccugu

SEQ ID NO: 4049517 - RNA, 21 nt, Rubella virus
cacucgacgaggacggccgcu

SEQ ID NO: 4049518 - RNA, 17 nt, Rubella virus
cagcauuacggccacca

SEQ ID NO: 4049519 - RNA, 13 nt, Rubella virus
cagcgacgcggcc

SEQ ID NO: 4049520 - RNA, 19 nt, Rubella virus
caggcgcccgcugccccga

SEQ ID NO: 4049521 - RNA, 12 nt, Rubella virus
caggucccgccc

SEQ ID NO: 4049522 - RNA, 22 nt, Rubella virus
caguucgcccgguggcccugcc

SEQ ID NO: 4049523 - RNA, 17 nt, Rubella virus
caucgcgggcgccgcca

SEQ ID NO: 4049524 - RNA, 20 nt, Rubella virus
ccaccaccaucagcugccgu

SEQ ID NO: 4049525 - RNA, 16 nt, Rubella virus
ccacggcgcugacacc

SEQ ID NO: 4049526 - RNA, 20 nt, Rubella virus
ccagccucggcccucuggcu

SEQ ID NO: 4049527 - RNA, 16 nt, Rubella virus
cccaguacccgccuac

SEQ ID NO: 4049528 - RNA, 16 nt, Rubella virus
ccccaggccuuccuug

SEQ ID NO: 4049529 - RNA, 13 nt, Rubella virus
cccccgccacugc

SEQ ID NO: 4049530 - RNA, 18 nt, Rubella virus
cccccugcugcgcacugc

SEQ ID NO: 4049531 - RNA, 13 nt, Rubella virus
ccccgccacugcg

SEQ ID NO: 4049532 - RNA, 14 nt, Rubella virus
ccccgcgcuggugg

SEQ ID NO: 4049533 - RNA, 14 nt, Rubella virus
cccgcacuaggcca

SEQ ID NO: 4049534 - RNA, 18 nt, Rubella virus
cccuaccaagucagcugc

SEQ ID NO: 4049535 - RNA, 21 nt, Rubella virus
cccugcgcucauguacaaccc

SEQ ID NO: 4049536 - RNA, 14 nt, Rubella virus
ccgcacuaggccac

SEQ ID NO: 4049537 - RNA, 17 nt, Rubella virus
ccgccacaacagccuca

SEQ ID NO: 4049538 - RNA, 18 nt, Rubella virus
ccgggcgugggggcucug

SEQ ID NO: 4049539 - RNA, 16 nt, Rubella virus
ccuaccucugcacugc

SEQ ID NO: 4049540 - RNA, 21 nt, Rubella virus
ccuccccgguuugccaacgcc

SEQ ID NO: 4049541 - RNA, 14 nt, Rubella virus
ccugagcgacuggc

SEQ ID NO: 4049542 - RNA, 23 nt, Rubella virus
ccugcuggggcuuccccaccgac

SEQ ID NO: 4049543 - RNA, 19 nt, Rubella virus
ccuggcauccaccgggccc

SEQ ID NO: 4049544 - RNA, 23 nt, Rubella virus
ccuggguacccgcagccccuugc

SEQ ID NO: 4049545 - RNA, 17 nt, Rubella virus
ccuggucgacgccgacg

SEQ ID NO: 4049546 - RNA, 15 nt, Rubella virus
ccugugcgcacgggc

SEQ ID NO: 4049547 - RNA, 16 nt, Rubella virus
cgacccccugcugcgc

SEQ ID NO: 4049548 - RNA, 22 nt, Rubella virus
cgacccccugcugcgcacugcc

SEQ ID NO: 4049549 - RNA, 23 nt, Rubella virus
cgacggcgacagcgccccgcuuc

SEQ ID NO: 4049550 - RNA, 22 nt, Rubella virus
cgacuugcuccccagccucggc

SEQ ID NO: 4049551 - RNA, 13 nt, Rubella virus
aaacccgcacuag

SEQ ID NO: 4049552 - RNA, 23 nt, Rubella virus
aaugcccgaguggauccacgccc

SEQ ID NO: 4049553 - RNA, 13 nt, Rubella virus
aauugccacggcc

SEQ ID NO: 4049554 - RNA, 16 nt, Rubella virus
accaccaucagcugcc

SEQ ID NO: 4049555 - RNA, 17 nt, Rubella virus
accaccaucagcugccg

SEQ ID NO: 4049556 - RNA, 17 nt, Rubella virus
accagcgaccccuggca

SEQ ID NO: 4049557 - RNA, 13 nt, Rubella virus
accaucagcugcc

SEQ ID NO: 4049558 - RNA, 18 nt, Rubella virus
acccaccgaggccugcgu

SEQ ID NO: 4049559 - RNA, 13 nt, Rubella virus
acccccgcgcugg

SEQ ID NO: 4049560 - RNA, 19 nt, Rubella virus
acccgguuuggcugcgcua

SEQ ID NO: 4049561 - RNA, 14 nt, Rubella virus
accgcccgccccga

SEQ ID NO: 4049562 - RNA, 18 nt, Rubella virus
accggcaaucagcagucc

SEQ ID NO: 4049563 - RNA, 22 nt, Rubella virus
acgcgcuggcaccgacugcugc

SEQ ID NO: 4049564 - RNA, 14 nt, Rubella virus
acgcggccugcugg

SEQ ID NO: 4049565 - RNA, 16 nt, Rubella virus
acggccaccaccacca

SEQ ID NO: 4049566 - RNA, 22 nt, Rubella virus
acggccgcugggacccugcgcu

SEQ ID NO: 4049567 - RNA, 23 nt, Rubella virus
acuccggagggccccgccgccgc

SEQ ID NO: 4049568 - RNA, 18 nt, Rubella virus
acugcaccggggugcgcc

SEQ ID NO: 4049569 - RNA, 14 nt, Rubella virus
acugccccuggacc

SEQ ID NO: 4049570 - RNA, 21 nt, Rubella virus
acugcgccggcccccugccac

SEQ ID NO: 4049571 - RNA, 15 nt, Rubella virus
acuggcaccagggca

SEQ ID NO: 4049572 - RNA, 21 nt, Rubella virus
acuugcuccccagccucggcc

SEQ ID NO: 4049573 - RNA, 20 nt, Rubella virus
agagcgcccccggcugcgcc

SEQ ID NO: 4049574 - RNA, 20 nt, Rubella virus
agccccccugugcgcacggg

SEQ ID NO: 4049575 - RNA, 22 nt, Rubella virus
agcgcccccggcugcgccuggu

SEQ ID NO: 4049576 - RNA, 17 nt, Rubella virus
agcuacguccagcaccc

SEQ ID NO: 4049577 - RNA, 15 nt, Rubella virus
agcucacucugggcg

SEQ ID NO: 4049578 - RNA, 23 nt, Rubella virus
agcuggccucuuacuucaacccu

SEQ ID NO: 4049579 - RNA, 17 nt, Rubella virus
aggcacccaccgaggcc

SEQ ID NO: 4049580 - RNA, 19 nt, Rubella virus
aggcacccaccgaggccug

SEQ ID NO: 4049581 - RNA, 16 nt, Rubella virus
aggccacuggagccug

SEQ ID NO: 4049582 - RNA, 16 nt, Rubella virus
agggcuugggggccug

SEQ ID NO: 4049583 - RNA, 23 nt, Rubella virus
aguucgcccgguggcccugccac

SEQ ID NO: 4049584 - RNA, 14 nt, Rubella virus
auacgcgcuggacc

SEQ ID NO: 4049585 - RNA, 15 nt, Rubella virus
auacgcgcuggaccg

SEQ ID NO: 4049586 - RNA, 18 nt, Rubella virus
auuucaccaaccugggca

SEQ ID NO: 4049587 - RNA, 15 nt, Rubella virus
caacccuggcggcag

SEQ ID NO: 4049588 - RNA, 17 nt, Rubella virus
caacccuugcgggcccg

SEQ ID NO: 4049589 - RNA, 19 nt, Rubella virus
cacagcgacgcggccugcu

SEQ ID NO: 4049590 - RNA, 22 nt, Rubella virus
caccgaggcacccaccgaggcc

SEQ ID NO: 4049591 - RNA, 13 nt, Rubella virus
caccuucugggcu

SEQ ID NO: 4049592 - RNA, 20 nt, Rubella virus
cacggccccgauugggccuc

SEQ ID NO: 4049593 - RNA, 21 nt, Rubella virus
cacucgcuggcuuacucgcuu

SEQ ID NO: 4049594 - RNA, 15 nt, Rubella virus
cagcagucccggugg

SEQ ID NO: 4049595 - RNA, 14 nt, Rubella virus
cagccccccugugc

SEQ ID NO: 4049596 - RNA, 20 nt, Rubella virus
cagccccuugcgcgcgcauc

SEQ ID NO: 4049597 - RNA, 15 nt, Rubella virus
cagcgacgugcugcc

SEQ ID NO: 4049598 - RNA, 20 nt, Rubella virus
caggccuuccuugccgggcu

SEQ ID NO: 4049599 - RNA, 15 nt, Rubella virus
caggcgcccgcugcc

SEQ ID NO: 4049600 - RNA, 13 nt, Rubella virus
cagggccccgccc

SEQ ID NO: 4049601 - RNA, 23 nt, Rubella virus
cagggguacaacccccccgccua

SEQ ID NO: 4049602 - RNA, 13 nt, Rubella virus
caguacccgccua

SEQ ID NO: 4049603 - RNA, 14 nt, Rubella virus
cagugcgcggccuc

SEQ ID NO: 4049604 - RNA, 19 nt, Rubella virus
cauccaggcgcccgcugcc

SEQ ID NO: 4049605 - RNA, 22 nt, Rubella virus
cauuugcgagauccccacugau

SEQ ID NO: 4049606 - RNA, 11 nt, Rubella virus
ccacaccaccg

SEQ ID NO: 4049607 - RNA, 14 nt, Rubella virus
ccaccaucagcugc

SEQ ID NO: 4049608 - RNA, 23 nt, Rubella virus
ccacgcccacaccaccagcgacc

SEQ ID NO: 4049609 - RNA, 11 nt, Rubella virus
ccagggccccg

SEQ ID NO: 4049610 - RNA, 22 nt, Rubella virus
ccauccuuggcgcauccgcuuc

SEQ ID NO: 4049611 - RNA, 23 nt, Rubella virus
cccagccucggcccucuggcucg

SEQ ID NO: 4049612 - RNA, 17 nt, Rubella virus
ccccgaagacggcugga

SEQ ID NO: 4049613 - RNA, 14 nt, Rubella virus
ccccggcugcgccu

SEQ ID NO: 4049614 - RNA, 19 nt, Rubella virus
cccgcaccuguugcuguau

SEQ ID NO: 4049615 - RNA, 19 nt, Rubella virus
cccgcacuaggccacuaga

SEQ ID NO: 4049616 - RNA, 15 nt, Rubella virus
cccgccacugcgccg

SEQ ID NO: 4049617 - RNA, 19 nt, Rubella virus
cccgcgccccgagcugggg

SEQ ID NO: 4049618 - RNA, 15 nt, Rubella virus
cccggcagaccuggg

SEQ ID NO: 4049619 - RNA, 14 nt, Rubella virus
cccggggaccuggu

SEQ ID NO: 4049620 - RNA, 16 nt, Rubella virus
cccguucugcaacacg

SEQ ID NO: 4049621 - RNA, 19 nt, Rubella virus
cccucuggcucgccacagc

SEQ ID NO: 4049622 - RNA, 14 nt, Rubella virus
ccgaccgccgcccg

SEQ ID NO: 4049623 - RNA, 19 nt, Rubella virus
ccgccgcggcgccgccgcc

SEQ ID NO: 4049624 - RNA, 18 nt, Rubella virus
ccgcgccugucgccgccg

SEQ ID NO: 4049625 - RNA, 17 nt, Rubella virus
ccgcgcgcgccgggcuc

SEQ ID NO: 4049626 - RNA, 16 nt, Rubella virus
ccgcgucggcggcacg

SEQ ID NO: 4049627 - RNA, 19 nt, Rubella virus
ccgcugggacccugcgcuc

SEQ ID NO: 4049628 - RNA, 19 nt, Rubella virus
ccggagggccccgccgccg

SEQ ID NO: 4049629 - RNA, 16 nt, Rubella virus
ccggcagaccugggcg

SEQ ID NO: 4049630 - RNA, 14 nt, Rubella virus
ccggcgugguguau

SEQ ID NO: 4049631 - RNA, 13 nt, Rubella virus
ccgguggggccuc

SEQ ID NO: 4049632 - RNA, 19 nt, Rubella virus
ccguggcgcguggccugcg

SEQ ID NO: 4049633 - RNA, 20 nt, Rubella virus
ccucaaugacagcugcggcg

SEQ ID NO: 4049634 - RNA, 15 nt, Rubella virus
ccucgaggccacugg

SEQ ID NO: 4049635 - RNA, 14 nt, Rubella virus
ccucucaccaccgc

SEQ ID NO: 4049636 - RNA, 19 nt, Rubella virus
ccugauauuuauggugugc

SEQ ID NO: 4049637 - RNA, 22 nt, Rubella virus
ccugcgugaccucguggcuuug

SEQ ID NO: 4049638 - RNA, 21 nt, Rubella virus
ccugcugcgcacugccccugg

SEQ ID NO: 4049639 - RNA, 12 nt, Rubella virus
ccuggcggcagc

SEQ ID NO: 4049640 - RNA, 13 nt, Rubella virus
ccugucgccgccg

SEQ ID NO: 4049641 - RNA, 22 nt, Rubella virus
ccugucgccgccgcggcgccgc

SEQ ID NO: 4049642 - RNA, 13 nt, Rubella virus
ccuugccgggcuc

SEQ ID NO: 4049643 - RNA, 14 nt, Rubella virus
cgacgcggccugcu

SEQ ID NO: 4049644 - RNA, 13 nt, Rubella virus
cgacgugcugccc

SEQ ID NO: 4049645 - RNA, 12 nt, Rubella virus
cgacuugcuccc

SEQ ID NO: 4049646 - RNA, 17 nt, Rubella virus
cgcacguuagcgccacc

SEQ ID NO: 4049647 - RNA, 14 nt, Rubella virus
cgcacuaggccacu

SEQ ID NO: 4049648 - RNA, 12 nt, Rubella virus
cgcagccccccu

SEQ ID NO: 4049649 - RNA, 13 nt, Rubella virus
cgcagggacuggu

SEQ ID NO: 4049650 - RNA, 23 nt, Rubella virus
cgcagggacugguccagggcccc

SEQ ID NO: 4049651 - RNA, 20 nt, Rubella virus
cgcauccgcuucggugcccc

SEQ ID NO: 4049652 - RNA, 16 nt, Rubella virus
cgccacucaagcaccu

SEQ ID NO: 4049653 - RNA, 15 nt, Rubella virus
cgcccccggcugcgc

SEQ ID NO: 4049654 - RNA, 20 nt, Rubella virus
cgcccgccucuccacgaccc

SEQ ID NO: 4049655 - RNA, 21 nt, Rubella virus
aagcaccuguccccgugcgcc

SEQ ID NO: 4049656 - RNA, 12 nt, Rubella virus
acacccccccgc

SEQ ID NO: 4049657 - RNA, 14 nt, Rubella virus
acacgccgcacgga

SEQ ID NO: 4049658 - RNA, 20 nt, Rubella virus
accaccagcgaccccuggca

SEQ ID NO: 4049659 - RNA, 16 nt, Rubella virus
acccccugcugcgcac

SEQ ID NO: 4049660 - RNA, 22 nt, Rubella virus
accccuggcauccaccgggccc

SEQ ID NO: 4049661 - RNA, 14 nt, Rubella virus
acccuugcgggccc

SEQ ID NO: 4049662 - RNA, 20 nt, Rubella virus
acccuugcgggcccgagccg

SEQ ID NO: 4049663 - RNA, 20 nt, Rubella virus
accuaccucugcacugcacc

SEQ ID NO: 4049664 - RNA, 20 nt, Rubella virus
accucgaggccacuggagcc

SEQ ID NO: 4049665 - RNA, 16 nt, Rubella virus
acgacccccugcugcg

SEQ ID NO: 4049666 - RNA, 19 nt, Rubella virus
acgaccgaccgccgcccgc

SEQ ID NO: 4049667 - RNA, 14 nt, Rubella virus
acgaccgccgccac

SEQ ID NO: 4049668 - RNA, 20 nt, Rubella virus
acgaccgccgccacccccgc

SEQ ID NO: 4049669 - RNA, 18 nt, Rubella virus
acgcccucgcggccuucg

SEQ ID NO: 4049670 - RNA, 17 nt, Rubella virus
acgccgacgacccccug

SEQ ID NO: 4049671 - RNA, 19 nt, Rubella virus
acgccucucaccaccgcgg

SEQ ID NO: 4049672 - RNA, 20 nt, Rubella virus
acgccugucauaggcucuca

SEQ ID NO: 4049673 - RNA, 20 nt, Rubella virus
acuagauccccgcaccuguu

SEQ ID NO: 4049674 - RNA, 12 nt, Rubella virus
agaccugggcgg

SEQ ID NO: 4049675 - RNA, 15 nt, Rubella virus
agcauuacggccacc

SEQ ID NO: 4049676 - RNA, 20 nt, Rubella virus
agcgccucgcuagugggccc

SEQ ID NO: 4049677 - RNA, 13 nt, Rubella virus
agcuggggccacc

SEQ ID NO: 4049678 - RNA, 17 nt, Rubella virus
aggcgcccgcugccccg

SEQ ID NO: 4049679 - RNA, 14 nt, Rubella virus
agggguacaacccc

SEQ ID NO: 4049680 - RNA, 20 nt, Rubella virus
aguacccgccuacccgguuu

SEQ ID NO: 4049681 - RNA, 15 nt, Rubella virus
agugggcugcugccc

SEQ ID NO: 4049682 - RNA, 15 nt, Rubella virus
aguucgucaccgccg

SEQ ID NO: 4049683 - RNA, 10 nt, Rubella virus
aucagcugcc

SEQ ID NO: 4049684 - RNA, 13 nt, Rubella virus
auccaccgggccc

SEQ ID NO: 4049685 - RNA, 14 nt, Rubella virus
augcaaaccgggcg

SEQ ID NO: 4049686 - RNA, 17 nt, Rubella virus
augcccgaguggaucca

SEQ ID NO: 4049687 - RNA, 15 nt, Rubella virus
augcgguggggccuu

SEQ ID NO: 4049688 - RNA, 14 nt, Rubella virus
auggcggcaccucc

SEQ ID NO: 4049689 - RNA, 13 nt, Rubella virus
auggugugccgcc

SEQ ID NO: 4049690 - RNA, 15 nt, Rubella virus
caaccugggcacccc

SEQ ID NO: 4049691 - RNA, 19 nt, Rubella virus
caaugugcgugugaccggg

SEQ ID NO: 4049692 - RNA, 14 nt, Rubella virus
cacacacaccacug

SEQ ID NO: 4049693 - RNA, 21 nt, Rubella virus
cacagcgacgcggccugcugg

SEQ ID NO: 4049694 - RNA, 20 nt, Rubella virus
cacauggacuucuggugugu

SEQ ID NO: 4049695 - RNA, 19 nt, Rubella virus
caccgaggcacccaccgag

SEQ ID NO: 4049696 - RNA, 15 nt, Rubella virus
caccgccgcccuccu

SEQ ID NO: 4049697 - RNA, 20 nt, Rubella virus
caccgcgcgcgccgggcucc

SEQ ID NO: 4049698 - RNA, 13 nt, Rubella virus
acaacccccccgc

SEQ ID NO: 4049699 - RNA, 15 nt, Rubella virus
acaaucaaccugccg

SEQ ID NO: 4049700 - RNA, 20 nt, Rubella virus
acacagcgacgcggccugcu

SEQ ID NO: 4049701 - RNA, 22 nt, Rubella virus
acacagcgacgcggccugcugg

SEQ ID NO: 4049702 - RNA, 15 nt, Rubella virus
accaagucagcugcg

SEQ ID NO: 4049703 - RNA, 16 nt, Rubella virus
accccgacgccucuca

SEQ ID NO: 4049704 - RNA, 16 nt, Rubella virus
acccgcacuaggccac

SEQ ID NO: 4049705 - RNA, 18 nt, Rubella virus
acccggcagaccugggcg

SEQ ID NO: 4049706 - RNA, 17 nt, Rubella virus
accgcgcgcgccgggcu

SEQ ID NO: 4049707 - RNA, 23 nt, Rubella virus
accgcgcgggucaucgaccccgc

SEQ ID NO: 4049708 - RNA, 13 nt, Rubella virus
accucggcgccgu

SEQ ID NO: 4049709 - RNA, 18 nt, Rubella virus
accugagcgacuggcacc

SEQ ID NO: 4049710 - RNA, 20 nt, Rubella virus
accugcauuucaccaaccug

SEQ ID NO: 4049711 - RNA, 20 nt, Rubella virus
acgccagcgacgugcugccc

SEQ ID NO: 4049712 - RNA, 15 nt, Rubella virus
acgcccacaccacca

SEQ ID NO: 4049713 - RNA, 15 nt, Rubella virus
acgcgcuggcaccga

SEQ ID NO: 4049714 - RNA, 22 nt, Rubella virus
acggucgccguuggcaccgcgc

SEQ ID NO: 4049715 - RNA, 18 nt, Rubella virus
acguuagcgccaccccgc

SEQ ID NO: 4049716 - RNA, 18 nt, Rubella virus
acuccacauacgcgcugg

SEQ ID NO: 4049717 - RNA, 19 nt, Rubella virus
acucgacgaggacggccgc

SEQ ID NO: 4049718 - RNA, 15 nt, Rubella virus
acugccccuggaccc

SEQ ID NO: 4049719 - RNA, 13 nt, Rubella virus
agacccgcucggc

SEQ ID NO: 4049720 - RNA, 21 nt, Rubella virus
agauccccgcaccuguugcug

SEQ ID NO: 4049721 - RNA, 19 nt, Rubella virus
agcagucccgguggggccu

SEQ ID NO: 4049722 - RNA, 21 nt, Rubella virus
agcgccucgcuagugggcccc

SEQ ID NO: 4049723 - RNA, 18 nt, Rubella virus
agcguguucgcccuugcu

SEQ ID NO: 4049724 - RNA, 14 nt, Rubella virus
aggcgagcgcaccu

SEQ ID NO: 4049725 - RNA, 18 nt, Rubella virus
agggcuugggggccuggg

SEQ ID NO: 4049726 - RNA, 18 nt, Rubella virus
auggcgaggaccucggcg

SEQ ID NO: 4049727 - RNA, 19 nt, Rubella virus
auuuauggugugccgccgc

SEQ ID NO: 4049728 - RNA, 20 nt, Rubella virus
caacccuugcgggcccgagc

SEQ ID NO: 4049729 - RNA, 18 nt, Rubella virus
caacgccauuccccugac

SEQ ID NO: 4049730 - RNA, 22 nt, Rubella virus
cacaccaccagcgaccccuggc

SEQ ID NO: 4049731 - RNA, 13 nt, Rubella virus
caccaccgcggcg

SEQ ID NO: 4049732 - RNA, 18 nt, Rubella virus
cacccaccgaggccugcg

SEQ ID NO: 4049733 - RNA, 14 nt, Rubella virus
caccgacugcugcg

SEQ ID NO: 4049734 - RNA, 16 nt, Rubella virus
caccuucugggcuguc

SEQ ID NO: 4049735 - RNA, 20 nt, Rubella virus
cacgacccugacaccgaggc

SEQ ID NO: 4049736 - RNA, 21 nt, Rubella virus
cacguuagcgccaccccgcaa

SEQ ID NO: 4049737 - RNA, 16 nt, Rubella virus
cacuagauccccgcac

SEQ ID NO: 4049738 - RNA, 22 nt, Rubella virus
cacugcaccggggugcgccacu

SEQ ID NO: 4049739 - RNA, 16 nt, Rubella virus
cagacuccggccccga

SEQ ID NO: 4049740 - RNA, 15 nt, Rubella virus
cagagcgcccccggc

SEQ ID NO: 4049741 - RNA, 15 nt, Rubella virus
cagcauuacggccac

SEQ ID NO: 4049742 - RNA, 17 nt, Rubella virus
cagcgacgcggccugcu

SEQ ID NO: 4049743 - RNA, 20 nt, Rubella virus
cagcgacgugcugcccggcc

SEQ ID NO: 4049744 - RNA, 16 nt, Rubella virus
cagcucacucugggcg

SEQ ID NO: 4049745 - RNA, 12 nt, Rubella virus
cagggccccgcc

SEQ ID NO: 4049746 - RNA, 14 nt, Rubella virus
cagugcgguacccc

SEQ ID NO: 4049747 - RNA, 16 nt, Rubella virus
cauccaccgggccccu

SEQ ID NO: 4049748 - RNA, 16 nt, Rubella virus
cauccaggcgcccgcu

SEQ ID NO: 4049749 - RNA, 20 nt, Rubella virus
cauccaggcgcccgcugccc

SEQ ID NO: 4049750 - RNA, 14 nt, Rubella virus
ccaaccugggcacc

SEQ ID NO: 4049751 - RNA, 11 nt, Rubella virus
ccacaccacca

SEQ ID NO: 4049752 - RNA, 19 nt, Rubella virus
ccacagcgaacgcgcuguc

SEQ ID NO: 4049753 - RNA, 12 nt, Rubella virus
ccaccgggcccc

SEQ ID NO: 4049754 - RNA, 15 nt, Rubella virus
ccacgaccgccgcca

SEQ ID NO: 4049755 - RNA, 12 nt, Rubella virus
ccacucgcuggc

SEQ ID NO: 4049756 - RNA, 15 nt, Rubella virus
ccagacuccggcccc

SEQ ID NO: 4049757 - RNA, 17 nt, Rubella virus
ccagugcgcggccucga

SEQ ID NO: 4049758 - RNA, 14 nt, Rubella virus
ccaugggaccucga

SEQ ID NO: 4049759 - RNA, 13 nt, Rubella virus
ccccugccacgcc

SEQ ID NO: 4049760 - RNA, 23 nt, Rubella virus
ccccugggaaguucgucaccgcc

SEQ ID NO: 4049761 - RNA, 19 nt, Rubella virus
cccgagccgcccgcucacg

SEQ ID NO: 4049762 - RNA, 14 nt, Rubella virus
cccgagcuggggcc

SEQ ID NO: 4049763 - RNA, 14 nt, Rubella virus
cccgcaccuguugc

SEQ ID NO: 4049764 - RNA, 15 nt, Rubella virus
cccgcaccuguugcu

SEQ ID NO: 4049765 - RNA, 16 nt, Rubella virus
cccgcacuaggccacu

SEQ ID NO: 4049766 - RNA, 16 nt, Rubella virus
cccugcugcgcacugc

SEQ ID NO: 4049767 - RNA, 17 nt, Rubella virus
cccugcugcgcacugcc

SEQ ID NO: 4049768 - RNA, 13 nt, Rubella virus
ccgaccgccgccc

SEQ ID NO: 4049769 - RNA, 13 nt, Rubella virus
ccgccgccacccc

SEQ ID NO: 4049770 - RNA, 20 nt, Rubella virus
ccgcgccccgagcuggggcc

SEQ ID NO: 4049771 - RNA, 22 nt, Rubella virus
ccgcgcgaaacccgcacuaggc

SEQ ID NO: 4049772 - RNA, 13 nt, Rubella virus
ccgguggcccugc

SEQ ID NO: 4049773 - RNA, 22 nt, Rubella virus
ccguucugcaacacgccgcacg

SEQ ID NO: 4049774 - RNA, 21 nt, Rubella virus
ccuccucaacacccccccgcc

SEQ ID NO: 4049775 - RNA, 16 nt, Rubella virus
ccucgaggccacugga

SEQ ID NO: 4049776 - RNA, 18 nt, Rubella virus
ccucgcuagugggccccc

SEQ ID NO: 4049777 - RNA, 18 nt, Rubella virus
ccugcagggguacaaccc

SEQ ID NO: 4049778 - RNA, 14 nt, Rubella virus
ccugcgcccgccuc

SEQ ID NO: 4049779 - RNA, 15 nt, Rubella virus
ccuucguccugcugg

SEQ ID NO: 4049780 - RNA, 19 nt, Rubella virus
ccuugcgcgcgcaucugga

SEQ ID NO: 4049781 - RNA, 14 nt, Rubella virus
ccuuggcgcauccg

SEQ ID NO: 4049782 - RNA, 17 nt, Rubella virus
cgacgacccccugcugc

SEQ ID NO: 4049783 - RNA, 18 nt, Rubella virus
cgacgacccccugcugcg

SEQ ID NO: 4049784 - RNA, 14 nt, Rubella virus
cgcacugccccugg

SEQ ID NO: 4049785 - RNA, 21 nt, Rubella virus
cgcagggacugguccagggcc

SEQ ID NO: 4049786 - RNA, 18 nt, Rubella virus
cgccacucaagcaccugu

SEQ ID NO: 4049787 - RNA, 20 nt, Rubella virus
cgccacugcgccggcccccu

SEQ ID NO: 4049788 - RNA, 13 nt, Rubella virus
cgccauccuuggc

SEQ ID NO: 4049789 - RNA, 14 nt, Rubella virus
cgccauuugcgccc

SEQ ID NO: 4049790 - RNA, 18 nt, Rubella virus
cgccauuugcgcccuccc

SEQ ID NO: 4049791 - RNA, 17 nt, Rubella virus
cgcccauccaggcgccc

SEQ ID NO: 4049792 - RNA, 21 nt, Rubella virus
cgccccgagcuggggccaccg

SEQ ID NO: 4049793 - RNA, 20 nt, Rubella virus
cgccgcccuccucaacaccc

SEQ ID NO: 4049794 - RNA, 18 nt, Rubella virus
cgccgccgcggcgccgcc

SEQ ID NO: 4049795 - RNA, 19 nt, Rubella virus
cgcgaaacccgcacuaggc

SEQ ID NO: 4049796 - RNA, 11 nt, Rubella virus
cgcgcagcugg

SEQ ID NO: 4049797 - RNA, 13 nt, Rubella virus
cgcgccgggcucc

SEQ ID NO: 4049798 - RNA, 21 nt, Rubella virus
cgcugauauggcggcaccucc

SEQ ID NO: 4049799 - RNA, 18 nt, Rubella virus
cgcugucucuugaucacg

SEQ ID NO: 4049800 - RNA, 17 nt, Rubella virus
cggagggccccgccgcc

SEQ ID NO: 4049801 - RNA, 17 nt, Rubella virus
cggccccgauugggccu

SEQ ID NO: 4049802 - RNA, 21 nt, Rubella virus
cggccgcugggacccugcgcu

SEQ ID NO: 4049803 - RNA, 17 nt, Rubella virus
cgggcccgagccgcccg

SEQ ID NO: 4049804 - RNA, 20 nt, Rubella virus
cggucgccguuggcaccgcg

SEQ ID NO: 4049805 - RNA, 15 nt, Rubella virus
cggugccccccaggc

SEQ ID NO: 4049806 - RNA, 13 nt, Rubella virus
cgguggggccucg

SEQ ID NO: 4049807 - RNA, 14 nt, Rubella virus
cgucaccgccgccc

SEQ ID NO: 4049808 - RNA, 19 nt, Rubella virus
cguggccugcgcccgccuc

SEQ ID NO: 4049809 - RNA, 18 nt, Rubella virus
cuaccaagucagcugcgg

SEQ ID NO: 4049810 - RNA, 14 nt, Rubella virus
cuccacgacccuga

SEQ ID NO: 4049811 - RNA, 18 nt, Rubella virus
cucguggcuuuggagcga

SEQ ID NO: 4049812 - RNA, 19 nt, Rubella virus
cugcaccggggugcgccac

SEQ ID NO: 4049813 - RNA, 11 nt, Rubella virus
cugccacgccg

SEQ ID NO: 4049814 - RNA, 16 nt, Rubella virus
cugccccgcgccccga

SEQ ID NO: 4049815 - RNA, 17 nt, Rubella virus
cuggaccguacggccau

SEQ ID NO: 4049816 - RNA, 14 nt, Rubella virus
cuggcggcagcuac

SEQ ID NO: 4049817 - RNA, 19 nt, Rubella virus
cugggcacccccccacucg

SEQ ID NO: 4049818 - RNA, 22 nt, Rubella virus
cugggcgccauuugcgcccucc

SEQ ID NO: 4049819 - RNA, 20 nt, Rubella virus
cuggggccaccgaccaaccc

SEQ ID NO: 4049820 - RNA, 15 nt, Rubella virus
cugggugcgggccga

SEQ ID NO: 4049821 - RNA, 16 nt, Rubella virus
cuucccccccacacca

SEQ ID NO: 4049822 - RNA, 17 nt, Rubella virus
cuugcuccccagccucg

SEQ ID NO: 4049823 - RNA, 18 nt, Rubella virus
cuugugggggccacgcca

SEQ ID NO: 4049824 - RNA, 14 nt, Rubella virus
gacaccgaggcacc

SEQ ID NO: 4049825 - RNA, 22 nt, Rubella virus
cgaggccugcgugaccucgugg

SEQ ID NO: 4049826 - RNA, 12 nt, Rubella virus
cgccccccccgg

SEQ ID NO: 4049827 - RNA, 20 nt, Rubella virus
cgccccgaagacggcuggac

SEQ ID NO: 4049828 - RNA, 18 nt, Rubella virus
cgccccgagcuggggcca

SEQ ID NO: 4049829 - RNA, 13 nt, Rubella virus
cgccccgcuuccc

SEQ ID NO: 4049830 - RNA, 19 nt, Rubella virus
cgcccgaccccggggaccu

SEQ ID NO: 4049831 - RNA, 12 nt, Rubella virus
cgccgccacccc

SEQ ID NO: 4049832 - RNA, 12 nt, Rubella virus
cgccgcgccugu

SEQ ID NO: 4049833 - RNA, 19 nt, Rubella virus
cgccgggcuccagccccgc

SEQ ID NO: 4049834 - RNA, 16 nt, Rubella virus
cgccuacuccucuggc

SEQ ID NO: 4049835 - RNA, 12 nt, Rubella virus
cgccugcgccac

SEQ ID NO: 4049836 - RNA, 22 nt, Rubella virus
cgcgaaacccgcacuaggccac

SEQ ID NO: 4049837 - RNA, 19 nt, Rubella virus
cgcggcuugugggggccac

SEQ ID NO: 4049838 - RNA, 13 nt, Rubella virus
cgcguggccugcg

SEQ ID NO: 4049839 - RNA, 17 nt, Rubella virus
cgcuagugggcccccgc

SEQ ID NO: 4049840 - RNA, 23 nt, Rubella virus
cgcucggcgcgccauccuuggcg

SEQ ID NO: 4049841 - RNA, 15 nt, Rubella virus
cgcugccgcagcccc

SEQ ID NO: 4049842 - RNA, 17 nt, Rubella virus
cggagugggcugcugcc

SEQ ID NO: 4049843 - RNA, 16 nt, Rubella virus
cggcacgcgcuggcac

SEQ ID NO: 4049844 - RNA, 15 nt, Rubella virus
cggccacuggcucca

SEQ ID NO: 4049845 - RNA, 19 nt, Rubella virus
cggcccucuggcucgccac

SEQ ID NO: 4049846 - RNA, 15 nt, Rubella virus
cggccugcuggggcu

SEQ ID NO: 4049847 - RNA, 23 nt, Rubella virus
cgggagcccgaauugccacggcc

SEQ ID NO: 4049848 - RNA, 17 nt, Rubella virus
cgggccgaugcgccugc

SEQ ID NO: 4049849 - RNA, 19 nt, Rubella virus
cgggcgugggggcucugcc

SEQ ID NO: 4049850 - RNA, 16 nt, Rubella virus
cgggcucuugcucgcc

SEQ ID NO: 4049851 - RNA, 17 nt, Rubella virus
cgucaccgccgcccucc

SEQ ID NO: 4049852 - RNA, 16 nt, Rubella virus
cguccagcacccucac

SEQ ID NO: 4049853 - RNA, 22 nt, Rubella virus
cgugggggcucugccccgcgcc

SEQ ID NO: 4049854 - RNA, 15 nt, Rubella virus
cuaccucugcacugc

SEQ ID NO: 4049855 - RNA, 13 nt, Rubella virus
cucacucugggcg

SEQ ID NO: 4049856 - RNA, 14 nt, Rubella virus
cucacucugggcgc

SEQ ID NO: 4049857 - RNA, 20 nt, Rubella virus
cucuggcggguacgcgcagc

SEQ ID NO: 4049858 - RNA, 17 nt, Rubella virus
cucuggcucgccacagc

SEQ ID NO: 4049859 - RNA, 13 nt, Rubella virus
cugacugcucgcg

SEQ ID NO: 4049860 - RNA, 22 nt, Rubella virus
cugccacgcacguuagcgccac

SEQ ID NO: 4049861 - RNA, 15 nt, Rubella virus
cugcccggccacugg

SEQ ID NO: 4049862 - RNA, 20 nt, Rubella virus
cugccgcagccccccugugc

SEQ ID NO: 4049863 - RNA, 17 nt, Rubella virus
cugccguuccucgggca

SEQ ID NO: 4049864 - RNA, 18 nt, Rubella virus
cugccguuccucgggcac

SEQ ID NO: 4049865 - RNA, 22 nt, Rubella virus
cugcuuugccccaugggaccuc

SEQ ID NO: 4049866 - RNA, 18 nt, Rubella virus
cuggcaccgacugcugcg

SEQ ID NO: 4049867 - RNA, 21 nt, Rubella virus
cugggcggagugggcugcugc

SEQ ID NO: 4049868 - RNA, 17 nt, Rubella virus
cugguccagggccccgc

SEQ ID NO: 4049869 - RNA, 17 nt, Rubella virus
cuggucccguggguccu

SEQ ID NO: 4049870 - RNA, 14 nt, Rubella virus
cuguccaccaccgc

SEQ ID NO: 4049871 - RNA, 16 nt, Rubella virus
cuuccccccugggaac

SEQ ID NO: 4049872 - RNA, 16 nt, Rubella virus
cuugccgggcucuugc

SEQ ID NO: 4049873 - RNA, 15 nt, Rubella virus
gaaacgccagcgacg

SEQ ID NO: 4049874 - RNA, 22 nt, Rubella virus
gacccgcucggcgcgccauccu

SEQ ID NO: 4049875 - RNA, 14 nt, Rubella virus
gaccguacggccau

SEQ ID NO: 4049876 - RNA, 19 nt, Rubella virus
gaccucggcgccguccccc

SEQ ID NO: 4049877 - RNA, 11 nt, Rubella virus
gaccugggcgg

SEQ ID NO: 4049878 - RNA, 18 nt, Rubella virus
gacgcgcgacuugcuccc

SEQ ID NO: 4049879 - RNA, 12 nt, Rubella virus
gacggcgacagc

SEQ ID NO: 4049880 - RNA, 19 nt, Rubella virus
gacggcggcugcuuugccc

SEQ ID NO: 4049881 - RNA, 19 nt, Rubella virus
gacuccggagggccccgcc

SEQ ID NO: 4049882 - RNA, 19 nt, Rubella virus
gacugguccagggccccgc

SEQ ID NO: 4049883 - RNA, 16 nt, Rubella virus
gagugggcugcugccc

SEQ ID NO: 4049884 - RNA, 19 nt, Rubella virus
gauccacgcccacaccacc

SEQ ID NO: 4049885 - RNA, 17 nt, Rubella virus
gcacacacaccacugcu

SEQ ID NO: 4049886 - RNA, 16 nt, Rubella virus
gcaccuucugggcugu

SEQ ID NO: 4049887 - RNA, 16 nt, Rubella virus
gcacuaggccacuaga

SEQ ID NO: 4049888 - RNA, 22 nt, Rubella virus
gcagccguggcgcguggccugc

SEQ ID NO: 4049889 - RNA, 13 nt, Rubella virus
gcauuacggccac

SEQ ID NO: 4049890 - RNA, 22 nt, Rubella virus
gccaacgccauuccccugacug

SEQ ID NO: 4049891 - RNA, 21 nt, Rubella virus
gccacagcgaacgcgcugucu

SEQ ID NO: 4049892 - RNA, 18 nt, Rubella virus
gccacccccgccacugcg

SEQ ID NO: 4049893 - RNA, 19 nt, Rubella virus
gcccacaccaccagcgacc

SEQ ID NO: 4049894 - RNA, 19 nt, Rubella virus
gccccgagcuggggccacc

SEQ ID NO: 4049895 - RNA, 14 nt, Rubella virus
gcccgguggcccug

SEQ ID NO: 4049896 - RNA, 13 nt, Rubella virus
gcccucaccgcgg

SEQ ID NO: 4049897 - RNA, 13 nt, Rubella virus
gccgcccgcucac

SEQ ID NO: 4049898 - RNA, 15 nt, Rubella virus
gccuacuccucuggc

SEQ ID NO: 4049899 - RNA, 17 nt, Rubella virus
gccucgcuagugggccc

SEQ ID NO: 4049900 - RNA, 21 nt, Rubella virus
gccucuuacuucaacccuggc

SEQ ID NO: 4049901 - RNA, 22 nt, Rubella virus
gccucuuacuucaacccuggcg

SEQ ID NO: 4049902 - RNA, 23 nt, Rubella virus
gccugcgugaccucguggcuuug

SEQ ID NO: 4049903 - RNA, 19 nt, Rubella virus
gccuggguacccgcagccc

SEQ ID NO: 4049904 - RNA, 20 nt, Rubella virus
gccuuccccccugggaacug

SEQ ID NO: 4049905 - RNA, 14 nt, Rubella virus
gcgaucgcgcgacc

SEQ ID NO: 4049906 - RNA, 15 nt, Rubella virus
gcgcacgggcagcau

SEQ ID NO: 4049907 - RNA, 20 nt, Rubella virus
gcgcaucuggaauggcacac

SEQ ID NO: 4049908 - RNA, 15 nt, Rubella virus
gcgcgucggccagca

SEQ ID NO: 4049909 - RNA, 22 nt, Rubella virus
gcgcugguggaaggccuugccc

SEQ ID NO: 4049910 - RNA, 22 nt, Rubella virus
gcggcugggguugcuacaaccu

SEQ ID NO: 4049911 - RNA, 20 nt, Rubella virus
gcgugcccgcccauccaggc

SEQ ID NO: 4049912 - RNA, 17 nt, Rubella virus
gcgugggggcucugccc

SEQ ID NO: 4049913 - RNA, 17 nt, Rubella virus
gcguguucgcccuugcu

SEQ ID NO: 4049914 - RNA, 18 nt, Rubella virus
gcucugccccgcgccccg

SEQ ID NO: 4049915 - RNA, 14 nt, Rubella virus
gcugcgcacugccc

SEQ ID NO: 4049916 - RNA, 22 nt, Rubella virus
gcugcuuugccccaugggaccu

SEQ ID NO: 4049917 - RNA, 21 nt, Rubella virus
gcugggguugcuacaaccuga

SEQ ID NO: 4049918 - RNA, 17 nt, Rubella virus
gcuucuugucugggugc

SEQ ID NO: 4049919 - RNA, 13 nt, Rubella virus
ggacacagcgacg

SEQ ID NO: 4049920 - RNA, 14 nt, Rubella virus
ggaccguacggcca

SEQ ID NO: 4049921 - RNA, 12 nt, Rubella virus
ggagugggcugc

SEQ ID NO: 4049922 - RNA, 18 nt, Rubella virus
ggcacccaccgaggccug

SEQ ID NO: 4049923 - RNA, 19 nt, Rubella virus
ggccccgauugggccuccc

SEQ ID NO: 4049924 - RNA, 14 nt, Rubella virus
ggcccucuggcucg

SEQ ID NO: 4049925 - RNA, 17 nt, Rubella virus
ggcccucuggcucgcca

SEQ ID NO: 4049926 - RNA, 16 nt, Rubella virus
ggccugcgcccgccuc

SEQ ID NO: 4049927 - RNA, 13 nt, Rubella virus
ggcgccgccgccg

SEQ ID NO: 4049928 - RNA, 14 nt, Rubella virus
ggcucuugcucgcc

SEQ ID NO: 4049929 - RNA, 23 nt, Rubella virus
ggcugcgcuaugcgguggggccu

SEQ ID NO: 4049930 - RNA, 14 nt, Rubella virus
gggccccgccgccg

SEQ ID NO: 4049931 - RNA, 14 nt, Rubella virus
gggcuccagccccg

SEQ ID NO: 4049932 - RNA, 16 nt, Rubella virus
gggcuugggggccugg

SEQ ID NO: 4049933 - RNA, 17 nt, Rubella virus
gucccgguggggccucg

SEQ ID NO: 4049934 - RNA, 24 nt, Rubella virus
gucgccguuggcaccgcgcgcgcc

SEQ ID NO: 4049935 - RNA, 18 nt, Rubella virus
gucggagacccggcagac

SEQ ID NO: 4049936 - RNA, 16 nt, Rubella virus
gugcaccuucugggcu

SEQ ID NO: 4049937 - RNA, 16 nt, Rubella virus
uaccaagucagcugcg

SEQ ID NO: 4049938 - RNA, 21 nt, Rubella virus
uacgcugccgcagccccccug

SEQ ID NO: 4049939 - RNA, 14 nt, Rubella virus
uacggccaccacca

SEQ ID NO: 4049940 - RNA, 22 nt, Rubella virus
ucagcagucccgguggggccuc

SEQ ID NO: 4049941 - RNA, 21 nt, Rubella virus
ucccagacuccggccccgaag

SEQ ID NO: 4049942 - RNA, 21 nt, Rubella virus
uccccagccucggcccucugg

SEQ ID NO: 4049943 - RNA, 14 nt, Rubella virus
uccccugacugcuc

SEQ ID NO: 4049944 - RNA, 14 nt, Rubella virus
uccgcgucggcggc

SEQ ID NO: 4049945 - RNA, 20 nt, Rubella virus
uccgcuucggugccccccag

SEQ ID NO: 4049946 - RNA, 18 nt, Rubella virus
uccggagggccccgccgc

SEQ ID NO: 4049947 - RNA, 23 nt, Rubella virus
ugacuccggagggccccgccgcc

SEQ ID NO: 4049948 - RNA, 17 nt, Rubella virus
ugccccccaggccuucc

SEQ ID NO: 4049949 - RNA, 13 nt, Rubella virus
ugccgcagccccc

SEQ ID NO: 4049950 - RNA, 15 nt, Rubella virus
ugcgcacugccccug

SEQ ID NO: 4049951 - RNA, 20 nt, Rubella virus
uggcacacacaccacugcug

SEQ ID NO: 4049952 - RNA, 18 nt, Rubella virus
uggcaccgacugcugcgc

SEQ ID NO: 4049953 - RNA, 15 nt, Rubella virus
uggcaccgcgcgcgc

SEQ ID NO: 4049954 - RNA, 16 nt, Rubella virus
ugggccuccccgguuu

SEQ ID NO: 4049955 - RNA, 15 nt, Rubella virus
ugucgccgccgcggc

SEQ ID NO: 4049956 - RNA, 16 nt, Rubella virus
uugaucacgcccucgc

SEQ ID NO: 4049957 - RNA, 23 nt, Rubella virus
cgcccgcgaccccgacgccucuc

SEQ ID NO: 4049958 - RNA, 13 nt, Rubella virus
cgccgccgcggcg

SEQ ID NO: 4049959 - RNA, 15 nt, Rubella virus
cgccugcgccacggc

SEQ ID NO: 4049960 - RNA, 14 nt, Rubella virus
cgcggccugcuggg

SEQ ID NO: 4049961 - RNA, 21 nt, Rubella virus
cgcggccuucguccugcuggu

SEQ ID NO: 4049962 - RNA, 14 nt, Rubella virus
cgcugggacccugc

SEQ ID NO: 4049963 - RNA, 12 nt, Rubella virus
cggagacccggc

SEQ ID NO: 4049964 - RNA, 15 nt, Rubella virus
cggcagaccugggcg

SEQ ID NO: 4049965 - RNA, 20 nt, Rubella virus
cggccaucauggcggcaccu

SEQ ID NO: 4049966 - RNA, 14 nt, Rubella virus
cggcccccugccac

SEQ ID NO: 4049967 - RNA, 18 nt, Rubella virus
cggccccgauugggccuc

SEQ ID NO: 4049968 - RNA, 19 nt, Rubella virus
cggccccgauugggccucc

SEQ ID NO: 4049969 - RNA, 20 nt, Rubella virus
cggccccgauugggccuccc

SEQ ID NO: 4049970 - RNA, 19 nt, Rubella virus
cggccugcuggggcuuccc

SEQ ID NO: 4049971 - RNA, 14 nt, Rubella virus
cggcgacagcgccc

SEQ ID NO: 4049972 - RNA, 20 nt, Rubella virus
cggcgccgccgccgcccuca

SEQ ID NO: 4049973 - RNA, 19 nt, Rubella virus
cggcgcuauagcgccucgc

SEQ ID NO: 4049974 - RNA, 16 nt, Rubella virus
cggcugcgccuggucg

SEQ ID NO: 4049975 - RNA, 20 nt, Rubella virus
cgggccgaugcgccugcgcc

SEQ ID NO: 4049976 - RNA, 13 nt, Rubella virus
cggggccguggcc

SEQ ID NO: 4049977 - RNA, 16 nt, Rubella virus
cguccuuaccgcccgc

SEQ ID NO: 4049978 - RNA, 17 nt, Rubella virus
cuacccgguuuggcugc

SEQ ID NO: 4049979 - RNA, 18 nt, Rubella virus
cuccacgacccugacacc

SEQ ID NO: 4049980 - RNA, 22 nt, Rubella virus
cuccacgaccgccgccaccccc

SEQ ID NO: 4049981 - RNA, 15 nt, Rubella virus
cuccucaacaccccc

SEQ ID NO: 4049982 - RNA, 19 nt, Rubella virus
cucgaggccacuggagccu

SEQ ID NO: 4049983 - RNA, 20 nt, Rubella virus
cucgcggcuugugggggcca

SEQ ID NO: 4049984 - RNA, 14 nt, Rubella virus
cucggcccucuggc

SEQ ID NO: 4049985 - RNA, 18 nt, Rubella virus
cugccccgcgccccgagc

SEQ ID NO: 4049986 - RNA, 21 nt, Rubella virus
cugccgcagccccccugugcg

SEQ ID NO: 4049987 - RNA, 15 nt, Rubella virus
cuggcaccagggcac

SEQ ID NO: 4049988 - RNA, 22 nt, Rubella virus
cuggcggguacgcgcagcuggc

SEQ ID NO: 4049989 - RNA, 23 nt, Rubella virus
cugugcgcacgggcagcauuacg

SEQ ID NO: 4049990 - RNA, 12 nt, Rubella virus
cuguugcuguau

SEQ ID NO: 4049991 - RNA, 14 nt, Rubella virus
cuguugcuguauag

SEQ ID NO: 4049992 - RNA, 16 nt, Rubella virus
cuugaucacgcccucg

SEQ ID NO: 4049993 - RNA, 21 nt, Rubella virus
gaccugggcggagugggcugc

SEQ ID NO: 4049994 - RNA, 17 nt, Rubella virus
gacgacccccugcugcg

SEQ ID NO: 4049995 - RNA, 14 nt, Rubella virus
gacgcggccugcug

SEQ ID NO: 4049996 - RNA, 16 nt, Rubella virus
gacuccggagggcccc

SEQ ID NO: 4049997 - RNA, 23 nt, Rubella virus
gacuugcuccccagccucggccc

SEQ ID NO: 4049998 - RNA, 12 nt, Rubella virus
gagcuggggcca

SEQ ID NO: 4049999 - RNA, 23 nt, Rubella virus
gaggcuuucaccuaccucugcac

SEQ ID NO: 4050000 - RNA, 18 nt, Rubella virus
gcaccuacgccgagcagg

SEQ ID NO: 4050001 - RNA, 17 nt, Rubella virus
gcagccccuugcgcgcg

SEQ ID NO: 4050002 - RNA, 22 nt, Rubella virus
gcauuucaccaaccugggcacc

SEQ ID NO: 4050003 - RNA, 16 nt, Rubella virus
gccacugcgccggccc

SEQ ID NO: 4050004 - RNA, 16 nt, Rubella virus
gccagcgacgugcugc

SEQ ID NO: 4050005 - RNA, 17 nt, Rubella virus
gccaucauggcggcacc

SEQ ID NO: 4050006 - RNA, 19 nt, Rubella virus
gcccgaauugccacggccc

SEQ ID NO: 4050007 - RNA, 21 nt, Rubella virus
gcccgcucacgucguccgcgc

SEQ ID NO: 4050008 - RNA, 16 nt, Rubella virus
gccgcgccugucgccg

SEQ ID NO: 4050009 - RNA, 17 nt, Rubella virus
gccgcgccugucgccgc

SEQ ID NO: 4050010 - RNA, 17 nt, Rubella virus
gccggcccccugccacg

SEQ ID NO: 4050011 - RNA, 23 nt, Rubella virus
gccgugacuccggagggccccgc

SEQ ID NO: 4050012 - RNA, 14 nt, Rubella virus
gccguuggcaccgc

SEQ ID NO: 4050013 - RNA, 20 nt, Rubella virus
gccucuuacuucaacccugg

SEQ ID NO: 4050014 - RNA, 14 nt, Rubella virus
gcgacgcggccugc

SEQ ID NO: 4050015 - RNA, 13 nt, Rubella virus
gcgccccgagcug

SEQ ID NO: 4050016 - RNA, 21 nt, Rubella virus
gcgccccgagcuggggccacc

SEQ ID NO: 4050017 - RNA, 13 nt, Rubella virus
gcgccugcgccac

SEQ ID NO: 4050018 - RNA, 18 nt, Rubella virus
gcgcucauguacaacccu

SEQ ID NO: 4050019 - RNA, 15 nt, Rubella virus
gcggccucgacggcg

SEQ ID NO: 4050020 - RNA, 15 nt, Rubella virus
gcggcugcuuugccc

SEQ ID NO: 4050021 - RNA, 15 nt, Rubella virus
gcggcuucuugucug

SEQ ID NO: 4050022 - RNA, 18 nt, Rubella virus
gcgugggggcucugcccc

SEQ ID NO: 4050023 - RNA, 15 nt, Rubella virus
gcuacguccagcacc

SEQ ID NO: 4050024 - RNA, 15 nt, Rubella virus
gcucacucugggcgc

SEQ ID NO: 4050025 - RNA, 19 nt, Rubella virus
gcuccaaggcggcuggggu

SEQ ID NO: 4050026 - RNA, 15 nt, Rubella virus
gcuccagccccgcgc

SEQ ID NO: 4050027 - RNA, 12 nt, Rubella virus
gcucugccccgc

SEQ ID NO: 4050028 - RNA, 17 nt, Rubella virus
gcugcccggccacuggc

SEQ ID NO: 4050029 - RNA, 16 nt, Rubella virus
gcugcgcacugccccu

SEQ ID NO: 4050030 - RNA, 19 nt, Rubella virus
gcuggcaccgacugcugcg

SEQ ID NO: 4050031 - RNA, 19 nt, Rubella virus
gcuucccccccacaccacc

SEQ ID NO: 4050032 - RNA, 22 nt, Rubella virus
gcuucggugccccccaggccuu

SEQ ID NO: 4050033 - RNA, 20 nt, Rubella virus
ggacacagcgacgcggccug

SEQ ID NO: 4050034 - RNA, 15 nt, Rubella virus
ggaccucggcgccgu

SEQ ID NO: 4050035 - RNA, 18 nt, Rubella virus
ggacugguccagggcccc

SEQ ID NO: 4050036 - RNA, 21 nt, Rubella virus
ggagcccgaauugccacggcc

SEQ ID NO: 4050037 - RNA, 14 nt, Rubella virus
ggagggccccgccg

SEQ ID NO: 4050038 - RNA, 19 nt, Rubella virus
ggcacccaccgaggccugc

SEQ ID NO: 4050039 - RNA, 16 nt, Rubella virus
ggcagcauuacggcca

SEQ ID NO: 4050040 - RNA, 17 nt, Rubella virus
ggcauccaccgggcccc

SEQ ID NO: 4050041 - RNA, 16 nt, Rubella virus
ggccacuggagccugc

SEQ ID NO: 4050042 - RNA, 22 nt, Rubella virus
ggccagcgcagggacuggucca

SEQ ID NO: 4050043 - RNA, 17 nt, Rubella virus
ggccaucauggcggcac

SEQ ID NO: 4050044 - RNA, 21 nt, Rubella virus
ggccccgccccccccggagga

SEQ ID NO: 4050045 - RNA, 14 nt, Rubella virus
ggccuuccuugccg

SEQ ID NO: 4050046 - RNA, 16 nt, Rubella virus
ggcgccguccccccug

SEQ ID NO: 4050047 - RNA, 13 nt, Rubella virus
ggcgcguggccug

SEQ ID NO: 4050048 - RNA, 14 nt, Rubella virus
ggcgcguggccugc

SEQ ID NO: 4050049 - RNA, 20 nt, Rubella virus
ggcgugggggcucugccccg

SEQ ID NO: 4050050 - RNA, 15 nt, Rubella virus
ggcucuugcucgcca

SEQ ID NO: 4050051 - RNA, 18 nt, Rubella virus
ggcuguccaccaccgccc

SEQ ID NO: 4050052 - RNA, 20 nt, Rubella virus
gggggaggcaauugccaucu

SEQ ID NO: 4050053 - RNA, 21 nt, Rubella virus
guaccacccuaccgcgugcga

SEQ ID NO: 4050054 - RNA, 13 nt, Rubella virus
guccccccuggga

SEQ ID NO: 4050055 - RNA, 21 nt, Rubella virus
gugagccccaugggacgcgcg

SEQ ID NO: 4050056 - RNA, 13 nt, Rubella virus
gugcgcggccucg

SEQ ID NO: 4050057 - RNA, 15 nt, Rubella virus
guggaaggccuugcc

SEQ ID NO: 4050058 - RNA, 14 nt, Rubella virus
guggcccugccacg

SEQ ID NO: 4050059 - RNA, 15 nt, Rubella virus
gugggggcucugccc

SEQ ID NO: 4050060 - RNA, 22 nt, Rubella virus
guugaucugcgggcuguccacc

SEQ ID NO: 4050061 - RNA, 21 nt, Rubella virus
uaccagugcgguacccccgcg

SEQ ID NO: 4050062 - RNA, 13 nt, Rubella virus
uaccgcccgcccc

SEQ ID NO: 4050063 - RNA, 22 nt, Rubella virus
uagauccccgcaccuguugcug

SEQ ID NO: 4050064 - RNA, 14 nt, Rubella virus
uauggcggcaccuc

SEQ ID NO: 4050065 - RNA, 17 nt, Rubella virus
ucaauggcgaggaccuc

SEQ ID NO: 4050066 - RNA, 19 nt, Rubella virus
ucaauggcgaggaccucgg

SEQ ID NO: 4050067 - RNA, 16 nt, Rubella virus
ucaccaaccugggcac

SEQ ID NO: 4050068 - RNA, 12 nt, Rubella virus
uccccccuggga

SEQ ID NO: 4050069 - RNA, 22 nt, Rubella virus
ucgacgaggacggccgcuggga

SEQ ID NO: 4050070 - RNA, 18 nt, Rubella virus
ucgccgccgcggcgccgc

SEQ ID NO: 4050071 - RNA, 13 nt, Rubella virus
ucuggcucgccac

SEQ ID NO: 4050072 - RNA, 16 nt, Rubella virus
ugagcgacuggcacca

SEQ ID NO: 4050073 - RNA, 21 nt, Rubella virus
ugcauuucaccaaccugggca

SEQ ID NO: 4050074 - RNA, 23 nt, Rubella virus
ugccacggccccgauugggccuc

SEQ ID NO: 4050075 - RNA, 21 nt, Rubella virus
ugcccgaguggauccacgccc

SEQ ID NO: 4050076 - RNA, 17 nt, Rubella virus
ugcccggccacuggcuc

SEQ ID NO: 4050077 - RNA, 19 nt, Rubella virus
ugccgcagccccccugugc

SEQ ID NO: 4050078 - RNA, 20 nt, Rubella virus
ugccuucggacacagcgacg

SEQ ID NO: 4050079 - RNA, 14 nt, Rubella virus
ugcgccucgcuggc

SEQ ID NO: 4050080 - RNA, 15 nt, Rubella virus
ugcgcgucggccagc

SEQ ID NO: 4050081 - RNA, 22 nt, Rubella virus
ugcgcucauguacaacccuugc

SEQ ID NO: 4050082 - RNA, 16 nt, Rubella virus
ugcgggcccgagccgc

SEQ ID NO: 4050083 - RNA, 22 nt, Rubella virus
ugcgguggggccuuccccccug

SEQ ID NO: 4050084 - RNA, 19 nt, Rubella virus
ugcuggggcuuccccaccg

SEQ ID NO: 4050085 - RNA, 14 nt, Rubella virus
uggacccggcgagg

SEQ ID NO: 4050086 - RNA, 19 nt, Rubella virus
ugcgccacggcgcugacac

SEQ ID NO: 4050087 - RNA, 19 nt, Rubella virus
ugcgcccucccacucgcug

SEQ ID NO: 4050088 - RNA, 19 nt, Rubella virus
ugcuacaaccugagcgacu

SEQ ID NO: 4050089 - RNA, 22 nt, Rubella virus
ugcugcccggccacuggcucca

SEQ ID NO: 4050090 - RNA, 22 nt, Rubella virus
ugcugugucggagacccggcag

SEQ ID NO: 4050091 - RNA, 14 nt, Rubella virus
ugcuuugccccaug

SEQ ID NO: 4050092 - RNA, 15 nt, Rubella virus
uggcaccgacugcug

SEQ ID NO: 4050093 - RNA, 14 nt, Rubella virus
uggcgaggaccucg

SEQ ID NO: 4050094 - RNA, 21 nt, Rubella virus
uggcgaggaccucggcgccgu

SEQ ID NO: 4050095 - RNA, 17 nt, Rubella virus
uggcgcguggccugcgc

SEQ ID NO: 4050096 - RNA, 16 nt, Rubella virus
ugggguaaaggcgagc

SEQ ID NO: 4050097 - RNA, 18 nt, Rubella virus
uggguacccgcagccccu

SEQ ID NO: 4050098 - RNA, 13 nt, Rubella virus
uguccccgugcgc

SEQ ID NO: 4050099 - RNA, 17 nt, Rubella virus
ugugucggagacccggc

SEQ ID NO: 4050100 - RNA, 13 nt, Rubella virus
uucguccugcugg

SEQ ID NO: 4050101 - RNA, 22 nt, Rubella virus
uugccgggcucuugcucgccac

SEQ ID NO: 4050102 - RNA, 15 nt, Rubella virus
aacccgcacuaggcc

SEQ ID NO: 4050103 - RNA, 12 nt, Rubella virus
aagucagcugcg

SEQ ID NO: 4050104 - RNA, 13 nt, Rubella virus
gacagcgccccgc

SEQ ID NO: 4050105 - RNA, 17 nt, Rubella virus
gacaguucgcccggugg

SEQ ID NO: 4050106 - RNA, 13 nt, Rubella virus
gaccccggggacc

SEQ ID NO: 4050107 - RNA, 15 nt, Rubella virus
gacgcggccugcugg

SEQ ID NO: 4050108 - RNA, 16 nt, Rubella virus
gacggccgcugggacc

SEQ ID NO: 4050109 - RNA, 20 nt, Rubella virus
gacuuccgcgucggcggcac

SEQ ID NO: 4050110 - RNA, 17 nt, Rubella virus
gagaccaggaccgucug

SEQ ID NO: 4050111 - RNA, 15 nt, Rubella virus
gagggcuugggggcc

SEQ ID NO: 4050112 - RNA, 24 nt, Rubella virus
gagggcuugggggccuggguaccc

SEQ ID NO: 4050113 - RNA, 23 nt, Rubella virus
gcaaaccgggcgugggggcucug

SEQ ID NO: 4050114 - RNA, 14 nt, Rubella virus
gcaccagggcacuc

SEQ ID NO: 4050115 - RNA, 19 nt, Rubella virus
gcacgcgcuggcaccgacu

SEQ ID NO: 4050116 - RNA, 15 nt, Rubella virus
gcacugccccuggac

SEQ ID NO: 4050117 - RNA, 16 nt, Rubella virus
gcauccgcuucggugc

SEQ ID NO: 4050118 - RNA, 17 nt, Rubella virus
gccacccccgccacugc

SEQ ID NO: 4050119 - RNA, 19 nt, Rubella virus
gccagugcgcggccucgac

SEQ ID NO: 4050120 - RNA, 16 nt, Rubella virus
gccaucauggcggcac

SEQ ID NO: 4050121 - RNA, 16 nt, Rubella virus
gcccaguacccgccua

SEQ ID NO: 4050122 - RNA, 18 nt, Rubella virus
gcccauugguggcagcuc

SEQ ID NO: 4050123 - RNA, 23 nt, Rubella virus
gccccgagcuggggccaccgacc

SEQ ID NO: 4050124 - RNA, 18 nt, Rubella virus
gccccgccgccgccgcgg

SEQ ID NO: 4050125 - RNA, 14 nt, Rubella virus
gccccgcgccccga

SEQ ID NO: 4050126 - RNA, 13 nt, Rubella virus
gccccuuggggcu

SEQ ID NO: 4050127 - RNA, 12 nt, Rubella virus
gccgcagccccc

SEQ ID NO: 4050128 - RNA, 14 nt, Rubella virus
gccgcggcaaccgg

SEQ ID NO: 4050129 - RNA, 19 nt, Rubella virus
gccgcugggacccugcgcu

SEQ ID NO: 4050130 - RNA, 20 nt, Rubella virus
gccgugacuccggagggccc

SEQ ID NO: 4050131 - RNA, 13 nt, Rubella virus
gccguggccagcg

SEQ ID NO: 4050132 - RNA, 17 nt, Rubella virus
gccguuccucgggcacg

SEQ ID NO: 4050133 - RNA, 18 nt, Rubella virus
gccucaaugacagcugcg

SEQ ID NO: 4050134 - RNA, 16 nt, Rubella virus
gccucggcccucuggc

SEQ ID NO: 4050135 - RNA, 17 nt, Rubella virus
gccucuccacgacccug

SEQ ID NO: 4050136 - RNA, 17 nt, Rubella virus
gccugcgcccgccucuc

SEQ ID NO: 4050137 - RNA, 13 nt, Rubella virus
gccugcuggggcu

SEQ ID NO: 4050138 - RNA, 15 nt, Rubella virus
gcgaacuccacgacc

SEQ ID NO: 4050139 - RNA, 14 nt, Rubella virus
gcgcacgggcagca

SEQ ID NO: 4050140 - RNA, 18 nt, Rubella virus
gcgcagcuggccucuuac

SEQ ID NO: 4050141 - RNA, 20 nt, Rubella virus
gcgcccccggcugcgccugg

SEQ ID NO: 4050142 - RNA, 14 nt, Rubella virus
gcgccccgagcugg

SEQ ID NO: 4050143 - RNA, 22 nt, Rubella virus
gcgcccgccucuccacgacccu

SEQ ID NO: 4050144 - RNA, 23 nt, Rubella virus
gcgcccgccucuccacgacccug

SEQ ID NO: 4050145 - RNA, 16 nt, Rubella virus
gcgccgggcuccagcc

SEQ ID NO: 4050146 - RNA, 16 nt, Rubella virus
gcgccugcgccacggc

SEQ ID NO: 4050147 - RNA, 13 nt, Rubella virus
gcgcgcgugcacc

SEQ ID NO: 4050148 - RNA, 19 nt, Rubella virus
gcgcguacaaucaaccugc

SEQ ID NO: 4050149 - RNA, 18 nt, Rubella virus
gcgcugauauggcggcac

SEQ ID NO: 4050150 - RNA, 18 nt, Rubella virus
gcggccuucguccugcug

SEQ ID NO: 4050151 - RNA, 19 nt, Rubella virus
gcggcgcuauagcgccucg

SEQ ID NO: 4050152 - RNA, 13 nt, Rubella virus
gcgucggcggcac

SEQ ID NO: 4050153 - RNA, 18 nt, Rubella virus
gcgugcaccuucugggcu

SEQ ID NO: 4050154 - RNA, 15 nt, Rubella virus
gcguggccugcgccc

SEQ ID NO: 4050155 - RNA, 17 nt, Rubella virus
gcuagcuacguccagca

SEQ ID NO: 4050156 - RNA, 17 nt, Rubella virus
gcucgcggcuugugggg

SEQ ID NO: 4050157 - RNA, 18 nt, Rubella virus
gcugcccggccacuggcu

SEQ ID NO: 4050158 - RNA, 19 nt, Rubella virus
gcugcgcuaugcggugggg

SEQ ID NO: 4050159 - RNA, 21 nt, Rubella virus
gcuggaccguacggccaugcu

SEQ ID NO: 4050160 - RNA, 16 nt, Rubella virus
gcuugugggggccacg

SEQ ID NO: 4050161 - RNA, 22 nt, Rubella virus
ggagcacgaccgaccgccgccc

SEQ ID NO: 4050162 - RNA, 21 nt, Rubella virus
ggcaccagggcacucaugucu

SEQ ID NO: 4050163 - RNA, 22 nt, Rubella virus
ggcaccuugcgcgucggccagc

SEQ ID NO: 4050164 - RNA, 13 nt, Rubella virus
ggcacgacggcca

SEQ ID NO: 4050165 - RNA, 23 nt, Rubella virus
ggccacuagauccccgcaccugu

SEQ ID NO: 4050166 - RNA, 15 nt, Rubella virus
ggccacuggagccug

SEQ ID NO: 4050167 - RNA, 16 nt, Rubella virus
ggccccgccgccgccg

SEQ ID NO: 4050168 - RNA, 15 nt, Rubella virus
ggccucgggagcccg

SEQ ID NO: 4050169 - RNA, 17 nt, Rubella virus
ggccugcuggggcuucc

SEQ ID NO: 4050170 - RNA, 22 nt, Rubella virus
ggcggcaccuccuacgcugccg

SEQ ID NO: 4050171 - RNA, 11 nt, Rubella virus
ggcggcagcua

SEQ ID NO: 4050172 - RNA, 23 nt, Rubella virus
gggacugguccagggccccgccc

SEQ ID NO: 4050173 - RNA, 15 nt, Rubella virus
ggggccguggccagc

SEQ ID NO: 4050174 - RNA, 14 nt, Rubella virus
gguacgcgcagcug

SEQ ID NO: 4050175 - RNA, 12 nt, Rubella virus
gucccggugggg

SEQ ID NO: 4050176 - RNA, 17 nt, Rubella virus
gucgccgccgcggcgcc

SEQ ID NO: 4050177 - RNA, 22 nt, Rubella virus
gugcgagggcuugggggccugg

SEQ ID NO: 4050178 - RNA, 21 nt, Rubella virus
guggcagcucacucugggcgc

SEQ ID NO: 4050179 - RNA, 21 nt, Rubella virus
uacaaccugagcgacuggcac

SEQ ID NO: 4050180 - RNA, 16 nt, Rubella virus
uaccucugcacugcac

SEQ ID NO: 4050181 - RNA, 22 nt, Rubella virus
uauggcacacacaccacugcug

SEQ ID NO: 4050182 - RNA, 15 nt, Rubella virus
ucaaugacagcugcg

SEQ ID NO: 4050183 - RNA, 14 nt, Rubella virus
ucaccaaccugggc

SEQ ID NO: 4050184 - RNA, 13 nt, Rubella virus
ucacucugggcgc

SEQ ID NO: 4050185 - RNA, 18 nt, Rubella virus
uccacauacgcgcuggac

SEQ ID NO: 4050186 - RNA, 19 nt, Rubella virus
uccagggccccgccccccc

SEQ ID NO: 4050187 - RNA, 20 nt, Rubella virus
uccccacugaugucucgugc

SEQ ID NO: 4050188 - RNA, 22 nt, Rubella virus
uccccagccucggcccucuggc

SEQ ID NO: 4050189 - RNA, 16 nt, Rubella virus
uccccgcaccuguugc

SEQ ID NO: 4050190 - RNA, 13 nt, Rubella virus
ucgcgggcgccgc

SEQ ID NO: 4050191 - RNA, 16 nt, Rubella virus
ugccccuggacccggc

SEQ ID NO: 4050192 - RNA, 12 nt, Rubella virus
ugccgggcucuu

SEQ ID NO: 4050193 - RNA, 15 nt, Rubella virus
ugcgccggcccccug

SEQ ID NO: 4050194 - RNA, 14 nt, Rubella virus
ugcgccugcgccac

SEQ ID NO: 4050195 - RNA, 18 nt, Rubella virus
ugcgccuggucgacgccg

SEQ ID NO: 4050196 - RNA, 21 nt, Rubella virus
ugcgcggccucgacggcgaca

SEQ ID NO: 4050197 - RNA, 17 nt, Rubella virus
ugcuccccagccucggc

SEQ ID NO: 4050198 - RNA, 15 nt, Rubella virus
uggcagcucacucug

SEQ ID NO: 4050199 - RNA, 14 nt, Rubella virus
ugggacgcgcgacu

SEQ ID NO: 4050200 - RNA, 15 nt, Rubella virus
uggggccucgggagc

SEQ ID NO: 4050201 - RNA, 20 nt, Rubella virus
uggguacccgcagccccuug

SEQ ID NO: 4050202 - RNA, 17 nt, Rubella virus
uggugagccccauggga

SEQ ID NO: 4050203 - RNA, 15 nt, Rubella virus
ugguggaaggccuug

SEQ ID NO: 4050204 - RNA, 20 nt, Rubella virus
ugucggagacccggcagacc

SEQ ID NO: 4050205 - RNA, 13 nt, Rubella virus
uguugcuguauag

SEQ ID NO: 4050206 - RNA, 14 nt, Rubella virus
uucccccccacacc

SEQ ID NO: 4050207 - RNA, 20 nt, Rubella virus
uugaaccugccuucggacac

SEQ ID NO: 4050208 - RNA, 16 nt, Rubella virus
uuucaccuaccucugc

SEQ ID NO: 4050209 - RNA, 20 nt, Rubella virus
cacugcgccggcccccugcc

SEQ ID NO: 4050210 - RNA, 19 nt, Rubella virus
cagcgaccccuggcaucca

SEQ ID NO: 4050211 - RNA, 16 nt, Rubella virus
caggcgcccgcugccc

SEQ ID NO: 4050212 - RNA, 14 nt, Rubella virus
cagggacuggucca

SEQ ID NO: 4050213 - RNA, 21 nt, Rubella virus
cagggguacaacccccccgcc

SEQ ID NO: 4050214 - RNA, 17 nt, Rubella virus
cauccaggcgcccgcug

SEQ ID NO: 4050215 - RNA, 13 nt, Rubella virus
caucgaccccgcc

SEQ ID NO: 4050216 - RNA, 16 nt, Rubella virus
caucgcgggcgccgcc

SEQ ID NO: 4050217 - RNA, 20 nt, Rubella virus
cauuugcgcccucccacucg

SEQ ID NO: 4050218 - RNA, 17 nt, Rubella virus
ccagccccgcgcugaua

SEQ ID NO: 4050219 - RNA, 13 nt, Rubella virus
ccccaugggaccu

SEQ ID NO: 4050220 - RNA, 18 nt, Rubella virus
ccccgugcgccucgcugg

SEQ ID NO: 4050221 - RNA, 15 nt, Rubella virus
cccgaagacggcugg

SEQ ID NO: 4050222 - RNA, 22 nt, Rubella virus
cccgcccuaccaagucagcugc

SEQ ID NO: 4050223 - RNA, 17 nt, Rubella virus
cccggccacuggcucca

SEQ ID NO: 4050224 - RNA, 18 nt, Rubella virus
cccgugcgccucgcuggc

SEQ ID NO: 4050225 - RNA, 17 nt, Rubella virus
cccucccacucgcuggc

SEQ ID NO: 4050226 - RNA, 19 nt, Rubella virus
ccgagcuggggccaccgac

SEQ ID NO: 4050227 - RNA, 17 nt, Rubella virus
ccgaugcgccugcgcca

SEQ ID NO: 4050228 - RNA, 15 nt, Rubella virus
ccgcaccuguugcug

SEQ ID NO: 4050229 - RNA, 22 nt, Rubella virus
ccgcagccccccugugcgcacg

SEQ ID NO: 4050230 - RNA, 22 nt, Rubella virus
ccgcccuaccaagucagcugcg

SEQ ID NO: 4050231 - RNA, 22 nt, Rubella virus
ccggcgugguguauggcacaca

SEQ ID NO: 4050232 - RNA, 16 nt, Rubella virus
ccucaaugacagcugc

SEQ ID NO: 4050233 - RNA, 16 nt, Rubella virus
ccuccuacgcugccgc

SEQ ID NO: 4050234 - RNA, 18 nt, Rubella virus
ccucggcccucuggcucg

SEQ ID NO: 4050235 - RNA, 15 nt, Rubella virus
ccugcugcgcacugc

SEQ ID NO: 4050236 - RNA, 15 nt, Rubella virus
ccuugccgggcucuu

SEQ ID NO: 4050237 - RNA, 16 nt, Rubella virus
cgacgcggccugcugg

SEQ ID NO: 4050238 - RNA, 23 nt, Rubella virus
cgaggcacccaccgaggccugcg

SEQ ID NO: 4050239 - RNA, 13 nt, Rubella virus
cgcaccuguugcu

SEQ ID NO: 4050240 - RNA, 21 nt, Rubella virus
cgcacugccccuggacccggc

SEQ ID NO: 4050241 - RNA, 16 nt, Rubella virus
cgcagggacuggucca

SEQ ID NO: 4050242 - RNA, 18 nt, Rubella virus
cgccacugcgccggcccc

SEQ ID NO: 4050243 - RNA, 15 nt, Rubella virus
cgccgccgcccucac

SEQ ID NO: 4050244 - RNA, 14 nt, Rubella virus
cgccggcccccugc

SEQ ID NO: 4050245 - RNA, 22 nt, Rubella virus
cgccuacccgguuuggcugcgc

SEQ ID NO: 4050246 - RNA, 19 nt, Rubella virus
cgcgacuugcuccccagcc

SEQ ID NO: 4050247 - RNA, 21 nt, Rubella virus
cgcgccccgagcuggggccac

SEQ ID NO: 4050248 - RNA, 16 nt, Rubella virus
cgcguggccugcgccc

SEQ ID NO: 4050249 - RNA, 12 nt, Rubella virus
cgcugggacccu

SEQ ID NO: 4050250 - RNA, 18 nt, Rubella virus
cggagugggcugcugccc

SEQ ID NO: 4050251 - RNA, 22 nt, Rubella virus
cggcacgcgcuggcaccgacug

SEQ ID NO: 4050252 - RNA, 15 nt, Rubella virus
cggccgcugggaccc

SEQ ID NO: 4050253 - RNA, 13 nt, Rubella virus
cggcugcgccugg

SEQ ID NO: 4050254 - RNA, 19 nt, Rubella virus
cggcuggacuugccgcggc

SEQ ID NO: 4050255 - RNA, 16 nt, Rubella virus
cgggcacgacggccau

SEQ ID NO: 4050256 - RNA, 18 nt, Rubella virus
cgggcucuugcucgccac

SEQ ID NO: 4050257 - RNA, 11 nt, Rubella virus
cguccugcugg

SEQ ID NO: 4050258 - RNA, 19 nt, Rubella virus
cgugacuccggagggcccc

SEQ ID NO: 4050259 - RNA, 20 nt, Rubella virus
cguggccugcgcccgccucu

SEQ ID NO: 4050260 - RNA, 16 nt, Rubella virus
cguggcgcguggccug

SEQ ID NO: 4050261 - RNA, 19 nt, Rubella virus
cgugggggcucugccccgc

SEQ ID NO: 4050262 - RNA, 15 nt, Rubella virus
cguguucgcccuugc

SEQ ID NO: 4050263 - RNA, 12 nt, Rubella virus
cucaccaccgcg

SEQ ID NO: 4050264 - RNA, 15 nt, Rubella virus
cuccaaggcggcugg

SEQ ID NO: 4050265 - RNA, 17 nt, Rubella virus
cuccaaggcggcugggg

SEQ ID NO: 4050266 - RNA, 15 nt, Rubella virus
cuccggagggccccg

SEQ ID NO: 4050267 - RNA, 20 nt, Rubella virus
cucggcccucuggcucgcca

SEQ ID NO: 4050268 - RNA, 12 nt, Rubella virus
cucucaccaccg

SEQ ID NO: 4050269 - RNA, 16 nt, Rubella virus
cugagcgacuggcacc

SEQ ID NO: 4050270 - RNA, 21 nt, Rubella virus
cugcgcuaugcgguggggccu

SEQ ID NO: 4050271 - RNA, 19 nt, Rubella virus
cugcugcgcaugccagugc

SEQ ID NO: 4050272 - RNA, 13 nt, Rubella virus
cuggcggcagcua

SEQ ID NO: 4050273 - RNA, 15 nt, Rubella virus
cugguguguggagca

SEQ ID NO: 4050274 - RNA, 17 nt, Rubella virus
cugucaacgccuacucc

SEQ ID NO: 4050275 - RNA, 21 nt, Rubella virus
cugucgccgccgcggcgccgc

SEQ ID NO: 4050276 - RNA, 17 nt, Rubella virus
cugugcgcacgggcagc

SEQ ID NO: 4050277 - RNA, 20 nt, Rubella virus
cuugucugggugcgggccga

SEQ ID NO: 4050278 - RNA, 13 nt, Rubella virus
gaaggccuugccc

SEQ ID NO: 4050279 - RNA, 19 nt, Rubella virus
gacacagcgacgcggccug

SEQ ID NO: 4050280 - RNA, 20 nt, Rubella virus
gacacagcgacgcggccugc

SEQ ID NO: 4050281 - RNA, 22 nt, Rubella virus
gacacagcgacgcggccugcug

SEQ ID NO: 4050282 - RNA, 17 nt, Rubella virus
gacagcugcggcggcuu

SEQ ID NO: 4050283 - RNA, 15 nt, Rubella virus
gacccggcagaccug

SEQ ID NO: 4050284 - RNA, 19 nt, Rubella virus
gacccggcgaggugugggu

SEQ ID NO: 4050285 - RNA, 21 nt, Rubella virus
gaccugcauuucaccaaccug

SEQ ID NO: 4050286 - RNA, 15 nt, Rubella virus
gacgacccccugcug

SEQ ID NO: 4050287 - RNA, 17 nt, Rubella virus
gacgaggacggccgcug

SEQ ID NO: 4050288 - RNA, 20 nt, Rubella virus
gacggccaucauggcggcac

SEQ ID NO: 4050289 - RNA, 18 nt, Rubella virus
gacggcgacagcgccccg

SEQ ID NO: 4050290 - RNA, 12 nt, Rubella virus
gacgugcugccc

SEQ ID NO: 4050291 - RNA, 15 nt, Rubella virus
gagagcgaucgcgcg

SEQ ID NO: 4050292 - RNA, 14 nt, Rubella virus
gaggacggccgcug

SEQ ID NO: 4050293 - RNA, 15 nt, Rubella virus
gagugggcugcugcc

SEQ ID NO: 4050294 - RNA, 16 nt, Rubella virus
gauccccgcaccuguu

SEQ ID NO: 4050295 - RNA, 12 nt, Rubella virus
gaugucucgugc

SEQ ID NO: 4050296 - RNA, 18 nt, Rubella virus
gauuguggacggcggcug

SEQ ID NO: 4050297 - RNA, 14 nt, Rubella virus
gcaccuguccccgu

SEQ ID NO: 4050298 - RNA, 16 nt, Rubella virus
gcauccaccgggcccc

SEQ ID NO: 4050299 - RNA, 21 nt, Rubella virus
gcauugagacccgcucggcgc

SEQ ID NO: 4050300 - RNA, 22 nt, Rubella virus
gccaccaccaccaucagcugcc

SEQ ID NO: 4050301 - RNA, 15 nt, Rubella virus
gccagcgcagggacu

SEQ ID NO: 4050302 - RNA, 17 nt, Rubella virus
gccccccaggccuuccu

SEQ ID NO: 4050303 - RNA, 21 nt, Rubella virus
gccccccugugcgcacgggca

SEQ ID NO: 4050304 - RNA, 15 nt, Rubella virus
gccccgagcuggggc

SEQ ID NO: 4050305 - RNA, 16 nt, Rubella virus
gccccgccccccccgg

SEQ ID NO: 4050306 - RNA, 16 nt, Rubella virus
gccgccacccccgcca

SEQ ID NO: 4050307 - RNA, 16 nt, Rubella virus
gccgcggcgugcccgc

SEQ ID NO: 4050308 - RNA, 18 nt, Rubella virus
gccgcugggacccugcgc

SEQ ID NO: 4050309 - RNA, 22 nt, Rubella virus
gccggccucaaugacagcugcg

SEQ ID NO: 4050310 - RNA, 16 nt, Rubella virus
gccucaacccccgcgc

SEQ ID NO: 4050311 - RNA, 23 nt, Rubella virus
gccucgcuagugggcccccgcgc

SEQ ID NO: 4050312 - RNA, 19 nt, Rubella virus
gccugcgugaccucguggc

SEQ ID NO: 4050313 - RNA, 17 nt, Rubella virus
gcgaaacccgcacuagg

SEQ ID NO: 4050314 - RNA, 21 nt, Rubella virus
gcgcauccgcuucggugcccc

SEQ ID NO: 4050315 - RNA, 22 nt, Rubella virus
gcgcauugagacccgcucggcg

SEQ ID NO: 4050316 - RNA, 17 nt, Rubella virus
gcgcugacacccggugc

SEQ ID NO: 4050317 - RNA, 21 nt, Rubella virus
gcggcuugugggggccacgcc

SEQ ID NO: 4050318 - RNA, 14 nt, Rubella virus
gcgggcuguccacc

SEQ ID NO: 4050319 - RNA, 20 nt, Rubella virus
gcgggcuguccaccaccgcc

SEQ ID NO: 4050320 - RNA, 16 nt, Rubella virus
gcgguggggccuuccc

SEQ ID NO: 4050321 - RNA, 15 nt, Rubella virus
gcuccaaggcggcug

SEQ ID NO: 4050322 - RNA, 16 nt, Rubella virus
gcugauauggcggcac

SEQ ID NO: 4050323 - RNA, 21 nt, Rubella virus
gcugcccauugguggcagcuc

SEQ ID NO: 4050324 - RNA, 15 nt, Rubella virus
gcugcccggccacug

SEQ ID NO: 4050325 - RNA, 18 nt, Rubella virus
gcugccgcagccccccug

SEQ ID NO: 4050326 - RNA, 17 nt, Rubella virus
gcugccguuccucgggc

SEQ ID NO: 4050327 - RNA, 18 nt, Rubella virus
gcugccguuccucgggca

SEQ ID NO: 4050328 - RNA, 15 nt, Rubella virus
gcugcgcacugcccc

SEQ ID NO: 4050329 - RNA, 18 nt, Rubella virus
gcuuucaccuaccucugc

SEQ ID NO: 4050330 - RNA, 18 nt, Rubella virus
ggacggccgcugggaccc

SEQ ID NO: 4050331 - RNA, 16 nt, Rubella virus
ggcaccgcgcgcgccg

SEQ ID NO: 4050332 - RNA, 22 nt, Rubella virus
ggcaccgcgcgcgccgggcucc

SEQ ID NO: 4050333 - RNA, 18 nt, Rubella virus
ggcagcauuacggccacc

SEQ ID NO: 4050334 - RNA, 23 nt, Rubella virus
ggccccgaagccaucgcgggcgc

SEQ ID NO: 4050335 - RNA, 16 nt, Rubella virus
ggcccucuggcucgcc

SEQ ID NO: 4050336 - RNA, 15 nt, Rubella virus
ggccgaugcgccugc

SEQ ID NO: 4050337 - RNA, 13 nt, Rubella virus
ggccugcuggggc

SEQ ID NO: 4050338 - RNA, 22 nt, Rubella virus
ggccuggguacccgcagccccu

SEQ ID NO: 4050339 - RNA, 14 nt, Rubella virus
ggccuuccccccug

SEQ ID NO: 4050340 - RNA, 17 nt, Rubella virus
ggcggagugggcugcug

SEQ ID NO: 4050341 - RNA, 23 nt, Rubella virus
ggcggcugcuuugccccauggga

SEQ ID NO: 4050342 - RNA, 15 nt, Rubella virus
ggcggcuucuugucu

SEQ ID NO: 4050343 - RNA, 15 nt, Rubella virus
ggcgugggggcucug

SEQ ID NO: 4050344 - RNA, 20 nt, Rubella virus
ggcuccaaggcggcuggggu

SEQ ID NO: 4050345 - RNA, 13 nt, Rubella virus
ggcuccagccccg

SEQ ID NO: 4050346 - RNA, 19 nt, Rubella virus
ggguacaacccccccgccu

SEQ ID NO: 4050347 - RNA, 20 nt, Rubella virus
ggguacaacccccccgccua

SEQ ID NO: 4050348 - RNA, 16 nt, Rubella virus
gguccagggccccgcc

SEQ ID NO: 4050349 - RNA, 12 nt, Rubella virus
guccagggcccc

SEQ ID NO: 4050350 - RNA, 14 nt, Rubella virus
gucccgcccgaccc

SEQ ID NO: 4050351 - RNA, 22 nt, Rubella virus
gucgccguuggcaccgcgcgcg

SEQ ID NO: 4050352 - RNA, 18 nt, Rubella virus
gugcaccuucugggcugu

SEQ ID NO: 4050353 - RNA, 15 nt, Rubella virus
gugccgccgcgccug

SEQ ID NO: 4050354 - RNA, 16 nt, Rubella virus
guggcgcguggccugc

SEQ ID NO: 4050355 - RNA, 12 nt, Rubella virus
gugggggcucug

SEQ ID NO: 4050356 - RNA, 22 nt, Rubella virus
guuccucgggcacgacggccau

SEQ ID NO: 4050357 - RNA, 21 nt, Rubella virus
uagauccccgcaccuguugcu

SEQ ID NO: 4050358 - RNA, 21 nt, Rubella virus
ucaacccuggcggcagcuacu

SEQ ID NO: 4050359 - RNA, 14 nt, Rubella virus
ucaccacugaacac

SEQ ID NO: 4050360 - RNA, 15 nt, Rubella virus
ucaccgccgcccucc

SEQ ID NO: 4050361 - RNA, 15 nt, Rubella virus
ucauggcggcaccuu

SEQ ID NO: 4050362 - RNA, 10 nt, Rubella virus
uccaccaccg

SEQ ID NO: 4050363 - RNA, 19 nt, Rubella virus
uccgcuucggugcccccca

SEQ ID NO: 4050364 - RNA, 21 nt, Rubella virus
uccuuaccgcccgccccgaag

SEQ ID NO: 4050365 - RNA, 22 nt, Rubella virus
ucgccgccgcggcgccgccgcc

SEQ ID NO: 4050366 - RNA, 14 nt, Rubella virus
ucgcgggcgccgcc

SEQ ID NO: 4050367 - RNA, 19 nt, Rubella virus
ucgcuagugggcccccgcg

SEQ ID NO: 4050368 - RNA, 23 nt, Rubella virus
ucuggcggguacgcgcagcuggc

SEQ ID NO: 4050369 - RNA, 19 nt, Rubella virus
ugacuccggagggccccgc

SEQ ID NO: 4050370 - RNA, 18 nt, Rubella virus
ugcaccggggugcgccac

SEQ ID NO: 4050371 - RNA, 15 nt, Rubella virus
ugcaccuucugggcu

SEQ ID NO: 4050372 - RNA, 13 nt, Rubella virus
ugccgcggcgugc

SEQ ID NO: 4050373 - RNA, 15 nt, Rubella virus
ugcgcacgggcagca

SEQ ID NO: 4050374 - RNA, 20 nt, Rubella virus
ugcgcggccucgacggcgac

SEQ ID NO: 4050375 - RNA, 23 nt, Rubella virus
ugcucgcggcuugugggggccac

SEQ ID NO: 4050376 - RNA, 20 nt, Rubella virus
ugcuggucccguggguccug

SEQ ID NO: 4050377 - RNA, 21 nt, Rubella virus
uggcacacagcgcgcgugcac

SEQ ID NO: 4050378 - RNA, 21 nt, Rubella virus
uggcauccaccgggccccuug

SEQ ID NO: 4050379 - RNA, 20 nt, Rubella virus
uggggccuuccccccuggga

SEQ ID NO: 4050380 - RNA, 14 nt, Rubella virus
uggugagccccaug

SEQ ID NO: 4050381 - RNA, 12 nt, Rubella virus
ugucgccgccgc

SEQ ID NO: 4050382 - RNA, 17 nt, Rubella virus
ugucgccgccgcggcgc

SEQ ID NO: 4050383 - RNA, 17 nt, Rubella virus
uucaccaaccugggcac

SEQ ID NO: 4050384 - RNA, 15 nt, SARS coronavirus
aaaacgaacaugaaa

SEQ ID NO: 4050385 - RNA, 22 nt, SARS coronavirus
aaaaugaaagagcucagcccca

SEQ ID NO: 4050386 - RNA, 15 nt, SARS coronavirus
aaacacucaugauga

SEQ ID NO: 4050387 - RNA, 22 nt, SARS coronavirus
aaacauucccaccaacagagcc

SEQ ID NO: 4050388 - RNA, 22 nt, SARS coronavirus
aaacugcccucgcgcuauugcu

SEQ ID NO: 4050389 - RNA, 14 nt, SARS coronavirus
aaacuuguguccuu

SEQ ID NO: 4050390 - RNA, 12 nt, SARS coronavirus
aaaucaaauguu

SEQ ID NO: 4050391 - RNA, 21 nt, SARS coronavirus
aaaucgccaaccaauuuaaca

SEQ ID NO: 4050392 - RNA, 20 nt, SARS coronavirus
aacaaaucgccaaccaauuu

SEQ ID NO: 4050393 - RNA, 18 nt, SARS coronavirus
aacaacauugccaaaagg

SEQ ID NO: 4050394 - RNA, 15 nt, SARS coronavirus
aacagagccuaaaaa

SEQ ID NO: 4050395 - RNA, 14 nt, SARS coronavirus
aacauacuucaucu

SEQ ID NO: 4050396 - RNA, 17 nt, SARS coronavirus
aacgucacucaagcauu

SEQ ID NO: 4050397 - RNA, 18 nt, SARS coronavirus
aacuaaucagggcugcug

SEQ ID NO: 4050398 - RNA, 18 nt, SARS coronavirus
aacugguguuauugcuga

SEQ ID NO: 4050399 - RNA, 14 nt, SARS coronavirus
aagaagcagcccac

SEQ ID NO: 4050400 - RNA, 17 nt, SARS coronavirus
aagagaucacuguggcu

SEQ ID NO: 4050401 - RNA, 22 nt, SARS coronavirus
aagcauuaaacacacuuguuaa

SEQ ID NO: 4050402 - RNA, 11 nt, SARS coronavirus
aagcucagccu

SEQ ID NO: 4050403 - RNA, 12 nt, SARS coronavirus
aagcucagccuu

SEQ ID NO: 4050404 - RNA, 14 nt, SARS coronavirus
aaggucaccaaacu

SEQ ID NO: 4050405 - RNA, 23 nt, SARS coronavirus
aauaaaccucaugugcuugaaga

SEQ ID NO: 4050406 - RNA, 19 nt, SARS coronavirus
aauaaauuugcacuaacuu

SEQ ID NO: 4050407 - RNA, 23 nt, SARS coronavirus
aauaaugcuagggagagcugccu

SEQ ID NO: 4050408 - RNA, 19 nt, SARS coronavirus
aauagcuucuuaggagaau

SEQ ID NO: 4050409 - RNA, 21 nt, SARS coronavirus
aauagugguccagaugaccaa

SEQ ID NO: 4050410 - RNA, 14 nt, SARS coronavirus
aaucugaacucuuc

SEQ ID NO: 4050411 - RNA, 17 nt, SARS coronavirus
aaugaaagagcucagcc

SEQ ID NO: 4050412 - RNA, 18 nt, SARS coronavirus
aaugaucuuugcuucucc

SEQ ID NO: 4050413 - RNA, 13 nt, SARS coronavirus
aauuaaaaugucu

SEQ ID NO: 4050414 - RNA, 21 nt, SARS coronavirus
aauuauuaugagauguuggcu

SEQ ID NO: 4050415 - RNA, 21 nt, SARS coronavirus
aauucuacuaauguuguuaua

SEQ ID NO: 4050416 - RNA, 12 nt, SARS coronavirus
acaaacauucuu

SEQ ID NO: 4050417 - RNA, 13 nt, SARS coronavirus
acaaauaauuacu

SEQ ID NO: 4050418 - RNA, 13 nt, SARS coronavirus
acaacaaggccaa

SEQ ID NO: 4050419 - RNA, 21 nt, SARS coronavirus
acaaguagguuuaguuaacuu

SEQ ID NO: 4050420 - RNA, 17 nt, SARS coronavirus
acaaucaaaaagaguug

SEQ ID NO: 4050421 - RNA, 21 nt, SARS coronavirus
acacagaggaacuucuuuucu

SEQ ID NO: 4050422 - RNA, 17 nt, SARS coronavirus
acacucaugaugaccac

SEQ ID NO: 4050423 - RNA, 18 nt, SARS coronavirus
acagagccuaaaaaggac

SEQ ID NO: 4050424 - RNA, 18 nt, SARS coronavirus
acagccuuuucaccugcu

SEQ ID NO: 4050425 - RNA, 20 nt, SARS coronavirus
acagccuuuucaccugcuca

SEQ ID NO: 4050426 - RNA, 23 nt, SARS coronavirus
acauuggccgcaaauugcacaau

SEQ ID NO: 4050427 - RNA, 15 nt, SARS coronavirus
accaaaacuuuucau

SEQ ID NO: 4050428 - RNA, 14 nt, SARS coronavirus
accaaacugcugca

SEQ ID NO: 4050429 - RNA, 18 nt, SARS coronavirus
acccaaaauguucucuau

SEQ ID NO: 4050430 - RNA, 19 nt, SARS coronavirus
acccaaggaaauuucgggg

SEQ ID NO: 4050431 - RNA, 13 nt, SARS coronavirus
accccaagguuua

SEQ ID NO: 4050432 - RNA, 17 nt, SARS coronavirus
acccgacgaguucgugg

SEQ ID NO: 4050433 - RNA, 21 nt, SARS coronavirus
accgugcuacaacuuccucaa

SEQ ID NO: 4050434 - RNA, 15 nt, SARS coronavirus
acgcauacaaaacau

SEQ ID NO: 4050435 - RNA, 13 nt, SARS coronavirus
acguuauaauaag

SEQ ID NO: 4050436 - RNA, 19 nt, SARS coronavirus
acuaaaagaaccuugccca

SEQ ID NO: 4050437 - RNA, 18 nt, SARS coronavirus
acuaagaaaucugcugcu

SEQ ID NO: 4050438 - RNA, 19 nt, SARS coronavirus
acuaagaaaucugcugcug

SEQ ID NO: 4050439 - RNA, 20 nt, SARS coronavirus
acuaagaaaucugcugcuga

SEQ ID NO: 4050440 - RNA, 21 nt, SARS coronavirus
acuaaucagggcugcugaaau

SEQ ID NO: 4050441 - RNA, 16 nt, SARS coronavirus
acucaaagaagacuac

SEQ ID NO: 4050442 - RNA, 20 nt, SARS coronavirus
acucagguguuaaagacuau

SEQ ID NO: 4050443 - RNA, 23 nt, SARS coronavirus
acucuuagaucaauuacugcaca

SEQ ID NO: 4050444 - RNA, 17 nt, SARS coronavirus
acugacaauaaccagaa

SEQ ID NO: 4050445 - RNA, 13 nt, SARS coronavirus
acugcugaacaag

SEQ ID NO: 4050446 - RNA, 18 nt, SARS coronavirus
acuucuauuaccuaggaa

SEQ ID NO: 4050447 - RNA, 17 nt, SARS coronavirus
acuucuauuugugcuuu

SEQ ID NO: 4050448 - RNA, 12 nt, SARS coronavirus
acuuuucaauua

SEQ ID NO: 4050449 - RNA, 12 nt, SARS coronavirus
agagacaaaaga

SEQ ID NO: 4050450 - RNA, 18 nt, SARS coronavirus
agagauauugauuaucau

SEQ ID NO: 4050451 - RNA, 15 nt, SARS coronavirus
agaucaguuucacca

SEQ ID NO: 4050452 - RNA, 21 nt, SARS coronavirus
agaucaguuucaccaaaacuu

SEQ ID NO: 4050453 - RNA, 17 nt, SARS coronavirus
agcgccaggacaaacug

SEQ ID NO: 4050454 - RNA, 23 nt, SARS coronavirus
agcugcaagacguuguuaaccag

SEQ ID NO: 4050455 - RNA, 21 nt, SARS coronavirus
aggaacugauuacaaacauug

SEQ ID NO: 4050456 - RNA, 16 nt, SARS coronavirus
aggacgcaauggggca

SEQ ID NO: 4050457 - RNA, 22 nt, SARS coronavirus
agggggguuuacuauccugaug

SEQ ID NO: 4050458 - RNA, 22 nt, SARS coronavirus
aguaaugccuguuucuauggcu

SEQ ID NO: 4050459 - RNA, 21 nt, SARS coronavirus
agucaagggagaugauguaag

SEQ ID NO: 4050460 - RNA, 20 nt, SARS coronavirus
aguuacccaaaauguucucu

SEQ ID NO: 4050461 - RNA, 15 nt, SARS coronavirus
auaacaaugcugcca

SEQ ID NO: 4050462 - RNA, 14 nt, SARS coronavirus
auaauggaccccaa

SEQ ID NO: 4050463 - RNA, 14 nt, SARS coronavirus
auacacccaaagac

SEQ ID NO: 4050464 - RNA, 20 nt, SARS coronavirus
auaccuacuaacuuuucaau

SEQ ID NO: 4050465 - RNA, 16 nt, SARS coronavirus
auacuuauagcacugc

SEQ ID NO: 4050466 - RNA, 12 nt, SARS coronavirus
aucauuaacaac

SEQ ID NO: 4050467 - RNA, 16 nt, SARS coronavirus
aucuuggcgacauuuc

SEQ ID NO: 4050468 - RNA, 14 nt, SARS coronavirus
augaaagagcucag

SEQ ID NO: 4050469 - RNA, 17 nt, SARS coronavirus
augaaagagcucagccc

SEQ ID NO: 4050470 - RNA, 15 nt, SARS coronavirus
augaagcucagccuu

SEQ ID NO: 4050471 - RNA, 17 nt, SARS coronavirus
augaaggcaaagcauac

SEQ ID NO: 4050472 - RNA, 23 nt, SARS coronavirus
augacaaagauccacaauucaaa

SEQ ID NO: 4050473 - RNA, 20 nt, SARS coronavirus
augagauguuggcuuuguug

SEQ ID NO: 4050474 - RNA, 16 nt, SARS coronavirus
ccaggaucuagaagaa

SEQ ID NO: 4050475 - RNA, 14 nt, SARS coronavirus
ccauuaaaugauua

SEQ ID NO: 4050476 - RNA, 21 nt, SARS coronavirus
ccauuaaauuggaugacaaag

SEQ ID NO: 4050477 - RNA, 14 nt, SARS coronavirus
cccaggagaggaac

SEQ ID NO: 4050478 - RNA, 17 nt, SARS coronavirus
ccgcagagacaaaagaa

SEQ ID NO: 4050479 - RNA, 18 nt, SARS coronavirus
ccgcauuacauuuggugg

SEQ ID NO: 4050480 - RNA, 20 nt, SARS coronavirus
ccgugcuacaacuuccucaa

SEQ ID NO: 4050481 - RNA, 20 nt, SARS coronavirus
ccuacggcgcuaacaaagaa

SEQ ID NO: 4050482 - RNA, 21 nt, SARS coronavirus
ccuaggaacuggcccagaagc

SEQ ID NO: 4050483 - RNA, 14 nt, SARS coronavirus
ccuauuggagcugg

SEQ ID NO: 4050484 - RNA, 15 nt, SARS coronavirus
ccuauuuuguuggcu

SEQ ID NO: 4050485 - RNA, 18 nt, SARS coronavirus
ccucuucucgcuccucau

SEQ ID NO: 4050486 - RNA, 17 nt, SARS coronavirus
ccuggcagcaguagggg

SEQ ID NO: 4050487 - RNA, 20 nt, SARS coronavirus
ccuugcaccccaccugcucu

SEQ ID NO: 4050488 - RNA, 21 nt, SARS coronavirus
ccuugcaccccaccugcucuu

SEQ ID NO: 4050489 - RNA, 24 nt, SARS coronavirus
ccuuuaagugcuauggcguuucug

SEQ ID NO: 4050490 - RNA, 13 nt, SARS coronavirus
cgaacaaauuaaa

SEQ ID NO: 4050491 - RNA, 22 nt, SARS coronavirus
cgauaaugcauuuaauugcacu

SEQ ID NO: 4050492 - RNA, 14 nt, SARS coronavirus
cgcuauugcugcua

SEQ ID NO: 4050493 - RNA, 22 nt, SARS coronavirus
cgggggacaauugugaccagac

SEQ ID NO: 4050494 - RNA, 19 nt, SARS coronavirus
cgguacucgacauaccuau

SEQ ID NO: 4050495 - RNA, 16 nt, SARS coronavirus
cuaaaaaggacaaaaa

SEQ ID NO: 4050496 - RNA, 16 nt, SARS coronavirus
cuaauccagcaaugga

SEQ ID NO: 4050497 - RNA, 15 nt, SARS coronavirus
cuaaucuugcugcua

SEQ ID NO: 4050498 - RNA, 20 nt, SARS coronavirus
cuaauuuuggugcaauuuca

SEQ ID NO: 4050499 - RNA, 17 nt, SARS coronavirus
cuacaucacgaacgcuu

SEQ ID NO: 4050500 - RNA, 16 nt, SARS coronavirus
cuacauuuaugcucaa

SEQ ID NO: 4050501 - RNA, 13 nt, SARS coronavirus
cuaccgaagagcu

SEQ ID NO: 4050502 - RNA, 16 nt, SARS coronavirus
cuagagaucucauuug

SEQ ID NO: 4050503 - RNA, 21 nt, SARS coronavirus
cuaguuagugguacugccacu

SEQ ID NO: 4050504 - RNA, 14 nt, SARS coronavirus
cuauccugaugaaa

SEQ ID NO: 4050505 - RNA, 19 nt, SARS coronavirus
cuauuccuuguuuuaauaa

SEQ ID NO: 4050506 - RNA, 14 nt, SARS coronavirus
cuauuuguuaccau

SEQ ID NO: 4050507 - RNA, 12 nt, SARS coronavirus
cucacucagcau

SEQ ID NO: 4050508 - RNA, 17 nt, SARS coronavirus
cucacucagcauggcaa

SEQ ID NO: 4050509 - RNA, 22 nt, SARS coronavirus
cucacugaugauaugauugcug

SEQ ID NO: 4050510 - RNA, 19 nt, SARS coronavirus
cucagcauggcaaggagga

SEQ ID NO: 4050511 - RNA, 16 nt, SARS coronavirus
cucauuguugcugcuc

SEQ ID NO: 4050512 - RNA, 23 nt, SARS coronavirus
cuccgggggacaauugugaccag

SEQ ID NO: 4050513 - RNA, 13 nt, SARS coronavirus
cuccuggcagcag

SEQ ID NO: 4050514 - RNA, 17 nt, SARS coronavirus
cucgcgcuauugcugcu

SEQ ID NO: 4050515 - RNA, 15 nt, SARS coronavirus
cucuugcugacaaua

SEQ ID NO: 4050516 - RNA, 14 nt, SARS coronavirus
cugagcuugacuca

SEQ ID NO: 4050517 - RNA, 21 nt, SARS coronavirus
cugaugauaugauugcugccu

SEQ ID NO: 4050518 - RNA, 15 nt, SARS coronavirus
cugauuacaaacauu

SEQ ID NO: 4050519 - RNA, 18 nt, SARS coronavirus
cugcaaguacuguucaug

SEQ ID NO: 4050520 - RNA, 24 nt, SARS coronavirus
cugcaaguacuguucaugcuacag

SEQ ID NO: 4050521 - RNA, 20 nt, SARS coronavirus
cugccaaaagagaucacugu

SEQ ID NO: 4050522 - RNA, 13 nt, SARS coronavirus
cugcucgaauggc

SEQ ID NO: 4050523 - RNA, 21 nt, SARS coronavirus
cuggaacaaaugcuucaucug

SEQ ID NO: 4050524 - RNA, 14 nt, SARS coronavirus
cuggucuaaacgaa

SEQ ID NO: 4050525 - RNA, 20 nt, SARS coronavirus
cuguaguacagcgcugugca

SEQ ID NO: 4050526 - RNA, 16 nt, SARS coronavirus
cuguugauuguucuca

SEQ ID NO: 4050527 - RNA, 21 nt, SARS coronavirus
cuuauguccuucccacaagca

SEQ ID NO: 4050528 - RNA, 21 nt, SARS coronavirus
cuucaggcuguuugcucguac

SEQ ID NO: 4050529 - RNA, 22 nt, SARS coronavirus
cuucuccaaugucuaugcagau

SEQ ID NO: 4050530 - RNA, 22 nt, SARS coronavirus
cuucugcuaaucuugcugcuac

SEQ ID NO: 4050531 - RNA, 13 nt, SARS coronavirus
cuugaaagagcca

SEQ ID NO: 4050532 - RNA, 12 nt, SARS coronavirus
cuugaagauccu

SEQ ID NO: 4050533 - RNA, 22 nt, SARS coronavirus
cuugagagcaaaguuucuggua

SEQ ID NO: 4050534 - RNA, 17 nt, SARS coronavirus
cuugcuagucacacuag

SEQ ID NO: 4050535 - RNA, 10 nt, SARS coronavirus
cuugcugcug

SEQ ID NO: 4050536 - RNA, 24 nt, SARS coronavirus
cuugcuuucgugguauucuugcua

SEQ ID NO: 4050537 - RNA, 23 nt, SARS coronavirus
cuugguuuauuacacagaggaac

SEQ ID NO: 4050538 - RNA, 14 nt, SARS coronavirus
cuuuaauugacuuc

SEQ ID NO: 4050539 - RNA, 22 nt, SARS coronavirus
cuuuaggugcugauaguucaau

SEQ ID NO: 4050540 - RNA, 16 nt, SARS coronavirus
cuuugaaauauuuugg

SEQ ID NO: 4050541 - RNA, 20 nt, SARS coronavirus
cuuugcuucaccauuaagag

SEQ ID NO: 4050542 - RNA, 13 nt, SARS coronavirus
cuuugugcucuag

SEQ ID NO: 4050543 - RNA, 22 nt, SARS coronavirus
cuuuucuccacaaauaauuacu

SEQ ID NO: 4050544 - RNA, 21 nt, SARS coronavirus
guauugaaaaugcuacauucu

SEQ ID NO: 4050545 - RNA, 19 nt, SARS coronavirus
guauuuuuaauacuuugcu

SEQ ID NO: 4050546 - RNA, 19 nt, SARS coronavirus
gugacaacagauguuucau

SEQ ID NO: 4050547 - RNA, 21 nt, SARS coronavirus
gugacaacagauguuucaucu

SEQ ID NO: 4050548 - RNA, 17 nt, SARS coronavirus
gugcaccacuuuugaug

SEQ ID NO: 4050549 - RNA, 13 nt, SARS coronavirus
gugcuugcugcug

SEQ ID NO: 4050550 - RNA, 15 nt, SARS coronavirus
guggucauucaaccc

SEQ ID NO: 4050551 - RNA, 13 nt, SARS coronavirus
guguaaaauuaau

SEQ ID NO: 4050552 - RNA, 14 nt, SARS coronavirus
guuagauuauccau

SEQ ID NO: 4050553 - RNA, 21 nt, SARS coronavirus
guuagauuauccauaaaacga

SEQ ID NO: 4050554 - RNA, 19 nt, SARS coronavirus
guugacuuccagguuacaa

SEQ ID NO: 4050555 - RNA, 23 nt, SARS coronavirus
guuucaccaaaacuuuucaucag

SEQ ID NO: 4050556 - RNA, 16 nt, SARS coronavirus
guuuuaaauaaacgaa

SEQ ID NO: 4050557 - RNA, 18 nt, SARS coronavirus
guuuuuaaugcuacuaaa

SEQ ID NO: 4050558 - RNA, 18 nt, SARS coronavirus
uaaaaagccucgccaaaa

SEQ ID NO: 4050559 - RNA, 14 nt, SARS coronavirus
uaaacaacuccugg

SEQ ID NO: 4050560 - RNA, 16 nt, SARS coronavirus
uaaacaacuccuggaa

SEQ ID NO: 4050561 - RNA, 15 nt, SARS coronavirus
uaacugcacugaugu

SEQ ID NO: 4050562 - RNA, 21 nt, SARS coronavirus
uaagagaaagacagaaugaau

SEQ ID NO: 4050563 - RNA, 13 nt, SARS coronavirus
uaauaacaaugcu

SEQ ID NO: 4050564 - RNA, 18 nt, SARS coronavirus
uaauacuuugcuucacca

SEQ ID NO: 4050565 - RNA, 15 nt, SARS coronavirus
uaaugccuguuucua

SEQ ID NO: 4050566 - RNA, 16 nt, SARS coronavirus
uaauucaagaaauuca

SEQ ID NO: 4050567 - RNA, 15 nt, SARS coronavirus
uaauugacuucuauu

SEQ ID NO: 4050568 - RNA, 17 nt, SARS coronavirus
uaauuguguugcugauu

SEQ ID NO: 4050569 - RNA, 14 nt, SARS coronavirus
uacaaaacauuccc

SEQ ID NO: 4050570 - RNA, 16 nt, SARS coronavirus
uacaguguugccaccu

SEQ ID NO: 4050571 - RNA, 20 nt, SARS coronavirus
uacaucaccagauguugauc

SEQ ID NO: 4050572 - RNA, 12 nt, SARS coronavirus
uacauuacacau

SEQ ID NO: 4050573 - RNA, 17 nt, SARS coronavirus
uacuacaauuugccuau

SEQ ID NO: 4050574 - RNA, 21 nt, SARS coronavirus
uacuacagacaauacauuugu

SEQ ID NO: 4050575 - RNA, 23 nt, SARS coronavirus
uacucuaauaacaccauugcuau

SEQ ID NO: 4050576 - RNA, 22 nt, SARS coronavirus
uaguauuuuuaauacuuugcuu

SEQ ID NO: 4050577 - RNA, 17 nt, SARS coronavirus
uagugagacaauuauuu

SEQ ID NO: 4050578 - RNA, 16 nt, SARS coronavirus
uauaaauugccagaug

SEQ ID NO: 4050579 - RNA, 15 nt, SARS coronavirus
uauuagacauuucac

SEQ ID NO: 4050580 - RNA, 19 nt, SARS coronavirus
uauuccuagccuggauuau

SEQ ID NO: 4050581 - RNA, 15 nt, SARS coronavirus
uauucgauaaugcau

SEQ ID NO: 4050582 - RNA, 18 nt, SARS coronavirus
uauucggaguuagaugau

SEQ ID NO: 4050583 - RNA, 14 nt, SARS coronavirus
uauugauuaucauu

SEQ ID NO: 4050584 - RNA, 19 nt, SARS coronavirus
uauuuauuuugcugccaca

SEQ ID NO: 4050585 - RNA, 12 nt, SARS coronavirus
ucaacaauuugg

SEQ ID NO: 4050586 - RNA, 14 nt, SARS coronavirus
ucaacgcauguaga

SEQ ID NO: 4050587 - RNA, 16 nt, SARS coronavirus
ucaacuccuggcagca

SEQ ID NO: 4050588 - RNA, 21 nt, SARS coronavirus
ucaacugucaagauccagcug

SEQ ID NO: 4050589 - RNA, 19 nt, SARS coronavirus
ucaagaaauucaacuccug

SEQ ID NO: 4050590 - RNA, 20 nt, SARS coronavirus
ucaagaaauucaacuccugg

SEQ ID NO: 4050591 - RNA, 20 nt, SARS coronavirus
ucaagcauuaaacacacuug

SEQ ID NO: 4050592 - RNA, 22 nt, SARS coronavirus
ucaagccucuucucgcuccuca

SEQ ID NO: 4050593 - RNA, 23 nt, SARS coronavirus
ucaagccucuucucgcuccucau

SEQ ID NO: 4050594 - RNA, 21 nt, SARS coronavirus
ucacagcucucacucagcaug

SEQ ID NO: 4050595 - RNA, 14 nt, SARS coronavirus
ucaccaaacugcug

SEQ ID NO: 4050596 - RNA, 22 nt, SARS coronavirus
ucacucauugaccuucaagaau

SEQ ID NO: 4050597 - RNA, 20 nt, SARS coronavirus
ucacuuuaauugacuucuau

SEQ ID NO: 4050598 - RNA, 15 nt, SARS coronavirus
ucagcauggcaagga

SEQ ID NO: 4050599 - RNA, 14 nt, SARS coronavirus
ucauuguugcugcu

SEQ ID NO: 4050600 - RNA, 15 nt, SARS coronavirus
ucauuguugcugcuc

SEQ ID NO: 4050601 - RNA, 13 nt, SARS coronavirus
uccaaucaacacc

SEQ ID NO: 4050602 - RNA, 13 nt, SARS coronavirus
uccagaacaaacc

SEQ ID NO: 4050603 - RNA, 22 nt, SARS coronavirus
uccagaacaaacccaaggaaau

SEQ ID NO: 4050604 - RNA, 15 nt, SARS coronavirus
uccagaugaccaaau

SEQ ID NO: 4050605 - RNA, 18 nt, SARS coronavirus
ucccaccaacagagccua

SEQ ID NO: 4050606 - RNA, 23 nt, SARS coronavirus
uccugcaaguacuguucaugcua

SEQ ID NO: 4050607 - RNA, 17 nt, SARS coronavirus
ucgccacuuuuucucau

SEQ ID NO: 4050608 - RNA, 17 nt, SARS coronavirus
ucgcgcuauugcugcua

SEQ ID NO: 4050609 - RNA, 12 nt, SARS coronavirus
ucuaauuucagg

SEQ ID NO: 4050610 - RNA, 22 nt, SARS coronavirus
ucuaguuagugguacugccacu

SEQ ID NO: 4050611 - RNA, 13 nt, SARS coronavirus
ucuauaucaagau

SEQ ID NO: 4050612 - RNA, 16 nt, SARS coronavirus
ucuauaucaagauguu

SEQ ID NO: 4050613 - RNA, 20 nt, SARS coronavirus
ucuaugagaaccaaaaacaa

SEQ ID NO: 4050614 - RNA, 17 nt, SARS coronavirus
ucucauuguugcugcuc

SEQ ID NO: 4050615 - RNA, 20 nt, SARS coronavirus
ucuccugcaaguacuguuca

SEQ ID NO: 4050616 - RNA, 13 nt, SARS coronavirus
ucugucuaugcau

SEQ ID NO: 4050617 - RNA, 18 nt, SARS coronavirus
ucuuccauuuuauucuaa

SEQ ID NO: 4050618 - RNA, 13 nt, SARS coronavirus
ugaaacuucucau

SEQ ID NO: 4050619 - RNA, 11 nt, SARS coronavirus
ugaaagagcuc

SEQ ID NO: 4050620 - RNA, 13 nt, SARS coronavirus
ugaacucuucuga

SEQ ID NO: 4050621 - RNA, 14 nt, SARS coronavirus
ugaacucuucugaa

SEQ ID NO: 4050622 - RNA, 17 nt, SARS coronavirus
ugaacucuucugaagga

SEQ ID NO: 4050623 - RNA, 15 nt, SARS coronavirus
ugaacuuuuaaaugc

SEQ ID NO: 4050624 - RNA, 21 nt, SARS coronavirus
ugaaggucaccaaacugcugc

SEQ ID NO: 4050625 - RNA, 20 nt, SARS coronavirus
ugacaaagauccacaauuca

SEQ ID NO: 4050626 - RNA, 22 nt, SARS coronavirus
ugacaauaaccagaauggagga

SEQ ID NO: 4050627 - RNA, 22 nt, SARS coronavirus
ugacgcauacaaaacauuccca

SEQ ID NO: 4050628 - RNA, 20 nt, SARS coronavirus
ugacggcaaaaugaaagagc

SEQ ID NO: 4050629 - RNA, 15 nt, SARS coronavirus
ugacguuauaauaag

SEQ ID NO: 4050630 - RNA, 19 nt, SARS coronavirus
ugacuuccagguuacaaua

SEQ ID NO: 4050631 - RNA, 18 nt, SARS coronavirus
ugacuucuauuugugcuu

SEQ ID NO: 4050632 - RNA, 16 nt, SARS coronavirus
ugagagagacauaucu

SEQ ID NO: 4050633 - RNA, 14 nt, SARS coronavirus
ugauauuaaugcua

SEQ ID NO: 4050634 - RNA, 14 nt, SARS coronavirus
ugaugaaaauggua

SEQ ID NO: 4050635 - RNA, 22 nt, SARS coronavirus
ugauguuucuacagcaauucau

SEQ ID NO: 4050636 - RNA, 19 nt, SARS coronavirus
ugauguuucugauuucacu

SEQ ID NO: 4050637 - RNA, 13 nt, SARS coronavirus
ugauuacaaacau

SEQ ID NO: 4050638 - RNA, 19 nt, SARS coronavirus
ugauucagguuuugcugca

SEQ ID NO: 4050639 - RNA, 20 nt, SARS coronavirus
ugauuccguucgagauccua

SEQ ID NO: 4050640 - RNA, 21 nt, SARS coronavirus
ugauuucuccagacaacuuca

SEQ ID NO: 4050641 - RNA, 19 nt, SARS coronavirus
ugcaagaucaguuucacca

SEQ ID NO: 4050642 - RNA, 18 nt, SARS coronavirus
ugcaauuuacugcugcua

SEQ ID NO: 4050643 - RNA, 22 nt, SARS coronavirus
ugcacuagcacacacuuugcuu

SEQ ID NO: 4050644 - RNA, 13 nt, SARS coronavirus
ugcaguugccuca

SEQ ID NO: 4050645 - RNA, 23 nt, SARS coronavirus
ugcaugggagagaaaaaaaauuu

SEQ ID NO: 4050646 - RNA, 23 nt, SARS coronavirus
ugccaaaaggcuucuacgcagag

SEQ ID NO: 4050647 - RNA, 14 nt, SARS coronavirus
ugccaccucugcuc

SEQ ID NO: 4050648 - RNA, 20 nt, SARS coronavirus
ugcccucgcgcuauugcugc

SEQ ID NO: 4050649 - RNA, 13 nt, SARS coronavirus
ugccuauucuaau

SEQ ID NO: 4050650 - RNA, 17 nt, SARS coronavirus
ugcuaaucuugcugcua

SEQ ID NO: 4050651 - RNA, 20 nt, SARS coronavirus
ugcuaauuugcuucuccaau

SEQ ID NO: 4050652 - RNA, 16 nt, SARS coronavirus
ugcuacaacuuccuca

SEQ ID NO: 4050653 - RNA, 19 nt, SARS coronavirus
ugcuagagaucucauuugu

SEQ ID NO: 4050654 - RNA, 15 nt, SARS coronavirus
ugcuuaucauggcag

SEQ ID NO: 4050655 - RNA, 18 nt, SARS coronavirus
uggaaacuauaaauuaaa

SEQ ID NO: 4050656 - RNA, 20 nt, SARS coronavirus
uggaagucacaccuucggga

SEQ ID NO: 4050657 - RNA, 20 nt, SARS coronavirus
uggaaugucacgcauuggca

SEQ ID NO: 4050658 - RNA, 15 nt, SARS coronavirus
uggagcuucugcuga

SEQ ID NO: 4050659 - RNA, 15 nt, SARS coronavirus
uggcgacauuucagg

SEQ ID NO: 4050660 - RNA, 19 nt, SARS coronavirus
uggcuacuaccgaagagcu

SEQ ID NO: 4050661 - RNA, 15 nt, SARS coronavirus
uggcuauuucaccga

SEQ ID NO: 4050662 - RNA, 23 nt, SARS coronavirus
ugggagagaaaaaaaauuucuaa

SEQ ID NO: 4050663 - RNA, 22 nt, SARS coronavirus
ugguaccuucaugaaggucacc

SEQ ID NO: 4050664 - RNA, 20 nt, SARS coronavirus
ugguauuuauuuugcugcca

SEQ ID NO: 4050665 - RNA, 18 nt, SARS coronavirus
uggugguuauucugagga

SEQ ID NO: 4050666 - RNA, 15 nt, SARS coronavirus
ugucgucaacauuca

SEQ ID NO: 4050667 - RNA, 16 nt, SARS coronavirus
ugucguuacugaaggu

SEQ ID NO: 4050668 - RNA, 13 nt, SARS coronavirus
ugugacucuucuu

SEQ ID NO: 4050669 - RNA, 13 nt, SARS coronavirus
ugugucaauuuua

SEQ ID NO: 4050670 - RNA, 21 nt, SARS coronavirus
uguuauuggccauuaaaugau

SEQ ID NO: 4050671 - RNA, 16 nt, SARS coronavirus
uguucuauaucaagau

SEQ ID NO: 4050672 - RNA, 20 nt, SARS coronavirus
uguugcaguugccucaaggg

SEQ ID NO: 4050673 - RNA, 20 nt, SARS coronavirus
uguugucuuccuacauguca

SEQ ID NO: 4050674 - RNA, 14 nt, SARS coronavirus
uguuuauuuucuua

SEQ ID NO: 4050675 - RNA, 18 nt, SARS coronavirus
uuaaauaaacgaacaaau

SEQ ID NO: 4050676 - RNA, 22 nt, SARS coronavirus
uuaaggaugguauuuauuuugc

SEQ ID NO: 4050677 - RNA, 14 nt, SARS coronavirus
uuacaaauuuuaga

SEQ ID NO: 4050678 - RNA, 12 nt, SARS coronavirus
uuacugcugcua

SEQ ID NO: 4050679 - RNA, 20 nt, SARS coronavirus
uuagacauuucaccuugcgc

SEQ ID NO: 4050680 - RNA, 20 nt, SARS coronavirus
uuauaaauauagguaucuua

SEQ ID NO: 4050681 - RNA, 21 nt, SARS coronavirus
uuauccauaaaacgaacauga

SEQ ID NO: 4050682 - RNA, 12 nt, SARS coronavirus
uucaaacaugca

SEQ ID NO: 4050683 - RNA, 19 nt, SARS coronavirus
uucaauagugagacaauua

SEQ ID NO: 4050684 - RNA, 17 nt, SARS coronavirus
uucccaccaacagagcc

SEQ ID NO: 4050685 - RNA, 13 nt, SARS coronavirus
uucucuuccugac

SEQ ID NO: 4050686 - RNA, 22 nt, SARS coronavirus
uucugucgucaacauucaaaaa

SEQ ID NO: 4050687 - RNA, 15 nt, SARS coronavirus
uugccaccucugcuc

SEQ ID NO: 4050688 - RNA, 14 nt, SARS coronavirus
uugccuauucuaau

SEQ ID NO: 4050689 - RNA, 20 nt, SARS coronavirus
uugccucaagggugcaugcu

SEQ ID NO: 4050690 - RNA, 14 nt, SARS coronavirus
uugcuauuuggaau

SEQ ID NO: 4050691 - RNA, 18 nt, SARS coronavirus
uugcugccuacacugcug

SEQ ID NO: 4050692 - RNA, 15 nt, SARS coronavirus
uugugcuaguuacca

SEQ ID NO: 4050693 - RNA, 15 nt, SARS coronavirus
uugugcuugcugcug

SEQ ID NO: 4050694 - RNA, 12 nt, SARS coronavirus
uuguugcugcuc

SEQ ID NO: 4050695 - RNA, 18 nt, SARS coronavirus
uuuaccagaccucuaauu

SEQ ID NO: 4050696 - RNA, 22 nt, SARS coronavirus
uuuacgauacauagucuacucu

SEQ ID NO: 4050697 - RNA, 16 nt, SARS coronavirus
uuuacuaccagcuuga

SEQ ID NO: 4050698 - RNA, 13 nt, SARS coronavirus
uuuacugcugcua

SEQ ID NO: 4050699 - RNA, 18 nt, SARS coronavirus
uuugacuuguauuucucu

SEQ ID NO: 4050700 - RNA, 16 nt, SARS coronavirus
uuuggugguuuuaauu

SEQ ID NO: 4050701 - RNA, 19 nt, SARS coronavirus
gacgaguucguggugguga

SEQ ID NO: 4050702 - RNA, 15 nt, SARS coronavirus
gacgugguccagaac

SEQ ID NO: 4050703 - RNA, 19 nt, SARS coronavirus
gacuacuguauaccauaua

SEQ ID NO: 4050704 - RNA, 20 nt, SARS coronavirus
gacugaugaagcucagccuu

SEQ ID NO: 4050705 - RNA, 21 nt, SARS coronavirus
gagauguuggcuuuguuggaa

SEQ ID NO: 4050706 - RNA, 20 nt, SARS coronavirus
gagccaguucucaagggugu

SEQ ID NO: 4050707 - RNA, 22 nt, SARS coronavirus
gagccuaaaaaggacaaaaaga

SEQ ID NO: 4050708 - RNA, 21 nt, SARS coronavirus
gaggacgcaauggggcaaggc

SEQ ID NO: 4050709 - RNA, 17 nt, SARS coronavirus
gaguuagaugaugaaga

SEQ ID NO: 4050710 - RNA, 19 nt, SARS coronavirus
gaguugcuaauccagcaau

SEQ ID NO: 4050711 - RNA, 14 nt, SARS coronavirus
gaugaagcucagcc

SEQ ID NO: 4050712 - RNA, 16 nt, SARS coronavirus
gauugcgauugcaaug

SEQ ID NO: 4050713 - RNA, 16 nt, SARS coronavirus
gauuucuccagacaac

SEQ ID NO: 4050714 - RNA, 20 nt, SARS coronavirus
gcaacgacaauauugcuuug

SEQ ID NO: 4050715 - RNA, 17 nt, SARS coronavirus
gcaauggggcaaggcca

SEQ ID NO: 4050716 - RNA, 17 nt, SARS coronavirus
gcaauuuacugcugcua

SEQ ID NO: 4050717 - RNA, 17 nt, SARS coronavirus
gcacacacuuugcuuuu

SEQ ID NO: 4050718 - RNA, 14 nt, SARS coronavirus
gcagauucuuuugu

SEQ ID NO: 4050719 - RNA, 19 nt, SARS coronavirus
gcaguugccucaagggugc

SEQ ID NO: 4050720 - RNA, 16 nt, SARS coronavirus
gcauguaacuuugaau

SEQ ID NO: 4050721 - RNA, 12 nt, SARS coronavirus
gccacugcugga

SEQ ID NO: 4050722 - RNA, 22 nt, SARS coronavirus
gcccucgcgcuauugcugcuag

SEQ ID NO: 4050723 - RNA, 14 nt, SARS coronavirus
gcgcuaacaaagaa

SEQ ID NO: 4050724 - RNA, 23 nt, SARS coronavirus
gcguacuucuuuuucuugcuuuc

SEQ ID NO: 4050725 - RNA, 17 nt, SARS coronavirus
gcguuccaaucaacacc

SEQ ID NO: 4050726 - RNA, 14 nt, SARS coronavirus
gcuacaacuuccuc

SEQ ID NO: 4050727 - RNA, 15 nt, SARS coronavirus
gcuauaccuacuaac

SEQ ID NO: 4050728 - RNA, 13 nt, SARS coronavirus
gcucaauaaaaga

SEQ ID NO: 4050729 - RNA, 13 nt, SARS coronavirus
gcucaaugugguc

SEQ ID NO: 4050730 - RNA, 20 nt, SARS coronavirus
gcuccaagugccucugcauu

SEQ ID NO: 4050731 - RNA, 21 nt, SARS coronavirus
gcucuugugguucuugcugca

SEQ ID NO: 4050732 - RNA, 16 nt, SARS coronavirus
gcugaacaagcacauu

SEQ ID NO: 4050733 - RNA, 19 nt, SARS coronavirus
gcugaacucaaaugcucug

SEQ ID NO: 4050734 - RNA, 18 nt, SARS coronavirus
gcugccaccgugcuacaa

SEQ ID NO: 4050735 - RNA, 19 nt, SARS coronavirus
gcugccuacacugcugcuc

SEQ ID NO: 4050736 - RNA, 17 nt, SARS coronavirus
gcuugagucuacacaaa

SEQ ID NO: 4050737 - RNA, 14 nt, SARS coronavirus
gcuugauguggcuu

SEQ ID NO: 4050738 - RNA, 13 nt, SARS coronavirus
gcuugugcugacg

SEQ ID NO: 4050739 - RNA, 15 nt, SARS coronavirus
ggaacaacauugcca

SEQ ID NO: 4050740 - RNA, 11 nt, SARS coronavirus
ggagaggaacu

SEQ ID NO: 4050741 - RNA, 20 nt, SARS coronavirus
ggaggacuugaaagagccac

SEQ ID NO: 4050742 - RNA, 19 nt, SARS coronavirus
ggcaaaaugaaagagcuca

SEQ ID NO: 4050743 - RNA, 22 nt, SARS coronavirus
ggccaaacugucacuaagaaau

SEQ ID NO: 4050744 - RNA, 16 nt, SARS coronavirus
ggccauuaaaugauua

SEQ ID NO: 4050745 - RNA, 12 nt, SARS coronavirus
ggcucuucagga

SEQ ID NO: 4050746 - RNA, 23 nt, SARS coronavirus
ggcuucuacgcagagggaagcag

SEQ ID NO: 4050747 - RNA, 23 nt, SARS coronavirus
ggcuucugcuaaucuugcugcua

SEQ ID NO: 4050748 - RNA, 17 nt, SARS coronavirus
ggggaaauucuccugcu

SEQ ID NO: 4050749 - RNA, 12 nt, SARS coronavirus
gguauucuugcu

SEQ ID NO: 4050750 - RNA, 17 nt, SARS coronavirus
ggucaccaaacugcugc

SEQ ID NO: 4050751 - RNA, 18 nt, SARS coronavirus
guaaaaauugacaaugcu

SEQ ID NO: 4050752 - RNA, 22 nt, SARS coronavirus
guaacacaacaacuaaucaggg

SEQ ID NO: 4050753 - RNA, 15 nt, SARS coronavirus
guaaugccuguuucu

SEQ ID NO: 4050754 - RNA, 22 nt, SARS coronavirus
guacgacuguacuacuaaaaga

SEQ ID NO: 4050755 - RNA, 23 nt, SARS coronavirus
gucacuaagaaaucugcugcuga

SEQ ID NO: 4050756 - RNA, 13 nt, SARS coronavirus
gucauacugcuga

SEQ ID NO: 4050757 - RNA, 17 nt, SARS coronavirus
guccagaugaccaaauu

SEQ ID NO: 4050758 - RNA, 14 nt, SARS coronavirus
gugcguacugcugc

SEQ ID NO: 4050759 - RNA, 17 nt, SARS coronavirus
guguugguaccuucaug

SEQ ID NO: 4050760 - RNA, 14 nt, SARS coronavirus
guuaaagacccacc

SEQ ID NO: 4050761 - RNA, 18 nt, SARS coronavirus
guuaccaucuauucacau

SEQ ID NO: 4050762 - RNA, 24 nt, SARS coronavirus
guucaagcuccuaauuacacucaa

SEQ ID NO: 4050763 - RNA, 17 nt, SARS coronavirus
guugaaugaucuuugcu

SEQ ID NO: 4050764 - RNA, 22 nt, SARS coronavirus
guugcaguugccucaagggugc

SEQ ID NO: 4050765 - RNA, 18 nt, SARS coronavirus
guugcuguucuauaucaa

SEQ ID NO: 4050766 - RNA, 21 nt, SARS coronavirus
uaaaaauuuaaaugaaucacu

SEQ ID NO: 4050767 - RNA, 14 nt, SARS coronavirus
uaacaaugcugcca

SEQ ID NO: 4050768 - RNA, 20 nt, SARS coronavirus
uaaccagaaugcucaagcau

SEQ ID NO: 4050769 - RNA, 15 nt, SARS coronavirus
uaagaagaauuauuc

SEQ ID NO: 4050770 - RNA, 14 nt, SARS coronavirus
uaagguacaacacu

SEQ ID NO: 4050771 - RNA, 12 nt, SARS coronavirus
uaauuacuacag

SEQ ID NO: 4050772 - RNA, 15 nt, SARS coronavirus
uaauuuuaauggacu

SEQ ID NO: 4050773 - RNA, 14 nt, SARS coronavirus
uacaacuuccucaa

SEQ ID NO: 4050774 - RNA, 22 nt, SARS coronavirus
uacaauugucguuacugaaggu

SEQ ID NO: 4050775 - RNA, 19 nt, SARS coronavirus
uacacucaacauacuucau

SEQ ID NO: 4050776 - RNA, 15 nt, SARS coronavirus
uacagccuuuucacc

SEQ ID NO: 4050777 - RNA, 22 nt, SARS coronavirus
uacaucaccagauguugaucuu

SEQ ID NO: 4050778 - RNA, 16 nt, SARS coronavirus
uaccaaaauaauugcg

SEQ ID NO: 4050779 - RNA, 19 nt, SARS coronavirus
uaccaaccuuacagaguug

SEQ ID NO: 4050780 - RNA, 21 nt, SARS coronavirus
uaccagaccucuaauuucagg

SEQ ID NO: 4050781 - RNA, 15 nt, SARS coronavirus
uaccaugaacaacaa

SEQ ID NO: 4050782 - RNA, 14 nt, SARS coronavirus
uaccuucaugaagg

SEQ ID NO: 4050783 - RNA, 17 nt, SARS coronavirus
uaccuuuuaaggauggu

SEQ ID NO: 4050784 - RNA, 15 nt, SARS coronavirus
uacuaaaaugucuga

SEQ ID NO: 4050785 - RNA, 14 nt, SARS coronavirus
uacugccacugcug

SEQ ID NO: 4050786 - RNA, 15 nt, SARS coronavirus
uacuuauagcacugc

SEQ ID NO: 4050787 - RNA, 19 nt, SARS coronavirus
uagcuacuucguugcuucc

SEQ ID NO: 4050788 - RNA, 21 nt, SARS coronavirus
uagggaggacuugaaagagcc

SEQ ID NO: 4050789 - RNA, 15 nt, SARS coronavirus
uagggguaauacuua

SEQ ID NO: 4050790 - RNA, 17 nt, SARS coronavirus
uagucaagggagaugau

SEQ ID NO: 4050791 - RNA, 18 nt, SARS coronavirus
uauaccuacuaacuuuuc

SEQ ID NO: 4050792 - RNA, 15 nt, SARS coronavirus
uaugguucaaacaug

SEQ ID NO: 4050793 - RNA, 22 nt, SARS coronavirus
uauucuacuggaaacaauguau

SEQ ID NO: 4050794 - RNA, 16 nt, SARS coronavirus
uauugaggacuugcuc

SEQ ID NO: 4050795 - RNA, 17 nt, SARS coronavirus
uauuggccauuaaauga

SEQ ID NO: 4050796 - RNA, 16 nt, SARS coronavirus
ucaaauaccuuuugcu

SEQ ID NO: 4050797 - RNA, 16 nt, SARS coronavirus
ucaaccuauagaugua

SEQ ID NO: 4050798 - RNA, 23 nt, SARS coronavirus
ucaagaaucacuuacaacaacau

SEQ ID NO: 4050799 - RNA, 19 nt, SARS coronavirus
ucaagugugcuaaaugaua

SEQ ID NO: 4050800 - RNA, 19 nt, SARS coronavirus
ucaauuagcauuacuacag

SEQ ID NO: 4050801 - RNA, 18 nt, SARS coronavirus
ucacacuagccauccuua

SEQ ID NO: 4050802 - RNA, 23 nt, SARS coronavirus
ucagacaaggaacugauuacaaa

SEQ ID NO: 4050803 - RNA, 18 nt, SARS coronavirus
ucagcauggcaaggagga

SEQ ID NO: 4050804 - RNA, 19 nt, SARS coronavirus
ucauacaucaccagauguu

SEQ ID NO: 4050805 - RNA, 21 nt, SARS coronavirus
ucaugaaggucaccaaacugc

SEQ ID NO: 4050806 - RNA, 20 nt, SARS coronavirus
ucauuguugcugcucuagua

SEQ ID NO: 4050807 - RNA, 14 nt, SARS coronavirus
uccagacaacuuca

SEQ ID NO: 4050808 - RNA, 22 nt, SARS coronavirus
uccuauuggagcuggcauuugu

SEQ ID NO: 4050809 - RNA, 12 nt, SARS coronavirus
ucggauggcuug

SEQ ID NO: 4050810 - RNA, 15 nt, SARS coronavirus
ucggggaccaagacc

SEQ ID NO: 4050811 - RNA, 20 nt, SARS coronavirus
ucuaauaacaccauugcuau

SEQ ID NO: 4050812 - RNA, 20 nt, SARS coronavirus
ucucaaaauccacuugcuga

SEQ ID NO: 4050813 - RNA, 15 nt, SARS coronavirus
ucucauuguugcugc

SEQ ID NO: 4050814 - RNA, 17 nt, SARS coronavirus
ucuccgggggacaauug

SEQ ID NO: 4050815 - RNA, 16 nt, SARS coronavirus
ucuccugcaaguacug

SEQ ID NO: 4050816 - RNA, 20 nt, SARS coronavirus
ucuggcucuuguggccagua

SEQ ID NO: 4050817 - RNA, 17 nt, SARS coronavirus
ucuuagaucaauuacug

SEQ ID NO: 4050818 - RNA, 13 nt, SARS coronavirus
ucuuaggagaaug

SEQ ID NO: 4050819 - RNA, 16 nt, SARS coronavirus
ucuucucgcuccucau

SEQ ID NO: 4050820 - RNA, 14 nt, SARS coronavirus
ucuuguggccagua

SEQ ID NO: 4050821 - RNA, 13 nt, SARS coronavirus
ugaaaauuauucu

SEQ ID NO: 4050822 - RNA, 23 nt, SARS coronavirus
ugaaagagccaccacauuuucau

SEQ ID NO: 4050823 - RNA, 16 nt, SARS coronavirus
ugaaagagcucagccc

SEQ ID NO: 4050824 - RNA, 15 nt, SARS coronavirus
ugaacucaaaugcuc

SEQ ID NO: 4050825 - RNA, 13 nt, SARS coronavirus
ugaagcucagccu

SEQ ID NO: 4050826 - RNA, 18 nt, SARS coronavirus
ugacaauaaccagaaugg

SEQ ID NO: 4050827 - RNA, 20 nt, SARS coronavirus
ugacguuauaauaaguucaa

SEQ ID NO: 4050828 - RNA, 14 nt, SARS coronavirus
ugacucauucaaag

SEQ ID NO: 4050829 - RNA, 14 nt, SARS coronavirus
ugaugaccacacaa

SEQ ID NO: 4050830 - RNA, 18 nt, SARS coronavirus
ugcacaccuaauguuacu

SEQ ID NO: 4050831 - RNA, 21 nt, SARS coronavirus
ugccaccgugcuacaacuucc

SEQ ID NO: 4050832 - RNA, 17 nt, SARS coronavirus
ugccuacacugcugcuc

SEQ ID NO: 4050833 - RNA, 18 nt, SARS coronavirus
ugccuauauggaagagcc

SEQ ID NO: 4050834 - RNA, 14 nt, SARS coronavirus
ugcucaaguaugau

SEQ ID NO: 4050835 - RNA, 15 nt, SARS coronavirus
ugcucuacaacucaa

SEQ ID NO: 4050836 - RNA, 24 nt, SARS coronavirus
ugcugacgguacucgacauaccua

SEQ ID NO: 4050837 - RNA, 22 nt, SARS coronavirus
ugcugccuacacugcugcucua

SEQ ID NO: 4050838 - RNA, 18 nt, SARS coronavirus
ugcuuugcuaguacagua

SEQ ID NO: 4050839 - RNA, 22 nt, SARS coronavirus
ugcuuuuuagccuuucugcuau

SEQ ID NO: 4050840 - RNA, 14 nt, SARS coronavirus
uggaacaaaugcuu

SEQ ID NO: 4050841 - RNA, 15 nt, SARS coronavirus
uggaaugucacgcau

SEQ ID NO: 4050842 - RNA, 20 nt, SARS coronavirus
uggagagguuuuuaaugcua

SEQ ID NO: 4050843 - RNA, 19 nt, SARS coronavirus
uggaugauuucuccagaca

SEQ ID NO: 4050844 - RNA, 13 nt, SARS coronavirus
uggcgcugcucuu

SEQ ID NO: 4050845 - RNA, 13 nt, SARS coronavirus
uggggcaaggcca

SEQ ID NO: 4050846 - RNA, 18 nt, SARS coronavirus
uggggcaaggccaaaaca

SEQ ID NO: 4050847 - RNA, 23 nt, SARS coronavirus
uggggcaaggccaaaacagcgcc

SEQ ID NO: 4050848 - RNA, 14 nt, SARS coronavirus
ugguaccuucauga

SEQ ID NO: 4050849 - RNA, 21 nt, SARS coronavirus
uggugguuuuaauuuuucaca

SEQ ID NO: 4050850 - RNA, 22 nt, SARS coronavirus
uguccuuuuggagagguuuuua

SEQ ID NO: 4050851 - RNA, 12 nt, SARS coronavirus
ugugcagaauga

SEQ ID NO: 4050852 - RNA, 12 nt, SARS coronavirus
uguuaacugcac

SEQ ID NO: 4050853 - RNA, 16 nt, SARS coronavirus
uguucuuggacaauca

SEQ ID NO: 4050854 - RNA, 19 nt, SARS coronavirus
uguucuuggacaaucaaaa

SEQ ID NO: 4050855 - RNA, 15 nt, SARS coronavirus
uuaaucaauguguaa

SEQ ID NO: 4050856 - RNA, 11 nt, SARS coronavirus
uuaauuguuau

SEQ ID NO: 4050857 - RNA, 20 nt, SARS coronavirus
uuacaccuggaacaaaugcu

SEQ ID NO: 4050858 - RNA, 22 nt, SARS coronavirus
uuacaggcagacuucaaagccu

SEQ ID NO: 4050859 - RNA, 20 nt, SARS coronavirus
uuaccagaccucuaauuuca

SEQ ID NO: 4050860 - RNA, 17 nt, SARS coronavirus
uuacugcacagccagua

SEQ ID NO: 4050861 - RNA, 15 nt, SARS coronavirus
uuauagcacugcuug

SEQ ID NO: 4050862 - RNA, 18 nt, SARS coronavirus
uucaaaaaucauacauca

SEQ ID NO: 4050863 - RNA, 21 nt, SARS coronavirus
uucaagaaucacuuacaacaa

SEQ ID NO: 4050864 - RNA, 17 nt, SARS coronavirus
uucacaucuuuugcuug

SEQ ID NO: 4050865 - RNA, 18 nt, SARS coronavirus
uucuaauuguguugcuga

SEQ ID NO: 4050866 - RNA, 22 nt, SARS coronavirus
uucugcugauucaacucaggca

SEQ ID NO: 4050867 - RNA, 23 nt, SARS coronavirus
uugaauacacccaaagaccacau

SEQ ID NO: 4050868 - RNA, 18 nt, SARS coronavirus
uugacuuguauuucucua

SEQ ID NO: 4050869 - RNA, 15 nt, SARS coronavirus
uugcugauuauaauu

SEQ ID NO: 4050870 - RNA, 18 nt, SARS coronavirus
uugcuucuccaaugucua

SEQ ID NO: 4050871 - RNA, 18 nt, SARS coronavirus
uuggaaugucacgcauug

SEQ ID NO: 4050872 - RNA, 18 nt, SARS coronavirus
uuguaagguacaacacua

SEQ ID NO: 4050873 - RNA, 20 nt, SARS coronavirus
uuguacauaauaaagcuugu

SEQ ID NO: 4050874 - RNA, 21 nt, SARS coronavirus
uuguguuuaauggcacuucuu

SEQ ID NO: 4050875 - RNA, 15 nt, SARS coronavirus
uuguugcaguugccu

SEQ ID NO: 4050876 - RNA, 15 nt, SARS coronavirus
uuguugcugcucuag

SEQ ID NO: 4050877 - RNA, 15 nt, SARS coronavirus
uuuaacaagcuuguu

SEQ ID NO: 4050878 - RNA, 12 nt, SARS coronavirus
uuuaaguugccu

SEQ ID NO: 4050879 - RNA, 21 nt, SARS coronavirus
uuuaauagcuucuuaggagaa

SEQ ID NO: 4050880 - RNA, 17 nt, SARS coronavirus
uuuacccaauaauacug

SEQ ID NO: 4050881 - RNA, 17 nt, SARS coronavirus
uuucaucgaggccacgc

SEQ ID NO: 4050882 - RNA, 17 nt, SARS coronavirus
uuucaucuuguugacuu

SEQ ID NO: 4050883 - RNA, 17 nt, SARS coronavirus
uuucugauuucacugau

SEQ ID NO: 4050884 - RNA, 20 nt, SARS coronavirus
uuugagagagacauaucuaa

SEQ ID NO: 4050885 - RNA, 20 nt, SARS coronavirus
uuugcuugucgcugcaggua

SEQ ID NO: 4050886 - RNA, 22 nt, SARS coronavirus
uuugguuuucacucgaaaucca

SEQ ID NO: 4050887 - RNA, 12 nt, SARS coronavirus
uuuuauucuaau

SEQ ID NO: 4050888 - RNA, 13 nt, SARS coronavirus
uuuucaaccuuua

SEQ ID NO: 4050889 - RNA, 20 nt, SARS coronavirus
uuuucaaccuuuaagugcua

SEQ ID NO: 4050890 - RNA, 14 nt, SARS coronavirus
uuuuuaaugcuacu

SEQ ID NO: 4050891 - RNA, 17 nt, SARS coronavirus
ucggauggcuuguuauu

SEQ ID NO: 4050892 - RNA, 17 nt, SARS coronavirus
ucuaaaaagccucgcca

SEQ ID NO: 4050893 - RNA, 22 nt, SARS coronavirus
ucuacuggaaacaauguauucc

SEQ ID NO: 4050894 - RNA, 16 nt, SARS coronavirus
ucuagaagaaccuugu

SEQ ID NO: 4050895 - RNA, 21 nt, SARS coronavirus
ucuaugagggggguuuacuau

SEQ ID NO: 4050896 - RNA, 21 nt, SARS coronavirus
ucucacucagcauggcaagga

SEQ ID NO: 4050897 - RNA, 18 nt, SARS coronavirus
ucuucaaagagauuucaa

SEQ ID NO: 4050898 - RNA, 18 nt, SARS coronavirus
ucuuggcgacauuucagg

SEQ ID NO: 4050899 - RNA, 16 nt, SARS coronavirus
ucuuugcuguuucuaa

SEQ ID NO: 4050900 - RNA, 12 nt, SARS coronavirus
ugaaaauuauuc

SEQ ID NO: 4050901 - RNA, 11 nt, SARS coronavirus
ugaaacuucuc

SEQ ID NO: 4050902 - RNA, 16 nt, SARS coronavirus
ugaaugaucuuugcuu

SEQ ID NO: 4050903 - RNA, 18 nt, SARS coronavirus
ugacaaugcuucuccugc

SEQ ID NO: 4050904 - RNA, 18 nt, SARS coronavirus
ugacagguuaauuacagg

SEQ ID NO: 4050905 - RNA, 22 nt, SARS coronavirus
ugaccagaccgcucauggaaag

SEQ ID NO: 4050906 - RNA, 16 nt, SARS coronavirus
ugacucugagccaguu

SEQ ID NO: 4050907 - RNA, 16 nt, SARS coronavirus
ugacucuucuuccugc

SEQ ID NO: 4050908 - RNA, 22 nt, SARS coronavirus
ugacucuucuuccugcggcuga

SEQ ID NO: 4050909 - RNA, 14 nt, SARS coronavirus
ugagauuuuuuacu

SEQ ID NO: 4050910 - RNA, 19 nt, SARS coronavirus
ugagcaauauauuaaaugg

SEQ ID NO: 4050911 - RNA, 19 nt, SARS coronavirus
ugaucuuggcgacauuuca

SEQ ID NO: 4050912 - RNA, 12 nt, SARS coronavirus
ugaugaagcuca

SEQ ID NO: 4050913 - RNA, 15 nt, SARS coronavirus
ugaugccuuuucgcu

SEQ ID NO: 4050914 - RNA, 22 nt, SARS coronavirus
ugaugccuuuucgcuugauguu

SEQ ID NO: 4050915 - RNA, 14 nt, SARS coronavirus
ugauuguauuuaca

SEQ ID NO: 4050916 - RNA, 18 nt, SARS coronavirus
ugcaacugagggagccuu

SEQ ID NO: 4050917 - RNA, 15 nt, SARS coronavirus
ugcacaauuugcucc

SEQ ID NO: 4050918 - RNA, 23 nt, SARS coronavirus
ugcacucucagguauugcugcug

SEQ ID NO: 4050919 - RNA, 22 nt, SARS coronavirus
ugcccucgcgcuauugcugcua

SEQ ID NO: 4050920 - RNA, 14 nt, SARS coronavirus
ugccuacacugcug

SEQ ID NO: 4050921 - RNA, 14 nt, SARS coronavirus
ugccuauauggaag

SEQ ID NO: 4050922 - RNA, 18 nt, SARS coronavirus
ugcuauccccaugugauu

SEQ ID NO: 4050923 - RNA, 19 nt, SARS coronavirus
ugcuauuccuuguuuuaau

SEQ ID NO: 4050924 - RNA, 14 nt, SARS coronavirus
ugcuccaagugccu

SEQ ID NO: 4050925 - RNA, 20 nt, SARS coronavirus
ugcugccuacacugcugcuc

SEQ ID NO: 4050926 - RNA, 16 nt, SARS coronavirus
ugcuggacuaauugcc

SEQ ID NO: 4050927 - RNA, 20 nt, SARS coronavirus
ugcuggacuaauugccaucg

SEQ ID NO: 4050928 - RNA, 15 nt, SARS coronavirus
ugcuggcacacacau

SEQ ID NO: 4050929 - RNA, 24 nt, SARS coronavirus
ugcuucaccauuaagagaaagaca

SEQ ID NO: 4050930 - RNA, 14 nt, SARS coronavirus
ugcuuccuucaggc

SEQ ID NO: 4050931 - RNA, 12 nt, SARS coronavirus
ugcuugcugcug

SEQ ID NO: 4050932 - RNA, 20 nt, SARS coronavirus
uggaagagcccuaaugugua

SEQ ID NO: 4050933 - RNA, 14 nt, SARS coronavirus
uggaugacaaagau

SEQ ID NO: 4050934 - RNA, 14 nt, SARS coronavirus
uggcauggaaguca

SEQ ID NO: 4050935 - RNA, 16 nt, SARS coronavirus
uggcccagaagcuuca

SEQ ID NO: 4050936 - RNA, 16 nt, SARS coronavirus
uggcugacuuaucaug

SEQ ID NO: 4050937 - RNA, 21 nt, SARS coronavirus
uggcuuugugcucuaggaaag

SEQ ID NO: 4050938 - RNA, 18 nt, SARS coronavirus
uggguugcaacugaggga

SEQ ID NO: 4050939 - RNA, 21 nt, SARS coronavirus
uggucauucaacccagaaaca

SEQ ID NO: 4050940 - RNA, 16 nt, SARS coronavirus
uggugacggcaaaaug

SEQ ID NO: 4050941 - RNA, 20 nt, SARS coronavirus
uggugacggcaaaaugaaag

SEQ ID NO: 4050942 - RNA, 18 nt, SARS coronavirus
ugguuuucacucgaaauc

SEQ ID NO: 4050943 - RNA, 19 nt, SARS coronavirus
uguauuccagacucaagca

SEQ ID NO: 4050944 - RNA, 20 nt, SARS coronavirus
ugucaagauccagcuggugg

SEQ ID NO: 4050945 - RNA, 21 nt, SARS coronavirus
ugucacgcauuggcauggaag

SEQ ID NO: 4050946 - RNA, 15 nt, SARS coronavirus
ugucuacagaauuaa

SEQ ID NO: 4050947 - RNA, 17 nt, SARS coronavirus
ugugacucuucuuccug

SEQ ID NO: 4050948 - RNA, 17 nt, SARS coronavirus
ugugucaauuuuaauuu

SEQ ID NO: 4050949 - RNA, 17 nt, SARS coronavirus
uguuacaggguuucaua

SEQ ID NO: 4050950 - RNA, 12 nt, SARS coronavirus
uguuauugcuga

SEQ ID NO: 4050951 - RNA, 21 nt, SARS coronavirus
uguuucaucuuguugacuucc

SEQ ID NO: 4050952 - RNA, 15 nt, SARS coronavirus
uguuucugauuucac

SEQ ID NO: 4050953 - RNA, 16 nt, SARS coronavirus
uuaaauaaacgaacaa

SEQ ID NO: 4050954 - RNA, 23 nt, SARS coronavirus
uuaaauggccuugguauguuugg

SEQ ID NO: 4050955 - RNA, 17 nt, SARS coronavirus
uuaacauugcuuaucau

SEQ ID NO: 4050956 - RNA, 21 nt, SARS coronavirus
uuacaacaacaucaacugcau

SEQ ID NO: 4050957 - RNA, 17 nt, SARS coronavirus
uuacauuugguggaccc

SEQ ID NO: 4050958 - RNA, 20 nt, SARS coronavirus
uuacuacagacacugguauu

SEQ ID NO: 4050959 - RNA, 19 nt, SARS coronavirus
uuagaugaugaagaaccua

SEQ ID NO: 4050960 - RNA, 19 nt, SARS coronavirus
uuauaauuauaaauugcca

SEQ ID NO: 4050961 - RNA, 14 nt, SARS coronavirus
uuaucauggagcca

SEQ ID NO: 4050962 - RNA, 15 nt, SARS coronavirus
uuauuauucuguuug

SEQ ID NO: 4050963 - RNA, 13 nt, SARS coronavirus
uuauucugaggau

SEQ ID NO: 4050964 - RNA, 21 nt, SARS coronavirus
uuauuuaagccucuaacuaag

SEQ ID NO: 4050965 - RNA, 18 nt, SARS coronavirus
uucaaacaugcacaccua

SEQ ID NO: 4050966 - RNA, 22 nt, SARS coronavirus
uucaacccagaaacaaacauuc

SEQ ID NO: 4050967 - RNA, 18 nt, SARS coronavirus
uucaagaaauucaacucc

SEQ ID NO: 4050968 - RNA, 19 nt, SARS coronavirus
uucuacgcagagggaagca

SEQ ID NO: 4050969 - RNA, 20 nt, SARS coronavirus
uucuacugaaugugcuaauu

SEQ ID NO: 4050970 - RNA, 14 nt, SARS coronavirus
uucucauuguugcu

SEQ ID NO: 4050971 - RNA, 16 nt, SARS coronavirus
uucucauuguuuugac

SEQ ID NO: 4050972 - RNA, 17 nt, SARS coronavirus
uucucauuguuuugacu

SEQ ID NO: 4050973 - RNA, 11 nt, SARS coronavirus
uucuccugcuc

SEQ ID NO: 4050974 - RNA, 19 nt, SARS coronavirus
uucugaaggaguuccugau

SEQ ID NO: 4050975 - RNA, 13 nt, SARS coronavirus
uucuguuuggaac

SEQ ID NO: 4050976 - RNA, 15 nt, SARS coronavirus
uugagagagacauau

SEQ ID NO: 4050977 - RNA, 18 nt, SARS coronavirus
uugcauaugcacuguagu

SEQ ID NO: 4050978 - RNA, 21 nt, SARS coronavirus
uugccucaagggugcaugcuc

SEQ ID NO: 4050979 - RNA, 18 nt, SARS coronavirus
uuggaugacaaagaucca

SEQ ID NO: 4050980 - RNA, 14 nt, SARS coronavirus
uuguugacuuccag

SEQ ID NO: 4050981 - RNA, 12 nt, SARS coronavirus
uuuaacauugcu

SEQ ID NO: 4050982 - RNA, 22 nt, SARS coronavirus
uuuaacucaggauuuauuucuu

SEQ ID NO: 4050983 - RNA, 23 nt, SARS coronavirus
uuuaccagaccucuaauuucagg

SEQ ID NO: 4050984 - RNA, 21 nt, SARS coronavirus
uuucaggauugcuauuuggaa

SEQ ID NO: 4050985 - RNA, 12 nt, SARS coronavirus
uuugaacuuuua

SEQ ID NO: 4050986 - RNA, 20 nt, SARS coronavirus
uuugcaauuuacugcugcua

SEQ ID NO: 4050987 - RNA, 22 nt, SARS coronavirus
uuuguacauaauaaagcuuguu

SEQ ID NO: 4050988 - RNA, 15 nt, SARS coronavirus
uuuucaucagacaag

SEQ ID NO: 4050989 - RNA, 14 nt, SARS coronavirus
augauguucaagcu

SEQ ID NO: 4050990 - RNA, 14 nt, SARS coronavirus
augcauuuaauugc

SEQ ID NO: 4050991 - RNA, 15 nt, SARS coronavirus
augccuguuucuaug

SEQ ID NO: 4050992 - RNA, 24 nt, SARS coronavirus
augccuugauauauuuucuacaau

SEQ ID NO: 4050993 - RNA, 12 nt, SARS coronavirus
augcuucaucug

SEQ ID NO: 4050994 - RNA, 15 nt, SARS coronavirus
augucgacacuucuu

SEQ ID NO: 4050995 - RNA, 16 nt, SARS coronavirus
augugauuuuaauagc

SEQ ID NO: 4050996 - RNA, 18 nt, SARS coronavirus
auguucaagcuccuaauu

SEQ ID NO: 4050997 - RNA, 20 nt, SARS coronavirus
auuacuacagaaguaaugcc

SEQ ID NO: 4050998 - RNA, 14 nt, SARS coronavirus
auuagacauuucac

SEQ ID NO: 4050999 - RNA, 20 nt, SARS coronavirus
auuauaaauauagguaucuu

SEQ ID NO: 4051000 - RNA, 19 nt, SARS coronavirus
auuauccacugaccuuauu

SEQ ID NO: 4051001 - RNA, 22 nt, SARS coronavirus
auucaacccagaaacaaacauu

SEQ ID NO: 4051002 - RNA, 19 nt, SARS coronavirus
auucgauaaugcauuuaau

SEQ ID NO: 4051003 - RNA, 19 nt, SARS coronavirus
auucuacugaaugugcuaa

SEQ ID NO: 4051004 - RNA, 22 nt, SARS coronavirus
auucuacuggaaacaauguauu

SEQ ID NO: 4051005 - RNA, 17 nt, SARS coronavirus
auucucuuccugacauu

SEQ ID NO: 4051006 - RNA, 16 nt, SARS coronavirus
auucuuuggaauguca

SEQ ID NO: 4051007 - RNA, 13 nt, SARS coronavirus
auugcuuaucaug

SEQ ID NO: 4051008 - RNA, 12 nt, SARS coronavirus
auugcuuugcua

SEQ ID NO: 4051009 - RNA, 13 nt, SARS coronavirus
auugggcaagcug

SEQ ID NO: 4051010 - RNA, 13 nt, SARS coronavirus
auuuauuuugcug

SEQ ID NO: 4051011 - RNA, 15 nt, SARS coronavirus
auuucaaccauuuca

SEQ ID NO: 4051012 - RNA, 13 nt, SARS coronavirus
auuucuuccauuu

SEQ ID NO: 4051013 - RNA, 20 nt, SARS coronavirus
auuugcaauuuacugcugcu

SEQ ID NO: 4051014 - RNA, 19 nt, SARS coronavirus
auuuuggugguuuuaauuu

SEQ ID NO: 4051015 - RNA, 19 nt, SARS coronavirus
auuuuuaauacuuugcuuc

SEQ ID NO: 4051016 - RNA, 19 nt, SARS coronavirus
caaacugguguuauugcug

SEQ ID NO: 4051017 - RNA, 16 nt, SARS coronavirus
caacugucaagaucca

SEQ ID NO: 4051018 - RNA, 15 nt, SARS coronavirus
caacuuccucaagga

SEQ ID NO: 4051019 - RNA, 18 nt, SARS coronavirus
caagcuccuaauuacacu

SEQ ID NO: 4051020 - RNA, 14 nt, SARS coronavirus
caaggccaaacugu

SEQ ID NO: 4051021 - RNA, 18 nt, SARS coronavirus
caaguaugaugaaaaugg

SEQ ID NO: 4051022 - RNA, 13 nt, SARS coronavirus
caauaaauuugca

SEQ ID NO: 4051023 - RNA, 15 nt, SARS coronavirus
caauauugcuuugcu

SEQ ID NO: 4051024 - RNA, 19 nt, SARS coronavirus
caauggggcaaggccaaaa

SEQ ID NO: 4051025 - RNA, 17 nt, SARS coronavirus
caaugugccucuccggg

SEQ ID NO: 4051026 - RNA, 21 nt, SARS coronavirus
caauuuggccgugauguuucu

SEQ ID NO: 4051027 - RNA, 23 nt, SARS coronavirus
cacauaaacgaacuuauggauuu

SEQ ID NO: 4051028 - RNA, 19 nt, SARS coronavirus
caccugcucaagacauuug

SEQ ID NO: 4051029 - RNA, 16 nt, SARS coronavirus
cacuaagaaaucugcu

SEQ ID NO: 4051030 - RNA, 15 nt, SARS coronavirus
cacuagcacacacuu

SEQ ID NO: 4051031 - RNA, 22 nt, SARS coronavirus
cacucagcauggcaaggaggaa

SEQ ID NO: 4051032 - RNA, 18 nt, SARS coronavirus
cacucgcugaugcuggcu

SEQ ID NO: 4051033 - RNA, 15 nt, SARS coronavirus
cagcccacugugacu

SEQ ID NO: 4051034 - RNA, 21 nt, SARS coronavirus
caucacgaacgcuuucuuauu

SEQ ID NO: 4051035 - RNA, 23 nt, SARS coronavirus
caugaaaauuauucucuuccuga

SEQ ID NO: 4051036 - RNA, 14 nt, SARS coronavirus
caugaugaccacac

SEQ ID NO: 4051037 - RNA, 21 nt, SARS coronavirus
cauggaugauuucuccagaca

SEQ ID NO: 4051038 - RNA, 20 nt, SARS coronavirus
cauggguuguguccuugcuu

SEQ ID NO: 4051039 - RNA, 14 nt, SARS coronavirus
cauuaacgcuucug

SEQ ID NO: 4051040 - RNA, 14 nt, SARS coronavirus
cauucuuacagccu

SEQ ID NO: 4051041 - RNA, 13 nt, SARS coronavirus
cauucuucucaau

SEQ ID NO: 4051042 - RNA, 15 nt, SARS coronavirus
cauucuucucaaugu

SEQ ID NO: 4051043 - RNA, 14 nt, SARS coronavirus
cauuguugcugcuc

SEQ ID NO: 4051044 - RNA, 21 nt, SARS coronavirus
cauuugcaauuuacugcugcu

SEQ ID NO: 4051045 - RNA, 18 nt, SARS coronavirus
ccaagaccuaaucagaca

SEQ ID NO: 4051046 - RNA, 18 nt, SARS coronavirus
ccaauaugguagcuuuug

SEQ ID NO: 4051047 - RNA, 20 nt, SARS coronavirus
ccacagcgccagcaauuugu

SEQ ID NO: 4051048 - RNA, 15 nt, SARS coronavirus
ccaccucugcucacu

SEQ ID NO: 4051049 - RNA, 21 nt, SARS coronavirus
ccacuuuuucucauuguugcu

SEQ ID NO: 4051050 - RNA, 15 nt, SARS coronavirus
ccagaaacaaacauu

SEQ ID NO: 4051051 - RNA, 17 nt, SARS coronavirus
ccaguucucaagggugu

SEQ ID NO: 4051052 - RNA, 21 nt, SARS coronavirus
ccauccuuacugcgcuucgau

SEQ ID NO: 4051053 - RNA, 22 nt, SARS coronavirus
cccaugugauuuuaauagcuuc

SEQ ID NO: 4051054 - RNA, 14 nt, SARS coronavirus
ccccaccugcucuu

SEQ ID NO: 4051055 - RNA, 20 nt, SARS coronavirus
cccuuucuuugcuguuucua

SEQ ID NO: 4051056 - RNA, 12 nt, SARS coronavirus
ccgcagagacaa

SEQ ID NO: 4051057 - RNA, 12 nt, SARS coronavirus
ccuaauguguaa

SEQ ID NO: 4051058 - RNA, 19 nt, SARS coronavirus
ccucgcgcuauugcugcua

SEQ ID NO: 4051059 - RNA, 19 nt, SARS coronavirus
ccuucgggaacauggcuga

SEQ ID NO: 4051060 - RNA, 12 nt, SARS coronavirus
cgacacuucuua

SEQ ID NO: 4051061 - RNA, 15 nt, SARS coronavirus
cgaggccacgcggag

SEQ ID NO: 4051062 - RNA, 15 nt, SARS coronavirus
cgcauacaaaacauu

SEQ ID NO: 4051063 - RNA, 21 nt, SARS coronavirus
cgcauuggcauggaagucaca

SEQ ID NO: 4051064 - RNA, 18 nt, SARS coronavirus
cggagguacaaauugaca

SEQ ID NO: 4051065 - RNA, 18 nt, SARS coronavirus
cggcaaaaugaaagagcu

SEQ ID NO: 4051066 - RNA, 12 nt, SARS coronavirus
cgguacuauuac

SEQ ID NO: 4051067 - RNA, 16 nt, SARS coronavirus
cguacccgcucaaugu

SEQ ID NO: 4051068 - RNA, 12 nt, SARS coronavirus
cguacugcugca

SEQ ID NO: 4051069 - RNA, 14 nt, SARS coronavirus
cgugguccagaaca

SEQ ID NO: 4051070 - RNA, 12 nt, SARS coronavirus
cguugcauuucu

SEQ ID NO: 4051071 - RNA, 16 nt, SARS coronavirus
cuaacaaagaaggcau

SEQ ID NO: 4051072 - RNA, 15 nt, SARS coronavirus
cuaagaaaucugcug

SEQ ID NO: 4051073 - RNA, 16 nt, SARS coronavirus
cuaagaaaucugcugc

SEQ ID NO: 4051074 - RNA, 17 nt, SARS coronavirus
cuaagaaaucugcugcu

SEQ ID NO: 4051075 - RNA, 16 nt, SARS coronavirus
cuaagaggucuuuuau

SEQ ID NO: 4051076 - RNA, 21 nt, SARS coronavirus
cuaauaaaccucaugugcuug

SEQ ID NO: 4051077 - RNA, 16 nt, SARS coronavirus
cuaaucuugcugcuac

SEQ ID NO: 4051078 - RNA, 15 nt, SARS coronavirus
cuaauguuacuauca

SEQ ID NO: 4051079 - RNA, 21 nt, SARS coronavirus
cuaauuuuggugcaauuucaa

SEQ ID NO: 4051080 - RNA, 14 nt, SARS coronavirus
cuacacugcugcuc

SEQ ID NO: 4051081 - RNA, 17 nt, SARS coronavirus
cuacacugcugcucuag

SEQ ID NO: 4051082 - RNA, 23 nt, SARS coronavirus
cuacagacaauacauuugucuca

SEQ ID NO: 4051083 - RNA, 18 nt, SARS coronavirus
cuacagcaauucaugcag

SEQ ID NO: 4051084 - RNA, 16 nt, SARS coronavirus
cuacuaccgaagagcu

SEQ ID NO: 4051085 - RNA, 19 nt, SARS coronavirus
cuagcacacacuuugcuuu

SEQ ID NO: 4051086 - RNA, 23 nt, SARS coronavirus
cuagcggagguggugaaacugcc

SEQ ID NO: 4051087 - RNA, 22 nt, SARS coronavirus
cuaggaacuggcccagaagcuu

SEQ ID NO: 4051088 - RNA, 16 nt, SARS coronavirus
cuagggcgcugugaca

SEQ ID NO: 4051089 - RNA, 23 nt, SARS coronavirus
cuaugcaguugcauaugcacugu

SEQ ID NO: 4051090 - RNA, 18 nt, SARS coronavirus
cuaugucuuuaggugcug

SEQ ID NO: 4051091 - RNA, 21 nt, SARS coronavirus
cucaagucaaacaaauguaca

SEQ ID NO: 4051092 - RNA, 14 nt, SARS coronavirus
cucacucagcaugg

SEQ ID NO: 4051093 - RNA, 22 nt, SARS coronavirus
cucacuuuaauugacuucuauu

SEQ ID NO: 4051094 - RNA, 15 nt, SARS coronavirus
cucauggaaagugaa

SEQ ID NO: 4051095 - RNA, 20 nt, SARS coronavirus
cuccugcaaguacuguucau

SEQ ID NO: 4051096 - RNA, 19 nt, SARS coronavirus
cucguacccgcucaaugug

SEQ ID NO: 4051097 - RNA, 16 nt, SARS coronavirus
cucuaggaaagguuuu

SEQ ID NO: 4051098 - RNA, 19 nt, SARS coronavirus
cugaaugugcuaauuugcu

SEQ ID NO: 4051099 - RNA, 17 nt, SARS coronavirus
cugaugaagcucagccu

SEQ ID NO: 4051100 - RNA, 14 nt, SARS coronavirus
aaaagaagcagccc

SEQ ID NO: 4051101 - RNA, 12 nt, SARS coronavirus
aaaaucuauugu

SEQ ID NO: 4051102 - RNA, 19 nt, SARS coronavirus
aaaauuauccacugaccuu

SEQ ID NO: 4051103 - RNA, 20 nt, SARS coronavirus
aaaauuauccacugaccuua

SEQ ID NO: 4051104 - RNA, 15 nt, SARS coronavirus
aaacaaacauucuuc

SEQ ID NO: 4051105 - RNA, 14 nt, SARS coronavirus
aaacgaacaugaaa

SEQ ID NO: 4051106 - RNA, 22 nt, SARS coronavirus
aaagaagcagcccacugugacu

SEQ ID NO: 4051107 - RNA, 22 nt, SARS coronavirus
aaaugaaagagcucagccccag

SEQ ID NO: 4051108 - RNA, 12 nt, SARS coronavirus
aaauucaagaau

SEQ ID NO: 4051109 - RNA, 20 nt, SARS coronavirus
aacaacuccuggaacaaugg

SEQ ID NO: 4051110 - RNA, 15 nt, SARS coronavirus
aaccauuucaacaau

SEQ ID NO: 4051111 - RNA, 21 nt, SARS coronavirus
aacgaacaugaaaauuauucu

SEQ ID NO: 4051112 - RNA, 17 nt, SARS coronavirus
aacgaacuuauggauuu

SEQ ID NO: 4051113 - RNA, 22 nt, SARS coronavirus
aacuaacuauuauuauuauucu

SEQ ID NO: 4051114 - RNA, 23 nt, SARS coronavirus
aacugcccucgcgcuauugcugc

SEQ ID NO: 4051115 - RNA, 15 nt, SARS coronavirus
aagaaaucugcugcu

SEQ ID NO: 4051116 - RNA, 19 nt, SARS coronavirus
aagaaccuuguaccaaagu

SEQ ID NO: 4051117 - RNA, 12 nt, SARS coronavirus
aagaagaauuau

SEQ ID NO: 4051118 - RNA, 11 nt, SARS coronavirus
aagagaaagac

SEQ ID NO: 4051119 - RNA, 15 nt, SARS coronavirus
aagagauuucaacca

SEQ ID NO: 4051120 - RNA, 22 nt, SARS coronavirus
aagcagcccacugugacucuuc

SEQ ID NO: 4051121 - RNA, 21 nt, SARS coronavirus
caauggggcaaggccaaaaca

SEQ ID NO: 4051122 - RNA, 21 nt, SARS coronavirus
caauugcuuacucuaauaaca

SEQ ID NO: 4051123 - RNA, 16 nt, SARS coronavirus
caauuuacugcugcua

SEQ ID NO: 4051124 - RNA, 16 nt, SARS coronavirus
cacaauucaaagacaa

SEQ ID NO: 4051125 - RNA, 13 nt, SARS coronavirus
cacacacuuugcu

SEQ ID NO: 4051126 - RNA, 22 nt, SARS coronavirus
cacacgugaaguguucgcucaa

SEQ ID NO: 4051127 - RNA, 15 nt, SARS coronavirus
caccauuaagagaaa

SEQ ID NO: 4051128 - RNA, 18 nt, SARS coronavirus
caccgaaguuuacuacca

SEQ ID NO: 4051129 - RNA, 13 nt, SARS coronavirus
cacgucagcugca

SEQ ID NO: 4051130 - RNA, 13 nt, SARS coronavirus
cagaaacaaacau

SEQ ID NO: 4051131 - RNA, 21 nt, SARS coronavirus
cagaaguaaugccuguuucua

SEQ ID NO: 4051132 - RNA, 16 nt, SARS coronavirus
cagaggcggcagucaa

SEQ ID NO: 4051133 - RNA, 23 nt, SARS coronavirus
cagaguuguaguacuuucuuuug

SEQ ID NO: 4051134 - RNA, 18 nt, SARS coronavirus
cagcaauuugucaugaag

SEQ ID NO: 4051135 - RNA, 14 nt, SARS coronavirus
cagcauggcaagga

SEQ ID NO: 4051136 - RNA, 18 nt, SARS coronavirus
cagcugcagccuauuuug

SEQ ID NO: 4051137 - RNA, 19 nt, SARS coronavirus
cagcuugagucuacacaaa

SEQ ID NO: 4051138 - RNA, 15 nt, SARS coronavirus
caggaucuagaagaa

SEQ ID NO: 4051139 - RNA, 20 nt, SARS coronavirus
cauaacuaugacuacuguau

SEQ ID NO: 4051140 - RNA, 19 nt, SARS coronavirus
caugaguggagcuucugcu

SEQ ID NO: 4051141 - RNA, 14 nt, SARS coronavirus
cauugauuguauuu

SEQ ID NO: 4051142 - RNA, 22 nt, SARS coronavirus
cauuuggugcuggcgcugcucu

SEQ ID NO: 4051143 - RNA, 14 nt, SARS coronavirus
ccacaaaacaguac

SEQ ID NO: 4051144 - RNA, 21 nt, SARS coronavirus
ccacagagaaaucaaauguug

SEQ ID NO: 4051145 - RNA, 20 nt, SARS coronavirus
ccagaacaaacccaaggaaa

SEQ ID NO: 4051146 - RNA, 23 nt, SARS coronavirus
ccaucaggaacauacgagggcaa

SEQ ID NO: 4051147 - RNA, 13 nt, SARS coronavirus
cccagaaacaaac

SEQ ID NO: 4051148 - RNA, 14 nt, SARS coronavirus
ccccaacuuugaaa

SEQ ID NO: 4051149 - RNA, 15 nt, SARS coronavirus
cccucgaggccaggg

SEQ ID NO: 4051150 - RNA, 14 nt, SARS coronavirus
ccgugauguuucug

SEQ ID NO: 4051151 - RNA, 14 nt, SARS coronavirus
ccuaaaaaggacaa

SEQ ID NO: 4051152 - RNA, 18 nt, SARS coronavirus
ccuaaucagacaaggaac

SEQ ID NO: 4051153 - RNA, 17 nt, SARS coronavirus
ccucuucucgcuccuca

SEQ ID NO: 4051154 - RNA, 18 nt, SARS coronavirus
cgcaauggggcaaggcca

SEQ ID NO: 4051155 - RNA, 18 nt, SARS coronavirus
cgcagagggaagcagagg

SEQ ID NO: 4051156 - RNA, 15 nt, SARS coronavirus
cgcucaauaaaagau

SEQ ID NO: 4051157 - RNA, 15 nt, SARS coronavirus
cugcuaaucuugcug

SEQ ID NO: 4051158 - RNA, 17 nt, SARS coronavirus
cuguacuacuaaaagaa

SEQ ID NO: 4051159 - RNA, 17 nt, SARS coronavirus
cuguucaugcuacagca

SEQ ID NO: 4051160 - RNA, 13 nt, SARS coronavirus
cuuauagcacugc

SEQ ID NO: 4051161 - RNA, 17 nt, SARS coronavirus
cuucaaaauuccaugag

SEQ ID NO: 4051162 - RNA, 12 nt, SARS coronavirus
cuucucaaugug

SEQ ID NO: 4051163 - RNA, 15 nt, SARS coronavirus
cuugcugcugucuac

SEQ ID NO: 4051164 - RNA, 18 nt, SARS coronavirus
cuugcuuguuuugugcuu

SEQ ID NO: 4051165 - RNA, 15 nt, SARS coronavirus
cuuuuucuugcuuuc

SEQ ID NO: 4051166 - RNA, 12 nt, SARS coronavirus
gaaaucagggcu

SEQ ID NO: 4051167 - RNA, 13 nt, SARS coronavirus
gaaaucugcugcu

SEQ ID NO: 4051168 - RNA, 12 nt, SARS coronavirus
gaagcucagccu

SEQ ID NO: 4051169 - RNA, 17 nt, SARS coronavirus
gaaugaucuuugcuucu

SEQ ID NO: 4051170 - RNA, 16 nt, SARS coronavirus
gacaaagauccacaau

SEQ ID NO: 4051171 - RNA, 20 nt, SARS coronavirus
gacacucgcugaugcuggcu

SEQ ID NO: 4051172 - RNA, 23 nt, SARS coronavirus
gaccacacaaggcagaugggcua

SEQ ID NO: 4051173 - RNA, 13 nt, SARS coronavirus
gaccacauuggca

SEQ ID NO: 4051174 - RNA, 12 nt, SARS coronavirus
gacuaccaaauu

SEQ ID NO: 4051175 - RNA, 15 nt, SARS coronavirus
gagcucagccccaga

SEQ ID NO: 4051176 - RNA, 17 nt, SARS coronavirus
gaggacuugaaagagcc

SEQ ID NO: 4051177 - RNA, 12 nt, SARS coronavirus
gaguacauaucu

SEQ ID NO: 4051178 - RNA, 23 nt, SARS coronavirus
gaugaagcucagccuuugccgca

SEQ ID NO: 4051179 - RNA, 22 nt, SARS coronavirus
gcaaauugcacaauuugcucca

SEQ ID NO: 4051180 - RNA, 20 nt, SARS coronavirus
gcaagaucaguuucaccaaa

SEQ ID NO: 4051181 - RNA, 18 nt, SARS coronavirus
gcaauucaccauuucacc

SEQ ID NO: 4051182 - RNA, 20 nt, SARS coronavirus
gcacucucagguauugcugc

SEQ ID NO: 4051183 - RNA, 19 nt, SARS coronavirus
gcaucuaauaaaccucaug

SEQ ID NO: 4051184 - RNA, 22 nt, SARS coronavirus
gcaucuaauaaaccucaugugc

SEQ ID NO: 4051185 - RNA, 18 nt, SARS coronavirus
gccacuuuuucucauugu

SEQ ID NO: 4051186 - RNA, 15 nt, SARS coronavirus
gccccccgcauuaca

SEQ ID NO: 4051187 - RNA, 19 nt, SARS coronavirus
gcccucgcgcuauugcugc

SEQ ID NO: 4051188 - RNA, 17 nt, SARS coronavirus
gccgacgacgacuacua

SEQ ID NO: 4051189 - RNA, 15 nt, SARS coronavirus
gcgccgaccccaagg

SEQ ID NO: 4051190 - RNA, 15 nt, SARS coronavirus
gcgcuauugcugcua

SEQ ID NO: 4051191 - RNA, 15 nt, SARS coronavirus
gcuagggagagcugc

SEQ ID NO: 4051192 - RNA, 13 nt, SARS coronavirus
gcuauugcugcua

SEQ ID NO: 4051193 - RNA, 12 nt, SARS coronavirus
gcucaauguggu

SEQ ID NO: 4051194 - RNA, 22 nt, SARS coronavirus
gcugccuauauggaagagcccu

SEQ ID NO: 4051195 - RNA, 15 nt, SARS coronavirus
gcuggcgcugcucuu

SEQ ID NO: 4051196 - RNA, 15 nt, SARS coronavirus
gcuucuccugcaagu

SEQ ID NO: 4051197 - RNA, 13 nt, SARS coronavirus
gcuugauguggcu

SEQ ID NO: 4051198 - RNA, 11 nt, SARS coronavirus
gcuugcugcug

SEQ ID NO: 4051199 - RNA, 12 nt, SARS coronavirus
ggcaaaaugaaa

SEQ ID NO: 4051200 - RNA, 22 nt, SARS coronavirus
ggccaaaacagcgccgacccca

SEQ ID NO: 4051201 - RNA, 16 nt, SARS coronavirus
ggcgcuaacaaagaag

SEQ ID NO: 4051202 - RNA, 19 nt, SARS coronavirus
ggcuacuaccgaagagcua

SEQ ID NO: 4051203 - RNA, 13 nt, SARS coronavirus
gguauugcugcug

SEQ ID NO: 4051204 - RNA, 13 nt, SARS coronavirus
guaguacuuucuu

SEQ ID NO: 4051205 - RNA, 23 nt, SARS coronavirus
gucaagccucuucucgcuccuca

SEQ ID NO: 4051206 - RNA, 23 nt, SARS coronavirus
gucaccaaacugcugcauuuaga

SEQ ID NO: 4051207 - RNA, 14 nt, SARS coronavirus
gucacucaagcauu

SEQ ID NO: 4051208 - RNA, 14 nt, SARS coronavirus
gucauucaacccag

SEQ ID NO: 4051209 - RNA, 22 nt, SARS coronavirus
gugccucugcauucuuuggaau

SEQ ID NO: 4051210 - RNA, 15 nt, SARS coronavirus
gugcguacugcugca

SEQ ID NO: 4051211 - RNA, 21 nt, SARS coronavirus
guuguuaaccagaaugcucaa

SEQ ID NO: 4051212 - RNA, 21 nt, SARS coronavirus
guuuccuauuccuagccugga

SEQ ID NO: 4051213 - RNA, 23 nt, SARS coronavirus
guuugcucguacccgcucaaugu

SEQ ID NO: 4051214 - RNA, 15 nt, SARS coronavirus
uaaaaauuuaaauga

SEQ ID NO: 4051215 - RNA, 23 nt, SARS coronavirus
uaaaacgaacaugaaaauuauuc

SEQ ID NO: 4051216 - RNA, 17 nt, SARS coronavirus
uaacagugucacagaua

SEQ ID NO: 4051217 - RNA, 19 nt, SARS coronavirus
uaacuaugacuacuguaua

SEQ ID NO: 4051218 - RNA, 16 nt, SARS coronavirus
uaauaacaaugcugcc

SEQ ID NO: 4051219 - RNA, 15 nt, SARS coronavirus
uaaugcuagggagag

SEQ ID NO: 4051220 - RNA, 15 nt, SARS coronavirus
uacacugcugcucua

SEQ ID NO: 4051221 - RNA, 14 nt, SARS coronavirus
uacaggcagacuuc

SEQ ID NO: 4051222 - RNA, 19 nt, SARS coronavirus
uacauuuaugcucaaguau

SEQ ID NO: 4051223 - RNA, 17 nt, SARS coronavirus
uaccauacaguuucuuu

SEQ ID NO: 4051224 - RNA, 13 nt, SARS coronavirus
uaccuuuugcuau

SEQ ID NO: 4051225 - RNA, 15 nt, SARS coronavirus
uacuacagacaauac

SEQ ID NO: 4051226 - RNA, 15 nt, SARS coronavirus
uacuaucaacuguca

SEQ ID NO: 4051227 - RNA, 20 nt, SARS coronavirus
uacuucuuuuucuugcuuuc

SEQ ID NO: 4051228 - RNA, 11 nt, SARS coronavirus
uagaauuauua

SEQ ID NO: 4051229 - RNA, 18 nt, SARS coronavirus
uagauucccucgaggcca

SEQ ID NO: 4051230 - RNA, 23 nt, SARS coronavirus
uaggaacuggcccagaagcuuca

SEQ ID NO: 4051231 - RNA, 18 nt, SARS coronavirus
uaguauuuuuaauacuuu

SEQ ID NO: 4051232 - RNA, 16 nt, SARS coronavirus
uagugguacugccacu

SEQ ID NO: 4051233 - RNA, 20 nt, SARS coronavirus
uauaaauuaaauacagacca

SEQ ID NO: 4051234 - RNA, 15 nt, SARS coronavirus
uauaucaagauguua

SEQ ID NO: 4051235 - RNA, 22 nt, SARS coronavirus
uaugaugaaaaugguacaauca

SEQ ID NO: 4051236 - RNA, 18 nt, SARS coronavirus
uauggcguuucugccacu

SEQ ID NO: 4051237 - RNA, 14 nt, SARS coronavirus
uaugguucaaacau

SEQ ID NO: 4051238 - RNA, 23 nt, SARS coronavirus
uauguacaucugcggagauucua

SEQ ID NO: 4051239 - RNA, 13 nt, SARS coronavirus
uauucucuuccug

SEQ ID NO: 4051240 - RNA, 19 nt, SARS coronavirus
uauuuaaagccaacuacau

SEQ ID NO: 4051241 - RNA, 18 nt, SARS coronavirus
ucaaauaccuuuugcuau

SEQ ID NO: 4051242 - RNA, 14 nt, SARS coronavirus
ucaaauucaagaau

SEQ ID NO: 4051243 - RNA, 18 nt, SARS coronavirus
ucaaauucaagaaucacu

SEQ ID NO: 4051244 - RNA, 18 nt, SARS coronavirus
ucaacaccaaaacucaaa

SEQ ID NO: 4051245 - RNA, 21 nt, SARS coronavirus
ucaacgcauguagaauuauua

SEQ ID NO: 4051246 - RNA, 22 nt, SARS coronavirus
ucaacugacaauaaccagaaug

SEQ ID NO: 4051247 - RNA, 20 nt, SARS coronavirus
ucaagaaucacuuacaacaa

SEQ ID NO: 4051248 - RNA, 14 nt, SARS coronavirus
ucaaggaacaacau

SEQ ID NO: 4051249 - RNA, 21 nt, SARS coronavirus
ucaaguaugaugaaaauggua

SEQ ID NO: 4051250 - RNA, 15 nt, SARS coronavirus
ucacaucuuuugcuu

SEQ ID NO: 4051251 - RNA, 16 nt, SARS coronavirus
ucaccaaacugcugca

SEQ ID NO: 4051252 - RNA, 17 nt, SARS coronavirus
ucacguaugugccaucc

SEQ ID NO: 4051253 - RNA, 18 nt, SARS coronavirus
ucacuaagaaaucugcug

SEQ ID NO: 4051254 - RNA, 19 nt, SARS coronavirus
ucacuaagaaaucugcugc

SEQ ID NO: 4051255 - RNA, 14 nt, SARS coronavirus
ucaggauugcuauu

SEQ ID NO: 4051256 - RNA, 23 nt, SARS coronavirus
ucaggcauaaacacucaugauga

SEQ ID NO: 4051257 - RNA, 16 nt, SARS coronavirus
ucaucagacaagagga

SEQ ID NO: 4051258 - RNA, 18 nt, SARS coronavirus
ucaucugaaguugcuguu

SEQ ID NO: 4051259 - RNA, 17 nt, SARS coronavirus
ucaugaaggcaaagcau

SEQ ID NO: 4051260 - RNA, 21 nt, SARS coronavirus
ucaugguuacaaucuugcuuu

SEQ ID NO: 4051261 - RNA, 13 nt, SARS coronavirus
ucauuaacaacac

SEQ ID NO: 4051262 - RNA, 20 nt, SARS coronavirus
ucauucguuucggaagaaac

SEQ ID NO: 4051263 - RNA, 19 nt, SARS coronavirus
ucauuggugcugugaucau

SEQ ID NO: 4051264 - RNA, 20 nt, SARS coronavirus
ucauuguuuugacuuguauu

SEQ ID NO: 4051265 - RNA, 23 nt, SARS coronavirus
ucauuugcaauuuacugcugcua

SEQ ID NO: 4051266 - RNA, 19 nt, SARS coronavirus
uccaagugccucugcauuc

SEQ ID NO: 4051267 - RNA, 13 nt, SARS coronavirus
uccaaugucuaug

SEQ ID NO: 4051268 - RNA, 14 nt, SARS coronavirus
uccagaacaaaccc

SEQ ID NO: 4051269 - RNA, 17 nt, SARS coronavirus
uccauaaaacgaacaug

SEQ ID NO: 4051270 - RNA, 23 nt, SARS coronavirus
uccaugaguggagcuucugcuga

SEQ ID NO: 4051271 - RNA, 20 nt, SARS coronavirus
ucccuaauauuacaaacuug

SEQ ID NO: 4051272 - RNA, 12 nt, SARS coronavirus
uccuggcagcag

SEQ ID NO: 4051273 - RNA, 12 nt, SARS coronavirus
ucgaggccaggg

SEQ ID NO: 4051274 - RNA, 18 nt, SARS coronavirus
ucgccacuuuuucucauu

SEQ ID NO: 4051275 - RNA, 15 nt, SARS coronavirus
ucgcuugauguuuca

SEQ ID NO: 4051276 - RNA, 17 nt, SARS coronavirus
aaaccaacguagugccc

SEQ ID NO: 4051277 - RNA, 21 nt, SARS coronavirus
aaaccuugcaccccaccugcu

SEQ ID NO: 4051278 - RNA, 17 nt, SARS coronavirus
aaacgaacaugaaacuu

SEQ ID NO: 4051279 - RNA, 20 nt, SARS coronavirus
aaacgaacaugaaacuucuc

SEQ ID NO: 4051280 - RNA, 22 nt, SARS coronavirus
aaagacaacgucauacugcuga

SEQ ID NO: 4051281 - RNA, 16 nt, SARS coronavirus
aaagccucgccaaaaa

SEQ ID NO: 4051282 - RNA, 16 nt, SARS coronavirus
aaauauuagacauuuc

SEQ ID NO: 4051283 - RNA, 13 nt, SARS coronavirus
aaaucugcugcug

SEQ ID NO: 4051284 - RNA, 23 nt, SARS coronavirus
aaaugauuaugguuuuuacacca

SEQ ID NO: 4051285 - RNA, 18 nt, SARS coronavirus
aaauuaaauacagaccac

SEQ ID NO: 4051286 - RNA, 14 nt, SARS coronavirus
aaauuuuagagcca

SEQ ID NO: 4051287 - RNA, 12 nt, SARS coronavirus
aacaagcacauu

SEQ ID NO: 4051288 - RNA, 13 nt, SARS coronavirus
aacaagcuuguua

SEQ ID NO: 4051289 - RNA, 13 nt, SARS coronavirus
aacauucuucuca

SEQ ID NO: 4051290 - RNA, 17 nt, SARS coronavirus
aacugauuacaaacauu

SEQ ID NO: 4051291 - RNA, 20 nt, SARS coronavirus
aagaccuaaucagacaagga

SEQ ID NO: 4051292 - RNA, 20 nt, SARS coronavirus
aagcugcaagacguuguuaa

SEQ ID NO: 4051293 - RNA, 20 nt, SARS coronavirus
aagucagguaauuuuaaaca

SEQ ID NO: 4051294 - RNA, 16 nt, SARS coronavirus
aaguugcuguucuaua

SEQ ID NO: 4051295 - RNA, 15 nt, SARS coronavirus
aauaaagauggguuu

SEQ ID NO: 4051296 - RNA, 23 nt, SARS coronavirus
aauacuuugcuucaccauuaaga

SEQ ID NO: 4051297 - RNA, 16 nt, SARS coronavirus
aauagcguacuucuuu

SEQ ID NO: 4051298 - RNA, 23 nt, SARS coronavirus
aauauuacaaacuuguguccuuu

SEQ ID NO: 4051299 - RNA, 14 nt, SARS coronavirus
aaucagacaaggaa

SEQ ID NO: 4051300 - RNA, 16 nt, SARS coronavirus
aaugugcaaauacaca

SEQ ID NO: 4051301 - RNA, 16 nt, SARS coronavirus
aauuuacugcugcuau

SEQ ID NO: 4051302 - RNA, 14 nt, SARS coronavirus
aauuuuaauuuuaa

SEQ ID NO: 4051303 - RNA, 21 nt, SARS coronavirus
aauuuuagagccauucuuaca

SEQ ID NO: 4051304 - RNA, 18 nt, SARS coronavirus
acaaacauucuucucaau

SEQ ID NO: 4051305 - RNA, 19 nt, SARS coronavirus
acaaacccaaggaaauuuc

SEQ ID NO: 4051306 - RNA, 15 nt, SARS coronavirus
acaaagauccacaau

SEQ ID NO: 4051307 - RNA, 15 nt, SARS coronavirus
acaaaugcuucaucu

SEQ ID NO: 4051308 - RNA, 16 nt, SARS coronavirus
acaauaaauuugcacu

SEQ ID NO: 4051309 - RNA, 18 nt, SARS coronavirus
acacaaggcagaugggcu

SEQ ID NO: 4051310 - RNA, 18 nt, SARS coronavirus
acagcucucacucagcau

SEQ ID NO: 4051311 - RNA, 14 nt, SARS coronavirus
acauaaacgaacuu

SEQ ID NO: 4051312 - RNA, 15 nt, SARS coronavirus
acaugaaaauuauuc

SEQ ID NO: 4051313 - RNA, 14 nt, SARS coronavirus
acaugaaacuucuc

SEQ ID NO: 4051314 - RNA, 21 nt, SARS coronavirus
acauuggccgcaaauugcaca

SEQ ID NO: 4051315 - RNA, 15 nt, SARS coronavirus
acauuucaggcauua

SEQ ID NO: 4051316 - RNA, 13 nt, SARS coronavirus
acccaaagaccac

SEQ ID NO: 4051317 - RNA, 18 nt, SARS coronavirus
acccagaaacaaacauuc

SEQ ID NO: 4051318 - RNA, 15 nt, SARS coronavirus
acccucuugcugaca

SEQ ID NO: 4051319 - RNA, 16 nt, SARS coronavirus
accgcuacaagccuca

SEQ ID NO: 4051320 - RNA, 16 nt, SARS coronavirus
accugccaaaagagau

SEQ ID NO: 4051321 - RNA, 17 nt, SARS coronavirus
accuucaugaaggucac

SEQ ID NO: 4051322 - RNA, 16 nt, SARS coronavirus
acgaacaugaaacuuc

SEQ ID NO: 4051323 - RNA, 17 nt, SARS coronavirus
acgcauacaaaacauuc

SEQ ID NO: 4051324 - RNA, 13 nt, SARS coronavirus
acguacugccaca

SEQ ID NO: 4051325 - RNA, 21 nt, SARS coronavirus
acguacugccacaaaacagua

SEQ ID NO: 4051326 - RNA, 14 nt, SARS coronavirus
acgucauacugcug

SEQ ID NO: 4051327 - RNA, 17 nt, SARS coronavirus
acuaagaagaauuauuc

SEQ ID NO: 4051328 - RNA, 13 nt, SARS coronavirus
acuacaauuugcc

SEQ ID NO: 4051329 - RNA, 19 nt, SARS coronavirus
acuauuauuauuauucugu

SEQ ID NO: 4051330 - RNA, 18 nt, SARS coronavirus
acucaggcauaaacacuc

SEQ ID NO: 4051331 - RNA, 22 nt, SARS coronavirus
acucugagccaguucucaaggg

SEQ ID NO: 4051332 - RNA, 14 nt, SARS coronavirus
acugagggagccuu

SEQ ID NO: 4051333 - RNA, 16 nt, SARS coronavirus
acugaugaagcucagc

SEQ ID NO: 4051334 - RNA, 22 nt, SARS coronavirus
acugauguuucuacagcaauuc

SEQ ID NO: 4051335 - RNA, 22 nt, SARS coronavirus
acugcacagccaguaaaaauug

SEQ ID NO: 4051336 - RNA, 17 nt, SARS coronavirus
acugccacaaaacagua

SEQ ID NO: 4051337 - RNA, 18 nt, SARS coronavirus
acuguacuacuaaaagaa

SEQ ID NO: 4051338 - RNA, 17 nt, SARS coronavirus
acuuacgagaguuugug

SEQ ID NO: 4051339 - RNA, 12 nt, SARS coronavirus
acuuauagcacu

SEQ ID NO: 4051340 - RNA, 15 nt, SARS coronavirus
acuugcacuagcaca

SEQ ID NO: 4051341 - RNA, 19 nt, SARS coronavirus
agaaagugaguacgaacuu

SEQ ID NO: 4051342 - RNA, 15 nt, SARS coronavirus
agaaugcucaagcau

SEQ ID NO: 4051343 - RNA, 13 nt, SARS coronavirus
agacaacuucaaa

SEQ ID NO: 4051344 - RNA, 15 nt, SARS coronavirus
agagacaaaagaagc

SEQ ID NO: 4051345 - RNA, 14 nt, SARS coronavirus
agaucacuguggcu

SEQ ID NO: 4051346 - RNA, 17 nt, SARS coronavirus
agaugaccaaauuggcu

SEQ ID NO: 4051347 - RNA, 16 nt, SARS coronavirus
agcauuaaacacacuu

SEQ ID NO: 4051348 - RNA, 14 nt, SARS coronavirus
agccaguucucaag

SEQ ID NO: 4051349 - RNA, 20 nt, SARS coronavirus
agccauucuuacagccuuuu

SEQ ID NO: 4051350 - RNA, 14 nt, SARS coronavirus
agcgccagcaauuu

SEQ ID NO: 4051351 - RNA, 22 nt, SARS coronavirus
agcucuaauuuuggugcaauuu

SEQ ID NO: 4051352 - RNA, 20 nt, SARS coronavirus
agcucucacucagcauggca

SEQ ID NO: 4051353 - RNA, 23 nt, SARS coronavirus
aggaacaacauugccaaaaggcu

SEQ ID NO: 4051354 - RNA, 12 nt, SARS coronavirus
aggaacuucuuu

SEQ ID NO: 4051355 - RNA, 23 nt, SARS coronavirus
aggagauguugugagauucccua

SEQ ID NO: 4051356 - RNA, 19 nt, SARS coronavirus
agggaggacuugaaagagc

SEQ ID NO: 4051357 - RNA, 21 nt, SARS coronavirus
agggcuuccaguucauuugca

SEQ ID NO: 4051358 - RNA, 19 nt, SARS coronavirus
aggucaccaaacugcugca

SEQ ID NO: 4051359 - RNA, 22 nt, SARS coronavirus
aggucgcuaaaaauuuaaauga

SEQ ID NO: 4051360 - RNA, 16 nt, SARS coronavirus
aguacagcgcugugca

SEQ ID NO: 4051361 - RNA, 14 nt, SARS coronavirus
agucuacacaaauu

SEQ ID NO: 4051362 - RNA, 15 nt, SARS coronavirus
aguuagaugaugaag

SEQ ID NO: 4051363 - RNA, 14 nt, SARS coronavirus
aguugccucaaggg

SEQ ID NO: 4051364 - RNA, 12 nt, SARS coronavirus
auaacaaugcug

SEQ ID NO: 4051365 - RNA, 16 nt, SARS coronavirus
auaauuauaaauugcc

SEQ ID NO: 4051366 - RNA, 19 nt, SARS coronavirus
aucaauuacugcacagcca

SEQ ID NO: 4051367 - RNA, 11 nt, SARS coronavirus
aucugcugcug

SEQ ID NO: 4051368 - RNA, 17 nt, SARS coronavirus
aucuugcugcuacuaaa

SEQ ID NO: 4051369 - RNA, 17 nt, SARS coronavirus
augaguggagcuucugc

SEQ ID NO: 4051370 - RNA, 17 nt, SARS coronavirus
augcaguugcauaugca

SEQ ID NO: 4051371 - RNA, 20 nt, SARS coronavirus
augccuguuucuauggcuaa

SEQ ID NO: 4051372 - RNA, 20 nt, SARS coronavirus
augcuacuaaauucccuucu

SEQ ID NO: 4051373 - RNA, 20 nt, SARS coronavirus
auggcacacuaugguucaaa

SEQ ID NO: 4051374 - RNA, 14 nt, SARS coronavirus
augguucaaacaug

SEQ ID NO: 4051375 - RNA, 20 nt, SARS coronavirus
augguucaaacaugcacacc

SEQ ID NO: 4051376 - RNA, 23 nt, SARS coronavirus
auguaguucgugaucuaccuucu

SEQ ID NO: 4051377 - RNA, 16 nt, SARS coronavirus
augucgacacuucuua

SEQ ID NO: 4051378 - RNA, 17 nt, SARS coronavirus
augugcaaauacacaca

SEQ ID NO: 4051379 - RNA, 19 nt, SARS coronavirus
auguuacuaucaacuguca

SEQ ID NO: 4051380 - RNA, 22 nt, SARS coronavirus
auuaaauggccuugguauguuu

SEQ ID NO: 4051381 - RNA, 14 nt, SARS coronavirus
ucuugugcagaaug

SEQ ID NO: 4051382 - RNA, 14 nt, SARS coronavirus
ugaaacuucucauu

SEQ ID NO: 4051383 - RNA, 16 nt, SARS coronavirus
ugaacuuuuaaaugca

SEQ ID NO: 4051384 - RNA, 21 nt, SARS coronavirus
ugacaacccuuucuuugcugu

SEQ ID NO: 4051385 - RNA, 13 nt, SARS coronavirus
ugacauggaugau

SEQ ID NO: 4051386 - RNA, 19 nt, SARS coronavirus
ugacgcauacaaaacauuc

SEQ ID NO: 4051387 - RNA, 15 nt, SARS coronavirus
ugagauguuggcuuu

SEQ ID NO: 4051388 - RNA, 20 nt, SARS coronavirus
ugaugaaaaugguacaauca

SEQ ID NO: 4051389 - RNA, 22 nt, SARS coronavirus
ugaugaccacacaaggcagaug

SEQ ID NO: 4051390 - RNA, 18 nt, SARS coronavirus
ugcaccccaccugcucuu

SEQ ID NO: 4051391 - RNA, 21 nt, SARS coronavirus
ugcacuaacuugcacuagcac

SEQ ID NO: 4051392 - RNA, 14 nt, SARS coronavirus
ugcacuagcacaca

SEQ ID NO: 4051393 - RNA, 22 nt, SARS coronavirus
ugcaguugcauaugcacuguag

SEQ ID NO: 4051394 - RNA, 13 nt, SARS coronavirus
ugcaucuaauaaa

SEQ ID NO: 4051395 - RNA, 23 nt, SARS coronavirus
ugccacaaaacaguacaacguca

SEQ ID NO: 4051396 - RNA, 13 nt, SARS coronavirus
ugccgcagagaca

SEQ ID NO: 4051397 - RNA, 23 nt, SARS coronavirus
ugcgagcuauaucacuaucagga

SEQ ID NO: 4051398 - RNA, 13 nt, SARS coronavirus
ugcuaauuugcuu

SEQ ID NO: 4051399 - RNA, 18 nt, SARS coronavirus
ugcuagggagagcugccu

SEQ ID NO: 4051400 - RNA, 14 nt, SARS coronavirus
ugcugucuacagaa

SEQ ID NO: 4051401 - RNA, 22 nt, SARS coronavirus
ugcuuguuuugugcuugcugcu

SEQ ID NO: 4051402 - RNA, 19 nt, SARS coronavirus
uggauuauguuacuacaau

SEQ ID NO: 4051403 - RNA, 20 nt, SARS coronavirus
uggcuacuaccgaagagcua

SEQ ID NO: 4051404 - RNA, 19 nt, SARS coronavirus
uggcuagcggaggugguga

SEQ ID NO: 4051405 - RNA, 14 nt, SARS coronavirus
uggugaaacugccc

SEQ ID NO: 4051406 - RNA, 20 nt, SARS coronavirus
uguaacuuugaauuguguga

SEQ ID NO: 4051407 - RNA, 19 nt, SARS coronavirus
uguaggcuugauguggcuu

SEQ ID NO: 4051408 - RNA, 17 nt, SARS coronavirus
ugugcucuaggaaaggu

SEQ ID NO: 4051409 - RNA, 16 nt, SARS coronavirus
uguucccucaggagau

SEQ ID NO: 4051410 - RNA, 19 nt, SARS coronavirus
uguuggaagugcaaaucca

SEQ ID NO: 4051411 - RNA, 22 nt, SARS coronavirus
uguuuuaauaaugcuuauuaua

SEQ ID NO: 4051412 - RNA, 14 nt, SARS coronavirus
uuaaacaacuccug

SEQ ID NO: 4051413 - RNA, 22 nt, SARS coronavirus
uuaaugcuacuaaauucccuuc

SEQ ID NO: 4051414 - RNA, 20 nt, SARS coronavirus
uuacagaguuguaguacuuu

SEQ ID NO: 4051415 - RNA, 19 nt, SARS coronavirus
uuacagccuuuucaccugc

SEQ ID NO: 4051416 - RNA, 18 nt, SARS coronavirus
uuaggagaaugacaaaaa

SEQ ID NO: 4051417 - RNA, 13 nt, SARS coronavirus
uuauuauuauucu

SEQ ID NO: 4051418 - RNA, 12 nt, SARS coronavirus
uucaagaaauuc

SEQ ID NO: 4051419 - RNA, 22 nt, SARS coronavirus
uucaauagugagacaauuauuu

SEQ ID NO: 4051420 - RNA, 15 nt, SARS coronavirus
uucacagcucucacu

SEQ ID NO: 4051421 - RNA, 13 nt, SARS coronavirus
uucaucgaggcca

SEQ ID NO: 4051422 - RNA, 15 nt, SARS coronavirus
uucaucuuguugacu

SEQ ID NO: 4051423 - RNA, 15 nt, SARS coronavirus
uuccauuuuauucua

SEQ ID NO: 4051424 - RNA, 17 nt, SARS coronavirus
uucccucgaggccaggg

SEQ ID NO: 4051425 - RNA, 13 nt, SARS coronavirus
uuccuauuccuag

SEQ ID NO: 4051426 - RNA, 20 nt, SARS coronavirus
uuccugacauugauuguauu

SEQ ID NO: 4051427 - RNA, 19 nt, SARS coronavirus
uucgauaaugcauuuaauu

SEQ ID NO: 4051428 - RNA, 23 nt, SARS coronavirus
uucucauuguuuugacuuguauu

SEQ ID NO: 4051429 - RNA, 15 nt, SARS coronavirus
uucuuauuauuucuu

SEQ ID NO: 4051430 - RNA, 13 nt, SARS coronavirus
uugcugaacucaa

SEQ ID NO: 4051431 - RNA, 22 nt, SARS coronavirus
uugcugcuacuaaaaugucuga

SEQ ID NO: 4051432 - RNA, 18 nt, SARS coronavirus
uugcuggacuaauugcca

SEQ ID NO: 4051433 - RNA, 18 nt, SARS coronavirus
uugcuuguuuugugcuug

SEQ ID NO: 4051434 - RNA, 13 nt, SARS coronavirus
uugcuuuugcuug

SEQ ID NO: 4051435 - RNA, 15 nt, SARS coronavirus
uuggcauggaaguca

SEQ ID NO: 4051436 - RNA, 15 nt, SARS coronavirus
uugggcaagcugcaa

SEQ ID NO: 4051437 - RNA, 15 nt, SARS coronavirus
uuguaguacuuucuu

SEQ ID NO: 4051438 - RNA, 17 nt, SARS coronavirus
uuguuaccaucuauuca

SEQ ID NO: 4051439 - RNA, 14 nt, SARS coronavirus
uuuaacaagcuugu

SEQ ID NO: 4051440 - RNA, 21 nt, SARS coronavirus
uuuaaggaugguauuuauuuu

SEQ ID NO: 4051441 - RNA, 22 nt, SARS coronavirus
uuuaagugcuauggcguuucug

SEQ ID NO: 4051442 - RNA, 18 nt, SARS coronavirus
uuuacaucuugcgagcua

SEQ ID NO: 4051443 - RNA, 20 nt, SARS coronavirus
uuucaagugugcuaaaugau

SEQ ID NO: 4051444 - RNA, 23 nt, SARS coronavirus
uuucugccacuaaguugaaugau

SEQ ID NO: 4051445 - RNA, 15 nt, SARS coronavirus
uuuugcuugugcuga

SEQ ID NO: 4051446 - RNA, 22 nt, SARS coronavirus
aaaacguacugccacaaaacag

SEQ ID NO: 4051447 - RNA, 20 nt, SARS coronavirus
aaaagacugaugaagcucag

SEQ ID NO: 4051448 - RNA, 23 nt, SARS coronavirus
aaaaucauacaucaccagauguu

SEQ ID NO: 4051449 - RNA, 15 nt, SARS coronavirus
aaaaugucugagugu

SEQ ID NO: 4051450 - RNA, 19 nt, SARS coronavirus
aaaauuauucucuuccuga

SEQ ID NO: 4051451 - RNA, 20 nt, SARS coronavirus
aaaauuccaugaguggagcu

SEQ ID NO: 4051452 - RNA, 15 nt, SARS coronavirus
aaaauuucuaauugu

SEQ ID NO: 4051453 - RNA, 19 nt, SARS coronavirus
aaacaguacaacgucacuc

SEQ ID NO: 4051454 - RNA, 23 nt, SARS coronavirus
aaacugguguuauugcugauuau

SEQ ID NO: 4051455 - RNA, 13 nt, SARS coronavirus
aaagagccaccac

SEQ ID NO: 4051456 - RNA, 16 nt, SARS coronavirus
aaagagccaccacauu

SEQ ID NO: 4051457 - RNA, 15 nt, SARS coronavirus
aaagauggcagcuag

SEQ ID NO: 4051458 - RNA, 17 nt, SARS coronavirus
aaauauuagacauuuca

SEQ ID NO: 4051459 - RNA, 19 nt, SARS coronavirus
aaauauuagacauuucacc

SEQ ID NO: 4051460 - RNA, 20 nt, SARS coronavirus
aaauuauucucuuccugaca

SEQ ID NO: 4051461 - RNA, 17 nt, SARS coronavirus
aaauugacaaugcuucu

SEQ ID NO: 4051462 - RNA, 15 nt, SARS coronavirus
aacaaauuaaaaugu

SEQ ID NO: 4051463 - RNA, 17 nt, SARS coronavirus
aacaacuaaucagggcu

SEQ ID NO: 4051464 - RNA, 23 nt, SARS coronavirus
aacaaggcgauuagucaaauuca

SEQ ID NO: 4051465 - RNA, 17 nt, SARS coronavirus
aacagcgccgaccccaa

SEQ ID NO: 4051466 - RNA, 22 nt, SARS coronavirus
aacauggcugacuuaucaugga

SEQ ID NO: 4051467 - RNA, 20 nt, SARS coronavirus
aacauguuuauuuucuuauu

SEQ ID NO: 4051468 - RNA, 17 nt, SARS coronavirus
aaccuuuaagugcuaug

SEQ ID NO: 4051469 - RNA, 13 nt, SARS coronavirus
aacuacuuuguuu

SEQ ID NO: 4051470 - RNA, 16 nt, SARS coronavirus
aagacguuguuaacca

SEQ ID NO: 4051471 - RNA, 13 nt, SARS coronavirus
aagacuaccaaau

SEQ ID NO: 4051472 - RNA, 22 nt, SARS coronavirus
aaggaacugauuacaaacauug

SEQ ID NO: 4051473 - RNA, 16 nt, SARS coronavirus
aaggaccugccaaaag

SEQ ID NO: 4051474 - RNA, 13 nt, SARS coronavirus
aaguguaauuaca

SEQ ID NO: 4051475 - RNA, 16 nt, SARS coronavirus
aauaaacgaacaaauu

SEQ ID NO: 4051476 - RNA, 18 nt, SARS coronavirus
aauauauuaaauggccuu

SEQ ID NO: 4051477 - RNA, 14 nt, SARS coronavirus
aauauuacaaacuu

SEQ ID NO: 4051478 - RNA, 14 nt, SARS coronavirus
aauggcacuucuug

SEQ ID NO: 4051479 - RNA, 15 nt, SARS coronavirus
acaaaagaagcagcc

SEQ ID NO: 4051480 - RNA, 14 nt, SARS coronavirus
acaauucuacuaau

SEQ ID NO: 4051481 - RNA, 13 nt, SARS coronavirus
acacucaugauga

SEQ ID NO: 4051482 - RNA, 16 nt, SARS coronavirus
acauggcuauuucacc

SEQ ID NO: 4051483 - RNA, 19 nt, SARS coronavirus
acauuugguggacccacag

SEQ ID NO: 4051484 - RNA, 19 nt, SARS coronavirus
acauuuucaucgaggccac

SEQ ID NO: 4051485 - RNA, 17 nt, SARS coronavirus
accaaagucuaaacgaa

SEQ ID NO: 4051486 - RNA, 20 nt, SARS coronavirus
accaacagagccuaaaaagg

SEQ ID NO: 4051487 - RNA, 14 nt, SARS coronavirus
accaauuuaacaag

SEQ ID NO: 4051488 - RNA, 22 nt, SARS coronavirus
accacauuuucaucgaggccac

SEQ ID NO: 4051489 - RNA, 12 nt, SARS coronavirus
accucaugugcu

SEQ ID NO: 4051490 - RNA, 23 nt, SARS coronavirus
acgaguucgugguggugacggca

SEQ ID NO: 4051491 - RNA, 20 nt, SARS coronavirus
acgcaauggggcaaggccaa

SEQ ID NO: 4051492 - RNA, 22 nt, SARS coronavirus
acguacuuguuguuuuaaauaa

SEQ ID NO: 4051493 - RNA, 15 nt, SARS coronavirus
acuacaauuugccua

SEQ ID NO: 4051494 - RNA, 16 nt, SARS coronavirus
acuauaaauuaaauac

SEQ ID NO: 4051495 - RNA, 21 nt, SARS coronavirus
acuaugguucaaacaugcaca

SEQ ID NO: 4051496 - RNA, 14 nt, SARS coronavirus
acugaugaagcuca

SEQ ID NO: 4051497 - RNA, 21 nt, SARS coronavirus
acuugucauuggugcugugau

SEQ ID NO: 4051498 - RNA, 15 nt, SARS coronavirus
agaaaucugcugcug

SEQ ID NO: 4051499 - RNA, 23 nt, SARS coronavirus
agaauuauuaugagauguuggcu

SEQ ID NO: 4051500 - RNA, 20 nt, SARS coronavirus
agacagauugaaccagcuug

SEQ ID NO: 4051501 - RNA, 19 nt, SARS coronavirus
agagacaaaagaagcagcc

SEQ ID NO: 4051502 - RNA, 17 nt, SARS coronavirus
agagcugccuauaugga

SEQ ID NO: 4051503 - RNA, 14 nt, SARS coronavirus
agauggguuucucu

SEQ ID NO: 4051504 - RNA, 18 nt, SARS coronavirus
agauucccucgaggccag

SEQ ID NO: 4051505 - RNA, 22 nt, SARS coronavirus
agauugacaaaggaauuuacca

SEQ ID NO: 4051506 - RNA, 15 nt, SARS coronavirus
agcacaaguagguuu

SEQ ID NO: 4051507 - RNA, 17 nt, SARS coronavirus
agcacacacuuugcuuu

SEQ ID NO: 4051508 - RNA, 12 nt, SARS coronavirus
agccucuucucg

SEQ ID NO: 4051509 - RNA, 13 nt, SARS coronavirus
agccuuucugcua

SEQ ID NO: 4051510 - RNA, 17 nt, SARS coronavirus
agcucagccccagaugg

SEQ ID NO: 4051511 - RNA, 13 nt, SARS coronavirus
agcuuguuuuccu

SEQ ID NO: 4051512 - RNA, 23 nt, SARS coronavirus
aggaacuggcccagaagcuucac

SEQ ID NO: 4051513 - RNA, 14 nt, SARS coronavirus
aggcauaaacacuc

SEQ ID NO: 4051514 - RNA, 17 nt, SARS coronavirus
aggcaucuaaaaagccu

SEQ ID NO: 4051515 - RNA, 18 nt, SARS coronavirus
aggccaacaacaacaagg

SEQ ID NO: 4051516 - RNA, 21 nt, SARS coronavirus
aggccaacaacaacaaggcca

SEQ ID NO: 4051517 - RNA, 17 nt, SARS coronavirus
aggcggcagucaagccu

SEQ ID NO: 4051518 - RNA, 14 nt, SARS coronavirus
aggguuucauacua

SEQ ID NO: 4051519 - RNA, 13 nt, SARS coronavirus
aguaauagguuuc

SEQ ID NO: 4051520 - RNA, 21 nt, SARS coronavirus
aguacauaucugaugccuuuu

SEQ ID NO: 4051521 - RNA, 22 nt, SARS coronavirus
agucgaggcggagguacaaauu

SEQ ID NO: 4051522 - RNA, 16 nt, SARS coronavirus
agucuacucuugugca

SEQ ID NO: 4051523 - RNA, 16 nt, SARS coronavirus
agugagacaauuauuu

SEQ ID NO: 4051524 - RNA, 19 nt, SARS coronavirus
aguuucugguaaaggccaa

SEQ ID NO: 4051525 - RNA, 17 nt, SARS coronavirus
aguuugaugaggaugac

SEQ ID NO: 4051526 - RNA, 18 nt, SARS coronavirus
auaauaaguucaauagug

SEQ ID NO: 4051527 - RNA, 16 nt, SARS coronavirus
auaauuacuacagaca

SEQ ID NO: 4051528 - RNA, 14 nt, SARS coronavirus
auacaaaacauucc

SEQ ID NO: 4051529 - RNA, 13 nt, SARS coronavirus
auacacccaaaga

SEQ ID NO: 4051530 - RNA, 13 nt, SARS coronavirus
auacaguuucuuu

SEQ ID NO: 4051531 - RNA, 18 nt, SARS coronavirus
auacugcugaacaagcac

SEQ ID NO: 4051532 - RNA, 12 nt, SARS coronavirus
auacuucaucua

SEQ ID NO: 4051533 - RNA, 21 nt, SARS coronavirus
auagcuucuuaggagaaugac

SEQ ID NO: 4051534 - RNA, 17 nt, SARS coronavirus
auaucuaaugugccuuu

SEQ ID NO: 4051535 - RNA, 16 nt, SARS coronavirus
aucaacaccaauagug

SEQ ID NO: 4051536 - RNA, 15 nt, SARS coronavirus
aucaacugucaagau

SEQ ID NO: 4051537 - RNA, 21 nt, SARS coronavirus
aucagacacucuuuauuuaac

SEQ ID NO: 4051538 - RNA, 13 nt, SARS coronavirus
aucuauuguggcu

SEQ ID NO: 4051539 - RNA, 14 nt, SARS coronavirus
augaaacuucucau

SEQ ID NO: 4051540 - RNA, 16 nt, SARS coronavirus
augaccaaauuggcua

SEQ ID NO: 4051541 - RNA, 15 nt, SARS coronavirus
augaccacacaaggc

SEQ ID NO: 4051542 - RNA, 18 nt, SARS coronavirus
augcaguugcauaugcac

SEQ ID NO: 4051543 - RNA, 13 nt, SARS coronavirus
auggcacuucuug

SEQ ID NO: 4051544 - RNA, 13 nt, SARS coronavirus
auggguuucucua

SEQ ID NO: 4051545 - RNA, 19 nt, SARS coronavirus
auguaaacguuuucgcaau

SEQ ID NO: 4051546 - RNA, 18 nt, SARS coronavirus
augucgacacuucuuaug

SEQ ID NO: 4051547 - RNA, 12 nt, SARS coronavirus
auuacaaacauu

SEQ ID NO: 4051548 - RNA, 21 nt, SARS coronavirus
auuauuaacaauucuacuaau

SEQ ID NO: 4051549 - RNA, 18 nt, SARS coronavirus
auucaacccagaaacaaa

SEQ ID NO: 4051550 - RNA, 22 nt, SARS coronavirus
auucaacugacaauaaccagaa

SEQ ID NO: 4051551 - RNA, 13 nt, SARS coronavirus
auucagguuuugc

SEQ ID NO: 4051552 - RNA, 23 nt, SARS coronavirus
auucuguuuggaacuuuaacauu

SEQ ID NO: 4051553 - RNA, 23 nt, SARS coronavirus
auugaaccagcuugagagcaaag

SEQ ID NO: 4051554 - RNA, 18 nt, SARS coronavirus
auugaccgccucaaugag

SEQ ID NO: 4051555 - RNA, 20 nt, SARS coronavirus
auugacgcauacaaaacauu

SEQ ID NO: 4051556 - RNA, 22 nt, SARS coronavirus
auuucaaccauuucaacaauuu

SEQ ID NO: 4051557 - RNA, 17 nt, SARS coronavirus
auuucuuccauuuuauu

SEQ ID NO: 4051558 - RNA, 21 nt, SARS coronavirus
auuugcaauuuacugcugcua

SEQ ID NO: 4051559 - RNA, 15 nt, SARS coronavirus
auuugguggacccac

SEQ ID NO: 4051560 - RNA, 14 nt, SARS coronavirus
auuuugcugccaca

SEQ ID NO: 4051561 - RNA, 15 nt, SARS coronavirus
auuuuggugcaauuu

SEQ ID NO: 4051562 - RNA, 14 nt, SARS coronavirus
auuuugguuuucac

SEQ ID NO: 4051563 - RNA, 18 nt, SARS coronavirus
gaaaaaaaauuucuaauu

SEQ ID NO: 4051564 - RNA, 12 nt, SARS coronavirus
gaaaauuauucu

SEQ ID NO: 4051565 - RNA, 11 nt, SARS coronavirus
gaaacaaacau

SEQ ID NO: 4051566 - RNA, 14 nt, SARS coronavirus
gaaagacagaauga

SEQ ID NO: 4051567 - RNA, 14 nt, SARS coronavirus
gaaaucugcugcug

SEQ ID NO: 4051568 - RNA, 13 nt, SARS coronavirus
gaacaacauugcc

SEQ ID NO: 4051569 - RNA, 23 nt, SARS coronavirus
gaacuugucauuggugcugugau

SEQ ID NO: 4051570 - RNA, 21 nt, SARS coronavirus
gaaggucaccaaacugcugca

SEQ ID NO: 4051571 - RNA, 20 nt, SARS coronavirus
gaaugugcuaauuugcuucu

SEQ ID NO: 4051572 - RNA, 23 nt, SARS coronavirus
gacacucccuagggcgcugugac

SEQ ID NO: 4051573 - RNA, 16 nt, SARS coronavirus
gaccuaaucagacaag

SEQ ID NO: 4051574 - RNA, 21 nt, SARS coronavirus
gacugaugaagcucagccuuu

SEQ ID NO: 4051575 - RNA, 18 nt, SARS coronavirus
gacuuucaggauugcuau

SEQ ID NO: 4051576 - RNA, 19 nt, SARS coronavirus
gagcugccuauauggaaga

SEQ ID NO: 4051577 - RNA, 16 nt, SARS coronavirus
gaggacuugaaagagc

SEQ ID NO: 4051578 - RNA, 19 nt, SARS coronavirus
gauaguucaauugcuuacu

SEQ ID NO: 4051579 - RNA, 17 nt, SARS coronavirus
gaugaccaaauuggcua

SEQ ID NO: 4051580 - RNA, 13 nt, SARS coronavirus
gaugcuguugauu

SEQ ID NO: 4051581 - RNA, 14 nt, SARS coronavirus
gcaaauugcacaau

SEQ ID NO: 4051582 - RNA, 21 nt, SARS coronavirus
gcaaguacuguucaugcuaca

SEQ ID NO: 4051583 - RNA, 14 nt, SARS coronavirus
gcaauccuaauaac

SEQ ID NO: 4051584 - RNA, 16 nt, SARS coronavirus
gcaauuuacugcugcu

SEQ ID NO: 4051585 - RNA, 17 nt, SARS coronavirus
gcacaccuaauguuacu

SEQ ID NO: 4051586 - RNA, 21 nt, SARS coronavirus
gcauuaaacacacuuguuaaa

SEQ ID NO: 4051587 - RNA, 23 nt, SARS coronavirus
gcauuacauuugguggacccaca

SEQ ID NO: 4051588 - RNA, 20 nt, SARS coronavirus
gcauucuuuggaaugucacg

SEQ ID NO: 4051589 - RNA, 21 nt, SARS coronavirus
gccacuuuuucucauuguugc

SEQ ID NO: 4051590 - RNA, 19 nt, SARS coronavirus
gccagggcguuccaaucaa

SEQ ID NO: 4051591 - RNA, 15 nt, SARS coronavirus
gccaguucucaaggg

SEQ ID NO: 4051592 - RNA, 16 nt, SARS coronavirus
gcccucgcgcuauugc

SEQ ID NO: 4051593 - RNA, 19 nt, SARS coronavirus
gccgcagagacaaaagaag

SEQ ID NO: 4051594 - RNA, 18 nt, SARS coronavirus
gccuauuuuguuggcuau

SEQ ID NO: 4051595 - RNA, 17 nt, SARS coronavirus
gccuugaauacacccaa

SEQ ID NO: 4051596 - RNA, 20 nt, SARS coronavirus
gccuuucuccccugauggca

SEQ ID NO: 4051597 - RNA, 17 nt, SARS coronavirus
gcggcagucaagccucu

SEQ ID NO: 4051598 - RNA, 20 nt, SARS coronavirus
gcuagcccuuuauaagggcu

SEQ ID NO: 4051599 - RNA, 12 nt, SARS coronavirus
gcuauugcugcu

SEQ ID NO: 4051600 - RNA, 15 nt, SARS coronavirus
gcugcaaguuugaug

SEQ ID NO: 4051601 - RNA, 15 nt, SARS coronavirus
gcugcagguauggag

SEQ ID NO: 4051602 - RNA, 17 nt, SARS coronavirus
gcugcuauuuguuacca

SEQ ID NO: 4051603 - RNA, 12 nt, SARS coronavirus
gcugguggugcg

SEQ ID NO: 4051604 - RNA, 17 nt, SARS coronavirus
gcugugaucauucgugg

SEQ ID NO: 4051605 - RNA, 20 nt, SARS coronavirus
gcuucugcugauucaacuca

SEQ ID NO: 4051606 - RNA, 23 nt, SARS coronavirus
gcuucugucgucaacauucaaaa

SEQ ID NO: 4051607 - RNA, 19 nt, SARS coronavirus
gcuucuuaggagaaugaca

SEQ ID NO: 4051608 - RNA, 23 nt, SARS coronavirus
gcuuguuuugugcuugcugcugu

SEQ ID NO: 4051609 - RNA, 21 nt, SARS coronavirus
ggaacauggcugacuuaucau

SEQ ID NO: 4051610 - RNA, 19 nt, SARS coronavirus
ggagccuugaauacaccca

SEQ ID NO: 4051611 - RNA, 16 nt, SARS coronavirus
ggaugacaaagaucca

SEQ ID NO: 4051612 - RNA, 14 nt, SARS coronavirus
ggcaaaaugaaaga

SEQ ID NO: 4051613 - RNA, 21 nt, SARS coronavirus
ggcaaaaugaaagagcucagc

SEQ ID NO: 4051614 - RNA, 23 nt, SARS coronavirus
ggcaaaaugaaagagcucagccc

SEQ ID NO: 4051615 - RNA, 18 nt, SARS coronavirus
ggcacugauucagguuuu

SEQ ID NO: 4051616 - RNA, 20 nt, SARS coronavirus
gguaauacuuauagcacugc

SEQ ID NO: 4051617 - RNA, 17 nt, SARS coronavirus
gguacugccacugcugg

SEQ ID NO: 4051618 - RNA, 16 nt, SARS coronavirus
gguucaacaagagcuc

SEQ ID NO: 4051619 - RNA, 21 nt, SARS coronavirus
gguuuauuacacagaggaacu

SEQ ID NO: 4051620 - RNA, 17 nt, SARS coronavirus
gucaagccucuucucgc

SEQ ID NO: 4051621 - RNA, 20 nt, SARS coronavirus
gucacgcauuggcauggaag

SEQ ID NO: 4051622 - RNA, 20 nt, SARS coronavirus
gucacuaagaaaucugcugc

SEQ ID NO: 4051623 - RNA, 15 nt, SARS coronavirus
gucuaaacgaacaug

SEQ ID NO: 4051624 - RNA, 22 nt, SARS coronavirus
gugacggcaaaaugaaagagcu

SEQ ID NO: 4051625 - RNA, 16 nt, SARS coronavirus
gugauauuaaugcuag

SEQ ID NO: 4051626 - RNA, 18 nt, SARS coronavirus
gugcaagaucaguuucac

SEQ ID NO: 4051627 - RNA, 18 nt, SARS coronavirus
gugcuaauuugcuucucc

SEQ ID NO: 4051628 - RNA, 19 nt, SARS coronavirus
gugcucuaggaaagguuuu

SEQ ID NO: 4051629 - RNA, 23 nt, SARS coronavirus
gugcuugcugcugucuacagaau

SEQ ID NO: 4051630 - RNA, 24 nt, SARS coronavirus
guuacaaucuugcuuuguugcaug

SEQ ID NO: 4051631 - RNA, 16 nt, SARS coronavirus
guucaugcuacagcaa

SEQ ID NO: 4051632 - RNA, 23 nt, SARS coronavirus
guucauuugcaauuuacugcugc

SEQ ID NO: 4051633 - RNA, 15 nt, SARS coronavirus
guugcauaugcacug

SEQ ID NO: 4051634 - RNA, 20 nt, SARS coronavirus
guuuuaauaaugcuuauuau

SEQ ID NO: 4051635 - RNA, 14 nt, SARS coronavirus
uaaaaaggacaaaa

SEQ ID NO: 4051636 - RNA, 21 nt, SARS coronavirus
uaaacgaacuaacuauuauua

SEQ ID NO: 4051637 - RNA, 15 nt, SARS coronavirus
uaaagccaacuacau

SEQ ID NO: 4051638 - RNA, 16 nt, SARS coronavirus
uaaaggccaacaacaa

SEQ ID NO: 4051639 - RNA, 14 nt, SARS coronavirus
uaaaugauauccuu

SEQ ID NO: 4051640 - RNA, 13 nt, SARS coronavirus
uaaauuggaugac

SEQ ID NO: 4051641 - RNA, 20 nt, SARS coronavirus
uaaauuugcacuaacuugca

SEQ ID NO: 4051642 - RNA, 22 nt, SARS coronavirus
uaacaacacaguuuaugauccu

SEQ ID NO: 4051643 - RNA, 13 nt, SARS coronavirus
uaacuaaacagca

SEQ ID NO: 4051644 - RNA, 16 nt, SARS coronavirus
uaacuaaacagcacaa

SEQ ID NO: 4051645 - RNA, 18 nt, SARS coronavirus
uaacugcacugauguuuc

SEQ ID NO: 4051646 - RNA, 17 nt, SARS coronavirus
uaagaaaucugcugcug

SEQ ID NO: 4051647 - RNA, 16 nt, SARS coronavirus
uaagaagaauuauucg

SEQ ID NO: 4051648 - RNA, 15 nt, SARS coronavirus
uaagcacaagaaagu

SEQ ID NO: 4051649 - RNA, 20 nt, SARS coronavirus
uaauacuuauagcacugcuu

SEQ ID NO: 4051650 - RNA, 15 nt, SARS coronavirus
uaauacuuugcuuca

SEQ ID NO: 4051651 - RNA, 14 nt, SARS coronavirus
uaaucuugcugcua

SEQ ID NO: 4051652 - RNA, 21 nt, SARS coronavirus
uaauuucaggguuguucccuc

SEQ ID NO: 4051653 - RNA, 17 nt, SARS coronavirus
uacauaucugaugccuu

SEQ ID NO: 4051654 - RNA, 15 nt, SARS coronavirus
uacuucguugcuucc

SEQ ID NO: 4051655 - RNA, 14 nt, SARS coronavirus
uaguacagcgcugu

SEQ ID NO: 4051656 - RNA, 14 nt, SARS coronavirus
uaucauuaugagga

SEQ ID NO: 4051657 - RNA, 15 nt, SARS coronavirus
uauuuugguuuucac

SEQ ID NO: 4051658 - RNA, 15 nt, SARS coronavirus
ucaaagagauuucaa

SEQ ID NO: 4051659 - RNA, 16 nt, SARS coronavirus
ucaaggaacaacauug

SEQ ID NO: 4051660 - RNA, 22 nt, SARS coronavirus
ucaaggaacaacauugccaaaa

SEQ ID NO: 4051661 - RNA, 15 nt, SARS coronavirus
ucaagucaaacaaau

SEQ ID NO: 4051662 - RNA, 18 nt, SARS coronavirus
ucaagucaaacaaaugua

SEQ ID NO: 4051663 - RNA, 20 nt, SARS coronavirus
ucaauaaaagauggcagcua

SEQ ID NO: 4051664 - RNA, 22 nt, SARS coronavirus
ucaauagugagacaauuauuua

SEQ ID NO: 4051665 - RNA, 13 nt, SARS coronavirus
ucacaccagcuug

SEQ ID NO: 4051666 - RNA, 12 nt, SARS coronavirus
ucacagaugcug

SEQ ID NO: 4051667 - RNA, 20 nt, SARS coronavirus
ucacagcucucacucagcau

SEQ ID NO: 4051668 - RNA, 19 nt, SARS coronavirus
ucaccaaacugcugcauuu

SEQ ID NO: 4051669 - RNA, 15 nt, SARS coronavirus
ucacuaagaaaucug

SEQ ID NO: 4051670 - RNA, 16 nt, SARS coronavirus
ucagguauugcugcug

SEQ ID NO: 4051671 - RNA, 21 nt, SARS coronavirus
uccaugaguggagcuucugcu

SEQ ID NO: 4051672 - RNA, 21 nt, SARS coronavirus
uccuaauuacacucaacauac

SEQ ID NO: 4051673 - RNA, 14 nt, SARS coronavirus
ucgauaaugcauuu

SEQ ID NO: 4051674 - RNA, 22 nt, SARS coronavirus
ucuaaacgaacaugaaacuucu

SEQ ID NO: 4051675 - RNA, 22 nt, SARS coronavirus
ucuaauuuuggugcaauuucaa

SEQ ID NO: 4051676 - RNA, 14 nt, SARS coronavirus
ucuccagacaacuu

SEQ ID NO: 4051677 - RNA, 23 nt, SARS coronavirus
ucugauaauggaccccaaucaaa

SEQ ID NO: 4051678 - RNA, 15 nt, SARS coronavirus
ucuuauuauuucuua

SEQ ID NO: 4051679 - RNA, 13 nt, SARS coronavirus
ucuucaaauaccu

SEQ ID NO: 4051680 - RNA, 13 nt, SARS coronavirus
ucuucugaaggag

SEQ ID NO: 4051681 - RNA, 13 nt, SARS coronavirus
ucuucuuccugcg

SEQ ID NO: 4051682 - RNA, 22 nt, SARS coronavirus
ucuugcugcuacuaaaaugucu

SEQ ID NO: 4051683 - RNA, 21 nt, SARS coronavirus
aaggaacaacauugccaaaag

SEQ ID NO: 4051684 - RNA, 22 nt, SARS coronavirus
aaggacaaaaagaaaaagacug

SEQ ID NO: 4051685 - RNA, 24 nt, SARS coronavirus
aaggcaucguauggguugcaacug

SEQ ID NO: 4051686 - RNA, 13 nt, SARS coronavirus
aaggccaaaacag

SEQ ID NO: 4051687 - RNA, 20 nt, SARS coronavirus
aaggucaccaaacugcugca

SEQ ID NO: 4051688 - RNA, 17 nt, SARS coronavirus
aagucagguaauuuuaa

SEQ ID NO: 4051689 - RNA, 15 nt, SARS coronavirus
aauaaauuugcacua

SEQ ID NO: 4051690 - RNA, 14 nt, SARS coronavirus
aaugauuaugguuu

SEQ ID NO: 4051691 - RNA, 15 nt, SARS coronavirus
aauucaacuccuggc

SEQ ID NO: 4051692 - RNA, 19 nt, SARS coronavirus
aauugacagguuaauuaca

SEQ ID NO: 4051693 - RNA, 14 nt, SARS coronavirus
aauuggaugacaaa

SEQ ID NO: 4051694 - RNA, 23 nt, SARS coronavirus
aauuguuauuggccauuaaauga

SEQ ID NO: 4051695 - RNA, 16 nt, SARS coronavirus
acaaaagaagcagccc

SEQ ID NO: 4051696 - RNA, 21 nt, SARS coronavirus
acaacauugccaaaaggcuuc

SEQ ID NO: 4051697 - RNA, 19 nt, SARS coronavirus
acaacgguacuauuaccgu

SEQ ID NO: 4051698 - RNA, 17 nt, SARS coronavirus
acaagccucacucccuu

SEQ ID NO: 4051699 - RNA, 17 nt, SARS coronavirus
acaauauugcuuugcua

SEQ ID NO: 4051700 - RNA, 15 nt, SARS coronavirus
acaaucacagaugcu

SEQ ID NO: 4051701 - RNA, 18 nt, SARS coronavirus
acacagaggaacuucuuu

SEQ ID NO: 4051702 - RNA, 19 nt, SARS coronavirus
acacuaugguucaaacaug

SEQ ID NO: 4051703 - RNA, 12 nt, SARS coronavirus
acacucuuuauu

SEQ ID NO: 4051704 - RNA, 17 nt, SARS coronavirus
acagagaaaucaaaugu

SEQ ID NO: 4051705 - RNA, 17 nt, SARS coronavirus
acagguacguuaauagu

SEQ ID NO: 4051706 - RNA, 21 nt, SARS coronavirus
acauacgagggcaauucacca

SEQ ID NO: 4051707 - RNA, 23 nt, SARS coronavirus
accagaaugcucaagcauuaaac

SEQ ID NO: 4051708 - RNA, 15 nt, SARS coronavirus
accagcuugagagca

SEQ ID NO: 4051709 - RNA, 14 nt, SARS coronavirus
accuuauguccuuc

SEQ ID NO: 4051710 - RNA, 19 nt, SARS coronavirus
accuuuaagugcuauggcg

SEQ ID NO: 4051711 - RNA, 23 nt, SARS coronavirus
accuuuuaaggaugguauuuauu

SEQ ID NO: 4051712 - RNA, 21 nt, SARS coronavirus
acgacaauauugcuuugcuag

SEQ ID NO: 4051713 - RNA, 16 nt, SARS coronavirus
acguagugccccccgc

SEQ ID NO: 4051714 - RNA, 15 nt, SARS coronavirus
acgucacucaagcau

SEQ ID NO: 4051715 - RNA, 13 nt, SARS coronavirus
acuaaauucccuu

SEQ ID NO: 4051716 - RNA, 23 nt, SARS coronavirus
acuacuuuguuugcuggcacaca

SEQ ID NO: 4051717 - RNA, 15 nt, SARS coronavirus
acucaacauacuuca

SEQ ID NO: 4051718 - RNA, 22 nt, SARS coronavirus
acucauugaccuucaagaauug

SEQ ID NO: 4051719 - RNA, 20 nt, SARS coronavirus
acucuuagaucaauuacugc

SEQ ID NO: 4051720 - RNA, 17 nt, SARS coronavirus
acugauuacaaacauug

SEQ ID NO: 4051721 - RNA, 18 nt, SARS coronavirus
acuuccucaaggaacaac

SEQ ID NO: 4051722 - RNA, 20 nt, SARS coronavirus
acuucucauuguuuugacuu

SEQ ID NO: 4051723 - RNA, 18 nt, SARS coronavirus
acuucuuuuucuugcuuu

SEQ ID NO: 4051724 - RNA, 22 nt, SARS coronavirus
acuuugcuucaccauuaagaga

SEQ ID NO: 4051725 - RNA, 12 nt, SARS coronavirus
acuuuuaaaugc

SEQ ID NO: 4051726 - RNA, 16 nt, SARS coronavirus
agaacaaacccaagga

SEQ ID NO: 4051727 - RNA, 17 nt, SARS coronavirus
agaacccauuacuuuau

SEQ ID NO: 4051728 - RNA, 18 nt, SARS coronavirus
agacauaucuaaugugcc

SEQ ID NO: 4051729 - RNA, 22 nt, SARS coronavirus
agacauuucaccuugcgcuuuu

SEQ ID NO: 4051730 - RNA, 15 nt, SARS coronavirus
agagauuucaaccau

SEQ ID NO: 4051731 - RNA, 21 nt, SARS coronavirus
agagauuucaaccauuucaac

SEQ ID NO: 4051732 - RNA, 12 nt, SARS coronavirus
agagcucagccc

SEQ ID NO: 4051733 - RNA, 21 nt, SARS coronavirus
agcguacuucuuuuucuugcu

SEQ ID NO: 4051734 - RNA, 17 nt, SARS coronavirus
aggaacauacgagggca

SEQ ID NO: 4051735 - RNA, 16 nt, SARS coronavirus
aggaacuuagauuccc

SEQ ID NO: 4051736 - RNA, 13 nt, SARS coronavirus
aggacaaaaagaa

SEQ ID NO: 4051737 - RNA, 20 nt, SARS coronavirus
aggacaaaaagaaaaagacu

SEQ ID NO: 4051738 - RNA, 14 nt, SARS coronavirus
aggacuugcucuuu

SEQ ID NO: 4051739 - RNA, 18 nt, SARS coronavirus
aggccagggcguuccaau

SEQ ID NO: 4051740 - RNA, 20 nt, SARS coronavirus
aggugcugauaguucaauug

SEQ ID NO: 4051741 - RNA, 21 nt, SARS coronavirus
aguacuagccaaaaaucuauu

SEQ ID NO: 4051742 - RNA, 16 nt, SARS coronavirus
aguacuguucaugcua

SEQ ID NO: 4051743 - RNA, 12 nt, SARS coronavirus
aguaugaugaaa

SEQ ID NO: 4051744 - RNA, 18 nt, SARS coronavirus
agugcgacauuccuauug

SEQ ID NO: 4051745 - RNA, 19 nt, SARS coronavirus
aguucgugaucuaccuucu

SEQ ID NO: 4051746 - RNA, 15 nt, SARS coronavirus
auaaaacgaacauga

SEQ ID NO: 4051747 - RNA, 16 nt, SARS coronavirus
auacaguuucuuuauu

SEQ ID NO: 4051748 - RNA, 15 nt, SARS coronavirus
auaccuuuugcuaug

SEQ ID NO: 4051749 - RNA, 18 nt, SARS coronavirus
auacgagcauguaacuuu

SEQ ID NO: 4051750 - RNA, 20 nt, SARS coronavirus
auagcgccaggacaaacugg

SEQ ID NO: 4051751 - RNA, 22 nt, SARS coronavirus
auagugguccagaugaccaaau

SEQ ID NO: 4051752 - RNA, 13 nt, SARS coronavirus
auauauuaaaugg

SEQ ID NO: 4051753 - RNA, 15 nt, SARS coronavirus
auaucugaugccuuu

SEQ ID NO: 4051754 - RNA, 16 nt, SARS coronavirus
auccuaauaacaaugc

SEQ ID NO: 4051755 - RNA, 14 nt, SARS coronavirus
aucucacauagcaa

SEQ ID NO: 4051756 - RNA, 20 nt, SARS coronavirus
aucugaaauauuagacauuu

SEQ ID NO: 4051757 - RNA, 15 nt, SARS coronavirus
aucuuagacauggca

SEQ ID NO: 4051758 - RNA, 17 nt, SARS coronavirus
aucuugacguuauaaua

SEQ ID NO: 4051759 - RNA, 18 nt, SARS coronavirus
aucuugacguuauaauaa

SEQ ID NO: 4051760 - RNA, 22 nt, SARS coronavirus
augaaaauuauucucuuccuga

SEQ ID NO: 4051761 - RNA, 14 nt, SARS coronavirus
augaagcucagccu

SEQ ID NO: 4051762 - RNA, 23 nt, SARS coronavirus
augaaggucaccaaacugcugca

SEQ ID NO: 4051763 - RNA, 15 nt, SARS coronavirus
augaucuuugcuucu

SEQ ID NO: 4051764 - RNA, 21 nt, SARS coronavirus
augauuaugguuuuuacacca

SEQ ID NO: 4051765 - RNA, 21 nt, SARS coronavirus
augcuguugauuguucucaaa

SEQ ID NO: 4051766 - RNA, 23 nt, SARS coronavirus
auggaccccaaucaaaccaacgu

SEQ ID NO: 4051767 - RNA, 18 nt, SARS coronavirus
auggaguuagauuaucca

SEQ ID NO: 4051768 - RNA, 16 nt, SARS coronavirus
auggguuguguccuug

SEQ ID NO: 4051769 - RNA, 21 nt, SARS coronavirus
augguguugucuuccuacaug

SEQ ID NO: 4051770 - RNA, 14 nt, SARS coronavirus
auguagaauuauua

SEQ ID NO: 4051771 - RNA, 21 nt, SARS coronavirus
auguauuccagacucaagcag

SEQ ID NO: 4051772 - RNA, 18 nt, SARS coronavirus
augugcuaauuugcuucu

SEQ ID NO: 4051773 - RNA, 14 nt, SARS coronavirus
auguuucuacagca

SEQ ID NO: 4051774 - RNA, 22 nt, SARS coronavirus
auuauaaauugccagaugauuu

SEQ ID NO: 4051775 - RNA, 18 nt, SARS coronavirus
auuccagacucaagcagg

SEQ ID NO: 4051776 - RNA, 19 nt, SARS coronavirus
auucccaccaacagagccu

SEQ ID NO: 4051777 - RNA, 15 nt, SARS coronavirus
auucucuuccugaca

SEQ ID NO: 4051778 - RNA, 17 nt, SARS coronavirus
auugacaaugcuucucc

SEQ ID NO: 4051779 - RNA, 20 nt, SARS coronavirus
auugaugcuacuucaacugg

SEQ ID NO: 4051780 - RNA, 14 nt, SARS coronavirus
auuggaugacaaag

SEQ ID NO: 4051781 - RNA, 22 nt, SARS coronavirus
auuguggcuuauacuaugucuu

SEQ ID NO: 4051782 - RNA, 18 nt, SARS coronavirus
auugugugcguacugcug

SEQ ID NO: 4051783 - RNA, 20 nt, SARS coronavirus
auugugugcguacugcugca

SEQ ID NO: 4051784 - RNA, 14 nt, SARS coronavirus
auuuacugcugcua

SEQ ID NO: 4051785 - RNA, 24 nt, SARS coronavirus
auuugcacuaacuugcacuagcac

SEQ ID NO: 4051786 - RNA, 13 nt, SARS coronavirus
auuuuaauagcuu

SEQ ID NO: 4051787 - RNA, 23 nt, SARS coronavirus
caaaaacguacugccacaaaaca

SEQ ID NO: 4051788 - RNA, 23 nt, SARS coronavirus
caaaaagaaaaagacugaugaag

SEQ ID NO: 4051789 - RNA, 20 nt, SARS coronavirus
caaaaugaaagagcucagcc

SEQ ID NO: 4051790 - RNA, 15 nt, SARS coronavirus
caaacccaaggaaau

SEQ ID NO: 4051791 - RNA, 18 nt, SARS coronavirus
caaacuuguguccuuuug

SEQ ID NO: 4051792 - RNA, 15 nt, SARS coronavirus
caaagaagacuacca

SEQ ID NO: 4051793 - RNA, 14 nt, SARS coronavirus
caaaguuucuggua

SEQ ID NO: 4051794 - RNA, 15 nt, SARS coronavirus
caaauaauuacuaca

SEQ ID NO: 4051795 - RNA, 14 nt, SARS coronavirus
caacaacaaggcca

SEQ ID NO: 4051796 - RNA, 11 nt, SARS coronavirus
caacaaggcca

SEQ ID NO: 4051797 - RNA, 21 nt, SARS coronavirus
caagaccuaaucagacaagga

SEQ ID NO: 4051798 - RNA, 20 nt, SARS coronavirus
caagggugcaugcucuugug

SEQ ID NO: 4051799 - RNA, 17 nt, SARS coronavirus
caagucaaacaaaugua

SEQ ID NO: 4051800 - RNA, 18 nt, SARS coronavirus
caagugugcuaaaugaua

SEQ ID NO: 4051801 - RNA, 16 nt, SARS coronavirus
caauggggcaaggcca

SEQ ID NO: 4051802 - RNA, 13 nt, SARS coronavirus
cguuucugccacu

SEQ ID NO: 4051803 - RNA, 16 nt, SARS coronavirus
cuaaacgaacaugaaa

SEQ ID NO: 4051804 - RNA, 13 nt, SARS coronavirus
cuaacuugcacua

SEQ ID NO: 4051805 - RNA, 20 nt, SARS coronavirus
cuaagaaaucugcugcugag

SEQ ID NO: 4051806 - RNA, 21 nt, SARS coronavirus
cuaaguugaaugaucuuugcu

SEQ ID NO: 4051807 - RNA, 13 nt, SARS coronavirus
cuaauaacaaugc

SEQ ID NO: 4051808 - RNA, 14 nt, SARS coronavirus
cuacaacuuccuca

SEQ ID NO: 4051809 - RNA, 21 nt, SARS coronavirus
cuacaugucacguaugugcca

SEQ ID NO: 4051810 - RNA, 21 nt, SARS coronavirus
cuacgcagagggaagcagagg

SEQ ID NO: 4051811 - RNA, 15 nt, SARS coronavirus
cuacuaaaaugucug

SEQ ID NO: 4051812 - RNA, 14 nt, SARS coronavirus
cuacuaacuuuuca

SEQ ID NO: 4051813 - RNA, 15 nt, SARS coronavirus
cuacugaaugugcua

SEQ ID NO: 4051814 - RNA, 19 nt, SARS coronavirus
cuacuucguugcuuccuuc

SEQ ID NO: 4051815 - RNA, 21 nt, SARS coronavirus
cuagccauccuuacugcgcuu

SEQ ID NO: 4051816 - RNA, 17 nt, SARS coronavirus
cuagggcgcugugacau

SEQ ID NO: 4051817 - RNA, 20 nt, SARS coronavirus
cuaugucuuuaggugcugau

SEQ ID NO: 4051818 - RNA, 21 nt, SARS coronavirus
cuauuuuguuggcuauuuaaa

SEQ ID NO: 4051819 - RNA, 16 nt, SARS coronavirus
cucaaagaagacuacc

SEQ ID NO: 4051820 - RNA, 23 nt, SARS coronavirus
cucaaugaggucgcuaaaaauuu

SEQ ID NO: 4051821 - RNA, 22 nt, SARS coronavirus
cucacucccuuucggauggcuu

SEQ ID NO: 4051822 - RNA, 19 nt, SARS coronavirus
cucagccuuugccgcagag

SEQ ID NO: 4051823 - RNA, 16 nt, SARS coronavirus
cucaggauuuauuucu

SEQ ID NO: 4051824 - RNA, 16 nt, SARS coronavirus
cucaggcauaaacacu

SEQ ID NO: 4051825 - RNA, 13 nt, SARS coronavirus
cucagguauugcu

SEQ ID NO: 4051826 - RNA, 16 nt, SARS coronavirus
cucaugugcuugaaga

SEQ ID NO: 4051827 - RNA, 18 nt, SARS coronavirus
cucgaauggcuagcggag

SEQ ID NO: 4051828 - RNA, 18 nt, SARS coronavirus
cucgccacuuuuucucau

SEQ ID NO: 4051829 - RNA, 15 nt, SARS coronavirus
cucgcuccucaucac

SEQ ID NO: 4051830 - RNA, 20 nt, SARS coronavirus
cucguacccgcucaaugugg

SEQ ID NO: 4051831 - RNA, 21 nt, SARS coronavirus
cucuaguuagugguacugcca

SEQ ID NO: 4051832 - RNA, 16 nt, SARS coronavirus
cucucagguauugcug

SEQ ID NO: 4051833 - RNA, 24 nt, SARS coronavirus
cucuggcucuuguggccaguaaca

SEQ ID NO: 4051834 - RNA, 13 nt, SARS coronavirus
cucugugcucuac

SEQ ID NO: 4051835 - RNA, 18 nt, SARS coronavirus
cucuugugcagaaugaau

SEQ ID NO: 4051836 - RNA, 19 nt, SARS coronavirus
cugaaguugcuguucuaua

SEQ ID NO: 4051837 - RNA, 18 nt, SARS coronavirus
cugacuuaucauggagcc

SEQ ID NO: 4051838 - RNA, 16 nt, SARS coronavirus
cugaugaagcucagcc

SEQ ID NO: 4051839 - RNA, 17 nt, SARS coronavirus
cugauguuucuacagca

SEQ ID NO: 4051840 - RNA, 14 nt, SARS coronavirus
cugauuacaaacau

SEQ ID NO: 4051841 - RNA, 16 nt, SARS coronavirus
cugcagccuauuuugu

SEQ ID NO: 4051842 - RNA, 20 nt, SARS coronavirus
cugcagguauggaggcgcaa

SEQ ID NO: 4051843 - RNA, 14 nt, SARS coronavirus
cugccaaaagagau

SEQ ID NO: 4051844 - RNA, 23 nt, SARS coronavirus
cugcccucgcgcuauugcugcua

SEQ ID NO: 4051845 - RNA, 12 nt, SARS coronavirus
cugcuuggcuuu

SEQ ID NO: 4051846 - RNA, 13 nt, SARS coronavirus
cuggaacaaaugc

SEQ ID NO: 4051847 - RNA, 16 nt, SARS coronavirus
cuggaacaauggaacc

SEQ ID NO: 4051848 - RNA, 13 nt, SARS coronavirus
cuggcagcaguag

SEQ ID NO: 4051849 - RNA, 22 nt, SARS coronavirus
cuguuuuucagagcgcuaccaa

SEQ ID NO: 4051850 - RNA, 22 nt, SARS coronavirus
cuuacagccuuuucaccugcuc

SEQ ID NO: 4051851 - RNA, 15 nt, SARS coronavirus
cuuagaucaauuacu

SEQ ID NO: 4051852 - RNA, 17 nt, SARS coronavirus
cuuagcucuaauuuugg

SEQ ID NO: 4051853 - RNA, 14 nt, SARS coronavirus
cuuauaggagcuga

SEQ ID NO: 4051854 - RNA, 16 nt, SARS coronavirus
cuucaaagagauuuca

SEQ ID NO: 4051855 - RNA, 14 nt, SARS coronavirus
cuuccuacauguca

SEQ ID NO: 4051856 - RNA, 11 nt, SARS coronavirus
cuucucauugu

SEQ ID NO: 4051857 - RNA, 17 nt, SARS coronavirus
cuucuggucuaaacgaa

SEQ ID NO: 4051858 - RNA, 21 nt, SARS coronavirus
cuucugucgucaacauucaaa

SEQ ID NO: 4051859 - RNA, 12 nt, SARS coronavirus
cuugaaagagcc

SEQ ID NO: 4051860 - RNA, 23 nt, SARS coronavirus
cuugaaagagccaccacauuuuc

SEQ ID NO: 4051861 - RNA, 16 nt, SARS coronavirus
cuugaagauccuugua

SEQ ID NO: 4051862 - RNA, 21 nt, SARS coronavirus
cuugaauacacccaaagacca

SEQ ID NO: 4051863 - RNA, 23 nt, SARS coronavirus
cuugauauauuuucuacaaugca

SEQ ID NO: 4051864 - RNA, 16 nt, SARS coronavirus
cuugcgaauggccgga

SEQ ID NO: 4051865 - RNA, 18 nt, SARS coronavirus
cuugguauuaacauuaca

SEQ ID NO: 4051866 - RNA, 16 nt, SARS coronavirus
cuuuaauugacuucua

SEQ ID NO: 4051867 - RNA, 17 nt, SARS coronavirus
cuuugaaaccuauuuuu

SEQ ID NO: 4051868 - RNA, 14 nt, SARS coronavirus
cuuuucaucagaca

SEQ ID NO: 4051869 - RNA, 20 nt, SARS coronavirus
gaaaaugcuacauucuucau

SEQ ID NO: 4051870 - RNA, 23 nt, SARS coronavirus
gaaacaaacauucuucucaaugu

SEQ ID NO: 4051871 - RNA, 20 nt, SARS coronavirus
gaaagguuuuaccuuuucau

SEQ ID NO: 4051872 - RNA, 17 nt, SARS coronavirus
gaacuugucauuggugc

SEQ ID NO: 4051873 - RNA, 22 nt, SARS coronavirus
gaauacacccaaagaccacauu

SEQ ID NO: 4051874 - RNA, 22 nt, SARS coronavirus
gaauggcuagcggaggugguga

SEQ ID NO: 4051875 - RNA, 13 nt, SARS coronavirus
gacaaaggaauuu

SEQ ID NO: 4051876 - RNA, 23 nt, SARS coronavirus
gacaaggaacugauuacaaacau

SEQ ID NO: 4051877 - RNA, 17 nt, SARS coronavirus
gacaaguacuucaaaaa

SEQ ID NO: 4051878 - RNA, 19 nt, SARS coronavirus
gacaauauugcuuugcuag

SEQ ID NO: 4051879 - RNA, 19 nt, SARS coronavirus
gacaauuauuuaagccucu

SEQ ID NO: 4051880 - RNA, 17 nt, SARS coronavirus
gacagauugaaccagcu

SEQ ID NO: 4051881 - RNA, 21 nt, SARS coronavirus
gaccccaagguuuacccaaua

SEQ ID NO: 4051882 - RNA, 18 nt, SARS coronavirus
cuuuugaugauguucaag

SEQ ID NO: 4051883 - RNA, 12 nt, SARS coronavirus
gaaaaugcuaca

SEQ ID NO: 4051884 - RNA, 22 nt, SARS coronavirus
gaaagagccaccacauuuucau

SEQ ID NO: 4051885 - RNA, 14 nt, SARS coronavirus
gaacaaacccaagg

SEQ ID NO: 4051886 - RNA, 18 nt, SARS coronavirus
gaacaaacccaaggaaau

SEQ ID NO: 4051887 - RNA, 20 nt, SARS coronavirus
gaagcagcccacugugacuc

SEQ ID NO: 4051888 - RNA, 14 nt, SARS coronavirus
gaaguugcuguucu

SEQ ID NO: 4051889 - RNA, 21 nt, SARS coronavirus
gacaaagauccacaauucaaa

SEQ ID NO: 4051890 - RNA, 17 nt, SARS coronavirus
gacaacagauguuucau

SEQ ID NO: 4051891 - RNA, 18 nt, SARS coronavirus
gacaacgucauacugcug

SEQ ID NO: 4051892 - RNA, 15 nt, SARS coronavirus
gacacugguauugaa

SEQ ID NO: 4051893 - RNA, 22 nt, SARS coronavirus
gacucugagccaguucucaagg

SEQ ID NO: 4051894 - RNA, 15 nt, SARS coronavirus
gacuugcucuuuaau

SEQ ID NO: 4051895 - RNA, 22 nt, SARS coronavirus
gagccuugaauacacccaaaga

SEQ ID NO: 4051896 - RNA, 20 nt, SARS coronavirus
gaggcaucuaaaaagccucg

SEQ ID NO: 4051897 - RNA, 14 nt, SARS coronavirus
gauaugauugcugc

SEQ ID NO: 4051898 - RNA, 14 nt, SARS coronavirus
gaucacuguggcua

SEQ ID NO: 4051899 - RNA, 18 nt, SARS coronavirus
gauguuucugauuucacu

SEQ ID NO: 4051900 - RNA, 21 nt, SARS coronavirus
gauugcugccuacacugcugc

SEQ ID NO: 4051901 - RNA, 21 nt, SARS coronavirus
gauugugugcguacugcugca

SEQ ID NO: 4051902 - RNA, 16 nt, SARS coronavirus
gcaagacguuguuaac

SEQ ID NO: 4051903 - RNA, 18 nt, SARS coronavirus
gcacaccuaauguuacua

SEQ ID NO: 4051904 - RNA, 22 nt, SARS coronavirus
gcacugauucagguuuugcugc

SEQ ID NO: 4051905 - RNA, 20 nt, SARS coronavirus
gcauugggcaagcugcaaga

SEQ ID NO: 4051906 - RNA, 16 nt, SARS coronavirus
gcauuucaacaccaaa

SEQ ID NO: 4051907 - RNA, 12 nt, SARS coronavirus
gcauuucuugcu

SEQ ID NO: 4051908 - RNA, 21 nt, SARS coronavirus
gcccucgcgcuauugcugcua

SEQ ID NO: 4051909 - RNA, 18 nt, SARS coronavirus
gcucggcuucauugcugg

SEQ ID NO: 4051910 - RNA, 20 nt, SARS coronavirus
gcugccuauauggaagagcc

SEQ ID NO: 4051911 - RNA, 16 nt, SARS coronavirus
gcugcugaaaucaggg

SEQ ID NO: 4051912 - RNA, 20 nt, SARS coronavirus
gcugugaucauucgugguca

SEQ ID NO: 4051913 - RNA, 19 nt, SARS coronavirus
gcuuaucauggcagacaac

SEQ ID NO: 4051914 - RNA, 20 nt, SARS coronavirus
gcuucuccaaugucuaugca

SEQ ID NO: 4051915 - RNA, 19 nt, SARS coronavirus
gcuugagagcaaaguuucu

SEQ ID NO: 4051916 - RNA, 22 nt, SARS coronavirus
gcuuguuuugugcuugcugcug

SEQ ID NO: 4051917 - RNA, 21 nt, SARS coronavirus
ggaacauacgagggcaauuca

SEQ ID NO: 4051918 - RNA, 23 nt, SARS coronavirus
ggacuugaaagagccaccacauu

SEQ ID NO: 4051919 - RNA, 19 nt, SARS coronavirus
ggagguacaaauugacagg

SEQ ID NO: 4051920 - RNA, 18 nt, SARS coronavirus
ggcaaaaugaaagagcuc

SEQ ID NO: 4051921 - RNA, 21 nt, SARS coronavirus
ggcaucuaaaaagccucgcca

SEQ ID NO: 4051922 - RNA, 15 nt, SARS coronavirus
ggugcaugcucuugu

SEQ ID NO: 4051923 - RNA, 19 nt, SARS coronavirus
gguucaacaagagcucuac

SEQ ID NO: 4051924 - RNA, 14 nt, SARS coronavirus
gguucacagcucuc

SEQ ID NO: 4051925 - RNA, 16 nt, SARS coronavirus
gguucuugcugcaagu

SEQ ID NO: 4051926 - RNA, 13 nt, SARS coronavirus
guacaacgucacu

SEQ ID NO: 4051927 - RNA, 22 nt, SARS coronavirus
caaacugguguuauugcugauu

SEQ ID NO: 4051928 - RNA, 13 nt, SARS coronavirus
caaauaccuuuug

SEQ ID NO: 4051929 - RNA, 21 nt, SARS coronavirus
caaauucaagaaucacuuaca

SEQ ID NO: 4051930 - RNA, 17 nt, SARS coronavirus
caacaacaacaaggcca

SEQ ID NO: 4051931 - RNA, 14 nt, SARS coronavirus
caacaaggccaaac

SEQ ID NO: 4051932 - RNA, 23 nt, SARS coronavirus
caacagagccuaaaaaggacaaa

SEQ ID NO: 4051933 - RNA, 11 nt, SARS coronavirus
caacuccugga

SEQ ID NO: 4051934 - RNA, 17 nt, SARS coronavirus
caacuccuggcagcagu

SEQ ID NO: 4051935 - RNA, 21 nt, SARS coronavirus
caagaaauucaacuccuggca

SEQ ID NO: 4051936 - RNA, 14 nt, SARS coronavirus
caagauccagcugg

SEQ ID NO: 4051937 - RNA, 18 nt, SARS coronavirus
caagggugucaaauuaca

SEQ ID NO: 4051938 - RNA, 16 nt, SARS coronavirus
caagucaaacaaaugu

SEQ ID NO: 4051939 - RNA, 15 nt, SARS coronavirus
caagugccucugcau

SEQ ID NO: 4051940 - RNA, 16 nt, SARS coronavirus
caauaaccagaaugga

SEQ ID NO: 4051941 - RNA, 14 nt, SARS coronavirus
caauggcuuguauu

SEQ ID NO: 4051942 - RNA, 15 nt, SARS coronavirus
caauggcuuguauug

SEQ ID NO: 4051943 - RNA, 17 nt, SARS coronavirus
caauuagcauuacuaca

SEQ ID NO: 4051944 - RNA, 22 nt, SARS coronavirus
cacaccuucgggaacauggcug

SEQ ID NO: 4051945 - RNA, 19 nt, SARS coronavirus
cacagauucaacugacaau

SEQ ID NO: 4051946 - RNA, 18 nt, SARS coronavirus
cacagcucucacucagca

SEQ ID NO: 4051947 - RNA, 13 nt, SARS coronavirus
cacaucuuuugcu

SEQ ID NO: 4051948 - RNA, 18 nt, SARS coronavirus
cacauugacgcauacaaa

SEQ ID NO: 4051949 - RNA, 21 nt, SARS coronavirus
caccauuaagagaaagacaga

SEQ ID NO: 4051950 - RNA, 20 nt, SARS coronavirus
caccauuucacccucuugcu

SEQ ID NO: 4051951 - RNA, 16 nt, SARS coronavirus
cacgaacgcuuucuua

SEQ ID NO: 4051952 - RNA, 19 nt, SARS coronavirus
cacuaagaaaucugcugcu

SEQ ID NO: 4051953 - RNA, 20 nt, SARS coronavirus
cacuaagaaaucugcugcug

SEQ ID NO: 4051954 - RNA, 19 nt, SARS coronavirus
cacucagguguuaaagacu

SEQ ID NO: 4051955 - RNA, 13 nt, SARS coronavirus
cacugcugcucua

SEQ ID NO: 4051956 - RNA, 23 nt, SARS coronavirus
cacuugcuuguuuugugcuugcu

SEQ ID NO: 4051957 - RNA, 21 nt, SARS coronavirus
cagacaaggaacugauuacaa

SEQ ID NO: 4051958 - RNA, 16 nt, SARS coronavirus
cagagccuaaaaagga

SEQ ID NO: 4051959 - RNA, 19 nt, SARS coronavirus
cagagccuaaaaaggacaa

SEQ ID NO: 4051960 - RNA, 18 nt, SARS coronavirus
cagaggaacuucuuuucu

SEQ ID NO: 4051961 - RNA, 13 nt, SARS coronavirus
cagcccacuguga

SEQ ID NO: 4051962 - RNA, 17 nt, SARS coronavirus
cagcucucacucagcau

SEQ ID NO: 4051963 - RNA, 20 nt, SARS coronavirus
cagcucucacucagcauggc

SEQ ID NO: 4051964 - RNA, 19 nt, SARS coronavirus
caggauugcuauuuggaau

SEQ ID NO: 4051965 - RNA, 14 nt, SARS coronavirus
cagguauugcugcu

SEQ ID NO: 4051966 - RNA, 18 nt, SARS coronavirus
caguugcauaugcacugu

SEQ ID NO: 4051967 - RNA, 23 nt, SARS coronavirus
cauagucuacucuugugcagaau

SEQ ID NO: 4051968 - RNA, 16 nt, SARS coronavirus
cauaucugaugccuuu

SEQ ID NO: 4051969 - RNA, 15 nt, SARS coronavirus
caucuuguugacuuc

SEQ ID NO: 4051970 - RNA, 16 nt, SARS coronavirus
caugaaggucaccaaa

SEQ ID NO: 4051971 - RNA, 21 nt, SARS coronavirus
caugaaggucaccaaacugcu

SEQ ID NO: 4051972 - RNA, 20 nt, SARS coronavirus
caugaguggagcuucugcug

SEQ ID NO: 4051973 - RNA, 18 nt, SARS coronavirus
cauugcuuaucauggcag

SEQ ID NO: 4051974 - RNA, 20 nt, SARS coronavirus
cauuggcuaccaaccuuaca

SEQ ID NO: 4051975 - RNA, 20 nt, SARS coronavirus
cauuguuuugacuuguauuu

SEQ ID NO: 4051976 - RNA, 15 nt, SARS coronavirus
cauuuggugcuggcg

SEQ ID NO: 4051977 - RNA, 13 nt, SARS coronavirus
ccaccucugcuca

SEQ ID NO: 4051978 - RNA, 20 nt, SARS coronavirus
ccagaagcuucacuucccua

SEQ ID NO: 4051979 - RNA, 12 nt, SARS coronavirus
auuauuaacaau

SEQ ID NO: 4051980 - RNA, 17 nt, SARS coronavirus
auuauucuguuuggaac

SEQ ID NO: 4051981 - RNA, 21 nt, SARS coronavirus
auucaacccagaaacaaacau

SEQ ID NO: 4051982 - RNA, 17 nt, SARS coronavirus
auucccuucugucuaug

SEQ ID NO: 4051983 - RNA, 19 nt, SARS coronavirus
auugcgauugcaauggcuu

SEQ ID NO: 4051984 - RNA, 13 nt, SARS coronavirus
auuguugcugcuc

SEQ ID NO: 4051985 - RNA, 22 nt, SARS coronavirus
auuuaagccucuaacuaagaag

SEQ ID NO: 4051986 - RNA, 13 nt, SARS coronavirus
auuuacugcugcu

SEQ ID NO: 4051987 - RNA, 15 nt, SARS coronavirus
auuucggggaccaag

SEQ ID NO: 4051988 - RNA, 19 nt, SARS coronavirus
auuucuaauuguguugcug

SEQ ID NO: 4051989 - RNA, 21 nt, SARS coronavirus
auuucuuccauuuuauucuaa

SEQ ID NO: 4051990 - RNA, 18 nt, SARS coronavirus
auuugcaauuuacugcug

SEQ ID NO: 4051991 - RNA, 13 nt, SARS coronavirus
caaaaacaaaucg

SEQ ID NO: 4051992 - RNA, 12 nt, SARS coronavirus
caaacugcugca

SEQ ID NO: 4051993 - RNA, 12 nt, SARS coronavirus
caaagaccacau

SEQ ID NO: 4051994 - RNA, 23 nt, SARS coronavirus
caaauagcgccaggacaaacugg

SEQ ID NO: 4051995 - RNA, 12 nt, SARS coronavirus
caaauuacuaca

SEQ ID NO: 4051996 - RNA, 18 nt, SARS coronavirus
caaauugcacaauuugcu

SEQ ID NO: 4051997 - RNA, 19 nt, SARS coronavirus
caacaccaaaacucaaaga

SEQ ID NO: 4051998 - RNA, 22 nt, SARS coronavirus
caacacuagggguaauacuuau

SEQ ID NO: 4051999 - RNA, 18 nt, SARS coronavirus
caacgucauacugcugaa

SEQ ID NO: 4052000 - RNA, 21 nt, SARS coronavirus
caacuacuuuguuugcuggca

SEQ ID NO: 4052001 - RNA, 18 nt, SARS coronavirus
caagauguuaacugcacu

SEQ ID NO: 4052002 - RNA, 13 nt, SARS coronavirus
caaucaacaccaa

SEQ ID NO: 4052003 - RNA, 18 nt, SARS coronavirus
caaucacagaugcuguug

SEQ ID NO: 4052004 - RNA, 13 nt, SARS coronavirus
caauggacuuaca

SEQ ID NO: 4052005 - RNA, 13 nt, SARS coronavirus
caauguguaacau

SEQ ID NO: 4052006 - RNA, 14 nt, SARS coronavirus
caauucaaagacaa

SEQ ID NO: 4052007 - RNA, 14 nt, SARS coronavirus
caauugcuuacucu

SEQ ID NO: 4052008 - RNA, 15 nt, SARS coronavirus
caauuuacugcugcu

SEQ ID NO: 4052009 - RNA, 15 nt, SARS coronavirus
caccaaacugcugca

SEQ ID NO: 4052010 - RNA, 22 nt, SARS coronavirus
cacuagccauccuuacugcgcu

SEQ ID NO: 4052011 - RNA, 15 nt, SARS coronavirus
cacucagcauggcaa

SEQ ID NO: 4052012 - RNA, 18 nt, SARS coronavirus
cacucagcauggcaagga

SEQ ID NO: 4052013 - RNA, 21 nt, SARS coronavirus
cacucucagguauugcugcug

SEQ ID NO: 4052014 - RNA, 23 nt, SARS coronavirus
cacugaugauaugauugcugccu

SEQ ID NO: 4052015 - RNA, 14 nt, SARS coronavirus
cacugauguuucua

SEQ ID NO: 4052016 - RNA, 12 nt, SARS coronavirus
cacugcugcucu

SEQ ID NO: 4052017 - RNA, 20 nt, SARS coronavirus
cacugcuggauggacauuug

SEQ ID NO: 4052018 - RNA, 21 nt, SARS coronavirus
cagaauggaggacgcaauggg

SEQ ID NO: 4052019 - RNA, 16 nt, SARS coronavirus
cagaugguacuucuau

SEQ ID NO: 4052020 - RNA, 17 nt, SARS coronavirus
cagaugguacuucuauu

SEQ ID NO: 4052021 - RNA, 15 nt, SARS coronavirus
cagcaguaggggaaa

SEQ ID NO: 4052022 - RNA, 17 nt, SARS coronavirus
cagcgccgaccccaagg

SEQ ID NO: 4052023 - RNA, 17 nt, SARS coronavirus
cagguauggaggcgcaa

SEQ ID NO: 4052024 - RNA, 20 nt, SARS coronavirus
cauacugcugaacaagcaca

SEQ ID NO: 4052025 - RNA, 13 nt, SARS coronavirus
cauagauggcaca

SEQ ID NO: 4052026 - RNA, 17 nt, SARS coronavirus
cauagauggcacacuau

SEQ ID NO: 4052027 - RNA, 14 nt, SARS coronavirus
caugacuaguuguu

SEQ ID NO: 4052028 - RNA, 13 nt, SARS coronavirus
cauucuuuggaau

SEQ ID NO: 4052029 - RNA, 20 nt, SARS coronavirus
cauugcuauaccuacuaacu

SEQ ID NO: 4052030 - RNA, 23 nt, SARS coronavirus
cauuggaguuacccaaaauguuc

SEQ ID NO: 4052031 - RNA, 19 nt, SARS coronavirus
cauuugguggacccacaga

SEQ ID NO: 4052032 - RNA, 20 nt, SARS coronavirus
ccaacuacauuuaugcucaa

SEQ ID NO: 4052033 - RNA, 17 nt, SARS coronavirus
ccaagaccuaaucagac

SEQ ID NO: 4052034 - RNA, 20 nt, SARS coronavirus
ccaccugcucuuaauuguua

SEQ ID NO: 4052035 - RNA, 16 nt, SARS coronavirus
ccagcuugagucuaca

SEQ ID NO: 4052036 - RNA, 22 nt, SARS coronavirus
ccaugaguggagcuucugcuga

SEQ ID NO: 4052037 - RNA, 23 nt, SARS coronavirus
ccaugaguggagcuucugcugau

SEQ ID NO: 4052038 - RNA, 19 nt, SARS coronavirus
ccauuuuauucuaauguua

SEQ ID NO: 4052039 - RNA, 19 nt, SARS coronavirus
ccgugcuacaacuuccuca

SEQ ID NO: 4052040 - RNA, 16 nt, SARS coronavirus
ccuauuggagcuggca

SEQ ID NO: 4052041 - RNA, 21 nt, SARS coronavirus
ccucaugugcuugaagauccu

SEQ ID NO: 4052042 - RNA, 20 nt, SARS coronavirus
ccucgcgcuauugcugcuag

SEQ ID NO: 4052043 - RNA, 16 nt, SARS coronavirus
ccugcucgaauggcua

SEQ ID NO: 4052044 - RNA, 13 nt, SARS coronavirus
ccuugcgcuuuug

SEQ ID NO: 4052045 - RNA, 12 nt, SARS coronavirus
ccuuucugcuau

SEQ ID NO: 4052046 - RNA, 20 nt, SARS coronavirus
ccuuugccgcagagacaaaa

SEQ ID NO: 4052047 - RNA, 15 nt, SARS coronavirus
cgaacuaacuauuau

SEQ ID NO: 4052048 - RNA, 17 nt, SARS coronavirus
cgaacuuauguacucau

SEQ ID NO: 4052049 - RNA, 15 nt, SARS coronavirus
cgaaguuuacuacca

SEQ ID NO: 4052050 - RNA, 18 nt, SARS coronavirus
cgaaugugcaaauacaca

SEQ ID NO: 4052051 - RNA, 19 nt, SARS coronavirus
cgauacauagucuacucuu

SEQ ID NO: 4052052 - RNA, 13 nt, SARS coronavirus
cgcuauugcugcu

SEQ ID NO: 4052053 - RNA, 15 nt, SARS coronavirus
cgcuccucaucacgu

SEQ ID NO: 4052054 - RNA, 21 nt, SARS coronavirus
cgggauugcgauugcaauggc

SEQ ID NO: 4052055 - RNA, 21 nt, SARS coronavirus
cgucauacugcugaacaagca

SEQ ID NO: 4052056 - RNA, 13 nt, SARS coronavirus
cuaauauuacaaa

SEQ ID NO: 4052057 - RNA, 16 nt, SARS coronavirus
cuaaucagggcugcug

SEQ ID NO: 4052058 - RNA, 20 nt, SARS coronavirus
cuaaucuugcugcuacuaaa

SEQ ID NO: 4052059 - RNA, 20 nt, SARS coronavirus
cuaauguuacuaucaacugu

SEQ ID NO: 4052060 - RNA, 14 nt, SARS coronavirus
cuaauguuguuaua

SEQ ID NO: 4052061 - RNA, 16 nt, SARS coronavirus
cuacacugcugcucua

SEQ ID NO: 4052062 - RNA, 17 nt, SARS coronavirus
cuacagaaguaaugccu

SEQ ID NO: 4052063 - RNA, 16 nt, SARS coronavirus
cuacuaacuuuucaau

SEQ ID NO: 4052064 - RNA, 15 nt, SARS coronavirus
cuagggcgcugugac

SEQ ID NO: 4052065 - RNA, 11 nt, SARS coronavirus
cuauguuuaua

SEQ ID NO: 4052066 - RNA, 13 nt, SARS coronavirus
cuauugcugcuag

SEQ ID NO: 4052067 - RNA, 14 nt, SARS coronavirus
cucgcuccucauca

SEQ ID NO: 4052068 - RNA, 20 nt, SARS coronavirus
cugaaauauuagacauuuca

SEQ ID NO: 4052069 - RNA, 13 nt, SARS coronavirus
cugauaauggacc

SEQ ID NO: 4052070 - RNA, 13 nt, SARS coronavirus
cugauuacaaaca

SEQ ID NO: 4052071 - RNA, 16 nt, SARS coronavirus
cugcaaguuugaugag

SEQ ID NO: 4052072 - RNA, 22 nt, SARS coronavirus
cugccaaaagagaucacugugg

SEQ ID NO: 4052073 - RNA, 15 nt, SARS coronavirus
cugcucacugaugau

SEQ ID NO: 4052074 - RNA, 20 nt, SARS coronavirus
cugcugauucaacucaggca

SEQ ID NO: 4052075 - RNA, 18 nt, SARS coronavirus
cuggcagcaguaggggaa

SEQ ID NO: 4052076 - RNA, 21 nt, SARS coronavirus
cugguauugaaaaugcuacau

SEQ ID NO: 4052077 - RNA, 21 nt, SARS coronavirus
cuguaguacagcgcugugcau

SEQ ID NO: 4052078 - RNA, 13 nt, SARS coronavirus
cugucaagaucca

SEQ ID NO: 4052079 - RNA, 12 nt, SARS coronavirus
cuguggcuacau

SEQ ID NO: 4052080 - RNA, 15 nt, SARS coronavirus
cuguuuggaacuuua

SEQ ID NO: 4052081 - RNA, 24 nt, SARS coronavirus
cuuacaguguugccaccucugcuc

SEQ ID NO: 4052082 - RNA, 18 nt, SARS coronavirus
cuuauggauuuguuuaug

SEQ ID NO: 4052083 - RNA, 23 nt, SARS coronavirus
cuucugguuuuaacacuuugaaa

SEQ ID NO: 4052084 - RNA, 20 nt, SARS coronavirus
cuucuuaggagaaugacaaa

SEQ ID NO: 4052085 - RNA, 19 nt, SARS coronavirus
cuucuucaaagagauuuca

SEQ ID NO: 4052086 - RNA, 20 nt, SARS coronavirus
cuucuucaaagagauuucaa

SEQ ID NO: 4052087 - RNA, 14 nt, SARS coronavirus
cuugaaagagccac

SEQ ID NO: 4052088 - RNA, 15 nt, SARS coronavirus
cuugacucauucaaa

SEQ ID NO: 4052089 - RNA, 20 nt, SARS coronavirus
cuugauauauuuucuacaau

SEQ ID NO: 4052090 - RNA, 20 nt, SARS coronavirus
cuugcuagucacacuagcca

SEQ ID NO: 4052091 - RNA, 18 nt, SARS coronavirus
cuugcuuuguugcaugac

SEQ ID NO: 4052092 - RNA, 15 nt, SARS coronavirus
cuuggcgacauuuca

SEQ ID NO: 4052093 - RNA, 16 nt, SARS coronavirus
cuuguaagguacaaca

SEQ ID NO: 4052094 - RNA, 22 nt, SARS coronavirus
cuuguaccaaagucuaaacgaa

SEQ ID NO: 4052095 - RNA, 15 nt, SARS coronavirus
cuuguauuucucuau

SEQ ID NO: 4052096 - RNA, 22 nt, SARS coronavirus
cuugucauuggugcugugauca

SEQ ID NO: 4052097 - RNA, 14 nt, SARS coronavirus
cuuuaaucaaugug

SEQ ID NO: 4052098 - RNA, 23 nt, SARS coronavirus
cuuuguaagcacaagaaagugag

SEQ ID NO: 4052099 - RNA, 22 nt, SARS coronavirus
cugauguuucuacagcaauuca

SEQ ID NO: 4052100 - RNA, 13 nt, SARS coronavirus
cugcaaguacugu

SEQ ID NO: 4052101 - RNA, 21 nt, SARS coronavirus
cugcaaguacuguucaugcua

SEQ ID NO: 4052102 - RNA, 23 nt, SARS coronavirus
cugccaccgugcuacaacuuccu

SEQ ID NO: 4052103 - RNA, 17 nt, Sin Nombre virus
aacaaaacuaccucauu

SEQ ID NO: 4052104 - RNA, 16 nt, Sin Nombre virus
aacaaucuaccucauu

SEQ ID NO: 4052105 - RNA, 15 nt, Sin Nombre virus
aaugcuaagucuaua

SEQ ID NO: 4052106 - RNA, 16 nt, Sin Nombre virus
aauuuuuauuuuuaua

SEQ ID NO: 4052107 - RNA, 23 nt, Sin Nombre virus
acuaaucaggguuuauugcacua

SEQ ID NO: 4052108 - RNA, 23 nt, Sin Nombre virus
acuaggguggguucaagggccaa

SEQ ID NO: 4052109 - RNA, 20 nt, Sin Nombre virus
acugcucuguucucggagca

SEQ ID NO: 4052110 - RNA, 21 nt, Sin Nombre virus
acuuguucucucuacugcucu

SEQ ID NO: 4052111 - RNA, 22 nt, Sin Nombre virus
acuuguucucucuacugcucug

SEQ ID NO: 4052112 - RNA, 23 nt, Sin Nombre virus
acuuguucucucuacugcucugu

SEQ ID NO: 4052113 - RNA, 14 nt, Sin Nombre virus
agcuuauuaaaucu

SEQ ID NO: 4052114 - RNA, 15 nt, Sin Nombre virus
aguguuauuguagua

SEQ ID NO: 4052115 - RNA, 20 nt, Sin Nombre virus
auauaaucccauuugcuuau

SEQ ID NO: 4052116 - RNA, 16 nt, Sin Nombre virus
auaucaauaacauuug

SEQ ID NO: 4052117 - RNA, 13 nt, Sin Nombre virus
augcuaagucuau

SEQ ID NO: 4052118 - RNA, 15 nt, Sin Nombre virus
auuaaguuuuguuaa

SEQ ID NO: 4052119 - RNA, 21 nt, Sin Nombre virus
auuauauucacaucuguauau

SEQ ID NO: 4052120 - RNA, 14 nt, Sin Nombre virus
caauuauaucacag

SEQ ID NO: 4052121 - RNA, 20 nt, Sin Nombre virus
cacuaggguggguucaaggg

SEQ ID NO: 4052122 - RNA, 24 nt, Sin Nombre virus
cauaaccgaaauauuuauacuaau

SEQ ID NO: 4052123 - RNA, 17 nt, Sin Nombre virus
ccagauuauauucacau

SEQ ID NO: 4052124 - RNA, 15 nt, Sin Nombre virus
ccguucaaacuggaa

SEQ ID NO: 4052125 - RNA, 12 nt, Sin Nombre virus
cucggagcauac

SEQ ID NO: 4052126 - RNA, 14 nt, Sin Nombre virus
cucuacugcucugu

SEQ ID NO: 4052127 - RNA, 20 nt, Sin Nombre virus
cucuguucucggagcauacu

SEQ ID NO: 4052128 - RNA, 12 nt, Sin Nombre virus
cugcucuguucu

SEQ ID NO: 4052129 - RNA, 17 nt, Sin Nombre virus
cuuaacaccuauauaau

SEQ ID NO: 4052130 - RNA, 16 nt, Sin Nombre virus
cuuauuacgaggcuuu

SEQ ID NO: 4052131 - RNA, 16 nt, Sin Nombre virus
gcucuguucucggagc

SEQ ID NO: 4052132 - RNA, 17 nt, Sin Nombre virus
gcucuguucucggagca

SEQ ID NO: 4052133 - RNA, 20 nt, Sin Nombre virus
guaaauucuugauugcuuuu

SEQ ID NO: 4052134 - RNA, 16 nt, Sin Nombre virus
guuaaguuuuguuaag

SEQ ID NO: 4052135 - RNA, 21 nt, Sin Nombre virus
guucaagggccaauuauauca

SEQ ID NO: 4052136 - RNA, 15 nt, Sin Nombre virus
guuuuguuaaguugu

SEQ ID NO: 4052137 - RNA, 15 nt, Sin Nombre virus
uaagcuuauuaaauc

SEQ ID NO: 4052138 - RNA, 14 nt, Sin Nombre virus
uacugcucuguucu

SEQ ID NO: 4052139 - RNA, 21 nt, Sin Nombre virus
uacugcucuguucucggagca

SEQ ID NO: 4052140 - RNA, 14 nt, Sin Nombre virus
uaguguuaagucau

SEQ ID NO: 4052141 - RNA, 15 nt, Sin Nombre virus
uauuccaaaccauga

SEQ ID NO: 4052142 - RNA, 18 nt, Sin Nombre virus
ucuauauuguuuaguguu

SEQ ID NO: 4052143 - RNA, 17 nt, Sin Nombre virus
ugauaguauuaagucau

SEQ ID NO: 4052144 - RNA, 13 nt, Sin Nombre virus
ugcuuuucaagga

SEQ ID NO: 4052145 - RNA, 22 nt, Sin Nombre virus
uguaugggggguguuuaguguu

SEQ ID NO: 4052146 - RNA, 17 nt, Sin Nombre virus
ugugagcaagaguauga

SEQ ID NO: 4052147 - RNA, 21 nt, Sin Nombre virus
uguuaaguuucgguaagucug

SEQ ID NO: 4052148 - RNA, 17 nt, Sin Nombre virus
uucgguaagucuguuaa

SEQ ID NO: 4052149 - RNA, 15 nt, Sin Nombre virus
uucucucuacugcuc

SEQ ID NO: 4052150 - RNA, 16 nt, Sin Nombre virus
uuguuaaguuguauua

SEQ ID NO: 4052151 - RNA, 16 nt, Sin Nombre virus
aaccaugacuuguucu

SEQ ID NO: 4052152 - RNA, 18 nt, Sin Nombre virus
aaccaugacuuguucucu

SEQ ID NO: 4052153 - RNA, 18 nt, Sin Nombre virus
aauaagauuuauauacau

SEQ ID NO: 4052154 - RNA, 14 nt, Sin Nombre virus
aaucaggguuuaua

SEQ ID NO: 4052155 - RNA, 20 nt, Sin Nombre virus
aauuuuuauuuuuauacaag

SEQ ID NO: 4052156 - RNA, 18 nt, Sin Nombre virus
acaaaacuaccucauuau

SEQ ID NO: 4052157 - RNA, 18 nt, Sin Nombre virus
acauagauuuauuuuaua

SEQ ID NO: 4052158 - RNA, 17 nt, Sin Nombre virus
acauuuguauauuccca

SEQ ID NO: 4052159 - RNA, 23 nt, Sin Nombre virus
acuaacacugugacucuguaaag

SEQ ID NO: 4052160 - RNA, 13 nt, Sin Nombre virus
acugcucuguucu

SEQ ID NO: 4052161 - RNA, 15 nt, Sin Nombre virus
acugcucuguucucg

SEQ ID NO: 4052162 - RNA, 17 nt, Sin Nombre virus
acugugacucuguaaag

SEQ ID NO: 4052163 - RNA, 17 nt, Sin Nombre virus
acuuguucucucuacug

SEQ ID NO: 4052164 - RNA, 21 nt, Sin Nombre virus
agauuauauucacaucuguau

SEQ ID NO: 4052165 - RNA, 21 nt, Sin Nombre virus
agcuaaaaaaaacaaauccuu

SEQ ID NO: 4052166 - RNA, 19 nt, Sin Nombre virus
aguauuaagucauauguau

SEQ ID NO: 4052167 - RNA, 16 nt, Sin Nombre virus
aaaccaugacuuguuc

SEQ ID NO: 4052168 - RNA, 19 nt, Sin Nombre virus
aaucaaaauaagauuuaua

SEQ ID NO: 4052169 - RNA, 19 nt, Sin Nombre virus
aauugauuucuucauuaca

SEQ ID NO: 4052170 - RNA, 17 nt, Sin Nombre virus
aucuugauaguauuaag

SEQ ID NO: 4052171 - RNA, 23 nt, Sin Nombre virus
aucuugauaguauuaagucauau

SEQ ID NO: 4052172 - RNA, 14 nt, Sin Nombre virus
augacuuguucucu

SEQ ID NO: 4052173 - RNA, 15 nt, Sin Nombre virus
auuaaaucuuguuaa

SEQ ID NO: 4052174 - RNA, 15 nt, Sin Nombre virus
auuccaaaccaugac

SEQ ID NO: 4052175 - RNA, 16 nt, Sin Nombre virus
auuuuaucaacucauu

SEQ ID NO: 4052176 - RNA, 20 nt, Sin Nombre virus
auuuuuauuuuuauacaagu

SEQ ID NO: 4052177 - RNA, 14 nt, Sin Nombre virus
caaaacuaccucau

SEQ ID NO: 4052178 - RNA, 22 nt, Sin Nombre virus
caauuuucuuuauuccaaacca

SEQ ID NO: 4052179 - RNA, 22 nt, Sin Nombre virus
caggucuaucccuauauuggaa

SEQ ID NO: 4052180 - RNA, 18 nt, Sin Nombre virus
caucauuaaucaggguuu

SEQ ID NO: 4052181 - RNA, 18 nt, Sin Nombre virus
caucuguauauauggaug

SEQ ID NO: 4052182 - RNA, 23 nt, Sin Nombre virus
caugacuuguucucucuacugcu

SEQ ID NO: 4052183 - RNA, 10 nt, Sin Nombre virus
cauuaacagc

SEQ ID NO: 4052184 - RNA, 22 nt, Sin Nombre virus
cauuaaucaggguuuauaaaau

SEQ ID NO: 4052185 - RNA, 15 nt, Sin Nombre virus
ccaaaccaugacuug

SEQ ID NO: 4052186 - RNA, 19 nt, Sin Nombre virus
cugcucuguucucggagca

SEQ ID NO: 4052187 - RNA, 20 nt, Sin Nombre virus
gcuuauuaaaucuuguuaag

SEQ ID NO: 4052188 - RNA, 14 nt, Sin Nombre virus
ggcacuaaucaggg

SEQ ID NO: 4052189 - RNA, 17 nt, Sin Nombre virus
ggcacuaaucaggguuu

SEQ ID NO: 4052190 - RNA, 14 nt, Sin Nombre virus
uaaaucuuguuaag

SEQ ID NO: 4052191 - RNA, 22 nt, Sin Nombre virus
ucuuuauuccaaaccaugacuu

SEQ ID NO: 4052192 - RNA, 21 nt, Sin Nombre virus
uguauauauggauguaaauuu

SEQ ID NO: 4052193 - RNA, 14 nt, Sin Nombre virus
ugugacucuguaaa

SEQ ID NO: 4052194 - RNA, 23 nt, Sin Nombre virus
uuucuuuauuccaaaccaugacu

SEQ ID NO: 4052195 - RNA, 18 nt, Sin Nombre virus
uuuucuuuauuccaaacc

SEQ ID NO: 4052196 - RNA, 20 nt, Sin Nombre virus
uuuuguuaaguuguauuaag

SEQ ID NO: 4052197 - RNA, 11 nt, Sin Nombre virus
aaguuuguuaa

SEQ ID NO: 4052198 - RNA, 14 nt, Sin Nombre virus
aauaguacaugaca

SEQ ID NO: 4052199 - RNA, 23 nt, Sin Nombre virus
aauuauaucacaggguauauaau

SEQ ID NO: 4052200 - RNA, 16 nt, Sin Nombre virus
acaaauccuuaacacc

SEQ ID NO: 4052201 - RNA, 17 nt, Sin Nombre virus
acaacaaucuaccucau

SEQ ID NO: 4052202 - RNA, 14 nt, Sin Nombre virus
acaacauuauuuca

SEQ ID NO: 4052203 - RNA, 13 nt, Sin Nombre virus
accaugacuuguu

SEQ ID NO: 4052204 - RNA, 20 nt, Sin Nombre virus
acuuguucucucuacugcuc

SEQ ID NO: 4052205 - RNA, 17 nt, Sin Nombre virus
auauguauguucuuaua

SEQ ID NO: 4052206 - RNA, 18 nt, Sin Nombre virus
auauucacaucuguauau

SEQ ID NO: 4052207 - RNA, 21 nt, Sin Nombre virus
aucaacuuauauucagggcau

SEQ ID NO: 4052208 - RNA, 21 nt, Sin Nombre virus
auuacgaggcuuuuguuccug

SEQ ID NO: 4052209 - RNA, 20 nt, Sin Nombre virus
auucccauaaccgaaauauu

SEQ ID NO: 4052210 - RNA, 12 nt, Sin Nombre virus
caaaccaugacu

SEQ ID NO: 4052211 - RNA, 22 nt, Sin Nombre virus
caugacuuguucucucuacugc

SEQ ID NO: 4052212 - RNA, 12 nt, Sin Nombre virus
cauuaacagcua

SEQ ID NO: 4052213 - RNA, 23 nt, Sin Nombre virus
ccaaaccaugacuuguucucucu

SEQ ID NO: 4052214 - RNA, 21 nt, Sin Nombre virus
cuauauuguuuaguguuauug

SEQ ID NO: 4052215 - RNA, 21 nt, Sin Nombre virus
cucuacugcucuguucucgga

SEQ ID NO: 4052216 - RNA, 20 nt, Sin Nombre virus
cuuuauuccaaaccaugacu

SEQ ID NO: 4052217 - RNA, 19 nt, Sin Nombre virus
gacacuaaugcuugcuuug

SEQ ID NO: 4052218 - RNA, 15 nt, Sin Nombre virus
gacuuguucucucua

SEQ ID NO: 4052219 - RNA, 23 nt, Sin Nombre virus
gacuuguucucucuacugcucug

SEQ ID NO: 4052220 - RNA, 23 nt, Sin Nombre virus
gcucuguucucggagcauacuac

SEQ ID NO: 4052221 - RNA, 13 nt, Sin Nombre virus
gcuuuuguuccug

SEQ ID NO: 4052222 - RNA, 18 nt, Sin Nombre virus
guaaucaacuuauauuca

SEQ ID NO: 4052223 - RNA, 16 nt, Sin Nombre virus
guuucgguaagucugu

SEQ ID NO: 4052224 - RNA, 15 nt, Sin Nombre virus
uaagucuguuaaaug

SEQ ID NO: 4052225 - RNA, 16 nt, Sin Nombre virus
uaagucuguuaaaugu

SEQ ID NO: 4052226 - RNA, 15 nt, Sin Nombre virus
uauaaguaaauucuu

SEQ ID NO: 4052227 - RNA, 19 nt, Sin Nombre virus
uauauaaucccauuugcuu

SEQ ID NO: 4052228 - RNA, 20 nt, Sin Nombre virus
uauaucaauaacauuuguau

SEQ ID NO: 4052229 - RNA, 13 nt, Sin Nombre virus
uauauuggaagau

SEQ ID NO: 4052230 - RNA, 15 nt, Sin Nombre virus
uccaaaccaugacuu

SEQ ID NO: 4052231 - RNA, 15 nt, Sin Nombre virus
ucuuuauuccaaacc

SEQ ID NO: 4052232 - RNA, 20 nt, Sin Nombre virus
uguuaaauguaguuaaucuu

SEQ ID NO: 4052233 - RNA, 19 nt, Sin Nombre virus
uuaaaucuuguuaaguuug

SEQ ID NO: 4052234 - RNA, 18 nt, Sin Nombre virus
uuaagcuuauuaaaucuu

SEQ ID NO: 4052235 - RNA, 23 nt, Sin Nombre virus
uuaucuguuuaaugcuaagucua

SEQ ID NO: 4052236 - RNA, 21 nt, Sin Nombre virus
uuccaaaccaugacuuguucu

SEQ ID NO: 4052237 - RNA, 16 nt, Sin Nombre virus
uuguaguauuguauua

SEQ ID NO: 4052238 - RNA, 14 nt, Sin Nombre virus
uuguauuaaguuuu

SEQ ID NO: 4052239 - RNA, 17 nt, Sin Nombre virus
uuucauuauauguaugu

SEQ ID NO: 4052240 - RNA, 17 nt, Sin Nombre virus
aguauuguauuauguau

SEQ ID NO: 4052241 - RNA, 13 nt, Sin Nombre virus
aucaacucauuau

SEQ ID NO: 4052242 - RNA, 16 nt, Sin Nombre virus
aucccuauauuggaag

SEQ ID NO: 4052243 - RNA, 13 nt, Sin Nombre virus
auguauguucuua

SEQ ID NO: 4052244 - RNA, 21 nt, Sin Nombre virus
auuaaccguucaaacuggaac

SEQ ID NO: 4052245 - RNA, 14 nt, Sin Nombre virus
auuaagucauaugu

SEQ ID NO: 4052246 - RNA, 16 nt, Sin Nombre virus
caacaaucuaccucau

SEQ ID NO: 4052247 - RNA, 22 nt, Sin Nombre virus
cauagauuuauuuuauauacau

SEQ ID NO: 4052248 - RNA, 14 nt, Sin Nombre virus
cccuauuaccucaa

SEQ ID NO: 4052249 - RNA, 12 nt, Sin Nombre virus
cuauuaccucaa

SEQ ID NO: 4052250 - RNA, 19 nt, Sin Nombre virus
cucucaucauuaaucaggg

SEQ ID NO: 4052251 - RNA, 16 nt, Sin Nombre virus
gaggcuuuuguuccug

SEQ ID NO: 4052252 - RNA, 20 nt, Sin Nombre virus
uaacuaacccauuaacagcu

SEQ ID NO: 4052253 - RNA, 10 nt, Sin Nombre virus
uacugcucug

SEQ ID NO: 4052254 - RNA, 13 nt, Sin Nombre virus
uauauauggaugu

SEQ ID NO: 4052255 - RNA, 17 nt, Sin Nombre virus
uauuaaaucuuguuaag

SEQ ID NO: 4052256 - RNA, 17 nt, Sin Nombre virus
uauuaaguuuuguuaag

SEQ ID NO: 4052257 - RNA, 22 nt, Sin Nombre virus
uauucacaucuguauauaugga

SEQ ID NO: 4052258 - RNA, 13 nt, Sin Nombre virus
ucuacugcucugu

SEQ ID NO: 4052259 - RNA, 13 nt, Sin Nombre virus
ucucuacugcucu

SEQ ID NO: 4052260 - RNA, 14 nt, Sin Nombre virus
ucucuacugcucug

SEQ ID NO: 4052261 - RNA, 17 nt, Sin Nombre virus
ugacuuguucucucuac

SEQ ID NO: 4052262 - RNA, 19 nt, Sin Nombre virus
uuaaguuguauuaaguuuu

SEQ ID NO: 4052263 - RNA, 19 nt, Sin Nombre virus
uuauauucacaucuguaua

SEQ ID NO: 4052264 - RNA, 21 nt, Sin Nombre virus
uuguuaaguuuguuaaguuuu

SEQ ID NO: 4052265 - RNA, 13 nt, Sin Nombre virus
uuuauaaaauuuu

SEQ ID NO: 4052266 - RNA, 22 nt, Sin Nombre virus
uuuauuccaaaccaugacuugu

SEQ ID NO: 4052267 - RNA, 18 nt, Tula virus
acacacgcacauccaaug

SEQ ID NO: 4052268 - RNA, 13 nt, Tula virus
acaguauguguuu

SEQ ID NO: 4052269 - RNA, 22 nt, Tula virus
acucagguaaucugcugcucug

SEQ ID NO: 4052270 - RNA, 15 nt, Tula virus
aguguaaguucauua

SEQ ID NO: 4052271 - RNA, 14 nt, Tula virus
auaucaaacugaac

SEQ ID NO: 4052272 - RNA, 16 nt, Tula virus
aucucuauuuaaacau

SEQ ID NO: 4052273 - RNA, 20 nt, Tula virus
augcaugauuacaauucaca

SEQ ID NO: 4052274 - RNA, 21 nt, Tula virus
auuccuggacuuuuguuccug

SEQ ID NO: 4052275 - RNA, 17 nt, Tula virus
auuuguugcucuuuucu

SEQ ID NO: 4052276 - RNA, 23 nt, Tula virus
caccaaugcaugauuacaauuca

SEQ ID NO: 4052277 - RNA, 15 nt, Tula virus
caguauguguuuaua

SEQ ID NO: 4052278 - RNA, 14 nt, Tula virus
cuauauuaacagua

SEQ ID NO: 4052279 - RNA, 13 nt, Tula virus
cuauuuguugcuc

SEQ ID NO: 4052280 - RNA, 18 nt, Tula virus
cucagacaguuguuuucu

SEQ ID NO: 4052281 - RNA, 12 nt, Tula virus
cugcucuguaug

SEQ ID NO: 4052282 - RNA, 13 nt, Tula virus
cuucaucucuauu

SEQ ID NO: 4052283 - RNA, 13 nt, Tula virus
gcucuuuucucgg

SEQ ID NO: 4052284 - RNA, 12 nt, Tula virus
uaaaauuguaag

SEQ ID NO: 4052285 - RNA, 13 nt, Tula virus
uacaauucacaca

SEQ ID NO: 4052286 - RNA, 15 nt, Tula virus
uaccacuuuacuacu

SEQ ID NO: 4052287 - RNA, 16 nt, Tula virus
uggacuuuuguuccug

SEQ ID NO: 4052288 - RNA, 18 nt, Tula virus
uguuuauaucaaacugaa

SEQ ID NO: 4052289 - RNA, 14 nt, Tula virus
uuccuuaaugcaua

SEQ ID NO: 4052290 - RNA, 19 nt, Tula virus
uugggcacaaaauucacac

SEQ ID NO: 4052291 - RNA, 14 nt, Tula virus
uuuucuucaucucu

SEQ ID NO: 4052292 - RNA, 18 nt, Tula virus
aacuaccacuuuacuacu

SEQ ID NO: 4052293 - RNA, 13 nt, Tula virus
aaugcauauguac

SEQ ID NO: 4052294 - RNA, 18 nt, Tula virus
acuauuuguugcucuuuu

SEQ ID NO: 4052295 - RNA, 14 nt, Tula virus
acugaacuguauag

SEQ ID NO: 4052296 - RNA, 18 nt, Tula virus
acugagcuaucaucucug

SEQ ID NO: 4052297 - RNA, 23 nt, Tula virus
acugagcuaucaucucugucucu

SEQ ID NO: 4052298 - RNA, 22 nt, Tula virus
acuguauagcccucauacuacu

SEQ ID NO: 4052299 - RNA, 16 nt, Tula virus
augauuacaauucaca

SEQ ID NO: 4052300 - RNA, 16 nt, Tula virus
caaaucaaacacauau

SEQ ID NO: 4052301 - RNA, 17 nt, Tula virus
cacugauuggguugggu

SEQ ID NO: 4052302 - RNA, 23 nt, Tula virus
cuauuuguugcucuuuucucgga

SEQ ID NO: 4052303 - RNA, 12 nt, Tula virus
cucggagcauac

SEQ ID NO: 4052304 - RNA, 21 nt, Tula virus
cuuaaugcauauguacuuaua

SEQ ID NO: 4052305 - RNA, 15 nt, Tula virus
gcacauccaaugaua

SEQ ID NO: 4052306 - RNA, 19 nt, Tula virus
guugggcacaaaauucaca

SEQ ID NO: 4052307 - RNA, 22 nt, Tula virus
uaagcugggguagguaaguuua

SEQ ID NO: 4052308 - RNA, 14 nt, Tula virus
uauaagcuggggua

SEQ ID NO: 4052309 - RNA, 21 nt, Tula virus
ugauuacaauucacacauaca

SEQ ID NO: 4052310 - RNA, 12 nt, Tula virus
uuaaacauuucu

SEQ ID NO: 4052311 - RNA, 16 nt, Tula virus
uucuucaucucuauuu

SEQ ID NO: 4052312 - RNA, 13 nt, Tula virus
uugauuauugcac

SEQ ID NO: 4052313 - RNA, 22 nt, Tula virus
uuguaaguccuuguuuggugua

SEQ ID NO: 4052314 - RNA, 19 nt, Tula virus
uuguugcucuuuucucgga

SEQ ID NO: 4052315 - RNA, 14 nt, Tula virus
aaaacuaccacuuu

SEQ ID NO: 4052316 - RNA, 11 nt, Tula virus
aaaucaaacac

SEQ ID NO: 4052317 - RNA, 15 nt, Tula virus
acaccaaugcaugau

SEQ ID NO: 4052318 - RNA, 16 nt, Tula virus
acuacuacucuaccuc

SEQ ID NO: 4052319 - RNA, 22 nt, Tula virus
auagcccucauacuacuuccaa

SEQ ID NO: 4052320 - RNA, 19 nt, Tula virus
augauuacaauucacacau

SEQ ID NO: 4052321 - RNA, 16 nt, Tula virus
auuuguugcucuuuuc

SEQ ID NO: 4052322 - RNA, 22 nt, Tula virus
cacucagguaaucugcugcucu

SEQ ID NO: 4052323 - RNA, 18 nt, Tula virus
cuauuuguugcucuuuuc

SEQ ID NO: 4052324 - RNA, 16 nt, Tula virus
gcacauccaaugauau

SEQ ID NO: 4052325 - RNA, 13 nt, Tula virus
guacgauuccacu

SEQ ID NO: 4052326 - RNA, 18 nt, Tula virus
gucucuuuucuucaucuc

SEQ ID NO: 4052327 - RNA, 13 nt, Tula virus
guugcucuuuucu

SEQ ID NO: 4052328 - RNA, 17 nt, Tula virus
uacuaaucguaagguag

SEQ ID NO: 4052329 - RNA, 19 nt, Tula virus
uauaucuuauauuacuaau

SEQ ID NO: 4052330 - RNA, 13 nt, Tula virus
ucugcugcucugu

SEQ ID NO: 4052331 - RNA, 22 nt, Tula virus
ucuuuucucggagcauacuacu

SEQ ID NO: 4052332 - RNA, 17 nt, Tula virus
ugagcuaucaucucugu

SEQ ID NO: 4052333 - RNA, 22 nt, Tula virus
ugggucaaaucaaacacauaua

SEQ ID NO: 4052334 - RNA, 15 nt, Tula virus
uuaaguuuaaaauug

SEQ ID NO: 4052335 - RNA, 13 nt, Tula virus
uuuguuaaguuua

SEQ ID NO: 4052336 - RNA, 15 nt, Tula virus
auguacuuauaccuu

SEQ ID NO: 4052337 - RNA, 15 nt, Tula virus
auguguuuauaucaa

SEQ ID NO: 4052338 - RNA, 16 nt, Tula virus
auugcacuacagcuug

SEQ ID NO: 4052339 - RNA, 14 nt, Tula virus
caaacugaacugua

SEQ ID NO: 4052340 - RNA, 14 nt, Tula virus
caauucacacauac

SEQ ID NO: 4052341 - RNA, 12 nt, Tula virus
cccaauaaugug

SEQ ID NO: 4052342 - RNA, 11 nt, Tula virus
cggagcauacu

SEQ ID NO: 4052343 - RNA, 22 nt, Tula virus
cuuauauuacuaaucuccuaua

SEQ ID NO: 4052344 - RNA, 23 nt, Tula virus
cuuuacuacuacucuaccucaua

SEQ ID NO: 4052345 - RNA, 22 nt, Tula virus
cuuuuuauuauuccuuaaugca

SEQ ID NO: 4052346 - RNA, 22 nt, Tula virus
gcacaaaauucacaccaaugca

SEQ ID NO: 4052347 - RNA, 23 nt, Tula virus
gcuaucaucucugucucuuuucu

SEQ ID NO: 4052348 - RNA, 16 nt, Tula virus
gcucuuuucucggagc

SEQ ID NO: 4052349 - RNA, 19 nt, Tula virus
guacacuuauauauaugca

SEQ ID NO: 4052350 - RNA, 19 nt, Tula virus
guauuaugucacuagugua

SEQ ID NO: 4052351 - RNA, 13 nt, Tula virus
guugauuauugca

SEQ ID NO: 4052352 - RNA, 19 nt, Tula virus
uacgauuccacuaccucag

SEQ ID NO: 4052353 - RNA, 16 nt, Tula virus
uacuauuuguugcucu

SEQ ID NO: 4052354 - RNA, 19 nt, Tula virus
uaucaaacugaacuguaua

SEQ ID NO: 4052355 - RNA, 15 nt, Tula virus
uaucgaucauuccug

SEQ ID NO: 4052356 - RNA, 13 nt, Tula virus
uaugaauuugaag

SEQ ID NO: 4052357 - RNA, 19 nt, Tula virus
ucacuaguguaaguucauu

SEQ ID NO: 4052358 - RNA, 18 nt, Tula virus
ucauaucgaucauuccug

SEQ ID NO: 4052359 - RNA, 14 nt, Tula virus
ucaucucuauuuaa

SEQ ID NO: 4052360 - RNA, 18 nt, Tula virus
ucgaucauuccuggacuu

SEQ ID NO: 4052361 - RNA, 14 nt, Tula virus
ucuguauguuuauu

SEQ ID NO: 4052362 - RNA, 12 nt, Tula virus
ugcucuuuucuc

SEQ ID NO: 4052363 - RNA, 23 nt, Tula virus
ugugaaacugagcuaucaucucu

SEQ ID NO: 4052364 - RNA, 18 nt, Tula virus
uguugcucuuuucucgga

SEQ ID NO: 4052365 - RNA, 22 nt, Tula virus
uguuuucuugauugcuuuucaa

SEQ ID NO: 4052366 - RNA, 13 nt, Tula virus
uuacaauucacac

SEQ ID NO: 4052367 - RNA, 14 nt, Tula virus
uuauauauaugcac

SEQ ID NO: 4052368 - RNA, 17 nt, Tula virus
uuauaucaaacugaacu

SEQ ID NO: 4052369 - RNA, 21 nt, Tula virus
uucaucucuauuuaaacauuu

SEQ ID NO: 4052370 - RNA, 15 nt, Tula virus
uuuguuaaguuuaaa

SEQ ID NO: 4052371 - RNA, 14 nt, Tula virus
acaaaauucacacc

SEQ ID NO: 4052372 - RNA, 19 nt, Tula virus
acaauucacacauacacug

SEQ ID NO: 4052373 - RNA, 15 nt, Tula virus
acauuucuaccuccg

SEQ ID NO: 4052374 - RNA, 13 nt, Tula virus
acuuuuguuccug

SEQ ID NO: 4052375 - RNA, 19 nt, Tula virus
aguccuuguuugguguaaa

SEQ ID NO: 4052376 - RNA, 22 nt, Tula virus
auaacuuuuuauuauuccuuaa

SEQ ID NO: 4052377 - RNA, 18 nt, Tula virus
aucugcugcucuguaugu

SEQ ID NO: 4052378 - RNA, 20 nt, Tula virus
augaauuugaaggguugggc

SEQ ID NO: 4052379 - RNA, 13 nt, Uukuniemi virus
agaaccuuuucuc

SEQ ID NO: 4052380 - RNA, 22 nt, Uukuniemi virus
aggugcuugcucaauugcagug

SEQ ID NO: 4052381 - RNA, 14 nt, Uukuniemi virus
agugcuccucaagg

SEQ ID NO: 4052382 - RNA, 19 nt, Uukuniemi virus
agugcuccucaagguugac

SEQ ID NO: 4052383 - RNA, 15 nt, Uukuniemi virus
aguugcaaggugcuu

SEQ ID NO: 4052384 - RNA, 23 nt, Uukuniemi virus
caucccauaacgcuuagguucau

SEQ ID NO: 4052385 - RNA, 16 nt, Uukuniemi virus
ccaaacuacagugauc

SEQ ID NO: 4052386 - RNA, 14 nt, Uukuniemi virus
cucaauugcaguga

SEQ ID NO: 4052387 - RNA, 17 nt, Uukuniemi virus
cucaauugcagugaaga

SEQ ID NO: 4052388 - RNA, 14 nt, Uukuniemi virus
gcaaggugcuugcu

SEQ ID NO: 4052389 - RNA, 13 nt, Uukuniemi virus
ucaaacaugaagu

SEQ ID NO: 4052390 - RNA, 17 nt, Uukuniemi virus
uccagugcuccucaagg

SEQ ID NO: 4052391 - RNA, 16 nt, Uukuniemi virus
ugcaaggugcuugcuc

SEQ ID NO: 4052392 - RNA, 21 nt, Uukuniemi virus
ugcagugaagaaccuuuucuc

SEQ ID NO: 4052393 - RNA, 17 nt, Uukuniemi virus
ugugacuagucuuuucu

SEQ ID NO: 4052394 - RNA, 14 nt, Uukuniemi virus
uuuaauucggccaa

SEQ ID NO: 4052395 - RNA, 21 nt, Uukuniemi virus
aaagggcuucggcccaaacua

SEQ ID NO: 4052396 - RNA, 16 nt, Uukuniemi virus
agaguuggauggacag

SEQ ID NO: 4052397 - RNA, 18 nt, Uukuniemi virus
agcacucucaaaggugau

SEQ ID NO: 4052398 - RNA, 15 nt, Uukuniemi virus
aggugauccagugcu

SEQ ID NO: 4052399 - RNA, 22 nt, Uukuniemi virus
caagaauguggagaaggcacag

SEQ ID NO: 4052400 - RNA, 15 nt, Uukuniemi virus
ccaaacuacagugau

SEQ ID NO: 4052401 - RNA, 15 nt, Uukuniemi virus
cucaauugcagugaa

SEQ ID NO: 4052402 - RNA, 21 nt, Uukuniemi virus
gaaccuuuucucugcaauggu

SEQ ID NO: 4052403 - RNA, 16 nt, Uukuniemi virus
uccagcagucgcuccc

SEQ ID NO: 4052404 - RNA, 22 nt, Uukuniemi virus
ucgcucccuagcacucucaaag

SEQ ID NO: 4052405 - RNA, 12 nt, Uukuniemi virus
ucugcccaguga

SEQ ID NO: 4052406 - RNA, 16 nt, Uukuniemi virus
ugauccagugcuccuc

SEQ ID NO: 4052407 - RNA, 19 nt, Uukuniemi virus
ugauccuacgacuggccaa

SEQ ID NO: 4052408 - RNA, 23 nt, Uukuniemi virus
aacgcuuagguucauaguugcaa

SEQ ID NO: 4052409 - RNA, 19 nt, Uukuniemi virus
acuggccaauccuugguga

SEQ ID NO: 4052410 - RNA, 14 nt, Uukuniemi virus
agcacucucaaagg

SEQ ID NO: 4052411 - RNA, 11 nt, Uukuniemi virus
auccagugcuc

SEQ ID NO: 4052412 - RNA, 16 nt, Uukuniemi virus
caaacaugaaguucau

SEQ ID NO: 4052413 - RNA, 22 nt, Uukuniemi virus
caaacaugaaguucaugugcuu

SEQ ID NO: 4052414 - RNA, 21 nt, Uukuniemi virus
caauccuuggugaauguggug

SEQ ID NO: 4052415 - RNA, 14 nt, Uukuniemi virus
cagauucugcccag

SEQ ID NO: 4052416 - RNA, 15 nt, Uukuniemi virus
cccaaacuacaguga

SEQ ID NO: 4052417 - RNA, 20 nt, Uukuniemi virus
cucccuagcacucucaaagg

SEQ ID NO: 4052418 - RNA, 17 nt, Uukuniemi virus
gaaguucaugugcuucu

SEQ ID NO: 4052419 - RNA, 20 nt, Uukuniemi virus
uaaaagggcuucggcccaaa

SEQ ID NO: 4052420 - RNA, 14 nt, Uukuniemi virus
ucugcaaugguccc

SEQ ID NO: 4052421 - RNA, 13 nt, Uukuniemi virus
ugcccagugaccu

SEQ ID NO: 4052422 - RNA, 18 nt, Uukuniemi virus
uucaccagauucugccca

SEQ ID NO: 4052423 - RNA, 14 nt, Uukuniemi virus
aacaugaaguucau

SEQ ID NO: 4052424 - RNA, 14 nt, Uukuniemi virus
aaguucaugugcuu

SEQ ID NO: 4052425 - RNA, 21 nt, Uukuniemi virus
acagauccuucaccagauucu

SEQ ID NO: 4052426 - RNA, 13 nt, Uukuniemi virus
acaguaagguucu

SEQ ID NO: 4052427 - RNA, 21 nt, Uukuniemi virus
accagauucugcccagugacc

SEQ ID NO: 4052428 - RNA, 23 nt, Uukuniemi virus
acucucaaaggugauccagugcu

SEQ ID NO: 4052429 - RNA, 13 nt, Uukuniemi virus
aguugcaaggugc

SEQ ID NO: 4052430 - RNA, 14 nt, Uukuniemi virus
augugcuucuucuu

SEQ ID NO: 4052431 - RNA, 11 nt, Uukuniemi virus
auucaaacaug

SEQ ID NO: 4052432 - RNA, 22 nt, Uukuniemi virus
cagugauccuacgacuggccaa

SEQ ID NO: 4052433 - RNA, 13 nt, Uukuniemi virus
cuagucuuuucug

SEQ ID NO: 4052434 - RNA, 19 nt, Uukuniemi virus
cucaaaggugauccagugc

SEQ ID NO: 4052435 - RNA, 21 nt, Uukuniemi virus
cucuaauuggacucuaaaagg

SEQ ID NO: 4052436 - RNA, 21 nt, Uukuniemi virus
cugcaauggucccccuuguga

SEQ ID NO: 4052437 - RNA, 16 nt, Uukuniemi virus
gauucugcccagugac

SEQ ID NO: 4052438 - RNA, 14 nt, Uukuniemi virus
uaauucggccaaau

SEQ ID NO: 4052439 - RNA, 12 nt, Uukuniemi virus
uagucuuuucug

SEQ ID NO: 4052440 - RNA, 15 nt, Uukuniemi virus
ugauccagugcuccu

SEQ ID NO: 4052441 - RNA, 21 nt, Uukuniemi virus
uggacaguaagguucuuccga

SEQ ID NO: 4052442 - RNA, 13 nt, Vaccinia virus
aaaaaaauuaaua

SEQ ID NO: 4052443 - RNA, 20 nt, Vaccinia virus
aaaaaaggagcagacccuaa

SEQ ID NO: 4052444 - RNA, 11 nt, Vaccinia virus
aaaaaaugauc

SEQ ID NO: 4052445 - RNA, 13 nt, Vaccinia virus
aaaaaauuauacu

SEQ ID NO: 4052446 - RNA, 12 nt, Vaccinia virus
aaaaaauuccca

SEQ ID NO: 4052447 - RNA, 15 nt, Vaccinia virus
aaaaacgaggauauu

SEQ ID NO: 4052448 - RNA, 17 nt, Vaccinia virus
aaaaacuacuaugcucu

SEQ ID NO: 4052449 - RNA, 14 nt, Vaccinia virus
aaaaagaauguaua

SEQ ID NO: 4052450 - RNA, 23 nt, Vaccinia virus
aaaaagaguuucaaaaauauuca

SEQ ID NO: 4052451 - RNA, 21 nt, Vaccinia virus
aaaaagauuccuauuuacaaa

SEQ ID NO: 4052452 - RNA, 20 nt, Vaccinia virus
aaaaagcucuauauuacaaa

SEQ ID NO: 4052453 - RNA, 13 nt, Vaccinia virus
aaaaaggaaucua

SEQ ID NO: 4052454 - RNA, 22 nt, Vaccinia virus
aaaaauacaugggaaaugauau

SEQ ID NO: 4052455 - RNA, 23 nt, Vaccinia virus
aaaaauacaugggaaaugauauc

SEQ ID NO: 4052456 - RNA, 19 nt, Vaccinia virus
aaaaauauuuuuauucucu

SEQ ID NO: 4052457 - RNA, 17 nt, Vaccinia virus
aaaaauccuuaaugaua

SEQ ID NO: 4052458 - RNA, 15 nt, Vaccinia virus
aaaaaucgauuuuau

SEQ ID NO: 4052459 - RNA, 18 nt, Vaccinia virus
aaaaauguuaauuuugaa

SEQ ID NO: 4052460 - RNA, 16 nt, Vaccinia virus
aaaaauuauccuauca

SEQ ID NO: 4052461 - RNA, 21 nt, Vaccinia virus
aaaaauugaauugaugauaua

SEQ ID NO: 4052462 - RNA, 15 nt, Vaccinia virus
aaaacaauaaauauu

SEQ ID NO: 4052463 - RNA, 22 nt, Vaccinia virus
aaaacauauaaaucuaaaauug

SEQ ID NO: 4052464 - RNA, 19 nt, Vaccinia virus
aaaacauauauaauaaaua

SEQ ID NO: 4052465 - RNA, 18 nt, Vaccinia virus
aaaacauggauuugguaa

SEQ ID NO: 4052466 - RNA, 15 nt, Vaccinia virus
aaaaccaaggacuuu

SEQ ID NO: 4052467 - RNA, 15 nt, Vaccinia virus
aaaaccguuaaaaug

SEQ ID NO: 4052468 - RNA, 13 nt, Vaccinia virus
aaaacuacuacaa

SEQ ID NO: 4052469 - RNA, 20 nt, Vaccinia virus
aaaacuauaugucuguagaa

SEQ ID NO: 4052470 - RNA, 18 nt, Vaccinia virus
aaaacugcguuguaucau

SEQ ID NO: 4052471 - RNA, 21 nt, Vaccinia virus
aaaagaaaaacagaacaauau

SEQ ID NO: 4052472 - RNA, 22 nt, Vaccinia virus
aaaagacaaauauauguggugu

SEQ ID NO: 4052473 - RNA, 13 nt, Vaccinia virus
aaaagacaugaua

SEQ ID NO: 4052474 - RNA, 20 nt, Vaccinia virus
aaaagacggaggauuuccau

SEQ ID NO: 4052475 - RNA, 14 nt, Vaccinia virus
aaaagaucauacaa

SEQ ID NO: 4052476 - RNA, 15 nt, Vaccinia virus
aaaagccccaauuua

SEQ ID NO: 4052477 - RNA, 16 nt, Vaccinia virus
aaaaguaagauauuau

SEQ ID NO: 4052478 - RNA, 15 nt, Vaccinia virus
aaaaguacagaauua

SEQ ID NO: 4052479 - RNA, 19 nt, Vaccinia virus
aaaaguacucaaucuguac

SEQ ID NO: 4052480 - RNA, 14 nt, Vaccinia virus
aaaaguaggaauua

SEQ ID NO: 4052481 - RNA, 13 nt, Vaccinia virus
aaaaguucauaau

SEQ ID NO: 4052482 - RNA, 22 nt, Vaccinia virus
aaaaguuuuccaucuauguaga

SEQ ID NO: 4052483 - RNA, 13 nt, Vaccinia virus
aaaauaaaaaacc

SEQ ID NO: 4052484 - RNA, 18 nt, Vaccinia virus
aaaauaaacacauagaaa

SEQ ID NO: 4052485 - RNA, 13 nt, Vaccinia virus
aaaauaauaucua

SEQ ID NO: 4052486 - RNA, 14 nt, Vaccinia virus
aaaauaauuuccaa

SEQ ID NO: 4052487 - RNA, 16 nt, Vaccinia virus
aaaauacgaauaauca

SEQ ID NO: 4052488 - RNA, 17 nt, Vaccinia virus
aaaauagcgcugaaaau

SEQ ID NO: 4052489 - RNA, 15 nt, Vaccinia virus
aaaauaguucuguaa

SEQ ID NO: 4052490 - RNA, 18 nt, Vaccinia virus
aaaauauacguguacugu

SEQ ID NO: 4052491 - RNA, 14 nt, Vaccinia virus
aaaauauagcauag

SEQ ID NO: 4052492 - RNA, 17 nt, Vaccinia virus
aaaauauaguagaauuu

SEQ ID NO: 4052493 - RNA, 21 nt, Vaccinia virus
aaaauaucacaggagcaaugu

SEQ ID NO: 4052494 - RNA, 13 nt, Vaccinia virus
aaaauauguauaa

SEQ ID NO: 4052495 - RNA, 21 nt, Vaccinia virus
uauagauccuccaguaaauga

SEQ ID NO: 4052496 - RNA, 23 nt, Vaccinia virus
uauagauggaggggauuggcauu

SEQ ID NO: 4052497 - RNA, 19 nt, Vaccinia virus
uauagcauucuuggaugaa

SEQ ID NO: 4052498 - RNA, 20 nt, Vaccinia virus
uauagcugaggguguuagaa

SEQ ID NO: 4052499 - RNA, 17 nt, Vaccinia virus
uauaguagaauuucauu

SEQ ID NO: 4052500 - RNA, 13 nt, Vaccinia virus
uauaguagaugcu

SEQ ID NO: 4052501 - RNA, 20 nt, Vaccinia virus
uauaguucuuaacaucuauu

SEQ ID NO: 4052502 - RNA, 22 nt, Vaccinia virus
uauauaagacacagaaauacua

SEQ ID NO: 4052503 - RNA, 14 nt, Vaccinia virus
uauauaagacguau

SEQ ID NO: 4052504 - RNA, 16 nt, Vaccinia virus
uauauaauaaauacuu

SEQ ID NO: 4052505 - RNA, 22 nt, Vaccinia virus
uauauaauuuuuggacaaaugu

SEQ ID NO: 4052506 - RNA, 16 nt, Vaccinia virus
uauauagcacaaaugu

SEQ ID NO: 4052507 - RNA, 22 nt, Vaccinia virus
uauauagcuauucuucuuuaaa

SEQ ID NO: 4052508 - RNA, 18 nt, Vaccinia virus
uauauagcuuauuccaca

SEQ ID NO: 4052509 - RNA, 14 nt, Vaccinia virus
uauauaguaaugaa

SEQ ID NO: 4052510 - RNA, 11 nt, Vaccinia virus
uauauauacag

SEQ ID NO: 4052511 - RNA, 18 nt, Vaccinia virus
uauauaucagauacaguu

SEQ ID NO: 4052512 - RNA, 14 nt, Vaccinia virus
uauauauuaucaua

SEQ ID NO: 4052513 - RNA, 17 nt, Vaccinia virus
uauaucaaauacaucua

SEQ ID NO: 4052514 - RNA, 23 nt, Vaccinia virus
uauaucacaacaucuauaaaagu

SEQ ID NO: 4052515 - RNA, 17 nt, Vaccinia virus
uauaucaucuacauaau

SEQ ID NO: 4052516 - RNA, 15 nt, Vaccinia virus
uauauccaauaaagc

SEQ ID NO: 4052517 - RNA, 19 nt, Vaccinia virus
uauaucgacauacuacuua

SEQ ID NO: 4052518 - RNA, 22 nt, Vaccinia virus
uauaucuguccaauuaaaugua

SEQ ID NO: 4052519 - RNA, 17 nt, Vaccinia virus
uauaugaaguaaaguau

SEQ ID NO: 4052520 - RNA, 14 nt, Vaccinia virus
uauaugauaucuuu

SEQ ID NO: 4052521 - RNA, 13 nt, Vaccinia virus
uauaugcaucaaa

SEQ ID NO: 4052522 - RNA, 16 nt, Vaccinia virus
uauaugccacguuuau

SEQ ID NO: 4052523 - RNA, 21 nt, Vaccinia virus
uauaugccacguuuauacauu

SEQ ID NO: 4052524 - RNA, 21 nt, Vaccinia virus
uauaugguauagggagaguau

SEQ ID NO: 4052525 - RNA, 20 nt, Vaccinia virus
uauauguaagauguuuagaa

SEQ ID NO: 4052526 - RNA, 13 nt, Vaccinia virus
uauauguauguaa

SEQ ID NO: 4052527 - RNA, 21 nt, Vaccinia virus
uauaugugcgagaauauccuc

SEQ ID NO: 4052528 - RNA, 17 nt, Vaccinia virus
uauauuaaaaaauguca

SEQ ID NO: 4052529 - RNA, 18 nt, Vaccinia virus
uauauuaacucagaagau

SEQ ID NO: 4052530 - RNA, 14 nt, Vaccinia virus
uauauucuaucaua

SEQ ID NO: 4052531 - RNA, 22 nt, Vaccinia virus
uauauucucuaguuacuacgau

SEQ ID NO: 4052532 - RNA, 15 nt, Vaccinia virus
uauauucuuacagua

SEQ ID NO: 4052533 - RNA, 22 nt, Vaccinia virus
uauauugagaguguauccuuga

SEQ ID NO: 4052534 - RNA, 22 nt, Vaccinia virus
uauauugauuuucguaacagau

SEQ ID NO: 4052535 - RNA, 16 nt, Vaccinia virus
uauauuguuaaacuuu

SEQ ID NO: 4052536 - RNA, 14 nt, Vaccinia virus
uauauuuagauguu

SEQ ID NO: 4052537 - RNA, 12 nt, Vaccinia virus
uauauuuccagc

SEQ ID NO: 4052538 - RNA, 16 nt, Vaccinia virus
uauauuuucauuuaaa

SEQ ID NO: 4052539 - RNA, 15 nt, Vaccinia virus
uaucaaacacauaua

SEQ ID NO: 4052540 - RNA, 12 nt, Vaccinia virus
uaucaaaucuuu

SEQ ID NO: 4052541 - RNA, 18 nt, Vaccinia virus
uaucaaauugcauaccua

SEQ ID NO: 4052542 - RNA, 13 nt, Vaccinia virus
uaucaacaucuga

SEQ ID NO: 4052543 - RNA, 17 nt, Vaccinia virus
uaucaacguaacuauau

SEQ ID NO: 4052544 - RNA, 16 nt, Vaccinia virus
uaucaaguuggccauu

SEQ ID NO: 4052545 - RNA, 21 nt, Vaccinia virus
uaucaauaacgcaaucaugau

SEQ ID NO: 4052546 - RNA, 22 nt, Vaccinia virus
uaucaauaagaaaguuaagaau

SEQ ID NO: 4052547 - RNA, 13 nt, Vaccinia virus
uaucaauagcagu

SEQ ID NO: 4052548 - RNA, 22 nt, Vaccinia virus
uaucaaucaaaacagaauauga

SEQ ID NO: 4052549 - RNA, 17 nt, Vaccinia virus
uaucaauccaacaaaug

SEQ ID NO: 4052550 - RNA, 18 nt, Vaccinia virus
uaucaauccaacaaaugc

SEQ ID NO: 4052551 - RNA, 17 nt, Vaccinia virus
uaucaauuaaauaauua

SEQ ID NO: 4052552 - RNA, 14 nt, Vaccinia virus
uaucacuccaugau

SEQ ID NO: 4052553 - RNA, 19 nt, Vaccinia virus
uaucagaccguacauacau

SEQ ID NO: 4052554 - RNA, 18 nt, Vaccinia virus
uaucagaguuacaucaaa

SEQ ID NO: 4052555 - RNA, 20 nt, Vaccinia virus
uaucagucacgauguaggaa

SEQ ID NO: 4052556 - RNA, 21 nt, Vaccinia virus
uaucauaaaagauacaaauau

SEQ ID NO: 4052557 - RNA, 15 nt, Vaccinia virus
uaucauaauuaaauu

SEQ ID NO: 4052558 - RNA, 23 nt, Vaccinia virus
uaucaucauuuugauauuacuua

SEQ ID NO: 4052559 - RNA, 14 nt, Vaccinia virus
uaucauuaaaucua

SEQ ID NO: 4052560 - RNA, 18 nt, Vaccinia virus
uaucauuaauaaagacuu

SEQ ID NO: 4052561 - RNA, 13 nt, Vaccinia virus
uaucauuaaugau

SEQ ID NO: 4052562 - RNA, 21 nt, Vaccinia virus
uaucauuucuacauuguuuau

SEQ ID NO: 4052563 - RNA, 14 nt, Vaccinia virus
uauccaacauaugg

SEQ ID NO: 4052564 - RNA, 18 nt, Vaccinia virus
uauccaacgauuuuuagu

SEQ ID NO: 4052565 - RNA, 14 nt, Vaccinia virus
uauccaagaaaaag

SEQ ID NO: 4052566 - RNA, 14 nt, Vaccinia virus
uauccaccuuauuu

SEQ ID NO: 4052567 - RNA, 21 nt, Vaccinia virus
uauccgcacaugcagaagaac

SEQ ID NO: 4052568 - RNA, 21 nt, Vaccinia virus
uauccggagacgucaucuguu

SEQ ID NO: 4052569 - RNA, 17 nt, Vaccinia virus
uauccuauauacgaaaa

SEQ ID NO: 4052570 - RNA, 19 nt, Vaccinia virus
uauccucguuuuguuuucu

SEQ ID NO: 4052571 - RNA, 15 nt, Vaccinia virus
uaucgauaauuauuu

SEQ ID NO: 4052572 - RNA, 15 nt, Vaccinia virus
uaucgauguggagau

SEQ ID NO: 4052573 - RNA, 21 nt, Vaccinia virus
uaucgcauuuucuaacgugau

SEQ ID NO: 4052574 - RNA, 15 nt, Vaccinia virus
uaucguaucauuaaa

SEQ ID NO: 4052575 - RNA, 15 nt, Vaccinia virus
uaucguaucugucaa

SEQ ID NO: 4052576 - RNA, 19 nt, Vaccinia virus
uaucuacauauuuaccaaa

SEQ ID NO: 4052577 - RNA, 20 nt, Vaccinia virus
uaucuacgauuuuuacaaaa

SEQ ID NO: 4052578 - RNA, 13 nt, Vaccinia virus
uaucuauacauac

SEQ ID NO: 4052579 - RNA, 19 nt, Vaccinia virus
uaucuauaucauccaugua

SEQ ID NO: 4052580 - RNA, 17 nt, Vaccinia virus
uaucuaugcuuacugua

SEQ ID NO: 4052581 - RNA, 20 nt, Vaccinia virus
uaucuauuuuaacaaagcau

SEQ ID NO: 4052582 - RNA, 17 nt, Vaccinia virus
uaucucaauaguuucau

SEQ ID NO: 4052583 - RNA, 18 nt, Vaccinia virus
uaucucagugcaaagauu

SEQ ID NO: 4052584 - RNA, 19 nt, Vaccinia virus
uaucucucugauacaauca

SEQ ID NO: 4052585 - RNA, 20 nt, Vaccinia virus
uaucugaguauaguguucau

SEQ ID NO: 4052586 - RNA, 13 nt, Vaccinia virus
uaucuguuuccau

SEQ ID NO: 4052587 - RNA, 16 nt, Vaccinia virus
uaucuuaucgaaugau

SEQ ID NO: 4052588 - RNA, 12 nt, Vaccinia virus
uaucuucauaga

SEQ ID NO: 4052589 - RNA, 17 nt, Vaccinia virus
uaucuuccgucaaggau

SEQ ID NO: 4052590 - RNA, 16 nt, Vaccinia virus
uaucuuguacguauau

SEQ ID NO: 4052591 - RNA, 18 nt, Vaccinia virus
uaugaaacgaacacuauu

SEQ ID NO: 4052592 - RNA, 21 nt, Vaccinia virus
uuaaauaucaaccgcaaauca

SEQ ID NO: 4052593 - RNA, 13 nt, Vaccinia virus
uuaaauauguucu

SEQ ID NO: 4052594 - RNA, 18 nt, Vaccinia virus
uuaaaucaagucuagaau

SEQ ID NO: 4052595 - RNA, 13 nt, Vaccinia virus
uuaaaucauuacu

SEQ ID NO: 4052596 - RNA, 22 nt, Vaccinia virus
uuaaaucuaacgagaauauguu

SEQ ID NO: 4052597 - RNA, 17 nt, Vaccinia virus
uuaaaugaugaaacuaa

SEQ ID NO: 4052598 - RNA, 20 nt, Vaccinia virus
uuaaauuucaguuuauguuu

SEQ ID NO: 4052599 - RNA, 21 nt, Vaccinia virus
uuaacaauauauuauuaguuu

SEQ ID NO: 4052600 - RNA, 13 nt, Vaccinia virus
uuaacaauuauca

SEQ ID NO: 4052601 - RNA, 20 nt, Vaccinia virus
uuaacaccuccacaguuuuu

SEQ ID NO: 4052602 - RNA, 16 nt, Vaccinia virus
uuaacacucucugcca

SEQ ID NO: 4052603 - RNA, 19 nt, Vaccinia virus
uuaacaucucuucauuaau

SEQ ID NO: 4052604 - RNA, 20 nt, Vaccinia virus
uuaacaucuuuuuauaucug

SEQ ID NO: 4052605 - RNA, 20 nt, Vaccinia virus
uuaacauuuuggcaaauuga

SEQ ID NO: 4052606 - RNA, 17 nt, Vaccinia virus
uuaaccuaacuaaaaga

SEQ ID NO: 4052607 - RNA, 15 nt, Vaccinia virus
uuaacggcuauucaa

SEQ ID NO: 4052608 - RNA, 22 nt, Vaccinia virus
uuaacguaucgcauuaauacug

SEQ ID NO: 4052609 - RNA, 22 nt, Vaccinia virus
uuaagagauccgauaaacauug

SEQ ID NO: 4052610 - RNA, 14 nt, Vaccinia virus
uuaagaucuaauau

SEQ ID NO: 4052611 - RNA, 18 nt, Vaccinia virus
uuaagcauauccugaaua

SEQ ID NO: 4052612 - RNA, 23 nt, Vaccinia virus
uuaagcuguucaaaauauagcau

SEQ ID NO: 4052613 - RNA, 19 nt, Vaccinia virus
uuaaguagaucaucugaaa

SEQ ID NO: 4052614 - RNA, 21 nt, Vaccinia virus
uuaaguucuggaauauuauua

SEQ ID NO: 4052615 - RNA, 18 nt, Vaccinia virus
uuaauaaauuucuuuuca

SEQ ID NO: 4052616 - RNA, 24 nt, Vaccinia virus
uuaauaauugcggguaucacuguu

SEQ ID NO: 4052617 - RNA, 13 nt, Vaccinia virus
uuaauaauuguua

SEQ ID NO: 4052618 - RNA, 15 nt, Vaccinia virus
uuaauacaaguagua

SEQ ID NO: 4052619 - RNA, 15 nt, Vaccinia virus
uuaauagaacucuuu

SEQ ID NO: 4052620 - RNA, 22 nt, Vaccinia virus
uuaauagauauauuaauacuuu

SEQ ID NO: 4052621 - RNA, 14 nt, Vaccinia virus
uuaauaucaaacaa

SEQ ID NO: 4052622 - RNA, 11 nt, Vaccinia virus
uuaauaucuuu

SEQ ID NO: 4052623 - RNA, 12 nt, Vaccinia virus
uuaauaugagua

SEQ ID NO: 4052624 - RNA, 12 nt, Vaccinia virus
uuaauauguaca

SEQ ID NO: 4052625 - RNA, 17 nt, Vaccinia virus
uuaauauguaugauuca

SEQ ID NO: 4052626 - RNA, 14 nt, Vaccinia virus
uuaauauuacuguu

SEQ ID NO: 4052627 - RNA, 23 nt, Vaccinia virus
uuaauauugauacauacauuaau

SEQ ID NO: 4052628 - RNA, 18 nt, Vaccinia virus
uuaauauugcacaaagaa

SEQ ID NO: 4052629 - RNA, 14 nt, Vaccinia virus
uuaauccaaauaug

SEQ ID NO: 4052630 - RNA, 16 nt, Vaccinia virus
uuaauccacuauauau

SEQ ID NO: 4052631 - RNA, 22 nt, Vaccinia virus
uuaauccgggugaaauuauucc

SEQ ID NO: 4052632 - RNA, 16 nt, Vaccinia virus
uuaauccuucuagaau

SEQ ID NO: 4052633 - RNA, 12 nt, Vaccinia virus
uuaaugaagauc

SEQ ID NO: 4052634 - RNA, 18 nt, Vaccinia virus
uuaaugaauaucauuaac

SEQ ID NO: 4052635 - RNA, 21 nt, Vaccinia virus
uuaaugacacuaguuaagaac

SEQ ID NO: 4052636 - RNA, 14 nt, Vaccinia virus
uuaauggaaacuau

SEQ ID NO: 4052637 - RNA, 15 nt, Vaccinia virus
uuaauguauaucuuu

SEQ ID NO: 4052638 - RNA, 15 nt, Vaccinia virus
uuaauuaauguaacu

SEQ ID NO: 4052639 - RNA, 11 nt, Vaccinia virus
uuaauuauuca

SEQ ID NO: 4052640 - RNA, 16 nt, Vaccinia virus
uuaauuccauaucuuu

SEQ ID NO: 4052641 - RNA, 15 nt, Vaccinia virus
uuaauuuauuauuga

SEQ ID NO: 4052642 - RNA, 13 nt, Vaccinia virus
uuaauuuguacau

SEQ ID NO: 4052643 - RNA, 19 nt, Vaccinia virus
uuaauuuuagaaauacuua

SEQ ID NO: 4052644 - RNA, 14 nt, Vaccinia virus
uuaauuuuuaguuu

SEQ ID NO: 4052645 - RNA, 17 nt, Vaccinia virus
uuacaaauauucacaag

SEQ ID NO: 4052646 - RNA, 19 nt, Vaccinia virus
uuacaacgccaucaugaau

SEQ ID NO: 4052647 - RNA, 21 nt, Vaccinia virus
uuacaauguagaaauuagaaa

SEQ ID NO: 4052648 - RNA, 23 nt, Vaccinia virus
uuacacacuuuguccguaaaaca

SEQ ID NO: 4052649 - RNA, 17 nt, Vaccinia virus
uuacauaaaugaaaaga

SEQ ID NO: 4052650 - RNA, 19 nt, Vaccinia virus
uuacauugcucguaaaaga

SEQ ID NO: 4052651 - RNA, 12 nt, Vaccinia virus
uuaccaacaaua

SEQ ID NO: 4052652 - RNA, 14 nt, Vaccinia virus
uuaccaacacaaag

SEQ ID NO: 4052653 - RNA, 19 nt, Vaccinia virus
uuaccagaagguguuguaa

SEQ ID NO: 4052654 - RNA, 20 nt, Vaccinia virus
uuaccaucaaaagcauuaau

SEQ ID NO: 4052655 - RNA, 19 nt, Vaccinia virus
uuacccaugcaacugaacg

SEQ ID NO: 4052656 - RNA, 16 nt, Vaccinia virus
uuacccuugucauuau

SEQ ID NO: 4052657 - RNA, 23 nt, Vaccinia virus
uuaccucuucugauaucauuaau

SEQ ID NO: 4052658 - RNA, 18 nt, Vaccinia virus
uuacgaauauauaaaaga

SEQ ID NO: 4052659 - RNA, 19 nt, Vaccinia virus
uuacgacgugcuaaucuag

SEQ ID NO: 4052660 - RNA, 14 nt, Vaccinia virus
uuacgauagacuuu

SEQ ID NO: 4052661 - RNA, 17 nt, Vaccinia virus
uuacgcaaaacauuaua

SEQ ID NO: 4052662 - RNA, 14 nt, Vaccinia virus
uuacguuacacuuu

SEQ ID NO: 4052663 - RNA, 13 nt, Vaccinia virus
uuacuaauggagu

SEQ ID NO: 4052664 - RNA, 15 nt, Vaccinia virus
uuacuagauuaaaaa

SEQ ID NO: 4052665 - RNA, 19 nt, Vaccinia virus
uuacucauuuuuuauaaaa

SEQ ID NO: 4052666 - RNA, 14 nt, Vaccinia virus
uuacugaauuauua

SEQ ID NO: 4052667 - RNA, 14 nt, Vaccinia virus
uuacuuaaaugccu

SEQ ID NO: 4052668 - RNA, 13 nt, Vaccinia virus
uuacuugugguaa

SEQ ID NO: 4052669 - RNA, 23 nt, Vaccinia virus
uuacuuugaaacaggauuuccaa

SEQ ID NO: 4052670 - RNA, 19 nt, Vaccinia virus
uuacuuugaccacauccuu

SEQ ID NO: 4052671 - RNA, 13 nt, Vaccinia virus
uuacuuuuggaau

SEQ ID NO: 4052672 - RNA, 20 nt, Vaccinia virus
uuagaaauuggucuguguua

SEQ ID NO: 4052673 - RNA, 17 nt, Vaccinia virus
uuagaagagucauuaaa

SEQ ID NO: 4052674 - RNA, 20 nt, Vaccinia virus
uuagaauauauguauguaaa

SEQ ID NO: 4052675 - RNA, 21 nt, Vaccinia virus
uuagacaacaagguaccuaua

SEQ ID NO: 4052676 - RNA, 13 nt, Vaccinia virus
uuagacuagauac

SEQ ID NO: 4052677 - RNA, 18 nt, Vaccinia virus
uuagacuguuuguagaau

SEQ ID NO: 4052678 - RNA, 15 nt, Vaccinia virus
uuagagaacauacau

SEQ ID NO: 4052679 - RNA, 17 nt, Vaccinia virus
uuagauacaauggauga

SEQ ID NO: 4052680 - RNA, 13 nt, Vaccinia virus
uuagauauucacg

SEQ ID NO: 4052681 - RNA, 21 nt, Vaccinia virus
uuagaucauuaacucuagaaa

SEQ ID NO: 4052682 - RNA, 17 nt, Vaccinia virus
uuagauccaacauuaau

SEQ ID NO: 4052683 - RNA, 22 nt, Vaccinia virus
uuagaucccggauacuggauau

SEQ ID NO: 4052684 - RNA, 18 nt, Vaccinia virus
uuagaugagaaauuauuc

SEQ ID NO: 4052685 - RNA, 22 nt, Vaccinia virus
uuagauuuauuuuuauaaaguu

SEQ ID NO: 4052686 - RNA, 19 nt, Vaccinia virus
uuagauuuuuuacacuguu

SEQ ID NO: 4052687 - RNA, 17 nt, Vaccinia virus
uuagcaaaauuauuaau

SEQ ID NO: 4052688 - RNA, 12 nt, Vaccinia virus
uuagcaauuuuc

SEQ ID NO: 4052689 - RNA, 15 nt, Vaccinia virus
uuagcaucugauuuu

SEQ ID NO: 4052690 - RNA, 16 nt, Vaccinia virus
uuagcguacacauuuu

SEQ ID NO: 4052691 - RNA, 22 nt, Vaccinia virus
uuaguaagugccacaaaacaga

SEQ ID NO: 4052692 - RNA, 15 nt, Vaccinia virus
uuaguaggcaucuuu

SEQ ID NO: 4052693 - RNA, 16 nt, Vaccinia virus
uuaguauaauuauuga

SEQ ID NO: 4052694 - RNA, 20 nt, Vaccinia virus
uuaguaucuagcucuguaaa

SEQ ID NO: 4052695 - RNA, 17 nt, Vaccinia virus
uuagucaaucuuauuca

SEQ ID NO: 4052696 - RNA, 21 nt, Vaccinia virus
uuaguccugcguuagauguua

SEQ ID NO: 4052697 - RNA, 17 nt, Vaccinia virus
uuagucgucucaaagag

SEQ ID NO: 4052698 - RNA, 15 nt, Vaccinia virus
uuagucuauuaucca

SEQ ID NO: 4052699 - RNA, 14 nt, Vaccinia virus
uuagugaaaucuuu

SEQ ID NO: 4052700 - RNA, 22 nt, Vaccinia virus
aaauauugaacuaguaguacgu

SEQ ID NO: 4052701 - RNA, 18 nt, Vaccinia virus
aaauauuuaacucaugau

SEQ ID NO: 4052702 - RNA, 20 nt, Vaccinia virus
aaauauuucauuagauguua

SEQ ID NO: 4052703 - RNA, 21 nt, Vaccinia virus
aaaucauaauaugagauguuu

SEQ ID NO: 4052704 - RNA, 19 nt, Vaccinia virus
aaaucauccguuguuauau

SEQ ID NO: 4052705 - RNA, 23 nt, Vaccinia virus
aaaucauccguuguuauauaccg

SEQ ID NO: 4052706 - RNA, 16 nt, Vaccinia virus
aaaucauuaaaaagau

SEQ ID NO: 4052707 - RNA, 22 nt, Vaccinia virus
aaaucauuagugacggaaaauc

SEQ ID NO: 4052708 - RNA, 13 nt, Vaccinia virus
aaauccaaacauu

SEQ ID NO: 4052709 - RNA, 24 nt, Vaccinia virus
aaauccaaauugcgacacuauuca

SEQ ID NO: 4052710 - RNA, 17 nt, Vaccinia virus
aaauccuccaucacuuc

SEQ ID NO: 4052711 - RNA, 17 nt, Vaccinia virus
aaaucguauaaaguuau

SEQ ID NO: 4052712 - RNA, 14 nt, Vaccinia virus
aaaucguguugugu

SEQ ID NO: 4052713 - RNA, 13 nt, Vaccinia virus
aaaucuaacuucu

SEQ ID NO: 4052714 - RNA, 23 nt, Vaccinia virus
aaaucuaucuuuagcuucugaaa

SEQ ID NO: 4052715 - RNA, 19 nt, Vaccinia virus
aaaugaaccucuggaauua

SEQ ID NO: 4052716 - RNA, 21 nt, Vaccinia virus
aaaugaacuuuuacagaucua

SEQ ID NO: 4052717 - RNA, 23 nt, Vaccinia virus
aaaugacuaauuuuguagcauua

SEQ ID NO: 4052718 - RNA, 18 nt, Vaccinia virus
aaaugauaucuuagaaua

SEQ ID NO: 4052719 - RNA, 19 nt, Vaccinia virus
aaaugaugcugguuauuau

SEQ ID NO: 4052720 - RNA, 23 nt, Vaccinia virus
aaaugaugcugguuauuauacau

SEQ ID NO: 4052721 - RNA, 17 nt, Vaccinia virus
uuauauacacauaauua

SEQ ID NO: 4052722 - RNA, 21 nt, Vaccinia virus
uuauauacacauaauuauucu

SEQ ID NO: 4052723 - RNA, 16 nt, Vaccinia virus
uuauauagauguagug

SEQ ID NO: 4052724 - RNA, 18 nt, Vaccinia virus
uuauaucuaaaaauuaga

SEQ ID NO: 4052725 - RNA, 21 nt, Vaccinia virus
uuauauuaacacauacauuuu

SEQ ID NO: 4052726 - RNA, 11 nt, Vaccinia virus
uuauauuuugu

SEQ ID NO: 4052727 - RNA, 13 nt, Vaccinia virus
uuaucaaaucuag

SEQ ID NO: 4052728 - RNA, 16 nt, Vaccinia virus
uuaucaaauggaugcu

SEQ ID NO: 4052729 - RNA, 21 nt, Vaccinia virus
uuaucagugucguaaauuacg

SEQ ID NO: 4052730 - RNA, 15 nt, Vaccinia virus
uuaucauggagugau

SEQ ID NO: 4052731 - RNA, 12 nt, Vaccinia virus
uuaucauuauua

SEQ ID NO: 4052732 - RNA, 17 nt, Vaccinia virus
uuauccgcuaaaaauuu

SEQ ID NO: 4052733 - RNA, 15 nt, Vaccinia virus
uuauccuaucaugua

SEQ ID NO: 4052734 - RNA, 17 nt, Vaccinia virus
uuaucgauauugaagau

SEQ ID NO: 4052735 - RNA, 14 nt, Vaccinia virus
uuaucuaacucuuu

SEQ ID NO: 4052736 - RNA, 22 nt, Vaccinia virus
uuaucuauaucaucuacauaau

SEQ ID NO: 4052737 - RNA, 14 nt, Vaccinia virus
uuaucuauuaucca

SEQ ID NO: 4052738 - RNA, 16 nt, Vaccinia virus
uuaucuauuucaaaaa

SEQ ID NO: 4052739 - RNA, 21 nt, Vaccinia virus
uuaucucuauagauaaugacg

SEQ ID NO: 4052740 - RNA, 23 nt, Vaccinia virus
uuaucucuuuccuagauacugua

SEQ ID NO: 4052741 - RNA, 22 nt, Vaccinia virus
uuaugaaaccauacuaauagau

SEQ ID NO: 4052742 - RNA, 14 nt, Vaccinia virus
uuaugagaauagau

SEQ ID NO: 4052743 - RNA, 19 nt, Vaccinia virus
uuaugccguuaucauuaau

SEQ ID NO: 4052744 - RNA, 18 nt, Vaccinia virus
uuauguaaaacaaacuug

SEQ ID NO: 4052745 - RNA, 21 nt, Vaccinia virus
uuauguucgguauaaaaauua

SEQ ID NO: 4052746 - RNA, 22 nt, Vaccinia virus
uuauuaaaguacguaaaucuag

SEQ ID NO: 4052747 - RNA, 13 nt, Vaccinia virus
uuauuaaaguuua

SEQ ID NO: 4052748 - RNA, 13 nt, Vaccinia virus
uuauuaauucucu

SEQ ID NO: 4052749 - RNA, 13 nt, Vaccinia virus
uuauuacauguuu

SEQ ID NO: 4052750 - RNA, 12 nt, Vaccinia virus
uuauuacauucu

SEQ ID NO: 4052751 - RNA, 13 nt, Vaccinia virus
uuauuacuaaaca

SEQ ID NO: 4052752 - RNA, 22 nt, Vaccinia virus
uuauuacuaaacuacgugaaca

SEQ ID NO: 4052753 - RNA, 19 nt, Vaccinia virus
uuauuagucugucuguaga

SEQ ID NO: 4052754 - RNA, 21 nt, Vaccinia virus
uuauuaguuuuuuauuauuga

SEQ ID NO: 4052755 - RNA, 11 nt, Vaccinia virus
uuauuaucuaa

SEQ ID NO: 4052756 - RNA, 14 nt, Vaccinia virus
uuauuaucuguaga

SEQ ID NO: 4052757 - RNA, 22 nt, Vaccinia virus
uuauucaucgucgucuacuauu

SEQ ID NO: 4052758 - RNA, 22 nt, Vaccinia virus
uuauugauacccgucuguuuaa

SEQ ID NO: 4052759 - RNA, 22 nt, Vaccinia virus
uuauugguauuucuuacauaaa

SEQ ID NO: 4052760 - RNA, 12 nt, Vaccinia virus
uuauuuaacaug

SEQ ID NO: 4052761 - RNA, 14 nt, Vaccinia virus
uuauuuaacucuuu

SEQ ID NO: 4052762 - RNA, 12 nt, Vaccinia virus
uuauuuagugua

SEQ ID NO: 4052763 - RNA, 19 nt, Vaccinia virus
uuauuucagaaauuauucg

SEQ ID NO: 4052764 - RNA, 13 nt, Vaccinia virus
uuauuucuaaaau

SEQ ID NO: 4052765 - RNA, 18 nt, Vaccinia virus
uuauuucugaauuauucc

SEQ ID NO: 4052766 - RNA, 15 nt, Vaccinia virus
uuauuucuucugaau

SEQ ID NO: 4052767 - RNA, 13 nt, Vaccinia virus
uuauuuuuggaag

SEQ ID NO: 4052768 - RNA, 21 nt, Vaccinia virus
uuauuuuuugguauaauucua

SEQ ID NO: 4052769 - RNA, 14 nt, Vaccinia virus
uuauuuuuuuggaa

SEQ ID NO: 4052770 - RNA, 21 nt, Vaccinia virus
uucaaauccgaaauugucuga

SEQ ID NO: 4052771 - RNA, 15 nt, Vaccinia virus
uucaagagaauauuc

SEQ ID NO: 4052772 - RNA, 15 nt, Vaccinia virus
uucaauaaaugauuc

SEQ ID NO: 4052773 - RNA, 22 nt, Vaccinia virus
uucaauaauucuauucuaguau

SEQ ID NO: 4052774 - RNA, 21 nt, Vaccinia virus
uucaaucucuaguuuuauuuu

SEQ ID NO: 4052775 - RNA, 16 nt, Vaccinia virus
uucaaucugagauucu

SEQ ID NO: 4052776 - RNA, 22 nt, Vaccinia virus
uucaauggauacugcaucuguu

SEQ ID NO: 4052777 - RNA, 18 nt, Vaccinia virus
uucacaaaacuagacuuu

SEQ ID NO: 4052778 - RNA, 13 nt, Vaccinia virus
uucacaaaauacg

SEQ ID NO: 4052779 - RNA, 18 nt, Vaccinia virus
uucacaauaucaguaucu

SEQ ID NO: 4052780 - RNA, 14 nt, Vaccinia virus
uucacaauucauuc

SEQ ID NO: 4052781 - RNA, 14 nt, Vaccinia virus
uucaccaauaaaaa

SEQ ID NO: 4052782 - RNA, 22 nt, Vaccinia virus
uucaccaucauacucauauaau

SEQ ID NO: 4052783 - RNA, 19 nt, Vaccinia virus
uucacucguuucauaaaga

SEQ ID NO: 4052784 - RNA, 17 nt, Vaccinia virus
uucacuuuaauagauau

SEQ ID NO: 4052785 - RNA, 17 nt, Vaccinia virus
uucagaggaauacagac

SEQ ID NO: 4052786 - RNA, 18 nt, Vaccinia virus
uucagcauuacuugauau

SEQ ID NO: 4052787 - RNA, 19 nt, Vaccinia virus
uucagcgguaaagauaucu

SEQ ID NO: 4052788 - RNA, 20 nt, Vaccinia virus
uucaguaaccaaauacauau

SEQ ID NO: 4052789 - RNA, 19 nt, Vaccinia virus
uucauaaauaaaaacuugg

SEQ ID NO: 4052790 - RNA, 14 nt, Vaccinia virus
uucauaucauucuu

SEQ ID NO: 4052791 - RNA, 14 nt, Vaccinia virus
uucaucaaacauua

SEQ ID NO: 4052792 - RNA, 17 nt, Vaccinia virus
uucauccauuuacaacu

SEQ ID NO: 4052793 - RNA, 19 nt, Vaccinia virus
uucauccguuuccuuauga

SEQ ID NO: 4052794 - RNA, 18 nt, Vaccinia virus
uucaucguaucuagauaa

SEQ ID NO: 4052795 - RNA, 18 nt, Vaccinia virus
uucauguuuauaaaaaug

SEQ ID NO: 4052796 - RNA, 15 nt, Vaccinia virus
uucauuaauaucuuu

SEQ ID NO: 4052797 - RNA, 17 nt, Vaccinia virus
uucauuaauuucugaua

SEQ ID NO: 4052798 - RNA, 15 nt, Vaccinia virus
uucauuacacaucuu

SEQ ID NO: 4052799 - RNA, 15 nt, Vaccinia virus
uucauucguaaaucu

SEQ ID NO: 4052800 - RNA, 11 nt, Vaccinia virus
uucauuucuaa

SEQ ID NO: 4052801 - RNA, 16 nt, Vaccinia virus
uuccaaaaacauauga

SEQ ID NO: 4052802 - RNA, 15 nt, Vaccinia virus
uuccaauagaugucu

SEQ ID NO: 4052803 - RNA, 14 nt, Vaccinia virus
uuccaaucauugau

SEQ ID NO: 4052804 - RNA, 20 nt, Vaccinia virus
uuccaaugauauauuuucca

SEQ ID NO: 4052805 - RNA, 21 nt, Vaccinia virus
uuccacaauacgagucauuau

SEQ ID NO: 4052806 - RNA, 14 nt, Vaccinia virus
uuccagaguguuua

SEQ ID NO: 4052807 - RNA, 15 nt, Vaccinia virus
uuccagaucuguaug

SEQ ID NO: 4052808 - RNA, 20 nt, Vaccinia virus
uuccauacguuuauauucuu

SEQ ID NO: 4052809 - RNA, 14 nt, Vaccinia virus
uuccauauagauau

SEQ ID NO: 4052810 - RNA, 18 nt, Vaccinia virus
uuccauccacaauuauug

SEQ ID NO: 4052811 - RNA, 22 nt, Vaccinia virus
uuccaugggacuauauaauuuu

SEQ ID NO: 4052812 - RNA, 23 nt, Vaccinia virus
uucccaaugguuucaucaauaga

SEQ ID NO: 4052813 - RNA, 16 nt, Vaccinia virus
uuccugugacaaaaau

SEQ ID NO: 4052814 - RNA, 16 nt, Vaccinia virus
uuccuuuaucauuaau

SEQ ID NO: 4052815 - RNA, 15 nt, Vaccinia virus
uucgauauucucauu

SEQ ID NO: 4052816 - RNA, 20 nt, Vaccinia virus
uucguugucuuuacacuuuc

SEQ ID NO: 4052817 - RNA, 18 nt, Vaccinia virus
uucguuuaucuuggaaca

SEQ ID NO: 4052818 - RNA, 18 nt, Vaccinia virus
uucuaaaaaaauauuaac

SEQ ID NO: 4052819 - RNA, 12 nt, Vaccinia virus
uucuaauacuau

SEQ ID NO: 4052820 - RNA, 12 nt, Vaccinia virus
uucuacaucuuc

SEQ ID NO: 4052821 - RNA, 13 nt, Vaccinia virus
uucuacauuuuca

SEQ ID NO: 4052822 - RNA, 21 nt, Vaccinia virus
uucuacuacuucauuaaucuu

SEQ ID NO: 4052823 - RNA, 21 nt, Vaccinia virus
uucuacuaugcacauuauucu

SEQ ID NO: 4052824 - RNA, 21 nt, Vaccinia virus
uggauaacgguacucuagaau

SEQ ID NO: 4052825 - RNA, 20 nt, Vaccinia virus
uggauagagauugagauucu

SEQ ID NO: 4052826 - RNA, 17 nt, Vaccinia virus
uggaugauauagaucuu

SEQ ID NO: 4052827 - RNA, 20 nt, Vaccinia virus
uggauggauuauaauugaug

SEQ ID NO: 4052828 - RNA, 15 nt, Vaccinia virus
uggauguacauguau

SEQ ID NO: 4052829 - RNA, 17 nt, Vaccinia virus
uggcaauaaaguuuuua

SEQ ID NO: 4052830 - RNA, 17 nt, Vaccinia virus
uggcauaggaacauuuc

SEQ ID NO: 4052831 - RNA, 14 nt, Vaccinia virus
uggccaaccuuugu

SEQ ID NO: 4052832 - RNA, 19 nt, Vaccinia virus
uggcuagauucaacauuua

SEQ ID NO: 4052833 - RNA, 22 nt, Vaccinia virus
uggcucuugaaaccaagguuuu

SEQ ID NO: 4052834 - RNA, 22 nt, Vaccinia virus
ugggaucaugcauucaaaugga

SEQ ID NO: 4052835 - RNA, 16 nt, Vaccinia virus
ugggucuaguuuucag

SEQ ID NO: 4052836 - RNA, 13 nt, Vaccinia virus
ugggugauggaua

SEQ ID NO: 4052837 - RNA, 10 nt, Vaccinia virus
ugguaaaaug

SEQ ID NO: 4052838 - RNA, 16 nt, Vaccinia virus
ugguaaaguaaaucau

SEQ ID NO: 4052839 - RNA, 22 nt, Vaccinia virus
ugguaacgucaucaucaacaau

SEQ ID NO: 4052840 - RNA, 11 nt, Vaccinia virus
ugguauauaca

SEQ ID NO: 4052841 - RNA, 12 nt, Vaccinia virus
ugguauauacau

SEQ ID NO: 4052842 - RNA, 18 nt, Vaccinia virus
ugguauauccaaaccauc

SEQ ID NO: 4052843 - RNA, 20 nt, Vaccinia virus
ugguauccuggcgaauauua

SEQ ID NO: 4052844 - RNA, 17 nt, Vaccinia virus
uggucauaauagaaugu

SEQ ID NO: 4052845 - RNA, 14 nt, Vaccinia virus
uggucauagaaaau

SEQ ID NO: 4052846 - RNA, 14 nt, Vaccinia virus
uggugaaauuauug

SEQ ID NO: 4052847 - RNA, 19 nt, Vaccinia virus
ugguguauuaaauuccagu

SEQ ID NO: 4052848 - RNA, 22 nt, Vaccinia virus
ugguuccacaauucauuuccau

SEQ ID NO: 4052849 - RNA, 19 nt, Vaccinia virus
uguaaaaaaauuauacugu

SEQ ID NO: 4052850 - RNA, 14 nt, Vaccinia virus
uguaaaauaucuuc

SEQ ID NO: 4052851 - RNA, 20 nt, Vaccinia virus
uguaaaggauaugauauguu

SEQ ID NO: 4052852 - RNA, 12 nt, Vaccinia virus
uguaagaaauaa

SEQ ID NO: 4052853 - RNA, 13 nt, Vaccinia virus
uguaagauacuug

SEQ ID NO: 4052854 - RNA, 20 nt, Vaccinia virus
uguaauacauuuugaacucu

SEQ ID NO: 4052855 - RNA, 14 nt, Vaccinia virus
uguaauaguuucca

SEQ ID NO: 4052856 - RNA, 18 nt, Vaccinia virus
uguaauuuagaauacguu

SEQ ID NO: 4052857 - RNA, 15 nt, Vaccinia virus
uguaauuuagaugug

SEQ ID NO: 4052858 - RNA, 17 nt, Vaccinia virus
uguaauuuuuguuuccg

SEQ ID NO: 4052859 - RNA, 15 nt, Vaccinia virus
uguacaauaugaaca

SEQ ID NO: 4052860 - RNA, 17 nt, Vaccinia virus
uguacauuaauaaauga

SEQ ID NO: 4052861 - RNA, 12 nt, Vaccinia virus
uguaccuauuaa

SEQ ID NO: 4052862 - RNA, 20 nt, Vaccinia virus
uguacuacaaacaggcgaug

SEQ ID NO: 4052863 - RNA, 19 nt, Vaccinia virus
uguagaagguucauauguu

SEQ ID NO: 4052864 - RNA, 18 nt, Vaccinia virus
uguagacaaauauacuuu

SEQ ID NO: 4052865 - RNA, 23 nt, Vaccinia virus
uguagauaauaacuaaaaaucaa

SEQ ID NO: 4052866 - RNA, 13 nt, Vaccinia virus
uguagauaucuuu

SEQ ID NO: 4052867 - RNA, 14 nt, Vaccinia virus
uguaggaaaaagau

SEQ ID NO: 4052868 - RNA, 12 nt, Vaccinia virus
uguaguaguaua

SEQ ID NO: 4052869 - RNA, 15 nt, Vaccinia virus
uguaguauaucuaca

SEQ ID NO: 4052870 - RNA, 21 nt, Vaccinia virus
uguagugucaauuuuaaauga

SEQ ID NO: 4052871 - RNA, 15 nt, Vaccinia virus
uguaguuauugaacu

SEQ ID NO: 4052872 - RNA, 13 nt, Vaccinia virus
uguauaaaaagaa

SEQ ID NO: 4052873 - RNA, 16 nt, Vaccinia virus
uguauaacaaauacag

SEQ ID NO: 4052874 - RNA, 17 nt, Vaccinia virus
uguauaacaaauacaga

SEQ ID NO: 4052875 - RNA, 21 nt, Vaccinia virus
uguauaacaaucguauaucuu

SEQ ID NO: 4052876 - RNA, 22 nt, Vaccinia virus
uguauagaggucagauacuggu

SEQ ID NO: 4052877 - RNA, 23 nt, Vaccinia virus
uguauaugauguuucuguuuuca

SEQ ID NO: 4052878 - RNA, 17 nt, Vaccinia virus
uguaucauauucaacau

SEQ ID NO: 4052879 - RNA, 16 nt, Vaccinia virus
uguauuaaaauacuuu

SEQ ID NO: 4052880 - RNA, 21 nt, Vaccinia virus
uguauuaguuaaauauuaaaa

SEQ ID NO: 4052881 - RNA, 18 nt, Vaccinia virus
uguauuauccaauacaga

SEQ ID NO: 4052882 - RNA, 20 nt, Vaccinia virus
uguauuauucugaauaguga

SEQ ID NO: 4052883 - RNA, 20 nt, Vaccinia virus
ugucaaugaagaguauacag

SEQ ID NO: 4052884 - RNA, 20 nt, Vaccinia virus
ugucaguaguauacaucaug

SEQ ID NO: 4052885 - RNA, 19 nt, Vaccinia virus
uguccauaggauacuuugu

SEQ ID NO: 4052886 - RNA, 18 nt, Vaccinia virus
ugucccaucagcauguag

SEQ ID NO: 4052887 - RNA, 17 nt, Vaccinia virus
ugucggcgacaugauua

SEQ ID NO: 4052888 - RNA, 19 nt, Vaccinia virus
ugucguguuccuguuuccu

SEQ ID NO: 4052889 - RNA, 20 nt, Vaccinia virus
ugucguguuccuguuuccua

SEQ ID NO: 4052890 - RNA, 21 nt, Vaccinia virus
ugucuaaacgaccaucuuuga

SEQ ID NO: 4052891 - RNA, 12 nt, Vaccinia virus
ugucuacauaaa

SEQ ID NO: 4052892 - RNA, 16 nt, Vaccinia virus
ugucuacauaaaucua

SEQ ID NO: 4052893 - RNA, 15 nt, Vaccinia virus
ugucuauuaucuguu

SEQ ID NO: 4052894 - RNA, 22 nt, Vaccinia virus
ugucucgaggcuaaaacacauu

SEQ ID NO: 4052895 - RNA, 22 nt, Vaccinia virus
ugucuggaccaucguuugucau

SEQ ID NO: 4052896 - RNA, 15 nt, Vaccinia virus
ugucuguauauguaa

SEQ ID NO: 4052897 - RNA, 23 nt, Vaccinia virus
ugugaaugguaaagaaugcuguu

SEQ ID NO: 4052898 - RNA, 18 nt, Vaccinia virus
ugugacuguuuucucauc

SEQ ID NO: 4052899 - RNA, 12 nt, Vaccinia virus
ugugauggauuu

SEQ ID NO: 4052900 - RNA, 17 nt, Vaccinia virus
ugugcuuaauguuucca

SEQ ID NO: 4052901 - RNA, 16 nt, Vaccinia virus
uguggaucugaagaag

SEQ ID NO: 4052902 - RNA, 23 nt, Vaccinia virus
ugugucaaagguuaaaccuuuau

SEQ ID NO: 4052903 - RNA, 17 nt, Vaccinia virus
uguguuuacaguaguaa

SEQ ID NO: 4052904 - RNA, 21 nt, Vaccinia virus
uguuaacugacaauugcaaaa

SEQ ID NO: 4052905 - RNA, 12 nt, Vaccinia virus
uguuaauaacug

SEQ ID NO: 4052906 - RNA, 15 nt, Vaccinia virus
uguuaauacaucacu

SEQ ID NO: 4052907 - RNA, 22 nt, Vaccinia virus
uguuacaacuuuaccaaaauua

SEQ ID NO: 4052908 - RNA, 21 nt, Vaccinia virus
uguuauacacggucuagagca

SEQ ID NO: 4052909 - RNA, 15 nt, Vaccinia virus
uguuauauauaaaag

SEQ ID NO: 4052910 - RNA, 16 nt, Vaccinia virus
uguuauauauugucua

SEQ ID NO: 4052911 - RNA, 20 nt, Vaccinia virus
uguuauuguaguauaugaua

SEQ ID NO: 4052912 - RNA, 20 nt, Vaccinia virus
uguucacaaaaauacauaaa

SEQ ID NO: 4052913 - RNA, 22 nt, Vaccinia virus
uguucagauacuauaccguugu

SEQ ID NO: 4052914 - RNA, 19 nt, Vaccinia virus
uguuccaacucgugugcuc

SEQ ID NO: 4052915 - RNA, 17 nt, Vaccinia virus
uguucgauauucucauu

SEQ ID NO: 4052916 - RNA, 16 nt, Vaccinia virus
uguucuacacauguau

SEQ ID NO: 4052917 - RNA, 14 nt, Vaccinia virus
uguugaaaaugaaa

SEQ ID NO: 4052918 - RNA, 14 nt, Vaccinia virus
uguugugaaagagu

SEQ ID NO: 4052919 - RNA, 21 nt, Vaccinia virus
uguuguuuauucaacauguac

SEQ ID NO: 4052920 - RNA, 21 nt, Vaccinia virus
uguuuaacaaagauauuacca

SEQ ID NO: 4052921 - RNA, 12 nt, Vaccinia virus
uguuuaagaaaa

SEQ ID NO: 4052922 - RNA, 11 nt, Vaccinia virus
uguuuaagaua

SEQ ID NO: 4052923 - RNA, 16 nt, Vaccinia virus
uguuuaccacaaugua

SEQ ID NO: 4052924 - RNA, 17 nt, Vaccinia virus
uguuuauacaagauuga

SEQ ID NO: 4052925 - RNA, 17 nt, Vaccinia virus
uguuuaucuauacuauu

SEQ ID NO: 4052926 - RNA, 19 nt, Vaccinia virus
uguuucgaaacuuuaucaa

SEQ ID NO: 4052927 - RNA, 23 nt, Vaccinia virus
uguuugauuucucuaucgaugca

SEQ ID NO: 4052928 - RNA, 19 nt, Vaccinia virus
uguuuggcaauaaaguuuu

SEQ ID NO: 4052929 - RNA, 23 nt, Vaccinia virus
uguuugucugagggguucgucua

SEQ ID NO: 4052930 - RNA, 23 nt, Vaccinia virus
uguuuucaauggccaucugaaau

SEQ ID NO: 4052931 - RNA, 14 nt, Vaccinia virus
uguuuucaucauuu

SEQ ID NO: 4052932 - RNA, 22 nt, Vaccinia virus
uguuuugaggcagcaaauacug

SEQ ID NO: 4052933 - RNA, 15 nt, Vaccinia virus
uguuuuuguuuucau

SEQ ID NO: 4052934 - RNA, 12 nt, Vaccinia virus
uuaaaaaaagau

SEQ ID NO: 4052935 - RNA, 19 nt, Vaccinia virus
uuaaaaaggaaaauacuau

SEQ ID NO: 4052936 - RNA, 14 nt, Vaccinia virus
uuaaaaaguuaucu

SEQ ID NO: 4052937 - RNA, 16 nt, Vaccinia virus
uuaaaaaguuaucuuu

SEQ ID NO: 4052938 - RNA, 14 nt, Vaccinia virus
uuaaaaauacgguu

SEQ ID NO: 4052939 - RNA, 13 nt, Vaccinia virus
uuaaaaauuuuca

SEQ ID NO: 4052940 - RNA, 19 nt, Vaccinia virus
uuaaaauacuaaauugaac

SEQ ID NO: 4052941 - RNA, 17 nt, Vaccinia virus
uuaaaauauuauuuaga

SEQ ID NO: 4052942 - RNA, 14 nt, Vaccinia virus
uuaaacauacuggu

SEQ ID NO: 4052943 - RNA, 20 nt, Vaccinia virus
uuaaacgaauaaaagauauu

SEQ ID NO: 4052944 - RNA, 18 nt, Vaccinia virus
uuaaacgauuuauaaaaa

SEQ ID NO: 4052945 - RNA, 23 nt, Vaccinia virus
uuaaacguaguuaugauaaauga

SEQ ID NO: 4052946 - RNA, 22 nt, Vaccinia virus
uuaaacuguaucgaucauucuu

SEQ ID NO: 4052947 - RNA, 22 nt, Vaccinia virus
uuaaacuguuuguauaauaucu

SEQ ID NO: 4052948 - RNA, 23 nt, Vaccinia virus
uuaaagagacuacaauauauucu

SEQ ID NO: 4052949 - RNA, 22 nt, Vaccinia virus
uuaaaggauaaaauauuaucca

SEQ ID NO: 4052950 - RNA, 19 nt, Vaccinia virus
uaugaacuuucaaggacuu

SEQ ID NO: 4052951 - RNA, 15 nt, Vaccinia virus
uaugaagaugauguu

SEQ ID NO: 4052952 - RNA, 16 nt, Vaccinia virus
uaugaaguacgauguu

SEQ ID NO: 4052953 - RNA, 20 nt, Vaccinia virus
uaugaccggcaaucaugaau

SEQ ID NO: 4052954 - RNA, 12 nt, Vaccinia virus
uaugacgucucu

SEQ ID NO: 4052955 - RNA, 13 nt, Vaccinia virus
uaugauaugugau

SEQ ID NO: 4052956 - RNA, 16 nt, Vaccinia virus
uaugaucauuuugaua

SEQ ID NO: 4052957 - RNA, 21 nt, Vaccinia virus
uaugauccacaaaacguauau

SEQ ID NO: 4052958 - RNA, 16 nt, Vaccinia virus
uaugaugccgguaaau

SEQ ID NO: 4052959 - RNA, 15 nt, Vaccinia virus
uaugauggauacaug

SEQ ID NO: 4052960 - RNA, 16 nt, Vaccinia virus
uaugauggguggauau

SEQ ID NO: 4052961 - RNA, 13 nt, Vaccinia virus
uaugauucuaaua

SEQ ID NO: 4052962 - RNA, 13 nt, Vaccinia virus
uaugauucuguaa

SEQ ID NO: 4052963 - RNA, 17 nt, Vaccinia virus
uaugcauccaaaguauu

SEQ ID NO: 4052964 - RNA, 18 nt, Vaccinia virus
uaugcgaguaugaugcaa

SEQ ID NO: 4052965 - RNA, 13 nt, Vaccinia virus
uaugcgauagcaa

SEQ ID NO: 4052966 - RNA, 14 nt, Vaccinia virus
uauggaaaaacuug

SEQ ID NO: 4052967 - RNA, 19 nt, Vaccinia virus
uauggacgcagauagcuau

SEQ ID NO: 4052968 - RNA, 18 nt, Vaccinia virus
uauggaucuauucaagau

SEQ ID NO: 4052969 - RNA, 15 nt, Vaccinia virus
uauggaugccacugc

SEQ ID NO: 4052970 - RNA, 22 nt, Vaccinia virus
uauggauuuggucauaauagaa

SEQ ID NO: 4052971 - RNA, 22 nt, Vaccinia virus
uaugguauugauaaaauuaaug

SEQ ID NO: 4052972 - RNA, 16 nt, Vaccinia virus
uauguaagacuugugg

SEQ ID NO: 4052973 - RNA, 15 nt, Vaccinia virus
uauguagagguguau

SEQ ID NO: 4052974 - RNA, 21 nt, Vaccinia virus
uauguauuguaccaaagauuu

SEQ ID NO: 4052975 - RNA, 16 nt, Vaccinia virus
uauguauuuaauauca

SEQ ID NO: 4052976 - RNA, 19 nt, Vaccinia virus
uaugucuuccguuggauau

SEQ ID NO: 4052977 - RNA, 19 nt, Vaccinia virus
uaugugaauaugguaugau

SEQ ID NO: 4052978 - RNA, 16 nt, Vaccinia virus
uauguguauuaucaga

SEQ ID NO: 4052979 - RNA, 22 nt, Vaccinia virus
uaugugugauauugauaucuuu

SEQ ID NO: 4052980 - RNA, 19 nt, Vaccinia virus
uauguguguagacaaucau

SEQ ID NO: 4052981 - RNA, 14 nt, Vaccinia virus
uauguugacaugua

SEQ ID NO: 4052982 - RNA, 16 nt, Vaccinia virus
uauguuucuaaauuuu

SEQ ID NO: 4052983 - RNA, 13 nt, Vaccinia virus
uauuaaaaaaugu

SEQ ID NO: 4052984 - RNA, 13 nt, Vaccinia virus
uauuaaauaucug

SEQ ID NO: 4052985 - RNA, 13 nt, Vaccinia virus
uauuaaauuuaga

SEQ ID NO: 4052986 - RNA, 23 nt, Vaccinia virus
uauuaacacuaaaaaauaaacac

SEQ ID NO: 4052987 - RNA, 22 nt, Vaccinia virus
uauuaacaguucguuugaugau

SEQ ID NO: 4052988 - RNA, 23 nt, Vaccinia virus
uauuaacgcaccuauaaagacuu

SEQ ID NO: 4052989 - RNA, 20 nt, Vaccinia virus
uauuaacuuuguucauuuau

SEQ ID NO: 4052990 - RNA, 13 nt, Vaccinia virus
uauuaauaaugau

SEQ ID NO: 4052991 - RNA, 19 nt, Vaccinia virus
uauuaaucaagucaauuau

SEQ ID NO: 4052992 - RNA, 23 nt, Vaccinia virus
uauuaauccuuucuucuugagau

SEQ ID NO: 4052993 - RNA, 13 nt, Vaccinia virus
uauuaaucuuuuu

SEQ ID NO: 4052994 - RNA, 18 nt, Vaccinia virus
uauuaaugaucacaugcu

SEQ ID NO: 4052995 - RNA, 13 nt, Vaccinia virus
uauuaauggauuu

SEQ ID NO: 4052996 - RNA, 14 nt, Vaccinia virus
uauuaauucuguaa

SEQ ID NO: 4052997 - RNA, 17 nt, Vaccinia virus
uauuaauuguaaaugau

SEQ ID NO: 4052998 - RNA, 22 nt, Vaccinia virus
uauuacaagacgucauucuaaa

SEQ ID NO: 4052999 - RNA, 19 nt, Vaccinia virus
uauuacaagaguacguuau

SEQ ID NO: 4053000 - RNA, 14 nt, Vaccinia virus
uauuacguuagcau

SEQ ID NO: 4053001 - RNA, 17 nt, Vaccinia virus
uauuauaaaaaaguuuu

SEQ ID NO: 4053002 - RNA, 14 nt, Vaccinia virus
uauuauaaacucac

SEQ ID NO: 4053003 - RNA, 19 nt, Vaccinia virus
uauuauaaacucucaacau

SEQ ID NO: 4053004 - RNA, 15 nt, Vaccinia virus
uauuaucaaauacug

SEQ ID NO: 4053005 - RNA, 10 nt, Vaccinia virus
uauuaucauc

SEQ ID NO: 4053006 - RNA, 17 nt, Vaccinia virus
uauuauccuugacuuga

SEQ ID NO: 4053007 - RNA, 13 nt, Vaccinia virus
uauuaucuauaaa

SEQ ID NO: 4053008 - RNA, 21 nt, Vaccinia virus
uauuauguuaacggaaaguau

SEQ ID NO: 4053009 - RNA, 15 nt, Vaccinia virus
uauuauuauacauga

SEQ ID NO: 4053010 - RNA, 18 nt, Vaccinia virus
uauuauugucauaaacau

SEQ ID NO: 4053011 - RNA, 15 nt, Vaccinia virus
uauuauuuaaacgaa

SEQ ID NO: 4053012 - RNA, 14 nt, Vaccinia virus
uauucaaaauauga

SEQ ID NO: 4053013 - RNA, 17 nt, Vaccinia virus
uauucaagucaaagaaa

SEQ ID NO: 4053014 - RNA, 16 nt, Vaccinia virus
uauucaucaucaauau

SEQ ID NO: 4053015 - RNA, 15 nt, Vaccinia virus
uauuccaauguuuaa

SEQ ID NO: 4053016 - RNA, 20 nt, Vaccinia virus
uauuccuaccaaacaaaauu

SEQ ID NO: 4053017 - RNA, 16 nt, Vaccinia virus
uauuccuguuaucauc

SEQ ID NO: 4053018 - RNA, 19 nt, Vaccinia virus
uauucggcauuucuaaaau

SEQ ID NO: 4053019 - RNA, 20 nt, Vaccinia virus
uauucgucgucgacuaucaa

SEQ ID NO: 4053020 - RNA, 23 nt, Vaccinia virus
uauucuaauacauaauucuucug

SEQ ID NO: 4053021 - RNA, 19 nt, Vaccinia virus
uauucuaccauagcaaauc

SEQ ID NO: 4053022 - RNA, 22 nt, Vaccinia virus
uauucuaucuccaguauuuaca

SEQ ID NO: 4053023 - RNA, 14 nt, Vaccinia virus
uauucuauuucgaa

SEQ ID NO: 4053024 - RNA, 18 nt, Vaccinia virus
uauucuguucuauucaaa

SEQ ID NO: 4053025 - RNA, 18 nt, Vaccinia virus
uauucuugcucaauagau

SEQ ID NO: 4053026 - RNA, 13 nt, Vaccinia virus
uauugaaacugag

SEQ ID NO: 4053027 - RNA, 12 nt, Vaccinia virus
uauugacaaaua

SEQ ID NO: 4053028 - RNA, 20 nt, Vaccinia virus
uauugauaaagaucuaaaaa

SEQ ID NO: 4053029 - RNA, 13 nt, Vaccinia virus
uauugauuuacua

SEQ ID NO: 4053030 - RNA, 20 nt, Vaccinia virus
uauugcgcaucgauaucuuu

SEQ ID NO: 4053031 - RNA, 18 nt, Vaccinia virus
uauuggaccgaauuacag

SEQ ID NO: 4053032 - RNA, 18 nt, Vaccinia virus
uauuguauccauacauac

SEQ ID NO: 4053033 - RNA, 21 nt, Vaccinia virus
uauuguuuaauauauuauaua

SEQ ID NO: 4053034 - RNA, 16 nt, Vaccinia virus
uauuguuuauuaucua

SEQ ID NO: 4053035 - RNA, 21 nt, Vaccinia virus
uauuguuuggguaaaacagau

SEQ ID NO: 4053036 - RNA, 16 nt, Vaccinia virus
uauuguuuugaagaaa

SEQ ID NO: 4053037 - RNA, 21 nt, Vaccinia virus
uauuuaacggcuauucaagau

SEQ ID NO: 4053038 - RNA, 15 nt, Vaccinia virus
uauuuaacucaugau

SEQ ID NO: 4053039 - RNA, 12 nt, Vaccinia virus
uauuuacaauua

SEQ ID NO: 4053040 - RNA, 18 nt, Vaccinia virus
uauuuaucaauucuucua

SEQ ID NO: 4053041 - RNA, 21 nt, Vaccinia virus
uauuuaucucuucauuauaua

SEQ ID NO: 4053042 - RNA, 13 nt, Vaccinia virus
uauuuccauaaua

SEQ ID NO: 4053043 - RNA, 14 nt, Vaccinia virus
uauuucguacauuu

SEQ ID NO: 4053044 - RNA, 18 nt, Vaccinia virus
uauuucuauauuugacuc

SEQ ID NO: 4053045 - RNA, 12 nt, Vaccinia virus
uauuucuuacau

SEQ ID NO: 4053046 - RNA, 16 nt, Vaccinia virus
uauuugacgcaucuua

SEQ ID NO: 4053047 - RNA, 23 nt, Vaccinia virus
uauuugcacacauaauccauucu

SEQ ID NO: 4053048 - RNA, 23 nt, Vaccinia virus
uauuugcgaggaugacucucaaa

SEQ ID NO: 4053049 - RNA, 19 nt, Vaccinia virus
uauuuucaguuuuauuaua

SEQ ID NO: 4053050 - RNA, 20 nt, Vaccinia virus
uauuuucuggaaguggauau

SEQ ID NO: 4053051 - RNA, 15 nt, Vaccinia virus
uauuuuguuauuaua

SEQ ID NO: 4053052 - RNA, 23 nt, Vaccinia virus
uauuuuuaauagcugcucuuugu

SEQ ID NO: 4053053 - RNA, 21 nt, Vaccinia virus
uauuuuuucuggcauuaucua

SEQ ID NO: 4053054 - RNA, 13 nt, Vaccinia virus
uauuuuuuucaua

SEQ ID NO: 4053055 - RNA, 18 nt, Vaccinia virus
ucaaaaaaagauuauucg

SEQ ID NO: 4053056 - RNA, 21 nt, Vaccinia virus
ucaaaaaacaauuuauucaga

SEQ ID NO: 4053057 - RNA, 17 nt, Vaccinia virus
ucaaaaaauaaauuaga

SEQ ID NO: 4053058 - RNA, 23 nt, Vaccinia virus
ucaaaaagauuagacauaucaga

SEQ ID NO: 4053059 - RNA, 18 nt, Vaccinia virus
ucaaaaauauucauuaau

SEQ ID NO: 4053060 - RNA, 13 nt, Vaccinia virus
ucaaaaauuuaga

SEQ ID NO: 4053061 - RNA, 13 nt, Vaccinia virus
ucaaaagaaaucu

SEQ ID NO: 4053062 - RNA, 14 nt, Vaccinia virus
ucaaaauauguaga

SEQ ID NO: 4053063 - RNA, 16 nt, Vaccinia virus
ucaaaauauguagaaa

SEQ ID NO: 4053064 - RNA, 23 nt, Vaccinia virus
ucaaacgaauaaacaauuucaca

SEQ ID NO: 4053065 - RNA, 19 nt, Vaccinia virus
ucaaacggcgcagacguau

SEQ ID NO: 4053066 - RNA, 22 nt, Vaccinia virus
ucaaacucuaaugaccacaucu

SEQ ID NO: 4053067 - RNA, 15 nt, Vaccinia virus
ucaaauaacaaacaa

SEQ ID NO: 4053068 - RNA, 16 nt, Vaccinia virus
ucaaauaggagauauu

SEQ ID NO: 4053069 - RNA, 12 nt, Vaccinia virus
ucaaauaugaaa

SEQ ID NO: 4053070 - RNA, 19 nt, Vaccinia virus
ucaaauggauaauuuaaga

SEQ ID NO: 4053071 - RNA, 20 nt, Vaccinia virus
ucaaauucucguucauguau

SEQ ID NO: 4053072 - RNA, 18 nt, Vaccinia virus
ucaacaauaugcaaauag

SEQ ID NO: 4053073 - RNA, 20 nt, Vaccinia virus
ucaacagaaucaguauauau

SEQ ID NO: 4053074 - RNA, 16 nt, Vaccinia virus
ucaacauaaauaauuc

SEQ ID NO: 4053075 - RNA, 23 nt, Vaccinia virus
ucaacgaugaaaacuuuaaauac

SEQ ID NO: 4053076 - RNA, 18 nt, Vaccinia virus
ucaacgauucuagaauau

SEQ ID NO: 4053077 - RNA, 18 nt, Vaccinia virus
aaugucgaauaacuguaa

SEQ ID NO: 4053078 - RNA, 22 nt, Vaccinia virus
aaugucuauaguucucaucuuu

SEQ ID NO: 4053079 - RNA, 14 nt, Vaccinia virus
aauguuaaaacuac

SEQ ID NO: 4053080 - RNA, 14 nt, Vaccinia virus
aauguuaauuuaua

SEQ ID NO: 4053081 - RNA, 16 nt, Vaccinia virus
aauguuaauuuugaaa

SEQ ID NO: 4053082 - RNA, 12 nt, Vaccinia virus
aauguuaccaua

SEQ ID NO: 4053083 - RNA, 19 nt, Vaccinia virus
aauguuagagacggaaaua

SEQ ID NO: 4053084 - RNA, 16 nt, Vaccinia virus
aauguuagugaugaau

SEQ ID NO: 4053085 - RNA, 19 nt, Vaccinia virus
aauguuagugaugaauauc

SEQ ID NO: 4053086 - RNA, 23 nt, Vaccinia virus
aauguuauaguuuucuaaaaugu

SEQ ID NO: 4053087 - RNA, 12 nt, Vaccinia virus
aauguucauaau

SEQ ID NO: 4053088 - RNA, 22 nt, Vaccinia virus
aauguucaugacauccauuaca

SEQ ID NO: 4053089 - RNA, 17 nt, Vaccinia virus
aauguuguuaaaugauc

SEQ ID NO: 4053090 - RNA, 21 nt, Vaccinia virus
aauuaaaaccaaguacuacaa

SEQ ID NO: 4053091 - RNA, 22 nt, Vaccinia virus
aauuaaaauaacaccauuuagu

SEQ ID NO: 4053092 - RNA, 16 nt, Vaccinia virus
aauuaaauaguuuauu

SEQ ID NO: 4053093 - RNA, 16 nt, Vaccinia virus
aauuaaucaaauggua

SEQ ID NO: 4053094 - RNA, 17 nt, Vaccinia virus
aauuaaucauauacaac

SEQ ID NO: 4053095 - RNA, 13 nt, Vaccinia virus
aauuaauucuuua

SEQ ID NO: 4053096 - RNA, 20 nt, Vaccinia virus
aauuaauucuuuauugucau

SEQ ID NO: 4053097 - RNA, 15 nt, Vaccinia virus
aauuaauuugauaau

SEQ ID NO: 4053098 - RNA, 19 nt, Vaccinia virus
aauuacgcucuacaaaaug

SEQ ID NO: 4053099 - RNA, 15 nt, Vaccinia virus
aauuacuaaaauaua

SEQ ID NO: 4053100 - RNA, 19 nt, Vaccinia virus
aauuacuaaaauauacaaa

SEQ ID NO: 4053101 - RNA, 19 nt, Vaccinia virus
aauuacuuugacaaaugua

SEQ ID NO: 4053102 - RNA, 16 nt, Vaccinia virus
aauuagaauuacaaaa

SEQ ID NO: 4053103 - RNA, 13 nt, Vaccinia virus
aauuagagaauua

SEQ ID NO: 4053104 - RNA, 19 nt, Vaccinia virus
aauuagucauacguaauga

SEQ ID NO: 4053105 - RNA, 18 nt, Vaccinia virus
aauuaguucguuggaaaa

SEQ ID NO: 4053106 - RNA, 12 nt, Vaccinia virus
aauuaguuuauu

SEQ ID NO: 4053107 - RNA, 22 nt, Vaccinia virus
aauuaguuuuucuuuacacaau

SEQ ID NO: 4053108 - RNA, 21 nt, Vaccinia virus
aauuauaauauaaaaauacuu

SEQ ID NO: 4053109 - RNA, 14 nt, Vaccinia virus
aauuauaauguuuc

SEQ ID NO: 4053110 - RNA, 17 nt, Vaccinia virus
aauuauagaacgaagua

SEQ ID NO: 4053111 - RNA, 23 nt, Vaccinia virus
aauuaucgacauagguauagaau

SEQ ID NO: 4053112 - RNA, 16 nt, Vaccinia virus
aauuaugcaaucaaug

SEQ ID NO: 4053113 - RNA, 21 nt, Vaccinia virus
aauuauuaauuuuagugaaau

SEQ ID NO: 4053114 - RNA, 14 nt, Vaccinia virus
aauuauuauccaau

SEQ ID NO: 4053115 - RNA, 17 nt, Vaccinia virus
aauuauuauuacugaau

SEQ ID NO: 4053116 - RNA, 17 nt, Vaccinia virus
aauuauucguuuacuga

SEQ ID NO: 4053117 - RNA, 20 nt, Vaccinia virus
aauucacuguauaaaaagaa

SEQ ID NO: 4053118 - RNA, 18 nt, Vaccinia virus
aauucauagccaauggau

SEQ ID NO: 4053119 - RNA, 21 nt, Vaccinia virus
aauucauccguccuucagaca

SEQ ID NO: 4053120 - RNA, 19 nt, Vaccinia virus
aauuccagauguuguaaaa

SEQ ID NO: 4053121 - RNA, 14 nt, Vaccinia virus
aauucguuagcaaa

SEQ ID NO: 4053122 - RNA, 14 nt, Vaccinia virus
aauucuaaaugaug

SEQ ID NO: 4053123 - RNA, 23 nt, Vaccinia virus
aauucucuuacgccgauauuucu

SEQ ID NO: 4053124 - RNA, 15 nt, Vaccinia virus
aauucuuaucaauaa

SEQ ID NO: 4053125 - RNA, 15 nt, Vaccinia virus
aauucuuaugauaua

SEQ ID NO: 4053126 - RNA, 19 nt, Vaccinia virus
aauucuuggauauaugaua

SEQ ID NO: 4053127 - RNA, 17 nt, Vaccinia virus
aauucuuuauaacugaa

SEQ ID NO: 4053128 - RNA, 19 nt, Vaccinia virus
uaacgaguuccauuuauau

SEQ ID NO: 4053129 - RNA, 19 nt, Vaccinia virus
uaacgauaacgucauuaau

SEQ ID NO: 4053130 - RNA, 21 nt, Vaccinia virus
uaacgauuuccaugucuacau

SEQ ID NO: 4053131 - RNA, 20 nt, Vaccinia virus
uaacgguuauaaaauuuaua

SEQ ID NO: 4053132 - RNA, 14 nt, Vaccinia virus
uaacguaucgcauu

SEQ ID NO: 4053133 - RNA, 20 nt, Vaccinia virus
uaacguccaucauuacagaa

SEQ ID NO: 4053134 - RNA, 13 nt, Vaccinia virus
uaacuaucuguaa

SEQ ID NO: 4053135 - RNA, 22 nt, Vaccinia virus
uaacuaucuguaaaagcauaug

SEQ ID NO: 4053136 - RNA, 18 nt, Vaccinia virus
uaacuccagaacaucuuc

SEQ ID NO: 4053137 - RNA, 14 nt, Vaccinia virus
uaacucuguuuuau

SEQ ID NO: 4053138 - RNA, 19 nt, Vaccinia virus
uaacucuuucgaauacuua

SEQ ID NO: 4053139 - RNA, 16 nt, Vaccinia virus
uaacugcuguguguau

SEQ ID NO: 4053140 - RNA, 17 nt, Vaccinia virus
uaacuggaucuuuauuu

SEQ ID NO: 4053141 - RNA, 18 nt, Vaccinia virus
uaacuggcggauuauuca

SEQ ID NO: 4053142 - RNA, 15 nt, Vaccinia virus
uaacuguuaucucuu

SEQ ID NO: 4053143 - RNA, 16 nt, Vaccinia virus
uaacuuacaaaaugua

SEQ ID NO: 4053144 - RNA, 19 nt, Vaccinia virus
uaacuugaugucaggaacu

SEQ ID NO: 4053145 - RNA, 16 nt, Vaccinia virus
uaagaaaaauagagag

SEQ ID NO: 4053146 - RNA, 16 nt, Vaccinia virus
uaagaaaguuaagaau

SEQ ID NO: 4053147 - RNA, 20 nt, Vaccinia virus
uaagaaugacuccuauguuu

SEQ ID NO: 4053148 - RNA, 17 nt, Vaccinia virus
uaagaccgaaauuauca

SEQ ID NO: 4053149 - RNA, 23 nt, Vaccinia virus
uaagacuaaugcuugaaaaugga

SEQ ID NO: 4053150 - RNA, 13 nt, Vaccinia virus
uaagacugucaau

SEQ ID NO: 4053151 - RNA, 19 nt, Vaccinia virus
uaagacuuauucucuacau

SEQ ID NO: 4053152 - RNA, 15 nt, Vaccinia virus
uaagaggaugaucug

SEQ ID NO: 4053153 - RNA, 16 nt, Vaccinia virus
uaagaugcaaacauua

SEQ ID NO: 4053154 - RNA, 20 nt, Vaccinia virus
uaagaugcaaacauuaugua

SEQ ID NO: 4053155 - RNA, 14 nt, Vaccinia virus
uaagcaagaaagau

SEQ ID NO: 4053156 - RNA, 20 nt, Vaccinia virus
uaagcaaguacauggaugau

SEQ ID NO: 4053157 - RNA, 19 nt, Vaccinia virus
uaagcgcuauacaaaucau

SEQ ID NO: 4053158 - RNA, 18 nt, Vaccinia virus
uaagcuuuuuaaaaucau

SEQ ID NO: 4053159 - RNA, 14 nt, Vaccinia virus
uaaggaguugaaau

SEQ ID NO: 4053160 - RNA, 18 nt, Vaccinia virus
uaagguagaaucucuauu

SEQ ID NO: 4053161 - RNA, 18 nt, Vaccinia virus
uaaguacaucaucuggaa

SEQ ID NO: 4053162 - RNA, 20 nt, Vaccinia virus
uaagucuuacaauguucgaa

SEQ ID NO: 4053163 - RNA, 16 nt, Vaccinia virus
uaauaaaauguuacaa

SEQ ID NO: 4053164 - RNA, 22 nt, Vaccinia virus
uaauaaccuacgcguauuauca

SEQ ID NO: 4053165 - RNA, 15 nt, Vaccinia virus
uaauaacuugaaaga

SEQ ID NO: 4053166 - RNA, 17 nt, Vaccinia virus
uaauaagugguauucca

SEQ ID NO: 4053167 - RNA, 20 nt, Vaccinia virus
uaauaauuuaguucauggaa

SEQ ID NO: 4053168 - RNA, 17 nt, Vaccinia virus
uaauacacacaaaguau

SEQ ID NO: 4053169 - RNA, 16 nt, Vaccinia virus
uaauacauauuauuca

SEQ ID NO: 4053170 - RNA, 14 nt, Vaccinia virus
uaauacauuuugaa

SEQ ID NO: 4053171 - RNA, 16 nt, Vaccinia virus
uaauacauuuugaacu

SEQ ID NO: 4053172 - RNA, 22 nt, Vaccinia virus
uaauacuuauucauauuuuagu

SEQ ID NO: 4053173 - RNA, 13 nt, Vaccinia virus
uaauagaacucuu

SEQ ID NO: 4053174 - RNA, 16 nt, Vaccinia virus
uaauagaaugaagaau

SEQ ID NO: 4053175 - RNA, 19 nt, Vaccinia virus
uaauagcguuaacuaucaa

SEQ ID NO: 4053176 - RNA, 17 nt, Vaccinia virus
uaauagcuccauaaacu

SEQ ID NO: 4053177 - RNA, 22 nt, Vaccinia virus
uaauagguuugaucguugucau

SEQ ID NO: 4053178 - RNA, 17 nt, Vaccinia virus
uaauaguuuaucauacu

SEQ ID NO: 4053179 - RNA, 13 nt, Vaccinia virus
uaauauaauauua

SEQ ID NO: 4053180 - RNA, 13 nt, Vaccinia virus
uaauauagaagau

SEQ ID NO: 4053181 - RNA, 22 nt, Vaccinia virus
uaauaucagaggaguuauuuac

SEQ ID NO: 4053182 - RNA, 15 nt, Vaccinia virus
uaauauccaaucuua

SEQ ID NO: 4053183 - RNA, 21 nt, Vaccinia virus
uaauauccucaauaacguuau

SEQ ID NO: 4053184 - RNA, 14 nt, Vaccinia virus
uaauaucuaacaaa

SEQ ID NO: 4053185 - RNA, 16 nt, Vaccinia virus
uaauaugacucaugau

SEQ ID NO: 4053186 - RNA, 13 nt, Vaccinia virus
uaauaugaguaau

SEQ ID NO: 4053187 - RNA, 19 nt, Vaccinia virus
uaauauuaaaaauaagaau

SEQ ID NO: 4053188 - RNA, 19 nt, Vaccinia virus
uaauauucguauuuugcau

SEQ ID NO: 4053189 - RNA, 22 nt, Vaccinia virus
uaauauuggcagcguuguuuau

SEQ ID NO: 4053190 - RNA, 13 nt, Vaccinia virus
uaauauuguugau

SEQ ID NO: 4053191 - RNA, 13 nt, Vaccinia virus
uaauauuuugcau

SEQ ID NO: 4053192 - RNA, 23 nt, Vaccinia virus
uaaucaaaauugucuaugauguc

SEQ ID NO: 4053193 - RNA, 18 nt, Vaccinia virus
uaaucagaaaacuuauaa

SEQ ID NO: 4053194 - RNA, 16 nt, Vaccinia virus
uaaucauauaaaucau

SEQ ID NO: 4053195 - RNA, 18 nt, Vaccinia virus
uaauccacuauauauucu

SEQ ID NO: 4053196 - RNA, 21 nt, Vaccinia virus
uaauccagaauguacacuauu

SEQ ID NO: 4053197 - RNA, 16 nt, Vaccinia virus
uaauccagucuuuaau

SEQ ID NO: 4053198 - RNA, 17 nt, Vaccinia virus
uaauccaucaacaaugu

SEQ ID NO: 4053199 - RNA, 22 nt, Vaccinia virus
uaaucccgcauuuauacauauu

SEQ ID NO: 4053200 - RNA, 14 nt, Vaccinia virus
uaauccuagaugau

SEQ ID NO: 4053201 - RNA, 22 nt, Vaccinia virus
uaauccuauucuugaucucauc

SEQ ID NO: 4053202 - RNA, 15 nt, Vaccinia virus
uaauccuguguuuau

SEQ ID NO: 4053203 - RNA, 19 nt, Vaccinia virus
uaaucggagaauguuuccc

SEQ ID NO: 4053204 - RNA, 20 nt, Vaccinia virus
uaaucguaagcgcuauacaa

SEQ ID NO: 4053205 - RNA, 20 nt, Vaccinia virus
uaaucguguauaacaucuuu

SEQ ID NO: 4053206 - RNA, 17 nt, Vaccinia virus
uaaucguuauuaucauc

SEQ ID NO: 4053207 - RNA, 21 nt, Vaccinia virus
uaaucuaaaauaguucuguaa

SEQ ID NO: 4053208 - RNA, 19 nt, Vaccinia virus
uaaucuauaggcaacgaug

SEQ ID NO: 4053209 - RNA, 15 nt, Vaccinia virus
uaaucuuuaauguaa

SEQ ID NO: 4053210 - RNA, 12 nt, Vaccinia virus
uaaucuuuucug

SEQ ID NO: 4053211 - RNA, 13 nt, Vaccinia virus
uaaugaacucauu

SEQ ID NO: 4053212 - RNA, 15 nt, Vaccinia virus
uaaugauagaauuau

SEQ ID NO: 4053213 - RNA, 21 nt, Vaccinia virus
uaaugauugcccauagaguau

SEQ ID NO: 4053214 - RNA, 22 nt, Vaccinia virus
uaaugcaggguguauauuauua

SEQ ID NO: 4053215 - RNA, 17 nt, Vaccinia virus
uaaugcuuaaacuauca

SEQ ID NO: 4053216 - RNA, 19 nt, Vaccinia virus
uaauuacaaguauuauuga

SEQ ID NO: 4053217 - RNA, 14 nt, Vaccinia virus
uaauuacuaaaucu

SEQ ID NO: 4053218 - RNA, 23 nt, Vaccinia virus
uaauuagagacuuuauaacagau

SEQ ID NO: 4053219 - RNA, 14 nt, Vaccinia virus
uaauuaucuaaaua

SEQ ID NO: 4053220 - RNA, 13 nt, Vaccinia virus
uaauuauuuccag

SEQ ID NO: 4053221 - RNA, 17 nt, Vaccinia virus
uaauuccuuuuuaaauu

SEQ ID NO: 4053222 - RNA, 22 nt, Vaccinia virus
uaauucuuaucaauaacauauu

SEQ ID NO: 4053223 - RNA, 17 nt, Vaccinia virus
uaauucuucuacugcau

SEQ ID NO: 4053224 - RNA, 16 nt, Vaccinia virus
uaauugaacaaaguau

SEQ ID NO: 4053225 - RNA, 15 nt, Vaccinia virus
uaauugaguaaauga

SEQ ID NO: 4053226 - RNA, 14 nt, Vaccinia virus
uaauugcuuuucua

SEQ ID NO: 4053227 - RNA, 16 nt, Vaccinia virus
uaauugggugaagaau

SEQ ID NO: 4053228 - RNA, 21 nt, Vaccinia virus
uaauuuacaaaaauuuaaaau

SEQ ID NO: 4053229 - RNA, 12 nt, Vaccinia virus
uaauuuacuacu

SEQ ID NO: 4053230 - RNA, 16 nt, Vaccinia virus
uaauuuauaauauacu

SEQ ID NO: 4053231 - RNA, 21 nt, Vaccinia virus
uacaaaaauauuuuuauucuc

SEQ ID NO: 4053232 - RNA, 13 nt, Vaccinia virus
uacaaaagcaauu

SEQ ID NO: 4053233 - RNA, 18 nt, Vaccinia virus
uacaaaauaauagauaua

SEQ ID NO: 4053234 - RNA, 17 nt, Vaccinia virus
uacaaaauguugauaau

SEQ ID NO: 4053235 - RNA, 22 nt, Vaccinia virus
uacaaacgauuauuagaucuuu

SEQ ID NO: 4053236 - RNA, 21 nt, Vaccinia virus
uacaaacuauagaaauuauuu

SEQ ID NO: 4053237 - RNA, 17 nt, Vaccinia virus
uacaaauauguacauua

SEQ ID NO: 4053238 - RNA, 15 nt, Vaccinia virus
uacaaauauucacaa

SEQ ID NO: 4053239 - RNA, 23 nt, Vaccinia virus
uacaaaugacacugauaaaguag

SEQ ID NO: 4053240 - RNA, 17 nt, Vaccinia virus
uacaaauuuuaagaaau

SEQ ID NO: 4053241 - RNA, 18 nt, Vaccinia virus
uacaacagugauaugugu

SEQ ID NO: 4053242 - RNA, 20 nt, Vaccinia virus
uacaacagugauauguguaa

SEQ ID NO: 4053243 - RNA, 18 nt, Vaccinia virus
uacaacuggucauagaaa

SEQ ID NO: 4053244 - RNA, 18 nt, Vaccinia virus
uacaauauauucucauag

SEQ ID NO: 4053245 - RNA, 21 nt, Vaccinia virus
uacaaucaaaccuauaacauu

SEQ ID NO: 4053246 - RNA, 20 nt, Vaccinia virus
uacaaucguucgaacucguc

SEQ ID NO: 4053247 - RNA, 17 nt, Vaccinia virus
uacaauuaucauuuuga

SEQ ID NO: 4053248 - RNA, 24 nt, Vaccinia virus
uacaauugguuaugauaucaugua

SEQ ID NO: 4053249 - RNA, 14 nt, Vaccinia virus
uacaccggaucuau

SEQ ID NO: 4053250 - RNA, 16 nt, Vaccinia virus
uacacgugcuucggau

SEQ ID NO: 4053251 - RNA, 15 nt, Vaccinia virus
uacacucuauuucaa

SEQ ID NO: 4053252 - RNA, 16 nt, Vaccinia virus
uacagaaacaaugauu

SEQ ID NO: 4053253 - RNA, 14 nt, Vaccinia virus
uacagauacagaua

SEQ ID NO: 4053254 - RNA, 13 nt, Vaccinia virus
gauguguauacau

SEQ ID NO: 4053255 - RNA, 16 nt, Vaccinia virus
gauguguuuagaaaau

SEQ ID NO: 4053256 - RNA, 16 nt, Vaccinia virus
gauguuaaacaaauaa

SEQ ID NO: 4053257 - RNA, 20 nt, Vaccinia virus
gauguugauuaggucuuuua

SEQ ID NO: 4053258 - RNA, 19 nt, Vaccinia virus
gauguuuaaugauacgaua

SEQ ID NO: 4053259 - RNA, 21 nt, Vaccinia virus
gauuaaaaauaaaguuaucau

SEQ ID NO: 4053260 - RNA, 21 nt, Vaccinia virus
gauuaauaguuuuauuugaag

SEQ ID NO: 4053261 - RNA, 15 nt, Vaccinia virus
gauuacaagaaauau

SEQ ID NO: 4053262 - RNA, 22 nt, Vaccinia virus
gauuaccucuaguuucagaauu

SEQ ID NO: 4053263 - RNA, 22 nt, Vaccinia virus
gauuaguauauuccuuauucac

SEQ ID NO: 4053264 - RNA, 20 nt, Vaccinia virus
gauuauaaaguggaagagua

SEQ ID NO: 4053265 - RNA, 20 nt, Vaccinia virus
gauuauaauccuuauacauc

SEQ ID NO: 4053266 - RNA, 14 nt, Vaccinia virus
gauuauaugauaua

SEQ ID NO: 4053267 - RNA, 15 nt, Vaccinia virus
gauuaucguuuucau

SEQ ID NO: 4053268 - RNA, 15 nt, Vaccinia virus
gauuauuuuuauuau

SEQ ID NO: 4053269 - RNA, 20 nt, Vaccinia virus
gauucaacaaugucgagaua

SEQ ID NO: 4053270 - RNA, 23 nt, Vaccinia virus
gauucaggaaucguuuauucgau

SEQ ID NO: 4053271 - RNA, 14 nt, Vaccinia virus
gauucaucaacauu

SEQ ID NO: 4053272 - RNA, 20 nt, Vaccinia virus
gauucauuuuauuuguuaaa

SEQ ID NO: 4053273 - RNA, 19 nt, Vaccinia virus
gauuccacggaagaacuac

SEQ ID NO: 4053274 - RNA, 18 nt, Vaccinia virus
gauuccagccacuuggga

SEQ ID NO: 4053275 - RNA, 21 nt, Vaccinia virus
gauucgcaaacuauucuaaua

SEQ ID NO: 4053276 - RNA, 23 nt, Vaccinia virus
gauucguccuuaaccaacugauu

SEQ ID NO: 4053277 - RNA, 16 nt, Vaccinia virus
gauucuaggaacaguu

SEQ ID NO: 4053278 - RNA, 13 nt, Vaccinia virus
gauucuaucuuua

SEQ ID NO: 4053279 - RNA, 18 nt, Vaccinia virus
gauucucuacucuagaua

SEQ ID NO: 4053280 - RNA, 19 nt, Vaccinia virus
gauucugauaacauaaaaa

SEQ ID NO: 4053281 - RNA, 22 nt, Vaccinia virus
gauucugauaacauaaaaauau

SEQ ID NO: 4053282 - RNA, 21 nt, Vaccinia virus
gauugaaauuauauucuuuuu

SEQ ID NO: 4053283 - RNA, 20 nt, Vaccinia virus
gauugaggaagcacauaugu

SEQ ID NO: 4053284 - RNA, 21 nt, Vaccinia virus
gauuguauauuuuauuuuaua

SEQ ID NO: 4053285 - RNA, 19 nt, Vaccinia virus
gauugugcaucuacugaua

SEQ ID NO: 4053286 - RNA, 16 nt, Vaccinia virus
gauuguugccguaaau

SEQ ID NO: 4053287 - RNA, 21 nt, Vaccinia virus
gauuuauuugauaaucauguu

SEQ ID NO: 4053288 - RNA, 22 nt, Vaccinia virus
gauuucauuaucgguguauuuu

SEQ ID NO: 4053289 - RNA, 13 nt, Vaccinia virus
gauuuugauuuug

SEQ ID NO: 4053290 - RNA, 22 nt, Vaccinia virus
gauuuuuuuaucccauguuuca

SEQ ID NO: 4053291 - RNA, 19 nt, Vaccinia virus
gcaaaaauauauuagacaa

SEQ ID NO: 4053292 - RNA, 14 nt, Vaccinia virus
gcaaaaauauucua

SEQ ID NO: 4053293 - RNA, 12 nt, Vaccinia virus
gcaaaauaauua

SEQ ID NO: 4053294 - RNA, 16 nt, Vaccinia virus
gcaaaauaguaaugau

SEQ ID NO: 4053295 - RNA, 16 nt, Vaccinia virus
gcaaacuuaacagcuc

SEQ ID NO: 4053296 - RNA, 18 nt, Vaccinia virus
gcaaagauguuuaaugau

SEQ ID NO: 4053297 - RNA, 19 nt, Vaccinia virus
gcaaaucacucaauaucua

SEQ ID NO: 4053298 - RNA, 16 nt, Vaccinia virus
guuuaacaaaguuauu

SEQ ID NO: 4053299 - RNA, 17 nt, Vaccinia virus
guuuaauaauaauucau

SEQ ID NO: 4053300 - RNA, 14 nt, Vaccinia virus
guuuaauauugcac

SEQ ID NO: 4053301 - RNA, 14 nt, Vaccinia virus
guuuaauucuucau

SEQ ID NO: 4053302 - RNA, 17 nt, Vaccinia virus
guuuacaacacuuuucu

SEQ ID NO: 4053303 - RNA, 19 nt, Vaccinia virus
guuuaccacaauguauaau

SEQ ID NO: 4053304 - RNA, 15 nt, Vaccinia virus
guuuaucaauaacua

SEQ ID NO: 4053305 - RNA, 17 nt, Vaccinia virus
guuuauguacuaugcca

SEQ ID NO: 4053306 - RNA, 19 nt, Vaccinia virus
guuuauuuagauacagaug

SEQ ID NO: 4053307 - RNA, 17 nt, Vaccinia virus
guuucaaaaauauucau

SEQ ID NO: 4053308 - RNA, 21 nt, Vaccinia virus
guuucauggaacaauaaaaga

SEQ ID NO: 4053309 - RNA, 17 nt, Vaccinia virus
guuucgauauaaucauc

SEQ ID NO: 4053310 - RNA, 14 nt, Vaccinia virus
guuucuacuaacuu

SEQ ID NO: 4053311 - RNA, 18 nt, Vaccinia virus
guuucuggauuauuuuua

SEQ ID NO: 4053312 - RNA, 21 nt, Vaccinia virus
guuuggagacuaauucuuucu

SEQ ID NO: 4053313 - RNA, 15 nt, Vaccinia virus
guuuuauaacgaagu

SEQ ID NO: 4053314 - RNA, 14 nt, Vaccinia virus
guuuucaucuuuua

SEQ ID NO: 4053315 - RNA, 14 nt, Vaccinia virus
guuuucucuauucu

SEQ ID NO: 4053316 - RNA, 17 nt, Vaccinia virus
uaaaaaaaaugacuugu

SEQ ID NO: 4053317 - RNA, 14 nt, Vaccinia virus
uaaaaaaauuauuu

SEQ ID NO: 4053318 - RNA, 17 nt, Vaccinia virus
uaaaaaguuuuaacaug

SEQ ID NO: 4053319 - RNA, 15 nt, Vaccinia virus
uaaaaauaaacauug

SEQ ID NO: 4053320 - RNA, 17 nt, Vaccinia virus
uaaaaauaguauuauca

SEQ ID NO: 4053321 - RNA, 15 nt, Vaccinia virus
uaaaaauucacacau

SEQ ID NO: 4053322 - RNA, 14 nt, Vaccinia virus
uaaaacaaacuugu

SEQ ID NO: 4053323 - RNA, 14 nt, Vaccinia virus
uaaaacagauuucu

SEQ ID NO: 4053324 - RNA, 16 nt, Vaccinia virus
uaaaacauuaaauguc

SEQ ID NO: 4053325 - RNA, 16 nt, Vaccinia virus
uaaaaccaacuaauau

SEQ ID NO: 4053326 - RNA, 15 nt, Vaccinia virus
uaaaacgauaaaaga

SEQ ID NO: 4053327 - RNA, 20 nt, Vaccinia virus
uaaaacugaaccuacuuuau

SEQ ID NO: 4053328 - RNA, 19 nt, Vaccinia virus
uaaaacugcauauuauaca

SEQ ID NO: 4053329 - RNA, 21 nt, Vaccinia virus
uaaaacuuccucauuaagauu

SEQ ID NO: 4053330 - RNA, 17 nt, Vaccinia virus
uaaaacuuuauuaucca

SEQ ID NO: 4053331 - RNA, 19 nt, Vaccinia virus
uaaaagacaaauauaugug

SEQ ID NO: 4053332 - RNA, 14 nt, Vaccinia virus
uaaaagauggauau

SEQ ID NO: 4053333 - RNA, 17 nt, Vaccinia virus
uaaaaguaucaaaucuu

SEQ ID NO: 4053334 - RNA, 14 nt, Vaccinia virus
uaaaaguuaaugag

SEQ ID NO: 4053335 - RNA, 14 nt, Vaccinia virus
uaaaauaaucucuu

SEQ ID NO: 4053336 - RNA, 23 nt, Vaccinia virus
uaaaauacuuuccgaauaagucu

SEQ ID NO: 4053337 - RNA, 17 nt, Vaccinia virus
uaaaaucagcagacuuu

SEQ ID NO: 4053338 - RNA, 21 nt, Vaccinia virus
uaaaaucagcagacuuuugaa

SEQ ID NO: 4053339 - RNA, 18 nt, Vaccinia virus
uaaaauuaaauaguagua

SEQ ID NO: 4053340 - RNA, 14 nt, Vaccinia virus
uaaaauuguagcau

SEQ ID NO: 4053341 - RNA, 18 nt, Vaccinia virus
uaaacaauuucacaaaug

SEQ ID NO: 4053342 - RNA, 22 nt, Vaccinia virus
uaaacaguuuccacuuugguaa

SEQ ID NO: 4053343 - RNA, 16 nt, Vaccinia virus
uaaacaugaauuuauu

SEQ ID NO: 4053344 - RNA, 13 nt, Vaccinia virus
uaaacauuccaca

SEQ ID NO: 4053345 - RNA, 17 nt, Vaccinia virus
uaaacauugauuaaauu

SEQ ID NO: 4053346 - RNA, 19 nt, Vaccinia virus
uaaaccauguugugaaaga

SEQ ID NO: 4053347 - RNA, 22 nt, Vaccinia virus
uaaacguuguuuacucauauag

SEQ ID NO: 4053348 - RNA, 16 nt, Vaccinia virus
uaaacucagauaauag

SEQ ID NO: 4053349 - RNA, 20 nt, Vaccinia virus
uaaacugcgccaaauugugg

SEQ ID NO: 4053350 - RNA, 23 nt, Vaccinia virus
uaaacuguuuguauaauaucucu

SEQ ID NO: 4053351 - RNA, 14 nt, Vaccinia virus
uaaacuuuaacaau

SEQ ID NO: 4053352 - RNA, 14 nt, Vaccinia virus
uaaagaagacgcua

SEQ ID NO: 4053353 - RNA, 19 nt, Vaccinia virus
uaaagauacaaauaugucu

SEQ ID NO: 4053354 - RNA, 15 nt, Vaccinia virus
uaaagauauaaauga

SEQ ID NO: 4053355 - RNA, 12 nt, Vaccinia virus
uaaagauauucu

SEQ ID NO: 4053356 - RNA, 15 nt, Vaccinia virus
uaaagccguaauuga

SEQ ID NO: 4053357 - RNA, 16 nt, Vaccinia virus
uaaaggaugaguacau

SEQ ID NO: 4053358 - RNA, 14 nt, Vaccinia virus
uaaaguauuuggaa

SEQ ID NO: 4053359 - RNA, 15 nt, Vaccinia virus
uaaauaauuauuuca

SEQ ID NO: 4053360 - RNA, 16 nt, Vaccinia virus
uaaauagagaagguau

SEQ ID NO: 4053361 - RNA, 20 nt, Vaccinia virus
uaaauaucauaaucuaaaau

SEQ ID NO: 4053362 - RNA, 20 nt, Vaccinia virus
uaaauauuuuaaaauuuaua

SEQ ID NO: 4053363 - RNA, 22 nt, Vaccinia virus
uaaauauuuuucuaccuuuuca

SEQ ID NO: 4053364 - RNA, 14 nt, Vaccinia virus
uaaaucacauaucu

SEQ ID NO: 4053365 - RNA, 18 nt, Vaccinia virus
uaaaucagaauguuacag

SEQ ID NO: 4053366 - RNA, 20 nt, Vaccinia virus
uaaaucaugacguaaaugua

SEQ ID NO: 4053367 - RNA, 15 nt, Vaccinia virus
uaaaucauuaucuac

SEQ ID NO: 4053368 - RNA, 17 nt, Vaccinia virus
uaaauccaucucagaau

SEQ ID NO: 4053369 - RNA, 15 nt, Vaccinia virus
uaaauccgagaauau

SEQ ID NO: 4053370 - RNA, 23 nt, Vaccinia virus
uaaauccucuauuuauugacauu

SEQ ID NO: 4053371 - RNA, 15 nt, Vaccinia virus
uaaauccuuguuuga

SEQ ID NO: 4053372 - RNA, 23 nt, Vaccinia virus
uaaaucuaaaauugauggaugag

SEQ ID NO: 4053373 - RNA, 20 nt, Vaccinia virus
uaaaucuaacauugauuuua

SEQ ID NO: 4053374 - RNA, 15 nt, Vaccinia virus
uaaaucuccuucaug

SEQ ID NO: 4053375 - RNA, 20 nt, Vaccinia virus
uaaaugauuucgaucugucu

SEQ ID NO: 4053376 - RNA, 14 nt, Vaccinia virus
uaaaugauuuucug

SEQ ID NO: 4053377 - RNA, 19 nt, Vaccinia virus
uaaaugcaauaacaaagau

SEQ ID NO: 4053378 - RNA, 18 nt, Vaccinia virus
uaaaugcgugacuauaaa

SEQ ID NO: 4053379 - RNA, 14 nt, Vaccinia virus
uaaauguaaauuca

SEQ ID NO: 4053380 - RNA, 17 nt, Vaccinia virus
uaaauguuuaaacauca

SEQ ID NO: 4053381 - RNA, 15 nt, Vaccinia virus
uaaauguuuaacguu

SEQ ID NO: 4053382 - RNA, 20 nt, Vaccinia virus
uaaauguuuucucuguaaua

SEQ ID NO: 4053383 - RNA, 18 nt, Vaccinia virus
uaaauuacacauuuccaa

SEQ ID NO: 4053384 - RNA, 18 nt, Vaccinia virus
uaaauuauauauggauuu

SEQ ID NO: 4053385 - RNA, 17 nt, Vaccinia virus
uaaauucaaccaugaau

SEQ ID NO: 4053386 - RNA, 12 nt, Vaccinia virus
uaaauucaagau

SEQ ID NO: 4053387 - RNA, 13 nt, Vaccinia virus
uaaauucauauaa

SEQ ID NO: 4053388 - RNA, 16 nt, Vaccinia virus
uaaauuccuuaauauu

SEQ ID NO: 4053389 - RNA, 12 nt, Vaccinia virus
uaaauuguguag

SEQ ID NO: 4053390 - RNA, 19 nt, Vaccinia virus
uaaauuuagugagaauaau

SEQ ID NO: 4053391 - RNA, 17 nt, Vaccinia virus
uaaauuuaucaauaaau

SEQ ID NO: 4053392 - RNA, 14 nt, Vaccinia virus
uaaauuuaucuauu

SEQ ID NO: 4053393 - RNA, 11 nt, Vaccinia virus
uaaauuucaau

SEQ ID NO: 4053394 - RNA, 14 nt, Vaccinia virus
uaaauuuuaaacau

SEQ ID NO: 4053395 - RNA, 19 nt, Vaccinia virus
uaacaaaaauuaugaaaua

SEQ ID NO: 4053396 - RNA, 20 nt, Vaccinia virus
uaacaaaaucaggaaaaaag

SEQ ID NO: 4053397 - RNA, 16 nt, Vaccinia virus
uaacaaauuaaagaua

SEQ ID NO: 4053398 - RNA, 14 nt, Vaccinia virus
uaacaaauuuccua

SEQ ID NO: 4053399 - RNA, 18 nt, Vaccinia virus
uaacaaauuuccuaaaua

SEQ ID NO: 4053400 - RNA, 14 nt, Vaccinia virus
uaacaauuaauuag

SEQ ID NO: 4053401 - RNA, 16 nt, Vaccinia virus
uaacaauugucuguaa

SEQ ID NO: 4053402 - RNA, 18 nt, Vaccinia virus
uaacaauuuauuuuguau

SEQ ID NO: 4053403 - RNA, 14 nt, Vaccinia virus
uaacacacaugucu

SEQ ID NO: 4053404 - RNA, 22 nt, Vaccinia virus
uaacacguuuuuuagaucucau

SEQ ID NO: 4053405 - RNA, 21 nt, Vaccinia virus
uaacacucgcuccauauucca

SEQ ID NO: 4053406 - RNA, 18 nt, Vaccinia virus
uaacagauaaaaagacuu

SEQ ID NO: 4053407 - RNA, 16 nt, Vaccinia virus
uaacagauacauaaac

SEQ ID NO: 4053408 - RNA, 20 nt, Vaccinia virus
uaacaggggaaugaacagca

SEQ ID NO: 4053409 - RNA, 17 nt, Vaccinia virus
uaacaguuuuacuauau

SEQ ID NO: 4053410 - RNA, 15 nt, Vaccinia virus
uaacauaaaaacuua

SEQ ID NO: 4053411 - RNA, 23 nt, Vaccinia virus
uaacaucuggccuguucauaaau

SEQ ID NO: 4053412 - RNA, 20 nt, Vaccinia virus
uaacaugcgguucaaaauag

SEQ ID NO: 4053413 - RNA, 17 nt, Vaccinia virus
uaacauggauacagaua

SEQ ID NO: 4053414 - RNA, 18 nt, Vaccinia virus
uaacauguuacagaauau

SEQ ID NO: 4053415 - RNA, 16 nt, Vaccinia virus
uaacauugacugaaua

SEQ ID NO: 4053416 - RNA, 17 nt, Vaccinia virus
uaacauugaguaaaucc

SEQ ID NO: 4053417 - RNA, 15 nt, Vaccinia virus
uaacauuuauuauca

SEQ ID NO: 4053418 - RNA, 20 nt, Vaccinia virus
uaaccauauauccaauaaag

SEQ ID NO: 4053419 - RNA, 17 nt, Vaccinia virus
uaaccaugaaagaaaga

SEQ ID NO: 4053420 - RNA, 15 nt, Vaccinia virus
uaaccuuaucauuau

SEQ ID NO: 4053421 - RNA, 23 nt, Vaccinia virus
uaaccuuggcugucucauucaau

SEQ ID NO: 4053422 - RNA, 23 nt, Vaccinia virus
uaacgaacgaggugugaauguac

SEQ ID NO: 4053423 - RNA, 18 nt, Vaccinia virus
uaacgaauuauauagucu

SEQ ID NO: 4053424 - RNA, 15 nt, Vaccinia virus
uaacgaggacuuauu

SEQ ID NO: 4053425 - RNA, 15 nt, Vaccinia virus
agaaccaaaugauua

SEQ ID NO: 4053426 - RNA, 16 nt, Vaccinia virus
agaaccaguaacauau

SEQ ID NO: 4053427 - RNA, 17 nt, Vaccinia virus
agaacgaugucaaaaua

SEQ ID NO: 4053428 - RNA, 20 nt, Vaccinia virus
agaacgaugucaaaauauga

SEQ ID NO: 4053429 - RNA, 22 nt, Vaccinia virus
agaacgaugucaaaauaugagu

SEQ ID NO: 4053430 - RNA, 19 nt, Vaccinia virus
agaacgguagaaacuauac

SEQ ID NO: 4053431 - RNA, 13 nt, Vaccinia virus
agaacguaaauua

SEQ ID NO: 4053432 - RNA, 13 nt, Vaccinia virus
agaacuaacacaa

SEQ ID NO: 4053433 - RNA, 18 nt, Vaccinia virus
agaacucuuuaaacgaua

SEQ ID NO: 4053434 - RNA, 12 nt, Vaccinia virus
agaacucuuuuc

SEQ ID NO: 4053435 - RNA, 22 nt, Vaccinia virus
agaacugauugcaguguucauc

SEQ ID NO: 4053436 - RNA, 24 nt, Vaccinia virus
agaacugccauauguuggagauac

SEQ ID NO: 4053437 - RNA, 21 nt, Vaccinia virus
agaacuguuuuagaagucaag

SEQ ID NO: 4053438 - RNA, 18 nt, Vaccinia virus
agaacuuacgauacaucu

SEQ ID NO: 4053439 - RNA, 22 nt, Vaccinia virus
agaacuuaugaccgugauaaaa

SEQ ID NO: 4053440 - RNA, 23 nt, Vaccinia virus
agaagaauucaagucaggaacua

SEQ ID NO: 4053441 - RNA, 21 nt, Vaccinia virus
agaagagucauuaaaauaugc

SEQ ID NO: 4053442 - RNA, 19 nt, Vaccinia virus
agaaguaacgccauauuac

SEQ ID NO: 4053443 - RNA, 16 nt, Vaccinia virus
agaagucgucaagcau

SEQ ID NO: 4053444 - RNA, 17 nt, Vaccinia virus
agaaguuauagaaugua

SEQ ID NO: 4053445 - RNA, 12 nt, Vaccinia virus
agaaguuauuau

SEQ ID NO: 4053446 - RNA, 15 nt, Vaccinia virus
agaaguuguaaauga

SEQ ID NO: 4053447 - RNA, 14 nt, Vaccinia virus
agaaguuuuauccu

SEQ ID NO: 4053448 - RNA, 18 nt, Vaccinia virus
agaaguuuucccaaaaaa

SEQ ID NO: 4053449 - RNA, 21 nt, Vaccinia virus
agaauaaaaugcuaaugucaa

SEQ ID NO: 4053450 - RNA, 16 nt, Vaccinia virus
agaauaagaucaagau

SEQ ID NO: 4053451 - RNA, 14 nt, Vaccinia virus
agaauaauaugacu

SEQ ID NO: 4053452 - RNA, 15 nt, Vaccinia virus
agaauacgccaagga

SEQ ID NO: 4053453 - RNA, 16 nt, Vaccinia virus
agaauacugaucuucu

SEQ ID NO: 4053454 - RNA, 23 nt, Vaccinia virus
agaauauaaauuauauauggauu

SEQ ID NO: 4053455 - RNA, 21 nt, Vaccinia virus
agaauauacucaauagaauuu

SEQ ID NO: 4053456 - RNA, 12 nt, Vaccinia virus
agaauauacucu

SEQ ID NO: 4053457 - RNA, 13 nt, Vaccinia virus
agaauauauguuu

SEQ ID NO: 4053458 - RNA, 17 nt, Vaccinia virus
agaauauccucuagaga

SEQ ID NO: 4053459 - RNA, 18 nt, Vaccinia virus
agaauauguauaucaauu

SEQ ID NO: 4053460 - RNA, 21 nt, Vaccinia virus
agaauaugucucuuaacuauu

SEQ ID NO: 4053461 - RNA, 18 nt, Vaccinia virus
agaaucagaaucauacaa

SEQ ID NO: 4053462 - RNA, 23 nt, Vaccinia virus
agaaucagcgucguuuaacacaa

SEQ ID NO: 4053463 - RNA, 18 nt, Vaccinia virus
agaaucauacaaugaauu

SEQ ID NO: 4053464 - RNA, 20 nt, Vaccinia virus
agaaucauugcuguaaacaa

SEQ ID NO: 4053465 - RNA, 18 nt, Vaccinia virus
agaauccacaacagacga

SEQ ID NO: 4053466 - RNA, 19 nt, Vaccinia virus
agaauccaucaguuguuaa

SEQ ID NO: 4053467 - RNA, 21 nt, Vaccinia virus
agaauccuaacuauucaucca

SEQ ID NO: 4053468 - RNA, 15 nt, Vaccinia virus
agaaucguaauggau

SEQ ID NO: 4053469 - RNA, 16 nt, Vaccinia virus
agaaugcauacugucu

SEQ ID NO: 4053470 - RNA, 17 nt, Vaccinia virus
agaaugcuucagaauua

SEQ ID NO: 4053471 - RNA, 21 nt, Vaccinia virus
agaauggaaaggaaacuaucu

SEQ ID NO: 4053472 - RNA, 18 nt, Vaccinia virus
agaauguuccuaauguau

SEQ ID NO: 4053473 - RNA, 13 nt, Vaccinia virus
agaauguuuacca

SEQ ID NO: 4053474 - RNA, 15 nt, Vaccinia virus
agaauuaacuaguau

SEQ ID NO: 4053475 - RNA, 19 nt, Vaccinia virus
agaauuaaugggaacuauu

SEQ ID NO: 4053476 - RNA, 15 nt, Vaccinia virus
agaauucaacuauau

SEQ ID NO: 4053477 - RNA, 13 nt, Vaccinia virus
agaauuguaacuu

SEQ ID NO: 4053478 - RNA, 21 nt, Vaccinia virus
agaauuuaccagauaucuucu

SEQ ID NO: 4053479 - RNA, 21 nt, Vaccinia virus
agaauuucuacauaauuauau

SEQ ID NO: 4053480 - RNA, 15 nt, Vaccinia virus
agaauuuucauggau

SEQ ID NO: 4053481 - RNA, 22 nt, Vaccinia virus
agaauuuuuauaaauuuuucca

SEQ ID NO: 4053482 - RNA, 22 nt, Vaccinia virus
agaauuuuuucguguuccaaac

SEQ ID NO: 4053483 - RNA, 17 nt, Vaccinia virus
agacaaacgcugauaga

SEQ ID NO: 4053484 - RNA, 18 nt, Vaccinia virus
agacaaugcuaauauauu

SEQ ID NO: 4053485 - RNA, 17 nt, Vaccinia virus
agacaauugacaaaauu

SEQ ID NO: 4053486 - RNA, 11 nt, Vaccinia virus
agacacaucug

SEQ ID NO: 4053487 - RNA, 22 nt, Vaccinia virus
agacacaucugccauagauuua

SEQ ID NO: 4053488 - RNA, 20 nt, Vaccinia virus
agacacuaacucuguuuuau

SEQ ID NO: 4053489 - RNA, 22 nt, Vaccinia virus
agacaugauaauauuaaagaua

SEQ ID NO: 4053490 - RNA, 14 nt, Vaccinia virus
agacauuaauagaa

SEQ ID NO: 4053491 - RNA, 19 nt, Vaccinia virus
agaccgucuacaaaaaacu

SEQ ID NO: 4053492 - RNA, 22 nt, Vaccinia virus
agacgacucgagccuuuauuau

SEQ ID NO: 4053493 - RNA, 17 nt, Vaccinia virus
agacgccugauauguag

SEQ ID NO: 4053494 - RNA, 23 nt, Vaccinia virus
agacgcuauggcacgaaauaucu

SEQ ID NO: 4053495 - RNA, 19 nt, Vaccinia virus
agacggagucauaacuauu

SEQ ID NO: 4053496 - RNA, 18 nt, Vaccinia virus
agacggauaagaaauaua

SEQ ID NO: 4053497 - RNA, 23 nt, Vaccinia virus
agacgucaauaucugauuauuau

SEQ ID NO: 4053498 - RNA, 13 nt, Vaccinia virus
agacguuguacaa

SEQ ID NO: 4053499 - RNA, 17 nt, Vaccinia virus
agacuacaauauauucu

SEQ ID NO: 4053500 - RNA, 17 nt, Vaccinia virus
agacuacgaaacugaua

SEQ ID NO: 4053501 - RNA, 18 nt, Vaccinia virus
agacuacguagacuguuu

SEQ ID NO: 4053502 - RNA, 20 nt, Vaccinia virus
agacuaggugcuauggaugg

SEQ ID NO: 4053503 - RNA, 14 nt, Vaccinia virus
agacuccugguaau

SEQ ID NO: 4053504 - RNA, 20 nt, Vaccinia virus
agacuuuauaauuucaucua

SEQ ID NO: 4053505 - RNA, 19 nt, Vaccinia virus
agacuuugccacaacagaa

SEQ ID NO: 4053506 - RNA, 13 nt, Vaccinia virus
agacuuuguagaa

SEQ ID NO: 4053507 - RNA, 13 nt, Vaccinia virus
agagaaauauauu

SEQ ID NO: 4053508 - RNA, 20 nt, Vaccinia virus
agagaggcugcugaaaauaa

SEQ ID NO: 4053509 - RNA, 22 nt, Vaccinia virus
agagcuaccgaaggagauacua

SEQ ID NO: 4053510 - RNA, 22 nt, Vaccinia virus
agagcuacuaacguauaauucu

SEQ ID NO: 4053511 - RNA, 12 nt, Vaccinia virus
agaggaaauauc

SEQ ID NO: 4053512 - RNA, 13 nt, Vaccinia virus
agaggaagaagau

SEQ ID NO: 4053513 - RNA, 12 nt, Vaccinia virus
agaggagaagua

SEQ ID NO: 4053514 - RNA, 16 nt, Vaccinia virus
agaggaguuauuuacu

SEQ ID NO: 4053515 - RNA, 17 nt, Vaccinia virus
agaggcauaaucaaugu

SEQ ID NO: 4053516 - RNA, 14 nt, Vaccinia virus
agaggccaucugga

SEQ ID NO: 4053517 - RNA, 22 nt, Vaccinia virus
agagguucccaauuccaaagau

SEQ ID NO: 4053518 - RNA, 21 nt, Vaccinia virus
agaguaaccccauauaaugua

SEQ ID NO: 4053519 - RNA, 20 nt, Vaccinia virus
agaguaguaucauuaaaucu

SEQ ID NO: 4053520 - RNA, 20 nt, Vaccinia virus
agaguuaucaagagaaaauu

SEQ ID NO: 4053521 - RNA, 19 nt, Vaccinia virus
agaguuuuauucucauuau

SEQ ID NO: 4053522 - RNA, 20 nt, Vaccinia virus
agcgagaaauaaucauaaau

SEQ ID NO: 4053523 - RNA, 22 nt, Vaccinia virus
agcgcuuaaucucaaaauaugu

SEQ ID NO: 4053524 - RNA, 13 nt, Vaccinia virus
agcggaugaaaaa

SEQ ID NO: 4053525 - RNA, 22 nt, Vaccinia virus
agcguagaaguuguaaaugaca

SEQ ID NO: 4053526 - RNA, 23 nt, Vaccinia virus
agcguauaucucuauuaaaugcg

SEQ ID NO: 4053527 - RNA, 15 nt, Vaccinia virus
agcuaaaaaugccac

SEQ ID NO: 4053528 - RNA, 21 nt, Vaccinia virus
agcuaaugaugcggauauugu

SEQ ID NO: 4053529 - RNA, 19 nt, Vaccinia virus
agcuauaauaauaaaugua

SEQ ID NO: 4053530 - RNA, 22 nt, Vaccinia virus
agcuauagcauuguuauguauu

SEQ ID NO: 4053531 - RNA, 16 nt, Vaccinia virus
agcuaucgucucugga

SEQ ID NO: 4053532 - RNA, 21 nt, Vaccinia virus
agcuauguuaucaugaaaugu

SEQ ID NO: 4053533 - RNA, 14 nt, Vaccinia virus
agcuauuaaacugu

SEQ ID NO: 4053534 - RNA, 16 nt, Vaccinia virus
agcuauuuaaaugggu

SEQ ID NO: 4053535 - RNA, 18 nt, Vaccinia virus
agcucaauauaaaugcgu

SEQ ID NO: 4053536 - RNA, 19 nt, Vaccinia virus
agcucauaugauuucagua

SEQ ID NO: 4053537 - RNA, 14 nt, Vaccinia virus
agcucaucuaaaaa

SEQ ID NO: 4053538 - RNA, 16 nt, Vaccinia virus
agcucuuaguauggga

SEQ ID NO: 4053539 - RNA, 21 nt, Vaccinia virus
agcuggauaucaguagaugca

SEQ ID NO: 4053540 - RNA, 18 nt, Vaccinia virus
agcuguacaccauagcac

SEQ ID NO: 4053541 - RNA, 18 nt, Vaccinia virus
agcugugguguaaucuua

SEQ ID NO: 4053542 - RNA, 21 nt, Vaccinia virus
agcuguucaagaauauacaag

SEQ ID NO: 4053543 - RNA, 17 nt, Vaccinia virus
agcuuacaauaaacucc

SEQ ID NO: 4053544 - RNA, 18 nt, Vaccinia virus
agcuuccagauuuaaaaa

SEQ ID NO: 4053545 - RNA, 15 nt, Vaccinia virus
aggaaauaaaucaua

SEQ ID NO: 4053546 - RNA, 22 nt, Vaccinia virus
aggaaauauccucacaacuuaa

SEQ ID NO: 4053547 - RNA, 15 nt, Vaccinia virus
aggaaauuaugagaa

SEQ ID NO: 4053548 - RNA, 22 nt, Vaccinia virus
aggaaauuaugagaaugagauu

SEQ ID NO: 4053549 - RNA, 14 nt, Vaccinia virus
aggaacauaaacaa

SEQ ID NO: 4053550 - RNA, 23 nt, Vaccinia virus
aggaacauuaucaauuuuuacau

SEQ ID NO: 4053551 - RNA, 16 nt, Vaccinia virus
aggaaguauaucugag

SEQ ID NO: 4053552 - RNA, 18 nt, Vaccinia virus
aggaauaaaauaugaaau

SEQ ID NO: 4053553 - RNA, 13 nt, Vaccinia virus
aggaauaucugau

SEQ ID NO: 4053554 - RNA, 22 nt, Vaccinia virus
aggaaucuauuaaagauuguuu

SEQ ID NO: 4053555 - RNA, 15 nt, Vaccinia virus
aggacguaacuauaa

SEQ ID NO: 4053556 - RNA, 23 nt, Vaccinia virus
aggacuauuguuacaaaaguuaa

SEQ ID NO: 4053557 - RNA, 22 nt, Vaccinia virus
aggacugaguaccgauaucacu

SEQ ID NO: 4053558 - RNA, 19 nt, Vaccinia virus
aggacuuuguagaaauauu

SEQ ID NO: 4053559 - RNA, 17 nt, Vaccinia virus
aggagaaggaaaaugaa

SEQ ID NO: 4053560 - RNA, 14 nt, Vaccinia virus
aggagauauugaaa

SEQ ID NO: 4053561 - RNA, 23 nt, Vaccinia virus
aggagauuuaguauuuagcagug

SEQ ID NO: 4053562 - RNA, 14 nt, Vaccinia virus
aggagcauacagua

SEQ ID NO: 4053563 - RNA, 14 nt, Vaccinia virus
aggauacuuuguaa

SEQ ID NO: 4053564 - RNA, 14 nt, Vaccinia virus
aggauagcaaaaua

SEQ ID NO: 4053565 - RNA, 19 nt, Vaccinia virus
aggauauaaguagauguuc

SEQ ID NO: 4053566 - RNA, 22 nt, Vaccinia virus
aggauauuuguucgacuuugug

SEQ ID NO: 4053567 - RNA, 21 nt, Vaccinia virus
aggaucuacguucauauguau

SEQ ID NO: 4053568 - RNA, 16 nt, Vaccinia virus
aggaugacucucaaau

SEQ ID NO: 4053569 - RNA, 18 nt, Vaccinia virus
aggaugcauuaucauuau

SEQ ID NO: 4053570 - RNA, 22 nt, Vaccinia virus
aggauggguuccauaacuaaau

SEQ ID NO: 4053571 - RNA, 15 nt, Vaccinia virus
aggauugauggugaa

SEQ ID NO: 4053572 - RNA, 17 nt, Vaccinia virus
aggauuguauaaauuac

SEQ ID NO: 4053573 - RNA, 23 nt, Vaccinia virus
aggauuuaaacaaaaaaguuauc

SEQ ID NO: 4053574 - RNA, 20 nt, Vaccinia virus
aggcaauagcgacauaaaca

SEQ ID NO: 4053575 - RNA, 20 nt, Vaccinia virus
aggcaauguauauuuaucca

SEQ ID NO: 4053576 - RNA, 14 nt, Vaccinia virus
aggcauaaaaugua

SEQ ID NO: 4053577 - RNA, 17 nt, Vaccinia virus
aggcauguugauggaaa

SEQ ID NO: 4053578 - RNA, 17 nt, Vaccinia virus
aggccaaaacaaaauuu

SEQ ID NO: 4053579 - RNA, 15 nt, Vaccinia virus
aggccaaagaaauga

SEQ ID NO: 4053580 - RNA, 14 nt, Vaccinia virus
aggcgucaaagaua

SEQ ID NO: 4053581 - RNA, 17 nt, Vaccinia virus
aggcucaguauguaaac

SEQ ID NO: 4053582 - RNA, 12 nt, Vaccinia virus
agggaaaaugaa

SEQ ID NO: 4053583 - RNA, 12 nt, Vaccinia virus
agggaauuauug

SEQ ID NO: 4053584 - RNA, 16 nt, Vaccinia virus
agggauuuuauaugau

SEQ ID NO: 4053585 - RNA, 16 nt, Vaccinia virus
agggcuaaaugucuag

SEQ ID NO: 4053586 - RNA, 15 nt, Vaccinia virus
aggggaaaaauuaua

SEQ ID NO: 4053587 - RNA, 20 nt, Vaccinia virus
aggggaacccaucaaagaua

SEQ ID NO: 4053588 - RNA, 16 nt, Vaccinia virus
aggggaugaaucauug

SEQ ID NO: 4053589 - RNA, 18 nt, Vaccinia virus
aggggauuggcauuuaac

SEQ ID NO: 4053590 - RNA, 21 nt, Vaccinia virus
aggguauauccaucacuaaaa

SEQ ID NO: 4053591 - RNA, 14 nt, Vaccinia virus
agguaaauguaaau

SEQ ID NO: 4053592 - RNA, 20 nt, Vaccinia virus
agguacuauaauauuaaaaa

SEQ ID NO: 4053593 - RNA, 18 nt, Vaccinia virus
agguauacacaaaaagaa

SEQ ID NO: 4053594 - RNA, 16 nt, Vaccinia virus
agguauauuuauucca

SEQ ID NO: 4053595 - RNA, 19 nt, Vaccinia virus
agguauguaccacauacug

SEQ ID NO: 4053596 - RNA, 13 nt, Vaccinia virus
aggucgcaaaaaa

SEQ ID NO: 4053597 - RNA, 17 nt, Vaccinia virus
agguguguuuuuuacca

SEQ ID NO: 4053598 - RNA, 17 nt, Vaccinia virus
agguuucauauuuauca

SEQ ID NO: 4053599 - RNA, 16 nt, Vaccinia virus
aguaaaaauaacuaga

SEQ ID NO: 4053600 - RNA, 14 nt, Vaccinia virus
aguaaaaucuauca

SEQ ID NO: 4053601 - RNA, 20 nt, Vaccinia virus
aguaaagauuucaaagaugu

SEQ ID NO: 4053602 - RNA, 14 nt, Vaccinia virus
aguaaaguaaacaa

SEQ ID NO: 4053603 - RNA, 17 nt, Vaccinia virus
aguaaaugaaaaaaaac

SEQ ID NO: 4053604 - RNA, 14 nt, Vaccinia virus
aguaaauucaagau

SEQ ID NO: 4053605 - RNA, 19 nt, Vaccinia virus
aguaacgcguggaaaaagc

SEQ ID NO: 4053606 - RNA, 19 nt, Vaccinia virus
aguaacuauugacuuaaua

SEQ ID NO: 4053607 - RNA, 18 nt, Vaccinia virus
aguaaguaucuuauguau

SEQ ID NO: 4053608 - RNA, 15 nt, Vaccinia virus
aguaauaaaucaacu

SEQ ID NO: 4053609 - RNA, 18 nt, Vaccinia virus
aguaauggcggaaaacuu

SEQ ID NO: 4053610 - RNA, 20 nt, Vaccinia virus
aguaauggguuauuguggau

SEQ ID NO: 4053611 - RNA, 16 nt, Vaccinia virus
aguaaugguauguauu

SEQ ID NO: 4053612 - RNA, 15 nt, Vaccinia virus
aguaauuacauagau

SEQ ID NO: 4053613 - RNA, 19 nt, Vaccinia virus
aguaauuauaagaaauaua

SEQ ID NO: 4053614 - RNA, 18 nt, Vaccinia virus
aguaauucagacacuucu

SEQ ID NO: 4053615 - RNA, 15 nt, Vaccinia virus
aguaauuuuuuauca

SEQ ID NO: 4053616 - RNA, 20 nt, Vaccinia virus
aguacacuccguuuaauaaa

SEQ ID NO: 4053617 - RNA, 18 nt, Vaccinia virus
aguacagaauuaauuaga

SEQ ID NO: 4053618 - RNA, 16 nt, Vaccinia virus
aguacaucuacuauau

SEQ ID NO: 4053619 - RNA, 15 nt, Vaccinia virus
aguacaucuaucacc

SEQ ID NO: 4053620 - RNA, 13 nt, Vaccinia virus
aguacggauuaaa

SEQ ID NO: 4053621 - RNA, 21 nt, Vaccinia virus
aguacugcuuuuuucgaaaug

SEQ ID NO: 4053622 - RNA, 17 nt, Vaccinia virus
aguagaaauuaucaaau

SEQ ID NO: 4053623 - RNA, 18 nt, Vaccinia virus
aguagaaauuccguugga

SEQ ID NO: 4053624 - RNA, 19 nt, Vaccinia virus
aguagccagacaaaugguc

SEQ ID NO: 4053625 - RNA, 18 nt, Vaccinia virus
aguaggauauauuaaagu

SEQ ID NO: 4053626 - RNA, 13 nt, Vaccinia virus
aguauaaaaauua

SEQ ID NO: 4053627 - RNA, 18 nt, Vaccinia virus
aguauaaaacauuaaaug

SEQ ID NO: 4053628 - RNA, 19 nt, Vaccinia virus
aguauaaacacgaauacua

SEQ ID NO: 4053629 - RNA, 21 nt, Vaccinia virus
aguauacacgcuaaaauaacu

SEQ ID NO: 4053630 - RNA, 17 nt, Vaccinia virus
aguauaccaaacauagu

SEQ ID NO: 4053631 - RNA, 13 nt, Vaccinia virus
aguaucaaacucu

SEQ ID NO: 4053632 - RNA, 15 nt, Vaccinia virus
aguaucaaaucuucu

SEQ ID NO: 4053633 - RNA, 20 nt, Vaccinia virus
aguaucaacaaucaacuaau

SEQ ID NO: 4053634 - RNA, 17 nt, Vaccinia virus
aguaugaagaaaaaugu

SEQ ID NO: 4053635 - RNA, 21 nt, Vaccinia virus
aguaugaguaagauaguguuu

SEQ ID NO: 4053636 - RNA, 16 nt, Vaccinia virus
aguauggagacauuga

SEQ ID NO: 4053637 - RNA, 17 nt, Vaccinia virus
aguauggagacauugau

SEQ ID NO: 4053638 - RNA, 23 nt, Vaccinia virus
aguauguuaguggacuugucaaa

SEQ ID NO: 4053639 - RNA, 18 nt, Vaccinia virus
aguauuaaauauuaauaa

SEQ ID NO: 4053640 - RNA, 22 nt, Vaccinia virus
aguauuaucaacguaacuauau

SEQ ID NO: 4053641 - RNA, 14 nt, Vaccinia virus
auauagaugucaau

SEQ ID NO: 4053642 - RNA, 15 nt, Vaccinia virus
auauagguuacuaga

SEQ ID NO: 4053643 - RNA, 14 nt, Vaccinia virus
auauaguaaugaag

SEQ ID NO: 4053644 - RNA, 18 nt, Vaccinia virus
auauagugaaacaaaaua

SEQ ID NO: 4053645 - RNA, 23 nt, Vaccinia virus
auauaguguugcuaucucuugcg

SEQ ID NO: 4053646 - RNA, 13 nt, Vaccinia virus
auauaguuauaga

SEQ ID NO: 4053647 - RNA, 13 nt, Vaccinia virus
auauauaaugaau

SEQ ID NO: 4053648 - RNA, 16 nt, Vaccinia virus
auauauaguauuaaug

SEQ ID NO: 4053649 - RNA, 13 nt, Vaccinia virus
auauaucaaacau

SEQ ID NO: 4053650 - RNA, 21 nt, Vaccinia virus
auauaucuacuucuuccacug

SEQ ID NO: 4053651 - RNA, 12 nt, Vaccinia virus
auauaugcauua

SEQ ID NO: 4053652 - RNA, 16 nt, Vaccinia virus
auauauggauaaugcu

SEQ ID NO: 4053653 - RNA, 18 nt, Vaccinia virus
auauauguucgcuauugu

SEQ ID NO: 4053654 - RNA, 16 nt, Vaccinia virus
auauauuaaaaaaugu

SEQ ID NO: 4053655 - RNA, 13 nt, Vaccinia virus
auauauuaaacaa

SEQ ID NO: 4053656 - RNA, 16 nt, Vaccinia virus
auauauuaagaaguuc

SEQ ID NO: 4053657 - RNA, 13 nt, Vaccinia virus
auauauuagaaau

SEQ ID NO: 4053658 - RNA, 22 nt, Vaccinia virus
auauauugcaaaucacucaaua

SEQ ID NO: 4053659 - RNA, 22 nt, Vaccinia virus
auauauugcuuacuagauguug

SEQ ID NO: 4053660 - RNA, 18 nt, Vaccinia virus
auauauuguagauaagaa

SEQ ID NO: 4053661 - RNA, 21 nt, Vaccinia virus
auauauuguuucauaauugcu

SEQ ID NO: 4053662 - RNA, 15 nt, Vaccinia virus
auauauuuauuuuca

SEQ ID NO: 4053663 - RNA, 18 nt, Vaccinia virus
auauauuucuuagcuaga

SEQ ID NO: 4053664 - RNA, 21 nt, Vaccinia virus
auauauuuuccaugaaaucaa

SEQ ID NO: 4053665 - RNA, 12 nt, Vaccinia virus
auaucaauuagu

SEQ ID NO: 4053666 - RNA, 17 nt, Vaccinia virus
auaucacauuguauaua

SEQ ID NO: 4053667 - RNA, 18 nt, Vaccinia virus
auaucagacagcauggug

SEQ ID NO: 4053668 - RNA, 20 nt, Vaccinia virus
auaucagccgcacuagcauc

SEQ ID NO: 4053669 - RNA, 14 nt, Vaccinia virus
auaucauacaugau

SEQ ID NO: 4053670 - RNA, 14 nt, Vaccinia virus
auaucaucaaacaa

SEQ ID NO: 4053671 - RNA, 16 nt, Vaccinia virus
auaucaucuacauaau

SEQ ID NO: 4053672 - RNA, 22 nt, Vaccinia virus
auaucaucuuuucacuaaauaa

SEQ ID NO: 4053673 - RNA, 17 nt, Vaccinia virus
auaucaugaagagaugu

SEQ ID NO: 4053674 - RNA, 23 nt, Vaccinia virus
auaucauuaggauuuaacuccuu

SEQ ID NO: 4053675 - RNA, 13 nt, Vaccinia virus
auauccaaaauuu

SEQ ID NO: 4053676 - RNA, 17 nt, Vaccinia virus
auauccgcuauuacaag

SEQ ID NO: 4053677 - RNA, 19 nt, Vaccinia virus
auauccguuaaguuuguau

SEQ ID NO: 4053678 - RNA, 22 nt, Vaccinia virus
auauccuuuagaguauuucuca

SEQ ID NO: 4053679 - RNA, 19 nt, Vaccinia virus
auauccuuugcauucuauu

SEQ ID NO: 4053680 - RNA, 19 nt, Vaccinia virus
auaucgagaucuuuuguau

SEQ ID NO: 4053681 - RNA, 17 nt, Vaccinia virus
auaucggaauaaguaga

SEQ ID NO: 4053682 - RNA, 17 nt, Vaccinia virus
auaucggucuuauucuu

SEQ ID NO: 4053683 - RNA, 16 nt, Vaccinia virus
auaucuaauuucugua

SEQ ID NO: 4053684 - RNA, 16 nt, Vaccinia virus
auaucuacuagaaaga

SEQ ID NO: 4053685 - RNA, 19 nt, Vaccinia virus
auaucuagacuuucuguua

SEQ ID NO: 4053686 - RNA, 19 nt, Vaccinia virus
auaucuagcaaaaauucua

SEQ ID NO: 4053687 - RNA, 21 nt, Vaccinia virus
auaucugaaacaaagaauugu

SEQ ID NO: 4053688 - RNA, 16 nt, Vaccinia virus
auaucugaguaugaug

SEQ ID NO: 4053689 - RNA, 21 nt, Vaccinia virus
auaucugaugagaucaauaga

SEQ ID NO: 4053690 - RNA, 19 nt, Vaccinia virus
auaucuggaaagaaaucua

SEQ ID NO: 4053691 - RNA, 22 nt, Vaccinia virus
auaucuuaaauaacucauuuau

SEQ ID NO: 4053692 - RNA, 13 nt, Vaccinia virus
auaucuuauucca

SEQ ID NO: 4053693 - RNA, 15 nt, Vaccinia virus
auaucuuguucuaug

SEQ ID NO: 4053694 - RNA, 23 nt, Vaccinia virus
auaucuuguuuagaaaaaugcua

SEQ ID NO: 4053695 - RNA, 21 nt, Vaccinia virus
auaucuuugguguaaaguuaa

SEQ ID NO: 4053696 - RNA, 17 nt, Vaccinia virus
auaucuuuuugaauugu

SEQ ID NO: 4053697 - RNA, 21 nt, Vaccinia virus
auaugaaaaacaugucucucu

SEQ ID NO: 4053698 - RNA, 19 nt, Vaccinia virus
auaugaacagacauuguau

SEQ ID NO: 4053699 - RNA, 23 nt, Vaccinia virus
auaugacgacuucaaucaaacaa

SEQ ID NO: 4053700 - RNA, 19 nt, Vaccinia virus
auaugacggacauuccauu

SEQ ID NO: 4053701 - RNA, 16 nt, Vaccinia virus
auaugagaaugaauau

SEQ ID NO: 4053702 - RNA, 13 nt, Vaccinia virus
auaugaugaaugg

SEQ ID NO: 4053703 - RNA, 17 nt, Vaccinia virus
auaugcaaagucuaaau

SEQ ID NO: 4053704 - RNA, 22 nt, Vaccinia virus
auaugcaaauagagcaauuacu

SEQ ID NO: 4053705 - RNA, 19 nt, Vaccinia virus
auaugccagaacuauuuuu

SEQ ID NO: 4053706 - RNA, 23 nt, Vaccinia virus
auaugccgugggaugaugucaaa

SEQ ID NO: 4053707 - RNA, 17 nt, Vaccinia virus
auaugccuccagaaguu

SEQ ID NO: 4053708 - RNA, 21 nt, Vaccinia virus
auaugcucauauauuuauaga

SEQ ID NO: 4053709 - RNA, 19 nt, Vaccinia virus
auaugcuuuuauuuuugga

SEQ ID NO: 4053710 - RNA, 22 nt, Vaccinia virus
auauguauucgucuuucugaau

SEQ ID NO: 4053711 - RNA, 13 nt, Vaccinia virus
auauguauuuccu

SEQ ID NO: 4053712 - RNA, 17 nt, Vaccinia virus
auauguauuuucuuucc

SEQ ID NO: 4053713 - RNA, 17 nt, Vaccinia virus
auaugucuguacaaaug

SEQ ID NO: 4053714 - RNA, 23 nt, Vaccinia virus
auauguguuuacaguaguaauga

SEQ ID NO: 4053715 - RNA, 21 nt, Vaccinia virus
auauguuuuaauauuuacaag

SEQ ID NO: 4053716 - RNA, 20 nt, Vaccinia virus
auauuaaaaauucacacauu

SEQ ID NO: 4053717 - RNA, 23 nt, Vaccinia virus
auauuaacgcguuuuaugaauga

SEQ ID NO: 4053718 - RNA, 22 nt, Vaccinia virus
auauuaauacacauaaugaagu

SEQ ID NO: 4053719 - RNA, 20 nt, Vaccinia virus
auauuacaaacuauagaaau

SEQ ID NO: 4053720 - RNA, 15 nt, Vaccinia virus
auauuacaaauacuu

SEQ ID NO: 4053721 - RNA, 18 nt, Vaccinia virus
auauuaccaguuguggaa

SEQ ID NO: 4053722 - RNA, 19 nt, Vaccinia virus
auauuacuaaacacacauu

SEQ ID NO: 4053723 - RNA, 18 nt, Vaccinia virus
auauuacuaauugauaga

SEQ ID NO: 4053724 - RNA, 20 nt, Vaccinia virus
auauuacuauuggcaauugu

SEQ ID NO: 4053725 - RNA, 13 nt, Vaccinia virus
auauuagaauuua

SEQ ID NO: 4053726 - RNA, 13 nt, Vaccinia virus
auauuagauuuac

SEQ ID NO: 4053727 - RNA, 21 nt, Vaccinia virus
auauuaggcacagucaaacau

SEQ ID NO: 4053728 - RNA, 22 nt, Vaccinia virus
auauuaggcacagucaaacauu

SEQ ID NO: 4053729 - RNA, 17 nt, Vaccinia virus
auauuaguauguuauau

SEQ ID NO: 4053730 - RNA, 18 nt, Vaccinia virus
auauuagugaugaauuga

SEQ ID NO: 4053731 - RNA, 15 nt, Vaccinia virus
auauuauacaaaaua

SEQ ID NO: 4053732 - RNA, 18 nt, Vaccinia virus
auauuaucaccuauugcc

SEQ ID NO: 4053733 - RNA, 16 nt, Vaccinia virus
auauuaucguuuguaa

SEQ ID NO: 4053734 - RNA, 15 nt, Vaccinia virus
auauuauuaaucauu

SEQ ID NO: 4053735 - RNA, 13 nt, Vaccinia virus
auauuauuacaca

SEQ ID NO: 4053736 - RNA, 20 nt, Vaccinia virus
auauuauuacacauaaacau

SEQ ID NO: 4053737 - RNA, 14 nt, Vaccinia virus
auauuauuaugaag

SEQ ID NO: 4053738 - RNA, 20 nt, Vaccinia virus
auauuauuuuuauguuuuau

SEQ ID NO: 4053739 - RNA, 17 nt, Vaccinia virus
auauucaacauguuuaa

SEQ ID NO: 4053740 - RNA, 20 nt, Vaccinia virus
auauucaguaaccaaauaca

SEQ ID NO: 4053741 - RNA, 16 nt, Vaccinia virus
auauucaguuuauaga

SEQ ID NO: 4053742 - RNA, 17 nt, Vaccinia virus
auauuccaagaucaaaa

SEQ ID NO: 4053743 - RNA, 18 nt, Vaccinia virus
auauuccaagaucaaaag

SEQ ID NO: 4053744 - RNA, 21 nt, Vaccinia virus
auauuccgguuugcaaaacaa

SEQ ID NO: 4053745 - RNA, 20 nt, Vaccinia virus
auauucgaaauuagaaagua

SEQ ID NO: 4053746 - RNA, 19 nt, Vaccinia virus
auauucuaacgauaauaga

SEQ ID NO: 4053747 - RNA, 21 nt, Vaccinia virus
auauucugccguguuuaaaga

SEQ ID NO: 4053748 - RNA, 14 nt, Vaccinia virus
auauucuguucuau

SEQ ID NO: 4053749 - RNA, 11 nt, Vaccinia virus
auauucuuucu

SEQ ID NO: 4053750 - RNA, 21 nt, Vaccinia virus
auauuguacgauguaauacua

SEQ ID NO: 4053751 - RNA, 19 nt, Vaccinia virus
auauuguacgguagaauug

SEQ ID NO: 4053752 - RNA, 20 nt, Vaccinia virus
auauuguacgguagaauuga

SEQ ID NO: 4053753 - RNA, 19 nt, Vaccinia virus
auauuguucuuaauagaca

SEQ ID NO: 4053754 - RNA, 18 nt, Vaccinia virus
auauuuacaguuacuaaa

SEQ ID NO: 4053755 - RNA, 16 nt, Vaccinia virus
auauuucuauuucuau

SEQ ID NO: 4053756 - RNA, 12 nt, Vaccinia virus
auauuucugaag

SEQ ID NO: 4053757 - RNA, 14 nt, Vaccinia virus
auauuucuggaaug

SEQ ID NO: 4053758 - RNA, 13 nt, Vaccinia virus
auauuugaaaauc

SEQ ID NO: 4053759 - RNA, 17 nt, Vaccinia virus
auauuugcacacauaau

SEQ ID NO: 4053760 - RNA, 19 nt, Vaccinia virus
auauuugugaaaaauauua

SEQ ID NO: 4053761 - RNA, 22 nt, Vaccinia virus
auauuuguuauuuuuucuguaa

SEQ ID NO: 4053762 - RNA, 12 nt, Vaccinia virus
auauuuuaauga

SEQ ID NO: 4053763 - RNA, 14 nt, Vaccinia virus
auauuuugcagcca

SEQ ID NO: 4053764 - RNA, 18 nt, Vaccinia virus
auauuuuuuuaguaaugu

SEQ ID NO: 4053765 - RNA, 12 nt, Vaccinia virus
aucaaaaaauua

SEQ ID NO: 4053766 - RNA, 13 nt, Vaccinia virus
aucaaaaaauuac

SEQ ID NO: 4053767 - RNA, 13 nt, Vaccinia virus
aucaaaaaguaag

SEQ ID NO: 4053768 - RNA, 14 nt, Vaccinia virus
aucaaaagaaaucu

SEQ ID NO: 4053769 - RNA, 21 nt, Vaccinia virus
aucaaaauagcaaaguaacga

SEQ ID NO: 4053770 - RNA, 22 nt, Vaccinia virus
aucaaacaaaaaagcucaauaa

SEQ ID NO: 4053771 - RNA, 17 nt, Vaccinia virus
aucaaacaggagacuau

SEQ ID NO: 4053772 - RNA, 19 nt, Vaccinia virus
aucaaagauuaauacauua

SEQ ID NO: 4053773 - RNA, 13 nt, Vaccinia virus
aucaaauacuuca

SEQ ID NO: 4053774 - RNA, 18 nt, Vaccinia virus
aucaaaucauugauacau

SEQ ID NO: 4053775 - RNA, 23 nt, Vaccinia virus
aucaaaucucuaucaucacauau

SEQ ID NO: 4053776 - RNA, 14 nt, Vaccinia virus
aucaacagaaauau

SEQ ID NO: 4053777 - RNA, 16 nt, Vaccinia virus
aucaacagauagcuug

SEQ ID NO: 4053778 - RNA, 16 nt, Vaccinia virus
aucaacaucuuaaaaa

SEQ ID NO: 4053779 - RNA, 20 nt, Vaccinia virus
aucaacggauaaucugaagu

SEQ ID NO: 4053780 - RNA, 14 nt, Vaccinia virus
aucaagaaacauuu

SEQ ID NO: 4053781 - RNA, 19 nt, Vaccinia virus
aucaaggacaguuaaaacu

SEQ ID NO: 4053782 - RNA, 23 nt, Vaccinia virus
aucaaguuggccauuaucgauau

SEQ ID NO: 4053783 - RNA, 22 nt, Vaccinia virus
aucaauaacgcaaucaugauuu

SEQ ID NO: 4053784 - RNA, 20 nt, Vaccinia virus
aucaauaagcauuaugauuu

SEQ ID NO: 4053785 - RNA, 21 nt, Vaccinia virus
aucaauaccaaagaaggaaga

SEQ ID NO: 4053786 - RNA, 12 nt, Vaccinia virus
aucaauagcuua

SEQ ID NO: 4053787 - RNA, 15 nt, Vaccinia virus
aucaauauuauucau

SEQ ID NO: 4053788 - RNA, 20 nt, Vaccinia virus
aucaaucuagcauuucuagc

SEQ ID NO: 4053789 - RNA, 17 nt, Vaccinia virus
aucaaugaguaagacuu

SEQ ID NO: 4053790 - RNA, 18 nt, Vaccinia virus
aucaauuaaauaauuaau

SEQ ID NO: 4053791 - RNA, 17 nt, Vaccinia virus
aucaauuuaucauauau

SEQ ID NO: 4053792 - RNA, 12 nt, Vaccinia virus
aucaauuucaaa

SEQ ID NO: 4053793 - RNA, 15 nt, Vaccinia virus
aucacaaagaaagcu

SEQ ID NO: 4053794 - RNA, 22 nt, Vaccinia virus
aucacaacaucguuuuugauau

SEQ ID NO: 4053795 - RNA, 21 nt, Vaccinia virus
aucacaacaucuauaaaagua

SEQ ID NO: 4053796 - RNA, 19 nt, Vaccinia virus
aucacaagaaguuagaaag

SEQ ID NO: 4053797 - RNA, 21 nt, Vaccinia virus
aucacgaguuuguaaagcuau

SEQ ID NO: 4053798 - RNA, 19 nt, Vaccinia virus
aucacuaugaaacaaaugu

SEQ ID NO: 4053799 - RNA, 13 nt, Vaccinia virus
aucacuucaauaa

SEQ ID NO: 4053800 - RNA, 18 nt, Vaccinia virus
aucagaauaaaucaauau

SEQ ID NO: 4053801 - RNA, 17 nt, Vaccinia virus
aucagacguuguaaauu

SEQ ID NO: 4053802 - RNA, 13 nt, Vaccinia virus
aucagauuaaaau

SEQ ID NO: 4053803 - RNA, 17 nt, Vaccinia virus
aucaggaauccaaagag

SEQ ID NO: 4053804 - RNA, 15 nt, Vaccinia virus
aucagguaaaacaau

SEQ ID NO: 4053805 - RNA, 12 nt, Vaccinia virus
aucaguaucuuc

SEQ ID NO: 4053806 - RNA, 17 nt, Vaccinia virus
aucaguuuuguauucca

SEQ ID NO: 4053807 - RNA, 16 nt, Vaccinia virus
aucauaauaugagaug

SEQ ID NO: 4053808 - RNA, 13 nt, Vaccinia virus
aucauaauauuaa

SEQ ID NO: 4053809 - RNA, 15 nt, Vaccinia virus
aucauaauuaaauua

SEQ ID NO: 4053810 - RNA, 13 nt, Vaccinia virus
aucauaauuacau

SEQ ID NO: 4053811 - RNA, 14 nt, Vaccinia virus
aucauaccuccauc

SEQ ID NO: 4053812 - RNA, 15 nt, Vaccinia virus
aucauacucauauaa

SEQ ID NO: 4053813 - RNA, 11 nt, Vaccinia virus
aucauacuuac

SEQ ID NO: 4053814 - RNA, 22 nt, Vaccinia virus
aucauaguuuuuacacauagau

SEQ ID NO: 4053815 - RNA, 21 nt, Vaccinia virus
aucauauaucugaagauauac

SEQ ID NO: 4053816 - RNA, 14 nt, Vaccinia virus
aucauauucaacau

SEQ ID NO: 4053817 - RNA, 20 nt, Vaccinia virus
aucauauucaucaucaauau

SEQ ID NO: 4053818 - RNA, 16 nt, Vaccinia virus
ccacugucuaaaugua

SEQ ID NO: 4053819 - RNA, 21 nt, Vaccinia virus
ccagaacauugaugagacaau

SEQ ID NO: 4053820 - RNA, 17 nt, Vaccinia virus
ccagaaugaaaaacucu

SEQ ID NO: 4053821 - RNA, 13 nt, Vaccinia virus
ccagauaauaaca

SEQ ID NO: 4053822 - RNA, 20 nt, Vaccinia virus
ccagaugaaugggugucaca

SEQ ID NO: 4053823 - RNA, 15 nt, Vaccinia virus
ccaguacaucuauca

SEQ ID NO: 4053824 - RNA, 12 nt, Vaccinia virus
ccaguauaacac

SEQ ID NO: 4053825 - RNA, 23 nt, Vaccinia virus
ccaguauggaagaggauuuucua

SEQ ID NO: 4053826 - RNA, 14 nt, Vaccinia virus
ccaguauucucgga

SEQ ID NO: 4053827 - RNA, 19 nt, Vaccinia virus
ccagucuuugguaucgaua

SEQ ID NO: 4053828 - RNA, 13 nt, Vaccinia virus
ccauaauaguuua

SEQ ID NO: 4053829 - RNA, 21 nt, Vaccinia virus
ccauaauggcgcuaucuuuca

SEQ ID NO: 4053830 - RNA, 15 nt, Vaccinia virus
ccauaauuuucucuc

SEQ ID NO: 4053831 - RNA, 14 nt, Vaccinia virus
ccauaucaacaucu

SEQ ID NO: 4053832 - RNA, 22 nt, Vaccinia virus
ccauauguuuggagcaaauauc

SEQ ID NO: 4053833 - RNA, 14 nt, Vaccinia virus
ccaucuaacaaaaa

SEQ ID NO: 4053834 - RNA, 15 nt, Vaccinia virus
ccaucucuauguuuc

SEQ ID NO: 4053835 - RNA, 17 nt, Vaccinia virus
ccaugcacguaaacauu

SEQ ID NO: 4053836 - RNA, 15 nt, Vaccinia virus
ccauuaaucacugau

SEQ ID NO: 4053837 - RNA, 17 nt, Vaccinia virus
ccauuagguuaaaugau

SEQ ID NO: 4053838 - RNA, 17 nt, Vaccinia virus
ccauuuuaacaguuucu

SEQ ID NO: 4053839 - RNA, 21 nt, Vaccinia virus
ccauuuuaugcgauguuuaua

SEQ ID NO: 4053840 - RNA, 14 nt, Vaccinia virus
cccaaauaucuuua

SEQ ID NO: 4053841 - RNA, 15 nt, Vaccinia virus
cccaacugcaaguga

SEQ ID NO: 4053842 - RNA, 15 nt, Vaccinia virus
cccacguuuaaacau

SEQ ID NO: 4053843 - RNA, 14 nt, Vaccinia virus
ccccauauaauuuu

SEQ ID NO: 4053844 - RNA, 22 nt, Vaccinia virus
cccgagagaugcgauacaaaag

SEQ ID NO: 4053845 - RNA, 19 nt, Vaccinia virus
ccgaaagaacugauugcag

SEQ ID NO: 4053846 - RNA, 18 nt, Vaccinia virus
ccgacucauuauuuccca

SEQ ID NO: 4053847 - RNA, 16 nt, Vaccinia virus
ccgaggaaacgaaaga

SEQ ID NO: 4053848 - RNA, 20 nt, Vaccinia virus
ccgaucuaaaaaaaacuauc

SEQ ID NO: 4053849 - RNA, 18 nt, Vaccinia virus
ccgaugauguaagucuua

SEQ ID NO: 4053850 - RNA, 21 nt, Vaccinia virus
ccgguucuuaauauuguauug

SEQ ID NO: 4053851 - RNA, 19 nt, Vaccinia virus
ccguaauguaaguaguuua

SEQ ID NO: 4053852 - RNA, 13 nt, Vaccinia virus
ccguuaaaguaug

SEQ ID NO: 4053853 - RNA, 14 nt, Vaccinia virus
ccguuaaugaaaaa

SEQ ID NO: 4053854 - RNA, 15 nt, Vaccinia virus
ccguuuaauuuccua

SEQ ID NO: 4053855 - RNA, 18 nt, Vaccinia virus
ccuaaauaaauaugugua

SEQ ID NO: 4053856 - RNA, 21 nt, Vaccinia virus
ccuaacgaugauauguuuuca

SEQ ID NO: 4053857 - RNA, 13 nt, Vaccinia virus
ccuaauauaacag

SEQ ID NO: 4053858 - RNA, 17 nt, Vaccinia virus
ccuagucauauguuuaa

SEQ ID NO: 4053859 - RNA, 16 nt, Vaccinia virus
ccuauacuauguuaua

SEQ ID NO: 4053860 - RNA, 14 nt, Vaccinia virus
ccuaucauguauuu

SEQ ID NO: 4053861 - RNA, 17 nt, Vaccinia virus
ccuaugauguguuuaga

SEQ ID NO: 4053862 - RNA, 12 nt, Vaccinia virus
ccucaaauguag

SEQ ID NO: 4053863 - RNA, 15 nt, Vaccinia virus
ccucagguagguuua

SEQ ID NO: 4053864 - RNA, 15 nt, Vaccinia virus
ccuccuacagauuuu

SEQ ID NO: 4053865 - RNA, 18 nt, Vaccinia virus
ccugauuaguauuuucua

SEQ ID NO: 4053866 - RNA, 21 nt, Vaccinia virus
ccugguagacggaauguuuua

SEQ ID NO: 4053867 - RNA, 18 nt, Vaccinia virus
ccuguaguuuuaacugga

SEQ ID NO: 4053868 - RNA, 16 nt, Vaccinia virus
ccuugagaauauccau

SEQ ID NO: 4053869 - RNA, 15 nt, Vaccinia virus
ccuugauuauguuuu

SEQ ID NO: 4053870 - RNA, 14 nt, Vaccinia virus
ccuuguuauccauu

SEQ ID NO: 4053871 - RNA, 18 nt, Vaccinia virus
ccuuucuccuguaaagaa

SEQ ID NO: 4053872 - RNA, 21 nt, Vaccinia virus
ccuuuggugaauccaucucua

SEQ ID NO: 4053873 - RNA, 21 nt, Vaccinia virus
ccuuuguuauuuauuuuauuc

SEQ ID NO: 4053874 - RNA, 19 nt, Vaccinia virus
ccuuuuccucagacaucua

SEQ ID NO: 4053875 - RNA, 18 nt, Vaccinia virus
cgaaaaauauaguuccau

SEQ ID NO: 4053876 - RNA, 15 nt, Vaccinia virus
cgaaaaaugaugaag

SEQ ID NO: 4053877 - RNA, 21 nt, Vaccinia virus
cgaaacauccaucgauacaua

SEQ ID NO: 4053878 - RNA, 19 nt, Vaccinia virus
cgaacaauaucuuauucca

SEQ ID NO: 4053879 - RNA, 19 nt, Vaccinia virus
cgaagaugcuauccaucag

SEQ ID NO: 4053880 - RNA, 19 nt, Vaccinia virus
cgaauaauucuaauaaacu

SEQ ID NO: 4053881 - RNA, 18 nt, Vaccinia virus
cgaauauaucaaaacuac

SEQ ID NO: 4053882 - RNA, 21 nt, Vaccinia virus
cgaauauuagguaaagauauu

SEQ ID NO: 4053883 - RNA, 19 nt, Vaccinia virus
cgaaugccaauguuaauuu

SEQ ID NO: 4053884 - RNA, 21 nt, Vaccinia virus
cgaaugccauagaauaaauau

SEQ ID NO: 4053885 - RNA, 21 nt, Vaccinia virus
cgaauuauuucuuuguuuaua

SEQ ID NO: 4053886 - RNA, 15 nt, Vaccinia virus
cgacaucaagaccca

SEQ ID NO: 4053887 - RNA, 23 nt, Vaccinia virus
cgacuaguucccgcauuaaauaa

SEQ ID NO: 4053888 - RNA, 14 nt, Vaccinia virus
cgacuaucguguuu

SEQ ID NO: 4053889 - RNA, 16 nt, Vaccinia virus
cgacucauuauuuccc

SEQ ID NO: 4053890 - RNA, 14 nt, Vaccinia virus
cgacucgacauuug

SEQ ID NO: 4053891 - RNA, 17 nt, Vaccinia virus
cgacucuacuaguucca

SEQ ID NO: 4053892 - RNA, 21 nt, Vaccinia virus
cgacuuauuuaacucuuuagu

SEQ ID NO: 4053893 - RNA, 16 nt, Vaccinia virus
cgacuuuguuaaugac

SEQ ID NO: 4053894 - RNA, 21 nt, Vaccinia virus
cgagaauguugggauccagag

SEQ ID NO: 4053895 - RNA, 20 nt, Vaccinia virus
cgagagacuuuguagaaaca

SEQ ID NO: 4053896 - RNA, 20 nt, Vaccinia virus
cgaggaugaacucacuucuc

SEQ ID NO: 4053897 - RNA, 18 nt, Vaccinia virus
cgagucaaagcauaauac

SEQ ID NO: 4053898 - RNA, 14 nt, Vaccinia virus
cgaguuuaauaacc

SEQ ID NO: 4053899 - RNA, 16 nt, Vaccinia virus
cgauaauuauaaggcu

SEQ ID NO: 4053900 - RNA, 13 nt, Vaccinia virus
cgauacuagauuu

SEQ ID NO: 4053901 - RNA, 15 nt, Vaccinia virus
cgauagcaauuuguu

SEQ ID NO: 4053902 - RNA, 12 nt, Vaccinia virus
cgauauacuuau

SEQ ID NO: 4053903 - RNA, 15 nt, Vaccinia virus
cgauauguuaucuac

SEQ ID NO: 4053904 - RNA, 19 nt, Vaccinia virus
cgaucaaagaauuaaugau

SEQ ID NO: 4053905 - RNA, 15 nt, Vaccinia virus
cgaucaaaugauauc

SEQ ID NO: 4053906 - RNA, 18 nt, Vaccinia virus
cgauccacaaucaaagaa

SEQ ID NO: 4053907 - RNA, 17 nt, Vaccinia virus
cgaugaguguagaugcu

SEQ ID NO: 4053908 - RNA, 18 nt, Vaccinia virus
cgaugauauguuaaauau

SEQ ID NO: 4053909 - RNA, 15 nt, Vaccinia virus
cgaugauuauauguu

SEQ ID NO: 4053910 - RNA, 15 nt, Vaccinia virus
cgauuaaacuuuaau

SEQ ID NO: 4053911 - RNA, 13 nt, Vaccinia virus
cgauuagauggac

SEQ ID NO: 4053912 - RNA, 13 nt, Vaccinia virus
cgauuuaugugac

SEQ ID NO: 4053913 - RNA, 15 nt, Vaccinia virus
cgauuuuaucaucuu

SEQ ID NO: 4053914 - RNA, 17 nt, Vaccinia virus
cgcauguuuuaaugcau

SEQ ID NO: 4053915 - RNA, 12 nt, Vaccinia virus
cgcauuaaugag

SEQ ID NO: 4053916 - RNA, 18 nt, Vaccinia virus
cgcauuccaaucuuaaac

SEQ ID NO: 4053917 - RNA, 11 nt, Vaccinia virus
cgccauaauac

SEQ ID NO: 4053918 - RNA, 14 nt, Vaccinia virus
cgcccuuguauguu

SEQ ID NO: 4053919 - RNA, 19 nt, Vaccinia virus
cgccuuuauuuccacauua

SEQ ID NO: 4053920 - RNA, 24 nt, Vaccinia virus
cgcguuuugacgacguguacaaaa

SEQ ID NO: 4053921 - RNA, 20 nt, Vaccinia virus
cgcuacaauuauagaacgaa

SEQ ID NO: 4053922 - RNA, 13 nt, Vaccinia virus
cggaaaguauuuc

SEQ ID NO: 4053923 - RNA, 13 nt, Vaccinia virus
cggaacaauaaac

SEQ ID NO: 4053924 - RNA, 20 nt, Vaccinia virus
cggaauugccaacucucaaa

SEQ ID NO: 4053925 - RNA, 22 nt, Vaccinia virus
cggacuuauauagcuuauucca

SEQ ID NO: 4053926 - RNA, 14 nt, Vaccinia virus
cggacuuuaaacag

SEQ ID NO: 4053927 - RNA, 22 nt, Vaccinia virus
cggaguaaguguugagcucccu

SEQ ID NO: 4053928 - RNA, 14 nt, Vaccinia virus
cggauaaaaguuuu

SEQ ID NO: 4053929 - RNA, 16 nt, Vaccinia virus
cggauagcaguauuuc

SEQ ID NO: 4053930 - RNA, 23 nt, Vaccinia virus
cggauaguauucaagucaaagaa

SEQ ID NO: 4053931 - RNA, 13 nt, Vaccinia virus
cggauaguuuaag

SEQ ID NO: 4053932 - RNA, 15 nt, Vaccinia virus
cggauggaugauaua

SEQ ID NO: 4053933 - RNA, 16 nt, Vaccinia virus
cgggaauuaauguccu

SEQ ID NO: 4053934 - RNA, 17 nt, Vaccinia virus
cgggauaaaauaauaca

SEQ ID NO: 4053935 - RNA, 20 nt, Vaccinia virus
cggggaucguguucuacaua

SEQ ID NO: 4053936 - RNA, 18 nt, Vaccinia virus
cggguaccuucacaucuc

SEQ ID NO: 4053937 - RNA, 15 nt, Vaccinia virus
cgguguauuguauuu

SEQ ID NO: 4053938 - RNA, 21 nt, Vaccinia virus
cgguuaauguuguauuucauu

SEQ ID NO: 4053939 - RNA, 23 nt, Vaccinia virus
cgguucgguaacgucuguggaug

SEQ ID NO: 4053940 - RNA, 22 nt, Vaccinia virus
uuguacaucuugacauuuucuu

SEQ ID NO: 4053941 - RNA, 21 nt, Vaccinia virus
uuguacgaauccaauuuuuca

SEQ ID NO: 4053942 - RNA, 16 nt, Vaccinia virus
uuguacgguacguuau

SEQ ID NO: 4053943 - RNA, 18 nt, Vaccinia virus
uuguaucaugacauucaa

SEQ ID NO: 4053944 - RNA, 18 nt, Vaccinia virus
uuguauccauacuguaug

SEQ ID NO: 4053945 - RNA, 17 nt, Vaccinia virus
uugucaaauauugcucg

SEQ ID NO: 4053946 - RNA, 12 nt, Vaccinia virus
uugucuagauaa

SEQ ID NO: 4053947 - RNA, 22 nt, Vaccinia virus
uugugaucggauaguauucaag

SEQ ID NO: 4053948 - RNA, 15 nt, Vaccinia virus
uugugauucuagaau

SEQ ID NO: 4053949 - RNA, 20 nt, Vaccinia virus
uuguuaggaaucuauucaaa

SEQ ID NO: 4053950 - RNA, 16 nt, Vaccinia virus
uuguucagcuguagaa

SEQ ID NO: 4053951 - RNA, 12 nt, Vaccinia virus
uuguucucuuag

SEQ ID NO: 4053952 - RNA, 22 nt, Vaccinia virus
uuguugauggaucugugaugca

SEQ ID NO: 4053953 - RNA, 20 nt, Vaccinia virus
uuguuuaaccacugcaugau

SEQ ID NO: 4053954 - RNA, 22 nt, Vaccinia virus
uuguuugguuagcauuauuaaa

SEQ ID NO: 4053955 - RNA, 18 nt, Vaccinia virus
uuuaaaaaaaaaauacuu

SEQ ID NO: 4053956 - RNA, 23 nt, Vaccinia virus
uuuaaaaaaaaaauacuuauucu

SEQ ID NO: 4053957 - RNA, 19 nt, Vaccinia virus
uuuaaacaaaaaaguuauc

SEQ ID NO: 4053958 - RNA, 19 nt, Vaccinia virus
uuuaaacagagaaaucagu

SEQ ID NO: 4053959 - RNA, 17 nt, Vaccinia virus
uuuaaaguaaacuucgu

SEQ ID NO: 4053960 - RNA, 23 nt, Vaccinia virus
uuuaaauauuauauaaacauuug

SEQ ID NO: 4053961 - RNA, 17 nt, Vaccinia virus
uuuaacuagucuucucu

SEQ ID NO: 4053962 - RNA, 17 nt, Vaccinia virus
uuuaacuuugaaauugu

SEQ ID NO: 4053963 - RNA, 11 nt, Vaccinia virus
uuuaacuuuuc

SEQ ID NO: 4053964 - RNA, 23 nt, Vaccinia virus
uuuaaggaggcuuccuuuucuaa

SEQ ID NO: 4053965 - RNA, 13 nt, Vaccinia virus
uuuaauaaacuga

SEQ ID NO: 4053966 - RNA, 23 nt, Vaccinia virus
uuuaauaugaaaaaaauaaacau

SEQ ID NO: 4053967 - RNA, 13 nt, Vaccinia virus
uuuaauauuucga

SEQ ID NO: 4053968 - RNA, 18 nt, Vaccinia virus
uuuaaucccuuuuucaga

SEQ ID NO: 4053969 - RNA, 22 nt, Vaccinia virus
uuuaaugauacgauacuagauu

SEQ ID NO: 4053970 - RNA, 18 nt, Vaccinia virus
uuuacacaugguuauuuu

SEQ ID NO: 4053971 - RNA, 16 nt, Vaccinia virus
uuuacagaucuaguau

SEQ ID NO: 4053972 - RNA, 13 nt, Vaccinia virus
uuuacaguuucug

SEQ ID NO: 4053973 - RNA, 12 nt, Vaccinia virus
uuuaccacaaag

SEQ ID NO: 4053974 - RNA, 19 nt, Vaccinia virus
uuuacccacuauaaaauaa

SEQ ID NO: 4053975 - RNA, 22 nt, Vaccinia virus
uuccuguuccguuaacaucucu

SEQ ID NO: 4053976 - RNA, 14 nt, Vaccinia virus
uuccuucuuauucu

SEQ ID NO: 4053977 - RNA, 13 nt, Vaccinia virus
uucgaaaauacua

SEQ ID NO: 4053978 - RNA, 19 nt, Vaccinia virus
uucguaggcacacaaucua

SEQ ID NO: 4053979 - RNA, 19 nt, Vaccinia virus
uucgucuucccaaaauguu

SEQ ID NO: 4053980 - RNA, 12 nt, Vaccinia virus
uucuaaaauagu

SEQ ID NO: 4053981 - RNA, 21 nt, Vaccinia virus
uucuacaauuacguaaugaag

SEQ ID NO: 4053982 - RNA, 15 nt, Vaccinia virus
uucuacuacuucauu

SEQ ID NO: 4053983 - RNA, 23 nt, Vaccinia virus
uucuagaaaacgaaaacauccua

SEQ ID NO: 4053984 - RNA, 20 nt, Vaccinia virus
uucuagaacuauaaaaacag

SEQ ID NO: 4053985 - RNA, 19 nt, Vaccinia virus
uucuagaauaaguuucaua

SEQ ID NO: 4053986 - RNA, 23 nt, Vaccinia virus
uucuagcucccggauugaaaaca

SEQ ID NO: 4053987 - RNA, 23 nt, Vaccinia virus
uucuauaagguuucuuaaucagu

SEQ ID NO: 4053988 - RNA, 16 nt, Vaccinia virus
uucuauaauaaacuuu

SEQ ID NO: 4053989 - RNA, 21 nt, Vaccinia virus
uucuauccaaggacaaggaug

SEQ ID NO: 4053990 - RNA, 22 nt, Vaccinia virus
uucuaugaaaggagagaaugua

SEQ ID NO: 4053991 - RNA, 23 nt, Vaccinia virus
uucuaugaaaggagagaauguau

SEQ ID NO: 4053992 - RNA, 17 nt, Vaccinia virus
uucuauggcguacaaag

SEQ ID NO: 4053993 - RNA, 14 nt, Vaccinia virus
uucuauuucgaauu

SEQ ID NO: 4053994 - RNA, 20 nt, Vaccinia virus
uucucaucuauguaaucaua

SEQ ID NO: 4053995 - RNA, 14 nt, Vaccinia virus
uucuccuggaugau

SEQ ID NO: 4053996 - RNA, 15 nt, Vaccinia virus
uucucgaaaaaauua

SEQ ID NO: 4053997 - RNA, 18 nt, Vaccinia virus
uucucguauacucugccc

SEQ ID NO: 4053998 - RNA, 16 nt, Vaccinia virus
uucucucaacaucuuc

SEQ ID NO: 4053999 - RNA, 14 nt, Vaccinia virus
uucucugaauauag

SEQ ID NO: 4054000 - RNA, 13 nt, Vaccinia virus
uucugaauuauuu

SEQ ID NO: 4054001 - RNA, 22 nt, Vaccinia virus
uucugacaauauuuaguuuauu

SEQ ID NO: 4054002 - RNA, 18 nt, Vaccinia virus
uucugcauuacaaagaag

SEQ ID NO: 4054003 - RNA, 19 nt, Vaccinia virus
uucuggaacauuaaaugua

SEQ ID NO: 4054004 - RNA, 12 nt, Vaccinia virus
uucuuaagaaau

SEQ ID NO: 4054005 - RNA, 13 nt, Vaccinia virus
uucuuaauaaucg

SEQ ID NO: 4054006 - RNA, 12 nt, Vaccinia virus
uucuuacaauua

SEQ ID NO: 4054007 - RNA, 16 nt, Vaccinia virus
uucuuaugaaacuugg

SEQ ID NO: 4054008 - RNA, 16 nt, Vaccinia virus
uucuucagaauaauag

SEQ ID NO: 4054009 - RNA, 22 nt, Vaccinia virus
uucuugacugucgcuaauaucu

SEQ ID NO: 4054010 - RNA, 23 nt, Vaccinia virus
uucuugauagagaugagaugcuc

SEQ ID NO: 4054011 - RNA, 20 nt, Vaccinia virus
uucuuggauccuaacaauga

SEQ ID NO: 4054012 - RNA, 13 nt, Vaccinia virus
uucuuguguaauu

SEQ ID NO: 4054013 - RNA, 13 nt, Vaccinia virus
uucuuuuaucaua

SEQ ID NO: 4054014 - RNA, 15 nt, Vaccinia virus
uugaaaacuauuucu

SEQ ID NO: 4054015 - RNA, 20 nt, Vaccinia virus
uugaaacuaaacuuauuuag

SEQ ID NO: 4054016 - RNA, 14 nt, Vaccinia virus
uugaaacuaugucu

SEQ ID NO: 4054017 - RNA, 12 nt, Vaccinia virus
uugaaacuuuuu

SEQ ID NO: 4054018 - RNA, 13 nt, Vaccinia virus
uugaaauguguaa

SEQ ID NO: 4054019 - RNA, 14 nt, Vaccinia virus
uugaacauuauuga

SEQ ID NO: 4054020 - RNA, 15 nt, Vaccinia virus
uugaaccauguaugc

SEQ ID NO: 4054021 - RNA, 18 nt, Vaccinia virus
uugaaccggaagaauuga

SEQ ID NO: 4054022 - RNA, 13 nt, Vaccinia virus
uugaaugucauga

SEQ ID NO: 4054023 - RNA, 23 nt, Vaccinia virus
uugacgcacccgcgucuguuuuu

SEQ ID NO: 4054024 - RNA, 23 nt, Vaccinia virus
uugaggcagcaaauacugaacca

SEQ ID NO: 4054025 - RNA, 23 nt, Vaccinia virus
uugauaauaucuauauaugaucu

SEQ ID NO: 4054026 - RNA, 17 nt, Vaccinia virus
uugauaauuacgcguau

SEQ ID NO: 4054027 - RNA, 17 nt, Vaccinia virus
uugauaggaucuauaau

SEQ ID NO: 4054028 - RNA, 22 nt, Vaccinia virus
uugauaggaucuauaauguagu

SEQ ID NO: 4054029 - RNA, 20 nt, Vaccinia virus
uugauaguauaccaacuaua

SEQ ID NO: 4054030 - RNA, 21 nt, Vaccinia virus
uugauauaucaguuaaugcgu

SEQ ID NO: 4054031 - RNA, 16 nt, Vaccinia virus
uugauaucacauauuu

SEQ ID NO: 4054032 - RNA, 17 nt, Vaccinia virus
uugauaucuuuagauau

SEQ ID NO: 4054033 - RNA, 18 nt, Vaccinia virus
uugaugaaguucgaugau

SEQ ID NO: 4054034 - RNA, 14 nt, Vaccinia virus
uugaugaauuauua

SEQ ID NO: 4054035 - RNA, 13 nt, Vaccinia virus
uugauuacucuuu

SEQ ID NO: 4054036 - RNA, 22 nt, Vaccinia virus
uugauucaaucuaucuagcaau

SEQ ID NO: 4054037 - RNA, 18 nt, Vaccinia virus
uugauuuuaaaauuaaaa

SEQ ID NO: 4054038 - RNA, 13 nt, Vaccinia virus
uugcaauugguaa

SEQ ID NO: 4054039 - RNA, 13 nt, Vaccinia virus
uugcaucaguucu

SEQ ID NO: 4054040 - RNA, 14 nt, Vaccinia virus
uugcaucuacauca

SEQ ID NO: 4054041 - RNA, 14 nt, Vaccinia virus
uugccauuaguuuu

SEQ ID NO: 4054042 - RNA, 13 nt, Vaccinia virus
uugccguaaaucc

SEQ ID NO: 4054043 - RNA, 16 nt, Vaccinia virus
uugcgauauacauaaa

SEQ ID NO: 4054044 - RNA, 12 nt, Vaccinia virus
uugcguauacau

SEQ ID NO: 4054045 - RNA, 15 nt, Vaccinia virus
uugcuggauucacaa

SEQ ID NO: 4054046 - RNA, 22 nt, Vaccinia virus
uugcugucgaagaggcaaaaga

SEQ ID NO: 4054047 - RNA, 15 nt, Vaccinia virus
uuggaacuaguauuu

SEQ ID NO: 4054048 - RNA, 18 nt, Vaccinia virus
uuggacaaaucuggaaaa

SEQ ID NO: 4054049 - RNA, 23 nt, Vaccinia virus
uuggaccaccgacuguaacauug

SEQ ID NO: 4054050 - RNA, 14 nt, Vaccinia virus
uuggcaaaaacgga

SEQ ID NO: 4054051 - RNA, 13 nt, Vaccinia virus
uuggcaauuaaaa

SEQ ID NO: 4054052 - RNA, 18 nt, Vaccinia virus
uuggcacgaacaaaagga

SEQ ID NO: 4054053 - RNA, 18 nt, Vaccinia virus
uuggcaguacucauuaau

SEQ ID NO: 4054054 - RNA, 21 nt, Vaccinia virus
uugguaauauggauacuaauu

SEQ ID NO: 4054055 - RNA, 21 nt, Vaccinia virus
uugguauuacuauauaguaua

SEQ ID NO: 4054056 - RNA, 15 nt, Vaccinia virus
uuggucgauguaaaa

SEQ ID NO: 4054057 - RNA, 22 nt, Vaccinia virus
uugguuguggaucuucuacaau

SEQ ID NO: 4054058 - RNA, 14 nt, Vaccinia virus
uuguaaauuauuuu

SEQ ID NO: 4054059 - RNA, 14 nt, Vaccinia virus
uuguaacuaguuuu

SEQ ID NO: 4054060 - RNA, 15 nt, Vaccinia virus
uuguaauaucuuaaa

SEQ ID NO: 4054061 - RNA, 15 nt, Vaccinia virus
uuguaauuaaauuuu

SEQ ID NO: 4054062 - RNA, 23 nt, Vaccinia virus
ggugccgcagcaagcauacagac

SEQ ID NO: 4054063 - RNA, 22 nt, Vaccinia virus
gguggcugauuaggcuguaguc

SEQ ID NO: 4054064 - RNA, 17 nt, Vaccinia virus
gguguaggaguacauac

SEQ ID NO: 4054065 - RNA, 20 nt, Vaccinia virus
gguuaauguuguauuucauu

SEQ ID NO: 4054066 - RNA, 22 nt, Vaccinia virus
gguugccgcaaauagauagaac

SEQ ID NO: 4054067 - RNA, 16 nt, Vaccinia virus
gguuuuauuuuauccu

SEQ ID NO: 4054068 - RNA, 20 nt, Vaccinia virus
guaaaaaaaccuauaaugau

SEQ ID NO: 4054069 - RNA, 14 nt, Vaccinia virus
guaaaaaaauuaga

SEQ ID NO: 4054070 - RNA, 15 nt, Vaccinia virus
guaaaaaauauguua

SEQ ID NO: 4054071 - RNA, 13 nt, Vaccinia virus
guaaaaaauguac

SEQ ID NO: 4054072 - RNA, 15 nt, Vaccinia virus
guaaaacauaaagga

SEQ ID NO: 4054073 - RNA, 17 nt, Vaccinia virus
guaaaagucaaauuaga

SEQ ID NO: 4054074 - RNA, 21 nt, Vaccinia virus
guaaaauguugaugauaucua

SEQ ID NO: 4054075 - RNA, 12 nt, Vaccinia virus
guaaacauauca

SEQ ID NO: 4054076 - RNA, 22 nt, Vaccinia virus
guaaaccgauaguguauaaaga

SEQ ID NO: 4054077 - RNA, 18 nt, Vaccinia virus
guaaaccgauuaaacguc

SEQ ID NO: 4054078 - RNA, 12 nt, Vaccinia virus
guaaagaaggag

SEQ ID NO: 4054079 - RNA, 15 nt, Vaccinia virus
guaaagauauuucuc

SEQ ID NO: 4054080 - RNA, 13 nt, Vaccinia virus
guaaauacauuga

SEQ ID NO: 4054081 - RNA, 22 nt, Vaccinia virus
guaaauauucuaaauuaaccaa

SEQ ID NO: 4054082 - RNA, 15 nt, Vaccinia virus
guaaaucacauaucu

SEQ ID NO: 4054083 - RNA, 14 nt, Vaccinia virus
guaaauuaguucau

SEQ ID NO: 4054084 - RNA, 16 nt, Vaccinia virus
guaacacaauaaagga

SEQ ID NO: 4054085 - RNA, 19 nt, Vaccinia virus
guaacauccucaugauuua

SEQ ID NO: 4054086 - RNA, 18 nt, Vaccinia virus
guaaccaaauacauauua

SEQ ID NO: 4054087 - RNA, 22 nt, Vaccinia virus
guaaccagaauuguaaaauuag

SEQ ID NO: 4054088 - RNA, 15 nt, Vaccinia virus
guaaccgaaucuucc

SEQ ID NO: 4054089 - RNA, 20 nt, Vaccinia virus
guaacgcguggaaaaagcuc

SEQ ID NO: 4054090 - RNA, 17 nt, Vaccinia virus
guaacuguaaauuucuc

SEQ ID NO: 4054091 - RNA, 23 nt, Vaccinia virus
guaagaacucucuucauuacuau

SEQ ID NO: 4054092 - RNA, 22 nt, Vaccinia virus
guaaguaucuuauguauauguu

SEQ ID NO: 4054093 - RNA, 17 nt, Vaccinia virus
guaaguuuaaaaaagac

SEQ ID NO: 4054094 - RNA, 18 nt, Vaccinia virus
guaauaaauaugauuuug

SEQ ID NO: 4054095 - RNA, 20 nt, Vaccinia virus
guaauaaucuugauuguaca

SEQ ID NO: 4054096 - RNA, 16 nt, Vaccinia virus
guaauaucuuaaauaa

SEQ ID NO: 4054097 - RNA, 18 nt, Vaccinia virus
guaauauggaauaguguu

SEQ ID NO: 4054098 - RNA, 15 nt, Vaccinia virus
guaauauucuaaaac

SEQ ID NO: 4054099 - RNA, 10 nt, Vaccinia virus
guaauguuua

SEQ ID NO: 4054100 - RNA, 17 nt, Vaccinia virus
guaauuaaaauaaaaag

SEQ ID NO: 4054101 - RNA, 13 nt, Vaccinia virus
guaauuaaauguu

SEQ ID NO: 4054102 - RNA, 15 nt, Vaccinia virus
guaauuaauuaugau

SEQ ID NO: 4054103 - RNA, 13 nt, Vaccinia virus
guaauuacuuauc

SEQ ID NO: 4054104 - RNA, 19 nt, Vaccinia virus
guaauucgcgugauaaaau

SEQ ID NO: 4054105 - RNA, 20 nt, Vaccinia virus
guacacaauaucauaaacaa

SEQ ID NO: 4054106 - RNA, 17 nt, Vaccinia virus
guacauuaauaaaugaa

SEQ ID NO: 4054107 - RNA, 17 nt, Vaccinia virus
guacauuauuacauaga

SEQ ID NO: 4054108 - RNA, 20 nt, Vaccinia virus
guacauucugcaauauuguu

SEQ ID NO: 4054109 - RNA, 22 nt, Vaccinia virus
guacauuuuccagauuaacaga

SEQ ID NO: 4054110 - RNA, 13 nt, Vaccinia virus
guaccaucuuauu

SEQ ID NO: 4054111 - RNA, 23 nt, Vaccinia virus
guacccuggauacgaaauaaauu

SEQ ID NO: 4054112 - RNA, 15 nt, Vaccinia virus
guacgguaccuuugu

SEQ ID NO: 4054113 - RNA, 22 nt, Vaccinia virus
guacgugucaaagguauaugau

SEQ ID NO: 4054114 - RNA, 22 nt, Vaccinia virus
guacuaaauucgauaucuuuuu

SEQ ID NO: 4054115 - RNA, 13 nt, Vaccinia virus
guacuauguguua

SEQ ID NO: 4054116 - RNA, 13 nt, Vaccinia virus
guacuuaaugaag

SEQ ID NO: 4054117 - RNA, 23 nt, Vaccinia virus
guacuuguauguguuauaaauau

SEQ ID NO: 4054118 - RNA, 17 nt, Vaccinia virus
guacuuugaugauuuuu

SEQ ID NO: 4054119 - RNA, 17 nt, Vaccinia virus
guagaaaauauauucua

SEQ ID NO: 4054120 - RNA, 22 nt, Vaccinia virus
guagaacaacgauuuaaucaua

SEQ ID NO: 4054121 - RNA, 16 nt, Vaccinia virus
guagaaucauauugcu

SEQ ID NO: 4054122 - RNA, 19 nt, Vaccinia virus
guagacuuacuaaagucaa

SEQ ID NO: 4054123 - RNA, 13 nt, Vaccinia virus
guagauaaucauu

SEQ ID NO: 4054124 - RNA, 18 nt, Vaccinia virus
guagaucacguuaaauca

SEQ ID NO: 4054125 - RNA, 21 nt, Vaccinia virus
guagaucuuaucuauccagau

SEQ ID NO: 4054126 - RNA, 20 nt, Vaccinia virus
guagcaagauuuuuaaacaa

SEQ ID NO: 4054127 - RNA, 20 nt, Vaccinia virus
guagugcaggcuuaaagcaa

SEQ ID NO: 4054128 - RNA, 16 nt, Vaccinia virus
guauaaaaauuaaaca

SEQ ID NO: 4054129 - RNA, 19 nt, Vaccinia virus
guauaaauuuuagaaauaa

SEQ ID NO: 4054130 - RNA, 19 nt, Vaccinia virus
guauaacacacaugucuua

SEQ ID NO: 4054131 - RNA, 17 nt, Vaccinia virus
guauaauauuuaaacaa

SEQ ID NO: 4054132 - RNA, 16 nt, Vaccinia virus
guauacacaaaaagaa

SEQ ID NO: 4054133 - RNA, 19 nt, Vaccinia virus
guauacaccaacaguauga

SEQ ID NO: 4054134 - RNA, 16 nt, Vaccinia virus
guauacgcagaaaaga

SEQ ID NO: 4054135 - RNA, 14 nt, Vaccinia virus
guauacucuauucg

SEQ ID NO: 4054136 - RNA, 13 nt, Vaccinia virus
guauacucugccc

SEQ ID NO: 4054137 - RNA, 18 nt, Vaccinia virus
guauauauuguuucucuc

SEQ ID NO: 4054138 - RNA, 17 nt, Vaccinia virus
guauauguaagauguuu

SEQ ID NO: 4054139 - RNA, 15 nt, Vaccinia virus
guaucauuuaaacau

SEQ ID NO: 4054140 - RNA, 14 nt, Vaccinia virus
guauccacaaauag

SEQ ID NO: 4054141 - RNA, 19 nt, Vaccinia virus
guaucgacgguaaauggaa

SEQ ID NO: 4054142 - RNA, 22 nt, Vaccinia virus
guaucgcgauuaguguauacac

SEQ ID NO: 4054143 - RNA, 19 nt, Vaccinia virus
guaucuaauauagauuuua

SEQ ID NO: 4054144 - RNA, 20 nt, Vaccinia virus
guaucuaauuuccugauuua

SEQ ID NO: 4054145 - RNA, 22 nt, Vaccinia virus
guaucucuaccuaugauuaaau

SEQ ID NO: 4054146 - RNA, 18 nt, Vaccinia virus
guaugaccguuaacuaca

SEQ ID NO: 4054147 - RNA, 15 nt, Vaccinia virus
guaugcaauauauca

SEQ ID NO: 4054148 - RNA, 18 nt, Vaccinia virus
guaugccauuuacuuaau

SEQ ID NO: 4054149 - RNA, 17 nt, Vaccinia virus
guauguauuacgaagaa

SEQ ID NO: 4054150 - RNA, 18 nt, Vaccinia virus
guaugucccaauauuaau

SEQ ID NO: 4054151 - RNA, 13 nt, Vaccinia virus
guauguuugugaa

SEQ ID NO: 4054152 - RNA, 14 nt, Vaccinia virus
guauuaguaggaaa

SEQ ID NO: 4054153 - RNA, 14 nt, Vaccinia virus
guauuaugaugaau

SEQ ID NO: 4054154 - RNA, 14 nt, Vaccinia virus
guauucaacaugcu

SEQ ID NO: 4054155 - RNA, 20 nt, Vaccinia virus
guauucaguagccaauccua

SEQ ID NO: 4054156 - RNA, 23 nt, Vaccinia virus
guauucucagaguugacgaauau

SEQ ID NO: 4054157 - RNA, 13 nt, Vaccinia virus
guauugguaauau

SEQ ID NO: 4054158 - RNA, 13 nt, Vaccinia virus
guauuguauauac

SEQ ID NO: 4054159 - RNA, 16 nt, Vaccinia virus
guauuucauuacccaa

SEQ ID NO: 4054160 - RNA, 21 nt, Vaccinia virus
guauuucucuacaauauuaau

SEQ ID NO: 4054161 - RNA, 20 nt, Vaccinia virus
guauuugagaaauauguaua

SEQ ID NO: 4054162 - RNA, 13 nt, Vaccinia virus
guauuugauuuug

SEQ ID NO: 4054163 - RNA, 22 nt, Vaccinia virus
gucaaagguauaugauaaacua

SEQ ID NO: 4054164 - RNA, 16 nt, Vaccinia virus
gucaaaugucuauucu

SEQ ID NO: 4054165 - RNA, 23 nt, Vaccinia virus
gucaaauuccaaauuuuuuucau

SEQ ID NO: 4054166 - RNA, 22 nt, Vaccinia virus
gucaacaaguuggaugauauua

SEQ ID NO: 4054167 - RNA, 14 nt, Vaccinia virus
gucaaucaaagaga

SEQ ID NO: 4054168 - RNA, 19 nt, Vaccinia virus
gucaauuacaaauaaagcg

SEQ ID NO: 4054169 - RNA, 15 nt, Vaccinia virus
gucaauugauucuua

SEQ ID NO: 4054170 - RNA, 19 nt, Vaccinia virus
gucacauacacuagugaua

SEQ ID NO: 4054171 - RNA, 19 nt, Vaccinia virus
gucacuacguaauaaaagu

SEQ ID NO: 4054172 - RNA, 18 nt, Vaccinia virus
gucagcggcaucuaaauu

SEQ ID NO: 4054173 - RNA, 16 nt, Vaccinia virus
gucaguaguauacauc

SEQ ID NO: 4054174 - RNA, 14 nt, Vaccinia virus
gucauagaugaaau

SEQ ID NO: 4054175 - RNA, 23 nt, Vaccinia virus
gucauauagucgagcaagagaau

SEQ ID NO: 4054176 - RNA, 15 nt, Vaccinia virus
gucauuuguauuuua

SEQ ID NO: 4054177 - RNA, 18 nt, Vaccinia virus
guccaauaugaucaugug

SEQ ID NO: 4054178 - RNA, 13 nt, Vaccinia virus
guccaauauuuua

SEQ ID NO: 4054179 - RNA, 23 nt, Vaccinia virus
guccauuuaaaguacagauuuua

SEQ ID NO: 4054180 - RNA, 13 nt, Vaccinia virus
guccauuuucugu

SEQ ID NO: 4054181 - RNA, 15 nt, Vaccinia virus
guccgaauguauggc

SEQ ID NO: 4054182 - RNA, 13 nt, Vaccinia virus
guccgcuuuagua

SEQ ID NO: 4054183 - RNA, 13 nt, Vaccinia virus
guccuuaauaucu

SEQ ID NO: 4054184 - RNA, 18 nt, Vaccinia virus
gucgacguuucucaaagu

SEQ ID NO: 4054185 - RNA, 22 nt, Vaccinia virus
gucgagaacguuaaaauaaucg

SEQ ID NO: 4054186 - RNA, 21 nt, Vaccinia virus
gucgcuauaauucauauuaau

SEQ ID NO: 4054187 - RNA, 23 nt, Vaccinia virus
gucgcuucgcgaauuuagaaaau

SEQ ID NO: 4054188 - RNA, 13 nt, Vaccinia virus
gcaucugauuuuu

SEQ ID NO: 4054189 - RNA, 21 nt, Vaccinia virus
gcaucuuauuagaauauuaac

SEQ ID NO: 4054190 - RNA, 13 nt, Vaccinia virus
gcaucuuguuaac

SEQ ID NO: 4054191 - RNA, 19 nt, Vaccinia virus
gcaugcgugguagauguuu

SEQ ID NO: 4054192 - RNA, 19 nt, Vaccinia virus
gcauucuaccguuguuaaa

SEQ ID NO: 4054193 - RNA, 19 nt, Vaccinia virus
gcauugauaaugucuauau

SEQ ID NO: 4054194 - RNA, 18 nt, Vaccinia virus
gccaaaaugauagauauu

SEQ ID NO: 4054195 - RNA, 12 nt, Vaccinia virus
gccaaaguuaua

SEQ ID NO: 4054196 - RNA, 19 nt, Vaccinia virus
gccaaauguucaauaucua

SEQ ID NO: 4054197 - RNA, 21 nt, Vaccinia virus
gccaacucucaaaaugcugau

SEQ ID NO: 4054198 - RNA, 23 nt, Vaccinia virus
gccaauugauaguagauaaugag

SEQ ID NO: 4054199 - RNA, 16 nt, Vaccinia virus
gccacauuuaguuaac

SEQ ID NO: 4054200 - RNA, 13 nt, Vaccinia virus
gccacgcuacuaa

SEQ ID NO: 4054201 - RNA, 14 nt, Vaccinia virus
gccagaucuucuuc

SEQ ID NO: 4054202 - RNA, 19 nt, Vaccinia virus
gccaguccuccuacagauu

SEQ ID NO: 4054203 - RNA, 16 nt, Vaccinia virus
gccauggacuaagaua

SEQ ID NO: 4054204 - RNA, 19 nt, Vaccinia virus
gccauuaguuuucaugaaa

SEQ ID NO: 4054205 - RNA, 22 nt, Vaccinia virus
gccccaggaucuccaacaaauu

SEQ ID NO: 4054206 - RNA, 13 nt, Vaccinia virus
gccucuagauauc

SEQ ID NO: 4054207 - RNA, 14 nt, Vaccinia virus
gccuguucauaaau

SEQ ID NO: 4054208 - RNA, 17 nt, Vaccinia virus
gccuuauauagcacuuu

SEQ ID NO: 4054209 - RNA, 17 nt, Vaccinia virus
gcgaaccgauuaaacau

SEQ ID NO: 4054210 - RNA, 20 nt, Vaccinia virus
gcgaacugaaggaaucaggu

SEQ ID NO: 4054211 - RNA, 17 nt, Vaccinia virus
gcgaguguuacaacauc

SEQ ID NO: 4054212 - RNA, 20 nt, Vaccinia virus
gcgauaaacggaauaauaau

SEQ ID NO: 4054213 - RNA, 22 nt, Vaccinia virus
gcgauagugagagugauaauau

SEQ ID NO: 4054214 - RNA, 20 nt, Vaccinia virus
gcgauauacauaaacugauc

SEQ ID NO: 4054215 - RNA, 13 nt, Vaccinia virus
gcgccaaauugug

SEQ ID NO: 4054216 - RNA, 13 nt, Vaccinia virus
gcgcuauaguauu

SEQ ID NO: 4054217 - RNA, 13 nt, Vaccinia virus
gcggacauuuucu

SEQ ID NO: 4054218 - RNA, 15 nt, Vaccinia virus
gcggcuauagaaaag

SEQ ID NO: 4054219 - RNA, 22 nt, Vaccinia virus
gcgguuaaaauaguuuauaaca

SEQ ID NO: 4054220 - RNA, 23 nt, Vaccinia virus
gcguguuuuaaauccuuaauaua

SEQ ID NO: 4054221 - RNA, 13 nt, Vaccinia virus
gcguuaauguuug

SEQ ID NO: 4054222 - RNA, 19 nt, Vaccinia virus
gcguuuuaugaaugaugau

SEQ ID NO: 4054223 - RNA, 13 nt, Vaccinia virus
gcuaaaauaccua

SEQ ID NO: 4054224 - RNA, 22 nt, Vaccinia virus
gcuaaagcuaucuauacuauca

SEQ ID NO: 4054225 - RNA, 18 nt, Vaccinia virus
gcuaaaucguauauguua

SEQ ID NO: 4054226 - RNA, 22 nt, Vaccinia virus
gcuaacacguaauuauaauaau

SEQ ID NO: 4054227 - RNA, 20 nt, Vaccinia virus
gcuaacauacgagacauguu

SEQ ID NO: 4054228 - RNA, 21 nt, Vaccinia virus
gcuaacgaugagauucaucgu

SEQ ID NO: 4054229 - RNA, 17 nt, Vaccinia virus
gcuaaguaauaaaucaa

SEQ ID NO: 4054230 - RNA, 14 nt, Vaccinia virus
gcuaauauauugau

SEQ ID NO: 4054231 - RNA, 15 nt, Vaccinia virus
gcuacaaaauauguu

SEQ ID NO: 4054232 - RNA, 17 nt, Vaccinia virus
gcuacauaauccagcua

SEQ ID NO: 4054233 - RNA, 18 nt, Vaccinia virus
gcuacugcugauaaugau

SEQ ID NO: 4054234 - RNA, 16 nt, Vaccinia virus
gcuagaauuagaaaag

SEQ ID NO: 4054235 - RNA, 17 nt, Vaccinia virus
gcuaguacucuuaagag

SEQ ID NO: 4054236 - RNA, 16 nt, Vaccinia virus
gcuauaauauauucua

SEQ ID NO: 4054237 - RNA, 20 nt, Vaccinia virus
gcuauguauauauauuucuu

SEQ ID NO: 4054238 - RNA, 17 nt, Vaccinia virus
gcuauguuuaauacuua

SEQ ID NO: 4054239 - RNA, 22 nt, Vaccinia virus
gcuauuaaucauccaaagucaa

SEQ ID NO: 4054240 - RNA, 13 nt, Vaccinia virus
gcuauuacuuauu

SEQ ID NO: 4054241 - RNA, 18 nt, Vaccinia virus
gcuauuagagguaaugau

SEQ ID NO: 4054242 - RNA, 14 nt, Vaccinia virus
gcucaguaaaugua

SEQ ID NO: 4054243 - RNA, 17 nt, Vaccinia virus
gcucaguaauggauauu

SEQ ID NO: 4054244 - RNA, 15 nt, Vaccinia virus
gcuccucucucaggc

SEQ ID NO: 4054245 - RNA, 20 nt, Vaccinia virus
gcucgcaucaaucuagcauu

SEQ ID NO: 4054246 - RNA, 21 nt, Vaccinia virus
gcucuuuguccauuauuucua

SEQ ID NO: 4054247 - RNA, 12 nt, Vaccinia virus
gcugaaaugaga

SEQ ID NO: 4054248 - RNA, 23 nt, Vaccinia virus
gcugaucuucaucuauaaaucaa

SEQ ID NO: 4054249 - RNA, 17 nt, Vaccinia virus
gcugguaaaguaaauca

SEQ ID NO: 4054250 - RNA, 21 nt, Vaccinia virus
gcuguagaaccagcugcucca

SEQ ID NO: 4054251 - RNA, 15 nt, Vaccinia virus
gcuguugaaucuuua

SEQ ID NO: 4054252 - RNA, 13 nt, Vaccinia virus
gcuuacuacuaac

SEQ ID NO: 4054253 - RNA, 17 nt, Vaccinia virus
gcuucagcggauccugu

SEQ ID NO: 4054254 - RNA, 22 nt, Vaccinia virus
gcuuccaggcuaucaaauggau

SEQ ID NO: 4054255 - RNA, 21 nt, Vaccinia virus
gcuucuaucuuguuuagauuu

SEQ ID NO: 4054256 - RNA, 14 nt, Vaccinia virus
gcuugaaaauggac

SEQ ID NO: 4054257 - RNA, 14 nt, Vaccinia virus
gcuugauauuaaag

SEQ ID NO: 4054258 - RNA, 22 nt, Vaccinia virus
ggaaaacuuuaauaacaaagaa

SEQ ID NO: 4054259 - RNA, 23 nt, Vaccinia virus
ggaaaagaauuuaccagauaucu

SEQ ID NO: 4054260 - RNA, 23 nt, Vaccinia virus
ggaaacaucucuucuaguuucac

SEQ ID NO: 4054261 - RNA, 11 nt, Vaccinia virus
ggaaacuauaa

SEQ ID NO: 4054262 - RNA, 17 nt, Vaccinia virus
ggaaacuuuuguuuugu

SEQ ID NO: 4054263 - RNA, 15 nt, Vaccinia virus
ggaacauuaaaugua

SEQ ID NO: 4054264 - RNA, 20 nt, Vaccinia virus
ggaaguagaaucauaaagaa

SEQ ID NO: 4054265 - RNA, 15 nt, Vaccinia virus
ggaauaaacaugucu

SEQ ID NO: 4054266 - RNA, 11 nt, Vaccinia virus
ggaauauacaa

SEQ ID NO: 4054267 - RNA, 19 nt, Vaccinia virus
ggaaucgauuuuguaauau

SEQ ID NO: 4054268 - RNA, 17 nt, Vaccinia virus
ggaaugacauacauacu

SEQ ID NO: 4054269 - RNA, 16 nt, Vaccinia virus
ggacagcuauauucuc

SEQ ID NO: 4054270 - RNA, 17 nt, Vaccinia virus
ggacuauuugacuuugu

SEQ ID NO: 4054271 - RNA, 22 nt, Vaccinia virus
ggagaguauccucuaugaagaa

SEQ ID NO: 4054272 - RNA, 19 nt, Vaccinia virus
ggagaucauuaaauguuuc

SEQ ID NO: 4054273 - RNA, 19 nt, Vaccinia virus
ggaguaaguagucuauuaa

SEQ ID NO: 4054274 - RNA, 16 nt, Vaccinia virus
ggaguaucuauuuuaa

SEQ ID NO: 4054275 - RNA, 15 nt, Vaccinia virus
ggauaaaaucuuuug

SEQ ID NO: 4054276 - RNA, 19 nt, Vaccinia virus
ggauaaucagaauauacac

SEQ ID NO: 4054277 - RNA, 14 nt, Vaccinia virus
ggauaaugauagaa

SEQ ID NO: 4054278 - RNA, 11 nt, Vaccinia virus
ggauacaaaaa

SEQ ID NO: 4054279 - RNA, 14 nt, Vaccinia virus
ggauagagaaauau

SEQ ID NO: 4054280 - RNA, 15 nt, Vaccinia virus
ggauaugucuagaac

SEQ ID NO: 4054281 - RNA, 14 nt, Vaccinia virus
ggaucauccuuuaa

SEQ ID NO: 4054282 - RNA, 22 nt, Vaccinia virus
ggaucgcaagaauuuauuucua

SEQ ID NO: 4054283 - RNA, 18 nt, Vaccinia virus
ggaugaagcauauuacuc

SEQ ID NO: 4054284 - RNA, 18 nt, Vaccinia virus
gaaaacuagauacaaaau

SEQ ID NO: 4054285 - RNA, 18 nt, Vaccinia virus
gaaaagcuuaaaauagcu

SEQ ID NO: 4054286 - RNA, 14 nt, Vaccinia virus
gaaaauaaauacaa

SEQ ID NO: 4054287 - RNA, 22 nt, Vaccinia virus
gaaaauaaauccaaaauaacua

SEQ ID NO: 4054288 - RNA, 17 nt, Vaccinia virus
gaaaauaaucuaguaaa

SEQ ID NO: 4054289 - RNA, 16 nt, Vaccinia virus
gaaaauacguucuauu

SEQ ID NO: 4054290 - RNA, 17 nt, Vaccinia virus
gaaaauacuaaaucaga

SEQ ID NO: 4054291 - RNA, 19 nt, Vaccinia virus
gaaaaugaugguacauaua

SEQ ID NO: 4054292 - RNA, 21 nt, Vaccinia virus
gaaaaugcagaaaugauuuug

SEQ ID NO: 4054293 - RNA, 22 nt, Vaccinia virus
gaaaauguacuucgaugagauu

SEQ ID NO: 4054294 - RNA, 21 nt, Vaccinia virus
gaaaauuagaucugauaauau

SEQ ID NO: 4054295 - RNA, 17 nt, Vaccinia virus
gaaaauuauguaaaaca

SEQ ID NO: 4054296 - RNA, 14 nt, Vaccinia virus
gaaacaauguuucu

SEQ ID NO: 4054297 - RNA, 14 nt, Vaccinia virus
gaaacacuagcauu

SEQ ID NO: 4054298 - RNA, 20 nt, Vaccinia virus
gaaaccacugucuaaaugua

SEQ ID NO: 4054299 - RNA, 14 nt, Vaccinia virus
gaaacuaucuuuuu

SEQ ID NO: 4054300 - RNA, 20 nt, Vaccinia virus
gaaacuuuuuagaauaucua

SEQ ID NO: 4054301 - RNA, 11 nt, Vaccinia virus
gaaagaauaaa

SEQ ID NO: 4054302 - RNA, 14 nt, Vaccinia virus
gaaagauguuauuu

SEQ ID NO: 4054303 - RNA, 21 nt, Vaccinia virus
gaaagauucuauaauaaugaa

SEQ ID NO: 4054304 - RNA, 13 nt, Vaccinia virus
gaaaggaauuaau

SEQ ID NO: 4054305 - RNA, 22 nt, Vaccinia virus
gaaaggagagaauguauucauu

SEQ ID NO: 4054306 - RNA, 16 nt, Vaccinia virus
gaaaggcgguauaugu

SEQ ID NO: 4054307 - RNA, 18 nt, Vaccinia virus
gaaaguauagcuaaugau

SEQ ID NO: 4054308 - RNA, 23 nt, Vaccinia virus
gaaaguauuuuuguguuaaaaca

SEQ ID NO: 4054309 - RNA, 14 nt, Vaccinia virus
gaaauaaaucagac

SEQ ID NO: 4054310 - RNA, 23 nt, Vaccinia virus
gaaauaccauaaauauauuucua

SEQ ID NO: 4054311 - RNA, 18 nt, Vaccinia virus
gaaauacuaaaaaaugua

SEQ ID NO: 4054312 - RNA, 16 nt, Vaccinia virus
gaaauagauccuucaa

SEQ ID NO: 4054313 - RNA, 14 nt, Vaccinia virus
gaaauauaccgaua

SEQ ID NO: 4054314 - RNA, 15 nt, Vaccinia virus
gaaauauauacuuca

SEQ ID NO: 4054315 - RNA, 17 nt, Vaccinia virus
gaaauauaugagaugua

SEQ ID NO: 4054316 - RNA, 13 nt, Vaccinia virus
gaaauauauuaag

SEQ ID NO: 4054317 - RNA, 13 nt, Vaccinia virus
gaaauauauuguu

SEQ ID NO: 4054318 - RNA, 16 nt, Vaccinia virus
gaaauauauuguuaaa

SEQ ID NO: 4054319 - RNA, 13 nt, Vaccinia virus
gaaauauucuguu

SEQ ID NO: 4054320 - RNA, 18 nt, Vaccinia virus
gaaaucaaaucucuauca

SEQ ID NO: 4054321 - RNA, 15 nt, Vaccinia virus
gaaaucauauaugau

SEQ ID NO: 4054322 - RNA, 21 nt, Vaccinia virus
gaaaucauuuuuuuaaaacug

SEQ ID NO: 4054323 - RNA, 15 nt, Vaccinia virus
gaaaucuguaaucua

SEQ ID NO: 4054324 - RNA, 19 nt, Vaccinia virus
gaaaugacuccaugaaaac

SEQ ID NO: 4054325 - RNA, 21 nt, Vaccinia virus
gaaauggaagaguuaaugaau

SEQ ID NO: 4054326 - RNA, 19 nt, Vaccinia virus
gaaauggagagagacuguu

SEQ ID NO: 4054327 - RNA, 14 nt, Vaccinia virus
gaaauggauaauau

SEQ ID NO: 4054328 - RNA, 20 nt, Vaccinia virus
gaaauguuauauauaaaaga

SEQ ID NO: 4054329 - RNA, 11 nt, Vaccinia virus
gaaauuagaaa

SEQ ID NO: 4054330 - RNA, 17 nt, Vaccinia virus
gaaauuagaaaguaaug

SEQ ID NO: 4054331 - RNA, 18 nt, Vaccinia virus
gaaauuugaaagaacuac

SEQ ID NO: 4054332 - RNA, 17 nt, Vaccinia virus
gaacaauaaaagagaau

SEQ ID NO: 4054333 - RNA, 15 nt, Vaccinia virus
gaacaauuacagaca

SEQ ID NO: 4054334 - RNA, 20 nt, Vaccinia virus
gaacacauaaccaauuuaua

SEQ ID NO: 4054335 - RNA, 16 nt, Vaccinia virus
gaacacauuaaacaaa

SEQ ID NO: 4054336 - RNA, 19 nt, Vaccinia virus
gaacacauuaaacaaaaau

SEQ ID NO: 4054337 - RNA, 14 nt, Vaccinia virus
gaacagauaguuua

SEQ ID NO: 4054338 - RNA, 14 nt, Vaccinia virus
gaacagaugauaua

SEQ ID NO: 4054339 - RNA, 14 nt, Vaccinia virus
gaacaucuuccaua

SEQ ID NO: 4054340 - RNA, 19 nt, Vaccinia virus
gaacaucuuccauauccua

SEQ ID NO: 4054341 - RNA, 19 nt, Vaccinia virus
gaacauucuccgauaucua

SEQ ID NO: 4054342 - RNA, 23 nt, Vaccinia virus
gaacauuucugcauuacaaagaa

SEQ ID NO: 4054343 - RNA, 22 nt, Vaccinia virus
gaaccaauacaacguaaaauau

SEQ ID NO: 4054344 - RNA, 17 nt, Vaccinia virus
gaaccaguaacauauga

SEQ ID NO: 4054345 - RNA, 21 nt, Vaccinia virus
gaaccaguaccagaucuuaau

SEQ ID NO: 4054346 - RNA, 18 nt, Vaccinia virus
gaaccuucuacauauaau

SEQ ID NO: 4054347 - RNA, 16 nt, Vaccinia virus
gaacgauaaacaaauu

SEQ ID NO: 4054348 - RNA, 19 nt, Vaccinia virus
gaacguaaauuaguucaua

SEQ ID NO: 4054349 - RNA, 17 nt, Vaccinia virus
gaacguauaguuugaua

SEQ ID NO: 4054350 - RNA, 12 nt, Vaccinia virus
gaacuaauacau

SEQ ID NO: 4054351 - RNA, 18 nt, Vaccinia virus
gaacuaauccacauauga

SEQ ID NO: 4054352 - RNA, 19 nt, Vaccinia virus
gaacuaauccacauaugau

SEQ ID NO: 4054353 - RNA, 23 nt, Vaccinia virus
gaacuauaaaaacagauaaugau

SEQ ID NO: 4054354 - RNA, 13 nt, Vaccinia virus
gaacuauauuaag

SEQ ID NO: 4054355 - RNA, 22 nt, Vaccinia virus
gaacucuaaucaaaaucuuaau

SEQ ID NO: 4054356 - RNA, 21 nt, Vaccinia virus
gaacuuacugacaaaguuaag

SEQ ID NO: 4054357 - RNA, 14 nt, Vaccinia virus
gaagaagaaaacaa

SEQ ID NO: 4054358 - RNA, 15 nt, Vaccinia virus
gaagaagaaaacaaa

SEQ ID NO: 4054359 - RNA, 13 nt, Vaccinia virus
gaagaagaugcua

SEQ ID NO: 4054360 - RNA, 22 nt, Vaccinia virus
gaagaaggacaacaucuacuuu

SEQ ID NO: 4054361 - RNA, 15 nt, Vaccinia virus
gaagacacauuauuu

SEQ ID NO: 4054362 - RNA, 17 nt, Vaccinia virus
gaagagacggugugaga

SEQ ID NO: 4054363 - RNA, 22 nt, Vaccinia virus
gaagaugauuuugcuagagaua

SEQ ID NO: 4054364 - RNA, 12 nt, Vaccinia virus
gaaggacaacau

SEQ ID NO: 4054365 - RNA, 18 nt, Vaccinia virus
gaaggaggaacaguuuua

SEQ ID NO: 4054366 - RNA, 15 nt, Vaccinia virus
gaaggcauaucguga

SEQ ID NO: 4054367 - RNA, 12 nt, Vaccinia virus
gaaguaaugaag

SEQ ID NO: 4054368 - RNA, 14 nt, Vaccinia virus
gaaguaaugaagaa

SEQ ID NO: 4054369 - RNA, 23 nt, Vaccinia virus
gaaguauaucugaguaugaugau

SEQ ID NO: 4054370 - RNA, 19 nt, Vaccinia virus
gaagucguguacguaauau

SEQ ID NO: 4054371 - RNA, 15 nt, Vaccinia virus
gaaguuauagaaugu

SEQ ID NO: 4054372 - RNA, 20 nt, Vaccinia virus
gaauaaaguuggaaguuuaa

SEQ ID NO: 4054373 - RNA, 22 nt, Vaccinia virus
gaauaauaugacucaugaucua

SEQ ID NO: 4054374 - RNA, 19 nt, Vaccinia virus
gaauaauccuauaucacuu

SEQ ID NO: 4054375 - RNA, 22 nt, Vaccinia virus
gaauacgacgaccauaucaauu

SEQ ID NO: 4054376 - RNA, 14 nt, Vaccinia virus
gaauagacuuucug

SEQ ID NO: 4054377 - RNA, 16 nt, Vaccinia virus
gaauagugguauauaa

SEQ ID NO: 4054378 - RNA, 17 nt, Vaccinia virus
gaauauaaauuauauau

SEQ ID NO: 4054379 - RNA, 21 nt, Vaccinia virus
gaauauacugauuagaaauaa

SEQ ID NO: 4054380 - RNA, 13 nt, Vaccinia virus
gaauauaguuaua

SEQ ID NO: 4054381 - RNA, 16 nt, Vaccinia virus
gaauauauaaaagacg

SEQ ID NO: 4054382 - RNA, 22 nt, Vaccinia virus
gaauauauagguaauacauaua

SEQ ID NO: 4054383 - RNA, 12 nt, Vaccinia virus
gaauauauuaau

SEQ ID NO: 4054384 - RNA, 14 nt, Vaccinia virus
gaauaucauauuac

SEQ ID NO: 4054385 - RNA, 17 nt, Vaccinia virus
gaauauggggaaaauau

SEQ ID NO: 4054386 - RNA, 21 nt, Vaccinia virus
gaauauggggaaaauauucua

SEQ ID NO: 4054387 - RNA, 14 nt, Vaccinia virus
gaauauguauauca

SEQ ID NO: 4054388 - RNA, 22 nt, Vaccinia virus
gaauaugugcuaaaaucacuga

SEQ ID NO: 4054389 - RNA, 21 nt, Vaccinia virus
gaauauguuauaauagagaua

SEQ ID NO: 4054390 - RNA, 14 nt, Vaccinia virus
gaauauuaaacaau

SEQ ID NO: 4054391 - RNA, 17 nt, Vaccinia virus
gaauauuaaacaauuau

SEQ ID NO: 4054392 - RNA, 21 nt, Vaccinia virus
gaauauuccucuaacagauau

SEQ ID NO: 4054393 - RNA, 18 nt, Vaccinia virus
gaaucacguguuaaacaa

SEQ ID NO: 4054394 - RNA, 19 nt, Vaccinia virus
gaaucagugaauaaauuca

SEQ ID NO: 4054395 - RNA, 14 nt, Vaccinia virus
gaaucauacaauga

SEQ ID NO: 4054396 - RNA, 20 nt, Vaccinia virus
gaaucauuuaucauaacuac

SEQ ID NO: 4054397 - RNA, 20 nt, Vaccinia virus
gaauccaucucuauguuuca

SEQ ID NO: 4054398 - RNA, 15 nt, Vaccinia virus
gaaucccuacauauu

SEQ ID NO: 4054399 - RNA, 18 nt, Vaccinia virus
gaaucccuacauauuuua

SEQ ID NO: 4054400 - RNA, 15 nt, Vaccinia virus
gaauccuauacucug

SEQ ID NO: 4054401 - RNA, 12 nt, Vaccinia virus
gaaucuauuuua

SEQ ID NO: 4054402 - RNA, 13 nt, Vaccinia virus
gaaugaagagaag

SEQ ID NO: 4054403 - RNA, 23 nt, Vaccinia virus
gaaugacaucgcauuuauaucuu

SEQ ID NO: 4054404 - RNA, 22 nt, Vaccinia virus
gaaugcggugccauucaugaaa

SEQ ID NO: 4054405 - RNA, 19 nt, Vaccinia virus
gaaugcuguuaugugcaua

SEQ ID NO: 4054406 - RNA, 14 nt, Vaccinia virus
aucuauauauguau

SEQ ID NO: 4054407 - RNA, 16 nt, Vaccinia virus
aucuauauauguauuu

SEQ ID NO: 4054408 - RNA, 12 nt, Vaccinia virus
aucuauauuaac

SEQ ID NO: 4054409 - RNA, 17 nt, Vaccinia virus
aucuaucaaacaaaauu

SEQ ID NO: 4054410 - RNA, 18 nt, Vaccinia virus
aucuauccgcgacaaauu

SEQ ID NO: 4054411 - RNA, 14 nt, Vaccinia virus
aucuaucuuaaaaa

SEQ ID NO: 4054412 - RNA, 17 nt, Vaccinia virus
aucuaucuuaucgaaug

SEQ ID NO: 4054413 - RNA, 21 nt, Vaccinia virus
aucuauuaaacagaaauggug

SEQ ID NO: 4054414 - RNA, 21 nt, Vaccinia virus
aucuauuaaacgaauaaaaga

SEQ ID NO: 4054415 - RNA, 17 nt, Vaccinia virus
aucuauucauaaaacau

SEQ ID NO: 4054416 - RNA, 18 nt, Vaccinia virus
aucuauugacuauaacuc

SEQ ID NO: 4054417 - RNA, 21 nt, Vaccinia virus
aucucaaaauagguacucugu

SEQ ID NO: 4054418 - RNA, 15 nt, Vaccinia virus
aucucaacaaaauuc

SEQ ID NO: 4054419 - RNA, 19 nt, Vaccinia virus
aucucauuaagcuaauaga

SEQ ID NO: 4054420 - RNA, 17 nt, Vaccinia virus
aucucauucaaauccau

SEQ ID NO: 4054421 - RNA, 16 nt, Vaccinia virus
aucuccaguauuuaca

SEQ ID NO: 4054422 - RNA, 19 nt, Vaccinia virus
aucuccaucgaugauacau

SEQ ID NO: 4054423 - RNA, 15 nt, Vaccinia virus
aucucgaugaaaaua

SEQ ID NO: 4054424 - RNA, 14 nt, Vaccinia virus
aucucuuuagaaug

SEQ ID NO: 4054425 - RNA, 16 nt, Vaccinia virus
aucugaaaauaaauaa

SEQ ID NO: 4054426 - RNA, 16 nt, Vaccinia virus
aucugaaacauacgau

SEQ ID NO: 4054427 - RNA, 19 nt, Vaccinia virus
aucugaauaaaacaucgau

SEQ ID NO: 4054428 - RNA, 23 nt, Vaccinia virus
aucugacucauggauucauuaau

SEQ ID NO: 4054429 - RNA, 21 nt, Vaccinia virus
aucugauaagauaucuucuca

SEQ ID NO: 4054430 - RNA, 21 nt, Vaccinia virus
aucugauagaaagaauaagaa

SEQ ID NO: 4054431 - RNA, 19 nt, Vaccinia virus
aucugaucuguucauauac

SEQ ID NO: 4054432 - RNA, 15 nt, Vaccinia virus
aucugaugagaucaa

SEQ ID NO: 4054433 - RNA, 21 nt, Vaccinia virus
aucugaugagaucaauagaca

SEQ ID NO: 4054434 - RNA, 17 nt, Vaccinia virus
aucugcuauaauuaaga

SEQ ID NO: 4054435 - RNA, 12 nt, Vaccinia virus
aucuggaaaauc

SEQ ID NO: 4054436 - RNA, 14 nt, Vaccinia virus
aucuggcucucucu

SEQ ID NO: 4054437 - RNA, 18 nt, Vaccinia virus
aucugguagcaaagaaau

SEQ ID NO: 4054438 - RNA, 12 nt, Vaccinia virus
aucuguauucuc

SEQ ID NO: 4054439 - RNA, 22 nt, Vaccinia virus
aucuguggaaaauaauacucug

SEQ ID NO: 4054440 - RNA, 19 nt, Vaccinia virus
aucuuauauacacauaauu

SEQ ID NO: 4054441 - RNA, 23 nt, Vaccinia virus
aucuuauauacacauaauuauuc

SEQ ID NO: 4054442 - RNA, 19 nt, Vaccinia virus
aucuuauguauauguuugu

SEQ ID NO: 4054443 - RNA, 20 nt, Vaccinia virus
aucuuauguuuuuaagagau

SEQ ID NO: 4054444 - RNA, 17 nt, Vaccinia virus
aucuucauagaauacua

SEQ ID NO: 4054445 - RNA, 14 nt, Vaccinia virus
aucuucaugccuuu

SEQ ID NO: 4054446 - RNA, 16 nt, Vaccinia virus
aucuucgguaucuuga

SEQ ID NO: 4054447 - RNA, 14 nt, Vaccinia virus
aucuucguuaaaaa

SEQ ID NO: 4054448 - RNA, 20 nt, Vaccinia virus
aucuucucuccuguuaauaa

SEQ ID NO: 4054449 - RNA, 23 nt, Vaccinia virus
aucuucucuccuguuaauaacuc

SEQ ID NO: 4054450 - RNA, 15 nt, Vaccinia virus
aucuucuuaaucucu

SEQ ID NO: 4054451 - RNA, 18 nt, Vaccinia virus
aucuucuuauaagauugu

SEQ ID NO: 4054452 - RNA, 19 nt, Vaccinia virus
aucuugacugucuaucucu

SEQ ID NO: 4054453 - RNA, 22 nt, Vaccinia virus
aucuuggcuccauacuguacca

SEQ ID NO: 4054454 - RNA, 15 nt, Vaccinia virus
aucuuguuuagaaaa

SEQ ID NO: 4054455 - RNA, 18 nt, Vaccinia virus
aucuuuaauaucuagauu

SEQ ID NO: 4054456 - RNA, 17 nt, Vaccinia virus
aucuuuacgaauuacuu

SEQ ID NO: 4054457 - RNA, 12 nt, Vaccinia virus
aucuuugaaaau

SEQ ID NO: 4054458 - RNA, 24 nt, Vaccinia virus
aucuuuguuggaucagucucuaag

SEQ ID NO: 4054459 - RNA, 22 nt, Vaccinia virus
aucuuuuagaaaaguuaaacau

SEQ ID NO: 4054460 - RNA, 13 nt, Vaccinia virus
aucuuuuguucua

SEQ ID NO: 4054461 - RNA, 21 nt, Vaccinia virus
aucuuuuuauuaguaggcauc

SEQ ID NO: 4054462 - RNA, 21 nt, Vaccinia virus
augaaaaauuuuccacaucuc

SEQ ID NO: 4054463 - RNA, 20 nt, Vaccinia virus
augaaaacuuuaaauacuua

SEQ ID NO: 4054464 - RNA, 21 nt, Vaccinia virus
augaaaacuuuaaauacuuaa

SEQ ID NO: 4054465 - RNA, 20 nt, Vaccinia virus
augaaaauuauaaugaauau

SEQ ID NO: 4054466 - RNA, 14 nt, Vaccinia virus
augaaacauuuaau

SEQ ID NO: 4054467 - RNA, 16 nt, Vaccinia virus
augaaagaaagaagac

SEQ ID NO: 4054468 - RNA, 19 nt, Vaccinia virus
augaaaggagagaauguau

SEQ ID NO: 4054469 - RNA, 13 nt, Vaccinia virus
augaauaaagaaa

SEQ ID NO: 4054470 - RNA, 14 nt, Vaccinia virus
augaauaaagaaaa

SEQ ID NO: 4054471 - RNA, 14 nt, Vaccinia virus
augaauaaguacua

SEQ ID NO: 4054472 - RNA, 14 nt, Vaccinia virus
augaauaaguguga

SEQ ID NO: 4054473 - RNA, 23 nt, Vaccinia virus
augaaucacguguuaaacaaugg

SEQ ID NO: 4054474 - RNA, 21 nt, Vaccinia virus
augaauccaucguacaagcca

SEQ ID NO: 4054475 - RNA, 15 nt, Vaccinia virus
augaauguuuucaau

SEQ ID NO: 4054476 - RNA, 16 nt, Vaccinia virus
augaauuaauuaaugu

SEQ ID NO: 4054477 - RNA, 18 nt, Vaccinia virus
augaauuuuuaaaaucau

SEQ ID NO: 4054478 - RNA, 13 nt, Vaccinia virus
augacaaacauuu

SEQ ID NO: 4054479 - RNA, 17 nt, Vaccinia virus
augacaacucaaacauc

SEQ ID NO: 4054480 - RNA, 14 nt, Vaccinia virus
augacacuguguau

SEQ ID NO: 4054481 - RNA, 17 nt, Vaccinia virus
augacauucucugacau

SEQ ID NO: 4054482 - RNA, 17 nt, Vaccinia virus
augacgagcgucauauu

SEQ ID NO: 4054483 - RNA, 14 nt, Vaccinia virus
augacguaaaugua

SEQ ID NO: 4054484 - RNA, 20 nt, Vaccinia virus
augacguaaccaagaaguuu

SEQ ID NO: 4054485 - RNA, 19 nt, Vaccinia virus
augacuaucuauauauacc

SEQ ID NO: 4054486 - RNA, 20 nt, Vaccinia virus
augacuuaguucuuaaucca

SEQ ID NO: 4054487 - RNA, 15 nt, Vaccinia virus
augagaacauaguau

SEQ ID NO: 4054488 - RNA, 19 nt, Vaccinia virus
augagagugauaucauauu

SEQ ID NO: 4054489 - RNA, 15 nt, Vaccinia virus
augagcaaguagaaa

SEQ ID NO: 4054490 - RNA, 17 nt, Vaccinia virus
augagcauuaguauuuc

SEQ ID NO: 4054491 - RNA, 15 nt, Vaccinia virus
augagguguacagcg

SEQ ID NO: 4054492 - RNA, 18 nt, Vaccinia virus
augaguaaaaucaaacac

SEQ ID NO: 4054493 - RNA, 11 nt, Vaccinia virus
augaguauuuu

SEQ ID NO: 4054494 - RNA, 15 nt, Vaccinia virus
augauaaacuaacua

SEQ ID NO: 4054495 - RNA, 22 nt, Vaccinia virus
augauaauuuacacaguaacca

SEQ ID NO: 4054496 - RNA, 19 nt, Vaccinia virus
augauauaggggucuucau

SEQ ID NO: 4054497 - RNA, 16 nt, Vaccinia virus
augauauguuaaauau

SEQ ID NO: 4054498 - RNA, 16 nt, Vaccinia virus
augauauuagaacugc

SEQ ID NO: 4054499 - RNA, 23 nt, Vaccinia virus
augaucaagaaggaaaucaaauc

SEQ ID NO: 4054500 - RNA, 19 nt, Vaccinia virus
augaucaggaaaguuuauu

SEQ ID NO: 4054501 - RNA, 20 nt, Vaccinia virus
augaucaucuauuguuauau

SEQ ID NO: 4054502 - RNA, 18 nt, Vaccinia virus
augaucaugugagaauac

SEQ ID NO: 4054503 - RNA, 16 nt, Vaccinia virus
augauccuauucuaaa

SEQ ID NO: 4054504 - RNA, 22 nt, Vaccinia virus
augauggguguacaaucaagau

SEQ ID NO: 4054505 - RNA, 16 nt, Vaccinia virus
augaugguacauauau

SEQ ID NO: 4054506 - RNA, 20 nt, Vaccinia virus
augaugugagagagaaauac

SEQ ID NO: 4054507 - RNA, 14 nt, Vaccinia virus
augauuaucaaaug

SEQ ID NO: 4054508 - RNA, 23 nt, Vaccinia virus
augauucauuuuuuaaguauuug

SEQ ID NO: 4054509 - RNA, 21 nt, Vaccinia virus
augauucuaaccuagaauuac

SEQ ID NO: 4054510 - RNA, 16 nt, Vaccinia virus
augauugauuagaaaa

SEQ ID NO: 4054511 - RNA, 17 nt, Vaccinia virus
augauuuacaaaugguu

SEQ ID NO: 4054512 - RNA, 15 nt, Vaccinia virus
augauuuagaaauga

SEQ ID NO: 4054513 - RNA, 21 nt, Vaccinia virus
augauuuuccuucuaaaguaa

SEQ ID NO: 4054514 - RNA, 15 nt, Vaccinia virus
augcaauaacaaaga

SEQ ID NO: 4054515 - RNA, 15 nt, Vaccinia virus
augcaaucaacaagu

SEQ ID NO: 4054516 - RNA, 14 nt, Vaccinia virus
augcaaucaaugau

SEQ ID NO: 4054517 - RNA, 18 nt, Vaccinia virus
augcacaaagaagaauuc

SEQ ID NO: 4054518 - RNA, 16 nt, Vaccinia virus
augcaccugaaacauc

SEQ ID NO: 4054519 - RNA, 18 nt, Vaccinia virus
augcagauuuauugaaaa

SEQ ID NO: 4054520 - RNA, 15 nt, Vaccinia virus
augcauaaucgauau

SEQ ID NO: 4054521 - RNA, 13 nt, Vaccinia virus
augcaucaaacag

SEQ ID NO: 4054522 - RNA, 16 nt, Vaccinia virus
augcaucuauuucauc

SEQ ID NO: 4054523 - RNA, 19 nt, Vaccinia virus
augcauucguuuaaagaua

SEQ ID NO: 4054524 - RNA, 17 nt, Vaccinia virus
augcauuuuuauauaca

SEQ ID NO: 4054525 - RNA, 15 nt, Vaccinia virus
augccggagaguaaa

SEQ ID NO: 4054526 - RNA, 18 nt, Vaccinia virus
augccucagguucaucga

SEQ ID NO: 4054527 - RNA, 18 nt, Vaccinia virus
augccuuaggauauguaa

SEQ ID NO: 4054528 - RNA, 18 nt, Vaccinia virus
augcgauucaaaaaagaa

SEQ ID NO: 4054529 - RNA, 20 nt, Vaccinia virus
augcguccauguugucuauu

SEQ ID NO: 4054530 - RNA, 13 nt, Vaccinia virus
augcuaaagcaaa

SEQ ID NO: 4054531 - RNA, 22 nt, Vaccinia virus
augcuaguuaauaguaaaugaa

SEQ ID NO: 4054532 - RNA, 12 nt, Vaccinia virus
augcuauguuua

SEQ ID NO: 4054533 - RNA, 19 nt, Vaccinia virus
caaaacaacauauacacau

SEQ ID NO: 4054534 - RNA, 20 nt, Vaccinia virus
caaaaccaacacuuaucaau

SEQ ID NO: 4054535 - RNA, 23 nt, Vaccinia virus
caaaacgaggauaguugauuuau

SEQ ID NO: 4054536 - RNA, 19 nt, Vaccinia virus
caaaacguccucuauacau

SEQ ID NO: 4054537 - RNA, 16 nt, Vaccinia virus
caaaacucaaauguua

SEQ ID NO: 4054538 - RNA, 17 nt, Vaccinia virus
caaaaguaagcauuucc

SEQ ID NO: 4054539 - RNA, 15 nt, Vaccinia virus
caaaauacaauuguu

SEQ ID NO: 4054540 - RNA, 19 nt, Vaccinia virus
caaaauacauaauuuugua

SEQ ID NO: 4054541 - RNA, 21 nt, Vaccinia virus
caaaauacucaggaagauauu

SEQ ID NO: 4054542 - RNA, 17 nt, Vaccinia virus
caaaauagguacucugu

SEQ ID NO: 4054543 - RNA, 16 nt, Vaccinia virus
caaaauauguaacaau

SEQ ID NO: 4054544 - RNA, 12 nt, Vaccinia virus
caaaaugauaua

SEQ ID NO: 4054545 - RNA, 15 nt, Vaccinia virus
caaaauggcaauuau

SEQ ID NO: 4054546 - RNA, 14 nt, Vaccinia virus
caaacaacugaaaa

SEQ ID NO: 4054547 - RNA, 13 nt, Vaccinia virus
caaacaauguaua

SEQ ID NO: 4054548 - RNA, 21 nt, Vaccinia virus
caaacaauguuugacugaaua

SEQ ID NO: 4054549 - RNA, 15 nt, Vaccinia virus
caaacaugacauuuu

SEQ ID NO: 4054550 - RNA, 20 nt, Vaccinia virus
caaacucagaaccaaaugau

SEQ ID NO: 4054551 - RNA, 16 nt, Vaccinia virus
caaacucuauuuuaaa

SEQ ID NO: 4054552 - RNA, 18 nt, Vaccinia virus
caaacugcaaauguagua

SEQ ID NO: 4054553 - RNA, 23 nt, Vaccinia virus
caaacugcguuaauguauucucu

SEQ ID NO: 4054554 - RNA, 14 nt, Vaccinia virus
caaacuuuacucuu

SEQ ID NO: 4054555 - RNA, 11 nt, Vaccinia virus
caaagaaagag

SEQ ID NO: 4054556 - RNA, 16 nt, Vaccinia virus
caaagaauuaaugaua

SEQ ID NO: 4054557 - RNA, 15 nt, Vaccinia virus
caaagagaaaacaaa

SEQ ID NO: 4054558 - RNA, 14 nt, Vaccinia virus
caaagcaaccagaa

SEQ ID NO: 4054559 - RNA, 15 nt, Vaccinia virus
caaagcaucgauuug

SEQ ID NO: 4054560 - RNA, 21 nt, Vaccinia virus
caaaggagaugauuuaucuau

SEQ ID NO: 4054561 - RNA, 15 nt, Vaccinia virus
caaaggaugaaagaa

SEQ ID NO: 4054562 - RNA, 18 nt, Vaccinia virus
caaagguacuauuucuac

SEQ ID NO: 4054563 - RNA, 16 nt, Vaccinia virus
caaagucaucaaucau

SEQ ID NO: 4054564 - RNA, 16 nt, Vaccinia virus
caaaguuaguacagaa

SEQ ID NO: 4054565 - RNA, 14 nt, Vaccinia virus
caaauaauaaacua

SEQ ID NO: 4054566 - RNA, 19 nt, Vaccinia virus
caaauagagauaaaacaag

SEQ ID NO: 4054567 - RNA, 15 nt, Vaccinia virus
caaauaggagauauu

SEQ ID NO: 4054568 - RNA, 14 nt, Vaccinia virus
caaauauacuaacg

SEQ ID NO: 4054569 - RNA, 21 nt, Vaccinia virus
caaauaucggcauuuauguuu

SEQ ID NO: 4054570 - RNA, 14 nt, Vaccinia virus
caaaucacugaaaa

SEQ ID NO: 4054571 - RNA, 17 nt, Vaccinia virus
caaaucuauauaccaua

SEQ ID NO: 4054572 - RNA, 20 nt, Vaccinia virus
caaauggucaaugauaugau

SEQ ID NO: 4054573 - RNA, 22 nt, Vaccinia virus
caaauguuaaacauuaauugau

SEQ ID NO: 4054574 - RNA, 19 nt, Vaccinia virus
caaauuaagcauuuuggaa

SEQ ID NO: 4054575 - RNA, 14 nt, Vaccinia virus
caaauuccaaauuu

SEQ ID NO: 4054576 - RNA, 18 nt, Vaccinia virus
caaauuuaccacuagaac

SEQ ID NO: 4054577 - RNA, 16 nt, Vaccinia virus
caaauuuuucaugaau

SEQ ID NO: 4054578 - RNA, 23 nt, Vaccinia virus
caaauuuuuucuuuaauauuuua

SEQ ID NO: 4054579 - RNA, 19 nt, Vaccinia virus
caaauuuuuuuuacaaaca

SEQ ID NO: 4054580 - RNA, 15 nt, Vaccinia virus
caacaaaaaaugaau

SEQ ID NO: 4054581 - RNA, 22 nt, Vaccinia virus
caacaaaaagaugcuauguaua

SEQ ID NO: 4054582 - RNA, 15 nt, Vaccinia virus
caacaaauauaaaau

SEQ ID NO: 4054583 - RNA, 14 nt, Vaccinia virus
caacaaauuuggaa

SEQ ID NO: 4054584 - RNA, 15 nt, Vaccinia virus
caacaacauauaauu

SEQ ID NO: 4054585 - RNA, 22 nt, Vaccinia virus
caacaacgaaccaaaaugaauu

SEQ ID NO: 4054586 - RNA, 23 nt, Vaccinia virus
caacaaguguguagauaucuuua

SEQ ID NO: 4054587 - RNA, 16 nt, Vaccinia virus
caacaaguuggaugau

SEQ ID NO: 4054588 - RNA, 20 nt, Vaccinia virus
caacaguuacuccaauuaca

SEQ ID NO: 4054589 - RNA, 18 nt, Vaccinia virus
caacauaauauuaaacac

SEQ ID NO: 4054590 - RNA, 23 nt, Vaccinia virus
caaccagguaggcaguuuuauuu

SEQ ID NO: 4054591 - RNA, 23 nt, Vaccinia virus
caaccauuaacggaugaaaauaa

SEQ ID NO: 4054592 - RNA, 16 nt, Vaccinia virus
caaccuacacuauuau

SEQ ID NO: 4054593 - RNA, 23 nt, Vaccinia virus
caacgauaaaaauaauauuguuu

SEQ ID NO: 4054594 - RNA, 13 nt, Vaccinia virus
caacgauauucua

SEQ ID NO: 4054595 - RNA, 20 nt, Vaccinia virus
caacuaguuuucaucaaugu

SEQ ID NO: 4054596 - RNA, 23 nt, Vaccinia virus
caacuauaucgacauauuucauu

SEQ ID NO: 4054597 - RNA, 19 nt, Vaccinia virus
caacuauccucguuuuguu

SEQ ID NO: 4054598 - RNA, 15 nt, Vaccinia virus
caacucuaaucacuu

SEQ ID NO: 4054599 - RNA, 15 nt, Vaccinia virus
caacuuaaacaaaau

SEQ ID NO: 4054600 - RNA, 13 nt, Vaccinia virus
caacuuauccauu

SEQ ID NO: 4054601 - RNA, 20 nt, Vaccinia virus
caacuuauccauuuauacau

SEQ ID NO: 4054602 - RNA, 17 nt, Vaccinia virus
caacuugacaaaucuua

SEQ ID NO: 4054603 - RNA, 17 nt, Vaccinia virus
caacuuuaggaucucua

SEQ ID NO: 4054604 - RNA, 16 nt, Vaccinia virus
caacuuuauuagauaa

SEQ ID NO: 4054605 - RNA, 18 nt, Vaccinia virus
caagaacaacuagaacag

SEQ ID NO: 4054606 - RNA, 22 nt, Vaccinia virus
caagaauauacaaguauuauuu

SEQ ID NO: 4054607 - RNA, 13 nt, Vaccinia virus
caagaccaaacac

SEQ ID NO: 4054608 - RNA, 17 nt, Vaccinia virus
caagacggauaagaaau

SEQ ID NO: 4054609 - RNA, 21 nt, Vaccinia virus
caagagaaugaaauauauaca

SEQ ID NO: 4054610 - RNA, 16 nt, Vaccinia virus
caagagauauauugga

SEQ ID NO: 4054611 - RNA, 15 nt, Vaccinia virus
caagauauauacacu

SEQ ID NO: 4054612 - RNA, 23 nt, Vaccinia virus
caagauccucucuuaaaugaauc

SEQ ID NO: 4054613 - RNA, 18 nt, Vaccinia virus
caagaucgauagacacug

SEQ ID NO: 4054614 - RNA, 16 nt, Vaccinia virus
caagauuuuuaaacaa

SEQ ID NO: 4054615 - RNA, 20 nt, Vaccinia virus
caagcaaaaacaaaaaacuu

SEQ ID NO: 4054616 - RNA, 23 nt, Vaccinia virus
caagcuucguuguagaaacacug

SEQ ID NO: 4054617 - RNA, 17 nt, Vaccinia virus
caaggaacuaaauagau

SEQ ID NO: 4054618 - RNA, 15 nt, Vaccinia virus
caaggauacacucuc

SEQ ID NO: 4054619 - RNA, 22 nt, Vaccinia virus
caaggcuuugauaucuaaauau

SEQ ID NO: 4054620 - RNA, 14 nt, Vaccinia virus
caagguuagaugua

SEQ ID NO: 4054621 - RNA, 14 nt, Vaccinia virus
caaguauccaucau

SEQ ID NO: 4054622 - RNA, 19 nt, Vaccinia virus
caaguaucuuguuccuaau

SEQ ID NO: 4054623 - RNA, 16 nt, Vaccinia virus
caaguaugacauugua

SEQ ID NO: 4054624 - RNA, 16 nt, Vaccinia virus
caagucccaaauggag

SEQ ID NO: 4054625 - RNA, 23 nt, Vaccinia virus
caagucuucaguucuaucuucua

SEQ ID NO: 4054626 - RNA, 19 nt, Vaccinia virus
caagugacaacaaaaaaug

SEQ ID NO: 4054627 - RNA, 17 nt, Vaccinia virus
caaguggcugcuauuuc

SEQ ID NO: 4054628 - RNA, 17 nt, Vaccinia virus
caauaaaacauuuccua

SEQ ID NO: 4054629 - RNA, 15 nt, Vaccinia virus
caauaaauccgaugu

SEQ ID NO: 4054630 - RNA, 19 nt, Vaccinia virus
caauaaaugcauuaguuua

SEQ ID NO: 4054631 - RNA, 15 nt, Vaccinia virus
caauaacauaacucu

SEQ ID NO: 4054632 - RNA, 20 nt, Vaccinia virus
caauaagucuauaucgaugu

SEQ ID NO: 4054633 - RNA, 16 nt, Vaccinia virus
caauacaacguaaaau

SEQ ID NO: 4054634 - RNA, 18 nt, Vaccinia virus
caauacgccaauaaugau

SEQ ID NO: 4054635 - RNA, 16 nt, Vaccinia virus
caauacggccauccag

SEQ ID NO: 4054636 - RNA, 15 nt, Vaccinia virus
caauacuaauucaaa

SEQ ID NO: 4054637 - RNA, 13 nt, Vaccinia virus
caauagaaucugu

SEQ ID NO: 4054638 - RNA, 18 nt, Vaccinia virus
caauagaugauagaauau

SEQ ID NO: 4054639 - RNA, 21 nt, Vaccinia virus
caauagcuuaacggauacuug

SEQ ID NO: 4054640 - RNA, 23 nt, Vaccinia virus
caauaguaguguaguuaauguaa

SEQ ID NO: 4054641 - RNA, 15 nt, Vaccinia virus
caauaguugauuuuu

SEQ ID NO: 4054642 - RNA, 23 nt, Vaccinia virus
caauauagucuguguuccauaau

SEQ ID NO: 4054643 - RNA, 15 nt, Vaccinia virus
caauauauauacagu

SEQ ID NO: 4054644 - RNA, 16 nt, Vaccinia virus
caauauauguaaucau

SEQ ID NO: 4054645 - RNA, 12 nt, Vaccinia virus
caauaugauauc

SEQ ID NO: 4054646 - RNA, 22 nt, Vaccinia virus
caauaugaucacaaagaaagcu

SEQ ID NO: 4054647 - RNA, 21 nt, Vaccinia virus
caauaugucuguacaaauguu

SEQ ID NO: 4054648 - RNA, 19 nt, Vaccinia virus
caauauugaaaauacuaau

SEQ ID NO: 4054649 - RNA, 23 nt, Vaccinia virus
caauauuguuaucguaauuggaa

SEQ ID NO: 4054650 - RNA, 15 nt, Vaccinia virus
caauauuuuucguuu

SEQ ID NO: 4054651 - RNA, 15 nt, Vaccinia virus
caaucaaacaaaaaa

SEQ ID NO: 4054652 - RNA, 23 nt, Vaccinia virus
caaucaaugauagacuagaagaa

SEQ ID NO: 4054653 - RNA, 22 nt, Vaccinia virus
caaucauuccucauaagaugau

SEQ ID NO: 4054654 - RNA, 19 nt, Vaccinia virus
caauccuucagauaaucug

SEQ ID NO: 4054655 - RNA, 16 nt, Vaccinia virus
caaucgaugugucaaa

SEQ ID NO: 4054656 - RNA, 21 nt, Vaccinia virus
caaucggauuaauaucucuau

SEQ ID NO: 4054657 - RNA, 14 nt, Vaccinia virus
caaugaaugauaug

SEQ ID NO: 4054658 - RNA, 14 nt, Vaccinia virus
caaugaauuaacuu

SEQ ID NO: 4054659 - RNA, 19 nt, Vaccinia virus
caaugacauggaaauaucu

SEQ ID NO: 4054660 - RNA, 13 nt, Vaccinia virus
caaugauaaugau

SEQ ID NO: 4054661 - RNA, 10 nt, Vaccinia virus
caaugauaua

SEQ ID NO: 4054662 - RNA, 21 nt, Vaccinia virus
caaugauauauuuuccaugaa

SEQ ID NO: 4054663 - RNA, 22 nt, Vaccinia virus
caaugauugaagcauucuuucc

SEQ ID NO: 4054664 - RNA, 17 nt, Vaccinia virus
caaugcucaguaaaugu

SEQ ID NO: 4054665 - RNA, 18 nt, Vaccinia virus
caauggauacugcaucug

SEQ ID NO: 4054666 - RNA, 15 nt, Vaccinia virus
caaugggucguugga

SEQ ID NO: 4054667 - RNA, 21 nt, Vaccinia virus
caauguagaaauuagaaagau

SEQ ID NO: 4054668 - RNA, 18 nt, Vaccinia virus
caaugucgaauaacugua

SEQ ID NO: 4054669 - RNA, 22 nt, Vaccinia virus
caaugucuauaguucucaucuu

SEQ ID NO: 4054670 - RNA, 20 nt, Vaccinia virus
caauguggagauuuaaucug

SEQ ID NO: 4054671 - RNA, 14 nt, Vaccinia virus
caauguuagaguau

SEQ ID NO: 4054672 - RNA, 11 nt, Vaccinia virus
caauuaaaugu

SEQ ID NO: 4054673 - RNA, 12 nt, Vaccinia virus
caauuaaaugua

SEQ ID NO: 4054674 - RNA, 11 nt, Vaccinia virus
caauuaaugau

SEQ ID NO: 4054675 - RNA, 18 nt, Vaccinia virus
caauuaguuaauaaugau

SEQ ID NO: 4054676 - RNA, 17 nt, Vaccinia virus
caauuauaauauacgau

SEQ ID NO: 4054677 - RNA, 22 nt, Vaccinia virus
caauuauacguuuuuauauaau

SEQ ID NO: 4054678 - RNA, 17 nt, Vaccinia virus
caauuaucauuuugauu

SEQ ID NO: 4054679 - RNA, 13 nt, Vaccinia virus
caauucaucucua

SEQ ID NO: 4054680 - RNA, 21 nt, Vaccinia virus
caauucauuccuauaaguuua

SEQ ID NO: 4054681 - RNA, 22 nt, Vaccinia virus
caauugguuaugauaucaugua

SEQ ID NO: 4054682 - RNA, 21 nt, Vaccinia virus
caauuguauuauugauacaau

SEQ ID NO: 4054683 - RNA, 19 nt, Vaccinia virus
caauuguuugauauauaau

SEQ ID NO: 4054684 - RNA, 19 nt, Vaccinia virus
caauuuauacggauuucua

SEQ ID NO: 4054685 - RNA, 18 nt, Vaccinia virus
caauuuguauuauccaau

SEQ ID NO: 4054686 - RNA, 17 nt, Vaccinia virus
caauuuuaaaucaucuu

SEQ ID NO: 4054687 - RNA, 19 nt, Vaccinia virus
caauuuugauguauaacaa

SEQ ID NO: 4054688 - RNA, 21 nt, Vaccinia virus
cacaaagaauuuuagacacua

SEQ ID NO: 4054689 - RNA, 23 nt, Vaccinia virus
cacaaauaguaaaugagagaucu

SEQ ID NO: 4054690 - RNA, 15 nt, Vaccinia virus
cacaaccaaauacuu

SEQ ID NO: 4054691 - RNA, 13 nt, Vaccinia virus
cacagaaauacua

SEQ ID NO: 4054692 - RNA, 18 nt, Vaccinia virus
cacauccaucaauuguaa

SEQ ID NO: 4054693 - RNA, 19 nt, Vaccinia virus
cacauccuuuauuaauaau

SEQ ID NO: 4054694 - RNA, 14 nt, Vaccinia virus
cacaugauccauuu

SEQ ID NO: 4054695 - RNA, 23 nt, Vaccinia virus
cacaugauccauuuauaguuaua

SEQ ID NO: 4054696 - RNA, 19 nt, Vaccinia virus
caccauauagaucaaucau

SEQ ID NO: 4054697 - RNA, 18 nt, Vaccinia virus
caccaucuucauaauaaa

SEQ ID NO: 4054698 - RNA, 13 nt, Vaccinia virus
caccgaugaugga

SEQ ID NO: 4054699 - RNA, 16 nt, Vaccinia virus
caccggaauacuauuc

SEQ ID NO: 4054700 - RNA, 15 nt, Vaccinia virus
caccguaguguauau

SEQ ID NO: 4054701 - RNA, 18 nt, Vaccinia virus
caccuaccuuaaucaugu

SEQ ID NO: 4054702 - RNA, 20 nt, Vaccinia virus
caccuauagcaucaauaauu

SEQ ID NO: 4054703 - RNA, 14 nt, Vaccinia virus
caccucauacauau

SEQ ID NO: 4054704 - RNA, 15 nt, Vaccinia virus
caccuccuauaucaa

SEQ ID NO: 4054705 - RNA, 16 nt, Vaccinia virus
cacgaaaaaugaugaa

SEQ ID NO: 4054706 - RNA, 22 nt, Vaccinia virus
cacgaacgaaaccuacugugac

SEQ ID NO: 4054707 - RNA, 18 nt, Vaccinia virus
cacgguaauaaaauguua

SEQ ID NO: 4054708 - RNA, 15 nt, Vaccinia virus
cacguuuauuucaua

SEQ ID NO: 4054709 - RNA, 15 nt, Vaccinia virus
cacuaacgugauuau

SEQ ID NO: 4054710 - RNA, 12 nt, Vaccinia virus
cacuacaucuuu

SEQ ID NO: 4054711 - RNA, 14 nt, Vaccinia virus
cacuagaaaccacg

SEQ ID NO: 4054712 - RNA, 22 nt, Vaccinia virus
cacuauacauuuugaaacuaug

SEQ ID NO: 4054713 - RNA, 16 nt, Vaccinia virus
cacuauguuagcauuu

SEQ ID NO: 4054714 - RNA, 12 nt, Vaccinia virus
cacucucugcca

SEQ ID NO: 4054715 - RNA, 13 nt, Vaccinia virus
cacucugucauau

SEQ ID NO: 4054716 - RNA, 21 nt, Vaccinia virus
cacugucuggcaauaaaugau

SEQ ID NO: 4054717 - RNA, 13 nt, Vaccinia virus
cacuuauuucaug

SEQ ID NO: 4054718 - RNA, 14 nt, Vaccinia virus
cacuuguaguucuu

SEQ ID NO: 4054719 - RNA, 13 nt, Vaccinia virus
cagaaaagauauu

SEQ ID NO: 4054720 - RNA, 15 nt, Vaccinia virus
cagaaacuguaaaga

SEQ ID NO: 4054721 - RNA, 18 nt, Vaccinia virus
cagaaaugacuccaugaa

SEQ ID NO: 4054722 - RNA, 15 nt, Vaccinia virus
cagaaauuauauacg

SEQ ID NO: 4054723 - RNA, 22 nt, Vaccinia virus
cagaaauugguauaaauguugu

SEQ ID NO: 4054724 - RNA, 12 nt, Vaccinia virus
cagaacuauuag

SEQ ID NO: 4054725 - RNA, 18 nt, Vaccinia virus
cagaagaauaugaugauu

SEQ ID NO: 4054726 - RNA, 15 nt, Vaccinia virus
cagaaggaaacuucu

SEQ ID NO: 4054727 - RNA, 18 nt, Vaccinia virus
cagaaggcgguaauagaa

SEQ ID NO: 4054728 - RNA, 14 nt, Vaccinia virus
cagaaguaaugaag

SEQ ID NO: 4054729 - RNA, 21 nt, Vaccinia virus
cagaagugugaauaugaucuu

SEQ ID NO: 4054730 - RNA, 13 nt, Vaccinia virus
cagaauaaaucaa

SEQ ID NO: 4054731 - RNA, 22 nt, Vaccinia virus
cagaauagagccaaaaugguaa

SEQ ID NO: 4054732 - RNA, 19 nt, Vaccinia virus
cagaaucauacaaugaauu

SEQ ID NO: 4054733 - RNA, 16 nt, Vaccinia virus
cagaauucuaaaugau

SEQ ID NO: 4054734 - RNA, 21 nt, Vaccinia virus
cagaauucuaaaugaugauau

SEQ ID NO: 4054735 - RNA, 18 nt, Vaccinia virus
cagaauuucuacauaauu

SEQ ID NO: 4054736 - RNA, 21 nt, Vaccinia virus
cagacauugucugacugaaua

SEQ ID NO: 4054737 - RNA, 13 nt, Vaccinia virus
cagacuguuuaug

SEQ ID NO: 4054738 - RNA, 15 nt, Vaccinia virus
cagagaggccaucug

SEQ ID NO: 4054739 - RNA, 18 nt, Vaccinia virus
cagagcucaucuaaaaaa

SEQ ID NO: 4054740 - RNA, 15 nt, Vaccinia virus
cagaggaguuauuua

SEQ ID NO: 4054741 - RNA, 17 nt, Vaccinia virus
cagaggauaacuauuua

SEQ ID NO: 4054742 - RNA, 15 nt, Vaccinia virus
cagagguuguauuua

SEQ ID NO: 4054743 - RNA, 14 nt, Vaccinia virus
cagauaauaacaga

SEQ ID NO: 4054744 - RNA, 20 nt, Vaccinia virus
cagauacaguuaauaucuau

SEQ ID NO: 4054745 - RNA, 20 nt, Vaccinia virus
cagauacgaugaugauguag

SEQ ID NO: 4054746 - RNA, 18 nt, Vaccinia virus
cagauagauaaagucuug

SEQ ID NO: 4054747 - RNA, 23 nt, Vaccinia virus
cagauuacgagccagaucuucuu

SEQ ID NO: 4054748 - RNA, 18 nt, Vaccinia virus
cagauuuuugaaugaaug

SEQ ID NO: 4054749 - RNA, 16 nt, Vaccinia virus
cagcgaacuugauauu

SEQ ID NO: 4054750 - RNA, 19 nt, Vaccinia virus
cagcuauguuaucaugaaa

SEQ ID NO: 4054751 - RNA, 17 nt, Vaccinia virus
caggauaaggaauugua

SEQ ID NO: 4054752 - RNA, 23 nt, Vaccinia virus
cagggaacggcuaaaaguauuuu

SEQ ID NO: 4054753 - RNA, 16 nt, Vaccinia virus
cagguauacuguucag

SEQ ID NO: 4054754 - RNA, 12 nt, Vaccinia virus
caguaaauguuc

SEQ ID NO: 4054755 - RNA, 19 nt, Vaccinia virus
caguaaccaaauacauauu

SEQ ID NO: 4054756 - RNA, 18 nt, Vaccinia virus
caguaaguacaucaucug

SEQ ID NO: 4054757 - RNA, 14 nt, Vaccinia virus
caguaguaaugaag

SEQ ID NO: 4054758 - RNA, 13 nt, Vaccinia virus
caguaguauacau

SEQ ID NO: 4054759 - RNA, 14 nt, Vaccinia virus
caguaguucauuau

SEQ ID NO: 4054760 - RNA, 22 nt, Vaccinia virus
caguaguugcgggaacaauauu

SEQ ID NO: 4054761 - RNA, 14 nt, Vaccinia virus
caguauaccaaaca

SEQ ID NO: 4054762 - RNA, 15 nt, Vaccinia virus
caguauaccaaacau

SEQ ID NO: 4054763 - RNA, 21 nt, Vaccinia virus
caguaucgaaaaaugcugaag

SEQ ID NO: 4054764 - RNA, 15 nt, Vaccinia virus
caguauuauuaauau

SEQ ID NO: 4054765 - RNA, 18 nt, Vaccinia virus
cagucaagucaaugauau

SEQ ID NO: 4054766 - RNA, 11 nt, Vaccinia virus
cagucaugaaa

SEQ ID NO: 4054767 - RNA, 15 nt, Vaccinia virus
cagucauuccaucau

SEQ ID NO: 4054768 - RNA, 19 nt, Vaccinia virus
cagucuugaaacagcaucu

SEQ ID NO: 4054769 - RNA, 18 nt, Vaccinia virus
cagugacggauauacaaa

SEQ ID NO: 4054770 - RNA, 17 nt, Vaccinia virus
cagugacuguaucacac

SEQ ID NO: 4054771 - RNA, 22 nt, Vaccinia virus
cagugguuuuauuuuauccuug

SEQ ID NO: 4054772 - RNA, 20 nt, Vaccinia virus
caguugaauggauucguccu

SEQ ID NO: 4054773 - RNA, 19 nt, Vaccinia virus
caguuucaucgauaaagga

SEQ ID NO: 4054774 - RNA, 18 nt, Vaccinia virus
caguuucuagugacaaaa

SEQ ID NO: 4054775 - RNA, 15 nt, Vaccinia virus
caguuuuaguauuuu

SEQ ID NO: 4054776 - RNA, 21 nt, Vaccinia virus
cauaaaaauaaaaauauaauu

SEQ ID NO: 4054777 - RNA, 14 nt, Vaccinia virus
cauaaaacaucauu

SEQ ID NO: 4054778 - RNA, 18 nt, Vaccinia virus
cauaaaacucauuguuua

SEQ ID NO: 4054779 - RNA, 14 nt, Vaccinia virus
cauaaaauuuaaga

SEQ ID NO: 4054780 - RNA, 12 nt, Vaccinia virus
cauaaacaaauu

SEQ ID NO: 4054781 - RNA, 16 nt, Vaccinia virus
cauaaacaauauaaau

SEQ ID NO: 4054782 - RNA, 12 nt, Vaccinia virus
cauaaacauguc

SEQ ID NO: 4054783 - RNA, 14 nt, Vaccinia virus
cauaaacugauacg

SEQ ID NO: 4054784 - RNA, 18 nt, Vaccinia virus
cauaaaggaauauacaaa

SEQ ID NO: 4054785 - RNA, 15 nt, Vaccinia virus
cauaaauaaaaacuu

SEQ ID NO: 4054786 - RNA, 22 nt, Vaccinia virus
cauaaauaauaaauacaauaau

SEQ ID NO: 4054787 - RNA, 16 nt, Vaccinia virus
cauaaauuauuucauu

SEQ ID NO: 4054788 - RNA, 20 nt, Vaccinia virus
cauaacaccacgaacauguc

SEQ ID NO: 4054789 - RNA, 16 nt, Vaccinia virus
cauaacuguauaaaau

SEQ ID NO: 4054790 - RNA, 17 nt, Vaccinia virus
cauaacuucguuguccu

SEQ ID NO: 4054791 - RNA, 19 nt, Vaccinia virus
cauaacuugagagcaucca

SEQ ID NO: 4054792 - RNA, 19 nt, Vaccinia virus
cauaauacuaucuauguua

SEQ ID NO: 4054793 - RNA, 15 nt, Vaccinia virus
cauaauacucaauac

SEQ ID NO: 4054794 - RNA, 13 nt, Vaccinia virus
cauaauauauaca

SEQ ID NO: 4054795 - RNA, 13 nt, Vaccinia virus
cauaauaucuuua

SEQ ID NO: 4054796 - RNA, 15 nt, Vaccinia virus
cauaauauuaaacac

SEQ ID NO: 4054797 - RNA, 20 nt, Vaccinia virus
cauaaucaucacugucauca

SEQ ID NO: 4054798 - RNA, 20 nt, Vaccinia virus
cauaaugucuagcagcaucu

SEQ ID NO: 4054799 - RNA, 20 nt, Vaccinia virus
cauaauuaaauuaucgacau

SEQ ID NO: 4054800 - RNA, 15 nt, Vaccinia virus
cauaauuacauuuag

SEQ ID NO: 4054801 - RNA, 18 nt, Vaccinia virus
cauaauuauucuaucaau

SEQ ID NO: 4054802 - RNA, 21 nt, Vaccinia virus
cauaauuguuagcuguuuuca

SEQ ID NO: 4054803 - RNA, 15 nt, Vaccinia virus
cauacacuacaguaa

SEQ ID NO: 4054804 - RNA, 21 nt, Vaccinia virus
cauacgugccagcuauguuua

SEQ ID NO: 4054805 - RNA, 12 nt, Vaccinia virus
cauacuacuuau

SEQ ID NO: 4054806 - RNA, 20 nt, Vaccinia virus
cauacuaggagccaucauuu

SEQ ID NO: 4054807 - RNA, 14 nt, Vaccinia virus
cauacuauuguuua

SEQ ID NO: 4054808 - RNA, 21 nt, Vaccinia virus
cauagauauuaauuaucacau

SEQ ID NO: 4054809 - RNA, 16 nt, Vaccinia virus
cauagaugauauugua

SEQ ID NO: 4054810 - RNA, 20 nt, Vaccinia virus
cauagcauaguuuuucauaa

SEQ ID NO: 4054811 - RNA, 20 nt, Vaccinia virus
cauagguagagauacuuuca

SEQ ID NO: 4054812 - RNA, 18 nt, Vaccinia virus
cauaguggacaacauuaa

SEQ ID NO: 4054813 - RNA, 16 nt, Vaccinia virus
cauaguuuguaucaau

SEQ ID NO: 4054814 - RNA, 15 nt, Vaccinia virus
cauauaaaaaaugau

SEQ ID NO: 4054815 - RNA, 18 nt, Vaccinia virus
cauauagauauuuucuuu

SEQ ID NO: 4054816 - RNA, 14 nt, Vaccinia virus
cauauauuacguaa

SEQ ID NO: 4054817 - RNA, 17 nt, Vaccinia virus
cauauauuagaaauaca

SEQ ID NO: 4054818 - RNA, 20 nt, Vaccinia virus
cauaucgucuagauuuuguu

SEQ ID NO: 4054819 - RNA, 19 nt, Vaccinia virus
cauaucuauaggaaaggau

SEQ ID NO: 4054820 - RNA, 13 nt, Vaccinia virus
cauauuacauaau

SEQ ID NO: 4054821 - RNA, 19 nt, Vaccinia virus
cauauuauuuuuauguuuu

SEQ ID NO: 4054822 - RNA, 16 nt, Vaccinia virus
cauauucuaugaauuu

SEQ ID NO: 4054823 - RNA, 14 nt, Vaccinia virus
cauauugacgaugu

SEQ ID NO: 4054824 - RNA, 15 nt, Vaccinia virus
cauauugaucauuua

SEQ ID NO: 4054825 - RNA, 23 nt, Vaccinia virus
cauauuuucugguaguguuucua

SEQ ID NO: 4054826 - RNA, 19 nt, Vaccinia virus
caucaaaugguacaaaaaa

SEQ ID NO: 4054827 - RNA, 21 nt, Vaccinia virus
caucaaccuuccgacuaaaga

SEQ ID NO: 4054828 - RNA, 15 nt, Vaccinia virus
caucaaucaucauuu

SEQ ID NO: 4054829 - RNA, 18 nt, Vaccinia virus
caucagaaaugacuccau

SEQ ID NO: 4054830 - RNA, 21 nt, Vaccinia virus
caucagacguuccggaaagag

SEQ ID NO: 4054831 - RNA, 17 nt, Vaccinia virus
caucagcugaaaaacua

SEQ ID NO: 4054832 - RNA, 18 nt, Vaccinia virus
caucaguaucuucagaca

SEQ ID NO: 4054833 - RNA, 21 nt, Vaccinia virus
caucauacgaaaauagauucu

SEQ ID NO: 4054834 - RNA, 21 nt, Vaccinia virus
caucaucaaaagacuuaugau

SEQ ID NO: 4054835 - RNA, 17 nt, Vaccinia virus
cauccaagucaauaucu

SEQ ID NO: 4054836 - RNA, 24 nt, Vaccinia virus
cauccaugagauugaaugccauuu

SEQ ID NO: 4054837 - RNA, 19 nt, Vaccinia virus
cauccauuuuaugcgaugu

SEQ ID NO: 4054838 - RNA, 17 nt, Vaccinia virus
cauccuacuaugcaauu

SEQ ID NO: 4054839 - RNA, 16 nt, Vaccinia virus
cauccuuuauuaauaa

SEQ ID NO: 4054840 - RNA, 21 nt, Vaccinia virus
caucgauuuuuagauuucauu

SEQ ID NO: 4054841 - RNA, 21 nt, Vaccinia virus
caucgguacggguauucauuu

SEQ ID NO: 4054842 - RNA, 20 nt, Vaccinia virus
caucgucgucuacuauucua

SEQ ID NO: 4054843 - RNA, 19 nt, Vaccinia virus
caucuaacuauaugauauc

SEQ ID NO: 4054844 - RNA, 12 nt, Vaccinia virus
caucuacauaau

SEQ ID NO: 4054845 - RNA, 15 nt, Vaccinia virus
caucuacauaaucua

SEQ ID NO: 4054846 - RNA, 18 nt, Vaccinia virus
caucuauagaaacauauu

SEQ ID NO: 4054847 - RNA, 18 nt, Vaccinia virus
caucuauaggugaugcug

SEQ ID NO: 4054848 - RNA, 18 nt, Vaccinia virus
caucuaucaaacaaaauu

SEQ ID NO: 4054849 - RNA, 12 nt, Vaccinia virus
caucuaucaucu

SEQ ID NO: 4054850 - RNA, 13 nt, Vaccinia virus
caucuaucaucuc

SEQ ID NO: 4054851 - RNA, 23 nt, Vaccinia virus
caucuaucaucuccacacaguca

SEQ ID NO: 4054852 - RNA, 18 nt, Vaccinia virus
caucuauuaaguuuuuuu

SEQ ID NO: 4054853 - RNA, 20 nt, Vaccinia virus
caucuauuguuauauaacaa

SEQ ID NO: 4054854 - RNA, 17 nt, Vaccinia virus
caucugauaauuuagau

SEQ ID NO: 4054855 - RNA, 24 nt, Vaccinia virus
caucugccauaauccuauucuuga

SEQ ID NO: 4054856 - RNA, 12 nt, Vaccinia virus
caucugucauau

SEQ ID NO: 4054857 - RNA, 18 nt, Vaccinia virus
caucuucgucuauuucua

SEQ ID NO: 4054858 - RNA, 20 nt, Vaccinia virus
caucuuggacggaaucgauu

SEQ ID NO: 4054859 - RNA, 23 nt, Vaccinia virus
caugaaaccacugucuaaaugua

SEQ ID NO: 4054860 - RNA, 17 nt, Vaccinia virus
caugaaaugaugauaua

SEQ ID NO: 4054861 - RNA, 18 nt, Vaccinia virus
caugaacacgaugauaua

SEQ ID NO: 4054862 - RNA, 16 nt, Vaccinia virus
caugaaucuaaaagaa

SEQ ID NO: 4054863 - RNA, 17 nt, Vaccinia virus
caugagauugaaugcca

SEQ ID NO: 4054864 - RNA, 19 nt, Vaccinia virus
caugaucaagagugauuua

SEQ ID NO: 4054865 - RNA, 15 nt, Vaccinia virus
caugauuaguauuuu

SEQ ID NO: 4054866 - RNA, 20 nt, Vaccinia virus
caugauuucauuaucggugu

SEQ ID NO: 4054867 - RNA, 17 nt, Vaccinia virus
cauggauuuuauauaga

SEQ ID NO: 4054868 - RNA, 18 nt, Vaccinia virus
caugggucauagaauuua

SEQ ID NO: 4054869 - RNA, 16 nt, Vaccinia virus
caugggugacauaauu

SEQ ID NO: 4054870 - RNA, 20 nt, Vaccinia virus
cauggucuagauguaaaaaa

SEQ ID NO: 4054871 - RNA, 18 nt, Vaccinia virus
cauggugauuuauggaua

SEQ ID NO: 4054872 - RNA, 22 nt, Vaccinia virus
caugucugauauuuugauguau

SEQ ID NO: 4054873 - RNA, 21 nt, Vaccinia virus
cauguucauuggcuguggaau

SEQ ID NO: 4054874 - RNA, 18 nt, Vaccinia virus
cauguuugcucucugaau

SEQ ID NO: 4054875 - RNA, 17 nt, Vaccinia virus
cauguuuuaaugcauuc

SEQ ID NO: 4054876 - RNA, 22 nt, Vaccinia virus
cauuaaacccucgaucaugaau

SEQ ID NO: 4054877 - RNA, 15 nt, Vaccinia virus
cauuaaauguuucau

SEQ ID NO: 4054878 - RNA, 14 nt, Vaccinia virus
cauuaacuauuuuu

SEQ ID NO: 4054879 - RNA, 21 nt, Vaccinia virus
cauuaaggcguugaugcaauu

SEQ ID NO: 4054880 - RNA, 16 nt, Vaccinia virus
cauuaauagaaugaag

SEQ ID NO: 4054881 - RNA, 16 nt, Vaccinia virus
cauuaaucuauuagaa

SEQ ID NO: 4054882 - RNA, 13 nt, Vaccinia virus
cauuaauuucuga

SEQ ID NO: 4054883 - RNA, 16 nt, Vaccinia virus
cauuaauuucugauau

SEQ ID NO: 4054884 - RNA, 22 nt, Vaccinia virus
cauuagccacguucacuguaaa

SEQ ID NO: 4054885 - RNA, 19 nt, Vaccinia virus
cauuaggaaauguuucuga

SEQ ID NO: 4054886 - RNA, 18 nt, Vaccinia virus
cauuagguuaaaugauuu

SEQ ID NO: 4054887 - RNA, 21 nt, Vaccinia virus
cauuauaugggguuacucuaa

SEQ ID NO: 4054888 - RNA, 15 nt, Vaccinia virus
cauuaucaaaaagaa

SEQ ID NO: 4054889 - RNA, 14 nt, Vaccinia virus
cauuauucuauuuc

SEQ ID NO: 4054890 - RNA, 11 nt, Vaccinia virus
cauuauuggaa

SEQ ID NO: 4054891 - RNA, 23 nt, Vaccinia virus
cauuauuuaccgaacaggcauuu

SEQ ID NO: 4054892 - RNA, 19 nt, Vaccinia virus
acagauagaucauuuugaa

SEQ ID NO: 4054893 - RNA, 16 nt, Vaccinia virus
acagaugccagauuac

SEQ ID NO: 4054894 - RNA, 20 nt, Vaccinia virus
acagcacuguggaugugaca

SEQ ID NO: 4054895 - RNA, 20 nt, Vaccinia virus
acaggaccguauuagaaugu

SEQ ID NO: 4054896 - RNA, 19 nt, Vaccinia virus
acaguaguaauuaaugaaa

SEQ ID NO: 4054897 - RNA, 21 nt, Vaccinia virus
acagucugcggacuuuaaaca

SEQ ID NO: 4054898 - RNA, 15 nt, Vaccinia virus
acauaaaaaaaaugu

SEQ ID NO: 4054899 - RNA, 15 nt, Vaccinia virus
acauaaauaauucua

SEQ ID NO: 4054900 - RNA, 18 nt, Vaccinia virus
acauagaguuaagagaga

SEQ ID NO: 4054901 - RNA, 24 nt, Vaccinia virus
acauagaugugguaauaucugacu

SEQ ID NO: 4054902 - RNA, 20 nt, Vaccinia virus
acauaguguuuuauauucca

SEQ ID NO: 4054903 - RNA, 20 nt, Vaccinia virus
acauaguugaauaaauccuc

SEQ ID NO: 4054904 - RNA, 16 nt, Vaccinia virus
acauauauuauuacau

SEQ ID NO: 4054905 - RNA, 15 nt, Vaccinia virus
acauaucuaacaaug

SEQ ID NO: 4054906 - RNA, 19 nt, Vaccinia virus
acauaugguuucuaaaucu

SEQ ID NO: 4054907 - RNA, 15 nt, Vaccinia virus
acauauuaaaaauuc

SEQ ID NO: 4054908 - RNA, 22 nt, Vaccinia virus
acauauuauucaaaauaugauu

SEQ ID NO: 4054909 - RNA, 16 nt, Vaccinia virus
acauauuuuaaugaac

SEQ ID NO: 4054910 - RNA, 14 nt, Vaccinia virus
acaucaaaauaaua

SEQ ID NO: 4054911 - RNA, 14 nt, Vaccinia virus
acaucaaaugaugu

SEQ ID NO: 4054912 - RNA, 19 nt, Vaccinia virus
acauccuuccaagaagaag

SEQ ID NO: 4054913 - RNA, 18 nt, Vaccinia virus
acauccuucuauguugac

SEQ ID NO: 4054914 - RNA, 20 nt, Vaccinia virus
acaucggcugccaaaguuau

SEQ ID NO: 4054915 - RNA, 17 nt, Vaccinia virus
acaucuauauacuauau

SEQ ID NO: 4054916 - RNA, 13 nt, Vaccinia virus
acaucucucauaa

SEQ ID NO: 4054917 - RNA, 21 nt, Vaccinia virus
acaucucuggaaauagaauuc

SEQ ID NO: 4054918 - RNA, 19 nt, Vaccinia virus
acaucugcguuaucaauaa

SEQ ID NO: 4054919 - RNA, 22 nt, Vaccinia virus
acaucuguuugagaauuaagau

SEQ ID NO: 4054920 - RNA, 15 nt, Vaccinia virus
acaucuuuccuacau

SEQ ID NO: 4054921 - RNA, 16 nt, Vaccinia virus
acaugacauuuuccuu

SEQ ID NO: 4054922 - RNA, 18 nt, Vaccinia virus
acaugagagaaacaauau

SEQ ID NO: 4054923 - RNA, 14 nt, Vaccinia virus
acaugcagaagaac

SEQ ID NO: 4054924 - RNA, 18 nt, Vaccinia virus
acaugcgguucaaaauag

SEQ ID NO: 4054925 - RNA, 18 nt, Vaccinia virus
acaugcuacaaaauaugu

SEQ ID NO: 4054926 - RNA, 13 nt, Vaccinia virus
acaugcuguauac

SEQ ID NO: 4054927 - RNA, 23 nt, Vaccinia virus
acaugguuaaaguacauguacaa

SEQ ID NO: 4054928 - RNA, 18 nt, Vaccinia virus
acaugguucuccaugaau

SEQ ID NO: 4054929 - RNA, 11 nt, Vaccinia virus
acauguaacug

SEQ ID NO: 4054930 - RNA, 22 nt, Vaccinia virus
acauguauacuugacaaaaauu

SEQ ID NO: 4054931 - RNA, 18 nt, Vaccinia virus
acaugucaucgaaauggu

SEQ ID NO: 4054932 - RNA, 17 nt, Vaccinia virus
acaugucucucucaaau

SEQ ID NO: 4054933 - RNA, 17 nt, Vaccinia virus
acauguguuuuagaaua

SEQ ID NO: 4054934 - RNA, 13 nt, Vaccinia virus
acauguuaguaga

SEQ ID NO: 4054935 - RNA, 21 nt, Vaccinia virus
acauguuccagaugucauaau

SEQ ID NO: 4054936 - RNA, 16 nt, Vaccinia virus
acauuaaaaauuucca

SEQ ID NO: 4054937 - RNA, 22 nt, Vaccinia virus
acauuagcagauuaguaugaag

SEQ ID NO: 4054938 - RNA, 13 nt, Vaccinia virus
acauuauaauaau

SEQ ID NO: 4054939 - RNA, 22 nt, Vaccinia virus
acauuaugccguuaucauuaau

SEQ ID NO: 4054940 - RNA, 16 nt, Vaccinia virus
acauucagaaagacga

SEQ ID NO: 4054941 - RNA, 12 nt, Vaccinia virus
acauucaucaau

SEQ ID NO: 4054942 - RNA, 14 nt, Vaccinia virus
acauuccuaugaug

SEQ ID NO: 4054943 - RNA, 22 nt, Vaccinia virus
acauucgauggucuaucuauca

SEQ ID NO: 4054944 - RNA, 14 nt, Vaccinia virus
acauucuuaaacaa

SEQ ID NO: 4054945 - RNA, 14 nt, Vaccinia virus
aaaaaaagaauaua

SEQ ID NO: 4054946 - RNA, 13 nt, Vaccinia virus
aaaaaaauaaaua

SEQ ID NO: 4054947 - RNA, 13 nt, Vaccinia virus
aaaaaagaacuaa

SEQ ID NO: 4054948 - RNA, 12 nt, Vaccinia virus
aaaaaauauauu

SEQ ID NO: 4054949 - RNA, 16 nt, Vaccinia virus
aaaaacucuaacaugu

SEQ ID NO: 4054950 - RNA, 16 nt, Vaccinia virus
aaaaagaaagaauaua

SEQ ID NO: 4054951 - RNA, 22 nt, Vaccinia virus
aaaaagauuaccguaugauaug

SEQ ID NO: 4054952 - RNA, 19 nt, Vaccinia virus
aaaaagauuucagaaucua

SEQ ID NO: 4054953 - RNA, 15 nt, Vaccinia virus
aaaaagauuuuguua

SEQ ID NO: 4054954 - RNA, 19 nt, Vaccinia virus
aaaaagccccaauuuacaa

SEQ ID NO: 4054955 - RNA, 15 nt, Vaccinia virus
aaaaaguuuuaacau

SEQ ID NO: 4054956 - RNA, 12 nt, Vaccinia virus
aaaaauaaacaa

SEQ ID NO: 4054957 - RNA, 21 nt, Vaccinia virus
aaaaaucugauagaaagaaua

SEQ ID NO: 4054958 - RNA, 14 nt, Vaccinia virus
aaaaaucuuuguuc

SEQ ID NO: 4054959 - RNA, 14 nt, Vaccinia virus
aaaaaugaugaauu

SEQ ID NO: 4054960 - RNA, 22 nt, Vaccinia virus
aaaaauuuuaagcgaugauaug

SEQ ID NO: 4054961 - RNA, 22 nt, Vaccinia virus
aaaacaaauuuguacaugaaga

SEQ ID NO: 4054962 - RNA, 23 nt, Vaccinia virus
aaaacagaauaugagaaugaaua

SEQ ID NO: 4054963 - RNA, 11 nt, Vaccinia virus
aaaacagauga

SEQ ID NO: 4054964 - RNA, 11 nt, Vaccinia virus
aaaacauaaua

SEQ ID NO: 4054965 - RNA, 16 nt, Vaccinia virus
aaaacauucaaauguu

SEQ ID NO: 4054966 - RNA, 21 nt, Vaccinia virus
aaaaccaguauuuguagcaag

SEQ ID NO: 4054967 - RNA, 16 nt, Vaccinia virus
aaaaccguuaaaaugu

SEQ ID NO: 4054968 - RNA, 18 nt, Vaccinia virus
aaaacuaucaaugauaug

SEQ ID NO: 4054969 - RNA, 17 nt, Vaccinia virus
aaaacucuaagaacuua

SEQ ID NO: 4054970 - RNA, 16 nt, Vaccinia virus
aaaacugaaaauauau

SEQ ID NO: 4054971 - RNA, 19 nt, Vaccinia virus
aaaacugguuaaaacagua

SEQ ID NO: 4054972 - RNA, 22 nt, Vaccinia virus
aaaacugguuuaacuaauaaua

SEQ ID NO: 4054973 - RNA, 18 nt, Vaccinia virus
aaaacuugauaauuaaua

SEQ ID NO: 4054974 - RNA, 22 nt, Vaccinia virus
aaaagcuauuaucaaauacugu

SEQ ID NO: 4054975 - RNA, 13 nt, Vaccinia virus
aaaagcuuaaaau

SEQ ID NO: 4054976 - RNA, 23 nt, Vaccinia virus
aaaaggaauuuaccagugauuau

SEQ ID NO: 4054977 - RNA, 17 nt, Vaccinia virus
aaaaggucauaacaagu

SEQ ID NO: 4054978 - RNA, 12 nt, Vaccinia virus
aaaaguaaauga

SEQ ID NO: 4054979 - RNA, 16 nt, Vaccinia virus
aaaaguccucgaauua

SEQ ID NO: 4054980 - RNA, 13 nt, Vaccinia virus
aaaaguuaaaacu

SEQ ID NO: 4054981 - RNA, 22 nt, Vaccinia virus
aaaaguuguagaacguaaauua

SEQ ID NO: 4054982 - RNA, 15 nt, Vaccinia virus
aaaauaaaaugagua

SEQ ID NO: 4054983 - RNA, 20 nt, Vaccinia virus
aaaauaaacacauagaaaua

SEQ ID NO: 4054984 - RNA, 13 nt, Vaccinia virus
aaaauaauaauua

SEQ ID NO: 4054985 - RNA, 15 nt, Vaccinia virus
aaaauaauaugauua

SEQ ID NO: 4054986 - RNA, 10 nt, Vaccinia virus
aaaauacuua

SEQ ID NO: 4054987 - RNA, 19 nt, Vaccinia virus
aaaauauaaugauauacaa

SEQ ID NO: 4054988 - RNA, 14 nt, Vaccinia virus
aaaauauaauguac

SEQ ID NO: 4054989 - RNA, 13 nt, Vaccinia virus
aaaauauaauuua

SEQ ID NO: 4054990 - RNA, 13 nt, Vaccinia virus
aaaauauguagaa

SEQ ID NO: 4054991 - RNA, 18 nt, Vaccinia virus
aaaauauuuauuagaaca

SEQ ID NO: 4054992 - RNA, 22 nt, Vaccinia virus
aaaauauuuuuauucucuuucu

SEQ ID NO: 4054993 - RNA, 22 nt, Vaccinia virus
aaaaucgucuucacaaagaaug

SEQ ID NO: 4054994 - RNA, 21 nt, Vaccinia virus
aaaaucguguuuguguaguuu

SEQ ID NO: 4054995 - RNA, 22 nt, Vaccinia virus
aaaaucuuuguucuaaaaacug

SEQ ID NO: 4054996 - RNA, 16 nt, Vaccinia virus
aaaaugcagaaaugau

SEQ ID NO: 4054997 - RNA, 19 nt, Vaccinia virus
aaaaugcauguacagaauc

SEQ ID NO: 4054998 - RNA, 19 nt, Vaccinia virus
aaaaugcgauguugauuua

SEQ ID NO: 4054999 - RNA, 15 nt, Vaccinia virus
aaaaugcuagaauua

SEQ ID NO: 4055000 - RNA, 21 nt, Vaccinia virus
aaaaugcuccgcauaacucua

SEQ ID NO: 4055001 - RNA, 15 nt, Vaccinia virus
aaaauggacguagaa

SEQ ID NO: 4055002 - RNA, 18 nt, Vaccinia virus
aaaauggugcuauuagaa

SEQ ID NO: 4055003 - RNA, 16 nt, Vaccinia virus
aaaaugugauauagaa

SEQ ID NO: 4055004 - RNA, 17 nt, Vaccinia virus
aaaauuccgcuacuaau

SEQ ID NO: 4055005 - RNA, 15 nt, Vaccinia virus
aaaauucgacaauga

SEQ ID NO: 4055006 - RNA, 20 nt, Vaccinia virus
aaaauucuuaaaauaauuua

SEQ ID NO: 4055007 - RNA, 13 nt, Vaccinia virus
aaaauugcauuug

SEQ ID NO: 4055008 - RNA, 19 nt, Vaccinia virus
aaaauuguaacaacaaugu

SEQ ID NO: 4055009 - RNA, 19 nt, Vaccinia virus
aaaauuguugaucauauag

SEQ ID NO: 4055010 - RNA, 15 nt, Vaccinia virus
aaaauuuaaagaaug

SEQ ID NO: 4055011 - RNA, 14 nt, Vaccinia virus
aaaauuuagaauga

SEQ ID NO: 4055012 - RNA, 15 nt, Vaccinia virus
aaacaaaauuuuacu

SEQ ID NO: 4055013 - RNA, 11 nt, Vaccinia virus
aaacaaacauc

SEQ ID NO: 4055014 - RNA, 12 nt, Vaccinia virus
aaacaacugaaa

SEQ ID NO: 4055015 - RNA, 22 nt, Vaccinia virus
aaacaagugauacguaagaaua

SEQ ID NO: 4055016 - RNA, 14 nt, Vaccinia virus
aaacaauacucuau

SEQ ID NO: 4055017 - RNA, 15 nt, Vaccinia virus
aaacaauguauacaa

SEQ ID NO: 4055018 - RNA, 12 nt, Vaccinia virus
aaacaauguuuc

SEQ ID NO: 4055019 - RNA, 20 nt, Vaccinia virus
aaacacugauucagaaaugg

SEQ ID NO: 4055020 - RNA, 22 nt, Vaccinia virus
aaacacuguuguuagagauuuu

SEQ ID NO: 4055021 - RNA, 16 nt, Vaccinia virus
aaacagaugguagaac

SEQ ID NO: 4055022 - RNA, 12 nt, Vaccinia virus
aaacauggagac

SEQ ID NO: 4055023 - RNA, 15 nt, Vaccinia virus
aaacauugauuaaau

SEQ ID NO: 4055024 - RNA, 18 nt, Vaccinia virus
aaacauuuuauuucuaga

SEQ ID NO: 4055025 - RNA, 20 nt, Vaccinia virus
aaaccaucggagaaggaaua

SEQ ID NO: 4055026 - RNA, 20 nt, Vaccinia virus
aaaccgaugauuauauguuc

SEQ ID NO: 4055027 - RNA, 19 nt, Vaccinia virus
aaacgaguacuuuaaagaa

SEQ ID NO: 4055028 - RNA, 17 nt, Vaccinia virus
aaacgauuaaacaauau

SEQ ID NO: 4055029 - RNA, 16 nt, Vaccinia virus
aaacuaaacuuauuua

SEQ ID NO: 4055030 - RNA, 20 nt, Vaccinia virus
aaacuaacauuguuaauuga

SEQ ID NO: 4055031 - RNA, 18 nt, Vaccinia virus
aaacuacgucaagacucu

SEQ ID NO: 4055032 - RNA, 14 nt, Vaccinia virus
aaacuacuggaaua

SEQ ID NO: 4055033 - RNA, 12 nt, Vaccinia virus
aaacuagcaaac

SEQ ID NO: 4055034 - RNA, 23 nt, Vaccinia virus
aaacuaugucaaaaauuguagaa

SEQ ID NO: 4055035 - RNA, 15 nt, Vaccinia virus
aauacuuaaaaugua

SEQ ID NO: 4055036 - RNA, 15 nt, Vaccinia virus
aauacuuuacgcuau

SEQ ID NO: 4055037 - RNA, 21 nt, Vaccinia virus
aauacuuuuuuuauuaaauga

SEQ ID NO: 4055038 - RNA, 17 nt, Vaccinia virus
aauagaaaaaacaugug

SEQ ID NO: 4055039 - RNA, 20 nt, Vaccinia virus
aauagaaucuauuuuaauga

SEQ ID NO: 4055040 - RNA, 11 nt, Vaccinia virus
aauagaaucug

SEQ ID NO: 4055041 - RNA, 14 nt, Vaccinia virus
aauagauaucauga

SEQ ID NO: 4055042 - RNA, 14 nt, Vaccinia virus
aauagaugaauaua

SEQ ID NO: 4055043 - RNA, 18 nt, Vaccinia virus
aauagauguauuugauau

SEQ ID NO: 4055044 - RNA, 22 nt, Vaccinia virus
aauagcaccuagacaaguugcu

SEQ ID NO: 4055045 - RNA, 18 nt, Vaccinia virus
aauagcuuuacuucuaua

SEQ ID NO: 4055046 - RNA, 18 nt, Vaccinia virus
aauaggaguuagaauaau

SEQ ID NO: 4055047 - RNA, 21 nt, Vaccinia virus
aauaguacgacuuuaaaucca

SEQ ID NO: 4055048 - RNA, 18 nt, Vaccinia virus
aauagucuuguaaagaua

SEQ ID NO: 4055049 - RNA, 20 nt, Vaccinia virus
aauagugucauuaggaguua

SEQ ID NO: 4055050 - RNA, 15 nt, Vaccinia virus
aauaguguuagauaa

SEQ ID NO: 4055051 - RNA, 14 nt, Vaccinia virus
aauaguguucuaaa

SEQ ID NO: 4055052 - RNA, 19 nt, Vaccinia virus
aauaguuacauacaaacug

SEQ ID NO: 4055053 - RNA, 14 nt, Vaccinia virus
aauaguuuaucaua

SEQ ID NO: 4055054 - RNA, 19 nt, Vaccinia virus
aauaguuuguuuuggaaau

SEQ ID NO: 4055055 - RNA, 17 nt, Vaccinia virus
aauauaaaaaaaugauu

SEQ ID NO: 4055056 - RNA, 12 nt, Vaccinia virus
aauauaaaacua

SEQ ID NO: 4055057 - RNA, 15 nt, Vaccinia virus
aauauaacaguaucu

SEQ ID NO: 4055058 - RNA, 18 nt, Vaccinia virus
aauauaaugauauacaau

SEQ ID NO: 4055059 - RNA, 21 nt, Vaccinia virus
aauauacagacucuaucgugu

SEQ ID NO: 4055060 - RNA, 12 nt, Vaccinia virus
aauauacucuau

SEQ ID NO: 4055061 - RNA, 12 nt, Vaccinia virus
aauauagaauau

SEQ ID NO: 4055062 - RNA, 20 nt, Vaccinia virus
aauauagcaucgauccauga

SEQ ID NO: 4055063 - RNA, 21 nt, Vaccinia virus
aauauagguauauuuauucca

SEQ ID NO: 4055064 - RNA, 15 nt, Vaccinia virus
aauauauugaucaua

SEQ ID NO: 4055065 - RNA, 12 nt, Vaccinia virus
aauaucauuaag

SEQ ID NO: 4055066 - RNA, 23 nt, Vaccinia virus
aauauccacuauugcaacuauaa

SEQ ID NO: 4055067 - RNA, 18 nt, Vaccinia virus
aauauccagaguguuuca

SEQ ID NO: 4055068 - RNA, 21 nt, Vaccinia virus
aauaucuaggacaauaguuuc

SEQ ID NO: 4055069 - RNA, 20 nt, Vaccinia virus
aauaucucaauaguuucaua

SEQ ID NO: 4055070 - RNA, 15 nt, Vaccinia virus
aauaucuguuccuca

SEQ ID NO: 4055071 - RNA, 14 nt, Vaccinia virus
aauaucuuaaauaa

SEQ ID NO: 4055072 - RNA, 17 nt, Vaccinia virus
aauaucuuuacgaauua

SEQ ID NO: 4055073 - RNA, 19 nt, Vaccinia virus
aauaucuuuauucauucca

SEQ ID NO: 4055074 - RNA, 14 nt, Vaccinia virus
aauaugauagaaau

SEQ ID NO: 4055075 - RNA, 20 nt, Vaccinia virus
aauaugauuagaaguuauau

SEQ ID NO: 4055076 - RNA, 22 nt, Vaccinia virus
aauaugcuaguuaauaguaaau

SEQ ID NO: 4055077 - RNA, 20 nt, Vaccinia virus
aauaugcucaugaacauuag

SEQ ID NO: 4055078 - RNA, 19 nt, Vaccinia virus
aauaugguaauuuagagaa

SEQ ID NO: 4055079 - RNA, 21 nt, Vaccinia virus
aauaugguauggguucugaua

SEQ ID NO: 4055080 - RNA, 22 nt, Vaccinia virus
aauauguucucgucuaagagau

SEQ ID NO: 4055081 - RNA, 13 nt, Vaccinia virus
aauauuaaaacuu

SEQ ID NO: 4055082 - RNA, 19 nt, Vaccinia virus
aauauuauauaaacauuug

SEQ ID NO: 4055083 - RNA, 20 nt, Vaccinia virus
aauauucacaagaugaauuc

SEQ ID NO: 4055084 - RNA, 14 nt, Vaccinia virus
aauauucuaaauua

SEQ ID NO: 4055085 - RNA, 23 nt, Vaccinia virus
aauauuguaacaauuuauuuugu

SEQ ID NO: 4055086 - RNA, 15 nt, Vaccinia virus
aauauuguagcauua

SEQ ID NO: 4055087 - RNA, 23 nt, Vaccinia virus
aauauuguuuuucacuuuuuaua

SEQ ID NO: 4055088 - RNA, 14 nt, Vaccinia virus
aauauuuaguauua

SEQ ID NO: 4055089 - RNA, 21 nt, Vaccinia virus
aauauuuaguuuauucauaau

SEQ ID NO: 4055090 - RNA, 14 nt, Vaccinia virus
aauauuuuuaguuu

SEQ ID NO: 4055091 - RNA, 13 nt, Vaccinia virus
aauauuuuuauuu

SEQ ID NO: 4055092 - RNA, 14 nt, Vaccinia virus
aauauuuuuccauu

SEQ ID NO: 4055093 - RNA, 13 nt, Vaccinia virus
aauauuuuucuau

SEQ ID NO: 4055094 - RNA, 16 nt, Vaccinia virus
aauauuuuuuagagaa

SEQ ID NO: 4055095 - RNA, 19 nt, Vaccinia virus
aaucaaggaacuaaauaga

SEQ ID NO: 4055096 - RNA, 19 nt, Vaccinia virus
aaucaagggaaaaucugaa

SEQ ID NO: 4055097 - RNA, 18 nt, Vaccinia virus
aaucaaugauagacuaga

SEQ ID NO: 4055098 - RNA, 19 nt, Vaccinia virus
aaucaauguacauacaucg

SEQ ID NO: 4055099 - RNA, 20 nt, Vaccinia virus
aaucaccaaauuuuacaaaa

SEQ ID NO: 4055100 - RNA, 20 nt, Vaccinia virus
aaucaccgcaagaacacacg

SEQ ID NO: 4055101 - RNA, 19 nt, Vaccinia virus
aaucacuacaauaauuaca

SEQ ID NO: 4055102 - RNA, 15 nt, Vaccinia virus
aaucacuauagaaaa

SEQ ID NO: 4055103 - RNA, 21 nt, Vaccinia virus
aaucacugcgauuguauuauc

SEQ ID NO: 4055104 - RNA, 14 nt, Vaccinia virus
aaucagaaaugaug

SEQ ID NO: 4055105 - RNA, 23 nt, Vaccinia virus
aaucagacugggaggaucacugu

SEQ ID NO: 4055106 - RNA, 15 nt, Vaccinia virus
aaucaguuuaggaaa

SEQ ID NO: 4055107 - RNA, 14 nt, Vaccinia virus
aaucauagaacugc

SEQ ID NO: 4055108 - RNA, 12 nt, Vaccinia virus
aaucaucacugu

SEQ ID NO: 4055109 - RNA, 18 nt, Vaccinia virus
aaucauccauaaauuaua

SEQ ID NO: 4055110 - RNA, 12 nt, Vaccinia virus
aaucauguacau

SEQ ID NO: 4055111 - RNA, 15 nt, Vaccinia virus
aaucauuaaaugauu

SEQ ID NO: 4055112 - RNA, 17 nt, Vaccinia virus
aaucauugggaaacauu

SEQ ID NO: 4055113 - RNA, 22 nt, Vaccinia virus
aaucauuucgacauuaauuccu

SEQ ID NO: 4055114 - RNA, 15 nt, Vaccinia virus
aauccaaaaaaugaa

SEQ ID NO: 4055115 - RNA, 15 nt, Vaccinia virus
aauccaaacaucacu

SEQ ID NO: 4055116 - RNA, 18 nt, Vaccinia virus
aauccaguaauaucaugu

SEQ ID NO: 4055117 - RNA, 20 nt, Vaccinia virus
aauccagucuuuaaugaauu

SEQ ID NO: 4055118 - RNA, 21 nt, Vaccinia virus
aauccaucuguauuaaagaua

SEQ ID NO: 4055119 - RNA, 15 nt, Vaccinia virus
aauccauucuaauga

SEQ ID NO: 4055120 - RNA, 20 nt, Vaccinia virus
aauccauucucucaaucacu

SEQ ID NO: 4055121 - RNA, 15 nt, Vaccinia virus
aauccuguuucuacu

SEQ ID NO: 4055122 - RNA, 21 nt, Vaccinia virus
aaucgauaaaaccaugaaaua

SEQ ID NO: 4055123 - RNA, 15 nt, Vaccinia virus
aaucguauaucuucu

SEQ ID NO: 4055124 - RNA, 23 nt, Vaccinia virus
aaucgucuauaauaaugaauauu

SEQ ID NO: 4055125 - RNA, 22 nt, Vaccinia virus
aaucuaauaacuugaaagagau

SEQ ID NO: 4055126 - RNA, 17 nt, Vaccinia virus
aaucuaccuauagaaaa

SEQ ID NO: 4055127 - RNA, 18 nt, Vaccinia virus
aaucuagauuccaaucau

SEQ ID NO: 4055128 - RNA, 18 nt, Vaccinia virus
aaucuaggaauuacauaa

SEQ ID NO: 4055129 - RNA, 19 nt, Vaccinia virus
aaucuaguacgcgaaauaa

SEQ ID NO: 4055130 - RNA, 23 nt, Vaccinia virus
aaucuaguuguggaaauacuucc

SEQ ID NO: 4055131 - RNA, 19 nt, Vaccinia virus
aaucuauccgcgacaaauu

SEQ ID NO: 4055132 - RNA, 19 nt, Vaccinia virus
aaucucguuacauguuauu

SEQ ID NO: 4055133 - RNA, 19 nt, Vaccinia virus
aaucucuaucaucacauau

SEQ ID NO: 4055134 - RNA, 14 nt, Vaccinia virus
aaucugaaaaugaa

SEQ ID NO: 4055135 - RNA, 23 nt, Vaccinia virus
aaucugagauuuuacguaucuau

SEQ ID NO: 4055136 - RNA, 11 nt, Vaccinia virus
aaucuggaaaa

SEQ ID NO: 4055137 - RNA, 21 nt, Vaccinia virus
aaucuuaaacauauagggaau

SEQ ID NO: 4055138 - RNA, 17 nt, Vaccinia virus
aaucuuaauaucuucgu

SEQ ID NO: 4055139 - RNA, 15 nt, Vaccinia virus
aaucuuggaaauuau

SEQ ID NO: 4055140 - RNA, 20 nt, Vaccinia virus
aaucuuggcauauugaucau

SEQ ID NO: 4055141 - RNA, 14 nt, Vaccinia virus
aaucuuuaauguaa

SEQ ID NO: 4055142 - RNA, 16 nt, Vaccinia virus
aaucuuugucaaauau

SEQ ID NO: 4055143 - RNA, 14 nt, Vaccinia virus
aaucuuuugugaaa

SEQ ID NO: 4055144 - RNA, 23 nt, Vaccinia virus
aaucuuuuuauuaguaggcaucu

SEQ ID NO: 4055145 - RNA, 12 nt, Vaccinia virus
aaugaaaauaua

SEQ ID NO: 4055146 - RNA, 23 nt, Vaccinia virus
aaugaaaauauaaauaguuuuua

SEQ ID NO: 4055147 - RNA, 12 nt, Vaccinia virus
aaugaaauucuu

SEQ ID NO: 4055148 - RNA, 23 nt, Vaccinia virus
aaugaacaucgggaauauagaau

SEQ ID NO: 4055149 - RNA, 21 nt, Vaccinia virus
aaugaagauaucauugauuga

SEQ ID NO: 4055150 - RNA, 19 nt, Vaccinia virus
aaugaagaucuauuuccag

SEQ ID NO: 4055151 - RNA, 13 nt, Vaccinia virus
aaugaauacagug

SEQ ID NO: 4055152 - RNA, 13 nt, Vaccinia virus
aaugaauauagau

SEQ ID NO: 4055153 - RNA, 17 nt, Vaccinia virus
aaugaaucccaaacauu

SEQ ID NO: 4055154 - RNA, 12 nt, Vaccinia virus
aaugaauguuua

SEQ ID NO: 4055155 - RNA, 23 nt, Vaccinia virus
aaugaauuaauuaagauauuguu

SEQ ID NO: 4055156 - RNA, 16 nt, Vaccinia virus
aaugaauuauuuacaa

SEQ ID NO: 4055157 - RNA, 22 nt, Vaccinia virus
aaugacaauaaaauuaucauga

SEQ ID NO: 4055158 - RNA, 21 nt, Vaccinia virus
aaugacaucuaugauuuuacu

SEQ ID NO: 4055159 - RNA, 18 nt, Vaccinia virus
aaugagagcaaaaauaua

SEQ ID NO: 4055160 - RNA, 22 nt, Vaccinia virus
aaugagauuauuaaguauuuau

SEQ ID NO: 4055161 - RNA, 21 nt, Vaccinia virus
aaugaggucgcaaaaaaacug

SEQ ID NO: 4055162 - RNA, 21 nt, Vaccinia virus
aaugaguaauuaauugucuua

SEQ ID NO: 4055163 - RNA, 13 nt, Vaccinia virus
aaugauaacuaga

SEQ ID NO: 4055164 - RNA, 13 nt, Vaccinia virus
aaugauaaugaua

SEQ ID NO: 4055165 - RNA, 15 nt, Vaccinia virus
aaugauaaugauaca

SEQ ID NO: 4055166 - RNA, 14 nt, Vaccinia virus
aaugauacagaaaa

SEQ ID NO: 4055167 - RNA, 21 nt, Vaccinia virus
aaugauauccgcgaacgauau

SEQ ID NO: 4055168 - RNA, 17 nt, Vaccinia virus
aaugauaucuuagaaua

SEQ ID NO: 4055169 - RNA, 19 nt, Vaccinia virus
aaugaucauccagauaaua

SEQ ID NO: 4055170 - RNA, 19 nt, Vaccinia virus
aaugaucucaauuagaaua

SEQ ID NO: 4055171 - RNA, 15 nt, Vaccinia virus
aaugaugaaaggaua

SEQ ID NO: 4055172 - RNA, 21 nt, Vaccinia virus
aaugaugaugaugaaauggau

SEQ ID NO: 4055173 - RNA, 16 nt, Vaccinia virus
aaugaugucaggaaau

SEQ ID NO: 4055174 - RNA, 21 nt, Vaccinia virus
aaugauuuagaaaugaaguua

SEQ ID NO: 4055175 - RNA, 14 nt, Vaccinia virus
aaugcaaauuacuu

SEQ ID NO: 4055176 - RNA, 23 nt, Vaccinia virus
aaugcacuguucaagaauuuaua

SEQ ID NO: 4055177 - RNA, 21 nt, Vaccinia virus
aaugcagauuuauugaaaaug

SEQ ID NO: 4055178 - RNA, 13 nt, Vaccinia virus
aaugcauuuuaua

SEQ ID NO: 4055179 - RNA, 23 nt, Vaccinia virus
aaugccuuacucgguguauauaa

SEQ ID NO: 4055180 - RNA, 15 nt, Vaccinia virus
aaugcuaauauuaaa

SEQ ID NO: 4055181 - RNA, 13 nt, Vaccinia virus
aauggaaauacuu

SEQ ID NO: 4055182 - RNA, 14 nt, Vaccinia virus
aauggaugucauga

SEQ ID NO: 4055183 - RNA, 13 nt, Vaccinia virus
aauggcaaaugua

SEQ ID NO: 4055184 - RNA, 14 nt, Vaccinia virus
aauggcugaauggc

SEQ ID NO: 4055185 - RNA, 18 nt, Vaccinia virus
aauggcuguuuguauaau

SEQ ID NO: 4055186 - RNA, 14 nt, Vaccinia virus
aaugggagcuuaaa

SEQ ID NO: 4055187 - RNA, 14 nt, Vaccinia virus
aaugguuucgaaga

SEQ ID NO: 4055188 - RNA, 12 nt, Vaccinia virus
aauguaaagaua

SEQ ID NO: 4055189 - RNA, 16 nt, Vaccinia virus
aauguaaagguuuaua

SEQ ID NO: 4055190 - RNA, 15 nt, Vaccinia virus
aauguacucaugaaa

SEQ ID NO: 4055191 - RNA, 21 nt, Vaccinia virus
aauguacuucgaugagauuga

SEQ ID NO: 4055192 - RNA, 22 nt, Vaccinia virus
aauguagaaauugaaaauaaua

SEQ ID NO: 4055193 - RNA, 14 nt, Vaccinia virus
aauguaguaaauau

SEQ ID NO: 4055194 - RNA, 12 nt, Vaccinia virus
aauguauaacag

SEQ ID NO: 4055195 - RNA, 21 nt, Vaccinia virus
aauguaugaacaucauggaau

SEQ ID NO: 4055196 - RNA, 15 nt, Vaccinia virus
aaugucaaguuuauu

SEQ ID NO: 4055197 - RNA, 15 nt, Vaccinia virus
aauguccaagucuug

SEQ ID NO: 4055198 - RNA, 14 nt, Vaccinia virus
aauguccacaaaug

SEQ ID NO: 4055199 - RNA, 18 nt, Vaccinia virus
aauguuaucgaugaugua

SEQ ID NO: 4055200 - RNA, 15 nt, Vaccinia virus
aauguuauuacuugu

SEQ ID NO: 4055201 - RNA, 12 nt, Vaccinia virus
aauguucaauau

SEQ ID NO: 4055202 - RNA, 15 nt, Vaccinia virus
aauguucugucuugu

SEQ ID NO: 4055203 - RNA, 20 nt, Vaccinia virus
aauguucuuaacuacauuca

SEQ ID NO: 4055204 - RNA, 20 nt, Vaccinia virus
aauguuuaaacaucaaacau

SEQ ID NO: 4055205 - RNA, 21 nt, Vaccinia virus
aauguuucgaugaaauagaua

SEQ ID NO: 4055206 - RNA, 16 nt, Vaccinia virus
aauuaacaauaucaau

SEQ ID NO: 4055207 - RNA, 23 nt, Vaccinia virus
aauuaaggagauagcuucaucua

SEQ ID NO: 4055208 - RNA, 13 nt, Vaccinia virus
aauuaauaaugau

SEQ ID NO: 4055209 - RNA, 15 nt, Vaccinia virus
aauuaauauguauga

SEQ ID NO: 4055210 - RNA, 15 nt, Vaccinia virus
aauuacagacagcaa

SEQ ID NO: 4055211 - RNA, 21 nt, Vaccinia virus
aauuacagaguuuucagaaga

SEQ ID NO: 4055212 - RNA, 15 nt, Vaccinia virus
aauuacccauggaga

SEQ ID NO: 4055213 - RNA, 20 nt, Vaccinia virus
aauuagucuauuauccaaga

SEQ ID NO: 4055214 - RNA, 17 nt, Vaccinia virus
aauuagugaucaguuua

SEQ ID NO: 4055215 - RNA, 12 nt, Vaccinia virus
aauuauauaaau

SEQ ID NO: 4055216 - RNA, 12 nt, Vaccinia virus
aauuauauuguc

SEQ ID NO: 4055217 - RNA, 15 nt, Vaccinia virus
aauuaucaaauacuu

SEQ ID NO: 4055218 - RNA, 12 nt, Vaccinia virus
aauuaucaaaug

SEQ ID NO: 4055219 - RNA, 22 nt, Vaccinia virus
aauuaucguuccugguauauag

SEQ ID NO: 4055220 - RNA, 22 nt, Vaccinia virus
aauuaugaaaaaguaaaugaug

SEQ ID NO: 4055221 - RNA, 19 nt, Vaccinia virus
aauuauuagcaaaaauaua

SEQ ID NO: 4055222 - RNA, 16 nt, Vaccinia virus
aauuauuauuaaauau

SEQ ID NO: 4055223 - RNA, 15 nt, Vaccinia virus
aauuauuauuacuga

SEQ ID NO: 4055224 - RNA, 21 nt, Vaccinia virus
aauuauucacaauaucaguau

SEQ ID NO: 4055225 - RNA, 23 nt, Vaccinia virus
aauuauucauucuagaacuauaa

SEQ ID NO: 4055226 - RNA, 22 nt, Vaccinia virus
aauuauuccucucaucacuaau

SEQ ID NO: 4055227 - RNA, 13 nt, Vaccinia virus
aauuauuuaacuu

SEQ ID NO: 4055228 - RNA, 19 nt, Vaccinia virus
aauuauuuuuucuuaguaa

SEQ ID NO: 4055229 - RNA, 17 nt, Vaccinia virus
aauucaaauagauguuc

SEQ ID NO: 4055230 - RNA, 19 nt, Vaccinia virus
aauucaucguuacggagau

SEQ ID NO: 4055231 - RNA, 16 nt, Vaccinia virus
aauucaucucuagaua

SEQ ID NO: 4055232 - RNA, 17 nt, Vaccinia virus
aauucaucuucuauaua

SEQ ID NO: 4055233 - RNA, 14 nt, Vaccinia virus
aauuccauaucuuu

SEQ ID NO: 4055234 - RNA, 20 nt, Vaccinia virus
aauuccauaucuuuuagaaa

SEQ ID NO: 4055235 - RNA, 19 nt, Vaccinia virus
aauuccggauacaugaaca

SEQ ID NO: 4055236 - RNA, 15 nt, Vaccinia virus
aauucgagaaagaua

SEQ ID NO: 4055237 - RNA, 21 nt, Vaccinia virus
aauucgaggaagauguaaaga

SEQ ID NO: 4055238 - RNA, 17 nt, Vaccinia virus
aauucuaugaugaaaca

SEQ ID NO: 4055239 - RNA, 15 nt, Vaccinia virus
aauucuauucuagua

SEQ ID NO: 4055240 - RNA, 15 nt, Vaccinia virus
aauugaguaaaugaa

SEQ ID NO: 4055241 - RNA, 13 nt, Vaccinia virus
aauugccaaagau

SEQ ID NO: 4055242 - RNA, 14 nt, Vaccinia virus
aauugcuuuucuaa

SEQ ID NO: 4055243 - RNA, 20 nt, Vaccinia virus
aauugguaacucauucuaua

SEQ ID NO: 4055244 - RNA, 16 nt, Vaccinia virus
aauuguauuauuuccc

SEQ ID NO: 4055245 - RNA, 15 nt, Vaccinia virus
aauugucacuuuguu

SEQ ID NO: 4055246 - RNA, 18 nt, Vaccinia virus
aauugucuacuaacauua

SEQ ID NO: 4055247 - RNA, 13 nt, Vaccinia virus
aauugucuagaua

SEQ ID NO: 4055248 - RNA, 15 nt, Vaccinia virus
aauugucuuucucuu

SEQ ID NO: 4055249 - RNA, 22 nt, Vaccinia virus
aauuguuuuuguacauaauaga

SEQ ID NO: 4055250 - RNA, 19 nt, Vaccinia virus
aauuuaaaguguaaauaua

SEQ ID NO: 4055251 - RNA, 17 nt, Vaccinia virus
aauuuacaaaacuggua

SEQ ID NO: 4055252 - RNA, 15 nt, Vaccinia virus
aauuuacauguucau

SEQ ID NO: 4055253 - RNA, 12 nt, Vaccinia virus
aauuuagaauga

SEQ ID NO: 4055254 - RNA, 12 nt, Vaccinia virus
aauuuaucaugg

SEQ ID NO: 4055255 - RNA, 14 nt, Vaccinia virus
aauuuauuaaauac

SEQ ID NO: 4055256 - RNA, 17 nt, Vaccinia virus
aauuuauuguaacagua

SEQ ID NO: 4055257 - RNA, 17 nt, Vaccinia virus
aauuuauuucagaaauu

SEQ ID NO: 4055258 - RNA, 12 nt, Vaccinia virus
aauuuauuucua

SEQ ID NO: 4055259 - RNA, 12 nt, Vaccinia virus
aauuucaaaaua

SEQ ID NO: 4055260 - RNA, 15 nt, Vaccinia virus
aauuucauccauuua

SEQ ID NO: 4055261 - RNA, 14 nt, Vaccinia virus
aauuuccaucucua

SEQ ID NO: 4055262 - RNA, 15 nt, Vaccinia virus
aauuucgaaaauaua

SEQ ID NO: 4055263 - RNA, 19 nt, Vaccinia virus
aauuucgaagcuagcgaua

SEQ ID NO: 4055264 - RNA, 20 nt, Vaccinia virus
aauuucuagaacaucaucuc

SEQ ID NO: 4055265 - RNA, 17 nt, Vaccinia virus
aauuucugguuagauaa

SEQ ID NO: 4055266 - RNA, 13 nt, Vaccinia virus
aauuugacuacau

SEQ ID NO: 4055267 - RNA, 15 nt, Vaccinia virus
aauuugauaaagaua

SEQ ID NO: 4055268 - RNA, 20 nt, Vaccinia virus
aauuugggaggcuuaaagug

SEQ ID NO: 4055269 - RNA, 23 nt, Vaccinia virus
aauuuguauguuugggagaauua

SEQ ID NO: 4055270 - RNA, 19 nt, Vaccinia virus
aauuuguccacguucuuua

SEQ ID NO: 4055271 - RNA, 13 nt, Vaccinia virus
aauuuuaagaaau

SEQ ID NO: 4055272 - RNA, 21 nt, Vaccinia virus
aauuuuaagauuuuaaaugua

SEQ ID NO: 4055273 - RNA, 17 nt, Vaccinia virus
aauuuuaauuaauguaa

SEQ ID NO: 4055274 - RNA, 13 nt, Vaccinia virus
aauuuuuuaaaaa

SEQ ID NO: 4055275 - RNA, 17 nt, Vaccinia virus
aauuuuuucguguucca

SEQ ID NO: 4055276 - RNA, 15 nt, Vaccinia virus
acaaaaaaaagaaua

SEQ ID NO: 4055277 - RNA, 17 nt, Vaccinia virus
acaaaaaagcucaauaa

SEQ ID NO: 4055278 - RNA, 14 nt, Vaccinia virus
acaaaaaaugaauu

SEQ ID NO: 4055279 - RNA, 21 nt, Vaccinia virus
acaaaaaaugaauuaauaaua

SEQ ID NO: 4055280 - RNA, 16 nt, Vaccinia virus
acaaaaagaaagaaua

SEQ ID NO: 4055281 - RNA, 15 nt, Vaccinia virus
acaaaacagaaauau

SEQ ID NO: 4055282 - RNA, 16 nt, Vaccinia virus
acaaaagguauuacaa

SEQ ID NO: 4055283 - RNA, 22 nt, Vaccinia virus
acaaaauaauaauggaaguacu

SEQ ID NO: 4055284 - RNA, 13 nt, Vaccinia virus
acaaaauaaugua

SEQ ID NO: 4055285 - RNA, 13 nt, Vaccinia virus
acaaaaucuaaac

SEQ ID NO: 4055286 - RNA, 20 nt, Vaccinia virus
acaaaauuuggguuuaauuu

SEQ ID NO: 4055287 - RNA, 16 nt, Vaccinia virus
acaaacaccauccuug

SEQ ID NO: 4055288 - RNA, 17 nt, Vaccinia virus
acaaacagucuaaacaa

SEQ ID NO: 4055289 - RNA, 21 nt, Vaccinia virus
acaaauauaugcaaaauaaua

SEQ ID NO: 4055290 - RNA, 13 nt, Vaccinia virus
acaaauguagaag

SEQ ID NO: 4055291 - RNA, 23 nt, Vaccinia virus
acaacaacgaaccaaaaugaauu

SEQ ID NO: 4055292 - RNA, 17 nt, Vaccinia virus
acaacauacuauuguuu

SEQ ID NO: 4055293 - RNA, 22 nt, Vaccinia virus
acaacaucacgcucgauaauca

SEQ ID NO: 4055294 - RNA, 20 nt, Vaccinia virus
acaacauccuccagagaaga

SEQ ID NO: 4055295 - RNA, 14 nt, Vaccinia virus
acaacauuaauaca

SEQ ID NO: 4055296 - RNA, 17 nt, Vaccinia virus
acaaccgcuacauaauc

SEQ ID NO: 4055297 - RNA, 17 nt, Vaccinia virus
acaacuaccaauuguuu

SEQ ID NO: 4055298 - RNA, 15 nt, Vaccinia virus
acaacuguuguaaau

SEQ ID NO: 4055299 - RNA, 20 nt, Vaccinia virus
acaacuuaaucugaugaaua

SEQ ID NO: 4055300 - RNA, 21 nt, Vaccinia virus
acaacuuuuaaauacaaauau

SEQ ID NO: 4055301 - RNA, 21 nt, Vaccinia virus
acaagaaucauccaaguggau

SEQ ID NO: 4055302 - RNA, 15 nt, Vaccinia virus
acaagaucaugaaca

SEQ ID NO: 4055303 - RNA, 17 nt, Vaccinia virus
acaagauuccuuuucua

SEQ ID NO: 4055304 - RNA, 21 nt, Vaccinia virus
acaagauuuuuagcguauuau

SEQ ID NO: 4055305 - RNA, 17 nt, Vaccinia virus
acaagcccgucaauaau

SEQ ID NO: 4055306 - RNA, 14 nt, Vaccinia virus
acaagucuaauaau

SEQ ID NO: 4055307 - RNA, 22 nt, Vaccinia virus
acaagugaaauguugucauuau

SEQ ID NO: 4055308 - RNA, 21 nt, Vaccinia virus
acaauacagaagauagcaaag

SEQ ID NO: 4055309 - RNA, 15 nt, Vaccinia virus
acaauagauagucua

SEQ ID NO: 4055310 - RNA, 17 nt, Vaccinia virus
acaauagcgcuuaaucu

SEQ ID NO: 4055311 - RNA, 18 nt, Vaccinia virus
acaauaggaaaucuaucu

SEQ ID NO: 4055312 - RNA, 15 nt, Vaccinia virus
acaauaucaauaaau

SEQ ID NO: 4055313 - RNA, 15 nt, Vaccinia virus
acaauauuaguaugu

SEQ ID NO: 4055314 - RNA, 20 nt, Vaccinia virus
acaauauuaucaucuugaau

SEQ ID NO: 4055315 - RNA, 21 nt, Vaccinia virus
acaaucaagaagauagcuucu

SEQ ID NO: 4055316 - RNA, 17 nt, Vaccinia virus
acaaucagauauaucua

SEQ ID NO: 4055317 - RNA, 19 nt, Vaccinia virus
acaaucauccggauauucu

SEQ ID NO: 4055318 - RNA, 16 nt, Vaccinia virus
acaauccaaaaaauga

SEQ ID NO: 4055319 - RNA, 21 nt, Vaccinia virus
acaaucuacucacauaugcau

SEQ ID NO: 4055320 - RNA, 22 nt, Vaccinia virus
acaaucuaguuuugagaacauc

SEQ ID NO: 4055321 - RNA, 20 nt, Vaccinia virus
acaaucucagauaugggaaa

SEQ ID NO: 4055322 - RNA, 17 nt, Vaccinia virus
acaaucuguauuucauu

SEQ ID NO: 4055323 - RNA, 19 nt, Vaccinia virus
acaaucuuaaugucuguau

SEQ ID NO: 4055324 - RNA, 15 nt, Vaccinia virus
acaaugaaaauggau

SEQ ID NO: 4055325 - RNA, 18 nt, Vaccinia virus
acaaugcuaauauauucu

SEQ ID NO: 4055326 - RNA, 15 nt, Vaccinia virus
acaauguauacaaau

SEQ ID NO: 4055327 - RNA, 19 nt, Vaccinia virus
acaauguauacaaauguac

SEQ ID NO: 4055328 - RNA, 17 nt, Vaccinia virus
acaauguuuccauccau

SEQ ID NO: 4055329 - RNA, 15 nt, Vaccinia virus
acaauuacacuacau

SEQ ID NO: 4055330 - RNA, 13 nt, Vaccinia virus
acaauuacguaau

SEQ ID NO: 4055331 - RNA, 19 nt, Vaccinia virus
acaauuagacguaaguucu

SEQ ID NO: 4055332 - RNA, 16 nt, Vaccinia virus
acaauuauuauauaau

SEQ ID NO: 4055333 - RNA, 14 nt, Vaccinia virus
acaauucauuucca

SEQ ID NO: 4055334 - RNA, 18 nt, Vaccinia virus
acaauuuacauguucauu

SEQ ID NO: 4055335 - RNA, 14 nt, Vaccinia virus
acaauuuuaacaga

SEQ ID NO: 4055336 - RNA, 16 nt, Vaccinia virus
acacaaggcauuguuu

SEQ ID NO: 4055337 - RNA, 13 nt, Vaccinia virus
acacauauacgaa

SEQ ID NO: 4055338 - RNA, 17 nt, Vaccinia virus
acacauuaggauacaga

SEQ ID NO: 4055339 - RNA, 15 nt, Vaccinia virus
acacauuuucaaaua

SEQ ID NO: 4055340 - RNA, 21 nt, Vaccinia virus
acaccaucuucauaauaaaua

SEQ ID NO: 4055341 - RNA, 18 nt, Vaccinia virus
acacccucagcuauaucu

SEQ ID NO: 4055342 - RNA, 16 nt, Vaccinia virus
acacgauuuaauccau

SEQ ID NO: 4055343 - RNA, 19 nt, Vaccinia virus
acacguguagaauaucuac

SEQ ID NO: 4055344 - RNA, 22 nt, Vaccinia virus
acacguguccacauccuuuauu

SEQ ID NO: 4055345 - RNA, 17 nt, Vaccinia virus
acacuaaaauuaaacau

SEQ ID NO: 4055346 - RNA, 12 nt, Vaccinia virus
acacuaagaugc

SEQ ID NO: 4055347 - RNA, 12 nt, Vaccinia virus
acacuaauuaaa

SEQ ID NO: 4055348 - RNA, 14 nt, Vaccinia virus
acacuaucugaucu

SEQ ID NO: 4055349 - RNA, 21 nt, Vaccinia virus
acacuauugaacgauuuaucu

SEQ ID NO: 4055350 - RNA, 20 nt, Vaccinia virus
acacucauaaauaaaaauga

SEQ ID NO: 4055351 - RNA, 17 nt, Vaccinia virus
acacucgacacaauauu

SEQ ID NO: 4055352 - RNA, 12 nt, Vaccinia virus
acacucucaaua

SEQ ID NO: 4055353 - RNA, 16 nt, Vaccinia virus
acacuguguauuguuu

SEQ ID NO: 4055354 - RNA, 18 nt, Vaccinia virus
acacuuuggauacaaaau

SEQ ID NO: 4055355 - RNA, 20 nt, Vaccinia virus
acacuuuguccguaaaacau

SEQ ID NO: 4055356 - RNA, 17 nt, Vaccinia virus
acagaaacuagaggaga

SEQ ID NO: 4055357 - RNA, 22 nt, Vaccinia virus
acagaaacuguaaagaacagug

SEQ ID NO: 4055358 - RNA, 19 nt, Vaccinia virus
acagaacuuaacaauaaau

SEQ ID NO: 4055359 - RNA, 14 nt, Vaccinia virus
acagaaguuuugaa

SEQ ID NO: 4055360 - RNA, 17 nt, Vaccinia virus
acagaauaaacaaaaua

SEQ ID NO: 4055361 - RNA, 18 nt, Vaccinia virus
acagaauguagauaauca

SEQ ID NO: 4055362 - RNA, 14 nt, Vaccinia virus
acagacuucaaagu

SEQ ID NO: 4055363 - RNA, 18 nt, Vaccinia virus
acagagccaucuguaaaa

SEQ ID NO: 4055364 - RNA, 19 nt, Vaccinia virus
acagaggaacgucauauau

SEQ ID NO: 4055365 - RNA, 15 nt, Vaccinia virus
acagauguauuggau

SEQ ID NO: 4055366 - RNA, 18 nt, Vaccinia virus
acagauguuacaaaugua

SEQ ID NO: 4055367 - RNA, 13 nt, Vaccinia virus
acagauuaauagu

SEQ ID NO: 4055368 - RNA, 20 nt, Vaccinia virus
acagcaacacauucaauauu

SEQ ID NO: 4055369 - RNA, 16 nt, Vaccinia virus
acagcaguaguuuaac

SEQ ID NO: 4055370 - RNA, 14 nt, Vaccinia virus
acagccucauauau

SEQ ID NO: 4055371 - RNA, 20 nt, Vaccinia virus
acagcuaucaaaauauguag

SEQ ID NO: 4055372 - RNA, 20 nt, Vaccinia virus
acagguagaauuuauaaaca

SEQ ID NO: 4055373 - RNA, 18 nt, Vaccinia virus
acaguaaccaaaaugaaa

SEQ ID NO: 4055374 - RNA, 15 nt, Vaccinia virus
acaguaguaaugaag

SEQ ID NO: 4055375 - RNA, 17 nt, Vaccinia virus
acaguaucauuuaaaca

SEQ ID NO: 4055376 - RNA, 21 nt, Vaccinia virus
acagucgaacaaucuuaaugu

SEQ ID NO: 4055377 - RNA, 21 nt, Vaccinia virus
acagugauacccgcaauuauu

SEQ ID NO: 4055378 - RNA, 22 nt, Vaccinia virus
acagugcaaccucuauuggaua

SEQ ID NO: 4055379 - RNA, 21 nt, Vaccinia virus
acaguuacgguuguacauuau

SEQ ID NO: 4055380 - RNA, 21 nt, Vaccinia virus
acaguuacuccaauuacaaca

SEQ ID NO: 4055381 - RNA, 11 nt, Vaccinia virus
acauaaauguc

SEQ ID NO: 4055382 - RNA, 17 nt, Vaccinia virus
acauaacagguagaauu

SEQ ID NO: 4055383 - RNA, 20 nt, Vaccinia virus
acauaagaugucuaugaaua

SEQ ID NO: 4055384 - RNA, 17 nt, Vaccinia virus
acauaauucaucuauua

SEQ ID NO: 4055385 - RNA, 18 nt, Vaccinia virus
acauacgagaaaguggau

SEQ ID NO: 4055386 - RNA, 21 nt, Vaccinia virus
acauauaaaucuaaaauugau

SEQ ID NO: 4055387 - RNA, 22 nt, Vaccinia virus
acauauaccgccuuucaaaauu

SEQ ID NO: 4055388 - RNA, 22 nt, Vaccinia virus
acauauaucugauaguauucca

SEQ ID NO: 4055389 - RNA, 17 nt, Vaccinia virus
acauaugacaaacauug

SEQ ID NO: 4055390 - RNA, 18 nt, Vaccinia virus
acauauggaauauaucua

SEQ ID NO: 4055391 - RNA, 23 nt, Vaccinia virus
acauauggaauauaucuauaauu

SEQ ID NO: 4055392 - RNA, 20 nt, Vaccinia virus
acauaugguuucuaaaucua

SEQ ID NO: 4055393 - RNA, 17 nt, Vaccinia virus
acauauuuauauaauua

SEQ ID NO: 4055394 - RNA, 14 nt, Vaccinia virus
acauauuucauuug

SEQ ID NO: 4055395 - RNA, 19 nt, Vaccinia virus
acaucagauguagcgaaga

SEQ ID NO: 4055396 - RNA, 14 nt, Vaccinia virus
acauccgaaaaagu

SEQ ID NO: 4055397 - RNA, 18 nt, Vaccinia virus
acauccgaaaaaguugac

SEQ ID NO: 4055398 - RNA, 18 nt, Vaccinia virus
acauccuucucuucccuc

SEQ ID NO: 4055399 - RNA, 14 nt, Vaccinia virus
acaucgaaaaugaa

SEQ ID NO: 4055400 - RNA, 23 nt, Vaccinia virus
acaucgguacggguauucauuua

SEQ ID NO: 4055401 - RNA, 23 nt, Vaccinia virus
acaucggugagugauaugccuau

SEQ ID NO: 4055402 - RNA, 22 nt, Vaccinia virus
acaucguauaucgucuuuguua

SEQ ID NO: 4055403 - RNA, 14 nt, Vaccinia virus
acaucguuuaauaa

SEQ ID NO: 4055404 - RNA, 19 nt, Vaccinia virus
acaucuaaagaaaaaugau

SEQ ID NO: 4055405 - RNA, 12 nt, Vaccinia virus
aaaaaaucuuca

SEQ ID NO: 4055406 - RNA, 11 nt, Vaccinia virus
aaaaaaugaua

SEQ ID NO: 4055407 - RNA, 18 nt, Vaccinia virus
aaaaacauaauagcuccc

SEQ ID NO: 4055408 - RNA, 14 nt, Vaccinia virus
aaaaacaugucucu

SEQ ID NO: 4055409 - RNA, 20 nt, Vaccinia virus
aaaaacauuaacaagaauca

SEQ ID NO: 4055410 - RNA, 14 nt, Vaccinia virus
aaaaacuaauauua

SEQ ID NO: 4055411 - RNA, 13 nt, Vaccinia virus
aaaaacugauauu

SEQ ID NO: 4055412 - RNA, 19 nt, Vaccinia virus
aaaaacugcguuguaucau

SEQ ID NO: 4055413 - RNA, 14 nt, Vaccinia virus
aaaaagaugauaua

SEQ ID NO: 4055414 - RNA, 21 nt, Vaccinia virus
aaaaagauuaccguaugauau

SEQ ID NO: 4055415 - RNA, 23 nt, Vaccinia virus
aaaaaguauacguccuguggugu

SEQ ID NO: 4055416 - RNA, 16 nt, Vaccinia virus
aaaaaguuuucccaua

SEQ ID NO: 4055417 - RNA, 17 nt, Vaccinia virus
aaaaauacuuaaaaugu

SEQ ID NO: 4055418 - RNA, 12 nt, Vaccinia virus
aaaaauacuuac

SEQ ID NO: 4055419 - RNA, 17 nt, Vaccinia virus
aaaaaugaaaauaaaua

SEQ ID NO: 4055420 - RNA, 12 nt, Vaccinia virus
aaaaauggaugu

SEQ ID NO: 4055421 - RNA, 21 nt, Vaccinia virus
aaaaauguaaaauauuuuucu

SEQ ID NO: 4055422 - RNA, 21 nt, Vaccinia virus
aaaaauuauacuguaacacaa

SEQ ID NO: 4055423 - RNA, 12 nt, Vaccinia virus
aaaaauuauccu

SEQ ID NO: 4055424 - RNA, 14 nt, Vaccinia virus
aaaaauuuaaagaa

SEQ ID NO: 4055425 - RNA, 17 nt, Vaccinia virus
aaaaauuuaaagaaugu

SEQ ID NO: 4055426 - RNA, 20 nt, Vaccinia virus
aaaaauuuaaagaauguaua

SEQ ID NO: 4055427 - RNA, 22 nt, Vaccinia virus
aaaacaaggacgcguuaauaaa

SEQ ID NO: 4055428 - RNA, 13 nt, Vaccinia virus
aaaacaauaaaua

SEQ ID NO: 4055429 - RNA, 15 nt, Vaccinia virus
aaaacaauacaguga

SEQ ID NO: 4055430 - RNA, 17 nt, Vaccinia virus
aaaacauuauaauaaua

SEQ ID NO: 4055431 - RNA, 16 nt, Vaccinia virus
aaaaccucaucgaaga

SEQ ID NO: 4055432 - RNA, 15 nt, Vaccinia virus
aaaacgauauuagaa

SEQ ID NO: 4055433 - RNA, 15 nt, Vaccinia virus
aaaacgauuaaacaa

SEQ ID NO: 4055434 - RNA, 22 nt, Vaccinia virus
aaaacuauuacuaggagaauua

SEQ ID NO: 4055435 - RNA, 15 nt, Vaccinia virus
aaaacugcugugaau

SEQ ID NO: 4055436 - RNA, 22 nt, Vaccinia virus
aaaacuguccaaauagauguac

SEQ ID NO: 4055437 - RNA, 19 nt, Vaccinia virus
aaaacuuaacucaacuguu

SEQ ID NO: 4055438 - RNA, 18 nt, Vaccinia virus
aaaacuuccucauuaaga

SEQ ID NO: 4055439 - RNA, 21 nt, Vaccinia virus
aaaacuugucuguauauguaa

SEQ ID NO: 4055440 - RNA, 18 nt, Vaccinia virus
aaaagaauguauauacau

SEQ ID NO: 4055441 - RNA, 21 nt, Vaccinia virus
cauuauuacuaccaucauuau

SEQ ID NO: 4055442 - RNA, 16 nt, Vaccinia virus
cauucauguacuaaca

SEQ ID NO: 4055443 - RNA, 12 nt, Vaccinia virus
cauuccaaagau

SEQ ID NO: 4055444 - RNA, 15 nt, Vaccinia virus
cauuccuuauacaau

SEQ ID NO: 4055445 - RNA, 14 nt, Vaccinia virus
cauucuaaugaugu

SEQ ID NO: 4055446 - RNA, 14 nt, Vaccinia virus
cauucuaucucaaa

SEQ ID NO: 4055447 - RNA, 12 nt, Vaccinia virus
cauucuauuuuu

SEQ ID NO: 4055448 - RNA, 21 nt, Vaccinia virus
cauucuccgauaucuaauuuc

SEQ ID NO: 4055449 - RNA, 18 nt, Vaccinia virus
cauucuugguuguggaua

SEQ ID NO: 4055450 - RNA, 19 nt, Vaccinia virus
cauugacggauaaaacaaa

SEQ ID NO: 4055451 - RNA, 12 nt, Vaccinia virus
cauuuaaaguua

SEQ ID NO: 4055452 - RNA, 15 nt, Vaccinia virus
cauuuacaacucuau

SEQ ID NO: 4055453 - RNA, 19 nt, Vaccinia virus
cauuuacuuuuucauaauu

SEQ ID NO: 4055454 - RNA, 19 nt, Vaccinia virus
cauuuauaaagacaaacaa

SEQ ID NO: 4055455 - RNA, 13 nt, Vaccinia virus
cauuuauacauau

SEQ ID NO: 4055456 - RNA, 12 nt, Vaccinia virus
cauuuaucacaa

SEQ ID NO: 4055457 - RNA, 17 nt, Vaccinia virus
cauuuaucauauauaau

SEQ ID NO: 4055458 - RNA, 20 nt, Vaccinia virus
cauuucugcauuacaaagaa

SEQ ID NO: 4055459 - RNA, 21 nt, Vaccinia virus
cauuuuauggaaacuauaauu

SEQ ID NO: 4055460 - RNA, 19 nt, Vaccinia virus
cauuuuccagaugauaugu

SEQ ID NO: 4055461 - RNA, 16 nt, Vaccinia virus
cauuuucuuacaauua

SEQ ID NO: 4055462 - RNA, 18 nt, Vaccinia virus
cauuuuggaaacauaaaa

SEQ ID NO: 4055463 - RNA, 12 nt, Vaccinia virus
cauuuuuaggau

SEQ ID NO: 4055464 - RNA, 11 nt, Vaccinia virus
ccaaacaaaau

SEQ ID NO: 4055465 - RNA, 16 nt, Vaccinia virus
ccaaacugcauucgug

SEQ ID NO: 4055466 - RNA, 13 nt, Vaccinia virus
ccaaaucugguaa

SEQ ID NO: 4055467 - RNA, 22 nt, Vaccinia virus
ccaaauuaucaucauuaaacau

SEQ ID NO: 4055468 - RNA, 14 nt, Vaccinia virus
ccaacaguaugaaa

SEQ ID NO: 4055469 - RNA, 13 nt, Vaccinia virus
ccaaccuuuguug

SEQ ID NO: 4055470 - RNA, 17 nt, Vaccinia virus
ccaacucauuuaaauau

SEQ ID NO: 4055471 - RNA, 15 nt, Vaccinia virus
ccaacucuuuaauaa

SEQ ID NO: 4055472 - RNA, 22 nt, Vaccinia virus
ccaagauccucucuuaaaugaa

SEQ ID NO: 4055473 - RNA, 15 nt, Vaccinia virus
ccaagugcuuaaaua

SEQ ID NO: 4055474 - RNA, 16 nt, Vaccinia virus
ccaagugcuuaaauau

SEQ ID NO: 4055475 - RNA, 18 nt, Vaccinia virus
ccaauaaacuauuucuaa

SEQ ID NO: 4055476 - RNA, 17 nt, Vaccinia virus
ccaauaauccaucaucu

SEQ ID NO: 4055477 - RNA, 22 nt, Vaccinia virus
ccaauaauguauagacaauuau

SEQ ID NO: 4055478 - RNA, 12 nt, Vaccinia virus
ccaauacauguu

SEQ ID NO: 4055479 - RNA, 20 nt, Vaccinia virus
ccaauauaguaguuaaauua

SEQ ID NO: 4055480 - RNA, 16 nt, Vaccinia virus
ccaauauuuuauauaa

SEQ ID NO: 4055481 - RNA, 18 nt, Vaccinia virus
ccaaucaccuuauaugau

SEQ ID NO: 4055482 - RNA, 17 nt, Vaccinia virus
ccaaucauugauaucuu

SEQ ID NO: 4055483 - RNA, 12 nt, Vaccinia virus
ccaauuaaaugu

SEQ ID NO: 4055484 - RNA, 20 nt, Vaccinia virus
ccaauucgguuauaaaugaa

SEQ ID NO: 4055485 - RNA, 16 nt, Vaccinia virus
ccaauuucaaggacaa

SEQ ID NO: 4055486 - RNA, 17 nt, Vaccinia virus
ccaauuuggauauagca

SEQ ID NO: 4055487 - RNA, 12 nt, Vaccinia virus
ccacaaaacaga

SEQ ID NO: 4055488 - RNA, 22 nt, Vaccinia virus
ccaccaauagaaguuuucccaa

SEQ ID NO: 4055489 - RNA, 20 nt, Vaccinia virus
ccaccagugguuuuauuuua

SEQ ID NO: 4055490 - RNA, 15 nt, Vaccinia virus
ccaccucucuggaag

SEQ ID NO: 4055491 - RNA, 24 nt, Vaccinia virus
ccacuaauucucauuaaaugguua

SEQ ID NO: 4055492 - RNA, 14 nt, Vaccinia virus
ccacuauaaaauaa

SEQ ID NO: 4055493 - RNA, 17 nt, Vaccinia virus
ccacugucacuggaaag

SEQ ID NO: 4055494 - RNA, 16 nt, Vaccinia virus
ccacuucggauccaua

SEQ ID NO: 4055495 - RNA, 14 nt, Vaccinia virus
ccacuuuugcuuua

SEQ ID NO: 4055496 - RNA, 15 nt, Vaccinia virus
ccagauauauaucuu

SEQ ID NO: 4055497 - RNA, 17 nt, Vaccinia virus
ccagaucaaaacaaaau

SEQ ID NO: 4055498 - RNA, 23 nt, Vaccinia virus
ccagaucuauugacuauaacucc

SEQ ID NO: 4055499 - RNA, 20 nt, Vaccinia virus
ccagggaaauuaaagaagaa

SEQ ID NO: 4055500 - RNA, 23 nt, Vaccinia virus
ccaguacucgggucuaacaucuc

SEQ ID NO: 4055501 - RNA, 20 nt, Vaccinia virus
ccagugcuauaucucccugu

SEQ ID NO: 4055502 - RNA, 14 nt, Vaccinia virus
ccaguuuaucccua

SEQ ID NO: 4055503 - RNA, 15 nt, Vaccinia virus
ccauaagcaaacuga

SEQ ID NO: 4055504 - RNA, 18 nt, Vaccinia virus
ccauaauccuauucuuga

SEQ ID NO: 4055505 - RNA, 14 nt, Vaccinia virus
ccauacauacaucu

SEQ ID NO: 4055506 - RNA, 13 nt, Vaccinia virus
ccauagaggaugu

SEQ ID NO: 4055507 - RNA, 23 nt, Vaccinia virus
ccauauuuuguuauuauauuaau

SEQ ID NO: 4055508 - RNA, 21 nt, Vaccinia virus
ccauccaagucaauaucuuua

SEQ ID NO: 4055509 - RNA, 21 nt, Vaccinia virus
ccaucgcuucuaucuuguuua

SEQ ID NO: 4055510 - RNA, 18 nt, Vaccinia virus
ccaucuaucaaacaaaau

SEQ ID NO: 4055511 - RNA, 17 nt, Vaccinia virus
ccaucugguucaggaaa

SEQ ID NO: 4055512 - RNA, 23 nt, Vaccinia virus
ccaucugguucaggaaagacagc

SEQ ID NO: 4055513 - RNA, 22 nt, Vaccinia virus
ccaucugucauauuuagauuuu

SEQ ID NO: 4055514 - RNA, 22 nt, Vaccinia virus
ccaugcaaacuaucuaaaugua

SEQ ID NO: 4055515 - RNA, 13 nt, Vaccinia virus
ccaugcagcauuu

SEQ ID NO: 4055516 - RNA, 17 nt, Vaccinia virus
ccaugcagcauuuccua

SEQ ID NO: 4055517 - RNA, 17 nt, Vaccinia virus
ccauggauggaaacauu

SEQ ID NO: 4055518 - RNA, 15 nt, Vaccinia virus
ccauuaagugacauu

SEQ ID NO: 4055519 - RNA, 18 nt, Vaccinia virus
ccauuaucuauaucaucu

SEQ ID NO: 4055520 - RNA, 16 nt, Vaccinia virus
ccauucuaauacuuua

SEQ ID NO: 4055521 - RNA, 13 nt, Vaccinia virus
ccauuuaaaguua

SEQ ID NO: 4055522 - RNA, 19 nt, Vaccinia virus
ccccaggaucuccaacaaa

SEQ ID NO: 4055523 - RNA, 17 nt, Vaccinia virus
cccgcuucuauuuacuc

SEQ ID NO: 4055524 - RNA, 23 nt, Vaccinia virus
cccguauagaaguucaaagguua

SEQ ID NO: 4055525 - RNA, 12 nt, Vaccinia virus
ccgauuaaacau

SEQ ID NO: 4055526 - RNA, 20 nt, Vaccinia virus
ccgcaauaacaugguaacug

SEQ ID NO: 4055527 - RNA, 12 nt, Vaccinia virus
ccggaacaaaaa

SEQ ID NO: 4055528 - RNA, 20 nt, Vaccinia virus
ccggacgacauauuaaucuu

SEQ ID NO: 4055529 - RNA, 16 nt, Vaccinia virus
ccggaguuagaaagca

SEQ ID NO: 4055530 - RNA, 19 nt, Vaccinia virus
ccgguuugcaaaacaaaaa

SEQ ID NO: 4055531 - RNA, 21 nt, Vaccinia virus
ccguguucguuugaaugccac

SEQ ID NO: 4055532 - RNA, 11 nt, Vaccinia virus
ccguguuuaug

SEQ ID NO: 4055533 - RNA, 20 nt, Vaccinia virus
ccguuauauaaucuacaaaa

SEQ ID NO: 4055534 - RNA, 20 nt, Vaccinia virus
ccguuuuaucgguuaccaua

SEQ ID NO: 4055535 - RNA, 20 nt, Vaccinia virus
ccuaauucucucaucuauca

SEQ ID NO: 4055536 - RNA, 16 nt, Vaccinia virus
ccuacacccgaagaga

SEQ ID NO: 4055537 - RNA, 20 nt, Vaccinia virus
ccuacacuauuauaugauua

SEQ ID NO: 4055538 - RNA, 14 nt, Vaccinia virus
ccuagagaauuaau

SEQ ID NO: 4055539 - RNA, 21 nt, Vaccinia virus
ccuaguacggcggauuuacua

SEQ ID NO: 4055540 - RNA, 17 nt, Vaccinia virus
ccuauaaacaugaauuu

SEQ ID NO: 4055541 - RNA, 12 nt, Vaccinia virus
ccuaucucugac

SEQ ID NO: 4055542 - RNA, 20 nt, Vaccinia virus
ccucaaacucgauauauuua

SEQ ID NO: 4055543 - RNA, 12 nt, Vaccinia virus
ccucaucuucua

SEQ ID NO: 4055544 - RNA, 21 nt, Vaccinia virus
ccuccaccgaugauggaguaa

SEQ ID NO: 4055545 - RNA, 14 nt, Vaccinia virus
ccucuucaauuaga

SEQ ID NO: 4055546 - RNA, 13 nt, Vaccinia virus
ccugaccauccau

SEQ ID NO: 4055547 - RNA, 17 nt, Vaccinia virus
ccugccauuuuagagau

SEQ ID NO: 4055548 - RNA, 17 nt, Vaccinia virus
ccuggaguauggaauac

SEQ ID NO: 4055549 - RNA, 23 nt, Vaccinia virus
ccugguaagauaucuuuauauuc

SEQ ID NO: 4055550 - RNA, 14 nt, Vaccinia virus
ccuguucaaauuua

SEQ ID NO: 4055551 - RNA, 14 nt, Vaccinia virus
ccuuaauauaauag

SEQ ID NO: 4055552 - RNA, 22 nt, Vaccinia virus
ccuuauagaggauguuaaacaa

SEQ ID NO: 4055553 - RNA, 15 nt, Vaccinia virus
ccuucguuguuucua

SEQ ID NO: 4055554 - RNA, 15 nt, Vaccinia virus
ccuuuaaauccucua

SEQ ID NO: 4055555 - RNA, 12 nt, Vaccinia virus
ccuuuauuucca

SEQ ID NO: 4055556 - RNA, 17 nt, Vaccinia virus
ccuuuuccuuaucuuca

SEQ ID NO: 4055557 - RNA, 12 nt, Vaccinia virus
cgaaaauauauu

SEQ ID NO: 4055558 - RNA, 17 nt, Vaccinia virus
cgaaaauugcuauuuca

SEQ ID NO: 4055559 - RNA, 14 nt, Vaccinia virus
cgaacguggaaggu

SEQ ID NO: 4055560 - RNA, 23 nt, Vaccinia virus
cgaagaaaaaaauggaaauacuu

SEQ ID NO: 4055561 - RNA, 17 nt, Vaccinia virus
cgaagaagagaaagaca

SEQ ID NO: 4055562 - RNA, 17 nt, Vaccinia virus
cgaauauaaaucauauu

SEQ ID NO: 4055563 - RNA, 11 nt, Vaccinia virus
cgaaugauaua

SEQ ID NO: 4055564 - RNA, 13 nt, Vaccinia virus
cgacaagauaucg

SEQ ID NO: 4055565 - RNA, 18 nt, Vaccinia virus
cgacaucaaaugguacaa

SEQ ID NO: 4055566 - RNA, 17 nt, Vaccinia virus
auuuuaucuuuuagagg

SEQ ID NO: 4055567 - RNA, 17 nt, Vaccinia virus
auuuuauuucaaaauua

SEQ ID NO: 4055568 - RNA, 20 nt, Vaccinia virus
auuuucaagagauaguuuuc

SEQ ID NO: 4055569 - RNA, 13 nt, Vaccinia virus
auuuucauucacu

SEQ ID NO: 4055570 - RNA, 22 nt, Vaccinia virus
auuuucggguuuaaauucuuua

SEQ ID NO: 4055571 - RNA, 15 nt, Vaccinia virus
auuuucuuuauaaaa

SEQ ID NO: 4055572 - RNA, 23 nt, Vaccinia virus
auuuugaaaggcgguauauguau

SEQ ID NO: 4055573 - RNA, 16 nt, Vaccinia virus
auuuuggaaaaaauug

SEQ ID NO: 4055574 - RNA, 18 nt, Vaccinia virus
auuuuggugaaauuauua

SEQ ID NO: 4055575 - RNA, 15 nt, Vaccinia virus
auuuugguguaaauc

SEQ ID NO: 4055576 - RNA, 22 nt, Vaccinia virus
auuuuguaguuaauuuaucaca

SEQ ID NO: 4055577 - RNA, 17 nt, Vaccinia virus
auuuugugcaaauagau

SEQ ID NO: 4055578 - RNA, 20 nt, Vaccinia virus
auuuuuaacagcaacacauu

SEQ ID NO: 4055579 - RNA, 20 nt, Vaccinia virus
auuuuuagaaaguauccauc

SEQ ID NO: 4055580 - RNA, 19 nt, Vaccinia virus
auuuuuauucagcauuacu

SEQ ID NO: 4055581 - RNA, 15 nt, Vaccinia virus
auuuuucuucauuua

SEQ ID NO: 4055582 - RNA, 18 nt, Vaccinia virus
auuuuugcaucauuuacg

SEQ ID NO: 4055583 - RNA, 14 nt, Vaccinia virus
auuuuuuacaauuu

SEQ ID NO: 4055584 - RNA, 21 nt, Vaccinia virus
caaaaaaaugugcacaguuuc

SEQ ID NO: 4055585 - RNA, 21 nt, Vaccinia virus
caaaaaacuuuacgauagacu

SEQ ID NO: 4055586 - RNA, 14 nt, Vaccinia virus
caaaaaauuacuuu

SEQ ID NO: 4055587 - RNA, 16 nt, Vaccinia virus
caaaaauauuaaaccu

SEQ ID NO: 4055588 - RNA, 15 nt, Vaccinia virus
caaaacucaaauguu

SEQ ID NO: 4055589 - RNA, 15 nt, Vaccinia virus
caaaagacuauacau

SEQ ID NO: 4055590 - RNA, 21 nt, Vaccinia virus
caaaaggaagaaggacaacau

SEQ ID NO: 4055591 - RNA, 15 nt, Vaccinia virus
caaaagguagcuaau

SEQ ID NO: 4055592 - RNA, 22 nt, Vaccinia virus
caaaaguaguucaacauaauau

SEQ ID NO: 4055593 - RNA, 16 nt, Vaccinia virus
caaaaguuaauuucua

SEQ ID NO: 4055594 - RNA, 14 nt, Vaccinia virus
caaaauccaaauuu

SEQ ID NO: 4055595 - RNA, 21 nt, Vaccinia virus
caaaaugauagauauuuuuuu

SEQ ID NO: 4055596 - RNA, 22 nt, Vaccinia virus
caaaauucagauucuaucuuua

SEQ ID NO: 4055597 - RNA, 23 nt, Vaccinia virus
caaaauugucuaugaugucaucu

SEQ ID NO: 4055598 - RNA, 22 nt, Vaccinia virus
caaaauuuuacuuuuaguucuu

SEQ ID NO: 4055599 - RNA, 16 nt, Vaccinia virus
caaacaauuuuaacag

SEQ ID NO: 4055600 - RNA, 22 nt, Vaccinia virus
caaacagcaaggguucgucaaa

SEQ ID NO: 4055601 - RNA, 20 nt, Vaccinia virus
caaacaguuugguauuagaa

SEQ ID NO: 4055602 - RNA, 15 nt, Vaccinia virus
caaacauacaucuau

SEQ ID NO: 4055603 - RNA, 22 nt, Vaccinia virus
caaacauacaucuauaaauuug

SEQ ID NO: 4055604 - RNA, 21 nt, Vaccinia virus
caaacccuugaucuccucuau

SEQ ID NO: 4055605 - RNA, 19 nt, Vaccinia virus
caaacuuccauggaaaaac

SEQ ID NO: 4055606 - RNA, 23 nt, Vaccinia virus
caaacuuugaagaauuuauauaa

SEQ ID NO: 4055607 - RNA, 18 nt, Vaccinia virus
caaacuuuuucacagagc

SEQ ID NO: 4055608 - RNA, 22 nt, Vaccinia virus
caaagaacagaauaaacaaaau

SEQ ID NO: 4055609 - RNA, 18 nt, Vaccinia virus
caaagaauuaaugauagu

SEQ ID NO: 4055610 - RNA, 18 nt, Vaccinia virus
caaagagaccaaugaauu

SEQ ID NO: 4055611 - RNA, 13 nt, Vaccinia virus
caaagauauggaa

SEQ ID NO: 4055612 - RNA, 22 nt, Vaccinia virus
caaagauucuuccuccaaacag

SEQ ID NO: 4055613 - RNA, 19 nt, Vaccinia virus
caaagauuuaaauccuaau

SEQ ID NO: 4055614 - RNA, 13 nt, Vaccinia virus
caaaguuguuaaa

SEQ ID NO: 4055615 - RNA, 16 nt, Vaccinia virus
caaauaaguauuauca

SEQ ID NO: 4055616 - RNA, 17 nt, Vaccinia virus
caaauagagcaauuacu

SEQ ID NO: 4055617 - RNA, 20 nt, Vaccinia virus
caaauauaucaauaguagua

SEQ ID NO: 4055618 - RNA, 21 nt, Vaccinia virus
caaauauaugcaaaauaauau

SEQ ID NO: 4055619 - RNA, 13 nt, Vaccinia virus
caaauaugauaug

SEQ ID NO: 4055620 - RNA, 14 nt, Vaccinia virus
caaaucaacucaua

SEQ ID NO: 4055621 - RNA, 17 nt, Vaccinia virus
caaaucauugauacauu

SEQ ID NO: 4055622 - RNA, 15 nt, Vaccinia virus
caaauccauuaaugu

SEQ ID NO: 4055623 - RNA, 15 nt, Vaccinia virus
caaaucuaacuucua

SEQ ID NO: 4055624 - RNA, 13 nt, Vaccinia virus
caaaucuggaaaa

SEQ ID NO: 4055625 - RNA, 18 nt, Vaccinia virus
caaaucuucuuauaagau

SEQ ID NO: 4055626 - RNA, 18 nt, Vaccinia virus
caaaugaaaaaaauacuu

SEQ ID NO: 4055627 - RNA, 22 nt, Vaccinia virus
caaaugaaacaggacauuauca

SEQ ID NO: 4055628 - RNA, 15 nt, Vaccinia virus
caaauggauaauuua

SEQ ID NO: 4055629 - RNA, 14 nt, Vaccinia virus
caaauguagaagau

SEQ ID NO: 4055630 - RNA, 14 nt, Vaccinia virus
caaauguuaaacau

SEQ ID NO: 4055631 - RNA, 19 nt, Vaccinia virus
caaauuauuucuucugaau

SEQ ID NO: 4055632 - RNA, 23 nt, Vaccinia virus
caaauucuuggauauaugauaua

SEQ ID NO: 4055633 - RNA, 20 nt, Vaccinia virus
caaauuuauuccauauuuua

SEQ ID NO: 4055634 - RNA, 14 nt, Vaccinia virus
caaauuuuacuaca

SEQ ID NO: 4055635 - RNA, 18 nt, Vaccinia virus
caacaaaauucagauucu

SEQ ID NO: 4055636 - RNA, 20 nt, Vaccinia virus
caacaaagaaauuuuugguu

SEQ ID NO: 4055637 - RNA, 20 nt, Vaccinia virus
caacaaguguguagauaucu

SEQ ID NO: 4055638 - RNA, 19 nt, Vaccinia virus
caacaaguuggaugauauu

SEQ ID NO: 4055639 - RNA, 22 nt, Vaccinia virus
caacaauuuuguauuauucuga

SEQ ID NO: 4055640 - RNA, 12 nt, Vaccinia virus
caacagaaaaag

SEQ ID NO: 4055641 - RNA, 18 nt, Vaccinia virus
caacaggucauauucuca

SEQ ID NO: 4055642 - RNA, 20 nt, Vaccinia virus
caacaucacgcucgauaauc

SEQ ID NO: 4055643 - RNA, 19 nt, Vaccinia virus
caacauccuccagagaaga

SEQ ID NO: 4055644 - RNA, 22 nt, Vaccinia virus
caacaucuuaagcguagaaguu

SEQ ID NO: 4055645 - RNA, 19 nt, Vaccinia virus
caacgaaucccuacauauu

SEQ ID NO: 4055646 - RNA, 21 nt, Vaccinia virus
caacuaauguaugauauaauu

SEQ ID NO: 4055647 - RNA, 22 nt, Vaccinia virus
caacuacggcguccgcuuuagu

SEQ ID NO: 4055648 - RNA, 16 nt, Vaccinia virus
caacucuaaucacuuu

SEQ ID NO: 4055649 - RNA, 12 nt, Vaccinia virus
caacucucaaaa

SEQ ID NO: 4055650 - RNA, 15 nt, Vaccinia virus
caacugaaaaaguua

SEQ ID NO: 4055651 - RNA, 13 nt, Vaccinia virus
caacuguuguaaa

SEQ ID NO: 4055652 - RNA, 12 nt, Vaccinia virus
caacuuaaacaa

SEQ ID NO: 4055653 - RNA, 19 nt, Vaccinia virus
caacuucuccuuauugauu

SEQ ID NO: 4055654 - RNA, 17 nt, Vaccinia virus
caagaacuacaaaaguu

SEQ ID NO: 4055655 - RNA, 13 nt, Vaccinia virus
caagaaugauauc

SEQ ID NO: 4055656 - RNA, 17 nt, Vaccinia virus
caagaucuuugauauac

SEQ ID NO: 4055657 - RNA, 18 nt, Vaccinia virus
caagauucguagaagcau

SEQ ID NO: 4055658 - RNA, 20 nt, Vaccinia virus
caaggaaacuaauaccucua

SEQ ID NO: 4055659 - RNA, 20 nt, Vaccinia virus
caaguaggauuuuuccaaag

SEQ ID NO: 4055660 - RNA, 17 nt, Vaccinia virus
caaguaguaauagugau

SEQ ID NO: 4055661 - RNA, 13 nt, Vaccinia virus
caaguauaaugac

SEQ ID NO: 4055662 - RNA, 15 nt, Vaccinia virus
caagucauaaaucau

SEQ ID NO: 4055663 - RNA, 23 nt, Vaccinia virus
caaguuaucgucuguauuaaugu

SEQ ID NO: 4055664 - RNA, 21 nt, Vaccinia virus
caaguucuauaguuucuggau

SEQ ID NO: 4055665 - RNA, 15 nt, Vaccinia virus
caauaaaaaaaauug

SEQ ID NO: 4055666 - RNA, 19 nt, Vaccinia virus
caauaaaauuaucaugaca

SEQ ID NO: 4055667 - RNA, 17 nt, Vaccinia virus
caauaaacaaaauacuc

SEQ ID NO: 4055668 - RNA, 21 nt, Vaccinia virus
caauaacuaauggcaaaugua

SEQ ID NO: 4055669 - RNA, 15 nt, Vaccinia virus
caauaagcuuuagau

SEQ ID NO: 4055670 - RNA, 13 nt, Vaccinia virus
caauaaguaguau

SEQ ID NO: 4055671 - RNA, 20 nt, Vaccinia virus
caauaaugccgguauuggca

SEQ ID NO: 4055672 - RNA, 20 nt, Vaccinia virus
caauacauguuuuauaaaau

SEQ ID NO: 4055673 - RNA, 23 nt, Vaccinia virus
caauacuaauucaaauuguuaaa

SEQ ID NO: 4055674 - RNA, 22 nt, Vaccinia virus
caauacugcgacuuuguuaaug

SEQ ID NO: 4055675 - RNA, 14 nt, Vaccinia virus
caauagauagucua

SEQ ID NO: 4055676 - RNA, 21 nt, Vaccinia virus
caauauagagauuagaggagg

SEQ ID NO: 4055677 - RNA, 16 nt, Vaccinia virus
caauauagcaacagua

SEQ ID NO: 4055678 - RNA, 19 nt, Vaccinia virus
caauauauacgaguauaau

SEQ ID NO: 4055679 - RNA, 13 nt, Vaccinia virus
caauauaucaucu

SEQ ID NO: 4055680 - RNA, 18 nt, Vaccinia virus
caauauauguaaucauug

SEQ ID NO: 4055681 - RNA, 14 nt, Vaccinia virus
caauauauuuuuuu

SEQ ID NO: 4055682 - RNA, 14 nt, Vaccinia virus
caauaucaguaucu

SEQ ID NO: 4055683 - RNA, 17 nt, Vaccinia virus
caauaugugaaucauuu

SEQ ID NO: 4055684 - RNA, 14 nt, Vaccinia virus
caauauuaucaucu

SEQ ID NO: 4055685 - RNA, 18 nt, Vaccinia virus
caaucaaaccuauaacau

SEQ ID NO: 4055686 - RNA, 22 nt, Vaccinia virus
caaucacgcauaaaaauaucuu

SEQ ID NO: 4055687 - RNA, 20 nt, Vaccinia virus
caaucauuuauugacaauaa

SEQ ID NO: 4055688 - RNA, 19 nt, Vaccinia virus
caaucguuccaugaugggu

SEQ ID NO: 4055689 - RNA, 16 nt, Vaccinia virus
cauaauauuaaacacu

SEQ ID NO: 4055690 - RNA, 15 nt, Vaccinia virus
cauaauccucaucug

SEQ ID NO: 4055691 - RNA, 24 nt, Vaccinia virus
cauaaucuaaaauaguucuguaau

SEQ ID NO: 4055692 - RNA, 20 nt, Vaccinia virus
cauaaugcagauuuauugaa

SEQ ID NO: 4055693 - RNA, 20 nt, Vaccinia virus
cauaauguaaagauauucua

SEQ ID NO: 4055694 - RNA, 17 nt, Vaccinia virus
cauacagcucaucgauu

SEQ ID NO: 4055695 - RNA, 18 nt, Vaccinia virus
cauacaucgccgucaucu

SEQ ID NO: 4055696 - RNA, 21 nt, Vaccinia virus
cauacaugaaaugaucucuau

SEQ ID NO: 4055697 - RNA, 20 nt, Vaccinia virus
cauacauucggacagacaca

SEQ ID NO: 4055698 - RNA, 18 nt, Vaccinia virus
cauacauuuguaaaagua

SEQ ID NO: 4055699 - RNA, 17 nt, Vaccinia virus
cauacccuccuguauau

SEQ ID NO: 4055700 - RNA, 16 nt, Vaccinia virus
cauaccgcaaauggaa

SEQ ID NO: 4055701 - RNA, 16 nt, Vaccinia virus
cauacuaauagaugua

SEQ ID NO: 4055702 - RNA, 14 nt, Vaccinia virus
cauacuacuauuau

SEQ ID NO: 4055703 - RNA, 17 nt, Vaccinia virus
cauagaaaguuaaaagu

SEQ ID NO: 4055704 - RNA, 15 nt, Vaccinia virus
cauagaauaaauauc

SEQ ID NO: 4055705 - RNA, 14 nt, Vaccinia virus
cauagacuuuaucu

SEQ ID NO: 4055706 - RNA, 22 nt, Vaccinia virus
cauagauccaguagauccuaau

SEQ ID NO: 4055707 - RNA, 15 nt, Vaccinia virus
cauagaugaaauacu

SEQ ID NO: 4055708 - RNA, 15 nt, Vaccinia virus
cauaggauacucuau

SEQ ID NO: 4055709 - RNA, 16 nt, Vaccinia virus
cauagucuucaauaau

SEQ ID NO: 4055710 - RNA, 19 nt, Vaccinia virus
cauaguggacaacauuaau

SEQ ID NO: 4055711 - RNA, 20 nt, Vaccinia virus
cauaguuuguaucaauaaua

SEQ ID NO: 4055712 - RNA, 18 nt, Vaccinia virus
cauaguuuuuacacauag

SEQ ID NO: 4055713 - RNA, 20 nt, Vaccinia virus
cauauaauagacauaaugac

SEQ ID NO: 4055714 - RNA, 16 nt, Vaccinia virus
cauauagaucaaucau

SEQ ID NO: 4055715 - RNA, 22 nt, Vaccinia virus
cauauaguauucuuguauucua

SEQ ID NO: 4055716 - RNA, 16 nt, Vaccinia virus
cauauaguuaaucuau

SEQ ID NO: 4055717 - RNA, 22 nt, Vaccinia virus
cauauaugguauugguccauua

SEQ ID NO: 4055718 - RNA, 18 nt, Vaccinia virus
cauaucaauuuguacauc

SEQ ID NO: 4055719 - RNA, 18 nt, Vaccinia virus
cauaucauacaugauauu

SEQ ID NO: 4055720 - RNA, 21 nt, Vaccinia virus
cauaugguacgauguuguaaa

SEQ ID NO: 4055721 - RNA, 14 nt, Vaccinia virus
cauaugguacguaa

SEQ ID NO: 4055722 - RNA, 20 nt, Vaccinia virus
cauauguuuuaauauuuaca

SEQ ID NO: 4055723 - RNA, 18 nt, Vaccinia virus
cauauuacaaaaucgauu

SEQ ID NO: 4055724 - RNA, 14 nt, Vaccinia virus
cauauuacauaaua

SEQ ID NO: 4055725 - RNA, 14 nt, Vaccinia virus
cauauuauacagua

SEQ ID NO: 4055726 - RNA, 14 nt, Vaccinia virus
cauauucuacucuu

SEQ ID NO: 4055727 - RNA, 13 nt, Vaccinia virus
cauauucucauaa

SEQ ID NO: 4055728 - RNA, 14 nt, Vaccinia virus
cauauuuauggauu

SEQ ID NO: 4055729 - RNA, 20 nt, Vaccinia virus
cauauuugaacuuaacuuca

SEQ ID NO: 4055730 - RNA, 15 nt, Vaccinia virus
cauauuuuaaugaac

SEQ ID NO: 4055731 - RNA, 14 nt, Vaccinia virus
cauauuuucaguaa

SEQ ID NO: 4055732 - RNA, 17 nt, Vaccinia virus
aguuccgagauaauuuc

SEQ ID NO: 4055733 - RNA, 19 nt, Vaccinia virus
aguucuggcaauguuucau

SEQ ID NO: 4055734 - RNA, 16 nt, Vaccinia virus
aguucuuaauacuucg

SEQ ID NO: 4055735 - RNA, 19 nt, Vaccinia virus
aguucuuacacauaucacu

SEQ ID NO: 4055736 - RNA, 13 nt, Vaccinia virus
aguucuuuucuag

SEQ ID NO: 4055737 - RNA, 17 nt, Vaccinia virus
aguugaagauucuaaug

SEQ ID NO: 4055738 - RNA, 21 nt, Vaccinia virus
aguugggauaguauuuuucua

SEQ ID NO: 4055739 - RNA, 20 nt, Vaccinia virus
aguuguauacuaucagaauc

SEQ ID NO: 4055740 - RNA, 17 nt, Vaccinia virus
aggaucuacauccucga

SEQ ID NO: 4055741 - RNA, 14 nt, Vaccinia virus
aggaucuagcaaag

SEQ ID NO: 4055742 - RNA, 19 nt, Vaccinia virus
aggaucuagcaaaggaaau

SEQ ID NO: 4055743 - RNA, 13 nt, Vaccinia virus
aggaugaauuuga

SEQ ID NO: 4055744 - RNA, 19 nt, Vaccinia virus
aggaugaguacauuucaca

SEQ ID NO: 4055745 - RNA, 19 nt, Vaccinia virus
aggauggaauuaucaucaa

SEQ ID NO: 4055746 - RNA, 18 nt, Vaccinia virus
aggauguaauuaaauguu

SEQ ID NO: 4055747 - RNA, 21 nt, Vaccinia virus
aggauuaaaaauaaaguuauc

SEQ ID NO: 4055748 - RNA, 21 nt, Vaccinia virus
aggauuaguuuccgaacuaau

SEQ ID NO: 4055749 - RNA, 12 nt, Vaccinia virus
aggauucuuaau

SEQ ID NO: 4055750 - RNA, 15 nt, Vaccinia virus
aggcacaaugaauga

SEQ ID NO: 4055751 - RNA, 18 nt, Vaccinia virus
aggcaguccagaaauauu

SEQ ID NO: 4055752 - RNA, 21 nt, Vaccinia virus
aggcauaaaaauaaaaauaua

SEQ ID NO: 4055753 - RNA, 21 nt, Vaccinia virus
aggcauguugauggaaaaauu

SEQ ID NO: 4055754 - RNA, 14 nt, Vaccinia virus
aggcauuaacuaga

SEQ ID NO: 4055755 - RNA, 19 nt, Vaccinia virus
aggcuuugauaucuaaaua

SEQ ID NO: 4055756 - RNA, 18 nt, Vaccinia virus
guuuaucgccuacaucau

SEQ ID NO: 4055757 - RNA, 12 nt, Vaccinia virus
guuuaucuuuuu

SEQ ID NO: 4055758 - RNA, 17 nt, Vaccinia virus
guuuauggaucuauuca

SEQ ID NO: 4055759 - RNA, 15 nt, Vaccinia virus
guuuccaaaaaaugu

SEQ ID NO: 4055760 - RNA, 23 nt, Vaccinia virus
guuuccacaucaaccaaguaaug

SEQ ID NO: 4055761 - RNA, 18 nt, Vaccinia virus
guuuccaguuauaaaaca

SEQ ID NO: 4055762 - RNA, 23 nt, Vaccinia virus
guuucccaaugaaaugguacaau

SEQ ID NO: 4055763 - RNA, 14 nt, Vaccinia virus
guuucguaauaucu

SEQ ID NO: 4055764 - RNA, 15 nt, Vaccinia virus
guuucucaucuuuua

SEQ ID NO: 4055765 - RNA, 21 nt, Vaccinia virus
guuucuuagcuugugauuuuu

SEQ ID NO: 4055766 - RNA, 20 nt, Vaccinia virus
guuugaaaaucgucuuuuau

SEQ ID NO: 4055767 - RNA, 15 nt, Vaccinia virus
guuugauaaauguag

SEQ ID NO: 4055768 - RNA, 15 nt, Vaccinia virus
guuuguaaaauaucu

SEQ ID NO: 4055769 - RNA, 23 nt, Vaccinia virus
guuuguuucggccugaaguuggu

SEQ ID NO: 4055770 - RNA, 14 nt, Vaccinia virus
guuuguuuuggaaa

SEQ ID NO: 4055771 - RNA, 20 nt, Vaccinia virus
guuuuacguuauuaaucauc

SEQ ID NO: 4055772 - RNA, 19 nt, Vaccinia virus
guuuuauuuuaucuuuuac

SEQ ID NO: 4055773 - RNA, 21 nt, Vaccinia virus
guuuucccauagaacaucagu

SEQ ID NO: 4055774 - RNA, 17 nt, Vaccinia virus
guuuucuacaauaacua

SEQ ID NO: 4055775 - RNA, 23 nt, Vaccinia virus
guuuuguuuucucuuugguaacu

SEQ ID NO: 4055776 - RNA, 23 nt, Vaccinia virus
guuuuuuaauuccauaucuuuua

SEQ ID NO: 4055777 - RNA, 16 nt, Vaccinia virus
guuuuuuuacuuucua

SEQ ID NO: 4055778 - RNA, 18 nt, Vaccinia virus
uaaaaaaacauuauucua

SEQ ID NO: 4055779 - RNA, 18 nt, Vaccinia virus
uaaaaaaccuccuucaug

SEQ ID NO: 4055780 - RNA, 14 nt, Vaccinia virus
uaaaaaauauccuu

SEQ ID NO: 4055781 - RNA, 21 nt, Vaccinia virus
uaacgcaccuauaaagacuuu

SEQ ID NO: 4055782 - RNA, 15 nt, Vaccinia virus
uaacgcauuaaugag

SEQ ID NO: 4055783 - RNA, 17 nt, Vaccinia virus
uaacgguacucuagaau

SEQ ID NO: 4055784 - RNA, 15 nt, Vaccinia virus
uaacguuaaacauua

SEQ ID NO: 4055785 - RNA, 18 nt, Vaccinia virus
uaacguucuaacaucauu

SEQ ID NO: 4055786 - RNA, 19 nt, Vaccinia virus
uaacuaaaaauguaaaaua

SEQ ID NO: 4055787 - RNA, 12 nt, Vaccinia virus
uaacuaaauguc

SEQ ID NO: 4055788 - RNA, 18 nt, Vaccinia virus
uaacuacugauaacaaaa

SEQ ID NO: 4055789 - RNA, 21 nt, Vaccinia virus
uaacuagcuuaaacagaugag

SEQ ID NO: 4055790 - RNA, 16 nt, Vaccinia virus
uaacuagucuucucug

SEQ ID NO: 4055791 - RNA, 19 nt, Vaccinia virus
uaacuauauaccuauuaau

SEQ ID NO: 4055792 - RNA, 13 nt, Vaccinia virus
uaacuauauucca

SEQ ID NO: 4055793 - RNA, 14 nt, Vaccinia virus
uaacuauauucuua

SEQ ID NO: 4055794 - RNA, 21 nt, Vaccinia virus
uaacuauuuuuuauuacuuua

SEQ ID NO: 4055795 - RNA, 16 nt, Vaccinia virus
uaacucauuuuuugaa

SEQ ID NO: 4055796 - RNA, 22 nt, Vaccinia virus
uaacuccaggccguuuguuucc

SEQ ID NO: 4055797 - RNA, 19 nt, Vaccinia virus
uaacucgguaucuacuuua

SEQ ID NO: 4055798 - RNA, 18 nt, Vaccinia virus
uaacugacuuaauaguag

SEQ ID NO: 4055799 - RNA, 16 nt, Vaccinia virus
uaacugcuuuucugga

SEQ ID NO: 4055800 - RNA, 14 nt, Vaccinia virus
uaacuuaauuuauu

SEQ ID NO: 4055801 - RNA, 15 nt, Vaccinia virus
uaacuucugauuuua

SEQ ID NO: 4055802 - RNA, 23 nt, Vaccinia virus
uaacuugcgggguuaauuucaca

SEQ ID NO: 4055803 - RNA, 16 nt, Vaccinia virus
uaacuuuuguucuaug

SEQ ID NO: 4055804 - RNA, 22 nt, Vaccinia virus
uaagaacaugucuucuauucua

SEQ ID NO: 4055805 - RNA, 22 nt, Vaccinia virus
uaagaauaauuuugaagcauug

SEQ ID NO: 4055806 - RNA, 15 nt, Vaccinia virus
uaagaguaacagcug

SEQ ID NO: 4055807 - RNA, 16 nt, Vaccinia virus
uaagaguaacagcugc

SEQ ID NO: 4055808 - RNA, 17 nt, Vaccinia virus
uaagauauccauaucau

SEQ ID NO: 4055809 - RNA, 21 nt, Vaccinia virus
uaagauaucuacuagaaagau

SEQ ID NO: 4055810 - RNA, 23 nt, Vaccinia virus
uaagaucuggguauuucuuuucu

SEQ ID NO: 4055811 - RNA, 14 nt, Vaccinia virus
uaagaugucauaau

SEQ ID NO: 4055812 - RNA, 14 nt, Vaccinia virus
uaagccaaacucau

SEQ ID NO: 4055813 - RNA, 22 nt, Vaccinia virus
uaaggacauuggauauguggaa

SEQ ID NO: 4055814 - RNA, 18 nt, Vaccinia virus
uaaguaauaacuauguuu

SEQ ID NO: 4055815 - RNA, 23 nt, Vaccinia virus
uaaguaguuaugagggaaaagau

SEQ ID NO: 4055816 - RNA, 21 nt, Vaccinia virus
uaaguauuuauaaaacucaua

SEQ ID NO: 4055817 - RNA, 17 nt, Vaccinia virus
uaagucccgaugaaaua

SEQ ID NO: 4055818 - RNA, 18 nt, Vaccinia virus
uaagucucucuccauaac

SEQ ID NO: 4055819 - RNA, 12 nt, Vaccinia virus
uaaguguuuaua

SEQ ID NO: 4055820 - RNA, 20 nt, Vaccinia virus
uaaguucauuaucugaaaua

SEQ ID NO: 4055821 - RNA, 13 nt, Vaccinia virus
uaaguuggaugaa

SEQ ID NO: 4055822 - RNA, 14 nt, Vaccinia virus
uaauaaaaacauua

SEQ ID NO: 4055823 - RNA, 21 nt, Vaccinia virus
uaauaaaaguggaagucauuu

SEQ ID NO: 4055824 - RNA, 18 nt, Vaccinia virus
uaauaaacauuccacauu

SEQ ID NO: 4055825 - RNA, 14 nt, Vaccinia virus
uaauaaaggaugug

SEQ ID NO: 4055826 - RNA, 15 nt, Vaccinia virus
uaauaaaucaaaaua

SEQ ID NO: 4055827 - RNA, 19 nt, Vaccinia virus
uaauaaauugguaaauccu

SEQ ID NO: 4055828 - RNA, 20 nt, Vaccinia virus
uaauaaauuuucucuugaaa

SEQ ID NO: 4055829 - RNA, 13 nt, Vaccinia virus
uaauaacaaguau

SEQ ID NO: 4055830 - RNA, 15 nt, Vaccinia virus
uaauaacaguuauau

SEQ ID NO: 4055831 - RNA, 21 nt, Vaccinia virus
uaauaacaugcgguucaaaau

SEQ ID NO: 4055832 - RNA, 20 nt, Vaccinia virus
uaauaaccugacuaauuuga

SEQ ID NO: 4055833 - RNA, 18 nt, Vaccinia virus
uaauaacgaguacauucu

SEQ ID NO: 4055834 - RNA, 21 nt, Vaccinia virus
uaauaacuagcuuaaacagau

SEQ ID NO: 4055835 - RNA, 19 nt, Vaccinia virus
uaauaauauuuugaaucuu

SEQ ID NO: 4055836 - RNA, 14 nt, Vaccinia virus
uaauaaucaauaau

SEQ ID NO: 4055837 - RNA, 22 nt, Vaccinia virus
uaauaaucaauaauauaucuua

SEQ ID NO: 4055838 - RNA, 15 nt, Vaccinia virus
uaauaauucauggaa

SEQ ID NO: 4055839 - RNA, 15 nt, Vaccinia virus
uaauaauuuaacaau

SEQ ID NO: 4055840 - RNA, 12 nt, Vaccinia virus
uaauacagacga

SEQ ID NO: 4055841 - RNA, 21 nt, Vaccinia virus
uaauacauccccauuccagua

SEQ ID NO: 4055842 - RNA, 19 nt, Vaccinia virus
uaauacaucucuggaaaua

SEQ ID NO: 4055843 - RNA, 24 nt, Vaccinia virus
uaauaccaauugcggacuuacuau

SEQ ID NO: 4055844 - RNA, 15 nt, Vaccinia virus
uaauacuaucuggau

SEQ ID NO: 4055845 - RNA, 14 nt, Vaccinia virus
uaauacuguuuucu

SEQ ID NO: 4055846 - RNA, 19 nt, Vaccinia virus
uaauagacuauauaaaccg

SEQ ID NO: 4055847 - RNA, 16 nt, Vaccinia virus
uaauagauauaucucu

SEQ ID NO: 4055848 - RNA, 20 nt, Vaccinia virus
uaauagaucaacagaaauau

SEQ ID NO: 4055849 - RNA, 24 nt, Vaccinia virus
uaauaguuuccaccgaaagacuau

SEQ ID NO: 4055850 - RNA, 16 nt, Vaccinia virus
uaauauaaaagaauau

SEQ ID NO: 4055851 - RNA, 22 nt, Vaccinia virus
uaauauaaccaccgauaaaucu

SEQ ID NO: 4055852 - RNA, 18 nt, Vaccinia virus
uaauaucccacauuauca

SEQ ID NO: 4055853 - RNA, 20 nt, Vaccinia virus
uaauaucccacauuaucauc

SEQ ID NO: 4055854 - RNA, 15 nt, Vaccinia virus
uaauaucuaaauauu

SEQ ID NO: 4055855 - RNA, 14 nt, Vaccinia virus
uaauaugaguaaaa

SEQ ID NO: 4055856 - RNA, 17 nt, Vaccinia virus
uaauaugauuagaaguu

SEQ ID NO: 4055857 - RNA, 19 nt, Vaccinia virus
uaauauuaaagauaaagcg

SEQ ID NO: 4055858 - RNA, 11 nt, Vaccinia virus
uaauauuugcu

SEQ ID NO: 4055859 - RNA, 19 nt, Vaccinia virus
uaauauuuugcaucauuca

SEQ ID NO: 4055860 - RNA, 22 nt, Vaccinia virus
uaaucaaaaucuuaauaucuuc

SEQ ID NO: 4055861 - RNA, 17 nt, Vaccinia virus
uaaucaauacaaaacau

SEQ ID NO: 4055862 - RNA, 22 nt, Vaccinia virus
uaaucauaaauuauuucauuau

SEQ ID NO: 4055863 - RNA, 23 nt, Vaccinia virus
uaaucauauuuagacugauguau

SEQ ID NO: 4055864 - RNA, 18 nt, Vaccinia virus
uaauccaaugauacuuuu

SEQ ID NO: 4055865 - RNA, 18 nt, Vaccinia virus
uaauccuuuuuauuuauu

SEQ ID NO: 4055866 - RNA, 14 nt, Vaccinia virus
uaaucgauuuugca

SEQ ID NO: 4055867 - RNA, 17 nt, Vaccinia virus
uaaucggagaauguuuc

SEQ ID NO: 4055868 - RNA, 15 nt, Vaccinia virus
uaaucguuauuauca

SEQ ID NO: 4055869 - RNA, 19 nt, Vaccinia virus
uaaucuacaaaacaaucau

SEQ ID NO: 4055870 - RNA, 23 nt, Vaccinia virus
uaaucuauuuuaccucuucugau

SEQ ID NO: 4055871 - RNA, 16 nt, Vaccinia virus
uaaugaacgaauuaug

SEQ ID NO: 4055872 - RNA, 17 nt, Vaccinia virus
uaaugacaauaauuaug

SEQ ID NO: 4055873 - RNA, 23 nt, Vaccinia virus
uaaugacaucuaugauuuuacug

SEQ ID NO: 4055874 - RNA, 15 nt, Vaccinia virus
uaaugauauaucuug

SEQ ID NO: 4055875 - RNA, 22 nt, Vaccinia virus
uaaugauguauguuuaaacacu

SEQ ID NO: 4055876 - RNA, 17 nt, Vaccinia virus
uaaugcaggguguauau

SEQ ID NO: 4055877 - RNA, 14 nt, Vaccinia virus
uaaugcuacagaua

SEQ ID NO: 4055878 - RNA, 15 nt, Vaccinia virus
uaauggaguuguaaa

SEQ ID NO: 4055879 - RNA, 14 nt, Vaccinia virus
uaauguaaaaucau

SEQ ID NO: 4055880 - RNA, 21 nt, Vaccinia virus
uaauguaaucucuaaauucau

SEQ ID NO: 4055881 - RNA, 23 nt, Vaccinia virus
uaauguagaagaucauacagaca

SEQ ID NO: 4055882 - RNA, 21 nt, Vaccinia virus
uaauguauucucuuacaaaua

SEQ ID NO: 4055883 - RNA, 19 nt, Vaccinia virus
uaauguuuaauuuaucaaa

SEQ ID NO: 4055884 - RNA, 18 nt, Vaccinia virus
uuagaucucauaugugcu

SEQ ID NO: 4055885 - RNA, 15 nt, Vaccinia virus
uuagaugaauuauua

SEQ ID NO: 4055886 - RNA, 13 nt, Vaccinia virus
uuagauuauucuc

SEQ ID NO: 4055887 - RNA, 23 nt, Vaccinia virus
uuagcaucagucuccacacuauu

SEQ ID NO: 4055888 - RNA, 14 nt, Vaccinia virus
uuagccauuuaauu

SEQ ID NO: 4055889 - RNA, 20 nt, Vaccinia virus
uuaguaaaaaauuuauuucu

SEQ ID NO: 4055890 - RNA, 18 nt, Vaccinia virus
uuaguaauauaucucaga

SEQ ID NO: 4055891 - RNA, 20 nt, Vaccinia virus
uuaguauaacgugaauguau

SEQ ID NO: 4055892 - RNA, 15 nt, Vaccinia virus
uuaguauaauuauug

SEQ ID NO: 4055893 - RNA, 22 nt, Vaccinia virus
uuaguauaucaaauacaucuau

SEQ ID NO: 4055894 - RNA, 19 nt, Vaccinia virus
uuaguauauuccuuauuca

SEQ ID NO: 4055895 - RNA, 19 nt, Vaccinia virus
uuaguaucuagcucuguaa

SEQ ID NO: 4055896 - RNA, 15 nt, Vaccinia virus
uuagucagauuauua

SEQ ID NO: 4055897 - RNA, 18 nt, Vaccinia virus
uuagucgugguaagaaag

SEQ ID NO: 4055898 - RNA, 12 nt, Vaccinia virus
uuaguuaacaua

SEQ ID NO: 4055899 - RNA, 15 nt, Vaccinia virus
uuauaaaaauguucu

SEQ ID NO: 4055900 - RNA, 13 nt, Vaccinia virus
uuauaagauaucc

SEQ ID NO: 4055901 - RNA, 12 nt, Vaccinia virus
guaacauaaaaa

SEQ ID NO: 4055902 - RNA, 15 nt, Vaccinia virus
guaacgcguggaaaa

SEQ ID NO: 4055903 - RNA, 21 nt, Vaccinia virus
guaacuggaucuuuauuuuuc

SEQ ID NO: 4055904 - RNA, 11 nt, Vaccinia virus
guaaguuuauu

SEQ ID NO: 4055905 - RNA, 15 nt, Vaccinia virus
guaauaaauaugauu

SEQ ID NO: 4055906 - RNA, 18 nt, Vaccinia virus
guaauaacagugcuauca

SEQ ID NO: 4055907 - RNA, 17 nt, Vaccinia virus
guaauaagaauaaaaug

SEQ ID NO: 4055908 - RNA, 20 nt, Vaccinia virus
guaauaucaugucuaaugau

SEQ ID NO: 4055909 - RNA, 22 nt, Vaccinia virus
guaauaucugacuuauuuccua

SEQ ID NO: 4055910 - RNA, 14 nt, Vaccinia virus
guaauauucaucau

SEQ ID NO: 4055911 - RNA, 16 nt, Vaccinia virus
guaaucauagaugaau

SEQ ID NO: 4055912 - RNA, 22 nt, Vaccinia virus
guaaugaacagacuauuuauca

SEQ ID NO: 4055913 - RNA, 13 nt, Vaccinia virus
guaauuaaugaaa

SEQ ID NO: 4055914 - RNA, 18 nt, Vaccinia virus
guaauuauaguauaaugu

SEQ ID NO: 4055915 - RNA, 23 nt, Vaccinia virus
guaauugacaucuauauauccuu

SEQ ID NO: 4055916 - RNA, 17 nt, Vaccinia virus
guaauuguauuauuucc

SEQ ID NO: 4055917 - RNA, 21 nt, Vaccinia virus
guacaaaaaaauaaaacuaga

SEQ ID NO: 4055918 - RNA, 19 nt, Vaccinia virus
guacaaaaaauaucauguu

SEQ ID NO: 4055919 - RNA, 17 nt, Vaccinia virus
guacaaauguuaaacau

SEQ ID NO: 4055920 - RNA, 15 nt, Vaccinia virus
guacaacauacuguu

SEQ ID NO: 4055921 - RNA, 17 nt, Vaccinia virus
guacaauaaauagcuuu

SEQ ID NO: 4055922 - RNA, 22 nt, Vaccinia virus
guacaaugauaaugauacagua

SEQ ID NO: 4055923 - RNA, 16 nt, Vaccinia virus
guacacaacacaauga

SEQ ID NO: 4055924 - RNA, 22 nt, Vaccinia virus
guacacagcauguuauaacuaa

SEQ ID NO: 4055925 - RNA, 18 nt, Vaccinia virus
guacaggacguaacuaua

SEQ ID NO: 4055926 - RNA, 16 nt, Vaccinia virus
guacauaaguuguaca

SEQ ID NO: 4055927 - RNA, 12 nt, Vaccinia virus
guacauaauaga

SEQ ID NO: 4055928 - RNA, 15 nt, Vaccinia virus
guacaucuugacauu

SEQ ID NO: 4055929 - RNA, 18 nt, Vaccinia virus
guacauuaauaaaugaaa

SEQ ID NO: 4055930 - RNA, 22 nt, Vaccinia virus
guaccagcauuuguaauaaucc

SEQ ID NO: 4055931 - RNA, 21 nt, Vaccinia virus
guaccgauucuagauacaaga

SEQ ID NO: 4055932 - RNA, 19 nt, Vaccinia virus
guacggcgagcuauuuaau

SEQ ID NO: 4055933 - RNA, 20 nt, Vaccinia virus
guacgggcgcuguaauuaau

SEQ ID NO: 4055934 - RNA, 13 nt, Vaccinia virus
guacuauaauauu

SEQ ID NO: 4055935 - RNA, 20 nt, Vaccinia virus
guacuccucccauaauacuu

SEQ ID NO: 4055936 - RNA, 14 nt, Vaccinia virus
guacucuuaagaga

SEQ ID NO: 4055937 - RNA, 18 nt, Vaccinia virus
guacuguaaaaacaaauu

SEQ ID NO: 4055938 - RNA, 18 nt, Vaccinia virus
guagacauagauauucua

SEQ ID NO: 4055939 - RNA, 22 nt, Vaccinia virus
guagauaagaaugugauaagau

SEQ ID NO: 4055940 - RNA, 14 nt, Vaccinia virus
guagauacauggcu

SEQ ID NO: 4055941 - RNA, 12 nt, Vaccinia virus
guagauauugcu

SEQ ID NO: 4055942 - RNA, 15 nt, Vaccinia virus
guagaugugauuuuu

SEQ ID NO: 4055943 - RNA, 14 nt, Vaccinia virus
guagcguauuucuc

SEQ ID NO: 4055944 - RNA, 15 nt, Vaccinia virus
guaggauauauuaaa

SEQ ID NO: 4055945 - RNA, 13 nt, Vaccinia virus
guaguaacucuaa

SEQ ID NO: 4055946 - RNA, 13 nt, Vaccinia virus
guagugguuauau

SEQ ID NO: 4055947 - RNA, 13 nt, Vaccinia virus
guauaaaaauuaa

SEQ ID NO: 4055948 - RNA, 18 nt, Vaccinia virus
guauaacauucuuaaaca

SEQ ID NO: 4055949 - RNA, 19 nt, Vaccinia virus
guauaacauucuuaaacaa

SEQ ID NO: 4055950 - RNA, 18 nt, Vaccinia virus
guauaauaacuaaauguc

SEQ ID NO: 4055951 - RNA, 20 nt, Vaccinia virus
guauaauucuuuauaacuga

SEQ ID NO: 4055952 - RNA, 19 nt, Vaccinia virus
guauaauuuuuauguuuua

SEQ ID NO: 4055953 - RNA, 14 nt, Vaccinia virus
guauauaguuuaua

SEQ ID NO: 4055954 - RNA, 22 nt, Vaccinia virus
guauaucaacaucuaccuuauu

SEQ ID NO: 4055955 - RNA, 13 nt, Vaccinia virus
guauauuauucau

SEQ ID NO: 4055956 - RNA, 19 nt, Vaccinia virus
guauauucuagguacuuau

SEQ ID NO: 4055957 - RNA, 19 nt, Vaccinia virus
guaucaaaaaauuacuuuu

SEQ ID NO: 4055958 - RNA, 22 nt, Vaccinia virus
guaucaaucaagaggauggaau

SEQ ID NO: 4055959 - RNA, 16 nt, Vaccinia virus
guaucauaauauuaau

SEQ ID NO: 4055960 - RNA, 23 nt, Vaccinia virus
guauccacuuuaauaauaucaua

SEQ ID NO: 4055961 - RNA, 19 nt, Vaccinia virus
guauccagguagacauaga

SEQ ID NO: 4055962 - RNA, 17 nt, Vaccinia virus
guauccuugauuauguu

SEQ ID NO: 4055963 - RNA, 23 nt, Vaccinia virus
guaucgauacgcauuuucaaaau

SEQ ID NO: 4055964 - RNA, 19 nt, Vaccinia virus
guaucgcauuaauacuguu

SEQ ID NO: 4055965 - RNA, 17 nt, Vaccinia virus
guaucugaaguacuauu

SEQ ID NO: 4055966 - RNA, 15 nt, Vaccinia virus
guaucuuauauacac

SEQ ID NO: 4055967 - RNA, 17 nt, Vaccinia virus
guaugaauaaucuucau

SEQ ID NO: 4055968 - RNA, 17 nt, Vaccinia virus
guaugaggcaacauugu

SEQ ID NO: 4055969 - RNA, 18 nt, Vaccinia virus
guauggagacauucauug

SEQ ID NO: 4055970 - RNA, 13 nt, Vaccinia virus
guaugucaugaau

SEQ ID NO: 4055971 - RNA, 21 nt, Vaccinia virus
guaugugugugugguauagau

SEQ ID NO: 4055972 - RNA, 14 nt, Vaccinia virus
guauuaauaauauc

SEQ ID NO: 4055973 - RNA, 16 nt, Vaccinia virus
guauuacuauaauagg

SEQ ID NO: 4055974 - RNA, 14 nt, Vaccinia virus
guauucaauuacua

SEQ ID NO: 4055975 - RNA, 21 nt, Vaccinia virus
guauucacuauaucaguuuua

SEQ ID NO: 4055976 - RNA, 12 nt, Vaccinia virus
guauugauaaau

SEQ ID NO: 4055977 - RNA, 15 nt, Vaccinia virus
guauuggauaaagga

SEQ ID NO: 4055978 - RNA, 12 nt, Vaccinia virus
guauuuggaaag

SEQ ID NO: 4055979 - RNA, 22 nt, Vaccinia virus
guauuuuuguuagaguauauaa

SEQ ID NO: 4055980 - RNA, 22 nt, Vaccinia virus
guauuuuuuauggcaaacuuua

SEQ ID NO: 4055981 - RNA, 14 nt, Vaccinia virus
gucaauauucuguu

SEQ ID NO: 4055982 - RNA, 15 nt, Vaccinia virus
gucaaucuuauucaa

SEQ ID NO: 4055983 - RNA, 18 nt, Vaccinia virus
gucaaugauaugauuuuu

SEQ ID NO: 4055984 - RNA, 13 nt, Vaccinia virus
gucaaugauuuca

SEQ ID NO: 4055985 - RNA, 17 nt, Vaccinia virus
gucaauuuuaaaugaug

SEQ ID NO: 4055986 - RNA, 22 nt, Vaccinia virus
gucacugucuggcaauaaauga

SEQ ID NO: 4055987 - RNA, 14 nt, Vaccinia virus
gucagaauucucuc

SEQ ID NO: 4055988 - RNA, 17 nt, Vaccinia virus
ugagaguagauaucauu

SEQ ID NO: 4055989 - RNA, 13 nt, Vaccinia virus
ugagauaagaaca

SEQ ID NO: 4055990 - RNA, 14 nt, Vaccinia virus
ugagauauauacac

SEQ ID NO: 4055991 - RNA, 14 nt, Vaccinia virus
ugaggauaaugcua

SEQ ID NO: 4055992 - RNA, 17 nt, Vaccinia virus
ugaguauaucagaucau

SEQ ID NO: 4055993 - RNA, 13 nt, Vaccinia virus
aaaaaagcaaugu

SEQ ID NO: 4055994 - RNA, 11 nt, Vaccinia virus
aaaaacuauac

SEQ ID NO: 4055995 - RNA, 19 nt, Vaccinia virus
aaaaacuguuuaacaaggu

SEQ ID NO: 4055996 - RNA, 14 nt, Vaccinia virus
aaaaagaaugagua

SEQ ID NO: 4055997 - RNA, 19 nt, Vaccinia virus
aaaaagcucuauauuacaa

SEQ ID NO: 4055998 - RNA, 23 nt, Vaccinia virus
aaaaaugcuagaauuagaaaagu

SEQ ID NO: 4055999 - RNA, 15 nt, Vaccinia virus
aaaaauguuaauuua

SEQ ID NO: 4056000 - RNA, 20 nt, Vaccinia virus
aaaaauuagaucaaagaaua

SEQ ID NO: 4056001 - RNA, 14 nt, Vaccinia virus
aaaaauuauacugu

SEQ ID NO: 4056002 - RNA, 22 nt, Vaccinia virus
aaaaauuauccuaucauguauu

SEQ ID NO: 4056003 - RNA, 13 nt, Vaccinia virus
aaaaauucccauu

SEQ ID NO: 4056004 - RNA, 20 nt, Vaccinia virus
aaaaauugaauugaugauau

SEQ ID NO: 4056005 - RNA, 21 nt, Vaccinia virus
aaaaauuuuaagcgaugauau

SEQ ID NO: 4056006 - RNA, 14 nt, Vaccinia virus
aaaacaaugaacua

SEQ ID NO: 4056007 - RNA, 15 nt, Vaccinia virus
aaaacacaaauaugg

SEQ ID NO: 4056008 - RNA, 16 nt, Vaccinia virus
aaaacagauaaugaua

SEQ ID NO: 4056009 - RNA, 21 nt, Vaccinia virus
aaaacauaaaggaauauacaa

SEQ ID NO: 4056010 - RNA, 13 nt, Vaccinia virus
aaaacauaaucaa

SEQ ID NO: 4056011 - RNA, 17 nt, Vaccinia virus
aaaacauauauaauaaa

SEQ ID NO: 4056012 - RNA, 20 nt, Vaccinia virus
aaaacauuauaauaauauaa

SEQ ID NO: 4056013 - RNA, 21 nt, Vaccinia virus
aaaacauuauucuauuucgaa

SEQ ID NO: 4056014 - RNA, 22 nt, Vaccinia virus
aaaacgaggagcggauaaugau

SEQ ID NO: 4056015 - RNA, 13 nt, Vaccinia virus
aaaacucaaaugu

SEQ ID NO: 4056016 - RNA, 17 nt, Vaccinia virus
aaaacugguuaaaacag

SEQ ID NO: 4056017 - RNA, 22 nt, Vaccinia virus
aaaacugguuaaaacaguaugu

SEQ ID NO: 4056018 - RNA, 16 nt, Vaccinia virus
aaaacuuuaauaacaa

SEQ ID NO: 4056019 - RNA, 14 nt, Vaccinia virus
aaaagaaaauuugu

SEQ ID NO: 4056020 - RNA, 11 nt, Vaccinia virus
aaaagaaagua

SEQ ID NO: 4056021 - RNA, 18 nt, Vaccinia virus
aaaagaacuaacguccau

SEQ ID NO: 4056022 - RNA, 20 nt, Vaccinia virus
aaaagaauguaucaagaaua

SEQ ID NO: 4056023 - RNA, 21 nt, Vaccinia virus
aaaagacgcuuguuaauaagu

SEQ ID NO: 4056024 - RNA, 14 nt, Vaccinia virus
aaaagacuauacau

SEQ ID NO: 4056025 - RNA, 14 nt, Vaccinia virus
aaaagauaaaugua

SEQ ID NO: 4056026 - RNA, 16 nt, Vaccinia virus
aaaagauacguacugu

SEQ ID NO: 4056027 - RNA, 17 nt, Vaccinia virus
aaaagauucgguuuuau

SEQ ID NO: 4056028 - RNA, 22 nt, Vaccinia virus
aaaagauucgguuuuauacugu

SEQ ID NO: 4056029 - RNA, 10 nt, Vaccinia virus
aaaagucaac

SEQ ID NO: 4056030 - RNA, 13 nt, Vaccinia virus
aaaauaaaguuau

SEQ ID NO: 4056031 - RNA, 19 nt, Vaccinia virus
aaaauaaucauacaaucua

SEQ ID NO: 4056032 - RNA, 13 nt, Vaccinia virus
aaaauacauaaag

SEQ ID NO: 4056033 - RNA, 16 nt, Vaccinia virus
aaaauacuauagacca

SEQ ID NO: 4056034 - RNA, 15 nt, Vaccinia virus
aaaauagaaaaaaca

SEQ ID NO: 4056035 - RNA, 16 nt, Vaccinia virus
aaaauagcgcugaaaa

SEQ ID NO: 4056036 - RNA, 13 nt, Vaccinia virus
aaaauauaaauua

SEQ ID NO: 4056037 - RNA, 14 nt, Vaccinia virus
aaaauauaaugaua

SEQ ID NO: 4056038 - RNA, 17 nt, Vaccinia virus
aaaauauauaaugaaua

SEQ ID NO: 4056039 - RNA, 22 nt, Vaccinia virus
aaaauauggaauuguauuuucu

SEQ ID NO: 4056040 - RNA, 16 nt, Vaccinia virus
aaaauauguauaacgu

SEQ ID NO: 4056041 - RNA, 13 nt, Vaccinia virus
aaaauauuaucua

SEQ ID NO: 4056042 - RNA, 16 nt, Vaccinia virus
aaaauauuuauuagaa

SEQ ID NO: 4056043 - RNA, 16 nt, Vaccinia virus
aaaaucauugggauuu

SEQ ID NO: 4056044 - RNA, 15 nt, Vaccinia virus
aaaaucgauaaacug

SEQ ID NO: 4056045 - RNA, 16 nt, Vaccinia virus
aaaaucugauagaaag

SEQ ID NO: 4056046 - RNA, 22 nt, Vaccinia virus
aaaaugguguauuggaccuggu

SEQ ID NO: 4056047 - RNA, 18 nt, Vaccinia virus
aaaaugugggagaaucua

SEQ ID NO: 4056048 - RNA, 19 nt, Vaccinia virus
aaaaugugucaagaaucua

SEQ ID NO: 4056049 - RNA, 17 nt, Vaccinia virus
aaaauguugaugauauc

SEQ ID NO: 4056050 - RNA, 13 nt, Vaccinia virus
aaaauuauguaaa

SEQ ID NO: 4056051 - RNA, 22 nt, Vaccinia virus
aaaauuauuaaacaauacucua

SEQ ID NO: 4056052 - RNA, 13 nt, Vaccinia virus
aaaauuguagaac

SEQ ID NO: 4056053 - RNA, 16 nt, Vaccinia virus
aaaauuuaagagaaug

SEQ ID NO: 4056054 - RNA, 12 nt, Vaccinia virus
aaacaaaaaugc

SEQ ID NO: 4056055 - RNA, 14 nt, Vaccinia virus
aaacaaagaauugu

SEQ ID NO: 4056056 - RNA, 12 nt, Vaccinia virus
aaacaacucuuc

SEQ ID NO: 4056057 - RNA, 17 nt, Vaccinia virus
aaacaauacagugauug

SEQ ID NO: 4056058 - RNA, 22 nt, Vaccinia virus
aaacacgucgaagguuaacauc

SEQ ID NO: 4056059 - RNA, 13 nt, Vaccinia virus
aaacacuguuguu

SEQ ID NO: 4056060 - RNA, 20 nt, Vaccinia virus
aaacagacgacaacauguaa

SEQ ID NO: 4056061 - RNA, 23 nt, Vaccinia virus
aaacagauauaguuuuucuggaa

SEQ ID NO: 4056062 - RNA, 22 nt, Vaccinia virus
aaacagucagcuggucuaaaau

SEQ ID NO: 4056063 - RNA, 19 nt, Vaccinia virus
aaacaguuacuguuaguau

SEQ ID NO: 4056064 - RNA, 14 nt, Vaccinia virus
aaacauauucuaug

SEQ ID NO: 4056065 - RNA, 18 nt, Vaccinia virus
aaacaugaugagauguuu

SEQ ID NO: 4056066 - RNA, 22 nt, Vaccinia virus
aaacauucuuuauuaaguguuu

SEQ ID NO: 4056067 - RNA, 15 nt, Vaccinia virus
aaacauuuugcagaa

SEQ ID NO: 4056068 - RNA, 21 nt, Vaccinia virus
aaaccaaaucuugauuacaaa

SEQ ID NO: 4056069 - RNA, 17 nt, Vaccinia virus
aacucuugcuacaaaau

SEQ ID NO: 4056070 - RNA, 19 nt, Vaccinia virus
aacugcuuuucuggauggc

SEQ ID NO: 4056071 - RNA, 17 nt, Vaccinia virus
aacuguguuucagguau

SEQ ID NO: 4056072 - RNA, 18 nt, Vaccinia virus
aacuuaaaagaauuacuu

SEQ ID NO: 4056073 - RNA, 17 nt, Vaccinia virus
aacuuaaacaaaauaca

SEQ ID NO: 4056074 - RNA, 19 nt, Vaccinia virus
aacuuagacggcaaguugu

SEQ ID NO: 4056075 - RNA, 15 nt, Vaccinia virus
aacuuauucuugaua

SEQ ID NO: 4056076 - RNA, 17 nt, Vaccinia virus
aacuucgugaauaaugu

SEQ ID NO: 4056077 - RNA, 19 nt, Vaccinia virus
aacuucuaaucuuguaaua

SEQ ID NO: 4056078 - RNA, 16 nt, Vaccinia virus
aacuucuagucuagaa

SEQ ID NO: 4056079 - RNA, 16 nt, Vaccinia virus
aacuuggggagaauga

SEQ ID NO: 4056080 - RNA, 19 nt, Vaccinia virus
aacuuguguucuaaaugga

SEQ ID NO: 4056081 - RNA, 13 nt, Vaccinia virus
aacuuuaaauacu

SEQ ID NO: 4056082 - RNA, 14 nt, Vaccinia virus
aacuuuaaauacuu

SEQ ID NO: 4056083 - RNA, 19 nt, Vaccinia virus
aacuuuauccauaucucua

SEQ ID NO: 4056084 - RNA, 23 nt, Vaccinia virus
aacuuuauccauaucucuagaua

SEQ ID NO: 4056085 - RNA, 12 nt, Vaccinia virus
aacuuucuagaa

SEQ ID NO: 4056086 - RNA, 14 nt, Vaccinia virus
aacuuuuaaauaca

SEQ ID NO: 4056087 - RNA, 16 nt, Vaccinia virus
aacuuuuagaaauaua

SEQ ID NO: 4056088 - RNA, 21 nt, Vaccinia virus
aacuuuuguuuuguuucugau

SEQ ID NO: 4056089 - RNA, 23 nt, Vaccinia virus
aagaaauacuaaaaaauguagaa

SEQ ID NO: 4056090 - RNA, 15 nt, Vaccinia virus
aagaaauuaauaaag

SEQ ID NO: 4056091 - RNA, 15 nt, Vaccinia virus
aagaacaauguccaa

SEQ ID NO: 4056092 - RNA, 12 nt, Vaccinia virus
aagaagaaguua

SEQ ID NO: 4056093 - RNA, 11 nt, Vaccinia virus
aagaagagaau

SEQ ID NO: 4056094 - RNA, 23 nt, Vaccinia virus
aagaaguagcuaauguuguaaac

SEQ ID NO: 4056095 - RNA, 17 nt, Vaccinia virus
aagaaguuccaugaugu

SEQ ID NO: 4056096 - RNA, 22 nt, Vaccinia virus
aagaauaauccuauaucacuuc

SEQ ID NO: 4056097 - RNA, 14 nt, Vaccinia virus
aagaauauagaaau

SEQ ID NO: 4056098 - RNA, 13 nt, Vaccinia virus
aagaauugugcau

SEQ ID NO: 4056099 - RNA, 14 nt, Vaccinia virus
aagaauuuggaaau

SEQ ID NO: 4056100 - RNA, 13 nt, Vaccinia virus
aagaccaauaaua

SEQ ID NO: 4056101 - RNA, 16 nt, Vaccinia virus
aagacgauacuguuuc

SEQ ID NO: 4056102 - RNA, 18 nt, Vaccinia virus
aagacugcugaauguauc

SEQ ID NO: 4056103 - RNA, 19 nt, Vaccinia virus
aagacuuuguguugugcau

SEQ ID NO: 4056104 - RNA, 18 nt, Vaccinia virus
aagagaauugucaaaauu

SEQ ID NO: 4056105 - RNA, 19 nt, Vaccinia virus
aagagcuacgugagacuua

SEQ ID NO: 4056106 - RNA, 15 nt, Vaccinia virus
aagaguauacagaag

SEQ ID NO: 4056107 - RNA, 14 nt, Vaccinia virus
aagauaaaguuuau

SEQ ID NO: 4056108 - RNA, 14 nt, Vaccinia virus
aagauaauuaucca

SEQ ID NO: 4056109 - RNA, 23 nt, Vaccinia virus
aagauaggggaguaguugaaauc

SEQ ID NO: 4056110 - RNA, 13 nt, Vaccinia virus
aagauauagcacc

SEQ ID NO: 4056111 - RNA, 20 nt, Vaccinia virus
aagauaucuacuagaaagau

SEQ ID NO: 4056112 - RNA, 18 nt, Vaccinia virus
aagauaucuauacuuacu

SEQ ID NO: 4056113 - RNA, 17 nt, Vaccinia virus
aagauaugcuacaagau

SEQ ID NO: 4056114 - RNA, 15 nt, Vaccinia virus
aagaucauacagaca

SEQ ID NO: 4056115 - RNA, 14 nt, Vaccinia virus
aagaugaaaugauu

SEQ ID NO: 4056116 - RNA, 14 nt, Vaccinia virus
aagauguuagaaaa

SEQ ID NO: 4056117 - RNA, 16 nt, Vaccinia virus
aagauuacuacacuug

SEQ ID NO: 4056118 - RNA, 17 nt, Vaccinia virus
aagauuguacagaaauc

SEQ ID NO: 4056119 - RNA, 22 nt, Vaccinia virus
aagauuuuuagcguauuauccu

SEQ ID NO: 4056120 - RNA, 12 nt, Vaccinia virus
aagcaaaugaug

SEQ ID NO: 4056121 - RNA, 14 nt, Vaccinia virus
aagcaagaaagaua

SEQ ID NO: 4056122 - RNA, 14 nt, Vaccinia virus
aagcaauaaauaca

SEQ ID NO: 4056123 - RNA, 16 nt, Vaccinia virus
aagcaauaaauacaga

SEQ ID NO: 4056124 - RNA, 19 nt, Vaccinia virus
aagcaugacggcaugauaa

SEQ ID NO: 4056125 - RNA, 22 nt, Vaccinia virus
aagcuacuuguuuaacaaaguu

SEQ ID NO: 4056126 - RNA, 14 nt, Vaccinia virus
aagcugacaaaauu

SEQ ID NO: 4056127 - RNA, 17 nt, Vaccinia virus
aagcuguucaaaauaua

SEQ ID NO: 4056128 - RNA, 14 nt, Vaccinia virus
aagcuugacuacau

SEQ ID NO: 4056129 - RNA, 16 nt, Vaccinia virus
aaggaauuaauuauuc

SEQ ID NO: 4056130 - RNA, 21 nt, Vaccinia virus
aaggacauuggauauguggaa

SEQ ID NO: 4056131 - RNA, 20 nt, Vaccinia virus
aaggacauuguaaauuuuau

SEQ ID NO: 4056132 - RNA, 23 nt, Vaccinia virus
aaggaggaucuuuacccauccaa

SEQ ID NO: 4056133 - RNA, 16 nt, Vaccinia virus
aaggauauacaaagca

SEQ ID NO: 4056134 - RNA, 15 nt, Vaccinia virus
aaggauaugauaugu

SEQ ID NO: 4056135 - RNA, 15 nt, Vaccinia virus
aaggaucuguacacg

SEQ ID NO: 4056136 - RNA, 23 nt, Vaccinia virus
aaggaugcaaacuuacagaaaca

SEQ ID NO: 4056137 - RNA, 12 nt, Vaccinia virus
aaggucagaaaa

SEQ ID NO: 4056138 - RNA, 18 nt, Vaccinia virus
aaggugucgauuaccauu

SEQ ID NO: 4056139 - RNA, 12 nt, Vaccinia virus
aagguucuuaua

SEQ ID NO: 4056140 - RNA, 11 nt, Vaccinia virus
aaguaaauacu

SEQ ID NO: 4056141 - RNA, 16 nt, Vaccinia virus
aaguaaguauguugaa

SEQ ID NO: 4056142 - RNA, 15 nt, Vaccinia virus
aaguacgauguuauu

SEQ ID NO: 4056143 - RNA, 16 nt, Vaccinia virus
aaguacuugauacaua

SEQ ID NO: 4056144 - RNA, 16 nt, Vaccinia virus
aaguaucaaaucgaua

SEQ ID NO: 4056145 - RNA, 18 nt, Vaccinia virus
aaguauccauuuagcaaa

SEQ ID NO: 4056146 - RNA, 22 nt, Vaccinia virus
aaguaucuaguuagcaauuuuc

SEQ ID NO: 4056147 - RNA, 18 nt, Vaccinia virus
aaguaugauacaauacuu

SEQ ID NO: 4056148 - RNA, 18 nt, Vaccinia virus
aaguauuguuuugauaac

SEQ ID NO: 4056149 - RNA, 14 nt, Vaccinia virus
aaguauuuauaaaa

SEQ ID NO: 4056150 - RNA, 20 nt, Vaccinia virus
aaguauuugaacauguagau

SEQ ID NO: 4056151 - RNA, 16 nt, Vaccinia virus
aagucacuaacugaua

SEQ ID NO: 4056152 - RNA, 19 nt, Vaccinia virus
aagucauacuagaauaaag

SEQ ID NO: 4056153 - RNA, 20 nt, Vaccinia virus
aagucccucauagaaugaua

SEQ ID NO: 4056154 - RNA, 20 nt, Vaccinia virus
aaguccuaguuguauacuga

SEQ ID NO: 4056155 - RNA, 21 nt, Vaccinia virus
aagucucguucguaaauaaua

SEQ ID NO: 4056156 - RNA, 19 nt, Vaccinia virus
aagucugauauucagaaag

SEQ ID NO: 4056157 - RNA, 16 nt, Vaccinia virus
aagucuuacaauguuc

SEQ ID NO: 4056158 - RNA, 22 nt, Vaccinia virus
aagugaacaauaauuaauucuu

SEQ ID NO: 4056159 - RNA, 19 nt, Vaccinia virus
aaguggacauauagaugca

SEQ ID NO: 4056160 - RNA, 17 nt, Vaccinia virus
aaguuaaaauaucaugg

SEQ ID NO: 4056161 - RNA, 22 nt, Vaccinia virus
aaguuacaaacaacuaggaaau

SEQ ID NO: 4056162 - RNA, 15 nt, Vaccinia virus
aaguucaccaaacaa

SEQ ID NO: 4056163 - RNA, 18 nt, Vaccinia virus
aaguucauaacagauaca

SEQ ID NO: 4056164 - RNA, 22 nt, Vaccinia virus
aaguuccagaaaauguagaauu

SEQ ID NO: 4056165 - RNA, 16 nt, Vaccinia virus
aaguugaccaauucau

SEQ ID NO: 4056166 - RNA, 13 nt, Vaccinia virus
aaguuguuaaaaa

SEQ ID NO: 4056167 - RNA, 19 nt, Vaccinia virus
aaguuuauucgcuaccaua

SEQ ID NO: 4056168 - RNA, 17 nt, Vaccinia virus
aaguuucguacaaauac

SEQ ID NO: 4056169 - RNA, 15 nt, Vaccinia virus
aaguuucuauuucuu

SEQ ID NO: 4056170 - RNA, 16 nt, Vaccinia virus
aaguuucucaugauaa

SEQ ID NO: 4056171 - RNA, 17 nt, Vaccinia virus
aaguuuggagaaaugga

SEQ ID NO: 4056172 - RNA, 19 nt, Vaccinia virus
aaguuuggcagcuagcaga

SEQ ID NO: 4056173 - RNA, 22 nt, Vaccinia virus
aaguuuuauagagauagacgaa

SEQ ID NO: 4056174 - RNA, 16 nt, Vaccinia virus
aaguuuuuauucucuu

SEQ ID NO: 4056175 - RNA, 13 nt, Vaccinia virus
aauaaaacuguau

SEQ ID NO: 4056176 - RNA, 21 nt, Vaccinia virus
aauaaaaucacuaguaucaau

SEQ ID NO: 4056177 - RNA, 19 nt, Vaccinia virus
aauaaacucagaacaauau

SEQ ID NO: 4056178 - RNA, 15 nt, Vaccinia virus
aauaaauaacaaugg

SEQ ID NO: 4056179 - RNA, 20 nt, Vaccinia virus
aauaaaugcgauacagacau

SEQ ID NO: 4056180 - RNA, 16 nt, Vaccinia virus
aauaaaugcuugauau

SEQ ID NO: 4056181 - RNA, 20 nt, Vaccinia virus
aauaaauguccacuauacau

SEQ ID NO: 4056182 - RNA, 17 nt, Vaccinia virus
aauaaauuuuuccaaga

SEQ ID NO: 4056183 - RNA, 17 nt, Vaccinia virus
aauaacauaggauuaaa

SEQ ID NO: 4056184 - RNA, 19 nt, Vaccinia virus
aauaacauaggauuaaaaa

SEQ ID NO: 4056185 - RNA, 15 nt, Vaccinia virus
aauaacaucagaaaa

SEQ ID NO: 4056186 - RNA, 18 nt, Vaccinia virus
aauaacauuuauuaucau

SEQ ID NO: 4056187 - RNA, 23 nt, Vaccinia virus
aauaaccguuagacauaaaauug

SEQ ID NO: 4056188 - RNA, 19 nt, Vaccinia virus
aauaacuacaguuugaaaa

SEQ ID NO: 4056189 - RNA, 21 nt, Vaccinia virus
aauaacuagcuuaaacagaug

SEQ ID NO: 4056190 - RNA, 23 nt, Vaccinia virus
aauaacucauuuauauauuaaaa

SEQ ID NO: 4056191 - RNA, 23 nt, Vaccinia virus
aauaacucucgugcuucagaaaa

SEQ ID NO: 4056192 - RNA, 23 nt, Vaccinia virus
aauaagaacuauaaaaaaaauaa

SEQ ID NO: 4056193 - RNA, 21 nt, Vaccinia virus
aauuuccccauugauagaaaa

SEQ ID NO: 4056194 - RNA, 23 nt, Vaccinia virus
aauuucuaaaggagcaaauguua

SEQ ID NO: 4056195 - RNA, 20 nt, Vaccinia virus
aauuucuuagucauagacaa

SEQ ID NO: 4056196 - RNA, 17 nt, Vaccinia virus
aauuucuuuauucucua

SEQ ID NO: 4056197 - RNA, 12 nt, Vaccinia virus
aauuugaauauc

SEQ ID NO: 4056198 - RNA, 19 nt, Vaccinia virus
aauuugauccauguucaua

SEQ ID NO: 4056199 - RNA, 16 nt, Vaccinia virus
aauuuguucaaaauaa

SEQ ID NO: 4056200 - RNA, 21 nt, Vaccinia virus
aauuuuauucuagaauugaua

SEQ ID NO: 4056201 - RNA, 20 nt, Vaccinia virus
aauuuuuaacgauuuacugu

SEQ ID NO: 4056202 - RNA, 20 nt, Vaccinia virus
aauuuuuauuaaugauacaa

SEQ ID NO: 4056203 - RNA, 14 nt, Vaccinia virus
aauuuuuauuucuc

SEQ ID NO: 4056204 - RNA, 12 nt, Vaccinia virus
aauuuuucuuaa

SEQ ID NO: 4056205 - RNA, 14 nt, Vaccinia virus
aauuuuuuuuauga

SEQ ID NO: 4056206 - RNA, 17 nt, Vaccinia virus
aauuuuuuuucuagaua

SEQ ID NO: 4056207 - RNA, 15 nt, Vaccinia virus
acaaaaaagaacuaa

SEQ ID NO: 4056208 - RNA, 15 nt, Vaccinia virus
acaaaagcaauuauu

SEQ ID NO: 4056209 - RNA, 12 nt, Vaccinia virus
acaaaagguauu

SEQ ID NO: 4056210 - RNA, 16 nt, Vaccinia virus
acaaaauacuauauau

SEQ ID NO: 4056211 - RNA, 15 nt, Vaccinia virus
acaaaaucaaauaau

SEQ ID NO: 4056212 - RNA, 22 nt, Vaccinia virus
acaaaauccaaacauuacaaau

SEQ ID NO: 4056213 - RNA, 17 nt, Vaccinia virus
acaaaaucuagacucua

SEQ ID NO: 4056214 - RNA, 17 nt, Vaccinia virus
acaaacaacuaggaaau

SEQ ID NO: 4056215 - RNA, 22 nt, Vaccinia virus
acaaacauuuuuguugguguaa

SEQ ID NO: 4056216 - RNA, 16 nt, Vaccinia virus
acaaacuauagaaauu

SEQ ID NO: 4056217 - RNA, 17 nt, Vaccinia virus
acaaacuguaaguaugu

SEQ ID NO: 4056218 - RNA, 19 nt, Vaccinia virus
acaaacuuuuccuuuucca

SEQ ID NO: 4056219 - RNA, 17 nt, Vaccinia virus
acaaagauggcugaaau

SEQ ID NO: 4056220 - RNA, 16 nt, Vaccinia virus
acaaagcacucaauaa

SEQ ID NO: 4056221 - RNA, 17 nt, Vaccinia virus
acaaauauacuuuauca

SEQ ID NO: 4056222 - RNA, 23 nt, Vaccinia virus
acaaauauuuaacucaugaugaa

SEQ ID NO: 4056223 - RNA, 15 nt, Vaccinia virus
acaaaucuauaacau

SEQ ID NO: 4056224 - RNA, 19 nt, Vaccinia virus
acaaaugcgccaaaguuau

SEQ ID NO: 4056225 - RNA, 18 nt, Vaccinia virus
acaaauggauguuaaugu

SEQ ID NO: 4056226 - RNA, 18 nt, Vaccinia virus
acaacacgggauaaauua

SEQ ID NO: 4056227 - RNA, 16 nt, Vaccinia virus
acaaccgcuacauaau

SEQ ID NO: 4056228 - RNA, 22 nt, Vaccinia virus
acaacgucaucgcuucaucuau

SEQ ID NO: 4056229 - RNA, 14 nt, Vaccinia virus
acaacuaaacagua

SEQ ID NO: 4056230 - RNA, 23 nt, Vaccinia virus
acaagacauuuuuuguccuauau

SEQ ID NO: 4056231 - RNA, 17 nt, Vaccinia virus
acaagagauagaggagg

SEQ ID NO: 4056232 - RNA, 22 nt, Vaccinia virus
acaagaguggaaacucacauau

SEQ ID NO: 4056233 - RNA, 15 nt, Vaccinia virus
acaagaucuuuguuu

SEQ ID NO: 4056234 - RNA, 20 nt, Vaccinia virus
acaagauuuccaaucuuuga

SEQ ID NO: 4056235 - RNA, 13 nt, Vaccinia virus
acaagucuaauaa

SEQ ID NO: 4056236 - RNA, 22 nt, Vaccinia virus
acaaguuauacgucauuucauc

SEQ ID NO: 4056237 - RNA, 15 nt, Vaccinia virus
acaaguuuucauauu

SEQ ID NO: 4056238 - RNA, 16 nt, Vaccinia virus
acaauaaaaaaaauug

SEQ ID NO: 4056239 - RNA, 14 nt, Vaccinia virus
acaauaaaaauagu

SEQ ID NO: 4056240 - RNA, 16 nt, Vaccinia virus
acaauaaugagaaugu

SEQ ID NO: 4056241 - RNA, 20 nt, Vaccinia virus
acaauaauucagauaaugua

SEQ ID NO: 4056242 - RNA, 18 nt, Vaccinia virus
acaauacgauaaacauug

SEQ ID NO: 4056243 - RNA, 20 nt, Vaccinia virus
acaauacugcgacuuuguua

SEQ ID NO: 4056244 - RNA, 21 nt, Vaccinia virus
acaauacugcgacuuuguuaa

SEQ ID NO: 4056245 - RNA, 18 nt, Vaccinia virus
acaauaucaguaucuucu

SEQ ID NO: 4056246 - RNA, 22 nt, Vaccinia virus
acaauaucauaaacaaacuaau

SEQ ID NO: 4056247 - RNA, 15 nt, Vaccinia virus
acaauauggaaaaac

SEQ ID NO: 4056248 - RNA, 23 nt, Vaccinia virus
acaauauuuaguuuauucauaau

SEQ ID NO: 4056249 - RNA, 12 nt, Vaccinia virus
acaauauuuccg

SEQ ID NO: 4056250 - RNA, 15 nt, Vaccinia virus
acaaucgauaauaua

SEQ ID NO: 4056251 - RNA, 18 nt, Vaccinia virus
acaaucugucgaaaaagu

SEQ ID NO: 4056252 - RNA, 19 nt, Vaccinia virus
acaaugaaccguaauauau

SEQ ID NO: 4056253 - RNA, 15 nt, Vaccinia virus
acaaugauaaugaua

SEQ ID NO: 4056254 - RNA, 19 nt, Vaccinia virus
acaauggccgucuauguau

SEQ ID NO: 4056255 - RNA, 18 nt, Vaccinia virus
acaauggucgauuauaga

SEQ ID NO: 4056256 - RNA, 23 nt, Vaccinia virus
acaauggucgauuauagaaaugc

SEQ ID NO: 4056257 - RNA, 15 nt, Vaccinia virus
acaauguauaauaua

SEQ ID NO: 4056258 - RNA, 18 nt, Vaccinia virus
acaauguuucuuacauau

SEQ ID NO: 4056259 - RNA, 20 nt, Vaccinia virus
acaauguuugucauauguau

SEQ ID NO: 4056260 - RNA, 13 nt, Vaccinia virus
acaauuacaaaug

SEQ ID NO: 4056261 - RNA, 19 nt, Vaccinia virus
acaauuaucauuuugauua

SEQ ID NO: 4056262 - RNA, 16 nt, Vaccinia virus
acaauugucuguaaac

SEQ ID NO: 4056263 - RNA, 16 nt, Vaccinia virus
acaauuucuauuuccu

SEQ ID NO: 4056264 - RNA, 17 nt, Vaccinia virus
acaauuuguauuaucca

SEQ ID NO: 4056265 - RNA, 22 nt, Vaccinia virus
acaauuuguauuuuuuaaucua

SEQ ID NO: 4056266 - RNA, 14 nt, Vaccinia virus
acaauuuuguauua

SEQ ID NO: 4056267 - RNA, 19 nt, Vaccinia virus
acaauuuuugccuugaauu

SEQ ID NO: 4056268 - RNA, 19 nt, Vaccinia virus
acaauuuuuuuauaauaau

SEQ ID NO: 4056269 - RNA, 16 nt, Vaccinia virus
acacaaccagcaauaa

SEQ ID NO: 4056270 - RNA, 12 nt, Vaccinia virus
acacaagaucug

SEQ ID NO: 4056271 - RNA, 21 nt, Vaccinia virus
acacacuuaccuucaacagua

SEQ ID NO: 4056272 - RNA, 13 nt, Vaccinia virus
acacauauccacg

SEQ ID NO: 4056273 - RNA, 12 nt, Vaccinia virus
acacaugaugaa

SEQ ID NO: 4056274 - RNA, 16 nt, Vaccinia virus
acaccagcuuuuauca

SEQ ID NO: 4056275 - RNA, 16 nt, Vaccinia virus
acaccgccucuagaua

SEQ ID NO: 4056276 - RNA, 15 nt, Vaccinia virus
acaccuauaagauua

SEQ ID NO: 4056277 - RNA, 21 nt, Vaccinia virus
acacgaaagaaucaaaagaau

SEQ ID NO: 4056278 - RNA, 18 nt, Vaccinia virus
acacgggauaaauuauuu

SEQ ID NO: 4056279 - RNA, 17 nt, Vaccinia virus
acacuaauauuaugaug

SEQ ID NO: 4056280 - RNA, 16 nt, Vaccinia virus
acacuacugaaaaaag

SEQ ID NO: 4056281 - RNA, 12 nt, Vaccinia virus
acacuauugaac

SEQ ID NO: 4056282 - RNA, 23 nt, Vaccinia virus
acacuccguuuaauaaacugagu

SEQ ID NO: 4056283 - RNA, 18 nt, Vaccinia virus
acacugcgaucugaauaa

SEQ ID NO: 4056284 - RNA, 16 nt, Vaccinia virus
acacugguaacuauau

SEQ ID NO: 4056285 - RNA, 23 nt, Vaccinia virus
acacuguucacauccuuccaaga

SEQ ID NO: 4056286 - RNA, 22 nt, Vaccinia virus
acacuucuauaguaucuauaua

SEQ ID NO: 4056287 - RNA, 15 nt, Vaccinia virus
acagaaacuguaaag

SEQ ID NO: 4056288 - RNA, 17 nt, Vaccinia virus
acagaaauauaugagau

SEQ ID NO: 4056289 - RNA, 19 nt, Vaccinia virus
acagaaauauaugagaugu

SEQ ID NO: 4056290 - RNA, 22 nt, Vaccinia virus
acagaauaaacaaaauaaugua

SEQ ID NO: 4056291 - RNA, 17 nt, Vaccinia virus
acagaauauaaauuaua

SEQ ID NO: 4056292 - RNA, 13 nt, Vaccinia virus
acagauaaugaua

SEQ ID NO: 4056293 - RNA, 18 nt, Vaccinia virus
acagaucuaguauaauua

SEQ ID NO: 4056294 - RNA, 13 nt, Vaccinia virus
acagaugauauau

SEQ ID NO: 4056295 - RNA, 18 nt, Vaccinia virus
acagauggauuaaaucgu

SEQ ID NO: 4056296 - RNA, 15 nt, Vaccinia virus
acagauguaaauaua

SEQ ID NO: 4056297 - RNA, 21 nt, Vaccinia virus
acagauguaaauauauuuaca

SEQ ID NO: 4056298 - RNA, 15 nt, Vaccinia virus
acaggaaagaaguau

SEQ ID NO: 4056299 - RNA, 20 nt, Vaccinia virus
acaggcgaugguaaaaagac

SEQ ID NO: 4056300 - RNA, 15 nt, Vaccinia virus
acagguucucaauau

SEQ ID NO: 4056301 - RNA, 20 nt, Vaccinia virus
acagguuuaaacuaauacua

SEQ ID NO: 4056302 - RNA, 19 nt, Vaccinia virus
acaguaauguccaaaucua

SEQ ID NO: 4056303 - RNA, 20 nt, Vaccinia virus
acaguuaacgaaagcaaaga

SEQ ID NO: 4056304 - RNA, 13 nt, Vaccinia virus
acaguuugaaaaa

SEQ ID NO: 4056305 - RNA, 12 nt, Vaccinia virus
acaguuuuacua

SEQ ID NO: 4056306 - RNA, 13 nt, Vaccinia virus
acauaaacaaauu

SEQ ID NO: 4056307 - RNA, 21 nt, Vaccinia virus
acauaaacggcuuuuaaacag

SEQ ID NO: 4056308 - RNA, 15 nt, Vaccinia virus
acauaaauaugcaaa

SEQ ID NO: 4056309 - RNA, 21 nt, Vaccinia virus
acauaacuacguaucucaaua

SEQ ID NO: 4056310 - RNA, 14 nt, Vaccinia virus
acauaaguauaaag

SEQ ID NO: 4056311 - RNA, 20 nt, Vaccinia virus
acauaaguauauaauaaaua

SEQ ID NO: 4056312 - RNA, 21 nt, Vaccinia virus
acauaauccagcuagugaaua

SEQ ID NO: 4056313 - RNA, 22 nt, Vaccinia virus
acauaaucguagauucauguua

SEQ ID NO: 4056314 - RNA, 17 nt, Vaccinia virus
acauaauuauucuauca

SEQ ID NO: 4056315 - RNA, 16 nt, Vaccinia virus
acauaccguuagauaa

SEQ ID NO: 4056316 - RNA, 22 nt, Vaccinia virus
acauaguuugggaaaagaaauc

SEQ ID NO: 4056317 - RNA, 13 nt, Vaccinia virus
acauauaaaugua

SEQ ID NO: 4056318 - RNA, 13 nt, Vaccinia virus
acauauaaauguc

SEQ ID NO: 4056319 - RNA, 23 nt, Vaccinia virus
acauauagaugcagaaguaauga

SEQ ID NO: 4056320 - RNA, 17 nt, Vaccinia virus
acauaucgguguuucca

SEQ ID NO: 4056321 - RNA, 17 nt, Vaccinia virus
acauaucuaaaugaaua

SEQ ID NO: 4056322 - RNA, 16 nt, Vaccinia virus
acauaucuaacaaugg

SEQ ID NO: 4056323 - RNA, 21 nt, Vaccinia virus
acauaugaaccuucuacauau

SEQ ID NO: 4056324 - RNA, 22 nt, Vaccinia virus
acauaugcaucuauauaaucuu

SEQ ID NO: 4056325 - RNA, 15 nt, Vaccinia virus
acauauuauacagua

SEQ ID NO: 4056326 - RNA, 16 nt, Vaccinia virus
acauauucuaugaauu

SEQ ID NO: 4056327 - RNA, 15 nt, Vaccinia virus
acauauuuauauaau

SEQ ID NO: 4056328 - RNA, 22 nt, Vaccinia virus
acauauuuuagaacagaaauac

SEQ ID NO: 4056329 - RNA, 14 nt, Vaccinia virus
acaucaaaaaauua

SEQ ID NO: 4056330 - RNA, 16 nt, Vaccinia virus
acaucacgcucgauaa

SEQ ID NO: 4056331 - RNA, 18 nt, Vaccinia virus
acaucaugaaaugaugau

SEQ ID NO: 4056332 - RNA, 17 nt, Vaccinia virus
acaucccgguuaaacau

SEQ ID NO: 4056333 - RNA, 20 nt, Vaccinia virus
acauccgaaauacaaaaugu

SEQ ID NO: 4056334 - RNA, 21 nt, Vaccinia virus
acauccgccuuguauaugaug

SEQ ID NO: 4056335 - RNA, 14 nt, Vaccinia virus
acaucgacucauaa

SEQ ID NO: 4056336 - RNA, 14 nt, Vaccinia virus
acaucgucuagauc

SEQ ID NO: 4056337 - RNA, 23 nt, Vaccinia virus
acaucuaaaaaauccuuaaugau

SEQ ID NO: 4056338 - RNA, 14 nt, Vaccinia virus
acaucuaaaaaugu

SEQ ID NO: 4056339 - RNA, 18 nt, Vaccinia virus
acaucuaccuuauuuccc

SEQ ID NO: 4056340 - RNA, 20 nt, Vaccinia virus
acaucuacuuuaucuauuca

SEQ ID NO: 4056341 - RNA, 15 nt, Vaccinia virus
acaugauauucaugu

SEQ ID NO: 4056342 - RNA, 19 nt, Vaccinia virus
acaugcuccaauugaaugu

SEQ ID NO: 4056343 - RNA, 21 nt, Vaccinia virus
acauggaaauagguuuuguuc

SEQ ID NO: 4056344 - RNA, 18 nt, Vaccinia virus
acauggaauaaauuauua

SEQ ID NO: 4056345 - RNA, 13 nt, Vaccinia virus
acauuaaauguau

SEQ ID NO: 4056346 - RNA, 21 nt, Vaccinia virus
acauuaacucucucauuuucu

SEQ ID NO: 4056347 - RNA, 14 nt, Vaccinia virus
acauuaauagaaug

SEQ ID NO: 4056348 - RNA, 19 nt, Vaccinia virus
acauuagccggacaaauau

SEQ ID NO: 4056349 - RNA, 20 nt, Vaccinia virus
acauuagccggacaaauaua

SEQ ID NO: 4056350 - RNA, 20 nt, Vaccinia virus
acauuaucaaaaagaacgau

SEQ ID NO: 4056351 - RNA, 18 nt, Vaccinia virus
acauuaugagaauaugac

SEQ ID NO: 4056352 - RNA, 17 nt, Vaccinia virus
acauuauuaaucagaau

SEQ ID NO: 4056353 - RNA, 21 nt, Vaccinia virus
acauucuuaaccauauaucca

SEQ ID NO: 4056354 - RNA, 22 nt, Vaccinia virus
acauugaucuauuauuuaauga

SEQ ID NO: 4056355 - RNA, 23 nt, Vaccinia virus
acauuggcgccguuuaauuuccu

SEQ ID NO: 4056356 - RNA, 21 nt, Vaccinia virus
acauuguuacgucuccaauaa

SEQ ID NO: 4056357 - RNA, 23 nt, Vaccinia virus
acauuguuacgucuccaauaaau

SEQ ID NO: 4056358 - RNA, 17 nt, Vaccinia virus
acauuguuuauggugau

SEQ ID NO: 4056359 - RNA, 14 nt, Vaccinia virus
acauuuaugauaug

SEQ ID NO: 4056360 - RNA, 17 nt, Vaccinia virus
acauuuccgaaugaaug

SEQ ID NO: 4056361 - RNA, 16 nt, Vaccinia virus
acauuucucaaaugaa

SEQ ID NO: 4056362 - RNA, 14 nt, Vaccinia virus
acauuuuauuucua

SEQ ID NO: 4056363 - RNA, 21 nt, Vaccinia virus
acauuuucacaaauacuacaa

SEQ ID NO: 4056364 - RNA, 20 nt, Vaccinia virus
acauuuuccauuauuaauaa

SEQ ID NO: 4056365 - RNA, 14 nt, Vaccinia virus
acauuuuccauuua

SEQ ID NO: 4056366 - RNA, 17 nt, Vaccinia virus
accaaagacuuugaaau

SEQ ID NO: 4056367 - RNA, 18 nt, Vaccinia virus
accaauaaaaauaaacua

SEQ ID NO: 4056368 - RNA, 14 nt, Vaccinia virus
accaauaaacuauu

SEQ ID NO: 4056369 - RNA, 22 nt, Vaccinia virus
accaauaucgauuacuaugaau

SEQ ID NO: 4056370 - RNA, 23 nt, Vaccinia virus
accaauaucgauuacuaugaaua

SEQ ID NO: 4056371 - RNA, 19 nt, Vaccinia virus
accaauuguuuuuguacau

SEQ ID NO: 4056372 - RNA, 13 nt, Vaccinia virus
accacaacauuuc

SEQ ID NO: 4056373 - RNA, 12 nt, Vaccinia virus
accacaauaauc

SEQ ID NO: 4056374 - RNA, 13 nt, Vaccinia virus
accacuagcaaaa

SEQ ID NO: 4056375 - RNA, 18 nt, Vaccinia virus
accacucgaaaaaguaau

SEQ ID NO: 4056376 - RNA, 20 nt, Vaccinia virus
accagaagguguuguaacuu

SEQ ID NO: 4056377 - RNA, 16 nt, Vaccinia virus
accagccuacauuuug

SEQ ID NO: 4056378 - RNA, 14 nt, Vaccinia virus
accagcuccaugac

SEQ ID NO: 4056379 - RNA, 18 nt, Vaccinia virus
accaguaccagaucuuaa

SEQ ID NO: 4056380 - RNA, 22 nt, Vaccinia virus
accagucucgcguucaagauua

SEQ ID NO: 4056381 - RNA, 16 nt, Vaccinia virus
accaucuaucaaacaa

SEQ ID NO: 4056382 - RNA, 19 nt, Vaccinia virus
accaugaaauugagaagau

SEQ ID NO: 4056383 - RNA, 21 nt, Vaccinia virus
accaugaaauugagaagauca

SEQ ID NO: 4056384 - RNA, 14 nt, Vaccinia virus
accauuaaaaauug

SEQ ID NO: 4056385 - RNA, 16 nt, Vaccinia virus
accauuaauaggaaaa

SEQ ID NO: 4056386 - RNA, 16 nt, Vaccinia virus
accauuagauaaucua

SEQ ID NO: 4056387 - RNA, 24 nt, Vaccinia virus
accauuauucgccuguaucagaua

SEQ ID NO: 4056388 - RNA, 17 nt, Vaccinia virus
accauuuuaaaaucauu

SEQ ID NO: 4056389 - RNA, 23 nt, Vaccinia virus
accauuuuuuuuaaaaaaaauag

SEQ ID NO: 4056390 - RNA, 19 nt, Vaccinia virus
acccaaagagaccaaugaa

SEQ ID NO: 4056391 - RNA, 18 nt, Vaccinia virus
acccagaucucuuuuucu

SEQ ID NO: 4056392 - RNA, 15 nt, Vaccinia virus
acccaguuaguuuua

SEQ ID NO: 4056393 - RNA, 19 nt, Vaccinia virus
acccauuagguuaaaugau

SEQ ID NO: 4056394 - RNA, 21 nt, Vaccinia virus
accccauauaauguagacaug

SEQ ID NO: 4056395 - RNA, 14 nt, Vaccinia virus
acccgcaauuauua

SEQ ID NO: 4056396 - RNA, 17 nt, Vaccinia virus
acccuuccagauaaugu

SEQ ID NO: 4056397 - RNA, 21 nt, Vaccinia virus
accgacgauaauauaaacauc

SEQ ID NO: 4056398 - RNA, 21 nt, Vaccinia virus
accgaucaaagaauuaaugau

SEQ ID NO: 4056399 - RNA, 23 nt, Vaccinia virus
accggcuguggaguuauaugaau

SEQ ID NO: 4056400 - RNA, 15 nt, Vaccinia virus
accggucauauuaau

SEQ ID NO: 4056401 - RNA, 21 nt, Vaccinia virus
accguauccauaaacaauauu

SEQ ID NO: 4056402 - RNA, 21 nt, Vaccinia virus
accgucgaguuacuuaaaugc

SEQ ID NO: 4056403 - RNA, 16 nt, Vaccinia virus
accguuguuaaauacu

SEQ ID NO: 4056404 - RNA, 17 nt, Vaccinia virus
accuaagcaagaaagau

SEQ ID NO: 4056405 - RNA, 14 nt, Vaccinia virus
accuaagggauuuu

SEQ ID NO: 4056406 - RNA, 21 nt, Vaccinia virus
accuaaucccgcauuuauaca

SEQ ID NO: 4056407 - RNA, 22 nt, Vaccinia virus
accuaucaaggaacaaauauug

SEQ ID NO: 4056408 - RNA, 15 nt, Vaccinia virus
accuaugauaaagga

SEQ ID NO: 4056409 - RNA, 15 nt, Vaccinia virus
accuauuaauaauua

SEQ ID NO: 4056410 - RNA, 22 nt, Vaccinia virus
accucagacugguagagaauga

SEQ ID NO: 4056411 - RNA, 17 nt, Vaccinia virus
accucuaucaucuacau

SEQ ID NO: 4056412 - RNA, 16 nt, Vaccinia virus
accucuccaaaaagaa

SEQ ID NO: 4056413 - RNA, 22 nt, Vaccinia virus
accucuuauuggucagaaauau

SEQ ID NO: 4056414 - RNA, 23 nt, Vaccinia virus
accucuuauuggucagaaauauu

SEQ ID NO: 4056415 - RNA, 15 nt, Vaccinia virus
accugauuagaauuc

SEQ ID NO: 4056416 - RNA, 20 nt, Vaccinia virus
acgaaaguauagcuaaugau

SEQ ID NO: 4056417 - RNA, 14 nt, Vaccinia virus
acgaaauauuagaa

SEQ ID NO: 4056418 - RNA, 20 nt, Vaccinia virus
acgaaauugcaaaauaugcu

SEQ ID NO: 4056419 - RNA, 20 nt, Vaccinia virus
acgacacuggaaaaugcgau

SEQ ID NO: 4056420 - RNA, 19 nt, Vaccinia virus
acgacucuccauacgauga

SEQ ID NO: 4056421 - RNA, 22 nt, Vaccinia virus
acgagauuauuauuaacaaagu

SEQ ID NO: 4056422 - RNA, 19 nt, Vaccinia virus
acgauaaaagaugcauaua

SEQ ID NO: 4056423 - RNA, 19 nt, Vaccinia virus
acgauaccaucuucuggaa

SEQ ID NO: 4056424 - RNA, 17 nt, Vaccinia virus
acgauacuaugcauauu

SEQ ID NO: 4056425 - RNA, 21 nt, Vaccinia virus
acgauauuaucgacuaugaau

SEQ ID NO: 4056426 - RNA, 18 nt, Vaccinia virus
acgauauuuguuggauuc

SEQ ID NO: 4056427 - RNA, 21 nt, Vaccinia virus
acgaugauauuaaaauuauuu

SEQ ID NO: 4056428 - RNA, 19 nt, Vaccinia virus
acgauggcaagaaauggau

SEQ ID NO: 4056429 - RNA, 17 nt, Vaccinia virus
acgauuaccaauacuuu

SEQ ID NO: 4056430 - RNA, 15 nt, Vaccinia virus
acgauucaggaaucg

SEQ ID NO: 4056431 - RNA, 18 nt, Vaccinia virus
acgauuucugaauuauuu

SEQ ID NO: 4056432 - RNA, 22 nt, Vaccinia virus
acgcaauagucagacuguaguu

SEQ ID NO: 4056433 - RNA, 23 nt, Vaccinia virus
acgcacuagagaguuuaucagaa

SEQ ID NO: 4056434 - RNA, 14 nt, Vaccinia virus
acgcauaauuauua

SEQ ID NO: 4056435 - RNA, 17 nt, Vaccinia virus
acgccaauacauguuuu

SEQ ID NO: 4056436 - RNA, 16 nt, Vaccinia virus
acgccgaucucugaau

SEQ ID NO: 4056437 - RNA, 15 nt, Vaccinia virus
acgccgucuuuaucu

SEQ ID NO: 4056438 - RNA, 13 nt, Vaccinia virus
acgcgucuguuuu

SEQ ID NO: 4056439 - RNA, 21 nt, Vaccinia virus
acgcguuuuaugaaugaugau

SEQ ID NO: 4056440 - RNA, 22 nt, Vaccinia virus
caugauccuauucuaaauggau

SEQ ID NO: 4056441 - RNA, 19 nt, Vaccinia virus
caugauggucauguuuauu

SEQ ID NO: 4056442 - RNA, 19 nt, Vaccinia virus
caugauucacguuauauaa

SEQ ID NO: 4056443 - RNA, 17 nt, Vaccinia virus
caugauuccguauucug

SEQ ID NO: 4056444 - RNA, 20 nt, Vaccinia virus
caugcaaagcucuaaaucca

SEQ ID NO: 4056445 - RNA, 18 nt, Vaccinia virus
caugcucuauuuugucau

SEQ ID NO: 4056446 - RNA, 21 nt, Vaccinia virus
cauggaaaagauaaaguuuua

SEQ ID NO: 4056447 - RNA, 15 nt, Vaccinia virus
cauggacauacuaau

SEQ ID NO: 4056448 - RNA, 15 nt, Vaccinia virus
caugggacuauauaa

SEQ ID NO: 4056449 - RNA, 15 nt, Vaccinia virus
cauggucuagaugua

SEQ ID NO: 4056450 - RNA, 14 nt, Vaccinia virus
cauggugauacuug

SEQ ID NO: 4056451 - RNA, 20 nt, Vaccinia virus
cauguaacacucgacacaau

SEQ ID NO: 4056452 - RNA, 13 nt, Vaccinia virus
cauguauccacuu

SEQ ID NO: 4056453 - RNA, 15 nt, Vaccinia virus
caugucaacaaaaau

SEQ ID NO: 4056454 - RNA, 20 nt, Vaccinia virus
caugugaauauaauaauaca

SEQ ID NO: 4056455 - RNA, 16 nt, Vaccinia virus
cauguucgaaaaagug

SEQ ID NO: 4056456 - RNA, 14 nt, Vaccinia virus
cauuaaauguauuu

SEQ ID NO: 4056457 - RNA, 22 nt, Vaccinia virus
cauuaacgauaucuugcaaaau

SEQ ID NO: 4056458 - RNA, 23 nt, Vaccinia virus
cauuaaguucacuagaauaucca

SEQ ID NO: 4056459 - RNA, 15 nt, Vaccinia virus
cauuaauacaguaag

SEQ ID NO: 4056460 - RNA, 16 nt, Vaccinia virus
cauuaauggcaauaac

SEQ ID NO: 4056461 - RNA, 18 nt, Vaccinia virus
cauuacaaagaagaacug

SEQ ID NO: 4056462 - RNA, 17 nt, Vaccinia virus
cauuacuaauacucaau

SEQ ID NO: 4056463 - RNA, 23 nt, Vaccinia virus
cauuaguuaaugaaaauaacucu

SEQ ID NO: 4056464 - RNA, 17 nt, Vaccinia virus
cauuaucuauaucaucu

SEQ ID NO: 4056465 - RNA, 14 nt, Vaccinia virus
cauuaucuuuguuu

SEQ ID NO: 4056466 - RNA, 18 nt, Vaccinia virus
cauuauucuauuucgaau

SEQ ID NO: 4056467 - RNA, 18 nt, Vaccinia virus
cauuauuuuuauauuuuc

SEQ ID NO: 4056468 - RNA, 17 nt, Vaccinia virus
cauucaaccauucauaa

SEQ ID NO: 4056469 - RNA, 13 nt, Vaccinia virus
cauucacaaaaag

SEQ ID NO: 4056470 - RNA, 20 nt, Vaccinia virus
cauuccaagucacugugugu

SEQ ID NO: 4056471 - RNA, 19 nt, Vaccinia virus
cauucuaauauauguauuu

SEQ ID NO: 4056472 - RNA, 20 nt, Vaccinia virus
cauucuacguccuauggaug

SEQ ID NO: 4056473 - RNA, 23 nt, Vaccinia virus
cauucuauuaaugucuacucuau

SEQ ID NO: 4056474 - RNA, 17 nt, Vaccinia virus
cauucuucccauggaug

SEQ ID NO: 4056475 - RNA, 22 nt, Vaccinia virus
cauucuucggauccaaaugcug

SEQ ID NO: 4056476 - RNA, 21 nt, Vaccinia virus
cauugauaaagaaguuauaga

SEQ ID NO: 4056477 - RNA, 17 nt, Vaccinia virus
cauugauaucuuuagau

SEQ ID NO: 4056478 - RNA, 20 nt, Vaccinia virus
cauugauugccauaauaauu

SEQ ID NO: 4056479 - RNA, 13 nt, Vaccinia virus
cauuguaaagccc

SEQ ID NO: 4056480 - RNA, 22 nt, Vaccinia virus
cauuguccagauugaacauaca

SEQ ID NO: 4056481 - RNA, 14 nt, Vaccinia virus
cauugucuuauaga

SEQ ID NO: 4056482 - RNA, 15 nt, Vaccinia virus
cauuguuauguauuu

SEQ ID NO: 4056483 - RNA, 16 nt, Vaccinia virus
cauuguuuguauucuc

SEQ ID NO: 4056484 - RNA, 14 nt, Vaccinia virus
cauuuaaaugaauc

SEQ ID NO: 4056485 - RNA, 14 nt, Vaccinia virus
cauuuauacacaau

SEQ ID NO: 4056486 - RNA, 14 nt, Vaccinia virus
cauuuauaucauuu

SEQ ID NO: 4056487 - RNA, 18 nt, Vaccinia virus
cauuuauaucauuuguuu

SEQ ID NO: 4056488 - RNA, 17 nt, Vaccinia virus
cauuuauaucuuuagcu

SEQ ID NO: 4056489 - RNA, 16 nt, Vaccinia virus
cauuuaucacaaaaaa

SEQ ID NO: 4056490 - RNA, 21 nt, Vaccinia virus
cauuuaucacaaaaaaaacuu

SEQ ID NO: 4056491 - RNA, 22 nt, Vaccinia virus
cauuuauuggagacguaacaau

SEQ ID NO: 4056492 - RNA, 21 nt, Vaccinia virus
cauuuccaaaucuaacuucua

SEQ ID NO: 4056493 - RNA, 14 nt, Vaccinia virus
cauuuccuacauau

SEQ ID NO: 4056494 - RNA, 23 nt, Vaccinia virus
cauuucuaauacaugacaauaaa

SEQ ID NO: 4056495 - RNA, 10 nt, Vaccinia virus
cauuugagaa

SEQ ID NO: 4056496 - RNA, 18 nt, Vaccinia virus
cauuuggucuauacaaau

SEQ ID NO: 4056497 - RNA, 13 nt, Vaccinia virus
cauuuuacauuau

SEQ ID NO: 4056498 - RNA, 19 nt, Vaccinia virus
cauuuuauaaauauauaau

SEQ ID NO: 4056499 - RNA, 16 nt, Vaccinia virus
cauuuuauuguggaau

SEQ ID NO: 4056500 - RNA, 13 nt, Vaccinia virus
cauuuuauuucua

SEQ ID NO: 4056501 - RNA, 17 nt, Vaccinia virus
cauuuucacaaauacua

SEQ ID NO: 4056502 - RNA, 20 nt, Vaccinia virus
cauuuucccaaauaucuuua

SEQ ID NO: 4056503 - RNA, 19 nt, Vaccinia virus
cauuuucucuuucucucuu

SEQ ID NO: 4056504 - RNA, 17 nt, Vaccinia virus
cauuuuuuaaguauuug

SEQ ID NO: 4056505 - RNA, 12 nt, Vaccinia virus
ccaaaaaaauuc

SEQ ID NO: 4056506 - RNA, 23 nt, Vaccinia virus
ccaaaaaguguuuggcaauaaag

SEQ ID NO: 4056507 - RNA, 15 nt, Vaccinia virus
ccaaaaauauccaua

SEQ ID NO: 4056508 - RNA, 23 nt, Vaccinia virus
ccaaaaauuuuuaaaguauaucu

SEQ ID NO: 4056509 - RNA, 12 nt, Vaccinia virus
ccaaaacaaaau

SEQ ID NO: 4056510 - RNA, 11 nt, Vaccinia virus
ccaaaaugaau

SEQ ID NO: 4056511 - RNA, 21 nt, Vaccinia virus
ccaaacucagaaccaaaugau

SEQ ID NO: 4056512 - RNA, 15 nt, Vaccinia virus
ccaaaggauguuuaa

SEQ ID NO: 4056513 - RNA, 19 nt, Vaccinia virus
ccaaaugcugucugcgaaa

SEQ ID NO: 4056514 - RNA, 14 nt, Vaccinia virus
ccaacaauuguuua

SEQ ID NO: 4056515 - RNA, 22 nt, Vaccinia virus
ccaaccgaauggaguaaaauaa

SEQ ID NO: 4056516 - RNA, 21 nt, Vaccinia virus
ccaacggcggacguaguucua

SEQ ID NO: 4056517 - RNA, 16 nt, Vaccinia virus
ccaacucuuuaauaaa

SEQ ID NO: 4056518 - RNA, 20 nt, Vaccinia virus
ccaagaaaauagaaauucgu

SEQ ID NO: 4056519 - RNA, 14 nt, Vaccinia virus
ccaagauaucuaua

SEQ ID NO: 4056520 - RNA, 21 nt, Vaccinia virus
ccaagucauaucuagaaugaa

SEQ ID NO: 4056521 - RNA, 15 nt, Vaccinia virus
ccaaguuaaauuuua

SEQ ID NO: 4056522 - RNA, 15 nt, Vaccinia virus
ccaauacauguuuua

SEQ ID NO: 4056523 - RNA, 17 nt, Vaccinia virus
ccaaucuaagaaauuua

SEQ ID NO: 4056524 - RNA, 14 nt, Vaccinia virus
ccaaugaaauggua

SEQ ID NO: 4056525 - RNA, 15 nt, Vaccinia virus
ccaaugcuucucugu

SEQ ID NO: 4056526 - RNA, 14 nt, Vaccinia virus
ccaauuguuugaua

SEQ ID NO: 4056527 - RNA, 14 nt, Vaccinia virus
ccacaauacgcaug

SEQ ID NO: 4056528 - RNA, 18 nt, Vaccinia virus
ccacaauuagguauuuua

SEQ ID NO: 4056529 - RNA, 16 nt, Vaccinia virus
ccacguuuaaacauuc

SEQ ID NO: 4056530 - RNA, 17 nt, Vaccinia virus
ccacugaugagauguua

SEQ ID NO: 4056531 - RNA, 16 nt, Vaccinia virus
ccacuuugguaaaauc

SEQ ID NO: 4056532 - RNA, 15 nt, Vaccinia virus
ccagaacuauuuuua

SEQ ID NO: 4056533 - RNA, 19 nt, Vaccinia virus
ccagaguguucgaaugcca

SEQ ID NO: 4056534 - RNA, 22 nt, Vaccinia virus
ccagauggaguggaagacacug

SEQ ID NO: 4056535 - RNA, 17 nt, Vaccinia virus
ccagcguguccccagga

SEQ ID NO: 4056536 - RNA, 22 nt, Vaccinia virus
ccaguaaaugacgcguuuccua

SEQ ID NO: 4056537 - RNA, 12 nt, Vaccinia virus
ccaguauucucg

SEQ ID NO: 4056538 - RNA, 14 nt, Vaccinia virus
ccagugcauuucua

SEQ ID NO: 4056539 - RNA, 19 nt, Vaccinia virus
ccauagcuaucaagucuuu

SEQ ID NO: 4056540 - RNA, 17 nt, Vaccinia virus
ccauauauccaauaaag

SEQ ID NO: 4056541 - RNA, 20 nt, Vaccinia virus
ccaucagaauguuucccuga

SEQ ID NO: 4056542 - RNA, 15 nt, Vaccinia virus
ccaucauccaagaaa

SEQ ID NO: 4056543 - RNA, 14 nt, Vaccinia virus
ccaucauuucucaa

SEQ ID NO: 4056544 - RNA, 19 nt, Vaccinia virus
ccaucuaauaaauaucaua

SEQ ID NO: 4056545 - RNA, 15 nt, Vaccinia virus
ccaugaaagaaagaa

SEQ ID NO: 4056546 - RNA, 18 nt, Vaccinia virus
ccaugauggucauguuua

SEQ ID NO: 4056547 - RNA, 22 nt, Vaccinia virus
ccaugucugaaacgagacgcua

SEQ ID NO: 4056548 - RNA, 12 nt, Vaccinia virus
ccauuuaaauau

SEQ ID NO: 4056549 - RNA, 22 nt, Vaccinia virus
ccauuuaucauggaaaagaauu

SEQ ID NO: 4056550 - RNA, 16 nt, Vaccinia virus
ccauuuuaaaaucauu

SEQ ID NO: 4056551 - RNA, 14 nt, Vaccinia virus
cccaagauuucauc

SEQ ID NO: 4056552 - RNA, 20 nt, Vaccinia virus
cccaaucuuguuauaaacac

SEQ ID NO: 4056553 - RNA, 20 nt, Vaccinia virus
ccgaauuuguuuuguuuauu

SEQ ID NO: 4056554 - RNA, 19 nt, Vaccinia virus
ccgauaaacuccaauaaaa

SEQ ID NO: 4056555 - RNA, 20 nt, Vaccinia virus
ccgauauagauauuaaacaa

SEQ ID NO: 4056556 - RNA, 14 nt, Vaccinia virus
ccgaucaacaaaag

SEQ ID NO: 4056557 - RNA, 22 nt, Vaccinia virus
ccgccuuaaauguaucuuuacu

SEQ ID NO: 4056558 - RNA, 19 nt, Vaccinia virus
ccguacaacauacuguuua

SEQ ID NO: 4056559 - RNA, 19 nt, Vaccinia virus
ccgucaagagaguuaucug

SEQ ID NO: 4056560 - RNA, 15 nt, Vaccinia virus
ccgucacauacacua

SEQ ID NO: 4056561 - RNA, 16 nt, Vaccinia virus
ccuaaagccguaauug

SEQ ID NO: 4056562 - RNA, 14 nt, Vaccinia virus
ccuaaagguaaaug

SEQ ID NO: 4056563 - RNA, 14 nt, Vaccinia virus
ccuaaauuuuguug

SEQ ID NO: 4056564 - RNA, 20 nt, Vaccinia virus
uaaauguaucgugucucauu

SEQ ID NO: 4056565 - RNA, 23 nt, Vaccinia virus
uaaauguauuuuuuaugauauac

SEQ ID NO: 4056566 - RNA, 18 nt, Vaccinia virus
uaaauguccacuauacau

SEQ ID NO: 4056567 - RNA, 20 nt, Vaccinia virus
uaaauguggcuacaaacuuu

SEQ ID NO: 4056568 - RNA, 22 nt, Vaccinia virus
uaaauguuuugauuucaauuua

SEQ ID NO: 4056569 - RNA, 11 nt, Vaccinia virus
uaaauuagaag

SEQ ID NO: 4056570 - RNA, 20 nt, Vaccinia virus
uaaauuauuuaauaaaguau

SEQ ID NO: 4056571 - RNA, 15 nt, Vaccinia virus
uaaauuuauaauguu

SEQ ID NO: 4056572 - RNA, 13 nt, Vaccinia virus
uaaauuuauucuc

SEQ ID NO: 4056573 - RNA, 16 nt, Vaccinia virus
uaaauuuuacaaaucu

SEQ ID NO: 4056574 - RNA, 17 nt, Vaccinia virus
uaacaaaaauuaugaaa

SEQ ID NO: 4056575 - RNA, 18 nt, Vaccinia virus
uaacaaaaauuaugaaau

SEQ ID NO: 4056576 - RNA, 19 nt, Vaccinia virus
uaacaaaauccaaacauua

SEQ ID NO: 4056577 - RNA, 20 nt, Vaccinia virus
uaacaaagauauuaccaguu

SEQ ID NO: 4056578 - RNA, 16 nt, Vaccinia virus
uaacaacgacuuauaa

SEQ ID NO: 4056579 - RNA, 13 nt, Vaccinia virus
uaacaacuuauac

SEQ ID NO: 4056580 - RNA, 17 nt, Vaccinia virus
uaacaauaucaauaaau

SEQ ID NO: 4056581 - RNA, 15 nt, Vaccinia virus
uaacaauuucuauaa

SEQ ID NO: 4056582 - RNA, 12 nt, Vaccinia virus
uaacacaaccaa

SEQ ID NO: 4056583 - RNA, 20 nt, Vaccinia virus
uaacacuacucacaauagaa

SEQ ID NO: 4056584 - RNA, 23 nt, Vaccinia virus
uaacagccuguucaaauuuauau

SEQ ID NO: 4056585 - RNA, 15 nt, Vaccinia virus
uaacagcuuccguaa

SEQ ID NO: 4056586 - RNA, 16 nt, Vaccinia virus
uaacaguaacuuguau

SEQ ID NO: 4056587 - RNA, 16 nt, Vaccinia virus
uaacaguauuauuaau

SEQ ID NO: 4056588 - RNA, 19 nt, Vaccinia virus
uaacaguccgguucuuaau

SEQ ID NO: 4056589 - RNA, 15 nt, Vaccinia virus
uaacagucgaacaau

SEQ ID NO: 4056590 - RNA, 17 nt, Vaccinia virus
uaacauaaaaacucauu

SEQ ID NO: 4056591 - RNA, 18 nt, Vaccinia virus
uaacauaaaaauaucauu

SEQ ID NO: 4056592 - RNA, 18 nt, Vaccinia virus
uaacaucagaaaauguaa

SEQ ID NO: 4056593 - RNA, 16 nt, Vaccinia virus
uaacaucuugauuaau

SEQ ID NO: 4056594 - RNA, 20 nt, Vaccinia virus
uaacaucuuuguaaacagau

SEQ ID NO: 4056595 - RNA, 22 nt, Vaccinia virus
uaacaucuuuguaaacagauau

SEQ ID NO: 4056596 - RNA, 21 nt, Vaccinia virus
uaacaugacauuuauucauca

SEQ ID NO: 4056597 - RNA, 22 nt, Vaccinia virus
uaacaugacauuuauucaucau

SEQ ID NO: 4056598 - RNA, 23 nt, Vaccinia virus
uaacauuguuaauugaaaaggga

SEQ ID NO: 4056599 - RNA, 17 nt, Vaccinia virus
uaaccaccucucuggaa

SEQ ID NO: 4056600 - RNA, 18 nt, Vaccinia virus
uaacccauuauaaaacuu

SEQ ID NO: 4056601 - RNA, 16 nt, Vaccinia virus
uaacgaggaagaaauu

SEQ ID NO: 4056602 - RNA, 16 nt, Vaccinia virus
uaacgaugaaaaccag

SEQ ID NO: 4056603 - RNA, 14 nt, Vaccinia virus
uaacgcaacuauau

SEQ ID NO: 4056604 - RNA, 18 nt, Vaccinia virus
uaacgccgaucucugaau

SEQ ID NO: 4056605 - RNA, 22 nt, Vaccinia virus
uaacgccuauacuauguuauau

SEQ ID NO: 4056606 - RNA, 20 nt, Vaccinia virus
uaacguauucgauacauuuu

SEQ ID NO: 4056607 - RNA, 13 nt, Vaccinia virus
uaacgucauuaaa

SEQ ID NO: 4056608 - RNA, 16 nt, Vaccinia virus
uaacuauuuagcaaaa

SEQ ID NO: 4056609 - RNA, 18 nt, Vaccinia virus
uaacucaaagacaucaua

SEQ ID NO: 4056610 - RNA, 21 nt, Vaccinia virus
uaacucucucauuuucuuuaa

SEQ ID NO: 4056611 - RNA, 19 nt, Vaccinia virus
uaacucucuggaugcuaug

SEQ ID NO: 4056612 - RNA, 15 nt, Vaccinia virus
uaacuuggaaaagau

SEQ ID NO: 4056613 - RNA, 20 nt, Vaccinia virus
uaagaaauuuagcaacgaua

SEQ ID NO: 4056614 - RNA, 14 nt, Vaccinia virus
uaagaaugugauaa

SEQ ID NO: 4056615 - RNA, 18 nt, Vaccinia virus
uaagagacgggaaaauag

SEQ ID NO: 4056616 - RNA, 15 nt, Vaccinia virus
uaagauuaucaaaau

SEQ ID NO: 4056617 - RNA, 20 nt, Vaccinia virus
uaagauuaucaaaaucuugu

SEQ ID NO: 4056618 - RNA, 12 nt, Vaccinia virus
uaagcauugucu

SEQ ID NO: 4056619 - RNA, 15 nt, Vaccinia virus
uaagcuguucaaaau

SEQ ID NO: 4056620 - RNA, 18 nt, Vaccinia virus
uaaguacccuuauauuca

SEQ ID NO: 4056621 - RNA, 23 nt, Vaccinia virus
uaaguagagauucggguacugua

SEQ ID NO: 4056622 - RNA, 18 nt, Vaccinia virus
uaaguaguuuaucaacau

SEQ ID NO: 4056623 - RNA, 12 nt, Vaccinia virus
uaaguauccauu

SEQ ID NO: 4056624 - RNA, 17 nt, Vaccinia virus
uaaguaugaugucuaug

SEQ ID NO: 4056625 - RNA, 19 nt, Vaccinia virus
uaaguauucacaaacggga

SEQ ID NO: 4056626 - RNA, 22 nt, Vaccinia virus
uaaguauuuggcuagucaagau

SEQ ID NO: 4056627 - RNA, 14 nt, Vaccinia virus
uaagucuauuugaa

SEQ ID NO: 4056628 - RNA, 16 nt, Vaccinia virus
uaagucuguggaggau

SEQ ID NO: 4056629 - RNA, 22 nt, Vaccinia virus
uaaguguagcaaauaaaaucua

SEQ ID NO: 4056630 - RNA, 21 nt, Vaccinia virus
uaaguuacagcgacacgguau

SEQ ID NO: 4056631 - RNA, 13 nt, Vaccinia virus
uaaguucuuuaua

SEQ ID NO: 4056632 - RNA, 20 nt, Vaccinia virus
uaaguuuauaaauuccacaa

SEQ ID NO: 4056633 - RNA, 22 nt, Vaccinia virus
uaauaaacauuccacauucaga

SEQ ID NO: 4056634 - RNA, 13 nt, Vaccinia virus
uaauaaagacuuc

SEQ ID NO: 4056635 - RNA, 23 nt, Vaccinia virus
uaauaaaggugguaguauuguca

SEQ ID NO: 4056636 - RNA, 12 nt, Vaccinia virus
uaauaaauuaga

SEQ ID NO: 4056637 - RNA, 16 nt, Vaccinia virus
uaauaaauugguaaau

SEQ ID NO: 4056638 - RNA, 13 nt, Vaccinia virus
uaauaagaauaaa

SEQ ID NO: 4056639 - RNA, 14 nt, Vaccinia virus
uaauaagaauaaag

SEQ ID NO: 4056640 - RNA, 13 nt, Vaccinia virus
uaauaagauaaau

SEQ ID NO: 4056641 - RNA, 15 nt, Vaccinia virus
uaauaauaauucauc

SEQ ID NO: 4056642 - RNA, 19 nt, Vaccinia virus
uaauaaugauucaacaaug

SEQ ID NO: 4056643 - RNA, 14 nt, Vaccinia virus
uaauaauuauauca

SEQ ID NO: 4056644 - RNA, 12 nt, Vaccinia virus
uaauaauuguau

SEQ ID NO: 4056645 - RNA, 14 nt, Vaccinia virus
uaauacacacaaag

SEQ ID NO: 4056646 - RNA, 15 nt, Vaccinia virus
uaauacacacaaagu

SEQ ID NO: 4056647 - RNA, 20 nt, Vaccinia virus
uaauacagcaucuaacuuga

SEQ ID NO: 4056648 - RNA, 21 nt, Vaccinia virus
uaauagcaacauaugaagaac

SEQ ID NO: 4056649 - RNA, 23 nt, Vaccinia virus
uaauagcagaaagcuauaacuug

SEQ ID NO: 4056650 - RNA, 15 nt, Vaccinia virus
uaauagcaucucguu

SEQ ID NO: 4056651 - RNA, 15 nt, Vaccinia virus
uaauagcgucuacau

SEQ ID NO: 4056652 - RNA, 20 nt, Vaccinia virus
uaauagcguuaacuaucaaa

SEQ ID NO: 4056653 - RNA, 19 nt, Vaccinia virus
uaauagcuccauaaacuga

SEQ ID NO: 4056654 - RNA, 20 nt, Vaccinia virus
uaauagcuccauaaacugau

SEQ ID NO: 4056655 - RNA, 21 nt, Vaccinia virus
uaauagcuccccuguuuucau

SEQ ID NO: 4056656 - RNA, 22 nt, Vaccinia virus
uaauaggagcuagaagaacuuc

SEQ ID NO: 4056657 - RNA, 13 nt, Vaccinia virus
uaauaguaaauga

SEQ ID NO: 4056658 - RNA, 13 nt, Vaccinia virus
uaauaguaggaac

SEQ ID NO: 4056659 - RNA, 14 nt, Vaccinia virus
uaauaguauccauu

SEQ ID NO: 4056660 - RNA, 17 nt, Vaccinia virus
uaauaguguacuacaaa

SEQ ID NO: 4056661 - RNA, 22 nt, Vaccinia virus
uaauauaaaaaaacauuauucu

SEQ ID NO: 4056662 - RNA, 21 nt, Vaccinia virus
uaauauaaaagaauauguaua

SEQ ID NO: 4056663 - RNA, 14 nt, Vaccinia virus
uaauauaaacaucu

SEQ ID NO: 4056664 - RNA, 16 nt, Vaccinia virus
uaauauaaacaucuug

SEQ ID NO: 4056665 - RNA, 18 nt, Vaccinia virus
uaauauacaauuaucauu

SEQ ID NO: 4056666 - RNA, 22 nt, Vaccinia virus
uaauauagggcugacgucguau

SEQ ID NO: 4056667 - RNA, 16 nt, Vaccinia virus
uaauauauaaacucuu

SEQ ID NO: 4056668 - RNA, 15 nt, Vaccinia virus
uaauauaucaaacau

SEQ ID NO: 4056669 - RNA, 18 nt, Vaccinia virus
uaauauauugaucauaau

SEQ ID NO: 4056670 - RNA, 22 nt, Vaccinia virus
uaauaucaaacgguaacacauc

SEQ ID NO: 4056671 - RNA, 21 nt, Vaccinia virus
uaauaucagaccguacauaca

SEQ ID NO: 4056672 - RNA, 22 nt, Vaccinia virus
uaauaucagaccguacauacau

SEQ ID NO: 4056673 - RNA, 13 nt, Vaccinia virus
uaauaucauauag

SEQ ID NO: 4056674 - RNA, 17 nt, Vaccinia virus
uaauauccaaucuuauu

SEQ ID NO: 4056675 - RNA, 19 nt, Vaccinia virus
uaauaucuauauuuccagc

SEQ ID NO: 4056676 - RNA, 15 nt, Vaccinia virus
uaauaucuucuggaa

SEQ ID NO: 4056677 - RNA, 15 nt, Vaccinia virus
uaauauugauacaua

SEQ ID NO: 4056678 - RNA, 20 nt, Vaccinia virus
uaaucaaaauugucuaugau

SEQ ID NO: 4056679 - RNA, 22 nt, Vaccinia virus
uaaucaaauuugguguuguuaa

SEQ ID NO: 4056680 - RNA, 15 nt, Vaccinia virus
uaaucaaggauacac

SEQ ID NO: 4056681 - RNA, 17 nt, Vaccinia virus
uaaucagauucuuauau

SEQ ID NO: 4056682 - RNA, 23 nt, Vaccinia virus
uaaucauauaggcauugauuuuu

SEQ ID NO: 4056683 - RNA, 19 nt, Vaccinia virus
uaaucaugaaaucaaggau

SEQ ID NO: 4056684 - RNA, 16 nt, Vaccinia virus
uaaucauuguccagau

SEQ ID NO: 4056685 - RNA, 15 nt, Vaccinia virus
uaauccuaagaaaac

SEQ ID NO: 4056686 - RNA, 17 nt, Vaccinia virus
uaauccuaagaaaacuc

SEQ ID NO: 4056687 - RNA, 23 nt, Vaccinia virus
uaauccugaauauauugauuuuc

SEQ ID NO: 4056688 - RNA, 18 nt, Vaccinia virus
uaaucuaguagaaaagau

SEQ ID NO: 4056689 - RNA, 17 nt, Vaccinia virus
uaaucucuccagaguau

SEQ ID NO: 4056690 - RNA, 17 nt, Vaccinia virus
uaaucuuguaauauuca

SEQ ID NO: 4056691 - RNA, 15 nt, Vaccinia virus
uaaucuuuguuggau

SEQ ID NO: 4056692 - RNA, 13 nt, Vaccinia virus
uaaugauaaauuu

SEQ ID NO: 4056693 - RNA, 18 nt, Vaccinia virus
uaauggauauucugaaua

SEQ ID NO: 4056694 - RNA, 15 nt, Vaccinia virus
uaauggaucuucuag

SEQ ID NO: 4056695 - RNA, 20 nt, Vaccinia virus
uaaugggucguauugguauu

SEQ ID NO: 4056696 - RNA, 21 nt, Vaccinia virus
uaauguuauauguaacauuga

SEQ ID NO: 4056697 - RNA, 14 nt, Vaccinia virus
uaauuauauuuaca

SEQ ID NO: 4056698 - RNA, 17 nt, Vaccinia virus
uaauucagauacuacag

SEQ ID NO: 4056699 - RNA, 20 nt, Vaccinia virus
uaauucuuuauaacugaacu

SEQ ID NO: 4056700 - RNA, 16 nt, Vaccinia virus
uaauugaguaaaugaa

SEQ ID NO: 4056701 - RNA, 20 nt, Vaccinia virus
uaauuguuauuuuauucaua

SEQ ID NO: 4056702 - RNA, 20 nt, Vaccinia virus
uaauuucuguaaauucauga

SEQ ID NO: 4056703 - RNA, 22 nt, Vaccinia virus
uaauuugaccugauuacauuuu

SEQ ID NO: 4056704 - RNA, 16 nt, Vaccinia virus
uaauuugaguaagaau

SEQ ID NO: 4056705 - RNA, 22 nt, Vaccinia virus
uaauuugauaauaaaucaaaau

SEQ ID NO: 4056706 - RNA, 18 nt, Vaccinia virus
uaauuugguauauacaua

SEQ ID NO: 4056707 - RNA, 16 nt, Vaccinia virus
uaauuuuagaagcuau

SEQ ID NO: 4056708 - RNA, 17 nt, Vaccinia virus
uaauuuuuuuauuacau

SEQ ID NO: 4056709 - RNA, 14 nt, Vaccinia virus
uacaaaaucaucug

SEQ ID NO: 4056710 - RNA, 23 nt, Vaccinia virus
uacaaaauguugauaauccuuga

SEQ ID NO: 4056711 - RNA, 22 nt, Vaccinia virus
uacaaacuuuuccuuuuccaca

SEQ ID NO: 4056712 - RNA, 20 nt, Vaccinia virus
uacaaauguagaagauauca

SEQ ID NO: 4056713 - RNA, 16 nt, Vaccinia virus
uacaacauuccaaaga

SEQ ID NO: 4056714 - RNA, 17 nt, Vaccinia virus
uacaagaaauauuucca

SEQ ID NO: 4056715 - RNA, 13 nt, Vaccinia virus
uacaagaguggaa

SEQ ID NO: 4056716 - RNA, 20 nt, Vaccinia virus
uacaagcucgguuuuaacuu

SEQ ID NO: 4056717 - RNA, 13 nt, Vaccinia virus
uacaauauuuccg

SEQ ID NO: 4056718 - RNA, 21 nt, Vaccinia virus
uacaauccuucguuaucucug

SEQ ID NO: 4056719 - RNA, 16 nt, Vaccinia virus
uacaaucuguauuuca

SEQ ID NO: 4056720 - RNA, 19 nt, Vaccinia virus
uacacaucuaucaagugau

SEQ ID NO: 4056721 - RNA, 23 nt, Vaccinia virus
uacaccaucaauagauaaaacga

SEQ ID NO: 4056722 - RNA, 16 nt, Vaccinia virus
uacaccgcuauguuua

SEQ ID NO: 4056723 - RNA, 13 nt, Vaccinia virus
uacacgaaugauu

SEQ ID NO: 4056724 - RNA, 16 nt, Vaccinia virus
uacacguaccagcauu

SEQ ID NO: 4056725 - RNA, 19 nt, Vaccinia virus
uacagaaggcaaacgcuau

SEQ ID NO: 4056726 - RNA, 18 nt, Vaccinia virus
uacagauguuacaaaugu

SEQ ID NO: 4056727 - RNA, 22 nt, Vaccinia virus
uacagauguuacaaauguagaa

SEQ ID NO: 4056728 - RNA, 19 nt, Vaccinia virus
uacagauugcacuauacau

SEQ ID NO: 4056729 - RNA, 21 nt, Vaccinia virus
uacaguuucuguaaugaugga

SEQ ID NO: 4056730 - RNA, 14 nt, Vaccinia virus
uacauaaaacauca

SEQ ID NO: 4056731 - RNA, 14 nt, Vaccinia virus
uacauaacaucuuu

SEQ ID NO: 4056732 - RNA, 16 nt, Vaccinia virus
uacauaauucuucugu

SEQ ID NO: 4056733 - RNA, 23 nt, Vaccinia virus
uacauacagguacgaaauacgua

SEQ ID NO: 4056734 - RNA, 21 nt, Vaccinia virus
uacauagcaucuucacaaauu

SEQ ID NO: 4056735 - RNA, 14 nt, Vaccinia virus
uacaucaagagagc

SEQ ID NO: 4056736 - RNA, 21 nt, Vaccinia virus
uacaucaugccauuaagaaac

SEQ ID NO: 4056737 - RNA, 19 nt, Vaccinia virus
uacaucccgguuaaacauu

SEQ ID NO: 4056738 - RNA, 19 nt, Vaccinia virus
uacaucgguaucuagaucu

SEQ ID NO: 4056739 - RNA, 21 nt, Vaccinia virus
uacaucgucucaucuguuuaa

SEQ ID NO: 4056740 - RNA, 20 nt, Vaccinia virus
uacaucuacuauauuaacau

SEQ ID NO: 4056741 - RNA, 23 nt, Vaccinia virus
uacauucucauuaauuaaccauu

SEQ ID NO: 4056742 - RNA, 17 nt, Vaccinia virus
uacauugaauauaaaau

SEQ ID NO: 4056743 - RNA, 13 nt, Vaccinia virus
uacauuguauaaa

SEQ ID NO: 4056744 - RNA, 14 nt, Vaccinia virus
uacauuguuucaua

SEQ ID NO: 4056745 - RNA, 14 nt, Vaccinia virus
uacauuucucaaau

SEQ ID NO: 4056746 - RNA, 23 nt, Vaccinia virus
uaccaaacuuucagaagaaaugg

SEQ ID NO: 4056747 - RNA, 13 nt, Vaccinia virus
uaccaaauauuag

SEQ ID NO: 4056748 - RNA, 17 nt, Vaccinia virus
uaccaauacucaagacu

SEQ ID NO: 4056749 - RNA, 22 nt, Vaccinia virus
uaccaauaugucuguacaaaug

SEQ ID NO: 4056750 - RNA, 23 nt, Vaccinia virus
uaccaauaugucuguacaaaugu

SEQ ID NO: 4056751 - RNA, 22 nt, Vaccinia virus
uaccacgcaauuauauaaugua

SEQ ID NO: 4056752 - RNA, 20 nt, Vaccinia virus
uaccacguaaaacuuaaaau

SEQ ID NO: 4056753 - RNA, 18 nt, Vaccinia virus
uaccacuuauuacuccau

SEQ ID NO: 4056754 - RNA, 21 nt, Vaccinia virus
uaccagcauuaguaacagcuu

SEQ ID NO: 4056755 - RNA, 20 nt, Vaccinia virus
uaccauagaagauguuagaa

SEQ ID NO: 4056756 - RNA, 19 nt, Vaccinia virus
uaccauuaaagaauucuua

SEQ ID NO: 4056757 - RNA, 21 nt, Vaccinia virus
uaccauuaauuguuuacugua

SEQ ID NO: 4056758 - RNA, 18 nt, Vaccinia virus
uaccauuagauaaucuag

SEQ ID NO: 4056759 - RNA, 15 nt, Vaccinia virus
uaccauuucauugau

SEQ ID NO: 4056760 - RNA, 17 nt, Vaccinia virus
uaccauuuuaaaaucau

SEQ ID NO: 4056761 - RNA, 16 nt, Vaccinia virus
uacccaaaucugaaaa

SEQ ID NO: 4056762 - RNA, 15 nt, Vaccinia virus
uacccaccuguaaua

SEQ ID NO: 4056763 - RNA, 16 nt, Vaccinia virus
uaccgaacaggcauuu

SEQ ID NO: 4056764 - RNA, 21 nt, Vaccinia virus
uaccgauuuaucaucauacac

SEQ ID NO: 4056765 - RNA, 21 nt, Vaccinia virus
uaccucucggcgaaauaguua

SEQ ID NO: 4056766 - RNA, 15 nt, Vaccinia virus
uaccucucuuaaaau

SEQ ID NO: 4056767 - RNA, 13 nt, Vaccinia virus
uaccuuaaucaug

SEQ ID NO: 4056768 - RNA, 16 nt, Vaccinia virus
uacgaacaauaucuua

SEQ ID NO: 4056769 - RNA, 14 nt, Vaccinia virus
uacgagaaaaucaa

SEQ ID NO: 4056770 - RNA, 15 nt, Vaccinia virus
uacgauuuucuucuu

SEQ ID NO: 4056771 - RNA, 18 nt, Vaccinia virus
uacgauuuucuucuuuga

SEQ ID NO: 4056772 - RNA, 22 nt, Vaccinia virus
uacgcaauaugaucacaaagaa

SEQ ID NO: 4056773 - RNA, 19 nt, Vaccinia virus
uacgcauguuuuaaugcau

SEQ ID NO: 4056774 - RNA, 23 nt, Vaccinia virus
uacgcauuuucaaaauacauguc

SEQ ID NO: 4056775 - RNA, 21 nt, Vaccinia virus
uacgcuauuaaucuuuaaaau

SEQ ID NO: 4056776 - RNA, 14 nt, Vaccinia virus
uacggaaagaacca

SEQ ID NO: 4056777 - RNA, 20 nt, Vaccinia virus
uacgguuccaccgacucauu

SEQ ID NO: 4056778 - RNA, 17 nt, Vaccinia virus
uacguaauaaaaguaau

SEQ ID NO: 4056779 - RNA, 23 nt, Vaccinia virus
uacguauaacuuucuucugcaaa

SEQ ID NO: 4056780 - RNA, 15 nt, Vaccinia virus
uacguauauuuagau

SEQ ID NO: 4056781 - RNA, 15 nt, Vaccinia virus
uacgucaucaaaaau

SEQ ID NO: 4056782 - RNA, 21 nt, Vaccinia virus
uacguucggagacaauaaagc

SEQ ID NO: 4056783 - RNA, 13 nt, Vaccinia virus
uacuaaaaaaugu

SEQ ID NO: 4056784 - RNA, 15 nt, Vaccinia virus
uacuaaagaaacugu

SEQ ID NO: 4056785 - RNA, 16 nt, Vaccinia virus
uacuaaagucaucaau

SEQ ID NO: 4056786 - RNA, 19 nt, Vaccinia virus
uacuaaauucgauaucuuu

SEQ ID NO: 4056787 - RNA, 18 nt, Vaccinia virus
uacuaacguauaauucuu

SEQ ID NO: 4056788 - RNA, 18 nt, Vaccinia virus
uacuaaugacaauaauua

SEQ ID NO: 4056789 - RNA, 19 nt, Vaccinia virus
uacuaaugguaucaagaag

SEQ ID NO: 4056790 - RNA, 18 nt, Vaccinia virus
uacuaauuacaaaccugu

SEQ ID NO: 4056791 - RNA, 23 nt, Vaccinia virus
uacuaccugcuguuguuuauuca

SEQ ID NO: 4056792 - RNA, 15 nt, Vaccinia virus
uacuacuauuauuga

SEQ ID NO: 4056793 - RNA, 23 nt, Vaccinia virus
uacuacuggucuuucucaaccau

SEQ ID NO: 4056794 - RNA, 16 nt, Vaccinia virus
uacuaguuuucuaagu

SEQ ID NO: 4056795 - RNA, 22 nt, Vaccinia virus
uacuauauuaacaucuaaacau

SEQ ID NO: 4056796 - RNA, 14 nt, Vaccinia virus
uacuaucaauauua

SEQ ID NO: 4056797 - RNA, 17 nt, Vaccinia virus
uacuaugccaaaugaau

SEQ ID NO: 4056798 - RNA, 14 nt, Vaccinia virus
uacucaaauagcac

SEQ ID NO: 4056799 - RNA, 15 nt, Vaccinia virus
uacucagaggauuac

SEQ ID NO: 4056800 - RNA, 19 nt, Vaccinia virus
uacucggccgacauaaugu

SEQ ID NO: 4056801 - RNA, 16 nt, Vaccinia virus
uacucguuaguuugga

SEQ ID NO: 4056802 - RNA, 17 nt, Vaccinia virus
uacucuauaaaauacua

SEQ ID NO: 4056803 - RNA, 23 nt, Vaccinia virus
uacucuaugaauggauacuugua

SEQ ID NO: 4056804 - RNA, 22 nt, Vaccinia virus
uacucuucaaaguuucugaaau

SEQ ID NO: 4056805 - RNA, 20 nt, Vaccinia virus
uacucuuggucuaauacuga

SEQ ID NO: 4056806 - RNA, 18 nt, Vaccinia virus
uacugagccaacaaauau

SEQ ID NO: 4056807 - RNA, 24 nt, Vaccinia virus
uacugauaaagaagaagaucauac

SEQ ID NO: 4056808 - RNA, 24 nt, Vaccinia virus
uacugauaauguagaagaucauac

SEQ ID NO: 4056809 - RNA, 13 nt, Vaccinia virus
uacugcaauaaaa

SEQ ID NO: 4056810 - RNA, 14 nt, Vaccinia virus
uauccauuggaaaa

SEQ ID NO: 4056811 - RNA, 17 nt, Vaccinia virus
uauccuaucauguauuu

SEQ ID NO: 4056812 - RNA, 22 nt, Vaccinia virus
uauccucagacucugauuugaa

SEQ ID NO: 4056813 - RNA, 16 nt, Vaccinia virus
uauccucguucuaauu

SEQ ID NO: 4056814 - RNA, 15 nt, Vaccinia virus
uauccugcucugaua

SEQ ID NO: 4056815 - RNA, 20 nt, Vaccinia virus
uauccuugauuauguuuuau

SEQ ID NO: 4056816 - RNA, 19 nt, Vaccinia virus
uauccuuuaccaccaaaua

SEQ ID NO: 4056817 - RNA, 18 nt, Vaccinia virus
uaucgauuucuacauaua

SEQ ID NO: 4056818 - RNA, 18 nt, Vaccinia virus
uaucgcuaaaauuuucau

SEQ ID NO: 4056819 - RNA, 13 nt, Vaccinia virus
uaucgugucucau

SEQ ID NO: 4056820 - RNA, 12 nt, Vaccinia virus
uaucguuuucau

SEQ ID NO: 4056821 - RNA, 15 nt, Vaccinia virus
uaucuaaaaaucuua

SEQ ID NO: 4056822 - RNA, 17 nt, Vaccinia virus
uaucuaacaaauuuccu

SEQ ID NO: 4056823 - RNA, 14 nt, Vaccinia virus
uaucuaacaucuug

SEQ ID NO: 4056824 - RNA, 18 nt, Vaccinia virus
uaucuaauuucuguauau

SEQ ID NO: 4056825 - RNA, 13 nt, Vaccinia virus
uaucuacacaugu

SEQ ID NO: 4056826 - RNA, 14 nt, Vaccinia virus
uaucuaccagagau

SEQ ID NO: 4056827 - RNA, 18 nt, Vaccinia virus
uaucuacgauccaucaaa

SEQ ID NO: 4056828 - RNA, 22 nt, Vaccinia virus
uaucuacgauuuuuacaaaagu

SEQ ID NO: 4056829 - RNA, 14 nt, Vaccinia virus
uaucuacuagauag

SEQ ID NO: 4056830 - RNA, 20 nt, Vaccinia virus
uaucuagauaacaacgacuu

SEQ ID NO: 4056831 - RNA, 17 nt, Vaccinia virus
uaucuauauguuuugau

SEQ ID NO: 4056832 - RNA, 15 nt, Vaccinia virus
uaucuauguuaucau

SEQ ID NO: 4056833 - RNA, 22 nt, Vaccinia virus
uaucucaucgcaguauauauca

SEQ ID NO: 4056834 - RNA, 18 nt, Vaccinia virus
uaucucauucaaauccau

SEQ ID NO: 4056835 - RNA, 19 nt, Vaccinia virus
uaucuccaguauuuacauu

SEQ ID NO: 4056836 - RNA, 23 nt, Vaccinia virus
uaucucgcauccauauguuugga

SEQ ID NO: 4056837 - RNA, 18 nt, Vaccinia virus
uaucucuauuaaaugcgu

SEQ ID NO: 4056838 - RNA, 10 nt, Vaccinia virus
uaucucuuuc

SEQ ID NO: 4056839 - RNA, 24 nt, Vaccinia virus
uaucugaguaugaugauuuacaaa

SEQ ID NO: 4056840 - RNA, 16 nt, Vaccinia virus
uaucugcggaagagac

SEQ ID NO: 4056841 - RNA, 14 nt, Vaccinia virus
uaucuguuaccaua

SEQ ID NO: 4056842 - RNA, 18 nt, Vaccinia virus
uaucuuaaauaacucauu

SEQ ID NO: 4056843 - RNA, 20 nt, Vaccinia virus
uaucuuauauacacauaauu

SEQ ID NO: 4056844 - RNA, 18 nt, Vaccinia virus
uaucuucauagaauacua

SEQ ID NO: 4056845 - RNA, 12 nt, Vaccinia virus
uaucuucucaaa

SEQ ID NO: 4056846 - RNA, 20 nt, Vaccinia virus
uaucuuuaguaguguuuccc

SEQ ID NO: 4056847 - RNA, 15 nt, Vaccinia virus
uaugaagauaaacac

SEQ ID NO: 4056848 - RNA, 16 nt, Vaccinia virus
uaugaagauaaacacu

SEQ ID NO: 4056849 - RNA, 18 nt, Vaccinia virus
uaugaccgguuuaauguu

SEQ ID NO: 4056850 - RNA, 19 nt, Vaccinia virus
uaugacgcaguaacauaua

SEQ ID NO: 4056851 - RNA, 15 nt, Vaccinia virus
uaugacuaaagcuau

SEQ ID NO: 4056852 - RNA, 18 nt, Vaccinia virus
uaugagaucgucguacau

SEQ ID NO: 4056853 - RNA, 14 nt, Vaccinia virus
uaugaguucuucuu

SEQ ID NO: 4056854 - RNA, 18 nt, Vaccinia virus
uaugauagaaauuagcaa

SEQ ID NO: 4056855 - RNA, 17 nt, Vaccinia virus
uaugauaguuuuaacau

SEQ ID NO: 4056856 - RNA, 14 nt, Vaccinia virus
uaugauauauacac

SEQ ID NO: 4056857 - RNA, 16 nt, Vaccinia virus
uaugaucuugauuuau

SEQ ID NO: 4056858 - RNA, 15 nt, Vaccinia virus
uaugaugcaaagaug

SEQ ID NO: 4056859 - RNA, 18 nt, Vaccinia virus
uaugcaaccguaucaaaa

SEQ ID NO: 4056860 - RNA, 15 nt, Vaccinia virus
uaugcgagacauaua

SEQ ID NO: 4056861 - RNA, 14 nt, Vaccinia virus
uaugcgcaauauca

SEQ ID NO: 4056862 - RNA, 16 nt, Vaccinia virus
uaugcgggaauuaaug

SEQ ID NO: 4056863 - RNA, 13 nt, Vaccinia virus
uauggaaaacuaa

SEQ ID NO: 4056864 - RNA, 13 nt, Vaccinia virus
uauggaaucugua

SEQ ID NO: 4056865 - RNA, 23 nt, Vaccinia virus
uauggacgacgguaagaaugaag

SEQ ID NO: 4056866 - RNA, 14 nt, Vaccinia virus
uauggagcaaacau

SEQ ID NO: 4056867 - RNA, 22 nt, Vaccinia virus
uauggagcgaguguuacaacau

SEQ ID NO: 4056868 - RNA, 21 nt, Vaccinia virus
uauggauuuuuuuaaaaagga

SEQ ID NO: 4056869 - RNA, 15 nt, Vaccinia virus
uaugguauucuucua

SEQ ID NO: 4056870 - RNA, 16 nt, Vaccinia virus
uauguaaaacaaacuu

SEQ ID NO: 4056871 - RNA, 22 nt, Vaccinia virus
uauguaaaacaaacuuguaauu

SEQ ID NO: 4056872 - RNA, 19 nt, Vaccinia virus
uauguaccgcguuaucauc

SEQ ID NO: 4056873 - RNA, 17 nt, Vaccinia virus
uaugucaaaaauuguag

SEQ ID NO: 4056874 - RNA, 22 nt, Vaccinia virus
uaugucauaaacuguaaaugau

SEQ ID NO: 4056875 - RNA, 21 nt, Vaccinia virus
uauguccauuaaaguuaaauu

SEQ ID NO: 4056876 - RNA, 21 nt, Vaccinia virus
uaugucguccgguaguauaau

SEQ ID NO: 4056877 - RNA, 20 nt, Vaccinia virus
uaugucgucuacuggaugaa

SEQ ID NO: 4056878 - RNA, 18 nt, Vaccinia virus
uaugucuguacaaauguu

SEQ ID NO: 4056879 - RNA, 15 nt, Vaccinia virus
uauguugacauguau

SEQ ID NO: 4056880 - RNA, 18 nt, Vaccinia virus
uauguuuuaugaauagau

SEQ ID NO: 4056881 - RNA, 19 nt, Vaccinia virus
uauguuuuuacagagacuu

SEQ ID NO: 4056882 - RNA, 19 nt, Vaccinia virus
uauuaaaacuaucaaugau

SEQ ID NO: 4056883 - RNA, 12 nt, Vaccinia virus
uauuaaaacuga

SEQ ID NO: 4056884 - RNA, 13 nt, Vaccinia virus
uauuaaaacugac

SEQ ID NO: 4056885 - RNA, 18 nt, Vaccinia virus
uauuaaaauuauuucuaa

SEQ ID NO: 4056886 - RNA, 16 nt, Vaccinia virus
uauuaaaauucuuaaa

SEQ ID NO: 4056887 - RNA, 17 nt, Vaccinia virus
uauuaaaggaacuaaag

SEQ ID NO: 4056888 - RNA, 20 nt, Vaccinia virus
uauuaaaucucgauaauauc

SEQ ID NO: 4056889 - RNA, 17 nt, Vaccinia virus
uauuaacgaguuccauu

SEQ ID NO: 4056890 - RNA, 23 nt, Vaccinia virus
uauuaacgcguuuuaugaaugau

SEQ ID NO: 4056891 - RNA, 21 nt, Vaccinia virus
uauuaacgguaauacauuuau

SEQ ID NO: 4056892 - RNA, 19 nt, Vaccinia virus
uauuaagaaguuccaugau

SEQ ID NO: 4056893 - RNA, 23 nt, Vaccinia virus
uauuaauaacaguuauauaucua

SEQ ID NO: 4056894 - RNA, 15 nt, Vaccinia virus
uauuaauaauuacuu

SEQ ID NO: 4056895 - RNA, 20 nt, Vaccinia virus
uauuaauacaugucuuagau

SEQ ID NO: 4056896 - RNA, 15 nt, Vaccinia virus
uauuaaugaugaaag

SEQ ID NO: 4056897 - RNA, 13 nt, Vaccinia virus
uauuaauguauua

SEQ ID NO: 4056898 - RNA, 18 nt, Vaccinia virus
uauuaauguauuauuaua

SEQ ID NO: 4056899 - RNA, 12 nt, Vaccinia virus
uauuaauuaaac

SEQ ID NO: 4056900 - RNA, 23 nt, Vaccinia virus
uauuacaaaauauuuugagacuc

SEQ ID NO: 4056901 - RNA, 15 nt, Vaccinia virus
uauuacaaccaaugu

SEQ ID NO: 4056902 - RNA, 18 nt, Vaccinia virus
uauuacagaaguuuugaa

SEQ ID NO: 4056903 - RNA, 19 nt, Vaccinia virus
uauuacauaauauauacag

SEQ ID NO: 4056904 - RNA, 19 nt, Vaccinia virus
uauuacguggagaaaucau

SEQ ID NO: 4056905 - RNA, 15 nt, Vaccinia virus
uauuacguuagcauu

SEQ ID NO: 4056906 - RNA, 12 nt, Vaccinia virus
uauuacuuuagu

SEQ ID NO: 4056907 - RNA, 22 nt, Vaccinia virus
uauuagaauuggaauaccaaau

SEQ ID NO: 4056908 - RNA, 17 nt, Vaccinia virus
uauuagauuuuguauua

SEQ ID NO: 4056909 - RNA, 19 nt, Vaccinia virus
uauuagcgaauauaucaaa

SEQ ID NO: 4056910 - RNA, 14 nt, Vaccinia virus
uauuagucaauggu

SEQ ID NO: 4056911 - RNA, 14 nt, Vaccinia virus
uauuauaaacucuc

SEQ ID NO: 4056912 - RNA, 20 nt, Vaccinia virus
uauuauaaagccuuuaucua

SEQ ID NO: 4056913 - RNA, 11 nt, Vaccinia virus
uauuauacaug

SEQ ID NO: 4056914 - RNA, 21 nt, Vaccinia virus
uauuaucaggaacauuaucaa

SEQ ID NO: 4056915 - RNA, 12 nt, Vaccinia virus
uauuaucaugau

SEQ ID NO: 4056916 - RNA, 18 nt, Vaccinia virus
uauuauccgaagacagau

SEQ ID NO: 4056917 - RNA, 15 nt, Vaccinia virus
uauuaucucaacaaa

SEQ ID NO: 4056918 - RNA, 21 nt, Vaccinia virus
uauuaugaugaacuuuaucua

SEQ ID NO: 4056919 - RNA, 18 nt, Vaccinia virus
uauuauggaaaucaacau

SEQ ID NO: 4056920 - RNA, 16 nt, Vaccinia virus
uauuauguuuaucaca

SEQ ID NO: 4056921 - RNA, 23 nt, Vaccinia virus
uauuauuaaacguaguuaugaua

SEQ ID NO: 4056922 - RNA, 14 nt, Vaccinia virus
uauuauuaaucauu

SEQ ID NO: 4056923 - RNA, 23 nt, Vaccinia virus
uauuauuaggaucuacguucaua

SEQ ID NO: 4056924 - RNA, 22 nt, Vaccinia virus
uauuauugauacaauuauuaua

SEQ ID NO: 4056925 - RNA, 17 nt, Vaccinia virus
uauucaagcaaaaacaa

SEQ ID NO: 4056926 - RNA, 15 nt, Vaccinia virus
uauucacaaauauga

SEQ ID NO: 4056927 - RNA, 16 nt, Vaccinia virus
uauucagauuaucaug

SEQ ID NO: 4056928 - RNA, 14 nt, Vaccinia virus
uauucauaauaaga

SEQ ID NO: 4056929 - RNA, 20 nt, Vaccinia virus
uauucauuaggauuaucaaa

SEQ ID NO: 4056930 - RNA, 16 nt, Vaccinia virus
uauuccaaucauugau

SEQ ID NO: 4056931 - RNA, 17 nt, Vaccinia virus
uauuccuaguuuggauu

SEQ ID NO: 4056932 - RNA, 19 nt, Vaccinia virus
uauucgacuugguguuuga

SEQ ID NO: 4056933 - RNA, 16 nt, Vaccinia virus
uauucggcauuucuaa

SEQ ID NO: 4056934 - RNA, 12 nt, Vaccinia virus
uagccuguuuua

SEQ ID NO: 4056935 - RNA, 17 nt, Vaccinia virus
uagcgaacauauaucug

SEQ ID NO: 4056936 - RNA, 21 nt, Vaccinia virus
uagcgaagaagagaaagacag

SEQ ID NO: 4056937 - RNA, 16 nt, Vaccinia virus
uagcggguauccccgu

SEQ ID NO: 4056938 - RNA, 18 nt, Vaccinia virus
uagcguacaaaauuaucg

SEQ ID NO: 4056939 - RNA, 21 nt, Vaccinia virus
uagcuauucguaacaaaacua

SEQ ID NO: 4056940 - RNA, 18 nt, Vaccinia virus
uagcuccccuguuuucau

SEQ ID NO: 4056941 - RNA, 13 nt, Vaccinia virus
uagcuguuuucau

SEQ ID NO: 4056942 - RNA, 23 nt, Vaccinia virus
uagcuuuguuagacuagauacua

SEQ ID NO: 4056943 - RNA, 21 nt, Vaccinia virus
uaggaaauuucaugcaacgaa

SEQ ID NO: 4056944 - RNA, 15 nt, Vaccinia virus
uaggaccacuagcaa

SEQ ID NO: 4056945 - RNA, 21 nt, Vaccinia virus
uaggaccacuagcaaaagaua

SEQ ID NO: 4056946 - RNA, 14 nt, Vaccinia virus
uaggagaauuauuu

SEQ ID NO: 4056947 - RNA, 18 nt, Vaccinia virus
uaggagacgcccaaaaua

SEQ ID NO: 4056948 - RNA, 14 nt, Vaccinia virus
uaggaguaauagaa

SEQ ID NO: 4056949 - RNA, 14 nt, Vaccinia virus
uaggaguaucuauu

SEQ ID NO: 4056950 - RNA, 15 nt, Vaccinia virus
uaggauaauacaucc

SEQ ID NO: 4056951 - RNA, 17 nt, Vaccinia virus
uaggauacucuaugaau

SEQ ID NO: 4056952 - RNA, 18 nt, Vaccinia virus
uaggcacagucaaacauu

SEQ ID NO: 4056953 - RNA, 22 nt, Vaccinia virus
uaggcuuccaaaaauuuuucau

SEQ ID NO: 4056954 - RNA, 20 nt, Vaccinia virus
uagguaugaucguuaagaau

SEQ ID NO: 4056955 - RNA, 16 nt, Vaccinia virus
uagguauguccucugc

SEQ ID NO: 4056956 - RNA, 20 nt, Vaccinia virus
uaggucuuguguuagaugau

SEQ ID NO: 4056957 - RNA, 21 nt, Vaccinia virus
uaggugccaccaauaaacuau

SEQ ID NO: 4056958 - RNA, 20 nt, Vaccinia virus
uaguaaaauaaucauacaau

SEQ ID NO: 4056959 - RNA, 21 nt, Vaccinia virus
uaguaauuauaaaaccaagga

SEQ ID NO: 4056960 - RNA, 13 nt, Vaccinia virus
uaguagauacaua

SEQ ID NO: 4056961 - RNA, 17 nt, Vaccinia virus
uaguauaacacacaugu

SEQ ID NO: 4056962 - RNA, 15 nt, Vaccinia virus
uaguauaucaaagau

SEQ ID NO: 4056963 - RNA, 18 nt, Vaccinia virus
uaguauaugaacaaacgu

SEQ ID NO: 4056964 - RNA, 18 nt, Vaccinia virus
uaguauaugauaauauua

SEQ ID NO: 4056965 - RNA, 19 nt, Vaccinia virus
uaguaugucgauauacuua

SEQ ID NO: 4056966 - RNA, 23 nt, Vaccinia virus
uaguauuuaacaagagaagagau

SEQ ID NO: 4056967 - RNA, 20 nt, Vaccinia virus
uagucaucacauuaacuauu

SEQ ID NO: 4056968 - RNA, 19 nt, Vaccinia virus
uagucgguuaauguuguau

SEQ ID NO: 4056969 - RNA, 19 nt, Vaccinia virus
uagucuaguaucuaaacau

SEQ ID NO: 4056970 - RNA, 13 nt, Vaccinia virus
uagucucuguaau

SEQ ID NO: 4056971 - RNA, 14 nt, Vaccinia virus
uagucuucaauaau

SEQ ID NO: 4056972 - RNA, 18 nt, Vaccinia virus
uagugaucaguuuaugua

SEQ ID NO: 4056973 - RNA, 16 nt, Vaccinia virus
uagugaugaauaucug

SEQ ID NO: 4056974 - RNA, 13 nt, Vaccinia virus
uaguggacaacau

SEQ ID NO: 4056975 - RNA, 18 nt, Vaccinia virus
uaguggacuugucaaauc

SEQ ID NO: 4056976 - RNA, 15 nt, Vaccinia virus
uaguuaaugaaacau

SEQ ID NO: 4056977 - RNA, 22 nt, Vaccinia virus
uaguuauggcacucuuauuaua

SEQ ID NO: 4056978 - RNA, 23 nt, Vaccinia virus
uaguuauuagugauaaaauagua

SEQ ID NO: 4056979 - RNA, 14 nt, Vaccinia virus
uaguucauacacca

SEQ ID NO: 4056980 - RNA, 18 nt, Vaccinia virus
uaguucguguacuaguca

SEQ ID NO: 4056981 - RNA, 19 nt, Vaccinia virus
uaguucucuuuuguagaac

SEQ ID NO: 4056982 - RNA, 20 nt, Vaccinia virus
uaguuguucagcuguagaac

SEQ ID NO: 4056983 - RNA, 17 nt, Vaccinia virus
uaguuguuuaauuuauu

SEQ ID NO: 4056984 - RNA, 13 nt, Vaccinia virus
uaguuuacagaua

SEQ ID NO: 4056985 - RNA, 14 nt, Vaccinia virus
uaguuuauaucuuu

SEQ ID NO: 4056986 - RNA, 16 nt, Vaccinia virus
uaguuuaucauacuua

SEQ ID NO: 4056987 - RNA, 14 nt, Vaccinia virus
uaguuuauuauaua

SEQ ID NO: 4056988 - RNA, 17 nt, Vaccinia virus
uaguuuauuccaaucau

SEQ ID NO: 4056989 - RNA, 19 nt, Vaccinia virus
uaguuuccuuaacaaaucu

SEQ ID NO: 4056990 - RNA, 18 nt, Vaccinia virus
uaguuucuauaucuacau

SEQ ID NO: 4056991 - RNA, 15 nt, Vaccinia virus
uaguuuguuucugga

SEQ ID NO: 4056992 - RNA, 15 nt, Vaccinia virus
uaguuuuacuaucau

SEQ ID NO: 4056993 - RNA, 19 nt, Vaccinia virus
uaguuuucaucagauaaga

SEQ ID NO: 4056994 - RNA, 20 nt, Vaccinia virus
uaguuuuuauagauucuuua

SEQ ID NO: 4056995 - RNA, 13 nt, Vaccinia virus
uaguuuuucugga

SEQ ID NO: 4056996 - RNA, 13 nt, Vaccinia virus
uauaaaaaacuaa

SEQ ID NO: 4056997 - RNA, 13 nt, Vaccinia virus
uauaaaaacuuuu

SEQ ID NO: 4056998 - RNA, 13 nt, Vaccinia virus
uauaaaaauacuu

SEQ ID NO: 4056999 - RNA, 19 nt, Vaccinia virus
uauaaaacgauuaaacaau

SEQ ID NO: 4057000 - RNA, 19 nt, Vaccinia virus
uauaaaacuacuacaauga

SEQ ID NO: 4057001 - RNA, 14 nt, Vaccinia virus
uauaaaacuuauga

SEQ ID NO: 4057002 - RNA, 16 nt, Vaccinia virus
uauaaaacuugucugu

SEQ ID NO: 4057003 - RNA, 19 nt, Vaccinia virus
uauaaaacuugucuguaua

SEQ ID NO: 4057004 - RNA, 14 nt, Vaccinia virus
uauaaaauauauug

SEQ ID NO: 4057005 - RNA, 21 nt, Vaccinia virus
uauaaacaugaauuuauuucu

SEQ ID NO: 4057006 - RNA, 22 nt, Vaccinia virus
uauaaaccgcuauugaaacuga

SEQ ID NO: 4057007 - RNA, 20 nt, Vaccinia virus
uauaaacguauacuguagau

SEQ ID NO: 4057008 - RNA, 17 nt, Vaccinia virus
uauaaacucgcuuaaua

SEQ ID NO: 4057009 - RNA, 16 nt, Vaccinia virus
uauaaacucucaacau

SEQ ID NO: 4057010 - RNA, 23 nt, Vaccinia virus
uauaaacuuuauccauaucucua

SEQ ID NO: 4057011 - RNA, 16 nt, Vaccinia virus
uauaaagauugugcaa

SEQ ID NO: 4057012 - RNA, 21 nt, Vaccinia virus
uauaaaguccgcacuacuguu

SEQ ID NO: 4057013 - RNA, 21 nt, Vaccinia virus
uauaaagucugucaaaucauc

SEQ ID NO: 4057014 - RNA, 14 nt, Vaccinia virus
uauaaaguguaugu

SEQ ID NO: 4057015 - RNA, 18 nt, Vaccinia virus
uauaaauauauaaugggu

SEQ ID NO: 4057016 - RNA, 14 nt, Vaccinia virus
uauaaauucucgag

SEQ ID NO: 4057017 - RNA, 12 nt, Vaccinia virus
uauaacaaccaa

SEQ ID NO: 4057018 - RNA, 21 nt, Vaccinia virus
uauaacagagccaucuguaaa

SEQ ID NO: 4057019 - RNA, 19 nt, Vaccinia virus
uauaaccaccgauaaaucu

SEQ ID NO: 4057020 - RNA, 14 nt, Vaccinia virus
uauaaccuuaacuu

SEQ ID NO: 4057021 - RNA, 20 nt, Vaccinia virus
uauaacuucugguaaauauu

SEQ ID NO: 4057022 - RNA, 19 nt, Vaccinia virus
uauaagaauuuuuauacau

SEQ ID NO: 4057023 - RNA, 20 nt, Vaccinia virus
uauaagaauuuuuauacauu

SEQ ID NO: 4057024 - RNA, 17 nt, Vaccinia virus
uauaagauuaucaaaau

SEQ ID NO: 4057025 - RNA, 19 nt, Vaccinia virus
uacaguaguaauuaaugaa

SEQ ID NO: 4057026 - RNA, 22 nt, Vaccinia virus
uacauacaucuccaaaacuauc

SEQ ID NO: 4057027 - RNA, 22 nt, Vaccinia virus
uacauauaccgccuuucaaaau

SEQ ID NO: 4057028 - RNA, 20 nt, Vaccinia virus
uacaucaucgaacuucugau

SEQ ID NO: 4057029 - RNA, 17 nt, Vaccinia virus
uacaucggauacgacau

SEQ ID NO: 4057030 - RNA, 16 nt, Vaccinia virus
uacaucgucuagaucu

SEQ ID NO: 4057031 - RNA, 14 nt, Vaccinia virus
uacaucuacuauau

SEQ ID NO: 4057032 - RNA, 17 nt, Vaccinia virus
uacaucuuccuucuuau

SEQ ID NO: 4057033 - RNA, 15 nt, Vaccinia virus
uacaugacaauaaag

SEQ ID NO: 4057034 - RNA, 17 nt, Vaccinia virus
uacauggacucauuaaa

SEQ ID NO: 4057035 - RNA, 20 nt, Vaccinia virus
uacauguaaugauuuaaaau

SEQ ID NO: 4057036 - RNA, 19 nt, Vaccinia virus
uacauguuucccaauuugu

SEQ ID NO: 4057037 - RNA, 13 nt, Vaccinia virus
uacauguuuucau

SEQ ID NO: 4057038 - RNA, 17 nt, Vaccinia virus
uacauucuuuuugcugu

SEQ ID NO: 4057039 - RNA, 17 nt, Vaccinia virus
uacauuguauaaaaagc

SEQ ID NO: 4057040 - RNA, 15 nt, Vaccinia virus
uacauuuucuuacaa

SEQ ID NO: 4057041 - RNA, 22 nt, Vaccinia virus
uaccaacaugucugauauuuug

SEQ ID NO: 4057042 - RNA, 21 nt, Vaccinia virus
uaccacaauaaaaaaaauuga

SEQ ID NO: 4057043 - RNA, 21 nt, Vaccinia virus
uaccacuuuccaacuuaucau

SEQ ID NO: 4057044 - RNA, 20 nt, Vaccinia virus
uaccagauauuauacaaaau

SEQ ID NO: 4057045 - RNA, 14 nt, Vaccinia virus
uaccagaucuuaau

SEQ ID NO: 4057046 - RNA, 17 nt, Vaccinia virus
uaccaucaacuacugua

SEQ ID NO: 4057047 - RNA, 16 nt, Vaccinia virus
uaccauuaaucacuga

SEQ ID NO: 4057048 - RNA, 18 nt, Vaccinia virus
uacccaaucucucucaaa

SEQ ID NO: 4057049 - RNA, 12 nt, Vaccinia virus
uaccgaaaauaa

SEQ ID NO: 4057050 - RNA, 16 nt, Vaccinia virus
uaccgaagaauuaaau

SEQ ID NO: 4057051 - RNA, 15 nt, Vaccinia virus
uaccgauuuaucauc

SEQ ID NO: 4057052 - RNA, 21 nt, Vaccinia virus
uaccuaucuucgauauaaaau

SEQ ID NO: 4057053 - RNA, 11 nt, Vaccinia virus
uaccuguuuuu

SEQ ID NO: 4057054 - RNA, 13 nt, Vaccinia virus
uaccuguuuuuau

SEQ ID NO: 4057055 - RNA, 18 nt, Vaccinia virus
uacgaaccgggaaagaga

SEQ ID NO: 4057056 - RNA, 21 nt, Vaccinia virus
uacgaauaucguucucuaaau

SEQ ID NO: 4057057 - RNA, 14 nt, Vaccinia virus
uacgauucaggaau

SEQ ID NO: 4057058 - RNA, 22 nt, Vaccinia virus
uacgcaaauaccgaucaacaaa

SEQ ID NO: 4057059 - RNA, 16 nt, Vaccinia virus
uacgcaauguuacaca

SEQ ID NO: 4057060 - RNA, 14 nt, Vaccinia virus
uacgccaaggaaag

SEQ ID NO: 4057061 - RNA, 14 nt, Vaccinia virus
uacgcuauuaaaau

SEQ ID NO: 4057062 - RNA, 18 nt, Vaccinia virus
uacgcuccuuaucaaaau

SEQ ID NO: 4057063 - RNA, 15 nt, Vaccinia virus
uacggaagaagaaaa

SEQ ID NO: 4057064 - RNA, 20 nt, Vaccinia virus
uacguaauagaacgugucau

SEQ ID NO: 4057065 - RNA, 13 nt, Vaccinia virus
uacguauccucga

SEQ ID NO: 4057066 - RNA, 16 nt, Vaccinia virus
uacgucuauacagaua

SEQ ID NO: 4057067 - RNA, 23 nt, Vaccinia virus
ucaacguaacuauauuccaaauu

SEQ ID NO: 4057068 - RNA, 13 nt, Vaccinia virus
ucaacuucaucau

SEQ ID NO: 4057069 - RNA, 16 nt, Vaccinia virus
ucaaguaaagauuuca

SEQ ID NO: 4057070 - RNA, 14 nt, Vaccinia virus
ucaagucaauuauc

SEQ ID NO: 4057071 - RNA, 17 nt, Vaccinia virus
ucaaguuaugaaaauag

SEQ ID NO: 4057072 - RNA, 15 nt, Vaccinia virus
ucaauaauauaucuu

SEQ ID NO: 4057073 - RNA, 16 nt, Vaccinia virus
ucaauaaucaaccauc

SEQ ID NO: 4057074 - RNA, 14 nt, Vaccinia virus
ucaauaauucuauu

SEQ ID NO: 4057075 - RNA, 12 nt, Vaccinia virus
ucaauacaaaaa

SEQ ID NO: 4057076 - RNA, 12 nt, Vaccinia virus
ucaauagaagau

SEQ ID NO: 4057077 - RNA, 15 nt, Vaccinia virus
ucaauagacauccaa

SEQ ID NO: 4057078 - RNA, 21 nt, Vaccinia virus
ucaauagcaguuuauuaucca

SEQ ID NO: 4057079 - RNA, 19 nt, Vaccinia virus
ucaauagcugagucuauau

SEQ ID NO: 4057080 - RNA, 13 nt, Vaccinia virus
ucaauagguagua

SEQ ID NO: 4057081 - RNA, 14 nt, Vaccinia virus
ucaauauagaucuu

SEQ ID NO: 4057082 - RNA, 14 nt, Vaccinia virus
ucaauaucaucaaa

SEQ ID NO: 4057083 - RNA, 16 nt, Vaccinia virus
ucaauauugaaaauac

SEQ ID NO: 4057084 - RNA, 18 nt, Vaccinia virus
ucaaucaaggaacuaaau

SEQ ID NO: 4057085 - RNA, 20 nt, Vaccinia virus
ucaaucauccuaaagaguau

SEQ ID NO: 4057086 - RNA, 20 nt, Vaccinia virus
ucaaucggauacagacacuc

SEQ ID NO: 4057087 - RNA, 22 nt, Vaccinia virus
ucaauuacacuauuugucuuaa

SEQ ID NO: 4057088 - RNA, 15 nt, Vaccinia virus
ucacaaauacuacaa

SEQ ID NO: 4057089 - RNA, 17 nt, Vaccinia virus
ucacaaguaugaagaaa

SEQ ID NO: 4057090 - RNA, 18 nt, Vaccinia virus
ucacaauacgauuuagau

SEQ ID NO: 4057091 - RNA, 18 nt, Vaccinia virus
ucacacuacugaaaaaag

SEQ ID NO: 4057092 - RNA, 23 nt, Vaccinia virus
ucacauauaaaauuuuaauuaau

SEQ ID NO: 4057093 - RNA, 17 nt, Vaccinia virus
ucacauccuuuauuuua

SEQ ID NO: 4057094 - RNA, 17 nt, Vaccinia virus
ucacaugucuaaacuuc

SEQ ID NO: 4057095 - RNA, 18 nt, Vaccinia virus
ucaccaauaagauaauag

SEQ ID NO: 4057096 - RNA, 21 nt, Vaccinia virus
ucacuaacugauaccaugaaa

SEQ ID NO: 4057097 - RNA, 15 nt, Vaccinia virus
ucacucaauaucuag

SEQ ID NO: 4057098 - RNA, 22 nt, Vaccinia virus
ucacucucauaauguaaagaua

SEQ ID NO: 4057099 - RNA, 20 nt, Vaccinia virus
ucacugauuaauuauuugcc

SEQ ID NO: 4057100 - RNA, 19 nt, Vaccinia virus
ucacuguauaaaaagaaug

SEQ ID NO: 4057101 - RNA, 23 nt, Vaccinia virus
ucagaaaggauagagcaauaagu

SEQ ID NO: 4057102 - RNA, 15 nt, Vaccinia virus
ucagaacugaugcaa

SEQ ID NO: 4057103 - RNA, 16 nt, Vaccinia virus
ucagaauauacaccua

SEQ ID NO: 4057104 - RNA, 23 nt, Vaccinia virus
ucagaauauacaccuaacguuuu

SEQ ID NO: 4057105 - RNA, 22 nt, Vaccinia virus
ucagaauuuucauggauguaga

SEQ ID NO: 4057106 - RNA, 14 nt, Vaccinia virus
ucagagagauuucg

SEQ ID NO: 4057107 - RNA, 21 nt, Vaccinia virus
ucagagauuauugucuuauau

SEQ ID NO: 4057108 - RNA, 12 nt, Vaccinia virus
ucagaguucagu

SEQ ID NO: 4057109 - RNA, 19 nt, Vaccinia virus
ucagaguucagugaagaag

SEQ ID NO: 4057110 - RNA, 15 nt, Vaccinia virus
ucagauaaucugaaa

SEQ ID NO: 4057111 - RNA, 13 nt, Vaccinia virus
ucagauauuugcg

SEQ ID NO: 4057112 - RNA, 17 nt, Vaccinia virus
ucagauuucaauucacg

SEQ ID NO: 4057113 - RNA, 21 nt, Vaccinia virus
ucagcaucugguacaauaaau

SEQ ID NO: 4057114 - RNA, 16 nt, Vaccinia virus
ucaggugccccgacuc

SEQ ID NO: 4057115 - RNA, 15 nt, Vaccinia virus
ucaguaucuucagac

SEQ ID NO: 4057116 - RNA, 18 nt, Vaccinia virus
ucagucuucgaagcaugu

SEQ ID NO: 4057117 - RNA, 20 nt, Vaccinia virus
ucaguguccaucauuucauu

SEQ ID NO: 4057118 - RNA, 18 nt, Vaccinia virus
ucaguguggguacaaaua

SEQ ID NO: 4057119 - RNA, 21 nt, Vaccinia virus
ucauaaaauauuuuuauucuc

SEQ ID NO: 4057120 - RNA, 13 nt, Vaccinia virus
ucauaaagaacag

SEQ ID NO: 4057121 - RNA, 22 nt, Vaccinia virus
ucauaacuugagagcauccagu

SEQ ID NO: 4057122 - RNA, 14 nt, Vaccinia virus
ucauaaguguauau

SEQ ID NO: 4057123 - RNA, 17 nt, Vaccinia virus
ucauaauugcuuuucua

SEQ ID NO: 4057124 - RNA, 17 nt, Vaccinia virus
ucauacuagaauaaagc

SEQ ID NO: 4057125 - RNA, 18 nt, Vaccinia virus
ucauagccgcucuuagag

SEQ ID NO: 4057126 - RNA, 12 nt, Vaccinia virus
ucauaguuuuua

SEQ ID NO: 4057127 - RNA, 18 nt, Vaccinia virus
ucauauacaacucuuuaa

SEQ ID NO: 4057128 - RNA, 13 nt, Vaccinia virus
ucauauacuauuu

SEQ ID NO: 4057129 - RNA, 21 nt, Vaccinia virus
ucauauauauacugagaaguu

SEQ ID NO: 4057130 - RNA, 17 nt, Vaccinia virus
ucauaucacauaguguu

SEQ ID NO: 4057131 - RNA, 18 nt, Vaccinia virus
ucauaugugguauucacu

SEQ ID NO: 4057132 - RNA, 17 nt, Vaccinia virus
ucauauguuguuguaau

SEQ ID NO: 4057133 - RNA, 14 nt, Vaccinia virus
ucauauuaaugggu

SEQ ID NO: 4057134 - RNA, 15 nt, Vaccinia virus
ucauauuauagauuu

SEQ ID NO: 4057135 - RNA, 14 nt, Vaccinia virus
ucauauuuagauuu

SEQ ID NO: 4057136 - RNA, 18 nt, Vaccinia virus
ucaucaaacaacugaaaa

SEQ ID NO: 4057137 - RNA, 14 nt, Vaccinia virus
ucaucaauguagug

SEQ ID NO: 4057138 - RNA, 20 nt, Vaccinia virus
ucaucaccagcacaacaucu

SEQ ID NO: 4057139 - RNA, 20 nt, Vaccinia virus
ucaucaccuaucuugugcau

SEQ ID NO: 4057140 - RNA, 22 nt, Vaccinia virus
ucauccgauaaacuccaauaaa

SEQ ID NO: 4057141 - RNA, 23 nt, Vaccinia virus
ucauccguggauauuugauuuuu

SEQ ID NO: 4057142 - RNA, 16 nt, Vaccinia virus
ucauccguuguuauau

SEQ ID NO: 4057143 - RNA, 20 nt, Vaccinia virus
ucauccguuuccuuaugaag

SEQ ID NO: 4057144 - RNA, 23 nt, Vaccinia virus
ucaucgaacuucugaucauuaau

SEQ ID NO: 4057145 - RNA, 16 nt, Vaccinia virus
ucaucgauaguauaau

SEQ ID NO: 4057146 - RNA, 20 nt, Vaccinia virus
ucaucggacuuugugcauau

SEQ ID NO: 4057147 - RNA, 15 nt, Vaccinia virus
ucaucgugacauaag

SEQ ID NO: 4057148 - RNA, 17 nt, Vaccinia virus
ucaucuacucauagaaa

SEQ ID NO: 4057149 - RNA, 12 nt, Vaccinia virus
ucaucuguuuua

SEQ ID NO: 4057150 - RNA, 13 nt, Vaccinia virus
ucaucuucauagg

SEQ ID NO: 4057151 - RNA, 20 nt, Vaccinia virus
ucaucuuuuaccaacacaaa

SEQ ID NO: 4057152 - RNA, 22 nt, Vaccinia virus
ucaugaugaaguugagaaugau

SEQ ID NO: 4057153 - RNA, 22 nt, Vaccinia virus
ucaugucugguaauucauauag

SEQ ID NO: 4057154 - RNA, 15 nt, Vaccinia virus
ucauguguagaugcu

SEQ ID NO: 4057155 - RNA, 17 nt, Vaccinia virus
ucauguguucaaaguau

SEQ ID NO: 4057156 - RNA, 16 nt, Vaccinia virus
ucauguuuauuucuag

SEQ ID NO: 4057157 - RNA, 15 nt, Vaccinia virus
ucauuaaaauaugug

SEQ ID NO: 4057158 - RNA, 22 nt, Vaccinia virus
ucauuaaauguuucaucagaaa

SEQ ID NO: 4057159 - RNA, 18 nt, Vaccinia virus
ucauuacagaaacuguaa

SEQ ID NO: 4057160 - RNA, 15 nt, Vaccinia virus
ucauuacuacuguaa

SEQ ID NO: 4057161 - RNA, 17 nt, Vaccinia virus
ucauuauuauguugaua

SEQ ID NO: 4057162 - RNA, 16 nt, Vaccinia virus
ucauucucuagaagau

SEQ ID NO: 4057163 - RNA, 15 nt, Vaccinia virus
ucauugauugagaag

SEQ ID NO: 4057164 - RNA, 14 nt, Vaccinia virus
ucauuggaaaauau

SEQ ID NO: 4057165 - RNA, 16 nt, Vaccinia virus
ucauuguaaauuuaua

SEQ ID NO: 4057166 - RNA, 20 nt, Vaccinia virus
ucauuuaacacuauacucau

SEQ ID NO: 4057167 - RNA, 20 nt, Vaccinia virus
ucauuuacuaaggaguaaaa

SEQ ID NO: 4057168 - RNA, 12 nt, Vaccinia virus
ucauuuagaaug

SEQ ID NO: 4057169 - RNA, 19 nt, Vaccinia virus
ucauuucuccaaagaauau

SEQ ID NO: 4057170 - RNA, 15 nt, Vaccinia virus
ucauuuggagaguau

SEQ ID NO: 4057171 - RNA, 13 nt, Vaccinia virus
ucauuuguuucca

SEQ ID NO: 4057172 - RNA, 15 nt, Vaccinia virus
ucauuuuauaauugu

SEQ ID NO: 4057173 - RNA, 18 nt, Vaccinia virus
ucauuuucuauuuaaaau

SEQ ID NO: 4057174 - RNA, 17 nt, Vaccinia virus
uccaaauugcgacacua

SEQ ID NO: 4057175 - RNA, 15 nt, Vaccinia virus
uccaaguucuauagu

SEQ ID NO: 4057176 - RNA, 21 nt, Vaccinia virus
uccaauacuaauucaaauugu

SEQ ID NO: 4057177 - RNA, 13 nt, Vaccinia virus
uccaauagauguc

SEQ ID NO: 4057178 - RNA, 13 nt, Vaccinia virus
uccaauguauuua

SEQ ID NO: 4057179 - RNA, 14 nt, Vaccinia virus
uccaauuaaaugua

SEQ ID NO: 4057180 - RNA, 14 nt, Vaccinia virus
uccaauuacaaaaa

SEQ ID NO: 4057181 - RNA, 15 nt, Vaccinia virus
uccaauuacaaaaac

SEQ ID NO: 4057182 - RNA, 15 nt, Vaccinia virus
uccaauuuuauucua

SEQ ID NO: 4057183 - RNA, 16 nt, Vaccinia virus
uccacaaauaguaaau

SEQ ID NO: 4057184 - RNA, 16 nt, Vaccinia virus
uccacauuaauacagc

SEQ ID NO: 4057185 - RNA, 23 nt, Vaccinia virus
uccacgauaaaauccuccuauca

SEQ ID NO: 4057186 - RNA, 23 nt, Vaccinia virus
uccacucucgauaaaucuacuca

SEQ ID NO: 4057187 - RNA, 14 nt, Vaccinia virus
uccagauaauaacc

SEQ ID NO: 4057188 - RNA, 17 nt, Vaccinia virus
uccagaugcgagagaau

SEQ ID NO: 4057189 - RNA, 20 nt, Vaccinia virus
uccagccguagaauaucuaa

SEQ ID NO: 4057190 - RNA, 15 nt, Vaccinia virus
uccauaauuuucucu

SEQ ID NO: 4057191 - RNA, 17 nt, Vaccinia virus
uccauaauuuucucucg

SEQ ID NO: 4057192 - RNA, 19 nt, Vaccinia virus
uccauaguacauaguuguu

SEQ ID NO: 4057193 - RNA, 17 nt, Vaccinia virus
uccaucauuucauuaau

SEQ ID NO: 4057194 - RNA, 19 nt, Vaccinia virus
uccaucgaugauacaugua

SEQ ID NO: 4057195 - RNA, 18 nt, Vaccinia virus
uccaucguugcaauaaua

SEQ ID NO: 4057196 - RNA, 17 nt, Vaccinia virus
uccaugauaaauuauuu

SEQ ID NO: 4057197 - RNA, 18 nt, Vaccinia virus
uccaugauacaacuuugc

SEQ ID NO: 4057198 - RNA, 21 nt, Vaccinia virus
uccaugcagcauuuccuacau

SEQ ID NO: 4057199 - RNA, 16 nt, Vaccinia virus
uccauguccaauauga

SEQ ID NO: 4057200 - RNA, 20 nt, Vaccinia virus
uccauguugucuauuuccaa

SEQ ID NO: 4057201 - RNA, 14 nt, Vaccinia virus
ucuccccaaacauu

SEQ ID NO: 4057202 - RNA, 16 nt, Vaccinia virus
ucuccuuuuguagaca

SEQ ID NO: 4057203 - RNA, 15 nt, Vaccinia virus
ucucuauguuucagu

SEQ ID NO: 4057204 - RNA, 22 nt, Vaccinia virus
ucucucaaucacuacaucuuua

SEQ ID NO: 4057205 - RNA, 21 nt, Vaccinia virus
ucucugauguuuguuuucgau

SEQ ID NO: 4057206 - RNA, 22 nt, Vaccinia virus
ucucuguuuaaugaauuacuaa

SEQ ID NO: 4057207 - RNA, 22 nt, Vaccinia virus
ucucuuuuguagaacuuaacuu

SEQ ID NO: 4057208 - RNA, 19 nt, Vaccinia virus
ucugaaaauccacuaacaa

SEQ ID NO: 4057209 - RNA, 12 nt, Vaccinia virus
ucugaauuauuu

SEQ ID NO: 4057210 - RNA, 19 nt, Vaccinia virus
ucugaauuauuucauauau

SEQ ID NO: 4057211 - RNA, 21 nt, Vaccinia virus
ucugacauaagaugucuauga

SEQ ID NO: 4057212 - RNA, 20 nt, Vaccinia virus
ucugauaauccagucuuuaa

SEQ ID NO: 4057213 - RNA, 17 nt, Vaccinia virus
ucugaucuuaacuccuc

SEQ ID NO: 4057214 - RNA, 18 nt, Vaccinia virus
ucugcuccuuuuucuauu

SEQ ID NO: 4057215 - RNA, 15 nt, Vaccinia virus
ucuguaaauaguuuu

SEQ ID NO: 4057216 - RNA, 12 nt, Vaccinia virus
ucuguacaaaau

SEQ ID NO: 4057217 - RNA, 22 nt, Vaccinia virus
ucugucauauguauaaaugaag

SEQ ID NO: 4057218 - RNA, 15 nt, Vaccinia virus
ucugucauauuuaga

SEQ ID NO: 4057219 - RNA, 15 nt, Vaccinia virus
ucugugguggaugau

SEQ ID NO: 4057220 - RNA, 19 nt, Vaccinia virus
ucuguuccccucuaucauc

SEQ ID NO: 4057221 - RNA, 14 nt, Vaccinia virus
ucuuaaauuucaua

SEQ ID NO: 4057222 - RNA, 22 nt, Vaccinia virus
ucuuacacauucgcucauacau

SEQ ID NO: 4057223 - RNA, 17 nt, Vaccinia virus
ucuuauaauuguaacau

SEQ ID NO: 4057224 - RNA, 14 nt, Vaccinia virus
ucuuauagauguau

SEQ ID NO: 4057225 - RNA, 15 nt, Vaccinia virus
ucuuauauacacagu

SEQ ID NO: 4057226 - RNA, 18 nt, Vaccinia virus
ucuuaugcauguuucaua

SEQ ID NO: 4057227 - RNA, 22 nt, Vaccinia virus
ucuucaaaguuucugaaauaag

SEQ ID NO: 4057228 - RNA, 20 nt, Vaccinia virus
ucuucaguucuaucuucuaa

SEQ ID NO: 4057229 - RNA, 14 nt, Vaccinia virus
ucuuccuacuaucu

SEQ ID NO: 4057230 - RNA, 16 nt, Vaccinia virus
ucuucggauauucuaa

SEQ ID NO: 4057231 - RNA, 19 nt, Vaccinia virus
ucuucguacgauccaaauu

SEQ ID NO: 4057232 - RNA, 13 nt, Vaccinia virus
ucuucuacaucuu

SEQ ID NO: 4057233 - RNA, 16 nt, Vaccinia virus
ucuucuacuauugcaa

SEQ ID NO: 4057234 - RNA, 14 nt, Vaccinia virus
ucuucuauuucuaa

SEQ ID NO: 4057235 - RNA, 13 nt, Vaccinia virus
ucuucucaaaaga

SEQ ID NO: 4057236 - RNA, 23 nt, Vaccinia virus
ucuucucguaggcgaaugauucc

SEQ ID NO: 4057237 - RNA, 14 nt, Vaccinia virus
ucuucuuauuuaga

SEQ ID NO: 4057238 - RNA, 14 nt, Vaccinia virus
ucuucuucuacauu

SEQ ID NO: 4057239 - RNA, 22 nt, Vaccinia virus
ucuugaggguuguguuaaauug

SEQ ID NO: 4057240 - RNA, 17 nt, Vaccinia virus
ucuugauacuauccagu

SEQ ID NO: 4057241 - RNA, 23 nt, Vaccinia virus
ucuugauuaccuggcucauugau

SEQ ID NO: 4057242 - RNA, 15 nt, Vaccinia virus
ucuuguaucauauau

SEQ ID NO: 4057243 - RNA, 15 nt, Vaccinia virus
ucuuguucaauggau

SEQ ID NO: 4057244 - RNA, 21 nt, Vaccinia virus
ucuuuaaacgauauucuugaa

SEQ ID NO: 4057245 - RNA, 15 nt, Vaccinia virus
ucuuuaacaaauucu

SEQ ID NO: 4057246 - RNA, 15 nt, Vaccinia virus
ucuuuaauacagaug

SEQ ID NO: 4057247 - RNA, 17 nt, Vaccinia virus
ucuuuaauagugucauu

SEQ ID NO: 4057248 - RNA, 21 nt, Vaccinia virus
ucuuuacaguuucuguaauga

SEQ ID NO: 4057249 - RNA, 22 nt, Vaccinia virus
ucuuuacaguuucuguaaugau

SEQ ID NO: 4057250 - RNA, 23 nt, Vaccinia virus
ucuuuaugacaucgccuacaaau

SEQ ID NO: 4057251 - RNA, 14 nt, Vaccinia virus
ucuuucaggaaagc

SEQ ID NO: 4057252 - RNA, 14 nt, Vaccinia virus
ucuuucguacaucu

SEQ ID NO: 4057253 - RNA, 17 nt, Vaccinia virus
ucuuucuaauacuauau

SEQ ID NO: 4057254 - RNA, 20 nt, Vaccinia virus
ucuuugaccaacgauuuaga

SEQ ID NO: 4057255 - RNA, 20 nt, Vaccinia virus
ucuuuggcucuucuaucaac

SEQ ID NO: 4057256 - RNA, 20 nt, Vaccinia virus
ucuuuguccauuauuucuau

SEQ ID NO: 4057257 - RNA, 20 nt, Vaccinia virus
ucuuuguugaacguuucaaa

SEQ ID NO: 4057258 - RNA, 19 nt, Vaccinia virus
ucuuuuucuacgucaaaau

SEQ ID NO: 4057259 - RNA, 14 nt, Vaccinia virus
ucuuuuuuacacau

SEQ ID NO: 4057260 - RNA, 15 nt, Vaccinia virus
ugaaaaaaauacuua

SEQ ID NO: 4057261 - RNA, 21 nt, Vaccinia virus
ugaaaacuaaaugguauacac

SEQ ID NO: 4057262 - RNA, 20 nt, Vaccinia virus
ugaaaaguucuaugaaaaac

SEQ ID NO: 4057263 - RNA, 22 nt, Vaccinia virus
ugaaaauggacguagaacaaga

SEQ ID NO: 4057264 - RNA, 14 nt, Vaccinia virus
ugaaacgaacacua

SEQ ID NO: 4057265 - RNA, 21 nt, Vaccinia virus
ugaaacgugucacaacuuauc

SEQ ID NO: 4057266 - RNA, 21 nt, Vaccinia virus
ugaaauagcguucgucaacau

SEQ ID NO: 4057267 - RNA, 19 nt, Vaccinia virus
ugaaaucaguggaguagua

SEQ ID NO: 4057268 - RNA, 20 nt, Vaccinia virus
ugaaaugauucucucaacau

SEQ ID NO: 4057269 - RNA, 13 nt, Vaccinia virus
ugaaauuaaucau

SEQ ID NO: 4057270 - RNA, 19 nt, Vaccinia virus
ugaacacacgaugaaaaug

SEQ ID NO: 4057271 - RNA, 13 nt, Vaccinia virus
ugaaccaaacauu

SEQ ID NO: 4057272 - RNA, 14 nt, Vaccinia virus
ugaacuuuaucuag

SEQ ID NO: 4057273 - RNA, 15 nt, Vaccinia virus
ugaagaaaguaauua

SEQ ID NO: 4057274 - RNA, 11 nt, Vaccinia virus
ugaagaaauga

SEQ ID NO: 4057275 - RNA, 21 nt, Vaccinia virus
ugaagaauuuauauaaaucau

SEQ ID NO: 4057276 - RNA, 21 nt, Vaccinia virus
ugaagauggauucauccuuaa

SEQ ID NO: 4057277 - RNA, 15 nt, Vaccinia virus
ugaagcauuggaagc

SEQ ID NO: 4057278 - RNA, 20 nt, Vaccinia virus
ugaagcauuggaagcaacua

SEQ ID NO: 4057279 - RNA, 22 nt, Vaccinia virus
ugaagcugguaaaguaaaucau

SEQ ID NO: 4057280 - RNA, 19 nt, Vaccinia virus
ugaauaaucagauuuaccc

SEQ ID NO: 4057281 - RNA, 12 nt, Vaccinia virus
ugaauaauguac

SEQ ID NO: 4057282 - RNA, 13 nt, Vaccinia virus
ugaauaauguacu

SEQ ID NO: 4057283 - RNA, 22 nt, Vaccinia virus
ugaauagcaaaaucuuuacuau

SEQ ID NO: 4057284 - RNA, 17 nt, Vaccinia virus
ugaauauaaaauaacua

SEQ ID NO: 4057285 - RNA, 16 nt, Vaccinia virus
ugaauauccagaugga

SEQ ID NO: 4057286 - RNA, 15 nt, Vaccinia virus
ugaauaucuacaaau

SEQ ID NO: 4057287 - RNA, 23 nt, Vaccinia virus
ugaauaucugcaauauauauuca

SEQ ID NO: 4057288 - RNA, 14 nt, Vaccinia virus
ugaauauuaaacaa

SEQ ID NO: 4057289 - RNA, 14 nt, Vaccinia virus
ugaaucaaauguaa

SEQ ID NO: 4057290 - RNA, 17 nt, Vaccinia virus
ugaaucuaaacuagugg

SEQ ID NO: 4057291 - RNA, 22 nt, Vaccinia virus
ugaaugaaggauuugaaucauc

SEQ ID NO: 4057292 - RNA, 21 nt, Vaccinia virus
ugaaugggaauuucuauguca

SEQ ID NO: 4057293 - RNA, 14 nt, Vaccinia virus
ugaauguauucacu

SEQ ID NO: 4057294 - RNA, 17 nt, Vaccinia virus
ugaauguucucaagaac

SEQ ID NO: 4057295 - RNA, 13 nt, Vaccinia virus
ugaauguuuucaa

SEQ ID NO: 4057296 - RNA, 16 nt, Vaccinia virus
ugaauucucauuuugc

SEQ ID NO: 4057297 - RNA, 18 nt, Vaccinia virus
ugaauucucauuuugcau

SEQ ID NO: 4057298 - RNA, 19 nt, Vaccinia virus
ugaauugaugaguuguaca

SEQ ID NO: 4057299 - RNA, 19 nt, Vaccinia virus
ugaauuuauaucuaagaua

SEQ ID NO: 4057300 - RNA, 13 nt, Vaccinia virus
ugacaauacugua

SEQ ID NO: 4057301 - RNA, 21 nt, Vaccinia virus
ugacaauauuauuaugaagac

SEQ ID NO: 4057302 - RNA, 16 nt, Vaccinia virus
ugacagcacagggagc

SEQ ID NO: 4057303 - RNA, 17 nt, Vaccinia virus
ugacauaauuacauaua

SEQ ID NO: 4057304 - RNA, 17 nt, Vaccinia virus
ugacaucauacuagaua

SEQ ID NO: 4057305 - RNA, 16 nt, Vaccinia virus
ugacaucgccuacaaa

SEQ ID NO: 4057306 - RNA, 15 nt, Vaccinia virus
ugacauuuuccuugu

SEQ ID NO: 4057307 - RNA, 14 nt, Vaccinia virus
ugacauuuuggauu

SEQ ID NO: 4057308 - RNA, 19 nt, Vaccinia virus
ugacauuuuggauucuguu

SEQ ID NO: 4057309 - RNA, 13 nt, Vaccinia virus
ugaccaacucauc

SEQ ID NO: 4057310 - RNA, 12 nt, Vaccinia virus
ugacgaagagac

SEQ ID NO: 4057311 - RNA, 21 nt, Vaccinia virus
ugacgacaauaacaaaaucac

SEQ ID NO: 4057312 - RNA, 16 nt, Vaccinia virus
ugacgacgaugauuga

SEQ ID NO: 4057313 - RNA, 23 nt, Vaccinia virus
ugacgaugaaaaugaugguacau

SEQ ID NO: 4057314 - RNA, 20 nt, Vaccinia virus
ugacgcauuuaauagagaua

SEQ ID NO: 4057315 - RNA, 21 nt, Vaccinia virus
ugacgcguuuccuacauaaca

SEQ ID NO: 4057316 - RNA, 13 nt, Vaccinia virus
ugacgcuguaaaa

SEQ ID NO: 4057317 - RNA, 19 nt, Vaccinia virus
ugacucgcaacaauuguag

SEQ ID NO: 4057318 - RNA, 16 nt, Vaccinia virus
ugacuggaguguauau

SEQ ID NO: 4057319 - RNA, 11 nt, Vaccinia virus
ugacuuucaaa

SEQ ID NO: 4057320 - RNA, 23 nt, Vaccinia virus
ugagaauccgcuacauauuauug

SEQ ID NO: 4057321 - RNA, 16 nt, Vaccinia virus
ugagacgauguaucca

SEQ ID NO: 4057322 - RNA, 23 nt, Vaccinia virus
ugagauuuguuuuguuaaacaau

SEQ ID NO: 4057323 - RNA, 17 nt, Vaccinia virus
ugagcaaagauuguucu

SEQ ID NO: 4057324 - RNA, 15 nt, Vaccinia virus
ugagcaauucccaag

SEQ ID NO: 4057325 - RNA, 20 nt, Vaccinia virus
uggaauccaauuguuugaua

SEQ ID NO: 4057326 - RNA, 21 nt, Vaccinia virus
uggaauucaguuggaauauug

SEQ ID NO: 4057327 - RNA, 14 nt, Vaccinia virus
uggacaacauuaau

SEQ ID NO: 4057328 - RNA, 19 nt, Vaccinia virus
uggacgacgguaagaauga

SEQ ID NO: 4057329 - RNA, 20 nt, Vaccinia virus
uggaggaauuuauagaugcu

SEQ ID NO: 4057330 - RNA, 16 nt, Vaccinia virus
uggaguaccaguuuca

SEQ ID NO: 4057331 - RNA, 14 nt, Vaccinia virus
cuauaguuaauuga

SEQ ID NO: 4057332 - RNA, 17 nt, Vaccinia virus
cuauaguuuuauugcuu

SEQ ID NO: 4057333 - RNA, 20 nt, Vaccinia virus
cuauauauaccuuuccagua

SEQ ID NO: 4057334 - RNA, 16 nt, Vaccinia virus
cuauaucaaugccuuu

SEQ ID NO: 4057335 - RNA, 20 nt, Vaccinia virus
cuauauuuguuccuguagau

SEQ ID NO: 4057336 - RNA, 19 nt, Vaccinia virus
cuaucaaaauauguagaaa

SEQ ID NO: 4057337 - RNA, 23 nt, Vaccinia virus
cuaucgaaaauugcuauuucaga

SEQ ID NO: 4057338 - RNA, 21 nt, Vaccinia virus
cuaucgaugauagcacuguua

SEQ ID NO: 4057339 - RNA, 19 nt, Vaccinia virus
cuaucuaugcgguagauag

SEQ ID NO: 4057340 - RNA, 14 nt, Vaccinia virus
cuaucucuguaaac

SEQ ID NO: 4057341 - RNA, 17 nt, Vaccinia virus
cuaugacuucaucaucu

SEQ ID NO: 4057342 - RNA, 15 nt, Vaccinia virus
cuaugguacaaguug

SEQ ID NO: 4057343 - RNA, 17 nt, Vaccinia virus
cuaugucucuuauuaga

SEQ ID NO: 4057344 - RNA, 17 nt, Vaccinia virus
cuauguuccucguuucc

SEQ ID NO: 4057345 - RNA, 14 nt, Vaccinia virus
cuauguuguuuaug

SEQ ID NO: 4057346 - RNA, 21 nt, Vaccinia virus
cuauguuuccccuauaaucuu

SEQ ID NO: 4057347 - RNA, 16 nt, Vaccinia virus
cuauuaagaguaacag

SEQ ID NO: 4057348 - RNA, 15 nt, Vaccinia virus
cuauuaauaauuacu

SEQ ID NO: 4057349 - RNA, 17 nt, Vaccinia virus
cuauuagaauuuacaaa

SEQ ID NO: 4057350 - RNA, 16 nt, Vaccinia virus
cuauuaucaaauacug

SEQ ID NO: 4057351 - RNA, 16 nt, Vaccinia virus
gaaccaauuacugaua

SEQ ID NO: 4057352 - RNA, 17 nt, Vaccinia virus
gaaccagauaguuuaua

SEQ ID NO: 4057353 - RNA, 18 nt, Vaccinia virus
gaaccaguaacauaugau

SEQ ID NO: 4057354 - RNA, 15 nt, Vaccinia virus
gaaccauuacaaaua

SEQ ID NO: 4057355 - RNA, 14 nt, Vaccinia virus
gaacgauaaacaaa

SEQ ID NO: 4057356 - RNA, 17 nt, Vaccinia virus
gaacgaugucaaaauau

SEQ ID NO: 4057357 - RNA, 13 nt, Vaccinia virus
gaacgccauaaua

SEQ ID NO: 4057358 - RNA, 17 nt, Vaccinia virus
gaacguaaauuaguuca

SEQ ID NO: 4057359 - RNA, 13 nt, Vaccinia virus
gaacuaagagaaa

SEQ ID NO: 4057360 - RNA, 13 nt, Vaccinia virus
gaacuaauaugau

SEQ ID NO: 4057361 - RNA, 17 nt, Vaccinia virus
gaacuagauauauuaau

SEQ ID NO: 4057362 - RNA, 19 nt, Vaccinia virus
gaacuauaaaacuacuaca

SEQ ID NO: 4057363 - RNA, 14 nt, Vaccinia virus
gaacucauguagca

SEQ ID NO: 4057364 - RNA, 16 nt, Vaccinia virus
gaacucgauacuaucg

SEQ ID NO: 4057365 - RNA, 16 nt, Vaccinia virus
gaacucuuugauuuug

SEQ ID NO: 4057366 - RNA, 18 nt, Vaccinia virus
gaacuggaccguauaucu

SEQ ID NO: 4057367 - RNA, 18 nt, Vaccinia virus
gaagaacgguagaaacua

SEQ ID NO: 4057368 - RNA, 22 nt, Vaccinia virus
gaagaacguguauuaaauagaa

SEQ ID NO: 4057369 - RNA, 23 nt, Vaccinia virus
gaagaauggaaaccuuuaaucua

SEQ ID NO: 4057370 - RNA, 17 nt, Vaccinia virus
gaagaauuaauaaacaa

SEQ ID NO: 4057371 - RNA, 14 nt, Vaccinia virus
gaagaauuucuguu

SEQ ID NO: 4057372 - RNA, 14 nt, Vaccinia virus
gaagacuccuggua

SEQ ID NO: 4057373 - RNA, 22 nt, Vaccinia virus
gaagagacgccucguuccaagu

SEQ ID NO: 4057374 - RNA, 15 nt, Vaccinia virus
gaagagauguuauau

SEQ ID NO: 4057375 - RNA, 22 nt, Vaccinia virus
gaagagauuccugacuuugcau

SEQ ID NO: 4057376 - RNA, 16 nt, Vaccinia virus
gaagaugcgcauucca

SEQ ID NO: 4057377 - RNA, 16 nt, Vaccinia virus
gaagauguuagaaaaa

SEQ ID NO: 4057378 - RNA, 20 nt, Vaccinia virus
gaagauuuaacuagauuaua

SEQ ID NO: 4057379 - RNA, 13 nt, Vaccinia virus
gaaggaauucuuu

SEQ ID NO: 4057380 - RNA, 18 nt, Vaccinia virus
gaaggagacggauacugu

SEQ ID NO: 4057381 - RNA, 21 nt, Vaccinia virus
gaaggauuggucuuaaaagau

SEQ ID NO: 4057382 - RNA, 16 nt, Vaccinia virus
gaaguggauauacaua

SEQ ID NO: 4057383 - RNA, 19 nt, Vaccinia virus
gcuauugaaacugacggau

SEQ ID NO: 4057384 - RNA, 14 nt, Vaccinia virus
gcuauuuugacaua

SEQ ID NO: 4057385 - RNA, 16 nt, Vaccinia virus
gcucaaacaaaaugug

SEQ ID NO: 4057386 - RNA, 19 nt, Vaccinia virus
gcucuaccgcaguuagcca

SEQ ID NO: 4057387 - RNA, 16 nt, Vaccinia virus
gcugaaugaucuuuuu

SEQ ID NO: 4057388 - RNA, 23 nt, Vaccinia virus
gcugaauguaucuuccacaucaa

SEQ ID NO: 4057389 - RNA, 21 nt, Vaccinia virus
gcugagaauaucuuuauucau

SEQ ID NO: 4057390 - RNA, 16 nt, Vaccinia virus
gcugaggguguuagaa

SEQ ID NO: 4057391 - RNA, 15 nt, Vaccinia virus
gcugcagcauauaac

SEQ ID NO: 4057392 - RNA, 14 nt, Vaccinia virus
gcugguaaaguaaa

SEQ ID NO: 4057393 - RNA, 12 nt, Vaccinia virus
gcuguaaacaag

SEQ ID NO: 4057394 - RNA, 19 nt, Vaccinia virus
gcuguggaguuauaugaau

SEQ ID NO: 4057395 - RNA, 12 nt, Vaccinia virus
gcuguucaaaau

SEQ ID NO: 4057396 - RNA, 19 nt, Vaccinia virus
gcuguuccucuguaaauaa

SEQ ID NO: 4057397 - RNA, 16 nt, Vaccinia virus
gcuuagaaauaaacga

SEQ ID NO: 4057398 - RNA, 20 nt, Vaccinia virus
gcuuagcuaauccugauauu

SEQ ID NO: 4057399 - RNA, 23 nt, Vaccinia virus
gcuucaaucgcgcguuagaaauu

SEQ ID NO: 4057400 - RNA, 22 nt, Vaccinia virus
gcuuccagauacagugauuuug

SEQ ID NO: 4057401 - RNA, 18 nt, Vaccinia virus
gcuucuaucuuguuuaga

SEQ ID NO: 4057402 - RNA, 23 nt, Vaccinia virus
gcuucuuaaaucagaauguuaca

SEQ ID NO: 4057403 - RNA, 18 nt, Vaccinia virus
gcuugauaauuagauaua

SEQ ID NO: 4057404 - RNA, 14 nt, Vaccinia virus
gcuuuucucuuuua

SEQ ID NO: 4057405 - RNA, 15 nt, Vaccinia virus
gcuuuucucuuuuaa

SEQ ID NO: 4057406 - RNA, 22 nt, Vaccinia virus
gcuuuugcgaucaauaaaugga

SEQ ID NO: 4057407 - RNA, 11 nt, Vaccinia virus
ggaaaaagcuc

SEQ ID NO: 4057408 - RNA, 19 nt, Vaccinia virus
ggaaaaaguguugaagaua

SEQ ID NO: 4057409 - RNA, 12 nt, Vaccinia virus
ggaaaaaugaug

SEQ ID NO: 4057410 - RNA, 21 nt, Vaccinia virus
ggaaaaauuauaauguuuccu

SEQ ID NO: 4057411 - RNA, 16 nt, Vaccinia virus
ggaaacuuucuagaac

SEQ ID NO: 4057412 - RNA, 17 nt, Vaccinia virus
ggaaaguucaaaaaguc

SEQ ID NO: 4057413 - RNA, 18 nt, Vaccinia virus
ggaaauuuaugaagaugu

SEQ ID NO: 4057414 - RNA, 16 nt, Vaccinia virus
ggaaccucgagaaugu

SEQ ID NO: 4057415 - RNA, 18 nt, Vaccinia virus
ggaacgugauaguuucuc

SEQ ID NO: 4057416 - RNA, 14 nt, Vaccinia virus
ggaagaguaggaag

SEQ ID NO: 4057417 - RNA, 18 nt, Vaccinia virus
ggaauaaauuauuaucca

SEQ ID NO: 4057418 - RNA, 14 nt, Vaccinia virus
ggaauuguauuuuc

SEQ ID NO: 4057419 - RNA, 23 nt, Vaccinia virus
ggagaauacaaagcguacagaua

SEQ ID NO: 4057420 - RNA, 12 nt, Vaccinia virus
ggagaauguuuc

SEQ ID NO: 4057421 - RNA, 22 nt, Vaccinia virus
ggagauuauagcaauaugugua

SEQ ID NO: 4057422 - RNA, 15 nt, Vaccinia virus
ggaguaaauauacaa

SEQ ID NO: 4057423 - RNA, 14 nt, Vaccinia virus
ggaguuauaugaau

SEQ ID NO: 4057424 - RNA, 16 nt, Vaccinia virus
ggauaaccuagaaaau

SEQ ID NO: 4057425 - RNA, 18 nt, Vaccinia virus
ggauaccaguuuggaaac

SEQ ID NO: 4057426 - RNA, 16 nt, Vaccinia virus
ggaucuaguauuauug

SEQ ID NO: 4057427 - RNA, 16 nt, Vaccinia virus
ggaucuccuauuucuu

SEQ ID NO: 4057428 - RNA, 19 nt, Vaccinia virus
ggaucugacucggacucug

SEQ ID NO: 4057429 - RNA, 22 nt, Vaccinia virus
ggaugaccauauauuuauuuuc

SEQ ID NO: 4057430 - RNA, 13 nt, Vaccinia virus
ggaugccacugcu

SEQ ID NO: 4057431 - RNA, 22 nt, Vaccinia virus
ggaugucaucaauguagaaaau

SEQ ID NO: 4057432 - RNA, 13 nt, Vaccinia virus
ggauuaacagguu

SEQ ID NO: 4057433 - RNA, 19 nt, Vaccinia virus
cuauuaucuccguuauaga

SEQ ID NO: 4057434 - RNA, 23 nt, Vaccinia virus
cuauuauguuaacggaaaguauu

SEQ ID NO: 4057435 - RNA, 18 nt, Vaccinia virus
cuauugauugaguacugu

SEQ ID NO: 4057436 - RNA, 16 nt, Vaccinia virus
cuauuggcaauuguag

SEQ ID NO: 4057437 - RNA, 14 nt, Vaccinia virus
cuauuucguccaua

SEQ ID NO: 4057438 - RNA, 16 nt, Vaccinia virus
cuauuuguauaauaau

SEQ ID NO: 4057439 - RNA, 13 nt, Vaccinia virus
cuauuuuaauagg

SEQ ID NO: 4057440 - RNA, 15 nt, Vaccinia virus
cuauuuuaucauuuu

SEQ ID NO: 4057441 - RNA, 19 nt, Vaccinia virus
cuauuuucgcuccaaaugu

SEQ ID NO: 4057442 - RNA, 15 nt, Vaccinia virus
cuauuuuuacaguac

SEQ ID NO: 4057443 - RNA, 19 nt, Vaccinia virus
cucaaucacuacaucuuua

SEQ ID NO: 4057444 - RNA, 15 nt, Vaccinia virus
cucaauuaguuuauu

SEQ ID NO: 4057445 - RNA, 17 nt, Vaccinia virus
cucacauccuuuauuuu

SEQ ID NO: 4057446 - RNA, 11 nt, Vaccinia virus
cucacauuuca

SEQ ID NO: 4057447 - RNA, 22 nt, Vaccinia virus
cucagauucaguuucucaucuu

SEQ ID NO: 4057448 - RNA, 21 nt, Vaccinia virus
cucagucaauauauuaagaag

SEQ ID NO: 4057449 - RNA, 21 nt, Vaccinia virus
cucauaagaugauaaaaagug

SEQ ID NO: 4057450 - RNA, 20 nt, Vaccinia virus
cucauagaccuguaguuuua

SEQ ID NO: 4057451 - RNA, 18 nt, Vaccinia virus
cucauauaacuucuagau

SEQ ID NO: 4057452 - RNA, 14 nt, Vaccinia virus
cucauuaaaaauuu

SEQ ID NO: 4057453 - RNA, 16 nt, Vaccinia virus
cucauuaaaacuucua

SEQ ID NO: 4057454 - RNA, 21 nt, Vaccinia virus
cucauuacauaguugauaaaa

SEQ ID NO: 4057455 - RNA, 15 nt, Vaccinia virus
cucauuuucucuuuc

SEQ ID NO: 4057456 - RNA, 16 nt, Vaccinia virus
cuccaaguucuauagu

SEQ ID NO: 4057457 - RNA, 14 nt, Vaccinia virus
cuccaaucaugugu

SEQ ID NO: 4057458 - RNA, 18 nt, Vaccinia virus
cuccacaguuuuuaauuu

SEQ ID NO: 4057459 - RNA, 23 nt, Vaccinia virus
cucccauggaaugacccaauaag

SEQ ID NO: 4057460 - RNA, 12 nt, Vaccinia virus
cucccuuuagau

SEQ ID NO: 4057461 - RNA, 20 nt, Vaccinia virus
cuccuacaggaauaucuuua

SEQ ID NO: 4057462 - RNA, 15 nt, Vaccinia virus
cuccucauauggauc

SEQ ID NO: 4057463 - RNA, 17 nt, Vaccinia virus
cucguaagauaaaguuu

SEQ ID NO: 4057464 - RNA, 12 nt, Vaccinia virus
cucguucaucua

SEQ ID NO: 4057465 - RNA, 11 nt, Vaccinia virus
cucuaaaugag

SEQ ID NO: 4057466 - RNA, 12 nt, Vaccinia virus
cucuaaaugagu

SEQ ID NO: 4057467 - RNA, 21 nt, Vaccinia virus
cucuaaaugagucuacugcua

SEQ ID NO: 4057468 - RNA, 22 nt, Vaccinia virus
cucuagguaacaaacaaacucu

SEQ ID NO: 4057469 - RNA, 15 nt, Vaccinia virus
cucuauaaaaaugaa

SEQ ID NO: 4057470 - RNA, 14 nt, Vaccinia virus
cucuauauuacaaa

SEQ ID NO: 4057471 - RNA, 17 nt, Vaccinia virus
cucuauucgaaaacucu

SEQ ID NO: 4057472 - RNA, 18 nt, Vaccinia virus
cucuauuucuuaaugaau

SEQ ID NO: 4057473 - RNA, 22 nt, Vaccinia virus
cucucgaaagacguuguacaau

SEQ ID NO: 4057474 - RNA, 14 nt, Vaccinia virus
cucugaaucucugu

SEQ ID NO: 4057475 - RNA, 19 nt, Vaccinia virus
cucugauagcaguuucaau

SEQ ID NO: 4057476 - RNA, 17 nt, Vaccinia virus
cucuuccgucaccaaaa

SEQ ID NO: 4057477 - RNA, 18 nt, Vaccinia virus
cucuuuaacgaaauuaaa

SEQ ID NO: 4057478 - RNA, 17 nt, Vaccinia virus
cucuuucgcuauuucua

SEQ ID NO: 4057479 - RNA, 13 nt, Vaccinia virus
cucuuucuccuuc

SEQ ID NO: 4057480 - RNA, 14 nt, Vaccinia virus
cucuuucuccuuuc

SEQ ID NO: 4057481 - RNA, 15 nt, Vaccinia virus
cugaaaaagauauca

SEQ ID NO: 4057482 - RNA, 20 nt, Vaccinia virus
cugaaaaagauaucagagaa

SEQ ID NO: 4057483 - RNA, 16 nt, Vaccinia virus
cugaaaagaaaguauc

SEQ ID NO: 4057484 - RNA, 17 nt, Vaccinia virus
cugaaacaguaugauuu

SEQ ID NO: 4057485 - RNA, 16 nt, Vaccinia virus
cugaaauaauuagaac

SEQ ID NO: 4057486 - RNA, 23 nt, Vaccinia virus
cugaacacgauguuuauggaguu

SEQ ID NO: 4057487 - RNA, 19 nt, Vaccinia virus
cugaacuugaggucaagga

SEQ ID NO: 4057488 - RNA, 21 nt, Vaccinia virus
cugaagauuguugaaauugua

SEQ ID NO: 4057489 - RNA, 14 nt, Vaccinia virus
cugaauaaaacauc

SEQ ID NO: 4057490 - RNA, 16 nt, Vaccinia virus
cugaauauauugauuu

SEQ ID NO: 4057491 - RNA, 14 nt, Vaccinia virus
cugacauucagaaa

SEQ ID NO: 4057492 - RNA, 18 nt, Vaccinia virus
cugacuagcaaauccagc

SEQ ID NO: 4057493 - RNA, 15 nt, Vaccinia virus
cugacucauggauuc

SEQ ID NO: 4057494 - RNA, 21 nt, Vaccinia virus
cugauaagauaucuucucaaa

SEQ ID NO: 4057495 - RNA, 17 nt, Vaccinia virus
cugauagcaguuucaau

SEQ ID NO: 4057496 - RNA, 20 nt, Vaccinia virus
cugauaucauuaaugauaua

SEQ ID NO: 4057497 - RNA, 13 nt, Vaccinia virus
cugaugaaacauu

SEQ ID NO: 4057498 - RNA, 14 nt, Vaccinia virus
cugaugaaacauuu

SEQ ID NO: 4057499 - RNA, 17 nt, Vaccinia virus
cugauuauuuacuauaa

SEQ ID NO: 4057500 - RNA, 20 nt, Vaccinia virus
cugauuuauguuuuaaauau

SEQ ID NO: 4057501 - RNA, 14 nt, Vaccinia virus
cugcaauauauauu

SEQ ID NO: 4057502 - RNA, 15 nt, Vaccinia virus
cugcagcauuuugag

SEQ ID NO: 4057503 - RNA, 18 nt, Vaccinia virus
cugcgacggagcauuuuc

SEQ ID NO: 4057504 - RNA, 21 nt, Vaccinia virus
cugcggauauaaagucaucgu

SEQ ID NO: 4057505 - RNA, 23 nt, Vaccinia virus
cugcuggaaaauaaaucacugac

SEQ ID NO: 4057506 - RNA, 19 nt, Vaccinia virus
cuggaauuaguuagauaua

SEQ ID NO: 4057507 - RNA, 17 nt, Vaccinia virus
cuggaggagauggauua

SEQ ID NO: 4057508 - RNA, 13 nt, Vaccinia virus
cuggauauguuuu

SEQ ID NO: 4057509 - RNA, 14 nt, Vaccinia virus
cuggcauuaucuau

SEQ ID NO: 4057510 - RNA, 18 nt, Vaccinia virus
cuggggauggucuauaca

SEQ ID NO: 4057511 - RNA, 17 nt, Vaccinia virus
cugggguaaaguaagua

SEQ ID NO: 4057512 - RNA, 22 nt, Vaccinia virus
cugguagagaaugauauagaaa

SEQ ID NO: 4057513 - RNA, 18 nt, Vaccinia virus
cuggucuaaaauuuccau

SEQ ID NO: 4057514 - RNA, 20 nt, Vaccinia virus
cuggugauuggguagaagua

SEQ ID NO: 4057515 - RNA, 15 nt, Vaccinia virus
cuguaaagaacagug

SEQ ID NO: 4057516 - RNA, 15 nt, Vaccinia virus
cuguaaguauguuua

SEQ ID NO: 4057517 - RNA, 17 nt, Vaccinia virus
cuguacaccauagcacu

SEQ ID NO: 4057518 - RNA, 17 nt, Vaccinia virus
cuguaccaaagucauca

SEQ ID NO: 4057519 - RNA, 19 nt, Vaccinia virus
cuguagaaugcgaaggaag

SEQ ID NO: 4057520 - RNA, 17 nt, Vaccinia virus
cuguauguacaacagug

SEQ ID NO: 4057521 - RNA, 14 nt, Vaccinia virus
cugucaauaagaca

SEQ ID NO: 4057522 - RNA, 13 nt, Vaccinia virus
cugucuaaaugua

SEQ ID NO: 4057523 - RNA, 12 nt, Vaccinia virus
cugucugcuggc

SEQ ID NO: 4057524 - RNA, 19 nt, Vaccinia virus
cuguguaaagaaaugguaa

SEQ ID NO: 4057525 - RNA, 13 nt, Vaccinia virus
cuguuauuuugaa

SEQ ID NO: 4057526 - RNA, 15 nt, Vaccinia virus
cuguucauaaauaaa

SEQ ID NO: 4057527 - RNA, 16 nt, Vaccinia virus
cuguucuccguguggu

SEQ ID NO: 4057528 - RNA, 15 nt, Vaccinia virus
cuguugaaguacuua

SEQ ID NO: 4057529 - RNA, 23 nt, Vaccinia virus
cuguuguauaugaucauuuugau

SEQ ID NO: 4057530 - RNA, 18 nt, Vaccinia virus
cuguuuuaacaucuuuuu

SEQ ID NO: 4057531 - RNA, 18 nt, Vaccinia virus
cuguuuucucaucacuua

SEQ ID NO: 4057532 - RNA, 17 nt, Vaccinia virus
cuuaaaaacuauaccau

SEQ ID NO: 4057533 - RNA, 20 nt, Vaccinia virus
cuuaaaauuuaaaaugauau

SEQ ID NO: 4057534 - RNA, 15 nt, Vaccinia virus
cuuaaauauuucuac

SEQ ID NO: 4057535 - RNA, 20 nt, Vaccinia virus
cuuaaauguaucuuuacuag

SEQ ID NO: 4057536 - RNA, 14 nt, Vaccinia virus
cuuaacaaaaauua

SEQ ID NO: 4057537 - RNA, 19 nt, Vaccinia virus
cuuaacaguuccacaaauu

SEQ ID NO: 4057538 - RNA, 19 nt, Vaccinia virus
cuuaacaugagacauaaau

SEQ ID NO: 4057539 - RNA, 23 nt, Vaccinia virus
cuuaacgaaagaaguuguaucau

SEQ ID NO: 4057540 - RNA, 15 nt, Vaccinia virus
cuuaacuuguaauaa

SEQ ID NO: 4057541 - RNA, 17 nt, Vaccinia virus
cuuaacuuguaauaauu

SEQ ID NO: 4057542 - RNA, 18 nt, Vaccinia virus
cuuaauacagauugcacu

SEQ ID NO: 4057543 - RNA, 14 nt, Vaccinia virus
cuuaauuauaacga

SEQ ID NO: 4057544 - RNA, 16 nt, Vaccinia virus
cuuacaaauauucaca

SEQ ID NO: 4057545 - RNA, 12 nt, Vaccinia virus
cuuacaauaaac

SEQ ID NO: 4057546 - RNA, 21 nt, Vaccinia virus
cuuacaauccguguuauuuua

SEQ ID NO: 4057547 - RNA, 16 nt, Vaccinia virus
cuuaccuucaacagua

SEQ ID NO: 4057548 - RNA, 21 nt, Vaccinia virus
cuuauaaaacuauauuuggaa

SEQ ID NO: 4057549 - RNA, 22 nt, Vaccinia virus
cuuauauaccgccucaaacucu

SEQ ID NO: 4057550 - RNA, 13 nt, Vaccinia virus
cuuaucaauaaca

SEQ ID NO: 4057551 - RNA, 13 nt, Vaccinia virus
cuuaucgacaucu

SEQ ID NO: 4057552 - RNA, 16 nt, Vaccinia virus
cuuauguaugugcauu

SEQ ID NO: 4057553 - RNA, 18 nt, Vaccinia virus
cuuauuccauuaucugaa

SEQ ID NO: 4057554 - RNA, 22 nt, Vaccinia virus
cuuauucuuuguauuuuggcau

SEQ ID NO: 4057555 - RNA, 22 nt, Vaccinia virus
cuuauugaguggaaaguucaaa

SEQ ID NO: 4057556 - RNA, 22 nt, Vaccinia virus
cuuauuggucagaaauauugua

SEQ ID NO: 4057557 - RNA, 19 nt, Vaccinia virus
cuucagacaacaucucaga

SEQ ID NO: 4057558 - RNA, 23 nt, Vaccinia virus
cuucagacagccaaucaaaaaga

SEQ ID NO: 4057559 - RNA, 21 nt, Vaccinia virus
cuucaucggcuuuaacaauug

SEQ ID NO: 4057560 - RNA, 20 nt, Vaccinia virus
caaaaauuuuuuauuucagc

SEQ ID NO: 4057561 - RNA, 22 nt, Vaccinia virus
caaaacguaaucauagaugaau

SEQ ID NO: 4057562 - RNA, 15 nt, Vaccinia virus
caaaacuauuucaga

SEQ ID NO: 4057563 - RNA, 15 nt, Vaccinia virus
caaaacugaaaauau

SEQ ID NO: 4057564 - RNA, 22 nt, Vaccinia virus
caaaagacuaugggaauauauu

SEQ ID NO: 4057565 - RNA, 23 nt, Vaccinia virus
caaaaggacguagacaauacuuu

SEQ ID NO: 4057566 - RNA, 14 nt, Vaccinia virus
caaaaguccaugau

SEQ ID NO: 4057567 - RNA, 16 nt, Vaccinia virus
caaaaguccaugauca

SEQ ID NO: 4057568 - RNA, 14 nt, Vaccinia virus
caaaauacauaauu

SEQ ID NO: 4057569 - RNA, 19 nt, Vaccinia virus
caaaauauguuucaaucau

SEQ ID NO: 4057570 - RNA, 15 nt, Vaccinia virus
caauuucauaaugag

SEQ ID NO: 4057571 - RNA, 23 nt, Vaccinia virus
caauuugcuucagcggauccugu

SEQ ID NO: 4057572 - RNA, 18 nt, Vaccinia virus
caauuuuaacagauguau

SEQ ID NO: 4057573 - RNA, 21 nt, Vaccinia virus
caauuuuacccucaaucaugu

SEQ ID NO: 4057574 - RNA, 21 nt, Vaccinia virus
caauuuuguauuauucugaau

SEQ ID NO: 4057575 - RNA, 22 nt, Vaccinia virus
caauuuuuagcaccauuaucuu

SEQ ID NO: 4057576 - RNA, 21 nt, Vaccinia virus
caauuuuucagauuuuugaau

SEQ ID NO: 4057577 - RNA, 14 nt, Vaccinia virus
caauuuuuuguucu

SEQ ID NO: 4057578 - RNA, 14 nt, Vaccinia virus
cacaacaauaacag

SEQ ID NO: 4057579 - RNA, 19 nt, Vaccinia virus
cacaacacaaugacuuaua

SEQ ID NO: 4057580 - RNA, 22 nt, Vaccinia virus
cacaagccauuguugucugaaa

SEQ ID NO: 4057581 - RNA, 17 nt, Vaccinia virus
cacacauuuaugauaug

SEQ ID NO: 4057582 - RNA, 20 nt, Vaccinia virus
cacacgaggacuauguuugg

SEQ ID NO: 4057583 - RNA, 17 nt, Vaccinia virus
cacagauagaucauuuu

SEQ ID NO: 4057584 - RNA, 15 nt, Vaccinia virus
cacauaauuauucua

SEQ ID NO: 4057585 - RNA, 15 nt, Vaccinia virus
cacauacaaaacuag

SEQ ID NO: 4057586 - RNA, 12 nt, Vaccinia virus
cacauagaauaa

SEQ ID NO: 4057587 - RNA, 20 nt, Vaccinia virus
cacauauggaauauaucuau

SEQ ID NO: 4057588 - RNA, 16 nt, Vaccinia virus
cacauauuuuaaugaa

SEQ ID NO: 4057589 - RNA, 12 nt, Vaccinia virus
cacauuaaacaa

SEQ ID NO: 4057590 - RNA, 20 nt, Vaccinia virus
caccagaauagcuauggauu

SEQ ID NO: 4057591 - RNA, 15 nt, Vaccinia virus
cacgaaauaucucau

SEQ ID NO: 4057592 - RNA, 15 nt, Vaccinia virus
cacgagaacuauuaa

SEQ ID NO: 4057593 - RNA, 21 nt, Vaccinia virus
cacguaaccauucuaaacaau

SEQ ID NO: 4057594 - RNA, 16 nt, Vaccinia virus
cacguaccagcauuug

SEQ ID NO: 4057595 - RNA, 14 nt, Vaccinia virus
cacguuuaaacauu

SEQ ID NO: 4057596 - RNA, 13 nt, Vaccinia virus
cacguuugaacag

SEQ ID NO: 4057597 - RNA, 20 nt, Vaccinia virus
cacuaauaucgauauacaaa

SEQ ID NO: 4057598 - RNA, 13 nt, Vaccinia virus
cacuagaugauuu

SEQ ID NO: 4057599 - RNA, 14 nt, Vaccinia virus
cacuauaugcaguu

SEQ ID NO: 4057600 - RNA, 14 nt, Vaccinia virus
cacuauucauguaa

SEQ ID NO: 4057601 - RNA, 15 nt, Vaccinia virus
cacucucgaaaucac

SEQ ID NO: 4057602 - RNA, 13 nt, Vaccinia virus
cacugcagcauuu

SEQ ID NO: 4057603 - RNA, 23 nt, Vaccinia virus
cacugggguaaaguaaguauuua

SEQ ID NO: 4057604 - RNA, 19 nt, Vaccinia virus
cacuggugucagacugugc

SEQ ID NO: 4057605 - RNA, 19 nt, Vaccinia virus
cacuuaaugguauaaugau

SEQ ID NO: 4057606 - RNA, 16 nt, Vaccinia virus
cacuucuauaguaucu

SEQ ID NO: 4057607 - RNA, 18 nt, Vaccinia virus
cacuuuuuuauaaagaug

SEQ ID NO: 4057608 - RNA, 18 nt, Vaccinia virus
cagaaacuguaaagaaca

SEQ ID NO: 4057609 - RNA, 21 nt, Vaccinia virus
cagaaauauaugagauguagu

SEQ ID NO: 4057610 - RNA, 12 nt, Vaccinia virus
cagaaaugauuu

SEQ ID NO: 4057611 - RNA, 22 nt, Vaccinia virus
cagaaauggaagaguuaaugaa

SEQ ID NO: 4057612 - RNA, 21 nt, Vaccinia virus
cagaacgaauuaugauagaaa

SEQ ID NO: 4057613 - RNA, 14 nt, Vaccinia virus
cagaagauaaugaa

SEQ ID NO: 4057614 - RNA, 14 nt, Vaccinia virus
cagaagcaauaaau

SEQ ID NO: 4057615 - RNA, 15 nt, Vaccinia virus
cagaauagagccaaa

SEQ ID NO: 4057616 - RNA, 22 nt, Vaccinia virus
cagaauagccgauauagauauu

SEQ ID NO: 4057617 - RNA, 18 nt, Vaccinia virus
cagaauauauaagacaca

SEQ ID NO: 4057618 - RNA, 15 nt, Vaccinia virus
cagaauguacacuau

SEQ ID NO: 4057619 - RNA, 13 nt, Vaccinia virus
cagaauguuacag

SEQ ID NO: 4057620 - RNA, 14 nt, Vaccinia virus
cagacaaugcuuua

SEQ ID NO: 4057621 - RNA, 14 nt, Vaccinia virus
cagaccucucuuaa

SEQ ID NO: 4057622 - RNA, 17 nt, Vaccinia virus
cagagccaucuguaaaa

SEQ ID NO: 4057623 - RNA, 16 nt, Vaccinia virus
cagaggaugaaauaga

SEQ ID NO: 4057624 - RNA, 15 nt, Vaccinia virus
cagaggauugauggu

SEQ ID NO: 4057625 - RNA, 19 nt, Vaccinia virus
cagagguuaauauagaagc

SEQ ID NO: 4057626 - RNA, 14 nt, Vaccinia virus
cagaguuuagauua

SEQ ID NO: 4057627 - RNA, 22 nt, Vaccinia virus
cagauaaucugaaaaugaaauu

SEQ ID NO: 4057628 - RNA, 15 nt, Vaccinia virus
cagauacagauacag

SEQ ID NO: 4057629 - RNA, 16 nt, Vaccinia virus
cagauacaguuaauau

SEQ ID NO: 4057630 - RNA, 18 nt, Vaccinia virus
cagauauggucaaaucaa

SEQ ID NO: 4057631 - RNA, 15 nt, Vaccinia virus
cagauauuuuaguuu

SEQ ID NO: 4057632 - RNA, 13 nt, Vaccinia virus
cagaugucauuau

SEQ ID NO: 4057633 - RNA, 18 nt, Vaccinia virus
cagauuuaacaauuucua

SEQ ID NO: 4057634 - RNA, 13 nt, Vaccinia virus
cagcauguauguu

SEQ ID NO: 4057635 - RNA, 21 nt, Vaccinia virus
cagccuuaauuuuuucaugau

SEQ ID NO: 4057636 - RNA, 17 nt, Vaccinia virus
cagcggcuauuaauaau

SEQ ID NO: 4057637 - RNA, 16 nt, Vaccinia virus
cagcgugaauaaugua

SEQ ID NO: 4057638 - RNA, 20 nt, Vaccinia virus
cagcuaucgcuuacgcauuu

SEQ ID NO: 4057639 - RNA, 16 nt, Vaccinia virus
caggaauaugacuauu

SEQ ID NO: 4057640 - RNA, 17 nt, Vaccinia virus
caggauacuaugcuauu

SEQ ID NO: 4057641 - RNA, 19 nt, Vaccinia virus
caggaucuccaacaaauuu

SEQ ID NO: 4057642 - RNA, 21 nt, Vaccinia virus
caggauuccuauucauuuuga

SEQ ID NO: 4057643 - RNA, 16 nt, Vaccinia virus
cagguaggcaguuuua

SEQ ID NO: 4057644 - RNA, 15 nt, Vaccinia virus
cagguuauccagaag

SEQ ID NO: 4057645 - RNA, 17 nt, Vaccinia virus
caguacacgaaugauuu

SEQ ID NO: 4057646 - RNA, 15 nt, Vaccinia virus
caguauauaucauuu

SEQ ID NO: 4057647 - RNA, 23 nt, Vaccinia virus
caguauugggacaacuuaaucug

SEQ ID NO: 4057648 - RNA, 18 nt, Vaccinia virus
caguccgguucuuaauau

SEQ ID NO: 4057649 - RNA, 17 nt, Vaccinia virus
cagucuccaguuaauau

SEQ ID NO: 4057650 - RNA, 16 nt, Vaccinia virus
cagugacggauauaca

SEQ ID NO: 4057651 - RNA, 19 nt, Vaccinia virus
cagugguuucauguuuaua

SEQ ID NO: 4057652 - RNA, 23 nt, Vaccinia virus
caguguaaagaacgaauguugua

SEQ ID NO: 4057653 - RNA, 19 nt, Vaccinia virus
caguuaaagaaaaauacuc

SEQ ID NO: 4057654 - RNA, 15 nt, Vaccinia virus
caguuaauauauuua

SEQ ID NO: 4057655 - RNA, 20 nt, Vaccinia virus
caguuaccaaagagaaaaca

SEQ ID NO: 4057656 - RNA, 16 nt, Vaccinia virus
caguuagcuacucuag

SEQ ID NO: 4057657 - RNA, 23 nt, Vaccinia virus
caguuuuuaauuucuuugguaau

SEQ ID NO: 4057658 - RNA, 16 nt, Vaccinia virus
cauaaaaaaauauauu

SEQ ID NO: 4057659 - RNA, 17 nt, Vaccinia virus
cauaaaaacuuauacau

SEQ ID NO: 4057660 - RNA, 12 nt, Vaccinia virus
cauaaaacauca

SEQ ID NO: 4057661 - RNA, 21 nt, Vaccinia virus
cauaaaacugaugagauauau

SEQ ID NO: 4057662 - RNA, 21 nt, Vaccinia virus
cauaaacgauugcugcuguuc

SEQ ID NO: 4057663 - RNA, 20 nt, Vaccinia virus
cauaaacuuucuagacaucu

SEQ ID NO: 4057664 - RNA, 12 nt, Vaccinia virus
cauaacauaauu

SEQ ID NO: 4057665 - RNA, 15 nt, Vaccinia virus
cauaacauauuuuga

SEQ ID NO: 4057666 - RNA, 19 nt, Vaccinia virus
cauaacgaaaauaucacag

SEQ ID NO: 4057667 - RNA, 22 nt, Vaccinia virus
cauaauacucccacaaauacug

SEQ ID NO: 4057668 - RNA, 15 nt, Vaccinia virus
cauaauuaauacaau

SEQ ID NO: 4057669 - RNA, 16 nt, Vaccinia virus
cauacacuacaguaag

SEQ ID NO: 4057670 - RNA, 22 nt, Vaccinia virus
cauaccgucccaaaacauggau

SEQ ID NO: 4057671 - RNA, 13 nt, Vaccinia virus
cauacuauguuuu

SEQ ID NO: 4057672 - RNA, 20 nt, Vaccinia virus
cauacucguuaguuuggaau

SEQ ID NO: 4057673 - RNA, 18 nt, Vaccinia virus
cauagaccuguaguuuua

SEQ ID NO: 4057674 - RNA, 22 nt, Vaccinia virus
cauagcaugcgacuaugauauc

SEQ ID NO: 4057675 - RNA, 14 nt, Vaccinia virus
cauagccaauggau

SEQ ID NO: 4057676 - RNA, 13 nt, Vaccinia virus
cauagcuauuuua

SEQ ID NO: 4057677 - RNA, 16 nt, Vaccinia virus
cauagggcuaaauguc

SEQ ID NO: 4057678 - RNA, 16 nt, Vaccinia virus
cauaguaaauucuguu

SEQ ID NO: 4057679 - RNA, 20 nt, Vaccinia virus
cauaguagugagaucgacgu

SEQ ID NO: 4057680 - RNA, 17 nt, Vaccinia virus
cauaguccucguguggu

SEQ ID NO: 4057681 - RNA, 21 nt, Vaccinia virus
cauaguguuuuauauuccaaa

SEQ ID NO: 4057682 - RNA, 17 nt, Vaccinia virus
cauaguuuuucauaauu

SEQ ID NO: 4057683 - RNA, 12 nt, Vaccinia virus
cauauaaaugua

SEQ ID NO: 4057684 - RNA, 12 nt, Vaccinia virus
cauauaaauguc

SEQ ID NO: 4057685 - RNA, 22 nt, Vaccinia virus
cauauaauuauacuaucgauga

SEQ ID NO: 4057686 - RNA, 17 nt, Vaccinia virus
cauauacuauuacuuau

SEQ ID NO: 4057687 - RNA, 19 nt, Vaccinia virus
cauauacuauuuauaagau

SEQ ID NO: 4057688 - RNA, 23 nt, Vaccinia virus
cauauacugaugauaauaaugaa

SEQ ID NO: 4057689 - RNA, 20 nt, Vaccinia virus
cauauauuaaaacuaccaau

SEQ ID NO: 4057690 - RNA, 15 nt, Vaccinia virus
cauauauuuuuggau

SEQ ID NO: 4057691 - RNA, 23 nt, Vaccinia virus
cauaugaugaacuaauaaaggaa

SEQ ID NO: 4057692 - RNA, 16 nt, Vaccinia virus
cauaugauguuuguuu

SEQ ID NO: 4057693 - RNA, 16 nt, Vaccinia virus
cauauguuuaaacgac

SEQ ID NO: 4057694 - RNA, 11 nt, Vaccinia virus
acauuaaacag

SEQ ID NO: 4057695 - RNA, 18 nt, Vaccinia virus
acauuaauacuuuaauga

SEQ ID NO: 4057696 - RNA, 21 nt, Vaccinia virus
acauuaauuccuuuuuaaauu

SEQ ID NO: 4057697 - RNA, 20 nt, Vaccinia virus
acauuauuaaauuaugaagu

SEQ ID NO: 4057698 - RNA, 15 nt, Vaccinia virus
acauuauuacauaga

SEQ ID NO: 4057699 - RNA, 17 nt, Vaccinia virus
acauuauucuauuucga

SEQ ID NO: 4057700 - RNA, 13 nt, Vaccinia virus
acauucagaaaga

SEQ ID NO: 4057701 - RNA, 14 nt, Vaccinia virus
acauucuaggaaug

SEQ ID NO: 4057702 - RNA, 13 nt, Vaccinia virus
acauugagaaugu

SEQ ID NO: 4057703 - RNA, 19 nt, Vaccinia virus
acauugaugagacaauaau

SEQ ID NO: 4057704 - RNA, 19 nt, Vaccinia virus
acauugcuuuaaaauggac

SEQ ID NO: 4057705 - RNA, 15 nt, Vaccinia virus
acauuguaugaugau

SEQ ID NO: 4057706 - RNA, 14 nt, Vaccinia virus
acauuguuaauuga

SEQ ID NO: 4057707 - RNA, 12 nt, Vaccinia virus
acauuuacauau

SEQ ID NO: 4057708 - RNA, 17 nt, Vaccinia virus
acauuuacauauuucga

SEQ ID NO: 4057709 - RNA, 13 nt, Vaccinia virus
acauuuauaucca

SEQ ID NO: 4057710 - RNA, 20 nt, Vaccinia virus
acauuuuggcaaauugauua

SEQ ID NO: 4057711 - RNA, 17 nt, Vaccinia virus
accaaaaacucauauaa

SEQ ID NO: 4057712 - RNA, 20 nt, Vaccinia virus
accaaaaugaaaauacuuua

SEQ ID NO: 4057713 - RNA, 13 nt, Vaccinia virus
accaaacauucuu

SEQ ID NO: 4057714 - RNA, 13 nt, Vaccinia virus
accaaauuuuaca

SEQ ID NO: 4057715 - RNA, 19 nt, Vaccinia virus
accaacgggucaugugaca

SEQ ID NO: 4057716 - RNA, 20 nt, Vaccinia virus
accaacguauagagguauau

SEQ ID NO: 4057717 - RNA, 15 nt, Vaccinia virus
accaaggacuuugua

SEQ ID NO: 4057718 - RNA, 16 nt, Vaccinia virus
accaauacuuuuguua

SEQ ID NO: 4057719 - RNA, 22 nt, Vaccinia virus
accaauaugucuguacaaaugu

SEQ ID NO: 4057720 - RNA, 18 nt, Vaccinia virus
accacacgacaaugaaca

SEQ ID NO: 4057721 - RNA, 17 nt, Vaccinia virus
accaccaaauaaaauuc

SEQ ID NO: 4057722 - RNA, 19 nt, Vaccinia virus
accacgaaacaauauauau

SEQ ID NO: 4057723 - RNA, 19 nt, Vaccinia virus
accacugucuaaauguaau

SEQ ID NO: 4057724 - RNA, 18 nt, Vaccinia virus
accacuuauuacuccauc

SEQ ID NO: 4057725 - RNA, 15 nt, Vaccinia virus
accagaugucauuau

SEQ ID NO: 4057726 - RNA, 17 nt, Vaccinia virus
accaggguuuauuucau

SEQ ID NO: 4057727 - RNA, 16 nt, Vaccinia virus
accagucuaggaauaa

SEQ ID NO: 4057728 - RNA, 21 nt, Vaccinia virus
accauauauuuggcaugguuu

SEQ ID NO: 4057729 - RNA, 15 nt, Vaccinia virus
accaucccacucuag

SEQ ID NO: 4057730 - RNA, 21 nt, Vaccinia virus
accauccuuuaaaaaaaauga

SEQ ID NO: 4057731 - RNA, 16 nt, Vaccinia virus
acccauggaaaaauag

SEQ ID NO: 4057732 - RNA, 20 nt, Vaccinia virus
accgauaucacuucagaaau

SEQ ID NO: 4057733 - RNA, 19 nt, Vaccinia virus
accgcuagaucuguaauug

SEQ ID NO: 4057734 - RNA, 20 nt, Vaccinia virus
accggaagaauuaauaaaca

SEQ ID NO: 4057735 - RNA, 17 nt, Vaccinia virus
accggcaagaaagugaa

SEQ ID NO: 4057736 - RNA, 16 nt, Vaccinia virus
accguuugauauacca

SEQ ID NO: 4057737 - RNA, 13 nt, Vaccinia virus
accucaaaaauuu

SEQ ID NO: 4057738 - RNA, 13 nt, Vaccinia virus
accucgagaaugu

SEQ ID NO: 4057739 - RNA, 21 nt, Vaccinia virus
accugccauaaauaaaugcuu

SEQ ID NO: 4057740 - RNA, 17 nt, Vaccinia virus
accuuuaacuucuggaa

SEQ ID NO: 4057741 - RNA, 15 nt, Vaccinia virus
acgaaagaaaaagaa

SEQ ID NO: 4057742 - RNA, 14 nt, Vaccinia virus
acgaauauaaauca

SEQ ID NO: 4057743 - RNA, 23 nt, Vaccinia virus
acgaauaucguucucuaaauguc

SEQ ID NO: 4057744 - RNA, 14 nt, Vaccinia virus
acgaaucaagugau

SEQ ID NO: 4057745 - RNA, 18 nt, Vaccinia virus
acgaauuaggagaacuua

SEQ ID NO: 4057746 - RNA, 15 nt, Vaccinia virus
acgacguuuacaucg

SEQ ID NO: 4057747 - RNA, 14 nt, Vaccinia virus
acgacuaaacauuu

SEQ ID NO: 4057748 - RNA, 18 nt, Vaccinia virus
acgacucuugagacuuua

SEQ ID NO: 4057749 - RNA, 16 nt, Vaccinia virus
acgacuuauaauuaau

SEQ ID NO: 4057750 - RNA, 11 nt, Vaccinia virus
acgauaaaaga

SEQ ID NO: 4057751 - RNA, 14 nt, Vaccinia virus
acgauaaugucuuu

SEQ ID NO: 4057752 - RNA, 15 nt, Vaccinia virus
acgauacaucuguuu

SEQ ID NO: 4057753 - RNA, 17 nt, Vaccinia virus
acgauauauaguaauga

SEQ ID NO: 4057754 - RNA, 14 nt, Vaccinia virus
acgauauauuguuu

SEQ ID NO: 4057755 - RNA, 20 nt, Vaccinia virus
acgauccaaacaauguuucu

SEQ ID NO: 4057756 - RNA, 22 nt, Vaccinia virus
acgaucuuguuguuuauuuuca

SEQ ID NO: 4057757 - RNA, 20 nt, Vaccinia virus
acgaugaugauuuaugaauu

SEQ ID NO: 4057758 - RNA, 18 nt, Vaccinia virus
acgauguaguuagauaga

SEQ ID NO: 4057759 - RNA, 16 nt, Vaccinia virus
acgauuauuauaaaau

SEQ ID NO: 4057760 - RNA, 19 nt, Vaccinia virus
acgauuuccaugucuacau

SEQ ID NO: 4057761 - RNA, 22 nt, Vaccinia virus
acgauuuccaugucuacauuau

SEQ ID NO: 4057762 - RNA, 15 nt, Vaccinia virus
acgauuuguuuaauu

SEQ ID NO: 4057763 - RNA, 15 nt, Vaccinia virus
acgcaacaaaugauu

SEQ ID NO: 4057764 - RNA, 12 nt, Vaccinia virus
acgcaaugguuu

SEQ ID NO: 4057765 - RNA, 16 nt, Vaccinia virus
acgcaccucaaaugua

SEQ ID NO: 4057766 - RNA, 23 nt, Vaccinia virus
acgcagaaauugguauaaauguu

SEQ ID NO: 4057767 - RNA, 14 nt, Vaccinia virus
acgcagauagcuau

SEQ ID NO: 4057768 - RNA, 16 nt, Vaccinia virus
acgcaguuuuucuuau

SEQ ID NO: 4057769 - RNA, 15 nt, Vaccinia virus
acgcgucuuuaacuc

SEQ ID NO: 4057770 - RNA, 14 nt, Vaccinia virus
acggagacaaaauu

SEQ ID NO: 4057771 - RNA, 22 nt, Vaccinia virus
acggagucauaacuauuuuacc

SEQ ID NO: 4057772 - RNA, 17 nt, Vaccinia virus
acggccauugcugccac

SEQ ID NO: 4057773 - RNA, 18 nt, Vaccinia virus
acgggcgcuguaauuaau

SEQ ID NO: 4057774 - RNA, 15 nt, Vaccinia virus
acgguaacuaaaugu

SEQ ID NO: 4057775 - RNA, 14 nt, Vaccinia virus
acggugaauacaau

SEQ ID NO: 4057776 - RNA, 19 nt, Vaccinia virus
acggugagaagacaauauu

SEQ ID NO: 4057777 - RNA, 18 nt, Vaccinia virus
acguaaauacaaaacaga

SEQ ID NO: 4057778 - RNA, 16 nt, Vaccinia virus
acguaaccaagaaguu

SEQ ID NO: 4057779 - RNA, 21 nt, Vaccinia virus
acguaacuauauuccaaauua

SEQ ID NO: 4057780 - RNA, 13 nt, Vaccinia virus
acguaaugaagau

SEQ ID NO: 4057781 - RNA, 16 nt, Vaccinia virus
acguaguuauguagag

SEQ ID NO: 4057782 - RNA, 19 nt, Vaccinia virus
acguauauuuagauguuuu

SEQ ID NO: 4057783 - RNA, 19 nt, Vaccinia virus
acgucugauauucgaaaau

SEQ ID NO: 4057784 - RNA, 22 nt, Vaccinia virus
acgucuuucacuaauugacuau

SEQ ID NO: 4057785 - RNA, 15 nt, Vaccinia virus
acgugcaaggcauuu

SEQ ID NO: 4057786 - RNA, 13 nt, Vaccinia virus
acguuaauacaaa

SEQ ID NO: 4057787 - RNA, 17 nt, Vaccinia virus
acguuacuacguucaga

SEQ ID NO: 4057788 - RNA, 19 nt, Vaccinia virus
acguucuacuauagaauua

SEQ ID NO: 4057789 - RNA, 20 nt, Vaccinia virus
acguucuacuauagaauuaa

SEQ ID NO: 4057790 - RNA, 14 nt, Vaccinia virus
acguucuuuaauuu

SEQ ID NO: 4057791 - RNA, 23 nt, Vaccinia virus
acguuucauuuuuugucuauaau

SEQ ID NO: 4057792 - RNA, 22 nt, Vaccinia virus
acguuugguaauggcaauguau

SEQ ID NO: 4057793 - RNA, 19 nt, Vaccinia virus
acguuuuucgaaaaaauua

SEQ ID NO: 4057794 - RNA, 17 nt, Vaccinia virus
acuaaaaaauguagaaa

SEQ ID NO: 4057795 - RNA, 12 nt, Vaccinia virus
acuaaaagacau

SEQ ID NO: 4057796 - RNA, 17 nt, Vaccinia virus
acuaaacacacauuauu

SEQ ID NO: 4057797 - RNA, 18 nt, Vaccinia virus
acuaaacacauuauuaau

SEQ ID NO: 4057798 - RNA, 17 nt, Vaccinia virus
acuaaauacauuaucau

SEQ ID NO: 4057799 - RNA, 21 nt, Vaccinia virus
acuaaauauucauaacuaauu

SEQ ID NO: 4057800 - RNA, 14 nt, Vaccinia virus
acuaaauccgagaa

SEQ ID NO: 4057801 - RNA, 14 nt, Vaccinia virus
acuaaauuaacaau

SEQ ID NO: 4057802 - RNA, 14 nt, Vaccinia virus
acuaaauugaacac

SEQ ID NO: 4057803 - RNA, 23 nt, Vaccinia virus
acuaacauacggcaaauauuuug

SEQ ID NO: 4057804 - RNA, 18 nt, Vaccinia virus
acuaacgauaacgugaaa

SEQ ID NO: 4057805 - RNA, 16 nt, Vaccinia virus
acuaggagaauuauuu

SEQ ID NO: 4057806 - RNA, 18 nt, Vaccinia virus
acuagucgcguuaauagu

SEQ ID NO: 4057807 - RNA, 22 nt, Vaccinia virus
acuauaaaaaaaauaauaauua

SEQ ID NO: 4057808 - RNA, 18 nt, Vaccinia virus
acuauaauauaaucuaga

SEQ ID NO: 4057809 - RNA, 14 nt, Vaccinia virus
acuauagacauaau

SEQ ID NO: 4057810 - RNA, 14 nt, Vaccinia virus
acuauaucaguuuu

SEQ ID NO: 4057811 - RNA, 15 nt, Vaccinia virus
acuauauuauguuuu

SEQ ID NO: 4057812 - RNA, 17 nt, Vaccinia virus
acuauauuguacuuuac

SEQ ID NO: 4057813 - RNA, 21 nt, Vaccinia virus
acuaucaaucgauaacaagau

SEQ ID NO: 4057814 - RNA, 20 nt, Vaccinia virus
acuaucuaaauguaauuaau

SEQ ID NO: 4057815 - RNA, 22 nt, Vaccinia virus
acuaucugauaagauaucuucu

SEQ ID NO: 4057816 - RNA, 19 nt, Vaccinia virus
acuaucuuuuuaggaaugu

SEQ ID NO: 4057817 - RNA, 15 nt, Vaccinia virus
acuaugcuauuugca

SEQ ID NO: 4057818 - RNA, 22 nt, Vaccinia virus
acuauggacgcaugauaagaau

SEQ ID NO: 4057819 - RNA, 23 nt, Vaccinia virus
acuaugucaguaguauacaucau

SEQ ID NO: 4057820 - RNA, 19 nt, Vaccinia virus
acuauguguuaaaaaauuc

SEQ ID NO: 4057821 - RNA, 19 nt, Vaccinia virus
acuauguuugguauacugu

SEQ ID NO: 4057822 - RNA, 16 nt, Vaccinia virus
acuauuacuaugaauc

SEQ ID NO: 4057823 - RNA, 19 nt, Vaccinia virus
acuauuagaauuaaguaga

SEQ ID NO: 4057824 - RNA, 15 nt, Vaccinia virus
acuauuauaacaaga

SEQ ID NO: 4057825 - RNA, 15 nt, Vaccinia virus
acuauuauuauugaa

SEQ ID NO: 4057826 - RNA, 16 nt, Vaccinia virus
acuauuauuuguuaua

SEQ ID NO: 4057827 - RNA, 19 nt, Vaccinia virus
acuauugaagccauugaaa

SEQ ID NO: 4057828 - RNA, 12 nt, Vaccinia virus
acuauugccauc

SEQ ID NO: 4057829 - RNA, 12 nt, Vaccinia virus
acuauuugucua

SEQ ID NO: 4057830 - RNA, 15 nt, Vaccinia virus
acuauuuuauaccuu

SEQ ID NO: 4057831 - RNA, 17 nt, Vaccinia virus
acucagauuauucuuaa

SEQ ID NO: 4057832 - RNA, 18 nt, Vaccinia virus
acucaggaagauauuuua

SEQ ID NO: 4057833 - RNA, 13 nt, Vaccinia virus
acucauaaaauac

SEQ ID NO: 4057834 - RNA, 16 nt, Vaccinia virus
acucauaaaauacaag

SEQ ID NO: 4057835 - RNA, 22 nt, Vaccinia virus
acucauaaaauacaagagaaug

SEQ ID NO: 4057836 - RNA, 12 nt, Vaccinia virus
acucaugaugaa

SEQ ID NO: 4057837 - RNA, 15 nt, Vaccinia virus
acucauuaaaacuuc

SEQ ID NO: 4057838 - RNA, 16 nt, Vaccinia virus
acucauuuaacagaug

SEQ ID NO: 4057839 - RNA, 18 nt, Vaccinia virus
acuccauccguaaaaaug

SEQ ID NO: 4057840 - RNA, 14 nt, Vaccinia virus
acucccacaaauac

SEQ ID NO: 4057841 - RNA, 16 nt, Vaccinia virus
acuccggauagagaaa

SEQ ID NO: 4057842 - RNA, 18 nt, Vaccinia virus
acuccgguugaugaugau

SEQ ID NO: 4057843 - RNA, 15 nt, Vaccinia virus
acucuacuaguucca

SEQ ID NO: 4057844 - RNA, 22 nt, Vaccinia virus
acucucuucuauaaaaauggau

SEQ ID NO: 4057845 - RNA, 20 nt, Vaccinia virus
acucugggucauauuauaga

SEQ ID NO: 4057846 - RNA, 20 nt, Vaccinia virus
acucuguagacuuuaauaga

SEQ ID NO: 4057847 - RNA, 20 nt, Vaccinia virus
acugacuucuaacaaacauc

SEQ ID NO: 4057848 - RNA, 12 nt, Vaccinia virus
acugagaaguua

SEQ ID NO: 4057849 - RNA, 14 nt, Vaccinia virus
acugaguaaaugug

SEQ ID NO: 4057850 - RNA, 13 nt, Vaccinia virus
acugauacuaucg

SEQ ID NO: 4057851 - RNA, 18 nt, Vaccinia virus
acugauucagaaauggau

SEQ ID NO: 4057852 - RNA, 21 nt, Vaccinia virus
acugauucuggacauagcuuu

SEQ ID NO: 4057853 - RNA, 20 nt, Vaccinia virus
acugcagagggaaaaugcua

SEQ ID NO: 4057854 - RNA, 20 nt, Vaccinia virus
acugccgaguuuaaaacuuc

SEQ ID NO: 4057855 - RNA, 15 nt, Vaccinia virus
acugcgaucugaaua

SEQ ID NO: 4057856 - RNA, 19 nt, Vaccinia virus
acugcgauuguauuauccg

SEQ ID NO: 4057857 - RNA, 17 nt, Vaccinia virus
acugcugugaauacagc

SEQ ID NO: 4057858 - RNA, 24 nt, Vaccinia virus
acugguaauccacauaguuguaaa

SEQ ID NO: 4057859 - RNA, 23 nt, Vaccinia virus
acuguagaugguucuuuaauagu

SEQ ID NO: 4057860 - RNA, 18 nt, Vaccinia virus
acuguauccucaaacauc

SEQ ID NO: 4057861 - RNA, 12 nt, Vaccinia virus
acugucuaaaug

SEQ ID NO: 4057862 - RNA, 13 nt, Vaccinia virus
acugucuauacaa

SEQ ID NO: 4057863 - RNA, 21 nt, Vaccinia virus
acugucucauacacuacagua

SEQ ID NO: 4057864 - RNA, 17 nt, Vaccinia virus
acuguuaucuaaugaau

SEQ ID NO: 4057865 - RNA, 13 nt, Vaccinia virus
acuguucaggaau

SEQ ID NO: 4057866 - RNA, 18 nt, Vaccinia virus
acuguucccgucaauaga

SEQ ID NO: 4057867 - RNA, 16 nt, Vaccinia virus
acuuaagacuuaaaac

SEQ ID NO: 4057868 - RNA, 14 nt, Vaccinia virus
acuuaaguuguaaa

SEQ ID NO: 4057869 - RNA, 14 nt, Vaccinia virus
acuuagauuaaauu

SEQ ID NO: 4057870 - RNA, 15 nt, Vaccinia virus
acuuaguacuaauaa

SEQ ID NO: 4057871 - RNA, 20 nt, Vaccinia virus
acuuaguauacaaaaaaaug

SEQ ID NO: 4057872 - RNA, 14 nt, Vaccinia virus
acuuauuaaugaau

SEQ ID NO: 4057873 - RNA, 15 nt, Vaccinia virus
acuucaaaaacgaua

SEQ ID NO: 4057874 - RNA, 16 nt, Vaccinia virus
acuucaaucaaacaaa

SEQ ID NO: 4057875 - RNA, 23 nt, Vaccinia virus
acuucacauuuuaaauaaauguc

SEQ ID NO: 4057876 - RNA, 21 nt, Vaccinia virus
acuucagguuucuuagcuugu

SEQ ID NO: 4057877 - RNA, 23 nt, Vaccinia virus
acuucauccguuuccuuaugaag

SEQ ID NO: 4057878 - RNA, 15 nt, Vaccinia virus
acuuccguuuaaaaa

SEQ ID NO: 4057879 - RNA, 23 nt, Vaccinia virus
acuucuaaugagcaaguagaaaa

SEQ ID NO: 4057880 - RNA, 23 nt, Vaccinia virus
acuucuagcgcugauuuaacuaa

SEQ ID NO: 4057881 - RNA, 13 nt, Vaccinia virus
acuucucuaaaug

SEQ ID NO: 4057882 - RNA, 15 nt, Vaccinia virus
acuucucuaucaaug

SEQ ID NO: 4057883 - RNA, 17 nt, Vaccinia virus
acuucugcaucuauaug

SEQ ID NO: 4057884 - RNA, 20 nt, Vaccinia virus
acuucuuccaguucuggaua

SEQ ID NO: 4057885 - RNA, 23 nt, Vaccinia virus
acuugaaauaaucggagaauguu

SEQ ID NO: 4057886 - RNA, 14 nt, Vaccinia virus
acuugauaauuaau

SEQ ID NO: 4057887 - RNA, 21 nt, Vaccinia virus
acuuggaaaagauaacuauug

SEQ ID NO: 4057888 - RNA, 15 nt, Vaccinia virus
acuuggaaacaucuc

SEQ ID NO: 4057889 - RNA, 14 nt, Vaccinia virus
acuuguauaauaag

SEQ ID NO: 4057890 - RNA, 14 nt, Vaccinia virus
acuuuaaauacuua

SEQ ID NO: 4057891 - RNA, 19 nt, Vaccinia virus
acuuuaacguauaaaugac

SEQ ID NO: 4057892 - RNA, 23 nt, Vaccinia virus
acuuuaagcuaaaauauuuucua

SEQ ID NO: 4057893 - RNA, 16 nt, Vaccinia virus
acuuuaauaacaaaga

SEQ ID NO: 4057894 - RNA, 13 nt, Vaccinia virus
acuuuaucuaaau

SEQ ID NO: 4057895 - RNA, 13 nt, Vaccinia virus
acuuucagucugu

SEQ ID NO: 4057896 - RNA, 20 nt, Vaccinia virus
acuuuguaacuaguuuuaua

SEQ ID NO: 4057897 - RNA, 13 nt, Vaccinia virus
acuuuguuaauga

SEQ ID NO: 4057898 - RNA, 20 nt, Vaccinia virus
acuuuuacagaucuaguaua

SEQ ID NO: 4057899 - RNA, 17 nt, Vaccinia virus
acuuuuauaauuauaga

SEQ ID NO: 4057900 - RNA, 15 nt, Vaccinia virus
acuuuuuauacuaau

SEQ ID NO: 4057901 - RNA, 20 nt, Vaccinia virus
acuuuuucaucuuuacauau

SEQ ID NO: 4057902 - RNA, 22 nt, Vaccinia virus
acuuuuuuacccacuauaaaau

SEQ ID NO: 4057903 - RNA, 22 nt, Vaccinia virus
agaaaaaaauauuaucgauauu

SEQ ID NO: 4057904 - RNA, 13 nt, Vaccinia virus
agaaaacagacuu

SEQ ID NO: 4057905 - RNA, 20 nt, Vaccinia virus
agaaaacuagauacaaaauu

SEQ ID NO: 4057906 - RNA, 20 nt, Vaccinia virus
agaaaacucguuauuaacua

SEQ ID NO: 4057907 - RNA, 14 nt, Vaccinia virus
agaaaagagaaauu

SEQ ID NO: 4057908 - RNA, 21 nt, Vaccinia virus
agaaaauaacagauauuacaa

SEQ ID NO: 4057909 - RNA, 19 nt, Vaccinia virus
aucuacgccuuuaaauccu

SEQ ID NO: 4057910 - RNA, 18 nt, Vaccinia virus
aucuacguucauauguau

SEQ ID NO: 4057911 - RNA, 23 nt, Vaccinia virus
aucuagaaacacuuggauauugu

SEQ ID NO: 4057912 - RNA, 15 nt, Vaccinia virus
aucuagcaaaaauuc

SEQ ID NO: 4057913 - RNA, 13 nt, Vaccinia virus
aucuagccauuau

SEQ ID NO: 4057914 - RNA, 17 nt, Vaccinia virus
aucuaggaauuacauaa

SEQ ID NO: 4057915 - RNA, 17 nt, Vaccinia virus
aucuaggaguaauuaag

SEQ ID NO: 4057916 - RNA, 19 nt, Vaccinia virus
aucuauaauucuagcuaau

SEQ ID NO: 4057917 - RNA, 21 nt, Vaccinia virus
aucuauaauuugugaguuuuc

SEQ ID NO: 4057918 - RNA, 19 nt, Vaccinia virus
aucuauacugcagaauaga

SEQ ID NO: 4057919 - RNA, 21 nt, Vaccinia virus
aucuauaugaccgauaagaga

SEQ ID NO: 4057920 - RNA, 19 nt, Vaccinia virus
aucuauauugcuacauaau

SEQ ID NO: 4057921 - RNA, 18 nt, Vaccinia virus
aucuauccauaugcaucu

SEQ ID NO: 4057922 - RNA, 17 nt, Vaccinia virus
aucuaugcuuacuguau

SEQ ID NO: 4057923 - RNA, 16 nt, Vaccinia virus
aucuaugguauuaaga

SEQ ID NO: 4057924 - RNA, 13 nt, Vaccinia virus
aucuauguagaau

SEQ ID NO: 4057925 - RNA, 14 nt, Vaccinia virus
aucuauguagaauc

SEQ ID NO: 4057926 - RNA, 20 nt, Vaccinia virus
aucuauuaaacagaaauggu

SEQ ID NO: 4057927 - RNA, 13 nt, Vaccinia virus
aucuauuagaaaa

SEQ ID NO: 4057928 - RNA, 23 nt, Vaccinia virus
aucuauuagaagcugacaaaauu

SEQ ID NO: 4057929 - RNA, 19 nt, Vaccinia virus
aucuauuugauaauuacgc

SEQ ID NO: 4057930 - RNA, 14 nt, Vaccinia virus
aucuauuuuaaaua

SEQ ID NO: 4057931 - RNA, 15 nt, Vaccinia virus
aucuauuuuaaauac

SEQ ID NO: 4057932 - RNA, 12 nt, Vaccinia virus
aucucaaaauag

SEQ ID NO: 4057933 - RNA, 14 nt, Vaccinia virus
aucucaacaaaauu

SEQ ID NO: 4057934 - RNA, 17 nt, Vaccinia virus
aucucagugcaaagauu

SEQ ID NO: 4057935 - RNA, 22 nt, Vaccinia virus
aucuccacacagucaaauccgu

SEQ ID NO: 4057936 - RNA, 16 nt, Vaccinia virus
aucucccauaaucuug

SEQ ID NO: 4057937 - RNA, 13 nt, Vaccinia virus
aucuccucuauuu

SEQ ID NO: 4057938 - RNA, 22 nt, Vaccinia virus
aucucuaacgagugaucaaauc

SEQ ID NO: 4057939 - RNA, 18 nt, Vaccinia virus
aucucuauaauaucuagu

SEQ ID NO: 4057940 - RNA, 22 nt, Vaccinia virus
aucucuauaauaucuaguuuuu

SEQ ID NO: 4057941 - RNA, 21 nt, Vaccinia virus
aucucuauccaaggauguaau

SEQ ID NO: 4057942 - RNA, 17 nt, Vaccinia virus
aucucuccgaccauucc

SEQ ID NO: 4057943 - RNA, 14 nt, Vaccinia virus
aucucuuaacaaaa

SEQ ID NO: 4057944 - RNA, 16 nt, Vaccinia virus
aucucuuaacaaaaau

SEQ ID NO: 4057945 - RNA, 18 nt, Vaccinia virus
aucucuuaauccaaauau

SEQ ID NO: 4057946 - RNA, 21 nt, Vaccinia virus
aucugacucggacucuguaau

SEQ ID NO: 4057947 - RNA, 23 nt, Vaccinia virus
aucugagauucuauaaucgcuuu

SEQ ID NO: 4057948 - RNA, 19 nt, Vaccinia virus
aucugauaacuuuaaacau

SEQ ID NO: 4057949 - RNA, 18 nt, Vaccinia virus
aucugauaauauuaaaaa

SEQ ID NO: 4057950 - RNA, 18 nt, Vaccinia virus
aucugauaauuuagauaa

SEQ ID NO: 4057951 - RNA, 17 nt, Vaccinia virus
aucuggauuucagauau

SEQ ID NO: 4057952 - RNA, 16 nt, Vaccinia virus
aucugggaauaaaaua

SEQ ID NO: 4057953 - RNA, 15 nt, Vaccinia virus
aucuguaaaaguugu

SEQ ID NO: 4057954 - RNA, 23 nt, Vaccinia virus
augcaucuuaacacucucugcca

SEQ ID NO: 4057955 - RNA, 17 nt, Vaccinia virus
augccggacaauagcac

SEQ ID NO: 4057956 - RNA, 23 nt, Vaccinia virus
augccuauaaaguaauaaucuuc

SEQ ID NO: 4057957 - RNA, 13 nt, Vaccinia virus
augcgaaggaagu

SEQ ID NO: 4057958 - RNA, 23 nt, Vaccinia virus
augcgauaguagaguaaacauuu

SEQ ID NO: 4057959 - RNA, 22 nt, Vaccinia virus
augcgccggcagucacaucugu

SEQ ID NO: 4057960 - RNA, 22 nt, Vaccinia virus
augcuauccaucagaauguuuc

SEQ ID NO: 4057961 - RNA, 13 nt, Vaccinia virus
augcugugauaua

SEQ ID NO: 4057962 - RNA, 15 nt, Vaccinia virus
augcuucagaauuag

SEQ ID NO: 4057963 - RNA, 19 nt, Vaccinia virus
auggaaaaguucaacauga

SEQ ID NO: 4057964 - RNA, 13 nt, Vaccinia virus
auggaaaggaaau

SEQ ID NO: 4057965 - RNA, 15 nt, Vaccinia virus
auggaagaaacagaa

SEQ ID NO: 4057966 - RNA, 21 nt, Vaccinia virus
auggaauuaucaucaaaaaac

SEQ ID NO: 4057967 - RNA, 15 nt, Vaccinia virus
auggaauuggagaaa

SEQ ID NO: 4057968 - RNA, 19 nt, Vaccinia virus
auggacgaauuaggagaac

SEQ ID NO: 4057969 - RNA, 16 nt, Vaccinia virus
auggagagauuuaacu

SEQ ID NO: 4057970 - RNA, 16 nt, Vaccinia virus
auggaguacuauuuua

SEQ ID NO: 4057971 - RNA, 17 nt, Vaccinia virus
auggagucauuucugau

SEQ ID NO: 4057972 - RNA, 14 nt, Vaccinia virus
auggaguuguaaau

SEQ ID NO: 4057973 - RNA, 18 nt, Vaccinia virus
auggaucaccguguuuau

SEQ ID NO: 4057974 - RNA, 16 nt, Vaccinia virus
auggaucuauucaaga

SEQ ID NO: 4057975 - RNA, 18 nt, Vaccinia virus
auggaugagaacacguau

SEQ ID NO: 4057976 - RNA, 12 nt, Vaccinia virus
auggaugauaua

SEQ ID NO: 4057977 - RNA, 14 nt, Vaccinia virus
auggaugcagaaua

SEQ ID NO: 4057978 - RNA, 17 nt, Vaccinia virus
auggaugucaucaaugu

SEQ ID NO: 4057979 - RNA, 21 nt, Vaccinia virus
auggaugucaucaauguagaa

SEQ ID NO: 4057980 - RNA, 20 nt, Vaccinia virus
auggauuaucggaaauacuu

SEQ ID NO: 4057981 - RNA, 23 nt, Vaccinia virus
auggauuuuuuuaaaaaggaaau

SEQ ID NO: 4057982 - RNA, 16 nt, Vaccinia virus
auggcguacaaaggaa

SEQ ID NO: 4057983 - RNA, 17 nt, Vaccinia virus
augguaaaauuaaauag

SEQ ID NO: 4057984 - RNA, 17 nt, Vaccinia virus
augguagcaauaugcua

SEQ ID NO: 4057985 - RNA, 14 nt, Vaccinia virus
auggucuauacaau

SEQ ID NO: 4057986 - RNA, 11 nt, Vaccinia virus
auggucucaca

SEQ ID NO: 4057987 - RNA, 15 nt, Vaccinia virus
auggugaaauuauug

SEQ ID NO: 4057988 - RNA, 14 nt, Vaccinia virus
augguuacauuuau

SEQ ID NO: 4057989 - RNA, 15 nt, Vaccinia virus
augguucaaagacua

SEQ ID NO: 4057990 - RNA, 19 nt, Vaccinia virus
augguuuacccuagaauac

SEQ ID NO: 4057991 - RNA, 20 nt, Vaccinia virus
aguuaauggagaaauacuua

SEQ ID NO: 4057992 - RNA, 13 nt, Vaccinia virus
aguuacuuaaaug

SEQ ID NO: 4057993 - RNA, 19 nt, Vaccinia virus
aguuaugagucaauuggua

SEQ ID NO: 4057994 - RNA, 13 nt, Vaccinia virus
aguuauuaaugau

SEQ ID NO: 4057995 - RNA, 16 nt, Vaccinia virus
aguuauuggauuaaaa

SEQ ID NO: 4057996 - RNA, 19 nt, Vaccinia virus
aguucauauuuauuagaua

SEQ ID NO: 4057997 - RNA, 17 nt, Vaccinia virus
aguucauuauaaauucu

SEQ ID NO: 4057998 - RNA, 12 nt, Vaccinia virus
aguucuggaaua

SEQ ID NO: 4057999 - RNA, 15 nt, Vaccinia virus
aguugaguuuauccu

SEQ ID NO: 4058000 - RNA, 14 nt, Vaccinia virus
aguuguaucaucua

SEQ ID NO: 4058001 - RNA, 23 nt, Vaccinia virus
aguuguggaaauacuuccaucaa

SEQ ID NO: 4058002 - RNA, 18 nt, Vaccinia virus
aguuguuccuagauaugu

SEQ ID NO: 4058003 - RNA, 20 nt, Vaccinia virus
aguuuaauauccucagucau

SEQ ID NO: 4058004 - RNA, 12 nt, Vaccinia virus
aguuuauaucaa

SEQ ID NO: 4058005 - RNA, 19 nt, Vaccinia virus
aguuuaucccuauauucaa

SEQ ID NO: 4058006 - RNA, 18 nt, Vaccinia virus
aguuucacaugaauuugu

SEQ ID NO: 4058007 - RNA, 19 nt, Vaccinia virus
aguuucauaucguaacuga

SEQ ID NO: 4058008 - RNA, 20 nt, Vaccinia virus
aguuucaucgauaaaggaua

SEQ ID NO: 4058009 - RNA, 12 nt, Vaccinia virus
aguuucuagaua

SEQ ID NO: 4058010 - RNA, 17 nt, Vaccinia virus
aguuugagguuuuagau

SEQ ID NO: 4058011 - RNA, 20 nt, Vaccinia virus
aguuugccuucuuuaguaga

SEQ ID NO: 4058012 - RNA, 17 nt, Vaccinia virus
aguuuggagaaauggag

SEQ ID NO: 4058013 - RNA, 20 nt, Vaccinia virus
aguuuggcaauuaaaaauua

SEQ ID NO: 4058014 - RNA, 16 nt, Vaccinia virus
aguuuguuuucauuau

SEQ ID NO: 4058015 - RNA, 15 nt, Vaccinia virus
aguuuuauaacgaag

SEQ ID NO: 4058016 - RNA, 17 nt, Vaccinia virus
aguuuuccguuagaaaa

SEQ ID NO: 4058017 - RNA, 16 nt, Vaccinia virus
aguuuucuuucaaaau

SEQ ID NO: 4058018 - RNA, 19 nt, Vaccinia virus
aguuuuggccauuauuaga

SEQ ID NO: 4058019 - RNA, 18 nt, Vaccinia virus
auaaaaaauauucuucau

SEQ ID NO: 4058020 - RNA, 18 nt, Vaccinia virus
auaaaaacauuaacaaga

SEQ ID NO: 4058021 - RNA, 18 nt, Vaccinia virus
auaaaaaguaauauucau

SEQ ID NO: 4058022 - RNA, 14 nt, Vaccinia virus
auaaaaauaauauu

SEQ ID NO: 4058023 - RNA, 14 nt, Vaccinia virus
auaaaaauacuuau

SEQ ID NO: 4058024 - RNA, 20 nt, Vaccinia virus
auaaaacguggaaagaaucu

SEQ ID NO: 4058025 - RNA, 20 nt, Vaccinia virus
auaaaacuugucuguauaug

SEQ ID NO: 4058026 - RNA, 20 nt, Vaccinia virus
auaaaagucuauuuguuuau

SEQ ID NO: 4058027 - RNA, 21 nt, Vaccinia virus
auaaaaguuguaaaguaaaua

SEQ ID NO: 4058028 - RNA, 14 nt, Vaccinia virus
auaaaauaaaauga

SEQ ID NO: 4058029 - RNA, 14 nt, Vaccinia virus
auaaaauaauacau

SEQ ID NO: 4058030 - RNA, 20 nt, Vaccinia virus
auaaaaucauuugagaaauu

SEQ ID NO: 4058031 - RNA, 13 nt, Vaccinia virus
auaaaaucuauau

SEQ ID NO: 4058032 - RNA, 13 nt, Vaccinia virus
auaaaauguugau

SEQ ID NO: 4058033 - RNA, 15 nt, Vaccinia virus
auaaaauuaauaaua

SEQ ID NO: 4058034 - RNA, 17 nt, Vaccinia virus
auaaaauuaaugagauu

SEQ ID NO: 4058035 - RNA, 21 nt, Vaccinia virus
auaaacagucuccuaauauaa

SEQ ID NO: 4058036 - RNA, 22 nt, Vaccinia virus
auaaacauaaguauauaauaaa

SEQ ID NO: 4058037 - RNA, 14 nt, Vaccinia virus
auaaacauaauaaa

SEQ ID NO: 4058038 - RNA, 20 nt, Vaccinia virus
auaaacauuuguguuuguau

SEQ ID NO: 4058039 - RNA, 14 nt, Vaccinia virus
auaaacuaacacaa

SEQ ID NO: 4058040 - RNA, 20 nt, Vaccinia virus
auaaacuaggauuuaaacaa

SEQ ID NO: 4058041 - RNA, 21 nt, Vaccinia virus
auaaacuccguguuuaugaug

SEQ ID NO: 4058042 - RNA, 19 nt, Vaccinia virus
auaaacugcgccaaauugu

SEQ ID NO: 4058043 - RNA, 13 nt, Vaccinia virus
auaaacuguaaau

SEQ ID NO: 4058044 - RNA, 18 nt, Vaccinia virus
auaaagauaguguagcgu

SEQ ID NO: 4058045 - RNA, 19 nt, Vaccinia virus
auaaaggaauaaaauauga

SEQ ID NO: 4058046 - RNA, 16 nt, Vaccinia virus
auaaauacaauaauua

SEQ ID NO: 4058047 - RNA, 16 nt, Vaccinia virus
auaaauaguucaacau

SEQ ID NO: 4058048 - RNA, 17 nt, Vaccinia virus
auaaauaucaucaauau

SEQ ID NO: 4058049 - RNA, 16 nt, Vaccinia virus
auaaaucaaaauaugg

SEQ ID NO: 4058050 - RNA, 14 nt, Vaccinia virus
auaaaucuaucuuu

SEQ ID NO: 4058051 - RNA, 22 nt, Vaccinia virus
auaaaugcgauacagacauuaa

SEQ ID NO: 4058052 - RNA, 12 nt, Vaccinia virus
auaaaugggaac

SEQ ID NO: 4058053 - RNA, 22 nt, Vaccinia virus
auaaaugguuucgaagaucuuc

SEQ ID NO: 4058054 - RNA, 21 nt, Vaccinia virus
auaaaugucacgccauaacua

SEQ ID NO: 4058055 - RNA, 13 nt, Vaccinia virus
auaaauguuguaa

SEQ ID NO: 4058056 - RNA, 19 nt, Vaccinia virus
auaaauuagucauacguaa

SEQ ID NO: 4058057 - RNA, 17 nt, Vaccinia virus
auaaauuauaaaaaaag

SEQ ID NO: 4058058 - RNA, 23 nt, Vaccinia virus
auaaauuugucauuuaugauaua

SEQ ID NO: 4058059 - RNA, 24 nt, Vaccinia virus
auaacagaguaccaucaacacauu

SEQ ID NO: 4058060 - RNA, 15 nt, Vaccinia virus
auaacaggaguuuuc

SEQ ID NO: 4058061 - RNA, 17 nt, Vaccinia virus
auaacaggcuaaaaugu

SEQ ID NO: 4058062 - RNA, 20 nt, Vaccinia virus
auaacaucagaaaauguaaa

SEQ ID NO: 4058063 - RNA, 15 nt, Vaccinia virus
auaacauguuaauuu

SEQ ID NO: 4058064 - RNA, 19 nt, Vaccinia virus
auaacauguuaauuuccga

SEQ ID NO: 4058065 - RNA, 19 nt, Vaccinia virus
auaacauucuuaaacaaua

SEQ ID NO: 4058066 - RNA, 14 nt, Vaccinia virus
auaacauuguuuau

SEQ ID NO: 4058067 - RNA, 20 nt, Vaccinia virus
auaaccggcaagaaagugaa

SEQ ID NO: 4058068 - RNA, 18 nt, Vaccinia virus
auaaccggcgcugucaug

SEQ ID NO: 4058069 - RNA, 17 nt, Vaccinia virus
auaaccuccugaaaaug

SEQ ID NO: 4058070 - RNA, 17 nt, Vaccinia virus
auaacgaaaauaucaca

SEQ ID NO: 4058071 - RNA, 21 nt, Vaccinia virus
auaacgaguacauucugcaau

SEQ ID NO: 4058072 - RNA, 14 nt, Vaccinia virus
auaacgauauauau

SEQ ID NO: 4058073 - RNA, 20 nt, Vaccinia virus
auaacgauggcaagaaaugg

SEQ ID NO: 4058074 - RNA, 15 nt, Vaccinia virus
auaacgugaaauaua

SEQ ID NO: 4058075 - RNA, 16 nt, Vaccinia virus
auaacguuagccacca

SEQ ID NO: 4058076 - RNA, 19 nt, Vaccinia virus
auaacguuuuuauuuguaa

SEQ ID NO: 4058077 - RNA, 15 nt, Vaccinia virus
auaacuaaacuacua

SEQ ID NO: 4058078 - RNA, 15 nt, Vaccinia virus
auaacuacauauucu

SEQ ID NO: 4058079 - RNA, 21 nt, Vaccinia virus
auaacuauugauguuacacca

SEQ ID NO: 4058080 - RNA, 18 nt, Vaccinia virus
auaacucguuuuucuuaa

SEQ ID NO: 4058081 - RNA, 22 nt, Vaccinia virus
auaacuuuuuaccucauaugaa

SEQ ID NO: 4058082 - RNA, 14 nt, Vaccinia virus
auaacuuuuucaau

SEQ ID NO: 4058083 - RNA, 13 nt, Vaccinia virus
auaagaacuauau

SEQ ID NO: 4058084 - RNA, 22 nt, Vaccinia virus
auaagaaugacuccuauguuuc

SEQ ID NO: 4058085 - RNA, 15 nt, Vaccinia virus
auaaguguugucaaa

SEQ ID NO: 4058086 - RNA, 17 nt, Vaccinia virus
auaauaaaaguuaucca

SEQ ID NO: 4058087 - RNA, 13 nt, Vaccinia virus
auaauaaauacuu

SEQ ID NO: 4058088 - RNA, 14 nt, Vaccinia virus
auaauaacaucgau

SEQ ID NO: 4058089 - RNA, 15 nt, Vaccinia virus
auaauaacaucgauu

SEQ ID NO: 4058090 - RNA, 14 nt, Vaccinia virus
auaauaauauauau

SEQ ID NO: 4058091 - RNA, 11 nt, Vaccinia virus
auaauacuuug

SEQ ID NO: 4058092 - RNA, 14 nt, Vaccinia virus
auaauagacauaau

SEQ ID NO: 4058093 - RNA, 17 nt, Vaccinia virus
auaauagagugugguau

SEQ ID NO: 4058094 - RNA, 17 nt, Vaccinia virus
auaauagcaacauauga

SEQ ID NO: 4058095 - RNA, 20 nt, Vaccinia virus
auaauagguggaacguauau

SEQ ID NO: 4058096 - RNA, 13 nt, Vaccinia virus
auaauauaaacau

SEQ ID NO: 4058097 - RNA, 20 nt, Vaccinia virus
auaauauagagguguuuuau

SEQ ID NO: 4058098 - RNA, 23 nt, Vaccinia virus
auaauaucagaccguacauacau

SEQ ID NO: 4058099 - RNA, 14 nt, Vaccinia virus
auaauaucagaugu

SEQ ID NO: 4058100 - RNA, 17 nt, Vaccinia virus
auaauauccgaauauau

SEQ ID NO: 4058101 - RNA, 16 nt, Vaccinia virus
auaauccagaauguac

SEQ ID NO: 4058102 - RNA, 14 nt, Vaccinia virus
auaauccagauuuu

SEQ ID NO: 4058103 - RNA, 21 nt, Vaccinia virus
auaaucccauucuaauacuuu

SEQ ID NO: 4058104 - RNA, 21 nt, Vaccinia virus
auaauccuaucuaagauguug

SEQ ID NO: 4058105 - RNA, 17 nt, Vaccinia virus
auaauccuuauacaucu

SEQ ID NO: 4058106 - RNA, 19 nt, Vaccinia virus
auaaucugguggauacucu

SEQ ID NO: 4058107 - RNA, 19 nt, Vaccinia virus
auaaugacuguagauauua

SEQ ID NO: 4058108 - RNA, 16 nt, Vaccinia virus
auaaugaguuagauua

SEQ ID NO: 4058109 - RNA, 15 nt, Vaccinia virus
auaaugauacaguac

SEQ ID NO: 4058110 - RNA, 17 nt, Vaccinia virus
auaaugauagacaagau

SEQ ID NO: 4058111 - RNA, 17 nt, Vaccinia virus
auaaugaugaccuauau

SEQ ID NO: 4058112 - RNA, 18 nt, Vaccinia virus
auaauggaucuucuagua

SEQ ID NO: 4058113 - RNA, 18 nt, Vaccinia virus
auaauguaaaaucaugau

SEQ ID NO: 4058114 - RNA, 16 nt, Vaccinia virus
auaauguuaccguguu

SEQ ID NO: 4058115 - RNA, 15 nt, Vaccinia virus
auaauuauagaucag

SEQ ID NO: 4058116 - RNA, 13 nt, Vaccinia virus
auaauuauuucca

SEQ ID NO: 4058117 - RNA, 19 nt, Vaccinia virus
auaauugagauugauguaa

SEQ ID NO: 4058118 - RNA, 21 nt, Vaccinia virus
acaucuauauugcuacauaau

SEQ ID NO: 4058119 - RNA, 10 nt, Vaccinia virus
acaucuaucu

SEQ ID NO: 4058120 - RNA, 14 nt, Vaccinia virus
acaucucgcaauaa

SEQ ID NO: 4058121 - RNA, 13 nt, Vaccinia virus
acaucuguuugag

SEQ ID NO: 4058122 - RNA, 15 nt, Vaccinia virus
acaucuugauacuuu

SEQ ID NO: 4058123 - RNA, 14 nt, Vaccinia virus
acauggaacucaug

SEQ ID NO: 4058124 - RNA, 14 nt, Vaccinia virus
acaugggaaaugau

SEQ ID NO: 4058125 - RNA, 13 nt, Vaccinia virus
acauguaauacau

SEQ ID NO: 4058126 - RNA, 23 nt, Vaccinia virus
acauguaucgacgguaaauggaa

SEQ ID NO: 4058127 - RNA, 15 nt, Vaccinia virus
acaugugucauuuau

SEQ ID NO: 4058128 - RNA, 17 nt, Vaccinia virus
acgcuagcgacucuguu

SEQ ID NO: 4058129 - RNA, 17 nt, Vaccinia virus
acgcugaaguaauuaau

SEQ ID NO: 4058130 - RNA, 16 nt, Vaccinia virus
acggaaaaaugcaugu

SEQ ID NO: 4058131 - RNA, 18 nt, Vaccinia virus
acggagccccaggaucuc

SEQ ID NO: 4058132 - RNA, 22 nt, Vaccinia virus
acgggaaaggaauuaauuauuc

SEQ ID NO: 4058133 - RNA, 18 nt, Vaccinia virus
acguaaugaaguuaauga

SEQ ID NO: 4058134 - RNA, 15 nt, Vaccinia virus
acguagaaaacggau

SEQ ID NO: 4058135 - RNA, 23 nt, Vaccinia virus
acguaucaccaacggaaauggua

SEQ ID NO: 4058136 - RNA, 15 nt, Vaccinia virus
acgucaucaaaaaua

SEQ ID NO: 4058137 - RNA, 22 nt, Vaccinia virus
acgucauccuuuccgaaagaua

SEQ ID NO: 4058138 - RNA, 13 nt, Vaccinia virus
acgucauuucauc

SEQ ID NO: 4058139 - RNA, 21 nt, Vaccinia virus
acgugauggauauauuaaagu

SEQ ID NO: 4058140 - RNA, 14 nt, Vaccinia virus
acgugauuuuauca

SEQ ID NO: 4058141 - RNA, 13 nt, Vaccinia virus
acguuaaacauua

SEQ ID NO: 4058142 - RNA, 18 nt, Vaccinia virus
acguucacuaauaaauug

SEQ ID NO: 4058143 - RNA, 15 nt, Vaccinia virus
acguucauagaauuu

SEQ ID NO: 4058144 - RNA, 19 nt, Vaccinia virus
acguucggagacaauaaag

SEQ ID NO: 4058145 - RNA, 22 nt, Vaccinia virus
acguugauggacagaugauaca

SEQ ID NO: 4058146 - RNA, 21 nt, Vaccinia virus
acguuguaaaacauaaaggaa

SEQ ID NO: 4058147 - RNA, 15 nt, Vaccinia virus
acguuuaauaauaau

SEQ ID NO: 4058148 - RNA, 22 nt, Vaccinia virus
acguuuagccgccuuuaauaga

SEQ ID NO: 4058149 - RNA, 19 nt, Vaccinia virus
acguuucugucaacaaugu

SEQ ID NO: 4058150 - RNA, 13 nt, Vaccinia virus
acuaaacacauua

SEQ ID NO: 4058151 - RNA, 13 nt, Vaccinia virus
acuaaauacauua

SEQ ID NO: 4058152 - RNA, 20 nt, Vaccinia virus
acuaaauuaacaauaucaau

SEQ ID NO: 4058153 - RNA, 16 nt, Vaccinia virus
acuaacaauaacuaga

SEQ ID NO: 4058154 - RNA, 16 nt, Vaccinia virus
acuaacgaaauuaaua

SEQ ID NO: 4058155 - RNA, 14 nt, Vaccinia virus
acuaauaaacauuc

SEQ ID NO: 4058156 - RNA, 14 nt, Vaccinia virus
acuaauaauaauua

SEQ ID NO: 4058157 - RNA, 16 nt, Vaccinia virus
acuaauacaucugaaa

SEQ ID NO: 4058158 - RNA, 17 nt, Vaccinia virus
acuaaugacaauaauua

SEQ ID NO: 4058159 - RNA, 19 nt, Vaccinia virus
acuaaugcaucuauuucau

SEQ ID NO: 4058160 - RNA, 20 nt, Vaccinia virus
acuaaugcaucuauuucauc

SEQ ID NO: 4058161 - RNA, 14 nt, Vaccinia virus
acuaauguuaauug

SEQ ID NO: 4058162 - RNA, 18 nt, Vaccinia virus
acuaauuuuuauuaauga

SEQ ID NO: 4058163 - RNA, 14 nt, Vaccinia virus
acuacaauauuuca

SEQ ID NO: 4058164 - RNA, 15 nt, Vaccinia virus
acuacaauauuucau

SEQ ID NO: 4058165 - RNA, 16 nt, Vaccinia virus
acuacaucuuuaagau

SEQ ID NO: 4058166 - RNA, 18 nt, Vaccinia virus
acuaccucagacugguag

SEQ ID NO: 4058167 - RNA, 13 nt, Vaccinia virus
acuaccuuaauaa

SEQ ID NO: 4058168 - RNA, 15 nt, Vaccinia virus
acuacguugaagauc

SEQ ID NO: 4058169 - RNA, 22 nt, Vaccinia virus
acuacuaggagggaaaaugaag

SEQ ID NO: 4058170 - RNA, 12 nt, Vaccinia virus
acuacuggaaua

SEQ ID NO: 4058171 - RNA, 19 nt, Vaccinia virus
acuagaaagggaaaaauua

SEQ ID NO: 4058172 - RNA, 13 nt, Vaccinia virus
acuagaagagaau

SEQ ID NO: 4058173 - RNA, 14 nt, Vaccinia virus
acuagaauaaagca

SEQ ID NO: 4058174 - RNA, 23 nt, Vaccinia virus
acuagaguaguauauugucacau

SEQ ID NO: 4058175 - RNA, 23 nt, Vaccinia virus
acuagauaaacuaucaguaaguu

SEQ ID NO: 4058176 - RNA, 16 nt, Vaccinia virus
acuaguauauguggaa

SEQ ID NO: 4058177 - RNA, 18 nt, Vaccinia virus
acuauaaaauaaaaugag

SEQ ID NO: 4058178 - RNA, 18 nt, Vaccinia virus
acuauaaauggagaaugu

SEQ ID NO: 4058179 - RNA, 23 nt, Vaccinia virus
acuauagaccaaacugcaaaugu

SEQ ID NO: 4058180 - RNA, 20 nt, Vaccinia virus
acuauaguacaccuagagaa

SEQ ID NO: 4058181 - RNA, 14 nt, Vaccinia virus
acuauauguuccag

SEQ ID NO: 4058182 - RNA, 23 nt, Vaccinia virus
acuaucagaaucaguuacauguu

SEQ ID NO: 4058183 - RNA, 15 nt, Vaccinia virus
acuaucauaauuaaa

SEQ ID NO: 4058184 - RNA, 19 nt, Vaccinia virus
acuaucgcaucaaaaggau

SEQ ID NO: 4058185 - RNA, 14 nt, Vaccinia virus
acuaucuaaaugua

SEQ ID NO: 4058186 - RNA, 23 nt, Vaccinia virus
acuaugaauccgaugaucucacu

SEQ ID NO: 4058187 - RNA, 16 nt, Vaccinia virus
acuaugccaaaugaau

SEQ ID NO: 4058188 - RNA, 20 nt, Vaccinia virus
acuaugccaagcguaugcug

SEQ ID NO: 4058189 - RNA, 18 nt, Vaccinia virus
acuaugcgauuauuuuca

SEQ ID NO: 4058190 - RNA, 16 nt, Vaccinia virus
acuauggcaauaauug

SEQ ID NO: 4058191 - RNA, 16 nt, Vaccinia virus
acuaugucaaaaauug

SEQ ID NO: 4058192 - RNA, 18 nt, Vaccinia virus
acuauguuuuuuauuaga

SEQ ID NO: 4058193 - RNA, 20 nt, Vaccinia virus
acuauuauacucuguauuag

SEQ ID NO: 4058194 - RNA, 15 nt, Vaccinia virus
acuauucauggaaau

SEQ ID NO: 4058195 - RNA, 22 nt, Vaccinia virus
acuauuccuagcaucagcaaaa

SEQ ID NO: 4058196 - RNA, 17 nt, Vaccinia virus
acuauugacuuaauagg

SEQ ID NO: 4058197 - RNA, 16 nt, Vaccinia virus
acuauuuggauagaca

SEQ ID NO: 4058198 - RNA, 18 nt, Vaccinia virus
acuauuugucuuaauaga

SEQ ID NO: 4058199 - RNA, 20 nt, Vaccinia virus
acuauuuuaaauagcauaga

SEQ ID NO: 4058200 - RNA, 16 nt, Vaccinia virus
acucacgcaauuauua

SEQ ID NO: 4058201 - RNA, 17 nt, Vaccinia virus
acucauaaauaaaaaug

SEQ ID NO: 4058202 - RNA, 16 nt, Vaccinia virus
acuccaauuaucuuua

SEQ ID NO: 4058203 - RNA, 14 nt, Vaccinia virus
acuccguagagaaa

SEQ ID NO: 4058204 - RNA, 12 nt, Vaccinia virus
acucuaaaauau

SEQ ID NO: 4058205 - RNA, 23 nt, Vaccinia virus
acucuacacguguccacauccuu

SEQ ID NO: 4058206 - RNA, 16 nt, Vaccinia virus
acucuacguaucucgu

SEQ ID NO: 4058207 - RNA, 22 nt, Vaccinia virus
acucuaucauggcaauaacaca

SEQ ID NO: 4058208 - RNA, 16 nt, Vaccinia virus
acucuauucuucaaga

SEQ ID NO: 4058209 - RNA, 20 nt, Vaccinia virus
acucucuacccuaaacuuua

SEQ ID NO: 4058210 - RNA, 23 nt, Vaccinia virus
acucuuacaacgccaucaugaau

SEQ ID NO: 4058211 - RNA, 14 nt, Vaccinia virus
acugaaucauauau

SEQ ID NO: 4058212 - RNA, 14 nt, Vaccinia virus
acugacuuaauagu

SEQ ID NO: 4058213 - RNA, 15 nt, Vaccinia virus
acugauaccaugaaa

SEQ ID NO: 4058214 - RNA, 18 nt, Vaccinia virus
acugauuaauuauuugcc

SEQ ID NO: 4058215 - RNA, 13 nt, Vaccinia virus
acugauuagaaau

SEQ ID NO: 4058216 - RNA, 15 nt, Vaccinia virus
acugauucagaaaug

SEQ ID NO: 4058217 - RNA, 16 nt, Vaccinia virus
acugcaauaaaacauu

SEQ ID NO: 4058218 - RNA, 21 nt, Vaccinia virus
acugcagcaaaggcaauaagu

SEQ ID NO: 4058219 - RNA, 17 nt, Vaccinia virus
acugcauccuucuaaga

SEQ ID NO: 4058220 - RNA, 13 nt, Vaccinia virus
acugcugugaaua

SEQ ID NO: 4058221 - RNA, 18 nt, Vaccinia virus
acugcuuuaggugcugaa

SEQ ID NO: 4058222 - RNA, 19 nt, Vaccinia virus
acuggucauagaaaaugau

SEQ ID NO: 4058223 - RNA, 20 nt, Vaccinia virus
acuggucauagaaaaugauu

SEQ ID NO: 4058224 - RNA, 20 nt, Vaccinia virus
acugguguauauaauuauuu

SEQ ID NO: 4058225 - RNA, 16 nt, Vaccinia virus
acugguuaaaauccuc

SEQ ID NO: 4058226 - RNA, 22 nt, Vaccinia virus
acuguacaaggaauugaugaag

SEQ ID NO: 4058227 - RNA, 19 nt, Vaccinia virus
acuguacccacuaugaaua

SEQ ID NO: 4058228 - RNA, 19 nt, Vaccinia virus
acuguagauauuauauaga

SEQ ID NO: 4058229 - RNA, 22 nt, Vaccinia virus
acuguaucgauuucuacauaua

SEQ ID NO: 4058230 - RNA, 16 nt, Vaccinia virus
acuguccaaaaugaug

SEQ ID NO: 4058231 - RNA, 14 nt, Vaccinia virus
acugucuaaaugua

SEQ ID NO: 4058232 - RNA, 15 nt, Vaccinia virus
acuguggauguaaua

SEQ ID NO: 4058233 - RNA, 20 nt, Vaccinia virus
acuguggaugugacagacug

SEQ ID NO: 4058234 - RNA, 19 nt, Vaccinia virus
acuguuauuacuacugaag

SEQ ID NO: 4058235 - RNA, 13 nt, Vaccinia virus
acuguucaagaau

SEQ ID NO: 4058236 - RNA, 22 nt, Vaccinia virus
acuguugaaguacuuaaugaag

SEQ ID NO: 4058237 - RNA, 15 nt, Vaccinia virus
acuguuuauuaauga

SEQ ID NO: 4058238 - RNA, 20 nt, Vaccinia virus
acuguuuuccugaaggaaau

SEQ ID NO: 4058239 - RNA, 14 nt, Vaccinia virus
acuuaaaaaaugaa

SEQ ID NO: 4058240 - RNA, 16 nt, Vaccinia virus
acuuaaugaaaaaugu

SEQ ID NO: 4058241 - RNA, 16 nt, Vaccinia virus
acuuacugacaaaguu

SEQ ID NO: 4058242 - RNA, 16 nt, Vaccinia virus
acuuagauuaaauucu

SEQ ID NO: 4058243 - RNA, 19 nt, Vaccinia virus
acuucaaaguuguuaaaaa

SEQ ID NO: 4058244 - RNA, 23 nt, Vaccinia virus
acuucaaaguuguuaaaaaauua

SEQ ID NO: 4058245 - RNA, 18 nt, Vaccinia virus
acuucagaugauggugca

SEQ ID NO: 4058246 - RNA, 17 nt, Vaccinia virus
acuuccaauaaaauuac

SEQ ID NO: 4058247 - RNA, 23 nt, Vaccinia virus
acuuccucauuaagauugucaug

SEQ ID NO: 4058248 - RNA, 16 nt, Vaccinia virus
acuucguuuaucuugg

SEQ ID NO: 4058249 - RNA, 18 nt, Vaccinia virus
acuucuuggaaugauacu

SEQ ID NO: 4058250 - RNA, 22 nt, Vaccinia virus
acuugaaauaaucggagaaugu

SEQ ID NO: 4058251 - RNA, 13 nt, Vaccinia virus
acuuguuaauagu

SEQ ID NO: 4058252 - RNA, 22 nt, Vaccinia virus
agcaauuagugccguauacuuu

SEQ ID NO: 4058253 - RNA, 18 nt, Vaccinia virus
agcaauuaugaaacaaua

SEQ ID NO: 4058254 - RNA, 16 nt, Vaccinia virus
agcacaucaaaugaug

SEQ ID NO: 4058255 - RNA, 23 nt, Vaccinia virus
agcacgaucgugguuaacaauau

SEQ ID NO: 4058256 - RNA, 18 nt, Vaccinia virus
agcacguggaaaaaaagu

SEQ ID NO: 4058257 - RNA, 21 nt, Vaccinia virus
agcacuacgcaauaugaucac

SEQ ID NO: 4058258 - RNA, 21 nt, Vaccinia virus
agcacucguuauuaauacaag

SEQ ID NO: 4058259 - RNA, 16 nt, Vaccinia virus
agcagacuagaaauaa

SEQ ID NO: 4058260 - RNA, 22 nt, Vaccinia virus
agcagauuagacgauaugacau

SEQ ID NO: 4058261 - RNA, 16 nt, Vaccinia virus
agcauauuagaaucua

SEQ ID NO: 4058262 - RNA, 21 nt, Vaccinia virus
agcauauuccuaaauacaucu

SEQ ID NO: 4058263 - RNA, 19 nt, Vaccinia virus
agcauauuguaauaucuua

SEQ ID NO: 4058264 - RNA, 17 nt, Vaccinia virus
agcaucaauaauuguuu

SEQ ID NO: 4058265 - RNA, 18 nt, Vaccinia virus
agcaucauaaaaaugagu

SEQ ID NO: 4058266 - RNA, 14 nt, Vaccinia virus
agcaucuaacuuga

SEQ ID NO: 4058267 - RNA, 22 nt, Vaccinia virus
agcaucuugaauagaaacgaua

SEQ ID NO: 4058268 - RNA, 11 nt, Vaccinia virus
agcauguagaa

SEQ ID NO: 4058269 - RNA, 13 nt, Vaccinia virus
agcauuaauacag

SEQ ID NO: 4058270 - RNA, 19 nt, Vaccinia virus
agcauucacagauucuauu

SEQ ID NO: 4058271 - RNA, 14 nt, Vaccinia virus
agcauugaaaauac

SEQ ID NO: 4058272 - RNA, 21 nt, Vaccinia virus
agccaagacgaacaaaaucaa

SEQ ID NO: 4058273 - RNA, 16 nt, Vaccinia virus
agccaauccuaacucu

SEQ ID NO: 4058274 - RNA, 21 nt, Vaccinia virus
agccauucuucccauggaugu

SEQ ID NO: 4058275 - RNA, 18 nt, Vaccinia virus
agcgcauaauaaauuaua

SEQ ID NO: 4058276 - RNA, 14 nt, Vaccinia virus
agcggauaaugaua

SEQ ID NO: 4058277 - RNA, 19 nt, Vaccinia virus
agcggauaaugauagaauu

SEQ ID NO: 4058278 - RNA, 14 nt, Vaccinia virus
agcggcaucuaaau

SEQ ID NO: 4058279 - RNA, 14 nt, Vaccinia virus
agcgguguuauuau

SEQ ID NO: 4058280 - RNA, 21 nt, Vaccinia virus
agcguacagauacgaugauga

SEQ ID NO: 4058281 - RNA, 15 nt, Vaccinia virus
agcuaagucuauuau

SEQ ID NO: 4058282 - RNA, 15 nt, Vaccinia virus
agcuaauaccaauuu

SEQ ID NO: 4058283 - RNA, 23 nt, Vaccinia virus
agcuaauauaaaaauauauuaau

SEQ ID NO: 4058284 - RNA, 14 nt, Vaccinia virus
agcuacucuagauu

SEQ ID NO: 4058285 - RNA, 16 nt, Vaccinia virus
agcuaucaaaauaugu

SEQ ID NO: 4058286 - RNA, 22 nt, Vaccinia virus
agcuaugaacuuguuuaaugac

SEQ ID NO: 4058287 - RNA, 21 nt, Vaccinia virus
agcuaugcgauuggauaagaa

SEQ ID NO: 4058288 - RNA, 20 nt, Vaccinia virus
agcuauuaucaaauacugua

SEQ ID NO: 4058289 - RNA, 17 nt, Vaccinia virus
agcuauugcauaauaca

SEQ ID NO: 4058290 - RNA, 15 nt, Vaccinia virus
agcuccaucaguuuu

SEQ ID NO: 4058291 - RNA, 23 nt, Vaccinia virus
agcuccuaauggagauuuucuau

SEQ ID NO: 4058292 - RNA, 15 nt, Vaccinia virus
agcuccugguauaug

SEQ ID NO: 4058293 - RNA, 17 nt, Vaccinia virus
agcucucguauucaguu

SEQ ID NO: 4058294 - RNA, 21 nt, Vaccinia virus
agcucucguauucaguuucau

SEQ ID NO: 4058295 - RNA, 16 nt, Vaccinia virus
agcucuuugaaguuuu

SEQ ID NO: 4058296 - RNA, 14 nt, Vaccinia virus
agcuggucuaaaau

SEQ ID NO: 4058297 - RNA, 19 nt, Vaccinia virus
agcugugaguauuaaugau

SEQ ID NO: 4058298 - RNA, 14 nt, Vaccinia virus
agcuuaaacuacua

SEQ ID NO: 4058299 - RNA, 19 nt, Vaccinia virus
agcuucaucuauaucuaga

SEQ ID NO: 4058300 - RNA, 22 nt, Vaccinia virus
agcuucgcugguaguuuaauau

SEQ ID NO: 4058301 - RNA, 15 nt, Vaccinia virus
agcuucguauacucu

SEQ ID NO: 4058302 - RNA, 19 nt, Vaccinia virus
agcuuucacucauaugaca

SEQ ID NO: 4058303 - RNA, 20 nt, Vaccinia virus
agcuuucacuuaaacuguau

SEQ ID NO: 4058304 - RNA, 20 nt, Vaccinia virus
agcuuucauaguuagauaca

SEQ ID NO: 4058305 - RNA, 13 nt, Vaccinia virus
aggaaaaaagaua

SEQ ID NO: 4058306 - RNA, 12 nt, Vaccinia virus
aggaaaaguauu

SEQ ID NO: 4058307 - RNA, 14 nt, Vaccinia virus
aggaaauaucaauu

SEQ ID NO: 4058308 - RNA, 18 nt, Vaccinia virus
aggaaauuaugagaauga

SEQ ID NO: 4058309 - RNA, 13 nt, Vaccinia virus
aggaacaaauauu

SEQ ID NO: 4058310 - RNA, 18 nt, Vaccinia virus
aggaacuggauauuacaa

SEQ ID NO: 4058311 - RNA, 17 nt, Vaccinia virus
aggaagaauaucauauu

SEQ ID NO: 4058312 - RNA, 19 nt, Vaccinia virus
aggaaugauugccuucauc

SEQ ID NO: 4058313 - RNA, 21 nt, Vaccinia virus
aggaauuacauagaugauauu

SEQ ID NO: 4058314 - RNA, 20 nt, Vaccinia virus
aggacaaagugaaacaauca

SEQ ID NO: 4058315 - RNA, 17 nt, Vaccinia virus
aggacaccacuaucuga

SEQ ID NO: 4058316 - RNA, 14 nt, Vaccinia virus
aggacguaauacau

SEQ ID NO: 4058317 - RNA, 13 nt, Vaccinia virus
aggacuauuagaa

SEQ ID NO: 4058318 - RNA, 13 nt, Vaccinia virus
aggacuuaacaau

SEQ ID NO: 4058319 - RNA, 20 nt, Vaccinia virus
aggacuuucuucaaagaaaa

SEQ ID NO: 4058320 - RNA, 14 nt, Vaccinia virus
aggagaacaaagaa

SEQ ID NO: 4058321 - RNA, 22 nt, Vaccinia virus
aggagaugauagucauuugacu

SEQ ID NO: 4058322 - RNA, 14 nt, Vaccinia virus
aggagauuaaagga

SEQ ID NO: 4058323 - RNA, 18 nt, Vaccinia virus
aggagauuuagaaauguu

SEQ ID NO: 4058324 - RNA, 16 nt, Vaccinia virus
aggagcauacaguaag

SEQ ID NO: 4058325 - RNA, 17 nt, Vaccinia virus
aggagccgaaaacauug

SEQ ID NO: 4058326 - RNA, 17 nt, Vaccinia virus
aggagucgccaaaugua

SEQ ID NO: 4058327 - RNA, 19 nt, Vaccinia virus
aggauaaaauauuauccaa

SEQ ID NO: 4058328 - RNA, 13 nt, Vaccinia virus
aggauaaaguaaa

SEQ ID NO: 4058329 - RNA, 12 nt, Vaccinia virus
aggauaauacau

SEQ ID NO: 4058330 - RNA, 21 nt, Vaccinia virus
aggauacacucucaauauacu

SEQ ID NO: 4058331 - RNA, 18 nt, Vaccinia virus
aggauaccgaagaauuaa

SEQ ID NO: 4058332 - RNA, 15 nt, Vaccinia virus
aggauagagcaauaa

SEQ ID NO: 4058333 - RNA, 17 nt, Vaccinia virus
aggauauauuaaagucu

SEQ ID NO: 4058334 - RNA, 14 nt, Vaccinia virus
aggauaucucaaaa

SEQ ID NO: 4058335 - RNA, 20 nt, Vaccinia virus
aggauaugauaaaaaauaua

SEQ ID NO: 4058336 - RNA, 18 nt, Vaccinia virus
aggaucuagcaaaggaaa

SEQ ID NO: 4058337 - RNA, 17 nt, Vaccinia virus
aggauuauaaucucauu

SEQ ID NO: 4058338 - RNA, 20 nt, Vaccinia virus
aggauucgauuuugauguau

SEQ ID NO: 4058339 - RNA, 23 nt, Vaccinia virus
aggauugauuacuauaaauggag

SEQ ID NO: 4058340 - RNA, 18 nt, Vaccinia virus
aggauuggucuuaaaaga

SEQ ID NO: 4058341 - RNA, 13 nt, Vaccinia virus
aggauuuucuaga

SEQ ID NO: 4058342 - RNA, 22 nt, Vaccinia virus
aggcaacaaguauacaauuuug

SEQ ID NO: 4058343 - RNA, 17 nt, Vaccinia virus
aggcacauaauaucuuu

SEQ ID NO: 4058344 - RNA, 18 nt, Vaccinia virus
aggccaaagaaaugagua

SEQ ID NO: 4058345 - RNA, 20 nt, Vaccinia virus
aggcguaucugauacaggcg

SEQ ID NO: 4058346 - RNA, 16 nt, Vaccinia virus
agggaagcaaaugaug

SEQ ID NO: 4058347 - RNA, 23 nt, Vaccinia virus
agggauaggaguaggaaugccac

SEQ ID NO: 4058348 - RNA, 22 nt, Vaccinia virus
aggggaaaaauuauaauguuuc

SEQ ID NO: 4058349 - RNA, 24 nt, Vaccinia virus
aggguccauuuucuguaaauagaa

SEQ ID NO: 4058350 - RNA, 20 nt, Vaccinia virus
agguaaaguaggacauaaua

SEQ ID NO: 4058351 - RNA, 17 nt, Vaccinia virus
agguaacauaaaaacug

SEQ ID NO: 4058352 - RNA, 14 nt, Vaccinia virus
agguacuaggaaaa

SEQ ID NO: 4058353 - RNA, 16 nt, Vaccinia virus
agguaguaaaaaauaa

SEQ ID NO: 4058354 - RNA, 13 nt, Vaccinia virus
agguauuuauuca

SEQ ID NO: 4058355 - RNA, 20 nt, Vaccinia virus
aggugaugcugguucuggag

SEQ ID NO: 4058356 - RNA, 17 nt, Vaccinia virus
agguggcuaccgacaau

SEQ ID NO: 4058357 - RNA, 21 nt, Vaccinia virus
agguuacguauagucuauaug

SEQ ID NO: 4058358 - RNA, 22 nt, Vaccinia virus
aguaaaacuuucuaguuaucau

SEQ ID NO: 4058359 - RNA, 15 nt, Vaccinia virus
aguaaagaaaagaua

SEQ ID NO: 4058360 - RNA, 18 nt, Vaccinia virus
aguaaaugaaaaaaaacu

SEQ ID NO: 4058361 - RNA, 22 nt, Vaccinia virus
aguaaccccauauaauguagac

SEQ ID NO: 4058362 - RNA, 15 nt, Vaccinia virus
aguaacgcaauacaa

SEQ ID NO: 4058363 - RNA, 21 nt, Vaccinia virus
aguaacuauguaaaugauaac

SEQ ID NO: 4058364 - RNA, 14 nt, Vaccinia virus
aguaagaauaagac

SEQ ID NO: 4058365 - RNA, 14 nt, Vaccinia virus
aguaagcauuuccu

SEQ ID NO: 4058366 - RNA, 19 nt, Vaccinia virus
aguaaguacaucaucugga

SEQ ID NO: 4058367 - RNA, 13 nt, Vaccinia virus
aguaaguaucuua

SEQ ID NO: 4058368 - RNA, 19 nt, Vaccinia virus
aguaagugcaacaucugga

SEQ ID NO: 4058369 - RNA, 17 nt, Vaccinia virus
aguaagugucauuuaac

SEQ ID NO: 4058370 - RNA, 22 nt, Vaccinia virus
aguaauaaaacaaaaaaaagaa

SEQ ID NO: 4058371 - RNA, 17 nt, Vaccinia virus
aguaaucauauaaaugu

SEQ ID NO: 4058372 - RNA, 24 nt, Vaccinia virus
aguaaugaagaaaaguauuaccuc

SEQ ID NO: 4058373 - RNA, 11 nt, Vaccinia virus
aguaauguuua

SEQ ID NO: 4058374 - RNA, 17 nt, Vaccinia virus
aguaauuuguucaaaau

SEQ ID NO: 4058375 - RNA, 14 nt, Vaccinia virus
aguuuucaucaaug

SEQ ID NO: 4058376 - RNA, 19 nt, Vaccinia virus
aguuuuguucauuaauagu

SEQ ID NO: 4058377 - RNA, 16 nt, Vaccinia virus
auaaaaaaagcaaugu

SEQ ID NO: 4058378 - RNA, 11 nt, Vaccinia virus
auaaaaaauua

SEQ ID NO: 4058379 - RNA, 16 nt, Vaccinia virus
auaaaaacgaggauau

SEQ ID NO: 4058380 - RNA, 16 nt, Vaccinia virus
auaaaaauaacaauua

SEQ ID NO: 4058381 - RNA, 22 nt, Vaccinia virus
auaaaaauaguaucaacaauca

SEQ ID NO: 4058382 - RNA, 20 nt, Vaccinia virus
auaaaaauguuuuuguuuaa

SEQ ID NO: 4058383 - RNA, 16 nt, Vaccinia virus
auaaaaauuauguuuu

SEQ ID NO: 4058384 - RNA, 15 nt, Vaccinia virus
auaaaacuuuauuau

SEQ ID NO: 4058385 - RNA, 14 nt, Vaccinia virus
auaaaagaauaugu

SEQ ID NO: 4058386 - RNA, 14 nt, Vaccinia virus
auaaaauggauaac

SEQ ID NO: 4058387 - RNA, 22 nt, Vaccinia virus
auaaaauuuaagagaaugauua

SEQ ID NO: 4058388 - RNA, 14 nt, Vaccinia virus
auaaacacauagaa

SEQ ID NO: 4058389 - RNA, 14 nt, Vaccinia virus
auaaacaucaacau

SEQ ID NO: 4058390 - RNA, 17 nt, Vaccinia virus
auaaacauuguuuguau

SEQ ID NO: 4058391 - RNA, 12 nt, Vaccinia virus
auaaacuagaga

SEQ ID NO: 4058392 - RNA, 21 nt, Vaccinia virus
auaaacucacauuucaaauau

SEQ ID NO: 4058393 - RNA, 17 nt, Vaccinia virus
auaaacuccguguuuau

SEQ ID NO: 4058394 - RNA, 19 nt, Vaccinia virus
auaaacuuuauccauaucu

SEQ ID NO: 4058395 - RNA, 15 nt, Vaccinia virus
auaaagaaaauaugg

SEQ ID NO: 4058396 - RNA, 21 nt, Vaccinia virus
auaaagaaguuauagaaugua

SEQ ID NO: 4058397 - RNA, 14 nt, Vaccinia virus
auaaagaaugaaug

SEQ ID NO: 4058398 - RNA, 17 nt, Vaccinia virus
auaaagacaaacaaugg

SEQ ID NO: 4058399 - RNA, 19 nt, Vaccinia virus
auaaagaccgaauacauaa

SEQ ID NO: 4058400 - RNA, 16 nt, Vaccinia virus
auaaagauauaaauga

SEQ ID NO: 4058401 - RNA, 13 nt, Vaccinia virus
auaaagauauaca

SEQ ID NO: 4058402 - RNA, 23 nt, Vaccinia virus
auaaagaugacgaugaaaaugau

SEQ ID NO: 4058403 - RNA, 16 nt, Vaccinia virus
auaaaggcagaaaugc

SEQ ID NO: 4058404 - RNA, 16 nt, Vaccinia virus
auaaaguuuauacaag

SEQ ID NO: 4058405 - RNA, 13 nt, Vaccinia virus
auaaauaaugaau

SEQ ID NO: 4058406 - RNA, 23 nt, Vaccinia virus
auaaauaaugaucguaaugaaca

SEQ ID NO: 4058407 - RNA, 13 nt, Vaccinia virus
auaaauauacaau

SEQ ID NO: 4058408 - RNA, 18 nt, Vaccinia virus
auaaauauuuuuauucag

SEQ ID NO: 4058409 - RNA, 20 nt, Vaccinia virus
auaaaucauauaaaaaauga

SEQ ID NO: 4058410 - RNA, 17 nt, Vaccinia virus
auaaauccgaugucuug

SEQ ID NO: 4058411 - RNA, 19 nt, Vaccinia virus
auaaaugauucaaccauga

SEQ ID NO: 4058412 - RNA, 13 nt, Vaccinia virus
auaaauggaaaug

SEQ ID NO: 4058413 - RNA, 18 nt, Vaccinia virus
auaaauggagaucuaaau

SEQ ID NO: 4058414 - RNA, 18 nt, Vaccinia virus
auaaauugguaaauccua

SEQ ID NO: 4058415 - RNA, 19 nt, Vaccinia virus
auaacaaaauccaaacauu

SEQ ID NO: 4058416 - RNA, 23 nt, Vaccinia virus
auaacaagagauuuauuguguau

SEQ ID NO: 4058417 - RNA, 21 nt, Vaccinia virus
auaacaaguuuccuguaaauu

SEQ ID NO: 4058418 - RNA, 18 nt, Vaccinia virus
auaacacaaaaugugaac

SEQ ID NO: 4058419 - RNA, 22 nt, Vaccinia virus
auaacagcuuagauuuaacguu

SEQ ID NO: 4058420 - RNA, 14 nt, Vaccinia virus
auaacaguaucuga

SEQ ID NO: 4058421 - RNA, 20 nt, Vaccinia virus
auaacaugaacgauaaacaa

SEQ ID NO: 4058422 - RNA, 16 nt, Vaccinia virus
auaacauuaauaucaa

SEQ ID NO: 4058423 - RNA, 22 nt, Vaccinia virus
auaacauucuaggaauguuguu

SEQ ID NO: 4058424 - RNA, 17 nt, Vaccinia virus
auaacauucuuaaacaa

SEQ ID NO: 4058425 - RNA, 15 nt, Vaccinia virus
auaacauuguuuaug

SEQ ID NO: 4058426 - RNA, 24 nt, Vaccinia virus
auaacauuuauuaucaugaugaca

SEQ ID NO: 4058427 - RNA, 17 nt, Vaccinia virus
auaaccuagaaaauaua

SEQ ID NO: 4058428 - RNA, 23 nt, Vaccinia virus
auaaccuucuaccgaacacuaac

SEQ ID NO: 4058429 - RNA, 16 nt, Vaccinia virus
auaaccuuuuccuuau

SEQ ID NO: 4058430 - RNA, 19 nt, Vaccinia virus
auaacguaaccagaauugu

SEQ ID NO: 4058431 - RNA, 14 nt, Vaccinia virus
auaacuaaaaaugu

SEQ ID NO: 4058432 - RNA, 13 nt, Vaccinia virus
auaacuaaauguc

SEQ ID NO: 4058433 - RNA, 17 nt, Vaccinia virus
auaacuaucagaguuac

SEQ ID NO: 4058434 - RNA, 21 nt, Vaccinia virus
auaacucauuuuuugaauaua

SEQ ID NO: 4058435 - RNA, 15 nt, Vaccinia virus
auaacuguuuaaaaa

SEQ ID NO: 4058436 - RNA, 18 nt, Vaccinia virus
auaacuucuagauguaga

SEQ ID NO: 4058437 - RNA, 14 nt, Vaccinia virus
auaacuuuaguaaa

SEQ ID NO: 4058438 - RNA, 17 nt, Vaccinia virus
auaacuuuuucaauauc

SEQ ID NO: 4058439 - RNA, 16 nt, Vaccinia virus
auaagaagagaaaggu

SEQ ID NO: 4058440 - RNA, 22 nt, Vaccinia virus
auaagacuuuacuuuucuaaau

SEQ ID NO: 4058441 - RNA, 15 nt, Vaccinia virus
auaagaugcaaacau

SEQ ID NO: 4058442 - RNA, 14 nt, Vaccinia virus
auaagauuaucaaa

SEQ ID NO: 4058443 - RNA, 19 nt, Vaccinia virus
auaagcuuugaauguuaua

SEQ ID NO: 4058444 - RNA, 22 nt, Vaccinia virus
auaagguacuuuuucucauaau

SEQ ID NO: 4058445 - RNA, 15 nt, Vaccinia virus
auaaguaaaugaaaa

SEQ ID NO: 4058446 - RNA, 19 nt, Vaccinia virus
auaaguaguaauaaugauu

SEQ ID NO: 4058447 - RNA, 15 nt, Vaccinia virus
auaaguauuaucaaa

SEQ ID NO: 4058448 - RNA, 15 nt, Vaccinia virus
auaauaaauugguaa

SEQ ID NO: 4058449 - RNA, 16 nt, Vaccinia virus
auaauaaauuuuucca

SEQ ID NO: 4058450 - RNA, 20 nt, Vaccinia virus
auaauaacaaguaugacauu

SEQ ID NO: 4058451 - RNA, 14 nt, Vaccinia virus
auaauaaucaaaau

SEQ ID NO: 4058452 - RNA, 13 nt, Vaccinia virus
auaauaaugaaua

SEQ ID NO: 4058453 - RNA, 23 nt, Vaccinia virus
auaauacauccuacuaugcaauu

SEQ ID NO: 4058454 - RNA, 16 nt, Vaccinia virus
auaauacauuuaaauu

SEQ ID NO: 4058455 - RNA, 15 nt, Vaccinia virus
auaauagcaacauau

SEQ ID NO: 4058456 - RNA, 17 nt, Vaccinia virus
auaauagggagaaauga

SEQ ID NO: 4058457 - RNA, 20 nt, Vaccinia virus
auaauagguuugaucguugu

SEQ ID NO: 4058458 - RNA, 13 nt, Vaccinia virus
auaauauaaucua

SEQ ID NO: 4058459 - RNA, 17 nt, Vaccinia virus
auaauaugacucaugau

SEQ ID NO: 4058460 - RNA, 15 nt, Vaccinia virus
auaauauuagauuua

SEQ ID NO: 4058461 - RNA, 16 nt, Vaccinia virus
auaaucaauaauauau

SEQ ID NO: 4058462 - RNA, 21 nt, Vaccinia virus
auaaucaccauacuagaguuu

SEQ ID NO: 4058463 - RNA, 16 nt, Vaccinia virus
auaaucagaauauaca

SEQ ID NO: 4058464 - RNA, 19 nt, Vaccinia virus
auaauccggauguugugua

SEQ ID NO: 4058465 - RNA, 21 nt, Vaccinia virus
auaaucguuuaccacuuaaau

SEQ ID NO: 4058466 - RNA, 23 nt, Vaccinia virus
auaaucuaguaaaacuuucuagu

SEQ ID NO: 4058467 - RNA, 21 nt, Vaccinia virus
auaaucuugauuguacaccca

SEQ ID NO: 4058468 - RNA, 18 nt, Vaccinia virus
auaaugacaauaaaauua

SEQ ID NO: 4058469 - RNA, 14 nt, Vaccinia virus
auaaugauagaaua

SEQ ID NO: 4058470 - RNA, 15 nt, Vaccinia virus
auaaugauagaauua

SEQ ID NO: 4058471 - RNA, 13 nt, Vaccinia virus
auaaugauagaca

SEQ ID NO: 4058472 - RNA, 15 nt, Vaccinia virus
auaauggcuguuugu

SEQ ID NO: 4058473 - RNA, 21 nt, Vaccinia virus
auaaugguucaggauauagau

SEQ ID NO: 4058474 - RNA, 20 nt, Vaccinia virus
auaauguuaccauacauuau

SEQ ID NO: 4058475 - RNA, 18 nt, Vaccinia virus
auaauuauaucacaacau

SEQ ID NO: 4058476 - RNA, 20 nt, Vaccinia virus
auaauuauuucaauauacua

SEQ ID NO: 4058477 - RNA, 13 nt, Vaccinia virus
auaauuuaacaau

SEQ ID NO: 4058478 - RNA, 21 nt, Vaccinia virus
auaauuuaacauuuuggcaaa

SEQ ID NO: 4058479 - RNA, 13 nt, Vaccinia virus
auaauuucuguaa

SEQ ID NO: 4058480 - RNA, 16 nt, Vaccinia virus
auaauuuuuauguuuu

SEQ ID NO: 4058481 - RNA, 18 nt, Vaccinia virus
auacaaaauguuugacau

SEQ ID NO: 4058482 - RNA, 18 nt, Vaccinia virus
auacaaauccauuaaugu

SEQ ID NO: 4058483 - RNA, 17 nt, Vaccinia virus
auacaagaacaacuaga

SEQ ID NO: 4058484 - RNA, 16 nt, Vaccinia virus
auacaagaguggaaac

SEQ ID NO: 4058485 - RNA, 17 nt, Vaccinia virus
auacaaguguagaugau

SEQ ID NO: 4058486 - RNA, 20 nt, Vaccinia virus
auacaaugcucaguaaaugu

SEQ ID NO: 4058487 - RNA, 18 nt, Vaccinia virus
auacaauggaauacuuca

SEQ ID NO: 4058488 - RNA, 14 nt, Vaccinia virus
auacacaucaaaau

SEQ ID NO: 4058489 - RNA, 22 nt, Vaccinia virus
auacacgauuuaauccaucugu

SEQ ID NO: 4058490 - RNA, 14 nt, Vaccinia virus
auacagaagauuua

SEQ ID NO: 4058491 - RNA, 18 nt, Vaccinia virus
auacagacaauugacaaa

SEQ ID NO: 4058492 - RNA, 18 nt, Vaccinia virus
auacagacgauaacuuga

SEQ ID NO: 4058493 - RNA, 20 nt, Vaccinia virus
auacagcguuacauuauuau

SEQ ID NO: 4058494 - RNA, 16 nt, Vaccinia virus
auacauaaagaaaugu

SEQ ID NO: 4058495 - RNA, 19 nt, Vaccinia virus
auacauaauucuucuguua

SEQ ID NO: 4058496 - RNA, 12 nt, Vaccinia virus
auacauauuuua

SEQ ID NO: 4058497 - RNA, 24 nt, Vaccinia virus
auacaucaagagagcagaaauuac

SEQ ID NO: 4058498 - RNA, 20 nt, Vaccinia virus
auacauccguagaaauauga

SEQ ID NO: 4058499 - RNA, 21 nt, Vaccinia virus
auauauucgcauauauuccca

SEQ ID NO: 4058500 - RNA, 12 nt, Vaccinia virus
auauauuguuaa

SEQ ID NO: 4058501 - RNA, 13 nt, Vaccinia virus
auauauuguuuca

SEQ ID NO: 4058502 - RNA, 16 nt, Vaccinia virus
auauauuuuucuagau

SEQ ID NO: 4058503 - RNA, 19 nt, Vaccinia virus
auaucacauaguguuuuau

SEQ ID NO: 4058504 - RNA, 17 nt, Vaccinia virus
auaucaguguccaucau

SEQ ID NO: 4058505 - RNA, 15 nt, Vaccinia virus
auaucaugaaauaua

SEQ ID NO: 4058506 - RNA, 20 nt, Vaccinia virus
auaucauuaggauuuaacuc

SEQ ID NO: 4058507 - RNA, 22 nt, Vaccinia virus
auauccaaaauuuuguaugaag

SEQ ID NO: 4058508 - RNA, 20 nt, Vaccinia virus
auauccagauggaguggaag

SEQ ID NO: 4058509 - RNA, 23 nt, Vaccinia virus
auauccucacaacuuaaugaaga

SEQ ID NO: 4058510 - RNA, 14 nt, Vaccinia virus
auaucgauguuuaa

SEQ ID NO: 4058511 - RNA, 16 nt, Vaccinia virus
auaucuaaaugaauac

SEQ ID NO: 4058512 - RNA, 21 nt, Vaccinia virus
auaucuaauggauaaacugaa

SEQ ID NO: 4058513 - RNA, 15 nt, Vaccinia virus
auaucuaauuucugu

SEQ ID NO: 4058514 - RNA, 13 nt, Vaccinia virus
auaucuagaauga

SEQ ID NO: 4058515 - RNA, 15 nt, Vaccinia virus
auaucuauaggaaag

SEQ ID NO: 4058516 - RNA, 15 nt, Vaccinia virus
auaucuauaugauug

SEQ ID NO: 4058517 - RNA, 18 nt, Vaccinia virus
auaucugaguaugaugau

SEQ ID NO: 4058518 - RNA, 13 nt, Vaccinia virus
auaucuuaaauaa

SEQ ID NO: 4058519 - RNA, 17 nt, Vaccinia virus
auaugaaaaacaugucu

SEQ ID NO: 4058520 - RNA, 18 nt, Vaccinia virus
auaugaaccugacaugau

SEQ ID NO: 4058521 - RNA, 19 nt, Vaccinia virus
auaugauccaugcauagau

SEQ ID NO: 4058522 - RNA, 20 nt, Vaccinia virus
auaugauguuucuguuuuca

SEQ ID NO: 4058523 - RNA, 21 nt, Vaccinia virus
auaugauuucagauacuauau

SEQ ID NO: 4058524 - RNA, 23 nt, Vaccinia virus
auaugcccgguaguugcgauaua

SEQ ID NO: 4058525 - RNA, 17 nt, Vaccinia virus
auauggauauucauaga

SEQ ID NO: 4058526 - RNA, 21 nt, Vaccinia virus
auauggcgcgcguucaacauu

SEQ ID NO: 4058527 - RNA, 22 nt, Vaccinia virus
auaugguuucuaaaucuaucaa

SEQ ID NO: 4058528 - RNA, 23 nt, Vaccinia virus
auaugguuuuuggccaaaaugau

SEQ ID NO: 4058529 - RNA, 18 nt, Vaccinia virus
auauguagcaaacaugau

SEQ ID NO: 4058530 - RNA, 15 nt, Vaccinia virus
auauguaucaaagau

SEQ ID NO: 4058531 - RNA, 23 nt, Vaccinia virus
auauguggaaaugucauagaaag

SEQ ID NO: 4058532 - RNA, 21 nt, Vaccinia virus
auauuaaaaaaugucacuauu

SEQ ID NO: 4058533 - RNA, 19 nt, Vaccinia virus
auauuaaaaauaagaauga

SEQ ID NO: 4058534 - RNA, 20 nt, Vaccinia virus
auauuaacgaguuccauuua

SEQ ID NO: 4058535 - RNA, 11 nt, Vaccinia virus
auauuaauaga

SEQ ID NO: 4058536 - RNA, 15 nt, Vaccinia virus
auauuaauaggagau

SEQ ID NO: 4058537 - RNA, 15 nt, Vaccinia virus
auauuaaugucguau

SEQ ID NO: 4058538 - RNA, 14 nt, Vaccinia virus
auauuaguacagaa

SEQ ID NO: 4058539 - RNA, 12 nt, Vaccinia virus
auauuauacaaa

SEQ ID NO: 4058540 - RNA, 16 nt, Vaccinia virus
auauuauauaaacauu

SEQ ID NO: 4058541 - RNA, 13 nt, Vaccinia virus
auauuaucaaaau

SEQ ID NO: 4058542 - RNA, 22 nt, Vaccinia virus
auauuaucgugccgaaauucgu

SEQ ID NO: 4058543 - RNA, 19 nt, Vaccinia virus
auauuaucucaacaaaauu

SEQ ID NO: 4058544 - RNA, 20 nt, Vaccinia virus
auauuaucuuuuuagacacg

SEQ ID NO: 4058545 - RNA, 22 nt, Vaccinia virus
auauuauuauuuuucuugguaa

SEQ ID NO: 4058546 - RNA, 15 nt, Vaccinia virus
auauucaacauguuu

SEQ ID NO: 4058547 - RNA, 15 nt, Vaccinia virus
auauucauagauuga

SEQ ID NO: 4058548 - RNA, 18 nt, Vaccinia virus
auauuccaguucauauuu

SEQ ID NO: 4058549 - RNA, 15 nt, Vaccinia virus
auauucccaaacaua

SEQ ID NO: 4058550 - RNA, 15 nt, Vaccinia virus
auauuccuugaauaa

SEQ ID NO: 4058551 - RNA, 14 nt, Vaccinia virus
auauucuaugaauu

SEQ ID NO: 4058552 - RNA, 14 nt, Vaccinia virus
auauucuaugacug

SEQ ID NO: 4058553 - RNA, 13 nt, Vaccinia virus
auauucuaugaug

SEQ ID NO: 4058554 - RNA, 17 nt, Vaccinia virus
auauucuguaguuguau

SEQ ID NO: 4058555 - RNA, 16 nt, Vaccinia virus
auauucuguuguguca

SEQ ID NO: 4058556 - RNA, 24 nt, Vaccinia virus
auauucuuaaaagguuucauauuu

SEQ ID NO: 4058557 - RNA, 22 nt, Vaccinia virus
auauugauaauauuuuaauaga

SEQ ID NO: 4058558 - RNA, 20 nt, Vaccinia virus
auauugauaucuuuuugaau

SEQ ID NO: 4058559 - RNA, 20 nt, Vaccinia virus
auauugaugugucuguuuau

SEQ ID NO: 4058560 - RNA, 18 nt, Vaccinia virus
auauugcaccagaauuaa

SEQ ID NO: 4058561 - RNA, 15 nt, Vaccinia virus
auauugguuguuaaa

SEQ ID NO: 4058562 - RNA, 14 nt, Vaccinia virus
auauuguagaauac

SEQ ID NO: 4058563 - RNA, 16 nt, Vaccinia virus
auauugucacaugucu

SEQ ID NO: 4058564 - RNA, 14 nt, Vaccinia virus
auauuguuacacca

SEQ ID NO: 4058565 - RNA, 17 nt, Vaccinia virus
auauuguucuuaauaga

SEQ ID NO: 4058566 - RNA, 22 nt, Vaccinia virus
auauuuaagugauauaaaacua

SEQ ID NO: 4058567 - RNA, 15 nt, Vaccinia virus
auauuuacaguuacu

SEQ ID NO: 4058568 - RNA, 17 nt, Vaccinia virus
auauuuacauauuuacu

SEQ ID NO: 4058569 - RNA, 15 nt, Vaccinia virus
auauuuagaaauuga

SEQ ID NO: 4058570 - RNA, 21 nt, Vaccinia virus
auauuuauacccgcuaugaag

SEQ ID NO: 4058571 - RNA, 13 nt, Vaccinia virus
auauuucauauac

SEQ ID NO: 4058572 - RNA, 15 nt, Vaccinia virus
auauuucauauacua

SEQ ID NO: 4058573 - RNA, 18 nt, Vaccinia virus
auauuucuauuucuauuu

SEQ ID NO: 4058574 - RNA, 19 nt, Vaccinia virus
auauuucuccacuacauau

SEQ ID NO: 4058575 - RNA, 21 nt, Vaccinia virus
auauuuggaaucagacacaga

SEQ ID NO: 4058576 - RNA, 22 nt, Vaccinia virus
auauuuggcuaaacuauauaau

SEQ ID NO: 4058577 - RNA, 16 nt, Vaccinia virus
auauuuguuaaugccu

SEQ ID NO: 4058578 - RNA, 21 nt, Vaccinia virus
auauuuuucguuuacaaaauc

SEQ ID NO: 4058579 - RNA, 23 nt, Vaccinia virus
aucaaaacauauagauagacgag

SEQ ID NO: 4058580 - RNA, 19 nt, Vaccinia virus
aucaaaaucguauaaaguu

SEQ ID NO: 4058581 - RNA, 14 nt, Vaccinia virus
aucaaacauuuaau

SEQ ID NO: 4058582 - RNA, 19 nt, Vaccinia virus
aucaaacauuuaauuacau

SEQ ID NO: 4058583 - RNA, 20 nt, Vaccinia virus
aucaaacgcugaaguaauua

SEQ ID NO: 4058584 - RNA, 23 nt, Vaccinia virus
aucaaacucuaaugaccacaucu

SEQ ID NO: 4058585 - RNA, 20 nt, Vaccinia virus
aucaaacuguauagguaugu

SEQ ID NO: 4058586 - RNA, 20 nt, Vaccinia virus
aucaaaugguaaauacugua

SEQ ID NO: 4058587 - RNA, 19 nt, Vaccinia virus
aucaacagaaucaguauau

SEQ ID NO: 4058588 - RNA, 19 nt, Vaccinia virus
aucaaccaccgaugaugcg

SEQ ID NO: 4058589 - RNA, 20 nt, Vaccinia virus
aucaacgaguucaaauauga

SEQ ID NO: 4058590 - RNA, 19 nt, Vaccinia virus
aucaacggagauauaaaug

SEQ ID NO: 4058591 - RNA, 23 nt, Vaccinia virus
aucaacuaccuaaggaauauuca

SEQ ID NO: 4058592 - RNA, 18 nt, Vaccinia virus
aucaacuuuauuagauaa

SEQ ID NO: 4058593 - RNA, 14 nt, Vaccinia virus
aucaagaucauaau

SEQ ID NO: 4058594 - RNA, 14 nt, Vaccinia virus
aucaaguagaaauu

SEQ ID NO: 4058595 - RNA, 13 nt, Vaccinia virus
aucaauaaauagu

SEQ ID NO: 4058596 - RNA, 14 nt, Vaccinia virus
aucaauaacaaugu

SEQ ID NO: 4058597 - RNA, 20 nt, Vaccinia virus
aucaauaauauaucuuauau

SEQ ID NO: 4058598 - RNA, 13 nt, Vaccinia virus
aucaauaaugacg

SEQ ID NO: 4058599 - RNA, 15 nt, Vaccinia virus
aucaauaucucaauu

SEQ ID NO: 4058600 - RNA, 16 nt, Vaccinia virus
aucaaucauauuacau

SEQ ID NO: 4058601 - RNA, 19 nt, Vaccinia virus
aucaaucgguguguagaaa

SEQ ID NO: 4058602 - RNA, 12 nt, Vaccinia virus
aucaauguacau

SEQ ID NO: 4058603 - RNA, 13 nt, Vaccinia virus
aucaauguagaaa

SEQ ID NO: 4058604 - RNA, 13 nt, Vaccinia virus
aucaauuaaauaa

SEQ ID NO: 4058605 - RNA, 23 nt, Vaccinia virus
aucaauucuucuacauuaaaaau

SEQ ID NO: 4058606 - RNA, 17 nt, Vaccinia virus
aucacagcaguaguuua

SEQ ID NO: 4058607 - RNA, 22 nt, Vaccinia virus
aucacagcuaucuugaagccau

SEQ ID NO: 4058608 - RNA, 16 nt, Vaccinia virus
aucacaggagcaaugu

SEQ ID NO: 4058609 - RNA, 19 nt, Vaccinia virus
aucacauaucuaacaaugg

SEQ ID NO: 4058610 - RNA, 16 nt, Vaccinia virus
aucacauaugcaaaga

SEQ ID NO: 4058611 - RNA, 17 nt, Vaccinia virus
aucaccacuuucauauu

SEQ ID NO: 4058612 - RNA, 21 nt, Vaccinia virus
aucaccuauugccagguacau

SEQ ID NO: 4058613 - RNA, 14 nt, Vaccinia virus
aucacgucauauau

SEQ ID NO: 4058614 - RNA, 13 nt, Vaccinia virus
aucacuaaaauaa

SEQ ID NO: 4058615 - RNA, 13 nt, Vaccinia virus
aucacuaacaaua

SEQ ID NO: 4058616 - RNA, 16 nt, Vaccinia virus
aucacuacaauaauua

SEQ ID NO: 4058617 - RNA, 20 nt, Vaccinia virus
aucacucuucgaaaagaaac

SEQ ID NO: 4058618 - RNA, 23 nt, Vaccinia virus
aucacugccgaguuuaaaacuuc

SEQ ID NO: 4058619 - RNA, 15 nt, Vaccinia virus
aucacuguuguacau

SEQ ID NO: 4058620 - RNA, 21 nt, Vaccinia virus
aucagaaucauacaaugaauu

SEQ ID NO: 4058621 - RNA, 22 nt, Vaccinia virus
aucagagccaauaauaauagau

SEQ ID NO: 4058622 - RNA, 17 nt, Vaccinia virus
cucaucguauauuuuga

SEQ ID NO: 4058623 - RNA, 15 nt, Vaccinia virus
cucauuaaaacuucu

SEQ ID NO: 4058624 - RNA, 13 nt, Vaccinia virus
cucauuacauagu

SEQ ID NO: 4058625 - RNA, 14 nt, Vaccinia virus
cucauuauuuccca

SEQ ID NO: 4058626 - RNA, 19 nt, Vaccinia virus
cuccacaguuuuuaauuuc

SEQ ID NO: 4058627 - RNA, 17 nt, Vaccinia virus
cuccaccuucauauuua

SEQ ID NO: 4058628 - RNA, 23 nt, Vaccinia virus
cucccggagauguuucauaauag

SEQ ID NO: 4058629 - RNA, 22 nt, Vaccinia virus
cucccggauauuuuuuacaauu

SEQ ID NO: 4058630 - RNA, 20 nt, Vaccinia virus
cuccuaauauaacaguaucu

SEQ ID NO: 4058631 - RNA, 21 nt, Vaccinia virus
cuccuagguuucucuauaaac

SEQ ID NO: 4058632 - RNA, 14 nt, Vaccinia virus
cuccuguagauaug

SEQ ID NO: 4058633 - RNA, 14 nt, Vaccinia virus
cuccuuucaaacuu

SEQ ID NO: 4058634 - RNA, 20 nt, Vaccinia virus
cucgauacauuaacucucuc

SEQ ID NO: 4058635 - RNA, 19 nt, Vaccinia virus
cucgaugggacauuucaac

SEQ ID NO: 4058636 - RNA, 19 nt, Vaccinia virus
cucggauuugaagaaauca

SEQ ID NO: 4058637 - RNA, 15 nt, Vaccinia virus
cucguuuaaacagaa

SEQ ID NO: 4058638 - RNA, 22 nt, Vaccinia virus
cucuaagaacuuauuaaugaau

SEQ ID NO: 4058639 - RNA, 16 nt, Vaccinia virus
cucuaaguuaacacau

SEQ ID NO: 4058640 - RNA, 11 nt, Vaccinia virus
cucuagaaaaa

SEQ ID NO: 4058641 - RNA, 15 nt, Vaccinia virus
cucuauaaaauacua

SEQ ID NO: 4058642 - RNA, 13 nt, Vaccinia virus
cucuauagauaau

SEQ ID NO: 4058643 - RNA, 20 nt, Vaccinia virus
cucuaugacuucaucaucug

SEQ ID NO: 4058644 - RNA, 17 nt, Vaccinia virus
cucucaucuacaaaaac

SEQ ID NO: 4058645 - RNA, 13 nt, Vaccinia virus
cucucaucuuuua

SEQ ID NO: 4058646 - RNA, 14 nt, Vaccinia virus
cucucauugauuuu

SEQ ID NO: 4058647 - RNA, 18 nt, Vaccinia virus
cucucucacuacacuuuu

SEQ ID NO: 4058648 - RNA, 15 nt, Vaccinia virus
cucucucugccaaaa

SEQ ID NO: 4058649 - RNA, 16 nt, Vaccinia virus
cucuguaauaguuucc

SEQ ID NO: 4058650 - RNA, 15 nt, Vaccinia virus
cucuuaauuauaacg

SEQ ID NO: 4058651 - RNA, 11 nt, Vaccinia virus
cucuuucugaa

SEQ ID NO: 4058652 - RNA, 19 nt, Vaccinia virus
cucuuugacauauuuugag

SEQ ID NO: 4058653 - RNA, 18 nt, Vaccinia virus
cugaaauaaccacaucug

SEQ ID NO: 4058654 - RNA, 23 nt, Vaccinia virus
cugaaauacgauucuauauaucu

SEQ ID NO: 4058655 - RNA, 13 nt, Vaccinia virus
cugaaguuucaua

SEQ ID NO: 4058656 - RNA, 19 nt, Vaccinia virus
cugaauguaucuuccacau

SEQ ID NO: 4058657 - RNA, 23 nt, Vaccinia virus
cugaaugucgaaccuaucuagua

SEQ ID NO: 4058658 - RNA, 19 nt, Vaccinia virus
cugaauuauuauuacugaa

SEQ ID NO: 4058659 - RNA, 17 nt, Vaccinia virus
cugacugaauacauccu

SEQ ID NO: 4058660 - RNA, 14 nt, Vaccinia virus
cugauaagauaucu

SEQ ID NO: 4058661 - RNA, 22 nt, Vaccinia virus
cugauacaaucucuuaucaugu

SEQ ID NO: 4058662 - RNA, 17 nt, Vaccinia virus
cugauagaaagaauaag

SEQ ID NO: 4058663 - RNA, 15 nt, Vaccinia virus
cugauauauugcaaa

SEQ ID NO: 4058664 - RNA, 18 nt, Vaccinia virus
cugaugcauguauuugcu

SEQ ID NO: 4058665 - RNA, 17 nt, Vaccinia virus
cugauggagucuccuuc

SEQ ID NO: 4058666 - RNA, 20 nt, Vaccinia virus
cugauuaaugagaucuucua

SEQ ID NO: 4058667 - RNA, 18 nt, Vaccinia virus
cugcagcauuuugaggau

SEQ ID NO: 4058668 - RNA, 19 nt, Vaccinia virus
cugcagccauuuuuaugau

SEQ ID NO: 4058669 - RNA, 20 nt, Vaccinia virus
cugccauuaauaucucuauu

SEQ ID NO: 4058670 - RNA, 17 nt, Vaccinia virus
cugccauuuuagagauu

SEQ ID NO: 4058671 - RNA, 16 nt, Vaccinia virus
cugcuaauaaauaaug

SEQ ID NO: 4058672 - RNA, 15 nt, Vaccinia virus
cugcuagaacaucca

SEQ ID NO: 4058673 - RNA, 14 nt, Vaccinia virus
cugcuauaauuaag

SEQ ID NO: 4058674 - RNA, 17 nt, Vaccinia virus
cugcuauaauuaagaua

SEQ ID NO: 4058675 - RNA, 16 nt, Vaccinia virus
cugcuauauggauauu

SEQ ID NO: 4058676 - RNA, 12 nt, Vaccinia virus
cugcugaaaaua

SEQ ID NO: 4058677 - RNA, 22 nt, Vaccinia virus
cugcuggaaaauaaaucacuga

SEQ ID NO: 4058678 - RNA, 16 nt, Vaccinia virus
cugcuuagacuuccaa

SEQ ID NO: 4058679 - RNA, 17 nt, Vaccinia virus
cuggaaguggauauaca

SEQ ID NO: 4058680 - RNA, 20 nt, Vaccinia virus
cuggaauagaaucuauuuua

SEQ ID NO: 4058681 - RNA, 16 nt, Vaccinia virus
cuggaggagauggauu

SEQ ID NO: 4058682 - RNA, 15 nt, Vaccinia virus
cuggaggaguaagaa

SEQ ID NO: 4058683 - RNA, 13 nt, Vaccinia virus
cuggaucuggaaa

SEQ ID NO: 4058684 - RNA, 18 nt, Vaccinia virus
cuggcaggcacaugcaug

SEQ ID NO: 4058685 - RNA, 19 nt, Vaccinia virus
cuggcuauuucaaaauaaa

SEQ ID NO: 4058686 - RNA, 19 nt, Vaccinia virus
cugggccauguagaauaaa

SEQ ID NO: 4058687 - RNA, 22 nt, Vaccinia virus
cugguaacuauauucuuagaaa

SEQ ID NO: 4058688 - RNA, 22 nt, Vaccinia virus
cugguaauccacauaguuguaa

SEQ ID NO: 4058689 - RNA, 18 nt, Vaccinia virus
cugguacaggaguucagu

SEQ ID NO: 4058690 - RNA, 18 nt, Vaccinia virus
cugguauuuauauaugca

SEQ ID NO: 4058691 - RNA, 22 nt, Vaccinia virus
cuggucuaaaauuuccaucucu

SEQ ID NO: 4058692 - RNA, 14 nt, Vaccinia virus
cugguuuagauauu

SEQ ID NO: 4058693 - RNA, 22 nt, Vaccinia virus
cuguaaaaacaaauuuguacau

SEQ ID NO: 4058694 - RNA, 20 nt, Vaccinia virus
cuguaaacuaaguagagauu

SEQ ID NO: 4058695 - RNA, 16 nt, Vaccinia virus
cuguaaaggaaucauu

SEQ ID NO: 4058696 - RNA, 11 nt, Vaccinia virus
cuguaaaugau

SEQ ID NO: 4058697 - RNA, 22 nt, Vaccinia virus
cuguaauaaaggugguaguauu

SEQ ID NO: 4058698 - RNA, 13 nt, Vaccinia virus
cuguaaugaugga

SEQ ID NO: 4058699 - RNA, 21 nt, Vaccinia virus
cuguagauaaacuaggauuua

SEQ ID NO: 4058700 - RNA, 11 nt, Vaccinia virus
cuguauauacu

SEQ ID NO: 4058701 - RNA, 19 nt, Vaccinia virus
cuguauauacuuagauaua

SEQ ID NO: 4058702 - RNA, 17 nt, Vaccinia virus
cuguaucccgucaacga

SEQ ID NO: 4058703 - RNA, 18 nt, Vaccinia virus
cuguauccucaaacaucc

SEQ ID NO: 4058704 - RNA, 23 nt, Vaccinia virus
cuguauuaaagauauuguuacac

SEQ ID NO: 4058705 - RNA, 20 nt, Vaccinia virus
cugucuauaaugacaauaaa

SEQ ID NO: 4058706 - RNA, 19 nt, Vaccinia virus
cugucuucaaugaacucau

SEQ ID NO: 4058707 - RNA, 18 nt, Vaccinia virus
cugucuuucgauguucau

SEQ ID NO: 4058708 - RNA, 11 nt, Vaccinia virus
cuguggaauaa

SEQ ID NO: 4058709 - RNA, 14 nt, Vaccinia virus
cuguucaacaaacu

SEQ ID NO: 4058710 - RNA, 14 nt, Vaccinia virus
cuguucaucguuua

SEQ ID NO: 4058711 - RNA, 20 nt, Vaccinia virus
cuguuggaaccggcugugga

SEQ ID NO: 4058712 - RNA, 14 nt, Vaccinia virus
cuguuguacauaca

SEQ ID NO: 4058713 - RNA, 20 nt, Vaccinia virus
cuguuuaucuauacuauuaa

SEQ ID NO: 4058714 - RNA, 15 nt, Vaccinia virus
cuguuucuacuaacu

SEQ ID NO: 4058715 - RNA, 20 nt, Vaccinia virus
cuuaaaagauauuaauggag

SEQ ID NO: 4058716 - RNA, 12 nt, Vaccinia virus
cuuaaaauguaa

SEQ ID NO: 4058717 - RNA, 15 nt, Vaccinia virus
cuuaaacagaugaga

SEQ ID NO: 4058718 - RNA, 14 nt, Vaccinia virus
cuuaaauguuuucu

SEQ ID NO: 4058719 - RNA, 14 nt, Vaccinia virus
cuuaacaaaaauug

SEQ ID NO: 4058720 - RNA, 19 nt, Vaccinia virus
cuuaacuuacaaaauguaa

SEQ ID NO: 4058721 - RNA, 13 nt, Vaccinia virus
cuuaacuuuuucu

SEQ ID NO: 4058722 - RNA, 20 nt, Vaccinia virus
cuuaagaaaauuauuacuag

SEQ ID NO: 4058723 - RNA, 20 nt, Vaccinia virus
cuuaauacaccguuaacaau

SEQ ID NO: 4058724 - RNA, 23 nt, Vaccinia virus
cuuaauccuucuagaauuagaau

SEQ ID NO: 4058725 - RNA, 13 nt, Vaccinia virus
cuuaaugcauuuu

SEQ ID NO: 4058726 - RNA, 19 nt, Vaccinia virus
cuuaauuucagaagaaaac

SEQ ID NO: 4058727 - RNA, 13 nt, Vaccinia virus
cuuacaaaguuuu

SEQ ID NO: 4058728 - RNA, 15 nt, Vaccinia virus
cuuacauaaaugucu

SEQ ID NO: 4058729 - RNA, 13 nt, Vaccinia virus
cuuaccccuugau

SEQ ID NO: 4058730 - RNA, 18 nt, Vaccinia virus
cuuaccuucaacaguaua

SEQ ID NO: 4058731 - RNA, 18 nt, Vaccinia virus
cuuacuaucuuuuucuca

SEQ ID NO: 4058732 - RNA, 19 nt, Vaccinia virus
cuuagaaggaguguuuucu

SEQ ID NO: 4058733 - RNA, 16 nt, Vaccinia virus
cuuaguaaacagucca

SEQ ID NO: 4058734 - RNA, 13 nt, Vaccinia virus
cuuaguaacucua

SEQ ID NO: 4058735 - RNA, 13 nt, Vaccinia virus
cuuaguauacaaa

SEQ ID NO: 4058736 - RNA, 19 nt, Vaccinia virus
cuuauaauuaauguccaag

SEQ ID NO: 4058737 - RNA, 19 nt, Vaccinia virus
cuuaucgaagugacacucu

SEQ ID NO: 4058738 - RNA, 22 nt, Vaccinia virus
cuuaugaaacuuggaaacaucu

SEQ ID NO: 4058739 - RNA, 15 nt, Vaccinia virus
cuuaugaggaaugau

SEQ ID NO: 4058740 - RNA, 22 nt, Vaccinia virus
cuuaugauauaaggaaacagcu

SEQ ID NO: 4058741 - RNA, 17 nt, Vaccinia virus
cuuauuccacaauacga

SEQ ID NO: 4058742 - RNA, 15 nt, Vaccinia virus
cuucaagagaugucu

SEQ ID NO: 4058743 - RNA, 15 nt, Vaccinia virus
cuucaauaaaaugag

SEQ ID NO: 4058744 - RNA, 22 nt, Vaccinia virus
cuucacagauagaucauuuuga

SEQ ID NO: 4058745 - RNA, 19 nt, Vaccinia virus
cuucagaaauuaucgaugu

SEQ ID NO: 4058746 - RNA, 12 nt, Vaccinia virus
cuucagaauaau

SEQ ID NO: 4058747 - RNA, 19 nt, Vaccinia virus
cuucagcggauccuguauu

SEQ ID NO: 4058748 - RNA, 14 nt, Vaccinia virus
cuucaucaucuguu

SEQ ID NO: 4058749 - RNA, 20 nt, Vaccinia virus
cuucaugaacauaaucaguu

SEQ ID NO: 4058750 - RNA, 18 nt, Vaccinia virus
cuucauucguaaaucuuu

SEQ ID NO: 4058751 - RNA, 12 nt, Vaccinia virus
cuucauuucuaa

SEQ ID NO: 4058752 - RNA, 14 nt, Vaccinia virus
cuuccaacauaaua

SEQ ID NO: 4058753 - RNA, 20 nt, Vaccinia virus
cuuccagauaauguucucuu

SEQ ID NO: 4058754 - RNA, 15 nt, Vaccinia virus
cuuccaguucuggau

SEQ ID NO: 4058755 - RNA, 17 nt, Vaccinia virus
cuuccgucgaugucuac

SEQ ID NO: 4058756 - RNA, 14 nt, Vaccinia virus
cuucgauagauauu

SEQ ID NO: 4058757 - RNA, 14 nt, Vaccinia virus
cuucguuuaaauaa

SEQ ID NO: 4058758 - RNA, 17 nt, Vaccinia virus
cuucuaccguuuuguuc

SEQ ID NO: 4058759 - RNA, 17 nt, Vaccinia virus
cuucuauaaaaauggau

SEQ ID NO: 4058760 - RNA, 13 nt, Vaccinia virus
cuucugauuuuaa

SEQ ID NO: 4058761 - RNA, 18 nt, Vaccinia virus
cuucuguacaaaaucguu

SEQ ID NO: 4058762 - RNA, 18 nt, Vaccinia virus
cuugaaaauuguuuuucu

SEQ ID NO: 4058763 - RNA, 20 nt, Vaccinia virus
cuugacauuuucuucuuucu

SEQ ID NO: 4058764 - RNA, 20 nt, Vaccinia virus
cuugagacuugauagauauu

SEQ ID NO: 4058765 - RNA, 22 nt, Vaccinia virus
cuugaggagaucuaaacaaucu

SEQ ID NO: 4058766 - RNA, 17 nt, Vaccinia virus
cuugauacgcucauuaa

SEQ ID NO: 4058767 - RNA, 17 nt, Vaccinia virus
cuugauacuauccagua

SEQ ID NO: 4058768 - RNA, 21 nt, Vaccinia virus
cuugauucuaguaucuuuugu

SEQ ID NO: 4058769 - RNA, 23 nt, Vaccinia virus
cuugcacuuaaagucuacauugu

SEQ ID NO: 4058770 - RNA, 13 nt, Vaccinia virus
cuuguugacaaaa

SEQ ID NO: 4058771 - RNA, 12 nt, Vaccinia virus
cuuuaacuucug

SEQ ID NO: 4058772 - RNA, 14 nt, Vaccinia virus
cuuuaauagauaua

SEQ ID NO: 4058773 - RNA, 14 nt, Vaccinia virus
cuuuaauguaugaa

SEQ ID NO: 4058774 - RNA, 18 nt, Vaccinia virus
cuuuacaguuucuguaau

SEQ ID NO: 4058775 - RNA, 13 nt, Vaccinia virus
cuuuacuuuucua

SEQ ID NO: 4058776 - RNA, 14 nt, Vaccinia virus
cuuuagaaaaacuu

SEQ ID NO: 4058777 - RNA, 20 nt, Vaccinia virus
cuuuauaagagcuacuaacg

SEQ ID NO: 4058778 - RNA, 13 nt, Vaccinia virus
cuuuaucaagcac

SEQ ID NO: 4058779 - RNA, 20 nt, Vaccinia virus
cuuuauccauaucucuagau

SEQ ID NO: 4058780 - RNA, 13 nt, Vaccinia virus
cuuuauuaucuau

SEQ ID NO: 4058781 - RNA, 21 nt, Vaccinia virus
cuuucaggguaucacaaaaau

SEQ ID NO: 4058782 - RNA, 17 nt, Vaccinia virus
cuuucuagaacauacug

SEQ ID NO: 4058783 - RNA, 23 nt, Vaccinia virus
cuuucugauggucucauaaaaaa

SEQ ID NO: 4058784 - RNA, 17 nt, Vaccinia virus
cuuugcaaauuguauau

SEQ ID NO: 4058785 - RNA, 15 nt, Vaccinia virus
cuuugcaauauugua

SEQ ID NO: 4058786 - RNA, 15 nt, Vaccinia virus
cuuugcauucugaaa

SEQ ID NO: 4058787 - RNA, 19 nt, Vaccinia virus
cuuuggagucucaucuuua

SEQ ID NO: 4058788 - RNA, 23 nt, Vaccinia virus
cuuuggauuuucaccaguaugua

SEQ ID NO: 4058789 - RNA, 15 nt, Vaccinia virus
cuuugucggaagaau

SEQ ID NO: 4058790 - RNA, 18 nt, Vaccinia virus
cuuuuaauucuuaucaau

SEQ ID NO: 4058791 - RNA, 11 nt, Vaccinia virus
cuuuuaauuuu

SEQ ID NO: 4058792 - RNA, 12 nt, Vaccinia virus
cuuuuagaaaag

SEQ ID NO: 4058793 - RNA, 23 nt, Vaccinia virus
cuuuuagagguucccaauuccaa

SEQ ID NO: 4058794 - RNA, 20 nt, Vaccinia virus
cuuuuaguaacguaugugaa

SEQ ID NO: 4058795 - RNA, 17 nt, Vaccinia virus
cuuuugcggacauuuuc

SEQ ID NO: 4058796 - RNA, 15 nt, Vaccinia virus
cuuuugugaaaagau

SEQ ID NO: 4058797 - RNA, 11 nt, Vaccinia virus
cuuuuuaggaa

SEQ ID NO: 4058798 - RNA, 17 nt, Vaccinia virus
cuuuuuauccuuuagau

SEQ ID NO: 4058799 - RNA, 23 nt, Vaccinia virus
cuuuuuuuagagaugaaaaauuu

SEQ ID NO: 4058800 - RNA, 22 nt, Vaccinia virus
gaaaaaaaauugaauugaugau

SEQ ID NO: 4058801 - RNA, 18 nt, Vaccinia virus
gaaaaaguuccauaugau

SEQ ID NO: 4058802 - RNA, 14 nt, Vaccinia virus
gaaaaauauaaugu

SEQ ID NO: 4058803 - RNA, 15 nt, Vaccinia virus
gaaaaauauaaugua

SEQ ID NO: 4058804 - RNA, 13 nt, Vaccinia virus
gaaaaaugaugaa

SEQ ID NO: 4058805 - RNA, 19 nt, Vaccinia virus
gaaaaaugcuagaauuaga

SEQ ID NO: 4058806 - RNA, 19 nt, Vaccinia virus
gaaaaauuauaauguuucc

SEQ ID NO: 4058807 - RNA, 15 nt, Vaccinia virus
gaaaacauuguguuu

SEQ ID NO: 4058808 - RNA, 21 nt, Vaccinia virus
gaaaacauuguguuuaaucuu

SEQ ID NO: 4058809 - RNA, 16 nt, Vaccinia virus
gaaaaccgauaacgau

SEQ ID NO: 4058810 - RNA, 23 nt, Vaccinia virus
gaaaauaaaucacugacgauauu

SEQ ID NO: 4058811 - RNA, 12 nt, Vaccinia virus
gaaaauaaugac

SEQ ID NO: 4058812 - RNA, 22 nt, Vaccinia virus
gaaaauaaugacgcguacgaua

SEQ ID NO: 4058813 - RNA, 15 nt, Vaccinia virus
gaaaauuauaaugaa

SEQ ID NO: 4058814 - RNA, 17 nt, Vaccinia virus
gaaacaguaugauuuua

SEQ ID NO: 4058815 - RNA, 22 nt, Vaccinia virus
gaaacauccaucgauacauaua

SEQ ID NO: 4058816 - RNA, 18 nt, Vaccinia virus
gaaacaucucuucuaguu

SEQ ID NO: 4058817 - RNA, 17 nt, Vaccinia virus
gaaacauggggauugaa

SEQ ID NO: 4058818 - RNA, 20 nt, Vaccinia virus
gaaacccccucauuuuuuaa

SEQ ID NO: 4058819 - RNA, 16 nt, Vaccinia virus
gaaacggugaauacaa

SEQ ID NO: 4058820 - RNA, 23 nt, Vaccinia virus
gaaacguaauauccucaauaacg

SEQ ID NO: 4058821 - RNA, 18 nt, Vaccinia virus
gaaacuaucugauaagau

SEQ ID NO: 4058822 - RNA, 21 nt, Vaccinia virus
gaaacuuaaaauauaaugaua

SEQ ID NO: 4058823 - RNA, 20 nt, Vaccinia virus
gaaagacagccauagccaaa

SEQ ID NO: 4058824 - RNA, 16 nt, Vaccinia virus
gaaagagauaauagaa

SEQ ID NO: 4058825 - RNA, 15 nt, Vaccinia virus
gaaagcgagaaauaa

SEQ ID NO: 4058826 - RNA, 16 nt, Vaccinia virus
gaaaguaaauaauaua

SEQ ID NO: 4058827 - RNA, 14 nt, Vaccinia virus
gaaauaauauuaaa

SEQ ID NO: 4058828 - RNA, 21 nt, Vaccinia virus
gaaauacuaaaaaauguagaa

SEQ ID NO: 4058829 - RNA, 18 nt, Vaccinia virus
gaaauagaggaagacaca

SEQ ID NO: 4058830 - RNA, 15 nt, Vaccinia virus
gaaauagauaaugaa

SEQ ID NO: 4058831 - RNA, 19 nt, Vaccinia virus
gaaauagcucguuucuauu

SEQ ID NO: 4058832 - RNA, 22 nt, Vaccinia virus
gaaauauaaaaccaacuaauau

SEQ ID NO: 4058833 - RNA, 18 nt, Vaccinia virus
gaaauauaguaauaagau

SEQ ID NO: 4058834 - RNA, 14 nt, Vaccinia virus
gaaauauauacaua

SEQ ID NO: 4058835 - RNA, 20 nt, Vaccinia virus
gaaaucauggcgauguuuua

SEQ ID NO: 4058836 - RNA, 14 nt, Vaccinia virus
gaaauccuauuuua

SEQ ID NO: 4058837 - RNA, 22 nt, Vaccinia virus
gaaaucuauaauaucuuugaaa

SEQ ID NO: 4058838 - RNA, 17 nt, Vaccinia virus
gaaaugaugaaggaaag

SEQ ID NO: 4058839 - RNA, 18 nt, Vaccinia virus
gaaaugccugauaaagau

SEQ ID NO: 4058840 - RNA, 22 nt, Vaccinia virus
gaaauguccguuauauaaucua

SEQ ID NO: 4058841 - RNA, 17 nt, Vaccinia virus
gaaauguguaauaauau

SEQ ID NO: 4058842 - RNA, 14 nt, Vaccinia virus
gaaauguuaaaacu

SEQ ID NO: 4058843 - RNA, 16 nt, Vaccinia virus
gaacaauaaacaaaau

SEQ ID NO: 4058844 - RNA, 17 nt, Vaccinia virus
gaacaauuuuaaaucau

SEQ ID NO: 4058845 - RNA, 23 nt, Vaccinia virus
gaacaccacuuacguuaauacua

SEQ ID NO: 4058846 - RNA, 21 nt, Vaccinia virus
gaacacgauuauuauaaaaua

SEQ ID NO: 4058847 - RNA, 16 nt, Vaccinia virus
gaacagauaguuuauu

SEQ ID NO: 4058848 - RNA, 18 nt, Vaccinia virus
gaacagcuaucaaaauau

SEQ ID NO: 4058849 - RNA, 23 nt, Vaccinia virus
gaacagcuaucaaaauauguaga

SEQ ID NO: 4058850 - RNA, 15 nt, Vaccinia virus
gaacauaaacaaauu

SEQ ID NO: 4058851 - RNA, 21 nt, Vaccinia virus
gaacaucuugauuauaauaua

SEQ ID NO: 4058852 - RNA, 18 nt, Vaccinia virus
gaacaugugugaaaauau

SEQ ID NO: 4058853 - RNA, 18 nt, Vaccinia virus
gaacgaagaucuuuucuc

SEQ ID NO: 4058854 - RNA, 18 nt, Vaccinia virus
gaacgagaacgacuaucu

SEQ ID NO: 4058855 - RNA, 17 nt, Vaccinia virus
gaacgaggagacuauau

SEQ ID NO: 4058856 - RNA, 22 nt, Vaccinia virus
gaacgauauuugugaaaaauau

SEQ ID NO: 4058857 - RNA, 12 nt, Vaccinia virus
gaacuaauaaag

SEQ ID NO: 4058858 - RNA, 13 nt, Vaccinia virus
gaacuaccaauau

SEQ ID NO: 4058859 - RNA, 18 nt, Vaccinia virus
gaacuauaaaaacagaua

SEQ ID NO: 4058860 - RNA, 15 nt, Vaccinia virus
gaacuauauaaugaa

SEQ ID NO: 4058861 - RNA, 21 nt, Vaccinia virus
gaacuauuuuuuuauacuucu

SEQ ID NO: 4058862 - RNA, 21 nt, Vaccinia virus
gaacucaagucgaauauaaau

SEQ ID NO: 4058863 - RNA, 18 nt, Vaccinia virus
gaacuucugaucauuaau

SEQ ID NO: 4058864 - RNA, 15 nt, Vaccinia virus
gaagaaaacaaacau

SEQ ID NO: 4058865 - RNA, 14 nt, Vaccinia virus
gaagaaauaaaggc

SEQ ID NO: 4058866 - RNA, 11 nt, Vaccinia virus
gaagaaauuga

SEQ ID NO: 4058867 - RNA, 17 nt, Vaccinia virus
gaagaagaugacaaucu

SEQ ID NO: 4058868 - RNA, 16 nt, Vaccinia virus
gaagagaaaggucaau

SEQ ID NO: 4058869 - RNA, 16 nt, Vaccinia virus
gaagaucauacagaca

SEQ ID NO: 4058870 - RNA, 16 nt, Vaccinia virus
gauuauucuacuauca

SEQ ID NO: 4058871 - RNA, 13 nt, Vaccinia virus
gauuauuuccugc

SEQ ID NO: 4058872 - RNA, 17 nt, Vaccinia virus
gauucaacaaaacucaa

SEQ ID NO: 4058873 - RNA, 20 nt, Vaccinia virus
gauucaacaaaacucaaagc

SEQ ID NO: 4058874 - RNA, 15 nt, Vaccinia virus
gauucaacauuuaua

SEQ ID NO: 4058875 - RNA, 13 nt, Vaccinia virus
gauucacaaauau

SEQ ID NO: 4058876 - RNA, 18 nt, Vaccinia virus
gauucgguuuuauacugu

SEQ ID NO: 4058877 - RNA, 18 nt, Vaccinia virus
gauucuaucuuccuucga

SEQ ID NO: 4058878 - RNA, 23 nt, Vaccinia virus
gauucuauuaagaguaacagcug

SEQ ID NO: 4058879 - RNA, 19 nt, Vaccinia virus
gauucuucacaagugaaau

SEQ ID NO: 4058880 - RNA, 21 nt, Vaccinia virus
gauucuugauagagaugagau

SEQ ID NO: 4058881 - RNA, 20 nt, Vaccinia virus
gauugauccuagaacuagau

SEQ ID NO: 4058882 - RNA, 14 nt, Vaccinia virus
gauugccauaauaa

SEQ ID NO: 4058883 - RNA, 17 nt, Vaccinia virus
gauuuaucuaguuuauc

SEQ ID NO: 4058884 - RNA, 17 nt, Vaccinia virus
gauuugguaguauuuau

SEQ ID NO: 4058885 - RNA, 22 nt, Vaccinia virus
gauuuuauuuaguguagauaug

SEQ ID NO: 4058886 - RNA, 16 nt, Vaccinia virus
gcaaaaauaauaugau

SEQ ID NO: 4058887 - RNA, 18 nt, Vaccinia virus
gcaaaacauuauaauaau

SEQ ID NO: 4058888 - RNA, 14 nt, Vaccinia virus
gcaaacaacaacaa

SEQ ID NO: 4058889 - RNA, 17 nt, Vaccinia virus
gcaaacgcgauaaggau

SEQ ID NO: 4058890 - RNA, 23 nt, Vaccinia virus
gcaaagaacagaauaaacaaaau

SEQ ID NO: 4058891 - RNA, 17 nt, Vaccinia virus
gcaaauacgauagucua

SEQ ID NO: 4058892 - RNA, 18 nt, Vaccinia virus
gcaaauugucuauaucua

SEQ ID NO: 4058893 - RNA, 15 nt, Vaccinia virus
gcaacaaguauacaa

SEQ ID NO: 4058894 - RNA, 21 nt, Vaccinia virus
gcaaccaccgcaugauaauau

SEQ ID NO: 4058895 - RNA, 13 nt, Vaccinia virus
gcaagaaauggau

SEQ ID NO: 4058896 - RNA, 15 nt, Vaccinia virus
gcaauaauggaaucu

SEQ ID NO: 4058897 - RNA, 22 nt, Vaccinia virus
gcaauaauggaaucuagaucua

SEQ ID NO: 4058898 - RNA, 17 nt, Vaccinia virus
gcaauagcugauuauuu

SEQ ID NO: 4058899 - RNA, 13 nt, Vaccinia virus
gcaauaucaucua

SEQ ID NO: 4058900 - RNA, 15 nt, Vaccinia virus
gcaaucaugauuuua

SEQ ID NO: 4058901 - RNA, 22 nt, Vaccinia virus
gcacaacaucuaacuauaugau

SEQ ID NO: 4058902 - RNA, 16 nt, Vaccinia virus
gcacauguauaauaua

SEQ ID NO: 4058903 - RNA, 21 nt, Vaccinia virus
gcacguaucuaaaguauuucu

SEQ ID NO: 4058904 - RNA, 21 nt, Vaccinia virus
gcacuauacauuuugaaacua

SEQ ID NO: 4058905 - RNA, 20 nt, Vaccinia virus
gcagcaucgcgacuauucua

SEQ ID NO: 4058906 - RNA, 23 nt, Vaccinia virus
gcaguacuacuagguagaagaau

SEQ ID NO: 4058907 - RNA, 18 nt, Vaccinia virus
gcaguuacaagauuuuua

SEQ ID NO: 4058908 - RNA, 21 nt, Vaccinia virus
gcaguuuuauuuuaucuuuua

SEQ ID NO: 4058909 - RNA, 15 nt, Vaccinia virus
gcaguuuuguucauu

SEQ ID NO: 4058910 - RNA, 17 nt, Vaccinia virus
gcauaaauuguaaaaaa

SEQ ID NO: 4058911 - RNA, 19 nt, Vaccinia virus
gcauaauccuuguaaugau

SEQ ID NO: 4058912 - RNA, 11 nt, Vaccinia virus
gcauacuaucg

SEQ ID NO: 4058913 - RNA, 11 nt, Vaccinia virus
gcauagauaua

SEQ ID NO: 4058914 - RNA, 21 nt, Vaccinia virus
gcauaguaacucauaauugcu

SEQ ID NO: 4058915 - RNA, 13 nt, Vaccinia virus
gcauaucaugaaa

SEQ ID NO: 4058916 - RNA, 21 nt, Vaccinia virus
gcaucaacaauuacaaaugag

SEQ ID NO: 4058917 - RNA, 18 nt, Vaccinia virus
gcaucaggauauaaagaa

SEQ ID NO: 4058918 - RNA, 17 nt, Vaccinia virus
gcaucaguaucuucaga

SEQ ID NO: 4058919 - RNA, 12 nt, Vaccinia virus
gcaucuauuuua

SEQ ID NO: 4058920 - RNA, 22 nt, Vaccinia virus
gcauguagaagacaauaaagau

SEQ ID NO: 4058921 - RNA, 15 nt, Vaccinia virus
gcauuaaaugaugaa

SEQ ID NO: 4058922 - RNA, 19 nt, Vaccinia virus
gcauuaacuagauuaauuu

SEQ ID NO: 4058923 - RNA, 13 nt, Vaccinia virus
gcauuaauacagu

SEQ ID NO: 4058924 - RNA, 21 nt, Vaccinia virus
gcauuaauacuguuuucuuag

SEQ ID NO: 4058925 - RNA, 18 nt, Vaccinia virus
gcauuacaguucuuuucu

SEQ ID NO: 4058926 - RNA, 14 nt, Vaccinia virus
gcauucaaauggau

SEQ ID NO: 4058927 - RNA, 17 nt, Vaccinia virus
gcauucuucauucuauu

SEQ ID NO: 4058928 - RNA, 16 nt, Vaccinia virus
gcauuucuaauacaug

SEQ ID NO: 4058929 - RNA, 18 nt, Vaccinia virus
gcauuuuuugguuucuuu

SEQ ID NO: 4058930 - RNA, 15 nt, Vaccinia virus
gccaaaaugauagau

SEQ ID NO: 4058931 - RNA, 12 nt, Vaccinia virus
gccaacaaauau

SEQ ID NO: 4058932 - RNA, 21 nt, Vaccinia virus
gccaagauaucuauauaauua

SEQ ID NO: 4058933 - RNA, 23 nt, Vaccinia virus
gccacaaaugaaaaaaauacuua

SEQ ID NO: 4058934 - RNA, 15 nt, Vaccinia virus
gccaccacuucucua

SEQ ID NO: 4058935 - RNA, 20 nt, Vaccinia virus
gccagagauaauuucuguaa

SEQ ID NO: 4058936 - RNA, 21 nt, Vaccinia virus
gccauauuccacagauaauau

SEQ ID NO: 4058937 - RNA, 13 nt, Vaccinia virus
gccauccaaacaa

SEQ ID NO: 4058938 - RNA, 21 nt, Vaccinia virus
gccauugcugccacucauaau

SEQ ID NO: 4058939 - RNA, 22 nt, Vaccinia virus
gccauuuguagucuuucaacau

SEQ ID NO: 4058940 - RNA, 22 nt, Vaccinia virus
gcccaauuuugguguaaaucua

SEQ ID NO: 4058941 - RNA, 17 nt, Vaccinia virus
gcccauagaguauuauu

SEQ ID NO: 4058942 - RNA, 14 nt, Vaccinia virus
gccgaacuaaaaaa

SEQ ID NO: 4058943 - RNA, 18 nt, Vaccinia virus
gccgaugaauggaucacc

SEQ ID NO: 4058944 - RNA, 17 nt, Vaccinia virus
gccgucuuuaucucuua

SEQ ID NO: 4058945 - RNA, 15 nt, Vaccinia virus
gccucaguugucaac

SEQ ID NO: 4058946 - RNA, 19 nt, Vaccinia virus
gccuccacuagaagagaau

SEQ ID NO: 4058947 - RNA, 12 nt, Vaccinia virus
gccugaauaucu

SEQ ID NO: 4058948 - RNA, 13 nt, Vaccinia virus
gcgaaauaaagaa

SEQ ID NO: 4058949 - RNA, 14 nt, Vaccinia virus
gcgaggaaauguau

SEQ ID NO: 4058950 - RNA, 19 nt, Vaccinia virus
gcgauagcugauaauagaa

SEQ ID NO: 4058951 - RNA, 23 nt, Vaccinia virus
gcgauaucuccauuaauaaugau

SEQ ID NO: 4058952 - RNA, 21 nt, Vaccinia virus
gcgccuuauauagcacuuuua

SEQ ID NO: 4058953 - RNA, 22 nt, Vaccinia virus
gcggacauuaaacgauuugaug

SEQ ID NO: 4058954 - RNA, 16 nt, Vaccinia virus
gcggccaucauauuau

SEQ ID NO: 4058955 - RNA, 19 nt, Vaccinia virus
gcgguucaaaauagaaaau

SEQ ID NO: 4058956 - RNA, 18 nt, Vaccinia virus
gcguacacaaucaaucau

SEQ ID NO: 4058957 - RNA, 15 nt, Vaccinia virus
gcguaguauuacuuc

SEQ ID NO: 4058958 - RNA, 15 nt, Vaccinia virus
gcguccgauuccguu

SEQ ID NO: 4058959 - RNA, 17 nt, Vaccinia virus
gcguguuuuauuaauca

SEQ ID NO: 4058960 - RNA, 21 nt, Vaccinia virus
gcguuaacuaucaaacaaacu

SEQ ID NO: 4058961 - RNA, 15 nt, Vaccinia virus
gcguuaauaaaaaca

SEQ ID NO: 4058962 - RNA, 22 nt, Vaccinia virus
gcguucagauugggaucuuuuc

SEQ ID NO: 4058963 - RNA, 15 nt, Vaccinia virus
gcguucauuggaaaa

SEQ ID NO: 4058964 - RNA, 23 nt, Vaccinia virus
gcguuccuugugcuuaauguuuc

SEQ ID NO: 4058965 - RNA, 14 nt, Vaccinia virus
gcuaaaaaauuagu

SEQ ID NO: 4058966 - RNA, 14 nt, Vaccinia virus
gcuaaaauuuucau

SEQ ID NO: 4058967 - RNA, 20 nt, Vaccinia virus
gcuaaguauacgaucuuuua

SEQ ID NO: 4058968 - RNA, 21 nt, Vaccinia virus
gcuaauaaugacuguagauau

SEQ ID NO: 4058969 - RNA, 16 nt, Vaccinia virus
gcuaauauuaguacua

SEQ ID NO: 4058970 - RNA, 22 nt, Vaccinia virus
gcuacacccacuagaaaccacg

SEQ ID NO: 4058971 - RNA, 16 nt, Vaccinia virus
gcuacucguuuggaau

SEQ ID NO: 4058972 - RNA, 15 nt, Vaccinia virus
gcuaguauagaaauu

SEQ ID NO: 4058973 - RNA, 20 nt, Vaccinia virus
gcuaguuaauaguaaaugaa

SEQ ID NO: 4058974 - RNA, 23 nt, Vaccinia virus
gcuauagcauuguuauguauuuc

SEQ ID NO: 4058975 - RNA, 17 nt, Vaccinia virus
gcuaucaaaauauguag

SEQ ID NO: 4058976 - RNA, 20 nt, Vaccinia virus
gcuauccaucagaauguuuc

SEQ ID NO: 4058977 - RNA, 17 nt, Vaccinia virus
gcuaugaaggaaagaca

SEQ ID NO: 4058978 - RNA, 21 nt, Vaccinia virus
gcuauucuggugcuaauuauu

SEQ ID NO: 4058979 - RNA, 15 nt, Vaccinia virus
gcucaguaaauguau

SEQ ID NO: 4058980 - RNA, 12 nt, Vaccinia virus
gcucuacaaaau

SEQ ID NO: 4058981 - RNA, 19 nt, Vaccinia virus
gcucuauauuacaaacuau

SEQ ID NO: 4058982 - RNA, 13 nt, Vaccinia virus
gcucuaucuuuua

SEQ ID NO: 4058983 - RNA, 24 nt, Vaccinia virus
gcucuggcuauucgagaugaacau

SEQ ID NO: 4058984 - RNA, 18 nt, Vaccinia virus
gcucuuuugaugauaaau

SEQ ID NO: 4058985 - RNA, 21 nt, Vaccinia virus
gcugaaguaauuaauuuuucu

SEQ ID NO: 4058986 - RNA, 14 nt, Vaccinia virus
gcugaguauuucau

SEQ ID NO: 4058987 - RNA, 15 nt, Vaccinia virus
gcugccaaaguuauu

SEQ ID NO: 4058988 - RNA, 23 nt, Vaccinia virus
gcugguaauaguuuacagauauu

SEQ ID NO: 4058989 - RNA, 12 nt, Vaccinia virus
gcuguaaaucac

SEQ ID NO: 4058990 - RNA, 13 nt, Vaccinia virus
gcuguuauauauu

SEQ ID NO: 4058991 - RNA, 14 nt, Vaccinia virus
gcuuauauuuucau

SEQ ID NO: 4058992 - RNA, 13 nt, Vaccinia virus
gcuucauccuuua

SEQ ID NO: 4058993 - RNA, 19 nt, Vaccinia virus
gcuugauaagauaaaaucu

SEQ ID NO: 4058994 - RNA, 17 nt, Vaccinia virus
gcuugcauguauuaaag

SEQ ID NO: 4058995 - RNA, 14 nt, Vaccinia virus
gcuuuccuaaagaa

SEQ ID NO: 4058996 - RNA, 17 nt, Vaccinia virus
ggaaaaaauuguugauc

SEQ ID NO: 4058997 - RNA, 21 nt, Vaccinia virus
ggaaaagucaaagucguuuaa

SEQ ID NO: 4058998 - RNA, 14 nt, Vaccinia virus
ggaacaauaaaaga

SEQ ID NO: 4058999 - RNA, 22 nt, Vaccinia virus
ggaacaguucuaccaccaguaa

SEQ ID NO: 4059000 - RNA, 19 nt, Vaccinia virus
ggaacauuaaauguauuuu

SEQ ID NO: 4059001 - RNA, 17 nt, Vaccinia virus
ggaauaugacuauuuuc

SEQ ID NO: 4059002 - RNA, 21 nt, Vaccinia virus
ggaaucaauuacagauuucuc

SEQ ID NO: 4059003 - RNA, 14 nt, Vaccinia virus
ggacaccacuaucu

SEQ ID NO: 4059004 - RNA, 17 nt, Vaccinia virus
ggacacgauauagagag

SEQ ID NO: 4059005 - RNA, 21 nt, Vaccinia virus
ggacagauacuacuauuuguc

SEQ ID NO: 4059006 - RNA, 15 nt, Vaccinia virus
ggacagucuauuuuc

SEQ ID NO: 4059007 - RNA, 14 nt, Vaccinia virus
ggacccauagagaa

SEQ ID NO: 4059008 - RNA, 14 nt, Vaccinia virus
ggagaauguuuccc

SEQ ID NO: 4059009 - RNA, 23 nt, Vaccinia virus
ggaguacccacugaugagauguu

SEQ ID NO: 4059010 - RNA, 14 nt, Vaccinia virus
ggauacucuauuaa

SEQ ID NO: 4059011 - RNA, 14 nt, Vaccinia virus
ggauauguuuuuaa

SEQ ID NO: 4059012 - RNA, 18 nt, Vaccinia virus
ggauauugcaugauagaa

SEQ ID NO: 4059013 - RNA, 20 nt, Vaccinia virus
ggauguuguucgauugauuu

SEQ ID NO: 4059014 - RNA, 20 nt, Vaccinia virus
ggauugguggauauauacgu

SEQ ID NO: 4059015 - RNA, 21 nt, Vaccinia virus
ggauugguuucuaaauucaug

SEQ ID NO: 4059016 - RNA, 11 nt, Vaccinia virus
ggcaucuuuuu

SEQ ID NO: 4059017 - RNA, 14 nt, Vaccinia virus
ggcauguguuuccc

SEQ ID NO: 4059018 - RNA, 15 nt, Vaccinia virus
ggccguuuguuuccu

SEQ ID NO: 4059019 - RNA, 11 nt, Vaccinia virus
gggaaaugaua

SEQ ID NO: 4059020 - RNA, 19 nt, Vaccinia virus
gggacgcguauauguuucu

SEQ ID NO: 4059021 - RNA, 20 nt, Vaccinia virus
gggauuguccggcauaucau

SEQ ID NO: 4059022 - RNA, 12 nt, Vaccinia virus
gguaaauguuuu

SEQ ID NO: 4059023 - RNA, 16 nt, Vaccinia virus
gguaacgcgucuuuaa

SEQ ID NO: 4059024 - RNA, 19 nt, Vaccinia virus
gguaauagauuuuucauau

SEQ ID NO: 4059025 - RNA, 13 nt, Vaccinia virus
gguacuauuucua

SEQ ID NO: 4059026 - RNA, 13 nt, Vaccinia virus
gguauaauaacuu

SEQ ID NO: 4059027 - RNA, 20 nt, Vaccinia virus
gguauaucuggaaagaaauc

SEQ ID NO: 4059028 - RNA, 17 nt, Vaccinia virus
gguaugauuuuugucca

SEQ ID NO: 4059029 - RNA, 21 nt, Vaccinia virus
gguauuuauaaacuuuaucca

SEQ ID NO: 4059030 - RNA, 17 nt, Vaccinia virus
ggucacacguguagaau

SEQ ID NO: 4059031 - RNA, 17 nt, Vaccinia virus
gguggauggagucccag

SEQ ID NO: 4059032 - RNA, 16 nt, Vaccinia virus
gguuaacaucuuauaa

SEQ ID NO: 4059033 - RNA, 19 nt, Vaccinia virus
gguuaacucuuucuuuuga

SEQ ID NO: 4059034 - RNA, 11 nt, Vaccinia virus
gguuagauauu

SEQ ID NO: 4059035 - RNA, 16 nt, Vaccinia virus
gguucgauauaaagga

SEQ ID NO: 4059036 - RNA, 13 nt, Vaccinia virus
gguuguaucucau

SEQ ID NO: 4059037 - RNA, 22 nt, Vaccinia virus
gguuucgaagaucuucuuauuu

SEQ ID NO: 4059038 - RNA, 14 nt, Vaccinia virus
guaaaaauaauuau

SEQ ID NO: 4059039 - RNA, 16 nt, Vaccinia virus
guaaaaaugaaaugau

SEQ ID NO: 4059040 - RNA, 14 nt, Vaccinia virus
guaaaauaaucaua

SEQ ID NO: 4059041 - RNA, 20 nt, Vaccinia virus
guaaaauaaucauacaaucu

SEQ ID NO: 4059042 - RNA, 13 nt, Vaccinia virus
guaaaauaaucuc

SEQ ID NO: 4059043 - RNA, 14 nt, Vaccinia virus
guaaaauauucuuu

SEQ ID NO: 4059044 - RNA, 19 nt, Vaccinia virus
guaaaaugaaauaucuuaa

SEQ ID NO: 4059045 - RNA, 22 nt, Vaccinia virus
guaaaauggccaagaaaauaga

SEQ ID NO: 4059046 - RNA, 15 nt, Vaccinia virus
guaaacacauaucca

SEQ ID NO: 4059047 - RNA, 22 nt, Vaccinia virus
guaaacauuaugccguuaucau

SEQ ID NO: 4059048 - RNA, 23 nt, Vaccinia virus
guaaaccagcggcuacuaaaaga

SEQ ID NO: 4059049 - RNA, 15 nt, Vaccinia virus
guaaaccguuuuuaa

SEQ ID NO: 4059050 - RNA, 17 nt, Vaccinia virus
guaaaggauaugauaug

SEQ ID NO: 4059051 - RNA, 15 nt, Vaccinia virus
guaaauaaauacuuu

SEQ ID NO: 4059052 - RNA, 13 nt, Vaccinia virus
guaaauaguuuua

SEQ ID NO: 4059053 - RNA, 19 nt, Vaccinia virus
guaaauauagaucaaacaa

SEQ ID NO: 4059054 - RNA, 16 nt, Vaccinia virus
guaaaucacauaucua

SEQ ID NO: 4059055 - RNA, 15 nt, Vaccinia virus
guaaaucauuaucua

SEQ ID NO: 4059056 - RNA, 16 nt, Vaccinia virus
guaaauccuaguucug

SEQ ID NO: 4059057 - RNA, 11 nt, Vaccinia virus
guaacaaacug

SEQ ID NO: 4059058 - RNA, 18 nt, Vaccinia virus
guaacagcuuggacaauc

SEQ ID NO: 4059059 - RNA, 17 nt, Vaccinia virus
guaacuauguaaaugau

SEQ ID NO: 4059060 - RNA, 21 nt, Vaccinia virus
guaacucuaguaaaauaauca

SEQ ID NO: 4059061 - RNA, 17 nt, Vaccinia virus
guaagacgauuaaccaa

SEQ ID NO: 4059062 - RNA, 18 nt, Vaccinia virus
guaagacuugacuagauc

SEQ ID NO: 4059063 - RNA, 14 nt, Vaccinia virus
guaagcauuuccuu

SEQ ID NO: 4059064 - RNA, 14 nt, Vaccinia virus
guaauaacauugcu

SEQ ID NO: 4059065 - RNA, 19 nt, Vaccinia virus
guaauaagauuucuauucc

SEQ ID NO: 4059066 - RNA, 13 nt, Vaccinia virus
guaauaaucuguu

SEQ ID NO: 4059067 - RNA, 18 nt, Vaccinia virus
guaauacauauaaauguc

SEQ ID NO: 4059068 - RNA, 14 nt, Vaccinia virus
guaauacaugcaaa

SEQ ID NO: 4059069 - RNA, 23 nt, Vaccinia virus
guaauacuuuucuucauuacuuc

SEQ ID NO: 4059070 - RNA, 22 nt, Vaccinia virus
guaauagaauacgaugauauua

SEQ ID NO: 4059071 - RNA, 14 nt, Vaccinia virus
guaauauauaaacu

SEQ ID NO: 4059072 - RNA, 15 nt, Vaccinia virus
guaauauuuuuaguu

SEQ ID NO: 4059073 - RNA, 13 nt, Vaccinia virus
guaauccauaauc

SEQ ID NO: 4059074 - RNA, 21 nt, Vaccinia virus
guaaucgucguagggagagaa

SEQ ID NO: 4059075 - RNA, 20 nt, Vaccinia virus
guaaugauaaaaucaaucgu

SEQ ID NO: 4059076 - RNA, 15 nt, Vaccinia virus
guaauuaaauguuug

SEQ ID NO: 4059077 - RNA, 22 nt, Vaccinia virus
guacacauauggaauauaucua

SEQ ID NO: 4059078 - RNA, 20 nt, Vaccinia virus
guacauggaugauauagaua

SEQ ID NO: 4059079 - RNA, 18 nt, Vaccinia virus
guacaugggaaaugaaau

SEQ ID NO: 4059080 - RNA, 21 nt, Vaccinia virus
guacauuagccggacaaauau

SEQ ID NO: 4059081 - RNA, 20 nt, Vaccinia virus
guaccagaaggaacauacga

SEQ ID NO: 4059082 - RNA, 16 nt, Vaccinia virus
guaccauuugauuuuc

SEQ ID NO: 4059083 - RNA, 14 nt, Vaccinia virus
guacccaaguuauu

SEQ ID NO: 4059084 - RNA, 20 nt, Vaccinia virus
guaccuggaauguaaagccc

SEQ ID NO: 4059085 - RNA, 15 nt, Vaccinia virus
guaccugguaagaua

SEQ ID NO: 4059086 - RNA, 17 nt, Vaccinia virus
guacuccucccauaaua

SEQ ID NO: 4059087 - RNA, 17 nt, Vaccinia virus
guacuucuguacaaaau

SEQ ID NO: 4059088 - RNA, 16 nt, Vaccinia virus
guacuuguacacauau

SEQ ID NO: 4059089 - RNA, 16 nt, Vaccinia virus
guagaacaauguguga

SEQ ID NO: 4059090 - RNA, 17 nt, Vaccinia virus
guagaauuuuuuaaaaa

SEQ ID NO: 4059091 - RNA, 17 nt, Vaccinia virus
guagauaaucauuuaau

SEQ ID NO: 4059092 - RNA, 22 nt, Vaccinia virus
guagauuuucaauuauguauca

SEQ ID NO: 4059093 - RNA, 20 nt, Vaccinia virus
guagcaaagaaauuaauaga

SEQ ID NO: 4059094 - RNA, 22 nt, Vaccinia virus
guagcaaauaaaaucuauauga

SEQ ID NO: 4059095 - RNA, 19 nt, Vaccinia virus
guagucaguagacaucuga

SEQ ID NO: 4059096 - RNA, 15 nt, Vaccinia virus
guaguuguugguaac

SEQ ID NO: 4059097 - RNA, 23 nt, Vaccinia virus
guauaacaugacauuuauucauc

SEQ ID NO: 4059098 - RNA, 12 nt, Vaccinia virus
guauaacauucu

SEQ ID NO: 4059099 - RNA, 21 nt, Vaccinia virus
guauaauacggacuucauaau

SEQ ID NO: 4059100 - RNA, 18 nt, Vaccinia virus
guauaauauuuaaacaau

SEQ ID NO: 4059101 - RNA, 16 nt, Vaccinia virus
guauaauucuuuauaa

SEQ ID NO: 4059102 - RNA, 20 nt, Vaccinia virus
guauacacaaaaagaaagaa

SEQ ID NO: 4059103 - RNA, 22 nt, Vaccinia virus
guauacagcuggagauuaucau

SEQ ID NO: 4059104 - RNA, 20 nt, Vaccinia virus
guauagauccuccaguaaau

SEQ ID NO: 4059105 - RNA, 14 nt, Vaccinia virus
guauauaacauugu

SEQ ID NO: 4059106 - RNA, 11 nt, Vaccinia virus
guauauacaug

SEQ ID NO: 4059107 - RNA, 23 nt, Vaccinia virus
guaucaauaauagcaacauauga

SEQ ID NO: 4059108 - RNA, 16 nt, Vaccinia virus
guaucaugaacucuaa

SEQ ID NO: 4059109 - RNA, 14 nt, Vaccinia virus
guaucauuaaacau

SEQ ID NO: 4059110 - RNA, 15 nt, Vaccinia virus
guauccauaaacaau

SEQ ID NO: 4059111 - RNA, 22 nt, Vaccinia virus
guauccuauuccacauuuuguu

SEQ ID NO: 4059112 - RNA, 20 nt, Vaccinia virus
guaucgacaucuuuauuauu

SEQ ID NO: 4059113 - RNA, 15 nt, Vaccinia virus
guaucgauaauuauu

SEQ ID NO: 4059114 - RNA, 14 nt, Vaccinia virus
guaucgcacgcucu

SEQ ID NO: 4059115 - RNA, 16 nt, Vaccinia virus
guaucuacgauuuuua

SEQ ID NO: 4059116 - RNA, 17 nt, Vaccinia virus
guaucuagccauaucua

SEQ ID NO: 4059117 - RNA, 15 nt, Vaccinia virus
guaucuauaaucauc

SEQ ID NO: 4059118 - RNA, 16 nt, Vaccinia virus
ucuuccauuuaaauau

SEQ ID NO: 4059119 - RNA, 22 nt, Vaccinia virus
ucuuccguuuauuauuauacau

SEQ ID NO: 4059120 - RNA, 22 nt, Vaccinia virus
ucuuccuuaacuauauauuugu

SEQ ID NO: 4059121 - RNA, 15 nt, Vaccinia virus
ucuuccuucgauaga

SEQ ID NO: 4059122 - RNA, 22 nt, Vaccinia virus
ucuucgcccucaauuucccaaa

SEQ ID NO: 4059123 - RNA, 17 nt, Vaccinia virus
ucuucuauuuuaucauu

SEQ ID NO: 4059124 - RNA, 19 nt, Vaccinia virus
ucuucucuaagagcuacgu

SEQ ID NO: 4059125 - RNA, 18 nt, Vaccinia virus
ucuugauuacaaaaccaa

SEQ ID NO: 4059126 - RNA, 22 nt, Vaccinia virus
ucuugauuaccuuacucaugau

SEQ ID NO: 4059127 - RNA, 15 nt, Vaccinia virus
ucuugguaauacuua

SEQ ID NO: 4059128 - RNA, 14 nt, Vaccinia virus
ucuuuaaugugaaa

SEQ ID NO: 4059129 - RNA, 21 nt, Vaccinia virus
ucuuuaccauaacuguauaaa

SEQ ID NO: 4059130 - RNA, 15 nt, Vaccinia virus
ucuuuacccauccaa

SEQ ID NO: 4059131 - RNA, 17 nt, Vaccinia virus
ucuuuagcuucugaaau

SEQ ID NO: 4059132 - RNA, 14 nt, Vaccinia virus
ucuuucauuucagu

SEQ ID NO: 4059133 - RNA, 17 nt, Vaccinia virus
ucuuucuucuacuauau

SEQ ID NO: 4059134 - RNA, 21 nt, Vaccinia virus
ucuuugaaaaguucuaugaaa

SEQ ID NO: 4059135 - RNA, 22 nt, Vaccinia virus
ucuuugaaacacgauuuaaaau

SEQ ID NO: 4059136 - RNA, 12 nt, Vaccinia virus
ucuuuuaaauau

SEQ ID NO: 4059137 - RNA, 22 nt, Vaccinia virus
ucuuuuuauucucguuaaacag

SEQ ID NO: 4059138 - RNA, 19 nt, Vaccinia virus
ugaaaaaaaacuagucguu

SEQ ID NO: 4059139 - RNA, 14 nt, Vaccinia virus
ugaaaauaaagaua

SEQ ID NO: 4059140 - RNA, 12 nt, Vaccinia virus
ugaaaauacguu

SEQ ID NO: 4059141 - RNA, 15 nt, Vaccinia virus
ugaaaaugaaaauau

SEQ ID NO: 4059142 - RNA, 18 nt, Vaccinia virus
ugaaacaggacauuauca

SEQ ID NO: 4059143 - RNA, 14 nt, Vaccinia virus
ugaaagaacuacau

SEQ ID NO: 4059144 - RNA, 20 nt, Vaccinia virus
ugaaagcgagaaauaaucau

SEQ ID NO: 4059145 - RNA, 13 nt, Vaccinia virus
ugaaauaacucuu

SEQ ID NO: 4059146 - RNA, 20 nt, Vaccinia virus
ugaaauccguagaaacaucu

SEQ ID NO: 4059147 - RNA, 11 nt, Vaccinia virus
ugaaauuauuc

SEQ ID NO: 4059148 - RNA, 17 nt, Vaccinia virus
ugaacauaguaagaaau

SEQ ID NO: 4059149 - RNA, 24 nt, Vaccinia virus
ugaacauauaguucgucauuuaau

SEQ ID NO: 4059150 - RNA, 14 nt, Vaccinia virus
ugaaccaaacauuc

SEQ ID NO: 4059151 - RNA, 21 nt, Vaccinia virus
ugaaccaaacauucuuucaaa

SEQ ID NO: 4059152 - RNA, 23 nt, Vaccinia virus
ugaaccaguuaauguauaucuuu

SEQ ID NO: 4059153 - RNA, 19 nt, Vaccinia virus
ugaaccguaauauaucuag

SEQ ID NO: 4059154 - RNA, 17 nt, Vaccinia virus
ugaacgcuauuaaacau

SEQ ID NO: 4059155 - RNA, 23 nt, Vaccinia virus
ugaagaaccaguaacauaugaua

SEQ ID NO: 4059156 - RNA, 22 nt, Vaccinia virus
ugaagaagugucuauaaaugua

SEQ ID NO: 4059157 - RNA, 12 nt, Vaccinia virus
ugaagaugaugu

SEQ ID NO: 4059158 - RNA, 15 nt, Vaccinia virus
ugaagaugaugugaa

SEQ ID NO: 4059159 - RNA, 16 nt, Vaccinia virus
ugaagcaaaauaugcu

SEQ ID NO: 4059160 - RNA, 16 nt, Vaccinia virus
ugaagccauugaaaac

SEQ ID NO: 4059161 - RNA, 16 nt, Vaccinia virus
ugaauacaauaauuca

SEQ ID NO: 4059162 - RNA, 12 nt, Vaccinia virus
ugaauauacuuu

SEQ ID NO: 4059163 - RNA, 15 nt, Vaccinia virus
ugaauauauaugaca

SEQ ID NO: 4059164 - RNA, 11 nt, Vaccinia virus
ugaaucucugu

SEQ ID NO: 4059165 - RNA, 20 nt, Vaccinia virus
ugaaugcugaugaacagguu

SEQ ID NO: 4059166 - RNA, 16 nt, Vaccinia virus
ugaauggauacuaguu

SEQ ID NO: 4059167 - RNA, 13 nt, Vaccinia virus
ugaauugcauaca

SEQ ID NO: 4059168 - RNA, 18 nt, Vaccinia virus
ugaauugcgauuauaaga

SEQ ID NO: 4059169 - RNA, 14 nt, Vaccinia virus
ugaauuguuucuuu

SEQ ID NO: 4059170 - RNA, 21 nt, Vaccinia virus
ugacaaaaucaacuacauaau

SEQ ID NO: 4059171 - RNA, 13 nt, Vaccinia virus
ugacaaaauuaaa

SEQ ID NO: 4059172 - RNA, 12 nt, Vaccinia virus
ugacaauaauua

SEQ ID NO: 4059173 - RNA, 17 nt, Vaccinia virus
ugacaauaauuauguag

SEQ ID NO: 4059174 - RNA, 16 nt, Vaccinia virus
ugacacuaucuucugu

SEQ ID NO: 4059175 - RNA, 18 nt, Vaccinia virus
ugacaucauacuagauaa

SEQ ID NO: 4059176 - RNA, 19 nt, Vaccinia virus
ugacaucgacgcauuauau

SEQ ID NO: 4059177 - RNA, 12 nt, Vaccinia virus
ugacauggaaau

SEQ ID NO: 4059178 - RNA, 17 nt, Vaccinia virus
ugacauuuauucaucau

SEQ ID NO: 4059179 - RNA, 20 nt, Vaccinia virus
ugacauuuucacaaauacua

SEQ ID NO: 4059180 - RNA, 20 nt, Vaccinia virus
ugacauuuuccuuguaucca

SEQ ID NO: 4059181 - RNA, 18 nt, Vaccinia virus
ugacgaacguauugcuau

SEQ ID NO: 4059182 - RNA, 17 nt, Vaccinia virus
ugacgcaguaacauaua

SEQ ID NO: 4059183 - RNA, 18 nt, Vaccinia virus
ugacgcaguaacauauau

SEQ ID NO: 4059184 - RNA, 19 nt, Vaccinia virus
ugacguacaaaaaaauaaa

SEQ ID NO: 4059185 - RNA, 17 nt, Vaccinia virus
ugacgucagccauagca

SEQ ID NO: 4059186 - RNA, 19 nt, Vaccinia virus
ugacuagacugauuucucu

SEQ ID NO: 4059187 - RNA, 20 nt, Vaccinia virus
ugacuaguuguagaauuuga

SEQ ID NO: 4059188 - RNA, 20 nt, Vaccinia virus
ugacuguagaacucaugaau

SEQ ID NO: 4059189 - RNA, 18 nt, Vaccinia virus
ugacuuaacuuguaauaa

SEQ ID NO: 4059190 - RNA, 23 nt, Vaccinia virus
ugacuuaacuuguaauaauugcu

SEQ ID NO: 4059191 - RNA, 12 nt, Vaccinia virus
ugacuucaucau

SEQ ID NO: 4059192 - RNA, 21 nt, Vaccinia virus
ugacuuuuuuuguaccuuugu

SEQ ID NO: 4059193 - RNA, 19 nt, Vaccinia virus
ugagauaaauaucaucaau

SEQ ID NO: 4059194 - RNA, 21 nt, Vaccinia virus
ugagauacguaguuauguaga

SEQ ID NO: 4059195 - RNA, 22 nt, Vaccinia virus
ugagaucccacaucauuucaac

SEQ ID NO: 4059196 - RNA, 17 nt, Vaccinia virus
ugagauguuuauauguu

SEQ ID NO: 4059197 - RNA, 14 nt, Vaccinia virus
ugaggaaauugaua

SEQ ID NO: 4059198 - RNA, 18 nt, Vaccinia virus
ugaggagaucuaaacaau

SEQ ID NO: 4059199 - RNA, 15 nt, Vaccinia virus
ugaguaaugaaaucc

SEQ ID NO: 4059200 - RNA, 17 nt, Vaccinia virus
ugagucuauaucccauu

SEQ ID NO: 4059201 - RNA, 16 nt, Vaccinia virus
ugauacaccuguaauc

SEQ ID NO: 4059202 - RNA, 16 nt, Vaccinia virus
ugauagagacaaacua

SEQ ID NO: 4059203 - RNA, 11 nt, Vaccinia virus
ugauagauauu

SEQ ID NO: 4059204 - RNA, 16 nt, Vaccinia virus
ugauagauuuucuacu

SEQ ID NO: 4059205 - RNA, 21 nt, Vaccinia virus
ugauagguaucgaugaaggac

SEQ ID NO: 4059206 - RNA, 17 nt, Vaccinia virus
ugauaguaauucucgga

SEQ ID NO: 4059207 - RNA, 22 nt, Vaccinia virus
ugauaguauuccaauaucugag

SEQ ID NO: 4059208 - RNA, 21 nt, Vaccinia virus
ugauauacaaugcucaguaaa

SEQ ID NO: 4059209 - RNA, 19 nt, Vaccinia virus
ugauaucauguuagauaua

SEQ ID NO: 4059210 - RNA, 21 nt, Vaccinia virus
ugauauuagccuuuacagaua

SEQ ID NO: 4059211 - RNA, 17 nt, Vaccinia virus
ugauauuggauauauca

SEQ ID NO: 4059212 - RNA, 23 nt, Vaccinia virus
ugauauugugaaugguaaagaau

SEQ ID NO: 4059213 - RNA, 16 nt, Vaccinia virus
ugaucaaaaagagauu

SEQ ID NO: 4059214 - RNA, 18 nt, Vaccinia virus
ugaucggauaguauucaa

SEQ ID NO: 4059215 - RNA, 13 nt, Vaccinia virus
ugaugaauuaaug

SEQ ID NO: 4059216 - RNA, 14 nt, Vaccinia virus
ugaugaauuuaccu

SEQ ID NO: 4059217 - RNA, 16 nt, Vaccinia virus
ugaugaguuagauauu

SEQ ID NO: 4059218 - RNA, 14 nt, Vaccinia virus
ugaugauagagaua

SEQ ID NO: 4059219 - RNA, 17 nt, Vaccinia virus
ugaugauuauggagaac

SEQ ID NO: 4059220 - RNA, 21 nt, Vaccinia virus
ugaugcguuccauuuguguau

SEQ ID NO: 4059221 - RNA, 22 nt, Vaccinia virus
ugauuaaugauuuagaaaugaa

SEQ ID NO: 4059222 - RNA, 14 nt, Vaccinia virus
ugauuauauagaua

SEQ ID NO: 4059223 - RNA, 14 nt, Vaccinia virus
ugauuauuagauuu

SEQ ID NO: 4059224 - RNA, 21 nt, Vaccinia virus
ugauuauucuauaaguauaga

SEQ ID NO: 4059225 - RNA, 18 nt, Vaccinia virus
ugauucacguuauauaac

SEQ ID NO: 4059226 - RNA, 18 nt, Vaccinia virus
ugauucauucacuaucaa

SEQ ID NO: 4059227 - RNA, 16 nt, Vaccinia virus
ugauuccaaaauugaa

SEQ ID NO: 4059228 - RNA, 11 nt, Vaccinia virus
ugauugaagaa

SEQ ID NO: 4059229 - RNA, 17 nt, Vaccinia virus
ugauugcagauuugcca

SEQ ID NO: 4059230 - RNA, 16 nt, Vaccinia virus
ugauuguacacuucua

SEQ ID NO: 4059231 - RNA, 16 nt, Vaccinia virus
ugauugugucucgaau

SEQ ID NO: 4059232 - RNA, 15 nt, Vaccinia virus
ugauuucaauuuauu

SEQ ID NO: 4059233 - RNA, 23 nt, Vaccinia virus
ugauuucgacggagaugaagaau

SEQ ID NO: 4059234 - RNA, 18 nt, Vaccinia virus
ugauuuucguaacagaua

SEQ ID NO: 4059235 - RNA, 22 nt, Vaccinia virus
ugauuuuguagaugccauauca

SEQ ID NO: 4059236 - RNA, 18 nt, Vaccinia virus
ugcaaagaacagaauaaa

SEQ ID NO: 4059237 - RNA, 14 nt, Vaccinia virus
ugcaaagucuaaau

SEQ ID NO: 4059238 - RNA, 19 nt, Vaccinia virus
ugcaacggcgaaacaaaau

SEQ ID NO: 4059239 - RNA, 12 nt, Vaccinia virus
ugcaaggcauuu

SEQ ID NO: 4059240 - RNA, 13 nt, Vaccinia virus
ugcaauaaaucua

SEQ ID NO: 4059241 - RNA, 18 nt, Vaccinia virus
ugcacaaagaagaauucu

SEQ ID NO: 4059242 - RNA, 18 nt, Vaccinia virus
uuaacgaguuaaaaaaga

SEQ ID NO: 4059243 - RNA, 22 nt, Vaccinia virus
uuaacgauuggaaaucauuaac

SEQ ID NO: 4059244 - RNA, 14 nt, Vaccinia virus
uuaacguauaaaug

SEQ ID NO: 4059245 - RNA, 23 nt, Vaccinia virus
uuaacgucuaccgaaacaucguu

SEQ ID NO: 4059246 - RNA, 16 nt, Vaccinia virus
uuaacuagauuauaca

SEQ ID NO: 4059247 - RNA, 13 nt, Vaccinia virus
uuaacuauuuugu

SEQ ID NO: 4059248 - RNA, 20 nt, Vaccinia virus
uuaacuugacuaaauauuca

SEQ ID NO: 4059249 - RNA, 15 nt, Vaccinia virus
uuaagaaaauuauua

SEQ ID NO: 4059250 - RNA, 17 nt, Vaccinia virus
uuaagagaauaauagau

SEQ ID NO: 4059251 - RNA, 13 nt, Vaccinia virus
uuaagagauaucu

SEQ ID NO: 4059252 - RNA, 22 nt, Vaccinia virus
uuaauaaauccggaacuguaaa

SEQ ID NO: 4059253 - RNA, 20 nt, Vaccinia virus
uuaauaagauuuuuaucauu

SEQ ID NO: 4059254 - RNA, 14 nt, Vaccinia virus
uuaauaauguagua

SEQ ID NO: 4059255 - RNA, 17 nt, Vaccinia virus
uuaauagauauauuaau

SEQ ID NO: 4059256 - RNA, 15 nt, Vaccinia virus
uuaauagauuaacau

SEQ ID NO: 4059257 - RNA, 18 nt, Vaccinia virus
uuaauaggcaucauuuau

SEQ ID NO: 4059258 - RNA, 18 nt, Vaccinia virus
uuaauaguuuacaccuuu

SEQ ID NO: 4059259 - RNA, 20 nt, Vaccinia virus
uuaauauaugcucuagauau

SEQ ID NO: 4059260 - RNA, 18 nt, Vaccinia virus
uuaauauauuuaaacuag

SEQ ID NO: 4059261 - RNA, 15 nt, Vaccinia virus
uuaauauuagaguua

SEQ ID NO: 4059262 - RNA, 16 nt, Vaccinia virus
uuaauccauuauuuca

SEQ ID NO: 4059263 - RNA, 15 nt, Vaccinia virus
uuaauccuagaugau

SEQ ID NO: 4059264 - RNA, 15 nt, Vaccinia virus
uuaaucuauuagaau

SEQ ID NO: 4059265 - RNA, 22 nt, Vaccinia virus
uuaaucuuggcuccauacugua

SEQ ID NO: 4059266 - RNA, 15 nt, Vaccinia virus
uuaaucuuuaaaauu

SEQ ID NO: 4059267 - RNA, 12 nt, Vaccinia virus
uuaaucuuuucu

SEQ ID NO: 4059268 - RNA, 23 nt, Vaccinia virus
uuaaugagcguaaacaauaaucg

SEQ ID NO: 4059269 - RNA, 23 nt, Vaccinia virus
uuaaugcacacaguauuaucuac

SEQ ID NO: 4059270 - RNA, 16 nt, Vaccinia virus
uuaaugcuacagauau

SEQ ID NO: 4059271 - RNA, 13 nt, Vaccinia virus
uuaauguuugcuc

SEQ ID NO: 4059272 - RNA, 14 nt, Vaccinia virus
uuaauuacauccuu

SEQ ID NO: 4059273 - RNA, 12 nt, Vaccinia virus
uuaauuaucuaa

SEQ ID NO: 4059274 - RNA, 12 nt, Vaccinia virus
uuaauucucuau

SEQ ID NO: 4059275 - RNA, 17 nt, Vaccinia virus
uuacaaaauucauuaac

SEQ ID NO: 4059276 - RNA, 12 nt, Vaccinia virus
uuacaauuauug

SEQ ID NO: 4059277 - RNA, 16 nt, Vaccinia virus
uuacauaauauauaca

SEQ ID NO: 4059278 - RNA, 21 nt, Vaccinia virus
uuacauauuucgacaaaaaga

SEQ ID NO: 4059279 - RNA, 13 nt, Vaccinia virus
uuacaucauuaag

SEQ ID NO: 4059280 - RNA, 12 nt, Vaccinia virus
uuacaugugauc

SEQ ID NO: 4059281 - RNA, 21 nt, Vaccinia virus
uuaccaucuucuuugauuaau

SEQ ID NO: 4059282 - RNA, 13 nt, Vaccinia virus
uuaccauguauga

SEQ ID NO: 4059283 - RNA, 20 nt, Vaccinia virus
uuaccccucauaguauuaau

SEQ ID NO: 4059284 - RNA, 13 nt, Vaccinia virus
uuaccgcauuaau

SEQ ID NO: 4059285 - RNA, 17 nt, Vaccinia virus
uuaccggucauauuaau

SEQ ID NO: 4059286 - RNA, 22 nt, Vaccinia virus
uuaccguccuccgccaauauag

SEQ ID NO: 4059287 - RNA, 15 nt, Vaccinia virus
uuacguuaauacuaa

SEQ ID NO: 4059288 - RNA, 16 nt, Vaccinia virus
uuacguuaauacuaag

SEQ ID NO: 4059289 - RNA, 12 nt, Vaccinia virus
uuacuaauagaa

SEQ ID NO: 4059290 - RNA, 14 nt, Vaccinia virus
uuacuacauuauua

SEQ ID NO: 4059291 - RNA, 18 nt, Vaccinia virus
uuacuaccaucauuauua

SEQ ID NO: 4059292 - RNA, 22 nt, Vaccinia virus
uuacuacguucagauuucaauu

SEQ ID NO: 4059293 - RNA, 16 nt, Vaccinia virus
uuacuauagcauuaau

SEQ ID NO: 4059294 - RNA, 19 nt, Vaccinia virus
uuacuaucaauauuauuca

SEQ ID NO: 4059295 - RNA, 13 nt, Vaccinia virus
uuacucaugauua

SEQ ID NO: 4059296 - RNA, 14 nt, Vaccinia virus
uuacuccuuaaaaa

SEQ ID NO: 4059297 - RNA, 14 nt, Vaccinia virus
uuacuucuuccaug

SEQ ID NO: 4059298 - RNA, 20 nt, Vaccinia virus
uuacuugauaggugaaaaga

SEQ ID NO: 4059299 - RNA, 9 nt, Vaccinia virus
uuagaaaaa

SEQ ID NO: 4059300 - RNA, 22 nt, Vaccinia virus
uuagaaagaaacgauuauuucu

SEQ ID NO: 4059301 - RNA, 20 nt, Vaccinia virus
uuagaaggauuggucuuaaa

SEQ ID NO: 4059302 - RNA, 16 nt, Vaccinia virus
uuagaauauauuuucu

SEQ ID NO: 4059303 - RNA, 23 nt, Vaccinia virus
uuagacauaaaaacuaauauuag

SEQ ID NO: 4059304 - RNA, 19 nt, Vaccinia virus
uuagacgacguauuauaca

SEQ ID NO: 4059305 - RNA, 14 nt, Vaccinia virus
uuagagaaaaacaa

SEQ ID NO: 4059306 - RNA, 20 nt, Vaccinia virus
uuagauauauagaauuagua

SEQ ID NO: 4059307 - RNA, 19 nt, Vaccinia virus
uuagauaugugauuuacag

SEQ ID NO: 4059308 - RNA, 13 nt, Vaccinia virus
uuagaucauuaac

SEQ ID NO: 4059309 - RNA, 24 nt, Vaccinia virus
uuagaucugauacaccuguaauca

SEQ ID NO: 4059310 - RNA, 16 nt, Vaccinia virus
uuagccguuguuugag

SEQ ID NO: 4059311 - RNA, 22 nt, Vaccinia virus
uuaguaaaaaauuuauuucuaa

SEQ ID NO: 4059312 - RNA, 20 nt, Vaccinia virus
uuaguacccacgucuuuuca

SEQ ID NO: 4059313 - RNA, 14 nt, Vaccinia virus
uuagucauugcaau

SEQ ID NO: 4059314 - RNA, 15 nt, Vaccinia virus
uuagucuuacacauu

SEQ ID NO: 4059315 - RNA, 14 nt, Vaccinia virus
uuagugaaacauuc

SEQ ID NO: 4059316 - RNA, 16 nt, Vaccinia virus
uuagugaaaucuuuaa

SEQ ID NO: 4059317 - RNA, 16 nt, Vaccinia virus
uuaguucuuuuagaaa

SEQ ID NO: 4059318 - RNA, 15 nt, Vaccinia virus
uuaguugucuaguau

SEQ ID NO: 4059319 - RNA, 23 nt, Vaccinia virus
uuaguuucuauaucuacaucuau

SEQ ID NO: 4059320 - RNA, 16 nt, Vaccinia virus
uuaguuuuuggauaga

SEQ ID NO: 4059321 - RNA, 13 nt, Vaccinia virus
uuauaaaaacuuu

SEQ ID NO: 4059322 - RNA, 12 nt, Vaccinia virus
uuauaacuaaac

SEQ ID NO: 4059323 - RNA, 12 nt, Vaccinia virus
uuauaacuaaca

SEQ ID NO: 4059324 - RNA, 18 nt, Vaccinia virus
uuauacaggucauuacau

SEQ ID NO: 4059325 - RNA, 23 nt, Vaccinia virus
uuauacauguuccagaugucaua

SEQ ID NO: 4059326 - RNA, 18 nt, Vaccinia virus
uuauacgguucugucauu

SEQ ID NO: 4059327 - RNA, 16 nt, Vaccinia virus
uuauacuaauaugaca

SEQ ID NO: 4059328 - RNA, 19 nt, Vaccinia virus
uuauagacaaauuauucau

SEQ ID NO: 4059329 - RNA, 15 nt, Vaccinia virus
uuauagaguguggua

SEQ ID NO: 4059330 - RNA, 23 nt, Vaccinia virus
uuauagcguacaauacauguaca

SEQ ID NO: 4059331 - RNA, 15 nt, Vaccinia virus
uuauauaaauauguu

SEQ ID NO: 4059332 - RNA, 21 nt, Vaccinia virus
uuauauacgaaauauuauaca

SEQ ID NO: 4059333 - RNA, 12 nt, Vaccinia virus
uuauauauguaa

SEQ ID NO: 4059334 - RNA, 12 nt, Vaccinia virus
uuauaucuuuuu

SEQ ID NO: 4059335 - RNA, 21 nt, Vaccinia virus
uuauauggaacacgauuauua

SEQ ID NO: 4059336 - RNA, 19 nt, Vaccinia virus
uuauauugaugaugucgaa

SEQ ID NO: 4059337 - RNA, 16 nt, Vaccinia virus
uuaucaaaucuuuaau

SEQ ID NO: 4059338 - RNA, 19 nt, Vaccinia virus
uuaucaaguguauuaguca

SEQ ID NO: 4059339 - RNA, 14 nt, Vaccinia virus
uuaucacaauauag

SEQ ID NO: 4059340 - RNA, 13 nt, Vaccinia virus
uuaucauacuguc

SEQ ID NO: 4059341 - RNA, 18 nt, Vaccinia virus
uuaucaucauccauuaau

SEQ ID NO: 4059342 - RNA, 13 nt, Vaccinia virus
uuaucaucauuau

SEQ ID NO: 4059343 - RNA, 16 nt, Vaccinia virus
uuaucaucuaaucauc

SEQ ID NO: 4059344 - RNA, 13 nt, Vaccinia virus
uuaucauuuucca

SEQ ID NO: 4059345 - RNA, 16 nt, Vaccinia virus
uuauccacuucacauu

SEQ ID NO: 4059346 - RNA, 17 nt, Vaccinia virus
uuauccauuuauacauu

SEQ ID NO: 4059347 - RNA, 20 nt, Vaccinia virus
uuauccguauuuccauaaua

SEQ ID NO: 4059348 - RNA, 22 nt, Vaccinia virus
uuauccuuuagaugaauuauua

SEQ ID NO: 4059349 - RNA, 22 nt, Vaccinia virus
uuaucgaaugauauauuuuuca

SEQ ID NO: 4059350 - RNA, 17 nt, Vaccinia virus
uuaucguuuucaucuuu

SEQ ID NO: 4059351 - RNA, 14 nt, Vaccinia virus
uuaucuaaugaaug

SEQ ID NO: 4059352 - RNA, 20 nt, Vaccinia virus
uuaucuucauagaauacuaa

SEQ ID NO: 4059353 - RNA, 21 nt, Vaccinia virus
uuaucuuuuuagacacguaua

SEQ ID NO: 4059354 - RNA, 23 nt, Vaccinia virus
uuaugauauaaggaaacagcuuu

SEQ ID NO: 4059355 - RNA, 20 nt, Vaccinia virus
uuauggaucuauucaagaug

SEQ ID NO: 4059356 - RNA, 15 nt, Vaccinia virus
uuauguaaaacauuu

SEQ ID NO: 4059357 - RNA, 19 nt, Vaccinia virus
uuaugucauaaacuguaaa

SEQ ID NO: 4059358 - RNA, 20 nt, Vaccinia virus
uuauuaaauauuuuuggaca

SEQ ID NO: 4059359 - RNA, 11 nt, Vaccinia virus
uuauuaacauc

SEQ ID NO: 4059360 - RNA, 15 nt, Vaccinia virus
uuauuacuuuuggaa

SEQ ID NO: 4059361 - RNA, 16 nt, Vaccinia virus
uuauuagaauaagagu

SEQ ID NO: 4059362 - RNA, 15 nt, Vaccinia virus
uuauuagauuuggua

SEQ ID NO: 4059363 - RNA, 17 nt, Vaccinia virus
uuauucauauucuuaaa

SEQ ID NO: 4059364 - RNA, 23 nt, Vaccinia virus
uuauuccaaucauugauaucuuu

SEQ ID NO: 4059365 - RNA, 14 nt, Vaccinia virus
uuauuccacauaag

SEQ ID NO: 4059366 - RNA, 18 nt, Vaccinia virus
uuauuccaucaugucaac

SEQ ID NO: 4059367 - RNA, 18 nt, Vaccinia virus
uuauucuauuuuacuaaa

SEQ ID NO: 4059368 - RNA, 15 nt, Vaccinia virus
uuauucucuacgagu

SEQ ID NO: 4059369 - RNA, 12 nt, Vaccinia virus
uuauucucuuaa

SEQ ID NO: 4059370 - RNA, 19 nt, Vaccinia virus
uuauucuguucuauucaaa

SEQ ID NO: 4059371 - RNA, 22 nt, Vaccinia virus
uuauugcuagccucaucuucua

SEQ ID NO: 4059372 - RNA, 21 nt, Vaccinia virus
uuauugggccaguauacuguu

SEQ ID NO: 4059373 - RNA, 23 nt, Vaccinia virus
uuauugggugguaaacuagauaa

SEQ ID NO: 4059374 - RNA, 22 nt, Vaccinia virus
uuauuggugcuucguacauaag

SEQ ID NO: 4059375 - RNA, 18 nt, Vaccinia virus
uuauugucgagcauauua

SEQ ID NO: 4059376 - RNA, 12 nt, Vaccinia virus
uuauuucugaau

SEQ ID NO: 4059377 - RNA, 23 nt, Vaccinia virus
uuauuuuaaaccuaaagauguua

SEQ ID NO: 4059378 - RNA, 22 nt, Vaccinia virus
uuauuuuaggaucauauuuaca

SEQ ID NO: 4059379 - RNA, 19 nt, Vaccinia virus
uuauuuucuucuacguaca

SEQ ID NO: 4059380 - RNA, 14 nt, Vaccinia virus
uuauuuuuggaaga

SEQ ID NO: 4059381 - RNA, 15 nt, Vaccinia virus
uucaaaaauuuagaa

SEQ ID NO: 4059382 - RNA, 13 nt, Vaccinia virus
uucaaaauuauuu

SEQ ID NO: 4059383 - RNA, 22 nt, Vaccinia virus
uucaacaaguaggauuuuucca

SEQ ID NO: 4059384 - RNA, 17 nt, Vaccinia virus
uucaacaugauuauucu

SEQ ID NO: 4059385 - RNA, 22 nt, Vaccinia virus
uucaacauuuuauggaaacuau

SEQ ID NO: 4059386 - RNA, 15 nt, Vaccinia virus
uucaauauacuaguu

SEQ ID NO: 4059387 - RNA, 13 nt, Vaccinia virus
uucaauauugaaa

SEQ ID NO: 4059388 - RNA, 20 nt, Vaccinia virus
uucaaugucucuuuuucaga

SEQ ID NO: 4059389 - RNA, 19 nt, Vaccinia virus
uucacaugauguagugaua

SEQ ID NO: 4059390 - RNA, 16 nt, Vaccinia virus
uucacauugaaacuau

SEQ ID NO: 4059391 - RNA, 18 nt, Vaccinia virus
uucacauugaaacuaugu

SEQ ID NO: 4059392 - RNA, 18 nt, Vaccinia virus
uucaccaaacaacuuuua

SEQ ID NO: 4059393 - RNA, 22 nt, Vaccinia virus
uucacgaaaaaugaugaaggca

SEQ ID NO: 4059394 - RNA, 21 nt, Vaccinia virus
uucagaaagacgaauacauau

SEQ ID NO: 4059395 - RNA, 14 nt, Vaccinia virus
uucagaaauuauuc

SEQ ID NO: 4059396 - RNA, 21 nt, Vaccinia virus
uucagaauacaaucuguauuu

SEQ ID NO: 4059397 - RNA, 22 nt, Vaccinia virus
uucagauauaaaaaucuguuuu

SEQ ID NO: 4059398 - RNA, 17 nt, Vaccinia virus
uucaggaacauaaacaa

SEQ ID NO: 4059399 - RNA, 17 nt, Vaccinia virus
uucagucagacaauguc

SEQ ID NO: 4059400 - RNA, 16 nt, Vaccinia virus
uucauaaaguugcugg

SEQ ID NO: 4059401 - RNA, 20 nt, Vaccinia virus
uucauaacgcauaauuauua

SEQ ID NO: 4059402 - RNA, 22 nt, Vaccinia virus
uucauaauuguuagcuguuuuc

SEQ ID NO: 4059403 - RNA, 21 nt, Vaccinia virus
uucauauuuuaccaacucuuu

SEQ ID NO: 4059404 - RNA, 18 nt, Vaccinia virus
uucauauuuuaguuuuua

SEQ ID NO: 4059405 - RNA, 16 nt, Vaccinia virus
uucaucagauuauuua

SEQ ID NO: 4059406 - RNA, 20 nt, Vaccinia virus
uucaucauccaccuguuuua

SEQ ID NO: 4059407 - RNA, 14 nt, Vaccinia virus
uucaucauccauga

SEQ ID NO: 4059408 - RNA, 14 nt, Vaccinia virus
uucaucuuggauga

SEQ ID NO: 4059409 - RNA, 12 nt, Vaccinia virus
uucauuaauuuu

SEQ ID NO: 4059410 - RNA, 15 nt, Vaccinia virus
uucauuacuacugua

SEQ ID NO: 4059411 - RNA, 15 nt, Vaccinia virus
uucauuacuauauau

SEQ ID NO: 4059412 - RNA, 15 nt, Vaccinia virus
uucauuacuaucuuu

SEQ ID NO: 4059413 - RNA, 18 nt, Vaccinia virus
uucauuagauaacagugu

SEQ ID NO: 4059414 - RNA, 15 nt, Vaccinia virus
uuccaacucugucuu

SEQ ID NO: 4059415 - RNA, 14 nt, Vaccinia virus
uuccaagaaacuaa

SEQ ID NO: 4059416 - RNA, 21 nt, Vaccinia virus
uuccaauuccguagguaaacg

SEQ ID NO: 4059417 - RNA, 14 nt, Vaccinia virus
uuccacaauacgag

SEQ ID NO: 4059418 - RNA, 17 nt, Vaccinia virus
uuccaccgacucauuau

SEQ ID NO: 4059419 - RNA, 22 nt, Vaccinia virus
uuccaggaucuagauaauuaau

SEQ ID NO: 4059420 - RNA, 17 nt, Vaccinia virus
uuccaugcuacuaguau

SEQ ID NO: 4059421 - RNA, 13 nt, Vaccinia virus
uuccauuauuaau

SEQ ID NO: 4059422 - RNA, 17 nt, Vaccinia virus
uuccauugauaaagaag

SEQ ID NO: 4059423 - RNA, 19 nt, Vaccinia virus
uuccauuggccucauuaac

SEQ ID NO: 4059424 - RNA, 15 nt, Vaccinia virus
uuccauuuuuaauuu

SEQ ID NO: 4059425 - RNA, 17 nt, Vaccinia virus
uucccaaacauacaucu

SEQ ID NO: 4059426 - RNA, 14 nt, Vaccinia virus
uucccaaauaauca

SEQ ID NO: 4059427 - RNA, 15 nt, Vaccinia virus
uucccaaauaguuuu

SEQ ID NO: 4059428 - RNA, 14 nt, Vaccinia virus
uucccauucuaaug

SEQ ID NO: 4059429 - RNA, 21 nt, Vaccinia virus
uucccugauuaguauuuucua

SEQ ID NO: 4059430 - RNA, 19 nt, Vaccinia virus
uuccgaaguaguagucuuu

SEQ ID NO: 4059431 - RNA, 12 nt, Vaccinia virus
uuccucauuaag

SEQ ID NO: 4059432 - RNA, 13 nt, Vaccinia virus
uuccuccauaauu

SEQ ID NO: 4059433 - RNA, 13 nt, Vaccinia virus
uuccuuccaauga

SEQ ID NO: 4059434 - RNA, 21 nt, Vaccinia virus
uuccuuuacgugauaaaucau

SEQ ID NO: 4059435 - RNA, 13 nt, Vaccinia virus
uucgaagauauca

SEQ ID NO: 4059436 - RNA, 17 nt, Vaccinia virus
uucgaguuuaucaaaac

SEQ ID NO: 4059437 - RNA, 22 nt, Vaccinia virus
uucgaugccggacaauagcaca

SEQ ID NO: 4059438 - RNA, 13 nt, Vaccinia virus
uucgcaucguauu

SEQ ID NO: 4059439 - RNA, 17 nt, Vaccinia virus
uucgcuaaaaaauuagu

SEQ ID NO: 4059440 - RNA, 14 nt, Vaccinia virus
uucguaaaauguag

SEQ ID NO: 4059441 - RNA, 23 nt, Vaccinia virus
uucguaacuggcggauuauucau

SEQ ID NO: 4059442 - RNA, 16 nt, Vaccinia virus
uucgucgaauaaugua

SEQ ID NO: 4059443 - RNA, 12 nt, Vaccinia virus
uucguguuugac

SEQ ID NO: 4059444 - RNA, 20 nt, Vaccinia virus
uucuaaaaaaauauuaacga

SEQ ID NO: 4059445 - RNA, 19 nt, Vaccinia virus
uucuaaaaugguaaacuuu

SEQ ID NO: 4059446 - RNA, 21 nt, Vaccinia virus
uucuaagaaaucuauaauauc

SEQ ID NO: 4059447 - RNA, 15 nt, Vaccinia virus
uucuaaguucuaaug

SEQ ID NO: 4059448 - RNA, 21 nt, Vaccinia virus
uucuacagugauaguuucauu

SEQ ID NO: 4059449 - RNA, 22 nt, Vaccinia virus
uucuacuaugcacauuauucua

SEQ ID NO: 4059450 - RNA, 14 nt, Vaccinia virus
uucuagucuagaaa

SEQ ID NO: 4059451 - RNA, 15 nt, Vaccinia virus
uucuauacauagaug

SEQ ID NO: 4059452 - RNA, 17 nt, Vaccinia virus
uucuauacguuucuauu

SEQ ID NO: 4059453 - RNA, 18 nt, Vaccinia virus
uucuauauagcuauucuu

SEQ ID NO: 4059454 - RNA, 19 nt, Vaccinia virus
uucuaucaucauaaucagu

SEQ ID NO: 4059455 - RNA, 18 nt, Vaccinia virus
uucuaucgauaauugucu

SEQ ID NO: 4059456 - RNA, 19 nt, Vaccinia virus
uucuaugcuauaaaugaau

SEQ ID NO: 4059457 - RNA, 13 nt, Vaccinia virus
uucuauuauuauu

SEQ ID NO: 4059458 - RNA, 20 nt, Vaccinia virus
uucucaaaagaucaaggaaa

SEQ ID NO: 4059459 - RNA, 11 nt, Vaccinia virus
uucucauuaaa

SEQ ID NO: 4059460 - RNA, 19 nt, Vaccinia virus
uucucauugcuuauauuuu

SEQ ID NO: 4059461 - RNA, 16 nt, Vaccinia virus
uucuccaauacuaauu

SEQ ID NO: 4059462 - RNA, 23 nt, Vaccinia virus
uucuccaugaauuaauacauauu

SEQ ID NO: 4059463 - RNA, 22 nt, Vaccinia virus
uucucucauaaauacagagaug

SEQ ID NO: 4059464 - RNA, 20 nt, Vaccinia virus
uucucucaucuaucaaaagu

SEQ ID NO: 4059465 - RNA, 15 nt, Vaccinia virus
uucugauuuuaucuu

SEQ ID NO: 4059466 - RNA, 13 nt, Vaccinia virus
uucugcaauaucu

SEQ ID NO: 4059467 - RNA, 22 nt, Vaccinia virus
uucuggaaguggauauacauag

SEQ ID NO: 4059468 - RNA, 14 nt, Vaccinia virus
uucuggauuauuuu

SEQ ID NO: 4059469 - RNA, 21 nt, Vaccinia virus
uucuuagcgaaugaugcagac

SEQ ID NO: 4059470 - RNA, 20 nt, Vaccinia virus
uucuuauugagagacgucau

SEQ ID NO: 4059471 - RNA, 12 nt, Vaccinia virus
uucuuuauucuc

SEQ ID NO: 4059472 - RNA, 12 nt, Vaccinia virus
uucuuucaaaau

SEQ ID NO: 4059473 - RNA, 14 nt, Vaccinia virus
uugaaaauuauuuu

SEQ ID NO: 4059474 - RNA, 19 nt, Vaccinia virus
uugaaacuaggauacauaa

SEQ ID NO: 4059475 - RNA, 19 nt, Vaccinia virus
uugaauaggaguuugaaua

SEQ ID NO: 4059476 - RNA, 14 nt, Vaccinia virus
uugacaaauuauuc

SEQ ID NO: 4059477 - RNA, 15 nt, Vaccinia virus
uugacaaauuauucu

SEQ ID NO: 4059478 - RNA, 15 nt, Vaccinia virus
uugacaucuauauau

SEQ ID NO: 4059479 - RNA, 21 nt, Vaccinia virus
uugacauuaaucuauuagaau

SEQ ID NO: 4059480 - RNA, 19 nt, Vaccinia virus
uugaccucucagaaucagu

SEQ ID NO: 4059481 - RNA, 14 nt, Vaccinia virus
uugacgacguguac

SEQ ID NO: 4059482 - RNA, 16 nt, Vaccinia virus
uugacuaaaucuuaau

SEQ ID NO: 4059483 - RNA, 20 nt, Vaccinia virus
uugagaugucucauuagaau

SEQ ID NO: 4059484 - RNA, 21 nt, Vaccinia virus
uugagcuaauuuuuguaaaua

SEQ ID NO: 4059485 - RNA, 18 nt, Vaccinia virus
uugagguaaucuucuuug

SEQ ID NO: 4059486 - RNA, 17 nt, Vaccinia virus
uugauaaagauagauga

SEQ ID NO: 4059487 - RNA, 21 nt, Vaccinia virus
uugauaagacacgguagauca

SEQ ID NO: 4059488 - RNA, 15 nt, Vaccinia virus
uugauaauauuauua

SEQ ID NO: 4059489 - RNA, 17 nt, Vaccinia virus
uugauacauacauuaau

SEQ ID NO: 4059490 - RNA, 16 nt, Vaccinia virus
uugauacggcuauucu

SEQ ID NO: 4059491 - RNA, 21 nt, Vaccinia virus
aaaccaacgaggaggaauauc

SEQ ID NO: 4059492 - RNA, 19 nt, Vaccinia virus
aaaccauuuuucagaaagu

SEQ ID NO: 4059493 - RNA, 22 nt, Vaccinia virus
aaaccuuugacuaguuguagaa

SEQ ID NO: 4059494 - RNA, 15 nt, Vaccinia virus
aaacgaaaacuauau

SEQ ID NO: 4059495 - RNA, 15 nt, Vaccinia virus
aaacgaauuacugaa

SEQ ID NO: 4059496 - RNA, 14 nt, Vaccinia virus
aaacgacauacugu

SEQ ID NO: 4059497 - RNA, 18 nt, Vaccinia virus
aaacgauauucuugaaau

SEQ ID NO: 4059498 - RNA, 18 nt, Vaccinia virus
aaacgauguacugaagau

SEQ ID NO: 4059499 - RNA, 15 nt, Vaccinia virus
aaacgcguacauaac

SEQ ID NO: 4059500 - RNA, 21 nt, Vaccinia virus
aaacguauauagaugucaaug

SEQ ID NO: 4059501 - RNA, 19 nt, Vaccinia virus
aaacguggauaaaaugcau

SEQ ID NO: 4059502 - RNA, 16 nt, Vaccinia virus
aaacguuuagagauua

SEQ ID NO: 4059503 - RNA, 13 nt, Vaccinia virus
aaacuaaauaacg

SEQ ID NO: 4059504 - RNA, 13 nt, Vaccinia virus
aaacuagauacaa

SEQ ID NO: 4059505 - RNA, 19 nt, Vaccinia virus
aaacuauaauuuugugaaa

SEQ ID NO: 4059506 - RNA, 12 nt, Vaccinia virus
aaacuaucugau

SEQ ID NO: 4059507 - RNA, 16 nt, Vaccinia virus
aaacuauuuaguuaug

SEQ ID NO: 4059508 - RNA, 21 nt, Vaccinia virus
aaacucguacuaaucucuucu

SEQ ID NO: 4059509 - RNA, 19 nt, Vaccinia virus
aaacucuauuuuaaaauua

SEQ ID NO: 4059510 - RNA, 18 nt, Vaccinia virus
aaacucucuauuucuuaa

SEQ ID NO: 4059511 - RNA, 22 nt, Vaccinia virus
aaacucuuuagcgguauaauua

SEQ ID NO: 4059512 - RNA, 22 nt, Vaccinia virus
aaacugauuuuagcagaauaua

SEQ ID NO: 4059513 - RNA, 17 nt, Vaccinia virus
aaacugcaaauguagua

SEQ ID NO: 4059514 - RNA, 18 nt, Vaccinia virus
aaacuguuuaauauugca

SEQ ID NO: 4059515 - RNA, 18 nt, Vaccinia virus
aaacuuauuuagaauauc

SEQ ID NO: 4059516 - RNA, 17 nt, Vaccinia virus
aaacuuccguuuaaaaa

SEQ ID NO: 4059517 - RNA, 20 nt, Vaccinia virus
aaacuuccucauuaagauug

SEQ ID NO: 4059518 - RNA, 15 nt, Vaccinia virus
aaacuuuauuaucca

SEQ ID NO: 4059519 - RNA, 14 nt, Vaccinia virus
aaacuuuuagaaau

SEQ ID NO: 4059520 - RNA, 14 nt, Vaccinia virus
aaacuuuuuagaaa

SEQ ID NO: 4059521 - RNA, 15 nt, Vaccinia virus
aaacuuuuuagaaau

SEQ ID NO: 4059522 - RNA, 17 nt, Vaccinia virus
aaacuuuuuagaauauc

SEQ ID NO: 4059523 - RNA, 17 nt, Vaccinia virus
aaagaacggagaauugu

SEQ ID NO: 4059524 - RNA, 15 nt, Vaccinia virus
aaagaaguagcuaau

SEQ ID NO: 4059525 - RNA, 15 nt, Vaccinia virus
aaagaaguccauuua

SEQ ID NO: 4059526 - RNA, 15 nt, Vaccinia virus
aaagaaguuauagaa

SEQ ID NO: 4059527 - RNA, 17 nt, Vaccinia virus
aaagaauaauccuauau

SEQ ID NO: 4059528 - RNA, 13 nt, Vaccinia virus
aaagaauuuggaa

SEQ ID NO: 4059529 - RNA, 14 nt, Vaccinia virus
aaagacuucuuucu

SEQ ID NO: 4059530 - RNA, 15 nt, Vaccinia virus
aaagauauuccaaga

SEQ ID NO: 4059531 - RNA, 13 nt, Vaccinia virus
aaagaugauauau

SEQ ID NO: 4059532 - RNA, 12 nt, Vaccinia virus
aaagcauauucc

SEQ ID NO: 4059533 - RNA, 16 nt, Vaccinia virus
aaagcgcuauagagua

SEQ ID NO: 4059534 - RNA, 18 nt, Vaccinia virus
aaaggacaggaauauuua

SEQ ID NO: 4059535 - RNA, 14 nt, Vaccinia virus
aaagguaagaguua

SEQ ID NO: 4059536 - RNA, 13 nt, Vaccinia virus
aaagguucuauca

SEQ ID NO: 4059537 - RNA, 19 nt, Vaccinia virus
aaaguaauauucauaugua

SEQ ID NO: 4059538 - RNA, 22 nt, Vaccinia virus
aaaguagaugguauuucugaaa

SEQ ID NO: 4059539 - RNA, 16 nt, Vaccinia virus
aaaguauacauguuag

SEQ ID NO: 4059540 - RNA, 17 nt, Vaccinia virus
aaaguauucuuauguau

SEQ ID NO: 4059541 - RNA, 17 nt, Vaccinia virus
aaaguauuuuaauacau

SEQ ID NO: 4059542 - RNA, 14 nt, Vaccinia virus
aaagugaaaaucua

SEQ ID NO: 4059543 - RNA, 14 nt, Vaccinia virus
aaaguuaagaauua

SEQ ID NO: 4059544 - RNA, 16 nt, Vaccinia virus
aaaguuaauauuuucu

SEQ ID NO: 4059545 - RNA, 19 nt, Vaccinia virus
aaaguuacaacuggucaua

SEQ ID NO: 4059546 - RNA, 17 nt, Vaccinia virus
aaaguucauaaucucau

SEQ ID NO: 4059547 - RNA, 20 nt, Vaccinia virus
aaauaaaaagguagauguuc

SEQ ID NO: 4059548 - RNA, 15 nt, Vaccinia virus
aaauaaaauaaugau

SEQ ID NO: 4059549 - RNA, 16 nt, Vaccinia virus
aaauaaaauacauuua

SEQ ID NO: 4059550 - RNA, 17 nt, Vaccinia virus
aaauaaacauaacauau

SEQ ID NO: 4059551 - RNA, 12 nt, Vaccinia virus
aaauaaaguuau

SEQ ID NO: 4059552 - RNA, 13 nt, Vaccinia virus
aaauaagagacuu

SEQ ID NO: 4059553 - RNA, 18 nt, Vaccinia virus
aaauaauccugaauauau

SEQ ID NO: 4059554 - RNA, 17 nt, Vaccinia virus
aaauaaucggagaaugu

SEQ ID NO: 4059555 - RNA, 15 nt, Vaccinia virus
aaauaauuagaacua

SEQ ID NO: 4059556 - RNA, 13 nt, Vaccinia virus
aaauacauaaaga

SEQ ID NO: 4059557 - RNA, 21 nt, Vaccinia virus
aaauacauaugacaaacauug

SEQ ID NO: 4059558 - RNA, 15 nt, Vaccinia virus
aaauacgaacuuuau

SEQ ID NO: 4059559 - RNA, 18 nt, Vaccinia virus
aaauacugacacaaacaa

SEQ ID NO: 4059560 - RNA, 13 nt, Vaccinia virus
aaauagauguuag

SEQ ID NO: 4059561 - RNA, 21 nt, Vaccinia virus
aaauagcgauugguguuguaa

SEQ ID NO: 4059562 - RNA, 20 nt, Vaccinia virus
aaauagcguucgucaacaua

SEQ ID NO: 4059563 - RNA, 19 nt, Vaccinia virus
aaauauaaaaccaacuaau

SEQ ID NO: 4059564 - RNA, 18 nt, Vaccinia virus
aaauauaauuuauaauau

SEQ ID NO: 4059565 - RNA, 20 nt, Vaccinia virus
aaauauagguuacuagauua

SEQ ID NO: 4059566 - RNA, 14 nt, Vaccinia virus
aaauauauacuuca

SEQ ID NO: 4059567 - RNA, 17 nt, Vaccinia virus
aaauauauuuucauuua

SEQ ID NO: 4059568 - RNA, 12 nt, Vaccinia virus
aaauaucucauc

SEQ ID NO: 4059569 - RNA, 17 nt, Vaccinia virus
aaauauggaagcgaaug

SEQ ID NO: 4059570 - RNA, 15 nt, Vaccinia virus
aaauauguacauuau

SEQ ID NO: 4059571 - RNA, 19 nt, Vaccinia virus
aaauauuaucgauauugaa

SEQ ID NO: 4059572 - RNA, 17 nt, Vaccinia virus
aaauauucauaacuaau

SEQ ID NO: 4059573 - RNA, 15 nt, Vaccinia virus
aaauauucuacauau

SEQ ID NO: 4059574 - RNA, 16 nt, Vaccinia virus
aaauauuuaacucaug

SEQ ID NO: 4059575 - RNA, 14 nt, Vaccinia virus
aaauauuuacuaau

SEQ ID NO: 4059576 - RNA, 12 nt, Vaccinia virus
aaauauuucauu

SEQ ID NO: 4059577 - RNA, 22 nt, Vaccinia virus
aaauauuucuacuacuucauua

SEQ ID NO: 4059578 - RNA, 13 nt, Vaccinia virus
aaauauuugugua

SEQ ID NO: 4059579 - RNA, 23 nt, Vaccinia virus
aaaucaaacggauugguaacauu

SEQ ID NO: 4059580 - RNA, 17 nt, Vaccinia virus
aaaucaaccaccgauga

SEQ ID NO: 4059581 - RNA, 13 nt, Vaccinia virus
aaaucaacucaua

SEQ ID NO: 4059582 - RNA, 21 nt, Vaccinia virus
aaaucaaucaaggaacuaaau

SEQ ID NO: 4059583 - RNA, 19 nt, Vaccinia virus
aaaucagaauguuacagca

SEQ ID NO: 4059584 - RNA, 17 nt, Vaccinia virus
aaaucaggaaaaaagau

SEQ ID NO: 4059585 - RNA, 16 nt, Vaccinia virus
aaaucaguaacuaugu

SEQ ID NO: 4059586 - RNA, 20 nt, Vaccinia virus
aaaucauuacuaauacucaa

SEQ ID NO: 4059587 - RNA, 17 nt, Vaccinia virus
aaauccaaguuucuauu

SEQ ID NO: 4059588 - RNA, 15 nt, Vaccinia virus
aaauccaauagugaa

SEQ ID NO: 4059589 - RNA, 20 nt, Vaccinia virus
aaauccaugcaaaaaaaugu

SEQ ID NO: 4059590 - RNA, 20 nt, Vaccinia virus
aaaucuaguaucguaucauu

SEQ ID NO: 4059591 - RNA, 19 nt, Vaccinia virus
aaaucuaguucugcauugu

SEQ ID NO: 4059592 - RNA, 16 nt, Vaccinia virus
aaaucuaguuguggaa

SEQ ID NO: 4059593 - RNA, 17 nt, Vaccinia virus
aaaucuauauuguuuaa

SEQ ID NO: 4059594 - RNA, 22 nt, Vaccinia virus
aaaucuaucuuauauacacaua

SEQ ID NO: 4059595 - RNA, 19 nt, Vaccinia virus
aaaugaucggaucuaaaau

SEQ ID NO: 4059596 - RNA, 16 nt, Vaccinia virus
aaaugcgauacagaca

SEQ ID NO: 4059597 - RNA, 17 nt, Vaccinia virus
aaauggauuuauuggau

SEQ ID NO: 4059598 - RNA, 16 nt, Vaccinia virus
aaaugguuagauauua

SEQ ID NO: 4059599 - RNA, 15 nt, Vaccinia virus
aaauguaaauccaau

SEQ ID NO: 4059600 - RNA, 18 nt, Vaccinia virus
aaaugucaugauuaguau

SEQ ID NO: 4059601 - RNA, 22 nt, Vaccinia virus
aaaugucguggacacaacuauu

SEQ ID NO: 4059602 - RNA, 21 nt, Vaccinia virus
aaaugugucguaguuagcaag

SEQ ID NO: 4059603 - RNA, 23 nt, Vaccinia virus
aaauguuaauuuugaaacuaugu

SEQ ID NO: 4059604 - RNA, 21 nt, Vaccinia virus
aaauguuacugaagaauauau

SEQ ID NO: 4059605 - RNA, 18 nt, Vaccinia virus
aaauguucuuaacuacau

SEQ ID NO: 4059606 - RNA, 15 nt, Vaccinia virus
aaauguugucauuau

SEQ ID NO: 4059607 - RNA, 19 nt, Vaccinia virus
aaauuaaaggagcauguau

SEQ ID NO: 4059608 - RNA, 23 nt, Vaccinia virus
aaauuaacagauaaaaagacuuu

SEQ ID NO: 4059609 - RNA, 14 nt, Vaccinia virus
aaauuaauauuucu

SEQ ID NO: 4059610 - RNA, 14 nt, Vaccinia virus
aaauuaauuauugu

SEQ ID NO: 4059611 - RNA, 13 nt, Vaccinia virus
aaauuacuuaaag

SEQ ID NO: 4059612 - RNA, 15 nt, Vaccinia virus
aaauuagaaagauua

SEQ ID NO: 4059613 - RNA, 17 nt, Vaccinia virus
aaauuauaaaauuauau

SEQ ID NO: 4059614 - RNA, 21 nt, Vaccinia virus
aaauuauuuaauuuaauacau

SEQ ID NO: 4059615 - RNA, 18 nt, Vaccinia virus
aaauuauuuuuacuaaua

SEQ ID NO: 4059616 - RNA, 15 nt, Vaccinia virus
aauaagaauaaaaug

SEQ ID NO: 4059617 - RNA, 18 nt, Vaccinia virus
aauaagagacuuaaacaa

SEQ ID NO: 4059618 - RNA, 23 nt, Vaccinia virus
aauaagagcagcacaaacucauu

SEQ ID NO: 4059619 - RNA, 21 nt, Vaccinia virus
aauaauaucccacauuaucau

SEQ ID NO: 4059620 - RNA, 20 nt, Vaccinia virus
aauaaucauaaauuauuuca

SEQ ID NO: 4059621 - RNA, 14 nt, Vaccinia virus
aauaauguuauuau

SEQ ID NO: 4059622 - RNA, 14 nt, Vaccinia virus
aauaauuaaugccc

SEQ ID NO: 4059623 - RNA, 24 nt, Vaccinia virus
aauaauuacuuuacaaacgaugua

SEQ ID NO: 4059624 - RNA, 22 nt, Vaccinia virus
aauaauuauaucacaacaucua

SEQ ID NO: 4059625 - RNA, 15 nt, Vaccinia virus
aauaauuaugaugau

SEQ ID NO: 4059626 - RNA, 15 nt, Vaccinia virus
aauaauuauguagua

SEQ ID NO: 4059627 - RNA, 14 nt, Vaccinia virus
aauaauuauuagaa

SEQ ID NO: 4059628 - RNA, 15 nt, Vaccinia virus
aauaauucagauaau

SEQ ID NO: 4059629 - RNA, 23 nt, Vaccinia virus
aauaauucauggaaauuuaacag

SEQ ID NO: 4059630 - RNA, 23 nt, Vaccinia virus
aauacacuuagguuuuuggaaaa

SEQ ID NO: 4059631 - RNA, 11 nt, Vaccinia virus
aauacagaaug

SEQ ID NO: 4059632 - RNA, 23 nt, Vaccinia virus
aauacauauuauucaaaauauga

SEQ ID NO: 4059633 - RNA, 21 nt, Vaccinia virus
aauacauuucucaaaugaaua

SEQ ID NO: 4059634 - RNA, 21 nt, Vaccinia virus
aauaccauaaauauauuucua

SEQ ID NO: 4059635 - RNA, 16 nt, Vaccinia virus
aauaccucauaaaacg

SEQ ID NO: 4059636 - RNA, 16 nt, Vaccinia virus
aauaccucuacacuau

SEQ ID NO: 4059637 - RNA, 21 nt, Vaccinia virus
aauacgaaaacgauauuauua

SEQ ID NO: 4059638 - RNA, 16 nt, Vaccinia virus
aauacgaauuaugcaa

SEQ ID NO: 4059639 - RNA, 14 nt, Vaccinia virus
aauacguuagagaa

SEQ ID NO: 4059640 - RNA, 20 nt, Vaccinia virus
aauacuaaaaaauguagaaa

SEQ ID NO: 4059641 - RNA, 21 nt, Vaccinia virus
aauacuaaaaaauguagaaau

SEQ ID NO: 4059642 - RNA, 22 nt, Vaccinia virus
aauacuaauaggucuaaaaacc

SEQ ID NO: 4059643 - RNA, 21 nt, Vaccinia virus
aauacuaaugcaucuauuuca

SEQ ID NO: 4059644 - RNA, 19 nt, Vaccinia virus
aauacuauuacagaaguuu

SEQ ID NO: 4059645 - RNA, 18 nt, Vaccinia virus
aauacucaauacuuucca

SEQ ID NO: 4059646 - RNA, 20 nt, Vaccinia virus
aauacucaauccuucagaau

SEQ ID NO: 4059647 - RNA, 23 nt, Vaccinia virus
aauacuccucauuacguuucauu

SEQ ID NO: 4059648 - RNA, 18 nt, Vaccinia virus
aauacucuucaaaguuuc

SEQ ID NO: 4059649 - RNA, 16 nt, Vaccinia virus
aauacugaugcauuuu

SEQ ID NO: 4059650 - RNA, 13 nt, Vaccinia virus
aauacuuaaaaug

SEQ ID NO: 4059651 - RNA, 16 nt, Vaccinia virus
aauacuuaacagagga

SEQ ID NO: 4059652 - RNA, 19 nt, Vaccinia virus
aauacuuauuaauggcucu

SEQ ID NO: 4059653 - RNA, 14 nt, Vaccinia virus
aauacuuuaguaau

SEQ ID NO: 4059654 - RNA, 11 nt, Vaccinia virus
aauagaaucua

SEQ ID NO: 4059655 - RNA, 22 nt, Vaccinia virus
aauagacaaacuguaaguaugu

SEQ ID NO: 4059656 - RNA, 23 nt, Vaccinia virus
aauagacauaagaaauuugccaa

SEQ ID NO: 4059657 - RNA, 21 nt, Vaccinia virus
aauagaggagccauuaaaugu

SEQ ID NO: 4059658 - RNA, 17 nt, Vaccinia virus
aauagauaucaugaaga

SEQ ID NO: 4059659 - RNA, 18 nt, Vaccinia virus
aauagaucaacagaaaua

SEQ ID NO: 4059660 - RNA, 18 nt, Vaccinia virus
aauagaugauagaauauc

SEQ ID NO: 4059661 - RNA, 23 nt, Vaccinia virus
aauagcgcuuaaucucaaaauau

SEQ ID NO: 4059662 - RNA, 13 nt, Vaccinia virus
aauagcucaauau

SEQ ID NO: 4059663 - RNA, 16 nt, Vaccinia virus
aauaggaauggauaau

SEQ ID NO: 4059664 - RNA, 16 nt, Vaccinia virus
aauaggugaugaugca

SEQ ID NO: 4059665 - RNA, 17 nt, Vaccinia virus
aauaggugaugaugcaa

SEQ ID NO: 4059666 - RNA, 14 nt, Vaccinia virus
aauaguaaugauuc

SEQ ID NO: 4059667 - RNA, 22 nt, Vaccinia virus
aauaguauacgcagaaaagaua

SEQ ID NO: 4059668 - RNA, 22 nt, Vaccinia virus
aauaguucaacaucuacuuuug

SEQ ID NO: 4059669 - RNA, 12 nt, Vaccinia virus
aauaguuucaua

SEQ ID NO: 4059670 - RNA, 14 nt, Vaccinia virus
aauaguuucauaau

SEQ ID NO: 4059671 - RNA, 23 nt, Vaccinia virus
aauaguuuguuuuggaaauagau

SEQ ID NO: 4059672 - RNA, 21 nt, Vaccinia virus
aauaguuuugauauuaguaaa

SEQ ID NO: 4059673 - RNA, 20 nt, Vaccinia virus
aauaguuuuuuuguuuccuu

SEQ ID NO: 4059674 - RNA, 14 nt, Vaccinia virus
aauauaaaaauaua

SEQ ID NO: 4059675 - RNA, 18 nt, Vaccinia virus
aauauaaaagaauaugua

SEQ ID NO: 4059676 - RNA, 13 nt, Vaccinia virus
aauauaaauggua

SEQ ID NO: 4059677 - RNA, 15 nt, Vaccinia virus
aauauaauaaauaua

SEQ ID NO: 4059678 - RNA, 17 nt, Vaccinia virus
aauauacaauagaugca

SEQ ID NO: 4059679 - RNA, 17 nt, Vaccinia virus
aauauacgauuaguaau

SEQ ID NO: 4059680 - RNA, 17 nt, Vaccinia virus
aauauacugauuagaaa

SEQ ID NO: 4059681 - RNA, 19 nt, Vaccinia virus
aauauaucuauaauuugau

SEQ ID NO: 4059682 - RNA, 20 nt, Vaccinia virus
aauauaugcaaaauaauauc

SEQ ID NO: 4059683 - RNA, 15 nt, Vaccinia virus
aauauauuaagaaau

SEQ ID NO: 4059684 - RNA, 19 nt, Vaccinia virus
aauauauuauuaguuuaua

SEQ ID NO: 4059685 - RNA, 15 nt, Vaccinia virus
aauaucaacaagucc

SEQ ID NO: 4059686 - RNA, 18 nt, Vaccinia virus
aauaucaucuaaacagua

SEQ ID NO: 4059687 - RNA, 23 nt, Vaccinia virus
aauauccaaguauuuuaauucua

SEQ ID NO: 4059688 - RNA, 18 nt, Vaccinia virus
aauauccacucugucaua

SEQ ID NO: 4059689 - RNA, 17 nt, Vaccinia virus
aauauccucagucaucu

SEQ ID NO: 4059690 - RNA, 22 nt, Vaccinia virus
aauaucuauuaaacgaauaaaa

SEQ ID NO: 4059691 - RNA, 20 nt, Vaccinia virus
aauaucuuuaauacagaugg

SEQ ID NO: 4059692 - RNA, 17 nt, Vaccinia virus
aauaucuuuaauccaau

SEQ ID NO: 4059693 - RNA, 23 nt, Vaccinia virus
aauaugaguuggaguugauucau

SEQ ID NO: 4059694 - RNA, 21 nt, Vaccinia virus
aauaugcggaaccucgagaau

SEQ ID NO: 4059695 - RNA, 21 nt, Vaccinia virus
aauauggacacgcggcuguaa

SEQ ID NO: 4059696 - RNA, 15 nt, Vaccinia virus
aauauggauccucau

SEQ ID NO: 4059697 - RNA, 20 nt, Vaccinia virus
aauaugugcuaaaaucacug

SEQ ID NO: 4059698 - RNA, 15 nt, Vaccinia virus
aauaugugcucugcg

SEQ ID NO: 4059699 - RNA, 19 nt, Vaccinia virus
aauauuaauauuagaguua

SEQ ID NO: 4059700 - RNA, 22 nt, Vaccinia virus
aauauuacuaauugauagaccu

SEQ ID NO: 4059701 - RNA, 17 nt, Vaccinia virus
aauauuagguaaagaua

SEQ ID NO: 4059702 - RNA, 20 nt, Vaccinia virus
aauauucuaugacugaaugu

SEQ ID NO: 4059703 - RNA, 18 nt, Vaccinia virus
aauauugccauaauuuuc

SEQ ID NO: 4059704 - RNA, 15 nt, Vaccinia virus
aauauuguauuguuu

SEQ ID NO: 4059705 - RNA, 17 nt, Vaccinia virus
aauauuguuaucguaau

SEQ ID NO: 4059706 - RNA, 12 nt, Vaccinia virus
aauauuuaacuc

SEQ ID NO: 4059707 - RNA, 14 nt, Vaccinia virus
aauauuuucuauga

SEQ ID NO: 4059708 - RNA, 22 nt, Vaccinia virus
aauauuuuucuauguuaggaau

SEQ ID NO: 4059709 - RNA, 16 nt, Vaccinia virus
aauauuuuuuauaaaa

SEQ ID NO: 4059710 - RNA, 14 nt, Vaccinia virus
aaucaaacaaaaaa

SEQ ID NO: 4059711 - RNA, 14 nt, Vaccinia virus
aaucaaagaauugg

SEQ ID NO: 4059712 - RNA, 18 nt, Vaccinia virus
aaucaacucuaaucacuu

SEQ ID NO: 4059713 - RNA, 22 nt, Vaccinia virus
aaucaagauucauuuuuaaaau

SEQ ID NO: 4059714 - RNA, 12 nt, Vaccinia virus
aaucaauagcuu

SEQ ID NO: 4059715 - RNA, 16 nt, Vaccinia virus
aaucacuauagaaaau

SEQ ID NO: 4059716 - RNA, 17 nt, Vaccinia virus
aaucacuuuaacuuuua

SEQ ID NO: 4059717 - RNA, 13 nt, Vaccinia virus
aaucagaaaacuu

SEQ ID NO: 4059718 - RNA, 13 nt, Vaccinia virus
aaucagaaauugg

SEQ ID NO: 4059719 - RNA, 16 nt, Vaccinia virus
aaucauauuuagaaaa

SEQ ID NO: 4059720 - RNA, 22 nt, Vaccinia virus
aaucauuaaaaaaauuaacuga

SEQ ID NO: 4059721 - RNA, 17 nt, Vaccinia virus
aaucauuccucauaaga

SEQ ID NO: 4059722 - RNA, 13 nt, Vaccinia virus
aaucauugauaca

SEQ ID NO: 4059723 - RNA, 14 nt, Vaccinia virus
aaucauugauacau

SEQ ID NO: 4059724 - RNA, 17 nt, Vaccinia virus
aaucauuuuugcaucau

SEQ ID NO: 4059725 - RNA, 21 nt, Vaccinia virus
aauccaaaguucauucucaga

SEQ ID NO: 4059726 - RNA, 19 nt, Vaccinia virus
aauccaaauaaaauggaua

SEQ ID NO: 4059727 - RNA, 15 nt, Vaccinia virus
aauccaauugauuga

SEQ ID NO: 4059728 - RNA, 20 nt, Vaccinia virus
aauccaauugauugacuauc

SEQ ID NO: 4059729 - RNA, 15 nt, Vaccinia virus
aauccacauaugaua

SEQ ID NO: 4059730 - RNA, 21 nt, Vaccinia virus
aauccauaaauaaaguauaug

SEQ ID NO: 4059731 - RNA, 14 nt, Vaccinia virus
aauccauaccgucc

SEQ ID NO: 4059732 - RNA, 21 nt, Vaccinia virus
aauccaucucuauguuucagu

SEQ ID NO: 4059733 - RNA, 21 nt, Vaccinia virus
aauccauugauaauuucuugu

SEQ ID NO: 4059734 - RNA, 19 nt, Vaccinia virus
aauccuauacucugaaaga

SEQ ID NO: 4059735 - RNA, 13 nt, Vaccinia virus
aauccugaauaua

SEQ ID NO: 4059736 - RNA, 17 nt, Vaccinia virus
aauccuuuuuuauaaaa

SEQ ID NO: 4059737 - RNA, 17 nt, Vaccinia virus
aaucgcgcguuagaaau

SEQ ID NO: 4059738 - RNA, 14 nt, Vaccinia virus
aaucgcuuaauaga

SEQ ID NO: 4059739 - RNA, 19 nt, Vaccinia virus
auguauacauuuuccauuu

SEQ ID NO: 4059740 - RNA, 17 nt, Vaccinia virus
auguauaccauugacuc

SEQ ID NO: 4059741 - RNA, 13 nt, Vaccinia virus
auguauacuguau

SEQ ID NO: 4059742 - RNA, 17 nt, Vaccinia virus
auguauccacaucaaag

SEQ ID NO: 4059743 - RNA, 18 nt, Vaccinia virus
auguaugauucaauguau

SEQ ID NO: 4059744 - RNA, 20 nt, Vaccinia virus
auguaugcaauucacuguau

SEQ ID NO: 4059745 - RNA, 21 nt, Vaccinia virus
auguauuaacuuuguucauuu

SEQ ID NO: 4059746 - RNA, 22 nt, Vaccinia virus
auguauuauuauagauuuucca

SEQ ID NO: 4059747 - RNA, 19 nt, Vaccinia virus
auguauucagucagacaau

SEQ ID NO: 4059748 - RNA, 13 nt, Vaccinia virus
augucacuauuaa

SEQ ID NO: 4059749 - RNA, 11 nt, Vaccinia virus
augucauauag

SEQ ID NO: 4059750 - RNA, 13 nt, Vaccinia virus
augucauuuguau

SEQ ID NO: 4059751 - RNA, 13 nt, Vaccinia virus
auguccgaagaga

SEQ ID NO: 4059752 - RNA, 13 nt, Vaccinia virus
auguccuggugau

SEQ ID NO: 4059753 - RNA, 21 nt, Vaccinia virus
augucgagaaacagaacuauu

SEQ ID NO: 4059754 - RNA, 21 nt, Vaccinia virus
augucggucggcauucuauuu

SEQ ID NO: 4059755 - RNA, 13 nt, Vaccinia virus
augucuacauuau

SEQ ID NO: 4059756 - RNA, 16 nt, Vaccinia virus
augucuguagaaaaaa

SEQ ID NO: 4059757 - RNA, 12 nt, Vaccinia virus
augucuguuuga

SEQ ID NO: 4059758 - RNA, 20 nt, Vaccinia virus
augugaacagauaaaaggua

SEQ ID NO: 4059759 - RNA, 14 nt, Vaccinia virus
augugacuguuuuc

SEQ ID NO: 4059760 - RNA, 15 nt, Vaccinia virus
augugauaauuauuu

SEQ ID NO: 4059761 - RNA, 17 nt, Vaccinia virus
augugauucucugaaaa

SEQ ID NO: 4059762 - RNA, 18 nt, Vaccinia virus
augugcuaaaaaguuuuc

SEQ ID NO: 4059763 - RNA, 13 nt, Vaccinia virus
auguggaauuaug

SEQ ID NO: 4059764 - RNA, 21 nt, Vaccinia virus
auguggucuguuguauaugau

SEQ ID NO: 4059765 - RNA, 21 nt, Vaccinia virus
auguguuucccaaacaaaaug

SEQ ID NO: 4059766 - RNA, 20 nt, Vaccinia virus
auguuaaaacuacaaaaaug

SEQ ID NO: 4059767 - RNA, 22 nt, Vaccinia virus
auguuaaauguagacaaauaua

SEQ ID NO: 4059768 - RNA, 22 nt, Vaccinia virus
auguuaauaacaucagaaaaug

SEQ ID NO: 4059769 - RNA, 14 nt, Vaccinia virus
auguuacaaaugua

SEQ ID NO: 4059770 - RNA, 15 nt, Vaccinia virus
auguuagaacuguag

SEQ ID NO: 4059771 - RNA, 15 nt, Vaccinia virus
auguuauaaaaucua

SEQ ID NO: 4059772 - RNA, 14 nt, Vaccinia virus
auguuaucaaaccu

SEQ ID NO: 4059773 - RNA, 14 nt, Vaccinia virus
auguuauugucaca

SEQ ID NO: 4059774 - RNA, 19 nt, Vaccinia virus
auguuauugucacacuaau

SEQ ID NO: 4059775 - RNA, 16 nt, Vaccinia virus
auguuccaacucuguc

SEQ ID NO: 4059776 - RNA, 19 nt, Vaccinia virus
auguucgguauaaaaauua

SEQ ID NO: 4059777 - RNA, 18 nt, Vaccinia virus
auguugaacauaaaacua

SEQ ID NO: 4059778 - RNA, 16 nt, Vaccinia virus
auguugcaugaaauaa

SEQ ID NO: 4059779 - RNA, 16 nt, Vaccinia virus
auguuguuaaaauaua

SEQ ID NO: 4059780 - RNA, 23 nt, Vaccinia virus
auguuuauuuuuuucauauuaaa

SEQ ID NO: 4059781 - RNA, 17 nt, Vaccinia virus
auguuugggagaauuaa

SEQ ID NO: 4059782 - RNA, 15 nt, Vaccinia virus
auguuuguucagagg

SEQ ID NO: 4059783 - RNA, 14 nt, Vaccinia virus
auguuuuacucugg

SEQ ID NO: 4059784 - RNA, 13 nt, Vaccinia virus
auguuuucacaau

SEQ ID NO: 4059785 - RNA, 19 nt, Vaccinia virus
auuaaaaaacauauauaau

SEQ ID NO: 4059786 - RNA, 17 nt, Vaccinia virus
auuaaaaaauaacuuaa

SEQ ID NO: 4059787 - RNA, 16 nt, Vaccinia virus
auuaaaaauaaaauac

SEQ ID NO: 4059788 - RNA, 15 nt, Vaccinia virus
auuaaaaauaaaguu

SEQ ID NO: 4059789 - RNA, 13 nt, Vaccinia virus
auuaaacauaaau

SEQ ID NO: 4059790 - RNA, 16 nt, Vaccinia virus
auuaaacauuguucau

SEQ ID NO: 4059791 - RNA, 19 nt, Vaccinia virus
auuaaaccauguugugaaa

SEQ ID NO: 4059792 - RNA, 23 nt, Vaccinia virus
auuaaacguaguuaugauaaaug

SEQ ID NO: 4059793 - RNA, 18 nt, Vaccinia virus
auuaaacguauaaaaacg

SEQ ID NO: 4059794 - RNA, 12 nt, Vaccinia virus
auuaaacuaauu

SEQ ID NO: 4059795 - RNA, 20 nt, Vaccinia virus
auuaaacuaauucauuuuca

SEQ ID NO: 4059796 - RNA, 20 nt, Vaccinia virus
auuaaaucauuaaaugauug

SEQ ID NO: 4059797 - RNA, 17 nt, Vaccinia virus
auuaaauguuugaucaa

SEQ ID NO: 4059798 - RNA, 18 nt, Vaccinia virus
auuaacagauaaaaagac

SEQ ID NO: 4059799 - RNA, 22 nt, Vaccinia virus
auuaacuuccacauuaauacag

SEQ ID NO: 4059800 - RNA, 22 nt, Vaccinia virus
auuaagcaacaugucucuaaau

SEQ ID NO: 4059801 - RNA, 17 nt, Vaccinia virus
auuaagcauuuuggaaa

SEQ ID NO: 4059802 - RNA, 21 nt, Vaccinia virus
auuaauaaaaauacaauccuu

SEQ ID NO: 4059803 - RNA, 17 nt, Vaccinia virus
auuaauaauuaauaauu

SEQ ID NO: 4059804 - RNA, 15 nt, Vaccinia virus
auuaauacagacgau

SEQ ID NO: 4059805 - RNA, 19 nt, Vaccinia virus
auuaauaguuuuauuugaa

SEQ ID NO: 4059806 - RNA, 17 nt, Vaccinia virus
auuaauaucuauuaaac

SEQ ID NO: 4059807 - RNA, 23 nt, Vaccinia virus
auuaauauuacuguuaauaacug

SEQ ID NO: 4059808 - RNA, 12 nt, Vaccinia virus
auuaaucaaaug

SEQ ID NO: 4059809 - RNA, 15 nt, Vaccinia virus
auuaaucaagucaau

SEQ ID NO: 4059810 - RNA, 13 nt, Vaccinia virus
auuaaucauauac

SEQ ID NO: 4059811 - RNA, 18 nt, Vaccinia virus
auuaaugggcuuaguaaa

SEQ ID NO: 4059812 - RNA, 17 nt, Vaccinia virus
auuaauguaacuauaga

SEQ ID NO: 4059813 - RNA, 14 nt, Vaccinia virus
auuaauuguaaaug

SEQ ID NO: 4059814 - RNA, 18 nt, Vaccinia virus
auuaauuuccacaucgau

SEQ ID NO: 4059815 - RNA, 14 nt, Vaccinia virus
auuacaaaagaaac

SEQ ID NO: 4059816 - RNA, 12 nt, Vaccinia virus
auuacaaacaug

SEQ ID NO: 4059817 - RNA, 14 nt, Vaccinia virus
auuacaaaccuguc

SEQ ID NO: 4059818 - RNA, 19 nt, Vaccinia virus
auuacaaacuauagaaauu

SEQ ID NO: 4059819 - RNA, 15 nt, Vaccinia virus
auuacaaagaagaac

SEQ ID NO: 4059820 - RNA, 17 nt, Vaccinia virus
auuacaaauaaagcgga

SEQ ID NO: 4059821 - RNA, 23 nt, Vaccinia virus
auuacaaaucuagagguagaacu

SEQ ID NO: 4059822 - RNA, 18 nt, Vaccinia virus
auuacaaguauuauugau

SEQ ID NO: 4059823 - RNA, 22 nt, Vaccinia virus
auuacaaguuaagucacacuaa

SEQ ID NO: 4059824 - RNA, 14 nt, Vaccinia virus
auuacacaaauauu

SEQ ID NO: 4059825 - RNA, 16 nt, Vaccinia virus
auuacacauaaacauc

SEQ ID NO: 4059826 - RNA, 15 nt, Vaccinia virus
auuacacauuuccaa

SEQ ID NO: 4059827 - RNA, 19 nt, Vaccinia virus
auuacacgcuauuaaucau

SEQ ID NO: 4059828 - RNA, 19 nt, Vaccinia virus
auuacauccggcaaaaaua

SEQ ID NO: 4059829 - RNA, 21 nt, Vaccinia virus
auuacauuuuuuauaaauaga

SEQ ID NO: 4059830 - RNA, 20 nt, Vaccinia virus
auuaccagaagguguuguaa

SEQ ID NO: 4059831 - RNA, 22 nt, Vaccinia virus
auuaccaggguucuuguuauau

SEQ ID NO: 4059832 - RNA, 17 nt, Vaccinia virus
auuaccauagaagaugu

SEQ ID NO: 4059833 - RNA, 14 nt, Vaccinia virus
auuacccauggaga

SEQ ID NO: 4059834 - RNA, 23 nt, Vaccinia virus
auuacgaaucauuaaaaaaauua

SEQ ID NO: 4059835 - RNA, 15 nt, Vaccinia virus
auuacgcucuacaaa

SEQ ID NO: 4059836 - RNA, 21 nt, Vaccinia virus
auuacggcgaaauaaagaaaa

SEQ ID NO: 4059837 - RNA, 14 nt, Vaccinia virus
auuacuaaacauuu

SEQ ID NO: 4059838 - RNA, 17 nt, Vaccinia virus
auuacuaggagaauuau

SEQ ID NO: 4059839 - RNA, 13 nt, Vaccinia virus
auuacuauaaaug

SEQ ID NO: 4059840 - RNA, 21 nt, Vaccinia virus
auuacuauaaauggagaaugu

SEQ ID NO: 4059841 - RNA, 13 nt, Vaccinia virus
auuacuaugaauc

SEQ ID NO: 4059842 - RNA, 22 nt, Vaccinia virus
auuacuccagccguagaauauc

SEQ ID NO: 4059843 - RNA, 19 nt, Vaccinia virus
auuacuuuuucaaagaaaa

SEQ ID NO: 4059844 - RNA, 13 nt, Vaccinia virus
auuagaaauggau

SEQ ID NO: 4059845 - RNA, 12 nt, Vaccinia virus
auuagaauguau

SEQ ID NO: 4059846 - RNA, 14 nt, Vaccinia virus
auuagacauaugau

SEQ ID NO: 4059847 - RNA, 19 nt, Vaccinia virus
auuagacguagcuuaucau

SEQ ID NO: 4059848 - RNA, 13 nt, Vaccinia virus
auuagauaaaguu

SEQ ID NO: 4059849 - RNA, 15 nt, Vaccinia virus
auuagcauccuuaua

SEQ ID NO: 4059850 - RNA, 21 nt, Vaccinia virus
auuagcgagguauuuauucau

SEQ ID NO: 4059851 - RNA, 22 nt, Vaccinia virus
auuaggaucuacguucauaugu

SEQ ID NO: 4059852 - RNA, 22 nt, Vaccinia virus
auuaggcacagucaaacauuca

SEQ ID NO: 4059853 - RNA, 15 nt, Vaccinia virus
auuaguaaaaaauuu

SEQ ID NO: 4059854 - RNA, 21 nt, Vaccinia virus
auuaguauucuucuugucauc

SEQ ID NO: 4059855 - RNA, 18 nt, Vaccinia virus
auuagucacgacugaaau

SEQ ID NO: 4059856 - RNA, 15 nt, Vaccinia virus
auuagugacggaaaa

SEQ ID NO: 4059857 - RNA, 17 nt, Vaccinia virus
auuaguggaagaaagau

SEQ ID NO: 4059858 - RNA, 22 nt, Vaccinia virus
auuaguguauacaccaacagua

SEQ ID NO: 4059859 - RNA, 17 nt, Vaccinia virus
auuaguugaugugacug

SEQ ID NO: 4059860 - RNA, 21 nt, Vaccinia virus
auuaguuuccuuuuuauaaaa

SEQ ID NO: 4059861 - RNA, 17 nt, Vaccinia virus
auuauaaauauugaugu

SEQ ID NO: 4059862 - RNA, 14 nt, Vaccinia virus
auuauacaucgagu

SEQ ID NO: 4059863 - RNA, 15 nt, Vaccinia virus
auuguuaaauuauua

SEQ ID NO: 4059864 - RNA, 19 nt, Vaccinia virus
auuguuauugaucaaacau

SEQ ID NO: 4059865 - RNA, 19 nt, Vaccinia virus
auuguugucugaaauacga

SEQ ID NO: 4059866 - RNA, 14 nt, Vaccinia virus
auuguuuagaauac

SEQ ID NO: 4059867 - RNA, 17 nt, Vaccinia virus
auuguuuuuguacauaa

SEQ ID NO: 4059868 - RNA, 16 nt, Vaccinia virus
auuguuuuuuauuuuc

SEQ ID NO: 4059869 - RNA, 19 nt, Vaccinia virus
auuuaacaagagaagagau

SEQ ID NO: 4059870 - RNA, 24 nt, Vaccinia virus
auuuaacgaaucauccauaaauua

SEQ ID NO: 4059871 - RNA, 16 nt, Vaccinia virus
auuuaacguuaaagau

SEQ ID NO: 4059872 - RNA, 18 nt, Vaccinia virus
auuuaagcagagaauguu

SEQ ID NO: 4059873 - RNA, 21 nt, Vaccinia virus
auuuaagugauauaaaacuau

SEQ ID NO: 4059874 - RNA, 16 nt, Vaccinia virus
auuuaauuacauccuu

SEQ ID NO: 4059875 - RNA, 22 nt, Vaccinia virus
auuuaauuuggucauuauuaau

SEQ ID NO: 4059876 - RNA, 16 nt, Vaccinia virus
auuuaauuuuagauaa

SEQ ID NO: 4059877 - RNA, 17 nt, Vaccinia virus
auuuacaccaaaaacuc

SEQ ID NO: 4059878 - RNA, 19 nt, Vaccinia virus
auuuaccguuacuaauaag

SEQ ID NO: 4059879 - RNA, 22 nt, Vaccinia virus
auuuacggaacuucuaaaacug

SEQ ID NO: 4059880 - RNA, 14 nt, Vaccinia virus
auuuagaaaugaag

SEQ ID NO: 4059881 - RNA, 22 nt, Vaccinia virus
auuuagauuaaauccagaaguu

SEQ ID NO: 4059882 - RNA, 17 nt, Vaccinia virus
auuuaggacuuugcaau

SEQ ID NO: 4059883 - RNA, 15 nt, Vaccinia virus
auuuaguauuaaaug

SEQ ID NO: 4059884 - RNA, 17 nt, Vaccinia virus
auuuagucuuacacauu

SEQ ID NO: 4059885 - RNA, 19 nt, Vaccinia virus
auuuauaaccuuuuccuua

SEQ ID NO: 4059886 - RNA, 14 nt, Vaccinia virus
auuuauagaugaag

SEQ ID NO: 4059887 - RNA, 16 nt, Vaccinia virus
auuuauauauuaaaaa

SEQ ID NO: 4059888 - RNA, 13 nt, Vaccinia virus
auuuaucauauau

SEQ ID NO: 4059889 - RNA, 18 nt, Vaccinia virus
auuuauccguaaaaaugu

SEQ ID NO: 4059890 - RNA, 19 nt, Vaccinia virus
auuuaucgcuaacaugcau

SEQ ID NO: 4059891 - RNA, 16 nt, Vaccinia virus
auuuauguuuuaaaua

SEQ ID NO: 4059892 - RNA, 13 nt, Vaccinia virus
auuuauuaaauac

SEQ ID NO: 4059893 - RNA, 14 nt, Vaccinia virus
auuuauuaucuugu

SEQ ID NO: 4059894 - RNA, 19 nt, Vaccinia virus
auuuauucaucaucaaaag

SEQ ID NO: 4059895 - RNA, 22 nt, Vaccinia virus
auuuauuuuuguacauuaauaa

SEQ ID NO: 4059896 - RNA, 15 nt, Vaccinia virus
auuucaaaauuauuu

SEQ ID NO: 4059897 - RNA, 15 nt, Vaccinia virus
auuucacgaaaaaug

SEQ ID NO: 4059898 - RNA, 15 nt, Vaccinia virus
auuucacuacuaucu

SEQ ID NO: 4059899 - RNA, 19 nt, Vaccinia virus
auuucaguuuauguuugua

SEQ ID NO: 4059900 - RNA, 11 nt, Vaccinia virus
auuucauguac

SEQ ID NO: 4059901 - RNA, 15 nt, Vaccinia virus
auuucauuaauuaau

SEQ ID NO: 4059902 - RNA, 22 nt, Vaccinia virus
auuuccacauuagaugguaaau

SEQ ID NO: 4059903 - RNA, 23 nt, Vaccinia virus
auuuccauccgauuguuguguac

SEQ ID NO: 4059904 - RNA, 14 nt, Vaccinia virus
auuuccaugucuac

SEQ ID NO: 4059905 - RNA, 17 nt, Vaccinia virus
auuuccauuuuuaauuu

SEQ ID NO: 4059906 - RNA, 15 nt, Vaccinia virus
auuucgauaaugaac

SEQ ID NO: 4059907 - RNA, 22 nt, Vaccinia virus
auuucggaaucgcaaaccacca

SEQ ID NO: 4059908 - RNA, 17 nt, Vaccinia virus
auuucguuaaaacauuc

SEQ ID NO: 4059909 - RNA, 16 nt, Vaccinia virus
auuucuaagagaauga

SEQ ID NO: 4059910 - RNA, 14 nt, Vaccinia virus
auuucuaauguuuc

SEQ ID NO: 4059911 - RNA, 17 nt, Vaccinia virus
auuucuauuucuguaua

SEQ ID NO: 4059912 - RNA, 23 nt, Vaccinia virus
auuucucuaccacaggagaaugg

SEQ ID NO: 4059913 - RNA, 18 nt, Vaccinia virus
auuucucucauaaauaca

SEQ ID NO: 4059914 - RNA, 23 nt, Vaccinia virus
auuucuggauauguuuuuaauaa

SEQ ID NO: 4059915 - RNA, 13 nt, Vaccinia virus
auuucuguaaauu

SEQ ID NO: 4059916 - RNA, 19 nt, Vaccinia virus
auuucuguauaucuauaau

SEQ ID NO: 4059917 - RNA, 22 nt, Vaccinia virus
auuucuuuuuucuggcauaacu

SEQ ID NO: 4059918 - RNA, 21 nt, Vaccinia virus
auuugaacagagccuguaaca

SEQ ID NO: 4059919 - RNA, 17 nt, Vaccinia virus
auuugacgcuuuucucu

SEQ ID NO: 4059920 - RNA, 21 nt, Vaccinia virus
auuugagagaucauuucuaua

SEQ ID NO: 4059921 - RNA, 16 nt, Vaccinia virus
auuugauauaaugaau

SEQ ID NO: 4059922 - RNA, 14 nt, Vaccinia virus
auuugaucaguuua

SEQ ID NO: 4059923 - RNA, 18 nt, Vaccinia virus
auuugccauauauggaua

SEQ ID NO: 4059924 - RNA, 15 nt, Vaccinia virus
auuuggauuuuguug

SEQ ID NO: 4059925 - RNA, 15 nt, Vaccinia virus
auuugguaaaaugaa

SEQ ID NO: 4059926 - RNA, 19 nt, Vaccinia virus
auuugguauauacauagau

SEQ ID NO: 4059927 - RNA, 17 nt, Vaccinia virus
auuuguaggaaaaagau

SEQ ID NO: 4059928 - RNA, 17 nt, Vaccinia virus
auuuguauccuuaucua

SEQ ID NO: 4059929 - RNA, 22 nt, Vaccinia virus
auuugugccgcauacagaucaa

SEQ ID NO: 4059930 - RNA, 13 nt, Vaccinia virus
auuuguucuugua

SEQ ID NO: 4059931 - RNA, 20 nt, Vaccinia virus
auuuuaaaauuaaaaaggaa

SEQ ID NO: 4059932 - RNA, 20 nt, Vaccinia virus
auuuuacaacuuuuaacaag

SEQ ID NO: 4059933 - RNA, 17 nt, Vaccinia virus
auuuuacccucaaucau

SEQ ID NO: 4059934 - RNA, 22 nt, Vaccinia virus
auuuuacccucaaucauguacu

SEQ ID NO: 4059935 - RNA, 20 nt, Vaccinia virus
auuuuacuaaauaauggcug

SEQ ID NO: 4059936 - RNA, 22 nt, Vaccinia virus
auuuuauaacguuaguuaauaa

SEQ ID NO: 4059937 - RNA, 22 nt, Vaccinia virus
auuuuauauuuuguaauaagaa

SEQ ID NO: 4059938 - RNA, 15 nt, Vaccinia virus
auuuuaucaaacaug

SEQ ID NO: 4059939 - RNA, 18 nt, Vaccinia virus
auuuuaugguauuaauaa

SEQ ID NO: 4059940 - RNA, 23 nt, Vaccinia virus
auuuucagcguggauuucucaua

SEQ ID NO: 4059941 - RNA, 15 nt, Vaccinia virus
auuuucucuugaaaa

SEQ ID NO: 4059942 - RNA, 22 nt, Vaccinia virus
auuuucuugugaccaacucauc

SEQ ID NO: 4059943 - RNA, 12 nt, Vaccinia virus
auuuugaggaaa

SEQ ID NO: 4059944 - RNA, 21 nt, Vaccinia virus
auuuugauauuacuuauaaua

SEQ ID NO: 4059945 - RNA, 21 nt, Vaccinia virus
auuuugcucuauaaacugaau

SEQ ID NO: 4059946 - RNA, 20 nt, Vaccinia virus
auuuuggagagccuuaacga

SEQ ID NO: 4059947 - RNA, 17 nt, Vaccinia virus
auuuuggcguuaucauu

SEQ ID NO: 4059948 - RNA, 18 nt, Vaccinia virus
auuuugguuuacauguaa

SEQ ID NO: 4059949 - RNA, 22 nt, Vaccinia virus
auuuuguagaugccauaucaua

SEQ ID NO: 4059950 - RNA, 21 nt, Vaccinia virus
auuuugucuuuaaguauauac

SEQ ID NO: 4059951 - RNA, 19 nt, Vaccinia virus
auuuugugauauuaauaua

SEQ ID NO: 4059952 - RNA, 17 nt, Vaccinia virus
auuuuuaaacuguuugu

SEQ ID NO: 4059953 - RNA, 20 nt, Vaccinia virus
auuuuuacagcgacacuauu

SEQ ID NO: 4059954 - RNA, 23 nt, Vaccinia virus
auuuuuagacauuagauaugcca

SEQ ID NO: 4059955 - RNA, 20 nt, Vaccinia virus
auuuuuaguuacagaaguga

SEQ ID NO: 4059956 - RNA, 12 nt, Vaccinia virus
auuuuuaucaua

SEQ ID NO: 4059957 - RNA, 19 nt, Vaccinia virus
auuuuucuauguuaggaau

SEQ ID NO: 4059958 - RNA, 12 nt, Vaccinia virus
auuuuuucauuu

SEQ ID NO: 4059959 - RNA, 23 nt, Vaccinia virus
auuuuuuuaaaaaaaaaauacuu

SEQ ID NO: 4059960 - RNA, 14 nt, Vaccinia virus
auuuuuuuauucau

SEQ ID NO: 4059961 - RNA, 18 nt, Vaccinia virus
caaaaagggauauauauu

SEQ ID NO: 4059962 - RNA, 16 nt, Vaccinia virus
caaaaaguaagauauu

SEQ ID NO: 4059963 - RNA, 19 nt, Vaccinia virus
caaaaauauaauagcuaau

SEQ ID NO: 4059964 - RNA, 13 nt, Vaccinia virus
caaaaauauucua

SEQ ID NO: 4059965 - RNA, 16 nt, Vaccinia virus
caaaaauguucuuaau

SEQ ID NO: 4059966 - RNA, 15 nt, Vaccinia virus
caaaacgaguacuuu

SEQ ID NO: 4059967 - RNA, 18 nt, Vaccinia virus
caaaagacaugauaauau

SEQ ID NO: 4059968 - RNA, 18 nt, Vaccinia virus
caaaaggacguagacaau

SEQ ID NO: 4059969 - RNA, 16 nt, Vaccinia virus
caaaaggggugagaau

SEQ ID NO: 4059970 - RNA, 19 nt, Vaccinia virus
caaaaguaagcauuuccuu

SEQ ID NO: 4059971 - RNA, 18 nt, Vaccinia virus
caaaaguucauaaucuca

SEQ ID NO: 4059972 - RNA, 14 nt, Vaccinia virus
caaaaucuuaauau

SEQ ID NO: 4059973 - RNA, 16 nt, Vaccinia virus
caaaaugaaaauacuu

SEQ ID NO: 4059974 - RNA, 15 nt, Vaccinia virus
caaaaugauauacag

SEQ ID NO: 4059975 - RNA, 20 nt, Vaccinia virus
caaaauguuugacauuagua

SEQ ID NO: 4059976 - RNA, 17 nt, Vaccinia virus
caaacaauguauacaaa

SEQ ID NO: 4059977 - RNA, 14 nt, Vaccinia virus
caaacaauguuucu

SEQ ID NO: 4059978 - RNA, 18 nt, Vaccinia virus
caaacaggaaagaaguau

SEQ ID NO: 4059979 - RNA, 16 nt, Vaccinia virus
caaacauuauguagua

SEQ ID NO: 4059980 - RNA, 17 nt, Vaccinia virus
caaacugcauucguguu

SEQ ID NO: 4059981 - RNA, 20 nt, Vaccinia virus
caaacuuaaucuuauuagaa

SEQ ID NO: 4059982 - RNA, 21 nt, Vaccinia virus
caaagaaacaucaaguagaaa

SEQ ID NO: 4059983 - RNA, 12 nt, Vaccinia virus
caaagaaauacg

SEQ ID NO: 4059984 - RNA, 14 nt, Vaccinia virus
caaagaaauuaaua

SEQ ID NO: 4059985 - RNA, 17 nt, Vaccinia virus
caaagaauauaucuaau

SEQ ID NO: 4059986 - RNA, 22 nt, Vaccinia virus
cagacucugauuugaacaaugc

SEQ ID NO: 4059987 - RNA, 12 nt, Vaccinia virus
cagacugaaagu

SEQ ID NO: 4059988 - RNA, 19 nt, Vaccinia virus
cagagaggccaucuggaag

SEQ ID NO: 4059989 - RNA, 23 nt, Vaccinia virus
cagagauccacugucacuggaaa

SEQ ID NO: 4059990 - RNA, 15 nt, Vaccinia virus
cagaguguuucaaag

SEQ ID NO: 4059991 - RNA, 15 nt, Vaccinia virus
cagaguugauuguaa

SEQ ID NO: 4059992 - RNA, 21 nt, Vaccinia virus
cagauaauaaccuccugaaaa

SEQ ID NO: 4059993 - RNA, 21 nt, Vaccinia virus
cagauauuccgacaaaggauu

SEQ ID NO: 4059994 - RNA, 14 nt, Vaccinia virus
cagaucaaaacaaa

SEQ ID NO: 4059995 - RNA, 20 nt, Vaccinia virus
cagauccucccguuaaaacc

SEQ ID NO: 4059996 - RNA, 18 nt, Vaccinia virus
cagaugccagauuacaaa

SEQ ID NO: 4059997 - RNA, 18 nt, Vaccinia virus
cagauguaaauauauuua

SEQ ID NO: 4059998 - RNA, 22 nt, Vaccinia virus
cagaugucauaauauuggauug

SEQ ID NO: 4059999 - RNA, 19 nt, Vaccinia virus
cagauguuggaggaugaag

SEQ ID NO: 4060000 - RNA, 13 nt, Vaccinia virus
cagauguuguaaa

SEQ ID NO: 4060001 - RNA, 13 nt, Vaccinia virus
cagauuuuaauau

SEQ ID NO: 4060002 - RNA, 18 nt, Vaccinia virus
cagauuuugauauucuau

SEQ ID NO: 4060003 - RNA, 22 nt, Vaccinia virus
cagauuuuugaaugaaugaaua

SEQ ID NO: 4060004 - RNA, 21 nt, Vaccinia virus
cagcaauagaucggaugauuu

SEQ ID NO: 4060005 - RNA, 20 nt, Vaccinia virus
cagcacagggagccacagaa

SEQ ID NO: 4060006 - RNA, 12 nt, Vaccinia virus
cagcuguagaac

SEQ ID NO: 4060007 - RNA, 13 nt, Vaccinia virus
caggaacuauuaa

SEQ ID NO: 4060008 - RNA, 15 nt, Vaccinia virus
caggaaggagauauu

SEQ ID NO: 4060009 - RNA, 16 nt, Vaccinia virus
caggagauagauaucc

SEQ ID NO: 4060010 - RNA, 14 nt, Vaccinia virus
caguaacauauauu

SEQ ID NO: 4060011 - RNA, 21 nt, Vaccinia virus
caguaauagcuccauaaacug

SEQ ID NO: 4060012 - RNA, 18 nt, Vaccinia virus
caguaggucuuggugaag

SEQ ID NO: 4060013 - RNA, 17 nt, Vaccinia virus
caguaguaauuaaugaa

SEQ ID NO: 4060014 - RNA, 18 nt, Vaccinia virus
caguauaccucaaaaauu

SEQ ID NO: 4060015 - RNA, 19 nt, Vaccinia virus
cagucaagucaaugauauu

SEQ ID NO: 4060016 - RNA, 15 nt, Vaccinia virus
cagucacagacacug

SEQ ID NO: 4060017 - RNA, 15 nt, Vaccinia virus
caguccacuguauaa

SEQ ID NO: 4060018 - RNA, 17 nt, Vaccinia virus
caguccagaaauauuua

SEQ ID NO: 4060019 - RNA, 16 nt, Vaccinia virus
cagucuaguauccauu

SEQ ID NO: 4060020 - RNA, 17 nt, Vaccinia virus
cagucuaguauccauuu

SEQ ID NO: 4060021 - RNA, 21 nt, Vaccinia virus
cagucuaugauagcaauuacu

SEQ ID NO: 4060022 - RNA, 22 nt, Vaccinia virus
cagucugaacaucaaucuuuuu

SEQ ID NO: 4060023 - RNA, 17 nt, Vaccinia virus
caguguacguauauuua

SEQ ID NO: 4060024 - RNA, 19 nt, Vaccinia virus
caguuaacgaaagcaaaga

SEQ ID NO: 4060025 - RNA, 12 nt, Vaccinia virus
caguuauuggau

SEQ ID NO: 4060026 - RNA, 20 nt, Vaccinia virus
caguuccccuacguaucuau

SEQ ID NO: 4060027 - RNA, 16 nt, Vaccinia virus
caguucguuugaugau

SEQ ID NO: 4060028 - RNA, 11 nt, Vaccinia virus
caguuugagaa

SEQ ID NO: 4060029 - RNA, 20 nt, Vaccinia virus
caguuuuaagaugucauaau

SEQ ID NO: 4060030 - RNA, 23 nt, Vaccinia virus
cauaaaaaaauauauuauuuuua

SEQ ID NO: 4060031 - RNA, 22 nt, Vaccinia virus
cauaaaaacucauuacauaguu

SEQ ID NO: 4060032 - RNA, 13 nt, Vaccinia virus
cauaaaacauaau

SEQ ID NO: 4060033 - RNA, 22 nt, Vaccinia virus
cauaaaauuaucgaggauaucu

SEQ ID NO: 4060034 - RNA, 17 nt, Vaccinia virus
cauaaacauguccaaua

SEQ ID NO: 4060035 - RNA, 18 nt, Vaccinia virus
cauaaacugaucacuaau

SEQ ID NO: 4060036 - RNA, 19 nt, Vaccinia virus
cauaaacugaucacuaauu

SEQ ID NO: 4060037 - RNA, 23 nt, Vaccinia virus
cauaaauaauaaauacaauaauu

SEQ ID NO: 4060038 - RNA, 17 nt, Vaccinia virus
cauaaauauauuucuaa

SEQ ID NO: 4060039 - RNA, 14 nt, Vaccinia virus
cauaacgcauaauu

SEQ ID NO: 4060040 - RNA, 13 nt, Vaccinia virus
cauaacguccaga

SEQ ID NO: 4060041 - RNA, 20 nt, Vaccinia virus
cauaagcuugacuacauuug

SEQ ID NO: 4060042 - RNA, 19 nt, Vaccinia virus
cauaaggaaacuuuuguuu

SEQ ID NO: 4060043 - RNA, 14 nt, Vaccinia virus
cauaaguauguuug

SEQ ID NO: 4060044 - RNA, 17 nt, Vaccinia virus
cauaagucuaauagacu

SEQ ID NO: 4060045 - RNA, 15 nt, Vaccinia virus
cauaauauuaucaaa

SEQ ID NO: 4060046 - RNA, 21 nt, Vaccinia virus
cauaaucaucacugucaucag

SEQ ID NO: 4060047 - RNA, 18 nt, Vaccinia virus
cauaauccuuguaaugau

SEQ ID NO: 4060048 - RNA, 17 nt, Vaccinia virus
cauacauacuaucuuua

SEQ ID NO: 4060049 - RNA, 22 nt, Vaccinia virus
cauacaugaaaugaucucuauu

SEQ ID NO: 4060050 - RNA, 22 nt, Vaccinia virus
cauaccuauaggaauagucucu

SEQ ID NO: 4060051 - RNA, 17 nt, Vaccinia virus
cauacgaugaaaauggu

SEQ ID NO: 4060052 - RNA, 15 nt, Vaccinia virus
cauacuaauagaugu

SEQ ID NO: 4060053 - RNA, 17 nt, Vaccinia virus
cauacuauguuuuguau

SEQ ID NO: 4060054 - RNA, 20 nt, Vaccinia virus
cauacuuagaauuuuaggac

SEQ ID NO: 4060055 - RNA, 13 nt, Vaccinia virus
cauagaaaaugau

SEQ ID NO: 4060056 - RNA, 20 nt, Vaccinia virus
cauagaacugccauauguug

SEQ ID NO: 4060057 - RNA, 17 nt, Vaccinia virus
cauagauguauauauca

SEQ ID NO: 4060058 - RNA, 13 nt, Vaccinia virus
cauagcaauacuu

SEQ ID NO: 4060059 - RNA, 22 nt, Vaccinia virus
cauagguggagucuuuaucaau

SEQ ID NO: 4060060 - RNA, 17 nt, Vaccinia virus
cauaguaacucauaauu

SEQ ID NO: 4060061 - RNA, 16 nt, Vaccinia virus
cauaguaauacauauu

SEQ ID NO: 4060062 - RNA, 13 nt, Vaccinia virus
cauagucuucaau

SEQ ID NO: 4060063 - RNA, 18 nt, Vaccinia virus
cauauagaugcagaagua

SEQ ID NO: 4060064 - RNA, 14 nt, Vaccinia virus
cauauagauuacaa

SEQ ID NO: 4060065 - RNA, 19 nt, Vaccinia virus
cauauaggaaacuauaaag

SEQ ID NO: 4060066 - RNA, 17 nt, Vaccinia virus
cauauauggauaaugcu

SEQ ID NO: 4060067 - RNA, 13 nt, Vaccinia virus
cauauauuucauu

SEQ ID NO: 4060068 - RNA, 20 nt, Vaccinia virus
cauaucaucauuguguaaac

SEQ ID NO: 4060069 - RNA, 14 nt, Vaccinia virus
cauaucuauccaua

SEQ ID NO: 4060070 - RNA, 22 nt, Vaccinia virus
cauaucuauccauaugcaucuu

SEQ ID NO: 4060071 - RNA, 14 nt, Vaccinia virus
cauaugauguuugu

SEQ ID NO: 4060072 - RNA, 12 nt, Vaccinia virus
cauauguuuauu

SEQ ID NO: 4060073 - RNA, 12 nt, Vaccinia virus
cauauuaaacau

SEQ ID NO: 4060074 - RNA, 20 nt, Vaccinia virus
cauauuaucaccuauugcca

SEQ ID NO: 4060075 - RNA, 22 nt, Vaccinia virus
cauauucauuaggauuaucaaa

SEQ ID NO: 4060076 - RNA, 20 nt, Vaccinia virus
cauauucuaccuuuuuauuu

SEQ ID NO: 4060077 - RNA, 22 nt, Vaccinia virus
cauauugaugugucuguuuaua

SEQ ID NO: 4060078 - RNA, 19 nt, Vaccinia virus
cauauuuauucuauggaug

SEQ ID NO: 4060079 - RNA, 14 nt, Vaccinia virus
caucaaaaaacaac

SEQ ID NO: 4060080 - RNA, 22 nt, Vaccinia virus
caucaaaaauaaguaaaaagug

SEQ ID NO: 4060081 - RNA, 20 nt, Vaccinia virus
caucaaaauaggagauaucu

SEQ ID NO: 4060082 - RNA, 14 nt, Vaccinia virus
caucaaaauauguu

SEQ ID NO: 4060083 - RNA, 17 nt, Vaccinia virus
caucacuauauguucca

SEQ ID NO: 4060084 - RNA, 21 nt, Vaccinia virus
caucagaauaaaucaauaucu

SEQ ID NO: 4060085 - RNA, 16 nt, Vaccinia virus
caucagacgcaauaac

SEQ ID NO: 4060086 - RNA, 22 nt, Vaccinia virus
caucaucgaagagcauuuuguu

SEQ ID NO: 4060087 - RNA, 18 nt, Vaccinia virus
caucaucgugacauaagu

SEQ ID NO: 4060088 - RNA, 13 nt, Vaccinia virus
caucaucuggaau

SEQ ID NO: 4060089 - RNA, 18 nt, Vaccinia virus
cauccguuguuauauacc

SEQ ID NO: 4060090 - RNA, 22 nt, Vaccinia virus
cauccuucucuucccucuucua

SEQ ID NO: 4060091 - RNA, 22 nt, Vaccinia virus
cauccuuggauagagauugaga

SEQ ID NO: 4060092 - RNA, 21 nt, Vaccinia virus
caucgauucccauaugauguu

SEQ ID NO: 4060093 - RNA, 18 nt, Vaccinia virus
caucgcauuguacgaugu

SEQ ID NO: 4060094 - RNA, 16 nt, Vaccinia virus
caucggaucuguaaaa

SEQ ID NO: 4060095 - RNA, 16 nt, Vaccinia virus
caucgucucaucuguu

SEQ ID NO: 4060096 - RNA, 16 nt, Vaccinia virus
caucuacuuuaucuau

SEQ ID NO: 4060097 - RNA, 21 nt, Vaccinia virus
caucuagccucgguaaucugu

SEQ ID NO: 4060098 - RNA, 20 nt, Vaccinia virus
caucuauauugcuacauaau

SEQ ID NO: 4060099 - RNA, 21 nt, Vaccinia virus
caucuauguagaauccaucag

SEQ ID NO: 4060100 - RNA, 14 nt, Vaccinia virus
caucugcucaacaa

SEQ ID NO: 4060101 - RNA, 23 nt, Vaccinia virus
caucugguacaauaaauagcuuu

SEQ ID NO: 4060102 - RNA, 16 nt, Vaccinia virus
caucuuaguauaacac

SEQ ID NO: 4060103 - RNA, 14 nt, Vaccinia virus
caucuugacauuuu

SEQ ID NO: 4060104 - RNA, 23 nt, Vaccinia virus
caugaacaaucacaagaacagag

SEQ ID NO: 4060105 - RNA, 22 nt, Vaccinia virus
caugaaggagauuuaguauuua

SEQ ID NO: 4060106 - RNA, 20 nt, Vaccinia virus
caugaauccauucuaaugau

SEQ ID NO: 4060107 - RNA, 18 nt, Vaccinia virus
caugacaaaauuaaaaaa

SEQ ID NO: 4060108 - RNA, 16 nt, Vaccinia virus
caugacguaaauguaa

SEQ ID NO: 4060109 - RNA, 21 nt, Vaccinia virus
guucaacuggagauuauagca

SEQ ID NO: 4060110 - RNA, 21 nt, Vaccinia virus
guucagauugggaucuuuuca

SEQ ID NO: 4060111 - RNA, 20 nt, Vaccinia virus
guucauacaugaaaugaucu

SEQ ID NO: 4060112 - RNA, 20 nt, Vaccinia virus
guuccaauauguaucaaaga

SEQ ID NO: 4060113 - RNA, 18 nt, Vaccinia virus
guuccguaucuguauuua

SEQ ID NO: 4060114 - RNA, 23 nt, Vaccinia virus
guucgugccaauugaguaacauu

SEQ ID NO: 4060115 - RNA, 13 nt, Vaccinia virus
guucguucuggga

SEQ ID NO: 4060116 - RNA, 21 nt, Vaccinia virus
guucuaacgccgaucucugaa

SEQ ID NO: 4060117 - RNA, 14 nt, Vaccinia virus
guucuuaauagucu

SEQ ID NO: 4060118 - RNA, 16 nt, Vaccinia virus
guugacauguauauau

SEQ ID NO: 4060119 - RNA, 19 nt, Vaccinia virus
guugacauguauauaucca

SEQ ID NO: 4060120 - RNA, 18 nt, Vaccinia virus
guugauaaaauguugaua

SEQ ID NO: 4060121 - RNA, 21 nt, Vaccinia virus
guugaucagaaugaauguuua

SEQ ID NO: 4060122 - RNA, 17 nt, Vaccinia virus
guugcaauaauaaaagu

SEQ ID NO: 4060123 - RNA, 21 nt, Vaccinia virus
guugcaauaauaaaaguuauc

SEQ ID NO: 4060124 - RNA, 20 nt, Vaccinia virus
guugcgcagagugaauaauu

SEQ ID NO: 4060125 - RNA, 19 nt, Vaccinia virus
guugcugcucguauaaucu

SEQ ID NO: 4060126 - RNA, 13 nt, Vaccinia virus
guugguagauauu

SEQ ID NO: 4060127 - RNA, 14 nt, Vaccinia virus
guuguauagaaauu

SEQ ID NO: 4060128 - RNA, 18 nt, Vaccinia virus
guugucuaguauuuaaca

SEQ ID NO: 4060129 - RNA, 18 nt, Vaccinia virus
guuguuaaaguuaauauu

SEQ ID NO: 4060130 - RNA, 13 nt, Vaccinia virus
guuuaaaauuagc

SEQ ID NO: 4060131 - RNA, 21 nt, Vaccinia virus
guuuaaaguaaacuucguaaa

SEQ ID NO: 4060132 - RNA, 19 nt, Vaccinia virus
guuuaacaaaguuauucau

SEQ ID NO: 4060133 - RNA, 16 nt, Vaccinia virus
guuuaauuuucacaag

SEQ ID NO: 4060134 - RNA, 17 nt, Vaccinia virus
guuuacaguaguaauga

SEQ ID NO: 4060135 - RNA, 13 nt, Vaccinia virus
guuuagagaaugc

SEQ ID NO: 4060136 - RNA, 14 nt, Vaccinia virus
guuuagaugucgaa

SEQ ID NO: 4060137 - RNA, 22 nt, Vaccinia virus
guuuauaauuacaacauaauag

SEQ ID NO: 4060138 - RNA, 19 nt, Vaccinia virus
guuuaucgccuacaucauc

SEQ ID NO: 4060139 - RNA, 17 nt, Vaccinia virus
guuucaucaauagaaga

SEQ ID NO: 4060140 - RNA, 18 nt, Vaccinia virus
guuucauguuuauaaaaa

SEQ ID NO: 4060141 - RNA, 19 nt, Vaccinia virus
guuuccuggauaaaccaca

SEQ ID NO: 4060142 - RNA, 16 nt, Vaccinia virus
guuucucauguggauc

SEQ ID NO: 4060143 - RNA, 20 nt, Vaccinia virus
guuucugucaacaauguuug

SEQ ID NO: 4060144 - RNA, 13 nt, Vaccinia virus
guuuggaauaacu

SEQ ID NO: 4060145 - RNA, 16 nt, Vaccinia virus
guuuggauuaauaauu

SEQ ID NO: 4060146 - RNA, 15 nt, Vaccinia virus
guuuguuuuggaaau

SEQ ID NO: 4060147 - RNA, 22 nt, Vaccinia virus
guuuuaacgaauuauauagucu

SEQ ID NO: 4060148 - RNA, 19 nt, Vaccinia virus
guuuuacguuauuaaucau

SEQ ID NO: 4060149 - RNA, 20 nt, Vaccinia virus
guuuucagaagauaauuauc

SEQ ID NO: 4060150 - RNA, 11 nt, Vaccinia virus
guuuucaucag

SEQ ID NO: 4060151 - RNA, 20 nt, Vaccinia virus
guuuuccaaccggacucauu

SEQ ID NO: 4060152 - RNA, 17 nt, Vaccinia virus
guuuucccauacuaauu

SEQ ID NO: 4060153 - RNA, 15 nt, Vaccinia virus
guuuucgauacuuuu

SEQ ID NO: 4060154 - RNA, 16 nt, Vaccinia virus
guuuucuacaauaacu

SEQ ID NO: 4060155 - RNA, 17 nt, Vaccinia virus
guuuucuagauggaaau

SEQ ID NO: 4060156 - RNA, 15 nt, Vaccinia virus
uaaaaaaaaugacuu

SEQ ID NO: 4060157 - RNA, 13 nt, Vaccinia virus
uaaaaaaacauua

SEQ ID NO: 4060158 - RNA, 23 nt, Vaccinia virus
uaaaaaaaugauugaagaaggag

SEQ ID NO: 4060159 - RNA, 14 nt, Vaccinia virus
uaaaaaagauaaag

SEQ ID NO: 4060160 - RNA, 16 nt, Vaccinia virus
uaaaaaauauucuuca

SEQ ID NO: 4060161 - RNA, 18 nt, Vaccinia virus
uaaaaacauuuuauuucu

SEQ ID NO: 4060162 - RNA, 20 nt, Vaccinia virus
uaaaaaguucgaguuucuca

SEQ ID NO: 4060163 - RNA, 21 nt, Vaccinia virus
uaaaaaguuuuccaucuaugu

SEQ ID NO: 4060164 - RNA, 16 nt, Vaccinia virus
uaaaaauaaacaacau

SEQ ID NO: 4060165 - RNA, 12 nt, Vaccinia virus
uaaaaauuauug

SEQ ID NO: 4060166 - RNA, 16 nt, Vaccinia virus
uaaaacgauuaaacaa

SEQ ID NO: 4060167 - RNA, 19 nt, Vaccinia virus
uaaaacuuguaagaaguaa

SEQ ID NO: 4060168 - RNA, 13 nt, Vaccinia virus
uaaaagucaacau

SEQ ID NO: 4060169 - RNA, 13 nt, Vaccinia virus
uaaaauaauacau

SEQ ID NO: 4060170 - RNA, 18 nt, Vaccinia virus
uaaaauaguucuguaaua

SEQ ID NO: 4060171 - RNA, 19 nt, Vaccinia virus
uaaaauaguuuauaacauu

SEQ ID NO: 4060172 - RNA, 18 nt, Vaccinia virus
uaaaauauaaugauauac

SEQ ID NO: 4060173 - RNA, 22 nt, Vaccinia virus
uaaaauauacucgacaacuuua

SEQ ID NO: 4060174 - RNA, 17 nt, Vaccinia virus
uaaaaucacugaacauu

SEQ ID NO: 4060175 - RNA, 20 nt, Vaccinia virus
uaaaaucucagauugugcau

SEQ ID NO: 4060176 - RNA, 16 nt, Vaccinia virus
uaaaaucugaucuugu

SEQ ID NO: 4060177 - RNA, 12 nt, Vaccinia virus
uaaaauggauua

SEQ ID NO: 4060178 - RNA, 19 nt, Vaccinia virus
uaaaaugguaaacuuuugc

SEQ ID NO: 4060179 - RNA, 16 nt, Vaccinia virus
uaaaauuccuacucau

SEQ ID NO: 4060180 - RNA, 14 nt, Vaccinia virus
uaaacaaaauacuc

SEQ ID NO: 4060181 - RNA, 16 nt, Vaccinia virus
uaaacaaucuaguuuu

SEQ ID NO: 4060182 - RNA, 22 nt, Vaccinia virus
uaaacaaucuaguuuugagaac

SEQ ID NO: 4060183 - RNA, 20 nt, Vaccinia virus
uaaacaaucugucgaaaaag

SEQ ID NO: 4060184 - RNA, 21 nt, Vaccinia virus
uaaacaauugggguuuccagg

SEQ ID NO: 4060185 - RNA, 16 nt, Vaccinia virus
uaaacacauuauuaau

SEQ ID NO: 4060186 - RNA, 23 nt, Vaccinia virus
uaaacauauagggaaucauauau

SEQ ID NO: 4060187 - RNA, 21 nt, Vaccinia virus
uaaacaucuuugcaucauacu

SEQ ID NO: 4060188 - RNA, 17 nt, Vaccinia virus
uaaacauuguucaugau

SEQ ID NO: 4060189 - RNA, 14 nt, Vaccinia virus
uaaacgaacuauau

SEQ ID NO: 4060190 - RNA, 22 nt, Vaccinia virus
uaaacgacuauaaaauuauuga

SEQ ID NO: 4060191 - RNA, 14 nt, Vaccinia virus
uaaacguacauuuu

SEQ ID NO: 4060192 - RNA, 18 nt, Vaccinia virus
uaaacucagauaauagca

SEQ ID NO: 4060193 - RNA, 19 nt, Vaccinia virus
uaaacucagauaauagcaa

SEQ ID NO: 4060194 - RNA, 23 nt, Vaccinia virus
uaaacuccacccauuacauauau

SEQ ID NO: 4060195 - RNA, 20 nt, Vaccinia virus
uaaacucgcuuaauaucuuc

SEQ ID NO: 4060196 - RNA, 18 nt, Vaccinia virus
uaaacugcgccaaauugu

SEQ ID NO: 4060197 - RNA, 16 nt, Vaccinia virus
uaaagaaaagauaucc

SEQ ID NO: 4060198 - RNA, 20 nt, Vaccinia virus
uaaagaagaagaucauacag

SEQ ID NO: 4060199 - RNA, 15 nt, Vaccinia virus
uaaagaccgaauaca

SEQ ID NO: 4060200 - RNA, 16 nt, Vaccinia virus
uaaagacuuaagacuu

SEQ ID NO: 4060201 - RNA, 13 nt, Vaccinia virus
uaaagauaaacau

SEQ ID NO: 4060202 - RNA, 16 nt, Vaccinia virus
uaaagauauuguuaca

SEQ ID NO: 4060203 - RNA, 17 nt, Vaccinia virus
uaaagccgguguaacau

SEQ ID NO: 4060204 - RNA, 15 nt, Vaccinia virus
uaaaggauguggaca

SEQ ID NO: 4060205 - RNA, 14 nt, Vaccinia virus
uaaagguaaaugua

SEQ ID NO: 4060206 - RNA, 15 nt, Vaccinia virus
uaaaguaauaaucuu

SEQ ID NO: 4060207 - RNA, 21 nt, Vaccinia virus
uaaaguaugaacaaagaaaug

SEQ ID NO: 4060208 - RNA, 22 nt, Vaccinia virus
uaaaguauuugauaaaucucuu

SEQ ID NO: 4060209 - RNA, 13 nt, Vaccinia virus
uaaaguuaucaug

SEQ ID NO: 4060210 - RNA, 15 nt, Vaccinia virus
uaaauaaauaugugu

SEQ ID NO: 4060211 - RNA, 12 nt, Vaccinia virus
uaaauaaauguc

SEQ ID NO: 4060212 - RNA, 14 nt, Vaccinia virus
uaaauacauuauca

SEQ ID NO: 4060213 - RNA, 16 nt, Vaccinia virus
uaaauacauuaucaug

SEQ ID NO: 4060214 - RNA, 20 nt, Vaccinia virus
uaaauaccauacaauuuaug

SEQ ID NO: 4060215 - RNA, 12 nt, Vaccinia virus
uaaauagaauau

SEQ ID NO: 4060216 - RNA, 24 nt, Vaccinia virus
uaaauagaauucucuucauaucau

SEQ ID NO: 4060217 - RNA, 17 nt, Vaccinia virus
uaaauagagagauauca

SEQ ID NO: 4060218 - RNA, 19 nt, Vaccinia virus
uaaauauagguuacuagau

SEQ ID NO: 4060219 - RNA, 16 nt, Vaccinia virus
uaaauauccacucugu

SEQ ID NO: 4060220 - RNA, 18 nt, Vaccinia virus
uaaauauguguauuauca

SEQ ID NO: 4060221 - RNA, 18 nt, Vaccinia virus
uaaauauugauguuaaua

SEQ ID NO: 4060222 - RNA, 16 nt, Vaccinia virus
uaaauauuuuaaaauu

SEQ ID NO: 4060223 - RNA, 17 nt, Vaccinia virus
uaaaucagaauguuaca

SEQ ID NO: 4060224 - RNA, 21 nt, Vaccinia virus
uaaaucauuccaucgauacau

SEQ ID NO: 4060225 - RNA, 14 nt, Vaccinia virus
uaaauccagaaguu

SEQ ID NO: 4060226 - RNA, 15 nt, Vaccinia virus
uaaaucguauauguu

SEQ ID NO: 4060227 - RNA, 21 nt, Vaccinia virus
uaaaucuacucagauuauucu

SEQ ID NO: 4060228 - RNA, 18 nt, Vaccinia virus
uaaaucuauuauauuuua

SEQ ID NO: 4060229 - RNA, 13 nt, Vaccinia virus
uaaaugaaaagau

SEQ ID NO: 4060230 - RNA, 22 nt, Vaccinia virus
uaaaugaucggaucuaaaaucc

SEQ ID NO: 4060231 - RNA, 23 nt, Vaccinia virus
uaaaugauucuaacgacaucucu

SEQ ID NO: 4060232 - RNA, 17 nt, Vaccinia virus
uaaauguagacaaauau

SEQ ID NO: 4060233 - RNA, 21 nt, Vaccinia virus
uaguucuucaguaguaauaac

SEQ ID NO: 4060234 - RNA, 19 nt, Vaccinia virus
uaguucuuugaacaucuug

SEQ ID NO: 4060235 - RNA, 21 nt, Vaccinia virus
uaguucuuuuagaaaauucua

SEQ ID NO: 4060236 - RNA, 21 nt, Vaccinia virus
uaguugauagaacaaaauaca

SEQ ID NO: 4060237 - RNA, 18 nt, Vaccinia virus
uaguuguggaaauacuuc

SEQ ID NO: 4060238 - RNA, 15 nt, Vaccinia virus
uaguuuacuuuucua

SEQ ID NO: 4060239 - RNA, 20 nt, Vaccinia virus
uaguuuccuuaacaaaucua

SEQ ID NO: 4060240 - RNA, 17 nt, Vaccinia virus
uaguuugauugucucau

SEQ ID NO: 4060241 - RNA, 19 nt, Vaccinia virus
uaguuuuaacauuauuaua

SEQ ID NO: 4060242 - RNA, 14 nt, Vaccinia virus
uaguuuuuacacau

SEQ ID NO: 4060243 - RNA, 17 nt, Vaccinia virus
uaguuuuucuuuacaca

SEQ ID NO: 4060244 - RNA, 13 nt, Vaccinia virus
uaguuuuuuucau

SEQ ID NO: 4060245 - RNA, 17 nt, Vaccinia virus
uaguuuuuuuguuuccu

SEQ ID NO: 4060246 - RNA, 19 nt, Vaccinia virus
uauaaaaaaacauuauucu

SEQ ID NO: 4060247 - RNA, 16 nt, Vaccinia virus
uauaaaaauuaauauu

SEQ ID NO: 4060248 - RNA, 18 nt, Vaccinia virus
uauaaaacuacuacaaug

SEQ ID NO: 4060249 - RNA, 13 nt, Vaccinia virus
uauaaaaucacuu

SEQ ID NO: 4060250 - RNA, 17 nt, Vaccinia virus
uauaaaaucuguaucga

SEQ ID NO: 4060251 - RNA, 13 nt, Vaccinia virus
uauaaaaugacau

SEQ ID NO: 4060252 - RNA, 14 nt, Vaccinia virus
uauaaacaaaaaua

SEQ ID NO: 4060253 - RNA, 20 nt, Vaccinia virus
uauaaacauuuguguuugua

SEQ ID NO: 4060254 - RNA, 15 nt, Vaccinia virus
uauaaagacaaacaa

SEQ ID NO: 4060255 - RNA, 15 nt, Vaccinia virus
uauaaauaacauuua

SEQ ID NO: 4060256 - RNA, 18 nt, Vaccinia virus
uauaaauagauguuagua

SEQ ID NO: 4060257 - RNA, 15 nt, Vaccinia virus
uauaaauauccuuaa

SEQ ID NO: 4060258 - RNA, 22 nt, Vaccinia virus
uauaaauaugagcauuaguauu

SEQ ID NO: 4060259 - RNA, 14 nt, Vaccinia virus
uauaaauauguucc

SEQ ID NO: 4060260 - RNA, 18 nt, Vaccinia virus
uauaaaugaaguacuguu

SEQ ID NO: 4060261 - RNA, 12 nt, Vaccinia virus
uauaaauuaaag

SEQ ID NO: 4060262 - RNA, 15 nt, Vaccinia virus
uauaacaaauacaga

SEQ ID NO: 4060263 - RNA, 22 nt, Vaccinia virus
uauaaccuaaaacccauguaua

SEQ ID NO: 4060264 - RNA, 21 nt, Vaccinia virus
uauaaguuguuaaaaaaagga

SEQ ID NO: 4060265 - RNA, 20 nt, Vaccinia virus
uauaauaacgauuuguuuaa

SEQ ID NO: 4060266 - RNA, 16 nt, Vaccinia virus
uauaauaaucaauaau

SEQ ID NO: 4060267 - RNA, 14 nt, Vaccinia virus
uauaauauacucuu

SEQ ID NO: 4060268 - RNA, 17 nt, Vaccinia virus
uauaauauauuagauau

SEQ ID NO: 4060269 - RNA, 12 nt, Vaccinia virus
uauaauaucuua

SEQ ID NO: 4060270 - RNA, 14 nt, Vaccinia virus
uauaaucaaagauu

SEQ ID NO: 4060271 - RNA, 22 nt, Vaccinia virus
uauaaucaguagcguguuuuaa

SEQ ID NO: 4060272 - RNA, 18 nt, Vaccinia virus
uauaaucaucguaacugc

SEQ ID NO: 4060273 - RNA, 16 nt, Vaccinia virus
uauaauucuccugaaa

SEQ ID NO: 4060274 - RNA, 23 nt, Vaccinia virus
uauaauuuuauugagauuucuga

SEQ ID NO: 4060275 - RNA, 21 nt, Vaccinia virus
uauacaagaguggaaacucac

SEQ ID NO: 4060276 - RNA, 22 nt, Vaccinia virus
uauacaaggcggauguugugaa

SEQ ID NO: 4060277 - RNA, 15 nt, Vaccinia virus
uauacaaguguagau

SEQ ID NO: 4060278 - RNA, 13 nt, Vaccinia virus
uauacaauuauca

SEQ ID NO: 4060279 - RNA, 14 nt, Vaccinia virus
uauacacauuuuca

SEQ ID NO: 4060280 - RNA, 16 nt, Vaccinia virus
uauacacgcuaaaaua

SEQ ID NO: 4060281 - RNA, 20 nt, Vaccinia virus
uauacagcuggagauuauca

SEQ ID NO: 4060282 - RNA, 22 nt, Vaccinia virus
uauacagcuggagauuaucauc

SEQ ID NO: 4060283 - RNA, 20 nt, Vaccinia virus
uauacagugaacacacaaua

SEQ ID NO: 4060284 - RNA, 15 nt, Vaccinia virus
uauacauaaacugau

SEQ ID NO: 4060285 - RNA, 22 nt, Vaccinia virus
uauacaugauaccguuuagcau

SEQ ID NO: 4060286 - RNA, 17 nt, Vaccinia virus
uauacaugauauuauca

SEQ ID NO: 4060287 - RNA, 14 nt, Vaccinia virus
uauacauuacugaa

SEQ ID NO: 4060288 - RNA, 23 nt, Vaccinia virus
uauacccauacugaauggaugaa

SEQ ID NO: 4060289 - RNA, 21 nt, Vaccinia virus
uauacgaaauaaaauagacaa

SEQ ID NO: 4060290 - RNA, 19 nt, Vaccinia virus
uauacgaaauauuauacau

SEQ ID NO: 4060291 - RNA, 17 nt, Vaccinia virus
uauacgaauguaucaaa

SEQ ID NO: 4060292 - RNA, 17 nt, Vaccinia virus
uauacggcagcagcuuc

SEQ ID NO: 4060293 - RNA, 20 nt, Vaccinia virus
uauacggcuacaauuucaua

SEQ ID NO: 4060294 - RNA, 23 nt, Vaccinia virus
uauacgguaucgcgauuagugua

SEQ ID NO: 4060295 - RNA, 16 nt, Vaccinia virus
uauacucuauucuuca

SEQ ID NO: 4060296 - RNA, 18 nt, Vaccinia virus
uauacucuuauuaucaaa

SEQ ID NO: 4060297 - RNA, 21 nt, Vaccinia virus
uauacuugucaucauuucuaa

SEQ ID NO: 4060298 - RNA, 13 nt, Vaccinia virus
uauagaauugucu

SEQ ID NO: 4060299 - RNA, 20 nt, Vaccinia virus
uauagaggaauaucaucaaa

SEQ ID NO: 4060300 - RNA, 22 nt, Vaccinia virus
uauagauagcuuuagcuaauau

SEQ ID NO: 4060301 - RNA, 19 nt, Vaccinia virus
uauagcuauucuucuuuaa

SEQ ID NO: 4060302 - RNA, 14 nt, Vaccinia virus
uauaggaauagucu

SEQ ID NO: 4060303 - RNA, 16 nt, Vaccinia virus
uauaggagaaaaacaa

SEQ ID NO: 4060304 - RNA, 16 nt, Vaccinia virus
uauaggcgguguauuu

SEQ ID NO: 4060305 - RNA, 22 nt, Vaccinia virus
uauaguuaauaguguacuacaa

SEQ ID NO: 4060306 - RNA, 16 nt, Vaccinia virus
uauaguuuuaaacuga

SEQ ID NO: 4060307 - RNA, 13 nt, Vaccinia virus
uauauaacguuau

SEQ ID NO: 4060308 - RNA, 17 nt, Vaccinia virus
uauauaauaaauacuuu

SEQ ID NO: 4060309 - RNA, 19 nt, Vaccinia virus
uauauaauccaucaacaau

SEQ ID NO: 4060310 - RNA, 24 nt, Vaccinia virus
uauauaccacuuaaugacaaaauc

SEQ ID NO: 4060311 - RNA, 12 nt, Vaccinia virus
uauauagauguc

SEQ ID NO: 4060312 - RNA, 13 nt, Vaccinia virus
uauauaucaugau

SEQ ID NO: 4060313 - RNA, 17 nt, Vaccinia virus
uauauaucauuuguaca

SEQ ID NO: 4060314 - RNA, 12 nt, Vaccinia virus
uauauauucucu

SEQ ID NO: 4060315 - RNA, 15 nt, Vaccinia virus
uauauauuugaaaau

SEQ ID NO: 4060316 - RNA, 17 nt, Vaccinia virus
uauaucaauaagaaagu

SEQ ID NO: 4060317 - RNA, 17 nt, Vaccinia virus
uauaucaucauuuugau

SEQ ID NO: 4060318 - RNA, 15 nt, Vaccinia virus
uauauccuuuuguau

SEQ ID NO: 4060319 - RNA, 22 nt, Vaccinia virus
uauaugcaguuuuaagauguca

SEQ ID NO: 4060320 - RNA, 19 nt, Vaccinia virus
uauaugcccuauuaucaua

SEQ ID NO: 4060321 - RNA, 22 nt, Vaccinia virus
uauauggaacacgauuauuaua

SEQ ID NO: 4060322 - RNA, 13 nt, Vaccinia virus
uauauguaacauu

SEQ ID NO: 4060323 - RNA, 12 nt, Vaccinia virus
uauauguagcaa

SEQ ID NO: 4060324 - RNA, 11 nt, Vaccinia virus
uauauguuucu

SEQ ID NO: 4060325 - RNA, 13 nt, Vaccinia virus
uauauguuuucau

SEQ ID NO: 4060326 - RNA, 15 nt, Vaccinia virus
uauauuagagaagau

SEQ ID NO: 4060327 - RNA, 17 nt, Vaccinia virus
uauauuaucauagaccu

SEQ ID NO: 4060328 - RNA, 16 nt, Vaccinia virus
uauauucgaauucaaa

SEQ ID NO: 4060329 - RNA, 13 nt, Vaccinia virus
uauauucuaugau

SEQ ID NO: 4060330 - RNA, 14 nt, Vaccinia virus
uauauuucuaugau

SEQ ID NO: 4060331 - RNA, 16 nt, Vaccinia virus
uauauuugcaacaauu

SEQ ID NO: 4060332 - RNA, 22 nt, Vaccinia virus
uauauuuucacuuuaucucauu

SEQ ID NO: 4060333 - RNA, 20 nt, Vaccinia virus
uauauuuuccaugaaaucaa

SEQ ID NO: 4060334 - RNA, 14 nt, Vaccinia virus
uaucaaaacauaua

SEQ ID NO: 4060335 - RNA, 13 nt, Vaccinia virus
uaucaaaagacuu

SEQ ID NO: 4060336 - RNA, 14 nt, Vaccinia virus
uaucaaauacugua

SEQ ID NO: 4060337 - RNA, 18 nt, Vaccinia virus
uaucaaggaacaaauauu

SEQ ID NO: 4060338 - RNA, 23 nt, Vaccinia virus
uaucaauaacgcaaucaugauuu

SEQ ID NO: 4060339 - RNA, 14 nt, Vaccinia virus
uaucaauaacuaca

SEQ ID NO: 4060340 - RNA, 19 nt, Vaccinia virus
uaucaauagcaguuuauua

SEQ ID NO: 4060341 - RNA, 18 nt, Vaccinia virus
uaucaccguuaaugaggu

SEQ ID NO: 4060342 - RNA, 19 nt, Vaccinia virus
uaucacgugcaaggcauuu

SEQ ID NO: 4060343 - RNA, 20 nt, Vaccinia virus
uaucagaagugugaauauga

SEQ ID NO: 4060344 - RNA, 16 nt, Vaccinia virus
uaucagacuacuuauu

SEQ ID NO: 4060345 - RNA, 18 nt, Vaccinia virus
uaucagacuacuuauucu

SEQ ID NO: 4060346 - RNA, 14 nt, Vaccinia virus
uaucaguagaugca

SEQ ID NO: 4060347 - RNA, 16 nt, Vaccinia virus
uaucauaaaugaaaua

SEQ ID NO: 4060348 - RNA, 17 nt, Vaccinia virus
uaucauagaguaucuua

SEQ ID NO: 4060349 - RNA, 16 nt, Vaccinia virus
uaucaucauuaucauu

SEQ ID NO: 4060350 - RNA, 18 nt, Vaccinia virus
uaucaucgacacaaauga

SEQ ID NO: 4060351 - RNA, 20 nt, Vaccinia virus
uaucauugauugagaagaag

SEQ ID NO: 4060352 - RNA, 14 nt, Vaccinia virus
uaucauuuacuaga

SEQ ID NO: 4060353 - RNA, 20 nt, Vaccinia virus
uauccaacuugacaaaucuu

SEQ ID NO: 4060354 - RNA, 16 nt, Vaccinia virus
uauccaauacagaaug

SEQ ID NO: 4060355 - RNA, 19 nt, Vaccinia virus
uauccauaucucuagauac

SEQ ID NO: 4060356 - RNA, 13 nt, Vaccinia virus
uauccauuauucu

SEQ ID NO: 4060357 - RNA, 18 nt, Vaccinia virus
uuugguaauggcaaugua

SEQ ID NO: 4060358 - RNA, 16 nt, Vaccinia virus
uuugguauauacauag

SEQ ID NO: 4060359 - RNA, 14 nt, Vaccinia virus
uuugguucuucucu

SEQ ID NO: 4060360 - RNA, 14 nt, Vaccinia virus
uuuguaauugacau

SEQ ID NO: 4060361 - RNA, 18 nt, Vaccinia virus
uuuguacgucacaucuuc

SEQ ID NO: 4060362 - RNA, 16 nt, Vaccinia virus
uuuguauaacgucuuu

SEQ ID NO: 4060363 - RNA, 18 nt, Vaccinia virus
uuuguccuuaagacuaua

SEQ ID NO: 4060364 - RNA, 15 nt, Vaccinia virus
uuuguugagaugcug

SEQ ID NO: 4060365 - RNA, 15 nt, Vaccinia virus
uuuuaaagguaucua

SEQ ID NO: 4060366 - RNA, 17 nt, Vaccinia virus
uuuuaaauauuguauua

SEQ ID NO: 4060367 - RNA, 20 nt, Vaccinia virus
uuuuacagaucuaguauaau

SEQ ID NO: 4060368 - RNA, 15 nt, Vaccinia virus
uuuuacgaauaaacg

SEQ ID NO: 4060369 - RNA, 23 nt, Vaccinia virus
uuuuacgccucuccuuccguaaa

SEQ ID NO: 4060370 - RNA, 21 nt, Vaccinia virus
uuuuagauaaaaaauuauaua

SEQ ID NO: 4060371 - RNA, 20 nt, Vaccinia virus
uuuuaggauaugcuuucaua

SEQ ID NO: 4060372 - RNA, 14 nt, Vaccinia virus
uuuuaguuuaucaa

SEQ ID NO: 4060373 - RNA, 12 nt, Vaccinia virus
uuuuauaaacau

SEQ ID NO: 4060374 - RNA, 23 nt, Vaccinia virus
uuuuauaugucucgcauaaacau

SEQ ID NO: 4060375 - RNA, 17 nt, Vaccinia virus
uuuuaucgauucuaaug

SEQ ID NO: 4060376 - RNA, 21 nt, Vaccinia virus
uuuuaucuauauuguauucua

SEQ ID NO: 4060377 - RNA, 15 nt, Vaccinia virus
uuuuauuacauguuu

SEQ ID NO: 4060378 - RNA, 19 nt, Vaccinia virus
uuuuccaucuauguagaau

SEQ ID NO: 4060379 - RNA, 14 nt, Vaccinia virus
uuuucgaaauggua

SEQ ID NO: 4060380 - RNA, 23 nt, Vaccinia virus
uuuucuguacucagauucaguuu

SEQ ID NO: 4060381 - RNA, 19 nt, Vaccinia virus
uuuucuuucuaauacuaua

SEQ ID NO: 4060382 - RNA, 14 nt, Vaccinia virus
uuuugguucuucuc

SEQ ID NO: 4060383 - RNA, 12 nt, Vaccinia virus
uuuuguaauaag

SEQ ID NO: 4060384 - RNA, 22 nt, Vaccinia virus
uuuuguaauaagaauaaaaugc

SEQ ID NO: 4060385 - RNA, 13 nt, Vaccinia virus
uuuuguacauaau

SEQ ID NO: 4060386 - RNA, 17 nt, Vaccinia virus
uuuuguuugggaaacac

SEQ ID NO: 4060387 - RNA, 14 nt, Vaccinia virus
uuuuuaaaaucauu

SEQ ID NO: 4060388 - RNA, 11 nt, Vaccinia virus
uuuuuaacaug

SEQ ID NO: 4060389 - RNA, 23 nt, Vaccinia virus
uuuuuagccggaauaacaucauc

SEQ ID NO: 4060390 - RNA, 12 nt, Vaccinia virus
uuuuucaugauu

SEQ ID NO: 4060391 - RNA, 14 nt, Vaccinia virus
uuuuucgacauauu

SEQ ID NO: 4060392 - RNA, 23 nt, Vaccinia virus
uuuuucguuuacaaaaucaaaua

SEQ ID NO: 4060393 - RNA, 15 nt, Vaccinia virus
uuuuuuacguaguaa

SEQ ID NO: 4060394 - RNA, 11 nt, Vaccinia virus
uuuuuuggaau

SEQ ID NO: 4060395 - RNA, 24 nt, Vaccinia virus
aguuguuguccguuaucuaacaug

SEQ ID NO: 4060396 - RNA, 12 nt, Vaccinia virus
aguuuaacuagu

SEQ ID NO: 4060397 - RNA, 22 nt, Vaccinia virus
aguuuaagaaucucaugucaaa

SEQ ID NO: 4060398 - RNA, 19 nt, Vaccinia virus
aguuuaucaauaacuacau

SEQ ID NO: 4060399 - RNA, 16 nt, Vaccinia virus
aguuuaucauacuuag

SEQ ID NO: 4060400 - RNA, 12 nt, Vaccinia virus
aguuucagaauu

SEQ ID NO: 4060401 - RNA, 21 nt, Vaccinia virus
aguuucucaugucucuauaua

SEQ ID NO: 4060402 - RNA, 20 nt, Vaccinia virus
aguuucuugagugcgaaugu

SEQ ID NO: 4060403 - RNA, 15 nt, Vaccinia virus
aguuuggauuaauaa

SEQ ID NO: 4060404 - RNA, 16 nt, Vaccinia virus
aguuuuaaaaauacuu

SEQ ID NO: 4060405 - RNA, 17 nt, Vaccinia virus
aguuuuaaaaauacuua

SEQ ID NO: 4060406 - RNA, 15 nt, Vaccinia virus
aguuuuauaaacucg

SEQ ID NO: 4060407 - RNA, 14 nt, Vaccinia virus
aguuuucuaaagau

SEQ ID NO: 4060408 - RNA, 19 nt, Vaccinia virus
aguuuucucuauucugaaa

SEQ ID NO: 4060409 - RNA, 12 nt, Vaccinia virus
auaaaaaaauua

SEQ ID NO: 4060410 - RNA, 11 nt, Vaccinia virus
auaaaaacaag

SEQ ID NO: 4060411 - RNA, 16 nt, Vaccinia virus
auaaaaacuuauacau

SEQ ID NO: 4060412 - RNA, 23 nt, Vaccinia virus
auaaaaagacuuuuauaauucau

SEQ ID NO: 4060413 - RNA, 19 nt, Vaccinia virus
auaaaaaguauagguguau

SEQ ID NO: 4060414 - RNA, 13 nt, Vaccinia virus
auaaaaauauauu

SEQ ID NO: 4060415 - RNA, 20 nt, Vaccinia virus
auaaaaguuccagaaaaugu

SEQ ID NO: 4060416 - RNA, 14 nt, Vaccinia virus
auaaaauaacaaua

SEQ ID NO: 4060417 - RNA, 12 nt, Vaccinia virus
auaaaauagaca

SEQ ID NO: 4060418 - RNA, 14 nt, Vaccinia virus
auaaaauaucuuaa

SEQ ID NO: 4060419 - RNA, 12 nt, Vaccinia virus
auaaaaucucca

SEQ ID NO: 4060420 - RNA, 17 nt, Vaccinia virus
auaaaauguuaauacau

SEQ ID NO: 4060421 - RNA, 14 nt, Vaccinia virus
auaaaauuacuuaa

SEQ ID NO: 4060422 - RNA, 17 nt, Vaccinia virus
auaaaauugaaguaaua

SEQ ID NO: 4060423 - RNA, 19 nt, Vaccinia virus
auaaaauuuuaauuaaugu

SEQ ID NO: 4060424 - RNA, 14 nt, Vaccinia virus
auaaacaauauuaa

SEQ ID NO: 4060425 - RNA, 22 nt, Vaccinia virus
auaaacauaauaaacaaaauua

SEQ ID NO: 4060426 - RNA, 15 nt, Vaccinia virus
auaaacaugucuauu

SEQ ID NO: 4060427 - RNA, 17 nt, Vaccinia virus
auaaacaugucuauugu

SEQ ID NO: 4060428 - RNA, 20 nt, Vaccinia virus
auaaaccauuagauaaaguu

SEQ ID NO: 4060429 - RNA, 16 nt, Vaccinia virus
auaaaccauuguauaa

SEQ ID NO: 4060430 - RNA, 24 nt, Vaccinia virus
auaaaccucuggcacuuauuucau

SEQ ID NO: 4060431 - RNA, 18 nt, Vaccinia virus
auaaacggguguaaacaa

SEQ ID NO: 4060432 - RNA, 22 nt, Vaccinia virus
auaaacguucacguaaauacaa

SEQ ID NO: 4060433 - RNA, 18 nt, Vaccinia virus
auaaacuaacauuguuaa

SEQ ID NO: 4060434 - RNA, 15 nt, Vaccinia virus
auaaacuauuuuacc

SEQ ID NO: 4060435 - RNA, 16 nt, Vaccinia virus
auaaacugaucacuaa

SEQ ID NO: 4060436 - RNA, 16 nt, Vaccinia virus
auaaacuuaacccauu

SEQ ID NO: 4060437 - RNA, 14 nt, Vaccinia virus
auaaagaugauaua

SEQ ID NO: 4060438 - RNA, 23 nt, Vaccinia virus
auaaaguccgacuauuguucuau

SEQ ID NO: 4060439 - RNA, 19 nt, Vaccinia virus
auaaagucugucaaaucau

SEQ ID NO: 4060440 - RNA, 14 nt, Vaccinia virus
auaaaguguucauc

SEQ ID NO: 4060441 - RNA, 14 nt, Vaccinia virus
auaaauaacaaugg

SEQ ID NO: 4060442 - RNA, 17 nt, Vaccinia virus
auaaauaauaaauacaa

SEQ ID NO: 4060443 - RNA, 17 nt, Vaccinia virus
auaaauacaccaaauau

SEQ ID NO: 4060444 - RNA, 16 nt, Vaccinia virus
auaaauauaauaacaa

SEQ ID NO: 4060445 - RNA, 19 nt, Vaccinia virus
auaaauaucauuaauauau

SEQ ID NO: 4060446 - RNA, 21 nt, Vaccinia virus
auaaauaugcaaagucuaaau

SEQ ID NO: 4060447 - RNA, 20 nt, Vaccinia virus
auaaaucaagaucauaauua

SEQ ID NO: 4060448 - RNA, 21 nt, Vaccinia virus
auaaaucacuuuuuauacuaa

SEQ ID NO: 4060449 - RNA, 13 nt, Vaccinia virus
auaaaucauauaa

SEQ ID NO: 4060450 - RNA, 12 nt, Vaccinia virus
auaaaucauauu

SEQ ID NO: 4060451 - RNA, 20 nt, Vaccinia virus
auaaauuaggagauaaucua

SEQ ID NO: 4060452 - RNA, 14 nt, Vaccinia virus
auaaauuauaucua

SEQ ID NO: 4060453 - RNA, 18 nt, Vaccinia virus
auaaauuaucaaauacuu

SEQ ID NO: 4060454 - RNA, 14 nt, Vaccinia virus
auaaauuauuucau

SEQ ID NO: 4060455 - RNA, 14 nt, Vaccinia virus
auaaauucuagcau

SEQ ID NO: 4060456 - RNA, 17 nt, Vaccinia virus
auaaauuugucauuuau

SEQ ID NO: 4060457 - RNA, 15 nt, Vaccinia virus
auaacaaguaugaca

SEQ ID NO: 4060458 - RNA, 15 nt, Vaccinia virus
auaacaaucguauau

SEQ ID NO: 4060459 - RNA, 15 nt, Vaccinia virus
auaacaauuaacaau

SEQ ID NO: 4060460 - RNA, 17 nt, Vaccinia virus
auaacacaaaaugugaa

SEQ ID NO: 4060461 - RNA, 19 nt, Vaccinia virus
auaacagagccaucuguaa

SEQ ID NO: 4060462 - RNA, 21 nt, Vaccinia virus
auaacagagccaucuguaaaa

SEQ ID NO: 4060463 - RNA, 18 nt, Vaccinia virus
auaacaggggaaugaaca

SEQ ID NO: 4060464 - RNA, 18 nt, Vaccinia virus
auaacauucuaggaaugu

SEQ ID NO: 4060465 - RNA, 15 nt, Vaccinia virus
auaacauugauguau

SEQ ID NO: 4060466 - RNA, 22 nt, Vaccinia virus
auaaccacaucuggaaggcuua

SEQ ID NO: 4060467 - RNA, 19 nt, Vaccinia virus
auaaccucuccuauaugaa

SEQ ID NO: 4060468 - RNA, 13 nt, Vaccinia virus
auaaccuuuuccu

SEQ ID NO: 4060469 - RNA, 22 nt, Vaccinia virus
auaacgaguacauucugcaaua

SEQ ID NO: 4060470 - RNA, 16 nt, Vaccinia virus
auaacgauaacgauau

SEQ ID NO: 4060471 - RNA, 21 nt, Vaccinia virus
auaacuagcuuaaacagauga

SEQ ID NO: 4060472 - RNA, 15 nt, Vaccinia virus
auaacuauguuuuaa

SEQ ID NO: 4060473 - RNA, 16 nt, Vaccinia virus
auaacucuucgucaaa

SEQ ID NO: 4060474 - RNA, 19 nt, Vaccinia virus
auaacuucuagauguagaa

SEQ ID NO: 4060475 - RNA, 16 nt, Vaccinia virus
auaagaaauauauacu

SEQ ID NO: 4060476 - RNA, 14 nt, Vaccinia virus
auaagaauaaagua

SEQ ID NO: 4060477 - RNA, 14 nt, Vaccinia virus
auaagacuuuacuu

SEQ ID NO: 4060478 - RNA, 22 nt, Vaccinia virus
auaagaguguaguaucauagau

SEQ ID NO: 4060479 - RNA, 13 nt, Vaccinia virus
auaagauaucuuc

SEQ ID NO: 4060480 - RNA, 23 nt, Vaccinia virus
auaagaugacuguagaacucaug

SEQ ID NO: 4060481 - RNA, 15 nt, Vaccinia virus
auaagauuaguaaca

SEQ ID NO: 4060482 - RNA, 23 nt, Vaccinia virus
auaagcuauaauaauaaauguau

SEQ ID NO: 4060483 - RNA, 13 nt, Vaccinia virus
auaaguaguaaua

SEQ ID NO: 4060484 - RNA, 15 nt, Vaccinia virus
auaaguuucauagau

SEQ ID NO: 4060485 - RNA, 15 nt, Vaccinia virus
auaauaaaucaaaau

SEQ ID NO: 4060486 - RNA, 16 nt, Vaccinia virus
auaauaaccagaaagu

SEQ ID NO: 4060487 - RNA, 14 nt, Vaccinia virus
auaauaauaaaugu

SEQ ID NO: 4060488 - RNA, 17 nt, Vaccinia virus
auaauaauccagaaugu

SEQ ID NO: 4060489 - RNA, 19 nt, Vaccinia virus
auaauaaucucgucgaugu

SEQ ID NO: 4060490 - RNA, 16 nt, Vaccinia virus
auaauacaaaugacua

SEQ ID NO: 4060491 - RNA, 19 nt, Vaccinia virus
auaauacggacuucauaau

SEQ ID NO: 4060492 - RNA, 18 nt, Vaccinia virus
auaauagauuuaucuagu

SEQ ID NO: 4060493 - RNA, 17 nt, Vaccinia virus
auaauagccaaucgauu

SEQ ID NO: 4060494 - RNA, 21 nt, Vaccinia virus
auaauaggagguaaugauaug

SEQ ID NO: 4060495 - RNA, 16 nt, Vaccinia virus
auaauaggauaagacu

SEQ ID NO: 4060496 - RNA, 16 nt, Vaccinia virus
auaauaggguaucuaa

SEQ ID NO: 4060497 - RNA, 20 nt, Vaccinia virus
auaauaguacgacuuuaaau

SEQ ID NO: 4060498 - RNA, 16 nt, Vaccinia virus
auaauauaucaaacau

SEQ ID NO: 4060499 - RNA, 22 nt, Vaccinia virus
auaauaucggucuuauucuuaa

SEQ ID NO: 4060500 - RNA, 13 nt, Vaccinia virus
auaauaucuauau

SEQ ID NO: 4060501 - RNA, 14 nt, Vaccinia virus
auaauauuaaauau

SEQ ID NO: 4060502 - RNA, 19 nt, Vaccinia virus
auaauauuuuaauagauua

SEQ ID NO: 4060503 - RNA, 19 nt, Vaccinia virus
auaaucaaaauugucuaug

SEQ ID NO: 4060504 - RNA, 22 nt, Vaccinia virus
auaaucaaaauugucuaugaug

SEQ ID NO: 4060505 - RNA, 16 nt, Vaccinia virus
auaaucaauguuguaa

SEQ ID NO: 4060506 - RNA, 14 nt, Vaccinia virus
auaaucauucuuaa

SEQ ID NO: 4060507 - RNA, 18 nt, Vaccinia virus
auaaucuaaaauaguucu

SEQ ID NO: 4060508 - RNA, 14 nt, Vaccinia virus
auaaugaucauaua

SEQ ID NO: 4060509 - RNA, 15 nt, Vaccinia virus
auaaugaucauauag

SEQ ID NO: 4060510 - RNA, 17 nt, Vaccinia virus
auaauguagaagaucau

SEQ ID NO: 4060511 - RNA, 16 nt, Vaccinia virus
auaaugucaugucuag

SEQ ID NO: 4060512 - RNA, 13 nt, Vaccinia virus
auaauuaauacaa

SEQ ID NO: 4060513 - RNA, 14 nt, Vaccinia virus
auaauuauaagacu

SEQ ID NO: 4060514 - RNA, 15 nt, Vaccinia virus
auaauuauuagaaua

SEQ ID NO: 4060515 - RNA, 18 nt, Vaccinia virus
aggguaucuaauuuccug

SEQ ID NO: 4060516 - RNA, 22 nt, Vaccinia virus
agguacauggucuagauguaaa

SEQ ID NO: 4060517 - RNA, 19 nt, Vaccinia virus
agguacuauaauauuaaaa

SEQ ID NO: 4060518 - RNA, 16 nt, Vaccinia virus
aggucagaaaaaauuu

SEQ ID NO: 4060519 - RNA, 20 nt, Vaccinia virus
aggucuaccgcauacgaaau

SEQ ID NO: 4060520 - RNA, 21 nt, Vaccinia virus
aggucuauuaggccucagaau

SEQ ID NO: 4060521 - RNA, 19 nt, Vaccinia virus
agguguguuuuuuaccauu

SEQ ID NO: 4060522 - RNA, 23 nt, Vaccinia virus
agguguuccggagaaucaguaaa

SEQ ID NO: 4060523 - RNA, 16 nt, Vaccinia virus
agguuaaauagaaugc

SEQ ID NO: 4060524 - RNA, 15 nt, Vaccinia virus
agguuuaguaucuca

SEQ ID NO: 4060525 - RNA, 19 nt, Vaccinia virus
agguuuauauauucaauau

SEQ ID NO: 4060526 - RNA, 22 nt, Vaccinia virus
agguuuugcaacauguuaaaau

SEQ ID NO: 4060527 - RNA, 20 nt, Vaccinia virus
aguaaacauaucauaauauu

SEQ ID NO: 4060528 - RNA, 22 nt, Vaccinia virus
aguaaacuugacuaaaucuuaa

SEQ ID NO: 4060529 - RNA, 19 nt, Vaccinia virus
aguaaagauuucaaagaug

SEQ ID NO: 4060530 - RNA, 16 nt, Vaccinia virus
aguaaagucaggacug

SEQ ID NO: 4060531 - RNA, 16 nt, Vaccinia virus
aguaaauaauaaaaca

SEQ ID NO: 4060532 - RNA, 20 nt, Vaccinia virus
aguaacagucugaacgcauu

SEQ ID NO: 4060533 - RNA, 15 nt, Vaccinia virus
aguaaguaugauauc

SEQ ID NO: 4060534 - RNA, 17 nt, Vaccinia virus
aguaaguuuaugauggu

SEQ ID NO: 4060535 - RNA, 17 nt, Vaccinia virus
aguaauaucaugucuaa

SEQ ID NO: 4060536 - RNA, 20 nt, Vaccinia virus
aguaaucauauaaauguuua

SEQ ID NO: 4060537 - RNA, 22 nt, Vaccinia virus
aguacccacugaugagauguua

SEQ ID NO: 4060538 - RNA, 23 nt, Vaccinia virus
aguacgaugcaaugaguaagaca

SEQ ID NO: 4060539 - RNA, 22 nt, Vaccinia virus
aguacucucucauaaaguggau

SEQ ID NO: 4060540 - RNA, 13 nt, Vaccinia virus
aguacuuaaugaa

SEQ ID NO: 4060541 - RNA, 15 nt, Vaccinia virus
aguacuuguacacau

SEQ ID NO: 4060542 - RNA, 21 nt, Vaccinia virus
aguacuuugaugauuuuucca

SEQ ID NO: 4060543 - RNA, 14 nt, Vaccinia virus
aguagaaaauaaua

SEQ ID NO: 4060544 - RNA, 22 nt, Vaccinia virus
aguagaaaauacaacggauauc

SEQ ID NO: 4060545 - RNA, 22 nt, Vaccinia virus
aguagagauucggguacuguau

SEQ ID NO: 4060546 - RNA, 17 nt, Vaccinia virus
aguagauacauaucaau

SEQ ID NO: 4060547 - RNA, 22 nt, Vaccinia virus
aguagauacauaucaauaucau

SEQ ID NO: 4060548 - RNA, 15 nt, Vaccinia virus
aguagauuuaauagu

SEQ ID NO: 4060549 - RNA, 15 nt, Vaccinia virus
aguaguucaacauaa

SEQ ID NO: 4060550 - RNA, 17 nt, Vaccinia virus
aguaguuuaugauaaag

SEQ ID NO: 4060551 - RNA, 13 nt, Vaccinia virus
aguauaauguaaa

SEQ ID NO: 4060552 - RNA, 22 nt, Vaccinia virus
aguauaccaugaccuucuucau

SEQ ID NO: 4060553 - RNA, 18 nt, Vaccinia virus
aguauacuaucgucauuu

SEQ ID NO: 4060554 - RNA, 21 nt, Vaccinia virus
aguauauauaaguuauugcau

SEQ ID NO: 4060555 - RNA, 19 nt, Vaccinia virus
aguauaugggcgauauucu

SEQ ID NO: 4060556 - RNA, 23 nt, Vaccinia virus
aguaucaagauguaaaauacuua

SEQ ID NO: 4060557 - RNA, 21 nt, Vaccinia virus
aguaugaagaccuauuaauaa

SEQ ID NO: 4060558 - RNA, 19 nt, Vaccinia virus
aguaugaaguugaacuaau

SEQ ID NO: 4060559 - RNA, 21 nt, Vaccinia virus
aguaugacauuguaaaagaca

SEQ ID NO: 4060560 - RNA, 14 nt, Vaccinia virus
aguaugcaauauau

SEQ ID NO: 4060561 - RNA, 15 nt, Vaccinia virus
aguauguaaaaaugu

SEQ ID NO: 4060562 - RNA, 13 nt, Vaccinia virus
aguauguaacaga

SEQ ID NO: 4060563 - RNA, 16 nt, Vaccinia virus
aguauguuuaauauga

SEQ ID NO: 4060564 - RNA, 14 nt, Vaccinia virus
aguauuaaauauua

SEQ ID NO: 4060565 - RNA, 21 nt, Vaccinia virus
aguauuaaauauuaauaagaa

SEQ ID NO: 4060566 - RNA, 22 nt, Vaccinia virus
aguauuaaccaugaaagaaaga

SEQ ID NO: 4060567 - RNA, 18 nt, Vaccinia virus
aguauuagucauaaacuu

SEQ ID NO: 4060568 - RNA, 13 nt, Vaccinia virus
aguauuaucaaag

SEQ ID NO: 4060569 - RNA, 19 nt, Vaccinia virus
aguauucgccccaaaggau

SEQ ID NO: 4060570 - RNA, 16 nt, Vaccinia virus
aguauugaaacuauau

SEQ ID NO: 4060571 - RNA, 16 nt, Vaccinia virus
aguauuucuuacucaa

SEQ ID NO: 4060572 - RNA, 12 nt, Vaccinia virus
aguauuuucuau

SEQ ID NO: 4060573 - RNA, 19 nt, Vaccinia virus
aguauuuuuacaaaaaugu

SEQ ID NO: 4060574 - RNA, 19 nt, Vaccinia virus
agucacugccguucuaaug

SEQ ID NO: 4060575 - RNA, 19 nt, Vaccinia virus
agucagaggaacauuaaac

SEQ ID NO: 4060576 - RNA, 23 nt, Vaccinia virus
agucagcuggucuaaaauuucca

SEQ ID NO: 4060577 - RNA, 17 nt, Vaccinia virus
agucauagaaaaauaua

SEQ ID NO: 4060578 - RNA, 17 nt, Vaccinia virus
agucauguuaaaaauga

SEQ ID NO: 4060579 - RNA, 13 nt, Vaccinia virus
agucauuguuuua

SEQ ID NO: 4060580 - RNA, 15 nt, Vaccinia virus
agucgguauuucauc

SEQ ID NO: 4060581 - RNA, 18 nt, Vaccinia virus
agucguuuauuaucuugu

SEQ ID NO: 4060582 - RNA, 17 nt, Vaccinia virus
agucuacugcuagaaaa

SEQ ID NO: 4060583 - RNA, 19 nt, Vaccinia virus
agucuagguucacaaugaa

SEQ ID NO: 4060584 - RNA, 22 nt, Vaccinia virus
agucuaucgccuuagauacuuu

SEQ ID NO: 4060585 - RNA, 17 nt, Vaccinia virus
agucuccagaaaucugu

SEQ ID NO: 4060586 - RNA, 15 nt, Vaccinia virus
agucucuugguuuua

SEQ ID NO: 4060587 - RNA, 16 nt, Vaccinia virus
agugaaaaguucacau

SEQ ID NO: 4060588 - RNA, 19 nt, Vaccinia virus
agugaaauguugucauuau

SEQ ID NO: 4060589 - RNA, 23 nt, Vaccinia virus
agugaauauaucauuaggauuua

SEQ ID NO: 4060590 - RNA, 15 nt, Vaccinia virus
agugacaaaaugcua

SEQ ID NO: 4060591 - RNA, 19 nt, Vaccinia virus
agugacaacaaaaaaugaa

SEQ ID NO: 4060592 - RNA, 21 nt, Vaccinia virus
agugauaaguaauaacuaugu

SEQ ID NO: 4060593 - RNA, 16 nt, Vaccinia virus
agugauaugaacauau

SEQ ID NO: 4060594 - RNA, 22 nt, Vaccinia virus
agugaugauaacacauauucau

SEQ ID NO: 4060595 - RNA, 15 nt, Vaccinia virus
agugcaaugaauauc

SEQ ID NO: 4060596 - RNA, 15 nt, Vaccinia virus
agugcacguuuacau

SEQ ID NO: 4060597 - RNA, 20 nt, Vaccinia virus
agugcacucucuaccacaau

SEQ ID NO: 4060598 - RNA, 21 nt, Vaccinia virus
agugcuauggaacaaaacaau

SEQ ID NO: 4060599 - RNA, 13 nt, Vaccinia virus
agugcuucuucuu

SEQ ID NO: 4060600 - RNA, 14 nt, Vaccinia virus
aguggaguaauuua

SEQ ID NO: 4060601 - RNA, 14 nt, Vaccinia virus
aguggauucuucua

SEQ ID NO: 4060602 - RNA, 23 nt, Vaccinia virus
agugguaggucauacuccaucaa

SEQ ID NO: 4060603 - RNA, 20 nt, Vaccinia virus
agugguauauaauccaucaa

SEQ ID NO: 4060604 - RNA, 15 nt, Vaccinia virus
agugguauaucuugu

SEQ ID NO: 4060605 - RNA, 15 nt, Vaccinia virus
aguguagauaugaua

SEQ ID NO: 4060606 - RNA, 16 nt, Vaccinia virus
agugucuauaaaugua

SEQ ID NO: 4060607 - RNA, 23 nt, Vaccinia virus
agugugaauaugaucuucaucua

SEQ ID NO: 4060608 - RNA, 16 nt, Vaccinia virus
aguguuauaaauggau

SEQ ID NO: 4060609 - RNA, 24 nt, Vaccinia virus
aguguuuagcguggcuagaauagu

SEQ ID NO: 4060610 - RNA, 16 nt, Vaccinia virus
aguuaaggauaauaag

SEQ ID NO: 4060611 - RNA, 14 nt, Vaccinia virus
aguuaauaaaaucu

SEQ ID NO: 4060612 - RNA, 17 nt, Vaccinia virus
aguuaauauuauugggu

SEQ ID NO: 4060613 - RNA, 17 nt, Vaccinia virus
aguuaauggagaaauac

SEQ ID NO: 4060614 - RNA, 22 nt, Vaccinia virus
aguuacucuuggucuaauacug

SEQ ID NO: 4060615 - RNA, 15 nt, Vaccinia virus
aguuauaaguuugaa

SEQ ID NO: 4060616 - RNA, 13 nt, Vaccinia virus
aguuauauauacu

SEQ ID NO: 4060617 - RNA, 13 nt, Vaccinia virus
aguuauaugaaua

SEQ ID NO: 4060618 - RNA, 15 nt, Vaccinia virus
aguuaucaaguuugu

SEQ ID NO: 4060619 - RNA, 17 nt, Vaccinia virus
aguuaucccacuagaga

SEQ ID NO: 4060620 - RNA, 18 nt, Vaccinia virus
aguuaucuaucuuaaaaa

SEQ ID NO: 4060621 - RNA, 22 nt, Vaccinia virus
aguuaucugguaaguucauuau

SEQ ID NO: 4060622 - RNA, 20 nt, Vaccinia virus
aguucaccaaacaacuuuua

SEQ ID NO: 4060623 - RNA, 11 nt, Vaccinia virus
aguucaguuuu

SEQ ID NO: 4060624 - RNA, 17 nt, Vaccinia virus
aguucauaaaaauaaua

SEQ ID NO: 4060625 - RNA, 13 nt, Vaccinia virus
agauauacgcuau

SEQ ID NO: 4060626 - RNA, 15 nt, Vaccinia virus
agauauacuacuucu

SEQ ID NO: 4060627 - RNA, 18 nt, Vaccinia virus
agauauagaagauaaaca

SEQ ID NO: 4060628 - RNA, 14 nt, Vaccinia virus
agauauagauguua

SEQ ID NO: 4060629 - RNA, 15 nt, Vaccinia virus
agauauauuauaauu

SEQ ID NO: 4060630 - RNA, 13 nt, Vaccinia virus
agauauauuggag

SEQ ID NO: 4060631 - RNA, 15 nt, Vaccinia virus
agauauccagaguuu

SEQ ID NO: 4060632 - RNA, 19 nt, Vaccinia virus
agauaucgacgguauguau

SEQ ID NO: 4060633 - RNA, 20 nt, Vaccinia virus
agauaucgccuuuauuucca

SEQ ID NO: 4060634 - RNA, 15 nt, Vaccinia virus
agauaucuauacuua

SEQ ID NO: 4060635 - RNA, 14 nt, Vaccinia virus
agauaucuucucaa

SEQ ID NO: 4060636 - RNA, 21 nt, Vaccinia virus
agauaugaauuugauaagacu

SEQ ID NO: 4060637 - RNA, 18 nt, Vaccinia virus
agauaugccagaacuauu

SEQ ID NO: 4060638 - RNA, 20 nt, Vaccinia virus
agauaugugauaaaaaucgu

SEQ ID NO: 4060639 - RNA, 19 nt, Vaccinia virus
agauauguuuagagaaugc

SEQ ID NO: 4060640 - RNA, 23 nt, Vaccinia virus
agauauuagucaaggaugugauu

SEQ ID NO: 4060641 - RNA, 23 nt, Vaccinia virus
agauauuauacaaaauacuauau

SEQ ID NO: 4060642 - RNA, 19 nt, Vaccinia virus
agauauuccgacaaaggau

SEQ ID NO: 4060643 - RNA, 19 nt, Vaccinia virus
agauauuuggcuaaacuau

SEQ ID NO: 4060644 - RNA, 16 nt, Vaccinia virus
agaucaaaacaaaauu

SEQ ID NO: 4060645 - RNA, 17 nt, Vaccinia virus
agaucaucaaaauaugu

SEQ ID NO: 4060646 - RNA, 13 nt, Vaccinia virus
agaucauuaaaug

SEQ ID NO: 4060647 - RNA, 17 nt, Vaccinia virus
agaucauuugaaauuau

SEQ ID NO: 4060648 - RNA, 19 nt, Vaccinia virus
agauccaaagaagauguuc

SEQ ID NO: 4060649 - RNA, 13 nt, Vaccinia virus
agaucccacauca

SEQ ID NO: 4060650 - RNA, 15 nt, Vaccinia virus
agaucgauagacacu

SEQ ID NO: 4060651 - RNA, 22 nt, Vaccinia virus
agaucugauaauauuaaaaagu

SEQ ID NO: 4060652 - RNA, 16 nt, Vaccinia virus
agaucuuaagaaaauu

SEQ ID NO: 4060653 - RNA, 18 nt, Vaccinia virus
agaucuucguuaaaaagu

SEQ ID NO: 4060654 - RNA, 13 nt, Vaccinia virus
agaugaaaaaugg

SEQ ID NO: 4060655 - RNA, 15 nt, Vaccinia virus
agaugaaauagcguu

SEQ ID NO: 4060656 - RNA, 19 nt, Vaccinia virus
agaugaggauagcaaaaua

SEQ ID NO: 4060657 - RNA, 18 nt, Vaccinia virus
agaugauguuaacuaugu

SEQ ID NO: 4060658 - RNA, 19 nt, Vaccinia virus
agaugauucgauaaauaga

SEQ ID NO: 4060659 - RNA, 18 nt, Vaccinia virus
agaugccaagauaucuau

SEQ ID NO: 4060660 - RNA, 21 nt, Vaccinia virus
agaugccaagauaucuauaua

SEQ ID NO: 4060661 - RNA, 13 nt, Vaccinia virus
agaugccauauca

SEQ ID NO: 4060662 - RNA, 19 nt, Vaccinia virus
agaugcuauaucaaaauau

SEQ ID NO: 4060663 - RNA, 17 nt, Vaccinia virus
agaugcugcuccuggau

SEQ ID NO: 4060664 - RNA, 14 nt, Vaccinia virus
agauguaaauauau

SEQ ID NO: 4060665 - RNA, 14 nt, Vaccinia virus
agauguauacuccu

SEQ ID NO: 4060666 - RNA, 12 nt, Vaccinia virus
agaugucauuau

SEQ ID NO: 4060667 - RNA, 22 nt, Vaccinia virus
agaugucguuagaaucauuuau

SEQ ID NO: 4060668 - RNA, 16 nt, Vaccinia virus
agauguguauguuugu

SEQ ID NO: 4060669 - RNA, 21 nt, Vaccinia virus
agauuaaaauuaacaaaauua

SEQ ID NO: 4060670 - RNA, 24 nt, Vaccinia virus
agauuaucuaguuagaacuaucau

SEQ ID NO: 4060671 - RNA, 17 nt, Vaccinia virus
agauuauggagcaaaca

SEQ ID NO: 4060672 - RNA, 20 nt, Vaccinia virus
agauucagaauuucuacaua

SEQ ID NO: 4060673 - RNA, 14 nt, Vaccinia virus
agauucccaaauaa

SEQ ID NO: 4060674 - RNA, 21 nt, Vaccinia virus
agauuccuucuacugcagcaa

SEQ ID NO: 4060675 - RNA, 20 nt, Vaccinia virus
agauucuggaggagauggau

SEQ ID NO: 4060676 - RNA, 15 nt, Vaccinia virus
agauugaaauuauau

SEQ ID NO: 4060677 - RNA, 19 nt, Vaccinia virus
agauugaaugccauuuacg

SEQ ID NO: 4060678 - RNA, 13 nt, Vaccinia virus
agauuguacuucu

SEQ ID NO: 4060679 - RNA, 22 nt, Vaccinia virus
agauuguuuaagaagagaauua

SEQ ID NO: 4060680 - RNA, 20 nt, Vaccinia virus
agauuuauugaaaaugugua

SEQ ID NO: 4060681 - RNA, 22 nt, Vaccinia virus
agauuugcauuucuauacuugu

SEQ ID NO: 4060682 - RNA, 19 nt, Vaccinia virus
agauuugccauauauggau

SEQ ID NO: 4060683 - RNA, 23 nt, Vaccinia virus
agauuuuccauccacaauuauug

SEQ ID NO: 4060684 - RNA, 18 nt, Vaccinia virus
agauuuuggugaaauuau

SEQ ID NO: 4060685 - RNA, 15 nt, Vaccinia virus
agcaaaacaaaauua

SEQ ID NO: 4060686 - RNA, 16 nt, Vaccinia virus
agcaagagaaucauca

SEQ ID NO: 4060687 - RNA, 15 nt, Vaccinia virus
agcaauaguauaauu

SEQ ID NO: 4060688 - RNA, 16 nt, Vaccinia virus
agcacaagauuuccaa

SEQ ID NO: 4060689 - RNA, 15 nt, Vaccinia virus
agcacaucaaaugau

SEQ ID NO: 4060690 - RNA, 22 nt, Vaccinia virus
agcacgaucgugguuaacaaua

SEQ ID NO: 4060691 - RNA, 17 nt, Vaccinia virus
agcacuguggaugugac

SEQ ID NO: 4060692 - RNA, 13 nt, Vaccinia virus
agcagcgauuuug

SEQ ID NO: 4060693 - RNA, 13 nt, Vaccinia virus
agcaguuuauuau

SEQ ID NO: 4060694 - RNA, 16 nt, Vaccinia virus
agcaguuuauuaucca

SEQ ID NO: 4060695 - RNA, 19 nt, Vaccinia virus
agcauaaacauaauaaaca

SEQ ID NO: 4060696 - RNA, 19 nt, Vaccinia virus
agcauacgaauuacaauaa

SEQ ID NO: 4060697 - RNA, 12 nt, Vaccinia virus
agcauacucuau

SEQ ID NO: 4060698 - RNA, 13 nt, Vaccinia virus
agcauauaacuaa

SEQ ID NO: 4060699 - RNA, 12 nt, Vaccinia virus
agcauauguuua

SEQ ID NO: 4060700 - RNA, 11 nt, Vaccinia virus
agcauauuaaa

SEQ ID NO: 4060701 - RNA, 19 nt, Vaccinia virus
agcaucagcaaaacaguua

SEQ ID NO: 4060702 - RNA, 16 nt, Vaccinia virus
agcauccaguaugaau

SEQ ID NO: 4060703 - RNA, 23 nt, Vaccinia virus
agcauccuauucgaauaaugagu

SEQ ID NO: 4060704 - RNA, 11 nt, Vaccinia virus
agcauguagac

SEQ ID NO: 4060705 - RNA, 15 nt, Vaccinia virus
agcauuuuuauaauu

SEQ ID NO: 4060706 - RNA, 15 nt, Vaccinia virus
agccaauacuuuaac

SEQ ID NO: 4060707 - RNA, 22 nt, Vaccinia virus
agccaaucaaaaagauuagaca

SEQ ID NO: 4060708 - RNA, 22 nt, Vaccinia virus
agccauguugauaaacuacuua

SEQ ID NO: 4060709 - RNA, 14 nt, Vaccinia virus
agccuagaaaucaa

SEQ ID NO: 4060710 - RNA, 20 nt, Vaccinia virus
agccugaagcucaucuuguu

SEQ ID NO: 4060711 - RNA, 21 nt, Vaccinia virus
agccugaguaguuggaagaau

SEQ ID NO: 4060712 - RNA, 21 nt, Vaccinia virus
agcgaugauauguuaaauaua

SEQ ID NO: 4060713 - RNA, 16 nt, Vaccinia virus
agcgcuuccuaaauaa

SEQ ID NO: 4060714 - RNA, 15 nt, Vaccinia virus
agcguaucuauaauu

SEQ ID NO: 4060715 - RNA, 19 nt, Vaccinia virus
agcguuaacuaucaaacaa

SEQ ID NO: 4060716 - RNA, 18 nt, Vaccinia virus
agcuaaagacucuaaaug

SEQ ID NO: 4060717 - RNA, 21 nt, Vaccinia virus
agcuagagugauaauuucguu

SEQ ID NO: 4060718 - RNA, 15 nt, Vaccinia virus
agcuauauagaugac

SEQ ID NO: 4060719 - RNA, 17 nt, Vaccinia virus
agcuaucaagucuuuau

SEQ ID NO: 4060720 - RNA, 14 nt, Vaccinia virus
agcuaugaacuugu

SEQ ID NO: 4060721 - RNA, 17 nt, Vaccinia virus
agcuauguuuacugcug

SEQ ID NO: 4060722 - RNA, 15 nt, Vaccinia virus
agcucaauauaaaug

SEQ ID NO: 4060723 - RNA, 21 nt, Vaccinia virus
agcuccuacaggaauaucuuu

SEQ ID NO: 4060724 - RNA, 13 nt, Vaccinia virus
agcugaaaugaga

SEQ ID NO: 4060725 - RNA, 15 nt, Vaccinia virus
agcuguucaaaauau

SEQ ID NO: 4060726 - RNA, 21 nt, Vaccinia virus
agcuguuccaauaaauuauuu

SEQ ID NO: 4060727 - RNA, 18 nt, Vaccinia virus
agcuuaaacagaugagac

SEQ ID NO: 4060728 - RNA, 21 nt, Vaccinia virus
agcuucaucuauaucuagauu

SEQ ID NO: 4060729 - RNA, 14 nt, Vaccinia virus
agcuuccagauaca

SEQ ID NO: 4060730 - RNA, 16 nt, Vaccinia virus
agcuuccagauuuaaa

SEQ ID NO: 4060731 - RNA, 21 nt, Vaccinia virus
agcuuccagauuuaaaaaggu

SEQ ID NO: 4060732 - RNA, 19 nt, Vaccinia virus
agcuucuccuccuauuugu

SEQ ID NO: 4060733 - RNA, 14 nt, Vaccinia virus
agcuucugaaauaa

SEQ ID NO: 4060734 - RNA, 16 nt, Vaccinia virus
agcuuuacucugaaaa

SEQ ID NO: 4060735 - RNA, 22 nt, Vaccinia virus
agcuuuuguucacaaaaauaca

SEQ ID NO: 4060736 - RNA, 12 nt, Vaccinia virus
aggaaacuauaa

SEQ ID NO: 4060737 - RNA, 12 nt, Vaccinia virus
aggaaauacuug

SEQ ID NO: 4060738 - RNA, 22 nt, Vaccinia virus
aggaaaucccaccgccuuucug

SEQ ID NO: 4060739 - RNA, 12 nt, Vaccinia virus
aggaaugagagu

SEQ ID NO: 4060740 - RNA, 18 nt, Vaccinia virus
aggaaugccacaaaugaa

SEQ ID NO: 4060741 - RNA, 17 nt, Vaccinia virus
aggacagaaaaaugcua

SEQ ID NO: 4060742 - RNA, 22 nt, Vaccinia virus
aggaccacuagcaaaagauaaa

SEQ ID NO: 4060743 - RNA, 13 nt, Vaccinia virus
aggagaaguaaua

SEQ ID NO: 4060744 - RNA, 17 nt, Vaccinia virus
aggagcaccagaaguau

SEQ ID NO: 4060745 - RNA, 19 nt, Vaccinia virus
aggagguauauaucaugau

SEQ ID NO: 4060746 - RNA, 20 nt, Vaccinia virus
aggauaaaaucguuuauccu

SEQ ID NO: 4060747 - RNA, 20 nt, Vaccinia virus
aggauacauaaaauuuaaga

SEQ ID NO: 4060748 - RNA, 21 nt, Vaccinia virus
aggauaccguuaaauauaacu

SEQ ID NO: 4060749 - RNA, 16 nt, Vaccinia virus
aggauacucuaugaau

SEQ ID NO: 4060750 - RNA, 21 nt, Vaccinia virus
aggauaucucaaaaaauaaua

SEQ ID NO: 4060751 - RNA, 23 nt, Vaccinia virus
aggauauuagcgaauauaucaaa

SEQ ID NO: 4060752 - RNA, 14 nt, Vaccinia virus
aaguaccuggaaug

SEQ ID NO: 4060753 - RNA, 22 nt, Vaccinia virus
aaguacuguucaaacaugauga

SEQ ID NO: 4060754 - RNA, 18 nt, Vaccinia virus
aaguaguaauaaugauuc

SEQ ID NO: 4060755 - RNA, 16 nt, Vaccinia virus
aaguaguauaaaagua

SEQ ID NO: 4060756 - RNA, 11 nt, Vaccinia virus
aaguauaacga

SEQ ID NO: 4060757 - RNA, 13 nt, Vaccinia virus
aaguauaauucuu

SEQ ID NO: 4060758 - RNA, 20 nt, Vaccinia virus
aaguauaucgacauacuacu

SEQ ID NO: 4060759 - RNA, 13 nt, Vaccinia virus
aaguaucaaaucu

SEQ ID NO: 4060760 - RNA, 15 nt, Vaccinia virus
aaguauuuauacaaa

SEQ ID NO: 4060761 - RNA, 14 nt, Vaccinia virus
aagucaucaaucau

SEQ ID NO: 4060762 - RNA, 16 nt, Vaccinia virus
aagucaucgucuacaa

SEQ ID NO: 4060763 - RNA, 21 nt, Vaccinia virus
aagucucgcauguucagcaau

SEQ ID NO: 4060764 - RNA, 18 nt, Vaccinia virus
aagugacaacaaaaaaug

SEQ ID NO: 4060765 - RNA, 21 nt, Vaccinia virus
aagugaucucgagaaauaaua

SEQ ID NO: 4060766 - RNA, 17 nt, Vaccinia virus
aagugucgauuguaaua

SEQ ID NO: 4060767 - RNA, 20 nt, Vaccinia virus
aagugugaugauuguacacu

SEQ ID NO: 4060768 - RNA, 22 nt, Vaccinia virus
aaguguguaaccgcguuaaugu

SEQ ID NO: 4060769 - RNA, 11 nt, Vaccinia virus
aaguuaauagc

SEQ ID NO: 4060770 - RNA, 18 nt, Vaccinia virus
aaguuacuuaaaaugguu

SEQ ID NO: 4060771 - RNA, 23 nt, Vaccinia virus
aaguuagaagagucauuaaaaua

SEQ ID NO: 4060772 - RNA, 17 nt, Vaccinia virus
aaguuauagacaaauua

SEQ ID NO: 4060773 - RNA, 22 nt, Vaccinia virus
aaguuauccaaguuaaaggaua

SEQ ID NO: 4060774 - RNA, 21 nt, Vaccinia virus
aaguuaucucuaacaaaacua

SEQ ID NO: 4060775 - RNA, 18 nt, Vaccinia virus
aaguucauaaaaauaaua

SEQ ID NO: 4060776 - RNA, 19 nt, Vaccinia virus
aaguucauuaucugaaaua

SEQ ID NO: 4060777 - RNA, 18 nt, Vaccinia virus
aaguucuggcaauguuuc

SEQ ID NO: 4060778 - RNA, 15 nt, Vaccinia virus
aaguuuaaaaaagac

SEQ ID NO: 4060779 - RNA, 14 nt, Vaccinia virus
aaguuucaaacugu

SEQ ID NO: 4060780 - RNA, 20 nt, Vaccinia virus
aaguuucaaacuguugacuu

SEQ ID NO: 4060781 - RNA, 20 nt, Vaccinia virus
aaguuucauagauagauaau

SEQ ID NO: 4060782 - RNA, 15 nt, Vaccinia virus
aaguuucguacaaau

SEQ ID NO: 4060783 - RNA, 15 nt, Vaccinia virus
aaguuuguaggaaag

SEQ ID NO: 4060784 - RNA, 20 nt, Vaccinia virus
aaguuuuaucuuucucucuu

SEQ ID NO: 4060785 - RNA, 23 nt, Vaccinia virus
aaguuuuucacccauaaauaaua

SEQ ID NO: 4060786 - RNA, 12 nt, Vaccinia virus
aauaaaaacaag

SEQ ID NO: 4060787 - RNA, 14 nt, Vaccinia virus
aauaaaaauguuuu

SEQ ID NO: 4060788 - RNA, 11 nt, Vaccinia virus
aauaaaacaau

SEQ ID NO: 4060789 - RNA, 17 nt, Vaccinia virus
aauaaaagacaaaucuu

SEQ ID NO: 4060790 - RNA, 20 nt, Vaccinia virus
aauaaaauguuaauacauca

SEQ ID NO: 4060791 - RNA, 14 nt, Vaccinia virus
aauaaaauuaucau

SEQ ID NO: 4060792 - RNA, 17 nt, Vaccinia virus
aauaaacaauuucacaa

SEQ ID NO: 4060793 - RNA, 22 nt, Vaccinia virus
aauaaacuccguagagaaauau

SEQ ID NO: 4060794 - RNA, 12 nt, Vaccinia virus
aauaaauacuuu

SEQ ID NO: 4060795 - RNA, 12 nt, Vaccinia virus
aauaaauaugug

SEQ ID NO: 4060796 - RNA, 24 nt, Vaccinia virus
aauaaauguuuugauuucaauuua

SEQ ID NO: 4060797 - RNA, 21 nt, Vaccinia virus
aauaaauuauuuguugugacu

SEQ ID NO: 4060798 - RNA, 15 nt, Vaccinia virus
aauaaauuuuuccaa

SEQ ID NO: 4060799 - RNA, 13 nt, Vaccinia virus
aauaacaggcuaa

SEQ ID NO: 4060800 - RNA, 20 nt, Vaccinia virus
aauaacuauguuuuaaaaau

SEQ ID NO: 4060801 - RNA, 23 nt, Vaccinia virus
aauaacuucgugaauaauguuuc

SEQ ID NO: 4060802 - RNA, 16 nt, Vaccinia virus
aauaaguguagcaaau

SEQ ID NO: 4060803 - RNA, 13 nt, Vaccinia virus
aauaauaaaugua

SEQ ID NO: 4060804 - RNA, 19 nt, Vaccinia virus
aauaauaauuuaacaaucu

SEQ ID NO: 4060805 - RNA, 23 nt, Vaccinia virus
aauaauacaauauuuuucguuua

SEQ ID NO: 4060806 - RNA, 19 nt, Vaccinia virus
aauaauaucuauauuucca

SEQ ID NO: 4060807 - RNA, 23 nt, Vaccinia virus
aauaauauuugagaguauuggua

SEQ ID NO: 4060808 - RNA, 14 nt, Vaccinia virus
aauaaucauacaau

SEQ ID NO: 4060809 - RNA, 15 nt, Vaccinia virus
aauaaucguuauuau

SEQ ID NO: 4060810 - RNA, 15 nt, Vaccinia virus
agacaacgaauacaa

SEQ ID NO: 4060811 - RNA, 21 nt, Vaccinia virus
agacaaguauccguuugauau

SEQ ID NO: 4060812 - RNA, 22 nt, Vaccinia virus
agacaaguauccguuugauauu

SEQ ID NO: 4060813 - RNA, 19 nt, Vaccinia virus
agacaauaacuaacaauua

SEQ ID NO: 4060814 - RNA, 21 nt, Vaccinia virus
agacaaucaucuuggagcaac

SEQ ID NO: 4060815 - RNA, 21 nt, Vaccinia virus
agacacauaugcgaucagaua

SEQ ID NO: 4060816 - RNA, 16 nt, Vaccinia virus
agacacuaacucuguu

SEQ ID NO: 4060817 - RNA, 18 nt, Vaccinia virus
agacagcgugaauaaugu

SEQ ID NO: 4060818 - RNA, 18 nt, Vaccinia virus
agacagugguuucauguu

SEQ ID NO: 4060819 - RNA, 16 nt, Vaccinia virus
agacauaaaaacuaau

SEQ ID NO: 4060820 - RNA, 15 nt, Vaccinia virus
agacauaagaaauuu

SEQ ID NO: 4060821 - RNA, 21 nt, Vaccinia virus
agacauaucgguaaaaugcau

SEQ ID NO: 4060822 - RNA, 17 nt, Vaccinia virus
agacauaugauaaaacg

SEQ ID NO: 4060823 - RNA, 22 nt, Vaccinia virus
agacauuagaccguuuaauaga

SEQ ID NO: 4060824 - RNA, 12 nt, Vaccinia virus
agaccaaaaauu

SEQ ID NO: 4060825 - RNA, 13 nt, Vaccinia virus
agaccaaacaaua

SEQ ID NO: 4060826 - RNA, 21 nt, Vaccinia virus
agaccaagcuucguuguagaa

SEQ ID NO: 4060827 - RNA, 22 nt, Vaccinia virus
agaccaagcuucguuguagaaa

SEQ ID NO: 4060828 - RNA, 14 nt, Vaccinia virus
agaccaauaauaaa

SEQ ID NO: 4060829 - RNA, 16 nt, Vaccinia virus
agaccauuuaauacga

SEQ ID NO: 4060830 - RNA, 15 nt, Vaccinia virus
agacgaauacauaua

SEQ ID NO: 4060831 - RNA, 22 nt, Vaccinia virus
agacgaggagauuuagaaaugu

SEQ ID NO: 4060832 - RNA, 18 nt, Vaccinia virus
agacgauuaguaauauau

SEQ ID NO: 4060833 - RNA, 16 nt, Vaccinia virus
agacguacuccagaua

SEQ ID NO: 4060834 - RNA, 18 nt, Vaccinia virus
agacguggagaucuagaa

SEQ ID NO: 4060835 - RNA, 22 nt, Vaccinia virus
agacguucacgacacuggaaaa

SEQ ID NO: 4060836 - RNA, 13 nt, Vaccinia virus
agacuaacacaca

SEQ ID NO: 4060837 - RNA, 21 nt, Vaccinia virus
agacuaggugcuauggauggg

SEQ ID NO: 4060838 - RNA, 21 nt, Vaccinia virus
agacuauaccuagagcuauuu

SEQ ID NO: 4060839 - RNA, 22 nt, Vaccinia virus
agacugagauacgcaaagaauc

SEQ ID NO: 4060840 - RNA, 17 nt, Vaccinia virus
agacugguagagaauga

SEQ ID NO: 4060841 - RNA, 17 nt, Vaccinia virus
agacuguuuauacaaga

SEQ ID NO: 4060842 - RNA, 15 nt, Vaccinia virus
agacuguuuguagaa

SEQ ID NO: 4060843 - RNA, 14 nt, Vaccinia virus
agacuugugggaaa

SEQ ID NO: 4060844 - RNA, 17 nt, Vaccinia virus
agacuuucgucaauuug

SEQ ID NO: 4060845 - RNA, 15 nt, Vaccinia virus
agagaacaaauaaua

SEQ ID NO: 4060846 - RNA, 20 nt, Vaccinia virus
agagaagcacucguuauuaa

SEQ ID NO: 4060847 - RNA, 21 nt, Vaccinia virus
agagaagucgucaagcauauu

SEQ ID NO: 4060848 - RNA, 13 nt, Vaccinia virus
agagaauacgcau

SEQ ID NO: 4060849 - RNA, 12 nt, Vaccinia virus
agagaauauacu

SEQ ID NO: 4060850 - RNA, 13 nt, Vaccinia virus
agagaaugauaua

SEQ ID NO: 4060851 - RNA, 21 nt, Vaccinia virus
agagaauugcugcaauauauu

SEQ ID NO: 4060852 - RNA, 14 nt, Vaccinia virus
agagacaaugaaaa

SEQ ID NO: 4060853 - RNA, 15 nt, Vaccinia virus
agagacggaaauagu

SEQ ID NO: 4060854 - RNA, 17 nt, Vaccinia virus
agagacgucauacucuu

SEQ ID NO: 4060855 - RNA, 21 nt, Vaccinia virus
agagauaauauagagguguuu

SEQ ID NO: 4060856 - RNA, 19 nt, Vaccinia virus
agagaucaacgaaaaggaa

SEQ ID NO: 4060857 - RNA, 23 nt, Vaccinia virus
agagauccacugucacuggaaag

SEQ ID NO: 4060858 - RNA, 23 nt, Vaccinia virus
agagaucuacuggcgaaauggua

SEQ ID NO: 4060859 - RNA, 14 nt, Vaccinia virus
agagaugaaaaauu

SEQ ID NO: 4060860 - RNA, 16 nt, Vaccinia virus
agagauuguuaaauua

SEQ ID NO: 4060861 - RNA, 19 nt, Vaccinia virus
agagauuuaacuguucauc

SEQ ID NO: 4060862 - RNA, 15 nt, Vaccinia virus
agagcagcacaaacu

SEQ ID NO: 4060863 - RNA, 18 nt, Vaccinia virus
agagcuuuauuaacuucu

SEQ ID NO: 4060864 - RNA, 22 nt, Vaccinia virus
agaggaaacauggggauugaaa

SEQ ID NO: 4060865 - RNA, 21 nt, Vaccinia virus
agaggaugaaauagauagaau

SEQ ID NO: 4060866 - RNA, 13 nt, Vaccinia virus
agaggauugaugg

SEQ ID NO: 4060867 - RNA, 14 nt, Vaccinia virus
agaggauuuucuag

SEQ ID NO: 4060868 - RNA, 14 nt, Vaccinia virus
agagguaaugaugu

SEQ ID NO: 4060869 - RNA, 21 nt, Vaccinia virus
agaguaaacggcugaacuugu

SEQ ID NO: 4060870 - RNA, 17 nt, Vaccinia virus
agaguagauauuaaugu

SEQ ID NO: 4060871 - RNA, 16 nt, Vaccinia virus
agaguaguauauuguc

SEQ ID NO: 4060872 - RNA, 21 nt, Vaccinia virus
agaguauaaaacauuaaaugu

SEQ ID NO: 4060873 - RNA, 19 nt, Vaccinia virus
agaguaugacgucucucaa

SEQ ID NO: 4060874 - RNA, 18 nt, Vaccinia virus
agagugagucuagaauuc

SEQ ID NO: 4060875 - RNA, 18 nt, Vaccinia virus
agaguguucgaaugccaa

SEQ ID NO: 4060876 - RNA, 13 nt, Vaccinia virus
agaguucauuuau

SEQ ID NO: 4060877 - RNA, 23 nt, Vaccinia virus
agaguucuuacacauaucacugu

SEQ ID NO: 4060878 - RNA, 19 nt, Vaccinia virus
agaguugauuguaaauaca

SEQ ID NO: 4060879 - RNA, 15 nt, Vaccinia virus
agaguuuuauaacga

SEQ ID NO: 4060880 - RNA, 20 nt, Vaccinia virus
agauaaaccguuuauguauu

SEQ ID NO: 4060881 - RNA, 13 nt, Vaccinia virus
agauaaacuuuau

SEQ ID NO: 4060882 - RNA, 18 nt, Vaccinia virus
agauaaacuuuauguauu

SEQ ID NO: 4060883 - RNA, 16 nt, Vaccinia virus
agauaaaguuuauaca

SEQ ID NO: 4060884 - RNA, 12 nt, Vaccinia virus
agauaaauaugg

SEQ ID NO: 4060885 - RNA, 12 nt, Vaccinia virus
agauaaaugguc

SEQ ID NO: 4060886 - RNA, 21 nt, Vaccinia virus
agauaaugauauauuaaacaa

SEQ ID NO: 4060887 - RNA, 14 nt, Vaccinia virus
agauacaaauaugu

SEQ ID NO: 4060888 - RNA, 17 nt, Vaccinia virus
agauacaaauuuuaaga

SEQ ID NO: 4060889 - RNA, 15 nt, Vaccinia virus
agauacagauguaaa

SEQ ID NO: 4060890 - RNA, 14 nt, Vaccinia virus
agauacagauguua

SEQ ID NO: 4060891 - RNA, 17 nt, Vaccinia virus
agauaccaacauuaaaa

SEQ ID NO: 4060892 - RNA, 21 nt, Vaccinia virus
agauaccucaccgaguuaaaa

SEQ ID NO: 4060893 - RNA, 16 nt, Vaccinia virus
agauacguauuagaua

SEQ ID NO: 4060894 - RNA, 19 nt, Vaccinia virus
agauacgugauuaauacau

SEQ ID NO: 4060895 - RNA, 19 nt, Vaccinia virus
agauacuacagaaacuaau

SEQ ID NO: 4060896 - RNA, 16 nt, Vaccinia virus
agauacuauauuuguu

SEQ ID NO: 4060897 - RNA, 15 nt, Vaccinia virus
agauacuuuaauaca

SEQ ID NO: 4060898 - RNA, 19 nt, Vaccinia virus
agauacuuuauuacuccau

SEQ ID NO: 4060899 - RNA, 20 nt, Vaccinia virus
agauacuuuauuacuccauu

SEQ ID NO: 4060900 - RNA, 15 nt, Vaccinia virus
agauagaaacuauag

SEQ ID NO: 4060901 - RNA, 15 nt, Vaccinia virus
agauagaaaugaauu

SEQ ID NO: 4060902 - RNA, 18 nt, Vaccinia virus
agauagcuucaucuauau

SEQ ID NO: 4060903 - RNA, 17 nt, Vaccinia virus
agauaggacgguauaug

SEQ ID NO: 4060904 - RNA, 16 nt, Vaccinia virus
agauaguaaauagaua

SEQ ID NO: 4060905 - RNA, 13 nt, Vaccinia virus
aaaagaauugcuu

SEQ ID NO: 4060906 - RNA, 15 nt, Vaccinia virus
aaaagaccaauaaua

SEQ ID NO: 4060907 - RNA, 21 nt, Vaccinia virus
aaaagacgucacuauuaccaa

SEQ ID NO: 4060908 - RNA, 13 nt, Vaccinia virus
aaaagauaauaca

SEQ ID NO: 4060909 - RNA, 13 nt, Vaccinia virus
aaaagauacguac

SEQ ID NO: 4060910 - RNA, 22 nt, Vaccinia virus
aaaagauggaggauaugguggu

SEQ ID NO: 4060911 - RNA, 14 nt, Vaccinia virus
aaaagauuauacaa

SEQ ID NO: 4060912 - RNA, 12 nt, Vaccinia virus
aaaaggaaaaua

SEQ ID NO: 4060913 - RNA, 21 nt, Vaccinia virus
aaaagguauuacaagaauaua

SEQ ID NO: 4060914 - RNA, 14 nt, Vaccinia virus
aaaaguaaauacug

SEQ ID NO: 4060915 - RNA, 18 nt, Vaccinia virus
aaaaguuccagaaaaugu

SEQ ID NO: 4060916 - RNA, 21 nt, Vaccinia virus
aaaaguuccagaaaauguaga

SEQ ID NO: 4060917 - RNA, 23 nt, Vaccinia virus
aaaaguuuuccaucuauguagaa

SEQ ID NO: 4060918 - RNA, 18 nt, Vaccinia virus
aaaauaaagauaaaaacg

SEQ ID NO: 4060919 - RNA, 23 nt, Vaccinia virus
aaaauacauaugacaaacauugu

SEQ ID NO: 4060920 - RNA, 21 nt, Vaccinia virus
aaaauaccaucaucauagcau

SEQ ID NO: 4060921 - RNA, 13 nt, Vaccinia virus
aaaauacuacugu

SEQ ID NO: 4060922 - RNA, 12 nt, Vaccinia virus
aaaauagcaaag

SEQ ID NO: 4060923 - RNA, 14 nt, Vaccinia virus
aaaauaguucugua

SEQ ID NO: 4060924 - RNA, 16 nt, Vaccinia virus
aaaauauauaguauua

SEQ ID NO: 4060925 - RNA, 13 nt, Vaccinia virus
aaaauauauucua

SEQ ID NO: 4060926 - RNA, 17 nt, Vaccinia virus
aaaauauguaauaauca

SEQ ID NO: 4060927 - RNA, 20 nt, Vaccinia virus
aaaauauuaaaccucuuucu

SEQ ID NO: 4060928 - RNA, 23 nt, Vaccinia virus
aaaaucaggguuaucaaaguguu

SEQ ID NO: 4060929 - RNA, 15 nt, Vaccinia virus
aaaauccuccuauca

SEQ ID NO: 4060930 - RNA, 24 nt, Vaccinia virus
aaaaugaaaauacuuuaguaauua

SEQ ID NO: 4060931 - RNA, 22 nt, Vaccinia virus
aaaaugacaucguugcccggau

SEQ ID NO: 4060932 - RNA, 17 nt, Vaccinia virus
aaaaugcugaagcaaua

SEQ ID NO: 4060933 - RNA, 15 nt, Vaccinia virus
aaaauggauuacuua

SEQ ID NO: 4060934 - RNA, 12 nt, Vaccinia virus
aaaauuagaaag

SEQ ID NO: 4060935 - RNA, 13 nt, Vaccinia virus
aaaauuauaacua

SEQ ID NO: 4060936 - RNA, 21 nt, Vaccinia virus
aaaauuauguuuuuauaucua

SEQ ID NO: 4060937 - RNA, 17 nt, Vaccinia virus
aaaauucuaagguagaa

SEQ ID NO: 4060938 - RNA, 20 nt, Vaccinia virus
aaaauuuaaagaauguauaa

SEQ ID NO: 4060939 - RNA, 14 nt, Vaccinia virus
aaaauuuugaucau

SEQ ID NO: 4060940 - RNA, 13 nt, Vaccinia virus
aaacaaaaaaaag

SEQ ID NO: 4060941 - RNA, 21 nt, Vaccinia virus
aaacaacaaugccauuuuaca

SEQ ID NO: 4060942 - RNA, 16 nt, Vaccinia virus
aaacaacuaaacagua

SEQ ID NO: 4060943 - RNA, 21 nt, Vaccinia virus
aaacaauggucgauuauagaa

SEQ ID NO: 4060944 - RNA, 18 nt, Vaccinia virus
aaacaauguauacaaaug

SEQ ID NO: 4060945 - RNA, 19 nt, Vaccinia virus
aaacaauguauacaaaugu

SEQ ID NO: 4060946 - RNA, 22 nt, Vaccinia virus
aaacaauuucacaaauggaugu

SEQ ID NO: 4060947 - RNA, 13 nt, Vaccinia virus
aaacacauaucca

SEQ ID NO: 4060948 - RNA, 16 nt, Vaccinia virus
aaacacgcuacacaac

SEQ ID NO: 4060949 - RNA, 16 nt, Vaccinia virus
aaacacguuagaguuu

SEQ ID NO: 4060950 - RNA, 18 nt, Vaccinia virus
aaacacugauucagaaau

SEQ ID NO: 4060951 - RNA, 16 nt, Vaccinia virus
aaacauacaucuguuu

SEQ ID NO: 4060952 - RNA, 14 nt, Vaccinia virus
aaacaucauauaca

SEQ ID NO: 4060953 - RNA, 16 nt, Vaccinia virus
aaacaucauugcucca

SEQ ID NO: 4060954 - RNA, 14 nt, Vaccinia virus
aaacauucauguac

SEQ ID NO: 4060955 - RNA, 20 nt, Vaccinia virus
aaaccaacguaggucuaaau

SEQ ID NO: 4060956 - RNA, 20 nt, Vaccinia virus
aaaccaaggacuuuguagaa

SEQ ID NO: 4060957 - RNA, 20 nt, Vaccinia virus
aaaccaggugaguguagaaa

SEQ ID NO: 4060958 - RNA, 16 nt, Vaccinia virus
aaaccaucgucugaau

SEQ ID NO: 4060959 - RNA, 16 nt, Vaccinia virus
aaaccuaaagauguua

SEQ ID NO: 4060960 - RNA, 12 nt, Vaccinia virus
aaacgauuaaac

SEQ ID NO: 4060961 - RNA, 17 nt, Vaccinia virus
aaacuacugauguuauc

SEQ ID NO: 4060962 - RNA, 21 nt, Vaccinia virus
aaacuaggaaucgguaacagu

SEQ ID NO: 4060963 - RNA, 17 nt, Vaccinia virus
aaacuaguucugagaaa

SEQ ID NO: 4060964 - RNA, 12 nt, Vaccinia virus
aaacuauacgaa

SEQ ID NO: 4060965 - RNA, 21 nt, Vaccinia virus
aaacuauuacuaggagaauua

SEQ ID NO: 4060966 - RNA, 18 nt, Vaccinia virus
aaacugaaaauauauuga

SEQ ID NO: 4060967 - RNA, 12 nt, Vaccinia virus
aaacuuacagaa

SEQ ID NO: 4060968 - RNA, 22 nt, Vaccinia virus
aaacuucaaucuguuaagauua

SEQ ID NO: 4060969 - RNA, 17 nt, Vaccinia virus
aaacuucucuaaaugag

SEQ ID NO: 4060970 - RNA, 19 nt, Vaccinia virus
aaacuugauaauuaauaau

SEQ ID NO: 4060971 - RNA, 21 nt, Vaccinia virus
aaacuuuaauaacaaagaaag

SEQ ID NO: 4060972 - RNA, 19 nt, Vaccinia virus
aaacuuuacgauagacuuu

SEQ ID NO: 4060973 - RNA, 13 nt, Vaccinia virus
aaagaauaauccu

SEQ ID NO: 4060974 - RNA, 22 nt, Vaccinia virus
aaagaauuuuuucguguuccaa

SEQ ID NO: 4060975 - RNA, 15 nt, Vaccinia virus
aaagacaaacaaugg

SEQ ID NO: 4060976 - RNA, 14 nt, Vaccinia virus
aaagacaaauauau

SEQ ID NO: 4060977 - RNA, 19 nt, Vaccinia virus
aaagacagcgacaucaaga

SEQ ID NO: 4060978 - RNA, 15 nt, Vaccinia virus
aaagacaucauauau

SEQ ID NO: 4060979 - RNA, 18 nt, Vaccinia virus
aaagaccgaauacauaac

SEQ ID NO: 4060980 - RNA, 15 nt, Vaccinia virus
aaagacgaauacaua

SEQ ID NO: 4060981 - RNA, 24 nt, Vaccinia virus
aaagagaacguauuuauuguuacu

SEQ ID NO: 4060982 - RNA, 14 nt, Vaccinia virus
aaagagaauuauau

SEQ ID NO: 4060983 - RNA, 13 nt, Vaccinia virus
aaagagacuacaa

SEQ ID NO: 4060984 - RNA, 18 nt, Vaccinia virus
aaagaggcugguaacaac

SEQ ID NO: 4060985 - RNA, 22 nt, Vaccinia virus
aaagaguugguaaaauaugaaa

SEQ ID NO: 4060986 - RNA, 13 nt, Vaccinia virus
aaagauaacuauu

SEQ ID NO: 4060987 - RNA, 12 nt, Vaccinia virus
aaagauauuguu

SEQ ID NO: 4060988 - RNA, 15 nt, Vaccinia virus
aaagaugauauaucu

SEQ ID NO: 4060989 - RNA, 24 nt, Vaccinia virus
aaagauuaaaucauuaaaugauug

SEQ ID NO: 4060990 - RNA, 12 nt, Vaccinia virus
aaagauuguaca

SEQ ID NO: 4060991 - RNA, 19 nt, Vaccinia virus
aaagcaauugacuaauaaa

SEQ ID NO: 4060992 - RNA, 15 nt, Vaccinia virus
aaagcauuaauacag

SEQ ID NO: 4060993 - RNA, 23 nt, Vaccinia virus
aaagcuauuaucaaauacuguac

SEQ ID NO: 4060994 - RNA, 17 nt, Vaccinia virus
aaaguauauauaaguua

SEQ ID NO: 4060995 - RNA, 20 nt, Vaccinia virus
aaaguauuuuaauacaugua

SEQ ID NO: 4060996 - RNA, 17 nt, Vaccinia virus
aaagucaucucuuguau

SEQ ID NO: 4060997 - RNA, 18 nt, Vaccinia virus
aaaguuagaugugucaua

SEQ ID NO: 4060998 - RNA, 15 nt, Vaccinia virus
aaaguuaguacagaa

SEQ ID NO: 4060999 - RNA, 21 nt, Vaccinia virus
aaaguuucugaaauaagauua

SEQ ID NO: 4061000 - RNA, 12 nt, Vaccinia virus
aaaguuugagau

SEQ ID NO: 4061001 - RNA, 20 nt, Vaccinia virus
aaaguuuucuuucaaaauag

SEQ ID NO: 4061002 - RNA, 14 nt, Vaccinia virus
aaauaaaacuauag

SEQ ID NO: 4061003 - RNA, 15 nt, Vaccinia virus
aaauaaaaucuauau

SEQ ID NO: 4061004 - RNA, 22 nt, Vaccinia virus
aaauaaaccguuuaauauugau

SEQ ID NO: 4061005 - RNA, 13 nt, Vaccinia virus
aaauaaaguauau

SEQ ID NO: 4061006 - RNA, 11 nt, Vaccinia virus
aaauaaauguc

SEQ ID NO: 4061007 - RNA, 20 nt, Vaccinia virus
aaauaacaccguuacacgaa

SEQ ID NO: 4061008 - RNA, 18 nt, Vaccinia virus
aaauaacauuuauuauca

SEQ ID NO: 4061009 - RNA, 17 nt, Vaccinia virus
aaauaaguaguaauaau

SEQ ID NO: 4061010 - RNA, 14 nt, Vaccinia virus
aaauaauaauggaa

SEQ ID NO: 4061011 - RNA, 13 nt, Vaccinia virus
aaauaauauauca

SEQ ID NO: 4061012 - RNA, 19 nt, Vaccinia virus
aaauaauauaucaaacaug

SEQ ID NO: 4061013 - RNA, 12 nt, Vaccinia virus
aaauaauccaac

SEQ ID NO: 4061014 - RNA, 22 nt, Vaccinia virus
aaauaaucccgcaauucauuuu

SEQ ID NO: 4061015 - RNA, 13 nt, Vaccinia virus
aaauaauccugaa

SEQ ID NO: 4061016 - RNA, 22 nt, Vaccinia virus
aaauaaucucuuaguguuggaa

SEQ ID NO: 4061017 - RNA, 14 nt, Vaccinia virus
aaauaauucauuuu

SEQ ID NO: 4061018 - RNA, 16 nt, Vaccinia virus
aaauacaaaacagaga

SEQ ID NO: 4061019 - RNA, 18 nt, Vaccinia virus
aaauacaaaauaauagau

SEQ ID NO: 4061020 - RNA, 14 nt, Vaccinia virus
aaauacaaauauau

SEQ ID NO: 4061021 - RNA, 11 nt, Vaccinia virus
aaauacagaua

SEQ ID NO: 4061022 - RNA, 18 nt, Vaccinia virus
aaauacauaauuuuguaa

SEQ ID NO: 4061023 - RNA, 18 nt, Vaccinia virus
aaauacaugggaaaugau

SEQ ID NO: 4061024 - RNA, 17 nt, Vaccinia virus
aaauacuuaacagagga

SEQ ID NO: 4061025 - RNA, 16 nt, Vaccinia virus
aaauacuuuauauucu

SEQ ID NO: 4061026 - RNA, 13 nt, Vaccinia virus
aaauagagcaauu

SEQ ID NO: 4061027 - RNA, 15 nt, Vaccinia virus
aaauagauagaacua

SEQ ID NO: 4061028 - RNA, 16 nt, Vaccinia virus
aaauagauagaacuac

SEQ ID NO: 4061029 - RNA, 22 nt, Vaccinia virus
aaauagcgcugaaaauaaagau

SEQ ID NO: 4061030 - RNA, 20 nt, Vaccinia virus
aaauaggguuguguauaauu

SEQ ID NO: 4061031 - RNA, 16 nt, Vaccinia virus
aaauagguacucuguu

SEQ ID NO: 4061032 - RNA, 23 nt, Vaccinia virus
aaauaggucuucgucuacaguag

SEQ ID NO: 4061033 - RNA, 16 nt, Vaccinia virus
aaauagguuuuguucu

SEQ ID NO: 4061034 - RNA, 13 nt, Vaccinia virus
aaauauaacuauu

SEQ ID NO: 4061035 - RNA, 12 nt, Vaccinia virus
aaauauaaugau

SEQ ID NO: 4061036 - RNA, 20 nt, Vaccinia virus
aaauauaguagaauuucauu

SEQ ID NO: 4061037 - RNA, 14 nt, Vaccinia virus
aaauauauaaugaa

SEQ ID NO: 4061038 - RNA, 14 nt, Vaccinia virus
aaauauauacauau

SEQ ID NO: 4061039 - RNA, 12 nt, Vaccinia virus
aaauauauuguu

SEQ ID NO: 4061040 - RNA, 22 nt, Vaccinia virus
aaauauauuuacaauuauugga

SEQ ID NO: 4061041 - RNA, 23 nt, Vaccinia virus
aaauauauuuacaauuauuggaa

SEQ ID NO: 4061042 - RNA, 17 nt, Vaccinia virus
aaauaucauuaauauau

SEQ ID NO: 4061043 - RNA, 16 nt, Vaccinia virus
aaauaugauuuuguaa

SEQ ID NO: 4061044 - RNA, 12 nt, Vaccinia virus
aaauauguguau

SEQ ID NO: 4061045 - RNA, 17 nt, Vaccinia virus
aaauauguuauguuuau

SEQ ID NO: 4061046 - RNA, 17 nt, Vaccinia virus
aaaucaaaacauuuuca

SEQ ID NO: 4061047 - RNA, 18 nt, Vaccinia virus
aaaucaaaauccauauca

SEQ ID NO: 4061048 - RNA, 21 nt, Vaccinia virus
aaaucaaacacaagaucuucu

SEQ ID NO: 4061049 - RNA, 20 nt, Vaccinia virus
aaaucaagucuagaauauau

SEQ ID NO: 4061050 - RNA, 23 nt, Vaccinia virus
aaaucaguaacuauguucauuuu

SEQ ID NO: 4061051 - RNA, 20 nt, Vaccinia virus
aaaucauuaaaugauuguau

SEQ ID NO: 4061052 - RNA, 21 nt, Vaccinia virus
aaauccuguaauauuuuuagu

SEQ ID NO: 4061053 - RNA, 15 nt, Vaccinia virus
aaaucuugauuacaa

SEQ ID NO: 4061054 - RNA, 22 nt, Vaccinia virus
aaaucuugucugcuuaauacac

SEQ ID NO: 4061055 - RNA, 18 nt, Vaccinia virus
aaaucuuuaauugucuug

SEQ ID NO: 4061056 - RNA, 23 nt, Vaccinia virus
aaaucuuucauuucuuccuggua

SEQ ID NO: 4061057 - RNA, 23 nt, Vaccinia virus
aaaucuuuguucuaaaaacugua

SEQ ID NO: 4061058 - RNA, 17 nt, Vaccinia virus
aaaugacuaauuuugua

SEQ ID NO: 4061059 - RNA, 21 nt, Vaccinia virus
aaaugaggucgcaaaaaaacu

SEQ ID NO: 4061060 - RNA, 15 nt, Vaccinia virus
aaaugauaacuagau

SEQ ID NO: 4061061 - RNA, 21 nt, Vaccinia virus
aaaugaugacuugauagaaua

SEQ ID NO: 4061062 - RNA, 18 nt, Vaccinia virus
aaaugauguuaccacuuu

SEQ ID NO: 4061063 - RNA, 22 nt, Vaccinia virus
aaaugcgauacagacauuaaga

SEQ ID NO: 4061064 - RNA, 22 nt, Vaccinia virus
aaauggaggaggagacaaugac

SEQ ID NO: 4061065 - RNA, 17 nt, Vaccinia virus
aaaugguaaauacugua

SEQ ID NO: 4061066 - RNA, 23 nt, Vaccinia virus
aaaugguugaauccagcauguau

SEQ ID NO: 4061067 - RNA, 19 nt, Vaccinia virus
aaauguauaaaaaacuaau

SEQ ID NO: 4061068 - RNA, 12 nt, Vaccinia virus
aaaugucaugau

SEQ ID NO: 4061069 - RNA, 17 nt, Vaccinia virus
aaauguugauagcugaa

SEQ ID NO: 4061070 - RNA, 22 nt, Vaccinia virus
aaauguuugaucaauaacaaug

SEQ ID NO: 4061071 - RNA, 23 nt, Vaccinia virus
aaauuaaaaaauaacuuaauuua

SEQ ID NO: 4061072 - RNA, 22 nt, Vaccinia virus
aaauuacuccagccguagaaua

SEQ ID NO: 4061073 - RNA, 15 nt, Vaccinia virus
aaauuagaucaaaga

SEQ ID NO: 4061074 - RNA, 18 nt, Vaccinia virus
aaauuagucauacguaau

SEQ ID NO: 4061075 - RNA, 15 nt, Vaccinia virus
aaauuauauacugaa

SEQ ID NO: 4061076 - RNA, 19 nt, Vaccinia virus
aaauuauccuaucauguau

SEQ ID NO: 4061077 - RNA, 20 nt, Vaccinia virus
aaauuauuaaacaauacucu

SEQ ID NO: 4061078 - RNA, 21 nt, Vaccinia virus
aaauuauuuaauaaaguauau

SEQ ID NO: 4061079 - RNA, 21 nt, Vaccinia virus
aaauucccaaguagauauccu

SEQ ID NO: 4061080 - RNA, 17 nt, Vaccinia virus
aaauuguaacaacaaug

SEQ ID NO: 4061081 - RNA, 17 nt, Vaccinia virus
aaauuguccuauauaau

SEQ ID NO: 4061082 - RNA, 15 nt, Vaccinia virus
aaauuuaaaaugaua

SEQ ID NO: 4061083 - RNA, 16 nt, Vaccinia virus
aaauuuagauacaucu

SEQ ID NO: 4061084 - RNA, 20 nt, Vaccinia virus
aaauuuccauuuuuaauuua

SEQ ID NO: 4061085 - RNA, 17 nt, Vaccinia virus
aaauuugaaagaacuac

SEQ ID NO: 4061086 - RNA, 21 nt, Vaccinia virus
aaauuuuacaaaucuauaaca

SEQ ID NO: 4061087 - RNA, 13 nt, Vaccinia virus
aaauuuucaauua

SEQ ID NO: 4061088 - RNA, 21 nt, Vaccinia virus
aaauuuuugguucuucucuaa

SEQ ID NO: 4061089 - RNA, 14 nt, Vaccinia virus
aacaaaaaaguuau

SEQ ID NO: 4061090 - RNA, 20 nt, Vaccinia virus
aacaaaaugugauauagaaa

SEQ ID NO: 4061091 - RNA, 13 nt, Vaccinia virus
aacaaauacagaa

SEQ ID NO: 4061092 - RNA, 17 nt, Vaccinia virus
aacaaccaaaaaaauau

SEQ ID NO: 4061093 - RNA, 17 nt, Vaccinia virus
aacaacugaaaaaaauu

SEQ ID NO: 4061094 - RNA, 17 nt, Vaccinia virus
aacaagaucuuugauau

SEQ ID NO: 4061095 - RNA, 12 nt, Vaccinia virus
aacaagcaauug

SEQ ID NO: 4061096 - RNA, 18 nt, Vaccinia virus
aacaagguaucgaaucua

SEQ ID NO: 4061097 - RNA, 21 nt, Vaccinia virus
aacaaguaugacauuguaaaa

SEQ ID NO: 4061098 - RNA, 18 nt, Vaccinia virus
aacaauagucuuguaaag

SEQ ID NO: 4061099 - RNA, 18 nt, Vaccinia virus
aacaauauaaauccagua

SEQ ID NO: 4061100 - RNA, 20 nt, Vaccinia virus
aacaaucaucgcauauagua

SEQ ID NO: 4061101 - RNA, 15 nt, Vaccinia virus
aacaauguuugucau

SEQ ID NO: 4061102 - RNA, 12 nt, Vaccinia virus
aacaauuacaaa

SEQ ID NO: 4061103 - RNA, 16 nt, Vaccinia virus
aacaauuuugucagua

SEQ ID NO: 4061104 - RNA, 11 nt, Vaccinia virus
aacacaaauau

SEQ ID NO: 4061105 - RNA, 22 nt, Vaccinia virus
aacaccguuacacgaagagaua

SEQ ID NO: 4061106 - RNA, 16 nt, Vaccinia virus
aacaccuauaagauua

SEQ ID NO: 4061107 - RNA, 18 nt, Vaccinia virus
aacacguuagaguuuaua

SEQ ID NO: 4061108 - RNA, 16 nt, Vaccinia virus
aacacuauuaaaauau

SEQ ID NO: 4061109 - RNA, 22 nt, Vaccinia virus
aacacuauuccaucuguggaaa

SEQ ID NO: 4061110 - RNA, 17 nt, Vaccinia virus
aacacugauucagaaau

SEQ ID NO: 4061111 - RNA, 16 nt, Vaccinia virus
aacacuggcuagaaaa

SEQ ID NO: 4061112 - RNA, 16 nt, Vaccinia virus
aacacuuuccugauuu

SEQ ID NO: 4061113 - RNA, 13 nt, Vaccinia virus
aacacuuuucuau

SEQ ID NO: 4061114 - RNA, 18 nt, Vaccinia virus
aacagaaacguuuagaga

SEQ ID NO: 4061115 - RNA, 18 nt, Vaccinia virus
aacagacgacaacaugua

SEQ ID NO: 4061116 - RNA, 12 nt, Vaccinia virus
aacagauacaua

SEQ ID NO: 4061117 - RNA, 21 nt, Vaccinia virus
aacagauauuacaaccaaugu

SEQ ID NO: 4061118 - RNA, 19 nt, Vaccinia virus
aacagcuaucaaaauaugu

SEQ ID NO: 4061119 - RNA, 21 nt, Vaccinia virus
aacaggucgcuauauccacca

SEQ ID NO: 4061120 - RNA, 19 nt, Vaccinia virus
aacaggugguauauuauau

SEQ ID NO: 4061121 - RNA, 16 nt, Vaccinia virus
aacagucgaacaaucu

SEQ ID NO: 4061122 - RNA, 16 nt, Vaccinia virus
aacagucuaaacaaua

SEQ ID NO: 4061123 - RNA, 18 nt, Vaccinia virus
aacaguuacuguuaguau

SEQ ID NO: 4061124 - RNA, 21 nt, Vaccinia virus
aacaguuugguauuagaauca

SEQ ID NO: 4061125 - RNA, 16 nt, Vaccinia virus
aacauaaauaauucua

SEQ ID NO: 4061126 - RNA, 12 nt, Vaccinia virus
aacauaaugccg

SEQ ID NO: 4061127 - RNA, 18 nt, Vaccinia virus
aacaucaacugaaaaagu

SEQ ID NO: 4061128 - RNA, 12 nt, Vaccinia virus
aacaucaagaau

SEQ ID NO: 4061129 - RNA, 22 nt, Vaccinia virus
aacaucguaucuucaaaaaggu

SEQ ID NO: 4061130 - RNA, 20 nt, Vaccinia virus
aacaucuuggggaaauaugg

SEQ ID NO: 4061131 - RNA, 20 nt, Vaccinia virus
aacaucuuuguaaacagaua

SEQ ID NO: 4061132 - RNA, 16 nt, Vaccinia virus
aacauggauacagaua

SEQ ID NO: 4061133 - RNA, 11 nt, Vaccinia virus
aacauguacau

SEQ ID NO: 4061134 - RNA, 13 nt, Vaccinia virus
aacauguuccauu

SEQ ID NO: 4061135 - RNA, 15 nt, Vaccinia virus
aacauguuuagaaag

SEQ ID NO: 4061136 - RNA, 13 nt, Vaccinia virus
aacauuaaaaugu

SEQ ID NO: 4061137 - RNA, 22 nt, Vaccinia virus
aacauuaaaauguccacagaua

SEQ ID NO: 4061138 - RNA, 16 nt, Vaccinia virus
aacauuaaauguauuu

SEQ ID NO: 4061139 - RNA, 14 nt, Vaccinia virus
aacauuaauacaga

SEQ ID NO: 4061140 - RNA, 13 nt, Vaccinia virus
aacauuaauugau

SEQ ID NO: 4061141 - RNA, 15 nt, Vaccinia virus
aacauuauguaguaa

SEQ ID NO: 4061142 - RNA, 18 nt, Vaccinia virus
aacauuccacauucagau

SEQ ID NO: 4061143 - RNA, 19 nt, Vaccinia virus
aacauuguuuguauucucc

SEQ ID NO: 4061144 - RNA, 17 nt, Vaccinia virus
aacauuuauuaucauga

SEQ ID NO: 4061145 - RNA, 21 nt, Vaccinia virus
aacauuuauuaucaugaugac

SEQ ID NO: 4061146 - RNA, 16 nt, Vaccinia virus
aaccagaauuguaaaa

SEQ ID NO: 4061147 - RNA, 16 nt, Vaccinia virus
aaccagaucaaaacaa

SEQ ID NO: 4061148 - RNA, 20 nt, Vaccinia virus
aaccauauaaaaacaauagu

SEQ ID NO: 4061149 - RNA, 16 nt, Vaccinia virus
aaccaugagugugaaa

SEQ ID NO: 4061150 - RNA, 15 nt, Vaccinia virus
aacccagauaauaac

SEQ ID NO: 4061151 - RNA, 19 nt, Vaccinia virus
aacccuuacaacuacagua

SEQ ID NO: 4061152 - RNA, 17 nt, Vaccinia virus
aaccgcguuaauguuug

SEQ ID NO: 4061153 - RNA, 22 nt, Vaccinia virus
aaccucacuguuaaaaauaugu

SEQ ID NO: 4061154 - RNA, 12 nt, Vaccinia virus
aacgaacuagag

SEQ ID NO: 4061155 - RNA, 15 nt, Vaccinia virus
aacgaaguaaaaagu

SEQ ID NO: 4061156 - RNA, 17 nt, Vaccinia virus
aacgaaguauuuauacu

SEQ ID NO: 4061157 - RNA, 20 nt, Vaccinia virus
aacgaccaucuuugaaaauu

SEQ ID NO: 4061158 - RNA, 21 nt, Vaccinia virus
aacgaguacaaguagaacuua

SEQ ID NO: 4061159 - RNA, 16 nt, Vaccinia virus
aacgauuaaacaauau

SEQ ID NO: 4061160 - RNA, 14 nt, Vaccinia virus
aacgccuuuagaaa

SEQ ID NO: 4061161 - RNA, 16 nt, Vaccinia virus
aacggaacauauuuau

SEQ ID NO: 4061162 - RNA, 21 nt, Vaccinia virus
aacggagaauaucuauacaua

SEQ ID NO: 4061163 - RNA, 14 nt, Vaccinia virus
aacggaugaaaaua

SEQ ID NO: 4061164 - RNA, 13 nt, Vaccinia virus
aacggcuaucacu

SEQ ID NO: 4061165 - RNA, 14 nt, Vaccinia virus
aacgguauaugaau

SEQ ID NO: 4061166 - RNA, 16 nt, Vaccinia virus
aacguacaaauggaua

SEQ ID NO: 4061167 - RNA, 21 nt, Vaccinia virus
aacgugaaugaucuauuaucu

SEQ ID NO: 4061168 - RNA, 14 nt, Vaccinia virus
aacgugaauguaug

SEQ ID NO: 4061169 - RNA, 17 nt, Vaccinia virus
aacgugaguauuuuacu

SEQ ID NO: 4061170 - RNA, 18 nt, Vaccinia virus
aacguuuuaaaaaaagau

SEQ ID NO: 4061171 - RNA, 15 nt, Vaccinia virus
aacuaaaaaaaauga

SEQ ID NO: 4061172 - RNA, 19 nt, Vaccinia virus
aacuaaaugguauacacau

SEQ ID NO: 4061173 - RNA, 19 nt, Vaccinia virus
aacuaacaaacuauacaag

SEQ ID NO: 4061174 - RNA, 15 nt, Vaccinia virus
aacuaagucuagaau

SEQ ID NO: 4061175 - RNA, 21 nt, Vaccinia virus
aacuacaucgguaucuagauc

SEQ ID NO: 4061176 - RNA, 23 nt, Vaccinia virus
aacuaccaauaugucuguacaaa

SEQ ID NO: 4061177 - RNA, 23 nt, Vaccinia virus
aacuacuccauuuuauuguggaa

SEQ ID NO: 4061178 - RNA, 17 nt, Vaccinia virus
aacuacucgaacagaua

SEQ ID NO: 4061179 - RNA, 20 nt, Vaccinia virus
aacuaguagaagguacgacu

SEQ ID NO: 4061180 - RNA, 15 nt, Vaccinia virus
aacuaguauaaaauc

SEQ ID NO: 4061181 - RNA, 15 nt, Vaccinia virus
aacuaguguagaaaa

SEQ ID NO: 4061182 - RNA, 19 nt, Vaccinia virus
aacuauagagaacaaauaa

SEQ ID NO: 4061183 - RNA, 14 nt, Vaccinia virus
aacuauauaaugaa

SEQ ID NO: 4061184 - RNA, 16 nt, Vaccinia virus
aacuaucaauauuaac

SEQ ID NO: 4061185 - RNA, 21 nt, Vaccinia virus
aacuaucguuggaaaauggug

SEQ ID NO: 4061186 - RNA, 18 nt, Vaccinia virus
aacuauguucauuuuuuu

SEQ ID NO: 4061187 - RNA, 17 nt, Vaccinia virus
aacuauuccaauguuua

SEQ ID NO: 4061188 - RNA, 22 nt, Vaccinia virus
aacuauuuccggcuguuguaua

SEQ ID NO: 4061189 - RNA, 12 nt, Vaccinia virus
aacuauuuuuuu

SEQ ID NO: 4061190 - RNA, 13 nt, Vaccinia virus
aacucaaucccaa

SEQ ID NO: 4061191 - RNA, 21 nt, Vaccinia virus
aacucauauaacuucuagaug

SEQ ID NO: 4061192 - RNA, 21 nt, Vaccinia virus
aacucauuuaaauaucauaau

SEQ ID NO: 4061193 - RNA, 22 nt, Vaccinia virus
aacuccuccuaggauauuugua

SEQ ID NO: 4061194 - RNA, 14 nt, Vaccinia virus
aacuccuggauaac

SEQ ID NO: 4061195 - RNA, 19 nt, Vaccinia virus
aacucgcuuaauaucuucu

SEQ ID NO: 4061196 - RNA, 15 nt, Vaccinia virus
aacucguaaaaagau

SEQ ID NO: 4061197 - RNA, 20 nt, Vaccinia virus
aacucgucuccccaaacauu

SEQ ID NO: 4061198 - RNA, 15 nt, Vaccinia virus
aacucuaaucaaaau

SEQ ID NO: 4061199 - RNA, 13 nt, Vaccinia virus
aacucuaucaugg

SEQ ID NO: 4061200 - RNA, 20 nt, Vaccinia virus
aacucucguauagucauaga

SEQ ID NO: 4061201 - RNA, 21 nt, Vaccinia virus
aacucugauuauugucuaaua

SEQ ID NO: 4061202 - RNA, 17 nt, Vaccinia virus
aacuguaauuugauucu

SEQ ID NO: 4061203 - RNA, 12 nt, Vaccinia virus
aacuuaaaauau

SEQ ID NO: 4061204 - RNA, 14 nt, Vaccinia virus
aacuuaaacaaaau

SEQ ID NO: 4061205 - RNA, 13 nt, Vaccinia virus
aacuuaacagcuc

SEQ ID NO: 4061206 - RNA, 21 nt, Vaccinia virus
aacuuauaauccuuuuuauuu

SEQ ID NO: 4061207 - RNA, 22 nt, Vaccinia virus
aacuuauaauccuuuuuauuua

SEQ ID NO: 4061208 - RNA, 15 nt, Vaccinia virus
aacuuauccauuuau

SEQ ID NO: 4061209 - RNA, 19 nt, Vaccinia virus
aacuuccguuuaaaaaugg

SEQ ID NO: 4061210 - RNA, 20 nt, Vaccinia virus
aacuucuggaaguuccaaac

SEQ ID NO: 4061211 - RNA, 21 nt, Vaccinia virus
aacuuggaaacaucucuucua

SEQ ID NO: 4061212 - RNA, 19 nt, Vaccinia virus
aacuugguauuuuuugguu

SEQ ID NO: 4061213 - RNA, 15 nt, Vaccinia virus
aacuuucaucuaaua

SEQ ID NO: 4061214 - RNA, 15 nt, Vaccinia virus
aacuuugauuauccu

SEQ ID NO: 4061215 - RNA, 12 nt, Vaccinia virus
aacuuuugcaua

SEQ ID NO: 4061216 - RNA, 13 nt, Vaccinia virus
aagaaaacaaaca

SEQ ID NO: 4061217 - RNA, 23 nt, Vaccinia virus
aagaaacugacuugauaaaaaug

SEQ ID NO: 4061218 - RNA, 14 nt, Vaccinia virus
aagaaauauuucca

SEQ ID NO: 4061219 - RNA, 14 nt, Vaccinia virus
aagaaauuaauaga

SEQ ID NO: 4061220 - RNA, 20 nt, Vaccinia virus
aagaacacacgaacaucuuu

SEQ ID NO: 4061221 - RNA, 23 nt, Vaccinia virus
aagaagaaauacuaaaaaaugua

SEQ ID NO: 4061222 - RNA, 13 nt, Vaccinia virus
aagaagagaauua

SEQ ID NO: 4061223 - RNA, 21 nt, Vaccinia virus
aagaaguauacuaucgucauu

SEQ ID NO: 4061224 - RNA, 15 nt, Vaccinia virus
aagaaguuauagaca

SEQ ID NO: 4061225 - RNA, 20 nt, Vaccinia virus
aagaaucaaaagaaugauuc

SEQ ID NO: 4061226 - RNA, 21 nt, Vaccinia virus
aagaaugcuucagaauuagaa

SEQ ID NO: 4061227 - RNA, 12 nt, Vaccinia virus
aagaauggauga

SEQ ID NO: 4061228 - RNA, 23 nt, Vaccinia virus
aagacaacgaauacaaacgccau

SEQ ID NO: 4061229 - RNA, 18 nt, Vaccinia virus
aagacaucauauauagaa

SEQ ID NO: 4061230 - RNA, 18 nt, Vaccinia virus
aagaccugacuagcaaau

SEQ ID NO: 4061231 - RNA, 20 nt, Vaccinia virus
aagacgaggagauuuagaaa

SEQ ID NO: 4061232 - RNA, 14 nt, Vaccinia virus
aagacggggauuuc

SEQ ID NO: 4061233 - RNA, 21 nt, Vaccinia virus
aagacguuguacaauaugaac

SEQ ID NO: 4061234 - RNA, 20 nt, Vaccinia virus
aagacuuagugacggacuua

SEQ ID NO: 4061235 - RNA, 22 nt, Vaccinia virus
aagagauaaaagcauuuuaacu

SEQ ID NO: 4061236 - RNA, 18 nt, Vaccinia virus
aagagcgacguacaacug

SEQ ID NO: 4061237 - RNA, 14 nt, Vaccinia virus
aagaguuaaugaau

SEQ ID NO: 4061238 - RNA, 14 nt, Vaccinia virus
aagauaaucuucuc

SEQ ID NO: 4061239 - RNA, 16 nt, Vaccinia virus
aagauacaacaaauua

SEQ ID NO: 4061240 - RNA, 22 nt, Vaccinia virus
aagauaccaaacagaauccuaa

SEQ ID NO: 4061241 - RNA, 20 nt, Vaccinia virus
aagauaccaguauaccucaa

SEQ ID NO: 4061242 - RNA, 17 nt, Vaccinia virus
aagauacuguuuagaga

SEQ ID NO: 4061243 - RNA, 20 nt, Vaccinia virus
aagauacuugaagacauucc

SEQ ID NO: 4061244 - RNA, 21 nt, Vaccinia virus
aagauagcggaagauacgacu

SEQ ID NO: 4061245 - RNA, 14 nt, Vaccinia virus
aagauauaaaugac

SEQ ID NO: 4061246 - RNA, 14 nt, Vaccinia virus
aagauauauacacu

SEQ ID NO: 4061247 - RNA, 14 nt, Vaccinia virus
aagauauuccaaga

SEQ ID NO: 4061248 - RNA, 17 nt, Vaccinia virus
aagauauuguuaaauaa

SEQ ID NO: 4061249 - RNA, 21 nt, Vaccinia virus
aagaucauacagucacagaca

SEQ ID NO: 4061250 - RNA, 18 nt, Vaccinia virus
aagaugauaaaaacauuu

SEQ ID NO: 4061251 - RNA, 16 nt, Vaccinia virus
aagaugauauaaguua

SEQ ID NO: 4061252 - RNA, 13 nt, Vaccinia virus
aagaugaugugaa

SEQ ID NO: 4061253 - RNA, 17 nt, Vaccinia virus
aagaugcaaacauuaug

SEQ ID NO: 4061254 - RNA, 15 nt, Vaccinia virus
aagauguuuagaaaa

SEQ ID NO: 4061255 - RNA, 21 nt, Vaccinia virus
aagauuaaaucauuaaaugau

SEQ ID NO: 4061256 - RNA, 17 nt, Vaccinia virus
aagauuccauuaucuaa

SEQ ID NO: 4061257 - RNA, 13 nt, Vaccinia virus
aagauuguacacu

SEQ ID NO: 4061258 - RNA, 13 nt, Vaccinia virus
aagauuguagaau

SEQ ID NO: 4061259 - RNA, 19 nt, Vaccinia virus
aagauugucauguggauua

SEQ ID NO: 4061260 - RNA, 21 nt, Vaccinia virus
aagauuguuuaagaagagaau

SEQ ID NO: 4061261 - RNA, 18 nt, Vaccinia virus
aagcagacuagaaauaac

SEQ ID NO: 4061262 - RNA, 20 nt, Vaccinia virus
aagcauuuuggaaacauaaa

SEQ ID NO: 4061263 - RNA, 19 nt, Vaccinia virus
aagccaauuccaauuguug

SEQ ID NO: 4061264 - RNA, 22 nt, Vaccinia virus
aagcggaacaauaaacaaaaua

SEQ ID NO: 4061265 - RNA, 20 nt, Vaccinia virus
aagcguguaaacgaaaacua

SEQ ID NO: 4061266 - RNA, 22 nt, Vaccinia virus
aagcguuggcaccggaauacua

SEQ ID NO: 4061267 - RNA, 16 nt, Vaccinia virus
aagcucuaaauccaaa

SEQ ID NO: 4061268 - RNA, 15 nt, Vaccinia virus
aaggaagaaggacaa

SEQ ID NO: 4061269 - RNA, 19 nt, Vaccinia virus
aaggaauaaaauaugaaau

SEQ ID NO: 4061270 - RNA, 17 nt, Vaccinia virus
aaggacaguuaaaacua

SEQ ID NO: 4061271 - RNA, 17 nt, Vaccinia virus
aaggacuuuguagaaau

SEQ ID NO: 4061272 - RNA, 19 nt, Vaccinia virus
aaggaguagcagauuuccu

SEQ ID NO: 4061273 - RNA, 19 nt, Vaccinia virus
aaggauaaaauauuaucca

SEQ ID NO: 4061274 - RNA, 11 nt, Vaccinia virus
aaggauaaaga

SEQ ID NO: 4061275 - RNA, 15 nt, Vaccinia virus
aaggcacuaugucca

SEQ ID NO: 4061276 - RNA, 12 nt, Vaccinia virus
aaggcagaaaug

SEQ ID NO: 4061277 - RNA, 21 nt, Vaccinia virus
aaggucaauuacggcgaaaua

SEQ ID NO: 4061278 - RNA, 15 nt, Vaccinia virus
aagguuaacaucuua

SEQ ID NO: 4061279 - RNA, 12 nt, Vaccinia virus
aagguuguaaau

SEQ ID NO: 4061280 - RNA, 20 nt, Vaccinia virus
aaguaaaagaucuauaaugu

SEQ ID NO: 4061281 - RNA, 12 nt, Vaccinia virus
aaguaaacuucg

SEQ ID NO: 4061282 - RNA, 23 nt, Vaccinia virus
aaguaaauaauaaaacaauaaau

SEQ ID NO: 4061283 - RNA, 16 nt, Vaccinia virus
aaguaauuaauuuuuc

SEQ ID NO: 4061284 - RNA, 12 nt, Vaccinia virus
aaguaauucaga

SEQ ID NO: 4061285 - RNA, 18 nt, Vaccinia virus
aaguacauggaugauaua

SEQ ID NO: 4061286 - RNA, 21 nt, Vaccinia virus
auuaaacauuguucaugauau

SEQ ID NO: 4061287 - RNA, 20 nt, Vaccinia virus
auuaaagacuuaagacuuaa

SEQ ID NO: 4061288 - RNA, 17 nt, Vaccinia virus
auuaaauauagguauau

SEQ ID NO: 4061289 - RNA, 16 nt, Vaccinia virus
auuaaaucauugacug

SEQ ID NO: 4061290 - RNA, 17 nt, Vaccinia virus
auuaaaucuuucauuuc

SEQ ID NO: 4061291 - RNA, 21 nt, Vaccinia virus
auuaaaugcaauaacaaagau

SEQ ID NO: 4061292 - RNA, 19 nt, Vaccinia virus
auuaaauuuuuuuauuaau

SEQ ID NO: 4061293 - RNA, 22 nt, Vaccinia virus
auuaacaacgaccgauaauaaa

SEQ ID NO: 4061294 - RNA, 17 nt, Vaccinia virus
auuaacagguucucaau

SEQ ID NO: 4061295 - RNA, 21 nt, Vaccinia virus
auuaacagguucucaauauua

SEQ ID NO: 4061296 - RNA, 18 nt, Vaccinia virus
auuaacauaguugaauaa

SEQ ID NO: 4061297 - RNA, 24 nt, Vaccinia virus
auuaacgaguuccauuuauaucau

SEQ ID NO: 4061298 - RNA, 17 nt, Vaccinia virus
auuaacgguuauaaaau

SEQ ID NO: 4061299 - RNA, 14 nt, Vaccinia virus
auuaacuaucugua

SEQ ID NO: 4061300 - RNA, 13 nt, Vaccinia virus
auuaacuauuuug

SEQ ID NO: 4061301 - RNA, 21 nt, Vaccinia virus
auuaacucagaagauuauuau

SEQ ID NO: 4061302 - RNA, 14 nt, Vaccinia virus
auuaaguguggugu

SEQ ID NO: 4061303 - RNA, 17 nt, Vaccinia virus
auuaaguguuauaagau

SEQ ID NO: 4061304 - RNA, 14 nt, Vaccinia virus
auuaauaaauccgu

SEQ ID NO: 4061305 - RNA, 15 nt, Vaccinia virus
auuaauacacauaau

SEQ ID NO: 4061306 - RNA, 12 nt, Vaccinia virus
auuaauacuuuu

SEQ ID NO: 4061307 - RNA, 15 nt, Vaccinia virus
auuaauagaaugaag

SEQ ID NO: 4061308 - RNA, 22 nt, Vaccinia virus
auuaaucaaaugguaaauacug

SEQ ID NO: 4061309 - RNA, 14 nt, Vaccinia virus
auuaaucuuuacca

SEQ ID NO: 4061310 - RNA, 16 nt, Vaccinia virus
auuaaucuuuucugua

SEQ ID NO: 4061311 - RNA, 17 nt, Vaccinia virus
auuaaucuuuucuguac

SEQ ID NO: 4061312 - RNA, 15 nt, Vaccinia virus
auuaaugagaucuuc

SEQ ID NO: 4061313 - RNA, 17 nt, Vaccinia virus
auuaaugcuacagauau

SEQ ID NO: 4061314 - RNA, 19 nt, Vaccinia virus
auuaauguccaagucuuga

SEQ ID NO: 4061315 - RNA, 13 nt, Vaccinia virus
auuaauuauucau

SEQ ID NO: 4061316 - RNA, 23 nt, Vaccinia virus
auuaauuucuaaaggagcaaaug

SEQ ID NO: 4061317 - RNA, 14 nt, Vaccinia virus
auuaauuuuagaaa

SEQ ID NO: 4061318 - RNA, 19 nt, Vaccinia virus
auuaauuuuugugggaagc

SEQ ID NO: 4061319 - RNA, 13 nt, Vaccinia virus
auuacaaaaacua

SEQ ID NO: 4061320 - RNA, 14 nt, Vaccinia virus
auuacaacauaaua

SEQ ID NO: 4061321 - RNA, 21 nt, Vaccinia virus
auuacaauuugcauguugcau

SEQ ID NO: 4061322 - RNA, 14 nt, Vaccinia virus
auuaccauggauga

SEQ ID NO: 4061323 - RNA, 18 nt, Vaccinia virus
auuacguggagaaaucau

SEQ ID NO: 4061324 - RNA, 19 nt, Vaccinia virus
auuacuaccuucagaaauu

SEQ ID NO: 4061325 - RNA, 13 nt, Vaccinia virus
auuacuacguaaa

SEQ ID NO: 4061326 - RNA, 14 nt, Vaccinia virus
auuacuacugaaga

SEQ ID NO: 4061327 - RNA, 16 nt, Vaccinia virus
auuacuccauuaaaua

SEQ ID NO: 4061328 - RNA, 18 nt, Vaccinia virus
auuacucuccuagguuuc

SEQ ID NO: 4061329 - RNA, 15 nt, Vaccinia virus
auuacuuaucauuua

SEQ ID NO: 4061330 - RNA, 14 nt, Vaccinia virus
auuacuuuaauagu

SEQ ID NO: 4061331 - RNA, 20 nt, Vaccinia virus
auuagaaaaaguguauucau

SEQ ID NO: 4061332 - RNA, 16 nt, Vaccinia virus
auuagcgaacauauau

SEQ ID NO: 4061333 - RNA, 18 nt, Vaccinia virus
auuaggaaaaguauucug

SEQ ID NO: 4061334 - RNA, 20 nt, Vaccinia virus
auuaguaggaaauuucuuga

SEQ ID NO: 4061335 - RNA, 17 nt, Vaccinia virus
auuagucauguuaaaaa

SEQ ID NO: 4061336 - RNA, 18 nt, Vaccinia virus
auuagugacggaaaaucg

SEQ ID NO: 4061337 - RNA, 17 nt, Vaccinia virus
auuagugauagaacguu

SEQ ID NO: 4061338 - RNA, 21 nt, Vaccinia virus
auuagugaugaauugaaaauu

SEQ ID NO: 4061339 - RNA, 21 nt, Vaccinia virus
auuaguuagauauauagaauu

SEQ ID NO: 4061340 - RNA, 16 nt, Vaccinia virus
auuauaagauuaaaug

SEQ ID NO: 4061341 - RNA, 18 nt, Vaccinia virus
auuauaauaguuuaucau

SEQ ID NO: 4061342 - RNA, 12 nt, Vaccinia virus
auuauaauguau

SEQ ID NO: 4061343 - RNA, 15 nt, Vaccinia virus
auuauacaaaaauuu

SEQ ID NO: 4061344 - RNA, 22 nt, Vaccinia virus
auuauacaccuuauaauaggug

SEQ ID NO: 4061345 - RNA, 12 nt, Vaccinia virus
auuauaccaaaa

SEQ ID NO: 4061346 - RNA, 21 nt, Vaccinia virus
auuauaguucuuaacaucuau

SEQ ID NO: 4061347 - RNA, 14 nt, Vaccinia virus
auuauauaauguau

SEQ ID NO: 4061348 - RNA, 23 nt, Vaccinia virus
auuauauagauacagaacaucaa

SEQ ID NO: 4061349 - RNA, 14 nt, Vaccinia virus
auuauauauggauu

SEQ ID NO: 4061350 - RNA, 15 nt, Vaccinia virus
auuauauauggauuu

SEQ ID NO: 4061351 - RNA, 23 nt, Vaccinia virus
auuauaugggguuacucuaaauc

SEQ ID NO: 4061352 - RNA, 20 nt, Vaccinia virus
auuauaugguagauuguuaa

SEQ ID NO: 4061353 - RNA, 18 nt, Vaccinia virus
auuaucaaaagacaugau

SEQ ID NO: 4061354 - RNA, 18 nt, Vaccinia virus
auuaucaaaauuaacaga

SEQ ID NO: 4061355 - RNA, 18 nt, Vaccinia virus
auuaucaaaauuuggaaa

SEQ ID NO: 4061356 - RNA, 14 nt, Vaccinia virus
auuaucaaauggau

SEQ ID NO: 4061357 - RNA, 14 nt, Vaccinia virus
auuaucaaauguug

SEQ ID NO: 4061358 - RNA, 24 nt, Vaccinia virus
auuaucaacguaacuauauuccaa

SEQ ID NO: 4061359 - RNA, 21 nt, Vaccinia virus
auuaucaagauguguauguuu

SEQ ID NO: 4061360 - RNA, 22 nt, Vaccinia virus
auuaucaugacaaaauuaaaaa

SEQ ID NO: 4061361 - RNA, 19 nt, Vaccinia virus
auuaucaugagauguguau

SEQ ID NO: 4061362 - RNA, 16 nt, Vaccinia virus
auuauccguauuucca

SEQ ID NO: 4061363 - RNA, 15 nt, Vaccinia virus
auuaucgacauaggu

SEQ ID NO: 4061364 - RNA, 17 nt, Vaccinia virus
auuaucgacuaugaauc

SEQ ID NO: 4061365 - RNA, 20 nt, Vaccinia virus
auuaucgaggauaucucaaa

SEQ ID NO: 4061366 - RNA, 20 nt, Vaccinia virus
auuaucgaguuuaaaucauu

SEQ ID NO: 4061367 - RNA, 19 nt, Vaccinia virus
auuaucgcuaauugacaca

SEQ ID NO: 4061368 - RNA, 16 nt, Vaccinia virus
auuaucuacaguguau

SEQ ID NO: 4061369 - RNA, 20 nt, Vaccinia virus
auuaucuuuguuuugauauc

SEQ ID NO: 4061370 - RNA, 21 nt, Vaccinia virus
auuaugaaaaaguaaaugaug

SEQ ID NO: 4061371 - RNA, 15 nt, Vaccinia virus
auuaugaaacaauau

SEQ ID NO: 4061372 - RNA, 15 nt, Vaccinia virus
auuaugaaacuauau

SEQ ID NO: 4061373 - RNA, 13 nt, Vaccinia virus
auuaugagaauga

SEQ ID NO: 4061374 - RNA, 15 nt, Vaccinia virus
auuaugauagaaauu

SEQ ID NO: 4061375 - RNA, 20 nt, Vaccinia virus
auuaugcauucguuuaaaga

SEQ ID NO: 4061376 - RNA, 17 nt, Vaccinia virus
auuaugcgauagcaaga

SEQ ID NO: 4061377 - RNA, 17 nt, Vaccinia virus
auuauguuuuaugaaua

SEQ ID NO: 4061378 - RNA, 13 nt, Vaccinia virus
auuauuaauaaag

SEQ ID NO: 4061379 - RNA, 12 nt, Vaccinia virus
auuauuaauaag

SEQ ID NO: 4061380 - RNA, 18 nt, Vaccinia virus
auuauuaucuuuagaaau

SEQ ID NO: 4061381 - RNA, 14 nt, Vaccinia virus
auuauuaugaugau

SEQ ID NO: 4061382 - RNA, 18 nt, Vaccinia virus
auuauucuacuaucaaag

SEQ ID NO: 4061383 - RNA, 16 nt, Vaccinia virus
auuauucuaucaauuu

SEQ ID NO: 4061384 - RNA, 19 nt, Vaccinia virus
auuauucuauuucgaauuu

SEQ ID NO: 4061385 - RNA, 17 nt, Vaccinia virus
auuauucuuaaaugccu

SEQ ID NO: 4061386 - RNA, 21 nt, Vaccinia virus
auuauuggguaaguuuaaaaa

SEQ ID NO: 4061387 - RNA, 19 nt, Vaccinia virus
auuauugguucauuggaau

SEQ ID NO: 4061388 - RNA, 21 nt, Vaccinia virus
auuauuuuucaccauauagau

SEQ ID NO: 4061389 - RNA, 13 nt, Vaccinia virus
auucaaaaaagaa

SEQ ID NO: 4061390 - RNA, 14 nt, Vaccinia virus
auucaaauguuguu

SEQ ID NO: 4061391 - RNA, 21 nt, Vaccinia virus
auucaaauguuguuaaaugau

SEQ ID NO: 4061392 - RNA, 23 nt, Vaccinia virus
auucaaccacucucgauacauua

SEQ ID NO: 4061393 - RNA, 20 nt, Vaccinia virus
auucaagcgaauuacucugu

SEQ ID NO: 4061394 - RNA, 20 nt, Vaccinia virus
auucagacacuucuuaacga

SEQ ID NO: 4061395 - RNA, 19 nt, Vaccinia virus
auucauacuuaacaaauug

SEQ ID NO: 4061396 - RNA, 16 nt, Vaccinia virus
auucauagcuguauuu

SEQ ID NO: 4061397 - RNA, 18 nt, Vaccinia virus
auucauauuaauacuuug

SEQ ID NO: 4061398 - RNA, 12 nt, Vaccinia virus
auucaucaauau

SEQ ID NO: 4061399 - RNA, 15 nt, Vaccinia virus
auucauccuuaaaug

SEQ ID NO: 4061400 - RNA, 21 nt, Vaccinia virus
auucauuaggauuaucaaauc

SEQ ID NO: 4061401 - RNA, 17 nt, Vaccinia virus
auucauucaaugucucu

SEQ ID NO: 4061402 - RNA, 18 nt, Vaccinia virus
auuccaauguuuaacaag

SEQ ID NO: 4061403 - RNA, 23 nt, Vaccinia virus
auuccaggaucuagauaauuaau

SEQ ID NO: 4061404 - RNA, 22 nt, Vaccinia virus
auuccauauagauauaauuuua

SEQ ID NO: 4061405 - RNA, 12 nt, Vaccinia virus
auuccauggaag

SEQ ID NO: 4061406 - RNA, 22 nt, Vaccinia virus
auucccccugccauuuuagaga

SEQ ID NO: 4061407 - RNA, 21 nt, Vaccinia virus
auuccuuauucacacaaaaag

SEQ ID NO: 4061408 - RNA, 14 nt, Vaccinia virus
auucguagaaagua

SEQ ID NO: 4061409 - RNA, 18 nt, Vaccinia virus
auucguauaaauauccuu

SEQ ID NO: 4061410 - RNA, 15 nt, Vaccinia virus
ugaguguagaugcug

SEQ ID NO: 4061411 - RNA, 18 nt, Vaccinia virus
ugaguuacgaagauauca

SEQ ID NO: 4061412 - RNA, 23 nt, Vaccinia virus
ugauaaagauaaaagaauucaga

SEQ ID NO: 4061413 - RNA, 13 nt, Vaccinia virus
ugauaaauuauuu

SEQ ID NO: 4061414 - RNA, 16 nt, Vaccinia virus
ugauaacuucaggaaa

SEQ ID NO: 4061415 - RNA, 13 nt, Vaccinia virus
ugauaauaugaaa

SEQ ID NO: 4061416 - RNA, 22 nt, Vaccinia virus
ugauaauauuaaaagauggaua

SEQ ID NO: 4061417 - RNA, 18 nt, Vaccinia virus
ugauaauuauaccaagga

SEQ ID NO: 4061418 - RNA, 18 nt, Vaccinia virus
ugauacaaaaacgaaaua

SEQ ID NO: 4061419 - RNA, 21 nt, Vaccinia virus
ugauacaacaauauaugugca

SEQ ID NO: 4061420 - RNA, 18 nt, Vaccinia virus
ugauacccgcaauuauua

SEQ ID NO: 4061421 - RNA, 21 nt, Vaccinia virus
ugauacguacaaugauaauga

SEQ ID NO: 4061422 - RNA, 21 nt, Vaccinia virus
ugauacucucaaccauuauua

SEQ ID NO: 4061423 - RNA, 21 nt, Vaccinia virus
ugauagacaagauauauacac

SEQ ID NO: 4061424 - RNA, 16 nt, Vaccinia virus
ugauagagguaaacuu

SEQ ID NO: 4061425 - RNA, 23 nt, Vaccinia virus
ugauagauacgcauuuucuggag

SEQ ID NO: 4061426 - RNA, 17 nt, Vaccinia virus
ugauagccguagaucuu

SEQ ID NO: 4061427 - RNA, 17 nt, Vaccinia virus
ugauaguauuauucauu

SEQ ID NO: 4061428 - RNA, 15 nt, Vaccinia virus
ugauaguuucucauu

SEQ ID NO: 4061429 - RNA, 15 nt, Vaccinia virus
ugauauaaaacuauc

SEQ ID NO: 4061430 - RNA, 20 nt, Vaccinia virus
ugauauagaaaagcauauca

SEQ ID NO: 4061431 - RNA, 21 nt, Vaccinia virus
ugauauaggggucuucauaac

SEQ ID NO: 4061432 - RNA, 16 nt, Vaccinia virus
ugauauaguaauauua

SEQ ID NO: 4061433 - RNA, 16 nt, Vaccinia virus
ugauauauaauuuaca

SEQ ID NO: 4061434 - RNA, 20 nt, Vaccinia virus
ugauauauaauuuacagcua

SEQ ID NO: 4061435 - RNA, 20 nt, Vaccinia virus
ugauaucgcauagaaauaca

SEQ ID NO: 4061436 - RNA, 22 nt, Vaccinia virus
ugauaugauuuuuaaucaagau

SEQ ID NO: 4061437 - RNA, 21 nt, Vaccinia virus
ugauauuggagcaaaauccua

SEQ ID NO: 4061438 - RNA, 13 nt, Vaccinia virus
ugauauuuggauc

SEQ ID NO: 4061439 - RNA, 22 nt, Vaccinia virus
ugaucauuuugauauugugaau

SEQ ID NO: 4061440 - RNA, 13 nt, Vaccinia virus
ugaucggaucuaa

SEQ ID NO: 4061441 - RNA, 13 nt, Vaccinia virus
ugaucuagucuuu

SEQ ID NO: 4061442 - RNA, 21 nt, Vaccinia virus
ugaucucaauggaaugcaaaa

SEQ ID NO: 4061443 - RNA, 20 nt, Vaccinia virus
ugaugaaagauaaacuaaau

SEQ ID NO: 4061444 - RNA, 20 nt, Vaccinia virus
ugaugaaguucgaugauguc

SEQ ID NO: 4061445 - RNA, 22 nt, Vaccinia virus
ugaugaaguugagaaugauaug

SEQ ID NO: 4061446 - RNA, 23 nt, Vaccinia virus
ugaugaaucuucauuaucugaua

SEQ ID NO: 4061447 - RNA, 18 nt, Vaccinia virus
ugaugaguuguacaucuu

SEQ ID NO: 4061448 - RNA, 22 nt, Vaccinia virus
ugaugaugcagaauuuuggaua

SEQ ID NO: 4061449 - RNA, 15 nt, Vaccinia virus
ugaugcaaagauguu

SEQ ID NO: 4061450 - RNA, 22 nt, Vaccinia virus
ugauggaugagauauacagcua

SEQ ID NO: 4061451 - RNA, 17 nt, Vaccinia virus
ugauguaagucuuacaa

SEQ ID NO: 4061452 - RNA, 19 nt, Vaccinia virus
ugaugucaaagauuguaca

SEQ ID NO: 4061453 - RNA, 22 nt, Vaccinia virus
ugaugugagagagaaauacuuc

SEQ ID NO: 4061454 - RNA, 16 nt, Vaccinia virus
ugauuaauaugugaca

SEQ ID NO: 4061455 - RNA, 20 nt, Vaccinia virus
ugauuaguauaacuagauuu

SEQ ID NO: 4061456 - RNA, 17 nt, Vaccinia virus
ugauuaguauuuucuau

SEQ ID NO: 4061457 - RNA, 23 nt, Vaccinia virus
ugauuaucuucuugagacauaac

SEQ ID NO: 4061458 - RNA, 21 nt, Vaccinia virus
ugauucaucaacauuugcugu

SEQ ID NO: 4061459 - RNA, 16 nt, Vaccinia virus
ugauucgauaaauaga

SEQ ID NO: 4061460 - RNA, 19 nt, Vaccinia virus
ugauugauuauuucaaaga

SEQ ID NO: 4061461 - RNA, 17 nt, Vaccinia virus
ugauuggguagaaguag

SEQ ID NO: 4061462 - RNA, 18 nt, Vaccinia virus
ugauuguaaauacagaua

SEQ ID NO: 4061463 - RNA, 22 nt, Vaccinia virus
ugauuuuaacgacgacauauua

SEQ ID NO: 4061464 - RNA, 18 nt, Vaccinia virus
ugauuuuuccuaaaucua

SEQ ID NO: 4061465 - RNA, 20 nt, Vaccinia virus
ugauuuuucuucauuuauca

SEQ ID NO: 4061466 - RNA, 23 nt, Vaccinia virus
ugcaaaaaacgccaauacauguu

SEQ ID NO: 4061467 - RNA, 17 nt, Vaccinia virus
ugcaaacuuaacagcuc

SEQ ID NO: 4061468 - RNA, 16 nt, Vaccinia virus
ugcaaauguaguauuu

SEQ ID NO: 4061469 - RNA, 17 nt, Vaccinia virus
ugcaacaucuggagaau

SEQ ID NO: 4061470 - RNA, 21 nt, Vaccinia virus
ugcaacgaauuauuagucugu

SEQ ID NO: 4061471 - RNA, 15 nt, Vaccinia virus
ugcaaguuauucucg

SEQ ID NO: 4061472 - RNA, 16 nt, Vaccinia virus
ugcaauaacaaagauu

SEQ ID NO: 4061473 - RNA, 17 nt, Vaccinia virus
ugcaaugaauaucuaca

SEQ ID NO: 4061474 - RNA, 23 nt, Vaccinia virus
ugcacguaaccauucuaaacaau

SEQ ID NO: 4061475 - RNA, 16 nt, Vaccinia virus
ugcagaagcaauaaau

SEQ ID NO: 4061476 - RNA, 15 nt, Vaccinia virus
ugcagaaguaaugaa

SEQ ID NO: 4061477 - RNA, 20 nt, Vaccinia virus
ugcaugauguacagauuucg

SEQ ID NO: 4061478 - RNA, 13 nt, Vaccinia virus
ugccaaaaugaua

SEQ ID NO: 4061479 - RNA, 21 nt, Vaccinia virus
ugccaauaugucaucuaugga

SEQ ID NO: 4061480 - RNA, 23 nt, Vaccinia virus
ugccacaaaugaaaaaaauacuu

SEQ ID NO: 4061481 - RNA, 15 nt, Vaccinia virus
ugccacgguuccaag

SEQ ID NO: 4061482 - RNA, 18 nt, Vaccinia virus
ugccuuuuuauacauguu

SEQ ID NO: 4061483 - RNA, 17 nt, Vaccinia virus
ugcggguaucacuguua

SEQ ID NO: 4061484 - RNA, 14 nt, Vaccinia virus
ugcuaaaauaccua

SEQ ID NO: 4061485 - RNA, 12 nt, Vaccinia virus
ugcuaaauacua

SEQ ID NO: 4061486 - RNA, 13 nt, Vaccinia virus
ugcuaauauacaa

SEQ ID NO: 4061487 - RNA, 17 nt, Vaccinia virus
ugcuauaccuaauacua

SEQ ID NO: 4061488 - RNA, 20 nt, Vaccinia virus
ugcuaucaucacucuaaaau

SEQ ID NO: 4061489 - RNA, 16 nt, Vaccinia virus
ugcucggcaauaacua

SEQ ID NO: 4061490 - RNA, 14 nt, Vaccinia virus
ugcucuuucggugg

SEQ ID NO: 4061491 - RNA, 14 nt, Vaccinia virus
ugcugaagcaauaa

SEQ ID NO: 4061492 - RNA, 15 nt, Vaccinia virus
ugcuguuguacauac

SEQ ID NO: 4061493 - RNA, 15 nt, Vaccinia virus
ugcuuauauuuucau

SEQ ID NO: 4061494 - RNA, 19 nt, Vaccinia virus
ugcuugcuagacaccuuuu

SEQ ID NO: 4061495 - RNA, 15 nt, Vaccinia virus
uggaaagaaaucuac

SEQ ID NO: 4061496 - RNA, 13 nt, Vaccinia virus
uggaaagauauca

SEQ ID NO: 4061497 - RNA, 20 nt, Vaccinia virus
uggaaagauaucagauaagu

SEQ ID NO: 4061498 - RNA, 12 nt, Vaccinia virus
uggaaauacuuc

SEQ ID NO: 4061499 - RNA, 18 nt, Vaccinia virus
uggaaauaucugugaaua

SEQ ID NO: 4061500 - RNA, 13 nt, Vaccinia virus
uggaacaauaaaa

SEQ ID NO: 4061501 - RNA, 20 nt, Vaccinia virus
uggaagagucuucaacgaua

SEQ ID NO: 4061502 - RNA, 15 nt, Vaccinia virus
uggaagauauuucca

SEQ ID NO: 4061503 - RNA, 21 nt, Vaccinia virus
uggaagaugcuauaucaaaau

SEQ ID NO: 4061504 - RNA, 22 nt, Vaccinia virus
uggaagaugcuauaucaaaaua

SEQ ID NO: 4061505 - RNA, 16 nt, Vaccinia virus
uggaagcguauguucc

SEQ ID NO: 4061506 - RNA, 16 nt, Vaccinia virus
uggaaucaucuucuga

SEQ ID NO: 4061507 - RNA, 19 nt, Vaccinia virus
uggaaugacgaauccuguu

SEQ ID NO: 4061508 - RNA, 23 nt, Vaccinia virus
uggaaugacgaauccuguuucua

SEQ ID NO: 4061509 - RNA, 23 nt, Vaccinia virus
uggaaugcaaaaccccauaguga

SEQ ID NO: 4061510 - RNA, 15 nt, Vaccinia virus
uggacaaaucuggaa

SEQ ID NO: 4061511 - RNA, 15 nt, Vaccinia virus
uggacauacuaauau

SEQ ID NO: 4061512 - RNA, 14 nt, Vaccinia virus
uggaccaauuuauu

SEQ ID NO: 4061513 - RNA, 23 nt, Vaccinia virus
uggagacgccugauauguaggca

SEQ ID NO: 4061514 - RNA, 14 nt, Vaccinia virus
uggagaucuagaaa

SEQ ID NO: 4061515 - RNA, 16 nt, Vaccinia virus
uggagcaaacauuaac

SEQ ID NO: 4061516 - RNA, 15 nt, Vaccinia virus
uggaguaguacaaga

SEQ ID NO: 4061517 - RNA, 21 nt, Vaccinia virus
uggaguguauauuuaucucuu

SEQ ID NO: 4061518 - RNA, 13 nt, Vaccinia virus
uggaguugaagau

SEQ ID NO: 4061519 - RNA, 17 nt, Vaccinia virus
uggauaauauauacguu

SEQ ID NO: 4061520 - RNA, 20 nt, Vaccinia virus
uggauaccgcacuagguaca

SEQ ID NO: 4061521 - RNA, 16 nt, Vaccinia virus
uggauauguguuuaca

SEQ ID NO: 4061522 - RNA, 19 nt, Vaccinia virus
uggauauuacaaauacuuu

SEQ ID NO: 4061523 - RNA, 17 nt, Vaccinia virus
uggaucaucgugugaua

SEQ ID NO: 4061524 - RNA, 21 nt, Vaccinia virus
uguuuaaugaauuacuaaaau

SEQ ID NO: 4061525 - RNA, 19 nt, Vaccinia virus
uguuuacaguaguaaugaa

SEQ ID NO: 4061526 - RNA, 17 nt, Vaccinia virus
uguuuaccagcuccaug

SEQ ID NO: 4061527 - RNA, 21 nt, Vaccinia virus
uguuuaccagcuccaugacuu

SEQ ID NO: 4061528 - RNA, 17 nt, Vaccinia virus
uguuuagaaaaaugcua

SEQ ID NO: 4061529 - RNA, 13 nt, Vaccinia virus
uguuuauuuucaa

SEQ ID NO: 4061530 - RNA, 19 nt, Vaccinia virus
uguuucacauuuacauauu

SEQ ID NO: 4061531 - RNA, 12 nt, Vaccinia virus
uguuucauauuu

SEQ ID NO: 4061532 - RNA, 18 nt, Vaccinia virus
uguuuccaugacauauua

SEQ ID NO: 4061533 - RNA, 15 nt, Vaccinia virus
uguuugaaaacagaa

SEQ ID NO: 4061534 - RNA, 22 nt, Vaccinia virus
uguuugaaaacagaaacaucau

SEQ ID NO: 4061535 - RNA, 23 nt, Vaccinia virus
uguuuuaaauaucaaccgcaaau

SEQ ID NO: 4061536 - RNA, 16 nt, Vaccinia virus
uguuuuauguuuauua

SEQ ID NO: 4061537 - RNA, 13 nt, Vaccinia virus
uguuuucauacau

SEQ ID NO: 4061538 - RNA, 13 nt, Vaccinia virus
uguuuuuaucauc

SEQ ID NO: 4061539 - RNA, 22 nt, Vaccinia virus
uuaaaaaaaaaauacuuauucu

SEQ ID NO: 4061540 - RNA, 23 nt, Vaccinia virus
uuaaaaacaaacuuuuuauccuu

SEQ ID NO: 4061541 - RNA, 18 nt, Vaccinia virus
uuaaaaaggaaaauacua

SEQ ID NO: 4061542 - RNA, 18 nt, Vaccinia virus
uuaaaaauaguauuauca

SEQ ID NO: 4061543 - RNA, 15 nt, Vaccinia virus
uuaaaaauaugugcu

SEQ ID NO: 4061544 - RNA, 17 nt, Vaccinia virus
uuaaaacuguuuaagaa

SEQ ID NO: 4061545 - RNA, 22 nt, Vaccinia virus
uuaaaagaauuacuuagucugu

SEQ ID NO: 4061546 - RNA, 12 nt, Vaccinia virus
uuaaaauacuaa

SEQ ID NO: 4061547 - RNA, 19 nt, Vaccinia virus
uuaaaauauauucuaauau

SEQ ID NO: 4061548 - RNA, 15 nt, Vaccinia virus
uuaaaauauuauuua

SEQ ID NO: 4061549 - RNA, 13 nt, Vaccinia virus
uuaaaaucauuau

SEQ ID NO: 4061550 - RNA, 12 nt, Vaccinia virus
uuaaaaugugua

SEQ ID NO: 4061551 - RNA, 15 nt, Vaccinia virus
uuaaaauuauuaaac

SEQ ID NO: 4061552 - RNA, 12 nt, Vaccinia virus
uuaaaauuauuu

SEQ ID NO: 4061553 - RNA, 17 nt, Vaccinia virus
uuaaacauacaucuguu

SEQ ID NO: 4061554 - RNA, 12 nt, Vaccinia virus
uuaaacaucuuu

SEQ ID NO: 4061555 - RNA, 20 nt, Vaccinia virus
uuaaacgauuugaugaguua

SEQ ID NO: 4061556 - RNA, 22 nt, Vaccinia virus
uuaaagauggaguauaaucuuu

SEQ ID NO: 4061557 - RNA, 21 nt, Vaccinia virus
uuaaaggaguaugucaugaau

SEQ ID NO: 4061558 - RNA, 24 nt, Vaccinia virus
uuaaaggauggugaaauuauugca

SEQ ID NO: 4061559 - RNA, 17 nt, Vaccinia virus
uuaaaguacguaaaucu

SEQ ID NO: 4061560 - RNA, 17 nt, Vaccinia virus
uuaaauauuguauuaau

SEQ ID NO: 4061561 - RNA, 23 nt, Vaccinia virus
uuaaaucccaauucagaaaucaa

SEQ ID NO: 4061562 - RNA, 13 nt, Vaccinia virus
uuaaauccuuaau

SEQ ID NO: 4061563 - RNA, 11 nt, Vaccinia virus
uuaaauuauua

SEQ ID NO: 4061564 - RNA, 14 nt, Vaccinia virus
uuaaauuauuauua

SEQ ID NO: 4061565 - RNA, 13 nt, Vaccinia virus
uuaaauuauuuag

SEQ ID NO: 4061566 - RNA, 13 nt, Vaccinia virus
uuaaauucaucau

SEQ ID NO: 4061567 - RNA, 13 nt, Vaccinia virus
uuaaauucuuuaa

SEQ ID NO: 4061568 - RNA, 18 nt, Vaccinia virus
uuaaauuuuuuuauuaau

SEQ ID NO: 4061569 - RNA, 23 nt, Vaccinia virus
uuaacaaaugguucaaagacuag

SEQ ID NO: 4061570 - RNA, 20 nt, Vaccinia virus
uuaacagaguagauauuaau

SEQ ID NO: 4061571 - RNA, 23 nt, Vaccinia virus
uuaacaucuaaaaaauccuuaau

SEQ ID NO: 4061572 - RNA, 15 nt, Vaccinia virus
uuaacaucuauuaau

SEQ ID NO: 4061573 - RNA, 18 nt, Vaccinia virus
uuaacgcaccuauaaaga

SEQ ID NO: 4061574 - RNA, 15 nt, Vaccinia virus
uuaacguauaaauga

SEQ ID NO: 4061575 - RNA, 16 nt, Vaccinia virus
uuaacuuuucauuaau

SEQ ID NO: 4061576 - RNA, 19 nt, Vaccinia virus
uuaagaggacuauuagaag

SEQ ID NO: 4061577 - RNA, 17 nt, Vaccinia virus
uuaagauuguacacuuu

SEQ ID NO: 4061578 - RNA, 19 nt, Vaccinia virus
uuaagauuuuaaauguaua

SEQ ID NO: 4061579 - RNA, 20 nt, Vaccinia virus
uuaagcaacaugucucuaaa

SEQ ID NO: 4061580 - RNA, 20 nt, Vaccinia virus
uuaaggaauacaauacauac

SEQ ID NO: 4061581 - RNA, 15 nt, Vaccinia virus
uuaaggggaaaaagc

SEQ ID NO: 4061582 - RNA, 22 nt, Vaccinia virus
uuaaguauuguuuuuucauuau

SEQ ID NO: 4061583 - RNA, 18 nt, Vaccinia virus
uuaauaaaaauacaaucc

SEQ ID NO: 4061584 - RNA, 15 nt, Vaccinia virus
uuaauaauuguauug

SEQ ID NO: 4061585 - RNA, 21 nt, Vaccinia virus
uuaauaauuguuauuauuuca

SEQ ID NO: 4061586 - RNA, 14 nt, Vaccinia virus
uuaauacauuauua

SEQ ID NO: 4061587 - RNA, 16 nt, Vaccinia virus
uuaauacuacauauuu

SEQ ID NO: 4061588 - RNA, 21 nt, Vaccinia virus
uuaauagauauaucucuuaau

SEQ ID NO: 4061589 - RNA, 17 nt, Vaccinia virus
uuaauauaguuauuaau

SEQ ID NO: 4061590 - RNA, 13 nt, Vaccinia virus
uuaauauguauga

SEQ ID NO: 4061591 - RNA, 13 nt, Vaccinia virus
uuaauauuucuau

SEQ ID NO: 4061592 - RNA, 23 nt, Vaccinia virus
uuaaucauauacaacucuuuaau

SEQ ID NO: 4061593 - RNA, 15 nt, Vaccinia virus
uuaaucauguacaug

SEQ ID NO: 4061594 - RNA, 14 nt, Vaccinia virus
uuaaucauuaacuu

SEQ ID NO: 4061595 - RNA, 17 nt, Vaccinia virus
uuaaucguacucauuau

SEQ ID NO: 4061596 - RNA, 15 nt, Vaccinia virus
uuaaucguauguaua

SEQ ID NO: 4061597 - RNA, 14 nt, Vaccinia virus
uuaaugaaacauuu

SEQ ID NO: 4061598 - RNA, 17 nt, Vaccinia virus
uuaaugaacaaauccuu

SEQ ID NO: 4061599 - RNA, 15 nt, Vaccinia virus
uuaaugcaccgaaca

SEQ ID NO: 4061600 - RNA, 16 nt, Vaccinia virus
uuaaugcaucauuaau

SEQ ID NO: 4061601 - RNA, 21 nt, Vaccinia virus
uuaaugccgauuuaauacguu

SEQ ID NO: 4061602 - RNA, 20 nt, Vaccinia virus
uuaaugucaggaaauguaua

SEQ ID NO: 4061603 - RNA, 23 nt, Vaccinia virus
uuaaugucugcgccauuaucuau

SEQ ID NO: 4061604 - RNA, 22 nt, Vaccinia virus
uuaauucuagacuauuuggaca

SEQ ID NO: 4061605 - RNA, 15 nt, Vaccinia virus
uuaauucucucaggu

SEQ ID NO: 4061606 - RNA, 23 nt, Vaccinia virus
uuaauuguuaaacauacaucugu

SEQ ID NO: 4061607 - RNA, 18 nt, Vaccinia virus
uuaauuuggucauuauua

SEQ ID NO: 4061608 - RNA, 11 nt, Vaccinia virus
uuacaaacauc

SEQ ID NO: 4061609 - RNA, 21 nt, Vaccinia virus
uuacaaacgacauacuguaug

SEQ ID NO: 4061610 - RNA, 22 nt, Vaccinia virus
uuacaaacugaauaauaucaga

SEQ ID NO: 4061611 - RNA, 12 nt, Vaccinia virus
uuacaaaucuag

SEQ ID NO: 4061612 - RNA, 16 nt, Vaccinia virus
uuacaacaacauauga

SEQ ID NO: 4061613 - RNA, 17 nt, Vaccinia virus
uuacaagaauauaaaaa

SEQ ID NO: 4061614 - RNA, 15 nt, Vaccinia virus
uuacaagcuguuuau

SEQ ID NO: 4061615 - RNA, 19 nt, Vaccinia virus
uuacacuauuugucuuaau

SEQ ID NO: 4061616 - RNA, 18 nt, Vaccinia virus
uuacagaucuaguauaau

SEQ ID NO: 4061617 - RNA, 17 nt, Vaccinia virus
uuacauauuuacuggua

SEQ ID NO: 4061618 - RNA, 22 nt, Vaccinia virus
uuacaucaccucuaacaucauc

SEQ ID NO: 4061619 - RNA, 16 nt, Vaccinia virus
uuacaucuaguucuuu

SEQ ID NO: 4061620 - RNA, 17 nt, Vaccinia virus
uuacauuaguaaucuuu

SEQ ID NO: 4061621 - RNA, 16 nt, Vaccinia virus
uuacauuauaagaaau

SEQ ID NO: 4061622 - RNA, 16 nt, Vaccinia virus
uuaccaacucuuuaau

SEQ ID NO: 4061623 - RNA, 20 nt, Vaccinia virus
uuaccagcauuaguaacagc

SEQ ID NO: 4061624 - RNA, 12 nt, Vaccinia virus
uuaccuauucac

SEQ ID NO: 4061625 - RNA, 15 nt, Vaccinia virus
uuacgaaucauuaaa

SEQ ID NO: 4061626 - RNA, 20 nt, Vaccinia virus
uuacguggagaaaucauguu

SEQ ID NO: 4061627 - RNA, 20 nt, Vaccinia virus
uuacuaguuuuccaguguuc

SEQ ID NO: 4061628 - RNA, 22 nt, Vaccinia virus
uuacuauguuguuuaugucuuu

SEQ ID NO: 4061629 - RNA, 15 nt, Vaccinia virus
uuacucuaaaucgcu

SEQ ID NO: 4061630 - RNA, 21 nt, Vaccinia virus
uuacugcugcguuaaacauuc

SEQ ID NO: 4061631 - RNA, 21 nt, Vaccinia virus
uuacuggugcuccuguagcau

SEQ ID NO: 4061632 - RNA, 22 nt, Vaccinia virus
uuagaaaaaaugaugcugguua

SEQ ID NO: 4061633 - RNA, 20 nt, Vaccinia virus
uuagaaaacucucuauuucu

SEQ ID NO: 4061634 - RNA, 23 nt, Vaccinia virus
uuagaaaacucucuauuucuuaa

SEQ ID NO: 4061635 - RNA, 17 nt, Vaccinia virus
uuagaaaauucucuuac

SEQ ID NO: 4061636 - RNA, 16 nt, Vaccinia virus
uuagaaggaguguuuu

SEQ ID NO: 4061637 - RNA, 17 nt, Vaccinia virus
uuagaauagucucuuua

SEQ ID NO: 4061638 - RNA, 19 nt, Vaccinia virus
uuagaaucauugcuguaaa

SEQ ID NO: 4061639 - RNA, 19 nt, Vaccinia virus
uuagacagugguuucaugu

SEQ ID NO: 4061640 - RNA, 17 nt, Vaccinia virus
uuagacgcuuauuauua

SEQ ID NO: 4061641 - RNA, 22 nt, Vaccinia virus
uuagacuguuuguagaaugcug

SEQ ID NO: 4061642 - RNA, 14 nt, Vaccinia virus
uuagacuuguauuc

SEQ ID NO: 4061643 - RNA, 21 nt, Vaccinia virus
uuagagauaauauccugaaca

SEQ ID NO: 4061644 - RNA, 19 nt, Vaccinia virus
uuagaguaguaucauuaaa

SEQ ID NO: 4061645 - RNA, 20 nt, Vaccinia virus
uuagauaaauggaauacuaa

SEQ ID NO: 4061646 - RNA, 17 nt, Vaccinia virus
uuagauaauugugguaa

SEQ ID NO: 4061647 - RNA, 18 nt, Vaccinia virus
uuuaaacacucuuucuga

SEQ ID NO: 4061648 - RNA, 20 nt, Vaccinia virus
uuuaaauauuauauaaacau

SEQ ID NO: 4061649 - RNA, 18 nt, Vaccinia virus
uuuaacaaaguuauucau

SEQ ID NO: 4061650 - RNA, 15 nt, Vaccinia virus
uuuaacaauuucuau

SEQ ID NO: 4061651 - RNA, 12 nt, Vaccinia virus
uuuaacacuaua

SEQ ID NO: 4061652 - RNA, 16 nt, Vaccinia virus
uuuaagaaauggugua

SEQ ID NO: 4061653 - RNA, 23 nt, Vaccinia virus
uuuaagacugcugaauguaucuu

SEQ ID NO: 4061654 - RNA, 14 nt, Vaccinia virus
uuuaauacagaugg

SEQ ID NO: 4061655 - RNA, 16 nt, Vaccinia virus
uuuaauagauauacac

SEQ ID NO: 4061656 - RNA, 18 nt, Vaccinia virus
uuuaaugacgaauucaua

SEQ ID NO: 4061657 - RNA, 21 nt, Vaccinia virus
uuuaccgacacccguuucaug

SEQ ID NO: 4061658 - RNA, 17 nt, Vaccinia virus
uuuaccucuucugauau

SEQ ID NO: 4061659 - RNA, 22 nt, Vaccinia virus
uuuacgagcuauuaaacuguuu

SEQ ID NO: 4061660 - RNA, 21 nt, Vaccinia virus
uuuacuuuucuaaauucauaa

SEQ ID NO: 4061661 - RNA, 20 nt, Vaccinia virus
uuuagaaauguuauauauaa

SEQ ID NO: 4061662 - RNA, 16 nt, Vaccinia virus
uuuagaagugauucuu

SEQ ID NO: 4061663 - RNA, 19 nt, Vaccinia virus
uuuagaauauauguaugua

SEQ ID NO: 4061664 - RNA, 18 nt, Vaccinia virus
uuuagaugaauuauuauu

SEQ ID NO: 4061665 - RNA, 14 nt, Vaccinia virus
uuuagucgagauau

SEQ ID NO: 4061666 - RNA, 14 nt, Vaccinia virus
uuuaguguagauau

SEQ ID NO: 4061667 - RNA, 15 nt, Vaccinia virus
uuuauaaacaaaaau

SEQ ID NO: 4061668 - RNA, 14 nt, Vaccinia virus
uuuauacuucuaau

SEQ ID NO: 4061669 - RNA, 14 nt, Vaccinia virus
uuuauagaauuuag

SEQ ID NO: 4061670 - RNA, 20 nt, Vaccinia virus
uuuaucucgaggauacguaa

SEQ ID NO: 4061671 - RNA, 22 nt, Vaccinia virus
uuuaugaaugaugauauauaac

SEQ ID NO: 4061672 - RNA, 15 nt, Vaccinia virus
uuuaugauacguaca

SEQ ID NO: 4061673 - RNA, 17 nt, Vaccinia virus
uuuauguuaaaucaauu

SEQ ID NO: 4061674 - RNA, 14 nt, Vaccinia virus
uuuauuaaauacuc

SEQ ID NO: 4061675 - RNA, 19 nt, Vaccinia virus
uuuauuaagaaaauucaga

SEQ ID NO: 4061676 - RNA, 22 nt, Vaccinia virus
uuuauuuaaggacuuaacaauu

SEQ ID NO: 4061677 - RNA, 13 nt, Vaccinia virus
uuuauuuauucuc

SEQ ID NO: 4061678 - RNA, 14 nt, Vaccinia virus
uuuauuuuauucua

SEQ ID NO: 4061679 - RNA, 19 nt, Vaccinia virus
uuucaaagcaauuguauua

SEQ ID NO: 4061680 - RNA, 14 nt, Vaccinia virus
uuucaccaauaaga

SEQ ID NO: 4061681 - RNA, 16 nt, Vaccinia virus
uuucagaaucuagauu

SEQ ID NO: 4061682 - RNA, 16 nt, Vaccinia virus
uuucagaggaauacag

SEQ ID NO: 4061683 - RNA, 13 nt, Vaccinia virus
uuucaucgaugau

SEQ ID NO: 4061684 - RNA, 14 nt, Vaccinia virus
uuucaucuagauac

SEQ ID NO: 4061685 - RNA, 14 nt, Vaccinia virus
uuucauguucgaaa

SEQ ID NO: 4061686 - RNA, 12 nt, Vaccinia virus
uuuccaaagaua

SEQ ID NO: 4061687 - RNA, 21 nt, Vaccinia virus
uuuccaaaucaguaacuaugu

SEQ ID NO: 4061688 - RNA, 20 nt, Vaccinia virus
uuuccauggcccauucuauu

SEQ ID NO: 4061689 - RNA, 16 nt, Vaccinia virus
uuucccagcauuaacu

SEQ ID NO: 4061690 - RNA, 19 nt, Vaccinia virus
uuuccuaguauucgucaaa

SEQ ID NO: 4061691 - RNA, 21 nt, Vaccinia virus
uuucgauucuggcuauuucaa

SEQ ID NO: 4061692 - RNA, 21 nt, Vaccinia virus
uuucuaccaaccaagaauaac

SEQ ID NO: 4061693 - RNA, 16 nt, Vaccinia virus
uuucuacuacuucauu

SEQ ID NO: 4061694 - RNA, 16 nt, Vaccinia virus
uuucucaaagauguua

SEQ ID NO: 4061695 - RNA, 16 nt, Vaccinia virus
uuucuccacuacauau

SEQ ID NO: 4061696 - RNA, 22 nt, Vaccinia virus
uuucugguguaauauucuaguu

SEQ ID NO: 4061697 - RNA, 16 nt, Vaccinia virus
uuucugguuagauaac

SEQ ID NO: 4061698 - RNA, 18 nt, Vaccinia virus
uuucuguaaauucaugau

SEQ ID NO: 4061699 - RNA, 22 nt, Vaccinia virus
uuugaaaauguuacugaagaau

SEQ ID NO: 4061700 - RNA, 12 nt, Vaccinia virus
uuugaaacugaa

SEQ ID NO: 4061701 - RNA, 19 nt, Vaccinia virus
uuugaauauacuuuuaauu

SEQ ID NO: 4061702 - RNA, 19 nt, Vaccinia virus
uuugaauuaguuuauaauu

SEQ ID NO: 4061703 - RNA, 14 nt, Vaccinia virus
uuugacgacaacca

SEQ ID NO: 4061704 - RNA, 15 nt, Vaccinia virus
uuugagauuucauaa

SEQ ID NO: 4061705 - RNA, 17 nt, Vaccinia virus
uuugagguaaucuucuu

SEQ ID NO: 4061706 - RNA, 18 nt, Vaccinia virus
uuugauaaauuucuucuu

SEQ ID NO: 4061707 - RNA, 16 nt, Vaccinia virus
uuugauacccugauau

SEQ ID NO: 4061708 - RNA, 17 nt, Vaccinia virus
uuugauauuacuaaaca

SEQ ID NO: 4061709 - RNA, 21 nt, Vaccinia virus
uuugauauuacuaaacacaca

SEQ ID NO: 4061710 - RNA, 19 nt, Vaccinia virus
uuugccaagguuagaugua

SEQ ID NO: 4061711 - RNA, 21 nt, Vaccinia virus
uuuggaaacauaaaauaacuc

SEQ ID NO: 4061712 - RNA, 22 nt, Vaccinia virus
uuuggcuaaacuauauaauucu

SEQ ID NO: 4061713 - RNA, 14 nt, Vaccinia virus
uuuggcucuucuau

SEQ ID NO: 4061714 - RNA, 23 nt, Vaccinia virus
uuuggucccgauaccauuaaaga

SEQ ID NO: 4061715 - RNA, 18 nt, Vaccinia virus
uuuguaaagcuauguaaa

SEQ ID NO: 4061716 - RNA, 22 nt, Vaccinia virus
uuuguaaauaacuaucuauaaa

SEQ ID NO: 4061717 - RNA, 23 nt, Vaccinia virus
uuuguacagaacguaguaguuua

SEQ ID NO: 4061718 - RNA, 17 nt, Vaccinia virus
uuuguaccuuuguacau

SEQ ID NO: 4061719 - RNA, 13 nt, Vaccinia virus
uuuguauguacca

SEQ ID NO: 4061720 - RNA, 14 nt, Vaccinia virus
uuuguauucauaga

SEQ ID NO: 4061721 - RNA, 16 nt, Vaccinia virus
uuugucauuaacuuua

SEQ ID NO: 4061722 - RNA, 14 nt, Vaccinia virus
uuuguguugugcau

SEQ ID NO: 4061723 - RNA, 14 nt, Vaccinia virus
uuuuaaacacucuu

SEQ ID NO: 4061724 - RNA, 14 nt, Vaccinia virus
uuuuaaggggaaaa

SEQ ID NO: 4061725 - RNA, 14 nt, Vaccinia virus
uuuuaauauaaacg

SEQ ID NO: 4061726 - RNA, 16 nt, Vaccinia virus
uuuuaauguauaacag

SEQ ID NO: 4061727 - RNA, 23 nt, Vaccinia virus
uuuuacauggauuuaucauauca

SEQ ID NO: 4061728 - RNA, 18 nt, Vaccinia virus
uuuuacguaguaaucguc

SEQ ID NO: 4061729 - RNA, 18 nt, Vaccinia virus
uuuuagaaauguuauaua

SEQ ID NO: 4061730 - RNA, 15 nt, Vaccinia virus
uuuuagcagucuaac

SEQ ID NO: 4061731 - RNA, 20 nt, Vaccinia virus
uuuuagccagagauaucaua

SEQ ID NO: 4061732 - RNA, 13 nt, Vaccinia virus
uuuuauacuucua

SEQ ID NO: 4061733 - RNA, 19 nt, Vaccinia virus
uuuuauggcaaacuuuacu

SEQ ID NO: 4061734 - RNA, 12 nt, Vaccinia virus
uuuuauuuaauu

SEQ ID NO: 4061735 - RNA, 15 nt, Vaccinia virus
uuuucacuaaauaag

SEQ ID NO: 4061736 - RNA, 18 nt, Vaccinia virus
uuuucauuagcaugaauc

SEQ ID NO: 4061737 - RNA, 15 nt, Vaccinia virus
uuuucguguuccaaa

SEQ ID NO: 4061738 - RNA, 21 nt, Vaccinia virus
uuuugaaggauuggacaaauc

SEQ ID NO: 4061739 - RNA, 23 nt, Vaccinia virus
uuuugacaaagauggucuaaaau

SEQ ID NO: 4061740 - RNA, 15 nt, Vaccinia virus
uuuugcgcuauuaaa

SEQ ID NO: 4061741 - RNA, 22 nt, Vaccinia virus
uuuugguuucuuucauuucagu

SEQ ID NO: 4061742 - RNA, 20 nt, Vaccinia virus
uuuuguuggagaacuugaua

SEQ ID NO: 4061743 - RNA, 19 nt, Vaccinia virus
uuuuuaaagguaucuaaug

SEQ ID NO: 4061744 - RNA, 15 nt, Vaccinia virus
uuuuuacuaaucaua

SEQ ID NO: 4061745 - RNA, 21 nt, Vaccinia virus
uuuuuauaaaaacuuuuagaa

SEQ ID NO: 4061746 - RNA, 21 nt, Vaccinia virus
uuuuuauaaaaugacaucguu

SEQ ID NO: 4061747 - RNA, 21 nt, Vaccinia virus
uuuuuauuacauguuuucaua

SEQ ID NO: 4061748 - RNA, 17 nt, Vaccinia virus
uuuuucaucuuuacaua

SEQ ID NO: 4061749 - RNA, 13 nt, Vaccinia virus
uuuuucaugauug

SEQ ID NO: 4061750 - RNA, 19 nt, Vaccinia virus
uuuuucuucauuuaucaua

SEQ ID NO: 4061751 - RNA, 15 nt, Vaccinia virus
uuuuugacuuacaua

SEQ ID NO: 4061752 - RNA, 19 nt, Vaccinia virus
uuuuugcaggaaguauauc

SEQ ID NO: 4061753 - RNA, 18 nt, Vaccinia virus
uuuuuuagauguaguauc

SEQ ID NO: 4061754 - RNA, 21 nt, Vaccinia virus
ggaauuaaucuaguagaaaag

SEQ ID NO: 4061755 - RNA, 16 nt, Vaccinia virus
ggacaaauucuuuuga

SEQ ID NO: 4061756 - RNA, 19 nt, Vaccinia virus
ggacauacguauauuucua

SEQ ID NO: 4061757 - RNA, 21 nt, Vaccinia virus
ggacaucgacgccuuagaaau

SEQ ID NO: 4061758 - RNA, 22 nt, Vaccinia virus
ggaccacauccuucuucaucaa

SEQ ID NO: 4061759 - RNA, 22 nt, Vaccinia virus
ggacgacauauuaaucuuuuua

SEQ ID NO: 4061760 - RNA, 18 nt, Vaccinia virus
ggacgauauauuguuuca

SEQ ID NO: 4061761 - RNA, 17 nt, Vaccinia virus
ggagacauccauugaua

SEQ ID NO: 4061762 - RNA, 17 nt, Vaccinia virus
ggagguggauauuucug

SEQ ID NO: 4061763 - RNA, 13 nt, Vaccinia virus
ggaguuagaaaac

SEQ ID NO: 4061764 - RNA, 18 nt, Vaccinia virus
ggauaaaacaaaaaugcu

SEQ ID NO: 4061765 - RNA, 22 nt, Vaccinia virus
ggauacguccguccaagaauac

SEQ ID NO: 4061766 - RNA, 21 nt, Vaccinia virus
ggaucuaaaauccauauuuuc

SEQ ID NO: 4061767 - RNA, 20 nt, Vaccinia virus
ggaucuccaucauccacaug

SEQ ID NO: 4061768 - RNA, 23 nt, Vaccinia virus
ggaugguccaaacugccacugau

SEQ ID NO: 4061769 - RNA, 13 nt, Vaccinia virus
ggcaaaagaauac

SEQ ID NO: 4061770 - RNA, 17 nt, Vaccinia virus
ggcaugcaugugccugc

SEQ ID NO: 4061771 - RNA, 14 nt, Vaccinia virus
ggcauuuguauuuu

SEQ ID NO: 4061772 - RNA, 22 nt, Vaccinia virus
ggcggauguugugaaugacauc

SEQ ID NO: 4061773 - RNA, 13 nt, Vaccinia virus
ggcucauugauua

SEQ ID NO: 4061774 - RNA, 17 nt, Vaccinia virus
gggaaauauggaagaaa

SEQ ID NO: 4061775 - RNA, 23 nt, Vaccinia virus
gguagauguuuggagaaaugaga

SEQ ID NO: 4061776 - RNA, 19 nt, Vaccinia virus
gguagcuuccagauuuaaa

SEQ ID NO: 4061777 - RNA, 15 nt, Vaccinia virus
gguauauguuuacca

SEQ ID NO: 4061778 - RNA, 22 nt, Vaccinia virus
ggucaaccccuaagucuuuuua

SEQ ID NO: 4061779 - RNA, 12 nt, Vaccinia virus
ggucagaaauau

SEQ ID NO: 4061780 - RNA, 15 nt, Vaccinia virus
ggucuaucaauaacu

SEQ ID NO: 4061781 - RNA, 13 nt, Vaccinia virus
ggucuaucuauua

SEQ ID NO: 4061782 - RNA, 19 nt, Vaccinia virus
ggugucuccauguacauac

SEQ ID NO: 4061783 - RNA, 17 nt, Vaccinia virus
guaaaaaguuuauuaau

SEQ ID NO: 4061784 - RNA, 13 nt, Vaccinia virus
guaaaacaaacuu

SEQ ID NO: 4061785 - RNA, 19 nt, Vaccinia virus
guaaaagaucuauaauguc

SEQ ID NO: 4061786 - RNA, 17 nt, Vaccinia virus
guaaaaucaaacacaag

SEQ ID NO: 4061787 - RNA, 18 nt, Vaccinia virus
guaaaaugaaauaucuua

SEQ ID NO: 4061788 - RNA, 14 nt, Vaccinia virus
guaaacauaucaua

SEQ ID NO: 4061789 - RNA, 13 nt, Vaccinia virus
guaaagauaucua

SEQ ID NO: 4061790 - RNA, 14 nt, Vaccinia virus
guaaauaauaauau

SEQ ID NO: 4061791 - RNA, 13 nt, Vaccinia virus
guaaaucuuuuca

SEQ ID NO: 4061792 - RNA, 17 nt, Vaccinia virus
guaaauguuuuuaucau

SEQ ID NO: 4061793 - RNA, 19 nt, Vaccinia virus
guaaauuuuaucaugugua

SEQ ID NO: 4061794 - RNA, 18 nt, Vaccinia virus
gugcauacgcauucaucu

SEQ ID NO: 4061795 - RNA, 19 nt, Vaccinia virus
gugccaaaaugauauacag

SEQ ID NO: 4061796 - RNA, 18 nt, Vaccinia virus
gugcucaagcuaaacaag

SEQ ID NO: 4061797 - RNA, 15 nt, Vaccinia virus
gugcuuaauguuucc

SEQ ID NO: 4061798 - RNA, 19 nt, Vaccinia virus
guggaagcugaacacauua

SEQ ID NO: 4061799 - RNA, 19 nt, Vaccinia virus
guggucaauuacaaauaaa

SEQ ID NO: 4061800 - RNA, 21 nt, Vaccinia virus
guguacguauauuuagauguu

SEQ ID NO: 4061801 - RNA, 22 nt, Vaccinia virus
guguauuaccccucauaguauu

SEQ ID NO: 4061802 - RNA, 12 nt, Vaccinia virus
guguauuuccau

SEQ ID NO: 4061803 - RNA, 15 nt, Vaccinia virus
guguauuuccaucau

SEQ ID NO: 4061804 - RNA, 15 nt, Vaccinia virus
guguccauaauccuc

SEQ ID NO: 4061805 - RNA, 15 nt, Vaccinia virus
gugucgauucaucaa

SEQ ID NO: 4061806 - RNA, 15 nt, Vaccinia virus
gugucugaaucgaua

SEQ ID NO: 4061807 - RNA, 13 nt, Vaccinia virus
guguuaaaacaau

SEQ ID NO: 4061808 - RNA, 10 nt, Vaccinia virus
guguuagcca

SEQ ID NO: 4061809 - RNA, 13 nt, Vaccinia virus
guguuauaauauu

SEQ ID NO: 4061810 - RNA, 22 nt, Vaccinia virus
guguuccggagaaucaguaaag

SEQ ID NO: 4061811 - RNA, 15 nt, Vaccinia virus
guguuuuaguuuauc

SEQ ID NO: 4061812 - RNA, 13 nt, Vaccinia virus
guuaaaaaaaaga

SEQ ID NO: 4061813 - RNA, 14 nt, Vaccinia virus
guuaaaaauuuaga

SEQ ID NO: 4061814 - RNA, 19 nt, Vaccinia virus
guuaaaggauauuaugcau

SEQ ID NO: 4061815 - RNA, 17 nt, Vaccinia virus
guuaagagaauaauaga

SEQ ID NO: 4061816 - RNA, 17 nt, Vaccinia virus
guuaauaaguaaaugaa

SEQ ID NO: 4061817 - RNA, 23 nt, Vaccinia virus
guuaauauagacaauucuuuugu

SEQ ID NO: 4061818 - RNA, 17 nt, Vaccinia virus
guuaaucccaacaauga

SEQ ID NO: 4061819 - RNA, 19 nt, Vaccinia virus
guuaauuaugcaaauuuga

SEQ ID NO: 4061820 - RNA, 13 nt, Vaccinia virus
guuacaaauguag

SEQ ID NO: 4061821 - RNA, 18 nt, Vaccinia virus
guuacaauuuguuaaaaa

SEQ ID NO: 4061822 - RNA, 16 nt, Vaccinia virus
guuacaccaaaaaaga

SEQ ID NO: 4061823 - RNA, 22 nt, Vaccinia virus
guuacacgcauccuuauaaaga

SEQ ID NO: 4061824 - RNA, 16 nt, Vaccinia virus
guuacgauuuuaucau

SEQ ID NO: 4061825 - RNA, 21 nt, Vaccinia virus
guuacucaguugaacagauga

SEQ ID NO: 4061826 - RNA, 18 nt, Vaccinia virus
guuagaaucauuuaucau

SEQ ID NO: 4061827 - RNA, 14 nt, Vaccinia virus
guuagacauaaaaa

SEQ ID NO: 4061828 - RNA, 19 nt, Vaccinia virus
guuagaugauuauaaagga

SEQ ID NO: 4061829 - RNA, 22 nt, Vaccinia virus
guuagaugguaaaauacaaaau

SEQ ID NO: 4061830 - RNA, 15 nt, Vaccinia virus
guuagauguuaaaaa

SEQ ID NO: 4061831 - RNA, 16 nt, Vaccinia virus
guuaguucucuuuuca

SEQ ID NO: 4061832 - RNA, 19 nt, Vaccinia virus
guuauacgucauuucaucu

SEQ ID NO: 4061833 - RNA, 15 nt, Vaccinia virus
guuauauauaaaaga

SEQ ID NO: 4061834 - RNA, 23 nt, Vaccinia virus
guuauauguaacauugaguaaau

SEQ ID NO: 4061835 - RNA, 21 nt, Vaccinia virus
guuaucaucguauaaauuaaa

SEQ ID NO: 4061836 - RNA, 18 nt, Vaccinia virus
guuaucaugaaauguuug

SEQ ID NO: 4061837 - RNA, 11 nt, Vaccinia virus
guuaucuuuug

SEQ ID NO: 4061838 - RNA, 23 nt, Vaccinia virus
guuaugaaucuggauugccuaaa

SEQ ID NO: 4061839 - RNA, 22 nt, Vaccinia virus
guuauuacuacugaagaacuac

SEQ ID NO: 4061840 - RNA, 15 nt, Vaccinia virus
guuauuauaaacucu

SEQ ID NO: 4061841 - RNA, 13 nt, Vaccinia virus
guuauuauacaug

SEQ ID NO: 4061842 - RNA, 19 nt, Vaccinia virus
guuauucucggaugcuaaa

SEQ ID NO: 4061843 - RNA, 15 nt, Vaccinia virus
guucaaaaccuuuga

SEQ ID NO: 4061844 - RNA, 14 nt, Vaccinia virus
guucaaauauauga

SEQ ID NO: 4061845 - RNA, 12 nt, Vaccinia virus
guucaaauuaag

SEQ ID NO: 4061846 - RNA, 16 nt, Vaccinia virus
guucaccuucuauaga

SEQ ID NO: 4061847 - RNA, 18 nt, Vaccinia virus
guucauaagucuaauaga

SEQ ID NO: 4061848 - RNA, 18 nt, Vaccinia virus
guucauaaucucaucauc

SEQ ID NO: 4061849 - RNA, 15 nt, Vaccinia virus
guucaucacauaugc

SEQ ID NO: 4061850 - RNA, 21 nt, Vaccinia virus
guucauuaaaaacaaacuuuu

SEQ ID NO: 4061851 - RNA, 12 nt, Vaccinia virus
guuccauggcag

SEQ ID NO: 4061852 - RNA, 15 nt, Vaccinia virus
guuccauuacaaaua

SEQ ID NO: 4061853 - RNA, 22 nt, Vaccinia virus
guuccugguauauagauaaaga

SEQ ID NO: 4061854 - RNA, 19 nt, Vaccinia virus
guuccuguagauaauaacu

SEQ ID NO: 4061855 - RNA, 23 nt, Vaccinia virus
guucguaaacgaacuauaucauc

SEQ ID NO: 4061856 - RNA, 21 nt, Vaccinia virus
guucgugccaauugaguaaca

SEQ ID NO: 4061857 - RNA, 18 nt, Vaccinia virus
guucuaaauuuagauagu

SEQ ID NO: 4061858 - RNA, 13 nt, Vaccinia virus
guucuaacaucau

SEQ ID NO: 4061859 - RNA, 21 nt, Vaccinia virus
guucuaaugugauucucugaa

SEQ ID NO: 4061860 - RNA, 21 nt, Vaccinia virus
guucuagcccucuucaagaac

SEQ ID NO: 4061861 - RNA, 23 nt, Vaccinia virus
guucuagucgguauuucaucauu

SEQ ID NO: 4061862 - RNA, 21 nt, Vaccinia virus
guucuaguuccgcauuaaaug

SEQ ID NO: 4061863 - RNA, 12 nt, Vaccinia virus
guucucuaaaug

SEQ ID NO: 4061864 - RNA, 17 nt, Vaccinia virus
guucugggaauagaaac

SEQ ID NO: 4061865 - RNA, 19 nt, Vaccinia virus
guucuucgcagaugaugau

SEQ ID NO: 4061866 - RNA, 16 nt, Vaccinia virus
guucuuugaacaucuu

SEQ ID NO: 4061867 - RNA, 15 nt, Vaccinia virus
guucuuuuagaaaau

SEQ ID NO: 4061868 - RNA, 17 nt, Vaccinia virus
guugacgcuguaaaaga

SEQ ID NO: 4061869 - RNA, 20 nt, Vaccinia virus
guugagcuaauuuuuguaaa

SEQ ID NO: 4061870 - RNA, 12 nt, Vaccinia virus
guugauauuaac

SEQ ID NO: 4061871 - RNA, 23 nt, Vaccinia virus
guugaucucaagccgucuuuucu

SEQ ID NO: 4061872 - RNA, 19 nt, Vaccinia virus
guugaugugacuguuuucu

SEQ ID NO: 4061873 - RNA, 16 nt, Vaccinia virus
guugauuacucuuuuu

SEQ ID NO: 4061874 - RNA, 17 nt, Vaccinia virus
guuggaaaaaugaugaa

SEQ ID NO: 4061875 - RNA, 20 nt, Vaccinia virus
guuguacaaauggagauauu

SEQ ID NO: 4061876 - RNA, 10 nt, Vaccinia virus
guuguauuua

SEQ ID NO: 4061877 - RNA, 17 nt, Vaccinia virus
guuguuaaaaaauuaag

SEQ ID NO: 4061878 - RNA, 23 nt, Vaccinia virus
guuguuacauuaguaaucuuuuu

SEQ ID NO: 4061879 - RNA, 16 nt, Vaccinia virus
guuguuccuagauaug

SEQ ID NO: 4061880 - RNA, 14 nt, Vaccinia virus
guuuaaaacuucua

SEQ ID NO: 4061881 - RNA, 21 nt, Vaccinia virus
guuuaacgaggacuuauucag

SEQ ID NO: 4061882 - RNA, 13 nt, Vaccinia virus
guuuaauacuuau

SEQ ID NO: 4061883 - RNA, 13 nt, Vaccinia virus
guuuaauauccuc

SEQ ID NO: 4061884 - RNA, 21 nt, Vaccinia virus
guuuacaaacugaauaauauc

SEQ ID NO: 4061885 - RNA, 19 nt, Vaccinia virus
guuuagacggcaacauaga

SEQ ID NO: 4061886 - RNA, 17 nt, Vaccinia virus
guuuagcuauucguaac

SEQ ID NO: 4061887 - RNA, 14 nt, Vaccinia virus
guuuauagauguuc

SEQ ID NO: 4061888 - RNA, 19 nt, Vaccinia virus
uaaaaacaaauuuguacau

SEQ ID NO: 4061889 - RNA, 21 nt, Vaccinia virus
uaaaaaccaucgucugaaucc

SEQ ID NO: 4061890 - RNA, 16 nt, Vaccinia virus
uaaaaacucauuacau

SEQ ID NO: 4061891 - RNA, 21 nt, Vaccinia virus
uaaaaacucuaacauguguuu

SEQ ID NO: 4061892 - RNA, 15 nt, Vaccinia virus
uaaaaagauaaacuu

SEQ ID NO: 4061893 - RNA, 19 nt, Vaccinia virus
uaaaaagaugauauaucua

SEQ ID NO: 4061894 - RNA, 16 nt, Vaccinia virus
uaaaaaggaaauacuu

SEQ ID NO: 4061895 - RNA, 16 nt, Vaccinia virus
uaaaaauaauauuguu

SEQ ID NO: 4061896 - RNA, 15 nt, Vaccinia virus
uaaaaauaauuauua

SEQ ID NO: 4061897 - RNA, 14 nt, Vaccinia virus
uaaaaauaugugcu

SEQ ID NO: 4061898 - RNA, 14 nt, Vaccinia virus
uaaaaauuauguuu

SEQ ID NO: 4061899 - RNA, 12 nt, Vaccinia virus
uaaaacauaaag

SEQ ID NO: 4061900 - RNA, 14 nt, Vaccinia virus
uaaaacauuugcau

SEQ ID NO: 4061901 - RNA, 20 nt, Vaccinia virus
uaaaacuaucucgacuuauu

SEQ ID NO: 4061902 - RNA, 22 nt, Vaccinia virus
uaaaacuggagagacugauuac

SEQ ID NO: 4061903 - RNA, 17 nt, Vaccinia virus
uaaaagacaaaucuugu

SEQ ID NO: 4061904 - RNA, 13 nt, Vaccinia virus
uaaaagacuuauu

SEQ ID NO: 4061905 - RNA, 18 nt, Vaccinia virus
uaaaaguuaaugagagca

SEQ ID NO: 4061906 - RNA, 15 nt, Vaccinia virus
uaaaauacuacuguu

SEQ ID NO: 4061907 - RNA, 12 nt, Vaccinia virus
uaaaauaucuua

SEQ ID NO: 4061908 - RNA, 14 nt, Vaccinia virus
uaaaauauguaguc

SEQ ID NO: 4061909 - RNA, 12 nt, Vaccinia virus
uaaaaugagcau

SEQ ID NO: 4061910 - RNA, 17 nt, Vaccinia virus
uaaaaugauauuucauu

SEQ ID NO: 4061911 - RNA, 15 nt, Vaccinia virus
uaaaaugguaaacuu

SEQ ID NO: 4061912 - RNA, 17 nt, Vaccinia virus
uaaaauguccacagaua

SEQ ID NO: 4061913 - RNA, 15 nt, Vaccinia virus
uaaaauuacuuaaag

SEQ ID NO: 4061914 - RNA, 22 nt, Vaccinia virus
uaaaauuaucuacacaaauaga

SEQ ID NO: 4061915 - RNA, 20 nt, Vaccinia virus
uaaaauuauugauauguaua

SEQ ID NO: 4061916 - RNA, 22 nt, Vaccinia virus
uaaaauuccuaacgaugauaug

SEQ ID NO: 4061917 - RNA, 15 nt, Vaccinia virus
uaaaauuuaaaauga

SEQ ID NO: 4061918 - RNA, 21 nt, Vaccinia virus
uaaacaaacuaauaaacauuc

SEQ ID NO: 4061919 - RNA, 18 nt, Vaccinia virus
uaaacaagcuaucucuug

SEQ ID NO: 4061920 - RNA, 15 nt, Vaccinia virus
uaaacaauuucacaa

SEQ ID NO: 4061921 - RNA, 17 nt, Vaccinia virus
uaaacacacauuauuca

SEQ ID NO: 4061922 - RNA, 16 nt, Vaccinia virus
uaaacacgaauacuau

SEQ ID NO: 4061923 - RNA, 20 nt, Vaccinia virus
uaaacagcauuucugucaac

SEQ ID NO: 4061924 - RNA, 22 nt, Vaccinia virus
uaaacauaaauauccauuggaa

SEQ ID NO: 4061925 - RNA, 17 nt, Vaccinia virus
uaaacaucuugauacuu

SEQ ID NO: 4061926 - RNA, 13 nt, Vaccinia virus
uaaacauggauuu

SEQ ID NO: 4061927 - RNA, 23 nt, Vaccinia virus
uaaacauuaucgagcaagcauug

SEQ ID NO: 4061928 - RNA, 23 nt, Vaccinia virus
uaaacauuguuuguauucuccag

SEQ ID NO: 4061929 - RNA, 21 nt, Vaccinia virus
uaaacccucgaucaugaaugg

SEQ ID NO: 4061930 - RNA, 18 nt, Vaccinia virus
uaaaccgauaguguauaa

SEQ ID NO: 4061931 - RNA, 15 nt, Vaccinia virus
uaaacgauauucuug

SEQ ID NO: 4061932 - RNA, 20 nt, Vaccinia virus
uaaacgauuuuccaaaucag

SEQ ID NO: 4061933 - RNA, 20 nt, Vaccinia virus
uaaacgcgucaaauuuuuca

SEQ ID NO: 4061934 - RNA, 23 nt, Vaccinia virus
uaaacggcaaaccaaaaacauuu

SEQ ID NO: 4061935 - RNA, 18 nt, Vaccinia virus
uaaacggcuuuuaaacag

SEQ ID NO: 4061936 - RNA, 18 nt, Vaccinia virus
uaaacguauucaugacau

SEQ ID NO: 4061937 - RNA, 18 nt, Vaccinia virus
uaaacuacucgaacagau

SEQ ID NO: 4061938 - RNA, 15 nt, Vaccinia virus
uaaacuacuggaaua

SEQ ID NO: 4061939 - RNA, 20 nt, Vaccinia virus
uaaacuauacuaugaugucu

SEQ ID NO: 4061940 - RNA, 20 nt, Vaccinia virus
uaaacuauuuuaccagcauu

SEQ ID NO: 4061941 - RNA, 17 nt, Vaccinia virus
uaaacucacauuucaaa

SEQ ID NO: 4061942 - RNA, 17 nt, Vaccinia virus
uaaacucuuuaguuucc

SEQ ID NO: 4061943 - RNA, 23 nt, Vaccinia virus
uaaacugcgccaaauuguggcau

SEQ ID NO: 4061944 - RNA, 12 nt, Vaccinia virus
uaaagaaaauau

SEQ ID NO: 4061945 - RNA, 17 nt, Vaccinia virus
uaaagaaaugucuacau

SEQ ID NO: 4061946 - RNA, 15 nt, Vaccinia virus
uaaagacaaacaaug

SEQ ID NO: 4061947 - RNA, 17 nt, Vaccinia virus
uaaagacaacgaauaca

SEQ ID NO: 4061948 - RNA, 21 nt, Vaccinia virus
uaaagauauucuaaaauggua

SEQ ID NO: 4061949 - RNA, 19 nt, Vaccinia virus
uaaagcauauuccauuaau

SEQ ID NO: 4061950 - RNA, 15 nt, Vaccinia virus
uaaaggaugauacau

SEQ ID NO: 4061951 - RNA, 14 nt, Vaccinia virus
uaaagucugucaaa

SEQ ID NO: 4061952 - RNA, 21 nt, Vaccinia virus
uaaaguuagaugugucauacu

SEQ ID NO: 4061953 - RNA, 15 nt, Vaccinia virus
uaaauaaauaauguu

SEQ ID NO: 4061954 - RNA, 13 nt, Vaccinia virus
uaaauauaaacac

SEQ ID NO: 4061955 - RNA, 13 nt, Vaccinia virus
uaaauauauuuac

SEQ ID NO: 4061956 - RNA, 14 nt, Vaccinia virus
uaaauaucauuaau

SEQ ID NO: 4061957 - RNA, 13 nt, Vaccinia virus
uaaauauuucauu

SEQ ID NO: 4061958 - RNA, 16 nt, Vaccinia virus
uaaaucaacagaaguu

SEQ ID NO: 4061959 - RNA, 15 nt, Vaccinia virus
uaaaucaauaucucu

SEQ ID NO: 4061960 - RNA, 23 nt, Vaccinia virus
uaaauccaaauucggaucuaauu

SEQ ID NO: 4061961 - RNA, 14 nt, Vaccinia virus
uaaaucuauuauau

SEQ ID NO: 4061962 - RNA, 19 nt, Vaccinia virus
uaaaucuguauaucuuucc

SEQ ID NO: 4061963 - RNA, 18 nt, Vaccinia virus
uaaaucuguuucuaaaga

SEQ ID NO: 4061964 - RNA, 23 nt, Vaccinia virus
uaaaugaaguacuguucaaacau

SEQ ID NO: 4061965 - RNA, 14 nt, Vaccinia virus
uaaaugacaaguau

SEQ ID NO: 4061966 - RNA, 14 nt, Vaccinia virus
uaaaugauaucuua

SEQ ID NO: 4061967 - RNA, 22 nt, Vaccinia virus
uaaaugggugccgcagcaagca

SEQ ID NO: 4061968 - RNA, 14 nt, Vaccinia virus
uaaauguauccauu

SEQ ID NO: 4061969 - RNA, 22 nt, Vaccinia virus
uaaauguuuaaacaucaaacau

SEQ ID NO: 4061970 - RNA, 22 nt, Vaccinia virus
uaaauguuuuacaacuaucaua

SEQ ID NO: 4061971 - RNA, 18 nt, Vaccinia virus
uaaauguuuucucuguaa

SEQ ID NO: 4061972 - RNA, 15 nt, Vaccinia virus
uaaauuaauuuacca

SEQ ID NO: 4061973 - RNA, 17 nt, Vaccinia virus
uaaauuaguucauacac

SEQ ID NO: 4061974 - RNA, 21 nt, Vaccinia virus
uaaauuauaaaaaaagcaaug

SEQ ID NO: 4061975 - RNA, 19 nt, Vaccinia virus
uaaauuauuuaauggagua

SEQ ID NO: 4061976 - RNA, 16 nt, Vaccinia virus
uaaauuuucuauacau

SEQ ID NO: 4061977 - RNA, 16 nt, Vaccinia virus
uaaauuuuuaacgauu

SEQ ID NO: 4061978 - RNA, 23 nt, Vaccinia virus
uaaauuuuuuuucaguuaucuau

SEQ ID NO: 4061979 - RNA, 21 nt, Vaccinia virus
uaacaaaaauuaugaaauaac

SEQ ID NO: 4061980 - RNA, 16 nt, Vaccinia virus
uaacaaaacuauuuca

SEQ ID NO: 4061981 - RNA, 14 nt, Vaccinia virus
uaacaaaauuaaag

SEQ ID NO: 4061982 - RNA, 12 nt, Vaccinia virus
uaacaaacaucu

SEQ ID NO: 4061983 - RNA, 16 nt, Vaccinia virus
uaacaaccucuuuaau

SEQ ID NO: 4061984 - RNA, 17 nt, Vaccinia virus
uaacaaccucuuuaaua

SEQ ID NO: 4061985 - RNA, 21 nt, Vaccinia virus
uaacaaguugaccaauucauu

SEQ ID NO: 4061986 - RNA, 13 nt, Vaccinia virus
uaacaauauggaa

SEQ ID NO: 4061987 - RNA, 14 nt, Vaccinia virus
uaacaauguuucca

SEQ ID NO: 4061988 - RNA, 14 nt, Vaccinia virus
uaacaauuaaugau

SEQ ID NO: 4061989 - RNA, 19 nt, Vaccinia virus
uaacacaaccaaauacuug

SEQ ID NO: 4061990 - RNA, 13 nt, Vaccinia virus
uaacacauauuca

SEQ ID NO: 4061991 - RNA, 17 nt, Vaccinia virus
uaacacauuucaacaau

SEQ ID NO: 4061992 - RNA, 17 nt, Vaccinia virus
uaacacauuuucaucua

SEQ ID NO: 4061993 - RNA, 17 nt, Vaccinia virus
uaacagaaaaaacaaug

SEQ ID NO: 4061994 - RNA, 21 nt, Vaccinia virus
uaacagagaggccaucuggaa

SEQ ID NO: 4061995 - RNA, 15 nt, Vaccinia virus
uaacagauacauaaa

SEQ ID NO: 4061996 - RNA, 17 nt, Vaccinia virus
uaacagcucuauuauau

SEQ ID NO: 4061997 - RNA, 22 nt, Vaccinia virus
uaacaguaucauuuaaacauuu

SEQ ID NO: 4061998 - RNA, 22 nt, Vaccinia virus
uaacauaaaaacuuauacaucc

SEQ ID NO: 4061999 - RNA, 15 nt, Vaccinia virus
uaacaucacuaauau

SEQ ID NO: 4062000 - RNA, 20 nt, Vaccinia virus
uaacaucaucaaaagacuua

SEQ ID NO: 4062001 - RNA, 24 nt, Vaccinia virus
uaacaucaucaaaagacuuaugau

SEQ ID NO: 4062002 - RNA, 16 nt, Vaccinia virus
uaacaucuuucaucau

SEQ ID NO: 4062003 - RNA, 13 nt, Vaccinia virus
uaacaugaacgau

SEQ ID NO: 4062004 - RNA, 17 nt, Vaccinia virus
uaacaugagacauaaau

SEQ ID NO: 4062005 - RNA, 20 nt, Vaccinia virus
uaacaugcauuugaaaagau

SEQ ID NO: 4062006 - RNA, 18 nt, Vaccinia virus
uaacaugcgguucaaaau

SEQ ID NO: 4062007 - RNA, 16 nt, Vaccinia virus
uaacauucugauuuaa

SEQ ID NO: 4062008 - RNA, 20 nt, Vaccinia virus
uaacauuuuuuguaaaugua

SEQ ID NO: 4062009 - RNA, 23 nt, Vaccinia virus
uaacgagugaucaaaucauugau

SEQ ID NO: 4062010 - RNA, 20 nt, Vaccinia virus
uaacgauaacacaaaaugug

SEQ ID NO: 4062011 - RNA, 21 nt, Vaccinia virus
uaacgauaucuugcaaaauag

SEQ ID NO: 4062012 - RNA, 19 nt, Vaccinia virus
auuacggaauuauuggcuu

SEQ ID NO: 4062013 - RNA, 13 nt, Vaccinia virus
auuacuacugaag

SEQ ID NO: 4062014 - RNA, 19 nt, Vaccinia virus
auuacuaucuuuaacauaa

SEQ ID NO: 4062015 - RNA, 22 nt, Vaccinia virus
auuacucauguaaccuacuaga

SEQ ID NO: 4062016 - RNA, 21 nt, Vaccinia virus
auuacucuccuagguuucucu

SEQ ID NO: 4062017 - RNA, 16 nt, Vaccinia virus
auuacuuuaauaguug

SEQ ID NO: 4062018 - RNA, 12 nt, Vaccinia virus
auuacuuuacaa

SEQ ID NO: 4062019 - RNA, 20 nt, Vaccinia virus
auuacuuuacauauaauauc

SEQ ID NO: 4062020 - RNA, 16 nt, Vaccinia virus
auuagacgaugugaga

SEQ ID NO: 4062021 - RNA, 14 nt, Vaccinia virus
auuagagaagcacu

SEQ ID NO: 4062022 - RNA, 16 nt, Vaccinia virus
auuagauauuaaugag

SEQ ID NO: 4062023 - RNA, 17 nt, Vaccinia virus
auuagauuuaauagcau

SEQ ID NO: 4062024 - RNA, 17 nt, Vaccinia virus
auuagcguauugagaag

SEQ ID NO: 4062025 - RNA, 15 nt, Vaccinia virus
auuaggaaauguuuc

SEQ ID NO: 4062026 - RNA, 15 nt, Vaccinia virus
auuaggauuaucaaa

SEQ ID NO: 4062027 - RNA, 16 nt, Vaccinia virus
auuaguaacagucuua

SEQ ID NO: 4062028 - RNA, 20 nt, Vaccinia virus
auuaguaaggcuuuagaaac

SEQ ID NO: 4062029 - RNA, 22 nt, Vaccinia virus
auuaguaaggcuuuagaaacuu

SEQ ID NO: 4062030 - RNA, 22 nt, Vaccinia virus
auuaguacaccgcuauguuuaa

SEQ ID NO: 4062031 - RNA, 13 nt, Vaccinia virus
auuaguuaaauau

SEQ ID NO: 4062032 - RNA, 22 nt, Vaccinia virus
auuaguucccaauggaucaaug

SEQ ID NO: 4062033 - RNA, 22 nt, Vaccinia virus
auuauaacaucguaucuucaaa

SEQ ID NO: 4062034 - RNA, 20 nt, Vaccinia virus
auuauaaugaauauuauuau

SEQ ID NO: 4062035 - RNA, 13 nt, Vaccinia virus
auuauacaugugu

SEQ ID NO: 4062036 - RNA, 14 nt, Vaccinia virus
auuauacuagaguu

SEQ ID NO: 4062037 - RNA, 14 nt, Vaccinia virus
auuauagacacuau

SEQ ID NO: 4062038 - RNA, 23 nt, Vaccinia virus
auuauagacuugauccauuuccu

SEQ ID NO: 4062039 - RNA, 22 nt, Vaccinia virus
auuauauagauaauucuaauug

SEQ ID NO: 4062040 - RNA, 14 nt, Vaccinia virus
auuauauuuauuau

SEQ ID NO: 4062041 - RNA, 14 nt, Vaccinia virus
auuaucaaaaagaa

SEQ ID NO: 4062042 - RNA, 20 nt, Vaccinia virus
auuaucaaaauuuggaaacu

SEQ ID NO: 4062043 - RNA, 16 nt, Vaccinia virus
auuaucaaagucacaa

SEQ ID NO: 4062044 - RNA, 16 nt, Vaccinia virus
auuaucaaauggaugc

SEQ ID NO: 4062045 - RNA, 15 nt, Vaccinia virus
auuaucaagaugugu

SEQ ID NO: 4062046 - RNA, 18 nt, Vaccinia virus
auuaucaucaaaaaacaa

SEQ ID NO: 4062047 - RNA, 14 nt, Vaccinia virus
auuauccaauagau

SEQ ID NO: 4062048 - RNA, 19 nt, Vaccinia virus
auuauccaugauagaaaga

SEQ ID NO: 4062049 - RNA, 17 nt, Vaccinia virus
auuauccggauucauuu

SEQ ID NO: 4062050 - RNA, 17 nt, Vaccinia virus
auuauccuaucauguau

SEQ ID NO: 4062051 - RNA, 20 nt, Vaccinia virus
auuaucuaaguccuguugau

SEQ ID NO: 4062052 - RNA, 12 nt, Vaccinia virus
auuaucuuuacc

SEQ ID NO: 4062053 - RNA, 21 nt, Vaccinia virus
auuaucuuuuuagacacguau

SEQ ID NO: 4062054 - RNA, 16 nt, Vaccinia virus
auuaugaaaaaguaaa

SEQ ID NO: 4062055 - RNA, 20 nt, Vaccinia virus
auuaugaaaaaguaaaugau

SEQ ID NO: 4062056 - RNA, 24 nt, Vaccinia virus
auuaugacgucagccauagcauca

SEQ ID NO: 4062057 - RNA, 11 nt, Vaccinia virus
auuaugauacu

SEQ ID NO: 4062058 - RNA, 17 nt, Vaccinia virus
auuaugccguuaucauu

SEQ ID NO: 4062059 - RNA, 20 nt, Vaccinia virus
auuauggaaaucaacauaau

SEQ ID NO: 4062060 - RNA, 17 nt, Vaccinia virus
auuauuaaacaauacuc

SEQ ID NO: 4062061 - RNA, 12 nt, Vaccinia virus
auuauuaaauau

SEQ ID NO: 4062062 - RNA, 16 nt, Vaccinia virus
auuauuaauaagaaug

SEQ ID NO: 4062063 - RNA, 18 nt, Vaccinia virus
auuauuaaucauuaacuu

SEQ ID NO: 4062064 - RNA, 14 nt, Vaccinia virus
auuauuacauagau

SEQ ID NO: 4062065 - RNA, 18 nt, Vaccinia virus
auuauuacauagauguau

SEQ ID NO: 4062066 - RNA, 19 nt, Vaccinia virus
auuauucagauacgucuau

SEQ ID NO: 4062067 - RNA, 12 nt, Vaccinia virus
auuauucauuuu

SEQ ID NO: 4062068 - RNA, 18 nt, Vaccinia virus
auuauucauuuucuauuu

SEQ ID NO: 4062069 - RNA, 16 nt, Vaccinia virus
auuauuccuaauuaag

SEQ ID NO: 4062070 - RNA, 21 nt, Vaccinia virus
auuauucuuugauucgaauuu

SEQ ID NO: 4062071 - RNA, 20 nt, Vaccinia virus
auuauugucauaaacauuau

SEQ ID NO: 4062072 - RNA, 13 nt, Vaccinia virus
auuauuuaaugag

SEQ ID NO: 4062073 - RNA, 14 nt, Vaccinia virus
auuauuuuuggaag

SEQ ID NO: 4062074 - RNA, 12 nt, Vaccinia virus
auucaaauccuu

SEQ ID NO: 4062075 - RNA, 17 nt, Vaccinia virus
auucaagauuuuauuau

SEQ ID NO: 4062076 - RNA, 20 nt, Vaccinia virus
auucaagcaaaaacaaaaaa

SEQ ID NO: 4062077 - RNA, 20 nt, Vaccinia virus
auucaauuacuacaaaaauu

SEQ ID NO: 4062078 - RNA, 21 nt, Vaccinia virus
auucaauuacuacaaaaauua

SEQ ID NO: 4062079 - RNA, 14 nt, Vaccinia virus
auucacaaauauga

SEQ ID NO: 4062080 - RNA, 22 nt, Vaccinia virus
auucagaauuucuacauaauua

SEQ ID NO: 4062081 - RNA, 19 nt, Vaccinia virus
auucagaguccucuaauug

SEQ ID NO: 4062082 - RNA, 16 nt, Vaccinia virus
auucagaguuguuguu

SEQ ID NO: 4062083 - RNA, 17 nt, Vaccinia virus
auucagcugaaaugaga

SEQ ID NO: 4062084 - RNA, 16 nt, Vaccinia virus
auucauaaaacauaau

SEQ ID NO: 4062085 - RNA, 23 nt, Vaccinia virus
auucauaaaacauaaucaaggau

SEQ ID NO: 4062086 - RNA, 18 nt, Vaccinia virus
auucauaacgucauugau

SEQ ID NO: 4062087 - RNA, 12 nt, Vaccinia virus
auucauaacuaa

SEQ ID NO: 4062088 - RNA, 18 nt, Vaccinia virus
auucauauucuuaaaagg

SEQ ID NO: 4062089 - RNA, 16 nt, Vaccinia virus
auucauccuguugucu

SEQ ID NO: 4062090 - RNA, 21 nt, Vaccinia virus
auucaucuacgcgauaauaga

SEQ ID NO: 4062091 - RNA, 21 nt, Vaccinia virus
auucauucacuaucaaucgau

SEQ ID NO: 4062092 - RNA, 22 nt, Vaccinia virus
auuccaguaucugaaguacuau

SEQ ID NO: 4062093 - RNA, 18 nt, Vaccinia virus
auuccauuaucugaaaug

SEQ ID NO: 4062094 - RNA, 15 nt, Vaccinia virus
auuccuauucauuuu

SEQ ID NO: 4062095 - RNA, 21 nt, Vaccinia virus
auuccuuuucguaggcacaca

SEQ ID NO: 4062096 - RNA, 13 nt, Vaccinia virus
auucgacacuauu

SEQ ID NO: 4062097 - RNA, 14 nt, Vaccinia virus
auucgauauuacga

SEQ ID NO: 4062098 - RNA, 16 nt, Vaccinia virus
auucgcuaaaaaauua

SEQ ID NO: 4062099 - RNA, 13 nt, Vaccinia virus
auucguaguuuuu

SEQ ID NO: 4062100 - RNA, 23 nt, Vaccinia virus
auucgugacagauccaugucuga

SEQ ID NO: 4062101 - RNA, 15 nt, Vaccinia virus
auucuaauacauaau

SEQ ID NO: 4062102 - RNA, 21 nt, Vaccinia virus
auucuaccuuuuuauuuucua

SEQ ID NO: 4062103 - RNA, 22 nt, Vaccinia virus
auucuacuaggcugacacuaug

SEQ ID NO: 4062104 - RNA, 15 nt, Vaccinia virus
auucuagaccaaaaa

SEQ ID NO: 4062105 - RNA, 20 nt, Vaccinia virus
auucuagucuuaaccaaaaa

SEQ ID NO: 4062106 - RNA, 19 nt, Vaccinia virus
auucuaugaauuuauaaaa

SEQ ID NO: 4062107 - RNA, 13 nt, Vaccinia virus
auucuaugaugaa

SEQ ID NO: 4062108 - RNA, 17 nt, Vaccinia virus
auucuauggaugaugcu

SEQ ID NO: 4062109 - RNA, 22 nt, Vaccinia virus
auucuaugucgucuacuggaug

SEQ ID NO: 4062110 - RNA, 16 nt, Vaccinia virus
auucuauuaaugucua

SEQ ID NO: 4062111 - RNA, 16 nt, Vaccinia virus
auucuauuauauuaac

SEQ ID NO: 4062112 - RNA, 14 nt, Vaccinia virus
auucucauuaaaug

SEQ ID NO: 4062113 - RNA, 16 nt, Vaccinia virus
auucucgaaucuaaag

SEQ ID NO: 4062114 - RNA, 13 nt, Vaccinia virus
auucucuauuuug

SEQ ID NO: 4062115 - RNA, 19 nt, Vaccinia virus
auucucuuaauuauaacga

SEQ ID NO: 4062116 - RNA, 23 nt, Vaccinia virus
auucucuuacaaauauucacaag

SEQ ID NO: 4062117 - RNA, 15 nt, Vaccinia virus
auucugaaacaguau

SEQ ID NO: 4062118 - RNA, 19 nt, Vaccinia virus
auucuggugcuaauuauuc

SEQ ID NO: 4062119 - RNA, 17 nt, Vaccinia virus
auucuguaaaaaaauua

SEQ ID NO: 4062120 - RNA, 19 nt, Vaccinia virus
auucuuaagacacauuucu

SEQ ID NO: 4062121 - RNA, 22 nt, Vaccinia virus
auucuuagaaauauaaaacuug

SEQ ID NO: 4062122 - RNA, 18 nt, Vaccinia virus
auucuucacagacugaag

SEQ ID NO: 4062123 - RNA, 23 nt, Vaccinia virus
auucuucuuuaaacgauuuucca

SEQ ID NO: 4062124 - RNA, 21 nt, Vaccinia virus
auucuugaaacuuuuuagaau

SEQ ID NO: 4062125 - RNA, 12 nt, Vaccinia virus
auucuuucaaag

SEQ ID NO: 4062126 - RNA, 16 nt, Vaccinia virus
auugaacgguaucuuc

SEQ ID NO: 4062127 - RNA, 12 nt, Vaccinia virus
auugacaaaauu

SEQ ID NO: 4062128 - RNA, 19 nt, Vaccinia virus
auugacuaucuuuugaaaa

SEQ ID NO: 4062129 - RNA, 17 nt, Vaccinia virus
auugagcggaccaucug

SEQ ID NO: 4062130 - RNA, 13 nt, Vaccinia virus
auugauagauuac

SEQ ID NO: 4062131 - RNA, 15 nt, Vaccinia virus
auugaucaaacauuu

SEQ ID NO: 4062132 - RNA, 16 nt, Vaccinia virus
auugaugacacuagau

SEQ ID NO: 4062133 - RNA, 23 nt, Vaccinia virus
auugaugcaaauagcagauagau

SEQ ID NO: 4062134 - RNA, 17 nt, Vaccinia virus
auugauuagaaaauaua

SEQ ID NO: 4062135 - RNA, 20 nt, Vaccinia virus
auugauuauuucaaagacua

SEQ ID NO: 4062136 - RNA, 16 nt, Vaccinia virus
auugcaacguauauag

SEQ ID NO: 4062137 - RNA, 16 nt, Vaccinia virus
auugcauuuuguuaua

SEQ ID NO: 4062138 - RNA, 14 nt, Vaccinia virus
auugcgacacuauu

SEQ ID NO: 4062139 - RNA, 18 nt, Vaccinia virus
auugcuaccguaaauaua

SEQ ID NO: 4062140 - RNA, 18 nt, Vaccinia virus
auuggaaaucauuaacgg

SEQ ID NO: 4062141 - RNA, 17 nt, Vaccinia virus
auuggaacuaguauuua

SEQ ID NO: 4062142 - RNA, 18 nt, Vaccinia virus
auuggaauaccaaauauu

SEQ ID NO: 4062143 - RNA, 13 nt, Vaccinia virus
auuggaauuauuu

SEQ ID NO: 4062144 - RNA, 19 nt, Vaccinia virus
auuggauaguuuuuuugaa

SEQ ID NO: 4062145 - RNA, 17 nt, Vaccinia virus
auuggauuggauacacu

SEQ ID NO: 4062146 - RNA, 23 nt, Vaccinia virus
auuggcaaaaacggauauggaug

SEQ ID NO: 4062147 - RNA, 15 nt, Vaccinia virus
auuggcuuuucuuua

SEQ ID NO: 4062148 - RNA, 17 nt, Vaccinia virus
auuggguccuauugcuu

SEQ ID NO: 4062149 - RNA, 14 nt, Vaccinia virus
auugguaaauccua

SEQ ID NO: 4062150 - RNA, 21 nt, Vaccinia virus
auugguagaguuuuauaacga

SEQ ID NO: 4062151 - RNA, 16 nt, Vaccinia virus
auugguauaaauguug

SEQ ID NO: 4062152 - RNA, 19 nt, Vaccinia virus
auugguuacccuugucauu

SEQ ID NO: 4062153 - RNA, 19 nt, Vaccinia virus
auugguuuaugauguauaa

SEQ ID NO: 4062154 - RNA, 12 nt, Vaccinia virus
auuguaaaugau

SEQ ID NO: 4062155 - RNA, 15 nt, Vaccinia virus
auuguacgaacgaag

SEQ ID NO: 4062156 - RNA, 20 nt, Vaccinia virus
auuguacgucucaauagcug

SEQ ID NO: 4062157 - RNA, 22 nt, Vaccinia virus
auuguccauaggauacuuugua

SEQ ID NO: 4062158 - RNA, 21 nt, Vaccinia virus
auugucucgucaaugucuaua

SEQ ID NO: 4062159 - RNA, 17 nt, Vaccinia virus
auugucugaugaagaau

SEQ ID NO: 4062160 - RNA, 17 nt, Vaccinia virus
auugugcuuaauuauuu

SEQ ID NO: 4062161 - RNA, 16 nt, Vaccinia virus
auuguuaauugaaaag

SEQ ID NO: 4062162 - RNA, 13 nt, Vaccinia virus
auuguuacaaaag

SEQ ID NO: 4062163 - RNA, 16 nt, Vaccinia virus
auuguuagcuguuuuc

SEQ ID NO: 4062164 - RNA, 19 nt, Vaccinia virus
auuguugccguaaauccug

SEQ ID NO: 4062165 - RNA, 20 nt, Vaccinia virus
auuguuuugaagaaaugaua

SEQ ID NO: 4062166 - RNA, 13 nt, Vaccinia virus
auuuaaacaaaaa

SEQ ID NO: 4062167 - RNA, 21 nt, Vaccinia virus
auuuaaaugaaucccaaacau

SEQ ID NO: 4062168 - RNA, 13 nt, Vaccinia virus
auuuaacacuaua

SEQ ID NO: 4062169 - RNA, 20 nt, Vaccinia virus
auuuaacuagauuauacaau

SEQ ID NO: 4062170 - RNA, 18 nt, Vaccinia virus
auuuaacucaugaugaag

SEQ ID NO: 4062171 - RNA, 20 nt, Vaccinia virus
auuuaaggcuuuaaaauuga

SEQ ID NO: 4062172 - RNA, 17 nt, Vaccinia virus
auuuaauacguucauua

SEQ ID NO: 4062173 - RNA, 13 nt, Vaccinia virus
auuuaauagagau

SEQ ID NO: 4062174 - RNA, 13 nt, Vaccinia virus
auuuaauauagau

SEQ ID NO: 4062175 - RNA, 14 nt, Vaccinia virus
auuuacaaaaauuu

SEQ ID NO: 4062176 - RNA, 16 nt, Vaccinia virus
auuuacaccaauagug

SEQ ID NO: 4062177 - RNA, 19 nt, Vaccinia virus
auuuaccgaacaggcauuu

SEQ ID NO: 4062178 - RNA, 17 nt, Vaccinia virus
auuuacuaucuguaaug

SEQ ID NO: 4062179 - RNA, 14 nt, Vaccinia virus
auuuagcaaaauua

SEQ ID NO: 4062180 - RNA, 16 nt, Vaccinia virus
auuuaguauuaaauga

SEQ ID NO: 4062181 - RNA, 12 nt, Vaccinia virus
auuuauaaacau

SEQ ID NO: 4062182 - RNA, 12 nt, Vaccinia virus
auuuauaaugag

SEQ ID NO: 4062183 - RNA, 19 nt, Vaccinia virus
auuuauacccgcuaugaag

SEQ ID NO: 4062184 - RNA, 16 nt, Vaccinia virus
auuuauacuucuucua

SEQ ID NO: 4062185 - RNA, 14 nt, Vaccinia virus
auuuauauaugcau

SEQ ID NO: 4062186 - RNA, 14 nt, Vaccinia virus
auuuaucauggagu

SEQ ID NO: 4062187 - RNA, 20 nt, Vaccinia virus
auuuauccagucugagaaaa

SEQ ID NO: 4062188 - RNA, 14 nt, Vaccinia virus
auuuaucuauuuua

SEQ ID NO: 4062189 - RNA, 17 nt, Vaccinia virus
auuuauuucuauaccuu

SEQ ID NO: 4062190 - RNA, 22 nt, Vaccinia virus
auuucaacaauaaugagaaugu

SEQ ID NO: 4062191 - RNA, 16 nt, Vaccinia virus
auuucaacgucuaaug

SEQ ID NO: 4062192 - RNA, 22 nt, Vaccinia virus
auuucacagaaacacuagcauu

SEQ ID NO: 4062193 - RNA, 17 nt, Vaccinia virus
auuucacgaaaaaugau

SEQ ID NO: 4062194 - RNA, 18 nt, Vaccinia virus
auuucacgaaaaaugaug

SEQ ID NO: 4062195 - RNA, 14 nt, Vaccinia virus
auuucacguucagc

SEQ ID NO: 4062196 - RNA, 16 nt, Vaccinia virus
auuucagaacauagaa

SEQ ID NO: 4062197 - RNA, 15 nt, Vaccinia virus
auuucauauaauaga

SEQ ID NO: 4062198 - RNA, 14 nt, Vaccinia virus
auuucauccaauuu

SEQ ID NO: 4062199 - RNA, 20 nt, Vaccinia virus
auuucaucuccguaaauaua

SEQ ID NO: 4062200 - RNA, 20 nt, Vaccinia virus
auuucauuacccaaguuuga

SEQ ID NO: 4062201 - RNA, 14 nt, Vaccinia virus
auuucauuguaaau

SEQ ID NO: 4062202 - RNA, 14 nt, Vaccinia virus
auuuccaucaaaug

SEQ ID NO: 4062203 - RNA, 18 nt, Vaccinia virus
auuuccugauuuaaauag

SEQ ID NO: 4062204 - RNA, 15 nt, Vaccinia virus
auuucgaaaauacua

SEQ ID NO: 4062205 - RNA, 14 nt, Vaccinia virus
auuucgacaaaaag

SEQ ID NO: 4062206 - RNA, 15 nt, Vaccinia virus
auuucuauucaugaa

SEQ ID NO: 4062207 - RNA, 12 nt, Vaccinia virus
auuucuauuuuu

SEQ ID NO: 4062208 - RNA, 23 nt, Vaccinia virus
auuucuccaaagaauauaucuaa

SEQ ID NO: 4062209 - RNA, 19 nt, Vaccinia virus
auuucucguaaaaguagaa

SEQ ID NO: 4062210 - RNA, 15 nt, Vaccinia virus
auuucucuaucgaug

SEQ ID NO: 4062211 - RNA, 16 nt, Vaccinia virus
auuucugguuagauaa

SEQ ID NO: 4062212 - RNA, 23 nt, Vaccinia virus
auuucuuuucccucguucaucua

SEQ ID NO: 4062213 - RNA, 16 nt, Vaccinia virus
auuugagaguuuuaua

SEQ ID NO: 4062214 - RNA, 22 nt, Vaccinia virus
auuugauacgauauuuguugga

SEQ ID NO: 4062215 - RNA, 20 nt, Vaccinia virus
auuugaucgauuacauuuau

SEQ ID NO: 4062216 - RNA, 14 nt, Vaccinia virus
auuugauguuguag

SEQ ID NO: 4062217 - RNA, 22 nt, Vaccinia virus
auuugcgugguuguuuaucaca

SEQ ID NO: 4062218 - RNA, 23 nt, Vaccinia virus
auuuggaaaacgucaacguguau

SEQ ID NO: 4062219 - RNA, 13 nt, Vaccinia virus
auuuggaaaagaa

SEQ ID NO: 4062220 - RNA, 18 nt, Vaccinia virus
auuuggagcuuuaauagu

SEQ ID NO: 4062221 - RNA, 20 nt, Vaccinia virus
auuuguaucuccuuucucuu

SEQ ID NO: 4062222 - RNA, 22 nt, Vaccinia virus
auuuguauuauccaauacagaa

SEQ ID NO: 4062223 - RNA, 21 nt, Vaccinia virus
auuugucuuccuuaacuauau

SEQ ID NO: 4062224 - RNA, 19 nt, Vaccinia virus
auuugucuucuuucuuuua

SEQ ID NO: 4062225 - RNA, 16 nt, Vaccinia virus
auuuguuguucauaag

SEQ ID NO: 4062226 - RNA, 20 nt, Vaccinia virus
auuuuaaaauuauuaaacaa

SEQ ID NO: 4062227 - RNA, 15 nt, Vaccinia virus
auuuuaagaaauggu

SEQ ID NO: 4062228 - RNA, 21 nt, Vaccinia virus
auuuuaagaaaugguguaacu

SEQ ID NO: 4062229 - RNA, 17 nt, Vaccinia virus
auuuuaaguuuauugac

SEQ ID NO: 4062230 - RNA, 15 nt, Vaccinia virus
auuuuaauauagcug

SEQ ID NO: 4062231 - RNA, 21 nt, Vaccinia virus
auuuuaccaacucuuuaauaa

SEQ ID NO: 4062232 - RNA, 18 nt, Vaccinia virus
auuuuacgaauaaacgaa

SEQ ID NO: 4062233 - RNA, 19 nt, Vaccinia virus
auuuuacucauuuuuuaua

SEQ ID NO: 4062234 - RNA, 15 nt, Vaccinia virus
auuuuacuuuaauaa

SEQ ID NO: 4062235 - RNA, 13 nt, Vaccinia virus
auuuuagacacua

SEQ ID NO: 4062236 - RNA, 18 nt, Vaccinia virus
auuuuagcagugaaauaa

SEQ ID NO: 4062237 - RNA, 16 nt, Vaccinia virus
auuuuagucauugcaa

SEQ ID NO: 4062238 - RNA, 20 nt, Vaccinia virus
auuuuauaccgaauaagaga

SEQ ID NO: 4062239 - RNA, 14 nt, Vaccinia virus
auuuuaucaaacau

SEQ ID NO: 4062240 - RNA, 20 nt, Vaccinia virus
auuuuauccaaaaagaauga

SEQ ID NO: 4062241 - RNA, 18 nt, Vaccinia virus
auuuuaucgauucuaaug

SEQ ID NO: 4062242 - RNA, 15 nt, Vaccinia virus
auuuuaucuuuuacu

SEQ ID NO: 4062243 - RNA, 16 nt, Vaccinia virus
auuuucaauuauaaua

SEQ ID NO: 4062244 - RNA, 16 nt, Vaccinia virus
auuuucacaaauacua

SEQ ID NO: 4062245 - RNA, 16 nt, Vaccinia virus
auuuucauuuaaauga

SEQ ID NO: 4062246 - RNA, 13 nt, Vaccinia virus
auuuuccauuuau

SEQ ID NO: 4062247 - RNA, 23 nt, Vaccinia virus
auuuugaugauaauguuaccaua

SEQ ID NO: 4062248 - RNA, 19 nt, Vaccinia virus
auuuugauuccaaaauuga

SEQ ID NO: 4062249 - RNA, 19 nt, Vaccinia virus
auuuugcaauuucuucaua

SEQ ID NO: 4062250 - RNA, 12 nt, Vaccinia virus
auuuuguaacug

SEQ ID NO: 4062251 - RNA, 14 nt, Vaccinia virus
auuuuuaaaaauuu

SEQ ID NO: 4062252 - RNA, 16 nt, Vaccinia virus
auuuuuagugaaacau

SEQ ID NO: 4062253 - RNA, 19 nt, Vaccinia virus
auuuuuaguuuauacuauu

SEQ ID NO: 4062254 - RNA, 23 nt, Vaccinia virus
auuuuuauauuauuuacacaauu

SEQ ID NO: 4062255 - RNA, 12 nt, Vaccinia virus
auuuuuaucaug

SEQ ID NO: 4062256 - RNA, 12 nt, Vaccinia virus
auuuuuaucauu

SEQ ID NO: 4062257 - RNA, 23 nt, Vaccinia virus
auuuuuauuaaugauacaaaaac

SEQ ID NO: 4062258 - RNA, 19 nt, Vaccinia virus
auuuuuggauuacaagaaa

SEQ ID NO: 4062259 - RNA, 12 nt, Vaccinia virus
auuuuuuaucua

SEQ ID NO: 4062260 - RNA, 11 nt, Vaccinia virus
caaaaaaccau

SEQ ID NO: 4062261 - RNA, 13 nt, Vaccinia virus
caaaaaauauauu

SEQ ID NO: 4062262 - RNA, 13 nt, Vaccinia virus
caaaaacgauauu

SEQ ID NO: 4062263 - RNA, 12 nt, Vaccinia virus
caaaaagagagu

SEQ ID NO: 4062264 - RNA, 16 nt, Vaccinia virus
caaaaagauauaaaau

SEQ ID NO: 4062265 - RNA, 11 nt, Vaccinia virus
caaaaagcaua

SEQ ID NO: 4062266 - RNA, 20 nt, Vaccinia virus
caaaaauauuuuuauucucu

SEQ ID NO: 4062267 - RNA, 21 nt, Vaccinia virus
aucauauuccggcguaugaau

SEQ ID NO: 4062268 - RNA, 22 nt, Vaccinia virus
aucauauuccggcguaugaauu

SEQ ID NO: 4062269 - RNA, 16 nt, Vaccinia virus
aucaucaacaauccaa

SEQ ID NO: 4062270 - RNA, 15 nt, Vaccinia virus
aucauccaaguggau

SEQ ID NO: 4062271 - RNA, 21 nt, Vaccinia virus
aucaucguuaggauuugguaa

SEQ ID NO: 4062272 - RNA, 12 nt, Vaccinia virus
aucaucugaaaa

SEQ ID NO: 4062273 - RNA, 13 nt, Vaccinia virus
aucaugaaauaua

SEQ ID NO: 4062274 - RNA, 14 nt, Vaccinia virus
aucaugaaaugaug

SEQ ID NO: 4062275 - RNA, 23 nt, Vaccinia virus
aucaugauuggguagcaaauauu

SEQ ID NO: 4062276 - RNA, 15 nt, Vaccinia virus
aucaugguaugcaug

SEQ ID NO: 4062277 - RNA, 12 nt, Vaccinia virus
aucauguagaaa

SEQ ID NO: 4062278 - RNA, 17 nt, Vaccinia virus
aucauguagaagaauuc

SEQ ID NO: 4062279 - RNA, 13 nt, Vaccinia virus
aucauuaaaggau

SEQ ID NO: 4062280 - RNA, 16 nt, Vaccinia virus
aucauugcuguaaaca

SEQ ID NO: 4062281 - RNA, 23 nt, Vaccinia virus
aucauuucuauaauuuaggaaug

SEQ ID NO: 4062282 - RNA, 14 nt, Vaccinia virus
auccaaaaaaugaa

SEQ ID NO: 4062283 - RNA, 17 nt, Vaccinia virus
auccaaacccuugaucu

SEQ ID NO: 4062284 - RNA, 14 nt, Vaccinia virus
auccaagauacuua

SEQ ID NO: 4062285 - RNA, 21 nt, Vaccinia virus
auccaaguuaaaggauauuau

SEQ ID NO: 4062286 - RNA, 16 nt, Vaccinia virus
auccaauacagaaugu

SEQ ID NO: 4062287 - RNA, 14 nt, Vaccinia virus
auccaaucauauau

SEQ ID NO: 4062288 - RNA, 19 nt, Vaccinia virus
auccaauuguuugauauau

SEQ ID NO: 4062289 - RNA, 14 nt, Vaccinia virus
auccacaauuauug

SEQ ID NO: 4062290 - RNA, 19 nt, Vaccinia virus
auccacugcugaacagcua

SEQ ID NO: 4062291 - RNA, 19 nt, Vaccinia virus
auccagaauguacacuauu

SEQ ID NO: 4062292 - RNA, 15 nt, Vaccinia virus
auccauaucguauau

SEQ ID NO: 4062293 - RNA, 16 nt, Vaccinia virus
aucccuacauauuuua

SEQ ID NO: 4062294 - RNA, 17 nt, Vaccinia virus
aucccuauauucaacau

SEQ ID NO: 4062295 - RNA, 18 nt, Vaccinia virus
aucccuaucuauaauauc

SEQ ID NO: 4062296 - RNA, 16 nt, Vaccinia virus
auccgacuagaauuag

SEQ ID NO: 4062297 - RNA, 15 nt, Vaccinia virus
auccgauaaacauug

SEQ ID NO: 4062298 - RNA, 18 nt, Vaccinia virus
auccgggugaaauuauuc

SEQ ID NO: 4062299 - RNA, 15 nt, Vaccinia virus
auccguagaaauaug

SEQ ID NO: 4062300 - RNA, 14 nt, Vaccinia virus
auccguauccauga

SEQ ID NO: 4062301 - RNA, 19 nt, Vaccinia virus
auccguuaaaauaauuaau

SEQ ID NO: 4062302 - RNA, 22 nt, Vaccinia virus
auccguuacaauuuguuaaaaa

SEQ ID NO: 4062303 - RNA, 15 nt, Vaccinia virus
auccguucuuaacuu

SEQ ID NO: 4062304 - RNA, 22 nt, Vaccinia virus
auccucuauccgacuagaauua

SEQ ID NO: 4062305 - RNA, 14 nt, Vaccinia virus
auccugauauuaau

SEQ ID NO: 4062306 - RNA, 23 nt, Vaccinia virus
auccuguaauauuuuuaguuuuu

SEQ ID NO: 4062307 - RNA, 16 nt, Vaccinia virus
auccuguucuaucaac

SEQ ID NO: 4062308 - RNA, 21 nt, Vaccinia virus
auccuguugucuaaaucucuu

SEQ ID NO: 4062309 - RNA, 18 nt, Vaccinia virus
auccuuguucagauacua

SEQ ID NO: 4062310 - RNA, 20 nt, Vaccinia virus
auccuuuaccaccaaauaaa

SEQ ID NO: 4062311 - RNA, 22 nt, Vaccinia virus
auccuuucguaaauuauaauaa

SEQ ID NO: 4062312 - RNA, 17 nt, Vaccinia virus
aucgaaaucuuaaauac

SEQ ID NO: 4062313 - RNA, 19 nt, Vaccinia virus
aucgacauggcuucuucca

SEQ ID NO: 4062314 - RNA, 17 nt, Vaccinia virus
aucgacgccuuagaaau

SEQ ID NO: 4062315 - RNA, 14 nt, Vaccinia virus
aucgacgucaaaga

SEQ ID NO: 4062316 - RNA, 19 nt, Vaccinia virus
aucgaguugauaucuaucg

SEQ ID NO: 4062317 - RNA, 14 nt, Vaccinia virus
aucgauacgcauuu

SEQ ID NO: 4062318 - RNA, 18 nt, Vaccinia virus
aucgauucccauaugaug

SEQ ID NO: 4062319 - RNA, 22 nt, Vaccinia virus
aucgcaucaaauaaaauuauug

SEQ ID NO: 4062320 - RNA, 16 nt, Vaccinia virus
aucggacgcagaaauu

SEQ ID NO: 4062321 - RNA, 21 nt, Vaccinia virus
aucggacucuucuaucauuau

SEQ ID NO: 4062322 - RNA, 19 nt, Vaccinia virus
aucggacuuugugcauaug

SEQ ID NO: 4062323 - RNA, 14 nt, Vaccinia virus
aucguaaaucuguu

SEQ ID NO: 4062324 - RNA, 13 nt, Vaccinia virus
aucguaaugaaca

SEQ ID NO: 4062325 - RNA, 15 nt, Vaccinia virus
aucgucacaaugaua

SEQ ID NO: 4062326 - RNA, 14 nt, Vaccinia virus
aucguccauagcaa

SEQ ID NO: 4062327 - RNA, 15 nt, Vaccinia virus
aucgucucuaucuuu

SEQ ID NO: 4062328 - RNA, 12 nt, Vaccinia virus
aucuaaaaaacu

SEQ ID NO: 4062329 - RNA, 13 nt, Vaccinia virus
aucuaaaaaacua

SEQ ID NO: 4062330 - RNA, 13 nt, Vaccinia virus
aucuaaaauccau

SEQ ID NO: 4062331 - RNA, 19 nt, Vaccinia virus
aucuaaacgcguuagauaa

SEQ ID NO: 4062332 - RNA, 16 nt, Vaccinia virus
aucuaacagaaacguu

SEQ ID NO: 4062333 - RNA, 22 nt, Vaccinia virus
aucuaacagaaacguuuagaga

SEQ ID NO: 4062334 - RNA, 22 nt, Vaccinia virus
aucuaaccaagacggauaagaa

SEQ ID NO: 4062335 - RNA, 15 nt, Vaccinia virus
aucuaacguauucua

SEQ ID NO: 4062336 - RNA, 13 nt, Vaccinia virus
aucuaauauaauu

SEQ ID NO: 4062337 - RNA, 11 nt, Vaccinia virus
aucuaauuaau

SEQ ID NO: 4062338 - RNA, 22 nt, Vaccinia virus
aucuaauuaguuuuucuuuaca

SEQ ID NO: 4062339 - RNA, 18 nt, Vaccinia virus
aucuacaaauuggagauc

SEQ ID NO: 4062340 - RNA, 16 nt, Vaccinia virus
aucuacacauguauuu

SEQ ID NO: 4062341 - RNA, 20 nt, Vaccinia virus
aucuaccucuccaaaaagaa

SEQ ID NO: 4062342 - RNA, 21 nt, Vaccinia virus
aucuacgauccaucaaaaaac

SEQ ID NO: 4062343 - RNA, 19 nt, Vaccinia virus
cgguuugcaaaacaaaaau

SEQ ID NO: 4062344 - RNA, 14 nt, Vaccinia virus
cgguuuuaacuuua

SEQ ID NO: 4062345 - RNA, 14 nt, Vaccinia virus
cgguuuuccaucau

SEQ ID NO: 4062346 - RNA, 21 nt, Vaccinia virus
cguaaaccguuuaauaauauu

SEQ ID NO: 4062347 - RNA, 16 nt, Vaccinia virus
cguaaacgcagauauu

SEQ ID NO: 4062348 - RNA, 14 nt, Vaccinia virus
cguacauugugugu

SEQ ID NO: 4062349 - RNA, 22 nt, Vaccinia virus
cguaccaacucauuuaaauauc

SEQ ID NO: 4062350 - RNA, 13 nt, Vaccinia virus
cguaccagcauuu

SEQ ID NO: 4062351 - RNA, 24 nt, Vaccinia virus
cguacucccaauauguguacgaac

SEQ ID NO: 4062352 - RNA, 19 nt, Vaccinia virus
cguagaaguuguaaaugac

SEQ ID NO: 4062353 - RNA, 21 nt, Vaccinia virus
cguagcaaaaguaagcauuuc

SEQ ID NO: 4062354 - RNA, 23 nt, Vaccinia virus
cguauaaaaaucgauaaacugcg

SEQ ID NO: 4062355 - RNA, 20 nt, Vaccinia virus
cguauagcaauguaauggag

SEQ ID NO: 4062356 - RNA, 19 nt, Vaccinia virus
cauauuuagaaaaaagauu

SEQ ID NO: 4062357 - RNA, 20 nt, Vaccinia virus
cauauuuaucaauucuucua

SEQ ID NO: 4062358 - RNA, 15 nt, Vaccinia virus
cauauuucauuucca

SEQ ID NO: 4062359 - RNA, 16 nt, Vaccinia virus
caucaaaaaacaacug

SEQ ID NO: 4062360 - RNA, 13 nt, Vaccinia virus
caucaauauaaau

SEQ ID NO: 4062361 - RNA, 16 nt, Vaccinia virus
caucagacaaugcuuu

SEQ ID NO: 4062362 - RNA, 21 nt, Vaccinia virus
caucauacuagauaaaucguu

SEQ ID NO: 4062363 - RNA, 14 nt, Vaccinia virus
caucauuaucauuu

SEQ ID NO: 4062364 - RNA, 15 nt, Vaccinia virus
caucauuccauaauu

SEQ ID NO: 4062365 - RNA, 15 nt, Vaccinia virus
cauccaagucaauau

SEQ ID NO: 4062366 - RNA, 22 nt, Vaccinia virus
cauccgauaacauguuaauuuc

SEQ ID NO: 4062367 - RNA, 17 nt, Vaccinia virus
cauccuuuauuaaauca

SEQ ID NO: 4062368 - RNA, 22 nt, Vaccinia virus
caucgagguaaccaccucucug

SEQ ID NO: 4062369 - RNA, 20 nt, Vaccinia virus
caucgaugauacauuucauc

SEQ ID NO: 4062370 - RNA, 17 nt, Vaccinia virus
caucgcaguauauauca

SEQ ID NO: 4062371 - RNA, 17 nt, Vaccinia virus
caucggguguauucuca

SEQ ID NO: 4062372 - RNA, 15 nt, Vaccinia virus
caucguauacuaaca

SEQ ID NO: 4062373 - RNA, 18 nt, Vaccinia virus
caucuacuuuugucauau

SEQ ID NO: 4062374 - RNA, 20 nt, Vaccinia virus
caucuaguccuuuaauucca

SEQ ID NO: 4062375 - RNA, 12 nt, Vaccinia virus
caucuaugauuu

SEQ ID NO: 4062376 - RNA, 22 nt, Vaccinia virus
caucuauuccaaauaaucagaa

SEQ ID NO: 4062377 - RNA, 22 nt, Vaccinia virus
caucuauuucaucguuuuguau

SEQ ID NO: 4062378 - RNA, 20 nt, Vaccinia virus
caucucguuuagauuuucca

SEQ ID NO: 4062379 - RNA, 15 nt, Vaccinia virus
caucucuauguuuca

SEQ ID NO: 4062380 - RNA, 21 nt, Vaccinia virus
caucugacaaacgaugccuuu

SEQ ID NO: 4062381 - RNA, 19 nt, Vaccinia virus
caucuggcuauuauguuua

SEQ ID NO: 4062382 - RNA, 22 nt, Vaccinia virus
caucuguaggauaucuauuuuu

SEQ ID NO: 4062383 - RNA, 18 nt, Vaccinia virus
caucugucauauuuagau

SEQ ID NO: 4062384 - RNA, 22 nt, Vaccinia virus
caucuucuuugauuaaugauuu

SEQ ID NO: 4062385 - RNA, 21 nt, Vaccinia virus
caucuuggggaaauauggaag

SEQ ID NO: 4062386 - RNA, 17 nt, Vaccinia virus
caugaaacguuuggaaa

SEQ ID NO: 4062387 - RNA, 13 nt, Vaccinia virus
caugaaagaaaga

SEQ ID NO: 4062388 - RNA, 16 nt, Vaccinia virus
caugaaaugaugauau

SEQ ID NO: 4062389 - RNA, 22 nt, Vaccinia virus
caugaacacgaugauauagaau

SEQ ID NO: 4062390 - RNA, 13 nt, Vaccinia virus
caugaacauaauc

SEQ ID NO: 4062391 - RNA, 14 nt, Vaccinia virus
caugaauuuuuugc

SEQ ID NO: 4062392 - RNA, 14 nt, Vaccinia virus
caugaccuucuuca

SEQ ID NO: 4062393 - RNA, 17 nt, Vaccinia virus
caugaguacuuguacac

SEQ ID NO: 4062394 - RNA, 19 nt, Vaccinia virus
caugaguacuuguacacau

SEQ ID NO: 4062395 - RNA, 13 nt, Vaccinia virus
caugauaucaugu

SEQ ID NO: 4062396 - RNA, 18 nt, Vaccinia virus
caugaugagauguuuaua

SEQ ID NO: 4062397 - RNA, 22 nt, Vaccinia virus
caugauguacagauuucggaau

SEQ ID NO: 4062398 - RNA, 19 nt, Vaccinia virus
caugccgugguguaacaau

SEQ ID NO: 4062399 - RNA, 18 nt, Vaccinia virus
cauggaacaauaaaagag

SEQ ID NO: 4062400 - RNA, 18 nt, Vaccinia virus
cauggacauaguaauaca

SEQ ID NO: 4062401 - RNA, 18 nt, Vaccinia virus
cauggccgaugaauggau

SEQ ID NO: 4062402 - RNA, 15 nt, Vaccinia virus
caugguggcauuuug

SEQ ID NO: 4062403 - RNA, 18 nt, Vaccinia virus
cauguaauacauuuugaa

SEQ ID NO: 4062404 - RNA, 14 nt, Vaccinia virus
cauguauauaucca

SEQ ID NO: 4062405 - RNA, 20 nt, Vaccinia virus
caugucccuauuauaaucau

SEQ ID NO: 4062406 - RNA, 22 nt, Vaccinia virus
caugucuaauggcgaacauguu

SEQ ID NO: 4062407 - RNA, 22 nt, Vaccinia virus
caugucuaauguguuaaaaaaa

SEQ ID NO: 4062408 - RNA, 15 nt, Vaccinia virus
caugucuacauuaua

SEQ ID NO: 4062409 - RNA, 22 nt, Vaccinia virus
cauguguuuuagaauauauaua

SEQ ID NO: 4062410 - RNA, 21 nt, Vaccinia virus
cauguugauaaacuacuuaca

SEQ ID NO: 4062411 - RNA, 17 nt, Vaccinia virus
cauguuuauaaaaaugu

SEQ ID NO: 4062412 - RNA, 13 nt, Vaccinia virus
cauuaacuuuaau

SEQ ID NO: 4062413 - RNA, 20 nt, Vaccinia virus
cauuaaguaaaguaaacaau

SEQ ID NO: 4062414 - RNA, 14 nt, Vaccinia virus
cauuaaucacugau

SEQ ID NO: 4062415 - RNA, 14 nt, Vaccinia virus
cauuaauuauaacg

SEQ ID NO: 4062416 - RNA, 15 nt, Vaccinia virus
cauuaauuauaacgg

SEQ ID NO: 4062417 - RNA, 21 nt, Vaccinia virus
cauuaauuucugauauggaau

SEQ ID NO: 4062418 - RNA, 21 nt, Vaccinia virus
cauuaccuccacgauacauuu

SEQ ID NO: 4062419 - RNA, 14 nt, Vaccinia virus
cauuacuaaaaaaa

SEQ ID NO: 4062420 - RNA, 15 nt, Vaccinia virus
cauuacuacuguaaa

SEQ ID NO: 4062421 - RNA, 17 nt, Vaccinia virus
cauuagauaacagugua

SEQ ID NO: 4062422 - RNA, 13 nt, Vaccinia virus
cauuagauacaau

SEQ ID NO: 4062423 - RNA, 15 nt, Vaccinia virus
cauuaggaaauguuu

SEQ ID NO: 4062424 - RNA, 15 nt, Vaccinia virus
cauuauacuuuuuuu

SEQ ID NO: 4062425 - RNA, 20 nt, Vaccinia virus
cauuauagauguguauacau

SEQ ID NO: 4062426 - RNA, 14 nt, Vaccinia virus
cauucauaaaaacc

SEQ ID NO: 4062427 - RNA, 11 nt, Vaccinia virus
cauucaugaaa

SEQ ID NO: 4062428 - RNA, 15 nt, Vaccinia virus
cauuccaguauucuc

SEQ ID NO: 4062429 - RNA, 17 nt, Vaccinia virus
cauucuaauguucauaa

SEQ ID NO: 4062430 - RNA, 17 nt, Vaccinia virus
cauugaucuauuauuua

SEQ ID NO: 4062431 - RNA, 16 nt, Vaccinia virus
cauugauugcauaauu

SEQ ID NO: 4062432 - RNA, 22 nt, Vaccinia virus
cauuggaguugauaauaauaca

SEQ ID NO: 4062433 - RNA, 20 nt, Vaccinia virus
cauuguaugguuuuaaauau

SEQ ID NO: 4062434 - RNA, 15 nt, Vaccinia virus
cauuguauuaugaug

SEQ ID NO: 4062435 - RNA, 23 nt, Vaccinia virus
cauuguguguuagucuugcuauc

SEQ ID NO: 4062436 - RNA, 23 nt, Vaccinia virus
cauuguuauugaucaaacauuua

SEQ ID NO: 4062437 - RNA, 21 nt, Vaccinia virus
cauuuaaaguacagauuuuag

SEQ ID NO: 4062438 - RNA, 19 nt, Vaccinia virus
cauuuaaaguuacaaacaa

SEQ ID NO: 4062439 - RNA, 17 nt, Vaccinia virus
cauuuaaauaucauaau

SEQ ID NO: 4062440 - RNA, 12 nt, Vaccinia virus
cauuuaauuaca

SEQ ID NO: 4062441 - RNA, 19 nt, Vaccinia virus
cauuuauaacggucaauau

SEQ ID NO: 4062442 - RNA, 18 nt, Vaccinia virus
cauuuauaacguacaaau

SEQ ID NO: 4062443 - RNA, 14 nt, Vaccinia virus
cauuuauagcauuu

SEQ ID NO: 4062444 - RNA, 20 nt, Vaccinia virus
cauuuaugagugauaaguaa

SEQ ID NO: 4062445 - RNA, 17 nt, Vaccinia virus
cauuuauuggagacgua

SEQ ID NO: 4062446 - RNA, 9 nt, Vaccinia virus
cauuucagu

SEQ ID NO: 4062447 - RNA, 14 nt, Vaccinia virus
cauuucuacaaaaa

SEQ ID NO: 4062448 - RNA, 18 nt, Vaccinia virus
cauuuuaggauaugcuuu

SEQ ID NO: 4062449 - RNA, 19 nt, Vaccinia virus
cauuuuaggauaugcuuuc

SEQ ID NO: 4062450 - RNA, 15 nt, Vaccinia virus
cauuuucuaucuuua

SEQ ID NO: 4062451 - RNA, 15 nt, Vaccinia virus
cauuuugauauugug

SEQ ID NO: 4062452 - RNA, 18 nt, Vaccinia virus
cauuuuuuauaaaaacuu

SEQ ID NO: 4062453 - RNA, 22 nt, Vaccinia virus
ccaaaaaguguuuggcaauaaa

SEQ ID NO: 4062454 - RNA, 16 nt, Vaccinia virus
ccaaacaauguuucua

SEQ ID NO: 4062455 - RNA, 17 nt, Vaccinia virus
ccaaacugcaaauguag

SEQ ID NO: 4062456 - RNA, 13 nt, Vaccinia virus
ccaaacuuuuuca

SEQ ID NO: 4062457 - RNA, 20 nt, Vaccinia virus
ccaaagucaucaaucaucau

SEQ ID NO: 4062458 - RNA, 14 nt, Vaccinia virus
ccaaauguuggaaa

SEQ ID NO: 4062459 - RNA, 14 nt, Vaccinia virus
ccaaauuaaugaau

SEQ ID NO: 4062460 - RNA, 21 nt, Vaccinia virus
ccaacauggugaauucuugca

SEQ ID NO: 4062461 - RNA, 13 nt, Vaccinia virus
ccaagacacauau

SEQ ID NO: 4062462 - RNA, 14 nt, Vaccinia virus
ccaaguuauugcuu

SEQ ID NO: 4062463 - RNA, 17 nt, Vaccinia virus
ccaauaaacuauuucua

SEQ ID NO: 4062464 - RNA, 21 nt, Vaccinia virus
ccaauauaguaguuaaauuau

SEQ ID NO: 4062465 - RNA, 23 nt, Vaccinia virus
ccaauaugucuguacaaauguua

SEQ ID NO: 4062466 - RNA, 17 nt, Vaccinia virus
ccaaugaugucaggaaa

SEQ ID NO: 4062467 - RNA, 17 nt, Vaccinia virus
ccaauuaccaacuagaa

SEQ ID NO: 4062468 - RNA, 22 nt, Vaccinia virus
ccaauuguuuuuguacauaaua

SEQ ID NO: 4062469 - RNA, 21 nt, Vaccinia virus
ccacaccgccucuagauaucg

SEQ ID NO: 4062470 - RNA, 16 nt, Vaccinia virus
ccaccaucuccuccaa

SEQ ID NO: 4062471 - RNA, 21 nt, Vaccinia virus
ccacguaaaacuuaaaauuua

SEQ ID NO: 4062472 - RNA, 23 nt, Vaccinia virus
ccacuacaucaauuuuacaaaag

SEQ ID NO: 4062473 - RNA, 19 nt, Vaccinia virus
ccacuaccggucucaguga

SEQ ID NO: 4062474 - RNA, 15 nt, Vaccinia virus
ccacuaucugauuca

SEQ ID NO: 4062475 - RNA, 15 nt, Vaccinia virus
gauaaguaauaacua

SEQ ID NO: 4062476 - RNA, 13 nt, Vaccinia virus
gauaauaauacac

SEQ ID NO: 4062477 - RNA, 18 nt, Vaccinia virus
gauaauaauuaauaucua

SEQ ID NO: 4062478 - RNA, 22 nt, Vaccinia virus
gauaauaucuauauaugaucua

SEQ ID NO: 4062479 - RNA, 18 nt, Vaccinia virus
gauaaucugaaaaugaaa

SEQ ID NO: 4062480 - RNA, 21 nt, Vaccinia virus
gauaaugauacaguaccauca

SEQ ID NO: 4062481 - RNA, 20 nt, Vaccinia virus
gauaaugauauauuaaacaa

SEQ ID NO: 4062482 - RNA, 16 nt, Vaccinia virus
gauaauuaauaauaua

SEQ ID NO: 4062483 - RNA, 15 nt, Vaccinia virus
gauaauuauuuccag

SEQ ID NO: 4062484 - RNA, 15 nt, Vaccinia virus
gauaauuauuucuac

SEQ ID NO: 4062485 - RNA, 19 nt, Vaccinia virus
gauacaacgguuacuauca

SEQ ID NO: 4062486 - RNA, 17 nt, Vaccinia virus
gauacaauggaugauau

SEQ ID NO: 4062487 - RNA, 14 nt, Vaccinia virus
gauacauaaacgaa

SEQ ID NO: 4062488 - RNA, 17 nt, Vaccinia virus
gauacaucuauauugcu

SEQ ID NO: 4062489 - RNA, 14 nt, Vaccinia virus
gauacauuuugcau

SEQ ID NO: 4062490 - RNA, 17 nt, Vaccinia virus
gauacccugauauuaau

SEQ ID NO: 4062491 - RNA, 21 nt, Vaccinia virus
gauaccgaucacguucuaguu

SEQ ID NO: 4062492 - RNA, 14 nt, Vaccinia virus
gauacgaugaugau

SEQ ID NO: 4062493 - RNA, 18 nt, Vaccinia virus
gauacgcuauuaaaauau

SEQ ID NO: 4062494 - RNA, 16 nt, Vaccinia virus
gauacguaauaaucuu

SEQ ID NO: 4062495 - RNA, 17 nt, Vaccinia virus
gauacuaguaugauggu

SEQ ID NO: 4062496 - RNA, 16 nt, Vaccinia virus
gauacuaucaaaauau

SEQ ID NO: 4062497 - RNA, 17 nt, Vaccinia virus
gauacuauuuauuucua

SEQ ID NO: 4062498 - RNA, 17 nt, Vaccinia virus
gauacugguuugauaaa

SEQ ID NO: 4062499 - RNA, 13 nt, Vaccinia virus
gauagacuuucuc

SEQ ID NO: 4062500 - RNA, 15 nt, Vaccinia virus
gauagagaacauaua

SEQ ID NO: 4062501 - RNA, 15 nt, Vaccinia virus
gauagcaaaauaaag

SEQ ID NO: 4062502 - RNA, 18 nt, Vaccinia virus
gauagcauuaauacagua

SEQ ID NO: 4062503 - RNA, 15 nt, Vaccinia virus
gauagccaacuauac

SEQ ID NO: 4062504 - RNA, 19 nt, Vaccinia virus
gauaguacagcguaguaca

SEQ ID NO: 4062505 - RNA, 23 nt, Vaccinia virus
gauaguuuuuuucauuacuaucu

SEQ ID NO: 4062506 - RNA, 18 nt, Vaccinia virus
gauauaaaaaucuguuuu

SEQ ID NO: 4062507 - RNA, 20 nt, Vaccinia virus
gauauagaaaucggaaauuu

SEQ ID NO: 4062508 - RNA, 14 nt, Vaccinia virus
gauauagauaugau

SEQ ID NO: 4062509 - RNA, 16 nt, Vaccinia virus
gauauauaucuuuuca

SEQ ID NO: 4062510 - RNA, 17 nt, Vaccinia virus
gauauaucaaaauuaga

SEQ ID NO: 4062511 - RNA, 20 nt, Vaccinia virus
gauauauggacgauaauaau

SEQ ID NO: 4062512 - RNA, 17 nt, Vaccinia virus
gauauauugauaauaau

SEQ ID NO: 4062513 - RNA, 18 nt, Vaccinia virus
gauauauuguuucauaau

SEQ ID NO: 4062514 - RNA, 23 nt, Vaccinia virus
gauauauuugcacacauaaucca

SEQ ID NO: 4062515 - RNA, 19 nt, Vaccinia virus
gauauauuuuugauaauau

SEQ ID NO: 4062516 - RNA, 17 nt, Vaccinia virus
gauauccauagauggag

SEQ ID NO: 4062517 - RNA, 20 nt, Vaccinia virus
gauaucgagaucuuuuguau

SEQ ID NO: 4062518 - RNA, 15 nt, Vaccinia virus
gauaucuaaauaugc

SEQ ID NO: 4062519 - RNA, 15 nt, Vaccinia virus
gauauuagaacugcu

SEQ ID NO: 4062520 - RNA, 12 nt, Vaccinia virus
gauauuauuaca

SEQ ID NO: 4062521 - RNA, 17 nt, Vaccinia virus
gauauucguugaugaau

SEQ ID NO: 4062522 - RNA, 13 nt, Vaccinia virus
gauauucuucaga

SEQ ID NO: 4062523 - RNA, 15 nt, Vaccinia virus
gauauuucuggaaug

SEQ ID NO: 4062524 - RNA, 21 nt, Vaccinia virus
gauauuuuaguuuuggcagau

SEQ ID NO: 4062525 - RNA, 14 nt, Vaccinia virus
gaucaacaaaagaa

SEQ ID NO: 4062526 - RNA, 15 nt, Vaccinia virus
gaucaacagaaauau

SEQ ID NO: 4062527 - RNA, 17 nt, Vaccinia virus
gaucacuguagugcuau

SEQ ID NO: 4062528 - RNA, 16 nt, Vaccinia virus
gaucauaucuacuaau

SEQ ID NO: 4062529 - RNA, 18 nt, Vaccinia virus
gaucaugcuguaaucaua

SEQ ID NO: 4062530 - RNA, 15 nt, Vaccinia virus
gaucauguagaaaac

SEQ ID NO: 4062531 - RNA, 22 nt, Vaccinia virus
gaucauuaauaugcucaugaac

SEQ ID NO: 4062532 - RNA, 14 nt, Vaccinia virus
gaucauuaaucauc

SEQ ID NO: 4062533 - RNA, 19 nt, Vaccinia virus
gauccuagaacuagauaua

SEQ ID NO: 4062534 - RNA, 20 nt, Vaccinia virus
gauccugcauagaaauaucu

SEQ ID NO: 4062535 - RNA, 17 nt, Vaccinia virus
gaucgauaaugagaaua

SEQ ID NO: 4062536 - RNA, 17 nt, Vaccinia virus
gaucguaaaucuguuuc

SEQ ID NO: 4062537 - RNA, 15 nt, Vaccinia virus
gaucgucacaaugau

SEQ ID NO: 4062538 - RNA, 18 nt, Vaccinia virus
gaucuccaucgaugauac

SEQ ID NO: 4062539 - RNA, 13 nt, Vaccinia virus
gaucuguauuaua

SEQ ID NO: 4062540 - RNA, 23 nt, Vaccinia virus
gaucuuuauuuuucguguauuuu

SEQ ID NO: 4062541 - RNA, 19 nt, Vaccinia virus
gaugaaggugggacuauau

SEQ ID NO: 4062542 - RNA, 13 nt, Vaccinia virus
gaugaauuauuau

SEQ ID NO: 4062543 - RNA, 15 nt, Vaccinia virus
gaugauauagaucuu

SEQ ID NO: 4062544 - RNA, 15 nt, Vaccinia virus
gaugauauauauauu

SEQ ID NO: 4062545 - RNA, 12 nt, Vaccinia virus
gaugauauuaac

SEQ ID NO: 4062546 - RNA, 14 nt, Vaccinia virus
gaugcauaaguaca

SEQ ID NO: 4062547 - RNA, 17 nt, Vaccinia virus
gaugcauauauuucauu

SEQ ID NO: 4062548 - RNA, 16 nt, Vaccinia virus
gaugccgguacuuaug

SEQ ID NO: 4062549 - RNA, 14 nt, Vaccinia virus
gaugccucuuuuag

SEQ ID NO: 4062550 - RNA, 19 nt, Vaccinia virus
gaugcuauguauauauauu

SEQ ID NO: 4062551 - RNA, 12 nt, Vaccinia virus
gaugguauuauc

SEQ ID NO: 4062552 - RNA, 15 nt, Vaccinia virus
gauguaguaguauau

SEQ ID NO: 4062553 - RNA, 18 nt, Vaccinia virus
gauguagugauagauaug

SEQ ID NO: 4062554 - RNA, 12 nt, Vaccinia virus
gauguauccaca

SEQ ID NO: 4062555 - RNA, 20 nt, Vaccinia virus
gauguauuagcaucuuauua

SEQ ID NO: 4062556 - RNA, 18 nt, Vaccinia virus
gaugucaaaggaugaaag

SEQ ID NO: 4062557 - RNA, 17 nt, Vaccinia virus
gaugucaaugaagagua

SEQ ID NO: 4062558 - RNA, 22 nt, Vaccinia virus
uucuagaauuagaauuacaaaa

SEQ ID NO: 4062559 - RNA, 13 nt, Vaccinia virus
uucuagaccaaaa

SEQ ID NO: 4062560 - RNA, 15 nt, Vaccinia virus
uucuagcgcugauuu

SEQ ID NO: 4062561 - RNA, 21 nt, Vaccinia virus
uucuaucaacgauucuagaau

SEQ ID NO: 4062562 - RNA, 17 nt, Vaccinia virus
uucuauuuuuaauauag

SEQ ID NO: 4062563 - RNA, 19 nt, Vaccinia virus
uucucaaaagaucaaggaa

SEQ ID NO: 4062564 - RNA, 20 nt, Vaccinia virus
uucucaaauccauagucuuc

SEQ ID NO: 4062565 - RNA, 18 nt, Vaccinia virus
uucucaugagaauggaaa

SEQ ID NO: 4062566 - RNA, 23 nt, Vaccinia virus
uucuccuggagggauaguauaau

SEQ ID NO: 4062567 - RNA, 15 nt, Vaccinia virus
uucucguuuccaaaa

SEQ ID NO: 4062568 - RNA, 19 nt, Vaccinia virus
uucucuuugguaacugcuu

SEQ ID NO: 4062569 - RNA, 15 nt, Vaccinia virus
uucugauuuuaacga

SEQ ID NO: 4062570 - RNA, 14 nt, Vaccinia virus
uucuggaucucacc

SEQ ID NO: 4062571 - RNA, 17 nt, Vaccinia virus
uucugguguaauauucu

SEQ ID NO: 4062572 - RNA, 15 nt, Vaccinia virus
uucugguuuaaaaac

SEQ ID NO: 4062573 - RNA, 12 nt, Vaccinia virus
uucuguacaaag

SEQ ID NO: 4062574 - RNA, 18 nt, Vaccinia virus
uucugucgauauagcuuu

SEQ ID NO: 4062575 - RNA, 20 nt, Vaccinia virus
uucuuaacuacguuaucauc

SEQ ID NO: 4062576 - RNA, 15 nt, Vaccinia virus
uucuuaagacacauu

SEQ ID NO: 4062577 - RNA, 20 nt, Vaccinia virus
uucuuacauaaaugaaaaga

SEQ ID NO: 4062578 - RNA, 16 nt, Vaccinia virus
uucuuauucuuauucu

SEQ ID NO: 4062579 - RNA, 17 nt, Vaccinia virus
uucuuauucuuauucuu

SEQ ID NO: 4062580 - RNA, 17 nt, Vaccinia virus
uucuucaauaaaaugag

SEQ ID NO: 4062581 - RNA, 23 nt, Vaccinia virus
uucuucaguaguaauaacagugc

SEQ ID NO: 4062582 - RNA, 17 nt, Vaccinia virus
gacuuuauaauuucauc

SEQ ID NO: 4062583 - RNA, 16 nt, Vaccinia virus
gagaaaaacaacgaga

SEQ ID NO: 4062584 - RNA, 16 nt, Vaccinia virus
gagaaagaagaaauac

SEQ ID NO: 4062585 - RNA, 14 nt, Vaccinia virus
gagaaauuauuccu

SEQ ID NO: 4062586 - RNA, 14 nt, Vaccinia virus
gagagauagaagaa

SEQ ID NO: 4062587 - RNA, 20 nt, Vaccinia virus
gagagcaugaaggagauuua

SEQ ID NO: 4062588 - RNA, 14 nt, Vaccinia virus
gagagcauucacag

SEQ ID NO: 4062589 - RNA, 19 nt, Vaccinia virus
gagaguagauaucauuaau

SEQ ID NO: 4062590 - RNA, 15 nt, Vaccinia virus
gagauaauagaaaau

SEQ ID NO: 4062591 - RNA, 20 nt, Vaccinia virus
gagauccugcauagaaauau

SEQ ID NO: 4062592 - RNA, 14 nt, Vaccinia virus
gagaugucugaaac

SEQ ID NO: 4062593 - RNA, 14 nt, Vaccinia virus
gagauuaaaugcaa

SEQ ID NO: 4062594 - RNA, 13 nt, Vaccinia virus
gagauuuucuauu

SEQ ID NO: 4062595 - RNA, 20 nt, Vaccinia virus
gagcuaaacacauuagauau

SEQ ID NO: 4062596 - RNA, 21 nt, Vaccinia virus
gagcuaaacacauuagauauu

SEQ ID NO: 4062597 - RNA, 20 nt, Vaccinia virus
gagcuaucuagacuacgaua

SEQ ID NO: 4062598 - RNA, 18 nt, Vaccinia virus
gaggacuuggauguuugu

SEQ ID NO: 4062599 - RNA, 13 nt, Vaccinia virus
gaggagaaguaau

SEQ ID NO: 4062600 - RNA, 22 nt, Vaccinia virus
gaggaggaauaucugaugaugu

SEQ ID NO: 4062601 - RNA, 14 nt, Vaccinia virus
gaggagguauauau

SEQ ID NO: 4062602 - RNA, 23 nt, Vaccinia virus
gaggauaguugauuuauuacuua

SEQ ID NO: 4062603 - RNA, 16 nt, Vaccinia virus
gaggaugaugaagaag

SEQ ID NO: 4062604 - RNA, 12 nt, Vaccinia virus
gaguaguuuaug

SEQ ID NO: 4062605 - RNA, 19 nt, Vaccinia virus
gaguauucgccccaaagga

SEQ ID NO: 4062606 - RNA, 11 nt, Vaccinia virus
gaguauuucuc

SEQ ID NO: 4062607 - RNA, 15 nt, Vaccinia virus
gaguuacuuaaaugc

SEQ ID NO: 4062608 - RNA, 15 nt, Vaccinia virus
gaguuagauauuaau

SEQ ID NO: 4062609 - RNA, 14 nt, Vaccinia virus
gaguuaucaagaga

SEQ ID NO: 4062610 - RNA, 20 nt, Vaccinia virus
gauaaaaaggaaucuauuaa

SEQ ID NO: 4062611 - RNA, 18 nt, Vaccinia virus
gauaaaacaaguuuucau

SEQ ID NO: 4062612 - RNA, 18 nt, Vaccinia virus
gauaaaacgauaaaagau

SEQ ID NO: 4062613 - RNA, 18 nt, Vaccinia virus
gauaaaauccuccuauca

SEQ ID NO: 4062614 - RNA, 18 nt, Vaccinia virus
gauaaacgugauaaaagu

SEQ ID NO: 4062615 - RNA, 14 nt, Vaccinia virus
gauaaaguuaucau

SEQ ID NO: 4062616 - RNA, 20 nt, Vaccinia virus
gauaaauucguaauaaucug

SEQ ID NO: 4062617 - RNA, 19 nt, Vaccinia virus
gauaacaauagucuuguaa

SEQ ID NO: 4062618 - RNA, 21 nt, Vaccinia virus
gauaacauguuaauuuccgac

SEQ ID NO: 4062619 - RNA, 21 nt, Vaccinia virus
gauaacuuuuucaauaucgua

SEQ ID NO: 4062620 - RNA, 22 nt, Vaccinia virus
gauaagagacguguuauuacau

SEQ ID NO: 4062621 - RNA, 20 nt, Vaccinia virus
agaauuuucauggauguaga

SEQ ID NO: 4062622 - RNA, 17 nt, Vaccinia virus
agaauuuuuuaaaaagu

SEQ ID NO: 4062623 - RNA, 21 nt, Vaccinia virus
agacaauugacaaaauucaca

SEQ ID NO: 4062624 - RNA, 20 nt, Vaccinia virus
agacaccuuuucaauguuua

SEQ ID NO: 4062625 - RNA, 19 nt, Vaccinia virus
agacacgaauaugacuaga

SEQ ID NO: 4062626 - RNA, 22 nt, Vaccinia virus
agacagccaaucaaaaagauua

SEQ ID NO: 4062627 - RNA, 16 nt, Vaccinia virus
agacagugguuucaug

SEQ ID NO: 4062628 - RNA, 13 nt, Vaccinia virus
agacauaauacua

SEQ ID NO: 4062629 - RNA, 20 nt, Vaccinia virus
agacaugguaucaacagaua

SEQ ID NO: 4062630 - RNA, 13 nt, Vaccinia virus
agacauuaauaga

SEQ ID NO: 4062631 - RNA, 16 nt, Vaccinia virus
agaccacacggagaac

SEQ ID NO: 4062632 - RNA, 14 nt, Vaccinia virus
agaccauauacuga

SEQ ID NO: 4062633 - RNA, 18 nt, Vaccinia virus
agacgaauacauauaccg

SEQ ID NO: 4062634 - RNA, 16 nt, Vaccinia virus
agacgacaacauguaa

SEQ ID NO: 4062635 - RNA, 18 nt, Vaccinia virus
agacgauuccaacaaacg

SEQ ID NO: 4062636 - RNA, 22 nt, Vaccinia virus
agacggcaauggauggauuaua

SEQ ID NO: 4062637 - RNA, 15 nt, Vaccinia virus
agacguauaagucua

SEQ ID NO: 4062638 - RNA, 16 nt, Vaccinia virus
agacgucaucuguucu

SEQ ID NO: 4062639 - RNA, 18 nt, Vaccinia virus
agacguggcaaacaaugu

SEQ ID NO: 4062640 - RNA, 14 nt, Vaccinia virus
agacguguuauuac

SEQ ID NO: 4062641 - RNA, 22 nt, Vaccinia virus
agacuacuuauucuauuuuacu

SEQ ID NO: 4062642 - RNA, 14 nt, Vaccinia virus
agacuaugauugac

SEQ ID NO: 4062643 - RNA, 17 nt, Vaccinia virus
agacuaugggaauauau

SEQ ID NO: 4062644 - RNA, 17 nt, Vaccinia virus
agacucaucaacgauga

SEQ ID NO: 4062645 - RNA, 16 nt, Vaccinia virus
agacuguuuguagaau

SEQ ID NO: 4062646 - RNA, 14 nt, Vaccinia virus
agacuuguauucaa

SEQ ID NO: 4062647 - RNA, 17 nt, Vaccinia virus
agacuuuacuuuucuaa

SEQ ID NO: 4062648 - RNA, 15 nt, Vaccinia virus
agacuuugaaauaua

SEQ ID NO: 4062649 - RNA, 14 nt, Vaccinia virus
agacuuuguagaaa

SEQ ID NO: 4062650 - RNA, 20 nt, Vaccinia virus
acaacgaauacaaacgccau

SEQ ID NO: 4062651 - RNA, 15 nt, Vaccinia virus
acaacgaauguguac

SEQ ID NO: 4062652 - RNA, 16 nt, Vaccinia virus
acaacgagauaucuug

SEQ ID NO: 4062653 - RNA, 19 nt, Vaccinia virus
acaacuuaaugaagaucua

SEQ ID NO: 4062654 - RNA, 19 nt, Vaccinia virus
acaacuuuuaaauacaaau

SEQ ID NO: 4062655 - RNA, 16 nt, Vaccinia virus
acaagaucaaaguaca

SEQ ID NO: 4062656 - RNA, 18 nt, Vaccinia virus
acaaguaggauuuuucca

SEQ ID NO: 4062657 - RNA, 12 nt, Vaccinia virus
acaaguuuucau

SEQ ID NO: 4062658 - RNA, 18 nt, Vaccinia virus
acaauaaauagcuuuacu

SEQ ID NO: 4062659 - RNA, 15 nt, Vaccinia virus
acaauaacuacauau

SEQ ID NO: 4062660 - RNA, 17 nt, Vaccinia virus
acaauacauguacaaau

SEQ ID NO: 4062661 - RNA, 17 nt, Vaccinia virus
acaauacggaauaucua

SEQ ID NO: 4062662 - RNA, 21 nt, Vaccinia virus
acaauagauggauaauggaag

SEQ ID NO: 4062663 - RNA, 16 nt, Vaccinia virus
acaauaguuagauaca

SEQ ID NO: 4062664 - RNA, 20 nt, Vaccinia virus
acaauauauucucauaguau

SEQ ID NO: 4062665 - RNA, 15 nt, Vaccinia virus
acaauaucauaaaca

SEQ ID NO: 4062666 - RNA, 15 nt, Vaccinia virus
acaauauuacaaaau

SEQ ID NO: 4062667 - RNA, 23 nt, Vaccinia virus
acaauauuuuucguuuacaaaau

SEQ ID NO: 4062668 - RNA, 14 nt, Vaccinia virus
acaauccaauaaua

SEQ ID NO: 4062669 - RNA, 18 nt, Vaccinia virus
acaauccuagaacgaaua

SEQ ID NO: 4062670 - RNA, 14 nt, Vaccinia virus
acaaucguuaauaa

SEQ ID NO: 4062671 - RNA, 15 nt, Vaccinia virus
acaaucucuauaucu

SEQ ID NO: 4062672 - RNA, 13 nt, Vaccinia virus
acaaugaacuaau

SEQ ID NO: 4062673 - RNA, 16 nt, Vaccinia virus
acaaugacugauauau

SEQ ID NO: 4062674 - RNA, 20 nt, Vaccinia virus
acaaugaugccaucauagau

SEQ ID NO: 4062675 - RNA, 22 nt, Vaccinia virus
acaaugaugcggaagaacaauu

SEQ ID NO: 4062676 - RNA, 15 nt, Vaccinia virus
acaaugcuaauauau

SEQ ID NO: 4062677 - RNA, 15 nt, Vaccinia virus
acaauguagaaauua

SEQ ID NO: 4062678 - RNA, 19 nt, Vaccinia virus
acaauguccaaaucuauau

SEQ ID NO: 4062679 - RNA, 21 nt, Vaccinia virus
acaauguuugacugaauauau

SEQ ID NO: 4062680 - RNA, 21 nt, Vaccinia virus
acaauguuugucauauguauu

SEQ ID NO: 4062681 - RNA, 16 nt, Vaccinia virus
acaauuacaaaugagu

SEQ ID NO: 4062682 - RNA, 19 nt, Vaccinia virus
acaauuauuauauaauucu

SEQ ID NO: 4062683 - RNA, 14 nt, Vaccinia virus
acaauuuacauguu

SEQ ID NO: 4062684 - RNA, 17 nt, Vaccinia virus
acaauuuauucagagag

SEQ ID NO: 4062685 - RNA, 22 nt, Vaccinia virus
acaauuuuuuuauaauaauucu

SEQ ID NO: 4062686 - RNA, 14 nt, Vaccinia virus
acacaaaaagaaag

SEQ ID NO: 4062687 - RNA, 20 nt, Vaccinia virus
acacaacgcgucuagacuuc

SEQ ID NO: 4062688 - RNA, 20 nt, Vaccinia virus
acacacugagaaacagcaua

SEQ ID NO: 4062689 - RNA, 18 nt, Vaccinia virus
acacaguagaaaauaaua

SEQ ID NO: 4062690 - RNA, 13 nt, Vaccinia virus
acacaucaaaaua

SEQ ID NO: 4062691 - RNA, 19 nt, Vaccinia virus
acacauucuuuagaacuuc

SEQ ID NO: 4062692 - RNA, 18 nt, Vaccinia virus
acacauuuucaaauaaua

SEQ ID NO: 4062693 - RNA, 15 nt, Vaccinia virus
acacgauauucaugg

SEQ ID NO: 4062694 - RNA, 13 nt, Vaccinia virus
acacgaugaugau

SEQ ID NO: 4062695 - RNA, 19 nt, Vaccinia virus
acacgauuuaauccaucug

SEQ ID NO: 4062696 - RNA, 16 nt, Vaccinia virus
acacuacccaauaaau

SEQ ID NO: 4062697 - RNA, 17 nt, Vaccinia virus
acacucuauaucuagaa

SEQ ID NO: 4062698 - RNA, 13 nt, Vaccinia virus
acacucuauuuca

SEQ ID NO: 4062699 - RNA, 19 nt, Vaccinia virus
acacuuuuguaaaauauua

SEQ ID NO: 4062700 - RNA, 19 nt, Vaccinia virus
acagaaaagauauuuguua

SEQ ID NO: 4062701 - RNA, 16 nt, Vaccinia virus
acagaacaguaaaugu

SEQ ID NO: 4062702 - RNA, 22 nt, Vaccinia virus
acagaagauagcaaagagauga

SEQ ID NO: 4062703 - RNA, 17 nt, Vaccinia virus
acagaauaugagaauga

SEQ ID NO: 4062704 - RNA, 22 nt, Vaccinia virus
acagaauguagauaaucauuua

SEQ ID NO: 4062705 - RNA, 18 nt, Vaccinia virus
acagacacgaauaugacu

SEQ ID NO: 4062706 - RNA, 14 nt, Vaccinia virus
acagaccaaauaua

SEQ ID NO: 4062707 - RNA, 22 nt, Vaccinia virus
acagacuguuauaaucaaagau

SEQ ID NO: 4062708 - RNA, 12 nt, Vaccinia virus
acagacuuuaac

SEQ ID NO: 4062709 - RNA, 23 nt, Vaccinia virus
acagagccaucuguaaaaagaua

SEQ ID NO: 4062710 - RNA, 21 nt, Vaccinia virus
acagaguauguaaaaauguua

SEQ ID NO: 4062711 - RNA, 21 nt, Vaccinia virus
acagaguuagaaauagauaau

SEQ ID NO: 4062712 - RNA, 18 nt, Vaccinia virus
acagaguuuucagaagau

SEQ ID NO: 4062713 - RNA, 23 nt, Vaccinia virus
aucaaugauagacuagaagaaag

SEQ ID NO: 4062714 - RNA, 21 nt, Vaccinia virus
aucaauguccugcuauacuuc

SEQ ID NO: 4062715 - RNA, 19 nt, Vaccinia virus
aucaauguguguaacucca

SEQ ID NO: 4062716 - RNA, 17 nt, Vaccinia virus
aucaauuaaauaauuaa

SEQ ID NO: 4062717 - RNA, 17 nt, Vaccinia virus
aucaauuucaaaaagag

SEQ ID NO: 4062718 - RNA, 13 nt, Vaccinia virus
aucacaaacauua

SEQ ID NO: 4062719 - RNA, 13 nt, Vaccinia virus
aucacaagaaguu

SEQ ID NO: 4062720 - RNA, 18 nt, Vaccinia virus
aucacaauauauguugau

SEQ ID NO: 4062721 - RNA, 13 nt, Vaccinia virus
aucacaaugacuu

SEQ ID NO: 4062722 - RNA, 22 nt, Vaccinia virus
aucacacaagccauuguugucu

SEQ ID NO: 4062723 - RNA, 16 nt, Vaccinia virus
aucacacuuaaaauaa

SEQ ID NO: 4062724 - RNA, 17 nt, Vaccinia virus
aucacacuuaaaauaaa

SEQ ID NO: 4062725 - RNA, 20 nt, Vaccinia virus
aucacauuguauauaguuua

SEQ ID NO: 4062726 - RNA, 21 nt, Vaccinia virus
aucacccgcgugugagagaag

SEQ ID NO: 4062727 - RNA, 22 nt, Vaccinia virus
aucacgucagcggcaucuaaau

SEQ ID NO: 4062728 - RNA, 19 nt, Vaccinia virus
aucacguguuaaacaaugg

SEQ ID NO: 4062729 - RNA, 17 nt, Vaccinia virus
aucacuaucuuugaaaa

SEQ ID NO: 4062730 - RNA, 19 nt, Vaccinia virus
aucacucucauaauguaaa

SEQ ID NO: 4062731 - RNA, 15 nt, Vaccinia virus
aucacucuucgaaaa

SEQ ID NO: 4062732 - RNA, 18 nt, Vaccinia virus
aucagaaaggauagagca

SEQ ID NO: 4062733 - RNA, 23 nt, Vaccinia virus
aucagacucugguauuuauauau

SEQ ID NO: 4062734 - RNA, 13 nt, Vaccinia virus
aucagagaacuuc

SEQ ID NO: 4062735 - RNA, 14 nt, Vaccinia virus
aucagauauuugcg

SEQ ID NO: 4062736 - RNA, 13 nt, Vaccinia virus
aucagaucauauu

SEQ ID NO: 4062737 - RNA, 15 nt, Vaccinia virus
aucagauuauuuaac

SEQ ID NO: 4062738 - RNA, 21 nt, Vaccinia virus
aucaguacguucuucauuuau

SEQ ID NO: 4062739 - RNA, 21 nt, Vaccinia virus
aucagucuccaguuaauauau

SEQ ID NO: 4062740 - RNA, 16 nt, Vaccinia virus
aucauaagcaucaugu

SEQ ID NO: 4062741 - RNA, 14 nt, Vaccinia virus
aucauaaguuuaua

SEQ ID NO: 4062742 - RNA, 15 nt, Vaccinia virus
aucauacaaugaauu

SEQ ID NO: 4062743 - RNA, 16 nt, Vaccinia virus
aucauacauuuaauaa

SEQ ID NO: 4062744 - RNA, 17 nt, Vaccinia virus
aucauagauucauauag

SEQ ID NO: 4062745 - RNA, 15 nt, Vaccinia virus
aucauagucgaacau

SEQ ID NO: 4062746 - RNA, 13 nt, Vaccinia virus
aucauauauaaug

SEQ ID NO: 4062747 - RNA, 15 nt, Vaccinia virus
aucauauauagaaug

SEQ ID NO: 4062748 - RNA, 22 nt, Vaccinia virus
aucauaucuauaucauccaugu

SEQ ID NO: 4062749 - RNA, 17 nt, Vaccinia virus
aucaucaccuaucuugu

SEQ ID NO: 4062750 - RNA, 18 nt, Vaccinia virus
aucaucgaucuaauagau

SEQ ID NO: 4062751 - RNA, 14 nt, Vaccinia virus
aucaucgauuuuca

SEQ ID NO: 4062752 - RNA, 22 nt, Vaccinia virus
aucaucugcacuaauuaacagu

SEQ ID NO: 4062753 - RNA, 22 nt, Vaccinia virus
aucaucuuaugaggaaugauug

SEQ ID NO: 4062754 - RNA, 20 nt, Vaccinia virus
aucaugauuggguagcaaau

SEQ ID NO: 4062755 - RNA, 17 nt, Vaccinia virus
aucauguccauuuaacu

SEQ ID NO: 4062756 - RNA, 11 nt, Vaccinia virus
aucauuaacga

SEQ ID NO: 4062757 - RNA, 19 nt, Vaccinia virus
aucauuacuaacuuuauca

SEQ ID NO: 4062758 - RNA, 19 nt, Vaccinia virus
aucauugauugagaagaag

SEQ ID NO: 4062759 - RNA, 19 nt, Vaccinia virus
aucauuuaaacauuuaacu

SEQ ID NO: 4062760 - RNA, 23 nt, Vaccinia virus
aucauuugacgauauuucuggaa

SEQ ID NO: 4062761 - RNA, 15 nt, Vaccinia virus
auccaaaauuuugua

SEQ ID NO: 4062762 - RNA, 12 nt, Vaccinia virus
auccaaacauua

SEQ ID NO: 4062763 - RNA, 19 nt, Vaccinia virus
auccaaacccuugaucucc

SEQ ID NO: 4062764 - RNA, 14 nt, Vaccinia virus
auccaaaguauuuu

SEQ ID NO: 4062765 - RNA, 24 nt, Vaccinia virus
auccaaauuuuuuuuacaaacauc

SEQ ID NO: 4062766 - RNA, 23 nt, Vaccinia virus
auccaaggauguaauuaaauguu

SEQ ID NO: 4062767 - RNA, 17 nt, Vaccinia virus
auccaauauuauugaaa

SEQ ID NO: 4062768 - RNA, 17 nt, Vaccinia virus
auccagucuuuaaugaa

SEQ ID NO: 4062769 - RNA, 22 nt, Vaccinia virus
auccauaguuuguaucaauaau

SEQ ID NO: 4062770 - RNA, 15 nt, Vaccinia virus
auccauauuucuuaa

SEQ ID NO: 4062771 - RNA, 15 nt, Vaccinia virus
auccaugauagaaag

SEQ ID NO: 4062772 - RNA, 17 nt, Vaccinia virus
auccauggcagagacga

SEQ ID NO: 4062773 - RNA, 16 nt, Vaccinia virus
aucccauauaauacag

SEQ ID NO: 4062774 - RNA, 14 nt, Vaccinia virus
aucccauuguaaag

SEQ ID NO: 4062775 - RNA, 15 nt, Vaccinia virus
aucccuuaaaaauua

SEQ ID NO: 4062776 - RNA, 21 nt, Vaccinia virus
auccgaaacaaucucagauau

SEQ ID NO: 4062777 - RNA, 17 nt, Vaccinia virus
auccgauacuuguaaga

SEQ ID NO: 4062778 - RNA, 17 nt, Vaccinia virus
auccggauauaauauau

SEQ ID NO: 4062779 - RNA, 15 nt, Vaccinia virus
auccguuaaguuugu

SEQ ID NO: 4062780 - RNA, 22 nt, Vaccinia virus
auccuaaagguaaauguaaauu

SEQ ID NO: 4062781 - RNA, 17 nt, Vaccinia virus
auccuaacuuuaaacaa

SEQ ID NO: 4062782 - RNA, 16 nt, Vaccinia virus
auccuacuguauacuu

SEQ ID NO: 4062783 - RNA, 17 nt, Vaccinia virus
auccuauacucugaaag

SEQ ID NO: 4062784 - RNA, 17 nt, Vaccinia virus
auccucagucaucuugu

SEQ ID NO: 4062785 - RNA, 18 nt, Vaccinia virus
auccucagucaucuuguc

SEQ ID NO: 4062786 - RNA, 19 nt, Vaccinia virus
auccuccggaguauuaaug

SEQ ID NO: 4062787 - RNA, 17 nt, Vaccinia virus
auccucgcuuuguguau

SEQ ID NO: 4062788 - RNA, 13 nt, Vaccinia virus
auccucuaugaag

SEQ ID NO: 4062789 - RNA, 15 nt, Vaccinia virus
auccuuaaauguuuu

SEQ ID NO: 4062790 - RNA, 17 nt, Vaccinia virus
auccuucagaauacaau

SEQ ID NO: 4062791 - RNA, 19 nt, Vaccinia virus
auccuucuauguugacaug

SEQ ID NO: 4062792 - RNA, 16 nt, Vaccinia virus
auccuuuguaaagaaa

SEQ ID NO: 4062793 - RNA, 18 nt, Vaccinia virus
auccuuuucuucagaaua

SEQ ID NO: 4062794 - RNA, 22 nt, Vaccinia virus
auccuuuuguuggaaaaaugau

SEQ ID NO: 4062795 - RNA, 23 nt, Vaccinia virus
aucgaauaacgaacauaacuuua

SEQ ID NO: 4062796 - RNA, 17 nt, Vaccinia virus
aucgauacauauaugca

SEQ ID NO: 4062797 - RNA, 14 nt, Vaccinia virus
aucgauagacacug

SEQ ID NO: 4062798 - RNA, 16 nt, Vaccinia virus
aucgauagacuuucuc

SEQ ID NO: 4062799 - RNA, 23 nt, Vaccinia virus
aucgaucaaaagacuauacauuu

SEQ ID NO: 4062800 - RNA, 19 nt, Vaccinia virus
aucgauccaugagaaauac

SEQ ID NO: 4062801 - RNA, 20 nt, Vaccinia virus
aucgauuuuuagauuucauu

SEQ ID NO: 4062802 - RNA, 17 nt, Vaccinia virus
aucgcuaaucaaaacua

SEQ ID NO: 4062803 - RNA, 22 nt, Vaccinia virus
aucggaacacuugguaguugaa

SEQ ID NO: 4062804 - RNA, 18 nt, Vaccinia virus
aucggaugauauuaaugu

SEQ ID NO: 4062805 - RNA, 13 nt, Vaccinia virus
aucggcucaaaga

SEQ ID NO: 4062806 - RNA, 15 nt, Vaccinia virus
aucguacuauauaca

SEQ ID NO: 4062807 - RNA, 24 nt, Vaccinia virus
aucguauaucuucuucugugauag

SEQ ID NO: 4062808 - RNA, 14 nt, Vaccinia virus
aucgucguacaugg

SEQ ID NO: 4062809 - RNA, 18 nt, Vaccinia virus
aucgucuaaaagaauugc

SEQ ID NO: 4062810 - RNA, 14 nt, Vaccinia virus
aucgucuucacaaa

SEQ ID NO: 4062811 - RNA, 19 nt, Vaccinia virus
aucgucuucacaaagaaug

SEQ ID NO: 4062812 - RNA, 23 nt, Vaccinia virus
aucguguuguguuggugaauauu

SEQ ID NO: 4062813 - RNA, 15 nt, Vaccinia virus
aucguuaagaauugu

SEQ ID NO: 4062814 - RNA, 23 nt, Vaccinia virus
aucguucucuaaaugucacaauc

SEQ ID NO: 4062815 - RNA, 16 nt, Vaccinia virus
aucguuuaaaauacua

SEQ ID NO: 4062816 - RNA, 15 nt, Vaccinia virus
aucguuuaaaguaaa

SEQ ID NO: 4062817 - RNA, 17 nt, Vaccinia virus
aucguuucuacaaaauc

SEQ ID NO: 4062818 - RNA, 14 nt, Vaccinia virus
aucguuuucaucuu

SEQ ID NO: 4062819 - RNA, 14 nt, Vaccinia virus
aucuaaaaacaaua

SEQ ID NO: 4062820 - RNA, 15 nt, Vaccinia virus
aucuaaaaucauaau

SEQ ID NO: 4062821 - RNA, 22 nt, Vaccinia virus
aucuaaacagacgacaacaugu

SEQ ID NO: 4062822 - RNA, 20 nt, Vaccinia virus
aucuaaagaugaugcuauuu

SEQ ID NO: 4062823 - RNA, 15 nt, Vaccinia virus
aucuaaauuaaauau

SEQ ID NO: 4062824 - RNA, 13 nt, Vaccinia virus
aucuaaugaauga

SEQ ID NO: 4062825 - RNA, 17 nt, Vaccinia virus
aucuaauggauaaacug

SEQ ID NO: 4062826 - RNA, 14 nt, Vaccinia virus
aucuaauuucugaa

SEQ ID NO: 4062827 - RNA, 14 nt, Vaccinia virus
aucuacaucuaugu

SEQ ID NO: 4062828 - RNA, 13 nt, Vaccinia virus
aucuaccuuauuu

SEQ ID NO: 4062829 - RNA, 17 nt, Vaccinia virus
aucuacuacauuagaca

SEQ ID NO: 4062830 - RNA, 15 nt, Vaccinia virus
aucuacuauacuuua

SEQ ID NO: 4062831 - RNA, 14 nt, Vaccinia virus
aucuagacauagau

SEQ ID NO: 4062832 - RNA, 19 nt, Vaccinia virus
aucuagaugcggugaucag

SEQ ID NO: 4062833 - RNA, 22 nt, Vaccinia virus
aucuagccauaucuaaagcuau

SEQ ID NO: 4062834 - RNA, 22 nt, Vaccinia virus
aucuagcugucuguaucauauu

SEQ ID NO: 4062835 - RNA, 20 nt, Vaccinia virus
aucuaguuguggaaauacuu

SEQ ID NO: 4062836 - RNA, 12 nt, Vaccinia virus
aucuauaaaagu

SEQ ID NO: 4062837 - RNA, 21 nt, Vaccinia virus
aucuauaacaugcuaaaccuu

SEQ ID NO: 4062838 - RNA, 19 nt, Vaccinia virus
aucuauaauuugauccaug

SEQ ID NO: 4062839 - RNA, 18 nt, Vaccinia virus
aucuauauacgauccacg

SEQ ID NO: 4062840 - RNA, 13 nt, Vaccinia virus
auauauagaauua

SEQ ID NO: 4062841 - RNA, 15 nt, Vaccinia virus
auauauauacaguga

SEQ ID NO: 4062842 - RNA, 14 nt, Vaccinia virus
auauaucaaacaug

SEQ ID NO: 4062843 - RNA, 20 nt, Vaccinia virus
auauaucaucgacaaagaca

SEQ ID NO: 4062844 - RNA, 18 nt, Vaccinia virus
auauaucccuuaaaaauu

SEQ ID NO: 4062845 - RNA, 15 nt, Vaccinia virus
auauaugauauacca

SEQ ID NO: 4062846 - RNA, 16 nt, Vaccinia virus
auauaugguuguugau

SEQ ID NO: 4062847 - RNA, 13 nt, Vaccinia virus
auauauugucuaa

SEQ ID NO: 4062848 - RNA, 18 nt, Vaccinia virus
auauauuugaaaaucguu

SEQ ID NO: 4062849 - RNA, 12 nt, Vaccinia virus
auauauuuguau

SEQ ID NO: 4062850 - RNA, 23 nt, Vaccinia virus
auauauuuucacuuuaucucauu

SEQ ID NO: 4062851 - RNA, 20 nt, Vaccinia virus
auaucaaacaauccaaaaaa

SEQ ID NO: 4062852 - RNA, 19 nt, Vaccinia virus
auaucacaaccuuuguuaa

SEQ ID NO: 4062853 - RNA, 20 nt, Vaccinia virus
auaucacaggagcaauguuu

SEQ ID NO: 4062854 - RNA, 15 nt, Vaccinia virus
auaucagacagcaug

SEQ ID NO: 4062855 - RNA, 17 nt, Vaccinia virus
auaucagacgauccaca

SEQ ID NO: 4062856 - RNA, 17 nt, Vaccinia virus
auaucauaaucuaaaau

SEQ ID NO: 4062857 - RNA, 11 nt, Vaccinia virus
auaucauauau

SEQ ID NO: 4062858 - RNA, 17 nt, Vaccinia virus
auaucaucauuguguaa

SEQ ID NO: 4062859 - RNA, 16 nt, Vaccinia virus
auaucaucgacaaaga

SEQ ID NO: 4062860 - RNA, 23 nt, Vaccinia virus
auaucaugaugauuugguuguau

SEQ ID NO: 4062861 - RNA, 17 nt, Vaccinia virus
auauccagugcauuucu

SEQ ID NO: 4062862 - RNA, 22 nt, Vaccinia virus
auauccguguuaaaaaaaauua

SEQ ID NO: 4062863 - RNA, 15 nt, Vaccinia virus
auauccguuaauagg

SEQ ID NO: 4062864 - RNA, 19 nt, Vaccinia virus
auauccuccuuuaaaauua

SEQ ID NO: 4062865 - RNA, 14 nt, Vaccinia virus
auauccuuuuguau

SEQ ID NO: 4062866 - RNA, 16 nt, Vaccinia virus
auauccuuuuguauaa

SEQ ID NO: 4062867 - RNA, 14 nt, Vaccinia virus
auaucgauaauaga

SEQ ID NO: 4062868 - RNA, 13 nt, Vaccinia virus
auaucgaugugga

SEQ ID NO: 4062869 - RNA, 19 nt, Vaccinia virus
auaucggauuauuaacaua

SEQ ID NO: 4062870 - RNA, 19 nt, Vaccinia virus
auaucgguaccguuaaaga

SEQ ID NO: 4062871 - RNA, 13 nt, Vaccinia virus
auaucguuaaaga

SEQ ID NO: 4062872 - RNA, 23 nt, Vaccinia virus
auaucuaggagguggauauuucu

SEQ ID NO: 4062873 - RNA, 15 nt, Vaccinia virus
auaucuauauuucca

SEQ ID NO: 4062874 - RNA, 19 nt, Vaccinia virus
auaucuauuuuuuugucau

SEQ ID NO: 4062875 - RNA, 14 nt, Vaccinia virus
auaucucaacgaug

SEQ ID NO: 4062876 - RNA, 23 nt, Vaccinia virus
auaucuucuaugaaaggagagaa

SEQ ID NO: 4062877 - RNA, 14 nt, Vaccinia virus
auaucuucucaaaa

SEQ ID NO: 4062878 - RNA, 17 nt, Vaccinia virus
auaucuucuuuuuucca

SEQ ID NO: 4062879 - RNA, 14 nt, Vaccinia virus
auaucuuguucuau

SEQ ID NO: 4062880 - RNA, 21 nt, Vaccinia virus
auaucuuguuuagaaaaaugc

SEQ ID NO: 4062881 - RNA, 20 nt, Vaccinia virus
auaucuuuacuaagaaaguu

SEQ ID NO: 4062882 - RNA, 13 nt, Vaccinia virus
auaugacaaacau

SEQ ID NO: 4062883 - RNA, 19 nt, Vaccinia virus
auaugauaauauuaaaaga

SEQ ID NO: 4062884 - RNA, 16 nt, Vaccinia virus
auaugaucaaaaagag

SEQ ID NO: 4062885 - RNA, 20 nt, Vaccinia virus
auaugcaccuagagaauugc

SEQ ID NO: 4062886 - RNA, 18 nt, Vaccinia virus
auaugccuccagaaguug

SEQ ID NO: 4062887 - RNA, 15 nt, Vaccinia virus
auaugcuacauguaa

SEQ ID NO: 4062888 - RNA, 14 nt, Vaccinia virus
auaugcucauauau

SEQ ID NO: 4062889 - RNA, 14 nt, Vaccinia virus
auaugcucuagaua

SEQ ID NO: 4062890 - RNA, 22 nt, Vaccinia virus
auauggaaaaguucaacaugau

SEQ ID NO: 4062891 - RNA, 13 nt, Vaccinia virus
auauguagcaaac

SEQ ID NO: 4062892 - RNA, 15 nt, Vaccinia virus
auauguagcaaacau

SEQ ID NO: 4062893 - RNA, 14 nt, Vaccinia virus
auauguaucauaau

SEQ ID NO: 4062894 - RNA, 16 nt, Vaccinia virus
auauguauuuuaauaa

SEQ ID NO: 4062895 - RNA, 20 nt, Vaccinia virus
auaugucucgcauaaacauu

SEQ ID NO: 4062896 - RNA, 21 nt, Vaccinia virus
auauguuaaauauaaaaaaug

SEQ ID NO: 4062897 - RNA, 15 nt, Vaccinia virus
auauguuauaauaga

SEQ ID NO: 4062898 - RNA, 14 nt, Vaccinia virus
auauguuguuguaa

SEQ ID NO: 4062899 - RNA, 13 nt, Vaccinia virus
auauguuuguaaa

SEQ ID NO: 4062900 - RNA, 15 nt, Vaccinia virus
auauuaaaauagcua

SEQ ID NO: 4062901 - RNA, 16 nt, Vaccinia virus
auauuaaagucuuuac

SEQ ID NO: 4062902 - RNA, 21 nt, Vaccinia virus
auauuaacgaguuccauuuau

SEQ ID NO: 4062903 - RNA, 18 nt, Vaccinia virus
auauuaauacacauaaug

SEQ ID NO: 4062904 - RNA, 23 nt, Vaccinia virus
auauuaaucauccacguuuugau

SEQ ID NO: 4062905 - RNA, 15 nt, Vaccinia virus
auauuaauucuguaa

SEQ ID NO: 4062906 - RNA, 13 nt, Vaccinia virus
auauuacaaaauc

SEQ ID NO: 4062907 - RNA, 20 nt, Vaccinia virus
auauuacaaccaauguuaug

SEQ ID NO: 4062908 - RNA, 20 nt, Vaccinia virus
auauuacauaccauuaauaa

SEQ ID NO: 4062909 - RNA, 16 nt, Vaccinia virus
auauuacuuauaauaa

SEQ ID NO: 4062910 - RNA, 16 nt, Vaccinia virus
auauuagacaauacua

SEQ ID NO: 4062911 - RNA, 17 nt, Vaccinia virus
auauuagauauuuuaug

SEQ ID NO: 4062912 - RNA, 14 nt, Vaccinia virus
auauuagauuuacu

SEQ ID NO: 4062913 - RNA, 16 nt, Vaccinia virus
auauuagauuuuguau

SEQ ID NO: 4062914 - RNA, 20 nt, Vaccinia virus
auauuaucgagauuuaauaa

SEQ ID NO: 4062915 - RNA, 13 nt, Vaccinia virus
auauuauuaaaga

SEQ ID NO: 4062916 - RNA, 21 nt, Vaccinia virus
auauuccgacaugcaaaaaug

SEQ ID NO: 4062917 - RNA, 21 nt, Vaccinia virus
auauuccggcguaugaauuga

SEQ ID NO: 4062918 - RNA, 23 nt, Vaccinia virus
auauucuauaacuugagacuuga

SEQ ID NO: 4062919 - RNA, 18 nt, Vaccinia virus
auauucucuauuuuggug

SEQ ID NO: 4062920 - RNA, 23 nt, Vaccinia virus
auauucuuguuauguuaauacau

SEQ ID NO: 4062921 - RNA, 18 nt, Vaccinia virus
auauucuuuuuuuauaga

SEQ ID NO: 4062922 - RNA, 16 nt, Vaccinia virus
auauugauguuaauaa

SEQ ID NO: 4062923 - RNA, 21 nt, Vaccinia virus
auauugcaccagaauuaauaa

SEQ ID NO: 4062924 - RNA, 19 nt, Vaccinia virus
auauuggagcaaaauccua

SEQ ID NO: 4062925 - RNA, 20 nt, Vaccinia virus
auauuguaccagauuaauga

SEQ ID NO: 4062926 - RNA, 15 nt, Vaccinia virus
auauuguuuaauaua

SEQ ID NO: 4062927 - RNA, 12 nt, Vaccinia virus
auauuuaaacaa

SEQ ID NO: 4062928 - RNA, 19 nt, Vaccinia virus
auauuuacauauuuacugg

SEQ ID NO: 4062929 - RNA, 15 nt, Vaccinia virus
auauuuaguauuauu

SEQ ID NO: 4062930 - RNA, 17 nt, Vaccinia virus
auauuuguauagauaau

SEQ ID NO: 4062931 - RNA, 21 nt, Vaccinia virus
auauuuguuccuguagauaau

SEQ ID NO: 4062932 - RNA, 22 nt, Vaccinia virus
auauuuuucuauguuaggaaua

SEQ ID NO: 4062933 - RNA, 21 nt, Vaccinia virus
auauuuuugauggguaagcca

SEQ ID NO: 4062934 - RNA, 15 nt, Vaccinia virus
auauuuuuuaauagu

SEQ ID NO: 4062935 - RNA, 14 nt, Vaccinia virus
auauuuuuuucuau

SEQ ID NO: 4062936 - RNA, 17 nt, Vaccinia virus
auauuuuuuuuuaaaga

SEQ ID NO: 4062937 - RNA, 22 nt, Vaccinia virus
aucaaaaccauuucuaagagaa

SEQ ID NO: 4062938 - RNA, 15 nt, Vaccinia virus
aucaaaagaaugauu

SEQ ID NO: 4062939 - RNA, 17 nt, Vaccinia virus
aucaaaauagcaaagua

SEQ ID NO: 4062940 - RNA, 22 nt, Vaccinia virus
aucaaagaucuuguuaucgauu

SEQ ID NO: 4062941 - RNA, 19 nt, Vaccinia virus
aucaaagucacaaagcaag

SEQ ID NO: 4062942 - RNA, 19 nt, Vaccinia virus
aucaaauggaugcuaauug

SEQ ID NO: 4062943 - RNA, 19 nt, Vaccinia virus
aucaaaugguacaaaaaag

SEQ ID NO: 4062944 - RNA, 17 nt, Vaccinia virus
aucaaaugguugauaau

SEQ ID NO: 4062945 - RNA, 13 nt, Vaccinia virus
aucaacaauuuug

SEQ ID NO: 4062946 - RNA, 20 nt, Vaccinia virus
aucaacagauagcuugaaug

SEQ ID NO: 4062947 - RNA, 17 nt, Vaccinia virus
aucaacauuguuucaaa

SEQ ID NO: 4062948 - RNA, 18 nt, Vaccinia virus
aucaaccgcauaauacaa

SEQ ID NO: 4062949 - RNA, 18 nt, Vaccinia virus
aucaacgaguucaaauau

SEQ ID NO: 4062950 - RNA, 21 nt, Vaccinia virus
aucaacgaguucaaauaugaa

SEQ ID NO: 4062951 - RNA, 23 nt, Vaccinia virus
aucaacgaguucaaauaugaaau

SEQ ID NO: 4062952 - RNA, 23 nt, Vaccinia virus
aucaacggaacauauuuauauaa

SEQ ID NO: 4062953 - RNA, 14 nt, Vaccinia virus
aucaacuacauaau

SEQ ID NO: 4062954 - RNA, 18 nt, Vaccinia virus
aucaagaauauccagauu

SEQ ID NO: 4062955 - RNA, 22 nt, Vaccinia virus
aucaagacguggcaaacaaugu

SEQ ID NO: 4062956 - RNA, 14 nt, Vaccinia virus
aucaagaguaacua

SEQ ID NO: 4062957 - RNA, 21 nt, Vaccinia virus
aucaagaguaacuauugacuu

SEQ ID NO: 4062958 - RNA, 23 nt, Vaccinia virus
aucaagauguguauguuugugaa

SEQ ID NO: 4062959 - RNA, 23 nt, Vaccinia virus
aucaaggacuuuuauaucccaca

SEQ ID NO: 4062960 - RNA, 22 nt, Vaccinia virus
aucaaggauacacucucaauau

SEQ ID NO: 4062961 - RNA, 23 nt, Vaccinia virus
aucaagucuuuauacaaugacau

SEQ ID NO: 4062962 - RNA, 23 nt, Vaccinia virus
aucaaguuuguaggaaaggacaa

SEQ ID NO: 4062963 - RNA, 14 nt, Vaccinia virus
aucaauaaauggau

SEQ ID NO: 4062964 - RNA, 20 nt, Vaccinia virus
aucaauaauuguuuugaauu

SEQ ID NO: 4062965 - RNA, 16 nt, Vaccinia virus
aucaaucgauaacaag

SEQ ID NO: 4062966 - RNA, 12 nt, Vaccinia virus
aguauacauguu

SEQ ID NO: 4062967 - RNA, 23 nt, Vaccinia virus
aguauacgaguaaauaacuauag

SEQ ID NO: 4062968 - RNA, 23 nt, Vaccinia virus
aguauacuaccuguuauauuucu

SEQ ID NO: 4062969 - RNA, 14 nt, Vaccinia virus
aguauagaaauugu

SEQ ID NO: 4062970 - RNA, 12 nt, Vaccinia virus
aguauaguuuua

SEQ ID NO: 4062971 - RNA, 13 nt, Vaccinia virus
aguauaucaaaua

SEQ ID NO: 4062972 - RNA, 20 nt, Vaccinia virus
aguauaucaaauacaucuau

SEQ ID NO: 4062973 - RNA, 21 nt, Vaccinia virus
aguaucaugaacucuaaucaa

SEQ ID NO: 4062974 - RNA, 15 nt, Vaccinia virus
aguaucauuaaaucu

SEQ ID NO: 4062975 - RNA, 17 nt, Vaccinia virus
aguaucgaaaaaugcug

SEQ ID NO: 4062976 - RNA, 20 nt, Vaccinia virus
aguaucuuauguauauguuu

SEQ ID NO: 4062977 - RNA, 18 nt, Vaccinia virus
aguaugacuuacuuguau

SEQ ID NO: 4062978 - RNA, 15 nt, Vaccinia virus
aguauggaauacaua

SEQ ID NO: 4062979 - RNA, 16 nt, Vaccinia virus
aguauguuugacuuua

SEQ ID NO: 4062980 - RNA, 18 nt, Vaccinia virus
aguauucucggauacucu

SEQ ID NO: 4062981 - RNA, 19 nt, Vaccinia virus
aguauugacaauacuguau

SEQ ID NO: 4062982 - RNA, 14 nt, Vaccinia virus
aguauuuaacaaga

SEQ ID NO: 4062983 - RNA, 22 nt, Vaccinia virus
aguauuuauacuuuuaggaaau

SEQ ID NO: 4062984 - RNA, 14 nt, Vaccinia virus
aguauuuuaauaca

SEQ ID NO: 4062985 - RNA, 13 nt, Vaccinia virus
aguauuuuuauca

SEQ ID NO: 4062986 - RNA, 15 nt, Vaccinia virus
agucaagaugaugaa

SEQ ID NO: 4062987 - RNA, 16 nt, Vaccinia virus
agucaagucaaugaua

SEQ ID NO: 4062988 - RNA, 17 nt, Vaccinia virus
agucaauguuuuugaaa

SEQ ID NO: 4062989 - RNA, 21 nt, Vaccinia virus
agucacuauuuuuauaacuaa

SEQ ID NO: 4062990 - RNA, 18 nt, Vaccinia virus
agucagacuguaguucua

SEQ ID NO: 4062991 - RNA, 14 nt, Vaccinia virus
agucauaaaaggau

SEQ ID NO: 4062992 - RNA, 12 nt, Vaccinia virus
agucauacuaga

SEQ ID NO: 4062993 - RNA, 19 nt, Vaccinia virus
agucaucuugucuagaaug

SEQ ID NO: 4062994 - RNA, 19 nt, Vaccinia virus
agucauggcgacuaaauua

SEQ ID NO: 4062995 - RNA, 13 nt, Vaccinia virus
agucauuaacaaa

SEQ ID NO: 4062996 - RNA, 21 nt, Vaccinia virus
aguccauccgauuaugagaca

SEQ ID NO: 4062997 - RNA, 20 nt, Vaccinia virus
agucccauuggauaguuuuu

SEQ ID NO: 4062998 - RNA, 15 nt, Vaccinia virus
agucgacagaagaau

SEQ ID NO: 4062999 - RNA, 22 nt, Vaccinia virus
agucucaaucuuauuuaacuaa

SEQ ID NO: 4063000 - RNA, 15 nt, Vaccinia virus
agucuccacacuauu

SEQ ID NO: 4063001 - RNA, 16 nt, Vaccinia virus
agucugucuguagaua

SEQ ID NO: 4063002 - RNA, 17 nt, Vaccinia virus
agugaaacaaucaagaa

SEQ ID NO: 4063003 - RNA, 13 nt, Vaccinia virus
agugaaacuaucu

SEQ ID NO: 4063004 - RNA, 23 nt, Vaccinia virus
agugaauugauugcuguuauuaa

SEQ ID NO: 4063005 - RNA, 19 nt, Vaccinia virus
agugacacucuauaucuag

SEQ ID NO: 4063006 - RNA, 18 nt, Vaccinia virus
agugauauaaaacuaucu

SEQ ID NO: 4063007 - RNA, 14 nt, Vaccinia virus
agugcaaugaauau

SEQ ID NO: 4063008 - RNA, 16 nt, Vaccinia virus
agugcuacuuuaagau

SEQ ID NO: 4063009 - RNA, 16 nt, Vaccinia virus
agugguauaucuuguu

SEQ ID NO: 4063010 - RNA, 17 nt, Vaccinia virus
aguggugugaauacaac

SEQ ID NO: 4063011 - RNA, 14 nt, Vaccinia virus
agugguuaaucuua

SEQ ID NO: 4063012 - RNA, 13 nt, Vaccinia virus
aguguaaagacaa

SEQ ID NO: 4063013 - RNA, 22 nt, Vaccinia virus
aguguacgaagcgguuuuacga

SEQ ID NO: 4063014 - RNA, 20 nt, Vaccinia virus
agugucaauuuuaaaugaug

SEQ ID NO: 4063015 - RNA, 18 nt, Vaccinia virus
agugugaauaugaucuuc

SEQ ID NO: 4063016 - RNA, 19 nt, Vaccinia virus
aguuaaaacuuguaagaag

SEQ ID NO: 4063017 - RNA, 23 nt, Vaccinia virus
aguuaaaauaucaugguuaucca

SEQ ID NO: 4063018 - RNA, 17 nt, Vaccinia virus
aguuaaaauuuuaagau

SEQ ID NO: 4063019 - RNA, 23 nt, Vaccinia virus
aguuaaaauuuuaagauuuuaaa

SEQ ID NO: 4063020 - RNA, 18 nt, Vaccinia virus
aguuaaagaaaaauacuc

SEQ ID NO: 4063021 - RNA, 13 nt, Vaccinia virus
aguuaaauauuaa

SEQ ID NO: 4063022 - RNA, 19 nt, Vaccinia virus
aguuaagagauuuagaaaa

SEQ ID NO: 4063023 - RNA, 13 nt, Vaccinia virus
aguuaauuuauca

SEQ ID NO: 4063024 - RNA, 19 nt, Vaccinia virus
aguuacauacaaacugaaa

SEQ ID NO: 4063025 - RNA, 18 nt, Vaccinia virus
aguuacauguuuaaauaa

SEQ ID NO: 4063026 - RNA, 22 nt, Vaccinia virus
aguuagaugugucauacuuguu

SEQ ID NO: 4063027 - RNA, 20 nt, Vaccinia virus
aguuagcaauuucaaaauag

SEQ ID NO: 4063028 - RNA, 21 nt, Vaccinia virus
aguuauauuuucgucuaucca

SEQ ID NO: 4063029 - RNA, 22 nt, Vaccinia virus
aguucacaacucgccucuaaug

SEQ ID NO: 4063030 - RNA, 20 nt, Vaccinia virus
aguucauaacagauacauaa

SEQ ID NO: 4063031 - RNA, 15 nt, Vaccinia virus
aguucauuaucugaa

SEQ ID NO: 4063032 - RNA, 23 nt, Vaccinia virus
aguucuugcuccuccuugauucu

SEQ ID NO: 4063033 - RNA, 15 nt, Vaccinia virus
aguucuuuuagaaaa

SEQ ID NO: 4063034 - RNA, 15 nt, Vaccinia virus
aguuggaaguuuaau

SEQ ID NO: 4063035 - RNA, 20 nt, Vaccinia virus
aguuguaaaguuaaaauugu

SEQ ID NO: 4063036 - RNA, 16 nt, Vaccinia virus
aguugucuaguauuua

SEQ ID NO: 4063037 - RNA, 20 nt, Vaccinia virus
aguuuaagauuguacacuuu

SEQ ID NO: 4063038 - RNA, 22 nt, Vaccinia virus
aguuuacuuucaugauuucauu

SEQ ID NO: 4063039 - RNA, 12 nt, Vaccinia virus
aguuuauaagaa

SEQ ID NO: 4063040 - RNA, 13 nt, Vaccinia virus
aguuuauuagaca

SEQ ID NO: 4063041 - RNA, 22 nt, Vaccinia virus
aguuuccuguaaauuuucuaua

SEQ ID NO: 4063042 - RNA, 17 nt, Vaccinia virus
aguuucuagauacuaga

SEQ ID NO: 4063043 - RNA, 16 nt, Vaccinia virus
aguuugaauaguuugu

SEQ ID NO: 4063044 - RNA, 22 nt, Vaccinia virus
aguuugcggauaaugauagaca

SEQ ID NO: 4063045 - RNA, 13 nt, Vaccinia virus
aguuuuauuggga

SEQ ID NO: 4063046 - RNA, 22 nt, Vaccinia virus
aguuuucuuucaaaauagcuau

SEQ ID NO: 4063047 - RNA, 12 nt, Vaccinia virus
aguuuuuaagag

SEQ ID NO: 4063048 - RNA, 17 nt, Vaccinia virus
aguuuuuaggaaauauu

SEQ ID NO: 4063049 - RNA, 13 nt, Vaccinia virus
aguuuuucuggaa

SEQ ID NO: 4063050 - RNA, 18 nt, Vaccinia virus
auaaaaaaacauuauucu

SEQ ID NO: 4063051 - RNA, 21 nt, Vaccinia virus
auaaaaacgagaaugacauaa

SEQ ID NO: 4063052 - RNA, 13 nt, Vaccinia virus
auaaaaagaaugu

SEQ ID NO: 4063053 - RNA, 22 nt, Vaccinia virus
auaaaaaguaauauucauaugu

SEQ ID NO: 4063054 - RNA, 13 nt, Vaccinia virus
auaaaaauacuua

SEQ ID NO: 4063055 - RNA, 23 nt, Vaccinia virus
auaaaaauguucuuuuuguguga

SEQ ID NO: 4063056 - RNA, 11 nt, Vaccinia virus
auaaaacauua

SEQ ID NO: 4063057 - RNA, 16 nt, Vaccinia virus
auaaaaccaguauuug

SEQ ID NO: 4063058 - RNA, 20 nt, Vaccinia virus
auaaaaccaugaaauauauu

SEQ ID NO: 4063059 - RNA, 19 nt, Vaccinia virus
auaaaacgaauuauagaca

SEQ ID NO: 4063060 - RNA, 12 nt, Vaccinia virus
auaaaacuauau

SEQ ID NO: 4063061 - RNA, 15 nt, Vaccinia virus
auaaaacucauauag

SEQ ID NO: 4063062 - RNA, 14 nt, Vaccinia virus
auaaaaguaauaaa

SEQ ID NO: 4063063 - RNA, 13 nt, Vaccinia virus
auaaaauaauaca

SEQ ID NO: 4063064 - RNA, 18 nt, Vaccinia virus
auaaaaugacaaauacuc

SEQ ID NO: 4063065 - RNA, 16 nt, Vaccinia virus
auaaaauguuaauaca

SEQ ID NO: 4063066 - RNA, 17 nt, Vaccinia virus
auaaaauuaucaugaca

SEQ ID NO: 4063067 - RNA, 21 nt, Vaccinia virus
auaaaauucuuaguuauauau

SEQ ID NO: 4063068 - RNA, 14 nt, Vaccinia virus
auaaaauuuaagag

SEQ ID NO: 4063069 - RNA, 17 nt, Vaccinia virus
auaaacaaacuaauaaa

SEQ ID NO: 4063070 - RNA, 16 nt, Vaccinia virus
auaaacauaaguauau

SEQ ID NO: 4063071 - RNA, 12 nt, Vaccinia virus
auaaacauagaa

SEQ ID NO: 4063072 - RNA, 15 nt, Vaccinia virus
auaaacaucaacauu

SEQ ID NO: 4063073 - RNA, 14 nt, Vaccinia virus
auaaacaugucuau

SEQ ID NO: 4063074 - RNA, 20 nt, Vaccinia virus
auaaacaugucuauuguuaa

SEQ ID NO: 4063075 - RNA, 17 nt, Vaccinia virus
auaaacucacauuucaa

SEQ ID NO: 4063076 - RNA, 14 nt, Vaccinia virus
auaaacucagauaa

SEQ ID NO: 4063077 - RNA, 20 nt, Vaccinia virus
auaaacucagauaauagcaa

SEQ ID NO: 4063078 - RNA, 13 nt, Vaccinia virus
auaaacuguuuau

SEQ ID NO: 4063079 - RNA, 15 nt, Vaccinia virus
auaaagaaaaaucua

SEQ ID NO: 4063080 - RNA, 22 nt, Vaccinia virus
auaaagaaaugucuacauaaau

SEQ ID NO: 4063081 - RNA, 16 nt, Vaccinia virus
auaaagaguccuauau

SEQ ID NO: 4063082 - RNA, 17 nt, Vaccinia virus
auaaaggagaaggaaaa

SEQ ID NO: 4063083 - RNA, 18 nt, Vaccinia virus
auaaaguaugaacaaaga

SEQ ID NO: 4063084 - RNA, 15 nt, Vaccinia virus
auaaauacauuuaca

SEQ ID NO: 4063085 - RNA, 12 nt, Vaccinia virus
auaaauagagaa

SEQ ID NO: 4063086 - RNA, 22 nt, Vaccinia virus
auaaauagcuuuacuucuauau

SEQ ID NO: 4063087 - RNA, 22 nt, Vaccinia virus
auaaauaggaguuagaauaaua

SEQ ID NO: 4063088 - RNA, 13 nt, Vaccinia virus
auaaauaguuuuu

SEQ ID NO: 4063089 - RNA, 15 nt, Vaccinia virus
auaaauaucauauau

SEQ ID NO: 4063090 - RNA, 20 nt, Vaccinia virus
auaaauauccuuggaauuga

SEQ ID NO: 4063091 - RNA, 23 nt, Vaccinia virus
auaaaucacuaaauaauauccca

SEQ ID NO: 4063092 - RNA, 22 nt, Vaccinia virus
auaaaucuacucagauuauucu

SEQ ID NO: 4063093 - RNA, 13 nt, Vaccinia virus
agcacagaacaca

SEQ ID NO: 4063094 - RNA, 18 nt, Vaccinia virus
agcacauguauaauauaa

SEQ ID NO: 4063095 - RNA, 16 nt, Vaccinia virus
agcagcguauucauug

SEQ ID NO: 4063096 - RNA, 18 nt, Vaccinia virus
agcaguagcgagaaagca

SEQ ID NO: 4063097 - RNA, 17 nt, Vaccinia virus
agcaguuaccaaagaga

SEQ ID NO: 4063098 - RNA, 14 nt, Vaccinia virus
agcauaaacuauac

SEQ ID NO: 4063099 - RNA, 20 nt, Vaccinia virus
agcauagcgauagaucuuaa

SEQ ID NO: 4063100 - RNA, 22 nt, Vaccinia virus
agcaucauguccauuuaacuaa

SEQ ID NO: 4063101 - RNA, 17 nt, Vaccinia virus
agcauccaguaugaaua

SEQ ID NO: 4063102 - RNA, 20 nt, Vaccinia virus
agcauccguaugcuacuaga

SEQ ID NO: 4063103 - RNA, 18 nt, Vaccinia virus
agcauucgcuaaaaaauu

SEQ ID NO: 4063104 - RNA, 22 nt, Vaccinia virus
agcauucuuuccagaacuauau

SEQ ID NO: 4063105 - RNA, 21 nt, Vaccinia virus
agcauugcguguuuuagugau

SEQ ID NO: 4063106 - RNA, 14 nt, Vaccinia virus
agcauuguuauuag

SEQ ID NO: 4063107 - RNA, 12 nt, Vaccinia virus
agccaauacuuu

SEQ ID NO: 4063108 - RNA, 13 nt, Vaccinia virus
agccaauacuuua

SEQ ID NO: 4063109 - RNA, 17 nt, Vaccinia virus
agccauagcaauacuuc

SEQ ID NO: 4063110 - RNA, 14 nt, Vaccinia virus
agccgaaaacauug

SEQ ID NO: 4063111 - RNA, 15 nt, Vaccinia virus
agccggacaaauaua

SEQ ID NO: 4063112 - RNA, 15 nt, Vaccinia virus
agcgaaggagaccac

SEQ ID NO: 4063113 - RNA, 12 nt, Vaccinia virus
agcgaauuauuu

SEQ ID NO: 4063114 - RNA, 19 nt, Vaccinia virus
agcgcugaaaauaaagaua

SEQ ID NO: 4063115 - RNA, 14 nt, Vaccinia virus
agcggcuacuaaaa

SEQ ID NO: 4063116 - RNA, 18 nt, Vaccinia virus
agcggggucgaucuugug

SEQ ID NO: 4063117 - RNA, 14 nt, Vaccinia virus
agcguaaaaguaaa

SEQ ID NO: 4063118 - RNA, 12 nt, Vaccinia virus
agcuaaaaaugc

SEQ ID NO: 4063119 - RNA, 16 nt, Vaccinia virus
agcuaagcaacuaaga

SEQ ID NO: 4063120 - RNA, 18 nt, Vaccinia virus
agcuaauccugauauuaa

SEQ ID NO: 4063121 - RNA, 19 nt, Vaccinia virus
agcuagaggaaaugaaaga

SEQ ID NO: 4063122 - RNA, 19 nt, Vaccinia virus
agcuauugcauaauacaag

SEQ ID NO: 4063123 - RNA, 14 nt, Vaccinia virus
agcuauuuaaaugg

SEQ ID NO: 4063124 - RNA, 20 nt, Vaccinia virus
agcuccaugacuuaugaaua

SEQ ID NO: 4063125 - RNA, 16 nt, Vaccinia virus
agcucgugguauuaua

SEQ ID NO: 4063126 - RNA, 19 nt, Vaccinia virus
agcucucccagauuucuuu

SEQ ID NO: 4063127 - RNA, 16 nt, Vaccinia virus
agcugaaaaacuaugu

SEQ ID NO: 4063128 - RNA, 12 nt, Vaccinia virus
agcugaaaugag

SEQ ID NO: 4063129 - RNA, 20 nt, Vaccinia virus
agcugaaucugauaaauaua

SEQ ID NO: 4063130 - RNA, 17 nt, Vaccinia virus
agcuugauaauuagaua

SEQ ID NO: 4063131 - RNA, 15 nt, Vaccinia virus
aggaaacuaauauug

SEQ ID NO: 4063132 - RNA, 17 nt, Vaccinia virus
aggaaacuuaaaauaua

SEQ ID NO: 4063133 - RNA, 21 nt, Vaccinia virus
aggaaauaccauaaauauauu

SEQ ID NO: 4063134 - RNA, 17 nt, Vaccinia virus
aggaaauggaagauauu

SEQ ID NO: 4063135 - RNA, 18 nt, Vaccinia virus
aggaaauugauaaugagu

SEQ ID NO: 4063136 - RNA, 22 nt, Vaccinia virus
aggaauaaaauaugaaauaagu

SEQ ID NO: 4063137 - RNA, 19 nt, Vaccinia virus
aggaauacaauacauaccu

SEQ ID NO: 4063138 - RNA, 18 nt, Vaccinia virus
aggaauaucugaugaugu

SEQ ID NO: 4063139 - RNA, 14 nt, Vaccinia virus
aggaaucaaugaua

SEQ ID NO: 4063140 - RNA, 20 nt, Vaccinia virus
aggaauuaaucuaguagaaa

SEQ ID NO: 4063141 - RNA, 15 nt, Vaccinia virus
aggaauuaauuauuc

SEQ ID NO: 4063142 - RNA, 22 nt, Vaccinia virus
aggaauuggaauccaauuguuu

SEQ ID NO: 4063143 - RNA, 18 nt, Vaccinia virus
aggaccguauuagaaugu

SEQ ID NO: 4063144 - RNA, 21 nt, Vaccinia virus
aggaccuuccaacuguggaua

SEQ ID NO: 4063145 - RNA, 15 nt, Vaccinia virus
aggacgguauaugua

SEQ ID NO: 4063146 - RNA, 17 nt, Vaccinia virus
aggacguaauacaugca

SEQ ID NO: 4063147 - RNA, 22 nt, Vaccinia virus
aggacuaucuccgaauuuguuu

SEQ ID NO: 4063148 - RNA, 18 nt, Vaccinia virus
aggagaauccgaaauauu

SEQ ID NO: 4063149 - RNA, 19 nt, Vaccinia virus
aggagauacuaucaaaaua

SEQ ID NO: 4063150 - RNA, 17 nt, Vaccinia virus
aggaguaggaaugccac

SEQ ID NO: 4063151 - RNA, 18 nt, Vaccinia virus
aggagucuuauagaugua

SEQ ID NO: 4063152 - RNA, 15 nt, Vaccinia virus
aggauaaagaugucu

SEQ ID NO: 4063153 - RNA, 17 nt, Vaccinia virus
aggauacucuaugaaug

SEQ ID NO: 4063154 - RNA, 15 nt, Vaccinia virus
aggaucgacuccaua

SEQ ID NO: 4063155 - RNA, 15 nt, Vaccinia virus
aggaugaaaaaggac

SEQ ID NO: 4063156 - RNA, 11 nt, Vaccinia virus
aggauggugaa

SEQ ID NO: 4063157 - RNA, 19 nt, Vaccinia virus
aggauuaacagguucucaa

SEQ ID NO: 4063158 - RNA, 20 nt, Vaccinia virus
aggauuaucaaaucuuuaau

SEQ ID NO: 4063159 - RNA, 17 nt, Vaccinia virus
aggcaaaagaugucaag

SEQ ID NO: 4063160 - RNA, 20 nt, Vaccinia virus
aggcacagucaaacauucaa

SEQ ID NO: 4063161 - RNA, 16 nt, Vaccinia virus
aggcaguuaaggauaa

SEQ ID NO: 4063162 - RNA, 15 nt, Vaccinia virus
aggcauuaacuagau

SEQ ID NO: 4063163 - RNA, 18 nt, Vaccinia virus
aggccaagcgaauuauuu

SEQ ID NO: 4063164 - RNA, 18 nt, Vaccinia virus
aggcggauguugugaaug

SEQ ID NO: 4063165 - RNA, 13 nt, Vaccinia virus
aggcuaucaaaug

SEQ ID NO: 4063166 - RNA, 21 nt, Vaccinia virus
aggcuucucaucucuuucaga

SEQ ID NO: 4063167 - RNA, 19 nt, Vaccinia virus
agggaaauuaaagaagaag

SEQ ID NO: 4063168 - RNA, 16 nt, Vaccinia virus
aggggagguaaauaua

SEQ ID NO: 4063169 - RNA, 14 nt, Vaccinia virus
agggguauacuucu

SEQ ID NO: 4063170 - RNA, 20 nt, Vaccinia virus
agguaagauaucuacuagaa

SEQ ID NO: 4063171 - RNA, 15 nt, Vaccinia virus
agguagcaaaaagau

SEQ ID NO: 4063172 - RNA, 17 nt, Vaccinia virus
agguaucuugccaugga

SEQ ID NO: 4063173 - RNA, 15 nt, Vaccinia virus
agguauuaaguuugg

SEQ ID NO: 4063174 - RNA, 17 nt, Vaccinia virus
agguauuccuuuaucca

SEQ ID NO: 4063175 - RNA, 14 nt, Vaccinia virus
aggucuaugucucu

SEQ ID NO: 4063176 - RNA, 14 nt, Vaccinia virus
aggugaacaagaga

SEQ ID NO: 4063177 - RNA, 14 nt, Vaccinia virus
agguguuguaacuu

SEQ ID NO: 4063178 - RNA, 18 nt, Vaccinia virus
agguugauguagaagaag

SEQ ID NO: 4063179 - RNA, 19 nt, Vaccinia virus
agguuuuuuaaaacagaug

SEQ ID NO: 4063180 - RNA, 18 nt, Vaccinia virus
aguaaaaucuaucauauu

SEQ ID NO: 4063181 - RNA, 13 nt, Vaccinia virus
aguaaauaauaaa

SEQ ID NO: 4063182 - RNA, 21 nt, Vaccinia virus
aguaaauagauaguuuuucca

SEQ ID NO: 4063183 - RNA, 13 nt, Vaccinia virus
aguaaaugaaugc

SEQ ID NO: 4063184 - RNA, 13 nt, Vaccinia virus
aguaaaugaugaa

SEQ ID NO: 4063185 - RNA, 19 nt, Vaccinia virus
aguaacacguuuuuuagau

SEQ ID NO: 4063186 - RNA, 17 nt, Vaccinia virus
aguaacgagucucaguu

SEQ ID NO: 4063187 - RNA, 16 nt, Vaccinia virus
aguaacuauguaaaug

SEQ ID NO: 4063188 - RNA, 21 nt, Vaccinia virus
aguaagacaauaggaaaucua

SEQ ID NO: 4063189 - RNA, 18 nt, Vaccinia virus
aguaagacuugacuagau

SEQ ID NO: 4063190 - RNA, 20 nt, Vaccinia virus
aguaaguauuuauaaaacuc

SEQ ID NO: 4063191 - RNA, 16 nt, Vaccinia virus
aguaaguauuuauaca

SEQ ID NO: 4063192 - RNA, 14 nt, Vaccinia virus
aguaaguuuaugau

SEQ ID NO: 4063193 - RNA, 17 nt, Vaccinia virus
aguaauaaaacaaaaaa

SEQ ID NO: 4063194 - RNA, 13 nt, Vaccinia virus
aguaaucaacaau

SEQ ID NO: 4063195 - RNA, 19 nt, Vaccinia virus
aguaaucauauaaauguuu

SEQ ID NO: 4063196 - RNA, 14 nt, Vaccinia virus
aguaauuauaagaa

SEQ ID NO: 4063197 - RNA, 17 nt, Vaccinia virus
aguacaagaaauauuuc

SEQ ID NO: 4063198 - RNA, 22 nt, Vaccinia virus
aguacacuuaguccaggaccua

SEQ ID NO: 4063199 - RNA, 24 nt, Vaccinia virus
aguacauagcaucuucacaaauua

SEQ ID NO: 4063200 - RNA, 13 nt, Vaccinia virus
aguacauuucaca

SEQ ID NO: 4063201 - RNA, 19 nt, Vaccinia virus
aguacccucaauuaguuua

SEQ ID NO: 4063202 - RNA, 15 nt, Vaccinia virus
aguaccuacacuauu

SEQ ID NO: 4063203 - RNA, 13 nt, Vaccinia virus
aguaccuggaaug

SEQ ID NO: 4063204 - RNA, 20 nt, Vaccinia virus
aguacuaauaaggaacuaga

SEQ ID NO: 4063205 - RNA, 14 nt, Vaccinia virus
aguacuaucauaau

SEQ ID NO: 4063206 - RNA, 22 nt, Vaccinia virus
aguacuccucccauaauacuuu

SEQ ID NO: 4063207 - RNA, 19 nt, Vaccinia virus
aguacuguucaaacaugau

SEQ ID NO: 4063208 - RNA, 14 nt, Vaccinia virus
aguacuuguaugug

SEQ ID NO: 4063209 - RNA, 14 nt, Vaccinia virus
aguacuuucgcaag

SEQ ID NO: 4063210 - RNA, 19 nt, Vaccinia virus
aguagaaaauaauauagau

SEQ ID NO: 4063211 - RNA, 23 nt, Vaccinia virus
aguagacauuaauagaaugaaga

SEQ ID NO: 4063212 - RNA, 18 nt, Vaccinia virus
aguagaccguuaaugaaa

SEQ ID NO: 4063213 - RNA, 21 nt, Vaccinia virus
aguagauacgcaaacuuagau

SEQ ID NO: 4063214 - RNA, 19 nt, Vaccinia virus
aguagauuguuggcuacau

SEQ ID NO: 4063215 - RNA, 22 nt, Vaccinia virus
aguaggguuauuaacacuaaaa

SEQ ID NO: 4063216 - RNA, 13 nt, Vaccinia virus
aguaguucauuau

SEQ ID NO: 4063217 - RNA, 19 nt, Vaccinia virus
aguaguuuaacuagucuuc

SEQ ID NO: 4063218 - RNA, 18 nt, Vaccinia virus
aguauaacgugaauguau

SEQ ID NO: 4063219 - RNA, 14 nt, Vaccinia virus
aguauaauauuuaa

SEQ ID NO: 4063220 - RNA, 22 nt, Vaccinia virus
cugaaaauuggaguuagguauu

SEQ ID NO: 4063221 - RNA, 23 nt, Vaccinia virus
cugaaacaaagaauugugcauua

SEQ ID NO: 4063222 - RNA, 16 nt, Vaccinia virus
cugaaacaucacuaau

SEQ ID NO: 4063223 - RNA, 15 nt, Vaccinia virus
cugaaccuacuuuau

SEQ ID NO: 4063224 - RNA, 22 nt, Vaccinia virus
cugaagaagagguaagauaucu

SEQ ID NO: 4063225 - RNA, 23 nt, Vaccinia virus
cugaagcguguuauauauacaag

SEQ ID NO: 4063226 - RNA, 17 nt, Vaccinia virus
cugaauauagaacauca

SEQ ID NO: 4063227 - RNA, 23 nt, Vaccinia virus
cugagauuuguuuuguuaaacaa

SEQ ID NO: 4063228 - RNA, 20 nt, Vaccinia virus
cugaguaccuacacuauuau

SEQ ID NO: 4063229 - RNA, 16 nt, Vaccinia virus
cugaguauuuggauuu

SEQ ID NO: 4063230 - RNA, 20 nt, Vaccinia virus
cugauaaguucuuuauacag

SEQ ID NO: 4063231 - RNA, 17 nt, Vaccinia virus
cugauaauuuagauaau

SEQ ID NO: 4063232 - RNA, 16 nt, Vaccinia virus
cugauagaaagaauaa

SEQ ID NO: 4063233 - RNA, 19 nt, Vaccinia virus
cugauagcaauucauguac

SEQ ID NO: 4063234 - RNA, 23 nt, Vaccinia virus
cugauauggaaucuguauucucg

SEQ ID NO: 4063235 - RNA, 14 nt, Vaccinia virus
cugaucauuaauau

SEQ ID NO: 4063236 - RNA, 16 nt, Vaccinia virus
cugaugauauuagaac

SEQ ID NO: 4063237 - RNA, 19 nt, Vaccinia virus
cugauuaacuuccacauua

SEQ ID NO: 4063238 - RNA, 14 nt, Vaccinia virus
cugauuaucuugag

SEQ ID NO: 4063239 - RNA, 16 nt, Vaccinia virus
cugcauagaaauaucu

SEQ ID NO: 4063240 - RNA, 15 nt, Vaccinia virus
cugccgaauuuagag

SEQ ID NO: 4063241 - RNA, 21 nt, Vaccinia virus
cugccguauauaggagaaaaa

SEQ ID NO: 4063242 - RNA, 13 nt, Vaccinia virus
cugcuauauuguu

SEQ ID NO: 4063243 - RNA, 16 nt, Vaccinia virus
cugcugcguuaaacau

SEQ ID NO: 4063244 - RNA, 16 nt, Vaccinia virus
cuggaaaaauacuuuu

SEQ ID NO: 4063245 - RNA, 13 nt, Vaccinia virus
cuggaaaaguugu

SEQ ID NO: 4063246 - RNA, 15 nt, Vaccinia virus
cuggauauauuuugc

SEQ ID NO: 4063247 - RNA, 14 nt, Vaccinia virus
cuggauauuacaaa

SEQ ID NO: 4063248 - RNA, 16 nt, Vaccinia virus
cugguaacaugauauc

SEQ ID NO: 4063249 - RNA, 12 nt, Vaccinia virus
cugguaauuuaa

SEQ ID NO: 4063250 - RNA, 16 nt, Vaccinia virus
cugguucaaaauuaau

SEQ ID NO: 4063251 - RNA, 23 nt, Vaccinia virus
cugguuuucuauaaauaaaagac

SEQ ID NO: 4063252 - RNA, 15 nt, Vaccinia virus
cuguaaacaaguuug

SEQ ID NO: 4063253 - RNA, 16 nt, Vaccinia virus
cuguaaguauguuuaa

SEQ ID NO: 4063254 - RNA, 14 nt, Vaccinia virus
cuguaaucuauagg

SEQ ID NO: 4063255 - RNA, 21 nt, Vaccinia virus
cuguacaaauguuaaacauua

SEQ ID NO: 4063256 - RNA, 21 nt, Vaccinia virus
cuguacacauaguguuacaaa

SEQ ID NO: 4063257 - RNA, 21 nt, Vaccinia virus
cuguagugucaguacuauuag

SEQ ID NO: 4063258 - RNA, 20 nt, Vaccinia virus
cuguaucaaccggauuuaaa

SEQ ID NO: 4063259 - RNA, 22 nt, Vaccinia virus
cuguauccgucaaucuaauauu

SEQ ID NO: 4063260 - RNA, 16 nt, Vaccinia virus
cuguauuccaauuagu

SEQ ID NO: 4063261 - RNA, 20 nt, Vaccinia virus
cuguauuguuaauagauaua

SEQ ID NO: 4063262 - RNA, 17 nt, Vaccinia virus
cugucaauagacaucca

SEQ ID NO: 4063263 - RNA, 19 nt, Vaccinia virus
cugucaauugauucuuauu

SEQ ID NO: 4063264 - RNA, 19 nt, Vaccinia virus
cugucugcagccauuuuua

SEQ ID NO: 4063265 - RNA, 16 nt, Vaccinia virus
cugucuggcaauaaau

SEQ ID NO: 4063266 - RNA, 22 nt, Vaccinia virus
cugucuugaguuccauuacaaa

SEQ ID NO: 4063267 - RNA, 16 nt, Vaccinia virus
cugugaugccaauaag

SEQ ID NO: 4063268 - RNA, 22 nt, Vaccinia virus
cuguuaccauaauuccuuugau

SEQ ID NO: 4063269 - RNA, 21 nt, Vaccinia virus
cuguuuaaacgaggacuauaa

SEQ ID NO: 4063270 - RNA, 13 nt, Vaccinia virus
cuguuuauacaag

SEQ ID NO: 4063271 - RNA, 16 nt, Vaccinia virus
cuguuucgaaacuuua

SEQ ID NO: 4063272 - RNA, 19 nt, Vaccinia virus
cuuaaaauauaaugauaua

SEQ ID NO: 4063273 - RNA, 19 nt, Vaccinia virus
cuuaaaugccuuauucucu

SEQ ID NO: 4063274 - RNA, 21 nt, Vaccinia virus
cuuaauauuguauuguuuaua

SEQ ID NO: 4063275 - RNA, 16 nt, Vaccinia virus
cuuaauucaucuucua

SEQ ID NO: 4063276 - RNA, 13 nt, Vaccinia virus
cuuaauuuugugc

SEQ ID NO: 4063277 - RNA, 21 nt, Vaccinia virus
cuuagacaagcggguaaauga

SEQ ID NO: 4063278 - RNA, 21 nt, Vaccinia virus
cuuaggcggauucaguacaau

SEQ ID NO: 4063279 - RNA, 17 nt, Vaccinia virus
cuuauacaggucauuac

SEQ ID NO: 4063280 - RNA, 21 nt, Vaccinia virus
cuuaucacgugcaaggcauuu

SEQ ID NO: 4063281 - RNA, 20 nt, Vaccinia virus
cuuaugauauucauucuuua

SEQ ID NO: 4063282 - RNA, 17 nt, Vaccinia virus
cuuauucggaaaguauu

SEQ ID NO: 4063283 - RNA, 15 nt, Vaccinia virus
cuucaauaacuuaua

SEQ ID NO: 4063284 - RNA, 19 nt, Vaccinia virus
cuucacauucggagauucu

SEQ ID NO: 4063285 - RNA, 18 nt, Vaccinia virus
cuucagaauacaaucugu

SEQ ID NO: 4063286 - RNA, 21 nt, Vaccinia virus
cuucagaauacaaucuguauu

SEQ ID NO: 4063287 - RNA, 23 nt, Vaccinia virus
cuucagauaaucugaaaaugaaa

SEQ ID NO: 4063288 - RNA, 18 nt, Vaccinia virus
cuucaucuaccaaagaaa

SEQ ID NO: 4063289 - RNA, 16 nt, Vaccinia virus
cuucauuaaucuuuuc

SEQ ID NO: 4063290 - RNA, 20 nt, Vaccinia virus
cuucauucguaaaucuuuuc

SEQ ID NO: 4063291 - RNA, 17 nt, Vaccinia virus
cuucccucuaucauguu

SEQ ID NO: 4063292 - RNA, 21 nt, Vaccinia virus
cuucgauagauauucuucaga

SEQ ID NO: 4063293 - RNA, 12 nt, Vaccinia virus
cuucgcaauaau

SEQ ID NO: 4063294 - RNA, 16 nt, Vaccinia virus
cuucgcuuuauauacc

SEQ ID NO: 4063295 - RNA, 19 nt, Vaccinia virus
cuucuaaucuuguaauauu

SEQ ID NO: 4063296 - RNA, 14 nt, Vaccinia virus
cuucuacauuuuca

SEQ ID NO: 4063297 - RNA, 13 nt, Vaccinia virus
cuucuagauaucc

SEQ ID NO: 4063298 - RNA, 20 nt, Vaccinia virus
cuucuauuuuaucauuuucc

SEQ ID NO: 4063299 - RNA, 23 nt, Vaccinia virus
cuucuggaagguuuguauucuga

SEQ ID NO: 4063300 - RNA, 15 nt, Vaccinia virus
cuucuuguauuuccu

SEQ ID NO: 4063301 - RNA, 21 nt, Vaccinia virus
cuucuuuaaacgauuuuccaa

SEQ ID NO: 4063302 - RNA, 17 nt, Vaccinia virus
cuucuuuuuauauccaa

SEQ ID NO: 4063303 - RNA, 21 nt, Vaccinia virus
cuucuuuuucugucucaauag

SEQ ID NO: 4063304 - RNA, 14 nt, Vaccinia virus
cuugaagaugauuu

SEQ ID NO: 4063305 - RNA, 15 nt, Vaccinia virus
cuugaauucuuuuau

SEQ ID NO: 4063306 - RNA, 22 nt, Vaccinia virus
cuugauaaccuuggcugucuca

SEQ ID NO: 4063307 - RNA, 17 nt, Vaccinia virus
cuugauacuuuuucuag

SEQ ID NO: 4063308 - RNA, 16 nt, Vaccinia virus
cuuggaaaagauaacu

SEQ ID NO: 4063309 - RNA, 13 nt, Vaccinia virus
cuuggaaguuuua

SEQ ID NO: 4063310 - RNA, 18 nt, Vaccinia virus
cuugguuuuaaucuauug

SEQ ID NO: 4063311 - RNA, 14 nt, Vaccinia virus
cuuguguuuggaag

SEQ ID NO: 4063312 - RNA, 16 nt, Vaccinia virus
cuuguuguuuauuuuc

SEQ ID NO: 4063313 - RNA, 20 nt, Vaccinia virus
cuuguuuuugcuaauuauuu

SEQ ID NO: 4063314 - RNA, 17 nt, Vaccinia virus
cuuuaaaagaaacugac

SEQ ID NO: 4063315 - RNA, 12 nt, Vaccinia virus
cuuuaaauacuu

SEQ ID NO: 4063316 - RNA, 15 nt, Vaccinia virus
cuuuaaccuauacau

SEQ ID NO: 4063317 - RNA, 15 nt, Vaccinia virus
cuuuaacguauaaau

SEQ ID NO: 4063318 - RNA, 18 nt, Vaccinia virus
cuuuaacuuuauacuuuu

SEQ ID NO: 4063319 - RNA, 17 nt, Vaccinia virus
cuuuaagagagguauaa

SEQ ID NO: 4063320 - RNA, 21 nt, Vaccinia virus
cuuuacaucaucgaacuucug

SEQ ID NO: 4063321 - RNA, 19 nt, Vaccinia virus
cuuuaguuuauacuauuac

SEQ ID NO: 4063322 - RNA, 20 nt, Vaccinia virus
cuuuauacuauaauaguacu

SEQ ID NO: 4063323 - RNA, 11 nt, Vaccinia virus
cuuuauccaua

SEQ ID NO: 4063324 - RNA, 19 nt, Vaccinia virus
cuuuaucucauuugagaau

SEQ ID NO: 4063325 - RNA, 16 nt, Vaccinia virus
cuuucaugauuucauu

SEQ ID NO: 4063326 - RNA, 15 nt, Vaccinia virus
cuuugaagagauauu

SEQ ID NO: 4063327 - RNA, 18 nt, Vaccinia virus
cuuugaaguuuuuaagag

SEQ ID NO: 4063328 - RNA, 19 nt, Vaccinia virus
cuuugauggcugauagugu

SEQ ID NO: 4063329 - RNA, 20 nt, Vaccinia virus
cuuugcguaucucagucugu

SEQ ID NO: 4063330 - RNA, 11 nt, Vaccinia virus
cuuugcuuucg

SEQ ID NO: 4063331 - RNA, 21 nt, Vaccinia virus
cuuuguaaagaaauuauuuuc

SEQ ID NO: 4063332 - RNA, 11 nt, Vaccinia virus
cuuuguagaaa

SEQ ID NO: 4063333 - RNA, 20 nt, Vaccinia virus
cuuuguggaugaugauaaaa

SEQ ID NO: 4063334 - RNA, 23 nt, Vaccinia virus
cuuuuaaauacaaauauaucaau

SEQ ID NO: 4063335 - RNA, 20 nt, Vaccinia virus
cuuuuagaagugauucuuug

SEQ ID NO: 4063336 - RNA, 21 nt, Vaccinia virus
cuuuuagaagugauucuuuga

SEQ ID NO: 4063337 - RNA, 15 nt, Vaccinia virus
cuuuuauaauucaua

SEQ ID NO: 4063338 - RNA, 18 nt, Vaccinia virus
cuuuugcggacauuuucu

SEQ ID NO: 4063339 - RNA, 16 nt, Vaccinia virus
cuuuugcuauuaccaa

SEQ ID NO: 4063340 - RNA, 16 nt, Vaccinia virus
cuuuuuaggaauguau

SEQ ID NO: 4063341 - RNA, 13 nt, Vaccinia virus
cuuuuuauucucg

SEQ ID NO: 4063342 - RNA, 16 nt, Vaccinia virus
cuuuuuuccaaacugc

SEQ ID NO: 4063343 - RNA, 16 nt, Vaccinia virus
gaaaaaaaauuaucua

SEQ ID NO: 4063344 - RNA, 14 nt, Vaccinia virus
gaaaaaaguuuauu

SEQ ID NO: 4063345 - RNA, 12 nt, Vaccinia virus
gaaaaaauagcu

SEQ ID NO: 4063346 - RNA, 18 nt, Vaccinia virus
gauacauuguaugaugau

SEQ ID NO: 4063347 - RNA, 15 nt, Vaccinia virus
gauacccuacucgau

SEQ ID NO: 4063348 - RNA, 15 nt, Vaccinia virus
gauaccuagaagauc

SEQ ID NO: 4063349 - RNA, 22 nt, Vaccinia virus
gauacguacugucuauaaugac

SEQ ID NO: 4063350 - RNA, 19 nt, Vaccinia virus
gauacuaucggcucaaaga

SEQ ID NO: 4063351 - RNA, 23 nt, Vaccinia virus
gauacuccguauccuauuccaca

SEQ ID NO: 4063352 - RNA, 20 nt, Vaccinia virus
gauacuccuuuguauguacc

SEQ ID NO: 4063353 - RNA, 18 nt, Vaccinia virus
gauagauuuaucuuuccu

SEQ ID NO: 4063354 - RNA, 16 nt, Vaccinia virus
gauagcaaagagauga

SEQ ID NO: 4063355 - RNA, 15 nt, Vaccinia virus
gauaguauuauucau

SEQ ID NO: 4063356 - RNA, 17 nt, Vaccinia virus
gauauaaaauagaaaau

SEQ ID NO: 4063357 - RNA, 19 nt, Vaccinia virus
gauauacauuguauaaaaa

SEQ ID NO: 4063358 - RNA, 18 nt, Vaccinia virus
gauauagaguauaaugau

SEQ ID NO: 4063359 - RNA, 16 nt, Vaccinia virus
gauauauaucauaaau

SEQ ID NO: 4063360 - RNA, 15 nt, Vaccinia virus
gauauauaucuuuuc

SEQ ID NO: 4063361 - RNA, 23 nt, Vaccinia virus
gauauaucaaaauuagacuggag

SEQ ID NO: 4063362 - RNA, 14 nt, Vaccinia virus
gauauauuuuucau

SEQ ID NO: 4063363 - RNA, 19 nt, Vaccinia virus
gauaucuuuacuaagaaag

SEQ ID NO: 4063364 - RNA, 13 nt, Vaccinia virus
gauauuaaacaag

SEQ ID NO: 4063365 - RNA, 13 nt, Vaccinia virus
gauauuacuuaua

SEQ ID NO: 4063366 - RNA, 12 nt, Vaccinia virus
gauauuaguaca

SEQ ID NO: 4063367 - RNA, 23 nt, Vaccinia virus
gauauuaucaugaauuagauaua

SEQ ID NO: 4063368 - RNA, 19 nt, Vaccinia virus
gauauuaucgacuaugaau

SEQ ID NO: 4063369 - RNA, 21 nt, Vaccinia virus
gauauucgaucccgauauccu

SEQ ID NO: 4063370 - RNA, 22 nt, Vaccinia virus
gauauugucccacggaagugaa

SEQ ID NO: 4063371 - RNA, 19 nt, Vaccinia virus
gauauuguugauaauacaa

SEQ ID NO: 4063372 - RNA, 17 nt, Vaccinia virus
gaucaacaaaagaauac

SEQ ID NO: 4063373 - RNA, 13 nt, Vaccinia virus
gaucaucugaaaa

SEQ ID NO: 4063374 - RNA, 22 nt, Vaccinia virus
gaucauuuugauauugugaaug

SEQ ID NO: 4063375 - RNA, 17 nt, Vaccinia virus
gauccaaacaauguuuc

SEQ ID NO: 4063376 - RNA, 16 nt, Vaccinia virus
gauccuuuucuucaga

SEQ ID NO: 4063377 - RNA, 15 nt, Vaccinia virus
gaucuaaaaaaaacu

SEQ ID NO: 4063378 - RNA, 14 nt, Vaccinia virus
gaucucauauuaaa

SEQ ID NO: 4063379 - RNA, 17 nt, Vaccinia virus
gaucuggaaaauaaucu

SEQ ID NO: 4063380 - RNA, 21 nt, Vaccinia virus
gaucuuaacuccucuauuaau

SEQ ID NO: 4063381 - RNA, 16 nt, Vaccinia virus
gaucuuaccaucuucu

SEQ ID NO: 4063382 - RNA, 15 nt, Vaccinia virus
gaucuucuacaauau

SEQ ID NO: 4063383 - RNA, 22 nt, Vaccinia virus
gaugaaggugggacuauaucua

SEQ ID NO: 4063384 - RNA, 18 nt, Vaccinia virus
gaugaauuaauuaauguu

SEQ ID NO: 4063385 - RNA, 14 nt, Vaccinia virus
gaugagacauaucc

SEQ ID NO: 4063386 - RNA, 17 nt, Vaccinia virus
gaugagguaaaaaauaa

SEQ ID NO: 4063387 - RNA, 22 nt, Vaccinia virus
gaugauacauguauuaaaauac

SEQ ID NO: 4063388 - RNA, 15 nt, Vaccinia virus
gaugauacuucacuc

SEQ ID NO: 4063389 - RNA, 15 nt, Vaccinia virus
gaugauagagauauu

SEQ ID NO: 4063390 - RNA, 17 nt, Vaccinia virus
gaugauuagauggagag

SEQ ID NO: 4063391 - RNA, 22 nt, Vaccinia virus
gaugccaauaagcuuuagauau

SEQ ID NO: 4063392 - RNA, 17 nt, Vaccinia virus
gaugccaucauagauau

SEQ ID NO: 4063393 - RNA, 21 nt, Vaccinia virus
gaugcuauguuuauagauguu

SEQ ID NO: 4063394 - RNA, 21 nt, Vaccinia virus
gauggaaacauuguuauugau

SEQ ID NO: 4063395 - RNA, 16 nt, Vaccinia virus
gauggacccauagaga

SEQ ID NO: 4063396 - RNA, 13 nt, Vaccinia virus
gaugguacuuaug

SEQ ID NO: 4063397 - RNA, 15 nt, Vaccinia virus
gaugguauuucugaa

SEQ ID NO: 4063398 - RNA, 14 nt, Vaccinia virus
gauguacgaaagaa

SEQ ID NO: 4063399 - RNA, 19 nt, Vaccinia virus
gaugucaaaggaugaaaga

SEQ ID NO: 4063400 - RNA, 23 nt, Vaccinia virus
gaugucaucuucgucuauuucua

SEQ ID NO: 4063401 - RNA, 18 nt, Vaccinia virus
gaugucgaugguauguau

SEQ ID NO: 4063402 - RNA, 22 nt, Vaccinia virus
gaugucugaaacguauucucuu

SEQ ID NO: 4063403 - RNA, 13 nt, Vaccinia virus
gaugugguaauau

SEQ ID NO: 4063404 - RNA, 19 nt, Vaccinia virus
gauuaaaucguguauucau

SEQ ID NO: 4063405 - RNA, 21 nt, Vaccinia virus
gauuaaguauuguuuuuucau

SEQ ID NO: 4063406 - RNA, 22 nt, Vaccinia virus
gauuaauaauucauggaaauuu

SEQ ID NO: 4063407 - RNA, 22 nt, Vaccinia virus
gauuacagucuuuaugauucau

SEQ ID NO: 4063408 - RNA, 14 nt, Vaccinia virus
gauuaguaaauuca

SEQ ID NO: 4063409 - RNA, 22 nt, Vaccinia virus
gauuaguaugaagauaaacacu

SEQ ID NO: 4063410 - RNA, 11 nt, Vaccinia virus
gauuaguucuu

SEQ ID NO: 4063411 - RNA, 23 nt, Vaccinia virus
gauuauaagauuaaauggcagac

SEQ ID NO: 4063412 - RNA, 12 nt, Vaccinia virus
gauuauuuucau

SEQ ID NO: 4063413 - RNA, 22 nt, Vaccinia virus
gauucacguuauauaacuauca

SEQ ID NO: 4063414 - RNA, 23 nt, Vaccinia virus
gauucauucacuaucaaucgaua

SEQ ID NO: 4063415 - RNA, 23 nt, Vaccinia virus
gauuccauggaagcucuagagua

SEQ ID NO: 4063416 - RNA, 21 nt, Vaccinia virus
gauucuaacgacaucucucgc

SEQ ID NO: 4063417 - RNA, 22 nt, Vaccinia virus
gauugacgcauuuaauagagau

SEQ ID NO: 4063418 - RNA, 13 nt, Vaccinia virus
gauugauuagaaa

SEQ ID NO: 4063419 - RNA, 21 nt, Vaccinia virus
gauugauuuggaauucuuuuu

SEQ ID NO: 4063420 - RNA, 22 nt, Vaccinia virus
gauuggauaagaaaacauaucu

SEQ ID NO: 4063421 - RNA, 22 nt, Vaccinia virus
gauuggauacacuaaaauuaaa

SEQ ID NO: 4063422 - RNA, 15 nt, Vaccinia virus
gauugggugaggaaa

SEQ ID NO: 4063423 - RNA, 23 nt, Vaccinia virus
gauuggucuuaaaagauauuaau

SEQ ID NO: 4063424 - RNA, 22 nt, Vaccinia virus
gauuguccggcauaucauguag

SEQ ID NO: 4063425 - RNA, 15 nt, Vaccinia virus
gauuguuaacuauag

SEQ ID NO: 4063426 - RNA, 16 nt, Vaccinia virus
gauuuaauaguuacca

SEQ ID NO: 4063427 - RNA, 17 nt, Vaccinia virus
gauuuaucauauuucuc

SEQ ID NO: 4063428 - RNA, 19 nt, Vaccinia virus
gauuucuaucccgaaagaa

SEQ ID NO: 4063429 - RNA, 20 nt, Vaccinia virus
gauuuuccaaaucaguaacu

SEQ ID NO: 4063430 - RNA, 13 nt, Vaccinia virus
gauuuucuagauc

SEQ ID NO: 4063431 - RNA, 14 nt, Vaccinia virus
gauuuuuccaaagu

SEQ ID NO: 4063432 - RNA, 22 nt, Vaccinia virus
gcaaaaaaucugauagaaagaa

SEQ ID NO: 4063433 - RNA, 13 nt, Vaccinia virus
gcaaaaauaauau

SEQ ID NO: 4063434 - RNA, 22 nt, Vaccinia virus
gcaaacuuacagaaacaaugau

SEQ ID NO: 4063435 - RNA, 15 nt, Vaccinia virus
gcaaagaaugaugac

SEQ ID NO: 4063436 - RNA, 13 nt, Vaccinia virus
gcaaagagaugau

SEQ ID NO: 4063437 - RNA, 18 nt, Vaccinia virus
gcaaaguaacgauaauca

SEQ ID NO: 4063438 - RNA, 14 nt, Vaccinia virus
gcaaauaaaaucua

SEQ ID NO: 4063439 - RNA, 16 nt, Vaccinia virus
gcaacugguaauuaaa

SEQ ID NO: 4063440 - RNA, 22 nt, Vaccinia virus
gcaagaacacacgaacaucuuu

SEQ ID NO: 4063441 - RNA, 17 nt, Vaccinia virus
gcaagaauuuauuucua

SEQ ID NO: 4063442 - RNA, 16 nt, Vaccinia virus
gcaagacuaacacaca

SEQ ID NO: 4063443 - RNA, 20 nt, Vaccinia virus
gcaagauuuuuaaacaacaa

SEQ ID NO: 4063444 - RNA, 20 nt, Vaccinia virus
gcaauacauuuuucuauguu

SEQ ID NO: 4063445 - RNA, 15 nt, Vaccinia virus
gcaauaguauaauua

SEQ ID NO: 4063446 - RNA, 19 nt, Vaccinia virus
gcaauauaucaucuuuuca

SEQ ID NO: 4063447 - RNA, 19 nt, Vaccinia virus
gcaaucacuacaauaauua

SEQ ID NO: 4063448 - RNA, 19 nt, Vaccinia virus
gcaaucauuccucauaaga

SEQ ID NO: 4063449 - RNA, 19 nt, Vaccinia virus
gcaaugagucgucaauccu

SEQ ID NO: 4063450 - RNA, 15 nt, Vaccinia virus
gcaauuauauaaugu

SEQ ID NO: 4063451 - RNA, 17 nt, Vaccinia virus
gcaauugcauucccauc

SEQ ID NO: 4063452 - RNA, 18 nt, Vaccinia virus
gcaauuuguuaauaagau

SEQ ID NO: 4063453 - RNA, 17 nt, Vaccinia virus
gcacuacgcaauaugau

SEQ ID NO: 4063454 - RNA, 20 nt, Vaccinia virus
gcacuacuguuaagaaugau

SEQ ID NO: 4063455 - RNA, 23 nt, Vaccinia virus
gcacuacuguuaagaaugauuac

SEQ ID NO: 4063456 - RNA, 12 nt, Vaccinia virus
gcagcauuuccu

SEQ ID NO: 4063457 - RNA, 21 nt, Vaccinia virus
gcaguacuacuagguagaaga

SEQ ID NO: 4063458 - RNA, 17 nt, Vaccinia virus
gcagucggauuggaaca

SEQ ID NO: 4063459 - RNA, 18 nt, Vaccinia virus
gcauaaacuauacuauga

SEQ ID NO: 4063460 - RNA, 13 nt, Vaccinia virus
gcauaagaaaaac

SEQ ID NO: 4063461 - RNA, 11 nt, Vaccinia virus
gcauaauacaa

SEQ ID NO: 4063462 - RNA, 12 nt, Vaccinia virus
gcauaauacaau

SEQ ID NO: 4063463 - RNA, 23 nt, Vaccinia virus
gcauagaguuugcggauaaugau

SEQ ID NO: 4063464 - RNA, 17 nt, Vaccinia virus
gcauaguuuuucauaau

SEQ ID NO: 4063465 - RNA, 18 nt, Vaccinia virus
gcauauaacaacaaauaa

SEQ ID NO: 4063466 - RNA, 17 nt, Vaccinia virus
gcauauauuagaaauac

SEQ ID NO: 4063467 - RNA, 17 nt, Vaccinia virus
gcauauucgaaauuaga

SEQ ID NO: 4063468 - RNA, 22 nt, Vaccinia virus
gcauccaaugaguaaaaucaaa

SEQ ID NO: 4063469 - RNA, 23 nt, Vaccinia virus
gcauccacucauauagaagaugc

SEQ ID NO: 4063470 - RNA, 15 nt, Vaccinia virus
gcaucgauuugcuaa

SEQ ID NO: 4063471 - RNA, 18 nt, Vaccinia virus
gcaucgcuucguuuacau

SEQ ID NO: 4063472 - RNA, 20 nt, Vaccinia virus
cuacgaaaacgaaaucugua

SEQ ID NO: 4063473 - RNA, 21 nt, Vaccinia virus
cuacuaaaagaucaaccaaaa

SEQ ID NO: 4063474 - RNA, 15 nt, Vaccinia virus
cuacucguuuggaau

SEQ ID NO: 4063475 - RNA, 18 nt, Vaccinia virus
cuacugacgauaguaucu

SEQ ID NO: 4063476 - RNA, 17 nt, Vaccinia virus
cuagaagauauagcacc

SEQ ID NO: 4063477 - RNA, 18 nt, Vaccinia virus
cuagacgauauagugaaa

SEQ ID NO: 4063478 - RNA, 20 nt, Vaccinia virus
cuagacuaacuaucucuuuc

SEQ ID NO: 4063479 - RNA, 16 nt, Vaccinia virus
cuagacuauauuauca

SEQ ID NO: 4063480 - RNA, 15 nt, Vaccinia virus
cuagagauaaaaucu

SEQ ID NO: 4063481 - RNA, 15 nt, Vaccinia virus
cuagaggagaaguaa

SEQ ID NO: 4063482 - RNA, 11 nt, Vaccinia virus
cuagauacauu

SEQ ID NO: 4063483 - RNA, 18 nt, Vaccinia virus
cuagaucuauagaaucaa

SEQ ID NO: 4063484 - RNA, 23 nt, Vaccinia virus
cuagauuaauuuuugugggaagc

SEQ ID NO: 4063485 - RNA, 16 nt, Vaccinia virus
cuaggauccuuuagaa

SEQ ID NO: 4063486 - RNA, 15 nt, Vaccinia virus
cuaggauuuaaacaa

SEQ ID NO: 4063487 - RNA, 16 nt, Vaccinia virus
cuagguuucucuauaa

SEQ ID NO: 4063488 - RNA, 21 nt, Vaccinia virus
cuaguacuuguauguguuaua

SEQ ID NO: 4063489 - RNA, 15 nt, Vaccinia virus
cuagucauauguuua

SEQ ID NO: 4063490 - RNA, 22 nt, Vaccinia virus
cuagugaguacggauuaaacau

SEQ ID NO: 4063491 - RNA, 18 nt, Vaccinia virus
cuaguggauguacaugua

SEQ ID NO: 4063492 - RNA, 19 nt, Vaccinia virus
cuauaaaaagaguuucaaa

SEQ ID NO: 4063493 - RNA, 15 nt, Vaccinia virus
cuauaaaaauggauu

SEQ ID NO: 4063494 - RNA, 16 nt, Vaccinia virus
cuauaaaaauggauuu

SEQ ID NO: 4063495 - RNA, 19 nt, Vaccinia virus
cuauaaaacgauuaaacaa

SEQ ID NO: 4063496 - RNA, 18 nt, Vaccinia virus
cuauaaaacuacuacaau

SEQ ID NO: 4063497 - RNA, 15 nt, Vaccinia virus
cuauaaacaugaauu

SEQ ID NO: 4063498 - RNA, 23 nt, Vaccinia virus
cuauaaagucugucaaaucaucu

SEQ ID NO: 4063499 - RNA, 16 nt, Vaccinia virus
cuauaaauagaucucu

SEQ ID NO: 4063500 - RNA, 11 nt, Vaccinia virus
cuauaaauguc

SEQ ID NO: 4063501 - RNA, 17 nt, Vaccinia virus
cuauaagccuuuguuua

SEQ ID NO: 4063502 - RNA, 14 nt, Vaccinia virus
cuauaauaaugaau

SEQ ID NO: 4063503 - RNA, 18 nt, Vaccinia virus
cuauaauauccauuuugu

SEQ ID NO: 4063504 - RNA, 20 nt, Vaccinia virus
cuauaaugaugauacucuca

SEQ ID NO: 4063505 - RNA, 23 nt, Vaccinia virus
cuauagaagagcgacagacaucu

SEQ ID NO: 4063506 - RNA, 14 nt, Vaccinia virus
cuauagauuuugaa

SEQ ID NO: 4063507 - RNA, 16 nt, Vaccinia virus
cuauaguuuguuuuca

SEQ ID NO: 4063508 - RNA, 12 nt, Vaccinia virus
cuauaucgaugu

SEQ ID NO: 4063509 - RNA, 15 nt, Vaccinia virus
cuauauuaacaucua

SEQ ID NO: 4063510 - RNA, 13 nt, Vaccinia virus
cuauauuguauuc

SEQ ID NO: 4063511 - RNA, 17 nt, Vaccinia virus
cuaucagaguccaugua

SEQ ID NO: 4063512 - RNA, 17 nt, Vaccinia virus
cuaucguaucugucaau

SEQ ID NO: 4063513 - RNA, 20 nt, Vaccinia virus
cuaucguuacuaguaaaaug

SEQ ID NO: 4063514 - RNA, 15 nt, Vaccinia virus
cuaucuaaauguaau

SEQ ID NO: 4063515 - RNA, 17 nt, Vaccinia virus
cuaucuccgaauuuguu

SEQ ID NO: 4063516 - RNA, 23 nt, Vaccinia virus
cuaucucuuucucuuucucucuu

SEQ ID NO: 4063517 - RNA, 20 nt, Vaccinia virus
cuaucuuuagcuucugaaau

SEQ ID NO: 4063518 - RNA, 18 nt, Vaccinia virus
cuaugaaaggagagaaug

SEQ ID NO: 4063519 - RNA, 21 nt, Vaccinia virus
cuaugaauaccauuaaacaau

SEQ ID NO: 4063520 - RNA, 16 nt, Vaccinia virus
cuaugauuaaaucguu

SEQ ID NO: 4063521 - RNA, 14 nt, Vaccinia virus
cuauguaaaugaua

SEQ ID NO: 4063522 - RNA, 18 nt, Vaccinia virus
cuaugucaaaaauuguag

SEQ ID NO: 4063523 - RNA, 15 nt, Vaccinia virus
cuauguugacaugua

SEQ ID NO: 4063524 - RNA, 19 nt, Vaccinia virus
cuauguugacauguauaua

SEQ ID NO: 4063525 - RNA, 11 nt, Vaccinia virus
cuauguuuaua

SEQ ID NO: 4063526 - RNA, 13 nt, Vaccinia virus
cuauguuuauaga

SEQ ID NO: 4063527 - RNA, 13 nt, Vaccinia virus
cuauuaaacuguu

SEQ ID NO: 4063528 - RNA, 20 nt, Vaccinia virus
cuauugaucaaguaugcaau

SEQ ID NO: 4063529 - RNA, 22 nt, Vaccinia virus
cuauuguuacaaaaguuaauaa

SEQ ID NO: 4063530 - RNA, 12 nt, Vaccinia virus
cuauuguuuauu

SEQ ID NO: 4063531 - RNA, 21 nt, Vaccinia virus
cuauuuagaucauuaacucua

SEQ ID NO: 4063532 - RNA, 21 nt, Vaccinia virus
cuauuucaacgucuaauguau

SEQ ID NO: 4063533 - RNA, 12 nt, Vaccinia virus
cuauuuggauuu

SEQ ID NO: 4063534 - RNA, 20 nt, Vaccinia virus
cucaaaguagauaaacccuc

SEQ ID NO: 4063535 - RNA, 18 nt, Vaccinia virus
cucaaaugaauaaguuua

SEQ ID NO: 4063536 - RNA, 16 nt, Vaccinia virus
cucaaccauagauaua

SEQ ID NO: 4063537 - RNA, 14 nt, Vaccinia virus
cucaauaguuucau

SEQ ID NO: 4063538 - RNA, 13 nt, Vaccinia virus
cucagaaacagaa

SEQ ID NO: 4063539 - RNA, 17 nt, Vaccinia virus
cucagugaauccaucuc

SEQ ID NO: 4063540 - RNA, 17 nt, Vaccinia virus
cucauaaaauaguucuc

SEQ ID NO: 4063541 - RNA, 18 nt, Vaccinia virus
cucauauuaucaggaaca

SEQ ID NO: 4063542 - RNA, 16 nt, Vaccinia virus
cucaucggaucuguaa

SEQ ID NO: 4063543 - RNA, 22 nt, Vaccinia virus
cucaugagaauggaaaggaaac

SEQ ID NO: 4063544 - RNA, 15 nt, Vaccinia virus
cucaugucaaauugu

SEQ ID NO: 4063545 - RNA, 13 nt, Vaccinia virus
cucauuaacaucu

SEQ ID NO: 4063546 - RNA, 19 nt, Vaccinia virus
cuccaaacgaguuaaguuu

SEQ ID NO: 4063547 - RNA, 14 nt, Vaccinia virus
cuccaauacuaauu

SEQ ID NO: 4063548 - RNA, 22 nt, Vaccinia virus
cuccagacuuuauaauuucauc

SEQ ID NO: 4063549 - RNA, 16 nt, Vaccinia virus
cuccguuacacuguua

SEQ ID NO: 4063550 - RNA, 12 nt, Vaccinia virus
cuccuguuugau

SEQ ID NO: 4063551 - RNA, 16 nt, Vaccinia virus
cuccuuuaaaauuaau

SEQ ID NO: 4063552 - RNA, 23 nt, Vaccinia virus
cucguaaauugggauaaaaauua

SEQ ID NO: 4063553 - RNA, 16 nt, Vaccinia virus
cucguauacucugccc

SEQ ID NO: 4063554 - RNA, 16 nt, Vaccinia virus
cucuaaacaaggaaac

SEQ ID NO: 4063555 - RNA, 18 nt, Vaccinia virus
cucuacucauuucauuau

SEQ ID NO: 4063556 - RNA, 13 nt, Vaccinia virus
cucuaguuucaga

SEQ ID NO: 4063557 - RNA, 18 nt, Vaccinia virus
cucuaucauggcaauaac

SEQ ID NO: 4063558 - RNA, 18 nt, Vaccinia virus
cucuauccgacuagaauu

SEQ ID NO: 4063559 - RNA, 13 nt, Vaccinia virus
cucuauuaaauac

SEQ ID NO: 4063560 - RNA, 14 nt, Vaccinia virus
cucuauucaucuga

SEQ ID NO: 4063561 - RNA, 18 nt, Vaccinia virus
cucuauucgaaaacucua

SEQ ID NO: 4063562 - RNA, 11 nt, Vaccinia virus
cucuauuuugg

SEQ ID NO: 4063563 - RNA, 22 nt, Vaccinia virus
cucuauuuugucauuaacuuua

SEQ ID NO: 4063564 - RNA, 19 nt, Vaccinia virus
cucucaacauuggaauaau

SEQ ID NO: 4063565 - RNA, 17 nt, Vaccinia virus
cucucauaauaaauuuu

SEQ ID NO: 4063566 - RNA, 12 nt, Vaccinia virus
cucucauuuucu

SEQ ID NO: 4063567 - RNA, 22 nt, Vaccinia virus
cucucauuuucuuuaacaaauu

SEQ ID NO: 4063568 - RNA, 16 nt, Vaccinia virus
cucucuauuucuuaau

SEQ ID NO: 4063569 - RNA, 19 nt, Vaccinia virus
cucugacauucagaaagag

SEQ ID NO: 4063570 - RNA, 18 nt, Vaccinia virus
cucugccaagauagcuuc

SEQ ID NO: 4063571 - RNA, 18 nt, Vaccinia virus
cucuucaacaucuuugau

SEQ ID NO: 4063572 - RNA, 12 nt, Vaccinia virus
cucuuuaauagc

SEQ ID NO: 4063573 - RNA, 16 nt, Vaccinia virus
cucuuucuccuuucuc

SEQ ID NO: 4063574 - RNA, 17 nt, Vaccinia virus
cugaaaauaaagauaaa

SEQ ID NO: 4063575 - RNA, 16 nt, Vaccinia virus
cugaaaaugaaauugu

SEQ ID NO: 4063576 - RNA, 19 nt, Vaccinia virus
uuacaauguagaaauuaga

SEQ ID NO: 4063577 - RNA, 16 nt, Vaccinia virus
uuacacauaaacaucg

SEQ ID NO: 4063578 - RNA, 19 nt, Vaccinia virus
uuacagaauuuguauccuu

SEQ ID NO: 4063579 - RNA, 16 nt, Vaccinia virus
uuacagauauuuucca

SEQ ID NO: 4063580 - RNA, 18 nt, Vaccinia virus
uuacauaguugauaaaaa

SEQ ID NO: 4063581 - RNA, 17 nt, Vaccinia virus
uuacauaucuacguucu

SEQ ID NO: 4063582 - RNA, 20 nt, Vaccinia virus
uuacaucgacgagauuauua

SEQ ID NO: 4063583 - RNA, 18 nt, Vaccinia virus
uuacauguaauacauuuu

SEQ ID NO: 4063584 - RNA, 20 nt, Vaccinia virus
uuacauuuuuuauaaauaga

SEQ ID NO: 4063585 - RNA, 23 nt, Vaccinia virus
uuaccacaauguauaauauaaga

SEQ ID NO: 4063586 - RNA, 13 nt, Vaccinia virus
uuaccagauaucu

SEQ ID NO: 4063587 - RNA, 15 nt, Vaccinia virus
uuaccagauaucuuc

SEQ ID NO: 4063588 - RNA, 15 nt, Vaccinia virus
uuaccucuacaaaua

SEQ ID NO: 4063589 - RNA, 21 nt, Vaccinia virus
uuacuaaaauaucgauguuua

SEQ ID NO: 4063590 - RNA, 17 nt, Vaccinia virus
uuacuaauaucauuagu

SEQ ID NO: 4063591 - RNA, 13 nt, Vaccinia virus
uuacuauguaguu

SEQ ID NO: 4063592 - RNA, 20 nt, Vaccinia virus
uuacugaggggaaaaucaau

SEQ ID NO: 4063593 - RNA, 17 nt, Vaccinia virus
uuacuggaauuagacaa

SEQ ID NO: 4063594 - RNA, 16 nt, Vaccinia virus
uuacuuagucuguaca

SEQ ID NO: 4063595 - RNA, 16 nt, Vaccinia virus
uuacuuguauaauaag

SEQ ID NO: 4063596 - RNA, 21 nt, Vaccinia virus
uuacuuuagaaggaaaaucau

SEQ ID NO: 4063597 - RNA, 16 nt, Vaccinia virus
uuacuuuguggaugau

SEQ ID NO: 4063598 - RNA, 15 nt, Vaccinia virus
uuacuuuuucaaaga

SEQ ID NO: 4063599 - RNA, 18 nt, Vaccinia virus
uuagaaacuucaaagauu

SEQ ID NO: 4063600 - RNA, 14 nt, Vaccinia virus
uuagaaaguauuuu

SEQ ID NO: 4063601 - RNA, 20 nt, Vaccinia virus
uuagaaaugaguucauuaaa

SEQ ID NO: 4063602 - RNA, 20 nt, Vaccinia virus
uuagaauauccagugcauuu

SEQ ID NO: 4063603 - RNA, 20 nt, Vaccinia virus
uuagacaagcggguaaauga

SEQ ID NO: 4063604 - RNA, 18 nt, Vaccinia virus
uuagacggcaacauagaa

SEQ ID NO: 4063605 - RNA, 22 nt, Vaccinia virus
uuagagaacauacauuuguaaa

SEQ ID NO: 4063606 - RNA, 17 nt, Vaccinia virus
uuagauaaaugcgguaa

SEQ ID NO: 4063607 - RNA, 18 nt, Vaccinia virus
uuagauaacggacaacaa

SEQ ID NO: 4063608 - RNA, 16 nt, Vaccinia virus
uuagauaauuguggua

SEQ ID NO: 4063609 - RNA, 19 nt, Vaccinia virus
uuagaugagaaauuauucc

SEQ ID NO: 4063610 - RNA, 17 nt, Vaccinia virus
uuagaugguuucuuuuu

SEQ ID NO: 4063611 - RNA, 21 nt, Vaccinia virus
uuagauuaugaggaugcuguu

SEQ ID NO: 4063612 - RNA, 16 nt, Vaccinia virus
uuagauuuccuagauu

SEQ ID NO: 4063613 - RNA, 17 nt, Vaccinia virus
uuagcagaauauauaag

SEQ ID NO: 4063614 - RNA, 16 nt, Vaccinia virus
uuaggauuaacauagu

SEQ ID NO: 4063615 - RNA, 11 nt, Vaccinia virus
uuaguauacac

SEQ ID NO: 4063616 - RNA, 18 nt, Vaccinia virus
uuagucauugcaauauag

SEQ ID NO: 4063617 - RNA, 23 nt, Vaccinia virus
uuagugaaacauuccacaucguu

SEQ ID NO: 4063618 - RNA, 22 nt, Vaccinia virus
uuaguucaucgcuuucuagaau

SEQ ID NO: 4063619 - RNA, 15 nt, Vaccinia virus
uuaguuccaacaauu

SEQ ID NO: 4063620 - RNA, 22 nt, Vaccinia virus
uuaguuucugguuuucuauaaa

SEQ ID NO: 4063621 - RNA, 15 nt, Vaccinia virus
uuauaaaacauagau

SEQ ID NO: 4063622 - RNA, 17 nt, Vaccinia virus
uuauaaaggagacuugu

SEQ ID NO: 4063623 - RNA, 13 nt, Vaccinia virus
uuauaaauagaug

SEQ ID NO: 4063624 - RNA, 19 nt, Vaccinia virus
uuauaacacuuauguauua

SEQ ID NO: 4063625 - RNA, 21 nt, Vaccinia virus
uuauaaccuuuuccuuaucuu

SEQ ID NO: 4063626 - RNA, 16 nt, Vaccinia virus
uuauaacuuauugucu

SEQ ID NO: 4063627 - RNA, 22 nt, Vaccinia virus
uuauaauauaaaaauacuuaug

SEQ ID NO: 4063628 - RNA, 15 nt, Vaccinia virus
uuauaaucaaagauu

SEQ ID NO: 4063629 - RNA, 19 nt, Vaccinia virus
uuauaaugaggauaauaag

SEQ ID NO: 4063630 - RNA, 14 nt, Vaccinia virus
uuauacaaaguuuu

SEQ ID NO: 4063631 - RNA, 14 nt, Vaccinia virus
uuauacaaugaacu

SEQ ID NO: 4063632 - RNA, 17 nt, Vaccinia virus
uuauacagaguauguaa

SEQ ID NO: 4063633 - RNA, 14 nt, Vaccinia virus
uuauacauuaucuu

SEQ ID NO: 4063634 - RNA, 21 nt, Vaccinia virus
uuauacauugaauauaaaaua

SEQ ID NO: 4063635 - RNA, 13 nt, Vaccinia virus
uuauagaauguau

SEQ ID NO: 4063636 - RNA, 18 nt, Vaccinia virus
uuauagacaaauuauuca

SEQ ID NO: 4063637 - RNA, 13 nt, Vaccinia virus
uuauagauguaca

SEQ ID NO: 4063638 - RNA, 17 nt, Vaccinia virus
uuauagauuuguaucuc

SEQ ID NO: 4063639 - RNA, 12 nt, Vaccinia virus
uuauaguuuuua

SEQ ID NO: 4063640 - RNA, 18 nt, Vaccinia virus
uuauauacucuaaucuuu

SEQ ID NO: 4063641 - RNA, 20 nt, Vaccinia virus
uuauaucaauaccaaagaag

SEQ ID NO: 4063642 - RNA, 22 nt, Vaccinia virus
uuauaucauccaauauuauuga

SEQ ID NO: 4063643 - RNA, 14 nt, Vaccinia virus
uuauauuauuuaca

SEQ ID NO: 4063644 - RNA, 16 nt, Vaccinia virus
uuauauucucuggaau

SEQ ID NO: 4063645 - RNA, 14 nt, Vaccinia virus
uuaucaaaaauaag

SEQ ID NO: 4063646 - RNA, 22 nt, Vaccinia virus
uuaucacaaugaaauauuuugg

SEQ ID NO: 4063647 - RNA, 20 nt, Vaccinia virus
uuaucacauaucacauuaau

SEQ ID NO: 4063648 - RNA, 23 nt, Vaccinia virus
uuaucagaagauggauggaugaa

SEQ ID NO: 4063649 - RNA, 19 nt, Vaccinia virus
uuaucagugucguaaauua

SEQ ID NO: 4063650 - RNA, 13 nt, Vaccinia virus
uuaucauaaaagu

SEQ ID NO: 4063651 - RNA, 14 nt, Vaccinia virus
uuaucaucauuaaa

SEQ ID NO: 4063652 - RNA, 22 nt, Vaccinia virus
uuaucgguaacaucuuuguaaa

SEQ ID NO: 4063653 - RNA, 22 nt, Vaccinia virus
uuaucguuuaagaauaauacag

SEQ ID NO: 4063654 - RNA, 14 nt, Vaccinia virus
uuaucuaucuuaaa

SEQ ID NO: 4063655 - RNA, 20 nt, Vaccinia virus
uuaucucaacaaaauucaga

SEQ ID NO: 4063656 - RNA, 15 nt, Vaccinia virus
uuaucucccauaauc

SEQ ID NO: 4063657 - RNA, 13 nt, Vaccinia virus
uuaucuguagacg

SEQ ID NO: 4063658 - RNA, 21 nt, Vaccinia virus
uuaugacaaaguuuacauucu

SEQ ID NO: 4063659 - RNA, 21 nt, Vaccinia virus
uuaugacgcaguaacauauau

SEQ ID NO: 4063660 - RNA, 17 nt, Vaccinia virus
uuaugauagaaauuagc

SEQ ID NO: 4063661 - RNA, 22 nt, Vaccinia virus
uuauggaguuagcaauuucaaa

SEQ ID NO: 4063662 - RNA, 21 nt, Vaccinia virus
uuaugggcauuuguauuuuga

SEQ ID NO: 4063663 - RNA, 15 nt, Vaccinia virus
uuauguaacuguaaa

SEQ ID NO: 4063664 - RNA, 12 nt, Vaccinia virus
uuauguacuaag

SEQ ID NO: 4063665 - RNA, 12 nt, Vaccinia virus
uuauguuucuuu

SEQ ID NO: 4063666 - RNA, 22 nt, Vaccinia virus
uuauuaaaguuuacaguuugaa

SEQ ID NO: 4063667 - RNA, 14 nt, Vaccinia virus
uuauuaaguauaau

SEQ ID NO: 4063668 - RNA, 20 nt, Vaccinia virus
uuauuacacgcuauuaauca

SEQ ID NO: 4063669 - RNA, 17 nt, Vaccinia virus
uuauuacugaauuauua

SEQ ID NO: 4063670 - RNA, 19 nt, Vaccinia virus
uuauuacuuaaguuguaaa

SEQ ID NO: 4063671 - RNA, 13 nt, Vaccinia virus
uuauuagaucuuu

SEQ ID NO: 4063672 - RNA, 20 nt, Vaccinia virus
uuauuagcccaaucuguaaa

SEQ ID NO: 4063673 - RNA, 17 nt, Vaccinia virus
uuauuagcgcaaucagu

SEQ ID NO: 4063674 - RNA, 13 nt, Vaccinia virus
uuauuauuucagg

SEQ ID NO: 4063675 - RNA, 16 nt, Vaccinia virus
uuauuauuucauuaau

SEQ ID NO: 4063676 - RNA, 23 nt, Vaccinia virus
uuauuccgguacugguuuagaua

SEQ ID NO: 4063677 - RNA, 17 nt, Vaccinia virus
uuauugauaauuguaaa

SEQ ID NO: 4063678 - RNA, 15 nt, Vaccinia virus
uuauugauauguaua

SEQ ID NO: 4063679 - RNA, 21 nt, Vaccinia virus
uuauuggcguuggaaaaauua

SEQ ID NO: 4063680 - RNA, 12 nt, Vaccinia virus
uuauuguaacag

SEQ ID NO: 4063681 - RNA, 13 nt, Vaccinia virus
uuauuuaacaauu

SEQ ID NO: 4063682 - RNA, 19 nt, Vaccinia virus
uuauuuagauacagaugua

SEQ ID NO: 4063683 - RNA, 16 nt, Vaccinia virus
uuauuuauauuuggua

SEQ ID NO: 4063684 - RNA, 12 nt, Vaccinia virus
uuauuuauguca

SEQ ID NO: 4063685 - RNA, 23 nt, Vaccinia virus
uuauuucagucgcugauuaauca

SEQ ID NO: 4063686 - RNA, 15 nt, Vaccinia virus
uuauuucauccaauu

SEQ ID NO: 4063687 - RNA, 13 nt, Vaccinia virus
uuauuuuuggaau

SEQ ID NO: 4063688 - RNA, 16 nt, Vaccinia virus
uucaaaauagcuaucu

SEQ ID NO: 4063689 - RNA, 14 nt, Vaccinia virus
uucaaaguuucuga

SEQ ID NO: 4063690 - RNA, 18 nt, Vaccinia virus
uucaaaguuucugaaaua

SEQ ID NO: 4063691 - RNA, 21 nt, Vaccinia virus
uucaaaguuucugaaauaaga

SEQ ID NO: 4063692 - RNA, 12 nt, Vaccinia virus
uucaacaucuuu

SEQ ID NO: 4063693 - RNA, 14 nt, Vaccinia virus
uucaacauguuuaa

SEQ ID NO: 4063694 - RNA, 16 nt, Vaccinia virus
uucaacgcuuggcuga

SEQ ID NO: 4063695 - RNA, 15 nt, Vaccinia virus
uucaagauuaucuuu

SEQ ID NO: 4063696 - RNA, 16 nt, Vaccinia virus
uucaagcgaauuacuc

SEQ ID NO: 4063697 - RNA, 21 nt, Vaccinia virus
uucaaggaugccauagauucu

SEQ ID NO: 4063698 - RNA, 17 nt, Vaccinia virus
uucaauugauaagacac

SEQ ID NO: 4063699 - RNA, 13 nt, Vaccinia virus
uucacaaauacua

SEQ ID NO: 4063700 - RNA, 20 nt, Vaccinia virus
uucacaacuuuacuguuuuu

SEQ ID NO: 4063701 - RNA, 19 nt, Vaccinia virus
uucacaagaugaauucagu

SEQ ID NO: 4063702 - RNA, 22 nt, Vaccinia virus
uucacaagaugaauucaguaau

SEQ ID NO: 4063703 - RNA, 14 nt, Vaccinia virus
ugucucuguuuuua

SEQ ID NO: 4063704 - RNA, 19 nt, Vaccinia virus
ugucuguaucauauucaac

SEQ ID NO: 4063705 - RNA, 17 nt, Vaccinia virus
ugucuuagaacaacauu

SEQ ID NO: 4063706 - RNA, 18 nt, Vaccinia virus
ugugauagucgauacguu

SEQ ID NO: 4063707 - RNA, 18 nt, Vaccinia virus
ugugauauugauaucuuu

SEQ ID NO: 4063708 - RNA, 13 nt, Vaccinia virus
ugugaucuucucg

SEQ ID NO: 4063709 - RNA, 15 nt, Vaccinia virus
ugugaugauuguaca

SEQ ID NO: 4063710 - RNA, 16 nt, Vaccinia virus
ugugaugccaauaagc

SEQ ID NO: 4063711 - RNA, 16 nt, Vaccinia virus
ugugcaucuacugaua

SEQ ID NO: 4063712 - RNA, 17 nt, Vaccinia virus
ugugcaucuacugauau

SEQ ID NO: 4063713 - RNA, 23 nt, Vaccinia virus
ugugggaagcgauucaaaaggac

SEQ ID NO: 4063714 - RNA, 18 nt, Vaccinia virus
uguguaacacuuuggaua

SEQ ID NO: 4063715 - RNA, 20 nt, Vaccinia virus
uguguauacgcuaacgguau

SEQ ID NO: 4063716 - RNA, 21 nt, Vaccinia virus
ugugucuacauaaauaugcaa

SEQ ID NO: 4063717 - RNA, 14 nt, Vaccinia virus
uguguuacauaucu

SEQ ID NO: 4063718 - RNA, 22 nt, Vaccinia virus
uguguuaucagccgcuacagaa

SEQ ID NO: 4063719 - RNA, 17 nt, Vaccinia virus
uguuaaaauauaaacag

SEQ ID NO: 4063720 - RNA, 14 nt, Vaccinia virus
uguuaaacaaauaa

SEQ ID NO: 4063721 - RNA, 14 nt, Vaccinia virus
uguuaaauuucagu

SEQ ID NO: 4063722 - RNA, 17 nt, Vaccinia virus
uguuaaauuuucuaaug

SEQ ID NO: 4063723 - RNA, 19 nt, Vaccinia virus
uguuaagaaugauuacuaa

SEQ ID NO: 4063724 - RNA, 21 nt, Vaccinia virus
uguuaauacaucaauggaaga

SEQ ID NO: 4063725 - RNA, 17 nt, Vaccinia virus
uguuacaaauguagaag

SEQ ID NO: 4063726 - RNA, 15 nt, Vaccinia virus
uguuacaacaucacg

SEQ ID NO: 4063727 - RNA, 22 nt, Vaccinia virus
uguuaccauaucguauaacuug

SEQ ID NO: 4063728 - RNA, 20 nt, Vaccinia virus
uguuauacagauguauuaca

SEQ ID NO: 4063729 - RNA, 12 nt, Vaccinia virus
uguuauauguaa

SEQ ID NO: 4063730 - RNA, 22 nt, Vaccinia virus
uguuaucaugaaauguuugaua

SEQ ID NO: 4063731 - RNA, 22 nt, Vaccinia virus
uguuauguauuucauuguucau

SEQ ID NO: 4063732 - RNA, 15 nt, Vaccinia virus
uguucaacaaacuaa

SEQ ID NO: 4063733 - RNA, 18 nt, Vaccinia virus
uguucaaggcaacagaug

SEQ ID NO: 4063734 - RNA, 21 nt, Vaccinia virus
uguucauuaacgauaucuugc

SEQ ID NO: 4063735 - RNA, 17 nt, Vaccinia virus
uguucguccgucaugau

SEQ ID NO: 4063736 - RNA, 19 nt, Vaccinia virus
uguugugaaugacaucauc

SEQ ID NO: 4063737 - RNA, 20 nt, Vaccinia virus
uguugugucaguuuauaaua

SEQ ID NO: 4063738 - RNA, 23 nt, Vaccinia virus
uguuuaacauucuuuuuuggaga

SEQ ID NO: 4063739 - RNA, 22 nt, Vaccinia virus
uguuuaauacuuauucauauuu

SEQ ID NO: 4063740 - RNA, 16 nt, Vaccinia virus
uguuuaauuuuuucua

SEQ ID NO: 4063741 - RNA, 21 nt, Vaccinia virus
uguuuaucuauacuauuaaaa

SEQ ID NO: 4063742 - RNA, 13 nt, Vaccinia virus
uguuucaaagcaa

SEQ ID NO: 4063743 - RNA, 20 nt, Vaccinia virus
uguuuccaugacauauuaca

SEQ ID NO: 4063744 - RNA, 16 nt, Vaccinia virus
uguuucuuacauauuu

SEQ ID NO: 4063745 - RNA, 15 nt, Vaccinia virus
uguuuguucauugga

SEQ ID NO: 4063746 - RNA, 12 nt, Vaccinia virus
uguuuuaacauc

SEQ ID NO: 4063747 - RNA, 13 nt, Vaccinia virus
uguuuuauaaaau

SEQ ID NO: 4063748 - RNA, 13 nt, Vaccinia virus
uguuuucaucauu

SEQ ID NO: 4063749 - RNA, 17 nt, Vaccinia virus
uuaaaaaaugaaaauaa

SEQ ID NO: 4063750 - RNA, 15 nt, Vaccinia virus
uuaaaaacaaacuuu

SEQ ID NO: 4063751 - RNA, 13 nt, Vaccinia virus
uuaaaaauuauua

SEQ ID NO: 4063752 - RNA, 17 nt, Vaccinia virus
uuaaaacagaugauuca

SEQ ID NO: 4063753 - RNA, 19 nt, Vaccinia virus
uuaaaacuugauaauuaau

SEQ ID NO: 4063754 - RNA, 22 nt, Vaccinia virus
uuaaaauaaaaaguaauauuca

SEQ ID NO: 4063755 - RNA, 17 nt, Vaccinia virus
uuaaaauacuaaauuga

SEQ ID NO: 4063756 - RNA, 23 nt, Vaccinia virus
uuaaaauaguuuauaacauuaau

SEQ ID NO: 4063757 - RNA, 12 nt, Vaccinia virus
uuaaaauuauua

SEQ ID NO: 4063758 - RNA, 21 nt, Vaccinia virus
uuaaacaaauaaguauuauca

SEQ ID NO: 4063759 - RNA, 23 nt, Vaccinia virus
uuaaacaauacucuauuauuaau

SEQ ID NO: 4063760 - RNA, 23 nt, Vaccinia virus
uuaaacaauaucacgaaaguaga

SEQ ID NO: 4063761 - RNA, 17 nt, Vaccinia virus
uuaaacauggcauuaau

SEQ ID NO: 4063762 - RNA, 19 nt, Vaccinia virus
uuaaacuaauucauuuuca

SEQ ID NO: 4063763 - RNA, 14 nt, Vaccinia virus
uuaaacuguaucga

SEQ ID NO: 4063764 - RNA, 16 nt, Vaccinia virus
uuaaagaaaaauacuc

SEQ ID NO: 4063765 - RNA, 12 nt, Vaccinia virus
uuaaagauauca

SEQ ID NO: 4063766 - RNA, 21 nt, Vaccinia virus
uuaaagauauuguuacaccac

SEQ ID NO: 4063767 - RNA, 17 nt, Vaccinia virus
uuaaaggauauuaugca

SEQ ID NO: 4063768 - RNA, 22 nt, Vaccinia virus
uuaaaggauggugaaauuauug

SEQ ID NO: 4063769 - RNA, 14 nt, Vaccinia virus
uuaaagguauuucu

SEQ ID NO: 4063770 - RNA, 14 nt, Vaccinia virus
uuaaaguguaaaua

SEQ ID NO: 4063771 - RNA, 22 nt, Vaccinia virus
uuaaauaacccgaguauugaaa

SEQ ID NO: 4063772 - RNA, 17 nt, Vaccinia virus
uuaaauaacucauuuau

SEQ ID NO: 4063773 - RNA, 13 nt, Vaccinia virus
uuaaauaauuaau

SEQ ID NO: 4063774 - RNA, 14 nt, Vaccinia virus
uuaaauaucauaau

SEQ ID NO: 4063775 - RNA, 12 nt, Vaccinia virus
uuaaauauuucu

SEQ ID NO: 4063776 - RNA, 21 nt, Vaccinia virus
uuaaauccucuauuuauugac

SEQ ID NO: 4063777 - RNA, 19 nt, Vaccinia virus
uuaaaucgccgaaugaaca

SEQ ID NO: 4063778 - RNA, 23 nt, Vaccinia virus
uuaaaugaauccaucuuauccuu

SEQ ID NO: 4063779 - RNA, 23 nt, Vaccinia virus
uuaaaugaguguccauauuuugc

SEQ ID NO: 4063780 - RNA, 14 nt, Vaccinia virus
uuaaauucuuuaau

SEQ ID NO: 4063781 - RNA, 18 nt, Vaccinia virus
uuaacaauugucuguaaa

SEQ ID NO: 4063782 - RNA, 22 nt, Vaccinia virus
uuaacacuauacucauauuaau

SEQ ID NO: 4063783 - RNA, 15 nt, Vaccinia virus
uuaacagauguagua

SEQ ID NO: 4063784 - RNA, 16 nt, Vaccinia virus
uuaacaucacuaauau

SEQ ID NO: 4063785 - RNA, 21 nt, Vaccinia virus
uuaaccaauacuauucauaau

SEQ ID NO: 4063786 - RNA, 21 nt, Vaccinia virus
uuaaccuuauuuuuauguucg

SEQ ID NO: 4063787 - RNA, 18 nt, Vaccinia virus
uuaacgaggacuuauuca

SEQ ID NO: 4063788 - RNA, 14 nt, Vaccinia virus
uuaacgauaucuug

SEQ ID NO: 4063789 - RNA, 18 nt, Vaccinia virus
uuaacguaucgcauuaau

SEQ ID NO: 4063790 - RNA, 21 nt, Vaccinia virus
uuaacgucuaccgaaacaucg

SEQ ID NO: 4063791 - RNA, 15 nt, Vaccinia virus
uuaacuaucuguaaa

SEQ ID NO: 4063792 - RNA, 23 nt, Vaccinia virus
uuaacuauuuugucucuguuuuu

SEQ ID NO: 4063793 - RNA, 19 nt, Vaccinia virus
uuaacucagaagauuauua

SEQ ID NO: 4063794 - RNA, 17 nt, Vaccinia virus
uuaacuccucuauuaau

SEQ ID NO: 4063795 - RNA, 22 nt, Vaccinia virus
uuaacucggucgguuuaucuac

SEQ ID NO: 4063796 - RNA, 15 nt, Vaccinia virus
uuaacuguucaucgu

SEQ ID NO: 4063797 - RNA, 14 nt, Vaccinia virus
uuaacuuacuuauu

SEQ ID NO: 4063798 - RNA, 17 nt, Vaccinia virus
uuaacuuccacauuaau

SEQ ID NO: 4063799 - RNA, 16 nt, Vaccinia virus
uuaacuuucaucuaau

SEQ ID NO: 4063800 - RNA, 22 nt, Vaccinia virus
uuaagagauuuagaaaacauua

SEQ ID NO: 4063801 - RNA, 21 nt, Vaccinia virus
uuaagccauaacauaauuuuc

SEQ ID NO: 4063802 - RNA, 21 nt, Vaccinia virus
uuaaguucaccaaacaacuuu

SEQ ID NO: 4063803 - RNA, 17 nt, Vaccinia virus
uuaauaaaguaugaaca

SEQ ID NO: 4063804 - RNA, 17 nt, Vaccinia virus
uuaauaaauguuuugau

SEQ ID NO: 4063805 - RNA, 22 nt, Vaccinia virus
uuaauaagaaugacuccuaugu

SEQ ID NO: 4063806 - RNA, 14 nt, Vaccinia virus
uuaauaauaauuca

SEQ ID NO: 4063807 - RNA, 14 nt, Vaccinia virus
uuaauaauacuauu

SEQ ID NO: 4063808 - RNA, 17 nt, Vaccinia virus
uuaauacguucauuaaa

SEQ ID NO: 4063809 - RNA, 20 nt, Vaccinia virus
uuaauacuacauauuuuuca

SEQ ID NO: 4063810 - RNA, 21 nt, Vaccinia virus
uuaauaguagucaguagacau

SEQ ID NO: 4063811 - RNA, 13 nt, Vaccinia virus
uuaaucauguaca

SEQ ID NO: 4063812 - RNA, 22 nt, Vaccinia virus
uuaauccaucguacaugguugg

SEQ ID NO: 4063813 - RNA, 18 nt, Vaccinia virus
uuaaucucaaaauauguu

SEQ ID NO: 4063814 - RNA, 17 nt, Vaccinia virus
uuaaucuuagaaaucaa

SEQ ID NO: 4063815 - RNA, 19 nt, Vaccinia virus
uuaaucuuggaaauuauuu

SEQ ID NO: 4063816 - RNA, 18 nt, Vaccinia virus
uuaaucuuuuuauuagua

SEQ ID NO: 4063817 - RNA, 16 nt, Vaccinia virus
uuaaugacaaacauuu

SEQ ID NO: 4063818 - RNA, 17 nt, Vaccinia virus
uuaaugacaaacauuuu

SEQ ID NO: 4063819 - RNA, 15 nt, Vaccinia virus
uuaaugauacaaaaa

SEQ ID NO: 4063820 - RNA, 21 nt, Vaccinia virus
uuaaugcuacagauauuauca

SEQ ID NO: 4063821 - RNA, 14 nt, Vaccinia virus
uuaauguauuauua

SEQ ID NO: 4063822 - RNA, 17 nt, Vaccinia virus
uuaauuaagauauuguu

SEQ ID NO: 4063823 - RNA, 16 nt, Vaccinia virus
uuaauuaguaacuguu

SEQ ID NO: 4063824 - RNA, 23 nt, Vaccinia virus
uuaauuauuguauuuauuauuua

SEQ ID NO: 4063825 - RNA, 22 nt, Vaccinia virus
uuaauuuccggaucuacauuuu

SEQ ID NO: 4063826 - RNA, 19 nt, Vaccinia virus
uuaauuuguacauucuuaa

SEQ ID NO: 4063827 - RNA, 22 nt, Vaccinia virus
uuaauuuuuaguuuauacuauu

SEQ ID NO: 4063828 - RNA, 20 nt, Vaccinia virus
uuacaaaugaguucugugua

SEQ ID NO: 4063829 - RNA, 15 nt, Vaccinia virus
uggcaauguuucaua

SEQ ID NO: 4063830 - RNA, 15 nt, Vaccinia virus
uggccaagaaaauag

SEQ ID NO: 4063831 - RNA, 15 nt, Vaccinia virus
uggccaauugucuuu

SEQ ID NO: 4063832 - RNA, 23 nt, Vaccinia virus
uggcugaaaucagagcucaucua

SEQ ID NO: 4063833 - RNA, 20 nt, Vaccinia virus
ugggaaaaacgaaauuaucg

SEQ ID NO: 4063834 - RNA, 16 nt, Vaccinia virus
ugggauaaaaauuaug

SEQ ID NO: 4063835 - RNA, 22 nt, Vaccinia virus
uggggaaauauggaagaaaguu

SEQ ID NO: 4063836 - RNA, 13 nt, Vaccinia virus
uggguuccauaac

SEQ ID NO: 4063837 - RNA, 17 nt, Vaccinia virus
ugguaaugaaauuauuc

SEQ ID NO: 4063838 - RNA, 20 nt, Vaccinia virus
ugguaauuaaauauaucaug

SEQ ID NO: 4063839 - RNA, 23 nt, Vaccinia virus
ugguacguaaccgaaucuuccca

SEQ ID NO: 4063840 - RNA, 19 nt, Vaccinia virus
ugguagauuuucaauuaug

SEQ ID NO: 4063841 - RNA, 22 nt, Vaccinia virus
ugguaguucuuccguggaauca

SEQ ID NO: 4063842 - RNA, 14 nt, Vaccinia virus
ugguauaucaacau

SEQ ID NO: 4063843 - RNA, 22 nt, Vaccinia virus
ugguauaucuggaaagaaaucu

SEQ ID NO: 4063844 - RNA, 14 nt, Vaccinia virus
ugguaucaacagau

SEQ ID NO: 4063845 - RNA, 15 nt, Vaccinia virus
ugguaucaacagaua

SEQ ID NO: 4063846 - RNA, 20 nt, Vaccinia virus
uggucaaccccuaagucuuu

SEQ ID NO: 4063847 - RNA, 17 nt, Vaccinia virus
uggucgauuauagaaau

SEQ ID NO: 4063848 - RNA, 14 nt, Vaccinia virus
ugguggaugauguc

SEQ ID NO: 4063849 - RNA, 13 nt, Vaccinia virus
ugguguaaaucua

SEQ ID NO: 4063850 - RNA, 17 nt, Vaccinia virus
ugguuguggaucuucua

SEQ ID NO: 4063851 - RNA, 19 nt, Vaccinia virus
ugguuguugauggaucugu

SEQ ID NO: 4063852 - RNA, 22 nt, Vaccinia virus
ugguuucgacucauuauaaugu

SEQ ID NO: 4063853 - RNA, 19 nt, Vaccinia virus
ugguuucuuucauuucagu

SEQ ID NO: 4063854 - RNA, 13 nt, Vaccinia virus
ugguuuucuaaau

SEQ ID NO: 4063855 - RNA, 15 nt, Vaccinia virus
uguaaaaaauauguu

SEQ ID NO: 4063856 - RNA, 20 nt, Vaccinia virus
uguaaaaacaaauuuguaca

SEQ ID NO: 4063857 - RNA, 16 nt, Vaccinia virus
uguaaaagcauauguu

SEQ ID NO: 4063858 - RNA, 23 nt, Vaccinia virus
uguaaacagauaugguguagcau

SEQ ID NO: 4063859 - RNA, 14 nt, Vaccinia virus
uguaacaaaguuuc

SEQ ID NO: 4063860 - RNA, 19 nt, Vaccinia virus
uguaaccgauaauaauguu

SEQ ID NO: 4063861 - RNA, 21 nt, Vaccinia virus
uguaaccgcguuaauguuugc

SEQ ID NO: 4063862 - RNA, 18 nt, Vaccinia virus
uguaacgaugaaaaccag

SEQ ID NO: 4063863 - RNA, 20 nt, Vaccinia virus
uguaauagugaaauuacauu

SEQ ID NO: 4063864 - RNA, 12 nt, Vaccinia virus
uguaauaucuua

SEQ ID NO: 4063865 - RNA, 15 nt, Vaccinia virus
uguaauauucaucau

SEQ ID NO: 4063866 - RNA, 19 nt, Vaccinia virus
uguaauuggaguaacuguu

SEQ ID NO: 4063867 - RNA, 14 nt, Vaccinia virus
uguacaccauagca

SEQ ID NO: 4063868 - RNA, 13 nt, Vaccinia virus
uguacauguaguu

SEQ ID NO: 4063869 - RNA, 16 nt, Vaccinia virus
uguacauuguuucaua

SEQ ID NO: 4063870 - RNA, 18 nt, Vaccinia virus
uguacccuguuuaacaug

SEQ ID NO: 4063871 - RNA, 16 nt, Vaccinia virus
uguaccggacacuaua

SEQ ID NO: 4063872 - RNA, 22 nt, Vaccinia virus
uguacucaugaaacguuuggaa

SEQ ID NO: 4063873 - RNA, 14 nt, Vaccinia virus
uguacuucuguaca

SEQ ID NO: 4063874 - RNA, 15 nt, Vaccinia virus
uguagaaaacaacaa

SEQ ID NO: 4063875 - RNA, 16 nt, Vaccinia virus
uguagaacguaaauua

SEQ ID NO: 4063876 - RNA, 13 nt, Vaccinia virus
uguagaacucaug

SEQ ID NO: 4063877 - RNA, 22 nt, Vaccinia virus
uguagaacucaugaaucuaaaa

SEQ ID NO: 4063878 - RNA, 17 nt, Vaccinia virus
uguagaaucagcaucca

SEQ ID NO: 4063879 - RNA, 18 nt, Vaccinia virus
uguagcucucccagauuu

SEQ ID NO: 4063880 - RNA, 13 nt, Vaccinia virus
uguaguuuucaca

SEQ ID NO: 4063881 - RNA, 13 nt, Vaccinia virus
uguauacuguaug

SEQ ID NO: 4063882 - RNA, 18 nt, Vaccinia virus
uguauauuuaucucuuca

SEQ ID NO: 4063883 - RNA, 22 nt, Vaccinia virus
uguauccgucaaucuaauauua

SEQ ID NO: 4063884 - RNA, 17 nt, Vaccinia virus
uguaucgaaaaacuuua

SEQ ID NO: 4063885 - RNA, 17 nt, Vaccinia virus
uguauggcguuuacuau

SEQ ID NO: 4063886 - RNA, 19 nt, Vaccinia virus
uguaugugugauauugaua

SEQ ID NO: 4063887 - RNA, 22 nt, Vaccinia virus
uguauuaaagauauuguuacac

SEQ ID NO: 4063888 - RNA, 22 nt, Vaccinia virus
uguauucaacaugcuuuucuau

SEQ ID NO: 4063889 - RNA, 19 nt, Vaccinia virus
uguauucgucuuucugaau

SEQ ID NO: 4063890 - RNA, 14 nt, Vaccinia virus
ugucaaaaauugua

SEQ ID NO: 4063891 - RNA, 18 nt, Vaccinia virus
ugucaaagguauaugaua

SEQ ID NO: 4063892 - RNA, 19 nt, Vaccinia virus
ugucaacaaaaaugugaua

SEQ ID NO: 4063893 - RNA, 16 nt, Vaccinia virus
ugucaauugauucuua

SEQ ID NO: 4063894 - RNA, 18 nt, Vaccinia virus
ugucaucaguuauguacg

SEQ ID NO: 4063895 - RNA, 15 nt, Vaccinia virus
ugucaugaauacguu

SEQ ID NO: 4063896 - RNA, 18 nt, Vaccinia virus
uguccaugcggauacuuu

SEQ ID NO: 4063897 - RNA, 21 nt, Vaccinia virus
ugucuaauaauagcguuuucu

SEQ ID NO: 4063898 - RNA, 18 nt, Vaccinia virus
ugucuacuccaaugacug

SEQ ID NO: 4063899 - RNA, 20 nt, Vaccinia virus
ugucucgcauaaacauuacu

SEQ ID NO: 4063900 - RNA, 20 nt, Vaccinia virus
uauagcauuguuauguauuu

SEQ ID NO: 4063901 - RNA, 18 nt, Vaccinia virus
uauaggaaacuauaaagu

SEQ ID NO: 4063902 - RNA, 18 nt, Vaccinia virus
uauaggaccacuagcaaa

SEQ ID NO: 4063903 - RNA, 14 nt, Vaccinia virus
uauaguauuaacuu

SEQ ID NO: 4063904 - RNA, 14 nt, Vaccinia virus
uauaguuaacauuu

SEQ ID NO: 4063905 - RNA, 20 nt, Vaccinia virus
uauaguucaaauuaagcauu

SEQ ID NO: 4063906 - RNA, 23 nt, Vaccinia virus
uauauaaaaucucguuacauguu

SEQ ID NO: 4063907 - RNA, 24 nt, Vaccinia virus
uauauaaaguuggaauuugacuau

SEQ ID NO: 4063908 - RNA, 19 nt, Vaccinia virus
uauauaaucagaguuuuua

SEQ ID NO: 4063909 - RNA, 17 nt, Vaccinia virus
uauauaccgauuucaca

SEQ ID NO: 4063910 - RNA, 18 nt, Vaccinia virus
uauauaccgauuucacaa

SEQ ID NO: 4063911 - RNA, 21 nt, Vaccinia virus
uauauagagccaagacgaaca

SEQ ID NO: 4063912 - RNA, 22 nt, Vaccinia virus
uauauagauaauucuaauugcu

SEQ ID NO: 4063913 - RNA, 23 nt, Vaccinia virus
uauauagccgucgccaauugugu

SEQ ID NO: 4063914 - RNA, 21 nt, Vaccinia virus
uauauaggccgaaucuaugau

SEQ ID NO: 4063915 - RNA, 19 nt, Vaccinia virus
uauauagguaauacauaua

SEQ ID NO: 4063916 - RNA, 15 nt, Vaccinia virus
uauauaguuuggauu

SEQ ID NO: 4063917 - RNA, 16 nt, Vaccinia virus
uauauauccuuuugua

SEQ ID NO: 4063918 - RNA, 19 nt, Vaccinia virus
uauauaucuaucuauuaca

SEQ ID NO: 4063919 - RNA, 11 nt, Vaccinia virus
uauauaucuuu

SEQ ID NO: 4063920 - RNA, 21 nt, Vaccinia virus
uauaucauccauguacuugcu

SEQ ID NO: 4063921 - RNA, 14 nt, Vaccinia virus
uauauccaauguau

SEQ ID NO: 4063922 - RNA, 18 nt, Vaccinia virus
uauauccguucuuaacuu

SEQ ID NO: 4063923 - RNA, 16 nt, Vaccinia virus
uauauccucggaugau

SEQ ID NO: 4063924 - RNA, 19 nt, Vaccinia virus
uauaucugaguaugaugau

SEQ ID NO: 4063925 - RNA, 20 nt, Vaccinia virus
uauaugaauaugauuucaga

SEQ ID NO: 4063926 - RNA, 15 nt, Vaccinia virus
uauaugccuguacuu

SEQ ID NO: 4063927 - RNA, 20 nt, Vaccinia virus
uauauuaucaaaauuuggaa

SEQ ID NO: 4063928 - RNA, 12 nt, Vaccinia virus
uauauuauuaca

SEQ ID NO: 4063929 - RNA, 10 nt, Vaccinia virus
uauauucucu

SEQ ID NO: 4063930 - RNA, 23 nt, Vaccinia virus
uauauugcauggaaucauagaug

SEQ ID NO: 4063931 - RNA, 14 nt, Vaccinia virus
uauauuguuucaua

SEQ ID NO: 4063932 - RNA, 17 nt, Vaccinia virus
uauauuuucucaacaag

SEQ ID NO: 4063933 - RNA, 17 nt, Vaccinia virus
uaucaacagauagcuug

SEQ ID NO: 4063934 - RNA, 20 nt, Vaccinia virus
uaucaagauguaaaauacuu

SEQ ID NO: 4063935 - RNA, 21 nt, Vaccinia virus
uaucacaacaucuauaaaagu

SEQ ID NO: 4063936 - RNA, 16 nt, Vaccinia virus
uaucacagucuguuuu

SEQ ID NO: 4063937 - RNA, 12 nt, Vaccinia virus
uaucacauauca

SEQ ID NO: 4063938 - RNA, 14 nt, Vaccinia virus
uaucauaaaugaaa

SEQ ID NO: 4063939 - RNA, 23 nt, Vaccinia virus
uaucaucgauaguauaauuauau

SEQ ID NO: 4063940 - RNA, 18 nt, Vaccinia virus
uaucaucgguucaacgau

SEQ ID NO: 4063941 - RNA, 20 nt, Vaccinia virus
uaucauuauaacucuagaau

SEQ ID NO: 4063942 - RNA, 22 nt, Vaccinia virus
uauccaaggacaaggaugaaaa

SEQ ID NO: 4063943 - RNA, 14 nt, Vaccinia virus
uauccaaucuuauu

SEQ ID NO: 4063944 - RNA, 14 nt, Vaccinia virus
uauccaauguauuu

SEQ ID NO: 4063945 - RNA, 18 nt, Vaccinia virus
uauccagauggaguggaa

SEQ ID NO: 4063946 - RNA, 15 nt, Vaccinia virus
uauccaugaugguca

SEQ ID NO: 4063947 - RNA, 16 nt, Vaccinia virus
uauccauuuagcaaaa

SEQ ID NO: 4063948 - RNA, 15 nt, Vaccinia virus
uauccgcgacaaauu

SEQ ID NO: 4063949 - RNA, 14 nt, Vaccinia virus
uauccucaaacauc

SEQ ID NO: 4063950 - RNA, 15 nt, Vaccinia virus
uauccucaaacaucc

SEQ ID NO: 4063951 - RNA, 21 nt, Vaccinia virus
uaucgacaauugcguggagau

SEQ ID NO: 4063952 - RNA, 19 nt, Vaccinia virus
uaucgauaauuauuucuac

SEQ ID NO: 4063953 - RNA, 16 nt, Vaccinia virus
uaucgcauauuuauau

SEQ ID NO: 4063954 - RNA, 22 nt, Vaccinia virus
uaucggacacaagaucuguaaa

SEQ ID NO: 4063955 - RNA, 16 nt, Vaccinia virus
uaucggaggaauuaag

SEQ ID NO: 4063956 - RNA, 22 nt, Vaccinia virus
uaucguauauuaaguugggaga

SEQ ID NO: 4063957 - RNA, 20 nt, Vaccinia virus
uaucguauuggauucugaaa

SEQ ID NO: 4063958 - RNA, 23 nt, Vaccinia virus
uaucuaaauuucuaguacuugua

SEQ ID NO: 4063959 - RNA, 17 nt, Vaccinia virus
uaucuacacaaauagaa

SEQ ID NO: 4063960 - RNA, 14 nt, Vaccinia virus
uaucuacacaugua

SEQ ID NO: 4063961 - RNA, 16 nt, Vaccinia virus
uaucuauaauaucuua

SEQ ID NO: 4063962 - RNA, 18 nt, Vaccinia virus
uaucuaugcuuacuguau

SEQ ID NO: 4063963 - RNA, 14 nt, Vaccinia virus
uaucuauguuuuua

SEQ ID NO: 4063964 - RNA, 19 nt, Vaccinia virus
uaucucaaaaaauaauaag

SEQ ID NO: 4063965 - RNA, 12 nt, Vaccinia virus
uaucucaaugag

SEQ ID NO: 4063966 - RNA, 21 nt, Vaccinia virus
uaucucacccucuuggaucau

SEQ ID NO: 4063967 - RNA, 23 nt, Vaccinia virus
uaucuccacucucgauaaaucua

SEQ ID NO: 4063968 - RNA, 14 nt, Vaccinia virus
uaucuccaguauuu

SEQ ID NO: 4063969 - RNA, 14 nt, Vaccinia virus
uaucucuugucuga

SEQ ID NO: 4063970 - RNA, 14 nt, Vaccinia virus
uaucugacauaaac

SEQ ID NO: 4063971 - RNA, 16 nt, Vaccinia virus
uaucugguucuaaaag

SEQ ID NO: 4063972 - RNA, 21 nt, Vaccinia virus
uaucuuauguauauguuugua

SEQ ID NO: 4063973 - RNA, 13 nt, Vaccinia virus
uaucuucuaaaaa

SEQ ID NO: 4063974 - RNA, 20 nt, Vaccinia virus
uaucuugaguacgaugacuu

SEQ ID NO: 4063975 - RNA, 13 nt, Vaccinia virus
uaucuuguuacaa

SEQ ID NO: 4063976 - RNA, 21 nt, Vaccinia virus
uaucuuguuuagaaaaaugcu

SEQ ID NO: 4063977 - RNA, 15 nt, Vaccinia virus
uaucuuuaacauaag

SEQ ID NO: 4063978 - RNA, 22 nt, Vaccinia virus
uaucuuuaacuaagucaaugau

SEQ ID NO: 4063979 - RNA, 21 nt, Vaccinia virus
uaucuuuuagagguucccaau

SEQ ID NO: 4063980 - RNA, 13 nt, Vaccinia virus
uaugaaaauagca

SEQ ID NO: 4063981 - RNA, 17 nt, Vaccinia virus
uaugaacgaaauagcua

SEQ ID NO: 4063982 - RNA, 13 nt, Vaccinia virus
uaugaaucuggau

SEQ ID NO: 4063983 - RNA, 12 nt, Vaccinia virus
uaugaaugacuc

SEQ ID NO: 4063984 - RNA, 14 nt, Vaccinia virus
uaugaaugaugaua

SEQ ID NO: 4063985 - RNA, 19 nt, Vaccinia virus
uaugacgacuucaaucaaa

SEQ ID NO: 4063986 - RNA, 18 nt, Vaccinia virus
uaugacucugauuucuug

SEQ ID NO: 4063987 - RNA, 22 nt, Vaccinia virus
uaugagggaaaagauucucauu

SEQ ID NO: 4063988 - RNA, 20 nt, Vaccinia virus
uaugaucaauucuggauuau

SEQ ID NO: 4063989 - RNA, 20 nt, Vaccinia virus
uaugauccucucucauugau

SEQ ID NO: 4063990 - RNA, 22 nt, Vaccinia virus
uaugaugaccggcgauaucaua

SEQ ID NO: 4063991 - RNA, 20 nt, Vaccinia virus
uaugaugcaaagauguuuaa

SEQ ID NO: 4063992 - RNA, 15 nt, Vaccinia virus
uaugauuuugaugau

SEQ ID NO: 4063993 - RNA, 15 nt, Vaccinia virus
uaugcaaucaauggu

SEQ ID NO: 4063994 - RNA, 23 nt, Vaccinia virus
uaugcuauaaaugaauucucauu

SEQ ID NO: 4063995 - RNA, 14 nt, Vaccinia virus
uaugcucuagauac

SEQ ID NO: 4063996 - RNA, 23 nt, Vaccinia virus
uaugcuuuuauuuuuggaaugau

SEQ ID NO: 4063997 - RNA, 13 nt, Vaccinia virus
uauggaagaaagu

SEQ ID NO: 4063998 - RNA, 19 nt, Vaccinia virus
uauggaagaagaaauaaag

SEQ ID NO: 4063999 - RNA, 18 nt, Vaccinia virus
uauggagaaccaaucauu

SEQ ID NO: 4064000 - RNA, 15 nt, Vaccinia virus
uauggagcaaacauu

SEQ ID NO: 4064001 - RNA, 18 nt, Vaccinia virus
uauggagcgaguguuaca

SEQ ID NO: 4064002 - RNA, 20 nt, Vaccinia virus
uauggaucuccaucgaugau

SEQ ID NO: 4064003 - RNA, 18 nt, Vaccinia virus
uauggccauagaggaugu

SEQ ID NO: 4064004 - RNA, 21 nt, Vaccinia virus
uauggguccaucuaugagaaa

SEQ ID NO: 4064005 - RNA, 18 nt, Vaccinia virus
uaugguucgcucaaaaau

SEQ ID NO: 4064006 - RNA, 19 nt, Vaccinia virus
uauguaaaacauuugcauu

SEQ ID NO: 4064007 - RNA, 19 nt, Vaccinia virus
uauguaaucauuguccaga

SEQ ID NO: 4064008 - RNA, 21 nt, Vaccinia virus
uauguacaacagugauaugug

SEQ ID NO: 4064009 - RNA, 20 nt, Vaccinia virus
uauguauuccuuuacgugau

SEQ ID NO: 4064010 - RNA, 15 nt, Vaccinia virus
uaugucguuaucauc

SEQ ID NO: 4064011 - RNA, 17 nt, Vaccinia virus
uauguugaaucuaaacu

SEQ ID NO: 4064012 - RNA, 19 nt, Vaccinia virus
uauguugugauucuagaau

SEQ ID NO: 4064013 - RNA, 14 nt, Vaccinia virus
uauguuuguaaaau

SEQ ID NO: 4064014 - RNA, 16 nt, Vaccinia virus
uauuaaaacuaucaau

SEQ ID NO: 4064015 - RNA, 14 nt, Vaccinia virus
uauuaaaauuauuu

SEQ ID NO: 4064016 - RNA, 22 nt, Vaccinia virus
uauuaaacaaggacauuguaaa

SEQ ID NO: 4064017 - RNA, 21 nt, Vaccinia virus
uauuaaagauuguuuaagaag

SEQ ID NO: 4064018 - RNA, 23 nt, Vaccinia virus
uauuaaaggaguaugucaugaau

SEQ ID NO: 4064019 - RNA, 19 nt, Vaccinia virus
uauuaaaugcgucaaucau

SEQ ID NO: 4064020 - RNA, 14 nt, Vaccinia virus
uauuaaccaugaaa

SEQ ID NO: 4064021 - RNA, 21 nt, Vaccinia virus
uauuaacgugaaacguaguau

SEQ ID NO: 4064022 - RNA, 17 nt, Vaccinia virus
uauuaacuaucuguaaa

SEQ ID NO: 4064023 - RNA, 22 nt, Vaccinia virus
uauuaauacaggaucuagcaaa

SEQ ID NO: 4064024 - RNA, 22 nt, Vaccinia virus
uauuaauccacuauauauucua

SEQ ID NO: 4064025 - RNA, 21 nt, Vaccinia virus
uauuaaugauacaaaaacgaa

SEQ ID NO: 4064026 - RNA, 14 nt, Vaccinia virus
uacgacuguuacgu

SEQ ID NO: 4064027 - RNA, 16 nt, Vaccinia virus
uacgaggauucaaaaa

SEQ ID NO: 4064028 - RNA, 22 nt, Vaccinia virus
uacgauauuauuacacauaaac

SEQ ID NO: 4064029 - RNA, 16 nt, Vaccinia virus
uacgauguuguaaagu

SEQ ID NO: 4064030 - RNA, 23 nt, Vaccinia virus
uacgcauuuuagcagucuaacau

SEQ ID NO: 4064031 - RNA, 16 nt, Vaccinia virus
uacgcauuuucaaaau

SEQ ID NO: 4064032 - RNA, 19 nt, Vaccinia virus
uacgccuuuaaauccucua

SEQ ID NO: 4064033 - RNA, 13 nt, Vaccinia virus
uacgcugauaaau

SEQ ID NO: 4064034 - RNA, 13 nt, Vaccinia virus
uacggaauuauug

SEQ ID NO: 4064035 - RNA, 13 nt, Vaccinia virus
uacggccauccag

SEQ ID NO: 4064036 - RNA, 15 nt, Vaccinia virus
uacguaaaaaagaua

SEQ ID NO: 4064037 - RNA, 17 nt, Vaccinia virus
uacguauuauauaugua

SEQ ID NO: 4064038 - RNA, 18 nt, Vaccinia virus
uacguguaaucagucucu

SEQ ID NO: 4064039 - RNA, 15 nt, Vaccinia virus
uacguucagauuuca

SEQ ID NO: 4064040 - RNA, 14 nt, Vaccinia virus
uacguuuacaugug

SEQ ID NO: 4064041 - RNA, 20 nt, Vaccinia virus
uacuaaaagaucaaccaaaa

SEQ ID NO: 4064042 - RNA, 14 nt, Vaccinia virus
uacuaaaauuccua

SEQ ID NO: 4064043 - RNA, 14 nt, Vaccinia virus
uacuaaaggaugag

SEQ ID NO: 4064044 - RNA, 19 nt, Vaccinia virus
uacuaagcaaguacaugga

SEQ ID NO: 4064045 - RNA, 20 nt, Vaccinia virus
uacuaaggccacuacucaaa

SEQ ID NO: 4064046 - RNA, 19 nt, Vaccinia virus
uacuaauuacuaaaucugu

SEQ ID NO: 4064047 - RNA, 23 nt, Vaccinia virus
uacuacaauacgguuuaccgaaa

SEQ ID NO: 4064048 - RNA, 13 nt, Vaccinia virus
uacuacaauuugu

SEQ ID NO: 4064049 - RNA, 14 nt, Vaccinia virus
uacuacguacugua

SEQ ID NO: 4064050 - RNA, 15 nt, Vaccinia virus
uacuacuucauuaau

SEQ ID NO: 4064051 - RNA, 14 nt, Vaccinia virus
uacuagaguacuua

SEQ ID NO: 4064052 - RNA, 20 nt, Vaccinia virus
uacuaguggauguacaugua

SEQ ID NO: 4064053 - RNA, 15 nt, Vaccinia virus
uacuaguuccaacau

SEQ ID NO: 4064054 - RNA, 19 nt, Vaccinia virus
uacuaguuuuacuaucaua

SEQ ID NO: 4064055 - RNA, 17 nt, Vaccinia virus
uacuauaauaguacuag

SEQ ID NO: 4064056 - RNA, 13 nt, Vaccinia virus
uacuauaauauua

SEQ ID NO: 4064057 - RNA, 15 nt, Vaccinia virus
uacuauauauaaaau

SEQ ID NO: 4064058 - RNA, 21 nt, Vaccinia virus
uacuauauccggcaauauuua

SEQ ID NO: 4064059 - RNA, 20 nt, Vaccinia virus
uacuaucuggaucuacacau

SEQ ID NO: 4064060 - RNA, 15 nt, Vaccinia virus
uacuaucuuuaacau

SEQ ID NO: 4064061 - RNA, 16 nt, Vaccinia virus
uacuaucuuuaacaua

SEQ ID NO: 4064062 - RNA, 23 nt, Vaccinia virus
uacuaugaauaucuucuaugaaa

SEQ ID NO: 4064063 - RNA, 17 nt, Vaccinia virus
uacuauuuuuuacauua

SEQ ID NO: 4064064 - RNA, 20 nt, Vaccinia virus
uacucaguugaacagaugau

SEQ ID NO: 4064065 - RNA, 22 nt, Vaccinia virus
uacuccauuauauauuccuuga

SEQ ID NO: 4064066 - RNA, 13 nt, Vaccinia virus
uacuccguuuuau

SEQ ID NO: 4064067 - RNA, 15 nt, Vaccinia virus
uacucuaaaucgcuu

SEQ ID NO: 4064068 - RNA, 20 nt, Vaccinia virus
uacucuaaucuuuaauagau

SEQ ID NO: 4064069 - RNA, 23 nt, Vaccinia virus
uacucuagguaacaaacaaacuc

SEQ ID NO: 4064070 - RNA, 16 nt, Vaccinia virus
uacucuaguaaaguca

SEQ ID NO: 4064071 - RNA, 22 nt, Vaccinia virus
uacucuccgaguguaaauauua

SEQ ID NO: 4064072 - RNA, 13 nt, Vaccinia virus
uacugaauuauua

SEQ ID NO: 4064073 - RNA, 20 nt, Vaccinia virus
uacugauaacaaaauauuag

SEQ ID NO: 4064074 - RNA, 13 nt, Vaccinia virus
uacugcaaaacuc

SEQ ID NO: 4064075 - RNA, 16 nt, Vaccinia virus
uacugcugauaaugau

SEQ ID NO: 4064076 - RNA, 18 nt, Vaccinia virus
uacuguaaacacauaucc

SEQ ID NO: 4064077 - RNA, 14 nt, Vaccinia virus
uacugucuuuugug

SEQ ID NO: 4064078 - RNA, 14 nt, Vaccinia virus
uacuguucaaacau

SEQ ID NO: 4064079 - RNA, 19 nt, Vaccinia virus
uacuguugaguaaaucagu

SEQ ID NO: 4064080 - RNA, 17 nt, Vaccinia virus
uacuguuuagaugauau

SEQ ID NO: 4064081 - RNA, 21 nt, Vaccinia virus
uacuuaaagauagaaaugaau

SEQ ID NO: 4064082 - RNA, 17 nt, Vaccinia virus
uacuuaacaucuaaaaa

SEQ ID NO: 4064083 - RNA, 11 nt, Vaccinia virus
uacuuaaugaa

SEQ ID NO: 4064084 - RNA, 23 nt, Vaccinia virus
uacuuacggcuacggcauuagau

SEQ ID NO: 4064085 - RNA, 20 nt, Vaccinia virus
uacuuagucuguacaaaagu

SEQ ID NO: 4064086 - RNA, 23 nt, Vaccinia virus
uacuuccaucaacauuguuucaa

SEQ ID NO: 4064087 - RNA, 20 nt, Vaccinia virus
uacuuguuaguaguuagaua

SEQ ID NO: 4064088 - RNA, 19 nt, Vaccinia virus
uacuuucaaugagauaaau

SEQ ID NO: 4064089 - RNA, 15 nt, Vaccinia virus
uacuuucgguuucau

SEQ ID NO: 4064090 - RNA, 16 nt, Vaccinia virus
uacuuucgguuucaua

SEQ ID NO: 4064091 - RNA, 15 nt, Vaccinia virus
uacuuugacaaaugu

SEQ ID NO: 4064092 - RNA, 16 nt, Vaccinia virus
uacuuuuacgagaaau

SEQ ID NO: 4064093 - RNA, 18 nt, Vaccinia virus
uagaaaaaacauguggua

SEQ ID NO: 4064094 - RNA, 20 nt, Vaccinia virus
uagaaaaaauagaacuuauc

SEQ ID NO: 4064095 - RNA, 22 nt, Vaccinia virus
uagaaaacagagauaguaaaua

SEQ ID NO: 4064096 - RNA, 18 nt, Vaccinia virus
uagaaaaugauucacaau

SEQ ID NO: 4064097 - RNA, 15 nt, Vaccinia virus
uagaaacauauucua

SEQ ID NO: 4064098 - RNA, 16 nt, Vaccinia virus
uagaaacaugaaacca

SEQ ID NO: 4064099 - RNA, 17 nt, Vaccinia virus
uagaaacuucaaagauu

SEQ ID NO: 4064100 - RNA, 18 nt, Vaccinia virus
uagaaauaaaaauuauua

SEQ ID NO: 4064101 - RNA, 14 nt, Vaccinia virus
uagaaaucaacgau

SEQ ID NO: 4064102 - RNA, 20 nt, Vaccinia virus
uagaaaucaacuuauucuug

SEQ ID NO: 4064103 - RNA, 20 nt, Vaccinia virus
uagaaauucaucaauaucca

SEQ ID NO: 4064104 - RNA, 17 nt, Vaccinia virus
uagaacaaaauacauaa

SEQ ID NO: 4064105 - RNA, 15 nt, Vaccinia virus
uagaacaauguguga

SEQ ID NO: 4064106 - RNA, 18 nt, Vaccinia virus
uagaacugccauauguug

SEQ ID NO: 4064107 - RNA, 22 nt, Vaccinia virus
uagaacugccauauguuggaga

SEQ ID NO: 4064108 - RNA, 19 nt, Vaccinia virus
uagaacugcuaauggaugu

SEQ ID NO: 4064109 - RNA, 17 nt, Vaccinia virus
uagaacuuuuaauuuug

SEQ ID NO: 4064110 - RNA, 17 nt, Vaccinia virus
uagaagauaucauaaau

SEQ ID NO: 4064111 - RNA, 20 nt, Vaccinia virus
uagaagaucgucgucaaagu

SEQ ID NO: 4064112 - RNA, 18 nt, Vaccinia virus
uagaauaagaacuauaaa

SEQ ID NO: 4064113 - RNA, 13 nt, Vaccinia virus
uagaauacuaaag

SEQ ID NO: 4064114 - RNA, 16 nt, Vaccinia virus
uagaauauauguaugu

SEQ ID NO: 4064115 - RNA, 18 nt, Vaccinia virus
uagaaugaagauaucauu

SEQ ID NO: 4064116 - RNA, 18 nt, Vaccinia virus
uagaaugcucuuaaauaa

SEQ ID NO: 4064117 - RNA, 19 nt, Vaccinia virus
uagaaugugauaauuauuu

SEQ ID NO: 4064118 - RNA, 22 nt, Vaccinia virus
uagaauuuauagacgacucauu

SEQ ID NO: 4064119 - RNA, 22 nt, Vaccinia virus
uagacaauacuuuuacggaaaa

SEQ ID NO: 4064120 - RNA, 16 nt, Vaccinia virus
uagacauagauauucu

SEQ ID NO: 4064121 - RNA, 13 nt, Vaccinia virus
uagacguauaagu

SEQ ID NO: 4064122 - RNA, 19 nt, Vaccinia virus
uagacuuaucgacaucuug

SEQ ID NO: 4064123 - RNA, 19 nt, Vaccinia virus
uagagaauuaauaucuauu

SEQ ID NO: 4064124 - RNA, 14 nt, Vaccinia virus
uagagagauucauu

SEQ ID NO: 4064125 - RNA, 21 nt, Vaccinia virus
uagagaggcugcugaaaauaa

SEQ ID NO: 4064126 - RNA, 22 nt, Vaccinia virus
uagagauaaaacaaguuuucau

SEQ ID NO: 4064127 - RNA, 19 nt, Vaccinia virus
uagagauacuuucagucug

SEQ ID NO: 4064128 - RNA, 14 nt, Vaccinia virus
uagagaucuaaagc

SEQ ID NO: 4064129 - RNA, 22 nt, Vaccinia virus
uagagccugugaaugcaaucaa

SEQ ID NO: 4064130 - RNA, 23 nt, Vaccinia virus
uagaggagacauuagaaucauug

SEQ ID NO: 4064131 - RNA, 13 nt, Vaccinia virus
uagaggucuaagu

SEQ ID NO: 4064132 - RNA, 16 nt, Vaccinia virus
uagaguaucguugaga

SEQ ID NO: 4064133 - RNA, 19 nt, Vaccinia virus
uagagugagucuagaauuc

SEQ ID NO: 4064134 - RNA, 22 nt, Vaccinia virus
uagauaacggacaacaacuauc

SEQ ID NO: 4064135 - RNA, 13 nt, Vaccinia virus
uagauaauucuaa

SEQ ID NO: 4064136 - RNA, 20 nt, Vaccinia virus
uagauacauuggccguaaua

SEQ ID NO: 4064137 - RNA, 23 nt, Vaccinia virus
uagauaguuuuuuugagccauau

SEQ ID NO: 4064138 - RNA, 16 nt, Vaccinia virus
uagauauaacuucugg

SEQ ID NO: 4064139 - RNA, 13 nt, Vaccinia virus
uagauauagauuu

SEQ ID NO: 4064140 - RNA, 20 nt, Vaccinia virus
uagauaucaaauccaaugga

SEQ ID NO: 4064141 - RNA, 17 nt, Vaccinia virus
uagauauccuuuuucau

SEQ ID NO: 4064142 - RNA, 14 nt, Vaccinia virus
uagauauuaaacaa

SEQ ID NO: 4064143 - RNA, 19 nt, Vaccinia virus
uagauccucauaaguguau

SEQ ID NO: 4064144 - RNA, 23 nt, Vaccinia virus
uagaucuuuacacaaauaauuac

SEQ ID NO: 4064145 - RNA, 14 nt, Vaccinia virus
uagaugaauuauua

SEQ ID NO: 4064146 - RNA, 16 nt, Vaccinia virus
uagaugaggauagcaa

SEQ ID NO: 4064147 - RNA, 16 nt, Vaccinia virus
uagaugcgucuagaag

SEQ ID NO: 4064148 - RNA, 15 nt, Vaccinia virus
uagauguaaugguaa

SEQ ID NO: 4064149 - RNA, 15 nt, Vaccinia virus
uagauguguauacau

SEQ ID NO: 4064150 - RNA, 14 nt, Vaccinia virus
uagauuguuuucag

SEQ ID NO: 4064151 - RNA, 17 nt, Vaccinia virus
uagauuuauaauacuuu

SEQ ID NO: 4064152 - RNA, 21 nt, Vaccinia virus
uagauuucauucagaggaugu

SEQ ID NO: 4064153 - RNA, 17 nt, Vaccinia virus
ggaugaguuaauguaua

SEQ ID NO: 4064154 - RNA, 14 nt, Vaccinia virus
ggauggacacauuc

SEQ ID NO: 4064155 - RNA, 18 nt, Vaccinia virus
ggauuaauauauguuaua

SEQ ID NO: 4064156 - RNA, 17 nt, Vaccinia virus
ggauuacaagaaauaug

SEQ ID NO: 4064157 - RNA, 18 nt, Vaccinia virus
ggauuaucaaaucuuuaa

SEQ ID NO: 4064158 - RNA, 21 nt, Vaccinia virus
ggauucauccuuaaauguuuu

SEQ ID NO: 4064159 - RNA, 22 nt, Vaccinia virus
ggauucauuaauaucuuuauaa

SEQ ID NO: 4064160 - RNA, 19 nt, Vaccinia virus
ggauucuuugcguaucuca

SEQ ID NO: 4064161 - RNA, 18 nt, Vaccinia virus
ggauuuggucauaauaga

SEQ ID NO: 4064162 - RNA, 13 nt, Vaccinia virus
ggauuuucuagau

SEQ ID NO: 4064163 - RNA, 19 nt, Vaccinia virus
ggcaauaacuaaaaaugua

SEQ ID NO: 4064164 - RNA, 21 nt, Vaccinia virus
ggcaauaauugcgaauguuuu

SEQ ID NO: 4064165 - RNA, 16 nt, Vaccinia virus
ggcaauuguagauaua

SEQ ID NO: 4064166 - RNA, 13 nt, Vaccinia virus
ggccaaaaugaua

SEQ ID NO: 4064167 - RNA, 17 nt, Vaccinia virus
ggccuaaagaauaucuu

SEQ ID NO: 4064168 - RNA, 19 nt, Vaccinia virus
ggcuacggcagauauaccu

SEQ ID NO: 4064169 - RNA, 18 nt, Vaccinia virus
ggcuagucaagaugauga

SEQ ID NO: 4064170 - RNA, 19 nt, Vaccinia virus
ggcuugcauguauuaaaga

SEQ ID NO: 4064171 - RNA, 21 nt, Vaccinia virus
ggggaaaaauuauaauguuuc

SEQ ID NO: 4064172 - RNA, 17 nt, Vaccinia virus
ggguuaaauuugaacaa

SEQ ID NO: 4064173 - RNA, 18 nt, Vaccinia virus
gguaaauguuuuuaucau

SEQ ID NO: 4064174 - RNA, 14 nt, Vaccinia virus
gguaaguucauuau

SEQ ID NO: 4064175 - RNA, 15 nt, Vaccinia virus
gguacaacauuccaa

SEQ ID NO: 4064176 - RNA, 17 nt, Vaccinia virus
gguacauagauuaucca

SEQ ID NO: 4064177 - RNA, 14 nt, Vaccinia virus
gguagagaaugaua

SEQ ID NO: 4064178 - RNA, 17 nt, Vaccinia virus
ggucccuauuguuacag

SEQ ID NO: 4064179 - RNA, 15 nt, Vaccinia virus
gguccuauugcuucc

SEQ ID NO: 4064180 - RNA, 14 nt, Vaccinia virus
ggucgaugucaaua

SEQ ID NO: 4064181 - RNA, 18 nt, Vaccinia virus
ggucuguguuacauaucu

SEQ ID NO: 4064182 - RNA, 16 nt, Vaccinia virus
ggugacaugugugaua

SEQ ID NO: 4064183 - RNA, 16 nt, Vaccinia virus
ggugagaacaugagac

SEQ ID NO: 4064184 - RNA, 16 nt, Vaccinia virus
uucacagaaacacuag

SEQ ID NO: 4064185 - RNA, 23 nt, Vaccinia virus
uucacagauagaucauuuugaac

SEQ ID NO: 4064186 - RNA, 13 nt, Vaccinia virus
uucacucauauga

SEQ ID NO: 4064187 - RNA, 15 nt, Vaccinia virus
uucagaaaauaaucc

SEQ ID NO: 4064188 - RNA, 21 nt, Vaccinia virus
uucagaaaguaauucauuaau

SEQ ID NO: 4064189 - RNA, 20 nt, Vaccinia virus
uucagaauuaauagauauau

SEQ ID NO: 4064190 - RNA, 20 nt, Vaccinia virus
uucagauauaaaaaucuguu

SEQ ID NO: 4064191 - RNA, 18 nt, Vaccinia virus
uucagcggauccuguauu

SEQ ID NO: 4064192 - RNA, 13 nt, Vaccinia virus
uucaggaacauaa

SEQ ID NO: 4064193 - RNA, 17 nt, Vaccinia virus
uucaguuucucaucuuu

SEQ ID NO: 4064194 - RNA, 16 nt, Vaccinia virus
uucauaaaaaccaucg

SEQ ID NO: 4064195 - RNA, 21 nt, Vaccinia virus
uucauaauuguuagcuguuuu

SEQ ID NO: 4064196 - RNA, 16 nt, Vaccinia virus
uucauauccuacugua

SEQ ID NO: 4064197 - RNA, 18 nt, Vaccinia virus
uucauauuaaacauacug

SEQ ID NO: 4064198 - RNA, 21 nt, Vaccinia virus
uucaucagauuauuuaacaau

SEQ ID NO: 4064199 - RNA, 13 nt, Vaccinia virus
uucaucauauuca

SEQ ID NO: 4064200 - RNA, 21 nt, Vaccinia virus
uucaucauauucaucaucaau

SEQ ID NO: 4064201 - RNA, 18 nt, Vaccinia virus
uucaucgcuuucuagaau

SEQ ID NO: 4064202 - RNA, 18 nt, Vaccinia virus
uucaucggcuuuaacaau

SEQ ID NO: 4064203 - RNA, 13 nt, Vaccinia virus
uucauuaaucuuu

SEQ ID NO: 4064204 - RNA, 13 nt, Vaccinia virus
uucauucguaaau

SEQ ID NO: 4064205 - RNA, 17 nt, Vaccinia virus
uucauucguaaaucuuu

SEQ ID NO: 4064206 - RNA, 11 nt, Vaccinia virus
uuccaaacauu

SEQ ID NO: 4064207 - RNA, 15 nt, Vaccinia virus
uuccaaauuauucuu

SEQ ID NO: 4064208 - RNA, 21 nt, Vaccinia virus
uuccaaauuuuuuucauugau

SEQ ID NO: 4064209 - RNA, 20 nt, Vaccinia virus
uuccaauaucugagcuaucu

SEQ ID NO: 4064210 - RNA, 18 nt, Vaccinia virus
uuccacgaacuucuaauu

SEQ ID NO: 4064211 - RNA, 16 nt, Vaccinia virus
uuccagaugucauaau

SEQ ID NO: 4064212 - RNA, 15 nt, Vaccinia virus
uuccaguauuuucca

SEQ ID NO: 4064213 - RNA, 13 nt, Vaccinia virus
uuccauaaacagu

SEQ ID NO: 4064214 - RNA, 20 nt, Vaccinia virus
uuccauauagauauaauuuu

SEQ ID NO: 4064215 - RNA, 14 nt, Vaccinia virus
uuccauccuuugua

SEQ ID NO: 4064216 - RNA, 18 nt, Vaccinia virus
uuccauucggauucacaa

SEQ ID NO: 4064217 - RNA, 19 nt, Vaccinia virus
uucccaaauaaucauucau

SEQ ID NO: 4064218 - RNA, 14 nt, Vaccinia virus
uucccauaaguuug

SEQ ID NO: 4064219 - RNA, 15 nt, Vaccinia virus
uuccgccaaauuuuc

SEQ ID NO: 4064220 - RNA, 15 nt, Vaccinia virus
uuccguaucuguauu

SEQ ID NO: 4064221 - RNA, 20 nt, Vaccinia virus
uuccguuaauaauacuauuu

SEQ ID NO: 4064222 - RNA, 18 nt, Vaccinia virus
uuccugaaggaaaugaac

SEQ ID NO: 4064223 - RNA, 19 nt, Vaccinia virus
uuccugacgucuagaguuu

SEQ ID NO: 4064224 - RNA, 21 nt, Vaccinia virus
gaaaaaauauuuuauuaguuu

SEQ ID NO: 4064225 - RNA, 22 nt, Vaccinia virus
gaaaaagaauuuuuauaaauuu

SEQ ID NO: 4064226 - RNA, 13 nt, Vaccinia virus
gaaaaauauauca

SEQ ID NO: 4064227 - RNA, 16 nt, Vaccinia virus
gaaaaauuuguagauu

SEQ ID NO: 4064228 - RNA, 20 nt, Vaccinia virus
gaaaacauuuuuaucauguu

SEQ ID NO: 4064229 - RNA, 21 nt, Vaccinia virus
uagauuuccucguccuaugga

SEQ ID NO: 4064230 - RNA, 15 nt, Vaccinia virus
uagcaauauguguaa

SEQ ID NO: 4064231 - RNA, 21 nt, Vaccinia virus
uagcacuacgcaauaugauca

SEQ ID NO: 4064232 - RNA, 16 nt, Vaccinia virus
uagcagauagauaaag

SEQ ID NO: 4064233 - RNA, 16 nt, Vaccinia virus
uagcauuaauacagua

SEQ ID NO: 4064234 - RNA, 20 nt, Vaccinia virus
uagccaaaagacuaugggaa

SEQ ID NO: 4064235 - RNA, 15 nt, Vaccinia virus
uagccacaauuauug

SEQ ID NO: 4064236 - RNA, 17 nt, Vaccinia virus
uagcccucuucaagaac

SEQ ID NO: 4064237 - RNA, 19 nt, Vaccinia virus
uagccgauaaacaaaucau

SEQ ID NO: 4064238 - RNA, 18 nt, Vaccinia virus
uagccuguuuuaacaucu

SEQ ID NO: 4064239 - RNA, 16 nt, Vaccinia virus
uagcgguaaguauaaa

SEQ ID NO: 4064240 - RNA, 21 nt, Vaccinia virus
uagcuaaagauuugucacaau

SEQ ID NO: 4064241 - RNA, 19 nt, Vaccinia virus
uagcuaauauaaaaauaua

SEQ ID NO: 4064242 - RNA, 17 nt, Vaccinia virus
uagcugagaauaucuuu

SEQ ID NO: 4064243 - RNA, 13 nt, Vaccinia virus
uaggauuaacaua

SEQ ID NO: 4064244 - RNA, 13 nt, Vaccinia virus
uaggcacacaauc

SEQ ID NO: 4064245 - RNA, 17 nt, Vaccinia virus
uaggcacagucaaacau

SEQ ID NO: 4064246 - RNA, 21 nt, Vaccinia virus
uaggcauaccauuagauaauc

SEQ ID NO: 4064247 - RNA, 21 nt, Vaccinia virus
uagggagaguauaaaacauua

SEQ ID NO: 4064248 - RNA, 15 nt, Vaccinia virus
uaggguuguguauaa

SEQ ID NO: 4064249 - RNA, 19 nt, Vaccinia virus
uagguauuuuaucucuauu

SEQ ID NO: 4064250 - RNA, 13 nt, Vaccinia virus
uaggugaugaugc

SEQ ID NO: 4064251 - RNA, 18 nt, Vaccinia virus
uagguuuaguaucucaau

SEQ ID NO: 4064252 - RNA, 15 nt, Vaccinia virus
uaguaaaaauaauua

SEQ ID NO: 4064253 - RNA, 18 nt, Vaccinia virus
uaguaaaaauaauuauua

SEQ ID NO: 4064254 - RNA, 21 nt, Vaccinia virus
uaguaaacuugacuaaaucuu

SEQ ID NO: 4064255 - RNA, 21 nt, Vaccinia virus
uaguaaguagaaauuaucaaa

SEQ ID NO: 4064256 - RNA, 14 nt, Vaccinia virus
uaguaauguuuaug

SEQ ID NO: 4064257 - RNA, 15 nt, Vaccinia virus
uaguaauuugugcau

SEQ ID NO: 4064258 - RNA, 20 nt, Vaccinia virus
uaguaauuuuuuaucauaaa

SEQ ID NO: 4064259 - RNA, 18 nt, Vaccinia virus
uaguagaguuuuauucuc

SEQ ID NO: 4064260 - RNA, 12 nt, Vaccinia virus
uaguagaugcua

SEQ ID NO: 4064261 - RNA, 19 nt, Vaccinia virus
uaguagauuuuuaagcugu

SEQ ID NO: 4064262 - RNA, 14 nt, Vaccinia virus
uaguaguguuuccc

SEQ ID NO: 4064263 - RNA, 17 nt, Vaccinia virus
uaguauaauuauaugua

SEQ ID NO: 4064264 - RNA, 14 nt, Vaccinia virus
uaguauaauuauug

SEQ ID NO: 4064265 - RNA, 16 nt, Vaccinia virus
uaguauaccaugaccu

SEQ ID NO: 4064266 - RNA, 20 nt, Vaccinia virus
uaguauagaucaaauacuug

SEQ ID NO: 4064267 - RNA, 20 nt, Vaccinia virus
uaguauaucuacacauguau

SEQ ID NO: 4064268 - RNA, 13 nt, Vaccinia virus
uaguaucuaaaac

SEQ ID NO: 4064269 - RNA, 15 nt, Vaccinia virus
uaguaucuaaacauu

SEQ ID NO: 4064270 - RNA, 18 nt, Vaccinia virus
uaguaucuuuuuuacgua

SEQ ID NO: 4064271 - RNA, 14 nt, Vaccinia virus
uaguaugguuucau

SEQ ID NO: 4064272 - RNA, 15 nt, Vaccinia virus
uaguaugguuucaua

SEQ ID NO: 4064273 - RNA, 15 nt, Vaccinia virus
uaguauucguuuucu

SEQ ID NO: 4064274 - RNA, 18 nt, Vaccinia virus
uaguauuuauacuacuaa

SEQ ID NO: 4064275 - RNA, 18 nt, Vaccinia virus
uagucaaucuuauucaag

SEQ ID NO: 4064276 - RNA, 17 nt, Vaccinia virus
uagucagaccauucuug

SEQ ID NO: 4064277 - RNA, 16 nt, Vaccinia virus
uagucauaauaucuuu

SEQ ID NO: 4064278 - RNA, 17 nt, Vaccinia virus
uagucauagacaaugcu

SEQ ID NO: 4064279 - RNA, 17 nt, Vaccinia virus
uagucauagaugaaaua

SEQ ID NO: 4064280 - RNA, 15 nt, Vaccinia virus
uagucgguauuucau

SEQ ID NO: 4064281 - RNA, 21 nt, Vaccinia virus
uagucuuagcugaccugaguu

SEQ ID NO: 4064282 - RNA, 23 nt, Vaccinia virus
uagugaugaauugaaaauuauuu

SEQ ID NO: 4064283 - RNA, 16 nt, Vaccinia virus
uagugaugguuuucua

SEQ ID NO: 4064284 - RNA, 23 nt, Vaccinia virus
uagugccaucagaauaggaugaa

SEQ ID NO: 4064285 - RNA, 18 nt, Vaccinia virus
uagugcucaaacaaaaug

SEQ ID NO: 4064286 - RNA, 14 nt, Vaccinia virus
uaguguuacaaaac

SEQ ID NO: 4064287 - RNA, 16 nt, Vaccinia virus
uaguuaccgcaaagaa

SEQ ID NO: 4064288 - RNA, 19 nt, Vaccinia virus
uaguuacgauuuuaucauc

SEQ ID NO: 4064289 - RNA, 19 nt, Vaccinia virus
uaguuacuacgaucucauc

SEQ ID NO: 4064290 - RNA, 17 nt, Vaccinia virus
uaguuacuuuaauaacc

SEQ ID NO: 4064291 - RNA, 17 nt, Vaccinia virus
uaguuaucuaucuuaaa

SEQ ID NO: 4064292 - RNA, 14 nt, Vaccinia virus
uaguuauuaaugau

SEQ ID NO: 4064293 - RNA, 17 nt, Vaccinia virus
uaguuauuacuuuucuc

SEQ ID NO: 4064294 - RNA, 23 nt, Vaccinia virus
uaguuccucaggauucuaaugau

SEQ ID NO: 4064295 - RNA, 14 nt, Vaccinia virus
uaguucgucauaac

SEQ ID NO: 4064296 - RNA, 22 nt, Vaccinia virus
uaguugacacguuuauuucaua

SEQ ID NO: 4064297 - RNA, 18 nt, Vaccinia virus
uaguugauuuauuacuua

SEQ ID NO: 4064298 - RNA, 22 nt, Vaccinia virus
uaguuguauacugagaauugac

SEQ ID NO: 4064299 - RNA, 17 nt, Vaccinia virus
uaguuguggaaauacuu

SEQ ID NO: 4064300 - RNA, 17 nt, Vaccinia virus
uauaaaaccaaggacuu

SEQ ID NO: 4064301 - RNA, 17 nt, Vaccinia virus
uauaaaauagaaaauaa

SEQ ID NO: 4064302 - RNA, 20 nt, Vaccinia virus
uauaaacaucuugauacuuu

SEQ ID NO: 4064303 - RNA, 17 nt, Vaccinia virus
uauaaacucucaacauu

SEQ ID NO: 4064304 - RNA, 20 nt, Vaccinia virus
uauaaagaugguaaacucuu

SEQ ID NO: 4064305 - RNA, 16 nt, Vaccinia virus
uauaaaguguaugucu

SEQ ID NO: 4064306 - RNA, 14 nt, Vaccinia virus
uauaaauagauguu

SEQ ID NO: 4064307 - RNA, 14 nt, Vaccinia virus
uauaaauggaugaa

SEQ ID NO: 4064308 - RNA, 17 nt, Vaccinia virus
uauaaauggaugaagca

SEQ ID NO: 4064309 - RNA, 13 nt, Vaccinia virus
uauaaauuuuaga

SEQ ID NO: 4064310 - RNA, 22 nt, Vaccinia virus
uauaacacuuauguauuaacuu

SEQ ID NO: 4064311 - RNA, 18 nt, Vaccinia virus
uauaacaugcuaaaccuu

SEQ ID NO: 4064312 - RNA, 17 nt, Vaccinia virus
uauaacauuaauaucaa

SEQ ID NO: 4064313 - RNA, 15 nt, Vaccinia virus
uauaaccuuaucauu

SEQ ID NO: 4064314 - RNA, 22 nt, Vaccinia virus
uauaacuaaacacguuaguguu

SEQ ID NO: 4064315 - RNA, 22 nt, Vaccinia virus
uauaacuaucaauauuaacagu

SEQ ID NO: 4064316 - RNA, 17 nt, Vaccinia virus
uauaacuucuaaucuug

SEQ ID NO: 4064317 - RNA, 17 nt, Vaccinia virus
uauaagacgauacuguu

SEQ ID NO: 4064318 - RNA, 22 nt, Vaccinia virus
uauaagauauccauaucaucau

SEQ ID NO: 4064319 - RNA, 15 nt, Vaccinia virus
uauaagauuaucaaa

SEQ ID NO: 4064320 - RNA, 20 nt, Vaccinia virus
uauaagauuaucaaaaucuu

SEQ ID NO: 4064321 - RNA, 19 nt, Vaccinia virus
uauaagcucuauuguuuga

SEQ ID NO: 4064322 - RNA, 14 nt, Vaccinia virus
uauaaggucagaaa

SEQ ID NO: 4064323 - RNA, 19 nt, Vaccinia virus
uauaauaacaaguaugaca

SEQ ID NO: 4064324 - RNA, 17 nt, Vaccinia virus
uauaauagucaauagau

SEQ ID NO: 4064325 - RNA, 14 nt, Vaccinia virus
uauaauauauucua

SEQ ID NO: 4064326 - RNA, 12 nt, Vaccinia virus
uauaauaucuuu

SEQ ID NO: 4064327 - RNA, 15 nt, Vaccinia virus
uauaaucguuaaauu

SEQ ID NO: 4064328 - RNA, 16 nt, Vaccinia virus
uauaaucguuaaauuu

SEQ ID NO: 4064329 - RNA, 23 nt, Vaccinia virus
uauaaucucauucgaacauacga

SEQ ID NO: 4064330 - RNA, 23 nt, Vaccinia virus
uauaaugacaucuaugauuuuac

SEQ ID NO: 4064331 - RNA, 14 nt, Vaccinia virus
uauaauguagacau

SEQ ID NO: 4064332 - RNA, 22 nt, Vaccinia virus
uauaauguucgccauuuauaua

SEQ ID NO: 4064333 - RNA, 21 nt, Vaccinia virus
uauaauguuuccucuuucaua

SEQ ID NO: 4064334 - RNA, 15 nt, Vaccinia virus
uauaauuauacuauu

SEQ ID NO: 4064335 - RNA, 16 nt, Vaccinia virus
uauaauuuuuaacagu

SEQ ID NO: 4064336 - RNA, 15 nt, Vaccinia virus
uauacaagauugaaa

SEQ ID NO: 4064337 - RNA, 15 nt, Vaccinia virus
uauacaauuaucauu

SEQ ID NO: 4064338 - RNA, 24 nt, Vaccinia virus
uauacaauuguuuguauucauuca

SEQ ID NO: 4064339 - RNA, 16 nt, Vaccinia virus
uauacagcguuacauu

SEQ ID NO: 4064340 - RNA, 21 nt, Vaccinia virus
uauacauccguagaaauauga

SEQ ID NO: 4064341 - RNA, 20 nt, Vaccinia virus
uauacauuacugaauuauua

SEQ ID NO: 4064342 - RNA, 13 nt, Vaccinia virus
uauacccaaagag

SEQ ID NO: 4064343 - RNA, 18 nt, Vaccinia virus
uauaccuuguaauuaaau

SEQ ID NO: 4064344 - RNA, 19 nt, Vaccinia virus
uauaccuuguaauuaaauu

SEQ ID NO: 4064345 - RNA, 13 nt, Vaccinia virus
uauacgacuauga

SEQ ID NO: 4064346 - RNA, 16 nt, Vaccinia virus
uauacuaaucaauaau

SEQ ID NO: 4064347 - RNA, 13 nt, Vaccinia virus
uauacuacaauug

SEQ ID NO: 4064348 - RNA, 18 nt, Vaccinia virus
uauacuccgguugaugau

SEQ ID NO: 4064349 - RNA, 16 nt, Vaccinia virus
uauagaaacauauucu

SEQ ID NO: 4064350 - RNA, 19 nt, Vaccinia virus
uauagagcacuauuucuaa

SEQ ID NO: 4064351 - RNA, 21 nt, Vaccinia virus
uauagagcacuauuucuaaau

SEQ ID NO: 4064352 - RNA, 23 nt, Vaccinia virus
uauagaggaauaucaucaaacaa

SEQ ID NO: 4064353 - RNA, 21 nt, Vaccinia virus
uauagaucagucaacggaaaa

SEQ ID NO: 4064354 - RNA, 20 nt, Vaccinia virus
uauagauggcuuguauguca

SEQ ID NO: 4064355 - RNA, 22 nt, Vaccinia virus
ucucacugaauacgaggaugau

SEQ ID NO: 4064356 - RNA, 14 nt, Vaccinia virus
ucucagaauucuaa

SEQ ID NO: 4064357 - RNA, 14 nt, Vaccinia virus
uagauaaacgugau

SEQ ID NO: 4064358 - RNA, 13 nt, Vaccinia virus
uagauaaacuauc

SEQ ID NO: 4064359 - RNA, 15 nt, Vaccinia virus
uagauaauucuaauu

SEQ ID NO: 4064360 - RNA, 16 nt, Vaccinia virus
uagauacaacgucauc

SEQ ID NO: 4064361 - RNA, 16 nt, Vaccinia virus
uagauaccauuaauca

SEQ ID NO: 4064362 - RNA, 16 nt, Vaccinia virus
uagauaccguaguaua

SEQ ID NO: 4064363 - RNA, 21 nt, Vaccinia virus
uagauacucuaccauuucugc

SEQ ID NO: 4064364 - RNA, 17 nt, Vaccinia virus
uagauagaaacuuauac

SEQ ID NO: 4064365 - RNA, 15 nt, Vaccinia virus
uagauauaaauucaa

SEQ ID NO: 4064366 - RNA, 18 nt, Vaccinia virus
uagaucacccuaaucuua

SEQ ID NO: 4064367 - RNA, 15 nt, Vaccinia virus
uagaucaucugaaaa

SEQ ID NO: 4064368 - RNA, 17 nt, Vaccinia virus
uagaucauuugaaauua

SEQ ID NO: 4064369 - RNA, 16 nt, Vaccinia virus
uagauccaacauuaau

SEQ ID NO: 4064370 - RNA, 17 nt, Vaccinia virus
uagaucggaugauuuac

SEQ ID NO: 4064371 - RNA, 16 nt, Vaccinia virus
uagaucugaauuaaau

SEQ ID NO: 4064372 - RNA, 22 nt, Vaccinia virus
uagaucuuccaaucuaucuauu

SEQ ID NO: 4064373 - RNA, 22 nt, Vaccinia virus
uagaugauagagguaauacuuu

SEQ ID NO: 4064374 - RNA, 15 nt, Vaccinia virus
uagaugauauuguaa

SEQ ID NO: 4064375 - RNA, 19 nt, Vaccinia virus
uagauguaaguaugauguc

SEQ ID NO: 4064376 - RNA, 20 nt, Vaccinia virus
uagauguuaaaaaaacaucg

SEQ ID NO: 4064377 - RNA, 14 nt, Vaccinia virus
uagauuaaugcuua

SEQ ID NO: 4064378 - RNA, 16 nt, Vaccinia virus
uagauuauaauccuua

SEQ ID NO: 4064379 - RNA, 13 nt, Vaccinia virus
uagauuaucuauu

SEQ ID NO: 4064380 - RNA, 19 nt, Vaccinia virus
uagauucauucguuauaga

SEQ ID NO: 4064381 - RNA, 13 nt, Vaccinia virus
uagauuuaucuag

SEQ ID NO: 4064382 - RNA, 16 nt, Vaccinia virus
uagauuuccaaagaua

SEQ ID NO: 4064383 - RNA, 16 nt, Vaccinia virus
uagauuuuccauccac

SEQ ID NO: 4064384 - RNA, 20 nt, Vaccinia virus
uagauuuuuuaaaggaugau

SEQ ID NO: 4064385 - RNA, 13 nt, Vaccinia virus
uagcaaaauuaac

SEQ ID NO: 4064386 - RNA, 18 nt, Vaccinia virus
uagcaaaggaaauugugc

SEQ ID NO: 4064387 - RNA, 23 nt, Vaccinia virus
uagcaagauuuuuaaacaacaau

SEQ ID NO: 4064388 - RNA, 19 nt, Vaccinia virus
uagcacauccaucaaagaa

SEQ ID NO: 4064389 - RNA, 15 nt, Vaccinia virus
uagcagucuaacauu

SEQ ID NO: 4064390 - RNA, 21 nt, Vaccinia virus
uagcaucuuauuagaauauua

SEQ ID NO: 4064391 - RNA, 21 nt, Vaccinia virus
uagcauuguuauguauuucau

SEQ ID NO: 4064392 - RNA, 14 nt, Vaccinia virus
uagccaucguuaau

SEQ ID NO: 4064393 - RNA, 19 nt, Vaccinia virus
aacuauuuugucucuguuu

SEQ ID NO: 4064394 - RNA, 20 nt, Vaccinia virus
aacucagucaauauauuaag

SEQ ID NO: 4064395 - RNA, 15 nt, Vaccinia virus
aacucauuauagaua

SEQ ID NO: 4064396 - RNA, 19 nt, Vaccinia virus
aacucauuuauauauuaaa

SEQ ID NO: 4064397 - RNA, 23 nt, Vaccinia virus
aacuccaauaaaaagaugauaua

SEQ ID NO: 4064398 - RNA, 20 nt, Vaccinia virus
aacuccggauagagaaauau

SEQ ID NO: 4064399 - RNA, 17 nt, Vaccinia virus
aacuccggccauuugua

SEQ ID NO: 4064400 - RNA, 18 nt, Vaccinia virus
aacuccguagagaaauau

SEQ ID NO: 4064401 - RNA, 14 nt, Vaccinia virus
aacuccucuagaug

SEQ ID NO: 4064402 - RNA, 15 nt, Vaccinia virus
aacucgguuaacaug

SEQ ID NO: 4064403 - RNA, 13 nt, Vaccinia virus
aacucuaaucaaa

SEQ ID NO: 4064404 - RNA, 18 nt, Vaccinia virus
aacucuuucgaauacuua

SEQ ID NO: 4064405 - RNA, 19 nt, Vaccinia virus
aacucuuucgaauacuuau

SEQ ID NO: 4064406 - RNA, 15 nt, Vaccinia virus
aacucuuugacauau

SEQ ID NO: 4064407 - RNA, 18 nt, Vaccinia virus
aacucuuugauuuuguau

SEQ ID NO: 4064408 - RNA, 22 nt, Vaccinia virus
aacugacguauuggaugaugca

SEQ ID NO: 4064409 - RNA, 20 nt, Vaccinia virus
aacuguagagggucaacaau

SEQ ID NO: 4064410 - RNA, 14 nt, Vaccinia virus
aacuguuaaauguu

SEQ ID NO: 4064411 - RNA, 15 nt, Vaccinia virus
aacuuaaaagaauua

SEQ ID NO: 4064412 - RNA, 21 nt, Vaccinia virus
aacuuaccacguaaaacuuaa

SEQ ID NO: 4064413 - RNA, 20 nt, Vaccinia virus
aacuuacgauacaucuguuu

SEQ ID NO: 4064414 - RNA, 15 nt, Vaccinia virus
aacuucguaaaauau

SEQ ID NO: 4064415 - RNA, 16 nt, Vaccinia virus
aacuucuaaucuugua

SEQ ID NO: 4064416 - RNA, 20 nt, Vaccinia virus
aacuucugccugaaauccaa

SEQ ID NO: 4064417 - RNA, 16 nt, Vaccinia virus
aacuugcaaaaaagac

SEQ ID NO: 4064418 - RNA, 23 nt, Vaccinia virus
aacuuuaaauaauuuacaaaaau

SEQ ID NO: 4064419 - RNA, 16 nt, Vaccinia virus
aacuuuccucagagau

SEQ ID NO: 4064420 - RNA, 14 nt, Vaccinia virus
aacuuugaaauugu

SEQ ID NO: 4064421 - RNA, 12 nt, Vaccinia virus
aacuuuuuggua

SEQ ID NO: 4064422 - RNA, 17 nt, Vaccinia virus
aagaaaaaugauuaucu

SEQ ID NO: 4064423 - RNA, 15 nt, Vaccinia virus
aagaaaacaaacauc

SEQ ID NO: 4064424 - RNA, 13 nt, Vaccinia virus
aagaaaacucguc

SEQ ID NO: 4064425 - RNA, 14 nt, Vaccinia virus
aagaaaaugcagaa

SEQ ID NO: 4064426 - RNA, 11 nt, Vaccinia virus
aagaaaugaua

SEQ ID NO: 4064427 - RNA, 23 nt, Vaccinia virus
aagaacguaaaauacauaugaca

SEQ ID NO: 4064428 - RNA, 12 nt, Vaccinia virus
aagaagaaguag

SEQ ID NO: 4064429 - RNA, 18 nt, Vaccinia virus
aagaagagaauuaaaaga

SEQ ID NO: 4064430 - RNA, 24 nt, Vaccinia virus
aagaagauuaucaagauguguaug

SEQ ID NO: 4064431 - RNA, 20 nt, Vaccinia virus
aagaagugucuauaaaugua

SEQ ID NO: 4064432 - RNA, 22 nt, Vaccinia virus
aagaagugucuauaaauguaga

SEQ ID NO: 4064433 - RNA, 18 nt, Vaccinia virus
aagaaguuauagaaugua

SEQ ID NO: 4064434 - RNA, 12 nt, Vaccinia virus
aagaauaaagua

SEQ ID NO: 4064435 - RNA, 13 nt, Vaccinia virus
aagaauauaacgu

SEQ ID NO: 4064436 - RNA, 13 nt, Vaccinia virus
aagaauucuuaug

SEQ ID NO: 4064437 - RNA, 15 nt, Vaccinia virus
aagacaauaaagaua

SEQ ID NO: 4064438 - RNA, 16 nt, Vaccinia virus
aagacaauauuaucau

SEQ ID NO: 4064439 - RNA, 16 nt, Vaccinia virus
aagacaaucauuuacu

SEQ ID NO: 4064440 - RNA, 18 nt, Vaccinia virus
aagaccaauuaacgauga

SEQ ID NO: 4064441 - RNA, 19 nt, Vaccinia virus
aagaccgaauacauaacag

SEQ ID NO: 4064442 - RNA, 21 nt, Vaccinia virus
aagacgaggagauuuagaaau

SEQ ID NO: 4064443 - RNA, 14 nt, Vaccinia virus
aagacuuaaaacuu

SEQ ID NO: 4064444 - RNA, 23 nt, Vaccinia virus
aagagauuccugacuuugcauuc

SEQ ID NO: 4064445 - RNA, 13 nt, Vaccinia virus
aagaggauuuucu

SEQ ID NO: 4064446 - RNA, 22 nt, Vaccinia virus
aagauauccagaguuuagauua

SEQ ID NO: 4064447 - RNA, 15 nt, Vaccinia virus
aagauaucugguucu

SEQ ID NO: 4064448 - RNA, 13 nt, Vaccinia virus
aagaucaaccaaa

SEQ ID NO: 4064449 - RNA, 14 nt, Vaccinia virus
aagaucaaggaaau

SEQ ID NO: 4064450 - RNA, 22 nt, Vaccinia virus
aagaugcaaacauuauguagua

SEQ ID NO: 4064451 - RNA, 18 nt, Vaccinia virus
aagauggaguauaaucuu

SEQ ID NO: 4064452 - RNA, 21 nt, Vaccinia virus
aagauguuuucugucagaaaa

SEQ ID NO: 4064453 - RNA, 21 nt, Vaccinia virus
aagauuaacuccauaaugucu

SEQ ID NO: 4064454 - RNA, 13 nt, Vaccinia virus
aagauuaguaaau

SEQ ID NO: 4064455 - RNA, 15 nt, Vaccinia virus
aagauuccuaaauua

SEQ ID NO: 4064456 - RNA, 14 nt, Vaccinia virus
aagauuguuuaaga

SEQ ID NO: 4064457 - RNA, 15 nt, Vaccinia virus
aagauuuauauaucu

SEQ ID NO: 4064458 - RNA, 20 nt, Vaccinia virus
aagauuucaucuauaucauu

SEQ ID NO: 4064459 - RNA, 23 nt, Vaccinia virus
aagcacucguuauuaauacaagu

SEQ ID NO: 4064460 - RNA, 17 nt, Vaccinia virus
aagcauaauacucuguu

SEQ ID NO: 4064461 - RNA, 18 nt, Vaccinia virus
aagccuuaugcauccaaa

SEQ ID NO: 4064462 - RNA, 14 nt, Vaccinia virus
aagcgguuaaauca

SEQ ID NO: 4064463 - RNA, 12 nt, Vaccinia virus
aagcuauguaaa

SEQ ID NO: 4064464 - RNA, 16 nt, Vaccinia virus
aagcuucguuguagaa

SEQ ID NO: 4064465 - RNA, 14 nt, Vaccinia virus
aaggaaaaugaaca

SEQ ID NO: 4064466 - RNA, 17 nt, Vaccinia virus
aaggaauauacaaaguu

SEQ ID NO: 4064467 - RNA, 12 nt, Vaccinia virus
aaggacaaaaug

SEQ ID NO: 4064468 - RNA, 15 nt, Vaccinia virus
aaggacauuguaaau

SEQ ID NO: 4064469 - RNA, 16 nt, Vaccinia virus
aaggcauuuggucuau

SEQ ID NO: 4064470 - RNA, 16 nt, Vaccinia virus
aaggcgguauauguau

SEQ ID NO: 4064471 - RNA, 15 nt, Vaccinia virus
aaggggugagaaugu

SEQ ID NO: 4064472 - RNA, 15 nt, Vaccinia virus
aagguauacgaaugu

SEQ ID NO: 4064473 - RNA, 15 nt, Vaccinia virus
aagguguuaaaauua

SEQ ID NO: 4064474 - RNA, 19 nt, Vaccinia virus
aagguuagcgcucagaaua

SEQ ID NO: 4064475 - RNA, 15 nt, Vaccinia virus
aaguaaacaauuuua

SEQ ID NO: 4064476 - RNA, 12 nt, Vaccinia virus
aaguaaauacug

SEQ ID NO: 4064477 - RNA, 11 nt, Vaccinia virus
aaguaaaugaa

SEQ ID NO: 4064478 - RNA, 20 nt, Vaccinia virus
aaguaauuauaguauaaugu

SEQ ID NO: 4064479 - RNA, 14 nt, Vaccinia virus
aaguacagaauuaa

SEQ ID NO: 4064480 - RNA, 18 nt, Vaccinia virus
aaguacagauuuuagaaa

SEQ ID NO: 4064481 - RNA, 19 nt, Vaccinia virus
aaguauagcuaaugaugcg

SEQ ID NO: 4064482 - RNA, 22 nt, Vaccinia virus
aaguaugaagaaaaauguugug

SEQ ID NO: 4064483 - RNA, 12 nt, Vaccinia virus
aaguaugauaca

SEQ ID NO: 4064484 - RNA, 15 nt, Vaccinia virus
ugaggaaugagagug

SEQ ID NO: 4064485 - RNA, 16 nt, Vaccinia virus
ugaggauuuaaaacuc

SEQ ID NO: 4064486 - RNA, 20 nt, Vaccinia virus
ugaguauugguauuacuaua

SEQ ID NO: 4064487 - RNA, 14 nt, Vaccinia virus
ugaguguagaugcu

SEQ ID NO: 4064488 - RNA, 21 nt, Vaccinia virus
ugaguuccuuguuuuugcuaa

SEQ ID NO: 4064489 - RNA, 18 nt, Vaccinia virus
ugauaaacacguuagagu

SEQ ID NO: 4064490 - RNA, 12 nt, Vaccinia virus
ugauaaaccauc

SEQ ID NO: 4064491 - RNA, 22 nt, Vaccinia virus
ugauaaauauacaauagaugca

SEQ ID NO: 4064492 - RNA, 16 nt, Vaccinia virus
ugauaacacauauuca

SEQ ID NO: 4064493 - RNA, 17 nt, Vaccinia virus
ugauaacuucaggaaau

SEQ ID NO: 4064494 - RNA, 15 nt, Vaccinia virus
ugauaccaugaaauu

SEQ ID NO: 4064495 - RNA, 15 nt, Vaccinia virus
ugauacguauauaca

SEQ ID NO: 4064496 - RNA, 16 nt, Vaccinia virus
ugauacguauauacac

SEQ ID NO: 4064497 - RNA, 19 nt, Vaccinia virus
ugauacucuuauagaugua

SEQ ID NO: 4064498 - RNA, 19 nt, Vaccinia virus
ugauagagguaaacuucua

SEQ ID NO: 4064499 - RNA, 12 nt, Vaccinia virus
ugauagcaagga

SEQ ID NO: 4064500 - RNA, 20 nt, Vaccinia virus
ugauagcaauucauguacca

SEQ ID NO: 4064501 - RNA, 22 nt, Vaccinia virus
ugauagugaaugaaucagauag

SEQ ID NO: 4064502 - RNA, 16 nt, Vaccinia virus
ugauauacuaagcaag

SEQ ID NO: 4064503 - RNA, 18 nt, Vaccinia virus
ugauauagcauugcgcau

SEQ ID NO: 4064504 - RNA, 16 nt, Vaccinia virus
ugauauaucuaguguu

SEQ ID NO: 4064505 - RNA, 14 nt, Vaccinia virus
ugauauauuuucca

SEQ ID NO: 4064506 - RNA, 17 nt, Vaccinia virus
ugauauccgcgaacgau

SEQ ID NO: 4064507 - RNA, 17 nt, Vaccinia virus
ugauaucgagaacagau

SEQ ID NO: 4064508 - RNA, 22 nt, Vaccinia virus
ugauaucuacaucguuuggauu

SEQ ID NO: 4064509 - RNA, 23 nt, Vaccinia virus
ugauaucuauaauaggguaucua

SEQ ID NO: 4064510 - RNA, 21 nt, Vaccinia virus
ugauaugauuaucguuuucau

SEQ ID NO: 4064511 - RNA, 16 nt, Vaccinia virus
ugauauguguaagaac

SEQ ID NO: 4064512 - RNA, 20 nt, Vaccinia virus
ugauauguguaagaacucuc

SEQ ID NO: 4064513 - RNA, 15 nt, Vaccinia virus
ugauauuacuuauaa

SEQ ID NO: 4064514 - RNA, 19 nt, Vaccinia virus
ugauauuacuuauaauaac

SEQ ID NO: 4064515 - RNA, 14 nt, Vaccinia virus
ugauauuucauaua

SEQ ID NO: 4064516 - RNA, 20 nt, Vaccinia virus
ugauauuucauugacagaua

SEQ ID NO: 4064517 - RNA, 18 nt, Vaccinia virus
ugaucacauuuagauaaa

SEQ ID NO: 4064518 - RNA, 16 nt, Vaccinia virus
ugaucaggaaaguuua

SEQ ID NO: 4064519 - RNA, 20 nt, Vaccinia virus
ugaucaugugagaauacuaa

SEQ ID NO: 4064520 - RNA, 20 nt, Vaccinia virus
ugaucauuggcaaaauccua

SEQ ID NO: 4064521 - RNA, 12 nt, Vaccinia virus
ugauccacaaaa

SEQ ID NO: 4064522 - RNA, 15 nt, Vaccinia virus
ugauccuuuuccaga

SEQ ID NO: 4064523 - RNA, 16 nt, Vaccinia virus
ugaucuaacuaagaua

SEQ ID NO: 4064524 - RNA, 16 nt, Vaccinia virus
ugaucucguguguaca

SEQ ID NO: 4064525 - RNA, 17 nt, Vaccinia virus
ugaugacacuagaugau

SEQ ID NO: 4064526 - RNA, 13 nt, Vaccinia virus
ugaugauaauguu

SEQ ID NO: 4064527 - RNA, 23 nt, Vaccinia virus
ugaugauuagauggagaguauau

SEQ ID NO: 4064528 - RNA, 14 nt, Vaccinia virus
ugaugcaugcgaua

SEQ ID NO: 4064529 - RNA, 19 nt, Vaccinia virus
ugaugcauucgacucaaca

SEQ ID NO: 4064530 - RNA, 17 nt, Vaccinia virus
ugaugccgguaaauguu

SEQ ID NO: 4064531 - RNA, 16 nt, Vaccinia virus
ugaugcugguucugga

SEQ ID NO: 4064532 - RNA, 17 nt, Vaccinia virus
ugauggguguacaauca

SEQ ID NO: 4064533 - RNA, 19 nt, Vaccinia virus
ugaugguuuucuaaauaga

SEQ ID NO: 4064534 - RNA, 22 nt, Vaccinia virus
ugauguaagauccaaacgagga

SEQ ID NO: 4064535 - RNA, 16 nt, Vaccinia virus
ugaugucaucuuccag

SEQ ID NO: 4064536 - RNA, 19 nt, Vaccinia virus
ugaugucguuauucugaaa

SEQ ID NO: 4064537 - RNA, 22 nt, Vaccinia virus
ugauuaaguauuguuuuuucau

SEQ ID NO: 4064538 - RNA, 17 nt, Vaccinia virus
ugauuacauuuuugaua

SEQ ID NO: 4064539 - RNA, 14 nt, Vaccinia virus
ugauuagaaaauau

SEQ ID NO: 4064540 - RNA, 15 nt, Vaccinia virus
ugauuagaauucauc

SEQ ID NO: 4064541 - RNA, 16 nt, Vaccinia virus
ugauuauaguuucuau

SEQ ID NO: 4064542 - RNA, 23 nt, Vaccinia virus
ugauuauucuauaaguauagaua

SEQ ID NO: 4064543 - RNA, 14 nt, Vaccinia virus
ugauuauuuacuau

SEQ ID NO: 4064544 - RNA, 17 nt, Vaccinia virus
ugauucauucacuauca

SEQ ID NO: 4064545 - RNA, 23 nt, Vaccinia virus
ugauucuccagccgaaacauauu

SEQ ID NO: 4064546 - RNA, 13 nt, Vaccinia virus
ugauugaacgauu

SEQ ID NO: 4064547 - RNA, 13 nt, Vaccinia virus
ugauuuacucauu

SEQ ID NO: 4064548 - RNA, 20 nt, Vaccinia virus
ugauuucguuagucauauua

SEQ ID NO: 4064549 - RNA, 23 nt, Vaccinia virus
ugauuuugaugauaauguuacca

SEQ ID NO: 4064550 - RNA, 22 nt, Vaccinia virus
ugcaaaauaugcucuagauacu

SEQ ID NO: 4064551 - RNA, 17 nt, Vaccinia virus
ugcaaggaaucaucuga

SEQ ID NO: 4064552 - RNA, 20 nt, Vaccinia virus
ugcacgacuacuuuguuaau

SEQ ID NO: 4064553 - RNA, 14 nt, Vaccinia virus
ugcacucaugauuc

SEQ ID NO: 4064554 - RNA, 20 nt, Vaccinia virus
ugcauccaugcagcauuucc

SEQ ID NO: 4064555 - RNA, 15 nt, Vaccinia virus
ugcaucuacaucauc

SEQ ID NO: 4064556 - RNA, 23 nt, Vaccinia virus
ugcaucuauauaaucuuuuucau

SEQ ID NO: 4064557 - RNA, 15 nt, Vaccinia virus
ugcaucuauaugucc

SEQ ID NO: 4064558 - RNA, 22 nt, Vaccinia virus
ugcauuaguaagugccacaaaa

SEQ ID NO: 4064559 - RNA, 11 nt, Vaccinia virus
ugcauucaaau

SEQ ID NO: 4064560 - RNA, 17 nt, Vaccinia virus
ugcauucguuuaaagau

SEQ ID NO: 4064561 - RNA, 16 nt, Vaccinia virus
ugccaaguacauaaau

SEQ ID NO: 4064562 - RNA, 18 nt, Vaccinia virus
ugccauaaauaaaugcuu

SEQ ID NO: 4064563 - RNA, 14 nt, Vaccinia virus
ugccauaauaauua

SEQ ID NO: 4064564 - RNA, 13 nt, Vaccinia virus
ugccauagauucu

SEQ ID NO: 4064565 - RNA, 17 nt, Vaccinia virus
ugccauaucauacauga

SEQ ID NO: 4064566 - RNA, 22 nt, Vaccinia virus
ugccguuuauaggucuagccac

SEQ ID NO: 4064567 - RNA, 15 nt, Vaccinia virus
ugcgacacuauucau

SEQ ID NO: 4064568 - RNA, 11 nt, Vaccinia virus
ugcgauacauu

SEQ ID NO: 4064569 - RNA, 14 nt, Vaccinia virus
ugcgaucugaauaa

SEQ ID NO: 4064570 - RNA, 15 nt, Vaccinia virus
ugcgugacagcacag

SEQ ID NO: 4064571 - RNA, 18 nt, Vaccinia virus
ugcuaaacuuuauguacu

SEQ ID NO: 4064572 - RNA, 14 nt, Vaccinia virus
ugcuaauuauuccu

SEQ ID NO: 4064573 - RNA, 12 nt, Vaccinia virus
ugcuaauuauuu

SEQ ID NO: 4064574 - RNA, 13 nt, Vaccinia virus
ugcuacgcaaaua

SEQ ID NO: 4064575 - RNA, 19 nt, Vaccinia virus
ugcuagacaccuuuucaau

SEQ ID NO: 4064576 - RNA, 23 nt, Vaccinia virus
ugcuauaucucuuccguuuauua

SEQ ID NO: 4064577 - RNA, 16 nt, Vaccinia virus
ugcuauccaucagaau

SEQ ID NO: 4064578 - RNA, 20 nt, Vaccinia virus
ugcucaaacaaaaugugaua

SEQ ID NO: 4064579 - RNA, 13 nt, Vaccinia virus
ugcuccaugauuu

SEQ ID NO: 4064580 - RNA, 22 nt, Vaccinia virus
ugcucgacaguguauacuauuu

SEQ ID NO: 4064581 - RNA, 22 nt, Vaccinia virus
ugcucggcaguaaucaacaaua

SEQ ID NO: 4064582 - RNA, 21 nt, Vaccinia virus
ugcugcaacaauucagacucc

SEQ ID NO: 4064583 - RNA, 21 nt, Vaccinia virus
ugcuguguguaugaaaugcuu

SEQ ID NO: 4064584 - RNA, 22 nt, Vaccinia virus
ugcuuaauacaccguuaacaau

SEQ ID NO: 4064585 - RNA, 18 nt, Vaccinia virus
ugcuucaacgaggaagau

SEQ ID NO: 4064586 - RNA, 23 nt, Vaccinia virus
ugcuucguuuaaauaauauauca

SEQ ID NO: 4064587 - RNA, 21 nt, Vaccinia virus
uggaaaaaggauggaaagaua

SEQ ID NO: 4064588 - RNA, 13 nt, Vaccinia virus
uggaaaaaugaug

SEQ ID NO: 4064589 - RNA, 21 nt, Vaccinia virus
uggaaaaaugaugaauuaaug

SEQ ID NO: 4064590 - RNA, 22 nt, Vaccinia virus
uggaaaagaauuuaccagauau

SEQ ID NO: 4064591 - RNA, 17 nt, Vaccinia virus
uggaaacuauaauuuug

SEQ ID NO: 4064592 - RNA, 22 nt, Vaccinia virus
uggaaacuauguuuuuuauuag

SEQ ID NO: 4064593 - RNA, 15 nt, Vaccinia virus
uggaaagaugcuguu

SEQ ID NO: 4064594 - RNA, 22 nt, Vaccinia virus
uggaaauaucugugaauacuuu

SEQ ID NO: 4064595 - RNA, 18 nt, Vaccinia virus
uggaacaaaacaaugacg

SEQ ID NO: 4064596 - RNA, 14 nt, Vaccinia virus
uggaacauaagaua

SEQ ID NO: 4064597 - RNA, 22 nt, Vaccinia virus
uggaagacagcgugaauaaugu

SEQ ID NO: 4064598 - RNA, 17 nt, Vaccinia virus
uggaagguuuguauucu

SEQ ID NO: 4064599 - RNA, 17 nt, Vaccinia virus
uggaauauaucuauaau

SEQ ID NO: 4064600 - RNA, 13 nt, Vaccinia virus
uggaaucaauaau

SEQ ID NO: 4064601 - RNA, 12 nt, Vaccinia virus
uggaaucacaaa

SEQ ID NO: 4064602 - RNA, 21 nt, Vaccinia virus
uggaaucagaagaugauucca

SEQ ID NO: 4064603 - RNA, 21 nt, Vaccinia virus
uggaaucaucuucugauucca

SEQ ID NO: 4064604 - RNA, 23 nt, Vaccinia virus
uuuauauauugcuuacuagaugu

SEQ ID NO: 4064605 - RNA, 21 nt, Vaccinia virus
uuuauaucauuuguuuuaauu

SEQ ID NO: 4064606 - RNA, 22 nt, Vaccinia virus
uuuaucuuuaacgauaccuaua

SEQ ID NO: 4064607 - RNA, 15 nt, Vaccinia virus
uuuaugcuucguaaa

SEQ ID NO: 4064608 - RNA, 12 nt, Vaccinia virus
uuuauuauucuu

SEQ ID NO: 4064609 - RNA, 23 nt, Vaccinia virus
uuuauuggagacguaacaaugua

SEQ ID NO: 4064610 - RNA, 11 nt, Vaccinia virus
uuuauuucuag

SEQ ID NO: 4064611 - RNA, 11 nt, Vaccinia virus
uuucaaagaug

SEQ ID NO: 4064612 - RNA, 16 nt, Vaccinia virus
uuucacccauaaauaa

SEQ ID NO: 4064613 - RNA, 17 nt, Vaccinia virus
uuucacuuuaucucauu

SEQ ID NO: 4064614 - RNA, 19 nt, Vaccinia virus
uuucagcguggauuucuca

SEQ ID NO: 4064615 - RNA, 14 nt, Vaccinia virus
uuucagucauugau

SEQ ID NO: 4064616 - RNA, 21 nt, Vaccinia virus
uuucauaauauuaucaaaaga

SEQ ID NO: 4064617 - RNA, 12 nt, Vaccinia virus
uuucauacauau

SEQ ID NO: 4064618 - RNA, 22 nt, Vaccinia virus
uuucaucuuucuccaauacuaa

SEQ ID NO: 4064619 - RNA, 22 nt, Vaccinia virus
uuucauuccaggaucuagauaa

SEQ ID NO: 4064620 - RNA, 13 nt, Vaccinia virus
uuucccauacuaa

SEQ ID NO: 4064621 - RNA, 15 nt, Vaccinia virus
uuucgaauacuuauu

SEQ ID NO: 4064622 - RNA, 19 nt, Vaccinia virus
uuucuacccauaaguuauc

SEQ ID NO: 4064623 - RNA, 15 nt, Vaccinia virus
uuucuacuagacuau

SEQ ID NO: 4064624 - RNA, 11 nt, Vaccinia virus
uuucuagauac

SEQ ID NO: 4064625 - RNA, 17 nt, Vaccinia virus
uuucuauuucuuucaug

SEQ ID NO: 4064626 - RNA, 15 nt, Vaccinia virus
uuucuggcuaagaag

SEQ ID NO: 4064627 - RNA, 15 nt, Vaccinia virus
uuucuuuaacaaauu

SEQ ID NO: 4064628 - RNA, 15 nt, Vaccinia virus
uuucuuuuuaaugau

SEQ ID NO: 4064629 - RNA, 13 nt, Vaccinia virus
uuugaacaucuug

SEQ ID NO: 4064630 - RNA, 18 nt, Vaccinia virus
uuugagagaucauuucua

SEQ ID NO: 4064631 - RNA, 19 nt, Vaccinia virus
uuugagagaucauuucuau

SEQ ID NO: 4064632 - RNA, 21 nt, Vaccinia virus
uuugauaggaucuauaaugua

SEQ ID NO: 4064633 - RNA, 22 nt, Vaccinia virus
uuugauauacuaagcaaguaca

SEQ ID NO: 4064634 - RNA, 13 nt, Vaccinia virus
uuugauucgaauu

SEQ ID NO: 4064635 - RNA, 20 nt, Vaccinia virus
uuugauuugcuuugaaugau

SEQ ID NO: 4064636 - RNA, 23 nt, Vaccinia virus
uacgucucagaauucuaaaugau

SEQ ID NO: 4064637 - RNA, 21 nt, Vaccinia virus
uacguuagguauguaccacau

SEQ ID NO: 4064638 - RNA, 17 nt, Vaccinia virus
uacguuucuauuuucua

SEQ ID NO: 4064639 - RNA, 16 nt, Vaccinia virus
uacuaaagcaaaggua

SEQ ID NO: 4064640 - RNA, 20 nt, Vaccinia virus
uacuacagaaacuaauauag

SEQ ID NO: 4064641 - RNA, 16 nt, Vaccinia virus
uacuagaauaaagcag

SEQ ID NO: 4064642 - RNA, 22 nt, Vaccinia virus
uacuagacugacuucuaacaaa

SEQ ID NO: 4064643 - RNA, 15 nt, Vaccinia virus
uacuagauguuguaa

SEQ ID NO: 4064644 - RNA, 21 nt, Vaccinia virus
uacuagccuacugccuauuaa

SEQ ID NO: 4064645 - RNA, 17 nt, Vaccinia virus
uacuaggagaauuauuu

SEQ ID NO: 4064646 - RNA, 12 nt, Vaccinia virus
uacuaucagaaa

SEQ ID NO: 4064647 - RNA, 16 nt, Vaccinia virus
uacuaucguaaugggg

SEQ ID NO: 4064648 - RNA, 18 nt, Vaccinia virus
uacuauuuguaauauuua

SEQ ID NO: 4064649 - RNA, 21 nt, Vaccinia virus
uacucagauucaguuucucau

SEQ ID NO: 4064650 - RNA, 14 nt, Vaccinia virus
uacucauuaucauu

SEQ ID NO: 4064651 - RNA, 18 nt, Vaccinia virus
uacucauuuaacagaugu

SEQ ID NO: 4064652 - RNA, 24 nt, Vaccinia virus
uacuccaaaaaacaaaauaacuag

SEQ ID NO: 4064653 - RNA, 20 nt, Vaccinia virus
uacuccucauuacguuucau

SEQ ID NO: 4064654 - RNA, 18 nt, Vaccinia virus
uacucuauucgaaaacuc

SEQ ID NO: 4064655 - RNA, 19 nt, Vaccinia virus
uacucucuauaacaaauau

SEQ ID NO: 4064656 - RNA, 15 nt, Vaccinia virus
uacucuuaagagagc

SEQ ID NO: 4064657 - RNA, 12 nt, Vaccinia virus
uacugcaauaau

SEQ ID NO: 4064658 - RNA, 22 nt, Vaccinia virus
uacuguuuacggagacaaaauu

SEQ ID NO: 4064659 - RNA, 15 nt, Vaccinia virus
uacuuaaaaaaugaa

SEQ ID NO: 4064660 - RNA, 14 nt, Vaccinia virus
uacuuacuuuagaa

SEQ ID NO: 4064661 - RNA, 15 nt, Vaccinia virus
uacuuaucauuuacu

SEQ ID NO: 4064662 - RNA, 17 nt, Vaccinia virus
uacuuauguaugugcau

SEQ ID NO: 4064663 - RNA, 17 nt, Vaccinia virus
uacuucagguuucuuag

SEQ ID NO: 4064664 - RNA, 14 nt, Vaccinia virus
uacuucauaaaaga

SEQ ID NO: 4064665 - RNA, 22 nt, Vaccinia virus
uacuucuccaaucauauagaua

SEQ ID NO: 4064666 - RNA, 14 nt, Vaccinia virus
uacuuguacacaua

SEQ ID NO: 4064667 - RNA, 16 nt, Vaccinia virus
uacuuucaugauuuca

SEQ ID NO: 4064668 - RNA, 13 nt, Vaccinia virus
uacuuuucuaaau

SEQ ID NO: 4064669 - RNA, 19 nt, Vaccinia virus
uacuuuuucaucuuuacau

SEQ ID NO: 4064670 - RNA, 14 nt, Vaccinia virus
uacuuuuucucaua

SEQ ID NO: 4064671 - RNA, 19 nt, Vaccinia virus
uagaaaaacuauaucuaug

SEQ ID NO: 4064672 - RNA, 13 nt, Vaccinia virus
uagaaaaacuuua

SEQ ID NO: 4064673 - RNA, 15 nt, Vaccinia virus
uagaaaacagagaua

SEQ ID NO: 4064674 - RNA, 23 nt, Vaccinia virus
uagaaaauaucacgcuuuccauu

SEQ ID NO: 4064675 - RNA, 14 nt, Vaccinia virus
uagaaaauggauuu

SEQ ID NO: 4064676 - RNA, 16 nt, Vaccinia virus
uagaaaauucuaaggu

SEQ ID NO: 4064677 - RNA, 21 nt, Vaccinia virus
uagaaaccacggaucguaaua

SEQ ID NO: 4064678 - RNA, 21 nt, Vaccinia virus
uagaaacgauaccaucuucug

SEQ ID NO: 4064679 - RNA, 17 nt, Vaccinia virus
uagaaacuauacgaaau

SEQ ID NO: 4064680 - RNA, 22 nt, Vaccinia virus
uagaaauaagagacuuaaacaa

SEQ ID NO: 4064681 - RNA, 14 nt, Vaccinia virus
uagaaauacaaaag

SEQ ID NO: 4064682 - RNA, 12 nt, Vaccinia virus
uagaaauacuua

SEQ ID NO: 4064683 - RNA, 18 nt, Vaccinia virus
uagaacagauuuaacaau

SEQ ID NO: 4064684 - RNA, 18 nt, Vaccinia virus
uagaacgaugucaaaaua

SEQ ID NO: 4064685 - RNA, 14 nt, Vaccinia virus
uagaacucuuuuca

SEQ ID NO: 4064686 - RNA, 17 nt, Vaccinia virus
uagaacuuaucaaagaa

SEQ ID NO: 4064687 - RNA, 15 nt, Vaccinia virus
uagaagaucauacag

SEQ ID NO: 4064688 - RNA, 18 nt, Vaccinia virus
uagaaggaaaaucaucau

SEQ ID NO: 4064689 - RNA, 15 nt, Vaccinia virus
uagaagucaaggaua

SEQ ID NO: 4064690 - RNA, 23 nt, Vaccinia virus
uagaagucugaucuuaacuccuc

SEQ ID NO: 4064691 - RNA, 18 nt, Vaccinia virus
uagaaguuguaaaugaca

SEQ ID NO: 4064692 - RNA, 17 nt, Vaccinia virus
uagaauaaauauccuug

SEQ ID NO: 4064693 - RNA, 19 nt, Vaccinia virus
uagaauaucuccucaagga

SEQ ID NO: 4064694 - RNA, 13 nt, Vaccinia virus
uagaaucaaagga

SEQ ID NO: 4064695 - RNA, 17 nt, Vaccinia virus
uagaaucguccauagca

SEQ ID NO: 4064696 - RNA, 22 nt, Vaccinia virus
uagaaucucuauuugccaauau

SEQ ID NO: 4064697 - RNA, 15 nt, Vaccinia virus
uagaaugaagaaugc

SEQ ID NO: 4064698 - RNA, 21 nt, Vaccinia virus
uagaauguuaucgaugaugua

SEQ ID NO: 4064699 - RNA, 11 nt, Vaccinia virus
uagaauuuaua

SEQ ID NO: 4064700 - RNA, 13 nt, Vaccinia virus
uagacaaaacuau

SEQ ID NO: 4064701 - RNA, 16 nt, Vaccinia virus
uagacaacaggaugaa

SEQ ID NO: 4064702 - RNA, 21 nt, Vaccinia virus
uagacaaugcuaauauauucu

SEQ ID NO: 4064703 - RNA, 21 nt, Vaccinia virus
uagacauaaaaacuaauauua

SEQ ID NO: 4064704 - RNA, 14 nt, Vaccinia virus
uagacauaauacua

SEQ ID NO: 4064705 - RNA, 15 nt, Vaccinia virus
uagacauuaauagaa

SEQ ID NO: 4064706 - RNA, 13 nt, Vaccinia virus
uagacauuuacca

SEQ ID NO: 4064707 - RNA, 14 nt, Vaccinia virus
uagaccuguagccg

SEQ ID NO: 4064708 - RNA, 18 nt, Vaccinia virus
uagacgaggaaacaaugc

SEQ ID NO: 4064709 - RNA, 20 nt, Vaccinia virus
uagacgagggguuagauggu

SEQ ID NO: 4064710 - RNA, 14 nt, Vaccinia virus
uagacgauaugaca

SEQ ID NO: 4064711 - RNA, 17 nt, Vaccinia virus
uagagagguacguguaa

SEQ ID NO: 4064712 - RNA, 13 nt, Vaccinia virus
uagagaucuaauu

SEQ ID NO: 4064713 - RNA, 12 nt, Vaccinia virus
uagagaugaugc

SEQ ID NO: 4064714 - RNA, 20 nt, Vaccinia virus
uagagauuguuaaauuauua

SEQ ID NO: 4064715 - RNA, 21 nt, Vaccinia virus
uagagcccacguuuaaacauu

SEQ ID NO: 4064716 - RNA, 22 nt, Vaccinia virus
uagagcccacguuuaaacauuc

SEQ ID NO: 4064717 - RNA, 14 nt, Vaccinia virus
uagagcucgaugau

SEQ ID NO: 4064718 - RNA, 14 nt, Vaccinia virus
uagagguagcaaaa

SEQ ID NO: 4064719 - RNA, 16 nt, Vaccinia virus
uagaguagacauuaau

SEQ ID NO: 4064720 - RNA, 15 nt, Vaccinia virus
uagauaaaauacuga

SEQ ID NO: 4064721 - RNA, 20 nt, Vaccinia virus
gucaaucuuauucaagcaaa

SEQ ID NO: 4064722 - RNA, 13 nt, Vaccinia virus
gucaauugauucu

SEQ ID NO: 4064723 - RNA, 12 nt, Vaccinia virus
gucacacgcucc

SEQ ID NO: 4064724 - RNA, 14 nt, Vaccinia virus
gucacgaugaugga

SEQ ID NO: 4064725 - RNA, 14 nt, Vaccinia virus
gucaggaaauguau

SEQ ID NO: 4064726 - RNA, 18 nt, Vaccinia virus
gucaugauuaguauuuua

SEQ ID NO: 4064727 - RNA, 14 nt, Vaccinia virus
gucauguuggaaca

SEQ ID NO: 4064728 - RNA, 20 nt, Vaccinia virus
gucauugaaggauaaacucg

SEQ ID NO: 4064729 - RNA, 13 nt, Vaccinia virus
guccaaugauugc

SEQ ID NO: 4064730 - RNA, 16 nt, Vaccinia virus
guccaucauuacagaa

SEQ ID NO: 4064731 - RNA, 16 nt, Vaccinia virus
guccauuaucaguaau

SEQ ID NO: 4064732 - RNA, 13 nt, Vaccinia virus
guccguacuuauu

SEQ ID NO: 4064733 - RNA, 15 nt, Vaccinia virus
guccguuauauaauc

SEQ ID NO: 4064734 - RNA, 18 nt, Vaccinia virus
guccuaaucucuuaacaa

SEQ ID NO: 4064735 - RNA, 23 nt, Vaccinia virus
guccuaaugccuaugauguguuu

SEQ ID NO: 4064736 - RNA, 15 nt, Vaccinia virus
gucgagguuuaaaaa

SEQ ID NO: 4064737 - RNA, 18 nt, Vaccinia virus
gucgauaaaaauuaaaaa

SEQ ID NO: 4064738 - RNA, 14 nt, Vaccinia virus
gucgauaacaaauu

SEQ ID NO: 4064739 - RNA, 14 nt, Vaccinia virus
gucgauauacuuau

SEQ ID NO: 4064740 - RNA, 16 nt, Vaccinia virus
gucggaggauguguua

SEQ ID NO: 4064741 - RNA, 19 nt, Vaccinia virus
gucuaaaccuucuuauucu

SEQ ID NO: 4064742 - RNA, 21 nt, Vaccinia virus
gucuagaauaucacauacuga

SEQ ID NO: 4064743 - RNA, 20 nt, Vaccinia virus
gucuaguaaguagaaauuau

SEQ ID NO: 4064744 - RNA, 13 nt, Vaccinia virus
gucuauaguucuc

SEQ ID NO: 4064745 - RNA, 20 nt, Vaccinia virus
gucuauccauuguuucacau

SEQ ID NO: 4064746 - RNA, 18 nt, Vaccinia virus
gucucagaauucuaaaug

SEQ ID NO: 4064747 - RNA, 13 nt, Vaccinia virus
gucucauagagaa

SEQ ID NO: 4064748 - RNA, 22 nt, Vaccinia virus
gucucauggccguguaugaaau

SEQ ID NO: 4064749 - RNA, 16 nt, Vaccinia virus
gucucuauaaaaauga

SEQ ID NO: 4064750 - RNA, 14 nt, Vaccinia virus
gucuggauuaaucu

SEQ ID NO: 4064751 - RNA, 15 nt, Vaccinia virus
gucuggauuaaucug

SEQ ID NO: 4064752 - RNA, 16 nt, Vaccinia virus
gucuuacacauucgcu

SEQ ID NO: 4064753 - RNA, 11 nt, Vaccinia virus
gucuuuucuaa

SEQ ID NO: 4064754 - RNA, 19 nt, Vaccinia virus
gugaaaauuacauacuuaa

SEQ ID NO: 4064755 - RNA, 14 nt, Vaccinia virus
gugacguacaaaaa

SEQ ID NO: 4064756 - RNA, 14 nt, Vaccinia virus
gugaucaucuucau

SEQ ID NO: 4064757 - RNA, 23 nt, Vaccinia virus
gugauccuauaaacaugaauuua

SEQ ID NO: 4064758 - RNA, 17 nt, Vaccinia virus
gugauggauuuaaacau

SEQ ID NO: 4064759 - RNA, 16 nt, Vaccinia virus
gugauguuguaacacu

SEQ ID NO: 4064760 - RNA, 13 nt, Vaccinia virus
gugauuuuccaac

SEQ ID NO: 4064761 - RNA, 13 nt, Vaccinia virus
gugcaaaugaggu

SEQ ID NO: 4064762 - RNA, 18 nt, Vaccinia virus
gugcaaggaaucaucuga

SEQ ID NO: 4064763 - RNA, 20 nt, Vaccinia virus
gugcaauuagauccaaagaa

SEQ ID NO: 4064764 - RNA, 23 nt, Vaccinia virus
gugcauaaauuaagauacaacaa

SEQ ID NO: 4064765 - RNA, 14 nt, Vaccinia virus
gugcauaucuuuuu

SEQ ID NO: 4064766 - RNA, 15 nt, Vaccinia virus
gugcgcugaggucgg

SEQ ID NO: 4064767 - RNA, 22 nt, Vaccinia virus
gugcuauuagaauuuacaaaac

SEQ ID NO: 4064768 - RNA, 13 nt, Vaccinia virus
gugcuguaacauu

SEQ ID NO: 4064769 - RNA, 14 nt, Vaccinia virus
gugcuuaauguuuc

SEQ ID NO: 4064770 - RNA, 13 nt, Vaccinia virus
guggacauuuaac

SEQ ID NO: 4064771 - RNA, 20 nt, Vaccinia virus
guggauacaaugaguauuua

SEQ ID NO: 4064772 - RNA, 12 nt, Vaccinia virus
gugggaugaugu

SEQ ID NO: 4064773 - RNA, 15 nt, Vaccinia virus
gugguagauauauag

SEQ ID NO: 4064774 - RNA, 18 nt, Vaccinia virus
gugguauuggauagaauu

SEQ ID NO: 4064775 - RNA, 18 nt, Vaccinia virus
gugguguaacaauaucuu

SEQ ID NO: 4064776 - RNA, 17 nt, Vaccinia virus
guguauaaaauauacug

SEQ ID NO: 4064777 - RNA, 15 nt, Vaccinia virus
guguauaacaucuuu

SEQ ID NO: 4064778 - RNA, 22 nt, Vaccinia virus
guguauauuuuuucauuuuuua

SEQ ID NO: 4064779 - RNA, 17 nt, Vaccinia virus
guguaucgacaucuuua

SEQ ID NO: 4064780 - RNA, 19 nt, Vaccinia virus
guguauuaaauagaauauu

SEQ ID NO: 4064781 - RNA, 21 nt, Vaccinia virus
guguauuguuuaguucauccu

SEQ ID NO: 4064782 - RNA, 22 nt, Vaccinia virus
guguauuuaaguugguagauuu

SEQ ID NO: 4064783 - RNA, 14 nt, Vaccinia virus
guguccauuuuuua

SEQ ID NO: 4064784 - RNA, 19 nt, Vaccinia virus
guguccguauaccaacaug

SEQ ID NO: 4064785 - RNA, 17 nt, Vaccinia virus
guguccuuuuucauccu

SEQ ID NO: 4064786 - RNA, 18 nt, Vaccinia virus
gugucuuuaaucauguac

SEQ ID NO: 4064787 - RNA, 13 nt, Vaccinia virus
guguguagauauc

SEQ ID NO: 4064788 - RNA, 18 nt, Vaccinia virus
gcaaaucuaguaaaucaa

SEQ ID NO: 4064789 - RNA, 14 nt, Vaccinia virus
gcaaauuauuucuu

SEQ ID NO: 4064790 - RNA, 18 nt, Vaccinia virus
gcaacggauuuaauuuua

SEQ ID NO: 4064791 - RNA, 22 nt, Vaccinia virus
gcaauaacaaagauucuuccuc

SEQ ID NO: 4064792 - RNA, 22 nt, Vaccinia virus
gcaauauaaaugguauauuuua

SEQ ID NO: 4064793 - RNA, 21 nt, Vaccinia virus
gcaauauaucaucuuuucacu

SEQ ID NO: 4064794 - RNA, 19 nt, Vaccinia virus
gcaauggcucuaacaacaa

SEQ ID NO: 4064795 - RNA, 16 nt, Vaccinia virus
gcaauuauauaaugua

SEQ ID NO: 4064796 - RNA, 14 nt, Vaccinia virus
gcaauucauuuucg

SEQ ID NO: 4064797 - RNA, 21 nt, Vaccinia virus
gcacaaucguuccaugauggg

SEQ ID NO: 4064798 - RNA, 16 nt, Vaccinia virus
gcacaaugaaugauau

SEQ ID NO: 4064799 - RNA, 17 nt, Vaccinia virus
gcacauccaucaaagaa

SEQ ID NO: 4064800 - RNA, 19 nt, Vaccinia virus
gcacuaaugcaaauuacuu

SEQ ID NO: 4064801 - RNA, 12 nt, Vaccinia virus
gcacuauuucua

SEQ ID NO: 4064802 - RNA, 16 nt, Vaccinia virus
gcacugguuuaguuca

SEQ ID NO: 4064803 - RNA, 19 nt, Vaccinia virus
gcagacuagaaauaacagg

SEQ ID NO: 4064804 - RNA, 12 nt, Vaccinia virus
gcagaugaugau

SEQ ID NO: 4064805 - RNA, 23 nt, Vaccinia virus
gcagauuguugccguaaauccug

SEQ ID NO: 4064806 - RNA, 16 nt, Vaccinia virus
gcagguacuauaauau

SEQ ID NO: 4064807 - RNA, 19 nt, Vaccinia virus
gcagucauuccaucauuua

SEQ ID NO: 4064808 - RNA, 13 nt, Vaccinia virus
gcauacauagaag

SEQ ID NO: 4064809 - RNA, 20 nt, Vaccinia virus
gcauauuaaaguaaaaucua

SEQ ID NO: 4064810 - RNA, 15 nt, Vaccinia virus
gcauauuagaaucua

SEQ ID NO: 4064811 - RNA, 21 nt, Vaccinia virus
gcauauuccuaaauacaucua

SEQ ID NO: 4064812 - RNA, 18 nt, Vaccinia virus
gcaucagacgcaauaaca

SEQ ID NO: 4064813 - RNA, 17 nt, Vaccinia virus
gcaucauaaaaaugagu

SEQ ID NO: 4064814 - RNA, 23 nt, Vaccinia virus
gcaucauacgaaaauagauucua

SEQ ID NO: 4064815 - RNA, 12 nt, Vaccinia virus
gcauccauccaa

SEQ ID NO: 4064816 - RNA, 21 nt, Vaccinia virus
gcauccuauucgaauaaugag

SEQ ID NO: 4064817 - RNA, 17 nt, Vaccinia virus
gcaucugguacaauaaa

SEQ ID NO: 4064818 - RNA, 20 nt, Vaccinia virus
gcaugguaguucguagauuu

SEQ ID NO: 4064819 - RNA, 22 nt, Vaccinia virus
gcauguagaaugugauaauuau

SEQ ID NO: 4064820 - RNA, 20 nt, Vaccinia virus
gcauguauuuuuuucugaau

SEQ ID NO: 4064821 - RNA, 18 nt, Vaccinia virus
gcauuaauacuguuuucu

SEQ ID NO: 4064822 - RNA, 20 nt, Vaccinia virus
gcauuagaugaaaaauggaa

SEQ ID NO: 4064823 - RNA, 16 nt, Vaccinia virus
gcauuaguaacagcuu

SEQ ID NO: 4064824 - RNA, 16 nt, Vaccinia virus
gcauucuuggaugaau

SEQ ID NO: 4064825 - RNA, 14 nt, Vaccinia virus
gcauuguuaagaca

SEQ ID NO: 4064826 - RNA, 14 nt, Vaccinia virus
gcauuuccaaagaa

SEQ ID NO: 4064827 - RNA, 15 nt, Vaccinia virus
gcauuucuaauacau

SEQ ID NO: 4064828 - RNA, 22 nt, Vaccinia virus
gcauuugugccgcauacagauc

SEQ ID NO: 4064829 - RNA, 16 nt, Vaccinia virus
gccaauugucuuucuc

SEQ ID NO: 4064830 - RNA, 13 nt, Vaccinia virus
gccacaaaugaaa

SEQ ID NO: 4064831 - RNA, 14 nt, Vaccinia virus
gccauuauuagaaa

SEQ ID NO: 4064832 - RNA, 23 nt, Vaccinia virus
gccauuuaguuauugaaauuaau

SEQ ID NO: 4064833 - RNA, 20 nt, Vaccinia virus
gccgauagucucauagucua

SEQ ID NO: 4064834 - RNA, 16 nt, Vaccinia virus
gccuauccaauaaucc

SEQ ID NO: 4064835 - RNA, 22 nt, Vaccinia virus
gccugaguaguuggaagaaucu

SEQ ID NO: 4064836 - RNA, 21 nt, Vaccinia virus
gccuuaauccuagaugaugau

SEQ ID NO: 4064837 - RNA, 16 nt, Vaccinia virus
gccuucgaauaaauaa

SEQ ID NO: 4064838 - RNA, 12 nt, Vaccinia virus
gcgaauauuaaa

SEQ ID NO: 4064839 - RNA, 14 nt, Vaccinia virus
gcgaauuacucugu

SEQ ID NO: 4064840 - RNA, 13 nt, Vaccinia virus
gcgaguguuacaa

SEQ ID NO: 4064841 - RNA, 13 nt, Vaccinia virus
gcggauacaaaac

SEQ ID NO: 4064842 - RNA, 17 nt, Vaccinia virus
gcgguaaacauucaugu

SEQ ID NO: 4064843 - RNA, 19 nt, Vaccinia virus
gcgguuuaauaaauguuuu

SEQ ID NO: 4064844 - RNA, 18 nt, Vaccinia virus
gcguaaaagucaaauuag

SEQ ID NO: 4064845 - RNA, 15 nt, Vaccinia virus
gcguaauguuagccc

SEQ ID NO: 4064846 - RNA, 21 nt, Vaccinia virus
gcguauaaugaaucuaaacuu

SEQ ID NO: 4064847 - RNA, 13 nt, Vaccinia virus
gcguauuuaagag

SEQ ID NO: 4064848 - RNA, 23 nt, Vaccinia virus
gcgucuguuuuauacauuuuuua

SEQ ID NO: 4064849 - RNA, 15 nt, Vaccinia virus
gcguggauuguuaac

SEQ ID NO: 4064850 - RNA, 11 nt, Vaccinia virus
gcguuaaacau

SEQ ID NO: 4064851 - RNA, 19 nt, Vaccinia virus
gcguucaagauuaucuuua

SEQ ID NO: 4064852 - RNA, 17 nt, Vaccinia virus
gcuaaaauuuucaucaa

SEQ ID NO: 4064853 - RNA, 16 nt, Vaccinia virus
gcuaauaaauaaugau

SEQ ID NO: 4064854 - RNA, 17 nt, Vaccinia virus
gcuaauuugauaaagau

SEQ ID NO: 4064855 - RNA, 21 nt, Vaccinia virus
gcuacaggucuaccuuuacaa

SEQ ID NO: 4064856 - RNA, 12 nt, Vaccinia virus
gcuacaguaaaa

SEQ ID NO: 4064857 - RNA, 21 nt, Vaccinia virus
gcuaccaucccacucuagaga

SEQ ID NO: 4064858 - RNA, 17 nt, Vaccinia virus
gcuauaacuugcuucaa

SEQ ID NO: 4064859 - RNA, 17 nt, Vaccinia virus
gcuauauggauauucau

SEQ ID NO: 4064860 - RNA, 22 nt, Vaccinia virus
gcuauauuccuguuaucaucau

SEQ ID NO: 4064861 - RNA, 16 nt, Vaccinia virus
gcuaucgcauaaucug

SEQ ID NO: 4064862 - RNA, 19 nt, Vaccinia virus
gcuauggcuucuuaaauca

SEQ ID NO: 4064863 - RNA, 17 nt, Vaccinia virus
gcuauguuaucaugaaa

SEQ ID NO: 4064864 - RNA, 14 nt, Vaccinia virus
gcuauuaaucuuua

SEQ ID NO: 4064865 - RNA, 10 nt, Vaccinia virus
ggauuacuua

SEQ ID NO: 4064866 - RNA, 13 nt, Vaccinia virus
ggauucaaaaaga

SEQ ID NO: 4064867 - RNA, 22 nt, Vaccinia virus
ggauucauccuguugucuaaau

SEQ ID NO: 4064868 - RNA, 17 nt, Vaccinia virus
ggauuucucauagaccu

SEQ ID NO: 4064869 - RNA, 20 nt, Vaccinia virus
ggauuugguaagacuauuac

SEQ ID NO: 4064870 - RNA, 15 nt, Vaccinia virus
ggcacuuauuucaug

SEQ ID NO: 4064871 - RNA, 13 nt, Vaccinia virus
ggcauuguuucua

SEQ ID NO: 4064872 - RNA, 20 nt, Vaccinia virus
ggccuguucauaaauaaaaa

SEQ ID NO: 4064873 - RNA, 20 nt, Vaccinia virus
ggcggaguaaguguugagcu

SEQ ID NO: 4064874 - RNA, 19 nt, Vaccinia virus
ggcguguuauacggagaag

SEQ ID NO: 4064875 - RNA, 20 nt, Vaccinia virus
ggcuacacacgguagaaaaa

SEQ ID NO: 4064876 - RNA, 16 nt, Vaccinia virus
ggcuccucucucaggc

SEQ ID NO: 4064877 - RNA, 19 nt, Vaccinia virus
ggcuccucucucaggcucu

SEQ ID NO: 4064878 - RNA, 13 nt, Vaccinia virus
gggaaaagucaaa

SEQ ID NO: 4064879 - RNA, 11 nt, Vaccinia virus
gggaaucgaug

SEQ ID NO: 4064880 - RNA, 21 nt, Vaccinia virus
gguagauuuguucuauagagc

SEQ ID NO: 4064881 - RNA, 17 nt, Vaccinia virus
gguauacuaguagguaa

SEQ ID NO: 4064882 - RNA, 20 nt, Vaccinia virus
ggucauauuauagauuuaau

SEQ ID NO: 4064883 - RNA, 23 nt, Vaccinia virus
ggucgucgauaacaaauuaaaga

SEQ ID NO: 4064884 - RNA, 15 nt, Vaccinia virus
ggugaauccaucucu

SEQ ID NO: 4064885 - RNA, 16 nt, Vaccinia virus
gguuaugauuuauaca

SEQ ID NO: 4064886 - RNA, 18 nt, Vaccinia virus
gguucccaauuccaaaga

SEQ ID NO: 4064887 - RNA, 16 nt, Vaccinia virus
gguugccaaauuuauu

SEQ ID NO: 4064888 - RNA, 20 nt, Vaccinia virus
guaaaaaaauuauacuguaa

SEQ ID NO: 4064889 - RNA, 14 nt, Vaccinia virus
guaaaaaauaauau

SEQ ID NO: 4064890 - RNA, 18 nt, Vaccinia virus
guaaaagaucuauaaugu

SEQ ID NO: 4064891 - RNA, 23 nt, Vaccinia virus
guaaaaguacagaauuaauuaga

SEQ ID NO: 4064892 - RNA, 12 nt, Vaccinia virus
guaaaauaucua

SEQ ID NO: 4064893 - RNA, 13 nt, Vaccinia virus
guaaaaucuauca

SEQ ID NO: 4064894 - RNA, 14 nt, Vaccinia virus
guaaacacauaucc

SEQ ID NO: 4064895 - RNA, 22 nt, Vaccinia virus
guaaacauugacggauaaaaca

SEQ ID NO: 4064896 - RNA, 23 nt, Vaccinia virus
guaaacauugacggauaaaacaa

SEQ ID NO: 4064897 - RNA, 13 nt, Vaccinia virus
guaaagacaauga

SEQ ID NO: 4064898 - RNA, 22 nt, Vaccinia virus
guaaauagaaucguauaauguc

SEQ ID NO: 4064899 - RNA, 23 nt, Vaccinia virus
guaaauaguuuuacguuauuaau

SEQ ID NO: 4064900 - RNA, 18 nt, Vaccinia virus
guaaauauucuaaauuaa

SEQ ID NO: 4064901 - RNA, 17 nt, Vaccinia virus
guaaaucauuaucuaca

SEQ ID NO: 4064902 - RNA, 14 nt, Vaccinia virus
guaaaugaugaaau

SEQ ID NO: 4064903 - RNA, 10 nt, Vaccinia virus
guaaauuaac

SEQ ID NO: 4064904 - RNA, 17 nt, Vaccinia virus
guaaccaaauacauauu

SEQ ID NO: 4064905 - RNA, 17 nt, Vaccinia virus
guaacuacguucaucau

SEQ ID NO: 4064906 - RNA, 22 nt, Vaccinia virus
guaacuaguuuuauacacaucu

SEQ ID NO: 4064907 - RNA, 20 nt, Vaccinia virus
guaacuccagaacaucuucc

SEQ ID NO: 4064908 - RNA, 19 nt, Vaccinia virus
guaagaagauuauauucua

SEQ ID NO: 4064909 - RNA, 19 nt, Vaccinia virus
guaagauuccuaaauuagu

SEQ ID NO: 4064910 - RNA, 13 nt, Vaccinia virus
guaauaaacuguu

SEQ ID NO: 4064911 - RNA, 12 nt, Vaccinia virus
guaauaauugcu

SEQ ID NO: 4064912 - RNA, 15 nt, Vaccinia virus
guaauaccauguuua

SEQ ID NO: 4064913 - RNA, 19 nt, Vaccinia virus
guaauaccauguuuaagau

SEQ ID NO: 4064914 - RNA, 13 nt, Vaccinia virus
guaauauucuagu

SEQ ID NO: 4064915 - RNA, 14 nt, Vaccinia virus
guaauauucuaguu

SEQ ID NO: 4064916 - RNA, 13 nt, Vaccinia virus
guaaugaagagaa

SEQ ID NO: 4064917 - RNA, 15 nt, Vaccinia virus
guaauggauaaugac

SEQ ID NO: 4064918 - RNA, 19 nt, Vaccinia virus
guaauguccaaaucuaguu

SEQ ID NO: 4064919 - RNA, 17 nt, Vaccinia virus
guaauuaguuucugguu

SEQ ID NO: 4064920 - RNA, 17 nt, Vaccinia virus
guacaaaaaagaacuaa

SEQ ID NO: 4064921 - RNA, 15 nt, Vaccinia virus
guacaaauauguaca

SEQ ID NO: 4064922 - RNA, 20 nt, Vaccinia virus
guacacuuuuuaauucucua

SEQ ID NO: 4064923 - RNA, 19 nt, Vaccinia virus
guacagaauuaauuagacg

SEQ ID NO: 4064924 - RNA, 12 nt, Vaccinia virus
guacauacuaga

SEQ ID NO: 4064925 - RNA, 15 nt, Vaccinia virus
guacauggaugauau

SEQ ID NO: 4064926 - RNA, 23 nt, Vaccinia virus
guacauggaugauauagauauga

SEQ ID NO: 4064927 - RNA, 16 nt, Vaccinia virus
guacauuaauaaauga

SEQ ID NO: 4064928 - RNA, 18 nt, Vaccinia virus
guaccaucgugauucuua

SEQ ID NO: 4064929 - RNA, 14 nt, Vaccinia virus
guaccauuuuuaac

SEQ ID NO: 4064930 - RNA, 17 nt, Vaccinia virus
guacccacugaugagau

SEQ ID NO: 4064931 - RNA, 17 nt, Vaccinia virus
guacggucugauauuau

SEQ ID NO: 4064932 - RNA, 20 nt, Vaccinia virus
guacuauuuuuuacauuacu

SEQ ID NO: 4064933 - RNA, 18 nt, Vaccinia virus
guacucguguccauaauc

SEQ ID NO: 4064934 - RNA, 23 nt, Vaccinia virus
guacuguucaaacaugaugagau

SEQ ID NO: 4064935 - RNA, 14 nt, Vaccinia virus
guagaaauuuuucu

SEQ ID NO: 4064936 - RNA, 21 nt, Vaccinia virus
guagaacaacgauuuaaucau

SEQ ID NO: 4064937 - RNA, 17 nt, Vaccinia virus
guagaacguaaauuagu

SEQ ID NO: 4064938 - RNA, 21 nt, Vaccinia virus
guagacgagccuagaaaucaa

SEQ ID NO: 4064939 - RNA, 15 nt, Vaccinia virus
guagauaucuuuacu

SEQ ID NO: 4064940 - RNA, 18 nt, Vaccinia virus
guagaucgucuaaaagaa

SEQ ID NO: 4064941 - RNA, 17 nt, Vaccinia virus
guagcaaagaaauuaau

SEQ ID NO: 4064942 - RNA, 18 nt, Vaccinia virus
guagcauuuucuuaacaa

SEQ ID NO: 4064943 - RNA, 16 nt, Vaccinia virus
guaggguuaaucgaac

SEQ ID NO: 4064944 - RNA, 18 nt, Vaccinia virus
guaguauaugaacaaacg

SEQ ID NO: 4064945 - RNA, 23 nt, Vaccinia virus
guaguuuaucgguuuuaaaucaa

SEQ ID NO: 4064946 - RNA, 11 nt, Vaccinia virus
guauaaacucc

SEQ ID NO: 4064947 - RNA, 14 nt, Vaccinia virus
guauaaagauguua

SEQ ID NO: 4064948 - RNA, 22 nt, Vaccinia virus
guauaauagaccacgauaauau

SEQ ID NO: 4064949 - RNA, 16 nt, Vaccinia virus
guauaauauuuaaaca

SEQ ID NO: 4064950 - RNA, 15 nt, Vaccinia virus
guauaaucuggugga

SEQ ID NO: 4064951 - RNA, 19 nt, Vaccinia virus
guauacucccuugcaucau

SEQ ID NO: 4064952 - RNA, 22 nt, Vaccinia virus
guauacucugcccuuuauuaca

SEQ ID NO: 4064953 - RNA, 16 nt, Vaccinia virus
guauacuugucaucau

SEQ ID NO: 4064954 - RNA, 13 nt, Vaccinia virus
guauauacauaga

SEQ ID NO: 4064955 - RNA, 22 nt, Vaccinia virus
guauauaucauuuguacauugu

SEQ ID NO: 4064956 - RNA, 16 nt, Vaccinia virus
guauaucuauauuaac

SEQ ID NO: 4064957 - RNA, 13 nt, Vaccinia virus
guauauguuucua

SEQ ID NO: 4064958 - RNA, 15 nt, Vaccinia virus
guauauucucuaguu

SEQ ID NO: 4064959 - RNA, 15 nt, Vaccinia virus
guaucauauauuaaa

SEQ ID NO: 4064960 - RNA, 23 nt, Vaccinia virus
guauccacaaauaguaaaugaga

SEQ ID NO: 4064961 - RNA, 20 nt, Vaccinia virus
guauccauuuuauaucacua

SEQ ID NO: 4064962 - RNA, 17 nt, Vaccinia virus
guaucgaaaaacuuuaa

SEQ ID NO: 4064963 - RNA, 19 nt, Vaccinia virus
guaucgauaauuauuucua

SEQ ID NO: 4064964 - RNA, 20 nt, Vaccinia virus
guaucgauaguguaguuauu

SEQ ID NO: 4064965 - RNA, 12 nt, Vaccinia virus
guaucuacuaga

SEQ ID NO: 4064966 - RNA, 14 nt, Vaccinia virus
guaucuuuacuaga

SEQ ID NO: 4064967 - RNA, 19 nt, Vaccinia virus
guauggaauauaauaaucu

SEQ ID NO: 4064968 - RNA, 21 nt, Vaccinia virus
guaugucccaauauuaaugca

SEQ ID NO: 4064969 - RNA, 15 nt, Vaccinia virus
guaugucuuauguau

SEQ ID NO: 4064970 - RNA, 15 nt, Vaccinia virus
guauguuuaaacacu

SEQ ID NO: 4064971 - RNA, 16 nt, Vaccinia virus
guauuaaguuuggaga

SEQ ID NO: 4064972 - RNA, 21 nt, Vaccinia virus
guauuaauacaugucuuagau

SEQ ID NO: 4064973 - RNA, 13 nt, Vaccinia virus
guauuagauaaau

SEQ ID NO: 4064974 - RNA, 17 nt, Vaccinia virus
guauuaucagauaucca

SEQ ID NO: 4064975 - RNA, 19 nt, Vaccinia virus
guauuauucauuuucuauu

SEQ ID NO: 4064976 - RNA, 23 nt, Vaccinia virus
guauucauuguuuagaauacaag

SEQ ID NO: 4064977 - RNA, 19 nt, Vaccinia virus
guauucauuuaucacaaaa

SEQ ID NO: 4064978 - RNA, 18 nt, Vaccinia virus
guauucggcauuucuaaa

SEQ ID NO: 4064979 - RNA, 22 nt, Vaccinia virus
guauucuauacccaucauguaa

SEQ ID NO: 4064980 - RNA, 16 nt, Vaccinia virus
guauucuauuuuggaa

SEQ ID NO: 4064981 - RNA, 17 nt, Vaccinia virus
guauucugaugauauua

SEQ ID NO: 4064982 - RNA, 14 nt, Vaccinia virus
guauugacaaauau

SEQ ID NO: 4064983 - RNA, 17 nt, Vaccinia virus
guauugcgcuacugauu

SEQ ID NO: 4064984 - RNA, 21 nt, Vaccinia virus
guauuuccauaauaagguuua

SEQ ID NO: 4064985 - RNA, 22 nt, Vaccinia virus
guauuucguaccuguauguaca

SEQ ID NO: 4064986 - RNA, 18 nt, Vaccinia virus
guauuucuggugauaaau

SEQ ID NO: 4064987 - RNA, 11 nt, Vaccinia virus
guauuuggauu

SEQ ID NO: 4064988 - RNA, 13 nt, Vaccinia virus
gucaaagaaauac

SEQ ID NO: 4064989 - RNA, 14 nt, Vaccinia virus
gucaagaugaugaa

SEQ ID NO: 4064990 - RNA, 20 nt, Vaccinia virus
gucaauaaggcguuuaaaaa

SEQ ID NO: 4064991 - RNA, 12 nt, Vaccinia virus
gucaauacugua

SEQ ID NO: 4064992 - RNA, 18 nt, Vaccinia virus
auuaauaaaggaugugga

SEQ ID NO: 4064993 - RNA, 14 nt, Vaccinia virus
auuaauacauuauu

SEQ ID NO: 4064994 - RNA, 17 nt, Vaccinia virus
auuaauagauauaucuc

SEQ ID NO: 4064995 - RNA, 13 nt, Vaccinia virus
auuaauaguuuug

SEQ ID NO: 4064996 - RNA, 17 nt, Vaccinia virus
auuaauaugcucaugaa

SEQ ID NO: 4064997 - RNA, 19 nt, Vaccinia virus
auuaaucuaguagaaaaga

SEQ ID NO: 4064998 - RNA, 16 nt, Vaccinia virus
auuaauguauuauuau

SEQ ID NO: 4064999 - RNA, 17 nt, Vaccinia virus
auuaauuaucacauauu

SEQ ID NO: 4065000 - RNA, 11 nt, Vaccinia virus
auuaauuauug

SEQ ID NO: 4065001 - RNA, 15 nt, Vaccinia virus
auuaauucuguaaau

SEQ ID NO: 4065002 - RNA, 13 nt, Vaccinia virus
auuaauuguuaaa

SEQ ID NO: 4065003 - RNA, 20 nt, Vaccinia virus
auuaauuguuauuuuauuca

SEQ ID NO: 4065004 - RNA, 17 nt, Vaccinia virus
auuacaacaacauauga

SEQ ID NO: 4065005 - RNA, 14 nt, Vaccinia virus
auuacacauuucca

SEQ ID NO: 4065006 - RNA, 20 nt, Vaccinia virus
auuacgaauauauaaaagac

SEQ ID NO: 4065007 - RNA, 16 nt, Vaccinia virus
auuacggagugugaaa

SEQ ID NO: 4065008 - RNA, 15 nt, Vaccinia virus
auuacguuucauuuu

SEQ ID NO: 4065009 - RNA, 19 nt, Vaccinia virus
auuacuaaaucuguauauc

SEQ ID NO: 4065010 - RNA, 22 nt, Vaccinia virus
auuacuaugaauaucuucuaug

SEQ ID NO: 4065011 - RNA, 20 nt, Vaccinia virus
auuacuaugaaucauaaaga

SEQ ID NO: 4065012 - RNA, 14 nt, Vaccinia virus
auuacuauuuguaa

SEQ ID NO: 4065013 - RNA, 15 nt, Vaccinia virus
auuacucaugcauuu

SEQ ID NO: 4065014 - RNA, 12 nt, Vaccinia virus
auuacuuaaaaa

SEQ ID NO: 4065015 - RNA, 17 nt, Vaccinia virus
auuagaauagucucuuu

SEQ ID NO: 4065016 - RNA, 17 nt, Vaccinia virus
auuagacgauaugacau

SEQ ID NO: 4065017 - RNA, 23 nt, Vaccinia virus
auuagacuuuucguauguaaugu

SEQ ID NO: 4065018 - RNA, 16 nt, Vaccinia virus
auuagagguaaugaug

SEQ ID NO: 4065019 - RNA, 20 nt, Vaccinia virus
auuagaguuaggcaauguau

SEQ ID NO: 4065020 - RNA, 15 nt, Vaccinia virus
auuagauacauagau

SEQ ID NO: 4065021 - RNA, 15 nt, Vaccinia virus
auuagaugagaaauu

SEQ ID NO: 4065022 - RNA, 20 nt, Vaccinia virus
auuagauggagaguauauuu

SEQ ID NO: 4065023 - RNA, 22 nt, Vaccinia virus
auuagguaaaguaggacauaau

SEQ ID NO: 4065024 - RNA, 18 nt, Vaccinia virus
auuaguaaaacuagcauu

SEQ ID NO: 4065025 - RNA, 14 nt, Vaccinia virus
auuaguaacagcuu

SEQ ID NO: 4065026 - RNA, 15 nt, Vaccinia virus
auuaguaugguuuca

SEQ ID NO: 4065027 - RNA, 19 nt, Vaccinia virus
auuagugaugaauugaaaa

SEQ ID NO: 4065028 - RNA, 20 nt, Vaccinia virus
auuaguuaguguaauguuaa

SEQ ID NO: 4065029 - RNA, 13 nt, Vaccinia virus
auuaguuucuuga

SEQ ID NO: 4065030 - RNA, 15 nt, Vaccinia virus
auuauaaagauaugu

SEQ ID NO: 4065031 - RNA, 14 nt, Vaccinia virus
auuauaagaaauau

SEQ ID NO: 4065032 - RNA, 15 nt, Vaccinia virus
auuauaaugaauauu

SEQ ID NO: 4065033 - RNA, 21 nt, Vaccinia virus
auuauacgcauaaauuguaaa

SEQ ID NO: 4065034 - RNA, 15 nt, Vaccinia virus
auuauagauguguau

SEQ ID NO: 4065035 - RNA, 22 nt, Vaccinia virus
auuauagguaacauaaaaacug

SEQ ID NO: 4065036 - RNA, 19 nt, Vaccinia virus
auaaaucuuuaucaagcac

SEQ ID NO: 4065037 - RNA, 15 nt, Vaccinia virus
auaaaugacaaguau

SEQ ID NO: 4065038 - RNA, 13 nt, Vaccinia virus
auaaauggagaau

SEQ ID NO: 4065039 - RNA, 19 nt, Vaccinia virus
auaaauucaaccaugaauu

SEQ ID NO: 4065040 - RNA, 14 nt, Vaccinia virus
auauaguuaauagu

SEQ ID NO: 4065041 - RNA, 21 nt, Vaccinia virus
auauaguuauuaaugaugaaa

SEQ ID NO: 4065042 - RNA, 16 nt, Vaccinia virus
auauaguucaaauuaa

SEQ ID NO: 4065043 - RNA, 22 nt, Vaccinia virus
auauauacucugagauaaaaca

SEQ ID NO: 4065044 - RNA, 13 nt, Vaccinia virus
auauauagaaugg

SEQ ID NO: 4065045 - RNA, 22 nt, Vaccinia virus
acuuuaauccuguguuuauaga

SEQ ID NO: 4065046 - RNA, 23 nt, Vaccinia virus
acuuuacaaacgauguacugaag

SEQ ID NO: 4065047 - RNA, 16 nt, Vaccinia virus
acuuuaucagauuaaa

SEQ ID NO: 4065048 - RNA, 23 nt, Vaccinia virus
acuuuauuacuccauuaaauaau

SEQ ID NO: 4065049 - RNA, 21 nt, Vaccinia virus
acuuucgaauaaguuugcaga

SEQ ID NO: 4065050 - RNA, 15 nt, Vaccinia virus
acuuucgguucuuua

SEQ ID NO: 4065051 - RNA, 13 nt, Vaccinia virus
acuuucucuaaau

SEQ ID NO: 4065052 - RNA, 13 nt, Vaccinia virus
acuuuguuaauaa

SEQ ID NO: 4065053 - RNA, 16 nt, Vaccinia virus
acuuuuaauuaacaaa

SEQ ID NO: 4065054 - RNA, 16 nt, Vaccinia virus
acuuuucauuaauagg

SEQ ID NO: 4065055 - RNA, 22 nt, Vaccinia virus
acuuuuggaaucguucaaaacc

SEQ ID NO: 4065056 - RNA, 13 nt, Vaccinia virus
acuuuuuacuaau

SEQ ID NO: 4065057 - RNA, 22 nt, Vaccinia virus
acuuuuucuagaaaaaaaauug

SEQ ID NO: 4065058 - RNA, 15 nt, Vaccinia virus
acuuuuucucauaau

SEQ ID NO: 4065059 - RNA, 22 nt, Vaccinia virus
acuuuuuguuuauauuaaauau

SEQ ID NO: 4065060 - RNA, 13 nt, Vaccinia virus
agaaaaaaauauu

SEQ ID NO: 4065061 - RNA, 14 nt, Vaccinia virus
agaaaaaacaaugu

SEQ ID NO: 4065062 - RNA, 12 nt, Vaccinia virus
agaaaaaaugau

SEQ ID NO: 4065063 - RNA, 16 nt, Vaccinia virus
agaaaaauauaaugua

SEQ ID NO: 4065064 - RNA, 20 nt, Vaccinia virus
agaaaaaucauuaaaaagau

SEQ ID NO: 4065065 - RNA, 12 nt, Vaccinia virus
agaaaaaugauu

SEQ ID NO: 4065066 - RNA, 11 nt, Vaccinia virus
agaaaacauuu

SEQ ID NO: 4065067 - RNA, 23 nt, Vaccinia virus
agaaaacucguuauuaacuaugu

SEQ ID NO: 4065068 - RNA, 22 nt, Vaccinia virus
agaaaagcaguuaccaaagaga

SEQ ID NO: 4065069 - RNA, 17 nt, Vaccinia virus
agaaaauacaacggaua

SEQ ID NO: 4065070 - RNA, 20 nt, Vaccinia virus
agaaaaugcagaaaugauuu

SEQ ID NO: 4065071 - RNA, 13 nt, Vaccinia virus
agaaacaaaaagu

SEQ ID NO: 4065072 - RNA, 19 nt, Vaccinia virus
agaaacgauaccaucuucu

SEQ ID NO: 4065073 - RNA, 18 nt, Vaccinia virus
agaaacgcaacaaaugau

SEQ ID NO: 4065074 - RNA, 16 nt, Vaccinia virus
agaaacggaggagaac

SEQ ID NO: 4065075 - RNA, 19 nt, Vaccinia virus
agaaacuugcaaaaaagac

SEQ ID NO: 4065076 - RNA, 22 nt, Vaccinia virus
agaaaggugugcacucugaauu

SEQ ID NO: 4065077 - RNA, 16 nt, Vaccinia virus
agaaagugcaaaugag

SEQ ID NO: 4065078 - RNA, 17 nt, Vaccinia virus
agaaagugcaaaugagg

SEQ ID NO: 4065079 - RNA, 18 nt, Vaccinia virus
agaaaguggauaaaacaa

SEQ ID NO: 4065080 - RNA, 18 nt, Vaccinia virus
agaaauaaaaauuauuau

SEQ ID NO: 4065081 - RNA, 18 nt, Vaccinia virus
agaaauaaacgaguaugu

SEQ ID NO: 4065082 - RNA, 17 nt, Vaccinia virus
agaaauacuaaaaaaug

SEQ ID NO: 4065083 - RNA, 12 nt, Vaccinia virus
agaaauacuucu

SEQ ID NO: 4065084 - RNA, 13 nt, Vaccinia virus
agaaauauauauu

SEQ ID NO: 4065085 - RNA, 12 nt, Vaccinia virus
agaaauaugauu

SEQ ID NO: 4065086 - RNA, 22 nt, Vaccinia virus
agaaauauguauacaugauauu

SEQ ID NO: 4065087 - RNA, 22 nt, Vaccinia virus
agaaaucaacgaucuaauacaa

SEQ ID NO: 4065088 - RNA, 13 nt, Vaccinia virus
agaaaucauauau

SEQ ID NO: 4065089 - RNA, 19 nt, Vaccinia virus
agaaaucauauaugauauu

SEQ ID NO: 4065090 - RNA, 15 nt, Vaccinia virus
agaaaugacuccaug

SEQ ID NO: 4065091 - RNA, 17 nt, Vaccinia virus
agaaaugagaaacuguu

SEQ ID NO: 4065092 - RNA, 22 nt, Vaccinia virus
agaaauggaaaucguaauacca

SEQ ID NO: 4065093 - RNA, 22 nt, Vaccinia virus
agaaaugguaaauaaauacuuu

SEQ ID NO: 4065094 - RNA, 13 nt, Vaccinia virus
agaaauuaauaaa

SEQ ID NO: 4065095 - RNA, 15 nt, Vaccinia virus
agaaauucauauccu

SEQ ID NO: 4065096 - RNA, 20 nt, Vaccinia virus
agaacaaaaucuaacagaua

SEQ ID NO: 4065097 - RNA, 16 nt, Vaccinia virus
agaacaacgaaauuau

SEQ ID NO: 4065098 - RNA, 14 nt, Vaccinia virus
agaacaauaucucg

SEQ ID NO: 4065099 - RNA, 16 nt, Vaccinia virus
agaacagaauaaacaa

SEQ ID NO: 4065100 - RNA, 18 nt, Vaccinia virus
agaacauauaaauguaga

SEQ ID NO: 4065101 - RNA, 21 nt, Vaccinia virus
agaacauuuuuauaaacauga

SEQ ID NO: 4065102 - RNA, 20 nt, Vaccinia virus
agaacccauuagguuaaaug

SEQ ID NO: 4065103 - RNA, 18 nt, Vaccinia virus
agaacuaacaaacuauac

SEQ ID NO: 4065104 - RNA, 14 nt, Vaccinia virus
agaacuaacacaac

SEQ ID NO: 4065105 - RNA, 16 nt, Vaccinia virus
agaacuaccaauaugu

SEQ ID NO: 4065106 - RNA, 22 nt, Vaccinia virus
agaacucucuucauuacuauau

SEQ ID NO: 4065107 - RNA, 19 nt, Vaccinia virus
agaacucuugaagaugauu

SEQ ID NO: 4065108 - RNA, 22 nt, Vaccinia virus
agaagaaauacuaaaaaaugua

SEQ ID NO: 4065109 - RNA, 16 nt, Vaccinia virus
agaagcguguuauugu

SEQ ID NO: 4065110 - RNA, 20 nt, Vaccinia virus
agaauaaaacucuacuauau

SEQ ID NO: 4065111 - RNA, 14 nt, Vaccinia virus
agaauaaaaugauu

SEQ ID NO: 4065112 - RNA, 13 nt, Vaccinia virus
agaauaaaguaau

SEQ ID NO: 4065113 - RNA, 16 nt, Vaccinia virus
agaauacgcauguuuu

SEQ ID NO: 4065114 - RNA, 21 nt, Vaccinia virus
agaauagaugcuauuuauccg

SEQ ID NO: 4065115 - RNA, 16 nt, Vaccinia virus
agaauauaaauuauau

SEQ ID NO: 4065116 - RNA, 21 nt, Vaccinia virus
agaauauaaccacuacaucau

SEQ ID NO: 4065117 - RNA, 20 nt, Vaccinia virus
agaauauauagguaauacau

SEQ ID NO: 4065118 - RNA, 22 nt, Vaccinia virus
agaauauauagguaauacauau

SEQ ID NO: 4065119 - RNA, 16 nt, Vaccinia virus
agaauaucuaauggau

SEQ ID NO: 4065120 - RNA, 19 nt, Vaccinia virus
agaauaucuauacauaccu

SEQ ID NO: 4065121 - RNA, 14 nt, Vaccinia virus
agaauaucucuaac

SEQ ID NO: 4065122 - RNA, 12 nt, Vaccinia virus
agaauaugagaa

SEQ ID NO: 4065123 - RNA, 16 nt, Vaccinia virus
agaaucauaaagaaca

SEQ ID NO: 4065124 - RNA, 14 nt, Vaccinia virus
agaaucuguuauau

SEQ ID NO: 4065125 - RNA, 16 nt, Vaccinia virus
agaauggaaaggaaac

SEQ ID NO: 4065126 - RNA, 14 nt, Vaccinia virus
agaauggaaauaua

SEQ ID NO: 4065127 - RNA, 19 nt, Vaccinia virus
agaauguuccagaguguuu

SEQ ID NO: 4065128 - RNA, 13 nt, Vaccinia virus
agaauuaagauua

SEQ ID NO: 4065129 - RNA, 20 nt, Vaccinia virus
agaauucacaccuagagaca

SEQ ID NO: 4065130 - RNA, 13 nt, Vaccinia virus
agaauucuagauc

SEQ ID NO: 4065131 - RNA, 19 nt, Vaccinia virus
agaauugacgaaacaaugu

SEQ ID NO: 4065132 - RNA, 20 nt, Vaccinia virus
agaauuggaauaccaaauau

SEQ ID NO: 4065133 - RNA, 17 nt, Vaccinia virus
agaauuuagaaauauau

SEQ ID NO: 4065134 - RNA, 16 nt, Vaccinia virus
agaauuucuacauaau

SEQ ID NO: 4065135 - RNA, 22 nt, Vaccinia virus
guucuuuccguacaacauacug

SEQ ID NO: 4065136 - RNA, 18 nt, Vaccinia virus
guucuuucgauuuggaaa

SEQ ID NO: 4065137 - RNA, 15 nt, Vaccinia virus
guugacuauaacaga

SEQ ID NO: 4065138 - RNA, 22 nt, Vaccinia virus
guugagugaaagguggaagauc

SEQ ID NO: 4065139 - RNA, 22 nt, Vaccinia virus
guugaugaggcacauaauaucu

SEQ ID NO: 4065140 - RNA, 22 nt, Vaccinia virus
guugauggaaaaauucuuuucg

SEQ ID NO: 4065141 - RNA, 19 nt, Vaccinia virus
guuuaaauucuuuaauauc

SEQ ID NO: 4065142 - RNA, 18 nt, Vaccinia virus
guuuaacuagucuucucu

SEQ ID NO: 4065143 - RNA, 14 nt, Vaccinia virus
guuuaauaaauguu

SEQ ID NO: 4065144 - RNA, 14 nt, Vaccinia virus
guuuaauacauuga

SEQ ID NO: 4065145 - RNA, 14 nt, Vaccinia virus
guuuaauacuuauu

SEQ ID NO: 4065146 - RNA, 19 nt, Vaccinia virus
guuuaauacuuauucauau

SEQ ID NO: 4065147 - RNA, 15 nt, Vaccinia virus
guuuagauucuuuuu

SEQ ID NO: 4065148 - RNA, 21 nt, Vaccinia virus
guuuauaaaaauguucuuuuu

SEQ ID NO: 4065149 - RNA, 16 nt, Vaccinia virus
guuuaucaacauggcu

SEQ ID NO: 4065150 - RNA, 22 nt, Vaccinia virus
guuucaaagcaauuguauuauu

SEQ ID NO: 4065151 - RNA, 12 nt, Vaccinia virus
guuuccauccau

SEQ ID NO: 4065152 - RNA, 23 nt, Vaccinia virus
guuucccuauuaaaauucuuaaa

SEQ ID NO: 4065153 - RNA, 13 nt, Vaccinia virus
guuuccuguaaau

SEQ ID NO: 4065154 - RNA, 22 nt, Vaccinia virus
guuucucaucuuuuacuugauu

SEQ ID NO: 4065155 - RNA, 14 nt, Vaccinia virus
guuucuuacauauu

SEQ ID NO: 4065156 - RNA, 14 nt, Vaccinia virus
guuugguaaucauu

SEQ ID NO: 4065157 - RNA, 15 nt, Vaccinia virus
guuuguauaauaucu

SEQ ID NO: 4065158 - RNA, 17 nt, Vaccinia virus
guuuguuccugugacaa

SEQ ID NO: 4065159 - RNA, 20 nt, Vaccinia virus
guuuuagagacuuugaagcu

SEQ ID NO: 4065160 - RNA, 16 nt, Vaccinia virus
guuuucauacauaugg

SEQ ID NO: 4065161 - RNA, 15 nt, Vaccinia virus
guuuucauuauuauu

SEQ ID NO: 4065162 - RNA, 15 nt, Vaccinia virus
guuuuguuggagaac

SEQ ID NO: 4065163 - RNA, 11 nt, Vaccinia virus
guuuuuacaga

SEQ ID NO: 4065164 - RNA, 17 nt, Vaccinia virus
uaaaaaaaaaauacuua

SEQ ID NO: 4065165 - RNA, 17 nt, Vaccinia virus
uaaaaaaaauagaaaaa

SEQ ID NO: 4065166 - RNA, 17 nt, Vaccinia virus
uaaaaaaguuaaaacuu

SEQ ID NO: 4065167 - RNA, 17 nt, Vaccinia virus
uaaaaagauaaacuuua

SEQ ID NO: 4065168 - RNA, 16 nt, Vaccinia virus
uaaaaagguagauguu

SEQ ID NO: 4065169 - RNA, 13 nt, Vaccinia virus
uaaaaauaaaagu

SEQ ID NO: 4065170 - RNA, 14 nt, Vaccinia virus
uaaaaauauguaua

SEQ ID NO: 4065171 - RNA, 16 nt, Vaccinia virus
uaaaaauguuaauuua

SEQ ID NO: 4065172 - RNA, 12 nt, Vaccinia virus
uaaaaauuauua

SEQ ID NO: 4065173 - RNA, 22 nt, Vaccinia virus
uaaaaauuuuuuagauguagua

SEQ ID NO: 4065174 - RNA, 13 nt, Vaccinia virus
uaaaacaauaaau

SEQ ID NO: 4065175 - RNA, 19 nt, Vaccinia virus
uaaaacauaaucaaggaua

SEQ ID NO: 4065176 - RNA, 14 nt, Vaccinia virus
uaaaacauuuccua

SEQ ID NO: 4065177 - RNA, 19 nt, Vaccinia virus
uaaaacuuaugauuaguca

SEQ ID NO: 4065178 - RNA, 17 nt, Vaccinia virus
uaaaauaaaaauccauu

SEQ ID NO: 4065179 - RNA, 16 nt, Vaccinia virus
uaaaauaaaaugagua

SEQ ID NO: 4065180 - RNA, 16 nt, Vaccinia virus
uaaaauaaauaucauu

SEQ ID NO: 4065181 - RNA, 23 nt, Vaccinia virus
uaaaauaacucuguagacgauac

SEQ ID NO: 4065182 - RNA, 15 nt, Vaccinia virus
ugcaaauguaguauu

SEQ ID NO: 4065183 - RNA, 14 nt, Vaccinia virus
ugcaacaucuggag

SEQ ID NO: 4065184 - RNA, 19 nt, Vaccinia virus
ugcaauggauaauuuccau

SEQ ID NO: 4065185 - RNA, 18 nt, Vaccinia virus
ugcacaaucugagauuuu

SEQ ID NO: 4065186 - RNA, 19 nt, Vaccinia virus
ugcaucgugcuuuaacauc

SEQ ID NO: 4065187 - RNA, 16 nt, Vaccinia virus
ugcaucuauaugucca

SEQ ID NO: 4065188 - RNA, 15 nt, Vaccinia virus
ugcauuuuguuauau

SEQ ID NO: 4065189 - RNA, 16 nt, Vaccinia virus
ugcauuuuuauauaca

SEQ ID NO: 4065190 - RNA, 14 nt, Vaccinia virus
ugccaaagauuucu

SEQ ID NO: 4065191 - RNA, 18 nt, Vaccinia virus
ugccacugaucaugauug

SEQ ID NO: 4065192 - RNA, 19 nt, Vaccinia virus
ugcccccauucuuaauaau

SEQ ID NO: 4065193 - RNA, 20 nt, Vaccinia virus
ugccguguuuaaagauuucu

SEQ ID NO: 4065194 - RNA, 18 nt, Vaccinia virus
ugcgccgacgaggaugaa

SEQ ID NO: 4065195 - RNA, 21 nt, Vaccinia virus
ugcgcgaaccaaaaugugaua

SEQ ID NO: 4065196 - RNA, 18 nt, Vaccinia virus
ugcgcuacauuguuacgu

SEQ ID NO: 4065197 - RNA, 16 nt, Vaccinia virus
ugcuaauauucccaaa

SEQ ID NO: 4065198 - RNA, 24 nt, Vaccinia virus
ugcuauguuuauagauguucacau

SEQ ID NO: 4065199 - RNA, 19 nt, Vaccinia virus
ugcuauuaagguuaaggau

SEQ ID NO: 4065200 - RNA, 15 nt, Vaccinia virus
ugcucaaacaaaaug

SEQ ID NO: 4065201 - RNA, 21 nt, Vaccinia virus
ugcugaccuggaaaaauacuu

SEQ ID NO: 4065202 - RNA, 17 nt, Vaccinia virus
ugcuguuccucuguaaa

SEQ ID NO: 4065203 - RNA, 14 nt, Vaccinia virus
ugcuguuuuuuacu

SEQ ID NO: 4065204 - RNA, 19 nt, Vaccinia virus
ugcuuacaugcauacuuga

SEQ ID NO: 4065205 - RNA, 16 nt, Vaccinia virus
ugcuuuagugaaauuu

SEQ ID NO: 4065206 - RNA, 21 nt, Vaccinia virus
ugcuuucugauaguauagaua

SEQ ID NO: 4065207 - RNA, 15 nt, Vaccinia virus
uggaaaaauaguguu

SEQ ID NO: 4065208 - RNA, 23 nt, Vaccinia virus
uggaaaacuuuaauaacaaagaa

SEQ ID NO: 4065209 - RNA, 19 nt, Vaccinia virus
uggaaacaauucauaauua

SEQ ID NO: 4065210 - RNA, 14 nt, Vaccinia virus
uggaaaucguaaua

SEQ ID NO: 4065211 - RNA, 20 nt, Vaccinia virus
uggaagaaauugaacuccuc

SEQ ID NO: 4065212 - RNA, 15 nt, Vaccinia virus
uggaauaaauuauua

SEQ ID NO: 4065213 - RNA, 14 nt, Vaccinia virus
uggaaugauacugu

SEQ ID NO: 4065214 - RNA, 17 nt, Vaccinia virus
uggaaugcguuccuugu

SEQ ID NO: 4065215 - RNA, 17 nt, Vaccinia virus
uggaauggaaugcuguu

SEQ ID NO: 4065216 - RNA, 16 nt, Vaccinia virus
uggaauuaguuagaua

SEQ ID NO: 4065217 - RNA, 19 nt, Vaccinia virus
uggacauaaagauagauau

SEQ ID NO: 4065218 - RNA, 20 nt, Vaccinia virus
uggaccaccgacuguaacau

SEQ ID NO: 4065219 - RNA, 17 nt, Vaccinia virus
uggacgauuuugugaua

SEQ ID NO: 4065220 - RNA, 12 nt, Vaccinia virus
uggagaaauacu

SEQ ID NO: 4065221 - RNA, 22 nt, Vaccinia virus
uggagaauguuccuaauguaua

SEQ ID NO: 4065222 - RNA, 14 nt, Vaccinia virus
uggagaucauuaaa

SEQ ID NO: 4065223 - RNA, 18 nt, Vaccinia virus
uggagaucauuaaauguu

SEQ ID NO: 4065224 - RNA, 22 nt, Vaccinia virus
uggagauccauaugaggaguca

SEQ ID NO: 4065225 - RNA, 13 nt, Vaccinia virus
uggagaugaaugc

SEQ ID NO: 4065226 - RNA, 17 nt, Vaccinia virus
uggaggauuauaugaua

SEQ ID NO: 4065227 - RNA, 15 nt, Vaccinia virus
uggaggcucaacaag

SEQ ID NO: 4065228 - RNA, 23 nt, Vaccinia virus
uggauaaaaugcaugacgugaua

SEQ ID NO: 4065229 - RNA, 16 nt, Vaccinia virus
uggauacuaauuguag

SEQ ID NO: 4065230 - RNA, 13 nt, Vaccinia virus
uggauauaugaua

SEQ ID NO: 4065231 - RNA, 22 nt, Vaccinia virus
uggaucuccaucgaugauacau

SEQ ID NO: 4065232 - RNA, 23 nt, Vaccinia virus
uggaugcuauguuuauagauguu

SEQ ID NO: 4065233 - RNA, 16 nt, Vaccinia virus
uggauuaaacauacua

SEQ ID NO: 4065234 - RNA, 20 nt, Vaccinia virus
uggauuaagcaauagugaua

SEQ ID NO: 4065235 - RNA, 15 nt, Vaccinia virus
uggauuaucggaaau

SEQ ID NO: 4065236 - RNA, 19 nt, Vaccinia virus
uggcaaacaauguauacaa

SEQ ID NO: 4065237 - RNA, 16 nt, Vaccinia virus
uauuacguauuauaua

SEQ ID NO: 4065238 - RNA, 17 nt, Vaccinia virus
uauuacguggagaaauc

SEQ ID NO: 4065239 - RNA, 21 nt, Vaccinia virus
uauuagauuugguaaaaugaa

SEQ ID NO: 4065240 - RNA, 15 nt, Vaccinia virus
uauuagguuaucauc

SEQ ID NO: 4065241 - RNA, 17 nt, Vaccinia virus
uauuauacaaaaauuuu

SEQ ID NO: 4065242 - RNA, 15 nt, Vaccinia virus
uauuauauaaacauu

SEQ ID NO: 4065243 - RNA, 20 nt, Vaccinia virus
uauuaucaaaauuuggaaac

SEQ ID NO: 4065244 - RNA, 22 nt, Vaccinia virus
uauuaucauacugucaacuaua

SEQ ID NO: 4065245 - RNA, 21 nt, Vaccinia virus
uauuauuagauaaauuuauca

SEQ ID NO: 4065246 - RNA, 15 nt, Vaccinia virus
uauuauuaugaugau

SEQ ID NO: 4065247 - RNA, 15 nt, Vaccinia virus
uauuauugacuucgu

SEQ ID NO: 4065248 - RNA, 19 nt, Vaccinia virus
uauuauugauccaaucaaa

SEQ ID NO: 4065249 - RNA, 18 nt, Vaccinia virus
uauucauaauccagaguu

SEQ ID NO: 4065250 - RNA, 18 nt, Vaccinia virus
uauucauagauugacuuu

SEQ ID NO: 4065251 - RNA, 14 nt, Vaccinia virus
uauucaucaucaaa

SEQ ID NO: 4065252 - RNA, 16 nt, Vaccinia virus
uauuccaaauuauucu

SEQ ID NO: 4065253 - RNA, 22 nt, Vaccinia virus
uauuccaaucauugauaucuuu

SEQ ID NO: 4065254 - RNA, 14 nt, Vaccinia virus
uauuccauuaaauu

SEQ ID NO: 4065255 - RNA, 15 nt, Vaccinia virus
uauuccauuaaugac

SEQ ID NO: 4065256 - RNA, 13 nt, Vaccinia virus
uauuccuaccaaa

SEQ ID NO: 4065257 - RNA, 16 nt, Vaccinia virus
uauuccuguuaucaua

SEQ ID NO: 4065258 - RNA, 19 nt, Vaccinia virus
uauucgucgucgacuauca

SEQ ID NO: 4065259 - RNA, 13 nt, Vaccinia virus
uauucuacuauca

SEQ ID NO: 4065260 - RNA, 17 nt, Vaccinia virus
uauucuaucaccagauu

SEQ ID NO: 4065261 - RNA, 18 nt, Vaccinia virus
uauucuauccaaggacaa

SEQ ID NO: 4065262 - RNA, 20 nt, Vaccinia virus
uauucucccaccguuauaua

SEQ ID NO: 4065263 - RNA, 23 nt, Vaccinia virus
uauucucuauuuugguggaggau

SEQ ID NO: 4065264 - RNA, 11 nt, Vaccinia virus
uauucucuuuc

SEQ ID NO: 4065265 - RNA, 19 nt, Vaccinia virus
uauucugaaacaguaugau

SEQ ID NO: 4065266 - RNA, 18 nt, Vaccinia virus
uauugaaaauguguauaa

SEQ ID NO: 4065267 - RNA, 19 nt, Vaccinia virus
uauugacuuaauaggcauc

SEQ ID NO: 4065268 - RNA, 20 nt, Vaccinia virus
uauugacuucguuuaucuug

SEQ ID NO: 4065269 - RNA, 18 nt, Vaccinia virus
uauugagaagcauuuagu

SEQ ID NO: 4065270 - RNA, 13 nt, Vaccinia virus
uauugagauuucu

SEQ ID NO: 4065271 - RNA, 22 nt, Vaccinia virus
uauugcggcauauauaaaguug

SEQ ID NO: 4065272 - RNA, 22 nt, Vaccinia virus
uauugcguacacaaucaaucau

SEQ ID NO: 4065273 - RNA, 14 nt, Vaccinia virus
uauuggcuuucaua

SEQ ID NO: 4065274 - RNA, 19 nt, Vaccinia virus
uauugguuacccuugucau

SEQ ID NO: 4065275 - RNA, 13 nt, Vaccinia virus
uauuguuaauaga

SEQ ID NO: 4065276 - RNA, 19 nt, Vaccinia virus
uauuguucuauauuauaua

SEQ ID NO: 4065277 - RNA, 19 nt, Vaccinia virus
uauuguuuagacuguuugu

SEQ ID NO: 4065278 - RNA, 14 nt, Vaccinia virus
uauuucaaagacua

SEQ ID NO: 4065279 - RNA, 17 nt, Vaccinia virus
uauuucaggaacaggau

SEQ ID NO: 4065280 - RNA, 21 nt, Vaccinia virus
uauuuccacauugcuuuaaaa

SEQ ID NO: 4065281 - RNA, 16 nt, Vaccinia virus
uauuucccuauaaaaa

SEQ ID NO: 4065282 - RNA, 12 nt, Vaccinia virus
uauuucuaaaau

SEQ ID NO: 4065283 - RNA, 20 nt, Vaccinia virus
uauuucuccacuacauaucc

SEQ ID NO: 4065284 - RNA, 13 nt, Vaccinia virus
uauuucuuacaua

SEQ ID NO: 4065285 - RNA, 22 nt, Vaccinia virus
uauuucuucgcuuuauauacca

SEQ ID NO: 4065286 - RNA, 21 nt, Vaccinia virus
uauuuggauuuggaaaagaaa

SEQ ID NO: 4065287 - RNA, 16 nt, Vaccinia virus
uauuuguauuuaucua

SEQ ID NO: 4065288 - RNA, 19 nt, Vaccinia virus
uauuuuaaaguuaaucaua

SEQ ID NO: 4065289 - RNA, 22 nt, Vaccinia virus
uauuuuaacaaagcaucgauuu

SEQ ID NO: 4065290 - RNA, 16 nt, Vaccinia virus
uauuuuaauacaugua

SEQ ID NO: 4065291 - RNA, 20 nt, Vaccinia virus
uauuuuacauggauuuauca

SEQ ID NO: 4065292 - RNA, 22 nt, Vaccinia virus
uauuuuacauggauuuaucaua

SEQ ID NO: 4065293 - RNA, 15 nt, Vaccinia virus
uauuuuaccguuugu

SEQ ID NO: 4065294 - RNA, 19 nt, Vaccinia virus
uauuuucuucuacguacau

SEQ ID NO: 4065295 - RNA, 14 nt, Vaccinia virus
uauuuugcaucauu

SEQ ID NO: 4065296 - RNA, 18 nt, Vaccinia virus
uauuuuuuuauacuucua

SEQ ID NO: 4065297 - RNA, 15 nt, Vaccinia virus
uauuuuuuuuaucua

SEQ ID NO: 4065298 - RNA, 15 nt, Vaccinia virus
ucaaaauauguaaua

SEQ ID NO: 4065299 - RNA, 14 nt, Vaccinia virus
ucaaaauauguuau

SEQ ID NO: 4065300 - RNA, 18 nt, Vaccinia virus
ucaaaaucuuaauaucuu

SEQ ID NO: 4065301 - RNA, 12 nt, Vaccinia virus
ucaaaauuauuu

SEQ ID NO: 4065302 - RNA, 18 nt, Vaccinia virus
ucaaaauuguaacaacaa

SEQ ID NO: 4065303 - RNA, 23 nt, Vaccinia virus
ucaaacaaaaaagcucaauaaga

SEQ ID NO: 4065304 - RNA, 18 nt, Vaccinia virus
ucaaacaugacauuuucc

SEQ ID NO: 4065305 - RNA, 24 nt, Vaccinia virus
ucaaagagaacguaguagauuguu

SEQ ID NO: 4065306 - RNA, 13 nt, Vaccinia virus
ucaaagauaauag

SEQ ID NO: 4065307 - RNA, 16 nt, Vaccinia virus
ucaaagauuaauacau

SEQ ID NO: 4065308 - RNA, 13 nt, Vaccinia virus
ucaaagcaucaaa

SEQ ID NO: 4065309 - RNA, 15 nt, Vaccinia virus
ucaaaguauccucua

SEQ ID NO: 4065310 - RNA, 17 nt, Vaccinia virus
ucaaagucacaaagcaa

SEQ ID NO: 4065311 - RNA, 21 nt, Vaccinia virus
ucuaucgaauguagcucugau

SEQ ID NO: 4065312 - RNA, 16 nt, Vaccinia virus
ucuaucuuuuauuuua

SEQ ID NO: 4065313 - RNA, 21 nt, Vaccinia virus
ucuaugagacgauauauagua

SEQ ID NO: 4065314 - RNA, 20 nt, Vaccinia virus
ucuaugagaucgucguacau

SEQ ID NO: 4065315 - RNA, 19 nt, Vaccinia virus
ucuaugaucugucuuuuaa

SEQ ID NO: 4065316 - RNA, 15 nt, Vaccinia virus
ucuauguauuuagua

SEQ ID NO: 4065317 - RNA, 14 nt, Vaccinia virus
ucuauuguuuggaa

SEQ ID NO: 4065318 - RNA, 12 nt, Vaccinia virus
ucucaaaauaug

SEQ ID NO: 4065319 - RNA, 14 nt, Vaccinia virus
ucucaaguuacauu

SEQ ID NO: 4065320 - RNA, 12 nt, Vaccinia virus
ucucaauuucua

SEQ ID NO: 4065321 - RNA, 14 nt, Vaccinia virus
ucucagguacagau

SEQ ID NO: 4065322 - RNA, 17 nt, Vaccinia virus
ucucagguacagauuuu

SEQ ID NO: 4065323 - RNA, 14 nt, Vaccinia virus
ucucaucuaucaaa

SEQ ID NO: 4065324 - RNA, 22 nt, Vaccinia virus
ucucauuaaaugguuagagagu

SEQ ID NO: 4065325 - RNA, 17 nt, Vaccinia virus
ucucauuaauuaaccau

SEQ ID NO: 4065326 - RNA, 20 nt, Vaccinia virus
ucucgaaagacguuguacaa

SEQ ID NO: 4065327 - RNA, 16 nt, Vaccinia virus
ucucuaacuacuauug

SEQ ID NO: 4065328 - RNA, 19 nt, Vaccinia virus
ucucuaaguuaacacaugu

SEQ ID NO: 4065329 - RNA, 15 nt, Vaccinia virus
ucucuaauuaugaaa

SEQ ID NO: 4065330 - RNA, 14 nt, Vaccinia virus
ucucuaguuuuauu

SEQ ID NO: 4065331 - RNA, 16 nt, Vaccinia virus
ucucuauaacaaauau

SEQ ID NO: 4065332 - RNA, 18 nt, Vaccinia virus
ucucuaucuguuuccauu

SEQ ID NO: 4065333 - RNA, 18 nt, Vaccinia virus
ucucuauuucuuaaugaa

SEQ ID NO: 4065334 - RNA, 17 nt, Vaccinia virus
ucucugacauucagaaa

SEQ ID NO: 4065335 - RNA, 14 nt, Vaccinia virus
ucucugauagaaug

SEQ ID NO: 4065336 - RNA, 22 nt, Vaccinia virus
ucucuuuuucagaaauuaguuu

SEQ ID NO: 4065337 - RNA, 21 nt, Vaccinia virus
ucugaaauaacauauagauuu

SEQ ID NO: 4065338 - RNA, 18 nt, Vaccinia virus
ucugaaauaagauuagua

SEQ ID NO: 4065339 - RNA, 13 nt, Vaccinia virus
ucugaaauaauca

SEQ ID NO: 4065340 - RNA, 18 nt, Vaccinia virus
ucugaaauuggaugagua

SEQ ID NO: 4065341 - RNA, 12 nt, Vaccinia virus
ucugaauuauuc

SEQ ID NO: 4065342 - RNA, 15 nt, Vaccinia virus
ucugaguauaguguu

SEQ ID NO: 4065343 - RNA, 15 nt, Vaccinia virus
ucugauaauuuagau

SEQ ID NO: 4065344 - RNA, 18 nt, Vaccinia virus
ucugauccguauccauga

SEQ ID NO: 4065345 - RNA, 19 nt, Vaccinia virus
ucugccugaaauccaaaua

SEQ ID NO: 4065346 - RNA, 13 nt, Vaccinia virus
ucugcucuuaaac

SEQ ID NO: 4065347 - RNA, 22 nt, Vaccinia virus
ucuggaaaaacaacacaaugua

SEQ ID NO: 4065348 - RNA, 19 nt, Vaccinia virus
ucuggaaugacgaauccug

SEQ ID NO: 4065349 - RNA, 16 nt, Vaccinia virus
ucuguguuacauaucu

SEQ ID NO: 4065350 - RNA, 14 nt, Vaccinia virus
ucuguuugaagaaa

SEQ ID NO: 4065351 - RNA, 12 nt, Vaccinia virus
ucuguuuucacc

SEQ ID NO: 4065352 - RNA, 15 nt, Vaccinia virus
ucuuaacuacauuca

SEQ ID NO: 4065353 - RNA, 22 nt, Vaccinia virus
ucuuaagacacauuucuucauu

SEQ ID NO: 4065354 - RNA, 20 nt, Vaccinia virus
ucuuaaggagaaugaaacag

SEQ ID NO: 4065355 - RNA, 14 nt, Vaccinia virus
ucuuaauacagauu

SEQ ID NO: 4065356 - RNA, 17 nt, Vaccinia virus
ucuuaccaucuucuuug

SEQ ID NO: 4065357 - RNA, 20 nt, Vaccinia virus
ucuuaguauugaaaugugua

SEQ ID NO: 4065358 - RNA, 13 nt, Vaccinia virus
ucuuauagaugug

SEQ ID NO: 4065359 - RNA, 14 nt, Vaccinia virus
ucuuauauuuauaa

SEQ ID NO: 4065360 - RNA, 14 nt, Vaccinia virus
ucuuaucaauaaca

SEQ ID NO: 4065361 - RNA, 16 nt, Vaccinia virus
ucuuauccauuucgaa

SEQ ID NO: 4065362 - RNA, 13 nt, Vaccinia virus
ucuuauucuuauu

SEQ ID NO: 4065363 - RNA, 19 nt, Vaccinia virus
ucuuauuggucagaaauau

SEQ ID NO: 4065364 - RNA, 13 nt, Vaccinia virus
ucuucaaauuccg

SEQ ID NO: 4065365 - RNA, 22 nt, Vaccinia virus
ucuucgccgcgacuuucuacau

SEQ ID NO: 4065366 - RNA, 12 nt, Vaccinia virus
ucuucuaucaaa

SEQ ID NO: 4065367 - RNA, 23 nt, Vaccinia virus
ucuucucaaaagaucaaggaaau

SEQ ID NO: 4065368 - RNA, 22 nt, Vaccinia virus
ucuucucgcuaguuuacuaugu

SEQ ID NO: 4065369 - RNA, 22 nt, Vaccinia virus
ucuucuugagaucccacaucau

SEQ ID NO: 4065370 - RNA, 18 nt, Vaccinia virus
ucuucuuugauuaaugau

SEQ ID NO: 4065371 - RNA, 19 nt, Vaccinia virus
ucuugagugcgaauguaau

SEQ ID NO: 4065372 - RNA, 22 nt, Vaccinia virus
ucuugauuaauaaaauuuauaa

SEQ ID NO: 4065373 - RNA, 15 nt, Vaccinia virus
ucuugauuacaaaac

SEQ ID NO: 4065374 - RNA, 22 nt, Vaccinia virus
ucuugccauggacuaagauauc

SEQ ID NO: 4065375 - RNA, 14 nt, Vaccinia virus
ucuugcucaaauaa

SEQ ID NO: 4065376 - RNA, 22 nt, Vaccinia virus
ucuuuaaguauauacgauaaga

SEQ ID NO: 4065377 - RNA, 20 nt, Vaccinia virus
ucuuuaauccaaucuaagaa

SEQ ID NO: 4065378 - RNA, 21 nt, Vaccinia virus
ucuuuaguuuccgccauuuau

SEQ ID NO: 4065379 - RNA, 14 nt, Vaccinia virus
ucuuuauacaauga

SEQ ID NO: 4065380 - RNA, 17 nt, Vaccinia virus
ucuuuauauucuauaau

SEQ ID NO: 4065381 - RNA, 14 nt, Vaccinia virus
ucuuuaucucuuag

SEQ ID NO: 4065382 - RNA, 14 nt, Vaccinia virus
ucuuuauucucuac

SEQ ID NO: 4065383 - RNA, 16 nt, Vaccinia virus
ucuuuccguacaacau

SEQ ID NO: 4065384 - RNA, 23 nt, Vaccinia virus
ucuuucgcagcauaaguaguaug

SEQ ID NO: 4065385 - RNA, 14 nt, Vaccinia virus
ucuuucucucuuug

SEQ ID NO: 4065386 - RNA, 21 nt, Vaccinia virus
ucuuugauuaaugauuuagaa

SEQ ID NO: 4065387 - RNA, 19 nt, Vaccinia virus
ucuuuguccauuauuucua

SEQ ID NO: 4065388 - RNA, 20 nt, Vaccinia virus
ucuuuuauuuuuuguaggaa

SEQ ID NO: 4065389 - RNA, 16 nt, Vaccinia virus
ucuuuuucccagcauu

SEQ ID NO: 4065390 - RNA, 15 nt, Vaccinia virus
ucuuuuuuguaccau

SEQ ID NO: 4065391 - RNA, 14 nt, Vaccinia virus
ucuuuuuuuccaaa

SEQ ID NO: 4065392 - RNA, 19 nt, Vaccinia virus
ugaaaaauuuuccacaucu

SEQ ID NO: 4065393 - RNA, 18 nt, Vaccinia virus
ugaaaacuuuaaauacuu

SEQ ID NO: 4065394 - RNA, 14 nt, Vaccinia virus
ugaaaauaacucuc

SEQ ID NO: 4065395 - RNA, 21 nt, Vaccinia virus
ugaaacuaugucaaaaauugu

SEQ ID NO: 4065396 - RNA, 18 nt, Vaccinia virus
ugaaacuuggaaacaucu

SEQ ID NO: 4065397 - RNA, 13 nt, Vaccinia virus
ugaaauagaagau

SEQ ID NO: 4065398 - RNA, 19 nt, Vaccinia virus
ugaaauagcucguuucuau

SEQ ID NO: 4065399 - RNA, 16 nt, Vaccinia virus
ugaaauaguuaucaag

SEQ ID NO: 4065400 - RNA, 15 nt, Vaccinia virus
ugaaaucgucacaau

SEQ ID NO: 4065401 - RNA, 15 nt, Vaccinia virus
ugaaauugagaagau

SEQ ID NO: 4065402 - RNA, 21 nt, Vaccinia virus
ugaacaagagauauauuggag

SEQ ID NO: 4065403 - RNA, 13 nt, Vaccinia virus
ugaacauucaucu

SEQ ID NO: 4065404 - RNA, 14 nt, Vaccinia virus
ugaaccauuauucg

SEQ ID NO: 4065405 - RNA, 14 nt, Vaccinia virus
ugaacuauuucuug

SEQ ID NO: 4065406 - RNA, 20 nt, Vaccinia virus
ugaacuauuucuugaaugag

SEQ ID NO: 4065407 - RNA, 20 nt, Vaccinia virus
ugaacuccgccguaguuucc

SEQ ID NO: 4065408 - RNA, 18 nt, Vaccinia virus
ugaagaaauaauuucuac

SEQ ID NO: 4065409 - RNA, 20 nt, Vaccinia virus
ugaagagaagggaauuauug

SEQ ID NO: 4065410 - RNA, 13 nt, Vaccinia virus
ugaagagaguucu

SEQ ID NO: 4065411 - RNA, 15 nt, Vaccinia virus
ugaagaggaaacaug

SEQ ID NO: 4065412 - RNA, 13 nt, Vaccinia virus
ugaagaugauguu

SEQ ID NO: 4065413 - RNA, 17 nt, Vaccinia virus
ugaaguuaugacauuca

SEQ ID NO: 4065414 - RNA, 20 nt, Vaccinia virus
ugaaguuggugcauaucuuu

SEQ ID NO: 4065415 - RNA, 13 nt, Vaccinia virus
ugaauaaggaaua

SEQ ID NO: 4065416 - RNA, 14 nt, Vaccinia virus
ugaauacauuauca

SEQ ID NO: 4065417 - RNA, 18 nt, Vaccinia virus
ugaauauagaacaucauu

SEQ ID NO: 4065418 - RNA, 22 nt, Vaccinia virus
ugaaucaaauguaacuauucaa

SEQ ID NO: 4065419 - RNA, 13 nt, Vaccinia virus
ugaaucaucuguu

SEQ ID NO: 4065420 - RNA, 16 nt, Vaccinia virus
ugaaucuaacaaagag

SEQ ID NO: 4065421 - RNA, 15 nt, Vaccinia virus
ugaaugcugaugaac

SEQ ID NO: 4065422 - RNA, 15 nt, Vaccinia virus
ugaauggauuuauca

SEQ ID NO: 4065423 - RNA, 17 nt, Vaccinia virus
ugaaugggaauuucuau

SEQ ID NO: 4065424 - RNA, 17 nt, Vaccinia virus
ugaauucucauuuugca

SEQ ID NO: 4065425 - RNA, 13 nt, Vaccinia virus
ugaauuuacagaa

SEQ ID NO: 4065426 - RNA, 14 nt, Vaccinia virus
ugaauuugauaaga

SEQ ID NO: 4065427 - RNA, 17 nt, Vaccinia virus
ugaauuugauaagacuu

SEQ ID NO: 4065428 - RNA, 22 nt, Vaccinia virus
ugacaaaauuaaaaaagauaaa

SEQ ID NO: 4065429 - RNA, 23 nt, Vaccinia virus
ugacaucauacuagauaaaucgu

SEQ ID NO: 4065430 - RNA, 18 nt, Vaccinia virus
ugacaucuaguauugaua

SEQ ID NO: 4065431 - RNA, 21 nt, Vaccinia virus
ugacaugaugucguuaaauuu

SEQ ID NO: 4065432 - RNA, 23 nt, Vaccinia virus
ugacgauagcuuuacucugaaaa

SEQ ID NO: 4065433 - RNA, 18 nt, Vaccinia virus
ugacgauauuucuggaau

SEQ ID NO: 4065434 - RNA, 23 nt, Vaccinia virus
ugacgaucuuguuauaauuauaa

SEQ ID NO: 4065435 - RNA, 18 nt, Vaccinia virus
uaauaaaaaaauuauuua

SEQ ID NO: 4065436 - RNA, 20 nt, Vaccinia virus
uaauaaagacuucuuucuca

SEQ ID NO: 4065437 - RNA, 15 nt, Vaccinia virus
uaauaagauuucuau

SEQ ID NO: 4065438 - RNA, 15 nt, Vaccinia virus
uaauaauaaacggaa

SEQ ID NO: 4065439 - RNA, 16 nt, Vaccinia virus
uaauaauagaaaccau

SEQ ID NO: 4065440 - RNA, 14 nt, Vaccinia virus
uaauaauccagaau

SEQ ID NO: 4065441 - RNA, 18 nt, Vaccinia virus
uaauaaucuugauuguac

SEQ ID NO: 4065442 - RNA, 13 nt, Vaccinia virus
uaauaaugauuca

SEQ ID NO: 4065443 - RNA, 14 nt, Vaccinia virus
uaauaauuaaccaa

SEQ ID NO: 4065444 - RNA, 20 nt, Vaccinia virus
uaauaauuugguauauacau

SEQ ID NO: 4065445 - RNA, 19 nt, Vaccinia virus
uaauaauuuuuuaaauccu

SEQ ID NO: 4065446 - RNA, 19 nt, Vaccinia virus
uaauacagauggauuaaau

SEQ ID NO: 4065447 - RNA, 18 nt, Vaccinia virus
uaauacaugacaauaaag

SEQ ID NO: 4065448 - RNA, 21 nt, Vaccinia virus
uaauacguuggucuaucuauu

SEQ ID NO: 4065449 - RNA, 12 nt, Vaccinia virus
uaauacuaaaua

SEQ ID NO: 4065450 - RNA, 15 nt, Vaccinia virus
uaauacuuaauucuu

SEQ ID NO: 4065451 - RNA, 15 nt, Vaccinia virus
uaauagauuaaugau

SEQ ID NO: 4065452 - RNA, 14 nt, Vaccinia virus
uaauagauuucuag

SEQ ID NO: 4065453 - RNA, 18 nt, Vaccinia virus
uaauagcgucuacauuga

SEQ ID NO: 4065454 - RNA, 15 nt, Vaccinia virus
uaauaguuuaucaua

SEQ ID NO: 4065455 - RNA, 17 nt, Vaccinia virus
uaauauaaaaauacuua

SEQ ID NO: 4065456 - RNA, 15 nt, Vaccinia virus
uaauauaaacaucuu

SEQ ID NO: 4065457 - RNA, 19 nt, Vaccinia virus
uaauauaaucuagacagau

SEQ ID NO: 4065458 - RNA, 19 nt, Vaccinia virus
uaauaucauagcaucuauu

SEQ ID NO: 4065459 - RNA, 17 nt, Vaccinia virus
uaauauccugaacagca

SEQ ID NO: 4065460 - RNA, 19 nt, Vaccinia virus
uaauaucggucuuauucuu

SEQ ID NO: 4065461 - RNA, 18 nt, Vaccinia virus
uaauaugacucaugaucu

SEQ ID NO: 4065462 - RNA, 19 nt, Vaccinia virus
uaauauucccagaaaagau

SEQ ID NO: 4065463 - RNA, 14 nt, Vaccinia virus
uaauauucuaaaac

SEQ ID NO: 4065464 - RNA, 19 nt, Vaccinia virus
uaauauuucacaugaugua

SEQ ID NO: 4065465 - RNA, 18 nt, Vaccinia virus
uaauauuucuauuucuau

SEQ ID NO: 4065466 - RNA, 20 nt, Vaccinia virus
uaauauuuuauuacaaucau

SEQ ID NO: 4065467 - RNA, 16 nt, Vaccinia virus
uaaucaaaaucuuaau

SEQ ID NO: 4065468 - RNA, 20 nt, Vaccinia virus
uaaucaaauuugguguuguu

SEQ ID NO: 4065469 - RNA, 18 nt, Vaccinia virus
uaaucauaaauuauuuca

SEQ ID NO: 4065470 - RNA, 19 nt, Vaccinia virus
uaaucauauaaauguuuaa

SEQ ID NO: 4065471 - RNA, 12 nt, Vaccinia virus
uaauccaaauau

SEQ ID NO: 4065472 - RNA, 15 nt, Vaccinia virus
uaaucgaguacacca

SEQ ID NO: 4065473 - RNA, 13 nt, Vaccinia virus
uaaucguguauaa

SEQ ID NO: 4065474 - RNA, 18 nt, Vaccinia virus
uaaucuacgauauuauua

SEQ ID NO: 4065475 - RNA, 12 nt, Vaccinia virus
uaaucuauuuua

SEQ ID NO: 4065476 - RNA, 15 nt, Vaccinia virus
uaaucuuacuacgau

SEQ ID NO: 4065477 - RNA, 14 nt, Vaccinia virus
uaaugaaauuauuc

SEQ ID NO: 4065478 - RNA, 15 nt, Vaccinia virus
uaaugaaauuauuca

SEQ ID NO: 4065479 - RNA, 20 nt, Vaccinia virus
uaaugacaauaaaauuauca

SEQ ID NO: 4065480 - RNA, 22 nt, Vaccinia virus
uaaugacaauaaaauuaucaug

SEQ ID NO: 4065481 - RNA, 22 nt, Vaccinia virus
uaaugccuuacucgguguauau

SEQ ID NO: 4065482 - RNA, 12 nt, Vaccinia virus
uaauggaguaau

SEQ ID NO: 4065483 - RNA, 15 nt, Vaccinia virus
uaauggaugucauga

SEQ ID NO: 4065484 - RNA, 19 nt, Vaccinia virus
uaaugguagcaauaugcua

SEQ ID NO: 4065485 - RNA, 12 nt, Vaccinia virus
uaauuaauguaa

SEQ ID NO: 4065486 - RNA, 13 nt, Vaccinia virus
uaauuaaugucca

SEQ ID NO: 4065487 - RNA, 16 nt, Vaccinia virus
uaauuacauccuugga

SEQ ID NO: 4065488 - RNA, 12 nt, Vaccinia virus
uaauuacauguu

SEQ ID NO: 4065489 - RNA, 16 nt, Vaccinia virus
uaauuagguuguuuau

SEQ ID NO: 4065490 - RNA, 16 nt, Vaccinia virus
uaauuaugauuuugau

SEQ ID NO: 4065491 - RNA, 16 nt, Vaccinia virus
uaauucauaagaauuu

SEQ ID NO: 4065492 - RNA, 19 nt, Vaccinia virus
uaauucuauuaauuguuaa

SEQ ID NO: 4065493 - RNA, 17 nt, Vaccinia virus
uaauucucauuaaaugg

SEQ ID NO: 4065494 - RNA, 15 nt, Vaccinia virus
uaauucuccugaaaa

SEQ ID NO: 4065495 - RNA, 18 nt, Vaccinia virus
uaauugcuacacccacua

SEQ ID NO: 4065496 - RNA, 14 nt, Vaccinia virus
uaauugucuuagaa

SEQ ID NO: 4065497 - RNA, 18 nt, Vaccinia virus
uaauuguuuacuguauau

SEQ ID NO: 4065498 - RNA, 21 nt, Vaccinia virus
uaauuucacaacuuuacuguu

SEQ ID NO: 4065499 - RNA, 13 nt, Vaccinia virus
uaauuucacgaau

SEQ ID NO: 4065500 - RNA, 19 nt, Vaccinia virus
uaauuucccaaauacacau

SEQ ID NO: 4065501 - RNA, 20 nt, Vaccinia virus
uaauuucguuaaaacauuca

SEQ ID NO: 4065502 - RNA, 13 nt, Vaccinia virus
uaauuucuagaac

SEQ ID NO: 4065503 - RNA, 22 nt, Vaccinia virus
uaauuugauucuucguucuuca

SEQ ID NO: 4065504 - RNA, 19 nt, Vaccinia virus
uaauuuguaaaccaucuua

SEQ ID NO: 4065505 - RNA, 17 nt, Vaccinia virus
uaauuuuaucaagacau

SEQ ID NO: 4065506 - RNA, 18 nt, Vaccinia virus
uaauuuucauauauugag

SEQ ID NO: 4065507 - RNA, 13 nt, Vaccinia virus
uacaaaaucgauu

SEQ ID NO: 4065508 - RNA, 20 nt, Vaccinia virus
uacaaaauuugcaucuacau

SEQ ID NO: 4065509 - RNA, 16 nt, Vaccinia virus
uacaaccaaauucuug

SEQ ID NO: 4065510 - RNA, 12 nt, Vaccinia virus
uacaacuaguga

SEQ ID NO: 4065511 - RNA, 21 nt, Vaccinia virus
uacaacuguuguaaauuauuu

SEQ ID NO: 4065512 - RNA, 13 nt, Vaccinia virus
uacaauaaauguu

SEQ ID NO: 4065513 - RNA, 17 nt, Vaccinia virus
uacaauaauuacaagua

SEQ ID NO: 4065514 - RNA, 22 nt, Vaccinia virus
uacaauaauucagauaauguaa

SEQ ID NO: 4065515 - RNA, 13 nt, Vaccinia virus
uacaauacaugua

SEQ ID NO: 4065516 - RNA, 17 nt, Vaccinia virus
uacaauacgauaaacau

SEQ ID NO: 4065517 - RNA, 18 nt, Vaccinia virus
uacaauauucauauccuu

SEQ ID NO: 4065518 - RNA, 20 nt, Vaccinia virus
uacaauauuuaaaagacuua

SEQ ID NO: 4065519 - RNA, 19 nt, Vaccinia virus
uacaaucucguuuaauauu

SEQ ID NO: 4065520 - RNA, 21 nt, Vaccinia virus
uacaaugauaaugauacagua

SEQ ID NO: 4065521 - RNA, 20 nt, Vaccinia virus
uacaaugcucaguaaaugua

SEQ ID NO: 4065522 - RNA, 13 nt, Vaccinia virus
uacaauucuguac

SEQ ID NO: 4065523 - RNA, 14 nt, Vaccinia virus
uacacaacacaaug

SEQ ID NO: 4065524 - RNA, 18 nt, Vaccinia virus
uacacaucagcaucuuga

SEQ ID NO: 4065525 - RNA, 22 nt, Vaccinia virus
uacacguaccucucuaaugggg

SEQ ID NO: 4065526 - RNA, 22 nt, Vaccinia virus
uacacuccucagauuuauacau

SEQ ID NO: 4065527 - RNA, 20 nt, Vaccinia virus
uacagauacagauguuacaa

SEQ ID NO: 4065528 - RNA, 19 nt, Vaccinia virus
uacagauguuacaaaugua

SEQ ID NO: 4065529 - RNA, 23 nt, Vaccinia virus
uacaguaaguacaucaucuggaa

SEQ ID NO: 4065530 - RNA, 20 nt, Vaccinia virus
uacaguguaugguacuagau

SEQ ID NO: 4065531 - RNA, 24 nt, Vaccinia virus
uacauaaacauguccaauacguua

SEQ ID NO: 4065532 - RNA, 18 nt, Vaccinia virus
uacauaggcaacauccga

SEQ ID NO: 4065533 - RNA, 19 nt, Vaccinia virus
uacauauaugcaauucgcu

SEQ ID NO: 4065534 - RNA, 16 nt, Vaccinia virus
uacauauuauacagua

SEQ ID NO: 4065535 - RNA, 19 nt, Vaccinia virus
uacauauuuuagaacagaa

SEQ ID NO: 4065536 - RNA, 14 nt, Vaccinia virus
uacaucuguuuccu

SEQ ID NO: 4065537 - RNA, 14 nt, Vaccinia virus
uacaucuugacauu

SEQ ID NO: 4065538 - RNA, 20 nt, Vaccinia virus
uacauggaugauauagauau

SEQ ID NO: 4065539 - RNA, 19 nt, Vaccinia virus
uacauggucucagaaguag

SEQ ID NO: 4065540 - RNA, 22 nt, Vaccinia virus
uacauuaaacguacauuuucca

SEQ ID NO: 4065541 - RNA, 21 nt, Vaccinia virus
uacauuggcuacggcagauau

SEQ ID NO: 4065542 - RNA, 13 nt, Vaccinia virus
uacauuucacaga

SEQ ID NO: 4065543 - RNA, 13 nt, Vaccinia virus
uacauuucaucau

SEQ ID NO: 4065544 - RNA, 17 nt, Vaccinia virus
uaccaaccuacacuauu

SEQ ID NO: 4065545 - RNA, 13 nt, Vaccinia virus
uaccagagauuuu

SEQ ID NO: 4065546 - RNA, 23 nt, Vaccinia virus
uaccaucuucuuugauuaaugau

SEQ ID NO: 4065547 - RNA, 21 nt, Vaccinia virus
uaccauggacggagacaaauu

SEQ ID NO: 4065548 - RNA, 15 nt, Vaccinia virus
uacccaauaaaaugu

SEQ ID NO: 4065549 - RNA, 17 nt, Vaccinia virus
uacccauggaaaaauag

SEQ ID NO: 4065550 - RNA, 15 nt, Vaccinia virus
uacccgcaauuauua

SEQ ID NO: 4065551 - RNA, 14 nt, Vaccinia virus
uaccgcacuuauau

SEQ ID NO: 4065552 - RNA, 21 nt, Vaccinia virus
uaccguaguauauugagagug

SEQ ID NO: 4065553 - RNA, 21 nt, Vaccinia virus
uaccuaauacuaaauacauua

SEQ ID NO: 4065554 - RNA, 21 nt, Vaccinia virus
uaccuagaacgaugucaaaau

SEQ ID NO: 4065555 - RNA, 21 nt, Vaccinia virus
uaccuaucaaggaacaaauau

SEQ ID NO: 4065556 - RNA, 19 nt, Vaccinia virus
uaccuauuaauacaucgua

SEQ ID NO: 4065557 - RNA, 18 nt, Vaccinia virus
uaccuccacaucuaaaaa

SEQ ID NO: 4065558 - RNA, 15 nt, Vaccinia virus
uaccuggaauguaaa

SEQ ID NO: 4065559 - RNA, 18 nt, Vaccinia virus
uaccuuucuacaugaaau

SEQ ID NO: 4065560 - RNA, 21 nt, Vaccinia virus
uacgaaaacgaaaucuguaau

SEQ ID NO: 4065561 - RNA, 11 nt, Vaccinia virus
uacgacgucag

SEQ ID NO: 4065562 - RNA, 23 nt, Vaccinia virus
uaaaauaaucauacaaucuagua

SEQ ID NO: 4065563 - RNA, 16 nt, Vaccinia virus
uaaaauaaucucuuag

SEQ ID NO: 4065564 - RNA, 21 nt, Vaccinia virus
uaaaauacuaaugcaucuauu

SEQ ID NO: 4065565 - RNA, 22 nt, Vaccinia virus
uaaaauagacaauggaauucau

SEQ ID NO: 4065566 - RNA, 23 nt, Vaccinia virus
uaaaauaucuagcaaaaauucua

SEQ ID NO: 4065567 - RNA, 20 nt, Vaccinia virus
uaaaaucaaucguuaucuaa

SEQ ID NO: 4065568 - RNA, 22 nt, Vaccinia virus
uaaaaucaucauuauaauaggu

SEQ ID NO: 4065569 - RNA, 23 nt, Vaccinia virus
uaaaauuauuuaauuuaauacau

SEQ ID NO: 4065570 - RNA, 21 nt, Vaccinia virus
uaaaauugauucuaugaaaac

SEQ ID NO: 4065571 - RNA, 16 nt, Vaccinia virus
uaaaauuuauaacauu

SEQ ID NO: 4065572 - RNA, 18 nt, Vaccinia virus
uaaaauuucauagacuuu

SEQ ID NO: 4065573 - RNA, 12 nt, Vaccinia virus
uaaaauuuccau

SEQ ID NO: 4065574 - RNA, 17 nt, Vaccinia virus
uaaacacauagaaauaa

SEQ ID NO: 4065575 - RNA, 17 nt, Vaccinia virus
uaaacauaagacuuauu

SEQ ID NO: 4065576 - RNA, 17 nt, Vaccinia virus
uaaacauuguuaucuag

SEQ ID NO: 4065577 - RNA, 15 nt, Vaccinia virus
uaaaccagacaaccc

SEQ ID NO: 4065578 - RNA, 14 nt, Vaccinia virus
uaaaccauuuuuca

SEQ ID NO: 4065579 - RNA, 16 nt, Vaccinia virus
uaaacgaaaacuauau

SEQ ID NO: 4065580 - RNA, 23 nt, Vaccinia virus
uaaacgccuuuagaaaaacuuua

SEQ ID NO: 4065581 - RNA, 20 nt, Vaccinia virus
uaaacuacgugaacauaugg

SEQ ID NO: 4065582 - RNA, 19 nt, Vaccinia virus
uaaacuguuuauuaaugau

SEQ ID NO: 4065583 - RNA, 16 nt, Vaccinia virus
uaaacuguuuguauaa

SEQ ID NO: 4065584 - RNA, 14 nt, Vaccinia virus
uaaacuuuaaugau

SEQ ID NO: 4065585 - RNA, 20 nt, Vaccinia virus
uaaacuuuauccauaucucu

SEQ ID NO: 4065586 - RNA, 16 nt, Vaccinia virus
uaaagaacgaauguug

SEQ ID NO: 4065587 - RNA, 16 nt, Vaccinia virus
uaaagaauaucuuugg

SEQ ID NO: 4065588 - RNA, 19 nt, Vaccinia virus
uaaagaauguauaaaccuu

SEQ ID NO: 4065589 - RNA, 18 nt, Vaccinia virus
uaaagauagaaaugaauu

SEQ ID NO: 4065590 - RNA, 13 nt, Vaccinia virus
uaaagauauuucu

SEQ ID NO: 4065591 - RNA, 18 nt, Vaccinia virus
uaaagaugacgaugaaaa

SEQ ID NO: 4065592 - RNA, 16 nt, Vaccinia virus
uaaagcaaaaugguug

SEQ ID NO: 4065593 - RNA, 19 nt, Vaccinia virus
uaaagcccucuauuagcau

SEQ ID NO: 4065594 - RNA, 15 nt, Vaccinia virus
uaaaggaugaguaca

SEQ ID NO: 4065595 - RNA, 17 nt, Vaccinia virus
uaaaguacguaaaucua

SEQ ID NO: 4065596 - RNA, 14 nt, Vaccinia virus
uaaauaaauacuuu

SEQ ID NO: 4065597 - RNA, 18 nt, Vaccinia virus
uaaauacuuuuuauuuac

SEQ ID NO: 4065598 - RNA, 21 nt, Vaccinia virus
uaaauaguuuuuuuguuuccu

SEQ ID NO: 4065599 - RNA, 21 nt, Vaccinia virus
uaaauauauuuacaauuauug

SEQ ID NO: 4065600 - RNA, 13 nt, Vaccinia virus
uaaauaucauaau

SEQ ID NO: 4065601 - RNA, 15 nt, Vaccinia virus
uaaaucaacgucauc

SEQ ID NO: 4065602 - RNA, 17 nt, Vaccinia virus
uaaaucaucgauuuuca

SEQ ID NO: 4065603 - RNA, 14 nt, Vaccinia virus
uaaaucauggauuu

SEQ ID NO: 4065604 - RNA, 16 nt, Vaccinia virus
uaaaucauggauuuua

SEQ ID NO: 4065605 - RNA, 23 nt, Vaccinia virus
uaaauccaaaauaacuaaacauu

SEQ ID NO: 4065606 - RNA, 22 nt, Vaccinia virus
uaaauccaguaauaucaugucu

SEQ ID NO: 4065607 - RNA, 18 nt, Vaccinia virus
uaaaugaaaaaaaacuag

SEQ ID NO: 4065608 - RNA, 16 nt, Vaccinia virus
uaaaugaauucucauu

SEQ ID NO: 4065609 - RNA, 17 nt, Vaccinia virus
uaaauguggcuacaaac

SEQ ID NO: 4065610 - RNA, 18 nt, Vaccinia virus
uaaauguuguaauuguau

SEQ ID NO: 4065611 - RNA, 22 nt, Vaccinia virus
uaaauguuuuuaucaucuugga

SEQ ID NO: 4065612 - RNA, 16 nt, Vaccinia virus
uaaauucgauaucuuu

SEQ ID NO: 4065613 - RNA, 14 nt, Vaccinia virus
uaaauucuguuuaa

SEQ ID NO: 4065614 - RNA, 15 nt, Vaccinia virus
uaaauugaaagcgag

SEQ ID NO: 4065615 - RNA, 18 nt, Vaccinia virus
uaaauuuacgaauuaaga

SEQ ID NO: 4065616 - RNA, 18 nt, Vaccinia virus
uaaauuuuaaacauaaag

SEQ ID NO: 4065617 - RNA, 14 nt, Vaccinia virus
uaaauuuuaucaug

SEQ ID NO: 4065618 - RNA, 13 nt, Vaccinia virus
uaacaaaauuaaa

SEQ ID NO: 4065619 - RNA, 13 nt, Vaccinia virus
uaacaaagaaaga

SEQ ID NO: 4065620 - RNA, 13 nt, Vaccinia virus
uaacaaauuaaag

SEQ ID NO: 4065621 - RNA, 21 nt, Vaccinia virus
uaacaacgacuuauaauuaau

SEQ ID NO: 4065622 - RNA, 21 nt, Vaccinia virus
uaacaagaucgauagacacug

SEQ ID NO: 4065623 - RNA, 19 nt, Vaccinia virus
uaacaauaucaauaaauuu

SEQ ID NO: 4065624 - RNA, 16 nt, Vaccinia virus
uaacacaaaaugugaa

SEQ ID NO: 4065625 - RNA, 13 nt, Vaccinia virus
uaacacauuuuca

SEQ ID NO: 4065626 - RNA, 20 nt, Vaccinia virus
uaacaccuauaagauuauca

SEQ ID NO: 4065627 - RNA, 17 nt, Vaccinia virus
uaacacuauacucauau

SEQ ID NO: 4065628 - RNA, 18 nt, Vaccinia virus
uaacagcaauaguauaau

SEQ ID NO: 4065629 - RNA, 23 nt, Vaccinia virus
uaacagcaauaguauaauuauau

SEQ ID NO: 4065630 - RNA, 17 nt, Vaccinia virus
uaacauaucguuucuuu

SEQ ID NO: 4065631 - RNA, 12 nt, Vaccinia virus
uaacaucauuau

SEQ ID NO: 4065632 - RNA, 19 nt, Vaccinia virus
cuaauaugaggaaaaugau

SEQ ID NO: 4065633 - RNA, 23 nt, Vaccinia virus
cuaauauucccaaacauacaucu

SEQ ID NO: 4065634 - RNA, 15 nt, Vaccinia virus
cuaauauuuuuagau

SEQ ID NO: 4065635 - RNA, 18 nt, Vaccinia virus
cuaaucucuuaacaaaaa

SEQ ID NO: 4065636 - RNA, 16 nt, Vaccinia virus
cuaaucucuucuuuaa

SEQ ID NO: 4065637 - RNA, 17 nt, Vaccinia virus
cuaaugcauguuauaga

SEQ ID NO: 4065638 - RNA, 20 nt, Vaccinia virus
cuaauguauuaguuaaauau

SEQ ID NO: 4065639 - RNA, 22 nt, Vaccinia virus
cuaauguauuaguuaaauauua

SEQ ID NO: 4065640 - RNA, 18 nt, Vaccinia virus
cuaaugugauucucugaa

SEQ ID NO: 4065641 - RNA, 23 nt, Vaccinia virus
cuaauguuuccggagauagauuu

SEQ ID NO: 4065642 - RNA, 19 nt, Vaccinia virus
cuaauucuauauuguuaua

SEQ ID NO: 4065643 - RNA, 17 nt, Vaccinia virus
cuaauuuacuaucugua

SEQ ID NO: 4065644 - RNA, 22 nt, Vaccinia virus
cuaauuuauugcaugguaagga

SEQ ID NO: 4065645 - RNA, 14 nt, Vaccinia virus
cuaauuucuguaua

SEQ ID NO: 4065646 - RNA, 17 nt, Vaccinia virus
cuacaaauagagauaaa

SEQ ID NO: 4065647 - RNA, 13 nt, Vaccinia virus
cuacaacuaguga

SEQ ID NO: 4065648 - RNA, 23 nt, Vaccinia virus
cuacaagacaaagauuuaucaga

SEQ ID NO: 4065649 - RNA, 13 nt, Vaccinia virus
cuacaauauuuca

SEQ ID NO: 4065650 - RNA, 23 nt, Vaccinia virus
cuacaaugaacuaagagaaaucu

SEQ ID NO: 4065651 - RNA, 18 nt, Vaccinia virus
cuacagguugcagcauag

SEQ ID NO: 4065652 - RNA, 23 nt, Vaccinia virus
cuacaguaggcauaccauuagau

SEQ ID NO: 4065653 - RNA, 15 nt, Vaccinia virus
cuacauucucauuaa

SEQ ID NO: 4065654 - RNA, 17 nt, Vaccinia virus
cuacgaaaacgaaaucu

SEQ ID NO: 4065655 - RNA, 19 nt, Vaccinia virus
ccgacuguaacauugacug

SEQ ID NO: 4065656 - RNA, 21 nt, Vaccinia virus
ccgauauauuugcacacauaa

SEQ ID NO: 4065657 - RNA, 20 nt, Vaccinia virus
ccgaucaaagaauuaaugau

SEQ ID NO: 4065658 - RNA, 14 nt, Vaccinia virus
ccgcauuaaaugau

SEQ ID NO: 4065659 - RNA, 18 nt, Vaccinia virus
ccggaguaauugauuaua

SEQ ID NO: 4065660 - RNA, 17 nt, Vaccinia virus
ccggugagaacaugaga

SEQ ID NO: 4065661 - RNA, 14 nt, Vaccinia virus
ccguagaaauacua

SEQ ID NO: 4065662 - RNA, 11 nt, Vaccinia virus
ccguguuuauu

SEQ ID NO: 4065663 - RNA, 11 nt, Vaccinia virus
ccguucucuga

SEQ ID NO: 4065664 - RNA, 19 nt, Vaccinia virus
ccuaacgaugauauguuuu

SEQ ID NO: 4065665 - RNA, 13 nt, Vaccinia virus
ccuaauaucauau

SEQ ID NO: 4065666 - RNA, 22 nt, Vaccinia virus
ccuagaaggucgccguauguua

SEQ ID NO: 4065667 - RNA, 13 nt, Vaccinia virus
ccuagcuuuguua

SEQ ID NO: 4065668 - RNA, 23 nt, Vaccinia virus
ccuauccaauaauccaucaucug

SEQ ID NO: 4065669 - RNA, 19 nt, Vaccinia virus
ccuauuccacauuuuguuu

SEQ ID NO: 4065670 - RNA, 22 nt, Vaccinia virus
ccuauugaucuucauuucguuu

SEQ ID NO: 4065671 - RNA, 17 nt, Vaccinia virus
ccucaaacucuauuuua

SEQ ID NO: 4065672 - RNA, 19 nt, Vaccinia virus
ccucaaucauguacuagcu

SEQ ID NO: 4065673 - RNA, 14 nt, Vaccinia virus
ccucucuuaacaaa

SEQ ID NO: 4065674 - RNA, 19 nt, Vaccinia virus
ccugccauaaauaaaugcu

SEQ ID NO: 4065675 - RNA, 15 nt, Vaccinia virus
ccuggaaaaauacuu

SEQ ID NO: 4065676 - RNA, 23 nt, Vaccinia virus
ccuguacuauaccauuaucuaua

SEQ ID NO: 4065677 - RNA, 12 nt, Vaccinia virus
ccuguguuuaua

SEQ ID NO: 4065678 - RNA, 21 nt, Vaccinia virus
ccuguuucuacuaacuuuuug

SEQ ID NO: 4065679 - RNA, 17 nt, Vaccinia virus
ccuuaaauguaucuuua

SEQ ID NO: 4065680 - RNA, 22 nt, Vaccinia virus
ccuuguccaaugugaauugaau

SEQ ID NO: 4065681 - RNA, 20 nt, Vaccinia virus
ccuuuuccuuaucuucauag

SEQ ID NO: 4065682 - RNA, 22 nt, Vaccinia virus
ccuuuugauaaauuucuucuug

SEQ ID NO: 4065683 - RNA, 15 nt, Vaccinia virus
cgaaaagaaacagau

SEQ ID NO: 4065684 - RNA, 14 nt, Vaccinia virus
cgaaagauguuauu

SEQ ID NO: 4065685 - RNA, 23 nt, Vaccinia virus
cgaaauaaaaaacauaauuuuaa

SEQ ID NO: 4065686 - RNA, 18 nt, Vaccinia virus
cgaaauaaauaaugaauu

SEQ ID NO: 4065687 - RNA, 16 nt, Vaccinia virus
cgaaauacaaaauguu

SEQ ID NO: 4065688 - RNA, 17 nt, Vaccinia virus
cgaaauacaaaauguua

SEQ ID NO: 4065689 - RNA, 21 nt, Vaccinia virus
cgaaauaguuaauaauucugu

SEQ ID NO: 4065690 - RNA, 19 nt, Vaccinia virus
cgaacacuauuagaauuaa

SEQ ID NO: 4065691 - RNA, 22 nt, Vaccinia virus
cgaaccagaaucagugaauaaa

SEQ ID NO: 4065692 - RNA, 22 nt, Vaccinia virus
cgaacccguacccagaaauacc

SEQ ID NO: 4065693 - RNA, 20 nt, Vaccinia virus
cgaagaauuaaaucuaacga

SEQ ID NO: 4065694 - RNA, 18 nt, Vaccinia virus
cgaagagacgauagauuu

SEQ ID NO: 4065695 - RNA, 11 nt, Vaccinia virus
cgaagcaaacg

SEQ ID NO: 4065696 - RNA, 23 nt, Vaccinia virus
cgaagugcguguaacaaaguauu

SEQ ID NO: 4065697 - RNA, 17 nt, Vaccinia virus
cgaauaaagugaacaau

SEQ ID NO: 4065698 - RNA, 13 nt, Vaccinia virus
cgaauaaauagau

SEQ ID NO: 4065699 - RNA, 13 nt, Vaccinia virus
cgaauaacaaaaa

SEQ ID NO: 4065700 - RNA, 16 nt, Vaccinia virus
cgaauaccauggauug

SEQ ID NO: 4065701 - RNA, 16 nt, Vaccinia virus
cgaauauaaaugauuu

SEQ ID NO: 4065702 - RNA, 17 nt, Vaccinia virus
cgaauauaaaugauuuc

SEQ ID NO: 4065703 - RNA, 22 nt, Vaccinia virus
cgaauaucguucucuaaauguc

SEQ ID NO: 4065704 - RNA, 15 nt, Vaccinia virus
cgaauccuguuucua

SEQ ID NO: 4065705 - RNA, 21 nt, Vaccinia virus
cgacaugauuaaguauuguuu

SEQ ID NO: 4065706 - RNA, 21 nt, Vaccinia virus
cgacuaucaacaauuuuguau

SEQ ID NO: 4065707 - RNA, 17 nt, Vaccinia virus
cgacucauaagaaagag

SEQ ID NO: 4065708 - RNA, 22 nt, Vaccinia virus
cgacucuguuggauauggguuu

SEQ ID NO: 4065709 - RNA, 13 nt, Vaccinia virus
cgacuuuuuguuu

SEQ ID NO: 4065710 - RNA, 17 nt, Vaccinia virus
cgagaauaugauagaaa

SEQ ID NO: 4065711 - RNA, 17 nt, Vaccinia virus
cgagauacagaaaagcu

SEQ ID NO: 4065712 - RNA, 17 nt, Vaccinia virus
cgauaacggaauagacu

SEQ ID NO: 4065713 - RNA, 19 nt, Vaccinia virus
cgauaacgugaaauauauu

SEQ ID NO: 4065714 - RNA, 19 nt, Vaccinia virus
cgauaaugugguuacucuu

SEQ ID NO: 4065715 - RNA, 22 nt, Vaccinia virus
cgauaauugucucauauguuuu

SEQ ID NO: 4065716 - RNA, 20 nt, Vaccinia virus
cgauacaaaaugugucaaga

SEQ ID NO: 4065717 - RNA, 13 nt, Vaccinia virus
cgauauagaguau

SEQ ID NO: 4065718 - RNA, 19 nt, Vaccinia virus
cgauaugccuccagaaguu

SEQ ID NO: 4065719 - RNA, 18 nt, Vaccinia virus
cgauauuucuuuucguuu

SEQ ID NO: 4065720 - RNA, 13 nt, Vaccinia virus
cgaucauaucuau

SEQ ID NO: 4065721 - RNA, 21 nt, Vaccinia virus
cgaucuuguuguuuauuuuca

SEQ ID NO: 4065722 - RNA, 21 nt, Vaccinia virus
cgauguggaaauuaaucugua

SEQ ID NO: 4065723 - RNA, 15 nt, Vaccinia virus
cgauuauuucugaau

SEQ ID NO: 4065724 - RNA, 14 nt, Vaccinia virus
cgauucaaaguacu

SEQ ID NO: 4065725 - RNA, 17 nt, Vaccinia virus
cgauucaaauaaaucac

SEQ ID NO: 4065726 - RNA, 14 nt, Vaccinia virus
cgauucaacaaaac

SEQ ID NO: 4065727 - RNA, 13 nt, Vaccinia virus
cgcaaaaaaacug

SEQ ID NO: 4065728 - RNA, 18 nt, Vaccinia virus
cgcaauuauauaauguau

SEQ ID NO: 4065729 - RNA, 14 nt, Vaccinia virus
cgcagaaaauaucu

SEQ ID NO: 4065730 - RNA, 17 nt, Vaccinia virus
cgcaucaggauauaaag

SEQ ID NO: 4065731 - RNA, 12 nt, Vaccinia virus
cgccauggaugg

SEQ ID NO: 4065732 - RNA, 17 nt, Vaccinia virus
cgccauuuauccagucu

SEQ ID NO: 4065733 - RNA, 19 nt, Vaccinia virus
cgccuccguugucauaaac

SEQ ID NO: 4065734 - RNA, 19 nt, Vaccinia virus
cgcggaaaaaacauaauag

SEQ ID NO: 4065735 - RNA, 15 nt, Vaccinia virus
cgcuagucaucacau

SEQ ID NO: 4065736 - RNA, 14 nt, Vaccinia virus
cgcugauuuaacua

SEQ ID NO: 4065737 - RNA, 17 nt, Vaccinia virus
cggaaaugguagaugua

SEQ ID NO: 4065738 - RNA, 13 nt, Vaccinia virus
cggaauagaugua

SEQ ID NO: 4065739 - RNA, 17 nt, Vaccinia virus
cggagaagaauugguaa

SEQ ID NO: 4065740 - RNA, 14 nt, Vaccinia virus
cggaucuucuuaau

SEQ ID NO: 4065741 - RNA, 21 nt, Vaccinia virus
cggaucuucuuaauucaucuu

SEQ ID NO: 4065742 - RNA, 16 nt, Vaccinia virus
cgguguguagaaagug

SEQ ID NO: 4065743 - RNA, 17 nt, Vaccinia virus
cguaagcgcuauacaaa

SEQ ID NO: 4065744 - RNA, 18 nt, Vaccinia virus
cguauaacaguaaaagaa

SEQ ID NO: 4065745 - RNA, 20 nt, Vaccinia virus
cguauauaacauuguuuaug

SEQ ID NO: 4065746 - RNA, 17 nt, Vaccinia virus
cguauucugaugauauu

SEQ ID NO: 4065747 - RNA, 21 nt, Vaccinia virus
cguauucugaugauauuagaa

SEQ ID NO: 4065748 - RNA, 15 nt, Vaccinia virus
cgucagcugcucuag

SEQ ID NO: 4065749 - RNA, 20 nt, Vaccinia virus
cguccaacgaguaacauccg

SEQ ID NO: 4065750 - RNA, 20 nt, Vaccinia virus
cgucgucaaaauauuuacua

SEQ ID NO: 4065751 - RNA, 23 nt, Vaccinia virus
cgucucugccauggauggaaaca

SEQ ID NO: 4065752 - RNA, 14 nt, Vaccinia virus
cguggauuauaaca

SEQ ID NO: 4065753 - RNA, 13 nt, Vaccinia virus
cgugguagauguu

SEQ ID NO: 4065754 - RNA, 19 nt, Vaccinia virus
cgugguaucuucuccauaa

SEQ ID NO: 4065755 - RNA, 14 nt, Vaccinia virus
cgugguuguuuauc

SEQ ID NO: 4065756 - RNA, 23 nt, Vaccinia virus
cguguauuuuugacguaaaugug

SEQ ID NO: 4065757 - RNA, 15 nt, Vaccinia virus
cguguguuucaggau

SEQ ID NO: 4065758 - RNA, 18 nt, Vaccinia virus
cguuaauaguacuacaau

SEQ ID NO: 4065759 - RNA, 20 nt, Vaccinia virus
cguucgcgacaguauguggu

SEQ ID NO: 4065760 - RNA, 13 nt, Vaccinia virus
cguucuacauaaa

SEQ ID NO: 4065761 - RNA, 21 nt, Vaccinia virus
cguuguucuuccaauugcaau

SEQ ID NO: 4065762 - RNA, 12 nt, Vaccinia virus
cguuuauggauc

SEQ ID NO: 4065763 - RNA, 19 nt, Vaccinia virus
cguuuuaaauuuuguauuc

SEQ ID NO: 4065764 - RNA, 23 nt, Vaccinia virus
cuaaaaaauagcgcugaaaauaa

SEQ ID NO: 4065765 - RNA, 16 nt, Vaccinia virus
cuaaaaagaauguaua

SEQ ID NO: 4065766 - RNA, 13 nt, Vaccinia virus
cuaaaauaauguc

SEQ ID NO: 4065767 - RNA, 15 nt, Vaccinia virus
cuaaaauaucgaugu

SEQ ID NO: 4065768 - RNA, 16 nt, Vaccinia virus
cuaaaauauuuucuag

SEQ ID NO: 4065769 - RNA, 14 nt, Vaccinia virus
cuaaaaucugcaua

SEQ ID NO: 4065770 - RNA, 21 nt, Vaccinia virus
cuaaagagauuuagacaacag

SEQ ID NO: 4065771 - RNA, 12 nt, Vaccinia virus
cuaaaguauuug

SEQ ID NO: 4065772 - RNA, 21 nt, Vaccinia virus
cuaaaucuguauaucuuucca

SEQ ID NO: 4065773 - RNA, 15 nt, Vaccinia virus
cuaaauucgauaucu

SEQ ID NO: 4065774 - RNA, 13 nt, Vaccinia virus
cuaacaaaacuau

SEQ ID NO: 4065775 - RNA, 15 nt, Vaccinia virus
cuaacauuguuaauu

SEQ ID NO: 4065776 - RNA, 13 nt, Vaccinia virus
cuaacguauucua

SEQ ID NO: 4065777 - RNA, 20 nt, Vaccinia virus
cuaagcaauagguaauaacu

SEQ ID NO: 4065778 - RNA, 16 nt, Vaccinia virus
cuaagcgguaaauaau

SEQ ID NO: 4065779 - RNA, 14 nt, Vaccinia virus
cuaaggauccagaa

SEQ ID NO: 4065780 - RNA, 23 nt, Vaccinia virus
cuaauaacacuuccaguaucaau

SEQ ID NO: 4065781 - RNA, 14 nt, Vaccinia virus
cuaauauauucuua

SEQ ID NO: 4065782 - RNA, 19 nt, Vaccinia virus
auuauauaauguauaaaug

SEQ ID NO: 4065783 - RNA, 14 nt, Vaccinia virus
auuauauacugaac

SEQ ID NO: 4065784 - RNA, 15 nt, Vaccinia virus
auuauauaguguugc

SEQ ID NO: 4065785 - RNA, 19 nt, Vaccinia virus
auuauaucacaacaucuau

SEQ ID NO: 4065786 - RNA, 14 nt, Vaccinia virus
auuauauguagaag

SEQ ID NO: 4065787 - RNA, 13 nt, Vaccinia virus
auuaucaaaucuu

SEQ ID NO: 4065788 - RNA, 16 nt, Vaccinia virus
auuaucaaauguuguu

SEQ ID NO: 4065789 - RNA, 21 nt, Vaccinia virus
auuaucaagauucugauguau

SEQ ID NO: 4065790 - RNA, 12 nt, Vaccinia virus
auuaucaguaau

SEQ ID NO: 4065791 - RNA, 15 nt, Vaccinia virus
auuaucggaaauacu

SEQ ID NO: 4065792 - RNA, 18 nt, Vaccinia virus
auuaucucagugcaaaga

SEQ ID NO: 4065793 - RNA, 21 nt, Vaccinia virus
auuaugcauucguuuaaagau

SEQ ID NO: 4065794 - RNA, 15 nt, Vaccinia virus
auuauguaucaauau

SEQ ID NO: 4065795 - RNA, 17 nt, Vaccinia virus
auuauuaaauuaugaag

SEQ ID NO: 4065796 - RNA, 18 nt, Vaccinia virus
auuauuaaguauaauaga

SEQ ID NO: 4065797 - RNA, 17 nt, Vaccinia virus
auuauuaaucagaauac

SEQ ID NO: 4065798 - RNA, 16 nt, Vaccinia virus
auuauuacguauccuc

SEQ ID NO: 4065799 - RNA, 12 nt, Vaccinia virus
auuauuagaaau

SEQ ID NO: 4065800 - RNA, 17 nt, Vaccinia virus
auuauuaguugauguga

SEQ ID NO: 4065801 - RNA, 14 nt, Vaccinia virus
auuauuauguugau

SEQ ID NO: 4065802 - RNA, 14 nt, Vaccinia virus
auuauuauuaauaa

SEQ ID NO: 4065803 - RNA, 16 nt, Vaccinia virus
auuauucaguaugaag

SEQ ID NO: 4065804 - RNA, 17 nt, Vaccinia virus
auuauucauaaauaacu

SEQ ID NO: 4065805 - RNA, 20 nt, Vaccinia virus
auuauugcgacguucauaga

SEQ ID NO: 4065806 - RNA, 14 nt, Vaccinia virus
auuauuuaauaaag

SEQ ID NO: 4065807 - RNA, 21 nt, Vaccinia virus
auuauuuugugcaaauagaug

SEQ ID NO: 4065808 - RNA, 12 nt, Vaccinia virus
auucaaaaauug

SEQ ID NO: 4065809 - RNA, 18 nt, Vaccinia virus
auucaaggaaagaauaaa

SEQ ID NO: 4065810 - RNA, 15 nt, Vaccinia virus
auucaaugucucuuu

SEQ ID NO: 4065811 - RNA, 19 nt, Vaccinia virus
auucacagacucucaagau

SEQ ID NO: 4065812 - RNA, 13 nt, Vaccinia virus
auucagaaaucaa

SEQ ID NO: 4065813 - RNA, 14 nt, Vaccinia virus
auucagcugaaaug

SEQ ID NO: 4065814 - RNA, 14 nt, Vaccinia virus
auucaguaaauaga

SEQ ID NO: 4065815 - RNA, 12 nt, Vaccinia virus
auucaguuuaua

SEQ ID NO: 4065816 - RNA, 19 nt, Vaccinia virus
auucauagauugacuuuga

SEQ ID NO: 4065817 - RNA, 13 nt, Vaccinia virus
auucauauagaac

SEQ ID NO: 4065818 - RNA, 15 nt, Vaccinia virus
auucaugaaaaugua

SEQ ID NO: 4065819 - RNA, 21 nt, Vaccinia virus
auuccaacaacaucaacugaa

SEQ ID NO: 4065820 - RNA, 19 nt, Vaccinia virus
auuccaaugaacaagauua

SEQ ID NO: 4065821 - RNA, 15 nt, Vaccinia virus
auuccaucuacuaag

SEQ ID NO: 4065822 - RNA, 15 nt, Vaccinia virus
auuccgccauuuaag

SEQ ID NO: 4065823 - RNA, 17 nt, Vaccinia virus
auuccuccauaauugca

SEQ ID NO: 4065824 - RNA, 14 nt, Vaccinia virus
auuccuugaauaac

SEQ ID NO: 4065825 - RNA, 17 nt, Vaccinia virus
auucgaaaacucuaaga

SEQ ID NO: 4065826 - RNA, 16 nt, Vaccinia virus
auucgaaauuagaaag

SEQ ID NO: 4065827 - RNA, 16 nt, Vaccinia virus
auucgauaagauagau

SEQ ID NO: 4065828 - RNA, 20 nt, Vaccinia virus
auucgcaaacuauucuaaua

SEQ ID NO: 4065829 - RNA, 21 nt, Vaccinia virus
auucgcuuagcgucuucuaua

SEQ ID NO: 4065830 - RNA, 15 nt, Vaccinia virus
auucguaguuuuuac

SEQ ID NO: 4065831 - RNA, 13 nt, Vaccinia virus
auucuaaaugaug

SEQ ID NO: 4065832 - RNA, 13 nt, Vaccinia virus
auucuaaauggau

SEQ ID NO: 4065833 - RNA, 13 nt, Vaccinia virus
auucuaauggaug

SEQ ID NO: 4065834 - RNA, 23 nt, Vaccinia virus
auucuacaagugacaacaaaaaa

SEQ ID NO: 4065835 - RNA, 17 nt, Vaccinia virus
auucuaccauagcaaau

SEQ ID NO: 4065836 - RNA, 13 nt, Vaccinia virus
auucuagcaucga

SEQ ID NO: 4065837 - RNA, 20 nt, Vaccinia virus
auucuauaaucaaugagaca

SEQ ID NO: 4065838 - RNA, 20 nt, Vaccinia virus
auucuaugaugguauugaag

SEQ ID NO: 4065839 - RNA, 16 nt, Vaccinia virus
auucuaugucuauuau

SEQ ID NO: 4065840 - RNA, 18 nt, Vaccinia virus
auucuccguuaguguuug

SEQ ID NO: 4065841 - RNA, 24 nt, Vaccinia virus
auucucucaacaucuucaauggau

SEQ ID NO: 4065842 - RNA, 20 nt, Vaccinia virus
auucucugacauucagaaag

SEQ ID NO: 4065843 - RNA, 21 nt, Vaccinia virus
auucugaauagugaaaaccuu

SEQ ID NO: 4065844 - RNA, 19 nt, Vaccinia virus
auucugaugauauuagaac

SEQ ID NO: 4065845 - RNA, 14 nt, Vaccinia virus
auucugcaauauug

SEQ ID NO: 4065846 - RNA, 18 nt, Vaccinia virus
auucuggcggcuagaaug

SEQ ID NO: 4065847 - RNA, 21 nt, Vaccinia virus
auucuggcuauuucaaaauaa

SEQ ID NO: 4065848 - RNA, 21 nt, Vaccinia virus
auucugguuuaaaaacacaca

SEQ ID NO: 4065849 - RNA, 14 nt, Vaccinia virus
auucuuaaaaucua

SEQ ID NO: 4065850 - RNA, 15 nt, Vaccinia virus
auucuuauucuuauu

SEQ ID NO: 4065851 - RNA, 15 nt, Vaccinia virus
auucuucgguaacuu

SEQ ID NO: 4065852 - RNA, 19 nt, Vaccinia virus
auucuugguaauuaauaga

SEQ ID NO: 4065853 - RNA, 18 nt, Vaccinia virus
auucuuuuauuaauguca

SEQ ID NO: 4065854 - RNA, 14 nt, Vaccinia virus
auucuuuuuaagau

SEQ ID NO: 4065855 - RNA, 14 nt, Vaccinia virus
auugaaaauuauuu

SEQ ID NO: 4065856 - RNA, 18 nt, Vaccinia virus
auugaacacuguucacau

SEQ ID NO: 4065857 - RNA, 14 nt, Vaccinia virus
auugaagaugaugu

SEQ ID NO: 4065858 - RNA, 11 nt, Vaccinia virus
aauaaggaaaa

SEQ ID NO: 4065859 - RNA, 18 nt, Vaccinia virus
aauaaggaauauacuaau

SEQ ID NO: 4065860 - RNA, 17 nt, Vaccinia virus
aauaagugugaugauug

SEQ ID NO: 4065861 - RNA, 21 nt, Vaccinia virus
aauaauaaccagaaaguuacg

SEQ ID NO: 4065862 - RNA, 15 nt, Vaccinia virus
aauaauaagaauaaa

SEQ ID NO: 4065863 - RNA, 23 nt, Vaccinia virus
aauaauaccguuugauauaccau

SEQ ID NO: 4065864 - RNA, 16 nt, Vaccinia virus
aauaauauaacucguu

SEQ ID NO: 4065865 - RNA, 14 nt, Vaccinia virus
aauaaucagaaauu

SEQ ID NO: 4065866 - RNA, 19 nt, Vaccinia virus
aauaaucccgcaauucauu

SEQ ID NO: 4065867 - RNA, 18 nt, Vaccinia virus
aauaaucguuauuaucau

SEQ ID NO: 4065868 - RNA, 14 nt, Vaccinia virus
aauaaucuucauua

SEQ ID NO: 4065869 - RNA, 19 nt, Vaccinia virus
aauaaugauucaacaaugu

SEQ ID NO: 4065870 - RNA, 19 nt, Vaccinia virus
aauaauggauaguauaaau

SEQ ID NO: 4065871 - RNA, 12 nt, Vaccinia virus
aauaauguuauu

SEQ ID NO: 4065872 - RNA, 16 nt, Vaccinia virus
aauaauucauggaaau

SEQ ID NO: 4065873 - RNA, 19 nt, Vaccinia virus
aauaauuguuuugaauuuc

SEQ ID NO: 4065874 - RNA, 14 nt, Vaccinia virus
aauaauuuacaaaa

SEQ ID NO: 4065875 - RNA, 22 nt, Vaccinia virus
aauaauuucuagaacaucaucu

SEQ ID NO: 4065876 - RNA, 16 nt, Vaccinia virus
aauacaaaaguucaua

SEQ ID NO: 4065877 - RNA, 12 nt, Vaccinia virus
aauacaauaauu

SEQ ID NO: 4065878 - RNA, 13 nt, Vaccinia virus
aauacaggaucua

SEQ ID NO: 4065879 - RNA, 20 nt, Vaccinia virus
aauacauauuguuuagcaaa

SEQ ID NO: 4065880 - RNA, 18 nt, Vaccinia virus
aauacaugggaaaugaua

SEQ ID NO: 4065881 - RNA, 20 nt, Vaccinia virus
aauacaugggaaaugauauc

SEQ ID NO: 4065882 - RNA, 15 nt, Vaccinia virus
aauaccauaaauaua

SEQ ID NO: 4065883 - RNA, 15 nt, Vaccinia virus
aauacgaauuaugca

SEQ ID NO: 4065884 - RNA, 22 nt, Vaccinia virus
aauacgauccaagguuagagaa

SEQ ID NO: 4065885 - RNA, 17 nt, Vaccinia virus
aauacggacuucauaau

SEQ ID NO: 4065886 - RNA, 23 nt, Vaccinia virus
aauacgucuugcacguaaucuau

SEQ ID NO: 4065887 - RNA, 13 nt, Vaccinia virus
aauacuaaauuga

SEQ ID NO: 4065888 - RNA, 12 nt, Vaccinia virus
aauacuaauuca

SEQ ID NO: 4065889 - RNA, 12 nt, Vaccinia virus
aauacuaucuau

SEQ ID NO: 4065890 - RNA, 18 nt, Vaccinia virus
aauacugcaauaauuuuc

SEQ ID NO: 4065891 - RNA, 19 nt, Vaccinia virus
aauacugcaauaauuuuca

SEQ ID NO: 4065892 - RNA, 20 nt, Vaccinia virus
aauacuuaccccuugaucgu

SEQ ID NO: 4065893 - RNA, 15 nt, Vaccinia virus
aauacuuaguuucca

SEQ ID NO: 4065894 - RNA, 23 nt, Vaccinia virus
aauacuuccaucaacauuguuuc

SEQ ID NO: 4065895 - RNA, 21 nt, Vaccinia virus
aauacuuugguaguauacaag

SEQ ID NO: 4065896 - RNA, 16 nt, Vaccinia virus
aauagaaaaaacaugu

SEQ ID NO: 4065897 - RNA, 19 nt, Vaccinia virus
aauagauaaugaacauaua

SEQ ID NO: 4065898 - RNA, 21 nt, Vaccinia virus
aauagauuggaugguugacau

SEQ ID NO: 4065899 - RNA, 15 nt, Vaccinia virus
aauagauuuuucaua

SEQ ID NO: 4065900 - RNA, 17 nt, Vaccinia virus
aauagcgcugaaaauaa

SEQ ID NO: 4065901 - RNA, 17 nt, Vaccinia virus
aauagcugaugauagaa

SEQ ID NO: 4065902 - RNA, 13 nt, Vaccinia virus
aauaggaauaauu

SEQ ID NO: 4065903 - RNA, 16 nt, Vaccinia virus
aauagguuguaauauc

SEQ ID NO: 4065904 - RNA, 14 nt, Vaccinia virus
aauagguuuuguuc

SEQ ID NO: 4065905 - RNA, 16 nt, Vaccinia virus
aauaguacauuuucca

SEQ ID NO: 4065906 - RNA, 13 nt, Vaccinia virus
aauaguagaauua

SEQ ID NO: 4065907 - RNA, 22 nt, Vaccinia virus
aauaguuacgcaauaucucaau

SEQ ID NO: 4065908 - RNA, 23 nt, Vaccinia virus
aauaguucccaacccagauaaua

SEQ ID NO: 4065909 - RNA, 23 nt, Vaccinia virus
aauaguucucccuuuuuaaaggu

SEQ ID NO: 4065910 - RNA, 14 nt, Vaccinia virus
aauaguucuguaau

SEQ ID NO: 4065911 - RNA, 14 nt, Vaccinia virus
aauaguuuacagau

SEQ ID NO: 4065912 - RNA, 15 nt, Vaccinia virus
aauaguuuauaacau

SEQ ID NO: 4065913 - RNA, 22 nt, Vaccinia virus
aauauaaaagaauauguauauc

SEQ ID NO: 4065914 - RNA, 22 nt, Vaccinia virus
aauauaaagcacguaggucuua

SEQ ID NO: 4065915 - RNA, 22 nt, Vaccinia virus
aauauaacuugguauaaagaua

SEQ ID NO: 4065916 - RNA, 13 nt, Vaccinia virus
aauauacaaguau

SEQ ID NO: 4065917 - RNA, 16 nt, Vaccinia virus
aauauaccauuaaaaa

SEQ ID NO: 4065918 - RNA, 15 nt, Vaccinia virus
aauauacgucguucu

SEQ ID NO: 4065919 - RNA, 19 nt, Vaccinia virus
aauauacgucguucuuauc

SEQ ID NO: 4065920 - RNA, 18 nt, Vaccinia virus
aauauagaaauaaugaua

SEQ ID NO: 4065921 - RNA, 20 nt, Vaccinia virus
aauauagaacaucauuucca

SEQ ID NO: 4065922 - RNA, 20 nt, Vaccinia virus
aauauagaucgaaaaauaua

SEQ ID NO: 4065923 - RNA, 22 nt, Vaccinia virus
aauauagcaucgauccaugaga

SEQ ID NO: 4065924 - RNA, 18 nt, Vaccinia virus
aauauaguaauaagauuu

SEQ ID NO: 4065925 - RNA, 15 nt, Vaccinia virus
aauauaguuaauagu

SEQ ID NO: 4065926 - RNA, 15 nt, Vaccinia virus
aauauauaaacucuu

SEQ ID NO: 4065927 - RNA, 20 nt, Vaccinia virus
aauauauaaguauaauccca

SEQ ID NO: 4065928 - RNA, 19 nt, Vaccinia virus
aauauauguugauaauauc

SEQ ID NO: 4065929 - RNA, 14 nt, Vaccinia virus
aauauauuaccaug

SEQ ID NO: 4065930 - RNA, 14 nt, Vaccinia virus
aauauauugauaau

SEQ ID NO: 4065931 - RNA, 16 nt, Vaccinia virus
aauaucagaaaggaua

SEQ ID NO: 4065932 - RNA, 19 nt, Vaccinia virus
aauaucaguaucuucuuua

SEQ ID NO: 4065933 - RNA, 14 nt, Vaccinia virus
aauaucauaaucua

SEQ ID NO: 4065934 - RNA, 21 nt, Vaccinia virus
aauaucgauguuuaacuuuug

SEQ ID NO: 4065935 - RNA, 14 nt, Vaccinia virus
aauaucuaauggau

SEQ ID NO: 4065936 - RNA, 17 nt, Vaccinia virus
aauaucuagcaaaaauu

SEQ ID NO: 4065937 - RNA, 14 nt, Vaccinia virus
aauaucuuauucca

SEQ ID NO: 4065938 - RNA, 20 nt, Vaccinia virus
aauaugacacgauuaccaau

SEQ ID NO: 4065939 - RNA, 18 nt, Vaccinia virus
aauaugagaaugaauaug

SEQ ID NO: 4065940 - RNA, 17 nt, Vaccinia virus
aauaugauuagaaguua

SEQ ID NO: 4065941 - RNA, 17 nt, Vaccinia virus
aauaugauuuuuaaaaa

SEQ ID NO: 4065942 - RNA, 15 nt, Vaccinia virus
uaauuaaauguuuga

SEQ ID NO: 4065943 - RNA, 15 nt, Vaccinia virus
uaauuaaucuaaaau

SEQ ID NO: 4065944 - RNA, 21 nt, Vaccinia virus
uaauuaauucuuuauugucau

SEQ ID NO: 4065945 - RNA, 15 nt, Vaccinia virus
uaauuacuaaaucug

SEQ ID NO: 4065946 - RNA, 16 nt, Vaccinia virus
uaauuauaagaaauau

SEQ ID NO: 4065947 - RNA, 14 nt, Vaccinia virus
uaauucauaagaau

SEQ ID NO: 4065948 - RNA, 12 nt, Vaccinia virus
uaauucauuaau

SEQ ID NO: 4065949 - RNA, 17 nt, Vaccinia virus
uaauucguauucuugga

SEQ ID NO: 4065950 - RNA, 14 nt, Vaccinia virus
uaauugacaucuau

SEQ ID NO: 4065951 - RNA, 16 nt, Vaccinia virus
uaauuguaacauccuu

SEQ ID NO: 4065952 - RNA, 14 nt, Vaccinia virus
uaauuguuaaacau

SEQ ID NO: 4065953 - RNA, 19 nt, Vaccinia virus
uaauuguuauuauuucauu

SEQ ID NO: 4065954 - RNA, 20 nt, Vaccinia virus
uaauuuaugaggugaacgau

SEQ ID NO: 4065955 - RNA, 14 nt, Vaccinia virus
uaauuuuacuagau

SEQ ID NO: 4065956 - RNA, 15 nt, Vaccinia virus
uaauuuuauugagau

SEQ ID NO: 4065957 - RNA, 22 nt, Vaccinia virus
uacaaaauguugauaauccuug

SEQ ID NO: 4065958 - RNA, 15 nt, Vaccinia virus
uauaauaucuuugaa

SEQ ID NO: 4065959 - RNA, 20 nt, Vaccinia virus
uauaauccuuauacaucuga

SEQ ID NO: 4065960 - RNA, 21 nt, Vaccinia virus
uauaaucguguauaacaucuu

SEQ ID NO: 4065961 - RNA, 20 nt, Vaccinia virus
uauaaucuucgucuauuaca

SEQ ID NO: 4065962 - RNA, 17 nt, Vaccinia virus
uauaaugucuacauucu

SEQ ID NO: 4065963 - RNA, 16 nt, Vaccinia virus
uauaauuauauguaga

SEQ ID NO: 4065964 - RNA, 20 nt, Vaccinia virus
uauaauucuuuauaacugaa

SEQ ID NO: 4065965 - RNA, 24 nt, Vaccinia virus
uauaauuuaggaaugauuaucaaa

SEQ ID NO: 4065966 - RNA, 18 nt, Vaccinia virus
uauacaaguguagaugau

SEQ ID NO: 4065967 - RNA, 16 nt, Vaccinia virus
uauacaauuuguggaa

SEQ ID NO: 4065968 - RNA, 22 nt, Vaccinia virus
uauacauagauauuaauuauca

SEQ ID NO: 4065969 - RNA, 14 nt, Vaccinia virus
uauacauucuucug

SEQ ID NO: 4065970 - RNA, 18 nt, Vaccinia virus
uauacauucuucuguuaa

SEQ ID NO: 4065971 - RNA, 18 nt, Vaccinia virus
uauaccgccucaaacucu

SEQ ID NO: 4065972 - RNA, 17 nt, Vaccinia virus
uauaccggcauugguaa

SEQ ID NO: 4065973 - RNA, 17 nt, Vaccinia virus
uauacgaaaaaauagca

SEQ ID NO: 4065974 - RNA, 15 nt, Vaccinia virus
uauacggauuucuau

SEQ ID NO: 4065975 - RNA, 21 nt, Vaccinia virus
uauacuauauaguaauaccaa

SEQ ID NO: 4065976 - RNA, 17 nt, Vaccinia virus
uauacugagaaguuauu

SEQ ID NO: 4065977 - RNA, 16 nt, Vaccinia virus
uauacuucauaaaaga

SEQ ID NO: 4065978 - RNA, 16 nt, Vaccinia virus
uauacuugucaucauu

SEQ ID NO: 4065979 - RNA, 21 nt, Vaccinia virus
uauacuuuuagaugacacauu

SEQ ID NO: 4065980 - RNA, 23 nt, Vaccinia virus
uauagagcccacguuuaaacauu

SEQ ID NO: 4065981 - RNA, 19 nt, Vaccinia virus
uauagauaacauaguuugg

SEQ ID NO: 4065982 - RNA, 16 nt, Vaccinia virus
uauagauccuccagua

SEQ ID NO: 4065983 - RNA, 17 nt, Vaccinia virus
uauagaucuuagacauu

SEQ ID NO: 4065984 - RNA, 22 nt, Vaccinia virus
uauagauggaggggauuggcau

SEQ ID NO: 4065985 - RNA, 16 nt, Vaccinia virus
uauagauguucacauu

SEQ ID NO: 4065986 - RNA, 23 nt, Vaccinia virus
uauaggauggcgacgguaacugc

SEQ ID NO: 4065987 - RNA, 13 nt, Vaccinia virus
uauaguuaacauu

SEQ ID NO: 4065988 - RNA, 17 nt, Vaccinia virus
uauauaacuaucaauau

SEQ ID NO: 4065989 - RNA, 19 nt, Vaccinia virus
uauauacacucuauuucaa

SEQ ID NO: 4065990 - RNA, 13 nt, Vaccinia virus
uauauacgaguau

SEQ ID NO: 4065991 - RNA, 17 nt, Vaccinia virus
uauauagauauuaucua

SEQ ID NO: 4065992 - RNA, 13 nt, Vaccinia virus
uauauagauguca

SEQ ID NO: 4065993 - RNA, 14 nt, Vaccinia virus
uauauaguuuuuua

SEQ ID NO: 4065994 - RNA, 13 nt, Vaccinia virus
uauauaucuggag

SEQ ID NO: 4065995 - RNA, 16 nt, Vaccinia virus
uauaucauuuguacau

SEQ ID NO: 4065996 - RNA, 17 nt, Vaccinia virus
uauaucauuuguuuuaa

SEQ ID NO: 4065997 - RNA, 20 nt, Vaccinia virus
uauauccaccaauagaaguu

SEQ ID NO: 4065998 - RNA, 15 nt, Vaccinia virus
uauaucccuuaaaaa

SEQ ID NO: 4065999 - RNA, 22 nt, Vaccinia virus
uauauccuacacccgaagagau

SEQ ID NO: 4066000 - RNA, 22 nt, Vaccinia virus
uauaucgcauauuuauaucgug

SEQ ID NO: 4066001 - RNA, 16 nt, Vaccinia virus
uauaucuaacaucuug

SEQ ID NO: 4066002 - RNA, 16 nt, Vaccinia virus
uauaucuuauaucuua

SEQ ID NO: 4066003 - RNA, 14 nt, Vaccinia virus
uauaucuucuucug

SEQ ID NO: 4066004 - RNA, 17 nt, Vaccinia virus
uauaugauauuccugga

SEQ ID NO: 4066005 - RNA, 20 nt, Vaccinia virus
uauaugguucgcucaaaaau

SEQ ID NO: 4066006 - RNA, 17 nt, Vaccinia virus
uauauguggaaauguca

SEQ ID NO: 4066007 - RNA, 15 nt, Vaccinia virus
uauauuaauacacau

SEQ ID NO: 4066008 - RNA, 14 nt, Vaccinia virus
uauauuaauacuuu

SEQ ID NO: 4066009 - RNA, 17 nt, Vaccinia virus
uauauuagacaauacua

SEQ ID NO: 4066010 - RNA, 23 nt, Vaccinia virus
uauauucaguaaccaaauacaua

SEQ ID NO: 4066011 - RNA, 21 nt, Vaccinia virus
uauauuucauucgucaaggau

SEQ ID NO: 4066012 - RNA, 13 nt, Vaccinia virus
uauauuuuaucua

SEQ ID NO: 4066013 - RNA, 14 nt, Vaccinia virus
uauauuuuuggauu

SEQ ID NO: 4066014 - RNA, 23 nt, Vaccinia virus
uaucaaaacauauagauagacga

SEQ ID NO: 4066015 - RNA, 18 nt, Vaccinia virus
uaucaaaaucuugucugc

SEQ ID NO: 4066016 - RNA, 17 nt, Vaccinia virus
uaucaaacaauccaaaa

SEQ ID NO: 4066017 - RNA, 18 nt, Vaccinia virus
uaucaaauagcucaauau

SEQ ID NO: 4066018 - RNA, 17 nt, Vaccinia virus
uaucaaccacauaucug

SEQ ID NO: 4066019 - RNA, 23 nt, Vaccinia virus
uaucaauaagcauuaugauuugu

SEQ ID NO: 4066020 - RNA, 16 nt, Vaccinia virus
uaucaauaccuuuucu

SEQ ID NO: 4066021 - RNA, 14 nt, Vaccinia virus
uaucaauagcaguu

SEQ ID NO: 4066022 - RNA, 18 nt, Vaccinia virus
uaucaauagcaguuuauu

SEQ ID NO: 4066023 - RNA, 17 nt, Vaccinia virus
uaucaauauuaacaguu

SEQ ID NO: 4066024 - RNA, 15 nt, Vaccinia virus
uaucaauuauaugug

SEQ ID NO: 4066025 - RNA, 14 nt, Vaccinia virus
uaucacagucuguu

SEQ ID NO: 4066026 - RNA, 23 nt, Vaccinia virus
uaucaggcgucuccauguuugau

SEQ ID NO: 4066027 - RNA, 22 nt, Vaccinia virus
uaucagucgaggacuuggaugu

SEQ ID NO: 4066028 - RNA, 18 nt, Vaccinia virus
uaucauaaauaaauaaug

SEQ ID NO: 4066029 - RNA, 14 nt, Vaccinia virus
uaucauaauuaaau

SEQ ID NO: 4066030 - RNA, 15 nt, Vaccinia virus
uaucauccaauauua

SEQ ID NO: 4066031 - RNA, 16 nt, Vaccinia virus
uaucaucuauuagaga

SEQ ID NO: 4066032 - RNA, 21 nt, Vaccinia virus
uaucaucuuaugaggaaugau

SEQ ID NO: 4066033 - RNA, 17 nt, Vaccinia virus
uaucaugaauuagauau

SEQ ID NO: 4066034 - RNA, 17 nt, Vaccinia virus
uaucaugagauguguau

SEQ ID NO: 4066035 - RNA, 15 nt, Vaccinia virus
uaucauuuaaacauu

SEQ ID NO: 4066036 - RNA, 20 nt, Vaccinia virus
uaucauuuugauuaauuguu

SEQ ID NO: 4066037 - RNA, 17 nt, Vaccinia virus
uauccagcuaacuuauu

SEQ ID NO: 4066038 - RNA, 21 nt, Vaccinia virus
uauccgacgacguuacucaaa

SEQ ID NO: 4066039 - RNA, 20 nt, Vaccinia virus
uauccucacaacuuaaugaa

SEQ ID NO: 4066040 - RNA, 14 nt, Vaccinia virus
uauccucagacucu

SEQ ID NO: 4066041 - RNA, 13 nt, Vaccinia virus
uaucgaacaaauu

SEQ ID NO: 4066042 - RNA, 14 nt, Vaccinia virus
uaucgaauuucuac

SEQ ID NO: 4066043 - RNA, 17 nt, Vaccinia virus
uaucgagaucuuuugua

SEQ ID NO: 4066044 - RNA, 18 nt, Vaccinia virus
uaucgccggucaucauaa

SEQ ID NO: 4066045 - RNA, 19 nt, Vaccinia virus
uaucgccggucaucauaag

SEQ ID NO: 4066046 - RNA, 22 nt, Vaccinia virus
uaucgcuaaaauuuucaucaaa

SEQ ID NO: 4066047 - RNA, 12 nt, Vaccinia virus
uaucuaaagcuu

SEQ ID NO: 4066048 - RNA, 15 nt, Vaccinia virus
uaucuaacucguaaa

SEQ ID NO: 4066049 - RNA, 23 nt, Vaccinia virus
uaucuaauuugauauaaugaauu

SEQ ID NO: 4066050 - RNA, 17 nt, Vaccinia virus
uaucuaccucuccaaaa

SEQ ID NO: 4066051 - RNA, 16 nt, Vaccinia virus
uaucuauaaacauaag

SEQ ID NO: 4066052 - RNA, 12 nt, Vaccinia virus
uaucuauacaua

SEQ ID NO: 4066053 - RNA, 16 nt, Vaccinia virus
uaucuauacuauuaaa

SEQ ID NO: 4066054 - RNA, 16 nt, Vaccinia virus
uaucuauguuaucauc

SEQ ID NO: 4066055 - RNA, 12 nt, Vaccinia virus
uaucucagucug

SEQ ID NO: 4066056 - RNA, 16 nt, Vaccinia virus
uaucucauuugagaau

SEQ ID NO: 4066057 - RNA, 14 nt, Vaccinia virus
uaucucuaacaaaa

SEQ ID NO: 4066058 - RNA, 19 nt, Vaccinia virus
uaucuggcucucucugcca

SEQ ID NO: 4066059 - RNA, 11 nt, Vaccinia virus
uaucuguaaaa

SEQ ID NO: 4066060 - RNA, 15 nt, Vaccinia virus
uaucugugaauacuu

SEQ ID NO: 4066061 - RNA, 16 nt, Vaccinia virus
uaucugugaauacuuu

SEQ ID NO: 4066062 - RNA, 21 nt, Vaccinia virus
uaucuucgauauaaaaucauu

SEQ ID NO: 4066063 - RNA, 15 nt, Vaccinia virus
uaucuucuuuaucua

SEQ ID NO: 4066064 - RNA, 19 nt, Vaccinia virus
uaucuuuccauuuaucaug

SEQ ID NO: 4066065 - RNA, 13 nt, Vaccinia virus
uaugaaauuuaag

SEQ ID NO: 4066066 - RNA, 17 nt, Vaccinia virus
uaugaauaaucuucauu

SEQ ID NO: 4066067 - RNA, 13 nt, Vaccinia virus
uaugaauaucuuc

SEQ ID NO: 4066068 - RNA, 21 nt, Vaccinia virus
uaugaauccgaugaucucacu

SEQ ID NO: 4066069 - RNA, 22 nt, Vaccinia virus
uaugaauggauacuuguaugau

SEQ ID NO: 4066070 - RNA, 14 nt, Vaccinia virus
uaugacaaacauug

SEQ ID NO: 4066071 - RNA, 21 nt, Vaccinia virus
uaugaccgguuuaauguuaua

SEQ ID NO: 4066072 - RNA, 18 nt, Vaccinia virus
uaugacucaugaucuauu

SEQ ID NO: 4066073 - RNA, 13 nt, Vaccinia virus
uaugagaaugaau

SEQ ID NO: 4066074 - RNA, 15 nt, Vaccinia virus
uaugaggaaugauug

SEQ ID NO: 4066075 - RNA, 21 nt, Vaccinia virus
uaugagucaauugguagaguu

SEQ ID NO: 4066076 - RNA, 16 nt, Vaccinia virus
uaugauaagauacaua

SEQ ID NO: 4066077 - RNA, 22 nt, Vaccinia virus
uaugauauaauucguggauaau

SEQ ID NO: 4066078 - RNA, 15 nt, Vaccinia virus
uaugauaucucuauu

SEQ ID NO: 4066079 - RNA, 18 nt, Vaccinia virus
uaugauauuccuggagau

SEQ ID NO: 4066080 - RNA, 13 nt, Vaccinia virus
uaugauucaaugu

SEQ ID NO: 4066081 - RNA, 19 nt, Vaccinia virus
uaugauuuuuaaucaagau

SEQ ID NO: 4066082 - RNA, 17 nt, Vaccinia virus
uccauauuuuagaauau

SEQ ID NO: 4066083 - RNA, 17 nt, Vaccinia virus
uccaucagaauguuucc

SEQ ID NO: 4066084 - RNA, 21 nt, Vaccinia virus
uccaucaucgucuuauuucaa

SEQ ID NO: 4066085 - RNA, 20 nt, Vaccinia virus
uccaucaugaucugguuuug

SEQ ID NO: 4066086 - RNA, 15 nt, Vaccinia virus
uccaugucuacauua

SEQ ID NO: 4066087 - RNA, 17 nt, Vaccinia virus
uccauuuuuaauuuaug

SEQ ID NO: 4066088 - RNA, 14 nt, Vaccinia virus
ucccaauaugugua

SEQ ID NO: 4066089 - RNA, 18 nt, Vaccinia virus
ucccacaguguugccauu

SEQ ID NO: 4066090 - RNA, 18 nt, Vaccinia virus
uccgaggauaguaaaaua

SEQ ID NO: 4066091 - RNA, 19 nt, Vaccinia virus
uccgcaauacauuucucaa

SEQ ID NO: 4066092 - RNA, 16 nt, Vaccinia virus
uccggagaucuaaaga

SEQ ID NO: 4066093 - RNA, 18 nt, Vaccinia virus
uccuagauauguaaaaua

SEQ ID NO: 4066094 - RNA, 15 nt, Vaccinia virus
uccuaguacacaaua

SEQ ID NO: 4066095 - RNA, 12 nt, Vaccinia virus
uccucaauaacg

SEQ ID NO: 4066096 - RNA, 24 nt, Vaccinia virus
uccucagauuuauacauauucuaa

SEQ ID NO: 4066097 - RNA, 15 nt, Vaccinia virus
uccucaggauucuaa

SEQ ID NO: 4066098 - RNA, 13 nt, Vaccinia virus
uccucccauaaua

SEQ ID NO: 4066099 - RNA, 12 nt, Vaccinia virus
uccuccuaucaa

SEQ ID NO: 4066100 - RNA, 17 nt, Vaccinia virus
uccuccuguagauaugu

SEQ ID NO: 4066101 - RNA, 19 nt, Vaccinia virus
uccuuaaauguuuucucug

SEQ ID NO: 4066102 - RNA, 20 nt, Vaccinia virus
uccuuaagauguuugagaau

SEQ ID NO: 4066103 - RNA, 13 nt, Vaccinia virus
uccuuaucaaaau

SEQ ID NO: 4066104 - RNA, 17 nt, Vaccinia virus
uccuuaucuucauagaa

SEQ ID NO: 4066105 - RNA, 12 nt, Vaccinia virus
uccuucgucucu

SEQ ID NO: 4066106 - RNA, 21 nt, Vaccinia virus
uccuucuaaaguaaguaugau

SEQ ID NO: 4066107 - RNA, 23 nt, Vaccinia virus
uccuuuaaaauauauucuaauau

SEQ ID NO: 4066108 - RNA, 17 nt, Vaccinia virus
ucgaagauaucauccaa

SEQ ID NO: 4066109 - RNA, 15 nt, Vaccinia virus
ucgaauacaaauuuu

SEQ ID NO: 4066110 - RNA, 17 nt, Vaccinia virus
ucgacguuucucaaagu

SEQ ID NO: 4066111 - RNA, 18 nt, Vaccinia virus
ucgacguuucucaaaguc

SEQ ID NO: 4066112 - RNA, 16 nt, Vaccinia virus
ucgagcuaauuucuaa

SEQ ID NO: 4066113 - RNA, 17 nt, Vaccinia virus
ucgauaacuguagucuu

SEQ ID NO: 4066114 - RNA, 16 nt, Vaccinia virus
ucgauaccuagaagau

SEQ ID NO: 4066115 - RNA, 14 nt, Vaccinia virus
ucgauauuagauuu

SEQ ID NO: 4066116 - RNA, 14 nt, Vaccinia virus
ucgauggucucaca

SEQ ID NO: 4066117 - RNA, 15 nt, Vaccinia virus
ucgauugauuuggaa

SEQ ID NO: 4066118 - RNA, 17 nt, Vaccinia virus
ucgauugugauuguauu

SEQ ID NO: 4066119 - RNA, 19 nt, Vaccinia virus
ucgauuuaccguuacuaau

SEQ ID NO: 4066120 - RNA, 21 nt, Vaccinia virus
ucgcauguucagcaauuuauu

SEQ ID NO: 4066121 - RNA, 17 nt, Vaccinia virus
ucgccgucgcuagauaa

SEQ ID NO: 4066122 - RNA, 14 nt, Vaccinia virus
ucgcgauaauguag

SEQ ID NO: 4066123 - RNA, 12 nt, Vaccinia virus
ucggaauuauuu

SEQ ID NO: 4066124 - RNA, 21 nt, Vaccinia virus
ucggauuauccuccguaagac

SEQ ID NO: 4066125 - RNA, 18 nt, Vaccinia virus
ucgguauaaaaauuauug

SEQ ID NO: 4066126 - RNA, 19 nt, Vaccinia virus
ucgguucuuuaaaagaaac

SEQ ID NO: 4066127 - RNA, 20 nt, Vaccinia virus
ucguacaguagagauauuug

SEQ ID NO: 4066128 - RNA, 15 nt, Vaccinia virus
ucguauacucugccc

SEQ ID NO: 4066129 - RNA, 14 nt, Vaccinia virus
ucguauccacaaau

SEQ ID NO: 4066130 - RNA, 13 nt, Vaccinia virus
ucguauguagaaa

SEQ ID NO: 4066131 - RNA, 19 nt, Vaccinia virus
ucguauuggauucugaaau

SEQ ID NO: 4066132 - RNA, 18 nt, Vaccinia virus
ucgucuccccaaacauug

SEQ ID NO: 4066133 - RNA, 13 nt, Vaccinia virus
ucgucucucuuag

SEQ ID NO: 4066134 - RNA, 12 nt, Vaccinia virus
ucgucuuuagag

SEQ ID NO: 4066135 - RNA, 16 nt, Vaccinia virus
ucgucuuuguuagcau

SEQ ID NO: 4066136 - RNA, 15 nt, Vaccinia virus
ucguuaaaaaguuuu

SEQ ID NO: 4066137 - RNA, 16 nt, Vaccinia virus
ucuaaaaaauccuuaa

SEQ ID NO: 4066138 - RNA, 21 nt, Vaccinia virus
ucuaaacauaagacuuauucu

SEQ ID NO: 4066139 - RNA, 23 nt, Vaccinia virus
ucuaaauaauaucuauuguuugg

SEQ ID NO: 4066140 - RNA, 22 nt, Vaccinia virus
ucuaacaaaaauuaugaaauaa

SEQ ID NO: 4066141 - RNA, 18 nt, Vaccinia virus
ucuaauccuccuauuaca

SEQ ID NO: 4066142 - RNA, 21 nt, Vaccinia virus
ucuacaaaaaggacauguaua

SEQ ID NO: 4066143 - RNA, 14 nt, Vaccinia virus
ucuacaaagucucu

SEQ ID NO: 4066144 - RNA, 19 nt, Vaccinia virus
ucuacagauauuuuaguuu

SEQ ID NO: 4066145 - RNA, 17 nt, Vaccinia virus
ucuacaggcuucucauc

SEQ ID NO: 4066146 - RNA, 20 nt, Vaccinia virus
ucuacaguaauguccaaauc

SEQ ID NO: 4066147 - RNA, 23 nt, Vaccinia virus
ucuacaucuuccuucuuauucuu

SEQ ID NO: 4066148 - RNA, 14 nt, Vaccinia virus
ucuaccauuucauu

SEQ ID NO: 4066149 - RNA, 17 nt, Vaccinia virus
ucuaccguuguuaaaua

SEQ ID NO: 4066150 - RNA, 15 nt, Vaccinia virus
ucuacgaagaaaguu

SEQ ID NO: 4066151 - RNA, 22 nt, Vaccinia virus
ucuacuaagcccaaaaccaaac

SEQ ID NO: 4066152 - RNA, 12 nt, Vaccinia virus
ucuacuaucaaa

SEQ ID NO: 4066153 - RNA, 14 nt, Vaccinia virus
ucuacuauucuauu

SEQ ID NO: 4066154 - RNA, 17 nt, Vaccinia virus
ucuacuguuccuaauau

SEQ ID NO: 4066155 - RNA, 17 nt, Vaccinia virus
ucuagaauaaguuucau

SEQ ID NO: 4066156 - RNA, 23 nt, Vaccinia virus
ucuagaauaucccaauagguguu

SEQ ID NO: 4066157 - RNA, 12 nt, Vaccinia virus
ucuagaaugaag

SEQ ID NO: 4066158 - RNA, 21 nt, Vaccinia virus
ucuagaauucauuagacguag

SEQ ID NO: 4066159 - RNA, 21 nt, Vaccinia virus
ucuagacgauuaguaauauau

SEQ ID NO: 4066160 - RNA, 21 nt, Vaccinia virus
ucuagauagaguauuaaauau

SEQ ID NO: 4066161 - RNA, 20 nt, Vaccinia virus
ucuaggagcaccagaaguau

SEQ ID NO: 4066162 - RNA, 19 nt, Vaccinia virus
ucuaguuaguuuguauaaa

SEQ ID NO: 4066163 - RNA, 21 nt, Vaccinia virus
ucuauaaacgucguauguaga

SEQ ID NO: 4066164 - RNA, 17 nt, Vaccinia virus
ucuauaaauaaaagaca

SEQ ID NO: 4066165 - RNA, 14 nt, Vaccinia virus
ucuauaauaucaga

SEQ ID NO: 4066166 - RNA, 18 nt, Vaccinia virus
ucuauaauaucuuauucu

SEQ ID NO: 4066167 - RNA, 19 nt, Vaccinia virus
ucuauaauaucuuauucug

SEQ ID NO: 4066168 - RNA, 15 nt, Vaccinia virus
ucuauaccaauauua

SEQ ID NO: 4066169 - RNA, 22 nt, Vaccinia virus
ucuauagaaacauauucuauga

SEQ ID NO: 4066170 - RNA, 14 nt, Vaccinia virus
ucuauagucagaau

SEQ ID NO: 4066171 - RNA, 14 nt, Vaccinia virus
ucuaucaaagccuu

SEQ ID NO: 4066172 - RNA, 19 nt, Vaccinia virus
ucuaucuccaguauuuaca

SEQ ID NO: 4066173 - RNA, 16 nt, Vaccinia virus
ucuaugaauaugauuu

SEQ ID NO: 4066174 - RNA, 14 nt, Vaccinia virus
ucuaugauaguuuu

SEQ ID NO: 4066175 - RNA, 23 nt, Vaccinia virus
ucuaugauauuguugauaauaca

SEQ ID NO: 4066176 - RNA, 12 nt, Vaccinia virus
ucuauguaucua

SEQ ID NO: 4066177 - RNA, 17 nt, Vaccinia virus
ucuauguuuuuagauuu

SEQ ID NO: 4066178 - RNA, 18 nt, Vaccinia virus
ucuauuaaaaauccaagu

SEQ ID NO: 4066179 - RNA, 16 nt, Vaccinia virus
ucuauuauuacagagu

SEQ ID NO: 4066180 - RNA, 12 nt, Vaccinia virus
ucuauucaagau

SEQ ID NO: 4066181 - RNA, 15 nt, Vaccinia virus
ucuauuuaauacuuu

SEQ ID NO: 4066182 - RNA, 20 nt, Vaccinia virus
ucuauuucaucguuuuguau

SEQ ID NO: 4066183 - RNA, 19 nt, Vaccinia virus
ucuauuugccaauauguca

SEQ ID NO: 4066184 - RNA, 23 nt, Vaccinia virus
ucuauuuguucugacaauauuua

SEQ ID NO: 4066185 - RNA, 14 nt, Vaccinia virus
ucucaagauuuuaa

SEQ ID NO: 4066186 - RNA, 16 nt, Vaccinia virus
ucucaauauuuggauc

SEQ ID NO: 4066187 - RNA, 14 nt, Vaccinia virus
ucucaauugucugu

SEQ ID NO: 4066188 - RNA, 18 nt, Vaccinia virus
ucucagaaucaaauauag

SEQ ID NO: 4066189 - RNA, 18 nt, Vaccinia virus
ucucauaaaaaaaguuuu

SEQ ID NO: 4066190 - RNA, 24 nt, Vaccinia virus
ucucauaauguaaagauauucuaa

SEQ ID NO: 4066191 - RNA, 15 nt, Vaccinia virus
ucucauauguuuuaa

SEQ ID NO: 4066192 - RNA, 14 nt, Vaccinia virus
ucuccagaaaucug

SEQ ID NO: 4066193 - RNA, 22 nt, Vaccinia virus
ucuccaugauuaaauauuuuaa

SEQ ID NO: 4066194 - RNA, 18 nt, Vaccinia virus
ucucccauaaucuuggua

SEQ ID NO: 4066195 - RNA, 14 nt, Vaccinia virus
ucucccuacgacga

SEQ ID NO: 4066196 - RNA, 14 nt, Vaccinia virus
ucuccgauaucuaa

SEQ ID NO: 4066197 - RNA, 22 nt, Vaccinia virus
ucuccgcaauacauuucucaaa

SEQ ID NO: 4066198 - RNA, 19 nt, Vaccinia virus
ucucguauucaguuucauc

SEQ ID NO: 4066199 - RNA, 15 nt, Vaccinia virus
ucucuaaaggaugac

SEQ ID NO: 4066200 - RNA, 13 nt, Vaccinia virus
ucucuaguuuuau

SEQ ID NO: 4066201 - RNA, 10 nt, Vaccinia virus
ucucuauaga

SEQ ID NO: 4066202 - RNA, 14 nt, Vaccinia virus
ucucuaucaaugau

SEQ ID NO: 4066203 - RNA, 17 nt, Vaccinia virus
ucucuaugauccugaaa

SEQ ID NO: 4066204 - RNA, 18 nt, Vaccinia virus
ucucuauugccaaauuuu

SEQ ID NO: 4066205 - RNA, 19 nt, Vaccinia virus
ucucucaaucacuacaucu

SEQ ID NO: 4066206 - RNA, 13 nt, Vaccinia virus
acucuaaguuugu

SEQ ID NO: 4066207 - RNA, 19 nt, Vaccinia virus
acucuagagacuaugauug

SEQ ID NO: 4066208 - RNA, 15 nt, Vaccinia virus
acucucaaauuauua

SEQ ID NO: 4066209 - RNA, 18 nt, Vaccinia virus
acucucuauuucuuaaug

SEQ ID NO: 4066210 - RNA, 21 nt, Vaccinia virus
acucucuauuucuuaaugaau

SEQ ID NO: 4066211 - RNA, 13 nt, Vaccinia virus
acucuuaauuaug

SEQ ID NO: 4066212 - RNA, 14 nt, Vaccinia virus
acucuuauuauaga

SEQ ID NO: 4066213 - RNA, 12 nt, Vaccinia virus
acucuucuuauu

SEQ ID NO: 4066214 - RNA, 20 nt, Vaccinia virus
acucuuggucuaauacugau

SEQ ID NO: 4066215 - RNA, 18 nt, Vaccinia virus
acucuuucgcuauuucua

SEQ ID NO: 4066216 - RNA, 22 nt, Vaccinia virus
acugaagucugauauucagaaa

SEQ ID NO: 4066217 - RNA, 18 nt, Vaccinia virus
acugaaugcuuucuugga

SEQ ID NO: 4066218 - RNA, 13 nt, Vaccinia virus
acugacuuuagac

SEQ ID NO: 4066219 - RNA, 18 nt, Vaccinia virus
acugagaaguuauuaucu

SEQ ID NO: 4066220 - RNA, 17 nt, Vaccinia virus
acugaguuggcuacuau

SEQ ID NO: 4066221 - RNA, 15 nt, Vaccinia virus
acugauuaacaaaug

SEQ ID NO: 4066222 - RNA, 22 nt, Vaccinia virus
acugauuaaugagaucuucuau

SEQ ID NO: 4066223 - RNA, 13 nt, Vaccinia virus
acugauucagaaa

SEQ ID NO: 4066224 - RNA, 13 nt, Vaccinia virus
acugauucuggac

SEQ ID NO: 4066225 - RNA, 19 nt, Vaccinia virus
acugccgaguuuaaaacuu

SEQ ID NO: 4066226 - RNA, 15 nt, Vaccinia virus
acuggaucguuuaaa

SEQ ID NO: 4066227 - RNA, 14 nt, Vaccinia virus
acuggcgaaauggu

SEQ ID NO: 4066228 - RNA, 22 nt, Vaccinia virus
acuggugaguuaauauucaugu

SEQ ID NO: 4066229 - RNA, 14 nt, Vaccinia virus
acuguaaaaacaaa

SEQ ID NO: 4066230 - RNA, 21 nt, Vaccinia virus
acuguaucaaccggauuuaaa

SEQ ID NO: 4066231 - RNA, 21 nt, Vaccinia virus
acugucuggcaauaaaugaua

SEQ ID NO: 4066232 - RNA, 16 nt, Vaccinia virus
acuguggauacucugu

SEQ ID NO: 4066233 - RNA, 20 nt, Vaccinia virus
acuguugaaguacuuaauga

SEQ ID NO: 4066234 - RNA, 19 nt, Vaccinia virus
acuguugccaaugauguca

SEQ ID NO: 4066235 - RNA, 13 nt, Vaccinia virus
acuguuuaauagc

SEQ ID NO: 4066236 - RNA, 14 nt, Vaccinia virus
acuuaaaaauggau

SEQ ID NO: 4066237 - RNA, 22 nt, Vaccinia virus
acuuaaugaagaucuauuucca

SEQ ID NO: 4066238 - RNA, 20 nt, Vaccinia virus
acuuacauggacacauucuu

SEQ ID NO: 4066239 - RNA, 18 nt, Vaccinia virus
acuuacuaaagucaauaa

SEQ ID NO: 4066240 - RNA, 18 nt, Vaccinia virus
acuuagaacagauuuaac

SEQ ID NO: 4066241 - RNA, 21 nt, Vaccinia virus
auaauucuacacggcaugguu

SEQ ID NO: 4066242 - RNA, 16 nt, Vaccinia virus
auaauucuauucuagu

SEQ ID NO: 4066243 - RNA, 14 nt, Vaccinia virus
auaauuuagauaau

SEQ ID NO: 4066244 - RNA, 22 nt, Vaccinia virus
auaauuucuguaaauucaugau

SEQ ID NO: 4066245 - RNA, 11 nt, Vaccinia virus
auaauuuuacc

SEQ ID NO: 4066246 - RNA, 15 nt, Vaccinia virus
auaauuuucauauau

SEQ ID NO: 4066247 - RNA, 14 nt, Vaccinia virus
auacaaaaaaaugc

SEQ ID NO: 4066248 - RNA, 20 nt, Vaccinia virus
auacaaaauuugcaucuaca

SEQ ID NO: 4066249 - RNA, 16 nt, Vaccinia virus
auacaauaaauguuua

SEQ ID NO: 4066250 - RNA, 21 nt, Vaccinia virus
auacaauaucuucgguaucuu

SEQ ID NO: 4066251 - RNA, 13 nt, Vaccinia virus
auacaauccauga

SEQ ID NO: 4066252 - RNA, 17 nt, Vaccinia virus
auacaauccaugauauu

SEQ ID NO: 4066253 - RNA, 17 nt, Vaccinia virus
auacaauggaugauaug

SEQ ID NO: 4066254 - RNA, 16 nt, Vaccinia virus
auacacauuuaauaaa

SEQ ID NO: 4066255 - RNA, 19 nt, Vaccinia virus
auacacguauaaaaaauau

SEQ ID NO: 4066256 - RNA, 18 nt, Vaccinia virus
auacacuguuuaaaauua

SEQ ID NO: 4066257 - RNA, 20 nt, Vaccinia virus
auacagaagauuuaacuaga

SEQ ID NO: 4066258 - RNA, 17 nt, Vaccinia virus
auacagaaggaaacuuc

SEQ ID NO: 4066259 - RNA, 14 nt, Vaccinia virus
auacagucuuaaau

SEQ ID NO: 4066260 - RNA, 16 nt, Vaccinia virus
auacauaccgaaagca

SEQ ID NO: 4066261 - RNA, 12 nt, Vaccinia virus
auacauauacca

SEQ ID NO: 4066262 - RNA, 17 nt, Vaccinia virus
auacauaugacaaacau

SEQ ID NO: 4066263 - RNA, 23 nt, Vaccinia virus
auacauaugguacgauguuguaa

SEQ ID NO: 4066264 - RNA, 13 nt, Vaccinia virus
auacaucuaaauu

SEQ ID NO: 4066265 - RNA, 16 nt, Vaccinia virus
auacaugaacaugucg

SEQ ID NO: 4066266 - RNA, 19 nt, Vaccinia virus
auacaugucuuagauguuc

SEQ ID NO: 4066267 - RNA, 23 nt, Vaccinia virus
auacauugaauauaaaauaacua

SEQ ID NO: 4066268 - RNA, 15 nt, Vaccinia virus
auacauugaucuaug

SEQ ID NO: 4066269 - RNA, 16 nt, Vaccinia virus
auacauuucucaaaug

SEQ ID NO: 4066270 - RNA, 19 nt, Vaccinia virus
auaccacaccauuuuuuaa

SEQ ID NO: 4066271 - RNA, 21 nt, Vaccinia virus
auaccaguauaccucaaaaau

SEQ ID NO: 4066272 - RNA, 16 nt, Vaccinia virus
auaccaguuauguuua

SEQ ID NO: 4066273 - RNA, 15 nt, Vaccinia virus
auaccguuaaauaua

SEQ ID NO: 4066274 - RNA, 14 nt, Vaccinia virus
auacgaaaauagau

SEQ ID NO: 4066275 - RNA, 22 nt, Vaccinia virus
auacgaauaucguucucuaaau

SEQ ID NO: 4066276 - RNA, 14 nt, Vaccinia virus
auacgagucauuau

SEQ ID NO: 4066277 - RNA, 14 nt, Vaccinia virus
auacgauucuauau

SEQ ID NO: 4066278 - RNA, 17 nt, Vaccinia virus
auacgcauguagaaugu

SEQ ID NO: 4066279 - RNA, 15 nt, Vaccinia virus
auacgccaaggaaag

SEQ ID NO: 4066280 - RNA, 17 nt, Vaccinia virus
auacgcuccuuaucaaa

SEQ ID NO: 4066281 - RNA, 14 nt, Vaccinia virus
auacguaaugaagu

SEQ ID NO: 4066282 - RNA, 20 nt, Vaccinia virus
auacguuuauauucuuuuaa

SEQ ID NO: 4066283 - RNA, 12 nt, Vaccinia virus
auacuaguuuuc

SEQ ID NO: 4066284 - RNA, 14 nt, Vaccinia virus
auacuauuguuuau

SEQ ID NO: 4066285 - RNA, 13 nt, Vaccinia virus
auacucucaucuu

SEQ ID NO: 4066286 - RNA, 12 nt, Vaccinia virus
auacucugaaag

SEQ ID NO: 4066287 - RNA, 21 nt, Vaccinia virus
auacucugcccuuuauuacau

SEQ ID NO: 4066288 - RNA, 22 nt, Vaccinia virus
auacucuucaaaguuucugaaa

SEQ ID NO: 4066289 - RNA, 22 nt, Vaccinia virus
auacugucuaauccuaagaaaa

SEQ ID NO: 4066290 - RNA, 14 nt, Vaccinia virus
auacuuaaaaaaug

SEQ ID NO: 4066291 - RNA, 15 nt, Vaccinia virus
auacuuaaaaaauga

SEQ ID NO: 4066292 - RNA, 20 nt, Vaccinia virus
auacuucaucaguguagaua

SEQ ID NO: 4066293 - RNA, 22 nt, Vaccinia virus
auacuucauuucuaaaauagua

SEQ ID NO: 4066294 - RNA, 15 nt, Vaccinia virus
auacuucuccaacau

SEQ ID NO: 4066295 - RNA, 22 nt, Vaccinia virus
auacuuuaacaucacuaauauc

SEQ ID NO: 4066296 - RNA, 14 nt, Vaccinia virus
auacuuuuaggaaa

SEQ ID NO: 4066297 - RNA, 20 nt, Vaccinia virus
auagaaaacucguuauuaac

SEQ ID NO: 4066298 - RNA, 13 nt, Vaccinia virus
auagaaaaugauu

SEQ ID NO: 4066299 - RNA, 15 nt, Vaccinia virus
auagaaacuauagau

SEQ ID NO: 4066300 - RNA, 13 nt, Vaccinia virus
auagaacaaaauc

SEQ ID NO: 4066301 - RNA, 16 nt, Vaccinia virus
auagaagauaucacau

SEQ ID NO: 4066302 - RNA, 14 nt, Vaccinia virus
auagaagauguuag

SEQ ID NO: 4066303 - RNA, 13 nt, Vaccinia virus
auagaauaaauua

SEQ ID NO: 4066304 - RNA, 21 nt, Vaccinia virus
auagaauucucuucauaucau

SEQ ID NO: 4066305 - RNA, 16 nt, Vaccinia virus
auagaauuuauaacau

SEQ ID NO: 4066306 - RNA, 18 nt, Vaccinia virus
auagaauuuauaacauga

SEQ ID NO: 4066307 - RNA, 22 nt, Vaccinia virus
auagagaauccuccgaauaauu

SEQ ID NO: 4066308 - RNA, 14 nt, Vaccinia virus
auagaggaugaauu

SEQ ID NO: 4066309 - RNA, 18 nt, Vaccinia virus
auagaguauuaaauauua

SEQ ID NO: 4066310 - RNA, 14 nt, Vaccinia virus
auagauaacauagu

SEQ ID NO: 4066311 - RNA, 16 nt, Vaccinia virus
auagauaaugauauau

SEQ ID NO: 4066312 - RNA, 13 nt, Vaccinia virus
auagauagaacua

SEQ ID NO: 4066313 - RNA, 23 nt, Vaccinia virus
auagauagugcuaaacgaauuac

SEQ ID NO: 4066314 - RNA, 16 nt, Vaccinia virus
auagauauaauuuuau

SEQ ID NO: 4066315 - RNA, 22 nt, Vaccinia virus
auagauauuaauuaucacauau

SEQ ID NO: 4066316 - RNA, 12 nt, Vaccinia virus
auagaucaaaua

SEQ ID NO: 4066317 - RNA, 17 nt, Vaccinia virus
auagaucgaaaaauaua

SEQ ID NO: 4066318 - RNA, 15 nt, Vaccinia virus
auagaugaagaucag

SEQ ID NO: 4066319 - RNA, 20 nt, Vaccinia virus
auagaugcaagguauaaccu

SEQ ID NO: 4066320 - RNA, 20 nt, Vaccinia virus
auagauggauaauggaagau

SEQ ID NO: 4066321 - RNA, 21 nt, Vaccinia virus
auagauggcacuguucuauga

SEQ ID NO: 4066322 - RNA, 23 nt, Vaccinia virus
auagauggucgacguuucucaaa

SEQ ID NO: 4066323 - RNA, 18 nt, Vaccinia virus
auagaugugagcuacugu

SEQ ID NO: 4066324 - RNA, 16 nt, Vaccinia virus
auagauuuccaaagau

SEQ ID NO: 4066325 - RNA, 16 nt, Vaccinia virus
auagcaauauguguaa

SEQ ID NO: 4066326 - RNA, 17 nt, Vaccinia virus
auagcauuaauacagua

SEQ ID NO: 4066327 - RNA, 15 nt, Vaccinia virus
auagccaaaagacua

SEQ ID NO: 4066328 - RNA, 17 nt, Vaccinia virus
auagccaucguuaauua

SEQ ID NO: 4066329 - RNA, 14 nt, Vaccinia virus
auagcuacaguaaa

SEQ ID NO: 4066330 - RNA, 18 nt, Vaccinia virus
auagcuuccuucaaucua

SEQ ID NO: 4066331 - RNA, 22 nt, Vaccinia virus
auagcuuuacucugaaaagaaa

SEQ ID NO: 4066332 - RNA, 13 nt, Vaccinia virus
auaggaacauuuc

SEQ ID NO: 4066333 - RNA, 15 nt, Vaccinia virus
auaggaccauacauu

SEQ ID NO: 4066334 - RNA, 17 nt, Vaccinia virus
auaggagcuagaagaac

SEQ ID NO: 4066335 - RNA, 20 nt, Vaccinia virus
auaggauucuuaauaugaua

SEQ ID NO: 4066336 - RNA, 14 nt, Vaccinia virus
auaggcaucauuua

SEQ ID NO: 4066337 - RNA, 14 nt, Vaccinia virus
auaggugaaaagau

SEQ ID NO: 4066338 - RNA, 13 nt, Vaccinia virus
auaguacauuccc

SEQ ID NO: 4066339 - RNA, 13 nt, Vaccinia virus
auaguagaauuaa

SEQ ID NO: 4066340 - RNA, 16 nt, Vaccinia virus
auaguagaauuaaugu

SEQ ID NO: 4066341 - RNA, 19 nt, Vaccinia virus
auaguaguguaguuaaugu

SEQ ID NO: 4066342 - RNA, 20 nt, Vaccinia virus
auaguauacgcagaaaagau

SEQ ID NO: 4066343 - RNA, 16 nt, Vaccinia virus
auaguaucuauauacg

SEQ ID NO: 4066344 - RNA, 19 nt, Vaccinia virus
auaguauucucagaguuga

SEQ ID NO: 4066345 - RNA, 14 nt, Vaccinia virus
auaguguauacaau

SEQ ID NO: 4066346 - RNA, 21 nt, Vaccinia virus
auagugucuccuauguuguaa

SEQ ID NO: 4066347 - RNA, 18 nt, Vaccinia virus
auaguuacauacaaacug

SEQ ID NO: 4066348 - RNA, 17 nt, Vaccinia virus
auaguuccauuaucuaa

SEQ ID NO: 4066349 - RNA, 21 nt, Vaccinia virus
auaguugaucagaaugaaugu

SEQ ID NO: 4066350 - RNA, 22 nt, Vaccinia virus
auaguuguuguccguuaucuaa

SEQ ID NO: 4066351 - RNA, 21 nt, Vaccinia virus
auaguuuccaccgaaagacua

SEQ ID NO: 4066352 - RNA, 22 nt, Vaccinia virus
auaguuuucucuauucugaaau

SEQ ID NO: 4066353 - RNA, 18 nt, Vaccinia virus
auauaaaaacucuaacau

SEQ ID NO: 4066354 - RNA, 21 nt, Vaccinia virus
auauaagacacagaaauacua

SEQ ID NO: 4066355 - RNA, 21 nt, Vaccinia virus
auauaaggccaaaacaaaauu

SEQ ID NO: 4066356 - RNA, 14 nt, Vaccinia virus
auauaagguuguau

SEQ ID NO: 4066357 - RNA, 14 nt, Vaccinia virus
auauaauaacaaga

SEQ ID NO: 4066358 - RNA, 14 nt, Vaccinia virus
auauaauaauacac

SEQ ID NO: 4066359 - RNA, 19 nt, Vaccinia virus
auauaauccgcauauucca

SEQ ID NO: 4066360 - RNA, 14 nt, Vaccinia virus
auauaaucuagaca

SEQ ID NO: 4066361 - RNA, 13 nt, Vaccinia virus
auauacacauaau

SEQ ID NO: 4066362 - RNA, 15 nt, Vaccinia virus
auauacagacucuau

SEQ ID NO: 4066363 - RNA, 14 nt, Vaccinia virus
auauacagucuuaa

SEQ ID NO: 4066364 - RNA, 15 nt, Vaccinia virus
auauacauuguauaa

SEQ ID NO: 4066365 - RNA, 17 nt, Vaccinia virus
auauaccgauauguaca

SEQ ID NO: 4066366 - RNA, 18 nt, Vaccinia virus
aucaacagaaguuaauaa

SEQ ID NO: 4066367 - RNA, 22 nt, Vaccinia virus
aucaacguaacuauauuccaaa

SEQ ID NO: 4066368 - RNA, 21 nt, Vaccinia virus
aucaacguagaaaaaauagaa

SEQ ID NO: 4066369 - RNA, 13 nt, Vaccinia virus
aucaacuauccuc

SEQ ID NO: 4066370 - RNA, 19 nt, Vaccinia virus
aucaagagugauuuaagaa

SEQ ID NO: 4066371 - RNA, 13 nt, Vaccinia virus
aucaaggauuaua

SEQ ID NO: 4066372 - RNA, 20 nt, Vaccinia virus
aucaauaaaugugagaaguu

SEQ ID NO: 4066373 - RNA, 16 nt, Vaccinia virus
aucaauaacuggcaca

SEQ ID NO: 4066374 - RNA, 22 nt, Vaccinia virus
aucaauaagaaaguuaagaauu

SEQ ID NO: 4066375 - RNA, 21 nt, Vaccinia virus
aucaauaccuuuucuggcuaa

SEQ ID NO: 4066376 - RNA, 12 nt, Vaccinia virus
aucaaucauauu

SEQ ID NO: 4066377 - RNA, 13 nt, Vaccinia virus
acaguuaaaacua

SEQ ID NO: 4066378 - RNA, 14 nt, Vaccinia virus
acaguuaacgaaag

SEQ ID NO: 4066379 - RNA, 14 nt, Vaccinia virus
acaguuauauaucu

SEQ ID NO: 4066380 - RNA, 16 nt, Vaccinia virus
acaguucuuuucuagc

SEQ ID NO: 4066381 - RNA, 13 nt, Vaccinia virus
acaguuucuguaa

SEQ ID NO: 4066382 - RNA, 15 nt, Vaccinia virus
acaguuuuacuauau

SEQ ID NO: 4066383 - RNA, 20 nt, Vaccinia virus
acauaaacugaucacuaauu

SEQ ID NO: 4066384 - RNA, 22 nt, Vaccinia virus
acauaaauaauucuagaggaga

SEQ ID NO: 4066385 - RNA, 15 nt, Vaccinia virus
acauaauauauacag

SEQ ID NO: 4066386 - RNA, 16 nt, Vaccinia virus
acauacaauuaaauca

SEQ ID NO: 4066387 - RNA, 16 nt, Vaccinia virus
acauacguauaaucug

SEQ ID NO: 4066388 - RNA, 17 nt, Vaccinia virus
acauacguauauuucua

SEQ ID NO: 4066389 - RNA, 16 nt, Vaccinia virus
acauacuaucuuuaau

SEQ ID NO: 4066390 - RNA, 20 nt, Vaccinia virus
acauacucuuaaaauuggau

SEQ ID NO: 4066391 - RNA, 12 nt, Vaccinia virus
acauagaaauaa

SEQ ID NO: 4066392 - RNA, 18 nt, Vaccinia virus
acauaggauuaaaaauaa

SEQ ID NO: 4066393 - RNA, 15 nt, Vaccinia virus
acauauaguggauua

SEQ ID NO: 4066394 - RNA, 14 nt, Vaccinia virus
acauauuacaaaau

SEQ ID NO: 4066395 - RNA, 15 nt, Vaccinia virus
acauauucaguugau

SEQ ID NO: 4066396 - RNA, 18 nt, Vaccinia virus
acauauuggguacuaguu

SEQ ID NO: 4066397 - RNA, 20 nt, Vaccinia virus
acaucaaaaagcuguuguau

SEQ ID NO: 4066398 - RNA, 21 nt, Vaccinia virus
acaucaaagaacguaaaauac

SEQ ID NO: 4066399 - RNA, 12 nt, Vaccinia virus
acaucaaaugau

SEQ ID NO: 4066400 - RNA, 21 nt, Vaccinia virus
acaucaacuaccuaaggaaua

SEQ ID NO: 4066401 - RNA, 14 nt, Vaccinia virus
acaucauauacaag

SEQ ID NO: 4066402 - RNA, 14 nt, Vaccinia virus
acaucccuuuucca

SEQ ID NO: 4066403 - RNA, 17 nt, Vaccinia virus
acauccgccuuaaaugu

SEQ ID NO: 4066404 - RNA, 18 nt, Vaccinia virus
acauccgccuuaaaugua

SEQ ID NO: 4066405 - RNA, 19 nt, Vaccinia virus
acauccucacuauucaugg

SEQ ID NO: 4066406 - RNA, 23 nt, Vaccinia virus
acaucuaguauugauaaauggaa

SEQ ID NO: 4066407 - RNA, 13 nt, Vaccinia virus
acaucuaguucuu

SEQ ID NO: 4066408 - RNA, 15 nt, Vaccinia virus
acaucuauuaaucau

SEQ ID NO: 4066409 - RNA, 17 nt, Vaccinia virus
acaucucaaugucuuua

SEQ ID NO: 4066410 - RNA, 16 nt, Vaccinia virus
acaucucgcaauaauc

SEQ ID NO: 4066411 - RNA, 20 nt, Vaccinia virus
acaucucugaacuauauaau

SEQ ID NO: 4066412 - RNA, 23 nt, Vaccinia virus
acaucuggccuguucauaaauaa

SEQ ID NO: 4066413 - RNA, 12 nt, Vaccinia virus
acaucuuccuuc

SEQ ID NO: 4066414 - RNA, 23 nt, Vaccinia virus
acaugcgguaaagauauuucuca

SEQ ID NO: 4066415 - RNA, 18 nt, Vaccinia virus
acaugggaaaugaaaugu

SEQ ID NO: 4066416 - RNA, 13 nt, Vaccinia virus
acaugguuaaagu

SEQ ID NO: 4066417 - RNA, 21 nt, Vaccinia virus
acauguaaugauuuaaaaugu

SEQ ID NO: 4066418 - RNA, 14 nt, Vaccinia virus
acauguuaaaugua

SEQ ID NO: 4066419 - RNA, 14 nt, Vaccinia virus
acauguuacagaau

SEQ ID NO: 4066420 - RNA, 14 nt, Vaccinia virus
acauguuuaauaua

SEQ ID NO: 4066421 - RNA, 20 nt, Vaccinia virus
acauuagaccguuuaauaga

SEQ ID NO: 4066422 - RNA, 18 nt, Vaccinia virus
acauuagauacaauggau

SEQ ID NO: 4066423 - RNA, 20 nt, Vaccinia virus
acauuaguagggauagaaug

SEQ ID NO: 4066424 - RNA, 20 nt, Vaccinia virus
acauucaaccacucucgaua

SEQ ID NO: 4066425 - RNA, 17 nt, Vaccinia virus
acauucagaaagaguuu

SEQ ID NO: 4066426 - RNA, 15 nt, Vaccinia virus
acauucuuauaacau

SEQ ID NO: 4066427 - RNA, 15 nt, Vaccinia virus
acauugaaacuaugu

SEQ ID NO: 4066428 - RNA, 14 nt, Vaccinia virus
acauugauuaaauu

SEQ ID NO: 4066429 - RNA, 22 nt, Vaccinia virus
acauugauuaaauuuuaauaua

SEQ ID NO: 4066430 - RNA, 22 nt, Vaccinia virus
acauuguuaauugaaaagggau

SEQ ID NO: 4066431 - RNA, 22 nt, Vaccinia virus
acauuguuauugaucaaacauu

SEQ ID NO: 4066432 - RNA, 19 nt, Vaccinia virus
acauuguuuguauucucca

SEQ ID NO: 4066433 - RNA, 15 nt, Vaccinia virus
acauuuccuacuacu

SEQ ID NO: 4066434 - RNA, 13 nt, Vaccinia virus
acauuuuaaaaua

SEQ ID NO: 4066435 - RNA, 18 nt, Vaccinia virus
acauuuuggcaaauugau

SEQ ID NO: 4066436 - RNA, 16 nt, Vaccinia virus
acauuuuugaaauacc

SEQ ID NO: 4066437 - RNA, 18 nt, Vaccinia virus
acauuuuuuauaaauaga

SEQ ID NO: 4066438 - RNA, 14 nt, Vaccinia virus
acauuuuuuguaaa

SEQ ID NO: 4066439 - RNA, 17 nt, Vaccinia virus
accaaaaaaucguauau

SEQ ID NO: 4066440 - RNA, 19 nt, Vaccinia virus
accaaacuuucagaagaaa

SEQ ID NO: 4066441 - RNA, 15 nt, Vaccinia virus
accaaauuaaugaau

SEQ ID NO: 4066442 - RNA, 16 nt, Vaccinia virus
accaaauuaaugaaua

SEQ ID NO: 4066443 - RNA, 17 nt, Vaccinia virus
accaacacuuaucaauu

SEQ ID NO: 4066444 - RNA, 15 nt, Vaccinia virus
accaacggaaauggu

SEQ ID NO: 4066445 - RNA, 16 nt, Vaccinia virus
accaacgguauaugaa

SEQ ID NO: 4066446 - RNA, 18 nt, Vaccinia virus
accaauaauaguagaauu

SEQ ID NO: 4066447 - RNA, 23 nt, Vaccinia virus
accaauauuggaauuauaauaua

SEQ ID NO: 4066448 - RNA, 22 nt, Vaccinia virus
accaauuaucuuuggagaaucg

SEQ ID NO: 4066449 - RNA, 21 nt, Vaccinia virus
accacaauaaaaaaaauugau

SEQ ID NO: 4066450 - RNA, 15 nt, Vaccinia virus
accacaggagaaugg

SEQ ID NO: 4066451 - RNA, 15 nt, Vaccinia virus
accacgaaacaauau

SEQ ID NO: 4066452 - RNA, 16 nt, Vaccinia virus
accagcacaacaucua

SEQ ID NO: 4066453 - RNA, 15 nt, Vaccinia virus
accagucaagucaau

SEQ ID NO: 4066454 - RNA, 22 nt, Vaccinia virus
accaguucauucaagauaagca

SEQ ID NO: 4066455 - RNA, 22 nt, Vaccinia virus
accauaacuguauaaaauggag

SEQ ID NO: 4066456 - RNA, 16 nt, Vaccinia virus
accauacuucuacaga

SEQ ID NO: 4066457 - RNA, 14 nt, Vaccinia virus
accauauacguguu

SEQ ID NO: 4066458 - RNA, 15 nt, Vaccinia virus
accauauacguguuu

SEQ ID NO: 4066459 - RNA, 19 nt, Vaccinia virus
accauaucgccguaaugua

SEQ ID NO: 4066460 - RNA, 21 nt, Vaccinia virus
accauaucgccguaauguaag

SEQ ID NO: 4066461 - RNA, 22 nt, Vaccinia virus
accauauuuucuggaaguggau

SEQ ID NO: 4066462 - RNA, 13 nt, Vaccinia virus
accaucaaaagca

SEQ ID NO: 4066463 - RNA, 15 nt, Vaccinia virus
accauuaaagaauuc

SEQ ID NO: 4066464 - RNA, 17 nt, Vaccinia virus
accauuacguuaacaga

SEQ ID NO: 4066465 - RNA, 16 nt, Vaccinia virus
accauuaucuuuguuu

SEQ ID NO: 4066466 - RNA, 21 nt, Vaccinia virus
accauuauucgccuguaucag

SEQ ID NO: 4066467 - RNA, 21 nt, Vaccinia virus
acccaaguuugagauuucaua

SEQ ID NO: 4066468 - RNA, 15 nt, Vaccinia virus
acccagcauacuuga

SEQ ID NO: 4066469 - RNA, 19 nt, Vaccinia virus
acccgcauacuuuaacaaa

SEQ ID NO: 4066470 - RNA, 14 nt, Vaccinia virus
acccuauaguuuua

SEQ ID NO: 4066471 - RNA, 19 nt, Vaccinia virus
acccuucuacgucaucaaa

SEQ ID NO: 4066472 - RNA, 15 nt, Vaccinia virus
accgggaaagagaag

SEQ ID NO: 4066473 - RNA, 22 nt, Vaccinia virus
accuagagacaaugaaaaaguu

SEQ ID NO: 4066474 - RNA, 18 nt, Vaccinia virus
accuauagcaucaauaau

SEQ ID NO: 4066475 - RNA, 22 nt, Vaccinia virus
accuauaugcccuauuaucaua

SEQ ID NO: 4066476 - RNA, 22 nt, Vaccinia virus
accuauggauacgguacacgua

SEQ ID NO: 4066477 - RNA, 17 nt, Vaccinia virus
accucuaguuucagaau

SEQ ID NO: 4066478 - RNA, 19 nt, Vaccinia virus
accucuggcacuuauuuca

SEQ ID NO: 4066479 - RNA, 20 nt, Vaccinia virus
accucuuauuggucagaaau

SEQ ID NO: 4066480 - RNA, 17 nt, Vaccinia virus
accuguaguuuuaacug

SEQ ID NO: 4066481 - RNA, 14 nt, Vaccinia virus
accuucuacauaua

SEQ ID NO: 4066482 - RNA, 12 nt, Vaccinia virus
acgaaacaaugu

SEQ ID NO: 4066483 - RNA, 17 nt, Vaccinia virus
acgaaagcaaagaauga

SEQ ID NO: 4066484 - RNA, 21 nt, Vaccinia virus
acgaaccagaaagugcaaaug

SEQ ID NO: 4066485 - RNA, 19 nt, Vaccinia virus
acgaaguauuuauacuuuu

SEQ ID NO: 4066486 - RNA, 17 nt, Vaccinia virus
acgagaagccauuuuau

SEQ ID NO: 4066487 - RNA, 21 nt, Vaccinia virus
acgagaauggcguuugauaua

SEQ ID NO: 4066488 - RNA, 22 nt, Vaccinia virus
acgagaauggcguuugauauau

SEQ ID NO: 4066489 - RNA, 17 nt, Vaccinia virus
acgagcuauuaaacugu

SEQ ID NO: 4066490 - RNA, 15 nt, Vaccinia virus
acgaggaaacaaugc

SEQ ID NO: 4066491 - RNA, 22 nt, Vaccinia virus
acgaggaaacaaugcgcuacau

SEQ ID NO: 4066492 - RNA, 18 nt, Vaccinia virus
acgauagucuguuaauaa

SEQ ID NO: 4066493 - RNA, 12 nt, Vaccinia virus
acgauaucacau

SEQ ID NO: 4066494 - RNA, 18 nt, Vaccinia virus
acgauccaaauuccggaa

SEQ ID NO: 4066495 - RNA, 14 nt, Vaccinia virus
acgaucuauuagaa

SEQ ID NO: 4066496 - RNA, 14 nt, Vaccinia virus
acgaugauauguuu

SEQ ID NO: 4066497 - RNA, 18 nt, Vaccinia virus
acgaugcugaguauuuca

SEQ ID NO: 4066498 - RNA, 13 nt, Vaccinia virus
acgauuacuacau

SEQ ID NO: 4066499 - RNA, 22 nt, Vaccinia virus
acgcagaaaagauaccacgagu

SEQ ID NO: 4066500 - RNA, 22 nt, Vaccinia virus
acgcauaaaaauaucuuccaau

SEQ ID NO: 4066501 - RNA, 15 nt, Vaccinia virus
acgcauccauccaaa

SEQ ID NO: 4066502 - RNA, 18 nt, Vaccinia virus
acgcauuauauaguuuuu

SEQ ID NO: 4066503 - RNA, 17 nt, Vaccinia virus
acgcuagauauacaguc

SEQ ID NO: 4066504 - RNA, 21 nt, Vaccinia virus
acgcuauaaaaagaguuucaa

SEQ ID NO: 4066505 - RNA, 15 nt, Vaccinia virus
acgcuauuaaucuuu

SEQ ID NO: 4066506 - RNA, 14 nt, Vaccinia virus
acggagauauuaaa

SEQ ID NO: 4066507 - RNA, 14 nt, Vaccinia virus
acggauacugucuu

SEQ ID NO: 4066508 - RNA, 20 nt, Vaccinia virus
acggcaaaccaaaaacauuu

SEQ ID NO: 4066509 - RNA, 13 nt, Vaccinia virus
acggcuauucugg

SEQ ID NO: 4066510 - RNA, 23 nt, Vaccinia virus
acggguuguauuguuauuuuaca

SEQ ID NO: 4066511 - RNA, 14 nt, Vaccinia virus
acgguauaugaaua

SEQ ID NO: 4066512 - RNA, 19 nt, Vaccinia virus
acguaaauacaaaacagag

SEQ ID NO: 4066513 - RNA, 12 nt, Vaccinia virus
acguaacaaugu

SEQ ID NO: 4066514 - RNA, 20 nt, Vaccinia virus
acguaguuaaugaaacauuu

SEQ ID NO: 4066515 - RNA, 17 nt, Vaccinia virus
acguaucucgucuaaau

SEQ ID NO: 4066516 - RNA, 14 nt, Vaccinia virus
acgucaaacaaugu

SEQ ID NO: 4066517 - RNA, 21 nt, Vaccinia virus
acguccugcaggguauuguuu

SEQ ID NO: 4066518 - RNA, 14 nt, Vaccinia virus
acgugcuguaccaa

SEQ ID NO: 4066519 - RNA, 13 nt, Vaccinia virus
acguuaacagaga

SEQ ID NO: 4066520 - RNA, 15 nt, Vaccinia virus
acguuacucaaacac

SEQ ID NO: 4066521 - RNA, 14 nt, Vaccinia virus
acguucauuaaaaa

SEQ ID NO: 4066522 - RNA, 18 nt, Vaccinia virus
acguuguacguuaaagca

SEQ ID NO: 4066523 - RNA, 19 nt, Vaccinia virus
acguuucuauuuucuauuu

SEQ ID NO: 4066524 - RNA, 22 nt, Vaccinia virus
acuaaacuaugugaugucuugg

SEQ ID NO: 4066525 - RNA, 19 nt, Vaccinia virus
acuaaaggcaacaaagaaa

SEQ ID NO: 4066526 - RNA, 19 nt, Vaccinia virus
acuaacgaaauuaauauga

SEQ ID NO: 4066527 - RNA, 18 nt, Vaccinia virus
acuaacgcaacuauauag

SEQ ID NO: 4066528 - RNA, 16 nt, Vaccinia virus
acuaacuuuaucacaa

SEQ ID NO: 4066529 - RNA, 19 nt, Vaccinia virus
acuaauauuuuauuucaaa

SEQ ID NO: 4066530 - RNA, 15 nt, Vaccinia virus
acuaaucaauaauca

SEQ ID NO: 4066531 - RNA, 20 nt, Vaccinia virus
acuaaucucuucuuuaacag

SEQ ID NO: 4066532 - RNA, 16 nt, Vaccinia virus
acuaauuaaagacuua

SEQ ID NO: 4066533 - RNA, 17 nt, Vaccinia virus
acuaauuguuaaccauu

SEQ ID NO: 4066534 - RNA, 16 nt, Vaccinia virus
acuacaacuagugaag

SEQ ID NO: 4066535 - RNA, 21 nt, Vaccinia virus
acuacaaugaacuaagagaaa

SEQ ID NO: 4066536 - RNA, 20 nt, Vaccinia virus
acuacaauugucuaaugaua

SEQ ID NO: 4066537 - RNA, 17 nt, Vaccinia virus
acuacacuuuuuaucau

SEQ ID NO: 4066538 - RNA, 20 nt, Vaccinia virus
acuacaguaguaauuaauga

SEQ ID NO: 4066539 - RNA, 14 nt, Vaccinia virus
acuacaguuugaaa

SEQ ID NO: 4066540 - RNA, 11 nt, Vaccinia virus
acuacauaucc

SEQ ID NO: 4066541 - RNA, 20 nt, Vaccinia virus
acuacauucucauuaauuaa

SEQ ID NO: 4066542 - RNA, 18 nt, Vaccinia virus
acuacugccauuaauauc

SEQ ID NO: 4066543 - RNA, 18 nt, Vaccinia virus
acuacuuacauggacaca

SEQ ID NO: 4066544 - RNA, 16 nt, Vaccinia virus
acuacuuuguuaauaa

SEQ ID NO: 4066545 - RNA, 13 nt, Vaccinia virus
acuagaagaaagu

SEQ ID NO: 4066546 - RNA, 23 nt, Vaccinia virus
acuagacuauuaauaagacugau

SEQ ID NO: 4066547 - RNA, 17 nt, Vaccinia virus
acuagacugauuucucu

SEQ ID NO: 4066548 - RNA, 15 nt, Vaccinia virus
acuagaguuguuaaa

SEQ ID NO: 4066549 - RNA, 14 nt, Vaccinia virus
acuagauaaacuau

SEQ ID NO: 4066550 - RNA, 16 nt, Vaccinia virus
acuagauuauacaaug

SEQ ID NO: 4066551 - RNA, 19 nt, Vaccinia virus
acuagcucgagaaugaaua

SEQ ID NO: 4066552 - RNA, 16 nt, Vaccinia virus
acuagcuuaaacagau

SEQ ID NO: 4066553 - RNA, 21 nt, Vaccinia virus
acuagugauagcauuaauaca

SEQ ID NO: 4066554 - RNA, 24 nt, Vaccinia virus
acuauagaagaacucaagcagaaa

SEQ ID NO: 4066555 - RNA, 20 nt, Vaccinia virus
acuauauaccuauuaauaca

SEQ ID NO: 4066556 - RNA, 19 nt, Vaccinia virus
acuauaucgacauauuuca

SEQ ID NO: 4066557 - RNA, 18 nt, Vaccinia virus
acuauauguuccaguaau

SEQ ID NO: 4066558 - RNA, 20 nt, Vaccinia virus
acuaucaaucgauaacaaga

SEQ ID NO: 4066559 - RNA, 21 nt, Vaccinia virus
acuaucaguaaguuuuauaga

SEQ ID NO: 4066560 - RNA, 12 nt, Vaccinia virus
acuaucuaaaug

SEQ ID NO: 4066561 - RNA, 17 nt, Vaccinia virus
acuaucugacauaaaca

SEQ ID NO: 4066562 - RNA, 14 nt, Vaccinia virus
acuaucuuuaacau

SEQ ID NO: 4066563 - RNA, 15 nt, Vaccinia virus
acuaucuuuaauaga

SEQ ID NO: 4066564 - RNA, 23 nt, Vaccinia virus
acuaugcgucgaaguaaaaauug

SEQ ID NO: 4066565 - RNA, 12 nt, Vaccinia virus
acuauuaaaacu

SEQ ID NO: 4066566 - RNA, 17 nt, Vaccinia virus
acuauuacuaggagaau

SEQ ID NO: 4066567 - RNA, 19 nt, Vaccinia virus
acuauuauuuauaacugau

SEQ ID NO: 4066568 - RNA, 17 nt, Vaccinia virus
acuauugccaucgaaug

SEQ ID NO: 4066569 - RNA, 11 nt, Vaccinia virus
acuauuucauu

SEQ ID NO: 4066570 - RNA, 13 nt, Vaccinia virus
acuauuugucuua

SEQ ID NO: 4066571 - RNA, 15 nt, Vaccinia virus
acuauuuucaguaau

SEQ ID NO: 4066572 - RNA, 15 nt, Vaccinia virus
acuauuuuuuacauu

SEQ ID NO: 4066573 - RNA, 16 nt, Vaccinia virus
acucauccuaucugga

SEQ ID NO: 4066574 - RNA, 22 nt, Vaccinia virus
acucaugaaucuaaaagaauug

SEQ ID NO: 4066575 - RNA, 16 nt, Vaccinia virus
acucaugauuaaaccu

SEQ ID NO: 4066576 - RNA, 23 nt, Vaccinia virus
acucauuucauuauaauaguuua

SEQ ID NO: 4066577 - RNA, 22 nt, Vaccinia virus
acuccaaugacugaauacauua

SEQ ID NO: 4066578 - RNA, 19 nt, Vaccinia virus
acuccuagagaauuaauau

SEQ ID NO: 4066579 - RNA, 23 nt, Vaccinia virus
acuccuuauuuuuagacauuaga

SEQ ID NO: 4066580 - RNA, 14 nt, Vaccinia virus
acuccuugacuauc

SEQ ID NO: 4066581 - RNA, 18 nt, Vaccinia virus
acucgaacagauaguuua

SEQ ID NO: 4066582 - RNA, 15 nt, Vaccinia virus
acucgcguuuagagg

SEQ ID NO: 4066583 - RNA, 22 nt, Vaccinia virus
acucuaaacaauuggacaaauu

SEQ ID NO: 4066584 - RNA, 23 nt, Vaccinia virus
acucuaaacaauuggacaaauuc

SEQ ID NO: 4066585 - RNA, 14 nt, Vaccinia virus
acucuaaaucgcuu

SEQ ID NO: 4066586 - RNA, 23 nt, Vaccinia virus
gagagucaauguuuuugaaacua

SEQ ID NO: 4066587 - RNA, 16 nt, Vaccinia virus
gagauaaucuauauca

SEQ ID NO: 4066588 - RNA, 15 nt, Vaccinia virus
gagaucuaaauacaa

SEQ ID NO: 4066589 - RNA, 13 nt, Vaccinia virus
gagauuaaugcua

SEQ ID NO: 4066590 - RNA, 21 nt, Vaccinia virus
gagauuuguuuuguuaaacaa

SEQ ID NO: 4066591 - RNA, 15 nt, Vaccinia virus
gaggaagacacauua

SEQ ID NO: 4066592 - RNA, 20 nt, Vaccinia virus
gaggaaguauaaaaauuaaa

SEQ ID NO: 4066593 - RNA, 22 nt, Vaccinia virus
gaggacuguuuuccugaaggaa

SEQ ID NO: 4066594 - RNA, 14 nt, Vaccinia virus
gagggaaaagucau

SEQ ID NO: 4066595 - RNA, 16 nt, Vaccinia virus
gagguauauaucauga

SEQ ID NO: 4066596 - RNA, 22 nt, Vaccinia virus
gaguaguaaacgcguacauaac

SEQ ID NO: 4066597 - RNA, 14 nt, Vaccinia virus
gagucucaucuuua

SEQ ID NO: 4066598 - RNA, 21 nt, Vaccinia virus
gagucuuuaucaauaaacaau

SEQ ID NO: 4066599 - RNA, 21 nt, Vaccinia virus
gaguuaggccaauagaaauau

SEQ ID NO: 4066600 - RNA, 14 nt, Vaccinia virus
gaguugacauaucg

SEQ ID NO: 4066601 - RNA, 17 nt, Vaccinia virus
gauaaaauuaaugagau

SEQ ID NO: 4066602 - RNA, 16 nt, Vaccinia virus
gauaacaaauuaaaga

SEQ ID NO: 4066603 - RNA, 21 nt, Vaccinia virus
gauaacuagaaucagaaucua

SEQ ID NO: 4066604 - RNA, 21 nt, Vaccinia virus
gauaacucucuucuauaaaaa

SEQ ID NO: 4066605 - RNA, 15 nt, Vaccinia virus
gauaacuguuuaaaa

SEQ ID NO: 4066606 - RNA, 13 nt, Vaccinia virus
gauaauaaacaaa

SEQ ID NO: 4066607 - RNA, 17 nt, Vaccinia virus
gauaauagauuaaugau

SEQ ID NO: 4066608 - RNA, 15 nt, Vaccinia virus
gauaaugaacauaua

SEQ ID NO: 4066609 - RNA, 13 nt, Vaccinia virus
gauaauuauccau

SEQ ID NO: 4066610 - RNA, 18 nt, Vaccinia virus
gauaauuucguuaaaaca

SEQ ID NO: 4066611 - RNA, 13 nt, Vaccinia virus
gauaauuucuugu

SEQ ID NO: 4066612 - RNA, 20 nt, Vaccinia virus
gauacaaucagauauaucua

SEQ ID NO: 4066613 - RNA, 20 nt, Vaccinia virus
gauacacucucaauauacua

SEQ ID NO: 4066614 - RNA, 14 nt, Vaccinia virus
gauacucuauuaau

SEQ ID NO: 4066615 - RNA, 17 nt, Vaccinia virus
gauagacuagaagaaag

SEQ ID NO: 4066616 - RNA, 16 nt, Vaccinia virus
gauagaugauccagau

SEQ ID NO: 4066617 - RNA, 13 nt, Vaccinia virus
gauagcaaaacaa

SEQ ID NO: 4066618 - RNA, 22 nt, Vaccinia virus
gauagcuuuaguuagauugcau

SEQ ID NO: 4066619 - RNA, 16 nt, Vaccinia virus
gauagguuauugacau

SEQ ID NO: 4066620 - RNA, 13 nt, Vaccinia virus
gauaguaaugcau

SEQ ID NO: 4066621 - RNA, 22 nt, Vaccinia virus
gauaguauaccaacuauauuac

SEQ ID NO: 4066622 - RNA, 19 nt, Vaccinia virus
gauaguauucaagucaaag

SEQ ID NO: 4066623 - RNA, 12 nt, Vaccinia virus
gauaguuucauu

SEQ ID NO: 4066624 - RNA, 20 nt, Vaccinia virus
gauauaauauauuagauauu

SEQ ID NO: 4066625 - RNA, 21 nt, Vaccinia virus
gauauaauucguggauaauca

SEQ ID NO: 4066626 - RNA, 17 nt, Vaccinia virus
gauauaauuuuauuaau

SEQ ID NO: 4066627 - RNA, 21 nt, Vaccinia virus
gauauacccgaagauauacac

SEQ ID NO: 4066628 - RNA, 18 nt, Vaccinia virus
gauauagaacacauaacc

SEQ ID NO: 4066629 - RNA, 22 nt, Vaccinia virus
gauauagacgaaauauuagaaa

SEQ ID NO: 4066630 - RNA, 20 nt, Vaccinia virus
gauauauaguaaugaagaga

SEQ ID NO: 4066631 - RNA, 23 nt, Vaccinia virus
gauauauauggucuuaugaaaga

SEQ ID NO: 4066632 - RNA, 22 nt, Vaccinia virus
gauauauauuguacgauaaugu

SEQ ID NO: 4066633 - RNA, 15 nt, Vaccinia virus
gauauauuaaacaag

SEQ ID NO: 4066634 - RNA, 20 nt, Vaccinia virus
gauaucaguagaugcacaau

SEQ ID NO: 4066635 - RNA, 19 nt, Vaccinia virus
gauauccaaaauuuuguau

SEQ ID NO: 4066636 - RNA, 15 nt, Vaccinia virus
cgacauucagaaaga

SEQ ID NO: 4066637 - RNA, 20 nt, Vaccinia virus
cgacgauaacgaaguauuua

SEQ ID NO: 4066638 - RNA, 20 nt, Vaccinia virus
cgagaaauaauaagaauaaa

SEQ ID NO: 4066639 - RNA, 12 nt, Vaccinia virus
cgagacuauuau

SEQ ID NO: 4066640 - RNA, 21 nt, Vaccinia virus
cgagagaaugaauaacccugg

SEQ ID NO: 4066641 - RNA, 13 nt, Vaccinia virus
cgaggauuuugau

SEQ ID NO: 4066642 - RNA, 19 nt, Vaccinia virus
cgaguugaguuuauccuua

SEQ ID NO: 4066643 - RNA, 16 nt, Vaccinia virus
cgaguuuaaaacuucu

SEQ ID NO: 4066644 - RNA, 21 nt, Vaccinia virus
cgauaaaauccuccuaucaau

SEQ ID NO: 4066645 - RNA, 21 nt, Vaccinia virus
cgauaacauguuaauuuccga

SEQ ID NO: 4066646 - RNA, 23 nt, Vaccinia virus
cgauaacauucuaggaauguugu

SEQ ID NO: 4066647 - RNA, 14 nt, Vaccinia virus
cgauagaucgaugg

SEQ ID NO: 4066648 - RNA, 19 nt, Vaccinia virus
cgauauagugaaacaaaau

SEQ ID NO: 4066649 - RNA, 19 nt, Vaccinia virus
cgauauuaaccuaaaagag

SEQ ID NO: 4066650 - RNA, 20 nt, Vaccinia virus
cgauauuauccgaagacaga

SEQ ID NO: 4066651 - RNA, 18 nt, Vaccinia virus
cgaugaucaaugacgaua

SEQ ID NO: 4066652 - RNA, 15 nt, Vaccinia virus
cgaugauggaguaau

SEQ ID NO: 4066653 - RNA, 20 nt, Vaccinia virus
cgaugauucgucuacauguu

SEQ ID NO: 4066654 - RNA, 16 nt, Vaccinia virus
cgaugcuguagcaucu

SEQ ID NO: 4066655 - RNA, 17 nt, Vaccinia virus
cgaugugucuacauaaa

SEQ ID NO: 4066656 - RNA, 16 nt, Vaccinia virus
cgauuagagauacaau

SEQ ID NO: 4066657 - RNA, 15 nt, Vaccinia virus
cgauuauuauaaaau

SEQ ID NO: 4066658 - RNA, 19 nt, Vaccinia virus
cgauucuauauauacucuu

SEQ ID NO: 4066659 - RNA, 18 nt, Vaccinia virus
cgauucuggcuauuucaa

SEQ ID NO: 4066660 - RNA, 18 nt, Vaccinia virus
cgauuguauaguuaauaa

SEQ ID NO: 4066661 - RNA, 14 nt, Vaccinia virus
cgauuucuacauau

SEQ ID NO: 4066662 - RNA, 16 nt, Vaccinia virus
cgauuuuuagauuuca

SEQ ID NO: 4066663 - RNA, 13 nt, Vaccinia virus
cgcaccaacaauu

SEQ ID NO: 4066664 - RNA, 15 nt, Vaccinia virus
cgcccaaaauagacg

SEQ ID NO: 4066665 - RNA, 16 nt, Vaccinia virus
cgcuuaauaucuucug

SEQ ID NO: 4066666 - RNA, 15 nt, Vaccinia virus
cggaacaucaauuau

SEQ ID NO: 4066667 - RNA, 21 nt, Vaccinia virus
cggauaaugauagacaagaua

SEQ ID NO: 4066668 - RNA, 23 nt, Vaccinia virus
cggauauucuaacgaaaacugua

SEQ ID NO: 4066669 - RNA, 23 nt, Vaccinia virus
cggcauuucuuuuuaaugauaua

SEQ ID NO: 4066670 - RNA, 15 nt, Vaccinia virus
cggcuacuaaaagau

SEQ ID NO: 4066671 - RNA, 18 nt, Vaccinia virus
cggcuaucgacuuaauau

SEQ ID NO: 4066672 - RNA, 22 nt, Vaccinia virus
cgggaagauuagucagaccauu

SEQ ID NO: 4066673 - RNA, 15 nt, Vaccinia virus
cgguacaacauucca

SEQ ID NO: 4066674 - RNA, 18 nt, Vaccinia virus
cggucgaugucaauaaua

SEQ ID NO: 4066675 - RNA, 11 nt, Vaccinia virus
cgguuguacau

SEQ ID NO: 4066676 - RNA, 23 nt, Vaccinia virus
cguaaaccauuuuucagaaagua

SEQ ID NO: 4066677 - RNA, 13 nt, Vaccinia virus
cguaaacuauuac

SEQ ID NO: 4066678 - RNA, 15 nt, Vaccinia virus
cguacuuaacaucua

SEQ ID NO: 4066679 - RNA, 13 nt, Vaccinia virus
cguagaaguugaa

SEQ ID NO: 4066680 - RNA, 18 nt, Vaccinia virus
cguagauaauauuucuag

SEQ ID NO: 4066681 - RNA, 19 nt, Vaccinia virus
cguauaaaguuauauaauu

SEQ ID NO: 4066682 - RNA, 12 nt, Vaccinia virus
cguauaaauuuu

SEQ ID NO: 4066683 - RNA, 12 nt, Vaccinia virus
cguauacucuac

SEQ ID NO: 4066684 - RNA, 12 nt, Vaccinia virus
cguauacucuau

SEQ ID NO: 4066685 - RNA, 15 nt, Vaccinia virus
cguaucuaaaguauu

SEQ ID NO: 4066686 - RNA, 17 nt, Vaccinia virus
cguaucuauaaucaucu

SEQ ID NO: 4066687 - RNA, 18 nt, Vaccinia virus
cguaucuauaaucaucug

SEQ ID NO: 4066688 - RNA, 15 nt, Vaccinia virus
cguauuagaauguau

SEQ ID NO: 4066689 - RNA, 20 nt, Vaccinia virus
cgucacagaaucuaccacag

SEQ ID NO: 4066690 - RNA, 12 nt, Vaccinia virus
cgucaguauuua

SEQ ID NO: 4066691 - RNA, 22 nt, Vaccinia virus
cgucuaaaacaauaaaugcauu

SEQ ID NO: 4066692 - RNA, 13 nt, Vaccinia virus
cgucuacaaaaaa

SEQ ID NO: 4066693 - RNA, 21 nt, Vaccinia virus
cgucuaccgaaacaucguuua

SEQ ID NO: 4066694 - RNA, 18 nt, Vaccinia virus
cgucucagaauucuaaau

SEQ ID NO: 4066695 - RNA, 17 nt, Vaccinia virus
cgucucugccauggaug

SEQ ID NO: 4066696 - RNA, 18 nt, Vaccinia virus
cgucuucccaaaauguua

SEQ ID NO: 4066697 - RNA, 14 nt, Vaccinia virus
cgugaaauaaaguc

SEQ ID NO: 4066698 - RNA, 14 nt, Vaccinia virus
cgugaauguauguu

SEQ ID NO: 4066699 - RNA, 20 nt, Vaccinia virus
cguggagaucauuaaauguu

SEQ ID NO: 4066700 - RNA, 18 nt, Vaccinia virus
cgugguuguuuaucacaa

SEQ ID NO: 4066701 - RNA, 14 nt, Vaccinia virus
cguguacaaaaaug

SEQ ID NO: 4066702 - RNA, 16 nt, Vaccinia virus
cguugacgcuguaaaa

SEQ ID NO: 4066703 - RNA, 13 nt, Vaccinia virus
cguuguuaagaua

SEQ ID NO: 4066704 - RNA, 22 nt, Vaccinia virus
cguuuaauaaacugaguguaaa

SEQ ID NO: 4066705 - RNA, 19 nt, Vaccinia virus
cguuuacaaacugaauaau

SEQ ID NO: 4066706 - RNA, 17 nt, Vaccinia virus
cguuuauccuuuuguug

SEQ ID NO: 4066707 - RNA, 19 nt, Vaccinia virus
cguuuuuaaguucuggaau

SEQ ID NO: 4066708 - RNA, 14 nt, Vaccinia virus
cuaaaaaauguaga

SEQ ID NO: 4066709 - RNA, 13 nt, Vaccinia virus
cuaaaaaugccac

SEQ ID NO: 4066710 - RNA, 22 nt, Vaccinia virus
cuaaaacuacguucgaugaauu

SEQ ID NO: 4066711 - RNA, 16 nt, Vaccinia virus
cuaaaauauacaaaca

SEQ ID NO: 4066712 - RNA, 19 nt, Vaccinia virus
cuaaaauauuuuuauucuc

SEQ ID NO: 4066713 - RNA, 12 nt, Vaccinia virus
cuaaacuagugg

SEQ ID NO: 4066714 - RNA, 15 nt, Vaccinia virus
cuaaacuuauuuaga

SEQ ID NO: 4066715 - RNA, 20 nt, Vaccinia virus
cuaaagacucuaaaugguug

SEQ ID NO: 4066716 - RNA, 20 nt, Vaccinia virus
cuaaagccgguguaacauuc

SEQ ID NO: 4066717 - RNA, 21 nt, Vaccinia virus
cuaaaggagcaaauguuaaug

SEQ ID NO: 4066718 - RNA, 14 nt, Vaccinia virus
cuaaaggaugagua

SEQ ID NO: 4066719 - RNA, 23 nt, Vaccinia virus
cuaaagggauuuuauaugauauc

SEQ ID NO: 4066720 - RNA, 10 nt, Vaccinia virus
cuaaauuaac

SEQ ID NO: 4066721 - RNA, 10 nt, Vaccinia virus
cuaaauuaau

SEQ ID NO: 4066722 - RNA, 22 nt, Vaccinia virus
cuaaauuuuguugauuacucuu

SEQ ID NO: 4066723 - RNA, 15 nt, Vaccinia virus
cuaacacauuucaac

SEQ ID NO: 4066724 - RNA, 14 nt, Vaccinia virus
cuaacucuguuuua

SEQ ID NO: 4066725 - RNA, 14 nt, Vaccinia virus
cuaacuuuaaacaa

SEQ ID NO: 4066726 - RNA, 15 nt, Vaccinia virus
cuaacuuuaaacaag

SEQ ID NO: 4066727 - RNA, 13 nt, Vaccinia virus
cuaagaaaacucu

SEQ ID NO: 4066728 - RNA, 19 nt, Vaccinia virus
cuaagagaaaucuuuagac

SEQ ID NO: 4066729 - RNA, 19 nt, Vaccinia virus
cuaagauuccauuaucuaa

SEQ ID NO: 4066730 - RNA, 21 nt, Vaccinia virus
cuaaguagaccguuaaugaaa

SEQ ID NO: 4066731 - RNA, 17 nt, Vaccinia virus
cuaauaaauuagauauu

SEQ ID NO: 4066732 - RNA, 14 nt, Vaccinia virus
cuaauaauaauuau

SEQ ID NO: 4066733 - RNA, 13 nt, Vaccinia virus
cuaauacucuggg

SEQ ID NO: 4066734 - RNA, 12 nt, Vaccinia virus
cuaauauacaau

SEQ ID NO: 4066735 - RNA, 22 nt, Vaccinia virus
cuaauauucccaaacauacauc

SEQ ID NO: 4066736 - RNA, 16 nt, Vaccinia virus
cuaauucaaauuguua

SEQ ID NO: 4066737 - RNA, 23 nt, Vaccinia virus
cuaauucacaauacgauuuagau

SEQ ID NO: 4066738 - RNA, 17 nt, Vaccinia virus
cuaauucgacuaucgaa

SEQ ID NO: 4066739 - RNA, 13 nt, Vaccinia virus
cuaauucuuuaau

SEQ ID NO: 4066740 - RNA, 16 nt, Vaccinia virus
cuaauuguuuaaauaa

SEQ ID NO: 4066741 - RNA, 12 nt, Vaccinia virus
cuaauuucugaa

SEQ ID NO: 4066742 - RNA, 20 nt, Vaccinia virus
cuaauuugauauaaugaauu

SEQ ID NO: 4066743 - RNA, 20 nt, Vaccinia virus
cuaauuuuguagcauuagua

SEQ ID NO: 4066744 - RNA, 16 nt, Vaccinia virus
cuacaaaagaaucugu

SEQ ID NO: 4066745 - RNA, 21 nt, Vaccinia virus
cuacaaaagcaauuauuacaa

SEQ ID NO: 4066746 - RNA, 19 nt, Vaccinia virus
cuacaaaauguugauaauc

SEQ ID NO: 4066747 - RNA, 20 nt, Vaccinia virus
cuacaaauuuggauauucua

SEQ ID NO: 4066748 - RNA, 22 nt, Vaccinia virus
cuacaucaguuuuguauuccaa

SEQ ID NO: 4066749 - RNA, 17 nt, Vaccinia virus
cuaccacacuucuagau

SEQ ID NO: 4066750 - RNA, 12 nt, Vaccinia virus
cuaccuauuuca

SEQ ID NO: 4066751 - RNA, 20 nt, Vaccinia virus
cuaccuuacccauaaacaau

SEQ ID NO: 4066752 - RNA, 16 nt, Vaccinia virus
cuacucauagaaaggu

SEQ ID NO: 4066753 - RNA, 15 nt, Vaccinia virus
cuacugcaucacuga

SEQ ID NO: 4066754 - RNA, 21 nt, Vaccinia virus
cuacugggauaagauuuccaa

SEQ ID NO: 4066755 - RNA, 18 nt, Vaccinia virus
cuacuucgguuagauguu

SEQ ID NO: 4066756 - RNA, 13 nt, Vaccinia virus
cuacuuuuacagu

SEQ ID NO: 4066757 - RNA, 18 nt, Vaccinia virus
cuagaaaacgaaaacauc

SEQ ID NO: 4066758 - RNA, 17 nt, Vaccinia virus
cuagaaugaagauauca

SEQ ID NO: 4066759 - RNA, 22 nt, Vaccinia virus
cuagacaccuuuucaauguuua

SEQ ID NO: 4066760 - RNA, 19 nt, Vaccinia virus
cuagacguuuauucucaaa

SEQ ID NO: 4066761 - RNA, 15 nt, Vaccinia virus
cucuucucugcauuu

SEQ ID NO: 4066762 - RNA, 14 nt, Vaccinia virus
cucuuggaauuaau

SEQ ID NO: 4066763 - RNA, 14 nt, Vaccinia virus
cucuuucuuuugau

SEQ ID NO: 4066764 - RNA, 23 nt, Vaccinia virus
cucuuuugaugauaaauuuccaa

SEQ ID NO: 4066765 - RNA, 16 nt, Vaccinia virus
cugaaaagaagugagu

SEQ ID NO: 4066766 - RNA, 14 nt, Vaccinia virus
cugaaaauaaagau

SEQ ID NO: 4066767 - RNA, 12 nt, Vaccinia virus
cugaaaauuaaa

SEQ ID NO: 4066768 - RNA, 15 nt, Vaccinia virus
cugaaagagaugaga

SEQ ID NO: 4066769 - RNA, 16 nt, Vaccinia virus
cugaaauaaucaugua

SEQ ID NO: 4066770 - RNA, 21 nt, Vaccinia virus
cugaaauccguagaaacaucu

SEQ ID NO: 4066771 - RNA, 21 nt, Vaccinia virus
cugaaauggugguaaaacuaa

SEQ ID NO: 4066772 - RNA, 20 nt, Vaccinia virus
cugaauaaucguuauuauca

SEQ ID NO: 4066773 - RNA, 15 nt, Vaccinia virus
cugaauuauuucaua

SEQ ID NO: 4066774 - RNA, 23 nt, Vaccinia virus
cugacauaaacauaucaaaagaa

SEQ ID NO: 4066775 - RNA, 17 nt, Vaccinia virus
cugacauucagaaagag

SEQ ID NO: 4066776 - RNA, 21 nt, Vaccinia virus
cugacuacuaacgaaauuaau

SEQ ID NO: 4066777 - RNA, 15 nt, Vaccinia virus
cugacuuauuuccua

SEQ ID NO: 4066778 - RNA, 13 nt, Vaccinia virus
cugaguaaaugug

SEQ ID NO: 4066779 - RNA, 15 nt, Vaccinia virus
cugauaauguagaag

SEQ ID NO: 4066780 - RNA, 16 nt, Vaccinia virus
cugauagcaguuucaa

SEQ ID NO: 4066781 - RNA, 19 nt, Vaccinia virus
cugaucuuaacuccucuau

SEQ ID NO: 4066782 - RNA, 18 nt, Vaccinia virus
cugaucuucuuuugucgu

SEQ ID NO: 4066783 - RNA, 23 nt, Vaccinia virus
cugauguaacccacguaacauug

SEQ ID NO: 4066784 - RNA, 16 nt, Vaccinia virus
cugauguuuguuuucg

SEQ ID NO: 4066785 - RNA, 14 nt, Vaccinia virus
cugauuaacaaaug

SEQ ID NO: 4066786 - RNA, 14 nt, Vaccinia virus
cugauuuauguuuu

SEQ ID NO: 4066787 - RNA, 17 nt, Vaccinia virus
cugauuuuuuaacuuca

SEQ ID NO: 4066788 - RNA, 21 nt, Vaccinia virus
cugauuuuuuaugauuuugug

SEQ ID NO: 4066789 - RNA, 16 nt, Vaccinia virus
cugcaaauguaguauu

SEQ ID NO: 4066790 - RNA, 18 nt, Vaccinia virus
cugcaaauguaguauuua

SEQ ID NO: 4066791 - RNA, 13 nt, Vaccinia virus
cugcaauaaaaca

SEQ ID NO: 4066792 - RNA, 19 nt, Vaccinia virus
cugcagcaaaggcaauaag

SEQ ID NO: 4066793 - RNA, 19 nt, Vaccinia virus
cugcagcaacuugugcacu

SEQ ID NO: 4066794 - RNA, 12 nt, Vaccinia virus
cugcagcauuuu

SEQ ID NO: 4066795 - RNA, 13 nt, Vaccinia virus
cugcaucacugac

SEQ ID NO: 4066796 - RNA, 14 nt, Vaccinia virus
cugccauggaugga

SEQ ID NO: 4066797 - RNA, 21 nt, Vaccinia virus
cugccauggauggaaacauug

SEQ ID NO: 4066798 - RNA, 21 nt, Vaccinia virus
cugcggacgcggaugcucagu

SEQ ID NO: 4066799 - RNA, 17 nt, Vaccinia virus
cugcguuaucaauaaau

SEQ ID NO: 4066800 - RNA, 12 nt, Vaccinia virus
cugcuauuucug

SEQ ID NO: 4066801 - RNA, 18 nt, Vaccinia virus
cugcuugggaauuuuuua

SEQ ID NO: 4066802 - RNA, 20 nt, Vaccinia virus
cuggaaaauaaaucacugac

SEQ ID NO: 4066803 - RNA, 18 nt, Vaccinia virus
cuggaagcaaaaaaucug

SEQ ID NO: 4066804 - RNA, 23 nt, Vaccinia virus
cuggaauuaguuagauauauaga

SEQ ID NO: 4066805 - RNA, 16 nt, Vaccinia virus
cuggauaauauauacg

SEQ ID NO: 4066806 - RNA, 22 nt, Vaccinia virus
cugguuugauaaacuguuuauu

SEQ ID NO: 4066807 - RNA, 12 nt, Vaccinia virus
cuguaaacauuu

SEQ ID NO: 4066808 - RNA, 16 nt, Vaccinia virus
cuguacaaauguuaaa

SEQ ID NO: 4066809 - RNA, 21 nt, Vaccinia virus
cuguaggaaauggaagauauu

SEQ ID NO: 4066810 - RNA, 18 nt, Vaccinia virus
cuguauaucuauaauauu

SEQ ID NO: 4066811 - RNA, 18 nt, Vaccinia virus
cuguaucauccaguuuuc

SEQ ID NO: 4066812 - RNA, 14 nt, Vaccinia virus
cugugaauacuuua

SEQ ID NO: 4066813 - RNA, 15 nt, Vaccinia virus
cuguuaauaacucua

SEQ ID NO: 4066814 - RNA, 16 nt, Vaccinia virus
cuguuaucuaaugaau

SEQ ID NO: 4066815 - RNA, 13 nt, Vaccinia virus
cuguucuauuuug

SEQ ID NO: 4066816 - RNA, 15 nt, Vaccinia virus
cuguuguacauacag

SEQ ID NO: 4066817 - RNA, 21 nt, Vaccinia virus
cuguuguuuauucaacaugua

SEQ ID NO: 4066818 - RNA, 15 nt, Vaccinia virus
cuguuuauuaaugau

SEQ ID NO: 4066819 - RNA, 20 nt, Vaccinia virus
cuuaaaaaguucgaguuucu

SEQ ID NO: 4066820 - RNA, 21 nt, Vaccinia virus
cuuaaaauuuaaaaugauauu

SEQ ID NO: 4066821 - RNA, 13 nt, Vaccinia virus
cuuaacaauaaau

SEQ ID NO: 4066822 - RNA, 18 nt, Vaccinia virus
cuuaaccauauauccaau

SEQ ID NO: 4066823 - RNA, 14 nt, Vaccinia virus
cuuaacuauuuccg

SEQ ID NO: 4066824 - RNA, 16 nt, Vaccinia virus
cuuaauagacaaacug

SEQ ID NO: 4066825 - RNA, 18 nt, Vaccinia virus
cuuaauauugccauaauu

SEQ ID NO: 4066826 - RNA, 16 nt, Vaccinia virus
cuuaaucauaucacau

SEQ ID NO: 4066827 - RNA, 23 nt, Vaccinia virus
cuuaaugaagaucuauuuccaga

SEQ ID NO: 4066828 - RNA, 15 nt, Vaccinia virus
cuuaaugucuguauc

SEQ ID NO: 4066829 - RNA, 14 nt, Vaccinia virus
cuuaauuauuuugc

SEQ ID NO: 4066830 - RNA, 14 nt, Vaccinia virus
cuuacauaaaugaa

SEQ ID NO: 4066831 - RNA, 14 nt, Vaccinia virus
cuuacuaucuuuuu

SEQ ID NO: 4066832 - RNA, 15 nt, Vaccinia virus
cuuagaaauaaacga

SEQ ID NO: 4066833 - RNA, 15 nt, Vaccinia virus
cuuaguaaacagucc

SEQ ID NO: 4066834 - RNA, 22 nt, Vaccinia virus
cuuauaaaacuauauuuggaau

SEQ ID NO: 4066835 - RNA, 16 nt, Vaccinia virus
cuuauauugaugaugu

SEQ ID NO: 4066836 - RNA, 16 nt, Vaccinia virus
cuuaucguugaagacu

SEQ ID NO: 4066837 - RNA, 13 nt, Vaccinia virus
cuuauuaacauuu

SEQ ID NO: 4066838 - RNA, 17 nt, Vaccinia virus
cuuauuacuuuuggaau

SEQ ID NO: 4066839 - RNA, 15 nt, Vaccinia virus
cuuauuauauuuccc

SEQ ID NO: 4066840 - RNA, 16 nt, Vaccinia virus
cuuauucuuaaaaucu

SEQ ID NO: 4066841 - RNA, 17 nt, Vaccinia virus
cuuauuuuuaaaaauug

SEQ ID NO: 4066842 - RNA, 21 nt, Vaccinia virus
cuucagaaaagucaaauauug

SEQ ID NO: 4066843 - RNA, 23 nt, Vaccinia virus
cuucagaauacaaucuguauuuc

SEQ ID NO: 4066844 - RNA, 16 nt, Vaccinia virus
cuucagacaacaucuc

SEQ ID NO: 4066845 - RNA, 18 nt, Vaccinia virus
cuucauuaaucuuuucug

SEQ ID NO: 4066846 - RNA, 12 nt, Vaccinia virus
cuucauuauuuu

SEQ ID NO: 4066847 - RNA, 20 nt, Vaccinia virus
cuuccacuguccaaaaugau

SEQ ID NO: 4066848 - RNA, 14 nt, Vaccinia virus
cuuccaguucugga

SEQ ID NO: 4066849 - RNA, 20 nt, Vaccinia virus
cuuccuaggauagcuuuagu

SEQ ID NO: 4066850 - RNA, 23 nt, Vaccinia virus
cuuccugguugguauugcgcuac

SEQ ID NO: 4066851 - RNA, 15 nt, Vaccinia virus
cuucgacaaaucguu

SEQ ID NO: 4066852 - RNA, 15 nt, Vaccinia virus
cuucgauaaaaugac

SEQ ID NO: 4066853 - RNA, 19 nt, Vaccinia virus
cuucgauauaaaaucauuu

SEQ ID NO: 4066854 - RNA, 22 nt, Vaccinia virus
cuucgauauuagauuuuguauu

SEQ ID NO: 4066855 - RNA, 22 nt, Vaccinia virus
cuucgaugagauugaucaugua

SEQ ID NO: 4066856 - RNA, 12 nt, Vaccinia virus
cuucuaaaacug

SEQ ID NO: 4066857 - RNA, 21 nt, Vaccinia virus
cuucuaaugagcaaguagaaa

SEQ ID NO: 4066858 - RNA, 14 nt, Vaccinia virus
cuucuacaauaucu

SEQ ID NO: 4066859 - RNA, 22 nt, Vaccinia virus
cuucuacaucuuccuucuuauu

SEQ ID NO: 4066860 - RNA, 17 nt, Vaccinia virus
cuucucaucucuuucag

SEQ ID NO: 4066861 - RNA, 16 nt, Vaccinia virus
cuucucuccuuucaaa

SEQ ID NO: 4066862 - RNA, 17 nt, Vaccinia virus
cuucucuguuuaaugaa

SEQ ID NO: 4066863 - RNA, 17 nt, Vaccinia virus
cuugacuacauucucau

SEQ ID NO: 4066864 - RNA, 14 nt, Vaccinia virus
cuugagaauaucca

SEQ ID NO: 4066865 - RNA, 20 nt, Vaccinia virus
cuugauacagccaaguaucu

SEQ ID NO: 4066866 - RNA, 21 nt, Vaccinia virus
cuugauuaccuuacucaugau

SEQ ID NO: 4066867 - RNA, 14 nt, Vaccinia virus
cuuggaaauuauuu

SEQ ID NO: 4066868 - RNA, 13 nt, Vaccinia virus
cuuguauuuugau

SEQ ID NO: 4066869 - RNA, 19 nt, Vaccinia virus
cuugucaaaucuauauacc

SEQ ID NO: 4066870 - RNA, 13 nt, Vaccinia virus
cuugugcauuuuc

SEQ ID NO: 4066871 - RNA, 22 nt, Vaccinia virus
cuuuaacgcccuuguauguuuu

SEQ ID NO: 4066872 - RNA, 17 nt, Vaccinia virus
cuuuaaguauauacgau

SEQ ID NO: 4066873 - RNA, 19 nt, Vaccinia virus
cuuuaauaacaaagaaaga

SEQ ID NO: 4066874 - RNA, 22 nt, Vaccinia virus
cuuuaauaggaguaauagaacu

SEQ ID NO: 4066875 - RNA, 18 nt, Vaccinia virus
cuuuaauagugucauuag

SEQ ID NO: 4066876 - RNA, 14 nt, Vaccinia virus
cuuuaaucuauauu

SEQ ID NO: 4066877 - RNA, 22 nt, Vaccinia virus
cuuuacaguuucuguaaugaug

SEQ ID NO: 4066878 - RNA, 17 nt, Vaccinia virus
cuuuagaaauuguauuc

SEQ ID NO: 4066879 - RNA, 16 nt, Vaccinia virus
cuuuagaagaauaucu

SEQ ID NO: 4066880 - RNA, 14 nt, Vaccinia virus
cuuuagaguauuuc

SEQ ID NO: 4066881 - RNA, 17 nt, Vaccinia virus
cuuuagaugaauuauua

SEQ ID NO: 4066882 - RNA, 19 nt, Vaccinia virus
cuuuauuauuauugacuuc

SEQ ID NO: 4066883 - RNA, 14 nt, Vaccinia virus
cuuucaagaauaaa

SEQ ID NO: 4066884 - RNA, 20 nt, Vaccinia virus
cuuuccguacaacauacugu

SEQ ID NO: 4066885 - RNA, 17 nt, Vaccinia virus
cuuuccugggaaacucu

SEQ ID NO: 4066886 - RNA, 12 nt, Vaccinia virus
cuuucuauuuuu

SEQ ID NO: 4066887 - RNA, 15 nt, Vaccinia virus
cuuucucacaaaaau

SEQ ID NO: 4066888 - RNA, 11 nt, Vaccinia virus
cuuucucucuu

SEQ ID NO: 4066889 - RNA, 18 nt, Vaccinia virus
cuuucuguauccagguag

SEQ ID NO: 4066890 - RNA, 13 nt, Vaccinia virus
cuuugauuaauga

SEQ ID NO: 4066891 - RNA, 20 nt, Vaccinia virus
cuuugguaaugaaauuauuc

SEQ ID NO: 4066892 - RNA, 16 nt, Vaccinia virus
cuuugguguaaaguua

SEQ ID NO: 4066893 - RNA, 19 nt, Vaccinia virus
cuuugugaugucuaguuuc

SEQ ID NO: 4066894 - RNA, 16 nt, Vaccinia virus
cuuuguguugugcauu

SEQ ID NO: 4066895 - RNA, 16 nt, Vaccinia virus
cuuuucuaaauucaua

SEQ ID NO: 4066896 - RNA, 18 nt, Vaccinia virus
cuuuucuauaaucaucuu

SEQ ID NO: 4066897 - RNA, 22 nt, Vaccinia virus
cuuuugauuugcuuugaaugau

SEQ ID NO: 4066898 - RNA, 14 nt, Vaccinia virus
gaaaaaaauaucua

SEQ ID NO: 4066899 - RNA, 16 nt, Vaccinia virus
gaaaaacacauaucua

SEQ ID NO: 4066900 - RNA, 15 nt, Vaccinia virus
gaaaaaguaaaugau

SEQ ID NO: 4066901 - RNA, 13 nt, Vaccinia virus
gaaaaauauuaaa

SEQ ID NO: 4066902 - RNA, 17 nt, Vaccinia virus
gaaaacauuuuuaucau

SEQ ID NO: 4066903 - RNA, 20 nt, Vaccinia virus
gaaaacgagccaguaaucuu

SEQ ID NO: 4066904 - RNA, 18 nt, Vaccinia virus
gaaaacuuuaaauacuua

SEQ ID NO: 4066905 - RNA, 13 nt, Vaccinia virus
gaaaagauaacua

SEQ ID NO: 4066906 - RNA, 16 nt, Vaccinia virus
gaaaagauauccagag

SEQ ID NO: 4066907 - RNA, 17 nt, Vaccinia virus
gaaaaguauaauucuuu

SEQ ID NO: 4066908 - RNA, 12 nt, Vaccinia virus
gaaaauaauaaa

SEQ ID NO: 4066909 - RNA, 19 nt, Vaccinia virus
gaaaauacaaguauagaua

SEQ ID NO: 4066910 - RNA, 21 nt, Vaccinia virus
gaaaauaccauccaagucaau

SEQ ID NO: 4066911 - RNA, 16 nt, Vaccinia virus
gaaaauagcagcugau

SEQ ID NO: 4066912 - RNA, 22 nt, Vaccinia virus
gaaaaucuacuaccgaugaugu

SEQ ID NO: 4066913 - RNA, 21 nt, Vaccinia virus
gaaaaucuuucuucuacuaua

SEQ ID NO: 4066914 - RNA, 19 nt, Vaccinia virus
gaaaauuauaaugaauauu

SEQ ID NO: 4066915 - RNA, 17 nt, Vaccinia virus
gaaacgauaucaugaac

SEQ ID NO: 4066916 - RNA, 15 nt, Vaccinia virus
gaaacgauguaguua

SEQ ID NO: 4066917 - RNA, 18 nt, Vaccinia virus
gaaacuauagauaaugau

SEQ ID NO: 4066918 - RNA, 22 nt, Vaccinia virus
gaaacugacggaugauucuagu

SEQ ID NO: 4066919 - RNA, 13 nt, Vaccinia virus
gaaacugauacaa

SEQ ID NO: 4066920 - RNA, 17 nt, Vaccinia virus
gaaacuguaaagaacag

SEQ ID NO: 4066921 - RNA, 17 nt, Vaccinia virus
gaaagaacugauugcag

SEQ ID NO: 4066922 - RNA, 14 nt, Vaccinia virus
gaaagaauaagaac

SEQ ID NO: 4066923 - RNA, 20 nt, Vaccinia virus
gaaagaaucaaaagaaugau

SEQ ID NO: 4066924 - RNA, 17 nt, Vaccinia virus
gaaagcgugauuuuaau

SEQ ID NO: 4066925 - RNA, 23 nt, Vaccinia virus
gaaagcugggggauguucugguu

SEQ ID NO: 4066926 - RNA, 15 nt, Vaccinia virus
gaaaguaaauaauau

SEQ ID NO: 4066927 - RNA, 21 nt, Vaccinia virus
gaaauaauaggagguaaugau

SEQ ID NO: 4066928 - RNA, 20 nt, Vaccinia virus
gaaauaaucauaaauuauuu

SEQ ID NO: 4066929 - RNA, 16 nt, Vaccinia virus
gaaauaauuuuuaguu

SEQ ID NO: 4066930 - RNA, 16 nt, Vaccinia virus
gaaauacaaaauguua

SEQ ID NO: 4066931 - RNA, 10 nt, Vaccinia virus
gaaauacuua

SEQ ID NO: 4066932 - RNA, 21 nt, Vaccinia virus
gaaauauaugagauguaguua

SEQ ID NO: 4066933 - RNA, 18 nt, Vaccinia virus
gaaauauauuaagaaauc

SEQ ID NO: 4066934 - RNA, 19 nt, Vaccinia virus
gaaaucauguuauaguguu

SEQ ID NO: 4066935 - RNA, 16 nt, Vaccinia virus
gaaaugagaaacuguu

SEQ ID NO: 4066936 - RNA, 20 nt, Vaccinia virus
gaaauguuuuucgauuacaa

SEQ ID NO: 4066937 - RNA, 15 nt, Vaccinia virus
gaaauugauaaugag

SEQ ID NO: 4066938 - RNA, 19 nt, Vaccinia virus
gaaauuuggguacugugaa

SEQ ID NO: 4066939 - RNA, 15 nt, Vaccinia virus
gaaauuuguaaucau

SEQ ID NO: 4066940 - RNA, 16 nt, Vaccinia virus
gaacaacgucaacaac

SEQ ID NO: 4066941 - RNA, 17 nt, Vaccinia virus
gaacaaguaucaaaaga

SEQ ID NO: 4066942 - RNA, 14 nt, Vaccinia virus
gaacaauaaaagag

SEQ ID NO: 4066943 - RNA, 21 nt, Vaccinia virus
gaacacacgaugaaaauguac

SEQ ID NO: 4066944 - RNA, 13 nt, Vaccinia virus
gaacacuacagua

SEQ ID NO: 4066945 - RNA, 13 nt, Vaccinia virus
gaacagaugauau

SEQ ID NO: 4066946 - RNA, 17 nt, Vaccinia virus
gaacagguuauccagaa

SEQ ID NO: 4066947 - RNA, 17 nt, Vaccinia virus
gaacauaaaacuaauau

SEQ ID NO: 4066948 - RNA, 19 nt, Vaccinia virus
gaacauagaacuaguucuc

SEQ ID NO: 4066949 - RNA, 15 nt, Vaccinia virus
gaacauauaaaugua

SEQ ID NO: 4066950 - RNA, 20 nt, Vaccinia virus
gaacauauuuauauaauuau

SEQ ID NO: 4066951 - RNA, 22 nt, Vaccinia virus
gaacaucuugauuauaauauaa

SEQ ID NO: 4066952 - RNA, 17 nt, Vaccinia virus
gaacauuauaauaauca

SEQ ID NO: 4066953 - RNA, 14 nt, Vaccinia virus
gaacauuuaagaga

SEQ ID NO: 4066954 - RNA, 16 nt, Vaccinia virus
gaaccuucuacauaua

SEQ ID NO: 4066955 - RNA, 22 nt, Vaccinia virus
gaacguaguaguaaguauuuau

SEQ ID NO: 4066956 - RNA, 19 nt, Vaccinia virus
gaacuaacuauuacuauga

SEQ ID NO: 4066957 - RNA, 17 nt, Vaccinia virus
gaacuagacgauaaugu

SEQ ID NO: 4066958 - RNA, 14 nt, Vaccinia virus
gaacugaugccuau

SEQ ID NO: 4066959 - RNA, 23 nt, Vaccinia virus
gaagaacguguauuaaauagaau

SEQ ID NO: 4066960 - RNA, 14 nt, Vaccinia virus
gaagaagaugaugg

SEQ ID NO: 4066961 - RNA, 13 nt, Vaccinia virus
gaagaaguuaaua

SEQ ID NO: 4066962 - RNA, 19 nt, Vaccinia virus
gaagaaugccuacauauca

SEQ ID NO: 4066963 - RNA, 16 nt, Vaccinia virus
gaagaauggaugauau

SEQ ID NO: 4066964 - RNA, 15 nt, Vaccinia virus
gaagacugaagagga

SEQ ID NO: 4066965 - RNA, 13 nt, Vaccinia virus
gaagagguuauau

SEQ ID NO: 4066966 - RNA, 13 nt, Vaccinia virus
gaagauagauaug

SEQ ID NO: 4066967 - RNA, 17 nt, Vaccinia virus
gaagauuaccucuaguu

SEQ ID NO: 4066968 - RNA, 19 nt, Vaccinia virus
gaagauucccaaauaauca

SEQ ID NO: 4066969 - RNA, 19 nt, Vaccinia virus
gaagcacgcugcuaauaaa

SEQ ID NO: 4066970 - RNA, 14 nt, Vaccinia virus
gaaggaucuguaca

SEQ ID NO: 4066971 - RNA, 17 nt, Vaccinia virus
gaagguuggguagaugg

SEQ ID NO: 4066972 - RNA, 17 nt, Vaccinia virus
gaaguacuauuaaaacc

SEQ ID NO: 4066973 - RNA, 17 nt, Vaccinia virus
gaaguaggauuauguaa

SEQ ID NO: 4066974 - RNA, 18 nt, Vaccinia virus
gaauaaacaaaauaaugu

SEQ ID NO: 4066975 - RNA, 14 nt, Vaccinia virus
gaauaaauauccuu

SEQ ID NO: 4066976 - RNA, 17 nt, Vaccinia virus
gaauaacgaacauaacu

SEQ ID NO: 4066977 - RNA, 11 nt, Vaccinia virus
gaauaagaaca

SEQ ID NO: 4066978 - RNA, 23 nt, Vaccinia virus
gaauaagugguuugauauuucau

SEQ ID NO: 4066979 - RNA, 20 nt, Vaccinia virus
gaauaaguuuauuagacacg

SEQ ID NO: 4066980 - RNA, 16 nt, Vaccinia virus
gaauaauccuauauca

SEQ ID NO: 4066981 - RNA, 13 nt, Vaccinia virus
gaauaauguuucu

SEQ ID NO: 4066982 - RNA, 20 nt, Vaccinia virus
gaauacaaucuguauuucau

SEQ ID NO: 4066983 - RNA, 22 nt, Vaccinia virus
gaauacacuccucagauuuaua

SEQ ID NO: 4066984 - RNA, 17 nt, Vaccinia virus
gaauaccauuaaacaau

SEQ ID NO: 4066985 - RNA, 15 nt, Vaccinia virus
gaauacgauaauuau

SEQ ID NO: 4066986 - RNA, 14 nt, Vaccinia virus
gaauacucccaaac

SEQ ID NO: 4066987 - RNA, 15 nt, Vaccinia virus
gaauagauuacucau

SEQ ID NO: 4066988 - RNA, 23 nt, Vaccinia virus
gaauagccgccggaaacuuucua

SEQ ID NO: 4066989 - RNA, 18 nt, Vaccinia virus
gaauagugccaucagaau

SEQ ID NO: 4066990 - RNA, 17 nt, Vaccinia virus
gaauauaaaaaaaugau

SEQ ID NO: 4066991 - RNA, 16 nt, Vaccinia virus
gaauauaaaauaacua

SEQ ID NO: 4066992 - RNA, 15 nt, Vaccinia virus
gaauauaauaaucua

SEQ ID NO: 4066993 - RNA, 20 nt, Vaccinia virus
gaauauagaucgaaaaauau

SEQ ID NO: 4066994 - RNA, 23 nt, Vaccinia virus
gaauaucaucgacuguugccaau

SEQ ID NO: 4066995 - RNA, 15 nt, Vaccinia virus
gaauaucuacaaauu

SEQ ID NO: 4066996 - RNA, 21 nt, Vaccinia virus
gaauaugaauucuaugaugaa

SEQ ID NO: 4066997 - RNA, 21 nt, Vaccinia virus
gaauauuagguaaagauauuu

SEQ ID NO: 4066998 - RNA, 13 nt, Vaccinia virus
gaauauuauaauu

SEQ ID NO: 4066999 - RNA, 13 nt, Vaccinia virus
gaauauuucuauu

SEQ ID NO: 4067000 - RNA, 12 nt, Vaccinia virus
gaaucaaaaagu

SEQ ID NO: 4067001 - RNA, 13 nt, Vaccinia virus
gaaucacaaacau

SEQ ID NO: 4067002 - RNA, 15 nt, Vaccinia virus
gaaucauaaagaaca

SEQ ID NO: 4067003 - RNA, 15 nt, Vaccinia virus
gaaucauaguuuuua

SEQ ID NO: 4067004 - RNA, 14 nt, Vaccinia virus
gaaucauuuuugca

SEQ ID NO: 4067005 - RNA, 16 nt, Vaccinia virus
gaauccgcuacauauu

SEQ ID NO: 4067006 - RNA, 14 nt, Vaccinia virus
gaauccuauacucu

SEQ ID NO: 4067007 - RNA, 18 nt, Vaccinia virus
gaaucgauuuuguaauau

SEQ ID NO: 4067008 - RNA, 17 nt, Vaccinia virus
gaaucgguucaaaaauu

SEQ ID NO: 4067009 - RNA, 22 nt, Vaccinia virus
gaaucguauaaugucccuucaa

SEQ ID NO: 4067010 - RNA, 20 nt, Vaccinia virus
ugagcucauaugauuucagu

SEQ ID NO: 4067011 - RNA, 15 nt, Vaccinia virus
ucaaaguuucugaaa

SEQ ID NO: 4067012 - RNA, 18 nt, Vaccinia virus
ucaaaguuucugaaauaa

SEQ ID NO: 4067013 - RNA, 19 nt, Vaccinia virus
ucaaauacaucuauuagua

SEQ ID NO: 4067014 - RNA, 23 nt, Vaccinia virus
ucaaaucgcccaucuauuacaaa

SEQ ID NO: 4067015 - RNA, 18 nt, Vaccinia virus
ucaaaugguaaauacugu

SEQ ID NO: 4067016 - RNA, 15 nt, Vaccinia virus
ucaaauuagauuucg

SEQ ID NO: 4067017 - RNA, 17 nt, Vaccinia virus
ucaaauuuuuucuuuaa

SEQ ID NO: 4067018 - RNA, 11 nt, Vaccinia virus
ucaacaaacua

SEQ ID NO: 4067019 - RNA, 20 nt, Vaccinia virus
ucaacaaguaggauuuuucc

SEQ ID NO: 4067020 - RNA, 21 nt, Vaccinia virus
ucaacaaucguuaauaaaucu

SEQ ID NO: 4067021 - RNA, 19 nt, Vaccinia virus
ucaacacuacccaauaaau

SEQ ID NO: 4067022 - RNA, 18 nt, Vaccinia virus
ucaacauacuauguuuug

SEQ ID NO: 4067023 - RNA, 20 nt, Vaccinia virus
ucaacgaucgucgauacaaa

SEQ ID NO: 4067024 - RNA, 13 nt, Vaccinia virus
ucaacuacauaau

SEQ ID NO: 4067025 - RNA, 16 nt, Vaccinia virus
ucaacuuauuaacauu

SEQ ID NO: 4067026 - RNA, 16 nt, Vaccinia virus
ucaagaagauaucaga

SEQ ID NO: 4067027 - RNA, 16 nt, Vaccinia virus
ucaagacccauccagu

SEQ ID NO: 4067028 - RNA, 20 nt, Vaccinia virus
ucaagacguggcaaacaaug

SEQ ID NO: 4067029 - RNA, 15 nt, Vaccinia virus
ucaagaguggagaau

SEQ ID NO: 4067030 - RNA, 20 nt, Vaccinia virus
ucaagccggcuauauauucu

SEQ ID NO: 4067031 - RNA, 22 nt, Vaccinia virus
ucaagccggcuauauauucugc

SEQ ID NO: 4067032 - RNA, 13 nt, Vaccinia virus
ucaagucaaugau

SEQ ID NO: 4067033 - RNA, 19 nt, Vaccinia virus
ucaaguuaucgucuguauu

SEQ ID NO: 4067034 - RNA, 15 nt, Vaccinia virus
ucaauaaaugauuca

SEQ ID NO: 4067035 - RNA, 19 nt, Vaccinia virus
ucaauaacuggcacaacaa

SEQ ID NO: 4067036 - RNA, 24 nt, Vaccinia virus
ucaauaauuguggcuauauauuca

SEQ ID NO: 4067037 - RNA, 12 nt, Vaccinia virus
ucaauagaauau

SEQ ID NO: 4067038 - RNA, 18 nt, Vaccinia virus
ucaaucaaacaaaaaagc

SEQ ID NO: 4067039 - RNA, 16 nt, Vaccinia virus
ucaaucacuacaucuu

SEQ ID NO: 4067040 - RNA, 17 nt, Vaccinia virus
ucaaucacuacaucuuu

SEQ ID NO: 4067041 - RNA, 14 nt, Vaccinia virus
ucaaucuuauucaa

SEQ ID NO: 4067042 - RNA, 22 nt, Vaccinia virus
ucaauucguucgaugaguauau

SEQ ID NO: 4067043 - RNA, 19 nt, Vaccinia virus
ucacaaaucacacaagcca

SEQ ID NO: 4067044 - RNA, 19 nt, Vaccinia virus
ucacaacaucuauaaaagu

SEQ ID NO: 4067045 - RNA, 23 nt, Vaccinia virus
ucacaugauguagugauagauau

SEQ ID NO: 4067046 - RNA, 14 nt, Vaccinia virus
ucacuaacuaaugu

SEQ ID NO: 4067047 - RNA, 18 nt, Vaccinia virus
ucacuacggacacaaagu

SEQ ID NO: 4067048 - RNA, 20 nt, Vaccinia virus
ucacuauaagaaaucagaau

SEQ ID NO: 4067049 - RNA, 15 nt, Vaccinia virus
ucacuauagaaaaug

SEQ ID NO: 4067050 - RNA, 15 nt, Vaccinia virus
ucacucaucgauuca

SEQ ID NO: 4067051 - RNA, 16 nt, Vaccinia virus
ucacuguuguacauac

SEQ ID NO: 4067052 - RNA, 21 nt, Vaccinia virus
ucacuguuguacauacaggua

SEQ ID NO: 4067053 - RNA, 12 nt, Vaccinia virus
ucacuucagaaa

SEQ ID NO: 4067054 - RNA, 18 nt, Vaccinia virus
ucagaaaacccaaacacu

SEQ ID NO: 4067055 - RNA, 18 nt, Vaccinia virus
ucagaaaauaccauccaa

SEQ ID NO: 4067056 - RNA, 21 nt, Vaccinia virus
ucagaaagaguuuccacaugu

SEQ ID NO: 4067057 - RNA, 23 nt, Vaccinia virus
ucagaacuuccaauaaaauuacu

SEQ ID NO: 4067058 - RNA, 14 nt, Vaccinia virus
ucagaaucguauau

SEQ ID NO: 4067059 - RNA, 22 nt, Vaccinia virus
ucagacgacccaaaacauagag

SEQ ID NO: 4067060 - RNA, 17 nt, Vaccinia virus
ucagacuacuuauucua

SEQ ID NO: 4067061 - RNA, 20 nt, Vaccinia virus
ucagacucugauuugaacaa

SEQ ID NO: 4067062 - RNA, 16 nt, Vaccinia virus
ucagauauaaaaaucu

SEQ ID NO: 4067063 - RNA, 22 nt, Vaccinia virus
auauacgaaauaaaauagacaa

SEQ ID NO: 4067064 - RNA, 20 nt, Vaccinia virus
auauacgaagggauuaaaaa

SEQ ID NO: 4067065 - RNA, 22 nt, Vaccinia virus
auauacucuaaucuuuaauaga

SEQ ID NO: 4067066 - RNA, 20 nt, Vaccinia virus
auauagauagcguauaucuc

SEQ ID NO: 4067067 - RNA, 22 nt, Vaccinia virus
auauagcggaugaaaaauuugu

SEQ ID NO: 4067068 - RNA, 16 nt, Vaccinia virus
auauaggugcaaaaaa

SEQ ID NO: 4067069 - RNA, 17 nt, Vaccinia virus
auauaguauauagaugu

SEQ ID NO: 4067070 - RNA, 18 nt, Vaccinia virus
auauaguguauaauaaag

SEQ ID NO: 4067071 - RNA, 13 nt, Vaccinia virus
auauaguuauuaa

SEQ ID NO: 4067072 - RNA, 14 nt, Vaccinia virus
auauaucugauagu

SEQ ID NO: 4067073 - RNA, 15 nt, Vaccinia virus
auauaugacauaaua

SEQ ID NO: 4067074 - RNA, 20 nt, Vaccinia virus
auauauggauaaugcuguau

SEQ ID NO: 4067075 - RNA, 15 nt, Vaccinia virus
auauauuaacucaga

SEQ ID NO: 4067076 - RNA, 20 nt, Vaccinia virus
auauauuaauacacauaaug

SEQ ID NO: 4067077 - RNA, 16 nt, Vaccinia virus
auauauuaauccacua

SEQ ID NO: 4067078 - RNA, 20 nt, Vaccinia virus
auauauuccuugaauaaccu

SEQ ID NO: 4067079 - RNA, 22 nt, Vaccinia virus
auauauuuuucauaaauacacu

SEQ ID NO: 4067080 - RNA, 21 nt, Vaccinia virus
auaucaacaacguggaauugu

SEQ ID NO: 4067081 - RNA, 17 nt, Vaccinia virus
auaucaacaucugaugc

SEQ ID NO: 4067082 - RNA, 18 nt, Vaccinia virus
auaucaauaagcauuaug

SEQ ID NO: 4067083 - RNA, 20 nt, Vaccinia virus
auaucacauaucuaaaugaa

SEQ ID NO: 4067084 - RNA, 15 nt, Vaccinia virus
auaucacuguuguac

SEQ ID NO: 4067085 - RNA, 20 nt, Vaccinia virus
auaucagauaaguaugaaga

SEQ ID NO: 4067086 - RNA, 15 nt, Vaccinia virus
auaucauacaugaua

SEQ ID NO: 4067087 - RNA, 17 nt, Vaccinia virus
auaucaucaucugaaau

SEQ ID NO: 4067088 - RNA, 14 nt, Vaccinia virus
auaucaucuacaua

SEQ ID NO: 4067089 - RNA, 13 nt, Vaccinia virus
auaucaugaugau

SEQ ID NO: 4067090 - RNA, 20 nt, Vaccinia virus
auaucauuaaguucacuaga

SEQ ID NO: 4067091 - RNA, 23 nt, Vaccinia virus
auaucauuaaguucacuagaaua

SEQ ID NO: 4067092 - RNA, 14 nt, Vaccinia virus
auaucauuaaugau

SEQ ID NO: 4067093 - RNA, 21 nt, Vaccinia virus
auaucauugaaugagauacua

SEQ ID NO: 4067094 - RNA, 18 nt, Vaccinia virus
auaucauugucuaauaga

SEQ ID NO: 4067095 - RNA, 12 nt, Vaccinia virus
auauccaaaauu

SEQ ID NO: 4067096 - RNA, 19 nt, Vaccinia virus
auaucgaacaaauuccaag

SEQ ID NO: 4067097 - RNA, 19 nt, Vaccinia virus
auaucgccuuuauuuccac

SEQ ID NO: 4067098 - RNA, 20 nt, Vaccinia virus
auaucggacgcagaaauugg

SEQ ID NO: 4067099 - RNA, 21 nt, Vaccinia virus
auaucgguaccguuaaagaug

SEQ ID NO: 4067100 - RNA, 16 nt, Vaccinia virus
auaucgguaguuguau

SEQ ID NO: 4067101 - RNA, 14 nt, Vaccinia virus
auaucguguucauu

SEQ ID NO: 4067102 - RNA, 16 nt, Vaccinia virus
auaucguucucuaaau

SEQ ID NO: 4067103 - RNA, 19 nt, Vaccinia virus
auaucuacugauaaaacug

SEQ ID NO: 4067104 - RNA, 16 nt, Vaccinia virus
auaucuagcaaaaauu

SEQ ID NO: 4067105 - RNA, 22 nt, Vaccinia virus
auaucuaguguuuuugugguau

SEQ ID NO: 4067106 - RNA, 20 nt, Vaccinia virus
auaucucauucaaauccaua

SEQ ID NO: 4067107 - RNA, 14 nt, Vaccinia virus
auaucucuaauaga

SEQ ID NO: 4067108 - RNA, 13 nt, Vaccinia virus
auaucucuagaua

SEQ ID NO: 4067109 - RNA, 18 nt, Vaccinia virus
auaucugagcuaucuaga

SEQ ID NO: 4067110 - RNA, 17 nt, Vaccinia virus
auaucugugaauacuuu

SEQ ID NO: 4067111 - RNA, 12 nt, Vaccinia virus
auaucuuaacuu

SEQ ID NO: 4067112 - RNA, 21 nt, Vaccinia virus
auaucuuagugcaaaaguaua

SEQ ID NO: 4067113 - RNA, 20 nt, Vaccinia virus
auaucuuauucugguuuaaa

SEQ ID NO: 4067114 - RNA, 18 nt, Vaccinia virus
auaucuugcaaaauagua

SEQ ID NO: 4067115 - RNA, 17 nt, Vaccinia virus
auaugaaaaaacauuau

SEQ ID NO: 4067116 - RNA, 20 nt, Vaccinia virus
auaugaaccuucuacauaua

SEQ ID NO: 4067117 - RNA, 14 nt, Vaccinia virus
auaugacaaacauu

SEQ ID NO: 4067118 - RNA, 12 nt, Vaccinia virus
auaugacauaau

SEQ ID NO: 4067119 - RNA, 19 nt, Vaccinia virus
auaugaccgauaagagacg

SEQ ID NO: 4067120 - RNA, 15 nt, Vaccinia virus
auaugauagaaauga

SEQ ID NO: 4067121 - RNA, 14 nt, Vaccinia virus
auaugauuacuaga

SEQ ID NO: 4067122 - RNA, 21 nt, Vaccinia virus
auaugccggagaguaaacauu

SEQ ID NO: 4067123 - RNA, 13 nt, Vaccinia virus
auaugccuauaaa

SEQ ID NO: 4067124 - RNA, 14 nt, Vaccinia virus
auaugcuacaagau

SEQ ID NO: 4067125 - RNA, 17 nt, Vaccinia virus
auaugcuaguuaauagu

SEQ ID NO: 4067126 - RNA, 11 nt, Vaccinia virus
auauggaugag

SEQ ID NO: 4067127 - RNA, 19 nt, Vaccinia virus
auaugugguguuacaguca

SEQ ID NO: 4067128 - RNA, 14 nt, Vaccinia virus
auauguuccaguaa

SEQ ID NO: 4067129 - RNA, 19 nt, Vaccinia virus
auauuaaaaaaaaauacuu

SEQ ID NO: 4067130 - RNA, 19 nt, Vaccinia virus
auauuaaaaauucacacau

SEQ ID NO: 4067131 - RNA, 18 nt, Vaccinia virus
auauuaacaucuaaacau

SEQ ID NO: 4067132 - RNA, 22 nt, Vaccinia virus
auauuaacgcguuuuaugaaug

SEQ ID NO: 4067133 - RNA, 15 nt, Vaccinia virus
auauuaaugcauuua

SEQ ID NO: 4067134 - RNA, 13 nt, Vaccinia virus
auauuacaaaaua

SEQ ID NO: 4067135 - RNA, 18 nt, Vaccinia virus
auauuacugaauuaauaa

SEQ ID NO: 4067136 - RNA, 16 nt, Vaccinia virus
auauuacuguuaauaa

SEQ ID NO: 4067137 - RNA, 14 nt, Vaccinia virus
auauuagaaauaca

SEQ ID NO: 4067138 - RNA, 14 nt, Vaccinia virus
auauuagaaucuac

SEQ ID NO: 4067139 - RNA, 15 nt, Vaccinia virus
auauuauauaaacau

SEQ ID NO: 4067140 - RNA, 15 nt, Vaccinia virus
auauuaucaccuauu

SEQ ID NO: 4067141 - RNA, 14 nt, Vaccinia virus
auauuauguuuuau

SEQ ID NO: 4067142 - RNA, 14 nt, Vaccinia virus
auauuauuaaauca

SEQ ID NO: 4067143 - RNA, 13 nt, Vaccinia virus
auauuauuaauaa

SEQ ID NO: 4067144 - RNA, 23 nt, Vaccinia virus
auauuauugggugguaaacuaga

SEQ ID NO: 4067145 - RNA, 17 nt, Vaccinia virus
auauucaagcgaauuac

SEQ ID NO: 4067146 - RNA, 14 nt, Vaccinia virus
auauucaucagaua

SEQ ID NO: 4067147 - RNA, 15 nt, Vaccinia virus
auauuccauuaauga

SEQ ID NO: 4067148 - RNA, 14 nt, Vaccinia virus
auauucccaaacau

SEQ ID NO: 4067149 - RNA, 15 nt, Vaccinia virus
auauucuaaaauggu

SEQ ID NO: 4067150 - RNA, 18 nt, Vaccinia virus
auauucucuauuaaauac

SEQ ID NO: 4067151 - RNA, 14 nt, Vaccinia virus
auauucugaauaua

SEQ ID NO: 4067152 - RNA, 11 nt, Vaccinia virus
auauucuguau

SEQ ID NO: 4067153 - RNA, 21 nt, Vaccinia virus
auauucuuaaaagguuucaua

SEQ ID NO: 4067154 - RNA, 14 nt, Vaccinia virus
auauucuuucuugu

SEQ ID NO: 4067155 - RNA, 14 nt, Vaccinia virus
auauugcuacauaa

SEQ ID NO: 4067156 - RNA, 19 nt, Vaccinia virus
auauugguacgugucuaua

SEQ ID NO: 4067157 - RNA, 18 nt, Vaccinia virus
auauuguagauaagaaug

SEQ ID NO: 4067158 - RNA, 15 nt, Vaccinia virus
auauuguagcauuac

SEQ ID NO: 4067159 - RNA, 14 nt, Vaccinia virus
auauuguuaaauaa

SEQ ID NO: 4067160 - RNA, 19 nt, Vaccinia virus
auauuguugauaauacaac

SEQ ID NO: 4067161 - RNA, 16 nt, Vaccinia virus
auauuuaccaaagcaa

SEQ ID NO: 4067162 - RNA, 13 nt, Vaccinia virus
auauuucaaucau

SEQ ID NO: 4067163 - RNA, 14 nt, Vaccinia virus
auauuuccauuuau

SEQ ID NO: 4067164 - RNA, 13 nt, Vaccinia virus
auauuucuggaau

SEQ ID NO: 4067165 - RNA, 19 nt, Vaccinia virus
auauuugagaguauuggua

SEQ ID NO: 4067166 - RNA, 14 nt, Vaccinia virus
auauuuuaguuuug

SEQ ID NO: 4067167 - RNA, 14 nt, Vaccinia virus
auauuuuuaauagc

SEQ ID NO: 4067168 - RNA, 20 nt, Vaccinia virus
auauuuuuauucagcauuac

SEQ ID NO: 4067169 - RNA, 22 nt, Vaccinia virus
auauuuuuuaucuaaaaaacua

SEQ ID NO: 4067170 - RNA, 21 nt, Vaccinia virus
auauuuuuuuaguaauguuua

SEQ ID NO: 4067171 - RNA, 22 nt, Vaccinia virus
aucaaaauaucucccggaauug

SEQ ID NO: 4067172 - RNA, 16 nt, Vaccinia virus
aucaaacaacugaaaa

SEQ ID NO: 4067173 - RNA, 12 nt, Vaccinia virus
aucaaacacaag

SEQ ID NO: 4067174 - RNA, 11 nt, Vaccinia virus
aucaaacauua

SEQ ID NO: 4067175 - RNA, 14 nt, Vaccinia virus
aucaaagaauaugu

SEQ ID NO: 4067176 - RNA, 23 nt, Vaccinia virus
aucaaaguggaaagaugcuguug

SEQ ID NO: 4067177 - RNA, 17 nt, Vaccinia virus
aucaaauagcucaauau

SEQ ID NO: 4067178 - RNA, 18 nt, Vaccinia virus
aucaacaauuacaaauga

SEQ ID NO: 4067179 - RNA, 16 nt, Vaccinia virus
aucaacaauuuuguau

SEQ ID NO: 4067180 - RNA, 17 nt, Vaccinia virus
aucuaacaccaaaaaua

SEQ ID NO: 4067181 - RNA, 21 nt, Vaccinia virus
aucuaacaucuugauuaauaa

SEQ ID NO: 4067182 - RNA, 15 nt, Vaccinia virus
aucuaauauacuuug

SEQ ID NO: 4067183 - RNA, 23 nt, Vaccinia virus
aucuagacaccagcgucuacaug

SEQ ID NO: 4067184 - RNA, 17 nt, Vaccinia virus
aucuagauaauuaauaa

SEQ ID NO: 4067185 - RNA, 21 nt, Vaccinia virus
aucuagcgucgacaucuauau

SEQ ID NO: 4067186 - RNA, 20 nt, Vaccinia virus
aucuagucaccgagggaaaa

SEQ ID NO: 4067187 - RNA, 15 nt, Vaccinia virus
aucuagucuuaaaug

SEQ ID NO: 4067188 - RNA, 21 nt, Vaccinia virus
aucuauaaaacgauuaaacaa

SEQ ID NO: 4067189 - RNA, 15 nt, Vaccinia virus
aucuauaaugucuac

SEQ ID NO: 4067190 - RNA, 15 nt, Vaccinia virus
aucuauauauguauu

SEQ ID NO: 4067191 - RNA, 20 nt, Vaccinia virus
aucuaucagaguccauguau

SEQ ID NO: 4067192 - RNA, 16 nt, Vaccinia virus
aucuauccauaugcau

SEQ ID NO: 4067193 - RNA, 17 nt, Vaccinia virus
aucuaucuuaaaaacua

SEQ ID NO: 4067194 - RNA, 22 nt, Vaccinia virus
aucuaucuuuagcuucugaaau

SEQ ID NO: 4067195 - RNA, 18 nt, Vaccinia virus
aucuauggaauuaccacu

SEQ ID NO: 4067196 - RNA, 17 nt, Vaccinia virus
aucuauguaaucauaug

SEQ ID NO: 4067197 - RNA, 13 nt, Vaccinia virus
aucuauucaaaau

SEQ ID NO: 4067198 - RNA, 18 nt, Vaccinia virus
cuagacuugauuauucua

SEQ ID NO: 4067199 - RNA, 16 nt, Vaccinia virus
cuagagacaaugaaaa

SEQ ID NO: 4067200 - RNA, 21 nt, Vaccinia virus
cuagauaaaauacugaaucaa

SEQ ID NO: 4067201 - RNA, 21 nt, Vaccinia virus
cuagauagaaagauguagcua

SEQ ID NO: 4067202 - RNA, 14 nt, Vaccinia virus
cuagauauguauuu

SEQ ID NO: 4067203 - RNA, 17 nt, Vaccinia virus
cuagauauuaguauuuu

SEQ ID NO: 4067204 - RNA, 12 nt, Vaccinia virus
cuagauccucau

SEQ ID NO: 4067205 - RNA, 17 nt, Vaccinia virus
cuagaucgucaguagua

SEQ ID NO: 4067206 - RNA, 16 nt, Vaccinia virus
cuagaugaugauuuuc

SEQ ID NO: 4067207 - RNA, 18 nt, Vaccinia virus
cuagcauccccuuucaau

SEQ ID NO: 4067208 - RNA, 18 nt, Vaccinia virus
cuaggaguaucuauuuua

SEQ ID NO: 4067209 - RNA, 20 nt, Vaccinia virus
cuaggauacauaaaauuuaa

SEQ ID NO: 4067210 - RNA, 19 nt, Vaccinia virus
cuaguaaaucaacugauag

SEQ ID NO: 4067211 - RNA, 20 nt, Vaccinia virus
cuaguauagaucaaauacuu

SEQ ID NO: 4067212 - RNA, 16 nt, Vaccinia virus
cuaguaucauuucuac

SEQ ID NO: 4067213 - RNA, 22 nt, Vaccinia virus
cuaguccaaagacuuacaggaa

SEQ ID NO: 4067214 - RNA, 18 nt, Vaccinia virus
cuagugcucaaacaaaau

SEQ ID NO: 4067215 - RNA, 18 nt, Vaccinia virus
cuaguuuucuaaguucua

SEQ ID NO: 4067216 - RNA, 13 nt, Vaccinia virus
cuaguuuugagaa

SEQ ID NO: 4067217 - RNA, 20 nt, Vaccinia virus
cuauaaaaaaaauaauaauu

SEQ ID NO: 4067218 - RNA, 16 nt, Vaccinia virus
cuauaaaaaacauaau

SEQ ID NO: 4067219 - RNA, 20 nt, Vaccinia virus
cuauaaaaagauuauacaaa

SEQ ID NO: 4067220 - RNA, 19 nt, Vaccinia virus
cuauaacauuaauaucaaa

SEQ ID NO: 4067221 - RNA, 13 nt, Vaccinia virus
cuauaauaaugaa

SEQ ID NO: 4067222 - RNA, 15 nt, Vaccinia virus
cuauaauauauucua

SEQ ID NO: 4067223 - RNA, 22 nt, Vaccinia virus
cuauacagcgaauagauucaga

SEQ ID NO: 4067224 - RNA, 21 nt, Vaccinia virus
cuauacauuguugcaucgugu

SEQ ID NO: 4067225 - RNA, 22 nt, Vaccinia virus
cuauacgaaauaaauauucaga

SEQ ID NO: 4067226 - RNA, 14 nt, Vaccinia virus
cuauacuaugaugu

SEQ ID NO: 4067227 - RNA, 14 nt, Vaccinia virus
cuauagauaaugac

SEQ ID NO: 4067228 - RNA, 22 nt, Vaccinia virus
cuauaguacacggaauaaugau

SEQ ID NO: 4067229 - RNA, 11 nt, Vaccinia virus
cuauaguucuc

SEQ ID NO: 4067230 - RNA, 21 nt, Vaccinia virus
cuauauaaagguccuauucca

SEQ ID NO: 4067231 - RNA, 21 nt, Vaccinia virus
cuauauagcuauucuucuuua

SEQ ID NO: 4067232 - RNA, 14 nt, Vaccinia virus
cuauauaguucaaa

SEQ ID NO: 4067233 - RNA, 15 nt, Vaccinia virus
cuauauaucuguauu

SEQ ID NO: 4067234 - RNA, 17 nt, Vaccinia virus
cuauauauucugcuaua

SEQ ID NO: 4067235 - RNA, 14 nt, Vaccinia virus
cuauauauuuugau

SEQ ID NO: 4067236 - RNA, 18 nt, Vaccinia virus
cuauaucaucuacauaau

SEQ ID NO: 4067237 - RNA, 15 nt, Vaccinia virus
cuauaucuaacaucu

SEQ ID NO: 4067238 - RNA, 15 nt, Vaccinia virus
cuauaucuauguuuu

SEQ ID NO: 4067239 - RNA, 12 nt, Vaccinia virus
cuauaucuucuu

SEQ ID NO: 4067240 - RNA, 13 nt, Vaccinia virus
cuauauuaauagg

SEQ ID NO: 4067241 - RNA, 20 nt, Vaccinia virus
cuauauuacgcggucgaugu

SEQ ID NO: 4067242 - RNA, 17 nt, Vaccinia virus
cuauauucuugauguag

SEQ ID NO: 4067243 - RNA, 15 nt, Vaccinia virus
cuauauuuaucacag

SEQ ID NO: 4067244 - RNA, 15 nt, Vaccinia virus
cuaucagaaucaguu

SEQ ID NO: 4067245 - RNA, 18 nt, Vaccinia virus
cuaucaugucuauucucc

SEQ ID NO: 4067246 - RNA, 15 nt, Vaccinia virus
cuaucuuguuuagau

SEQ ID NO: 4067247 - RNA, 12 nt, Vaccinia virus
cuaucuuuagag

SEQ ID NO: 4067248 - RNA, 15 nt, Vaccinia virus
cuauggccaaauguu

SEQ ID NO: 4067249 - RNA, 16 nt, Vaccinia virus
cuauggccaaauguuc

SEQ ID NO: 4067250 - RNA, 17 nt, Vaccinia virus
cuaugguauugauaaaa

SEQ ID NO: 4067251 - RNA, 13 nt, Vaccinia virus
cuauguaaaugau

SEQ ID NO: 4067252 - RNA, 16 nt, Vaccinia virus
cuauguuucaguuuaa

SEQ ID NO: 4067253 - RNA, 13 nt, Vaccinia virus
cuauuaaaguauc

SEQ ID NO: 4067254 - RNA, 17 nt, Vaccinia virus
augauuuuacugcaaua

SEQ ID NO: 4067255 - RNA, 23 nt, Vaccinia virus
augauuuucugggacuauuggaa

SEQ ID NO: 4067256 - RNA, 13 nt, Vaccinia virus
augcaaaauaaua

SEQ ID NO: 4067257 - RNA, 20 nt, Vaccinia virus
augcaaacuaucuaaaugua

SEQ ID NO: 4067258 - RNA, 21 nt, Vaccinia virus
augcaaagauguuuaaugaua

SEQ ID NO: 4067259 - RNA, 16 nt, Vaccinia virus
augcaaagucuaaaua

SEQ ID NO: 4067260 - RNA, 22 nt, Vaccinia virus
augcaaccguaucaaaaaauua

SEQ ID NO: 4067261 - RNA, 16 nt, Vaccinia virus
augcaccuagagaauu

SEQ ID NO: 4067262 - RNA, 17 nt, Vaccinia virus
augcacguaaacauuau

SEQ ID NO: 4067263 - RNA, 14 nt, Vaccinia virus
augcagaaaugauu

SEQ ID NO: 4067264 - RNA, 15 nt, Vaccinia virus
augcagaaguaauga

SEQ ID NO: 4067265 - RNA, 15 nt, Vaccinia virus
augcaucauuaauuu

SEQ ID NO: 4067266 - RNA, 17 nt, Vaccinia virus
augcaucgaacgaccau

SEQ ID NO: 4067267 - RNA, 17 nt, Vaccinia virus
augcaucgguaaauaua

SEQ ID NO: 4067268 - RNA, 14 nt, Vaccinia virus
augccaaaaucaua

SEQ ID NO: 4067269 - RNA, 18 nt, Vaccinia virus
augccauacucagaauua

SEQ ID NO: 4067270 - RNA, 15 nt, Vaccinia virus
augccuauaaaguaa

SEQ ID NO: 4067271 - RNA, 14 nt, Vaccinia virus
augcgauucaaaaa

SEQ ID NO: 4067272 - RNA, 15 nt, Vaccinia virus
augcgauuggauaag

SEQ ID NO: 4067273 - RNA, 20 nt, Vaccinia virus
augcggaaccucgagaaugu

SEQ ID NO: 4067274 - RNA, 23 nt, Vaccinia virus
augcggugccauucaugaaaaug

SEQ ID NO: 4067275 - RNA, 18 nt, Vaccinia virus
augcuauaccuaauacua

SEQ ID NO: 4067276 - RNA, 23 nt, Vaccinia virus
augcuauccaucagaauguuucc

SEQ ID NO: 4067277 - RNA, 20 nt, Vaccinia virus
augcuccaauugaaugucau

SEQ ID NO: 4067278 - RNA, 20 nt, Vaccinia virus
augcucgcaacauuaacauc

SEQ ID NO: 4067279 - RNA, 15 nt, Vaccinia virus
uacaaaauguuugac

SEQ ID NO: 4067280 - RNA, 13 nt, Vaccinia virus
uacaaacugaaaa

SEQ ID NO: 4067281 - RNA, 20 nt, Vaccinia virus
uacaaaggauccgacccuaa

SEQ ID NO: 4067282 - RNA, 12 nt, Vaccinia virus
uacaaaugacua

SEQ ID NO: 4067283 - RNA, 18 nt, Vaccinia virus
uacaacauuccaaagauc

SEQ ID NO: 4067284 - RNA, 22 nt, Vaccinia virus
uacaagaaauauuuccauccga

SEQ ID NO: 4067285 - RNA, 17 nt, Vaccinia virus
uacaaguuauacgucau

SEQ ID NO: 4067286 - RNA, 20 nt, Vaccinia virus
uacaauaaacuccguagaga

SEQ ID NO: 4067287 - RNA, 14 nt, Vaccinia virus
uacaauaacuacau

SEQ ID NO: 4067288 - RNA, 16 nt, Vaccinia virus
uacaauacacacaaua

SEQ ID NO: 4067289 - RNA, 15 nt, Vaccinia virus
uacaauauuuacauu

SEQ ID NO: 4067290 - RNA, 17 nt, Vaccinia virus
uacaaucagauauaucu

SEQ ID NO: 4067291 - RNA, 22 nt, Vaccinia virus
uacaauuuguggaauuaauauu

SEQ ID NO: 4067292 - RNA, 15 nt, Vaccinia virus
uacacauaauuauuc

SEQ ID NO: 4067293 - RNA, 19 nt, Vaccinia virus
uacacauaguguuacaaaa

SEQ ID NO: 4067294 - RNA, 20 nt, Vaccinia virus
uacagaaacuguaaagaaca

SEQ ID NO: 4067295 - RNA, 13 nt, Vaccinia virus
uacagacauuaag

SEQ ID NO: 4067296 - RNA, 20 nt, Vaccinia virus
uacagagacuuuaucuaaau

SEQ ID NO: 4067297 - RNA, 20 nt, Vaccinia virus
uacagagauguacagcuucc

SEQ ID NO: 4067298 - RNA, 13 nt, Vaccinia virus
uacagauguuaca

SEQ ID NO: 4067299 - RNA, 20 nt, Vaccinia virus
uacagauguuacaaauguag

SEQ ID NO: 4067300 - RNA, 17 nt, Vaccinia virus
uacaguaaaaauaacua

SEQ ID NO: 4067301 - RNA, 13 nt, Vaccinia virus
uacaguucuuggc

SEQ ID NO: 4067302 - RNA, 15 nt, Vaccinia virus
uacaguucuuuucua

SEQ ID NO: 4067303 - RNA, 18 nt, Vaccinia virus
uacauacgaauaacaaaa

SEQ ID NO: 4067304 - RNA, 19 nt, Vaccinia virus
uacauaugacaaacauugu

SEQ ID NO: 4067305 - RNA, 15 nt, Vaccinia virus
uacauauucuaauga

SEQ ID NO: 4067306 - RNA, 20 nt, Vaccinia virus
uacauauucuccauaauggu

SEQ ID NO: 4067307 - RNA, 19 nt, Vaccinia virus
uacaucaugaaaugaugau

SEQ ID NO: 4067308 - RNA, 17 nt, Vaccinia virus
uacauccgaaauacaaa

SEQ ID NO: 4067309 - RNA, 19 nt, Vaccinia virus
uacauccgauuaucaagau

SEQ ID NO: 4067310 - RNA, 17 nt, Vaccinia virus
uacaucgucucaucugu

SEQ ID NO: 4067311 - RNA, 20 nt, Vaccinia virus
uacaucuaaauuuuuacuau

SEQ ID NO: 4067312 - RNA, 18 nt, Vaccinia virus
uacaucuaguucuuugaa

SEQ ID NO: 4067313 - RNA, 16 nt, Vaccinia virus
uacaucuguuuccuau

SEQ ID NO: 4067314 - RNA, 17 nt, Vaccinia virus
uacaugauauuaucaug

SEQ ID NO: 4067315 - RNA, 15 nt, Vaccinia virus
uacaugcuacaugug

SEQ ID NO: 4067316 - RNA, 14 nt, Vaccinia virus
uacaugucuaaugu

SEQ ID NO: 4067317 - RNA, 22 nt, Vaccinia virus
uaccaaagacuuugaaauauag

SEQ ID NO: 4067318 - RNA, 14 nt, Vaccinia virus
uaccaaucauuuau

SEQ ID NO: 4067319 - RNA, 14 nt, Vaccinia virus
uaccacauacaaaa

SEQ ID NO: 4067320 - RNA, 14 nt, Vaccinia virus
uaccacuagcaaaa

SEQ ID NO: 4067321 - RNA, 12 nt, Vaccinia virus
uaccauacauua

SEQ ID NO: 4067322 - RNA, 18 nt, Vaccinia virus
uaccaucaacuacuguag

SEQ ID NO: 4067323 - RNA, 12 nt, Vaccinia virus
uaccaucauuau

SEQ ID NO: 4067324 - RNA, 13 nt, Vaccinia virus
uaccauuauuaau

SEQ ID NO: 4067325 - RNA, 19 nt, Vaccinia virus
uacccaaaucugaaaauaa

SEQ ID NO: 4067326 - RNA, 13 nt, Vaccinia virus
uacccaucaugua

SEQ ID NO: 4067327 - RNA, 16 nt, Vaccinia virus
uacccauccaauacua

SEQ ID NO: 4067328 - RNA, 21 nt, Vaccinia virus
uaccccucauaguauuaauau

SEQ ID NO: 4067329 - RNA, 13 nt, Vaccinia virus
uaccuacacuauu

SEQ ID NO: 4067330 - RNA, 23 nt, Vaccinia virus
uaccuaucaaggaacaaauauug

SEQ ID NO: 4067331 - RNA, 15 nt, Vaccinia virus
uaccucuacacuauu

SEQ ID NO: 4067332 - RNA, 16 nt, Vaccinia virus
uaccucuucugauauc

SEQ ID NO: 4067333 - RNA, 12 nt, Vaccinia virus
uaccuuaaugua

SEQ ID NO: 4067334 - RNA, 15 nt, Vaccinia virus
uaccuuuaaaauaua

SEQ ID NO: 4067335 - RNA, 21 nt, Vaccinia virus
uacgagaaauuaauuauugua

SEQ ID NO: 4067336 - RNA, 15 nt, Vaccinia virus
uacgcgcacacaaua

SEQ ID NO: 4067337 - RNA, 18 nt, Vaccinia virus
uacgguugauucaaaaau

SEQ ID NO: 4067338 - RNA, 12 nt, Vaccinia virus
uacguaaaaaag

SEQ ID NO: 4067339 - RNA, 16 nt, Vaccinia virus
uacguaucauaucuuc

SEQ ID NO: 4067340 - RNA, 14 nt, Vaccinia virus
uacguaucuauaau

SEQ ID NO: 4067341 - RNA, 19 nt, Vaccinia virus
uacguauuucguaccugua

SEQ ID NO: 4067342 - RNA, 20 nt, Vaccinia virus
uacgucucagaauucuaaau

SEQ ID NO: 4067343 - RNA, 16 nt, Vaccinia virus
uacguugauuucuagc

SEQ ID NO: 4067344 - RNA, 17 nt, Vaccinia virus
uacguuuacacaauugu

SEQ ID NO: 4067345 - RNA, 23 nt, Vaccinia virus
uacuaaaaaauguagaaauugaa

SEQ ID NO: 4067346 - RNA, 20 nt, Vaccinia virus
uacuaaaucuguauaucuuu

SEQ ID NO: 4067347 - RNA, 12 nt, Vaccinia virus
uacuaagaaagu

SEQ ID NO: 4067348 - RNA, 23 nt, Vaccinia virus
uacuaagaggaugaucuguauua

SEQ ID NO: 4067349 - RNA, 14 nt, Vaccinia virus
uacuaauagaugua

SEQ ID NO: 4067350 - RNA, 18 nt, Vaccinia virus
uacuaauaggucuaaaaa

SEQ ID NO: 4067351 - RNA, 22 nt, Vaccinia virus
uacuaauaggucuaaaaaccaa

SEQ ID NO: 4067352 - RNA, 14 nt, Vaccinia virus
uacuaaucaauaau

SEQ ID NO: 4067353 - RNA, 23 nt, Vaccinia virus
uacuacugaguauaaauaauuca

SEQ ID NO: 4067354 - RNA, 15 nt, Vaccinia virus
uacuagcucucaagu

SEQ ID NO: 4067355 - RNA, 14 nt, Vaccinia virus
uacuauacgcaaug

SEQ ID NO: 4067356 - RNA, 16 nt, Vaccinia virus
uacuauauguauucuu

SEQ ID NO: 4067357 - RNA, 12 nt, Vaccinia virus
uacuaucaaaau

SEQ ID NO: 4067358 - RNA, 13 nt, Vaccinia virus
uacuaucuuuaau

SEQ ID NO: 4067359 - RNA, 16 nt, Vaccinia virus
uacuauuuauuucuau

SEQ ID NO: 4067360 - RNA, 23 nt, Vaccinia virus
uacuauuuuuuacauuacuacau

SEQ ID NO: 4067361 - RNA, 17 nt, Vaccinia virus
uacucaaucaauagcaa

SEQ ID NO: 4067362 - RNA, 19 nt, Vaccinia virus
uacucuagauaaaaucacu

SEQ ID NO: 4067363 - RNA, 19 nt, Vaccinia virus
uacucuauaaaauacuaau

SEQ ID NO: 4067364 - RNA, 23 nt, Vaccinia virus
uacucuauagucagaauuuucau

SEQ ID NO: 4067365 - RNA, 23 nt, Vaccinia virus
uacugagaauugacgaaacaaug

SEQ ID NO: 4067366 - RNA, 19 nt, Vaccinia virus
uacugauaacaaaauauua

SEQ ID NO: 4067367 - RNA, 16 nt, Vaccinia virus
uacuggauucauacau

SEQ ID NO: 4067368 - RNA, 21 nt, Vaccinia virus
uacuguauguugcuacaugua

SEQ ID NO: 4067369 - RNA, 17 nt, Vaccinia virus
uacuuaaagauagaaau

SEQ ID NO: 4067370 - RNA, 13 nt, Vaccinia virus
uacuuacaucauu

SEQ ID NO: 4067371 - RNA, 15 nt, Vaccinia virus
uacuuaugacaaagu

SEQ ID NO: 4067372 - RNA, 17 nt, Vaccinia virus
uacuucaccacccuugu

SEQ ID NO: 4067373 - RNA, 13 nt, Vaccinia virus
uacuucuguacaa

SEQ ID NO: 4067374 - RNA, 22 nt, Vaccinia virus
uacuucuuccacuguccaaaau

SEQ ID NO: 4067375 - RNA, 19 nt, Vaccinia virus
uacuucuuuacgguaucua

SEQ ID NO: 4067376 - RNA, 17 nt, Vaccinia virus
uacuugaaauucuccag

SEQ ID NO: 4067377 - RNA, 21 nt, Vaccinia virus
uacuugacaaaaauugucacu

SEQ ID NO: 4067378 - RNA, 18 nt, Vaccinia virus
uacuuuacaaacgaugua

SEQ ID NO: 4067379 - RNA, 13 nt, Vaccinia virus
uacuuuacauaua

SEQ ID NO: 4067380 - RNA, 16 nt, Vaccinia virus
uacuuuauuacuccau

SEQ ID NO: 4067381 - RNA, 13 nt, Vaccinia virus
uacuuucuaauau

SEQ ID NO: 4067382 - RNA, 18 nt, Vaccinia virus
uacuuuuaguucuuuuag

SEQ ID NO: 4067383 - RNA, 16 nt, Vaccinia virus
uacuuuuguuacuaau

SEQ ID NO: 4067384 - RNA, 17 nt, Vaccinia virus
uagaaaaaaugaugcug

SEQ ID NO: 4067385 - RNA, 18 nt, Vaccinia virus
uagaaaauggauuuauug

SEQ ID NO: 4067386 - RNA, 20 nt, Vaccinia virus
uagaaaauucaucuaaacaa

SEQ ID NO: 4067387 - RNA, 18 nt, Vaccinia virus
uagaaacuggagaaauca

SEQ ID NO: 4067388 - RNA, 17 nt, Vaccinia virus
uagaaagaaaauaucua

SEQ ID NO: 4067389 - RNA, 13 nt, Vaccinia virus
uagaacaacucuc

SEQ ID NO: 4067390 - RNA, 14 nt, Vaccinia virus
uagaacguggauau

SEQ ID NO: 4067391 - RNA, 21 nt, Vaccinia virus
uagaacuuacugacaaaguua

SEQ ID NO: 4067392 - RNA, 16 nt, Vaccinia virus
uagaagccaauaucug

SEQ ID NO: 4067393 - RNA, 19 nt, Vaccinia virus
uagaagguucauauguugu

SEQ ID NO: 4067394 - RNA, 20 nt, Vaccinia virus
uagaaguuuuaaaaauacuu

SEQ ID NO: 4067395 - RNA, 14 nt, Vaccinia virus
uagaauaaauuagc

SEQ ID NO: 4067396 - RNA, 14 nt, Vaccinia virus
uagaaugaagaaug

SEQ ID NO: 4067397 - RNA, 13 nt, Vaccinia virus
uagaauggaugaa

SEQ ID NO: 4067398 - RNA, 22 nt, Vaccinia virus
uagaauguugagcuaauuuuug

SEQ ID NO: 4067399 - RNA, 21 nt, Vaccinia virus
uagaauucucuucauaucauu

SEQ ID NO: 4067400 - RNA, 16 nt, Vaccinia virus
uagaauuucauuuugu

SEQ ID NO: 4067401 - RNA, 23 nt, Vaccinia virus
uagacauaccggaucuacguucu

SEQ ID NO: 4067402 - RNA, 16 nt, Vaccinia virus
uagacauuuuuagaga

SEQ ID NO: 4067403 - RNA, 16 nt, Vaccinia virus
uaugcauguuucauaa

SEQ ID NO: 4067404 - RNA, 19 nt, Vaccinia virus
uaugccgugggaugauguc

SEQ ID NO: 4067405 - RNA, 17 nt, Vaccinia virus
uaugcgucgaauuaaau

SEQ ID NO: 4067406 - RNA, 16 nt, Vaccinia virus
uaugcucaugaacauu

SEQ ID NO: 4067407 - RNA, 19 nt, Vaccinia virus
uauggaaacuauaauuuug

SEQ ID NO: 4067408 - RNA, 21 nt, Vaccinia virus
uauggaugccaacguaguauc

SEQ ID NO: 4067409 - RNA, 20 nt, Vaccinia virus
uauggauuaccauggaugac

SEQ ID NO: 4067410 - RNA, 15 nt, Vaccinia virus
uauguaucaaagaua

SEQ ID NO: 4067411 - RNA, 14 nt, Vaccinia virus
uauguauucagaau

SEQ ID NO: 4067412 - RNA, 15 nt, Vaccinia virus
uauguguuuacagua

SEQ ID NO: 4067413 - RNA, 21 nt, Vaccinia virus
uauguuuauuagcguacacau

SEQ ID NO: 4067414 - RNA, 14 nt, Vaccinia virus
uauguuucaaucau

SEQ ID NO: 4067415 - RNA, 16 nt, Vaccinia virus
uauguuuuaaauauca

SEQ ID NO: 4067416 - RNA, 19 nt, Vaccinia virus
uauuaaaguacguaaaucu

SEQ ID NO: 4067417 - RNA, 14 nt, Vaccinia virus
uauuaaaucaugaa

SEQ ID NO: 4067418 - RNA, 17 nt, Vaccinia virus
uauuaacccaagcagca

SEQ ID NO: 4067419 - RNA, 18 nt, Vaccinia virus
uauuaacgcaccuauaaa

SEQ ID NO: 4067420 - RNA, 14 nt, Vaccinia virus
uauuaagauuaacu

SEQ ID NO: 4067421 - RNA, 15 nt, Vaccinia virus
uauuaagauuaucua

SEQ ID NO: 4067422 - RNA, 12 nt, Vaccinia virus
uauuaagcaaua

SEQ ID NO: 4067423 - RNA, 23 nt, Vaccinia virus
uauuaagccgccauuaauuacuu

SEQ ID NO: 4067424 - RNA, 19 nt, Vaccinia virus
uauuacaaaauauuuugag

SEQ ID NO: 4067425 - RNA, 14 nt, Vaccinia virus
uauuacaaccaaug

SEQ ID NO: 4067426 - RNA, 22 nt, Vaccinia virus
uauuacaauuugcauguugcau

SEQ ID NO: 4067427 - RNA, 19 nt, Vaccinia virus
uauuacgcuuaccaucaaa

SEQ ID NO: 4067428 - RNA, 14 nt, Vaccinia virus
uauuacuaaacauu

SEQ ID NO: 4067429 - RNA, 12 nt, Vaccinia virus
uauuagaauuaa

SEQ ID NO: 4067430 - RNA, 17 nt, Vaccinia virus
uauuagagauaccaaag

SEQ ID NO: 4067431 - RNA, 16 nt, Vaccinia virus
uauuagagguaaugau

SEQ ID NO: 4067432 - RNA, 17 nt, Vaccinia virus
uauuagagugucaauau

SEQ ID NO: 4067433 - RNA, 19 nt, Vaccinia virus
uauuagauaaauuuaucaa

SEQ ID NO: 4067434 - RNA, 15 nt, Vaccinia virus
uauuaguguuuagau

SEQ ID NO: 4067435 - RNA, 19 nt, Vaccinia virus
uauuaguugaugugacugu

SEQ ID NO: 4067436 - RNA, 13 nt, Vaccinia virus
uauuauacaugug

SEQ ID NO: 4067437 - RNA, 22 nt, Vaccinia virus
uauuaucaaagucacaaagcaa

SEQ ID NO: 4067438 - RNA, 16 nt, Vaccinia virus
uauuauccaauacaga

SEQ ID NO: 4067439 - RNA, 18 nt, Vaccinia virus
uauuauccaauuauuaua

SEQ ID NO: 4067440 - RNA, 18 nt, Vaccinia virus
uauuaucguuuguaacau

SEQ ID NO: 4067441 - RNA, 13 nt, Vaccinia virus
uauuauguuuauc

SEQ ID NO: 4067442 - RNA, 14 nt, Vaccinia virus
uauuauuacguguu

SEQ ID NO: 4067443 - RNA, 17 nt, Vaccinia virus
uauuauucauuuucuau

SEQ ID NO: 4067444 - RNA, 14 nt, Vaccinia virus
uauucaacauaucu

SEQ ID NO: 4067445 - RNA, 22 nt, Vaccinia virus
uauucaaugauccauuaucaua

SEQ ID NO: 4067446 - RNA, 21 nt, Vaccinia virus
uauucacaagaugaauucagu

SEQ ID NO: 4067447 - RNA, 15 nt, Vaccinia virus
uauucacuuaacagu

SEQ ID NO: 4067448 - RNA, 15 nt, Vaccinia virus
uauucaguuuauaga

SEQ ID NO: 4067449 - RNA, 19 nt, Vaccinia virus
uauucauaaaacauaauca

SEQ ID NO: 4067450 - RNA, 16 nt, Vaccinia virus
uauucauauucuuaaa

SEQ ID NO: 4067451 - RNA, 14 nt, Vaccinia virus
uauucauucaaugu

SEQ ID NO: 4067452 - RNA, 12 nt, Vaccinia virus
uauuccaaucau

SEQ ID NO: 4067453 - RNA, 24 nt, Vaccinia virus
uauuccaugaauaagugugaugau

SEQ ID NO: 4067454 - RNA, 16 nt, Vaccinia virus
uauucccaaacauaca

SEQ ID NO: 4067455 - RNA, 23 nt, Vaccinia virus
uauucggagcgcgcaauuuuuaa

SEQ ID NO: 4067456 - RNA, 19 nt, Vaccinia virus
uauucgucccuacuauaaa

SEQ ID NO: 4067457 - RNA, 21 nt, Vaccinia virus
uauucgucgucgacuaucaac

SEQ ID NO: 4067458 - RNA, 21 nt, Vaccinia virus
uauucguuguauucauucuaa

SEQ ID NO: 4067459 - RNA, 20 nt, Vaccinia virus
uauucuaccauagcaaaucu

SEQ ID NO: 4067460 - RNA, 22 nt, Vaccinia virus
uauucugacgucguucuacaua

SEQ ID NO: 4067461 - RNA, 16 nt, Vaccinia virus
uauucugauucuucua

SEQ ID NO: 4067462 - RNA, 19 nt, Vaccinia virus
uauucuuaaaagguuucau

SEQ ID NO: 4067463 - RNA, 17 nt, Vaccinia virus
uauucuuaaauuucaua

SEQ ID NO: 4067464 - RNA, 22 nt, Vaccinia virus
uauugaaugacguuuucucaua

SEQ ID NO: 4067465 - RNA, 15 nt, Vaccinia virus
uauugagauuucuga

SEQ ID NO: 4067466 - RNA, 14 nt, Vaccinia virus
uauugaguggaaag

SEQ ID NO: 4067467 - RNA, 18 nt, Vaccinia virus
uauugauaaaauuaauga

SEQ ID NO: 4067468 - RNA, 19 nt, Vaccinia virus
uauugccauaauuuucaua

SEQ ID NO: 4067469 - RNA, 14 nt, Vaccinia virus
uauugcuacauaau

SEQ ID NO: 4067470 - RNA, 20 nt, Vaccinia virus
uauugcuuuccuuuaucauu

SEQ ID NO: 4067471 - RNA, 20 nt, Vaccinia virus
uauuggaaaggcguuaucua

SEQ ID NO: 4067472 - RNA, 17 nt, Vaccinia virus
uauuggugcauuaauaa

SEQ ID NO: 4067473 - RNA, 14 nt, Vaccinia virus
uauugucgagcaua

SEQ ID NO: 4067474 - RNA, 17 nt, Vaccinia virus
uauugucucgucaaugu

SEQ ID NO: 4067475 - RNA, 15 nt, Vaccinia virus
uauugucuucuacau

SEQ ID NO: 4067476 - RNA, 13 nt, Vaccinia virus
uauuguuaucgua

SEQ ID NO: 4067477 - RNA, 14 nt, Vaccinia virus
uauuguuugagaac

SEQ ID NO: 4067478 - RNA, 14 nt, Vaccinia virus
uauuuaaaugacuu

SEQ ID NO: 4067479 - RNA, 22 nt, Vaccinia virus
uauuuaagaguggauucuucua

SEQ ID NO: 4067480 - RNA, 16 nt, Vaccinia virus
uauuuacaaaauucau

SEQ ID NO: 4067481 - RNA, 20 nt, Vaccinia virus
uauuuaccgaacaggcauuu

SEQ ID NO: 4067482 - RNA, 15 nt, Vaccinia virus
uauuuagauacagau

SEQ ID NO: 4067483 - RNA, 21 nt, Vaccinia virus
uauuuauaaacuuuauccaua

SEQ ID NO: 4067484 - RNA, 13 nt, Vaccinia virus
uauuuauacuacu

SEQ ID NO: 4067485 - RNA, 19 nt, Vaccinia virus
uauuuauccguaaaaaugu

SEQ ID NO: 4067486 - RNA, 20 nt, Vaccinia virus
uauuucaaaauuauuuacca

SEQ ID NO: 4067487 - RNA, 17 nt, Vaccinia virus
uauuuccagaugaugau

SEQ ID NO: 4067488 - RNA, 17 nt, Vaccinia virus
uauuuccaucaugaucu

SEQ ID NO: 4067489 - RNA, 21 nt, Vaccinia virus
uauuuccuguuccguuaacau

SEQ ID NO: 4067490 - RNA, 19 nt, Vaccinia virus
uauuucuucgcuuuauaua

SEQ ID NO: 4067491 - RNA, 22 nt, Vaccinia virus
uauuugagaaauauguauacau

SEQ ID NO: 4067492 - RNA, 16 nt, Vaccinia virus
uauuugauauacuaag

SEQ ID NO: 4067493 - RNA, 17 nt, Vaccinia virus
uauuuuaauacauguau

SEQ ID NO: 4067494 - RNA, 12 nt, Vaccinia virus
uauuuuacacau

SEQ ID NO: 4067495 - RNA, 13 nt, Vaccinia virus
uauuuuacuaaau

SEQ ID NO: 4067496 - RNA, 12 nt, Vaccinia virus
uauuuucuucua

SEQ ID NO: 4067497 - RNA, 21 nt, Vaccinia virus
uauuuugauaggaucuauaau

SEQ ID NO: 4067498 - RNA, 19 nt, Vaccinia virus
uauuuuuccauucuguuuu

SEQ ID NO: 4067499 - RNA, 14 nt, Vaccinia virus
uauuuuuuaugaua

SEQ ID NO: 4067500 - RNA, 17 nt, Vaccinia virus
ucaaaaaguaagauauu

SEQ ID NO: 4067501 - RNA, 16 nt, Vaccinia virus
ucaaaauauguuaugu

SEQ ID NO: 4067502 - RNA, 17 nt, Vaccinia virus
ucaaaauauguuauguu

SEQ ID NO: 4067503 - RNA, 16 nt, Vaccinia virus
ucaaacacgauauuca

SEQ ID NO: 4067504 - RNA, 13 nt, Vaccinia virus
ucaaacaguuugg

SEQ ID NO: 4067505 - RNA, 15 nt, Vaccinia virus
ucaaacucgauauau

SEQ ID NO: 4067506 - RNA, 12 nt, Vaccinia virus
ucaaagaaauaa

SEQ ID NO: 4067507 - RNA, 19 nt, Vaccinia virus
ucaaaggaugaaagaaagc

SEQ ID NO: 4067508 - RNA, 19 nt, Vaccinia virus
ucaaagggaccuaaaucua

SEQ ID NO: 4067509 - RNA, 19 nt, Vaccinia virus
ucaaaguccggauguauua

SEQ ID NO: 4067510 - RNA, 16 nt, Vaccinia virus
ucaaagucguuuauau

SEQ ID NO: 4067511 - RNA, 14 nt, Vaccinia virus
ucaaauacuucaaa

SEQ ID NO: 4067512 - RNA, 16 nt, Vaccinia virus
ucaaauuagauuucga

SEQ ID NO: 4067513 - RNA, 16 nt, Vaccinia virus
ucaaauuguccuauau

SEQ ID NO: 4067514 - RNA, 19 nt, Vaccinia virus
ucaaauuuauauccuauau

SEQ ID NO: 4067515 - RNA, 21 nt, Vaccinia virus
ucaacaauguuugucauaugu

SEQ ID NO: 4067516 - RNA, 23 nt, Vaccinia virus
ucaacaauguuugucauauguau

SEQ ID NO: 4067517 - RNA, 22 nt, Vaccinia virus
ucaacaucugaugcgcuaagac

SEQ ID NO: 4067518 - RNA, 18 nt, Vaccinia virus
ucaacauguuuaauauau

SEQ ID NO: 4067519 - RNA, 17 nt, Vaccinia virus
ucaaccaccgaugaugc

SEQ ID NO: 4067520 - RNA, 20 nt, Vaccinia virus
ucaacgaucuaauacaaaau

SEQ ID NO: 4067521 - RNA, 18 nt, Vaccinia virus
ucaacguagaaaaaauag

SEQ ID NO: 4067522 - RNA, 16 nt, Vaccinia virus
ucaacgucuaauguau

SEQ ID NO: 4067523 - RNA, 20 nt, Vaccinia virus
ucaacuaucguuggaaaaug

SEQ ID NO: 4067524 - RNA, 17 nt, Vaccinia virus
ucaagccggcuauauau

SEQ ID NO: 4067525 - RNA, 18 nt, Vaccinia virus
ucaaggaagaagaugcua

SEQ ID NO: 4067526 - RNA, 17 nt, Vaccinia virus
ucaaguaaagauuucaa

SEQ ID NO: 4067527 - RNA, 22 nt, Vaccinia virus
ucucugaauauagaacaucauu

SEQ ID NO: 4067528 - RNA, 15 nt, Vaccinia virus
ucucugguuugcuac

SEQ ID NO: 4067529 - RNA, 22 nt, Vaccinia virus
ucugaaauaacguauuuaaaca

SEQ ID NO: 4067530 - RNA, 20 nt, Vaccinia virus
ucugaaccaguuaauguaua

SEQ ID NO: 4067531 - RNA, 18 nt, Vaccinia virus
ucugacaauauuuaguuu

SEQ ID NO: 4067532 - RNA, 14 nt, Vaccinia virus
ucugacauaaacau

SEQ ID NO: 4067533 - RNA, 13 nt, Vaccinia virus
ucugagaauggau

SEQ ID NO: 4067534 - RNA, 23 nt, Vaccinia virus
ucugaucuuaacuccucuauuaa

SEQ ID NO: 4067535 - RNA, 20 nt, Vaccinia virus
ucugauuagaagccacuaua

SEQ ID NO: 4067536 - RNA, 12 nt, Vaccinia virus
ucugauuccacc

SEQ ID NO: 4067537 - RNA, 20 nt, Vaccinia virus
ucugcaaacuuaacagcucu

SEQ ID NO: 4067538 - RNA, 19 nt, Vaccinia virus
ucugcguguaaaaaguugu

SEQ ID NO: 4067539 - RNA, 17 nt, Vaccinia virus
ucuggaacaauuacaga

SEQ ID NO: 4067540 - RNA, 20 nt, Vaccinia virus
ucuggaaugacgaauccugu

SEQ ID NO: 4067541 - RNA, 14 nt, Vaccinia virus
ucuguaaaaguugu

SEQ ID NO: 4067542 - RNA, 19 nt, Vaccinia virus
ucuguacuucuguacaaaa

SEQ ID NO: 4067543 - RNA, 18 nt, Vaccinia virus
ucuguauuucauuguaaa

SEQ ID NO: 4067544 - RNA, 15 nt, Vaccinia virus
ucugucagaaaauac

SEQ ID NO: 4067545 - RNA, 16 nt, Vaccinia virus
ucugucauauuuagau

SEQ ID NO: 4067546 - RNA, 18 nt, Vaccinia virus
ucuguccaauuaaaugua

SEQ ID NO: 4067547 - RNA, 16 nt, Vaccinia virus
ucugugacuaugaauu

SEQ ID NO: 4067548 - RNA, 16 nt, Vaccinia virus
ucuguuaauuuuacua

SEQ ID NO: 4067549 - RNA, 18 nt, Vaccinia virus
ucuguuaccauaauuccu

SEQ ID NO: 4067550 - RNA, 17 nt, Vaccinia virus
ucuuaaaagguuucaua

SEQ ID NO: 4067551 - RNA, 18 nt, Vaccinia virus
ucuuaacacucucugcca

SEQ ID NO: 4067552 - RNA, 21 nt, Vaccinia virus
ucuuaacuacauucacaaaaa

SEQ ID NO: 4067553 - RNA, 22 nt, Vaccinia virus
ucuuaauagacacaucugccau

SEQ ID NO: 4067554 - RNA, 12 nt, Vaccinia virus
ucuuacaauguu

SEQ ID NO: 4067555 - RNA, 22 nt, Vaccinia virus
ucuuacauauuuuuuucuuauu

SEQ ID NO: 4067556 - RNA, 14 nt, Vaccinia virus
ucuuagaacaacau

SEQ ID NO: 4067557 - RNA, 14 nt, Vaccinia virus
ucuuagcgaaugau

SEQ ID NO: 4067558 - RNA, 23 nt, Vaccinia virus
ucuuaguuaauggagaaauacuu

SEQ ID NO: 4067559 - RNA, 21 nt, Vaccinia virus
ucuuauaauuguaacauccuu

SEQ ID NO: 4067560 - RNA, 16 nt, Vaccinia virus
ucuuauccauuuauaa

SEQ ID NO: 4067561 - RNA, 23 nt, Vaccinia virus
ucuucaaaguuucugaaauaaga

SEQ ID NO: 4067562 - RNA, 14 nt, Vaccinia virus
ucuucaucaaacag

SEQ ID NO: 4067563 - RNA, 21 nt, Vaccinia virus
ucuuccagcauccguuucuaa

SEQ ID NO: 4067564 - RNA, 19 nt, Vaccinia virus
ucuuccauguccaauauga

SEQ ID NO: 4067565 - RNA, 22 nt, Vaccinia virus
ucuuccggagaccccauaaaua

SEQ ID NO: 4067566 - RNA, 20 nt, Vaccinia virus
ucuuccugguauauuucuau

SEQ ID NO: 4067567 - RNA, 14 nt, Vaccinia virus
ucuuccuucuuauu

SEQ ID NO: 4067568 - RNA, 15 nt, Vaccinia virus
ucuucgaaaagaaac

SEQ ID NO: 4067569 - RNA, 20 nt, Vaccinia virus
ucuucgaaaagaaacagaua

SEQ ID NO: 4067570 - RNA, 20 nt, Vaccinia virus
ucuucggcgguuuucaugga

SEQ ID NO: 4067571 - RNA, 15 nt, Vaccinia virus
ucuucuauucuagaa

SEQ ID NO: 4067572 - RNA, 21 nt, Vaccinia virus
ucuucugaauucgaggaagau

SEQ ID NO: 4067573 - RNA, 16 nt, Vaccinia virus
ucuucugucaauugau

SEQ ID NO: 4067574 - RNA, 22 nt, Vaccinia virus
ucuucuuauaagauuguagaau

SEQ ID NO: 4067575 - RNA, 23 nt, Vaccinia virus
ucuucuugagaucccacaucauu

SEQ ID NO: 4067576 - RNA, 19 nt, Vaccinia virus
ucuugaagccauacauucg

SEQ ID NO: 4067577 - RNA, 23 nt, Vaccinia virus
ucuugacugucgcuaauaucuaa

SEQ ID NO: 4067578 - RNA, 18 nt, Vaccinia virus
ucuugcacgcguacauuu

SEQ ID NO: 4067579 - RNA, 14 nt, Vaccinia virus
ucuugcuacaaaau

SEQ ID NO: 4067580 - RNA, 19 nt, Vaccinia virus
ucuuggauaaaagcaucca

SEQ ID NO: 4067581 - RNA, 18 nt, Vaccinia virus
ucuuuaaaauuucauaga

SEQ ID NO: 4067582 - RNA, 23 nt, Vaccinia virus
ucuuuaauaucgacaauuucaua

SEQ ID NO: 4067583 - RNA, 13 nt, Vaccinia virus
ucuuuaauccaau

SEQ ID NO: 4067584 - RNA, 22 nt, Vaccinia virus
ucuuuacccauccaauacuacu

SEQ ID NO: 4067585 - RNA, 20 nt, Vaccinia virus
ucuuuaguaaacauaucaua

SEQ ID NO: 4067586 - RNA, 16 nt, Vaccinia virus
ucuuuaucucuuagua

SEQ ID NO: 4067587 - RNA, 16 nt, Vaccinia virus
ucuuuccauaguacau

SEQ ID NO: 4067588 - RNA, 18 nt, Vaccinia virus
ucuuucuccgccuauuaa

SEQ ID NO: 4067589 - RNA, 21 nt, Vaccinia virus
ucuuugaccaacgauuuagaa

SEQ ID NO: 4067590 - RNA, 18 nt, Vaccinia virus
ucuuuuaguuuaucaaaa

SEQ ID NO: 4067591 - RNA, 20 nt, Vaccinia virus
ucuuuuggguaauuguacaa

SEQ ID NO: 4067592 - RNA, 18 nt, Vaccinia virus
ucuuuuucucaaauccau

SEQ ID NO: 4067593 - RNA, 13 nt, Vaccinia virus
ugaaaaaacauua

SEQ ID NO: 4067594 - RNA, 12 nt, Vaccinia virus
ugaaaauacuuu

SEQ ID NO: 4067595 - RNA, 16 nt, Vaccinia virus
ugaaaauuaugauaca

SEQ ID NO: 4067596 - RNA, 12 nt, Vaccinia virus
ugaaaauuggag

SEQ ID NO: 4067597 - RNA, 14 nt, Vaccinia virus
ugaaacuaagucac

SEQ ID NO: 4067598 - RNA, 18 nt, Vaccinia virus
ugaaacuaagucuagaau

SEQ ID NO: 4067599 - RNA, 13 nt, Vaccinia virus
ugaaacuaucuuu

SEQ ID NO: 4067600 - RNA, 16 nt, Vaccinia virus
ugaaagcgagaaauaa

SEQ ID NO: 4067601 - RNA, 14 nt, Vaccinia virus
ugaaauaaagucau

SEQ ID NO: 4067602 - RNA, 17 nt, Vaccinia virus
ugaaauaauuagaacua

SEQ ID NO: 4067603 - RNA, 15 nt, Vaccinia virus
ugaaauauaguaaua

SEQ ID NO: 4067604 - RNA, 14 nt, Vaccinia virus
ugaaauauauacau

SEQ ID NO: 4067605 - RNA, 21 nt, Vaccinia virus
ugaaaucacuucaauaaauga

SEQ ID NO: 4067606 - RNA, 16 nt, Vaccinia virus
ugaaaugauaacuguu

SEQ ID NO: 4067607 - RNA, 19 nt, Vaccinia virus
ugaacaauaauuaauucuu

SEQ ID NO: 4067608 - RNA, 18 nt, Vaccinia virus
ugaacauaaaacuaauau

SEQ ID NO: 4067609 - RNA, 22 nt, Vaccinia virus
ugaaccguauuacucuacagua

SEQ ID NO: 4067610 - RNA, 23 nt, Vaccinia virus
ugaacgcugcccaccucauacau

SEQ ID NO: 4067611 - RNA, 18 nt, Vaccinia virus
ugaacugagauauauaca

SEQ ID NO: 4067612 - RNA, 15 nt, Vaccinia virus
ugaagaaaaauguug

SEQ ID NO: 4067613 - RNA, 21 nt, Vaccinia virus
ugaagaagagguaagauaucu

SEQ ID NO: 4067614 - RNA, 13 nt, Vaccinia virus
ugaagauacuguu

SEQ ID NO: 4067615 - RNA, 20 nt, Vaccinia virus
ugaagauauuauuaaaucau

SEQ ID NO: 4067616 - RNA, 18 nt, Vaccinia virus
ugaagaucuauuuccaga

SEQ ID NO: 4067617 - RNA, 21 nt, Vaccinia virus
ugaagaugugacguacaaaaa

SEQ ID NO: 4067618 - RNA, 22 nt, Vaccinia virus
ugaagcauucuuuccagaacua

SEQ ID NO: 4067619 - RNA, 20 nt, Vaccinia virus
ugaauaucuacaaauuggag

SEQ ID NO: 4067620 - RNA, 21 nt, Vaccinia virus
ugaaucaaauguaacuauuca

SEQ ID NO: 4067621 - RNA, 19 nt, Vaccinia virus
ugaaucauauauguauuca

SEQ ID NO: 4067622 - RNA, 20 nt, Vaccinia virus
ugaaucgauaacucuauuca

SEQ ID NO: 4067623 - RNA, 15 nt, Vaccinia virus
ugaaugaaucagaua

SEQ ID NO: 4067624 - RNA, 21 nt, Vaccinia virus
ugaauggaucaccguguuuau

SEQ ID NO: 4067625 - RNA, 13 nt, Vaccinia virus
ugaauuguuucuu

SEQ ID NO: 4067626 - RNA, 23 nt, Vaccinia virus
ugaauuuauuucagaaauuauuc

SEQ ID NO: 4067627 - RNA, 20 nt, Vaccinia virus
ugaauuucgagauuaaaugc

SEQ ID NO: 4067628 - RNA, 22 nt, Vaccinia virus
ugaauuugauuauuuugaagac

SEQ ID NO: 4067629 - RNA, 17 nt, Vaccinia virus
ugacaacucaaacaucu

SEQ ID NO: 4067630 - RNA, 17 nt, Vaccinia virus
ugacacauuuuacgaua

SEQ ID NO: 4067631 - RNA, 18 nt, Vaccinia virus
ugacaccagaaaacgacg

SEQ ID NO: 4067632 - RNA, 17 nt, Vaccinia virus
ugacagaccagaccuag

SEQ ID NO: 4067633 - RNA, 19 nt, Vaccinia virus
ugacauacauacuaucuuu

SEQ ID NO: 4067634 - RNA, 13 nt, Vaccinia virus
ugacauauuacaa

SEQ ID NO: 4067635 - RNA, 14 nt, Vaccinia virus
ugacauauuacaaa

SEQ ID NO: 4067636 - RNA, 17 nt, Vaccinia virus
ugacaucgcauuuauau

SEQ ID NO: 4067637 - RNA, 16 nt, Vaccinia virus
ugacaucuuguagaac

SEQ ID NO: 4067638 - RNA, 15 nt, Vaccinia virus
ugacauucaaagauc

SEQ ID NO: 4067639 - RNA, 18 nt, Vaccinia virus
ugaccuggaaaaauacuu

SEQ ID NO: 4067640 - RNA, 21 nt, Vaccinia virus
ugacgaaguaacgucauuaaa

SEQ ID NO: 4067641 - RNA, 13 nt, Vaccinia virus
ugacgauauuucu

SEQ ID NO: 4067642 - RNA, 21 nt, Vaccinia virus
ugacggagcccaauuuuggug

SEQ ID NO: 4067643 - RNA, 16 nt, Vaccinia virus
ugacgggauacagauu

SEQ ID NO: 4067644 - RNA, 20 nt, Vaccinia virus
ugacucauggauucauuaau

SEQ ID NO: 4067645 - RNA, 23 nt, Vaccinia virus
ugacuguagauauuauauagaua

SEQ ID NO: 4067646 - RNA, 17 nt, Vaccinia virus
ugacuuucaaaccaauu

SEQ ID NO: 4067647 - RNA, 18 nt, Vaccinia virus
ugagaaugagauucaaaa

SEQ ID NO: 4067648 - RNA, 12 nt, Vaccinia virus
ugagagcaucca

SEQ ID NO: 4067649 - RNA, 15 nt, Vaccinia virus
ugagaguagauauca

SEQ ID NO: 4067650 - RNA, 19 nt, Vaccinia virus
acuuguuggugaaauggua

SEQ ID NO: 4067651 - RNA, 16 nt, Vaccinia virus
acuuuaaacagaaaua

SEQ ID NO: 4067652 - RNA, 11 nt, Vaccinia virus
acuuuaaacau

SEQ ID NO: 4067653 - RNA, 19 nt, Vaccinia virus
acuuuaaauaauuuacaaa

SEQ ID NO: 4067654 - RNA, 14 nt, Vaccinia virus
acuuuaacaaucuc

SEQ ID NO: 4067655 - RNA, 19 nt, Vaccinia virus
acuuuaaccuauacaugau

SEQ ID NO: 4067656 - RNA, 21 nt, Vaccinia virus
acuuuacgcuauuaaucuuua

SEQ ID NO: 4067657 - RNA, 18 nt, Vaccinia virus
acuuuacuuuucuaaauu

SEQ ID NO: 4067658 - RNA, 14 nt, Vaccinia virus
acuuuauauuuccu

SEQ ID NO: 4067659 - RNA, 20 nt, Vaccinia virus
acuuuaucaucuuauauaga

SEQ ID NO: 4067660 - RNA, 19 nt, Vaccinia virus
acuuucagaagaaauggua

SEQ ID NO: 4067661 - RNA, 18 nt, Vaccinia virus
acuuucgaauaaguuugc

SEQ ID NO: 4067662 - RNA, 17 nt, Vaccinia virus
acuuuguggaugaugau

SEQ ID NO: 4067663 - RNA, 14 nt, Vaccinia virus
acuuuguuaauaau

SEQ ID NO: 4067664 - RNA, 19 nt, Vaccinia virus
acuuuuauuuuuagaaagu

SEQ ID NO: 4067665 - RNA, 15 nt, Vaccinia virus
acuuuuguuacuaau

SEQ ID NO: 4067666 - RNA, 13 nt, Vaccinia virus
acuuuuucauaau

SEQ ID NO: 4067667 - RNA, 23 nt, Vaccinia virus
acuuuuugguaggacaaagugaa

SEQ ID NO: 4067668 - RNA, 11 nt, Vaccinia virus
agaaaaacaac

SEQ ID NO: 4067669 - RNA, 11 nt, Vaccinia virus
agaaaacauua

SEQ ID NO: 4067670 - RNA, 15 nt, Vaccinia virus
agaaaacuagauaca

SEQ ID NO: 4067671 - RNA, 16 nt, Vaccinia virus
agaaaacuagauacaa

SEQ ID NO: 4067672 - RNA, 15 nt, Vaccinia virus
agaaaaggauguauu

SEQ ID NO: 4067673 - RNA, 18 nt, Vaccinia virus
agaaaaggauguauuauu

SEQ ID NO: 4067674 - RNA, 23 nt, Vaccinia virus
agaaaauaucuucuccuguaaua

SEQ ID NO: 4067675 - RNA, 11 nt, Vaccinia virus
agaaaauggau

SEQ ID NO: 4067676 - RNA, 22 nt, Vaccinia virus
agaaaaugucucucauaauaaa

SEQ ID NO: 4067677 - RNA, 15 nt, Vaccinia virus
agaaacagaacuauu

SEQ ID NO: 4067678 - RNA, 23 nt, Vaccinia virus
agaaacugacuugauaaaaaugg

SEQ ID NO: 4067679 - RNA, 14 nt, Vaccinia virus
agaaacuuaaagua

SEQ ID NO: 4067680 - RNA, 15 nt, Vaccinia virus
agaaacuuaguacua

SEQ ID NO: 4067681 - RNA, 19 nt, Vaccinia virus
agaaagaaaauaucuauau

SEQ ID NO: 4067682 - RNA, 13 nt, Vaccinia virus
agaaagauuaaau

SEQ ID NO: 4067683 - RNA, 22 nt, Vaccinia virus
agaaaguaugauacaauacuua

SEQ ID NO: 4067684 - RNA, 16 nt, Vaccinia virus
agaaagucagaaucua

SEQ ID NO: 4067685 - RNA, 21 nt, Vaccinia virus
agaaauaaaucagacaauaag

SEQ ID NO: 4067686 - RNA, 23 nt, Vaccinia virus
agaaauaagagacuuaaacaacg

SEQ ID NO: 4067687 - RNA, 16 nt, Vaccinia virus
agaaauaauaagaaua

SEQ ID NO: 4067688 - RNA, 12 nt, Vaccinia virus
agaaauacuuag

SEQ ID NO: 4067689 - RNA, 22 nt, Vaccinia virus
agaaauauauacuucaauugau

SEQ ID NO: 4067690 - RNA, 22 nt, Vaccinia virus
agaaaucauauaugauauuccu

SEQ ID NO: 4067691 - RNA, 19 nt, Vaccinia virus
agaaaucauccguuguuau

SEQ ID NO: 4067692 - RNA, 21 nt, Vaccinia virus
agaaaucauguuauaguguuu

SEQ ID NO: 4067693 - RNA, 21 nt, Vaccinia virus
agaaauccaaauaaaauggau

SEQ ID NO: 4067694 - RNA, 20 nt, Vaccinia virus
agaaaugaaguuaugacauu

SEQ ID NO: 4067695 - RNA, 23 nt, Vaccinia virus
agaaauggaagaguuaaugaaua

SEQ ID NO: 4067696 - RNA, 14 nt, Vaccinia virus
agaaauuaauagaa

SEQ ID NO: 4067697 - RNA, 17 nt, Vaccinia virus
agaaauucuuguucaau

SEQ ID NO: 4067698 - RNA, 23 nt, Vaccinia virus
agaaauuuuugguucuucucuaa

SEQ ID NO: 4067699 - RNA, 13 nt, Vaccinia virus
agaacaaauaaua

SEQ ID NO: 4067700 - RNA, 22 nt, Vaccinia virus
agaacaacgaaauuauacuaga

SEQ ID NO: 4067701 - RNA, 16 nt, Vaccinia virus
agaacacacuuuucuc

SEQ ID NO: 4067702 - RNA, 17 nt, Vaccinia virus
agaacacacuuuucuca

SEQ ID NO: 4067703 - RNA, 21 nt, Vaccinia virus
agaacacuacaguaguaauua

SEQ ID NO: 4067704 - RNA, 21 nt, Vaccinia virus
agaacagaauaaacaaaauaa

SEQ ID NO: 4067705 - RNA, 18 nt, Vaccinia virus
agaacaucauuuccaaau

SEQ ID NO: 4067706 - RNA, 20 nt, Vaccinia virus
agaacaugugugaaaauauu

SEQ ID NO: 4067707 - RNA, 17 nt, Vaccinia virus
agaaccacgaaacuaau

SEQ ID NO: 4067708 - RNA, 21 nt, Vaccinia virus
agaaccgucauucauuuagaa

SEQ ID NO: 4067709 - RNA, 18 nt, Vaccinia virus
agaacggagaauaucuau

SEQ ID NO: 4067710 - RNA, 21 nt, Vaccinia virus
agaacguaaaauacauaugac

SEQ ID NO: 4067711 - RNA, 18 nt, Vaccinia virus
agaacuaauguauauucu

SEQ ID NO: 4067712 - RNA, 14 nt, Vaccinia virus
agaacuuaacaaua

SEQ ID NO: 4067713 - RNA, 16 nt, Vaccinia virus
agaacuuauuaaugaa

SEQ ID NO: 4067714 - RNA, 13 nt, Vaccinia virus
agaagaauaugau

SEQ ID NO: 4067715 - RNA, 16 nt, Vaccinia virus
agaagauuaaacauau

SEQ ID NO: 4067716 - RNA, 13 nt, Vaccinia virus
agaagcaacuuau

SEQ ID NO: 4067717 - RNA, 22 nt, Vaccinia virus
agaagcacucguuauuaauaca

SEQ ID NO: 4067718 - RNA, 17 nt, Vaccinia virus
agaaggaguguuuucuu

SEQ ID NO: 4067719 - RNA, 23 nt, Vaccinia virus
agaaggaguugauuaagaauaua

SEQ ID NO: 4067720 - RNA, 17 nt, Vaccinia virus
agaagugugaauaugau

SEQ ID NO: 4067721 - RNA, 16 nt, Vaccinia virus
agaauaaucagaaauu

SEQ ID NO: 4067722 - RNA, 16 nt, Vaccinia virus
agaauacaaucuguau

SEQ ID NO: 4067723 - RNA, 15 nt, Vaccinia virus
agaauacgaugauau

SEQ ID NO: 4067724 - RNA, 16 nt, Vaccinia virus
agaauacgaugauauu

SEQ ID NO: 4067725 - RNA, 18 nt, Vaccinia virus
agaauacgccaaggaaag

SEQ ID NO: 4067726 - RNA, 21 nt, Vaccinia virus
agaauagcguuuacauauucu

SEQ ID NO: 4067727 - RNA, 23 nt, Vaccinia virus
agaauaguauuugagaaauaugu

SEQ ID NO: 4067728 - RNA, 15 nt, Vaccinia virus
agaauauaaaaaauu

SEQ ID NO: 4067729 - RNA, 16 nt, Vaccinia virus
agaauauaaaaacucu

SEQ ID NO: 4067730 - RNA, 20 nt, Vaccinia virus
agaauauacucaauagaauu

SEQ ID NO: 4067731 - RNA, 13 nt, Vaccinia virus
agaauauauguau

SEQ ID NO: 4067732 - RNA, 21 nt, Vaccinia virus
agaauaugauccguaacauau

SEQ ID NO: 4067733 - RNA, 18 nt, Vaccinia virus
agaaucaauacaaaaauu

SEQ ID NO: 4067734 - RNA, 19 nt, Vaccinia virus
agaaucaauugagaugucu

SEQ ID NO: 4067735 - RNA, 22 nt, Vaccinia virus
agaaucagugaauaaauucaag

SEQ ID NO: 4067736 - RNA, 19 nt, Vaccinia virus
agaaucauaaagaacagua

SEQ ID NO: 4067737 - RNA, 20 nt, Vaccinia virus
agaaucccauagggcuaaau

SEQ ID NO: 4067738 - RNA, 15 nt, Vaccinia virus
agaauccgaaauauu

SEQ ID NO: 4067739 - RNA, 16 nt, Vaccinia virus
agaaucuaaugaugac

SEQ ID NO: 4067740 - RNA, 14 nt, Vaccinia virus
agaaugaaacagua

SEQ ID NO: 4067741 - RNA, 11 nt, Vaccinia virus
agaaugauaug

SEQ ID NO: 4067742 - RNA, 20 nt, Vaccinia virus
agaaugcucuuaaauaaugu

SEQ ID NO: 4067743 - RNA, 12 nt, Vaccinia virus
agaaugcuguua

SEQ ID NO: 4067744 - RNA, 15 nt, Vaccinia virus
agaauggaaauauau

SEQ ID NO: 4067745 - RNA, 15 nt, Vaccinia virus
agaauggaugauauu

SEQ ID NO: 4067746 - RNA, 15 nt, Vaccinia virus
agaauguauaaaccu

SEQ ID NO: 4067747 - RNA, 17 nt, Vaccinia virus
agaaugugauaagaucg

SEQ ID NO: 4067748 - RNA, 12 nt, Vaccinia virus
agaauuagaaca

SEQ ID NO: 4067749 - RNA, 21 nt, Vaccinia virus
agaauuauaccgauagauaau

SEQ ID NO: 4067750 - RNA, 22 nt, Vaccinia virus
agaauucaagucaggaacuauu

SEQ ID NO: 4067751 - RNA, 15 nt, Vaccinia virus
agaauucagauguug

SEQ ID NO: 4067752 - RNA, 22 nt, Vaccinia virus
agaauucuuaguuaauggagaa

SEQ ID NO: 4067753 - RNA, 22 nt, Vaccinia virus
agaauugauaauauaaauauga

SEQ ID NO: 4067754 - RNA, 13 nt, Vaccinia virus
agaauugucuauc

SEQ ID NO: 4067755 - RNA, 15 nt, Vaccinia virus
agaauuuuagacacu

SEQ ID NO: 4067756 - RNA, 16 nt, Vaccinia virus
agaauuuuuauaaauu

SEQ ID NO: 4067757 - RNA, 22 nt, Vaccinia virus
agacaaaacuauuccaauguuu

SEQ ID NO: 4067758 - RNA, 23 nt, Vaccinia virus
agacaagcggguaaaugauuauu

SEQ ID NO: 4067759 - RNA, 20 nt, Vaccinia virus
agacaaucauuuacuaagga

SEQ ID NO: 4067760 - RNA, 22 nt, Vaccinia virus
agacacauaugguuucuaaauc

SEQ ID NO: 4067761 - RNA, 15 nt, Vaccinia virus
agacacgcauguguu

SEQ ID NO: 4067762 - RNA, 12 nt, Vaccinia virus
agacagauuaug

SEQ ID NO: 4067763 - RNA, 13 nt, Vaccinia virus
agacauaaauaaa

SEQ ID NO: 4067764 - RNA, 21 nt, Vaccinia virus
agacauuguugaauucuguga

SEQ ID NO: 4067765 - RNA, 13 nt, Vaccinia virus
agaccagaaaugc

SEQ ID NO: 4067766 - RNA, 17 nt, Vaccinia virus
agacccaaaugucuguu

SEQ ID NO: 4067767 - RNA, 19 nt, Vaccinia virus
agacccuaauuauguagau

SEQ ID NO: 4067768 - RNA, 15 nt, Vaccinia virus
agacgaacaaaauca

SEQ ID NO: 4067769 - RNA, 23 nt, Vaccinia virus
agacgacgacaauaguguucuaa

SEQ ID NO: 4067770 - RNA, 15 nt, Vaccinia virus
agacgacguauuaua

SEQ ID NO: 4067771 - RNA, 16 nt, Vaccinia virus
agacgagauaguuuuc

SEQ ID NO: 4067772 - RNA, 14 nt, Vaccinia virus
agacgcccaaaaua

SEQ ID NO: 4067773 - RNA, 13 nt, Vaccinia virus
agacgcuuauuau

SEQ ID NO: 4067774 - RNA, 17 nt, Vaccinia virus
aguacauggaugauaua

SEQ ID NO: 4067775 - RNA, 17 nt, Vaccinia virus
aguaccgauucuagaua

SEQ ID NO: 4067776 - RNA, 14 nt, Vaccinia virus
aguacgguaauaga

SEQ ID NO: 4067777 - RNA, 23 nt, Vaccinia virus
aguacguacuaugccaaaugaau

SEQ ID NO: 4067778 - RNA, 17 nt, Vaccinia virus
aguacuacuagguagaa

SEQ ID NO: 4067779 - RNA, 16 nt, Vaccinia virus
aguacuaucauaauua

SEQ ID NO: 4067780 - RNA, 14 nt, Vaccinia virus
aguagaaaauauau

SEQ ID NO: 4067781 - RNA, 16 nt, Vaccinia virus
aguagacgacauagaa

SEQ ID NO: 4067782 - RNA, 22 nt, Vaccinia virus
aguagauacauggcuaucgcaa

SEQ ID NO: 4067783 - RNA, 16 nt, Vaccinia virus
aguagauuuuauucca

SEQ ID NO: 4067784 - RNA, 19 nt, Vaccinia virus
aguagcuauaauauauucu

SEQ ID NO: 4067785 - RNA, 20 nt, Vaccinia virus
aguaguucugcgcaaugcau

SEQ ID NO: 4067786 - RNA, 22 nt, Vaccinia virus
aguauaaacgccauaauacuca

SEQ ID NO: 4067787 - RNA, 21 nt, Vaccinia virus
aguauacaucaugaaaugaug

SEQ ID NO: 4067788 - RNA, 16 nt, Vaccinia virus
aguauaccaacuauau

SEQ ID NO: 4067789 - RNA, 24 nt, Vaccinia virus
aguauacgaagaaaaaguaaauac

SEQ ID NO: 4067790 - RNA, 17 nt, Vaccinia virus
aguauagaucaaaagaa

SEQ ID NO: 4067791 - RNA, 19 nt, Vaccinia virus
aguauaucuacacauguau

SEQ ID NO: 4067792 - RNA, 16 nt, Vaccinia virus
aguauaugaacaaacg

SEQ ID NO: 4067793 - RNA, 18 nt, Vaccinia virus
aguauaugauaauauuaa

SEQ ID NO: 4067794 - RNA, 15 nt, Vaccinia virus
aguaucaugaacucu

SEQ ID NO: 4067795 - RNA, 22 nt, Vaccinia virus
aguauccaucgcuucuaucuug

SEQ ID NO: 4067796 - RNA, 19 nt, Vaccinia virus
aguauccauuuuacauuau

SEQ ID NO: 4067797 - RNA, 17 nt, Vaccinia virus
aguaucuucuuuaucua

SEQ ID NO: 4067798 - RNA, 20 nt, Vaccinia virus
aguaucuuuuguucuagaug

SEQ ID NO: 4067799 - RNA, 18 nt, Vaccinia virus
aguaugaagauaaacacu

SEQ ID NO: 4067800 - RNA, 16 nt, Vaccinia virus
aguaugaauaaucuuc

SEQ ID NO: 4067801 - RNA, 18 nt, Vaccinia virus
aguaugauacaauacuua

SEQ ID NO: 4067802 - RNA, 17 nt, Vaccinia virus
aguaugcuaaacuuuau

SEQ ID NO: 4067803 - RNA, 21 nt, Vaccinia virus
aguauggaagaggauuuucua

SEQ ID NO: 4067804 - RNA, 14 nt, Vaccinia virus
aguaugucaugaau

SEQ ID NO: 4067805 - RNA, 12 nt, Vaccinia virus
aguauuaaugau

SEQ ID NO: 4067806 - RNA, 14 nt, Vaccinia virus
aguauucaagucaa

SEQ ID NO: 4067807 - RNA, 15 nt, Vaccinia virus
aguauucaagucaaa

SEQ ID NO: 4067808 - RNA, 16 nt, Vaccinia virus
aguauuccaauaucug

SEQ ID NO: 4067809 - RNA, 23 nt, Vaccinia virus
aguauucuucuugucaucuuguu

SEQ ID NO: 4067810 - RNA, 23 nt, Vaccinia virus
aguauugguaauauauaaacucu

SEQ ID NO: 4067811 - RNA, 13 nt, Vaccinia virus
aguauuuaacaag

SEQ ID NO: 4067812 - RNA, 18 nt, Vaccinia virus
aguauuuauacuacuaau

SEQ ID NO: 4067813 - RNA, 22 nt, Vaccinia virus
aguauuucuguguauuaauaga

SEQ ID NO: 4067814 - RNA, 16 nt, Vaccinia virus
aguauuugauaaaaca

SEQ ID NO: 4067815 - RNA, 19 nt, Vaccinia virus
aguauuuuaauacauguau

SEQ ID NO: 4067816 - RNA, 13 nt, Vaccinia virus
aguauuuuucuaa

SEQ ID NO: 4067817 - RNA, 21 nt, Vaccinia virus
agucaacaaugaaaauggaua

SEQ ID NO: 4067818 - RNA, 19 nt, Vaccinia virus
agucaauauauuaagaagu

SEQ ID NO: 4067819 - RNA, 13 nt, Vaccinia virus
agucaauaucuuu

SEQ ID NO: 4067820 - RNA, 17 nt, Vaccinia virus
agucacgaauaacgaua

SEQ ID NO: 4067821 - RNA, 19 nt, Vaccinia virus
agucagaaccuauuaacga

SEQ ID NO: 4067822 - RNA, 15 nt, Vaccinia virus
agucauaaaaggaua

SEQ ID NO: 4067823 - RNA, 19 nt, Vaccinia virus
agucauaaaaggauacuaa

SEQ ID NO: 4067824 - RNA, 17 nt, Vaccinia virus
agucauacguaaugaag

SEQ ID NO: 4067825 - RNA, 13 nt, Vaccinia virus
agucauaucuaga

SEQ ID NO: 4067826 - RNA, 16 nt, Vaccinia virus
agucauaucuagaaug

SEQ ID NO: 4067827 - RNA, 16 nt, Vaccinia virus
agucauguuaaaaaug

SEQ ID NO: 4067828 - RNA, 23 nt, Vaccinia virus
agucauuugacuagauaaacuau

SEQ ID NO: 4067829 - RNA, 17 nt, Vaccinia virus
aguccuaaauuuucuaa

SEQ ID NO: 4067830 - RNA, 16 nt, Vaccinia virus
aguccuauauauuuga

SEQ ID NO: 4067831 - RNA, 16 nt, Vaccinia virus
agucgaacaaucuuaa

SEQ ID NO: 4067832 - RNA, 18 nt, Vaccinia virus
agucgaacaaucuuaaug

SEQ ID NO: 4067833 - RNA, 17 nt, Vaccinia virus
agucgagauacagaaaa

SEQ ID NO: 4067834 - RNA, 20 nt, Vaccinia virus
agucguucucguucagaauc

SEQ ID NO: 4067835 - RNA, 16 nt, Vaccinia virus
agucuagguucacaau

SEQ ID NO: 4067836 - RNA, 23 nt, Vaccinia virus
agucuauaugaucaaaaagagau

SEQ ID NO: 4067837 - RNA, 22 nt, Vaccinia virus
agucuccuucgauggucucaca

SEQ ID NO: 4067838 - RNA, 19 nt, Vaccinia virus
agucucgcguucaagauua

SEQ ID NO: 4067839 - RNA, 19 nt, Vaccinia virus
agucucgugaguaauucca

SEQ ID NO: 4067840 - RNA, 18 nt, Vaccinia virus
agucugucaaaucaucuu

SEQ ID NO: 4067841 - RNA, 20 nt, Vaccinia virus
agucugugguggaugauguc

SEQ ID NO: 4067842 - RNA, 15 nt, Vaccinia virus
agugaauccaucuca

SEQ ID NO: 4067843 - RNA, 17 nt, Vaccinia virus
agugaaucgacuauaga

SEQ ID NO: 4067844 - RNA, 17 nt, Vaccinia virus
agugaauuccaccauga

SEQ ID NO: 4067845 - RNA, 18 nt, Vaccinia virus
agugacuuuguagcucuc

SEQ ID NO: 4067846 - RNA, 20 nt, Vaccinia virus
agugauacccgcaauuauua

SEQ ID NO: 4067847 - RNA, 23 nt, Vaccinia virus
agugauauagaucccaaaucuuc

SEQ ID NO: 4067848 - RNA, 12 nt, Vaccinia virus
agugauuuuaca

SEQ ID NO: 4067849 - RNA, 13 nt, Vaccinia virus
agugcaaugaaua

SEQ ID NO: 4067850 - RNA, 17 nt, Vaccinia virus
agugccacaaaacagaa

SEQ ID NO: 4067851 - RNA, 15 nt, Vaccinia virus
aguggaguugaagau

SEQ ID NO: 4067852 - RNA, 15 nt, Vaccinia virus
aguguaguuaaugua

SEQ ID NO: 4067853 - RNA, 13 nt, Vaccinia virus
aguguucuaaauu

SEQ ID NO: 4067854 - RNA, 13 nt, Vaccinia virus
aguguuugauucu

SEQ ID NO: 4067855 - RNA, 21 nt, Vaccinia virus
aguuaaaaaagaccaguucau

SEQ ID NO: 4067856 - RNA, 16 nt, Vaccinia virus
aguuaaaacuuuauca

SEQ ID NO: 4067857 - RNA, 13 nt, Vaccinia virus
aguuaaaaugaua

SEQ ID NO: 4067858 - RNA, 17 nt, Vaccinia virus
aguuaaauauuaaaacu

SEQ ID NO: 4067859 - RNA, 18 nt, Vaccinia virus
aguuaaguuuuuuaagaa

SEQ ID NO: 4067860 - RNA, 18 nt, Vaccinia virus
aguuaaugcgucuaaaac

SEQ ID NO: 4067861 - RNA, 16 nt, Vaccinia virus
aguuagaaaguauuuu

SEQ ID NO: 4067862 - RNA, 22 nt, Vaccinia virus
aguuaggguucuuguuccauua

SEQ ID NO: 4067863 - RNA, 21 nt, Vaccinia virus
aguuauacgucauuucaucug

SEQ ID NO: 4067864 - RNA, 17 nt, Vaccinia virus
aguuauccgaucuaaaa

SEQ ID NO: 4067865 - RNA, 16 nt, Vaccinia virus
aguuauuaagcaauau

SEQ ID NO: 4067866 - RNA, 14 nt, Vaccinia virus
aguuauuaaugaug

SEQ ID NO: 4067867 - RNA, 15 nt, Vaccinia virus
aguuauuuacuuuga

SEQ ID NO: 4067868 - RNA, 15 nt, Vaccinia virus
aguucauaacagaua

SEQ ID NO: 4067869 - RNA, 19 nt, Vaccinia virus
aguucaucgcuuucuagaa

SEQ ID NO: 4067870 - RNA, 15 nt, Vaccinia virus
aguuccagaaaaugu

SEQ ID NO: 4067871 - RNA, 18 nt, Vaccinia virus
aguucccgcauuaaauaa

SEQ ID NO: 4067872 - RNA, 19 nt, Vaccinia virus
aguuccgcauuaaaugaug

SEQ ID NO: 4067873 - RNA, 16 nt, Vaccinia virus
aguuccuuaugaugac

SEQ ID NO: 4067874 - RNA, 23 nt, Vaccinia virus
aguucucuuuucauguucgaaaa

SEQ ID NO: 4067875 - RNA, 20 nt, Vaccinia virus
aguucuucggcgguuuucau

SEQ ID NO: 4067876 - RNA, 13 nt, Vaccinia virus
aguucuucuagaa

SEQ ID NO: 4067877 - RNA, 17 nt, Vaccinia virus
aguucuuuuaugucaag

SEQ ID NO: 4067878 - RNA, 23 nt, Vaccinia virus
aguugacacguuuauuucauaua

SEQ ID NO: 4067879 - RNA, 16 nt, Vaccinia virus
aguugauaauaauaca

SEQ ID NO: 4067880 - RNA, 17 nt, Vaccinia virus
aguugauuguaaauaca

SEQ ID NO: 4067881 - RNA, 16 nt, Vaccinia virus
aguuggccauuaucga

SEQ ID NO: 4067882 - RNA, 20 nt, Vaccinia virus
aguuguggaagacuguacaa

SEQ ID NO: 4067883 - RNA, 15 nt, Vaccinia virus
aguuuaauaauacaa

SEQ ID NO: 4067884 - RNA, 15 nt, Vaccinia virus
aguuuauacuauuaa

SEQ ID NO: 4067885 - RNA, 18 nt, Vaccinia virus
aguuuauaucaauaagaa

SEQ ID NO: 4067886 - RNA, 16 nt, Vaccinia virus
aguuuauuauccacua

SEQ ID NO: 4067887 - RNA, 19 nt, Vaccinia virus
aguuucaucgauaaaggau

SEQ ID NO: 4067888 - RNA, 19 nt, Vaccinia virus
aguuuccgccauuuaucca

SEQ ID NO: 4067889 - RNA, 16 nt, Vaccinia virus
aguuucuauacugucu

SEQ ID NO: 4067890 - RNA, 17 nt, Vaccinia virus
aguuucugguuuucuau

SEQ ID NO: 4067891 - RNA, 14 nt, Vaccinia virus
aguuucuguaauga

SEQ ID NO: 4067892 - RNA, 19 nt, Vaccinia virus
aguuucuguaaugauggac

SEQ ID NO: 4067893 - RNA, 21 nt, Vaccinia virus
aguuugauuaguauaacuaga

SEQ ID NO: 4067894 - RNA, 16 nt, Vaccinia virus
aguuuggauuaucgua

SEQ ID NO: 4067895 - RNA, 15 nt, Vaccinia virus
aguuuguuuuggaaa

SEQ ID NO: 4067896 - RNA, 21 nt, Vaccinia virus
aguuuuauuauaaguuaaaau

SEQ ID NO: 4067897 - RNA, 21 nt, Vaccinia virus
aguuuucagaagauaauuauc

SEQ ID NO: 4067898 - RNA, 19 nt, Vaccinia virus
ccuaauacaucucuggaaa

SEQ ID NO: 4067899 - RNA, 18 nt, Vaccinia virus
ccuacaggaauaucuuua

SEQ ID NO: 4067900 - RNA, 17 nt, Vaccinia virus
ccuagauacuguauaua

SEQ ID NO: 4067901 - RNA, 22 nt, Vaccinia virus
ccuauguuuccccuauaaucuu

SEQ ID NO: 4067902 - RNA, 18 nt, Vaccinia virus
ccuauuccacauuuuguu

SEQ ID NO: 4067903 - RNA, 16 nt, Vaccinia virus
ccuauucuaaauggau

SEQ ID NO: 4067904 - RNA, 18 nt, Vaccinia virus
ccucagaggauauguuug

SEQ ID NO: 4067905 - RNA, 20 nt, Vaccinia virus
ccucgacugauguggaauca

SEQ ID NO: 4067906 - RNA, 23 nt, Vaccinia virus
ccucggauaaauaggaucaucua

SEQ ID NO: 4067907 - RNA, 15 nt, Vaccinia virus
ccugauuauuuacua

SEQ ID NO: 4067908 - RNA, 19 nt, Vaccinia virus
ccuguauucuuuuuaagau

SEQ ID NO: 4067909 - RNA, 19 nt, Vaccinia virus
ccuuaaauguuuucucugu

SEQ ID NO: 4067910 - RNA, 16 nt, Vaccinia virus
ccuuaccaugcaauaa

SEQ ID NO: 4067911 - RNA, 15 nt, Vaccinia virus
ccuuacucaugauua

SEQ ID NO: 4067912 - RNA, 17 nt, Vaccinia virus
ccuuauaaagaaugaau

SEQ ID NO: 4067913 - RNA, 20 nt, Vaccinia virus
ccuucacaucucgcaauaau

SEQ ID NO: 4067914 - RNA, 20 nt, Vaccinia virus
ccuuccacauccaugagauu

SEQ ID NO: 4067915 - RNA, 19 nt, Vaccinia virus
ccuugaaaaugaauacagu

SEQ ID NO: 4067916 - RNA, 16 nt, Vaccinia virus
ccuugcguuucucuga

SEQ ID NO: 4067917 - RNA, 20 nt, Vaccinia virus
ccuugggaguaguuuaugau

SEQ ID NO: 4067918 - RNA, 13 nt, Vaccinia virus
ccuuguauccauu

SEQ ID NO: 4067919 - RNA, 15 nt, Vaccinia virus
ccuuguauguuuuua

SEQ ID NO: 4067920 - RNA, 16 nt, Vaccinia virus
ccuuuacaguggauaa

SEQ ID NO: 4067921 - RNA, 20 nt, Vaccinia virus
cgaaaaaaaagcuauuauca

SEQ ID NO: 4067922 - RNA, 21 nt, Vaccinia virus
cgaaagaacugauugcagugu

SEQ ID NO: 4067923 - RNA, 15 nt, Vaccinia virus
cgaaaucuuaaauac

SEQ ID NO: 4067924 - RNA, 22 nt, Vaccinia virus
cgaacacuaacgcgcaugauuu

SEQ ID NO: 4067925 - RNA, 14 nt, Vaccinia virus
cgaaccagaaagug

SEQ ID NO: 4067926 - RNA, 17 nt, Vaccinia virus
cgaagaacuaauaaacu

SEQ ID NO: 4067927 - RNA, 12 nt, Vaccinia virus
cgaauaaaagau

SEQ ID NO: 4067928 - RNA, 13 nt, Vaccinia virus
cgaauaacaaaau

SEQ ID NO: 4067929 - RNA, 16 nt, Vaccinia virus
cgaauauauaaaagac

SEQ ID NO: 4067930 - RNA, 20 nt, Vaccinia virus
cgaaucaagugauucagaaa

SEQ ID NO: 4067931 - RNA, 15 nt, Vaccinia virus
cgaaucuaugauauu

SEQ ID NO: 4067932 - RNA, 14 nt, Vaccinia virus
cgaaugaauguuuu

SEQ ID NO: 4067933 - RNA, 22 nt, Vaccinia virus
cgaauuuacucgcauuucuaau

SEQ ID NO: 4067934 - RNA, 17 nt, Vaccinia virus
cgacaaaaagauauaaa

SEQ ID NO: 4067935 - RNA, 16 nt, Vaccinia virus
cgacgacaauaguguu

SEQ ID NO: 4067936 - RNA, 18 nt, Vaccinia virus
cgacugugauaauaauac

SEQ ID NO: 4067937 - RNA, 14 nt, Vaccinia virus
cgagauacagaaaa

SEQ ID NO: 4067938 - RNA, 13 nt, Vaccinia virus
cgagcaagagaau

SEQ ID NO: 4067939 - RNA, 21 nt, Vaccinia virus
cgaggagauuuagaaauguug

SEQ ID NO: 4067940 - RNA, 23 nt, Vaccinia virus
cgaggauaauauuagauuuacug

SEQ ID NO: 4067941 - RNA, 21 nt, Vaccinia virus
cgaguaaauaacuauagaagu

SEQ ID NO: 4067942 - RNA, 17 nt, Vaccinia virus
cgaguuuaaaacuucua

SEQ ID NO: 4067943 - RNA, 17 nt, Vaccinia virus
cgauaacauucuaaaga

SEQ ID NO: 4067944 - RNA, 21 nt, Vaccinia virus
cgauacauccuucuauguuga

SEQ ID NO: 4067945 - RNA, 16 nt, Vaccinia virus
cgauacuaauuacaaa

SEQ ID NO: 4067946 - RNA, 11 nt, Vaccinia virus
cgauagaaaaa

SEQ ID NO: 4067947 - RNA, 13 nt, Vaccinia virus
cgauauacauaaa

SEQ ID NO: 4067948 - RNA, 10 nt, Vaccinia virus
cgauauuaau

SEQ ID NO: 4067949 - RNA, 18 nt, Vaccinia virus
cgaugaccauuuaaaaac

SEQ ID NO: 4067950 - RNA, 21 nt, Vaccinia virus
cgaugacucuaccugaugaau

SEQ ID NO: 4067951 - RNA, 21 nt, Vaccinia virus
cgaugguuuuuauauguguuu

SEQ ID NO: 4067952 - RNA, 19 nt, Vaccinia virus
cgauguuuaacuuuuguuc

SEQ ID NO: 4067953 - RNA, 19 nt, Vaccinia virus
cgauuuguuuaauuuuuag

SEQ ID NO: 4067954 - RNA, 13 nt, Vaccinia virus
cgcauaaacauua

SEQ ID NO: 4067955 - RNA, 11 nt, Vaccinia virus
cgcauacuuug

SEQ ID NO: 4067956 - RNA, 13 nt, Vaccinia virus
cgcauaucaugaa

SEQ ID NO: 4067957 - RNA, 13 nt, Vaccinia virus
cgcauuaaaugau

SEQ ID NO: 4067958 - RNA, 15 nt, Vaccinia virus
cgccgcguucucugu

SEQ ID NO: 4067959 - RNA, 14 nt, Vaccinia virus
cgccuuuauuucca

SEQ ID NO: 4067960 - RNA, 16 nt, Vaccinia virus
cgcgauaaauucguaa

SEQ ID NO: 4067961 - RNA, 13 nt, Vaccinia virus
cgcgucuguuuua

SEQ ID NO: 4067962 - RNA, 17 nt, Vaccinia virus
cgcuacaauaacucuau

SEQ ID NO: 4067963 - RNA, 21 nt, Vaccinia virus
cgcuauugcacaauuuuguuu

SEQ ID NO: 4067964 - RNA, 15 nt, Vaccinia virus
cgcucuuuugaugau

SEQ ID NO: 4067965 - RNA, 13 nt, Vaccinia virus
cggaaaguauuuu

SEQ ID NO: 4067966 - RNA, 18 nt, Vaccinia virus
cggaauuauuggcuuuca

SEQ ID NO: 4067967 - RNA, 15 nt, Vaccinia virus
cggagauaagacuag

SEQ ID NO: 4067968 - RNA, 13 nt, Vaccinia virus
cggauacgacauc

SEQ ID NO: 4067969 - RNA, 14 nt, Vaccinia virus
cggcacauauuaau

SEQ ID NO: 4067970 - RNA, 18 nt, Vaccinia virus
cggcuauagaaaaguaua

SEQ ID NO: 4067971 - RNA, 22 nt, Vaccinia virus
cgggaacaauauuaguauguua

SEQ ID NO: 4067972 - RNA, 15 nt, Vaccinia virus
cgguaacaaauguuc

SEQ ID NO: 4067973 - RNA, 15 nt, Vaccinia virus
cgguaccuuugucca

SEQ ID NO: 4067974 - RNA, 18 nt, Vaccinia virus
cggugcuguaacauucug

SEQ ID NO: 4067975 - RNA, 15 nt, Vaccinia virus
cgguguaauauuaau

SEQ ID NO: 4067976 - RNA, 16 nt, Vaccinia virus
cgguucuuuaaaagaa

SEQ ID NO: 4067977 - RNA, 16 nt, Vaccinia virus
cguaaaccauuuuuca

SEQ ID NO: 4067978 - RNA, 14 nt, Vaccinia virus
cguaaauacauguc

SEQ ID NO: 4067979 - RNA, 18 nt, Vaccinia virus
cguaagauaaaguuuaua

SEQ ID NO: 4067980 - RNA, 22 nt, Vaccinia virus
cguaauaugcggucuaauuguc

SEQ ID NO: 4067981 - RNA, 17 nt, Vaccinia virus
cguacaaggauuucaag

SEQ ID NO: 4067982 - RNA, 22 nt, Vaccinia virus
cguagaaaguaucuuauauaca

SEQ ID NO: 4067983 - RNA, 21 nt, Vaccinia virus
cguagagaaauaucuauaauu

SEQ ID NO: 4067984 - RNA, 13 nt, Vaccinia virus
cguaguaacucua

SEQ ID NO: 4067985 - RNA, 15 nt, Vaccinia virus
cguaguguauaacaa

SEQ ID NO: 4067986 - RNA, 20 nt, Vaccinia virus
cguauaauucuuuauaacug

SEQ ID NO: 4067987 - RNA, 13 nt, Vaccinia virus
cguauauauuguu

SEQ ID NO: 4067988 - RNA, 18 nt, Vaccinia virus
cguauaucucauuaagcu

SEQ ID NO: 4067989 - RNA, 12 nt, Vaccinia virus
cguauauguuuc

SEQ ID NO: 4067990 - RNA, 16 nt, Vaccinia virus
cguccgguaguauaau

SEQ ID NO: 4067991 - RNA, 17 nt, Vaccinia virus
cgucuauauaguauuuu

SEQ ID NO: 4067992 - RNA, 14 nt, Vaccinia virus
cgucucaaucuuua

SEQ ID NO: 4067993 - RNA, 17 nt, Vaccinia virus
cgucucaucuguuuaag

SEQ ID NO: 4067994 - RNA, 15 nt, Vaccinia virus
cgucuguuuuuguuu

SEQ ID NO: 4067995 - RNA, 13 nt, Vaccinia virus
cgugaaauaaagu

SEQ ID NO: 4067996 - RNA, 14 nt, Vaccinia virus
cgugauagcucccg

SEQ ID NO: 4067997 - RNA, 19 nt, Vaccinia virus
cgugcacccaacguauuua

SEQ ID NO: 4067998 - RNA, 16 nt, Vaccinia virus
cgugcguaauauuguu

SEQ ID NO: 4067999 - RNA, 16 nt, Vaccinia virus
cguggaaucaauaauu

SEQ ID NO: 4068000 - RNA, 22 nt, Vaccinia virus
cguguauuaaauagaauauuua

SEQ ID NO: 4068001 - RNA, 20 nt, Vaccinia virus
cguguucguuugaaugccac

SEQ ID NO: 4068002 - RNA, 17 nt, Vaccinia virus
cguuaaauauaacuggu

SEQ ID NO: 4068003 - RNA, 22 nt, Vaccinia virus
cguuaauaggagcuagaagaac

SEQ ID NO: 4068004 - RNA, 18 nt, Vaccinia virus
cguuagaguuuauacacu

SEQ ID NO: 4068005 - RNA, 16 nt, Vaccinia virus
cguuagaucuauuuua

SEQ ID NO: 4068006 - RNA, 20 nt, Vaccinia virus
cguuagccaccacuucucua

SEQ ID NO: 4068007 - RNA, 16 nt, Vaccinia virus
cguucuuugaugugga

SEQ ID NO: 4068008 - RNA, 11 nt, Vaccinia virus
cguugaugaau

SEQ ID NO: 4068009 - RNA, 15 nt, Vaccinia virus
cguuuaaacagaauu

SEQ ID NO: 4068010 - RNA, 18 nt, Vaccinia virus
cguuuaaaguaaacuucg

SEQ ID NO: 4068011 - RNA, 20 nt, Vaccinia virus
cguuuaaaguaaacuucgua

SEQ ID NO: 4068012 - RNA, 22 nt, Vaccinia virus
cguuucauaaagagaucaggaa

SEQ ID NO: 4068013 - RNA, 13 nt, Vaccinia virus
cguuucuauuuuc

SEQ ID NO: 4068014 - RNA, 14 nt, Vaccinia virus
cguuugaaugccac

SEQ ID NO: 4068015 - RNA, 20 nt, Vaccinia virus
cuaaaaaauagcgcugaaaa

SEQ ID NO: 4068016 - RNA, 13 nt, Vaccinia virus
cuaaaaaauguag

SEQ ID NO: 4068017 - RNA, 16 nt, Vaccinia virus
cuaaaaaauguagaaa

SEQ ID NO: 4068018 - RNA, 12 nt, Vaccinia virus
cuaaaaacugua

SEQ ID NO: 4068019 - RNA, 21 nt, Vaccinia virus
cuaaaacuggagagacugauu

SEQ ID NO: 4068020 - RNA, 23 nt, Vaccinia virus
cuaaaauaguucuguaauauguc

SEQ ID NO: 4068021 - RNA, 20 nt, Vaccinia virus
cuaaaauauuuuuauucuca

SEQ ID NO: 4068022 - RNA, 20 nt, Vaccinia virus
cuaaaauauuuuuuauucuc

SEQ ID NO: 4068023 - RNA, 16 nt, Vaccinia virus
gaagaugcuauaucaa

SEQ ID NO: 4068024 - RNA, 15 nt, Vaccinia virus
gaagauuauauucua

SEQ ID NO: 4068025 - RNA, 21 nt, Vaccinia virus
gaagauuauuauggaaaucaa

SEQ ID NO: 4068026 - RNA, 21 nt, Vaccinia virus
gaagcaacuaaacuaugugau

SEQ ID NO: 4068027 - RNA, 18 nt, Vaccinia virus
gaagcaaugaaaucacuu

SEQ ID NO: 4068028 - RNA, 20 nt, Vaccinia virus
gaagcguauguucccggaca

SEQ ID NO: 4068029 - RNA, 18 nt, Vaccinia virus
gaagcugguaaaguaaau

SEQ ID NO: 4068030 - RNA, 15 nt, Vaccinia virus
gaagugguuaaucuu

SEQ ID NO: 4068031 - RNA, 16 nt, Vaccinia virus
gaaguuaaacugugaa

SEQ ID NO: 4068032 - RNA, 17 nt, Vaccinia virus
gaaguuguauacuauca

SEQ ID NO: 4068033 - RNA, 13 nt, Vaccinia virus
gaaguuuuaaaaa

SEQ ID NO: 4068034 - RNA, 18 nt, Vaccinia virus
gaauaaaacucuacuaua

SEQ ID NO: 4068035 - RNA, 19 nt, Vaccinia virus
gaauaaauuaucaacgaau

SEQ ID NO: 4068036 - RNA, 14 nt, Vaccinia virus
gaauaaauuauuau

SEQ ID NO: 4068037 - RNA, 19 nt, Vaccinia virus
gaauaagaguguaguauca

SEQ ID NO: 4068038 - RNA, 16 nt, Vaccinia virus
gaauaagugugaugau

SEQ ID NO: 4068039 - RNA, 18 nt, Vaccinia virus
gaauaaucguuauuauca

SEQ ID NO: 4068040 - RNA, 18 nt, Vaccinia virus
gaauaauguuucuauguu

SEQ ID NO: 4068041 - RNA, 21 nt, Vaccinia virus
gaauacaaucuguauuucauu

SEQ ID NO: 4068042 - RNA, 18 nt, Vaccinia virus
gaauacgaugauauuaaa

SEQ ID NO: 4068043 - RNA, 17 nt, Vaccinia virus
gaauacgcauguuuuaa

SEQ ID NO: 4068044 - RNA, 23 nt, Vaccinia virus
gaauagccgauauagauauuaaa

SEQ ID NO: 4068045 - RNA, 17 nt, Vaccinia virus
gaauaguaguagcucua

SEQ ID NO: 4068046 - RNA, 16 nt, Vaccinia virus
gaauagugccaucaga

SEQ ID NO: 4068047 - RNA, 20 nt, Vaccinia virus
gaauauaaaauaacuacagu

SEQ ID NO: 4068048 - RNA, 15 nt, Vaccinia virus
gaauauaaaccauau

SEQ ID NO: 4068049 - RNA, 13 nt, Vaccinia virus
gaauauaaaucau

SEQ ID NO: 4068050 - RNA, 19 nt, Vaccinia virus
gaauauaaccacuacauca

SEQ ID NO: 4068051 - RNA, 14 nt, Vaccinia virus
gaauauacaaguau

SEQ ID NO: 4068052 - RNA, 17 nt, Vaccinia virus
gaauauacaaguauuau

SEQ ID NO: 4068053 - RNA, 19 nt, Vaccinia virus
gaauauacuaaucaauaau

SEQ ID NO: 4068054 - RNA, 16 nt, Vaccinia virus
gaauauaucuauaauu

SEQ ID NO: 4068055 - RNA, 22 nt, Vaccinia virus
gaauauauugugacuccagaua

SEQ ID NO: 4068056 - RNA, 13 nt, Vaccinia virus
gaauaucauugcu

SEQ ID NO: 4068057 - RNA, 17 nt, Vaccinia virus
gaauaucugcaauauau

SEQ ID NO: 4068058 - RNA, 22 nt, Vaccinia virus
gaauaucugucuuauauuuaua

SEQ ID NO: 4068059 - RNA, 16 nt, Vaccinia virus
gaauaucuuuauucau

SEQ ID NO: 4068060 - RNA, 15 nt, Vaccinia virus
gaauaugguaugauu

SEQ ID NO: 4068061 - RNA, 17 nt, Vaccinia virus
gaauauguuauaauaga

SEQ ID NO: 4068062 - RNA, 18 nt, Vaccinia virus
gaauauuauuaugaugau

SEQ ID NO: 4068063 - RNA, 11 nt, Vaccinia virus
gaaucagcauc

SEQ ID NO: 4068064 - RNA, 18 nt, Vaccinia virus
gaauccauagaacaaaau

SEQ ID NO: 4068065 - RNA, 15 nt, Vaccinia virus
gaauccgaaauuaga

SEQ ID NO: 4068066 - RNA, 16 nt, Vaccinia virus
gaaucggauaguuuaa

SEQ ID NO: 4068067 - RNA, 20 nt, Vaccinia virus
gaaucugaaaacguauaaau

SEQ ID NO: 4068068 - RNA, 16 nt, Vaccinia virus
gaaugaaauauauaca

SEQ ID NO: 4068069 - RNA, 13 nt, Vaccinia virus
gaaugacauaacu

SEQ ID NO: 4068070 - RNA, 23 nt, Vaccinia virus
gaaugccacgguuccaaguauau

SEQ ID NO: 4068071 - RNA, 20 nt, Vaccinia virus
gaauguaauuuuuguuuccg

SEQ ID NO: 4068072 - RNA, 21 nt, Vaccinia virus
gaaugucauuuguauuuuaua

SEQ ID NO: 4068073 - RNA, 19 nt, Vaccinia virus
gaauguucucaagaacuac

SEQ ID NO: 4068074 - RNA, 17 nt, Vaccinia virus
gaauuaacgagauauau

SEQ ID NO: 4068075 - RNA, 13 nt, Vaccinia virus
gaauuaauaauau

SEQ ID NO: 4068076 - RNA, 17 nt, Vaccinia virus
gaauuaauuaauguuuu

SEQ ID NO: 4068077 - RNA, 15 nt, Vaccinia virus
gaauuagucaaucuu

SEQ ID NO: 4068078 - RNA, 14 nt, Vaccinia virus
gaauucaguaauau

SEQ ID NO: 4068079 - RNA, 17 nt, Vaccinia virus
gaauucauuugauguau

SEQ ID NO: 4068080 - RNA, 15 nt, Vaccinia virus
gaauuccucugaaaa

SEQ ID NO: 4068081 - RNA, 18 nt, Vaccinia virus
gaauucuucaauaaaaug

SEQ ID NO: 4068082 - RNA, 18 nt, Vaccinia virus
gaauugaugaguuguaca

SEQ ID NO: 4068083 - RNA, 18 nt, Vaccinia virus
gaauugguggaaaaagug

SEQ ID NO: 4068084 - RNA, 14 nt, Vaccinia virus
gaauuguaacuuga

SEQ ID NO: 4068085 - RNA, 22 nt, Vaccinia virus
gaauuguacccaaaucugaaaa

SEQ ID NO: 4068086 - RNA, 16 nt, Vaccinia virus
gaauuguuucuuuuag

SEQ ID NO: 4068087 - RNA, 14 nt, Vaccinia virus
gaauuuauaucuaa

SEQ ID NO: 4068088 - RNA, 14 nt, Vaccinia virus
gaauuugauacugu

SEQ ID NO: 4068089 - RNA, 18 nt, Vaccinia virus
gaauuuguuguuucuauu

SEQ ID NO: 4068090 - RNA, 16 nt, Vaccinia virus
gaauuuuaguuauuac

SEQ ID NO: 4068091 - RNA, 19 nt, Vaccinia virus
gaauuuuuaaaaucauuau

SEQ ID NO: 4068092 - RNA, 11 nt, Vaccinia virus
gacaaauguag

SEQ ID NO: 4068093 - RNA, 22 nt, Vaccinia virus
gacaagagacguaaauauucua

SEQ ID NO: 4068094 - RNA, 16 nt, Vaccinia virus
gacaauacuguauuau

SEQ ID NO: 4068095 - RNA, 16 nt, Vaccinia virus
gacaaugaauugcaua

SEQ ID NO: 4068096 - RNA, 15 nt, Vaccinia virus
gacacaaauuauggc

SEQ ID NO: 4068097 - RNA, 15 nt, Vaccinia virus
gacacaucugccaua

SEQ ID NO: 4068098 - RNA, 20 nt, Vaccinia virus
gacacauucuuuagaacuuc

SEQ ID NO: 4068099 - RNA, 22 nt, Vaccinia virus
gacacuaugcgacuuaauacaa

SEQ ID NO: 4068100 - RNA, 15 nt, Vaccinia virus
gacacucuauaucua

SEQ ID NO: 4068101 - RNA, 22 nt, Vaccinia virus
gacacugaacacguuaacgaua

SEQ ID NO: 4068102 - RNA, 13 nt, Vaccinia virus
gacagaaaaaugc

SEQ ID NO: 4068103 - RNA, 18 nt, Vaccinia virus
gacagaaccuugugucau

SEQ ID NO: 4068104 - RNA, 19 nt, Vaccinia virus
gacagacuacguagacugu

SEQ ID NO: 4068105 - RNA, 17 nt, Vaccinia virus
gacagcuauguuaucau

SEQ ID NO: 4068106 - RNA, 24 nt, Vaccinia virus
gacaggcagaacacgucaugcaau

SEQ ID NO: 4068107 - RNA, 23 nt, Vaccinia virus
gacauguucgugguguuaugaaa

SEQ ID NO: 4068108 - RNA, 19 nt, Vaccinia virus
gacauuuggaauguuauau

SEQ ID NO: 4068109 - RNA, 17 nt, Vaccinia virus
gaccaucguuugucaua

SEQ ID NO: 4068110 - RNA, 12 nt, Vaccinia virus
gacccauagaga

SEQ ID NO: 4068111 - RNA, 15 nt, Vaccinia virus
gaccgaauacauaac

SEQ ID NO: 4068112 - RNA, 17 nt, Vaccinia virus
gaccggcaaucaugaau

SEQ ID NO: 4068113 - RNA, 12 nt, Vaccinia virus
gaccguguuucu

SEQ ID NO: 4068114 - RNA, 16 nt, Vaccinia virus
gaccuauuaauaauua

SEQ ID NO: 4068115 - RNA, 22 nt, Vaccinia virus
gaccuauuaauaauuacuuauc

SEQ ID NO: 4068116 - RNA, 15 nt, Vaccinia virus
gacgaacguauugcu

SEQ ID NO: 4068117 - RNA, 16 nt, Vaccinia virus
gacgaguguaaacacu

SEQ ID NO: 4068118 - RNA, 15 nt, Vaccinia virus
gacgauaauaauuua

SEQ ID NO: 4068119 - RNA, 17 nt, Vaccinia virus
gacgcauuuaauagaga

SEQ ID NO: 4068120 - RNA, 17 nt, Vaccinia virus
gacgcguucauuggaaa

SEQ ID NO: 4068121 - RNA, 20 nt, Vaccinia virus
gacgcuauggcacgaaauau

SEQ ID NO: 4068122 - RNA, 13 nt, Vaccinia virus
gacgguaucaugc

SEQ ID NO: 4068123 - RNA, 21 nt, Vaccinia virus
gacguauaagucuauuugaaa

SEQ ID NO: 4068124 - RNA, 20 nt, Vaccinia virus
gacgucaauggcaaaaauau

SEQ ID NO: 4068125 - RNA, 13 nt, Vaccinia virus
gacguuaguucuu

SEQ ID NO: 4068126 - RNA, 14 nt, Vaccinia virus
gacuacgauugcac

SEQ ID NO: 4068127 - RNA, 14 nt, Vaccinia virus
gacuacuuauucua

SEQ ID NO: 4068128 - RNA, 22 nt, Vaccinia virus
gacuauuggaauguguuaaaaa

SEQ ID NO: 4068129 - RNA, 19 nt, Vaccinia virus
gacucaucaacgaugaaaa

SEQ ID NO: 4068130 - RNA, 21 nt, Vaccinia virus
gacucgcguuuagaggaguga

SEQ ID NO: 4068131 - RNA, 15 nt, Vaccinia virus
gacucuagaugaaau

SEQ ID NO: 4068132 - RNA, 19 nt, Vaccinia virus
gacucuauaucuauuucug

SEQ ID NO: 4068133 - RNA, 15 nt, Vaccinia virus
gacucugguauuuau

SEQ ID NO: 4068134 - RNA, 17 nt, Vaccinia virus
gacuguuauaaaaaugc

SEQ ID NO: 4068135 - RNA, 23 nt, Vaccinia virus
gacuuaugucacgaugauggaau

SEQ ID NO: 4068136 - RNA, 22 nt, Vaccinia virus
gacuugucaaaucuauauacca

SEQ ID NO: 4068137 - RNA, 23 nt, Vaccinia virus
gacuuguuagauagagaugagau

SEQ ID NO: 4068138 - RNA, 22 nt, Vaccinia virus
gacuuuaucuaaauuucuagua

SEQ ID NO: 4068139 - RNA, 20 nt, Vaccinia virus
gacuuugucaacuuuguaaa

SEQ ID NO: 4068140 - RNA, 12 nt, Vaccinia virus
gacuuuguuaau

SEQ ID NO: 4068141 - RNA, 17 nt, Vaccinia virus
gagaaaccgaugauuau

SEQ ID NO: 4068142 - RNA, 19 nt, Vaccinia virus
gagaacuaacacaaccagc

SEQ ID NO: 4068143 - RNA, 19 nt, Vaccinia virus
gagaagaagcuaauacccu

SEQ ID NO: 4068144 - RNA, 18 nt, Vaccinia virus
gagaaguaauaaaacgaa

SEQ ID NO: 4068145 - RNA, 17 nt, Vaccinia virus
gagaauaaaaauguuuu

SEQ ID NO: 4068146 - RNA, 14 nt, Vaccinia virus
gagaauuaaaagag

SEQ ID NO: 4068147 - RNA, 14 nt, Vaccinia virus
ucaucuaugugauu

SEQ ID NO: 4068148 - RNA, 16 nt, Vaccinia virus
ucaucucuagauaugu

SEQ ID NO: 4068149 - RNA, 15 nt, Vaccinia virus
ucaucuucuauauaa

SEQ ID NO: 4068150 - RNA, 22 nt, Vaccinia virus
ucaucuuuaguaaacauaucau

SEQ ID NO: 4068151 - RNA, 16 nt, Vaccinia virus
ucaugaaaugaugaua

SEQ ID NO: 4068152 - RNA, 15 nt, Vaccinia virus
ucaugaagagauguu

SEQ ID NO: 4068153 - RNA, 17 nt, Vaccinia virus
ucaugccuuuccuggaa

SEQ ID NO: 4068154 - RNA, 20 nt, Vaccinia virus
ucauguaaccuacuagaaug

SEQ ID NO: 4068155 - RNA, 12 nt, Vaccinia virus
ucauuaaauguu

SEQ ID NO: 4068156 - RNA, 17 nt, Vaccinia virus
ucauuaauaauuucuag

SEQ ID NO: 4068157 - RNA, 12 nt, Vaccinia virus
ucauuagauguu

SEQ ID NO: 4068158 - RNA, 18 nt, Vaccinia virus
ucauucauggaguuagaa

SEQ ID NO: 4068159 - RNA, 22 nt, Vaccinia virus
ucauuccaucauuuaagaaggc

SEQ ID NO: 4068160 - RNA, 14 nt, Vaccinia virus
ucauucuauuaaug

SEQ ID NO: 4068161 - RNA, 14 nt, Vaccinia virus
ucauucucuucuau

SEQ ID NO: 4068162 - RNA, 20 nt, Vaccinia virus
ucauugacagcgguagaugu

SEQ ID NO: 4068163 - RNA, 20 nt, Vaccinia virus
ucauugguugcgucaagaac

SEQ ID NO: 4068164 - RNA, 16 nt, Vaccinia virus
ucauuugcguacccaa

SEQ ID NO: 4068165 - RNA, 23 nt, Vaccinia virus
ucauuuuccagaugauauguaug

SEQ ID NO: 4068166 - RNA, 16 nt, Vaccinia virus
uccaacaauagcuuua

SEQ ID NO: 4068167 - RNA, 22 nt, Vaccinia virus
uccaauaaauuaucaaauacuu

SEQ ID NO: 4068168 - RNA, 15 nt, Vaccinia virus
uccaauaaauuauuu

SEQ ID NO: 4068169 - RNA, 13 nt, Vaccinia virus
uccaaucauauag

SEQ ID NO: 4068170 - RNA, 20 nt, Vaccinia virus
uccaauugaaugucaugaua

SEQ ID NO: 4068171 - RNA, 22 nt, Vaccinia virus
uccaauuuuucagauuuuugaa

SEQ ID NO: 4068172 - RNA, 15 nt, Vaccinia virus
uccacaucaucuagu

SEQ ID NO: 4068173 - RNA, 19 nt, Vaccinia virus
uccaccaucugccauaauc

SEQ ID NO: 4068174 - RNA, 18 nt, Vaccinia virus
uccacguucuuuaauuuu

SEQ ID NO: 4068175 - RNA, 15 nt, Vaccinia virus
uccacuauacauucu

SEQ ID NO: 4068176 - RNA, 13 nt, Vaccinia virus
uccagauauauau

SEQ ID NO: 4068177 - RNA, 15 nt, Vaccinia virus
uccagaugucauaau

SEQ ID NO: 4068178 - RNA, 19 nt, Vaccinia virus
uccaggccguuuguuuccu

SEQ ID NO: 4068179 - RNA, 22 nt, Vaccinia virus
uccagggaaauuaaagaagaag

SEQ ID NO: 4068180 - RNA, 14 nt, Vaccinia virus
uccauaaauuuaua

SEQ ID NO: 4068181 - RNA, 19 nt, Vaccinia virus
uccauaaauuuauaauguu

SEQ ID NO: 4068182 - RNA, 22 nt, Vaccinia virus
uccauauguuuggagcaaauau

SEQ ID NO: 4068183 - RNA, 21 nt, Vaccinia virus
uccauauuuucugguaguguu

SEQ ID NO: 4068184 - RNA, 18 nt, Vaccinia virus
uccaucagaauguuuccc

SEQ ID NO: 4068185 - RNA, 17 nt, Vaccinia virus
uccaucucgcccaucuc

SEQ ID NO: 4068186 - RNA, 20 nt, Vaccinia virus
uccaugacauauuacaaaau

SEQ ID NO: 4068187 - RNA, 15 nt, Vaccinia virus
uccaugaucaagaag

SEQ ID NO: 4068188 - RNA, 15 nt, Vaccinia virus
uccauuaauguggaa

SEQ ID NO: 4068189 - RNA, 22 nt, Vaccinia virus
uccauuauauauuccuugaaua

SEQ ID NO: 4068190 - RNA, 16 nt, Vaccinia virus
uccauuauuaauaaga

SEQ ID NO: 4068191 - RNA, 18 nt, Vaccinia virus
uccauugauaaagaaguu

SEQ ID NO: 4068192 - RNA, 20 nt, Vaccinia virus
uccauuuaaggcuuuaaaau

SEQ ID NO: 4068193 - RNA, 14 nt, Vaccinia virus
uccauuuuacauua

SEQ ID NO: 4068194 - RNA, 14 nt, Vaccinia virus
ucccaaauaucuuu

SEQ ID NO: 4068195 - RNA, 17 nt, Vaccinia virus
ucccaauuccaaagauc

SEQ ID NO: 4068196 - RNA, 11 nt, Vaccinia virus
ucccagcauua

SEQ ID NO: 4068197 - RNA, 17 nt, Vaccinia virus
ucccauauauuccauga

SEQ ID NO: 4068198 - RNA, 23 nt, Vaccinia virus
ucccauggaaugacccaauaagu

SEQ ID NO: 4068199 - RNA, 23 nt, Vaccinia virus
uccgaaaaaguugacuauguuca

SEQ ID NO: 4068200 - RNA, 22 nt, Vaccinia virus
uccgaaauuagaaauucccaag

SEQ ID NO: 4068201 - RNA, 16 nt, Vaccinia virus
uccgaaugaauguuuu

SEQ ID NO: 4068202 - RNA, 18 nt, Vaccinia virus
uccggagacgucaucugu

SEQ ID NO: 4068203 - RNA, 22 nt, Vaccinia virus
uccgggaacauacgcuuccaga

SEQ ID NO: 4068204 - RNA, 16 nt, Vaccinia virus
uccgucaccaaaaaag

SEQ ID NO: 4068205 - RNA, 14 nt, Vaccinia virus
uccguuuacuacaa

SEQ ID NO: 4068206 - RNA, 18 nt, Vaccinia virus
uccguuuauccacaauua

SEQ ID NO: 4068207 - RNA, 15 nt, Vaccinia virus
uccuauacucugaaa

SEQ ID NO: 4068208 - RNA, 21 nt, Vaccinia virus
uccuauauauuugaaaaucgu

SEQ ID NO: 4068209 - RNA, 18 nt, Vaccinia virus
uccuauucccaacaaugu

SEQ ID NO: 4068210 - RNA, 18 nt, Vaccinia virus
uccucauuacguuucauu

SEQ ID NO: 4068211 - RNA, 16 nt, Vaccinia virus
uccucggccauuuuaa

SEQ ID NO: 4068212 - RNA, 16 nt, Vaccinia virus
uccugcguuagauguu

SEQ ID NO: 4068213 - RNA, 15 nt, Vaccinia virus
uccuguacuauacca

SEQ ID NO: 4068214 - RNA, 14 nt, Vaccinia virus
uccuguuaauaacu

SEQ ID NO: 4068215 - RNA, 11 nt, Vaccinia virus
uccuguuucau

SEQ ID NO: 4068216 - RNA, 13 nt, Vaccinia virus
uccuuaaaguaac

SEQ ID NO: 4068217 - RNA, 16 nt, Vaccinia virus
uccuucauucauuaga

SEQ ID NO: 4068218 - RNA, 16 nt, Vaccinia virus
uccuuccaacauaaua

SEQ ID NO: 4068219 - RNA, 13 nt, Vaccinia virus
uccuuccaaugau

SEQ ID NO: 4068220 - RNA, 13 nt, Vaccinia virus
uccuuucuaaaau

SEQ ID NO: 4068221 - RNA, 16 nt, Vaccinia virus
uccuuugauuaucauc

SEQ ID NO: 4068222 - RNA, 20 nt, Vaccinia virus
ucgaaaauugcuauuucaga

SEQ ID NO: 4068223 - RNA, 20 nt, Vaccinia virus
ucgaaaucgcgacuccggaa

SEQ ID NO: 4068224 - RNA, 11 nt, Vaccinia virus
ucgaauacagu

SEQ ID NO: 4068225 - RNA, 12 nt, Vaccinia virus
ucgaauacuuau

SEQ ID NO: 4068226 - RNA, 14 nt, Vaccinia virus
ucgacaguguauac

SEQ ID NO: 4068227 - RNA, 12 nt, Vaccinia virus
ucgacauauuaa

SEQ ID NO: 4068228 - RNA, 22 nt, Vaccinia virus
ucgacauccgucaaaaccaauu

SEQ ID NO: 4068229 - RNA, 19 nt, Vaccinia virus
ucgacaucuggauuucaga

SEQ ID NO: 4068230 - RNA, 14 nt, Vaccinia virus
ucgacgacauuaag

SEQ ID NO: 4068231 - RNA, 12 nt, Vaccinia virus
ucgacuguuacu

SEQ ID NO: 4068232 - RNA, 16 nt, Vaccinia virus
ucgauaacucuauuca

SEQ ID NO: 4068233 - RNA, 11 nt, Vaccinia virus
ucgauacuuuu

SEQ ID NO: 4068234 - RNA, 12 nt, Vaccinia virus
ucgauauacaaa

SEQ ID NO: 4068235 - RNA, 20 nt, Vaccinia virus
ucgaucaaaagacuauacau

SEQ ID NO: 4068236 - RNA, 21 nt, Vaccinia virus
ucgaucaaaagacuauacauu

SEQ ID NO: 4068237 - RNA, 20 nt, Vaccinia virus
ucgaugaaauaucugauguu

SEQ ID NO: 4068238 - RNA, 20 nt, Vaccinia virus
ucgauuccguccaagaugau

SEQ ID NO: 4068239 - RNA, 12 nt, Vaccinia virus
ucgcaaauuccg

SEQ ID NO: 4068240 - RNA, 19 nt, Vaccinia virus
ucgcaacauuaacaucuug

SEQ ID NO: 4068241 - RNA, 20 nt, Vaccinia virus
ucgcauaaacauuacuaaaa

SEQ ID NO: 4068242 - RNA, 17 nt, Vaccinia virus
ucgcauauaacaacaaa

SEQ ID NO: 4068243 - RNA, 20 nt, Vaccinia virus
ucgcauuguacgauguagua

SEQ ID NO: 4068244 - RNA, 21 nt, Vaccinia virus
ucgcuuucugguaacaugaua

SEQ ID NO: 4068245 - RNA, 17 nt, Vaccinia virus
ucggauccuuuguacag

SEQ ID NO: 4068246 - RNA, 12 nt, Vaccinia virus
ucggcucaaaga

SEQ ID NO: 4068247 - RNA, 21 nt, Vaccinia virus
ucgguaucuagaucucuagaa

SEQ ID NO: 4068248 - RNA, 16 nt, Vaccinia virus
ucgguucuuuaaaaga

SEQ ID NO: 4068249 - RNA, 17 nt, Vaccinia virus
ucguaagauaaaguuua

SEQ ID NO: 4068250 - RNA, 15 nt, Vaccinia virus
ucguacuauauacaa

SEQ ID NO: 4068251 - RNA, 12 nt, Vaccinia virus
ucguagaaagua

SEQ ID NO: 4068252 - RNA, 14 nt, Vaccinia virus
ucguauaaaguuau

SEQ ID NO: 4068253 - RNA, 19 nt, Vaccinia virus
ucgucaaaauauuuacuaa

SEQ ID NO: 4068254 - RNA, 14 nt, Vaccinia virus
ucguccuuaaccaa

SEQ ID NO: 4068255 - RNA, 13 nt, Vaccinia virus
ucgucuacuauuc

SEQ ID NO: 4068256 - RNA, 13 nt, Vaccinia virus
ucgucucaucugu

SEQ ID NO: 4068257 - RNA, 19 nt, Vaccinia virus
ucgucugugaaacaucacg

SEQ ID NO: 4068258 - RNA, 18 nt, Vaccinia virus
ucgugaaauaggaauaau

SEQ ID NO: 4068259 - RNA, 14 nt, Vaccinia virus
ucgugaauaauguu

SEQ ID NO: 4068260 - RNA, 13 nt, Vaccinia virus
ucgugaauacuug

SEQ ID NO: 4068261 - RNA, 20 nt, Vaccinia virus
ucgugcagaggauaguuguu

SEQ ID NO: 4068262 - RNA, 20 nt, Vaccinia virus
ucguggauaaucauucuuaa

SEQ ID NO: 4068263 - RNA, 13 nt, Vaccinia virus
ucguguucuacau

SEQ ID NO: 4068264 - RNA, 14 nt, Vaccinia virus
ucguuaaaaaguuu

SEQ ID NO: 4068265 - RNA, 11 nt, Vaccinia virus
ucguuaaugaa

SEQ ID NO: 4068266 - RNA, 16 nt, Vaccinia virus
ucguucaaauuuuuaa

SEQ ID NO: 4068267 - RNA, 23 nt, Vaccinia virus
ucguuccaagucauaucuagaau

SEQ ID NO: 4068268 - RNA, 17 nt, Vaccinia virus
ucguuccgccaaauuuu

SEQ ID NO: 4068269 - RNA, 22 nt, Vaccinia virus
ucguugacaucuaguauugaua

SEQ ID NO: 4068270 - RNA, 12 nt, Vaccinia virus
ucguuguagaaa

SEQ ID NO: 4068271 - RNA, 16 nt, Vaccinia virus
ucguuguccuuuacau

SEQ ID NO: 4068272 - RNA, 23 nt, Vaccinia virus
ugcacaauccaaacuuuuucaca

SEQ ID NO: 4068273 - RNA, 13 nt, Vaccinia virus
ugcaccagaauua

SEQ ID NO: 4068274 - RNA, 17 nt, Vaccinia virus
ugcacguuuacauaucu

SEQ ID NO: 4068275 - RNA, 18 nt, Vaccinia virus
ugcacuuaaagucuacau

SEQ ID NO: 4068276 - RNA, 14 nt, Vaccinia virus
ugcagaauauuucu

SEQ ID NO: 4068277 - RNA, 16 nt, Vaccinia virus
ugcauaaucagauucu

SEQ ID NO: 4068278 - RNA, 23 nt, Vaccinia virus
ugcauacaauacuagucuagaaa

SEQ ID NO: 4068279 - RNA, 18 nt, Vaccinia virus
ugcauaucuuuuucaaca

SEQ ID NO: 4068280 - RNA, 22 nt, Vaccinia virus
ugcaucaacaauuacaaaugag

SEQ ID NO: 4068281 - RNA, 15 nt, Vaccinia virus
ugcauguuucauaac

SEQ ID NO: 4068282 - RNA, 14 nt, Vaccinia virus
ugcauguuugcucu

SEQ ID NO: 4068283 - RNA, 20 nt, Vaccinia virus
ugcauugacuuuguuaguga

SEQ ID NO: 4068284 - RNA, 14 nt, Vaccinia virus
ugcauuucuacaaa

SEQ ID NO: 4068285 - RNA, 19 nt, Vaccinia virus
ugccaaaucuauaagaaaa

SEQ ID NO: 4068286 - RNA, 12 nt, Vaccinia virus
ugccacaaauga

SEQ ID NO: 4068287 - RNA, 22 nt, Vaccinia virus
ugccauaauuuucauauauuga

SEQ ID NO: 4068288 - RNA, 18 nt, Vaccinia virus
ugccuauuaggacagaua

SEQ ID NO: 4068289 - RNA, 14 nt, Vaccinia virus
ugcgaucaauaaau

SEQ ID NO: 4068290 - RNA, 21 nt, Vaccinia virus
ugcggauaugauccaagaggg

SEQ ID NO: 4068291 - RNA, 17 nt, Vaccinia virus
ugcuaauacgaauauua

SEQ ID NO: 4068292 - RNA, 15 nt, Vaccinia virus
ugcucggcaauaacu

SEQ ID NO: 4068293 - RNA, 22 nt, Vaccinia virus
ugcucuacaugcgguaaagaua

SEQ ID NO: 4068294 - RNA, 15 nt, Vaccinia virus
ugcuuaauguuucca

SEQ ID NO: 4068295 - RNA, 15 nt, Vaccinia virus
ugcuuacuagauguu

SEQ ID NO: 4068296 - RNA, 17 nt, Vaccinia virus
ugcuuccgaucccaaau

SEQ ID NO: 4068297 - RNA, 23 nt, Vaccinia virus
ugcuuuccuuguugaugaaggau

SEQ ID NO: 4068298 - RNA, 22 nt, Vaccinia virus
ugcuuuuaucaggauaaauaca

SEQ ID NO: 4068299 - RNA, 21 nt, Vaccinia virus
ugcuuuucuauaaucaucuua

SEQ ID NO: 4068300 - RNA, 18 nt, Vaccinia virus
uggaaaagauaacuauug

SEQ ID NO: 4068301 - RNA, 16 nt, Vaccinia virus
uggaaaggaaauuaug

SEQ ID NO: 4068302 - RNA, 21 nt, Vaccinia virus
uggaaauacuuccaucaacau

SEQ ID NO: 4068303 - RNA, 13 nt, Vaccinia virus
uggaaaugucaua

SEQ ID NO: 4068304 - RNA, 12 nt, Vaccinia virus
uggaaauuauuu

SEQ ID NO: 4068305 - RNA, 23 nt, Vaccinia virus
uggaacuccuauuggaauuauuu

SEQ ID NO: 4068306 - RNA, 23 nt, Vaccinia virus
uggaagacagccgucucuacaua

SEQ ID NO: 4068307 - RNA, 20 nt, Vaccinia virus
uggaagcugaacacauuaaa

SEQ ID NO: 4068308 - RNA, 19 nt, Vaccinia virus
uggaauagaugaaggaaua

SEQ ID NO: 4068309 - RNA, 14 nt, Vaccinia virus
uggaauuaacuauc

SEQ ID NO: 4068310 - RNA, 19 nt, Vaccinia virus
uggagaaucgucuaucuuu

SEQ ID NO: 4068311 - RNA, 21 nt, Vaccinia virus
uggagaucauuaaauguuuca

SEQ ID NO: 4068312 - RNA, 17 nt, Vaccinia virus
uggagcgaguguuacaa

SEQ ID NO: 4068313 - RNA, 22 nt, Vaccinia virus
uggaguugauucauaacgaaaa

SEQ ID NO: 4068314 - RNA, 16 nt, Vaccinia virus
uggauauggguuucca

SEQ ID NO: 4068315 - RNA, 19 nt, Vaccinia virus
uggauauguggaaaaguau

SEQ ID NO: 4068316 - RNA, 14 nt, Vaccinia virus
uggaugaggaauga

SEQ ID NO: 4068317 - RNA, 22 nt, Vaccinia virus
uggaugaggaaugagagugaua

SEQ ID NO: 4068318 - RNA, 19 nt, Vaccinia virus
uggauguacggcuuuacau

SEQ ID NO: 4068319 - RNA, 21 nt, Vaccinia virus
uggaugucaucaauguagaaa

SEQ ID NO: 4068320 - RNA, 21 nt, Vaccinia virus
uggauuauaaauauugauguu

SEQ ID NO: 4068321 - RNA, 12 nt, Vaccinia virus
uggauuuggauu

SEQ ID NO: 4068322 - RNA, 13 nt, Vaccinia virus
uggcaaauuauuu

SEQ ID NO: 4068323 - RNA, 20 nt, Vaccinia virus
uggcauagacuuauacugug

SEQ ID NO: 4068324 - RNA, 13 nt, Vaccinia virus
uggccgacgucag

SEQ ID NO: 4068325 - RNA, 22 nt, Vaccinia virus
uggcggaguaaguguugagcuc

SEQ ID NO: 4068326 - RNA, 15 nt, Vaccinia virus
uggcggcuagaaugg

SEQ ID NO: 4068327 - RNA, 15 nt, Vaccinia virus
uggcuauuucaaaau

SEQ ID NO: 4068328 - RNA, 21 nt, Vaccinia virus
uggcuucuuccauaguuagaa

SEQ ID NO: 4068329 - RNA, 20 nt, Vaccinia virus
uggcuuuguagauuuggaua

SEQ ID NO: 4068330 - RNA, 18 nt, Vaccinia virus
ugggaauauauuuggauu

SEQ ID NO: 4068331 - RNA, 21 nt, Vaccinia virus
ugggacuauuggaauguguua

SEQ ID NO: 4068332 - RNA, 22 nt, Vaccinia virus
ugggauaaaaauuauguuuuua

SEQ ID NO: 4068333 - RNA, 16 nt, Vaccinia virus
ugggguuacucuaaau

SEQ ID NO: 4068334 - RNA, 10 nt, Vaccinia virus
ugguaaaaua

SEQ ID NO: 4068335 - RNA, 14 nt, Vaccinia virus
ugguaauuaaauau

SEQ ID NO: 4068336 - RNA, 19 nt, Vaccinia virus
ugguacaaaaaauaucaug

SEQ ID NO: 4068337 - RNA, 17 nt, Vaccinia virus
ugguacgaaauauauug

SEQ ID NO: 4068338 - RNA, 22 nt, Vaccinia virus
uggucaauagcgauaugugauu

SEQ ID NO: 4068339 - RNA, 21 nt, Vaccinia virus
uggucuagauguaaaaaaugu

SEQ ID NO: 4068340 - RNA, 12 nt, Vaccinia virus
uggugaaagagu

SEQ ID NO: 4068341 - RNA, 23 nt, Vaccinia virus
ugguguccuaguacacaauauca

SEQ ID NO: 4068342 - RNA, 18 nt, Vaccinia virus
ugguuccacaauucauuu

SEQ ID NO: 4068343 - RNA, 14 nt, Vaccinia virus
ugguuuaauuauuu

SEQ ID NO: 4068344 - RNA, 15 nt, Vaccinia virus
ugguuuauauuacca

SEQ ID NO: 4068345 - RNA, 15 nt, Vaccinia virus
ugguuucuaaaucua

SEQ ID NO: 4068346 - RNA, 16 nt, Vaccinia virus
uguaaaaucaugauuc

SEQ ID NO: 4068347 - RNA, 13 nt, Vaccinia virus
uguaaauaucuuu

SEQ ID NO: 4068348 - RNA, 19 nt, Vaccinia virus
uguaaaugauuuuguagau

SEQ ID NO: 4068349 - RNA, 19 nt, Vaccinia virus
uguaaauuaggagaaacaa

SEQ ID NO: 4068350 - RNA, 20 nt, Vaccinia virus
uguaaauuuuaucaugugua

SEQ ID NO: 4068351 - RNA, 24 nt, Vaccinia virus
uguaacgcgucuguuuuauacauu

SEQ ID NO: 4068352 - RNA, 20 nt, Vaccinia virus
uguaacugcuacuugggaua

SEQ ID NO: 4068353 - RNA, 19 nt, Vaccinia virus
uguaaucuuauuaacuguu

SEQ ID NO: 4068354 - RNA, 17 nt, Vaccinia virus
uguaauugugacaucau

SEQ ID NO: 4068355 - RNA, 15 nt, Vaccinia virus
uguaauuuuaacaua

SEQ ID NO: 4068356 - RNA, 15 nt, Vaccinia virus
uguacacauaguguu

SEQ ID NO: 4068357 - RNA, 18 nt, Vaccinia virus
uguacgauacauaauguu

SEQ ID NO: 4068358 - RNA, 19 nt, Vaccinia virus
uguacgauggauucauccu

SEQ ID NO: 4068359 - RNA, 22 nt, Vaccinia virus
uguacgauggauucauccuguu

SEQ ID NO: 4068360 - RNA, 22 nt, Vaccinia virus
uguacgauguaguaguaacugu

SEQ ID NO: 4068361 - RNA, 17 nt, Vaccinia virus
uguagaugguucuuuaa

SEQ ID NO: 4068362 - RNA, 20 nt, Vaccinia virus
uguagcucucccagauuucu

SEQ ID NO: 4068363 - RNA, 19 nt, Vaccinia virus
uguauaaaccuuuuucaga

SEQ ID NO: 4068364 - RNA, 18 nt, Vaccinia virus
uguauaacagagccaucu

SEQ ID NO: 4068365 - RNA, 19 nt, Vaccinia virus
uguauaacaugacauuuau

SEQ ID NO: 4068366 - RNA, 16 nt, Vaccinia virus
uguauaaucaacucua

SEQ ID NO: 4068367 - RNA, 18 nt, Vaccinia virus
uguauacaccaacaguau

SEQ ID NO: 4068368 - RNA, 19 nt, Vaccinia virus
uguauagacaauuauguaa

SEQ ID NO: 4068369 - RNA, 23 nt, Vaccinia virus
uguauauuauaaagauauguacg

SEQ ID NO: 4068370 - RNA, 19 nt, Vaccinia virus
uguaucaaacaguuuggua

SEQ ID NO: 4068371 - RNA, 23 nt, Vaccinia virus
uguaucaaagacauuaauacuuu

SEQ ID NO: 4068372 - RNA, 16 nt, Vaccinia virus
uguaucagacgauaau

SEQ ID NO: 4068373 - RNA, 15 nt, Vaccinia virus
uguaucaguuucgua

SEQ ID NO: 4068374 - RNA, 20 nt, Vaccinia virus
uguaucauaauauuaaucau

SEQ ID NO: 4068375 - RNA, 20 nt, Vaccinia virus
uguaucauuuagcgauucaa

SEQ ID NO: 4068376 - RNA, 22 nt, Vaccinia virus
uguauccacuuuaauaauauca

SEQ ID NO: 4068377 - RNA, 14 nt, Vaccinia virus
uguaugaaaugcuu

SEQ ID NO: 4068378 - RNA, 18 nt, Vaccinia virus
uguaugauaaaauucuua

SEQ ID NO: 4068379 - RNA, 19 nt, Vaccinia virus
uguaugcaaccguaucaaa

SEQ ID NO: 4068380 - RNA, 17 nt, Vaccinia virus
uguaugucucaauacua

SEQ ID NO: 4068381 - RNA, 22 nt, Vaccinia virus
uguaugugcauucuuuaugaca

SEQ ID NO: 4068382 - RNA, 17 nt, Vaccinia virus
uguauucaacaugcuuu

SEQ ID NO: 4068383 - RNA, 18 nt, Vaccinia virus
uguauucacuuaacaguu

SEQ ID NO: 4068384 - RNA, 13 nt, Vaccinia virus
uguauuccaaauu

SEQ ID NO: 4068385 - RNA, 15 nt, Vaccinia virus
uguauucucuuacaa

SEQ ID NO: 4068386 - RNA, 17 nt, Vaccinia virus
uguauucuuuuuaagau

SEQ ID NO: 4068387 - RNA, 19 nt, Vaccinia virus
uguauugauuacaguguau

SEQ ID NO: 4068388 - RNA, 15 nt, Vaccinia virus
uguauugcacauguu

SEQ ID NO: 4068389 - RNA, 21 nt, Vaccinia virus
uguauuggauccuuugacuau

SEQ ID NO: 4068390 - RNA, 17 nt, Vaccinia virus
uguauuuauaaccuuuu

SEQ ID NO: 4068391 - RNA, 11 nt, Vaccinia virus
uguauuuccau

SEQ ID NO: 4068392 - RNA, 12 nt, Vaccinia virus
ugucaacaaugu

SEQ ID NO: 4068393 - RNA, 22 nt, Vaccinia virus
ugucagagcacaagauuuccaa

SEQ ID NO: 4068394 - RNA, 15 nt, Vaccinia virus
ugucauuuauacguu

SEQ ID NO: 4068395 - RNA, 17 nt, Vaccinia virus
aaacucaauuauacucu

SEQ ID NO: 4068396 - RNA, 16 nt, Vaccinia virus
aaacucgcuuaauauc

SEQ ID NO: 4068397 - RNA, 18 nt, Vaccinia virus
aaacucguaaaaagauua

SEQ ID NO: 4068398 - RNA, 14 nt, Vaccinia virus
aaacucuuuucaaa

SEQ ID NO: 4068399 - RNA, 16 nt, Vaccinia virus
aaacugcugugaauac

SEQ ID NO: 4068400 - RNA, 14 nt, Vaccinia virus
aaacugugaauguc

SEQ ID NO: 4068401 - RNA, 15 nt, Vaccinia virus
aaacuguuuauucca

SEQ ID NO: 4068402 - RNA, 19 nt, Vaccinia virus
aaacuuccauggaaaaacg

SEQ ID NO: 4068403 - RNA, 14 nt, Vaccinia virus
aaacuugacauuua

SEQ ID NO: 4068404 - RNA, 21 nt, Vaccinia virus
aaacuugguauuuuuugguuc

SEQ ID NO: 4068405 - RNA, 19 nt, Vaccinia virus
aaacuuguaagaaguaaau

SEQ ID NO: 4068406 - RNA, 22 nt, Vaccinia virus
aaacuuuagaagaauaucucaa

SEQ ID NO: 4068407 - RNA, 11 nt, Vaccinia virus
aaacuuuaucc

SEQ ID NO: 4068408 - RNA, 13 nt, Vaccinia virus
aaacuuuuagaaa

SEQ ID NO: 4068409 - RNA, 15 nt, Vaccinia virus
aaagaaaaacacauu

SEQ ID NO: 4068410 - RNA, 14 nt, Vaccinia virus
aaagaaaucuuaug

SEQ ID NO: 4068411 - RNA, 16 nt, Vaccinia virus
aaagaggaucguacau

SEQ ID NO: 4068412 - RNA, 20 nt, Vaccinia virus
aaagaguacaaccucauacu

SEQ ID NO: 4068413 - RNA, 22 nt, Vaccinia virus
aaagaguauggugaaugacucu

SEQ ID NO: 4068414 - RNA, 14 nt, Vaccinia virus
aaagauagaaauga

SEQ ID NO: 4068415 - RNA, 15 nt, Vaccinia virus
aaagaucaaggaaau

SEQ ID NO: 4068416 - RNA, 12 nt, Vaccinia virus
aaagaucauauu

SEQ ID NO: 4068417 - RNA, 19 nt, Vaccinia virus
aaagaugcuauguauauau

SEQ ID NO: 4068418 - RNA, 15 nt, Vaccinia virus
aaagauggcugaaau

SEQ ID NO: 4068419 - RNA, 16 nt, Vaccinia virus
aaagauggucuaaaau

SEQ ID NO: 4068420 - RNA, 12 nt, Vaccinia virus
aaagauguuaug

SEQ ID NO: 4068421 - RNA, 16 nt, Vaccinia virus
aaagauuaauacauua

SEQ ID NO: 4068422 - RNA, 20 nt, Vaccinia virus
aaagauuaccguaugauaug

SEQ ID NO: 4068423 - RNA, 20 nt, Vaccinia virus
aaagauucuauaauaaugaa

SEQ ID NO: 4068424 - RNA, 18 nt, Vaccinia virus
aaagcaauacgauuuaug

SEQ ID NO: 4068425 - RNA, 18 nt, Vaccinia virus
aaagcaguuaccaaagag

SEQ ID NO: 4068426 - RNA, 15 nt, Vaccinia virus
aaagcaucauacgaa

SEQ ID NO: 4068427 - RNA, 20 nt, Vaccinia virus
aaagcauuaauacaguuaug

SEQ ID NO: 4068428 - RNA, 16 nt, Vaccinia virus
aaagcccauauauguu

SEQ ID NO: 4068429 - RNA, 19 nt, Vaccinia virus
aaagcggggucgaucuugu

SEQ ID NO: 4068430 - RNA, 19 nt, Vaccinia virus
aaagcugggggauguucug

SEQ ID NO: 4068431 - RNA, 20 nt, Vaccinia virus
aaaggaagaauaucauauua

SEQ ID NO: 4068432 - RNA, 23 nt, Vaccinia virus
aaaggcggucacgucgucaaaau

SEQ ID NO: 4068433 - RNA, 24 nt, Vaccinia virus
aaaggggugagaauguuccagagu

SEQ ID NO: 4068434 - RNA, 14 nt, Vaccinia virus
aaaguaaaaaagaa

SEQ ID NO: 4068435 - RNA, 19 nt, Vaccinia virus
aaaguauccucuacucauu

SEQ ID NO: 4068436 - RNA, 20 nt, Vaccinia virus
aaagucguuuauaucacauu

SEQ ID NO: 4068437 - RNA, 14 nt, Vaccinia virus
aaagugcaaaugag

SEQ ID NO: 4068438 - RNA, 22 nt, Vaccinia virus
aaaguuaggguucuuguuccau

SEQ ID NO: 4068439 - RNA, 16 nt, Vaccinia virus
aaaguuaguacagaag

SEQ ID NO: 4068440 - RNA, 14 nt, Vaccinia virus
aaaguucaacauga

SEQ ID NO: 4068441 - RNA, 15 nt, Vaccinia virus
aaaguuucacaugaa

SEQ ID NO: 4068442 - RNA, 23 nt, Vaccinia virus
aaauaaaauauaaaauauuggaa

SEQ ID NO: 4068443 - RNA, 13 nt, Vaccinia virus
aaauaaaaugagu

SEQ ID NO: 4068444 - RNA, 18 nt, Vaccinia virus
aaauaacaguaucauuua

SEQ ID NO: 4068445 - RNA, 16 nt, Vaccinia virus
aaauaaguaaaaagug

SEQ ID NO: 4068446 - RNA, 15 nt, Vaccinia virus
aaauaaguaguuaug

SEQ ID NO: 4068447 - RNA, 22 nt, Vaccinia virus
aaauaauccugaauauauugau

SEQ ID NO: 4068448 - RNA, 15 nt, Vaccinia virus
aaauaauuauuagaa

SEQ ID NO: 4068449 - RNA, 17 nt, Vaccinia virus
aaauacgaaaacgauau

SEQ ID NO: 4068450 - RNA, 15 nt, Vaccinia virus
aaauacuuccaucaa

SEQ ID NO: 4068451 - RNA, 15 nt, Vaccinia virus
aaauacuucuuggaa

SEQ ID NO: 4068452 - RNA, 13 nt, Vaccinia virus
aaauagaacuuau

SEQ ID NO: 4068453 - RNA, 16 nt, Vaccinia virus
aaauagagagcuauau

SEQ ID NO: 4068454 - RNA, 14 nt, Vaccinia virus
aaauagauuauuua

SEQ ID NO: 4068455 - RNA, 19 nt, Vaccinia virus
aaauagcggacagcuauau

SEQ ID NO: 4068456 - RNA, 21 nt, Vaccinia virus
aaauagcucuuaguaugggaa

SEQ ID NO: 4068457 - RNA, 22 nt, Vaccinia virus
aaauaggaguuagaauaauaau

SEQ ID NO: 4068458 - RNA, 16 nt, Vaccinia virus
aaauaggguuguguau

SEQ ID NO: 4068459 - RNA, 17 nt, Vaccinia virus
aaauaggguuguguaua

SEQ ID NO: 4068460 - RNA, 18 nt, Vaccinia virus
aaauagguuuuguucuau

SEQ ID NO: 4068461 - RNA, 20 nt, Vaccinia virus
aaauauauaguauuaaugau

SEQ ID NO: 4068462 - RNA, 14 nt, Vaccinia virus
aaauaucgauguuu

SEQ ID NO: 4068463 - RNA, 16 nt, Vaccinia virus
aaauaucuauaugauu

SEQ ID NO: 4068464 - RNA, 11 nt, Vaccinia virus
aaauaucucau

SEQ ID NO: 4068465 - RNA, 22 nt, Vaccinia virus
aaauaucuuaaggagaaugaaa

SEQ ID NO: 4068466 - RNA, 17 nt, Vaccinia virus
aaauauguaauaaucau

SEQ ID NO: 4068467 - RNA, 12 nt, Vaccinia virus
aaauauucauua

SEQ ID NO: 4068468 - RNA, 20 nt, Vaccinia virus
aaauauuuagaaauugaaau

SEQ ID NO: 4068469 - RNA, 14 nt, Vaccinia virus
aaaucaauccacua

SEQ ID NO: 4068470 - RNA, 21 nt, Vaccinia virus
aaaucagauaucgauguuaua

SEQ ID NO: 4068471 - RNA, 22 nt, Vaccinia virus
aaaucauuaacggauagcaaaa

SEQ ID NO: 4068472 - RNA, 23 nt, Vaccinia virus
aaaucauuauauaguguugcuau

SEQ ID NO: 4068473 - RNA, 16 nt, Vaccinia virus
aaaucauuguguuuau

SEQ ID NO: 4068474 - RNA, 21 nt, Vaccinia virus
aaauccuuguuugauaaaugu

SEQ ID NO: 4068475 - RNA, 19 nt, Vaccinia virus
aaaucguuaguagauguuu

SEQ ID NO: 4068476 - RNA, 17 nt, Vaccinia virus
aaaucuaacagauacaa

SEQ ID NO: 4068477 - RNA, 19 nt, Vaccinia virus
aaaucuaacagauacaaau

SEQ ID NO: 4068478 - RNA, 16 nt, Vaccinia virus
aaaucuagagguagaa

SEQ ID NO: 4068479 - RNA, 12 nt, Vaccinia virus
aaaucuugugaa

SEQ ID NO: 4068480 - RNA, 18 nt, Vaccinia virus
aaaugaaucccaaacauu

SEQ ID NO: 4068481 - RNA, 21 nt, Vaccinia virus
aaaugauaacuagauagaaag

SEQ ID NO: 4068482 - RNA, 17 nt, Vaccinia virus
aaaugauagaaauauau

SEQ ID NO: 4068483 - RNA, 20 nt, Vaccinia virus
aaaugaucauacucauuuau

SEQ ID NO: 4068484 - RNA, 18 nt, Vaccinia virus
aaaugauuaucaaacaca

SEQ ID NO: 4068485 - RNA, 14 nt, Vaccinia virus
aaaugauuuuggaa

SEQ ID NO: 4068486 - RNA, 20 nt, Vaccinia virus
aaaugcaagcaucuuguuaa

SEQ ID NO: 4068487 - RNA, 16 nt, Vaccinia virus
aaaugcgucaaucaua

SEQ ID NO: 4068488 - RNA, 15 nt, Vaccinia virus
aaaugcuaaauaugc

SEQ ID NO: 4068489 - RNA, 17 nt, Vaccinia virus
aaaugcugaagcaauaa

SEQ ID NO: 4068490 - RNA, 15 nt, Vaccinia virus
aaauggauauuucca

SEQ ID NO: 4068491 - RNA, 16 nt, Vaccinia virus
aaauguauaaaaaacu

SEQ ID NO: 4068492 - RNA, 21 nt, Vaccinia virus
aaauguauaacaaauacagaa

SEQ ID NO: 4068493 - RNA, 19 nt, Vaccinia virus
aaaugucacuauuaaagau

SEQ ID NO: 4068494 - RNA, 18 nt, Vaccinia virus
aaauguccguuauauaau

SEQ ID NO: 4068495 - RNA, 14 nt, Vaccinia virus
aaauguguaauaau

SEQ ID NO: 4068496 - RNA, 19 nt, Vaccinia virus
aaauguuaccggauuuaug

SEQ ID NO: 4068497 - RNA, 14 nt, Vaccinia virus
aaauguuugaucaa

SEQ ID NO: 4068498 - RNA, 14 nt, Vaccinia virus
aaauuaaaaaagau

SEQ ID NO: 4068499 - RNA, 22 nt, Vaccinia virus
aaauuaacagauaaaaagacuu

SEQ ID NO: 4068500 - RNA, 16 nt, Vaccinia virus
aaauuaauuauuguau

SEQ ID NO: 4068501 - RNA, 14 nt, Vaccinia virus
aaauuauccuauca

SEQ ID NO: 4068502 - RNA, 18 nt, Vaccinia virus
aaauuaugaaaaaaagau

SEQ ID NO: 4068503 - RNA, 18 nt, Vaccinia virus
aaauuauggcguuuguau

SEQ ID NO: 4068504 - RNA, 21 nt, Vaccinia virus
aaauuauucauucuagaacua

SEQ ID NO: 4068505 - RNA, 16 nt, Vaccinia virus
aaauucccauucuaau

SEQ ID NO: 4068506 - RNA, 18 nt, Vaccinia virus
aaauucuaggcucaguau

SEQ ID NO: 4068507 - RNA, 21 nt, Vaccinia virus
aaauucuuaguuauauauacu

SEQ ID NO: 4068508 - RNA, 13 nt, Vaccinia virus
aaauugaaaauaa

SEQ ID NO: 4068509 - RNA, 13 nt, Vaccinia virus
aaauugcaaaaua

SEQ ID NO: 4068510 - RNA, 21 nt, Vaccinia virus
aaauuggaaggauauacaaag

SEQ ID NO: 4068511 - RNA, 19 nt, Vaccinia virus
aaauuugcaucuacaucau

SEQ ID NO: 4068512 - RNA, 21 nt, Vaccinia virus
aaauuuuacccgccuucgaau

SEQ ID NO: 4068513 - RNA, 23 nt, Vaccinia virus
aaauuuuguugauuacucuuuuu

SEQ ID NO: 4068514 - RNA, 16 nt, Vaccinia virus
aaauuuuuuucauuga

SEQ ID NO: 4068515 - RNA, 17 nt, Vaccinia virus
aaauuuuuuuucaguua

SEQ ID NO: 4068516 - RNA, 13 nt, Vaccinia virus
aacaaaaauugau

SEQ ID NO: 4068517 - RNA, 12 nt, Vaccinia virus
aacaaacagcaa

SEQ ID NO: 4068518 - RNA, 15 nt, Vaccinia virus
aacaaaguuauucau

SEQ ID NO: 4068519 - RNA, 18 nt, Vaccinia virus
aacaacaaauaaaaaggu

SEQ ID NO: 4068520 - RNA, 22 nt, Vaccinia virus
aacaagcaucaugaauacagua

SEQ ID NO: 4068521 - RNA, 16 nt, Vaccinia virus
aacaaggcuuugauau

SEQ ID NO: 4068522 - RNA, 15 nt, Vaccinia virus
aacauaaucaaggau

SEQ ID NO: 4068523 - RNA, 19 nt, Vaccinia virus
aacauauauaauaaauaac

SEQ ID NO: 4068524 - RNA, 15 nt, Vaccinia virus
aacauauuuuucuau

SEQ ID NO: 4068525 - RNA, 14 nt, Vaccinia virus
aacaucaaaaaauu

SEQ ID NO: 4068526 - RNA, 18 nt, Vaccinia virus
aacauccuuuaaugguuu

SEQ ID NO: 4068527 - RNA, 20 nt, Vaccinia virus
aacaucgaagaugaaucaaa

SEQ ID NO: 4068528 - RNA, 17 nt, Vaccinia virus
aacaucucaaugucuuu

SEQ ID NO: 4068529 - RNA, 15 nt, Vaccinia virus
aacaugagacugacu

SEQ ID NO: 4068530 - RNA, 16 nt, Vaccinia virus
aacaugcuuuucuaua

SEQ ID NO: 4068531 - RNA, 20 nt, Vaccinia virus
aacaugucuucuauucuaga

SEQ ID NO: 4068532 - RNA, 17 nt, Vaccinia virus
aacaugugugaaaauau

SEQ ID NO: 4068533 - RNA, 13 nt, Vaccinia virus
aacauuaguucca

SEQ ID NO: 4068534 - RNA, 19 nt, Vaccinia virus
aacauuauucuauuucgaa

SEQ ID NO: 4068535 - RNA, 11 nt, Vaccinia virus
aacauucucca

SEQ ID NO: 4068536 - RNA, 19 nt, Vaccinia virus
aacauugauuuuaaaauua

SEQ ID NO: 4068537 - RNA, 17 nt, Vaccinia virus
aacauuuuauaaauaua

SEQ ID NO: 4068538 - RNA, 13 nt, Vaccinia virus
aacauuuuuguug

SEQ ID NO: 4068539 - RNA, 14 nt, Vaccinia virus
aacauuuuuuguuu

SEQ ID NO: 4068540 - RNA, 13 nt, Vaccinia virus
aaccaaauacaua

SEQ ID NO: 4068541 - RNA, 18 nt, Vaccinia virus
aaccagaaguuuuauccu

SEQ ID NO: 4068542 - RNA, 20 nt, Vaccinia virus
aaccagguaggcaguuuuau

SEQ ID NO: 4068543 - RNA, 13 nt, Vaccinia virus
aaccauaaauaca

SEQ ID NO: 4068544 - RNA, 21 nt, Vaccinia virus
aaccauucauuaauuucugau

SEQ ID NO: 4068545 - RNA, 22 nt, Vaccinia virus
aaccauugucuccuagcaauua

SEQ ID NO: 4068546 - RNA, 19 nt, Vaccinia virus
aaccugaucuggaaaauaa

SEQ ID NO: 4068547 - RNA, 15 nt, Vaccinia virus
aacgacgcauuaucu

SEQ ID NO: 4068548 - RNA, 21 nt, Vaccinia virus
aacgaguacuuuaaagaagua

SEQ ID NO: 4068549 - RNA, 17 nt, Vaccinia virus
aacgauaccaucuucug

SEQ ID NO: 4068550 - RNA, 14 nt, Vaccinia virus
aacgaugucaaaau

SEQ ID NO: 4068551 - RNA, 17 nt, Vaccinia virus
aacgauuuacuguggcu

SEQ ID NO: 4068552 - RNA, 16 nt, Vaccinia virus
aacgggauauaugaau

SEQ ID NO: 4068553 - RNA, 15 nt, Vaccinia virus
aacguaaaauacaua

SEQ ID NO: 4068554 - RNA, 17 nt, Vaccinia virus
aacgucguauguagaaa

SEQ ID NO: 4068555 - RNA, 12 nt, Vaccinia virus
aacguggauaaa

SEQ ID NO: 4068556 - RNA, 19 nt, Vaccinia virus
aacguucaccaaugucucu

SEQ ID NO: 4068557 - RNA, 18 nt, Vaccinia virus
aacguucacguaaauaca

SEQ ID NO: 4068558 - RNA, 21 nt, Vaccinia virus
aacguuucccaaugaaauggu

SEQ ID NO: 4068559 - RNA, 15 nt, Vaccinia virus
aacuaaauuaacaau

SEQ ID NO: 4068560 - RNA, 20 nt, Vaccinia virus
aacuaaccaacuaacuauau

SEQ ID NO: 4068561 - RNA, 14 nt, Vaccinia virus
aacuaacuauugaa

SEQ ID NO: 4068562 - RNA, 14 nt, Vaccinia virus
aacuacaauauuuc

SEQ ID NO: 4068563 - RNA, 17 nt, Vaccinia virus
aacuauauaauucuauu

SEQ ID NO: 4068564 - RNA, 20 nt, Vaccinia virus
aacuauaugucuguagaaaa

SEQ ID NO: 4068565 - RNA, 13 nt, Vaccinia virus
aacuaucaaacaa

SEQ ID NO: 4068566 - RNA, 20 nt, Vaccinia virus
aacuauuaacuauuuugucu

SEQ ID NO: 4068567 - RNA, 16 nt, Vaccinia virus
aacuauuucagaacau

SEQ ID NO: 4068568 - RNA, 15 nt, Vaccinia virus
aacuauuuuaccguu

SEQ ID NO: 4068569 - RNA, 18 nt, Vaccinia virus
aacuccaagauaccagua

SEQ ID NO: 4068570 - RNA, 20 nt, Vaccinia virus
aacuccaauaaaaagaugau

SEQ ID NO: 4068571 - RNA, 20 nt, Vaccinia virus
aacuccguguuuaugaugcc

SEQ ID NO: 4068572 - RNA, 21 nt, Vaccinia virus
aacucgccggcgcaucaguau

SEQ ID NO: 4068573 - RNA, 17 nt, Vaccinia virus
aacucgguaaaaaaauu

SEQ ID NO: 4068574 - RNA, 23 nt, Vaccinia virus
aacucuaguaaaauaaucauaca

SEQ ID NO: 4068575 - RNA, 16 nt, Vaccinia virus
aacucucaaaaugcug

SEQ ID NO: 4068576 - RNA, 18 nt, Vaccinia virus
aacucucguauagucaua

SEQ ID NO: 4068577 - RNA, 18 nt, Vaccinia virus
aacucucucauuuucuuu

SEQ ID NO: 4068578 - RNA, 18 nt, Vaccinia virus
aacucuugcuacaaaaug

SEQ ID NO: 4068579 - RNA, 18 nt, Vaccinia virus
aacucuuuagucgagaua

SEQ ID NO: 4068580 - RNA, 19 nt, Vaccinia virus
aacucuuucgcuauuucua

SEQ ID NO: 4068581 - RNA, 14 nt, Vaccinia virus
aacugaaucuaaca

SEQ ID NO: 4068582 - RNA, 19 nt, Vaccinia virus
aacugaggaugauugauua

SEQ ID NO: 4068583 - RNA, 20 nt, Vaccinia virus
aacugaguguaaaacucuau

SEQ ID NO: 4068584 - RNA, 17 nt, Vaccinia virus
aacugauucaauacgaa

SEQ ID NO: 4068585 - RNA, 22 nt, Vaccinia virus
aacugauuuuagcagaauauau

SEQ ID NO: 4068586 - RNA, 17 nt, Vaccinia virus
aacugcauauuauacac

SEQ ID NO: 4068587 - RNA, 21 nt, Vaccinia virus
aacugcauccuucuaagauua

SEQ ID NO: 4068588 - RNA, 14 nt, Vaccinia virus
aacuguauaaaaug

SEQ ID NO: 4068589 - RNA, 21 nt, Vaccinia virus
aacuguccacuguucuagaca

SEQ ID NO: 4068590 - RNA, 11 nt, Vaccinia virus
aacugucuaua

SEQ ID NO: 4068591 - RNA, 18 nt, Vaccinia virus
aacuguggauacucugua

SEQ ID NO: 4068592 - RNA, 15 nt, Vaccinia virus
aacuguuguaaauua

SEQ ID NO: 4068593 - RNA, 12 nt, Vaccinia virus
aacuuaaaagaa

SEQ ID NO: 4068594 - RNA, 16 nt, Vaccinia virus
aacuuaaaagaauuac

SEQ ID NO: 4068595 - RNA, 15 nt, Vaccinia virus
aacuuaaacaaaaua

SEQ ID NO: 4068596 - RNA, 12 nt, Vaccinia virus
aacuuacaaaau

SEQ ID NO: 4068597 - RNA, 15 nt, Vaccinia virus
aacuuaucaaaacau

SEQ ID NO: 4068598 - RNA, 19 nt, Vaccinia virus
aacuuauuuuauacagacu

SEQ ID NO: 4068599 - RNA, 18 nt, Vaccinia virus
aacuucauccguuuccuu

SEQ ID NO: 4068600 - RNA, 22 nt, Vaccinia virus
aacuucuagucuagaaauaaua

SEQ ID NO: 4068601 - RNA, 17 nt, Vaccinia virus
aacuucucuaaaugagu

SEQ ID NO: 4068602 - RNA, 17 nt, Vaccinia virus
aacuugaggucaaggau

SEQ ID NO: 4068603 - RNA, 20 nt, Vaccinia virus
aacuuggggagaaugauaca

SEQ ID NO: 4068604 - RNA, 12 nt, Vaccinia virus
aacuuuaaauac

SEQ ID NO: 4068605 - RNA, 16 nt, Vaccinia virus
aacuuuaucacaauau

SEQ ID NO: 4068606 - RNA, 14 nt, Vaccinia virus
aacuuuaucaucuu

SEQ ID NO: 4068607 - RNA, 14 nt, Vaccinia virus
aacuuuauuagaua

SEQ ID NO: 4068608 - RNA, 13 nt, Vaccinia virus
aacuuucuagaca

SEQ ID NO: 4068609 - RNA, 23 nt, Vaccinia virus
aacuuugaaauuguuuuuuauuu

SEQ ID NO: 4068610 - RNA, 15 nt, Vaccinia virus
aacuuuguucauuua

SEQ ID NO: 4068611 - RNA, 18 nt, Vaccinia virus
aacuuuuucacaaaacua

SEQ ID NO: 4068612 - RNA, 13 nt, Vaccinia virus
aagaaaaaugauu

SEQ ID NO: 4068613 - RNA, 14 nt, Vaccinia virus
aagaaaacaaacau

SEQ ID NO: 4068614 - RNA, 21 nt, Vaccinia virus
aagaaauauaaaacuacuguc

SEQ ID NO: 4068615 - RNA, 23 nt, Vaccinia virus
aagaaaugguaaauaaauacuuu

SEQ ID NO: 4068616 - RNA, 22 nt, Vaccinia virus
aagaagaaauacuaaaaaaugu

SEQ ID NO: 4068617 - RNA, 13 nt, Vaccinia virus
aagaagaugaugg

SEQ ID NO: 4068618 - RNA, 19 nt, Vaccinia virus
aagaagugucuauaaaugu

SEQ ID NO: 4068619 - RNA, 19 nt, Vaccinia virus
aagaauaugugacaaaguc

SEQ ID NO: 4068620 - RNA, 15 nt, Vaccinia virus
aagaaucauccaagu

SEQ ID NO: 4068621 - RNA, 20 nt, Vaccinia virus
aagaaugcuguuaugugcau

SEQ ID NO: 4068622 - RNA, 18 nt, Vaccinia virus
aagaauguauauacaugu

SEQ ID NO: 4068623 - RNA, 12 nt, Vaccinia virus
aagaauuacuua

SEQ ID NO: 4068624 - RNA, 19 nt, Vaccinia virus
auaauugaguaaaugaaug

SEQ ID NO: 4068625 - RNA, 14 nt, Vaccinia virus
auaauugcuuuucu

SEQ ID NO: 4068626 - RNA, 19 nt, Vaccinia virus
auaauuguaacauccuucu

SEQ ID NO: 4068627 - RNA, 18 nt, Vaccinia virus
auaauuguacuuuguaau

SEQ ID NO: 4068628 - RNA, 13 nt, Vaccinia virus
auaauuguuguau

SEQ ID NO: 4068629 - RNA, 14 nt, Vaccinia virus
auaauuguuuugaa

SEQ ID NO: 4068630 - RNA, 15 nt, Vaccinia virus
auaauuuaacauuuu

SEQ ID NO: 4068631 - RNA, 13 nt, Vaccinia virus
auaauuuaauaau

SEQ ID NO: 4068632 - RNA, 17 nt, Vaccinia virus
auaauuucccaaauaca

SEQ ID NO: 4068633 - RNA, 21 nt, Vaccinia virus
auaauuugaccugauuacauu

SEQ ID NO: 4068634 - RNA, 18 nt, Vaccinia virus
auaauuugguauauacau

SEQ ID NO: 4068635 - RNA, 19 nt, Vaccinia virus
auaauuuuugaugcuguug

SEQ ID NO: 4068636 - RNA, 18 nt, Vaccinia virus
auaauuuuuuuaguuuuu

SEQ ID NO: 4068637 - RNA, 15 nt, Vaccinia virus
auacaaaauaauaga

SEQ ID NO: 4068638 - RNA, 21 nt, Vaccinia virus
auacaaaugacuacguuguua

SEQ ID NO: 4068639 - RNA, 16 nt, Vaccinia virus
auacaaauuuuaagaa

SEQ ID NO: 4068640 - RNA, 14 nt, Vaccinia virus
auacaaauuuuacu

SEQ ID NO: 4068641 - RNA, 17 nt, Vaccinia virus
auacaagcgagugcuuc

SEQ ID NO: 4068642 - RNA, 13 nt, Vaccinia virus
auacaauaucuuc

SEQ ID NO: 4068643 - RNA, 14 nt, Vaccinia virus
auacacaaaaagaa

SEQ ID NO: 4068644 - RNA, 15 nt, Vaccinia virus
auacacauuuucaaa

SEQ ID NO: 4068645 - RNA, 21 nt, Vaccinia virus
auacaccaucaauagauaaaa

SEQ ID NO: 4068646 - RNA, 23 nt, Vaccinia virus
auacacguuagauuauucucaaa

SEQ ID NO: 4068647 - RNA, 21 nt, Vaccinia virus
auacagaguauguaaaaaugu

SEQ ID NO: 4068648 - RNA, 21 nt, Vaccinia virus
auacauagucgugaucaacau

SEQ ID NO: 4068649 - RNA, 15 nt, Vaccinia virus
auacauaucaauauc

SEQ ID NO: 4068650 - RNA, 19 nt, Vaccinia virus
auacauccgcauacagcca

SEQ ID NO: 4068651 - RNA, 21 nt, Vaccinia virus
auacaucuauuaguaugguuu

SEQ ID NO: 4068652 - RNA, 20 nt, Vaccinia virus
auacauguauuaaaauacuu

SEQ ID NO: 4068653 - RNA, 14 nt, Vaccinia virus
auacauuaaguaaa

SEQ ID NO: 4068654 - RNA, 20 nt, Vaccinia virus
auacauuaucaaaaagaacg

SEQ ID NO: 4068655 - RNA, 16 nt, Vaccinia virus
auacauucuucuguua

SEQ ID NO: 4068656 - RNA, 16 nt, Vaccinia virus
auacauuugaguuacu

SEQ ID NO: 4068657 - RNA, 12 nt, Vaccinia virus
auaccaaacaua

SEQ ID NO: 4068658 - RNA, 18 nt, Vaccinia virus
auaccacauacaaaacua

SEQ ID NO: 4068659 - RNA, 16 nt, Vaccinia virus
auaccaucuucuggaa

SEQ ID NO: 4068660 - RNA, 13 nt, Vaccinia virus
auaccauguguau

SEQ ID NO: 4068661 - RNA, 20 nt, Vaccinia virus
auacccaaucucucucaaau

SEQ ID NO: 4068662 - RNA, 22 nt, Vaccinia virus
auaccguucgaugauauaguac

SEQ ID NO: 4068663 - RNA, 16 nt, Vaccinia virus
auaccuuguaauuaaa

SEQ ID NO: 4068664 - RNA, 21 nt, Vaccinia virus
auacgaaauaaauaaugaauu

SEQ ID NO: 4068665 - RNA, 21 nt, Vaccinia virus
auacgaaccgggaaagagaag

SEQ ID NO: 4068666 - RNA, 17 nt, Vaccinia virus
auacgaagacuauagau

SEQ ID NO: 4068667 - RNA, 16 nt, Vaccinia virus
auacgaggaugaugaa

SEQ ID NO: 4068668 - RNA, 16 nt, Vaccinia virus
auacgauaagauaugu

SEQ ID NO: 4068669 - RNA, 22 nt, Vaccinia virus
auacgauaguuuguuucuggaa

SEQ ID NO: 4068670 - RNA, 16 nt, Vaccinia virus
auacgauggugaaaga

SEQ ID NO: 4068671 - RNA, 15 nt, Vaccinia virus
auacggaauaaacau

SEQ ID NO: 4068672 - RNA, 16 nt, Vaccinia virus
auacguacugucuaua

SEQ ID NO: 4068673 - RNA, 17 nt, Vaccinia virus
auacuaagcaaguacau

SEQ ID NO: 4068674 - RNA, 21 nt, Vaccinia virus
auacuaccaaccuacacuauu

SEQ ID NO: 4068675 - RNA, 15 nt, Vaccinia virus
auacuagaguacuua

SEQ ID NO: 4068676 - RNA, 19 nt, Vaccinia virus
auacuaguagcuucacaaa

SEQ ID NO: 4068677 - RNA, 11 nt, Vaccinia virus
auacuaucaaa

SEQ ID NO: 4068678 - RNA, 13 nt, Vaccinia virus
auacuaucaaaau

SEQ ID NO: 4068679 - RNA, 21 nt, Vaccinia virus
auacucccuugcaucauauac

SEQ ID NO: 4068680 - RNA, 14 nt, Vaccinia virus
auacucuaugaaug

SEQ ID NO: 4068681 - RNA, 14 nt, Vaccinia virus
auacucuauuaaug

SEQ ID NO: 4068682 - RNA, 23 nt, Vaccinia virus
auacucuccgaguguaaauauua

SEQ ID NO: 4068683 - RNA, 15 nt, Vaccinia virus
auacuggagaacuua

SEQ ID NO: 4068684 - RNA, 17 nt, Vaccinia virus
auacugguuaaaauccu

SEQ ID NO: 4068685 - RNA, 21 nt, Vaccinia virus
auacugucuguaacucugaua

SEQ ID NO: 4068686 - RNA, 14 nt, Vaccinia virus
auacuuaaaaaugg

SEQ ID NO: 4068687 - RNA, 13 nt, Vaccinia virus
auacuuuaacauc

SEQ ID NO: 4068688 - RNA, 23 nt, Vaccinia virus
auacuuucgguucuuuaaaagaa

SEQ ID NO: 4068689 - RNA, 23 nt, Vaccinia virus
agaaaaucuuucuucuacuauau

SEQ ID NO: 4068690 - RNA, 23 nt, Vaccinia virus
agaaaauuagaucugauaauauu

SEQ ID NO: 4068691 - RNA, 21 nt, Vaccinia virus
agaaacaccuagaauacucau

SEQ ID NO: 4068692 - RNA, 23 nt, Vaccinia virus
agaaacacugaagcuaacgauga

SEQ ID NO: 4068693 - RNA, 13 nt, Vaccinia virus
agaaacauauucu

SEQ ID NO: 4068694 - RNA, 20 nt, Vaccinia virus
agaaacuauagauaaugaua

SEQ ID NO: 4068695 - RNA, 18 nt, Vaccinia virus
agaaauacuaaaaaaugu

SEQ ID NO: 4068696 - RNA, 18 nt, Vaccinia virus
agaaauagauaaugaaca

SEQ ID NO: 4068697 - RNA, 17 nt, Vaccinia virus
agaaauauacagcaaug

SEQ ID NO: 4068698 - RNA, 18 nt, Vaccinia virus
agaaauauguuaacaaua

SEQ ID NO: 4068699 - RNA, 19 nt, Vaccinia virus
agaaaucaacgaucuaaua

SEQ ID NO: 4068700 - RNA, 21 nt, Vaccinia virus
agaaaucaacgaucuaauaca

SEQ ID NO: 4068701 - RNA, 22 nt, Vaccinia virus
agaaaucccaccuuauuauauu

SEQ ID NO: 4068702 - RNA, 12 nt, Vaccinia virus
agaaaugauauc

SEQ ID NO: 4068703 - RNA, 22 nt, Vaccinia virus
agaaauggauuaucggaaauac

SEQ ID NO: 4068704 - RNA, 16 nt, Vaccinia virus
agaaauuaucaaaugu

SEQ ID NO: 4068705 - RNA, 23 nt, Vaccinia virus
agaaauuauuuuuacuaauagaa

SEQ ID NO: 4068706 - RNA, 18 nt, Vaccinia virus
agaacaaaaucuaacaga

SEQ ID NO: 4068707 - RNA, 20 nt, Vaccinia virus
agaacagaauaaacaaaaua

SEQ ID NO: 4068708 - RNA, 18 nt, Vaccinia virus
agaacagaccaaauauau

SEQ ID NO: 4068709 - RNA, 15 nt, Vaccinia virus
agaacaguaaauguu

SEQ ID NO: 4068710 - RNA, 19 nt, Vaccinia virus
agaacauacauuuguaaaa

SEQ ID NO: 4068711 - RNA, 22 nt, Vaccinia virus
aagauaugguaaaauuaaauag

SEQ ID NO: 4068712 - RNA, 21 nt, Vaccinia virus
aagauauuaucggguuuaaga

SEQ ID NO: 4068713 - RNA, 22 nt, Vaccinia virus
aagauccaaacgaggaggaaau

SEQ ID NO: 4068714 - RNA, 19 nt, Vaccinia virus
aagauuauuauggaaauca

SEQ ID NO: 4068715 - RNA, 20 nt, Vaccinia virus
aagauuguguuauauaacgg

SEQ ID NO: 4068716 - RNA, 13 nt, Vaccinia virus
aagauuguucucu

SEQ ID NO: 4068717 - RNA, 15 nt, Vaccinia virus
aagauuuaaauccua

SEQ ID NO: 4068718 - RNA, 20 nt, Vaccinia virus
aagauuuuugagaugucuca

SEQ ID NO: 4068719 - RNA, 23 nt, Vaccinia virus
aagcaugugucacuaugauaaac

SEQ ID NO: 4068720 - RNA, 21 nt, Vaccinia virus
aagccauuguugucugaaaua

SEQ ID NO: 4068721 - RNA, 15 nt, Vaccinia virus
aagcccaaaaccaaa

SEQ ID NO: 4068722 - RNA, 17 nt, Vaccinia virus
aagcgaauuacucuguc

SEQ ID NO: 4068723 - RNA, 17 nt, Vaccinia virus
aagcguguuauauauac

SEQ ID NO: 4068724 - RNA, 19 nt, Vaccinia virus
aagcuauuaucaaauacug

SEQ ID NO: 4068725 - RNA, 15 nt, Vaccinia virus
aagcuuuuagaauau

SEQ ID NO: 4068726 - RNA, 12 nt, Vaccinia virus
aaggaacuagaa

SEQ ID NO: 4068727 - RNA, 16 nt, Vaccinia virus
aaggaauugaugaagu

SEQ ID NO: 4068728 - RNA, 12 nt, Vaccinia virus
aaggacaaaguu

SEQ ID NO: 4068729 - RNA, 18 nt, Vaccinia virus
aaggacagaaaaaugcua

SEQ ID NO: 4068730 - RNA, 15 nt, Vaccinia virus
aaggacuuuguagaa

SEQ ID NO: 4068731 - RNA, 16 nt, Vaccinia virus
aaggagauauugaaac

SEQ ID NO: 4068732 - RNA, 17 nt, Vaccinia virus
aaggauacuaaacauug

SEQ ID NO: 4068733 - RNA, 19 nt, Vaccinia virus
aaggccaaagaaaugagua

SEQ ID NO: 4068734 - RNA, 23 nt, Vaccinia virus
aaggcggauguugugaaugacau

SEQ ID NO: 4068735 - RNA, 15 nt, Vaccinia virus
aagguaagaguuaug

SEQ ID NO: 4068736 - RNA, 18 nt, Vaccinia virus
aagguguuaaaauuagaa

SEQ ID NO: 4068737 - RNA, 14 nt, Vaccinia virus
aaguaaauacugaa

SEQ ID NO: 4068738 - RNA, 13 nt, Vaccinia virus
aaguaaugguaug

SEQ ID NO: 4068739 - RNA, 16 nt, Vaccinia virus
aaguacuauugucuaa

SEQ ID NO: 4068740 - RNA, 20 nt, Vaccinia virus
aaguagaaauuaucaaaugu

SEQ ID NO: 4068741 - RNA, 20 nt, Vaccinia virus
aaguagaucaucugaaaauc

SEQ ID NO: 4068742 - RNA, 20 nt, Vaccinia virus
aaguagaugguauuucugaa

SEQ ID NO: 4068743 - RNA, 18 nt, Vaccinia virus
aaguaggauuauguaaca

SEQ ID NO: 4068744 - RNA, 19 nt, Vaccinia virus
aaguauacauguuagagaa

SEQ ID NO: 4068745 - RNA, 19 nt, Vaccinia virus
aaguauauaauaaauacuu

SEQ ID NO: 4068746 - RNA, 17 nt, Vaccinia virus
aaguaucaaaucuucua

SEQ ID NO: 4068747 - RNA, 23 nt, Vaccinia virus
aaguaucuacgauuuuuacaaaa

SEQ ID NO: 4068748 - RNA, 23 nt, Vaccinia virus
aaguaugaucaacgaugauacuc

SEQ ID NO: 4068749 - RNA, 21 nt, Vaccinia virus
aaguauucuccagaugaaugg

SEQ ID NO: 4068750 - RNA, 18 nt, Vaccinia virus
aagucauagaaaaauaua

SEQ ID NO: 4068751 - RNA, 18 nt, Vaccinia virus
aagucauaucuagaauga

SEQ ID NO: 4068752 - RNA, 17 nt, Vaccinia virus
aagucauuugaauccau

SEQ ID NO: 4068753 - RNA, 18 nt, Vaccinia virus
aagucgacaaccaaacgu

SEQ ID NO: 4068754 - RNA, 16 nt, Vaccinia virus
aagucugucaaaucau

SEQ ID NO: 4068755 - RNA, 18 nt, Vaccinia virus
aagugaaggauugauaac

SEQ ID NO: 4068756 - RNA, 21 nt, Vaccinia virus
aagugacauuauaauuuuacc

SEQ ID NO: 4068757 - RNA, 20 nt, Vaccinia virus
aagugaguauacuugucauc

SEQ ID NO: 4068758 - RNA, 17 nt, Vaccinia virus
aagugcuuaaauauuuc

SEQ ID NO: 4068759 - RNA, 14 nt, Vaccinia virus
aaguguguagauau

SEQ ID NO: 4068760 - RNA, 18 nt, Vaccinia virus
aaguuaacacaugucaca

SEQ ID NO: 4068761 - RNA, 18 nt, Vaccinia virus
aaguuaauucagauacua

SEQ ID NO: 4068762 - RNA, 14 nt, Vaccinia virus
aaguuauagaaugu

SEQ ID NO: 4068763 - RNA, 17 nt, Vaccinia virus
aaguuauuguacuaucg

SEQ ID NO: 4068764 - RNA, 13 nt, Vaccinia virus
aaguucuggaaua

SEQ ID NO: 4068765 - RNA, 23 nt, Vaccinia virus
aaguuuauuaguguuuagauaau

SEQ ID NO: 4068766 - RNA, 18 nt, Vaccinia virus
aaguuucguacaaauaca

SEQ ID NO: 4068767 - RNA, 20 nt, Vaccinia virus
aaguuucugaaauaagauua

SEQ ID NO: 4068768 - RNA, 19 nt, Vaccinia virus
aaguuugagauuucauaau

SEQ ID NO: 4068769 - RNA, 17 nt, Vaccinia virus
aaguuuuaaaaauacuu

SEQ ID NO: 4068770 - RNA, 14 nt, Vaccinia virus
aaguuuuacauaag

SEQ ID NO: 4068771 - RNA, 18 nt, Vaccinia virus
aaguuuucccauacuaau

SEQ ID NO: 4068772 - RNA, 22 nt, Vaccinia virus
aaguuuucuuucaaaauagcua

SEQ ID NO: 4068773 - RNA, 22 nt, Vaccinia virus
aaguuuuuccaauuauauggua

SEQ ID NO: 4068774 - RNA, 11 nt, Vaccinia virus
aauaaaaauua

SEQ ID NO: 4068775 - RNA, 12 nt, Vaccinia virus
aauaaaacauuu

SEQ ID NO: 4068776 - RNA, 19 nt, Vaccinia virus
aauaaaaguggaagucauu

SEQ ID NO: 4068777 - RNA, 19 nt, Vaccinia virus
aauaaacuaaacaaaacug

SEQ ID NO: 4068778 - RNA, 18 nt, Vaccinia virus
aauaaacuagagaaacuu

SEQ ID NO: 4068779 - RNA, 16 nt, Vaccinia virus
aauaaacuauuucuaa

SEQ ID NO: 4068780 - RNA, 19 nt, Vaccinia virus
aauaaagaaaaugcagaaa

SEQ ID NO: 4068781 - RNA, 20 nt, Vaccinia virus
aauaaaguauauauaaguua

SEQ ID NO: 4068782 - RNA, 12 nt, Vaccinia virus
aauaaauagcuu

SEQ ID NO: 4068783 - RNA, 16 nt, Vaccinia virus
aauaaaucacuuuuua

SEQ ID NO: 4068784 - RNA, 22 nt, Vaccinia virus
aauaaauggagaauaauuggaa

SEQ ID NO: 4068785 - RNA, 20 nt, Vaccinia virus
aauaaauguuuugauuucaa

SEQ ID NO: 4068786 - RNA, 21 nt, Vaccinia virus
aauaaauuuagugagaauaau

SEQ ID NO: 4068787 - RNA, 14 nt, Vaccinia virus
aauaacaauguuuc

SEQ ID NO: 4068788 - RNA, 18 nt, Vaccinia virus
aauaacuaaaaauguaaa

SEQ ID NO: 4068789 - RNA, 19 nt, Vaccinia virus
aauaacuauguuuuaaaaa

SEQ ID NO: 4068790 - RNA, 14 nt, Vaccinia virus
aauaacucuagacg

SEQ ID NO: 4068791 - RNA, 17 nt, Vaccinia virus
aauaacuuguuagauaa

SEQ ID NO: 4068792 - RNA, 12 nt, Vaccinia virus
aauaagaauaaa

SEQ ID NO: 4068793 - RNA, 21 nt, Vaccinia virus
aauaagaucguccguaacaaa

SEQ ID NO: 4068794 - RNA, 23 nt, Vaccinia virus
aauaagaucguccguaacaaagu

SEQ ID NO: 4068795 - RNA, 20 nt, Vaccinia virus
aauaaggaagguguuaaaau

SEQ ID NO: 4068796 - RNA, 19 nt, Vaccinia virus
aauaauaaacggaagagau

SEQ ID NO: 4068797 - RNA, 16 nt, Vaccinia virus
aauaauaguagaauua

SEQ ID NO: 4068798 - RNA, 19 nt, Vaccinia virus
aauaaucggagaauguuuc

SEQ ID NO: 4068799 - RNA, 18 nt, Vaccinia virus
aauaaucuaguaaaacuu

SEQ ID NO: 4068800 - RNA, 20 nt, Vaccinia virus
aauaaucucgucgauguaaa

SEQ ID NO: 4068801 - RNA, 20 nt, Vaccinia virus
aauaauggaucagauguaga

SEQ ID NO: 4068802 - RNA, 23 nt, Vaccinia virus
aauaauggcuguuuguauaauag

SEQ ID NO: 4068803 - RNA, 18 nt, Vaccinia virus
aauaauugcgaauguuuu

SEQ ID NO: 4068804 - RNA, 14 nt, Vaccinia virus
aauaauuuaacaau

SEQ ID NO: 4068805 - RNA, 14 nt, Vaccinia virus
aauacaaaauaaua

SEQ ID NO: 4068806 - RNA, 14 nt, Vaccinia virus
aauacaaaauguua

SEQ ID NO: 4068807 - RNA, 15 nt, Vaccinia virus
aauacacauaaugaa

SEQ ID NO: 4068808 - RNA, 19 nt, Vaccinia virus
aauacacgauuuaauccau

SEQ ID NO: 4068809 - RNA, 12 nt, Vaccinia virus
aauacagcaucu

SEQ ID NO: 4068810 - RNA, 13 nt, Vaccinia virus
aauacaugggaaa

SEQ ID NO: 4068811 - RNA, 20 nt, Vaccinia virus
aauacauguaacaaaguuuc

SEQ ID NO: 4068812 - RNA, 14 nt, Vaccinia virus
aauacauguacaaa

SEQ ID NO: 4068813 - RNA, 13 nt, Vaccinia virus
aauaccaauuuuu

SEQ ID NO: 4068814 - RNA, 22 nt, Vaccinia virus
aauaccauaaauauauuucuaa

SEQ ID NO: 4068815 - RNA, 18 nt, Vaccinia virus
aauacguuagguauguac

SEQ ID NO: 4068816 - RNA, 22 nt, Vaccinia virus
aauacucuauaaggucagaaaa

SEQ ID NO: 4068817 - RNA, 12 nt, Vaccinia virus
aauacugaauuc

SEQ ID NO: 4068818 - RNA, 23 nt, Vaccinia virus
aauacugaucuucuuuugucgua

SEQ ID NO: 4068819 - RNA, 14 nt, Vaccinia virus
aauacuguauuaug

SEQ ID NO: 4068820 - RNA, 12 nt, Vaccinia virus
aauacuuaaaaa

SEQ ID NO: 4068821 - RNA, 23 nt, Vaccinia virus
uccauugauaaagaaguuauaga

SEQ ID NO: 4068822 - RNA, 19 nt, Vaccinia virus
uccauuuauacauugaaua

SEQ ID NO: 4068823 - RNA, 14 nt, Vaccinia virus
uccauuuucuguaa

SEQ ID NO: 4068824 - RNA, 17 nt, Vaccinia virus
uccauuuuguucaucuc

SEQ ID NO: 4068825 - RNA, 23 nt, Vaccinia virus
ucccaauuaccaacuagaagucu

SEQ ID NO: 4068826 - RNA, 14 nt, Vaccinia virus
ucccaauuccaaag

SEQ ID NO: 4068827 - RNA, 11 nt, Vaccinia virus
ucccugaauac

SEQ ID NO: 4068828 - RNA, 23 nt, Vaccinia virus
uccgacaucaaaugguacaaaaa

SEQ ID NO: 4068829 - RNA, 20 nt, Vaccinia virus
uccgagauaauuucuccaga

SEQ ID NO: 4068830 - RNA, 17 nt, Vaccinia virus
uccgagucagauccaga

SEQ ID NO: 4068831 - RNA, 21 nt, Vaccinia virus
uccgcugccaaguuccuauua

SEQ ID NO: 4068832 - RNA, 16 nt, Vaccinia virus
uccggauccuuuucuu

SEQ ID NO: 4068833 - RNA, 20 nt, Vaccinia virus
uccggauccuuuucuucaga

SEQ ID NO: 4068834 - RNA, 20 nt, Vaccinia virus
uccggugcccagucuaaaag

SEQ ID NO: 4068835 - RNA, 15 nt, Vaccinia virus
uccgguugaugauga

SEQ ID NO: 4068836 - RNA, 22 nt, Vaccinia virus
uccguguaauccauaauccagu

SEQ ID NO: 4068837 - RNA, 15 nt, Vaccinia virus
uccguucucugaaua

SEQ ID NO: 4068838 - RNA, 19 nt, Vaccinia virus
uccguuuauuauuauacau

SEQ ID NO: 4068839 - RNA, 16 nt, Vaccinia virus
uccuaacuuuaaacaa

SEQ ID NO: 4068840 - RNA, 20 nt, Vaccinia virus
uccuagcaucagcaaaacag

SEQ ID NO: 4068841 - RNA, 17 nt, Vaccinia virus
uccuauaacuucuaauc

SEQ ID NO: 4068842 - RNA, 19 nt, Vaccinia virus
uccuauauuuuuuuauucu

SEQ ID NO: 4068843 - RNA, 13 nt, Vaccinia virus
uccuauuaugaaa

SEQ ID NO: 4068844 - RNA, 15 nt, Vaccinia virus
uccuauuucacgaaa

SEQ ID NO: 4068845 - RNA, 11 nt, Vaccinia virus
uccucauuaac

SEQ ID NO: 4068846 - RNA, 16 nt, Vaccinia virus
uccuuauacaauuugu

SEQ ID NO: 4068847 - RNA, 19 nt, Vaccinia virus
uccuuaucuucauagaaua

SEQ ID NO: 4068848 - RNA, 21 nt, Vaccinia virus
uccuuccaagaagaagacuua

SEQ ID NO: 4068849 - RNA, 17 nt, Vaccinia virus
uccuuggaauugauaga

SEQ ID NO: 4068850 - RNA, 20 nt, Vaccinia virus
uccuugugcuuaauguuucc

SEQ ID NO: 4068851 - RNA, 20 nt, Vaccinia virus
ucgaaugccauagaauaaau

SEQ ID NO: 4068852 - RNA, 21 nt, Vaccinia virus
ucgacauuuggaauguuauau

SEQ ID NO: 4068853 - RNA, 15 nt, Vaccinia virus
ucgagacgucaauau

SEQ ID NO: 4068854 - RNA, 23 nt, Vaccinia virus
ucgagauggguccguucucugaa

SEQ ID NO: 4068855 - RNA, 14 nt, Vaccinia virus
ucgagcgugauguu

SEQ ID NO: 4068856 - RNA, 17 nt, Vaccinia virus
ucgauacauuaacucuc

SEQ ID NO: 4068857 - RNA, 15 nt, Vaccinia virus
ucgauacauuuugca

SEQ ID NO: 4068858 - RNA, 21 nt, Vaccinia virus
ucgauaccguauuguucuaaa

SEQ ID NO: 4068859 - RNA, 12 nt, Vaccinia virus
ucgauauucuca

SEQ ID NO: 4068860 - RNA, 16 nt, Vaccinia virus
ucgaugcauguuagau

SEQ ID NO: 4068861 - RNA, 20 nt, Vaccinia virus
ucgauuacauuuaugggaua

SEQ ID NO: 4068862 - RNA, 20 nt, Vaccinia virus
ucgcaagaauuuauuucuaa

SEQ ID NO: 4068863 - RNA, 23 nt, Vaccinia virus
ucgcaauauucaucaauuuagau

SEQ ID NO: 4068864 - RNA, 17 nt, Vaccinia virus
ucgcauagcauaguuuu

SEQ ID NO: 4068865 - RNA, 17 nt, Vaccinia virus
ucgcgauuaguguauac

SEQ ID NO: 4068866 - RNA, 16 nt, Vaccinia virus
ucgcgcuuuacauucu

SEQ ID NO: 4068867 - RNA, 15 nt, Vaccinia virus
ucgcuaaaauuuuca

SEQ ID NO: 4068868 - RNA, 16 nt, Vaccinia virus
ucgcuauuucuauaga

SEQ ID NO: 4068869 - RNA, 17 nt, Vaccinia virus
ucggaguaucaucuauu

SEQ ID NO: 4068870 - RNA, 15 nt, Vaccinia virus
ucguaaaaaaguuuu

SEQ ID NO: 4068871 - RNA, 17 nt, Vaccinia virus
ucguaaaaagauucuug

SEQ ID NO: 4068872 - RNA, 12 nt, Vaccinia virus
ucguaaauacuc

SEQ ID NO: 4068873 - RNA, 21 nt, Vaccinia virus
ucguaacaaaacuauuucaga

SEQ ID NO: 4068874 - RNA, 22 nt, Vaccinia virus
ucguaauuggaaaaauaguguu

SEQ ID NO: 4068875 - RNA, 13 nt, Vaccinia virus
ucguacauccagg

SEQ ID NO: 4068876 - RNA, 13 nt, Vaccinia virus
ucguagauuuuaa

SEQ ID NO: 4068877 - RNA, 14 nt, Vaccinia virus
ucguauacuagaaa

SEQ ID NO: 4068878 - RNA, 20 nt, Vaccinia virus
ucguauuuuuguuagaguau

SEQ ID NO: 4068879 - RNA, 20 nt, Vaccinia virus
ucgucaacaaguuggaugau

SEQ ID NO: 4068880 - RNA, 18 nt, Vaccinia virus
ucguguauaacaucuuug

SEQ ID NO: 4068881 - RNA, 14 nt, Vaccinia virus
ucguguuaaauuuu

SEQ ID NO: 4068882 - RNA, 12 nt, Vaccinia virus
ucguuaaauuuu

SEQ ID NO: 4068883 - RNA, 15 nt, Vaccinia virus
ucguuaacuauaaga

SEQ ID NO: 4068884 - RNA, 13 nt, Vaccinia virus
ucguucaaauuuu

SEQ ID NO: 4068885 - RNA, 16 nt, Vaccinia virus
ucguucgaccuaaaau

SEQ ID NO: 4068886 - RNA, 13 nt, Vaccinia virus
ucguucucuaaau

SEQ ID NO: 4068887 - RNA, 19 nt, Vaccinia virus
ucguuuauaucacauugua

SEQ ID NO: 4068888 - RNA, 14 nt, Vaccinia virus
ucguuuucuacaau

SEQ ID NO: 4068889 - RNA, 22 nt, Vaccinia virus
ucuaaagaacggagaauaucua

SEQ ID NO: 4068890 - RNA, 20 nt, Vaccinia virus
ucuaaauagaauucucuuca

SEQ ID NO: 4068891 - RNA, 22 nt, Vaccinia virus
ucuaaaugaugauauaccuguu

SEQ ID NO: 4068892 - RNA, 15 nt, Vaccinia virus
ucuaacgguuucuuc

SEQ ID NO: 4068893 - RNA, 21 nt, Vaccinia virus
ucuaacuggugaguuaauauu

SEQ ID NO: 4068894 - RNA, 19 nt, Vaccinia virus
ucuaagagaaugagaguag

SEQ ID NO: 4068895 - RNA, 23 nt, Vaccinia virus
ucuaauaaguagaguccucauga

SEQ ID NO: 4068896 - RNA, 14 nt, Vaccinia virus
ucuaauacauaauu

SEQ ID NO: 4068897 - RNA, 15 nt, Vaccinia virus
ucuaauauuaauauu

SEQ ID NO: 4068898 - RNA, 17 nt, Vaccinia virus
ucuaauucuacauaugg

SEQ ID NO: 4068899 - RNA, 16 nt, Vaccinia virus
ucuacaagaugucaga

SEQ ID NO: 4068900 - RNA, 16 nt, Vaccinia virus
ucuacacauguaugua

SEQ ID NO: 4068901 - RNA, 16 nt, Vaccinia virus
ucuacacuauugaacg

SEQ ID NO: 4068902 - RNA, 15 nt, Vaccinia virus
ucuacagauggagua

SEQ ID NO: 4068903 - RNA, 21 nt, Vaccinia virus
ucuaccagccuacauuuugcu

SEQ ID NO: 4068904 - RNA, 19 nt, Vaccinia virus
ucuacgauuuuuacaaaag

SEQ ID NO: 4068905 - RNA, 19 nt, Vaccinia virus
ucuacuuacuggaaaauag

SEQ ID NO: 4068906 - RNA, 17 nt, Vaccinia virus
ucuacuuuaucuauuca

SEQ ID NO: 4068907 - RNA, 14 nt, Vaccinia virus
ucuagaacuaacaa

SEQ ID NO: 4068908 - RNA, 18 nt, Vaccinia virus
ucuagacagauagaugau

SEQ ID NO: 4068909 - RNA, 22 nt, Vaccinia virus
ucuagacuugauuuaaaaccga

SEQ ID NO: 4068910 - RNA, 15 nt, Vaccinia virus
ucuagauaaaaucac

SEQ ID NO: 4068911 - RNA, 19 nt, Vaccinia virus
ucuagauacuagaguagua

SEQ ID NO: 4068912 - RNA, 20 nt, Vaccinia virus
ucuagauacuagaguaguau

SEQ ID NO: 4068913 - RNA, 14 nt, Vaccinia virus
ucuagauauccaga

SEQ ID NO: 4068914 - RNA, 17 nt, Vaccinia virus
ucuagauccucucuuca

SEQ ID NO: 4068915 - RNA, 13 nt, Vaccinia virus
ucuagcauuucua

SEQ ID NO: 4068916 - RNA, 16 nt, Vaccinia virus
ucuagcuuucacuuaa

SEQ ID NO: 4068917 - RNA, 22 nt, Vaccinia virus
ucuaggagguggauauuucuga

SEQ ID NO: 4068918 - RNA, 18 nt, Vaccinia virus
ucuagucgcaucucuuaa

SEQ ID NO: 4068919 - RNA, 14 nt, Vaccinia virus
ucuauaaaauacua

SEQ ID NO: 4068920 - RNA, 21 nt, Vaccinia virus
ucuauaaacgaugguuuaauu

SEQ ID NO: 4068921 - RNA, 14 nt, Vaccinia virus
ucuauacguuucua

SEQ ID NO: 4068922 - RNA, 15 nt, Vaccinia virus
ucuauacguuucuau

SEQ ID NO: 4068923 - RNA, 15 nt, Vaccinia virus
ucuauaguucucauc

SEQ ID NO: 4068924 - RNA, 15 nt, Vaccinia virus
ucuauauauacucuu

SEQ ID NO: 4068925 - RNA, 19 nt, Vaccinia virus
ucuauaugugcgagaauau

SEQ ID NO: 4068926 - RNA, 13 nt, Vaccinia virus
ucuaucuuugcau

SEQ ID NO: 4068927 - RNA, 22 nt, Vaccinia virus
ucuaugaaaggagagaauguau

SEQ ID NO: 4068928 - RNA, 22 nt, Vaccinia virus
ucuaugacuaaagcuauuacaa

SEQ ID NO: 4068929 - RNA, 13 nt, Vaccinia virus
ucuaugcuauaaa

SEQ ID NO: 4068930 - RNA, 16 nt, Vaccinia virus
ucuauguugacaugua

SEQ ID NO: 4068931 - RNA, 20 nt, Vaccinia virus
ucuauuagaguauugcauuu

SEQ ID NO: 4068932 - RNA, 15 nt, Vaccinia virus
ucuauuagaugugua

SEQ ID NO: 4068933 - RNA, 13 nt, Vaccinia virus
ucuauucaucuga

SEQ ID NO: 4068934 - RNA, 18 nt, Vaccinia virus
ucuauucugaaauaauua

SEQ ID NO: 4068935 - RNA, 22 nt, Vaccinia virus
ucuauuguuuagacuguuugua

SEQ ID NO: 4068936 - RNA, 17 nt, Vaccinia virus
ucuauuuuuuaaauuuu

SEQ ID NO: 4068937 - RNA, 21 nt, Vaccinia virus
ucucaaaugaauaaguuuauu

SEQ ID NO: 4068938 - RNA, 12 nt, Vaccinia virus
ucucaauacuaa

SEQ ID NO: 4068939 - RNA, 15 nt, Vaccinia virus
ucucaauaguuucau

SEQ ID NO: 4068940 - RNA, 22 nt, Vaccinia virus
ucucacuaacuaauguuucuuu

SEQ ID NO: 4068941 - RNA, 12 nt, Vaccinia virus
aacgauucuaga

SEQ ID NO: 4068942 - RNA, 22 nt, Vaccinia virus
aacgauuuuccaaaucaguaac

SEQ ID NO: 4068943 - RNA, 16 nt, Vaccinia virus
aacgcaacaaaugauu

SEQ ID NO: 4068944 - RNA, 15 nt, Vaccinia virus
aacgccuuuagaaaa

SEQ ID NO: 4068945 - RNA, 16 nt, Vaccinia virus
aacgcuacaacagaua

SEQ ID NO: 4068946 - RNA, 17 nt, Vaccinia virus
aacgcucuuuugaugau

SEQ ID NO: 4068947 - RNA, 19 nt, Vaccinia virus
aacggcguuucggaaaaug

SEQ ID NO: 4068948 - RNA, 21 nt, Vaccinia virus
aacgguuacuaucaauauuau

SEQ ID NO: 4068949 - RNA, 22 nt, Vaccinia virus
aacguaguuaugauaaaugauu

SEQ ID NO: 4068950 - RNA, 16 nt, Vaccinia virus
aacgucauaaaaaugu

SEQ ID NO: 4068951 - RNA, 16 nt, Vaccinia virus
aacguguauuaaauag

SEQ ID NO: 4068952 - RNA, 16 nt, Vaccinia virus
aacguuuuaaaaaaag

SEQ ID NO: 4068953 - RNA, 12 nt, Vaccinia virus
aacuaaaaaugu

SEQ ID NO: 4068954 - RNA, 17 nt, Vaccinia virus
aacuaaacagucuauca

SEQ ID NO: 4068955 - RNA, 23 nt, Vaccinia virus
aacuaacguccaucauuacagaa

SEQ ID NO: 4068956 - RNA, 13 nt, Vaccinia virus
aacuaauaaacau

SEQ ID NO: 4068957 - RNA, 15 nt, Vaccinia virus
aacuaauaugauccu

SEQ ID NO: 4068958 - RNA, 14 nt, Vaccinia virus
aacuacaaaaaugc

SEQ ID NO: 4068959 - RNA, 18 nt, Vaccinia virus
aacuacugauaacaaaau

SEQ ID NO: 4068960 - RNA, 15 nt, Vaccinia virus
aacuacuugaaauuc

SEQ ID NO: 4068961 - RNA, 13 nt, Vaccinia virus
aacuacuugcaua

SEQ ID NO: 4068962 - RNA, 17 nt, Vaccinia virus
aacuagaagucugaucu

SEQ ID NO: 4068963 - RNA, 18 nt, Vaccinia virus
aacuagaaucagaaucua

SEQ ID NO: 4068964 - RNA, 18 nt, Vaccinia virus
aacuauaucuauguugau

SEQ ID NO: 4068965 - RNA, 20 nt, Vaccinia virus
aacuaucgauaguaaugcau

SEQ ID NO: 4068966 - RNA, 16 nt, Vaccinia virus
aacuaucguuggaaaa

SEQ ID NO: 4068967 - RNA, 14 nt, Vaccinia virus
aacuaucuguaaaa

SEQ ID NO: 4068968 - RNA, 15 nt, Vaccinia virus
aacuaugucaaaaau

SEQ ID NO: 4068969 - RNA, 18 nt, Vaccinia virus
aacuaugucaaaaauugu

SEQ ID NO: 4068970 - RNA, 14 nt, Vaccinia virus
aacuauuuagcaaa

SEQ ID NO: 4068971 - RNA, 15 nt, Vaccinia virus
uucuuggauaaaagc

SEQ ID NO: 4068972 - RNA, 21 nt, Vaccinia virus
uucuuggcaaaagaauaccaa

SEQ ID NO: 4068973 - RNA, 13 nt, Vaccinia virus
uucuuguuauaua

SEQ ID NO: 4068974 - RNA, 14 nt, Vaccinia virus
uucuuuuuauucuc

SEQ ID NO: 4068975 - RNA, 16 nt, Vaccinia virus
uugaaauuauauucuu

SEQ ID NO: 4068976 - RNA, 20 nt, Vaccinia virus
uugaaauuguuuuuuauuuu

SEQ ID NO: 4068977 - RNA, 14 nt, Vaccinia virus
uugaaccaaacauu

SEQ ID NO: 4068978 - RNA, 13 nt, Vaccinia virus
uugaagaaaucaa

SEQ ID NO: 4068979 - RNA, 21 nt, Vaccinia virus
uugaauuaaugguguuccauu

SEQ ID NO: 4068980 - RNA, 17 nt, Vaccinia virus
uugacaaaaucuuuaau

SEQ ID NO: 4068981 - RNA, 14 nt, Vaccinia virus
uugacaucuaguau

SEQ ID NO: 4068982 - RNA, 14 nt, Vaccinia virus
uugagaaaacauuu

SEQ ID NO: 4068983 - RNA, 21 nt, Vaccinia virus
uugagaaagaccaguaguauu

SEQ ID NO: 4068984 - RNA, 18 nt, Vaccinia virus
uugagaugcugcuccugg

SEQ ID NO: 4068985 - RNA, 20 nt, Vaccinia virus
uugaguuugucgcauacuuu

SEQ ID NO: 4068986 - RNA, 19 nt, Vaccinia virus
uugaguuuuccguuagaaa

SEQ ID NO: 4068987 - RNA, 18 nt, Vaccinia virus
uugauauauaauuuacag

SEQ ID NO: 4068988 - RNA, 16 nt, Vaccinia virus
uugauaucuuuagaua

SEQ ID NO: 4068989 - RNA, 21 nt, Vaccinia virus
uugaucauauaguuauguaua

SEQ ID NO: 4068990 - RNA, 16 nt, Vaccinia virus
uugaucuuauuauaca

SEQ ID NO: 4068991 - RNA, 19 nt, Vaccinia virus
uugaugacgucaaacaaug

SEQ ID NO: 4068992 - RNA, 19 nt, Vaccinia virus
uugaugucuacacauccuu

SEQ ID NO: 4068993 - RNA, 13 nt, Vaccinia virus
uugauucuagcau

SEQ ID NO: 4068994 - RNA, 13 nt, Vaccinia virus
uugauucuaguau

SEQ ID NO: 4068995 - RNA, 12 nt, Vaccinia virus
uugauugccaua

SEQ ID NO: 4068996 - RNA, 19 nt, Vaccinia virus
uugauuuaaagucuagagu

SEQ ID NO: 4068997 - RNA, 14 nt, Vaccinia virus
uugccaaugauguc

SEQ ID NO: 4068998 - RNA, 23 nt, Vaccinia virus
uugccacauccuuuauuaaauca

SEQ ID NO: 4068999 - RNA, 23 nt, Vaccinia virus
uugccaccuauagcaucaauaau

SEQ ID NO: 4069000 - RNA, 17 nt, Vaccinia virus
uugccguugucuguauu

SEQ ID NO: 4069001 - RNA, 13 nt, Vaccinia virus
uugcgacacuauu

SEQ ID NO: 4069002 - RNA, 13 nt, Vaccinia virus
uugcuaaaaucug

SEQ ID NO: 4069003 - RNA, 13 nt, Vaccinia virus
uugcuaauuauuu

SEQ ID NO: 4069004 - RNA, 19 nt, Vaccinia virus
uugcuauccauuauucuuu

SEQ ID NO: 4069005 - RNA, 15 nt, Vaccinia virus
uugcucucugaaucu

SEQ ID NO: 4069006 - RNA, 14 nt, Vaccinia virus
uuggaagaaucuca

SEQ ID NO: 4069007 - RNA, 18 nt, Vaccinia virus
uuggaaucacaaacauua

SEQ ID NO: 4069008 - RNA, 21 nt, Vaccinia virus
uuggagaugaucauagauuca

SEQ ID NO: 4069009 - RNA, 20 nt, Vaccinia virus
uuggauaggcugucugcugg

SEQ ID NO: 4069010 - RNA, 15 nt, Vaccinia virus
uuggaugaaccauug

SEQ ID NO: 4069011 - RNA, 22 nt, Vaccinia virus
uuggcauuuaacagauucacaa

SEQ ID NO: 4069012 - RNA, 22 nt, Vaccinia virus
uugggcggaucuguaaacauuu

SEQ ID NO: 4069013 - RNA, 20 nt, Vaccinia virus
uugguauaaauguuguaauu

SEQ ID NO: 4069014 - RNA, 13 nt, Vaccinia virus
uuggugaauccau

SEQ ID NO: 4069015 - RNA, 13 nt, Vaccinia virus
uugguguaaaucu

SEQ ID NO: 4069016 - RNA, 14 nt, Vaccinia virus
uuguacagaaauca

SEQ ID NO: 4069017 - RNA, 20 nt, Vaccinia virus
uuguacauuaauaaaugaaa

SEQ ID NO: 4069018 - RNA, 14 nt, Vaccinia virus
uuguauaugauguu

SEQ ID NO: 4069019 - RNA, 14 nt, Vaccinia virus
uuguauuuaucuaa

SEQ ID NO: 4069020 - RNA, 21 nt, Vaccinia virus
uugucguaaauacaugucuaa

SEQ ID NO: 4069021 - RNA, 21 nt, Vaccinia virus
uugucugacugaauacauccu

SEQ ID NO: 4069022 - RNA, 13 nt, Vaccinia virus
uuguguuagauga

SEQ ID NO: 4069023 - RNA, 17 nt, Vaccinia virus
uuguuaagacaaucgua

SEQ ID NO: 4069024 - RNA, 21 nt, Vaccinia virus
uuguuacccaugaucuauaaa

SEQ ID NO: 4069025 - RNA, 15 nt, Vaccinia virus
uuguuccuguagaua

SEQ ID NO: 4069026 - RNA, 17 nt, Vaccinia virus
uuguucuacacauguau

SEQ ID NO: 4069027 - RNA, 18 nt, Vaccinia virus
uuguucuuccaauugcaa

SEQ ID NO: 4069028 - RNA, 14 nt, Vaccinia virus
uuguugcucccaug

SEQ ID NO: 4069029 - RNA, 14 nt, Vaccinia virus
uuuaaaaaguuauc

SEQ ID NO: 4069030 - RNA, 15 nt, Vaccinia virus
uuuaaaacagaugau

SEQ ID NO: 4069031 - RNA, 17 nt, Vaccinia virus
uuuaaaagucaacaucu

SEQ ID NO: 4069032 - RNA, 11 nt, Vaccinia virus
uuuaaaaucau

SEQ ID NO: 4069033 - RNA, 13 nt, Vaccinia virus
uuuaaagaaguag

SEQ ID NO: 4069034 - RNA, 18 nt, Vaccinia virus
uuuaaaucccaauucaga

SEQ ID NO: 4069035 - RNA, 16 nt, Vaccinia virus
uuuaaccuauacauga

SEQ ID NO: 4069036 - RNA, 14 nt, Vaccinia virus
uuuaacuuuucauu

SEQ ID NO: 4069037 - RNA, 23 nt, Vaccinia virus
uuuaauauccaaucuuauuacuu

SEQ ID NO: 4069038 - RNA, 20 nt, Vaccinia virus
uuuaauccaaauauaaugau

SEQ ID NO: 4069039 - RNA, 19 nt, Vaccinia virus
uuuaaucucgaaauucaga

SEQ ID NO: 4069040 - RNA, 16 nt, Vaccinia virus
uuuaaugacuacuaua

SEQ ID NO: 4069041 - RNA, 21 nt, Vaccinia virus
uuuaauuacagaguuuucaga

SEQ ID NO: 4069042 - RNA, 16 nt, Vaccinia virus
uuuaauucuagacuau

SEQ ID NO: 4069043 - RNA, 16 nt, Vaccinia virus
uuuaauuuccuaguau

SEQ ID NO: 4069044 - RNA, 23 nt, Vaccinia virus
uuuaauuuuguuauaguagauau

SEQ ID NO: 4069045 - RNA, 21 nt, Vaccinia virus
uuuaauuuuuucuacagauau

SEQ ID NO: 4069046 - RNA, 14 nt, Vaccinia virus
uuuacaaaacuggu

SEQ ID NO: 4069047 - RNA, 23 nt, Vaccinia virus
uuuacacaguaaccaaaaugaaa

SEQ ID NO: 4069048 - RNA, 16 nt, Vaccinia virus
uuuacagauauauuca

SEQ ID NO: 4069049 - RNA, 21 nt, Vaccinia virus
uuuacauggcucguaccaaca

SEQ ID NO: 4069050 - RNA, 21 nt, Vaccinia virus
uuuaccaugggaugcuaauau

SEQ ID NO: 4069051 - RNA, 16 nt, Vaccinia virus
uuuaccggcaucauaa

SEQ ID NO: 4069052 - RNA, 20 nt, Vaccinia virus
uuuaccggcaucauaaacac

SEQ ID NO: 4069053 - RNA, 17 nt, Vaccinia virus
uuuacugucuaccuaaa

SEQ ID NO: 4069054 - RNA, 18 nt, Vaccinia virus
uuuacuguggcuagauac

SEQ ID NO: 4069055 - RNA, 18 nt, Vaccinia virus
uuuacuuucgguuucaua

SEQ ID NO: 4069056 - RNA, 15 nt, Vaccinia virus
uuuacuuuucuaaau

SEQ ID NO: 4069057 - RNA, 14 nt, Vaccinia virus
uuuagaauuuccaa

SEQ ID NO: 4069058 - RNA, 15 nt, Vaccinia virus
uuuagacguagaaaa

SEQ ID NO: 4069059 - RNA, 16 nt, Vaccinia virus
uuuagaguauuucuca

SEQ ID NO: 4069060 - RNA, 20 nt, Vaccinia virus
uuuagcaaggucccuaauau

SEQ ID NO: 4069061 - RNA, 16 nt, Vaccinia virus
uuuaguugucuaguau

SEQ ID NO: 4069062 - RNA, 12 nt, Vaccinia virus
uuuaguuucuuc

SEQ ID NO: 4069063 - RNA, 20 nt, Vaccinia virus
uuuauaaacaugaaaccacu

SEQ ID NO: 4069064 - RNA, 19 nt, Vaccinia virus
uuuauaaacuuaacccauu

SEQ ID NO: 4069065 - RNA, 18 nt, Vaccinia virus
uuuauaauuuuaccaucu

SEQ ID NO: 4069066 - RNA, 16 nt, Vaccinia virus
aaguaugaugucuaug

SEQ ID NO: 4069067 - RNA, 20 nt, Vaccinia virus
aagucacaaagcaagaccaa

SEQ ID NO: 4069068 - RNA, 14 nt, Vaccinia virus
aagucauaaaucau

SEQ ID NO: 4069069 - RNA, 16 nt, Vaccinia virus
aagucauaugugguau

SEQ ID NO: 4069070 - RNA, 19 nt, Vaccinia virus
aagucgaauauaaaugauu

SEQ ID NO: 4069071 - RNA, 21 nt, Vaccinia virus
aagugccacaaaacagaaaua

SEQ ID NO: 4069072 - RNA, 19 nt, Vaccinia virus
aaguggugccgucaaacaa

SEQ ID NO: 4069073 - RNA, 20 nt, Vaccinia virus
aagugugguguuuggucgau

SEQ ID NO: 4069074 - RNA, 17 nt, Vaccinia virus
aaguuaagaagauaccu

SEQ ID NO: 4069075 - RNA, 17 nt, Vaccinia virus
aaguuaguuauuuuacg

SEQ ID NO: 4069076 - RNA, 13 nt, Vaccinia virus
aaguuauagaaug

SEQ ID NO: 4069077 - RNA, 19 nt, Vaccinia virus
aaguucuggcaauguuuca

SEQ ID NO: 4069078 - RNA, 19 nt, Vaccinia virus
aaguucuucgacaaaucgu

SEQ ID NO: 4069079 - RNA, 16 nt, Vaccinia virus
aaguugauacaacaua

SEQ ID NO: 4069080 - RNA, 13 nt, Vaccinia virus
aaguugaucucaa

SEQ ID NO: 4069081 - RNA, 22 nt, Vaccinia virus
aaguugcgaugaaauaggagau

SEQ ID NO: 4069082 - RNA, 11 nt, Vaccinia virus
aaguuguacag

SEQ ID NO: 4069083 - RNA, 20 nt, Vaccinia virus
aaguugugacacguuucaau

SEQ ID NO: 4069084 - RNA, 18 nt, Vaccinia virus
aaguuuauagcagaauuc

SEQ ID NO: 4069085 - RNA, 14 nt, Vaccinia virus
aaguuucugaaaua

SEQ ID NO: 4069086 - RNA, 22 nt, Vaccinia virus
aaguuugaaacgagugaagaaa

SEQ ID NO: 4069087 - RNA, 19 nt, Vaccinia virus
aaguuuggguaaauaacua

SEQ ID NO: 4069088 - RNA, 22 nt, Vaccinia virus
aaguuuuaucucuuucucucuu

SEQ ID NO: 4069089 - RNA, 22 nt, Vaccinia virus
aaguuuuucacccauaaauaau

SEQ ID NO: 4069090 - RNA, 12 nt, Vaccinia virus
aauaaaauggau

SEQ ID NO: 4069091 - RNA, 13 nt, Vaccinia virus
aauaaauaauaac

SEQ ID NO: 4069092 - RNA, 18 nt, Vaccinia virus
aauaaauagauauaaaau

SEQ ID NO: 4069093 - RNA, 17 nt, Vaccinia virus
aauaaauauccuuggaa

SEQ ID NO: 4069094 - RNA, 12 nt, Vaccinia virus
aauaaaucaugg

SEQ ID NO: 4069095 - RNA, 11 nt, Vaccinia virus
aauaaauggau

SEQ ID NO: 4069096 - RNA, 16 nt, Vaccinia virus
aauaacaauuaacaau

SEQ ID NO: 4069097 - RNA, 17 nt, Vaccinia virus
aauaacaggcuaaaaug

SEQ ID NO: 4069098 - RNA, 22 nt, Vaccinia virus
aauaacauuuuuuguaaaugua

SEQ ID NO: 4069099 - RNA, 14 nt, Vaccinia virus
aauaacuagaucau

SEQ ID NO: 4069100 - RNA, 17 nt, Vaccinia virus
aauaacuaguauaaaau

SEQ ID NO: 4069101 - RNA, 15 nt, Vaccinia virus
aauaacuaugauauc

SEQ ID NO: 4069102 - RNA, 21 nt, Vaccinia virus
aauaacuggcacaacaauaac

SEQ ID NO: 4069103 - RNA, 12 nt, Vaccinia virus
uuugcacacaua

SEQ ID NO: 4069104 - RNA, 15 nt, Vaccinia virus
uuugcacguaaccau

SEQ ID NO: 4069105 - RNA, 14 nt, Vaccinia virus
uuuggaucuaguau

SEQ ID NO: 4069106 - RNA, 17 nt, Vaccinia virus
uuuguaaauaacuaucu

SEQ ID NO: 4069107 - RNA, 19 nt, Vaccinia virus
uuuguagcucucccagauu

SEQ ID NO: 4069108 - RNA, 14 nt, Vaccinia virus
uuuguauugcacau

SEQ ID NO: 4069109 - RNA, 17 nt, Vaccinia virus
uuugucaacuuuguaaa

SEQ ID NO: 4069110 - RNA, 21 nt, Vaccinia virus
uuugucuuagaacaacauuuu

SEQ ID NO: 4069111 - RNA, 14 nt, Vaccinia virus
uuuguuagaguaua

SEQ ID NO: 4069112 - RNA, 17 nt, Vaccinia virus
uuuguuauuguaguaua

SEQ ID NO: 4069113 - RNA, 19 nt, Vaccinia virus
uuuuaacaccuccacaguu

SEQ ID NO: 4069114 - RNA, 22 nt, Vaccinia virus
uuuuaacuaguguagaaaacag

SEQ ID NO: 4069115 - RNA, 17 nt, Vaccinia virus
uuuuacaauuucaucca

SEQ ID NO: 4069116 - RNA, 23 nt, Vaccinia virus
uuuuacacaaggcauuguuucua

SEQ ID NO: 4069117 - RNA, 17 nt, Vaccinia virus
uuuuaccaacacaaagg

SEQ ID NO: 4069118 - RNA, 23 nt, Vaccinia virus
uuuuacgacacgcauuugaugca

SEQ ID NO: 4069119 - RNA, 14 nt, Vaccinia virus
uuuuacucuauaaa

SEQ ID NO: 4069120 - RNA, 19 nt, Vaccinia virus
uuuuagguacucaucuacu

SEQ ID NO: 4069121 - RNA, 14 nt, Vaccinia virus
uuuucaguuaucua

SEQ ID NO: 4069122 - RNA, 23 nt, Vaccinia virus
uuuucaguuccccuacguaucua

SEQ ID NO: 4069123 - RNA, 19 nt, Vaccinia virus
uuuuccagaucuauugacu

SEQ ID NO: 4069124 - RNA, 15 nt, Vaccinia virus
uuuuccauccuuugu

SEQ ID NO: 4069125 - RNA, 11 nt, Vaccinia virus
uuuucuguaaa

SEQ ID NO: 4069126 - RNA, 17 nt, Vaccinia virus
uuuucuuaugcauguuu

SEQ ID NO: 4069127 - RNA, 19 nt, Vaccinia virus
uuuugaauuguuucuuuua

SEQ ID NO: 4069128 - RNA, 13 nt, Vaccinia virus
uuuuguauucaau

SEQ ID NO: 4069129 - RNA, 21 nt, Vaccinia virus
uuuugucgauaaaaauuaaaa

SEQ ID NO: 4069130 - RNA, 24 nt, Vaccinia virus
uuuuguggauuaguguacucucuu

SEQ ID NO: 4069131 - RNA, 23 nt, Vaccinia virus
uuuuguucacaaaaauacauaaa

SEQ ID NO: 4069132 - RNA, 23 nt, Vaccinia virus
uuuuuaaaaauugccacauccuu

SEQ ID NO: 4069133 - RNA, 19 nt, Vaccinia virus
uuuuuaaaaucauuauaua

SEQ ID NO: 4069134 - RNA, 17 nt, Vaccinia virus
uuuuuacaaacaucacu

SEQ ID NO: 4069135 - RNA, 13 nt, Vaccinia virus
uuuuuaguaugac

SEQ ID NO: 4069136 - RNA, 21 nt, Vaccinia virus
uuuuucgcgggauacaucauc

SEQ ID NO: 4069137 - RNA, 22 nt, Vaccinia virus
uuuuugugggaagcgauucaaa

SEQ ID NO: 4069138 - RNA, 18 nt, Vaccinia virus
acgagugaagaaauaauu

SEQ ID NO: 4069139 - RNA, 16 nt, Vaccinia virus
acgaguugacauaucg

SEQ ID NO: 4069140 - RNA, 21 nt, Vaccinia virus
acgauaaaaauaauauuguuu

SEQ ID NO: 4069141 - RNA, 21 nt, Vaccinia virus
acgauaaugugguuacucuuc

SEQ ID NO: 4069142 - RNA, 20 nt, Vaccinia virus
acgauaguuuguuucuggaa

SEQ ID NO: 4069143 - RNA, 17 nt, Vaccinia virus
acgauauaaauugauua

SEQ ID NO: 4069144 - RNA, 14 nt, Vaccinia virus
acgauauuagaauu

SEQ ID NO: 4069145 - RNA, 17 nt, Vaccinia virus
acgaucuaauacaaaau

SEQ ID NO: 4069146 - RNA, 14 nt, Vaccinia virus
acgaugaaaaccag

SEQ ID NO: 4069147 - RNA, 15 nt, Vaccinia virus
acgaugaaaauggua

SEQ ID NO: 4069148 - RNA, 15 nt, Vaccinia virus
acgaugauauggaug

SEQ ID NO: 4069149 - RNA, 22 nt, Vaccinia virus
acgauuacaucaccucuaacau

SEQ ID NO: 4069150 - RNA, 16 nt, Vaccinia virus
acgauuacuacauuau

SEQ ID NO: 4069151 - RNA, 19 nt, Vaccinia virus
acgauuaguucuuuaaaga

SEQ ID NO: 4069152 - RNA, 21 nt, Vaccinia virus
acgauuuuuagugaaacauuc

SEQ ID NO: 4069153 - RNA, 15 nt, Vaccinia virus
acgcaauaucucaau

SEQ ID NO: 4069154 - RNA, 14 nt, Vaccinia virus
acgcauccauccaa

SEQ ID NO: 4069155 - RNA, 18 nt, Vaccinia virus
acgccguaauaauuuccu

SEQ ID NO: 4069156 - RNA, 14 nt, Vaccinia virus
acgcguauauguuu

SEQ ID NO: 4069157 - RNA, 15 nt, Vaccinia virus
acgcugauaaauaua

SEQ ID NO: 4069158 - RNA, 14 nt, Vaccinia virus
acgcuuguuaauaa

SEQ ID NO: 4069159 - RNA, 12 nt, Vaccinia virus
acggaauuauug

SEQ ID NO: 4069160 - RNA, 22 nt, Vaccinia virus
acggaguuuauuuuauaugucu

SEQ ID NO: 4069161 - RNA, 19 nt, Vaccinia virus
acggauaucuaauauuaau

SEQ ID NO: 4069162 - RNA, 18 nt, Vaccinia virus
acggcaugauaaaaugaa

SEQ ID NO: 4069163 - RNA, 20 nt, Vaccinia virus
acggcuuuuaaacagucucc

SEQ ID NO: 4069164 - RNA, 21 nt, Vaccinia virus
acggggauuucguagaaguug

SEQ ID NO: 4069165 - RNA, 15 nt, Vaccinia virus
acgguaauaaaaugu

SEQ ID NO: 4069166 - RNA, 19 nt, Vaccinia virus
acggugcugaccuggaaaa

SEQ ID NO: 4069167 - RNA, 20 nt, Vaccinia virus
acguaaauacaaaacagaga

SEQ ID NO: 4069168 - RNA, 15 nt, Vaccinia virus
acguacauuuuccau

SEQ ID NO: 4069169 - RNA, 22 nt, Vaccinia virus
acguacccaucaauauaaauaa

SEQ ID NO: 4069170 - RNA, 22 nt, Vaccinia virus
acguagucgaacguuaguucca

SEQ ID NO: 4069171 - RNA, 18 nt, Vaccinia virus
acguauauaacauuguuu

SEQ ID NO: 4069172 - RNA, 22 nt, Vaccinia virus
acguaucaccaacggaaauggu

SEQ ID NO: 4069173 - RNA, 22 nt, Vaccinia virus
acguaucucgucguccaauauu

SEQ ID NO: 4069174 - RNA, 21 nt, Vaccinia virus
acgucaaaauuggaaggauau

SEQ ID NO: 4069175 - RNA, 18 nt, Vaccinia virus
acgucauaaaaauguuua

SEQ ID NO: 4069176 - RNA, 16 nt, Vaccinia virus
acgucaucaaaaauag

SEQ ID NO: 4069177 - RNA, 21 nt, Vaccinia virus
acgucaucgcuucaucuauca

SEQ ID NO: 4069178 - RNA, 15 nt, Vaccinia virus
acgucauucuaaaag

SEQ ID NO: 4069179 - RNA, 23 nt, Vaccinia virus
acgucuagaguuuauaucaauaa

SEQ ID NO: 4069180 - RNA, 23 nt, Vaccinia virus
acgucuuuucaccacagcacugu

SEQ ID NO: 4069181 - RNA, 13 nt, Vaccinia virus
acgugauagcucc

SEQ ID NO: 4069182 - RNA, 16 nt, Vaccinia virus
acguggauauguguuu

SEQ ID NO: 4069183 - RNA, 23 nt, Vaccinia virus
acgugucaacggcaguauuggga

SEQ ID NO: 4069184 - RNA, 16 nt, Vaccinia virus
acguuuaaacauucuu

SEQ ID NO: 4069185 - RNA, 14 nt, Vaccinia virus
acguuuacguguau

SEQ ID NO: 4069186 - RNA, 16 nt, Vaccinia virus
acguuuauucucaaau

SEQ ID NO: 4069187 - RNA, 12 nt, Vaccinia virus
acguuuuaucca

SEQ ID NO: 4069188 - RNA, 17 nt, Vaccinia virus
acuaaaaauaaacauug

SEQ ID NO: 4069189 - RNA, 10 nt, Vaccinia virus
acuaaacaaa

SEQ ID NO: 4069190 - RNA, 20 nt, Vaccinia virus
acuaaacacacauuauucag

SEQ ID NO: 4069191 - RNA, 15 nt, Vaccinia virus
acuaacacauuucaa

SEQ ID NO: 4069192 - RNA, 15 nt, Vaccinia virus
acuaacauuguuaau

SEQ ID NO: 4069193 - RNA, 16 nt, Vaccinia virus
acuaacuaauguuucu

SEQ ID NO: 4069194 - RNA, 12 nt, Vaccinia virus
acuaagaaaguu

SEQ ID NO: 4069195 - RNA, 22 nt, Vaccinia virus
acuaagugaacgaaagguauac

SEQ ID NO: 4069196 - RNA, 17 nt, Vaccinia virus
acuaaucgauuuugcau

SEQ ID NO: 4069197 - RNA, 23 nt, Vaccinia virus
acuaaucgauuuugcauacucua

SEQ ID NO: 4069198 - RNA, 17 nt, Vaccinia virus
acuaauggaguauucca

SEQ ID NO: 4069199 - RNA, 19 nt, Vaccinia virus
acuaauucucauuaaaugg

SEQ ID NO: 4069200 - RNA, 16 nt, Vaccinia virus
acuaauucuuucucau

SEQ ID NO: 4069201 - RNA, 17 nt, Vaccinia virus
acuaauuguuuaaauaa

SEQ ID NO: 4069202 - RNA, 22 nt, Vaccinia virus
acuacaaaaguuuucuuucaaa

SEQ ID NO: 4069203 - RNA, 12 nt, Vaccinia virus
acuacaauaauu

SEQ ID NO: 4069204 - RNA, 22 nt, Vaccinia virus
acuacaguaguaauuaaugaaa

SEQ ID NO: 4069205 - RNA, 22 nt, Vaccinia virus
acuacauaauccucaucuggaa

SEQ ID NO: 4069206 - RNA, 22 nt, Vaccinia virus
acuacauaguuaucuaucuuaa

SEQ ID NO: 4069207 - RNA, 15 nt, Vaccinia virus
acuacccaucacauu

SEQ ID NO: 4069208 - RNA, 14 nt, Vaccinia virus
acuacguuuaauaa

SEQ ID NO: 4069209 - RNA, 15 nt, Vaccinia virus
acuacuaacauggau

SEQ ID NO: 4069210 - RNA, 21 nt, Vaccinia virus
acuagacguuuauucucaaau

SEQ ID NO: 4069211 - RNA, 16 nt, Vaccinia virus
acuagacuauuaauaa

SEQ ID NO: 4069212 - RNA, 14 nt, Vaccinia virus
acuagaguauauaa

SEQ ID NO: 4069213 - RNA, 15 nt, Vaccinia virus
acuagauacaaaauu

SEQ ID NO: 4069214 - RNA, 21 nt, Vaccinia virus
acuaguauaaaaucuguaucg

SEQ ID NO: 4069215 - RNA, 17 nt, Vaccinia virus
acuauaauaguacuaga

SEQ ID NO: 4069216 - RNA, 24 nt, Vaccinia virus
acuauaggugcguuguauacacau

SEQ ID NO: 4069217 - RNA, 22 nt, Vaccinia virus
acuauaguuagcacucuuccau

SEQ ID NO: 4069218 - RNA, 21 nt, Vaccinia virus
acuauauaaaccgcuauugaa

SEQ ID NO: 4069219 - RNA, 17 nt, Vaccinia virus
acuauauauagaaacuu

SEQ ID NO: 4069220 - RNA, 12 nt, Vaccinia virus
acuauauccaug

SEQ ID NO: 4069221 - RNA, 19 nt, Vaccinia virus
acuauauuaacaucuaaac

SEQ ID NO: 4069222 - RNA, 20 nt, Vaccinia virus
acuaucaaccgcauaauaca

SEQ ID NO: 4069223 - RNA, 16 nt, Vaccinia virus
acuaucugauaagaua

SEQ ID NO: 4069224 - RNA, 13 nt, Vaccinia virus
acuaucuguaaaa

SEQ ID NO: 4069225 - RNA, 18 nt, Vaccinia virus
acuaugggaucaugcauu

SEQ ID NO: 4069226 - RNA, 21 nt, Vaccinia virus
acuauguuuuguauacauaaa

SEQ ID NO: 4069227 - RNA, 18 nt, Vaccinia virus
acuauucaacgcagaggu

SEQ ID NO: 4069228 - RNA, 18 nt, Vaccinia virus
acuauuccguaucuaucu

SEQ ID NO: 4069229 - RNA, 18 nt, Vaccinia virus
acucaacggaaaacauuu

SEQ ID NO: 4069230 - RNA, 21 nt, Vaccinia virus
acucaagcagaaacuuagauu

SEQ ID NO: 4069231 - RNA, 21 nt, Vaccinia virus
acucaauaucuagacuuucug

SEQ ID NO: 4069232 - RNA, 22 nt, Vaccinia virus
acucagauaauagcaauauuag

SEQ ID NO: 4069233 - RNA, 18 nt, Vaccinia virus
acucauaagaaagagaau

SEQ ID NO: 4069234 - RNA, 22 nt, Vaccinia virus
acucauuauuucccaaaauuug

SEQ ID NO: 4069235 - RNA, 13 nt, Vaccinia virus
acucauuguuuac

SEQ ID NO: 4069236 - RNA, 17 nt, Vaccinia virus
acuccaauuaucuuuac

SEQ ID NO: 4069237 - RNA, 18 nt, Vaccinia virus
acuccagaacaucuucca

SEQ ID NO: 4069238 - RNA, 19 nt, Vaccinia virus
acuccaugauaaauuauuu

SEQ ID NO: 4069239 - RNA, 18 nt, Vaccinia virus
acuccauuaaauaauuua

SEQ ID NO: 4069240 - RNA, 18 nt, Vaccinia virus
acuccccgaagauuuguu

SEQ ID NO: 4069241 - RNA, 20 nt, Vaccinia virus
acuccuagagaauuaauauc

SEQ ID NO: 4069242 - RNA, 21 nt, Vaccinia virus
acuccucuauuuaauacuuua

SEQ ID NO: 4069243 - RNA, 19 nt, Vaccinia virus
acuccugguaauacugaug

SEQ ID NO: 4069244 - RNA, 14 nt, Vaccinia virus
acuccuuuaauagg

SEQ ID NO: 4069245 - RNA, 16 nt, Vaccinia virus
acucgagucauuuuac

SEQ ID NO: 4069246 - RNA, 23 nt, Vaccinia virus
acucgauaacacauuuucaucua

SEQ ID NO: 4069247 - RNA, 22 nt, Vaccinia virus
acucgcauuucuaauacaugac

SEQ ID NO: 4069248 - RNA, 22 nt, Vaccinia virus
acucuaagaacuuauuaaugaa

SEQ ID NO: 4069249 - RNA, 14 nt, Vaccinia virus
acucuaauuuauug

SEQ ID NO: 4069250 - RNA, 22 nt, Vaccinia virus
acucuauaaaauacuaaugcau

SEQ ID NO: 4069251 - RNA, 14 nt, Vaccinia virus
acucucaaaaugcu

SEQ ID NO: 4069252 - RNA, 15 nt, Vaccinia virus
acucucaaaaugcug

SEQ ID NO: 4069253 - RNA, 13 nt, Vaccinia virus
acucucgauaaau

SEQ ID NO: 4069254 - RNA, 15 nt, Vaccinia virus
acucugaaaagaaag

SEQ ID NO: 4069255 - RNA, 16 nt, Vaccinia virus
acucugaaaagaaagu

SEQ ID NO: 4069256 - RNA, 17 nt, Vaccinia virus
acucugggucauauuau

SEQ ID NO: 4069257 - RNA, 20 nt, Vaccinia virus
acucuguuguuuuucuuaua

SEQ ID NO: 4069258 - RNA, 19 nt, Vaccinia virus
acucuguuuuauuaaccga

SEQ ID NO: 4069259 - RNA, 18 nt, Vaccinia virus
acucuuccacuauugcca

SEQ ID NO: 4069260 - RNA, 18 nt, Vaccinia virus
acucuuggaauuaauagu

SEQ ID NO: 4069261 - RNA, 12 nt, Vaccinia virus
acugaauuauua

SEQ ID NO: 4069262 - RNA, 18 nt, Vaccinia virus
acugaguuuuuaggaaau

SEQ ID NO: 4069263 - RNA, 22 nt, Vaccinia virus
acugauaaaguagauuaugaag

SEQ ID NO: 4069264 - RNA, 12 nt, Vaccinia virus
aaucauugauau

SEQ ID NO: 4069265 - RNA, 22 nt, Vaccinia virus
aaucauuguccagauugaacau

SEQ ID NO: 4069266 - RNA, 13 nt, Vaccinia virus
aaucauuuaucau

SEQ ID NO: 4069267 - RNA, 13 nt, Vaccinia virus
aauccaaauauga

SEQ ID NO: 4069268 - RNA, 14 nt, Vaccinia virus
aauccaaucuaaga

SEQ ID NO: 4069269 - RNA, 19 nt, Vaccinia virus
aauccagcuagugaauaua

SEQ ID NO: 4069270 - RNA, 17 nt, Vaccinia virus
aaucccgucucagaaag

SEQ ID NO: 4069271 - RNA, 22 nt, Vaccinia virus
aaucccuacauauuuuagaaca

SEQ ID NO: 4069272 - RNA, 16 nt, Vaccinia virus
aauccgguaaauggaa

SEQ ID NO: 4069273 - RNA, 18 nt, Vaccinia virus
aaucgauaacucuauuca

SEQ ID NO: 4069274 - RNA, 16 nt, Vaccinia virus
aaucggagaauguuuc

SEQ ID NO: 4069275 - RNA, 15 nt, Vaccinia virus
aaucgguaacagucc

SEQ ID NO: 4069276 - RNA, 15 nt, Vaccinia virus
aaucguauaaauacg

SEQ ID NO: 4069277 - RNA, 12 nt, Vaccinia virus
aaucguauauaa

SEQ ID NO: 4069278 - RNA, 16 nt, Vaccinia virus
aaucguuaagaaguuu

SEQ ID NO: 4069279 - RNA, 16 nt, Vaccinia virus
aaucuaaaagaauugg

SEQ ID NO: 4069280 - RNA, 13 nt, Vaccinia virus
aaucuaaugauga

SEQ ID NO: 4069281 - RNA, 22 nt, Vaccinia virus
aaucuacauccaauuuuagaaa

SEQ ID NO: 4069282 - RNA, 19 nt, Vaccinia virus
aaucuagccauuauaaagu

SEQ ID NO: 4069283 - RNA, 20 nt, Vaccinia virus
aaucuagccauugucuuaua

SEQ ID NO: 4069284 - RNA, 15 nt, Vaccinia virus
aaucuaguaaaacuu

SEQ ID NO: 4069285 - RNA, 21 nt, Vaccinia virus
aaucuaucuuaucgaaugaua

SEQ ID NO: 4069286 - RNA, 12 nt, Vaccinia virus
aaucugaaaaua

SEQ ID NO: 4069287 - RNA, 14 nt, Vaccinia virus
aaucugaagaaagu

SEQ ID NO: 4069288 - RNA, 15 nt, Vaccinia virus
aaucugauaaauaua

SEQ ID NO: 4069289 - RNA, 18 nt, Vaccinia virus
aaucuguauaucuuucca

SEQ ID NO: 4069290 - RNA, 20 nt, Vaccinia virus
aaucuucaguuuuugauauc

SEQ ID NO: 4069291 - RNA, 16 nt, Vaccinia virus
aaucuugauuacaaaa

SEQ ID NO: 4069292 - RNA, 13 nt, Vaccinia virus
aaucuuuaccaua

SEQ ID NO: 4069293 - RNA, 22 nt, Vaccinia virus
aaucuuuguuggaucagucucu

SEQ ID NO: 4069294 - RNA, 17 nt, Vaccinia virus
aaucuuuuucaucuugu

SEQ ID NO: 4069295 - RNA, 18 nt, Vaccinia virus
aaugaaauaacauaggau

SEQ ID NO: 4069296 - RNA, 12 nt, Vaccinia virus
aaugaacucauc

SEQ ID NO: 4069297 - RNA, 15 nt, Vaccinia virus
aaugaagauccaaga

SEQ ID NO: 4069298 - RNA, 19 nt, Vaccinia virus
aaugaaggauuugaaucau

SEQ ID NO: 4069299 - RNA, 16 nt, Vaccinia virus
aaugaauuuuuaaaau

SEQ ID NO: 4069300 - RNA, 22 nt, Vaccinia virus
aaugacaucgaagauuguccaa

SEQ ID NO: 4069301 - RNA, 22 nt, Vaccinia virus
aaugaccaguuugcaauaugca

SEQ ID NO: 4069302 - RNA, 22 nt, Vaccinia virus
aaugacuacguuguuaugagug

SEQ ID NO: 4069303 - RNA, 22 nt, Vaccinia virus
aaugacuucguaaaaaauaaua

SEQ ID NO: 4069304 - RNA, 19 nt, Vaccinia virus
aaugagaugcauaaaacuu

SEQ ID NO: 4069305 - RNA, 23 nt, Vaccinia virus
aaugaggcguuuaucauaucugu

SEQ ID NO: 4069306 - RNA, 17 nt, Vaccinia virus
aaugaguucuguguaga

SEQ ID NO: 4069307 - RNA, 15 nt, Vaccinia virus
aaugauaauaggaau

SEQ ID NO: 4069308 - RNA, 20 nt, Vaccinia virus
aaugauacaaaaacgaaaua

SEQ ID NO: 4069309 - RNA, 21 nt, Vaccinia virus
aaugauauuucauugacagau

SEQ ID NO: 4069310 - RNA, 14 nt, Vaccinia virus
aaugaucauccaga

SEQ ID NO: 4069311 - RNA, 17 nt, Vaccinia virus
aaugaugucaggaaaua

SEQ ID NO: 4069312 - RNA, 23 nt, Vaccinia virus
aaugauuacuaacgcaacuauau

SEQ ID NO: 4069313 - RNA, 17 nt, Vaccinia virus
aaugauugcauagugaa

SEQ ID NO: 4069314 - RNA, 17 nt, Vaccinia virus
aaugauuuagaaaugaa

SEQ ID NO: 4069315 - RNA, 18 nt, Vaccinia virus
aaugcaauaacaaagauu

SEQ ID NO: 4069316 - RNA, 15 nt, Vaccinia virus
aaugcaaucaaugau

SEQ ID NO: 4069317 - RNA, 17 nt, Vaccinia virus
aaugcuagaauuagaaa

SEQ ID NO: 4069318 - RNA, 18 nt, Vaccinia virus
aaugcuagaauuagaaaa

SEQ ID NO: 4069319 - RNA, 13 nt, Vaccinia virus
aaugcucaguaaa

SEQ ID NO: 4069320 - RNA, 17 nt, Vaccinia virus
aaugcucaguaaaugua

SEQ ID NO: 4069321 - RNA, 18 nt, Vaccinia virus
aaugcuucagaauuagaa

SEQ ID NO: 4069322 - RNA, 17 nt, Vaccinia virus
aaugcuugaaaauggac

SEQ ID NO: 4069323 - RNA, 16 nt, Vaccinia virus
aaugcuuuagugaaau

SEQ ID NO: 4069324 - RNA, 15 nt, Vaccinia virus
aauggaaucuagauc

SEQ ID NO: 4069325 - RNA, 20 nt, Vaccinia virus
aauggacuccaauacgaaau

SEQ ID NO: 4069326 - RNA, 17 nt, Vaccinia virus
aauggauuaucggaaau

SEQ ID NO: 4069327 - RNA, 22 nt, Vaccinia virus
aauggcaauaacuaaaaaugua

SEQ ID NO: 4069328 - RNA, 16 nt, Vaccinia virus
aauggcauacauagaa

SEQ ID NO: 4069329 - RNA, 16 nt, Vaccinia virus
aauggcugcuucuaua

SEQ ID NO: 4069330 - RNA, 19 nt, Vaccinia virus
aauggucgauuauagaaau

SEQ ID NO: 4069331 - RNA, 15 nt, Vaccinia virus
aauguaaagucuaua

SEQ ID NO: 4069332 - RNA, 17 nt, Vaccinia virus
aauguaaucauauaaau

SEQ ID NO: 4069333 - RNA, 14 nt, Vaccinia virus
aauguagaaauuga

SEQ ID NO: 4069334 - RNA, 16 nt, Vaccinia virus
aauguagacaaauaua

SEQ ID NO: 4069335 - RNA, 16 nt, Vaccinia virus
aauguagauaaucauu

SEQ ID NO: 4069336 - RNA, 20 nt, Vaccinia virus
aauguagauaaucauuuaau

SEQ ID NO: 4069337 - RNA, 20 nt, Vaccinia virus
aauguauaacaaauacagaa

SEQ ID NO: 4069338 - RNA, 16 nt, Vaccinia virus
aauguauacaaaugua

SEQ ID NO: 4069339 - RNA, 14 nt, Vaccinia virus
aaugucaugauaca

SEQ ID NO: 4069340 - RNA, 15 nt, Vaccinia virus
acauugauugccaua

SEQ ID NO: 4069341 - RNA, 19 nt, Vaccinia virus
acauuguccaauccaggac

SEQ ID NO: 4069342 - RNA, 16 nt, Vaccinia virus
acauuguuuauggaug

SEQ ID NO: 4069343 - RNA, 22 nt, Vaccinia virus
acauuguuuauggaugccacug

SEQ ID NO: 4069344 - RNA, 13 nt, Vaccinia virus
acauuguuucaua

SEQ ID NO: 4069345 - RNA, 12 nt, Vaccinia virus
acauuuaaugau

SEQ ID NO: 4069346 - RNA, 20 nt, Vaccinia virus
acauuuauuaucaugaugac

SEQ ID NO: 4069347 - RNA, 22 nt, Vaccinia virus
acauuugggccauuauaccucu

SEQ ID NO: 4069348 - RNA, 21 nt, Vaccinia virus
acauuuuauaaauauauaaug

SEQ ID NO: 4069349 - RNA, 19 nt, Vaccinia virus
acauuuuccauuuauaaca

SEQ ID NO: 4069350 - RNA, 13 nt, Vaccinia virus
acauuuuuaaaga

SEQ ID NO: 4069351 - RNA, 15 nt, Vaccinia virus
acauuuuuauaaaca

SEQ ID NO: 4069352 - RNA, 19 nt, Vaccinia virus
acauuuuuuauaaauagau

SEQ ID NO: 4069353 - RNA, 16 nt, Vaccinia virus
acauuuuuuguuuugg

SEQ ID NO: 4069354 - RNA, 15 nt, Vaccinia virus
accaaauuaucauca

SEQ ID NO: 4069355 - RNA, 22 nt, Vaccinia virus
accaacguuaguaaucauauaa

SEQ ID NO: 4069356 - RNA, 13 nt, Vaccinia virus
accaauaaacuau

SEQ ID NO: 4069357 - RNA, 21 nt, Vaccinia virus
accaauagaaguuuucccaaa

SEQ ID NO: 4069358 - RNA, 19 nt, Vaccinia virus
accaauuacugauaaugua

SEQ ID NO: 4069359 - RNA, 23 nt, Vaccinia virus
accaauuacugauaauguagaag

SEQ ID NO: 4069360 - RNA, 20 nt, Vaccinia virus
accacacggagaacagauga

SEQ ID NO: 4069361 - RNA, 19 nt, Vaccinia virus
accaccuccuauaucaaug

SEQ ID NO: 4069362 - RNA, 16 nt, Vaccinia virus
accaccucucuggaag

SEQ ID NO: 4069363 - RNA, 21 nt, Vaccinia virus
accaccucucuggaagacagc

SEQ ID NO: 4069364 - RNA, 17 nt, Vaccinia virus
accacgaauuaaaaaag

SEQ ID NO: 4069365 - RNA, 13 nt, Vaccinia virus
accacuucucuau

SEQ ID NO: 4069366 - RNA, 20 nt, Vaccinia virus
accacuucucuaucaaugau

SEQ ID NO: 4069367 - RNA, 16 nt, Vaccinia virus
accagcggcuacuaaa

SEQ ID NO: 4069368 - RNA, 16 nt, Vaccinia virus
accauagaagauguua

SEQ ID NO: 4069369 - RNA, 20 nt, Vaccinia virus
accauauauccaauaaagcu

SEQ ID NO: 4069370 - RNA, 16 nt, Vaccinia virus
accauauuuucuggaa

SEQ ID NO: 4069371 - RNA, 22 nt, Vaccinia virus
accauccuuuaaaaaaaaugau

SEQ ID NO: 4069372 - RNA, 20 nt, Vaccinia virus
accaucggaugauauuaaug

SEQ ID NO: 4069373 - RNA, 21 nt, Vaccinia virus
accaucucauaaaauaguucu

SEQ ID NO: 4069374 - RNA, 14 nt, Vaccinia virus
accaugaaagaaag

SEQ ID NO: 4069375 - RNA, 13 nt, Vaccinia virus
accaugaaauaua

SEQ ID NO: 4069376 - RNA, 19 nt, Vaccinia virus
accaugucguuaacuauaa

SEQ ID NO: 4069377 - RNA, 19 nt, Vaccinia virus
accauuagauaaaguugau

SEQ ID NO: 4069378 - RNA, 14 nt, Vaccinia virus
accauuauuaauaa

SEQ ID NO: 4069379 - RNA, 17 nt, Vaccinia virus
accauugauugcauaau

SEQ ID NO: 4069380 - RNA, 18 nt, Vaccinia virus
acccauggagauacuuua

SEQ ID NO: 4069381 - RNA, 16 nt, Vaccinia virus
accccauauaauuuua

SEQ ID NO: 4069382 - RNA, 15 nt, Vaccinia virus
acccgcgucuguuuu

SEQ ID NO: 4069383 - RNA, 19 nt, Vaccinia virus
acccuggauaaaaaguaaa

SEQ ID NO: 4069384 - RNA, 23 nt, Vaccinia virus
acccuuccuuaaacgugaaugau

SEQ ID NO: 4069385 - RNA, 13 nt, Vaccinia virus
accgaaagacuau

SEQ ID NO: 4069386 - RNA, 14 nt, Vaccinia virus
accgaccuguauac

SEQ ID NO: 4069387 - RNA, 18 nt, Vaccinia virus
accgacucauuauuuccc

SEQ ID NO: 4069388 - RNA, 14 nt, Vaccinia virus
accgagggaaaauc

SEQ ID NO: 4069389 - RNA, 17 nt, Vaccinia virus
accgauaaacuacuacu

SEQ ID NO: 4069390 - RNA, 12 nt, Vaccinia virus
accgauuucaca

SEQ ID NO: 4069391 - RNA, 22 nt, Vaccinia virus
accggacgacauauuaaucuuu

SEQ ID NO: 4069392 - RNA, 17 nt, Vaccinia virus
accggagauauagcuuc

SEQ ID NO: 4069393 - RNA, 15 nt, Vaccinia virus
accgguaaucuuguc

SEQ ID NO: 4069394 - RNA, 19 nt, Vaccinia virus
accguauuacucuacagua

SEQ ID NO: 4069395 - RNA, 15 nt, Vaccinia virus
accgucauucauuua

SEQ ID NO: 4069396 - RNA, 16 nt, Vaccinia virus
accgugaccaauaagu

SEQ ID NO: 4069397 - RNA, 21 nt, Vaccinia virus
accuaccucucuuaaaauggu

SEQ ID NO: 4069398 - RNA, 15 nt, Vaccinia virus
accuauuuacuggug

SEQ ID NO: 4069399 - RNA, 12 nt, Vaccinia virus
accuccuucaug

SEQ ID NO: 4069400 - RNA, 18 nt, Vaccinia virus
accucuccuauaugaaua

SEQ ID NO: 4069401 - RNA, 14 nt, Vaccinia virus
accuguauguacaa

SEQ ID NO: 4069402 - RNA, 23 nt, Vaccinia virus
accuucuauagaucugagaaugg

SEQ ID NO: 4069403 - RNA, 14 nt, Vaccinia virus
accuucuucauuuc

SEQ ID NO: 4069404 - RNA, 14 nt, Vaccinia virus
accuuuuucagaga

SEQ ID NO: 4069405 - RNA, 14 nt, Vaccinia virus
acgaaagcaaagaa

SEQ ID NO: 4069406 - RNA, 15 nt, Vaccinia virus
acgaaauagcuauau

SEQ ID NO: 4069407 - RNA, 20 nt, Vaccinia virus
acgaaauaucucaucaagaa

SEQ ID NO: 4069408 - RNA, 20 nt, Vaccinia virus
acgaacauuuauaucauuug

SEQ ID NO: 4069409 - RNA, 18 nt, Vaccinia virus
acgaagaauggaaauaua

SEQ ID NO: 4069410 - RNA, 19 nt, Vaccinia virus
acgaagaccuaauccauca

SEQ ID NO: 4069411 - RNA, 23 nt, Vaccinia virus
acgaauauaaaucauauuuagaa

SEQ ID NO: 4069412 - RNA, 15 nt, Vaccinia virus
acgaauauuacuaau

SEQ ID NO: 4069413 - RNA, 18 nt, Vaccinia virus
acgaauuuccucagagga

SEQ ID NO: 4069414 - RNA, 18 nt, Vaccinia virus
auuucguuucuuaaauau

SEQ ID NO: 4069415 - RNA, 22 nt, Vaccinia virus
auuucugaaccaguuaauguau

SEQ ID NO: 4069416 - RNA, 23 nt, Vaccinia virus
auuucuggaaugacgaauccugu

SEQ ID NO: 4069417 - RNA, 16 nt, Vaccinia virus
auuucuucauaugaug

SEQ ID NO: 4069418 - RNA, 14 nt, Vaccinia virus
auuugaacuuaacu

SEQ ID NO: 4069419 - RNA, 15 nt, Vaccinia virus
auuugcacacauaau

SEQ ID NO: 4069420 - RNA, 15 nt, Vaccinia virus
auuugcauuucuaua

SEQ ID NO: 4069421 - RNA, 20 nt, Vaccinia virus
auuuggaauuuauuaauaca

SEQ ID NO: 4069422 - RNA, 21 nt, Vaccinia virus
auuuggcauaaagagauagau

SEQ ID NO: 4069423 - RNA, 20 nt, Vaccinia virus
auuuggcuauuaaacaguau

SEQ ID NO: 4069424 - RNA, 19 nt, Vaccinia virus
auuugggccauuauaccuc

SEQ ID NO: 4069425 - RNA, 20 nt, Vaccinia virus
auuugguaaaucauuaucua

SEQ ID NO: 4069426 - RNA, 21 nt, Vaccinia virus
auuuguaauaauccuaucuaa

SEQ ID NO: 4069427 - RNA, 20 nt, Vaccinia virus
auuuguauagauaauuacga

SEQ ID NO: 4069428 - RNA, 15 nt, Vaccinia virus
auuugucuucuuucu

SEQ ID NO: 4069429 - RNA, 18 nt, Vaccinia virus
auuugugaguuuuccuua

SEQ ID NO: 4069430 - RNA, 13 nt, Vaccinia virus
auuuguuaaaaga

SEQ ID NO: 4069431 - RNA, 19 nt, Vaccinia virus
auuuguucguaugucauaa

SEQ ID NO: 4069432 - RNA, 19 nt, Vaccinia virus
auuuguuuuacucuauaaa

SEQ ID NO: 4069433 - RNA, 20 nt, Vaccinia virus
auuuguuuuguuuauuaaca

SEQ ID NO: 4069434 - RNA, 14 nt, Vaccinia virus
auuuuaacacuaau

SEQ ID NO: 4069435 - RNA, 19 nt, Vaccinia virus
auuuuaacgacgacauauu

SEQ ID NO: 4069436 - RNA, 20 nt, Vaccinia virus
auuuuaauaggaucuauaug

SEQ ID NO: 4069437 - RNA, 19 nt, Vaccinia virus
auuuuaauucuagacuauu

SEQ ID NO: 4069438 - RNA, 13 nt, Vaccinia virus
auuuuacaaaaaa

SEQ ID NO: 4069439 - RNA, 21 nt, Vaccinia virus
auuuuacuacauaguuaucua

SEQ ID NO: 4069440 - RNA, 12 nt, Vaccinia virus
auuuuagaauuu

SEQ ID NO: 4069441 - RNA, 14 nt, Vaccinia virus
auuuuaguuuuggc

SEQ ID NO: 4069442 - RNA, 13 nt, Vaccinia virus
auuuuaucaaacu

SEQ ID NO: 4069443 - RNA, 15 nt, Vaccinia virus
auuuuaucaagacau

SEQ ID NO: 4069444 - RNA, 18 nt, Vaccinia virus
auuuuauucuagaauuga

SEQ ID NO: 4069445 - RNA, 13 nt, Vaccinia virus
auuuuauugcuaa

SEQ ID NO: 4069446 - RNA, 18 nt, Vaccinia virus
auuuuccaaauacaucca

SEQ ID NO: 4069447 - RNA, 18 nt, Vaccinia virus
auuuuccauuauuaauaa

SEQ ID NO: 4069448 - RNA, 23 nt, Vaccinia virus
auuuucgaaacucguaaaaagau

SEQ ID NO: 4069449 - RNA, 14 nt, Vaccinia virus
auuuucuaacguga

SEQ ID NO: 4069450 - RNA, 21 nt, Vaccinia virus
auuuucugacgaaacgaugaa

SEQ ID NO: 4069451 - RNA, 22 nt, Vaccinia virus
auuuucuuacaauuaacgagaa

SEQ ID NO: 4069452 - RNA, 15 nt, Vaccinia virus
auuuucuuucuaaua

SEQ ID NO: 4069453 - RNA, 21 nt, Vaccinia virus
auuuugauauugugaauggua

SEQ ID NO: 4069454 - RNA, 19 nt, Vaccinia virus
auuuugcauuagauuuacu

SEQ ID NO: 4069455 - RNA, 15 nt, Vaccinia virus
auuuugucauuaacu

SEQ ID NO: 4069456 - RNA, 14 nt, Vaccinia virus
auuuuguucaucuc

SEQ ID NO: 4069457 - RNA, 19 nt, Vaccinia virus
auuuuuaaccaauacuauu

SEQ ID NO: 4069458 - RNA, 16 nt, Vaccinia virus
auuuuuaauagcugcu

SEQ ID NO: 4069459 - RNA, 16 nt, Vaccinia virus
auuuuuaguuacagaa

SEQ ID NO: 4069460 - RNA, 17 nt, Vaccinia virus
auuuuuauaguuuuuac

SEQ ID NO: 4069461 - RNA, 20 nt, Vaccinia virus
auuuuuauauacauuacuga

SEQ ID NO: 4069462 - RNA, 21 nt, Vaccinia virus
auuuuucuaccuuuucaauuu

SEQ ID NO: 4069463 - RNA, 16 nt, Vaccinia virus
auuuuucuucauuuau

SEQ ID NO: 4069464 - RNA, 20 nt, Vaccinia virus
auuuuugacuuacauaaaug

SEQ ID NO: 4069465 - RNA, 16 nt, Vaccinia virus
auuuuuggauuacaag

SEQ ID NO: 4069466 - RNA, 18 nt, Vaccinia virus
auuuuuguacauuaauaa

SEQ ID NO: 4069467 - RNA, 13 nt, Vaccinia virus
auuuuuuaucaua

SEQ ID NO: 4069468 - RNA, 23 nt, Vaccinia virus
auuuuuuuaaaaaggaaauacuu

SEQ ID NO: 4069469 - RNA, 16 nt, Vaccinia virus
auuuuuuuaguaaugu

SEQ ID NO: 4069470 - RNA, 13 nt, Vaccinia virus
auuuuuuugaaau

SEQ ID NO: 4069471 - RNA, 15 nt, Vaccinia virus
auuuuuuuucaucuc

SEQ ID NO: 4069472 - RNA, 19 nt, Vaccinia virus
caaaaaacgacgauuggaa

SEQ ID NO: 4069473 - RNA, 19 nt, Vaccinia virus
caaaaaagcucaauaagau

SEQ ID NO: 4069474 - RNA, 12 nt, Vaccinia virus
caaaaaauaaua

SEQ ID NO: 4069475 - RNA, 13 nt, Vaccinia virus
caaaaaauacaau

SEQ ID NO: 4069476 - RNA, 13 nt, Vaccinia virus
caaaaaaugaauu

SEQ ID NO: 4069477 - RNA, 19 nt, Vaccinia virus
caaaaagagagucaauguu

SEQ ID NO: 4069478 - RNA, 13 nt, Vaccinia virus
caaaaauaaugac

SEQ ID NO: 4069479 - RNA, 16 nt, Vaccinia virus
caaaaauuacgauauu

SEQ ID NO: 4069480 - RNA, 18 nt, Vaccinia virus
caaaaauuuuuuauuuca

SEQ ID NO: 4069481 - RNA, 17 nt, Vaccinia virus
cauuauuuuuuuggaau

SEQ ID NO: 4069482 - RNA, 13 nt, Vaccinia virus
cauucaaauguug

SEQ ID NO: 4069483 - RNA, 18 nt, Vaccinia virus
cauucaaauguuguuaaa

SEQ ID NO: 4069484 - RNA, 16 nt, Vaccinia virus
cauucaccagaaacua

SEQ ID NO: 4069485 - RNA, 23 nt, Vaccinia virus
cauucacuauuccgucacuggcu

SEQ ID NO: 4069486 - RNA, 21 nt, Vaccinia virus
cauucacugcagcauuuugag

SEQ ID NO: 4069487 - RNA, 21 nt, Vaccinia virus
cauucaugggugcugaauaau

SEQ ID NO: 4069488 - RNA, 23 nt, Vaccinia virus
cauucgacuuaguauacaaaaaa

SEQ ID NO: 4069489 - RNA, 23 nt, Vaccinia virus
cauucgcggaacuacauaguaaa

SEQ ID NO: 4069490 - RNA, 19 nt, Vaccinia virus
cauucuaauguucauaauu

SEQ ID NO: 4069491 - RNA, 20 nt, Vaccinia virus
cauucucuucucugcauuua

SEQ ID NO: 4069492 - RNA, 17 nt, Vaccinia virus
cauucugcaauauuguu

SEQ ID NO: 4069493 - RNA, 12 nt, Vaccinia virus
cauucuuggaug

SEQ ID NO: 4069494 - RNA, 22 nt, Vaccinia virus
cauugaugucguuauucugaaa

SEQ ID NO: 4069495 - RNA, 16 nt, Vaccinia virus
cauugcuuauauuuuc

SEQ ID NO: 4069496 - RNA, 17 nt, Vaccinia virus
cauugggaaacauuaca

SEQ ID NO: 4069497 - RNA, 17 nt, Vaccinia virus
cauuggugcuauccauu

SEQ ID NO: 4069498 - RNA, 13 nt, Vaccinia virus
cauuguaaauuua

SEQ ID NO: 4069499 - RNA, 11 nt, Vaccinia virus
cauuuaaacau

SEQ ID NO: 4069500 - RNA, 12 nt, Vaccinia virus
cauuuaaacauu

SEQ ID NO: 4069501 - RNA, 13 nt, Vaccinia virus
cauuuagacagug

SEQ ID NO: 4069502 - RNA, 22 nt, Vaccinia virus
cauuuaucgcuaacaugcauuu

SEQ ID NO: 4069503 - RNA, 22 nt, Vaccinia virus
cauuuauggguaucaaaaacuu

SEQ ID NO: 4069504 - RNA, 22 nt, Vaccinia virus
cauuuccaaaucuaacuucuag

SEQ ID NO: 4069505 - RNA, 17 nt, Vaccinia virus
cauuucucaaaugaaua

SEQ ID NO: 4069506 - RNA, 12 nt, Vaccinia virus
cauuugaugcac

SEQ ID NO: 4069507 - RNA, 13 nt, Vaccinia virus
cauuuguaauaau

SEQ ID NO: 4069508 - RNA, 15 nt, Vaccinia virus
cauuuuuuuaaaacu

SEQ ID NO: 4069509 - RNA, 17 nt, Vaccinia virus
cauuuuuuuuaaaaaaa

SEQ ID NO: 4069510 - RNA, 11 nt, Vaccinia virus
ccaaaaugaaa

SEQ ID NO: 4069511 - RNA, 18 nt, Vaccinia virus
ccaaagagaaaacaaaac

SEQ ID NO: 4069512 - RNA, 16 nt, Vaccinia virus
ccaaagucgauaacga

SEQ ID NO: 4069513 - RNA, 13 nt, Vaccinia virus
ccaaauaucuuua

SEQ ID NO: 4069514 - RNA, 21 nt, Vaccinia virus
ccaaaucaguaacuauguuca

SEQ ID NO: 4069515 - RNA, 18 nt, Vaccinia virus
ccaaaucuauauuguuua

SEQ ID NO: 4069516 - RNA, 23 nt, Vaccinia virus
ccaaauuuuuuuuacaaacauca

SEQ ID NO: 4069517 - RNA, 16 nt, Vaccinia virus
ccaacggaaaugguag

SEQ ID NO: 4069518 - RNA, 16 nt, Vaccinia virus
ccaacucauuuaaaua

SEQ ID NO: 4069519 - RNA, 18 nt, Vaccinia virus
ccaagaaacagucagcug

SEQ ID NO: 4069520 - RNA, 16 nt, Vaccinia virus
ccaagacgaacaaaau

SEQ ID NO: 4069521 - RNA, 17 nt, Vaccinia virus
ccaaggaucuucuauca

SEQ ID NO: 4069522 - RNA, 14 nt, Vaccinia virus
ccaaguagauaucc

SEQ ID NO: 4069523 - RNA, 17 nt, Vaccinia virus
ccaauauagucuguguu

SEQ ID NO: 4069524 - RNA, 17 nt, Vaccinia virus
ccaauuacaaaaacuac

SEQ ID NO: 4069525 - RNA, 19 nt, Vaccinia virus
ccaauuacugauaauguag

SEQ ID NO: 4069526 - RNA, 17 nt, Vaccinia virus
ccaauucguauaaauau

SEQ ID NO: 4069527 - RNA, 19 nt, Vaccinia virus
ccaauuuuucuuaacaaac

SEQ ID NO: 4069528 - RNA, 20 nt, Vaccinia virus
ccacacgaggacuauguuug

SEQ ID NO: 4069529 - RNA, 12 nt, Vaccinia virus
ccacaucaucua

SEQ ID NO: 4069530 - RNA, 14 nt, Vaccinia virus
ccaccguauccaua

SEQ ID NO: 4069531 - RNA, 17 nt, Vaccinia virus
ccacgaugauaaauauc

SEQ ID NO: 4069532 - RNA, 21 nt, Vaccinia virus
ccagaaacuaguucugagaaa

SEQ ID NO: 4069533 - RNA, 21 nt, Vaccinia virus
ccaguagguguaggaguacau

SEQ ID NO: 4069534 - RNA, 16 nt, Vaccinia virus
ccaguggcuaagauac

SEQ ID NO: 4069535 - RNA, 14 nt, Vaccinia virus
ccaguuauaaaaca

SEQ ID NO: 4069536 - RNA, 15 nt, Vaccinia virus
ccauagauucuuuga

SEQ ID NO: 4069537 - RNA, 21 nt, Vaccinia virus
ccauauaccauuaauuguuua

SEQ ID NO: 4069538 - RNA, 17 nt, Vaccinia virus
ccauauaucuguaucau

SEQ ID NO: 4069539 - RNA, 21 nt, Vaccinia virus
ccauaucuaaagcuauguuua

SEQ ID NO: 4069540 - RNA, 14 nt, Vaccinia virus
ccauauuuuuugca

SEQ ID NO: 4069541 - RNA, 14 nt, Vaccinia virus
ccaucaaaagcauu

SEQ ID NO: 4069542 - RNA, 22 nt, Vaccinia virus
ccaucaaaagcauuaauacagu

SEQ ID NO: 4069543 - RNA, 14 nt, Vaccinia virus
ccaucguuaauuau

SEQ ID NO: 4069544 - RNA, 17 nt, Vaccinia virus
ccaucucuauguuucag

SEQ ID NO: 4069545 - RNA, 16 nt, Vaccinia virus
ccaucugguuuaauau

SEQ ID NO: 4069546 - RNA, 14 nt, Vaccinia virus
ccaugauaaauuau

SEQ ID NO: 4069547 - RNA, 15 nt, Vaccinia virus
ccaugaucuauaaag

SEQ ID NO: 4069548 - RNA, 22 nt, Vaccinia virus
ccauggacuaagauaucugaaa

SEQ ID NO: 4069549 - RNA, 19 nt, Vaccinia virus
ccauggacucauaaucucu

SEQ ID NO: 4069550 - RNA, 20 nt, Vaccinia virus
ccaugucaauugaguuuaua

SEQ ID NO: 4069551 - RNA, 18 nt, Vaccinia virus
ccauguugucuauuucca

SEQ ID NO: 4069552 - RNA, 16 nt, Vaccinia virus
ccauuaaaaauuguua

SEQ ID NO: 4069553 - RNA, 21 nt, Vaccinia virus
ccauuauaaaacuuaugauua

SEQ ID NO: 4069554 - RNA, 14 nt, Vaccinia virus
ccauugaaaacuau

SEQ ID NO: 4069555 - RNA, 17 nt, Vaccinia virus
ccauuuauccagucuga

SEQ ID NO: 4069556 - RNA, 13 nt, Vaccinia virus
ccauuuuuccaua

SEQ ID NO: 4069557 - RNA, 18 nt, Vaccinia virus
cccaagcagcauccccgu

SEQ ID NO: 4069558 - RNA, 22 nt, Vaccinia virus
cccaauagaauaguauucucag

SEQ ID NO: 4069559 - RNA, 16 nt, Vaccinia virus
cccacugaugagaugu

SEQ ID NO: 4069560 - RNA, 12 nt, Vaccinia virus
cccauaacuggu

SEQ ID NO: 4069561 - RNA, 23 nt, Vaccinia virus
cccgucuguuuaauuuuuucuac

SEQ ID NO: 4069562 - RNA, 13 nt, Vaccinia virus
ccgacgaaaagau

SEQ ID NO: 4069563 - RNA, 17 nt, Vaccinia virus
augcuauuagaaaugga

SEQ ID NO: 4069564 - RNA, 21 nt, Vaccinia virus
auggaaacaaaugaaacagga

SEQ ID NO: 4069565 - RNA, 12 nt, Vaccinia virus
auggaaauacuu

SEQ ID NO: 4069566 - RNA, 23 nt, Vaccinia virus
auggaauauaauaaucuauuuua

SEQ ID NO: 4069567 - RNA, 16 nt, Vaccinia virus
auggaauuggagaaac

SEQ ID NO: 4069568 - RNA, 13 nt, Vaccinia virus
auggaguauauau

SEQ ID NO: 4069569 - RNA, 22 nt, Vaccinia virus
auggaguauuccaagaguuuua

SEQ ID NO: 4069570 - RNA, 22 nt, Vaccinia virus
auggauucauccuguugucuaa

SEQ ID NO: 4069571 - RNA, 24 nt, Vaccinia virus
auggauuuggucauaauagaaugu

SEQ ID NO: 4069572 - RNA, 22 nt, Vaccinia virus
auggauuuuuuuaaaaaggaaa

SEQ ID NO: 4069573 - RNA, 15 nt, Vaccinia virus
auggcacgaaauauc

SEQ ID NO: 4069574 - RNA, 13 nt, Vaccinia virus
augguaaaaagac

SEQ ID NO: 4069575 - RNA, 13 nt, Vaccinia virus
augguaaauacug

SEQ ID NO: 4069576 - RNA, 22 nt, Vaccinia virus
augguaacgauaacacaaaaug

SEQ ID NO: 4069577 - RNA, 21 nt, Vaccinia virus
augguacguaaccgaaucuuc

SEQ ID NO: 4069578 - RNA, 14 nt, Vaccinia virus
auggucauguuuau

SEQ ID NO: 4069579 - RNA, 12 nt, Vaccinia virus
auguaaaacaaa

SEQ ID NO: 4069580 - RNA, 14 nt, Vaccinia virus
auguaaucauauaa

SEQ ID NO: 4069581 - RNA, 15 nt, Vaccinia virus
auguagaaaauggau

SEQ ID NO: 4069582 - RNA, 16 nt, Vaccinia virus
auguagaauccaucag

SEQ ID NO: 4069583 - RNA, 16 nt, Vaccinia virus
auguagacaaaaugaa

SEQ ID NO: 4069584 - RNA, 18 nt, Vaccinia virus
auguagauaaaaaagaua

SEQ ID NO: 4069585 - RNA, 16 nt, Vaccinia virus
auguagcaaacaugau

SEQ ID NO: 4069586 - RNA, 18 nt, Vaccinia virus
auguagccuugacuacau

SEQ ID NO: 4069587 - RNA, 14 nt, Vaccinia virus
auguagcuauauag

SEQ ID NO: 4069588 - RNA, 13 nt, Vaccinia virus
auguauaaaccuu

SEQ ID NO: 4069589 - RNA, 16 nt, Vaccinia virus
auguaugauucaaugu

SEQ ID NO: 4069590 - RNA, 14 nt, Vaccinia virus
auguauuagacaaa

SEQ ID NO: 4069591 - RNA, 17 nt, Vaccinia virus
auguauuuugaggaaau

SEQ ID NO: 4069592 - RNA, 19 nt, Vaccinia virus
auguauuuuuuaugauaua

SEQ ID NO: 4069593 - RNA, 18 nt, Vaccinia virus
augucaaaaauuguagaa

SEQ ID NO: 4069594 - RNA, 16 nt, Vaccinia virus
augucauauaggaaac

SEQ ID NO: 4069595 - RNA, 17 nt, Vaccinia virus
augucggaguuaauagc

SEQ ID NO: 4069596 - RNA, 21 nt, Vaccinia virus
augucuaaaaacagaaauagc

SEQ ID NO: 4069597 - RNA, 23 nt, Vaccinia virus
augucuuauuaaaaaacauauau

SEQ ID NO: 4069598 - RNA, 18 nt, Vaccinia virus
auguguaaaaaguuuuaa

SEQ ID NO: 4069599 - RNA, 15 nt, Vaccinia virus
auguguuaaaaagaa

SEQ ID NO: 4069600 - RNA, 23 nt, Vaccinia virus
auguguuuaauuuucacaaguau

SEQ ID NO: 4069601 - RNA, 21 nt, Vaccinia virus
auguguuuacaguaguaauga

SEQ ID NO: 4069602 - RNA, 23 nt, Vaccinia virus
auguguuuuagaauauauauacg

SEQ ID NO: 4069603 - RNA, 12 nt, Vaccinia virus
auguuaaauaua

SEQ ID NO: 4069604 - RNA, 22 nt, Vaccinia virus
auguuaauugggguauuaauaa

SEQ ID NO: 4069605 - RNA, 12 nt, Vaccinia virus
auguuacaaaug

SEQ ID NO: 4069606 - RNA, 17 nt, Vaccinia virus
auguuaccauacauuau

SEQ ID NO: 4069607 - RNA, 21 nt, Vaccinia virus
auguuagcgcuuccuaaauaa

SEQ ID NO: 4069608 - RNA, 16 nt, Vaccinia virus
auguuauauauaccuu

SEQ ID NO: 4069609 - RNA, 20 nt, Vaccinia virus
auguuaucaugaaauguuug

SEQ ID NO: 4069610 - RNA, 20 nt, Vaccinia virus
auguuccauuuauaagaaau

SEQ ID NO: 4069611 - RNA, 19 nt, Vaccinia virus
auguucgugguguuaugaa

SEQ ID NO: 4069612 - RNA, 20 nt, Vaccinia virus
auguucuuaaucaauguaca

SEQ ID NO: 4069613 - RNA, 22 nt, Vaccinia virus
auguugcaugaaauaauaugca

SEQ ID NO: 4069614 - RNA, 22 nt, Vaccinia virus
auguuguaauauuucacaugau

SEQ ID NO: 4069615 - RNA, 16 nt, Vaccinia virus
auguuuccgagaaaua

SEQ ID NO: 4069616 - RNA, 18 nt, Vaccinia virus
auguuuccgagaaauaua

SEQ ID NO: 4069617 - RNA, 20 nt, Vaccinia virus
auguuucuguuuucaaacac

SEQ ID NO: 4069618 - RNA, 20 nt, Vaccinia virus
auguuugcaucgugcuuuaa

SEQ ID NO: 4069619 - RNA, 17 nt, Vaccinia virus
auguuuuaaaaaucaca

SEQ ID NO: 4069620 - RNA, 12 nt, Vaccinia virus
auuaaaaaagau

SEQ ID NO: 4069621 - RNA, 23 nt, Vaccinia virus
auuaaaaacaaacuuuuuauccu

SEQ ID NO: 4069622 - RNA, 14 nt, Vaccinia virus
auuaaaaccuaauu

SEQ ID NO: 4069623 - RNA, 14 nt, Vaccinia virus
auuaaaauacuuuc

SEQ ID NO: 4069624 - RNA, 17 nt, Vaccinia virus
auuaaaccuaaauaauu

SEQ ID NO: 4069625 - RNA, 19 nt, Vaccinia virus
auuaaacguacauuuucca

SEQ ID NO: 4069626 - RNA, 16 nt, Vaccinia virus
auuaaacuuuaaugau

SEQ ID NO: 4069627 - RNA, 20 nt, Vaccinia virus
auuaaagauuguuuaagaag

SEQ ID NO: 4069628 - RNA, 16 nt, Vaccinia virus
auuaaaggauguacuc

SEQ ID NO: 4069629 - RNA, 18 nt, Vaccinia virus
auuaaaggcuuuaaaagu

SEQ ID NO: 4069630 - RNA, 21 nt, Vaccinia virus
auuaaaggcuuuuuauaucau

SEQ ID NO: 4069631 - RNA, 19 nt, Vaccinia virus
auuaaauauagguauauuu

SEQ ID NO: 4069632 - RNA, 16 nt, Vaccinia virus
auuaaaucauuaaaug

SEQ ID NO: 4069633 - RNA, 19 nt, Vaccinia virus
auuaaaugauuguauuaac

SEQ ID NO: 4069634 - RNA, 15 nt, Vaccinia virus
auuaaauuuagagau

SEQ ID NO: 4069635 - RNA, 19 nt, Vaccinia virus
auuaacaaauuuuaaacaa

SEQ ID NO: 4069636 - RNA, 15 nt, Vaccinia virus
auuaacagaaaaaac

SEQ ID NO: 4069637 - RNA, 16 nt, Vaccinia virus
auuaacgaguuaaaaa

SEQ ID NO: 4069638 - RNA, 22 nt, Vaccinia virus
auuaacgaucuuuauaauauau

SEQ ID NO: 4069639 - RNA, 20 nt, Vaccinia virus
auuaacgcaccuauaaagac

SEQ ID NO: 4069640 - RNA, 22 nt, Vaccinia virus
auuaacuacugauaacaaaaua

SEQ ID NO: 4069641 - RNA, 18 nt, Vaccinia virus
auuaacuaucuguaaaag

SEQ ID NO: 4069642 - RNA, 22 nt, Vaccinia virus
auuaacuccgaggcacauacau

SEQ ID NO: 4069643 - RNA, 12 nt, Vaccinia virus
auuaacugucuu

SEQ ID NO: 4069644 - RNA, 16 nt, Vaccinia virus
auuaagcaacaugucu

SEQ ID NO: 4069645 - RNA, 23 nt, Vaccinia virus
auuaaggagauagcuucaucuau

SEQ ID NO: 4069646 - RNA, 16 nt, Vaccinia virus
acugaucccuaauuuc

SEQ ID NO: 4069647 - RNA, 17 nt, Vaccinia virus
acugauuaacaaauggu

SEQ ID NO: 4069648 - RNA, 20 nt, Vaccinia virus
acugcaaaacucaaauguua

SEQ ID NO: 4069649 - RNA, 17 nt, Vaccinia virus
acugcaauaaaacauuu

SEQ ID NO: 4069650 - RNA, 18 nt, Vaccinia virus
acugcguucaagucauaa

SEQ ID NO: 4069651 - RNA, 20 nt, Vaccinia virus
acugcugaauguaucuucca

SEQ ID NO: 4069652 - RNA, 19 nt, Vaccinia virus
acugcugcguuaaacauuc

SEQ ID NO: 4069653 - RNA, 14 nt, Vaccinia virus
acuggagagacuga

SEQ ID NO: 4069654 - RNA, 17 nt, Vaccinia virus
acuguacgauacauaau

SEQ ID NO: 4069655 - RNA, 17 nt, Vaccinia virus
acuguauccucaaacau

SEQ ID NO: 4069656 - RNA, 21 nt, Vaccinia virus
acugucacuggaaagaugaua

SEQ ID NO: 4069657 - RNA, 22 nt, Vaccinia virus
acuguuaguauaacgugaaugu

SEQ ID NO: 4069658 - RNA, 21 nt, Vaccinia virus
acuuacagauggauaaaacuu

SEQ ID NO: 4069659 - RNA, 19 nt, Vaccinia virus
acuuaucgcauagagacua

SEQ ID NO: 4069660 - RNA, 20 nt, Vaccinia virus
acuuauggacaacagaggau

SEQ ID NO: 4069661 - RNA, 16 nt, Vaccinia virus
acuucaauaaaugauu

SEQ ID NO: 4069662 - RNA, 18 nt, Vaccinia virus
acuucacucuauuaaaaa

SEQ ID NO: 4069663 - RNA, 22 nt, Vaccinia virus
acuucauaauuuaauaauguag

SEQ ID NO: 4069664 - RNA, 21 nt, Vaccinia virus
acuucaucaugaguuaaauau

SEQ ID NO: 4069665 - RNA, 13 nt, Vaccinia virus
acuuccauggaaa

SEQ ID NO: 4069666 - RNA, 14 nt, Vaccinia virus
acuucgcaauaauu

SEQ ID NO: 4069667 - RNA, 21 nt, Vaccinia virus
acuucuacgaagaaaguuagu

SEQ ID NO: 4069668 - RNA, 19 nt, Vaccinia virus
acuucuccguucuuaauaa

SEQ ID NO: 4069669 - RNA, 21 nt, Vaccinia virus
acuugacuaaaucuuaauagu

SEQ ID NO: 4069670 - RNA, 14 nt, Vaccinia virus
acuugauaaaaaug

SEQ ID NO: 4069671 - RNA, 16 nt, Vaccinia virus
acuugauaauuaauaa

SEQ ID NO: 4069672 - RNA, 21 nt, Vaccinia virus
acuugauacgcucauuaauaa

SEQ ID NO: 4069673 - RNA, 17 nt, Vaccinia virus
acuugcgggguuaauuu

SEQ ID NO: 4069674 - RNA, 16 nt, Vaccinia virus
acuuggcgauucuaua

SEQ ID NO: 4069675 - RNA, 15 nt, Vaccinia virus
acuuggggagaauga

SEQ ID NO: 4069676 - RNA, 22 nt, Vaccinia virus
acuugguauuuggaaauuagug

SEQ ID NO: 4069677 - RNA, 14 nt, Vaccinia virus
acuuguaauaauug

SEQ ID NO: 4069678 - RNA, 16 nt, Vaccinia virus
acuuguauaauuuccc

SEQ ID NO: 4069679 - RNA, 14 nt, Vaccinia virus
acuuguuagauaga

SEQ ID NO: 4069680 - RNA, 17 nt, Vaccinia virus
acuuguuuaacaaaguu

SEQ ID NO: 4069681 - RNA, 13 nt, Vaccinia virus
acuuguuuuguuc

SEQ ID NO: 4069682 - RNA, 15 nt, Vaccinia virus
acuuuaagcuaaaau

SEQ ID NO: 4069683 - RNA, 15 nt, Vaccinia virus
auaaauuuauucucu

SEQ ID NO: 4069684 - RNA, 13 nt, Vaccinia virus
auaacaaagaaag

SEQ ID NO: 4069685 - RNA, 22 nt, Vaccinia virus
auaacaaccucuuuaauagccg

SEQ ID NO: 4069686 - RNA, 19 nt, Vaccinia virus
auaacacaaccaaauacuu

SEQ ID NO: 4069687 - RNA, 15 nt, Vaccinia virus
auaacaguuauauau

SEQ ID NO: 4069688 - RNA, 13 nt, Vaccinia virus
auaacaucauauu

SEQ ID NO: 4069689 - RNA, 23 nt, Vaccinia virus
auaacaucuuucaucaucugaca

SEQ ID NO: 4069690 - RNA, 17 nt, Vaccinia virus
auaacaugguaacugga

SEQ ID NO: 4069691 - RNA, 13 nt, Vaccinia virus
auaacauucuuaa

SEQ ID NO: 4069692 - RNA, 14 nt, Vaccinia virus
auaacauugcuagu

SEQ ID NO: 4069693 - RNA, 16 nt, Vaccinia virus
auaacauuuuuuguaa

SEQ ID NO: 4069694 - RNA, 18 nt, Vaccinia virus
auaacauuuuuuguaaau

SEQ ID NO: 4069695 - RNA, 20 nt, Vaccinia virus
auaacgaauccaauguuaug

SEQ ID NO: 4069696 - RNA, 15 nt, Vaccinia virus
auaacgucuucuaug

SEQ ID NO: 4069697 - RNA, 20 nt, Vaccinia virus
auaacguuaucguuuucuac

SEQ ID NO: 4069698 - RNA, 13 nt, Vaccinia virus
auaacuaaagaaa

SEQ ID NO: 4069699 - RNA, 17 nt, Vaccinia virus
auaacuaaauuaacaau

SEQ ID NO: 4069700 - RNA, 18 nt, Vaccinia virus
auaacugguucaaaauua

SEQ ID NO: 4069701 - RNA, 15 nt, Vaccinia virus
auaacuuacuuucca

SEQ ID NO: 4069702 - RNA, 19 nt, Vaccinia virus
auaacuucuaaucuuguaa

SEQ ID NO: 4069703 - RNA, 22 nt, Vaccinia virus
auaacuuuaccccaaucagaua

SEQ ID NO: 4069704 - RNA, 13 nt, Vaccinia virus
auaagaaacaauu

SEQ ID NO: 4069705 - RNA, 19 nt, Vaccinia virus
auaagaacgggucauuuau

SEQ ID NO: 4069706 - RNA, 19 nt, Vaccinia virus
auaagaagaggacaaaguu

SEQ ID NO: 4069707 - RNA, 15 nt, Vaccinia virus
auaagacuaaugcuu

SEQ ID NO: 4069708 - RNA, 19 nt, Vaccinia virus
auaagacuuuacuuuucua

SEQ ID NO: 4069709 - RNA, 18 nt, Vaccinia virus
auaagagaggauaaaacg

SEQ ID NO: 4069710 - RNA, 20 nt, Vaccinia virus
auaagaggcauaaucaaugu

SEQ ID NO: 4069711 - RNA, 15 nt, Vaccinia virus
auaagaguguaguau

SEQ ID NO: 4069712 - RNA, 19 nt, Vaccinia virus
auaagaugucuaugaauau

SEQ ID NO: 4069713 - RNA, 13 nt, Vaccinia virus
auaagauuuccaa

SEQ ID NO: 4069714 - RNA, 15 nt, Vaccinia virus
auaagccaaagcauu

SEQ ID NO: 4069715 - RNA, 19 nt, Vaccinia virus
auaaggaacuagaaucgua

SEQ ID NO: 4069716 - RNA, 14 nt, Vaccinia virus
auaaguaaaugaaa

SEQ ID NO: 4069717 - RNA, 17 nt, Vaccinia virus
auaagucuauuugaaau

SEQ ID NO: 4069718 - RNA, 19 nt, Vaccinia virus
auaauaacgauuuguuuaa

SEQ ID NO: 4069719 - RNA, 18 nt, Vaccinia virus
auaauaagaugcaaacau

SEQ ID NO: 4069720 - RNA, 16 nt, Vaccinia virus
auaauaaugaaugcag

SEQ ID NO: 4069721 - RNA, 15 nt, Vaccinia virus
auaauacgaauauau

SEQ ID NO: 4069722 - RNA, 15 nt, Vaccinia virus
auaauacuaucugga

SEQ ID NO: 4069723 - RNA, 22 nt, Vaccinia virus
auaauacucggccgacauaaug

SEQ ID NO: 4069724 - RNA, 16 nt, Vaccinia virus
auaauacucuguuguu

SEQ ID NO: 4069725 - RNA, 19 nt, Vaccinia virus
auaauacuggagaacuuau

SEQ ID NO: 4069726 - RNA, 18 nt, Vaccinia virus
auaauauauuagauauuu

SEQ ID NO: 4069727 - RNA, 15 nt, Vaccinia virus
auaauauauucuaug

SEQ ID NO: 4069728 - RNA, 18 nt, Vaccinia virus
auaauaucucuaauagau

SEQ ID NO: 4069729 - RNA, 17 nt, Vaccinia virus
auaauaucuuuaaucca

SEQ ID NO: 4069730 - RNA, 20 nt, Vaccinia virus
auaauaugcaccugaaacau

SEQ ID NO: 4069731 - RNA, 14 nt, Vaccinia virus
auaauauuaauauu

SEQ ID NO: 4069732 - RNA, 13 nt, Vaccinia virus
auaaucaaaauug

SEQ ID NO: 4069733 - RNA, 16 nt, Vaccinia virus
auaaucaauacggcca

SEQ ID NO: 4069734 - RNA, 17 nt, Vaccinia virus
auaaucagaaaacuuau

SEQ ID NO: 4069735 - RNA, 19 nt, Vaccinia virus
auaaucaucgaauacuucg

SEQ ID NO: 4069736 - RNA, 14 nt, Vaccinia virus
auaaucauguugau

SEQ ID NO: 4069737 - RNA, 20 nt, Vaccinia virus
auaaucauuacuaacuuuau

SEQ ID NO: 4069738 - RNA, 22 nt, Vaccinia virus
auaaucauuacuaacuuuauca

SEQ ID NO: 4069739 - RNA, 14 nt, Vaccinia virus
auaauccugugcau

SEQ ID NO: 4069740 - RNA, 17 nt, Vaccinia virus
auaaucgcuuuguuguu

SEQ ID NO: 4069741 - RNA, 16 nt, Vaccinia virus
auaaucguauacuuca

SEQ ID NO: 4069742 - RNA, 18 nt, Vaccinia virus
auaaucguauuuguguga

SEQ ID NO: 4069743 - RNA, 22 nt, Vaccinia virus
auaaucuucgucuauuacacca

SEQ ID NO: 4069744 - RNA, 21 nt, Vaccinia virus
auaaucuucucuccuguuaau

SEQ ID NO: 4069745 - RNA, 14 nt, Vaccinia virus
auaaugaacauagu

SEQ ID NO: 4069746 - RNA, 17 nt, Vaccinia virus
auaaugacgauaacauu

SEQ ID NO: 4069747 - RNA, 20 nt, Vaccinia virus
auaaugauacgauacuauau

SEQ ID NO: 4069748 - RNA, 16 nt, Vaccinia virus
auaaugauagaauaga

SEQ ID NO: 4069749 - RNA, 14 nt, Vaccinia virus
auaaugauauauau

SEQ ID NO: 4069750 - RNA, 17 nt, Vaccinia virus
auaauggcuguuuguau

SEQ ID NO: 4069751 - RNA, 23 nt, Vaccinia virus
auaauggcuguuuguauaauaga

SEQ ID NO: 4069752 - RNA, 16 nt, Vaccinia virus
auaauggugcuuguau

SEQ ID NO: 4069753 - RNA, 20 nt, Vaccinia virus
auaauggugcuuguaucgaa

SEQ ID NO: 4069754 - RNA, 17 nt, Vaccinia virus
auaaugucugacuagau

SEQ ID NO: 4069755 - RNA, 21 nt, Vaccinia virus
auaauguuauuacuuguggua

SEQ ID NO: 4069756 - RNA, 22 nt, Vaccinia virus
auaauguuguccauuguaguau

SEQ ID NO: 4069757 - RNA, 22 nt, Vaccinia virus
auaauguuucuauguuuucuac

SEQ ID NO: 4069758 - RNA, 13 nt, Vaccinia virus
auaauuaguuuuu

SEQ ID NO: 4069759 - RNA, 23 nt, Vaccinia virus
auaauuauaauauaaaaauacuu

SEQ ID NO: 4069760 - RNA, 18 nt, Vaccinia virus
auaauuauauaaauaugu

SEQ ID NO: 4069761 - RNA, 14 nt, Vaccinia virus
auaauuauuuccag

SEQ ID NO: 4069762 - RNA, 15 nt, Vaccinia virus
auaauuauuuuguaa

SEQ ID NO: 4069763 - RNA, 19 nt, Vaccinia virus
auaauucauaagaauuuac

SEQ ID NO: 4069764 - RNA, 21 nt, Vaccinia virus
auaauucauuaauauguacau

SEQ ID NO: 4069765 - RNA, 21 nt, Vaccinia virus
auaauucuauucuaguauuac

SEQ ID NO: 4069766 - RNA, 19 nt, Vaccinia virus
auaauucuuuauaacugaa

SEQ ID NO: 4069767 - RNA, 15 nt, Vaccinia virus
auaauugcuuuucua

SEQ ID NO: 4069768 - RNA, 17 nt, Vaccinia virus
auaauuguacuuuguaa

SEQ ID NO: 4069769 - RNA, 22 nt, Vaccinia virus
auaauuguuuaagacugucaau

SEQ ID NO: 4069770 - RNA, 12 nt, Vaccinia virus
auaauuuaagag

SEQ ID NO: 4069771 - RNA, 14 nt, Vaccinia virus
auaauuuacagcua

SEQ ID NO: 4069772 - RNA, 16 nt, Vaccinia virus
auaauuuagauacuuu

SEQ ID NO: 4069773 - RNA, 13 nt, Vaccinia virus
auaauuuaggaau

SEQ ID NO: 4069774 - RNA, 12 nt, Vaccinia virus
auaauuucuaga

SEQ ID NO: 4069775 - RNA, 13 nt, Vaccinia virus
auaauuugaucca

SEQ ID NO: 4069776 - RNA, 12 nt, Vaccinia virus
auaauuuuacca

SEQ ID NO: 4069777 - RNA, 18 nt, Vaccinia virus
auaauuuuaccagaauac

SEQ ID NO: 4069778 - RNA, 20 nt, Vaccinia virus
auaauuuuaccagaauacua

SEQ ID NO: 4069779 - RNA, 18 nt, Vaccinia virus
auaauuuuuggacaaaug

SEQ ID NO: 4069780 - RNA, 23 nt, Vaccinia virus
auacaaaaucaucugauaauuua

SEQ ID NO: 4069781 - RNA, 20 nt, Vaccinia virus
auacaaauaugucuuuguua

SEQ ID NO: 4069782 - RNA, 20 nt, Vaccinia virus
auacaaauuuuaagaaaugg

SEQ ID NO: 4069783 - RNA, 21 nt, Vaccinia virus
auacaauaauucagauaaugu

SEQ ID NO: 4069784 - RNA, 16 nt, Vaccinia virus
auacaauuaucauuuu

SEQ ID NO: 4069785 - RNA, 20 nt, Vaccinia virus
auacacaucaaaauaauaaa

SEQ ID NO: 4069786 - RNA, 16 nt, Vaccinia virus
auacacaugauugaca

SEQ ID NO: 4069787 - RNA, 22 nt, Vaccinia virus
auacacauuuucaaauaauaaa

SEQ ID NO: 4069788 - RNA, 21 nt, Vaccinia virus
auacacgcuaaaauaacuagu

SEQ ID NO: 4069789 - RNA, 16 nt, Vaccinia virus
auacacuaaaauuaaa

SEQ ID NO: 4069790 - RNA, 20 nt, Vaccinia virus
auacagcuggagauuaucau

SEQ ID NO: 4069791 - RNA, 16 nt, Vaccinia virus
auacauaauuuuguaa

SEQ ID NO: 4069792 - RNA, 21 nt, Vaccinia virus
auacauaccugauuagaauuc

SEQ ID NO: 4069793 - RNA, 22 nt, Vaccinia virus
auacauagucgugaucaacauu

SEQ ID NO: 4069794 - RNA, 16 nt, Vaccinia virus
auacauauuuucagua

SEQ ID NO: 4069795 - RNA, 15 nt, Vaccinia virus
auacauccuucuaug

SEQ ID NO: 4069796 - RNA, 21 nt, Vaccinia virus
auacaucgguaaauaaaacua

SEQ ID NO: 4069797 - RNA, 18 nt, Vaccinia virus
auacaucucuggaaauag

SEQ ID NO: 4069798 - RNA, 14 nt, Vaccinia virus
auacauuguugcau

SEQ ID NO: 4069799 - RNA, 15 nt, Vaccinia virus
auacauuuauuguau

SEQ ID NO: 4069800 - RNA, 14 nt, Vaccinia virus
auacauuuuucuau

SEQ ID NO: 4069801 - RNA, 14 nt, Vaccinia virus
auaccaaucauuua

SEQ ID NO: 4069802 - RNA, 22 nt, Vaccinia virus
auaccacuuaaugacaaaauca

SEQ ID NO: 4069803 - RNA, 14 nt, Vaccinia virus
auaccauuucuagu

SEQ ID NO: 4069804 - RNA, 16 nt, Vaccinia virus
auaccucuacacuauu

SEQ ID NO: 4069805 - RNA, 21 nt, Vaccinia virus
auaccuuaccgccuucauaag

SEQ ID NO: 4069806 - RNA, 13 nt, Vaccinia virus
acuaacuauugaa

SEQ ID NO: 4069807 - RNA, 18 nt, Vaccinia virus
acuaacucucuaauggau

SEQ ID NO: 4069808 - RNA, 15 nt, Vaccinia virus
acuaauacaucugaa

SEQ ID NO: 4069809 - RNA, 17 nt, Vaccinia virus
acuaauacucaauccuu

SEQ ID NO: 4069810 - RNA, 14 nt, Vaccinia virus
acuaaucaauaauc

SEQ ID NO: 4069811 - RNA, 18 nt, Vaccinia virus
acuaaucguaauauucua

SEQ ID NO: 4069812 - RNA, 16 nt, Vaccinia virus
acuaaucucauuguuu

SEQ ID NO: 4069813 - RNA, 20 nt, Vaccinia virus
acuaauguauacauuuucca

SEQ ID NO: 4069814 - RNA, 17 nt, Vaccinia virus
acuaauucauuuucaau

SEQ ID NO: 4069815 - RNA, 20 nt, Vaccinia virus
acuaauucuuucucaucaac

SEQ ID NO: 4069816 - RNA, 16 nt, Vaccinia virus
acuacugaaaaaagug

SEQ ID NO: 4069817 - RNA, 16 nt, Vaccinia virus
acuacugaagaacuac

SEQ ID NO: 4069818 - RNA, 14 nt, Vaccinia virus
acuacuucauuaau

SEQ ID NO: 4069819 - RNA, 20 nt, Vaccinia virus
acuagauacaaaauuugcau

SEQ ID NO: 4069820 - RNA, 23 nt, Vaccinia virus
acuagauuaauuuuugugggaag

SEQ ID NO: 4069821 - RNA, 19 nt, Vaccinia virus
acuagcauccccuuucaau

SEQ ID NO: 4069822 - RNA, 18 nt, Vaccinia virus
aauaugcuaguuaauagu

SEQ ID NO: 4069823 - RNA, 22 nt, Vaccinia virus
aauauggagagguguauuucca

SEQ ID NO: 4069824 - RNA, 23 nt, Vaccinia virus
aauaugucucuuaacuauuuccg

SEQ ID NO: 4069825 - RNA, 15 nt, Vaccinia virus
aauauguguauuauc

SEQ ID NO: 4069826 - RNA, 12 nt, Vaccinia virus
aauauuaaacaa

SEQ ID NO: 4069827 - RNA, 12 nt, Vaccinia virus
aauauuaaauau

SEQ ID NO: 4069828 - RNA, 20 nt, Vaccinia virus
aauauuaguggaagaaagau

SEQ ID NO: 4069829 - RNA, 16 nt, Vaccinia virus
aauauuauuaugaaga

SEQ ID NO: 4069830 - RNA, 19 nt, Vaccinia virus
aauauuauucuuugauucg

SEQ ID NO: 4069831 - RNA, 13 nt, Vaccinia virus
aauauuauuuccc

SEQ ID NO: 4069832 - RNA, 12 nt, Vaccinia virus
aauauucagagu

SEQ ID NO: 4069833 - RNA, 17 nt, Vaccinia virus
aauauucauauccuugu

SEQ ID NO: 4069834 - RNA, 13 nt, Vaccinia virus
aauauucuguucu

SEQ ID NO: 4069835 - RNA, 17 nt, Vaccinia virus
aauauuggcuuuucuuu

SEQ ID NO: 4069836 - RNA, 21 nt, Vaccinia virus
aauauuguuuugcugucucaa

SEQ ID NO: 4069837 - RNA, 20 nt, Vaccinia virus
aauauuuaacucaugaugaa

SEQ ID NO: 4069838 - RNA, 12 nt, Vaccinia virus
aauauuuagaaa

SEQ ID NO: 4069839 - RNA, 16 nt, Vaccinia virus
aauauuuauuagaaca

SEQ ID NO: 4069840 - RNA, 11 nt, Vaccinia virus
aauauuucauu

SEQ ID NO: 4069841 - RNA, 17 nt, Vaccinia virus
aauauuucgauaaugaa

SEQ ID NO: 4069842 - RNA, 17 nt, Vaccinia virus
aauauuucgaugauaua

SEQ ID NO: 4069843 - RNA, 12 nt, Vaccinia virus
aauauuuucuau

SEQ ID NO: 4069844 - RNA, 13 nt, Vaccinia virus
aaucaaaaaauaa

SEQ ID NO: 4069845 - RNA, 18 nt, Vaccinia virus
aaucaacagaaguuaaua

SEQ ID NO: 4069846 - RNA, 14 nt, Vaccinia virus
aaucaagaaugaua

SEQ ID NO: 4069847 - RNA, 12 nt, Vaccinia virus
aaucacaaacau

SEQ ID NO: 4069848 - RNA, 16 nt, Vaccinia virus
aaucacacaagccauu

SEQ ID NO: 4069849 - RNA, 22 nt, Vaccinia virus
aaucaccaaauuuuacaaaaaa

SEQ ID NO: 4069850 - RNA, 19 nt, Vaccinia virus
aaucaccauccuuuaaaaa

SEQ ID NO: 4069851 - RNA, 18 nt, Vaccinia virus
aaucacucaauaucuaga

SEQ ID NO: 4069852 - RNA, 15 nt, Vaccinia virus
aaucagaacuuccaa

SEQ ID NO: 4069853 - RNA, 14 nt, Vaccinia virus
aaucagaguuuuua

SEQ ID NO: 4069854 - RNA, 19 nt, Vaccinia virus
aaucagauagacuguuguu

SEQ ID NO: 4069855 - RNA, 22 nt, Vaccinia virus
aaucaggguuaucaaaguguuu

SEQ ID NO: 4069856 - RNA, 21 nt, Vaccinia virus
aaucaguacguucuucauuua

SEQ ID NO: 4069857 - RNA, 22 nt, Vaccinia virus
aaucaguuacaaaacguuuaua

SEQ ID NO: 4069858 - RNA, 21 nt, Vaccinia virus
aaucauaguuuuuacacauag

SEQ ID NO: 4069859 - RNA, 20 nt, Vaccinia virus
aaucaucaauccuucagaua

SEQ ID NO: 4069860 - RNA, 18 nt, Vaccinia virus
aaucaugaauuuacagaa

SEQ ID NO: 4069861 - RNA, 16 nt, Vaccinia virus
aaucauggacuuuaua

SEQ ID NO: 4069862 - RNA, 14 nt, Vaccinia virus
aaucauuaaaugau

SEQ ID NO: 4069863 - RNA, 20 nt, Vaccinia virus
aaucauucucuucuaucuuu

SEQ ID NO: 4069864 - RNA, 22 nt, Vaccinia virus
aaucauugauacauuuaaaagu

SEQ ID NO: 4069865 - RNA, 23 nt, Vaccinia virus
uuuacccgccuucgaauaaauaa

SEQ ID NO: 4069866 - RNA, 13 nt, Vaccinia virus
uuuacccuagaau

SEQ ID NO: 4069867 - RNA, 22 nt, Vaccinia virus
uuuacgcaaaacauuauaauaa

SEQ ID NO: 4069868 - RNA, 17 nt, Vaccinia virus
uuuacgguaucuaauau

SEQ ID NO: 4069869 - RNA, 14 nt, Vaccinia virus
uuuacuggaauuag

SEQ ID NO: 4069870 - RNA, 23 nt, Vaccinia virus
uuuagaaaacucucuauuucuua

SEQ ID NO: 4069871 - RNA, 17 nt, Vaccinia virus
uuuagacgguugagaaa

SEQ ID NO: 4069872 - RNA, 14 nt, Vaccinia virus
uuuagauauaucua

SEQ ID NO: 4069873 - RNA, 19 nt, Vaccinia virus
uuuaggaaugauuaucaaa

SEQ ID NO: 4069874 - RNA, 16 nt, Vaccinia virus
uuuaguccuauuucaa

SEQ ID NO: 4069875 - RNA, 14 nt, Vaccinia virus
uuuaguuuaucaaa

SEQ ID NO: 4069876 - RNA, 16 nt, Vaccinia virus
uuuaguuuauucauaa

SEQ ID NO: 4069877 - RNA, 24 nt, Vaccinia virus
uuuauaaagaaauacauaucgcac

SEQ ID NO: 4069878 - RNA, 15 nt, Vaccinia virus
uuuauaaaguuuagu

SEQ ID NO: 4069879 - RNA, 12 nt, Vaccinia virus
uuuauaaauuuu

SEQ ID NO: 4069880 - RNA, 15 nt, Vaccinia virus
uuuauacuucuaaug

SEQ ID NO: 4069881 - RNA, 19 nt, Vaccinia virus
uuuauaggcgguguauuua

SEQ ID NO: 4069882 - RNA, 15 nt, Vaccinia virus
uuuauaucaauaaga

SEQ ID NO: 4069883 - RNA, 14 nt, Vaccinia virus
uuuauauuaaauau

SEQ ID NO: 4069884 - RNA, 16 nt, Vaccinia virus
uuuaucgcacagauau

SEQ ID NO: 4069885 - RNA, 22 nt, Vaccinia virus
uuuaucguggaaaauauggaca

SEQ ID NO: 4069886 - RNA, 12 nt, Vaccinia virus
uuuaucuauacu

SEQ ID NO: 4069887 - RNA, 21 nt, Vaccinia virus
uuuaucuuucccccuagauac

SEQ ID NO: 4069888 - RNA, 16 nt, Vaccinia virus
uuuauggaauaguuuu

SEQ ID NO: 4069889 - RNA, 23 nt, Vaccinia virus
uuuauuauauucaguaaccaaau

SEQ ID NO: 4069890 - RNA, 13 nt, Vaccinia virus
uuuauucuagaau

SEQ ID NO: 4069891 - RNA, 12 nt, Vaccinia virus
uuuauucucaaa

SEQ ID NO: 4069892 - RNA, 19 nt, Vaccinia virus
uuuauugucguacuuuaua

SEQ ID NO: 4069893 - RNA, 13 nt, Vaccinia virus
uuuauuucuaauu

SEQ ID NO: 4069894 - RNA, 14 nt, Vaccinia virus
uuucaaagaaugag

SEQ ID NO: 4069895 - RNA, 13 nt, Vaccinia virus
uuucaaauaccag

SEQ ID NO: 4069896 - RNA, 21 nt, Vaccinia virus
uuucaauauugaaaauacuaa

SEQ ID NO: 4069897 - RNA, 17 nt, Vaccinia virus
uuucaauuuauuguaaa

SEQ ID NO: 4069898 - RNA, 21 nt, Vaccinia virus
uuucagcguggauuucucaua

SEQ ID NO: 4069899 - RNA, 12 nt, Vaccinia virus
uuucaucaagau

SEQ ID NO: 4069900 - RNA, 16 nt, Vaccinia virus
uuucaucuauaucauu

SEQ ID NO: 4069901 - RNA, 20 nt, Vaccinia virus
uuucauucgaagacgcuaua

SEQ ID NO: 4069902 - RNA, 19 nt, Vaccinia virus
uuuccaaauuaguuagccg

SEQ ID NO: 4069903 - RNA, 19 nt, Vaccinia virus
uuuccaucaucgucuuauu

SEQ ID NO: 4069904 - RNA, 15 nt, Vaccinia virus
uuuccauuuuuaauu

SEQ ID NO: 4069905 - RNA, 15 nt, Vaccinia virus
uuucccauacuaauu

SEQ ID NO: 4069906 - RNA, 12 nt, Vaccinia virus
uuuccuagauac

SEQ ID NO: 4069907 - RNA, 16 nt, Vaccinia virus
uuucgaagaucuucuu

SEQ ID NO: 4069908 - RNA, 14 nt, Vaccinia virus
uuucgaauaaguuu

SEQ ID NO: 4069909 - RNA, 17 nt, Vaccinia virus
uuucgauuucuggauau

SEQ ID NO: 4069910 - RNA, 17 nt, Vaccinia virus
uuucgcgggauacauca

SEQ ID NO: 4069911 - RNA, 16 nt, Vaccinia virus
uuucguacauuuuuaa

SEQ ID NO: 4069912 - RNA, 17 nt, Vaccinia virus
uuucguaccaacucauu

SEQ ID NO: 4069913 - RNA, 17 nt, Vaccinia virus
uuucguauaauuuuuaa

SEQ ID NO: 4069914 - RNA, 20 nt, Vaccinia virus
uuucguuaaaacauucaaau

SEQ ID NO: 4069915 - RNA, 16 nt, Vaccinia virus
uuucguugguagauau

SEQ ID NO: 4069916 - RNA, 20 nt, Vaccinia virus
uuucuaacucgguaaaaaaa

SEQ ID NO: 4069917 - RNA, 17 nt, Vaccinia virus
uuucuaccuuuucaauu

SEQ ID NO: 4069918 - RNA, 15 nt, Vaccinia virus
uuucuagaacaucau

SEQ ID NO: 4069919 - RNA, 14 nt, Vaccinia virus
uuucuagacaucuu

SEQ ID NO: 4069920 - RNA, 16 nt, Vaccinia virus
uuucuaucgaauguag

SEQ ID NO: 4069921 - RNA, 18 nt, Vaccinia virus
uuucucaaccauagauau

SEQ ID NO: 4069922 - RNA, 13 nt, Vaccinia virus
uuucucauaauaa

SEQ ID NO: 4069923 - RNA, 19 nt, Vaccinia virus
uuucucucauguauaauaa

SEQ ID NO: 4069924 - RNA, 18 nt, Vaccinia virus
uuucugaauuauuucaua

SEQ ID NO: 4069925 - RNA, 21 nt, Vaccinia virus
uuucugguuuucuauaaauaa

SEQ ID NO: 4069926 - RNA, 20 nt, Vaccinia virus
uuucuguaaauucaugauug

SEQ ID NO: 4069927 - RNA, 13 nt, Vaccinia virus
uuucuguaaugau

SEQ ID NO: 4069928 - RNA, 21 nt, Vaccinia virus
uuucuuaaucaguccaucauu

SEQ ID NO: 4069929 - RNA, 14 nt, Vaccinia virus
uuucuucauaugau

SEQ ID NO: 4069930 - RNA, 15 nt, Vaccinia virus
uuucuuggcaaaaga

SEQ ID NO: 4069931 - RNA, 15 nt, Vaccinia virus
uuucuuguuaaugau

SEQ ID NO: 4069932 - RNA, 20 nt, Vaccinia virus
uuugaaauaucuuaugauga

SEQ ID NO: 4069933 - RNA, 14 nt, Vaccinia virus
uuugaacauguaga

SEQ ID NO: 4069934 - RNA, 13 nt, Vaccinia virus
uuugacuagauaa

SEQ ID NO: 4069935 - RNA, 16 nt, Vaccinia virus
uuugacuuacauaaau

SEQ ID NO: 4069936 - RNA, 23 nt, Vaccinia virus
uuugauagcuaacucgguaucua

SEQ ID NO: 4069937 - RNA, 21 nt, Vaccinia virus
uuugcucuauaaacugaauau

SEQ ID NO: 4069938 - RNA, 16 nt, Vaccinia virus
uuuggcaauaaaguuu

SEQ ID NO: 4069939 - RNA, 15 nt, Vaccinia virus
uuuggcuaaacuaua

SEQ ID NO: 4069940 - RNA, 15 nt, Vaccinia virus
uuuggcuuugugcau

SEQ ID NO: 4069941 - RNA, 20 nt, Vaccinia virus
uuugguacguugauuucuag

SEQ ID NO: 4069942 - RNA, 18 nt, Vaccinia virus
uuugguguaaaucuaauu

SEQ ID NO: 4069943 - RNA, 16 nt, Vaccinia virus
uuuguaauugugacau

SEQ ID NO: 4069944 - RNA, 12 nt, Vaccinia virus
uuuguacauuuu

SEQ ID NO: 4069945 - RNA, 20 nt, Vaccinia virus
uuuguaccaacaaacuguuc

SEQ ID NO: 4069946 - RNA, 17 nt, Vaccinia virus
uuuguacgucacaucuu

SEQ ID NO: 4069947 - RNA, 22 nt, Vaccinia virus
uuuguagucuuucaacauccuu

SEQ ID NO: 4069948 - RNA, 20 nt, Vaccinia virus
uuuguccacguucuuuaauu

SEQ ID NO: 4069949 - RNA, 21 nt, Vaccinia virus
uuuguccauuauuucuauauu

SEQ ID NO: 4069950 - RNA, 20 nt, Vaccinia virus
uuugucuccuucuccguaaa

SEQ ID NO: 4069951 - RNA, 19 nt, Vaccinia virus
uuugucuuccuuaacuaua

SEQ ID NO: 4069952 - RNA, 18 nt, Vaccinia virus
uuugugaaaacagauaac

SEQ ID NO: 4069953 - RNA, 17 nt, Vaccinia virus
uuuguuaaaaauuuaga

SEQ ID NO: 4069954 - RNA, 16 nt, Vaccinia virus
uuuguucuuguagaua

SEQ ID NO: 4069955 - RNA, 18 nt, Vaccinia virus
uuuuaaacaacuaaacag

SEQ ID NO: 4069956 - RNA, 17 nt, Vaccinia virus
uuuuaaaguuaaucaua

SEQ ID NO: 4069957 - RNA, 13 nt, Vaccinia virus
uuuuaacaucuuu

SEQ ID NO: 4069958 - RNA, 17 nt, Vaccinia virus
uuuuaacgauaguaaac

SEQ ID NO: 4069959 - RNA, 21 nt, Vaccinia virus
uuuuaacgcgucugaauguau

SEQ ID NO: 4069960 - RNA, 12 nt, Vaccinia virus
uuuuacauuacu

SEQ ID NO: 4069961 - RNA, 22 nt, Vaccinia virus
uuuuacccucaaucauguacua

SEQ ID NO: 4069962 - RNA, 16 nt, Vaccinia virus
uuuuagaaauauacag

SEQ ID NO: 4069963 - RNA, 17 nt, Vaccinia virus
uuuuagauuuuagcaua

SEQ ID NO: 4069964 - RNA, 12 nt, Vaccinia virus
uuuuauaaacaa

SEQ ID NO: 4069965 - RNA, 20 nt, Vaccinia virus
uuuuauauccaauguauuua

SEQ ID NO: 4069966 - RNA, 20 nt, Vaccinia virus
uuuuauauguguuugaucua

SEQ ID NO: 4069967 - RNA, 20 nt, Vaccinia virus
uuuuaucgauucaucuaauu

SEQ ID NO: 4069968 - RNA, 17 nt, Vaccinia virus
uuuucaauuauguauca

SEQ ID NO: 4069969 - RNA, 16 nt, Vaccinia virus
uuuucauaaauacacu

SEQ ID NO: 4069970 - RNA, 14 nt, Vaccinia virus
uuuucauguaucga

SEQ ID NO: 4069971 - RNA, 15 nt, Vaccinia virus
uuuuccaaaguuuua

SEQ ID NO: 4069972 - RNA, 12 nt, Vaccinia virus
uuuuccaugaua

SEQ ID NO: 4069973 - RNA, 21 nt, Vaccinia virus
uuuuccucagacaucuaaaaa

SEQ ID NO: 4069974 - RNA, 22 nt, Vaccinia virus
uuuucuacugaugcauguauuu

SEQ ID NO: 4069975 - RNA, 20 nt, Vaccinia virus
uuuucuauaaauaaaagaca

SEQ ID NO: 4069976 - RNA, 23 nt, Vaccinia virus
uuuugaagacgaugauucgucua

SEQ ID NO: 4069977 - RNA, 20 nt, Vaccinia virus
uuuugguggagguguaacug

SEQ ID NO: 4069978 - RNA, 17 nt, Vaccinia virus
uuuuuaaaaucaucauu

SEQ ID NO: 4069979 - RNA, 22 nt, Vaccinia virus
uuuuucauccuugcuaucaaag

SEQ ID NO: 4069980 - RNA, 15 nt, Vaccinia virus
uuuuuguuuaaccac

SEQ ID NO: 4069981 - RNA, 16 nt, Vaccinia virus
ucgauuuucuacagau

SEQ ID NO: 4069982 - RNA, 13 nt, Vaccinia virus
ucgcagaugauga

SEQ ID NO: 4069983 - RNA, 19 nt, Vaccinia virus
ucgcauuaauacuguuuuc

SEQ ID NO: 4069984 - RNA, 17 nt, Vaccinia virus
ucgcccaucucauacau

SEQ ID NO: 4069985 - RNA, 20 nt, Vaccinia virus
ucgcuaauguauagauuguu

SEQ ID NO: 4069986 - RNA, 14 nt, Vaccinia virus
ucgcuuucuagaau

SEQ ID NO: 4069987 - RNA, 17 nt, Vaccinia virus
ucggauaauauguaaaa

SEQ ID NO: 4069988 - RNA, 16 nt, Vaccinia virus
ucggauacucuauuaa

SEQ ID NO: 4069989 - RNA, 18 nt, Vaccinia virus
ucgggacgcguauauguu

SEQ ID NO: 4069990 - RNA, 19 nt, Vaccinia virus
ucguaauuauaguucuuaa

SEQ ID NO: 4069991 - RNA, 17 nt, Vaccinia virus
ucguacaaggauuucaa

SEQ ID NO: 4069992 - RNA, 19 nt, Vaccinia virus
ucguacauaaguuguacag

SEQ ID NO: 4069993 - RNA, 19 nt, Vaccinia virus
ucguacgauccaaauuccg

SEQ ID NO: 4069994 - RNA, 18 nt, Vaccinia virus
ucguacuauaccacauac

SEQ ID NO: 4069995 - RNA, 17 nt, Vaccinia virus
ucguacuuuauaucgug

SEQ ID NO: 4069996 - RNA, 17 nt, Vaccinia virus
ucguauguagaaauuuu

SEQ ID NO: 4069997 - RNA, 20 nt, Vaccinia virus
ucguauuucauaaaaguuau

SEQ ID NO: 4069998 - RNA, 14 nt, Vaccinia virus
ucgucuaaaguuua

SEQ ID NO: 4069999 - RNA, 18 nt, Vaccinia virus
ucgucuagcguugcuucu

SEQ ID NO: 4070000 - RNA, 15 nt, Vaccinia virus
ucgucuuucugaaug

SEQ ID NO: 4070001 - RNA, 19 nt, Vaccinia virus
ucguuaaacgccuuuagaa

SEQ ID NO: 4070002 - RNA, 12 nt, Vaccinia virus
ucguuacaaaag

SEQ ID NO: 4070003 - RNA, 15 nt, Vaccinia virus
ucguuauagaaugca

SEQ ID NO: 4070004 - RNA, 14 nt, Vaccinia virus
ucguuaucucagaa

SEQ ID NO: 4070005 - RNA, 21 nt, Vaccinia virus
ucguuccgccaaauuuucauu

SEQ ID NO: 4070006 - RNA, 16 nt, Vaccinia virus
ucguugacaucuugaa

SEQ ID NO: 4070007 - RNA, 16 nt, Vaccinia virus
ucguuuaauacuacau

SEQ ID NO: 4070008 - RNA, 16 nt, Vaccinia virus
ucguuugaugaucaua

SEQ ID NO: 4070009 - RNA, 13 nt, Vaccinia virus
ucguuuucaucuu

SEQ ID NO: 4070010 - RNA, 16 nt, Vaccinia virus
ucguuuuucuuaagaa

SEQ ID NO: 4070011 - RNA, 21 nt, Vaccinia virus
ucuaaaaauguuaauuuugaa

SEQ ID NO: 4070012 - RNA, 19 nt, Vaccinia virus
ucuaaacaagcgauuuaga

SEQ ID NO: 4070013 - RNA, 18 nt, Vaccinia virus
ucuaaacaguauguugua

SEQ ID NO: 4070014 - RNA, 16 nt, Vaccinia virus
ucuaaaccuucuuauu

SEQ ID NO: 4070015 - RNA, 16 nt, Vaccinia virus
ucuaaacgauuuagua

SEQ ID NO: 4070016 - RNA, 21 nt, Vaccinia virus
ucuaaaguuaagagauuuaga

SEQ ID NO: 4070017 - RNA, 22 nt, Vaccinia virus
ucuaaaguuaagagauuuagaa

SEQ ID NO: 4070018 - RNA, 19 nt, Vaccinia virus
ucuaacgccgaucucugaa

SEQ ID NO: 4070019 - RNA, 14 nt, Vaccinia virus
ucuaagauguugua

SEQ ID NO: 4070020 - RNA, 20 nt, Vaccinia virus
ucuaauagaucugauuagua

SEQ ID NO: 4070021 - RNA, 21 nt, Vaccinia virus
ucuaauugucggaauuauuuu

SEQ ID NO: 4070022 - RNA, 22 nt, Vaccinia virus
ucuacaaauagagauaaaacaa

SEQ ID NO: 4070023 - RNA, 23 nt, Vaccinia virus
ucuaccaaagaaagaguuugauu

SEQ ID NO: 4070024 - RNA, 16 nt, Vaccinia virus
ucuaccggaguuauau

SEQ ID NO: 4070025 - RNA, 18 nt, Vaccinia virus
ucuaccguuguuaaauac

SEQ ID NO: 4070026 - RNA, 19 nt, Vaccinia virus
ucuacuagacuauuaauaa

SEQ ID NO: 4070027 - RNA, 14 nt, Vaccinia virus
ucuacucuagauaa

SEQ ID NO: 4070028 - RNA, 16 nt, Vaccinia virus
ucuacugauaaaacug

SEQ ID NO: 4070029 - RNA, 14 nt, Vaccinia virus
ucuagauauuagua

SEQ ID NO: 4070030 - RNA, 18 nt, Vaccinia virus
ucuagaucucuagaauau

SEQ ID NO: 4070031 - RNA, 14 nt, Vaccinia virus
ucuagauguagaag

SEQ ID NO: 4070032 - RNA, 23 nt, Vaccinia virus
ucuagcaaaaauucuaugucuaa

SEQ ID NO: 4070033 - RNA, 15 nt, Vaccinia virus
ucuagccauaucuaa

SEQ ID NO: 4070034 - RNA, 18 nt, Vaccinia virus
ucuagccauaucuaaagc

SEQ ID NO: 4070035 - RNA, 21 nt, Vaccinia virus
ucuagccucgguaaucuguac

SEQ ID NO: 4070036 - RNA, 15 nt, Vaccinia virus
ucuauaagguuucuu

SEQ ID NO: 4070037 - RNA, 12 nt, Vaccinia virus
ucuauaggaaag

SEQ ID NO: 4070038 - RNA, 18 nt, Vaccinia virus
ucuauauacuauauagua

SEQ ID NO: 4070039 - RNA, 21 nt, Vaccinia virus
ucuaucaaaaguuaauuucua

SEQ ID NO: 4070040 - RNA, 22 nt, Vaccinia virus
ucuaucaaaaguuaauuucuau

SEQ ID NO: 4070041 - RNA, 13 nt, Vaccinia virus
ucuaucaauaacu

SEQ ID NO: 4070042 - RNA, 18 nt, Vaccinia virus
ucuaucagaguccaugua

SEQ ID NO: 4070043 - RNA, 17 nt, Vaccinia virus
ucuauccaagauacuua

SEQ ID NO: 4070044 - RNA, 16 nt, Vaccinia virus
ugacgcuuucaagaau

SEQ ID NO: 4070045 - RNA, 13 nt, Vaccinia virus
ugacguaaaugua

SEQ ID NO: 4070046 - RNA, 16 nt, Vaccinia virus
ugacguauuggaugau

SEQ ID NO: 4070047 - RNA, 19 nt, Vaccinia virus
ugacgucguucuacauaaa

SEQ ID NO: 4070048 - RNA, 14 nt, Vaccinia virus
ugacuaaaaugcug

SEQ ID NO: 4070049 - RNA, 17 nt, Vaccinia virus
ugacuagacugauuucu

SEQ ID NO: 4070050 - RNA, 19 nt, Vaccinia virus
ugacuaguccaaagacuua

SEQ ID NO: 4070051 - RNA, 20 nt, Vaccinia virus
ugacuaucuuuugaaaauau

SEQ ID NO: 4070052 - RNA, 14 nt, Vaccinia virus
ugacuauugagacg

SEQ ID NO: 4070053 - RNA, 21 nt, Vaccinia virus
ugacuauugcguguagaguau

SEQ ID NO: 4070054 - RNA, 17 nt, Vaccinia virus
ugacuccuauguuuccc

SEQ ID NO: 4070055 - RNA, 23 nt, Vaccinia virus
ugacuguauccacgcuagagaua

SEQ ID NO: 4070056 - RNA, 12 nt, Vaccinia virus
ugacuguuuucu

SEQ ID NO: 4070057 - RNA, 17 nt, Vaccinia virus
ugacuuaugaauacuaa

SEQ ID NO: 4070058 - RNA, 23 nt, Vaccinia virus
ugacuuuuugguccauuuuucca

SEQ ID NO: 4070059 - RNA, 23 nt, Vaccinia virus
ugagaaaagguucuaucaacaau

SEQ ID NO: 4070060 - RNA, 14 nt, Vaccinia virus
ugagaauauguucc

SEQ ID NO: 4070061 - RNA, 18 nt, Vaccinia virus
ugagaauggaaaggaaac

SEQ ID NO: 4070062 - RNA, 12 nt, Vaccinia virus
ugagacauaucc

SEQ ID NO: 4070063 - RNA, 23 nt, Vaccinia virus
ugagacgggucaaacaauuuuaa

SEQ ID NO: 4070064 - RNA, 20 nt, Vaccinia virus
ugagaguuuuauauguagca

SEQ ID NO: 4070065 - RNA, 22 nt, Vaccinia virus
ugagauacuaacacauuucaac

SEQ ID NO: 4070066 - RNA, 13 nt, Vaccinia virus
ugagauucuccau

SEQ ID NO: 4070067 - RNA, 19 nt, Vaccinia virus
ugagcauaaacauaauaaa

SEQ ID NO: 4070068 - RNA, 21 nt, Vaccinia virus
ugaggaaugauugccuucauc

SEQ ID NO: 4070069 - RNA, 22 nt, Vaccinia virus
ugaguaguuggaagaaucucau

SEQ ID NO: 4070070 - RNA, 19 nt, Vaccinia virus
ugaguuccauuacaaauau

SEQ ID NO: 4070071 - RNA, 20 nt, Vaccinia virus
ugauaaagauauuuauccuu

SEQ ID NO: 4070072 - RNA, 14 nt, Vaccinia virus
ugauaaauauacaa

SEQ ID NO: 4070073 - RNA, 21 nt, Vaccinia virus
ugauaaguucuuuauacaguu

SEQ ID NO: 4070074 - RNA, 20 nt, Vaccinia virus
ugauacggcgaugguuuuua

SEQ ID NO: 4070075 - RNA, 11 nt, Vaccinia virus
ugauagaaaau

SEQ ID NO: 4070076 - RNA, 20 nt, Vaccinia virus
ugauagaacugguaugaaca

SEQ ID NO: 4070077 - RNA, 16 nt, Vaccinia virus
ugauagaauagaugcu

SEQ ID NO: 4070078 - RNA, 20 nt, Vaccinia virus
ugauagugaaugaaucagau

SEQ ID NO: 4070079 - RNA, 17 nt, Vaccinia virus
ugauauacagucuuaaa

SEQ ID NO: 4070080 - RNA, 23 nt, Vaccinia virus
ugauauacagucuuaaauaguua

SEQ ID NO: 4070081 - RNA, 13 nt, Vaccinia virus
ugauauagaucuu

SEQ ID NO: 4070082 - RNA, 17 nt, Vaccinia virus
ugauauauauuuucacu

SEQ ID NO: 4070083 - RNA, 21 nt, Vaccinia virus
ugauauauccagauuacuaac

SEQ ID NO: 4070084 - RNA, 21 nt, Vaccinia virus
ugauaucaaacggauauugcc

SEQ ID NO: 4070085 - RNA, 17 nt, Vaccinia virus
ugauauccgcuauuaca

SEQ ID NO: 4070086 - RNA, 20 nt, Vaccinia virus
ugauaucgacggaagaaguu

SEQ ID NO: 4070087 - RNA, 17 nt, Vaccinia virus
ugauaucuuuagauaua

SEQ ID NO: 4070088 - RNA, 18 nt, Vaccinia virus
ugauauguauauuauuca

SEQ ID NO: 4070089 - RNA, 16 nt, Vaccinia virus
ugauauguuuucagcu

SEQ ID NO: 4070090 - RNA, 19 nt, Vaccinia virus
ugauauuucauauacuauu

SEQ ID NO: 4070091 - RNA, 22 nt, Vaccinia virus
ugaucucgccguagcuaccaug

SEQ ID NO: 4070092 - RNA, 18 nt, Vaccinia virus
ugaugaauaauuuagaua

SEQ ID NO: 4070093 - RNA, 13 nt, Vaccinia virus
ugaugaauuauua

SEQ ID NO: 4070094 - RNA, 14 nt, Vaccinia virus
ugaugaguuguaca

SEQ ID NO: 4070095 - RNA, 18 nt, Vaccinia virus
ugaugcaaauagcagaua

SEQ ID NO: 4070096 - RNA, 14 nt, Vaccinia virus
ugaugccaauaagc

SEQ ID NO: 4070097 - RNA, 14 nt, Vaccinia virus
ugauggaugagaua

SEQ ID NO: 4070098 - RNA, 21 nt, Vaccinia virus
ugaugguagucaauugauguu

SEQ ID NO: 4070099 - RNA, 15 nt, Vaccinia virus
ugaugucuauguacg

SEQ ID NO: 4070100 - RNA, 14 nt, Vaccinia virus
ugaugugaauuuag

SEQ ID NO: 4070101 - RNA, 23 nt, Vaccinia virus
ugauuaacagaaaaaacaauguu

SEQ ID NO: 4070102 - RNA, 20 nt, Vaccinia virus
ugauuagaaaauauaaauua

SEQ ID NO: 4070103 - RNA, 20 nt, Vaccinia virus
ugauuauccuaaucaggaau

SEQ ID NO: 4070104 - RNA, 23 nt, Vaccinia virus
ugauucgaauuuaguuucuucga

SEQ ID NO: 4070105 - RNA, 13 nt, Vaccinia virus
ugauucuacagua

SEQ ID NO: 4070106 - RNA, 23 nt, Vaccinia virus
ugauucuagucccgaagaauuuc

SEQ ID NO: 4070107 - RNA, 14 nt, Vaccinia virus
ugauugaaaaugaa

SEQ ID NO: 4070108 - RNA, 15 nt, Vaccinia virus
ugauuucuugaacau

SEQ ID NO: 4070109 - RNA, 17 nt, Vaccinia virus
ugcaaagucuaaauauu

SEQ ID NO: 4070110 - RNA, 17 nt, Vaccinia virus
ucagcauccacucauau

SEQ ID NO: 4070111 - RNA, 17 nt, Vaccinia virus
ucagcauuacuugauau

SEQ ID NO: 4070112 - RNA, 21 nt, Vaccinia virus
ucagccgcuacagaaacauau

SEQ ID NO: 4070113 - RNA, 13 nt, Vaccinia virus
ucagcuuuaguuu

SEQ ID NO: 4070114 - RNA, 14 nt, Vaccinia virus
ucaggaacauaaac

SEQ ID NO: 4070115 - RNA, 21 nt, Vaccinia virus
ucaggacgaauaauucuaaua

SEQ ID NO: 4070116 - RNA, 20 nt, Vaccinia virus
ucagguuaucaucauccauu

SEQ ID NO: 4070117 - RNA, 22 nt, Vaccinia virus
ucagguucaucgaucucuauaa

SEQ ID NO: 4070118 - RNA, 13 nt, Vaccinia virus
ucaguaucuucag

SEQ ID NO: 4070119 - RNA, 15 nt, Vaccinia virus
ucaguaucuucuuua

SEQ ID NO: 4070120 - RNA, 13 nt, Vaccinia virus
ucauaaaaaccau

SEQ ID NO: 4070121 - RNA, 23 nt, Vaccinia virus
ucauaaacaagcccgucaauaau

SEQ ID NO: 4070122 - RNA, 23 nt, Vaccinia virus
ucauaaacucauccuaucuggag

SEQ ID NO: 4070123 - RNA, 13 nt, Vaccinia virus
ucauaagaacuau

SEQ ID NO: 4070124 - RNA, 13 nt, Vaccinia virus
ucauaauaaauuu

SEQ ID NO: 4070125 - RNA, 15 nt, Vaccinia virus
ucauaauaucuuuaa

SEQ ID NO: 4070126 - RNA, 18 nt, Vaccinia virus
ucauaauguaaucucuaa

SEQ ID NO: 4070127 - RNA, 18 nt, Vaccinia virus
ucauaauuguuagcuguu

SEQ ID NO: 4070128 - RNA, 13 nt, Vaccinia virus
ucauagaacagac

SEQ ID NO: 4070129 - RNA, 16 nt, Vaccinia virus
ucauagaugaaauacu

SEQ ID NO: 4070130 - RNA, 20 nt, Vaccinia virus
ucauagccgcucuuagaguu

SEQ ID NO: 4070131 - RNA, 16 nt, Vaccinia virus
ucauagcugagaauau

SEQ ID NO: 4070132 - RNA, 13 nt, Vaccinia virus
ucauauaaauguu

SEQ ID NO: 4070133 - RNA, 17 nt, Vaccinia virus
ucauauaccauuucuag

SEQ ID NO: 4070134 - RNA, 21 nt, Vaccinia virus
ucauauacguucgucaccaga

SEQ ID NO: 4070135 - RNA, 19 nt, Vaccinia virus
ucauauaucugcucuuaaa

SEQ ID NO: 4070136 - RNA, 23 nt, Vaccinia virus
ucauaucuagaaugaagauauca

SEQ ID NO: 4070137 - RNA, 15 nt, Vaccinia virus
ucauaugauuucagu

SEQ ID NO: 4070138 - RNA, 21 nt, Vaccinia virus
ucauaugugcuaaaaaguuuu

SEQ ID NO: 4070139 - RNA, 13 nt, Vaccinia virus
ucauauuaaacau

SEQ ID NO: 4070140 - RNA, 14 nt, Vaccinia virus
ucauauucauacac

SEQ ID NO: 4070141 - RNA, 12 nt, Vaccinia virus
ucauauuuagac

SEQ ID NO: 4070142 - RNA, 19 nt, Vaccinia virus
ucaucaaaagacuuaugau

SEQ ID NO: 4070143 - RNA, 16 nt, Vaccinia virus
ucaucaacuagacguu

SEQ ID NO: 4070144 - RNA, 20 nt, Vaccinia virus
ucaucaacuagacguuuauu

SEQ ID NO: 4070145 - RNA, 20 nt, Vaccinia virus
ucaucauaguuacgauuuua

SEQ ID NO: 4070146 - RNA, 21 nt, Vaccinia virus
ucaucauccucuggugguucg

SEQ ID NO: 4070147 - RNA, 14 nt, Vaccinia virus
ucaucauuaucauu

SEQ ID NO: 4070148 - RNA, 13 nt, Vaccinia virus
ucaucauuucuaa

SEQ ID NO: 4070149 - RNA, 15 nt, Vaccinia virus
ucauccaguugaaug

SEQ ID NO: 4070150 - RNA, 15 nt, Vaccinia virus
ucauccaugguuuua

SEQ ID NO: 4070151 - RNA, 16 nt, Vaccinia virus
ucaucuaccaauucau

SEQ ID NO: 4070152 - RNA, 22 nt, Vaccinia virus
ucaucugggaauaaaauacuac

SEQ ID NO: 4070153 - RNA, 17 nt, Vaccinia virus
ucaugagauguguauac

SEQ ID NO: 4070154 - RNA, 20 nt, Vaccinia virus
ucaugauugccggucauaaa

SEQ ID NO: 4070155 - RNA, 15 nt, Vaccinia virus
ucaugauuucauuau

SEQ ID NO: 4070156 - RNA, 20 nt, Vaccinia virus
ucaugccauuaagaaacuag

SEQ ID NO: 4070157 - RNA, 22 nt, Vaccinia virus
ucaugccuuuccuggaauauca

SEQ ID NO: 4070158 - RNA, 15 nt, Vaccinia virus
ucauggcaucauaga

SEQ ID NO: 4070159 - RNA, 20 nt, Vaccinia virus
ucaugguuauacaggcauua

SEQ ID NO: 4070160 - RNA, 19 nt, Vaccinia virus
ucauguauuugagaguuuu

SEQ ID NO: 4070161 - RNA, 16 nt, Vaccinia virus
ucauguguagaugcua

SEQ ID NO: 4070162 - RNA, 15 nt, Vaccinia virus
ucauguuauaguguu

SEQ ID NO: 4070163 - RNA, 13 nt, Vaccinia virus
ucauuaaacaucu

SEQ ID NO: 4070164 - RNA, 17 nt, Vaccinia virus
ucauuaaguucacuaga

SEQ ID NO: 4070165 - RNA, 14 nt, Vaccinia virus
ucauuaauuucuga

SEQ ID NO: 4070166 - RNA, 12 nt, Vaccinia virus
ucauuagaauau

SEQ ID NO: 4070167 - RNA, 17 nt, Vaccinia virus
ucauuauaacucuagaa

SEQ ID NO: 4070168 - RNA, 18 nt, Vaccinia virus
ucauucaaauccauaaau

SEQ ID NO: 4070169 - RNA, 22 nt, Vaccinia virus
ucauucaaauccauaaauaaag

SEQ ID NO: 4070170 - RNA, 18 nt, Vaccinia virus
ucauucgcggaacuacau

SEQ ID NO: 4070171 - RNA, 15 nt, Vaccinia virus
ucauucguaaaucuu

SEQ ID NO: 4070172 - RNA, 15 nt, Vaccinia virus
ucauucuagaacuau

SEQ ID NO: 4070173 - RNA, 16 nt, Vaccinia virus
ucauugaugaaaauac

SEQ ID NO: 4070174 - RNA, 12 nt, Vaccinia virus
ucauugauuuua

SEQ ID NO: 4070175 - RNA, 12 nt, Vaccinia virus
ucauugauuuuu

SEQ ID NO: 4070176 - RNA, 23 nt, Vaccinia virus
ucauuuaacagauguaguaguau

SEQ ID NO: 4070177 - RNA, 16 nt, Vaccinia virus
ucauuucacaauucau

SEQ ID NO: 4070178 - RNA, 11 nt, Vaccinia virus
ucauuucaguu

SEQ ID NO: 4070179 - RNA, 22 nt, Vaccinia virus
ucauuugcucggcaguaaucaa

SEQ ID NO: 4070180 - RNA, 12 nt, Vaccinia virus
ucauuuguacau

SEQ ID NO: 4070181 - RNA, 19 nt, Vaccinia virus
uccaaguucuauaguuucu

SEQ ID NO: 4070182 - RNA, 23 nt, Vaccinia virus
uccaaucuaagaaauuuaaaauu

SEQ ID NO: 4070183 - RNA, 12 nt, Vaccinia virus
uccaauguuuaa

SEQ ID NO: 4070184 - RNA, 19 nt, Vaccinia virus
uccacaguuuuuaauuucu

SEQ ID NO: 4070185 - RNA, 17 nt, Vaccinia virus
uccacguucuacaaaag

SEQ ID NO: 4070186 - RNA, 22 nt, Vaccinia virus
uccaggaucguuucuacaaaau

SEQ ID NO: 4070187 - RNA, 17 nt, Vaccinia virus
uccagguuuuuuaucuc

SEQ ID NO: 4070188 - RNA, 15 nt, Vaccinia virus
uccagugcauuucua

SEQ ID NO: 4070189 - RNA, 18 nt, Vaccinia virus
uccaucuguggaaaauaa

SEQ ID NO: 4070190 - RNA, 18 nt, Vaccinia virus
uccaugauagaaagaaaa

SEQ ID NO: 4070191 - RNA, 12 nt, Vaccinia virus
uccauuaaugug

SEQ ID NO: 4070192 - RNA, 18 nt, Vaccinia virus
uccauuagccuuuccacu

SEQ ID NO: 4070193 - RNA, 23 nt, Vaccinia virus
uccauuagccuuuccacuucugc

SEQ ID NO: 4070194 - RNA, 19 nt, Vaccinia virus
uccauuauuuauuuacaga

SEQ ID NO: 4070195 - RNA, 22 nt, Vaccinia virus
uccauucucucaaucacuacau

SEQ ID NO: 4070196 - RNA, 14 nt, Vaccinia virus
ucccacauuauuuu

SEQ ID NO: 4070197 - RNA, 12 nt, Vaccinia virus
ucccauguuuca

SEQ ID NO: 4070198 - RNA, 17 nt, Vaccinia virus
ucccauucuaauacuuu

SEQ ID NO: 4070199 - RNA, 13 nt, Vaccinia virus
ucccauugaucau

SEQ ID NO: 4070200 - RNA, 21 nt, Vaccinia virus
uccccaaaaguaaaauaauca

SEQ ID NO: 4070201 - RNA, 15 nt, Vaccinia virus
ucccucguucaucua

SEQ ID NO: 4070202 - RNA, 19 nt, Vaccinia virus
uccgaaacgauaucaugaa

SEQ ID NO: 4070203 - RNA, 17 nt, Vaccinia virus
uccgauuguuguguaca

SEQ ID NO: 4070204 - RNA, 17 nt, Vaccinia virus
uccggagauagauuucc

SEQ ID NO: 4070205 - RNA, 12 nt, Vaccinia virus
uccuacaaccau

SEQ ID NO: 4070206 - RNA, 18 nt, Vaccinia virus
uccuacaggaauaucuuu

SEQ ID NO: 4070207 - RNA, 16 nt, Vaccinia virus
uccuagguuucucuau

SEQ ID NO: 4070208 - RNA, 19 nt, Vaccinia virus
uccuauaccgaguacugua

SEQ ID NO: 4070209 - RNA, 13 nt, Vaccinia virus
uccuaucucugac

SEQ ID NO: 4070210 - RNA, 22 nt, Vaccinia virus
uccucagcgauagcucuucuau

SEQ ID NO: 4070211 - RNA, 11 nt, Vaccinia virus
uccucaucugu

SEQ ID NO: 4070212 - RNA, 17 nt, Vaccinia virus
uccuccaguaaaugacg

SEQ ID NO: 4070213 - RNA, 12 nt, Vaccinia virus
uccuggugauau

SEQ ID NO: 4070214 - RNA, 13 nt, Vaccinia virus
uccuguaauaucu

SEQ ID NO: 4070215 - RNA, 17 nt, Vaccinia virus
uccuucaguuugagaaa

SEQ ID NO: 4070216 - RNA, 13 nt, Vaccinia virus
ucgaauaaaguau

SEQ ID NO: 4070217 - RNA, 22 nt, Vaccinia virus
ucgaauaaguuugcagacaaac

SEQ ID NO: 4070218 - RNA, 14 nt, Vaccinia virus
ucgaauaaugagua

SEQ ID NO: 4070219 - RNA, 14 nt, Vaccinia virus
ucgaauaauguaua

SEQ ID NO: 4070220 - RNA, 17 nt, Vaccinia virus
ucgaauuucuacaaaag

SEQ ID NO: 4070221 - RNA, 16 nt, Vaccinia virus
ucgacaucacaaccua

SEQ ID NO: 4070222 - RNA, 21 nt, Vaccinia virus
ucgacuaucaacaauuuugua

SEQ ID NO: 4070223 - RNA, 19 nt, Vaccinia virus
ucgacuauuuuaaauagca

SEQ ID NO: 4070224 - RNA, 20 nt, Vaccinia virus
ucgacuauuuuaaauagcau

SEQ ID NO: 4070225 - RNA, 23 nt, Vaccinia virus
ucgacucauaagaaagagaauag

SEQ ID NO: 4070226 - RNA, 22 nt, Vaccinia virus
ucgagagacuuuguagaaacaa

SEQ ID NO: 4070227 - RNA, 20 nt, Vaccinia virus
ucgagaugaacauucaucug

SEQ ID NO: 4070228 - RNA, 17 nt, Vaccinia virus
ucgaggacuuggauguu

SEQ ID NO: 4070229 - RNA, 17 nt, Vaccinia virus
ucgauaacacauuuuca

SEQ ID NO: 4070230 - RNA, 21 nt, Vaccinia virus
ucgauaauaacagaauguaga

SEQ ID NO: 4070231 - RNA, 13 nt, Vaccinia virus
ucgauaauuauuu

SEQ ID NO: 4070232 - RNA, 14 nt, Vaccinia virus
ucgauccaauaaau

SEQ ID NO: 4070233 - RNA, 14 nt, Vaccinia virus
ucgaugauguagug

SEQ ID NO: 4070234 - RNA, 17 nt, Vaccinia virus
ucgauguaaaauuuuug

SEQ ID NO: 4070235 - RNA, 19 nt, Vaccinia virus
ucgaugucgauagccauau

SEQ ID NO: 4070236 - RNA, 19 nt, Vaccinia virus
ucgauucccauaugauguu

SEQ ID NO: 4070237 - RNA, 22 nt, Vaccinia virus
ucgauucuggcuauuucaaaau

SEQ ID NO: 4070238 - RNA, 17 nt, Vaccinia virus
uaacaugugucauuuau

SEQ ID NO: 4070239 - RNA, 13 nt, Vaccinia virus
uaacauugagaau

SEQ ID NO: 4070240 - RNA, 21 nt, Vaccinia virus
uaacauuuuuuguaaauguaa

SEQ ID NO: 4070241 - RNA, 20 nt, Vaccinia virus
uaaccaaaaugaaaauacuu

SEQ ID NO: 4070242 - RNA, 21 nt, Vaccinia virus
uaaccaaaaugaaaauacuuu

SEQ ID NO: 4070243 - RNA, 23 nt, Vaccinia virus
uaacccauuauaaaacuuaugau

SEQ ID NO: 4070244 - RNA, 16 nt, Vaccinia virus
uaaccuccugaaaaug

SEQ ID NO: 4070245 - RNA, 21 nt, Vaccinia virus
uaaccuuuuccuuaucuucau

SEQ ID NO: 4070246 - RNA, 12 nt, Vaccinia virus
uaacgaaaauau

SEQ ID NO: 4070247 - RNA, 17 nt, Vaccinia virus
uaacgaggauaaacuau

SEQ ID NO: 4070248 - RNA, 19 nt, Vaccinia virus
uaacgagugaucaaaucau

SEQ ID NO: 4070249 - RNA, 15 nt, Vaccinia virus
uaacgaugauauguu

SEQ ID NO: 4070250 - RNA, 16 nt, Vaccinia virus
uaacgcauaauuauua

SEQ ID NO: 4070251 - RNA, 13 nt, Vaccinia virus
uaacggacaacaa

SEQ ID NO: 4070252 - RNA, 21 nt, Vaccinia virus
uaacggaugaaaauaagaaaa

SEQ ID NO: 4070253 - RNA, 17 nt, Vaccinia virus
uaacgucgguauuauau

SEQ ID NO: 4070254 - RNA, 13 nt, Vaccinia virus
uaacuaaauguca

SEQ ID NO: 4070255 - RNA, 20 nt, Vaccinia virus
uaacuaugcgauuauuuuca

SEQ ID NO: 4070256 - RNA, 21 nt, Vaccinia virus
uaacuaugcgauuauuuucau

SEQ ID NO: 4070257 - RNA, 21 nt, Vaccinia virus
uaacucuuucgaauacuuauu

SEQ ID NO: 4070258 - RNA, 15 nt, Vaccinia virus
uaacugguucaaaau

SEQ ID NO: 4070259 - RNA, 20 nt, Vaccinia virus
uaacuuaaaagaauuacuua

SEQ ID NO: 4070260 - RNA, 21 nt, Vaccinia virus
uaacuuccacauuaauacagc

SEQ ID NO: 4070261 - RNA, 22 nt, Vaccinia virus
uaacuucgugaauaauguuucu

SEQ ID NO: 4070262 - RNA, 13 nt, Vaccinia virus
uaacuucugauuu

SEQ ID NO: 4070263 - RNA, 21 nt, Vaccinia virus
uaacuuucuucugcaaacuua

SEQ ID NO: 4070264 - RNA, 15 nt, Vaccinia virus
uaacuuugauagcaa

SEQ ID NO: 4070265 - RNA, 22 nt, Vaccinia virus
uaacuuugauagcaaggaugaa

SEQ ID NO: 4070266 - RNA, 22 nt, Vaccinia virus
uaagaaaguaauucagacacuu

SEQ ID NO: 4070267 - RNA, 23 nt, Vaccinia virus
uaagaaagugaguuacgaagaua

SEQ ID NO: 4070268 - RNA, 22 nt, Vaccinia virus
uaagaaauccaaauaaaaugga

SEQ ID NO: 4070269 - RNA, 18 nt, Vaccinia virus
uaagaagauuauauucua

SEQ ID NO: 4070270 - RNA, 15 nt, Vaccinia virus
uaagaagucauaugu

SEQ ID NO: 4070271 - RNA, 21 nt, Vaccinia virus
uaagaaucgcgauucuaaaac

SEQ ID NO: 4070272 - RNA, 12 nt, Vaccinia virus
uaagaauuauuu

SEQ ID NO: 4070273 - RNA, 21 nt, Vaccinia virus
uaagacacagaaauacuauau

SEQ ID NO: 4070274 - RNA, 19 nt, Vaccinia virus
uaagaccuaccucucuuaa

SEQ ID NO: 4070275 - RNA, 13 nt, Vaccinia virus
uaagacuuauucu

SEQ ID NO: 4070276 - RNA, 21 nt, Vaccinia virus
uaagacuuuacuuuucuaaau

SEQ ID NO: 4070277 - RNA, 23 nt, Vaccinia virus
uaagagagauuagaguuuguaca

SEQ ID NO: 4070278 - RNA, 16 nt, Vaccinia virus
uaagagaucaaagcau

SEQ ID NO: 4070279 - RNA, 24 nt, Vaccinia virus
uaagagauuuagaaaacauuauau

SEQ ID NO: 4070280 - RNA, 16 nt, Vaccinia virus
uaagagccagauuucg

SEQ ID NO: 4070281 - RNA, 21 nt, Vaccinia virus
uaagaggcauaaucaauguug

SEQ ID NO: 4070282 - RNA, 21 nt, Vaccinia virus
uaagaguguaguaucauagau

SEQ ID NO: 4070283 - RNA, 12 nt, Vaccinia virus
uaagauacugug

SEQ ID NO: 4070284 - RNA, 16 nt, Vaccinia virus
uaagauaguauauucu

SEQ ID NO: 4070285 - RNA, 18 nt, Vaccinia virus
uaagauguuugagaauau

SEQ ID NO: 4070286 - RNA, 14 nt, Vaccinia virus
uaagcaacaugucu

SEQ ID NO: 4070287 - RNA, 19 nt, Vaccinia virus
uaaggacauuggauaugug

SEQ ID NO: 4070288 - RNA, 19 nt, Vaccinia virus
uaaguaauaaaucaacuau

SEQ ID NO: 4070289 - RNA, 14 nt, Vaccinia virus
uaagucacacuaag

SEQ ID NO: 4070290 - RNA, 18 nt, Vaccinia virus
uaagugauauaaaacuau

SEQ ID NO: 4070291 - RNA, 15 nt, Vaccinia virus
uaaguucauaaucau

SEQ ID NO: 4070292 - RNA, 19 nt, Vaccinia virus
uaaguucauuaucugaaau

SEQ ID NO: 4070293 - RNA, 20 nt, Vaccinia virus
uaaguuuaugagcuuuuaua

SEQ ID NO: 4070294 - RNA, 13 nt, Vaccinia virus
gucgucaaaauau

SEQ ID NO: 4070295 - RNA, 15 nt, Vaccinia virus
gucgucuauauuaac

SEQ ID NO: 4070296 - RNA, 15 nt, Vaccinia virus
gucuaacauuuuuaa

SEQ ID NO: 4070297 - RNA, 20 nt, Vaccinia virus
gucuaaguauagaucaaaag

SEQ ID NO: 4070298 - RNA, 19 nt, Vaccinia virus
gucuacaaccgcuacauaa

SEQ ID NO: 4070299 - RNA, 18 nt, Vaccinia virus
gucuaccauuguuucgua

SEQ ID NO: 4070300 - RNA, 13 nt, Vaccinia virus
gucuaucuauaug

SEQ ID NO: 4070301 - RNA, 23 nt, Vaccinia virus
gucucauaccggacgacauauua

SEQ ID NO: 4070302 - RNA, 20 nt, Vaccinia virus
gucucgucaaugucuauagu

SEQ ID NO: 4070303 - RNA, 13 nt, Vaccinia virus
gucucuaucuuua

SEQ ID NO: 4070304 - RNA, 19 nt, Vaccinia virus
gucucuuccgcagauaaau

SEQ ID NO: 4070305 - RNA, 14 nt, Vaccinia virus
gucuguaaaccaca

SEQ ID NO: 4070306 - RNA, 13 nt, Vaccinia virus
gucuuaauagaca

SEQ ID NO: 4070307 - RNA, 22 nt, Vaccinia virus
gucuuauaugaagucuauacag

SEQ ID NO: 4070308 - RNA, 19 nt, Vaccinia virus
gucuucuaaaaauaaaagu

SEQ ID NO: 4070309 - RNA, 15 nt, Vaccinia virus
gucuuuaucucuuag

SEQ ID NO: 4070310 - RNA, 13 nt, Vaccinia virus
gucuuucacuaau

SEQ ID NO: 4070311 - RNA, 14 nt, Vaccinia virus
gugaaaaauauuaa

SEQ ID NO: 4070312 - RNA, 22 nt, Vaccinia virus
gugaaaauuacauacuuaaaaa

SEQ ID NO: 4070313 - RNA, 17 nt, Vaccinia virus
gugaaaugguacaaaaa

SEQ ID NO: 4070314 - RNA, 17 nt, Vaccinia virus
gugaauaugaucuucau

SEQ ID NO: 4070315 - RNA, 19 nt, Vaccinia virus
gugacuuugauaauaacau

SEQ ID NO: 4070316 - RNA, 15 nt, Vaccinia virus
gugcaaggaaucauc

SEQ ID NO: 4070317 - RNA, 13 nt, Vaccinia virus
gugcacugguguc

SEQ ID NO: 4070318 - RNA, 15 nt, Vaccinia virus
gugcaguauuagaau

SEQ ID NO: 4070319 - RNA, 23 nt, Vaccinia virus
gugcauccaugcagcauuuccua

SEQ ID NO: 4070320 - RNA, 16 nt, Vaccinia virus
gugcaucgucuauucu

SEQ ID NO: 4070321 - RNA, 21 nt, Vaccinia virus
gugccguguuucaaauauucu

SEQ ID NO: 4070322 - RNA, 14 nt, Vaccinia virus
gugcuauuagaauu

SEQ ID NO: 4070323 - RNA, 18 nt, Vaccinia virus
gugcucaaacaaaaugug

SEQ ID NO: 4070324 - RNA, 16 nt, Vaccinia virus
guggaugguuaaaaag

SEQ ID NO: 4070325 - RNA, 19 nt, Vaccinia virus
gugggggacuggcugauga

SEQ ID NO: 4070326 - RNA, 20 nt, Vaccinia virus
guguagaugcuacuucaucu

SEQ ID NO: 4070327 - RNA, 23 nt, Vaccinia virus
guguauacaccaacaguaugaaa

SEQ ID NO: 4070328 - RNA, 23 nt, Vaccinia virus
guguauauuuaucucuucauuau

SEQ ID NO: 4070329 - RNA, 16 nt, Vaccinia virus
guguauuaauagauuu

SEQ ID NO: 4070330 - RNA, 13 nt, Vaccinia virus
guguauucaucgu

SEQ ID NO: 4070331 - RNA, 21 nt, Vaccinia virus
gugucaaacuguguagcuaga

SEQ ID NO: 4070332 - RNA, 16 nt, Vaccinia virus
guguggguacaaauau

SEQ ID NO: 4070333 - RNA, 22 nt, Vaccinia virus
guguucauccaaggaucuucua

SEQ ID NO: 4070334 - RNA, 13 nt, Vaccinia virus
guuaaauguuuua

SEQ ID NO: 4070335 - RNA, 11 nt, Vaccinia virus
guuaaauuaau

SEQ ID NO: 4070336 - RNA, 11 nt, Vaccinia virus
guuaauguuug

SEQ ID NO: 4070337 - RNA, 23 nt, Vaccinia virus
guuaauguuugcuccauaaucua

SEQ ID NO: 4070338 - RNA, 17 nt, Vaccinia virus
guuaauuaucuaaauaa

SEQ ID NO: 4070339 - RNA, 12 nt, Vaccinia virus
guuaauuuuacu

SEQ ID NO: 4070340 - RNA, 20 nt, Vaccinia virus
guuacauuaguaaucuuuuu

SEQ ID NO: 4070341 - RNA, 18 nt, Vaccinia virus
guuaccucguuuauucag

SEQ ID NO: 4070342 - RNA, 22 nt, Vaccinia virus
guuacguggaucgucacaauga

SEQ ID NO: 4070343 - RNA, 22 nt, Vaccinia virus
guuagauauuuagcaauugcau

SEQ ID NO: 4070344 - RNA, 13 nt, Vaccinia virus
guuauaaauuagg

SEQ ID NO: 4070345 - RNA, 16 nt, Vaccinia virus
guuauaagauuacuua

SEQ ID NO: 4070346 - RNA, 17 nt, Vaccinia virus
guuauaagauuacuuau

SEQ ID NO: 4070347 - RNA, 14 nt, Vaccinia virus
guuauauaauuauc

SEQ ID NO: 4070348 - RNA, 15 nt, Vaccinia virus
guuauauuuuuuucu

SEQ ID NO: 4070349 - RNA, 20 nt, Vaccinia virus
guuaucaucguauaaauuaa

SEQ ID NO: 4070350 - RNA, 22 nt, Vaccinia virus
guuaucaucguauaaauuaaag

SEQ ID NO: 4070351 - RNA, 15 nt, Vaccinia virus
guuaucuauuucaaa

SEQ ID NO: 4070352 - RNA, 16 nt, Vaccinia virus
guuaucugaugaaaga

SEQ ID NO: 4070353 - RNA, 17 nt, Vaccinia virus
guuauggcacucuuauu

SEQ ID NO: 4070354 - RNA, 22 nt, Vaccinia virus
guuauguauuucauuguucauc

SEQ ID NO: 4070355 - RNA, 21 nt, Vaccinia virus
guuauuacuaaggauguauua

SEQ ID NO: 4070356 - RNA, 23 nt, Vaccinia virus
guuauugcuuugguuuaauuauu

SEQ ID NO: 4070357 - RNA, 20 nt, Vaccinia virus
guuauugguauuucuuacau

SEQ ID NO: 4070358 - RNA, 15 nt, Vaccinia virus
guuauuuaugucaua

SEQ ID NO: 4070359 - RNA, 20 nt, Vaccinia virus
guuauuuggcaguacucauu

SEQ ID NO: 4070360 - RNA, 19 nt, Vaccinia virus
guucagaggaugaaauaga

SEQ ID NO: 4070361 - RNA, 15 nt, Vaccinia virus
guucauaaauaaaaa

SEQ ID NO: 4070362 - RNA, 15 nt, Vaccinia virus
guucauuuauaaucu

SEQ ID NO: 4070363 - RNA, 14 nt, Vaccinia virus
guuccaacaucaua

SEQ ID NO: 4070364 - RNA, 12 nt, Vaccinia virus
guuccauauuau

SEQ ID NO: 4070365 - RNA, 19 nt, Vaccinia virus
guuccggaucuauagaaga

SEQ ID NO: 4070366 - RNA, 19 nt, Vaccinia virus
guuccguguguaauaaccu

SEQ ID NO: 4070367 - RNA, 20 nt, Vaccinia virus
guuccucuguaaauaaaucu

SEQ ID NO: 4070368 - RNA, 13 nt, Vaccinia virus
guucgauagaaac

SEQ ID NO: 4070369 - RNA, 17 nt, Vaccinia virus
guucguugaugaggaau

SEQ ID NO: 4070370 - RNA, 23 nt, Vaccinia virus
guucuauguaucuaaaauaaugu

SEQ ID NO: 4070371 - RNA, 12 nt, Vaccinia virus
guucugauuuua

SEQ ID NO: 4070372 - RNA, 17 nt, Vaccinia virus
guucuuaacaucuauua

SEQ ID NO: 4070373 - RNA, 23 nt, Vaccinia virus
guucuuauaauuguaacauccuu

SEQ ID NO: 4070374 - RNA, 18 nt, Vaccinia virus
gaauuaauuauucauaau

SEQ ID NO: 4070375 - RNA, 17 nt, Vaccinia virus
gaauuaggagaacuuau

SEQ ID NO: 4070376 - RNA, 17 nt, Vaccinia virus
gaauuaguuagauauau

SEQ ID NO: 4070377 - RNA, 14 nt, Vaccinia virus
gaauugacaaauaa

SEQ ID NO: 4070378 - RNA, 20 nt, Vaccinia virus
gaauuggaacuaguauuuau

SEQ ID NO: 4070379 - RNA, 19 nt, Vaccinia virus
gaauuuauuucuaaaucua

SEQ ID NO: 4070380 - RNA, 16 nt, Vaccinia virus
gaauuuauuucuaauu

SEQ ID NO: 4070381 - RNA, 14 nt, Vaccinia virus
gaauuucuauguca

SEQ ID NO: 4070382 - RNA, 15 nt, Vaccinia virus
gaauuugauacuguc

SEQ ID NO: 4070383 - RNA, 14 nt, Vaccinia virus
gaauuuucauggau

SEQ ID NO: 4070384 - RNA, 15 nt, Vaccinia virus
gaauuuuuauacauu

SEQ ID NO: 4070385 - RNA, 20 nt, Vaccinia virus
gacaaacgcugauagaugau

SEQ ID NO: 4070386 - RNA, 22 nt, Vaccinia virus
gacaaaggguaauauuuugcau

SEQ ID NO: 4070387 - RNA, 18 nt, Vaccinia virus
gacaaaguccuaguugua

SEQ ID NO: 4070388 - RNA, 13 nt, Vaccinia virus
gacaaauacucua

SEQ ID NO: 4070389 - RNA, 13 nt, Vaccinia virus
gacaaauuauucu

SEQ ID NO: 4070390 - RNA, 15 nt, Vaccinia virus
gacaacaaaaaauga

SEQ ID NO: 4070391 - RNA, 22 nt, Vaccinia virus
gacaacaaggcuuugauaucua

SEQ ID NO: 4070392 - RNA, 15 nt, Vaccinia virus
gacaacgaauacaaa

SEQ ID NO: 4070393 - RNA, 20 nt, Vaccinia virus
gacaacuuaaucugaugaau

SEQ ID NO: 4070394 - RNA, 16 nt, Vaccinia virus
gacaaguauaaugaca

SEQ ID NO: 4070395 - RNA, 14 nt, Vaccinia virus
gacaauauuuaguu

SEQ ID NO: 4070396 - RNA, 15 nt, Vaccinia virus
gacaaugaauugcau

SEQ ID NO: 4070397 - RNA, 23 nt, Vaccinia virus
gacacgcucuuaggagauuaaag

SEQ ID NO: 4070398 - RNA, 17 nt, Vaccinia virus
gacacguuuauuucaua

SEQ ID NO: 4070399 - RNA, 19 nt, Vaccinia virus
gacagaucuucguuaaaaa

SEQ ID NO: 4070400 - RNA, 17 nt, Vaccinia virus
gacagcgugaauaaugu

SEQ ID NO: 4070401 - RNA, 22 nt, Vaccinia virus
gacaguaguugcgggaacaaua

SEQ ID NO: 4070402 - RNA, 16 nt, Vaccinia virus
gacauaccaucuauca

SEQ ID NO: 4070403 - RNA, 21 nt, Vaccinia virus
gacauacuguauguaaacaau

SEQ ID NO: 4070404 - RNA, 23 nt, Vaccinia virus
gacauccaugguggaauaaacua

SEQ ID NO: 4070405 - RNA, 18 nt, Vaccinia virus
gacauggcuucuuccaua

SEQ ID NO: 4070406 - RNA, 23 nt, Vaccinia virus
gacauuaugcuaccgucaugaau

SEQ ID NO: 4070407 - RNA, 20 nt, Vaccinia virus
gacauuauguuguuaaaaua

SEQ ID NO: 4070408 - RNA, 19 nt, Vaccinia virus
gaccaaauauauuauuaau

SEQ ID NO: 4070409 - RNA, 13 nt, Vaccinia virus
gaccaauaauaaa

SEQ ID NO: 4070410 - RNA, 23 nt, Vaccinia virus
gaccgauuaucgaguuuaaauca

SEQ ID NO: 4070411 - RNA, 20 nt, Vaccinia virus
gacgaccuuuggauuuucac

SEQ ID NO: 4070412 - RNA, 19 nt, Vaccinia virus
gacgaucuuguuauaauua

SEQ ID NO: 4070413 - RNA, 17 nt, Vaccinia virus
gacgauuccaacaaacg

SEQ ID NO: 4070414 - RNA, 12 nt, Vaccinia virus
gacgcauuuaau

SEQ ID NO: 4070415 - RNA, 22 nt, Vaccinia virus
gacgcauuuaauagagauauac

SEQ ID NO: 4070416 - RNA, 14 nt, Vaccinia virus
gacgcuacacuauc

SEQ ID NO: 4070417 - RNA, 23 nt, Vaccinia virus
gacggcuacucuaacucguacuc

SEQ ID NO: 4070418 - RNA, 23 nt, Vaccinia virus
gacguagucgaacguuaguucca

SEQ ID NO: 4070419 - RNA, 14 nt, Vaccinia virus
gacguguuauuaca

SEQ ID NO: 4070420 - RNA, 18 nt, Vaccinia virus
gacguuagaaucaagaau

SEQ ID NO: 4070421 - RNA, 20 nt, Vaccinia virus
gacguuggcacaugaugaau

SEQ ID NO: 4070422 - RNA, 22 nt, Vaccinia virus
gacuaagucuacaaauagagau

SEQ ID NO: 4070423 - RNA, 22 nt, Vaccinia virus
gacuaauaaauuagauauuaau

SEQ ID NO: 4070424 - RNA, 22 nt, Vaccinia virus
gacuaauuccuaguuucaucau

SEQ ID NO: 4070425 - RNA, 16 nt, Vaccinia virus
gacuacgaaacugaua

SEQ ID NO: 4070426 - RNA, 14 nt, Vaccinia virus
gacuacucuaggua

SEQ ID NO: 4070427 - RNA, 13 nt, Vaccinia virus
gacuauaaaauau

SEQ ID NO: 4070428 - RNA, 17 nt, Vaccinia virus
gacuauaaaauauucua

SEQ ID NO: 4070429 - RNA, 19 nt, Vaccinia virus
gacucauaagaaagagaau

SEQ ID NO: 4070430 - RNA, 13 nt, Vaccinia virus
gacucauaaucuc

SEQ ID NO: 4070431 - RNA, 21 nt, Vaccinia virus
gacuccaucaucgaucuaaua

SEQ ID NO: 4070432 - RNA, 21 nt, Vaccinia virus
gacucgcaaaaaauacaauau

SEQ ID NO: 4070433 - RNA, 23 nt, Vaccinia virus
gacucuucgucuucccaaaaugu

SEQ ID NO: 4070434 - RNA, 15 nt, Vaccinia virus
gacuggaguguauau

SEQ ID NO: 4070435 - RNA, 14 nt, Vaccinia virus
gacuguuauaaaaa

SEQ ID NO: 4070436 - RNA, 21 nt, Vaccinia virus
gacuucuggcgguugccauag

SEQ ID NO: 4070437 - RNA, 11 nt, Vaccinia virus
gacuuguuaau

SEQ ID NO: 4070438 - RNA, 18 nt, Vaccinia virus
gacuuguuaguuaaaaug

SEQ ID NO: 4070439 - RNA, 16 nt, Vaccinia virus
gacuuuguagaaauau

SEQ ID NO: 4070440 - RNA, 15 nt, Vaccinia virus
gagaaauaauaagaa

SEQ ID NO: 4070441 - RNA, 16 nt, Vaccinia virus
gagaauggaugauucu

SEQ ID NO: 4070442 - RNA, 16 nt, Vaccinia virus
gagaauguaauucuuu

SEQ ID NO: 4070443 - RNA, 12 nt, Vaccinia virus
gagaauguuucc

SEQ ID NO: 4070444 - RNA, 15 nt, Vaccinia virus
gagaauuaauaucua

SEQ ID NO: 4070445 - RNA, 20 nt, Vaccinia virus
gagacgguagaauaagugua

SEQ ID NO: 4070446 - RNA, 14 nt, Vaccinia virus
gagacuuaaacaac

SEQ ID NO: 4070447 - RNA, 17 nt, Vaccinia virus
gagagaacuaacacaac

SEQ ID NO: 4070448 - RNA, 16 nt, Vaccinia virus
gagagaauguauucau

SEQ ID NO: 4070449 - RNA, 23 nt, Vaccinia virus
gagagacccugcgcuuucucuau

SEQ ID NO: 4070450 - RNA, 21 nt, Vaccinia virus
gagauaucccguuagaaauau

SEQ ID NO: 4070451 - RNA, 16 nt, Vaccinia virus
gagaugagauaagaac

SEQ ID NO: 4070452 - RNA, 16 nt, Vaccinia virus
gagauuuaaucuguaa

SEQ ID NO: 4070453 - RNA, 14 nt, Vaccinia virus
gagauuuagaaaac

SEQ ID NO: 4070454 - RNA, 15 nt, Vaccinia virus
gagauuuaguuuauc

SEQ ID NO: 4070455 - RNA, 20 nt, Vaccinia virus
gagcaaucagaaaugaugcu

SEQ ID NO: 4070456 - RNA, 22 nt, Vaccinia virus
gagcauacaguaagcauagaua

SEQ ID NO: 4070457 - RNA, 23 nt, Vaccinia virus
gagcuaauuuuuguaaauaacua

SEQ ID NO: 4070458 - RNA, 16 nt, Vaccinia virus
gagcuauuaaacuguu

SEQ ID NO: 4070459 - RNA, 18 nt, Vaccinia virus
gagcuguuccaauaaauu

SEQ ID NO: 4070460 - RNA, 14 nt, Vaccinia virus
gaggaagaagaugg

SEQ ID NO: 4070461 - RNA, 20 nt, Vaccinia virus
gaggaguuauugauauuaac

SEQ ID NO: 4070462 - RNA, 15 nt, Vaccinia virus
gaggcaauagaaaag

SEQ ID NO: 4070463 - RNA, 21 nt, Vaccinia virus
gaguaacuguugguaguucuu

SEQ ID NO: 4070464 - RNA, 21 nt, Vaccinia virus
gaguacauuucacagaaacac

SEQ ID NO: 4070465 - RNA, 17 nt, Vaccinia virus
gaguagggauucaucau

SEQ ID NO: 4070466 - RNA, 23 nt, Vaccinia virus
gaguaguaaacgcguacauaacu

SEQ ID NO: 4070467 - RNA, 12 nt, Vaccinia virus
gaguaguacaag

SEQ ID NO: 4070468 - RNA, 21 nt, Vaccinia virus
gaguagugaugguuuucuaaa

SEQ ID NO: 4070469 - RNA, 17 nt, Vaccinia virus
gaguauuaaauauuaau

SEQ ID NO: 4070470 - RNA, 14 nt, Vaccinia virus
gagugaagaaauaa

SEQ ID NO: 4070471 - RNA, 13 nt, Vaccinia virus
gaguguagaaaac

SEQ ID NO: 4070472 - RNA, 12 nt, Vaccinia virus
gaguuuaaaacu

SEQ ID NO: 4070473 - RNA, 21 nt, Vaccinia virus
gauaaaaaccacuuaucgcau

SEQ ID NO: 4070474 - RNA, 21 nt, Vaccinia virus
gauaaaaauuuuuuagaugua

SEQ ID NO: 4070475 - RNA, 22 nt, Vaccinia virus
gauaaaagaugcauauauuaga

SEQ ID NO: 4070476 - RNA, 24 nt, Vaccinia virus
gauaaaaguuccagaaaauguaga

SEQ ID NO: 4070477 - RNA, 15 nt, Vaccinia virus
gauaaaaucaaacuu

SEQ ID NO: 4070478 - RNA, 15 nt, Vaccinia virus
gauaaaauuaaugag

SEQ ID NO: 4070479 - RNA, 17 nt, Vaccinia virus
gauaaauuaaugaucua

SEQ ID NO: 4070480 - RNA, 15 nt, Vaccinia virus
gauaacaaauuaaag

SEQ ID NO: 4070481 - RNA, 16 nt, Vaccinia virus
gauaacacauuuucau

SEQ ID NO: 4070482 - RNA, 11 nt, Vaccinia virus
gauaacuguau

SEQ ID NO: 4070483 - RNA, 15 nt, Vaccinia virus
gauaacuuuaaacau

SEQ ID NO: 4070484 - RNA, 20 nt, Vaccinia virus
gauaagaagaggacaaaguu

SEQ ID NO: 4070485 - RNA, 16 nt, Vaccinia virus
gauaagauaaaaucua

SEQ ID NO: 4070486 - RNA, 23 nt, Vaccinia virus
gauaagcuauaauaauaaaugua

SEQ ID NO: 4070487 - RNA, 18 nt, Vaccinia virus
gauaaguuagaucagugu

SEQ ID NO: 4070488 - RNA, 22 nt, Vaccinia virus
gauaauaauguuauuauaucua

SEQ ID NO: 4070489 - RNA, 19 nt, Vaccinia virus
gauaauagggagaaaugac

SEQ ID NO: 4070490 - RNA, 14 nt, Vaccinia virus
gauaauauuauuau

SEQ ID NO: 4070491 - RNA, 20 nt, Vaccinia virus
gauaauauuauuuauaugau

SEQ ID NO: 4070492 - RNA, 17 nt, Vaccinia virus
gauaauauuuguaaugg

SEQ ID NO: 4070493 - RNA, 17 nt, Vaccinia virus
gauaaucuauggggaga

SEQ ID NO: 4070494 - RNA, 19 nt, Vaccinia virus
gauaauuuuuuuauuacau

SEQ ID NO: 4070495 - RNA, 11 nt, Vaccinia virus
gauacaaauaa

SEQ ID NO: 4070496 - RNA, 16 nt, Vaccinia virus
gauacaacaaauuaaa

SEQ ID NO: 4070497 - RNA, 13 nt, Vaccinia virus
gauacaauacuua

SEQ ID NO: 4070498 - RNA, 16 nt, Vaccinia virus
gauacacguauaaaaa

SEQ ID NO: 4070499 - RNA, 21 nt, Vaccinia virus
gauacacuagacauuuuuuaa

SEQ ID NO: 4070500 - RNA, 17 nt, Vaccinia virus
auugaauaggaguuuga

SEQ ID NO: 4070501 - RNA, 17 nt, Vaccinia virus
auugaauuuauaucuaa

SEQ ID NO: 4070502 - RNA, 19 nt, Vaccinia virus
auugacgaaacaauguuuc

SEQ ID NO: 4070503 - RNA, 17 nt, Vaccinia virus
auugacgauucgucucu

SEQ ID NO: 4070504 - RNA, 15 nt, Vaccinia virus
auugaguaaauccuu

SEQ ID NO: 4070505 - RNA, 18 nt, Vaccinia virus
auugauaaaauuaaugag

SEQ ID NO: 4070506 - RNA, 22 nt, Vaccinia virus
auugauaaagaucuaaaaauua

SEQ ID NO: 4070507 - RNA, 19 nt, Vaccinia virus
auugauaucgcauagaaau

SEQ ID NO: 4070508 - RNA, 19 nt, Vaccinia virus
auugauccuagaacuagau

SEQ ID NO: 4070509 - RNA, 16 nt, Vaccinia virus
auugauuuuggaaacg

SEQ ID NO: 4070510 - RNA, 20 nt, Vaccinia virus
auugcaauugguaagaugac

SEQ ID NO: 4070511 - RNA, 18 nt, Vaccinia virus
auugcacaauccaaacuu

SEQ ID NO: 4070512 - RNA, 17 nt, Vaccinia virus
auugcauagugaauaua

SEQ ID NO: 4070513 - RNA, 15 nt, Vaccinia virus
auugcauuugaucag

SEQ ID NO: 4070514 - RNA, 15 nt, Vaccinia virus
auuggaacauaagau

SEQ ID NO: 4070515 - RNA, 14 nt, Vaccinia virus
auuggucagaaaua

SEQ ID NO: 4070516 - RNA, 17 nt, Vaccinia virus
auuggucagaaauauug

SEQ ID NO: 4070517 - RNA, 21 nt, Vaccinia virus
auugguucauacaugaaauga

SEQ ID NO: 4070518 - RNA, 19 nt, Vaccinia virus
auuguaaaagacaaauaua

SEQ ID NO: 4070519 - RNA, 16 nt, Vaccinia virus
auuguacuaucgaugu

SEQ ID NO: 4070520 - RNA, 16 nt, Vaccinia virus
auuguaguauaugaua

SEQ ID NO: 4070521 - RNA, 11 nt, Vaccinia virus
auuguauauag

SEQ ID NO: 4070522 - RNA, 19 nt, Vaccinia virus
auuguaugguuuuaaauau

SEQ ID NO: 4070523 - RNA, 16 nt, Vaccinia virus
auuguuuuaacuauaa

SEQ ID NO: 4070524 - RNA, 12 nt, Vaccinia virus
auuuaaauccua

SEQ ID NO: 4070525 - RNA, 17 nt, Vaccinia virus
auuuaaggcuuuaaaau

SEQ ID NO: 4070526 - RNA, 21 nt, Vaccinia virus
auuuaauacguucauuaaaaa

SEQ ID NO: 4070527 - RNA, 21 nt, Vaccinia virus
auuuaauuuuguaguuaauuu

SEQ ID NO: 4070528 - RNA, 22 nt, Vaccinia virus
auuuacagauuuaguuguuuaa

SEQ ID NO: 4070529 - RNA, 15 nt, Vaccinia virus
auuuacgcgcacaca

SEQ ID NO: 4070530 - RNA, 17 nt, Vaccinia virus
auuuacuuuuucauaau

SEQ ID NO: 4070531 - RNA, 20 nt, Vaccinia virus
auuuacuuuuucaucuuuac

SEQ ID NO: 4070532 - RNA, 18 nt, Vaccinia virus
auuuagauacaucuauau

SEQ ID NO: 4070533 - RNA, 14 nt, Vaccinia virus
auuuagauuaucaa

SEQ ID NO: 4070534 - RNA, 14 nt, Vaccinia virus
auuuagcaaaauuc

SEQ ID NO: 4070535 - RNA, 22 nt, Vaccinia virus
auuuaggaaugauuaucaaaug

SEQ ID NO: 4070536 - RNA, 14 nt, Vaccinia virus
auuuaguuaacaua

SEQ ID NO: 4070537 - RNA, 13 nt, Vaccinia virus
auuuauaaaaaug

SEQ ID NO: 4070538 - RNA, 19 nt, Vaccinia virus
auuuauagucgcgcuuuac

SEQ ID NO: 4070539 - RNA, 16 nt, Vaccinia virus
auuuauauaaaucauu

SEQ ID NO: 4070540 - RNA, 18 nt, Vaccinia virus
auuuaucauauuucucca

SEQ ID NO: 4070541 - RNA, 14 nt, Vaccinia virus
auuuauuaaauacu

SEQ ID NO: 4070542 - RNA, 14 nt, Vaccinia virus
auuuauuucuucuu

SEQ ID NO: 4070543 - RNA, 14 nt, Vaccinia virus
auuuauuugaugaa

SEQ ID NO: 4070544 - RNA, 16 nt, Vaccinia virus
auuucaaauauauuua

SEQ ID NO: 4070545 - RNA, 14 nt, Vaccinia virus
auuucaacaaacug

SEQ ID NO: 4070546 - RNA, 21 nt, Vaccinia virus
auuucauagacuuuaucuaga

SEQ ID NO: 4070547 - RNA, 22 nt, Vaccinia virus
auuucaucugugguauucuugu

SEQ ID NO: 4070548 - RNA, 21 nt, Vaccinia virus
auuuccaaucuuugacaauuu

SEQ ID NO: 4070549 - RNA, 18 nt, Vaccinia virus
auuucggcgccuauuuua

SEQ ID NO: 4070550 - RNA, 15 nt, Vaccinia virus
auuucguuuaucauu

SEQ ID NO: 4070551 - RNA, 14 nt, Vaccinia virus
auuucguuucuuaa

SEQ ID NO: 4070552 - RNA, 13 nt, Vaccinia virus
auacgaagacuau

SEQ ID NO: 4070553 - RNA, 19 nt, Vaccinia virus
auacgaauguaucaaacag

SEQ ID NO: 4070554 - RNA, 13 nt, Vaccinia virus
auacgauaaacau

SEQ ID NO: 4070555 - RNA, 20 nt, Vaccinia virus
auacgcaucucuaacuacua

SEQ ID NO: 4070556 - RNA, 22 nt, Vaccinia virus
auacguacugucuauaaugaca

SEQ ID NO: 4070557 - RNA, 19 nt, Vaccinia virus
auacguuucuauuuucuau

SEQ ID NO: 4070558 - RNA, 13 nt, Vaccinia virus
auacuaaacauug

SEQ ID NO: 4070559 - RNA, 13 nt, Vaccinia virus
auacuaaagaaac

SEQ ID NO: 4070560 - RNA, 21 nt, Vaccinia virus
auacuaaaggcaacaaagaaa

SEQ ID NO: 4070561 - RNA, 17 nt, Vaccinia virus
auacuaauucaaauugu

SEQ ID NO: 4070562 - RNA, 16 nt, Vaccinia virus
auacuaccuguuauau

SEQ ID NO: 4070563 - RNA, 15 nt, Vaccinia virus
auacuacuaaugaca

SEQ ID NO: 4070564 - RNA, 18 nt, Vaccinia virus
auacuacuucuccaacau

SEQ ID NO: 4070565 - RNA, 22 nt, Vaccinia virus
auacuagaguuguuaaaguuaa

SEQ ID NO: 4070566 - RNA, 23 nt, Vaccinia virus
auacuaguagcuucacaaagaug

SEQ ID NO: 4070567 - RNA, 17 nt, Vaccinia virus
auacuaguauagucacu

SEQ ID NO: 4070568 - RNA, 13 nt, Vaccinia virus
auacuagucuuag

SEQ ID NO: 4070569 - RNA, 15 nt, Vaccinia virus
auacuaguuuucuaa

SEQ ID NO: 4070570 - RNA, 23 nt, Vaccinia virus
auacuauaccguugugucuacaa

SEQ ID NO: 4070571 - RNA, 17 nt, Vaccinia virus
auacuaucuauaaacau

SEQ ID NO: 4070572 - RNA, 21 nt, Vaccinia virus
auacuaucuuuaauagaacuc

SEQ ID NO: 4070573 - RNA, 19 nt, Vaccinia virus
auacuauuaauuguaaaug

SEQ ID NO: 4070574 - RNA, 18 nt, Vaccinia virus
auacucccacaaauacug

SEQ ID NO: 4070575 - RNA, 20 nt, Vaccinia virus
auacucccacaaauacugac

SEQ ID NO: 4070576 - RNA, 17 nt, Vaccinia virus
auacucuauugagaaaa

SEQ ID NO: 4070577 - RNA, 14 nt, Vaccinia virus
auacucucaaccau

SEQ ID NO: 4070578 - RNA, 17 nt, Vaccinia virus
auacugaagucugauau

SEQ ID NO: 4070579 - RNA, 14 nt, Vaccinia virus
auacugagaauuga

SEQ ID NO: 4070580 - RNA, 21 nt, Vaccinia virus
auacuguagaugguucuuuaa

SEQ ID NO: 4070581 - RNA, 15 nt, Vaccinia virus
auacuguauauacua

SEQ ID NO: 4070582 - RNA, 16 nt, Vaccinia virus
auacugucaacuauag

SEQ ID NO: 4070583 - RNA, 22 nt, Vaccinia virus
auacuuagauauauuguagaua

SEQ ID NO: 4070584 - RNA, 17 nt, Vaccinia virus
auacuuauucugauucu

SEQ ID NO: 4070585 - RNA, 14 nt, Vaccinia virus
auacuucaaaauuu

SEQ ID NO: 4070586 - RNA, 23 nt, Vaccinia virus
auacuucauaaaagaaaauucua

SEQ ID NO: 4070587 - RNA, 21 nt, Vaccinia virus
auacuuuguaaucuagacaua

SEQ ID NO: 4070588 - RNA, 17 nt, Vaccinia virus
auacuuuucuaauucua

SEQ ID NO: 4070589 - RNA, 21 nt, Vaccinia virus
auagaaaauaacagauauuac

SEQ ID NO: 4070590 - RNA, 19 nt, Vaccinia virus
auagaacaaaauacauaau

SEQ ID NO: 4070591 - RNA, 16 nt, Vaccinia virus
auagacaauuauguaa

SEQ ID NO: 4070592 - RNA, 17 nt, Vaccinia virus
auagacuuucucuaaau

SEQ ID NO: 4070593 - RNA, 14 nt, Vaccinia virus
auagagaacauaau

SEQ ID NO: 4070594 - RNA, 15 nt, Vaccinia virus
auagagaacauaaug

SEQ ID NO: 4070595 - RNA, 17 nt, Vaccinia virus
auagagauauuauuacu

SEQ ID NO: 4070596 - RNA, 16 nt, Vaccinia virus
auagagcaaaauaauu

SEQ ID NO: 4070597 - RNA, 16 nt, Vaccinia virus
auagaggauauuucau

SEQ ID NO: 4070598 - RNA, 23 nt, Vaccinia virus
auagagguguuuuauuauguuua

SEQ ID NO: 4070599 - RNA, 17 nt, Vaccinia virus
auagauacgcauuuucu

SEQ ID NO: 4070600 - RNA, 20 nt, Vaccinia virus
auagauagcguauaucucua

SEQ ID NO: 4070601 - RNA, 15 nt, Vaccinia virus
auagaucaaauacuu

SEQ ID NO: 4070602 - RNA, 15 nt, Vaccinia virus
auagaucaagagaac

SEQ ID NO: 4070603 - RNA, 15 nt, Vaccinia virus
auagaugaaauacuc

SEQ ID NO: 4070604 - RNA, 22 nt, Vaccinia virus
auagaugaacaaggaaauccua

SEQ ID NO: 4070605 - RNA, 16 nt, Vaccinia virus
auagauggaguaagua

SEQ ID NO: 4070606 - RNA, 16 nt, Vaccinia virus
auagauguaucgauga

SEQ ID NO: 4070607 - RNA, 21 nt, Vaccinia virus
auagauguauuugauauacua

SEQ ID NO: 4070608 - RNA, 23 nt, Vaccinia virus
auagauucauucguuauagaaug

SEQ ID NO: 4070609 - RNA, 15 nt, Vaccinia virus
auagauucuugguaa

SEQ ID NO: 4070610 - RNA, 12 nt, Vaccinia virus
auagauuugcau

SEQ ID NO: 4070611 - RNA, 17 nt, Vaccinia virus
auagauuuuccauccac

SEQ ID NO: 4070612 - RNA, 16 nt, Vaccinia virus
auagauuuuucauauu

SEQ ID NO: 4070613 - RNA, 20 nt, Vaccinia virus
auagcaaggaugaaaaagga

SEQ ID NO: 4070614 - RNA, 15 nt, Vaccinia virus
auagcaguauuuccc

SEQ ID NO: 4070615 - RNA, 20 nt, Vaccinia virus
auagcguacaauacauguac

SEQ ID NO: 4070616 - RNA, 21 nt, Vaccinia virus
auagcguucgucaacauacua

SEQ ID NO: 4070617 - RNA, 22 nt, Vaccinia virus
auagcuacaguaaaaauaacua

SEQ ID NO: 4070618 - RNA, 18 nt, Vaccinia virus
auagcuauucuucuuuaa

SEQ ID NO: 4070619 - RNA, 20 nt, Vaccinia virus
auaggauacucuaugaaugg

SEQ ID NO: 4070620 - RNA, 16 nt, Vaccinia virus
auaggaucuauaaugu

SEQ ID NO: 4070621 - RNA, 13 nt, Vaccinia virus
auaggaucuauau

SEQ ID NO: 4070622 - RNA, 22 nt, Vaccinia virus
auaggaucuccgaaucugaaaa

SEQ ID NO: 4070623 - RNA, 16 nt, Vaccinia virus
auagggaaucauauau

SEQ ID NO: 4070624 - RNA, 23 nt, Vaccinia virus
auaguaccuagaacgaugucaaa

SEQ ID NO: 4070625 - RNA, 18 nt, Vaccinia virus
auaguauuaaugauugcc

SEQ ID NO: 4070626 - RNA, 15 nt, Vaccinia virus
auaguauucuuguau

SEQ ID NO: 4070627 - RNA, 17 nt, Vaccinia virus
auagucgaauacaguau

SEQ ID NO: 4070628 - RNA, 18 nt, Vaccinia virus
auagucgugaucaacauu

SEQ ID NO: 4070629 - RNA, 21 nt, Vaccinia virus
auaguggacaacauuaauaca

SEQ ID NO: 4070630 - RNA, 16 nt, Vaccinia virus
auaguggauuaauaua

SEQ ID NO: 4070631 - RNA, 17 nt, Vaccinia virus
auaguuaaaaaaauaca

SEQ ID NO: 4070632 - RNA, 18 nt, Vaccinia virus
auaguuaccgcaaagaaa

SEQ ID NO: 4070633 - RNA, 19 nt, Vaccinia virus
auaguuaccgcaaagaaac

SEQ ID NO: 4070634 - RNA, 18 nt, Vaccinia virus
auaguuauuacuuuucuc

SEQ ID NO: 4070635 - RNA, 21 nt, Vaccinia virus
auaguucguguacuagucaua

SEQ ID NO: 4070636 - RNA, 22 nt, Vaccinia virus
auaguucguguacuagucauaa

SEQ ID NO: 4070637 - RNA, 17 nt, Vaccinia virus
auaguuguuauaaagga

SEQ ID NO: 4070638 - RNA, 15 nt, Vaccinia virus
auaguuucuauuuuu

SEQ ID NO: 4070639 - RNA, 18 nt, Vaccinia virus
auaguuugggaaaagaaa

SEQ ID NO: 4070640 - RNA, 17 nt, Vaccinia virus
auaguuuuuuaauucca

SEQ ID NO: 4070641 - RNA, 13 nt, Vaccinia virus
auauaaaaaauuu

SEQ ID NO: 4070642 - RNA, 13 nt, Vaccinia virus
auauaaaaacauu

SEQ ID NO: 4070643 - RNA, 16 nt, Vaccinia virus
auauaaaauaacuaca

SEQ ID NO: 4070644 - RNA, 22 nt, Vaccinia virus
auauaaaauagaaaauaacaga

SEQ ID NO: 4070645 - RNA, 18 nt, Vaccinia virus
auauaaaccgcuauugaa

SEQ ID NO: 4070646 - RNA, 12 nt, Vaccinia virus
auauaaagaaau

SEQ ID NO: 4070647 - RNA, 22 nt, Vaccinia virus
auauaaauccguuaaaauaauu

SEQ ID NO: 4070648 - RNA, 15 nt, Vaccinia virus
auauaaccauuuucu

SEQ ID NO: 4070649 - RNA, 21 nt, Vaccinia virus
auauaaugauauauauuuuca

SEQ ID NO: 4070650 - RNA, 22 nt, Vaccinia virus
auauaauguacuagaugauauu

SEQ ID NO: 4070651 - RNA, 14 nt, Vaccinia virus
auauacaugugcaa

SEQ ID NO: 4070652 - RNA, 20 nt, Vaccinia virus
auauaccacuuaaugacaaa

SEQ ID NO: 4070653 - RNA, 21 nt, Vaccinia virus
auauaccgccucaaacucuau

SEQ ID NO: 4070654 - RNA, 19 nt, Vaccinia virus
auauaccgccuuucaaaau

SEQ ID NO: 4070655 - RNA, 19 nt, Vaccinia virus
auauaccuagcaaacgauu

SEQ ID NO: 4070656 - RNA, 20 nt, Vaccinia virus
auauacgaaauaaaauagac

SEQ ID NO: 4070657 - RNA, 20 nt, Vaccinia virus
auauacgaagaacaaugucc

SEQ ID NO: 4070658 - RNA, 23 nt, Vaccinia virus
auauacuaagcaaguacauggau

SEQ ID NO: 4070659 - RNA, 13 nt, Vaccinia virus
auauacuauauag

SEQ ID NO: 4070660 - RNA, 23 nt, Vaccinia virus
auauagagagcuucaucaauaga

SEQ ID NO: 4070661 - RNA, 21 nt, Vaccinia virus
auauagagaucgaaaaaagag

SEQ ID NO: 4070662 - RNA, 15 nt, Vaccinia virus
auauagaucaaacaa

SEQ ID NO: 4070663 - RNA, 15 nt, Vaccinia virus
auauagaucaaucau

SEQ ID NO: 4070664 - RNA, 23 nt, Vaccinia virus
auauagauggcuuguaugucaaa

SEQ ID NO: 4070665 - RNA, 18 nt, Vaccinia virus
auauagauuuuaucgauu

SEQ ID NO: 4070666 - RNA, 18 nt, Vaccinia virus
auauagccacaauuauug

SEQ ID NO: 4070667 - RNA, 13 nt, Vaccinia virus
auauaguaauaag

SEQ ID NO: 4070668 - RNA, 15 nt, Vaccinia virus
auauaguaaugaaga

SEQ ID NO: 4070669 - RNA, 14 nt, Vaccinia virus
auauaguagaugcu

SEQ ID NO: 4070670 - RNA, 20 nt, Vaccinia virus
auauagucuuggaucaaaua

SEQ ID NO: 4070671 - RNA, 23 nt, Vaccinia virus
auauagucuuggaucaaauagau

SEQ ID NO: 4070672 - RNA, 14 nt, Vaccinia virus
auauaguuaaaggu

SEQ ID NO: 4070673 - RNA, 22 nt, Vaccinia virus
gucauaaaaauguuuaaaucaa

SEQ ID NO: 4070674 - RNA, 16 nt, Vaccinia virus
gucauagaugaaauac

SEQ ID NO: 4070675 - RNA, 21 nt, Vaccinia virus
gucaucgaaaugguagauaua

SEQ ID NO: 4070676 - RNA, 23 nt, Vaccinia virus
guccaugacuugguauuuggaaa

SEQ ID NO: 4070677 - RNA, 13 nt, Vaccinia virus
gucccuaauaacu

SEQ ID NO: 4070678 - RNA, 23 nt, Vaccinia virus
guccguuauauaaucuacaaaac

SEQ ID NO: 4070679 - RNA, 22 nt, Vaccinia virus
guccuauaugcaugauagauuu

SEQ ID NO: 4070680 - RNA, 23 nt, Vaccinia virus
gucgcagcaugguaguucguaga

SEQ ID NO: 4070681 - RNA, 16 nt, Vaccinia virus
gucguccaauauuuua

SEQ ID NO: 4070682 - RNA, 21 nt, Vaccinia virus
gucgucguuuuuugaucuuua

SEQ ID NO: 4070683 - RNA, 21 nt, Vaccinia virus
gucuaaauccaacuauagaca

SEQ ID NO: 4070684 - RNA, 14 nt, Vaccinia virus
gucuaacaucucuc

SEQ ID NO: 4070685 - RNA, 12 nt, Vaccinia virus
gucuagaaauaa

SEQ ID NO: 4070686 - RNA, 22 nt, Vaccinia virus
gucuaucgccuuagauacuuuu

SEQ ID NO: 4070687 - RNA, 15 nt, Vaccinia virus
gucuauguauguacg

SEQ ID NO: 4070688 - RNA, 19 nt, Vaccinia virus
gucucgcauguucagcaau

SEQ ID NO: 4070689 - RNA, 13 nt, Vaccinia virus
gucucuuaaagga

SEQ ID NO: 4070690 - RNA, 19 nt, Vaccinia virus
gucugauauucgaaaaucu

SEQ ID NO: 4070691 - RNA, 21 nt, Vaccinia virus
gucuguaacucugauaaucuc

SEQ ID NO: 4070692 - RNA, 15 nt, Vaccinia virus
gucugucucagaauc

SEQ ID NO: 4070693 - RNA, 16 nt, Vaccinia virus
gucuguuuuauacauu

SEQ ID NO: 4070694 - RNA, 17 nt, Vaccinia virus
gucuuccuuauguagag

SEQ ID NO: 4070695 - RNA, 18 nt, Vaccinia virus
gugaaaauuacauacuua

SEQ ID NO: 4070696 - RNA, 14 nt, Vaccinia virus
gugaaauuauuccu

SEQ ID NO: 4070697 - RNA, 23 nt, Vaccinia virus
gugacuauuucauucucugaaaa

SEQ ID NO: 4070698 - RNA, 21 nt, Vaccinia virus
gugacuuaacuuguaauaauu

SEQ ID NO: 4070699 - RNA, 19 nt, Vaccinia virus
gugagaacuuguuaaagaa

SEQ ID NO: 4070700 - RNA, 17 nt, Vaccinia virus
gugauaaguaauaacua

SEQ ID NO: 4070701 - RNA, 13 nt, Vaccinia virus
gugauaguuuaua

SEQ ID NO: 4070702 - RNA, 18 nt, Vaccinia virus
gugauaucgaauauuuua

SEQ ID NO: 4070703 - RNA, 16 nt, Vaccinia virus
gugaugucuuggaauc

SEQ ID NO: 4070704 - RNA, 20 nt, Vaccinia virus
gugauucucugaaaauguaa

SEQ ID NO: 4070705 - RNA, 16 nt, Vaccinia virus
uggauccuaacaauga

SEQ ID NO: 4070706 - RNA, 13 nt, Vaccinia virus
uggaugaaccauu

SEQ ID NO: 4070707 - RNA, 17 nt, Vaccinia virus
uggaugaggaagugaua

SEQ ID NO: 4070708 - RNA, 19 nt, Vaccinia virus
uggaugaugucauucacaa

SEQ ID NO: 4070709 - RNA, 15 nt, Vaccinia virus
uggauggaaacauug

SEQ ID NO: 4070710 - RNA, 13 nt, Vaccinia virus
uggauguagauuu

SEQ ID NO: 4070711 - RNA, 15 nt, Vaccinia virus
uggauucuguuacaa

SEQ ID NO: 4070712 - RNA, 14 nt, Vaccinia virus
uggauugaagguua

SEQ ID NO: 4070713 - RNA, 15 nt, Vaccinia virus
uggauuuuuuguaca

SEQ ID NO: 4070714 - RNA, 17 nt, Vaccinia virus
uggcauaguagaauaau

SEQ ID NO: 4070715 - RNA, 21 nt, Vaccinia virus
uggcguguggauuugguaaga

SEQ ID NO: 4070716 - RNA, 18 nt, Vaccinia virus
ugggacuauauaauuuug

SEQ ID NO: 4070717 - RNA, 16 nt, Vaccinia virus
ugggcucaaugucuua

SEQ ID NO: 4070718 - RNA, 20 nt, Vaccinia virus
ugggugugguuaaacgaaag

SEQ ID NO: 4070719 - RNA, 19 nt, Vaccinia virus
ugguaaguucauuaucuga

SEQ ID NO: 4070720 - RNA, 21 nt, Vaccinia virus
ugguauaaaguauuuggcuau

SEQ ID NO: 4070721 - RNA, 16 nt, Vaccinia virus
ugguaucaagaaguau

SEQ ID NO: 4070722 - RNA, 13 nt, Vaccinia virus
ugguauguaucua

SEQ ID NO: 4070723 - RNA, 19 nt, Vaccinia virus
ugguauuagaaucaaggau

SEQ ID NO: 4070724 - RNA, 23 nt, Vaccinia virus
ugguauucuugucauugaaggau

SEQ ID NO: 4070725 - RNA, 17 nt, Vaccinia virus
uggucaauuacaaauaa

SEQ ID NO: 4070726 - RNA, 15 nt, Vaccinia virus
uggucauuaaaucuu

SEQ ID NO: 4070727 - RNA, 19 nt, Vaccinia virus
ugguccaaacugccacuga

SEQ ID NO: 4070728 - RNA, 14 nt, Vaccinia virus
uggugcauaucuuu

SEQ ID NO: 4070729 - RNA, 15 nt, Vaccinia virus
uggugcuaauuauuc

SEQ ID NO: 4070730 - RNA, 19 nt, Vaccinia virus
ugguuaaaaccuuugcaaa

SEQ ID NO: 4070731 - RNA, 17 nt, Vaccinia virus
ugguuaacaauauggaa

SEQ ID NO: 4070732 - RNA, 15 nt, Vaccinia virus
ugguuauuuacuaac

SEQ ID NO: 4070733 - RNA, 19 nt, Vaccinia virus
ugguuguagcgguuggaua

SEQ ID NO: 4070734 - RNA, 18 nt, Vaccinia virus
uguaaaaagauaaacuuu

SEQ ID NO: 4070735 - RNA, 19 nt, Vaccinia virus
uguaaaaagauaaacuuua

SEQ ID NO: 4070736 - RNA, 18 nt, Vaccinia virus
uguaaaaguaaaaaagaa

SEQ ID NO: 4070737 - RNA, 15 nt, Vaccinia virus
uguaaagaacaguga

SEQ ID NO: 4070738 - RNA, 21 nt, Vaccinia virus
uguaaaggauaugauauguug

SEQ ID NO: 4070739 - RNA, 21 nt, Vaccinia virus
uguaaauguaacauauuuaga

SEQ ID NO: 4070740 - RNA, 22 nt, Vaccinia virus
uguaaauucagcgguaaagaua

SEQ ID NO: 4070741 - RNA, 20 nt, Vaccinia virus
uguaacauugaguaaauccu

SEQ ID NO: 4070742 - RNA, 18 nt, Vaccinia virus
uguaacccacguaacauu

SEQ ID NO: 4070743 - RNA, 19 nt, Vaccinia virus
uguaacccacguaacauug

SEQ ID NO: 4070744 - RNA, 21 nt, Vaccinia virus
uguaauacuagcgugaacaac

SEQ ID NO: 4070745 - RNA, 20 nt, Vaccinia virus
uguaauauucuaguuuggua

SEQ ID NO: 4070746 - RNA, 20 nt, Vaccinia virus
uguaaucgguguccaccugg

SEQ ID NO: 4070747 - RNA, 19 nt, Vaccinia virus
uguaauggaugucaugaac

SEQ ID NO: 4070748 - RNA, 13 nt, Vaccinia virus
uguaauuaaauuu

SEQ ID NO: 4070749 - RNA, 14 nt, Vaccinia virus
uguacagaaaucau

SEQ ID NO: 4070750 - RNA, 14 nt, Vaccinia virus
uguacauuauuaca

SEQ ID NO: 4070751 - RNA, 15 nt, Vaccinia virus
uguaccuuauacguu

SEQ ID NO: 4070752 - RNA, 16 nt, Vaccinia virus
uguacuaucuagagau

SEQ ID NO: 4070753 - RNA, 23 nt, Vaccinia virus
uguacuucgaugagauugaucau

SEQ ID NO: 4070754 - RNA, 14 nt, Vaccinia virus
uguacuucuuccag

SEQ ID NO: 4070755 - RNA, 23 nt, Vaccinia virus
uguacuucuuccaguucuggaua

SEQ ID NO: 4070756 - RNA, 15 nt, Vaccinia virus
uguagauaugugaua

SEQ ID NO: 4070757 - RNA, 17 nt, Vaccinia virus
uguagauggauguagca

SEQ ID NO: 4070758 - RNA, 16 nt, Vaccinia virus
uguagccgauaaacaa

SEQ ID NO: 4070759 - RNA, 16 nt, Vaccinia virus
uguagguaguaguaca

SEQ ID NO: 4070760 - RNA, 16 nt, Vaccinia virus
uguaguaguaacuguu

SEQ ID NO: 4070761 - RNA, 18 nt, Vaccinia virus
uguagucgacagaagaau

SEQ ID NO: 4070762 - RNA, 20 nt, Vaccinia virus
uguauaauaagaugcaaaca

SEQ ID NO: 4070763 - RNA, 14 nt, Vaccinia virus
uguauaauuuggua

SEQ ID NO: 4070764 - RNA, 19 nt, Vaccinia virus
uguauacaucgguaaauaa

SEQ ID NO: 4070765 - RNA, 20 nt, Vaccinia virus
uguauauacuaacucucuaa

SEQ ID NO: 4070766 - RNA, 17 nt, Vaccinia virus
uguauauauauuucuua

SEQ ID NO: 4070767 - RNA, 15 nt, Vaccinia virus
uguauauuuuuucau

SEQ ID NO: 4070768 - RNA, 13 nt, Vaccinia virus
uguaucaaagaua

SEQ ID NO: 4070769 - RNA, 19 nt, Vaccinia virus
uguaucauccaguuuucca

SEQ ID NO: 4070770 - RNA, 19 nt, Vaccinia virus
uguaugcguugauauuaca

SEQ ID NO: 4070771 - RNA, 18 nt, Vaccinia virus
uguauguacggucugaua

SEQ ID NO: 4070772 - RNA, 17 nt, Vaccinia virus
uguaugucuuauguaua

SEQ ID NO: 4070773 - RNA, 15 nt, Vaccinia virus
uguauguuugggaga

SEQ ID NO: 4070774 - RNA, 12 nt, Vaccinia virus
uguauuaaauag

SEQ ID NO: 4070775 - RNA, 20 nt, Vaccinia virus
uguauuaaauagaauauuua

SEQ ID NO: 4070776 - RNA, 23 nt, Vaccinia virus
uguauucagaauuaauagauaua

SEQ ID NO: 4070777 - RNA, 14 nt, Vaccinia virus
uguauuuuggcaua

SEQ ID NO: 4070778 - RNA, 22 nt, Vaccinia virus
ugucaucuucgucuauuucuau

SEQ ID NO: 4070779 - RNA, 22 nt, Vaccinia virus
ugucaucuuguucagaaauaua

SEQ ID NO: 4070780 - RNA, 14 nt, Vaccinia virus
ugucauuuguauuu

SEQ ID NO: 4070781 - RNA, 21 nt, Vaccinia virus
uguccagcguguccccaggac

SEQ ID NO: 4070782 - RNA, 23 nt, Vaccinia virus
uguccauuguaguauaaaaauua

SEQ ID NO: 4070783 - RNA, 18 nt, Vaccinia virus
uguccgaugaucaaugac

SEQ ID NO: 4070784 - RNA, 14 nt, Vaccinia virus
uguccugcauguag

SEQ ID NO: 4070785 - RNA, 13 nt, Vaccinia virus
ugucuaaaucucu

SEQ ID NO: 4070786 - RNA, 23 nt, Vaccinia virus
ugucuaaugaugaacacaaaugg

SEQ ID NO: 4070787 - RNA, 20 nt, Vaccinia virus
ugucuacacauccuuuugua

SEQ ID NO: 4070788 - RNA, 19 nt, Vaccinia virus
ugucuacauaaauaugcaa

SEQ ID NO: 4070789 - RNA, 18 nt, Vaccinia virus
ugucuaugaauaugauuu

SEQ ID NO: 4070790 - RNA, 16 nt, Vaccinia virus
ugucucauauguuuua

SEQ ID NO: 4070791 - RNA, 19 nt, Vaccinia virus
ugucucuuaacuauuuccg

SEQ ID NO: 4070792 - RNA, 17 nt, Vaccinia virus
ugucugauuuuucuuca

SEQ ID NO: 4070793 - RNA, 17 nt, Vaccinia virus
ugucuguccgaauguau

SEQ ID NO: 4070794 - RNA, 17 nt, Vaccinia virus
ugucuuaaaguuuauua

SEQ ID NO: 4070795 - RNA, 23 nt, Vaccinia virus
ugucuuaaaguuuauuaauuaau

SEQ ID NO: 4070796 - RNA, 22 nt, Vaccinia virus
ugucuuagaaggaguguuuucu

SEQ ID NO: 4070797 - RNA, 21 nt, Vaccinia virus
ugucuuuaaguauauacgaua

SEQ ID NO: 4070798 - RNA, 18 nt, Vaccinia virus
ugugaagguuuagauguc

SEQ ID NO: 4070799 - RNA, 14 nt, Vaccinia virus
ugugacaugauguc

SEQ ID NO: 4070800 - RNA, 14 nt, Vaccinia virus
ugugacuguuuucu

SEQ ID NO: 4070801 - RNA, 13 nt, Vaccinia virus
ugugaguaguguu

SEQ ID NO: 4070802 - RNA, 20 nt, Vaccinia virus
ugugauagucgauacguuau

SEQ ID NO: 4070803 - RNA, 14 nt, Vaccinia virus
ugugauauaaacaa

SEQ ID NO: 4070804 - RNA, 13 nt, Vaccinia virus
ugugauauugaua

SEQ ID NO: 4070805 - RNA, 16 nt, Vaccinia virus
ugugaugauuguacac

SEQ ID NO: 4070806 - RNA, 23 nt, Vaccinia virus
ugugcucuuccagaguugggaua

SEQ ID NO: 4070807 - RNA, 15 nt, Vaccinia virus
uguguaaaaaguuuu

SEQ ID NO: 4070808 - RNA, 19 nt, Vaccinia virus
uguguagaaaguguuacau

SEQ ID NO: 4070809 - RNA, 18 nt, Vaccinia virus
uguuaaaaauaugugcuc

SEQ ID NO: 4070810 - RNA, 18 nt, Vaccinia virus
uguuaauaaguaaaugaa

SEQ ID NO: 4070811 - RNA, 15 nt, Vaccinia virus
uguuaauacaucaau

SEQ ID NO: 4070812 - RNA, 13 nt, Vaccinia virus
uguuaauuuugaa

SEQ ID NO: 4070813 - RNA, 14 nt, Vaccinia virus
uguuaguuuccuua

SEQ ID NO: 4070814 - RNA, 13 nt, Vaccinia virus
uguuauagaugug

SEQ ID NO: 4070815 - RNA, 17 nt, Vaccinia virus
uguuauuacgaaucauu

SEQ ID NO: 4070816 - RNA, 20 nt, Vaccinia virus
uguuauuacuacugaagaac

SEQ ID NO: 4070817 - RNA, 16 nt, Vaccinia virus
uguuauuguauacugu

SEQ ID NO: 4070818 - RNA, 12 nt, Vaccinia virus
uguucagaaaua

SEQ ID NO: 4070819 - RNA, 20 nt, Vaccinia virus
uguucauuaauaguauacac

SEQ ID NO: 4070820 - RNA, 15 nt, Vaccinia virus
uguucuaucaacgau

SEQ ID NO: 4070821 - RNA, 22 nt, Vaccinia virus
uguucuaucaacgauucuagaa

SEQ ID NO: 4070822 - RNA, 18 nt, Vaccinia virus
uguucuuaacuacauuca

SEQ ID NO: 4070823 - RNA, 17 nt, Vaccinia virus
uguugaugauaucuaca

SEQ ID NO: 4070824 - RNA, 18 nt, Vaccinia virus
uguuguaaggauccuggu

SEQ ID NO: 4070825 - RNA, 23 nt, Vaccinia virus
uguuuaaauaacccgaguauuga

SEQ ID NO: 4070826 - RNA, 15 nt, Vaccinia virus
uguuuaaaucaaaau

SEQ ID NO: 4070827 - RNA, 15 nt, Vaccinia virus
uguuuaacuuuuguu

SEQ ID NO: 4070828 - RNA, 18 nt, Vaccinia virus
uguuuaagaagagaauua

SEQ ID NO: 4070829 - RNA, 21 nt, Vaccinia virus
uuccguuggaugguaauaaac

SEQ ID NO: 4070830 - RNA, 23 nt, Vaccinia virus
uuccuagauauguaaaauaaucc

SEQ ID NO: 4070831 - RNA, 20 nt, Vaccinia virus
uuccuauaaucguuaaauuu

SEQ ID NO: 4070832 - RNA, 19 nt, Vaccinia virus
uuccugauuauuuacuaua

SEQ ID NO: 4070833 - RNA, 15 nt, Vaccinia virus
uuccuggagauaucc

SEQ ID NO: 4070834 - RNA, 12 nt, Vaccinia virus
uuccuuguguag

SEQ ID NO: 4070835 - RNA, 20 nt, Vaccinia virus
uucgaauauaucaaaaucau

SEQ ID NO: 4070836 - RNA, 23 nt, Vaccinia virus
uucgagauuaaaugcaauaacaa

SEQ ID NO: 4070837 - RNA, 16 nt, Vaccinia virus
uucgauagauauucuu

SEQ ID NO: 4070838 - RNA, 18 nt, Vaccinia virus
uucgcaaacuauucuaau

SEQ ID NO: 4070839 - RNA, 14 nt, Vaccinia virus
uucgcaucguauuu

SEQ ID NO: 4070840 - RNA, 12 nt, Vaccinia virus
uucgcugcuaug

SEQ ID NO: 4070841 - RNA, 19 nt, Vaccinia virus
uucgguauaaaaauuauug

SEQ ID NO: 4070842 - RNA, 16 nt, Vaccinia virus
uucguaaaauauucuu

SEQ ID NO: 4070843 - RNA, 20 nt, Vaccinia virus
uucgucaacaaguuggauga

SEQ ID NO: 4070844 - RNA, 16 nt, Vaccinia virus
uucuaagguagaaucu

SEQ ID NO: 4070845 - RNA, 20 nt, Vaccinia virus
uucuaauggaugauguucua

SEQ ID NO: 4070846 - RNA, 15 nt, Vaccinia virus
uucuaauucucagag

SEQ ID NO: 4070847 - RNA, 20 nt, Vaccinia virus
uucuacaaaagcaauuauua

SEQ ID NO: 4070848 - RNA, 13 nt, Vaccinia virus
uucuacaauaacu

SEQ ID NO: 4070849 - RNA, 21 nt, Vaccinia virus
uucuacaucuuccuucuuauu

SEQ ID NO: 4070850 - RNA, 21 nt, Vaccinia virus
uucuacaugcuccaauugaau

SEQ ID NO: 4070851 - RNA, 21 nt, Vaccinia virus
uucuaccuuacccauaaacaa

SEQ ID NO: 4070852 - RNA, 15 nt, Vaccinia virus
uucuacuuacuuauu

SEQ ID NO: 4070853 - RNA, 19 nt, Vaccinia virus
uucuagaacuaacaaacua

SEQ ID NO: 4070854 - RNA, 22 nt, Vaccinia virus
uucuagaaguugauacaacaua

SEQ ID NO: 4070855 - RNA, 16 nt, Vaccinia virus
uucuagaucaagaaac

SEQ ID NO: 4070856 - RNA, 18 nt, Vaccinia virus
uucuagucuuaaccaaaa

SEQ ID NO: 4070857 - RNA, 18 nt, Vaccinia virus
uucuaguucucuuuugua

SEQ ID NO: 4070858 - RNA, 21 nt, Vaccinia virus
uucuauaccaauauuauucuu

SEQ ID NO: 4070859 - RNA, 22 nt, Vaccinia virus
uucuauaccuuucgaaauuagu

SEQ ID NO: 4070860 - RNA, 16 nt, Vaccinia virus
uucuaucguaguguau

SEQ ID NO: 4070861 - RNA, 13 nt, Vaccinia virus
uucuauuauuaca

SEQ ID NO: 4070862 - RNA, 14 nt, Vaccinia virus
uucuauucuagaaa

SEQ ID NO: 4070863 - RNA, 15 nt, Vaccinia virus
uucuauucuuauucu

SEQ ID NO: 4070864 - RNA, 14 nt, Vaccinia virus
uucuauuuaauuuu

SEQ ID NO: 4070865 - RNA, 21 nt, Vaccinia virus
uucucaaaagaucaaggaaau

SEQ ID NO: 4070866 - RNA, 21 nt, Vaccinia virus
uucuccaccaaacauauucuu

SEQ ID NO: 4070867 - RNA, 18 nt, Vaccinia virus
uucuccguucuuaauaag

SEQ ID NO: 4070868 - RNA, 22 nt, Vaccinia virus
uucugacgucguucuacauaaa

SEQ ID NO: 4070869 - RNA, 21 nt, Vaccinia virus
uucugauauggaaucuguauu

SEQ ID NO: 4070870 - RNA, 13 nt, Vaccinia virus
uucugaugaaaca

SEQ ID NO: 4070871 - RNA, 17 nt, Vaccinia virus
uucugcgcaaugcauaa

SEQ ID NO: 4070872 - RNA, 21 nt, Vaccinia virus
uucuggaauaggauaauaauu

SEQ ID NO: 4070873 - RNA, 16 nt, Vaccinia virus
uucuggacauagcuuu

SEQ ID NO: 4070874 - RNA, 16 nt, Vaccinia virus
uucuggauauguuuuu

SEQ ID NO: 4070875 - RNA, 18 nt, Vaccinia virus
uucuggugcuaauuauuc

SEQ ID NO: 4070876 - RNA, 12 nt, Vaccinia virus
uucuguuuucaa

SEQ ID NO: 4070877 - RNA, 18 nt, Vaccinia virus
uucuuaaaagguuucaua

SEQ ID NO: 4070878 - RNA, 20 nt, Vaccinia virus
uucuuaacuuacaaaaugua

SEQ ID NO: 4070879 - RNA, 23 nt, Vaccinia virus
uucuuacaguacacaguauugac

SEQ ID NO: 4070880 - RNA, 20 nt, Vaccinia virus
uucuuacauauuuuuuucuu

SEQ ID NO: 4070881 - RNA, 19 nt, Vaccinia virus
uucuuaucaauaacauauu

SEQ ID NO: 4070882 - RNA, 23 nt, Vaccinia virus
uucuucauuuauggguaucaaaa

SEQ ID NO: 4070883 - RNA, 21 nt, Vaccinia virus
uucuucuauaguccugucuuu

SEQ ID NO: 4070884 - RNA, 20 nt, Vaccinia virus
uucuuggauauagaauccaa

SEQ ID NO: 4070885 - RNA, 14 nt, Vaccinia virus
uucuuguuaucaga

SEQ ID NO: 4070886 - RNA, 13 nt, Vaccinia virus
uugaaaauuauuu

SEQ ID NO: 4070887 - RNA, 10 nt, Vaccinia virus
uugaaagaga

SEQ ID NO: 4070888 - RNA, 22 nt, Vaccinia virus
uugaaccaguccauggaaaaga

SEQ ID NO: 4070889 - RNA, 16 nt, Vaccinia virus
uugaacuccucuagau

SEQ ID NO: 4070890 - RNA, 21 nt, Vaccinia virus
uugaagaauuuauauaaauca

SEQ ID NO: 4070891 - RNA, 20 nt, Vaccinia virus
uugacuacauucucauuaau

SEQ ID NO: 4070892 - RNA, 18 nt, Vaccinia virus
uugagacgggucaaacaa

SEQ ID NO: 4070893 - RNA, 17 nt, Vaccinia virus
uugagauggauucacug

SEQ ID NO: 4070894 - RNA, 20 nt, Vaccinia virus
uugagcaaucagaaaugaug

SEQ ID NO: 4070895 - RNA, 14 nt, Vaccinia virus
uugauaauaaauca

SEQ ID NO: 4070896 - RNA, 13 nt, Vaccinia virus
uugauaauaaucc

SEQ ID NO: 4070897 - RNA, 19 nt, Vaccinia virus
uugauacuuuuucuagaaa

SEQ ID NO: 4070898 - RNA, 21 nt, Vaccinia virus
uugauaguuguuccuagauau

SEQ ID NO: 4070899 - RNA, 15 nt, Vaccinia virus
uugauauauuauuua

SEQ ID NO: 4070900 - RNA, 20 nt, Vaccinia virus
uugauaucgcauagaaauac

SEQ ID NO: 4070901 - RNA, 13 nt, Vaccinia virus
uugaucaacuaua

SEQ ID NO: 4070902 - RNA, 18 nt, Vaccinia virus
uugaucaucguaauuaau

SEQ ID NO: 4070903 - RNA, 17 nt, Vaccinia virus
uugauccaguggaugau

SEQ ID NO: 4070904 - RNA, 18 nt, Vaccinia virus
uugauccguaauaacauu

SEQ ID NO: 4070905 - RNA, 20 nt, Vaccinia virus
uugauccuagaacuagauau

SEQ ID NO: 4070906 - RNA, 22 nt, Vaccinia virus
uugaucucaucauuccauaauu

SEQ ID NO: 4070907 - RNA, 20 nt, Vaccinia virus
uugaugauaucuacaucguu

SEQ ID NO: 4070908 - RNA, 15 nt, Vaccinia virus
uugauggaaaaauuc

SEQ ID NO: 4070909 - RNA, 17 nt, Vaccinia virus
uugaugucguuauucug

SEQ ID NO: 4070910 - RNA, 20 nt, Vaccinia virus
uugauuaccacgucuggaua

SEQ ID NO: 4070911 - RNA, 13 nt, Vaccinia virus
uugauuauuuuga

SEQ ID NO: 4070912 - RNA, 17 nt, Vaccinia virus
uugauucgcuucuuuaa

SEQ ID NO: 4070913 - RNA, 13 nt, Vaccinia virus
uugauuuuggaua

SEQ ID NO: 4070914 - RNA, 21 nt, Vaccinia virus
uugcagacaaacgaagaaaga

SEQ ID NO: 4070915 - RNA, 13 nt, Vaccinia virus
uugccaaguuauc

SEQ ID NO: 4070916 - RNA, 19 nt, Vaccinia virus
uugccaucacucucauaau

SEQ ID NO: 4070917 - RNA, 19 nt, Vaccinia virus
uugcguggagaucauuaaa

SEQ ID NO: 4070918 - RNA, 14 nt, Vaccinia virus
uugcuaacgguauu

SEQ ID NO: 4070919 - RNA, 21 nt, Vaccinia virus
uugcucggcgucaacgcugga

SEQ ID NO: 4070920 - RNA, 14 nt, Vaccinia virus
uugcucguaaaaga

SEQ ID NO: 4070921 - RNA, 20 nt, Vaccinia virus
uugcuuugguuuaauuauuu

SEQ ID NO: 4070922 - RNA, 13 nt, Vaccinia virus
uugcuuuucuaau

SEQ ID NO: 4070923 - RNA, 14 nt, Vaccinia virus
uugcuuuucuaauc

SEQ ID NO: 4070924 - RNA, 16 nt, Vaccinia virus
uuggaaccggcugugg

SEQ ID NO: 4070925 - RNA, 16 nt, Vaccinia virus
uuggaaucaauuacag

SEQ ID NO: 4070926 - RNA, 22 nt, Vaccinia virus
uuggagaaacugcaacuggaaa

SEQ ID NO: 4070927 - RNA, 17 nt, Vaccinia virus
uugguagauuuucaauu

SEQ ID NO: 4070928 - RNA, 16 nt, Vaccinia virus
uugguauuucuuacau

SEQ ID NO: 4070929 - RNA, 13 nt, Vaccinia virus
uugguuucuaaau

SEQ ID NO: 4070930 - RNA, 18 nt, Vaccinia virus
uuguaaaguuaaaauugu

SEQ ID NO: 4070931 - RNA, 21 nt, Vaccinia virus
uuguaacaucgguacggguau

SEQ ID NO: 4070932 - RNA, 18 nt, Vaccinia virus
uuguaauaaaaagggaaa

SEQ ID NO: 4070933 - RNA, 14 nt, Vaccinia virus
uuguacaaauuccu

SEQ ID NO: 4070934 - RNA, 15 nt, Vaccinia virus
uuguagaacguggau

SEQ ID NO: 4070935 - RNA, 16 nt, Vaccinia virus
uuguagauuuaucaua

SEQ ID NO: 4070936 - RNA, 11 nt, Vaccinia virus
uuguagucuuu

SEQ ID NO: 4070937 - RNA, 14 nt, Vaccinia virus
uuguaguuaaaaac

SEQ ID NO: 4070938 - RNA, 18 nt, Vaccinia virus
uuguauagaaacuguaua

SEQ ID NO: 4070939 - RNA, 16 nt, Vaccinia virus
uuguauauuucuucuu

SEQ ID NO: 4070940 - RNA, 14 nt, Vaccinia virus
uugucauuaucuac

SEQ ID NO: 4070941 - RNA, 20 nt, Vaccinia virus
uuguccagauugaacauaca

SEQ ID NO: 4070942 - RNA, 15 nt, Vaccinia virus
uuguccuauauauca

SEQ ID NO: 4070943 - RNA, 11 nt, Vaccinia virus
uugucuagaau

SEQ ID NO: 4070944 - RNA, 24 nt, Vaccinia virus
uugucuuuaaguauauacgauaag

SEQ ID NO: 4070945 - RNA, 16 nt, Vaccinia virus
uugugaaugacaucau

SEQ ID NO: 4070946 - RNA, 16 nt, Vaccinia virus
uuguucauuggaugag

SEQ ID NO: 4070947 - RNA, 16 nt, Vaccinia virus
uuguucuaaagccagu

SEQ ID NO: 4070948 - RNA, 14 nt, Vaccinia virus
uuguucuuggaugu

SEQ ID NO: 4070949 - RNA, 22 nt, Vaccinia virus
uuguugagaugcugcuccugga

SEQ ID NO: 4070950 - RNA, 17 nt, Vaccinia virus
uuguuguccguuaucua

SEQ ID NO: 4070951 - RNA, 22 nt, Vaccinia virus
uuguuuacacggugacuguauc

SEQ ID NO: 4070952 - RNA, 17 nt, Vaccinia virus
uuuaaaaacgaaucaga

SEQ ID NO: 4070953 - RNA, 11 nt, Vaccinia virus
gccaaauguac

SEQ ID NO: 4070954 - RNA, 14 nt, Vaccinia virus
gccaacuauacauc

SEQ ID NO: 4070955 - RNA, 14 nt, Vaccinia virus
gccaagauagcuuc

SEQ ID NO: 4070956 - RNA, 20 nt, Vaccinia virus
gccacaaaacagaaauaugu

SEQ ID NO: 4070957 - RNA, 13 nt, Vaccinia virus
gccagaaucaugg

SEQ ID NO: 4070958 - RNA, 16 nt, Vaccinia virus
gccagagauaauuucu

SEQ ID NO: 4070959 - RNA, 15 nt, Vaccinia virus
gccagaucuucuucu

SEQ ID NO: 4070960 - RNA, 20 nt, Vaccinia virus
gccauacucagaauuaugau

SEQ ID NO: 4070961 - RNA, 15 nt, Vaccinia virus
gccauuaauuacuuu

SEQ ID NO: 4070962 - RNA, 14 nt, Vaccinia virus
gccauuacaagaua

SEQ ID NO: 4070963 - RNA, 20 nt, Vaccinia virus
gccauugaaaacuauuucuu

SEQ ID NO: 4070964 - RNA, 22 nt, Vaccinia virus
gccccgcuucuauuuacucccg

SEQ ID NO: 4070965 - RNA, 17 nt, Vaccinia virus
gcccucaauuucccaaa

SEQ ID NO: 4070966 - RNA, 19 nt, Vaccinia virus
gcccucuauuagcauaaac

SEQ ID NO: 4070967 - RNA, 18 nt, Vaccinia virus
gccgaguuuaaaacuucu

SEQ ID NO: 4070968 - RNA, 15 nt, Vaccinia virus
gccgauaaacaaauc

SEQ ID NO: 4070969 - RNA, 17 nt, Vaccinia virus
gccgcuauaaugaugau

SEQ ID NO: 4070970 - RNA, 19 nt, Vaccinia virus
gccgguugccgcaaauaga

SEQ ID NO: 4070971 - RNA, 22 nt, Vaccinia virus
gccguauggaccauuauuuuua

SEQ ID NO: 4070972 - RNA, 22 nt, Vaccinia virus
gccuaaacccgacuuaguuaua

SEQ ID NO: 4070973 - RNA, 19 nt, Vaccinia virus
gccuauaaaguaauaaucu

SEQ ID NO: 4070974 - RNA, 20 nt, Vaccinia virus
gccucaucuucuauauccug

SEQ ID NO: 4070975 - RNA, 18 nt, Vaccinia virus
gccuccacuagaagagaa

SEQ ID NO: 4070976 - RNA, 14 nt, Vaccinia virus
gccugaaguuuauu

SEQ ID NO: 4070977 - RNA, 16 nt, Vaccinia virus
gccuguacuuggauuu

SEQ ID NO: 4070978 - RNA, 22 nt, Vaccinia virus
gccuuauucucuggagaaaaga

SEQ ID NO: 4070979 - RNA, 15 nt, Vaccinia virus
gccuuuuuauacaug

SEQ ID NO: 4070980 - RNA, 16 nt, Vaccinia virus
gcgaaccgauuaaaca

SEQ ID NO: 4070981 - RNA, 17 nt, Vaccinia virus
gcgaauaaauagauaua

SEQ ID NO: 4070982 - RNA, 19 nt, Vaccinia virus
gcgacaguaugugguacau

SEQ ID NO: 4070983 - RNA, 13 nt, Vaccinia virus
gcgauugauuuug

SEQ ID NO: 4070984 - RNA, 11 nt, Vaccinia virus
gcgcaugauuu

SEQ ID NO: 4070985 - RNA, 14 nt, Vaccinia virus
gcgcuaguagauuu

SEQ ID NO: 4070986 - RNA, 19 nt, Vaccinia virus
gcgcuauagaguagacauu

SEQ ID NO: 4070987 - RNA, 13 nt, Vaccinia virus
gcgcuaucuuuca

SEQ ID NO: 4070988 - RNA, 16 nt, Vaccinia virus
gcggaacaauaaacaa

SEQ ID NO: 4070989 - RNA, 15 nt, Vaccinia virus
gcggacuuuaaacag

SEQ ID NO: 4070990 - RNA, 20 nt, Vaccinia virus
gcggagauaauaucagaaag

SEQ ID NO: 4070991 - RNA, 16 nt, Vaccinia virus
gcggcaucuaaauuaa

SEQ ID NO: 4070992 - RNA, 12 nt, Vaccinia virus
gcgguguauuua

SEQ ID NO: 4070993 - RNA, 17 nt, Vaccinia virus
gcguacuucagguuucu

SEQ ID NO: 4070994 - RNA, 17 nt, Vaccinia virus
gcgucauuguaaaggaa

SEQ ID NO: 4070995 - RNA, 20 nt, Vaccinia virus
gcgugaacaacuuacagaug

SEQ ID NO: 4070996 - RNA, 16 nt, Vaccinia virus
gcuaaaaaauuaguag

SEQ ID NO: 4070997 - RNA, 12 nt, Vaccinia virus
gcuaacaucaua

SEQ ID NO: 4070998 - RNA, 17 nt, Vaccinia virus
gcuaaggaguuuaagaa

SEQ ID NO: 4070999 - RNA, 15 nt, Vaccinia virus
gcuaauaucuaaaua

SEQ ID NO: 4071000 - RNA, 21 nt, Vaccinia virus
gcuaauuuuuguaaauaacua

SEQ ID NO: 4071001 - RNA, 14 nt, Vaccinia virus
gcuacuaucuugua

SEQ ID NO: 4071002 - RNA, 15 nt, Vaccinia virus
gcuaguuauuaaaca

SEQ ID NO: 4071003 - RNA, 19 nt, Vaccinia virus
gcuauaauaauaaauguau

SEQ ID NO: 4071004 - RNA, 20 nt, Vaccinia virus
gcuauaauccgauauaugau

SEQ ID NO: 4071005 - RNA, 11 nt, Vaccinia virus
gcuauaaugau

SEQ ID NO: 4071006 - RNA, 14 nt, Vaccinia virus
gcuauaaugaugau

SEQ ID NO: 4071007 - RNA, 19 nt, Vaccinia virus
gcuaugauaaucagaucau

SEQ ID NO: 4071008 - RNA, 17 nt, Vaccinia virus
gcuauuaaaauauuuua

SEQ ID NO: 4071009 - RNA, 13 nt, Vaccinia virus
gcucauaaacuca

SEQ ID NO: 4071010 - RNA, 18 nt, Vaccinia virus
gcuccuacaggaauaucu

SEQ ID NO: 4071011 - RNA, 13 nt, Vaccinia virus
gcucgauaaucaa

SEQ ID NO: 4071012 - RNA, 23 nt, Vaccinia virus
gcucuacaugcgguaaagauauu

SEQ ID NO: 4071013 - RNA, 12 nt, Vaccinia virus
gcucuagauauu

SEQ ID NO: 4071014 - RNA, 18 nt, Vaccinia virus
gcucuguaaagcauauuc

SEQ ID NO: 4071015 - RNA, 18 nt, Vaccinia virus
gcugaacacauuaaacaa

SEQ ID NO: 4071016 - RNA, 15 nt, Vaccinia virus
gcugacuagcauauu

SEQ ID NO: 4071017 - RNA, 16 nt, Vaccinia virus
gcugauuaacuuccac

SEQ ID NO: 4071018 - RNA, 18 nt, Vaccinia virus
gcugauuauuuauuucuu

SEQ ID NO: 4071019 - RNA, 17 nt, Vaccinia virus
gcuguaaacaaguuugg

SEQ ID NO: 4071020 - RNA, 12 nt, Vaccinia virus
gcugucauguau

SEQ ID NO: 4071021 - RNA, 23 nt, Vaccinia virus
gcuuaaaggaagaauaucauauu

SEQ ID NO: 4071022 - RNA, 17 nt, Vaccinia virus
gcuucuuuaauuuuuua

SEQ ID NO: 4071023 - RNA, 16 nt, Vaccinia virus
gcuugugauuuuuucu

SEQ ID NO: 4071024 - RNA, 18 nt, Vaccinia virus
gcuuucaagaauaaacga

SEQ ID NO: 4071025 - RNA, 22 nt, Vaccinia virus
ggaaaaucgucuucacaaagaa

SEQ ID NO: 4071026 - RNA, 19 nt, Vaccinia virus
ggaaaaucugaagaagaua

SEQ ID NO: 4071027 - RNA, 16 nt, Vaccinia virus
ggaaacaauucauaau

SEQ ID NO: 4071028 - RNA, 23 nt, Vaccinia virus
ggaaagcuagacuugauuauucu

SEQ ID NO: 4071029 - RNA, 22 nt, Vaccinia virus
ggaaauacaccucuacauaacu

SEQ ID NO: 4071030 - RNA, 14 nt, Vaccinia virus
ggaaauggaagaaa

SEQ ID NO: 4071031 - RNA, 23 nt, Vaccinia virus
ggaagcaacuaaacuaugugaug

SEQ ID NO: 4071032 - RNA, 15 nt, Vaccinia virus
ggaaucuguauucuc

SEQ ID NO: 4071033 - RNA, 12 nt, Vaccinia virus
agauaaaacaag

SEQ ID NO: 4071034 - RNA, 13 nt, Vaccinia virus
agauaaacuaaau

SEQ ID NO: 4071035 - RNA, 16 nt, Vaccinia virus
agauaaagaguucuaa

SEQ ID NO: 4071036 - RNA, 21 nt, Vaccinia virus
agauaaauccaucuuccagaa

SEQ ID NO: 4071037 - RNA, 12 nt, Vaccinia virus
agauaauacaaa

SEQ ID NO: 4071038 - RNA, 16 nt, Vaccinia virus
agauaaugcuaaugua

SEQ ID NO: 4071039 - RNA, 16 nt, Vaccinia virus
agauacaauauuuaca

SEQ ID NO: 4071040 - RNA, 17 nt, Vaccinia virus
agauacagauacagaua

SEQ ID NO: 4071041 - RNA, 20 nt, Vaccinia virus
agauaccaacauuaaaaugu

SEQ ID NO: 4071042 - RNA, 21 nt, Vaccinia virus
agauacguaguuauguagagg

SEQ ID NO: 4071043 - RNA, 15 nt, Vaccinia virus
agauacgucuauaca

SEQ ID NO: 4071044 - RNA, 14 nt, Vaccinia virus
agauacuguauaua

SEQ ID NO: 4071045 - RNA, 18 nt, Vaccinia virus
agauagauaaucaaaauu

SEQ ID NO: 4071046 - RNA, 19 nt, Vaccinia virus
agauagcuuuagcuaauau

SEQ ID NO: 4071047 - RNA, 20 nt, Vaccinia virus
agauaguaaauagauaguuu

SEQ ID NO: 4071048 - RNA, 20 nt, Vaccinia virus
agauaguagcuauaauauau

SEQ ID NO: 4071049 - RNA, 16 nt, Vaccinia virus
agauaguuuucucuau

SEQ ID NO: 4071050 - RNA, 14 nt, Vaccinia virus
agauauauagaauu

SEQ ID NO: 4071051 - RNA, 16 nt, Vaccinia virus
agauauaucuacuucu

SEQ ID NO: 4071052 - RNA, 17 nt, Vaccinia virus
agauauauuauaauucu

SEQ ID NO: 4071053 - RNA, 22 nt, Vaccinia virus
agauaucauaaaugaaauagau

SEQ ID NO: 4071054 - RNA, 16 nt, Vaccinia virus
agauaugccaaaauca

SEQ ID NO: 4071055 - RNA, 22 nt, Vaccinia virus
agauaugguguagcauauguuu

SEQ ID NO: 4071056 - RNA, 15 nt, Vaccinia virus
agauauguuuauuca

SEQ ID NO: 4071057 - RNA, 13 nt, Vaccinia virus
agauauuaaugag

SEQ ID NO: 4071058 - RNA, 22 nt, Vaccinia virus
agauauuaucauuagucauguu

SEQ ID NO: 4071059 - RNA, 13 nt, Vaccinia virus
agaucaaaacaaa

SEQ ID NO: 4071060 - RNA, 18 nt, Vaccinia virus
agaucaaccaaaaaggag

SEQ ID NO: 4071061 - RNA, 17 nt, Vaccinia virus
agaucauuaaauguuuc

SEQ ID NO: 4071062 - RNA, 18 nt, Vaccinia virus
agauccaacauuaaucaa

SEQ ID NO: 4071063 - RNA, 21 nt, Vaccinia virus
agauccacugucacuggaaag

SEQ ID NO: 4071064 - RNA, 20 nt, Vaccinia virus
agauccucucuuaaaugaau

SEQ ID NO: 4071065 - RNA, 16 nt, Vaccinia virus
agauccucucuucaac

SEQ ID NO: 4071066 - RNA, 13 nt, Vaccinia virus
agaucuaaauaca

SEQ ID NO: 4071067 - RNA, 15 nt, Vaccinia virus
agaucuaaauacaaa

SEQ ID NO: 4071068 - RNA, 17 nt, Vaccinia virus
agaucuaauaaauggag

SEQ ID NO: 4071069 - RNA, 19 nt, Vaccinia virus
agaucuaauaaauggagaa

SEQ ID NO: 4071070 - RNA, 19 nt, Vaccinia virus
agaucuaauuuuucauuga

SEQ ID NO: 4071071 - RNA, 21 nt, Vaccinia virus
agaucuacuggcgaaauggua

SEQ ID NO: 4071072 - RNA, 18 nt, Vaccinia virus
agaucuaugauaucuucu

SEQ ID NO: 4071073 - RNA, 19 nt, Vaccinia virus
agaucuauuuuaaaguuaa

SEQ ID NO: 4071074 - RNA, 16 nt, Vaccinia virus
agaucuuugauauacu

SEQ ID NO: 4071075 - RNA, 22 nt, Vaccinia virus
agaugaguccaugacuugguau

SEQ ID NO: 4071076 - RNA, 15 nt, Vaccinia virus
agaugauacaaauaa

SEQ ID NO: 4071077 - RNA, 14 nt, Vaccinia virus
agaugaucauagau

SEQ ID NO: 4071078 - RNA, 21 nt, Vaccinia virus
agaugccauaucauacaugau

SEQ ID NO: 4071079 - RNA, 15 nt, Vaccinia virus
agaugcucaauggau

SEQ ID NO: 4071080 - RNA, 17 nt, Vaccinia virus
agaugcuggaagacaag

SEQ ID NO: 4071081 - RNA, 19 nt, Vaccinia virus
agauggaagggucaaacuu

SEQ ID NO: 4071082 - RNA, 18 nt, Vaccinia virus
agauggcguauuuaagag

SEQ ID NO: 4071083 - RNA, 14 nt, Vaccinia virus
agaugguaaacucu

SEQ ID NO: 4071084 - RNA, 14 nt, Vaccinia virus
agauguaaaaaaug

SEQ ID NO: 4071085 - RNA, 18 nt, Vaccinia virus
agauguauuugauauacu

SEQ ID NO: 4071086 - RNA, 16 nt, Vaccinia virus
agauguguauaauucu

SEQ ID NO: 4071087 - RNA, 18 nt, Vaccinia virus
agauguuagaaaaaauga

SEQ ID NO: 4071088 - RNA, 16 nt, Vaccinia virus
agauguuuaaugauac

SEQ ID NO: 4071089 - RNA, 18 nt, Vaccinia virus
agauguuugagaauauau

SEQ ID NO: 4071090 - RNA, 18 nt, Vaccinia virus
agauuaaaucauuaaaug

SEQ ID NO: 4071091 - RNA, 15 nt, Vaccinia virus
agauuaaaugcaaua

SEQ ID NO: 4071092 - RNA, 17 nt, Vaccinia virus
agauuaagauuaaacau

SEQ ID NO: 4071093 - RNA, 18 nt, Vaccinia virus
agauuagcuucgauguuu

SEQ ID NO: 4071094 - RNA, 22 nt, Vaccinia virus
agauuagguguagaucuagaug

SEQ ID NO: 4071095 - RNA, 14 nt, Vaccinia virus
agauuauaacuuau

SEQ ID NO: 4071096 - RNA, 18 nt, Vaccinia virus
agauuauggagcaaacau

SEQ ID NO: 4071097 - RNA, 19 nt, Vaccinia virus
agauuauuauggaaaucaa

SEQ ID NO: 4071098 - RNA, 16 nt, Vaccinia virus
agauuauucuuaaaug

SEQ ID NO: 4071099 - RNA, 19 nt, Vaccinia virus
agauucauguuaacacucu

SEQ ID NO: 4071100 - RNA, 16 nt, Vaccinia virus
agauuccuauuuacaa

SEQ ID NO: 4071101 - RNA, 24 nt, Vaccinia virus
agauucgaugguuugucaucguau

SEQ ID NO: 4071102 - RNA, 14 nt, Vaccinia virus
agauucuaauggau

SEQ ID NO: 4071103 - RNA, 14 nt, Vaccinia virus
agauucugauguau

SEQ ID NO: 4071104 - RNA, 16 nt, Vaccinia virus
agauugauuauuuccu

SEQ ID NO: 4071105 - RNA, 18 nt, Vaccinia virus
agauugguacgaaauaua

SEQ ID NO: 4071106 - RNA, 16 nt, Vaccinia virus
agauuuauaauacuuu

SEQ ID NO: 4071107 - RNA, 15 nt, Vaccinia virus
agauuucaaagaugu

SEQ ID NO: 4071108 - RNA, 19 nt, Vaccinia virus
agauuucagaaucuagauu

SEQ ID NO: 4071109 - RNA, 22 nt, Vaccinia virus
agauuucuuuuugggaaaaauu

SEQ ID NO: 4071110 - RNA, 22 nt, Vaccinia virus
agauuugguaaaaugaaauauc

SEQ ID NO: 4071111 - RNA, 18 nt, Vaccinia virus
agauuuucaauuauguau

SEQ ID NO: 4071112 - RNA, 20 nt, Vaccinia virus
agauuuuugacuuacauaaa

SEQ ID NO: 4071113 - RNA, 13 nt, Vaccinia virus
agcaaaaaaccau

SEQ ID NO: 4071114 - RNA, 14 nt, Vaccinia virus
agcaaaaaaugaua

SEQ ID NO: 4071115 - RNA, 16 nt, Vaccinia virus
agcaaaauuauuaauu

SEQ ID NO: 4071116 - RNA, 18 nt, Vaccinia virus
agcaaaucuaguaaauca

SEQ ID NO: 4071117 - RNA, 19 nt, Vaccinia virus
agcaacaugucucuaaaug

SEQ ID NO: 4071118 - RNA, 13 nt, Vaccinia virus
agcaacuaaucaa

SEQ ID NO: 4071119 - RNA, 21 nt, Vaccinia virus
agcaacuaaucaauagcuuaa

SEQ ID NO: 4071120 - RNA, 13 nt, Vaccinia virus
agcaagaaagaua

SEQ ID NO: 4071121 - RNA, 14 nt, Vaccinia virus
agcaauaaauacag

SEQ ID NO: 4071122 - RNA, 19 nt, Vaccinia virus
agcaauaguauaauuauau

SEQ ID NO: 4071123 - RNA, 14 nt, Vaccinia virus
agcaaugaaaucac

SEQ ID NO: 4071124 - RNA, 17 nt, Vaccinia virus
agcacauccaucaaaga

SEQ ID NO: 4071125 - RNA, 22 nt, Vaccinia virus
agcagauuaguaugaagauaaa

SEQ ID NO: 4071126 - RNA, 21 nt, Vaccinia virus
agcagcaucugcgauguuaua

SEQ ID NO: 4071127 - RNA, 21 nt, Vaccinia virus
agcauacgccaaauaucucaa

SEQ ID NO: 4071128 - RNA, 15 nt, Vaccinia virus
agcauagaggaugaa

SEQ ID NO: 4071129 - RNA, 19 nt, Vaccinia virus
agcauaucacgaacuauau

SEQ ID NO: 4071130 - RNA, 19 nt, Vaccinia virus
agcauauuccauuaaugac

SEQ ID NO: 4071131 - RNA, 17 nt, Vaccinia virus
agcaucagcaucuggcu

SEQ ID NO: 4071132 - RNA, 16 nt, Vaccinia virus
agcaucauaaaaauga

SEQ ID NO: 4071133 - RNA, 20 nt, Vaccinia virus
agcaucauacgaaaauagau

SEQ ID NO: 4071134 - RNA, 22 nt, Vaccinia virus
agcauccccuuucaauaguucu

SEQ ID NO: 4071135 - RNA, 21 nt, Vaccinia virus
agcauccguauaaaaaucgau

SEQ ID NO: 4071136 - RNA, 14 nt, Vaccinia virus
agcaucuaguugau

SEQ ID NO: 4071137 - RNA, 12 nt, Vaccinia virus
agcauguagaag

SEQ ID NO: 4071138 - RNA, 22 nt, Vaccinia virus
agcaugugaauauaauaauaca

SEQ ID NO: 4071139 - RNA, 16 nt, Vaccinia virus
agcauucaaauccgaa

SEQ ID NO: 4071140 - RNA, 19 nt, Vaccinia virus
agcauugaaaauacguucu

SEQ ID NO: 4071141 - RNA, 15 nt, Vaccinia virus
agcauuguuauguau

SEQ ID NO: 4071142 - RNA, 17 nt, Vaccinia virus
agcauuguuauguauuu

SEQ ID NO: 4071143 - RNA, 23 nt, Vaccinia virus
agcauuucugucgauauagcuuu

SEQ ID NO: 4071144 - RNA, 18 nt, Vaccinia virus
agcauuuguaauaauccu

SEQ ID NO: 4071145 - RNA, 19 nt, Vaccinia virus
agcauuuuggaaacauaaa

SEQ ID NO: 4071146 - RNA, 14 nt, Vaccinia virus
agccaacaaauaua

SEQ ID NO: 4071147 - RNA, 20 nt, Vaccinia virus
agccacuauagaguuucuaa

SEQ ID NO: 4071148 - RNA, 15 nt, Vaccinia virus
agccugaaaaagaua

SEQ ID NO: 4071149 - RNA, 19 nt, Vaccinia virus
agccugugaaugcaaucaa

SEQ ID NO: 4071150 - RNA, 20 nt, Vaccinia virus
agccuuaagaaaacuagaua

SEQ ID NO: 4071151 - RNA, 18 nt, Vaccinia virus
agcgacggggaugaugaa

SEQ ID NO: 4071152 - RNA, 19 nt, Vaccinia virus
auacuuuguaaucuagaca

SEQ ID NO: 4071153 - RNA, 18 nt, Vaccinia virus
auacuuugucggauuauc

SEQ ID NO: 4071154 - RNA, 20 nt, Vaccinia virus
auacuuuuaauuaacaaaag

SEQ ID NO: 4071155 - RNA, 19 nt, Vaccinia virus
auacuuuuacggaaaaaug

SEQ ID NO: 4071156 - RNA, 17 nt, Vaccinia virus
auacuuuuaggaaauca

SEQ ID NO: 4071157 - RNA, 19 nt, Vaccinia virus
auagaaauaaaaauuauua

SEQ ID NO: 4071158 - RNA, 14 nt, Vaccinia virus
auagaaauauauau

SEQ ID NO: 4071159 - RNA, 23 nt, Vaccinia virus
auagaacacccguagaaauacua

SEQ ID NO: 4071160 - RNA, 13 nt, Vaccinia virus
auagaagauagau

SEQ ID NO: 4071161 - RNA, 19 nt, Vaccinia virus
auagaagauagauaugcca

SEQ ID NO: 4071162 - RNA, 12 nt, Vaccinia virus
auagaagauuac

SEQ ID NO: 4071163 - RNA, 22 nt, Vaccinia virus
auagaaguuaaacugugaaugu

SEQ ID NO: 4071164 - RNA, 21 nt, Vaccinia virus
auagaaucggacgucugauau

SEQ ID NO: 4071165 - RNA, 19 nt, Vaccinia virus
auagacaaugcuaauauau

SEQ ID NO: 4071166 - RNA, 23 nt, Vaccinia virus
auagagagaaagaagaaauacua

SEQ ID NO: 4071167 - RNA, 17 nt, Vaccinia virus
auagagguaauacuuuu

SEQ ID NO: 4071168 - RNA, 16 nt, Vaccinia virus
auagauaaucaaaauu

SEQ ID NO: 4071169 - RNA, 14 nt, Vaccinia virus
auagauagaacuac

SEQ ID NO: 4071170 - RNA, 16 nt, Vaccinia virus
auagaucucucauuau

SEQ ID NO: 4071171 - RNA, 21 nt, Vaccinia virus
auagaugugguaauaucugac

SEQ ID NO: 4071172 - RNA, 19 nt, Vaccinia virus
auagauguucaucauauaa

SEQ ID NO: 4071173 - RNA, 16 nt, Vaccinia virus
auagauuuugaauauu

SEQ ID NO: 4071174 - RNA, 16 nt, Vaccinia virus
auagcaaaauaaaguu

SEQ ID NO: 4071175 - RNA, 17 nt, Vaccinia virus
auagcaaaaucuuuacu

SEQ ID NO: 4071176 - RNA, 17 nt, Vaccinia virus
auagcaaccaguguuug

SEQ ID NO: 4071177 - RNA, 15 nt, Vaccinia virus
auagcaauguaaugg

SEQ ID NO: 4071178 - RNA, 15 nt, Vaccinia virus
auagcaucaauaauu

SEQ ID NO: 4071179 - RNA, 15 nt, Vaccinia virus
auagcgaugauuauc

SEQ ID NO: 4071180 - RNA, 12 nt, Vaccinia virus
auagcuaucaag

SEQ ID NO: 4071181 - RNA, 22 nt, Vaccinia virus
auagcugaaucugauaaauaua

SEQ ID NO: 4071182 - RNA, 15 nt, Vaccinia virus
auaggagauauauau

SEQ ID NO: 4071183 - RNA, 16 nt, Vaccinia virus
auaggauacuuuguaa

SEQ ID NO: 4071184 - RNA, 14 nt, Vaccinia virus
auaggaucaucuau

SEQ ID NO: 4071185 - RNA, 21 nt, Vaccinia virus
auaggauuaaaaauaaaguua

SEQ ID NO: 4071186 - RNA, 23 nt, Vaccinia virus
auagguguaaaucuaggaauuac

SEQ ID NO: 4071187 - RNA, 22 nt, Vaccinia virus
auagguuacuagauuaaaaaug

SEQ ID NO: 4071188 - RNA, 20 nt, Vaccinia virus
auagguuuuuuaaaacagau

SEQ ID NO: 4071189 - RNA, 13 nt, Vaccinia virus
auaguaaaaucua

SEQ ID NO: 4071190 - RNA, 23 nt, Vaccinia virus
auaguaguacacagcauguuaua

SEQ ID NO: 4071191 - RNA, 24 nt, Vaccinia virus
auaguauacacgcuaaaauaacua

SEQ ID NO: 4071192 - RNA, 13 nt, Vaccinia virus
auaguaucaaacu

SEQ ID NO: 4071193 - RNA, 23 nt, Vaccinia virus
auagucagaauuuucauggaugu

SEQ ID NO: 4071194 - RNA, 16 nt, Vaccinia virus
auagucuccagaaauc

SEQ ID NO: 4071195 - RNA, 16 nt, Vaccinia virus
auagugaaacaaaaua

SEQ ID NO: 4071196 - RNA, 15 nt, Vaccinia virus
auaguggacaacauu

SEQ ID NO: 4071197 - RNA, 22 nt, Vaccinia virus
auaguuaccacgugcuguacca

SEQ ID NO: 4071198 - RNA, 22 nt, Vaccinia virus
auaguuagcgucaacuuucaua

SEQ ID NO: 4071199 - RNA, 20 nt, Vaccinia virus
auaguuaucuaucuuaaaaa

SEQ ID NO: 4071200 - RNA, 17 nt, Vaccinia virus
auaguuguuccuagaua

SEQ ID NO: 4071201 - RNA, 18 nt, Vaccinia virus
auaguuuuuuucauuacu

SEQ ID NO: 4071202 - RNA, 21 nt, Vaccinia virus
auauaacguaaccagaauugu

SEQ ID NO: 4071203 - RNA, 18 nt, Vaccinia virus
auauaacuaucaauauua

SEQ ID NO: 4071204 - RNA, 18 nt, Vaccinia virus
auauaauacuuaaaaaug

SEQ ID NO: 4071205 - RNA, 23 nt, Vaccinia virus
auauaauccgcauauuccauaua

SEQ ID NO: 4071206 - RNA, 21 nt, Vaccinia virus
auauacaacucuuuaauacga

SEQ ID NO: 4071207 - RNA, 17 nt, Vaccinia virus
auauacacauuuaauaa

SEQ ID NO: 4071208 - RNA, 16 nt, Vaccinia virus
auauacauuacugaau

SEQ ID NO: 4071209 - RNA, 20 nt, Vaccinia virus
auauaccuguuuuuauuuca

SEQ ID NO: 4071210 - RNA, 17 nt, Vaccinia virus
auauacguguacuguau

SEQ ID NO: 4071211 - RNA, 16 nt, Vaccinia virus
auauacguguuuaaaa

SEQ ID NO: 4071212 - RNA, 23 nt, Vaccinia virus
auauagaugcagaaguaaugaag

SEQ ID NO: 4071213 - RNA, 13 nt, Vaccinia virus
aaaugauuuugua

SEQ ID NO: 4071214 - RNA, 22 nt, Vaccinia virus
aaauggaagauauuuccauuua

SEQ ID NO: 4071215 - RNA, 22 nt, Vaccinia virus
aaauggauaauauccauauuga

SEQ ID NO: 4071216 - RNA, 15 nt, Vaccinia virus
aaauggauguuaaug

SEQ ID NO: 4071217 - RNA, 15 nt, Vaccinia virus
aaaugguauauuuua

SEQ ID NO: 4071218 - RNA, 14 nt, Vaccinia virus
aaaugguguaacuc

SEQ ID NO: 4071219 - RNA, 21 nt, Vaccinia virus
aaauguauuuuuuaugauaua

SEQ ID NO: 4071220 - RNA, 20 nt, Vaccinia virus
aaaugucuagcgauauuucu

SEQ ID NO: 4071221 - RNA, 22 nt, Vaccinia virus
aaauguuugauaaaaauaugua

SEQ ID NO: 4071222 - RNA, 14 nt, Vaccinia virus
aaauuaagauacaa

SEQ ID NO: 4071223 - RNA, 22 nt, Vaccinia virus
aaauuaauuuaccaucguguau

SEQ ID NO: 4071224 - RNA, 15 nt, Vaccinia virus
aaauuauaaugaaua

SEQ ID NO: 4071225 - RNA, 12 nt, Vaccinia virus
aaauuauauucu

SEQ ID NO: 4071226 - RNA, 18 nt, Vaccinia virus
aaauuaucaaauacuuca

SEQ ID NO: 4071227 - RNA, 15 nt, Vaccinia virus
aaauuaucaaauguu

SEQ ID NO: 4071228 - RNA, 20 nt, Vaccinia virus
aaauuaucuaucuacaucau

SEQ ID NO: 4071229 - RNA, 20 nt, Vaccinia virus
aaauuauuccuaauuaagaa

SEQ ID NO: 4071230 - RNA, 14 nt, Vaccinia virus
aaauuauucguuua

SEQ ID NO: 4071231 - RNA, 19 nt, Vaccinia virus
aaauucaguugcuggaauu

SEQ ID NO: 4071232 - RNA, 21 nt, Vaccinia virus
aaauuccaaauuuuuuucauu

SEQ ID NO: 4071233 - RNA, 18 nt, Vaccinia virus
aaauucggacuuggauuc

SEQ ID NO: 4071234 - RNA, 14 nt, Vaccinia virus
aaauucguaauaau

SEQ ID NO: 4071235 - RNA, 16 nt, Vaccinia virus
aaauucguuagcaaaa

SEQ ID NO: 4071236 - RNA, 18 nt, Vaccinia virus
aaauuguaagguuguaaa

SEQ ID NO: 4071237 - RNA, 21 nt, Vaccinia virus
aaauugucuagauaaaauacu

SEQ ID NO: 4071238 - RNA, 12 nt, Vaccinia virus
aaauugucuaua

SEQ ID NO: 4071239 - RNA, 21 nt, Vaccinia virus
aaauugucugaugaagaauua

SEQ ID NO: 4071240 - RNA, 14 nt, Vaccinia virus
aaauuguuaaauua

SEQ ID NO: 4071241 - RNA, 12 nt, Vaccinia virus
aaauuuagauua

SEQ ID NO: 4071242 - RNA, 14 nt, Vaccinia virus
aaauuugucauuua

SEQ ID NO: 4071243 - RNA, 21 nt, Vaccinia virus
aaauuuuaaagaguacacaau

SEQ ID NO: 4071244 - RNA, 13 nt, Vaccinia virus
aaauuuucauuca

SEQ ID NO: 4071245 - RNA, 22 nt, Vaccinia virus
aaauuuuuugagguaaucuucu

SEQ ID NO: 4071246 - RNA, 20 nt, Vaccinia virus
aaauuuuuuuuacaaacauc

SEQ ID NO: 4071247 - RNA, 20 nt, Vaccinia virus
aacaaaugcgccaaaguuau

SEQ ID NO: 4071248 - RNA, 22 nt, Vaccinia virus
aacaaaugcgccaaaguuauau

SEQ ID NO: 4071249 - RNA, 16 nt, Vaccinia virus
aacaacaccaugagau

SEQ ID NO: 4071250 - RNA, 17 nt, Vaccinia virus
aacaaccgcuuagaaau

SEQ ID NO: 4071251 - RNA, 19 nt, Vaccinia virus
aacaaggcgauuauaaagu

SEQ ID NO: 4071252 - RNA, 23 nt, Vaccinia virus
aacaagugauacguaagaauaua

SEQ ID NO: 4071253 - RNA, 16 nt, Vaccinia virus
aacaaguguguagaua

SEQ ID NO: 4071254 - RNA, 17 nt, Vaccinia virus
aacaaguuggaugauau

SEQ ID NO: 4071255 - RNA, 15 nt, Vaccinia virus
aacaauaguuauuac

SEQ ID NO: 4071256 - RNA, 17 nt, Vaccinia virus
aacaauauauacgagua

SEQ ID NO: 4071257 - RNA, 16 nt, Vaccinia virus
aacaaucaacuaaugu

SEQ ID NO: 4071258 - RNA, 13 nt, Vaccinia virus
aacaaucaagaag

SEQ ID NO: 4071259 - RNA, 14 nt, Vaccinia virus
aacaaugaaguuau

SEQ ID NO: 4071260 - RNA, 14 nt, Vaccinia virus
aacaauuguagaua

SEQ ID NO: 4071261 - RNA, 22 nt, Vaccinia virus
aacacaaauaguaauacaugua

SEQ ID NO: 4071262 - RNA, 12 nt, Vaccinia virus
aacacaaccaaa

SEQ ID NO: 4071263 - RNA, 16 nt, Vaccinia virus
aacaccacgaacaugu

SEQ ID NO: 4071264 - RNA, 16 nt, Vaccinia virus
aacacgauaggucaga

SEQ ID NO: 4071265 - RNA, 22 nt, Vaccinia virus
aacacuaaaaaauaaacacaua

SEQ ID NO: 4071266 - RNA, 13 nt, Vaccinia virus
aacacuauuagaa

SEQ ID NO: 4071267 - RNA, 17 nt, Vaccinia virus
aacacucgacacaauau

SEQ ID NO: 4071268 - RNA, 15 nt, Vaccinia virus
aacacucuuucugaa

SEQ ID NO: 4071269 - RNA, 19 nt, Vaccinia virus
aacacuuuggauacaaaau

SEQ ID NO: 4071270 - RNA, 15 nt, Vaccinia virus
aacagaaaaaacaau

SEQ ID NO: 4071271 - RNA, 20 nt, Vaccinia virus
aacagaugguagaacaaugu

SEQ ID NO: 4071272 - RNA, 15 nt, Vaccinia virus
aacaggaaagaagua

SEQ ID NO: 4071273 - RNA, 23 nt, Vaccinia virus
aacagugagaggaucgacuccau

SEQ ID NO: 4071274 - RNA, 15 nt, Vaccinia virus
aacagugaguuuauc

SEQ ID NO: 4071275 - RNA, 13 nt, Vaccinia virus
aacauaaaaauau

SEQ ID NO: 4071276 - RNA, 21 nt, Vaccinia virus
aacauaauuacgacgagcaua

SEQ ID NO: 4071277 - RNA, 17 nt, Vaccinia virus
aacauaauuuucuaaua

SEQ ID NO: 4071278 - RNA, 22 nt, Vaccinia virus
aacauacuauuguuuauuaucu

SEQ ID NO: 4071279 - RNA, 17 nt, Vaccinia virus
aacauauaauuauaaga

SEQ ID NO: 4071280 - RNA, 19 nt, Vaccinia virus
aacauauucuaugaauuua

SEQ ID NO: 4071281 - RNA, 15 nt, Vaccinia virus
aacaucagaaaaugu

SEQ ID NO: 4071282 - RNA, 15 nt, Vaccinia virus
aacaucuaacuauau

SEQ ID NO: 4071283 - RNA, 16 nt, Vaccinia virus
aacaucucucauaaga

SEQ ID NO: 4071284 - RNA, 15 nt, Vaccinia virus
aacaucuuaaaaauu

SEQ ID NO: 4071285 - RNA, 20 nt, Vaccinia virus
aacaucuugauacuuuuucu

SEQ ID NO: 4071286 - RNA, 21 nt, Vaccinia virus
aacaucuuuguaaacagauau

SEQ ID NO: 4071287 - RNA, 19 nt, Vaccinia virus
aacaugaauuuauuucuaa

SEQ ID NO: 4071288 - RNA, 14 nt, Vaccinia virus
aacauguagauuua

SEQ ID NO: 4071289 - RNA, 17 nt, Vaccinia virus
aacaugucuucuauucu

SEQ ID NO: 4071290 - RNA, 13 nt, Vaccinia virus
aacauguuaaaau

SEQ ID NO: 4071291 - RNA, 18 nt, Vaccinia virus
aacauuaaccguuucauc

SEQ ID NO: 4071292 - RNA, 21 nt, Vaccinia virus
aacauuauaauaaucaauaau

SEQ ID NO: 4071293 - RNA, 16 nt, Vaccinia virus
aacauuuccuacuacu

SEQ ID NO: 4071294 - RNA, 17 nt, Vaccinia virus
aacauuuuauuucuaga

SEQ ID NO: 4071295 - RNA, 20 nt, Vaccinia virus
aacauuuugcagaaaaaagu

SEQ ID NO: 4071296 - RNA, 16 nt, Vaccinia virus
aaccaccgaugaugcg

SEQ ID NO: 4071297 - RNA, 15 nt, Vaccinia virus
aaccagaaguuuuau

SEQ ID NO: 4071298 - RNA, 22 nt, Vaccinia virus
aaccaguaucucuuaacgaugu

SEQ ID NO: 4071299 - RNA, 21 nt, Vaccinia virus
aaccauccguuaucgaagaau

SEQ ID NO: 4071300 - RNA, 14 nt, Vaccinia virus
aaccuagaaaauau

SEQ ID NO: 4071301 - RNA, 16 nt, Vaccinia virus
aaccugaucuggaaaa

SEQ ID NO: 4071302 - RNA, 18 nt, Vaccinia virus
aaccugauuauauagaua

SEQ ID NO: 4071303 - RNA, 16 nt, Vaccinia virus
aacgaaaaauuaucgu

SEQ ID NO: 4071304 - RNA, 14 nt, Vaccinia virus
aacgaaauuauacu

SEQ ID NO: 4071305 - RNA, 20 nt, Vaccinia virus
aacgaacgaggugugaaugu

SEQ ID NO: 4071306 - RNA, 15 nt, Vaccinia virus
aacgaauaaacaauu

SEQ ID NO: 4071307 - RNA, 13 nt, Vaccinia virus
aacgaauuaucgu

SEQ ID NO: 4071308 - RNA, 18 nt, Vaccinia virus
aacgacguagauaguaau

SEQ ID NO: 4071309 - RNA, 18 nt, Vaccinia virus
aacgauaacacaaaaugu

SEQ ID NO: 4071310 - RNA, 22 nt, Vaccinia virus
uuaguucaaucuacgaauguau

SEQ ID NO: 4071311 - RNA, 18 nt, Vaccinia virus
uuaguuuuuuucucucaa

SEQ ID NO: 4071312 - RNA, 20 nt, Vaccinia virus
uuauaaaaaaaucauuucga

SEQ ID NO: 4071313 - RNA, 19 nt, Vaccinia virus
uuauaaacggguguaaaca

SEQ ID NO: 4071314 - RNA, 22 nt, Vaccinia virus
uuauaaagaccgaauacauaac

SEQ ID NO: 4071315 - RNA, 18 nt, Vaccinia virus
uuauaaaguuuagucucu

SEQ ID NO: 4071316 - RNA, 15 nt, Vaccinia virus
uuauaacucuagaau

SEQ ID NO: 4071317 - RNA, 21 nt, Vaccinia virus
uuauaauagguguaaaucuag

SEQ ID NO: 4071318 - RNA, 18 nt, Vaccinia virus
uuauaaugaauauuauua

SEQ ID NO: 4071319 - RNA, 14 nt, Vaccinia virus
uuauacacugguua

SEQ ID NO: 4071320 - RNA, 18 nt, Vaccinia virus
uuauacagaguauguaaa

SEQ ID NO: 4071321 - RNA, 17 nt, Vaccinia virus
uuauacauccuguucua

SEQ ID NO: 4071322 - RNA, 23 nt, Vaccinia virus
uuauacgaauaucguucucuaaa

SEQ ID NO: 4071323 - RNA, 20 nt, Vaccinia virus
uuauacgcauaaauuguaaa

SEQ ID NO: 4071324 - RNA, 21 nt, Vaccinia virus
uuauacggcuacaauuucaua

SEQ ID NO: 4071325 - RNA, 16 nt, Vaccinia virus
uuauacuauuacuauu

SEQ ID NO: 4071326 - RNA, 16 nt, Vaccinia virus
uuauaguuaacauuuu

SEQ ID NO: 4071327 - RNA, 13 nt, Vaccinia virus
uuauauaauguau

SEQ ID NO: 4071328 - RNA, 15 nt, Vaccinia virus
uuauauaauuuuugg

SEQ ID NO: 4071329 - RNA, 19 nt, Vaccinia virus
aaaauuuauaacauugucc

SEQ ID NO: 4071330 - RNA, 20 nt, Vaccinia virus
aaaauuuuuuagauguagua

SEQ ID NO: 4071331 - RNA, 12 nt, Vaccinia virus
aaacaaaaaacu

SEQ ID NO: 4071332 - RNA, 16 nt, Vaccinia virus
aaacaaaauuagaaag

SEQ ID NO: 4071333 - RNA, 18 nt, Vaccinia virus
aaacaaguuuucauauua

SEQ ID NO: 4071334 - RNA, 13 nt, Vaccinia virus
aaacaauguuaug

SEQ ID NO: 4071335 - RNA, 14 nt, Vaccinia virus
aaacauaaaaaaca

SEQ ID NO: 4071336 - RNA, 14 nt, Vaccinia virus
aaacauaaaauaac

SEQ ID NO: 4071337 - RNA, 13 nt, Vaccinia virus
aaacauaugccau

SEQ ID NO: 4071338 - RNA, 13 nt, Vaccinia virus
aaacaugugguau

SEQ ID NO: 4071339 - RNA, 12 nt, Vaccinia virus
aaacauuacaaa

SEQ ID NO: 4071340 - RNA, 21 nt, Vaccinia virus
aaacauugacggauaaaacaa

SEQ ID NO: 4071341 - RNA, 19 nt, Vaccinia virus
aaacauuguucaugauaua

SEQ ID NO: 4071342 - RNA, 22 nt, Vaccinia virus
aaacauuuuauauacuuuucua

SEQ ID NO: 4071343 - RNA, 11 nt, Vaccinia virus
aaaccaaaucu

SEQ ID NO: 4071344 - RNA, 14 nt, Vaccinia virus
aaaccaaaucuuga

SEQ ID NO: 4071345 - RNA, 21 nt, Vaccinia virus
aaaccaaggacuuuguagaaa

SEQ ID NO: 4071346 - RNA, 22 nt, Vaccinia virus
aaaccauguugugaaagaguuu

SEQ ID NO: 4071347 - RNA, 23 nt, Vaccinia virus
aaaccuuugacuaguuguagaau

SEQ ID NO: 4071348 - RNA, 14 nt, Vaccinia virus
aaacgaaagacugu

SEQ ID NO: 4071349 - RNA, 13 nt, Vaccinia virus
aaacgaacuauau

SEQ ID NO: 4071350 - RNA, 18 nt, Vaccinia virus
aaacgauuauuucugaau

SEQ ID NO: 4071351 - RNA, 19 nt, Vaccinia virus
aaacgauuuaauuacagag

SEQ ID NO: 4071352 - RNA, 20 nt, Vaccinia virus
aaacgcguuaguaaaacaug

SEQ ID NO: 4071353 - RNA, 19 nt, Vaccinia virus
aaacgcuauaaaaaacaua

SEQ ID NO: 4071354 - RNA, 18 nt, Vaccinia virus
aaacgcucuacgaauauc

SEQ ID NO: 4071355 - RNA, 17 nt, Vaccinia virus
aaacgucguauguagaa

SEQ ID NO: 4071356 - RNA, 19 nt, Vaccinia virus
aaacguuuggaaacuauac

SEQ ID NO: 4071357 - RNA, 14 nt, Vaccinia virus
aaacuaaacuuauu

SEQ ID NO: 4071358 - RNA, 15 nt, Vaccinia virus
aaacuaauucauuuu

SEQ ID NO: 4071359 - RNA, 14 nt, Vaccinia virus
aaacuaauucuguc

SEQ ID NO: 4071360 - RNA, 20 nt, Vaccinia virus
aaacuagagaaacuuaguac

SEQ ID NO: 4071361 - RNA, 12 nt, Vaccinia virus
aaacuaguagaa

SEQ ID NO: 4071362 - RNA, 21 nt, Vaccinia virus
aaacuaucuuuuuaggaaugu

SEQ ID NO: 4071363 - RNA, 20 nt, Vaccinia virus
aaacucuguuguauaucuac

SEQ ID NO: 4071364 - RNA, 12 nt, Vaccinia virus
aaacugaauaua

SEQ ID NO: 4071365 - RNA, 20 nt, Vaccinia virus
aaacugaaucuaacaaagag

SEQ ID NO: 4071366 - RNA, 14 nt, Vaccinia virus
aaacugguaaucca

SEQ ID NO: 4071367 - RNA, 24 nt, Vaccinia virus
aaacugguaauccacauaguugua

SEQ ID NO: 4071368 - RNA, 18 nt, Vaccinia virus
aaacugguuaaaacagua

SEQ ID NO: 4071369 - RNA, 16 nt, Vaccinia virus
aaacuguuuaagaaaa

SEQ ID NO: 4071370 - RNA, 19 nt, Vaccinia virus
aaacuuaaucuuauuagaa

SEQ ID NO: 4071371 - RNA, 20 nt, Vaccinia virus
aaacuuauacauccuguucu

SEQ ID NO: 4071372 - RNA, 19 nt, Vaccinia virus
aaacuucguaaaauauucu

SEQ ID NO: 4071373 - RNA, 14 nt, Vaccinia virus
aaacuuuaauaaca

SEQ ID NO: 4071374 - RNA, 17 nt, Vaccinia virus
aaagaaaauaucuauau

SEQ ID NO: 4071375 - RNA, 15 nt, Vaccinia virus
aaagaaaauauggaa

SEQ ID NO: 4071376 - RNA, 18 nt, Vaccinia virus
aaagaaacugucaucuau

SEQ ID NO: 4071377 - RNA, 21 nt, Vaccinia virus
aaagaagaagaucauacaguc

SEQ ID NO: 4071378 - RNA, 14 nt, Vaccinia virus
aaagaaguauacua

SEQ ID NO: 4071379 - RNA, 16 nt, Vaccinia virus
aaagaaguuguaucau

SEQ ID NO: 4071380 - RNA, 16 nt, Vaccinia virus
aaagacuaugcaaaga

SEQ ID NO: 4071381 - RNA, 16 nt, Vaccinia virus
aaagagaauuauauau

SEQ ID NO: 4071382 - RNA, 18 nt, Vaccinia virus
aaagauaauacauuuucu

SEQ ID NO: 4071383 - RNA, 12 nt, Vaccinia virus
aaagauguuauu

SEQ ID NO: 4071384 - RNA, 16 nt, Vaccinia virus
aaagauuaauuauccg

SEQ ID NO: 4071385 - RNA, 22 nt, Vaccinia virus
aaagauucuauaauaaugaaug

SEQ ID NO: 4071386 - RNA, 13 nt, Vaccinia virus
aaagcaaaauggu

SEQ ID NO: 4071387 - RNA, 19 nt, Vaccinia virus
aaagcaagaccaaacaccg

SEQ ID NO: 4071388 - RNA, 16 nt, Vaccinia virus
aaagcaauuauuacaa

SEQ ID NO: 4071389 - RNA, 16 nt, Vaccinia virus
aaagcaucacagaauc

SEQ ID NO: 4071390 - RNA, 22 nt, Vaccinia virus
aaagcggauauaccuagcaaac

SEQ ID NO: 4071391 - RNA, 19 nt, Vaccinia virus
aaaggauacuaaacauugu

SEQ ID NO: 4071392 - RNA, 13 nt, Vaccinia virus
aaaggauauuaug

SEQ ID NO: 4071393 - RNA, 16 nt, Vaccinia virus
aaagggauaacauguu

SEQ ID NO: 4071394 - RNA, 18 nt, Vaccinia virus
aaagggauauauauugua

SEQ ID NO: 4071395 - RNA, 15 nt, Vaccinia virus
aaagguauacgaaug

SEQ ID NO: 4071396 - RNA, 14 nt, Vaccinia virus
aaaguaauaaucuu

SEQ ID NO: 4071397 - RNA, 14 nt, Vaccinia virus
aaaguaauucauua

SEQ ID NO: 4071398 - RNA, 22 nt, Vaccinia virus
aaaguaguucaacauaauauua

SEQ ID NO: 4071399 - RNA, 13 nt, Vaccinia virus
aaagucaucucuu

SEQ ID NO: 4071400 - RNA, 23 nt, Vaccinia virus
aaagucguuuauaucacauugua

SEQ ID NO: 4071401 - RNA, 22 nt, Vaccinia virus
aaagugaucacgaguuuguaaa

SEQ ID NO: 4071402 - RNA, 12 nt, Vaccinia virus
aaaguuaaaagu

SEQ ID NO: 4071403 - RNA, 14 nt, Vaccinia virus
aaaguuaagaucug

SEQ ID NO: 4071404 - RNA, 23 nt, Vaccinia virus
aaaguuaauauuuucuaugagcu

SEQ ID NO: 4071405 - RNA, 16 nt, Vaccinia virus
aaaguuaaucauauag

SEQ ID NO: 4071406 - RNA, 23 nt, Vaccinia virus
aaaguuuuuccaauuauauggua

SEQ ID NO: 4071407 - RNA, 22 nt, Vaccinia virus
aaauaaaacagggauucguuua

SEQ ID NO: 4071408 - RNA, 22 nt, Vaccinia virus
aaauaaaauauaaaauauugga

SEQ ID NO: 4071409 - RNA, 20 nt, Vaccinia virus
aaauaacauauagauuuuau

SEQ ID NO: 4071410 - RNA, 12 nt, Vaccinia virus
aaauaacauuua

SEQ ID NO: 4071411 - RNA, 21 nt, Vaccinia virus
aaauaacgucuucuauguauu

SEQ ID NO: 4071412 - RNA, 20 nt, Vaccinia virus
aaauaaguaguaauaaugau

SEQ ID NO: 4071413 - RNA, 19 nt, Vaccinia virus
aaauaauacgaauauauca

SEQ ID NO: 4071414 - RNA, 22 nt, Vaccinia virus
aaauaauagggauaaaguucau

SEQ ID NO: 4071415 - RNA, 21 nt, Vaccinia virus
aaauaauagguuguaauauca

SEQ ID NO: 4071416 - RNA, 16 nt, Vaccinia virus
aaauacaccaaauaua

SEQ ID NO: 4071417 - RNA, 20 nt, Vaccinia virus
aaauacauaugacaaacauu

SEQ ID NO: 4071418 - RNA, 17 nt, Vaccinia virus
aaauaccauaaauauau

SEQ ID NO: 4071419 - RNA, 18 nt, Vaccinia virus
aaauaccuuuaacuauau

SEQ ID NO: 4071420 - RNA, 19 nt, Vaccinia virus
aaauacguucuauugugua

SEQ ID NO: 4071421 - RNA, 16 nt, Vaccinia virus
aaauagauagaaucua

SEQ ID NO: 4071422 - RNA, 12 nt, Vaccinia virus
aaauagauguua

SEQ ID NO: 4071423 - RNA, 18 nt, Vaccinia virus
aaauaggaucaucuauca

SEQ ID NO: 4071424 - RNA, 14 nt, Vaccinia virus
aaauagggauguuu

SEQ ID NO: 4071425 - RNA, 21 nt, Vaccinia virus
aaauauaaaacuugucuguau

SEQ ID NO: 4071426 - RNA, 15 nt, Vaccinia virus
aaauauaauaacgau

SEQ ID NO: 4071427 - RNA, 15 nt, Vaccinia virus
aaauauacagcaaug

SEQ ID NO: 4071428 - RNA, 22 nt, Vaccinia virus
aaauauaguagaauuucauuuu

SEQ ID NO: 4071429 - RNA, 18 nt, Vaccinia virus
aaauauaugcucauauau

SEQ ID NO: 4071430 - RNA, 21 nt, Vaccinia virus
aaauauauuaauccacuauau

SEQ ID NO: 4071431 - RNA, 15 nt, Vaccinia virus
aaauaucaauuauau

SEQ ID NO: 4071432 - RNA, 14 nt, Vaccinia virus
aaauauguaauaau

SEQ ID NO: 4071433 - RNA, 13 nt, Vaccinia virus
aaauauguagaaa

SEQ ID NO: 4071434 - RNA, 13 nt, Vaccinia virus
aaaauauuuuacu

SEQ ID NO: 4071435 - RNA, 19 nt, Vaccinia virus
aaaaucaggguuaucaaag

SEQ ID NO: 4071436 - RNA, 22 nt, Vaccinia virus
aaaaucuucaagagugcauuga

SEQ ID NO: 4071437 - RNA, 15 nt, Vaccinia virus
aaaaugauagaaaua

SEQ ID NO: 4071438 - RNA, 23 nt, Vaccinia virus
aaaaugcccaacaggaucauuug

SEQ ID NO: 4071439 - RNA, 15 nt, Vaccinia virus
aaaaugcuaauauua

SEQ ID NO: 4071440 - RNA, 17 nt, Vaccinia virus
aaaaugguaaacuuuug

SEQ ID NO: 4071441 - RNA, 20 nt, Vaccinia virus
aaaauguucuuaauagucua

SEQ ID NO: 4071442 - RNA, 13 nt, Vaccinia virus
aaaauuaguagaa

SEQ ID NO: 4071443 - RNA, 16 nt, Vaccinia virus
aaaauuaguagaauca

SEQ ID NO: 4071444 - RNA, 18 nt, Vaccinia virus
aaaauuauugauauguau

SEQ ID NO: 4071445 - RNA, 16 nt, Vaccinia virus
aaaauucguuagaaua

SEQ ID NO: 4071446 - RNA, 15 nt, Vaccinia virus
aaaauugauggauga

SEQ ID NO: 4071447 - RNA, 12 nt, Vaccinia virus
aauucuuucuca

SEQ ID NO: 4071448 - RNA, 22 nt, Vaccinia virus
aauugaacaaaguauucuuaug

SEQ ID NO: 4071449 - RNA, 16 nt, Vaccinia virus
aauugaaucuuaguaa

SEQ ID NO: 4071450 - RNA, 15 nt, Vaccinia virus
aauugaauugaugau

SEQ ID NO: 4071451 - RNA, 16 nt, Vaccinia virus
aauugauaauauaaau

SEQ ID NO: 4071452 - RNA, 14 nt, Vaccinia virus
aauugauucuauga

SEQ ID NO: 4071453 - RNA, 22 nt, Vaccinia virus
aauugauucuuauucacuauau

SEQ ID NO: 4071454 - RNA, 15 nt, Vaccinia virus
aauugcaguaucuau

SEQ ID NO: 4071455 - RNA, 15 nt, Vaccinia virus
aauugcgaauguuuu

SEQ ID NO: 4071456 - RNA, 19 nt, Vaccinia virus
aauuguauuauugauacaa

SEQ ID NO: 4071457 - RNA, 15 nt, Vaccinia virus
aauuguuguauuuau

SEQ ID NO: 4071458 - RNA, 19 nt, Vaccinia virus
aauuguuuacuguauauac

SEQ ID NO: 4071459 - RNA, 15 nt, Vaccinia virus
aauuguuugagauau

SEQ ID NO: 4071460 - RNA, 13 nt, Vaccinia virus
aauuuaaaauaua

SEQ ID NO: 4071461 - RNA, 14 nt, Vaccinia virus
aauuuaaagaaugu

SEQ ID NO: 4071462 - RNA, 17 nt, Vaccinia virus
aauuuaugaagauguua

SEQ ID NO: 4071463 - RNA, 18 nt, Vaccinia virus
aauuuauuaauacaggau

SEQ ID NO: 4071464 - RNA, 12 nt, Vaccinia virus
aauuuauuucuu

SEQ ID NO: 4071465 - RNA, 18 nt, Vaccinia virus
aauuuauuugauaaagga

SEQ ID NO: 4071466 - RNA, 15 nt, Vaccinia virus
aauuucauuuuguuu

SEQ ID NO: 4071467 - RNA, 23 nt, Vaccinia virus
aauuucucucaucuguaggauau

SEQ ID NO: 4071468 - RNA, 11 nt, Vaccinia virus
aauuuguacau

SEQ ID NO: 4071469 - RNA, 13 nt, Vaccinia virus
aauuuguuaaaaa

SEQ ID NO: 4071470 - RNA, 15 nt, Vaccinia virus
aauuuguucaaaaua

SEQ ID NO: 4071471 - RNA, 17 nt, Vaccinia virus
aauuuuaagaaauggug

SEQ ID NO: 4071472 - RNA, 20 nt, Vaccinia virus
aauuuucacaaguaugaaga

SEQ ID NO: 4071473 - RNA, 14 nt, Vaccinia virus
aauuuugaagcauu

SEQ ID NO: 4071474 - RNA, 12 nt, Vaccinia virus
aauuuuuagagg

SEQ ID NO: 4071475 - RNA, 15 nt, Vaccinia virus
aauuuuuaguuuaua

SEQ ID NO: 4071476 - RNA, 16 nt, Vaccinia virus
aauuuuuguuuccguu

SEQ ID NO: 4071477 - RNA, 18 nt, Vaccinia virus
aauuuuuucuacagauau

SEQ ID NO: 4071478 - RNA, 13 nt, Vaccinia virus
acaaaaaaguuau

SEQ ID NO: 4071479 - RNA, 15 nt, Vaccinia virus
acaaaaauacauaaa

SEQ ID NO: 4071480 - RNA, 21 nt, Vaccinia virus
acaaaaauugucacuuuguua

SEQ ID NO: 4071481 - RNA, 13 nt, Vaccinia virus
acaaaagugaaua

SEQ ID NO: 4071482 - RNA, 13 nt, Vaccinia virus
acaaaauacauaa

SEQ ID NO: 4071483 - RNA, 14 nt, Vaccinia virus
acaaaauacauaau

SEQ ID NO: 4071484 - RNA, 19 nt, Vaccinia virus
acaaaaucaacuacauaau

SEQ ID NO: 4071485 - RNA, 20 nt, Vaccinia virus
acaaaaucaucugauaauuu

SEQ ID NO: 4071486 - RNA, 15 nt, Vaccinia virus
acaaaaucuaaacaa

SEQ ID NO: 4071487 - RNA, 21 nt, Vaccinia virus
acaaaauucaaggaaagaaua

SEQ ID NO: 4071488 - RNA, 17 nt, Vaccinia virus
acaaaauucagauucua

SEQ ID NO: 4071489 - RNA, 20 nt, Vaccinia virus
acaaacaagcaucaugaaua

SEQ ID NO: 4071490 - RNA, 18 nt, Vaccinia virus
acaaacgcuacuauauau

SEQ ID NO: 4071491 - RNA, 13 nt, Vaccinia virus
acaaacuauacaa

SEQ ID NO: 4071492 - RNA, 22 nt, Vaccinia virus
acaaacuguucucuuaugaauc

SEQ ID NO: 4071493 - RNA, 17 nt, Vaccinia virus
acaaagauaaaaaccac

SEQ ID NO: 4071494 - RNA, 18 nt, Vaccinia virus
acaaagauggucuaaaau

SEQ ID NO: 4071495 - RNA, 18 nt, Vaccinia virus
acaaagcacucaauaaau

SEQ ID NO: 4071496 - RNA, 17 nt, Vaccinia virus
acaaauaguaaaugaga

SEQ ID NO: 4071497 - RNA, 16 nt, Vaccinia virus
acaaauaguaauacau

SEQ ID NO: 4071498 - RNA, 18 nt, Vaccinia virus
acaaaucuauuuggauuu

SEQ ID NO: 4071499 - RNA, 14 nt, Vaccinia virus
acaaaucuggaaaa

SEQ ID NO: 4071500 - RNA, 17 nt, Vaccinia virus
acaaauggucaaugaua

SEQ ID NO: 4071501 - RNA, 19 nt, Vaccinia virus
acaaauuaaacucuggaau

SEQ ID NO: 4071502 - RNA, 19 nt, Vaccinia virus
acaaauucuauauauguuu

SEQ ID NO: 4071503 - RNA, 14 nt, Vaccinia virus
acaacaaaauaaua

SEQ ID NO: 4071504 - RNA, 21 nt, Vaccinia virus
acaacaacgaaccaaaaugaa

SEQ ID NO: 4071505 - RNA, 18 nt, Vaccinia virus
acaacaaugucucgaaau

SEQ ID NO: 4071506 - RNA, 22 nt, Vaccinia virus
acaacaccuaugauaaaggaga

SEQ ID NO: 4071507 - RNA, 18 nt, Vaccinia virus
acaacaggaugaauccau

SEQ ID NO: 4071508 - RNA, 16 nt, Vaccinia virus
acaacauuccaaagau

SEQ ID NO: 4071509 - RNA, 18 nt, Vaccinia virus
acaaccgcuuagaaauaa

SEQ ID NO: 4071510 - RNA, 16 nt, Vaccinia virus
acaaccucauacuacu

SEQ ID NO: 4071511 - RNA, 16 nt, Vaccinia virus
uauaagauuguagaau

SEQ ID NO: 4071512 - RNA, 14 nt, Vaccinia virus
uauaaguagauguu

SEQ ID NO: 4071513 - RNA, 19 nt, Vaccinia virus
uauaauaaacuuuaaugau

SEQ ID NO: 4071514 - RNA, 15 nt, Vaccinia virus
uauaauaaauacuuu

SEQ ID NO: 4071515 - RNA, 20 nt, Vaccinia virus
uauaauacggacuucauaau

SEQ ID NO: 4071516 - RNA, 12 nt, Vaccinia virus
uauaauauccuc

SEQ ID NO: 4071517 - RNA, 16 nt, Vaccinia virus
uauaaucugaugaaca

SEQ ID NO: 4071518 - RNA, 18 nt, Vaccinia virus
uauaaucugaugaacaau

SEQ ID NO: 4071519 - RNA, 22 nt, Vaccinia virus
uauaaucuuuuucaucuuguga

SEQ ID NO: 4071520 - RNA, 12 nt, Vaccinia virus
uauaauguuucc

SEQ ID NO: 4071521 - RNA, 13 nt, Vaccinia virus
uauaauguuuccu

SEQ ID NO: 4071522 - RNA, 18 nt, Vaccinia virus
uauaauuauauguagaag

SEQ ID NO: 4071523 - RNA, 15 nt, Vaccinia virus
uauaauucuuuggua

SEQ ID NO: 4071524 - RNA, 21 nt, Vaccinia virus
uauaauuuacagcuauagcau

SEQ ID NO: 4071525 - RNA, 15 nt, Vaccinia virus
uauaauuuuuggaca

SEQ ID NO: 4071526 - RNA, 20 nt, Vaccinia virus
uauacaaugaacuaauauga

SEQ ID NO: 4071527 - RNA, 16 nt, Vaccinia virus
uauacaauuguuugua

SEQ ID NO: 4071528 - RNA, 20 nt, Vaccinia virus
uauacacguuagauuauucu

SEQ ID NO: 4071529 - RNA, 23 nt, Vaccinia virus
uauacagugaacacacaauaagc

SEQ ID NO: 4071530 - RNA, 22 nt, Vaccinia virus
uauacauguuagagaauauuca

SEQ ID NO: 4071531 - RNA, 17 nt, Vaccinia virus
uauaccaauauuauucu

SEQ ID NO: 4071532 - RNA, 17 nt, Vaccinia virus
uauaccugccuagaaau

SEQ ID NO: 4071533 - RNA, 19 nt, Vaccinia virus
uauacgaaauaaauauuca

SEQ ID NO: 4071534 - RNA, 16 nt, Vaccinia virus
uauacguacuuaacau

SEQ ID NO: 4071535 - RNA, 15 nt, Vaccinia virus
uauacuaucgaugau

SEQ ID NO: 4071536 - RNA, 18 nt, Vaccinia virus
uauacuccucauuaacau

SEQ ID NO: 4071537 - RNA, 16 nt, Vaccinia virus
uauacucuuauuauca

SEQ ID NO: 4071538 - RNA, 13 nt, Vaccinia virus
uauacuucuccaa

SEQ ID NO: 4071539 - RNA, 23 nt, Vaccinia virus
uauagauaaagaguccuauauau

SEQ ID NO: 4071540 - RNA, 17 nt, Vaccinia virus
uauagaucaaacaacac

SEQ ID NO: 4071541 - RNA, 20 nt, Vaccinia virus
gaaguuuaauaauacaauau

SEQ ID NO: 4071542 - RNA, 19 nt, Vaccinia virus
gaaguuuuaaaaauacuua

SEQ ID NO: 4071543 - RNA, 21 nt, Vaccinia virus
gaauaaggaauauacuaauca

SEQ ID NO: 4071544 - RNA, 13 nt, Vaccinia virus
gaauaaguuuauu

SEQ ID NO: 4071545 - RNA, 16 nt, Vaccinia virus
gaauaaucguuauuau

SEQ ID NO: 4071546 - RNA, 18 nt, Vaccinia virus
gaauaauuggaacacaag

SEQ ID NO: 4071547 - RNA, 14 nt, Vaccinia virus
gaauagauaauaau

SEQ ID NO: 4071548 - RNA, 22 nt, Vaccinia virus
gaauagucucuguaaucacugc

SEQ ID NO: 4071549 - RNA, 19 nt, Vaccinia virus
gaauaguuuguuuuggaaa

SEQ ID NO: 4071550 - RNA, 18 nt, Vaccinia virus
gaauauaaaaaauuuaua

SEQ ID NO: 4071551 - RNA, 20 nt, Vaccinia virus
gaauauacaaaguuaguaca

SEQ ID NO: 4071552 - RNA, 19 nt, Vaccinia virus
gaauauacuucauaaaaga

SEQ ID NO: 4071553 - RNA, 20 nt, Vaccinia virus
gaauauacuucauaaaagaa

SEQ ID NO: 4071554 - RNA, 18 nt, Vaccinia virus
gaauauagaaauaaugau

SEQ ID NO: 4071555 - RNA, 15 nt, Vaccinia virus
gaauauauguuuaua

SEQ ID NO: 4071556 - RNA, 18 nt, Vaccinia virus
gaauaucauuaacgauau

SEQ ID NO: 4071557 - RNA, 17 nt, Vaccinia virus
gaauauguuauaaauuu

SEQ ID NO: 4071558 - RNA, 12 nt, Vaccinia virus
gaauauugauuu

SEQ ID NO: 4071559 - RNA, 18 nt, Vaccinia virus
gaauauugauuuacuaaa

SEQ ID NO: 4071560 - RNA, 22 nt, Vaccinia virus
gaauauuuaauuuggucauuau

SEQ ID NO: 4071561 - RNA, 18 nt, Vaccinia virus
gaauauuucgauaaugaa

SEQ ID NO: 4071562 - RNA, 19 nt, Vaccinia virus
gaauauuucgauaaugaac

SEQ ID NO: 4071563 - RNA, 13 nt, Vaccinia virus
gaaucaguauaua

SEQ ID NO: 4071564 - RNA, 15 nt, Vaccinia virus
gaauccgugauuuug

SEQ ID NO: 4071565 - RNA, 16 nt, Vaccinia virus
gaaucgauaacucuau

SEQ ID NO: 4071566 - RNA, 13 nt, Vaccinia virus
gaaucguauauau

SEQ ID NO: 4071567 - RNA, 15 nt, Vaccinia virus
gaaucuaaugaugac

SEQ ID NO: 4071568 - RNA, 19 nt, Vaccinia virus
gaaucuagauuccaaucau

SEQ ID NO: 4071569 - RNA, 13 nt, Vaccinia virus
gaaucuucccaua

SEQ ID NO: 4071570 - RNA, 14 nt, Vaccinia virus
gaaugaauaugaau

SEQ ID NO: 4071571 - RNA, 16 nt, Vaccinia virus
gaaugacgaauccugu

SEQ ID NO: 4071572 - RNA, 21 nt, Vaccinia virus
gaaugcucggcaauaacuaau

SEQ ID NO: 4071573 - RNA, 18 nt, Vaccinia virus
gaauggcguuugauauau

SEQ ID NO: 4071574 - RNA, 15 nt, Vaccinia virus
gaauguaucaagaau

SEQ ID NO: 4071575 - RNA, 15 nt, Vaccinia virus
gaauguguacuaucu

SEQ ID NO: 4071576 - RNA, 17 nt, Vaccinia virus
gaauguuuuacucugga

SEQ ID NO: 4071577 - RNA, 12 nt, Vaccinia virus
gaauuaauacau

SEQ ID NO: 4071578 - RNA, 17 nt, Vaccinia virus
gaauuaauguaaucauu

SEQ ID NO: 4071579 - RNA, 16 nt, Vaccinia virus
gaauuacauagaugau

SEQ ID NO: 4071580 - RNA, 20 nt, Vaccinia virus
gaauuagucgucgaauauau

SEQ ID NO: 4071581 - RNA, 23 nt, Vaccinia virus
gaauuauaccgauagauaauggu

SEQ ID NO: 4071582 - RNA, 19 nt, Vaccinia virus
gaauuauuauuaauuauau

SEQ ID NO: 4071583 - RNA, 16 nt, Vaccinia virus
gaauuauuuacaaaau

SEQ ID NO: 4071584 - RNA, 17 nt, Vaccinia virus
gaauucgaggaagaugu

SEQ ID NO: 4071585 - RNA, 21 nt, Vaccinia virus
gaauucuuuuucgacuuuuug

SEQ ID NO: 4071586 - RNA, 19 nt, Vaccinia virus
gaauuggaauaccaaauau

SEQ ID NO: 4071587 - RNA, 15 nt, Vaccinia virus
gaauuuauuaauaca

SEQ ID NO: 4071588 - RNA, 12 nt, Vaccinia virus
gaauuucccaaa

SEQ ID NO: 4071589 - RNA, 20 nt, Vaccinia virus
gaauuugaucuauugcccua

SEQ ID NO: 4071590 - RNA, 17 nt, Vaccinia virus
gacaacaaaaaaugaau

SEQ ID NO: 4071591 - RNA, 21 nt, Vaccinia virus
gacaauaguuucuauacuguc

SEQ ID NO: 4071592 - RNA, 18 nt, Vaccinia virus
gacaccuaaaaagaaugu

SEQ ID NO: 4071593 - RNA, 17 nt, Vaccinia virus
gacacuaguuaagaaca

SEQ ID NO: 4071594 - RNA, 17 nt, Vaccinia virus
gacacuauuauuauuga

SEQ ID NO: 4071595 - RNA, 17 nt, Vaccinia virus
gacacuauucauguaau

SEQ ID NO: 4071596 - RNA, 22 nt, Vaccinia virus
gacacucuauaucuagaaauaa

SEQ ID NO: 4071597 - RNA, 15 nt, Vaccinia virus
gacagaaaaaugcua

SEQ ID NO: 4071598 - RNA, 19 nt, Vaccinia virus
gacagaagaauaugaugau

SEQ ID NO: 4071599 - RNA, 15 nt, Vaccinia virus
gacauagauauucua

SEQ ID NO: 4071600 - RNA, 22 nt, Vaccinia virus
gacaucgacgccuuagaaauaa

SEQ ID NO: 4071601 - RNA, 15 nt, Vaccinia virus
gacaugcaaaaaugc

SEQ ID NO: 4071602 - RNA, 17 nt, Vaccinia virus
gacaugcaauaaaucua

SEQ ID NO: 4071603 - RNA, 23 nt, Vaccinia virus
gacauucccacaguguugccauu

SEQ ID NO: 4071604 - RNA, 21 nt, Vaccinia virus
gacauuguaaaagacaaauau

SEQ ID NO: 4071605 - RNA, 20 nt, Vaccinia virus
gacauuguauuaugaugaau

SEQ ID NO: 4071606 - RNA, 22 nt, Vaccinia virus
gaccacacggagaacagaugac

SEQ ID NO: 4071607 - RNA, 20 nt, Vaccinia virus
gaccgaugaccauuuaaaaa

SEQ ID NO: 4071608 - RNA, 13 nt, Vaccinia virus
gaccuauaauuga

SEQ ID NO: 4071609 - RNA, 15 nt, Vaccinia virus
gaccuguugcacaau

SEQ ID NO: 4071610 - RNA, 22 nt, Vaccinia virus
gacgaguuucggcacauauuaa

SEQ ID NO: 4071611 - RNA, 20 nt, Vaccinia virus
gacgauauauaguaaugaag

SEQ ID NO: 4071612 - RNA, 22 nt, Vaccinia virus
gacgauauuagaugauaauuua

SEQ ID NO: 4071613 - RNA, 14 nt, Vaccinia virus
gacgauuucugaau

SEQ ID NO: 4071614 - RNA, 19 nt, Vaccinia virus
gacgcauuuaauagagaua

SEQ ID NO: 4071615 - RNA, 15 nt, Vaccinia virus
gacgcugucaguuau

SEQ ID NO: 4071616 - RNA, 12 nt, Vaccinia virus
gacguagaaaac

SEQ ID NO: 4071617 - RNA, 15 nt, Vaccinia virus
gacgucaaacaaugu

SEQ ID NO: 4071618 - RNA, 22 nt, Vaccinia virus
gacuaaauuagauuaugaggau

SEQ ID NO: 4071619 - RNA, 19 nt, Vaccinia virus
gacuacaaagaauguucua

SEQ ID NO: 4071620 - RNA, 19 nt, Vaccinia virus
gacuagauccguuaguuua

SEQ ID NO: 4071621 - RNA, 14 nt, Vaccinia virus
gacuagcauauuau

SEQ ID NO: 4071622 - RNA, 14 nt, Vaccinia virus
gacuauaacagaua

SEQ ID NO: 4071623 - RNA, 20 nt, Vaccinia virus
gacuaucaacaauuuuguau

SEQ ID NO: 4071624 - RNA, 15 nt, Vaccinia virus
gacuccuuucuaaua

SEQ ID NO: 4071625 - RNA, 23 nt, Vaccinia virus
gacucucaguaagaguuaugaau

SEQ ID NO: 4071626 - RNA, 16 nt, Vaccinia virus
gacuucuaacaaacau

SEQ ID NO: 4071627 - RNA, 19 nt, Vaccinia virus
gacuugucaaaucuauaua

SEQ ID NO: 4071628 - RNA, 18 nt, Vaccinia virus
gacuuuaaacagaaauau

SEQ ID NO: 4071629 - RNA, 24 nt, Vaccinia virus
guguuaaaugguucgauauaaagg

SEQ ID NO: 4071630 - RNA, 13 nt, Vaccinia virus
guguuauuuuuua

SEQ ID NO: 4071631 - RNA, 18 nt, Vaccinia virus
guuaaaauaucaugguua

SEQ ID NO: 4071632 - RNA, 13 nt, Vaccinia virus
guuaaaauuccua

SEQ ID NO: 4071633 - RNA, 18 nt, Vaccinia virus
guuaaacaauagauggau

SEQ ID NO: 4071634 - RNA, 17 nt, Vaccinia virus
guuaaacugugaauguc

SEQ ID NO: 4071635 - RNA, 20 nt, Vaccinia virus
guuaaagaaauuaauaaaga

SEQ ID NO: 4071636 - RNA, 18 nt, Vaccinia virus
guuaaagaucuuaagaaa

SEQ ID NO: 4071637 - RNA, 23 nt, Vaccinia virus
guuaaaugguucgauauaaagga

SEQ ID NO: 4071638 - RNA, 20 nt, Vaccinia virus
guuaaauguugguauaucaa

SEQ ID NO: 4071639 - RNA, 15 nt, Vaccinia virus
guuaagcauauccug

SEQ ID NO: 4071640 - RNA, 24 nt, Vaccinia virus
guuaauaucuauauauguauuuua

SEQ ID NO: 4071641 - RNA, 15 nt, Vaccinia virus
guuaaugaacaaauc

SEQ ID NO: 4071642 - RNA, 19 nt, Vaccinia virus
guuaauuuaucacauauca

SEQ ID NO: 4071643 - RNA, 13 nt, Vaccinia virus
guuaauuuuauca

SEQ ID NO: 4071644 - RNA, 10 nt, Vaccinia virus
guuacaaaag

SEQ ID NO: 4071645 - RNA, 18 nt, Vaccinia virus
guuacauuuauacuucuu

SEQ ID NO: 4071646 - RNA, 19 nt, Vaccinia virus
guuacauuuccaugucaau

SEQ ID NO: 4071647 - RNA, 13 nt, Vaccinia virus
guuacguauauau

SEQ ID NO: 4071648 - RNA, 13 nt, Vaccinia virus
guuacugauuuuu

SEQ ID NO: 4071649 - RNA, 19 nt, Vaccinia virus
guuagauaacucugcucca

SEQ ID NO: 4071650 - RNA, 21 nt, Vaccinia virus
guuagcaacgugauucaucaa

SEQ ID NO: 4071651 - RNA, 18 nt, Vaccinia virus
guuagcuguuuucaucaa

SEQ ID NO: 4071652 - RNA, 13 nt, Vaccinia virus
guuaguaaucaua

SEQ ID NO: 4071653 - RNA, 17 nt, Vaccinia virus
guuagugaugaauaucu

SEQ ID NO: 4071654 - RNA, 16 nt, Vaccinia virus
guuauaaacgggugua

SEQ ID NO: 4071655 - RNA, 14 nt, Vaccinia virus
guuauaauagagau

SEQ ID NO: 4071656 - RNA, 14 nt, Vaccinia virus
guuauaaucaaaga

SEQ ID NO: 4071657 - RNA, 15 nt, Vaccinia virus
guuauaguagauauc

SEQ ID NO: 4071658 - RNA, 18 nt, Vaccinia virus
guuauauuauuagauauc

SEQ ID NO: 4071659 - RNA, 21 nt, Vaccinia virus
guuauauuauuagauauccug

SEQ ID NO: 4071660 - RNA, 12 nt, Vaccinia virus
guuaucucagaa

SEQ ID NO: 4071661 - RNA, 16 nt, Vaccinia virus
guuauuaguacuauca

SEQ ID NO: 4071662 - RNA, 15 nt, Vaccinia virus
guuauuaucaucauu

SEQ ID NO: 4071663 - RNA, 16 nt, Vaccinia virus
guuauugguauuucuu

SEQ ID NO: 4071664 - RNA, 17 nt, Vaccinia virus
guucaaaacuuaaucuc

SEQ ID NO: 4071665 - RNA, 14 nt, Vaccinia virus
guucaaaauaaucc

SEQ ID NO: 4071666 - RNA, 21 nt, Vaccinia virus
guucacaaaaauacauaaaga

SEQ ID NO: 4071667 - RNA, 15 nt, Vaccinia virus
guucagaauauguua

SEQ ID NO: 4071668 - RNA, 16 nt, Vaccinia virus
guucagaggaugaaau

SEQ ID NO: 4071669 - RNA, 13 nt, Vaccinia virus
guucauaaucauc

SEQ ID NO: 4071670 - RNA, 16 nt, Vaccinia virus
guuccauaauaguuua

SEQ ID NO: 4071671 - RNA, 16 nt, Vaccinia virus
guuccggaucuauaga

SEQ ID NO: 4071672 - RNA, 23 nt, Vaccinia virus
guuccguuggaugguaauaaacu

SEQ ID NO: 4071673 - RNA, 16 nt, Vaccinia virus
guuccugaccauccau

SEQ ID NO: 4071674 - RNA, 23 nt, Vaccinia virus
guucuaacgccgaucucugaaug

SEQ ID NO: 4071675 - RNA, 21 nt, Vaccinia virus
guucuaucuucuaaaaaaucu

SEQ ID NO: 4071676 - RNA, 18 nt, Vaccinia virus
guucucaauauuacuuuu

SEQ ID NO: 4071677 - RNA, 15 nt, Vaccinia virus
guucucguucguaau

SEQ ID NO: 4071678 - RNA, 18 nt, Vaccinia virus
guucucuuugauaaaagu

SEQ ID NO: 4071679 - RNA, 17 nt, Vaccinia virus
guucugaaagagaugag

SEQ ID NO: 4071680 - RNA, 19 nt, Vaccinia virus
guucugauuuuaucuuuua

SEQ ID NO: 4071681 - RNA, 16 nt, Vaccinia virus
guucuuacacauauca

SEQ ID NO: 4071682 - RNA, 16 nt, Vaccinia virus
guucuugaucuuauua

SEQ ID NO: 4071683 - RNA, 15 nt, Vaccinia virus
guugaaauagaaaau

SEQ ID NO: 4071684 - RNA, 23 nt, Vaccinia virus
guugauguauugucguagaaaac

SEQ ID NO: 4071685 - RNA, 14 nt, Vaccinia virus
guuguauauuucuu

SEQ ID NO: 4071686 - RNA, 21 nt, Vaccinia virus
guuguuacuccauuauauauu

SEQ ID NO: 4071687 - RNA, 22 nt, Vaccinia virus
guuuaaaaacacacaguuugau

SEQ ID NO: 4071688 - RNA, 14 nt, Vaccinia virus
guuuaaaaauggug

SEQ ID NO: 4071689 - RNA, 18 nt, Vaccinia virus
guuuaaagauuucuuuuu

SEQ ID NO: 4071690 - RNA, 13 nt, Vaccinia virus
cauauuuugcaau

SEQ ID NO: 4071691 - RNA, 16 nt, Vaccinia virus
caucaaaauauguuuc

SEQ ID NO: 4071692 - RNA, 18 nt, Vaccinia virus
caucaacagucacauaau

SEQ ID NO: 4071693 - RNA, 20 nt, Vaccinia virus
caucauaugggaaucgaugu

SEQ ID NO: 4071694 - RNA, 16 nt, Vaccinia virus
caucauccauuaauau

SEQ ID NO: 4071695 - RNA, 21 nt, Vaccinia virus
caucaucguuacaauaaaaaa

SEQ ID NO: 4071696 - RNA, 16 nt, Vaccinia virus
cauccaugcagcauuu

SEQ ID NO: 4071697 - RNA, 20 nt, Vaccinia virus
caucccauauauuccaugaa

SEQ ID NO: 4071698 - RNA, 23 nt, Vaccinia virus
cauccuaagaugauaaaaaacuu

SEQ ID NO: 4071699 - RNA, 18 nt, Vaccinia virus
cauccucgacugaugugg

SEQ ID NO: 4071700 - RNA, 20 nt, Vaccinia virus
cauccuguggguuucucaua

SEQ ID NO: 4071701 - RNA, 15 nt, Vaccinia virus
caucgaagagcauuu

SEQ ID NO: 4071702 - RNA, 13 nt, Vaccinia virus
caucgaauacuuc

SEQ ID NO: 4071703 - RNA, 15 nt, Vaccinia virus
caucgauaguauaau

SEQ ID NO: 4071704 - RNA, 23 nt, Vaccinia virus
caucgauugugauuguauuuccu

SEQ ID NO: 4071705 - RNA, 20 nt, Vaccinia virus
caucggaaaaaaaucuuuuu

SEQ ID NO: 4071706 - RNA, 15 nt, Vaccinia virus
caucuaccaauucau

SEQ ID NO: 4071707 - RNA, 13 nt, Vaccinia virus
caucuaucgaugg

SEQ ID NO: 4071708 - RNA, 13 nt, Vaccinia virus
caucuauuccaaa

SEQ ID NO: 4071709 - RNA, 16 nt, Vaccinia virus
caucuauuuuaaauac

SEQ ID NO: 4071710 - RNA, 21 nt, Vaccinia virus
caucugauaauuuagauaauu

SEQ ID NO: 4071711 - RNA, 15 nt, Vaccinia virus
caucuggauuucaga

SEQ ID NO: 4071712 - RNA, 20 nt, Vaccinia virus
caucugggaauaaaauacua

SEQ ID NO: 4071713 - RNA, 21 nt, Vaccinia virus
caucuguuuccuauaaucguu

SEQ ID NO: 4071714 - RNA, 20 nt, Vaccinia virus
caucuucuuugauuaaugau

SEQ ID NO: 4071715 - RNA, 20 nt, Vaccinia virus
caugaagagauguuauauaa

SEQ ID NO: 4071716 - RNA, 16 nt, Vaccinia virus
caugaaggagauuuag

SEQ ID NO: 4071717 - RNA, 15 nt, Vaccinia virus
caugacguaaaugua

SEQ ID NO: 4071718 - RNA, 20 nt, Vaccinia virus
caugacuuaugaauacuaau

SEQ ID NO: 4071719 - RNA, 20 nt, Vaccinia virus
caugacuugguauuuggaaa

SEQ ID NO: 4071720 - RNA, 13 nt, Vaccinia virus
caugauaaacgaa

SEQ ID NO: 4071721 - RNA, 12 nt, Vaccinia virus
caugauagauuu

SEQ ID NO: 4071722 - RNA, 14 nt, Vaccinia virus
caugaugagauguu

SEQ ID NO: 4071723 - RNA, 17 nt, Vaccinia virus
caugcauucaaauggau

SEQ ID NO: 4071724 - RNA, 14 nt, Vaccinia virus
caugcucuauuuug

SEQ ID NO: 4071725 - RNA, 16 nt, Vaccinia virus
cauggaaaagaauuua

SEQ ID NO: 4071726 - RNA, 16 nt, Vaccinia virus
cauggaggaugcauua

SEQ ID NO: 4071727 - RNA, 21 nt, Vaccinia virus
cauggcaacggauuuaauuuu

SEQ ID NO: 4071728 - RNA, 15 nt, Vaccinia virus
caugguauauggaua

SEQ ID NO: 4071729 - RNA, 13 nt, Vaccinia virus
cauguacaugaau

SEQ ID NO: 4071730 - RNA, 18 nt, Vaccinia virus
cauguauacuugacaaaa

SEQ ID NO: 4071731 - RNA, 16 nt, Vaccinia virus
caugucgucuauuuuc

SEQ ID NO: 4071732 - RNA, 15 nt, Vaccinia virus
caugucuuagauguu

SEQ ID NO: 4071733 - RNA, 20 nt, Vaccinia virus
cauguggaucugaagaagag

SEQ ID NO: 4071734 - RNA, 22 nt, Vaccinia virus
cauguguagaugcuacuucauc

SEQ ID NO: 4071735 - RNA, 18 nt, Vaccinia virus
cauguguuucccaaacaa

SEQ ID NO: 4071736 - RNA, 21 nt, Vaccinia virus
cauguguuucccaaacaaaau

SEQ ID NO: 4071737 - RNA, 13 nt, Vaccinia virus
cauguuaaaaaug

SEQ ID NO: 4071738 - RNA, 21 nt, Vaccinia virus
cauguugaacauaaaacuaau

SEQ ID NO: 4071739 - RNA, 15 nt, Vaccinia virus
cauguugucuauuuc

SEQ ID NO: 4071740 - RNA, 15 nt, Vaccinia virus
cauguuuagaaagaa

SEQ ID NO: 4071741 - RNA, 17 nt, Vaccinia virus
cauguuuaucuauuuug

SEQ ID NO: 4071742 - RNA, 16 nt, Vaccinia virus
cauuaaaaugauuauu

SEQ ID NO: 4071743 - RNA, 19 nt, Vaccinia virus
cauuaaacgauuugaugag

SEQ ID NO: 4071744 - RNA, 18 nt, Vaccinia virus
cauuaaaucuauuauauu

SEQ ID NO: 4071745 - RNA, 14 nt, Vaccinia virus
cauuaagucauuaa

SEQ ID NO: 4071746 - RNA, 15 nt, Vaccinia virus
cauuaauaacauccu

SEQ ID NO: 4071747 - RNA, 20 nt, Vaccinia virus
cauuaauacagccuauuuuc

SEQ ID NO: 4071748 - RNA, 14 nt, Vaccinia virus
cauuaauacaguaa

SEQ ID NO: 4071749 - RNA, 23 nt, Vaccinia virus
cauuaauaggaaaagguggauuu

SEQ ID NO: 4071750 - RNA, 20 nt, Vaccinia virus
cauuaauauaugcucuagau

SEQ ID NO: 4071751 - RNA, 20 nt, Vaccinia virus
cauuaauaucuuuauaagag

SEQ ID NO: 4071752 - RNA, 18 nt, Vaccinia virus
cauuacagaaacuguaaa

SEQ ID NO: 4071753 - RNA, 15 nt, Vaccinia virus
cauuaccucaugaac

SEQ ID NO: 4071754 - RNA, 21 nt, Vaccinia virus
cauuacuaacuuuaucacaau

SEQ ID NO: 4071755 - RNA, 22 nt, Vaccinia virus
cauuacuaucuuuaacauaagu

SEQ ID NO: 4071756 - RNA, 18 nt, Vaccinia virus
cauuacuucuuccauguc

SEQ ID NO: 4071757 - RNA, 23 nt, Vaccinia virus
cauuacuucuuccauguccaaua

SEQ ID NO: 4071758 - RNA, 20 nt, Vaccinia virus
cauuagauauuauggcauug

SEQ ID NO: 4071759 - RNA, 15 nt, Vaccinia virus
cauuagguuaaauga

SEQ ID NO: 4071760 - RNA, 15 nt, Vaccinia virus
cauuaguaacagcuu

SEQ ID NO: 4071761 - RNA, 14 nt, Vaccinia virus
cauuauaaaaagug

SEQ ID NO: 4071762 - RNA, 21 nt, Vaccinia virus
cauuauacuuuuuuuuggaaa

SEQ ID NO: 4071763 - RNA, 11 nt, Vaccinia virus
cauuaugaauu

SEQ ID NO: 4071764 - RNA, 21 nt, Vaccinia virus
cauuauggauaaucuauuuac

SEQ ID NO: 4071765 - RNA, 19 nt, Vaccinia virus
cauuauuacauagauguau

SEQ ID NO: 4071766 - RNA, 20 nt, Vaccinia virus
augcuguuuuuuacuuugug

SEQ ID NO: 4071767 - RNA, 22 nt, Vaccinia virus
augcuugauaagauaaaaucua

SEQ ID NO: 4071768 - RNA, 13 nt, Vaccinia virus
auggaaaaaugac

SEQ ID NO: 4071769 - RNA, 21 nt, Vaccinia virus
auggaaacggaacagaaacua

SEQ ID NO: 4071770 - RNA, 13 nt, Vaccinia virus
auggaaaggaaac

SEQ ID NO: 4071771 - RNA, 20 nt, Vaccinia virus
auggaacaauaaaagagaau

SEQ ID NO: 4071772 - RNA, 20 nt, Vaccinia virus
auggaagaguuaaugaauau

SEQ ID NO: 4071773 - RNA, 18 nt, Vaccinia virus
auggaccaaauuaucauc

SEQ ID NO: 4071774 - RNA, 12 nt, Vaccinia virus
auggagcguaaa

SEQ ID NO: 4071775 - RNA, 16 nt, Vaccinia virus
auggaguauaaucuuu

SEQ ID NO: 4071776 - RNA, 20 nt, Vaccinia virus
auggauaauauuuguaaugg

SEQ ID NO: 4071777 - RNA, 23 nt, Vaccinia virus
auggauuaguuagacugaaugcu

SEQ ID NO: 4071778 - RNA, 14 nt, Vaccinia virus
auggcaacgacuau

SEQ ID NO: 4071779 - RNA, 21 nt, Vaccinia virus
auggcaucuauuuuaaauaca

SEQ ID NO: 4071780 - RNA, 16 nt, Vaccinia virus
auggcauugauaaugu

SEQ ID NO: 4071781 - RNA, 16 nt, Vaccinia virus
augggucauagaauuu

SEQ ID NO: 4071782 - RNA, 14 nt, Vaccinia virus
augguaaaagaaau

SEQ ID NO: 4071783 - RNA, 17 nt, Vaccinia virus
augguaaauaaauacuu

SEQ ID NO: 4071784 - RNA, 16 nt, Vaccinia virus
augguacaaaaaagaa

SEQ ID NO: 4071785 - RNA, 20 nt, Vaccinia virus
augguacuuaugacaaaguu

SEQ ID NO: 4071786 - RNA, 15 nt, Vaccinia virus
auggucauagagaac

SEQ ID NO: 4071787 - RNA, 21 nt, Vaccinia virus
auggucauguuuauuucuagu

SEQ ID NO: 4071788 - RNA, 19 nt, Vaccinia virus
augguucccauaaguuugg

SEQ ID NO: 4071789 - RNA, 20 nt, Vaccinia virus
augguucgcucaaaaauaua

SEQ ID NO: 4071790 - RNA, 18 nt, Vaccinia virus
augguuuacccuagaaua

SEQ ID NO: 4071791 - RNA, 17 nt, Vaccinia virus
auguaacuauagagaac

SEQ ID NO: 4071792 - RNA, 20 nt, Vaccinia virus
auguaauggagaguuaccuc

SEQ ID NO: 4071793 - RNA, 17 nt, Vaccinia virus
auguaauuaaauguuug

SEQ ID NO: 4071794 - RNA, 23 nt, Vaccinia virus
auguacgauccaaacaauguuuc

SEQ ID NO: 4071795 - RNA, 23 nt, Vaccinia virus
auguagagguguauuuccuauau

SEQ ID NO: 4071796 - RNA, 17 nt, Vaccinia virus
auguagugacgauguau

SEQ ID NO: 4071797 - RNA, 20 nt, Vaccinia virus
auguagugauagauaugaua

SEQ ID NO: 4071798 - RNA, 13 nt, Vaccinia virus
auguauaaaugaa

SEQ ID NO: 4071799 - RNA, 14 nt, Vaccinia virus
auguauacaaaugu

SEQ ID NO: 4071800 - RNA, 11 nt, Vaccinia virus
auguauauaca

SEQ ID NO: 4071801 - RNA, 14 nt, Vaccinia virus
auguaucaaagaua

SEQ ID NO: 4071802 - RNA, 21 nt, Vaccinia virus
auguaucauuagguaaaguag

SEQ ID NO: 4071803 - RNA, 13 nt, Vaccinia virus
auguauccguaaa

SEQ ID NO: 4071804 - RNA, 22 nt, Vaccinia virus
auguauccguaaaguaauuucc

SEQ ID NO: 4071805 - RNA, 17 nt, Vaccinia virus
auguauguuuaaacacu

SEQ ID NO: 4071806 - RNA, 21 nt, Vaccinia virus
auguauuucauuguucaucca

SEQ ID NO: 4071807 - RNA, 14 nt, Vaccinia virus
auguauuugauaua

SEQ ID NO: 4071808 - RNA, 19 nt, Vaccinia virus
auguauuuuaauaaaucau

SEQ ID NO: 4071809 - RNA, 22 nt, Vaccinia virus
auguauuuugaggaaauugaua

SEQ ID NO: 4071810 - RNA, 21 nt, Vaccinia virus
augucaaaggaugaaagaaag

SEQ ID NO: 4071811 - RNA, 22 nt, Vaccinia virus
augucacaauuuguauuaucca

SEQ ID NO: 4071812 - RNA, 15 nt, Vaccinia virus
augucaggaaauauu

SEQ ID NO: 4071813 - RNA, 16 nt, Vaccinia virus
augucaggaaauguau

SEQ ID NO: 4071814 - RNA, 13 nt, Vaccinia virus
augucauggaaac

SEQ ID NO: 4071815 - RNA, 20 nt, Vaccinia virus
augucauggaaacaaaugaa

SEQ ID NO: 4071816 - RNA, 18 nt, Vaccinia virus
augucauuuuuuuauccg

SEQ ID NO: 4071817 - RNA, 17 nt, Vaccinia virus
auguccauuaaaguuaa

SEQ ID NO: 4071818 - RNA, 21 nt, Vaccinia virus
augucgagauauauggacgau

SEQ ID NO: 4071819 - RNA, 18 nt, Vaccinia virus
augucguuauucugaaac

SEQ ID NO: 4071820 - RNA, 20 nt, Vaccinia virus
augucuaaugaugaacacaa

SEQ ID NO: 4071821 - RNA, 13 nt, Vaccinia virus
augucuacauaaa

SEQ ID NO: 4071822 - RNA, 13 nt, Vaccinia virus
augucuaugaaua

SEQ ID NO: 4071823 - RNA, 21 nt, Vaccinia virus
augucucuuuuucagaaauua

SEQ ID NO: 4071824 - RNA, 22 nt, Vaccinia virus
augucugauuuuucuucauuua

SEQ ID NO: 4071825 - RNA, 17 nt, Vaccinia virus
augugacguacaaaaaa

SEQ ID NO: 4071826 - RNA, 15 nt, Vaccinia virus
augugagaaguuugc

SEQ ID NO: 4071827 - RNA, 15 nt, Vaccinia virus
augugagcaaagauu

SEQ ID NO: 4071828 - RNA, 15 nt, Vaccinia virus
augugaguauuggau

SEQ ID NO: 4071829 - RNA, 20 nt, Vaccinia virus
augugauggaaaaaugacua

SEQ ID NO: 4071830 - RNA, 16 nt, Vaccinia virus
augugauucucugaaa

SEQ ID NO: 4071831 - RNA, 23 nt, Vaccinia virus
augugggacaucaauacgccaau

SEQ ID NO: 4071832 - RNA, 21 nt, Vaccinia virus
augugucuacauaaauaugca

SEQ ID NO: 4071833 - RNA, 16 nt, Vaccinia virus
auguguuuuagaauau

SEQ ID NO: 4071834 - RNA, 14 nt, Vaccinia virus
auguuaaaaaugac

SEQ ID NO: 4071835 - RNA, 20 nt, Vaccinia virus
auguuaaauauaaaaaauga

SEQ ID NO: 4071836 - RNA, 16 nt, Vaccinia virus
auguuaaauguagaca

SEQ ID NO: 4071837 - RNA, 13 nt, Vaccinia virus
auguuacagaaua

SEQ ID NO: 4071838 - RNA, 18 nt, Vaccinia virus
auguuagaaaaaaugaug

SEQ ID NO: 4071839 - RNA, 14 nt, Vaccinia virus
auguuauccaacau

SEQ ID NO: 4071840 - RNA, 22 nt, Vaccinia virus
auguucucguuuccaaaaaaug

SEQ ID NO: 4071841 - RNA, 17 nt, Vaccinia virus
auguugacauguauaua

SEQ ID NO: 4071842 - RNA, 18 nt, Vaccinia virus
auguugcaugaaauaaua

SEQ ID NO: 4071843 - RNA, 15 nt, Vaccinia virus
auguuggagauacua

SEQ ID NO: 4071844 - RNA, 21 nt, Vaccinia virus
auguugggauauugcaugaua

SEQ ID NO: 4071845 - RNA, 14 nt, Vaccinia virus
auguuguuaccaua

SEQ ID NO: 4071846 - RNA, 19 nt, Vaccinia virus
auguuuaaacaucaaacau

SEQ ID NO: 4071847 - RNA, 23 nt, Vaccinia virus
auguuuaauacuuauucauauuu

SEQ ID NO: 4071848 - RNA, 23 nt, Vaccinia virus
auguuuacugcugcguuaaacau

SEQ ID NO: 4071849 - RNA, 13 nt, Vaccinia virus
auguuucaaucau

SEQ ID NO: 4071850 - RNA, 17 nt, Vaccinia virus
auguuugacugaauaua

SEQ ID NO: 4071851 - RNA, 21 nt, Vaccinia virus
auguuugauaaaaauauguau

SEQ ID NO: 4071852 - RNA, 23 nt, Vaccinia virus
auguuugcggaagucaaauacga

SEQ ID NO: 4071853 - RNA, 18 nt, Vaccinia virus
auguuuucugucagaaaa

SEQ ID NO: 4071854 - RNA, 18 nt, Vaccinia virus
auguuuugauuucaauuu

SEQ ID NO: 4071855 - RNA, 14 nt, Vaccinia virus
auuaaaaaggaaaa

SEQ ID NO: 4071856 - RNA, 21 nt, Vaccinia virus
auuaaaacuaccaauaagaag

SEQ ID NO: 4071857 - RNA, 17 nt, Vaccinia virus
auuaaaauuaacaagga

SEQ ID NO: 4071858 - RNA, 15 nt, Vaccinia virus
auuaaacagaaaugg

SEQ ID NO: 4071859 - RNA, 19 nt, Vaccinia virus
auucguugaugaauuauua

SEQ ID NO: 4071860 - RNA, 22 nt, Vaccinia virus
auucuaaagagauuuagacaac

SEQ ID NO: 4071861 - RNA, 18 nt, Vaccinia virus
auucuaauauuaugaaug

SEQ ID NO: 4071862 - RNA, 12 nt, Vaccinia virus
auucuaaugaug

SEQ ID NO: 4071863 - RNA, 22 nt, Vaccinia virus
auucuaugaugaaacacaagau

SEQ ID NO: 4071864 - RNA, 22 nt, Vaccinia virus
auucucauugcuuauauuuuca

SEQ ID NO: 4071865 - RNA, 14 nt, Vaccinia virus
auucucuacagaug

SEQ ID NO: 4071866 - RNA, 17 nt, Vaccinia virus
auucucuauuaaauacc

SEQ ID NO: 4071867 - RNA, 23 nt, Vaccinia virus
auucugauuggucaaugugaaug

SEQ ID NO: 4071868 - RNA, 19 nt, Vaccinia virus
auucugcggcuauagaaaa

SEQ ID NO: 4071869 - RNA, 18 nt, Vaccinia virus
auucuguucuauucaaag

SEQ ID NO: 4071870 - RNA, 17 nt, Vaccinia virus
auucuuacaguacacag

SEQ ID NO: 4071871 - RNA, 17 nt, Vaccinia virus
auucuuaugagaauaga

SEQ ID NO: 4071872 - RNA, 17 nt, Vaccinia virus
auucuucauucugcaua

SEQ ID NO: 4071873 - RNA, 18 nt, Vaccinia virus
auucuucgcccucaauuu

SEQ ID NO: 4071874 - RNA, 16 nt, Vaccinia virus
auucuugguaauuaau

SEQ ID NO: 4071875 - RNA, 17 nt, Vaccinia virus
auucuuguucaauggau

SEQ ID NO: 4071876 - RNA, 15 nt, Vaccinia virus
auucuuuuauuaaug

SEQ ID NO: 4071877 - RNA, 19 nt, Vaccinia virus
auugaaaauacuaauuguu

SEQ ID NO: 4071878 - RNA, 21 nt, Vaccinia virus
auugaaacugaggcuguugaa

SEQ ID NO: 4071879 - RNA, 14 nt, Vaccinia virus
auugacagauagau

SEQ ID NO: 4071880 - RNA, 14 nt, Vaccinia virus
auugacgacuuugg

SEQ ID NO: 4071881 - RNA, 15 nt, Vaccinia virus
auugacgaugucaau

SEQ ID NO: 4071882 - RNA, 15 nt, Vaccinia virus
auugagaagaagcua

SEQ ID NO: 4071883 - RNA, 22 nt, Vaccinia virus
auugagacgaauggcucuuccu

SEQ ID NO: 4071884 - RNA, 20 nt, Vaccinia virus
auugauaguaccaaauucuu

SEQ ID NO: 4071885 - RNA, 23 nt, Vaccinia virus
auugaugugucuguuuauacaau

SEQ ID NO: 4071886 - RNA, 17 nt, Vaccinia virus
auugauuauuucaaaga

SEQ ID NO: 4071887 - RNA, 14 nt, Vaccinia virus
auugauuuuggaaa

SEQ ID NO: 4071888 - RNA, 22 nt, Vaccinia virus
auugcaugguaaggaaguagaa

SEQ ID NO: 4071889 - RNA, 21 nt, Vaccinia virus
auugcauuuugauaguuuauc

SEQ ID NO: 4071890 - RNA, 21 nt, Vaccinia virus
auugcguuuagcaucugauuu

SEQ ID NO: 4071891 - RNA, 22 nt, Vaccinia virus
auugcuagccucaucuucuaua

SEQ ID NO: 4071892 - RNA, 14 nt, Vaccinia virus
auugcuguaaacaa

SEQ ID NO: 4071893 - RNA, 22 nt, Vaccinia virus
auugcuguuaguauaauuauug

SEQ ID NO: 4071894 - RNA, 21 nt, Vaccinia virus
auuggaauaagcgucuucucg

SEQ ID NO: 4071895 - RNA, 20 nt, Vaccinia virus
auuggagauccgauccauga

SEQ ID NO: 4071896 - RNA, 16 nt, Vaccinia virus
auuggauggacacauu

SEQ ID NO: 4071897 - RNA, 19 nt, Vaccinia virus
auuggcaaaucuuaucauu

SEQ ID NO: 4071898 - RNA, 21 nt, Vaccinia virus
auuggcaaauuauuucuucug

SEQ ID NO: 4071899 - RNA, 18 nt, Vaccinia virus
auugggauaaaaauuaug

SEQ ID NO: 4071900 - RNA, 14 nt, Vaccinia virus
auugguaaauccuu

SEQ ID NO: 4071901 - RNA, 14 nt, Vaccinia virus
auuguaacaguauu

SEQ ID NO: 4071902 - RNA, 14 nt, Vaccinia virus
auuguacuuuguaa

SEQ ID NO: 4071903 - RNA, 17 nt, Vaccinia virus
auuguagaaucagcauc

SEQ ID NO: 4071904 - RNA, 19 nt, Vaccinia virus
auuguagcuauuuaaaugg

SEQ ID NO: 4071905 - RNA, 21 nt, Vaccinia virus
auugucgcacuauagaugcaa

SEQ ID NO: 4071906 - RNA, 20 nt, Vaccinia virus
auugucuagauaaaauacug

SEQ ID NO: 4071907 - RNA, 22 nt, Vaccinia virus
auugucuauaucuaaaaucaua

SEQ ID NO: 4071908 - RNA, 22 nt, Vaccinia virus
auugucugacauaagaugucua

SEQ ID NO: 4071909 - RNA, 22 nt, Vaccinia virus
auugugauuuaguguaguauau

SEQ ID NO: 4071910 - RNA, 16 nt, Vaccinia virus
auuguugucugaaaua

SEQ ID NO: 4071911 - RNA, 14 nt, Vaccinia virus
auuguuuuucacag

SEQ ID NO: 4071912 - RNA, 13 nt, Vaccinia virus
auuuaaaaugaua

SEQ ID NO: 4071913 - RNA, 10 nt, Vaccinia virus
auuuaaacau

SEQ ID NO: 4071914 - RNA, 12 nt, Vaccinia virus
auuuaaacgaag

SEQ ID NO: 4071915 - RNA, 18 nt, Vaccinia virus
auuuaacauuuuggcaaa

SEQ ID NO: 4071916 - RNA, 18 nt, Vaccinia virus
auuuaaggacuuaacaau

SEQ ID NO: 4071917 - RNA, 16 nt, Vaccinia virus
auuuaagguacuagau

SEQ ID NO: 4071918 - RNA, 14 nt, Vaccinia virus
auuuaauacuuuac

SEQ ID NO: 4071919 - RNA, 18 nt, Vaccinia virus
auuuaauuggacagauau

SEQ ID NO: 4071920 - RNA, 14 nt, Vaccinia virus
auuuacaauuauug

SEQ ID NO: 4071921 - RNA, 19 nt, Vaccinia virus
auuuacauucuuuuugcug

SEQ ID NO: 4071922 - RNA, 22 nt, Vaccinia virus
auuuaccaucccauauauucca

SEQ ID NO: 4071923 - RNA, 15 nt, Vaccinia virus
auuuacccauggaaa

SEQ ID NO: 4071924 - RNA, 20 nt, Vaccinia virus
auuuacuaaagucaucaaug

SEQ ID NO: 4071925 - RNA, 20 nt, Vaccinia virus
auuuacuaaucgauuuugca

SEQ ID NO: 4071926 - RNA, 16 nt, Vaccinia virus
auuuacuaucuguaau

SEQ ID NO: 4071927 - RNA, 16 nt, Vaccinia virus
auuuagacaacaggau

SEQ ID NO: 4071928 - RNA, 15 nt, Vaccinia virus
auuuaguuuaucuua

SEQ ID NO: 4071929 - RNA, 13 nt, Vaccinia virus
auuuauaaaaaaa

SEQ ID NO: 4071930 - RNA, 16 nt, Vaccinia virus
auuuauaauauacucu

SEQ ID NO: 4071931 - RNA, 15 nt, Vaccinia virus
auuuauauaugcauu

SEQ ID NO: 4071932 - RNA, 23 nt, Vaccinia virus
auuuauauccuauauacgaaaaa

SEQ ID NO: 4071933 - RNA, 18 nt, Vaccinia virus
auuuauaucuaaaaauua

SEQ ID NO: 4071934 - RNA, 19 nt, Vaccinia virus
auuuaucgguuuuggugaa

SEQ ID NO: 4071935 - RNA, 20 nt, Vaccinia virus
auuuaugauauauacacuuu

SEQ ID NO: 4071936 - RNA, 13 nt, Vaccinia virus
auuuauuaucaug

SEQ ID NO: 4071937 - RNA, 20 nt, Vaccinia virus
auuuauugcggauagcagua

SEQ ID NO: 4071938 - RNA, 19 nt, Vaccinia virus
auuuauuuaguauuaaaug

SEQ ID NO: 4071939 - RNA, 16 nt, Vaccinia virus
auuucaaaaaaugauc

SEQ ID NO: 4071940 - RNA, 17 nt, Vaccinia virus
auuucaaagacuaacuu

SEQ ID NO: 4071941 - RNA, 21 nt, Vaccinia virus
auuucaaauaggucuucgucu

SEQ ID NO: 4071942 - RNA, 19 nt, Vaccinia virus
auuucaacagacuguuuau

SEQ ID NO: 4071943 - RNA, 15 nt, Vaccinia virus
auuucacaaauggau

SEQ ID NO: 4071944 - RNA, 16 nt, Vaccinia virus
auuucacaacuuuacu

SEQ ID NO: 4071945 - RNA, 17 nt, Vaccinia virus
auuucaucguuuuguau

SEQ ID NO: 4071946 - RNA, 16 nt, Vaccinia virus
auuucaucugugguau

SEQ ID NO: 4071947 - RNA, 14 nt, Vaccinia virus
auuucauuaauagu

SEQ ID NO: 4071948 - RNA, 21 nt, Vaccinia virus
auuucauuauaauaguuuauc

SEQ ID NO: 4071949 - RNA, 17 nt, Vaccinia virus
auuucauucucugaaaa

SEQ ID NO: 4071950 - RNA, 21 nt, Vaccinia virus
auuuccaaagauacacacauu

SEQ ID NO: 4071951 - RNA, 23 nt, Vaccinia virus
auuuccaucucuaucuaauacag

SEQ ID NO: 4071952 - RNA, 17 nt, Vaccinia virus
auuucgaauacgauaau

SEQ ID NO: 4071953 - RNA, 13 nt, Vaccinia virus
auuucgacaaaaa

SEQ ID NO: 4071954 - RNA, 23 nt, Vaccinia virus
auuucguugaaccggaagaauug

SEQ ID NO: 4071955 - RNA, 22 nt, Vaccinia virus
auuucuaucccgaaagaacuga

SEQ ID NO: 4071956 - RNA, 14 nt, Vaccinia virus
auuucuuaauguaa

SEQ ID NO: 4071957 - RNA, 14 nt, Vaccinia virus
auuucuuacauaaa

SEQ ID NO: 4071958 - RNA, 21 nt, Vaccinia virus
auuucuuuuugggaaaaauug

SEQ ID NO: 4071959 - RNA, 22 nt, Vaccinia virus
auuugaaacuccuagagaauua

SEQ ID NO: 4071960 - RNA, 18 nt, Vaccinia virus
auuugagagaucauuucu

SEQ ID NO: 4071961 - RNA, 21 nt, Vaccinia virus
auuugcaccacuuucuaucaa

SEQ ID NO: 4071962 - RNA, 15 nt, Vaccinia virus
auuuggaaaagaaaa

SEQ ID NO: 4071963 - RNA, 17 nt, Vaccinia virus
auuuggaaaagaaaauu

SEQ ID NO: 4071964 - RNA, 16 nt, Vaccinia virus
auuugguaagacuauu

SEQ ID NO: 4071965 - RNA, 16 nt, Vaccinia virus
auuuggucauaauaga

SEQ ID NO: 4071966 - RNA, 22 nt, Vaccinia virus
auuuggucauaauagaauguau

SEQ ID NO: 4071967 - RNA, 16 nt, Vaccinia virus
auuuguacacaucuau

SEQ ID NO: 4071968 - RNA, 22 nt, Vaccinia virus
auuuguauuuuuuaaucuaucu

SEQ ID NO: 4071969 - RNA, 15 nt, Vaccinia virus
auuuguuaaaaauuu

SEQ ID NO: 4071970 - RNA, 15 nt, Vaccinia virus
auuuguuaacuauau

SEQ ID NO: 4071971 - RNA, 17 nt, Vaccinia virus
auuuguucaaacuuugu

SEQ ID NO: 4071972 - RNA, 17 nt, Vaccinia virus
auuuguucaagauagau

SEQ ID NO: 4071973 - RNA, 14 nt, Vaccinia virus
auuuguugaugaag

SEQ ID NO: 4071974 - RNA, 23 nt, Vaccinia virus
auuuguuuccaugacauauuaca

SEQ ID NO: 4071975 - RNA, 23 nt, Vaccinia virus
auuuguuuuguuaaacaauagau

SEQ ID NO: 4071976 - RNA, 14 nt, Vaccinia virus
auuuuaaaaaacug

SEQ ID NO: 4071977 - RNA, 18 nt, Vaccinia virus
auuuuaccucuucugaua

SEQ ID NO: 4071978 - RNA, 19 nt, Vaccinia virus
auuuuaggacggaucaaug

SEQ ID NO: 4071979 - RNA, 17 nt, Vaccinia virus
auuuuaguaauauggaa

SEQ ID NO: 4071980 - RNA, 15 nt, Vaccinia virus
auuuuauacuagagu

SEQ ID NO: 4071981 - RNA, 21 nt, Vaccinia virus
auuuuaucgauucuaaugaau

SEQ ID NO: 4071982 - RNA, 18 nt, Vaccinia virus
caaucuaagaaauuuaaa

SEQ ID NO: 4071983 - RNA, 16 nt, Vaccinia virus
caaucuagcauuucua

SEQ ID NO: 4071984 - RNA, 16 nt, Vaccinia virus
caaucucuauaucuau

SEQ ID NO: 4071985 - RNA, 17 nt, Vaccinia virus
caaugaaaugguacaau

SEQ ID NO: 4071986 - RNA, 16 nt, Vaccinia virus
caaugagaguuccuga

SEQ ID NO: 4071987 - RNA, 15 nt, Vaccinia virus
caaugagauaaauau

SEQ ID NO: 4071988 - RNA, 13 nt, Vaccinia virus
caaugauaacaau

SEQ ID NO: 4071989 - RNA, 20 nt, Vaccinia virus
caauggaaugcaaaacccca

SEQ ID NO: 4071990 - RNA, 13 nt, Vaccinia virus
caauggccaucug

SEQ ID NO: 4071991 - RNA, 18 nt, Vaccinia virus
caauggucucggauuggu

SEQ ID NO: 4071992 - RNA, 15 nt, Vaccinia virus
caauuaaaucaauau

SEQ ID NO: 4071993 - RNA, 16 nt, Vaccinia virus
caauuacugauaaugu

SEQ ID NO: 4071994 - RNA, 22 nt, Vaccinia virus
caauuauauguguguagacaau

SEQ ID NO: 4071995 - RNA, 15 nt, Vaccinia virus
caauuauguaucaau

SEQ ID NO: 4071996 - RNA, 19 nt, Vaccinia virus
caauuauucuaauggaugu

SEQ ID NO: 4071997 - RNA, 18 nt, Vaccinia virus
caauucagaaaucaaucu

SEQ ID NO: 4071998 - RNA, 15 nt, Vaccinia virus
caauucaugcucuau

SEQ ID NO: 4071999 - RNA, 16 nt, Vaccinia virus
caauuccuuuuugccu

SEQ ID NO: 4072000 - RNA, 19 nt, Vaccinia virus
caauuggcacgaacaaaag

SEQ ID NO: 4072001 - RNA, 24 nt, Vaccinia virus
caauugguagaguuuuauaacgaa

SEQ ID NO: 4072002 - RNA, 19 nt, Vaccinia virus
caauugucuguaaaccaca

SEQ ID NO: 4072003 - RNA, 22 nt, Vaccinia virus
caauugugauuuaguguaguau

SEQ ID NO: 4072004 - RNA, 20 nt, Vaccinia virus
caauuguuuuuguacauaau

SEQ ID NO: 4072005 - RNA, 16 nt, Vaccinia virus
caauuuagcugcauua

SEQ ID NO: 4072006 - RNA, 15 nt, Vaccinia virus
caauuuauuuuguau

SEQ ID NO: 4072007 - RNA, 23 nt, Vaccinia virus
caauuucauacgcuccucuuuug

SEQ ID NO: 4072008 - RNA, 22 nt, Vaccinia virus
cacaaauggauguuaauguauu

SEQ ID NO: 4072009 - RNA, 14 nt, Vaccinia virus
cacaacuuaaugaa

SEQ ID NO: 4072010 - RNA, 20 nt, Vaccinia virus
cacaauagcgcuuaaucuca

SEQ ID NO: 4072011 - RNA, 16 nt, Vaccinia virus
cacaauauauguugau

SEQ ID NO: 4072012 - RNA, 11 nt, Vaccinia virus
cacaaugaaug

SEQ ID NO: 4072013 - RNA, 17 nt, Vaccinia virus
cacaaugauaacaucca

SEQ ID NO: 4072014 - RNA, 17 nt, Vaccinia virus
cacacacgauuaauuuu

SEQ ID NO: 4072015 - RNA, 19 nt, Vaccinia virus
cacagaacaguaaauguuc

SEQ ID NO: 4072016 - RNA, 16 nt, Vaccinia virus
cacaguauugacaaau

SEQ ID NO: 4072017 - RNA, 14 nt, Vaccinia virus
cacauaagccauaa

SEQ ID NO: 4072018 - RNA, 18 nt, Vaccinia virus
cacauacauuuuuaacag

SEQ ID NO: 4072019 - RNA, 13 nt, Vaccinia virus
cacauagaauaaa

SEQ ID NO: 4072020 - RNA, 21 nt, Vaccinia virus
cacauauccacguucuacaaa

SEQ ID NO: 4072021 - RNA, 15 nt, Vaccinia virus
cacauauuaaugcag

SEQ ID NO: 4072022 - RNA, 21 nt, Vaccinia virus
cacauccuuuauuuuaucuau

SEQ ID NO: 4072023 - RNA, 15 nt, Vaccinia virus
cacaugauugacaaa

SEQ ID NO: 4072024 - RNA, 18 nt, Vaccinia virus
caccacacgacaaugaac

SEQ ID NO: 4072025 - RNA, 17 nt, Vaccinia virus
cacccguagaaauacua

SEQ ID NO: 4072026 - RNA, 23 nt, Vaccinia virus
caccgagggaaaaucuaaaguug

SEQ ID NO: 4072027 - RNA, 17 nt, Vaccinia virus
caccgauggugucacau

SEQ ID NO: 4072028 - RNA, 20 nt, Vaccinia virus
caccgcaugcaccauccgau

SEQ ID NO: 4072029 - RNA, 14 nt, Vaccinia virus
cacgaacaucuuuc

SEQ ID NO: 4072030 - RNA, 17 nt, Vaccinia virus
cacgaauauuacuaauu

SEQ ID NO: 4072031 - RNA, 16 nt, Vaccinia virus
cacgauuaauuuuuuu

SEQ ID NO: 4072032 - RNA, 14 nt, Vaccinia virus
cacggaagaacuac

SEQ ID NO: 4072033 - RNA, 18 nt, Vaccinia virus
cacguuuugauaaaucua

SEQ ID NO: 4072034 - RNA, 19 nt, Vaccinia virus
cacuaaucguaauauucua

SEQ ID NO: 4072035 - RNA, 13 nt, Vaccinia virus
cacuaauugacua

SEQ ID NO: 4072036 - RNA, 19 nt, Vaccinia virus
cacuaguuaagaacauguc

SEQ ID NO: 4072037 - RNA, 14 nt, Vaccinia virus
cacuauuauaacaa

SEQ ID NO: 4072038 - RNA, 16 nt, Vaccinia virus
cacucuucgaaaagaa

SEQ ID NO: 4072039 - RNA, 14 nt, Vaccinia virus
cacugauucagaaa

SEQ ID NO: 4072040 - RNA, 18 nt, Vaccinia virus
cacugcuggcaucgaugu

SEQ ID NO: 4072041 - RNA, 22 nt, Vaccinia virus
cacugucuggcaauaaaugaua

SEQ ID NO: 4072042 - RNA, 15 nt, Vaccinia virus
cacuguggaugugac

SEQ ID NO: 4072043 - RNA, 14 nt, Vaccinia virus
cacuguuaaaguua

SEQ ID NO: 4072044 - RNA, 22 nt, Vaccinia virus
cacuuagaacagauuuaacaau

SEQ ID NO: 4072045 - RNA, 19 nt, Vaccinia virus
cacuucgaagaguuaauau

SEQ ID NO: 4072046 - RNA, 15 nt, Vaccinia virus
cacuuggauauugua

SEQ ID NO: 4072047 - RNA, 13 nt, Vaccinia virus
cagaaaaaacaau

SEQ ID NO: 4072048 - RNA, 16 nt, Vaccinia virus
cagaaagacgaauaca

SEQ ID NO: 4072049 - RNA, 14 nt, Vaccinia virus
cagaaauacuauau

SEQ ID NO: 4072050 - RNA, 20 nt, Vaccinia virus
cagaaaugacuccaugaaaa

SEQ ID NO: 4072051 - RNA, 20 nt, Vaccinia virus
cagaaauugguauaaauguu

SEQ ID NO: 4072052 - RNA, 14 nt, Vaccinia virus
cagaacaauauauu

SEQ ID NO: 4072053 - RNA, 22 nt, Vaccinia virus
cagaagauagcaaagagaugau

SEQ ID NO: 4072054 - RNA, 22 nt, Vaccinia virus
cagaagauuauuauggaaauca

SEQ ID NO: 4072055 - RNA, 16 nt, Vaccinia virus
cagaaggaaacuucuu

SEQ ID NO: 4072056 - RNA, 21 nt, Vaccinia virus
cagacaaauggucaaugauau

SEQ ID NO: 4072057 - RNA, 22 nt, Vaccinia virus
cagacaauaagagcagcacaaa

SEQ ID NO: 4072058 - RNA, 17 nt, Vaccinia virus
cagacacagacgauauu

SEQ ID NO: 4072059 - RNA, 20 nt, Vaccinia virus
cagacucucaagauuuuaaa

SEQ ID NO: 4072060 - RNA, 19 nt, Vaccinia virus
cagaggaacgucauauauu

SEQ ID NO: 4072061 - RNA, 22 nt, Vaccinia virus
cagaguccucuaauugaucaag

SEQ ID NO: 4072062 - RNA, 17 nt, Vaccinia virus
cagaugcgccauauuua

SEQ ID NO: 4072063 - RNA, 22 nt, Vaccinia virus
cagauuaauaguuuuauuugaa

SEQ ID NO: 4072064 - RNA, 18 nt, Vaccinia virus
cagauugaacauacaguu

SEQ ID NO: 4072065 - RNA, 22 nt, Vaccinia virus
cagauugaauaggaguuugaau

SEQ ID NO: 4072066 - RNA, 22 nt, Vaccinia virus
cagauugcauggugauuugucu

SEQ ID NO: 4072067 - RNA, 23 nt, Vaccinia virus
cagauuguugccguaaauccugc

SEQ ID NO: 4072068 - RNA, 20 nt, Vaccinia virus
cagcaauuucuuuauucucu

SEQ ID NO: 4072069 - RNA, 19 nt, Vaccinia virus
cagcacggugguagauaua

SEQ ID NO: 4072070 - RNA, 21 nt, Vaccinia virus
cagcauagacuuugccacaac

SEQ ID NO: 4072071 - RNA, 14 nt, Vaccinia virus
cagccuuuaauagg

SEQ ID NO: 4072072 - RNA, 20 nt, Vaccinia virus
cagcuacugcugauaaugau

SEQ ID NO: 4072073 - RNA, 14 nt, Vaccinia virus
caggaauagaugua

SEQ ID NO: 4072074 - RNA, 15 nt, Vaccinia virus
caggauucuaaugau

SEQ ID NO: 4072075 - RNA, 14 nt, Vaccinia virus
caggcucuauuuuc

SEQ ID NO: 4072076 - RNA, 15 nt, Vaccinia virus
caggcucuauuuuca

SEQ ID NO: 4072077 - RNA, 13 nt, Vaccinia virus
cagggaaauuaaa

SEQ ID NO: 4072078 - RNA, 18 nt, Vaccinia virus
caggucuauucgacacua

SEQ ID NO: 4072079 - RNA, 19 nt, Vaccinia virus
cagguugcagcauagacuu

SEQ ID NO: 4072080 - RNA, 21 nt, Vaccinia virus
caguacuacuagguagaagaa

SEQ ID NO: 4072081 - RNA, 18 nt, Vaccinia virus
caguagcgagaaagcauc

SEQ ID NO: 4072082 - RNA, 17 nt, Vaccinia virus
caguaguauuggauggg

SEQ ID NO: 4072083 - RNA, 13 nt, Vaccinia virus
caguagucauugu

SEQ ID NO: 4072084 - RNA, 15 nt, Vaccinia virus
cagucugaacgcauu

SEQ ID NO: 4072085 - RNA, 14 nt, Vaccinia virus
cagucuuuaaugaa

SEQ ID NO: 4072086 - RNA, 22 nt, Vaccinia virus
caguuauguuuaacuuugaaau

SEQ ID NO: 4072087 - RNA, 17 nt, Vaccinia virus
caguuuauuauccacua

SEQ ID NO: 4072088 - RNA, 17 nt, Vaccinia virus
caguuucucaucuuuua

SEQ ID NO: 4072089 - RNA, 15 nt, Vaccinia virus
caguuucuguaauga

SEQ ID NO: 4072090 - RNA, 18 nt, Vaccinia virus
cauaaaacuaauauuuua

SEQ ID NO: 4072091 - RNA, 12 nt, Vaccinia virus
cauaaaaguugu

SEQ ID NO: 4072092 - RNA, 14 nt, Vaccinia virus
cauaaacacagaau

SEQ ID NO: 4072093 - RNA, 19 nt, Vaccinia virus
cauaaacuguaaaugauuu

SEQ ID NO: 4072094 - RNA, 22 nt, Vaccinia virus
cauaaauaacucuaauagcacg

SEQ ID NO: 4072095 - RNA, 18 nt, Vaccinia virus
cauaaauacacuuuuaua

SEQ ID NO: 4072096 - RNA, 19 nt, Vaccinia virus
cauaaaucaucuugauacu

SEQ ID NO: 4072097 - RNA, 20 nt, Vaccinia virus
cauaaauucaaccaugaauu

SEQ ID NO: 4072098 - RNA, 16 nt, Vaccinia virus
cauaacauaaaaacuc

SEQ ID NO: 4072099 - RNA, 21 nt, Vaccinia virus
cauaacaucuuucaucaucug

SEQ ID NO: 4072100 - RNA, 20 nt, Vaccinia virus
cauaacguccagaauguuua

SEQ ID NO: 4072101 - RNA, 15 nt, Vaccinia virus
cauaagauauccaua

SEQ ID NO: 4072102 - RNA, 14 nt, Vaccinia virus
cauaaguauauaau

SEQ ID NO: 4072103 - RNA, 16 nt, Vaccinia virus
cauaaguauguuugac

SEQ ID NO: 4072104 - RNA, 16 nt, Vaccinia virus
cauaauagaauguauu

SEQ ID NO: 4072105 - RNA, 18 nt, Vaccinia virus
cauaauaugagauguuua

SEQ ID NO: 4072106 - RNA, 19 nt, Vaccinia virus
uuauacagaagauuuaacu

SEQ ID NO: 4072107 - RNA, 12 nt, Vaccinia virus
uuauacaucuua

SEQ ID NO: 4072108 - RNA, 18 nt, Vaccinia virus
uuauaccaugucauuaac

SEQ ID NO: 4072109 - RNA, 22 nt, Vaccinia virus
uuauacgaaaaaaaucauuaaa

SEQ ID NO: 4072110 - RNA, 21 nt, Vaccinia virus
uuauacuucuccaacaucgau

SEQ ID NO: 4072111 - RNA, 15 nt, Vaccinia virus
uuauagaagauauca

SEQ ID NO: 4072112 - RNA, 14 nt, Vaccinia virus
uuauagaauuuaga

SEQ ID NO: 4072113 - RNA, 22 nt, Vaccinia virus
uuauaggcucuaaccauuuuca

SEQ ID NO: 4072114 - RNA, 20 nt, Vaccinia virus
uuauaguguuuaacaaagau

SEQ ID NO: 4072115 - RNA, 17 nt, Vaccinia virus
uuauauaaaaacauuuu

SEQ ID NO: 4072116 - RNA, 19 nt, Vaccinia virus
uuauaucguguucauuaac

SEQ ID NO: 4072117 - RNA, 18 nt, Vaccinia virus
uuauaucuauuuuauuca

SEQ ID NO: 4072118 - RNA, 23 nt, Vaccinia virus
uuauaugucucgcauaaacauua

SEQ ID NO: 4072119 - RNA, 17 nt, Vaccinia virus
uuauauuccucuauuaa

SEQ ID NO: 4072120 - RNA, 18 nt, Vaccinia virus
uuaucaaaacauauagau

SEQ ID NO: 4072121 - RNA, 17 nt, Vaccinia virus
uuaucaaaauuuggaaa

SEQ ID NO: 4072122 - RNA, 20 nt, Vaccinia virus
uuaucaagauguguauguuu

SEQ ID NO: 4072123 - RNA, 17 nt, Vaccinia virus
uuaucauuuugauuaau

SEQ ID NO: 4072124 - RNA, 13 nt, Vaccinia virus
uuauccaauacag

SEQ ID NO: 4072125 - RNA, 15 nt, Vaccinia virus
uuaucccuauauuca

SEQ ID NO: 4072126 - RNA, 22 nt, Vaccinia virus
uuauccguauuuccauaauaag

SEQ ID NO: 4072127 - RNA, 14 nt, Vaccinia virus
uuaucgacaucuug

SEQ ID NO: 4072128 - RNA, 17 nt, Vaccinia virus
uuaucgauucaucuaau

SEQ ID NO: 4072129 - RNA, 14 nt, Vaccinia virus
uuaucgcauacuag

SEQ ID NO: 4072130 - RNA, 16 nt, Vaccinia virus
uuaucgucuacgaaca

SEQ ID NO: 4072131 - RNA, 19 nt, Vaccinia virus
uuaucucagugcaaagauu

SEQ ID NO: 4072132 - RNA, 22 nt, Vaccinia virus
uuaucuuguuucgguggcugau

SEQ ID NO: 4072133 - RNA, 22 nt, Vaccinia virus
uuaugaaaaaguaaaugaugaa

SEQ ID NO: 4072134 - RNA, 23 nt, Vaccinia virus
uuaugaaacuuggaaacaucucu

SEQ ID NO: 4072135 - RNA, 22 nt, Vaccinia virus
uuaugauuagucacgacugaaa

SEQ ID NO: 4072136 - RNA, 16 nt, Vaccinia virus
uuaugccgaacuaaaa

SEQ ID NO: 4072137 - RNA, 17 nt, Vaccinia virus
uuauggagcaaacauua

SEQ ID NO: 4072138 - RNA, 19 nt, Vaccinia virus
uuauguaguaaagaugcua

SEQ ID NO: 4072139 - RNA, 19 nt, Vaccinia virus
uuauguauauguuuguaaa

SEQ ID NO: 4072140 - RNA, 19 nt, Vaccinia virus
uuauguguuauaagguacu

SEQ ID NO: 4072141 - RNA, 20 nt, Vaccinia virus
uuauguugccuaaacaagau

SEQ ID NO: 4072142 - RNA, 21 nt, Vaccinia virus
uuauuaaauccuuguuugaua

SEQ ID NO: 4072143 - RNA, 22 nt, Vaccinia virus
uuauuacauguuuucauauuca

SEQ ID NO: 4072144 - RNA, 17 nt, Vaccinia virus
uuauuacuaaacauuuu

SEQ ID NO: 4072145 - RNA, 17 nt, Vaccinia virus
uuauuagagauuucagc

SEQ ID NO: 4072146 - RNA, 23 nt, Vaccinia virus
uuauuagucgccgucucuauaaa

SEQ ID NO: 4072147 - RNA, 23 nt, Vaccinia virus
uuauuauagugguggaauucagu

SEQ ID NO: 4072148 - RNA, 18 nt, Vaccinia virus
uuauuaucccauuguaaa

SEQ ID NO: 4072149 - RNA, 14 nt, Vaccinia virus
uuauucauaauaag

SEQ ID NO: 4072150 - RNA, 22 nt, Vaccinia virus
uuauuccaauagaugucuuauu

SEQ ID NO: 4072151 - RNA, 11 nt, Vaccinia virus
uuauucuaaug

SEQ ID NO: 4072152 - RNA, 17 nt, Vaccinia virus
uuauugauaaagaucua

SEQ ID NO: 4072153 - RNA, 19 nt, Vaccinia virus
uuauugauugaaaaugaaa

SEQ ID NO: 4072154 - RNA, 14 nt, Vaccinia virus
uuauuguuugggua

SEQ ID NO: 4072155 - RNA, 18 nt, Vaccinia virus
uuauuucaaaauuauuua

SEQ ID NO: 4072156 - RNA, 22 nt, Vaccinia virus
uuauuucaaagacuaacuuaua

SEQ ID NO: 4072157 - RNA, 16 nt, Vaccinia virus
uuauuucucuauuaca

SEQ ID NO: 4072158 - RNA, 14 nt, Vaccinia virus
uuauuuuugaagau

SEQ ID NO: 4072159 - RNA, 19 nt, Vaccinia virus
uucaaaauuguaacaacaa

SEQ ID NO: 4072160 - RNA, 13 nt, Vaccinia virus
uucaacaaacuaa

SEQ ID NO: 4072161 - RNA, 10 nt, Vaccinia virus
uucaacaaug

SEQ ID NO: 4072162 - RNA, 23 nt, Vaccinia virus
uucaaccaugagugugaaacuaa

SEQ ID NO: 4072163 - RNA, 15 nt, Vaccinia virus
uucaaccauucauaa

SEQ ID NO: 4072164 - RNA, 23 nt, Vaccinia virus
uucaagagauaguuuucaucaga

SEQ ID NO: 4072165 - RNA, 14 nt, Vaccinia virus
uucaagauuaucuu

SEQ ID NO: 4072166 - RNA, 15 nt, Vaccinia virus
uucaauaucuauacu

SEQ ID NO: 4072167 - RNA, 22 nt, Vaccinia virus
uucaaugaacucaucgagauau

SEQ ID NO: 4072168 - RNA, 18 nt, Vaccinia virus
uucaaugugcucuuuaca

SEQ ID NO: 4072169 - RNA, 11 nt, Vaccinia virus
uucaauguuua

SEQ ID NO: 4072170 - RNA, 23 nt, Vaccinia virus
uucaauuacuacaaaaauuacuc

SEQ ID NO: 4072171 - RNA, 16 nt, Vaccinia virus
uucacguaaauacaaa

SEQ ID NO: 4072172 - RNA, 16 nt, Vaccinia virus
uucacuaaauaguuuu

SEQ ID NO: 4072173 - RNA, 19 nt, Vaccinia virus
uucacuauaucuaagaaac

SEQ ID NO: 4072174 - RNA, 22 nt, Vaccinia virus
uucacuuuuuauaauuuuacca

SEQ ID NO: 4072175 - RNA, 20 nt, Vaccinia virus
uucagaaagacgaauacaua

SEQ ID NO: 4072176 - RNA, 14 nt, Vaccinia virus
uucagaauuucuac

SEQ ID NO: 4072177 - RNA, 13 nt, Vaccinia virus
uucauaacaguga

SEQ ID NO: 4072178 - RNA, 19 nt, Vaccinia virus
uucauagcugagaauaucu

SEQ ID NO: 4072179 - RNA, 19 nt, Vaccinia virus
uucauaggauacucuauga

SEQ ID NO: 4072180 - RNA, 14 nt, Vaccinia virus
uucauagucauuaa

SEQ ID NO: 4072181 - RNA, 22 nt, Vaccinia virus
uucaucaauagacauaagaaau

SEQ ID NO: 4072182 - RNA, 17 nt, Vaccinia virus
uucaucagaaaugacuc

SEQ ID NO: 4072183 - RNA, 12 nt, Vaccinia virus
uucaucagauau

SEQ ID NO: 4072184 - RNA, 16 nt, Vaccinia virus
uucauccguuuccuua

SEQ ID NO: 4072185 - RNA, 18 nt, Vaccinia virus
uucaucggcauauuauua

SEQ ID NO: 4072186 - RNA, 23 nt, Vaccinia virus
uucaucguuuagaauaaaaugau

SEQ ID NO: 4072187 - RNA, 21 nt, Vaccinia virus
uucaugauuacggaauuauug

SEQ ID NO: 4072188 - RNA, 22 nt, Vaccinia virus
uucaugguaaggucuuagauau

SEQ ID NO: 4072189 - RNA, 12 nt, Vaccinia virus
uucauuaauuuc

SEQ ID NO: 4072190 - RNA, 12 nt, Vaccinia virus
uucauuacuaua

SEQ ID NO: 4072191 - RNA, 19 nt, Vaccinia virus
uucauuagauaacagugua

SEQ ID NO: 4072192 - RNA, 12 nt, Vaccinia virus
uucauuccuaua

SEQ ID NO: 4072193 - RNA, 12 nt, Vaccinia virus
uucauucguaaa

SEQ ID NO: 4072194 - RNA, 18 nt, Vaccinia virus
uuccaacauaauaaaagu

SEQ ID NO: 4072195 - RNA, 17 nt, Vaccinia virus
uuccaaccuacuacuag

SEQ ID NO: 4072196 - RNA, 18 nt, Vaccinia virus
uuccacagauaauauuag

SEQ ID NO: 4072197 - RNA, 16 nt, Vaccinia virus
uuccacauuaauacag

SEQ ID NO: 4072198 - RNA, 20 nt, Vaccinia virus
uuccacauuaauacagccua

SEQ ID NO: 4072199 - RNA, 21 nt, Vaccinia virus
uuccaccguauccauaaacaa

SEQ ID NO: 4072200 - RNA, 16 nt, Vaccinia virus
uuccaucaaacuguau

SEQ ID NO: 4072201 - RNA, 15 nt, Vaccinia virus
uuccaucuagacuau

SEQ ID NO: 4072202 - RNA, 21 nt, Vaccinia virus
uuccauuuauaucauccaaua

SEQ ID NO: 4072203 - RNA, 22 nt, Vaccinia virus
uucccauauccagacaacaauc

SEQ ID NO: 4072204 - RNA, 16 nt, Vaccinia virus
uucccauguacgacga

SEQ ID NO: 4072205 - RNA, 19 nt, Vaccinia virus
uucccuggaguaugagagu

SEQ ID NO: 4072206 - RNA, 18 nt, Vaccinia virus
uuccgguuugcaaaacaa

SEQ ID NO: 4072207 - RNA, 16 nt, Vaccinia virus
uuccguaucuguauuu

SEQ ID NO: 4072208 - RNA, 18 nt, Vaccinia virus
agagaacauauaaaugua

SEQ ID NO: 4072209 - RNA, 17 nt, Vaccinia virus
agagaagggaauuauug

SEQ ID NO: 4072210 - RNA, 14 nt, Vaccinia virus
agagacaaacuauu

SEQ ID NO: 4072211 - RNA, 19 nt, Vaccinia virus
agagacuuuauaacagaua

SEQ ID NO: 4072212 - RNA, 13 nt, Vaccinia virus
agagagaaauacu

SEQ ID NO: 4072213 - RNA, 14 nt, Vaccinia virus
agagagugcacuau

SEQ ID NO: 4072214 - RNA, 19 nt, Vaccinia virus
agagauaggucuaaugcau

SEQ ID NO: 4072215 - RNA, 15 nt, Vaccinia virus
agagaugucugaaac

SEQ ID NO: 4072216 - RNA, 15 nt, Vaccinia virus
agagauuuugaaaau

SEQ ID NO: 4072217 - RNA, 20 nt, Vaccinia virus
agagcauauuucauuuccaa

SEQ ID NO: 4072218 - RNA, 19 nt, Vaccinia virus
agagccuguaacaucucaa

SEQ ID NO: 4072219 - RNA, 18 nt, Vaccinia virus
agagcuauuuugacauac

SEQ ID NO: 4072220 - RNA, 17 nt, Vaccinia virus
agagcuucguauacucu

SEQ ID NO: 4072221 - RNA, 15 nt, Vaccinia virus
agaggcaaaagaugu

SEQ ID NO: 4072222 - RNA, 17 nt, Vaccinia virus
agaggcagucggauugg

SEQ ID NO: 4072223 - RNA, 14 nt, Vaccinia virus
agaggcauaaucaa

SEQ ID NO: 4072224 - RNA, 20 nt, Vaccinia virus
agagguucccaauuccaaag

SEQ ID NO: 4072225 - RNA, 20 nt, Vaccinia virus
agaguauccacuaaacuauu

SEQ ID NO: 4072226 - RNA, 13 nt, Vaccinia virus
agagucaauguuu

SEQ ID NO: 4072227 - RNA, 13 nt, Vaccinia virus
agaguccauguau

SEQ ID NO: 4072228 - RNA, 15 nt, Vaccinia virus
agagugauaauauau

SEQ ID NO: 4072229 - RNA, 19 nt, Vaccinia virus
agauaaacuaggauuuaaa

SEQ ID NO: 4072230 - RNA, 21 nt, Vaccinia virus
agauaaagaguccuauauauu

SEQ ID NO: 4072231 - RNA, 14 nt, Vaccinia virus
agauaaauuuauca

SEQ ID NO: 4072232 - RNA, 14 nt, Vaccinia virus
agauaacaguguaa

SEQ ID NO: 4072233 - RNA, 16 nt, Vaccinia virus
agauaauaacagagua

SEQ ID NO: 4072234 - RNA, 23 nt, Vaccinia virus
agauaauagggagaaaugacauu

SEQ ID NO: 4072235 - RNA, 21 nt, Vaccinia virus
agauacagauguuacaaaugu

SEQ ID NO: 4072236 - RNA, 14 nt, Vaccinia virus
agauacaucuauau

SEQ ID NO: 4072237 - RNA, 17 nt, Vaccinia virus
agauacauuguaugaug

SEQ ID NO: 4072238 - RNA, 13 nt, Vaccinia virus
agauacguauuag

SEQ ID NO: 4072239 - RNA, 16 nt, Vaccinia virus
agauacuaguaugaug

SEQ ID NO: 4072240 - RNA, 19 nt, Vaccinia virus
agauacuaucaaaauaucu

SEQ ID NO: 4072241 - RNA, 22 nt, Vaccinia virus
agauacuguguaaagaaauggu

SEQ ID NO: 4072242 - RNA, 14 nt, Vaccinia virus
agauagaaaugaau

SEQ ID NO: 4072243 - RNA, 17 nt, Vaccinia virus
agauagacgaggaaaca

SEQ ID NO: 4072244 - RNA, 17 nt, Vaccinia virus
agauagagacuccaaac

SEQ ID NO: 4072245 - RNA, 19 nt, Vaccinia virus
agauagagaugagaugucu

SEQ ID NO: 4072246 - RNA, 19 nt, Vaccinia virus
agauagcguauaucucuau

SEQ ID NO: 4072247 - RNA, 18 nt, Vaccinia virus
agauaguuuuaguuucca

SEQ ID NO: 4072248 - RNA, 17 nt, Vaccinia virus
agauaguuuuuuucauu

SEQ ID NO: 4072249 - RNA, 23 nt, Vaccinia virus
agauauaaaugacaaguauaaug

SEQ ID NO: 4072250 - RNA, 19 nt, Vaccinia virus
agauauacgcuaucuauau

SEQ ID NO: 4072251 - RNA, 22 nt, Vaccinia virus
agauauagcaccaucuauucca

SEQ ID NO: 4072252 - RNA, 19 nt, Vaccinia virus
agauauauauggucuuaug

SEQ ID NO: 4072253 - RNA, 23 nt, Vaccinia virus
agauaucucuggauauaucacaa

SEQ ID NO: 4072254 - RNA, 19 nt, Vaccinia virus
agauaucuucuuuuuucca

SEQ ID NO: 4072255 - RNA, 18 nt, Vaccinia virus
agauaugauaaaacuauu

SEQ ID NO: 4072256 - RNA, 17 nt, Vaccinia virus
agauauggucaaaucaa

SEQ ID NO: 4072257 - RNA, 13 nt, Vaccinia virus
agauauuaucuau

SEQ ID NO: 4072258 - RNA, 22 nt, Vaccinia virus
agauauuuccauuuaucuacug

SEQ ID NO: 4072259 - RNA, 21 nt, Vaccinia virus
agauauuuuaugggaaaaacg

SEQ ID NO: 4072260 - RNA, 15 nt, Vaccinia virus
agaucaagaaacauu

SEQ ID NO: 4072261 - RNA, 15 nt, Vaccinia virus
agaucauuaaauguu

SEQ ID NO: 4072262 - RNA, 20 nt, Vaccinia virus
agauccuuguucuauuccca

SEQ ID NO: 4072263 - RNA, 20 nt, Vaccinia virus
agaucuaaagauaaucuucu

SEQ ID NO: 4072264 - RNA, 15 nt, Vaccinia virus
agaucuaauuuuguu

SEQ ID NO: 4072265 - RNA, 19 nt, Vaccinia virus
agaucugaauuaaauaugu

SEQ ID NO: 4072266 - RNA, 18 nt, Vaccinia virus
agaucugagaauggauga

SEQ ID NO: 4072267 - RNA, 22 nt, Vaccinia virus
agaugaaaaauuuuccacaucu

SEQ ID NO: 4072268 - RNA, 22 nt, Vaccinia virus
agaugaaucaaauguaacuauu

SEQ ID NO: 4072269 - RNA, 16 nt, Vaccinia virus
agaugauaaaaacauu

SEQ ID NO: 4072270 - RNA, 22 nt, Vaccinia virus
agaugauuuggcuauuaaacag

SEQ ID NO: 4072271 - RNA, 15 nt, Vaccinia virus
agaugcaaacauuau

SEQ ID NO: 4072272 - RNA, 22 nt, Vaccinia virus
agaugcuaguguaccaauaugu

SEQ ID NO: 4072273 - RNA, 13 nt, Vaccinia virus
agaugcuauguau

SEQ ID NO: 4072274 - RNA, 16 nt, Vaccinia virus
agauguaaguaugaug

SEQ ID NO: 4072275 - RNA, 18 nt, Vaccinia virus
agauguaaguaugauguc

SEQ ID NO: 4072276 - RNA, 22 nt, Vaccinia virus
agauguauuagacaaaacuauu

SEQ ID NO: 4072277 - RNA, 17 nt, Vaccinia virus
agauguuaaaugaauua

SEQ ID NO: 4072278 - RNA, 21 nt, Vaccinia virus
agauguuagaaaaaaugaugc

SEQ ID NO: 4072279 - RNA, 19 nt, Vaccinia virus
agauguuuagaaaauggau

SEQ ID NO: 4072280 - RNA, 20 nt, Vaccinia virus
agauuagacauaucagauga

SEQ ID NO: 4072281 - RNA, 23 nt, Vaccinia virus
agauuagucagaccauucuuggu

SEQ ID NO: 4072282 - RNA, 19 nt, Vaccinia virus
agauuaucaaaaucuuguc

SEQ ID NO: 4072283 - RNA, 19 nt, Vaccinia virus
agauuauggagcaaacauu

SEQ ID NO: 4072284 - RNA, 15 nt, Vaccinia virus
agauuccuuuucuac

SEQ ID NO: 4072285 - RNA, 22 nt, Vaccinia virus
agauucucauuugauaaaaauu

SEQ ID NO: 4072286 - RNA, 17 nt, Vaccinia virus
agauugaucauguagaa

SEQ ID NO: 4072287 - RNA, 13 nt, Vaccinia virus
agauugcauggug

SEQ ID NO: 4072288 - RNA, 20 nt, Vaccinia virus
agauuggguuaauaaauaca

SEQ ID NO: 4072289 - RNA, 14 nt, Vaccinia virus
agauuguucucuua

SEQ ID NO: 4072290 - RNA, 21 nt, Vaccinia virus
agauuuaaggaaccagaauga

SEQ ID NO: 4072291 - RNA, 12 nt, Vaccinia virus
agauuuagaaau

SEQ ID NO: 4072292 - RNA, 14 nt, Vaccinia virus
agauuuagaaaugu

SEQ ID NO: 4072293 - RNA, 23 nt, Vaccinia virus
agauuuauugacggcuacucuaa

SEQ ID NO: 4072294 - RNA, 15 nt, Vaccinia virus
agauuuccaaagaua

SEQ ID NO: 4072295 - RNA, 18 nt, Vaccinia virus
agauuucugacaauuacu

SEQ ID NO: 4072296 - RNA, 13 nt, Vaccinia virus
agauuuucaauua

SEQ ID NO: 4072297 - RNA, 16 nt, Vaccinia virus
agauuuuguauuaccu

SEQ ID NO: 4072298 - RNA, 12 nt, Vaccinia virus
agcaaaaaauga

SEQ ID NO: 4072299 - RNA, 12 nt, Vaccinia virus
agcaaaaauaua

SEQ ID NO: 4072300 - RNA, 14 nt, Vaccinia virus
agcaaaauaauuaa

SEQ ID NO: 4072301 - RNA, 12 nt, Vaccinia virus
agcaaagaauga

SEQ ID NO: 4072302 - RNA, 21 nt, Vaccinia virus
agcaagacuaacacacaaugu

SEQ ID NO: 4072303 - RNA, 14 nt, Vaccinia virus
agcaagauacuuua

SEQ ID NO: 4072304 - RNA, 18 nt, Vaccinia virus
agcaagauuuuuaaacaa

SEQ ID NO: 4072305 - RNA, 14 nt, Vaccinia virus
agcaauucauguac

SEQ ID NO: 4072306 - RNA, 17 nt, Vaccinia virus
aaauuccccauauacca

SEQ ID NO: 4072307 - RNA, 17 nt, Vaccinia virus
aaauuccgcuacuaaua

SEQ ID NO: 4072308 - RNA, 14 nt, Vaccinia virus
aaauugauaaugag

SEQ ID NO: 4072309 - RNA, 22 nt, Vaccinia virus
aaauugauagagaguucauuua

SEQ ID NO: 4072310 - RNA, 22 nt, Vaccinia virus
aaauugcgacacuauucaugua

SEQ ID NO: 4072311 - RNA, 23 nt, Vaccinia virus
aaauugcgacacuauucauguaa

SEQ ID NO: 4072312 - RNA, 20 nt, Vaccinia virus
aaauugguauaaauguugua

SEQ ID NO: 4072313 - RNA, 21 nt, Vaccinia virus
aaauuggucuguguuacauau

SEQ ID NO: 4072314 - RNA, 22 nt, Vaccinia virus
aaauugucugaugaagaauuau

SEQ ID NO: 4072315 - RNA, 19 nt, Vaccinia virus
aaauuugauuguauacuuu

SEQ ID NO: 4072316 - RNA, 15 nt, Vaccinia virus
aaauuugucauuuau

SEQ ID NO: 4072317 - RNA, 22 nt, Vaccinia virus
aaauuuguucguccgucaugau

SEQ ID NO: 4072318 - RNA, 11 nt, Vaccinia virus
aaauuuucuaa

SEQ ID NO: 4072319 - RNA, 16 nt, Vaccinia virus
aaauuuuuaauccaaa

SEQ ID NO: 4072320 - RNA, 11 nt, Vaccinia virus
aacaaaacaau

SEQ ID NO: 4072321 - RNA, 12 nt, Vaccinia virus
aacaaaauacuc

SEQ ID NO: 4072322 - RNA, 23 nt, Vaccinia virus
aacaaaaucuaacagauacaaau

SEQ ID NO: 4072323 - RNA, 15 nt, Vaccinia virus
aacaaacaucucacc

SEQ ID NO: 4072324 - RNA, 16 nt, Vaccinia virus
aacaaacuauacaaga

SEQ ID NO: 4072325 - RNA, 19 nt, Vaccinia virus
aacaaauucugcaauaucu

SEQ ID NO: 4072326 - RNA, 21 nt, Vaccinia virus
aacaaauucuuuguugaacgu

SEQ ID NO: 4072327 - RNA, 16 nt, Vaccinia virus
aacaacucguuauuac

SEQ ID NO: 4072328 - RNA, 23 nt, Vaccinia virus
aacaagaucaugaacacgaugau

SEQ ID NO: 4072329 - RNA, 23 nt, Vaccinia virus
aacaaggcgauuauaaaguggaa

SEQ ID NO: 4072330 - RNA, 19 nt, Vaccinia virus
aacaaguuuggauuaucgu

SEQ ID NO: 4072331 - RNA, 22 nt, Vaccinia virus
aacaauaguuuguacugcaaaa

SEQ ID NO: 4072332 - RNA, 15 nt, Vaccinia virus
aacaauaugcaaaua

SEQ ID NO: 4072333 - RNA, 21 nt, Vaccinia virus
aacaauauuaaggagauucua

SEQ ID NO: 4072334 - RNA, 20 nt, Vaccinia virus
aacaaucguuaauaaaucug

SEQ ID NO: 4072335 - RNA, 16 nt, Vaccinia virus
aacaauguauacaaau

SEQ ID NO: 4072336 - RNA, 11 nt, Vaccinia virus
aacaauguuug

SEQ ID NO: 4072337 - RNA, 17 nt, Vaccinia virus
aacaauugucuguaaac

SEQ ID NO: 4072338 - RNA, 22 nt, Vaccinia virus
aacaauuuuguauuauucugaa

SEQ ID NO: 4072339 - RNA, 16 nt, Vaccinia virus
aacaauuuuuuguucu

SEQ ID NO: 4072340 - RNA, 16 nt, Vaccinia virus
aacacacacugagaaa

SEQ ID NO: 4072341 - RNA, 23 nt, Vaccinia virus
aacacacacugagaaacagcaua

SEQ ID NO: 4072342 - RNA, 15 nt, Vaccinia virus
aacacaucaauuucg

SEQ ID NO: 4072343 - RNA, 14 nt, Vaccinia virus
aacacauuaaacaa

SEQ ID NO: 4072344 - RNA, 21 nt, Vaccinia virus
aacacccauuuauuguacaaa

SEQ ID NO: 4072345 - RNA, 20 nt, Vaccinia virus
aacacuauacucauauuaau

SEQ ID NO: 4072346 - RNA, 17 nt, Vaccinia virus
aacacugguaacuauau

SEQ ID NO: 4072347 - RNA, 13 nt, Vaccinia virus
aacagaaaaaaca

SEQ ID NO: 4072348 - RNA, 17 nt, Vaccinia virus
aacagaaaaaacaaugu

SEQ ID NO: 4072349 - RNA, 18 nt, Vaccinia virus
aacagaaacuagaggaga

SEQ ID NO: 4072350 - RNA, 22 nt, Vaccinia virus
aacagaauaaacaaaauaaugu

SEQ ID NO: 4072351 - RNA, 19 nt, Vaccinia virus
aacagagccaucuguaaaa

SEQ ID NO: 4072352 - RNA, 18 nt, Vaccinia virus
aacagaguagauauuaau

SEQ ID NO: 4072353 - RNA, 23 nt, Vaccinia virus
aacaggaaacgcuguauauggaa

SEQ ID NO: 4072354 - RNA, 15 nt, Vaccinia virus
aacaggucauauucu

SEQ ID NO: 4072355 - RNA, 13 nt, Vaccinia virus
aacaguaaaagaa

SEQ ID NO: 4072356 - RNA, 14 nt, Vaccinia virus
aacaguaucauuua

SEQ ID NO: 4072357 - RNA, 16 nt, Vaccinia virus
aacaguucuaccacca

SEQ ID NO: 4072358 - RNA, 18 nt, Vaccinia virus
aacauacuauuguuuauu

SEQ ID NO: 4072359 - RNA, 13 nt, Vaccinia virus
aacauaugauauu

SEQ ID NO: 4072360 - RNA, 10 nt, Vaccinia virus
aacauauucu

SEQ ID NO: 4072361 - RNA, 12 nt, Vaccinia virus
aacauauucuca

SEQ ID NO: 4072362 - RNA, 17 nt, Vaccinia virus
aacaucaaaaaauuaua

SEQ ID NO: 4072363 - RNA, 13 nt, Vaccinia virus
aacaucaaacaug

SEQ ID NO: 4072364 - RNA, 17 nt, Vaccinia virus
aacaucaacacuuauau

SEQ ID NO: 4072365 - RNA, 21 nt, Vaccinia virus
aacaucauuauuuuugaagau

SEQ ID NO: 4072366 - RNA, 20 nt, Vaccinia virus
aacauccauuuauagaauuu

SEQ ID NO: 4072367 - RNA, 24 nt, Vaccinia virus
aacaucgauucccauaugauguuu

SEQ ID NO: 4072368 - RNA, 19 nt, Vaccinia virus
aacaucuagccucgguaau

SEQ ID NO: 4072369 - RNA, 14 nt, Vaccinia virus
aacauggaaguuau

SEQ ID NO: 4072370 - RNA, 20 nt, Vaccinia virus
aacauggggauugaaaauag

SEQ ID NO: 4072371 - RNA, 18 nt, Vaccinia virus
aacaugucucuaaaugug

SEQ ID NO: 4072372 - RNA, 20 nt, Vaccinia virus
aacauguuacuauagcauua

SEQ ID NO: 4072373 - RNA, 13 nt, Vaccinia virus
aacauuaggaaau

SEQ ID NO: 4072374 - RNA, 17 nt, Vaccinia virus
aacauucugauuuaaga

SEQ ID NO: 4072375 - RNA, 13 nt, Vaccinia virus
aacauuugcauua

SEQ ID NO: 4072376 - RNA, 21 nt, Vaccinia virus
aacauuuguguuuguaucuua

SEQ ID NO: 4072377 - RNA, 21 nt, Vaccinia virus
aacauuuuuauaaacaugaaa

SEQ ID NO: 4072378 - RNA, 11 nt, Vaccinia virus
aaccaaacauu

SEQ ID NO: 4072379 - RNA, 20 nt, Vaccinia virus
aaccaacgucauaaaaaugu

SEQ ID NO: 4072380 - RNA, 23 nt, Vaccinia virus
aaccaaggacuuuguagaaauau

SEQ ID NO: 4072381 - RNA, 23 nt, Vaccinia virus
aaccaauuacugauaauguagaa

SEQ ID NO: 4072382 - RNA, 16 nt, Vaccinia virus
aaccacggaucguaau

SEQ ID NO: 4072383 - RNA, 22 nt, Vaccinia virus
aaccaguauguuuaauaugaaa

SEQ ID NO: 4072384 - RNA, 12 nt, Vaccinia virus
aaccaguauuug

SEQ ID NO: 4072385 - RNA, 20 nt, Vaccinia virus
aaccaugcuacaaucauuau

SEQ ID NO: 4072386 - RNA, 14 nt, Vaccinia virus
aaccauucauuaau

SEQ ID NO: 4072387 - RNA, 20 nt, Vaccinia virus
aaccccauauaauguagaca

SEQ ID NO: 4072388 - RNA, 13 nt, Vaccinia virus
aaccgaaaguaaa

SEQ ID NO: 4072389 - RNA, 15 nt, Vaccinia virus
aaccgauaauaaugu

SEQ ID NO: 4072390 - RNA, 21 nt, Vaccinia virus
aaccguuauuuauagcagaua

SEQ ID NO: 4072391 - RNA, 17 nt, Vaccinia virus
aaccuaacucagucaau

SEQ ID NO: 4072392 - RNA, 15 nt, Vaccinia virus
aaccuauaaugucca

SEQ ID NO: 4072393 - RNA, 20 nt, Vaccinia virus
aaccucacuguuaaaaauau

SEQ ID NO: 4072394 - RNA, 12 nt, Vaccinia virus
aaccuucuuauu

SEQ ID NO: 4072395 - RNA, 17 nt, Vaccinia virus
aacgacuuauaauuaau

SEQ ID NO: 4072396 - RNA, 19 nt, Vaccinia virus
aacgagauaucuuguuaca

SEQ ID NO: 4072397 - RNA, 20 nt, Vaccinia virus
aacgaguucaaauaugaaau

SEQ ID NO: 4072398 - RNA, 19 nt, Vaccinia virus
aacgaugccuuuuguaaau

SEQ ID NO: 4072399 - RNA, 18 nt, Vaccinia virus
aacgauuagcuacagagu

SEQ ID NO: 4072400 - RNA, 23 nt, Vaccinia virus
aacgauugguauucguacaggua

SEQ ID NO: 4072401 - RNA, 19 nt, Vaccinia virus
aacgauuuaauuacagagu

SEQ ID NO: 4072402 - RNA, 21 nt, Vaccinia virus
aacgauuugaucgauuacauu

SEQ ID NO: 4072403 - RNA, 18 nt, Vaccinia virus
aacgcuacuauauauuau

SEQ ID NO: 4072404 - RNA, 18 nt, Vaccinia virus
aacguacaaauggauaaa

SEQ ID NO: 4072405 - RNA, 14 nt, Vaccinia virus
aacguauaaaugac

SEQ ID NO: 4072406 - RNA, 16 nt, Vaccinia virus
aacguauauuuuauuu

SEQ ID NO: 4072407 - RNA, 19 nt, Vaccinia virus
aacgucgguauuauauuau

SEQ ID NO: 4072408 - RNA, 21 nt, Vaccinia virus
aacgugauuauuauugucaua

SEQ ID NO: 4072409 - RNA, 16 nt, Vaccinia virus
aacguuccguaucugu

SEQ ID NO: 4072410 - RNA, 15 nt, Vaccinia virus
aacuaauauuaggaa

SEQ ID NO: 4072411 - RNA, 15 nt, Vaccinia virus
aacuacgucaagacu

SEQ ID NO: 4072412 - RNA, 19 nt, Vaccinia virus
aacuauacgaaauaaauau

SEQ ID NO: 4072413 - RNA, 15 nt, Vaccinia virus
aacuauagacaaaau

SEQ ID NO: 4072414 - RNA, 18 nt, Vaccinia virus
aacuauauucuuagaaau

SEQ ID NO: 4072415 - RNA, 16 nt, Vaccinia virus
aacuaucgauaguaau

SEQ ID NO: 4072416 - RNA, 15 nt, Vaccinia virus
aacuaucuaaaugua

SEQ ID NO: 4072417 - RNA, 15 nt, Vaccinia virus
aacuaugucaguagu

SEQ ID NO: 4072418 - RNA, 21 nt, Vaccinia virus
aacuauugaagccauugaaaa

SEQ ID NO: 4072419 - RNA, 15 nt, Vaccinia virus
aacuauuguuuuguu

SEQ ID NO: 4072420 - RNA, 14 nt, Vaccinia virus
aacuauuucuaaga

SEQ ID NO: 4072421 - RNA, 15 nt, Vaccinia virus
aacuauuuuuaacuu

SEQ ID NO: 4072422 - RNA, 18 nt, Vaccinia virus
aacucacauuucaaauau

SEQ ID NO: 4072423 - RNA, 19 nt, Vaccinia virus
aacucacauuucaaauaua

SEQ ID NO: 4072424 - RNA, 14 nt, Vaccinia virus
aacucaucgagaua

SEQ ID NO: 4072425 - RNA, 15 nt, Vaccinia virus
aacucauucuauaua

SEQ ID NO: 4072426 - RNA, 20 nt, Vaccinia virus
aacucuauaguuuguuuuca

SEQ ID NO: 4072427 - RNA, 20 nt, Vaccinia virus
aacucucuucuauaaaaaug

SEQ ID NO: 4072428 - RNA, 16 nt, Vaccinia virus
aacucuugaagaugau

SEQ ID NO: 4072429 - RNA, 22 nt, Vaccinia virus
aaucuaacauugauuuuaaaau

SEQ ID NO: 4072430 - RNA, 19 nt, Vaccinia virus
aaucuaagaaauuuaaaau

SEQ ID NO: 4072431 - RNA, 12 nt, Vaccinia virus
aaucuaccaguc

SEQ ID NO: 4072432 - RNA, 21 nt, Vaccinia virus
aaucuaguaaaucaacugaua

SEQ ID NO: 4072433 - RNA, 18 nt, Vaccinia virus
aaucuauaucauguagaa

SEQ ID NO: 4072434 - RNA, 17 nt, Vaccinia virus
aaucuaucuuauauaca

SEQ ID NO: 4072435 - RNA, 15 nt, Vaccinia virus
aaucuaugauauugu

SEQ ID NO: 4072436 - RNA, 16 nt, Vaccinia virus
aaucuauuagaauugg

SEQ ID NO: 4072437 - RNA, 16 nt, Vaccinia virus
aaucuauuuuggucau

SEQ ID NO: 4072438 - RNA, 13 nt, Vaccinia virus
aaucucacaauau

SEQ ID NO: 4072439 - RNA, 22 nt, Vaccinia virus
aaucuccgcaauacauuucuca

SEQ ID NO: 4072440 - RNA, 15 nt, Vaccinia virus
aaucucuauuugcca

SEQ ID NO: 4072441 - RNA, 17 nt, Vaccinia virus
aaucucuguuauuuccu

SEQ ID NO: 4072442 - RNA, 22 nt, Vaccinia virus
aaucuguacuauguguuaaaaa

SEQ ID NO: 4072443 - RNA, 22 nt, Vaccinia virus
aaucuuuagacgguugagaaaa

SEQ ID NO: 4072444 - RNA, 20 nt, Vaccinia virus
aaugaaacggugaauacaau

SEQ ID NO: 4072445 - RNA, 12 nt, Vaccinia virus
aaugaaaugaua

SEQ ID NO: 4072446 - RNA, 17 nt, Vaccinia virus
aaugaaauucuuguuua

SEQ ID NO: 4072447 - RNA, 19 nt, Vaccinia virus
aaugaacauaguaagaaau

SEQ ID NO: 4072448 - RNA, 14 nt, Vaccinia virus
aaugaaugaauaua

SEQ ID NO: 4072449 - RNA, 20 nt, Vaccinia virus
aaugacaaaaucaacuacau

SEQ ID NO: 4072450 - RNA, 13 nt, Vaccinia virus
aaugacaaacauu

SEQ ID NO: 4072451 - RNA, 14 nt, Vaccinia virus
aaugacauggaaau

SEQ ID NO: 4072452 - RNA, 18 nt, Vaccinia virus
aaugagauguuaaaugaa

SEQ ID NO: 4072453 - RNA, 22 nt, Vaccinia virus
aaugaguaagacaauaggaaau

SEQ ID NO: 4072454 - RNA, 14 nt, Vaccinia virus
aaugaguauuuaua

SEQ ID NO: 4072455 - RNA, 18 nt, Vaccinia virus
aaugauaaugauacagua

SEQ ID NO: 4072456 - RNA, 20 nt, Vaccinia virus
aaugaugaugaugaaaugga

SEQ ID NO: 4072457 - RNA, 23 nt, Vaccinia virus
aaugaugccucugccuuuuuaua

SEQ ID NO: 4072458 - RNA, 18 nt, Vaccinia virus
aaugcacacaguauuauc

SEQ ID NO: 4072459 - RNA, 14 nt, Vaccinia virus
aaugcagaaaugau

SEQ ID NO: 4072460 - RNA, 15 nt, Vaccinia virus
aaugcauuaaauaau

SEQ ID NO: 4072461 - RNA, 18 nt, Vaccinia virus
aaugcauuuuauaccgaa

SEQ ID NO: 4072462 - RNA, 15 nt, Vaccinia virus
aaugccacaaaugaa

SEQ ID NO: 4072463 - RNA, 16 nt, Vaccinia virus
aaugcccguaaagaua

SEQ ID NO: 4072464 - RNA, 15 nt, Vaccinia virus
aaugcgccaaaguua

SEQ ID NO: 4072465 - RNA, 22 nt, Vaccinia virus
aaugcgcgaaccaaaaugugau

SEQ ID NO: 4072466 - RNA, 17 nt, Vaccinia virus
aaugcggauuuagaaaa

SEQ ID NO: 4072467 - RNA, 18 nt, Vaccinia virus
aaugcucaguaaauguau

SEQ ID NO: 4072468 - RNA, 23 nt, Vaccinia virus
aaugcuucucuguuuaaugaauu

SEQ ID NO: 4072469 - RNA, 14 nt, Vaccinia virus
aaugcuugaaaaug

SEQ ID NO: 4072470 - RNA, 15 nt, Vaccinia virus
aauggagaaauacuu

SEQ ID NO: 4072471 - RNA, 16 nt, Vaccinia virus
aauggauaauuuccau

SEQ ID NO: 4072472 - RNA, 13 nt, Vaccinia virus
aauggauccacug

SEQ ID NO: 4072473 - RNA, 17 nt, Vaccinia virus
aauggaucuaguauuau

SEQ ID NO: 4072474 - RNA, 20 nt, Vaccinia virus
aauggaugaagcauauuacu

SEQ ID NO: 4072475 - RNA, 19 nt, Vaccinia virus
aauggaugaggaagugaua

SEQ ID NO: 4072476 - RNA, 16 nt, Vaccinia virus
aauggugguaaaacua

SEQ ID NO: 4072477 - RNA, 16 nt, Vaccinia virus
aauguaauuuuuguuu

SEQ ID NO: 4072478 - RNA, 16 nt, Vaccinia virus
aauguacauucgaaaa

SEQ ID NO: 4072479 - RNA, 15 nt, Vaccinia virus
aauguaguaaauaua

SEQ ID NO: 4072480 - RNA, 17 nt, Vaccinia virus
aauguauggcuucaaga

SEQ ID NO: 4072481 - RNA, 22 nt, Vaccinia virus
aauguauuaguuaaauauuaaa

SEQ ID NO: 4072482 - RNA, 16 nt, Vaccinia virus
aaugucaggaaaugua

SEQ ID NO: 4072483 - RNA, 23 nt, Vaccinia virus
aauguccaaaucuaguuguggaa

SEQ ID NO: 4072484 - RNA, 15 nt, Vaccinia virus
aaugucccuucaaga

SEQ ID NO: 4072485 - RNA, 15 nt, Vaccinia virus
aaugucucucauaau

SEQ ID NO: 4072486 - RNA, 22 nt, Vaccinia virus
aaugugauucucugaaaaugua

SEQ ID NO: 4072487 - RNA, 17 nt, Vaccinia virus
aauguguauaaaauaua

SEQ ID NO: 4072488 - RNA, 16 nt, Vaccinia virus
aauguguuaaaaagaa

SEQ ID NO: 4072489 - RNA, 21 nt, Vaccinia virus
aauguuaagcauauccugaau

SEQ ID NO: 4072490 - RNA, 15 nt, Vaccinia virus
aauguucucaagaac

SEQ ID NO: 4072491 - RNA, 20 nt, Vaccinia virus
aauguuguagguuaaaauua

SEQ ID NO: 4072492 - RNA, 23 nt, Vaccinia virus
aauguuuuugaaacuagaaucgu

SEQ ID NO: 4072493 - RNA, 13 nt, Vaccinia virus
aauguuuuuguuu

SEQ ID NO: 4072494 - RNA, 15 nt, Vaccinia virus
aauuaaaaccaagua

SEQ ID NO: 4072495 - RNA, 17 nt, Vaccinia virus
aauuaauaauauaaaau

SEQ ID NO: 4072496 - RNA, 18 nt, Vaccinia virus
aauuaaucuaguagaaaa

SEQ ID NO: 4072497 - RNA, 15 nt, Vaccinia virus
aauuaaugagauugu

SEQ ID NO: 4072498 - RNA, 16 nt, Vaccinia virus
aauuacauagaugaua

SEQ ID NO: 4072499 - RNA, 18 nt, Vaccinia virus
aauuacugauaauguaga

SEQ ID NO: 4072500 - RNA, 19 nt, Vaccinia virus
aauuacugauaauguagaa

SEQ ID NO: 4072501 - RNA, 15 nt, Vaccinia virus
aauuagaaagugaua

SEQ ID NO: 4072502 - RNA, 16 nt, Vaccinia virus
aauuagaaauucccaa

SEQ ID NO: 4072503 - RNA, 20 nt, Vaccinia virus
aauuagagacuuuauaacag

SEQ ID NO: 4072504 - RNA, 14 nt, Vaccinia virus
aauuagauuucgaa

SEQ ID NO: 4072505 - RNA, 15 nt, Vaccinia virus
aauuaggagaacuua

SEQ ID NO: 4072506 - RNA, 15 nt, Vaccinia virus
aauuaguaacuguua

SEQ ID NO: 4072507 - RNA, 21 nt, Vaccinia virus
aauuaguagaaucaaaggaua

SEQ ID NO: 4072508 - RNA, 16 nt, Vaccinia virus
aauuaguuuuucuuua

SEQ ID NO: 4072509 - RNA, 15 nt, Vaccinia virus
aauuauaaaauuaua

SEQ ID NO: 4072510 - RNA, 16 nt, Vaccinia virus
aauuauaagaaauaua

SEQ ID NO: 4072511 - RNA, 14 nt, Vaccinia virus
aauuauagacuuga

SEQ ID NO: 4072512 - RNA, 22 nt, Vaccinia virus
aauuauaguaagccaauuccaa

SEQ ID NO: 4072513 - RNA, 21 nt, Vaccinia virus
aauuaucaaauacuucaaaau

SEQ ID NO: 4072514 - RNA, 19 nt, Vaccinia virus
aauuaucacauauuaaaaa

SEQ ID NO: 4072515 - RNA, 12 nt, Vaccinia virus
aauuaugauaca

SEQ ID NO: 4072516 - RNA, 15 nt, Vaccinia virus
aauuaugauagaaau

SEQ ID NO: 4072517 - RNA, 12 nt, Vaccinia virus
aauuaugaugau

SEQ ID NO: 4072518 - RNA, 15 nt, Vaccinia virus
aauuauguaaaacau

SEQ ID NO: 4072519 - RNA, 13 nt, Vaccinia virus
aauuauuagaaua

SEQ ID NO: 4072520 - RNA, 19 nt, Vaccinia virus
aauuauuagaauaagagug

SEQ ID NO: 4072521 - RNA, 15 nt, Vaccinia virus
aauuauucuaucaau

SEQ ID NO: 4072522 - RNA, 20 nt, Vaccinia virus
aauuauuuaguuuuuucuuu

SEQ ID NO: 4072523 - RNA, 15 nt, Vaccinia virus
aauuauuuuguaaga

SEQ ID NO: 4072524 - RNA, 13 nt, Vaccinia virus
aauucaaauagau

SEQ ID NO: 4072525 - RNA, 18 nt, Vaccinia virus
aauucagcgguaaagaua

SEQ ID NO: 4072526 - RNA, 16 nt, Vaccinia virus
aauucaggaacuauaa

SEQ ID NO: 4072527 - RNA, 13 nt, Vaccinia virus
aauucaucaucug

SEQ ID NO: 4072528 - RNA, 13 nt, Vaccinia virus
aauucaucuucua

SEQ ID NO: 4072529 - RNA, 14 nt, Vaccinia virus
aauucauuccuaua

SEQ ID NO: 4072530 - RNA, 13 nt, Vaccinia virus
aauucauuuccau

SEQ ID NO: 4072531 - RNA, 18 nt, Vaccinia virus
aauucgguuauaaaugaa

SEQ ID NO: 4072532 - RNA, 20 nt, Vaccinia virus
aauucuacaacauuauuaua

SEQ ID NO: 4072533 - RNA, 17 nt, Vaccinia virus
aauucuaggcucaguau

SEQ ID NO: 4072534 - RNA, 23 nt, Vaccinia virus
aauucuauauauguuuucaucau

SEQ ID NO: 4072535 - RNA, 21 nt, Vaccinia virus
aauucuauccaagauacuuau

SEQ ID NO: 4072536 - RNA, 16 nt, Vaccinia virus
aauucuauuagaucau

SEQ ID NO: 4072537 - RNA, 17 nt, Vaccinia virus
aauucuuaucaauaaca

SEQ ID NO: 4072538 - RNA, 21 nt, Vaccinia virus
aauugaauugcgauuauaaga

SEQ ID NO: 4072539 - RNA, 17 nt, Vaccinia virus
aauugaccguguaauau

SEQ ID NO: 4072540 - RNA, 21 nt, Vaccinia virus
aauugaucaagaguaacuauu

SEQ ID NO: 4072541 - RNA, 14 nt, Vaccinia virus
aauugauucuuauu

SEQ ID NO: 4072542 - RNA, 14 nt, Vaccinia virus
aauuggaacacaag

SEQ ID NO: 4072543 - RNA, 21 nt, Vaccinia virus
aauugguuuaugauguauaau

SEQ ID NO: 4072544 - RNA, 17 nt, Vaccinia virus
aauuguaaaaacauaca

SEQ ID NO: 4072545 - RNA, 13 nt, Vaccinia virus
aauugucuaauga

SEQ ID NO: 4072546 - RNA, 14 nt, Vaccinia virus
aauuguuucuuuua

SEQ ID NO: 4072547 - RNA, 21 nt, Vaccinia virus
aauuuacucgcauuucuaaua

SEQ ID NO: 4072548 - RNA, 23 nt, Vaccinia virus
aauuuaguuacugcuauacagau

SEQ ID NO: 4072549 - RNA, 23 nt, Vaccinia virus
aauuuauagaugcuggaagacaa

SEQ ID NO: 4072550 - RNA, 15 nt, Vaccinia virus
aauuuauaucuaaga

SEQ ID NO: 4072551 - RNA, 14 nt, Vaccinia virus
aauuuauuucuaaa

SEQ ID NO: 4072552 - RNA, 14 nt, Vaccinia virus
aauuucauauuaau

SEQ ID NO: 4072553 - RNA, 17 nt, Vaccinia virus
aucagauaaguaugaag

SEQ ID NO: 4072554 - RNA, 20 nt, Vaccinia virus
aucagcauccacucauauag

SEQ ID NO: 4072555 - RNA, 20 nt, Vaccinia virus
aucagcaucuugaauagaaa

SEQ ID NO: 4072556 - RNA, 21 nt, Vaccinia virus
aucaggaauccaaagagcuau

SEQ ID NO: 4072557 - RNA, 17 nt, Vaccinia virus
aucaggauauaaagaaa

SEQ ID NO: 4072558 - RNA, 18 nt, Vaccinia virus
aucaggauauaaagaaaa

SEQ ID NO: 4072559 - RNA, 19 nt, Vaccinia virus
aucagucgagauacagaaa

SEQ ID NO: 4072560 - RNA, 13 nt, Vaccinia virus
aucauaaaaguug

SEQ ID NO: 4072561 - RNA, 14 nt, Vaccinia virus
aucauagaugaaug

SEQ ID NO: 4072562 - RNA, 12 nt, Vaccinia virus
aucauaguuuuu

SEQ ID NO: 4072563 - RNA, 19 nt, Vaccinia virus
aucauauuauaaagaugau

SEQ ID NO: 4072564 - RNA, 15 nt, Vaccinia virus
aucaucaucugaaau

SEQ ID NO: 4072565 - RNA, 15 nt, Vaccinia virus
aucaucauuguguaa

SEQ ID NO: 4072566 - RNA, 21 nt, Vaccinia virus
aucauccaccuguuuuaacau

SEQ ID NO: 4072567 - RNA, 14 nt, Vaccinia virus
aucauccauguacu

SEQ ID NO: 4072568 - RNA, 21 nt, Vaccinia virus
aucaucuacuccaugucuauu

SEQ ID NO: 4072569 - RNA, 17 nt, Vaccinia virus
aucaucuguuuuaaaaa

SEQ ID NO: 4072570 - RNA, 13 nt, Vaccinia virus
aucaugaaaugau

SEQ ID NO: 4072571 - RNA, 15 nt, Vaccinia virus
aucaugaauggauuu

SEQ ID NO: 4072572 - RNA, 17 nt, Vaccinia virus
aucaugacguaaaugua

SEQ ID NO: 4072573 - RNA, 13 nt, Vaccinia virus
aucaugaugauuu

SEQ ID NO: 4072574 - RNA, 20 nt, Vaccinia virus
aucauggauuuuauauagau

SEQ ID NO: 4072575 - RNA, 16 nt, Vaccinia virus
aucauguguaaaaagu

SEQ ID NO: 4072576 - RNA, 18 nt, Vaccinia virus
aucauucauuccuccaua

SEQ ID NO: 4072577 - RNA, 12 nt, Vaccinia virus
aucauuucacaa

SEQ ID NO: 4072578 - RNA, 19 nt, Vaccinia virus
aucauuuuugcaucauuua

SEQ ID NO: 4072579 - RNA, 15 nt, Vaccinia virus
auccaagaaaaaguc

SEQ ID NO: 4072580 - RNA, 22 nt, Vaccinia virus
auccaagaguuccgagauaauu

SEQ ID NO: 4072581 - RNA, 17 nt, Vaccinia virus
auccaaucuaagaaauu

SEQ ID NO: 4072582 - RNA, 15 nt, Vaccinia virus
auccaucaaaaaaca

SEQ ID NO: 4072583 - RNA, 20 nt, Vaccinia virus
auccaucuguauuaaagaua

SEQ ID NO: 4072584 - RNA, 23 nt, Vaccinia virus
auccaugguuuuaaguaaaugau

SEQ ID NO: 4072585 - RNA, 15 nt, Vaccinia virus
auccauucuaaugau

SEQ ID NO: 4072586 - RNA, 15 nt, Vaccinia virus
auccauuuacaacuc

SEQ ID NO: 4072587 - RNA, 13 nt, Vaccinia virus
aucccaaacauug

SEQ ID NO: 4072588 - RNA, 14 nt, Vaccinia virus
auccccuuucaaua

SEQ ID NO: 4072589 - RNA, 20 nt, Vaccinia virus
aucccuucucgcaaauucua

SEQ ID NO: 4072590 - RNA, 17 nt, Vaccinia virus
auccggauccuuuucuu

SEQ ID NO: 4072591 - RNA, 22 nt, Vaccinia virus
auccuaaugcauguuauagaug

SEQ ID NO: 4072592 - RNA, 15 nt, Vaccinia virus
auccuaauucacaau

SEQ ID NO: 4072593 - RNA, 15 nt, Vaccinia virus
auccuagaugaugau

SEQ ID NO: 4072594 - RNA, 13 nt, Vaccinia virus
auccuauaaacau

SEQ ID NO: 4072595 - RNA, 13 nt, Vaccinia virus
auccuauaacuuc

SEQ ID NO: 4072596 - RNA, 14 nt, Vaccinia virus
auccuauacucuga

SEQ ID NO: 4072597 - RNA, 13 nt, Vaccinia virus
auccucaaacauc

SEQ ID NO: 4072598 - RNA, 22 nt, Vaccinia virus
auccucagacucugauuugaac

SEQ ID NO: 4072599 - RNA, 21 nt, Vaccinia virus
auccucagucaucuugucuag

SEQ ID NO: 4072600 - RNA, 20 nt, Vaccinia virus
auccuuauaaagaaugaaug

SEQ ID NO: 4072601 - RNA, 15 nt, Vaccinia virus
auccuuauccuuuac

SEQ ID NO: 4072602 - RNA, 15 nt, Vaccinia virus
auccuucuagaauua

SEQ ID NO: 4072603 - RNA, 18 nt, Vaccinia virus
auccuuuaagaucaacau

SEQ ID NO: 4072604 - RNA, 17 nt, Vaccinia virus
auccuuuagauggugau

SEQ ID NO: 4072605 - RNA, 15 nt, Vaccinia virus
aucgaaaucauuuau

SEQ ID NO: 4072606 - RNA, 13 nt, Vaccinia virus
aucgaaaucuuaa

SEQ ID NO: 4072607 - RNA, 14 nt, Vaccinia virus
aucgaaugauauau

SEQ ID NO: 4072608 - RNA, 14 nt, Vaccinia virus
aucgacuauagaca

SEQ ID NO: 4072609 - RNA, 17 nt, Vaccinia virus
aucgacuauuuuaaaua

SEQ ID NO: 4072610 - RNA, 19 nt, Vaccinia virus
aucgacuugggucuucuca

SEQ ID NO: 4072611 - RNA, 14 nt, Vaccinia virus
aucgauaauuauuu

SEQ ID NO: 4072612 - RNA, 21 nt, Vaccinia virus
aucgauaauugucucauaugu

SEQ ID NO: 4072613 - RNA, 13 nt, Vaccinia virus
aucgaucauaucu

SEQ ID NO: 4072614 - RNA, 18 nt, Vaccinia virus
aucgauugauagugaaug

SEQ ID NO: 4072615 - RNA, 18 nt, Vaccinia virus
aucgauuuucaaauccau

SEQ ID NO: 4072616 - RNA, 18 nt, Vaccinia virus
aucgcauacuaguauuua

SEQ ID NO: 4072617 - RNA, 16 nt, Vaccinia virus
aucgcauagaaauaca

SEQ ID NO: 4072618 - RNA, 16 nt, Vaccinia virus
aucgccuuuauuucca

SEQ ID NO: 4072619 - RNA, 15 nt, Vaccinia virus
aucggcuuuaacaau

SEQ ID NO: 4072620 - RNA, 16 nt, Vaccinia virus
aucgucuguauuaaug

SEQ ID NO: 4072621 - RNA, 18 nt, Vaccinia virus
aucgugguuaacaauaug

SEQ ID NO: 4072622 - RNA, 14 nt, Vaccinia virus
aucgugugucuaua

SEQ ID NO: 4072623 - RNA, 22 nt, Vaccinia virus
aucguuuaaaauacuaaauuga

SEQ ID NO: 4072624 - RNA, 16 nt, Vaccinia virus
aucuaaacaauaccuc

SEQ ID NO: 4072625 - RNA, 22 nt, Vaccinia virus
aucuaaacauaagacuuauucu

SEQ ID NO: 4072626 - RNA, 20 nt, Vaccinia virus
aucuaaagauaaucuucucu

SEQ ID NO: 4072627 - RNA, 18 nt, Vaccinia virus
aucuaacagauacaaauu

SEQ ID NO: 4072628 - RNA, 22 nt, Vaccinia virus
aucuaauaaguugcgaugaaau

SEQ ID NO: 4072629 - RNA, 13 nt, Vaccinia virus
aucuaaucaucaa

SEQ ID NO: 4072630 - RNA, 15 nt, Vaccinia virus
aucuaaugaaugaag

SEQ ID NO: 4072631 - RNA, 14 nt, Vaccinia virus
aucuacacaaauag

SEQ ID NO: 4072632 - RNA, 21 nt, Vaccinia virus
aucuaccauaguuacagaauu

SEQ ID NO: 4072633 - RNA, 14 nt, Vaccinia virus
aucuacgaauguau

SEQ ID NO: 4072634 - RNA, 15 nt, Vaccinia virus
aucuacuagaaagau

SEQ ID NO: 4072635 - RNA, 18 nt, Vaccinia virus
aucuacucauagaaaggu

SEQ ID NO: 4072636 - RNA, 21 nt, Vaccinia virus
aucuacugauaaaacuggaag

SEQ ID NO: 4072637 - RNA, 15 nt, Vaccinia virus
aucuagacucuauau

SEQ ID NO: 4072638 - RNA, 13 nt, Vaccinia virus
aucuagagauugu

SEQ ID NO: 4072639 - RNA, 19 nt, Vaccinia virus
aucuagauuccaaucauug

SEQ ID NO: 4072640 - RNA, 15 nt, Vaccinia virus
aucuagguugccaaa

SEQ ID NO: 4072641 - RNA, 23 nt, Vaccinia virus
aucuaguuagaacuaucauagau

SEQ ID NO: 4072642 - RNA, 16 nt, Vaccinia virus
aucuaguuagcaauuu

SEQ ID NO: 4072643 - RNA, 15 nt, Vaccinia virus
aucuauauauaccuu

SEQ ID NO: 4072644 - RNA, 14 nt, Vaccinia virus
aucuauauauccuu

SEQ ID NO: 4072645 - RNA, 22 nt, Vaccinia virus
aucuauauauguauuuuaauaa

SEQ ID NO: 4072646 - RNA, 20 nt, Vaccinia virus
aucuauauuguuuaauauau

SEQ ID NO: 4072647 - RNA, 20 nt, Vaccinia virus
aucuauauuuaucacagucu

SEQ ID NO: 4072648 - RNA, 20 nt, Vaccinia virus
aucuaugguauuaagaauuc

SEQ ID NO: 4072649 - RNA, 17 nt, Vaccinia virus
aucuauuauugaugcaa

SEQ ID NO: 4072650 - RNA, 13 nt, Vaccinia virus
aucuauucccuug

SEQ ID NO: 4072651 - RNA, 22 nt, Vaccinia virus
aucuauuucaucguuuuguaua

SEQ ID NO: 4072652 - RNA, 13 nt, Vaccinia virus
aucuauuuuuguu

SEQ ID NO: 4072653 - RNA, 18 nt, Vaccinia virus
aucuauuuuuuugucaug

SEQ ID NO: 4072654 - RNA, 14 nt, Vaccinia virus
aucucaauaugaua

SEQ ID NO: 4072655 - RNA, 23 nt, Vaccinia virus
aucucagucuguggcguuugcuu

SEQ ID NO: 4072656 - RNA, 15 nt, Vaccinia virus
aucucauauuaaaaa

SEQ ID NO: 4072657 - RNA, 14 nt, Vaccinia virus
aucucaucagacau

SEQ ID NO: 4072658 - RNA, 19 nt, Vaccinia virus
aucuccacuuuugcuuuac

SEQ ID NO: 4072659 - RNA, 18 nt, Vaccinia virus
aucuccaucgaugauaca

SEQ ID NO: 4072660 - RNA, 15 nt, Vaccinia virus
aucucuaacuacuau

SEQ ID NO: 4072661 - RNA, 18 nt, Vaccinia virus
aucucuagauauguauuu

SEQ ID NO: 4072662 - RNA, 19 nt, Vaccinia virus
aucucuauaucuaugguug

SEQ ID NO: 4072663 - RNA, 16 nt, Vaccinia virus
aucucucauaagaaag

SEQ ID NO: 4072664 - RNA, 20 nt, Vaccinia virus
aucucuucuaguuucacuag

SEQ ID NO: 4072665 - RNA, 23 nt, Vaccinia virus
aucucuuuagaauguuaucgaug

SEQ ID NO: 4072666 - RNA, 15 nt, Vaccinia virus
aucucuuucuccuuu

SEQ ID NO: 4072667 - RNA, 17 nt, Vaccinia virus
aucucuuuuuuaacuaa

SEQ ID NO: 4072668 - RNA, 20 nt, Vaccinia virus
aucugaaauaacauauagau

SEQ ID NO: 4072669 - RNA, 16 nt, Vaccinia virus
aucugaagaaaguaau

SEQ ID NO: 4072670 - RNA, 18 nt, Vaccinia virus
aucugaaggugcaaccga

SEQ ID NO: 4072671 - RNA, 15 nt, Vaccinia virus
aucugaauaaaacau

SEQ ID NO: 4072672 - RNA, 15 nt, Vaccinia virus
aucugaauuaaauau

SEQ ID NO: 4072673 - RNA, 15 nt, Vaccinia virus
aucugacauaaacau

SEQ ID NO: 4072674 - RNA, 24 nt, Vaccinia virus
aucugacauaaacauaucaaaaga

SEQ ID NO: 4072675 - RNA, 14 nt, Vaccinia virus
aucugauagaaaga

SEQ ID NO: 4072676 - RNA, 13 nt, Vaccinia virus
aucugaucuuguu

SEQ ID NO: 4072677 - RNA, 18 nt, Vaccinia virus
aucugcacuaauuaacag

SEQ ID NO: 4072678 - RNA, 19 nt, Vaccinia virus
aucugggaauaaaauacua

SEQ ID NO: 4072679 - RNA, 17 nt, Vaccinia virus
aucuguacuucuguaca

SEQ ID NO: 4072680 - RNA, 15 nt, Vaccinia virus
aucugucaauagaca

SEQ ID NO: 4072681 - RNA, 22 nt, Vaccinia virus
aucugugauuucguuagucaua

SEQ ID NO: 4072682 - RNA, 13 nt, Vaccinia virus
aucuuaauaagca

SEQ ID NO: 4072683 - RNA, 17 nt, Vaccinia virus
aucuuauuuuuaacaaa

SEQ ID NO: 4072684 - RNA, 15 nt, Vaccinia virus
aucuuccuucuuauu

SEQ ID NO: 4072685 - RNA, 19 nt, Vaccinia virus
aucuucguuaaaaaguuuu

SEQ ID NO: 4072686 - RNA, 20 nt, Vaccinia virus
aucuucucuccuuucaaacu

SEQ ID NO: 4072687 - RNA, 20 nt, Vaccinia virus
aucuugaugcgguuuaauaa

SEQ ID NO: 4072688 - RNA, 15 nt, Vaccinia virus
aucuugauuuauaga

SEQ ID NO: 4072689 - RNA, 19 nt, Vaccinia virus
aucuugucugcuuaauaca

SEQ ID NO: 4072690 - RNA, 15 nt, Vaccinia virus
aucuuuaguaaacau

SEQ ID NO: 4072691 - RNA, 13 nt, Vaccinia virus
aucuuucauuucu

SEQ ID NO: 4072692 - RNA, 21 nt, Vaccinia virus
aucuuucccggagauaagacu

SEQ ID NO: 4072693 - RNA, 19 nt, Vaccinia virus
aucuuuggagaaucgucua

SEQ ID NO: 4072694 - RNA, 15 nt, Vaccinia virus
aucuuugucaaauau

SEQ ID NO: 4072695 - RNA, 19 nt, Vaccinia virus
aucuuuucacguuaaauga

SEQ ID NO: 4072696 - RNA, 16 nt, Vaccinia virus
aucuuuucucaaagau

SEQ ID NO: 4072697 - RNA, 14 nt, Vaccinia virus
augaaaaaaaacua

SEQ ID NO: 4072698 - RNA, 13 nt, Vaccinia virus
augaaacauuuaa

SEQ ID NO: 4072699 - RNA, 17 nt, Vaccinia virus
augaaacguuuggaaac

SEQ ID NO: 4072700 - RNA, 23 nt, Vaccinia virus
augaaagauacaacaaauuaaac

SEQ ID NO: 4072701 - RNA, 15 nt, Vaccinia virus
augaaauaaguauga

SEQ ID NO: 4072702 - RNA, 22 nt, Vaccinia virus
augaaauagcguucgucaacau

SEQ ID NO: 4072703 - RNA, 20 nt, Vaccinia virus
augaaauaucuuaaggagaa

SEQ ID NO: 4072704 - RNA, 20 nt, Vaccinia virus
augaaaucgcuuaauagaca

SEQ ID NO: 4072705 - RNA, 21 nt, Vaccinia virus
augaaaugauucucucaacau

SEQ ID NO: 4072706 - RNA, 14 nt, Vaccinia virus
augaaauuauucac

SEQ ID NO: 4072707 - RNA, 16 nt, Vaccinia virus
augaacaaagaaaugg

SEQ ID NO: 4072708 - RNA, 13 nt, Vaccinia virus
augaagaaugccu

SEQ ID NO: 4072709 - RNA, 22 nt, Vaccinia virus
augaagauagaucacaaaucac

SEQ ID NO: 4072710 - RNA, 17 nt, Vaccinia virus
augaaguugagaaugau

SEQ ID NO: 4072711 - RNA, 15 nt, Vaccinia virus
augaauacuaaugcc

SEQ ID NO: 4072712 - RNA, 16 nt, Vaccinia virus
augaauauaguaauua

SEQ ID NO: 4072713 - RNA, 21 nt, Vaccinia virus
augaauaucugcaauauauau

SEQ ID NO: 4072714 - RNA, 16 nt, Vaccinia virus
augaaugaugauauau

SEQ ID NO: 4072715 - RNA, 18 nt, Vaccinia virus
augaauggauacuuguau

SEQ ID NO: 4072716 - RNA, 19 nt, Vaccinia virus
augaauggaucaccguguu

SEQ ID NO: 4072717 - RNA, 17 nt, Vaccinia virus
augaauggaugcuagaa

SEQ ID NO: 4072718 - RNA, 14 nt, Vaccinia virus
augaauuaauuaag

SEQ ID NO: 4072719 - RNA, 13 nt, Vaccinia virus
augacaaacauug

SEQ ID NO: 4072720 - RNA, 22 nt, Vaccinia virus
augacacuaguuaagaacaugu

SEQ ID NO: 4072721 - RNA, 21 nt, Vaccinia virus
augaccaguuugcaauaugca

SEQ ID NO: 4072722 - RNA, 17 nt, Vaccinia virus
augacgaauacauuuau

SEQ ID NO: 4072723 - RNA, 15 nt, Vaccinia virus
augacucucaaauua

SEQ ID NO: 4072724 - RNA, 15 nt, Vaccinia virus
augagaucuguauag

SEQ ID NO: 4072725 - RNA, 18 nt, Vaccinia virus
augagaucuucuauuuua

SEQ ID NO: 4072726 - RNA, 19 nt, Vaccinia virus
augagauguuaaaugaauu

SEQ ID NO: 4072727 - RNA, 13 nt, Vaccinia virus
augagauguuauu

SEQ ID NO: 4072728 - RNA, 17 nt, Vaccinia virus
augaggcguuuaucaua

SEQ ID NO: 4072729 - RNA, 18 nt, Vaccinia virus
augaggucgcaaaaaaac

SEQ ID NO: 4072730 - RNA, 17 nt, Vaccinia virus
augaguacuuguacaca

SEQ ID NO: 4072731 - RNA, 15 nt, Vaccinia virus
augaguguagaugcu

SEQ ID NO: 4072732 - RNA, 12 nt, Vaccinia virus
augauaaaugau

SEQ ID NO: 4072733 - RNA, 15 nt, Vaccinia virus
augauaaugauacag

SEQ ID NO: 4072734 - RNA, 13 nt, Vaccinia virus
augauacacguau

SEQ ID NO: 4072735 - RNA, 21 nt, Vaccinia virus
augauacgauacuauauguau

SEQ ID NO: 4072736 - RNA, 17 nt, Vaccinia virus
augauacucucaaccau

SEQ ID NO: 4072737 - RNA, 21 nt, Vaccinia virus
augauacuucacucaucgauu

SEQ ID NO: 4072738 - RNA, 18 nt, Vaccinia virus
augauaguggaucucaau

SEQ ID NO: 4072739 - RNA, 14 nt, Vaccinia virus
augauauaauuaau

SEQ ID NO: 4072740 - RNA, 18 nt, Vaccinia virus
augauauaucuaguguuu

SEQ ID NO: 4072741 - RNA, 21 nt, Vaccinia virus
augauaugauuuuuaaucaag

SEQ ID NO: 4072742 - RNA, 15 nt, Vaccinia virus
augauauguugugau

SEQ ID NO: 4072743 - RNA, 14 nt, Vaccinia virus
augauauuguugau

SEQ ID NO: 4072744 - RNA, 17 nt, Vaccinia virus
augaucaagaaggaaau

SEQ ID NO: 4072745 - RNA, 21 nt, Vaccinia virus
augaucaagagugauuuaaga

SEQ ID NO: 4072746 - RNA, 18 nt, Vaccinia virus
augaucaggaaaguuuau

SEQ ID NO: 4072747 - RNA, 16 nt, Vaccinia virus
augaucuccacgcaau

SEQ ID NO: 4072748 - RNA, 14 nt, Vaccinia virus
augaugaaauguau

SEQ ID NO: 4072749 - RNA, 16 nt, Vaccinia virus
augauuucagauacua

SEQ ID NO: 4072750 - RNA, 14 nt, Vaccinia virus
augcaaaaaaaugu

SEQ ID NO: 4072751 - RNA, 12 nt, Vaccinia virus
augcaaacauua

SEQ ID NO: 4072752 - RNA, 23 nt, Vaccinia virus
augcaaacuuacagaaacaauga

SEQ ID NO: 4072753 - RNA, 18 nt, Vaccinia virus
augcaucgugaaaagaaa

SEQ ID NO: 4072754 - RNA, 17 nt, Vaccinia virus
augcaucuuauugaaug

SEQ ID NO: 4072755 - RNA, 19 nt, Vaccinia virus
augcauguuagauaacgga

SEQ ID NO: 4072756 - RNA, 14 nt, Vaccinia virus
augcauguuucaua

SEQ ID NO: 4072757 - RNA, 13 nt, Vaccinia virus
augcauuaucauu

SEQ ID NO: 4072758 - RNA, 14 nt, Vaccinia virus
augccuacauauca

SEQ ID NO: 4072759 - RNA, 22 nt, Vaccinia virus
augccuauuaggacagauacua

SEQ ID NO: 4072760 - RNA, 19 nt, Vaccinia virus
augccuuuccuggaauauc

SEQ ID NO: 4072761 - RNA, 18 nt, Vaccinia virus
augcuagugcucaaacaa

SEQ ID NO: 4072762 - RNA, 16 nt, Vaccinia virus
augcuauuagaaaugg

SEQ ID NO: 4072763 - RNA, 14 nt, Vaccinia virus
augcucuuaaauaa

SEQ ID NO: 4072764 - RNA, 22 nt, Vaccinia virus
augcuuaacuugacuaaauauu

SEQ ID NO: 4072765 - RNA, 12 nt, Vaccinia virus
augcuugaaaau

SEQ ID NO: 4072766 - RNA, 14 nt, Vaccinia virus
auggaaaguguaaa

SEQ ID NO: 4072767 - RNA, 17 nt, Vaccinia virus
auggaagaguuaaugaa

SEQ ID NO: 4072768 - RNA, 15 nt, Vaccinia virus
auggagcaaacauua

SEQ ID NO: 4072769 - RNA, 22 nt, Vaccinia virus
auggagucccagaccagaaaug

SEQ ID NO: 4072770 - RNA, 21 nt, Vaccinia virus
auggauaauccgucuauuuua

SEQ ID NO: 4072771 - RNA, 15 nt, Vaccinia virus
auggauauauuaaag

SEQ ID NO: 4072772 - RNA, 18 nt, Vaccinia virus
auggauuaaaucguguau

SEQ ID NO: 4072773 - RNA, 19 nt, Vaccinia virus
auggauuaucggaaauacu

SEQ ID NO: 4072774 - RNA, 20 nt, Vaccinia virus
auggauuuaucauaucaugg

SEQ ID NO: 4072775 - RNA, 18 nt, Vaccinia virus
auggcaaauguauagaac

SEQ ID NO: 4072776 - RNA, 15 nt, Vaccinia virus
auggcaagaaaugga

SEQ ID NO: 4072777 - RNA, 15 nt, Vaccinia virus
auggccgaugaaugg

SEQ ID NO: 4072778 - RNA, 14 nt, Vaccinia virus
augguaaaggauaa

SEQ ID NO: 4072779 - RNA, 15 nt, Vaccinia virus
augguacuuaugaca

SEQ ID NO: 4072780 - RNA, 12 nt, Vaccinia virus
augguauauaca

SEQ ID NO: 4072781 - RNA, 18 nt, Vaccinia virus
augguaucauuacaugcu

SEQ ID NO: 4072782 - RNA, 16 nt, Vaccinia virus
augguauuaagaauuc

SEQ ID NO: 4072783 - RNA, 16 nt, Vaccinia virus
auggucucacaaaaaa

SEQ ID NO: 4072784 - RNA, 22 nt, Vaccinia virus
auggucucggauugguggauau

SEQ ID NO: 4072785 - RNA, 16 nt, Vaccinia virus
augguuucugugacua

SEQ ID NO: 4072786 - RNA, 19 nt, Vaccinia virus
auguaacccuuuuuaucga

SEQ ID NO: 4072787 - RNA, 21 nt, Vaccinia virus
auguaaccuacuagaaugaua

SEQ ID NO: 4072788 - RNA, 13 nt, Vaccinia virus
auguaagucuuac

SEQ ID NO: 4072789 - RNA, 13 nt, Vaccinia virus
auguaauacuuug

SEQ ID NO: 4072790 - RNA, 17 nt, Vaccinia virus
auguaaucgaaauaaua

SEQ ID NO: 4072791 - RNA, 20 nt, Vaccinia virus
auguacgauccaaacaaugu

SEQ ID NO: 4072792 - RNA, 19 nt, Vaccinia virus
auguagaagguucauaugu

SEQ ID NO: 4072793 - RNA, 22 nt, Vaccinia virus
auguagaauuuuuuaaaaaguu

SEQ ID NO: 4072794 - RNA, 18 nt, Vaccinia virus
auguagagguaaaaagac

SEQ ID NO: 4072795 - RNA, 17 nt, Vaccinia virus
auguagcaaacaugaua

SEQ ID NO: 4072796 - RNA, 15 nt, Vaccinia virus
auguaguaguaacug

SEQ ID NO: 4072797 - RNA, 14 nt, Vaccinia virus
auguaguucguaaa

SEQ ID NO: 4072798 - RNA, 15 nt, Vaccinia virus
auguauaaaguguau

SEQ ID NO: 4072799 - RNA, 20 nt, Vaccinia virus
auguauaauaauaaacggaa

SEQ ID NO: 4072800 - RNA, 23 nt, Vaccinia virus
auguauaauauaaaaaaacauua

SEQ ID NO: 4072801 - RNA, 23 nt, Vaccinia virus
auguauaauuugguaaugguuuc

SEQ ID NO: 4072802 - RNA, 15 nt, Vaccinia virus
auuauagauuuucca

SEQ ID NO: 4072803 - RNA, 19 nt, Vaccinia virus
auuauagcaauauguguaa

SEQ ID NO: 4072804 - RNA, 21 nt, Vaccinia virus
auuauagcuucuggacauaau

SEQ ID NO: 4072805 - RNA, 22 nt, Vaccinia virus
auuauaucauugucuaauagau

SEQ ID NO: 4072806 - RNA, 22 nt, Vaccinia virus
auuauaucguauuugugcuaua

SEQ ID NO: 4072807 - RNA, 14 nt, Vaccinia virus
auuaucaaaagaca

SEQ ID NO: 4072808 - RNA, 19 nt, Vaccinia virus
auuaucaaaagacaugaua

SEQ ID NO: 4072809 - RNA, 13 nt, Vaccinia virus
auuaucaaaauuu

SEQ ID NO: 4072810 - RNA, 21 nt, Vaccinia virus
auuaucaaagucacaaagcaa

SEQ ID NO: 4072811 - RNA, 23 nt, Vaccinia virus
auuaucaggaacauuaucaauuu

SEQ ID NO: 4072812 - RNA, 17 nt, Vaccinia virus
auuauccaucuaacaaa

SEQ ID NO: 4072813 - RNA, 15 nt, Vaccinia virus
auuauccaugauaga

SEQ ID NO: 4072814 - RNA, 21 nt, Vaccinia virus
auuauccaugauagaaagaaa

SEQ ID NO: 4072815 - RNA, 17 nt, Vaccinia virus
auuaucccauuguaaag

SEQ ID NO: 4072816 - RNA, 17 nt, Vaccinia virus
auuaucgacauucaugg

SEQ ID NO: 4072817 - RNA, 18 nt, Vaccinia virus
auuaucgagauuuaauaa

SEQ ID NO: 4072818 - RNA, 18 nt, Vaccinia virus
auuaucgagcgugauguu

SEQ ID NO: 4072819 - RNA, 22 nt, Vaccinia virus
auuaucgagcgugauguuguaa

SEQ ID NO: 4072820 - RNA, 15 nt, Vaccinia virus
auuaucgcguucaga

SEQ ID NO: 4072821 - RNA, 23 nt, Vaccinia virus
auuaucguuccugguauauagau

SEQ ID NO: 4072822 - RNA, 18 nt, Vaccinia virus
auuaucucccauaaucuu

SEQ ID NO: 4072823 - RNA, 13 nt, Vaccinia virus
auuaucugaaaug

SEQ ID NO: 4072824 - RNA, 15 nt, Vaccinia virus
auuaucugaaauggu

SEQ ID NO: 4072825 - RNA, 21 nt, Vaccinia virus
auuaugaaaauuauaaugaau

SEQ ID NO: 4072826 - RNA, 22 nt, Vaccinia virus
auuaugacgucagccauagcau

SEQ ID NO: 4072827 - RNA, 19 nt, Vaccinia virus
auuaugauacucuuauaga

SEQ ID NO: 4072828 - RNA, 17 nt, Vaccinia virus
auuaugaugauacauuu

SEQ ID NO: 4072829 - RNA, 15 nt, Vaccinia virus
auuauguaaaacaaa

SEQ ID NO: 4072830 - RNA, 14 nt, Vaccinia virus
auuauguuuaaaga

SEQ ID NO: 4072831 - RNA, 20 nt, Vaccinia virus
auuauguuuuaugaauagau

SEQ ID NO: 4072832 - RNA, 18 nt, Vaccinia virus
auuauuagauuuaauagc

SEQ ID NO: 4072833 - RNA, 21 nt, Vaccinia virus
auuauugaagaugaugugaau

SEQ ID NO: 4072834 - RNA, 14 nt, Vaccinia virus
auuauuuaauggag

SEQ ID NO: 4072835 - RNA, 18 nt, Vaccinia virus
auuauuuaauuuaauaca

SEQ ID NO: 4072836 - RNA, 14 nt, Vaccinia virus
auuauuuauaccuc

SEQ ID NO: 4072837 - RNA, 14 nt, Vaccinia virus
auuauuuuaaaccu

SEQ ID NO: 4072838 - RNA, 16 nt, Vaccinia virus
auuauuuuuacagcga

SEQ ID NO: 4072839 - RNA, 24 nt, Vaccinia virus
auucaaaauggcaauuauacuaga

SEQ ID NO: 4072840 - RNA, 12 nt, Vaccinia virus
auucaagagaau

SEQ ID NO: 4072841 - RNA, 20 nt, Vaccinia virus
auucaagauuuuauuaucga

SEQ ID NO: 4072842 - RNA, 21 nt, Vaccinia virus
auucaagcaaaaacaaaaaac

SEQ ID NO: 4072843 - RNA, 15 nt, Vaccinia virus
auucaagucaaagaa

SEQ ID NO: 4072844 - RNA, 16 nt, Vaccinia virus
auucacaauaaaauuc

SEQ ID NO: 4072845 - RNA, 16 nt, Vaccinia virus
auucaccgaucaaaug

SEQ ID NO: 4072846 - RNA, 15 nt, Vaccinia virus
auucacguuauauaa

SEQ ID NO: 4072847 - RNA, 20 nt, Vaccinia virus
auucagaauuucuacauaau

SEQ ID NO: 4072848 - RNA, 12 nt, Vaccinia virus
auucagacacuu

SEQ ID NO: 4072849 - RNA, 23 nt, Vaccinia virus
auucaguuuauagagcaaaauaa

SEQ ID NO: 4072850 - RNA, 22 nt, Vaccinia virus
auucauaauaagauaaauccau

SEQ ID NO: 4072851 - RNA, 19 nt, Vaccinia virus
auucauaugacuaaaaugc

SEQ ID NO: 4072852 - RNA, 18 nt, Vaccinia virus
auucauauuuuaguuuuu

SEQ ID NO: 4072853 - RNA, 13 nt, Vaccinia virus
auucaucaacauu

SEQ ID NO: 4072854 - RNA, 13 nt, Vaccinia virus
auucaucaauaau

SEQ ID NO: 4072855 - RNA, 21 nt, Vaccinia virus
auucauccuguugucuaaauc

SEQ ID NO: 4072856 - RNA, 18 nt, Vaccinia virus
auucauggaguuagaaaa

SEQ ID NO: 4072857 - RNA, 14 nt, Vaccinia virus
auucauuaauucua

SEQ ID NO: 4072858 - RNA, 15 nt, Vaccinia virus
auucauuuagaaugg

SEQ ID NO: 4072859 - RNA, 12 nt, Vaccinia virus
auucauuuccau

SEQ ID NO: 4072860 - RNA, 16 nt, Vaccinia virus
auucauuuucaauuau

SEQ ID NO: 4072861 - RNA, 13 nt, Vaccinia virus
auucauuuucuau

SEQ ID NO: 4072862 - RNA, 12 nt, Vaccinia virus
auuccaaagauc

SEQ ID NO: 4072863 - RNA, 20 nt, Vaccinia virus
auuccacgaacuucuaauug

SEQ ID NO: 4072864 - RNA, 18 nt, Vaccinia virus
auuccguauauagcacaa

SEQ ID NO: 4072865 - RNA, 20 nt, Vaccinia virus
auuccuaccaaacaaaauuu

SEQ ID NO: 4072866 - RNA, 20 nt, Vaccinia virus
auuccucuaacgaacucaag

SEQ ID NO: 4072867 - RNA, 17 nt, Vaccinia virus
auucgaaauuagaaagu

SEQ ID NO: 4072868 - RNA, 15 nt, Vaccinia virus
auucgaauucaaaug

SEQ ID NO: 4072869 - RNA, 18 nt, Vaccinia virus
auucgacucaacauaaau

SEQ ID NO: 4072870 - RNA, 17 nt, Vaccinia virus
auucggagacuguauau

SEQ ID NO: 4072871 - RNA, 13 nt, Vaccinia virus
auucguaaaucuu

SEQ ID NO: 4072872 - RNA, 22 nt, Vaccinia virus
auucgucuuucugaaugucgaa

SEQ ID NO: 4072873 - RNA, 17 nt, Vaccinia virus
auucguuagcaaaauua

SEQ ID NO: 4072874 - RNA, 14 nt, Vaccinia virus
auucuaauggauga

SEQ ID NO: 4072875 - RNA, 21 nt, Vaccinia virus
auucuaccuuacccauaaaca

SEQ ID NO: 4072876 - RNA, 22 nt, Vaccinia virus
auucuaccuuuuuauuuucuaa

SEQ ID NO: 4072877 - RNA, 16 nt, Vaccinia virus
auucuagauacaagau

SEQ ID NO: 4072878 - RNA, 13 nt, Vaccinia virus
auucuauacuuaa

SEQ ID NO: 4072879 - RNA, 16 nt, Vaccinia virus
auucuaucguaucugu

SEQ ID NO: 4072880 - RNA, 13 nt, Vaccinia virus
auucuaugauggu

SEQ ID NO: 4072881 - RNA, 17 nt, Vaccinia virus
auucucaaacuccuaau

SEQ ID NO: 4072882 - RNA, 18 nt, Vaccinia virus
auucucauuaauuaacca

SEQ ID NO: 4072883 - RNA, 19 nt, Vaccinia virus
auucucgaauccgaaauua

SEQ ID NO: 4072884 - RNA, 23 nt, Vaccinia virus
auucucucaucuaucaaaaguua

SEQ ID NO: 4072885 - RNA, 19 nt, Vaccinia virus
auucugaauggauccacca

SEQ ID NO: 4072886 - RNA, 18 nt, Vaccinia virus
auucugauuggucaaugu

SEQ ID NO: 4072887 - RNA, 18 nt, Vaccinia virus
auucugcaauaucuucgu

SEQ ID NO: 4072888 - RNA, 15 nt, Vaccinia virus
auucuggacauagcu

SEQ ID NO: 4072889 - RNA, 15 nt, Vaccinia virus
auucugguuuaaaaa

SEQ ID NO: 4072890 - RNA, 14 nt, Vaccinia virus
auucuuaucaauaa

SEQ ID NO: 4072891 - RNA, 17 nt, Vaccinia virus
auucuugguuaaacuca

SEQ ID NO: 4072892 - RNA, 14 nt, Vaccinia virus
auugaacaauagau

SEQ ID NO: 4072893 - RNA, 13 nt, Vaccinia virus
auugaagaaggag

SEQ ID NO: 4072894 - RNA, 15 nt, Vaccinia virus
auugaguggaaaguu

SEQ ID NO: 4072895 - RNA, 15 nt, Vaccinia virus
auugauagugaauga

SEQ ID NO: 4072896 - RNA, 14 nt, Vaccinia virus
auugaucaaacauu

SEQ ID NO: 4072897 - RNA, 14 nt, Vaccinia virus
auugaucauuuaac

SEQ ID NO: 4072898 - RNA, 20 nt, Vaccinia virus
auugaucuauuauuuaauga

SEQ ID NO: 4072899 - RNA, 19 nt, Vaccinia virus
auugaugaaguucgaugau

SEQ ID NO: 4072900 - RNA, 17 nt, Vaccinia virus
auugaugcaaauagcag

SEQ ID NO: 4072901 - RNA, 15 nt, Vaccinia virus
auugaugucuacaca

SEQ ID NO: 4072902 - RNA, 17 nt, Vaccinia virus
auugauuacuauaaaug

SEQ ID NO: 4072903 - RNA, 22 nt, Vaccinia virus
auugauugaaaaugaaaauaua

SEQ ID NO: 4072904 - RNA, 21 nt, Vaccinia virus
auugauugccauaauaauuac

SEQ ID NO: 4072905 - RNA, 22 nt, Vaccinia virus
auugauugcuguuauuaaugga

SEQ ID NO: 4072906 - RNA, 20 nt, Vaccinia virus
auugcacuauacauuuugaa

SEQ ID NO: 4072907 - RNA, 17 nt, Vaccinia virus
auugcaugauagaaugg

SEQ ID NO: 4072908 - RNA, 17 nt, Vaccinia virus
auugcauggugauuugu

SEQ ID NO: 4072909 - RNA, 16 nt, Vaccinia virus
auugccaacucucaaa

SEQ ID NO: 4072910 - RNA, 20 nt, Vaccinia virus
auugcuuauauuuucaucua

SEQ ID NO: 4072911 - RNA, 23 nt, Vaccinia virus
auuggagaaguaggaaacaggaa

SEQ ID NO: 4072912 - RNA, 15 nt, Vaccinia virus
auuggcaaauuauuu

SEQ ID NO: 4072913 - RNA, 19 nt, Vaccinia virus
auuggcacgaacaaaagga

SEQ ID NO: 4072914 - RNA, 22 nt, Vaccinia virus
auugguaaauuccauagaauau

SEQ ID NO: 4072915 - RNA, 14 nt, Vaccinia virus
auugguacgaaaua

SEQ ID NO: 4072916 - RNA, 14 nt, Vaccinia virus
auugguauaaaugu

SEQ ID NO: 4072917 - RNA, 17 nt, Vaccinia virus
auuggucaaugugaaug

SEQ ID NO: 4072918 - RNA, 21 nt, Vaccinia virus
auugguguuccgauuuuagua

SEQ ID NO: 4072919 - RNA, 23 nt, Vaccinia virus
auugguugcgucaagaacuacua

SEQ ID NO: 4072920 - RNA, 13 nt, Vaccinia virus
auuguaaaugaua

SEQ ID NO: 4072921 - RNA, 20 nt, Vaccinia virus
auuguacgguagaauugaua

SEQ ID NO: 4072922 - RNA, 16 nt, Vaccinia virus
auuguagauuguugac

SEQ ID NO: 4072923 - RNA, 19 nt, Vaccinia virus
auuguauacugucuaaacg

SEQ ID NO: 4072924 - RNA, 17 nt, Vaccinia virus
auuguauaguuaauaag

SEQ ID NO: 4072925 - RNA, 16 nt, Vaccinia virus
auuguuaaacauacau

SEQ ID NO: 4072926 - RNA, 19 nt, Vaccinia virus
caaagaauuuuagacacua

SEQ ID NO: 4072927 - RNA, 14 nt, Vaccinia virus
caaagagaaaacaa

SEQ ID NO: 4072928 - RNA, 18 nt, Vaccinia virus
caaagaggguauauccau

SEQ ID NO: 4072929 - RNA, 20 nt, Vaccinia virus
caaagauauagaacacauaa

SEQ ID NO: 4072930 - RNA, 18 nt, Vaccinia virus
caaagauggcugaaauca

SEQ ID NO: 4072931 - RNA, 19 nt, Vaccinia virus
caaaggauccgacccuaau

SEQ ID NO: 4072932 - RNA, 18 nt, Vaccinia virus
caaaggaugaaagaaagc

SEQ ID NO: 4072933 - RNA, 17 nt, Vaccinia virus
caaaguguccuccuauu

SEQ ID NO: 4072934 - RNA, 14 nt, Vaccinia virus
caaauaaaaaguau

SEQ ID NO: 4072935 - RNA, 15 nt, Vaccinia virus
caaauaacaaaaucc

SEQ ID NO: 4072936 - RNA, 12 nt, Vaccinia virus
caaauacucuaa

SEQ ID NO: 4072937 - RNA, 16 nt, Vaccinia virus
caaauagauaagaaua

SEQ ID NO: 4072938 - RNA, 22 nt, Vaccinia virus
caaauaucauaacuuaguucuu

SEQ ID NO: 4072939 - RNA, 22 nt, Vaccinia virus
caaauaucggcauuuauguuuc

SEQ ID NO: 4072940 - RNA, 23 nt, Vaccinia virus
caaauaucuuuacgaauuacuuu

SEQ ID NO: 4072941 - RNA, 21 nt, Vaccinia virus
caaauauucacaagaugaauu

SEQ ID NO: 4072942 - RNA, 17 nt, Vaccinia virus
caaaucauuguguuuau

SEQ ID NO: 4072943 - RNA, 20 nt, Vaccinia virus
caaaugaguucuguguagau

SEQ ID NO: 4072944 - RNA, 15 nt, Vaccinia virus
caaaugauuaucaaa

SEQ ID NO: 4072945 - RNA, 15 nt, Vaccinia virus
caaauggucaaugau

SEQ ID NO: 4072946 - RNA, 15 nt, Vaccinia virus
caaauguuaaacauu

SEQ ID NO: 4072947 - RNA, 18 nt, Vaccinia virus
caaauuaaacucuggaau

SEQ ID NO: 4072948 - RNA, 20 nt, Vaccinia virus
caaauuauggcguuuguauu

SEQ ID NO: 4072949 - RNA, 12 nt, Vaccinia virus
caaauuauucua

SEQ ID NO: 4072950 - RNA, 21 nt, Vaccinia virus
caaauuccggaauagauguau

SEQ ID NO: 4072951 - RNA, 21 nt, Vaccinia virus
caacaaaagguauuacaagaa

SEQ ID NO: 4072952 - RNA, 18 nt, Vaccinia virus
caacaagagcagauaucu

SEQ ID NO: 4072953 - RNA, 15 nt, Vaccinia virus
caacaaguauacaau

SEQ ID NO: 4072954 - RNA, 22 nt, Vaccinia virus
caacaauguugccucauacauc

SEQ ID NO: 4072955 - RNA, 13 nt, Vaccinia virus
caacacuauguua

SEQ ID NO: 4072956 - RNA, 13 nt, Vaccinia virus
caacagaaaauau

SEQ ID NO: 4072957 - RNA, 20 nt, Vaccinia virus
caacagacgagacuccggaa

SEQ ID NO: 4072958 - RNA, 17 nt, Vaccinia virus
caacagugauaugugua

SEQ ID NO: 4072959 - RNA, 17 nt, Vaccinia virus
caacauccuuuaauggu

SEQ ID NO: 4072960 - RNA, 17 nt, Vaccinia virus
caacaucuauaaaagua

SEQ ID NO: 4072961 - RNA, 24 nt, Vaccinia virus
caacaugauuauucuacuaucaaa

SEQ ID NO: 4072962 - RNA, 15 nt, Vaccinia virus
caacauguuuaauau

SEQ ID NO: 4072963 - RNA, 13 nt, Vaccinia virus
caacauuccaaag

SEQ ID NO: 4072964 - RNA, 13 nt, Vaccinia virus
caaccaaauacuu

SEQ ID NO: 4072965 - RNA, 15 nt, Vaccinia virus
caaccgaaaucaugg

SEQ ID NO: 4072966 - RNA, 17 nt, Vaccinia virus
caacgaucuuguuguuu

SEQ ID NO: 4072967 - RNA, 18 nt, Vaccinia virus
caacucuauaguuuguuu

SEQ ID NO: 4072968 - RNA, 16 nt, Vaccinia virus
caacugucuauacaag

SEQ ID NO: 4072969 - RNA, 20 nt, Vaccinia virus
caagaaauauggauccucua

SEQ ID NO: 4072970 - RNA, 18 nt, Vaccinia virus
caagagugcauugacuuu

SEQ ID NO: 4072971 - RNA, 13 nt, Vaccinia virus
caagauauauaca

SEQ ID NO: 4072972 - RNA, 14 nt, Vaccinia virus
caagcgaauuauuu

SEQ ID NO: 4072973 - RNA, 20 nt, Vaccinia virus
caaggaacuaaauagauuua

SEQ ID NO: 4072974 - RNA, 13 nt, Vaccinia virus
caaggaucuucua

SEQ ID NO: 4072975 - RNA, 20 nt, Vaccinia virus
caaguaucaaaagauuaaag

SEQ ID NO: 4072976 - RNA, 21 nt, Vaccinia virus
caaguaugaagaaaaauguug

SEQ ID NO: 4072977 - RNA, 22 nt, Vaccinia virus
caaguauuguuuugauaacgau

SEQ ID NO: 4072978 - RNA, 21 nt, Vaccinia virus
caaguuguagacuuuuucaaa

SEQ ID NO: 4072979 - RNA, 23 nt, Vaccinia virus
caauaaaggagucuuauagaugu

SEQ ID NO: 4072980 - RNA, 23 nt, Vaccinia virus
caauaaaguuuuuaguaugacau

SEQ ID NO: 4072981 - RNA, 22 nt, Vaccinia virus
caauaaauagcuuuacuucuau

SEQ ID NO: 4072982 - RNA, 12 nt, Vaccinia virus
caauaaaugauu

SEQ ID NO: 4072983 - RNA, 20 nt, Vaccinia virus
caauaaauguuuaaacauca

SEQ ID NO: 4072984 - RNA, 19 nt, Vaccinia virus
caauaaauuagaauauauu

SEQ ID NO: 4072985 - RNA, 23 nt, Vaccinia virus
caauaacuucacuauugaucaag

SEQ ID NO: 4072986 - RNA, 22 nt, Vaccinia virus
caauaagcaguuuccuauucca

SEQ ID NO: 4072987 - RNA, 18 nt, Vaccinia virus
caauaagcuuuagauauu

SEQ ID NO: 4072988 - RNA, 20 nt, Vaccinia virus
caauacauuuuucuauguua

SEQ ID NO: 4072989 - RNA, 16 nt, Vaccinia virus
caauagcacaauuguu

SEQ ID NO: 4072990 - RNA, 22 nt, Vaccinia virus
caauaucuaugacucugauuuc

SEQ ID NO: 4072991 - RNA, 20 nt, Vaccinia virus
caauaucugauuauuaugau

SEQ ID NO: 4072992 - RNA, 16 nt, Vaccinia virus
caauauuaucaucuug

SEQ ID NO: 4072993 - RNA, 13 nt, Vaccinia virus
caauauuuaguuu

SEQ ID NO: 4072994 - RNA, 18 nt, Vaccinia virus
caaucauugauaucuuua

SEQ ID NO: 4072995 - RNA, 21 nt, Vaccinia virus
caauccguaacggaaauuaca

SEQ ID NO: 4072996 - RNA, 22 nt, Vaccinia virus
caaucuaucacugauuaauuau

SEQ ID NO: 4072997 - RNA, 13 nt, Vaccinia virus
caaucuuuaaugu

SEQ ID NO: 4072998 - RNA, 20 nt, Vaccinia virus
caaugaacaagauuaaucuc

SEQ ID NO: 4072999 - RNA, 17 nt, Vaccinia virus
caaugaacuaauauuua

SEQ ID NO: 4073000 - RNA, 20 nt, Vaccinia virus
caaugauaaugauacaguac

SEQ ID NO: 4073001 - RNA, 22 nt, Vaccinia virus
caauggauaccuugcuauuuuu

SEQ ID NO: 4073002 - RNA, 17 nt, Vaccinia virus
caauggauggauacaau

SEQ ID NO: 4073003 - RNA, 18 nt, Vaccinia virus
caauguacgccguguggu

SEQ ID NO: 4073004 - RNA, 17 nt, Vaccinia virus
caauguuuaauuuuuuu

SEQ ID NO: 4073005 - RNA, 20 nt, Vaccinia virus
caauuaccaacuagaagucu

SEQ ID NO: 4073006 - RNA, 18 nt, Vaccinia virus
caauuauacuagaacuau

SEQ ID NO: 4073007 - RNA, 13 nt, Vaccinia virus
caauuccaaagau

SEQ ID NO: 4073008 - RNA, 13 nt, Vaccinia virus
caauuuacuucua

SEQ ID NO: 4073009 - RNA, 23 nt, Vaccinia virus
caauuuauagucgcgcuuuacau

SEQ ID NO: 4073010 - RNA, 14 nt, Vaccinia virus
caauuuuaaaugau

SEQ ID NO: 4073011 - RNA, 16 nt, Vaccinia virus
cacaaagaaagcugua

SEQ ID NO: 4073012 - RNA, 21 nt, Vaccinia virus
cacaacaucguuuuugauauu

SEQ ID NO: 4073013 - RNA, 20 nt, Vaccinia virus
cacaagauuuccaaucuuug

SEQ ID NO: 4073014 - RNA, 15 nt, Vaccinia virus
cacaauguaugaaca

SEQ ID NO: 4073015 - RNA, 14 nt, Vaccinia virus
cacagaacaguaaa

SEQ ID NO: 4073016 - RNA, 13 nt, Vaccinia virus
cacauaaacaucg

SEQ ID NO: 4073017 - RNA, 13 nt, Vaccinia virus
cacauauugaugu

SEQ ID NO: 4073018 - RNA, 22 nt, Vaccinia virus
cacauuauacuuuuuuuuggaa

SEQ ID NO: 4073019 - RNA, 20 nt, Vaccinia virus
cacauuggugcuauccauuu

SEQ ID NO: 4073020 - RNA, 18 nt, Vaccinia virus
cacauuguauauaguuua

SEQ ID NO: 4073021 - RNA, 13 nt, Vaccinia virus
caccaaacauauu

SEQ ID NO: 4073022 - RNA, 17 nt, Vaccinia virus
caccaucggaugauauu

SEQ ID NO: 4073023 - RNA, 18 nt, Vaccinia virus
caccuaucuugugcauuu

SEQ ID NO: 4073024 - RNA, 13 nt, Vaccinia virus
caccuuugccuua

SEQ ID NO: 4073025 - RNA, 20 nt, Vaccinia virus
cacgaaauaaaaaacauaau

SEQ ID NO: 4073026 - RNA, 17 nt, Vaccinia virus
cacgauacuaugcauau

SEQ ID NO: 4073027 - RNA, 14 nt, Vaccinia virus
cacgaugaugauuu

SEQ ID NO: 4073028 - RNA, 16 nt, Vaccinia virus
cacguuaaaucaucua

SEQ ID NO: 4073029 - RNA, 21 nt, Vaccinia virus
cacuaaauaguuuuuuuguuu

SEQ ID NO: 4073030 - RNA, 18 nt, Vaccinia virus
cacuaacgcgcaugauuu

SEQ ID NO: 4073031 - RNA, 12 nt, Vaccinia virus
cacuaucuucug

SEQ ID NO: 4073032 - RNA, 23 nt, Vaccinia virus
cacugucucauacacuacaguaa

SEQ ID NO: 4073033 - RNA, 20 nt, Vaccinia virus
cacuuaaaucgauauaacag

SEQ ID NO: 4073034 - RNA, 15 nt, Vaccinia virus
cacuuaaugacaaaa

SEQ ID NO: 4073035 - RNA, 16 nt, Vaccinia virus
cacuuacagaaaagau

SEQ ID NO: 4073036 - RNA, 22 nt, Vaccinia virus
cagaaagaggaucguacaucca

SEQ ID NO: 4073037 - RNA, 17 nt, Vaccinia virus
cagaaauauguuaacaa

SEQ ID NO: 4073038 - RNA, 19 nt, Vaccinia virus
cagaaauggugauuuugag

SEQ ID NO: 4073039 - RNA, 21 nt, Vaccinia virus
cagaaauugguauaaauguug

SEQ ID NO: 4073040 - RNA, 17 nt, Vaccinia virus
cagaaccuauuaacgau

SEQ ID NO: 4073041 - RNA, 20 nt, Vaccinia virus
cagaaggaggaacaguuuua

SEQ ID NO: 4073042 - RNA, 17 nt, Vaccinia virus
cagaaucaguauauauu

SEQ ID NO: 4073043 - RNA, 22 nt, Vaccinia virus
cagaauccauauuucuuaaugu

SEQ ID NO: 4073044 - RNA, 23 nt, Vaccinia virus
cagaauccgcugauggaaacaca

SEQ ID NO: 4073045 - RNA, 21 nt, Vaccinia virus
cagaaucgcaacgcuaaaaga

SEQ ID NO: 4073046 - RNA, 20 nt, Vaccinia virus
cagaaucuagauuccaauca

SEQ ID NO: 4073047 - RNA, 18 nt, Vaccinia virus
cagacgugacguguauag

SEQ ID NO: 4073048 - RNA, 12 nt, Vaccinia virus
cagacuacuuau

SEQ ID NO: 4073049 - RNA, 12 nt, Vaccinia virus
guaucuauuuua

SEQ ID NO: 4073050 - RNA, 14 nt, Vaccinia virus
guaucucaauauga

SEQ ID NO: 4073051 - RNA, 19 nt, Vaccinia virus
guaucucgucuaaauuaga

SEQ ID NO: 4073052 - RNA, 19 nt, Vaccinia virus
guaucuuaguauugaaaug

SEQ ID NO: 4073053 - RNA, 15 nt, Vaccinia virus
guauguaguagauau

SEQ ID NO: 4073054 - RNA, 19 nt, Vaccinia virus
guaugucgauauacuuauc

SEQ ID NO: 4073055 - RNA, 18 nt, Vaccinia virus
guaugucgcggaugaaac

SEQ ID NO: 4073056 - RNA, 16 nt, Vaccinia virus
guauuauccaauacag

SEQ ID NO: 4073057 - RNA, 14 nt, Vaccinia virus
guauuccuacuuuu

SEQ ID NO: 4073058 - RNA, 21 nt, Vaccinia virus
guauucuauaccaauauuauu

SEQ ID NO: 4073059 - RNA, 22 nt, Vaccinia virus
guauucuucgauaguccuuauu

SEQ ID NO: 4073060 - RNA, 21 nt, Vaccinia virus
guauugacaauacuguauuau

SEQ ID NO: 4073061 - RNA, 17 nt, Vaccinia virus
guauuguucuaaagcca

SEQ ID NO: 4073062 - RNA, 16 nt, Vaccinia virus
guauuuauaaacuuua

SEQ ID NO: 4073063 - RNA, 15 nt, Vaccinia virus
guauuuauauaugca

SEQ ID NO: 4073064 - RNA, 16 nt, Vaccinia virus
guauuugaaaauggaa

SEQ ID NO: 4073065 - RNA, 15 nt, Vaccinia virus
guauuugaacagagc

SEQ ID NO: 4073066 - RNA, 17 nt, Vaccinia virus
gucaaacgaauaaacaa

SEQ ID NO: 4073067 - RNA, 18 nt, Vaccinia virus
gucaaacuuaauaaagga

SEQ ID NO: 4073068 - RNA, 14 nt, Vaccinia virus
gucaacaaaaaugu

SEQ ID NO: 4073069 - RNA, 19 nt, Vaccinia virus
gucaacggaccccaacauc

SEQ ID NO: 4073070 - RNA, 16 nt, Vaccinia virus
gucaaucuaauauuaa

SEQ ID NO: 4073071 - RNA, 14 nt, Vaccinia virus
gucaauuauacguu

SEQ ID NO: 4073072 - RNA, 16 nt, Vaccinia virus
gucaauugaguuuaua

SEQ ID NO: 4073073 - RNA, 15 nt, Vaccinia virus
gucacgaauauaaga

SEQ ID NO: 4073074 - RNA, 23 nt, Vaccinia virus
gucacgauguaggaauauagauc

SEQ ID NO: 4073075 - RNA, 23 nt, Vaccinia virus
gucacuaacugauaccaugaaau

SEQ ID NO: 4073076 - RNA, 22 nt, Vaccinia virus
gucaguaguauacaucaugaaa

SEQ ID NO: 4073077 - RNA, 22 nt, Vaccinia virus
gucauacuccaucaauuucaaa

SEQ ID NO: 4073078 - RNA, 14 nt, Vaccinia virus
gucauccuucacuc

SEQ ID NO: 4073079 - RNA, 18 nt, Vaccinia virus
gucaucuccagaggaaau

SEQ ID NO: 4073080 - RNA, 17 nt, Vaccinia virus
gucaucuuauguuuuua

SEQ ID NO: 4073081 - RNA, 22 nt, Vaccinia virus
gucaucuuauguuuuuaagaga

SEQ ID NO: 4073082 - RNA, 20 nt, Vaccinia virus
gucaucuuguucagaaauau

SEQ ID NO: 4073083 - RNA, 16 nt, Vaccinia virus
gucaugaacauuaaac

SEQ ID NO: 4073084 - RNA, 13 nt, Vaccinia virus
guccaaaaugaug

SEQ ID NO: 4073085 - RNA, 15 nt, Vaccinia virus
guccaauaugaucau

SEQ ID NO: 4073086 - RNA, 23 nt, Vaccinia virus
guccggagaucuaaagauaaucu

SEQ ID NO: 4073087 - RNA, 13 nt, Vaccinia virus
guccucaugauua

SEQ ID NO: 4073088 - RNA, 18 nt, Vaccinia virus
gucgacagaagaauauga

SEQ ID NO: 4073089 - RNA, 13 nt, Vaccinia virus
gucgauacaaaau

SEQ ID NO: 4073090 - RNA, 17 nt, Vaccinia virus
gucgcacuauagaugca

SEQ ID NO: 4073091 - RNA, 18 nt, Vaccinia virus
gucggaaaucuuaaccaa

SEQ ID NO: 4073092 - RNA, 21 nt, Vaccinia virus
gucuacaauuugggacaauga

SEQ ID NO: 4073093 - RNA, 17 nt, Vaccinia virus
gucuacuggaugaagau

SEQ ID NO: 4073094 - RNA, 22 nt, Vaccinia virus
gucuagagcaucaauguccugc

SEQ ID NO: 4073095 - RNA, 18 nt, Vaccinia virus
gucuaguaaguagaaauu

SEQ ID NO: 4073096 - RNA, 15 nt, Vaccinia virus
gucuaucaauaacug

SEQ ID NO: 4073097 - RNA, 19 nt, Vaccinia virus
gucuaucgccuuagauacu

SEQ ID NO: 4073098 - RNA, 23 nt, Vaccinia virus
gucuaugucucuuauuagagauu

SEQ ID NO: 4073099 - RNA, 23 nt, Vaccinia virus
gucucaugucguaauaaauauga

SEQ ID NO: 4073100 - RNA, 17 nt, Vaccinia virus
gucucucauaauaaauu

SEQ ID NO: 4073101 - RNA, 20 nt, Vaccinia virus
gucuguaacucugauaaucu

SEQ ID NO: 4073102 - RNA, 16 nt, Vaccinia virus
gucugucaaaucaucu

SEQ ID NO: 4073103 - RNA, 15 nt, Vaccinia virus
gucuuaaaguuuauu

SEQ ID NO: 4073104 - RNA, 15 nt, Vaccinia virus
gucuuaauagacaca

SEQ ID NO: 4073105 - RNA, 12 nt, Vaccinia virus
gucuuacacauu

SEQ ID NO: 4073106 - RNA, 12 nt, Vaccinia virus
gucuuagauaua

SEQ ID NO: 4073107 - RNA, 23 nt, Vaccinia virus
gucuuauucuuaaaaucuauucc

SEQ ID NO: 4073108 - RNA, 23 nt, Vaccinia virus
gucuugaacucgcugaaugaucu

SEQ ID NO: 4073109 - RNA, 17 nt, Vaccinia virus
gucuuuaaguauauacg

SEQ ID NO: 4073110 - RNA, 16 nt, Vaccinia virus
gugaauauauauguua

SEQ ID NO: 4073111 - RNA, 19 nt, Vaccinia virus
gugaauaugaucuucaucu

SEQ ID NO: 4073112 - RNA, 18 nt, Vaccinia virus
gugacauaauuacauaua

SEQ ID NO: 4073113 - RNA, 18 nt, Vaccinia virus
gugacggauauacaaaac

SEQ ID NO: 4073114 - RNA, 15 nt, Vaccinia virus
gugagaagucuuuuu

SEQ ID NO: 4073115 - RNA, 19 nt, Vaccinia virus
gugaguacggauuaaacau

SEQ ID NO: 4073116 - RNA, 15 nt, Vaccinia virus
gugaguuuuccuuaa

SEQ ID NO: 4073117 - RNA, 13 nt, Vaccinia virus
gugauauaaauaa

SEQ ID NO: 4073118 - RNA, 23 nt, Vaccinia virus
gugaugccaauaagcuuuagaua

SEQ ID NO: 4073119 - RNA, 17 nt, Vaccinia virus
gugauuauuuuuuggua

SEQ ID NO: 4073120 - RNA, 19 nt, Vaccinia virus
gugcacuuuuuuauaaaga

SEQ ID NO: 4073121 - RNA, 13 nt, Vaccinia virus
gugcuaccaaagg

SEQ ID NO: 4073122 - RNA, 18 nt, Vaccinia virus
gugcuucggauucaucca

SEQ ID NO: 4073123 - RNA, 20 nt, Vaccinia virus
gugcuuguaucgaaaaacuu

SEQ ID NO: 4073124 - RNA, 14 nt, Vaccinia virus
gugguguaaucuua

SEQ ID NO: 4073125 - RNA, 23 nt, Vaccinia virus
guguaaacgaaaacuauauacua

SEQ ID NO: 4073126 - RNA, 13 nt, Vaccinia virus
guguaaaguuaaa

SEQ ID NO: 4073127 - RNA, 23 nt, Vaccinia virus
guguacauccgaaauacaaaaug

SEQ ID NO: 4073128 - RNA, 21 nt, Vaccinia virus
guguacuagucauaauaucuu

SEQ ID NO: 4073129 - RNA, 16 nt, Vaccinia virus
guguagcuguuggaac

SEQ ID NO: 4073130 - RNA, 16 nt, Vaccinia virus
guguauacuauuuuua

SEQ ID NO: 4073131 - RNA, 14 nt, Vaccinia virus
guguauauaagacc

SEQ ID NO: 4073132 - RNA, 12 nt, Vaccinia virus
gugucacauaua

SEQ ID NO: 4073133 - RNA, 19 nt, Vaccinia virus
guguguugacuauaacaga

SEQ ID NO: 4073134 - RNA, 17 nt, Vaccinia virus
guguuaucuuagauaua

SEQ ID NO: 4073135 - RNA, 13 nt, Vaccinia virus
guguuuaauaacu

SEQ ID NO: 4073136 - RNA, 13 nt, Vaccinia virus
guguuuaaucuuc

SEQ ID NO: 4073137 - RNA, 15 nt, Vaccinia virus
guguuuuucaaaaca

SEQ ID NO: 4073138 - RNA, 19 nt, Vaccinia virus
guuaaaaaaaauuauccua

SEQ ID NO: 4073139 - RNA, 19 nt, Vaccinia virus
guuaaaaaauuaaguguua

SEQ ID NO: 4073140 - RNA, 15 nt, Vaccinia virus
guuaaaaauuuagau

SEQ ID NO: 4073141 - RNA, 23 nt, Vaccinia virus
guuaaaacauucaaauguuguua

SEQ ID NO: 4073142 - RNA, 16 nt, Vaccinia virus
guuaaaacuacaaaaa

SEQ ID NO: 4073143 - RNA, 18 nt, Vaccinia virus
guuaaaagaauaauccua

SEQ ID NO: 4073144 - RNA, 14 nt, Vaccinia virus
guuaaagaaauuaa

SEQ ID NO: 4073145 - RNA, 14 nt, Vaccinia virus
guuaaagaucuuaa

SEQ ID NO: 4073146 - RNA, 13 nt, Vaccinia virus
guuaaauuauuau

SEQ ID NO: 4073147 - RNA, 19 nt, Vaccinia virus
guuaaauuuuacaaaucua

SEQ ID NO: 4073148 - RNA, 16 nt, Vaccinia virus
guuaacauuuuauuau

SEQ ID NO: 4073149 - RNA, 19 nt, Vaccinia virus
guuaacuuugauuauccua

SEQ ID NO: 4073150 - RNA, 23 nt, Vaccinia virus
guuaagaaucgcgauucuaaaac

SEQ ID NO: 4073151 - RNA, 16 nt, Vaccinia virus
guuaagccugaauuua

SEQ ID NO: 4073152 - RNA, 12 nt, Vaccinia virus
guuaauaacauc

SEQ ID NO: 4073153 - RNA, 15 nt, Vaccinia virus
guuaauaauaaucuc

SEQ ID NO: 4073154 - RNA, 21 nt, Vaccinia virus
guuaauuucacaacuuuacug

SEQ ID NO: 4073155 - RNA, 15 nt, Vaccinia virus
guuaauuucuauuca

SEQ ID NO: 4073156 - RNA, 19 nt, Vaccinia virus
guuacaucaguuauaaaaa

SEQ ID NO: 4073157 - RNA, 17 nt, Vaccinia virus
guuacguuuacauguga

SEQ ID NO: 4073158 - RNA, 14 nt, Vaccinia virus
guuacuaaauuaau

SEQ ID NO: 4073159 - RNA, 18 nt, Vaccinia virus
guuagaaagcagauuaga

SEQ ID NO: 4073160 - RNA, 19 nt, Vaccinia virus
guuagaacgguuauagcau

SEQ ID NO: 4073161 - RNA, 17 nt, Vaccinia virus
guuagaaguuuuaaaaa

SEQ ID NO: 4073162 - RNA, 15 nt, Vaccinia virus
guuagauauagaaga

SEQ ID NO: 4073163 - RNA, 21 nt, Vaccinia virus
guuagauccaacauuaaucaa

SEQ ID NO: 4073164 - RNA, 20 nt, Vaccinia virus
guuaggauuugguaaaucau

SEQ ID NO: 4073165 - RNA, 15 nt, Vaccinia virus
guuaguacaguguua

SEQ ID NO: 4073166 - RNA, 14 nt, Vaccinia virus
guuagucauauuac

SEQ ID NO: 4073167 - RNA, 17 nt, Vaccinia virus
guuauaaaugaaauugu

SEQ ID NO: 4073168 - RNA, 17 nt, Vaccinia virus
guuauacagauguauua

SEQ ID NO: 4073169 - RNA, 18 nt, Vaccinia virus
guuauccccuuuauguaa

SEQ ID NO: 4073170 - RNA, 14 nt, Vaccinia virus
guuaugagggaaaa

SEQ ID NO: 4073171 - RNA, 20 nt, Vaccinia virus
guuauucuguucuauucaaa

SEQ ID NO: 4073172 - RNA, 15 nt, Vaccinia virus
guucaaaaauuuaga

SEQ ID NO: 4073173 - RNA, 16 nt, Vaccinia virus
uacugcuauacagaug

SEQ ID NO: 4073174 - RNA, 16 nt, Vaccinia virus
uacugcuggaaaauaa

SEQ ID NO: 4073175 - RNA, 17 nt, Vaccinia virus
uacuggaugaagaugug

SEQ ID NO: 4073176 - RNA, 18 nt, Vaccinia virus
uacugggauaagauuucc

SEQ ID NO: 4073177 - RNA, 21 nt, Vaccinia virus
uacuguauugauuacagugua

SEQ ID NO: 4073178 - RNA, 18 nt, Vaccinia virus
uacuuauuaguaaaacua

SEQ ID NO: 4073179 - RNA, 20 nt, Vaccinia virus
uacuucacucaucgauucaa

SEQ ID NO: 4073180 - RNA, 16 nt, Vaccinia virus
uacuuuaaagaaguag

SEQ ID NO: 4073181 - RNA, 19 nt, Vaccinia virus
uacuuugucggauuaucua

SEQ ID NO: 4073182 - RNA, 10 nt, Vaccinia virus
uacuuuucua

SEQ ID NO: 4073183 - RNA, 14 nt, Vaccinia virus
uacuuuuuacuaau

SEQ ID NO: 4073184 - RNA, 18 nt, Vaccinia virus
uacuuuuugcguauacau

SEQ ID NO: 4073185 - RNA, 13 nt, Vaccinia virus
uagaaaaaugcua

SEQ ID NO: 4073186 - RNA, 19 nt, Vaccinia virus
uagaaaauaauauagauuu

SEQ ID NO: 4073187 - RNA, 13 nt, Vaccinia virus
uagaaaauggauu

SEQ ID NO: 4073188 - RNA, 19 nt, Vaccinia virus
uagaaacuauacgaaauaa

SEQ ID NO: 4073189 - RNA, 22 nt, Vaccinia virus
uagaaagaaauuuguaaucauc

SEQ ID NO: 4073190 - RNA, 17 nt, Vaccinia virus
uagaaaguaauggauua

SEQ ID NO: 4073191 - RNA, 19 nt, Vaccinia virus
uagaaauaucuaggacaau

SEQ ID NO: 4073192 - RNA, 14 nt, Vaccinia virus
uagaaaucauauau

SEQ ID NO: 4073193 - RNA, 19 nt, Vaccinia virus
uagaaauuaucaaauguug

SEQ ID NO: 4073194 - RNA, 13 nt, Vaccinia virus
uagaacuuaacuu

SEQ ID NO: 4073195 - RNA, 16 nt, Vaccinia virus
uagaagaauucuugga

SEQ ID NO: 4073196 - RNA, 18 nt, Vaccinia virus
uagaagacaauaaagaua

SEQ ID NO: 4073197 - RNA, 16 nt, Vaccinia virus
uagaaguuguaaauga

SEQ ID NO: 4073198 - RNA, 12 nt, Vaccinia virus
uagaauaugucu

SEQ ID NO: 4073199 - RNA, 24 nt, Vaccinia virus
uagaaucagcgucguuuaacacaa

SEQ ID NO: 4073200 - RNA, 18 nt, Vaccinia virus
uagaauuuauaaacauca

SEQ ID NO: 4073201 - RNA, 12 nt, Vaccinia virus
uagaauuuccaa

SEQ ID NO: 4073202 - RNA, 16 nt, Vaccinia virus
uagaauuugaucuauu

SEQ ID NO: 4073203 - RNA, 19 nt, Vaccinia virus
uagacacgacuaaacauuu

SEQ ID NO: 4073204 - RNA, 16 nt, Vaccinia virus
uagacagaauaucgug

SEQ ID NO: 4073205 - RNA, 11 nt, Vaccinia virus
uagacauagau

SEQ ID NO: 4073206 - RNA, 21 nt, Vaccinia virus
uagacauaucgguaaaaugca

SEQ ID NO: 4073207 - RNA, 14 nt, Vaccinia virus
uagagacaaugaaa

SEQ ID NO: 4073208 - RNA, 17 nt, Vaccinia virus
uagagauacaauauuua

SEQ ID NO: 4073209 - RNA, 19 nt, Vaccinia virus
uagagauaccaaagacuuu

SEQ ID NO: 4073210 - RNA, 13 nt, Vaccinia virus
uagagauggauau

SEQ ID NO: 4073211 - RNA, 16 nt, Vaccinia virus
uagagauuauaucuuu

SEQ ID NO: 4073212 - RNA, 17 nt, Vaccinia virus
uagagauucgaugguuu

SEQ ID NO: 4073213 - RNA, 11 nt, Vaccinia virus
uagagauuuca

SEQ ID NO: 4073214 - RNA, 18 nt, Vaccinia virus
uagaggaauaucaucaaa

SEQ ID NO: 4073215 - RNA, 14 nt, Vaccinia virus
uagaggagaaguaa

SEQ ID NO: 4073216 - RNA, 19 nt, Vaccinia virus
uagaggaucuauuagaugu

SEQ ID NO: 4073217 - RNA, 17 nt, Vaccinia virus
uagaguccauuuaaagu

SEQ ID NO: 4073218 - RNA, 22 nt, Vaccinia virus
uagagugagucuagaauucauu

SEQ ID NO: 4073219 - RNA, 20 nt, Vaccinia virus
uagauaaaaaggaaucuauu

SEQ ID NO: 4073220 - RNA, 16 nt, Vaccinia virus
uagauaaaguagaugu

SEQ ID NO: 4073221 - RNA, 14 nt, Vaccinia virus
uagauaaauuuauc

SEQ ID NO: 4073222 - RNA, 12 nt, Vaccinia virus
uagauaacucuc

SEQ ID NO: 4073223 - RNA, 23 nt, Vaccinia virus
uagauaaugguagcaauaugcua

SEQ ID NO: 4073224 - RNA, 12 nt, Vaccinia virus
uagauacaaaau

SEQ ID NO: 4073225 - RNA, 17 nt, Vaccinia virus
uagauacaauggaugau

SEQ ID NO: 4073226 - RNA, 15 nt, Vaccinia virus
uagauauagaacaau

SEQ ID NO: 4073227 - RNA, 16 nt, Vaccinia virus
uagauaugugauuuac

SEQ ID NO: 4073228 - RNA, 17 nt, Vaccinia virus
uagauauuaguaaauua

SEQ ID NO: 4073229 - RNA, 18 nt, Vaccinia virus
uagauauuaguaaauuaa

SEQ ID NO: 4073230 - RNA, 15 nt, Vaccinia virus
uagaucaaauacuug

SEQ ID NO: 4073231 - RNA, 21 nt, Vaccinia virus
uagaucccggauacuggauau

SEQ ID NO: 4073232 - RNA, 20 nt, Vaccinia virus
uagaucugagaauggaugau

SEQ ID NO: 4073233 - RNA, 20 nt, Vaccinia virus
uagaugaaauacucuucaaa

SEQ ID NO: 4073234 - RNA, 20 nt, Vaccinia virus
uagaugauaauuuauacaaa

SEQ ID NO: 4073235 - RNA, 13 nt, Vaccinia virus
uagauguggaugu

SEQ ID NO: 4073236 - RNA, 13 nt, Vaccinia virus
uagauuaaaucca

SEQ ID NO: 4073237 - RNA, 15 nt, Vaccinia virus
uagauugacgacuuu

SEQ ID NO: 4073238 - RNA, 19 nt, Vaccinia virus
uagauugguacgaaauaua

SEQ ID NO: 4073239 - RNA, 16 nt, Vaccinia virus
uagauuucgaaaauac

SEQ ID NO: 4073240 - RNA, 21 nt, Vaccinia virus
uagauuucgaaaauacuaaau

SEQ ID NO: 4073241 - RNA, 17 nt, Vaccinia virus
uagauuuguaucuccuu

SEQ ID NO: 4073242 - RNA, 16 nt, Vaccinia virus
uagauuuuaucuaauu

SEQ ID NO: 4073243 - RNA, 13 nt, Vaccinia virus
uagauuuuggaua

SEQ ID NO: 4073244 - RNA, 18 nt, Vaccinia virus
uagauuuuggugaaauua

SEQ ID NO: 4073245 - RNA, 19 nt, Vaccinia virus
uagcaacaguaguucuugc

SEQ ID NO: 4073246 - RNA, 16 nt, Vaccinia virus
uagcaauuucaaaaua

SEQ ID NO: 4073247 - RNA, 16 nt, Vaccinia virus
uagcagcacaaaucaa

SEQ ID NO: 4073248 - RNA, 22 nt, Vaccinia virus
uagcagcugauacgucauuaac

SEQ ID NO: 4073249 - RNA, 16 nt, Vaccinia virus
uagcauaguuuuucau

SEQ ID NO: 4073250 - RNA, 22 nt, Vaccinia virus
uagcaucuuuccaaucaauaau

SEQ ID NO: 4073251 - RNA, 17 nt, Vaccinia virus
uagccaucguuaauuau

SEQ ID NO: 4073252 - RNA, 15 nt, Vaccinia virus
uagcgaagaaugcuu

SEQ ID NO: 4073253 - RNA, 13 nt, Vaccinia virus
uagcggaugaaaa

SEQ ID NO: 4073254 - RNA, 22 nt, Vaccinia virus
uagcgucgacaucuauauacua

SEQ ID NO: 4073255 - RNA, 15 nt, Vaccinia virus
uagcgugaaggauau

SEQ ID NO: 4073256 - RNA, 20 nt, Vaccinia virus
uagcguguuuuaaauccuua

SEQ ID NO: 4073257 - RNA, 23 nt, Vaccinia virus
uagcuaugaacuuguuuaaugac

SEQ ID NO: 4073258 - RNA, 14 nt, Vaccinia virus
uagcuauucuucuu

SEQ ID NO: 4073259 - RNA, 15 nt, Vaccinia virus
uagcuuucauaguua

SEQ ID NO: 4073260 - RNA, 13 nt, Vaccinia virus
uaggaaaaagaua

SEQ ID NO: 4073261 - RNA, 15 nt, Vaccinia virus
uaggagaacuuauag

SEQ ID NO: 4073262 - RNA, 14 nt, Vaccinia virus
uaggauaauaauua

SEQ ID NO: 4073263 - RNA, 15 nt, Vaccinia virus
uaggaucaguuauug

SEQ ID NO: 4073264 - RNA, 19 nt, Vaccinia virus
uaggauuuuggacuuauau

SEQ ID NO: 4073265 - RNA, 16 nt, Vaccinia virus
uaggauuuuuccaaag

SEQ ID NO: 4073266 - RNA, 15 nt, Vaccinia virus
uaggcguaaauuaug

SEQ ID NO: 4073267 - RNA, 13 nt, Vaccinia virus
uagguauguacca

SEQ ID NO: 4073268 - RNA, 21 nt, Vaccinia virus
uagguguuccggagaaucagu

SEQ ID NO: 4073269 - RNA, 14 nt, Vaccinia virus
uaguaaacauauca

SEQ ID NO: 4073270 - RNA, 19 nt, Vaccinia virus
uaguaaaccgauaguguau

SEQ ID NO: 4073271 - RNA, 17 nt, Vaccinia virus
uaguaacugacuuaaua

SEQ ID NO: 4073272 - RNA, 23 nt, Vaccinia virus
uaguaauuuauauuuuuacggua

SEQ ID NO: 4073273 - RNA, 19 nt, Vaccinia virus
uaguacgggcgcuguaauu

SEQ ID NO: 4073274 - RNA, 20 nt, Vaccinia virus
uaguacuacaauuuguauuu

SEQ ID NO: 4073275 - RNA, 23 nt, Vaccinia virus
uaguacuccucccauaauacuuu

SEQ ID NO: 4073276 - RNA, 19 nt, Vaccinia virus
uaguagcuucacaaagaug

SEQ ID NO: 4073277 - RNA, 18 nt, Vaccinia virus
uaguaguacacagcaugu

SEQ ID NO: 4073278 - RNA, 15 nt, Vaccinia virus
uaguauaacgugaau

SEQ ID NO: 4073279 - RNA, 22 nt, Vaccinia virus
uaguauaccaugaccuucuuca

SEQ ID NO: 4073280 - RNA, 18 nt, Vaccinia virus
uaguauccauuuuacauu

SEQ ID NO: 4073281 - RNA, 18 nt, Vaccinia virus
uaguaucguacaauucau

SEQ ID NO: 4073282 - RNA, 17 nt, Vaccinia virus
uaguauuugagaaauau

SEQ ID NO: 4073283 - RNA, 16 nt, Vaccinia virus
uagucaaucaaagaga

SEQ ID NO: 4073284 - RNA, 20 nt, Vaccinia virus
uagucuuuuuggucaucucu

SEQ ID NO: 4073285 - RNA, 15 nt, Vaccinia virus
uagugaaacaaaaua

SEQ ID NO: 4073286 - RNA, 23 nt, Vaccinia virus
uagugaaucgacuauagacauaa

SEQ ID NO: 4073287 - RNA, 17 nt, Vaccinia virus
uagugauuccauugaua

SEQ ID NO: 4073288 - RNA, 17 nt, Vaccinia virus
uagugcgccuaaaucaa

SEQ ID NO: 4073289 - RNA, 20 nt, Vaccinia virus
uagugguuauauucucugga

SEQ ID NO: 4073290 - RNA, 23 nt, Vaccinia virus
uaguguaauguuaacaaaaaugu

SEQ ID NO: 4073291 - RNA, 17 nt, Vaccinia virus
uaguguaucgacaucuu

SEQ ID NO: 4073292 - RNA, 23 nt, Vaccinia virus
uagugucaauuuuaaaugaugau

SEQ ID NO: 4073293 - RNA, 17 nt, Vaccinia virus
uaguguugcuaucucuu

SEQ ID NO: 4073294 - RNA, 17 nt, Vaccinia virus
uaguguuggauaucuuc

SEQ ID NO: 4073295 - RNA, 16 nt, Vaccinia virus
uaguuaauaaaaucua

SEQ ID NO: 4073296 - RNA, 20 nt, Vaccinia virus
uaguuaauggagaaauacuu

SEQ ID NO: 4073297 - RNA, 15 nt, Vaccinia virus
uauucuauuuuacua

SEQ ID NO: 4073298 - RNA, 20 nt, Vaccinia virus
uauucucguuaaacagcauu

SEQ ID NO: 4073299 - RNA, 21 nt, Vaccinia virus
uauucuggugcuaauuauucc

SEQ ID NO: 4073300 - RNA, 22 nt, Vaccinia virus
uauucuuaauucuuuaacaaaa

SEQ ID NO: 4073301 - RNA, 21 nt, Vaccinia virus
uauugaagaagaugacaaucu

SEQ ID NO: 4073302 - RNA, 16 nt, Vaccinia virus
uauugaagaugaugug

SEQ ID NO: 4073303 - RNA, 13 nt, Vaccinia virus
uauugaguggaaa

SEQ ID NO: 4073304 - RNA, 20 nt, Vaccinia virus
uauugcaaaucacucaauau

SEQ ID NO: 4073305 - RNA, 18 nt, Vaccinia virus
uauugcgacguucauaga

SEQ ID NO: 4073306 - RNA, 16 nt, Vaccinia virus
uauuggaauuauaaua

SEQ ID NO: 4073307 - RNA, 19 nt, Vaccinia virus
uauugguccauuaucagua

SEQ ID NO: 4073308 - RNA, 22 nt, Vaccinia virus
uauuguauuaauuaugaaaaac

SEQ ID NO: 4073309 - RNA, 14 nt, Vaccinia virus
uauuguuacagaug

SEQ ID NO: 4073310 - RNA, 14 nt, Vaccinia virus
uauuuaauaucaaa

SEQ ID NO: 4073311 - RNA, 19 nt, Vaccinia virus
uauuuacaucuaauuuacu

SEQ ID NO: 4073312 - RNA, 17 nt, Vaccinia virus
uauuuaguuuauucaua

SEQ ID NO: 4073313 - RNA, 14 nt, Vaccinia virus
uauuuauuuaaaau

SEQ ID NO: 4073314 - RNA, 21 nt, Vaccinia virus
uauuucuuucaugacugauuu

SEQ ID NO: 4073315 - RNA, 18 nt, Vaccinia virus
uauuuggcuagucaagau

SEQ ID NO: 4073316 - RNA, 20 nt, Vaccinia virus
uauuuguacacaucuaucaa

SEQ ID NO: 4073317 - RNA, 13 nt, Vaccinia virus
uauuuuacucauu

SEQ ID NO: 4073318 - RNA, 12 nt, Vaccinia virus
uauuuuaucauu

SEQ ID NO: 4073319 - RNA, 16 nt, Vaccinia virus
uauuuuauuucaaaau

SEQ ID NO: 4073320 - RNA, 20 nt, Vaccinia virus
uauuuucuauuuuuuaaauu

SEQ ID NO: 4073321 - RNA, 18 nt, Vaccinia virus
uauuuugcaauuucuuca

SEQ ID NO: 4073322 - RNA, 21 nt, Vaccinia virus
uauuuuuuucuauguuauaua

SEQ ID NO: 4073323 - RNA, 18 nt, Vaccinia virus
ucaaaacauauaaaucua

SEQ ID NO: 4073324 - RNA, 14 nt, Vaccinia virus
ucaaaagaaaucuu

SEQ ID NO: 4073325 - RNA, 16 nt, Vaccinia virus
ucaaaauagaaaauug

SEQ ID NO: 4073326 - RNA, 21 nt, Vaccinia virus
ucaaaauuguaacaacaaugu

SEQ ID NO: 4073327 - RNA, 12 nt, Vaccinia virus
ucaaagaaaaag

SEQ ID NO: 4073328 - RNA, 13 nt, Vaccinia virus
ucaaauagauguu

SEQ ID NO: 4073329 - RNA, 21 nt, Vaccinia virus
ucaaauccauaaauaaaguau

SEQ ID NO: 4073330 - RNA, 12 nt, Vaccinia virus
ucaaaucuauau

SEQ ID NO: 4073331 - RNA, 19 nt, Vaccinia virus
ucaaauggauuccauggaa

SEQ ID NO: 4073332 - RNA, 16 nt, Vaccinia virus
ucaaaugguacaaaaa

SEQ ID NO: 4073333 - RNA, 14 nt, Vaccinia virus
ucaaauguaguguu

SEQ ID NO: 4073334 - RNA, 13 nt, Vaccinia virus
ucaaauuaagcau

SEQ ID NO: 4073335 - RNA, 18 nt, Vaccinia virus
ucaaauuaagcauuuugg

SEQ ID NO: 4073336 - RNA, 22 nt, Vaccinia virus
ucaaauuugguaauucuauuaa

SEQ ID NO: 4073337 - RNA, 14 nt, Vaccinia virus
ucaaauuuuuucuu

SEQ ID NO: 4073338 - RNA, 15 nt, Vaccinia virus
ucaacaaaacucaaa

SEQ ID NO: 4073339 - RNA, 17 nt, Vaccinia virus
ucaacaaguguguagau

SEQ ID NO: 4073340 - RNA, 15 nt, Vaccinia virus
ucaacaaucguuaau

SEQ ID NO: 4073341 - RNA, 21 nt, Vaccinia virus
ucaacaauuuuguauuauucu

SEQ ID NO: 4073342 - RNA, 14 nt, Vaccinia virus
ucaacaucuuugau

SEQ ID NO: 4073343 - RNA, 23 nt, Vaccinia virus
ucaaccaaccgaauggaguaaaa

SEQ ID NO: 4073344 - RNA, 17 nt, Vaccinia virus
ucaaccacucgaaaaag

SEQ ID NO: 4073345 - RNA, 16 nt, Vaccinia virus
ucaacggaaaacauuu

SEQ ID NO: 4073346 - RNA, 18 nt, Vaccinia virus
ucaagacguggcaaacaa

SEQ ID NO: 4073347 - RNA, 20 nt, Vaccinia virus
ucaaggacaguuaaaacuau

SEQ ID NO: 4073348 - RNA, 21 nt, Vaccinia virus
ucaauagaauaugucucuuaa

SEQ ID NO: 4073349 - RNA, 15 nt, Vaccinia virus
ucaauagauuauaca

SEQ ID NO: 4073350 - RNA, 17 nt, Vaccinia virus
ucaauagauugguaaau

SEQ ID NO: 4073351 - RNA, 16 nt, Vaccinia virus
ucaauaguuucauaau

SEQ ID NO: 4073352 - RNA, 21 nt, Vaccinia virus
ucaauauacuauucuugugau

SEQ ID NO: 4073353 - RNA, 22 nt, Vaccinia virus
ucaaucguuuaaaguaaacuuc

SEQ ID NO: 4073354 - RNA, 14 nt, Vaccinia virus
ucaaugaagaguau

SEQ ID NO: 4073355 - RNA, 15 nt, Vaccinia virus
ucaaugugaauguau

SEQ ID NO: 4073356 - RNA, 23 nt, Vaccinia virus
ucaaugugaauguauucacuuaa

SEQ ID NO: 4073357 - RNA, 20 nt, Vaccinia virus
ucaauguguguaacuccaga

SEQ ID NO: 4073358 - RNA, 19 nt, Vaccinia virus
ucaauucguucgaugagua

SEQ ID NO: 4073359 - RNA, 15 nt, Vaccinia virus
ucaauucuucuacau

SEQ ID NO: 4073360 - RNA, 14 nt, Vaccinia virus
ucaauuuguacauc

SEQ ID NO: 4073361 - RNA, 20 nt, Vaccinia virus
ucacaaagauggcugaaauc

SEQ ID NO: 4073362 - RNA, 22 nt, Vaccinia virus
ucacaaguaugaagaaaaaugu

SEQ ID NO: 4073363 - RNA, 22 nt, Vaccinia virus
ucacagacacugucucauacac

SEQ ID NO: 4073364 - RNA, 14 nt, Vaccinia virus
ucacagauucuauu

SEQ ID NO: 4073365 - RNA, 11 nt, Vaccinia virus
ucacagucugu

SEQ ID NO: 4073366 - RNA, 15 nt, Vaccinia virus
ucacauccaccaaug

SEQ ID NO: 4073367 - RNA, 12 nt, Vaccinia virus
ucaccaauaaaa

SEQ ID NO: 4073368 - RNA, 21 nt, Vaccinia virus
ucaccaauaaaaauaaacuag

SEQ ID NO: 4073369 - RNA, 17 nt, Vaccinia virus
ucaccaguauguauucc

SEQ ID NO: 4073370 - RNA, 23 nt, Vaccinia virus
ucaccgauaaacgucauuucucu

SEQ ID NO: 4073371 - RNA, 20 nt, Vaccinia virus
ucacgaaaaaugaugaaggc

SEQ ID NO: 4073372 - RNA, 15 nt, Vaccinia virus
ucacguaaauacaaa

SEQ ID NO: 4073373 - RNA, 16 nt, Vaccinia virus
ucacuaacaauaacua

SEQ ID NO: 4073374 - RNA, 15 nt, Vaccinia virus
ucacuaauaaauugg

SEQ ID NO: 4073375 - RNA, 18 nt, Vaccinia virus
ucacuaugaaacaaaugu

SEQ ID NO: 4073376 - RNA, 21 nt, Vaccinia virus
ucacuguucuuuacaguuucu

SEQ ID NO: 4073377 - RNA, 14 nt, Vaccinia virus
ucacuguuguacau

SEQ ID NO: 4073378 - RNA, 13 nt, Vaccinia virus
ucacuucucuuca

SEQ ID NO: 4073379 - RNA, 21 nt, Vaccinia virus
ucacuucucuucauuacuacu

SEQ ID NO: 4073380 - RNA, 22 nt, Vaccinia virus
ucagaaagcugggggauguucu

SEQ ID NO: 4073381 - RNA, 13 nt, Vaccinia virus
ucagaaauuauuc

SEQ ID NO: 4073382 - RNA, 19 nt, Vaccinia virus
ucagaacgcucgucaauau

SEQ ID NO: 4073383 - RNA, 22 nt, Vaccinia virus
ucagaauaggaugaauauagua

SEQ ID NO: 4073384 - RNA, 13 nt, Vaccinia virus
ucagacaacaucu

SEQ ID NO: 4073385 - RNA, 19 nt, Vaccinia virus
ucagacgaguguaaacacu

SEQ ID NO: 4073386 - RNA, 15 nt, Vaccinia virus
ucagagaacuucugc

SEQ ID NO: 4073387 - RNA, 14 nt, Vaccinia virus
ucagcgcauaauaa

SEQ ID NO: 4073388 - RNA, 16 nt, Vaccinia virus
ucagcggcaucuaaau

SEQ ID NO: 4073389 - RNA, 14 nt, Vaccinia virus
ucagcgugauuuuc

SEQ ID NO: 4073390 - RNA, 12 nt, Vaccinia virus
ucaggaaaugua

SEQ ID NO: 4073391 - RNA, 20 nt, Vaccinia virus
ucaggaauccaaagagcuau

SEQ ID NO: 4073392 - RNA, 13 nt, Vaccinia virus
ucaguuacaaaac

SEQ ID NO: 4073393 - RNA, 14 nt, Vaccinia virus
ucauaaauuacaca

SEQ ID NO: 4073394 - RNA, 22 nt, Vaccinia virus
ucauaacuccggauagagaaau

SEQ ID NO: 4073395 - RNA, 17 nt, Vaccinia virus
ucauaauauuaaucauc

SEQ ID NO: 4073396 - RNA, 15 nt, Vaccinia virus
ucauaauuaauacaa

SEQ ID NO: 4073397 - RNA, 17 nt, Vaccinia virus
ucauaauuacauuuaga

SEQ ID NO: 4073398 - RNA, 21 nt, Vaccinia virus
ucauacauaugguacgauguu

SEQ ID NO: 4073399 - RNA, 16 nt, Vaccinia virus
ucauacaugauauuca

SEQ ID NO: 4073400 - RNA, 22 nt, Vaccinia virus
ucauauaaauguuuaacguuuu

SEQ ID NO: 4073401 - RNA, 20 nt, Vaccinia virus
ucauauaacuucuagaugua

SEQ ID NO: 4073402 - RNA, 16 nt, Vaccinia virus
ucauauaggaaacuau

SEQ ID NO: 4073403 - RNA, 19 nt, Vaccinia virus
ucauauauuuauagaagau

SEQ ID NO: 4073404 - RNA, 20 nt, Vaccinia virus
ucauauguauaaaugaagua

SEQ ID NO: 4073405 - RNA, 16 nt, Vaccinia virus
ucauauuaaacauacu

SEQ ID NO: 4073406 - RNA, 18 nt, Vaccinia virus
ucauauucaucaucaaua

SEQ ID NO: 4073407 - RNA, 24 nt, Vaccinia virus
ucauauugaacgguaucuucuuaa

SEQ ID NO: 4073408 - RNA, 21 nt, Vaccinia virus
ucaucaauguagaaaaugccc

SEQ ID NO: 4073409 - RNA, 13 nt, Vaccinia virus
ucaucacauaucg

SEQ ID NO: 4073410 - RNA, 22 nt, Vaccinia virus
ucaucacugucaucaguuaugu

SEQ ID NO: 4073411 - RNA, 19 nt, Vaccinia virus
ucaucacuuagaacagauu

SEQ ID NO: 4073412 - RNA, 18 nt, Vaccinia virus
ucaucagauaagauuuua

SEQ ID NO: 4073413 - RNA, 23 nt, Vaccinia virus
ucaucaucaacaauccaauaaua

SEQ ID NO: 4073414 - RNA, 19 nt, Vaccinia virus
ucaucaucguuacaauaaa

SEQ ID NO: 4073415 - RNA, 22 nt, Vaccinia virus
ucaucauuguguaaacuaaaua

SEQ ID NO: 4073416 - RNA, 16 nt, Vaccinia virus
ucaucauuuuuucacc

SEQ ID NO: 4073417 - RNA, 14 nt, Vaccinia virus
ucauccuugcuauc

SEQ ID NO: 4073418 - RNA, 23 nt, Vaccinia virus
ucaucgacuguacgauacauaau

SEQ ID NO: 4073419 - RNA, 13 nt, Vaccinia virus
ucaucuacaaaaa

SEQ ID NO: 4073420 - RNA, 13 nt, Vaccinia virus
ucaucuauaaaug

SEQ ID NO: 4073421 - RNA, 19 nt, Vaccinia virus
aauaauucauguauuucga

SEQ ID NO: 4073422 - RNA, 13 nt, Vaccinia virus
aauaauuuaucau

SEQ ID NO: 4073423 - RNA, 21 nt, Vaccinia virus
aauaauuuugaagcauuggaa

SEQ ID NO: 4073424 - RNA, 11 nt, Vaccinia virus
aauacaaaauc

SEQ ID NO: 4073425 - RNA, 15 nt, Vaccinia virus
aauacaaaaucaucu

SEQ ID NO: 4073426 - RNA, 14 nt, Vaccinia virus
aauacaaaugacua

SEQ ID NO: 4073427 - RNA, 21 nt, Vaccinia virus
aauacaagagaaugaaauaua

SEQ ID NO: 4073428 - RNA, 20 nt, Vaccinia virus
aauacaaggcacuaugucca

SEQ ID NO: 4073429 - RNA, 16 nt, Vaccinia virus
aauacacguuaauaca

SEQ ID NO: 4073430 - RNA, 21 nt, Vaccinia virus
aauacacuuacagaaaagaua

SEQ ID NO: 4073431 - RNA, 12 nt, Vaccinia virus
aauacaggauua

SEQ ID NO: 4073432 - RNA, 19 nt, Vaccinia virus
aauacauaauuuuguaaaa

SEQ ID NO: 4073433 - RNA, 22 nt, Vaccinia virus
aauacauuuaaauucaucaucu

SEQ ID NO: 4073434 - RNA, 22 nt, Vaccinia virus
aauaccgacgcgccugaauauc

SEQ ID NO: 4073435 - RNA, 17 nt, Vaccinia virus
aauacgaaaauccaugc

SEQ ID NO: 4073436 - RNA, 18 nt, Vaccinia virus
aauacgaugauauuaaaa

SEQ ID NO: 4073437 - RNA, 19 nt, Vaccinia virus
aauacgaugauauuaaaau

SEQ ID NO: 4073438 - RNA, 17 nt, Vaccinia virus
aauacguucauuaaaaa

SEQ ID NO: 4073439 - RNA, 15 nt, Vaccinia virus
aauacguuggucuau

SEQ ID NO: 4073440 - RNA, 23 nt, Vaccinia virus
aauacuaauuuguuuuacucuau

SEQ ID NO: 4073441 - RNA, 20 nt, Vaccinia virus
aauacuacgauuaacgauga

SEQ ID NO: 4073442 - RNA, 23 nt, Vaccinia virus
aauacucauuuucuuuuggaaaa

SEQ ID NO: 4073443 - RNA, 19 nt, Vaccinia virus
aauacugaugcauuuucca

SEQ ID NO: 4073444 - RNA, 12 nt, Vaccinia virus
aauacuguaaua

SEQ ID NO: 4073445 - RNA, 14 nt, Vaccinia virus
aauacuuaaaaaug

SEQ ID NO: 4073446 - RNA, 17 nt, Vaccinia virus
aauacuuaaaaauggau

SEQ ID NO: 4073447 - RNA, 18 nt, Vaccinia virus
aauacuuaccuaaugccu

SEQ ID NO: 4073448 - RNA, 16 nt, Vaccinia virus
aauacuucauuucuaa

SEQ ID NO: 4073449 - RNA, 21 nt, Vaccinia virus
aauacuuuuguuacuaauauc

SEQ ID NO: 4073450 - RNA, 17 nt, Vaccinia virus
aauagaaacguacuacu

SEQ ID NO: 4073451 - RNA, 23 nt, Vaccinia virus
aauagaaugcucuuaaauaaugu

SEQ ID NO: 4073452 - RNA, 13 nt, Vaccinia virus
aauagauaaaacg

SEQ ID NO: 4073453 - RNA, 14 nt, Vaccinia virus
aauagauggauaaa

SEQ ID NO: 4073454 - RNA, 18 nt, Vaccinia virus
aauagauguuaguacagu

SEQ ID NO: 4073455 - RNA, 19 nt, Vaccinia virus
aauagcuaacgcuaguaau

SEQ ID NO: 4073456 - RNA, 15 nt, Vaccinia virus
aauagcucaauauaa

SEQ ID NO: 4073457 - RNA, 19 nt, Vaccinia virus
aauaggaguaauagaacug

SEQ ID NO: 4073458 - RNA, 20 nt, Vaccinia virus
aauaggguaucuaauuuccu

SEQ ID NO: 4073459 - RNA, 23 nt, Vaccinia virus
aauagguguaaaucuaggaauua

SEQ ID NO: 4073460 - RNA, 19 nt, Vaccinia virus
aauaguaauuuuuuaucau

SEQ ID NO: 4073461 - RNA, 18 nt, Vaccinia virus
aauaguauacgcagaaaa

SEQ ID NO: 4073462 - RNA, 22 nt, Vaccinia virus
aauaguauuugagaaauaugua

SEQ ID NO: 4073463 - RNA, 16 nt, Vaccinia virus
aauagucaauagauua

SEQ ID NO: 4073464 - RNA, 18 nt, Vaccinia virus
aauaguccguguaaucca

SEQ ID NO: 4073465 - RNA, 17 nt, Vaccinia virus
aauagugccaucagaau

SEQ ID NO: 4073466 - RNA, 22 nt, Vaccinia virus
aauaguuuacagauauuuucca

SEQ ID NO: 4073467 - RNA, 22 nt, Vaccinia virus
aauaguuucauaauuguuagcu

SEQ ID NO: 4073468 - RNA, 23 nt, Vaccinia virus
aauaguuuguacugcaaaaauaa

SEQ ID NO: 4073469 - RNA, 14 nt, Vaccinia virus
aauauaaaaugaca

SEQ ID NO: 4073470 - RNA, 20 nt, Vaccinia virus
aauauauaagacacagaaau

SEQ ID NO: 4073471 - RNA, 21 nt, Vaccinia virus
aauauauaagacacagaaaua

SEQ ID NO: 4073472 - RNA, 14 nt, Vaccinia virus
aauauauacaguag

SEQ ID NO: 4073473 - RNA, 15 nt, Vaccinia virus
aauauauacguugau

SEQ ID NO: 4073474 - RNA, 20 nt, Vaccinia virus
aauauauacuucaauugaua

SEQ ID NO: 4073475 - RNA, 17 nt, Vaccinia virus
aauauaucaaacaugga

SEQ ID NO: 4073476 - RNA, 19 nt, Vaccinia virus
aauauaucaaacauggaga

SEQ ID NO: 4073477 - RNA, 22 nt, Vaccinia virus
aauauaucaaucaaaacagaau

SEQ ID NO: 4073478 - RNA, 17 nt, Vaccinia virus
aauauaucccuuaaaaa

SEQ ID NO: 4073479 - RNA, 23 nt, Vaccinia virus
aauauaucuauaauuugauccau

SEQ ID NO: 4073480 - RNA, 14 nt, Vaccinia virus
aauauaucuuauau

SEQ ID NO: 4073481 - RNA, 16 nt, Vaccinia virus
aauauauguugauaau

SEQ ID NO: 4073482 - RNA, 14 nt, Vaccinia virus
aauauauugaucau

SEQ ID NO: 4073483 - RNA, 17 nt, Vaccinia virus
aauauauugaucauaau

SEQ ID NO: 4073484 - RNA, 22 nt, Vaccinia virus
aauauauuuggauuuguggugu

SEQ ID NO: 4073485 - RNA, 19 nt, Vaccinia virus
aauauauuuuuuuaguaau

SEQ ID NO: 4073486 - RNA, 17 nt, Vaccinia virus
aauaucaaacaauccaa

SEQ ID NO: 4073487 - RNA, 15 nt, Vaccinia virus
aauaucagaaaggau

SEQ ID NO: 4073488 - RNA, 16 nt, Vaccinia virus
aauaucaguaucuucu

SEQ ID NO: 4073489 - RNA, 23 nt, Vaccinia virus
aauaucauaacuuaguucuuuua

SEQ ID NO: 4073490 - RNA, 21 nt, Vaccinia virus
aauaucauuaacgauauccaa

SEQ ID NO: 4073491 - RNA, 16 nt, Vaccinia virus
aauauccauuuuguuc

SEQ ID NO: 4073492 - RNA, 13 nt, Vaccinia virus
aauauccucaaua

SEQ ID NO: 4073493 - RNA, 20 nt, Vaccinia virus
aauaucuaauggauaaacug

SEQ ID NO: 4073494 - RNA, 15 nt, Vaccinia virus
aauaucuaggacaau

SEQ ID NO: 4073495 - RNA, 18 nt, Vaccinia virus
aauaucuccucaaggaau

SEQ ID NO: 4073496 - RNA, 15 nt, Vaccinia virus
aauaucuuuauaaga

SEQ ID NO: 4073497 - RNA, 10 nt, Vaccinia virus
aauaugaacc

SEQ ID NO: 4073498 - RNA, 18 nt, Vaccinia virus
aauaugaguaaugaaauc

SEQ ID NO: 4073499 - RNA, 19 nt, Vaccinia virus
aauaugaguuggaguugau

SEQ ID NO: 4073500 - RNA, 16 nt, Vaccinia virus
aauaugauuaacaagu

SEQ ID NO: 4073501 - RNA, 15 nt, Vaccinia virus
aauaugauuagaagu

SEQ ID NO: 4073502 - RNA, 21 nt, Vaccinia virus
aauaugauuuggccaaaugua

SEQ ID NO: 4073503 - RNA, 22 nt, Vaccinia virus
aauauggacacgcggcuguaaa

SEQ ID NO: 4073504 - RNA, 23 nt, Vaccinia virus
aauauggagagguguauuuccau

SEQ ID NO: 4073505 - RNA, 22 nt, Vaccinia virus
aauaugggauaacgaauccaau

SEQ ID NO: 4073506 - RNA, 21 nt, Vaccinia virus
aauaugucaucuauggaauua

SEQ ID NO: 4073507 - RNA, 13 nt, Vaccinia virus
aauauuaaaacua

SEQ ID NO: 4073508 - RNA, 16 nt, Vaccinia virus
aauauuaaauaucugu

SEQ ID NO: 4073509 - RNA, 17 nt, Vaccinia virus
aauauuacuaauugaua

SEQ ID NO: 4073510 - RNA, 12 nt, Vaccinia virus
aauauuagaaaa

SEQ ID NO: 4073511 - RNA, 19 nt, Vaccinia virus
aauauuagaguuaggcaau

SEQ ID NO: 4073512 - RNA, 12 nt, Vaccinia virus
aauauuaggaau

SEQ ID NO: 4073513 - RNA, 23 nt, Vaccinia virus
aauauuaugaaugagagauaccu

SEQ ID NO: 4073514 - RNA, 17 nt, Vaccinia virus
aauauucagaguccucu

SEQ ID NO: 4073515 - RNA, 19 nt, Vaccinia virus
aauauucauuaauucuaua

SEQ ID NO: 4073516 - RNA, 18 nt, Vaccinia virus
aauauuggaaaacuuuaa

SEQ ID NO: 4073517 - RNA, 19 nt, Vaccinia virus
aauauuuaacucaugauga

SEQ ID NO: 4073518 - RNA, 17 nt, Vaccinia virus
aauauuucauuagaugu

SEQ ID NO: 4073519 - RNA, 16 nt, Vaccinia virus
aauauuucuauuucua

SEQ ID NO: 4073520 - RNA, 17 nt, Vaccinia virus
aauauuuuaauagauua

SEQ ID NO: 4073521 - RNA, 20 nt, Vaccinia virus
aauauuuuucguuuacaaaa

SEQ ID NO: 4073522 - RNA, 20 nt, Vaccinia virus
aaucaaccaccgaugaugcg

SEQ ID NO: 4073523 - RNA, 16 nt, Vaccinia virus
aaucaagauucauuuu

SEQ ID NO: 4073524 - RNA, 14 nt, Vaccinia virus
aaucaaucauauua

SEQ ID NO: 4073525 - RNA, 19 nt, Vaccinia virus
aaucacagcaguaguuuaa

SEQ ID NO: 4073526 - RNA, 16 nt, Vaccinia virus
aaucagaaucuaauga

SEQ ID NO: 4073527 - RNA, 21 nt, Vaccinia virus
aaucagacucugguauuuaua

SEQ ID NO: 4073528 - RNA, 19 nt, Vaccinia virus
aaucauauaaaaaaugauu

SEQ ID NO: 4073529 - RNA, 17 nt, Vaccinia virus
aaucauauacaacucuu

SEQ ID NO: 4073530 - RNA, 14 nt, Vaccinia virus
aaucauauaugaua

SEQ ID NO: 4073531 - RNA, 15 nt, Vaccinia virus
aaucauauuuagaaa

SEQ ID NO: 4073532 - RNA, 18 nt, Vaccinia virus
aaucaucaauccuucaga

SEQ ID NO: 4073533 - RNA, 18 nt, Vaccinia virus
aaucauccuaagaugaua

SEQ ID NO: 4073534 - RNA, 18 nt, Vaccinia virus
aaucaugacguaaaugua

SEQ ID NO: 4073535 - RNA, 21 nt, Vaccinia virus
aaucaugugauuaugaauauu

SEQ ID NO: 4073536 - RNA, 23 nt, Vaccinia virus
aaucauuaucgauacuaauuaca

SEQ ID NO: 4073537 - RNA, 20 nt, Vaccinia virus
aaucauuccaucgauacauc

SEQ ID NO: 4073538 - RNA, 22 nt, Vaccinia virus
aaucauuccucauaagaugaua

SEQ ID NO: 4073539 - RNA, 14 nt, Vaccinia virus
aaucauuuaaucca

SEQ ID NO: 4073540 - RNA, 19 nt, Vaccinia virus
aaucauuuuuuuaaaacug

SEQ ID NO: 4073541 - RNA, 18 nt, Vaccinia virus
aauccaauuguuugauau

SEQ ID NO: 4073542 - RNA, 16 nt, Vaccinia virus
aauccauaaauaaagu

SEQ ID NO: 4073543 - RNA, 14 nt, Vaccinia virus
aauccauugauaau

SEQ ID NO: 4073544 - RNA, 22 nt, Vaccinia virus
aauccuauaccgaguacuguaa

SEQ ID NO: 4073545 - RNA, 18 nt, Vaccinia virus
aauccuuaaguucauaau

SEQ ID NO: 4073546 - RNA, 20 nt, Vaccinia virus
aauccuuggccuuugauucg

SEQ ID NO: 4073547 - RNA, 15 nt, Vaccinia virus
aauccuuugauuauc

SEQ ID NO: 4073548 - RNA, 15 nt, Vaccinia virus
aaucgauaacaagau

SEQ ID NO: 4073549 - RNA, 16 nt, Vaccinia virus
aaucgauuuuguaaua

SEQ ID NO: 4073550 - RNA, 22 nt, Vaccinia virus
aaucguacucauuauuggaaaa

SEQ ID NO: 4073551 - RNA, 14 nt, Vaccinia virus
aaucuaagaaauuu

SEQ ID NO: 4073552 - RNA, 16 nt, Vaccinia virus
aaucuaauauuaagaa

SEQ ID NO: 4073553 - RNA, 11 nt, Vaccinia virus
aaucuagcauu

SEQ ID NO: 4073554 - RNA, 21 nt, Vaccinia virus
aaucuaguacgcgaaauaaua

SEQ ID NO: 4073555 - RNA, 13 nt, Vaccinia virus
aaucuauaauauc

SEQ ID NO: 4073556 - RNA, 12 nt, Vaccinia virus
aaucuauaugac

SEQ ID NO: 4073557 - RNA, 15 nt, Vaccinia virus
aaucuauuagaauug

SEQ ID NO: 4073558 - RNA, 16 nt, Vaccinia virus
aaucuauucccuugau

SEQ ID NO: 4073559 - RNA, 17 nt, Vaccinia virus
aaucucaucaucgaaga

SEQ ID NO: 4073560 - RNA, 21 nt, Vaccinia virus
aaucucgucaguauugacaau

SEQ ID NO: 4073561 - RNA, 16 nt, Vaccinia virus
aaucucuaaagucacu

SEQ ID NO: 4073562 - RNA, 16 nt, Vaccinia virus
aaucucucucaaauau

SEQ ID NO: 4073563 - RNA, 17 nt, Vaccinia virus
aaucucugguucuaguu

SEQ ID NO: 4073564 - RNA, 15 nt, Vaccinia virus
aaucucuuaucaugu

SEQ ID NO: 4073565 - RNA, 13 nt, Vaccinia virus
aaucugaccaucc

SEQ ID NO: 4073566 - RNA, 21 nt, Vaccinia virus
aaucugauaaauauacaauag

SEQ ID NO: 4073567 - RNA, 20 nt, Vaccinia virus
aaucugauagaaagaauaag

SEQ ID NO: 4073568 - RNA, 13 nt, Vaccinia virus
aaucugaucuugu

SEQ ID NO: 4073569 - RNA, 13 nt, Vaccinia virus
aaucuguacuucu

SEQ ID NO: 4073570 - RNA, 15 nt, Vaccinia virus
aaucuguaucgaaug

SEQ ID NO: 4073571 - RNA, 13 nt, Vaccinia virus
aaucuguauuuca

SEQ ID NO: 4073572 - RNA, 18 nt, Vaccinia virus
aaucuuauuaacuguuuc

SEQ ID NO: 4073573 - RNA, 15 nt, Vaccinia virus
aaucuucuuauaaga

SEQ ID NO: 4073574 - RNA, 22 nt, Vaccinia virus
aaucuuggcauauugaucauuu

SEQ ID NO: 4073575 - RNA, 13 nt, Vaccinia virus
aaucuuugucaaa

SEQ ID NO: 4073576 - RNA, 20 nt, Vaccinia virus
aaucuuuguucuaaaaacug

SEQ ID NO: 4073577 - RNA, 18 nt, Vaccinia virus
aaucuuuugugaaaagau

SEQ ID NO: 4073578 - RNA, 13 nt, Vaccinia virus
aaugaaaauggau

SEQ ID NO: 4073579 - RNA, 14 nt, Vaccinia virus
aaugaaaauggaua

SEQ ID NO: 4073580 - RNA, 22 nt, Vaccinia virus
aaugaagaaugccuacauauca

SEQ ID NO: 4073581 - RNA, 13 nt, Vaccinia virus
aaugaauauuaaa

SEQ ID NO: 4073582 - RNA, 16 nt, Vaccinia virus
aaugaaucccaaacau

SEQ ID NO: 4073583 - RNA, 15 nt, Vaccinia virus
aaugacuccaugaaa

SEQ ID NO: 4073584 - RNA, 20 nt, Vaccinia virus
aaugaguauauguauuuucu

SEQ ID NO: 4073585 - RNA, 22 nt, Vaccinia virus
aaugaguuauuaagcaauauau

SEQ ID NO: 4073586 - RNA, 18 nt, Vaccinia virus
aaugauaaaaucaaacuu

SEQ ID NO: 4073587 - RNA, 13 nt, Vaccinia virus
aaugauaaagaua

SEQ ID NO: 4073588 - RNA, 22 nt, Vaccinia virus
aaugauagacuagaagaaagua

SEQ ID NO: 4073589 - RNA, 14 nt, Vaccinia virus
aaugauauauuaaa

SEQ ID NO: 4073590 - RNA, 17 nt, Vaccinia virus
aaugauggguuuucuau

SEQ ID NO: 4073591 - RNA, 12 nt, Vaccinia virus
aaugauucucuc

SEQ ID NO: 4073592 - RNA, 22 nt, Vaccinia virus
aaugauugcauagugaauauau

SEQ ID NO: 4073593 - RNA, 14 nt, Vaccinia virus
aaugauuuagaaau

SEQ ID NO: 4073594 - RNA, 15 nt, Vaccinia virus
aaugauuuuggaaaa

SEQ ID NO: 4073595 - RNA, 20 nt, Vaccinia virus
aaugcaauuaaaaaucgaua

SEQ ID NO: 4073596 - RNA, 15 nt, Vaccinia virus
aaugcagaaaugauu

SEQ ID NO: 4073597 - RNA, 22 nt, Vaccinia virus
aaugcagaucuaauaaauggag

SEQ ID NO: 4073598 - RNA, 19 nt, Vaccinia virus
aaugcaggaauuugaauau

SEQ ID NO: 4073599 - RNA, 16 nt, Vaccinia virus
aaugccucagaauauc

SEQ ID NO: 4073600 - RNA, 16 nt, Vaccinia virus
aaugccuuauucucug

SEQ ID NO: 4073601 - RNA, 19 nt, Vaccinia virus
aaugccuuccaaaguuuaa

SEQ ID NO: 4073602 - RNA, 17 nt, Vaccinia virus
aaugccuuuacagugga

SEQ ID NO: 4073603 - RNA, 22 nt, Vaccinia virus
aaugcgacgaguuaaaaagaua

SEQ ID NO: 4073604 - RNA, 17 nt, Vaccinia virus
aaugcgaggaaauguau

SEQ ID NO: 4073605 - RNA, 20 nt, Vaccinia virus
aaugcgaggaaauguauaau

SEQ ID NO: 4073606 - RNA, 17 nt, Vaccinia virus
aaugcgauacagacauu

SEQ ID NO: 4073607 - RNA, 20 nt, Vaccinia virus
aaugcuaauauauucuuaca

SEQ ID NO: 4073608 - RNA, 20 nt, Vaccinia virus
aaugcuucagaauuagaaca

SEQ ID NO: 4073609 - RNA, 16 nt, Vaccinia virus
aauggauaauuuaaga

SEQ ID NO: 4073610 - RNA, 18 nt, Vaccinia virus
aauggauuaucggaaaua

SEQ ID NO: 4073611 - RNA, 12 nt, Vaccinia virus
aaugguagaugu

SEQ ID NO: 4073612 - RNA, 21 nt, Vaccinia virus
aaugguauacacaucaaaaua

SEQ ID NO: 4073613 - RNA, 13 nt, Vaccinia virus
aaugguucuuucc

SEQ ID NO: 4073614 - RNA, 13 nt, Vaccinia virus
aauguaacuauag

SEQ ID NO: 4073615 - RNA, 14 nt, Vaccinia virus
aauguaauucuaaa

SEQ ID NO: 4073616 - RNA, 18 nt, Vaccinia virus
aauguagaaauuagaaag

SEQ ID NO: 4073617 - RNA, 15 nt, Vaccinia virus
aauguaggagaguua

SEQ ID NO: 4073618 - RNA, 21 nt, Vaccinia virus
aauguauccggccaauugaua

SEQ ID NO: 4073619 - RNA, 15 nt, Vaccinia virus
aauguauuaagauua

SEQ ID NO: 4073620 - RNA, 18 nt, Vaccinia virus
aauguauuaguaggaaau

SEQ ID NO: 4073621 - RNA, 14 nt, Vaccinia virus
aaugugucaagaau

SEQ ID NO: 4073622 - RNA, 14 nt, Vaccinia virus
aauguuaaacauua

SEQ ID NO: 4073623 - RNA, 14 nt, Vaccinia virus
aauguuaacaaaaa

SEQ ID NO: 4073624 - RNA, 18 nt, Vaccinia virus
aauguuucuuacauauuu

SEQ ID NO: 4073625 - RNA, 17 nt, Vaccinia virus
aauguuugacugaauau

SEQ ID NO: 4073626 - RNA, 19 nt, Vaccinia virus
aauguuugacugaauauau

SEQ ID NO: 4073627 - RNA, 22 nt, Vaccinia virus
aauguuugauaaaaauauguau

SEQ ID NO: 4073628 - RNA, 14 nt, Vaccinia virus
aauuaaaaaagaua

SEQ ID NO: 4073629 - RNA, 20 nt, Vaccinia virus
aauuaaaaaggaaaauacua

SEQ ID NO: 4073630 - RNA, 14 nt, Vaccinia virus
aauuaagauauugu

SEQ ID NO: 4073631 - RNA, 18 nt, Vaccinia virus
aauuaauaaaaauacaau

SEQ ID NO: 4073632 - RNA, 18 nt, Vaccinia virus
aauuaauaguuuugauau

SEQ ID NO: 4073633 - RNA, 19 nt, Vaccinia virus
aauuaauauguaugauuca

SEQ ID NO: 4073634 - RNA, 16 nt, Vaccinia virus
aauuaauuaauguuuu

SEQ ID NO: 4073635 - RNA, 15 nt, Vaccinia virus
aauuacacauuucca

SEQ ID NO: 4073636 - RNA, 16 nt, Vaccinia virus
aauuacacauuuccaa

SEQ ID NO: 4073637 - RNA, 15 nt, Vaccinia virus
aauuacacuauuugu

SEQ ID NO: 4073638 - RNA, 21 nt, Vaccinia virus
aauuacggcgaaauaaagaaa

SEQ ID NO: 4073639 - RNA, 21 nt, Vaccinia virus
aauuacgguugauucaaaaau

SEQ ID NO: 4073640 - RNA, 15 nt, Vaccinia virus
aauuacuuaaagaua

SEQ ID NO: 4073641 - RNA, 20 nt, Vaccinia virus
aauuacuuaaagauagaaau

SEQ ID NO: 4073642 - RNA, 15 nt, Vaccinia virus
aauuauacaagagau

SEQ ID NO: 4073643 - RNA, 14 nt, Vaccinia virus
aauuauauguagaa

SEQ ID NO: 4073644 - RNA, 12 nt, Vaccinia virus
aauuaucaaaau

SEQ ID NO: 4073645 - RNA, 17 nt, Vaccinia virus
aauuaugauagaaauua

SEQ ID NO: 4073646 - RNA, 16 nt, Vaccinia virus
aauuauguagaugaua

SEQ ID NO: 4073647 - RNA, 15 nt, Vaccinia virus
aauuauguuuuuaua

SEQ ID NO: 4073648 - RNA, 21 nt, Vaccinia virus
aauuauuccuaauuaagaaaa

SEQ ID NO: 4073649 - RNA, 19 nt, Vaccinia virus
aauuauucguuuacugaau

SEQ ID NO: 4073650 - RNA, 14 nt, Vaccinia virus
aauuauuucuaaua

SEQ ID NO: 4073651 - RNA, 19 nt, Vaccinia virus
aauucacaccuagagacaa

SEQ ID NO: 4073652 - RNA, 19 nt, Vaccinia virus
aauucaccuucacaaaaua

SEQ ID NO: 4073653 - RNA, 18 nt, Vaccinia virus
aauucauagcugagaaua

SEQ ID NO: 4073654 - RNA, 15 nt, Vaccinia virus
aauucaucuucuaua

SEQ ID NO: 4073655 - RNA, 17 nt, Vaccinia virus
aauucauuaauauguac

SEQ ID NO: 4073656 - RNA, 16 nt, Vaccinia virus
aauuccauauauuugu

SEQ ID NO: 4073657 - RNA, 14 nt, Vaccinia virus
aauucgauaucuuu

SEQ ID NO: 4073658 - RNA, 14 nt, Vaccinia virus
aauucguuagaaua

SEQ ID NO: 4073659 - RNA, 13 nt, Vaccinia virus
aauucuaaaugau

SEQ ID NO: 4073660 - RNA, 22 nt, Vaccinia virus
aauucuuaguuauauauacucu

SEQ ID NO: 4073661 - RNA, 20 nt, Vaccinia virus
aauucuucaauaaaaugaga

SEQ ID NO: 4073662 - RNA, 14 nt, Vaccinia virus
aauucuuuaauauc

SEQ ID NO: 4073663 - RNA, 15 nt, Vaccinia virus
aauugaaugucauga

SEQ ID NO: 4073664 - RNA, 13 nt, Vaccinia virus
aauugauucuuga

SEQ ID NO: 4073665 - RNA, 22 nt, Vaccinia virus
aauugcauacacuacaagacaa

SEQ ID NO: 4073666 - RNA, 17 nt, Vaccinia virus
aauugggguauuaauaa

SEQ ID NO: 4073667 - RNA, 18 nt, Vaccinia virus
aauugguagaguuuuaua

SEQ ID NO: 4073668 - RNA, 14 nt, Vaccinia virus
aauuguacuuugua

SEQ ID NO: 4073669 - RNA, 14 nt, Vaccinia virus
aauugucuaucugu

SEQ ID NO: 4073670 - RNA, 14 nt, Vaccinia virus
aauugucuguaaac

SEQ ID NO: 4073671 - RNA, 23 nt, Vaccinia virus
aauugugucagaaacuuagaaga

SEQ ID NO: 4073672 - RNA, 14 nt, Vaccinia virus
aauuuaaaaugaua

SEQ ID NO: 4073673 - RNA, 13 nt, Vaccinia virus
aauuuacagaaau

SEQ ID NO: 4073674 - RNA, 14 nt, Vaccinia virus
aauuuagaaauaua

SEQ ID NO: 4073675 - RNA, 17 nt, Vaccinia virus
aauuucaauauugaaaa

SEQ ID NO: 4073676 - RNA, 16 nt, Vaccinia virus
aauuucagaagaaaac

SEQ ID NO: 4073677 - RNA, 15 nt, Vaccinia virus
aauuucuauucauga

SEQ ID NO: 4073678 - RNA, 13 nt, Vaccinia virus
aauuugauaaaga

SEQ ID NO: 4073679 - RNA, 21 nt, Vaccinia virus
aauuugcugacugcauguacu

SEQ ID NO: 4073680 - RNA, 18 nt, Vaccinia virus
aauuugggucuaggagau

SEQ ID NO: 4073681 - RNA, 20 nt, Vaccinia virus
aauuuguagauuuuguuaua

SEQ ID NO: 4073682 - RNA, 13 nt, Vaccinia virus
aauuuuaacagau

SEQ ID NO: 4073683 - RNA, 16 nt, Vaccinia virus
aauuuuaagaaauggu

SEQ ID NO: 4073684 - RNA, 12 nt, Vaccinia virus
aauuuuagaaau

SEQ ID NO: 4073685 - RNA, 13 nt, Vaccinia virus
aauuuuagauaau

SEQ ID NO: 4073686 - RNA, 14 nt, Vaccinia virus
aauuuucaagagau

SEQ ID NO: 4073687 - RNA, 18 nt, Vaccinia virus
aauuuucuauacauagau

SEQ ID NO: 4073688 - RNA, 22 nt, Vaccinia virus
aauuuuguuuuuuuacuuucua

SEQ ID NO: 4073689 - RNA, 22 nt, Vaccinia virus
aauuuuuugagguaaucuucuu

SEQ ID NO: 4073690 - RNA, 23 nt, Vaccinia virus
aauuuuuugguagguuuuagaga

SEQ ID NO: 4073691 - RNA, 19 nt, Vaccinia virus
aauuuuuuguucuacacau

SEQ ID NO: 4073692 - RNA, 21 nt, Vaccinia virus
acaaaaagauuucagaaucua

SEQ ID NO: 4073693 - RNA, 14 nt, Vaccinia virus
acaaaaauacauaa

SEQ ID NO: 4073694 - RNA, 16 nt, Vaccinia virus
acaaaaauuaugaaau

SEQ ID NO: 4073695 - RNA, 16 nt, Vaccinia virus
acaaaagaguuaaguu

SEQ ID NO: 4073696 - RNA, 21 nt, Vaccinia virus
acaaaagguauuacaagaaua

SEQ ID NO: 4073697 - RNA, 18 nt, Vaccinia virus
acaaaagugaauauauau

SEQ ID NO: 4073698 - RNA, 16 nt, Vaccinia virus
acaaaaguuaauaauu

SEQ ID NO: 4073699 - RNA, 12 nt, Vaccinia virus
acaaaaucuuca

SEQ ID NO: 4073700 - RNA, 12 nt, Vaccinia virus
acaaaaugugau

SEQ ID NO: 4073701 - RNA, 20 nt, Vaccinia virus
acaaaauucguuagaauaua

SEQ ID NO: 4073702 - RNA, 17 nt, Vaccinia virus
acaaacaaacucuaaua

SEQ ID NO: 4073703 - RNA, 15 nt, Vaccinia virus
acaaacgaagaaaga

SEQ ID NO: 4073704 - RNA, 14 nt, Vaccinia virus
acaaacgugggaag

SEQ ID NO: 4073705 - RNA, 20 nt, Vaccinia virus
acaaagcacucaauaaauua

SEQ ID NO: 4073706 - RNA, 16 nt, Vaccinia virus
acaaaguccaaugauu

SEQ ID NO: 4073707 - RNA, 16 nt, Vaccinia virus
acaaauauaaaaugac

SEQ ID NO: 4073708 - RNA, 16 nt, Vaccinia virus
acaaaucacugaaaau

SEQ ID NO: 4073709 - RNA, 19 nt, Vaccinia virus
acaaaucaucuuaugguuu

SEQ ID NO: 4073710 - RNA, 18 nt, Vaccinia virus
acaaaugguucaaagacu

SEQ ID NO: 4073711 - RNA, 22 nt, Vaccinia virus
acaaauguuaaacauuaauuga

SEQ ID NO: 4073712 - RNA, 13 nt, Vaccinia virus
acaaauucuauau

SEQ ID NO: 4073713 - RNA, 18 nt, Vaccinia virus
acaaauuuauuuauuaac

SEQ ID NO: 4073714 - RNA, 22 nt, Vaccinia virus
acaacaauguugccucauacau

SEQ ID NO: 4073715 - RNA, 14 nt, Vaccinia virus
acaacacuaucuga

SEQ ID NO: 4073716 - RNA, 13 nt, Vaccinia virus
acaacauauaauu

SEQ ID NO: 4073717 - RNA, 17 nt, Vaccinia virus
acaacaucuaacuauau

SEQ ID NO: 4073718 - RNA, 19 nt, Vaccinia virus
acaacauggagcuaaucua

SEQ ID NO: 4073719 - RNA, 19 nt, Vaccinia virus
acaacgaaccaaaaugaau

SEQ ID NO: 4073720 - RNA, 19 nt, Vaccinia virus
acaacgagagauauuuuca

SEQ ID NO: 4073721 - RNA, 21 nt, Vaccinia virus
acaacgaggacaugauaacuu

SEQ ID NO: 4073722 - RNA, 16 nt, Vaccinia virus
acaagaaauauuucca

SEQ ID NO: 4073723 - RNA, 19 nt, Vaccinia virus
acaagacuacaaagaaugu

SEQ ID NO: 4073724 - RNA, 14 nt, Vaccinia virus
acaagaucaugaac

SEQ ID NO: 4073725 - RNA, 15 nt, Vaccinia virus
acaagaucuguaaau

SEQ ID NO: 4073726 - RNA, 18 nt, Vaccinia virus
acaagcccgucaauaauu

SEQ ID NO: 4073727 - RNA, 20 nt, Vaccinia virus
acaagcgagugcuucuucuu

SEQ ID NO: 4073728 - RNA, 14 nt, Vaccinia virus
acaaggaaacuaau

SEQ ID NO: 4073729 - RNA, 20 nt, Vaccinia virus
acaaguaucaaaagauuaaa

SEQ ID NO: 4073730 - RNA, 16 nt, Vaccinia virus
acaagucauuacuaau

SEQ ID NO: 4073731 - RNA, 17 nt, Vaccinia virus
acaaguuuucauauuau

SEQ ID NO: 4073732 - RNA, 14 nt, Vaccinia virus
acaauaacuucacu

SEQ ID NO: 4073733 - RNA, 12 nt, Vaccinia virus
acaauauuucau

SEQ ID NO: 4073734 - RNA, 19 nt, Vaccinia virus
acaaucaucuuggagcaac

SEQ ID NO: 4073735 - RNA, 17 nt, Vaccinia virus
acaaucguauaucuucu

SEQ ID NO: 4073736 - RNA, 13 nt, Vaccinia virus
acaaucucagaua

SEQ ID NO: 4073737 - RNA, 16 nt, Vaccinia virus
acaaucucuauaucua

SEQ ID NO: 4073738 - RNA, 16 nt, Vaccinia virus
acaaugaaaauggaua

SEQ ID NO: 4073739 - RNA, 22 nt, Vaccinia virus
acaaugaaccguaauauaucua

SEQ ID NO: 4073740 - RNA, 10 nt, Vaccinia virus
acaaugaacu

SEQ ID NO: 4073741 - RNA, 21 nt, Vaccinia virus
acaaugacuuauaaaaauacu

SEQ ID NO: 4073742 - RNA, 22 nt, Vaccinia virus
acaaugcuaauauauucuuaca

SEQ ID NO: 4073743 - RNA, 19 nt, Vaccinia virus
acaaugcucaguaaaugua

SEQ ID NO: 4073744 - RNA, 18 nt, Vaccinia virus
gauauccuaucuauuauu

SEQ ID NO: 4073745 - RNA, 17 nt, Vaccinia virus
gauaucgagaucuuuug

SEQ ID NO: 4073746 - RNA, 20 nt, Vaccinia virus
gauaucgccuuuauuuccac

SEQ ID NO: 4073747 - RNA, 16 nt, Vaccinia virus
gauaucuauacuuacu

SEQ ID NO: 4073748 - RNA, 18 nt, Vaccinia virus
gauaugaacagacauugu

SEQ ID NO: 4073749 - RNA, 15 nt, Vaccinia virus
gauauuaauaaugau

SEQ ID NO: 4073750 - RNA, 18 nt, Vaccinia virus
gauauuagaacugcuaau

SEQ ID NO: 4073751 - RNA, 15 nt, Vaccinia virus
gauauucuaugaauu

SEQ ID NO: 4073752 - RNA, 14 nt, Vaccinia virus
gauauugaagauga

SEQ ID NO: 4073753 - RNA, 12 nt, Vaccinia virus
gauauuguuaaa

SEQ ID NO: 4073754 - RNA, 20 nt, Vaccinia virus
gauauuuucguguuuuaguu

SEQ ID NO: 4073755 - RNA, 22 nt, Vaccinia virus
gaucaaggacuuuuauauccca

SEQ ID NO: 4073756 - RNA, 12 nt, Vaccinia virus
gaucaaguaaag

SEQ ID NO: 4073757 - RNA, 17 nt, Vaccinia virus
gaucaggaauccaaaga

SEQ ID NO: 4073758 - RNA, 16 nt, Vaccinia virus
gaucagguaaaacaau

SEQ ID NO: 4073759 - RNA, 21 nt, Vaccinia virus
gaucagguaaaacaauaaucg

SEQ ID NO: 4073760 - RNA, 18 nt, Vaccinia virus
gauccaucaaaaaacaac

SEQ ID NO: 4073761 - RNA, 18 nt, Vaccinia virus
gauccauuuauaguuaua

SEQ ID NO: 4073762 - RNA, 13 nt, Vaccinia virus
gaucguaaugaac

SEQ ID NO: 4073763 - RNA, 17 nt, Vaccinia virus
gaucuaaagauaaucuu

SEQ ID NO: 4073764 - RNA, 19 nt, Vaccinia virus
gaucuaauacaaaaucauc

SEQ ID NO: 4073765 - RNA, 15 nt, Vaccinia virus
gaucuaauuuuucau

SEQ ID NO: 4073766 - RNA, 20 nt, Vaccinia virus
gaucuagcaaaggaaauugu

SEQ ID NO: 4073767 - RNA, 17 nt, Vaccinia virus
gaucuaguuacaacuau

SEQ ID NO: 4073768 - RNA, 15 nt, Vaccinia virus
gaucucgagaaauaa

SEQ ID NO: 4073769 - RNA, 19 nt, Vaccinia virus
gaucugaugguaauccaau

SEQ ID NO: 4073770 - RNA, 14 nt, Vaccinia virus
gaucuggaaaauaa

SEQ ID NO: 4073771 - RNA, 21 nt, Vaccinia virus
gaugaaaaauuuuuagagguu

SEQ ID NO: 4073772 - RNA, 17 nt, Vaccinia virus
gaugaaggaauaaucuc

SEQ ID NO: 4073773 - RNA, 20 nt, Vaccinia virus
gaugaauuaauuaauguuuu

SEQ ID NO: 4073774 - RNA, 15 nt, Vaccinia virus
gaugagauguuuaua

SEQ ID NO: 4073775 - RNA, 21 nt, Vaccinia virus
gaugauagugacuauuucauu

SEQ ID NO: 4073776 - RNA, 16 nt, Vaccinia virus
gaugaugcaacucuau

SEQ ID NO: 4073777 - RNA, 13 nt, Vaccinia virus
gaugaugugaauu

SEQ ID NO: 4073778 - RNA, 22 nt, Vaccinia virus
gaugauguucuaccuauuucau

SEQ ID NO: 4073779 - RNA, 16 nt, Vaccinia virus
gaugauuaaaauuaac

SEQ ID NO: 4073780 - RNA, 22 nt, Vaccinia virus
gaugcgguuuaauaaauguuuu

SEQ ID NO: 4073781 - RNA, 14 nt, Vaccinia virus
gauggaauuaucau

SEQ ID NO: 4073782 - RNA, 15 nt, Vaccinia virus
gauggauauauuaaa

SEQ ID NO: 4073783 - RNA, 18 nt, Vaccinia virus
gauguaaauauauuuaca

SEQ ID NO: 4073784 - RNA, 11 nt, Vaccinia virus
gauguauauau

SEQ ID NO: 4073785 - RNA, 13 nt, Vaccinia virus
gauguauauauca

SEQ ID NO: 4073786 - RNA, 16 nt, Vaccinia virus
gauguauuguuuaguu

SEQ ID NO: 4073787 - RNA, 18 nt, Vaccinia virus
gaugucaaagauuguaca

SEQ ID NO: 4073788 - RNA, 15 nt, Vaccinia virus
gaugucaaugaagag

SEQ ID NO: 4073789 - RNA, 20 nt, Vaccinia virus
gaugucacaauuuguauuau

SEQ ID NO: 4073790 - RNA, 18 nt, Vaccinia virus
gaugucguuauucugaaa

SEQ ID NO: 4073791 - RNA, 14 nt, Vaccinia virus
gaugucuauguacg

SEQ ID NO: 4073792 - RNA, 14 nt, Vaccinia virus
gauguuuguucauu

SEQ ID NO: 4073793 - RNA, 20 nt, Vaccinia virus
gauuaaaucguguauucauc

SEQ ID NO: 4073794 - RNA, 12 nt, Vaccinia virus
gauuaacagagu

SEQ ID NO: 4073795 - RNA, 13 nt, Vaccinia virus
gauuaagauugcu

SEQ ID NO: 4073796 - RNA, 22 nt, Vaccinia virus
gauuaauuguuauuuuauucau

SEQ ID NO: 4073797 - RNA, 17 nt, Vaccinia virus
gauuaauuuuuuuucau

SEQ ID NO: 4073798 - RNA, 19 nt, Vaccinia virus
gauuauaauccuuauacau

SEQ ID NO: 4073799 - RNA, 17 nt, Vaccinia virus
gauuauuagaucuuuuc

SEQ ID NO: 4073800 - RNA, 16 nt, Vaccinia virus
gauuauuuacuauaau

SEQ ID NO: 4073801 - RNA, 20 nt, Vaccinia virus
gauucaaauccuucauucau

SEQ ID NO: 4073802 - RNA, 20 nt, Vaccinia virus
gauucaucaacauuugcugu

SEQ ID NO: 4073803 - RNA, 19 nt, Vaccinia virus
gauucaucaagguauauaa

SEQ ID NO: 4073804 - RNA, 20 nt, Vaccinia virus
gauucauccuuaaauguuuu

SEQ ID NO: 4073805 - RNA, 14 nt, Vaccinia virus
gauuccaacagcug

SEQ ID NO: 4073806 - RNA, 15 nt, Vaccinia virus
gauucuagaauauca

SEQ ID NO: 4073807 - RNA, 17 nt, Vaccinia virus
gauucuaguaucuuuug

SEQ ID NO: 4073808 - RNA, 16 nt, Vaccinia virus
gauugagauucucuau

SEQ ID NO: 4073809 - RNA, 14 nt, Vaccinia virus
gauugauaacugaa

SEQ ID NO: 4073810 - RNA, 11 nt, Vaccinia virus
gauugauuuuu

SEQ ID NO: 4073811 - RNA, 19 nt, Vaccinia virus
gauugcauagugaauauau

SEQ ID NO: 4073812 - RNA, 13 nt, Vaccinia virus
gauuguguuauau

SEQ ID NO: 4073813 - RNA, 18 nt, Vaccinia virus
gauuguuuaagaagagaa

SEQ ID NO: 4073814 - RNA, 23 nt, Vaccinia virus
gauuucuaucccgaaagaacuga

SEQ ID NO: 4073815 - RNA, 19 nt, Vaccinia virus
gauuugucacaauaugaau

SEQ ID NO: 4073816 - RNA, 12 nt, Vaccinia virus
gauuuucuggga

SEQ ID NO: 4073817 - RNA, 12 nt, Vaccinia virus
gauuuuugucca

SEQ ID NO: 4073818 - RNA, 19 nt, Vaccinia virus
gauuuuuuuccaugauauc

SEQ ID NO: 4073819 - RNA, 22 nt, Vaccinia virus
gcaaaaauaauaugauuagaag

SEQ ID NO: 4073820 - RNA, 18 nt, Vaccinia virus
gcaaaacuauuauuuuaa

SEQ ID NO: 4073821 - RNA, 22 nt, Vaccinia virus
gcaaaacugaaaauauauugau

SEQ ID NO: 4073822 - RNA, 23 nt, Vaccinia virus
gcaaacaacaacaaaauaauaau

SEQ ID NO: 4073823 - RNA, 20 nt, Vaccinia virus
gcaaacacuuuccugauuua

SEQ ID NO: 4073824 - RNA, 18 nt, Vaccinia virus
gcaaagaaauuaauagaa

SEQ ID NO: 4073825 - RNA, 13 nt, Vaccinia virus
gcaaauucuaguc

SEQ ID NO: 4073826 - RNA, 17 nt, Vaccinia virus
gcaaccguuagauguag

SEQ ID NO: 4073827 - RNA, 15 nt, Vaccinia virus
gcaagaaaauuuaua

SEQ ID NO: 4073828 - RNA, 12 nt, Vaccinia virus
gcaagaaaugga

SEQ ID NO: 4073829 - RNA, 19 nt, Vaccinia virus
gcaauaacuaaaaauguaa

SEQ ID NO: 4073830 - RNA, 17 nt, Vaccinia virus
gcaauagguaauaacua

SEQ ID NO: 4073831 - RNA, 23 nt, Vaccinia virus
gcaauagucagacuguaguucua

SEQ ID NO: 4073832 - RNA, 18 nt, Vaccinia virus
gcaauauaucaucuuuuc

SEQ ID NO: 4073833 - RNA, 14 nt, Vaccinia virus
gcaaugaauaucua

SEQ ID NO: 4073834 - RNA, 15 nt, Vaccinia virus
gcaaugcauaaucga

SEQ ID NO: 4073835 - RNA, 12 nt, Vaccinia virus
gcaauguaaugg

SEQ ID NO: 4073836 - RNA, 18 nt, Vaccinia virus
gcaauuagauccaaagaa

SEQ ID NO: 4073837 - RNA, 17 nt, Vaccinia virus
gcaauucgcuaaacaau

SEQ ID NO: 4073838 - RNA, 23 nt, Vaccinia virus
gcaauuuuauugcuaauaaugac

SEQ ID NO: 4073839 - RNA, 20 nt, Vaccinia virus
gcacacaaucuaauauugau

SEQ ID NO: 4073840 - RNA, 18 nt, Vaccinia virus
gcacauagcgaugauuau

SEQ ID NO: 4073841 - RNA, 12 nt, Vaccinia virus
gcacgaacaaaa

SEQ ID NO: 4073842 - RNA, 17 nt, Vaccinia virus
gcacuacuguuaagaau

SEQ ID NO: 4073843 - RNA, 19 nt, Vaccinia virus
gcagaaaugcaauuaaaaa

SEQ ID NO: 4073844 - RNA, 19 nt, Vaccinia virus
gcagcauuuccuacauaua

SEQ ID NO: 4073845 - RNA, 20 nt, Vaccinia virus
gcagguacuauaauauuaaa

SEQ ID NO: 4073846 - RNA, 17 nt, Vaccinia virus
gcagucuaacauuuuua

SEQ ID NO: 4073847 - RNA, 13 nt, Vaccinia virus
gcaguuucaauau

SEQ ID NO: 4073848 - RNA, 17 nt, Vaccinia virus
gcauaaacuaacacaag

SEQ ID NO: 4073849 - RNA, 16 nt, Vaccinia virus
gcauacuuuguaaucu

SEQ ID NO: 4073850 - RNA, 12 nt, Vaccinia virus
gcauagaaauac

SEQ ID NO: 4073851 - RNA, 17 nt, Vaccinia virus
gcauaggaacauuucug

SEQ ID NO: 4073852 - RNA, 14 nt, Vaccinia virus
gcauauauuagaaa

SEQ ID NO: 4073853 - RNA, 22 nt, Vaccinia virus
gcaucaacaauuacaaaugagu

SEQ ID NO: 4073854 - RNA, 22 nt, Vaccinia virus
gcauccccuuucaauaguucuc

SEQ ID NO: 4073855 - RNA, 15 nt, Vaccinia virus
gcauccguauaaaaa

SEQ ID NO: 4073856 - RNA, 22 nt, Vaccinia virus
gcauccuucuaagauuauuuua

SEQ ID NO: 4073857 - RNA, 20 nt, Vaccinia virus
gcaucuagucuuaaauggag

SEQ ID NO: 4073858 - RNA, 19 nt, Vaccinia virus
gcaucuauauaaucuuuuu

SEQ ID NO: 4073859 - RNA, 16 nt, Vaccinia virus
gcaucuuaauccuucu

SEQ ID NO: 4073860 - RNA, 22 nt, Vaccinia virus
gcaugcgacuaugauaucaugu

SEQ ID NO: 4073861 - RNA, 19 nt, Vaccinia virus
gcauguuugcucucugaau

SEQ ID NO: 4073862 - RNA, 14 nt, Vaccinia virus
gcauuaauaacauc

SEQ ID NO: 4073863 - RNA, 17 nt, Vaccinia virus
gcauuaguaucaugaac

SEQ ID NO: 4073864 - RNA, 16 nt, Vaccinia virus
gcauuccaaucuuaaa

SEQ ID NO: 4073865 - RNA, 22 nt, Vaccinia virus
gcauucuucauucuauuaaugu

SEQ ID NO: 4073866 - RNA, 12 nt, Vaccinia virus
gccaaaaugaua

SEQ ID NO: 4073867 - RNA, 18 nt, Vaccinia virus
gccaaacucauucacuuu

SEQ ID NO: 4073868 - RNA, 21 nt, Vaccinia virus
uagacugaaugcuuucuugga

SEQ ID NO: 4073869 - RNA, 19 nt, Vaccinia virus
uagacuguuuguagaaugc

SEQ ID NO: 4073870 - RNA, 20 nt, Vaccinia virus
uagacuguuuguagaaugcu

SEQ ID NO: 4073871 - RNA, 14 nt, Vaccinia virus
uagacuuacuaaag

SEQ ID NO: 4073872 - RNA, 16 nt, Vaccinia virus
uagacuugauuauucu

SEQ ID NO: 4073873 - RNA, 14 nt, Vaccinia virus
uagagaacauaaug

SEQ ID NO: 4073874 - RNA, 19 nt, Vaccinia virus
uagagacagauuaaguucu

SEQ ID NO: 4073875 - RNA, 16 nt, Vaccinia virus
uagagauaaaacaagu

SEQ ID NO: 4073876 - RNA, 22 nt, Vaccinia virus
uagagauuuugaaaauuaugua

SEQ ID NO: 4073877 - RNA, 20 nt, Vaccinia virus
uagagcccacguuuaaacau

SEQ ID NO: 4073878 - RNA, 23 nt, Vaccinia virus
uagaggaaguauaaaaauuaaac

SEQ ID NO: 4073879 - RNA, 16 nt, Vaccinia virus
uagaguuuuauucuca

SEQ ID NO: 4073880 - RNA, 14 nt, Vaccinia virus
uagauaaaauacug

SEQ ID NO: 4073881 - RNA, 21 nt, Vaccinia virus
uagauagacgaggaaacaaug

SEQ ID NO: 4073882 - RNA, 13 nt, Vaccinia virus
uagauauagagau

SEQ ID NO: 4073883 - RNA, 17 nt, Vaccinia virus
uagauauagauguuaua

SEQ ID NO: 4073884 - RNA, 14 nt, Vaccinia virus
uagauaucauuaau

SEQ ID NO: 4073885 - RNA, 16 nt, Vaccinia virus
uagaucaagaaacauu

SEQ ID NO: 4073886 - RNA, 15 nt, Vaccinia virus
uagaucacaaaucac

SEQ ID NO: 4073887 - RNA, 17 nt, Vaccinia virus
uagauccuaauucacaa

SEQ ID NO: 4073888 - RNA, 22 nt, Vaccinia virus
uagauccuucaauaacuuauag

SEQ ID NO: 4073889 - RNA, 13 nt, Vaccinia virus
uagaucggaugau

SEQ ID NO: 4073890 - RNA, 21 nt, Vaccinia virus
uagaucgucuaaaagaauugc

SEQ ID NO: 4073891 - RNA, 14 nt, Vaccinia virus
uagaucucuagaau

SEQ ID NO: 4073892 - RNA, 15 nt, Vaccinia virus
uagaugagaacagaa

SEQ ID NO: 4073893 - RNA, 19 nt, Vaccinia virus
uagaugcauauauuucauu

SEQ ID NO: 4073894 - RNA, 19 nt, Vaccinia virus
uagaugccauaucauacau

SEQ ID NO: 4073895 - RNA, 18 nt, Vaccinia virus
uagaugcuacuucaucua

SEQ ID NO: 4073896 - RNA, 14 nt, Vaccinia virus
uagauggucucauu

SEQ ID NO: 4073897 - RNA, 14 nt, Vaccinia virus
uagaugguucuuua

SEQ ID NO: 4073898 - RNA, 17 nt, Vaccinia virus
uagaugucgaagacuua

SEQ ID NO: 4073899 - RNA, 18 nt, Vaccinia virus
uagaugucgaagacuuac

SEQ ID NO: 4073900 - RNA, 21 nt, Vaccinia virus
uagauuaaugcuuaaacuauc

SEQ ID NO: 4073901 - RNA, 15 nt, Vaccinia virus
uagauuuauuugaua

SEQ ID NO: 4073902 - RNA, 18 nt, Vaccinia virus
uagauuucgaaaauacua

SEQ ID NO: 4073903 - RNA, 15 nt, Vaccinia virus
uagauuuuggauaau

SEQ ID NO: 4073904 - RNA, 15 nt, Vaccinia virus
uagauuuuguugaga

SEQ ID NO: 4073905 - RNA, 18 nt, Vaccinia virus
uagauuuuuaguuacaga

SEQ ID NO: 4073906 - RNA, 18 nt, Vaccinia virus
uagcaccauuaucuuugu

SEQ ID NO: 4073907 - RNA, 16 nt, Vaccinia virus
uagcagccaauacuuu

SEQ ID NO: 4073908 - RNA, 14 nt, Vaccinia virus
uagccaccauaaug

SEQ ID NO: 4073909 - RNA, 23 nt, Vaccinia virus
uagccagacaaauggucaaugau

SEQ ID NO: 4073910 - RNA, 18 nt, Vaccinia virus
uagccgcgguaacuuuua

SEQ ID NO: 4073911 - RNA, 17 nt, Vaccinia virus
uagccuuaagaaaacua

SEQ ID NO: 4073912 - RNA, 13 nt, Vaccinia virus
uagcgacauaaac

SEQ ID NO: 4073913 - RNA, 15 nt, Vaccinia virus
uagcgacauaaacau

SEQ ID NO: 4073914 - RNA, 12 nt, Vaccinia virus
uagcuaauauua

SEQ ID NO: 4073915 - RNA, 15 nt, Vaccinia virus
uagcuguucaagaau

SEQ ID NO: 4073916 - RNA, 23 nt, Vaccinia virus
uaggaaaacccgcacacauaaac

SEQ ID NO: 4073917 - RNA, 21 nt, Vaccinia virus
uaggaaauugguuuaugaugu

SEQ ID NO: 4073918 - RNA, 14 nt, Vaccinia virus
uaggaauaugugcu

SEQ ID NO: 4073919 - RNA, 12 nt, Vaccinia virus
uaggaaugccac

SEQ ID NO: 4073920 - RNA, 16 nt, Vaccinia virus
uaggagaguaaugggu

SEQ ID NO: 4073921 - RNA, 16 nt, Vaccinia virus
uaggaguuagaauaau

SEQ ID NO: 4073922 - RNA, 14 nt, Vaccinia virus
uaggauuuaaacaa

SEQ ID NO: 4073923 - RNA, 14 nt, Vaccinia virus
uagguaacauaaaa

SEQ ID NO: 4073924 - RNA, 21 nt, Vaccinia virus
uagguauugaccucucagaau

SEQ ID NO: 4073925 - RNA, 17 nt, Vaccinia virus
uagguuguaauaucaua

SEQ ID NO: 4073926 - RNA, 22 nt, Vaccinia virus
uagguuguuuauugauauacua

SEQ ID NO: 4073927 - RNA, 22 nt, Vaccinia virus
uaguaaacuugacuaaaucuua

SEQ ID NO: 4073928 - RNA, 17 nt, Vaccinia virus
uaguaaaguuagaugug

SEQ ID NO: 4073929 - RNA, 18 nt, Vaccinia virus
uaguaaccguuuuccauu

SEQ ID NO: 4073930 - RNA, 23 nt, Vaccinia virus
uaguaagccaauuccaauuguug

SEQ ID NO: 4073931 - RNA, 16 nt, Vaccinia virus
uaguaaggcuuuagaa

SEQ ID NO: 4073932 - RNA, 21 nt, Vaccinia virus
uaguaauaaugauucaacaau

SEQ ID NO: 4073933 - RNA, 14 nt, Vaccinia virus
uaguaauacaugua

SEQ ID NO: 4073934 - RNA, 15 nt, Vaccinia virus
uaguaauuaaugaaa

SEQ ID NO: 4073935 - RNA, 18 nt, Vaccinia virus
uaguaccaaauucuucua

SEQ ID NO: 4073936 - RNA, 20 nt, Vaccinia virus
uaguacgcgaaauaauauua

SEQ ID NO: 4073937 - RNA, 22 nt, Vaccinia virus
uaguacguauaacuuucuucug

SEQ ID NO: 4073938 - RNA, 17 nt, Vaccinia virus
uaguacucauuaucauu

SEQ ID NO: 4073939 - RNA, 15 nt, Vaccinia virus
uaguauaaauaguua

SEQ ID NO: 4073940 - RNA, 17 nt, Vaccinia virus
uaguauacccaaagaga

SEQ ID NO: 4073941 - RNA, 19 nt, Vaccinia virus
uaguauauugagaguguau

SEQ ID NO: 4073942 - RNA, 21 nt, Vaccinia virus
uaguaucaauaacgcaaucau

SEQ ID NO: 4073943 - RNA, 16 nt, Vaccinia virus
uaguaucuaaaacuac

SEQ ID NO: 4073944 - RNA, 14 nt, Vaccinia virus
uaguauguuauaua

SEQ ID NO: 4073945 - RNA, 19 nt, Vaccinia virus
uaguauuauucauuuucua

SEQ ID NO: 4073946 - RNA, 23 nt, Vaccinia virus
uaguauucaagucaaagaaauac

SEQ ID NO: 4073947 - RNA, 13 nt, Vaccinia virus
uagucaaggaugu

SEQ ID NO: 4073948 - RNA, 12 nt, Vaccinia virus
uagucacaauca

SEQ ID NO: 4073949 - RNA, 15 nt, Vaccinia virus
uagucagacuguagu

SEQ ID NO: 4073950 - RNA, 18 nt, Vaccinia virus
uagucguuuauuaucuug

SEQ ID NO: 4073951 - RNA, 17 nt, Vaccinia virus
uagucuuaaauggagau

SEQ ID NO: 4073952 - RNA, 19 nt, Vaccinia virus
uagugacggacuuaacaug

SEQ ID NO: 4073953 - RNA, 22 nt, Vaccinia virus
uaguggaguaauuuacaaauug

SEQ ID NO: 4073954 - RNA, 17 nt, Vaccinia virus
uaguggaucucaaugac

SEQ ID NO: 4073955 - RNA, 21 nt, Vaccinia virus
uagugugacuuaacuuguaau

SEQ ID NO: 4073956 - RNA, 13 nt, Vaccinia virus
uaguuaaauauua

SEQ ID NO: 4073957 - RNA, 21 nt, Vaccinia virus
uaguuaagaacaugucuucua

SEQ ID NO: 4073958 - RNA, 17 nt, Vaccinia virus
uaguuaugauaaaugau

SEQ ID NO: 4073959 - RNA, 18 nt, Vaccinia virus
uaguucuaucaugcuucc

SEQ ID NO: 4073960 - RNA, 19 nt, Vaccinia virus
uaguugauagaacaaaaua

SEQ ID NO: 4073961 - RNA, 23 nt, Vaccinia virus
uaguugauagaacaaaauacaua

SEQ ID NO: 4073962 - RNA, 15 nt, Vaccinia virus
uaguuuaucaaaaau

SEQ ID NO: 4073963 - RNA, 18 nt, Vaccinia virus
uaguuucaucauccauga

SEQ ID NO: 4073964 - RNA, 20 nt, Vaccinia virus
uaguuuccuuuuuauaaaau

SEQ ID NO: 4073965 - RNA, 17 nt, Vaccinia virus
uaguuucugguuuucua

SEQ ID NO: 4073966 - RNA, 22 nt, Vaccinia virus
uaguuucugguuuucuauaaau

SEQ ID NO: 4073967 - RNA, 14 nt, Vaccinia virus
uaguuuguuuucau

SEQ ID NO: 4073968 - RNA, 14 nt, Vaccinia virus
uaguuuuaagaaag

SEQ ID NO: 4073969 - RNA, 16 nt, Vaccinia virus
uaguuuuacuaucaua

SEQ ID NO: 4073970 - RNA, 14 nt, Vaccinia virus
uaguuuucuaaaau

SEQ ID NO: 4073971 - RNA, 21 nt, Vaccinia virus
uaguuuucucuauucugaaau

SEQ ID NO: 4073972 - RNA, 20 nt, Vaccinia virus
uaguuuuuuuguuuccuugu

SEQ ID NO: 4073973 - RNA, 22 nt, Vaccinia virus
uauaaaaacauuuuauuucuag

SEQ ID NO: 4073974 - RNA, 23 nt, Vaccinia virus
uauaaaaacauuuuauuucuaga

SEQ ID NO: 4073975 - RNA, 19 nt, Vaccinia virus
uauaaaaguaauaaaacaa

SEQ ID NO: 4073976 - RNA, 21 nt, Vaccinia virus
uauaaaauacuaaugcaucua

SEQ ID NO: 4073977 - RNA, 14 nt, Vaccinia virus
uauaaaauauucua

SEQ ID NO: 4073978 - RNA, 17 nt, Vaccinia virus
uauaaacguauacugua

SEQ ID NO: 4073979 - RNA, 14 nt, Vaccinia virus
uauaaagacaaaca

SEQ ID NO: 4073980 - RNA, 20 nt, Vaccinia virus
uauaaaggaauaaaauauga

SEQ ID NO: 4073981 - RNA, 22 nt, Vaccinia virus
uauaaauaaaagacaaaucuug

SEQ ID NO: 4073982 - RNA, 21 nt, Vaccinia virus
uauaaauaguuuuuauguaua

SEQ ID NO: 4073983 - RNA, 17 nt, Vaccinia virus
uauaaaucauauuuaga

SEQ ID NO: 4073984 - RNA, 15 nt, Vaccinia virus
uauaaauguagacuc

SEQ ID NO: 4073985 - RNA, 18 nt, Vaccinia virus
uauaacacuuauguauua

SEQ ID NO: 4073986 - RNA, 15 nt, Vaccinia virus
uauaacauuaauauu

SEQ ID NO: 4073987 - RNA, 19 nt, Vaccinia virus
uauaacguuaugaaacgaa

SEQ ID NO: 4073988 - RNA, 21 nt, Vaccinia virus
uauaacucguuuuuauaugug

SEQ ID NO: 4073989 - RNA, 16 nt, Vaccinia virus
uauaacuucuaaucuu

SEQ ID NO: 4073990 - RNA, 15 nt, Vaccinia virus
uauaauacaggauua

SEQ ID NO: 4073991 - RNA, 22 nt, Vaccinia virus
uauaauacuuaaaaauggaugu

SEQ ID NO: 4073992 - RNA, 15 nt, Vaccinia virus
ucaagucaaagaaau

SEQ ID NO: 4073993 - RNA, 21 nt, Vaccinia virus
ucaauaagaugcaucgugaaa

SEQ ID NO: 4073994 - RNA, 14 nt, Vaccinia virus
ucaauaaggaauua

SEQ ID NO: 4073995 - RNA, 21 nt, Vaccinia virus
ucaauaauuguggcuauauau

SEQ ID NO: 4073996 - RNA, 23 nt, Vaccinia virus
ucaauacaaaacauaaaaaacaa

SEQ ID NO: 4073997 - RNA, 17 nt, Vaccinia virus
ucaauacggccauccag

SEQ ID NO: 4073998 - RNA, 18 nt, Vaccinia virus
ucaauauauuaagaaguu

SEQ ID NO: 4073999 - RNA, 14 nt, Vaccinia virus
ucaauaucaacaag

SEQ ID NO: 4074000 - RNA, 15 nt, Vaccinia virus
ucaauaugagcaaug

SEQ ID NO: 4074001 - RNA, 18 nt, Vaccinia virus
ucaauccuuugauuauca

SEQ ID NO: 4074002 - RNA, 20 nt, Vaccinia virus
ucaauggauaccuugcuauu

SEQ ID NO: 4074003 - RNA, 22 nt, Vaccinia virus
ucaaugucuuaauaagaagugu

SEQ ID NO: 4074004 - RNA, 15 nt, Vaccinia virus
ucaauugauaagaca

SEQ ID NO: 4074005 - RNA, 11 nt, Vaccinia virus
ucacaauaaaa

SEQ ID NO: 4074006 - RNA, 18 nt, Vaccinia virus
ucacaauuaaaucauuga

SEQ ID NO: 4074007 - RNA, 19 nt, Vaccinia virus
ucacaccagaugucauuau

SEQ ID NO: 4074008 - RNA, 14 nt, Vaccinia virus
ucacagucuguuuu

SEQ ID NO: 4074009 - RNA, 15 nt, Vaccinia virus
ucacaugauguagug

SEQ ID NO: 4074010 - RNA, 19 nt, Vaccinia virus
ucaccaaauuuuacaaaaa

SEQ ID NO: 4074011 - RNA, 14 nt, Vaccinia virus
ucaccgauagagaa

SEQ ID NO: 4074012 - RNA, 18 nt, Vaccinia virus
ucaccugccauaaauaaa

SEQ ID NO: 4074013 - RNA, 16 nt, Vaccinia virus
ucaccuuaucaaaguc

SEQ ID NO: 4074014 - RNA, 19 nt, Vaccinia virus
ucacgauguaggaauauag

SEQ ID NO: 4074015 - RNA, 20 nt, Vaccinia virus
ucacguuauauaacuaucaa

SEQ ID NO: 4074016 - RNA, 17 nt, Vaccinia virus
ucacuaacaauaacuag

SEQ ID NO: 4074017 - RNA, 14 nt, Vaccinia virus
ucacuagaaacuag

SEQ ID NO: 4074018 - RNA, 22 nt, Vaccinia virus
ucacucgguggauacaauaaau

SEQ ID NO: 4074019 - RNA, 16 nt, Vaccinia virus
ucacucgugaagaagc

SEQ ID NO: 4074020 - RNA, 16 nt, Vaccinia virus
ucacucuucgaaaaga

SEQ ID NO: 4074021 - RNA, 16 nt, Vaccinia virus
ucacugcgauuguauu

SEQ ID NO: 4074022 - RNA, 18 nt, Vaccinia virus
ucacugggguaaaguaag

SEQ ID NO: 4074023 - RNA, 19 nt, Vaccinia virus
ucacuguguguaagaagau

SEQ ID NO: 4074024 - RNA, 18 nt, Vaccinia virus
ucagaacacacuuuucuc

SEQ ID NO: 4074025 - RNA, 14 nt, Vaccinia virus
ucagaaucaaauau

SEQ ID NO: 4074026 - RNA, 16 nt, Vaccinia virus
ucagaguuacaucaaa

SEQ ID NO: 4074027 - RNA, 15 nt, Vaccinia virus
ucagauauaucuauu

SEQ ID NO: 4074028 - RNA, 12 nt, Vaccinia virus
ucagaucaaagu

SEQ ID NO: 4074029 - RNA, 22 nt, Vaccinia virus
ucagaucguauagccuauccaa

SEQ ID NO: 4074030 - RNA, 15 nt, Vaccinia virus
ucagaugauguauua

SEQ ID NO: 4074031 - RNA, 21 nt, Vaccinia virus
ucagauuaaauccaucucaga

SEQ ID NO: 4074032 - RNA, 19 nt, Vaccinia virus
ucagauuauuaaguauaau

SEQ ID NO: 4074033 - RNA, 15 nt, Vaccinia virus
ucagauuauucuuaa

SEQ ID NO: 4074034 - RNA, 21 nt, Vaccinia virus
ucagauuauucuuaaaugccu

SEQ ID NO: 4074035 - RNA, 17 nt, Vaccinia virus
ucagccauagcaucagc

SEQ ID NO: 4074036 - RNA, 16 nt, Vaccinia virus
ucagcugaaaaacuau

SEQ ID NO: 4074037 - RNA, 18 nt, Vaccinia virus
ucaguaacuauguucauu

SEQ ID NO: 4074038 - RNA, 18 nt, Vaccinia virus
ucaguguagauaguaaau

SEQ ID NO: 4074039 - RNA, 19 nt, Vaccinia virus
ucaguguggguacaaauau

SEQ ID NO: 4074040 - RNA, 22 nt, Vaccinia virus
ucauaaaaaaauauauuauuuu

SEQ ID NO: 4074041 - RNA, 17 nt, Vaccinia virus
ucauaaauaaaaaugaa

SEQ ID NO: 4074042 - RNA, 18 nt, Vaccinia virus
ucauaaauuuuuauuucu

SEQ ID NO: 4074043 - RNA, 15 nt, Vaccinia virus
ucauaacguccagaa

SEQ ID NO: 4074044 - RNA, 23 nt, Vaccinia virus
ucauaaguggacauauagaugca

SEQ ID NO: 4074045 - RNA, 14 nt, Vaccinia virus
ucauaauugcuauu

SEQ ID NO: 4074046 - RNA, 20 nt, Vaccinia virus
ucauacgauaugccuccaga

SEQ ID NO: 4074047 - RNA, 18 nt, Vaccinia virus
ucauacuuguuaguaguu

SEQ ID NO: 4074048 - RNA, 13 nt, Vaccinia virus
ucauauagauauu

SEQ ID NO: 4074049 - RNA, 14 nt, Vaccinia virus
ucauauauuuuugg

SEQ ID NO: 4074050 - RNA, 20 nt, Vaccinia virus
ucauaucacauaguguuuua

SEQ ID NO: 4074051 - RNA, 15 nt, Vaccinia virus
ucauauccuacugua

SEQ ID NO: 4074052 - RNA, 19 nt, Vaccinia virus
ucauaugacuaaaaugcug

SEQ ID NO: 4074053 - RNA, 18 nt, Vaccinia virus
ucauauuaauaaaguguu

SEQ ID NO: 4074054 - RNA, 13 nt, Vaccinia virus
ucauauucucaua

SEQ ID NO: 4074055 - RNA, 15 nt, Vaccinia virus
ucauauuuagaauau

SEQ ID NO: 4074056 - RNA, 16 nt, Vaccinia virus
ucaucaaacaacugaa

SEQ ID NO: 4074057 - RNA, 15 nt, Vaccinia virus
ucaucaauagacaua

SEQ ID NO: 4074058 - RNA, 21 nt, Vaccinia virus
ucaucacauaucgccacaaaa

SEQ ID NO: 4074059 - RNA, 14 nt, Vaccinia virus
ucaucaucaaaaga

SEQ ID NO: 4074060 - RNA, 14 nt, Vaccinia virus
ucaucauuaaacau

SEQ ID NO: 4074061 - RNA, 17 nt, Vaccinia virus
ucauccagaucauuaag

SEQ ID NO: 4074062 - RNA, 18 nt, Vaccinia virus
ucauccguggauauuuga

SEQ ID NO: 4074063 - RNA, 18 nt, Vaccinia virus
ucauccuuaaauguuuuc

SEQ ID NO: 4074064 - RNA, 16 nt, Vaccinia virus
ucaucggaucuguaaa

SEQ ID NO: 4074065 - RNA, 20 nt, Vaccinia virus
ucaucguauagcaauguaau

SEQ ID NO: 4074066 - RNA, 13 nt, Vaccinia virus
ucaucuacauaau

SEQ ID NO: 4074067 - RNA, 23 nt, Vaccinia virus
ucaucuggaauugucacuacuaa

SEQ ID NO: 4074068 - RNA, 16 nt, Vaccinia virus
ucaucuucuauauaag

SEQ ID NO: 4074069 - RNA, 17 nt, Vaccinia virus
ucaucuugucuagaaug

SEQ ID NO: 4074070 - RNA, 19 nt, Vaccinia virus
ucaucuuguucagaaauau

SEQ ID NO: 4074071 - RNA, 13 nt, Vaccinia virus
ucaugaacauaau

SEQ ID NO: 4074072 - RNA, 20 nt, Vaccinia virus
ucaugaauacguuuaauguu

SEQ ID NO: 4074073 - RNA, 20 nt, Vaccinia virus
ucaugacugauuuuuuaacu

SEQ ID NO: 4074074 - RNA, 21 nt, Vaccinia virus
ucaugcauuuguuaguuauuc

SEQ ID NO: 4074075 - RNA, 20 nt, Vaccinia virus
ucauggaaacaaaugaaaca

SEQ ID NO: 4074076 - RNA, 20 nt, Vaccinia virus
ucauggauaauauuuguaau

SEQ ID NO: 4074077 - RNA, 12 nt, Vaccinia virus
ucauguaaccaa

SEQ ID NO: 4074078 - RNA, 14 nt, Vaccinia virus
ucauguagauaguu

SEQ ID NO: 4074079 - RNA, 19 nt, Vaccinia virus
ucauguucgaaaaagugaa

SEQ ID NO: 4074080 - RNA, 17 nt, Vaccinia virus
ucauuaaaaaaauuaac

SEQ ID NO: 4074081 - RNA, 17 nt, Vaccinia virus
ucauuaauaguauacac

SEQ ID NO: 4074082 - RNA, 17 nt, Vaccinia virus
ucauuacagaaacugua

SEQ ID NO: 4074083 - RNA, 18 nt, Vaccinia virus
ucauuauaacucuagaau

SEQ ID NO: 4074084 - RNA, 15 nt, Vaccinia virus
ucauuauauaguguu

SEQ ID NO: 4074085 - RNA, 21 nt, Vaccinia virus
ucauuaucgguguauuuucca

SEQ ID NO: 4074086 - RNA, 13 nt, Vaccinia virus
ucauuaucugaaa

SEQ ID NO: 4074087 - RNA, 15 nt, Vaccinia virus
ucauucaagauaagc

SEQ ID NO: 4074088 - RNA, 13 nt, Vaccinia virus
ucauucauauucu

SEQ ID NO: 4074089 - RNA, 23 nt, Vaccinia virus
ucauucgcggaacuacauaguaa

SEQ ID NO: 4074090 - RNA, 19 nt, Vaccinia virus
ucauugauugagaagaagc

SEQ ID NO: 4074091 - RNA, 20 nt, Vaccinia virus
ucauuguccagauugaacau

SEQ ID NO: 4074092 - RNA, 15 nt, Vaccinia virus
ucauuguuacauaaa

SEQ ID NO: 4074093 - RNA, 15 nt, Vaccinia virus
ucauuguuaugaauc

SEQ ID NO: 4074094 - RNA, 20 nt, Vaccinia virus
ucauuuauaaucuauuagaa

SEQ ID NO: 4074095 - RNA, 21 nt, Vaccinia virus
ucauuuucggguuuaaauucu

SEQ ID NO: 4074096 - RNA, 18 nt, Vaccinia virus
ucauuuuuuuaaaacugu

SEQ ID NO: 4074097 - RNA, 17 nt, Vaccinia virus
uccaaaaagaaugagua

SEQ ID NO: 4074098 - RNA, 22 nt, Vaccinia virus
uccaaggauguaauuaaauguu

SEQ ID NO: 4074099 - RNA, 14 nt, Vaccinia virus
uccaaguuucuauu

SEQ ID NO: 4074100 - RNA, 15 nt, Vaccinia virus
uccaauagugaaacu

SEQ ID NO: 4074101 - RNA, 14 nt, Vaccinia virus
uccaaucaugugua

SEQ ID NO: 4074102 - RNA, 15 nt, Vaccinia virus
uccaaucuuaaacau

SEQ ID NO: 4074103 - RNA, 15 nt, Vaccinia virus
uccaauguauuuaug

SEQ ID NO: 4074104 - RNA, 20 nt, Vaccinia virus
uccacaccgccucuagauau

SEQ ID NO: 4074105 - RNA, 13 nt, Vaccinia virus
uccacauccauga

SEQ ID NO: 4074106 - RNA, 22 nt, Vaccinia virus
uccaccgacucauuauuuccca

SEQ ID NO: 4074107 - RNA, 18 nt, Vaccinia virus
uccacugucacuggaaag

SEQ ID NO: 4074108 - RNA, 12 nt, Vaccinia virus
uccagaauguac

SEQ ID NO: 4074109 - RNA, 20 nt, Vaccinia virus
uccagauacagugauuuugg

SEQ ID NO: 4074110 - RNA, 17 nt, Vaccinia virus
uccaguaaaccguuuuu

SEQ ID NO: 4074111 - RNA, 14 nt, Vaccinia virus
uccauaaacugaua

SEQ ID NO: 4074112 - RNA, 14 nt, Vaccinia virus
uccauaauccucua

SEQ ID NO: 4074113 - RNA, 16 nt, Vaccinia virus
uccauaggauacuuug

SEQ ID NO: 4074114 - RNA, 22 nt, Vaccinia virus
uccauaggcaguccagaaauau

SEQ ID NO: 4074115 - RNA, 19 nt, Vaccinia virus
uccauauuucuuaauguaa

SEQ ID NO: 4074116 - RNA, 19 nt, Vaccinia virus
aucaauucuggauuauccc

SEQ ID NO: 4074117 - RNA, 21 nt, Vaccinia virus
aucaauucuggauuaucccuc

SEQ ID NO: 4074118 - RNA, 15 nt, Vaccinia virus
aucacaaaaaaaacu

SEQ ID NO: 4074119 - RNA, 22 nt, Vaccinia virus
aucacaaaaaaaacuucucuaa

SEQ ID NO: 4074120 - RNA, 13 nt, Vaccinia virus
aucacaaaucaca

SEQ ID NO: 4074121 - RNA, 20 nt, Vaccinia virus
aucacaagaaguuagaaagu

SEQ ID NO: 4074122 - RNA, 20 nt, Vaccinia virus
aucacagaauucuucaauaa

SEQ ID NO: 4074123 - RNA, 19 nt, Vaccinia virus
aucacagucuguuuuggua

SEQ ID NO: 4074124 - RNA, 15 nt, Vaccinia virus
aucacauauuaaaaa

SEQ ID NO: 4074125 - RNA, 22 nt, Vaccinia virus
aucaccauggacauaaagauag

SEQ ID NO: 4074126 - RNA, 22 nt, Vaccinia virus
aucacgauuuugucuuucagga

SEQ ID NO: 4074127 - RNA, 19 nt, Vaccinia virus
aucacuauauguuccagua

SEQ ID NO: 4074128 - RNA, 18 nt, Vaccinia virus
aucacuaucgcccaggag

SEQ ID NO: 4074129 - RNA, 17 nt, Vaccinia virus
aucacuguagugcuaug

SEQ ID NO: 4074130 - RNA, 18 nt, Vaccinia virus
aucagaaucauacaauga

SEQ ID NO: 4074131 - RNA, 18 nt, Vaccinia virus
aucagaccguacauacau

SEQ ID NO: 4074132 - RNA, 19 nt, Vaccinia virus
aucagaccguacauacaua

SEQ ID NO: 4074133 - RNA, 22 nt, Vaccinia virus
aucagaccguacauacauagac

SEQ ID NO: 4074134 - RNA, 14 nt, Vaccinia virus
aucagauaugaauu

SEQ ID NO: 4074135 - RNA, 16 nt, Vaccinia virus
aucagaugaucgauga

SEQ ID NO: 4074136 - RNA, 15 nt, Vaccinia virus
aucagauucuuauau

SEQ ID NO: 4074137 - RNA, 21 nt, Vaccinia virus
aucagcauguagacaaaauga

SEQ ID NO: 4074138 - RNA, 16 nt, Vaccinia virus
aucagcugaaaaacua

SEQ ID NO: 4074139 - RNA, 17 nt, Vaccinia virus
aucagcuuuaguuuaua

SEQ ID NO: 4074140 - RNA, 15 nt, Vaccinia virus
aucaggaaaaaagau

SEQ ID NO: 4074141 - RNA, 23 nt, Vaccinia virus
aucaguuuuguauuccaaauuaa

SEQ ID NO: 4074142 - RNA, 12 nt, Vaccinia virus
aucauaaaaaug

SEQ ID NO: 4074143 - RNA, 14 nt, Vaccinia virus
aucauaaaaaugag

SEQ ID NO: 4074144 - RNA, 20 nt, Vaccinia virus
aucauaaaaguuguaaagua

SEQ ID NO: 4074145 - RNA, 22 nt, Vaccinia virus
aucauaaaaguuguaaaguaaa

SEQ ID NO: 4074146 - RNA, 14 nt, Vaccinia virus
aucauaaagaacag

SEQ ID NO: 4074147 - RNA, 18 nt, Vaccinia virus
aucauaaauuauuucauu

SEQ ID NO: 4074148 - RNA, 15 nt, Vaccinia virus
aucauaaggaacuaa

SEQ ID NO: 4074149 - RNA, 19 nt, Vaccinia virus
aucauaauuacauuuagac

SEQ ID NO: 4074150 - RNA, 21 nt, Vaccinia virus
aucauacaaugaauuaauuaa

SEQ ID NO: 4074151 - RNA, 15 nt, Vaccinia virus
aucauacuuagaauu

SEQ ID NO: 4074152 - RNA, 15 nt, Vaccinia virus
aucauaucacauagu

SEQ ID NO: 4074153 - RNA, 21 nt, Vaccinia virus
aucauaucuauaggaaaggau

SEQ ID NO: 4074154 - RNA, 20 nt, Vaccinia virus
aucaucauuuaccagaauac

SEQ ID NO: 4074155 - RNA, 17 nt, Vaccinia virus
aucauccaauaguacau

SEQ ID NO: 4074156 - RNA, 16 nt, Vaccinia virus
aucauccaguuuucca

SEQ ID NO: 4074157 - RNA, 17 nt, Vaccinia virus
aucauccauuaauauaa

SEQ ID NO: 4074158 - RNA, 21 nt, Vaccinia virus
aucaucgaucauguuaaguaa

SEQ ID NO: 4074159 - RNA, 23 nt, Vaccinia virus
aucaucuguaggaaauggaagau

SEQ ID NO: 4074160 - RNA, 20 nt, Vaccinia virus
aucaugaaaugaugauauau

SEQ ID NO: 4074161 - RNA, 21 nt, Vaccinia virus
aucaugaauggauuuaucauc

SEQ ID NO: 4074162 - RNA, 14 nt, Vaccinia virus
aucaugacaaaauu

SEQ ID NO: 4074163 - RNA, 19 nt, Vaccinia virus
aucaugacaaaauuaaaaa

SEQ ID NO: 4074164 - RNA, 11 nt, Vaccinia virus
aucaugucuaa

SEQ ID NO: 4074165 - RNA, 18 nt, Vaccinia virus
aucaugucuaaugaugaa

SEQ ID NO: 4074166 - RNA, 16 nt, Vaccinia virus
aucauuaaaaaaauua

SEQ ID NO: 4074167 - RNA, 13 nt, Vaccinia virus
aucauuaaaugau

SEQ ID NO: 4074168 - RNA, 18 nt, Vaccinia virus
aucauuaucauuuuguaa

SEQ ID NO: 4074169 - RNA, 17 nt, Vaccinia virus
aucauugggaaacauua

SEQ ID NO: 4074170 - RNA, 15 nt, Vaccinia virus
aucauuuaaacauuu

SEQ ID NO: 4074171 - RNA, 15 nt, Vaccinia virus
aucauuuccaaaucu

SEQ ID NO: 4074172 - RNA, 13 nt, Vaccinia virus
aucauuucuauaa

SEQ ID NO: 4074173 - RNA, 14 nt, Vaccinia virus
auccaagucaauau

SEQ ID NO: 4074174 - RNA, 23 nt, Vaccinia virus
auccaauuguuugauauauaauu

SEQ ID NO: 4074175 - RNA, 19 nt, Vaccinia virus
auccacaacccauuaaaaa

SEQ ID NO: 4074176 - RNA, 16 nt, Vaccinia virus
auccaccacagacuga

SEQ ID NO: 4074177 - RNA, 22 nt, Vaccinia virus
auccacuaugaucaauucugga

SEQ ID NO: 4074178 - RNA, 23 nt, Vaccinia virus
auccacuaugaucaauucuggau

SEQ ID NO: 4074179 - RNA, 17 nt, Vaccinia virus
auccagacaacaaucgu

SEQ ID NO: 4074180 - RNA, 14 nt, Vaccinia virus
auccagaguguuuc

SEQ ID NO: 4074181 - RNA, 21 nt, Vaccinia virus
auccagcuagugaauauauau

SEQ ID NO: 4074182 - RNA, 16 nt, Vaccinia virus
auccauauuuucuggu

SEQ ID NO: 4074183 - RNA, 14 nt, Vaccinia virus
auccaucaaaaaug

SEQ ID NO: 4074184 - RNA, 19 nt, Vaccinia virus
aucccauucuaauacuuua

SEQ ID NO: 4074185 - RNA, 20 nt, Vaccinia virus
auccguguuaaaaaaaauua

SEQ ID NO: 4074186 - RNA, 20 nt, Vaccinia virus
auccuaaagaguauggugaa

SEQ ID NO: 4074187 - RNA, 13 nt, Vaccinia virus
auccuaacaauga

SEQ ID NO: 4074188 - RNA, 14 nt, Vaccinia virus
auccuaacaaugaa

SEQ ID NO: 4074189 - RNA, 16 nt, Vaccinia virus
auccuaggauccuuua

SEQ ID NO: 4074190 - RNA, 17 nt, Vaccinia virus
auccuauaacuucuaau

SEQ ID NO: 4074191 - RNA, 15 nt, Vaccinia virus
auccuaucuaagaug

SEQ ID NO: 4074192 - RNA, 15 nt, Vaccinia virus
auccuauucuaaaug

SEQ ID NO: 4074193 - RNA, 15 nt, Vaccinia virus
auccuccuauuacau

SEQ ID NO: 4074194 - RNA, 15 nt, Vaccinia virus
auccucuaaaggcug

SEQ ID NO: 4074195 - RNA, 17 nt, Vaccinia virus
auccuguuucuacuaac

SEQ ID NO: 4074196 - RNA, 20 nt, Vaccinia virus
auccuucagauaaucugaaa

SEQ ID NO: 4074197 - RNA, 16 nt, Vaccinia virus
auccuucuagaauuag

SEQ ID NO: 4074198 - RNA, 22 nt, Vaccinia virus
auccuuuauuaaaucaugaaug

SEQ ID NO: 4074199 - RNA, 21 nt, Vaccinia virus
auccuuuuguuggaaaaauga

SEQ ID NO: 4074200 - RNA, 20 nt, Vaccinia virus
aucgaagugacacucuauau

SEQ ID NO: 4074201 - RNA, 15 nt, Vaccinia virus
aucgacaucgagaac

SEQ ID NO: 4074202 - RNA, 13 nt, Vaccinia virus
aucgacuauuuua

SEQ ID NO: 4074203 - RNA, 22 nt, Vaccinia virus
aucgauaguguaguuauugaac

SEQ ID NO: 4074204 - RNA, 20 nt, Vaccinia virus
aucgauccucacuucgaaga

SEQ ID NO: 4074205 - RNA, 19 nt, Vaccinia virus
aucgaugaauaauacauuu

SEQ ID NO: 4074206 - RNA, 22 nt, Vaccinia virus
aucgaugaauaauacauuuaaa

SEQ ID NO: 4074207 - RNA, 18 nt, Vaccinia virus
aucgauuauauucuaaga

SEQ ID NO: 4074208 - RNA, 23 nt, Vaccinia virus
aucgcccaucuauuacaaacaug

SEQ ID NO: 4074209 - RNA, 17 nt, Vaccinia virus
aucgcuuaauagacaaa

SEQ ID NO: 4074210 - RNA, 17 nt, Vaccinia virus
aucggauacagacacuc

SEQ ID NO: 4074211 - RNA, 16 nt, Vaccinia virus
aucggaugauauuaau

SEQ ID NO: 4074212 - RNA, 22 nt, Vaccinia virus
aucggcauuuauguuucuuuaa

SEQ ID NO: 4074213 - RNA, 19 nt, Vaccinia virus
aucggccuucuuuuuuaca

SEQ ID NO: 4074214 - RNA, 13 nt, Vaccinia virus
aucguauauuaag

SEQ ID NO: 4074215 - RNA, 22 nt, Vaccinia virus
aucguauuugugugauggauuu

SEQ ID NO: 4074216 - RNA, 17 nt, Vaccinia virus
aucgucgauacaaaaug

SEQ ID NO: 4074217 - RNA, 20 nt, Vaccinia virus
aucgugcacccaacguauuu

SEQ ID NO: 4074218 - RNA, 17 nt, Vaccinia virus
aucgugcagguuaaaua

SEQ ID NO: 4074219 - RNA, 18 nt, Vaccinia virus
aucgugcagguuaaauag

SEQ ID NO: 4074220 - RNA, 16 nt, Vaccinia virus
aucguuaaauuuuaca

SEQ ID NO: 4074221 - RNA, 13 nt, Vaccinia virus
aucguuugucaua

SEQ ID NO: 4074222 - RNA, 13 nt, Vaccinia virus
aucuaaauauuua

SEQ ID NO: 4074223 - RNA, 23 nt, Vaccinia virus
aucuaacaaaaauuaugaaauaa

SEQ ID NO: 4074224 - RNA, 15 nt, Vaccinia virus
acaaugcuuuaauaa

SEQ ID NO: 4074225 - RNA, 16 nt, Vaccinia virus
acaauggaauacuuca

SEQ ID NO: 4074226 - RNA, 16 nt, Vaccinia virus
acaauguccaaaucua

SEQ ID NO: 4074227 - RNA, 12 nt, Vaccinia virus
acaauuacaaau

SEQ ID NO: 4074228 - RNA, 18 nt, Vaccinia virus
acaauuacguaaugaaga

SEQ ID NO: 4074229 - RNA, 17 nt, Vaccinia virus
acaauuauuauauaauu

SEQ ID NO: 4074230 - RNA, 20 nt, Vaccinia virus
acaauuugggacaaugaauu

SEQ ID NO: 4074231 - RNA, 23 nt, Vaccinia virus
acacaaguugauaaaauguugau

SEQ ID NO: 4074232 - RNA, 15 nt, Vaccinia virus
acacaauuaacaaua

SEQ ID NO: 4074233 - RNA, 20 nt, Vaccinia virus
acacacaacgcgucuagacu

SEQ ID NO: 4074234 - RNA, 17 nt, Vaccinia virus
acacacgaugaaaaugu

SEQ ID NO: 4074235 - RNA, 20 nt, Vaccinia virus
acacaguaaccaaaaugaaa

SEQ ID NO: 4074236 - RNA, 18 nt, Vaccinia virus
acacauauugaugugucu

SEQ ID NO: 4074237 - RNA, 19 nt, Vaccinia virus
acacauuaaacaaaaaucu

SEQ ID NO: 4074238 - RNA, 13 nt, Vaccinia virus
acacauuaacauc

SEQ ID NO: 4074239 - RNA, 13 nt, Vaccinia virus
acaccauagcacu

SEQ ID NO: 4074240 - RNA, 16 nt, Vaccinia virus
acaccuaauacucugg

SEQ ID NO: 4074241 - RNA, 16 nt, Vaccinia virus
acaccuagagaacuua

SEQ ID NO: 4074242 - RNA, 15 nt, Vaccinia virus
acaccucuacauaac

SEQ ID NO: 4074243 - RNA, 15 nt, Vaccinia virus
acacgacaaugaaca

SEQ ID NO: 4074244 - RNA, 15 nt, Vaccinia virus
acacgcauuaacaug

SEQ ID NO: 4074245 - RNA, 20 nt, Vaccinia virus
acacguagcaugugaauaua

SEQ ID NO: 4074246 - RNA, 13 nt, Vaccinia virus
acacguguagaau

SEQ ID NO: 4074247 - RNA, 19 nt, Vaccinia virus
acacguuuauuucauauaa

SEQ ID NO: 4074248 - RNA, 19 nt, Vaccinia virus
acacuaauauuaugaugaa

SEQ ID NO: 4074249 - RNA, 14 nt, Vaccinia virus
acacuaucuuuauu

SEQ ID NO: 4074250 - RNA, 16 nt, Vaccinia virus
acacuauucuuaaauu

SEQ ID NO: 4074251 - RNA, 20 nt, Vaccinia virus
acacuauucuuaaauuucau

SEQ ID NO: 4074252 - RNA, 13 nt, Vaccinia virus
acacucucaauau

SEQ ID NO: 4074253 - RNA, 14 nt, Vaccinia virus
acacugauucagaa

SEQ ID NO: 4074254 - RNA, 20 nt, Vaccinia virus
acacuguuaucuaaugaaug

SEQ ID NO: 4074255 - RNA, 17 nt, Vaccinia virus
acagaaacaucauauac

SEQ ID NO: 4074256 - RNA, 15 nt, Vaccinia virus
acagaacaauauauu

SEQ ID NO: 4074257 - RNA, 21 nt, Vaccinia virus
acagaacaucaaaaaauuaua

SEQ ID NO: 4074258 - RNA, 22 nt, Vaccinia virus
acagacaugguaucaacagaua

SEQ ID NO: 4074259 - RNA, 14 nt, Vaccinia virus
acagauaaauggaa

SEQ ID NO: 4074260 - RNA, 13 nt, Vaccinia virus
acagauacagaug

SEQ ID NO: 4074261 - RNA, 16 nt, Vaccinia virus
acagaugauauaucca

SEQ ID NO: 4074262 - RNA, 13 nt, Vaccinia virus
acagauggauaaa

SEQ ID NO: 4074263 - RNA, 23 nt, Vaccinia virus
acagcuaucaaaauauguagaaa

SEQ ID NO: 4074264 - RNA, 16 nt, Vaccinia virus
acagcuggagauuauc

SEQ ID NO: 4074265 - RNA, 16 nt, Vaccinia virus
acaggauuauaaucuc

SEQ ID NO: 4074266 - RNA, 13 nt, Vaccinia virus
acaggcauauuag

SEQ ID NO: 4074267 - RNA, 15 nt, Vaccinia virus
acaggcuauuuacaa

SEQ ID NO: 4074268 - RNA, 18 nt, Vaccinia virus
acaguaucugauaaucua

SEQ ID NO: 4074269 - RNA, 20 nt, Vaccinia virus
acuuagucuguacaaaaguu

SEQ ID NO: 4074270 - RNA, 15 nt, Vaccinia virus
acuuauguaugugca

SEQ ID NO: 4074271 - RNA, 20 nt, Vaccinia virus
acuuaugucacgaugaugga

SEQ ID NO: 4074272 - RNA, 14 nt, Vaccinia virus
acuuauuuaacucu

SEQ ID NO: 4074273 - RNA, 15 nt, Vaccinia virus
acuucaggaaauauc

SEQ ID NO: 4074274 - RNA, 15 nt, Vaccinia virus
acuucauuaaucuuu

SEQ ID NO: 4074275 - RNA, 19 nt, Vaccinia virus
acuuccaauaaaauuacuu

SEQ ID NO: 4074276 - RNA, 18 nt, Vaccinia virus
acuucuaacaaacaucuc

SEQ ID NO: 4074277 - RNA, 18 nt, Vaccinia virus
acuucuaucgauaauugu

SEQ ID NO: 4074278 - RNA, 21 nt, Vaccinia virus
acuucuccuuauugauugaaa

SEQ ID NO: 4074279 - RNA, 22 nt, Vaccinia virus
acuucuccuuauugauugaaaa

SEQ ID NO: 4074280 - RNA, 15 nt, Vaccinia virus
acuucucuaaaugag

SEQ ID NO: 4074281 - RNA, 19 nt, Vaccinia virus
acuugaaagagauaauaga

SEQ ID NO: 4074282 - RNA, 15 nt, Vaccinia virus
acuugacaaaaauug

SEQ ID NO: 4074283 - RNA, 17 nt, Vaccinia virus
acuugagacuugauaga

SEQ ID NO: 4074284 - RNA, 15 nt, Vaccinia virus
acuugcaaaaaagac

SEQ ID NO: 4074285 - RNA, 13 nt, Vaccinia virus
acuuguuuaauga

SEQ ID NO: 4074286 - RNA, 19 nt, Vaccinia virus
acuuuaaagcaaaaugguu

SEQ ID NO: 4074287 - RNA, 19 nt, Vaccinia virus
acuuuaaauacuuaacaga

SEQ ID NO: 4074288 - RNA, 17 nt, Vaccinia virus
acuuuaacguauaaaug

SEQ ID NO: 4074289 - RNA, 11 nt, Vaccinia virus
acuuuaaugau

SEQ ID NO: 4074290 - RNA, 22 nt, Vaccinia virus
acuuuaggaucucuauugccaa

SEQ ID NO: 4074291 - RNA, 20 nt, Vaccinia virus
acuuuauugccuguaauaau

SEQ ID NO: 4074292 - RNA, 21 nt, Vaccinia virus
acuuucaaugagauaaauaug

SEQ ID NO: 4074293 - RNA, 16 nt, Vaccinia virus
acuuucaucuaauaag

SEQ ID NO: 4074294 - RNA, 18 nt, Vaccinia virus
acuuuccaacuuaucauu

SEQ ID NO: 4074295 - RNA, 20 nt, Vaccinia virus
acuuucgguucuuuaaaaga

SEQ ID NO: 4074296 - RNA, 15 nt, Vaccinia virus
acuuucgguuucaua

SEQ ID NO: 4074297 - RNA, 16 nt, Vaccinia virus
acuuugauagcaagga

SEQ ID NO: 4074298 - RNA, 22 nt, Vaccinia virus
acuuugauagcaaggaugaaaa

SEQ ID NO: 4074299 - RNA, 12 nt, Vaccinia virus
acuuuuaaauac

SEQ ID NO: 4074300 - RNA, 23 nt, Vaccinia virus
acuuuuaacuaucgcaucaaaag

SEQ ID NO: 4074301 - RNA, 21 nt, Vaccinia virus
acuuuugaacuaaaauacaau

SEQ ID NO: 4074302 - RNA, 17 nt, Vaccinia virus
agaaaaaaaauugaauu

SEQ ID NO: 4074303 - RNA, 12 nt, Vaccinia virus
agaaaaaaaugg

SEQ ID NO: 4074304 - RNA, 14 nt, Vaccinia virus
agaaaaaaauggaa

SEQ ID NO: 4074305 - RNA, 12 nt, Vaccinia virus
agaaaaacagaa

SEQ ID NO: 4074306 - RNA, 19 nt, Vaccinia virus
agaaaaaugauuaucuucu

SEQ ID NO: 4074307 - RNA, 23 nt, Vaccinia virus
agaaaagguucuaucaacaauau

SEQ ID NO: 4074308 - RNA, 22 nt, Vaccinia virus
agaaaauaauccugaauauauu

SEQ ID NO: 4074309 - RNA, 16 nt, Vaccinia virus
agaaaauccuguaaua

SEQ ID NO: 4074310 - RNA, 17 nt, Vaccinia virus
agaaaauucuauauauu

SEQ ID NO: 4074311 - RNA, 15 nt, Vaccinia virus
agaaaauuuaauaaa

SEQ ID NO: 4074312 - RNA, 13 nt, Vaccinia virus
agaaacagaacua

SEQ ID NO: 4074313 - RNA, 17 nt, Vaccinia virus
agaaacaucauauacaa

SEQ ID NO: 4074314 - RNA, 22 nt, Vaccinia virus
agaaacuauagauaaugauaua

SEQ ID NO: 4074315 - RNA, 19 nt, Vaccinia virus
agaaacugacuugauaaaa

SEQ ID NO: 4074316 - RNA, 14 nt, Vaccinia virus
agaaagaaauuugu

SEQ ID NO: 4074317 - RNA, 15 nt, Vaccinia virus
agaaagaagaaauac

SEQ ID NO: 4074318 - RNA, 18 nt, Vaccinia virus
agaaagcgcguaauacua

SEQ ID NO: 4074319 - RNA, 23 nt, Vaccinia virus
agaaaguaugauacaauacuuac

SEQ ID NO: 4074320 - RNA, 20 nt, Vaccinia virus
agaaaguggauaaaacaaua

SEQ ID NO: 4074321 - RNA, 13 nt, Vaccinia virus
agaaauaaaaauu

SEQ ID NO: 4074322 - RNA, 12 nt, Vaccinia virus
agaaauaaagua

SEQ ID NO: 4074323 - RNA, 21 nt, Vaccinia virus
agaaauaacaggcuaaaaugu

SEQ ID NO: 4074324 - RNA, 21 nt, Vaccinia virus
agaaauaagagacuuaaacaa

SEQ ID NO: 4074325 - RNA, 13 nt, Vaccinia virus
agaaauacuauau

SEQ ID NO: 4074326 - RNA, 13 nt, Vaccinia virus
agaaauauauacu

SEQ ID NO: 4074327 - RNA, 16 nt, Vaccinia virus
agaaauaucuauaauu

SEQ ID NO: 4074328 - RNA, 14 nt, Vaccinia virus
agaaaucaacuuau

SEQ ID NO: 4074329 - RNA, 21 nt, Vaccinia virus
agaaauggagagagacuguuu

SEQ ID NO: 4074330 - RNA, 19 nt, Vaccinia virus
agaaauugguucuuuacca

SEQ ID NO: 4074331 - RNA, 18 nt, Vaccinia virus
agaaauuuagcaacgaua

SEQ ID NO: 4074332 - RNA, 14 nt, Vaccinia virus
agaaauuuuucuac

SEQ ID NO: 4074333 - RNA, 16 nt, Vaccinia virus
agaacgaauguuguag

SEQ ID NO: 4074334 - RNA, 18 nt, Vaccinia virus
agaacgaugucaaaauau

SEQ ID NO: 4074335 - RNA, 15 nt, Vaccinia virus
agaacggagaauugu

SEQ ID NO: 4074336 - RNA, 19 nt, Vaccinia virus
agaacuauaaaaacagaua

SEQ ID NO: 4074337 - RNA, 20 nt, Vaccinia virus
agaacuaucauagaugagaa

SEQ ID NO: 4074338 - RNA, 22 nt, Vaccinia virus
agaacuggaccguauaucucau

SEQ ID NO: 4074339 - RNA, 12 nt, Vaccinia virus
agaagaacauau

SEQ ID NO: 4074340 - RNA, 16 nt, Vaccinia virus
agaagauaucauaaau

SEQ ID NO: 4074341 - RNA, 19 nt, Vaccinia virus
agaagauggagagucacua

SEQ ID NO: 4074342 - RNA, 20 nt, Vaccinia virus
agaagauguuagaaaaaaug

SEQ ID NO: 4074343 - RNA, 23 nt, Vaccinia virus
agaagauguuagaaaaaaugaug

SEQ ID NO: 4074344 - RNA, 12 nt, Vaccinia virus
agaagauuaaac

SEQ ID NO: 4074345 - RNA, 13 nt, Vaccinia virus
agaagauuuaacu

SEQ ID NO: 4074346 - RNA, 17 nt, Vaccinia virus
agaagauuuaacuagau

SEQ ID NO: 4074347 - RNA, 21 nt, Vaccinia virus
agaagcauacgccaaauaucu

SEQ ID NO: 4074348 - RNA, 24 nt, Vaccinia virus
agaagcugguaauaguuuacagau

SEQ ID NO: 4074349 - RNA, 14 nt, Vaccinia virus
agaaggaaacuucu

SEQ ID NO: 4074350 - RNA, 22 nt, Vaccinia virus
agaaggguucgauuaucuguau

SEQ ID NO: 4074351 - RNA, 18 nt, Vaccinia virus
agaagucauacuagaaua

SEQ ID NO: 4074352 - RNA, 16 nt, Vaccinia virus
agaagucugaucuuaa

SEQ ID NO: 4074353 - RNA, 18 nt, Vaccinia virus
agaagugaguauacuugu

SEQ ID NO: 4074354 - RNA, 14 nt, Vaccinia virus
agaauaaauuauau

SEQ ID NO: 4074355 - RNA, 16 nt, Vaccinia virus
agaauaagaacuauaa

SEQ ID NO: 4074356 - RNA, 15 nt, Vaccinia virus
agaauaaguuucaua

SEQ ID NO: 4074357 - RNA, 12 nt, Vaccinia virus
agaauaauacag

SEQ ID NO: 4074358 - RNA, 23 nt, Vaccinia virus
agaauacgaugauauuaaaauua

SEQ ID NO: 4074359 - RNA, 22 nt, Vaccinia virus
agaauauaacgugguaucuucu

SEQ ID NO: 4074360 - RNA, 14 nt, Vaccinia virus
agaauauacuacaa

SEQ ID NO: 4074361 - RNA, 14 nt, Vaccinia virus
agaauaucuauaca

SEQ ID NO: 4074362 - RNA, 23 nt, Vaccinia virus
agaauaucuaucgacucuagaug

SEQ ID NO: 4074363 - RNA, 13 nt, Vaccinia virus
agaauaugucucu

SEQ ID NO: 4074364 - RNA, 19 nt, Vaccinia virus
agaauauuccucuaacaga

SEQ ID NO: 4074365 - RNA, 13 nt, Vaccinia virus
agaaucaaaggau

SEQ ID NO: 4074366 - RNA, 19 nt, Vaccinia virus
agaaucaaauauagauuuu

SEQ ID NO: 4074367 - RNA, 14 nt, Vaccinia virus
agaaucaauacaaa

SEQ ID NO: 4074368 - RNA, 18 nt, Vaccinia virus
agaaucaguuacauguuu

SEQ ID NO: 4074369 - RNA, 16 nt, Vaccinia virus
agaaucauugcuguaa

SEQ ID NO: 4074370 - RNA, 18 nt, Vaccinia virus
agaaucauugcuguaaac

SEQ ID NO: 4074371 - RNA, 18 nt, Vaccinia virus
agaauccaucaaaaaugu

SEQ ID NO: 4074372 - RNA, 22 nt, Vaccinia virus
agaauccgcugauggaaacaca

SEQ ID NO: 4074373 - RNA, 18 nt, Vaccinia virus
agaaucuauuuuaaugag

SEQ ID NO: 4074374 - RNA, 14 nt, Vaccinia virus
agaaucucaugaau

SEQ ID NO: 4074375 - RNA, 21 nt, Vaccinia virus
agaaucuuaguugguccaaau

SEQ ID NO: 4074376 - RNA, 16 nt, Vaccinia virus
agaaugaagauaucau

SEQ ID NO: 4074377 - RNA, 14 nt, Vaccinia virus
agaaugaauguuua

SEQ ID NO: 4074378 - RNA, 14 nt, Vaccinia virus
agaaugauauagaa

SEQ ID NO: 4074379 - RNA, 17 nt, Vaccinia virus
agaaugcauaaauuugu

SEQ ID NO: 4074380 - RNA, 17 nt, Vaccinia virus
agaaugcauccaaugag

SEQ ID NO: 4074381 - RNA, 13 nt, Vaccinia virus
agaauuaaaagag

SEQ ID NO: 4074382 - RNA, 19 nt, Vaccinia virus
agaauuaaaucuaacgaga

SEQ ID NO: 4074383 - RNA, 19 nt, Vaccinia virus
agaauuaauaauaucucua

SEQ ID NO: 4074384 - RNA, 22 nt, Vaccinia virus
agaauuagucaaucuuauucaa

SEQ ID NO: 4074385 - RNA, 15 nt, Vaccinia virus
agaauucuaaaugau

SEQ ID NO: 4074386 - RNA, 18 nt, Vaccinia virus
agaauugcugcaauauau

SEQ ID NO: 4074387 - RNA, 15 nt, Vaccinia virus
agaauuguaaaauua

SEQ ID NO: 4074388 - RNA, 11 nt, Vaccinia virus
agaauuucauu

SEQ ID NO: 4074389 - RNA, 14 nt, Vaccinia virus
agaauuucuguuca

SEQ ID NO: 4074390 - RNA, 18 nt, Vaccinia virus
agaauuuuuauacauuau

SEQ ID NO: 4074391 - RNA, 21 nt, Vaccinia virus
agacaaacuguaaguauguuu

SEQ ID NO: 4074392 - RNA, 16 nt, Vaccinia virus
agacaaauauacuuua

SEQ ID NO: 4074393 - RNA, 17 nt, Vaccinia virus
auauaccgccucaaacu

SEQ ID NO: 4074394 - RNA, 20 nt, Vaccinia virus
auauaccgccuuucaaaauu

SEQ ID NO: 4074395 - RNA, 18 nt, Vaccinia virus
auauaccuauuaauacau

SEQ ID NO: 4074396 - RNA, 21 nt, Vaccinia virus
aucuauuuuauucaagagaau

SEQ ID NO: 4074397 - RNA, 15 nt, Vaccinia virus
aucucaucauuccau

SEQ ID NO: 4074398 - RNA, 17 nt, Vaccinia virus
aucucuauguuucaguu

SEQ ID NO: 4074399 - RNA, 14 nt, Vaccinia virus
aucucuauuaaaug

SEQ ID NO: 4074400 - RNA, 19 nt, Vaccinia virus
aucucuuucagaacugaug

SEQ ID NO: 4074401 - RNA, 21 nt, Vaccinia virus
aucucuuuuucucaaauccau

SEQ ID NO: 4074402 - RNA, 22 nt, Vaccinia virus
aucugauaaauauacaauagau

SEQ ID NO: 4074403 - RNA, 23 nt, Vaccinia virus
aucugauaacuuuaaacauggau

SEQ ID NO: 4074404 - RNA, 15 nt, Vaccinia virus
aucuguaaacauuug

SEQ ID NO: 4074405 - RNA, 21 nt, Vaccinia virus
aucuguacuauguguuaaaaa

SEQ ID NO: 4074406 - RNA, 16 nt, Vaccinia virus
aucuguacuucuguac

SEQ ID NO: 4074407 - RNA, 15 nt, Vaccinia virus
aucugucaaguuacu

SEQ ID NO: 4074408 - RNA, 15 nt, Vaccinia virus
aucugucuuaauuaa

SEQ ID NO: 4074409 - RNA, 23 nt, Vaccinia virus
aucugucuuaauuaacugucuuu

SEQ ID NO: 4074410 - RNA, 19 nt, Vaccinia virus
aucuguuaccauaauuccu

SEQ ID NO: 4074411 - RNA, 21 nt, Vaccinia virus
aucuguuccucaucugucaua

SEQ ID NO: 4074412 - RNA, 13 nt, Vaccinia virus
aucuuaaauacca

SEQ ID NO: 4074413 - RNA, 19 nt, Vaccinia virus
aucuuaacacucucugcca

SEQ ID NO: 4074414 - RNA, 21 nt, Vaccinia virus
aucuuaacuccucuauuaaug

SEQ ID NO: 4074415 - RNA, 16 nt, Vaccinia virus
aucuuaccaucuucuu

SEQ ID NO: 4074416 - RNA, 22 nt, Vaccinia virus
aucuuaccauguccucaaauaa

SEQ ID NO: 4074417 - RNA, 15 nt, Vaccinia virus
aucuuacucaaaaua

SEQ ID NO: 4074418 - RNA, 20 nt, Vaccinia virus
aucuuauccuuggacaagau

SEQ ID NO: 4074419 - RNA, 17 nt, Vaccinia virus
aucuucauaauaaauaa

SEQ ID NO: 4074420 - RNA, 20 nt, Vaccinia virus
aucuucaucuaccaaagaaa

SEQ ID NO: 4074421 - RNA, 21 nt, Vaccinia virus
aucuucuuauuuagaucuugu

SEQ ID NO: 4074422 - RNA, 17 nt, Vaccinia virus
aucuugauuuauagaug

SEQ ID NO: 4074423 - RNA, 14 nt, Vaccinia virus
aucuugugcauuuu

SEQ ID NO: 4074424 - RNA, 15 nt, Vaccinia virus
aucuuguucagaaau

SEQ ID NO: 4074425 - RNA, 23 nt, Vaccinia virus
aucuuuaacgauaccuauaccua

SEQ ID NO: 4074426 - RNA, 17 nt, Vaccinia virus
aucuuuaauagaacucu

SEQ ID NO: 4074427 - RNA, 16 nt, Vaccinia virus
aucuuuaaucuuacua

SEQ ID NO: 4074428 - RNA, 21 nt, Vaccinia virus
aucuuuacccauccaauacua

SEQ ID NO: 4074429 - RNA, 20 nt, Vaccinia virus
aucuuuacgaauuacuuuac

SEQ ID NO: 4074430 - RNA, 17 nt, Vaccinia virus
aucuuucuccaauacua

SEQ ID NO: 4074431 - RNA, 15 nt, Vaccinia virus
aucuuugauauacua

SEQ ID NO: 4074432 - RNA, 22 nt, Vaccinia virus
aucuuuguucuaaaaacuguau

SEQ ID NO: 4074433 - RNA, 15 nt, Vaccinia virus
aucuuuuuaggaaug

SEQ ID NO: 4074434 - RNA, 16 nt, Vaccinia virus
aucuuuuuaggaaugu

SEQ ID NO: 4074435 - RNA, 20 nt, Vaccinia virus
aucuuuuucuacgucaaaau

SEQ ID NO: 4074436 - RNA, 17 nt, Vaccinia virus
augaaaaaaaacacuga

SEQ ID NO: 4074437 - RNA, 13 nt, Vaccinia virus
augaaaaaaagau

SEQ ID NO: 4074438 - RNA, 14 nt, Vaccinia virus
augaaaaaacauua

SEQ ID NO: 4074439 - RNA, 20 nt, Vaccinia virus
augaaaaacucugauaacua

SEQ ID NO: 4074440 - RNA, 13 nt, Vaccinia virus
augaaaaaguaaa

SEQ ID NO: 4074441 - RNA, 12 nt, Vaccinia virus
augaaaauacuu

SEQ ID NO: 4074442 - RNA, 21 nt, Vaccinia virus
augaaaauacuuuaguaauua

SEQ ID NO: 4074443 - RNA, 18 nt, Vaccinia virus
augaaaaugguaucacac

SEQ ID NO: 4074444 - RNA, 15 nt, Vaccinia virus
augaaacaugcauaa

SEQ ID NO: 4074445 - RNA, 14 nt, Vaccinia virus
augaaauauauuaa

SEQ ID NO: 4074446 - RNA, 12 nt, Vaccinia virus
augaaauguuug

SEQ ID NO: 4074447 - RNA, 17 nt, Vaccinia virus
augaaauuuaaguaaca

SEQ ID NO: 4074448 - RNA, 13 nt, Vaccinia virus
augaacaaagaaa

SEQ ID NO: 4074449 - RNA, 21 nt, Vaccinia virus
augaacacacgaugaaaaugu

SEQ ID NO: 4074450 - RNA, 19 nt, Vaccinia virus
augaacauaguaagaaauu

SEQ ID NO: 4074451 - RNA, 19 nt, Vaccinia virus
augaacuagacgauaaugu

SEQ ID NO: 4074452 - RNA, 19 nt, Vaccinia virus
augaacuuucaaggacuug

SEQ ID NO: 4074453 - RNA, 15 nt, Vaccinia virus
augaaucuaaaagaa

SEQ ID NO: 4074454 - RNA, 23 nt, Vaccinia virus
augaauuaacgagauauaugcga

SEQ ID NO: 4074455 - RNA, 17 nt, Vaccinia virus
augaauuccucugaaaa

SEQ ID NO: 4074456 - RNA, 13 nt, Vaccinia virus
augaauugauucu

SEQ ID NO: 4074457 - RNA, 21 nt, Vaccinia virus
augaauuugauaagacuuuga

SEQ ID NO: 4074458 - RNA, 14 nt, Vaccinia virus
augacaaaauuaaa

SEQ ID NO: 4074459 - RNA, 15 nt, Vaccinia virus
augacacuagaugau

SEQ ID NO: 4074460 - RNA, 19 nt, Vaccinia virus
augacgcauauucuacucu

SEQ ID NO: 4074461 - RNA, 13 nt, Vaccinia virus
augacucugauuu

SEQ ID NO: 4074462 - RNA, 19 nt, Vaccinia virus
augacuuauaaaaauacua

SEQ ID NO: 4074463 - RNA, 14 nt, Vaccinia virus
augacuuaugaaua

SEQ ID NO: 4074464 - RNA, 17 nt, Vaccinia virus
augacuuaugaauacua

SEQ ID NO: 4074465 - RNA, 21 nt, Vaccinia virus
augacuucguaaaaaauaaua

SEQ ID NO: 4074466 - RNA, 17 nt, Vaccinia virus
augagaaacuuaaagua

SEQ ID NO: 4074467 - RNA, 21 nt, Vaccinia virus
augagaauaaaacucuacuau

SEQ ID NO: 4074468 - RNA, 14 nt, Vaccinia virus
augagacgauguau

SEQ ID NO: 4074469 - RNA, 16 nt, Vaccinia virus
augagaucaauagaca

SEQ ID NO: 4074470 - RNA, 20 nt, Vaccinia virus
augagauuauuaaguauuua

SEQ ID NO: 4074471 - RNA, 15 nt, Vaccinia virus
augagguuuugcaac

SEQ ID NO: 4074472 - RNA, 17 nt, Vaccinia virus
augagugauaaguaaua

SEQ ID NO: 4074473 - RNA, 19 nt, Vaccinia virus
augauaaaggagaauagcg

SEQ ID NO: 4074474 - RNA, 16 nt, Vaccinia virus
augauaaguccaucau

SEQ ID NO: 4074475 - RNA, 21 nt, Vaccinia virus
augauaauaggaauggauaau

SEQ ID NO: 4074476 - RNA, 13 nt, Vaccinia virus
augauacauguau

SEQ ID NO: 4074477 - RNA, 16 nt, Vaccinia virus
augauacguacaauga

SEQ ID NO: 4074478 - RNA, 18 nt, Vaccinia virus
augauagaaaugaugaag

SEQ ID NO: 4074479 - RNA, 19 nt, Vaccinia virus
augauauacagucuuaaau

SEQ ID NO: 4074480 - RNA, 13 nt, Vaccinia virus
augauaucgagaa

SEQ ID NO: 4074481 - RNA, 15 nt, Vaccinia virus
augaucacaaagaaa

SEQ ID NO: 4074482 - RNA, 22 nt, Vaccinia virus
augaucauuuugauauugugaa

SEQ ID NO: 4074483 - RNA, 16 nt, Vaccinia virus
augauccauuuauagu

SEQ ID NO: 4074484 - RNA, 13 nt, Vaccinia virus
augaucuguuuau

SEQ ID NO: 4074485 - RNA, 21 nt, Vaccinia virus
augaugauacucucaaccauu

SEQ ID NO: 4074486 - RNA, 14 nt, Vaccinia virus
augaugauguagaa

SEQ ID NO: 4074487 - RNA, 22 nt, Vaccinia virus
augauguguuauuuuuuaacug

SEQ ID NO: 4074488 - RNA, 18 nt, Vaccinia virus
augauuaaaauuaacaag

SEQ ID NO: 4074489 - RNA, 14 nt, Vaccinia virus
augauucaaauccu

SEQ ID NO: 4074490 - RNA, 18 nt, Vaccinia virus
augauucgucuacauguu

SEQ ID NO: 4074491 - RNA, 22 nt, Vaccinia virus
augauucuccggccacuauuau

SEQ ID NO: 4074492 - RNA, 23 nt, Vaccinia virus
augauucucucaacaucuucaau

SEQ ID NO: 4074493 - RNA, 21 nt, Vaccinia virus
augauugacgcauuuaauaga

SEQ ID NO: 4074494 - RNA, 17 nt, Vaccinia virus
augauugauuagaaaau

SEQ ID NO: 4074495 - RNA, 16 nt, Vaccinia virus
augauugauuucgaau

SEQ ID NO: 4074496 - RNA, 14 nt, Vaccinia virus
augauuuaugaauu

SEQ ID NO: 4074497 - RNA, 19 nt, Vaccinia virus
cuauuaagaguaacagcug

SEQ ID NO: 4074498 - RNA, 16 nt, Vaccinia virus
cuauuaucuguuuaua

SEQ ID NO: 4074499 - RNA, 19 nt, Vaccinia virus
cuauuauuugcgaggauga

SEQ ID NO: 4074500 - RNA, 17 nt, Vaccinia virus
cuauucuaucuccagua

SEQ ID NO: 4074501 - RNA, 19 nt, Vaccinia virus
cuauucucguccauuuuag

SEQ ID NO: 4074502 - RNA, 14 nt, Vaccinia virus
cuauuguuuggaau

SEQ ID NO: 4074503 - RNA, 21 nt, Vaccinia virus
cuauuuauugacauuaaucua

SEQ ID NO: 4074504 - RNA, 17 nt, Vaccinia virus
cuauuucaacaaacugg

SEQ ID NO: 4074505 - RNA, 20 nt, Vaccinia virus
cuauuucauacuauuuugug

SEQ ID NO: 4074506 - RNA, 14 nt, Vaccinia virus
cuauuucuuaauga

SEQ ID NO: 4074507 - RNA, 13 nt, Vaccinia virus
cuauuuguuuaua

SEQ ID NO: 4074508 - RNA, 17 nt, Vaccinia virus
cuauuuuaccagcauua

SEQ ID NO: 4074509 - RNA, 17 nt, Vaccinia virus
cuauuuuacuaaauaau

SEQ ID NO: 4074510 - RNA, 14 nt, Vaccinia virus
cuauuuuuaauaua

SEQ ID NO: 4074511 - RNA, 19 nt, Vaccinia virus
cuauuuuuuuauacuucua

SEQ ID NO: 4074512 - RNA, 21 nt, Vaccinia virus
cuauuuuuuuauacuucuaau

SEQ ID NO: 4074513 - RNA, 19 nt, Vaccinia virus
cucaaaagaucaaggaaau

SEQ ID NO: 4074514 - RNA, 13 nt, Vaccinia virus
cucaaacauccuc

SEQ ID NO: 4074515 - RNA, 13 nt, Vaccinia virus
cucaaauagcacc

SEQ ID NO: 4074516 - RNA, 20 nt, Vaccinia virus
cucaagauuuuaaaaaacug

SEQ ID NO: 4074517 - RNA, 13 nt, Vaccinia virus
cucaauaccccaa

SEQ ID NO: 4074518 - RNA, 19 nt, Vaccinia virus
cucagcgauagcucuucua

SEQ ID NO: 4074519 - RNA, 19 nt, Vaccinia virus
cucauaauguaaagauauu

SEQ ID NO: 4074520 - RNA, 20 nt, Vaccinia virus
cucauagucuauuaaguggu

SEQ ID NO: 4074521 - RNA, 16 nt, Vaccinia virus
cucauaugauuucagu

SEQ ID NO: 4074522 - RNA, 18 nt, Vaccinia virus
cucaucguauaaaacucu

SEQ ID NO: 4074523 - RNA, 14 nt, Vaccinia virus
cucaucuuucccaa

SEQ ID NO: 4074524 - RNA, 19 nt, Vaccinia virus
cucauguaaccuacuagaa

SEQ ID NO: 4074525 - RNA, 20 nt, Vaccinia virus
cucauguucuuaaucaaugu

SEQ ID NO: 4074526 - RNA, 21 nt, Vaccinia virus
cucauuaauuaaccauuccaa

SEQ ID NO: 4074527 - RNA, 18 nt, Vaccinia virus
cuccauaguggacaacau

SEQ ID NO: 4074528 - RNA, 20 nt, Vaccinia virus
cuccaugauuaaauauuuua

SEQ ID NO: 4074529 - RNA, 16 nt, Vaccinia virus
cucccaccaaauuaau

SEQ ID NO: 4074530 - RNA, 16 nt, Vaccinia virus
cucccauaauacuuua

SEQ ID NO: 4074531 - RNA, 14 nt, Vaccinia virus
cuccccaaacauug

SEQ ID NO: 4074532 - RNA, 22 nt, Vaccinia virus
cuccgcuaggagcauacaguaa

SEQ ID NO: 4074533 - RNA, 21 nt, Vaccinia virus
cuccucauuacguuucauuuu

SEQ ID NO: 4074534 - RNA, 22 nt, Vaccinia virus
cucgauaacacauuuucaucua

SEQ ID NO: 4074535 - RNA, 17 nt, Vaccinia virus
cucgcuuuguguaucau

SEQ ID NO: 4074536 - RNA, 16 nt, Vaccinia virus
cucguuaaacagcauu

SEQ ID NO: 4074537 - RNA, 20 nt, Vaccinia virus
cucguuaaacgccuuuagaa

SEQ ID NO: 4074538 - RNA, 22 nt, Vaccinia virus
cucuaacaacaacgaaccaaaa

SEQ ID NO: 4074539 - RNA, 17 nt, Vaccinia virus
cucuaaggauccagaag

SEQ ID NO: 4074540 - RNA, 14 nt, Vaccinia virus
cucuacaaauaucu

SEQ ID NO: 4074541 - RNA, 13 nt, Vaccinia virus
cucuacucuagau

SEQ ID NO: 4074542 - RNA, 19 nt, Vaccinia virus
cucuagaauauuuaauuug

SEQ ID NO: 4074543 - RNA, 11 nt, Vaccinia virus
cucuagauaug

SEQ ID NO: 4074544 - RNA, 17 nt, Vaccinia virus
cucuagauauguauuua

SEQ ID NO: 4074545 - RNA, 21 nt, Vaccinia virus
cucuaguaaagucaggacuga

SEQ ID NO: 4074546 - RNA, 22 nt, Vaccinia virus
cucuauaguuuguuuucauuau

SEQ ID NO: 4074547 - RNA, 20 nt, Vaccinia virus
cucuauuauagcuucuggac

SEQ ID NO: 4074548 - RNA, 13 nt, Vaccinia virus
cucuauuguuuga

SEQ ID NO: 4074549 - RNA, 20 nt, Vaccinia virus
cucuauuucuuaaugaauuu

SEQ ID NO: 4074550 - RNA, 21 nt, Vaccinia virus
cucucagguacagauuuugaa

SEQ ID NO: 4074551 - RNA, 19 nt, Vaccinia virus
cucuccuagguuucucuau

SEQ ID NO: 4074552 - RNA, 14 nt, Vaccinia virus
cucucuaauggaug

SEQ ID NO: 4074553 - RNA, 19 nt, Vaccinia virus
cucucuauuucuuaaugaa

SEQ ID NO: 4074554 - RNA, 19 nt, Vaccinia virus
cucucugaaucucugugga

SEQ ID NO: 4074555 - RNA, 16 nt, Vaccinia virus
cucucuuaauuucaga

SEQ ID NO: 4074556 - RNA, 21 nt, Vaccinia virus
cucugaauauagaacaucauu

SEQ ID NO: 4074557 - RNA, 17 nt, Vaccinia virus
cucugauccguauccau

SEQ ID NO: 4074558 - RNA, 15 nt, Vaccinia virus
cucuggagaaaagau

SEQ ID NO: 4074559 - RNA, 17 nt, Vaccinia virus
cucuggauauaucacaa

SEQ ID NO: 4074560 - RNA, 16 nt, Vaccinia virus
cucuucaacaucuuug

SEQ ID NO: 4074561 - RNA, 19 nt, Vaccinia virus
gaaucuaccuauagaaaag

SEQ ID NO: 4074562 - RNA, 13 nt, Vaccinia virus
gaaucugugaaug

SEQ ID NO: 4074563 - RNA, 17 nt, Vaccinia virus
gaaugaaauauauacau

SEQ ID NO: 4074564 - RNA, 19 nt, Vaccinia virus
gaaugacaucgcauuuaua

SEQ ID NO: 4074565 - RNA, 23 nt, Vaccinia virus
gaaugagaugcauaaaacuuuau

SEQ ID NO: 4074566 - RNA, 13 nt, Vaccinia virus
gaaugaugauaua

SEQ ID NO: 4074567 - RNA, 16 nt, Vaccinia virus
gaaugcccgcauauau

SEQ ID NO: 4074568 - RNA, 23 nt, Vaccinia virus
gaauggaaaccuuuaaucuauau

SEQ ID NO: 4074569 - RNA, 12 nt, Vaccinia virus
gaauguauauac

SEQ ID NO: 4074570 - RNA, 12 nt, Vaccinia virus
gaaugucaugau

SEQ ID NO: 4074571 - RNA, 14 nt, Vaccinia virus
gaauguguauucuc

SEQ ID NO: 4074572 - RNA, 18 nt, Vaccinia virus
gaauuaauaauaucucua

SEQ ID NO: 4074573 - RNA, 15 nt, Vaccinia virus
gaauuaauguccuga

SEQ ID NO: 4074574 - RNA, 15 nt, Vaccinia virus
gaauuacucaugcau

SEQ ID NO: 4074575 - RNA, 14 nt, Vaccinia virus
gaauuauagacacu

SEQ ID NO: 4074576 - RNA, 20 nt, Vaccinia virus
gaauucauccguccuucaga

SEQ ID NO: 4074577 - RNA, 21 nt, Vaccinia virus
gaauugacgaaacaauguuuc

SEQ ID NO: 4074578 - RNA, 16 nt, Vaccinia virus
gaauugcaauuuugau

SEQ ID NO: 4074579 - RNA, 14 nt, Vaccinia virus
gaauuuagaaauau

SEQ ID NO: 4074580 - RNA, 11 nt, Vaccinia virus
gacaaauguaa

SEQ ID NO: 4074581 - RNA, 12 nt, Vaccinia virus
gacaauaaucuc

SEQ ID NO: 4074582 - RNA, 16 nt, Vaccinia virus
gacaauaggaaaucua

SEQ ID NO: 4074583 - RNA, 21 nt, Vaccinia virus
gacaauauuuaguuuauucau

SEQ ID NO: 4074584 - RNA, 20 nt, Vaccinia virus
gacacauaugcgaucagaua

SEQ ID NO: 4074585 - RNA, 15 nt, Vaccinia virus
gacaccauagagaua

SEQ ID NO: 4074586 - RNA, 20 nt, Vaccinia virus
gacacgauuaccaauacuuu

SEQ ID NO: 4074587 - RNA, 17 nt, Vaccinia virus
gacacugaaucaauuga

SEQ ID NO: 4074588 - RNA, 15 nt, Vaccinia virus
gacauaauacuaucu

SEQ ID NO: 4074589 - RNA, 18 nt, Vaccinia virus
gacauacguauauuucua

SEQ ID NO: 4074590 - RNA, 15 nt, Vaccinia virus
gacauaguaauacau

SEQ ID NO: 4074591 - RNA, 15 nt, Vaccinia virus
gacauaucagaugau

SEQ ID NO: 4074592 - RNA, 13 nt, Vaccinia virus
gacauauuucauu

SEQ ID NO: 4074593 - RNA, 19 nt, Vaccinia virus
gacaucuggauuucagaua

SEQ ID NO: 4074594 - RNA, 17 nt, Vaccinia virus
gacauuuucacaaauac

SEQ ID NO: 4074595 - RNA, 17 nt, Vaccinia virus
gaccaagacacauaugg

SEQ ID NO: 4074596 - RNA, 14 nt, Vaccinia virus
gaccaguauugaug

SEQ ID NO: 4074597 - RNA, 23 nt, Vaccinia virus
gaccgacgauaauauaaacaucu

SEQ ID NO: 4074598 - RNA, 18 nt, Vaccinia virus
gacgaaauauuagaaaaa

SEQ ID NO: 4074599 - RNA, 12 nt, Vaccinia virus
gacgauauuaac

SEQ ID NO: 4074600 - RNA, 13 nt, Vaccinia virus
gacgauauuucug

SEQ ID NO: 4074601 - RNA, 23 nt, Vaccinia virus
gacgauuucugaauuauuucaua

SEQ ID NO: 4074602 - RNA, 21 nt, Vaccinia virus
gacgcuuguuaauaaguaaau

SEQ ID NO: 4074603 - RNA, 15 nt, Vaccinia virus
gacggauaaaacaaa

SEQ ID NO: 4074604 - RNA, 18 nt, Vaccinia virus
gacggcguuaauaguaau

SEQ ID NO: 4074605 - RNA, 22 nt, Vaccinia virus
gacgucuagaguuuauaucaau

SEQ ID NO: 4074606 - RNA, 23 nt, Vaccinia virus
gacguugccagaaaauccuguaa

SEQ ID NO: 4074607 - RNA, 15 nt, Vaccinia virus
gacuacgaaacugau

SEQ ID NO: 4074608 - RNA, 14 nt, Vaccinia virus
gacuagacauuuac

SEQ ID NO: 4074609 - RNA, 19 nt, Vaccinia virus
gacuauagacauaauacua

SEQ ID NO: 4074610 - RNA, 16 nt, Vaccinia virus
gacuaugggaauauau

SEQ ID NO: 4074611 - RNA, 14 nt, Vaccinia virus
gacucauuaaaacu

SEQ ID NO: 4074612 - RNA, 18 nt, Vaccinia virus
gacucauuauuucccaaa

SEQ ID NO: 4074613 - RNA, 18 nt, Vaccinia virus
gacuccggaaccaauuac

SEQ ID NO: 4074614 - RNA, 14 nt, Vaccinia virus
gacucgucuacuau

SEQ ID NO: 4074615 - RNA, 17 nt, Vaccinia virus
gacucuaccugaugaau

SEQ ID NO: 4074616 - RNA, 17 nt, Vaccinia virus
gacugaccaguauugau

SEQ ID NO: 4074617 - RNA, 21 nt, Vaccinia virus
gacugccacguuagaggauga

SEQ ID NO: 4074618 - RNA, 19 nt, Vaccinia virus
gacuguagaacucaugaau

SEQ ID NO: 4074619 - RNA, 18 nt, Vaccinia virus
gacuuaagacuuaaaacu

SEQ ID NO: 4074620 - RNA, 15 nt, Vaccinia virus
gacuuaaucaugcau

SEQ ID NO: 4074621 - RNA, 21 nt, Vaccinia virus
gacuuacgucugcuaaaauac

SEQ ID NO: 4074622 - RNA, 16 nt, Vaccinia virus
gacuugauuuaaaacc

SEQ ID NO: 4074623 - RNA, 19 nt, Vaccinia virus
gacuuugaacauuauugau

SEQ ID NO: 4074624 - RNA, 19 nt, Vaccinia virus
gagaaaguggauaaaacaa

SEQ ID NO: 4074625 - RNA, 17 nt, Vaccinia virus
gagaagaugguuaaaaa

SEQ ID NO: 4074626 - RNA, 13 nt, Vaccinia virus
gagaauaauagau

SEQ ID NO: 4074627 - RNA, 16 nt, Vaccinia virus
gagaaugacauaacua

SEQ ID NO: 4074628 - RNA, 17 nt, Vaccinia virus
gagacgaucuacuauca

SEQ ID NO: 4074629 - RNA, 22 nt, Vaccinia virus
gagagaucauuucuauaauuua

SEQ ID NO: 4074630 - RNA, 19 nt, Vaccinia virus
agacggauaagaaauauau

SEQ ID NO: 4074631 - RNA, 14 nt, Vaccinia virus
agacuacaauauau

SEQ ID NO: 4074632 - RNA, 18 nt, Vaccinia virus
agacuaugugguuaaaug

SEQ ID NO: 4074633 - RNA, 21 nt, Vaccinia virus
agacugacuucuaacaaacau

SEQ ID NO: 4074634 - RNA, 20 nt, Vaccinia virus
agacuuuaagcuaaaauauu

SEQ ID NO: 4074635 - RNA, 16 nt, Vaccinia virus
agacuuuaucuagauc

SEQ ID NO: 4074636 - RNA, 17 nt, Vaccinia virus
agagaagucgucaagca

SEQ ID NO: 4074637 - RNA, 20 nt, Vaccinia virus
agagaaugaaauauauacau

SEQ ID NO: 4074638 - RNA, 22 nt, Vaccinia virus
agagacccugcgcuuucucuau

SEQ ID NO: 4074639 - RNA, 16 nt, Vaccinia virus
agagaccgauaccuau

SEQ ID NO: 4074640 - RNA, 17 nt, Vaccinia virus
agagacgggaaaauagu

SEQ ID NO: 4074641 - RNA, 14 nt, Vaccinia virus
agagauaacuauaa

SEQ ID NO: 4074642 - RNA, 12 nt, Vaccinia virus
agagauuuuacu

SEQ ID NO: 4074643 - RNA, 12 nt, Vaccinia virus
agagcaugaagg

SEQ ID NO: 4074644 - RNA, 16 nt, Vaccinia virus
agagccaucuguaaaa

SEQ ID NO: 4074645 - RNA, 15 nt, Vaccinia virus
agagcuauucuugga

SEQ ID NO: 4074646 - RNA, 13 nt, Vaccinia virus
agaggaaacuaau

SEQ ID NO: 4074647 - RNA, 22 nt, Vaccinia virus
agaggaccguugggaauuuuau

SEQ ID NO: 4074648 - RNA, 14 nt, Vaccinia virus
agaggauaacuauu

SEQ ID NO: 4074649 - RNA, 20 nt, Vaccinia virus
agagucacgaauaacgauau

SEQ ID NO: 4074650 - RNA, 14 nt, Vaccinia virus
agaguguuuaucca

SEQ ID NO: 4074651 - RNA, 16 nt, Vaccinia virus
agauaaaaaauuauau

SEQ ID NO: 4074652 - RNA, 12 nt, Vaccinia virus
agauaaauggaa

SEQ ID NO: 4074653 - RNA, 21 nt, Vaccinia virus
agauaacaacgacuuauaauu

SEQ ID NO: 4074654 - RNA, 15 nt, Vaccinia virus
agauaaccaaaaagu

SEQ ID NO: 4074655 - RNA, 12 nt, Vaccinia virus
agauaaggaagu

SEQ ID NO: 4074656 - RNA, 13 nt, Vaccinia virus
agauaaguuuaag

SEQ ID NO: 4074657 - RNA, 13 nt, Vaccinia virus
agauaauauaccg

SEQ ID NO: 4074658 - RNA, 17 nt, Vaccinia virus
agauaauauuagacaua

SEQ ID NO: 4074659 - RNA, 16 nt, Vaccinia virus
agauaaucaaaauugu

SEQ ID NO: 4074660 - RNA, 13 nt, Vaccinia virus
agauaaucuauau

SEQ ID NO: 4074661 - RNA, 13 nt, Vaccinia virus
agauaaugauaua

SEQ ID NO: 4074662 - RNA, 18 nt, Vaccinia virus
agauaaugcgguuuauca

SEQ ID NO: 4074663 - RNA, 18 nt, Vaccinia virus
agauaaugguagcaauau

SEQ ID NO: 4074664 - RNA, 20 nt, Vaccinia virus
agauaauugugguaauacac

SEQ ID NO: 4074665 - RNA, 13 nt, Vaccinia virus
agauaauuuuacc

SEQ ID NO: 4074666 - RNA, 20 nt, Vaccinia virus
agauaauuuuaccagaauac

SEQ ID NO: 4074667 - RNA, 22 nt, Vaccinia virus
agauacaguuaauaucuauaua

SEQ ID NO: 4074668 - RNA, 15 nt, Vaccinia virus
agauaccaaacagaa

SEQ ID NO: 4074669 - RNA, 20 nt, Vaccinia virus
agauaccacgaguaucaauu

SEQ ID NO: 4074670 - RNA, 16 nt, Vaccinia virus
agauacuguuuagaga

SEQ ID NO: 4074671 - RNA, 23 nt, Vaccinia virus
agauagaucacacauuaugaacu

SEQ ID NO: 4074672 - RNA, 21 nt, Vaccinia virus
agauagguauuuuaucucuau

SEQ ID NO: 4074673 - RNA, 20 nt, Vaccinia virus
agauauaaaauagaaaauaa

SEQ ID NO: 4074674 - RNA, 21 nt, Vaccinia virus
agauauaaaaugcguauucca

SEQ ID NO: 4074675 - RNA, 23 nt, Vaccinia virus
agauauacccgaagauauacaca

SEQ ID NO: 4074676 - RNA, 22 nt, Vaccinia virus
agauauacgcuaucuauauccu

SEQ ID NO: 4074677 - RNA, 18 nt, Vaccinia virus
agauauagauuugcauuu

SEQ ID NO: 4074678 - RNA, 17 nt, Vaccinia virus
agauauaguauauucca

SEQ ID NO: 4074679 - RNA, 15 nt, Vaccinia virus
agauauauagaauua

SEQ ID NO: 4074680 - RNA, 18 nt, Vaccinia virus
agauaucagagaacuucu

SEQ ID NO: 4074681 - RNA, 23 nt, Vaccinia virus
agauaucauaaaugaaauagaua

SEQ ID NO: 4074682 - RNA, 17 nt, Vaccinia virus
agauaucuauacuuacu

SEQ ID NO: 4074683 - RNA, 14 nt, Vaccinia virus
agauaugauagaca

SEQ ID NO: 4074684 - RNA, 23 nt, Vaccinia virus
agauaugguaaaauuaaauagua

SEQ ID NO: 4074685 - RNA, 10 nt, Vaccinia virus
agauauuaau

SEQ ID NO: 4074686 - RNA, 17 nt, Vaccinia virus
agauauuaguaaaagau

SEQ ID NO: 4074687 - RNA, 20 nt, Vaccinia virus
agauauuauuaaaucaugac

SEQ ID NO: 4074688 - RNA, 19 nt, Vaccinia virus
agauauuuagcaauugcau

SEQ ID NO: 4074689 - RNA, 19 nt, Vaccinia virus
agauauuuccauuuaucua

SEQ ID NO: 4074690 - RNA, 21 nt, Vaccinia virus
agauauuuggcuaaacuauau

SEQ ID NO: 4074691 - RNA, 17 nt, Vaccinia virus
agaucaacagaaauauu

SEQ ID NO: 4074692 - RNA, 13 nt, Vaccinia virus
agaucaaggaaau

SEQ ID NO: 4074693 - RNA, 22 nt, Vaccinia virus
agaucaauggugugauguugau

SEQ ID NO: 4074694 - RNA, 19 nt, Vaccinia virus
agaucaucaaaauauguuu

SEQ ID NO: 4074695 - RNA, 20 nt, Vaccinia virus
agauccugcauagaaauauc

SEQ ID NO: 4074696 - RNA, 15 nt, Vaccinia virus
agaucgaaaaaagag

SEQ ID NO: 4074697 - RNA, 24 nt, Vaccinia virus
agaucgcuuucugguaacaugaua

SEQ ID NO: 4074698 - RNA, 18 nt, Vaccinia virus
agaucuaaauacaaaauc

SEQ ID NO: 4074699 - RNA, 20 nt, Vaccinia virus
agaucuacuggcgaaauggu

SEQ ID NO: 4074700 - RNA, 19 nt, Vaccinia virus
agaucugcguguaaaaagu

SEQ ID NO: 4074701 - RNA, 23 nt, Vaccinia virus
agaucuucucuccuuucaaacuu

SEQ ID NO: 4074702 - RNA, 21 nt, Vaccinia virus
agaucuuuucucaaagauguu

SEQ ID NO: 4074703 - RNA, 16 nt, Vaccinia virus
agaugacgaugauaug

SEQ ID NO: 4074704 - RNA, 15 nt, Vaccinia virus
agaugagaacucuau

SEQ ID NO: 4074705 - RNA, 21 nt, Vaccinia virus
agaugagcauaaacauaauaa

SEQ ID NO: 4074706 - RNA, 17 nt, Vaccinia virus
agaugauaauuuauaca

SEQ ID NO: 4074707 - RNA, 23 nt, Vaccinia virus
agaugaugauacguauauacacu

SEQ ID NO: 4074708 - RNA, 20 nt, Vaccinia virus
agaugccaagauaucuauau

SEQ ID NO: 4074709 - RNA, 18 nt, Vaccinia virus
agaugcuauaucaaaaua

SEQ ID NO: 4074710 - RNA, 23 nt, Vaccinia virus
agaugcuauguauauauauuucu

SEQ ID NO: 4074711 - RNA, 15 nt, Vaccinia virus
agauggauaaaacuu

SEQ ID NO: 4074712 - RNA, 20 nt, Vaccinia virus
agaugguaaaauacaaaaua

SEQ ID NO: 4074713 - RNA, 18 nt, Vaccinia virus
agaugguagaacaaugug

SEQ ID NO: 4074714 - RNA, 16 nt, Vaccinia virus
agaugucuuauuaaaa

SEQ ID NO: 4074715 - RNA, 19 nt, Vaccinia virus
agaugugauggaaaaauga

SEQ ID NO: 4074716 - RNA, 19 nt, Vaccinia virus
agauguuacaaauguagaa

SEQ ID NO: 4074717 - RNA, 16 nt, Vaccinia virus
agauguuauuccuguu

SEQ ID NO: 4074718 - RNA, 13 nt, Vaccinia virus
agauuaaaaaugg

SEQ ID NO: 4074719 - RNA, 14 nt, Vaccinia virus
agauuaaaaauggu

SEQ ID NO: 4074720 - RNA, 22 nt, Vaccinia virus
agauuaaagacuuauagcuaga

SEQ ID NO: 4074721 - RNA, 18 nt, Vaccinia virus
agauuaccuauucacuua

SEQ ID NO: 4074722 - RNA, 15 nt, Vaccinia virus
agauuacucauguaa

SEQ ID NO: 4074723 - RNA, 17 nt, Vaccinia virus
agauuaguaaauucaag

SEQ ID NO: 4074724 - RNA, 14 nt, Vaccinia virus
agauuaguaacagu

SEQ ID NO: 4074725 - RNA, 13 nt, Vaccinia virus
agauuaucaaaau

SEQ ID NO: 4074726 - RNA, 14 nt, Vaccinia virus
agauucaacauuua

SEQ ID NO: 4074727 - RNA, 17 nt, Vaccinia virus
agauucgcauaaaggau

SEQ ID NO: 4074728 - RNA, 16 nt, Vaccinia virus
agauucucuaugagac

SEQ ID NO: 4074729 - RNA, 22 nt, Vaccinia virus
agauucuuccuccaaacaguua

SEQ ID NO: 4074730 - RNA, 14 nt, Vaccinia virus
agauugaaugccau

SEQ ID NO: 4074731 - RNA, 15 nt, Vaccinia virus
agauugguacgaaau

SEQ ID NO: 4074732 - RNA, 16 nt, Vaccinia virus
agauuguaucaguuuc

SEQ ID NO: 4074733 - RNA, 20 nt, Vaccinia virus
agauuguuguauagaaauuu

SEQ ID NO: 4074734 - RNA, 15 nt, Vaccinia virus
agauuguuuucagug

SEQ ID NO: 4074735 - RNA, 17 nt, Vaccinia virus
agauuuaucauauuucu

SEQ ID NO: 4074736 - RNA, 22 nt, Vaccinia virus
agauuuauuugauaaucauguu

SEQ ID NO: 4074737 - RNA, 16 nt, Vaccinia virus
agauuucaaagauguu

SEQ ID NO: 4074738 - RNA, 18 nt, Vaccinia virus
agauuuccuagauuuacu

SEQ ID NO: 4074739 - RNA, 15 nt, Vaccinia virus
agauuucgucuaaua

SEQ ID NO: 4074740 - RNA, 17 nt, Vaccinia virus
agauuucugacaauuac

SEQ ID NO: 4074741 - RNA, 15 nt, Vaccinia virus
agauuuuaaaaaacu

SEQ ID NO: 4074742 - RNA, 15 nt, Vaccinia virus
agauuuuaaauguau

SEQ ID NO: 4074743 - RNA, 14 nt, Vaccinia virus
agauuuuacuaacu

SEQ ID NO: 4074744 - RNA, 19 nt, Vaccinia virus
agauuuuuagcguauuauc

SEQ ID NO: 4074745 - RNA, 16 nt, Vaccinia virus
agauuuuuuaaaggau

SEQ ID NO: 4074746 - RNA, 11 nt, Vaccinia virus
agcaaaaaacc

SEQ ID NO: 4074747 - RNA, 15 nt, Vaccinia virus
agcaaaggaaauugu

SEQ ID NO: 4074748 - RNA, 23 nt, Vaccinia virus
agcaaagggugguaucauggcag

SEQ ID NO: 4074749 - RNA, 14 nt, Vaccinia virus
agcaacaugucucu

SEQ ID NO: 4074750 - RNA, 19 nt, Vaccinia virus
agcaauagugauagauuuu

SEQ ID NO: 4074751 - RNA, 15 nt, Vaccinia virus
agcaaucagaaauga

SEQ ID NO: 4074752 - RNA, 17 nt, Vaccinia virus
agcaaucagaaaugaug

SEQ ID NO: 4074753 - RNA, 17 nt, Vaccinia virus
agcaaugcuauaccuaa

SEQ ID NO: 4074754 - RNA, 16 nt, Vaccinia virus
auacauccuguucuau

SEQ ID NO: 4074755 - RNA, 14 nt, Vaccinia virus
auacauguuuguaa

SEQ ID NO: 4074756 - RNA, 13 nt, Vaccinia virus
auacauguuuuau

SEQ ID NO: 4074757 - RNA, 19 nt, Vaccinia virus
auacauuaaguaaaguaaa

SEQ ID NO: 4074758 - RNA, 19 nt, Vaccinia virus
auacauuauuacuaaacau

SEQ ID NO: 4074759 - RNA, 20 nt, Vaccinia virus
auacauuauuacuaaacauu

SEQ ID NO: 4074760 - RNA, 14 nt, Vaccinia virus
auacauugaauauu

SEQ ID NO: 4074761 - RNA, 20 nt, Vaccinia virus
auacauuuccgaaugaaugu

SEQ ID NO: 4074762 - RNA, 15 nt, Vaccinia virus
auacauuucucaaau

SEQ ID NO: 4074763 - RNA, 22 nt, Vaccinia virus
auacauuuugcauuagauuuac

SEQ ID NO: 4074764 - RNA, 15 nt, Vaccinia virus
auacauuuuucuaug

SEQ ID NO: 4074765 - RNA, 12 nt, Vaccinia virus
auaccaaaauuc

SEQ ID NO: 4074766 - RNA, 14 nt, Vaccinia virus
auaccaacaugucu

SEQ ID NO: 4074767 - RNA, 18 nt, Vaccinia virus
auaccaacauuaaaaugu

SEQ ID NO: 4074768 - RNA, 22 nt, Vaccinia virus
auaccaguauaccucaaaaauu

SEQ ID NO: 4074769 - RNA, 15 nt, Vaccinia virus
auaccaguuuggaaa

SEQ ID NO: 4074770 - RNA, 22 nt, Vaccinia virus
auaccauauccuccuguagaua

SEQ ID NO: 4074771 - RNA, 19 nt, Vaccinia virus
auaccuuuaacuucuggaa

SEQ ID NO: 4074772 - RNA, 18 nt, Vaccinia virus
auacgaagaaaaaguaaa

SEQ ID NO: 4074773 - RNA, 14 nt, Vaccinia virus
auacgauaaacauu

SEQ ID NO: 4074774 - RNA, 23 nt, Vaccinia virus
auacgauaguuuguuucuggaau

SEQ ID NO: 4074775 - RNA, 13 nt, Vaccinia virus
auacgauaucuuc

SEQ ID NO: 4074776 - RNA, 17 nt, Vaccinia virus
auacgcugauaaauaua

SEQ ID NO: 4074777 - RNA, 18 nt, Vaccinia virus
auacguaagaauauacua

SEQ ID NO: 4074778 - RNA, 23 nt, Vaccinia virus
auacuaaaaaauguagaaauuga

SEQ ID NO: 4074779 - RNA, 12 nt, Vaccinia virus
auacuaaagaaa

SEQ ID NO: 4074780 - RNA, 16 nt, Vaccinia virus
auacuaaagaaacugu

SEQ ID NO: 4074781 - RNA, 19 nt, Vaccinia virus
auacuaaaucuccuucaug

SEQ ID NO: 4074782 - RNA, 14 nt, Vaccinia virus
auacuaauaugaca

SEQ ID NO: 4074783 - RNA, 15 nt, Vaccinia virus
auacuagaacuauag

SEQ ID NO: 4074784 - RNA, 13 nt, Vaccinia virus
auacuauauguau

SEQ ID NO: 4074785 - RNA, 16 nt, Vaccinia virus
auacuaugaugucuag

SEQ ID NO: 4074786 - RNA, 14 nt, Vaccinia virus
auacucagaauuau

SEQ ID NO: 4074787 - RNA, 18 nt, Vaccinia virus
auacucaugccuaguaau

SEQ ID NO: 4074788 - RNA, 18 nt, Vaccinia virus
auacuccuucaugaacau

SEQ ID NO: 4074789 - RNA, 14 nt, Vaccinia virus
auacuccuuuguau

SEQ ID NO: 4074790 - RNA, 14 nt, Vaccinia virus
auacucuaaucuuu

SEQ ID NO: 4074791 - RNA, 23 nt, Vaccinia virus
auacucuaugaauggauacuugu

SEQ ID NO: 4074792 - RNA, 16 nt, Vaccinia virus
auacucuauucgaaaa

SEQ ID NO: 4074793 - RNA, 14 nt, Vaccinia virus
auacugaaccaucg

SEQ ID NO: 4074794 - RNA, 22 nt, Vaccinia virus
auacuguauauacuauuauaga

SEQ ID NO: 4074795 - RNA, 16 nt, Vaccinia virus
auacuguguaaagaaa

SEQ ID NO: 4074796 - RNA, 17 nt, Vaccinia virus
auacuguguaaagaaau

SEQ ID NO: 4074797 - RNA, 16 nt, Vaccinia virus
auacuuccaucaacau

SEQ ID NO: 4074798 - RNA, 18 nt, Vaccinia virus
auacuuuaaagcaaaaug

SEQ ID NO: 4074799 - RNA, 15 nt, Vaccinia virus
auacuuuuucuagaa

SEQ ID NO: 4074800 - RNA, 22 nt, Vaccinia virus
auagaaacauauucuaugaauu

SEQ ID NO: 4074801 - RNA, 23 nt, Vaccinia virus
auagaagcguauaaccuguauac

SEQ ID NO: 4074802 - RNA, 20 nt, Vaccinia virus
auagaauaaauauccuugga

SEQ ID NO: 4074803 - RNA, 12 nt, Vaccinia virus
auagaaucugug

SEQ ID NO: 4074804 - RNA, 17 nt, Vaccinia virus
auagaaugaagaaugcc

SEQ ID NO: 4074805 - RNA, 18 nt, Vaccinia virus
auagaauuuagaaauaua

SEQ ID NO: 4074806 - RNA, 15 nt, Vaccinia virus
auagacaaauuauuc

SEQ ID NO: 4074807 - RNA, 20 nt, Vaccinia virus
auagacggcuucuagaaguu

SEQ ID NO: 4074808 - RNA, 19 nt, Vaccinia virus
auagagaacauauaaaugu

SEQ ID NO: 4074809 - RNA, 17 nt, Vaccinia virus
auagagaguucauuuau

SEQ ID NO: 4074810 - RNA, 16 nt, Vaccinia virus
auagagaugagaugcu

SEQ ID NO: 4074811 - RNA, 23 nt, Vaccinia virus
auagagccaagacgaacaaaauc

SEQ ID NO: 4074812 - RNA, 22 nt, Vaccinia virus
auagagcccacguuuaaacauu

SEQ ID NO: 4074813 - RNA, 17 nt, Vaccinia virus
auagaggaagacacauu

SEQ ID NO: 4074814 - RNA, 22 nt, Vaccinia virus
auagauaguagcuauaauauau

SEQ ID NO: 4074815 - RNA, 18 nt, Vaccinia virus
auagauaugccagaacua

SEQ ID NO: 4074816 - RNA, 17 nt, Vaccinia virus
auagauauuuucuuucu

SEQ ID NO: 4074817 - RNA, 13 nt, Vaccinia virus
auagaucauaucu

SEQ ID NO: 4074818 - RNA, 21 nt, Vaccinia virus
auagaucggcaaagcuauugu

SEQ ID NO: 4074819 - RNA, 12 nt, Vaccinia virus
auagaugaaugu

SEQ ID NO: 4074820 - RNA, 16 nt, Vaccinia virus
auagauucagaauuuc

SEQ ID NO: 4074821 - RNA, 19 nt, Vaccinia virus
auagauuucgaaaauacua

SEQ ID NO: 4074822 - RNA, 13 nt, Vaccinia virus
auagcuaaaaaug

SEQ ID NO: 4074823 - RNA, 16 nt, Vaccinia virus
auagcuagaggaaaug

SEQ ID NO: 4074824 - RNA, 15 nt, Vaccinia virus
auagcugagaauauc

SEQ ID NO: 4074825 - RNA, 21 nt, Vaccinia virus
auagguaauacauauaaaugu

SEQ ID NO: 4074826 - RNA, 20 nt, Vaccinia virus
auaggucuucgucuacagua

SEQ ID NO: 4074827 - RNA, 18 nt, Vaccinia virus
auaggugcguuguauaca

SEQ ID NO: 4074828 - RNA, 22 nt, Vaccinia virus
auaggugcguuguauacacaua

SEQ ID NO: 4074829 - RNA, 14 nt, Vaccinia virus
auaguaaaauauua

SEQ ID NO: 4074830 - RNA, 19 nt, Vaccinia virus
auaguacuacaauuuguau

SEQ ID NO: 4074831 - RNA, 16 nt, Vaccinia virus
auaguagaguaaacau

SEQ ID NO: 4074832 - RNA, 17 nt, Vaccinia virus
auaguagaguaaacauu

SEQ ID NO: 4074833 - RNA, 23 nt, Vaccinia virus
auaguaggucuggaucuggaaaa

SEQ ID NO: 4074834 - RNA, 17 nt, Vaccinia virus
auaguauaauuauaugu

SEQ ID NO: 4074835 - RNA, 18 nt, Vaccinia virus
auagugaaacaaaauaua

SEQ ID NO: 4074836 - RNA, 23 nt, Vaccinia virus
auaguguuuaacaaagauauuac

SEQ ID NO: 4074837 - RNA, 19 nt, Vaccinia virus
auaguuacagaauuuguau

SEQ ID NO: 4074838 - RNA, 15 nt, Vaccinia virus
auaguuauaucacac

SEQ ID NO: 4074839 - RNA, 23 nt, Vaccinia virus
auaguuaucuaucuuaaaaacua

SEQ ID NO: 4074840 - RNA, 17 nt, Vaccinia virus
auaguucuuaacaucua

SEQ ID NO: 4074841 - RNA, 19 nt, Vaccinia virus
auaguuugggaaaagaaau

SEQ ID NO: 4074842 - RNA, 14 nt, Vaccinia virus
auauaaaaaaauga

SEQ ID NO: 4074843 - RNA, 15 nt, Vaccinia virus
auauaaauaugagca

SEQ ID NO: 4074844 - RNA, 18 nt, Vaccinia virus
auauaaaucuaaaauuga

SEQ ID NO: 4074845 - RNA, 17 nt, Vaccinia virus
auauaacuucugguaaa

SEQ ID NO: 4074846 - RNA, 13 nt, Vaccinia virus
auauaaugauaua

SEQ ID NO: 4074847 - RNA, 23 nt, Vaccinia virus
auauaauggauuugcaccacuuu

SEQ ID NO: 4074848 - RNA, 22 nt, Vaccinia virus
auauaaugggucccuagucaua

SEQ ID NO: 4074849 - RNA, 17 nt, Vaccinia virus
auauaauuauacuaucg

SEQ ID NO: 4074850 - RNA, 15 nt, Vaccinia virus
auauacacauaauua

SEQ ID NO: 4074851 - RNA, 14 nt, Vaccinia virus
auauaccauuaaaa

SEQ ID NO: 4074852 - RNA, 17 nt, Vaccinia virus
auauacgccaugauugu

SEQ ID NO: 4074853 - RNA, 22 nt, Vaccinia virus
auauacguugauagauuagcug

SEQ ID NO: 4074854 - RNA, 14 nt, Vaccinia virus
auauacuuuucuaa

SEQ ID NO: 4074855 - RNA, 21 nt, Vaccinia virus
auauagaaccugaucuggaaa

SEQ ID NO: 4074856 - RNA, 17 nt, Vaccinia virus
auauagaagauaaacau

SEQ ID NO: 4074857 - RNA, 19 nt, Vaccinia virus
auauagagauuagaggagg

SEQ ID NO: 4074858 - RNA, 20 nt, Vaccinia virus
auauagauuuuuuaaaggau

SEQ ID NO: 4074859 - RNA, 23 nt, Vaccinia virus
auauagcaucgauccaugagaaa

SEQ ID NO: 4074860 - RNA, 20 nt, Vaccinia virus
auauagcggaugaaaaauuu

SEQ ID NO: 4074861 - RNA, 15 nt, Vaccinia virus
auauagcuuauucca

SEQ ID NO: 4074862 - RNA, 19 nt, Vaccinia virus
auauaggaccacuagcaaa

SEQ ID NO: 4074863 - RNA, 12 nt, Vaccinia virus
auauaguaauga

SEQ ID NO: 4074864 - RNA, 14 nt, Vaccinia virus
auauaguaccuaga

SEQ ID NO: 4074865 - RNA, 15 nt, Vaccinia virus
auauaguauauagau

SEQ ID NO: 4074866 - RNA, 19 nt, Vaccinia virus
auauagugaaacaaaauau

SEQ ID NO: 4074867 - RNA, 21 nt, Vaccinia virus
auauaguucgucauuuaauaa

SEQ ID NO: 4074868 - RNA, 13 nt, Vaccinia virus
auauauacaguag

SEQ ID NO: 4074869 - RNA, 19 nt, Vaccinia virus
auauaucacccauccauuu

SEQ ID NO: 4074870 - RNA, 17 nt, Vaccinia virus
auauaucacuauaagaa

SEQ ID NO: 4074871 - RNA, 15 nt, Vaccinia virus
auauaucaugaugau

SEQ ID NO: 4074872 - RNA, 13 nt, Vaccinia virus
auauaucuauugu

SEQ ID NO: 4074873 - RNA, 12 nt, Vaccinia virus
auauauguugau

SEQ ID NO: 4074874 - RNA, 12 nt, Vaccinia virus
auauauguuuau

SEQ ID NO: 4074875 - RNA, 19 nt, Vaccinia virus
auauauguuuucaucauuu

SEQ ID NO: 4074876 - RNA, 15 nt, Vaccinia virus
auauauuagaaauac

SEQ ID NO: 4074877 - RNA, 18 nt, Vaccinia virus
auauauuaucauagaccu

SEQ ID NO: 4074878 - RNA, 22 nt, Vaccinia virus
cuaaaauuccuaacgaugauau

SEQ ID NO: 4074879 - RNA, 23 nt, Vaccinia virus
cuaaaauuccuaacgaugauaug

SEQ ID NO: 4074880 - RNA, 15 nt, Vaccinia virus
cuaaacaauguuaug

SEQ ID NO: 4074881 - RNA, 18 nt, Vaccinia virus
cuaaaccuucuuauucua

SEQ ID NO: 4074882 - RNA, 13 nt, Vaccinia virus
cuaaaguauuucu

SEQ ID NO: 4074883 - RNA, 14 nt, Vaccinia virus
cuaaauaaguagua

SEQ ID NO: 4074884 - RNA, 20 nt, Vaccinia virus
cuaaauaauggcuguuugua

SEQ ID NO: 4074885 - RNA, 16 nt, Vaccinia virus
cuaaaucucuuuagaa

SEQ ID NO: 4074886 - RNA, 18 nt, Vaccinia virus
cuaaauucaugucuaaug

SEQ ID NO: 4074887 - RNA, 21 nt, Vaccinia virus
cuaacaaaaauuaugaaauaa

SEQ ID NO: 4074888 - RNA, 13 nt, Vaccinia virus
cuaacacauuuca

SEQ ID NO: 4074889 - RNA, 23 nt, Vaccinia virus
cuaacauugauuuuaaaauuaaa

SEQ ID NO: 4074890 - RNA, 14 nt, Vaccinia virus
cuaagagaugaaaa

SEQ ID NO: 4074891 - RNA, 16 nt, Vaccinia virus
cuaaguccuauucucg

SEQ ID NO: 4074892 - RNA, 20 nt, Vaccinia virus
cuaauaaacauuccacauuc

SEQ ID NO: 4074893 - RNA, 15 nt, Vaccinia virus
cuaauacuaaauaca

SEQ ID NO: 4074894 - RNA, 22 nt, Vaccinia virus
cuaauagauguauuugauauac

SEQ ID NO: 4074895 - RNA, 15 nt, Vaccinia virus
cuaaucuuuaauaga

SEQ ID NO: 4074896 - RNA, 20 nt, Vaccinia virus
cuaaugccuuaggauaugua

SEQ ID NO: 4074897 - RNA, 18 nt, Vaccinia virus
cuaaugcggaaugucaac

SEQ ID NO: 4074898 - RNA, 17 nt, Vaccinia virus
cuaaugugauucucuga

SEQ ID NO: 4074899 - RNA, 13 nt, Vaccinia virus
cuaauguuguaaa

SEQ ID NO: 4074900 - RNA, 18 nt, Vaccinia virus
cuaauuauuccuauuuca

SEQ ID NO: 4074901 - RNA, 12 nt, Vaccinia virus
cuaauucuuucu

SEQ ID NO: 4074902 - RNA, 22 nt, Vaccinia virus
cuaauugaucaagaguaacuau

SEQ ID NO: 4074903 - RNA, 18 nt, Vaccinia virus
cuaauuugauauaaugaa

SEQ ID NO: 4074904 - RNA, 13 nt, Vaccinia virus
cuacaaaauguug

SEQ ID NO: 4074905 - RNA, 16 nt, Vaccinia virus
cuacaauauauucuca

SEQ ID NO: 4074906 - RNA, 21 nt, Vaccinia virus
cuacaauugucuaaugauauc

SEQ ID NO: 4074907 - RNA, 14 nt, Vaccinia virus
cuacaauuuguauu

SEQ ID NO: 4074908 - RNA, 15 nt, Vaccinia virus
cuacaguaaugucca

SEQ ID NO: 4074909 - RNA, 17 nt, Vaccinia virus
cuacaucaguuuuguau

SEQ ID NO: 4074910 - RNA, 16 nt, Vaccinia virus
cuaccaguuauucucg

SEQ ID NO: 4074911 - RNA, 23 nt, Vaccinia virus
cuaccauggcuccguuuaauuug

SEQ ID NO: 4074912 - RNA, 16 nt, Vaccinia virus
cuaccgaauaaaguug

SEQ ID NO: 4074913 - RNA, 18 nt, Vaccinia virus
cuaccgcaucaucaucgu

SEQ ID NO: 4074914 - RNA, 17 nt, Vaccinia virus
cuaccguuguuaaauac

SEQ ID NO: 4074915 - RNA, 13 nt, Vaccinia virus
cuaccugcuguug

SEQ ID NO: 4074916 - RNA, 15 nt, Vaccinia virus
cuaccuuuucaauuu

SEQ ID NO: 4074917 - RNA, 19 nt, Vaccinia virus
cuacgaaacugauacaauc

SEQ ID NO: 4074918 - RNA, 15 nt, Vaccinia virus
cuacgaaacuuugau

SEQ ID NO: 4074919 - RNA, 16 nt, Vaccinia virus
cuacuaauguauacau

SEQ ID NO: 4074920 - RNA, 19 nt, Vaccinia virus
cuacuacguucucuuugau

SEQ ID NO: 4074921 - RNA, 23 nt, Vaccinia virus
cuacuaguauagaucaaauacuu

SEQ ID NO: 4074922 - RNA, 13 nt, Vaccinia virus
cuacuauagaauu

SEQ ID NO: 4074923 - RNA, 20 nt, Vaccinia virus
cuacucuauagcgcuuuagu

SEQ ID NO: 4074924 - RNA, 16 nt, Vaccinia virus
cuacugcaucacugac

SEQ ID NO: 4074925 - RNA, 19 nt, Vaccinia virus
cuagaaaacgaaaacaucc

SEQ ID NO: 4074926 - RNA, 18 nt, Vaccinia virus
cuagaauacucauuuucu

SEQ ID NO: 4074927 - RNA, 19 nt, Vaccinia virus
cuagaauuagaauuacaaa

SEQ ID NO: 4074928 - RNA, 21 nt, Vaccinia virus
cuagaccgaugaccauuuaaa

SEQ ID NO: 4074929 - RNA, 24 nt, Vaccinia virus
cuagacgauuaguaauauaucuca

SEQ ID NO: 4074930 - RNA, 20 nt, Vaccinia virus
cuagauagaguauuaaauau

SEQ ID NO: 4074931 - RNA, 16 nt, Vaccinia virus
cuagauggaaauauug

SEQ ID NO: 4074932 - RNA, 17 nt, Vaccinia virus
cuagauuccaaucauug

SEQ ID NO: 4074933 - RNA, 16 nt, Vaccinia virus
cuagcgauuaugaaaa

SEQ ID NO: 4074934 - RNA, 18 nt, Vaccinia virus
cuagcguuauaacaaaau

SEQ ID NO: 4074935 - RNA, 16 nt, Vaccinia virus
cuaggugcuauggaug

SEQ ID NO: 4074936 - RNA, 14 nt, Vaccinia virus
cuaguagaaaagau

SEQ ID NO: 4074937 - RNA, 17 nt, Vaccinia virus
cuaguagcgaaaacuau

SEQ ID NO: 4074938 - RNA, 16 nt, Vaccinia virus
cuaguaucuuuuguuc

SEQ ID NO: 4074939 - RNA, 20 nt, Vaccinia virus
cuagucauaauaucuuuaau

SEQ ID NO: 4074940 - RNA, 14 nt, Vaccinia virus
cuagucuuaaaugg

SEQ ID NO: 4074941 - RNA, 14 nt, Vaccinia virus
cuaguucugagaaa

SEQ ID NO: 4074942 - RNA, 13 nt, Vaccinia virus
cuaguuguagaau

SEQ ID NO: 4074943 - RNA, 13 nt, Vaccinia virus
cuaguuguuuaug

SEQ ID NO: 4074944 - RNA, 20 nt, Vaccinia virus
cuauaaaacgauuaaacaau

SEQ ID NO: 4074945 - RNA, 21 nt, Vaccinia virus
cuauaaaauuguauauucaga

SEQ ID NO: 4074946 - RNA, 22 nt, Vaccinia virus
cuauaaacgaugguuuaauuug

SEQ ID NO: 4074947 - RNA, 12 nt, Vaccinia virus
cuauaacuucua

SEQ ID NO: 4074948 - RNA, 17 nt, Vaccinia virus
cuauaauaauaaaugua

SEQ ID NO: 4074949 - RNA, 23 nt, Vaccinia virus
cuauaccauauccuccuguagau

SEQ ID NO: 4074950 - RNA, 16 nt, Vaccinia virus
cuauaccauuaucuau

SEQ ID NO: 4074951 - RNA, 16 nt, Vaccinia virus
cuauacgaugaauaca

SEQ ID NO: 4074952 - RNA, 14 nt, Vaccinia virus
cuauagaaacaccu

SEQ ID NO: 4074953 - RNA, 18 nt, Vaccinia virus
cuauagaaauuauuuuua

SEQ ID NO: 4074954 - RNA, 14 nt, Vaccinia virus
cuauagacauaaua

SEQ ID NO: 4074955 - RNA, 19 nt, Vaccinia virus
cuauagaccaaacugcaaa

SEQ ID NO: 4074956 - RNA, 22 nt, Vaccinia virus
cuauagaguagacauuaauaga

SEQ ID NO: 4074957 - RNA, 19 nt, Vaccinia virus
cuauauaauucuauuagau

SEQ ID NO: 4074958 - RNA, 21 nt, Vaccinia virus
cuauauacaacgaaacaucua

SEQ ID NO: 4074959 - RNA, 13 nt, Vaccinia virus
cuauauagauauu

SEQ ID NO: 4074960 - RNA, 21 nt, Vaccinia virus
cuauauaucgucucauagaga

SEQ ID NO: 4074961 - RNA, 13 nt, Vaccinia virus
cuauauauguuuu

SEQ ID NO: 4074962 - RNA, 18 nt, Vaccinia virus
cuauaucgcuaaaauuuu

SEQ ID NO: 4074963 - RNA, 16 nt, Vaccinia virus
cuauaucuaacaucuu

SEQ ID NO: 4074964 - RNA, 20 nt, Vaccinia virus
cuauaucuauguuuuuagau

SEQ ID NO: 4074965 - RNA, 14 nt, Vaccinia virus
cuauauuauguuuu

SEQ ID NO: 4074966 - RNA, 22 nt, Vaccinia virus
cuaucaaauucggaucguaaau

SEQ ID NO: 4074967 - RNA, 21 nt, Vaccinia virus
cuaucaaccgcauaauacaau

SEQ ID NO: 4074968 - RNA, 18 nt, Vaccinia virus
cuaucauuaccucaugaa

SEQ ID NO: 4074969 - RNA, 15 nt, Vaccinia virus
cuaucuauauguuuu

SEQ ID NO: 4074970 - RNA, 16 nt, Vaccinia virus
cuaucuucaucauauu

SEQ ID NO: 4074971 - RNA, 13 nt, Vaccinia virus
cuaugauauuguu

SEQ ID NO: 4074972 - RNA, 20 nt, Vaccinia virus
cuaugcaaagaauuuggaau

SEQ ID NO: 4074973 - RNA, 21 nt, Vaccinia virus
cuaugcauauuauuaaucauu

SEQ ID NO: 4074974 - RNA, 23 nt, Vaccinia virus
cuaugguauugauaaaauuaaug

SEQ ID NO: 4074975 - RNA, 22 nt, Vaccinia virus
cuauguauucagaauuaauaga

SEQ ID NO: 4074976 - RNA, 15 nt, Vaccinia virus
cuauguuuuuaauga

SEQ ID NO: 4074977 - RNA, 15 nt, Vaccinia virus
cuauuaaagauggag

SEQ ID NO: 4074978 - RNA, 19 nt, Vaccinia virus
cuauuaaugacacuaguua

SEQ ID NO: 4074979 - RNA, 17 nt, Vaccinia virus
cuauuacugacuuuaau

SEQ ID NO: 4074980 - RNA, 23 nt, Vaccinia virus
cuauuagaguauugcauuuugau

SEQ ID NO: 4074981 - RNA, 21 nt, Vaccinia virus
cuauuccaucaaacuguauag

SEQ ID NO: 4074982 - RNA, 22 nt, Vaccinia virus
cuauuccuggugcuauuuugau

SEQ ID NO: 4074983 - RNA, 22 nt, Vaccinia virus
cuauuuguaauauuuagacaua

SEQ ID NO: 4074984 - RNA, 22 nt, Vaccinia virus
cucaaagagaauuauauauuua

SEQ ID NO: 4074985 - RNA, 19 nt, Vaccinia virus
cucaaaugggaaacaaucu

SEQ ID NO: 4074986 - RNA, 23 nt, Vaccinia virus
cucaaauguaguguuggauaucu

SEQ ID NO: 4074987 - RNA, 16 nt, Vaccinia virus
cucaacauaaauaauu

SEQ ID NO: 4074988 - RNA, 15 nt, Vaccinia virus
cucaacgcgauaucu

SEQ ID NO: 4074989 - RNA, 18 nt, Vaccinia virus
cucaauaaaaaaauuaau

SEQ ID NO: 4074990 - RNA, 14 nt, Vaccinia virus
cucaauaagaugac

SEQ ID NO: 4074991 - RNA, 15 nt, Vaccinia virus
cucaauucaggaaca

SEQ ID NO: 4074992 - RNA, 18 nt, Vaccinia virus
cucaccauuucgacaucu

SEQ ID NO: 4074993 - RNA, 12 nt, Vaccinia virus
cucacuucucuu

SEQ ID NO: 4074994 - RNA, 19 nt, Vaccinia virus
cucagaauucuaaaugaug

SEQ ID NO: 4074995 - RNA, 19 nt, Vaccinia virus
cucagauuaaauccaucuc

SEQ ID NO: 4074996 - RNA, 19 nt, Vaccinia virus
cucaguaaauguaucgugu

SEQ ID NO: 4074997 - RNA, 19 nt, Vaccinia virus
cucauaaguguauauaucu

SEQ ID NO: 4074998 - RNA, 15 nt, Vaccinia virus
cucauaguaucgauu

SEQ ID NO: 4074999 - RNA, 23 nt, Vaccinia virus
cucauauggaucuccaucgauga

SEQ ID NO: 4075000 - RNA, 18 nt, Vaccinia virus
cucaucggaucuguaaaa

SEQ ID NO: 4075001 - RNA, 15 nt, Vaccinia virus
gagacggauacuguc

SEQ ID NO: 4075002 - RNA, 21 nt, Vaccinia virus
gagacguaacaauguagcgca

SEQ ID NO: 4075003 - RNA, 23 nt, Vaccinia virus
gagacuuguuaguuaaaaugaua

SEQ ID NO: 4075004 - RNA, 13 nt, Vaccinia virus
gagagagaaauac

SEQ ID NO: 4075005 - RNA, 13 nt, Vaccinia virus
gagaguagauauc

SEQ ID NO: 4075006 - RNA, 17 nt, Vaccinia virus
gagauacuaacacauuu

SEQ ID NO: 4075007 - RNA, 20 nt, Vaccinia virus
gagaucauuaaauguuucau

SEQ ID NO: 4075008 - RNA, 22 nt, Vaccinia virus
gagaucuacuggcgaaauggua

SEQ ID NO: 4075009 - RNA, 15 nt, Vaccinia virus
gagauguuucauaau

SEQ ID NO: 4075010 - RNA, 20 nt, Vaccinia virus
gagauuggguuaauaaauac

SEQ ID NO: 4075011 - RNA, 15 nt, Vaccinia virus
gagcaaguagaaaac

SEQ ID NO: 4075012 - RNA, 22 nt, Vaccinia virus
gagcaauucccaagauuucauc

SEQ ID NO: 4075013 - RNA, 17 nt, Vaccinia virus
gagcacuauuucuaaau

SEQ ID NO: 4075014 - RNA, 19 nt, Vaccinia virus
gaggaaaucguauaaauac

SEQ ID NO: 4075015 - RNA, 15 nt, Vaccinia virus
gaggauguuaaacaa

SEQ ID NO: 4075016 - RNA, 17 nt, Vaccinia virus
gaggcuaaaacacauuu

SEQ ID NO: 4075017 - RNA, 15 nt, Vaccinia virus
gagguagcaaaaaga

SEQ ID NO: 4075018 - RNA, 18 nt, Vaccinia virus
gaguaacagucgaacaau

SEQ ID NO: 4075019 - RNA, 18 nt, Vaccinia virus
gaguaguacaagaaauau

SEQ ID NO: 4075020 - RNA, 14 nt, Vaccinia virus
gaguauauauuaag

SEQ ID NO: 4075021 - RNA, 19 nt, Vaccinia virus
gaguauuaaccaugaaaga

SEQ ID NO: 4075022 - RNA, 14 nt, Vaccinia virus
gagugguaaacaac

SEQ ID NO: 4075023 - RNA, 19 nt, Vaccinia virus
gaguuagauauuaauaaca

SEQ ID NO: 4075024 - RNA, 15 nt, Vaccinia virus
gaguucauuaaaaua

SEQ ID NO: 4075025 - RNA, 18 nt, Vaccinia virus
gaguuccauuacaaauau

SEQ ID NO: 4075026 - RNA, 16 nt, Vaccinia virus
gaguugauuguaaaua

SEQ ID NO: 4075027 - RNA, 12 nt, Vaccinia virus
gaguuuauacac

SEQ ID NO: 4075028 - RNA, 19 nt, Vaccinia virus
gaguuuuccguuagaaaag

SEQ ID NO: 4075029 - RNA, 17 nt, Vaccinia virus
gauaaaacgauaaaaga

SEQ ID NO: 4075030 - RNA, 22 nt, Vaccinia virus
gauaaaacguggaaagaaucua

SEQ ID NO: 4075031 - RNA, 18 nt, Vaccinia virus
gauaaacacucauauuau

SEQ ID NO: 4075032 - RNA, 16 nt, Vaccinia virus
gauaaagauauaugau

SEQ ID NO: 4075033 - RNA, 18 nt, Vaccinia virus
gauaaauaggaucaucua

SEQ ID NO: 4075034 - RNA, 22 nt, Vaccinia virus
gauaacuacaauauuucaucau

SEQ ID NO: 4075035 - RNA, 17 nt, Vaccinia virus
gauaacuagaaucagaa

SEQ ID NO: 4075036 - RNA, 18 nt, Vaccinia virus
gauaacuagauagaaaga

SEQ ID NO: 4075037 - RNA, 17 nt, Vaccinia virus
gauaacuauaaauggag

SEQ ID NO: 4075038 - RNA, 20 nt, Vaccinia virus
gauaagauauguuuauucau

SEQ ID NO: 4075039 - RNA, 23 nt, Vaccinia virus
gauaaggaguagcagauuuccua

SEQ ID NO: 4075040 - RNA, 16 nt, Vaccinia virus
gauaagguaaagugua

SEQ ID NO: 4075041 - RNA, 22 nt, Vaccinia virus
gauaauaaaaucacuaguauca

SEQ ID NO: 4075042 - RNA, 13 nt, Vaccinia virus
gauaauaaaucaa

SEQ ID NO: 4075043 - RNA, 21 nt, Vaccinia virus
gauaauaacagaguaccauca

SEQ ID NO: 4075044 - RNA, 20 nt, Vaccinia virus
gauaauacauuuucuuacaa

SEQ ID NO: 4075045 - RNA, 19 nt, Vaccinia virus
gauaauauuagacauauga

SEQ ID NO: 4075046 - RNA, 21 nt, Vaccinia virus
gauaauucgcgcaccaacaau

SEQ ID NO: 4075047 - RNA, 12 nt, Vaccinia virus
gauaauuuccau

SEQ ID NO: 4075048 - RNA, 22 nt, Vaccinia virus
gauaauuucuccagaacauuga

SEQ ID NO: 4075049 - RNA, 19 nt, Vaccinia virus
gauacaaaaucuaaacaaa

SEQ ID NO: 4075050 - RNA, 16 nt, Vaccinia virus
gauacagauacagaua

SEQ ID NO: 4075051 - RNA, 20 nt, Vaccinia virus
gauacagauuaauuuccaca

SEQ ID NO: 4075052 - RNA, 17 nt, Vaccinia virus
gauaccguuacauuuga

SEQ ID NO: 4075053 - RNA, 19 nt, Vaccinia virus
gauaccuuuguuauuuauu

SEQ ID NO: 4075054 - RNA, 19 nt, Vaccinia virus
gauacuaauuguagcuauu

SEQ ID NO: 4075055 - RNA, 19 nt, Vaccinia virus
gauacuagaguaguauauu

SEQ ID NO: 4075056 - RNA, 17 nt, Vaccinia virus
gauacuauccaguaaac

SEQ ID NO: 4075057 - RNA, 17 nt, Vaccinia virus
gauagacgcaaauuaga

SEQ ID NO: 4075058 - RNA, 18 nt, Vaccinia virus
gauaguaauuucacgaau

SEQ ID NO: 4075059 - RNA, 22 nt, Vaccinia virus
gauagucguucucguucagaau

SEQ ID NO: 4075060 - RNA, 23 nt, Vaccinia virus
gauauaauucguggauaaucauu

SEQ ID NO: 4075061 - RNA, 22 nt, Vaccinia virus
gauauacgcuaucuauauccug

SEQ ID NO: 4075062 - RNA, 20 nt, Vaccinia virus
gauauaguauauuccaguuc

SEQ ID NO: 4075063 - RNA, 21 nt, Vaccinia virus
gauauauaguaaugaagagag

SEQ ID NO: 4075064 - RNA, 22 nt, Vaccinia virus
gauauauuguuucauaauugcu

SEQ ID NO: 4075065 - RNA, 18 nt, Vaccinia virus
gauauauuuuucauaaau

SEQ ID NO: 4075066 - RNA, 22 nt, Vaccinia virus
gauauuaacgcguuuuaugaau

SEQ ID NO: 4075067 - RNA, 12 nt, Vaccinia virus
gauauuuucuau

SEQ ID NO: 4075068 - RNA, 23 nt, Vaccinia virus
gauauuuucuuucuaucauggau

SEQ ID NO: 4075069 - RNA, 13 nt, Vaccinia virus
gaucaaauacuug

SEQ ID NO: 4075070 - RNA, 17 nt, Vaccinia virus
gaucaacggauaaucug

SEQ ID NO: 4075071 - RNA, 19 nt, Vaccinia virus
gaucaacggauaaucugaa

SEQ ID NO: 4075072 - RNA, 15 nt, Vaccinia virus
gaucacacauuauga

SEQ ID NO: 4075073 - RNA, 19 nt, Vaccinia virus
gaucacauuuagauaaaaa

SEQ ID NO: 4075074 - RNA, 21 nt, Vaccinia virus
gaucauagaacagaccaaaua

SEQ ID NO: 4075075 - RNA, 14 nt, Vaccinia virus
gaucauucuuuuag

SEQ ID NO: 4075076 - RNA, 17 nt, Vaccinia virus
gaucauuuugauauugu

SEQ ID NO: 4075077 - RNA, 20 nt, Vaccinia virus
gauccacaaaacguauauag

SEQ ID NO: 4075078 - RNA, 18 nt, Vaccinia virus
gauccugcauagaaauau

SEQ ID NO: 4075079 - RNA, 13 nt, Vaccinia virus
gaucguuaaugaa

SEQ ID NO: 4075080 - RNA, 15 nt, Vaccinia virus
gaucuaaaaauuaaa

SEQ ID NO: 4075081 - RNA, 18 nt, Vaccinia virus
gaucuaauggaauccaau

SEQ ID NO: 4075082 - RNA, 21 nt, Vaccinia virus
gaucuagcaaaggaaauugug

SEQ ID NO: 4075083 - RNA, 20 nt, Vaccinia virus
gaucuauguaguuuuaaaac

SEQ ID NO: 4075084 - RNA, 21 nt, Vaccinia virus
gaucuauuagaaaauucucuu

SEQ ID NO: 4075085 - RNA, 15 nt, Vaccinia virus
gaucuccaacaaauu

SEQ ID NO: 4075086 - RNA, 23 nt, Vaccinia virus
gaucuccucuauuuguacuaucu

SEQ ID NO: 4075087 - RNA, 20 nt, Vaccinia virus
gaucucgagaaauaauaaga

SEQ ID NO: 4075088 - RNA, 21 nt, Vaccinia virus
gaugacaauauuauuaugaag

SEQ ID NO: 4075089 - RNA, 17 nt, Vaccinia virus
gaugacuccaucuuuua

SEQ ID NO: 4075090 - RNA, 19 nt, Vaccinia virus
gaugacuuuaguaaaucau

SEQ ID NO: 4075091 - RNA, 17 nt, Vaccinia virus
gaugagaacagaagcgu

SEQ ID NO: 4075092 - RNA, 18 nt, Vaccinia virus
gaugagcauaaacauaau

SEQ ID NO: 4075093 - RNA, 13 nt, Vaccinia virus
gaugaguauauau

SEQ ID NO: 4075094 - RNA, 14 nt, Vaccinia virus
gaugauaauuuaua

SEQ ID NO: 4075095 - RNA, 16 nt, Vaccinia virus
gaugauacauuucauc

SEQ ID NO: 4075096 - RNA, 15 nt, Vaccinia virus
gaugauauagauaug

SEQ ID NO: 4075097 - RNA, 21 nt, Vaccinia virus
gaugauccuuugagaagacaa

SEQ ID NO: 4075098 - RNA, 17 nt, Vaccinia virus
gaugaucugaauuauau

SEQ ID NO: 4075099 - RNA, 16 nt, Vaccinia virus
gaugaugucauucaca

SEQ ID NO: 4075100 - RNA, 18 nt, Vaccinia virus
gaugccaucauagauaua

SEQ ID NO: 4075101 - RNA, 23 nt, Vaccinia virus
gaugccgccaucguugauuacaa

SEQ ID NO: 4075102 - RNA, 18 nt, Vaccinia virus
gaugccgguaaauguuuu

SEQ ID NO: 4075103 - RNA, 23 nt, Vaccinia virus
gaugcuauccaucagaauguuuc

SEQ ID NO: 4075104 - RNA, 15 nt, Vaccinia virus
gaugcuauguuuaua

SEQ ID NO: 4075105 - RNA, 16 nt, Vaccinia virus
gaugcugcaugaugaa

SEQ ID NO: 4075106 - RNA, 20 nt, Vaccinia virus
gauggaaaguguaaagacaa

SEQ ID NO: 4075107 - RNA, 23 nt, Vaccinia virus
gauggugccaccguaguguauau

SEQ ID NO: 4075108 - RNA, 18 nt, Vaccinia virus
gauguaauuaaauguuug

SEQ ID NO: 4075109 - RNA, 20 nt, Vaccinia virus
gauguauaauuuuuuuaguu

SEQ ID NO: 4075110 - RNA, 22 nt, Vaccinia virus
gaugucauauaggaaacuauaa

SEQ ID NO: 4075111 - RNA, 12 nt, Vaccinia virus
gaugucaugaac

SEQ ID NO: 4075112 - RNA, 17 nt, Vaccinia virus
gaugugucuacauaaau

SEQ ID NO: 4075113 - RNA, 13 nt, Vaccinia virus
gauguuguaauau

SEQ ID NO: 4075114 - RNA, 19 nt, Vaccinia virus
gauuaaaaauaaaguuauc

SEQ ID NO: 4075115 - RNA, 22 nt, Vaccinia virus
gauuaaacuuuaaugauugcau

SEQ ID NO: 4075116 - RNA, 14 nt, Vaccinia virus
gauuaauaauucau

SEQ ID NO: 4075117 - RNA, 15 nt, Vaccinia virus
gauuaauuagauaua

SEQ ID NO: 4075118 - RNA, 21 nt, Vaccinia virus
gauuacaucucugaacuauau

SEQ ID NO: 4075119 - RNA, 21 nt, Vaccinia virus
gauuagaaaauauaaauuaau

SEQ ID NO: 4075120 - RNA, 22 nt, Vaccinia virus
gauuagcacgccggaaaaauaa

SEQ ID NO: 4075121 - RNA, 22 nt, Vaccinia virus
gauuaucguuuucaucuuuuau

SEQ ID NO: 4075122 - RNA, 17 nt, Vaccinia virus
gauuauguuuuaugaau

SEQ ID NO: 4075123 - RNA, 13 nt, Vaccinia virus
ucguuuacaaaau

SEQ ID NO: 4075124 - RNA, 19 nt, Vaccinia virus
ucguuuccucuguacacau

SEQ ID NO: 4075125 - RNA, 13 nt, Vaccinia virus
ucuaaaauguaua

SEQ ID NO: 4075126 - RNA, 10 nt, Vaccinia virus
ucuaaacaaa

SEQ ID NO: 4075127 - RNA, 18 nt, Vaccinia virus
ucuaaaccuucuuauucu

SEQ ID NO: 4075128 - RNA, 22 nt, Vaccinia virus
ucuaaagaaaaaugauuaucuu

SEQ ID NO: 4075129 - RNA, 16 nt, Vaccinia virus
ucuaaagagauuuaga

SEQ ID NO: 4075130 - RNA, 14 nt, Vaccinia virus
ucuaaauacaaaau

SEQ ID NO: 4075131 - RNA, 23 nt, Vaccinia virus
ucuaaauguggcuacaaacuuuu

SEQ ID NO: 4075132 - RNA, 14 nt, Vaccinia virus
ucuaacaucaucau

SEQ ID NO: 4075133 - RNA, 22 nt, Vaccinia virus
ucuaaccuuucccauugaucau

SEQ ID NO: 4075134 - RNA, 16 nt, Vaccinia virus
ucuaagauuauuuuaa

SEQ ID NO: 4075135 - RNA, 13 nt, Vaccinia virus
ucuaauauacuuu

SEQ ID NO: 4075136 - RNA, 17 nt, Vaccinia virus
ucuaaucacuuuaacuu

SEQ ID NO: 4075137 - RNA, 22 nt, Vaccinia virus
ucuaauccuccuauuacauaua

SEQ ID NO: 4075138 - RNA, 19 nt, Vaccinia virus
ucuaaugugauucucugaa

SEQ ID NO: 4075139 - RNA, 17 nt, Vaccinia virus
ucuaauuaguuuuucuu

SEQ ID NO: 4075140 - RNA, 20 nt, Vaccinia virus
ucuaauugggacauuauguu

SEQ ID NO: 4075141 - RNA, 16 nt, Vaccinia virus
ucuacaagaauuuugg

SEQ ID NO: 4075142 - RNA, 19 nt, Vaccinia virus
ucuacauaaucuacgauau

SEQ ID NO: 4075143 - RNA, 14 nt, Vaccinia virus
ucuacaugaaauag

SEQ ID NO: 4075144 - RNA, 23 nt, Vaccinia virus
ucuaccacagcagaaucccauga

SEQ ID NO: 4075145 - RNA, 20 nt, Vaccinia virus
ucuacuaggcugacacuaug

SEQ ID NO: 4075146 - RNA, 12 nt, Vaccinia virus
ucuacuuuuguc

SEQ ID NO: 4075147 - RNA, 15 nt, Vaccinia virus
ucuagagauuguacu

SEQ ID NO: 4075148 - RNA, 14 nt, Vaccinia virus
ucuagauagaguau

SEQ ID NO: 4075149 - RNA, 23 nt, Vaccinia virus
ucuagcuuauugaguggaaaguu

SEQ ID NO: 4075150 - RNA, 19 nt, Vaccinia virus
ucuaguauccauuuuacau

SEQ ID NO: 4075151 - RNA, 18 nt, Vaccinia virus
ucuaguuaucauguagua

SEQ ID NO: 4075152 - RNA, 23 nt, Vaccinia virus
ucuaguuuuauuuuuuuguacgu

SEQ ID NO: 4075153 - RNA, 17 nt, Vaccinia virus
ucuauaaacauaaguau

SEQ ID NO: 4075154 - RNA, 18 nt, Vaccinia virus
ucuauaauauaauaauca

SEQ ID NO: 4075155 - RNA, 16 nt, Vaccinia virus
ucuauacguuucuauu

SEQ ID NO: 4075156 - RNA, 19 nt, Vaccinia virus
ucuauacugucuguaacuc

SEQ ID NO: 4075157 - RNA, 22 nt, Vaccinia virus
ucuauagcgcuuuaguuccuua

SEQ ID NO: 4075158 - RNA, 22 nt, Vaccinia virus
ucuauaggugaugcugguucug

SEQ ID NO: 4075159 - RNA, 19 nt, Vaccinia virus
ucuauaguuuguuuucauu

SEQ ID NO: 4075160 - RNA, 17 nt, Vaccinia virus
ucuauauagauggagua

SEQ ID NO: 4075161 - RNA, 15 nt, Vaccinia virus
ucuauaucuucuuuu

SEQ ID NO: 4075162 - RNA, 23 nt, Vaccinia virus
ucuauauucccgauuuuguagua

SEQ ID NO: 4075163 - RNA, 14 nt, Vaccinia virus
ucuaucauagauuu

SEQ ID NO: 4075164 - RNA, 15 nt, Vaccinia virus
ucuaucauggauaau

SEQ ID NO: 4075165 - RNA, 18 nt, Vaccinia virus
ucuaucauggcaauaaca

SEQ ID NO: 4075166 - RNA, 20 nt, Vaccinia virus
ucuauccauuguuucacauu

SEQ ID NO: 4075167 - RNA, 23 nt, Vaccinia virus
ucuauccuuuuccggaagcaaug

SEQ ID NO: 4075168 - RNA, 15 nt, Vaccinia virus
ucuaucgacaucaga

SEQ ID NO: 4075169 - RNA, 13 nt, Vaccinia virus
ucuaucucaaaau

SEQ ID NO: 4075170 - RNA, 22 nt, Vaccinia virus
ucuaucuccaguauuuacauua

SEQ ID NO: 4075171 - RNA, 16 nt, Vaccinia virus
ucuaucuuuagaguau

SEQ ID NO: 4075172 - RNA, 18 nt, Vaccinia virus
ucuaucuuuaguaguguu

SEQ ID NO: 4075173 - RNA, 18 nt, Vaccinia virus
ucuaucuuuguagaguau

SEQ ID NO: 4075174 - RNA, 18 nt, Vaccinia virus
ucuauguugacauguaua

SEQ ID NO: 4075175 - RNA, 19 nt, Vaccinia virus
ucuauguugacauguauau

SEQ ID NO: 4075176 - RNA, 18 nt, Vaccinia virus
ucuauuaagaguaacagc

SEQ ID NO: 4075177 - RNA, 21 nt, Vaccinia virus
ucuauuacaccaccuccuaua

SEQ ID NO: 4075178 - RNA, 20 nt, Vaccinia virus
ucuauuaguaugguuucaua

SEQ ID NO: 4075179 - RNA, 21 nt, Vaccinia virus
ucuauucgaaaacucuaagaa

SEQ ID NO: 4075180 - RNA, 17 nt, Vaccinia virus
ucuauugccauuaguuu

SEQ ID NO: 4075181 - RNA, 12 nt, Vaccinia virus
ucuauuuggauu

SEQ ID NO: 4075182 - RNA, 18 nt, Vaccinia virus
ucuauuuuaucauuuucc

SEQ ID NO: 4075183 - RNA, 17 nt, Vaccinia virus
ucuauuuugucauuaac

SEQ ID NO: 4075184 - RNA, 22 nt, Vaccinia virus
ucucaaagauguuaugguugaa

SEQ ID NO: 4075185 - RNA, 18 nt, Vaccinia virus
ucucaacaaguucucaau

SEQ ID NO: 4075186 - RNA, 15 nt, Vaccinia virus
ucucaauacaaccaa

SEQ ID NO: 4075187 - RNA, 16 nt, Vaccinia virus
ucucaauaguuucaua

SEQ ID NO: 4075188 - RNA, 18 nt, Vaccinia virus
ucucacaaaaaaaguuuu

SEQ ID NO: 4075189 - RNA, 16 nt, Vaccinia virus
ucucacugaauacgag

SEQ ID NO: 4075190 - RNA, 21 nt, Vaccinia virus
ucucauaauaaacuagaguau

SEQ ID NO: 4075191 - RNA, 16 nt, Vaccinia virus
ucucauaauaaauuuu

SEQ ID NO: 4075192 - RNA, 23 nt, Vaccinia virus
ucucaucaucagaauaaaucaau

SEQ ID NO: 4075193 - RNA, 23 nt, Vaccinia virus
ucucaugagaauggaaaggaaac

SEQ ID NO: 4075194 - RNA, 13 nt, Vaccinia virus
ucucauguucuua

SEQ ID NO: 4075195 - RNA, 15 nt, Vaccinia virus
ucucauuuucuuuaa

SEQ ID NO: 4075196 - RNA, 15 nt, Vaccinia virus
ucuccaccaaacaua

SEQ ID NO: 4075197 - RNA, 18 nt, Vaccinia virus
ucuccauagagaaauuag

SEQ ID NO: 4075198 - RNA, 20 nt, Vaccinia virus
ucuccgcaauacauuucuca

SEQ ID NO: 4075199 - RNA, 13 nt, Vaccinia virus
ucuccuuucucuu

SEQ ID NO: 4075200 - RNA, 15 nt, Vaccinia virus
ucucgaugaaaauaa

SEQ ID NO: 4075201 - RNA, 16 nt, Vaccinia virus
ucucggacauuucagc

SEQ ID NO: 4075202 - RNA, 17 nt, Vaccinia virus
ucucguauacucugccc

SEQ ID NO: 4075203 - RNA, 19 nt, Vaccinia virus
ucucguauccacaaauagu

SEQ ID NO: 4075204 - RNA, 19 nt, Vaccinia virus
ucucuaaauaccucauaaa

SEQ ID NO: 4075205 - RNA, 20 nt, Vaccinia virus
ucucuauccaaggauguaau

SEQ ID NO: 4075206 - RNA, 17 nt, Vaccinia virus
ucucucagguacagauu

SEQ ID NO: 4075207 - RNA, 17 nt, Vaccinia virus
ucucucaucuaucaaaa

SEQ ID NO: 4075208 - RNA, 19 nt, Vaccinia virus
ucucuccaguuuuaguauu

SEQ ID NO: 4075209 - RNA, 15 nt, Vaccinia virus
ucucugacauucaga

SEQ ID NO: 4075210 - RNA, 18 nt, Vaccinia virus
ucucuuaguaaguuuauu

SEQ ID NO: 4075211 - RNA, 12 nt, Vaccinia virus
ucucuuaguguu

SEQ ID NO: 4075212 - RNA, 15 nt, Vaccinia virus
ucucuucaacaucuu

SEQ ID NO: 4075213 - RNA, 23 nt, Vaccinia virus
ucugaaauaacguauuuaaacaa

SEQ ID NO: 4075214 - RNA, 22 nt, Vaccinia virus
ucugaaauccguagaaacaucu

SEQ ID NO: 4075215 - RNA, 19 nt, Vaccinia virus
ucugaaguaguuucuaaua

SEQ ID NO: 4075216 - RNA, 20 nt, Vaccinia virus
ucugaauuauauuuauuauu

SEQ ID NO: 4075217 - RNA, 22 nt, Vaccinia virus
ucugacacccaaaaacaaccga

SEQ ID NO: 4075218 - RNA, 13 nt, Vaccinia virus
ucugacauucaga

SEQ ID NO: 4075219 - RNA, 20 nt, Vaccinia virus
ucugacuggguuguaauguu

SEQ ID NO: 4075220 - RNA, 22 nt, Vaccinia virus
ucugagaaaaugucucucauaa

SEQ ID NO: 4075221 - RNA, 15 nt, Vaccinia virus
ucugauaaucucuaa

SEQ ID NO: 4075222 - RNA, 14 nt, Vaccinia virus
ucugauaauuuaga

SEQ ID NO: 4075223 - RNA, 18 nt, Vaccinia virus
ucugauuugaacaaugca

SEQ ID NO: 4075224 - RNA, 15 nt, Vaccinia virus
ucugcggauuuauaa

SEQ ID NO: 4075225 - RNA, 13 nt, Vaccinia virus
ucuggaauuaaaa

SEQ ID NO: 4075226 - RNA, 19 nt, Vaccinia virus
ucuggacauaauucaucua

SEQ ID NO: 4075227 - RNA, 18 nt, Vaccinia virus
ucugggaauaaaauacua

SEQ ID NO: 4075228 - RNA, 15 nt, Vaccinia virus
ucuguaaauagaauc

SEQ ID NO: 4075229 - RNA, 19 nt, Vaccinia virus
ucugugguaaguaccgaua

SEQ ID NO: 4075230 - RNA, 15 nt, Vaccinia virus
ucuguuaguuuccuu

SEQ ID NO: 4075231 - RNA, 16 nt, Vaccinia virus
ucuguuuuauuaaccg

SEQ ID NO: 4075232 - RNA, 14 nt, Vaccinia virus
ucuuaaaaaguuuc

SEQ ID NO: 4075233 - RNA, 13 nt, Vaccinia virus
ucuuaaaagguuu

SEQ ID NO: 4075234 - RNA, 12 nt, Vaccinia virus
ucuuaaccaaaa

SEQ ID NO: 4075235 - RNA, 18 nt, Vaccinia virus
ucuuaacuuacaaaaugu

SEQ ID NO: 4075236 - RNA, 16 nt, Vaccinia virus
ucuuaaucauauucuu

SEQ ID NO: 4075237 - RNA, 16 nt, Vaccinia virus
ucuuacauucuauaga

SEQ ID NO: 4075238 - RNA, 19 nt, Vaccinia virus
ucuuaccaucuucuuugau

SEQ ID NO: 4075239 - RNA, 19 nt, Vaccinia virus
ucuuaccauguccucaaau

SEQ ID NO: 4075240 - RNA, 23 nt, Vaccinia virus
ucuuaguaacucuaguaaaauaa

SEQ ID NO: 4075241 - RNA, 13 nt, Vaccinia virus
ucuuauagaugua

SEQ ID NO: 4075242 - RNA, 18 nt, Vaccinia virus
ucuuauauagauuucgaa

SEQ ID NO: 4075243 - RNA, 13 nt, Vaccinia virus
ucuuauucuuaaa

SEQ ID NO: 4075244 - RNA, 21 nt, Vaccinia virus
ucuucaaaguuucugaaauaa

SEQ ID NO: 4075245 - RNA, 21 nt, Vaccinia virus
ucuucaucuauaaaucaagau

SEQ ID NO: 4075246 - RNA, 15 nt, Vaccinia virus
uguccauauuuucca

SEQ ID NO: 4075247 - RNA, 18 nt, Vaccinia virus
ugucccuucaagaagaua

SEQ ID NO: 4075248 - RNA, 21 nt, Vaccinia virus
uguccuugcguuucucugaua

SEQ ID NO: 4075249 - RNA, 15 nt, Vaccinia virus
uguccuuuacaucau

SEQ ID NO: 4075250 - RNA, 12 nt, Vaccinia virus
ugucgguaaacg

SEQ ID NO: 4075251 - RNA, 21 nt, Vaccinia virus
ugucuacaaccgcuacauaau

SEQ ID NO: 4075252 - RNA, 19 nt, Vaccinia virus
ugucuagaauggcaaaucu

SEQ ID NO: 4075253 - RNA, 20 nt, Vaccinia virus
ugucuagcauucuagagcau

SEQ ID NO: 4075254 - RNA, 14 nt, Vaccinia virus
ugucuaguuucgua

SEQ ID NO: 4075255 - RNA, 13 nt, Vaccinia virus
ugucuauaucuuc

SEQ ID NO: 4075256 - RNA, 16 nt, Vaccinia virus
ugucuaucucuguaaa

SEQ ID NO: 4075257 - RNA, 18 nt, Vaccinia virus
ugucucagaaucaaauau

SEQ ID NO: 4075258 - RNA, 15 nt, Vaccinia virus
ugucugacugaauac

SEQ ID NO: 4075259 - RNA, 23 nt, Vaccinia virus
ugucuuggaaucaauuacagauu

SEQ ID NO: 4075260 - RNA, 17 nt, Vaccinia virus
ugugaagguuuagaugu

SEQ ID NO: 4075261 - RNA, 23 nt, Vaccinia virus
ugugauacgauuaugacacuauu

SEQ ID NO: 4075262 - RNA, 13 nt, Vaccinia virus
ugugauaugaaca

SEQ ID NO: 4075263 - RNA, 15 nt, Vaccinia virus
ugugcuuaauuauuu

SEQ ID NO: 4075264 - RNA, 15 nt, Vaccinia virus
uguguaaaauaucag

SEQ ID NO: 4075265 - RNA, 16 nt, Vaccinia virus
uguguaugaaaugcuu

SEQ ID NO: 4075266 - RNA, 23 nt, Vaccinia virus
ugugucuacaaccgcuacauaau

SEQ ID NO: 4075267 - RNA, 14 nt, Vaccinia virus
ugugucuacauaaa

SEQ ID NO: 4075268 - RNA, 13 nt, Vaccinia virus
uguguuuacagua

SEQ ID NO: 4075269 - RNA, 23 nt, Vaccinia virus
uguuaaaugaucggaucuaaaau

SEQ ID NO: 4075270 - RNA, 13 nt, Vaccinia virus
uguuaauguauua

SEQ ID NO: 4075271 - RNA, 18 nt, Vaccinia virus
uguuacaaaaguuaauaa

SEQ ID NO: 4075272 - RNA, 23 nt, Vaccinia virus
uguuacucaguugaacagaugau

SEQ ID NO: 4075273 - RNA, 23 nt, Vaccinia virus
uguuagauauagaagauaaacau

SEQ ID NO: 4075274 - RNA, 17 nt, Vaccinia virus
uguuauaagauuacuua

SEQ ID NO: 4075275 - RNA, 15 nt, Vaccinia virus
uguuauaaguuuuua

SEQ ID NO: 4075276 - RNA, 22 nt, Vaccinia virus
uguuauacacggucuagagcau

SEQ ID NO: 4075277 - RNA, 21 nt, Vaccinia virus
uguuaugaaaccauacuaaua

SEQ ID NO: 4075278 - RNA, 16 nt, Vaccinia virus
uguuauuacuacugaa

SEQ ID NO: 4075279 - RNA, 14 nt, Vaccinia virus
uguuauuaucuguu

SEQ ID NO: 4075280 - RNA, 19 nt, Vaccinia virus
uguuauucuguucuauuca

SEQ ID NO: 4075281 - RNA, 23 nt, Vaccinia virus
uguuauuuuuucuguaauaguua

SEQ ID NO: 4075282 - RNA, 20 nt, Vaccinia virus
uguucacauccaccaaugau

SEQ ID NO: 4075283 - RNA, 13 nt, Vaccinia virus
uguucacauccuu

SEQ ID NO: 4075284 - RNA, 21 nt, Vaccinia virus
uguucauaauugcuuuucuaa

SEQ ID NO: 4075285 - RNA, 20 nt, Vaccinia virus
uguucccgucaauagagcaa

SEQ ID NO: 4075286 - RNA, 13 nt, Vaccinia virus
uguucuacauauu

SEQ ID NO: 4075287 - RNA, 18 nt, Vaccinia virus
uguugugcuguuguacau

SEQ ID NO: 4075288 - RNA, 16 nt, Vaccinia virus
uguuguguacauguag

SEQ ID NO: 4075289 - RNA, 19 nt, Vaccinia virus
uguuuaacaaaguuauuca

SEQ ID NO: 4075290 - RNA, 13 nt, Vaccinia virus
uguuuaauacuua

SEQ ID NO: 4075291 - RNA, 15 nt, Vaccinia virus
uguuuaauuuucaca

SEQ ID NO: 4075292 - RNA, 18 nt, Vaccinia virus
uguuuacaguaguaauga

SEQ ID NO: 4075293 - RNA, 21 nt, Vaccinia virus
uguuuauacaauccaugauau

SEQ ID NO: 4075294 - RNA, 21 nt, Vaccinia virus
uguuucaucuaucauagauuu

SEQ ID NO: 4075295 - RNA, 13 nt, Vaccinia virus
uguuuccauccau

SEQ ID NO: 4075296 - RNA, 23 nt, Vaccinia virus
uguuuccuauaaucguuaaauuu

SEQ ID NO: 4075297 - RNA, 20 nt, Vaccinia virus
uguuucuaccggcauagugg

SEQ ID NO: 4075298 - RNA, 21 nt, Vaccinia virus
uguuucuacuccauaauacuc

SEQ ID NO: 4075299 - RNA, 14 nt, Vaccinia virus
uguuucuuuuagaa

SEQ ID NO: 4075300 - RNA, 23 nt, Vaccinia virus
uguuugaaaacagaaacaucaua

SEQ ID NO: 4075301 - RNA, 14 nt, Vaccinia virus
uguuugagaauuaa

SEQ ID NO: 4075302 - RNA, 19 nt, Vaccinia virus
uguuugcugcguguauaac

SEQ ID NO: 4075303 - RNA, 16 nt, Vaccinia virus
uguuugguauacuguu

SEQ ID NO: 4075304 - RNA, 18 nt, Vaccinia virus
uguuuuacaacuaucaua

SEQ ID NO: 4075305 - RNA, 17 nt, Vaccinia virus
uguuuuagugauaucaa

SEQ ID NO: 4075306 - RNA, 17 nt, Vaccinia virus
uguuuucaucaagauuu

SEQ ID NO: 4075307 - RNA, 22 nt, Vaccinia virus
uguuuugaauuucuuagucaua

SEQ ID NO: 4075308 - RNA, 21 nt, Vaccinia virus
uguuuuuaagcuguucaaaau

SEQ ID NO: 4075309 - RNA, 13 nt, Vaccinia virus
uguuuuucacuuu

SEQ ID NO: 4075310 - RNA, 13 nt, Vaccinia virus
uguuuuuguacau

SEQ ID NO: 4075311 - RNA, 14 nt, Vaccinia virus
uguuuuuuaucaua

SEQ ID NO: 4075312 - RNA, 16 nt, Vaccinia virus
uguuuuuucauuauuu

SEQ ID NO: 4075313 - RNA, 17 nt, Vaccinia virus
uuaaaaaaaaauacuuu

SEQ ID NO: 4075314 - RNA, 13 nt, Vaccinia virus
uuaaaaaaauuaa

SEQ ID NO: 4075315 - RNA, 11 nt, Vaccinia virus
uuaaaaaauuu

SEQ ID NO: 4075316 - RNA, 23 nt, Vaccinia virus
uuaaaaaguugacagaaccuugu

SEQ ID NO: 4075317 - RNA, 21 nt, Vaccinia virus
uuaaaaauaagaaugaaauaa

SEQ ID NO: 4075318 - RNA, 13 nt, Vaccinia virus
uuaaaaauuuaga

SEQ ID NO: 4075319 - RNA, 11 nt, Vaccinia virus
uuaaaacauuc

SEQ ID NO: 4075320 - RNA, 15 nt, Vaccinia virus
uuaaaagauauuaau

SEQ ID NO: 4075321 - RNA, 20 nt, Vaccinia virus
uuaaaauaaaaaauauucuu

SEQ ID NO: 4075322 - RNA, 22 nt, Vaccinia virus
uuaaaauaaaaaauauucuuca

SEQ ID NO: 4075323 - RNA, 12 nt, Vaccinia virus
uuaaaauacuuu

SEQ ID NO: 4075324 - RNA, 16 nt, Vaccinia virus
uuaaaauauauuauca

SEQ ID NO: 4075325 - RNA, 23 nt, Vaccinia virus
uuaaaauauauuaucacuucagu

SEQ ID NO: 4075326 - RNA, 16 nt, Vaccinia virus
uuaaaaugauuauucc

SEQ ID NO: 4075327 - RNA, 23 nt, Vaccinia virus
uuaaacagaaauauaugagaugu

SEQ ID NO: 4075328 - RNA, 14 nt, Vaccinia virus
uuaaacauuguuca

SEQ ID NO: 4075329 - RNA, 16 nt, Vaccinia virus
uuaaacgaauaaaaga

SEQ ID NO: 4075330 - RNA, 22 nt, Vaccinia virus
uuaaacgaauuaaaauuauuua

SEQ ID NO: 4075331 - RNA, 19 nt, Vaccinia virus
uuaaacgauggauuuucca

SEQ ID NO: 4075332 - RNA, 17 nt, Vaccinia virus
uuaaacuguuuauuaau

SEQ ID NO: 4075333 - RNA, 19 nt, Vaccinia virus
uuaaacuucgcaauauuca

SEQ ID NO: 4075334 - RNA, 14 nt, Vaccinia virus
uuaaagaauguaua

SEQ ID NO: 4075335 - RNA, 21 nt, Vaccinia virus
uuaaagaugacaauauuauua

SEQ ID NO: 4075336 - RNA, 14 nt, Vaccinia virus
uuaaagauggagua

SEQ ID NO: 4075337 - RNA, 22 nt, Vaccinia virus
uuaaagcccauugaugcaaaua

SEQ ID NO: 4075338 - RNA, 15 nt, Vaccinia virus
uuaaaguauaucuua

SEQ ID NO: 4075339 - RNA, 14 nt, Vaccinia virus
uuaaaguuaaucau

SEQ ID NO: 4075340 - RNA, 15 nt, Vaccinia virus
uuaaaguuacaaaca

SEQ ID NO: 4075341 - RNA, 15 nt, Vaccinia virus
uuaaauaucugugaa

SEQ ID NO: 4075342 - RNA, 12 nt, Vaccinia virus
uuaaauauuaau

SEQ ID NO: 4075343 - RNA, 13 nt, Vaccinia virus
uuaaaucauuaaa

SEQ ID NO: 4075344 - RNA, 19 nt, Vaccinia virus
uuaaaucauuacuaauacu

SEQ ID NO: 4075345 - RNA, 18 nt, Vaccinia virus
uuaaauccaaacaucacu

SEQ ID NO: 4075346 - RNA, 17 nt, Vaccinia virus
uuaaauccuuguuugau

SEQ ID NO: 4075347 - RNA, 16 nt, Vaccinia virus
uuaaaugccuuauucu

SEQ ID NO: 4075348 - RNA, 21 nt, Vaccinia virus
uuaaaugccuuccaaaguuua

SEQ ID NO: 4075349 - RNA, 18 nt, Vaccinia virus
uuaaaugggucuaguuuu

SEQ ID NO: 4075350 - RNA, 13 nt, Vaccinia virus
uuaaauguuuucu

SEQ ID NO: 4075351 - RNA, 20 nt, Vaccinia virus
uuaaauuauccgcacaugca

SEQ ID NO: 4075352 - RNA, 16 nt, Vaccinia virus
uuaaauuauuauuaau

SEQ ID NO: 4075353 - RNA, 17 nt, Vaccinia virus
uuaaauuauuuaguuuu

SEQ ID NO: 4075354 - RNA, 23 nt, Vaccinia virus
uuaaauuuagagauaauauccug

SEQ ID NO: 4075355 - RNA, 19 nt, Vaccinia virus
uuaaauuucaguuuauguu

SEQ ID NO: 4075356 - RNA, 18 nt, Vaccinia virus
uuaaauuuuucaucuguu

SEQ ID NO: 4075357 - RNA, 16 nt, Vaccinia virus
uuaacaaaguuauuca

SEQ ID NO: 4075358 - RNA, 23 nt, Vaccinia virus
uuaacaaauucugcaauaucuuc

SEQ ID NO: 4075359 - RNA, 21 nt, Vaccinia virus
uuaacaauugucuguaaacca

SEQ ID NO: 4075360 - RNA, 15 nt, Vaccinia virus
uuaacacucauaaau

SEQ ID NO: 4075361 - RNA, 14 nt, Vaccinia virus
uuaacagauaaaaa

SEQ ID NO: 4075362 - RNA, 16 nt, Vaccinia virus
uuaacagauucacaaa

SEQ ID NO: 4075363 - RNA, 14 nt, Vaccinia virus
uuaacaucacuaau

SEQ ID NO: 4075364 - RNA, 17 nt, Vaccinia virus
uuaacaucuauuaauca

SEQ ID NO: 4075365 - RNA, 18 nt, Vaccinia virus
uuaacaucuauuaaucau

SEQ ID NO: 4075366 - RNA, 18 nt, Vaccinia virus
uuaacauuauuauauucu

SEQ ID NO: 4075367 - RNA, 17 nt, Vaccinia virus
uuaaccaacugauuaau

SEQ ID NO: 4075368 - RNA, 15 nt, Vaccinia virus
uuaaccuaacuaaaa

SEQ ID NO: 4075369 - RNA, 17 nt, Vaccinia virus
uuaacgaggacuuauuc

SEQ ID NO: 4075370 - RNA, 15 nt, Vaccinia virus
uugaucagaaugaau

SEQ ID NO: 4075371 - RNA, 18 nt, Vaccinia virus
uugaucaugcuguaauca

SEQ ID NO: 4075372 - RNA, 15 nt, Vaccinia virus
uugaucauguagaaa

SEQ ID NO: 4075373 - RNA, 15 nt, Vaccinia virus
uugaucuauguaguu

SEQ ID NO: 4075374 - RNA, 21 nt, Vaccinia virus
uugaugacgucaaacaauguu

SEQ ID NO: 4075375 - RNA, 21 nt, Vaccinia virus
uugauguaguacuuugaugau

SEQ ID NO: 4075376 - RNA, 12 nt, Vaccinia virus
uugauuuuggaa

SEQ ID NO: 4075377 - RNA, 20 nt, Vaccinia virus
uugcacaauccaaacuuuuu

SEQ ID NO: 4075378 - RNA, 15 nt, Vaccinia virus
uugcauccggaugau

SEQ ID NO: 4075379 - RNA, 14 nt, Vaccinia virus
uugcauuauagaau

SEQ ID NO: 4075380 - RNA, 22 nt, Vaccinia virus
uugccuccggagucauaaaagg

SEQ ID NO: 4075381 - RNA, 16 nt, Vaccinia virus
uugcgaaaugcucuaa

SEQ ID NO: 4075382 - RNA, 15 nt, Vaccinia virus
uugcgauauacauaa

SEQ ID NO: 4075383 - RNA, 15 nt, Vaccinia virus
uugcggcauauauaa

SEQ ID NO: 4075384 - RNA, 17 nt, Vaccinia virus
uugcguuucacaaacac

SEQ ID NO: 4075385 - RNA, 23 nt, Vaccinia virus
uuggaggcgaugaucuuaauuuu

SEQ ID NO: 4075386 - RNA, 14 nt, Vaccinia virus
uuggauauguggaa

SEQ ID NO: 4075387 - RNA, 14 nt, Vaccinia virus
uuggcaaauuauuu

SEQ ID NO: 4075388 - RNA, 14 nt, Vaccinia virus
uuggcuacauuuaa

SEQ ID NO: 4075389 - RNA, 17 nt, Vaccinia virus
uugguacagucuaguau

SEQ ID NO: 4075390 - RNA, 21 nt, Vaccinia virus
uuggucagaaauauuguauug

SEQ ID NO: 4075391 - RNA, 16 nt, Vaccinia virus
uugguggaauagauga

SEQ ID NO: 4075392 - RNA, 23 nt, Vaccinia virus
uugguguaauaaaaaaauuauuu

SEQ ID NO: 4075393 - RNA, 12 nt, Vaccinia virus
uugguuguauug

SEQ ID NO: 4075394 - RNA, 18 nt, Vaccinia virus
uuguaaagaaauuauuuu

SEQ ID NO: 4075395 - RNA, 12 nt, Vaccinia virus
uuguaaaugaca

SEQ ID NO: 4075396 - RNA, 15 nt, Vaccinia virus
uuguaagguuguaaa

SEQ ID NO: 4075397 - RNA, 12 nt, Vaccinia virus
uuguacaaaugg

SEQ ID NO: 4075398 - RNA, 22 nt, Vaccinia virus
uuguacacuucuauaguaucua

SEQ ID NO: 4075399 - RNA, 15 nt, Vaccinia virus
uuguacauguaauga

SEQ ID NO: 4075400 - RNA, 13 nt, Vaccinia virus
uuguacauuauua

SEQ ID NO: 4075401 - RNA, 17 nt, Vaccinia virus
uuguacuaucuagagau

SEQ ID NO: 4075402 - RNA, 17 nt, Vaccinia virus
uuguauagaaacuguau

SEQ ID NO: 4075403 - RNA, 16 nt, Vaccinia virus
uuguauauuuuauuuu

SEQ ID NO: 4075404 - RNA, 18 nt, Vaccinia virus
uuguaucaguuucagaau

SEQ ID NO: 4075405 - RNA, 17 nt, Vaccinia virus
uuguauccauacuguau

SEQ ID NO: 4075406 - RNA, 16 nt, Vaccinia virus
uuguauccuuaucuau

SEQ ID NO: 4075407 - RNA, 13 nt, Vaccinia virus
uuguauuauucug

SEQ ID NO: 4075408 - RNA, 16 nt, Vaccinia virus
uuguauuauucugaau

SEQ ID NO: 4075409 - RNA, 15 nt, Vaccinia virus
uuguccggcauauca

SEQ ID NO: 4075410 - RNA, 20 nt, Vaccinia virus
uugucgcuuauauugaugau

SEQ ID NO: 4075411 - RNA, 15 nt, Vaccinia virus
uugucuagaauauca

SEQ ID NO: 4075412 - RNA, 19 nt, Vaccinia virus
uugucucauggccguguau

SEQ ID NO: 4075413 - RNA, 16 nt, Vaccinia virus
uugugcuuaauuauuu

SEQ ID NO: 4075414 - RNA, 17 nt, Vaccinia virus
uugugggcaacugucua

SEQ ID NO: 4075415 - RNA, 19 nt, Vaccinia virus
uuguuaacgggcucguaaa

SEQ ID NO: 4075416 - RNA, 20 nt, Vaccinia virus
uuguucuauguaucuaaaau

SEQ ID NO: 4075417 - RNA, 23 nt, Vaccinia virus
uuguuuagcuauucguaacaaaa

SEQ ID NO: 4075418 - RNA, 14 nt, Vaccinia virus
uuguuuauauuaaa

SEQ ID NO: 4075419 - RNA, 16 nt, Vaccinia virus
uuuaaaaaguuaucuu

SEQ ID NO: 4075420 - RNA, 22 nt, Vaccinia virus
uuuaaacaagacggauauacag

SEQ ID NO: 4075421 - RNA, 22 nt, Vaccinia virus
uuuaaacuguccuauaaccucu

SEQ ID NO: 4075422 - RNA, 21 nt, Vaccinia virus
uuuaacgaggacuuauucaga

SEQ ID NO: 4075423 - RNA, 16 nt, Vaccinia virus
uuuaacgccuuccauu

SEQ ID NO: 4075424 - RNA, 21 nt, Vaccinia virus
uuuaacuucauccguuuccuu

SEQ ID NO: 4075425 - RNA, 22 nt, Vaccinia virus
uuuaagagaucaaagcaucaaa

SEQ ID NO: 4075426 - RNA, 14 nt, Vaccinia virus
uuuaagcuaguuau

SEQ ID NO: 4075427 - RNA, 16 nt, Vaccinia virus
uuuaauacuuauucau

SEQ ID NO: 4075428 - RNA, 20 nt, Vaccinia virus
uuuaauccgaauuucaaaau

SEQ ID NO: 4075429 - RNA, 16 nt, Vaccinia virus
uuuaaugugaaaucgu

SEQ ID NO: 4075430 - RNA, 17 nt, Vaccinia virus
uuuaauuggacagauau

SEQ ID NO: 4075431 - RNA, 19 nt, Vaccinia virus
uuuacaacacuuuucuauu

SEQ ID NO: 4075432 - RNA, 23 nt, Vaccinia virus
uuuacaucgacgagauuauuauu

SEQ ID NO: 4075433 - RNA, 13 nt, Vaccinia virus
uuuacauuauuua

SEQ ID NO: 4075434 - RNA, 18 nt, Vaccinia virus
uuuaccgaacaggcauuu

SEQ ID NO: 4075435 - RNA, 23 nt, Vaccinia virus
uuuacgguauagccucuagauaa

SEQ ID NO: 4075436 - RNA, 16 nt, Vaccinia virus
uuuacguuauuaauca

SEQ ID NO: 4075437 - RNA, 22 nt, Vaccinia virus
uuuacuguauauacuuagauau

SEQ ID NO: 4075438 - RNA, 18 nt, Vaccinia virus
uuuacuuuuucaucuuua

SEQ ID NO: 4075439 - RNA, 14 nt, Vaccinia virus
uuuagaaaaacuuu

SEQ ID NO: 4075440 - RNA, 19 nt, Vaccinia virus
uuuagaaaaaugcuaauau

SEQ ID NO: 4075441 - RNA, 19 nt, Vaccinia virus
uuuagacagugguuucaug

SEQ ID NO: 4075442 - RNA, 17 nt, Vaccinia virus
uuuagacgcuuauuauu

SEQ ID NO: 4075443 - RNA, 23 nt, Vaccinia virus
uuuagaucauuaacucuagaaau

SEQ ID NO: 4075444 - RNA, 14 nt, Vaccinia virus
uuuagauuuauuuu

SEQ ID NO: 4075445 - RNA, 22 nt, Vaccinia virus
uuuagcagucuaacauuuuuaa

SEQ ID NO: 4075446 - RNA, 17 nt, Vaccinia virus
uuuaguaggacuaguau

SEQ ID NO: 4075447 - RNA, 14 nt, Vaccinia virus
uuuaguauaaacag

SEQ ID NO: 4075448 - RNA, 15 nt, Vaccinia virus
uuuauaaaaacuuuu

SEQ ID NO: 4075449 - RNA, 15 nt, Vaccinia virus
uuuauaacgaaguag

SEQ ID NO: 4075450 - RNA, 16 nt, Vaccinia virus
uuuauaccuuguaauu

SEQ ID NO: 4075451 - RNA, 11 nt, Vaccinia virus
uuuauacuguu

SEQ ID NO: 4075452 - RNA, 11 nt, Vaccinia virus
uuuauauacau

SEQ ID NO: 4075453 - RNA, 14 nt, Vaccinia virus
uuuauccaaaaaga

SEQ ID NO: 4075454 - RNA, 13 nt, Vaccinia virus
uuuauccaaugau

SEQ ID NO: 4075455 - RNA, 17 nt, Vaccinia virus
uuuauccuauuauguaa

SEQ ID NO: 4075456 - RNA, 20 nt, Vaccinia virus
uuuaucgaccaagacacaua

SEQ ID NO: 4075457 - RNA, 15 nt, Vaccinia virus
uuuaucuauucauaa

SEQ ID NO: 4075458 - RNA, 20 nt, Vaccinia virus
uuuaugaugccgguaaaugu

SEQ ID NO: 4075459 - RNA, 22 nt, Vaccinia virus
uuuauuaaugucaggaaaugua

SEQ ID NO: 4075460 - RNA, 20 nt, Vaccinia virus
uuuauuaucuauagccaauu

SEQ ID NO: 4075461 - RNA, 15 nt, Vaccinia virus
uuuauuccaaucauu

SEQ ID NO: 4075462 - RNA, 22 nt, Vaccinia virus
uuuauucgguaagacaaucauu

SEQ ID NO: 4075463 - RNA, 19 nt, Vaccinia virus
uuucacuacuaucuaugau

SEQ ID NO: 4075464 - RNA, 20 nt, Vaccinia virus
uuucagcguggauuucucau

SEQ ID NO: 4075465 - RNA, 18 nt, Vaccinia virus
uuucauccgaucauugau

SEQ ID NO: 4075466 - RNA, 17 nt, Vaccinia virus
uuucauggaacaauaaa

SEQ ID NO: 4075467 - RNA, 14 nt, Vaccinia virus
uuucauggauguag

SEQ ID NO: 4075468 - RNA, 17 nt, Vaccinia virus
uuucauucgucaaggau

SEQ ID NO: 4075469 - RNA, 22 nt, Vaccinia virus
uuuccaagugucaaauuccaaa

SEQ ID NO: 4075470 - RNA, 12 nt, Vaccinia virus
uuuccauaauaa

SEQ ID NO: 4075471 - RNA, 11 nt, Vaccinia virus
uuuccauccac

SEQ ID NO: 4075472 - RNA, 21 nt, Vaccinia virus
uuuccggagauagauuuccaa

SEQ ID NO: 4075473 - RNA, 14 nt, Vaccinia virus
uuuccuauauuauu

SEQ ID NO: 4075474 - RNA, 15 nt, Vaccinia virus
uuuccuuccaaugau

SEQ ID NO: 4075475 - RNA, 18 nt, Vaccinia virus
uuucgcaucguauuuuaa

SEQ ID NO: 4075476 - RNA, 14 nt, Vaccinia virus
uuucgcuauuucua

SEQ ID NO: 4075477 - RNA, 14 nt, Vaccinia virus
uuucguacaucucu

SEQ ID NO: 4075478 - RNA, 21 nt, Vaccinia virus
uuucuacaauaacuacauauu

SEQ ID NO: 4075479 - RNA, 12 nt, Vaccinia virus
uuucuacauaau

SEQ ID NO: 4075480 - RNA, 17 nt, Vaccinia virus
uuucuagccccugcgga

SEQ ID NO: 4075481 - RNA, 16 nt, Vaccinia virus
uuucuauauagcuauu

SEQ ID NO: 4075482 - RNA, 23 nt, Vaccinia virus
uuucugaugaaacauuuaaugau

SEQ ID NO: 4075483 - RNA, 18 nt, Vaccinia virus
uuucuuguuaucagauau

SEQ ID NO: 4075484 - RNA, 22 nt, Vaccinia virus
uuugaacaaugcacgaccuaua

SEQ ID NO: 4075485 - RNA, 14 nt, Vaccinia virus
uuugacuuacauaa

SEQ ID NO: 4075486 - RNA, 17 nt, Vaccinia virus
uuugagaauauauacag

SEQ ID NO: 4075487 - RNA, 14 nt, Vaccinia virus
uuugagagggaaaa

SEQ ID NO: 4075488 - RNA, 18 nt, Vaccinia virus
uuugauagggacaaagua

SEQ ID NO: 4075489 - RNA, 21 nt, Vaccinia virus
uuugauuaguauaacuagauu

SEQ ID NO: 4075490 - RNA, 12 nt, Vaccinia virus
uuugauucuauu

SEQ ID NO: 4075491 - RNA, 13 nt, Vaccinia virus
uuugauuucaauu

SEQ ID NO: 4075492 - RNA, 23 nt, Vaccinia virus
uuuggagaaaugagaaacuguuu

SEQ ID NO: 4075493 - RNA, 15 nt, Vaccinia virus
uuuggauuuggaaaa

SEQ ID NO: 4075494 - RNA, 16 nt, Vaccinia virus
aacaaguuaaugagau

SEQ ID NO: 4075495 - RNA, 13 nt, Vaccinia virus
aacaaguuuuuau

SEQ ID NO: 4075496 - RNA, 20 nt, Vaccinia virus
aacaauaucuuuaauacaga

SEQ ID NO: 4075497 - RNA, 22 nt, Vaccinia virus
aacaauaugguaauuuagagaa

SEQ ID NO: 4075498 - RNA, 12 nt, Vaccinia virus
aacaauauuaag

SEQ ID NO: 4075499 - RNA, 19 nt, Vaccinia virus
aacaaucacaagaacagag

SEQ ID NO: 4075500 - RNA, 13 nt, Vaccinia virus
aacaaucuagaca

SEQ ID NO: 4075501 - RNA, 12 nt, Vaccinia virus
aacaauguuucu

SEQ ID NO: 4075502 - RNA, 17 nt, Vaccinia virus
aacaauuucuauuuccu

SEQ ID NO: 4075503 - RNA, 19 nt, Vaccinia virus
aacacaagucuaauaaugu

SEQ ID NO: 4075504 - RNA, 14 nt, Vaccinia virus
aacacagaacagua

SEQ ID NO: 4075505 - RNA, 22 nt, Vaccinia virus
aacaccuugugcauuauguaaa

SEQ ID NO: 4075506 - RNA, 22 nt, Vaccinia virus
aacacgauuauuauaaaauaac

SEQ ID NO: 4075507 - RNA, 19 nt, Vaccinia virus
aacacgauuuaaaaucaaa

SEQ ID NO: 4075508 - RNA, 20 nt, Vaccinia virus
aacacugaagcuaacgauga

SEQ ID NO: 4075509 - RNA, 17 nt, Vaccinia virus
aacacuuuccugauuua

SEQ ID NO: 4075510 - RNA, 13 nt, Vaccinia virus
aacagaacagaua

SEQ ID NO: 4075511 - RNA, 23 nt, Vaccinia virus
aacagacuauuuaucagaacacu

SEQ ID NO: 4075512 - RNA, 23 nt, Vaccinia virus
aacagcuaucaaaauauguagaa

SEQ ID NO: 4075513 - RNA, 16 nt, Vaccinia virus
aacaggaugaauccau

SEQ ID NO: 4075514 - RNA, 19 nt, Vaccinia virus
aacaggguuuguugauucg

SEQ ID NO: 4075515 - RNA, 12 nt, Vaccinia virus
aacaguauuauu

SEQ ID NO: 4075516 - RNA, 14 nt, Vaccinia virus
aacauaaaaacugu

SEQ ID NO: 4075517 - RNA, 15 nt, Vaccinia virus
aacauaaguauauaa

SEQ ID NO: 4075518 - RNA, 22 nt, Vaccinia virus
aacauaauagucgaauacagua

SEQ ID NO: 4075519 - RNA, 22 nt, Vaccinia virus
aguauucguuuucuaauucuuu

SEQ ID NO: 4075520 - RNA, 18 nt, Vaccinia virus
aguauucuauuuuggaaa

SEQ ID NO: 4075521 - RNA, 15 nt, Vaccinia virus
aguauucuuauguau

SEQ ID NO: 4075522 - RNA, 18 nt, Vaccinia virus
aguauuguuuaguauuuu

SEQ ID NO: 4075523 - RNA, 20 nt, Vaccinia virus
aguauuuacaauguagaaau

SEQ ID NO: 4075524 - RNA, 20 nt, Vaccinia virus
aguauuugagaaauauguau

SEQ ID NO: 4075525 - RNA, 16 nt, Vaccinia virus
aguauuuuuaccuaau

SEQ ID NO: 4075526 - RNA, 22 nt, Vaccinia virus
aguauuuuuguguuaaaacaau

SEQ ID NO: 4075527 - RNA, 13 nt, Vaccinia virus
agucaaaaagaua

SEQ ID NO: 4075528 - RNA, 15 nt, Vaccinia virus
agucaaacauucaac

SEQ ID NO: 4075529 - RNA, 13 nt, Vaccinia virus
agucaacacuaug

SEQ ID NO: 4075530 - RNA, 15 nt, Vaccinia virus
agucaagucaaugau

SEQ ID NO: 4075531 - RNA, 21 nt, Vaccinia virus
agucaauugguagaguuuuau

SEQ ID NO: 4075532 - RNA, 13 nt, Vaccinia virus
agucacuauuuuu

SEQ ID NO: 4075533 - RNA, 22 nt, Vaccinia virus
agucauaaacuugggauguaaa

SEQ ID NO: 4075534 - RNA, 19 nt, Vaccinia virus
agucauaucuagaaugaag

SEQ ID NO: 4075535 - RNA, 21 nt, Vaccinia virus
agucaucuuauguuuuuaaga

SEQ ID NO: 4075536 - RNA, 21 nt, Vaccinia virus
agucaugcuuauugauaaaga

SEQ ID NO: 4075537 - RNA, 15 nt, Vaccinia virus
agucauguuaaaaau

SEQ ID NO: 4075538 - RNA, 18 nt, Vaccinia virus
agucauguuaaaaaugac

SEQ ID NO: 4075539 - RNA, 14 nt, Vaccinia virus
agucauuauauacu

SEQ ID NO: 4075540 - RNA, 17 nt, Vaccinia virus
agucauuucugaugaaa

SEQ ID NO: 4075541 - RNA, 12 nt, Vaccinia virus
aguccagaaaua

SEQ ID NO: 4075542 - RNA, 13 nt, Vaccinia virus
aguccgcauuaug

SEQ ID NO: 4075543 - RNA, 19 nt, Vaccinia virus
aguccuaguuguauacuga

SEQ ID NO: 4075544 - RNA, 21 nt, Vaccinia virus
aguccuauauauuugaaaauc

SEQ ID NO: 4075545 - RNA, 13 nt, Vaccinia virus
agucgucaagcau

SEQ ID NO: 4075546 - RNA, 14 nt, Vaccinia virus
agucucucuccaua

SEQ ID NO: 4075547 - RNA, 15 nt, Vaccinia virus
agucugagaaaaugu

SEQ ID NO: 4075548 - RNA, 13 nt, Vaccinia virus
agucuuacacauu

SEQ ID NO: 4075549 - RNA, 20 nt, Vaccinia virus
agucuuuaaugaauuaacga

SEQ ID NO: 4075550 - RNA, 15 nt, Vaccinia virus
agugaaauaagcuuu

SEQ ID NO: 4075551 - RNA, 18 nt, Vaccinia virus
agugauagagguaaacuu

SEQ ID NO: 4075552 - RNA, 20 nt, Vaccinia virus
agugcaggcuuaaagcaauu

SEQ ID NO: 4075553 - RNA, 15 nt, Vaccinia virus
agugccaucagaaua

SEQ ID NO: 4075554 - RNA, 20 nt, Vaccinia virus
agugcggagucaacaaugaa

SEQ ID NO: 4075555 - RNA, 17 nt, Vaccinia virus
aguggaagucauuugac

SEQ ID NO: 4075556 - RNA, 22 nt, Vaccinia virus
agugggaugaaauccuauuuua

SEQ ID NO: 4075557 - RNA, 18 nt, Vaccinia virus
aguguaccaauaugugaa

SEQ ID NO: 4075558 - RNA, 23 nt, Vaccinia virus
aguguagugagagagcaugaagg

SEQ ID NO: 4075559 - RNA, 17 nt, Vaccinia virus
aguuaaaaguuaaugag

SEQ ID NO: 4075560 - RNA, 20 nt, Vaccinia virus
aguuaaacugugaaugucaa

SEQ ID NO: 4075561 - RNA, 17 nt, Vaccinia virus
aguuaacacaugucaca

SEQ ID NO: 4075562 - RNA, 13 nt, Vaccinia virus
aguuaauagcuuc

SEQ ID NO: 4075563 - RNA, 15 nt, Vaccinia virus
aucuguauaauaaga

SEQ ID NO: 4075564 - RNA, 14 nt, Vaccinia virus
aucuguauuaccga

SEQ ID NO: 4075565 - RNA, 21 nt, Vaccinia virus
aucugugguauucuugucauu

SEQ ID NO: 4075566 - RNA, 16 nt, Vaccinia virus
aucuguuuccuauaau

SEQ ID NO: 4075567 - RNA, 13 nt, Vaccinia virus
aucuuaaucgagu

SEQ ID NO: 4075568 - RNA, 20 nt, Vaccinia virus
aucuuagacauuuuuagaga

SEQ ID NO: 4075569 - RNA, 16 nt, Vaccinia virus
aucuuagcgaacugaa

SEQ ID NO: 4075570 - RNA, 17 nt, Vaccinia virus
aucuuagcgaacugaag

SEQ ID NO: 4075571 - RNA, 21 nt, Vaccinia virus
aucuuaggcauggacauacua

SEQ ID NO: 4075572 - RNA, 20 nt, Vaccinia virus
aucuuauucugguuuaaaaa

SEQ ID NO: 4075573 - RNA, 21 nt, Vaccinia virus
aucuucaagagugcauugacu

SEQ ID NO: 4075574 - RNA, 23 nt, Vaccinia virus
aucuucacaaauuauaucauugu

SEQ ID NO: 4075575 - RNA, 22 nt, Vaccinia virus
aucuucauccaguagacgacau

SEQ ID NO: 4075576 - RNA, 16 nt, Vaccinia virus
aucuucauuaucugau

SEQ ID NO: 4075577 - RNA, 16 nt, Vaccinia virus
aucuucgucuauuaca

SEQ ID NO: 4075578 - RNA, 14 nt, Vaccinia virus
aucuugauuaauaa

SEQ ID NO: 4075579 - RNA, 20 nt, Vaccinia virus
aucuugguuauauuauuaga

SEQ ID NO: 4075580 - RNA, 19 nt, Vaccinia virus
aucuugugaacuagacaua

SEQ ID NO: 4075581 - RNA, 20 nt, Vaccinia virus
aucuuguuauaauuauaaua

SEQ ID NO: 4075582 - RNA, 18 nt, Vaccinia virus
aucuuguucagaaauaua

SEQ ID NO: 4075583 - RNA, 21 nt, Vaccinia virus
aucuuuauaagagcuacuaac

SEQ ID NO: 4075584 - RNA, 17 nt, Vaccinia virus
aucuuuucacuaaauaa

SEQ ID NO: 4075585 - RNA, 16 nt, Vaccinia virus
aucuuuucuguacuca

SEQ ID NO: 4075586 - RNA, 16 nt, Vaccinia virus
aucuuuugaaaauaua

SEQ ID NO: 4075587 - RNA, 14 nt, Vaccinia virus
augaaaaaaaacac

SEQ ID NO: 4075588 - RNA, 15 nt, Vaccinia virus
augaaaaaaauacuu

SEQ ID NO: 4075589 - RNA, 12 nt, Vaccinia virus
augaaaaugaug

SEQ ID NO: 4075590 - RNA, 16 nt, Vaccinia virus
augaaaccauacuaau

SEQ ID NO: 4075591 - RNA, 17 nt, Vaccinia virus
augaaacgaacacuauu

SEQ ID NO: 4075592 - RNA, 19 nt, Vaccinia virus
augaacaaacgugggaaga

SEQ ID NO: 4075593 - RNA, 13 nt, Vaccinia virus
augaacaaauccu

SEQ ID NO: 4075594 - RNA, 21 nt, Vaccinia virus
augaacgcgauguuucuguaa

SEQ ID NO: 4075595 - RNA, 13 nt, Vaccinia virus
augaagaaagaaa

SEQ ID NO: 4075596 - RNA, 14 nt, Vaccinia virus
augaagaaagaaaa

SEQ ID NO: 4075597 - RNA, 16 nt, Vaccinia virus
augaagaauggaugau

SEQ ID NO: 4075598 - RNA, 21 nt, Vaccinia virus
augaagggaucguuaaugaac

SEQ ID NO: 4075599 - RNA, 23 nt, Vaccinia virus
augaauggaugguuuauguagac

SEQ ID NO: 4075600 - RNA, 21 nt, Vaccinia virus
augaauuacuaaaauauacaa

SEQ ID NO: 4075601 - RNA, 13 nt, Vaccinia virus
augaauuagagaa

SEQ ID NO: 4075602 - RNA, 17 nt, Vaccinia virus
augaauuagagaauuac

SEQ ID NO: 4075603 - RNA, 22 nt, Vaccinia virus
augacaucgccuacaaaugaca

SEQ ID NO: 4075604 - RNA, 16 nt, Vaccinia virus
augacauggaaauauc

SEQ ID NO: 4075605 - RNA, 15 nt, Vaccinia virus
augacauuuauucau

SEQ ID NO: 4075606 - RNA, 13 nt, Vaccinia virus
augacauuuuccu

SEQ ID NO: 4075607 - RNA, 17 nt, Vaccinia virus
augaccauuaaaauaaa

SEQ ID NO: 4075608 - RNA, 14 nt, Vaccinia virus
augagggaaaagau

SEQ ID NO: 4075609 - RNA, 15 nt, Vaccinia virus
augaguaaaacggaa

SEQ ID NO: 4075610 - RNA, 14 nt, Vaccinia virus
augaguauauguau

SEQ ID NO: 4075611 - RNA, 14 nt, Vaccinia virus
augaguuaauguau

SEQ ID NO: 4075612 - RNA, 14 nt, Vaccinia virus
augaguuagauuac

SEQ ID NO: 4075613 - RNA, 15 nt, Vaccinia virus
augauaaaaacauuu

SEQ ID NO: 4075614 - RNA, 18 nt, Vaccinia virus
augauaacuucaggaaau

SEQ ID NO: 4075615 - RNA, 13 nt, Vaccinia virus
augauaauaggaa

SEQ ID NO: 4075616 - RNA, 16 nt, Vaccinia virus
augauacauuaaguaa

SEQ ID NO: 4075617 - RNA, 19 nt, Vaccinia virus
augauauauuaaacaagga

SEQ ID NO: 4075618 - RNA, 19 nt, Vaccinia virus
augauaucuucacguagau

SEQ ID NO: 4075619 - RNA, 13 nt, Vaccinia virus
augauauggaugu

SEQ ID NO: 4075620 - RNA, 21 nt, Vaccinia virus
augauauugcgcauaauuucc

SEQ ID NO: 4075621 - RNA, 14 nt, Vaccinia virus
augaucaaaaagag

SEQ ID NO: 4075622 - RNA, 18 nt, Vaccinia virus
augauccuauucuaaaug

SEQ ID NO: 4075623 - RNA, 19 nt, Vaccinia virus
augaucgucuuuuguggaa

SEQ ID NO: 4075624 - RNA, 22 nt, Vaccinia virus
augaucucgauauuucaaucau

SEQ ID NO: 4075625 - RNA, 14 nt, Vaccinia virus
augaucuggaucau

SEQ ID NO: 4075626 - RNA, 20 nt, Vaccinia virus
augaucugucuuauaugaag

SEQ ID NO: 4075627 - RNA, 13 nt, Vaccinia virus
augaucuuaauuu

SEQ ID NO: 4075628 - RNA, 20 nt, Vaccinia virus
augaugaaacacaagaucaa

SEQ ID NO: 4075629 - RNA, 17 nt, Vaccinia virus
augaugaaauggauaau

SEQ ID NO: 4075630 - RNA, 20 nt, Vaccinia virus
augaugccgguaaauguuuu

SEQ ID NO: 4075631 - RNA, 15 nt, Vaccinia virus
augauuaucaaacac

SEQ ID NO: 4075632 - RNA, 21 nt, Vaccinia virus
augauucacaauuuacauguu

SEQ ID NO: 4075633 - RNA, 16 nt, Vaccinia virus
augauucuaacgacau

SEQ ID NO: 4075634 - RNA, 16 nt, Vaccinia virus
augauugggaaccagu

SEQ ID NO: 4075635 - RNA, 13 nt, Vaccinia virus
augauuuauaaug

SEQ ID NO: 4075636 - RNA, 22 nt, Vaccinia virus
augauuuggcuagauucaacau

SEQ ID NO: 4075637 - RNA, 22 nt, Vaccinia virus
augauuuuacugcaauauguau

SEQ ID NO: 4075638 - RNA, 22 nt, Vaccinia virus
augauuuuccuucuaaaguaag

SEQ ID NO: 4075639 - RNA, 22 nt, Vaccinia virus
augauuuugaaccguauuacuc

SEQ ID NO: 4075640 - RNA, 14 nt, Vaccinia virus
augcaaaaaugcua

SEQ ID NO: 4075641 - RNA, 13 nt, Vaccinia virus
augcaccauccga

SEQ ID NO: 4075642 - RNA, 16 nt, Vaccinia virus
augcaccgaacaucca

SEQ ID NO: 4075643 - RNA, 16 nt, Vaccinia virus
augcacuaacgagaaa

SEQ ID NO: 4075644 - RNA, 19 nt, Vaccinia virus
augcaucuauauaaucuuu

SEQ ID NO: 4075645 - RNA, 14 nt, Vaccinia virus
auguaaaaauguua

SEQ ID NO: 4075646 - RNA, 13 nt, Vaccinia virus
auguaaaacauuu

SEQ ID NO: 4075647 - RNA, 13 nt, Vaccinia virus
auguaaaauaaua

SEQ ID NO: 4075648 - RNA, 13 nt, Vaccinia virus
auguaaaauacuu

SEQ ID NO: 4075649 - RNA, 14 nt, Vaccinia virus
auguaaagaaggag

SEQ ID NO: 4075650 - RNA, 12 nt, Vaccinia virus
auguaaaugaua

SEQ ID NO: 4075651 - RNA, 21 nt, Vaccinia virus
auguaaguaguuuaucaacau

SEQ ID NO: 4075652 - RNA, 13 nt, Vaccinia virus
auguauacaaaug

SEQ ID NO: 4075653 - RNA, 16 nt, Vaccinia virus
auguauagaacaacga

SEQ ID NO: 4075654 - RNA, 14 nt, Vaccinia virus
auguauauaucacu

SEQ ID NO: 4075655 - RNA, 13 nt, Vaccinia virus
auguauauguuug

SEQ ID NO: 4075656 - RNA, 19 nt, Vaccinia virus
auguaucaaagauauagau

SEQ ID NO: 4075657 - RNA, 17 nt, Vaccinia virus
auguauggcuucaagau

SEQ ID NO: 4075658 - RNA, 13 nt, Vaccinia virus
auguauguuuaaa

SEQ ID NO: 4075659 - RNA, 19 nt, Vaccinia virus
auguauuguuuaguuacuc

SEQ ID NO: 4075660 - RNA, 19 nt, Vaccinia virus
auguauuuccuagcacauc

SEQ ID NO: 4075661 - RNA, 15 nt, Vaccinia virus
augucaaaaaaagau

SEQ ID NO: 4075662 - RNA, 22 nt, Vaccinia virus
augucauaaacuguaaaugauu

SEQ ID NO: 4075663 - RNA, 17 nt, Vaccinia virus
augucaucgaaauggua

SEQ ID NO: 4075664 - RNA, 22 nt, Vaccinia virus
auguccaaaucuaguuguggaa

SEQ ID NO: 4075665 - RNA, 20 nt, Vaccinia virus
auguccggaaugaagagaag

SEQ ID NO: 4075666 - RNA, 19 nt, Vaccinia virus
augucuaaaaacagaaaua

SEQ ID NO: 4075667 - RNA, 21 nt, Vaccinia virus
augucuaauggcgaacauguu

SEQ ID NO: 4075668 - RNA, 21 nt, Vaccinia virus
augucucgcauaaacauuacu

SEQ ID NO: 4075669 - RNA, 21 nt, Vaccinia virus
augucugacaccuaaaaagaa

SEQ ID NO: 4075670 - RNA, 19 nt, Vaccinia virus
augugagagagaaauacuu

SEQ ID NO: 4075671 - RNA, 22 nt, Vaccinia virus
augugagcaaagauuguucucu

SEQ ID NO: 4075672 - RNA, 16 nt, Vaccinia virus
augugaguauuggauu

SEQ ID NO: 4075673 - RNA, 16 nt, Vaccinia virus
augugcuaaaaucacu

SEQ ID NO: 4075674 - RNA, 22 nt, Vaccinia virus
augugcuaaaaucacugaacau

SEQ ID NO: 4075675 - RNA, 22 nt, Vaccinia virus
auguguauuaucagauauccaa

SEQ ID NO: 4075676 - RNA, 22 nt, Vaccinia virus
auguguguccggaguuagaaag

SEQ ID NO: 4075677 - RNA, 18 nt, Vaccinia virus
auguguuuuagaauauau

SEQ ID NO: 4075678 - RNA, 16 nt, Vaccinia virus
auguuaaauguuuuac

SEQ ID NO: 4075679 - RNA, 22 nt, Vaccinia virus
auguuacagaauauaaauuaua

SEQ ID NO: 4075680 - RNA, 22 nt, Vaccinia virus
auguucgugguguuaugaaaca

SEQ ID NO: 4075681 - RNA, 19 nt, Vaccinia virus
auguucugauuuuaucuuu

SEQ ID NO: 4075682 - RNA, 22 nt, Vaccinia virus
auguucuuaaucaauguacaua

SEQ ID NO: 4075683 - RNA, 21 nt, Vaccinia virus
auguucuucgcagaugaugau

SEQ ID NO: 4075684 - RNA, 18 nt, Vaccinia virus
auguucuuuuugugugaa

SEQ ID NO: 4075685 - RNA, 14 nt, Vaccinia virus
auguugacauguau

SEQ ID NO: 4075686 - RNA, 23 nt, Vaccinia virus
auguuggauuaaucuuuaccaua

SEQ ID NO: 4075687 - RNA, 15 nt, Vaccinia virus
auguuguuuuauaua

SEQ ID NO: 4075688 - RNA, 15 nt, Vaccinia virus
auguuuaaugauacg

SEQ ID NO: 4075689 - RNA, 14 nt, Vaccinia virus
auguuuauagaugu

SEQ ID NO: 4075690 - RNA, 13 nt, Vaccinia virus
auguuuaucacac

SEQ ID NO: 4075691 - RNA, 19 nt, Vaccinia virus
auguuucuuuaaaagucaa

SEQ ID NO: 4075692 - RNA, 16 nt, Vaccinia virus
auguuuggagaaauga

SEQ ID NO: 4075693 - RNA, 17 nt, Vaccinia virus
auguuugucauauguau

SEQ ID NO: 4075694 - RNA, 16 nt, Vaccinia virus
auguuuuaaauaucaa

SEQ ID NO: 4075695 - RNA, 21 nt, Vaccinia virus
auguuuuuagauuuuagcaua

SEQ ID NO: 4075696 - RNA, 20 nt, Vaccinia virus
auuaaaaaauucgacaauga

SEQ ID NO: 4075697 - RNA, 15 nt, Vaccinia virus
auuaaaaauuuccau

SEQ ID NO: 4075698 - RNA, 20 nt, Vaccinia virus
auuaaacaagugauacguaa

SEQ ID NO: 4075699 - RNA, 15 nt, Vaccinia virus
auuaaacguauucau

SEQ ID NO: 4075700 - RNA, 19 nt, Vaccinia virus
auuaaacguggauaaaaug

SEQ ID NO: 4075701 - RNA, 15 nt, Vaccinia virus
auuaaacuaauucau

SEQ ID NO: 4075702 - RNA, 21 nt, Vaccinia virus
auuaaacuaauucauuuucaa

SEQ ID NO: 4075703 - RNA, 23 nt, Vaccinia virus
auuaaagagauaguuuuuuucau

SEQ ID NO: 4075704 - RNA, 19 nt, Vaccinia virus
auuaaauagaauauuuaac

SEQ ID NO: 4075705 - RNA, 13 nt, Vaccinia virus
auuaaaucaauau

SEQ ID NO: 4075706 - RNA, 23 nt, Vaccinia virus
auuaaaucauugacugcuagaga

SEQ ID NO: 4075707 - RNA, 18 nt, Vaccinia virus
auuaaaugaugaaacuaa

SEQ ID NO: 4075708 - RNA, 18 nt, Vaccinia virus
auuaaaugcgucaaucau

SEQ ID NO: 4075709 - RNA, 19 nt, Vaccinia virus
auuaacaaaagugaauaua

SEQ ID NO: 4075710 - RNA, 22 nt, Vaccinia virus
auuaacgauaucuugcaaaaua

SEQ ID NO: 4075711 - RNA, 16 nt, Vaccinia virus
auuaacgguaauacau

SEQ ID NO: 4075712 - RNA, 22 nt, Vaccinia virus
auuaacuacuugaaauucucca

SEQ ID NO: 4075713 - RNA, 15 nt, Vaccinia virus
auuaacugaggauga

SEQ ID NO: 4075714 - RNA, 16 nt, Vaccinia virus
auuaacuuuguucauu

SEQ ID NO: 4075715 - RNA, 21 nt, Vaccinia virus
auuaaguucuggcaauguuuc

SEQ ID NO: 4075716 - RNA, 13 nt, Vaccinia virus
auuaauaauaauu

SEQ ID NO: 4075717 - RNA, 13 nt, Vaccinia virus
auuaauaauuaau

SEQ ID NO: 4075718 - RNA, 19 nt, Vaccinia virus
auuaauacacauaaugaag

SEQ ID NO: 4075719 - RNA, 21 nt, Vaccinia virus
auuaauacaggaucuagcaaa

SEQ ID NO: 4075720 - RNA, 13 nt, Vaccinia virus
auuaauacauauu

SEQ ID NO: 4075721 - RNA, 13 nt, Vaccinia virus
auuaauacauuua

SEQ ID NO: 4075722 - RNA, 22 nt, Vaccinia virus
auuaauauaguuauuaaugaug

SEQ ID NO: 4075723 - RNA, 19 nt, Vaccinia virus
auuaauguggaauauagau

SEQ ID NO: 4075724 - RNA, 10 nt, Vaccinia virus
auuaauuaaa

SEQ ID NO: 4075725 - RNA, 14 nt, Vaccinia virus
auuaauuaaccauu

SEQ ID NO: 4075726 - RNA, 13 nt, Vaccinia virus
auuacaacauaau

SEQ ID NO: 4075727 - RNA, 22 nt, Vaccinia virus
auuacaagacuacaaagaaugu

SEQ ID NO: 4075728 - RNA, 21 nt, Vaccinia virus
auuacacuacauuuuuaucau

SEQ ID NO: 4075729 - RNA, 16 nt, Vaccinia virus
auuacauacuuaaaaa

SEQ ID NO: 4075730 - RNA, 16 nt, Vaccinia virus
auuacauuuuaucaga

SEQ ID NO: 4075731 - RNA, 22 nt, Vaccinia virus
auuacauuuuuuauaaauagau

SEQ ID NO: 4075732 - RNA, 23 nt, Vaccinia virus
auuaccauagaagauguuagaaa

SEQ ID NO: 4075733 - RNA, 20 nt, Vaccinia virus
auuaccggucauauuaauaa

SEQ ID NO: 4075734 - RNA, 14 nt, Vaccinia virus
aagacauaaaacuc

SEQ ID NO: 4075735 - RNA, 16 nt, Vaccinia virus
aagacauaaaacucau

SEQ ID NO: 4075736 - RNA, 19 nt, Vaccinia virus
aagacaugauaauauuaaa

SEQ ID NO: 4075737 - RNA, 22 nt, Vaccinia virus
aagacauuccuaugaugaugca

SEQ ID NO: 4075738 - RNA, 19 nt, Vaccinia virus
aagacgguaacuaaauguu

SEQ ID NO: 4075739 - RNA, 20 nt, Vaccinia virus
aagacgguaacuaaauguuc

SEQ ID NO: 4075740 - RNA, 18 nt, Vaccinia virus
aagacuaucggacucuuc

SEQ ID NO: 4075741 - RNA, 18 nt, Vaccinia virus
aagagacuacaauauauu

SEQ ID NO: 4075742 - RNA, 20 nt, Vaccinia virus
aagagauuucaacagacugu

SEQ ID NO: 4075743 - RNA, 13 nt, Vaccinia virus
aagaguauuguac

SEQ ID NO: 4075744 - RNA, 20 nt, Vaccinia virus
aagaguggaaacucacauau

SEQ ID NO: 4075745 - RNA, 20 nt, Vaccinia virus
aagaguuaaugaauaucauu

SEQ ID NO: 4075746 - RNA, 22 nt, Vaccinia virus
aagaguuucaaaaauauucauu

SEQ ID NO: 4075747 - RNA, 15 nt, Vaccinia virus
aagauaaaagaauuc

SEQ ID NO: 4075748 - RNA, 20 nt, Vaccinia virus
aagauacuccuucaugaaca

SEQ ID NO: 4075749 - RNA, 19 nt, Vaccinia virus
aagauaguugucaguucau

SEQ ID NO: 4075750 - RNA, 17 nt, Vaccinia virus
caaaauccuauauugua

SEQ ID NO: 4075751 - RNA, 18 nt, Vaccinia virus
caaaaucguuaagaaguu

SEQ ID NO: 4075752 - RNA, 21 nt, Vaccinia virus
caaaaucguuccgccaaauuu

SEQ ID NO: 4075753 - RNA, 16 nt, Vaccinia virus
caaaaugauagauauu

SEQ ID NO: 4075754 - RNA, 16 nt, Vaccinia virus
caaaaugauauacagu

SEQ ID NO: 4075755 - RNA, 16 nt, Vaccinia virus
caaaaugcaagcaucu

SEQ ID NO: 4075756 - RNA, 12 nt, Vaccinia virus
caaaauguuuga

SEQ ID NO: 4075757 - RNA, 23 nt, Vaccinia virus
caaaauuaacagauaaaaagacu

SEQ ID NO: 4075758 - RNA, 12 nt, Vaccinia virus
caaaauuacaau

SEQ ID NO: 4075759 - RNA, 22 nt, Vaccinia virus
caaaauuggaaggauauacaaa

SEQ ID NO: 4075760 - RNA, 21 nt, Vaccinia virus
caaacaauccaaaaaaugaaa

SEQ ID NO: 4075761 - RNA, 23 nt, Vaccinia virus
caaacaucacucuucgaaaagaa

SEQ ID NO: 4075762 - RNA, 14 nt, Vaccinia virus
caaacauccucuau

SEQ ID NO: 4075763 - RNA, 16 nt, Vaccinia virus
caaacauucuuucaaa

SEQ ID NO: 4075764 - RNA, 11 nt, Vaccinia virus
caaacauuuaa

SEQ ID NO: 4075765 - RNA, 22 nt, Vaccinia virus
caaacgugaguauuuuacucau

SEQ ID NO: 4075766 - RNA, 14 nt, Vaccinia virus
caaacgugggaaga

SEQ ID NO: 4075767 - RNA, 14 nt, Vaccinia virus
caaacugcugaagu

SEQ ID NO: 4075768 - RNA, 15 nt, Vaccinia virus
caaacuuaacagcuc

SEQ ID NO: 4075769 - RNA, 14 nt, Vaccinia virus
caaagaaaugagua

SEQ ID NO: 4075770 - RNA, 22 nt, Vaccinia virus
caaagaauccgacaucaaaugg

SEQ ID NO: 4075771 - RNA, 16 nt, Vaccinia virus
caaagauaaaaaccac

SEQ ID NO: 4075772 - RNA, 16 nt, Vaccinia virus
caaagauggcugaaau

SEQ ID NO: 4075773 - RNA, 14 nt, Vaccinia virus
caaagcaucgauuu

SEQ ID NO: 4075774 - RNA, 15 nt, Vaccinia virus
caaauaaaauggaua

SEQ ID NO: 4075775 - RNA, 16 nt, Vaccinia virus
caaauaaaauucugau

SEQ ID NO: 4075776 - RNA, 22 nt, Vaccinia virus
caaauaaaucacuaaauaauau

SEQ ID NO: 4075777 - RNA, 14 nt, Vaccinia virus
caaauauacuuuau

SEQ ID NO: 4075778 - RNA, 12 nt, Vaccinia virus
caaauauauuua

SEQ ID NO: 4075779 - RNA, 23 nt, Vaccinia virus
caaauaucggaauaaguagacau

SEQ ID NO: 4075780 - RNA, 22 nt, Vaccinia virus
caaaucagacguuguaaauuau

SEQ ID NO: 4075781 - RNA, 23 nt, Vaccinia virus
caaauccuucauucauuagauaa

SEQ ID NO: 4075782 - RNA, 16 nt, Vaccinia virus
caaaucuauauuguuu

SEQ ID NO: 4075783 - RNA, 23 nt, Vaccinia virus
caaaucucugauccguauccaug

SEQ ID NO: 4075784 - RNA, 21 nt, Vaccinia virus
caaauggauguuaauguauua

SEQ ID NO: 4075785 - RNA, 21 nt, Vaccinia virus
caaauguagugaauaucucua

SEQ ID NO: 4075786 - RNA, 20 nt, Vaccinia virus
caaauuaagcauuuuggaaa

SEQ ID NO: 4075787 - RNA, 19 nt, Vaccinia virus
caaauucauuauuaaacag

SEQ ID NO: 4075788 - RNA, 18 nt, Vaccinia virus
caaauucugcaauaucuu

SEQ ID NO: 4075789 - RNA, 20 nt, Vaccinia virus
caaauucuuggauauaugau

SEQ ID NO: 4075790 - RNA, 24 nt, Vaccinia virus
caaauuguuaaauuaauaauggau

SEQ ID NO: 4075791 - RNA, 23 nt, Vaccinia virus
caaauuuuacuacauaguuaucu

SEQ ID NO: 4075792 - RNA, 22 nt, Vaccinia virus
caacaaacgaguuuauuaguuu

SEQ ID NO: 4075793 - RNA, 18 nt, Vaccinia virus
caacaaguuggaugauau

SEQ ID NO: 4075794 - RNA, 13 nt, Vaccinia virus
caacaaugauaua

SEQ ID NO: 4075795 - RNA, 15 nt, Vaccinia virus
caacaauuuuuuguu

SEQ ID NO: 4075796 - RNA, 19 nt, Vaccinia virus
caacagaacagauaguuua

SEQ ID NO: 4075797 - RNA, 16 nt, Vaccinia virus
caacauacuauuguuu

SEQ ID NO: 4075798 - RNA, 23 nt, Vaccinia virus
caacauacuguuuagaugauauu

SEQ ID NO: 4075799 - RNA, 15 nt, Vaccinia virus
caacauauacacauu

SEQ ID NO: 4075800 - RNA, 14 nt, Vaccinia virus
caacauaucuaucc

SEQ ID NO: 4075801 - RNA, 16 nt, Vaccinia virus
caacauuggaauaaua

SEQ ID NO: 4075802 - RNA, 19 nt, Vaccinia virus
caaccaucucauaaaauag

SEQ ID NO: 4075803 - RNA, 14 nt, Vaccinia virus
caaccggauuuaaa

SEQ ID NO: 4075804 - RNA, 23 nt, Vaccinia virus
caacgaauacaaacgccauaauu

SEQ ID NO: 4075805 - RNA, 13 nt, Vaccinia virus
caacgagauaucu

SEQ ID NO: 4075806 - RNA, 15 nt, Vaccinia virus
caacggagauacauu

SEQ ID NO: 4075807 - RNA, 20 nt, Vaccinia virus
caacguaguaucaucuucua

SEQ ID NO: 4075808 - RNA, 23 nt, Vaccinia virus
caacugauuaaugagaucuucua

SEQ ID NO: 4075809 - RNA, 22 nt, Vaccinia virus
caacuucaucaugaguuaaaua

SEQ ID NO: 4075810 - RNA, 23 nt, Vaccinia virus
caacuucaucaugaguuaaauau

SEQ ID NO: 4075811 - RNA, 22 nt, Vaccinia virus
caagaaagugaaaaguucacau

SEQ ID NO: 4075812 - RNA, 13 nt, Vaccinia virus
caagaauaaacga

SEQ ID NO: 4075813 - RNA, 16 nt, Vaccinia virus
caagaauauauguuua

SEQ ID NO: 4075814 - RNA, 23 nt, Vaccinia virus
caagaauccgaucccacuucugu

SEQ ID NO: 4075815 - RNA, 16 nt, Vaccinia virus
caagacuaacacacaa

SEQ ID NO: 4075816 - RNA, 20 nt, Vaccinia virus
caagagacguaaauauucua

SEQ ID NO: 4075817 - RNA, 15 nt, Vaccinia virus
caagaggauggaauu

SEQ ID NO: 4075818 - RNA, 17 nt, Vaccinia virus
caagaguaacuauugac

SEQ ID NO: 4075819 - RNA, 22 nt, Vaccinia virus
caagagugauuuaagaacaucc

SEQ ID NO: 4075820 - RNA, 15 nt, Vaccinia virus
caagauaagcaaacg

SEQ ID NO: 4075821 - RNA, 14 nt, Vaccinia virus
caagauuauuacgu

SEQ ID NO: 4075822 - RNA, 16 nt, Vaccinia virus
caagauuccuuuucua

SEQ ID NO: 4075823 - RNA, 17 nt, Vaccinia virus
caaguaaagauuucaaa

SEQ ID NO: 4075824 - RNA, 14 nt, Vaccinia virus
caaguauacaauuu

SEQ ID NO: 4075825 - RNA, 16 nt, Vaccinia virus
caagucuggaaaacug

SEQ ID NO: 4075826 - RNA, 22 nt, Vaccinia virus
caaguuuccuguaaauuuucua

SEQ ID NO: 4075827 - RNA, 19 nt, Vaccinia virus
caauaaaaauaaacuagag

SEQ ID NO: 4075828 - RNA, 13 nt, Vaccinia virus
caauaaacaaaau

SEQ ID NO: 4075829 - RNA, 21 nt, Vaccinia virus
caauaaacuccguagagaaau

SEQ ID NO: 4075830 - RNA, 18 nt, Vaccinia virus
caauaacgcaaucaugau

SEQ ID NO: 4075831 - RNA, 12 nt, Vaccinia virus
caauaagaaagu

SEQ ID NO: 4075832 - RNA, 16 nt, Vaccinia virus
caauaagcauuaugau

SEQ ID NO: 4075833 - RNA, 14 nt, Vaccinia virus
caauaauauacaau

SEQ ID NO: 4075834 - RNA, 18 nt, Vaccinia virus
caauacacacaauagaca

SEQ ID NO: 4075835 - RNA, 18 nt, Vaccinia virus
caauaccaaagaaggaag

SEQ ID NO: 4075836 - RNA, 19 nt, Vaccinia virus
caauaguuucauaauuguu

SEQ ID NO: 4075837 - RNA, 15 nt, Vaccinia virus
caauauaaauccagu

SEQ ID NO: 4075838 - RNA, 20 nt, Vaccinia virus
caauaucaauaaauuuuuuu

SEQ ID NO: 4075839 - RNA, 18 nt, Vaccinia virus
caauaucaguaucuucuu

SEQ ID NO: 4075840 - RNA, 15 nt, Vaccinia virus
caauaucguagaauu

SEQ ID NO: 4075841 - RNA, 16 nt, Vaccinia virus
caauaucguuaaagau

SEQ ID NO: 4075842 - RNA, 20 nt, Vaccinia virus
caauaugucuguacaaaugu

SEQ ID NO: 4075843 - RNA, 15 nt, Vaccinia virus
caauauuaaugcauu

SEQ ID NO: 4075844 - RNA, 12 nt, Vaccinia virus
caauauuacuuu

SEQ ID NO: 4075845 - RNA, 23 nt, Vaccinia virus
caauauucuauuacugcagaggg

SEQ ID NO: 4075846 - RNA, 16 nt, Vaccinia virus
caaucacuacaauaau

SEQ ID NO: 4075847 - RNA, 21 nt, Vaccinia virus
caaucauaaaaaaaauacaug

SEQ ID NO: 4075848 - RNA, 19 nt, Vaccinia virus
caaucggauacagacacuc

SEQ ID NO: 4075849 - RNA, 12 nt, Vaccinia virus
caaucuaucuau

SEQ ID NO: 4075850 - RNA, 19 nt, Vaccinia virus
caaucuccauuauuuuuuu

SEQ ID NO: 4075851 - RNA, 16 nt, Vaccinia virus
caaucucguuuaauau

SEQ ID NO: 4075852 - RNA, 20 nt, Vaccinia virus
caaucugggcguauaaugaa

SEQ ID NO: 4075853 - RNA, 12 nt, Vaccinia virus
caaugaaaucac

SEQ ID NO: 4075854 - RNA, 16 nt, Vaccinia virus
caaugauagacuagaa

SEQ ID NO: 4075855 - RNA, 18 nt, Vaccinia virus
caaugcucaguaaaugua

SEQ ID NO: 4075856 - RNA, 13 nt, Vaccinia virus
caauguccaaauc

SEQ ID NO: 4075857 - RNA, 22 nt, Vaccinia virus
caauuaacgaucuuuauaauau

SEQ ID NO: 4075858 - RNA, 12 nt, Vaccinia virus
caauuacugaua

SEQ ID NO: 4075859 - RNA, 20 nt, Vaccinia virus
caauuagauccaaagaagau

SEQ ID NO: 4075860 - RNA, 15 nt, Vaccinia virus
caauuaguuaauaau

SEQ ID NO: 4075861 - RNA, 17 nt, Vaccinia virus
caauuaguuuauuggua

SEQ ID NO: 4075862 - RNA, 23 nt, Vaccinia virus
caauuauaugguagauuguuaac

SEQ ID NO: 4075863 - RNA, 17 nt, Vaccinia virus
caauuauguaucaauau

SEQ ID NO: 4075864 - RNA, 17 nt, Vaccinia virus
caauuauugggccagua

SEQ ID NO: 4075865 - RNA, 16 nt, Vaccinia virus
caauucgguuauaaau

SEQ ID NO: 4075866 - RNA, 14 nt, Vaccinia virus
caauucguauaaau

SEQ ID NO: 4075867 - RNA, 19 nt, Vaccinia virus
caauugucuuucucuuuua

SEQ ID NO: 4075868 - RNA, 20 nt, Vaccinia virus
cauauuaaacuaauucauuu

SEQ ID NO: 4075869 - RNA, 17 nt, Vaccinia virus
cguauauagaugucaau

SEQ ID NO: 4075870 - RNA, 20 nt, Vaccinia virus
cguauaucucuauuaaaugc

SEQ ID NO: 4075871 - RNA, 14 nt, Vaccinia virus
cguauauguuucua

SEQ ID NO: 4075872 - RNA, 13 nt, Vaccinia virus
cguauauuucuau

SEQ ID NO: 4075873 - RNA, 15 nt, Vaccinia virus
cguaucauuaaacau

SEQ ID NO: 4075874 - RNA, 16 nt, Vaccinia virus
cguaugccuguuuaua

SEQ ID NO: 4075875 - RNA, 17 nt, Vaccinia virus
cgucaugauaaaaauuu

SEQ ID NO: 4075876 - RNA, 16 nt, Vaccinia virus
cgucuacaaaaaacuu

SEQ ID NO: 4075877 - RNA, 13 nt, Vaccinia virus
cgucuaucaucua

SEQ ID NO: 4075878 - RNA, 22 nt, Vaccinia virus
cgucucugacgguaccauaaac

SEQ ID NO: 4075879 - RNA, 15 nt, Vaccinia virus
cgugauguuguaaca

SEQ ID NO: 4075880 - RNA, 21 nt, Vaccinia virus
cgugcacuuuuuuauaaagau

SEQ ID NO: 4075881 - RNA, 20 nt, Vaccinia virus
cguggcaaacaauguauaca

SEQ ID NO: 4075882 - RNA, 17 nt, Vaccinia virus
cguguaacaaaguauua

SEQ ID NO: 4075883 - RNA, 18 nt, Vaccinia virus
cguguaaggcguaucuag

SEQ ID NO: 4075884 - RNA, 17 nt, Vaccinia virus
cgugucaaccaguuaaa

SEQ ID NO: 4075885 - RNA, 16 nt, Vaccinia virus
cguguucuuguguaau

SEQ ID NO: 4075886 - RNA, 19 nt, Vaccinia virus
cguuaacgauaguaucaau

SEQ ID NO: 4075887 - RNA, 11 nt, Vaccinia virus
cguuagaugua

SEQ ID NO: 4075888 - RNA, 18 nt, Vaccinia virus
cguuaguaacgccauuau

SEQ ID NO: 4075889 - RNA, 12 nt, Vaccinia virus
cguuagucauau

SEQ ID NO: 4075890 - RNA, 22 nt, Vaccinia virus
cguuauacaucuuaguuguaaa

SEQ ID NO: 4075891 - RNA, 19 nt, Vaccinia virus
cguuaucguuuucuacaau

SEQ ID NO: 4075892 - RNA, 20 nt, Vaccinia virus
cguuauuugagagaucauuu

SEQ ID NO: 4075893 - RNA, 19 nt, Vaccinia virus
cguucaacauuuuauggaa

SEQ ID NO: 4075894 - RNA, 22 nt, Vaccinia virus
cguugcgaagaaaaaaauggaa

SEQ ID NO: 4075895 - RNA, 18 nt, Vaccinia virus
cguuggaccauuaauagg

SEQ ID NO: 4075896 - RNA, 19 nt, Vaccinia virus
cguuguugaaucuauuuug

SEQ ID NO: 4075897 - RNA, 15 nt, Vaccinia virus
cuaaaaaaaaugacu

SEQ ID NO: 4075898 - RNA, 12 nt, Vaccinia virus
cuaaaaaacuaa

SEQ ID NO: 4075899 - RNA, 19 nt, Vaccinia virus
cuaaaaacuguaucgauuu

SEQ ID NO: 4075900 - RNA, 15 nt, Vaccinia virus
cuaaaaauguuaauu

SEQ ID NO: 4075901 - RNA, 17 nt, Vaccinia virus
cuaaaauuuugaucauc

SEQ ID NO: 4075902 - RNA, 15 nt, Vaccinia virus
cuaaacaagcuaucu

SEQ ID NO: 4075903 - RNA, 20 nt, Vaccinia virus
cuaaacacacauuauucaga

SEQ ID NO: 4075904 - RNA, 21 nt, Vaccinia virus
cuaaacccgacuuaguuauau

SEQ ID NO: 4075905 - RNA, 22 nt, Vaccinia virus
cuaaagcacaacgagagauauu

SEQ ID NO: 4075906 - RNA, 23 nt, Vaccinia virus
cuaaaggaugaguacauuucaca

SEQ ID NO: 4075907 - RNA, 17 nt, Vaccinia virus
cuaaauaaauaugugua

SEQ ID NO: 4075908 - RNA, 18 nt, Vaccinia virus
cuaaaucgcuuguuuaga

SEQ ID NO: 4075909 - RNA, 12 nt, Vaccinia virus
cuaaauuagaac

SEQ ID NO: 4075910 - RNA, 20 nt, Vaccinia virus
cuaacaauaacuagaucauc

SEQ ID NO: 4075911 - RNA, 19 nt, Vaccinia virus
cuaacagcaauaguauaau

SEQ ID NO: 4075912 - RNA, 23 nt, Vaccinia virus
cuaacauacgagacauguuagua

SEQ ID NO: 4075913 - RNA, 17 nt, Vaccinia virus
cuaacaugcauuugaaa

SEQ ID NO: 4075914 - RNA, 18 nt, Vaccinia virus
cuaacgccgaucucugaa

SEQ ID NO: 4075915 - RNA, 13 nt, Vaccinia virus
cuaacuauauacc

SEQ ID NO: 4075916 - RNA, 16 nt, Vaccinia virus
cuaaggaguaaaauag

SEQ ID NO: 4075917 - RNA, 13 nt, Vaccinia virus
cuaauaaacauuc

SEQ ID NO: 4075918 - RNA, 17 nt, Vaccinia virus
cuaauacaaaaucaucu

SEQ ID NO: 4075919 - RNA, 19 nt, Vaccinia virus
cuaauacaucucuggaaau

SEQ ID NO: 4075920 - RNA, 22 nt, Vaccinia virus
cuaauacaucucuggaaauaga

SEQ ID NO: 4075921 - RNA, 15 nt, Vaccinia virus
cuaaucaauagcuua

SEQ ID NO: 4075922 - RNA, 22 nt, Vaccinia virus
cuaaucuaaacgcguuagauaa

SEQ ID NO: 4075923 - RNA, 16 nt, Vaccinia virus
cuaaugaccacaucuu

SEQ ID NO: 4075924 - RNA, 21 nt, Vaccinia virus
cuaauguauagauuguuuuca

SEQ ID NO: 4075925 - RNA, 18 nt, Vaccinia virus
cuaauuaaucuaaaaucu

SEQ ID NO: 4075926 - RNA, 19 nt, Vaccinia virus
cuaauuuguaaaccaucuu

SEQ ID NO: 4075927 - RNA, 17 nt, Vaccinia virus
cuacaacagauauucca

SEQ ID NO: 4075928 - RNA, 15 nt, Vaccinia virus
cuacacuaaaaugau

SEQ ID NO: 4075929 - RNA, 17 nt, Vaccinia virus
cuacaguaauguccaaa

SEQ ID NO: 4075930 - RNA, 21 nt, Vaccinia virus
cuacauaguuaucuaucuuaa

SEQ ID NO: 4075931 - RNA, 21 nt, Vaccinia virus
cuacaucaguuuuguauucca

SEQ ID NO: 4075932 - RNA, 20 nt, Vaccinia virus
cuacauccauguuuaucuau

SEQ ID NO: 4075933 - RNA, 16 nt, Vaccinia virus
cuacaucuaugucuuu

SEQ ID NO: 4075934 - RNA, 23 nt, Vaccinia virus
cuacaucuuccuucuuauucuua

SEQ ID NO: 4075935 - RNA, 15 nt, Vaccinia virus
cuacaucuuuaagau

SEQ ID NO: 4075936 - RNA, 20 nt, Vaccinia virus
cuacauggacucauuaaaac

SEQ ID NO: 4075937 - RNA, 20 nt, Vaccinia virus
cuaccaacgauaagauauca

SEQ ID NO: 4075938 - RNA, 20 nt, Vaccinia virus
cuaccacacuucuagauauc

SEQ ID NO: 4075939 - RNA, 19 nt, Vaccinia virus
cuaccagccuacauuuugc

SEQ ID NO: 4075940 - RNA, 23 nt, Vaccinia virus
cuacgaaacugauacaaucucuu

SEQ ID NO: 4075941 - RNA, 18 nt, Vaccinia virus
cuacuaccgaugauguaa

SEQ ID NO: 4075942 - RNA, 17 nt, Vaccinia virus
cuacucuagguaacaaa

SEQ ID NO: 4075943 - RNA, 17 nt, Vaccinia virus
cuagaauuagaauuaca

SEQ ID NO: 4075944 - RNA, 15 nt, Vaccinia virus
cuagacaauauucca

SEQ ID NO: 4075945 - RNA, 15 nt, Vaccinia virus
cuagacuugauuuaa

SEQ ID NO: 4075946 - RNA, 18 nt, Vaccinia virus
cuagagcaucaauguccu

SEQ ID NO: 4075947 - RNA, 23 nt, Vaccinia virus
cuagauaaaaaggaaucuauuaa

SEQ ID NO: 4075948 - RNA, 22 nt, Vaccinia virus
cuagauacccaaucucucucaa

SEQ ID NO: 4075949 - RNA, 23 nt, Vaccinia virus
cuagauauguauuuaauaucaaa

SEQ ID NO: 4075950 - RNA, 17 nt, Vaccinia virus
cuagaucaagaaacauu

SEQ ID NO: 4075951 - RNA, 13 nt, Vaccinia virus
cuagccucaucuu

SEQ ID NO: 4075952 - RNA, 14 nt, Vaccinia virus
cuagcgacucuguu

SEQ ID NO: 4075953 - RNA, 17 nt, Vaccinia virus
cuaggaguguuggauuu

SEQ ID NO: 4075954 - RNA, 14 nt, Vaccinia virus
cuagucuucucuga

SEQ ID NO: 4075955 - RNA, 24 nt, Vaccinia virus
cuagucuuugugggcaacugucua

SEQ ID NO: 4075956 - RNA, 21 nt, Vaccinia virus
cuaguuaagaacaugucuucu

SEQ ID NO: 4075957 - RNA, 20 nt, Vaccinia virus
cuaguucaccuucuauagau

SEQ ID NO: 4075958 - RNA, 14 nt, Vaccinia virus
cuaguuuguuuaua

SEQ ID NO: 4075959 - RNA, 23 nt, Vaccinia virus
cuaguuuuauacacaucucuuca

SEQ ID NO: 4075960 - RNA, 18 nt, Vaccinia virus
cuauaaaauaaaaugagu

SEQ ID NO: 4075961 - RNA, 14 nt, Vaccinia virus
cuauaaacugaaua

SEQ ID NO: 4075962 - RNA, 17 nt, Vaccinia virus
cuauaaaugaauucuca

SEQ ID NO: 4075963 - RNA, 14 nt, Vaccinia virus
cuauaacuccuaua

SEQ ID NO: 4075964 - RNA, 20 nt, Vaccinia virus
cuauaagauuaucaaaaucu

SEQ ID NO: 4075965 - RNA, 16 nt, Vaccinia virus
cuauaauaucuuugaa

SEQ ID NO: 4075966 - RNA, 17 nt, Vaccinia virus
cuauaaugacaauaaaa

SEQ ID NO: 4075967 - RNA, 23 nt, Vaccinia virus
cuauaauguaguaaauauaaaau

SEQ ID NO: 4075968 - RNA, 15 nt, Vaccinia virus
cuauacaagucgucu

SEQ ID NO: 4075969 - RNA, 16 nt, Vaccinia virus
cuauacccaucaugua

SEQ ID NO: 4075970 - RNA, 13 nt, Vaccinia virus
cuauacuauguua

SEQ ID NO: 4075971 - RNA, 11 nt, Vaccinia virus
cuauagaaaau

SEQ ID NO: 4075972 - RNA, 21 nt, Vaccinia virus
cuauagacauaauacuaucug

SEQ ID NO: 4075973 - RNA, 20 nt, Vaccinia virus
cuauagcaucaauaauuguu

SEQ ID NO: 4075974 - RNA, 22 nt, Vaccinia virus
cuauaguccugucuuucgaugu

SEQ ID NO: 4075975 - RNA, 14 nt, Vaccinia virus
cuuccaagaagaag

SEQ ID NO: 4075976 - RNA, 19 nt, Vaccinia virus
cuuccaccacauccaucaa

SEQ ID NO: 4075977 - RNA, 17 nt, Vaccinia virus
cuucgauauuagauuuu

SEQ ID NO: 4075978 - RNA, 23 nt, Vaccinia virus
cuucgauauuagauuuuguauua

SEQ ID NO: 4075979 - RNA, 13 nt, Vaccinia virus
cuucguacauaag

SEQ ID NO: 4075980 - RNA, 12 nt, Vaccinia virus
cuucuaucuugu

SEQ ID NO: 4075981 - RNA, 14 nt, Vaccinia virus
cuucuaucuuuagu

SEQ ID NO: 4075982 - RNA, 13 nt, Vaccinia virus
cuucuauuucuaa

SEQ ID NO: 4075983 - RNA, 16 nt, Vaccinia virus
cuucucaucuauguaa

SEQ ID NO: 4075984 - RNA, 16 nt, Vaccinia virus
cuucucuauuguuuag

SEQ ID NO: 4075985 - RNA, 15 nt, Vaccinia virus
cuucuggacauaauu

SEQ ID NO: 4075986 - RNA, 14 nt, Vaccinia virus
cuucuguuaauuuu

SEQ ID NO: 4075987 - RNA, 14 nt, Vaccinia virus
cuucuuauuuagau

SEQ ID NO: 4075988 - RNA, 16 nt, Vaccinia virus
cuucuuccuuuuguuc

SEQ ID NO: 4075989 - RNA, 14 nt, Vaccinia virus
cuucuuuuuuccaa

SEQ ID NO: 4075990 - RNA, 18 nt, Vaccinia virus
cuugaucucaucauucca

SEQ ID NO: 4075991 - RNA, 18 nt, Vaccinia virus
cuuggauuuuuuguacau

SEQ ID NO: 4075992 - RNA, 19 nt, Vaccinia virus
cuuguauucaacaugcuuu

SEQ ID NO: 4075993 - RNA, 15 nt, Vaccinia virus
cuuuaaaagaaacug

SEQ ID NO: 4075994 - RNA, 23 nt, Vaccinia virus
cuuuaaacuuuggcauauacaag

SEQ ID NO: 4075995 - RNA, 20 nt, Vaccinia virus
cuuuaauugucuugaugaag

SEQ ID NO: 4075996 - RNA, 15 nt, Vaccinia virus
cuuuacuaagaaagu

SEQ ID NO: 4075997 - RNA, 20 nt, Vaccinia virus
cuuuagaauguuaucgauga

SEQ ID NO: 4075998 - RNA, 15 nt, Vaccinia virus
cuuuauaacugaacu

SEQ ID NO: 4075999 - RNA, 20 nt, Vaccinia virus
cuuuauaucguguucauuaa

SEQ ID NO: 4076000 - RNA, 21 nt, Vaccinia virus
cuuuaucucuuaguaaguuua

SEQ ID NO: 4076001 - RNA, 19 nt, Vaccinia virus
cuuuauuuccacauuagau

SEQ ID NO: 4076002 - RNA, 17 nt, Vaccinia virus
cuuucaaacuuaaucuu

SEQ ID NO: 4076003 - RNA, 19 nt, Vaccinia virus
cuuuccaaucaauaauuuu

SEQ ID NO: 4076004 - RNA, 15 nt, Vaccinia virus
cuuucgauuuggaaa

SEQ ID NO: 4076005 - RNA, 18 nt, Vaccinia virus
cuuucuagaauaaguuuc

SEQ ID NO: 4076006 - RNA, 16 nt, Vaccinia virus
cuuucuccuguaaaga

SEQ ID NO: 4076007 - RNA, 19 nt, Vaccinia virus
cuuugaaaauguuacugaa

SEQ ID NO: 4076008 - RNA, 14 nt, Vaccinia virus
cuuugauaaaaguu

SEQ ID NO: 4076009 - RNA, 13 nt, Vaccinia virus
cuuugauggauuc

SEQ ID NO: 4076010 - RNA, 18 nt, Vaccinia virus
cuuugauguggauacauc

SEQ ID NO: 4076011 - RNA, 17 nt, Vaccinia virus
cuuugguuuaauuauuu

SEQ ID NO: 4076012 - RNA, 18 nt, Vaccinia virus
cuuuguagaaaaaaauuc

SEQ ID NO: 4076013 - RNA, 22 nt, Vaccinia virus
cuuuuagaagugauucuuugau

SEQ ID NO: 4076014 - RNA, 22 nt, Vaccinia virus
cuuuuagagguucccaauucca

SEQ ID NO: 4076015 - RNA, 19 nt, Vaccinia virus
cuuuucaauguuuaauuuu

SEQ ID NO: 4076016 - RNA, 22 nt, Vaccinia virus
cuuuucauccaguugaauggau

SEQ ID NO: 4076017 - RNA, 16 nt, Vaccinia virus
cuuuuguauucauaga

SEQ ID NO: 4076018 - RNA, 18 nt, Vaccinia virus
cuuuuguggaauuuccca

SEQ ID NO: 4076019 - RNA, 19 nt, Vaccinia virus
gaaaaaaaagcuauuauca

SEQ ID NO: 4076020 - RNA, 17 nt, Vaccinia virus
gaaaaaaaauuaucuau

SEQ ID NO: 4076021 - RNA, 15 nt, Vaccinia virus
gaaaaaaauucaguu

SEQ ID NO: 4076022 - RNA, 13 nt, Vaccinia virus
gaaaaacacauuu

SEQ ID NO: 4076023 - RNA, 18 nt, Vaccinia virus
gaaaaaguaaaugaugaa

SEQ ID NO: 4076024 - RNA, 13 nt, Vaccinia virus
gaaaaaugauuau

SEQ ID NO: 4076025 - RNA, 17 nt, Vaccinia virus
gaaaacauuauauccuc

SEQ ID NO: 4076026 - RNA, 21 nt, Vaccinia virus
gaaaacgucauucaauaagau

SEQ ID NO: 4076027 - RNA, 17 nt, Vaccinia virus
gaaaacugguuaaaaca

SEQ ID NO: 4076028 - RNA, 15 nt, Vaccinia virus
gaaaaguaugauggu

SEQ ID NO: 4076029 - RNA, 21 nt, Vaccinia virus
gaaaaguucaacaugauuauu

SEQ ID NO: 4076030 - RNA, 16 nt, Vaccinia virus
gaaaauaacaaaucua

SEQ ID NO: 4076031 - RNA, 14 nt, Vaccinia virus
gaaaauauauucua

SEQ ID NO: 4076032 - RNA, 15 nt, Vaccinia virus
gaaaaucaucaucua

SEQ ID NO: 4076033 - RNA, 22 nt, Vaccinia virus
gaaaaugaaaagguacuagaua

SEQ ID NO: 4076034 - RNA, 17 nt, Vaccinia virus
gaaaaugcagaaaugau

SEQ ID NO: 4076035 - RNA, 17 nt, Vaccinia virus
gaaaaugcgauguugau

SEQ ID NO: 4076036 - RNA, 21 nt, Vaccinia virus
gaaaauguacuucgaugagau

SEQ ID NO: 4076037 - RNA, 15 nt, Vaccinia virus
gaaaauuagaaggau

SEQ ID NO: 4076038 - RNA, 18 nt, Vaccinia virus
gaaaauucauauacugau

SEQ ID NO: 4076039 - RNA, 22 nt, Vaccinia virus
gaaacaauguuucuuacauauu

SEQ ID NO: 4076040 - RNA, 13 nt, Vaccinia virus
gaaacauacgaua

SEQ ID NO: 4076041 - RNA, 23 nt, Vaccinia virus
gaaacauauucuaugaauuuaua

SEQ ID NO: 4076042 - RNA, 20 nt, Vaccinia virus
gaaacuaugucaaaaauugu

SEQ ID NO: 4076043 - RNA, 20 nt, Vaccinia virus
gaaacucuguuguauaucua

SEQ ID NO: 4076044 - RNA, 14 nt, Vaccinia virus
gaaagagaagaugg

SEQ ID NO: 4076045 - RNA, 13 nt, Vaccinia virus
gaaagauguuauu

SEQ ID NO: 4076046 - RNA, 15 nt, Vaccinia virus
gaaagauuaaaucau

SEQ ID NO: 4076047 - RNA, 15 nt, Vaccinia virus
gaaagcgugauuuua

SEQ ID NO: 4076048 - RNA, 20 nt, Vaccinia virus
gaaagcuguaaugguuuaua

SEQ ID NO: 4076049 - RNA, 15 nt, Vaccinia virus
gaaagucagaaucua

SEQ ID NO: 4076050 - RNA, 16 nt, Vaccinia virus
gaaagugcaaaugagg

SEQ ID NO: 4076051 - RNA, 20 nt, Vaccinia virus
gaaauaaaggcagaaaugca

SEQ ID NO: 4076052 - RNA, 15 nt, Vaccinia virus
gaaauaaauaaugaa

SEQ ID NO: 4076053 - RNA, 12 nt, Vaccinia virus
gaaauaauacaa

SEQ ID NO: 4076054 - RNA, 16 nt, Vaccinia virus
gaaauaggaauaauua

SEQ ID NO: 4076055 - RNA, 21 nt, Vaccinia virus
gaaauauuauacaugcugaca

SEQ ID NO: 4076056 - RNA, 16 nt, Vaccinia virus
gaaaucaacauaauau

SEQ ID NO: 4076057 - RNA, 14 nt, Vaccinia virus
gaaaucuaguucug

SEQ ID NO: 4076058 - RNA, 19 nt, Vaccinia virus
gaaaucuaucuuauauaca

SEQ ID NO: 4076059 - RNA, 15 nt, Vaccinia virus
gaaauggugauuuug

SEQ ID NO: 4076060 - RNA, 15 nt, Vaccinia virus
gaaauguauaaacua

SEQ ID NO: 4076061 - RNA, 20 nt, Vaccinia virus
gaaauguugggauauugcau

SEQ ID NO: 4076062 - RNA, 15 nt, Vaccinia virus
gaaauugcaaaauau

SEQ ID NO: 4076063 - RNA, 23 nt, Vaccinia virus
gaacaagagauauauuggagcac

SEQ ID NO: 4076064 - RNA, 16 nt, Vaccinia virus
gaacacauuuacgaua

SEQ ID NO: 4076065 - RNA, 13 nt, Vaccinia virus
gaacacgauguuu

SEQ ID NO: 4076066 - RNA, 22 nt, Vaccinia virus
gaacacgauuauuauaaaauaa

SEQ ID NO: 4076067 - RNA, 16 nt, Vaccinia virus
gaacagauaguuuauc

SEQ ID NO: 4076068 - RNA, 12 nt, Vaccinia virus
gaacaguuuauu

SEQ ID NO: 4076069 - RNA, 20 nt, Vaccinia virus
gaacaucauuuccaaaucua

SEQ ID NO: 4076070 - RNA, 17 nt, Variola virus
aguacuccguuuacaga

SEQ ID NO: 4076071 - RNA, 22 nt, Variola virus
aguacucucuuauaaaguggau

SEQ ID NO: 4076072 - RNA, 19 nt, Variola virus
aguacuguucauacaugau

SEQ ID NO: 4076073 - RNA, 13 nt, Variola virus
aguacuuaaugaa

SEQ ID NO: 4076074 - RNA, 18 nt, Variola virus
aguagaaauuccauugga

SEQ ID NO: 4076075 - RNA, 22 nt, Variola virus
aguagagauucggguacuguau

SEQ ID NO: 4076076 - RNA, 18 nt, Variola virus
aguagcuagacaaauggu

SEQ ID NO: 4076077 - RNA, 22 nt, Variola virus
aguauaaacuauaaacuaaaaa

SEQ ID NO: 4076078 - RNA, 21 nt, Variola virus
aguauaaugauaucuaugauu

SEQ ID NO: 4076079 - RNA, 14 nt, Variola virus
aguauacaauauau

SEQ ID NO: 4076080 - RNA, 24 nt, Variola virus
aguauacgaagaaaaaguaaauac

SEQ ID NO: 4076081 - RNA, 14 nt, Variola virus
aguauacuaccuau

SEQ ID NO: 4076082 - RNA, 23 nt, Variola virus
aguauacuaccuauuauauuucu

SEQ ID NO: 4076083 - RNA, 19 nt, Variola virus
aguauagcuaaugaugcag

SEQ ID NO: 4076084 - RNA, 16 nt, Variola virus
aguauauacacagaau

SEQ ID NO: 4076085 - RNA, 17 nt, Variola virus
aguauauagauaugccu

SEQ ID NO: 4076086 - RNA, 23 nt, Variola virus
aguauauuuuaauucauuucauu

SEQ ID NO: 4076087 - RNA, 13 nt, Variola virus
aguaucaaacucu

SEQ ID NO: 4076088 - RNA, 21 nt, Variola virus
aguaucaugaacucuaaucaa

SEQ ID NO: 4076089 - RNA, 21 nt, Variola virus
aguaucugagcacuacaguca

SEQ ID NO: 4076090 - RNA, 17 nt, Variola virus
aguaucuucuuuaucua

SEQ ID NO: 4076091 - RNA, 18 nt, Variola virus
aguaugacuuacuuguau

SEQ ID NO: 4076092 - RNA, 18 nt, Variola virus
aguauuagucauaaacuu

SEQ ID NO: 4076093 - RNA, 15 nt, Variola virus
aguauucaagucaaa

SEQ ID NO: 4076094 - RNA, 16 nt, Variola virus
aguauugaaacuauau

SEQ ID NO: 4076095 - RNA, 13 nt, Variola virus
aguauuuuucuaa

SEQ ID NO: 4076096 - RNA, 20 nt, Variola virus
agucaauaaaggcaaagaua

SEQ ID NO: 4076097 - RNA, 13 nt, Variola virus
agucaauaucuuu

SEQ ID NO: 4076098 - RNA, 14 nt, Variola virus
agucauaaaucauu

SEQ ID NO: 4076099 - RNA, 16 nt, Variola virus
agucauguuaaaaaug

SEQ ID NO: 4076100 - RNA, 15 nt, Variola virus
aguccagaaauggaa

SEQ ID NO: 4076101 - RNA, 21 nt, Variola virus
aguccuauauauuugaaaauc

SEQ ID NO: 4076102 - RNA, 23 nt, Variola virus
agucuaaaaguucuuuauugcac

SEQ ID NO: 4076103 - RNA, 15 nt, Variola virus
agucuccacacuauu

SEQ ID NO: 4076104 - RNA, 15 nt, Variola virus
agucucuccuuccaa

SEQ ID NO: 4076105 - RNA, 17 nt, Variola virus
agucuuaaaaauacuua

SEQ ID NO: 4076106 - RNA, 12 nt, Variola virus
agugaaacauuc

SEQ ID NO: 4076107 - RNA, 19 nt, Variola virus
agugaaauguugucauuau

SEQ ID NO: 4076108 - RNA, 12 nt, Variola virus
agugacaaguag

SEQ ID NO: 4076109 - RNA, 15 nt, Variola virus
agugaccaacucauc

SEQ ID NO: 4076110 - RNA, 21 nt, Variola virus
agugauaaguaauaacuaugu

SEQ ID NO: 4076111 - RNA, 16 nt, Variola virus
agugaucaaauuauug

SEQ ID NO: 4076112 - RNA, 17 nt, Variola virus
agugcuauuuugacaua

SEQ ID NO: 4076113 - RNA, 18 nt, Variola virus
agugcuauuuugacauac

SEQ ID NO: 4076114 - RNA, 17 nt, Variola virus
agugggacaaagaaaau

SEQ ID NO: 4076115 - RNA, 14 nt, Variola virus
agugguuaaucuua

SEQ ID NO: 4076116 - RNA, 19 nt, Variola virus
aguguaauaauuuauguau

SEQ ID NO: 4076117 - RNA, 19 nt, Variola virus
aguguagcguuuuaaauau

SEQ ID NO: 4076118 - RNA, 19 nt, Variola virus
aguguauguggaaauguua

SEQ ID NO: 4076119 - RNA, 21 nt, Variola virus
aguguauuuaugaaaaauaua

SEQ ID NO: 4076120 - RNA, 18 nt, Variola virus
agugugaauaugaucuuc

SEQ ID NO: 4076121 - RNA, 24 nt, Variola virus
aguguuuagcguggcuagaauagu

SEQ ID NO: 4076122 - RNA, 18 nt, Variola virus
aguuaaagaaaaauacuc

SEQ ID NO: 4076123 - RNA, 20 nt, Variola virus
aguuaaauucauauaaagua

SEQ ID NO: 4076124 - RNA, 17 nt, Variola virus
aguuaacacaugucaca

SEQ ID NO: 4076125 - RNA, 22 nt, Variola virus
aguuaaggauaagaacuggacu

SEQ ID NO: 4076126 - RNA, 13 nt, Variola virus
aguuaauaggaca

SEQ ID NO: 4076127 - RNA, 18 nt, Variola virus
aguuaaugcaucuaaaac

SEQ ID NO: 4076128 - RNA, 22 nt, Variola virus
aguuacucuuggucuaauacug

SEQ ID NO: 4076129 - RNA, 16 nt, Variola virus
aguuagaaaaaaugau

SEQ ID NO: 4076130 - RNA, 17 nt, Variola virus
aguuagauacaaagaua

SEQ ID NO: 4076131 - RNA, 16 nt, Variola virus
aguuauaauauuucca

SEQ ID NO: 4076132 - RNA, 21 nt, Variola virus
aguuauacgucauuucaucug

SEQ ID NO: 4076133 - RNA, 13 nt, Variola virus
aguuauauauacu

SEQ ID NO: 4076134 - RNA, 13 nt, Variola virus
aguuauaugaaua

SEQ ID NO: 4076135 - RNA, 21 nt, Variola virus
aguuauauuuucgucuaucca

SEQ ID NO: 4076136 - RNA, 16 nt, Variola virus
aguuaucaucuauaug

SEQ ID NO: 4076137 - RNA, 17 nt, Variola virus
aguuauccgaucuaaaa

SEQ ID NO: 4076138 - RNA, 23 nt, Variola virus
aguuauggacauaguaauacaua

SEQ ID NO: 4076139 - RNA, 20 nt, Variola virus
aguucaaauaugaaaugcua

SEQ ID NO: 4076140 - RNA, 18 nt, Variola virus
aguuccaaauuuaaauac

SEQ ID NO: 4076141 - RNA, 17 nt, Variola virus
aguuccgagauaauuuc

SEQ ID NO: 4076142 - RNA, 16 nt, Variola virus
aguuccucaacgugau

SEQ ID NO: 4076143 - RNA, 19 nt, Variola virus
aguucuggcaauguuucau

SEQ ID NO: 4076144 - RNA, 12 nt, Variola virus
aguucugugcag

SEQ ID NO: 4076145 - RNA, 16 nt, Variola virus
aguucuuaauacuucg

SEQ ID NO: 4076146 - RNA, 13 nt, Variola virus
aguucuucuagaa

SEQ ID NO: 4076147 - RNA, 24 nt, Variola virus
aguugaauauauuaaaguuauuua

SEQ ID NO: 4076148 - RNA, 16 nt, Variola virus
aguugcauagauguau

SEQ ID NO: 4076149 - RNA, 20 nt, Variola virus
aguuguauacuaucggaauc

SEQ ID NO: 4076150 - RNA, 16 nt, Variola virus
aguugucggucuaaag

SEQ ID NO: 4076151 - RNA, 23 nt, Variola virus
aguuguuauaaaggacagaaaua

SEQ ID NO: 4076152 - RNA, 12 nt, Variola virus
aguuucuagaua

SEQ ID NO: 4076153 - RNA, 17 nt, Variola virus
aguuucugguuuucuau

SEQ ID NO: 4076154 - RNA, 15 nt, Variola virus
aguuucuuaacuaca

SEQ ID NO: 4076155 - RNA, 22 nt, Variola virus
aguuucuugcguuuaauaaaca

SEQ ID NO: 4076156 - RNA, 16 nt, Variola virus
aguuugaauaguuugu

SEQ ID NO: 4076157 - RNA, 15 nt, Variola virus
aguuuggauuaauaa

SEQ ID NO: 4076158 - RNA, 20 nt, Variola virus
aguuuggcaauuaaaaauua

SEQ ID NO: 4076159 - RNA, 16 nt, Variola virus
aguuuuaaacaaaaua

SEQ ID NO: 4076160 - RNA, 17 nt, Variola virus
aguuuuaccuucuaaug

SEQ ID NO: 4076161 - RNA, 15 nt, Variola virus
aguuuuauaacgaag

SEQ ID NO: 4076162 - RNA, 22 nt, Variola virus
aguuuucucuuggcuucuucca

SEQ ID NO: 4076163 - RNA, 16 nt, Variola virus
aguuuuggaucaaaug

SEQ ID NO: 4076164 - RNA, 19 nt, Variola virus
aguuuuggccauuauuaga

SEQ ID NO: 4076165 - RNA, 13 nt, Variola virus
auaaaaaaaauua

SEQ ID NO: 4076166 - RNA, 17 nt, Variola virus
auaaaaaauaaguauau

SEQ ID NO: 4076167 - RNA, 18 nt, Variola virus
auaaaaaauuuuauucaa

SEQ ID NO: 4076168 - RNA, 16 nt, Variola virus
auaaaaacauuauucu

SEQ ID NO: 4076169 - RNA, 17 nt, Variola virus
auaaaaagguaucugau

SEQ ID NO: 4076170 - RNA, 20 nt, Variola virus
auaaaaauguuuuuguuuaa

SEQ ID NO: 4076171 - RNA, 15 nt, Variola virus
auaaaacucauauag

SEQ ID NO: 4076172 - RNA, 12 nt, Variola virus
auaaaauagaca

SEQ ID NO: 4076173 - RNA, 18 nt, Variola virus
auaaaauuaauaauagaa

SEQ ID NO: 4076174 - RNA, 17 nt, Variola virus
auaaacaacauaauaca

SEQ ID NO: 4076175 - RNA, 14 nt, Variola virus
auaaacaugucuau

SEQ ID NO: 4076176 - RNA, 20 nt, Variola virus
auaaacaugucuauuguuaa

SEQ ID NO: 4076177 - RNA, 15 nt, Variola virus
auaaacgacauaaua

SEQ ID NO: 4076178 - RNA, 18 nt, Variola virus
auaaacguucacguaaau

SEQ ID NO: 4076179 - RNA, 14 nt, Variola virus
auaaacuaacacaa

SEQ ID NO: 4076180 - RNA, 14 nt, Variola virus
auaaacucagauaa

SEQ ID NO: 4076181 - RNA, 19 nt, Variola virus
auaaacugcgccaaauugu

SEQ ID NO: 4076182 - RNA, 15 nt, Variola virus
auaaagaaaaaucua

SEQ ID NO: 4076183 - RNA, 15 nt, Variola virus
auaaagaaaauaugg

SEQ ID NO: 4076184 - RNA, 17 nt, Variola virus
auaaaggacagaaauau

SEQ ID NO: 4076185 - RNA, 17 nt, Variola virus
auaaaggagaaggaaaa

SEQ ID NO: 4076186 - RNA, 14 nt, Variola virus
auaaagucugucaa

SEQ ID NO: 4076187 - RNA, 15 nt, Variola virus
auaaauaaucaaaau

SEQ ID NO: 4076188 - RNA, 20 nt, Variola virus
auaaauauccuuggaauuga

SEQ ID NO: 4076189 - RNA, 18 nt, Variola virus
auaaauguucaaugaauu

SEQ ID NO: 4076190 - RNA, 20 nt, Variola virus
auaaauuaggagauaaucua

SEQ ID NO: 4076191 - RNA, 14 nt, Variola virus
auaaauuauaucua

SEQ ID NO: 4076192 - RNA, 18 nt, Variola virus
auaaauugguaaauccua

SEQ ID NO: 4076193 - RNA, 21 nt, Variola virus
auaaauuuuuccaagaaacua

SEQ ID NO: 4076194 - RNA, 10 nt, Variola virus
auaacaaagg

SEQ ID NO: 4076195 - RNA, 18 nt, Variola virus
auaacaaaugcagaaauu

SEQ ID NO: 4076196 - RNA, 21 nt, Variola virus
aucugauaagauaucuucuca

SEQ ID NO: 4076197 - RNA, 15 nt, Variola virus
aucugauuccauaua

SEQ ID NO: 4076198 - RNA, 16 nt, Variola virus
aucugauuuauuuccu

SEQ ID NO: 4076199 - RNA, 17 nt, Variola virus
aucugccgaauacagug

SEQ ID NO: 4076200 - RNA, 15 nt, Variola virus
aucuguaaacauuug

SEQ ID NO: 4076201 - RNA, 15 nt, Variola virus
aucuguauaauaaga

SEQ ID NO: 4076202 - RNA, 20 nt, Variola virus
aucuguauaauaagaugcaa

SEQ ID NO: 4076203 - RNA, 12 nt, Variola virus
aucuguauucuc

SEQ ID NO: 4076204 - RNA, 21 nt, Variola virus
aucuguauucucgauacagua

SEQ ID NO: 4076205 - RNA, 16 nt, Variola virus
aucugugauguaugca

SEQ ID NO: 4076206 - RNA, 16 nt, Variola virus
aucuuacauauacaga

SEQ ID NO: 4076207 - RNA, 22 nt, Variola virus
aucuuaccauguccucaaauaa

SEQ ID NO: 4076208 - RNA, 20 nt, Variola virus
aucuuagacauuuuuagaga

SEQ ID NO: 4076209 - RNA, 14 nt, Variola virus
aucuucguuaaaaa

SEQ ID NO: 4076210 - RNA, 19 nt, Variola virus
aucuucguuaaaaaguuuu

SEQ ID NO: 4076211 - RNA, 19 nt, Variola virus
aucuugacugucuaucucu

SEQ ID NO: 4076212 - RNA, 17 nt, Variola virus
aucuuuaugaauuacuu

SEQ ID NO: 4076213 - RNA, 19 nt, Variola virus
aucuuuggagaaucaucua

SEQ ID NO: 4076214 - RNA, 14 nt, Variola virus
aucuuuguuaaaua

SEQ ID NO: 4076215 - RNA, 24 nt, Variola virus
aucuuuguuggaucagucucuaag

SEQ ID NO: 4076216 - RNA, 15 nt, Variola virus
aucuuuuuaggaaug

SEQ ID NO: 4076217 - RNA, 17 nt, Variola virus
augaaacgaacacuauu

SEQ ID NO: 4076218 - RNA, 16 nt, Variola virus
augaaagaaagaagac

SEQ ID NO: 4076219 - RNA, 20 nt, Variola virus
augaaauaucuuaaggagaa

SEQ ID NO: 4076220 - RNA, 19 nt, Variola virus
augaaauauguagucguga

SEQ ID NO: 4076221 - RNA, 16 nt, Variola virus
augaacaaagaaaugg

SEQ ID NO: 4076222 - RNA, 21 nt, Variola virus
augaacacacgaugaaaaugu

SEQ ID NO: 4076223 - RNA, 23 nt, Variola virus
augaagaugacgaugaaaaugau

SEQ ID NO: 4076224 - RNA, 18 nt, Variola virus
augaaggaaagacauuau

SEQ ID NO: 4076225 - RNA, 21 nt, Variola virus
augaagggaucguuaaugaac

SEQ ID NO: 4076226 - RNA, 19 nt, Variola virus
augaauaaagagaaugcag

SEQ ID NO: 4076227 - RNA, 23 nt, Variola virus
augaaucacguguuuaacaaugg

SEQ ID NO: 4076228 - RNA, 14 nt, Variola virus
augaauuaauuaaa

SEQ ID NO: 4076229 - RNA, 13 nt, Variola virus
augaauuagagaa

SEQ ID NO: 4076230 - RNA, 17 nt, Variola virus
augaauuccucugaaaa

SEQ ID NO: 4076231 - RNA, 18 nt, Variola virus
augaauuuagaaaugauu

SEQ ID NO: 4076232 - RNA, 22 nt, Variola virus
augacacuaguuaagaacaugu

SEQ ID NO: 4076233 - RNA, 15 nt, Variola virus
augacauuuauucau

SEQ ID NO: 4076234 - RNA, 15 nt, Variola virus
augaccaaugaaugg

SEQ ID NO: 4076235 - RNA, 21 nt, Variola virus
augaccauuuaaaaaaacacu

SEQ ID NO: 4076236 - RNA, 14 nt, Variola virus
augacgcaguaaca

SEQ ID NO: 4076237 - RNA, 17 nt, Variola virus
augacgucaugucuauu

SEQ ID NO: 4076238 - RNA, 19 nt, Variola virus
augacuuauaaaaauacua

SEQ ID NO: 4076239 - RNA, 23 nt, Variola virus
augacuuauaaaaauacuaaaac

SEQ ID NO: 4076240 - RNA, 20 nt, Variola virus
augagacagauuaucauaua

SEQ ID NO: 4076241 - RNA, 13 nt, Variola virus
augagauguuauu

SEQ ID NO: 4076242 - RNA, 15 nt, Variola virus
augagcaaguagaaa

SEQ ID NO: 4076243 - RNA, 17 nt, Variola virus
augaggcguuuaucaua

SEQ ID NO: 4076244 - RNA, 18 nt, Variola virus
augaguaaaaucaaacac

SEQ ID NO: 4076245 - RNA, 11 nt, Variola virus
augaguauuuu

SEQ ID NO: 4076246 - RNA, 15 nt, Variola virus
augaguucugugcag

SEQ ID NO: 4076247 - RNA, 13 nt, Variola virus
augauaaaaugaa

SEQ ID NO: 4076248 - RNA, 21 nt, Variola virus
augauacacuaaguauauaca

SEQ ID NO: 4076249 - RNA, 13 nt, Variola virus
augauauaagacu

SEQ ID NO: 4076250 - RNA, 21 nt, Variola virus
augauaugauuuuuaaucaag

SEQ ID NO: 4076251 - RNA, 14 nt, Variola virus
augaucaaaaagag

SEQ ID NO: 4076252 - RNA, 15 nt, Variola virus
augaucauacauuau

SEQ ID NO: 4076253 - RNA, 20 nt, Variola virus
augaucugucuuauaugaag

SEQ ID NO: 4076254 - RNA, 21 nt, Variola virus
augaugauacucucaaccauu

SEQ ID NO: 4076255 - RNA, 20 nt, Variola virus
augaugcuauuagaauuuac

SEQ ID NO: 4076256 - RNA, 18 nt, Variola virus
augauuauaguuucuauu

SEQ ID NO: 4076257 - RNA, 19 nt, Variola virus
augauuauaguuucuauuu

SEQ ID NO: 4076258 - RNA, 14 nt, Variola virus
augauuauguuguu

SEQ ID NO: 4076259 - RNA, 16 nt, Variola virus
augauuucagauacua

SEQ ID NO: 4076260 - RNA, 22 nt, Variola virus
augauuuuaccgcaauauguau

SEQ ID NO: 4076261 - RNA, 22 nt, Variola virus
augauuuugaaccguauuacuc

SEQ ID NO: 4076262 - RNA, 13 nt, Variola virus
augcaaggcauuu

SEQ ID NO: 4076263 - RNA, 13 nt, Variola virus
augcauaaacgaa

SEQ ID NO: 4076264 - RNA, 13 nt, Variola virus
augcaucaaacag

SEQ ID NO: 4076265 - RNA, 19 nt, Variola virus
augcaucuauauaaucuuu

SEQ ID NO: 4076266 - RNA, 17 nt, Variola virus
augcauuauccaaaaua

SEQ ID NO: 4076267 - RNA, 20 nt, Variola virus
augcauuggcaucaaaagaa

SEQ ID NO: 4076268 - RNA, 17 nt, Variola virus
augcgagagacaaaaug

SEQ ID NO: 4076269 - RNA, 15 nt, Variola virus
augcggaugcucagu

SEQ ID NO: 4076270 - RNA, 24 nt, Variola virus
augcucuagauacugcaaaacuua

SEQ ID NO: 4076271 - RNA, 22 nt, Variola virus
augcugguuauuacacaugugu

SEQ ID NO: 4076272 - RNA, 12 nt, Variola virus
auggaaaggaaa

SEQ ID NO: 4076273 - RNA, 15 nt, Variola virus
auggaaauauuaaag

SEQ ID NO: 4076274 - RNA, 15 nt, Variola virus
auggaauaguuuuua

SEQ ID NO: 4076275 - RNA, 23 nt, Variola virus
auggaauauaauaaucuauuuua

SEQ ID NO: 4076276 - RNA, 18 nt, Variola virus
auggaccaaauuaucauc

SEQ ID NO: 4076277 - RNA, 17 nt, Variola virus
auggaccgucggacagu

SEQ ID NO: 4076278 - RNA, 16 nt, Variola virus
auggacgcaaaugauc

SEQ ID NO: 4076279 - RNA, 22 nt, Variola virus
auggagaagguuucgauuaucu

SEQ ID NO: 4076280 - RNA, 16 nt, Variola virus
auggagagauuuaacu

SEQ ID NO: 4076281 - RNA, 17 nt, Variola virus
auggaguaaguaguuua

SEQ ID NO: 4076282 - RNA, 14 nt, Variola virus
auggaguuguaaau

SEQ ID NO: 4076283 - RNA, 14 nt, Variola virus
auggaugcagaaua

SEQ ID NO: 4076284 - RNA, 16 nt, Variola virus
auggauggaugaugca

SEQ ID NO: 4076285 - RNA, 23 nt, Variola virus
auggauuaguuagacugaaugcu

SEQ ID NO: 4076286 - RNA, 23 nt, Variola virus
augggcgccgaccagucugaaca

SEQ ID NO: 4076287 - RNA, 14 nt, Variola virus
auggucauguuuau

SEQ ID NO: 4076288 - RNA, 15 nt, Variola virus
augguuuucacauuu

SEQ ID NO: 4076289 - RNA, 14 nt, Variola virus
auguaaaaauguua

SEQ ID NO: 4076290 - RNA, 14 nt, Variola virus
auguaacaauauua

SEQ ID NO: 4076291 - RNA, 16 nt, Variola virus
auguaacauuaaguaa

SEQ ID NO: 4076292 - RNA, 13 nt, Variola virus
auguaaguauuua

SEQ ID NO: 4076293 - RNA, 16 nt, Variola virus
auguaaucauuaucca

SEQ ID NO: 4076294 - RNA, 18 nt, Variola virus
auguaauggauaauuucc

SEQ ID NO: 4076295 - RNA, 23 nt, Variola virus
auguacucacggcuacggcauua

SEQ ID NO: 4076296 - RNA, 22 nt, Variola virus
auguagaauaucuaccaaauua

SEQ ID NO: 4076297 - RNA, 21 nt, Variola virus
auguagaaugugauaauuucc

SEQ ID NO: 4076298 - RNA, 22 nt, Variola virus
auguagaauuuuuuaaaaaguu

SEQ ID NO: 4076299 - RNA, 21 nt, Variola virus
auguauaauauaaaaacauua

SEQ ID NO: 4076300 - RNA, 14 nt, Variola virus
auguauacauaaua

SEQ ID NO: 4076301 - RNA, 14 nt, Variola virus
auguauauaucacu

SEQ ID NO: 4076302 - RNA, 21 nt, Variola virus
auguaucuuccacaucaaacg

SEQ ID NO: 4076303 - RNA, 14 nt, Variola virus
auguauuagacaaa

SEQ ID NO: 4076304 - RNA, 21 nt, Variola virus
auguauuucauuguucaucca

SEQ ID NO: 4076305 - RNA, 19 nt, Variola virus
auguauuuuaauaaaucau

SEQ ID NO: 4076306 - RNA, 21 nt, Variola virus
augucaaaggaugaaagaaag

SEQ ID NO: 4076307 - RNA, 19 nt, Variola virus
augucaagaucuuuuguau

SEQ ID NO: 4076308 - RNA, 13 nt, Variola virus
augucacuauuaa

SEQ ID NO: 4076309 - RNA, 16 nt, Variola virus
augucaucgaaauggu

SEQ ID NO: 4076310 - RNA, 21 nt, Variola virus
augucuaacggcgaacauguu

SEQ ID NO: 4076311 - RNA, 13 nt, Variola virus
augucuacauaaa

SEQ ID NO: 4076312 - RNA, 13 nt, Variola virus
augucuccaauuu

SEQ ID NO: 4076313 - RNA, 23 nt, Variola virus
augucuuaaaguuauuaauuaau

SEQ ID NO: 4076314 - RNA, 13 nt, Variola virus
augucuucaauuc

SEQ ID NO: 4076315 - RNA, 18 nt, Variola virus
augugacucuaguaacuc

SEQ ID NO: 4076316 - RNA, 20 nt, Variola virus
augugauuuuaucaaacaug

SEQ ID NO: 4076317 - RNA, 13 nt, Variola virus
auguggaauuaug

SEQ ID NO: 4076318 - RNA, 14 nt, Variola virus
augugguaaaagaa

SEQ ID NO: 4076319 - RNA, 18 nt, Variola virus
auguguaaaaaguuuuaa

SEQ ID NO: 4076320 - RNA, 14 nt, Variola virus
auguguagaauuaa

SEQ ID NO: 4076321 - RNA, 22 nt, Variola virus
augugucuacauaaauaugcaa

SEQ ID NO: 4076322 - RNA, 13 nt, Variola virus
gauguaguaauau

SEQ ID NO: 4076323 - RNA, 15 nt, Variola virus
gauguauaaguuuua

SEQ ID NO: 4076324 - RNA, 17 nt, Variola virus
gauguaucacacgcucu

SEQ ID NO: 4076325 - RNA, 18 nt, Variola virus
gaugucaaaggaugaaag

SEQ ID NO: 4076326 - RNA, 17 nt, Variola virus
gaugucaagaucuuuug

SEQ ID NO: 4076327 - RNA, 20 nt, Variola virus
gauguugauuaggucuuuua

SEQ ID NO: 4076328 - RNA, 16 nt, Variola virus
gauguuuuuagaaaau

SEQ ID NO: 4076329 - RNA, 21 nt, Variola virus
gauuaaaaauaaaguuaucau

SEQ ID NO: 4076330 - RNA, 22 nt, Variola virus
gauuaaacuuuaaugauugcau

SEQ ID NO: 4076331 - RNA, 22 nt, Variola virus
gauuaaggacuuuuauauccca

SEQ ID NO: 4076332 - RNA, 22 nt, Variola virus
gauuaauaauucauggaaauuu

SEQ ID NO: 4076333 - RNA, 12 nt, Variola virus
gauuaauguuuu

SEQ ID NO: 4076334 - RNA, 15 nt, Variola virus
gauuacaagaaauau

SEQ ID NO: 4076335 - RNA, 20 nt, Variola virus
gauuacuuugacaaauguag

SEQ ID NO: 4076336 - RNA, 22 nt, Variola virus
gauuaucguuuucaucuuuuau

SEQ ID NO: 4076337 - RNA, 16 nt, Variola virus
gauuauucacuauaau

SEQ ID NO: 4076338 - RNA, 12 nt, Variola virus
gauuauuuucau

SEQ ID NO: 4076339 - RNA, 15 nt, Variola virus
gauucaacauuuaua

SEQ ID NO: 4076340 - RNA, 13 nt, Variola virus
gauucacaaauau

SEQ ID NO: 4076341 - RNA, 15 nt, Variola virus
gauucacaauuuaua

SEQ ID NO: 4076342 - RNA, 14 nt, Variola virus
gauuccauauacca

SEQ ID NO: 4076343 - RNA, 19 nt, Variola virus
gauuccauggaagaacuac

SEQ ID NO: 4076344 - RNA, 14 nt, Variola virus
gauucuaaugauuu

SEQ ID NO: 4076345 - RNA, 18 nt, Variola virus
gauucucuacucuagaua

SEQ ID NO: 4076346 - RNA, 22 nt, Variola virus
gauucugauaacauaaaaauau

SEQ ID NO: 4076347 - RNA, 21 nt, Variola virus
gauugcauauuauauuuuaua

SEQ ID NO: 4076348 - RNA, 23 nt, Variola virus
gauuggucuuaaaagauauuaau

SEQ ID NO: 4076349 - RNA, 19 nt, Variola virus
gauuguuuauuguauauac

SEQ ID NO: 4076350 - RNA, 18 nt, Variola virus
gauuuacgcaaacuauau

SEQ ID NO: 4076351 - RNA, 16 nt, Variola virus
gauuuccaaucuuuug

SEQ ID NO: 4076352 - RNA, 22 nt, Variola virus
gauuuuauuuaguguagauaug

SEQ ID NO: 4076353 - RNA, 12 nt, Variola virus
gauuuucuggga

SEQ ID NO: 4076354 - RNA, 23 nt, Variola virus
gauuuuuuuaaaaaauagaaaaa

SEQ ID NO: 4076355 - RNA, 16 nt, Variola virus
gcaaaaauaauaugau

SEQ ID NO: 4076356 - RNA, 22 nt, Variola virus
gcaacggggaugaugauaauga

SEQ ID NO: 4076357 - RNA, 17 nt, Variola virus
gcaacuauuuauuucua

SEQ ID NO: 4076358 - RNA, 16 nt, Variola virus
gcaagaacauaaugau

SEQ ID NO: 4076359 - RNA, 22 nt, Variola virus
gcaaguaggauuuuuccaaagu

SEQ ID NO: 4076360 - RNA, 15 nt, Variola virus
gcaauaaauaugauu

SEQ ID NO: 4076361 - RNA, 12 nt, Variola virus
gcaauaauacaa

SEQ ID NO: 4076362 - RNA, 17 nt, Variola virus
gcaaucuaacauuuuua

SEQ ID NO: 4076363 - RNA, 15 nt, Variola virus
gcaauuauauaaugu

SEQ ID NO: 4076364 - RNA, 16 nt, Variola virus
gcaauuauauaaugua

SEQ ID NO: 4076365 - RNA, 21 nt, Variola virus
gcaccauucauaauuacagaa

SEQ ID NO: 4076366 - RNA, 12 nt, Variola virus
gcacgaacaaaa

SEQ ID NO: 4076367 - RNA, 21 nt, Variola virus
gcacgccguauacucuauagu

SEQ ID NO: 4076368 - RNA, 17 nt, Variola virus
gcacuacuguuaagaau

SEQ ID NO: 4076369 - RNA, 14 nt, Variola virus
gcagaauagauauu

SEQ ID NO: 4076370 - RNA, 14 nt, Variola virus
gcagaauauuucua

SEQ ID NO: 4076371 - RNA, 17 nt, Variola virus
gcagacaaaaugaagau

SEQ ID NO: 4076372 - RNA, 21 nt, Variola virus
gcagguaugauagcuccacca

SEQ ID NO: 4076373 - RNA, 17 nt, Variola virus
gcaguaauauuguuaau

SEQ ID NO: 4076374 - RNA, 19 nt, Variola virus
gcagucauuccaucauuua

SEQ ID NO: 4076375 - RNA, 23 nt, Variola virus
gcaguuagaacgguuauagcauc

SEQ ID NO: 4076376 - RNA, 15 nt, Variola virus
gcauaccauacuuag

SEQ ID NO: 4076377 - RNA, 16 nt, Variola virus
gcauagauguauauag

SEQ ID NO: 4076378 - RNA, 17 nt, Variola virus
gcauaggaacauuucug

SEQ ID NO: 4076379 - RNA, 23 nt, Variola virus
gcaucauacgaaaauagauucua

SEQ ID NO: 4076380 - RNA, 12 nt, Variola virus
gcauccauccaa

SEQ ID NO: 4076381 - RNA, 19 nt, Variola virus
gcaucuauauaaucuuuuu

SEQ ID NO: 4076382 - RNA, 19 nt, Variola virus
gcaugauaauauagaagau

SEQ ID NO: 4076383 - RNA, 17 nt, Variola virus
gcauggucuuguaauau

SEQ ID NO: 4076384 - RNA, 19 nt, Variola virus
gcauuaacaaaaucuuuaa

SEQ ID NO: 4076385 - RNA, 23 nt, Variola virus
gccaaaaaauccuguaauacuuu

SEQ ID NO: 4076386 - RNA, 19 nt, Variola virus
gccaaauguucaauaucua

SEQ ID NO: 4076387 - RNA, 18 nt, Variola virus
gccaacagguuaaagaaa

SEQ ID NO: 4076388 - RNA, 17 nt, Variola virus
gccaaucuauaauagau

SEQ ID NO: 4076389 - RNA, 14 nt, Variola virus
gccauuauuagaaa

SEQ ID NO: 4076390 - RNA, 20 nt, Variola virus
gccauugaaaacuauuucuu

SEQ ID NO: 4076391 - RNA, 19 nt, Variola virus
gccauugcuggauuacauc

SEQ ID NO: 4076392 - RNA, 14 nt, Variola virus
gccauuuguuuugu

SEQ ID NO: 4076393 - RNA, 15 nt, Variola virus
gccggcagucacauc

SEQ ID NO: 4076394 - RNA, 19 nt, Variola virus
gccgguugccgcaaauaga

SEQ ID NO: 4076395 - RNA, 13 nt, Variola virus
gccucuagauaua

SEQ ID NO: 4076396 - RNA, 20 nt, Variola virus
gccucuagauauagcuuuua

SEQ ID NO: 4076397 - RNA, 22 nt, Variola virus
gccuuauucucuggagaaaaga

SEQ ID NO: 4076398 - RNA, 15 nt, Variola virus
gcgauaauagauagu

SEQ ID NO: 4076399 - RNA, 17 nt, Variola virus
gcgaucugaauaaacaa

SEQ ID NO: 4076400 - RNA, 18 nt, Variola virus
gcgauuguagauaaugaa

SEQ ID NO: 4076401 - RNA, 11 nt, Variola virus
gcgcaugauuu

SEQ ID NO: 4076402 - RNA, 13 nt, Variola virus
gcgccaaauugug

SEQ ID NO: 4076403 - RNA, 13 nt, Variola virus
gcgcuaucuuuua

SEQ ID NO: 4076404 - RNA, 16 nt, Variola virus
gcggagauuuaaucug

SEQ ID NO: 4076405 - RNA, 17 nt, Variola virus
gcggcuuaauaaauguu

SEQ ID NO: 4076406 - RNA, 17 nt, Variola virus
gcgguaaacauucaugu

SEQ ID NO: 4076407 - RNA, 11 nt, Variola virus
gcguacaaaag

SEQ ID NO: 4076408 - RNA, 22 nt, Variola virus
gcgucuaguagauaugcuuuua

SEQ ID NO: 4076409 - RNA, 20 nt, Variola virus
gcgugaacaacuuacagaug

SEQ ID NO: 4076410 - RNA, 11 nt, Variola virus
gcguuaaacau

SEQ ID NO: 4076411 - RNA, 22 nt, Variola virus
gcuaauauuuuauuacaaucau

SEQ ID NO: 4076412 - RNA, 24 nt, Variola virus
gcuacacaaauaccaaucaaaaga

SEQ ID NO: 4076413 - RNA, 15 nt, Variola virus
gcuacagaaagguag

SEQ ID NO: 4076414 - RNA, 15 nt, Variola virus
gcuaccaaaguuauu

SEQ ID NO: 4076415 - RNA, 11 nt, Variola virus
gcuauaaugau

SEQ ID NO: 4076416 - RNA, 20 nt, Variola virus
gcuauagaggacaauaauau

SEQ ID NO: 4076417 - RNA, 14 nt, Variola virus
gcuauauaaaucau

SEQ ID NO: 4076418 - RNA, 18 nt, Variola virus
gcuauauaauaaauguau

SEQ ID NO: 4076419 - RNA, 23 nt, Variola virus
gcuauauagaugacgauccuuua

SEQ ID NO: 4076420 - RNA, 17 nt, Variola virus
gcuauauggauauucau

SEQ ID NO: 4076421 - RNA, 17 nt, Variola virus
gcuaugaaggaaagaca

SEQ ID NO: 4076422 - RNA, 14 nt, Variola virus
gcuauuaaucuuua

SEQ ID NO: 4076423 - RNA, 16 nt, Variola virus
gcucaaacaaaaugug

SEQ ID NO: 4076424 - RNA, 15 nt, Variola virus
gcucaguaaauguau

SEQ ID NO: 4076425 - RNA, 14 nt, Variola virus
gcuccauauuacaa

SEQ ID NO: 4076426 - RNA, 12 nt, Variola virus
gcucuacaaaau

SEQ ID NO: 4076427 - RNA, 18 nt, Variola virus
gcugaacacguuaaacaa

SEQ ID NO: 4076428 - RNA, 21 nt, Variola virus
gcugaaguaaucaauuuuucu

SEQ ID NO: 4076429 - RNA, 16 nt, Variola virus
gcugcaucuaaauuaa

SEQ ID NO: 4076430 - RNA, 23 nt, Variola virus
gcugcuaugauaauuagaucauu

SEQ ID NO: 4076431 - RNA, 19 nt, Variola virus
gcugcuggaucuaaauauu

SEQ ID NO: 4076432 - RNA, 14 nt, Variola virus
gcugguaaaguaaa

SEQ ID NO: 4076433 - RNA, 23 nt, Variola virus
gcugguaauaguuuacagauauu

SEQ ID NO: 4076434 - RNA, 16 nt, Variola virus
gcuguacuaaauucaa

SEQ ID NO: 4076435 - RNA, 19 nt, Variola virus
gcuguuccucuguaaauaa

SEQ ID NO: 4076436 - RNA, 22 nt, Variola virus
gcuuauaucagguauaauagau

SEQ ID NO: 4076437 - RNA, 22 nt, Variola virus
gcuuccagauacagugauuuug

SEQ ID NO: 4076438 - RNA, 14 nt, Variola virus
gcuugaaaauggac

SEQ ID NO: 4076439 - RNA, 14 nt, Variola virus
gcuuguauguguua

SEQ ID NO: 4076440 - RNA, 19 nt, Variola virus
gcuuuaauaucuaaauaug

SEQ ID NO: 4076441 - RNA, 18 nt, Variola virus
gcuuuuuugacauauuaa

SEQ ID NO: 4076442 - RNA, 23 nt, Variola virus
ggaaaaaaaucuuuuuuuauucu

SEQ ID NO: 4076443 - RNA, 11 nt, Variola virus
ggaaaaagcuc

SEQ ID NO: 4076444 - RNA, 22 nt, Variola virus
ggaaaacuuuaauaacaaagaa

SEQ ID NO: 4076445 - RNA, 23 nt, Variola virus
ggaaaagaauuuaccagauaucu

SEQ ID NO: 4076446 - RNA, 11 nt, Variola virus
ggaaaaugaug

SEQ ID NO: 4076447 - RNA, 22 nt, Variola virus
ggaaaucacaaugacuuuauca

SEQ ID NO: 4076448 - RNA, 18 nt, Variola virus
uaaggguccuacaaccau

SEQ ID NO: 4076449 - RNA, 15 nt, Variola virus
uaaguuacaggaacu

SEQ ID NO: 4076450 - RNA, 19 nt, Variola virus
uaaguuccauuacaaauau

SEQ ID NO: 4076451 - RNA, 21 nt, Variola virus
uaauaaaaguggaagucauuu

SEQ ID NO: 4076452 - RNA, 15 nt, Variola virus
uaauaaaauuauuca

SEQ ID NO: 4076453 - RNA, 14 nt, Variola virus
uaauaaauguuucg

SEQ ID NO: 4076454 - RNA, 13 nt, Variola virus
uaauaaauuuauu

SEQ ID NO: 4076455 - RNA, 13 nt, Variola virus
uaauaacaaguau

SEQ ID NO: 4076456 - RNA, 21 nt, Variola virus
uaauaacaugcgguucaaaau

SEQ ID NO: 4076457 - RNA, 19 nt, Variola virus
uaauaauuuguauauacau

SEQ ID NO: 4076458 - RNA, 16 nt, Variola virus
uaauacauauuauuca

SEQ ID NO: 4076459 - RNA, 16 nt, Variola virus
uaauacccauguuuaa

SEQ ID NO: 4076460 - RNA, 20 nt, Variola virus
uaauacccugguagaagaau

SEQ ID NO: 4076461 - RNA, 15 nt, Variola virus
uaauagaauuuauau

SEQ ID NO: 4076462 - RNA, 13 nt, Variola virus
uaauagacuauau

SEQ ID NO: 4076463 - RNA, 16 nt, Variola virus
uaauagauauaucucu

SEQ ID NO: 4076464 - RNA, 20 nt, Variola virus
uaauagaucaacagaaauau

SEQ ID NO: 4076465 - RNA, 15 nt, Variola virus
uaauaguuuaucaua

SEQ ID NO: 4076466 - RNA, 19 nt, Variola virus
uaauaguuuaucauacuua

SEQ ID NO: 4076467 - RNA, 21 nt, Variola virus
uaauauaaaaacuuauuacau

SEQ ID NO: 4076468 - RNA, 20 nt, Variola virus
uaauauaaaucaaauacuug

SEQ ID NO: 4076469 - RNA, 14 nt, Variola virus
uaauauaauacuaa

SEQ ID NO: 4076470 - RNA, 13 nt, Variola virus
uaauauaauauua

SEQ ID NO: 4076471 - RNA, 21 nt, Variola virus
uaauauaucuuauaucucguu

SEQ ID NO: 4076472 - RNA, 19 nt, Variola virus
uaauaucccacauugucau

SEQ ID NO: 4076473 - RNA, 17 nt, Variola virus
uaauauccgcuauuaca

SEQ ID NO: 4076474 - RNA, 22 nt, Variola virus
uaauauccuuauccgacuuuau

SEQ ID NO: 4076475 - RNA, 19 nt, Variola virus
uaauauuaaaaauaagaau

SEQ ID NO: 4076476 - RNA, 14 nt, Variola virus
uaauauuagaauau

SEQ ID NO: 4076477 - RNA, 20 nt, Variola virus
uaauauuaucuauaugaugg

SEQ ID NO: 4076478 - RNA, 14 nt, Variola virus
uaauauucauuaag

SEQ ID NO: 4076479 - RNA, 19 nt, Variola virus
uaauauucguauuuugcau

SEQ ID NO: 4076480 - RNA, 14 nt, Variola virus
uaauauucuaaaac

SEQ ID NO: 4076481 - RNA, 12 nt, Variola virus
uaauauugugaa

SEQ ID NO: 4076482 - RNA, 23 nt, Variola virus
uaauauugugaaugguaaagaau

SEQ ID NO: 4076483 - RNA, 12 nt, Variola virus
uaauauuguuaa

SEQ ID NO: 4076484 - RNA, 14 nt, Variola virus
uaauauuguuaauu

SEQ ID NO: 4076485 - RNA, 20 nt, Variola virus
uaaucaaaauugucuaugau

SEQ ID NO: 4076486 - RNA, 22 nt, Variola virus
uaaucaaauuugguguuguuaa

SEQ ID NO: 4076487 - RNA, 17 nt, Variola virus
uaaucagauucuuauau

SEQ ID NO: 4076488 - RNA, 23 nt, Variola virus
uaaucaguacguucuucauuuau

SEQ ID NO: 4076489 - RNA, 20 nt, Variola virus
uaaucagucauaacaaaugu

SEQ ID NO: 4076490 - RNA, 21 nt, Variola virus
uaauccaaauaugauauguga

SEQ ID NO: 4076491 - RNA, 16 nt, Variola virus
uaauccagucuuuaau

SEQ ID NO: 4076492 - RNA, 15 nt, Variola virus
uaauccuguguuuau

SEQ ID NO: 4076493 - RNA, 23 nt, Variola virus
uaauccuuuuuauuuauccucuc

SEQ ID NO: 4076494 - RNA, 14 nt, Variola virus
uaaucgauuuugca

SEQ ID NO: 4076495 - RNA, 20 nt, Variola virus
uaaucgucgaacguucuagu

SEQ ID NO: 4076496 - RNA, 20 nt, Variola virus
uaaucguguauaacaucuuu

SEQ ID NO: 4076497 - RNA, 14 nt, Variola virus
uaaucguuaucauu

SEQ ID NO: 4076498 - RNA, 17 nt, Variola virus
uaaucguuauuaucauc

SEQ ID NO: 4076499 - RNA, 20 nt, Variola virus
uaaucguuauuaucaucauu

SEQ ID NO: 4076500 - RNA, 21 nt, Variola virus
uaaucuaaaauaguucuguaa

SEQ ID NO: 4076501 - RNA, 19 nt, Variola virus
uaaucuauaaaacaaucau

SEQ ID NO: 4076502 - RNA, 21 nt, Variola virus
uaaucuguacuucuauacaaa

SEQ ID NO: 4076503 - RNA, 17 nt, Variola virus
uaaucuuacugaguuua

SEQ ID NO: 4076504 - RNA, 15 nt, Variola virus
uaaugaauuaguguu

SEQ ID NO: 4076505 - RNA, 23 nt, Variola virus
uaaugagcaaguagaaaaccucu

SEQ ID NO: 4076506 - RNA, 13 nt, Variola virus
uaaugauaaauuu

SEQ ID NO: 4076507 - RNA, 17 nt, Variola virus
uaaugaucuauggauua

SEQ ID NO: 4076508 - RNA, 20 nt, Variola virus
uaaugaugaccuauaugccc

SEQ ID NO: 4076509 - RNA, 15 nt, Variola virus
uaaugauugcauauu

SEQ ID NO: 4076510 - RNA, 14 nt, Variola virus
uaaugugaauuuag

SEQ ID NO: 4076511 - RNA, 18 nt, Variola virus
uaaugugaauuuagcaua

SEQ ID NO: 4076512 - RNA, 12 nt, Variola virus
uaauguuguauu

SEQ ID NO: 4076513 - RNA, 16 nt, Variola virus
uaauguuuaauuuauc

SEQ ID NO: 4076514 - RNA, 14 nt, Variola virus
uaauuacauacuuu

SEQ ID NO: 4076515 - RNA, 15 nt, Variola virus
uaauuacuaaaucug

SEQ ID NO: 4076516 - RNA, 16 nt, Variola virus
uaauuauaagaaauau

SEQ ID NO: 4076517 - RNA, 15 nt, Variola virus
uaauuauagauguau

SEQ ID NO: 4076518 - RNA, 17 nt, Variola virus
uaauucagauacuacag

SEQ ID NO: 4076519 - RNA, 18 nt, Variola virus
uaauucauuuucaauaau

SEQ ID NO: 4076520 - RNA, 14 nt, Variola virus
uaauugcuuuucua

SEQ ID NO: 4076521 - RNA, 20 nt, Variola virus
uaauuguuuaccgguguaau

SEQ ID NO: 4076522 - RNA, 16 nt, Variola virus
uaauuuuagaagcuau

SEQ ID NO: 4076523 - RNA, 15 nt, Variola virus
uaauuuuucauuaac

SEQ ID NO: 4076524 - RNA, 13 nt, Variola virus
uacaaaacgacuu

SEQ ID NO: 4076525 - RNA, 18 nt, Variola virus
uacaaaauaauagauaua

SEQ ID NO: 4076526 - RNA, 19 nt, Variola virus
uacaaacuuuuccuuuucc

SEQ ID NO: 4076527 - RNA, 13 nt, Variola virus
uacaaauagagau

SEQ ID NO: 4076528 - RNA, 20 nt, Variola virus
uacaaauuacaauaaugcag

SEQ ID NO: 4076529 - RNA, 17 nt, Variola virus
uacaaauuuuaagaaau

SEQ ID NO: 4076530 - RNA, 16 nt, Variola virus
uacaacauuccaaaga

SEQ ID NO: 4076531 - RNA, 16 nt, Variola virus
uacaaccaaauucuug

SEQ ID NO: 4076532 - RNA, 12 nt, Variola virus
uacaacuaguga

SEQ ID NO: 4076533 - RNA, 16 nt, Variola virus
uacaauacacacaaua

SEQ ID NO: 4076534 - RNA, 17 nt, Variola virus
uacaauacgauaaacau

SEQ ID NO: 4076535 - RNA, 17 nt, Variola virus
uacaaucaauaauauag

SEQ ID NO: 4076536 - RNA, 14 nt, Variola virus
uacaauuuuaucau

SEQ ID NO: 4076537 - RNA, 17 nt, Variola virus
uacacaaggcauugucu

SEQ ID NO: 4076538 - RNA, 14 nt, Variola virus
uacacaccaaugga

SEQ ID NO: 4076539 - RNA, 12 nt, Variola virus
uacacauaauga

SEQ ID NO: 4076540 - RNA, 20 nt, Variola virus
uacacauauggaauauaucu

SEQ ID NO: 4076541 - RNA, 16 nt, Variola virus
uacacguaccagcauu

SEQ ID NO: 4076542 - RNA, 13 nt, Variola virus
uacacuauuauau

SEQ ID NO: 4076543 - RNA, 16 nt, Variola virus
uacagaaacaaugauu

SEQ ID NO: 4076544 - RNA, 20 nt, Variola virus
uacagagauguacagcuucc

SEQ ID NO: 4076545 - RNA, 19 nt, Variola virus
uacagauguaaauauaucu

SEQ ID NO: 4076546 - RNA, 22 nt, Variola virus
uacaggaucuagcaaaggaaau

SEQ ID NO: 4076547 - RNA, 13 nt, Variola virus
uacaguucuucua

SEQ ID NO: 4076548 - RNA, 16 nt, Variola virus
uacauaaaaaaaaugu

SEQ ID NO: 4076549 - RNA, 13 nt, Variola virus
uacauaaaugucu

SEQ ID NO: 4076550 - RNA, 18 nt, Variola virus
uacauaggcaacaucaga

SEQ ID NO: 4076551 - RNA, 15 nt, Variola virus
uacaucgcauacaaa

SEQ ID NO: 4076552 - RNA, 19 nt, Variola virus
uacaucgguaucuagaucu

SEQ ID NO: 4076553 - RNA, 14 nt, Variola virus
uacaucuguuuccu

SEQ ID NO: 4076554 - RNA, 23 nt, Variola virus
uacaugaaauagaagauagauau

SEQ ID NO: 4076555 - RNA, 17 nt, Variola virus
uacauguauuaaagaau

SEQ ID NO: 4076556 - RNA, 21 nt, Variola virus
uacauuuuuaaacuguuugua

SEQ ID NO: 4076557 - RNA, 22 nt, Variola virus
uaccaaagacuuugaaauauag

SEQ ID NO: 4076558 - RNA, 17 nt, Variola virus
uaccaaccuacacuauu

SEQ ID NO: 4076559 - RNA, 14 nt, Variola virus
uaccaaucauuuau

SEQ ID NO: 4076560 - RNA, 18 nt, Variola virus
uaccaaucauuuauugau

SEQ ID NO: 4076561 - RNA, 22 nt, Variola virus
uaccacgcaauuauauaaugua

SEQ ID NO: 4076562 - RNA, 14 nt, Variola virus
uaccacuagcaaaa

SEQ ID NO: 4076563 - RNA, 18 nt, Variola virus
uaccagugauuauccauu

SEQ ID NO: 4076564 - RNA, 23 nt, Variola virus
uaccaucuucuuugauuaaugau

SEQ ID NO: 4076565 - RNA, 23 nt, Variola virus
uaccaugacuccucuucauacag

SEQ ID NO: 4076566 - RNA, 18 nt, Variola virus
uacccaacaauacauuua

SEQ ID NO: 4076567 - RNA, 13 nt, Variola virus
uacccuuccaaau

SEQ ID NO: 4076568 - RNA, 12 nt, Variola virus
uaccgaaaauaa

SEQ ID NO: 4076569 - RNA, 15 nt, Variola virus
uaccgauuuaucauc

SEQ ID NO: 4076570 - RNA, 13 nt, Variola virus
uaccgguguauau

SEQ ID NO: 4076571 - RNA, 17 nt, Variola virus
uaccguugugucuacaa

SEQ ID NO: 4076572 - RNA, 17 nt, Variola virus
uaccguuguuacuccau

SEQ ID NO: 4076573 - RNA, 21 nt, Variola virus
uaccuaauacuaaauacauua

SEQ ID NO: 4076574 - RNA, 15 nt, Variola virus
auguuuuauuaauuu

SEQ ID NO: 4076575 - RNA, 15 nt, Variola virus
auuaaaaauaaaguu

SEQ ID NO: 4076576 - RNA, 15 nt, Variola virus
auuaaaaauuuccau

SEQ ID NO: 4076577 - RNA, 22 nt, Variola virus
auuaaaauaaauauucuucaua

SEQ ID NO: 4076578 - RNA, 15 nt, Variola virus
auuaaacuaauucau

SEQ ID NO: 4076579 - RNA, 20 nt, Variola virus
auuaaacuaauucauuuuca

SEQ ID NO: 4076580 - RNA, 17 nt, Variola virus
auuaaacucuacauaau

SEQ ID NO: 4076581 - RNA, 22 nt, Variola virus
auuaaagauacaaaacguaauu

SEQ ID NO: 4076582 - RNA, 16 nt, Variola virus
auuaaaggauguacuc

SEQ ID NO: 4076583 - RNA, 19 nt, Variola virus
auuaaauagaauauuuaac

SEQ ID NO: 4076584 - RNA, 20 nt, Variola virus
auuaaauaucauuuuuugaa

SEQ ID NO: 4076585 - RNA, 13 nt, Variola virus
auuaaaucaauau

SEQ ID NO: 4076586 - RNA, 19 nt, Variola virus
auuaacaaaaucuuuaauu

SEQ ID NO: 4076587 - RNA, 14 nt, Variola virus
auuaacaagaauac

SEQ ID NO: 4076588 - RNA, 23 nt, Variola virus
auuaacaagaauacgucaaggaa

SEQ ID NO: 4076589 - RNA, 16 nt, Variola virus
auuaacaagucauuua

SEQ ID NO: 4076590 - RNA, 22 nt, Variola virus
auuaacgaguucaaauaugaaa

SEQ ID NO: 4076591 - RNA, 16 nt, Variola virus
auuaacgguaauacau

SEQ ID NO: 4076592 - RNA, 16 nt, Variola virus
auuaacguuccuaauu

SEQ ID NO: 4076593 - RNA, 22 nt, Variola virus
auuaacuccgaggcacauacau

SEQ ID NO: 4076594 - RNA, 20 nt, Variola virus
auuaacuuuaacaugucuac

SEQ ID NO: 4076595 - RNA, 16 nt, Variola virus
auuaacuuuguucauu

SEQ ID NO: 4076596 - RNA, 22 nt, Variola virus
auuaagcaacaugucuuuaaau

SEQ ID NO: 4076597 - RNA, 23 nt, Variola virus
auuaaggacuuuuauaucccaca

SEQ ID NO: 4076598 - RNA, 21 nt, Variola virus
auuaaguucuggcaauguuuc

SEQ ID NO: 4076599 - RNA, 19 nt, Variola virus
auuaauaacauuacauauu

SEQ ID NO: 4076600 - RNA, 15 nt, Variola virus
auuaauaauauaauu

SEQ ID NO: 4076601 - RNA, 21 nt, Variola virus
auuaauacaggaucuagcaaa

SEQ ID NO: 4076602 - RNA, 13 nt, Variola virus
auuaauacauauu

SEQ ID NO: 4076603 - RNA, 19 nt, Variola virus
auuaauacggaauauagau

SEQ ID NO: 4076604 - RNA, 12 nt, Variola virus
auuaauccaugg

SEQ ID NO: 4076605 - RNA, 19 nt, Variola virus
auuaaucuaguagaaaaga

SEQ ID NO: 4076606 - RNA, 19 nt, Variola virus
auuaaugcccaauuuggau

SEQ ID NO: 4076607 - RNA, 17 nt, Variola virus
auuaaugcuacagauau

SEQ ID NO: 4076608 - RNA, 10 nt, Variola virus
auuaauuaaa

SEQ ID NO: 4076609 - RNA, 13 nt, Variola virus
auuacaaaaacua

SEQ ID NO: 4076610 - RNA, 14 nt, Variola virus
auuacaaaagaaac

SEQ ID NO: 4076611 - RNA, 15 nt, Variola virus
auuacaaauacuuua

SEQ ID NO: 4076612 - RNA, 14 nt, Variola virus
auuacaauuaauaa

SEQ ID NO: 4076613 - RNA, 19 nt, Variola virus
auuacauccgaaaaaguug

SEQ ID NO: 4076614 - RNA, 20 nt, Variola virus
auuacauuuuuauaaauaga

SEQ ID NO: 4076615 - RNA, 22 nt, Variola virus
auuaccaggguucuuguuauau

SEQ ID NO: 4076616 - RNA, 15 nt, Variola virus
auuaccaucauauau

SEQ ID NO: 4076617 - RNA, 19 nt, Variola virus
auuaccaucguuguugaau

SEQ ID NO: 4076618 - RNA, 15 nt, Variola virus
auuaccaucucuaag

SEQ ID NO: 4076619 - RNA, 22 nt, Variola virus
auuaccaucucuaaguuucuuu

SEQ ID NO: 4076620 - RNA, 18 nt, Variola virus
auuacgaguugacacauu

SEQ ID NO: 4076621 - RNA, 20 nt, Variola virus
auuacguauuauauauguaa

SEQ ID NO: 4076622 - RNA, 16 nt, Variola virus
auuacuaauaaagaag

SEQ ID NO: 4076623 - RNA, 21 nt, Variola virus
auuacucuccuagguuucucu

SEQ ID NO: 4076624 - RNA, 18 nt, Variola virus
auuacuugauauaguaau

SEQ ID NO: 4076625 - RNA, 14 nt, Variola virus
auuacuuuaauagu

SEQ ID NO: 4076626 - RNA, 22 nt, Variola virus
auuagaaauacacuuacagaaa

SEQ ID NO: 4076627 - RNA, 17 nt, Variola virus
auuagaauagucucuuu

SEQ ID NO: 4076628 - RNA, 15 nt, Variola virus
auuagauaugccaaa

SEQ ID NO: 4076629 - RNA, 15 nt, Variola virus
auuagcagaauagau

SEQ ID NO: 4076630 - RNA, 20 nt, Variola virus
auuagccgaacauauagcug

SEQ ID NO: 4076631 - RNA, 21 nt, Variola virus
auuagcgagguauuuauucau

SEQ ID NO: 4076632 - RNA, 17 nt, Variola virus
auuagcgauagaacguu

SEQ ID NO: 4076633 - RNA, 16 nt, Variola virus
auuaguaauuaaauau

SEQ ID NO: 4076634 - RNA, 17 nt, Variola virus
auuaguggaagaaagau

SEQ ID NO: 4076635 - RNA, 21 nt, Variola virus
auuaguuuuuuguuacugacu

SEQ ID NO: 4076636 - RNA, 16 nt, Variola virus
auuauacuguuaaaug

SEQ ID NO: 4076637 - RNA, 15 nt, Variola virus
auuauacuuugguaa

SEQ ID NO: 4076638 - RNA, 22 nt, Variola virus
auuauacuuuuuuuuggaaaug

SEQ ID NO: 4076639 - RNA, 15 nt, Variola virus
auuauagauuuucca

SEQ ID NO: 4076640 - RNA, 22 nt, Variola virus
auuauaucauugucuaauagau

SEQ ID NO: 4076641 - RNA, 14 nt, Variola virus
auuaucaaaaagaa

SEQ ID NO: 4076642 - RNA, 18 nt, Variola virus
auuaucaaaagacaugau

SEQ ID NO: 4076643 - RNA, 19 nt, Variola virus
auuaucaaaagacaugaua

SEQ ID NO: 4076644 - RNA, 20 nt, Variola virus
auuaucaaaauuuggaaacu

SEQ ID NO: 4076645 - RNA, 21 nt, Variola virus
auuaucauuagucauguuaaa

SEQ ID NO: 4076646 - RNA, 15 nt, Variola virus
auuaucauuuuguaa

SEQ ID NO: 4076647 - RNA, 15 nt, Variola virus
auuaucuauaugaug

SEQ ID NO: 4076648 - RNA, 18 nt, Variola virus
auuaucucagugcaaaga

SEQ ID NO: 4076649 - RNA, 20 nt, Variola virus
auuaucuuuguuuugauauc

SEQ ID NO: 4076650 - RNA, 15 nt, Variola virus
auuaugaaacuauau

SEQ ID NO: 4076651 - RNA, 23 nt, Variola virus
auuaugacaaaauuaaaaaagau

SEQ ID NO: 4076652 - RNA, 20 nt, Variola virus
auuaugcauucguuuaaaga

SEQ ID NO: 4076653 - RNA, 23 nt, Variola virus
auuauguaaauaucuuuaauaca

SEQ ID NO: 4076654 - RNA, 18 nt, Variola virus
auuauguuguuaugagug

SEQ ID NO: 4076655 - RNA, 18 nt, Variola virus
auuauuaaguauaauaga

SEQ ID NO: 4076656 - RNA, 21 nt, Variola virus
auuauuaauaauuuguauaua

SEQ ID NO: 4076657 - RNA, 18 nt, Variola virus
auuauuaaucauuaacuu

SEQ ID NO: 4076658 - RNA, 17 nt, Variola virus
auuauuacacauagcau

SEQ ID NO: 4076659 - RNA, 14 nt, Variola virus
auuauuacauagau

SEQ ID NO: 4076660 - RNA, 18 nt, Variola virus
auuauuacauagauguau

SEQ ID NO: 4076661 - RNA, 17 nt, Variola virus
auuauuaguugauguga

SEQ ID NO: 4076662 - RNA, 14 nt, Variola virus
auuauuaugaugau

SEQ ID NO: 4076663 - RNA, 16 nt, Variola virus
auuauuccuaauuaag

SEQ ID NO: 4076664 - RNA, 17 nt, Variola virus
auuauugauauucaugg

SEQ ID NO: 4076665 - RNA, 18 nt, Variola virus
auuauuguguuuguguag

SEQ ID NO: 4076666 - RNA, 21 nt, Variola virus
auuauuguguuuguguaguuc

SEQ ID NO: 4076667 - RNA, 18 nt, Variola virus
auuauuuaauuuaauaca

SEQ ID NO: 4076668 - RNA, 18 nt, Variola virus
auuauuuuauauucauuu

SEQ ID NO: 4076669 - RNA, 14 nt, Variola virus
auuauuuuucacca

SEQ ID NO: 4076670 - RNA, 16 nt, Variola virus
auucaaaauauuaaac

SEQ ID NO: 4076671 - RNA, 17 nt, Variola virus
auucaagauuuuauuau

SEQ ID NO: 4076672 - RNA, 20 nt, Variola virus
auucaagcgaauuacucugu

SEQ ID NO: 4076673 - RNA, 15 nt, Variola virus
auucaagucaaagaa

SEQ ID NO: 4076674 - RNA, 14 nt, Variola virus
auucaauauuguau

SEQ ID NO: 4076675 - RNA, 19 nt, Variola virus
auucaauuaguuuauuaau

SEQ ID NO: 4076676 - RNA, 15 nt, Variola virus
auucacaaauaugac

SEQ ID NO: 4076677 - RNA, 22 nt, Variola virus
auucacaccuagagacaaugaa

SEQ ID NO: 4076678 - RNA, 14 nt, Variola virus
auucacauaaaaga

SEQ ID NO: 4076679 - RNA, 18 nt, Variola virus
auucagaacacacuuuuc

SEQ ID NO: 4076680 - RNA, 22 nt, Variola virus
auucagaauuucuacauaauua

SEQ ID NO: 4076681 - RNA, 14 nt, Variola virus
auucagcugaaaug

SEQ ID NO: 4076682 - RNA, 14 nt, Variola virus
auucaguagcuaga

SEQ ID NO: 4076683 - RNA, 15 nt, Variola virus
auucaguaguguuua

SEQ ID NO: 4076684 - RNA, 13 nt, Variola virus
auucauauagaac

SEQ ID NO: 4076685 - RNA, 14 nt, Variola virus
auucaucuagaaug

SEQ ID NO: 4076686 - RNA, 23 nt, Variola virus
auucaugguaaggucuuagaaau

SEQ ID NO: 4076687 - RNA, 15 nt, Variola virus
auucauguugaacau

SEQ ID NO: 4076688 - RNA, 15 nt, Variola virus
auucauuaaggagau

SEQ ID NO: 4076689 - RNA, 14 nt, Variola virus
auucauuaauucua

SEQ ID NO: 4076690 - RNA, 13 nt, Variola virus
auucauugacaua

SEQ ID NO: 4076691 - RNA, 12 nt, Variola virus
auucauuucauu

SEQ ID NO: 4076692 - RNA, 16 nt, Variola virus
auucauuuucaauaau

SEQ ID NO: 4076693 - RNA, 16 nt, Variola virus
auuccaacgauauuaa

SEQ ID NO: 4076694 - RNA, 21 nt, Variola virus
auuccaagucacuauguguaa

SEQ ID NO: 4076695 - RNA, 16 nt, Variola virus
auuccacuuuaacauc

SEQ ID NO: 4076696 - RNA, 21 nt, Variola virus
auuccagauguuguaaaauua

SEQ ID NO: 4076697 - RNA, 15 nt, Variola virus
auuccaucuacuaag

SEQ ID NO: 4076698 - RNA, 18 nt, Variola virus
auuccauuaucugaaaug

SEQ ID NO: 4076699 - RNA, 21 nt, Variola virus
auucccuggcgcguuuaagau

SEQ ID NO: 4076700 - RNA, 18 nt, Variola virus
caaucauugauaucuuua

SEQ ID NO: 4076701 - RNA, 19 nt, Variola virus
caaucggauacagacacuc

SEQ ID NO: 4076702 - RNA, 21 nt, Variola virus
caaucggauuaauaucucuau

SEQ ID NO: 4076703 - RNA, 12 nt, Variola virus
caaucuaucuau

SEQ ID NO: 4076704 - RNA, 17 nt, Variola virus
caaucuuauaucuucuu

SEQ ID NO: 4076705 - RNA, 19 nt, Variola virus
caaugauaaugaaccaucu

SEQ ID NO: 4076706 - RNA, 19 nt, Variola virus
caaugccaucuuacaugau

SEQ ID NO: 4076707 - RNA, 13 nt, Variola virus
caaugcucaguaa

SEQ ID NO: 4076708 - RNA, 16 nt, Variola virus
caauggagaaauacuu

SEQ ID NO: 4076709 - RNA, 18 nt, Variola virus
caaugucugucauaugua

SEQ ID NO: 4076710 - RNA, 14 nt, Variola virus
caauuaaugauauu

SEQ ID NO: 4076711 - RNA, 15 nt, Variola virus
caauuaguuaauaau

SEQ ID NO: 4076712 - RNA, 17 nt, Variola virus
caauuaguuuauuggua

SEQ ID NO: 4076713 - RNA, 22 nt, Variola virus
caauuauaacaauuauaacaau

SEQ ID NO: 4076714 - RNA, 14 nt, Variola virus
caauucuauccauu

SEQ ID NO: 4076715 - RNA, 17 nt, Variola virus
caauuggaguaucaucu

SEQ ID NO: 4076716 - RNA, 20 nt, Variola virus
caauuguuuuuguacauaau

SEQ ID NO: 4076717 - RNA, 14 nt, Variola virus
caauuuccaacaaa

SEQ ID NO: 4076718 - RNA, 18 nt, Variola virus
caauuuuaacagauguau

SEQ ID NO: 4076719 - RNA, 19 nt, Variola virus
caauuuugauguauaacaa

SEQ ID NO: 4076720 - RNA, 13 nt, Variola virus
cacacucuacaau

SEQ ID NO: 4076721 - RNA, 13 nt, Variola virus
cacagaaauacug

SEQ ID NO: 4076722 - RNA, 14 nt, Variola virus
cacagucaaacauu

SEQ ID NO: 4076723 - RNA, 13 nt, Variola virus
cacagucaucaag

SEQ ID NO: 4076724 - RNA, 15 nt, Variola virus
cacauacaaaacuag

SEQ ID NO: 4076725 - RNA, 18 nt, Variola virus
cacaucgacggacaaucu

SEQ ID NO: 4076726 - RNA, 18 nt, Variola virus
uaaauuaguagaaaauac

SEQ ID NO: 4076727 - RNA, 14 nt, Variola virus
uaaauuauuucauu

SEQ ID NO: 4076728 - RNA, 16 nt, Variola virus
uaaauuguauaaguau

SEQ ID NO: 4076729 - RNA, 14 nt, Variola virus
uaaauuuuaauauu

SEQ ID NO: 4076730 - RNA, 16 nt, Variola virus
uaaauuuucuauacau

SEQ ID NO: 4076731 - RNA, 20 nt, Variola virus
uaacaaaaucaggaaaaaag

SEQ ID NO: 4076732 - RNA, 14 nt, Variola virus
uaacaaaauuaaag

SEQ ID NO: 4076733 - RNA, 13 nt, Variola virus
uaacaaauuaaag

SEQ ID NO: 4076734 - RNA, 21 nt, Variola virus
uaacaacgacuuauaauuaau

SEQ ID NO: 4076735 - RNA, 14 nt, Variola virus
uaacaaucuuauau

SEQ ID NO: 4076736 - RNA, 18 nt, Variola virus
uaacacacucuaccaguu

SEQ ID NO: 4076737 - RNA, 17 nt, Variola virus
uaacacauaccuuuuuc

SEQ ID NO: 4076738 - RNA, 23 nt, Variola virus
uaacaccuauaagauuaucaaaa

SEQ ID NO: 4076739 - RNA, 22 nt, Variola virus
uaacaguaucauuuaaacauuu

SEQ ID NO: 4076740 - RNA, 21 nt, Variola virus
uaacaucacuaauaucaauau

SEQ ID NO: 4076741 - RNA, 22 nt, Variola virus
uaacaugacauuuauucaucau

SEQ ID NO: 4076742 - RNA, 23 nt, Variola virus
uaacaugauaacugguguagaga

SEQ ID NO: 4076743 - RNA, 20 nt, Variola virus
uaacaugcgguucaaaauag

SEQ ID NO: 4076744 - RNA, 13 nt, Variola virus
uaacauguuaauu

SEQ ID NO: 4076745 - RNA, 19 nt, Variola virus
uaaccaccgauaaaucuag

SEQ ID NO: 4076746 - RNA, 22 nt, Variola virus
uaaccgauaaaaagacuuuuau

SEQ ID NO: 4076747 - RNA, 22 nt, Variola virus
uaaccggcgcugucauguaucc

SEQ ID NO: 4076748 - RNA, 13 nt, Variola virus
uaaccuuuuuagu

SEQ ID NO: 4076749 - RNA, 23 nt, Variola virus
uaacgaacgcggugugaauguac

SEQ ID NO: 4076750 - RNA, 17 nt, Variola virus
uaacgaggacaaacuau

SEQ ID NO: 4076751 - RNA, 15 nt, Variola virus
uaacgaggauacauc

SEQ ID NO: 4076752 - RNA, 13 nt, Variola virus
uaacggaugaaaa

SEQ ID NO: 4076753 - RNA, 18 nt, Variola virus
uaacuacggauaacaaaa

SEQ ID NO: 4076754 - RNA, 15 nt, Variola virus
uaacuacuaauguau

SEQ ID NO: 4076755 - RNA, 15 nt, Variola virus
uaacuauuaauauua

SEQ ID NO: 4076756 - RNA, 22 nt, Variola virus
uaacuccaggccguuuguuucc

SEQ ID NO: 4076757 - RNA, 19 nt, Variola virus
uaacucgguaucuacuuua

SEQ ID NO: 4076758 - RNA, 19 nt, Variola virus
uaacucuuucgaauacuua

SEQ ID NO: 4076759 - RNA, 16 nt, Variola virus
uaacugcuacacaaau

SEQ ID NO: 4076760 - RNA, 21 nt, Variola virus
uaacuuucuucggcaaacuua

SEQ ID NO: 4076761 - RNA, 15 nt, Variola virus
uaacuuuugauuuua

SEQ ID NO: 4076762 - RNA, 21 nt, Variola virus
uaacuuuuucuuucucagcau

SEQ ID NO: 4076763 - RNA, 21 nt, Variola virus
uaagaaacuaguuuauuguga

SEQ ID NO: 4076764 - RNA, 19 nt, Variola virus
uaagaacuggacuguauau

SEQ ID NO: 4076765 - RNA, 17 nt, Variola virus
uaagaauaauccagaau

SEQ ID NO: 4076766 - RNA, 21 nt, Variola virus
uaagaauucguuuuucaacau

SEQ ID NO: 4076767 - RNA, 20 nt, Variola virus
uaagacacagaaauacugua

SEQ ID NO: 4076768 - RNA, 17 nt, Variola virus
uaagacaugacacaaag

SEQ ID NO: 4076769 - RNA, 17 nt, Variola virus
uaagaccgaaauuauca

SEQ ID NO: 4076770 - RNA, 14 nt, Variola virus
uaagacgucucauu

SEQ ID NO: 4076771 - RNA, 18 nt, Variola virus
uaagacguuguaucucuu

SEQ ID NO: 4076772 - RNA, 17 nt, Variola virus
uaagacugcuaaaugua

SEQ ID NO: 4076773 - RNA, 19 nt, Variola virus
uaagagauaucuaucuauu

SEQ ID NO: 4076774 - RNA, 20 nt, Variola virus
uaagaucguagaucucccau

SEQ ID NO: 4076775 - RNA, 16 nt, Variola virus
uaagaugcaaacauua

SEQ ID NO: 4076776 - RNA, 15 nt, Variola virus
uaagauuaucaaaau

SEQ ID NO: 4076777 - RNA, 17 nt, Variola virus
uaaguauaaacuauaaa

SEQ ID NO: 4076778 - RNA, 21 nt, Variola virus
uaaguaugucgaaucuaaacu

SEQ ID NO: 4076779 - RNA, 19 nt, Variola virus
uaaguauucacaaacggga

SEQ ID NO: 4076780 - RNA, 17 nt, Variola virus
uaaguauuuauacaaac

SEQ ID NO: 4076781 - RNA, 22 nt, Variola virus
uaaguauuuggcuagucaagau

SEQ ID NO: 4076782 - RNA, 20 nt, Variola virus
uaagugcgaugauuguacac

SEQ ID NO: 4076783 - RNA, 21 nt, Variola virus
uaaguuacagcgacacgguau

SEQ ID NO: 4076784 - RNA, 23 nt, Variola virus
uaaguuacugcugcaucauauaa

SEQ ID NO: 4076785 - RNA, 15 nt, Variola virus
uaaguucauaaucau

SEQ ID NO: 4076786 - RNA, 13 nt, Variola virus
uaaguucuuuaua

SEQ ID NO: 4076787 - RNA, 18 nt, Variola virus
uaaguucuuugaucucuu

SEQ ID NO: 4076788 - RNA, 20 nt, Variola virus
uaaguuuauaaauuccacaa

SEQ ID NO: 4076789 - RNA, 13 nt, Variola virus
uaauaaaauguca

SEQ ID NO: 4076790 - RNA, 15 nt, Variola virus
uaauaaaguguauau

SEQ ID NO: 4076791 - RNA, 19 nt, Variola virus
uaauaaauaaaucugaacc

SEQ ID NO: 4076792 - RNA, 19 nt, Variola virus
uaauaaauugguaaauccu

SEQ ID NO: 4076793 - RNA, 13 nt, Variola virus
uaauaagaaauau

SEQ ID NO: 4076794 - RNA, 13 nt, Variola virus
uaauaagauaaau

SEQ ID NO: 4076795 - RNA, 19 nt, Variola virus
uaauaaugauucaacaaug

SEQ ID NO: 4076796 - RNA, 16 nt, Variola virus
uaauacaaaauuuuca

SEQ ID NO: 4076797 - RNA, 15 nt, Variola virus
uaauacacacaaagu

SEQ ID NO: 4076798 - RNA, 20 nt, Variola virus
uaauacagcauccaacuuga

SEQ ID NO: 4076799 - RNA, 17 nt, Variola virus
uaauacgaaaugucuga

SEQ ID NO: 4076800 - RNA, 15 nt, Variola virus
uaauacgaguuauau

SEQ ID NO: 4076801 - RNA, 17 nt, Variola virus
uaauacuaauuauauca

SEQ ID NO: 4076802 - RNA, 15 nt, Variola virus
uaauagaaaaugaau

SEQ ID NO: 4076803 - RNA, 15 nt, Variola virus
uaauagacuaucaga

SEQ ID NO: 4076804 - RNA, 14 nt, Variola virus
uaauagauuucuag

SEQ ID NO: 4076805 - RNA, 17 nt, Variola virus
uaauagcauaaaugcua

SEQ ID NO: 4076806 - RNA, 13 nt, Variola virus
uaauaguaaauga

SEQ ID NO: 4076807 - RNA, 14 nt, Variola virus
uaauaguguuugaa

SEQ ID NO: 4076808 - RNA, 21 nt, Variola virus
uaauauaaaagaauauguaua

SEQ ID NO: 4076809 - RNA, 13 nt, Variola virus
uaauauagaagau

SEQ ID NO: 4076810 - RNA, 22 nt, Variola virus
uaauaucaaacgguaacacauc

SEQ ID NO: 4076811 - RNA, 17 nt, Variola virus
uaauaucagaauugucu

SEQ ID NO: 4076812 - RNA, 21 nt, Variola virus
uaauauguuggucuaucuauu

SEQ ID NO: 4076813 - RNA, 17 nt, Variola virus
uaauauuacuguuaaua

SEQ ID NO: 4076814 - RNA, 17 nt, Variola virus
uaauauuaguacuauau

SEQ ID NO: 4076815 - RNA, 22 nt, Variola virus
uaauauucauucaauauuuaca

SEQ ID NO: 4076816 - RNA, 15 nt, Variola virus
uaauauugaaaauac

SEQ ID NO: 4076817 - RNA, 18 nt, Variola virus
uaauauuucuauuucuau

SEQ ID NO: 4076818 - RNA, 15 nt, Variola virus
uaauauuuuauuaca

SEQ ID NO: 4076819 - RNA, 19 nt, Variola virus
uaauauuuuauuucaaaau

SEQ ID NO: 4076820 - RNA, 16 nt, Variola virus
uaaucaaaaucuuaau

SEQ ID NO: 4076821 - RNA, 21 nt, Variola virus
uaaucagucauaacaaaugua

SEQ ID NO: 4076822 - RNA, 22 nt, Variola virus
uaaucauguacucauaaaacga

SEQ ID NO: 4076823 - RNA, 13 nt, Variola virus
uaaucauuaucca

SEQ ID NO: 4076824 - RNA, 12 nt, Variola virus
uaaucuauuuua

SEQ ID NO: 4076825 - RNA, 19 nt, Variola virus
uaaucucuucuuuaacagu

SEQ ID NO: 4076826 - RNA, 15 nt, Variola virus
uaaucuuuguuggau

SEQ ID NO: 4076827 - RNA, 15 nt, Variola virus
uaaugaacaaauccu

SEQ ID NO: 4076828 - RNA, 17 nt, Variola virus
uaaugagcaaauuuauu

SEQ ID NO: 4076829 - RNA, 15 nt, Variola virus
uaaugauagaauuau

SEQ ID NO: 4076830 - RNA, 15 nt, Variola virus
uaaugauauaucuug

SEQ ID NO: 4076831 - RNA, 21 nt, Variola virus
uaaugauugcccauagaguau

SEQ ID NO: 4076832 - RNA, 19 nt, Variola virus
uaauggucgaaacacguca

SEQ ID NO: 4076833 - RNA, 17 nt, Variola virus
uaauguuguuaccauau

SEQ ID NO: 4076834 - RNA, 18 nt, Variola virus
uaauuaauuucucguaaa

SEQ ID NO: 4076835 - RNA, 15 nt, Variola virus
uaauuacagaauuau

SEQ ID NO: 4076836 - RNA, 23 nt, Variola virus
uaauuacgcucuacaaaauguca

SEQ ID NO: 4076837 - RNA, 17 nt, Variola virus
uaauucauuaauuuuca

SEQ ID NO: 4076838 - RNA, 16 nt, Variola virus
uaauuccguuaauauu

SEQ ID NO: 4076839 - RNA, 21 nt, Variola virus
uaauuccguuaauauuaaaaa

SEQ ID NO: 4076840 - RNA, 15 nt, Variola virus
uaauucuccugaaaa

SEQ ID NO: 4076841 - RNA, 15 nt, Variola virus
uaauucuuucuccac

SEQ ID NO: 4076842 - RNA, 18 nt, Variola virus
uaauugcucguugguauu

SEQ ID NO: 4076843 - RNA, 18 nt, Variola virus
uaauuucuuuauuaucua

SEQ ID NO: 4076844 - RNA, 16 nt, Variola virus
uaauuuguauauacau

SEQ ID NO: 4076845 - RNA, 20 nt, Variola virus
uaauuuuagauaauauacca

SEQ ID NO: 4076846 - RNA, 18 nt, Variola virus
uaauuuuauauuccucua

SEQ ID NO: 4076847 - RNA, 17 nt, Variola virus
uaauuuuaucaagacau

SEQ ID NO: 4076848 - RNA, 16 nt, Variola virus
uacaaaaaauaaaaga

SEQ ID NO: 4076849 - RNA, 13 nt, Variola virus
uacaaaaacauac

SEQ ID NO: 4076850 - RNA, 22 nt, Variola virus
uacaaacgauuauuagaucuuu

SEQ ID NO: 4076851 - RNA, 16 nt, Variola virus
uacaaauauuauacau

SEQ ID NO: 4076852 - RNA, 13 nt, Variola virus
uagagaucuaauu

SEQ ID NO: 4076853 - RNA, 16 nt, Variola virus
uagagauuauaucuuu

SEQ ID NO: 4076854 - RNA, 22 nt, Variola virus
uagagcccacguuuaaacauuc

SEQ ID NO: 4076855 - RNA, 17 nt, Variola virus
uagaggacuuggauguu

SEQ ID NO: 4076856 - RNA, 13 nt, Variola virus
uagaggaucuauu

SEQ ID NO: 4076857 - RNA, 19 nt, Variola virus
uagaggaucuauuagaugu

SEQ ID NO: 4076858 - RNA, 12 nt, Variola virus
uagauaaaucaa

SEQ ID NO: 4076859 - RNA, 16 nt, Variola virus
uagauacaacgucauc

SEQ ID NO: 4076860 - RNA, 15 nt, Variola virus
uagauauaaauucaa

SEQ ID NO: 4076861 - RNA, 14 nt, Variola virus
uagauauagauguu

SEQ ID NO: 4076862 - RNA, 21 nt, Variola virus
uagauauagcuuuuauuucca

SEQ ID NO: 4076863 - RNA, 20 nt, Variola virus
uagauaucaaauccaaugga

SEQ ID NO: 4076864 - RNA, 15 nt, Variola virus
uagaucaucugaaaa

SEQ ID NO: 4076865 - RNA, 17 nt, Variola virus
uagaucauuugaaauua

SEQ ID NO: 4076866 - RNA, 12 nt, Variola virus
uagauccaagga

SEQ ID NO: 4076867 - RNA, 22 nt, Variola virus
uagaucuuccaaucuaucuauu

SEQ ID NO: 4076868 - RNA, 22 nt, Variola virus
uagaucuuuuacacuguuaaag

SEQ ID NO: 4076869 - RNA, 19 nt, Variola virus
uagaugaacuuuaauucaa

SEQ ID NO: 4076870 - RNA, 16 nt, Variola virus
uagaugcaucuaaaag

SEQ ID NO: 4076871 - RNA, 19 nt, Variola virus
uagaugccauaucauacau

SEQ ID NO: 4076872 - RNA, 19 nt, Variola virus
uagaugguauuucugaaag

SEQ ID NO: 4076873 - RNA, 14 nt, Variola virus
uagaugguucuuua

SEQ ID NO: 4076874 - RNA, 21 nt, Variola virus
uagauguaguaauaucugauu

SEQ ID NO: 4076875 - RNA, 19 nt, Variola virus
uagauguauauauuucauu

SEQ ID NO: 4076876 - RNA, 23 nt, Variola virus
uagaugucaaugaagaguacaca

SEQ ID NO: 4076877 - RNA, 17 nt, Variola virus
uagaugucgaagacuua

SEQ ID NO: 4076878 - RNA, 16 nt, Variola virus
uagauuauaauccuua

SEQ ID NO: 4076879 - RNA, 21 nt, Variola virus
uagauuauaauccuuauacau

SEQ ID NO: 4076880 - RNA, 21 nt, Variola virus
uagauuaugaagaauacucua

SEQ ID NO: 4076881 - RNA, 15 nt, Variola virus
uagauucacauaaag

SEQ ID NO: 4076882 - RNA, 18 nt, Variola virus
uagcaaaacuauuucaga

SEQ ID NO: 4076883 - RNA, 19 nt, Variola virus
uagcaacaguaguucuugc

SEQ ID NO: 4076884 - RNA, 23 nt, Variola virus
uagcaagauuuuuaaacaacaau

SEQ ID NO: 4076885 - RNA, 16 nt, Variola virus
uagcagauagauaaag

SEQ ID NO: 4076886 - RNA, 16 nt, Variola virus
uagcagcacaaaucaa

SEQ ID NO: 4076887 - RNA, 16 nt, Variola virus
uagcagccaauacuuu

SEQ ID NO: 4076888 - RNA, 14 nt, Variola virus
uagccaccauaaug

SEQ ID NO: 4076889 - RNA, 15 nt, Variola virus
uagccuauguuagga

SEQ ID NO: 4076890 - RNA, 17 nt, Variola virus
uagccuuaagaaaacua

SEQ ID NO: 4076891 - RNA, 13 nt, Variola virus
uagcggaugaaaa

SEQ ID NO: 4076892 - RNA, 20 nt, Variola virus
uagcguugcuucuacauaaa

SEQ ID NO: 4076893 - RNA, 17 nt, Variola virus
uagcuaaaaaaauagua

SEQ ID NO: 4076894 - RNA, 12 nt, Variola virus
uagcuaauauua

SEQ ID NO: 4076895 - RNA, 23 nt, Variola virus
uagcuaucucgucucucaacaaa

SEQ ID NO: 4076896 - RNA, 23 nt, Variola virus
uagcuaugaacuuguuuaaugau

SEQ ID NO: 4076897 - RNA, 17 nt, Variola virus
uagcucuguuaguuucc

SEQ ID NO: 4076898 - RNA, 15 nt, Variola virus
uagcuuuaacagugg

SEQ ID NO: 4076899 - RNA, 21 nt, Variola virus
uaggaaaggagugcauagaua

SEQ ID NO: 4076900 - RNA, 21 nt, Variola virus
uaggaaauuuugugcaacgaa

SEQ ID NO: 4076901 - RNA, 21 nt, Variola virus
uaggaccacuagcaaaagaua

SEQ ID NO: 4076902 - RNA, 13 nt, Variola virus
uaggauucucauc

SEQ ID NO: 4076903 - RNA, 14 nt, Variola virus
uaggauuuaaacaa

SEQ ID NO: 4076904 - RNA, 21 nt, Variola virus
uaggguaaucuuguaucuauu

SEQ ID NO: 4076905 - RNA, 12 nt, Variola virus
uagguaauaacu

SEQ ID NO: 4076906 - RNA, 21 nt, Variola virus
uagguauuguuuucacgguau

SEQ ID NO: 4076907 - RNA, 17 nt, Variola virus
uaggugaacaagagaua

SEQ ID NO: 4076908 - RNA, 15 nt, Variola virus
uaggugcaauagcau

SEQ ID NO: 4076909 - RNA, 22 nt, Variola virus
uagguuguuuauugauauacua

SEQ ID NO: 4076910 - RNA, 15 nt, Variola virus
uagguuuacuaaaau

SEQ ID NO: 4076911 - RNA, 17 nt, Variola virus
uaguaaucguuaucauu

SEQ ID NO: 4076912 - RNA, 18 nt, Variola virus
uaguaccaaauucuucua

SEQ ID NO: 4076913 - RNA, 18 nt, Variola virus
uaguauauggacaaacgu

SEQ ID NO: 4076914 - RNA, 20 nt, Variola virus
uaguaucaauccaacaaaug

SEQ ID NO: 4076915 - RNA, 17 nt, Variola virus
uaguauuccaauaucug

SEQ ID NO: 4076916 - RNA, 16 nt, Variola virus
uagucauaauaucuuu

SEQ ID NO: 4076917 - RNA, 17 nt, Variola virus
uagucauagaugaaaua

SEQ ID NO: 4076918 - RNA, 18 nt, Variola virus
uagucuguguuacauaau

SEQ ID NO: 4076919 - RNA, 16 nt, Variola virus
uagugaccaacucauc

SEQ ID NO: 4076920 - RNA, 12 nt, Variola virus
uagugaccauau

SEQ ID NO: 4076921 - RNA, 20 nt, Variola virus
uagugcuauggaacaaaaua

SEQ ID NO: 4076922 - RNA, 22 nt, Variola virus
uaguggaguaauuuacaaauug

SEQ ID NO: 4076923 - RNA, 23 nt, Variola virus
uaguguaccaauaugcgaaucau

SEQ ID NO: 4076924 - RNA, 18 nt, Variola virus
uaguuaaucuuauucaag

SEQ ID NO: 4076925 - RNA, 21 nt, Variola virus
uaguuagcgucaacuuucaua

SEQ ID NO: 4076926 - RNA, 21 nt, Variola virus
uaguucugaccagcaacucau

SEQ ID NO: 4076927 - RNA, 16 nt, Variola virus
uaguugcauagaugua

SEQ ID NO: 4076928 - RNA, 17 nt, Variola virus
uaguuuauuccaaucau

SEQ ID NO: 4076929 - RNA, 20 nt, Variola virus
uaguuuccuuaacaaaucua

SEQ ID NO: 4076930 - RNA, 20 nt, Variola virus
uaguuuccuuuuuauaaaau

SEQ ID NO: 4076931 - RNA, 22 nt, Variola virus
uaguuucugguuuucuauaaau

SEQ ID NO: 4076932 - RNA, 13 nt, Variola virus
uaguuucuguaac

SEQ ID NO: 4076933 - RNA, 14 nt, Variola virus
uaguuuuaagaaag

SEQ ID NO: 4076934 - RNA, 14 nt, Variola virus
uaguuuucuaaaau

SEQ ID NO: 4076935 - RNA, 24 nt, Variola virus
uaguuuuguaauaucuauagcauc

SEQ ID NO: 4076936 - RNA, 16 nt, Variola virus
uaguuuuucuaccuca

SEQ ID NO: 4076937 - RNA, 21 nt, Variola virus
uaguuuuuuuagaaaauucua

SEQ ID NO: 4076938 - RNA, 18 nt, Variola virus
uauaaaaacauuauucua

SEQ ID NO: 4076939 - RNA, 18 nt, Variola virus
uauaaaacuacuacaaug

SEQ ID NO: 4076940 - RNA, 17 nt, Variola virus
uauaaaauagaaaauaa

SEQ ID NO: 4076941 - RNA, 19 nt, Variola virus
uauaaaauucccaaucuug

SEQ ID NO: 4076942 - RNA, 20 nt, Variola virus
uauaaacauuuguguuugua

SEQ ID NO: 4076943 - RNA, 18 nt, Variola virus
uauaaacgaguauagcau

SEQ ID NO: 4076944 - RNA, 17 nt, Variola virus
uauaaacucucaacauu

SEQ ID NO: 4076945 - RNA, 14 nt, Variola virus
uauaaaguguaugu

SEQ ID NO: 4076946 - RNA, 17 nt, Variola virus
uauaaauagacaaacaa

SEQ ID NO: 4076947 - RNA, 15 nt, Variola virus
uauaacauuaauauu

SEQ ID NO: 4076948 - RNA, 16 nt, Variola virus
uauaacuucuaaucuu

SEQ ID NO: 4076949 - RNA, 17 nt, Variola virus
uauaagacgauacuguu

SEQ ID NO: 4076950 - RNA, 13 nt, Variola virus
uauaauaaaugua

SEQ ID NO: 4076951 - RNA, 18 nt, Variola virus
uauaauaaauguauacau

SEQ ID NO: 4076952 - RNA, 15 nt, Variola virus
uauaauaucuuugaa

SEQ ID NO: 4076953 - RNA, 13 nt, Variola virus
uauaauauuuccu

SEQ ID NO: 4076954 - RNA, 14 nt, Variola virus
uauaaucaaagauu

SEQ ID NO: 4076955 - RNA, 17 nt, Variola virus
uauaauccgauauauga

SEQ ID NO: 4076956 - RNA, 16 nt, Variola virus
uauaaucgcuuuccag

SEQ ID NO: 4076957 - RNA, 13 nt, Variola virus
uauaaucuauaaa

SEQ ID NO: 4076958 - RNA, 20 nt, Variola virus
uauaaucuucgucuauuaca

SEQ ID NO: 4076959 - RNA, 22 nt, Variola virus
uauaauguucaccauuuauaua

SEQ ID NO: 4076960 - RNA, 17 nt, Variola virus
uauaauuuaccgcuaua

SEQ ID NO: 4076961 - RNA, 15 nt, Variola virus
uauaauuuuuggaca

SEQ ID NO: 4076962 - RNA, 15 nt, Variola virus
uauacaagauugaaa

SEQ ID NO: 4076963 - RNA, 18 nt, Variola virus
uauacaaguguagaugau

SEQ ID NO: 4076964 - RNA, 16 nt, Variola virus
uauacagcauuacauu

SEQ ID NO: 4076965 - RNA, 16 nt, Variola virus
uauacaguauaaugau

SEQ ID NO: 4076966 - RNA, 21 nt, Variola virus
uauaccaaggauaaaauauca

SEQ ID NO: 4076967 - RNA, 17 nt, Variola virus
uauaccaauauuauucu

SEQ ID NO: 4076968 - RNA, 13 nt, Variola virus
uauacuccauuaa

SEQ ID NO: 4076969 - RNA, 16 nt, Variola virus
uauacuguuaaaugua

SEQ ID NO: 4076970 - RNA, 11 nt, Variola virus
uauacuuguca

SEQ ID NO: 4076971 - RNA, 16 nt, Variola virus
uauacuugucaucauu

SEQ ID NO: 4076972 - RNA, 15 nt, Variola virus
uauagaaauuuugau

SEQ ID NO: 4076973 - RNA, 22 nt, Variola virus
uauagaauguuuccaaugagua

SEQ ID NO: 4076974 - RNA, 22 nt, Variola virus
uauagauggagguaauuggcau

SEQ ID NO: 4076975 - RNA, 19 nt, Variola virus
uauagcuauucuucuuuaa

SEQ ID NO: 4076976 - RNA, 13 nt, Variola virus
uauaguaucuauu

SEQ ID NO: 4076977 - RNA, 15 nt, Variola virus
uauaguggauccauu

SEQ ID NO: 4076978 - RNA, 11 nt, Variola virus
uauauguuucu

SEQ ID NO: 4076979 - RNA, 17 nt, Variola virus
uauauuaucauagaccu

SEQ ID NO: 4076980 - RNA, 12 nt, Variola virus
uauauucaauau

SEQ ID NO: 4076981 - RNA, 18 nt, Variola virus
uauauucagggacacuca

SEQ ID NO: 4076982 - RNA, 14 nt, Variola virus
uauauucuaucaua

SEQ ID NO: 4076983 - RNA, 13 nt, Variola virus
uauauucuaugau

SEQ ID NO: 4076984 - RNA, 23 nt, Variola virus
uauauucuuuaaauggaacagac

SEQ ID NO: 4076985 - RNA, 20 nt, Variola virus
uauauugccuccauagcauu

SEQ ID NO: 4076986 - RNA, 18 nt, Variola virus
uauauuuguuaacuacau

SEQ ID NO: 4076987 - RNA, 14 nt, Variola virus
uauauuuuauacau

SEQ ID NO: 4076988 - RNA, 14 nt, Variola virus
uauauuuuuggauu

SEQ ID NO: 4076989 - RNA, 11 nt, Variola virus
uaucaaagaua

SEQ ID NO: 4076990 - RNA, 12 nt, Variola virus
uaucaaaucuag

SEQ ID NO: 4076991 - RNA, 15 nt, Variola virus
uaucaagacauaugc

SEQ ID NO: 4076992 - RNA, 17 nt, Variola virus
uaucaauccaacaaaug

SEQ ID NO: 4076993 - RNA, 18 nt, Variola virus
uaucacuaucuucaucau

SEQ ID NO: 4076994 - RNA, 17 nt, Variola virus
uaucaucgacacaaaug

SEQ ID NO: 4076995 - RNA, 15 nt, Variola virus
uaucaucuguaagau

SEQ ID NO: 4076996 - RNA, 12 nt, Variola virus
uaucaucuuuuc

SEQ ID NO: 4076997 - RNA, 17 nt, Variola virus
uaucaugaauuagauau

SEQ ID NO: 4076998 - RNA, 14 nt, Variola virus
uaucauuaauacag

SEQ ID NO: 4076999 - RNA, 15 nt, Variola virus
uauccagaugagucc

SEQ ID NO: 4077000 - RNA, 17 nt, Variola virus
uauccagcuaacuuauu

SEQ ID NO: 4077001 - RNA, 14 nt, Variola virus
uauccucaaacauc

SEQ ID NO: 4077002 - RNA, 18 nt, Variola virus
uauccucuauuauacauu

SEQ ID NO: 4077003 - RNA, 15 nt, Variola virus
uaucgauaauuauuu

SEQ ID NO: 4077004 - RNA, 14 nt, Variola virus
uaucgauguacaca

SEQ ID NO: 4077005 - RNA, 17 nt, Variola virus
uaucgcgauugcauaga

SEQ ID NO: 4077006 - RNA, 22 nt, Variola virus
uaucgcuaaaaucuucaucaaa

SEQ ID NO: 4077007 - RNA, 22 nt, Variola virus
uaucguauauuaaguugggaga

SEQ ID NO: 4077008 - RNA, 17 nt, Variola virus
uaucuaaccauucaauu

SEQ ID NO: 4077009 - RNA, 15 nt, Variola virus
uaucuaauaauauua

SEQ ID NO: 4077010 - RNA, 12 nt, Variola virus
uaucuacaauua

SEQ ID NO: 4077011 - RNA, 19 nt, Variola virus
uaucuacauauuuaccaaa

SEQ ID NO: 4077012 - RNA, 23 nt, Variola virus
uaucuaguguuccuaauaucaua

SEQ ID NO: 4077013 - RNA, 13 nt, Variola virus
uaucuauacauac

SEQ ID NO: 4077014 - RNA, 14 nt, Variola virus
uaucuauauaugua

SEQ ID NO: 4077015 - RNA, 15 nt, Variola virus
uaucuauguuaucau

SEQ ID NO: 4077016 - RNA, 23 nt, Variola virus
uaucucgcauccauauguuugga

SEQ ID NO: 4077017 - RNA, 14 nt, Variola virus
uaucuguuaccaua

SEQ ID NO: 4077018 - RNA, 21 nt, Variola virus
uaucuuaaagccauacauuua

SEQ ID NO: 4077019 - RNA, 18 nt, Variola virus
uaucuuaaauaacucauu

SEQ ID NO: 4077020 - RNA, 18 nt, Variola virus
uaucuucauaaaauacua

SEQ ID NO: 4077021 - RNA, 17 nt, Variola virus
uaucuuccgucaaggau

SEQ ID NO: 4077022 - RNA, 20 nt, Variola virus
uaucuuuagcuucugaaaua

SEQ ID NO: 4077023 - RNA, 13 nt, Variola virus
uaucuuuccaacu

SEQ ID NO: 4077024 - RNA, 21 nt, Variola virus
uaucuuuuagagguucccaau

SEQ ID NO: 4077025 - RNA, 16 nt, Variola virus
uaugaagauaaacacu

SEQ ID NO: 4077026 - RNA, 22 nt, Variola virus
uaugaauaucaggaaauguaua

SEQ ID NO: 4077027 - RNA, 21 nt, Variola virus
uaugaauccgaugaucucacu

SEQ ID NO: 4077028 - RNA, 13 nt, Variola virus
uaugaaucuggau

SEQ ID NO: 4077029 - RNA, 21 nt, Variola virus
uaugaauggauaccuguauua

SEQ ID NO: 4077030 - RNA, 12 nt, Variola virus
uaugacaaacuu

SEQ ID NO: 4077031 - RNA, 23 nt, Variola virus
uaugacaucaacuacaaaugaua

SEQ ID NO: 4077032 - RNA, 20 nt, Variola virus
uaugacgcgcguucaacauu

SEQ ID NO: 4077033 - RNA, 14 nt, Variola virus
uaugacuaaaucua

SEQ ID NO: 4077034 - RNA, 16 nt, Variola virus
uaugaggaaaaugauu

SEQ ID NO: 4077035 - RNA, 23 nt, Variola virus
uaugauacugucuauaauagcaa

SEQ ID NO: 4077036 - RNA, 16 nt, Variola virus
uaugauggguggauau

SEQ ID NO: 4077037 - RNA, 13 nt, Variola virus
uaugauucuaaua

SEQ ID NO: 4077038 - RNA, 18 nt, Variola virus
uaugcaaccguaucaaaa

SEQ ID NO: 4077039 - RNA, 21 nt, Variola virus
uaugcaccuagagguucuauu

SEQ ID NO: 4077040 - RNA, 19 nt, Variola virus
uauggaagaagaaauaaag

SEQ ID NO: 4077041 - RNA, 19 nt, Variola virus
uauggacgcagauagcuau

SEQ ID NO: 4077042 - RNA, 23 nt, Variola virus
uauggucucaucguuguuuagaa

SEQ ID NO: 4077043 - RNA, 23 nt, Variola virus
uauguaacagacgagauaguuuu

SEQ ID NO: 4077044 - RNA, 16 nt, Variola virus
uauguaagacuugugg

SEQ ID NO: 4077045 - RNA, 23 nt, Variola virus
uauguauacauaauauuaucaug

SEQ ID NO: 4077046 - RNA, 17 nt, Variola virus
uaugucaaaaauuguag

SEQ ID NO: 4077047 - RNA, 21 nt, Variola virus
uauguccauuaaaguuaaauu

SEQ ID NO: 4077048 - RNA, 19 nt, Variola virus
uaugucuguacaaauguua

SEQ ID NO: 4077049 - RNA, 19 nt, Variola virus
uauguuaacggaaaguauu

SEQ ID NO: 4077050 - RNA, 20 nt, Variola virus
uauguuaauacuuauucaua

SEQ ID NO: 4077051 - RNA, 15 nt, Variola virus
uauguucaacuuuga

SEQ ID NO: 4077052 - RNA, 13 nt, Variola virus
uauguugauuuau

SEQ ID NO: 4077053 - RNA, 16 nt, Variola virus
uauguuucuaaauuuu

SEQ ID NO: 4077054 - RNA, 19 nt, Variola virus
uauuaaaaaaaaauacuuu

SEQ ID NO: 4077055 - RNA, 16 nt, Variola virus
uauuaaaacuaucaau

SEQ ID NO: 4077056 - RNA, 18 nt, Variola virus
uauuaaaauuauuucuaa

SEQ ID NO: 4077057 - RNA, 22 nt, Variola virus
uauuaaacucuacauaaucaua

SEQ ID NO: 4077058 - RNA, 23 nt, Variola virus
uauuaacuacggauaacaaaaua

SEQ ID NO: 4077059 - RNA, 15 nt, Variola virus
uauuaagauuaucua

SEQ ID NO: 4077060 - RNA, 23 nt, Variola virus
uauuaauaagaaugacuccuaua

SEQ ID NO: 4077061 - RNA, 14 nt, Variola virus
uauuaauaagacuu

SEQ ID NO: 4077062 - RNA, 20 nt, Variola virus
uauuaauacaugucuuagau

SEQ ID NO: 4077063 - RNA, 13 nt, Variola virus
uauuaaucuuuuu

SEQ ID NO: 4077064 - RNA, 14 nt, Variola virus
uauuacaauuaaau

SEQ ID NO: 4077065 - RNA, 16 nt, Variola virus
uauuacacauaaacau

SEQ ID NO: 4077066 - RNA, 19 nt, Variola virus
uauuacauaauauauacag

SEQ ID NO: 4077067 - RNA, 15 nt, Variola virus
uauuacgguaucaaa

SEQ ID NO: 4077068 - RNA, 16 nt, Variola virus
uauuacgguaucaaaa

SEQ ID NO: 4077069 - RNA, 16 nt, Variola virus
uauuacguauuauaua

SEQ ID NO: 4077070 - RNA, 17 nt, Variola virus
uauuagauaauaaacag

SEQ ID NO: 4077071 - RNA, 16 nt, Variola virus
uauuagcacuaucaua

SEQ ID NO: 4077072 - RNA, 17 nt, Variola virus
uauuauaaaaaaguuuu

SEQ ID NO: 4077073 - RNA, 19 nt, Variola virus
uauuauaaacucucaacau

SEQ ID NO: 4077074 - RNA, 11 nt, Variola virus
uauuauacaug

SEQ ID NO: 4077075 - RNA, 20 nt, Variola virus
uauuaucaaaauuuggaaac

SEQ ID NO: 4077076 - RNA, 12 nt, Variola virus
uauuaucaagau

SEQ ID NO: 4077077 - RNA, 15 nt, Variola virus
uauuaucauuaguca

SEQ ID NO: 4077078 - RNA, 17 nt, Variola virus
uauuauccguauuucca

SEQ ID NO: 4077079 - RNA, 14 nt, Variola virus
uauuaucucagugc

SEQ ID NO: 4077080 - RNA, 19 nt, Variola virus
uauuauugauccaaucaaa

SEQ ID NO: 4077081 - RNA, 21 nt, Variola virus
uauuauuuaaugagaaacuua

SEQ ID NO: 4077082 - RNA, 21 nt, Variola virus
uauucaauuuuuguauaucua

SEQ ID NO: 4077083 - RNA, 21 nt, Variola virus
uauucacagucgccauuuagu

SEQ ID NO: 4077084 - RNA, 14 nt, Variola virus
uauucaucaucaaa

SEQ ID NO: 4077085 - RNA, 20 nt, Variola virus
uauucaucgucgacuaucaa

SEQ ID NO: 4077086 - RNA, 22 nt, Variola virus
ucauaacuugagagcauccagu

SEQ ID NO: 4077087 - RNA, 13 nt, Variola virus
ucauaagaacuau

SEQ ID NO: 4077088 - RNA, 15 nt, Variola virus
ucauaauaucuuuaa

SEQ ID NO: 4077089 - RNA, 16 nt, Variola virus
ucauacaugauauuca

SEQ ID NO: 4077090 - RNA, 22 nt, Variola virus
ucauagaugaaauacucuuuaa

SEQ ID NO: 4077091 - RNA, 19 nt, Variola virus
ucauauaucugcucuuaaa

SEQ ID NO: 4077092 - RNA, 15 nt, Variola virus
ucaucaauagacaua

SEQ ID NO: 4077093 - RNA, 15 nt, Variola virus
ucaucaucuucuggu

SEQ ID NO: 4077094 - RNA, 15 nt, Variola virus
ucauccaguugaaug

SEQ ID NO: 4077095 - RNA, 23 nt, Variola virus
ucaucgacuguacgauacauaau

SEQ ID NO: 4077096 - RNA, 20 nt, Variola virus
ucaucggacuuugugcauau

SEQ ID NO: 4077097 - RNA, 16 nt, Variola virus
ucaucguuauuuuuaa

SEQ ID NO: 4077098 - RNA, 17 nt, Variola virus
ucaucuagauaauggga

SEQ ID NO: 4077099 - RNA, 13 nt, Variola virus
ucaucuaugaaug

SEQ ID NO: 4077100 - RNA, 16 nt, Variola virus
ucaucugaaauuguca

SEQ ID NO: 4077101 - RNA, 13 nt, Variola virus
ucaucuucauagg

SEQ ID NO: 4077102 - RNA, 16 nt, Variola virus
ucaucuuugauauuua

SEQ ID NO: 4077103 - RNA, 22 nt, Variola virus
ucaugaacaaucacaagaauag

SEQ ID NO: 4077104 - RNA, 20 nt, Variola virus
ucaugaaccaauacaaugua

SEQ ID NO: 4077105 - RNA, 13 nt, Variola virus
ucaugaauacagu

SEQ ID NO: 4077106 - RNA, 21 nt, Variola virus
ucaugaugauuugguuguauu

SEQ ID NO: 4077107 - RNA, 21 nt, Variola virus
ucaugcauuuguuaguuauuc

SEQ ID NO: 4077108 - RNA, 22 nt, Variola virus
ucauggaauacauaaagaacga

SEQ ID NO: 4077109 - RNA, 15 nt, Variola virus
ucauggggcaaacau

SEQ ID NO: 4077110 - RNA, 22 nt, Variola virus
ucaugucugguaauucauauag

SEQ ID NO: 4077111 - RNA, 18 nt, Variola virus
ucauguguggaugcuacu

SEQ ID NO: 4077112 - RNA, 19 nt, Variola virus
ucauguuaacacucuacgu

SEQ ID NO: 4077113 - RNA, 16 nt, Variola virus
ucauguuauagaugug

SEQ ID NO: 4077114 - RNA, 17 nt, Variola virus
ucauuaauaauuucuag

SEQ ID NO: 4077115 - RNA, 16 nt, Variola virus
ucauuacuacuguaaa

SEQ ID NO: 4077116 - RNA, 15 nt, Variola virus
ucauuacucuaaaau

SEQ ID NO: 4077117 - RNA, 12 nt, Variola virus
ucauuagauguu

SEQ ID NO: 4077118 - RNA, 14 nt, Variola virus
ucauuauaaauucu

SEQ ID NO: 4077119 - RNA, 21 nt, Variola virus
ucauuaucgguguauuuucca

SEQ ID NO: 4077120 - RNA, 17 nt, Variola virus
ucauucaauauuuacaa

SEQ ID NO: 4077121 - RNA, 14 nt, Variola virus
ucauucauuccucc

SEQ ID NO: 4077122 - RNA, 19 nt, Variola virus
ucauucgcuuaacaucuuc

SEQ ID NO: 4077123 - RNA, 14 nt, Variola virus
ucauugucuaaaaa

SEQ ID NO: 4077124 - RNA, 20 nt, Variola virus
ucauuucaaccagagaaguu

SEQ ID NO: 4077125 - RNA, 12 nt, Variola virus
ucauuuccaaau

SEQ ID NO: 4077126 - RNA, 13 nt, Variola virus
ucauuuccaaauc

SEQ ID NO: 4077127 - RNA, 16 nt, Variola virus
ucauuuguguacccaa

SEQ ID NO: 4077128 - RNA, 23 nt, Variola virus
ucauuuuccagaugauauguaug

SEQ ID NO: 4077129 - RNA, 16 nt, Variola virus
uccaaauuuaauucuu

SEQ ID NO: 4077130 - RNA, 22 nt, Variola virus
uccaaguacgguaauagauuuu

SEQ ID NO: 4077131 - RNA, 23 nt, Variola virus
uccaaucuaagaaauuuaaaauu

SEQ ID NO: 4077132 - RNA, 14 nt, Variola virus
uccaauguguuuaa

SEQ ID NO: 4077133 - RNA, 15 nt, Variola virus
uccaauuuuauucua

SEQ ID NO: 4077134 - RNA, 14 nt, Variola virus
uccaauuuuucaga

SEQ ID NO: 4077135 - RNA, 16 nt, Variola virus
uccacauuaauacagc

SEQ ID NO: 4077136 - RNA, 19 nt, Variola virus
uccaccaucuaccauaauc

SEQ ID NO: 4077137 - RNA, 14 nt, Variola virus
uccagauaauaacc

SEQ ID NO: 4077138 - RNA, 13 nt, Variola virus
uccagauauauau

SEQ ID NO: 4077139 - RNA, 17 nt, Variola virus
uccagaugcgagagaau

SEQ ID NO: 4077140 - RNA, 17 nt, Variola virus
uccagaugucaugauau

SEQ ID NO: 4077141 - RNA, 11 nt, Variola virus
uccagauuuca

SEQ ID NO: 4077142 - RNA, 14 nt, Variola virus
uccauaaauuuaua

SEQ ID NO: 4077143 - RNA, 19 nt, Variola virus
uccauaaauuuauaauguu

SEQ ID NO: 4077144 - RNA, 22 nt, Variola virus
uccauauguuuggagcaaauau

SEQ ID NO: 4077145 - RNA, 19 nt, Variola virus
uccauauuuugcaauuucu

SEQ ID NO: 4077146 - RNA, 18 nt, Variola virus
uccaucuguggaaaauaa

SEQ ID NO: 4077147 - RNA, 19 nt, Variola virus
uccaugaucuguuuaucau

SEQ ID NO: 4077148 - RNA, 21 nt, Variola virus
uccaugcaacauuuccuacau

SEQ ID NO: 4077149 - RNA, 22 nt, Variola virus
uccauggaaaagauaaaguuuu

SEQ ID NO: 4077150 - RNA, 18 nt, Variola virus
uccaugucaaauagaguu

SEQ ID NO: 4077151 - RNA, 23 nt, Variola virus
uccauguucgagcauacuagcau

SEQ ID NO: 4077152 - RNA, 19 nt, Variola virus
uccauuauuuauuuacaga

SEQ ID NO: 4077153 - RNA, 14 nt, Variola virus
ucccaaauaucuuu

SEQ ID NO: 4077154 - RNA, 17 nt, Variola virus
ucccauucuaauacuuu

SEQ ID NO: 4077155 - RNA, 19 nt, Variola virus
ucccgccgauccuguauua

SEQ ID NO: 4077156 - RNA, 19 nt, Variola virus
uccgacaugcaaaaaugcu

SEQ ID NO: 4077157 - RNA, 15 nt, Variola virus
uccgccguucuaaug

SEQ ID NO: 4077158 - RNA, 15 nt, Variola virus
uccggucgaugauga

SEQ ID NO: 4077159 - RNA, 13 nt, Variola virus
uccgguuaauuuu

SEQ ID NO: 4077160 - RNA, 22 nt, Variola virus
uccguguaauccauaauccagu

SEQ ID NO: 4077161 - RNA, 14 nt, Variola virus
uccguuucuaaaaa

SEQ ID NO: 4077162 - RNA, 18 nt, Variola virus
uccuacaggaauaucuuu

SEQ ID NO: 4077163 - RNA, 15 nt, Variola virus
uccuauacucugaaa

SEQ ID NO: 4077164 - RNA, 11 nt, Variola virus
uccucaucugu

SEQ ID NO: 4077165 - RNA, 18 nt, Variola virus
uccucuucaacacaaagu

SEQ ID NO: 4077166 - RNA, 21 nt, Variola virus
uccuguaguauugauucuaga

SEQ ID NO: 4077167 - RNA, 13 nt, Variola virus
uccuuaaaguaac

SEQ ID NO: 4077168 - RNA, 15 nt, Variola virus
uccuugcaaauuccg

SEQ ID NO: 4077169 - RNA, 13 nt, Variola virus
ucgaaauaucuuu

SEQ ID NO: 4077170 - RNA, 15 nt, Variola virus
ucgaaauauguaaua

SEQ ID NO: 4077171 - RNA, 15 nt, Variola virus
ucgaauacaaauuuu

SEQ ID NO: 4077172 - RNA, 19 nt, Variola virus
ucgacaucuggauuucaga

SEQ ID NO: 4077173 - RNA, 18 nt, Variola virus
ucgacauucagaaagacg

SEQ ID NO: 4077174 - RNA, 23 nt, Variola virus
ucgacguaacuauauuccaaauu

SEQ ID NO: 4077175 - RNA, 17 nt, Variola virus
ucgauaacagcauuugu

SEQ ID NO: 4077176 - RNA, 17 nt, Variola virus
ucgauaacuguagucuu

SEQ ID NO: 4077177 - RNA, 11 nt, Variola virus
ucgauacuuuu

SEQ ID NO: 4077178 - RNA, 23 nt, Variola virus
ucgaucuuuggauauucuaacga

SEQ ID NO: 4077179 - RNA, 22 nt, Variola virus
ucgauucuggcuauuucaaaau

SEQ ID NO: 4077180 - RNA, 17 nt, Variola virus
ucgcaaauucuagucuu

SEQ ID NO: 4077181 - RNA, 14 nt, Variola virus
ucgcaacugucuuu

SEQ ID NO: 4077182 - RNA, 13 nt, Variola virus
ucgcagaugauga

SEQ ID NO: 4077183 - RNA, 16 nt, Variola virus
ucgcgcuaauuucuaa

SEQ ID NO: 4077184 - RNA, 15 nt, Variola virus
ucgcuaauuaugaaa

SEQ ID NO: 4077185 - RNA, 17 nt, Variola virus
ucggcaaucuuucucaa

SEQ ID NO: 4077186 - RNA, 22 nt, Variola virus
ucgggaccaauuacuaauaaag

SEQ ID NO: 4077187 - RNA, 14 nt, Variola virus
ucggucaacuuauu

SEQ ID NO: 4077188 - RNA, 14 nt, Variola virus
ucgguuaugaauga

SEQ ID NO: 4077189 - RNA, 20 nt, Variola virus
ucguacaguagagauauuug

SEQ ID NO: 4077190 - RNA, 14 nt, Variola virus
ucguauaaauacug

SEQ ID NO: 4077191 - RNA, 15 nt, Variola virus
ucguauaaauauccu

SEQ ID NO: 4077192 - RNA, 14 nt, Variola virus
ucguauacuagaaa

SEQ ID NO: 4077193 - RNA, 20 nt, Variola virus
ucgucaacaaguuggaugau

SEQ ID NO: 4077194 - RNA, 13 nt, Variola virus
ucgucucucuuag

SEQ ID NO: 4077195 - RNA, 21 nt, Variola virus
ucguguuuguguaguuuucac

SEQ ID NO: 4077196 - RNA, 20 nt, Variola virus
ucguuauaacucgagaauau

SEQ ID NO: 4077197 - RNA, 20 nt, Variola virus
ucguucaacugucuuucaag

SEQ ID NO: 4077198 - RNA, 22 nt, Variola virus
ucguuccaagucauaucuagaa

SEQ ID NO: 4077199 - RNA, 21 nt, Variola virus
ucguugguaggauaauacauc

SEQ ID NO: 4077200 - RNA, 19 nt, Variola virus
ucguuuaacgaucauauua

SEQ ID NO: 4077201 - RNA, 19 nt, Variola virus
ucguuuauaucacauugua

SEQ ID NO: 4077202 - RNA, 16 nt, Variola virus
ucguuuuucuuaagaa

SEQ ID NO: 4077203 - RNA, 16 nt, Variola virus
ucuaaaaaauccuuaa

SEQ ID NO: 4077204 - RNA, 21 nt, Variola virus
ucuaaaaauguuaauuuugaa

SEQ ID NO: 4077205 - RNA, 13 nt, Variola virus
ucuaaaauguaua

SEQ ID NO: 4077206 - RNA, 17 nt, Variola virus
ucuaaaauuacaaacaa

SEQ ID NO: 4077207 - RNA, 18 nt, Variola virus
ucuaaaccuucuuauuuu

SEQ ID NO: 4077208 - RNA, 16 nt, Variola virus
ucuaaguuaacacaug

SEQ ID NO: 4077209 - RNA, 16 nt, Variola virus
ucuaauaauuuggaua

SEQ ID NO: 4077210 - RNA, 14 nt, Variola virus
ucuaauacauaauu

SEQ ID NO: 4077211 - RNA, 23 nt, Variola virus
ucuaauauccauuuuacauuauu

SEQ ID NO: 4077212 - RNA, 13 nt, Variola virus
aaauaagagacuu

SEQ ID NO: 4077213 - RNA, 16 nt, Variola virus
aaauaaguaaaaagug

SEQ ID NO: 4077214 - RNA, 14 nt, Variola virus
aaauaauacuauau

SEQ ID NO: 4077215 - RNA, 13 nt, Variola virus
aaauaauccugaa

SEQ ID NO: 4077216 - RNA, 18 nt, Variola virus
aaauaauccugaauauau

SEQ ID NO: 4077217 - RNA, 16 nt, Variola virus
aaauaauuauucuuua

SEQ ID NO: 4077218 - RNA, 11 nt, Variola virus
aaauacuagua

SEQ ID NO: 4077219 - RNA, 13 nt, Variola virus
aaauacuuuauca

SEQ ID NO: 4077220 - RNA, 23 nt, Variola virus
aaauagaucucugguucuauguu

SEQ ID NO: 4077221 - RNA, 12 nt, Variola virus
aaauagauguua

SEQ ID NO: 4077222 - RNA, 18 nt, Variola virus
aaauagguuuuguucuau

SEQ ID NO: 4077223 - RNA, 18 nt, Variola virus
aaauaguaucaucuauca

SEQ ID NO: 4077224 - RNA, 14 nt, Variola virus
aaauaguucauuuu

SEQ ID NO: 4077225 - RNA, 13 nt, Variola virus
aaauauaacuauu

SEQ ID NO: 4077226 - RNA, 14 nt, Variola virus
aaauauauacauau

SEQ ID NO: 4077227 - RNA, 14 nt, Variola virus
aaauauauacuuca

SEQ ID NO: 4077228 - RNA, 20 nt, Variola virus
aaauauauaguauuaaugau

SEQ ID NO: 4077229 - RNA, 23 nt, Variola virus
aaauauauuagacaauacuacaa

SEQ ID NO: 4077230 - RNA, 11 nt, Variola virus
aaauaucucau

SEQ ID NO: 4077231 - RNA, 22 nt, Variola virus
aaauaucuuuaauacagaguuu

SEQ ID NO: 4077232 - RNA, 13 nt, Variola virus
aaauauguagaaa

SEQ ID NO: 4077233 - RNA, 14 nt, Variola virus
aaauauuuacuaau

SEQ ID NO: 4077234 - RNA, 20 nt, Variola virus
aaauauuucauuagauguua

SEQ ID NO: 4077235 - RNA, 20 nt, Variola virus
aaauauuuucguugugaaga

SEQ ID NO: 4077236 - RNA, 21 nt, Variola virus
aaaucaaacacaagaucuucu

SEQ ID NO: 4077237 - RNA, 21 nt, Variola virus
aaaucaaucaaggaacuaaau

SEQ ID NO: 4077238 - RNA, 18 nt, Variola virus
aaaucacacgaugugucu

SEQ ID NO: 4077239 - RNA, 16 nt, Variola virus
aaaucaguaacuaugu

SEQ ID NO: 4077240 - RNA, 21 nt, Variola virus
aaaucauaauaugagauguuu

SEQ ID NO: 4077241 - RNA, 13 nt, Variola virus
aaaucauccacag

SEQ ID NO: 4077242 - RNA, 19 nt, Variola virus
aaaucauccguuguuauau

SEQ ID NO: 4077243 - RNA, 15 nt, Variola virus
aaaucaucuuauuua

SEQ ID NO: 4077244 - RNA, 19 nt, Variola virus
aaaucauggggcaaacauu

SEQ ID NO: 4077245 - RNA, 12 nt, Variola virus
aaauccaaauuu

SEQ ID NO: 4077246 - RNA, 19 nt, Variola virus
aaauccauguucuaccaac

SEQ ID NO: 4077247 - RNA, 17 nt, Variola virus
aaauccuucaucacuuc

SEQ ID NO: 4077248 - RNA, 21 nt, Variola virus
aaauccuuguuugauaaaugu

SEQ ID NO: 4077249 - RNA, 20 nt, Variola virus
aaaucguauaaauacugucu

SEQ ID NO: 4077250 - RNA, 18 nt, Variola virus
aaaucucaguuaacgauu

SEQ ID NO: 4077251 - RNA, 17 nt, Variola virus
aaaugacuaauuuugua

SEQ ID NO: 4077252 - RNA, 23 nt, Variola virus
aaaugacuaauuuuguagcauua

SEQ ID NO: 4077253 - RNA, 20 nt, Variola virus
aaaugagguagcaaaaaaac

SEQ ID NO: 4077254 - RNA, 14 nt, Variola virus
aaaugauugaagaa

SEQ ID NO: 4077255 - RNA, 15 nt, Variola virus
aaaugcguacauaac

SEQ ID NO: 4077256 - RNA, 21 nt, Variola virus
aaaugcucugcaauaacuaau

SEQ ID NO: 4077257 - RNA, 18 nt, Variola virus
aaauggaagguauuucca

SEQ ID NO: 4077258 - RNA, 11 nt, Variola virus
aaauggauaag

SEQ ID NO: 4077259 - RNA, 18 nt, Variola virus
aaauguauaaaaacuaau

SEQ ID NO: 4077260 - RNA, 16 nt, Variola virus
aaaugucccucauaau

SEQ ID NO: 4077261 - RNA, 17 nt, Variola virus
aaauguugauagcugaa

SEQ ID NO: 4077262 - RNA, 15 nt, Variola virus
aaauuauauacugaa

SEQ ID NO: 4077263 - RNA, 16 nt, Variola virus
aaauuauucacuauau

SEQ ID NO: 4077264 - RNA, 22 nt, Variola virus
aaauucuggauuggaugucacu

SEQ ID NO: 4077265 - RNA, 22 nt, Variola virus
aaauugauagagaguucauuua

SEQ ID NO: 4077266 - RNA, 13 nt, Variola virus
aaauugcaaaaua

SEQ ID NO: 4077267 - RNA, 16 nt, Variola virus
aaauugcauuugauua

SEQ ID NO: 4077268 - RNA, 22 nt, Variola virus
aaauugguagcugaauguuaua

SEQ ID NO: 4077269 - RNA, 20 nt, Variola virus
aaauugguauaaauguugua

SEQ ID NO: 4077270 - RNA, 17 nt, Variola virus
aaauuguccuauauaau

SEQ ID NO: 4077271 - RNA, 13 nt, Variola virus
aaauuguuuaguu

SEQ ID NO: 4077272 - RNA, 19 nt, Variola virus
aaauuuacggugacuacua

SEQ ID NO: 4077273 - RNA, 17 nt, Variola virus
aaauuuauuaaaaaugu

SEQ ID NO: 4077274 - RNA, 12 nt, Variola virus
aaauuuuucuac

SEQ ID NO: 4077275 - RNA, 18 nt, Variola virus
aaauuuuuuauacauuau

SEQ ID NO: 4077276 - RNA, 15 nt, Variola virus
aacaaacaucucacc

SEQ ID NO: 4077277 - RNA, 15 nt, Variola virus
aacaaaguuauucau

SEQ ID NO: 4077278 - RNA, 14 nt, Variola virus
aacaaauauuggca

SEQ ID NO: 4077279 - RNA, 16 nt, Variola virus
aacaaaucuauuugga

SEQ ID NO: 4077280 - RNA, 17 nt, Variola virus
aacaacucccggacuua

SEQ ID NO: 4077281 - RNA, 23 nt, Variola virus
aacaaguuccucaacgugauuau

SEQ ID NO: 4077282 - RNA, 14 nt, Variola virus
aacaauaaugagaa

SEQ ID NO: 4077283 - RNA, 18 nt, Variola virus
aacaauagucuuguaaag

SEQ ID NO: 4077284 - RNA, 13 nt, Variola virus
aacaaucaagaag

SEQ ID NO: 4077285 - RNA, 20 nt, Variola virus
aacaaucguuaauaaaucug

SEQ ID NO: 4077286 - RNA, 22 nt, Variola virus
aacacgauuauuauaaaauaac

SEQ ID NO: 4077287 - RNA, 20 nt, Variola virus
aacacuauacuuauauuaau

SEQ ID NO: 4077288 - RNA, 22 nt, Variola virus
aacacuauuccaucuguggaaa

SEQ ID NO: 4077289 - RNA, 24 nt, Variola virus
aacacuccggaaaaauaauuucca

SEQ ID NO: 4077290 - RNA, 16 nt, Variola virus
aacacuggcuagaaaa

SEQ ID NO: 4077291 - RNA, 13 nt, Variola virus
aacacuuuucuau

SEQ ID NO: 4077292 - RNA, 18 nt, Variola virus
aacagaaacguuuagaga

SEQ ID NO: 4077293 - RNA, 22 nt, Variola virus
aacagggaauuacuuuaauagu

SEQ ID NO: 4077294 - RNA, 16 nt, Variola virus
aacaguaucagauaau

SEQ ID NO: 4077295 - RNA, 20 nt, Variola virus
aacaguuaucaaaauaugua

SEQ ID NO: 4077296 - RNA, 16 nt, Variola virus
aacaguucuaccacca

SEQ ID NO: 4077297 - RNA, 18 nt, Variola virus
aacauaaauaauucuaga

SEQ ID NO: 4077298 - RNA, 12 nt, Variola virus
aacauaaugccg

SEQ ID NO: 4077299 - RNA, 17 nt, Variola virus
aacauauaauuauaaga

SEQ ID NO: 4077300 - RNA, 12 nt, Variola virus
aacaucaagaau

SEQ ID NO: 4077301 - RNA, 22 nt, Variola virus
aacaucuaauugugauaaaugu

SEQ ID NO: 4077302 - RNA, 20 nt, Variola virus
aacaucuuuguaaacagaua

SEQ ID NO: 4077303 - RNA, 23 nt, Variola virus
aacaugguaucuauuuuaaauac

SEQ ID NO: 4077304 - RNA, 17 nt, Variola virus
aacaugugugaaaauau

SEQ ID NO: 4077305 - RNA, 13 nt, Variola virus
aacauguuaaaau

SEQ ID NO: 4077306 - RNA, 13 nt, Variola virus
aacauuaguucca

SEQ ID NO: 4077307 - RNA, 15 nt, Variola virus
aacauugauaacuac

SEQ ID NO: 4077308 - RNA, 15 nt, Variola virus
aacauuuugaaaauu

SEQ ID NO: 4077309 - RNA, 20 nt, Variola virus
aacauuuugcagaaaaaagu

SEQ ID NO: 4077310 - RNA, 20 nt, Variola virus
aaccaacgucauaaaaaugu

SEQ ID NO: 4077311 - RNA, 15 nt, Variola virus
aaccaagaaacaguc

SEQ ID NO: 4077312 - RNA, 16 nt, Variola virus
aaccaauuuguauaug

SEQ ID NO: 4077313 - RNA, 22 nt, Variola virus
aaccaguacucucuuauaaagu

SEQ ID NO: 4077314 - RNA, 13 nt, Variola virus
aaccauaaauaca

SEQ ID NO: 4077315 - RNA, 19 nt, Variola virus
aaccauucaaaaaaguaau

SEQ ID NO: 4077316 - RNA, 16 nt, Variola virus
aaccgacauuaccauc

SEQ ID NO: 4077317 - RNA, 15 nt, Variola virus
aaccuaacacaaauu

SEQ ID NO: 4077318 - RNA, 15 nt, Variola virus
aaccuaagacaaauu

SEQ ID NO: 4077319 - RNA, 16 nt, Variola virus
aaccuuugcaaauaca

SEQ ID NO: 4077320 - RNA, 13 nt, Variola virus
aacgaaacaaugu

SEQ ID NO: 4077321 - RNA, 15 nt, Variola virus
aacgaaguaaaaagu

SEQ ID NO: 4077322 - RNA, 17 nt, Variola virus
aacgaaguauuuauacu

SEQ ID NO: 4077323 - RNA, 18 nt, Variola virus
aacgauaauuuauacgua

SEQ ID NO: 4077324 - RNA, 16 nt, Variola virus
aacguguauuaaauag

SEQ ID NO: 4077325 - RNA, 16 nt, Variola virus
aacguucauagaauuu

SEQ ID NO: 4077326 - RNA, 18 nt, Variola virus
aacuaaaaauuaaacaau

SEQ ID NO: 4077327 - RNA, 19 nt, Variola virus
aacuaaaugguauacacau

SEQ ID NO: 4077328 - RNA, 15 nt, Variola virus
aacuaaauuaacaau

SEQ ID NO: 4077329 - RNA, 21 nt, Variola virus
aacuaauucauuuucaauaau

SEQ ID NO: 4077330 - RNA, 22 nt, Variola virus
aacuacuuguaauauugaaauc

SEQ ID NO: 4077331 - RNA, 18 nt, Variola virus
aacuacuuuaucaguaaa

SEQ ID NO: 4077332 - RNA, 16 nt, Variola virus
aacuagacaauaaugu

SEQ ID NO: 4077333 - RNA, 17 nt, Variola virus
aacuagucuauuucaua

SEQ ID NO: 4077334 - RNA, 15 nt, Variola virus
aacuaguguagaaaa

SEQ ID NO: 4077335 - RNA, 15 nt, Variola virus
aacuaucacuuauac

SEQ ID NO: 4077336 - RNA, 13 nt, Variola virus
aacuauuuagaaa

SEQ ID NO: 4077337 - RNA, 16 nt, Variola virus
aacuauuuucaguaau

SEQ ID NO: 4077338 - RNA, 16 nt, Variola virus
aacucaucuaccauuu

SEQ ID NO: 4077339 - RNA, 23 nt, Variola virus
aauaauaccuucuacuaugcaau

SEQ ID NO: 4077340 - RNA, 20 nt, Variola virus
aauaauaucacuauuacaau

SEQ ID NO: 4077341 - RNA, 14 nt, Variola virus
aauaaucuucauua

SEQ ID NO: 4077342 - RNA, 13 nt, Variola virus
aauaaugaauauu

SEQ ID NO: 4077343 - RNA, 22 nt, Variola virus
aauaauguaguaaauauaaaau

SEQ ID NO: 4077344 - RNA, 23 nt, Variola virus
aauaauucauggaaauuuaacag

SEQ ID NO: 4077345 - RNA, 21 nt, Variola virus
aauaauuguaaaacauacaau

SEQ ID NO: 4077346 - RNA, 14 nt, Variola virus
aauaauuuaacaau

SEQ ID NO: 4077347 - RNA, 21 nt, Variola virus
aauaauuuaccucguacuaua

SEQ ID NO: 4077348 - RNA, 13 nt, Variola virus
aauacaagcaucu

SEQ ID NO: 4077349 - RNA, 15 nt, Variola virus
aauacacauaaugaa

SEQ ID NO: 4077350 - RNA, 11 nt, Variola virus
aauacagaaug

SEQ ID NO: 4077351 - RNA, 14 nt, Variola virus
aauacagaucaaaa

SEQ ID NO: 4077352 - RNA, 13 nt, Variola virus
aauacaggaucua

SEQ ID NO: 4077353 - RNA, 20 nt, Variola virus
aauacauauuuuuuguaaaa

SEQ ID NO: 4077354 - RNA, 22 nt, Variola virus
aauacaucaucaauuuugaaaa

SEQ ID NO: 4077355 - RNA, 23 nt, Variola virus
aauaccaguuauguucaacuuug

SEQ ID NO: 4077356 - RNA, 19 nt, Variola virus
aauacgaugauauuaaaau

SEQ ID NO: 4077357 - RNA, 16 nt, Variola virus
aauacguguugauaau

SEQ ID NO: 4077358 - RNA, 13 nt, Variola virus
aauacguugaaaa

SEQ ID NO: 4077359 - RNA, 18 nt, Variola virus
aauacucaauacuuucca

SEQ ID NO: 4077360 - RNA, 14 nt, Variola virus
aauacucuacagag

SEQ ID NO: 4077361 - RNA, 12 nt, Variola virus
aauacugaauuc

SEQ ID NO: 4077362 - RNA, 18 nt, Variola virus
aauacugcaauaauuuuc

SEQ ID NO: 4077363 - RNA, 22 nt, Variola virus
aauacuucucuguccuuaauaa

SEQ ID NO: 4077364 - RNA, 23 nt, Variola virus
aauacuugacugacuuaaaacuu

SEQ ID NO: 4077365 - RNA, 20 nt, Variola virus
aauacuuuaacaucacuaau

SEQ ID NO: 4077366 - RNA, 22 nt, Variola virus
aauagaauauacucuauucuuc

SEQ ID NO: 4077367 - RNA, 23 nt, Variola virus
aauagaaugcucuuaaauaaugu

SEQ ID NO: 4077368 - RNA, 23 nt, Variola virus
aauagauagugcuaaacgacuua

SEQ ID NO: 4077369 - RNA, 17 nt, Variola virus
aauagauccugaauauu

SEQ ID NO: 4077370 - RNA, 21 nt, Variola virus
aauagcaaaauuuuuacuauu

SEQ ID NO: 4077371 - RNA, 14 nt, Variola virus
aauagcaucaucuu

SEQ ID NO: 4077372 - RNA, 14 nt, Variola virus
aauaguaaaaucua

SEQ ID NO: 4077373 - RNA, 14 nt, Variola virus
aauaguaaugauuc

SEQ ID NO: 4077374 - RNA, 22 nt, Variola virus
aauaguaguagaauaagaacua

SEQ ID NO: 4077375 - RNA, 16 nt, Variola virus
aauagucaauagauua

SEQ ID NO: 4077376 - RNA, 18 nt, Variola virus
aauagucuuguaaagaua

SEQ ID NO: 4077377 - RNA, 20 nt, Variola virus
aauaguuagauacaaagaua

SEQ ID NO: 4077378 - RNA, 18 nt, Variola virus
aauaguuauuacuuuucu

SEQ ID NO: 4077379 - RNA, 15 nt, Variola virus
aauaguuuuuaacua

SEQ ID NO: 4077380 - RNA, 20 nt, Variola virus
aauauaaaaaaauaaauaua

SEQ ID NO: 4077381 - RNA, 17 nt, Variola virus
aauauaaaaaaaugauu

SEQ ID NO: 4077382 - RNA, 15 nt, Variola virus
aauauaauaaauaua

SEQ ID NO: 4077383 - RNA, 12 nt, Variola virus
aauauacucuau

SEQ ID NO: 4077384 - RNA, 20 nt, Variola virus
aauauacuuuguguuucaug

SEQ ID NO: 4077385 - RNA, 18 nt, Variola virus
aauauagaaauaaugaua

SEQ ID NO: 4077386 - RNA, 18 nt, Variola virus
aauauaguaguuagauua

SEQ ID NO: 4077387 - RNA, 15 nt, Variola virus
aauauaguuaauagu

SEQ ID NO: 4077388 - RNA, 17 nt, Variola virus
aauauaguuaguauaac

SEQ ID NO: 4077389 - RNA, 14 nt, Variola virus
aauauauucuauga

SEQ ID NO: 4077390 - RNA, 22 nt, Variola virus
aauaucaucaauauagagauua

SEQ ID NO: 4077391 - RNA, 17 nt, Variola virus
aauauccagaauguuuc

SEQ ID NO: 4077392 - RNA, 20 nt, Variola virus
aauaucgauuagauuuccua

SEQ ID NO: 4077393 - RNA, 13 nt, Variola virus
aauaucuuguaua

SEQ ID NO: 4077394 - RNA, 22 nt, Variola virus
aauaucuuguucugguuuaaaa

SEQ ID NO: 4077395 - RNA, 19 nt, Variola virus
aauaucuuuaauacagagu

SEQ ID NO: 4077396 - RNA, 18 nt, Variola virus
aauaugauagaaaugaug

SEQ ID NO: 4077397 - RNA, 15 nt, Variola virus
aauaugauuagaagu

SEQ ID NO: 4077398 - RNA, 20 nt, Variola virus
aauaugauuagaaguuauau

SEQ ID NO: 4077399 - RNA, 18 nt, Variola virus
aauaugcuaguuaauagu

SEQ ID NO: 4077400 - RNA, 19 nt, Variola virus
aauaugcucaugaagauua

SEQ ID NO: 4077401 - RNA, 23 nt, Variola virus
aauaugucucuuaacuauuuccg

SEQ ID NO: 4077402 - RNA, 18 nt, Variola virus
aauauuaaagauaaagcg

SEQ ID NO: 4077403 - RNA, 12 nt, Variola virus
aauauuaaauau

SEQ ID NO: 4077404 - RNA, 18 nt, Variola virus
aauauuaauaacauuaca

SEQ ID NO: 4077405 - RNA, 12 nt, Variola virus
aauauuagaaaa

SEQ ID NO: 4077406 - RNA, 19 nt, Variola virus
aauauuagaguuagguaau

SEQ ID NO: 4077407 - RNA, 15 nt, Variola virus
aauauuauaaagccu

SEQ ID NO: 4077408 - RNA, 15 nt, Variola virus
aauauuauaauacca

SEQ ID NO: 4077409 - RNA, 16 nt, Variola virus
aauauuauacaugaua

SEQ ID NO: 4077410 - RNA, 17 nt, Variola virus
aauauucauauccuugu

SEQ ID NO: 4077411 - RNA, 19 nt, Variola virus
aauauucauuaauucuaua

SEQ ID NO: 4077412 - RNA, 23 nt, Variola virus
aauauuguaacaauuuauuuugu

SEQ ID NO: 4077413 - RNA, 12 nt, Variola virus
aauauuuaacuc

SEQ ID NO: 4077414 - RNA, 21 nt, Variola virus
aauauuuguuaucaugaugac

SEQ ID NO: 4077415 - RNA, 11 nt, Variola virus
aauauuuuacg

SEQ ID NO: 4077416 - RNA, 14 nt, Variola virus
aauauuuuauuuca

SEQ ID NO: 4077417 - RNA, 20 nt, Variola virus
aaucaaccgccaaugaugcg

SEQ ID NO: 4077418 - RNA, 22 nt, Variola virus
aaucaagauucauuuuuaaaau

SEQ ID NO: 4077419 - RNA, 19 nt, Variola virus
aaucaagggaaaaucugaa

SEQ ID NO: 4077420 - RNA, 18 nt, Variola virus
aaucacucaauaucuaga

SEQ ID NO: 4077421 - RNA, 21 nt, Variola virus
aaucaguacguucuucauuua

SEQ ID NO: 4077422 - RNA, 13 nt, Variola virus
aaucauaaccauu

SEQ ID NO: 4077423 - RNA, 16 nt, Variola virus
aaucauauuuagaaaa

SEQ ID NO: 4077424 - RNA, 14 nt, Variola virus
aaucaucauaucca

SEQ ID NO: 4077425 - RNA, 13 nt, Variola virus
aaucauccuaaga

SEQ ID NO: 4077426 - RNA, 14 nt, Variola virus
aaucauuaaaugau

SEQ ID NO: 4077427 - RNA, 21 nt, Variola virus
aaucauuacugucgcuaucau

SEQ ID NO: 4077428 - RNA, 22 nt, Variola virus
aaucauucaaaaaucuaucacu

SEQ ID NO: 4077429 - RNA, 12 nt, Variola virus
aaucauugacau

SEQ ID NO: 4077430 - RNA, 15 nt, Variola virus
aauccaaauaugaua

SEQ ID NO: 4077431 - RNA, 18 nt, Variola virus
aauccaauuguuugauau

SEQ ID NO: 4077432 - RNA, 14 nt, Variola virus
aauccauccauuau

SEQ ID NO: 4077433 - RNA, 20 nt, Variola virus
aauccauucucucaaucacu

SEQ ID NO: 4077434 - RNA, 21 nt, Variola virus
aauccauugauaauuucuugu

SEQ ID NO: 4077435 - RNA, 13 nt, Variola virus
aaucccaauucag

SEQ ID NO: 4077436 - RNA, 22 nt, Variola virus
aaucccuacauauuuuagaaca

SEQ ID NO: 4077437 - RNA, 19 nt, Variola virus
aauccuauacucugaaaga

SEQ ID NO: 4077438 - RNA, 21 nt, Variola virus
aauccucuauuuauugacauu

SEQ ID NO: 4077439 - RNA, 15 nt, Variola virus
aauccuuugauuauc

SEQ ID NO: 4077440 - RNA, 17 nt, Variola virus
aauccuuuuuuauaaaa

SEQ ID NO: 4077441 - RNA, 17 nt, Variola virus
aaucgcgcguuagaaau

SEQ ID NO: 4077442 - RNA, 14 nt, Variola virus
aaucgcuuaauaga

SEQ ID NO: 4077443 - RNA, 16 nt, Variola virus
aaucggagaauguuuc

SEQ ID NO: 4077444 - RNA, 14 nt, Variola virus
aaucguuuaauagu

SEQ ID NO: 4077445 - RNA, 21 nt, Variola virus
aaucuaguacucgaaauaaua

SEQ ID NO: 4077446 - RNA, 16 nt, Variola virus
aaucuauucccuugau

SEQ ID NO: 4077447 - RNA, 21 nt, Variola virus
aaucucgucaguauugacaau

SEQ ID NO: 4077448 - RNA, 12 nt, Variola virus
aaucugaaaaug

SEQ ID NO: 4077449 - RNA, 13 nt, Variola virus
aaucugaaaaugu

SEQ ID NO: 4077450 - RNA, 20 nt, Variola virus
aaucugauagaaagaauaag

SEQ ID NO: 4077451 - RNA, 17 nt, Variola virus
aaucuuaauaucuucgu

SEQ ID NO: 4077452 - RNA, 13 nt, Variola virus
aaucuuuaccaua

SEQ ID NO: 4077453 - RNA, 13 nt, Variola virus
aaugaaaauggau

SEQ ID NO: 4077454 - RNA, 12 nt, Variola virus
aaugaaaugaua

SEQ ID NO: 4077455 - RNA, 15 nt, Variola virus
aaugaagauccaaga

SEQ ID NO: 4077456 - RNA, 14 nt, Variola virus
aaugaauaucuaca

SEQ ID NO: 4077457 - RNA, 16 nt, Variola virus
aaugaaucccaaacau

SEQ ID NO: 4077458 - RNA, 20 nt, Variola virus
aaugaauggcguaccaguuu

SEQ ID NO: 4077459 - RNA, 14 nt, Variola virus
aaugacuuauaaaa

SEQ ID NO: 4077460 - RNA, 19 nt, Variola virus
aaugagauacauaaaacuu

SEQ ID NO: 4077461 - RNA, 24 nt, Variola virus
aaugaggaaaucguauaaauacug

SEQ ID NO: 4077462 - RNA, 17 nt, Variola virus
aaugaguaaguucuaua

SEQ ID NO: 4077463 - RNA, 15 nt, Variola virus
aaugauaauaggaau

SEQ ID NO: 4077464 - RNA, 19 nt, Variola virus
aaugaugcgcacaaugaua

SEQ ID NO: 4077465 - RNA, 16 nt, Variola virus
acaaccgcuacauaau

SEQ ID NO: 4077466 - RNA, 22 nt, Variola virus
acaacgacgaaccaaaaugaau

SEQ ID NO: 4077467 - RNA, 23 nt, Variola virus
acaacuggauauucgauaacagc

SEQ ID NO: 4077468 - RNA, 20 nt, Variola virus
acaacuuucucgugguggug

SEQ ID NO: 4077469 - RNA, 21 nt, Variola virus
acaacuuuuaaauacaaauau

SEQ ID NO: 4077470 - RNA, 19 nt, Variola virus
acaagaaaauuagaaggau

SEQ ID NO: 4077471 - RNA, 21 nt, Variola virus
acaagauuuuuagcguauuau

SEQ ID NO: 4077472 - RNA, 22 nt, Variola virus
acaagccgaagaguauaaauuc

SEQ ID NO: 4077473 - RNA, 22 nt, Variola virus
acaagucuaauaauguuauuac

SEQ ID NO: 4077474 - RNA, 23 nt, Variola virus
acaaguugaccaauuuauuucua

SEQ ID NO: 4077475 - RNA, 12 nt, Variola virus
acaaguuuucau

SEQ ID NO: 4077476 - RNA, 17 nt, Variola virus
acaaguuuucauaucau

SEQ ID NO: 4077477 - RNA, 13 nt, Variola virus
acaauacagcagu

SEQ ID NO: 4077478 - RNA, 17 nt, Variola virus
acaauacauguacaaau

SEQ ID NO: 4077479 - RNA, 15 nt, Variola virus
acaauacguguugau

SEQ ID NO: 4077480 - RNA, 21 nt, Variola virus
acaauagauggauaauggaag

SEQ ID NO: 4077481 - RNA, 18 nt, Variola virus
acaauaguguucugaauu

SEQ ID NO: 4077482 - RNA, 16 nt, Variola virus
acaauaguuagauaca

SEQ ID NO: 4077483 - RNA, 20 nt, Variola virus
acaauauauguaaucauuau

SEQ ID NO: 4077484 - RNA, 15 nt, Variola virus
acaaucaauaauaua

SEQ ID NO: 4077485 - RNA, 19 nt, Variola virus
acaaucauccggauauucu

SEQ ID NO: 4077486 - RNA, 16 nt, Variola virus
acaauccaaaaaauga

SEQ ID NO: 4077487 - RNA, 18 nt, Variola virus
acaaucuaguacucgaaa

SEQ ID NO: 4077488 - RNA, 17 nt, Variola virus
acaaucuuauaucuucu

SEQ ID NO: 4077489 - RNA, 19 nt, Variola virus
acaaugaaccguaauauau

SEQ ID NO: 4077490 - RNA, 22 nt, Variola virus
acaaugaaccguaauauaucua

SEQ ID NO: 4077491 - RNA, 22 nt, Variola virus
acaaugacucuaucaacuauag

SEQ ID NO: 4077492 - RNA, 20 nt, Variola virus
acaaugaugccaucauagau

SEQ ID NO: 4077493 - RNA, 20 nt, Variola virus
acaaugccaucuuacaugau

SEQ ID NO: 4077494 - RNA, 15 nt, Variola virus
acaaugcuuuaauaa

SEQ ID NO: 4077495 - RNA, 15 nt, Variola virus
acaauuacacuacau

SEQ ID NO: 4077496 - RNA, 22 nt, Variola virus
acaauuauuagcaaaaauauau

SEQ ID NO: 4077497 - RNA, 20 nt, Variola virus
acaauuuauuucuaaaucua

SEQ ID NO: 4077498 - RNA, 15 nt, Variola virus
acaauuucacaaaug

SEQ ID NO: 4077499 - RNA, 18 nt, Variola virus
acaauuucacaaauggau

SEQ ID NO: 4077500 - RNA, 20 nt, Variola virus
acaauuugggacaaugaauu

SEQ ID NO: 4077501 - RNA, 14 nt, Variola virus
acaauuuuaacaga

SEQ ID NO: 4077502 - RNA, 13 nt, Variola virus
acacaaucaugau

SEQ ID NO: 4077503 - RNA, 22 nt, Variola virus
acacaccaaaaaagaaaaggau

SEQ ID NO: 4077504 - RNA, 15 nt, Variola virus
acacaccuaaaugug

SEQ ID NO: 4077505 - RNA, 20 nt, Variola virus
acacacugagaaacagcaua

SEQ ID NO: 4077506 - RNA, 21 nt, Variola virus
acacacuuaccuucaacagua

SEQ ID NO: 4077507 - RNA, 21 nt, Variola virus
acacauccgucaaagaaauaa

SEQ ID NO: 4077508 - RNA, 12 nt, Variola virus
acacauguguuu

SEQ ID NO: 4077509 - RNA, 15 nt, Variola virus
acacgagccuuuauu

SEQ ID NO: 4077510 - RNA, 15 nt, Variola virus
acacugagaaacagc

SEQ ID NO: 4077511 - RNA, 23 nt, Variola virus
acacuguucacauccuuccaaga

SEQ ID NO: 4077512 - RNA, 17 nt, Variola virus
acagaaauauaugagau

SEQ ID NO: 4077513 - RNA, 12 nt, Variola virus
acagaauuauug

SEQ ID NO: 4077514 - RNA, 19 nt, Variola virus
acagacguuaauauagaca

SEQ ID NO: 4077515 - RNA, 18 nt, Variola virus
acagagccaucuguaaaa

SEQ ID NO: 4077516 - RNA, 14 nt, Variola virus
acagauauuaucau

SEQ ID NO: 4077517 - RNA, 17 nt, Variola virus
acagaucaaaaaauaua

SEQ ID NO: 4077518 - RNA, 23 nt, Variola virus
acagaucaaaaaauauaguucca

SEQ ID NO: 4077519 - RNA, 19 nt, Variola virus
acagaugagagauaauaua

SEQ ID NO: 4077520 - RNA, 15 nt, Variola virus
acagauguaaauaua

SEQ ID NO: 4077521 - RNA, 13 nt, Variola virus
acagauuaauagu

SEQ ID NO: 4077522 - RNA, 13 nt, Variola virus
acagauuucggaa

SEQ ID NO: 4077523 - RNA, 14 nt, Variola virus
acagccucauauau

SEQ ID NO: 4077524 - RNA, 14 nt, Variola virus
acagcguaaaacac

SEQ ID NO: 4077525 - RNA, 16 nt, Variola virus
acagcuucuagaaguu

SEQ ID NO: 4077526 - RNA, 21 nt, Variola virus
acagucguucaacugucuuuc

SEQ ID NO: 4077527 - RNA, 23 nt, Variola virus
acagucuaucaucgacacaaaug

SEQ ID NO: 4077528 - RNA, 16 nt, Variola virus
acaguuacaaaugagu

SEQ ID NO: 4077529 - RNA, 13 nt, Variola virus
acaguuuaauaga

SEQ ID NO: 4077530 - RNA, 14 nt, Variola virus
acaguuuaucacau

SEQ ID NO: 4077531 - RNA, 15 nt, Variola virus
acaguuuuuuucuag

SEQ ID NO: 4077532 - RNA, 20 nt, Variola virus
acauaaaccgaucacuaauu

SEQ ID NO: 4077533 - RNA, 15 nt, Variola virus
acauaacuuguacag

SEQ ID NO: 4077534 - RNA, 19 nt, Variola virus
acauaagaugucuaugaau

SEQ ID NO: 4077535 - RNA, 12 nt, Variola virus
acauaauacaau

SEQ ID NO: 4077536 - RNA, 13 nt, Variola virus
acauaauaguuua

SEQ ID NO: 4077537 - RNA, 17 nt, Variola virus
acauaauuauucuauca

SEQ ID NO: 4077538 - RNA, 21 nt, Variola virus
acauaauuuucuauaacugaa

SEQ ID NO: 4077539 - RNA, 18 nt, Variola virus
acauacaaaaaaguggau

SEQ ID NO: 4077540 - RNA, 19 nt, Variola virus
acauacagcgaauggaaua

SEQ ID NO: 4077541 - RNA, 16 nt, Variola virus
acauacaucuaugaau

SEQ ID NO: 4077542 - RNA, 16 nt, Variola virus
acauacguauaaucug

SEQ ID NO: 4077543 - RNA, 12 nt, Variola virus
acauagaaauaa

SEQ ID NO: 4077544 - RNA, 23 nt, Variola virus
acauagagagcuucaucaauaga

SEQ ID NO: 4077545 - RNA, 20 nt, Variola virus
acauaguguuuuauauucca

SEQ ID NO: 4077546 - RNA, 18 nt, Variola virus
acauauagacaauaacua

SEQ ID NO: 4077547 - RNA, 17 nt, Variola virus
acauaucuaaaugaaua

SEQ ID NO: 4077548 - RNA, 18 nt, Variola virus
acauauggaucuuuaugu

SEQ ID NO: 4077549 - RNA, 15 nt, Variola virus
acauauuaaugaauu

SEQ ID NO: 4077550 - RNA, 14 nt, Variola virus
acauauuaaugcag

SEQ ID NO: 4077551 - RNA, 13 nt, Variola virus
acaucaucugaaa

SEQ ID NO: 4077552 - RNA, 14 nt, Variola virus
acaucaucugaaau

SEQ ID NO: 4077553 - RNA, 20 nt, Variola virus
acauccaaaauacaaaaugu

SEQ ID NO: 4077554 - RNA, 22 nt, Variola virus
acauccuacacggacucauuaa

SEQ ID NO: 4077555 - RNA, 23 nt, Variola virus
acaucgguacggguauucauuua

SEQ ID NO: 4077556 - RNA, 18 nt, Variola virus
acaucguaaucaaaagaa

SEQ ID NO: 4077557 - RNA, 17 nt, Variola virus
acaucuauauacuauau

SEQ ID NO: 4077558 - RNA, 21 nt, Variola virus
acaucuauauugcuacauaau

SEQ ID NO: 4077559 - RNA, 15 nt, Variola virus
acaucuuuccuacau

SEQ ID NO: 4077560 - RNA, 17 nt, Variola virus
acaugcaucuuauuaga

SEQ ID NO: 4077561 - RNA, 14 nt, Variola virus
acauggaggcacua

SEQ ID NO: 4077562 - RNA, 22 nt, Variola virus
acauggauuuaucauaucaugg

SEQ ID NO: 4077563 - RNA, 23 nt, Variola virus
acauguaucgacgguaaauggaa

SEQ ID NO: 4077564 - RNA, 14 nt, Variola virus
acauguauuaaaga

SEQ ID NO: 4077565 - RNA, 17 nt, Variola virus
acaugucucucucaaau

SEQ ID NO: 4077566 - RNA, 13 nt, Variola virus
acaugucuucaau

SEQ ID NO: 4077567 - RNA, 12 nt, Variola virus
acauuaaaugua

SEQ ID NO: 4077568 - RNA, 13 nt, Variola virus
acauuaaauguau

SEQ ID NO: 4077569 - RNA, 21 nt, Variola virus
acauuaacaucauacaucaau

SEQ ID NO: 4077570 - RNA, 21 nt, Variola virus
acauuaauuccuuuuuaaauu

SEQ ID NO: 4077571 - RNA, 15 nt, Variola virus
acauuaauugccaua

SEQ ID NO: 4077572 - RNA, 20 nt, Variola virus
acauuagaccguuuaauaga

SEQ ID NO: 4077573 - RNA, 20 nt, Variola virus
acauuagcgcauguacauau

SEQ ID NO: 4077574 - RNA, 22 nt, Variola virus
acauuauaucguuaucauuaau

SEQ ID NO: 4077575 - RNA, 23 nt, Variola virus
acauuauuuacaucuaauuuacu

SEQ ID NO: 4077576 - RNA, 20 nt, Variola virus
acauucaaccacucucgaua

SEQ ID NO: 4077577 - RNA, 18 nt, Variola virus
acauuguauuaugaugaa

SEQ ID NO: 4077578 - RNA, 19 nt, Variola virus
acauuguccaauccaggac

SEQ ID NO: 4077579 - RNA, 14 nt, Variola virus
acauuguuaauuga

SEQ ID NO: 4077580 - RNA, 16 nt, Variola virus
acauuucucaaaugaa

SEQ ID NO: 4077581 - RNA, 22 nt, Variola virus
acauuucuuauguuauuaauga

SEQ ID NO: 4077582 - RNA, 22 nt, Variola virus
acauuugggccauuauaccucu

SEQ ID NO: 4077583 - RNA, 18 nt, Variola virus
acauuuuggcaaauugau

SEQ ID NO: 4077584 - RNA, 21 nt, Variola virus
acauuuuuugacgaugaugau

SEQ ID NO: 4077585 - RNA, 14 nt, Variola virus
acauuuuuuguaaa

SEQ ID NO: 4077586 - RNA, 17 nt, Variola virus
accaaaaaggauaaaga

SEQ ID NO: 4077587 - RNA, 17 nt, Variola virus
accaaagacuuugaaau

SEQ ID NO: 4077588 - RNA, 16 nt, Variola virus
accaaagcaaccagaa

SEQ ID NO: 4077589 - RNA, 12 nt, Variola virus
accaaaucagau

SEQ ID NO: 4077590 - RNA, 17 nt, Variola virus
aucuucauuaucugaua

SEQ ID NO: 4077591 - RNA, 18 nt, Variola virus
aucuucguaccucaaacu

SEQ ID NO: 4077592 - RNA, 16 nt, Variola virus
aucuucgucuauuaca

SEQ ID NO: 4077593 - RNA, 16 nt, Variola virus
aucuugacugucuauc

SEQ ID NO: 4077594 - RNA, 18 nt, Variola virus
aucuugcaaguuaaauag

SEQ ID NO: 4077595 - RNA, 22 nt, Variola virus
aucuugcaaguuaaauagaaug

SEQ ID NO: 4077596 - RNA, 19 nt, Variola virus
aucuugucugcuuaauaca

SEQ ID NO: 4077597 - RNA, 15 nt, Variola virus
aucuuuaguaaacau

SEQ ID NO: 4077598 - RNA, 21 nt, Variola virus
aucuuuauacgagcuacgaau

SEQ ID NO: 4077599 - RNA, 15 nt, Variola virus
aucuuuguucuuaag

SEQ ID NO: 4077600 - RNA, 17 nt, Variola virus
augaaaaaaaacacuga

SEQ ID NO: 4077601 - RNA, 14 nt, Variola virus
augaaauauauuaa

SEQ ID NO: 4077602 - RNA, 15 nt, Variola virus
augaaauauauuaac

SEQ ID NO: 4077603 - RNA, 17 nt, Variola virus
augaacgagaugcagaa

SEQ ID NO: 4077604 - RNA, 14 nt, Variola virus
augaacuuuaucca

SEQ ID NO: 4077605 - RNA, 14 nt, Variola virus
augaagaaagaaaa

SEQ ID NO: 4077606 - RNA, 17 nt, Variola virus
augaagaguacacagaa

SEQ ID NO: 4077607 - RNA, 23 nt, Variola virus
augaagauccaagauuuguagaa

SEQ ID NO: 4077608 - RNA, 15 nt, Variola virus
augaauaucacauau

SEQ ID NO: 4077609 - RNA, 20 nt, Variola virus
augaauaucaggaaauguau

SEQ ID NO: 4077610 - RNA, 18 nt, Variola virus
augaauggauaccuguau

SEQ ID NO: 4077611 - RNA, 15 nt, Variola virus
augaauguuuucaau

SEQ ID NO: 4077612 - RNA, 19 nt, Variola virus
augaauuacuuuacauaua

SEQ ID NO: 4077613 - RNA, 17 nt, Variola virus
augaauuagagaauuac

SEQ ID NO: 4077614 - RNA, 13 nt, Variola virus
augaauugauucu

SEQ ID NO: 4077615 - RNA, 14 nt, Variola virus
augaauugcauaca

SEQ ID NO: 4077616 - RNA, 17 nt, Variola virus
augaccaguuugcaaua

SEQ ID NO: 4077617 - RNA, 19 nt, Variola virus
augacgcauauucuacucu

SEQ ID NO: 4077618 - RNA, 14 nt, Variola virus
augagauugaucau

SEQ ID NO: 4077619 - RNA, 14 nt, Variola virus
augagggaaaagau

SEQ ID NO: 4077620 - RNA, 15 nt, Variola virus
augagugaaggagac

SEQ ID NO: 4077621 - RNA, 15 nt, Variola virus
augauaaaaacaaua

SEQ ID NO: 4077622 - RNA, 13 nt, Variola virus
augauaacuagau

SEQ ID NO: 4077623 - RNA, 13 nt, Variola virus
augauaauaggaa

SEQ ID NO: 4077624 - RNA, 18 nt, Variola virus
augauaaugauaaugacg

SEQ ID NO: 4077625 - RNA, 22 nt, Variola virus
augauaauuuauacaaaguaua

SEQ ID NO: 4077626 - RNA, 13 nt, Variola virus
augauacgugcau

SEQ ID NO: 4077627 - RNA, 14 nt, Variola virus
augauauuguugau

SEQ ID NO: 4077628 - RNA, 17 nt, Variola virus
augaucaagaaggaaau

SEQ ID NO: 4077629 - RNA, 23 nt, Variola virus
augaucaagaaggaaaucaaauc

SEQ ID NO: 4077630 - RNA, 18 nt, Variola virus
augauccuauucuaaaug

SEQ ID NO: 4077631 - RNA, 19 nt, Variola virus
augaucgucuuuuguggaa

SEQ ID NO: 4077632 - RNA, 18 nt, Variola virus
augaucuauauguuuuau

SEQ ID NO: 4077633 - RNA, 14 nt, Variola virus
augaugaaauguau

SEQ ID NO: 4077634 - RNA, 16 nt, Variola virus
augaugucuauguaug

SEQ ID NO: 4077635 - RNA, 23 nt, Variola virus
augauucauuuuuuaaguauuug

SEQ ID NO: 4077636 - RNA, 23 nt, Variola virus
augauucuaucuacaucuucaau

SEQ ID NO: 4077637 - RNA, 22 nt, Variola virus
augauucuccggccacuauuau

SEQ ID NO: 4077638 - RNA, 17 nt, Variola virus
augcacguaaacauuau

SEQ ID NO: 4077639 - RNA, 20 nt, Variola virus
augcauuauccaaaauauua

SEQ ID NO: 4077640 - RNA, 22 nt, Variola virus
augccacgaauaaaaaauacuu

SEQ ID NO: 4077641 - RNA, 15 nt, Variola virus
augccugagaguaaa

SEQ ID NO: 4077642 - RNA, 21 nt, Variola virus
augcgacgaguuagaaagaua

SEQ ID NO: 4077643 - RNA, 15 nt, Variola virus
augcgauuggauaag

SEQ ID NO: 4077644 - RNA, 23 nt, Variola virus
augcggugccauucaugaaaaug

SEQ ID NO: 4077645 - RNA, 13 nt, Variola virus
auggaaaaacaaa

SEQ ID NO: 4077646 - RNA, 12 nt, Variola virus
auggaaauacuu

SEQ ID NO: 4077647 - RNA, 23 nt, Variola virus
auggaagguauuuccaucuaucu

SEQ ID NO: 4077648 - RNA, 21 nt, Variola virus
auggaauuaucaucaaaaaac

SEQ ID NO: 4077649 - RNA, 21 nt, Variola virus
auggacauuauuuuuuuaaac

SEQ ID NO: 4077650 - RNA, 15 nt, Variola virus
auggacuuaucuaca

SEQ ID NO: 4077651 - RNA, 16 nt, Variola virus
auggaguauaaucuuu

SEQ ID NO: 4077652 - RNA, 13 nt, Variola virus
auggaguauauau

SEQ ID NO: 4077653 - RNA, 21 nt, Variola virus
auggauaauccgucuauuuua

SEQ ID NO: 4077654 - RNA, 14 nt, Variola virus
auggauaauucucc

SEQ ID NO: 4077655 - RNA, 15 nt, Variola virus
auggaucuaguauua

SEQ ID NO: 4077656 - RNA, 13 nt, Variola virus
auggaucuggaaa

SEQ ID NO: 4077657 - RNA, 17 nt, Variola virus
auggaucugugauguau

SEQ ID NO: 4077658 - RNA, 18 nt, Variola virus
auggauugguaacauuau

SEQ ID NO: 4077659 - RNA, 24 nt, Variola virus
auggauuuggucauaauagaaugu

SEQ ID NO: 4077660 - RNA, 21 nt, Variola virus
augggaacggaacagaaacua

SEQ ID NO: 4077661 - RNA, 22 nt, Variola virus
augggugacauaauuacauaua

SEQ ID NO: 4077662 - RNA, 14 nt, Variola virus
augguaaaagaaau

SEQ ID NO: 4077663 - RNA, 18 nt, Variola virus
augguaaaauacaaaaua

SEQ ID NO: 4077664 - RNA, 15 nt, Variola virus
auggucagugcauaa

SEQ ID NO: 4077665 - RNA, 21 nt, Variola virus
auggucauguuuauuucuagc

SEQ ID NO: 4077666 - RNA, 11 nt, Variola virus
auggucucaca

SEQ ID NO: 4077667 - RNA, 16 nt, Variola virus
auggucucacaaaaaa

SEQ ID NO: 4077668 - RNA, 15 nt, Variola virus
augguucaaagacua

SEQ ID NO: 4077669 - RNA, 21 nt, Variola virus
augguuuucuaaauagaauuc

SEQ ID NO: 4077670 - RNA, 19 nt, Variola virus
augguuuuuauauguguuu

SEQ ID NO: 4077671 - RNA, 13 nt, Variola virus
auguaaaauaaua

SEQ ID NO: 4077672 - RNA, 12 nt, Variola virus
auguaaaaucau

SEQ ID NO: 4077673 - RNA, 16 nt, Variola virus
aaucacuauagaaaau

SEQ ID NO: 4077674 - RNA, 14 nt, Variola virus
aaucagaguuuuua

SEQ ID NO: 4077675 - RNA, 17 nt, Variola virus
aaucagaucugauaaua

SEQ ID NO: 4077676 - RNA, 20 nt, Variola virus
aaucaggacgaauaauucua

SEQ ID NO: 4077677 - RNA, 22 nt, Variola virus
aaucaggguuaucaaaguguuu

SEQ ID NO: 4077678 - RNA, 20 nt, Variola virus
aaucagucauaacaaaugua

SEQ ID NO: 4077679 - RNA, 22 nt, Variola virus
aaucaguuacaaaacguuuaua

SEQ ID NO: 4077680 - RNA, 20 nt, Variola virus
aaucaguugcuguugaagag

SEQ ID NO: 4077681 - RNA, 19 nt, Variola virus
aaucauaacaguaguuuaa

SEQ ID NO: 4077682 - RNA, 19 nt, Variola virus
aaucauauaaaaaaugauu

SEQ ID NO: 4077683 - RNA, 14 nt, Variola virus
aaucauauaugaua

SEQ ID NO: 4077684 - RNA, 15 nt, Variola virus
aaucauauuuagaaa

SEQ ID NO: 4077685 - RNA, 18 nt, Variola virus
aaucauccuaagaugaua

SEQ ID NO: 4077686 - RNA, 21 nt, Variola virus
aaucaugugauuaugaauauu

SEQ ID NO: 4077687 - RNA, 22 nt, Variola virus
aaucauuaaaaaaauuaacuga

SEQ ID NO: 4077688 - RNA, 20 nt, Variola virus
aaucauucucuucuaucuuu

SEQ ID NO: 4077689 - RNA, 12 nt, Variola virus
aaucauugauau

SEQ ID NO: 4077690 - RNA, 19 nt, Variola virus
aauccaaauaaaauggaua

SEQ ID NO: 4077691 - RNA, 20 nt, Variola virus
aauccagucuuuaaugaauu

SEQ ID NO: 4077692 - RNA, 15 nt, Variola virus
aauccauccuauccu

SEQ ID NO: 4077693 - RNA, 14 nt, Variola virus
aauccauugauaau

SEQ ID NO: 4077694 - RNA, 13 nt, Variola virus
aaucgauguguca

SEQ ID NO: 4077695 - RNA, 18 nt, Variola virus
aaucggguaauuauaaga

SEQ ID NO: 4077696 - RNA, 15 nt, Variola virus
aaucguauaaauacu

SEQ ID NO: 4077697 - RNA, 16 nt, Variola virus
aaucguauaaauacug

SEQ ID NO: 4077698 - RNA, 14 nt, Variola virus
aaucguuuaucuuu

SEQ ID NO: 4077699 - RNA, 17 nt, Variola virus
aaucguuuuugaaggau

SEQ ID NO: 4077700 - RNA, 13 nt, Variola virus
aaucuaacagaua

SEQ ID NO: 4077701 - RNA, 22 nt, Variola virus
aaucuaacauugauuuuaaaau

SEQ ID NO: 4077702 - RNA, 16 nt, Variola virus
aaucuaauacaaaauc

SEQ ID NO: 4077703 - RNA, 16 nt, Variola virus
aaucucaauuagaaua

SEQ ID NO: 4077704 - RNA, 15 nt, Variola virus
aaucucagaaagaua

SEQ ID NO: 4077705 - RNA, 17 nt, Variola virus
aaucucaucaucgaaga

SEQ ID NO: 4077706 - RNA, 19 nt, Variola virus
aaucucuaucgucacauau

SEQ ID NO: 4077707 - RNA, 13 nt, Variola virus
aaucucuauuugu

SEQ ID NO: 4077708 - RNA, 17 nt, Variola virus
aaucucuguuauuuccu

SEQ ID NO: 4077709 - RNA, 17 nt, Variola virus
aaucucuucuauuuuca

SEQ ID NO: 4077710 - RNA, 12 nt, Variola virus
aaucugaaaaua

SEQ ID NO: 4077711 - RNA, 18 nt, Variola virus
aaucugaaccaucaucug

SEQ ID NO: 4077712 - RNA, 19 nt, Variola virus
aaucugguggauacucuag

SEQ ID NO: 4077713 - RNA, 15 nt, Variola virus
aaucuguauaucuuu

SEQ ID NO: 4077714 - RNA, 14 nt, Variola virus
aaucuuaauaucuu

SEQ ID NO: 4077715 - RNA, 15 nt, Variola virus
aaucuuauaucuucu

SEQ ID NO: 4077716 - RNA, 18 nt, Variola virus
aaucuuuguuaaauauug

SEQ ID NO: 4077717 - RNA, 17 nt, Variola virus
aaucuuuuucaucuugu

SEQ ID NO: 4077718 - RNA, 20 nt, Variola virus
aaugaaguaguugcauagau

SEQ ID NO: 4077719 - RNA, 12 nt, Variola virus
aaugaauguuua

SEQ ID NO: 4077720 - RNA, 23 nt, Variola virus
aaugaauuaauuaaaauauuguu

SEQ ID NO: 4077721 - RNA, 22 nt, Variola virus
aaugacaucgaagauuguccaa

SEQ ID NO: 4077722 - RNA, 14 nt, Variola virus
aaugacauggaaau

SEQ ID NO: 4077723 - RNA, 16 nt, Variola virus
aaugacgaauugaaaa

SEQ ID NO: 4077724 - RNA, 18 nt, Variola virus
aaugacgaauugaaaauu

SEQ ID NO: 4077725 - RNA, 17 nt, Variola virus
aaugacggguuuucuau

SEQ ID NO: 4077726 - RNA, 20 nt, Variola virus
aaugacguuaauaacaaaaa

SEQ ID NO: 4077727 - RNA, 17 nt, Variola virus
aaugacuuagugauauc

SEQ ID NO: 4077728 - RNA, 16 nt, Variola virus
aaugagagcaaaauau

SEQ ID NO: 4077729 - RNA, 17 nt, Variola virus
aaugagagcaaaauaua

SEQ ID NO: 4077730 - RNA, 21 nt, Variola virus
aaugagagcauauuucauuuc

SEQ ID NO: 4077731 - RNA, 16 nt, Variola virus
aaugagcguuuaaagu

SEQ ID NO: 4077732 - RNA, 21 nt, Variola virus
aaugagguagcaaaaaaacug

SEQ ID NO: 4077733 - RNA, 20 nt, Variola virus
aaugaguauauguauuuucu

SEQ ID NO: 4077734 - RNA, 19 nt, Variola virus
aaugaguuauuaagaaaua

SEQ ID NO: 4077735 - RNA, 18 nt, Variola virus
aaugauaaaaucaaacuu

SEQ ID NO: 4077736 - RNA, 17 nt, Variola virus
aaugauacugauaaagu

SEQ ID NO: 4077737 - RNA, 19 nt, Variola virus
aaugauauacaaugcucag

SEQ ID NO: 4077738 - RNA, 16 nt, Variola virus
aaugaucuaaauuaua

SEQ ID NO: 4077739 - RNA, 18 nt, Variola virus
aaugaugauaaaauggau

SEQ ID NO: 4077740 - RNA, 12 nt, Variola virus
aaugaugauguu

SEQ ID NO: 4077741 - RNA, 13 nt, Variola virus
aaugaugcagaua

SEQ ID NO: 4077742 - RNA, 19 nt, Variola virus
aaugcauucguauucuaua

SEQ ID NO: 4077743 - RNA, 19 nt, Variola virus
aaugccuuccaaaguuuaa

SEQ ID NO: 4077744 - RNA, 16 nt, Variola virus
aaugcgaggaaaugua

SEQ ID NO: 4077745 - RNA, 18 nt, Variola virus
aaugcuaguuuuagaaua

SEQ ID NO: 4077746 - RNA, 15 nt, Variola virus
aaugcucugcaauaa

SEQ ID NO: 4077747 - RNA, 17 nt, Variola virus
aaugcuugaaaauggac

SEQ ID NO: 4077748 - RNA, 18 nt, Variola virus
aauggaagguauuuccau

SEQ ID NO: 4077749 - RNA, 13 nt, Variola virus
aauggaauccaau

SEQ ID NO: 4077750 - RNA, 13 nt, Variola virus
aauggcaaaugua

SEQ ID NO: 4077751 - RNA, 14 nt, Variola virus
aaugguacagaaaa

SEQ ID NO: 4077752 - RNA, 24 nt, Variola virus
aauguaaagagugaucaaaucauu

SEQ ID NO: 4077753 - RNA, 15 nt, Variola virus
aaugucccuuuaaga

SEQ ID NO: 4077754 - RNA, 20 nt, Variola virus
aaugucgcaauuuguauuau

SEQ ID NO: 4077755 - RNA, 19 nt, Variola virus
aaugucuauuauaaagaua

SEQ ID NO: 4077756 - RNA, 17 nt, Variola virus
aaugugaguauuuuacu

SEQ ID NO: 4077757 - RNA, 16 nt, Variola virus
aaugugauguaucuau

SEQ ID NO: 4077758 - RNA, 16 nt, Variola virus
aauguguuaaaaagaa

SEQ ID NO: 4077759 - RNA, 16 nt, Variola virus
aauguuagugaugaau

SEQ ID NO: 4077760 - RNA, 19 nt, Variola virus
aauguuauauguaacauua

SEQ ID NO: 4077761 - RNA, 17 nt, Variola virus
aauguugucaaaugauc

SEQ ID NO: 4077762 - RNA, 19 nt, Variola virus
aauguuugacugaauauau

SEQ ID NO: 4077763 - RNA, 21 nt, Variola virus
aauuaaaaccaaguacuacaa

SEQ ID NO: 4077764 - RNA, 17 nt, Variola virus
aauuaacgaugagugca

SEQ ID NO: 4077765 - RNA, 18 nt, Variola virus
aauuaauucguuggaaaa

SEQ ID NO: 4077766 - RNA, 16 nt, Variola virus
aauuacagacaguaau

SEQ ID NO: 4077767 - RNA, 16 nt, Variola virus
aauuacauagaugaua

SEQ ID NO: 4077768 - RNA, 16 nt, Variola virus
aauuacuaguaucaau

SEQ ID NO: 4077769 - RNA, 18 nt, Variola virus
aauuacugauaauguaga

SEQ ID NO: 4077770 - RNA, 21 nt, Variola virus
aauuacugauaauguagaaaa

SEQ ID NO: 4077771 - RNA, 13 nt, Variola virus
aauuagagaauua

SEQ ID NO: 4077772 - RNA, 19 nt, Variola virus
aauuagucauacguaauga

SEQ ID NO: 4077773 - RNA, 17 nt, Variola virus
aauuagucgguuaaugu

SEQ ID NO: 4077774 - RNA, 23 nt, Variola virus
aauuaguguauaauuuugucaua

SEQ ID NO: 4077775 - RNA, 21 nt, Variola virus
aauuauacuuugguaaauguu

SEQ ID NO: 4077776 - RNA, 17 nt, Variola virus
aauuauauaauucuauu

SEQ ID NO: 4077777 - RNA, 12 nt, Variola virus
aauuaugauacu

SEQ ID NO: 4077778 - RNA, 17 nt, Variola virus
aauuauucguuuacuga

SEQ ID NO: 4077779 - RNA, 15 nt, Variola virus
aauuauucuaucaau

SEQ ID NO: 4077780 - RNA, 22 nt, Variola virus
aauuauugauaccuuuaaaagu

SEQ ID NO: 4077781 - RNA, 15 nt, Variola virus
aauuauuucuaacau

SEQ ID NO: 4077782 - RNA, 18 nt, Variola virus
aauucauagccaauggau

SEQ ID NO: 4077783 - RNA, 19 nt, Variola virus
aauucccaaucuuguuaua

SEQ ID NO: 4077784 - RNA, 18 nt, Variola virus
aauuccguuaauauuaaa

SEQ ID NO: 4077785 - RNA, 19 nt, Variola virus
aauuccuuugcuauuucua

SEQ ID NO: 4077786 - RNA, 21 nt, Variola virus
aauucgaggaagauguaaaga

SEQ ID NO: 4077787 - RNA, 20 nt, Variola virus
aauucguuuuuauaugugac

SEQ ID NO: 4077788 - RNA, 13 nt, Variola virus
aauucuaaaugau

SEQ ID NO: 4077789 - RNA, 13 nt, Variola virus
aauucuaauggau

SEQ ID NO: 4077790 - RNA, 20 nt, Variola virus
aauucuacaacauuauuaua

SEQ ID NO: 4077791 - RNA, 21 nt, Variola virus
aauucuaccagucuaggaaua

SEQ ID NO: 4077792 - RNA, 17 nt, Variola virus
aauucuaggcucaguau

SEQ ID NO: 4077793 - RNA, 21 nt, Variola virus
aauucuauccaagauacuuau

SEQ ID NO: 4077794 - RNA, 23 nt, Variola virus
aauucucggauagucuucuuauc

SEQ ID NO: 4077795 - RNA, 15 nt, Variola virus
aauucuucaaaugaa

SEQ ID NO: 4077796 - RNA, 14 nt, Variola virus
aauucuuuaauauc

SEQ ID NO: 4077797 - RNA, 17 nt, Variola virus
aauucuuuauaacugaa

SEQ ID NO: 4077798 - RNA, 16 nt, Variola virus
aauugaaucuuaguaa

SEQ ID NO: 4077799 - RNA, 21 nt, Variola virus
acuaauucauuuucaauaaua

SEQ ID NO: 4077800 - RNA, 24 nt, Variola virus
acuaauucuuuuucauuaacuaga

SEQ ID NO: 4077801 - RNA, 17 nt, Variola virus
acuaauuguuuaaauaa

SEQ ID NO: 4077802 - RNA, 16 nt, Variola virus
acuacaguaaguacau

SEQ ID NO: 4077803 - RNA, 20 nt, Variola virus
acuacauuaaaacuuaaaaa

SEQ ID NO: 4077804 - RNA, 19 nt, Variola virus
acuaccaaccuacacuauu

SEQ ID NO: 4077805 - RNA, 22 nt, Variola virus
acuacuaggagggaaaaugaag

SEQ ID NO: 4077806 - RNA, 15 nt, Variola virus
acuacuauuauugaa

SEQ ID NO: 4077807 - RNA, 21 nt, Variola virus
acuacucuuccacuauugcca

SEQ ID NO: 4077808 - RNA, 18 nt, Variola virus
acuacuuacauggacaca

SEQ ID NO: 4077809 - RNA, 14 nt, Variola virus
acuacuucauuaau

SEQ ID NO: 4077810 - RNA, 19 nt, Variola virus
acuagaaagggaaaaauua

SEQ ID NO: 4077811 - RNA, 17 nt, Variola virus
acuagacauuuaccaug

SEQ ID NO: 4077812 - RNA, 15 nt, Variola virus
acuagcauauuugua

SEQ ID NO: 4077813 - RNA, 19 nt, Variola virus
acuagcucgagaaugaaua

SEQ ID NO: 4077814 - RNA, 16 nt, Variola virus
acuaggagaauuauuu

SEQ ID NO: 4077815 - RNA, 22 nt, Variola virus
acuauaaaaaaaauaauaauua

SEQ ID NO: 4077816 - RNA, 16 nt, Variola virus
acuauaccauauccuc

SEQ ID NO: 4077817 - RNA, 16 nt, Variola virus
acuauagaugcuauca

SEQ ID NO: 4077818 - RNA, 22 nt, Variola virus
acuauagucagcacucuuccau

SEQ ID NO: 4077819 - RNA, 13 nt, Variola virus
acuauaucaguau

SEQ ID NO: 4077820 - RNA, 17 nt, Variola virus
acuaucaaccacauaau

SEQ ID NO: 4077821 - RNA, 21 nt, Variola virus
acuaucaguaaguuuuauaga

SEQ ID NO: 4077822 - RNA, 15 nt, Variola virus
acuaucauaauuaaa

SEQ ID NO: 4077823 - RNA, 12 nt, Variola virus
acuauccaauaa

SEQ ID NO: 4077824 - RNA, 15 nt, Variola virus
acuauccaucagaau

SEQ ID NO: 4077825 - RNA, 15 nt, Variola virus
acuaucuuuaauaga

SEQ ID NO: 4077826 - RNA, 16 nt, Variola virus
acuauguuaauacuua

SEQ ID NO: 4077827 - RNA, 17 nt, Variola virus
acuauuacaauuaauaa

SEQ ID NO: 4077828 - RNA, 23 nt, Variola virus
acuauuacagaaguuuuaaaaga

SEQ ID NO: 4077829 - RNA, 14 nt, Variola virus
acuauucauguaau

SEQ ID NO: 4077830 - RNA, 18 nt, Variola virus
acuauuccaaaugaugau

SEQ ID NO: 4077831 - RNA, 15 nt, Variola virus
acuauuguacauuau

SEQ ID NO: 4077832 - RNA, 12 nt, Variola virus
acuauuugucua

SEQ ID NO: 4077833 - RNA, 19 nt, Variola virus
acuauuuugguaucuucca

SEQ ID NO: 4077834 - RNA, 12 nt, Variola virus
acucaaacagaa

SEQ ID NO: 4077835 - RNA, 16 nt, Variola virus
acucaaacuaaauguc

SEQ ID NO: 4077836 - RNA, 21 nt, Variola virus
acucaacauaaauaauucuag

SEQ ID NO: 4077837 - RNA, 15 nt, Variola virus
acucacaaucacugu

SEQ ID NO: 4077838 - RNA, 22 nt, Variola virus
acucagauaauagcaauauuag

SEQ ID NO: 4077839 - RNA, 16 nt, Variola virus
acucaugauuaaaccu

SEQ ID NO: 4077840 - RNA, 15 nt, Variola virus
acuccauauauguuu

SEQ ID NO: 4077841 - RNA, 14 nt, Variola virus
acucccacaaauac

SEQ ID NO: 4077842 - RNA, 16 nt, Variola virus
acuccggauagagaaa

SEQ ID NO: 4077843 - RNA, 18 nt, Variola virus
acuccggucgaugaugau

SEQ ID NO: 4077844 - RNA, 23 nt, Variola virus
acuccuuauuuuuagacauuaga

SEQ ID NO: 4077845 - RNA, 18 nt, Variola virus
acucgaacagauaguuua

SEQ ID NO: 4077846 - RNA, 15 nt, Variola virus
acucgcguuuagagg

SEQ ID NO: 4077847 - RNA, 13 nt, Variola virus
acucuaaguuugu

SEQ ID NO: 4077848 - RNA, 14 nt, Variola virus
acucucaaaaugcu

SEQ ID NO: 4077849 - RNA, 23 nt, Variola virus
acucucaagauuuuaaaaaacug

SEQ ID NO: 4077850 - RNA, 18 nt, Variola virus
acucucccuauaucuucu

SEQ ID NO: 4077851 - RNA, 15 nt, Variola virus
acucucgaaaucaca

SEQ ID NO: 4077852 - RNA, 13 nt, Variola virus
acucucgauaaau

SEQ ID NO: 4077853 - RNA, 15 nt, Variola virus
acucugaaaagaaag

SEQ ID NO: 4077854 - RNA, 20 nt, Variola virus
acucuguugguuuucuuaua

SEQ ID NO: 4077855 - RNA, 17 nt, Variola virus
acucuguuucuguaucu

SEQ ID NO: 4077856 - RNA, 19 nt, Variola virus
acucuguuuuauuaaccga

SEQ ID NO: 4077857 - RNA, 14 nt, Variola virus
acucuuauuauaga

SEQ ID NO: 4077858 - RNA, 12 nt, Variola virus
acucuucuuauu

SEQ ID NO: 4077859 - RNA, 16 nt, Variola virus
acucuuuuauuuucca

SEQ ID NO: 4077860 - RNA, 23 nt, Variola virus
acugaaaauuaaaauaacacuau

SEQ ID NO: 4077861 - RNA, 21 nt, Variola virus
acugaacgaugguuuucacau

SEQ ID NO: 4077862 - RNA, 14 nt, Variola virus
acugaagagacuga

SEQ ID NO: 4077863 - RNA, 23 nt, Variola virus
acugaauacauuaucaaaaagaa

SEQ ID NO: 4077864 - RNA, 18 nt, Variola virus
acugaaugcuuucuugga

SEQ ID NO: 4077865 - RNA, 20 nt, Variola virus
acugacuucuaacaaacauc

SEQ ID NO: 4077866 - RNA, 16 nt, Variola virus
acugagaaacagcaua

SEQ ID NO: 4077867 - RNA, 22 nt, Variola virus
acugauaaaguagauuaugaag

SEQ ID NO: 4077868 - RNA, 18 nt, Variola virus
acugauaauguagaaaau

SEQ ID NO: 4077869 - RNA, 15 nt, Variola virus
acugauaccaugaaa

SEQ ID NO: 4077870 - RNA, 13 nt, Variola virus
acugauucagaaa

SEQ ID NO: 4077871 - RNA, 17 nt, Variola virus
acugcaauaaaacauuu

SEQ ID NO: 4077872 - RNA, 21 nt, Variola virus
acugcuaccgaagagcagcua

SEQ ID NO: 4077873 - RNA, 20 nt, Variola virus
acuggucauagaaaaugauu

SEQ ID NO: 4077874 - RNA, 22 nt, Variola virus
acuggugaguuaauauucaugu

SEQ ID NO: 4077875 - RNA, 23 nt, Variola virus
acuguagaugguucuuuaauagu

SEQ ID NO: 4077876 - RNA, 12 nt, Variola virus
acuguauuugga

SEQ ID NO: 4077877 - RNA, 16 nt, Variola virus
acugucaaaaaaauag

SEQ ID NO: 4077878 - RNA, 18 nt, Variola virus
acuguguucaagucauaa

SEQ ID NO: 4077879 - RNA, 13 nt, Variola virus
acuguuuaauagc

SEQ ID NO: 4077880 - RNA, 20 nt, Variola virus
acuguuuucuagauggaaau

SEQ ID NO: 4077881 - RNA, 20 nt, Variola virus
acuuaaaacuugauaauuaa

SEQ ID NO: 4077882 - RNA, 18 nt, Variola virus
acuuaaacaaaauacaau

SEQ ID NO: 4077883 - RNA, 18 nt, Variola virus
acuuaacaugagacauaa

SEQ ID NO: 4077884 - RNA, 16 nt, Variola virus
acuuaacuaucuuuca

SEQ ID NO: 4077885 - RNA, 19 nt, Variola virus
acuuaauauaauauugaag

SEQ ID NO: 4077886 - RNA, 22 nt, Variola virus
acuuaaugaagauuuauuucca

SEQ ID NO: 4077887 - RNA, 22 nt, Variola virus
acuuacagauggauaaaacuuc

SEQ ID NO: 4077888 - RNA, 20 nt, Variola virus
acuuacauggacacauucuu

SEQ ID NO: 4077889 - RNA, 20 nt, Variola virus
acuuauggacaacagaggau

SEQ ID NO: 4077890 - RNA, 17 nt, Variola virus
acuuauuguuuuaauaa

SEQ ID NO: 4077891 - RNA, 15 nt, Variola virus
acuucauuaaucuuu

SEQ ID NO: 4077892 - RNA, 17 nt, Variola virus
acuucauugauaucuuu

SEQ ID NO: 4077893 - RNA, 17 nt, Variola virus
acuuccaauaaaauuac

SEQ ID NO: 4077894 - RNA, 19 nt, Variola virus
acuuccaauaaaauuacuu

SEQ ID NO: 4077895 - RNA, 19 nt, Variola virus
acuuccguuuaaaaauggu

SEQ ID NO: 4077896 - RNA, 16 nt, Variola virus
acuucgauaaaauuac

SEQ ID NO: 4077897 - RNA, 19 nt, Variola virus
acuugaaagagauaauaga

SEQ ID NO: 4077898 - RNA, 23 nt, Variola virus
acuugaaauaaucggagaauguu

SEQ ID NO: 4077899 - RNA, 15 nt, Variola virus
acuuggaaacaucuc

SEQ ID NO: 4077900 - RNA, 14 nt, Variola virus
acuuguauaauaag

SEQ ID NO: 4077901 - RNA, 19 nt, Variola virus
acuuuaaccuauacaugau

SEQ ID NO: 4077902 - RNA, 16 nt, Variola virus
acuuuaauaacaaaga

SEQ ID NO: 4077903 - RNA, 18 nt, Variola virus
acuuuauaauuaaugaaa

SEQ ID NO: 4077904 - RNA, 20 nt, Variola virus
acuuuauugccuguaauaau

SEQ ID NO: 4077905 - RNA, 16 nt, Variola virus
acuuucaucuaauaag

SEQ ID NO: 4077906 - RNA, 22 nt, Variola virus
acuuugcauucuaucucaaaau

SEQ ID NO: 4077907 - RNA, 16 nt, Variola virus
acuuuuguccuaaaau

SEQ ID NO: 4077908 - RNA, 15 nt, Variola virus
acuuuuguuacuaau

SEQ ID NO: 4077909 - RNA, 13 nt, Variola virus
acuuuuuacuaau

SEQ ID NO: 4077910 - RNA, 22 nt, Variola virus
acuuuuucuagaaaaaaaauug

SEQ ID NO: 4077911 - RNA, 14 nt, Variola virus
agaaaaaaauggaa

SEQ ID NO: 4077912 - RNA, 23 nt, Variola virus
agaaaaaugaugcugguuauuac

SEQ ID NO: 4077913 - RNA, 19 nt, Variola virus
agaaaaaugcuaauauuaa

SEQ ID NO: 4077914 - RNA, 19 nt, Variola virus
agaaaacaaagucuagauu

SEQ ID NO: 4077915 - RNA, 22 nt, Variola virus
agaaaagauuaagauuaaacau

SEQ ID NO: 4077916 - RNA, 23 nt, Variola virus
agaaaagguucuaucaacaauau

SEQ ID NO: 4077917 - RNA, 17 nt, Variola virus
agaaaaguccuagaauu

SEQ ID NO: 4077918 - RNA, 23 nt, Variola virus
agaaaauaucuucuccuguaaua

SEQ ID NO: 4077919 - RNA, 15 nt, Variola virus
agaaacagaacuauu

SEQ ID NO: 4077920 - RNA, 22 nt, Variola virus
agaaagauauauuaagaauaau

SEQ ID NO: 4077921 - RNA, 18 nt, Variola virus
agaaaguaucaaaucgau

SEQ ID NO: 4077922 - RNA, 12 nt, Variola virus
agaaauacuucc

SEQ ID NO: 4077923 - RNA, 18 nt, Variola virus
agaaauagcgcugaaaau

SEQ ID NO: 4077924 - RNA, 18 nt, Variola virus
caauaccaaagaaggaag

SEQ ID NO: 4077925 - RNA, 16 nt, Variola virus
caauagcacaauuguu

SEQ ID NO: 4077926 - RNA, 22 nt, Variola virus
caauagcaucgcaacuauucua

SEQ ID NO: 4077927 - RNA, 17 nt, Variola virus
caauagucuuguaaaga

SEQ ID NO: 4077928 - RNA, 18 nt, Variola virus
caauaugccaauaaugau

SEQ ID NO: 4077929 - RNA, 20 nt, Variola virus
caauaugucuguacaaaugu

SEQ ID NO: 4077930 - RNA, 21 nt, Variola virus
caauaugucuguacaaauguu

SEQ ID NO: 4077931 - RNA, 20 nt, Variola virus
caaucaacgaauuaaugaua

SEQ ID NO: 4077932 - RNA, 21 nt, Variola virus
caauccguaacggaaauuaca

SEQ ID NO: 4077933 - RNA, 18 nt, Variola virus
caaucuaagaaauuuaaa

SEQ ID NO: 4077934 - RNA, 14 nt, Variola virus
caaugaauggauua

SEQ ID NO: 4077935 - RNA, 17 nt, Variola virus
caaugcucaguaaaugu

SEQ ID NO: 4077936 - RNA, 18 nt, Variola virus
caaugcucaguaaaugua

SEQ ID NO: 4077937 - RNA, 21 nt, Variola virus
caauggaugaggaagugauau

SEQ ID NO: 4077938 - RNA, 20 nt, Variola virus
caaugggagauuaaacuacu

SEQ ID NO: 4077939 - RNA, 20 nt, Variola virus
caaugggaugcaaaacccca

SEQ ID NO: 4077940 - RNA, 15 nt, Variola virus
caaugggucguugga

SEQ ID NO: 4077941 - RNA, 21 nt, Variola virus
caauguagaaauuagaaagau

SEQ ID NO: 4077942 - RNA, 17 nt, Variola virus
caauguauacaaaugua

SEQ ID NO: 4077943 - RNA, 20 nt, Variola virus
caauuaacauucuuauaaca

SEQ ID NO: 4077944 - RNA, 21 nt, Variola virus
caauuaacauucuuauaacau

SEQ ID NO: 4077945 - RNA, 19 nt, Variola virus
caauuaauuaauacaguaa

SEQ ID NO: 4077946 - RNA, 14 nt, Variola virus
caauuacugucucc

SEQ ID NO: 4077947 - RNA, 15 nt, Variola virus
caauuagaacacgua

SEQ ID NO: 4077948 - RNA, 22 nt, Variola virus
caauuauacguuuuuauauaau

SEQ ID NO: 4077949 - RNA, 17 nt, Variola virus
caauucgguuaugaaug

SEQ ID NO: 4077950 - RNA, 18 nt, Variola virus
caauugauaguaaauaau

SEQ ID NO: 4077951 - RNA, 18 nt, Variola virus
caauuggaguaucaucua

SEQ ID NO: 4077952 - RNA, 13 nt, Variola virus
caauugucauuag

SEQ ID NO: 4077953 - RNA, 15 nt, Variola virus
caauugucuauacaa

SEQ ID NO: 4077954 - RNA, 21 nt, Variola virus
caauuuuucagauuuuugaau

SEQ ID NO: 4077955 - RNA, 22 nt, Variola virus
cacaaauggauguuaauguauu

SEQ ID NO: 4077956 - RNA, 17 nt, Variola virus
cacacugauauuaugau

SEQ ID NO: 4077957 - RNA, 18 nt, Variola virus
cacauccaucaauuguaa

SEQ ID NO: 4077958 - RNA, 14 nt, Variola virus
cacauuguaacuau

SEQ ID NO: 4077959 - RNA, 18 nt, Variola virus
cacauuuuaaauaaaugu

SEQ ID NO: 4077960 - RNA, 13 nt, Variola virus
caccaagaaagcu

SEQ ID NO: 4077961 - RNA, 17 nt, Variola virus
cacccguagaaauacua

SEQ ID NO: 4077962 - RNA, 12 nt, Variola virus
caccuaaaugug

SEQ ID NO: 4077963 - RNA, 18 nt, Variola virus
cacgaaaucuauagguaa

SEQ ID NO: 4077964 - RNA, 23 nt, Variola virus
cacgaagagaccgauacaugauu

SEQ ID NO: 4077965 - RNA, 18 nt, Variola virus
cacgguaauaaaauguca

SEQ ID NO: 4077966 - RNA, 12 nt, Variola virus
cacguuaaacaa

SEQ ID NO: 4077967 - RNA, 18 nt, Variola virus
cacuaaguauauacacag

SEQ ID NO: 4077968 - RNA, 20 nt, Variola virus
cacuagaagagaauacacau

SEQ ID NO: 4077969 - RNA, 20 nt, Variola virus
cacuauaucaguaucuucuu

SEQ ID NO: 4077970 - RNA, 16 nt, Variola virus
cacuauguuagcauuu

SEQ ID NO: 4077971 - RNA, 14 nt, Variola virus
cacuauuauaacaa

SEQ ID NO: 4077972 - RNA, 23 nt, Variola virus
cacucgacugaauauuagcacau

SEQ ID NO: 4077973 - RNA, 14 nt, Variola virus
cacugcugaacagu

SEQ ID NO: 4077974 - RNA, 19 nt, Variola virus
cacuuaacuaucuuucaag

SEQ ID NO: 4077975 - RNA, 14 nt, Variola virus
cacuucucuaucaa

SEQ ID NO: 4077976 - RNA, 14 nt, Variola virus
cagaaauaugugaa

SEQ ID NO: 4077977 - RNA, 21 nt, Variola virus
cagaaauugguauaaauguug

SEQ ID NO: 4077978 - RNA, 17 nt, Variola virus
cagaacaucuuccauag

SEQ ID NO: 4077979 - RNA, 18 nt, Variola virus
cagaaguuuuguauugua

SEQ ID NO: 4077980 - RNA, 18 nt, Variola virus
cagaauagauauuaaugu

SEQ ID NO: 4077981 - RNA, 21 nt, Variola virus
cagaauauacuuuguguuuca

SEQ ID NO: 4077982 - RNA, 14 nt, Variola virus
cagaauaucccaaa

SEQ ID NO: 4077983 - RNA, 12 nt, Variola virus
cagaauaucuau

SEQ ID NO: 4077984 - RNA, 14 nt, Variola virus
cagaaucuagauuc

SEQ ID NO: 4077985 - RNA, 15 nt, Variola virus
cagaauguacacuau

SEQ ID NO: 4077986 - RNA, 15 nt, Variola virus
cagacuacuuuccua

SEQ ID NO: 4077987 - RNA, 17 nt, Variola virus
cagagccaucuguaaaa

SEQ ID NO: 4077988 - RNA, 14 nt, Variola virus
cagaggaaauauca

SEQ ID NO: 4077989 - RNA, 16 nt, Variola virus
cagaggaugaaauaga

SEQ ID NO: 4077990 - RNA, 16 nt, Variola virus
cagauacaaauuuuaa

SEQ ID NO: 4077991 - RNA, 15 nt, Variola virus
cagaucaauggauua

SEQ ID NO: 4077992 - RNA, 20 nt, Variola virus
cagauccucccguuaaaacc

SEQ ID NO: 4077993 - RNA, 16 nt, Variola virus
cagaugucagcaucug

SEQ ID NO: 4077994 - RNA, 22 nt, Variola virus
cagauugaauaggaguuugaau

SEQ ID NO: 4077995 - RNA, 18 nt, Variola virus
cagauuuaacaauuucua

SEQ ID NO: 4077996 - RNA, 22 nt, Variola virus
cagauuuuugaaugaaugaaua

SEQ ID NO: 4077997 - RNA, 17 nt, Variola virus
cagcaucuugaauagaa

SEQ ID NO: 4077998 - RNA, 12 nt, Variola virus
cagcauuacuug

SEQ ID NO: 4077999 - RNA, 16 nt, Variola virus
caggagauagauaucc

SEQ ID NO: 4078000 - RNA, 17 nt, Variola virus
caggauaaggaauugua

SEQ ID NO: 4078001 - RNA, 16 nt, Variola virus
caggcugucggagcca

SEQ ID NO: 4078002 - RNA, 19 nt, Variola virus
caguaaccaaauacauauu

SEQ ID NO: 4078003 - RNA, 18 nt, Variola virus
caguagcgagaaagcauc

SEQ ID NO: 4078004 - RNA, 17 nt, Variola virus
caguccagaaauauuua

SEQ ID NO: 4078005 - RNA, 18 nt, Variola virus
cagucccaugguuccaua

SEQ ID NO: 4078006 - RNA, 15 nt, Variola virus
cagucggucaacuua

SEQ ID NO: 4078007 - RNA, 17 nt, Variola virus
cagucuaauauccauuu

SEQ ID NO: 4078008 - RNA, 16 nt, Variola virus
cagucuaguauacaua

SEQ ID NO: 4078009 - RNA, 11 nt, Variola virus
cagucuggaaa

SEQ ID NO: 4078010 - RNA, 20 nt, Variola virus
cagucuuuaaguucuggaau

SEQ ID NO: 4078011 - RNA, 19 nt, Variola virus
cagugauagacuagaagaa

SEQ ID NO: 4078012 - RNA, 15 nt, Variola virus
cagugcaucaacuuc

SEQ ID NO: 4078013 - RNA, 18 nt, Variola virus
caguggaguaguaaaugc

SEQ ID NO: 4078014 - RNA, 17 nt, Variola virus
caguguauguaaaaaug

SEQ ID NO: 4078015 - RNA, 16 nt, Variola virus
caguuagcuacucuag

SEQ ID NO: 4078016 - RNA, 19 nt, Variola virus
caguuuggggcuauucauc

SEQ ID NO: 4078017 - RNA, 18 nt, Variola virus
caguuuucucaucacuua

SEQ ID NO: 4078018 - RNA, 12 nt, Variola virus
cauaaaacauca

SEQ ID NO: 4078019 - RNA, 18 nt, Variola virus
cauaaaacuaauauuuua

SEQ ID NO: 4078020 - RNA, 12 nt, Variola virus
cauaaaaguugu

SEQ ID NO: 4078021 - RNA, 23 nt, Variola virus
cauaaacaauauuaaggagauuc

SEQ ID NO: 4078022 - RNA, 18 nt, Variola virus
cauaaaccgaucacuaau

SEQ ID NO: 4078023 - RNA, 20 nt, Variola virus
cauaaaggcgcccauuucaa

SEQ ID NO: 4078024 - RNA, 16 nt, Variola virus
cauaaauuauuucauu

SEQ ID NO: 4078025 - RNA, 20 nt, Variola virus
cauaaauuucuccaacgauu

SEQ ID NO: 4078026 - RNA, 16 nt, Variola virus
cauaacauguaucaau

SEQ ID NO: 4078027 - RNA, 16 nt, Variola virus
cauaacuguauaaaau

SEQ ID NO: 4078028 - RNA, 18 nt, Variola virus
cauaagcgcuauauaaau

SEQ ID NO: 4078029 - RNA, 16 nt, Variola virus
cauaauauaaaaacuu

SEQ ID NO: 4078030 - RNA, 16 nt, Variola virus
cauaauaugaucacau

SEQ ID NO: 4078031 - RNA, 15 nt, Variola virus
cauaauauuaaacac

SEQ ID NO: 4078032 - RNA, 23 nt, Variola virus
cauacaaaaauauauuauuuuua

SEQ ID NO: 4078033 - RNA, 14 nt, Variola virus
cauacaugauauuc

SEQ ID NO: 4078034 - RNA, 22 nt, Variola virus
cauaccgucccaaaacauggau

SEQ ID NO: 4078035 - RNA, 17 nt, Variola virus
cauacgacgaaaauggu

SEQ ID NO: 4078036 - RNA, 16 nt, Variola virus
cauacgcguucucaag

SEQ ID NO: 4078037 - RNA, 14 nt, Variola virus
cauacuacuauuau

SEQ ID NO: 4078038 - RNA, 21 nt, Variola virus
cauagaugagguacuauuuua

SEQ ID NO: 4078039 - RNA, 13 nt, Variola virus
cauaguuaaauaa

SEQ ID NO: 4078040 - RNA, 15 nt, Variola virus
cauaguuuuaagaaa

SEQ ID NO: 4078041 - RNA, 23 nt, Variola virus
cauauaacuaucaacugugaugu

SEQ ID NO: 4078042 - RNA, 17 nt, Variola virus
cauauacuauuacuuau

SEQ ID NO: 4078043 - RNA, 20 nt, Variola virus
cauauacugauaauaaugaa

SEQ ID NO: 4078044 - RNA, 23 nt, Variola virus
cauauccagacaacaaucguuug

SEQ ID NO: 4078045 - RNA, 21 nt, Variola virus
cauaucugcgacggagcauuu

SEQ ID NO: 4078046 - RNA, 18 nt, Variola virus
cauauguaguguuaauuu

SEQ ID NO: 4078047 - RNA, 14 nt, Variola virus
cauauucuacucuu

SEQ ID NO: 4078048 - RNA, 19 nt, Variola virus
cauauuuagaaaaaagauu

SEQ ID NO: 4078049 - RNA, 20 nt, Variola virus
cauauuugaacuuaacuuca

SEQ ID NO: 4078050 - RNA, 17 nt, Variola virus
cugacauucagaaagag

SEQ ID NO: 4078051 - RNA, 20 nt, Variola virus
cugagcaaacucucaaaaga

SEQ ID NO: 4078052 - RNA, 16 nt, Variola virus
cugaguuuuuaggaaa

SEQ ID NO: 4078053 - RNA, 17 nt, Variola virus
cugauaauauuaucuau

SEQ ID NO: 4078054 - RNA, 19 nt, Variola virus
cugauacccaaaaacaucc

SEQ ID NO: 4078055 - RNA, 14 nt, Variola virus
cugauauucagaaa

SEQ ID NO: 4078056 - RNA, 23 nt, Variola virus
cugauguaacccacguaacauua

SEQ ID NO: 4078057 - RNA, 14 nt, Variola virus
cugauuaacaaaug

SEQ ID NO: 4078058 - RNA, 19 nt, Variola virus
cugauuaacccaucaucua

SEQ ID NO: 4078059 - RNA, 14 nt, Variola virus
cugcacuaugucca

SEQ ID NO: 4078060 - RNA, 16 nt, Variola virus
cugcauagaaauaucu

SEQ ID NO: 4078061 - RNA, 13 nt, Variola virus
cugcauucaauuc

SEQ ID NO: 4078062 - RNA, 15 nt, Variola virus
cugccgaauuuagag

SEQ ID NO: 4078063 - RNA, 22 nt, Variola virus
cugccuuuuuauacauauucca

SEQ ID NO: 4078064 - RNA, 15 nt, Variola virus
cugcguuaaacauuc

SEQ ID NO: 4078065 - RNA, 17 nt, Variola virus
cugcuauaauuaagaua

SEQ ID NO: 4078066 - RNA, 23 nt, Variola virus
cugcuggaaaauaaaucacugac

SEQ ID NO: 4078067 - RNA, 16 nt, Variola virus
cuggaaaaauacuuuu

SEQ ID NO: 4078068 - RNA, 20 nt, Variola virus
cuggaacauuaaauguauuu

SEQ ID NO: 4078069 - RNA, 20 nt, Variola virus
cuggaauagaaucuauuuua

SEQ ID NO: 4078070 - RNA, 15 nt, Variola virus
cuggaggaguaagaa

SEQ ID NO: 4078071 - RNA, 23 nt, Variola virus
cuggauuauuuuuauuauauuca

SEQ ID NO: 4078072 - RNA, 17 nt, Variola virus
cuggucuaaaauuucca

SEQ ID NO: 4078073 - RNA, 18 nt, Variola virus
cuguaaauguaguauuua

SEQ ID NO: 4078074 - RNA, 20 nt, Variola virus
cuguaagcguugucuguauu

SEQ ID NO: 4078075 - RNA, 21 nt, Variola virus
cuguacacaugguguuacaaa

SEQ ID NO: 4078076 - RNA, 14 nt, Variola virus
cuguagauaguuuu

SEQ ID NO: 4078077 - RNA, 21 nt, Variola virus
cuguauugaugguaucuguua

SEQ ID NO: 4078078 - RNA, 18 nt, Variola virus
cuguauuggauguaugca

SEQ ID NO: 4078079 - RNA, 14 nt, Variola virus
cuguauuguuaaua

SEQ ID NO: 4078080 - RNA, 19 nt, Variola virus
cugucugcagccauuuuua

SEQ ID NO: 4078081 - RNA, 22 nt, Variola virus
cugugagaacuuguuaaagaag

SEQ ID NO: 4078082 - RNA, 11 nt, Variola virus
cuguggaauaa

SEQ ID NO: 4078083 - RNA, 13 nt, Variola virus
cuguguuacauaa

SEQ ID NO: 4078084 - RNA, 22 nt, Variola virus
cuguucaaaaauuuagaaugau

SEQ ID NO: 4078085 - RNA, 14 nt, Variola virus
cuguucaucguuua

SEQ ID NO: 4078086 - RNA, 12 nt, Variola virus
cuguuccaucaa

SEQ ID NO: 4078087 - RNA, 23 nt, Variola virus
cuguugccaaugauguuaggaaa

SEQ ID NO: 4078088 - RNA, 13 nt, Variola virus
cuguuuauacaag

SEQ ID NO: 4078089 - RNA, 20 nt, Variola virus
cuguuuaucuauacuauuaa

SEQ ID NO: 4078090 - RNA, 15 nt, Variola virus
cuguuucuacuaacu

SEQ ID NO: 4078091 - RNA, 16 nt, Variola virus
cuuaaacuuauucuua

SEQ ID NO: 4078092 - RNA, 14 nt, Variola virus
cuuaaauguuuucu

SEQ ID NO: 4078093 - RNA, 19 nt, Variola virus
cuuaacaauuccacaaauu

SEQ ID NO: 4078094 - RNA, 23 nt, Variola virus
cuuaacgaaagaaguuguaucau

SEQ ID NO: 4078095 - RNA, 14 nt, Variola virus
cuuaacuauuuccg

SEQ ID NO: 4078096 - RNA, 13 nt, Variola virus
cuuaacuuuuucu

SEQ ID NO: 4078097 - RNA, 20 nt, Variola virus
cuuaagacaaguuuaacaau

SEQ ID NO: 4078098 - RNA, 20 nt, Variola virus
cuuaaucauauucuuaugaa

SEQ ID NO: 4078099 - RNA, 23 nt, Variola virus
cuuaauccuucuagaauuagaau

SEQ ID NO: 4078100 - RNA, 17 nt, Variola virus
cuuaauucuagcaucuu

SEQ ID NO: 4078101 - RNA, 12 nt, Variola virus
cuuacaauaaac

SEQ ID NO: 4078102 - RNA, 14 nt, Variola virus
cuuacauaaaugaa

SEQ ID NO: 4078103 - RNA, 17 nt, Variola virus
cuuacguguuuaauuuu

SEQ ID NO: 4078104 - RNA, 16 nt, Variola virus
cuuagauaaaaaauua

SEQ ID NO: 4078105 - RNA, 15 nt, Variola virus
cuuaguaaacagucc

SEQ ID NO: 4078106 - RNA, 16 nt, Variola virus
cuuaguguaaaacuau

SEQ ID NO: 4078107 - RNA, 19 nt, Variola virus
cuuauaauuaauguccaag

SEQ ID NO: 4078108 - RNA, 13 nt, Variola virus
cuuauuaacauuu

SEQ ID NO: 4078109 - RNA, 16 nt, Variola virus
cuuauuacuccauuau

SEQ ID NO: 4078110 - RNA, 18 nt, Variola virus
cuuauuccauuaucugaa

SEQ ID NO: 4078111 - RNA, 23 nt, Variola virus
cuucagaauauucuuuucuaaga

SEQ ID NO: 4078112 - RNA, 22 nt, Variola virus
cuucauaggauuaacaacaaug

SEQ ID NO: 4078113 - RNA, 16 nt, Variola virus
cuucaucacuucacua

SEQ ID NO: 4078114 - RNA, 20 nt, Variola virus
cuuccaaauaauauucucuu

SEQ ID NO: 4078115 - RNA, 22 nt, Variola virus
cuuccaaauaauauucucuuug

SEQ ID NO: 4078116 - RNA, 11 nt, Variola virus
cuuccacauua

SEQ ID NO: 4078117 - RNA, 20 nt, Variola virus
cuuccuaggauagcuuuagu

SEQ ID NO: 4078118 - RNA, 21 nt, Variola virus
cuucgauagauauucuucaga

SEQ ID NO: 4078119 - RNA, 20 nt, Variola virus
cuucuaaugauauauuuucc

SEQ ID NO: 4078120 - RNA, 14 nt, Variola virus
cuucuacauuuuca

SEQ ID NO: 4078121 - RNA, 13 nt, Variola virus
cuucuagauaucc

SEQ ID NO: 4078122 - RNA, 12 nt, Variola virus
cuucuaucuuua

SEQ ID NO: 4078123 - RNA, 11 nt, Variola virus
cuucuauuuua

SEQ ID NO: 4078124 - RNA, 20 nt, Variola virus
cuucuauuuuaucauuuucc

SEQ ID NO: 4078125 - RNA, 14 nt, Variola virus
cuucuuauuuagau

SEQ ID NO: 4078126 - RNA, 15 nt, Variola virus
cuucuuguauuuccu

SEQ ID NO: 4078127 - RNA, 13 nt, Variola virus
cuugaaauucucc

SEQ ID NO: 4078128 - RNA, 15 nt, Variola virus
cuugaauucuuuuau

SEQ ID NO: 4078129 - RNA, 14 nt, Variola virus
cuugacaaaaauua

SEQ ID NO: 4078130 - RNA, 20 nt, Variola virus
cuugagacuugauagauauu

SEQ ID NO: 4078131 - RNA, 22 nt, Variola virus
cuugaggagaucuaaacgaucu

SEQ ID NO: 4078132 - RNA, 14 nt, Variola virus
cuugauaaauugua

SEQ ID NO: 4078133 - RNA, 21 nt, Variola virus
cuugauucuaguaucuuuugu

SEQ ID NO: 4078134 - RNA, 12 nt, Variola virus
cuugcuauuuuu

SEQ ID NO: 4078135 - RNA, 18 nt, Variola virus
cuuguaagaaguaaaugc

SEQ ID NO: 4078136 - RNA, 18 nt, Variola virus
cuuguagacgaacauaau

SEQ ID NO: 4078137 - RNA, 19 nt, Variola virus
cuugucauguugauacauc

SEQ ID NO: 4078138 - RNA, 16 nt, Variola virus
cuuuaacagaugaucu

SEQ ID NO: 4078139 - RNA, 22 nt, Variola virus
cuuuaacgcccuuguauguuuu

SEQ ID NO: 4078140 - RNA, 17 nt, Variola virus
cuuuaaguauauacgau

SEQ ID NO: 4078141 - RNA, 19 nt, Variola virus
cuuuaauaacaaagaaaga

SEQ ID NO: 4078142 - RNA, 14 nt, Variola virus
cuuuaauagauaua

SEQ ID NO: 4078143 - RNA, 17 nt, Variola virus
cuuuagaaauuguauuc

SEQ ID NO: 4078144 - RNA, 20 nt, Variola virus
cuuuaguaaaguugucuaua

SEQ ID NO: 4078145 - RNA, 20 nt, Variola virus
cuuuauaucguguucauuaa

SEQ ID NO: 4078146 - RNA, 13 nt, Variola virus
cuuuaucaagcac

SEQ ID NO: 4078147 - RNA, 19 nt, Variola virus
cuuuaucuaguuguuuaug

SEQ ID NO: 4078148 - RNA, 21 nt, Variola virus
cuuuaucucuuaguaaguuua

SEQ ID NO: 4078149 - RNA, 22 nt, Variola virus
cuuucaaugcacgggcacugau

SEQ ID NO: 4078150 - RNA, 16 nt, Variola virus
cuuucucaacauuuca

SEQ ID NO: 4078151 - RNA, 16 nt, Variola virus
cuuugaauccauuuuc

SEQ ID NO: 4078152 - RNA, 14 nt, Variola virus
cuuugauaaaaguu

SEQ ID NO: 4078153 - RNA, 23 nt, Variola virus
cuuuuaaauacaaauauaucaau

SEQ ID NO: 4078154 - RNA, 23 nt, Variola virus
cuuuuagagguucccaauuccaa

SEQ ID NO: 4078155 - RNA, 20 nt, Variola virus
cuuuuaguaacguaugugaa

SEQ ID NO: 4078156 - RNA, 15 nt, Variola virus
cuuuuauaauucaua

SEQ ID NO: 4078157 - RNA, 19 nt, Variola virus
cuuuuaucgcguagauaua

SEQ ID NO: 4078158 - RNA, 12 nt, Variola virus
cuuuuauuucca

SEQ ID NO: 4078159 - RNA, 21 nt, Variola virus
cuuuucuauaaucauuuuuag

SEQ ID NO: 4078160 - RNA, 16 nt, Variola virus
cuuuuguauucauaga

SEQ ID NO: 4078161 - RNA, 19 nt, Variola virus
cuuuuguccuaaaauacua

SEQ ID NO: 4078162 - RNA, 17 nt, Variola virus
cuuuuuauccuuuagau

SEQ ID NO: 4078163 - RNA, 14 nt, Variola virus
cuuuuuccaauucu

SEQ ID NO: 4078164 - RNA, 22 nt, Variola virus
gaaaaaaaauugaauugaugau

SEQ ID NO: 4078165 - RNA, 22 nt, Variola virus
gaaaaaaauugguguaaaagau

SEQ ID NO: 4078166 - RNA, 16 nt, Variola virus
gaaaaaacauguggua

SEQ ID NO: 4078167 - RNA, 13 nt, Variola virus
gaaaaaauaucua

SEQ ID NO: 4078168 - RNA, 22 nt, Variola virus
gaaaaacacauaacugaagaaa

SEQ ID NO: 4078169 - RNA, 15 nt, Variola virus
gaaaaaguaaaugau

SEQ ID NO: 4078170 - RNA, 16 nt, Variola virus
gaaaaauuuguagauu

SEQ ID NO: 4078171 - RNA, 13 nt, Variola virus
gaaaacauaucua

SEQ ID NO: 4078172 - RNA, 16 nt, Variola virus
gaaaaccgauaacgau

SEQ ID NO: 4078173 - RNA, 18 nt, Variola virus
gaaaacuagauacaaaau

SEQ ID NO: 4078174 - RNA, 16 nt, Variola virus
gaaaagauauccagag

SEQ ID NO: 4078175 - RNA, 16 nt, Variola virus
gaaaagaugaaaugau

SEQ ID NO: 4078176 - RNA, 16 nt, Variola virus
uccaacuccuuuucga

SEQ ID NO: 4078177 - RNA, 15 nt, Variola virus
uccaaucuuaaacau

SEQ ID NO: 4078178 - RNA, 13 nt, Variola virus
uccacauccauga

SEQ ID NO: 4078179 - RNA, 13 nt, Variola virus
uccacuuaaauau

SEQ ID NO: 4078180 - RNA, 16 nt, Variola virus
uccaggauucuccuaa

SEQ ID NO: 4078181 - RNA, 20 nt, Variola virus
uccauaauacucccacaaau

SEQ ID NO: 4078182 - RNA, 17 nt, Variola virus
uccauaauuuucucucg

SEQ ID NO: 4078183 - RNA, 13 nt, Variola virus
uccauagauuucc

SEQ ID NO: 4078184 - RNA, 21 nt, Variola virus
uccauagugguacaauacuac

SEQ ID NO: 4078185 - RNA, 16 nt, Variola virus
uccaucaaaaaugucg

SEQ ID NO: 4078186 - RNA, 18 nt, Variola virus
uccaucagaauguuuccc

SEQ ID NO: 4078187 - RNA, 21 nt, Variola virus
uccaucauuguccuauuucaa

SEQ ID NO: 4078188 - RNA, 18 nt, Variola virus
uccaugauacaacucugc

SEQ ID NO: 4078189 - RNA, 23 nt, Variola virus
uccauuagccuuuccacuucugc

SEQ ID NO: 4078190 - RNA, 22 nt, Variola virus
uccauucucucaaucacuacau

SEQ ID NO: 4078191 - RNA, 19 nt, Variola virus
uccauuggaaaaacacagu

SEQ ID NO: 4078192 - RNA, 14 nt, Variola virus
uccauuuuacauua

SEQ ID NO: 4078193 - RNA, 14 nt, Variola virus
uccauuuucuguaa

SEQ ID NO: 4078194 - RNA, 14 nt, Variola virus
ucccaaugaaucaa

SEQ ID NO: 4078195 - RNA, 13 nt, Variola virus
ucccaauguuucg

SEQ ID NO: 4078196 - RNA, 14 nt, Variola virus
ucccaauuccaaag

SEQ ID NO: 4078197 - RNA, 17 nt, Variola virus
ucccccuuaucaguaga

SEQ ID NO: 4078198 - RNA, 20 nt, Variola virus
ucccuauuaaaauucuuaaa

SEQ ID NO: 4078199 - RNA, 12 nt, Variola virus
ucccuuuccaaa

SEQ ID NO: 4078200 - RNA, 20 nt, Variola virus
uccgagauaauuucuccaga

SEQ ID NO: 4078201 - RNA, 18 nt, Variola virus
uccgaggauaguaaaaua

SEQ ID NO: 4078202 - RNA, 16 nt, Variola virus
uccgauauucaauuuu

SEQ ID NO: 4078203 - RNA, 22 nt, Variola virus
uccgcauacgcauuacaguuuu

SEQ ID NO: 4078204 - RNA, 23 nt, Variola virus
uccggcauuauagauguguauac

SEQ ID NO: 4078205 - RNA, 20 nt, Variola virus
uccggugcgcagucuaaaag

SEQ ID NO: 4078206 - RNA, 17 nt, Variola virus
uccguauuauacuugua

SEQ ID NO: 4078207 - RNA, 14 nt, Variola virus
uccguauuccaaac

SEQ ID NO: 4078208 - RNA, 13 nt, Variola virus
uccguuuguacau

SEQ ID NO: 4078209 - RNA, 22 nt, Variola virus
uccuaaaauacuauuauaucuu

SEQ ID NO: 4078210 - RNA, 18 nt, Variola virus
uccuaaacuuuguaucug

SEQ ID NO: 4078211 - RNA, 21 nt, Variola virus
uccuauauauuugaaaaucgu

SEQ ID NO: 4078212 - RNA, 21 nt, Variola virus
uccuaucuauuauugaugcaa

SEQ ID NO: 4078213 - RNA, 18 nt, Variola virus
uccuauucccaacaaugu

SEQ ID NO: 4078214 - RNA, 24 nt, Variola virus
uccucagauuuauacauauucuaa

SEQ ID NO: 4078215 - RNA, 13 nt, Variola virus
uccuguaauaucu

SEQ ID NO: 4078216 - RNA, 19 nt, Variola virus
uccuuaaauguuuucucug

SEQ ID NO: 4078217 - RNA, 21 nt, Variola virus
uccuuccaagaagaagacuua

SEQ ID NO: 4078218 - RNA, 17 nt, Variola virus
uccuugguuuacaugga

SEQ ID NO: 4078219 - RNA, 16 nt, Variola virus
uccuuuaccaccaaau

SEQ ID NO: 4078220 - RNA, 16 nt, Variola virus
uccuuugauuaucauc

SEQ ID NO: 4078221 - RNA, 20 nt, Variola virus
ucgaaaaacuuuaauguaga

SEQ ID NO: 4078222 - RNA, 20 nt, Variola virus
ucgaaaauugcuauuucaga

SEQ ID NO: 4078223 - RNA, 14 nt, Variola virus
ucgaauaauguaua

SEQ ID NO: 4078224 - RNA, 15 nt, Variola virus
ucgaaugucauauac

SEQ ID NO: 4078225 - RNA, 17 nt, Variola virus
ucgaauuucuacaaaag

SEQ ID NO: 4078226 - RNA, 16 nt, Variola virus
ucgacauauguaugua

SEQ ID NO: 4078227 - RNA, 18 nt, Variola virus
ucgacguugcucaaaguc

SEQ ID NO: 4078228 - RNA, 21 nt, Variola virus
ucgacuaucaacaauuuugua

SEQ ID NO: 4078229 - RNA, 18 nt, Variola virus
ucgagaacagauuugaua

SEQ ID NO: 4078230 - RNA, 23 nt, Variola virus
ucgagaugggcccguucucugaa

SEQ ID NO: 4078231 - RNA, 15 nt, Variola virus
ucgaguacgccauau

SEQ ID NO: 4078232 - RNA, 13 nt, Variola virus
ucgauaauuauua

SEQ ID NO: 4078233 - RNA, 17 nt, Variola virus
ucgauacaucaacucuc

SEQ ID NO: 4078234 - RNA, 16 nt, Variola virus
ucgauaccuagaagau

SEQ ID NO: 4078235 - RNA, 14 nt, Variola virus
ucgauccaauaaau

SEQ ID NO: 4078236 - RNA, 14 nt, Variola virus
ucgauggucucaca

SEQ ID NO: 4078237 - RNA, 19 nt, Variola virus
ucgauuacuauggauaucu

SEQ ID NO: 4078238 - RNA, 19 nt, Variola virus
ucgcauuaauacuguuuuc

SEQ ID NO: 4078239 - RNA, 16 nt, Variola virus
ucgcuauauccaccaa

SEQ ID NO: 4078240 - RNA, 18 nt, Variola virus
ucgcuccaaauauacauu

SEQ ID NO: 4078241 - RNA, 20 nt, Variola virus
ucgcugaucgucuagaugau

SEQ ID NO: 4078242 - RNA, 17 nt, Variola virus
ucggauaauauguaaaa

SEQ ID NO: 4078243 - RNA, 13 nt, Variola virus
ucggaucuaaaau

SEQ ID NO: 4078244 - RNA, 13 nt, Variola virus
ucggguacaaaag

SEQ ID NO: 4078245 - RNA, 13 nt, Variola virus
ucggguuccaaac

SEQ ID NO: 4078246 - RNA, 17 nt, Variola virus
ucguaaaaagauucuug

SEQ ID NO: 4078247 - RNA, 19 nt, Variola virus
ucguacauaacuuguacag

SEQ ID NO: 4078248 - RNA, 12 nt, Variola virus
ucguagaaagua

SEQ ID NO: 4078249 - RNA, 15 nt, Variola virus
ucguaugauuucagu

SEQ ID NO: 4078250 - RNA, 21 nt, Variola virus
ucguaugucauaaauucuuua

SEQ ID NO: 4078251 - RNA, 22 nt, Variola virus
ucguauuccugacgucuagagu

SEQ ID NO: 4078252 - RNA, 14 nt, Variola virus
ucguccuuaaccaa

SEQ ID NO: 4078253 - RNA, 13 nt, Variola virus
ucgucuacaucau

SEQ ID NO: 4078254 - RNA, 20 nt, Variola virus
ucguggauaaucauucuuaa

SEQ ID NO: 4078255 - RNA, 18 nt, Variola virus
ucguguauaacaucuuug

SEQ ID NO: 4078256 - RNA, 12 nt, Variola virus
ucguuaaauuuu

SEQ ID NO: 4078257 - RNA, 14 nt, Variola virus
ucguuauuaucauc

SEQ ID NO: 4078258 - RNA, 15 nt, Variola virus
ucguucaacugucuu

SEQ ID NO: 4078259 - RNA, 23 nt, Variola virus
ucguuccaagucauaucuagaau

SEQ ID NO: 4078260 - RNA, 15 nt, Variola virus
ucguugguagauauu

SEQ ID NO: 4078261 - RNA, 16 nt, Variola virus
ucguuuaauauuacau

SEQ ID NO: 4078262 - RNA, 23 nt, Variola virus
ucuaaaacagcugugaauacagc

SEQ ID NO: 4078263 - RNA, 23 nt, Variola virus
ucuaaauaauaucuauuguuugg

SEQ ID NO: 4078264 - RNA, 13 nt, Variola virus
ucuaaauguauua

SEQ ID NO: 4078265 - RNA, 12 nt, Variola virus
ucuaaauuauuc

SEQ ID NO: 4078266 - RNA, 15 nt, Variola virus
ucuaacgguaguguu

SEQ ID NO: 4078267 - RNA, 21 nt, Variola virus
ucuaagacgucucauuucuau

SEQ ID NO: 4078268 - RNA, 16 nt, Variola virus
ucuaauacuuuaacau

SEQ ID NO: 4078269 - RNA, 17 nt, Variola virus
ucuaaucacuuuaacuu

SEQ ID NO: 4078270 - RNA, 19 nt, Variola virus
ucuaaugugauucucugaa

SEQ ID NO: 4078271 - RNA, 19 nt, Variola virus
ucuaauugaccgucucuaa

SEQ ID NO: 4078272 - RNA, 13 nt, Variola virus
ucuacaauuauug

SEQ ID NO: 4078273 - RNA, 19 nt, Variola virus
ucuacagauauuuuaguuu

SEQ ID NO: 4078274 - RNA, 14 nt, Variola virus
ucuaccauuucauu

SEQ ID NO: 4078275 - RNA, 17 nt, Variola virus
ucuaccuauuucaucag

SEQ ID NO: 4078276 - RNA, 22 nt, Variola virus
ucuacuaagcccaaaaccaaac

SEQ ID NO: 4078277 - RNA, 20 nt, Variola virus
ucuacuacacuucuagauau

SEQ ID NO: 4078278 - RNA, 19 nt, Variola virus
ucuacuuacuggaaaauag

SEQ ID NO: 4078279 - RNA, 15 nt, Variola virus
ucuagauaaaaucac

SEQ ID NO: 4078280 - RNA, 14 nt, Variola virus
ucuagauauccaga

SEQ ID NO: 4078281 - RNA, 18 nt, Variola virus
ucuagccauaucuaaagc

SEQ ID NO: 4078282 - RNA, 20 nt, Variola virus
ucuaggagcaccagaaguau

SEQ ID NO: 4078283 - RNA, 21 nt, Variola virus
ucuagugcuuguauguguuau

SEQ ID NO: 4078284 - RNA, 18 nt, Variola virus
ucuaguuaucauguagua

SEQ ID NO: 4078285 - RNA, 14 nt, Variola virus
ucuaguucugaacg

SEQ ID NO: 4078286 - RNA, 14 nt, Variola virus
ucuauaaaauacua

SEQ ID NO: 4078287 - RNA, 21 nt, Variola virus
ucuauaaacgaugguuuaauu

SEQ ID NO: 4078288 - RNA, 17 nt, Variola virus
ucuauaaauaaaagaca

SEQ ID NO: 4078289 - RNA, 13 nt, Variola virus
ucuauaacaaaug

SEQ ID NO: 4078290 - RNA, 15 nt, Variola virus
ucuauaagguuucuu

SEQ ID NO: 4078291 - RNA, 17 nt, Variola virus
ucuauaauaauguagua

SEQ ID NO: 4078292 - RNA, 17 nt, Variola virus
ucuauaauaucagaauu

SEQ ID NO: 4078293 - RNA, 18 nt, Variola virus
ucuauacagcgaauaaau

SEQ ID NO: 4078294 - RNA, 22 nt, Variola virus
ucuauacgucuuuauuuucuau

SEQ ID NO: 4078295 - RNA, 16 nt, Variola virus
ucuauauaauuauuuu

SEQ ID NO: 4078296 - RNA, 15 nt, Variola virus
ucuauaucauguaga

SEQ ID NO: 4078297 - RNA, 18 nt, Variola virus
ucuauaucuauaucuaca

SEQ ID NO: 4078298 - RNA, 15 nt, Variola virus
ucuauaucuucuuuu

SEQ ID NO: 4078299 - RNA, 18 nt, Variola virus
ucuaucauggcaauaaua

SEQ ID NO: 4078300 - RNA, 14 nt, Variola virus
ucuaucauguagua

SEQ ID NO: 4078301 - RNA, 23 nt, Variola virus
ucuauccuuuuccggaagcaaug

SEQ ID NO: 4078302 - RNA, 20 nt, Variola virus
agaugaggauaguaaaauaa

SEQ ID NO: 4078303 - RNA, 16 nt, Variola virus
agaugaucaaaaagac

SEQ ID NO: 4078304 - RNA, 14 nt, Variola virus
agaugcaauacaaa

SEQ ID NO: 4078305 - RNA, 13 nt, Variola virus
agaugcaccauau

SEQ ID NO: 4078306 - RNA, 18 nt, Variola virus
agaugccaagauaucuau

SEQ ID NO: 4078307 - RNA, 15 nt, Variola virus
agaugguaaacuguu

SEQ ID NO: 4078308 - RNA, 14 nt, Variola virus
agauguaaauauau

SEQ ID NO: 4078309 - RNA, 23 nt, Variola virus
agauguauuacagccucauauau

SEQ ID NO: 4078310 - RNA, 18 nt, Variola virus
agaugucagcaucugaua

SEQ ID NO: 4078311 - RNA, 18 nt, Variola virus
agaugucugugaacuauu

SEQ ID NO: 4078312 - RNA, 22 nt, Variola virus
agaugugauuuuaucaaacaug

SEQ ID NO: 4078313 - RNA, 18 nt, Variola virus
agauguuugagaauauau

SEQ ID NO: 4078314 - RNA, 15 nt, Variola virus
agauuaaaaaugguu

SEQ ID NO: 4078315 - RNA, 16 nt, Variola virus
agauuaauuuugaauu

SEQ ID NO: 4078316 - RNA, 15 nt, Variola virus
agauuacucauguaa

SEQ ID NO: 4078317 - RNA, 23 nt, Variola virus
agauuagucagaccauucuuggu

SEQ ID NO: 4078318 - RNA, 14 nt, Variola virus
agauuauaacuuau

SEQ ID NO: 4078319 - RNA, 14 nt, Variola virus
agauucaacauuua

SEQ ID NO: 4078320 - RNA, 17 nt, Variola virus
agauucacauaaaggau

SEQ ID NO: 4078321 - RNA, 20 nt, Variola virus
agauucuggaggagauggau

SEQ ID NO: 4078322 - RNA, 18 nt, Variola virus
agauugguacgaaauaua

SEQ ID NO: 4078323 - RNA, 16 nt, Variola virus
agauuguuuaauauau

SEQ ID NO: 4078324 - RNA, 11 nt, Variola virus
agauuuaagaa

SEQ ID NO: 4078325 - RNA, 21 nt, Variola virus
agauuuaagaaaccagaauga

SEQ ID NO: 4078326 - RNA, 16 nt, Variola virus
agauuuacucugaaaa

SEQ ID NO: 4078327 - RNA, 12 nt, Variola virus
agauuuagaaau

SEQ ID NO: 4078328 - RNA, 23 nt, Variola virus
augugaucuaugacaucaugcau

SEQ ID NO: 4078329 - RNA, 20 nt, Variola virus
augugauggaaaaaugacua

SEQ ID NO: 4078330 - RNA, 14 nt, Variola virus
augugauuguucaa

SEQ ID NO: 4078331 - RNA, 18 nt, Variola virus
augugcuaaaaaguuuuc

SEQ ID NO: 4078332 - RNA, 22 nt, Variola virus
augugcuaaaaucacugaacau

SEQ ID NO: 4078333 - RNA, 14 nt, Variola virus
auguggguauuuau

SEQ ID NO: 4078334 - RNA, 13 nt, Variola virus
auguuacacuaua

SEQ ID NO: 4078335 - RNA, 20 nt, Variola virus
auguuaucaugaaauguuug

SEQ ID NO: 4078336 - RNA, 22 nt, Variola virus
auguucucguuuccaaaaaaug

SEQ ID NO: 4078337 - RNA, 18 nt, Variola virus
auguugaacauaaaacua

SEQ ID NO: 4078338 - RNA, 21 nt, Variola virus
auguuggaauagcgaauguau

SEQ ID NO: 4078339 - RNA, 23 nt, Variola virus
auguuggauuaaucuuuaccaua

SEQ ID NO: 4078340 - RNA, 22 nt, Variola virus
auguugggauuauugcaugaua

SEQ ID NO: 4078341 - RNA, 14 nt, Variola virus
auguuguuaccaua

SEQ ID NO: 4078342 - RNA, 20 nt, Variola virus
auguuuaacuugacauuuau

SEQ ID NO: 4078343 - RNA, 19 nt, Variola virus
auguuuauauguuggcaua

SEQ ID NO: 4078344 - RNA, 16 nt, Variola virus
auguuuccgagaaaua

SEQ ID NO: 4078345 - RNA, 17 nt, Variola virus
auguuucgauuucaauu

SEQ ID NO: 4078346 - RNA, 16 nt, Variola virus
auguuugggagaauua

SEQ ID NO: 4078347 - RNA, 15 nt, Variola virus
auguuuuacacguau

SEQ ID NO: 4078348 - RNA, 14 nt, Variola virus
auguuuuacucugg

SEQ ID NO: 4078349 - RNA, 16 nt, Variola virus
auuaaaaaacauauau

SEQ ID NO: 4078350 - RNA, 19 nt, Variola virus
auuaaaaaacauauauaau

SEQ ID NO: 4078351 - RNA, 14 nt, Variola virus
auuaaaaccuaauu

SEQ ID NO: 4078352 - RNA, 14 nt, Variola virus
auuaaacaauagau

SEQ ID NO: 4078353 - RNA, 13 nt, Variola virus
auuaaacauaaau

SEQ ID NO: 4078354 - RNA, 17 nt, Variola virus
auuaaaccuaaauaauu

SEQ ID NO: 4078355 - RNA, 18 nt, Variola virus
auuaaacguauaaaaacg

SEQ ID NO: 4078356 - RNA, 23 nt, Variola virus
auuaaagagauaguuuuuuucau

SEQ ID NO: 4078357 - RNA, 20 nt, Variola virus
auuaaaucauuaaaugauug

SEQ ID NO: 4078358 - RNA, 18 nt, Variola virus
auuaaaugaugaaacuaa

SEQ ID NO: 4078359 - RNA, 15 nt, Variola virus
auuaaauucuggaau

SEQ ID NO: 4078360 - RNA, 19 nt, Variola virus
auuaaauuuuuuuauuaau

SEQ ID NO: 4078361 - RNA, 21 nt, Variola virus
auuaacaccggaacaaaaagc

SEQ ID NO: 4078362 - RNA, 14 nt, Variola virus
auuaacagcuuuaa

SEQ ID NO: 4078363 - RNA, 15 nt, Variola virus
auuaacaucauacau

SEQ ID NO: 4078364 - RNA, 21 nt, Variola virus
auuaacgaguucaaauaugaa

SEQ ID NO: 4078365 - RNA, 22 nt, Variola virus
auuaacuuccacauuaauacag

SEQ ID NO: 4078366 - RNA, 17 nt, Variola virus
auuaacuuuaucacaau

SEQ ID NO: 4078367 - RNA, 22 nt, Variola virus
auuaagacgaauggcucuuccu

SEQ ID NO: 4078368 - RNA, 16 nt, Variola virus
auuaauaaaaauaauu

SEQ ID NO: 4078369 - RNA, 20 nt, Variola virus
auuaauaagauuuuuauuau

SEQ ID NO: 4078370 - RNA, 13 nt, Variola virus
auuaauaaugacg

SEQ ID NO: 4078371 - RNA, 19 nt, Variola virus
auuaauacacauaaugaag

SEQ ID NO: 4078372 - RNA, 17 nt, Variola virus
auuaauagauauaucuc

SEQ ID NO: 4078373 - RNA, 20 nt, Variola virus
auuaauaucuauuaaacgaa

SEQ ID NO: 4078374 - RNA, 20 nt, Variola virus
gaaaacucucuaucucuuaa

SEQ ID NO: 4078375 - RNA, 21 nt, Variola virus
gaaaaguucaacaugauuauu

SEQ ID NO: 4078376 - RNA, 17 nt, Variola virus
gaaaauaaaaauguuuu

SEQ ID NO: 4078377 - RNA, 22 nt, Variola virus
gaaaauaaauccaaaauaacua

SEQ ID NO: 4078378 - RNA, 21 nt, Variola virus
gaaaauaccauccaagucaau

SEQ ID NO: 4078379 - RNA, 19 nt, Variola virus
gaaaauagaaauuuguaaa

SEQ ID NO: 4078380 - RNA, 14 nt, Variola virus
gaaaauauauucua

SEQ ID NO: 4078381 - RNA, 16 nt, Variola virus
gaaaauuauaaugaau

SEQ ID NO: 4078382 - RNA, 16 nt, Variola virus
gaaaauuuaggacuua

SEQ ID NO: 4078383 - RNA, 16 nt, Variola virus
gaaaauuuauaaacua

SEQ ID NO: 4078384 - RNA, 20 nt, Variola virus
gaaacccccucauuuuuuaa

SEQ ID NO: 4078385 - RNA, 15 nt, Variola virus
gaaacgauaccaucu

SEQ ID NO: 4078386 - RNA, 13 nt, Variola virus
gaaacugauacaa

SEQ ID NO: 4078387 - RNA, 17 nt, Variola virus
gaaagaaaguaugauau

SEQ ID NO: 4078388 - RNA, 23 nt, Variola virus
gaaagacgaauauuauaauacca

SEQ ID NO: 4078389 - RNA, 16 nt, Variola virus
gaaagagauaauagaa

SEQ ID NO: 4078390 - RNA, 15 nt, Variola virus
gaaagcgugauuuua

SEQ ID NO: 4078391 - RNA, 23 nt, Variola virus
gaaagcuaucgaacguaaacgua

SEQ ID NO: 4078392 - RNA, 24 nt, Variola virus
gaaaguaauuauuacaagucaaag

SEQ ID NO: 4078393 - RNA, 15 nt, Variola virus
gaaagucagaaucua

SEQ ID NO: 4078394 - RNA, 21 nt, Variola virus
gaaagucuuagggaugaggaa

SEQ ID NO: 4078395 - RNA, 16 nt, Variola virus
gaaagugcaaaugagg

SEQ ID NO: 4078396 - RNA, 17 nt, Variola virus
gaaauaauauaaaugau

SEQ ID NO: 4078397 - RNA, 21 nt, Variola virus
gaaauagcgcugaaaauaaag

SEQ ID NO: 4078398 - RNA, 23 nt, Variola virus
gaaauagcgcugaaaauaaagau

SEQ ID NO: 4078399 - RNA, 22 nt, Variola virus
gaaauauaaaaccaacuaauau

SEQ ID NO: 4078400 - RNA, 20 nt, Variola virus
gaaauauagaauauacuuca

SEQ ID NO: 4078401 - RNA, 14 nt, Variola virus
gaaauauauacaua

SEQ ID NO: 4078402 - RNA, 15 nt, Variola virus
gaaauauauacuuca

SEQ ID NO: 4078403 - RNA, 13 nt, Variola virus
gaaauauucuguu

SEQ ID NO: 4078404 - RNA, 17 nt, Variola virus
gaaaucguauauaacua

SEQ ID NO: 4078405 - RNA, 14 nt, Variola virus
gaaaucuauaauau

SEQ ID NO: 4078406 - RNA, 15 nt, Variola virus
gaaaucuguaaucua

SEQ ID NO: 4078407 - RNA, 17 nt, Variola virus
gaaaugaugaaggaaag

SEQ ID NO: 4078408 - RNA, 18 nt, Variola virus
gaaaugccugauaaagau

SEQ ID NO: 4078409 - RNA, 22 nt, Variola virus
gaaauguccguuauauaaucua

SEQ ID NO: 4078410 - RNA, 17 nt, Variola virus
gaaauguguaauaauau

SEQ ID NO: 4078411 - RNA, 14 nt, Variola virus
gaaauguuaaaacu

SEQ ID NO: 4078412 - RNA, 15 nt, Variola virus
gaaauugauaaugag

SEQ ID NO: 4078413 - RNA, 17 nt, Variola virus
gaacaaugucaaaauau

SEQ ID NO: 4078414 - RNA, 15 nt, Variola virus
gaacaauuacagaca

SEQ ID NO: 4078415 - RNA, 22 nt, Variola virus
gaacacgauuauuauaaaauaa

SEQ ID NO: 4078416 - RNA, 15 nt, Variola virus
gaacacguuaaacaa

SEQ ID NO: 4078417 - RNA, 14 nt, Variola virus
gaacagaugauaua

SEQ ID NO: 4078418 - RNA, 16 nt, Variola virus
gaacauaagauaucua

SEQ ID NO: 4078419 - RNA, 18 nt, Variola virus
gaacauaguaagaaauuc

SEQ ID NO: 4078420 - RNA, 20 nt, Variola virus
gaacaucauuuccaaaucua

SEQ ID NO: 4078421 - RNA, 14 nt, Variola virus
gaacauuuaagaga

SEQ ID NO: 4078422 - RNA, 17 nt, Variola virus
gaaccagauaguuuaua

SEQ ID NO: 4078423 - RNA, 14 nt, Variola virus
gaacgauaaacaaa

SEQ ID NO: 4078424 - RNA, 13 nt, Variola virus
gaacgaugauaug

SEQ ID NO: 4078425 - RNA, 19 nt, Variola virus
gaacuauaaaacuacuaca

SEQ ID NO: 4078426 - RNA, 21 nt, Variola virus
gaacuauuuuuuuauacuucu

SEQ ID NO: 4078427 - RNA, 21 nt, Variola virus
gaacucuugaagaugauuuug

SEQ ID NO: 4078428 - RNA, 16 nt, Variola virus
gaacuguucaaaauau

SEQ ID NO: 4078429 - RNA, 15 nt, Variola virus
gaacuguuuaagaga

SEQ ID NO: 4078430 - RNA, 23 nt, Variola virus
gaagaacguguauuaaauagaau

SEQ ID NO: 4078431 - RNA, 14 nt, Variola virus
gaagaagaaaacaa

SEQ ID NO: 4078432 - RNA, 15 nt, Variola virus
gaagaagaaaacaaa

SEQ ID NO: 4078433 - RNA, 13 nt, Variola virus
gaagaagaaauaa

SEQ ID NO: 4078434 - RNA, 23 nt, Variola virus
gaagaauggaaaccuuuaaucua

SEQ ID NO: 4078435 - RNA, 16 nt, Variola virus
gaagaauggaugauau

SEQ ID NO: 4078436 - RNA, 15 nt, Variola virus
gaagacaauaaugac

SEQ ID NO: 4078437 - RNA, 14 nt, Variola virus
gaagacauauuaau

SEQ ID NO: 4078438 - RNA, 22 nt, Variola virus
gaagagaugccucguuccaagu

SEQ ID NO: 4078439 - RNA, 13 nt, Variola virus
gaagauaaugaau

SEQ ID NO: 4078440 - RNA, 13 nt, Variola virus
gaagauagauaua

SEQ ID NO: 4078441 - RNA, 17 nt, Variola virus
gaagauuaccucuaguu

SEQ ID NO: 4078442 - RNA, 19 nt, Variola virus
gaagauucccaaauaauca

SEQ ID NO: 4078443 - RNA, 14 nt, Variola virus
gaagcuauauguaa

SEQ ID NO: 4078444 - RNA, 18 nt, Variola virus
gaagcugguaaaguaaau

SEQ ID NO: 4078445 - RNA, 17 nt, Variola virus
gaagguuggguagaugg

SEQ ID NO: 4078446 - RNA, 17 nt, Variola virus
gaaguaaacgaacgucu

SEQ ID NO: 4078447 - RNA, 16 nt, Variola virus
gaaguuaaacugugaa

SEQ ID NO: 4078448 - RNA, 17 nt, Variola virus
gaaguuguauacuaucg

SEQ ID NO: 4078449 - RNA, 20 nt, Variola virus
gaaguuuaauaauacaauau

SEQ ID NO: 4078450 - RNA, 19 nt, Variola virus
gaauaaagagaaugcagaa

SEQ ID NO: 4078451 - RNA, 13 nt, Variola virus
gaauaaaguauau

SEQ ID NO: 4078452 - RNA, 21 nt, Variola virus
gaauaaaguuaaacaacuauu

SEQ ID NO: 4078453 - RNA, 16 nt, Variola virus
gaauaaauuauaucua

SEQ ID NO: 4078454 - RNA, 19 nt, Variola virus
gaauaaauuaucaacgaau

SEQ ID NO: 4078455 - RNA, 13 nt, Variola virus
gaauaaguuuauu

SEQ ID NO: 4078456 - RNA, 18 nt, Variola virus
gaauaauguuucuauguu

SEQ ID NO: 4078457 - RNA, 17 nt, Variola virus
gaauacacauguuuuaa

SEQ ID NO: 4078458 - RNA, 16 nt, Variola virus
gaauacauuuauugca

SEQ ID NO: 4078459 - RNA, 18 nt, Variola virus
gaauacgaugauauuaaa

SEQ ID NO: 4078460 - RNA, 16 nt, Variola virus
gaauaguaaaauuaga

SEQ ID NO: 4078461 - RNA, 16 nt, Variola virus
gaauagugguauauaa

SEQ ID NO: 4078462 - RNA, 19 nt, Variola virus
gaauauacuucauaaaaga

SEQ ID NO: 4078463 - RNA, 21 nt, Variola virus
gaauaucuccucaaggaauac

SEQ ID NO: 4078464 - RNA, 17 nt, Variola virus
auucucuauuaaauacc

SEQ ID NO: 4078465 - RNA, 20 nt, Variola virus
auucucugaaaauguaaauc

SEQ ID NO: 4078466 - RNA, 15 nt, Variola virus
auucugaaacaguau

SEQ ID NO: 4078467 - RNA, 19 nt, Variola virus
auucugaauagauccacca

SEQ ID NO: 4078468 - RNA, 21 nt, Variola virus
auucugaauagugaaaaccuu

SEQ ID NO: 4078469 - RNA, 18 nt, Variola virus
auucugcaauaucuucgu

SEQ ID NO: 4078470 - RNA, 14 nt, Variola virus
auucugcaauauug

SEQ ID NO: 4078471 - RNA, 21 nt, Variola virus
auucuggcuauuucaaaauaa

SEQ ID NO: 4078472 - RNA, 14 nt, Variola virus
auucuuaaaaucua

SEQ ID NO: 4078473 - RNA, 16 nt, Variola virus
auucuuaagacacauu

SEQ ID NO: 4078474 - RNA, 17 nt, Variola virus
auucuucauucugcaua

SEQ ID NO: 4078475 - RNA, 17 nt, Variola virus
auucuugguuaaacuca

SEQ ID NO: 4078476 - RNA, 16 nt, Variola virus
auugaacgguaucuuc

SEQ ID NO: 4078477 - RNA, 19 nt, Variola virus
auugaauuggaaaaauaac

SEQ ID NO: 4078478 - RNA, 19 nt, Variola virus
auugacauggcuucuucca

SEQ ID NO: 4078479 - RNA, 16 nt, Variola virus
auugaugacacuagau

SEQ ID NO: 4078480 - RNA, 23 nt, Variola virus
auugaugcgaauagcagauagau

SEQ ID NO: 4078481 - RNA, 20 nt, Variola virus
auugauuacuuugacaaaug

SEQ ID NO: 4078482 - RNA, 17 nt, Variola virus
auugauuagaaaauaua

SEQ ID NO: 4078483 - RNA, 17 nt, Variola virus
auugauuucgucaaugu

SEQ ID NO: 4078484 - RNA, 18 nt, Variola virus
auugcacaauccaaacuu

SEQ ID NO: 4078485 - RNA, 17 nt, Variola virus
auugcauugugaauaua

SEQ ID NO: 4078486 - RNA, 21 nt, Variola virus
auugcauuuugauaguuuauc

SEQ ID NO: 4078487 - RNA, 22 nt, Variola virus
auugcuagccuuaucuucuaua

SEQ ID NO: 4078488 - RNA, 17 nt, Variola virus
auuggaacuaguauuua

SEQ ID NO: 4078489 - RNA, 21 nt, Variola virus
auuggaauguguuaaaaagaa

SEQ ID NO: 4078490 - RNA, 18 nt, Variola virus
auuggggaagguaacaau

SEQ ID NO: 4078491 - RNA, 16 nt, Variola virus
auugguauaaauguug

SEQ ID NO: 4078492 - RNA, 20 nt, Variola virus
auuguaccaucuuguuguaa

SEQ ID NO: 4078493 - RNA, 17 nt, Variola virus
auuguauauacuuagau

SEQ ID NO: 4078494 - RNA, 19 nt, Variola virus
auuguauccauacauacau

SEQ ID NO: 4078495 - RNA, 15 nt, Variola virus
auugucacuacuaaa

SEQ ID NO: 4078496 - RNA, 22 nt, Variola virus
auugucuauaucuaaaaucaua

SEQ ID NO: 4078497 - RNA, 16 nt, Variola virus
auugugauaaauguuc

SEQ ID NO: 4078498 - RNA, 18 nt, Variola virus
auuguuaauuauuucuaa

SEQ ID NO: 4078499 - RNA, 13 nt, Variola virus
auuguuacaaaag

SEQ ID NO: 4078500 - RNA, 12 nt, Variola virus
auuguuguguac

SEQ ID NO: 4078501 - RNA, 12 nt, Variola virus
auuguuuaagau

SEQ ID NO: 4078502 - RNA, 14 nt, Variola virus
auuguuuucaguaa

SEQ ID NO: 4078503 - RNA, 17 nt, Variola virus
auuguuuuuguacauaa

SEQ ID NO: 4078504 - RNA, 15 nt, Variola virus
auuuaaacauuuaac

SEQ ID NO: 4078505 - RNA, 19 nt, Variola virus
auuuaagagaucaaagcau

SEQ ID NO: 4078506 - RNA, 17 nt, Variola virus
auuuaaggcuuuaaaau

SEQ ID NO: 4078507 - RNA, 18 nt, Variola virus
auuuaaguagagaauguu

SEQ ID NO: 4078508 - RNA, 13 nt, Variola virus
auuuaauaagacu

SEQ ID NO: 4078509 - RNA, 17 nt, Variola virus
auuuaauaagacuuuga

SEQ ID NO: 4078510 - RNA, 14 nt, Variola virus
auuuaaugauucau

SEQ ID NO: 4078511 - RNA, 22 nt, Variola virus
auuuacagauuuaguuguuuaa

SEQ ID NO: 4078512 - RNA, 19 nt, Variola virus
auuuacauucuuuuugcug

SEQ ID NO: 4078513 - RNA, 19 nt, Variola virus
auuuaccguuacuaauaag

SEQ ID NO: 4078514 - RNA, 15 nt, Variola virus
auuuacuacugaugu

SEQ ID NO: 4078515 - RNA, 22 nt, Variola virus
auuuaggagugaucaucaaaug

SEQ ID NO: 4078516 - RNA, 16 nt, Variola virus
auuuaguauuaaauga

SEQ ID NO: 4078517 - RNA, 14 nt, Variola virus
auuuauaaaaaugc

SEQ ID NO: 4078518 - RNA, 17 nt, Variola virus
auuuauaccaugucaaa

SEQ ID NO: 4078519 - RNA, 11 nt, Variola virus
auuuauccauc

SEQ ID NO: 4078520 - RNA, 21 nt, Variola virus
auuuauuauuuucacggagau

SEQ ID NO: 4078521 - RNA, 14 nt, Variola virus
auuuauuucuucuu

SEQ ID NO: 4078522 - RNA, 21 nt, Variola virus
auuucaaagguguguacuuua

SEQ ID NO: 4078523 - RNA, 14 nt, Variola virus
auuucaacaggcau

SEQ ID NO: 4078524 - RNA, 18 nt, Variola virus
auuucaaggacaaaauga

SEQ ID NO: 4078525 - RNA, 15 nt, Variola virus
auuucaaucaaacaa

SEQ ID NO: 4078526 - RNA, 15 nt, Variola virus
auuucacuaauuaau

SEQ ID NO: 4078527 - RNA, 16 nt, Variola virus
auuucauauaguugaa

SEQ ID NO: 4078528 - RNA, 16 nt, Variola virus
auuucaucuguaguau

SEQ ID NO: 4078529 - RNA, 20 nt, Variola virus
auuuccagauauauaucuuu

SEQ ID NO: 4078530 - RNA, 17 nt, Variola virus
auuuccgcauucuuccu

SEQ ID NO: 4078531 - RNA, 21 nt, Variola virus
auuucgaauacgauacuuaua

SEQ ID NO: 4078532 - RNA, 13 nt, Variola virus
auuucgacaaaaa

SEQ ID NO: 4078533 - RNA, 21 nt, Variola virus
auuucuauacuuguuggugaa

SEQ ID NO: 4078534 - RNA, 12 nt, Variola virus
auuucuaucugu

SEQ ID NO: 4078535 - RNA, 19 nt, Variola virus
auuucuuauguuauuaaug

SEQ ID NO: 4078536 - RNA, 19 nt, Variola virus
auuugaaguauuuguugua

SEQ ID NO: 4078537 - RNA, 16 nt, Variola virus
auuugagagucuuaua

SEQ ID NO: 4078538 - RNA, 16 nt, Variola virus
auuugauauaaugaau

SEQ ID NO: 4078539 - RNA, 17 nt, Variola virus
auuuggaaaagaaaauu

SEQ ID NO: 4078540 - RNA, 22 nt, Variola virus
auuuggcaguacucauuaauaa

SEQ ID NO: 4078541 - RNA, 20 nt, Variola virus
auuugguaaauuauuaucua

SEQ ID NO: 4078542 - RNA, 17 nt, Variola virus
auuugguauaaaaauua

SEQ ID NO: 4078543 - RNA, 20 nt, Variola virus
auuuguagcaaaacuauuuc

SEQ ID NO: 4078544 - RNA, 18 nt, Variola virus
auuuguauauacauagau

SEQ ID NO: 4078545 - RNA, 15 nt, Variola virus
auuugucacaauaug

SEQ ID NO: 4078546 - RNA, 19 nt, Variola virus
auuugucugcuuucuuuua

SEQ ID NO: 4078547 - RNA, 17 nt, Variola virus
auuuguucaagauagau

SEQ ID NO: 4078548 - RNA, 19 nt, Variola virus
auuuguucguaugucauaa

SEQ ID NO: 4078549 - RNA, 12 nt, Variola virus
auuuuaaauaca

SEQ ID NO: 4078550 - RNA, 18 nt, Variola virus
auuuuaaauuuuaaacau

SEQ ID NO: 4078551 - RNA, 19 nt, Variola virus
auuuuaacgacgacauauu

SEQ ID NO: 4078552 - RNA, 19 nt, Variola virus
auuuuaacgucuaaaugua

SEQ ID NO: 4078553 - RNA, 18 nt, Variola virus
auuuuaauaguauccauu

SEQ ID NO: 4078554 - RNA, 19 nt, Variola virus
auuuuaauucuagacuauu

SEQ ID NO: 4078555 - RNA, 14 nt, Variola virus
auuuuacauuccuc

SEQ ID NO: 4078556 - RNA, 17 nt, Variola virus
auuuuacccucaaucau

SEQ ID NO: 4078557 - RNA, 18 nt, Variola virus
auuuuaccucuucugaua

SEQ ID NO: 4078558 - RNA, 18 nt, Variola virus
auuuuauaugucaaccau

SEQ ID NO: 4078559 - RNA, 15 nt, Variola virus
auuuuaucaagacau

SEQ ID NO: 4078560 - RNA, 15 nt, Variola virus
auuuuauuucaaaau

SEQ ID NO: 4078561 - RNA, 15 nt, Variola virus
auuuucaucuagaua

SEQ ID NO: 4078562 - RNA, 21 nt, Variola virus
auuuucuaacgaaacgaugaa

SEQ ID NO: 4078563 - RNA, 16 nt, Variola virus
auuuucuacaauaacu

SEQ ID NO: 4078564 - RNA, 18 nt, Variola virus
auuuucuauuuuuaauuu

SEQ ID NO: 4078565 - RNA, 15 nt, Variola virus
auuuucucuuaaaaa

SEQ ID NO: 4078566 - RNA, 15 nt, Variola virus
auuuugcuaucuuga

SEQ ID NO: 4078567 - RNA, 15 nt, Variola virus
auuuugucauuaacu

SEQ ID NO: 4078568 - RNA, 19 nt, Variola virus
auuuuuacagcgacacuau

SEQ ID NO: 4078569 - RNA, 16 nt, Variola virus
auuuuuauaaauagau

SEQ ID NO: 4078570 - RNA, 12 nt, Variola virus
auuuuuaucaua

SEQ ID NO: 4078571 - RNA, 20 nt, Variola virus
auuuuuaucauaacacuacu

SEQ ID NO: 4078572 - RNA, 16 nt, Variola virus
auuuuuguccauuacu

SEQ ID NO: 4078573 - RNA, 12 nt, Variola virus
auuuuuuguaaa

SEQ ID NO: 4078574 - RNA, 23 nt, Variola virus
auuuuuuuuaaaaaaaaauacuu

SEQ ID NO: 4078575 - RNA, 19 nt, Variola virus
caaaaaacgacgauuggaa

SEQ ID NO: 4078576 - RNA, 14 nt, Variola virus
caaaaaauccugua

SEQ ID NO: 4078577 - RNA, 13 nt, Variola virus
caaaaagacuaua

SEQ ID NO: 4078578 - RNA, 19 nt, Variola virus
caaaaagagagucaauguu

SEQ ID NO: 4078579 - RNA, 18 nt, Variola virus
caaaaagggauauauauu

SEQ ID NO: 4078580 - RNA, 18 nt, Variola virus
caaaacauaauacucugu

SEQ ID NO: 4078581 - RNA, 16 nt, Variola virus
caaaaccaauuccuuu

SEQ ID NO: 4078582 - RNA, 18 nt, Variola virus
caaaacuauuccaauguu

SEQ ID NO: 4078583 - RNA, 17 nt, Variola virus
caaaaguagaugguauu

SEQ ID NO: 4078584 - RNA, 20 nt, Variola virus
caaaagugacgucuuguauu

SEQ ID NO: 4078585 - RNA, 12 nt, Variola virus
caaaauaaugac

SEQ ID NO: 4078586 - RNA, 17 nt, Variola virus
caaaauacaaaauguua

SEQ ID NO: 4078587 - RNA, 21 nt, Variola virus
caaaauacucaggaagauauu

SEQ ID NO: 4078588 - RNA, 15 nt, Variola virus
caaaauagagccaaa

SEQ ID NO: 4078589 - RNA, 14 nt, Variola virus
caaaauccaaauuu

SEQ ID NO: 4078590 - RNA, 13 nt, Variola virus
cuaauacucuggg

SEQ ID NO: 4078591 - RNA, 13 nt, Variola virus
cuaauauaaucuu

SEQ ID NO: 4078592 - RNA, 15 nt, Variola virus
cuaauauuuuuagau

SEQ ID NO: 4078593 - RNA, 21 nt, Variola virus
cuaauguauagauuguuuuca

SEQ ID NO: 4078594 - RNA, 21 nt, Variola virus
cuaauuccuuugcuauuucua

SEQ ID NO: 4078595 - RNA, 19 nt, Variola virus
cuaauucuauauuguuaua

SEQ ID NO: 4078596 - RNA, 19 nt, Variola virus
cuaauuuauuucuucucuu

SEQ ID NO: 4078597 - RNA, 19 nt, Variola virus
cuacaaaauguugauaauc

SEQ ID NO: 4078598 - RNA, 14 nt, Variola virus
cuacaacagauauu

SEQ ID NO: 4078599 - RNA, 21 nt, Variola virus
cuacaauugucuaaugauauc

SEQ ID NO: 4078600 - RNA, 21 nt, Variola virus
cuacagaaggcgaacgcuaua

SEQ ID NO: 4078601 - RNA, 23 nt, Variola virus
cuacaguaggcauaccauuagau

SEQ ID NO: 4078602 - RNA, 19 nt, Variola virus
cuacauacauaagcaucuc

SEQ ID NO: 4078603 - RNA, 23 nt, Variola virus
cuacaugacaaagauuuaucaga

SEQ ID NO: 4078604 - RNA, 16 nt, Variola virus
cuacauuauuaaauca

SEQ ID NO: 4078605 - RNA, 12 nt, Variola virus
cuacauuguuua

SEQ ID NO: 4078606 - RNA, 15 nt, Variola virus
cuaccgaucucuuua

SEQ ID NO: 4078607 - RNA, 18 nt, Variola virus
cuaccgcaucaucaucgu

SEQ ID NO: 4078608 - RNA, 20 nt, Variola virus
cuacgauuuuauuucuuucg

SEQ ID NO: 4078609 - RNA, 17 nt, Variola virus
cuacuacacuucuagau

SEQ ID NO: 4078610 - RNA, 19 nt, Variola virus
cuacuacacuucuagauau

SEQ ID NO: 4078611 - RNA, 17 nt, Variola virus
cuacuggugaaauguga

SEQ ID NO: 4078612 - RNA, 19 nt, Variola virus
cuagaauuagaauuacaaa

SEQ ID NO: 4078613 - RNA, 24 nt, Variola virus
cuagacauuguacaauauguguua

SEQ ID NO: 4078614 - RNA, 24 nt, Variola virus
cuagacgauuaguaauauaucuca

SEQ ID NO: 4078615 - RNA, 21 nt, Variola virus
cuagacugaugaccauuuaaa

SEQ ID NO: 4078616 - RNA, 22 nt, Variola virus
cuagauacccaaucucucucaa

SEQ ID NO: 4078617 - RNA, 17 nt, Variola virus
cuagauauauuaauaac

SEQ ID NO: 4078618 - RNA, 23 nt, Variola virus
cuaguaaacuucgcguauacagu

SEQ ID NO: 4078619 - RNA, 14 nt, Variola virus
cuaguacuguaaaa

SEQ ID NO: 4078620 - RNA, 13 nt, Variola virus
cuagucagaacua

SEQ ID NO: 4078621 - RNA, 15 nt, Variola virus
cuagucauauguuua

SEQ ID NO: 4078622 - RNA, 22 nt, Variola virus
cuaguccaaagacuuacaggaa

SEQ ID NO: 4078623 - RNA, 21 nt, Variola virus
cuagugcuuguauguguuaua

SEQ ID NO: 4078624 - RNA, 21 nt, Variola virus
cuaguuaagaacaugucuuca

SEQ ID NO: 4078625 - RNA, 13 nt, Variola virus
cuaguuguagaau

SEQ ID NO: 4078626 - RNA, 13 nt, Variola virus
cuaguuguuuaug

SEQ ID NO: 4078627 - RNA, 20 nt, Variola virus
cuauaaaaaaaauaauaauu

SEQ ID NO: 4078628 - RNA, 16 nt, Variola virus
cuauaaaaaacauaau

SEQ ID NO: 4078629 - RNA, 14 nt, Variola virus
cuauaaaaaugaag

SEQ ID NO: 4078630 - RNA, 18 nt, Variola virus
cuauaaaacuacuacaau

SEQ ID NO: 4078631 - RNA, 22 nt, Variola virus
cuauaaacgaugguuuaauuug

SEQ ID NO: 4078632 - RNA, 20 nt, Variola virus
cuauaagauuaucaaaaucu

SEQ ID NO: 4078633 - RNA, 18 nt, Variola virus
cuauaauauccauuuugu

SEQ ID NO: 4078634 - RNA, 14 nt, Variola virus
cuauacauuuccga

SEQ ID NO: 4078635 - RNA, 14 nt, Variola virus
cuauagauaaugac

SEQ ID NO: 4078636 - RNA, 14 nt, Variola virus
cuauagaucaugua

SEQ ID NO: 4078637 - RNA, 16 nt, Variola virus
cuauaguuuguuuuca

SEQ ID NO: 4078638 - RNA, 21 nt, Variola virus
cuauauagcuauucuucuuua

SEQ ID NO: 4078639 - RNA, 16 nt, Variola virus
cuauaucauucucaaa

SEQ ID NO: 4078640 - RNA, 22 nt, Variola virus
cuauaucuucuaaaauuacaaa

SEQ ID NO: 4078641 - RNA, 19 nt, Variola virus
cuauaugacuguauuugga

SEQ ID NO: 4078642 - RNA, 17 nt, Variola virus
cuauauggauauucaua

SEQ ID NO: 4078643 - RNA, 20 nt, Variola virus
cuauauuuguuccuguagau

SEQ ID NO: 4078644 - RNA, 20 nt, Variola virus
cuaucauccaucauguuaag

SEQ ID NO: 4078645 - RNA, 17 nt, Variola virus
cuaucgaguuuaucaga

SEQ ID NO: 4078646 - RNA, 19 nt, Variola virus
cuaucuaugcuguagauag

SEQ ID NO: 4078647 - RNA, 16 nt, Variola virus
cuaucuucaucauauu

SEQ ID NO: 4078648 - RNA, 15 nt, Variola virus
cuaugauauuguuga

SEQ ID NO: 4078649 - RNA, 22 nt, Variola virus
cuaugaucguuuuaauauugug

SEQ ID NO: 4078650 - RNA, 15 nt, Variola virus
cuaugguacaaguug

SEQ ID NO: 4078651 - RNA, 17 nt, Variola virus
cuaugucucuuauuaga

SEQ ID NO: 4078652 - RNA, 16 nt, Variola virus
cuaugucuuuauccaa

SEQ ID NO: 4078653 - RNA, 19 nt, Variola virus
cuauguuaauauguauaua

SEQ ID NO: 4078654 - RNA, 15 nt, Variola virus
cuauguuuuuaauga

SEQ ID NO: 4078655 - RNA, 13 nt, Variola virus
cuauuaaaacuaa

SEQ ID NO: 4078656 - RNA, 16 nt, Variola virus
cuauuacguacauaac

SEQ ID NO: 4078657 - RNA, 20 nt, Variola virus
cuauuaguuguuccaauaaa

SEQ ID NO: 4078658 - RNA, 21 nt, Variola virus
cuauuaguuguuccaauaaau

SEQ ID NO: 4078659 - RNA, 13 nt, Variola virus
cuauuauuuugaa

SEQ ID NO: 4078660 - RNA, 23 nt, Variola virus
cuauucaguaguguuuacauaaa

SEQ ID NO: 4078661 - RNA, 15 nt, Variola virus
cuauuccuauuuccu

SEQ ID NO: 4078662 - RNA, 12 nt, Variola virus
cuauucucucuu

SEQ ID NO: 4078663 - RNA, 16 nt, Variola virus
cuauuggcaauuguag

SEQ ID NO: 4078664 - RNA, 20 nt, Variola virus
cuauuguuuguuuuaauaua

SEQ ID NO: 4078665 - RNA, 23 nt, Variola virus
cuauuucaaaaguuuuuaagaga

SEQ ID NO: 4078666 - RNA, 15 nt, Variola virus
cuauuucuauuucua

SEQ ID NO: 4078667 - RNA, 19 nt, Variola virus
cuauuuguguauucuucua

SEQ ID NO: 4078668 - RNA, 12 nt, Variola virus
cuauuuuaauga

SEQ ID NO: 4078669 - RNA, 16 nt, Variola virus
uaucuggcggugaaau

SEQ ID NO: 4078670 - RNA, 19 nt, Variola virus
uaucuggcucucucugcca

SEQ ID NO: 4078671 - RNA, 20 nt, Variola virus
uaucuuccgucaaggaucau

SEQ ID NO: 4078672 - RNA, 13 nt, Variola virus
uaucuucuaaaaa

SEQ ID NO: 4078673 - RNA, 13 nt, Variola virus
uaucuucuaaaau

SEQ ID NO: 4078674 - RNA, 15 nt, Variola virus
uaucuucuuuaucua

SEQ ID NO: 4078675 - RNA, 22 nt, Variola virus
uaucuuuaacuaagucaauuau

SEQ ID NO: 4078676 - RNA, 17 nt, Variola virus
uaucuuuauagaguaua

SEQ ID NO: 4078677 - RNA, 19 nt, Variola virus
uaucuuuccauuuaucaug

SEQ ID NO: 4078678 - RNA, 14 nt, Variola virus
uaucuuucuuugaa

SEQ ID NO: 4078679 - RNA, 19 nt, Variola virus
uaucuuuuucucaacgucg

SEQ ID NO: 4078680 - RNA, 13 nt, Variola virus
uaugaaaauagca

SEQ ID NO: 4078681 - RNA, 16 nt, Variola virus
uaugaaguacgauguu

SEQ ID NO: 4078682 - RNA, 12 nt, Variola virus
uaugaauuuaua

SEQ ID NO: 4078683 - RNA, 21 nt, Variola virus
uaugacaucaacuacaaauga

SEQ ID NO: 4078684 - RNA, 21 nt, Variola virus
uaugaccgguuuaauguuaua

SEQ ID NO: 4078685 - RNA, 15 nt, Variola virus
uaugacuaaacauuu

SEQ ID NO: 4078686 - RNA, 15 nt, Variola virus
uaugacuuaauagca

SEQ ID NO: 4078687 - RNA, 13 nt, Variola virus
uaugauaugugau

SEQ ID NO: 4078688 - RNA, 18 nt, Variola virus
uaugaucguuuuaauauu

SEQ ID NO: 4078689 - RNA, 13 nt, Variola virus
uaugauucuguaa

SEQ ID NO: 4078690 - RNA, 17 nt, Variola virus
uaugcacgaaauagcua

SEQ ID NO: 4078691 - RNA, 13 nt, Variola virus
uauggaauuccau

SEQ ID NO: 4078692 - RNA, 18 nt, Variola virus
uauggccauagaggaugu

SEQ ID NO: 4078693 - RNA, 14 nt, Variola virus
uauggcuucuccag

SEQ ID NO: 4078694 - RNA, 21 nt, Variola virus
uauggucagugcauaauaaag

SEQ ID NO: 4078695 - RNA, 17 nt, Variola virus
uauguaaguauuuacga

SEQ ID NO: 4078696 - RNA, 21 nt, Variola virus
uauguauuguaccaaagauuu

SEQ ID NO: 4078697 - RNA, 18 nt, Variola virus
uauguggaucugaagaag

SEQ ID NO: 4078698 - RNA, 17 nt, Variola virus
uauguguagaauuaaau

SEQ ID NO: 4078699 - RNA, 16 nt, Variola virus
uauguuuuguauacau

SEQ ID NO: 4078700 - RNA, 19 nt, Variola virus
uauguuuuuacagagacuu

SEQ ID NO: 4078701 - RNA, 13 nt, Variola virus
uauuaaaaaaugu

SEQ ID NO: 4078702 - RNA, 22 nt, Variola virus
uauuaaacaacgacauuguaaa

SEQ ID NO: 4078703 - RNA, 17 nt, Variola virus
uauuaaccacauaucug

SEQ ID NO: 4078704 - RNA, 22 nt, Variola virus
uauuaauacaggaucuagcaaa

SEQ ID NO: 4078705 - RNA, 14 nt, Variola virus
uauuaaucaaucau

SEQ ID NO: 4078706 - RNA, 22 nt, Variola virus
uauuacaagacgucauucuaaa

SEQ ID NO: 4078707 - RNA, 22 nt, Variola virus
uauuacaauuaauaaguauaaa

SEQ ID NO: 4078708 - RNA, 17 nt, Variola virus
uauuacuaggagaauua

SEQ ID NO: 4078709 - RNA, 19 nt, Variola virus
uauuacugacuuuaauauu

SEQ ID NO: 4078710 - RNA, 15 nt, Variola virus
uauuagaaauacacu

SEQ ID NO: 4078711 - RNA, 15 nt, Variola virus
uauuagaaucguguu

SEQ ID NO: 4078712 - RNA, 12 nt, Variola virus
uauuagaauuaa

SEQ ID NO: 4078713 - RNA, 22 nt, Variola virus
uauuagaauuggaauaccaaau

SEQ ID NO: 4078714 - RNA, 13 nt, Variola virus
uauuauaaucauu

SEQ ID NO: 4078715 - RNA, 20 nt, Variola virus
uauuaucaauucuggauuau

SEQ ID NO: 4078716 - RNA, 22 nt, Variola virus
uauuaucauacugucaacuaua

SEQ ID NO: 4078717 - RNA, 16 nt, Variola virus
uauuauccaauacaga

SEQ ID NO: 4078718 - RNA, 13 nt, Variola virus
uauuaucuauaaa

SEQ ID NO: 4078719 - RNA, 15 nt, Variola virus
uauuaucucaacaaa

SEQ ID NO: 4078720 - RNA, 20 nt, Variola virus
uauuaucucccauuaucuug

SEQ ID NO: 4078721 - RNA, 21 nt, Variola virus
uauuauguuaacggaaaguau

SEQ ID NO: 4078722 - RNA, 17 nt, Variola virus
uauucaagcaaaaacaa

SEQ ID NO: 4078723 - RNA, 13 nt, Variola virus
uauucacauaucg

SEQ ID NO: 4078724 - RNA, 15 nt, Variola virus
uauucacuuaacaau

SEQ ID NO: 4078725 - RNA, 16 nt, Variola virus
uauucauauucuuaaa

SEQ ID NO: 4078726 - RNA, 16 nt, Variola virus
uauuccaaucauugau

SEQ ID NO: 4078727 - RNA, 18 nt, Variola virus
uauuccagaugucaugau

SEQ ID NO: 4078728 - RNA, 17 nt, Variola virus
uauuccguauuuaucua

SEQ ID NO: 4078729 - RNA, 17 nt, Variola virus
uauuccuaguuuggauu

SEQ ID NO: 4078730 - RNA, 19 nt, Variola virus
uauuccuuucauuaacaau

SEQ ID NO: 4078731 - RNA, 13 nt, Variola virus
uauucgacacauc

SEQ ID NO: 4078732 - RNA, 23 nt, Variola virus
uauucggagcgcgcaauuuuuaa

SEQ ID NO: 4078733 - RNA, 19 nt, Variola virus
uauucuuaaaagguuucau

SEQ ID NO: 4078734 - RNA, 22 nt, Variola virus
uauucuuaauucuuuaacaaaa

SEQ ID NO: 4078735 - RNA, 16 nt, Variola virus
uauugaagauaaugug

SEQ ID NO: 4078736 - RNA, 20 nt, Variola virus
uauugcaaaucacucaauau

SEQ ID NO: 4078737 - RNA, 12 nt, Variola virus
uauugcaucaaa

SEQ ID NO: 4078738 - RNA, 14 nt, Variola virus
uauugcuacauaau

SEQ ID NO: 4078739 - RNA, 12 nt, Variola virus
uauugcuguauu

SEQ ID NO: 4078740 - RNA, 20 nt, Variola virus
uauugcuuuccuuuaucauu

SEQ ID NO: 4078741 - RNA, 18 nt, Variola virus
uauugguccgaauuacag

SEQ ID NO: 4078742 - RNA, 13 nt, Variola virus
uauuguagcauua

SEQ ID NO: 4078743 - RNA, 19 nt, Variola virus
uauuguggcgccuuauaua

SEQ ID NO: 4078744 - RNA, 19 nt, Variola virus
uauuuacaucuaauuuacu

SEQ ID NO: 4078745 - RNA, 20 nt, Variola virus
uauuuacugaacaggcauuu

SEQ ID NO: 4078746 - RNA, 18 nt, Variola virus
uauuuaucuuucuugcua

SEQ ID NO: 4078747 - RNA, 22 nt, Variola virus
uauuuaugauauauauuauaua

SEQ ID NO: 4078748 - RNA, 12 nt, Variola virus
uauuuauuucca

SEQ ID NO: 4078749 - RNA, 20 nt, Variola virus
uauuucaaaauuauuuacca

SEQ ID NO: 4078750 - RNA, 17 nt, Variola virus
uauuucacaucguauuu

SEQ ID NO: 4078751 - RNA, 23 nt, Variola virus
uauuucauugacggaugaucaua

SEQ ID NO: 4078752 - RNA, 15 nt, Variola virus
uauuuccaucaugau

SEQ ID NO: 4078753 - RNA, 18 nt, Variola virus
uauuucuauauuugacuc

SEQ ID NO: 4078754 - RNA, 23 nt, Variola virus
uauuugcgaggaugacucucaaa

SEQ ID NO: 4078755 - RNA, 19 nt, Variola virus
uauuuggcuaaauuauaua

SEQ ID NO: 4078756 - RNA, 12 nt, Variola virus
uauuuuaaugag

SEQ ID NO: 4078757 - RNA, 12 nt, Variola virus
uauuuuacacau

SEQ ID NO: 4078758 - RNA, 12 nt, Variola virus
uauuuuacuaau

SEQ ID NO: 4078759 - RNA, 13 nt, Variola virus
uauuuuacucauu

SEQ ID NO: 4078760 - RNA, 22 nt, Variola virus
uauuuucgcuccaaauauacau

SEQ ID NO: 4078761 - RNA, 12 nt, Variola virus
uauuuucuucua

SEQ ID NO: 4078762 - RNA, 21 nt, Variola virus
uauuuugauaggaucuauaau

SEQ ID NO: 4078763 - RNA, 19 nt, Variola virus
uauuuuuaacuuucaucua

SEQ ID NO: 4078764 - RNA, 19 nt, Variola virus
uauuuuucuaauacuauau

SEQ ID NO: 4078765 - RNA, 17 nt, Variola virus
uauuuuuuaucuaaaaa

SEQ ID NO: 4078766 - RNA, 18 nt, Variola virus
uauuuuuuuauacuucua

SEQ ID NO: 4078767 - RNA, 13 nt, Variola virus
ucaaaaacugaag

SEQ ID NO: 4078768 - RNA, 13 nt, Variola virus
ucaaaacaaacag

SEQ ID NO: 4078769 - RNA, 13 nt, Variola virus
ucaaaagaaaucu

SEQ ID NO: 4078770 - RNA, 14 nt, Variola virus
ucaaaagaaaucuu

SEQ ID NO: 4078771 - RNA, 12 nt, Variola virus
ucaaaagaagau

SEQ ID NO: 4078772 - RNA, 17 nt, Variola virus
ucaaaauauauagagaa

SEQ ID NO: 4078773 - RNA, 14 nt, Variola virus
ucaaaauauuucaa

SEQ ID NO: 4078774 - RNA, 18 nt, Variola virus
ucaaaaugcugauuucga

SEQ ID NO: 4078775 - RNA, 12 nt, Variola virus
ucaaaauuauuu

SEQ ID NO: 4078776 - RNA, 16 nt, Variola virus
ucaaaauuuauuugau

SEQ ID NO: 4078777 - RNA, 23 nt, Variola virus
ucaaacaaaaaagcucaauaaga

SEQ ID NO: 4078778 - RNA, 18 nt, Variola virus
ucaaacaugacauuuucc

SEQ ID NO: 4078779 - RNA, 15 nt, Variola virus
ucaaacucgauauau

SEQ ID NO: 4078780 - RNA, 12 nt, Variola virus
ucaaagaaaaag

SEQ ID NO: 4078781 - RNA, 14 nt, Variola virus
ucaaagaagaaguu

SEQ ID NO: 4078782 - RNA, 14 nt, Variola virus
ucaaagauuugaga

SEQ ID NO: 4078783 - RNA, 20 nt, Variola virus
ucaaauaauaaacuaaacaa

SEQ ID NO: 4078784 - RNA, 13 nt, Variola virus
ucaaauagauguu

SEQ ID NO: 4078785 - RNA, 16 nt, Variola virus
ucaaauuagauuucga

SEQ ID NO: 4078786 - RNA, 16 nt, Variola virus
uaacugcaguguguau

SEQ ID NO: 4078787 - RNA, 20 nt, Variola virus
uaacuguugccaaugauguu

SEQ ID NO: 4078788 - RNA, 21 nt, Variola virus
uaacuuccacauuaauacagc

SEQ ID NO: 4078789 - RNA, 22 nt, Variola virus
uaacuucgugaauaauguuucu

SEQ ID NO: 4078790 - RNA, 15 nt, Variola virus
uaacuuuucaaucau

SEQ ID NO: 4078791 - RNA, 19 nt, Variola virus
uaacuuuuucuuucucagc

SEQ ID NO: 4078792 - RNA, 22 nt, Variola virus
uaagaaaguaauucagacacuu

SEQ ID NO: 4078793 - RNA, 15 nt, Variola virus
uaagaagucauaugu

SEQ ID NO: 4078794 - RNA, 14 nt, Variola virus
uaagaaugugauaa

SEQ ID NO: 4078795 - RNA, 23 nt, Variola virus
uaagacuaaugcuugaaaaugga

SEQ ID NO: 4078796 - RNA, 16 nt, Variola virus
uaagauaguuguucau

SEQ ID NO: 4078797 - RNA, 15 nt, Variola virus
uaagauuaagugcua

SEQ ID NO: 4078798 - RNA, 17 nt, Variola virus
uaagauuuuaaauguau

SEQ ID NO: 4078799 - RNA, 23 nt, Variola virus
uaagauuuuugagauaucucauu

SEQ ID NO: 4078800 - RNA, 14 nt, Variola virus
uaagcaagaaagau

SEQ ID NO: 4078801 - RNA, 14 nt, Variola virus
uaagccaaacucau

SEQ ID NO: 4078802 - RNA, 19 nt, Variola virus
uaagcgcuauauaaaucau

SEQ ID NO: 4078803 - RNA, 18 nt, Variola virus
uaaguaauaacuauguuu

SEQ ID NO: 4078804 - RNA, 23 nt, Variola virus
uaaguaccggguaauauaucuuu

SEQ ID NO: 4078805 - RNA, 22 nt, Variola virus
uaaguaguuggaagaaucucau

SEQ ID NO: 4078806 - RNA, 15 nt, Variola virus
uaaguauaacacaaa

SEQ ID NO: 4078807 - RNA, 22 nt, Variola virus
uaaguauagcaaauaaaaucua

SEQ ID NO: 4078808 - RNA, 18 nt, Variola virus
uaagucaacguuuacauu

SEQ ID NO: 4078809 - RNA, 12 nt, Variola virus
uaagugaugcau

SEQ ID NO: 4078810 - RNA, 12 nt, Variola virus
uaaguguuuaua

SEQ ID NO: 4078811 - RNA, 20 nt, Variola virus
uaaguucauuaucugaaaua

SEQ ID NO: 4078812 - RNA, 22 nt, Variola virus
uaaguucuggaauauuaucauc

SEQ ID NO: 4078813 - RNA, 19 nt, Variola virus
uaaguuggucacauacuuu

SEQ ID NO: 4078814 - RNA, 21 nt, Variola virus
uaaguuguggguaguaucauc

SEQ ID NO: 4078815 - RNA, 13 nt, Variola virus
uaaguuucaagau

SEQ ID NO: 4078816 - RNA, 15 nt, Variola virus
uaauaaaacaaugga

SEQ ID NO: 4078817 - RNA, 13 nt, Variola virus
uaauaaauacaga

SEQ ID NO: 4078818 - RNA, 21 nt, Variola virus
uaauaaauguuucgauuucaa

SEQ ID NO: 4078819 - RNA, 22 nt, Variola virus
uaauaaauugaugacgucaugu

SEQ ID NO: 4078820 - RNA, 18 nt, Variola virus
uaauaaauuuauuauuua

SEQ ID NO: 4078821 - RNA, 16 nt, Variola virus
uaauaauagaaaccau

SEQ ID NO: 4078822 - RNA, 15 nt, Variola virus
uaauaaucucaucau

SEQ ID NO: 4078823 - RNA, 13 nt, Variola virus
uaauaaugauuca

SEQ ID NO: 4078824 - RNA, 14 nt, Variola virus
uaauaauuaaccaa

SEQ ID NO: 4078825 - RNA, 15 nt, Variola virus
uaauaauucauggaa

SEQ ID NO: 4078826 - RNA, 19 nt, Variola virus
uaauaauuuuuuaaauccu

SEQ ID NO: 4078827 - RNA, 20 nt, Variola virus
uaauacaggaauauaaucuu

SEQ ID NO: 4078828 - RNA, 18 nt, Variola virus
uaauacccguuuguuuaa

SEQ ID NO: 4078829 - RNA, 12 nt, Variola virus
uaauacuaaaua

SEQ ID NO: 4078830 - RNA, 19 nt, Variola virus
uaauagaauuuauauaucu

SEQ ID NO: 4078831 - RNA, 19 nt, Variola virus
uaauagacuauauaaaccg

SEQ ID NO: 4078832 - RNA, 22 nt, Variola virus
uaauagcaucaucuuuaucauu

SEQ ID NO: 4078833 - RNA, 21 nt, Variola virus
uaauagcuccccuguuuucau

SEQ ID NO: 4078834 - RNA, 13 nt, Variola virus
uaauaguaggaac

SEQ ID NO: 4078835 - RNA, 24 nt, Variola virus
uaauaguuuccaccaaaagacuau

SEQ ID NO: 4078836 - RNA, 16 nt, Variola virus
uaauauaaaaacauua

SEQ ID NO: 4078837 - RNA, 15 nt, Variola virus
uaauauaaaaacuua

SEQ ID NO: 4078838 - RNA, 16 nt, Variola virus
uaauauaaaagaauau

SEQ ID NO: 4078839 - RNA, 12 nt, Variola virus
uaauauaaacau

SEQ ID NO: 4078840 - RNA, 19 nt, Variola virus
uaauauaaucuagacagau

SEQ ID NO: 4078841 - RNA, 17 nt, Variola virus
uaauauagaaaauucau

SEQ ID NO: 4078842 - RNA, 18 nt, Variola virus
uaauauauugaucauaau

SEQ ID NO: 4078843 - RNA, 17 nt, Variola virus
uaauauccaaucuuauu

SEQ ID NO: 4078844 - RNA, 20 nt, Variola virus
uaauauccucuauuauacau

SEQ ID NO: 4078845 - RNA, 15 nt, Variola virus
uaauaugaguaacau

SEQ ID NO: 4078846 - RNA, 21 nt, Variola virus
uaauauucacagguauuauua

SEQ ID NO: 4078847 - RNA, 20 nt, Variola virus
uaauauucauucaauauuua

SEQ ID NO: 4078848 - RNA, 22 nt, Variola virus
uaauauuggcagcguuguuuau

SEQ ID NO: 4078849 - RNA, 15 nt, Variola virus
uaaucaaaauugucu

SEQ ID NO: 4078850 - RNA, 16 nt, Variola virus
uaaucaagucaauuau

SEQ ID NO: 4078851 - RNA, 23 nt, Variola virus
uaaucauauaggcauugauuuuu

SEQ ID NO: 4078852 - RNA, 19 nt, Variola virus
uaaucauguaaauguuuaa

SEQ ID NO: 4078853 - RNA, 18 nt, Variola virus
uaauccaaugauacuuuu

SEQ ID NO: 4078854 - RNA, 21 nt, Variola virus
uaauccagaauguacacuauu

SEQ ID NO: 4078855 - RNA, 22 nt, Variola virus
uaauccuauucuugaucucauc

SEQ ID NO: 4078856 - RNA, 15 nt, Variola virus
uaaucguuauuauca

SEQ ID NO: 4078857 - RNA, 17 nt, Variola virus
uaaucuauuuuaucauu

SEQ ID NO: 4078858 - RNA, 22 nt, Variola virus
uaaucuuuauuucguuuucgau

SEQ ID NO: 4078859 - RNA, 21 nt, Variola virus
uaaugaauuuagaaaugauug

SEQ ID NO: 4078860 - RNA, 17 nt, Variola virus
uaaugacaauaauuaug

SEQ ID NO: 4078861 - RNA, 22 nt, Variola virus
uaaugacauggacguagauguu

SEQ ID NO: 4078862 - RNA, 18 nt, Variola virus
uaaugauacagaaaaucu

SEQ ID NO: 4078863 - RNA, 22 nt, Variola virus
uaaugccuguaaaaauaaacau

SEQ ID NO: 4078864 - RNA, 18 nt, Variola virus
uaauggagauuuucuauu

SEQ ID NO: 4078865 - RNA, 14 nt, Variola virus
uaaugguguguuau

SEQ ID NO: 4078866 - RNA, 14 nt, Variola virus
uaauguaaaaucau

SEQ ID NO: 4078867 - RNA, 23 nt, Variola virus
uaauguagaaaaucauacagaca

SEQ ID NO: 4078868 - RNA, 15 nt, Variola virus
uaaugucucuauaaa

SEQ ID NO: 4078869 - RNA, 21 nt, Variola virus
uaauuaaaaguuuuacuauau

SEQ ID NO: 4078870 - RNA, 14 nt, Variola virus
uaauuaagaacuau

SEQ ID NO: 4078871 - RNA, 13 nt, Variola virus
uaauuaaugucca

SEQ ID NO: 4078872 - RNA, 16 nt, Variola virus
uaauuaggaucuucua

SEQ ID NO: 4078873 - RNA, 14 nt, Variola virus
uaauucauaagaau

SEQ ID NO: 4078874 - RNA, 14 nt, Variola virus
uaauucauacacca

SEQ ID NO: 4078875 - RNA, 18 nt, Variola virus
uaauuccaaaaauagcau

SEQ ID NO: 4078876 - RNA, 15 nt, Variola virus
uaauuccaaaagaug

SEQ ID NO: 4078877 - RNA, 12 nt, Variola virus
uaauucuaaaac

SEQ ID NO: 4078878 - RNA, 14 nt, Variola virus
uaauucuacaucca

SEQ ID NO: 4078879 - RNA, 21 nt, Variola virus
uaauugaguaaauaaaugcuc

SEQ ID NO: 4078880 - RNA, 19 nt, Variola virus
uaauugccauaauaauuac

SEQ ID NO: 4078881 - RNA, 23 nt, Variola virus
uaauugcucaaauaauacuauau

SEQ ID NO: 4078882 - RNA, 20 nt, Variola virus
uaauuggcuaguauuuaaca

SEQ ID NO: 4078883 - RNA, 18 nt, Variola virus
uaauuguccuauaugucg

SEQ ID NO: 4078884 - RNA, 17 nt, Variola virus
uaauuuaacuauuuuag

SEQ ID NO: 4078885 - RNA, 17 nt, Variola virus
uaauuuauacaaaguau

SEQ ID NO: 4078886 - RNA, 18 nt, Variola virus
uaauuucaggaacaggau

SEQ ID NO: 4078887 - RNA, 16 nt, Variola virus
uaauuugaguaagaau

SEQ ID NO: 4078888 - RNA, 19 nt, Variola virus
uaauuuguaaaccaucuua

SEQ ID NO: 4078889 - RNA, 17 nt, Variola virus
uaauuuguauauacaua

SEQ ID NO: 4078890 - RNA, 14 nt, Variola virus
uaauuuuacuagau

SEQ ID NO: 4078891 - RNA, 17 nt, Variola virus
uaauuuuauauuccucu

SEQ ID NO: 4078892 - RNA, 15 nt, Variola virus
uacaaaauauguucg

SEQ ID NO: 4078893 - RNA, 23 nt, Variola virus
uacaaaauguugauaauccuuga

SEQ ID NO: 4078894 - RNA, 18 nt, Variola virus
uacaaauauuauacauga

SEQ ID NO: 4078895 - RNA, 18 nt, Variola virus
uacaacuggucauagaaa

SEQ ID NO: 4078896 - RNA, 22 nt, Variola virus
uacaagaaauacuuccauccga

SEQ ID NO: 4078897 - RNA, 20 nt, Variola virus
uacaauaaacuccguagaga

SEQ ID NO: 4078898 - RNA, 13 nt, Variola virus
uacaauaaauguu

SEQ ID NO: 4078899 - RNA, 13 nt, Variola virus
uacaauacaugua

SEQ ID NO: 4078900 - RNA, 18 nt, Variola virus
uacaauauucauauccuu

SEQ ID NO: 4078901 - RNA, 13 nt, Variola virus
uacaauauuuccg

SEQ ID NO: 4078902 - RNA, 21 nt, Variola virus
uacaauccuucguuaucucug

SEQ ID NO: 4078903 - RNA, 20 nt, Variola virus
uacaaucguucaaacucguc

SEQ ID NO: 4078904 - RNA, 17 nt, Variola virus
uacacggcauaguuucu

SEQ ID NO: 4078905 - RNA, 12 nt, Variola virus
uacagaaaauau

SEQ ID NO: 4078906 - RNA, 20 nt, Variola virus
uacagagacuuuaucuaaau

SEQ ID NO: 4078907 - RNA, 20 nt, Variola virus
uacaguguaugguacuaaau

SEQ ID NO: 4078908 - RNA, 20 nt, Variola virus
agacguacauggaaaggaaa

SEQ ID NO: 4078909 - RNA, 23 nt, Variola virus
agacguccauaucugauuauuau

SEQ ID NO: 4078910 - RNA, 16 nt, Variola virus
agacguugccaaaaaa

SEQ ID NO: 4078911 - RNA, 13 nt, Variola virus
agacguuguacaa

SEQ ID NO: 4078912 - RNA, 20 nt, Variola virus
agacuaggugcuauggaugg

SEQ ID NO: 4078913 - RNA, 17 nt, Variola virus
agacuccguuccagaua

SEQ ID NO: 4078914 - RNA, 20 nt, Variola virus
agacugugcaucaacaguua

SEQ ID NO: 4078915 - RNA, 17 nt, Variola virus
agacuguuuauacaaga

SEQ ID NO: 4078916 - RNA, 15 nt, Variola virus
agacuuugaaauaua

SEQ ID NO: 4078917 - RNA, 22 nt, Variola virus
agacuuuuguccuaaaauacua

SEQ ID NO: 4078918 - RNA, 15 nt, Variola virus
agagaauuauauauu

SEQ ID NO: 4078919 - RNA, 16 nt, Variola virus
agagaccgauaccuau

SEQ ID NO: 4078920 - RNA, 16 nt, Variola virus
agagauaauagaaaau

SEQ ID NO: 4078921 - RNA, 14 nt, Variola virus
agagauaauauccu

SEQ ID NO: 4078922 - RNA, 15 nt, Variola virus
agagaucuacuggug

SEQ ID NO: 4078923 - RNA, 14 nt, Variola virus
agagaugaaaaauu

SEQ ID NO: 4078924 - RNA, 19 nt, Variola virus
agagauuuaacuguucauc

SEQ ID NO: 4078925 - RNA, 18 nt, Variola virus
agagauuucaacagacug

SEQ ID NO: 4078926 - RNA, 17 nt, Variola virus
agagcuucguauacucu

SEQ ID NO: 4078927 - RNA, 13 nt, Variola virus
agaggaaacuaau

SEQ ID NO: 4078928 - RNA, 16 nt, Variola virus
agaggaguuauuuacu

SEQ ID NO: 4078929 - RNA, 19 nt, Variola virus
agagucauuaaaauaugcg

SEQ ID NO: 4078930 - RNA, 22 nt, Variola virus
agaguccuauauauuugaaaau

SEQ ID NO: 4078931 - RNA, 15 nt, Variola virus
agagugauaauauau

SEQ ID NO: 4078932 - RNA, 13 nt, Variola virus
agaguucauuuau

SEQ ID NO: 4078933 - RNA, 20 nt, Variola virus
agaguuucaaaaauauucau

SEQ ID NO: 4078934 - RNA, 16 nt, Variola virus
agauaaaaaauuauau

SEQ ID NO: 4078935 - RNA, 16 nt, Variola virus
agauaaagaguucuaa

SEQ ID NO: 4078936 - RNA, 17 nt, Variola virus
agauaagaacauaauaa

SEQ ID NO: 4078937 - RNA, 23 nt, Variola virus
agauaauagggagaaaugacauu

SEQ ID NO: 4078938 - RNA, 22 nt, Variola virus
agauacaauggaugauaugaag

SEQ ID NO: 4078939 - RNA, 15 nt, Variola virus
agauacagauguaaa

SEQ ID NO: 4078940 - RNA, 21 nt, Variola virus
agauacaguuaauaucuauau

SEQ ID NO: 4078941 - RNA, 14 nt, Variola virus
agauacauauggau

SEQ ID NO: 4078942 - RNA, 21 nt, Variola virus
agauaccucagcguguuaaaa

SEQ ID NO: 4078943 - RNA, 16 nt, Variola virus
agauacguauuagaua

SEQ ID NO: 4078944 - RNA, 15 nt, Variola virus
agauacgucuauaca

SEQ ID NO: 4078945 - RNA, 12 nt, Variola virus
agauacuugaag

SEQ ID NO: 4078946 - RNA, 14 nt, Variola virus
agauaguaaauaga

SEQ ID NO: 4078947 - RNA, 16 nt, Variola virus
agauaguaaauagaua

SEQ ID NO: 4078948 - RNA, 19 nt, Variola virus
agauaguccagaaauggaa

SEQ ID NO: 4078949 - RNA, 21 nt, Variola virus
agauauaaaaugcguauucca

SEQ ID NO: 4078950 - RNA, 15 nt, Variola virus
agauaucaaaauauu

SEQ ID NO: 4078951 - RNA, 15 nt, Variola virus
agauauccagaguuu

SEQ ID NO: 4078952 - RNA, 16 nt, Variola virus
agauaugccaaaauca

SEQ ID NO: 4078953 - RNA, 22 nt, Variola virus
agauauuaucauuagucauguu

SEQ ID NO: 4078954 - RNA, 13 nt, Variola virus
agauauuaucuau

SEQ ID NO: 4078955 - RNA, 19 nt, Variola virus
agauauuuagcaauugcau

SEQ ID NO: 4078956 - RNA, 20 nt, Variola virus
agaucaaaauuaacaaaauu

SEQ ID NO: 4078957 - RNA, 16 nt, Variola virus
agaucauacagucaca

SEQ ID NO: 4078958 - RNA, 16 nt, Variola virus
agaucccaaaucuucu

SEQ ID NO: 4078959 - RNA, 20 nt, Variola virus
agauccucucuuaaaugaau

SEQ ID NO: 4078960 - RNA, 15 nt, Variola virus
agaucgaaaaaagag

SEQ ID NO: 4078961 - RNA, 22 nt, Variola virus
agaucguuggacauuggauaau

SEQ ID NO: 4078962 - RNA, 19 nt, Variola virus
agaucuacuggugaaaugu

SEQ ID NO: 4078963 - RNA, 19 nt, Variola virus
agaucugaauuaaauaugu

SEQ ID NO: 4078964 - RNA, 16 nt, Variola virus
agaucuuaagaaaauu

SEQ ID NO: 4078965 - RNA, 22 nt, Variola virus
agaugaguccaugacuugguau

SEQ ID NO: 4078966 - RNA, 13 nt, Variola virus
agaugauauguau

SEQ ID NO: 4078967 - RNA, 16 nt, Variola virus
auaauauuaucuauau

SEQ ID NO: 4078968 - RNA, 16 nt, Variola virus
auaauauuaugucuag

SEQ ID NO: 4078969 - RNA, 20 nt, Variola virus
auaauauuuguuaucaugau

SEQ ID NO: 4078970 - RNA, 19 nt, Variola virus
auaaucaaaauugucuaug

SEQ ID NO: 4078971 - RNA, 19 nt, Variola virus
auaaucauaaccauuucua

SEQ ID NO: 4078972 - RNA, 18 nt, Variola virus
auaaucaucgaauacuuu

SEQ ID NO: 4078973 - RNA, 14 nt, Variola virus
auaaucauuacugu

SEQ ID NO: 4078974 - RNA, 16 nt, Variola virus
auaauccagaauguac

SEQ ID NO: 4078975 - RNA, 18 nt, Variola virus
auaauccgauauaugaug

SEQ ID NO: 4078976 - RNA, 19 nt, Variola virus
auaauccggauguugugua

SEQ ID NO: 4078977 - RNA, 20 nt, Variola virus
auaauccugugcauaaauua

SEQ ID NO: 4078978 - RNA, 17 nt, Variola virus
auaauccuuauacaucu

SEQ ID NO: 4078979 - RNA, 15 nt, Variola virus
auaaucguuaauauu

SEQ ID NO: 4078980 - RNA, 23 nt, Variola virus
auaaucuaguaaaacuuucuagu

SEQ ID NO: 4078981 - RNA, 14 nt, Variola virus
auaaugaacauagu

SEQ ID NO: 4078982 - RNA, 20 nt, Variola virus
auaaugauacgauacuauau

SEQ ID NO: 4078983 - RNA, 17 nt, Variola virus
auaaugaugaccuauau

SEQ ID NO: 4078984 - RNA, 20 nt, Variola virus
auaauggcgcuaucuuuuaa

SEQ ID NO: 4078985 - RNA, 20 nt, Variola virus
auaauggucgaacacaguau

SEQ ID NO: 4078986 - RNA, 16 nt, Variola virus
auaauggugcuuguau

SEQ ID NO: 4078987 - RNA, 23 nt, Variola virus
auaauuacgagucucguguguaa

SEQ ID NO: 4078988 - RNA, 15 nt, Variola virus
auaauuuaacauuuu

SEQ ID NO: 4078989 - RNA, 19 nt, Variola virus
auaauuuaguguuuaaauu

SEQ ID NO: 4078990 - RNA, 21 nt, Variola virus
auaauuuugauuguacaccca

SEQ ID NO: 4078991 - RNA, 16 nt, Variola virus
auaauuuuuauguuuu

SEQ ID NO: 4078992 - RNA, 20 nt, Variola virus
auacaaaauuugcaucuaca

SEQ ID NO: 4078993 - RNA, 14 nt, Variola virus
auacaaauuuuacu

SEQ ID NO: 4078994 - RNA, 16 nt, Variola virus
auacaacuaaggagaa

SEQ ID NO: 4078995 - RNA, 16 nt, Variola virus
auacaauaaauguuua

SEQ ID NO: 4078996 - RNA, 16 nt, Variola virus
auacacaugauugaca

SEQ ID NO: 4078997 - RNA, 16 nt, Variola virus
auacacauuuaauaaa

SEQ ID NO: 4078998 - RNA, 19 nt, Variola virus
auacacguauaaaaaauau

SEQ ID NO: 4078999 - RNA, 18 nt, Variola virus
auacacuaaguauauaca

SEQ ID NO: 4079000 - RNA, 18 nt, Variola virus
auacacuguuuaaaauua

SEQ ID NO: 4079001 - RNA, 17 nt, Variola virus
auacagaaggaaacuuc

SEQ ID NO: 4079002 - RNA, 18 nt, Variola virus
auacagacaauugacaaa

SEQ ID NO: 4079003 - RNA, 15 nt, Variola virus
auacaguaaguacau

SEQ ID NO: 4079004 - RNA, 21 nt, Variola virus
auacaguguauguaaaaaugu

SEQ ID NO: 4079005 - RNA, 14 nt, Variola virus
auacauaaagaacg

SEQ ID NO: 4079006 - RNA, 20 nt, Variola virus
auacauggggaucugauggu

SEQ ID NO: 4079007 - RNA, 17 nt, Variola virus
auacauucgaaaaaucu

SEQ ID NO: 4079008 - RNA, 15 nt, Variola virus
auacauuuucaaaua

SEQ ID NO: 4079009 - RNA, 12 nt, Variola virus
auaccaaacaua

SEQ ID NO: 4079010 - RNA, 13 nt, Variola virus
auaccauguguau

SEQ ID NO: 4079011 - RNA, 16 nt, Variola virus
auaccuuguaauuaaa

SEQ ID NO: 4079012 - RNA, 17 nt, Variola virus
auaccuuuccuggaaua

SEQ ID NO: 4079013 - RNA, 18 nt, Variola virus
auacgaagaaaaaguaaa

SEQ ID NO: 4079014 - RNA, 20 nt, Variola virus
auacgaagggauugaaaaua

SEQ ID NO: 4079015 - RNA, 16 nt, Variola virus
auacgaggaugaugau

SEQ ID NO: 4079016 - RNA, 14 nt, Variola virus
auacgcguucucaa

SEQ ID NO: 4079017 - RNA, 14 nt, Variola virus
auacguauccauga

SEQ ID NO: 4079018 - RNA, 13 nt, Variola virus
auacgucuuuauu

SEQ ID NO: 4079019 - RNA, 18 nt, Variola virus
auacgugagaauauacua

SEQ ID NO: 4079020 - RNA, 12 nt, Variola virus
auacuaaauaua

SEQ ID NO: 4079021 - RNA, 22 nt, Variola virus
auacuagaguuguuaaaguuaa

SEQ ID NO: 4079022 - RNA, 15 nt, Variola virus
auacuaguuuucuaa

SEQ ID NO: 4079023 - RNA, 13 nt, Variola virus
auacuaucaaaau

SEQ ID NO: 4079024 - RNA, 22 nt, Variola virus
auacuauccaucagaauguuuc

SEQ ID NO: 4079025 - RNA, 14 nt, Variola virus
auacuauuguacau

SEQ ID NO: 4079026 - RNA, 20 nt, Variola virus
auacucaagauauuuguuaa

SEQ ID NO: 4079027 - RNA, 18 nt, Variola virus
auacucccacaaauacug

SEQ ID NO: 4079028 - RNA, 21 nt, Variola virus
auacucuacagaguugauugu

SEQ ID NO: 4079029 - RNA, 21 nt, Variola virus
auacuguagaugguucuuuaa

SEQ ID NO: 4079030 - RNA, 16 nt, Variola virus
auacugucaacuauag

SEQ ID NO: 4079031 - RNA, 20 nt, Variola virus
auacuuaaaaaaugaaaaua

SEQ ID NO: 4079032 - RNA, 14 nt, Variola virus
auacuuaaaaugua

SEQ ID NO: 4079033 - RNA, 22 nt, Variola virus
auacuuuaacaucacuaauauc

SEQ ID NO: 4079034 - RNA, 14 nt, Variola virus
auacuuuaugaaug

SEQ ID NO: 4079035 - RNA, 17 nt, Variola virus
auacuuugguaaauguu

SEQ ID NO: 4079036 - RNA, 14 nt, Variola virus
auacuuuguaacua

SEQ ID NO: 4079037 - RNA, 18 nt, Variola virus
auacuuuguaauauaaug

SEQ ID NO: 4079038 - RNA, 14 nt, Variola virus
auagaaaaugaauc

SEQ ID NO: 4079039 - RNA, 15 nt, Variola virus
auagaaauuuuggua

SEQ ID NO: 4079040 - RNA, 18 nt, Variola virus
auagaacaauauaaugua

SEQ ID NO: 4079041 - RNA, 20 nt, Variola virus
auagaacgaaguaaaaaguu

SEQ ID NO: 4079042 - RNA, 15 nt, Variola virus
auagaauuuauauau

SEQ ID NO: 4079043 - RNA, 22 nt, Variola virus
auagaccgucuacaagaaacuu

SEQ ID NO: 4079044 - RNA, 17 nt, Variola virus
auagagaguucauuuau

SEQ ID NO: 4079045 - RNA, 14 nt, Variola virus
auagaggaugaauu

SEQ ID NO: 4079046 - RNA, 17 nt, Variola virus
auagauaaguauuuacu

SEQ ID NO: 4079047 - RNA, 17 nt, Variola virus
auagauaauacaaaauu

SEQ ID NO: 4079048 - RNA, 16 nt, Variola virus
auagauaaugauauau

SEQ ID NO: 4079049 - RNA, 16 nt, Variola virus
auagauaauuguaaca

SEQ ID NO: 4079050 - RNA, 14 nt, Variola virus
auagauaucaaaau

SEQ ID NO: 4079051 - RNA, 16 nt, Variola virus
auagaucuuucauuau

SEQ ID NO: 4079052 - RNA, 13 nt, Variola virus
auagaugaaaauc

SEQ ID NO: 4079053 - RNA, 12 nt, Variola virus
auagaugaaugu

SEQ ID NO: 4079054 - RNA, 21 nt, Variola virus
auagaugagguacuauuuuau

SEQ ID NO: 4079055 - RNA, 21 nt, Variola virus
auagaugauggaagacaaguu

SEQ ID NO: 4079056 - RNA, 16 nt, Variola virus
auagaugccagauuac

SEQ ID NO: 4079057 - RNA, 13 nt, Variola virus
auagauguauaua

SEQ ID NO: 4079058 - RNA, 19 nt, Variola virus
auagauuucgaaaauacua

SEQ ID NO: 4079059 - RNA, 15 nt, Variola virus
auagcaucauugcua

SEQ ID NO: 4079060 - RNA, 14 nt, Variola virus
auagcuacaguaaa

SEQ ID NO: 4079061 - RNA, 12 nt, Variola virus
auagcuaucaag

SEQ ID NO: 4079062 - RNA, 17 nt, Variola virus
auagcuuuuauuuccac

SEQ ID NO: 4079063 - RNA, 15 nt, Variola virus
auaggcguacaaaag

SEQ ID NO: 4079064 - RNA, 16 nt, Variola virus
auagggaaucauauau

SEQ ID NO: 4079065 - RNA, 14 nt, Variola virus
auaguaaaauaaag

SEQ ID NO: 4079066 - RNA, 14 nt, Variola virus
auaguaaaauauua

SEQ ID NO: 4079067 - RNA, 16 nt, Variola virus
auaguacuaaagacua

SEQ ID NO: 4079068 - RNA, 18 nt, Variola virus
auaguaguacacaacaug

SEQ ID NO: 4079069 - RNA, 22 nt, Variola virus
auaguauauacguuauugucaa

SEQ ID NO: 4079070 - RNA, 16 nt, Variola virus
auaguauaucuacaca

SEQ ID NO: 4079071 - RNA, 23 nt, Variola virus
auaguauggcauucauugucuaa

SEQ ID NO: 4079072 - RNA, 13 nt, Variola virus
auaguaugucuua

SEQ ID NO: 4079073 - RNA, 15 nt, Variola virus
auaguuauaucacau

SEQ ID NO: 4079074 - RNA, 22 nt, Variola virus
auaguucguguacuagucauaa

SEQ ID NO: 4079075 - RNA, 19 nt, Variola virus
auaguuugggaaaagaaau

SEQ ID NO: 4079076 - RNA, 14 nt, Variola virus
auaguuuuggauca

SEQ ID NO: 4079077 - RNA, 13 nt, Variola virus
auauaaaaaauuu

SEQ ID NO: 4079078 - RNA, 16 nt, Variola virus
auauaaaauaacuaca

SEQ ID NO: 4079079 - RNA, 13 nt, Variola virus
auauaacauagaa

SEQ ID NO: 4079080 - RNA, 15 nt, Variola virus
auauaaguaauacau

SEQ ID NO: 4079081 - RNA, 18 nt, Variola virus
auauaauacuuaaaaaug

SEQ ID NO: 4079082 - RNA, 14 nt, Variola virus
auauaauccaucaa

SEQ ID NO: 4079083 - RNA, 12 nt, Variola virus
auauaaugaauu

SEQ ID NO: 4079084 - RNA, 18 nt, Variola virus
auauaauuaucacauauu

SEQ ID NO: 4079085 - RNA, 21 nt, Variola virus
auauacaacucucuaauacga

SEQ ID NO: 4079086 - RNA, 17 nt, Variola virus
auauacagaauuuguaa

SEQ ID NO: 4079087 - RNA, 14 nt, Variola virus
auauacagucuuaa

SEQ ID NO: 4079088 - RNA, 20 nt, Variola virus
auauagauuuuuuaaaggau

SEQ ID NO: 4079089 - RNA, 13 nt, Variola virus
auauagcauagau

SEQ ID NO: 4079090 - RNA, 21 nt, Variola virus
auauagcuuucacucauauaa

SEQ ID NO: 4079091 - RNA, 11 nt, Variola virus
auauaggaaaa

SEQ ID NO: 4079092 - RNA, 19 nt, Variola virus
auauaggaccacuagcaaa

SEQ ID NO: 4079093 - RNA, 17 nt, Variola virus
auauagggaaucauaua

SEQ ID NO: 4079094 - RNA, 13 nt, Variola virus
cuauauuguauuc

SEQ ID NO: 4079095 - RNA, 21 nt, Variola virus
cuaucaaccacauaauacaau

SEQ ID NO: 4079096 - RNA, 23 nt, Variola virus
cuaucagagcuaccgaaggagau

SEQ ID NO: 4079097 - RNA, 16 nt, Variola virus
cuaucagugaucuguu

SEQ ID NO: 4079098 - RNA, 18 nt, Variola virus
cuaucauuaccucaugaa

SEQ ID NO: 4079099 - RNA, 13 nt, Variola virus
cuaucauuuugag

SEQ ID NO: 4079100 - RNA, 12 nt, Variola virus
cuauccaauaaa

SEQ ID NO: 4079101 - RNA, 21 nt, Variola virus
cuaugaauaccauuaaacaau

SEQ ID NO: 4079102 - RNA, 17 nt, Variola virus
cuaugagugaaggagac

SEQ ID NO: 4079103 - RNA, 14 nt, Variola virus
cuaugcuauuugcg

SEQ ID NO: 4079104 - RNA, 22 nt, Variola virus
cuauguauucagaauuaauaga

SEQ ID NO: 4079105 - RNA, 16 nt, Variola virus
cuauguuucaguuuaa

SEQ ID NO: 4079106 - RNA, 17 nt, Variola virus
cuauuaguuguuccaau

SEQ ID NO: 4079107 - RNA, 22 nt, Variola virus
cuauuauaccagaauuaauagg

SEQ ID NO: 4079108 - RNA, 19 nt, Variola virus
cuauuauuugcgaggauga

SEQ ID NO: 4079109 - RNA, 14 nt, Variola virus
cuauucauguaaug

SEQ ID NO: 4079110 - RNA, 15 nt, Variola virus
cuauugccaaauguu

SEQ ID NO: 4079111 - RNA, 21 nt, Variola virus
cuauuguuaaucaugccacca

SEQ ID NO: 4079112 - RNA, 14 nt, Variola virus
cuauuguuuggaau

SEQ ID NO: 4079113 - RNA, 16 nt, Variola virus
cuauuuguauaauaau

SEQ ID NO: 4079114 - RNA, 20 nt, Variola virus
cuauuuuaacaaagcaucua

SEQ ID NO: 4079115 - RNA, 14 nt, Variola virus
cuauuuuuaauaua

SEQ ID NO: 4079116 - RNA, 13 nt, Variola virus
cucaaacauccuc

SEQ ID NO: 4079117 - RNA, 20 nt, Variola virus
cucaagauuuuaaaaaacug

SEQ ID NO: 4079118 - RNA, 17 nt, Variola virus
cucaauaaaaaauuaau

SEQ ID NO: 4079119 - RNA, 22 nt, Variola virus
cucagauucaguuucucaucuu

SEQ ID NO: 4079120 - RNA, 14 nt, Variola virus
cucauaauccauuu

SEQ ID NO: 4079121 - RNA, 19 nt, Variola virus
cucauaauguaaagauauu

SEQ ID NO: 4079122 - RNA, 18 nt, Variola virus
cucauauaacuucuagau

SEQ ID NO: 4079123 - RNA, 14 nt, Variola virus
cucaucaucuguuu

SEQ ID NO: 4079124 - RNA, 18 nt, Variola virus
cucaucggaucuguaaaa

SEQ ID NO: 4079125 - RNA, 15 nt, Variola virus
cucaugacuucauug

SEQ ID NO: 4079126 - RNA, 15 nt, Variola virus
cucaugucaaauugu

SEQ ID NO: 4079127 - RNA, 16 nt, Variola virus
cucauuaaaacuucua

SEQ ID NO: 4079128 - RNA, 14 nt, Variola virus
cucauuauuuccca

SEQ ID NO: 4079129 - RNA, 14 nt, Variola virus
cuccaauacuaauu

SEQ ID NO: 4079130 - RNA, 19 nt, Variola virus
cuccagaugauguuacaau

SEQ ID NO: 4079131 - RNA, 21 nt, Variola virus
cuccaucggcuuuaacaauug

SEQ ID NO: 4079132 - RNA, 14 nt, Variola virus
cuccccacauuuca

SEQ ID NO: 4079133 - RNA, 12 nt, Variola virus
cucccuuuagau

SEQ ID NO: 4079134 - RNA, 21 nt, Variola virus
cuccgcaauacauuucucaaa

SEQ ID NO: 4079135 - RNA, 19 nt, Variola virus
cuccguuuccauuaccauc

SEQ ID NO: 4079136 - RNA, 21 nt, Variola virus
cuccucauuacguuucauuuu

SEQ ID NO: 4079137 - RNA, 15 nt, Variola virus
cucgugcagauaucc

SEQ ID NO: 4079138 - RNA, 20 nt, Variola virus
cucguuaaacgccuuuagaa

SEQ ID NO: 4079139 - RNA, 16 nt, Variola virus
cucguugguauuugaa

SEQ ID NO: 4079140 - RNA, 11 nt, Variola virus
cucuaaaugag

SEQ ID NO: 4079141 - RNA, 12 nt, Variola virus
cucuaaaugagu

SEQ ID NO: 4079142 - RNA, 21 nt, Variola virus
cucuaaaugagucuacugcua

SEQ ID NO: 4079143 - RNA, 14 nt, Variola virus
cucuaacagauauu

SEQ ID NO: 4079144 - RNA, 19 nt, Variola virus
cucuacaaaaugucaugau

SEQ ID NO: 4079145 - RNA, 14 nt, Variola virus
cucuacaaauaucu

SEQ ID NO: 4079146 - RNA, 15 nt, Variola virus
cucuauaaaauacua

SEQ ID NO: 4079147 - RNA, 23 nt, Variola virus
cucuauaaaauacuaaugcaucu

SEQ ID NO: 4079148 - RNA, 22 nt, Variola virus
cucuauaguuuguuuucauuau

SEQ ID NO: 4079149 - RNA, 20 nt, Variola virus
cucuaugacuucaucaucug

SEQ ID NO: 4079150 - RNA, 19 nt, Variola virus
cucuauuggauauggauuu

SEQ ID NO: 4079151 - RNA, 22 nt, Variola virus
cucuauuggauauggauuucca

SEQ ID NO: 4079152 - RNA, 11 nt, Variola virus
cucuauuuugg

SEQ ID NO: 4079153 - RNA, 14 nt, Variola virus
cucucuaucucuua

SEQ ID NO: 4079154 - RNA, 16 nt, Variola virus
cucucuuaauuucaga

SEQ ID NO: 4079155 - RNA, 15 nt, Variola virus
cucuggagaaaagau

SEQ ID NO: 4079156 - RNA, 15 nt, Variola virus
cucuguuucuguauc

SEQ ID NO: 4079157 - RNA, 15 nt, Variola virus
cucuuaauuauaacg

SEQ ID NO: 4079158 - RNA, 20 nt, Variola virus
cugaaaaagauaucagagaa

SEQ ID NO: 4079159 - RNA, 17 nt, Variola virus
cugaaaauaaagauaaa

SEQ ID NO: 4079160 - RNA, 16 nt, Variola virus
cugaaauaauuagaac

SEQ ID NO: 4079161 - RNA, 22 nt, Variola virus
cugaagaagagguaagauaucu

SEQ ID NO: 4079162 - RNA, 20 nt, Variola virus
cugaauaaucguuauuauca

SEQ ID NO: 4079163 - RNA, 17 nt, Variola virus
cugaauagcaaaauuuu

SEQ ID NO: 4079164 - RNA, 17 nt, Variola virus
cugaauauagaacauca

SEQ ID NO: 4079165 - RNA, 16 nt, Variola virus
cugaauuuauuucaga

SEQ ID NO: 4079166 - RNA, 18 nt, Variola virus
cugacgauauuagaugau

SEQ ID NO: 4079167 - RNA, 23 nt, Variola virus
cugagauuuguuuuguuaaacaa

SEQ ID NO: 4079168 - RNA, 22 nt, Variola virus
cugaggauuuacuaaguaauua

SEQ ID NO: 4079169 - RNA, 20 nt, Variola virus
cugauaaguucuuuauacag

SEQ ID NO: 4079170 - RNA, 17 nt, Variola virus
cugauacaauuagauau

SEQ ID NO: 4079171 - RNA, 15 nt, Variola virus
cugauacgucauuaa

SEQ ID NO: 4079172 - RNA, 18 nt, Variola virus
cugauacguuauaaaggu

SEQ ID NO: 4079173 - RNA, 18 nt, Variola virus
cugauagcaauucaugua

SEQ ID NO: 4079174 - RNA, 13 nt, Variola virus
cugauauucagaa

SEQ ID NO: 4079175 - RNA, 20 nt, Variola virus
cugauuaauaagaucuucua

SEQ ID NO: 4079176 - RNA, 14 nt, Variola virus
cugauugugucuca

SEQ ID NO: 4079177 - RNA, 15 nt, Variola virus
cugauuuauuuccua

SEQ ID NO: 4079178 - RNA, 18 nt, Variola virus
cugauuuugcauguagug

SEQ ID NO: 4079179 - RNA, 21 nt, Variola virus
cugcggauauaaagucaucgu

SEQ ID NO: 4079180 - RNA, 14 nt, Variola virus
cugcuauaauuaag

SEQ ID NO: 4079181 - RNA, 16 nt, Variola virus
cugcuauauggauauu

SEQ ID NO: 4079182 - RNA, 19 nt, Variola virus
cugcuuuagaugauuuugg

SEQ ID NO: 4079183 - RNA, 13 nt, Variola virus
cugcuuucuuuua

SEQ ID NO: 4079184 - RNA, 14 nt, Variola virus
cuggaaaaaguugu

SEQ ID NO: 4079185 - RNA, 13 nt, Variola virus
cuggaauuucagu

SEQ ID NO: 4079186 - RNA, 17 nt, Variola virus
cuggagaagacacacuu

SEQ ID NO: 4079187 - RNA, 14 nt, Variola virus
cuggauauuacaaa

SEQ ID NO: 4079188 - RNA, 20 nt, Variola virus
cuggcgaauauuaaaacuau

SEQ ID NO: 4079189 - RNA, 19 nt, Variola virus
cuggcuauuucaaaauaaa

SEQ ID NO: 4079190 - RNA, 17 nt, Variola virus
cugggguaaaguaagua

SEQ ID NO: 4079191 - RNA, 20 nt, Variola virus
cuggugauuggguagaagua

SEQ ID NO: 4079192 - RNA, 20 nt, Variola virus
cugguguuaguuuauuccaa

SEQ ID NO: 4079193 - RNA, 15 nt, Variola virus
cuguaaaaaacauca

SEQ ID NO: 4079194 - RNA, 12 nt, Variola virus
cuguaaacauuu

SEQ ID NO: 4079195 - RNA, 21 nt, Variola virus
cuguaaauagaauaguauaau

SEQ ID NO: 4079196 - RNA, 18 nt, Variola virus
cuguaacuaugaauucua

SEQ ID NO: 4079197 - RNA, 16 nt, Variola virus
cuguaauuacauacuu

SEQ ID NO: 4079198 - RNA, 21 nt, Variola virus
cuguacaaauguuaaacauua

SEQ ID NO: 4079199 - RNA, 22 nt, Variola virus
cuguacaauaguuuuuaucuau

SEQ ID NO: 4079200 - RNA, 18 nt, Variola virus
cuguagaagcuaacauac

SEQ ID NO: 4079201 - RNA, 19 nt, Variola virus
cuguagaauucgaaggaag

SEQ ID NO: 4079202 - RNA, 21 nt, Variola virus
cuguagauaaacuaggauuua

SEQ ID NO: 4079203 - RNA, 19 nt, Variola virus
cuguauaucucauuaagcu

SEQ ID NO: 4079204 - RNA, 16 nt, Variola virus
cuguauuaaagauauu

SEQ ID NO: 4079205 - RNA, 20 nt, Variola virus
cuguauuguuaauagauaua

SEQ ID NO: 4079206 - RNA, 12 nt, Variola virus
cugucaacaaug

SEQ ID NO: 4079207 - RNA, 14 nt, Variola virus
cugucaauaagaca

SEQ ID NO: 4079208 - RNA, 24 nt, Variola virus
cugucuaucaagauccaugauucu

SEQ ID NO: 4079209 - RNA, 15 nt, Variola virus
cugugcaucaacagu

SEQ ID NO: 4079210 - RNA, 11 nt, Variola virus
cuguguucaag

SEQ ID NO: 4079211 - RNA, 12 nt, Variola virus
cuuaaaauguaa

SEQ ID NO: 4079212 - RNA, 17 nt, Variola virus
cuuaacaaguucucaau

SEQ ID NO: 4079213 - RNA, 19 nt, Variola virus
cuuaacaugagacauaaau

SEQ ID NO: 4079214 - RNA, 22 nt, Variola virus
cuuaacgaacgcggugugaaug

SEQ ID NO: 4079215 - RNA, 17 nt, Variola virus
cuuaacuuuuucuuucu

SEQ ID NO: 4079216 - RNA, 18 nt, Variola virus
cuuaauauugccauaauu

SEQ ID NO: 4079217 - RNA, 12 nt, Variola virus
cuuaaucaugug

SEQ ID NO: 4079218 - RNA, 13 nt, Variola virus
cuuaaugcauuuu

SEQ ID NO: 4079219 - RNA, 13 nt, Variola virus
cuuaccccuugau

SEQ ID NO: 4079220 - RNA, 13 nt, Variola virus
gcgacuaaaucag

SEQ ID NO: 4079221 - RNA, 15 nt, Variola virus
gcgauucagaacaca

SEQ ID NO: 4079222 - RNA, 13 nt, Variola virus
gcgauugauuuug

SEQ ID NO: 4079223 - RNA, 16 nt, Variola virus
gcgcuagucaucucau

SEQ ID NO: 4079224 - RNA, 22 nt, Variola virus
gcguaaaagucaaauuagauuu

SEQ ID NO: 4079225 - RNA, 21 nt, Variola virus
gcguauggcaaacgaaggaaa

SEQ ID NO: 4079226 - RNA, 15 nt, Variola virus
gcguucauuggaaaa

SEQ ID NO: 4079227 - RNA, 23 nt, Variola virus
gcguuccuugugcuuaauguuuc

SEQ ID NO: 4079228 - RNA, 16 nt, Variola virus
gcuaauaaauaaugau

SEQ ID NO: 4079229 - RNA, 14 nt, Variola virus
gcuaauauauugau

SEQ ID NO: 4079230 - RNA, 17 nt, Variola virus
gcuaauuauuucaucca

SEQ ID NO: 4079231 - RNA, 18 nt, Variola virus
gcuaauuuuuguaaauaa

SEQ ID NO: 4079232 - RNA, 21 nt, Variola virus
gcuacucguuuggaaucacaa

SEQ ID NO: 4079233 - RNA, 24 nt, Variola virus
gcuagagauaaucagauuagcuuu

SEQ ID NO: 4079234 - RNA, 14 nt, Variola virus
gcuauaaaugaauu

SEQ ID NO: 4079235 - RNA, 17 nt, Variola virus
gcuauaacuugcuucaa

SEQ ID NO: 4079236 - RNA, 14 nt, Variola virus
gcuauaaugaugau

SEQ ID NO: 4079237 - RNA, 23 nt, Variola virus
gcuauagcauuguuauguauuuc

SEQ ID NO: 4079238 - RNA, 13 nt, Variola virus
gcuauauccacca

SEQ ID NO: 4079239 - RNA, 21 nt, Variola virus
gcuaucguagaugugauuuuu

SEQ ID NO: 4079240 - RNA, 14 nt, Variola virus
gcuaugagggaaaa

SEQ ID NO: 4079241 - RNA, 13 nt, Variola virus
gcuauuacuuauu

SEQ ID NO: 4079242 - RNA, 18 nt, Variola virus
gcucaaagucgaauuaga

SEQ ID NO: 4079243 - RNA, 19 nt, Variola virus
gcucccgccgauccuguau

SEQ ID NO: 4079244 - RNA, 18 nt, Variola virus
gcucgaaucauacaaaaa

SEQ ID NO: 4079245 - RNA, 12 nt, Variola virus
gcucuagauauu

SEQ ID NO: 4079246 - RNA, 22 nt, Variola virus
gcucuagauauuaguauuuuua

SEQ ID NO: 4079247 - RNA, 17 nt, Variola virus
gcucuuucgaugauaau

SEQ ID NO: 4079248 - RNA, 17 nt, Variola virus
gcuggaaaauaaaucac

SEQ ID NO: 4079249 - RNA, 23 nt, Variola virus
gcuuaaaggaagaauaucauauu

SEQ ID NO: 4079250 - RNA, 21 nt, Variola virus
gcuucaauuacaauagauauc

SEQ ID NO: 4079251 - RNA, 20 nt, Variola virus
gcuucagaauauucuuuucu

SEQ ID NO: 4079252 - RNA, 22 nt, Variola virus
gcuuccaggcuaucaaauggau

SEQ ID NO: 4079253 - RNA, 16 nt, Variola virus
gcuugugauuuuuucu

SEQ ID NO: 4079254 - RNA, 22 nt, Variola virus
gcuuuugcgaucaauaaaugga

SEQ ID NO: 4079255 - RNA, 19 nt, Variola virus
ggaaaaaguguugaagaua

SEQ ID NO: 4079256 - RNA, 19 nt, Variola virus
ggaaaaucugaagaagaua

SEQ ID NO: 4079257 - RNA, 17 nt, Variola virus
ggaaaguucaaaaaguc

SEQ ID NO: 4079258 - RNA, 20 nt, Variola virus
ggaacuauuccguauuuauc

SEQ ID NO: 4079259 - RNA, 11 nt, Variola virus
ggaauauacaa

SEQ ID NO: 4079260 - RNA, 17 nt, Variola virus
ggacacgacauagagag

SEQ ID NO: 4079261 - RNA, 14 nt, Variola virus
ggagaauguuuccc

SEQ ID NO: 4079262 - RNA, 13 nt, Variola virus
ggaggaauugaua

SEQ ID NO: 4079263 - RNA, 16 nt, Variola virus
ggaguaucuauuuuaa

SEQ ID NO: 4079264 - RNA, 14 nt, Variola virus
ggaguuauaugaau

SEQ ID NO: 4079265 - RNA, 16 nt, Variola virus
ggauaaccuagaaaau

SEQ ID NO: 4079266 - RNA, 14 nt, Variola virus
ggauauguuuuuaa

SEQ ID NO: 4079267 - RNA, 18 nt, Variola virus
ggaugaaucauuggcaac

SEQ ID NO: 4079268 - RNA, 20 nt, Variola virus
ggauguuguucgauugauuu

SEQ ID NO: 4079269 - RNA, 10 nt, Variola virus
ggauuucaua

SEQ ID NO: 4079270 - RNA, 15 nt, Variola virus
ggauuucauauaaga

SEQ ID NO: 4079271 - RNA, 21 nt, Variola virus
ggcaauaauugcgaauguuuu

SEQ ID NO: 4079272 - RNA, 18 nt, Variola virus
ggcuagucaagaugauga

SEQ ID NO: 4079273 - RNA, 19 nt, Variola virus
gggaaaaagcucaauauug

SEQ ID NO: 4079274 - RNA, 17 nt, Variola virus
gggcaugcggaagacaa

SEQ ID NO: 4079275 - RNA, 13 nt, Variola virus
gguaagaaaguaa

SEQ ID NO: 4079276 - RNA, 14 nt, Variola virus
gguaaguucauuau

SEQ ID NO: 4079277 - RNA, 11 nt, Variola virus
gguaauaacua

SEQ ID NO: 4079278 - RNA, 19 nt, Variola virus
gguaauagauuuuucauau

SEQ ID NO: 4079279 - RNA, 17 nt, Variola virus
gguauacuaguagguaa

SEQ ID NO: 4079280 - RNA, 20 nt, Variola virus
gguauugucugagaaguuua

SEQ ID NO: 4079281 - RNA, 13 nt, Variola virus
gguauuucaucau

SEQ ID NO: 4079282 - RNA, 20 nt, Variola virus
ggucaucugguuuaggaaag

SEQ ID NO: 4079283 - RNA, 15 nt, Variola virus
ggugaauccaucucu

SEQ ID NO: 4079284 - RNA, 16 nt, Variola virus
gguggccaaauuuauu

SEQ ID NO: 4079285 - RNA, 17 nt, Variola virus
gguguaggaguacauac

SEQ ID NO: 4079286 - RNA, 16 nt, Variola virus
gguuaacaucuuauaa

SEQ ID NO: 4079287 - RNA, 19 nt, Variola virus
gguuaacucuuucuuuuga

SEQ ID NO: 4079288 - RNA, 20 nt, Variola virus
gguuaauguuguauuucauu

SEQ ID NO: 4079289 - RNA, 14 nt, Variola virus
gguucauuggaauc

SEQ ID NO: 4079290 - RNA, 18 nt, Variola virus
gguucccaauuccaaaga

SEQ ID NO: 4079291 - RNA, 23 nt, Variola virus
guaaaaagacgaagcuaauuaga

SEQ ID NO: 4079292 - RNA, 15 nt, Variola virus
guaaaaauaaaucac

SEQ ID NO: 4079293 - RNA, 23 nt, Variola virus
guaaaaguacagaauuaauuaga

SEQ ID NO: 4079294 - RNA, 14 nt, Variola virus
guaaaauauucuuu

SEQ ID NO: 4079295 - RNA, 19 nt, Variola virus
guaaaauuccuaaauuagu

SEQ ID NO: 4079296 - RNA, 21 nt, Variola virus
guaaacaauacuucugaagaa

SEQ ID NO: 4079297 - RNA, 13 nt, Variola virus
guaaagauaucua

SEQ ID NO: 4079298 - RNA, 14 nt, Variola virus
guaaauaacaauga

SEQ ID NO: 4079299 - RNA, 13 nt, Variola virus
guaaauaauacau

SEQ ID NO: 4079300 - RNA, 22 nt, Variola virus
guaaauagaauaguauaauguc

SEQ ID NO: 4079301 - RNA, 17 nt, Variola virus
guaaauugguacauaga

SEQ ID NO: 4079302 - RNA, 20 nt, Variola virus
guaacaacuaacgauaaaaa

SEQ ID NO: 4079303 - RNA, 19 nt, Variola virus
guaacauccucgugauuua

SEQ ID NO: 4079304 - RNA, 15 nt, Variola virus
guaacgcguggaaaa

SEQ ID NO: 4079305 - RNA, 22 nt, Variola virus
guaacguauacauuuaaugaau

SEQ ID NO: 4079306 - RNA, 17 nt, Variola virus
guaacucugauaaucuc

SEQ ID NO: 4079307 - RNA, 20 nt, Variola virus
guaauaucaugucuaaugau

SEQ ID NO: 4079308 - RNA, 22 nt, Variola virus
guaauauccucuauuauacauu

SEQ ID NO: 4079309 - RNA, 16 nt, Variola virus
guaauaucuuaaauaa

SEQ ID NO: 4079310 - RNA, 17 nt, Variola virus
guaaucaugaaauuaag

SEQ ID NO: 4079311 - RNA, 17 nt, Variola virus
guaaucauguaaauguu

SEQ ID NO: 4079312 - RNA, 20 nt, Variola virus
guaauguucucgaugaugau

SEQ ID NO: 4079313 - RNA, 15 nt, Variola virus
guaauuaauagauug

SEQ ID NO: 4079314 - RNA, 17 nt, Variola virus
guaauuggaaaauuagu

SEQ ID NO: 4079315 - RNA, 17 nt, Variola virus
guaauuuaacuauuuua

SEQ ID NO: 4079316 - RNA, 20 nt, Variola virus
guaauuucacgaauuugaua

SEQ ID NO: 4079317 - RNA, 22 nt, Variola virus
guacaaauucuuggauauauga

SEQ ID NO: 4079318 - RNA, 22 nt, Variola virus
guacaacaucuaacuauaugau

SEQ ID NO: 4079319 - RNA, 15 nt, Variola virus
guacaauaccuuugu

SEQ ID NO: 4079320 - RNA, 22 nt, Variola virus
guacacaacauguuauaacuaa

SEQ ID NO: 4079321 - RNA, 20 nt, Variola virus
guacacaauaucauaaacaa

SEQ ID NO: 4079322 - RNA, 12 nt, Variola virus
guacauauuaau

SEQ ID NO: 4079323 - RNA, 16 nt, Variola virus
guaccauuugauuuuc

SEQ ID NO: 4079324 - RNA, 14 nt, Variola virus
guacccaaguuauu

SEQ ID NO: 4079325 - RNA, 23 nt, Variola virus
guacccuggauacgaaauaaauu

SEQ ID NO: 4079326 - RNA, 15 nt, Variola virus
guacccuuaaucaug

SEQ ID NO: 4079327 - RNA, 21 nt, Variola virus
guaccgauucuagauacaaga

SEQ ID NO: 4079328 - RNA, 20 nt, Variola virus
guacgggcgcuguaauuaau

SEQ ID NO: 4079329 - RNA, 16 nt, Variola virus
guacuaucuagagauu

SEQ ID NO: 4079330 - RNA, 19 nt, Variola virus
guacuauugucuaaacaac

SEQ ID NO: 4079331 - RNA, 13 nt, Variola virus
guacuuaaugaag

SEQ ID NO: 4079332 - RNA, 21 nt, Variola virus
guacuucucccauaauacuuu

SEQ ID NO: 4079333 - RNA, 21 nt, Variola virus
guagacgagccuagaaaucaa

SEQ ID NO: 4079334 - RNA, 19 nt, Variola virus
guagacuuacuaaagucaa

SEQ ID NO: 4079335 - RNA, 17 nt, Variola virus
guagauaguuaccaucu

SEQ ID NO: 4079336 - RNA, 16 nt, Variola virus
guagauauauaaauaa

SEQ ID NO: 4079337 - RNA, 21 nt, Variola virus
guagauuuuucaauuaugcau

SEQ ID NO: 4079338 - RNA, 20 nt, Variola virus
guagcaagauuuuuaaacaa

SEQ ID NO: 4079339 - RNA, 18 nt, Variola virus
guagcuaaguauacgauc

SEQ ID NO: 4079340 - RNA, 15 nt, Variola virus
guaggauuuuuccaa

SEQ ID NO: 4079341 - RNA, 21 nt, Variola virus
guauaaaacaacaaaauuaua

SEQ ID NO: 4079342 - RNA, 11 nt, Variola virus
guauaaacucc

SEQ ID NO: 4079343 - RNA, 18 nt, Variola virus
guauaaauacccuuccaa

SEQ ID NO: 4079344 - RNA, 23 nt, Variola virus
guauaacaugacauuuauucauc

SEQ ID NO: 4079345 - RNA, 23 nt, Variola virus
ugacaagauccaucuacuuuucc

SEQ ID NO: 4079346 - RNA, 23 nt, Variola virus
ugacaucauacuagauaaaucgu

SEQ ID NO: 4079347 - RNA, 18 nt, Variola virus
ugacaucuaucuuugcau

SEQ ID NO: 4079348 - RNA, 15 nt, Variola virus
ugacccuauaaacau

SEQ ID NO: 4079349 - RNA, 21 nt, Variola virus
ugacgaagugacgucauuaaa

SEQ ID NO: 4079350 - RNA, 13 nt, Variola virus
ugacgacaaacag

SEQ ID NO: 4079351 - RNA, 19 nt, Variola virus
ugacggauaaaacaaaaau

SEQ ID NO: 4079352 - RNA, 13 nt, Variola virus
ugacguaaaugug

SEQ ID NO: 4079353 - RNA, 14 nt, Variola virus
ugacgucuguggau

SEQ ID NO: 4079354 - RNA, 16 nt, Variola virus
ugacuccauagagaua

SEQ ID NO: 4079355 - RNA, 23 nt, Variola virus
ugacuguagauauuauauagaua

SEQ ID NO: 4079356 - RNA, 20 nt, Variola virus
ugacuuuaucagaucaaaau

SEQ ID NO: 4079357 - RNA, 23 nt, Variola virus
ugagaaaagguucuaucaacaau

SEQ ID NO: 4079358 - RNA, 13 nt, Variola virus
ugagaaauuauuc

SEQ ID NO: 4079359 - RNA, 19 nt, Variola virus
ugagaauccgcugcauauu

SEQ ID NO: 4079360 - RNA, 13 nt, Variola virus
ugagaaugugauu

SEQ ID NO: 4079361 - RNA, 23 nt, Variola virus
ugagaguauugguaauguacaaa

SEQ ID NO: 4079362 - RNA, 13 nt, Variola virus
ugagauucuccau

SEQ ID NO: 4079363 - RNA, 14 nt, Variola virus
ugagcacugaaaac

SEQ ID NO: 4079364 - RNA, 15 nt, Variola virus
ugaggugguugcaga

SEQ ID NO: 4079365 - RNA, 14 nt, Variola virus
ugagugauaaacuu

SEQ ID NO: 4079366 - RNA, 19 nt, Variola virus
ugaguucugugcagaucau

SEQ ID NO: 4079367 - RNA, 14 nt, Variola virus
ugauaaauuguaca

SEQ ID NO: 4079368 - RNA, 16 nt, Variola virus
ugauaacacauauuca

SEQ ID NO: 4079369 - RNA, 16 nt, Variola virus
ugauaaggauuccucc

SEQ ID NO: 4079370 - RNA, 12 nt, Variola virus
ugauaauaacuu

SEQ ID NO: 4079371 - RNA, 14 nt, Variola virus
ugauacauuuugaa

SEQ ID NO: 4079372 - RNA, 19 nt, Variola virus
ugauacucuuauagaugua

SEQ ID NO: 4079373 - RNA, 17 nt, Variola virus
ugauagccguagaucuu

SEQ ID NO: 4079374 - RNA, 14 nt, Variola virus
ugauagcuccacca

SEQ ID NO: 4079375 - RNA, 19 nt, Variola virus
ugauaguauggcauucauu

SEQ ID NO: 4079376 - RNA, 17 nt, Variola virus
ugauaucgagaacagau

SEQ ID NO: 4079377 - RNA, 20 nt, Variola virus
ugauaucgcauagaaauaca

SEQ ID NO: 4079378 - RNA, 21 nt, Variola virus
ugauaugaugucguuaaauuu

SEQ ID NO: 4079379 - RNA, 22 nt, Variola virus
ugauaugauuuuuaaucaagau

SEQ ID NO: 4079380 - RNA, 18 nt, Variola virus
ugauauuuauuuugcuau

SEQ ID NO: 4079381 - RNA, 13 nt, Variola virus
ugauauuuucuau

SEQ ID NO: 4079382 - RNA, 20 nt, Variola virus
ugauauuuucuauaauauca

SEQ ID NO: 4079383 - RNA, 16 nt, Variola virus
ugaucaaaaagagauu

SEQ ID NO: 4079384 - RNA, 19 nt, Variola virus
ugauccaaauucuggaaua

SEQ ID NO: 4079385 - RNA, 20 nt, Variola virus
ugauccaucugcucaacaau

SEQ ID NO: 4079386 - RNA, 16 nt, Variola virus
ugaucucguguguaca

SEQ ID NO: 4079387 - RNA, 17 nt, Variola virus
ugaugaacuaauaaagg

SEQ ID NO: 4079388 - RNA, 18 nt, Variola virus
ugaugaauaauuuagaua

SEQ ID NO: 4079389 - RNA, 18 nt, Variola virus
ugauggauuuaaacaucg

SEQ ID NO: 4079390 - RNA, 16 nt, Variola virus
ugauguaaaauuuuug

SEQ ID NO: 4079391 - RNA, 16 nt, Variola virus
ugauguaaucucuaaa

SEQ ID NO: 4079392 - RNA, 21 nt, Variola virus
ugauguaaucucuaaauucau

SEQ ID NO: 4079393 - RNA, 18 nt, Variola virus
ugauguacaccaucaaau

SEQ ID NO: 4079394 - RNA, 20 nt, Variola virus
ugauuaaugugugacacauu

SEQ ID NO: 4079395 - RNA, 15 nt, Variola virus
ugauuagaauucauc

SEQ ID NO: 4079396 - RNA, 17 nt, Variola virus
ugauuaguauuuucuau

SEQ ID NO: 4079397 - RNA, 17 nt, Variola virus
ugauuauucuagccauu

SEQ ID NO: 4079398 - RNA, 16 nt, Variola virus
ugauuauucuccacca

SEQ ID NO: 4079399 - RNA, 17 nt, Variola virus
ugauuauuuuuugguau

SEQ ID NO: 4079400 - RNA, 23 nt, Variola virus
ugauucgaauuuaguuucuucga

SEQ ID NO: 4079401 - RNA, 18 nt, Variola virus
ugauuuauaauguggaua

SEQ ID NO: 4079402 - RNA, 17 nt, Variola virus
ugcaaagucuaaauauu

SEQ ID NO: 4079403 - RNA, 14 nt, Variola virus
ugcaaugaauaucu

SEQ ID NO: 4079404 - RNA, 14 nt, Variola virus
ugcaugacgugaua

SEQ ID NO: 4079405 - RNA, 22 nt, Variola virus
ugcauucuccguuaguguuuga

SEQ ID NO: 4079406 - RNA, 19 nt, Variola virus
ugccaaaguuuaaacugaa

SEQ ID NO: 4079407 - RNA, 18 nt, Variola virus
ugccacugaucaugauug

SEQ ID NO: 4079408 - RNA, 22 nt, Variola virus
ugccauaauucucauauauuga

SEQ ID NO: 4079409 - RNA, 14 nt, Variola virus
ugccauuaagaaac

SEQ ID NO: 4079410 - RNA, 16 nt, Variola virus
ugccgaauagaguucu

SEQ ID NO: 4079411 - RNA, 22 nt, Variola virus
ugccguuuauaggucuagccac

SEQ ID NO: 4079412 - RNA, 14 nt, Variola virus
ugccugccuguauu

SEQ ID NO: 4079413 - RNA, 17 nt, Variola virus
ugccuguaauaauuucu

SEQ ID NO: 4079414 - RNA, 16 nt, Variola virus
ugcgguacuacagaua

SEQ ID NO: 4079415 - RNA, 20 nt, Variola virus
ugcguacuucagguuucuua

SEQ ID NO: 4079416 - RNA, 21 nt, Variola virus
ugcuaauauacaauuauccuu

SEQ ID NO: 4079417 - RNA, 14 nt, Variola virus
ugcuauuaagguua

SEQ ID NO: 4079418 - RNA, 19 nt, Variola virus
ugcuauuaagguuaaggau

SEQ ID NO: 4079419 - RNA, 23 nt, Variola virus
ugcuguacuaaauucaauaucuu

SEQ ID NO: 4079420 - RNA, 13 nt, Variola virus
ugcuuccauaaua

SEQ ID NO: 4079421 - RNA, 23 nt, Variola virus
ugcuuuccuuguugaugaaggau

SEQ ID NO: 4079422 - RNA, 19 nt, Variola virus
uggaaacaauucauaauua

SEQ ID NO: 4079423 - RNA, 21 nt, Variola virus
uggaagacgcuauaucaaaau

SEQ ID NO: 4079424 - RNA, 15 nt, Variola virus
uggaauaaauuauua

SEQ ID NO: 4079425 - RNA, 18 nt, Variola virus
uggaauagcgaauguaug

SEQ ID NO: 4079426 - RNA, 16 nt, Variola virus
uggaauaguaaaaucu

SEQ ID NO: 4079427 - RNA, 12 nt, Variola virus
uggaauauacau

SEQ ID NO: 4079428 - RNA, 24 nt, Variola virus
uggacaacauuaauacaaacgaua

SEQ ID NO: 4079429 - RNA, 14 nt, Variola virus
uggacauaaagaua

SEQ ID NO: 4079430 - RNA, 14 nt, Variola virus
uggagaucuagaaa

SEQ ID NO: 4079431 - RNA, 18 nt, Variola virus
uggauaagcguaugaaau

SEQ ID NO: 4079432 - RNA, 20 nt, Variola virus
uggauacggcacuagguaca

SEQ ID NO: 4079433 - RNA, 22 nt, Variola virus
uggauauaauauauuagauauu

SEQ ID NO: 4079434 - RNA, 13 nt, Variola virus
uggauauaugaua

SEQ ID NO: 4079435 - RNA, 17 nt, Variola virus
uggaucaucgugugaua

SEQ ID NO: 4079436 - RNA, 15 nt, Variola virus
uggauccaaaugcug

SEQ ID NO: 4079437 - RNA, 16 nt, Variola virus
uggauccuaacaauga

SEQ ID NO: 4079438 - RNA, 13 nt, Variola virus
uggaugaccauau

SEQ ID NO: 4079439 - RNA, 13 nt, Variola virus
uggauguagauuu

SEQ ID NO: 4079440 - RNA, 20 nt, Variola virus
uggauuaagcaauagugaua

SEQ ID NO: 4079441 - RNA, 16 nt, Variola virus
uggauuaccauggaua

SEQ ID NO: 4079442 - RNA, 21 nt, Variola virus
uggauuauaaauaucgauguu

SEQ ID NO: 4079443 - RNA, 20 nt, Variola virus
uggauuugguaacuuugaua

SEQ ID NO: 4079444 - RNA, 22 nt, Variola virus
uggcaacgacuauuuuagaaau

SEQ ID NO: 4079445 - RNA, 15 nt, Variola virus
uggccaagaaaauag

SEQ ID NO: 4079446 - RNA, 22 nt, Variola virus
uggcggaguaaguguugagcuc

SEQ ID NO: 4079447 - RNA, 21 nt, Variola virus
uggcguguggauuugguaaga

SEQ ID NO: 4079448 - RNA, 14 nt, Variola virus
uggcuucuuccaua

SEQ ID NO: 4079449 - RNA, 18 nt, Variola virus
ugggacuauauaauuuug

SEQ ID NO: 4079450 - RNA, 16 nt, Variola virus
ugggcucaaugucuua

SEQ ID NO: 4079451 - RNA, 17 nt, Variola virus
ugguaauaaaauuauuc

SEQ ID NO: 4079452 - RNA, 17 nt, Variola virus
ugguacgaaauauauug

SEQ ID NO: 4079453 - RNA, 16 nt, Variola virus
ugguaucaagaaguau

SEQ ID NO: 4079454 - RNA, 14 nt, Variola virus
uggucauagaaaau

SEQ ID NO: 4079455 - RNA, 14 nt, Variola virus
ugguguuacaaaac

SEQ ID NO: 4079456 - RNA, 19 nt, Variola virus
ugguuguagcgguuggaua

SEQ ID NO: 4079457 - RNA, 17 nt, Variola virus
ugguuuagauauuccua

SEQ ID NO: 4079458 - RNA, 16 nt, Variola virus
ugguuuaguucaucua

SEQ ID NO: 4079459 - RNA, 15 nt, Variola virus
ugguuuauaccuaac

SEQ ID NO: 4079460 - RNA, 16 nt, Variola virus
ugguuuccuuaucauu

SEQ ID NO: 4079461 - RNA, 18 nt, Variola virus
uguaaaaagauaaacuuu

SEQ ID NO: 4079462 - RNA, 13 nt, Variola virus
uguaaauaucuuu

SEQ ID NO: 4079463 - RNA, 21 nt, Variola virus
uguaaauguaacguauuuaga

SEQ ID NO: 4079464 - RNA, 15 nt, Variola virus
uguaaauguaguauu

SEQ ID NO: 4079465 - RNA, 19 nt, Variola virus
uguaaauuaggagaaacaa

SEQ ID NO: 4079466 - RNA, 14 nt, Variola virus
uguaacaaaguuuc

SEQ ID NO: 4079467 - RNA, 19 nt, Variola virus
uguaacccacguaacauua

SEQ ID NO: 4079468 - RNA, 20 nt, Variola virus
uguaacuauucaguaguguu

SEQ ID NO: 4079469 - RNA, 20 nt, Variola virus
uguaacuucacuagguagua

SEQ ID NO: 4079470 - RNA, 13 nt, Variola virus
uguaagauacuug

SEQ ID NO: 4079471 - RNA, 21 nt, Variola virus
acaauauuacaauacauagau

SEQ ID NO: 4079472 - RNA, 23 nt, Variola virus
acaauauuuaguuuauucauaau

SEQ ID NO: 4079473 - RNA, 18 nt, Variola virus
acaaugcucaguaaaugu

SEQ ID NO: 4079474 - RNA, 18 nt, Variola virus
acaauguuucuuacauau

SEQ ID NO: 4079475 - RNA, 14 nt, Variola virus
acaauuaucaaauu

SEQ ID NO: 4079476 - RNA, 19 nt, Variola virus
acaauuauccuuuugauua

SEQ ID NO: 4079477 - RNA, 19 nt, Variola virus
acaauuauuauauaauucu

SEQ ID NO: 4079478 - RNA, 14 nt, Variola virus
acaauucauuucca

SEQ ID NO: 4079479 - RNA, 18 nt, Variola virus
acaauuuauauguucauu

SEQ ID NO: 4079480 - RNA, 17 nt, Variola virus
acaauuuauucagagag

SEQ ID NO: 4079481 - RNA, 18 nt, Variola virus
acaauuugaccaaaucua

SEQ ID NO: 4079482 - RNA, 19 nt, Variola virus
acaauuuucgccuugaauu

SEQ ID NO: 4079483 - RNA, 13 nt, Variola virus
acacaucaaaaua

SEQ ID NO: 4079484 - RNA, 18 nt, Variola virus
acacauccugaacaauaa

SEQ ID NO: 4079485 - RNA, 20 nt, Variola virus
acaccaaccuguauacugua

SEQ ID NO: 4079486 - RNA, 16 nt, Variola virus
acaccgccucuagaua

SEQ ID NO: 4079487 - RNA, 12 nt, Variola virus
acacuaauuaag

SEQ ID NO: 4079488 - RNA, 21 nt, Variola virus
acacucaacggaaaacauuuu

SEQ ID NO: 4079489 - RNA, 18 nt, Variola virus
acacugcgaucugaauaa

SEQ ID NO: 4079490 - RNA, 16 nt, Variola virus
acacuuagagaacuua

SEQ ID NO: 4079491 - RNA, 14 nt, Variola virus
acagaaauauauau

SEQ ID NO: 4079492 - RNA, 22 nt, Variola virus
acagaagauagcaaagagauga

SEQ ID NO: 4079493 - RNA, 15 nt, Variola virus
acagacaucacagac

SEQ ID NO: 4079494 - RNA, 15 nt, Variola virus
acagacuacuuuccu

SEQ ID NO: 4079495 - RNA, 18 nt, Variola virus
acagaguuuucagaagau

SEQ ID NO: 4079496 - RNA, 14 nt, Variola virus
acagauaaauggaa

SEQ ID NO: 4079497 - RNA, 19 nt, Variola virus
acagauauuacaaccagug

SEQ ID NO: 4079498 - RNA, 16 nt, Variola virus
acagaugauauaucca

SEQ ID NO: 4079499 - RNA, 20 nt, Variola virus
acagcacuguggaugugaca

SEQ ID NO: 4079500 - RNA, 15 nt, Variola virus
acagcagaaaaagac

SEQ ID NO: 4079501 - RNA, 24 nt, Variola virus
acagcagaaaaagacgagaucuga

SEQ ID NO: 4079502 - RNA, 19 nt, Variola virus
acagcuaacgaaagcaaag

SEQ ID NO: 4079503 - RNA, 20 nt, Variola virus
acagguagaauuuauaaaca

SEQ ID NO: 4079504 - RNA, 14 nt, Variola virus
acaguacauaguau

SEQ ID NO: 4079505 - RNA, 19 nt, Variola virus
acaguacauaguauugaca

SEQ ID NO: 4079506 - RNA, 22 nt, Variola virus
acagugcaaccucuauuggaua

SEQ ID NO: 4079507 - RNA, 20 nt, Variola virus
acaguguaugaaaaguuaca

SEQ ID NO: 4079508 - RNA, 21 nt, Variola virus
acaguuacgguuguacauuau

SEQ ID NO: 4079509 - RNA, 22 nt, Variola virus
acauaaauaauucuagaggaga

SEQ ID NO: 4079510 - RNA, 15 nt, Variola virus
acauaauacucaaua

SEQ ID NO: 4079511 - RNA, 16 nt, Variola virus
acauaccguuagauaa

SEQ ID NO: 4079512 - RNA, 17 nt, Variola virus
acauacuaguauuuaca

SEQ ID NO: 4079513 - RNA, 16 nt, Variola virus
acauacuaucuuuaau

SEQ ID NO: 4079514 - RNA, 15 nt, Variola virus
acauagauaauaaua

SEQ ID NO: 4079515 - RNA, 21 nt, Variola virus
acauagaugaaccaaaugaua

SEQ ID NO: 4079516 - RNA, 18 nt, Variola virus
acauaggauuaaaaauaa

SEQ ID NO: 4079517 - RNA, 22 nt, Variola virus
acauaguuugggaaaagaaauc

SEQ ID NO: 4079518 - RNA, 15 nt, Variola virus
acauauccuccauaa

SEQ ID NO: 4079519 - RNA, 16 nt, Variola virus
acauaucuaaaugaau

SEQ ID NO: 4079520 - RNA, 23 nt, Variola virus
acauauggaauauaucuauaauu

SEQ ID NO: 4079521 - RNA, 21 nt, Variola virus
acaucaacuaccuaaggaaua

SEQ ID NO: 4079522 - RNA, 19 nt, Variola virus
acauccucacuauucaugg

SEQ ID NO: 4079523 - RNA, 17 nt, Variola virus
acauccuuccaagaaga

SEQ ID NO: 4079524 - RNA, 19 nt, Variola virus
acauccuuccaagaagaag

SEQ ID NO: 4079525 - RNA, 19 nt, Variola virus
acaucgaugccuuaacauc

SEQ ID NO: 4079526 - RNA, 22 nt, Variola virus
acaucguauaucgucuuuguua

SEQ ID NO: 4079527 - RNA, 18 nt, Variola virus
acaucuaccuuauuuccc

SEQ ID NO: 4079528 - RNA, 13 nt, Variola virus
acaucuaguucuu

SEQ ID NO: 4079529 - RNA, 14 nt, Variola virus
acaucucuuuucca

SEQ ID NO: 4079530 - RNA, 13 nt, Variola virus
acaucuguuugag

SEQ ID NO: 4079531 - RNA, 21 nt, Variola virus
acaugauaggaaauuuugugc

SEQ ID NO: 4079532 - RNA, 19 nt, Variola virus
acaugaugauugccuuaag

SEQ ID NO: 4079533 - RNA, 18 nt, Variola virus
acaugcuacaaaauaugu

SEQ ID NO: 4079534 - RNA, 22 nt, Variola virus
acauguaaacuugacaaaaauu

SEQ ID NO: 4079535 - RNA, 20 nt, Variola virus
acaugucgccgacaugaaug

SEQ ID NO: 4079536 - RNA, 14 nt, Variola virus
acaugucuuaaagu

SEQ ID NO: 4079537 - RNA, 17 nt, Variola virus
acauguguuuuaauaua

SEQ ID NO: 4079538 - RNA, 13 nt, Variola virus
acauguuaguaga

SEQ ID NO: 4079539 - RNA, 14 nt, Variola virus
acauguuuaauaua

SEQ ID NO: 4079540 - RNA, 15 nt, Variola virus
aacuuauccauuuau

SEQ ID NO: 4079541 - RNA, 15 nt, Variola virus
aacuucguaaaauau

SEQ ID NO: 4079542 - RNA, 23 nt, Variola virus
aacuucuaaaacagcugugaaua

SEQ ID NO: 4079543 - RNA, 16 nt, Variola virus
aacuucuaaucuugua

SEQ ID NO: 4079544 - RNA, 22 nt, Variola virus
aacuucuagucuagaaauaaua

SEQ ID NO: 4079545 - RNA, 21 nt, Variola virus
aacuucuugcgugucuuucug

SEQ ID NO: 4079546 - RNA, 14 nt, Variola virus
aacuugacaaaaau

SEQ ID NO: 4079547 - RNA, 13 nt, Variola virus
aacuugaucuuua

SEQ ID NO: 4079548 - RNA, 21 nt, Variola virus
aacuuggaaacaucucuucua

SEQ ID NO: 4079549 - RNA, 20 nt, Variola virus
aacuuggggauaaugauaca

SEQ ID NO: 4079550 - RNA, 14 nt, Variola virus
aacuuugaaauugu

SEQ ID NO: 4079551 - RNA, 17 nt, Variola virus
aacuuuguuguuacauu

SEQ ID NO: 4079552 - RNA, 12 nt, Variola virus
aacuuuugcaua

SEQ ID NO: 4079553 - RNA, 14 nt, Variola virus
aagaaauauaugug

SEQ ID NO: 4079554 - RNA, 14 nt, Variola virus
aagaaauuaauaga

SEQ ID NO: 4079555 - RNA, 16 nt, Variola virus
aagaacaguacucaau

SEQ ID NO: 4079556 - RNA, 11 nt, Variola virus
aagaagagaau

SEQ ID NO: 4079557 - RNA, 13 nt, Variola virus
aagaagagaauua

SEQ ID NO: 4079558 - RNA, 20 nt, Variola virus
aagaagugucuauaaaugua

SEQ ID NO: 4079559 - RNA, 21 nt, Variola virus
aagaaugcuucggaauuagaa

SEQ ID NO: 4079560 - RNA, 17 nt, Variola virus
aagaauucggaaaugua

SEQ ID NO: 4079561 - RNA, 16 nt, Variola virus
aagaauugcaauuuug

SEQ ID NO: 4079562 - RNA, 17 nt, Variola virus
aagaauugucuguaaac

SEQ ID NO: 4079563 - RNA, 20 nt, Variola virus
aagaauuuguuguuucuauu

SEQ ID NO: 4079564 - RNA, 21 nt, Variola virus
aagacagagauacuaaauaua

SEQ ID NO: 4079565 - RNA, 18 nt, Variola virus
aagacaucauauauagaa

SEQ ID NO: 4079566 - RNA, 19 nt, Variola virus
aagaccaaacgaugauaca

SEQ ID NO: 4079567 - RNA, 21 nt, Variola virus
aagacguuguacaauaugaac

SEQ ID NO: 4079568 - RNA, 17 nt, Variola virus
aagacuaugucaaagua

SEQ ID NO: 4079569 - RNA, 19 nt, Variola virus
aagacucagaagaggauua

SEQ ID NO: 4079570 - RNA, 18 nt, Variola virus
aagacugcuaaauguauc

SEQ ID NO: 4079571 - RNA, 17 nt, Variola virus
aagagcaaauaucucau

SEQ ID NO: 4079572 - RNA, 15 nt, Variola virus
aagaggguugguaaa

SEQ ID NO: 4079573 - RNA, 20 nt, Variola virus
aagaguuaauaaauaucauu

SEQ ID NO: 4079574 - RNA, 16 nt, Variola virus
aagaguuucaaaaaua

SEQ ID NO: 4079575 - RNA, 20 nt, Variola virus
aagauaccgcaccauaugcu

SEQ ID NO: 4079576 - RNA, 17 nt, Variola virus
aagauacuguuuagaga

SEQ ID NO: 4079577 - RNA, 22 nt, Variola virus
aagauaugguaaaauuaaauag

SEQ ID NO: 4079578 - RNA, 19 nt, Variola virus
aagaucacuaauucuaguc

SEQ ID NO: 4079579 - RNA, 20 nt, Variola virus
aagauggauggaugaugcau

SEQ ID NO: 4079580 - RNA, 21 nt, Variola virus
aagauuaacuccauaaugucu

SEQ ID NO: 4079581 - RNA, 19 nt, Variola virus
aagauuaugauccaaugug

SEQ ID NO: 4079582 - RNA, 13 nt, Variola virus
aagauuguagaau

SEQ ID NO: 4079583 - RNA, 16 nt, Variola virus
aagauuguguagaaau

SEQ ID NO: 4079584 - RNA, 21 nt, Variola virus
aagauuguuuaagaagagaau

SEQ ID NO: 4079585 - RNA, 15 nt, Variola virus
aagauuuuaaaugua

SEQ ID NO: 4079586 - RNA, 20 nt, Variola virus
aagcaagaaagauacaggua

SEQ ID NO: 4079587 - RNA, 18 nt, Variola virus
aagcagacuagaaauaac

SEQ ID NO: 4079588 - RNA, 21 nt, Variola virus
aagccaucuguauuaaagaua

SEQ ID NO: 4079589 - RNA, 19 nt, Variola virus
aagccgucuuuucugaagu

SEQ ID NO: 4079590 - RNA, 23 nt, Variola virus
aagcguguuauauauacaagucu

SEQ ID NO: 4079591 - RNA, 15 nt, Variola virus
aagcuuuuagaauau

SEQ ID NO: 4079592 - RNA, 12 nt, Variola virus
aaggaacuagaa

SEQ ID NO: 4079593 - RNA, 16 nt, Variola virus
aaggaauugaugaagu

SEQ ID NO: 4079594 - RNA, 21 nt, Variola virus
aaggacagaaaaauguuagaa

SEQ ID NO: 4079595 - RNA, 16 nt, Variola virus
aaggagauauugaaac

SEQ ID NO: 4079596 - RNA, 18 nt, Variola virus
aaggauaaccuagaaaau

SEQ ID NO: 4079597 - RNA, 17 nt, Variola virus
aaggauacuaaacauug

SEQ ID NO: 4079598 - RNA, 19 nt, Variola virus
aaggauauucucauggaaa

SEQ ID NO: 4079599 - RNA, 14 nt, Variola virus
aaggcaauaagucu

SEQ ID NO: 4079600 - RNA, 15 nt, Variola virus
aaggcacuaugucca

SEQ ID NO: 4079601 - RNA, 18 nt, Variola virus
aagguguugauuaccauu

SEQ ID NO: 4079602 - RNA, 15 nt, Variola virus
aaguaaaaaagaaaa

SEQ ID NO: 4079603 - RNA, 15 nt, Variola virus
aaguaaacaauuuua

SEQ ID NO: 4079604 - RNA, 16 nt, Variola virus
aaguaaagaaaagaua

SEQ ID NO: 4079605 - RNA, 14 nt, Variola virus
aaguaaucaugaaa

SEQ ID NO: 4079606 - RNA, 16 nt, Variola virus
aaguaauucagacacu

SEQ ID NO: 4079607 - RNA, 18 nt, Variola virus
aaguacagauuuuaaaaa

SEQ ID NO: 4079608 - RNA, 14 nt, Variola virus
aaguagaaaauaua

SEQ ID NO: 4079609 - RNA, 13 nt, Variola virus
aaguaucaaaucu

SEQ ID NO: 4079610 - RNA, 22 nt, Variola virus
aaguaucuaguuagcaauuuuc

SEQ ID NO: 4079611 - RNA, 22 nt, Variola virus
aaguauuucuuacucaaaugaa

SEQ ID NO: 4079612 - RNA, 15 nt, Variola virus
aaguauuuguuguau

SEQ ID NO: 4079613 - RNA, 12 nt, Variola virus
aagucaauaaua

SEQ ID NO: 4079614 - RNA, 17 nt, Variola virus
aagucuuaaaaauacuu

SEQ ID NO: 4079615 - RNA, 17 nt, Variola virus
aagucuuacaauguuug

SEQ ID NO: 4079616 - RNA, 22 nt, Variola virus
aaguuaaugagagcaaaauaua

SEQ ID NO: 4079617 - RNA, 22 nt, Variola virus
aaguuacaaacaacuaggaaau

SEQ ID NO: 4079618 - RNA, 23 nt, Variola virus
aaguuagaagagucauuaaaaua

SEQ ID NO: 4079619 - RNA, 13 nt, Variola virus
aaguuaugacauu

SEQ ID NO: 4079620 - RNA, 17 nt, Variola virus
aaguuauuguacuaucg

SEQ ID NO: 4079621 - RNA, 13 nt, Variola virus
aaguugaucucaa

SEQ ID NO: 4079622 - RNA, 18 nt, Variola virus
aaguugggacugacagau

SEQ ID NO: 4079623 - RNA, 13 nt, Variola virus
aaguuguuaaaaa

SEQ ID NO: 4079624 - RNA, 15 nt, Variola virus
aaguuuaaaaaagac

SEQ ID NO: 4079625 - RNA, 18 nt, Variola virus
aaguuucguacaaauaca

SEQ ID NO: 4079626 - RNA, 14 nt, Variola virus
aaguuucugaaaua

SEQ ID NO: 4079627 - RNA, 17 nt, Variola virus
aaguuuggagaaaugga

SEQ ID NO: 4079628 - RNA, 16 nt, Variola virus
aaguuuggaugucuua

SEQ ID NO: 4079629 - RNA, 19 nt, Variola virus
aaguuuucccauacuaacu

SEQ ID NO: 4079630 - RNA, 22 nt, Variola virus
aaguuuucuuucaaaauagcua

SEQ ID NO: 4079631 - RNA, 12 nt, Variola virus
aauaaaaacaag

SEQ ID NO: 4079632 - RNA, 17 nt, Variola virus
aauaaacaauuucacaa

SEQ ID NO: 4079633 - RNA, 18 nt, Variola virus
aauaaacaucaacauugu

SEQ ID NO: 4079634 - RNA, 20 nt, Variola virus
aauaaaggcagaaauacaau

SEQ ID NO: 4079635 - RNA, 17 nt, Variola virus
aauaaauaguucaacau

SEQ ID NO: 4079636 - RNA, 15 nt, Variola virus
aauaaauguauacau

SEQ ID NO: 4079637 - RNA, 20 nt, Variola virus
aauaaauguuucgauuucaa

SEQ ID NO: 4079638 - RNA, 12 nt, Variola virus
aauaacaaauac

SEQ ID NO: 4079639 - RNA, 16 nt, Variola virus
aauaacaauuaacaau

SEQ ID NO: 4079640 - RNA, 17 nt, Variola virus
aauaacaggcuaaaaug

SEQ ID NO: 4079641 - RNA, 17 nt, Variola virus
aauaacauaggauuaaa

SEQ ID NO: 4079642 - RNA, 20 nt, Variola virus
aauaacuauguuuuaaaaau

SEQ ID NO: 4079643 - RNA, 21 nt, Variola virus
aauaacuucacuauugaucaa

SEQ ID NO: 4079644 - RNA, 17 nt, Variola virus
aauaacuuguuagauaa

SEQ ID NO: 4079645 - RNA, 12 nt, Variola virus
aauaagaaauac

SEQ ID NO: 4079646 - RNA, 20 nt, Variola virus
aauaagaaauaugaaaucua

SEQ ID NO: 4079647 - RNA, 21 nt, Variola virus
aauaagaacaaaguaaugccu

SEQ ID NO: 4079648 - RNA, 23 nt, Variola virus
aauaagaacuauaaaaaaaauaa

SEQ ID NO: 4079649 - RNA, 15 nt, Variola virus
aauaagcuauauaau

SEQ ID NO: 4079650 - RNA, 20 nt, Variola virus
aauaaucauaaauuauuuca

SEQ ID NO: 4079651 - RNA, 14 nt, Variola virus
aauaaucauacaau

SEQ ID NO: 4079652 - RNA, 15 nt, Variola virus
aauaaucguuauuau

SEQ ID NO: 4079653 - RNA, 18 nt, Variola virus
aauaaucguuauuaucau

SEQ ID NO: 4079654 - RNA, 12 nt, Variola virus
aauaauguucaa

SEQ ID NO: 4079655 - RNA, 14 nt, Variola virus
aauaauucuagacg

SEQ ID NO: 4079656 - RNA, 19 nt, Variola virus
aauaauuuauguauuucga

SEQ ID NO: 4079657 - RNA, 23 nt, Variola virus
aauacaaaacagaaaacaaaguc

SEQ ID NO: 4079658 - RNA, 16 nt, Variola virus
aauacaaaaguuaaua

SEQ ID NO: 4079659 - RNA, 13 nt, Variola virus
aauacaauacaua

SEQ ID NO: 4079660 - RNA, 16 nt, Variola virus
aauacauuaauugcca

SEQ ID NO: 4079661 - RNA, 16 nt, Variola virus
aauaccaaugcucaag

SEQ ID NO: 4079662 - RNA, 13 nt, Variola virus
aauaccaauuuuu

SEQ ID NO: 4079663 - RNA, 20 nt, Variola virus
aauacgacgguuuaauacac

SEQ ID NO: 4079664 - RNA, 20 nt, Variola virus
aauacgguaccgcaauuuug

SEQ ID NO: 4079665 - RNA, 19 nt, Variola virus
aauacucccacaaauacug

SEQ ID NO: 4079666 - RNA, 13 nt, Variola virus
agaugaugauaua

SEQ ID NO: 4079667 - RNA, 15 nt, Variola virus
agaugaugcaaauaa

SEQ ID NO: 4079668 - RNA, 21 nt, Variola virus
agaugccaagauaucuauaua

SEQ ID NO: 4079669 - RNA, 21 nt, Variola virus
agaugccauaucauacaugau

SEQ ID NO: 4079670 - RNA, 17 nt, Variola virus
agaugccgguacuuaug

SEQ ID NO: 4079671 - RNA, 13 nt, Variola virus
agaugcuauguau

SEQ ID NO: 4079672 - RNA, 20 nt, Variola virus
agaugguaaaauacaaaaua

SEQ ID NO: 4079673 - RNA, 14 nt, Variola virus
agauggucugaaau

SEQ ID NO: 4079674 - RNA, 12 nt, Variola virus
agaugucauuau

SEQ ID NO: 4079675 - RNA, 16 nt, Variola virus
agauguguauaauucu

SEQ ID NO: 4079676 - RNA, 16 nt, Variola virus
agauguuauuaaaugu

SEQ ID NO: 4079677 - RNA, 17 nt, Variola virus
agauguugcuccuggau

SEQ ID NO: 4079678 - RNA, 13 nt, Variola virus
agauuaaaaaugg

SEQ ID NO: 4079679 - RNA, 14 nt, Variola virus
agauuaaaaauggu

SEQ ID NO: 4079680 - RNA, 17 nt, Variola virus
agauuaggaaauguuuc

SEQ ID NO: 4079681 - RNA, 18 nt, Variola virus
agauuauaucauaaauaa

SEQ ID NO: 4079682 - RNA, 19 nt, Variola virus
agauuaucaaaaucuuguc

SEQ ID NO: 4079683 - RNA, 16 nt, Variola virus
agauuauucuuaaaug

SEQ ID NO: 4079684 - RNA, 19 nt, Variola virus
agauucuacaaguaacaac

SEQ ID NO: 4079685 - RNA, 16 nt, Variola virus
agauucuuauauaccg

SEQ ID NO: 4079686 - RNA, 15 nt, Variola virus
agauugaaauuauau

SEQ ID NO: 4079687 - RNA, 19 nt, Variola virus
agauugaaugccauuuacg

SEQ ID NO: 4079688 - RNA, 17 nt, Variola virus
agauugaucauguagaa

SEQ ID NO: 4079689 - RNA, 22 nt, Variola virus
agauuggguguagaucuagaug

SEQ ID NO: 4079690 - RNA, 20 nt, Variola virus
agauuggguuaauaaauaca

SEQ ID NO: 4079691 - RNA, 19 nt, Variola virus
agauuuacuguuuaucuaa

SEQ ID NO: 4079692 - RNA, 14 nt, Variola virus
agauuuagaaaugu

SEQ ID NO: 4079693 - RNA, 18 nt, Variola virus
agauuuaguuguuuaauu

SEQ ID NO: 4079694 - RNA, 19 nt, Variola virus
agauuucaacagacuguuu

SEQ ID NO: 4079695 - RNA, 19 nt, Variola virus
agauuucagaaucuagauu

SEQ ID NO: 4079696 - RNA, 18 nt, Variola virus
agauuuguaucucuuuuc

SEQ ID NO: 4079697 - RNA, 14 nt, Variola virus
agauuuuacuaacu

SEQ ID NO: 4079698 - RNA, 19 nt, Variola virus
agauuuugacuuacauaaa

SEQ ID NO: 4079699 - RNA, 23 nt, Variola virus
agauuuugacuuacauaaauguc

SEQ ID NO: 4079700 - RNA, 14 nt, Variola virus
agcaaaaaaugaua

SEQ ID NO: 4079701 - RNA, 17 nt, Variola virus
agcaaaacaguuacuau

SEQ ID NO: 4079702 - RNA, 16 nt, Variola virus
agcaaaagaaucauca

SEQ ID NO: 4079703 - RNA, 15 nt, Variola virus
agcaaaggaaauugu

SEQ ID NO: 4079704 - RNA, 18 nt, Variola virus
agcaaucaugaaacaaua

SEQ ID NO: 4079705 - RNA, 21 nt, Variola virus
agcaaucuuuuagaugaugau

SEQ ID NO: 4079706 - RNA, 22 nt, Variola virus
agcaauuagugccguauacuuu

SEQ ID NO: 4079707 - RNA, 13 nt, Variola virus
agcacaaaucaaa

SEQ ID NO: 4079708 - RNA, 13 nt, Variola virus
agcacagaacaca

SEQ ID NO: 4079709 - RNA, 16 nt, Variola virus
agcacuaucauaauua

SEQ ID NO: 4079710 - RNA, 17 nt, Variola virus
agcacuauuucuaaauc

SEQ ID NO: 4079711 - RNA, 17 nt, Variola virus
agcacuguggaugugac

SEQ ID NO: 4079712 - RNA, 19 nt, Variola virus
agcagcugcagcaacuucu

SEQ ID NO: 4079713 - RNA, 14 nt, Variola virus
agcauaaacuauac

SEQ ID NO: 4079714 - RNA, 19 nt, Variola virus
agcauacaaauuacaauaa

SEQ ID NO: 4079715 - RNA, 22 nt, Variola virus
agcauagauccgugagaaauac

SEQ ID NO: 4079716 - RNA, 19 nt, Variola virus
agcauaucacgaacuauau

SEQ ID NO: 4079717 - RNA, 21 nt, Variola virus
agcauauuccuaaauacaucu

SEQ ID NO: 4079718 - RNA, 15 nt, Variola virus
agcaucauaucuugu

SEQ ID NO: 4079719 - RNA, 14 nt, Variola virus
agcaucuaguugau

SEQ ID NO: 4079720 - RNA, 17 nt, Variola virus
agcauuauucuugaauu

SEQ ID NO: 4079721 - RNA, 20 nt, Variola virus
agcauuauugguauucuucu

SEQ ID NO: 4079722 - RNA, 17 nt, Variola virus
agcauugcuuucauuau

SEQ ID NO: 4079723 - RNA, 17 nt, Variola virus
agcauuguuauguauuu

SEQ ID NO: 4079724 - RNA, 18 nt, Variola virus
agccgcuggguuguaaac

SEQ ID NO: 4079725 - RNA, 20 nt, Variola virus
agccuuaagaaaacuagaua

SEQ ID NO: 4079726 - RNA, 18 nt, Variola virus
agcgaaaaauaauuauuc

SEQ ID NO: 4079727 - RNA, 20 nt, Variola virus
agcgagaaauaaucauaaau

SEQ ID NO: 4079728 - RNA, 22 nt, Variola virus
auauagucgaacguuaguucca

SEQ ID NO: 4079729 - RNA, 13 nt, Variola virus
auauaguuauaga

SEQ ID NO: 4079730 - RNA, 21 nt, Variola virus
auauauaagacacagaaauac

SEQ ID NO: 4079731 - RNA, 15 nt, Variola virus
auauaucaugaugau

SEQ ID NO: 4079732 - RNA, 15 nt, Variola virus
auauauuaacucaga

SEQ ID NO: 4079733 - RNA, 16 nt, Variola virus
auauauuaagaaguuc

SEQ ID NO: 4079734 - RNA, 15 nt, Variola virus
auauauuagaaauac

SEQ ID NO: 4079735 - RNA, 14 nt, Variola virus
auauauucaaacaa

SEQ ID NO: 4079736 - RNA, 18 nt, Variola virus
auauauugcuuacuagau

SEQ ID NO: 4079737 - RNA, 13 nt, Variola virus
auauauugucuaa

SEQ ID NO: 4079738 - RNA, 22 nt, Variola virus
auauauuuauagaagauauuac

SEQ ID NO: 4079739 - RNA, 14 nt, Variola virus
auauauuuggauuu

SEQ ID NO: 4079740 - RNA, 17 nt, Variola virus
auauauuuucauuuaaa

SEQ ID NO: 4079741 - RNA, 16 nt, Variola virus
auauauuuuucuagau

SEQ ID NO: 4079742 - RNA, 22 nt, Variola virus
auaucacaucaaguacaaaaua

SEQ ID NO: 4079743 - RNA, 18 nt, Variola virus
auaucagcauugcuuuca

SEQ ID NO: 4079744 - RNA, 17 nt, Variola virus
auaucauaaucuaaaau

SEQ ID NO: 4079745 - RNA, 19 nt, Variola virus
auaucauauauauacugaa

SEQ ID NO: 4079746 - RNA, 17 nt, Variola virus
auaucaucaaaauacug

SEQ ID NO: 4079747 - RNA, 14 nt, Variola virus
auaucaucaaacaa

SEQ ID NO: 4079748 - RNA, 14 nt, Variola virus
auaucauuaaugau

SEQ ID NO: 4079749 - RNA, 18 nt, Variola virus
auaucauugucuaauaga

SEQ ID NO: 4079750 - RNA, 15 nt, Variola virus
auauccauaggaaag

SEQ ID NO: 4079751 - RNA, 19 nt, Variola virus
auaucccacauugucaucu

SEQ ID NO: 4079752 - RNA, 14 nt, Variola virus
auauccuuuuguau

SEQ ID NO: 4079753 - RNA, 13 nt, Variola virus
auaucgaugugga

SEQ ID NO: 4079754 - RNA, 14 nt, Variola virus
auaucguguucauu

SEQ ID NO: 4079755 - RNA, 16 nt, Variola virus
auaucguucucuaaau

SEQ ID NO: 4079756 - RNA, 19 nt, Variola virus
auaucuagacuuucuguua

SEQ ID NO: 4079757 - RNA, 14 nt, Variola virus
auaucuaguauuga

SEQ ID NO: 4079758 - RNA, 16 nt, Variola virus
auaucuauauauguau

SEQ ID NO: 4079759 - RNA, 16 nt, Variola virus
auaucuauaucuacau

SEQ ID NO: 4079760 - RNA, 14 nt, Variola virus
auaucucaaagaug

SEQ ID NO: 4079761 - RNA, 14 nt, Variola virus
auaucucuaauaga

SEQ ID NO: 4079762 - RNA, 15 nt, Variola virus
auaucugauguuguu

SEQ ID NO: 4079763 - RNA, 13 nt, Variola virus
auaucuggauaau

SEQ ID NO: 4079764 - RNA, 21 nt, Variola virus
auaucuuagugcaaaaguaua

SEQ ID NO: 4079765 - RNA, 16 nt, Variola virus
auaucuucuccuguaa

SEQ ID NO: 4079766 - RNA, 17 nt, Variola virus
auaucuucuuuuuucca

SEQ ID NO: 4079767 - RNA, 14 nt, Variola virus
auaucuuguucuau

SEQ ID NO: 4079768 - RNA, 17 nt, Variola virus
auaugaaaaacaugucu

SEQ ID NO: 4079769 - RNA, 21 nt, Variola virus
auaugaaaaacaugucucucu

SEQ ID NO: 4079770 - RNA, 14 nt, Variola virus
auaugacuaaacau

SEQ ID NO: 4079771 - RNA, 22 nt, Variola virus
auaugacuauuuucacauguac

SEQ ID NO: 4079772 - RNA, 17 nt, Variola virus
auaugauaaacaaagau

SEQ ID NO: 4079773 - RNA, 16 nt, Variola virus
auaugaucaaaaagag

SEQ ID NO: 4079774 - RNA, 13 nt, Variola virus
auaugauccaugc

SEQ ID NO: 4079775 - RNA, 14 nt, Variola virus
auaugauuacuaga

SEQ ID NO: 4079776 - RNA, 21 nt, Variola virus
auaugauuucagauacuauau

SEQ ID NO: 4079777 - RNA, 14 nt, Variola virus
auaugcaacuauaa

SEQ ID NO: 4079778 - RNA, 18 nt, Variola virus
auaugccuccagaaguug

SEQ ID NO: 4079779 - RNA, 20 nt, Variola virus
auaugcgccuagagaauugc

SEQ ID NO: 4079780 - RNA, 14 nt, Variola virus
auaugcuacaagau

SEQ ID NO: 4079781 - RNA, 21 nt, Variola virus
auaugcucauauauuuauaga

SEQ ID NO: 4079782 - RNA, 19 nt, Variola virus
auaugcuuuuauuuuugga

SEQ ID NO: 4079783 - RNA, 17 nt, Variola virus
auauggauauucauaga

SEQ ID NO: 4079784 - RNA, 15 nt, Variola virus
auauguauacauaau

SEQ ID NO: 4079785 - RNA, 13 nt, Variola virus
auaugugaauaug

SEQ ID NO: 4079786 - RNA, 19 nt, Variola virus
auaugugcuaaaaaguuuu

SEQ ID NO: 4079787 - RNA, 19 nt, Variola virus
auaugugguguuacaguua

SEQ ID NO: 4079788 - RNA, 14 nt, Variola virus
auauuaaaaauaca

SEQ ID NO: 4079789 - RNA, 15 nt, Variola virus
auauuaaaauagcua

SEQ ID NO: 4079790 - RNA, 18 nt, Variola virus
auauuaaacacuaguaua

SEQ ID NO: 4079791 - RNA, 18 nt, Variola virus
auauuaaaguaaaaucua

SEQ ID NO: 4079792 - RNA, 20 nt, Variola virus
auauuaacgaguuccauuua

SEQ ID NO: 4079793 - RNA, 21 nt, Variola virus
auauuaacgaguuccauuuau

SEQ ID NO: 4079794 - RNA, 20 nt, Variola virus
auauuacaaacuauagaaau

SEQ ID NO: 4079795 - RNA, 23 nt, Variola virus
auauuacgaauuacauuucuugu

SEQ ID NO: 4079796 - RNA, 19 nt, Variola virus
auauuacuaaacacacauu

SEQ ID NO: 4079797 - RNA, 13 nt, Variola virus
auauuagaauuua

SEQ ID NO: 4079798 - RNA, 14 nt, Variola virus
auauuagauuuacu

SEQ ID NO: 4079799 - RNA, 22 nt, Variola virus
auauuaggcacagucaaacauu

SEQ ID NO: 4079800 - RNA, 22 nt, Variola virus
auauuaucaucccauuguaaag

SEQ ID NO: 4079801 - RNA, 16 nt, Variola virus
auauuaucguuuguaa

SEQ ID NO: 4079802 - RNA, 13 nt, Variola virus
auauuauuaauaa

SEQ ID NO: 4079803 - RNA, 23 nt, Variola virus
auauuauugggugguaaacuaga

SEQ ID NO: 4079804 - RNA, 20 nt, Variola virus
auauuauuuuuauguuuuau

SEQ ID NO: 4079805 - RNA, 19 nt, Variola virus
auauucauacaccugcaua

SEQ ID NO: 4079806 - RNA, 14 nt, Variola virus
auauucaucagaua

SEQ ID NO: 4079807 - RNA, 20 nt, Variola virus
auauuccgacaaaggauuga

SEQ ID NO: 4079808 - RNA, 21 nt, Variola virus
auauuccgacaugcaaaaaug

SEQ ID NO: 4079809 - RNA, 16 nt, Variola virus
auauuccucuacacca

SEQ ID NO: 4079810 - RNA, 14 nt, Variola virus
auauucuaugaauu

SEQ ID NO: 4079811 - RNA, 15 nt, Variola virus
auauucucauggaaa

SEQ ID NO: 4079812 - RNA, 18 nt, Variola virus
auauucucuauuuuggug

SEQ ID NO: 4079813 - RNA, 21 nt, Variola virus
auauucuuaaaagguuucaua

SEQ ID NO: 4079814 - RNA, 15 nt, Variola virus
auauugaaaaugaca

SEQ ID NO: 4079815 - RNA, 22 nt, Variola virus
auauugauaauauuuuaauaga

SEQ ID NO: 4079816 - RNA, 19 nt, Variola virus
auauuguacgguagaauug

SEQ ID NO: 4079817 - RNA, 20 nt, Variola virus
auauuguacgguagaauuga

SEQ ID NO: 4079818 - RNA, 16 nt, Variola virus
auauuuaaaauaucua

SEQ ID NO: 4079819 - RNA, 17 nt, Variola virus
auauuuacacacauaau

SEQ ID NO: 4079820 - RNA, 16 nt, Variola virus
auauuuauaagaauga

SEQ ID NO: 4079821 - RNA, 21 nt, Variola virus
auauuucuguaucaaaugcua

SEQ ID NO: 4079822 - RNA, 21 nt, Variola virus
auauuuggaaucagacacaga

SEQ ID NO: 4079823 - RNA, 20 nt, Variola virus
auauuuguuaucaugaugac

SEQ ID NO: 4079824 - RNA, 21 nt, Variola virus
auauuuguuccuguagauaau

SEQ ID NO: 4079825 - RNA, 14 nt, Variola virus
auauuuuacagcca

SEQ ID NO: 4079826 - RNA, 14 nt, Variola virus
auauuuuaguuuug

SEQ ID NO: 4079827 - RNA, 14 nt, Variola virus
auauuuuuaauagc

SEQ ID NO: 4079828 - RNA, 22 nt, Variola virus
auauuuuucuauguuaggaaua

SEQ ID NO: 4079829 - RNA, 17 nt, Variola virus
auauuuuucuuaacaag

SEQ ID NO: 4079830 - RNA, 16 nt, Variola virus
auauuuuuuaacuagu

SEQ ID NO: 4079831 - RNA, 12 nt, Variola virus
aucaaaaaauuu

SEQ ID NO: 4079832 - RNA, 17 nt, Variola virus
aucaaaaaguaagauau

SEQ ID NO: 4079833 - RNA, 14 nt, Variola virus
aucaaaacaaaauu

SEQ ID NO: 4079834 - RNA, 14 nt, Variola virus
aucaaauucauuau

SEQ ID NO: 4079835 - RNA, 16 nt, Variola virus
aucaacaauuuuguau

SEQ ID NO: 4079836 - RNA, 14 nt, Variola virus
aucaacagaaauau

SEQ ID NO: 4079837 - RNA, 20 nt, Variola virus
aucaacgaguuaaaaaagac

SEQ ID NO: 4079838 - RNA, 21 nt, Variola virus
aucaacugcguugauuaaaaa

SEQ ID NO: 4079839 - RNA, 16 nt, Variola virus
aucaacuuauucuuaa

SEQ ID NO: 4079840 - RNA, 14 nt, Variola virus
aucaagaaacauuu

SEQ ID NO: 4079841 - RNA, 21 nt, Variola virus
aucaagaguaacuauugacuu

SEQ ID NO: 4079842 - RNA, 23 nt, Variola virus
aucaagucuuuauacaaugacau

SEQ ID NO: 4079843 - RNA, 14 nt, Variola virus
aucaaguggauaaa

SEQ ID NO: 4079844 - RNA, 13 nt, Variola virus
aucaauaaaugug

SEQ ID NO: 4079845 - RNA, 21 nt, Variola virus
aucaauaccaaagaaggaaga

SEQ ID NO: 4079846 - RNA, 21 nt, Variola virus
aucaauaccuuuucuggcuaa

SEQ ID NO: 4079847 - RNA, 14 nt, Variola virus
aucaaucaaaagac

SEQ ID NO: 4079848 - RNA, 12 nt, Variola virus
aucaauguacau

SEQ ID NO: 4079849 - RNA, 22 nt, Variola virus
aucacaaaaaaaacuucucuaa

SEQ ID NO: 4079850 - RNA, 13 nt, Variola virus
aucacaaacauua

SEQ ID NO: 4079851 - RNA, 14 nt, Variola virus
aucacaaaccacca

SEQ ID NO: 4079852 - RNA, 19 nt, Variola virus
aucacagucuguuuuggua

SEQ ID NO: 4079853 - RNA, 16 nt, Variola virus
aucacauaugcaaaga

SEQ ID NO: 4079854 - RNA, 17 nt, Variola virus
cuuagaaaucaacaauc

SEQ ID NO: 4079855 - RNA, 22 nt, Variola virus
cuuauaaaacuauauuuggaau

SEQ ID NO: 4079856 - RNA, 17 nt, Variola virus
cuuauacaggucauuac

SEQ ID NO: 4079857 - RNA, 22 nt, Variola virus
cuuauauaccgccucaaacucu

SEQ ID NO: 4079858 - RNA, 18 nt, Variola virus
cuuaugaaagaacgcauu

SEQ ID NO: 4079859 - RNA, 22 nt, Variola virus
cuuaugauauaaggaaacagcu

SEQ ID NO: 4079860 - RNA, 15 nt, Variola virus
cuuauuauauuuccc

SEQ ID NO: 4079861 - RNA, 16 nt, Variola virus
cuuauucauauuuuag

SEQ ID NO: 4079862 - RNA, 16 nt, Variola virus
cuuauucuuaaaaucu

SEQ ID NO: 4079863 - RNA, 17 nt, Variola virus
cuuauuuuuaaaaauua

SEQ ID NO: 4079864 - RNA, 15 nt, Variola virus
cuucaauagauaccu

SEQ ID NO: 4079865 - RNA, 22 nt, Variola virus
cuucacagauagaucauuuuga

SEQ ID NO: 4079866 - RNA, 18 nt, Variola virus
cuucaggagauccugcau

SEQ ID NO: 4079867 - RNA, 20 nt, Variola virus
cuucauaaaagaaaauacua

SEQ ID NO: 4079868 - RNA, 12 nt, Variola virus
cuucaucuguaa

SEQ ID NO: 4079869 - RNA, 20 nt, Variola virus
cuucauucguaaaucuuuuc

SEQ ID NO: 4079870 - RNA, 16 nt, Variola virus
cuucuaaugcuguacu

SEQ ID NO: 4079871 - RNA, 19 nt, Variola virus
cuucuaggacggcgauucu

SEQ ID NO: 4079872 - RNA, 12 nt, Variola virus
cuucuauacaaa

SEQ ID NO: 4079873 - RNA, 17 nt, Variola virus
cuucucuguuuaaugaa

SEQ ID NO: 4079874 - RNA, 16 nt, Variola virus
cuugaaauacauguaa

SEQ ID NO: 4079875 - RNA, 15 nt, Variola virus
cuugaaccaaacauu

SEQ ID NO: 4079876 - RNA, 22 nt, Variola virus
cuugauaaccuuggcugucuca

SEQ ID NO: 4079877 - RNA, 12 nt, Variola virus
cuugaucauuuc

SEQ ID NO: 4079878 - RNA, 15 nt, Variola virus
cuugauuacauucuc

SEQ ID NO: 4079879 - RNA, 23 nt, Variola virus
cuugauuauucuauaaguauaaa

SEQ ID NO: 4079880 - RNA, 20 nt, Variola virus
cuuggaugaccauauauuua

SEQ ID NO: 4079881 - RNA, 15 nt, Variola virus
cuuguauauauuguu

SEQ ID NO: 4079882 - RNA, 13 nt, Variola virus
cuuguauuuugau

SEQ ID NO: 4079883 - RNA, 20 nt, Variola virus
cuuguuugauaaauguagcu

SEQ ID NO: 4079884 - RNA, 12 nt, Variola virus
cuuuaaaaauuu

SEQ ID NO: 4079885 - RNA, 15 nt, Variola virus
cuuuaaaagaaacug

SEQ ID NO: 4079886 - RNA, 15 nt, Variola virus
cuuuauaacugaacu

SEQ ID NO: 4079887 - RNA, 16 nt, Variola virus
cuuuauaauuaaugaa

SEQ ID NO: 4079888 - RNA, 15 nt, Variola virus
cuuuauuuuaucuau

SEQ ID NO: 4079889 - RNA, 18 nt, Variola virus
cuuucuguauccagguag

SEQ ID NO: 4079890 - RNA, 15 nt, Variola virus
cuuugaagagauauu

SEQ ID NO: 4079891 - RNA, 13 nt, Variola virus
cuuugauuaauga

SEQ ID NO: 4079892 - RNA, 19 nt, Variola virus
cuuuggagucucaucuuua

SEQ ID NO: 4079893 - RNA, 18 nt, Variola virus
cuuugguucuuuaaaaga

SEQ ID NO: 4079894 - RNA, 17 nt, Variola virus
cuuugguuuaauuauuu

SEQ ID NO: 4079895 - RNA, 18 nt, Variola virus
cuuuguagagaaaaauuc

SEQ ID NO: 4079896 - RNA, 13 nt, Variola virus
cuuuguuaaaaac

SEQ ID NO: 4079897 - RNA, 15 nt, Variola virus
cuuuguuggaagaau

SEQ ID NO: 4079898 - RNA, 20 nt, Variola virus
cuuuuagaagugauucuuug

SEQ ID NO: 4079899 - RNA, 22 nt, Variola virus
cuuuuagaagugauucuuugau

SEQ ID NO: 4079900 - RNA, 22 nt, Variola virus
cuuuuagagguucccaauucca

SEQ ID NO: 4079901 - RNA, 11 nt, Variola virus
cuuuuuaggaa

SEQ ID NO: 4079902 - RNA, 23 nt, Variola virus
cuuuuuugacaggaucagguucu

SEQ ID NO: 4079903 - RNA, 23 nt, Variola virus
cuuuuuuuagagaugaaaaauuu

SEQ ID NO: 4079904 - RNA, 12 nt, Variola virus
gaaaaaauaacu

SEQ ID NO: 4079905 - RNA, 12 nt, Variola virus
gaaaaaauagcu

SEQ ID NO: 4079906 - RNA, 13 nt, Variola virus
gaaaaacacauuu

SEQ ID NO: 4079907 - RNA, 23 nt, Variola virus
gaaaacgagaagcggauaaugau

SEQ ID NO: 4079908 - RNA, 20 nt, Variola virus
gaaaacgagccaguaaucuu

SEQ ID NO: 4079909 - RNA, 18 nt, Variola virus
gaaaagcuuaaaauagcu

SEQ ID NO: 4079910 - RNA, 16 nt, Variola virus
gaaaauaaauaauggu

SEQ ID NO: 4079911 - RNA, 14 nt, Variola virus
gaaaauaaauacaa

SEQ ID NO: 4079912 - RNA, 12 nt, Variola virus
gaaaauaaugac

SEQ ID NO: 4079913 - RNA, 17 nt, Variola virus
gaaaauacuaaaucaga

SEQ ID NO: 4079914 - RNA, 12 nt, Variola virus
gaaaauauuaaa

SEQ ID NO: 4079915 - RNA, 22 nt, Variola virus
gaaaauauuuaaaaaauaucua

SEQ ID NO: 4079916 - RNA, 16 nt, Variola virus
gaaaaucauacagaca

SEQ ID NO: 4079917 - RNA, 22 nt, Variola virus
gaaaaugugcuucuaugagauu

SEQ ID NO: 4079918 - RNA, 22 nt, Variola virus
gaaaauucuaauggaugauguu

SEQ ID NO: 4079919 - RNA, 21 nt, Variola virus
gaaaauuuuuaauuauaauau

SEQ ID NO: 4079920 - RNA, 18 nt, Variola virus
gaaacuauagauaaugau

SEQ ID NO: 4079921 - RNA, 20 nt, Variola virus
gaaacuaugucaaaaauugu

SEQ ID NO: 4079922 - RNA, 20 nt, Variola virus
gaaagaaucaaaagaaugau

SEQ ID NO: 4079923 - RNA, 16 nt, Variola virus
gaaagacgaauauuau

SEQ ID NO: 4079924 - RNA, 18 nt, Variola virus
gaaagauaccgaucacgu

SEQ ID NO: 4079925 - RNA, 21 nt, Variola virus
gaaagcaguugcgaacaacaa

SEQ ID NO: 4079926 - RNA, 20 nt, Variola virus
gaaagcuguaaugguuuaua

SEQ ID NO: 4079927 - RNA, 16 nt, Variola virus
gaaaguuuuauaugua

SEQ ID NO: 4079928 - RNA, 23 nt, Variola virus
gaaauacuuuauuacuccauuaa

SEQ ID NO: 4079929 - RNA, 15 nt, Variola virus
gaaauagauaaugaa

SEQ ID NO: 4079930 - RNA, 14 nt, Variola virus
gaaauauaccgaua

SEQ ID NO: 4079931 - RNA, 22 nt, Variola virus
gaaauauauacauauuuuaguu

SEQ ID NO: 4079932 - RNA, 17 nt, Variola virus
gaaauauaugagaugua

SEQ ID NO: 4079933 - RNA, 16 nt, Variola virus
gaaauauauuguuaaa

SEQ ID NO: 4079934 - RNA, 20 nt, Variola virus
gaaauauguauacauaauau

SEQ ID NO: 4079935 - RNA, 11 nt, Variola virus
gaaauauuaaa

SEQ ID NO: 4079936 - RNA, 14 nt, Variola virus
gaaaucuaguucug

SEQ ID NO: 4079937 - RNA, 19 nt, Variola virus
gaaaucuaucuuauauaca

SEQ ID NO: 4079938 - RNA, 13 nt, Variola virus
gaaauuagaaaau

SEQ ID NO: 4079939 - RNA, 20 nt, Variola virus
gaaauucuaucucuaagacg

SEQ ID NO: 4079940 - RNA, 19 nt, Variola virus
gaaauugguuuauaaugua

SEQ ID NO: 4079941 - RNA, 22 nt, Variola virus
gaaauugucacuacuaaaucaa

SEQ ID NO: 4079942 - RNA, 16 nt, Variola virus
gaaauuuaaaauuaga

SEQ ID NO: 4079943 - RNA, 18 nt, Variola virus
gaaauuuauacucaucau

SEQ ID NO: 4079944 - RNA, 16 nt, Variola virus
gaacaauaaacaaaau

SEQ ID NO: 4079945 - RNA, 14 nt, Variola virus
gaacaauuuacuuu

SEQ ID NO: 4079946 - RNA, 21 nt, Variola virus
gaacacgauuauuauaaaaua

SEQ ID NO: 4079947 - RNA, 13 nt, Variola virus
gaacagaugauau

SEQ ID NO: 4079948 - RNA, 20 nt, Variola virus
gaacauaugguauuauucua

SEQ ID NO: 4079949 - RNA, 20 nt, Variola virus
gaacaucaguacuauuguug

SEQ ID NO: 4079950 - RNA, 22 nt, Variola virus
gaacauccuccggaguauuaau

SEQ ID NO: 4079951 - RNA, 21 nt, Variola virus
gaacaucuugauuauaauaua

SEQ ID NO: 4079952 - RNA, 12 nt, Variola virus
gaacaugaugau

SEQ ID NO: 4079953 - RNA, 16 nt, Variola virus
gaacccaauuacgaua

SEQ ID NO: 4079954 - RNA, 16 nt, Variola virus
gaacgauaaacaaauu

SEQ ID NO: 4079955 - RNA, 16 nt, Variola virus
gaacgguuuauuucua

SEQ ID NO: 4079956 - RNA, 13 nt, Variola virus
gaacuaagagaaa

SEQ ID NO: 4079957 - RNA, 12 nt, Variola virus
gaacuaauaaag

SEQ ID NO: 4079958 - RNA, 13 nt, Variola virus
gaacuaauaugau

SEQ ID NO: 4079959 - RNA, 18 nt, Variola virus
gaacuaauccacauauga

SEQ ID NO: 4079960 - RNA, 17 nt, Variola virus
gaacuagacaauaaugu

SEQ ID NO: 4079961 - RNA, 17 nt, Variola virus
gaacuagauauauuaau

SEQ ID NO: 4079962 - RNA, 22 nt, Variola virus
gaacuauaaaaaaaauaauaau

SEQ ID NO: 4079963 - RNA, 13 nt, Variola virus
gaacuauauuaag

SEQ ID NO: 4079964 - RNA, 23 nt, Variola virus
gaacucccacccaugauaaugaa

SEQ ID NO: 4079965 - RNA, 13 nt, Variola virus
gaacucuguuucu

SEQ ID NO: 4079966 - RNA, 14 nt, Variola virus
gaacugaugccuau

SEQ ID NO: 4079967 - RNA, 19 nt, Variola virus
gaacuuuaaacagaaauau

SEQ ID NO: 4079968 - RNA, 17 nt, Variola virus
gaagaauuaauaaacaa

SEQ ID NO: 4079969 - RNA, 13 nt, Variola virus
gaagacaaucaag

SEQ ID NO: 4079970 - RNA, 16 nt, Variola virus
gaagagaaaagucaau

SEQ ID NO: 4079971 - RNA, 22 nt, Variola virus
gaagagauuccugacuuugcau

SEQ ID NO: 4079972 - RNA, 22 nt, Variola virus
gaagagucgcgaauaacgauau

SEQ ID NO: 4079973 - RNA, 16 nt, Variola virus
gaagauguuagaaaaa

SEQ ID NO: 4079974 - RNA, 16 nt, Variola virus
gaaggagauacuauca

SEQ ID NO: 4079975 - RNA, 15 nt, Variola virus
gaagugguuaaucuu

SEQ ID NO: 4079976 - RNA, 16 nt, Variola virus
gaaguuguauacuauc

SEQ ID NO: 4079977 - RNA, 22 nt, Variola virus
gaauaacuuugauaauaaggau

SEQ ID NO: 4079978 - RNA, 16 nt, Variola virus
gaauaaucguuauuau

SEQ ID NO: 4079979 - RNA, 18 nt, Variola virus
gaauaaucguuauuauca

SEQ ID NO: 4079980 - RNA, 13 nt, Variola virus
guauaaucuuuaa

SEQ ID NO: 4079981 - RNA, 19 nt, Variola virus
guauacauaauauuaucau

SEQ ID NO: 4079982 - RNA, 16 nt, Variola virus
guauacgcagaaaaga

SEQ ID NO: 4079983 - RNA, 14 nt, Variola virus
guauacucuauucg

SEQ ID NO: 4079984 - RNA, 16 nt, Variola virus
guauacuugucaucau

SEQ ID NO: 4079985 - RNA, 17 nt, Variola virus
guauauaucaugaugau

SEQ ID NO: 4079986 - RNA, 18 nt, Variola virus
guauaugugaauaugaca

SEQ ID NO: 4079987 - RNA, 13 nt, Variola virus
guauauuauucau

SEQ ID NO: 4079988 - RNA, 15 nt, Variola virus
guaucauauauuaaa

SEQ ID NO: 4079989 - RNA, 16 nt, Variola virus
guaucaugaacucuaa

SEQ ID NO: 4079990 - RNA, 15 nt, Variola virus
guauccauaaacaau

SEQ ID NO: 4079991 - RNA, 17 nt, Variola virus
guaucgaaaaacuuuaa

SEQ ID NO: 4079992 - RNA, 20 nt, Variola virus
guaucgacaucuuuauuauu

SEQ ID NO: 4079993 - RNA, 19 nt, Variola virus
guaucgauaauuauuucug

SEQ ID NO: 4079994 - RNA, 19 nt, Variola virus
guaucuaauauagauuuua

SEQ ID NO: 4079995 - RNA, 16 nt, Variola virus
guaucuacgauuuuua

SEQ ID NO: 4079996 - RNA, 14 nt, Variola virus
guaucuuuacuaga

SEQ ID NO: 4079997 - RNA, 17 nt, Variola virus
guaugauagcuccacca

SEQ ID NO: 4079998 - RNA, 13 nt, Variola virus
guaugauauguau

SEQ ID NO: 4079999 - RNA, 19 nt, Variola virus
guauggaauauaauaaucu

SEQ ID NO: 4080000 - RNA, 18 nt, Variola virus
guaugucuuauguauauu

SEQ ID NO: 4080001 - RNA, 21 nt, Variola virus
guaugugugugugguauagau

SEQ ID NO: 4080002 - RNA, 15 nt, Variola virus
guauuaacuauauca

SEQ ID NO: 4080003 - RNA, 17 nt, Variola virus
guauucaguuucaucaa

SEQ ID NO: 4080004 - RNA, 19 nt, Variola virus
guauucauuuaucacaaaa

SEQ ID NO: 4080005 - RNA, 13 nt, Variola virus
guauucuuggaua

SEQ ID NO: 4080006 - RNA, 21 nt, Variola virus
guauugacaauacuguauuau

SEQ ID NO: 4080007 - RNA, 16 nt, Variola virus
guauuggauguaugca

SEQ ID NO: 4080008 - RNA, 19 nt, Variola virus
guauuguuaauagauauau

SEQ ID NO: 4080009 - RNA, 11 nt, Variola virus
guauuuaagag

SEQ ID NO: 4080010 - RNA, 16 nt, Variola virus
guauuugaaaauggaa

SEQ ID NO: 4080011 - RNA, 16 nt, Variola virus
guauuuuauuuuggaa

SEQ ID NO: 4080012 - RNA, 18 nt, Variola virus
guauuuuuggugauaaau

SEQ ID NO: 4080013 - RNA, 22 nt, Variola virus
guauuuuuguuagaguauauaa

SEQ ID NO: 4080014 - RNA, 20 nt, Variola virus
guauuuuuuaugacaaacuu

SEQ ID NO: 4080015 - RNA, 14 nt, Variola virus
gucaacaaaaaugu

SEQ ID NO: 4080016 - RNA, 22 nt, Variola virus
gucaaccuuuguuguacaaauu

SEQ ID NO: 4080017 - RNA, 14 nt, Variola virus
gucaagaugaugaa

SEQ ID NO: 4080018 - RNA, 14 nt, Variola virus
gucaauauucuguu

SEQ ID NO: 4080019 - RNA, 15 nt, Variola virus
gucaauauuguuuua

SEQ ID NO: 4080020 - RNA, 16 nt, Variola virus
gucaaucuaauauuaa

SEQ ID NO: 4080021 - RNA, 19 nt, Variola virus
gucaauggaccccaacauc

SEQ ID NO: 4080022 - RNA, 16 nt, Variola virus
gucaauggagaaauac

SEQ ID NO: 4080023 - RNA, 15 nt, Variola virus
gucaauugauucuua

SEQ ID NO: 4080024 - RNA, 18 nt, Variola virus
gucaauuggaguaucauc

SEQ ID NO: 4080025 - RNA, 23 nt, Variola virus
gucacuaacugauaccaugaaau

SEQ ID NO: 4080026 - RNA, 19 nt, Variola virus
gucacuacguaauaaaagu

SEQ ID NO: 4080027 - RNA, 17 nt, Variola virus
gucauaacuuaguucuu

SEQ ID NO: 4080028 - RNA, 16 nt, Variola virus
gucauauucucauaau

SEQ ID NO: 4080029 - RNA, 20 nt, Variola virus
gucaucaaguagugauuuug

SEQ ID NO: 4080030 - RNA, 17 nt, Variola virus
gucaucgcguuguuuua

SEQ ID NO: 4080031 - RNA, 17 nt, Variola virus
gucaucuuauguuuuua

SEQ ID NO: 4080032 - RNA, 16 nt, Variola virus
gucauguugauacauc

SEQ ID NO: 4080033 - RNA, 16 nt, Variola virus
guccauuaucaguaau

SEQ ID NO: 4080034 - RNA, 15 nt, Variola virus
guccguuauauaauc

SEQ ID NO: 4080035 - RNA, 12 nt, Variola virus
gucgcacgcucc

SEQ ID NO: 4080036 - RNA, 18 nt, Variola virus
gucggaaaucuuaaccaa

SEQ ID NO: 4080037 - RNA, 19 nt, Variola virus
gucggaguaguacaagaaa

SEQ ID NO: 4080038 - RNA, 22 nt, Variola virus
gucgucgaaauaucuuuccaac

SEQ ID NO: 4080039 - RNA, 21 nt, Variola virus
gucguucuuccucaaguucuc

SEQ ID NO: 4080040 - RNA, 21 nt, Variola virus
gucuaaacguuguuuacucau

SEQ ID NO: 4080041 - RNA, 20 nt, Variola virus
gucuaaagaugacugauauu

SEQ ID NO: 4080042 - RNA, 13 nt, Variola virus
gucuaaugaugaa

SEQ ID NO: 4080043 - RNA, 16 nt, Variola virus
gucuacuuaaauguau

SEQ ID NO: 4080044 - RNA, 22 nt, Variola virus
gucuagagcaucaauguccugc

SEQ ID NO: 4080045 - RNA, 15 nt, Variola virus
gucuaucaauaacug

SEQ ID NO: 4080046 - RNA, 20 nt, Variola virus
gucuauccauuguuucacau

SEQ ID NO: 4080047 - RNA, 19 nt, Variola virus
gucuaugaauaugauuuuu

SEQ ID NO: 4080048 - RNA, 15 nt, Variola virus
gucuaugauauccuc

SEQ ID NO: 4080049 - RNA, 19 nt, Variola virus
gucuauucaacacuacuau

SEQ ID NO: 4080050 - RNA, 13 nt, Variola virus
gucuauuguuaau

SEQ ID NO: 4080051 - RNA, 23 nt, Variola virus
gucucaugucgcaauaaauauga

SEQ ID NO: 4080052 - RNA, 15 nt, Variola virus
gucuccaauauauga

SEQ ID NO: 4080053 - RNA, 13 nt, Variola virus
gucucuuaaagga

SEQ ID NO: 4080054 - RNA, 14 nt, Variola virus
gucugaacaucaau

SEQ ID NO: 4080055 - RNA, 15 nt, Variola virus
gucugucucagaauc

SEQ ID NO: 4080056 - RNA, 15 nt, Variola virus
gucuguuaauagaca

SEQ ID NO: 4080057 - RNA, 17 nt, Variola virus
gucuuaccuuacuaucu

SEQ ID NO: 4080058 - RNA, 22 nt, Variola virus
gucuuauaugaagucuauacag

SEQ ID NO: 4080059 - RNA, 12 nt, Variola virus
gucuuauccauu

SEQ ID NO: 4080060 - RNA, 13 nt, Variola virus
gucuuggaagcaa

SEQ ID NO: 4080061 - RNA, 17 nt, Variola virus
gucuuuucugaaguagg

SEQ ID NO: 4080062 - RNA, 20 nt, Variola virus
gugaauagauagguauuuua

SEQ ID NO: 4080063 - RNA, 19 nt, Variola virus
gugagaacuuguuaaagaa

SEQ ID NO: 4080064 - RNA, 22 nt, Variola virus
gugauaaacuugugcuaaucuc

SEQ ID NO: 4080065 - RNA, 17 nt, Variola virus
gugauaaguaauaacua

SEQ ID NO: 4080066 - RNA, 21 nt, Variola virus
gugauaccgauagugauuuug

SEQ ID NO: 4080067 - RNA, 16 nt, Variola virus
gugaucaauuuccaac

SEQ ID NO: 4080068 - RNA, 16 nt, Variola virus
gugauuguucaaucaa

SEQ ID NO: 4080069 - RNA, 15 nt, Variola virus
gugcagauaaucauu

SEQ ID NO: 4080070 - RNA, 18 nt, Variola virus
gugcucaaacaaaaugug

SEQ ID NO: 4080071 - RNA, 14 nt, Variola virus
gugcuuaauguuuc

SEQ ID NO: 4080072 - RNA, 23 nt, Variola virus
guggaggauggucccgaugauga

SEQ ID NO: 4080073 - RNA, 12 nt, Variola virus
gugggaugaugu

SEQ ID NO: 4080074 - RNA, 16 nt, Variola virus
guguaauguaaucaua

SEQ ID NO: 4080075 - RNA, 21 nt, Variola virus
guguacguauauuuagauguu

SEQ ID NO: 4080076 - RNA, 21 nt, Variola virus
guguacuagucauaauaucuu

SEQ ID NO: 4080077 - RNA, 17 nt, Variola virus
guguauaaaauauacug

SEQ ID NO: 4080078 - RNA, 19 nt, Variola virus
guguauacaguauaggaaa

SEQ ID NO: 4080079 - RNA, 19 nt, Variola virus
guguauuaaauagaauauu

SEQ ID NO: 4080080 - RNA, 21 nt, Variola virus
gugucaaacuguguagcuaga

SEQ ID NO: 4080081 - RNA, 15 nt, Variola virus
guguccauaauccuc

SEQ ID NO: 4080082 - RNA, 13 nt, Variola virus
guguuauaauauu

SEQ ID NO: 4080083 - RNA, 22 nt, Variola virus
guguuccggagaaucaguaaag

SEQ ID NO: 4080084 - RNA, 14 nt, Variola virus
guguucuauacguc

SEQ ID NO: 4080085 - RNA, 13 nt, Variola virus
guguuuagauauu

SEQ ID NO: 4080086 - RNA, 18 nt, Variola virus
guuaaaaaaauuauccua

SEQ ID NO: 4080087 - RNA, 17 nt, Variola virus
guuaaacugugaauguc

SEQ ID NO: 4080088 - RNA, 14 nt, Variola virus
guuaaagaaauuaa

SEQ ID NO: 4080089 - RNA, 23 nt, Variola virus
guuaaaugguucgauauaaagga

SEQ ID NO: 4080090 - RNA, 19 nt, Variola virus
guuaaauuuuacaaaucua

SEQ ID NO: 4080091 - RNA, 16 nt, Variola virus
guuaacauuuuauuau

SEQ ID NO: 4080092 - RNA, 17 nt, Variola virus
guuaacauuuuauuauu

SEQ ID NO: 4080093 - RNA, 19 nt, Variola virus
guuaacuuugauuauccua

SEQ ID NO: 4080094 - RNA, 11 nt, Variola virus
guuaauacagg

SEQ ID NO: 4080095 - RNA, 22 nt, Variola virus
guuaauacuuauucauauuuua

SEQ ID NO: 4080096 - RNA, 23 nt, Variola virus
guuaaucgucgaacguucuagua

SEQ ID NO: 4080097 - RNA, 19 nt, Variola virus
guuaauuuaucacauauca

SEQ ID NO: 4080098 - RNA, 12 nt, Variola virus
guuaauuuuacu

SEQ ID NO: 4080099 - RNA, 19 nt, Variola virus
guuacauuuccaugucaaa

SEQ ID NO: 4080100 - RNA, 22 nt, Variola virus
guuaccucguucugauaauaga

SEQ ID NO: 4080101 - RNA, 14 nt, Variola virus
guuacgaugaugaa

SEQ ID NO: 4080102 - RNA, 19 nt, Variola virus
guuagaacgguuauagcau

SEQ ID NO: 4080103 - RNA, 20 nt, Variola virus
guuagaucgucuauauauga

SEQ ID NO: 4080104 - RNA, 19 nt, Variola virus
guuagcugucguucaagau

SEQ ID NO: 4080105 - RNA, 13 nt, Variola virus
guuaguaaucaug

SEQ ID NO: 4080106 - RNA, 16 nt, Variola virus
uguaauagaauuuaua

SEQ ID NO: 4080107 - RNA, 18 nt, Variola virus
uguaauuuagaauacguu

SEQ ID NO: 4080108 - RNA, 17 nt, Variola virus
uguacauuaauaaauga

SEQ ID NO: 4080109 - RNA, 14 nt, Variola virus
uguacauuauuaca

SEQ ID NO: 4080110 - RNA, 16 nt, Variola virus
uguacuaucuagagau

SEQ ID NO: 4080111 - RNA, 17 nt, Variola virus
uguacuuaacaugauua

SEQ ID NO: 4080112 - RNA, 17 nt, Variola virus
uguagauggauguagca

SEQ ID NO: 4080113 - RNA, 14 nt, Variola virus
uguaggaaaaagau

SEQ ID NO: 4080114 - RNA, 18 nt, Variola virus
uguauaaaaacagaaaua

SEQ ID NO: 4080115 - RNA, 18 nt, Variola virus
uguauacaccaacuguau

SEQ ID NO: 4080116 - RNA, 17 nt, Variola virus
uguauaucuauaauguu

SEQ ID NO: 4080117 - RNA, 19 nt, Variola virus
uguaucaaacaguuuggua

SEQ ID NO: 4080118 - RNA, 21 nt, Variola virus
uguaucauauucaacauguuu

SEQ ID NO: 4080119 - RNA, 16 nt, Variola virus
uguauccauacauaca

SEQ ID NO: 4080120 - RNA, 19 nt, Variola virus
uguaucgagacguggagau

SEQ ID NO: 4080121 - RNA, 18 nt, Variola virus
uguauggguaauaguguu

SEQ ID NO: 4080122 - RNA, 18 nt, Variola virus
uguauguuuaaacacucu

SEQ ID NO: 4080123 - RNA, 12 nt, Variola virus
uguauuaaauag

SEQ ID NO: 4080124 - RNA, 21 nt, Variola virus
uguauuuggaucuuuuguaca

SEQ ID NO: 4080125 - RNA, 20 nt, Variola virus
ugucacauacacuagugaua

SEQ ID NO: 4080126 - RNA, 18 nt, Variola virus
ugucaucaguuauguacg

SEQ ID NO: 4080127 - RNA, 22 nt, Variola virus
uguccuauuucaaaaguuuuua

SEQ ID NO: 4080128 - RNA, 20 nt, Variola virus
ugucuacacauccuuuugua

SEQ ID NO: 4080129 - RNA, 23 nt, Variola virus
ugucuagaacggcaauugucuua

SEQ ID NO: 4080130 - RNA, 18 nt, Variola virus
ugucucagaaucaaauau

SEQ ID NO: 4080131 - RNA, 14 nt, Variola virus
ugucucuguuuuua

SEQ ID NO: 4080132 - RNA, 16 nt, Variola virus
ugucugcuuucuuuua

SEQ ID NO: 4080133 - RNA, 20 nt, Variola virus
ugucuggagaucuaaagaua

SEQ ID NO: 4080134 - RNA, 23 nt, Variola virus
ugucuuggaagcaauuacagauu

SEQ ID NO: 4080135 - RNA, 18 nt, Variola virus
ugugaagguuuagauguc

SEQ ID NO: 4080136 - RNA, 17 nt, Variola virus
ugugacuagacugauuu

SEQ ID NO: 4080137 - RNA, 14 nt, Variola virus
ugugauuguucaau

SEQ ID NO: 4080138 - RNA, 23 nt, Variola virus
uguggccucgaauacaaauuuua

SEQ ID NO: 4080139 - RNA, 17 nt, Variola virus
uguguaguuuucacaau

SEQ ID NO: 4080140 - RNA, 14 nt, Variola virus
ugugucuacauaaa

SEQ ID NO: 4080141 - RNA, 17 nt, Variola virus
ugugucuccauguacau

SEQ ID NO: 4080142 - RNA, 13 nt, Variola virus
ugugucuguuaau

SEQ ID NO: 4080143 - RNA, 15 nt, Variola virus
ugugugugugguaua

SEQ ID NO: 4080144 - RNA, 18 nt, Variola virus
uguuaaaaauaugugcuc

SEQ ID NO: 4080145 - RNA, 16 nt, Variola virus
uguuaauuauuucuaa

SEQ ID NO: 4080146 - RNA, 13 nt, Variola virus
uguuaauuuugaa

SEQ ID NO: 4080147 - RNA, 23 nt, Variola virus
uguuacucaguugaacagaugau

SEQ ID NO: 4080148 - RNA, 15 nt, Variola virus
uguuauaaguuuuua

SEQ ID NO: 4080149 - RNA, 21 nt, Variola virus
uguuauacacggucuagagca

SEQ ID NO: 4080150 - RNA, 13 nt, Variola virus
uguucacauccuu

SEQ ID NO: 4080151 - RNA, 21 nt, Variola virus
uguugcuucauccagaucauu

SEQ ID NO: 4080152 - RNA, 18 nt, Variola virus
uguuguaaggauccuggu

SEQ ID NO: 4080153 - RNA, 16 nt, Variola virus
uguuguuacauuucca

SEQ ID NO: 4080154 - RNA, 21 nt, Variola virus
uguuuaacaaagauauuacca

SEQ ID NO: 4080155 - RNA, 23 nt, Variola virus
uguuuaacauucuuuuuuggaga

SEQ ID NO: 4080156 - RNA, 22 nt, Variola virus
uguuuagaaauagcucuuagua

SEQ ID NO: 4080157 - RNA, 21 nt, Variola virus
uguuucaucuaucauagauuu

SEQ ID NO: 4080158 - RNA, 21 nt, Variola virus
uguuucuacuccauaauacuc

SEQ ID NO: 4080159 - RNA, 19 nt, Variola virus
uguuugcugcguguauaac

SEQ ID NO: 4080160 - RNA, 20 nt, Variola virus
uguuuuugaacuguucaaaa

SEQ ID NO: 4080161 - RNA, 21 nt, Variola virus
uguuuuugaacuguucaaaau

SEQ ID NO: 4080162 - RNA, 19 nt, Variola virus
uuaaaaaaaaauacuuauu

SEQ ID NO: 4080163 - RNA, 13 nt, Variola virus
uuaaaaaaauuaa

SEQ ID NO: 4080164 - RNA, 16 nt, Variola virus
uuaaaaaguuaucuuu

SEQ ID NO: 4080165 - RNA, 13 nt, Variola virus
uuaaaauauuguu

SEQ ID NO: 4080166 - RNA, 12 nt, Variola virus
uuaaaaugagua

SEQ ID NO: 4080167 - RNA, 16 nt, Variola virus
uuaaaaugauuauucc

SEQ ID NO: 4080168 - RNA, 12 nt, Variola virus
uuaaaauuauuu

SEQ ID NO: 4080169 - RNA, 21 nt, Variola virus
uuaaacaaauaaguauuauca

SEQ ID NO: 4080170 - RNA, 18 nt, Variola virus
uuaaacgauuuauaaaaa

SEQ ID NO: 4080171 - RNA, 22 nt, Variola virus
uuaaacuguaucgaucauucuu

SEQ ID NO: 4080172 - RNA, 19 nt, Variola virus
uuaaacuucgcaauauuca

SEQ ID NO: 4080173 - RNA, 14 nt, Variola virus
uuaaagaauguaua

SEQ ID NO: 4080174 - RNA, 22 nt, Variola virus
uuaaagagacuacaauauauuc

SEQ ID NO: 4080175 - RNA, 21 nt, Variola virus
uuaaagaugacaauauuauua

SEQ ID NO: 4080176 - RNA, 14 nt, Variola virus
uuaaagauggagua

SEQ ID NO: 4080177 - RNA, 22 nt, Variola virus
uuaaaggauaaaauauuaucca

SEQ ID NO: 4080178 - RNA, 24 nt, Variola virus
uuaaaggauggcgaaauuauugca

SEQ ID NO: 4080179 - RNA, 14 nt, Variola virus
uuaaaguuauuaau

SEQ ID NO: 4080180 - RNA, 15 nt, Variola virus
uuaaauaauguauca

SEQ ID NO: 4080181 - RNA, 13 nt, Variola virus
uuaaauauugauc

SEQ ID NO: 4080182 - RNA, 15 nt, Variola virus
uuaaaucguuguucu

SEQ ID NO: 4080183 - RNA, 17 nt, Variola virus
uuaaaugucauauuaau

SEQ ID NO: 4080184 - RNA, 13 nt, Variola virus
uuaaauguuuucu

SEQ ID NO: 4080185 - RNA, 23 nt, Variola virus
uuaaauuaauaauggauauagua

SEQ ID NO: 4080186 - RNA, 13 nt, Variola virus
uuaaauucuuuaa

SEQ ID NO: 4080187 - RNA, 23 nt, Variola virus
uuaacaaaugguucaaagacuag

SEQ ID NO: 4080188 - RNA, 20 nt, Variola virus
uuaacaccuccacaguuuuu

SEQ ID NO: 4080189 - RNA, 11 nt, Variola virus
uuaacaucuug

SEQ ID NO: 4080190 - RNA, 20 nt, Variola virus
uuaacauuuuggcaaauuga

SEQ ID NO: 4080191 - RNA, 17 nt, Variola virus
uuaaccaacugauuaau

SEQ ID NO: 4080192 - RNA, 20 nt, Variola virus
uuaacccacgauuuaauauu

SEQ ID NO: 4080193 - RNA, 19 nt, Variola virus
uuaaccuuuuuaguaaaug

SEQ ID NO: 4080194 - RNA, 18 nt, Variola virus
uuaacgcaccuauaaaga

SEQ ID NO: 4080195 - RNA, 21 nt, Variola virus
uuaacuaagucaauuauuuca

SEQ ID NO: 4080196 - RNA, 14 nt, Variola virus
uuaacuaauaaaaa

SEQ ID NO: 4080197 - RNA, 16 nt, Variola virus
uuaacuagauuauaca

SEQ ID NO: 4080198 - RNA, 17 nt, Variola virus
uuaacuccucuauuaau

SEQ ID NO: 4080199 - RNA, 15 nt, Variola virus
uuaacuguucaucgu

SEQ ID NO: 4080200 - RNA, 22 nt, Variola virus
uuaagagauccgauaaacauug

SEQ ID NO: 4080201 - RNA, 22 nt, Variola virus
uuaagagauuuagaaaacauua

SEQ ID NO: 4080202 - RNA, 14 nt, Variola virus
uuaagaucuaauau

SEQ ID NO: 4080203 - RNA, 18 nt, Variola virus
uuaauaaauaucauuaac

SEQ ID NO: 4080204 - RNA, 20 nt, Variola virus
uuaauaagacuuugaacauu

SEQ ID NO: 4080205 - RNA, 22 nt, Variola virus
uuaauaaugaucaucuagauaa

SEQ ID NO: 4080206 - RNA, 15 nt, Variola virus
uuaauaauuguauug

SEQ ID NO: 4080207 - RNA, 16 nt, Variola virus
uuaauacaucaucuaa

SEQ ID NO: 4080208 - RNA, 17 nt, Variola virus
uuaauagauauauuaau

SEQ ID NO: 4080209 - RNA, 15 nt, Variola virus
uuaauagauuaacau

SEQ ID NO: 4080210 - RNA, 13 nt, Variola virus
uuaauaguuuuua

SEQ ID NO: 4080211 - RNA, 12 nt, Variola virus
uuaauauuauca

SEQ ID NO: 4080212 - RNA, 16 nt, Variola virus
uuaauccuucuagaau

SEQ ID NO: 4080213 - RNA, 18 nt, Variola virus
uuaauccuuugauuauca

SEQ ID NO: 4080214 - RNA, 20 nt, Variola virus
uuaaugaagaacacauauuu

SEQ ID NO: 4080215 - RNA, 23 nt, Variola virus
uuaaugauacacacuauacuguc

SEQ ID NO: 4080216 - RNA, 14 nt, Variola virus
uuaauggaaacuau

SEQ ID NO: 4080217 - RNA, 15 nt, Variola virus
uuaauguauaucuuu

SEQ ID NO: 4080218 - RNA, 17 nt, Variola virus
uuaauuaauacaauguc

SEQ ID NO: 4080219 - RNA, 16 nt, Variola virus
uuaauuaguaacuguu

SEQ ID NO: 4080220 - RNA, 12 nt, Variola virus
uuaauugccaua

SEQ ID NO: 4080221 - RNA, 19 nt, Variola virus
uuaauuuguacauucuuaa

SEQ ID NO: 4080222 - RNA, 19 nt, Variola virus
uuacaaaaaaaucaauuaa

SEQ ID NO: 4080223 - RNA, 11 nt, Variola virus
uuacaaacauu

SEQ ID NO: 4080224 - RNA, 16 nt, Variola virus
uuacaaacauuacuag

SEQ ID NO: 4080225 - RNA, 14 nt, Variola virus
uuacaaauaaaagu

SEQ ID NO: 4080226 - RNA, 17 nt, Variola virus
uuacaaauauucacaag

SEQ ID NO: 4080227 - RNA, 13 nt, Variola virus
uuacaauacauag

SEQ ID NO: 4080228 - RNA, 15 nt, Variola virus
uuacacuaacuguau

SEQ ID NO: 4080229 - RNA, 21 nt, Variola virus
uuacagaauaauauucacagg

SEQ ID NO: 4080230 - RNA, 15 nt, Variola virus
uuacagccaagaaac

SEQ ID NO: 4080231 - RNA, 21 nt, Variola virus
uuacauaaaaaaaauguaaua

SEQ ID NO: 4080232 - RNA, 23 nt, Variola virus
uuacauacuuuguccguaaaaca

SEQ ID NO: 4080233 - RNA, 18 nt, Variola virus
uuacauaguugauaaaaa

SEQ ID NO: 4080234 - RNA, 18 nt, Variola virus
uuacaugugauacauuuu

SEQ ID NO: 4080235 - RNA, 13 nt, Variola virus
uuacauuucuugu

SEQ ID NO: 4080236 - RNA, 17 nt, Variola virus
uuacauuucuuguuuuu

SEQ ID NO: 4080237 - RNA, 12 nt, Variola virus
uuaccaacaaua

SEQ ID NO: 4080238 - RNA, 16 nt, Variola virus
uuaccagaauacuauu

SEQ ID NO: 4080239 - RNA, 12 nt, Variola virus
uuaccuauucac

SEQ ID NO: 4080240 - RNA, 23 nt, Variola virus
uuaccucuucugauaucauuaau

SEQ ID NO: 4080241 - RNA, 19 nt, Variola virus
uuacgacgugcuaaucuag

SEQ ID NO: 4080242 - RNA, 17 nt, Variola virus
uuacgauagaaauagau

SEQ ID NO: 4080243 - RNA, 18 nt, Variola virus
uuacuaacgugauuauua

SEQ ID NO: 4080244 - RNA, 15 nt, Variola virus
uuacuagauuaaaaa

SEQ ID NO: 4080245 - RNA, 19 nt, Variola virus
uuacuaucggcucaaagag

SEQ ID NO: 4080246 - RNA, 12 nt, Variola virus
uuacuauuuugg

SEQ ID NO: 4080247 - RNA, 16 nt, Variola virus
uuacuguuucuucacu

SEQ ID NO: 4080248 - RNA, 20 nt, Variola virus
uuacuuaauaggugaaaaga

SEQ ID NO: 4080249 - RNA, 19 nt, Variola virus
uuacuuugaccacauccuu

SEQ ID NO: 4080250 - RNA, 23 nt, Variola virus
uuacuuuuaguuuuuuuagaaaa

SEQ ID NO: 4080251 - RNA, 17 nt, Variola virus
uuagaauacuaaauuga

SEQ ID NO: 4080252 - RNA, 18 nt, Variola virus
uuagacggcaacauagaa

SEQ ID NO: 4080253 - RNA, 19 nt, Variola virus
uuagaguaguaucauuaaa

SEQ ID NO: 4080254 - RNA, 13 nt, Variola virus
uuagauacauagu

SEQ ID NO: 4080255 - RNA, 21 nt, Variola virus
uuagaucauuaacucuagaaa

SEQ ID NO: 4080256 - RNA, 19 nt, Variola virus
uuagaugagaaauuauucc

SEQ ID NO: 4080257 - RNA, 17 nt, Variola virus
uuagaugguuucuuuuu

SEQ ID NO: 4080258 - RNA, 22 nt, Variola virus
uuagauuuauuuuuauaaaguu

SEQ ID NO: 4080259 - RNA, 20 nt, Variola virus
uuaguaaaaaauuuauuucu

SEQ ID NO: 4080260 - RNA, 22 nt, Variola virus
uuaguaaaaaauuuauuucuaa

SEQ ID NO: 4080261 - RNA, 19 nt, Variola virus
uuaguaaggcuuuagaaac

SEQ ID NO: 4080262 - RNA, 22 nt, Variola virus
uuaguaagugcuacaaaacaga

SEQ ID NO: 4080263 - RNA, 15 nt, Variola virus
uuaguacauucuuca

SEQ ID NO: 4080264 - RNA, 22 nt, Variola virus
uuaguagaagaacucuguuucu

SEQ ID NO: 4080265 - RNA, 14 nt, Variola virus
uuaguagacauuuu

SEQ ID NO: 4080266 - RNA, 19 nt, Variola virus
uuaguaucuagcucuguaa

SEQ ID NO: 4080267 - RNA, 22 nt, Variola virus
uuaguauuaaacagauccuuaa

SEQ ID NO: 4080268 - RNA, 19 nt, Variola virus
uuagucgccgucucuauaa

SEQ ID NO: 4080269 - RNA, 16 nt, Variola virus
uuagucuguacaaaag

SEQ ID NO: 4080270 - RNA, 19 nt, Variola virus
uuagugauguaaguauaac

SEQ ID NO: 4080271 - RNA, 14 nt, Variola virus
uuaguuauugcaau

SEQ ID NO: 4080272 - RNA, 21 nt, Variola virus
uuaguugaugugacaguuuuc

SEQ ID NO: 4080273 - RNA, 16 nt, Variola virus
uuaguuuuuuuagaaa

SEQ ID NO: 4080274 - RNA, 15 nt, Variola virus
uuauaaaacauagau

SEQ ID NO: 4080275 - RNA, 22 nt, Variola virus
uuauaaagaccgaauacauaac

SEQ ID NO: 4080276 - RNA, 17 nt, Variola virus
uuauaaaggagacuugu

SEQ ID NO: 4080277 - RNA, 14 nt, Variola virus
uuauaacauuuucc

SEQ ID NO: 4080278 - RNA, 12 nt, Variola virus
uuauaacuaaac

SEQ ID NO: 4080279 - RNA, 16 nt, Variola virus
uuauaauauacauaag

SEQ ID NO: 4080280 - RNA, 12 nt, Variola virus
uuauaauuauua

SEQ ID NO: 4080281 - RNA, 14 nt, Variola virus
uuauacaaaguuuu

SEQ ID NO: 4080282 - RNA, 18 nt, Variola virus
uuauacaggucauuacau

SEQ ID NO: 4080283 - RNA, 17 nt, Variola virus
uuauacaguguauguaa

SEQ ID NO: 4080284 - RNA, 21 nt, Variola virus
uuauacaucgaauauaaaaua

SEQ ID NO: 4080285 - RNA, 23 nt, Variola virus
uuauacuaccagacgacauagaa

SEQ ID NO: 4080286 - RNA, 18 nt, Variola virus
uuauacuaugucauuaac

SEQ ID NO: 4080287 - RNA, 21 nt, Variola virus
uuauacuucuccaacaucgau

SEQ ID NO: 4080288 - RNA, 20 nt, Variola virus
uuauagaacagugucaucua

SEQ ID NO: 4080289 - RNA, 23 nt, Variola virus
uuauagcuucuggauauaauuca

SEQ ID NO: 4080290 - RNA, 18 nt, Variola virus
uuauagggaaauacuguu

SEQ ID NO: 4080291 - RNA, 16 nt, Variola virus
uuauaguuaacauuuu

SEQ ID NO: 4080292 - RNA, 15 nt, Variola virus
uuauauaaaacauuu

SEQ ID NO: 4080293 - RNA, 16 nt, Variola virus
uuauauaaucuauaaa

SEQ ID NO: 4080294 - RNA, 17 nt, Variola virus
uuauauacacauaauua

SEQ ID NO: 4080295 - RNA, 21 nt, Variola virus
uuauaucuuuagcuaaaucgu

SEQ ID NO: 4080296 - RNA, 17 nt, Variola virus
uuaucaaagucacaaag

SEQ ID NO: 4080297 - RNA, 13 nt, Variola virus
uuaucaaaucuag

SEQ ID NO: 4080298 - RNA, 14 nt, Variola virus
uuaucacauacuag

SEQ ID NO: 4080299 - RNA, 16 nt, Variola virus
uuaucauaucuguaau

SEQ ID NO: 4080300 - RNA, 18 nt, Variola virus
uuaucaugagauguguuu

SEQ ID NO: 4080301 - RNA, 18 nt, Variola virus
uuaucauuuuuuuauuca

SEQ ID NO: 4080302 - RNA, 13 nt, Variola virus
uuauccaauacag

SEQ ID NO: 4080303 - RNA, 14 nt, Variola virus
uuauccucauuaaa

SEQ ID NO: 4080304 - RNA, 23 nt, Variola virus
uuaucgauacacguuuucaaaau

SEQ ID NO: 4080305 - RNA, 13 nt, Variola virus
uuaucuacaucuu

SEQ ID NO: 4080306 - RNA, 21 nt, Variola virus
uuaucuauuccuuucauuaac

SEQ ID NO: 4080307 - RNA, 23 nt, Variola virus
uuaucuauuucaaaaaaugauca

SEQ ID NO: 4080308 - RNA, 19 nt, Variola virus
uuaucucagugcaaagauu

SEQ ID NO: 4080309 - RNA, 17 nt, Variola virus
uuaucucuauucaucau

SEQ ID NO: 4080310 - RNA, 13 nt, Variola virus
uuaucuuucuugc

SEQ ID NO: 4080311 - RNA, 20 nt, Variola virus
uuaugaaaaaguaaaugaug

SEQ ID NO: 4080312 - RNA, 23 nt, Variola virus
uuaugaaacuuggaaacaucucu

SEQ ID NO: 4080313 - RNA, 23 nt, Variola virus
uuaugaacgaugauauguaucca

SEQ ID NO: 4080314 - RNA, 22 nt, Variola virus
uuaugaauggauaccuguauua

SEQ ID NO: 4080315 - RNA, 16 nt, Variola virus
uuaugaauugauucuu

SEQ ID NO: 4080316 - RNA, 23 nt, Variola virus
uuaugacaaaguuuacauucuuu

SEQ ID NO: 4080317 - RNA, 15 nt, Variola virus
uuaugacgauuucaa

SEQ ID NO: 4080318 - RNA, 21 nt, Variola virus
uuaugacgcaguaacauagau

SEQ ID NO: 4080319 - RNA, 17 nt, Variola virus
uuaugauagaaauuagc

SEQ ID NO: 4080320 - RNA, 12 nt, Variola virus
uuauguacuaag

SEQ ID NO: 4080321 - RNA, 16 nt, Variola virus
uuauguuggacauaag

SEQ ID NO: 4080322 - RNA, 15 nt, Variola virus
uuauguuucuuuaaa

SEQ ID NO: 4080323 - RNA, 13 nt, Variola virus
uuauuaaaaugag

SEQ ID NO: 4080324 - RNA, 18 nt, Variola virus
uuauuaacuguuucgaua

SEQ ID NO: 4080325 - RNA, 13 nt, Variola virus
uuauuacuagaau

SEQ ID NO: 4080326 - RNA, 15 nt, Variola virus
uuauuacuuuuggaa

SEQ ID NO: 4080327 - RNA, 13 nt, Variola virus
uuauuagaucuuu

SEQ ID NO: 4080328 - RNA, 17 nt, Variola virus
uuauuauuuuauauuca

SEQ ID NO: 4080329 - RNA, 15 nt, Variola virus
uuauugcaaacgaug

SEQ ID NO: 4080330 - RNA, 20 nt, Variola virus
uuauugcacgcuauuaauca

SEQ ID NO: 4080331 - RNA, 23 nt, Variola virus
uuauugggugguaaacuagauaa

SEQ ID NO: 4080332 - RNA, 14 nt, Variola virus
uuauuuaacucuuu

SEQ ID NO: 4080333 - RNA, 22 nt, Variola virus
uuauuucaaagacuaacuuaua

SEQ ID NO: 4080334 - RNA, 23 nt, Variola virus
uuauuuuaaaccuaaagaugcua

SEQ ID NO: 4080335 - RNA, 19 nt, Variola virus
uuauuuuaucuuuuacuac

SEQ ID NO: 4080336 - RNA, 21 nt, Variola virus
uuauuuuuugguauaauucua

SEQ ID NO: 4080337 - RNA, 14 nt, Variola virus
uuauuuuuuuggaa

SEQ ID NO: 4080338 - RNA, 23 nt, Variola virus
uucaaaagauaguuuucaucaga

SEQ ID NO: 4080339 - RNA, 16 nt, Variola virus
uucaaaauagcuaucu

SEQ ID NO: 4080340 - RNA, 13 nt, Variola virus
uucaacaaacuaa

SEQ ID NO: 4080341 - RNA, 15 nt, Variola virus
uucaaccauucauaa

SEQ ID NO: 4080342 - RNA, 22 nt, Variola virus
uucaacguauggaauauaauaa

SEQ ID NO: 4080343 - RNA, 13 nt, Variola virus
uucaacugucuuu

SEQ ID NO: 4080344 - RNA, 19 nt, Variola virus
uucaaguccaauguuuuua

SEQ ID NO: 4080345 - RNA, 15 nt, Variola virus
uucaauaaaugauuc

SEQ ID NO: 4080346 - RNA, 20 nt, Variola virus
uucaaugucuccuuuucaga

SEQ ID NO: 4080347 - RNA, 13 nt, Variola virus
uucaauucucgga

SEQ ID NO: 4080348 - RNA, 13 nt, Variola virus
uucacauaaaaga

SEQ ID NO: 4080349 - RNA, 18 nt, Variola virus
uucagaaagcuguggaug

SEQ ID NO: 4080350 - RNA, 14 nt, Variola virus
uucagaauuucuac

SEQ ID NO: 4080351 - RNA, 19 nt, Variola virus
uucagauauaaaaaucugu

SEQ ID NO: 4080352 - RNA, 20 nt, Variola virus
uucagauauaaaaaucuguu

SEQ ID NO: 4080353 - RNA, 18 nt, Variola virus
uucagcauuacuugauau

SEQ ID NO: 4080354 - RNA, 19 nt, Variola virus
uucaguaguguuuacauaa

SEQ ID NO: 4080355 - RNA, 12 nt, Variola virus
uucagugaagaa

SEQ ID NO: 4080356 - RNA, 17 nt, Variola virus
uucaguuucucaucuuu

SEQ ID NO: 4080357 - RNA, 14 nt, Variola virus
uucauauacugaua

SEQ ID NO: 4080358 - RNA, 22 nt, Variola virus
uucaucaauagacauaagaaau

SEQ ID NO: 4080359 - RNA, 12 nt, Variola virus
uucaucagauau

SEQ ID NO: 4080360 - RNA, 13 nt, Variola virus
uucaucauauuca

SEQ ID NO: 4080361 - RNA, 14 nt, Variola virus
uucaucauuucaca

SEQ ID NO: 4080362 - RNA, 12 nt, Variola virus
uucaucuagaau

SEQ ID NO: 4080363 - RNA, 12 nt, Variola virus
uucaucuguaag

SEQ ID NO: 4080364 - RNA, 14 nt, Variola virus
uucaucuuggauga

SEQ ID NO: 4080365 - RNA, 12 nt, Variola virus
uucauucguaaa

SEQ ID NO: 4080366 - RNA, 18 nt, Variola virus
uuccaaauauauuacuag

SEQ ID NO: 4080367 - RNA, 16 nt, Variola virus
uuccaaauucuggauu

SEQ ID NO: 4080368 - RNA, 18 nt, Variola virus
uuccaaucuauaauaucu

SEQ ID NO: 4080369 - RNA, 14 nt, Variola virus
uuccacaauacgag

SEQ ID NO: 4080370 - RNA, 21 nt, Variola virus
uuccacaauacgagucauuau

SEQ ID NO: 4080371 - RNA, 19 nt, Variola virus
uuccagaauggcauacaua

SEQ ID NO: 4080372 - RNA, 13 nt, Variola virus
uuccauaaacagu

SEQ ID NO: 4080373 - RNA, 18 nt, Variola virus
uuccauccacaauuauug

SEQ ID NO: 4080374 - RNA, 13 nt, Variola virus
uuccauuauuaau

SEQ ID NO: 4080375 - RNA, 15 nt, Variola virus
uuccauuuuuaauuu

SEQ ID NO: 4080376 - RNA, 14 nt, Variola virus
uucccaaauaauca

SEQ ID NO: 4080377 - RNA, 22 nt, Variola virus
uucccauauccagacaacaauc

SEQ ID NO: 4080378 - RNA, 17 nt, Variola virus
uucccguaauaaauuuu

SEQ ID NO: 4080379 - RNA, 21 nt, Variola virus
uuccguuggaugguaauaaac

SEQ ID NO: 4080380 - RNA, 14 nt, Variola virus
uuccugaauacuau

SEQ ID NO: 4080381 - RNA, 15 nt, Variola virus
uuccuggagauaucc

SEQ ID NO: 4080382 - RNA, 22 nt, Variola virus
uuccuguuccguuaacaucucu

SEQ ID NO: 4080383 - RNA, 12 nt, Variola virus
uuccuuauucuu

SEQ ID NO: 4080384 - RNA, 18 nt, Variola virus
uucgcaaacuauucuaau

SEQ ID NO: 4080385 - RNA, 23 nt, Variola virus
uucggacuuauauagcuuauucc

SEQ ID NO: 4080386 - RNA, 18 nt, Variola virus
uucguagaaaguaucuua

SEQ ID NO: 4080387 - RNA, 14 nt, Variola virus
uucgucaaacauua

SEQ ID NO: 4080388 - RNA, 21 nt, Variola virus
uucguuagauuuucuacagau

SEQ ID NO: 4080389 - RNA, 16 nt, Variola virus
uucuaaugcuguacua

SEQ ID NO: 4080390 - RNA, 20 nt, Variola virus
uucuaauggaugauguucua

SEQ ID NO: 4080391 - RNA, 13 nt, Variola virus
uucuacauuuuca

SEQ ID NO: 4080392 - RNA, 21 nt, Variola virus
uucuacccccguuacauuugu

SEQ ID NO: 4080393 - RNA, 16 nt, Variola virus
uucuacuccuuucuua

SEQ ID NO: 4080394 - RNA, 17 nt, Variola virus
uucuagacacaacacua

SEQ ID NO: 4080395 - RNA, 22 nt, Variola virus
uucuagcucccggauugaaaac

SEQ ID NO: 4080396 - RNA, 14 nt, Variola virus
uucuaguuaucaug

SEQ ID NO: 4080397 - RNA, 15 nt, Variola virus
uucuauaaacugaau

SEQ ID NO: 4080398 - RNA, 18 nt, Variola virus
uucuauaaagucugucaa

SEQ ID NO: 4080399 - RNA, 13 nt, Variola virus
uucuauaaucauu

SEQ ID NO: 4080400 - RNA, 19 nt, Variola virus
uucuauacgucuuuauuuu

SEQ ID NO: 4080401 - RNA, 17 nt, Variola virus
uucuauaucuauaucua

SEQ ID NO: 4080402 - RNA, 19 nt, Variola virus
uucuaucuuuaauaucuag

SEQ ID NO: 4080403 - RNA, 13 nt, Variola virus
uucuauguaucua

SEQ ID NO: 4080404 - RNA, 19 nt, Variola virus
uucuauuauuauuaauuuu

SEQ ID NO: 4080405 - RNA, 15 nt, Variola virus
uucuauuuuuauucu

SEQ ID NO: 4080406 - RNA, 16 nt, Variola virus
uucucacuagugucua

SEQ ID NO: 4080407 - RNA, 16 nt, Variola virus
uucuccaauacuaauu

SEQ ID NO: 4080408 - RNA, 23 nt, Variola virus
uucucgauagagaugagaugcuu

SEQ ID NO: 4080409 - RNA, 16 nt, Variola virus
uucucgcaacugucuu

SEQ ID NO: 4080410 - RNA, 19 nt, Variola virus
uucucucagguacagauuu

SEQ ID NO: 4080411 - RNA, 22 nt, Variola virus
uucucucauaaauacagagaug

SEQ ID NO: 4080412 - RNA, 20 nt, Variola virus
uucucucauuuaucaaaagu

SEQ ID NO: 4080413 - RNA, 14 nt, Variola virus
uucucugaauauag

SEQ ID NO: 4080414 - RNA, 17 nt, Variola virus
uucucuuugauaaaagu

SEQ ID NO: 4080415 - RNA, 17 nt, Variola virus
uucucuuuuaauucagu

SEQ ID NO: 4080416 - RNA, 19 nt, Variola virus
uucugaauagauccaccau

SEQ ID NO: 4080417 - RNA, 22 nt, Variola virus
uucugacgucguucuacauaaa

SEQ ID NO: 4080418 - RNA, 15 nt, Variola virus
uucugauuuauccuu

SEQ ID NO: 4080419 - RNA, 18 nt, Variola virus
uucugcauuacaaagaag

SEQ ID NO: 4080420 - RNA, 19 nt, Variola virus
uucuggaacauuaaaugua

SEQ ID NO: 4080421 - RNA, 17 nt, Variola virus
uucuuaaacuuauucuu

SEQ ID NO: 4080422 - RNA, 13 nt, Variola virus
uucuuaauaaucg

SEQ ID NO: 4080423 - RNA, 23 nt, Variola virus
uucuuacaguacauaguauugac

SEQ ID NO: 4080424 - RNA, 20 nt, Variola virus
uucuuacauauuuuuuucuu

SEQ ID NO: 4080425 - RNA, 20 nt, Variola virus
uucuuaccagauauuauaca

SEQ ID NO: 4080426 - RNA, 21 nt, Variola virus
uucuuagcgaaugaugcagac

SEQ ID NO: 4080427 - RNA, 16 nt, Variola virus
uucuuaugaaacuugg

SEQ ID NO: 4080428 - RNA, 14 nt, Variola virus
uucuucaaaugaag

SEQ ID NO: 4080429 - RNA, 13 nt, Variola virus
uucuuguguaauu

SEQ ID NO: 4080430 - RNA, 16 nt, Variola virus
uugaaaaugaaaucac

SEQ ID NO: 4080431 - RNA, 22 nt, Variola virus
uugaaauuguuuuuuauuuucu

SEQ ID NO: 4080432 - RNA, 22 nt, Variola virus
uugaaucaucaucgguguagua

SEQ ID NO: 4080433 - RNA, 14 nt, Variola virus
uugaaucuauuucu

SEQ ID NO: 4080434 - RNA, 15 nt, Variola virus
uugaaugauguaguu

SEQ ID NO: 4080435 - RNA, 14 nt, Variola virus
uugacaaauuauuc

SEQ ID NO: 4080436 - RNA, 23 nt, Variola virus
uugacaucuaaaaaauccuuaau

SEQ ID NO: 4080437 - RNA, 21 nt, Variola virus
uugacauuaaucuauuagaau

SEQ ID NO: 4080438 - RNA, 22 nt, Variola virus
uugaccguguguaaaaugacuc

SEQ ID NO: 4080439 - RNA, 22 nt, Variola virus
uugagauuaaauguaauaacaa

SEQ ID NO: 4080440 - RNA, 16 nt, Variola virus
uugagcaguugaugca

SEQ ID NO: 4080441 - RNA, 15 nt, Variola virus
uugaggauauacaaa

SEQ ID NO: 4080442 - RNA, 15 nt, Variola virus
uugaggauuuaaaac

SEQ ID NO: 4080443 - RNA, 16 nt, Variola virus
uugauaaaaauuaaaa

SEQ ID NO: 4080444 - RNA, 15 nt, Variola virus
uugaucuauguaguu

SEQ ID NO: 4080445 - RNA, 14 nt, Variola virus
uugaugacguguac

SEQ ID NO: 4080446 - RNA, 20 nt, Variola virus
uugaugauaucuacaucguu

SEQ ID NO: 4080447 - RNA, 22 nt, Variola virus
uugaugugaucaauuuccaaca

SEQ ID NO: 4080448 - RNA, 19 nt, Variola virus
uugauuuaaagucuagagu

SEQ ID NO: 4080449 - RNA, 23 nt, Variola virus
uugauuuggaauucuuuuucgac

SEQ ID NO: 4080450 - RNA, 14 nt, Variola virus
uugauuuucguaac

SEQ ID NO: 4080451 - RNA, 21 nt, Variola virus
uugcaauauagaccauacuuc

SEQ ID NO: 4080452 - RNA, 13 nt, Variola virus
uugcaauugguaa

SEQ ID NO: 4080453 - RNA, 16 nt, Variola virus
uugcauacaauacuag

SEQ ID NO: 4080454 - RNA, 17 nt, Variola virus
uugcuaauuaauagcau

SEQ ID NO: 4080455 - RNA, 19 nt, Variola virus
uugcuagacaccuuuucaa

SEQ ID NO: 4080456 - RNA, 14 nt, Variola virus
uugcucguaaaaga

SEQ ID NO: 4080457 - RNA, 20 nt, Variola virus
uugcuuugguuuaauuauuu

SEQ ID NO: 4080458 - RNA, 23 nt, Variola virus
uuggaggcgaugaucuuaauuuu

SEQ ID NO: 4080459 - RNA, 16 nt, Variola virus
uuggaucagucucuaa

SEQ ID NO: 4080460 - RNA, 12 nt, Variola virus
uuggauguaugc

SEQ ID NO: 4080461 - RNA, 15 nt, Variola virus
uuggauuuuguauua

SEQ ID NO: 4080462 - RNA, 14 nt, Variola virus
uuggcaaauuauuu

SEQ ID NO: 4080463 - RNA, 20 nt, Variola virus
uuggcacgaacaaaaauacg

SEQ ID NO: 4080464 - RNA, 22 nt, Variola virus
uugggcggaucuguaaacauuu

SEQ ID NO: 4080465 - RNA, 14 nt, Variola virus
uugguaaauuccau

SEQ ID NO: 4080466 - RNA, 14 nt, Variola virus
uugguucucuagau

SEQ ID NO: 4080467 - RNA, 21 nt, Variola virus
uuguaacaucgguacggguau

SEQ ID NO: 4080468 - RNA, 15 nt, Variola virus
uuguaauaucuuaaa

SEQ ID NO: 4080469 - RNA, 14 nt, Variola virus
uuguacaaauuccu

SEQ ID NO: 4080470 - RNA, 22 nt, Variola virus
uuguacacuucuauaguaucua

SEQ ID NO: 4080471 - RNA, 20 nt, Variola virus
uuguacauuaauaaaugaaa

SEQ ID NO: 4080472 - RNA, 21 nt, Variola virus
uuguacgaauccaauuuuuca

SEQ ID NO: 4080473 - RNA, 15 nt, Variola virus
uuguauagaaauuuu

SEQ ID NO: 4080474 - RNA, 13 nt, Variola virus
uuguauuauucug

SEQ ID NO: 4080475 - RNA, 20 nt, Variola virus
uuguauucugaauagaucca

SEQ ID NO: 4080476 - RNA, 16 nt, Variola virus
uugucaacuuuguaaa

SEQ ID NO: 4080477 - RNA, 21 nt, Variola virus
uugucauguugauacaucacu

SEQ ID NO: 4080478 - RNA, 18 nt, Variola virus
uuguccuaaaauacuauu

SEQ ID NO: 4080479 - RNA, 21 nt, Variola virus
uugucguaaauacaugucuaa

SEQ ID NO: 4080480 - RNA, 19 nt, Variola virus
uugucucaugaccguguau

SEQ ID NO: 4080481 - RNA, 15 nt, Variola virus
uugucuuaacuauaa

SEQ ID NO: 4080482 - RNA, 18 nt, Variola virus
uugugucauugacaucuu

SEQ ID NO: 4080483 - RNA, 22 nt, Variola virus
uuguuggcgcgccucaaaugua

SEQ ID NO: 4080484 - RNA, 18 nt, Variola virus
uuguuuuaauuuuaggac

SEQ ID NO: 4080485 - RNA, 14 nt, Variola virus
uuuaaaaaguuauc

SEQ ID NO: 4080486 - RNA, 19 nt, Variola virus
uuuaaaagacucagaagag

SEQ ID NO: 4080487 - RNA, 18 nt, Variola virus
uuuaaacacucuuucuga

SEQ ID NO: 4080488 - RNA, 14 nt, Variola virus
uuuaaaguuucuga

SEQ ID NO: 4080489 - RNA, 18 nt, Variola virus
uuuaaauagcauagauau

SEQ ID NO: 4080490 - RNA, 16 nt, Variola virus
uuuaacauauguauca

SEQ ID NO: 4080491 - RNA, 15 nt, Variola virus
uuuaagaauagacag

SEQ ID NO: 4080492 - RNA, 16 nt, Variola virus
uuuaauuuccuaguau

SEQ ID NO: 4080493 - RNA, 23 nt, Variola virus
uuuaauuuuguuauaguagauau

SEQ ID NO: 4080494 - RNA, 21 nt, Variola virus
uuuacaagauuauuaaauccu

SEQ ID NO: 4080495 - RNA, 23 nt, Variola virus
uuuacacaguaaccaaaaugaaa

SEQ ID NO: 4080496 - RNA, 15 nt, Variola virus
uuuacacguaaccau

SEQ ID NO: 4080497 - RNA, 16 nt, Variola virus
uuuacagauauauuca

SEQ ID NO: 4080498 - RNA, 21 nt, Variola virus
uuuacauggcucguaccaaca

SEQ ID NO: 4080499 - RNA, 18 nt, Variola virus
uuuaccagugauuaucca

SEQ ID NO: 4080500 - RNA, 21 nt, Variola virus
uuuacccuuugacauuaaaaa

SEQ ID NO: 4080501 - RNA, 21 nt, Variola virus
uuuaccgacaccuguuucaug

SEQ ID NO: 4080502 - RNA, 22 nt, Variola virus
uuuacgagcuauuaaacuguuu

SEQ ID NO: 4080503 - RNA, 21 nt, Variola virus
uuuacgcgcacacaauacaga

SEQ ID NO: 4080504 - RNA, 14 nt, Variola virus
uuuacuggaauuag

SEQ ID NO: 4080505 - RNA, 13 nt, Variola virus
uuuagaaacauaa

SEQ ID NO: 4080506 - RNA, 20 nt, Variola virus
uuuagaaauguuauauauaa

SEQ ID NO: 4080507 - RNA, 18 nt, Variola virus
uuuagaaggaguguuuuc

SEQ ID NO: 4080508 - RNA, 20 nt, Variola virus
uuuagaaggaguguuuucuu

SEQ ID NO: 4080509 - RNA, 17 nt, Variola virus
uuuagacgcuuauuauu

SEQ ID NO: 4080510 - RNA, 17 nt, Variola virus
uuuagacgguugagaaa

SEQ ID NO: 4080511 - RNA, 15 nt, Variola virus
uuuagacguagaaaa

SEQ ID NO: 4080512 - RNA, 18 nt, Variola virus
uuuagagaaugcuaauau

SEQ ID NO: 4080513 - RNA, 16 nt, Variola virus
uuuagaguauuucuca

SEQ ID NO: 4080514 - RNA, 16 nt, Variola virus
uuuaguuuauucauaa

SEQ ID NO: 4080515 - RNA, 20 nt, Variola virus
uuuauaaacaugaaaccacu

SEQ ID NO: 4080516 - RNA, 23 nt, Variola virus
uuuauauaauuuuuggacaaaug

SEQ ID NO: 4080517 - RNA, 14 nt, Variola virus
uuuauauuuuucuu

SEQ ID NO: 4080518 - RNA, 19 nt, Variola virus
uuuaucaaccauucaaaaa

SEQ ID NO: 4080519 - RNA, 14 nt, Variola virus
uuuauccuauauau

SEQ ID NO: 4080520 - RNA, 11 nt, Variola virus
uuuauuucuaa

SEQ ID NO: 4080521 - RNA, 13 nt, Variola virus
uuuauuucuaauu

SEQ ID NO: 4080522 - RNA, 22 nt, Variola virus
uuucaaagaaugagauacauaa

SEQ ID NO: 4080523 - RNA, 20 nt, Variola virus
uuucaaugaguuuaauaacu

SEQ ID NO: 4080524 - RNA, 22 nt, Variola virus
uuucaccauauagaucaaucau

SEQ ID NO: 4080525 - RNA, 17 nt, Variola virus
uuucacuuuaucucauu

SEQ ID NO: 4080526 - RNA, 16 nt, Variola virus
uuucagaaucuagauu

SEQ ID NO: 4080527 - RNA, 16 nt, Variola virus
uuucagaggaauacag

SEQ ID NO: 4080528 - RNA, 12 nt, Variola virus
uuucauacauau

SEQ ID NO: 4080529 - RNA, 14 nt, Variola virus
uuucaucuagauac

SEQ ID NO: 4080530 - RNA, 12 nt, Variola virus
uuucaucuucuu

SEQ ID NO: 4080531 - RNA, 22 nt, Variola virus
uuucauuccaggaucuagauaa

SEQ ID NO: 4080532 - RNA, 21 nt, Variola virus
uuuccaaaucaguaacuaugu

SEQ ID NO: 4080533 - RNA, 22 nt, Variola virus
uuuccaaguggcgaauuccaaa

SEQ ID NO: 4080534 - RNA, 11 nt, Variola virus
uuuccauccac

SEQ ID NO: 4080535 - RNA, 20 nt, Variola virus
uuuccauggcccauucuauu

SEQ ID NO: 4080536 - RNA, 22 nt, Variola virus
uuuccauuagauuauaucauaa

SEQ ID NO: 4080537 - RNA, 13 nt, Variola virus
uuuccuacauaac

SEQ ID NO: 4080538 - RNA, 14 nt, Variola virus
uuucgaauaaguuu

SEQ ID NO: 4080539 - RNA, 18 nt, Variola virus
uuucguacaaauacagaa

SEQ ID NO: 4080540 - RNA, 19 nt, Variola virus
uuucuaaauuauuccaauu

SEQ ID NO: 4080541 - RNA, 15 nt, Variola virus
uuucuaaguucuaau

SEQ ID NO: 4080542 - RNA, 21 nt, Variola virus
uuucuacaauaacuacauauu

SEQ ID NO: 4080543 - RNA, 16 nt, Variola virus
uuucuacuacuucauu

SEQ ID NO: 4080544 - RNA, 14 nt, Variola virus
uuucuauaaucauu

SEQ ID NO: 4080545 - RNA, 20 nt, Variola virus
uuucucuuuuuauccucauu

SEQ ID NO: 4080546 - RNA, 22 nt, Variola virus
uuucuggaaguggauauacaua

SEQ ID NO: 4080547 - RNA, 21 nt, Variola virus
uuucuugauuagcccaucauu

SEQ ID NO: 4080548 - RNA, 13 nt, Variola virus
uuugaacaucuug

SEQ ID NO: 4080549 - RNA, 21 nt, Variola virus
uuugacaaagauggucugaaa

SEQ ID NO: 4080550 - RNA, 21 nt, Variola virus
uuugagaaauauguauacaua

SEQ ID NO: 4080551 - RNA, 17 nt, Variola virus
uuugagaauauauacag

SEQ ID NO: 4080552 - RNA, 18 nt, Variola virus
uuugagagaucauuucua

SEQ ID NO: 4080553 - RNA, 14 nt, Variola virus
uuugagagggaaaa

SEQ ID NO: 4080554 - RNA, 15 nt, Variola virus
uuugagauuucauaa

SEQ ID NO: 4080555 - RNA, 15 nt, Variola virus
uuugcuuuuucuauu

SEQ ID NO: 4080556 - RNA, 14 nt, Variola virus
uuuggcucuucuau

SEQ ID NO: 4080557 - RNA, 20 nt, Variola virus
uuuguaccaacaaacuguuc

SEQ ID NO: 4080558 - RNA, 14 nt, Variola virus
uuuguauaaucuuu

SEQ ID NO: 4080559 - RNA, 16 nt, Variola virus
uuugucauuaacuuua

SEQ ID NO: 4080560 - RNA, 21 nt, Variola virus
uuuguccauuauuucuauauu

SEQ ID NO: 4080561 - RNA, 20 nt, Variola virus
uuugucuccuccuccguaaa

SEQ ID NO: 4080562 - RNA, 14 nt, Variola virus
uuugugaacucuuu

SEQ ID NO: 4080563 - RNA, 18 nt, Variola virus
uuuguucuuaagacuaua

SEQ ID NO: 4080564 - RNA, 18 nt, Variola virus
uuuuaaaaaucauaacag

SEQ ID NO: 4080565 - RNA, 18 nt, Variola virus
uuuuaaacaacuaaacag

SEQ ID NO: 4080566 - RNA, 20 nt, Variola virus
uuuuaacaugauguaaucuc

SEQ ID NO: 4080567 - RNA, 22 nt, Variola virus
uuuuaacuaguguagaaaacag

SEQ ID NO: 4080568 - RNA, 23 nt, Variola virus
uuuuacauggauuuaucauauca

SEQ ID NO: 4080569 - RNA, 15 nt, Variola virus
uuuuacgaauaaaag

SEQ ID NO: 4080570 - RNA, 23 nt, Variola virus
uuuuacuccucuccuuccguaaa

SEQ ID NO: 4080571 - RNA, 16 nt, Variola virus
uuuuagaaaauucuaa

SEQ ID NO: 4080572 - RNA, 20 nt, Variola virus
uuuuagccagagauaucaua

SEQ ID NO: 4080573 - RNA, 20 nt, Variola virus
uuuuaggaauccauguauua

SEQ ID NO: 4080574 - RNA, 19 nt, Variola virus
uuuuagguacucaucuacu

SEQ ID NO: 4080575 - RNA, 22 nt, Variola virus
uuuuauaaucuuuauggaucua

SEQ ID NO: 4080576 - RNA, 13 nt, Variola virus
uuuuauacauauu

SEQ ID NO: 4080577 - RNA, 20 nt, Variola virus
uuuuaucaggauaaauacau

SEQ ID NO: 4080578 - RNA, 15 nt, Variola virus
uuuuauuaaaugacg

SEQ ID NO: 4080579 - RNA, 17 nt, Variola virus
uuuuauucacauaaaag

SEQ ID NO: 4080580 - RNA, 17 nt, Variola virus
uuuucaaagaaaaaggu

SEQ ID NO: 4080581 - RNA, 20 nt, Variola virus
uuuucaaagaaaaagguuug

SEQ ID NO: 4080582 - RNA, 21 nt, Variola virus
uuuucaacacucgacugaaua

SEQ ID NO: 4080583 - RNA, 17 nt, Variola virus
uuuucaaucauagaacu

SEQ ID NO: 4080584 - RNA, 18 nt, Variola virus
uuuucauuagcaugaauc

SEQ ID NO: 4080585 - RNA, 11 nt, Variola virus
uuuucuguaaa

SEQ ID NO: 4080586 - RNA, 13 nt, Variola virus
uuuuguacauaau

SEQ ID NO: 4080587 - RNA, 24 nt, Variola virus
uuuuguggauuaguguacucucuu

SEQ ID NO: 4080588 - RNA, 22 nt, Variola virus
uuuuuaacgcaauggucuuaga

SEQ ID NO: 4080589 - RNA, 15 nt, Variola virus
uuuuuacuaaucaua

SEQ ID NO: 4080590 - RNA, 14 nt, Variola virus
uuuuuauacauauu

SEQ ID NO: 4080591 - RNA, 12 nt, Variola virus
uuuuuauuccua

SEQ ID NO: 4080592 - RNA, 11 nt, Variola virus
uuuuuauucuu

SEQ ID NO: 4080593 - RNA, 17 nt, Variola virus
uuuuucaucuuuacaua

SEQ ID NO: 4080594 - RNA, 23 nt, Variola virus
auggauuuuuuuaaaaaggaaau

SEQ ID NO: 4080595 - RNA, 15 nt, Variola virus
auggcgaaauuauug

SEQ ID NO: 4080596 - RNA, 13 nt, Variola virus
augguaaaaagac

SEQ ID NO: 4080597 - RNA, 17 nt, Variola virus
augguaaaauuaaauag

SEQ ID NO: 4080598 - RNA, 13 nt, Variola virus
augguaaauacug

SEQ ID NO: 4080599 - RNA, 23 nt, Variola virus
auggucuauauauacacuacaau

SEQ ID NO: 4080600 - RNA, 21 nt, Variola virus
auguaaagcauuauucuugaa

SEQ ID NO: 4080601 - RNA, 19 nt, Variola virus
auguaacccuuuuuaucga

SEQ ID NO: 4080602 - RNA, 21 nt, Variola virus
auguaaccuacuagaaugaua

SEQ ID NO: 4080603 - RNA, 15 nt, Variola virus
auguaauaacaaagg

SEQ ID NO: 4080604 - RNA, 23 nt, Variola virus
auguacgauccaaacaauguuuc

SEQ ID NO: 4080605 - RNA, 23 nt, Variola virus
cauaaugaugguguauacaguau

SEQ ID NO: 4080606 - RNA, 20 nt, Variola virus
cauaauguaaagauauucua

SEQ ID NO: 4080607 - RNA, 20 nt, Variola virus
cauaauuaggaucuucuaau

SEQ ID NO: 4080608 - RNA, 21 nt, Variola virus
cauaauuguuagcuguuuuca

SEQ ID NO: 4080609 - RNA, 16 nt, Variola virus
cauacaaugauuucaa

SEQ ID NO: 4080610 - RNA, 15 nt, Variola virus
cauacacuacaguaa

SEQ ID NO: 4080611 - RNA, 17 nt, Variola virus
cauacauacuaucuuua

SEQ ID NO: 4080612 - RNA, 21 nt, Variola virus
cauaccaucuaucaaacaaaa

SEQ ID NO: 4080613 - RNA, 13 nt, Variola virus
cauacuccaucaa

SEQ ID NO: 4080614 - RNA, 20 nt, Variola virus
cauagaaagguugcgucuag

SEQ ID NO: 4080615 - RNA, 17 nt, Variola virus
cauagauaauauauacg

SEQ ID NO: 4080616 - RNA, 15 nt, Variola virus
cauagaugaaauacu

SEQ ID NO: 4080617 - RNA, 14 nt, Variola virus
cauagccaauggau

SEQ ID NO: 4080618 - RNA, 16 nt, Variola virus
cauaguaaauucuguu

SEQ ID NO: 4080619 - RNA, 17 nt, Variola virus
cauaguccucguguggu

SEQ ID NO: 4080620 - RNA, 14 nt, Variola virus
cauagugcgucuaa

SEQ ID NO: 4080621 - RNA, 18 nt, Variola virus
cauaguuuguaucaauaa

SEQ ID NO: 4080622 - RNA, 14 nt, Variola virus
cauauaauaaugaa

SEQ ID NO: 4080623 - RNA, 16 nt, Variola virus
cauauacguauccaug

SEQ ID NO: 4080624 - RNA, 20 nt, Variola virus
cauauaguauucuuguauuc

SEQ ID NO: 4080625 - RNA, 21 nt, Variola virus
cauauauguuuucaucauuuc

SEQ ID NO: 4080626 - RNA, 22 nt, Variola virus
cauauauuuugcauaacaugua

SEQ ID NO: 4080627 - RNA, 15 nt, Variola virus
cauauauuuuuggau

SEQ ID NO: 4080628 - RNA, 18 nt, Variola virus
cauaucauacaugauauu

SEQ ID NO: 4080629 - RNA, 20 nt, Variola virus
cauaucuccucuuccaucac

SEQ ID NO: 4080630 - RNA, 20 nt, Variola virus
cauauguuuuaauauuuaca

SEQ ID NO: 4080631 - RNA, 15 nt, Variola virus
cauauugaucauuug

SEQ ID NO: 4080632 - RNA, 13 nt, Variola virus
cauauuuugcaau

SEQ ID NO: 4080633 - RNA, 16 nt, Variola virus
caucaaaaaacaacug

SEQ ID NO: 4080634 - RNA, 12 nt, Variola virus
caucaaauggau

SEQ ID NO: 4080635 - RNA, 19 nt, Variola virus
caucaaccgaguuguuaau

SEQ ID NO: 4080636 - RNA, 18 nt, Variola virus
caucaaccgucacauaau

SEQ ID NO: 4080637 - RNA, 21 nt, Variola virus
caucagaauaaaucaauaucu

SEQ ID NO: 4080638 - RNA, 16 nt, Variola virus
caucagacaaugcuuu

SEQ ID NO: 4080639 - RNA, 16 nt, Variola virus
caucaucgagauaauu

SEQ ID NO: 4080640 - RNA, 14 nt, Variola virus
caucauuaucauuu

SEQ ID NO: 4080641 - RNA, 12 nt, Variola virus
cauccaacaauc

SEQ ID NO: 4080642 - RNA, 24 nt, Variola virus
cauccaugagauugaaugccauuu

SEQ ID NO: 4080643 - RNA, 18 nt, Variola virus
cauccguuguuauauacc

SEQ ID NO: 4080644 - RNA, 17 nt, Variola virus
cauccuuuauuaaauca

SEQ ID NO: 4080645 - RNA, 13 nt, Variola virus
caucgaauacuuu

SEQ ID NO: 4080646 - RNA, 23 nt, Variola virus
caucgacuguacgauacauaaug

SEQ ID NO: 4080647 - RNA, 15 nt, Variola virus
caucgaugaugcauu

SEQ ID NO: 4080648 - RNA, 23 nt, Variola virus
caucguauacuuuuuaauucucu

SEQ ID NO: 4080649 - RNA, 13 nt, Variola virus
caucgucaucaag

SEQ ID NO: 4080650 - RNA, 20 nt, Variola virus
caucgucgucuacuauucua

SEQ ID NO: 4080651 - RNA, 24 nt, Variola virus
caucuaccauaauccuauucuuga

SEQ ID NO: 4080652 - RNA, 14 nt, Variola virus
caucuauaucaucu

SEQ ID NO: 4080653 - RNA, 20 nt, Variola virus
caucucguuuagauuuucca

SEQ ID NO: 4080654 - RNA, 15 nt, Variola virus
caucucuauguuuca

SEQ ID NO: 4080655 - RNA, 12 nt, Variola virus
caucugcauuau

SEQ ID NO: 4080656 - RNA, 22 nt, Variola virus
caucuguaggauaucuauuuuc

SEQ ID NO: 4080657 - RNA, 12 nt, Variola virus
caucugucauau

SEQ ID NO: 4080658 - RNA, 18 nt, Variola virus
caucugucauuacauaau

SEQ ID NO: 4080659 - RNA, 21 nt, Variola virus
caucuuaaugcggcuuaauaa

SEQ ID NO: 4080660 - RNA, 17 nt, Variola virus
caucuuacauauacaga

SEQ ID NO: 4080661 - RNA, 16 nt, Variola virus
caucuuacaugaugau

SEQ ID NO: 4080662 - RNA, 18 nt, Variola virus
caucuuggaaacauaaaa

SEQ ID NO: 4080663 - RNA, 17 nt, Variola virus
caugaaacgaacacuau

SEQ ID NO: 4080664 - RNA, 13 nt, Variola virus
caugaaagaaaga

SEQ ID NO: 4080665 - RNA, 19 nt, Variola virus
caugaaauauauuaagaaa

SEQ ID NO: 4080666 - RNA, 23 nt, Variola virus
caugaacaaucacaagaauagag

SEQ ID NO: 4080667 - RNA, 13 nt, Variola virus
caugaacauaauc

SEQ ID NO: 4080668 - RNA, 23 nt, Variola virus
caugaauuuauuucuaauucuca

SEQ ID NO: 4080669 - RNA, 20 nt, Variola virus
caugacuugguauuuggaaa

SEQ ID NO: 4080670 - RNA, 17 nt, Variola virus
caugagauugaaugcca

SEQ ID NO: 4080671 - RNA, 18 nt, Variola virus
caugaugauuuaugguga

SEQ ID NO: 4080672 - RNA, 19 nt, Variola virus
caugauggucauguuuauu

SEQ ID NO: 4080673 - RNA, 15 nt, Variola virus
caugauguaaucucu

SEQ ID NO: 4080674 - RNA, 17 nt, Variola virus
caugcauccaaauggau

SEQ ID NO: 4080675 - RNA, 21 nt, Variola virus
cauggaaaagauaaaguuuua

SEQ ID NO: 4080676 - RNA, 18 nt, Variola virus
cauggaacaauaaaagag

SEQ ID NO: 4080677 - RNA, 23 nt, Variola virus
cauggauaucuuuaaagaacuaa

SEQ ID NO: 4080678 - RNA, 15 nt, Variola virus
cauggucuagaugua

SEQ ID NO: 4080679 - RNA, 22 nt, Variola virus
cauguaaacuugacaaaaauug

SEQ ID NO: 4080680 - RNA, 17 nt, Variola virus
cauguaacaauauuaca

SEQ ID NO: 4080681 - RNA, 19 nt, Variola virus
cauguauccacuuuugagc

SEQ ID NO: 4080682 - RNA, 12 nt, Variola virus
cauguauuuccu

SEQ ID NO: 4080683 - RNA, 21 nt, Variola virus
cauguuacacuauauaacaau

SEQ ID NO: 4080684 - RNA, 12 nt, Variola virus
cauguucauagg

SEQ ID NO: 4080685 - RNA, 14 nt, Variola virus
cauguuuauuucua

SEQ ID NO: 4080686 - RNA, 13 nt, Variola virus
cauuaaauuguga

SEQ ID NO: 4080687 - RNA, 12 nt, Variola virus
cauuaacagcuu

SEQ ID NO: 4080688 - RNA, 18 nt, Variola virus
cauuacaaagaagaacug

SEQ ID NO: 4080689 - RNA, 15 nt, Variola virus
cauuaccucaugaac

SEQ ID NO: 4080690 - RNA, 16 nt, Variola virus
cauuagagaaauguac

SEQ ID NO: 4080691 - RNA, 18 nt, Variola virus
cauuagguuaaaugauuu

SEQ ID NO: 4080692 - RNA, 14 nt, Variola virus
cauuaguaaacaau

SEQ ID NO: 4080693 - RNA, 21 nt, Variola virus
cauuauggauaaucuauuuac

SEQ ID NO: 4080694 - RNA, 23 nt, Variola virus
cauucacuauuccgucacuggcu

SEQ ID NO: 4080695 - RNA, 15 nt, Variola virus
cauuccuuauacaau

SEQ ID NO: 4080696 - RNA, 12 nt, Variola virus
cauucuauuuuu

SEQ ID NO: 4080697 - RNA, 20 nt, Variola virus
cauugauacacguucacuau

SEQ ID NO: 4080698 - RNA, 15 nt, Variola virus
cauugauuuauuuga

SEQ ID NO: 4080699 - RNA, 13 nt, Variola virus
cauuguaaagccc

SEQ ID NO: 4080700 - RNA, 18 nt, Variola virus
cauugugauuaaacauua

SEQ ID NO: 4080701 - RNA, 23 nt, Variola virus
cauuguucgugauaguauguggu

SEQ ID NO: 4080702 - RNA, 17 nt, Variola virus
cauuuaaauaucauaau

SEQ ID NO: 4080703 - RNA, 15 nt, Variola virus
cauuuacaacucuau

SEQ ID NO: 4080704 - RNA, 14 nt, Variola virus
cauuuauagcauuu

SEQ ID NO: 4080705 - RNA, 14 nt, Variola virus
cauuucaacguaaa

SEQ ID NO: 4080706 - RNA, 15 nt, Variola virus
cauuucacaauucau

SEQ ID NO: 4080707 - RNA, 22 nt, Variola virus
cauuugaugauauguuuggaau

SEQ ID NO: 4080708 - RNA, 12 nt, Variola virus
cauuugaugcac

SEQ ID NO: 4080709 - RNA, 17 nt, Variola virus
cauuuucacaaauacua

SEQ ID NO: 4080710 - RNA, 16 nt, Variola virus
cauuuucuuacaauua

SEQ ID NO: 4080711 - RNA, 19 nt, Variola virus
cauuuuuuauaaaaaacuu

SEQ ID NO: 4080712 - RNA, 18 nt, Variola virus
ccaaaauacaaaauguua

SEQ ID NO: 4080713 - RNA, 19 nt, Variola virus
ccaaacuccauaauuugcu

SEQ ID NO: 4080714 - RNA, 15 nt, Variola virus
ccaaacuguaaaugu

SEQ ID NO: 4080715 - RNA, 17 nt, Variola virus
ccaaacuguaaauguag

SEQ ID NO: 4080716 - RNA, 13 nt, Variola virus
ccaaacuuuuuua

SEQ ID NO: 4080717 - RNA, 20 nt, Variola virus
ccaaaggauguuuaacauuc

SEQ ID NO: 4080718 - RNA, 13 nt, Variola virus
ccaaauaucuuua

SEQ ID NO: 4080719 - RNA, 13 nt, Variola virus
ccaaaucugguaa

SEQ ID NO: 4080720 - RNA, 19 nt, Variola virus
ccaaaugcugucugugaaa

SEQ ID NO: 4080721 - RNA, 20 nt, Variola virus
ccaaauuuguuuuguuuauu

SEQ ID NO: 4080722 - RNA, 14 nt, Variola virus
ccaacaauuguuua

SEQ ID NO: 4080723 - RNA, 16 nt, Variola virus
ccaacggaaaugguag

SEQ ID NO: 4080724 - RNA, 20 nt, Variola virus
ccaacuucgccacccuugaa

SEQ ID NO: 4080725 - RNA, 20 nt, Variola virus
ccaagaaaauagaaauuugu

SEQ ID NO: 4080726 - RNA, 16 nt, Variola virus
ccaagauagaaacuau

SEQ ID NO: 4080727 - RNA, 14 nt, Variola virus
ccaaguagauaucu

SEQ ID NO: 4080728 - RNA, 22 nt, Variola virus
ccaaguaggugcaucuggagca

SEQ ID NO: 4080729 - RNA, 12 nt, Variola virus
ccaauaaaugac

SEQ ID NO: 4080730 - RNA, 12 nt, Variola virus
ccaauaguucuc

SEQ ID NO: 4080731 - RNA, 23 nt, Variola virus
ccaauaugucuguacaaauguua

SEQ ID NO: 4080732 - RNA, 21 nt, Variola virus
ccaaucaacgaauauccacua

SEQ ID NO: 4080733 - RNA, 17 nt, Variola virus
ccaaucauugauaucuu

SEQ ID NO: 4080734 - RNA, 19 nt, Variola virus
uauaaccaccgauaaaucu

SEQ ID NO: 4080735 - RNA, 19 nt, Variola virus
uauaacguuaugaaacgaa

SEQ ID NO: 4080736 - RNA, 16 nt, Variola virus
uauaacuauuaauauu

SEQ ID NO: 4080737 - RNA, 13 nt, Variola virus
uauaagaaugauu

SEQ ID NO: 4080738 - RNA, 14 nt, Variola virus
uauaaguagauguu

SEQ ID NO: 4080739 - RNA, 15 nt, Variola virus
uauaauaaauguaua

SEQ ID NO: 4080740 - RNA, 13 nt, Variola virus
uauaauagaucuu

SEQ ID NO: 4080741 - RNA, 15 nt, Variola virus
uauaaucguuaaauu

SEQ ID NO: 4080742 - RNA, 19 nt, Variola virus
uauaauuuacucucuauaa

SEQ ID NO: 4080743 - RNA, 18 nt, Variola virus
uauaauuucaucuacaau

SEQ ID NO: 4080744 - RNA, 21 nt, Variola virus
uauaauuuuuuuucuagauaa

SEQ ID NO: 4080745 - RNA, 22 nt, Variola virus
uauacaaauccauuaauacgga

SEQ ID NO: 4080746 - RNA, 13 nt, Variola virus
uauacaacuuuua

SEQ ID NO: 4080747 - RNA, 20 nt, Variola virus
uauacaaugaacuaauauga

SEQ ID NO: 4080748 - RNA, 15 nt, Variola virus
uauacaauuaaugau

SEQ ID NO: 4080749 - RNA, 20 nt, Variola virus
uauacacguuagauuauucu

SEQ ID NO: 4080750 - RNA, 17 nt, Variola virus
uauacauaauauuauca

SEQ ID NO: 4080751 - RNA, 22 nt, Variola virus
uauacauguuagagaauauuca

SEQ ID NO: 4080752 - RNA, 21 nt, Variola virus
uauaccacuauggauaccuug

SEQ ID NO: 4080753 - RNA, 18 nt, Variola virus
uauaccuuguaauuaaau

SEQ ID NO: 4080754 - RNA, 17 nt, Variola virus
uauacgaaaaaauagca

SEQ ID NO: 4080755 - RNA, 19 nt, Variola virus
uauacgaaauagauauuca

SEQ ID NO: 4080756 - RNA, 14 nt, Variola virus
uauacgaauacuau

SEQ ID NO: 4080757 - RNA, 13 nt, Variola virus
uauacuaauauga

SEQ ID NO: 4080758 - RNA, 21 nt, Variola virus
uauacuauauaguaauaccaa

SEQ ID NO: 4080759 - RNA, 24 nt, Variola virus
uauacugaguuggcuaugaucuug

SEQ ID NO: 4080760 - RNA, 16 nt, Variola virus
uauacuucauaaaaga

SEQ ID NO: 4080761 - RNA, 12 nt, Variola virus
uauagaacauca

SEQ ID NO: 4080762 - RNA, 23 nt, Variola virus
uauagagcccacguuuaaacauu

SEQ ID NO: 4080763 - RNA, 20 nt, Variola virus
uauagauggcuuguauguca

SEQ ID NO: 4080764 - RNA, 23 nt, Variola virus
uauagauucuugguaauuaauag

SEQ ID NO: 4080765 - RNA, 17 nt, Variola virus
uauagcuaaaaauguca

SEQ ID NO: 4080766 - RNA, 17 nt, Variola virus
uauagucuggaacacua

SEQ ID NO: 4080767 - RNA, 22 nt, Variola virus
uauaguuaauaguguacuacaa

SEQ ID NO: 4080768 - RNA, 17 nt, Variola virus
uauaguucuuaaucauu

SEQ ID NO: 4080769 - RNA, 19 nt, Variola virus
uauauaauccaucaacaau

SEQ ID NO: 4080770 - RNA, 21 nt, Variola virus
uauauagagccaagacgaaca

SEQ ID NO: 4080771 - RNA, 12 nt, Variola virus
uauauagauguc

SEQ ID NO: 4080772 - RNA, 15 nt, Variola virus
uauauaguuaagauu

SEQ ID NO: 4080773 - RNA, 20 nt, Variola virus
uauauauacugaaaaguuau

SEQ ID NO: 4080774 - RNA, 16 nt, Variola virus
uauauauccuuuugua

SEQ ID NO: 4080775 - RNA, 14 nt, Variola virus
uauauauuaucaua

SEQ ID NO: 4080776 - RNA, 15 nt, Variola virus
uauauauuugaaaau

SEQ ID NO: 4080777 - RNA, 13 nt, Variola virus
uauaucaauauca

SEQ ID NO: 4080778 - RNA, 17 nt, Variola virus
uauaucauuuguuuuaa

SEQ ID NO: 4080779 - RNA, 22 nt, Variola virus
uauaucgcauauuuauaucgug

SEQ ID NO: 4080780 - RNA, 15 nt, Variola virus
uauaucguuaucauu

SEQ ID NO: 4080781 - RNA, 21 nt, Variola virus
uauaugaacgauaauaacuua

SEQ ID NO: 4080782 - RNA, 19 nt, Variola virus
uauaugacuaacuuaucua

SEQ ID NO: 4080783 - RNA, 15 nt, Variola virus
uauaugagaugacuu

SEQ ID NO: 4080784 - RNA, 19 nt, Variola virus
uauaugcccuauuaucaua

SEQ ID NO: 4080785 - RNA, 21 nt, Variola virus
uauaugguauagggagaguau

SEQ ID NO: 4080786 - RNA, 19 nt, Variola virus
uauauggucuauauauaca

SEQ ID NO: 4080787 - RNA, 13 nt, Variola virus
uauauguaacauu

SEQ ID NO: 4080788 - RNA, 14 nt, Variola virus
uauaugugucucca

SEQ ID NO: 4080789 - RNA, 13 nt, Variola virus
uauauuaaaguca

SEQ ID NO: 4080790 - RNA, 13 nt, Variola virus
uauauuacgguau

SEQ ID NO: 4080791 - RNA, 22 nt, Variola virus
uauauuacgguaucuacuagau

SEQ ID NO: 4080792 - RNA, 15 nt, Variola virus
uauauuagagaagau

SEQ ID NO: 4080793 - RNA, 17 nt, Variola virus
uauauucauuuaauauu

SEQ ID NO: 4080794 - RNA, 16 nt, Variola virus
uauauucgaauucaaa

SEQ ID NO: 4080795 - RNA, 15 nt, Variola virus
uauauucuguuuuaa

SEQ ID NO: 4080796 - RNA, 15 nt, Variola virus
uauauucuuacagua

SEQ ID NO: 4080797 - RNA, 22 nt, Variola virus
uauauuuucacuuuaucucauu

SEQ ID NO: 4080798 - RNA, 16 nt, Variola virus
uauauuuucauuuaaa

SEQ ID NO: 4080799 - RNA, 12 nt, Variola virus
uauauuuugcau

SEQ ID NO: 4080800 - RNA, 22 nt, Variola virus
uaucaaagagaaggccaaagaa

SEQ ID NO: 4080801 - RNA, 14 nt, Variola virus
uaucaauagcaguu

SEQ ID NO: 4080802 - RNA, 18 nt, Variola virus
uaucaauccaacaaaugc

SEQ ID NO: 4080803 - RNA, 17 nt, Variola virus
uaucaauuaaauaauua

SEQ ID NO: 4080804 - RNA, 12 nt, Variola virus
uaucaauuuauc

SEQ ID NO: 4080805 - RNA, 19 nt, Variola virus
uaucaccgucgcuagauaa

SEQ ID NO: 4080806 - RNA, 14 nt, Variola virus
uaucagcuauugca

SEQ ID NO: 4080807 - RNA, 15 nt, Variola virus
uaucauaauuaaauu

SEQ ID NO: 4080808 - RNA, 21 nt, Variola virus
uaucauacaucggcuaccaaa

SEQ ID NO: 4080809 - RNA, 18 nt, Variola virus
uaucaucgacacaaauga

SEQ ID NO: 4080810 - RNA, 15 nt, Variola virus
uaucaucuacgauau

SEQ ID NO: 4080811 - RNA, 14 nt, Variola virus
uaucaucuauauca

SEQ ID NO: 4080812 - RNA, 14 nt, Variola virus
uaucaucuauauga

SEQ ID NO: 4080813 - RNA, 16 nt, Variola virus
uaucaucuauuagaga

SEQ ID NO: 4080814 - RNA, 18 nt, Variola virus
uaucauuaauuaauacaa

SEQ ID NO: 4080815 - RNA, 14 nt, Variola virus
uaucauuuacuaga

SEQ ID NO: 4080816 - RNA, 20 nt, Variola virus
uauccaaggacaaggaugaa

SEQ ID NO: 4080817 - RNA, 16 nt, Variola virus
uauccaauacagaaug

SEQ ID NO: 4080818 - RNA, 17 nt, Variola virus
uauccagauccuuuucu

SEQ ID NO: 4080819 - RNA, 22 nt, Variola virus
uauccaguuaagagaauaauag

SEQ ID NO: 4080820 - RNA, 17 nt, Variola virus
uauccaguuccuuuucu

SEQ ID NO: 4080821 - RNA, 20 nt, Variola virus
uauccaguuccuuuucuagu

SEQ ID NO: 4080822 - RNA, 18 nt, Variola virus
uauccauaaacaauauua

SEQ ID NO: 4080823 - RNA, 13 nt, Variola virus
uauccauuauucu

SEQ ID NO: 4080824 - RNA, 14 nt, Variola virus
uaucccccguauuu

SEQ ID NO: 4080825 - RNA, 19 nt, Variola virus
uauccguauuuccauaaua

SEQ ID NO: 4080826 - RNA, 14 nt, Variola virus
uaucgaauuucuac

SEQ ID NO: 4080827 - RNA, 24 nt, Variola virus
uaucgauguggaaauuacacugua

SEQ ID NO: 4080828 - RNA, 21 nt, Variola virus
uaucgauuagucuuaaugaua

SEQ ID NO: 4080829 - RNA, 15 nt, Variola virus
uaucgcgacauauau

SEQ ID NO: 4080830 - RNA, 21 nt, Variola virus
uaucgcuggaagggacuauau

SEQ ID NO: 4080831 - RNA, 16 nt, Variola virus
uaucggacuacuuauu

SEQ ID NO: 4080832 - RNA, 16 nt, Variola virus
uaucggaggaauuaag

SEQ ID NO: 4080833 - RNA, 19 nt, Variola virus
uaucggcauuuauguuucu

SEQ ID NO: 4080834 - RNA, 14 nt, Variola virus
uaucuaacaucuug

SEQ ID NO: 4080835 - RNA, 13 nt, Variola virus
uaucuacaucuuc

SEQ ID NO: 4080836 - RNA, 17 nt, Variola virus
uaucuaccucuccaaaa

SEQ ID NO: 4080837 - RNA, 22 nt, Variola virus
uaucuacgauuuuuacaaaagu

SEQ ID NO: 4080838 - RNA, 15 nt, Variola virus
uaucuagcaaagauu

SEQ ID NO: 4080839 - RNA, 17 nt, Variola virus
uaucucaauaguuucau

SEQ ID NO: 4080840 - RNA, 18 nt, Variola virus
uaucucagugcaaagauu

SEQ ID NO: 4080841 - RNA, 18 nt, Variola virus
uaucucauucaaauccau

SEQ ID NO: 4080842 - RNA, 14 nt, Variola virus
uaucucuuaaugag

SEQ ID NO: 4080843 - RNA, 20 nt, Variola virus
uaucugaguauaguguucau

SEQ ID NO: 4080844 - RNA, 13 nt, Variola virus
uaucugaugauau

SEQ ID NO: 4080845 - RNA, 16 nt, Variola virus
uaucugguucuaaaag

SEQ ID NO: 4080846 - RNA, 20 nt, Variola virus
uaucuuauauacacauaauu

SEQ ID NO: 4080847 - RNA, 21 nt, Variola virus
uaucuuauguauauguuugua

SEQ ID NO: 4080848 - RNA, 12 nt, Variola virus
uaucuucucaaa

SEQ ID NO: 4080849 - RNA, 17 nt, Variola virus
uaucuugguaauacuua

SEQ ID NO: 4080850 - RNA, 13 nt, Variola virus
uaucuuucaagau

SEQ ID NO: 4080851 - RNA, 13 nt, Variola virus
uaugaaauuuaag

SEQ ID NO: 4080852 - RNA, 17 nt, Variola virus
uaugaauaaucuucauu

SEQ ID NO: 4080853 - RNA, 14 nt, Variola virus
uaugaaucauacag

SEQ ID NO: 4080854 - RNA, 12 nt, Variola virus
uaugaaugacuc

SEQ ID NO: 4080855 - RNA, 14 nt, Variola virus
uaugacuuaauagc

SEQ ID NO: 4080856 - RNA, 22 nt, Variola virus
uaugagggaaaagauucucauu

SEQ ID NO: 4080857 - RNA, 18 nt, Variola virus
uaugauagaaauuagcaa

SEQ ID NO: 4080858 - RNA, 15 nt, Variola virus
uaugauaucauguaa

SEQ ID NO: 4080859 - RNA, 13 nt, Variola virus
uaugauauucauu

SEQ ID NO: 4080860 - RNA, 19 nt, Variola virus
uaugauccaauguguuuaa

SEQ ID NO: 4080861 - RNA, 15 nt, Variola virus
ucaaggaacaaauau

SEQ ID NO: 4080862 - RNA, 16 nt, Variola virus
ucaaguaaagauuuca

SEQ ID NO: 4080863 - RNA, 17 nt, Variola virus
ucaaguaaagauuucaa

SEQ ID NO: 4080864 - RNA, 17 nt, Variola virus
ucaaguuuguaggaaag

SEQ ID NO: 4080865 - RNA, 20 nt, Variola virus
ucaauaacuggcacaacaau

SEQ ID NO: 4080866 - RNA, 14 nt, Variola virus
ucaauaauuucagg

SEQ ID NO: 4080867 - RNA, 20 nt, Variola virus
ucaauacaccaauagaugau

SEQ ID NO: 4080868 - RNA, 12 nt, Variola virus
ucaauagaagau

SEQ ID NO: 4080869 - RNA, 17 nt, Variola virus
ucaauagauuauacauc

SEQ ID NO: 4080870 - RNA, 16 nt, Variola virus
ucaauaguuucauaau

SEQ ID NO: 4080871 - RNA, 20 nt, Variola virus
ucaaucaaaagacuauacau

SEQ ID NO: 4080872 - RNA, 21 nt, Variola virus
ucaaucaaaagacuauacauu

SEQ ID NO: 4080873 - RNA, 17 nt, Variola virus
ucaaucacuacaucuuu

SEQ ID NO: 4080874 - RNA, 19 nt, Variola virus
ucaauuaauaaaguaguau

SEQ ID NO: 4080875 - RNA, 13 nt, Variola virus
ucaauuacuacaa

SEQ ID NO: 4080876 - RNA, 22 nt, Variola virus
ucacaaguaugaagaaaaaugu

SEQ ID NO: 4080877 - RNA, 15 nt, Variola virus
ucacauacuuuguaa

SEQ ID NO: 4080878 - RNA, 12 nt, Variola virus
ucaccaauaaaa

SEQ ID NO: 4080879 - RNA, 22 nt, Variola virus
ucacgauaucucuuaaaugcua

SEQ ID NO: 4080880 - RNA, 15 nt, Variola virus
ucacguaaauacaaa

SEQ ID NO: 4080881 - RNA, 17 nt, Variola virus
ucacuaacaauaacuag

SEQ ID NO: 4080882 - RNA, 18 nt, Variola virus
ucacuaauucuagucuuu

SEQ ID NO: 4080883 - RNA, 14 nt, Variola virus
ucacuagaaacuag

SEQ ID NO: 4080884 - RNA, 20 nt, Variola virus
ucacuauaagaaaucagaau

SEQ ID NO: 4080885 - RNA, 21 nt, Variola virus
ucacuuaacaauuccacaaau

SEQ ID NO: 4080886 - RNA, 16 nt, Variola virus
ucacuucugucuacau

SEQ ID NO: 4080887 - RNA, 21 nt, Variola virus
ucagaaagaguucccacaugu

SEQ ID NO: 4080888 - RNA, 17 nt, Variola virus
ucagaaagcuguggaug

SEQ ID NO: 4080889 - RNA, 22 nt, Variola virus
ucagaaauuaguuuagagucaa

SEQ ID NO: 4080890 - RNA, 22 nt, Variola virus
ucagaauaggaugaauguagua

SEQ ID NO: 4080891 - RNA, 21 nt, Variola virus
ucagaaucaaauauagaucuu

SEQ ID NO: 4080892 - RNA, 14 nt, Variola virus
ucagaaucguauau

SEQ ID NO: 4080893 - RNA, 13 nt, Variola virus
ucagacaacaucu

SEQ ID NO: 4080894 - RNA, 15 nt, Variola virus
ucagagaacuucugc

SEQ ID NO: 4080895 - RNA, 19 nt, Variola virus
ucagaguucagugaagaag

SEQ ID NO: 4080896 - RNA, 17 nt, Variola virus
ucagcauccacucauau

SEQ ID NO: 4080897 - RNA, 17 nt, Variola virus
ucagcauuacuugauau

SEQ ID NO: 4080898 - RNA, 16 nt, Variola virus
ucagcugaaaaacuau

SEQ ID NO: 4080899 - RNA, 12 nt, Variola virus
ucaggaaaugua

SEQ ID NO: 4080900 - RNA, 18 nt, Variola virus
ucagucuggaaacuauca

SEQ ID NO: 4080901 - RNA, 13 nt, Variola virus
ucaguuacaaaac

SEQ ID NO: 4080902 - RNA, 17 nt, Variola virus
ucauaaaaaaaaguuuu

SEQ ID NO: 4080903 - RNA, 20 nt, Variola virus
ucauaaaacgauuggaaucu

SEQ ID NO: 4080904 - RNA, 15 nt, Variola virus
ucauaaauucuuuaa

SEQ ID NO: 4080905 - RNA, 13 nt, Variola virus
ucauaauaaauuu

SEQ ID NO: 4080906 - RNA, 17 nt, Variola virus
ucauaauaugagauguu

SEQ ID NO: 4080907 - RNA, 20 nt, Variola virus
ucauacgauaugccuccaga

SEQ ID NO: 4080908 - RNA, 15 nt, Variola virus
ucauagauucuuuaa

SEQ ID NO: 4080909 - RNA, 14 nt, Variola virus
ucauauaacacuca

SEQ ID NO: 4080910 - RNA, 23 nt, Variola virus
ucauaucuagaaugaagauauca

SEQ ID NO: 4080911 - RNA, 12 nt, Variola virus
ucauauguagug

SEQ ID NO: 4080912 - RNA, 14 nt, Variola virus
ucaucaaaauacug

SEQ ID NO: 4080913 - RNA, 12 nt, Variola virus
ucaucaauaaag

SEQ ID NO: 4080914 - RNA, 14 nt, Variola virus
ucaucaauguagug

SEQ ID NO: 4080915 - RNA, 13 nt, Variola virus
ucaucauuucuaa

SEQ ID NO: 4080916 - RNA, 17 nt, Variola virus
ucauccagaucauuaag

SEQ ID NO: 4080917 - RNA, 16 nt, Variola virus
ucauccgauauuauug

SEQ ID NO: 4080918 - RNA, 14 nt, Variola virus
ucauccgucucauu

SEQ ID NO: 4080919 - RNA, 18 nt, Variola virus
ucauccuuguucaucauu

SEQ ID NO: 4080920 - RNA, 23 nt, Variola virus
ucaucgaacuucugaucauuaau

SEQ ID NO: 4080921 - RNA, 15 nt, Variola virus
ucaucuaagaaauag

SEQ ID NO: 4080922 - RNA, 12 nt, Variola virus
ucaucuguuuua

SEQ ID NO: 4080923 - RNA, 22 nt, Variola virus
ucaugaaucaauuaguagaguu

SEQ ID NO: 4080924 - RNA, 16 nt, Variola virus
ucauggaauacauaaa

SEQ ID NO: 4080925 - RNA, 13 nt, Variola virus
ucauguaaauguu

SEQ ID NO: 4080926 - RNA, 17 nt, Variola virus
ucauguagaaaaauucu

SEQ ID NO: 4080927 - RNA, 14 nt, Variola virus
ucauguagauaguu

SEQ ID NO: 4080928 - RNA, 16 nt, Variola virus
ucauuaacuagacguu

SEQ ID NO: 4080929 - RNA, 22 nt, Variola virus
ucauuaacucuagaaaucugaa

SEQ ID NO: 4080930 - RNA, 17 nt, Variola virus
ucauuaaucauuucuaa

SEQ ID NO: 4080931 - RNA, 15 nt, Variola virus
ucauuaauugagaaa

SEQ ID NO: 4080932 - RNA, 22 nt, Variola virus
ucauuaauugagaaaaaacuaa

SEQ ID NO: 4080933 - RNA, 15 nt, Variola virus
ucauucaagauaagc

SEQ ID NO: 4080934 - RNA, 22 nt, Variola virus
ucauuccaucauuuaagaaggc

SEQ ID NO: 4080935 - RNA, 15 nt, Variola virus
ucauucguaaaucuu

SEQ ID NO: 4080936 - RNA, 18 nt, Variola virus
ucauucuuaagacacauu

SEQ ID NO: 4080937 - RNA, 15 nt, Variola virus
ucauugcuuucuaga

SEQ ID NO: 4080938 - RNA, 15 nt, Variola virus
ucauuuccugcacgu

SEQ ID NO: 4080939 - RNA, 19 nt, Variola virus
ucauuucuccaaagaauau

SEQ ID NO: 4080940 - RNA, 15 nt, Variola virus
ucauuuuauaauugu

SEQ ID NO: 4080941 - RNA, 14 nt, Variola virus
ucauuuucuacaau

SEQ ID NO: 4080942 - RNA, 18 nt, Variola virus
ucauuuucuauuuaaaau

SEQ ID NO: 4080943 - RNA, 17 nt, Variola virus
ucauuuucuucaacaaa

SEQ ID NO: 4080944 - RNA, 18 nt, Variola virus
ucauuuuuuuaggaguau

SEQ ID NO: 4080945 - RNA, 18 nt, Variola virus
uccaaaaacacaacaaau

SEQ ID NO: 4080946 - RNA, 12 nt, Variola virus
uccaaauaacuc

SEQ ID NO: 4080947 - RNA, 17 nt, Variola virus
uccaaauugcgacacua

SEQ ID NO: 4080948 - RNA, 16 nt, Variola virus
uccaacaauagcuuua

SEQ ID NO: 4080949 - RNA, 15 nt, Variola virus
uccaaguucuauagu

SEQ ID NO: 4080950 - RNA, 22 nt, Variola virus
uccaauaaauuaucaaauacuu

SEQ ID NO: 4080951 - RNA, 15 nt, Variola virus
uccaauaaauuauuu

SEQ ID NO: 4080952 - RNA, 13 nt, Variola virus
uccaauguauuua

SEQ ID NO: 4080953 - RNA, 15 nt, Variola virus
uccaauuuuucuuaa

SEQ ID NO: 4080954 - RNA, 16 nt, Variola virus
uccacaaauaguaaau

SEQ ID NO: 4080955 - RNA, 15 nt, Variola virus
uccacuauacauucu

SEQ ID NO: 4080956 - RNA, 22 nt, Variola virus
uccacuucugcagaauaauuag

SEQ ID NO: 4080957 - RNA, 19 nt, Variola virus
uccagaacaucuuccauag

SEQ ID NO: 4080958 - RNA, 12 nt, Variola virus
uccagaauguac

SEQ ID NO: 4080959 - RNA, 23 nt, Variola virus
uccagauauauaucuuuucagcu

SEQ ID NO: 4080960 - RNA, 13 nt, Variola virus
uccagauuacuaa

SEQ ID NO: 4080961 - RNA, 15 nt, Variola virus
uccagauuucauaau

SEQ ID NO: 4080962 - RNA, 16 nt, Variola virus
uccaguuccuuuucua

SEQ ID NO: 4080963 - RNA, 14 nt, Variola virus
uccauaaacugaua

SEQ ID NO: 4080964 - RNA, 23 nt, Variola virus
uccauagacagcuucuagaaguu

SEQ ID NO: 4080965 - RNA, 12 nt, Variola virus
uccauaggaaag

SEQ ID NO: 4080966 - RNA, 17 nt, Variola virus
uccauauuuuagaauau

SEQ ID NO: 4080967 - RNA, 16 nt, Variola virus
uccaucuacuuuucca

SEQ ID NO: 4080968 - RNA, 19 nt, Variola virus
uccaugauucuaucucuaa

SEQ ID NO: 4080969 - RNA, 18 nt, Variola virus
uccaugcaacauuuccua

SEQ ID NO: 4080970 - RNA, 19 nt, Variola virus
uccauggaagaacuaccaa

SEQ ID NO: 4080971 - RNA, 16 nt, Variola virus
uccauuaaauaaugua

SEQ ID NO: 4080972 - RNA, 13 nt, Variola virus
uccauuuauacau

SEQ ID NO: 4080973 - RNA, 11 nt, Variola virus
uccauuucuag

SEQ ID NO: 4080974 - RNA, 15 nt, Variola virus
uccauuuucccaaau

SEQ ID NO: 4080975 - RNA, 20 nt, Variola virus
ucccaaauguuggaaaauag

SEQ ID NO: 4080976 - RNA, 14 nt, Variola virus
ucccacaaauacug

SEQ ID NO: 4080977 - RNA, 18 nt, Variola virus
ucccacaguguugccauu

SEQ ID NO: 4080978 - RNA, 11 nt, Variola virus
ucccagcauua

SEQ ID NO: 4080979 - RNA, 12 nt, Variola virus
ucccauguuuca

SEQ ID NO: 4080980 - RNA, 21 nt, Variola virus
uccccaaaaguaaaauaauca

SEQ ID NO: 4080981 - RNA, 15 nt, Variola virus
ucccuuguguaacgu

SEQ ID NO: 4080982 - RNA, 13 nt, Variola virus
uccgaguaaaaug

SEQ ID NO: 4080983 - RNA, 16 nt, Variola virus
uccgaugauuaaugac

SEQ ID NO: 4080984 - RNA, 20 nt, Variola virus
uccgauuuaccguuacuaau

SEQ ID NO: 4080985 - RNA, 17 nt, Variola virus
uccggagauagauuucc

SEQ ID NO: 4080986 - RNA, 20 nt, Variola virus
uccguaacggaaauuacaga

SEQ ID NO: 4080987 - RNA, 16 nt, Variola virus
uccgugagaaauacgu

SEQ ID NO: 4080988 - RNA, 15 nt, Variola virus
ucgaacauacaaaaa

SEQ ID NO: 4080989 - RNA, 14 nt, Variola virus
ucgaauaaugagua

SEQ ID NO: 4080990 - RNA, 17 nt, Variola virus
ucgaauacgauacuuau

SEQ ID NO: 4080991 - RNA, 20 nt, Variola virus
ucgacuauuuuaaauagcau

SEQ ID NO: 4080992 - RNA, 23 nt, Variola virus
ucgacucauaagaaagagaauag

SEQ ID NO: 4080993 - RNA, 20 nt, Variola virus
ucgagaugaacauucaucug

SEQ ID NO: 4080994 - RNA, 17 nt, Variola virus
ucgaggauaucauccaa

SEQ ID NO: 4080995 - RNA, 20 nt, Variola virus
ucgaugaaauaucugauguu

SEQ ID NO: 4080996 - RNA, 14 nt, Variola virus
ucgauuucuggaua

SEQ ID NO: 4080997 - RNA, 15 nt, Variola virus
ucgauuuuuagauuu

SEQ ID NO: 4080998 - RNA, 21 nt, Variola virus
ucgcccucaauuucccaaaua

SEQ ID NO: 4080999 - RNA, 20 nt, Variola virus
ucgcuaauguauagauuguu

SEQ ID NO: 4081000 - RNA, 14 nt, Variola virus
ucgcuauauguucc

SEQ ID NO: 4081001 - RNA, 15 nt, Variola virus
ucgcuuucauaguua

SEQ ID NO: 4081002 - RNA, 21 nt, Variola virus
ucgcuuucugguaacaugaua

SEQ ID NO: 4081003 - RNA, 22 nt, Variola virus
ucggcaacauacuauuguacau

SEQ ID NO: 4081004 - RNA, 19 nt, Variola virus
ucgguaucugaaguacuua

SEQ ID NO: 4081005 - RNA, 14 nt, Variola virus
ucguaaaaaguuuu

SEQ ID NO: 4081006 - RNA, 22 nt, Variola virus
ucguaauuggaaaauuaguguu

SEQ ID NO: 4081007 - RNA, 13 nt, Variola virus
ucguacauccagg

SEQ ID NO: 4081008 - RNA, 15 nt, Variola virus
ucguacuauauacaa

SEQ ID NO: 4081009 - RNA, 13 nt, Variola virus
ucguagauuuuaa

SEQ ID NO: 4081010 - RNA, 18 nt, Variola virus
ucguagauuuuaauguau

SEQ ID NO: 4081011 - RNA, 18 nt, Variola virus
ucguaguaaguuaaccaa

SEQ ID NO: 4081012 - RNA, 14 nt, Variola virus
ucguauaaaguuau

SEQ ID NO: 4081013 - RNA, 17 nt, Variola virus
ucguauaccauuucuag

SEQ ID NO: 4081014 - RNA, 19 nt, Variola virus
ucguauuggauucugaaau

SEQ ID NO: 4081015 - RNA, 12 nt, Variola virus
ucgucuuuagag

SEQ ID NO: 4081016 - RNA, 14 nt, Variola virus
ucgugaauaauguu

SEQ ID NO: 4081017 - RNA, 12 nt, Variola virus
ucguuacaaaag

SEQ ID NO: 4081018 - RNA, 21 nt, Variola virus
ucguucaacugucuuucaaga

SEQ ID NO: 4081019 - RNA, 16 nt, Variola virus
ucguucgaucuaaaau

SEQ ID NO: 4081020 - RNA, 11 nt, Variola virus
ucguuuggauu

SEQ ID NO: 4081021 - RNA, 17 nt, Variola virus
ucuaaaaacaauacagu

SEQ ID NO: 4081022 - RNA, 20 nt, Variola virus
ucuaaaauguauaacaaaug

SEQ ID NO: 4081023 - RNA, 16 nt, Variola virus
ucuaaacaacaaacaa

SEQ ID NO: 4081024 - RNA, 16 nt, Variola virus
ucuaagauuauuuuaa

SEQ ID NO: 4081025 - RNA, 21 nt, Variola virus
ucuaauauaaucuuuaguauu

SEQ ID NO: 4081026 - RNA, 19 nt, Variola virus
ucuaauuuccugauucaga

SEQ ID NO: 4081027 - RNA, 14 nt, Variola virus
ucuacaugaaauag

SEQ ID NO: 4081028 - RNA, 18 nt, Variola virus
ucuaccagcuggaaaaag

SEQ ID NO: 4081029 - RNA, 15 nt, Variola virus
ucuacgaagaaaguu

SEQ ID NO: 4081030 - RNA, 19 nt, Variola virus
ucuacgauuuuuacaaaag

SEQ ID NO: 4081031 - RNA, 19 nt, Variola virus
ucuacuagacuauuaauaa

SEQ ID NO: 4081032 - RNA, 21 nt, Variola virus
ucuagacgauuaguaauauau

SEQ ID NO: 4081033 - RNA, 15 nt, Variola virus
ucuagagauuguacu

SEQ ID NO: 4081034 - RNA, 17 nt, Variola virus
ucuagagugaguuuagg

SEQ ID NO: 4081035 - RNA, 19 nt, Variola virus
ucuagauacuagaguagua

SEQ ID NO: 4081036 - RNA, 20 nt, Variola virus
ucuagauacuagaguaguau

SEQ ID NO: 4081037 - RNA, 14 nt, Variola virus
ucuagauauuagua

SEQ ID NO: 4081038 - RNA, 18 nt, Variola virus
ucuagaucucuagaauau

SEQ ID NO: 4081039 - RNA, 14 nt, Variola virus
ucuagcauuucuag

SEQ ID NO: 4081040 - RNA, 23 nt, Variola virus
ucuagcuuauugaguggaaaguu

SEQ ID NO: 4081041 - RNA, 18 nt, Variola virus
ucuagucgcaucucuuaa

SEQ ID NO: 4081042 - RNA, 19 nt, Variola virus
ucuaguugauauuccaacc

SEQ ID NO: 4081043 - RNA, 18 nt, Variola virus
ucuauaaagucugucaaa

SEQ ID NO: 4081044 - RNA, 23 nt, Variola virus
ucuauacagcgaauaaauucaga

SEQ ID NO: 4081045 - RNA, 22 nt, Variola virus
ucuauacgauaguuuguuucua

SEQ ID NO: 4081046 - RNA, 19 nt, Variola virus
ucuauaguuuguuuucauu

SEQ ID NO: 4081047 - RNA, 24 nt, Variola virus
ucuauauauacacuacaauuuagu

SEQ ID NO: 4081048 - RNA, 14 nt, Variola virus
ucuaucauagauuu

SEQ ID NO: 4081049 - RNA, 17 nt, Variola virus
ucuauccaagauacuua

SEQ ID NO: 4081050 - RNA, 20 nt, Variola virus
ucuauccauuguuucacauu

SEQ ID NO: 4081051 - RNA, 20 nt, Variola virus
ucuaugaauauaauagaugu

SEQ ID NO: 4081052 - RNA, 19 nt, Variola virus
ucuaugaucugucuuuuaa

SEQ ID NO: 4081053 - RNA, 19 nt, Variola virus
ucuauuaaagauuguuuaa

SEQ ID NO: 4081054 - RNA, 18 nt, Variola virus
ucuauuagauguguauaa

SEQ ID NO: 4081055 - RNA, 15 nt, Variola virus
ucuauuauacauuua

SEQ ID NO: 4081056 - RNA, 18 nt, Variola virus
ucuauuauauuuaggaua

SEQ ID NO: 4081057 - RNA, 12 nt, Variola virus
ucuauucaagau

SEQ ID NO: 4081058 - RNA, 17 nt, Variola virus
ucuauuguaguguauaa

SEQ ID NO: 4081059 - RNA, 14 nt, Variola virus
ucuauuguuuggaa

SEQ ID NO: 4081060 - RNA, 15 nt, Variola virus
ucuauuuaauacuuu

SEQ ID NO: 4081061 - RNA, 20 nt, Variola virus
ucuauuucaucguuuuguau

SEQ ID NO: 4081062 - RNA, 18 nt, Variola virus
ucuauuuuaucauuuucc

SEQ ID NO: 4081063 - RNA, 15 nt, Variola virus
ucucaauacaaccaa

SEQ ID NO: 4081064 - RNA, 12 nt, Variola virus
ucucaauacuaa

SEQ ID NO: 4081065 - RNA, 17 nt, Variola virus
ucucacaaaaaaguuuu

SEQ ID NO: 4081066 - RNA, 23 nt, Variola virus
ucucaucaucagaauaaaucaau

SEQ ID NO: 4081067 - RNA, 17 nt, Variola virus
ucucauuaauuaaccau

SEQ ID NO: 4081068 - RNA, 16 nt, Variola virus
ucuccagauuucauaa

SEQ ID NO: 4081069 - RNA, 18 nt, Variola virus
ucuccauaaagaaauuag

SEQ ID NO: 4081070 - RNA, 18 nt, Variola virus
ucucccauuaucuuggua

SEQ ID NO: 4081071 - RNA, 22 nt, Variola virus
ucuccgcaauacauuucucaaa

SEQ ID NO: 4081072 - RNA, 19 nt, Variola virus
ucucguauucaguuucauc

SEQ ID NO: 4081073 - RNA, 18 nt, Variola virus
ucucuaacgguaccauaa

SEQ ID NO: 4081074 - RNA, 16 nt, Variola virus
ucucuaagaggaugag

SEQ ID NO: 4081075 - RNA, 14 nt, Variola virus
ucucuaaguuucuu

SEQ ID NO: 4081076 - RNA, 16 nt, Variola virus
ucucuauaacaaaugu

SEQ ID NO: 4081077 - RNA, 10 nt, Variola virus
ucucuauaga

SEQ ID NO: 4081078 - RNA, 14 nt, Variola virus
ucucucaaaucaga

SEQ ID NO: 4081079 - RNA, 22 nt, Variola virus
ucucugaauauagaacaucauu

SEQ ID NO: 4081080 - RNA, 15 nt, Variola virus
ucucugacauucaga

SEQ ID NO: 4081081 - RNA, 16 nt, Variola virus
ucucuguaagauuucc

SEQ ID NO: 4081082 - RNA, 22 nt, Variola virus
ucucuguuuaaugaauuacuaa

SEQ ID NO: 4081083 - RNA, 18 nt, Variola virus
ucucuuaguaaguuuauu

SEQ ID NO: 4081084 - RNA, 19 nt, Variola virus
ucugaaaauccacuaacaa

SEQ ID NO: 4081085 - RNA, 21 nt, Variola virus
ucugaaauaacauauagauuu

SEQ ID NO: 4081086 - RNA, 18 nt, Variola virus
ucugaaauuccaucuaga

SEQ ID NO: 4081087 - RNA, 13 nt, Variola virus
ucugaauaaacaa

SEQ ID NO: 4081088 - RNA, 17 nt, Variola virus
ucugaauagauccacca

SEQ ID NO: 4081089 - RNA, 18 nt, Variola virus
ucugacaauauuuaguuu

SEQ ID NO: 4081090 - RNA, 13 nt, Variola virus
ucugacauucaga

SEQ ID NO: 4081091 - RNA, 20 nt, Variola virus
ucugauaauccagucuuuaa

SEQ ID NO: 4081092 - RNA, 15 nt, Variola virus
ucugcggauuuauaa

SEQ ID NO: 4081093 - RNA, 19 nt, Variola virus
ucugcguguaaaaaguugu

SEQ ID NO: 4081094 - RNA, 18 nt, Variola virus
ucugcuccuuuuucuauu

SEQ ID NO: 4081095 - RNA, 22 nt, Variola virus
ucuggaaaaacaacacaaugua

SEQ ID NO: 4081096 - RNA, 13 nt, Variola virus
ucuggaauuaaaa

SEQ ID NO: 4081097 - RNA, 20 nt, Variola virus
ucugguaccuauucuagaaa

SEQ ID NO: 4081098 - RNA, 19 nt, Variola virus
ucuguaaaccacaauuugc

SEQ ID NO: 4081099 - RNA, 15 nt, Variola virus
ucugucagaaaauac

SEQ ID NO: 4081100 - RNA, 16 nt, Variola virus
ucugucucagaaucaa

SEQ ID NO: 4081101 - RNA, 20 nt, Variola virus
ugaugacacuagaugauuug

SEQ ID NO: 4081102 - RNA, 14 nt, Variola virus
ugaugauagagaua

SEQ ID NO: 4081103 - RNA, 17 nt, Variola virus
ugaugauauguuuggaa

SEQ ID NO: 4081104 - RNA, 21 nt, Variola virus
ugaugguagucaauugauguu

SEQ ID NO: 4081105 - RNA, 13 nt, Variola virus
ugauguucauaua

SEQ ID NO: 4081106 - RNA, 23 nt, Variola virus
ugauuaacagaaaaaacaauguu

SEQ ID NO: 4081107 - RNA, 17 nt, Variola virus
ugauuacauuuuugaua

SEQ ID NO: 4081108 - RNA, 20 nt, Variola virus
ugauuagaaaauauaaauua

SEQ ID NO: 4081109 - RNA, 20 nt, Variola virus
ugauuccuaggucuacagaa

SEQ ID NO: 4081110 - RNA, 14 nt, Variola virus
ugauucuaucuaca

SEQ ID NO: 4081111 - RNA, 11 nt, Variola virus
ugauugaagaa

SEQ ID NO: 4081112 - RNA, 19 nt, Variola virus
ugauugacaaauuauucua

SEQ ID NO: 4081113 - RNA, 19 nt, Variola virus
ugauugauuauuucaaaga

SEQ ID NO: 4081114 - RNA, 17 nt, Variola virus
ugauugcagauuugcca

SEQ ID NO: 4081115 - RNA, 18 nt, Variola virus
ugauuguaaacacagaua

SEQ ID NO: 4081116 - RNA, 13 nt, Variola virus
ugauuuacucauu

SEQ ID NO: 4081117 - RNA, 19 nt, Variola virus
ugcaaauaaaauauacugu

SEQ ID NO: 4081118 - RNA, 16 nt, Variola virus
ugcaagauacaugcua

SEQ ID NO: 4081119 - RNA, 21 nt, Variola virus
ugcacagcgaagaauucuaga

SEQ ID NO: 4081120 - RNA, 14 nt, Variola virus
uuuaaaaugaucua

SEQ ID NO: 4081121 - RNA, 19 nt, Variola virus
uuuaaaauuagaucuuuua

SEQ ID NO: 4081122 - RNA, 12 nt, Variola virus
uuuaaacugaaa

SEQ ID NO: 4081123 - RNA, 20 nt, Variola virus
uuuaaauauuauauaaacau

SEQ ID NO: 4081124 - RNA, 18 nt, Variola virus
uuuaaaucccaauucaga

SEQ ID NO: 4081125 - RNA, 18 nt, Variola virus
uuuaacaaaguuauucau

SEQ ID NO: 4081126 - RNA, 12 nt, Variola virus
uuuaacacuaua

SEQ ID NO: 4081127 - RNA, 16 nt, Variola virus
uuuaaccuauacauga

SEQ ID NO: 4081128 - RNA, 17 nt, Variola virus
uuuaacuagucuucucu

SEQ ID NO: 4081129 - RNA, 23 nt, Variola virus
uuuaacuugcgggguuaaucuca

SEQ ID NO: 4081130 - RNA, 14 nt, Variola virus
uuuaacuuuucauu

SEQ ID NO: 4081131 - RNA, 15 nt, Variola virus
uuuaagauuguacac

SEQ ID NO: 4081132 - RNA, 23 nt, Variola virus
uuuaauauccaaucuuauuacuu

SEQ ID NO: 4081133 - RNA, 13 nt, Variola virus
uuuaauauuucga

SEQ ID NO: 4081134 - RNA, 13 nt, Variola virus
uuuaauuuguuga

SEQ ID NO: 4081135 - RNA, 14 nt, Variola virus
uuuacaaaacuggu

SEQ ID NO: 4081136 - RNA, 19 nt, Variola virus
uuuacaacacuuuucuauu

SEQ ID NO: 4081137 - RNA, 15 nt, Variola virus
uuuacaagauuauua

SEQ ID NO: 4081138 - RNA, 16 nt, Variola virus
uuuacagaucuaguau

SEQ ID NO: 4081139 - RNA, 13 nt, Variola virus
uuuacauuauuua

SEQ ID NO: 4081140 - RNA, 21 nt, Variola virus
uuuaccaugugaugcuaauau

SEQ ID NO: 4081141 - RNA, 17 nt, Variola virus
uuuaccucuucugauau

SEQ ID NO: 4081142 - RNA, 14 nt, Variola virus
uuuacgcuauuaaa

SEQ ID NO: 4081143 - RNA, 22 nt, Variola virus
uuuacuccucuccuuccguaaa

SEQ ID NO: 4081144 - RNA, 18 nt, Variola virus
uuuacuguggcuagauac

SEQ ID NO: 4081145 - RNA, 18 nt, Variola virus
uuuacuuuuucaucuuua

SEQ ID NO: 4081146 - RNA, 16 nt, Variola virus
uuuagaagugauucuu

SEQ ID NO: 4081147 - RNA, 14 nt, Variola virus
uuuagauuuauuuu

SEQ ID NO: 4081148 - RNA, 15 nt, Variola virus
uuuagcaauuucuga

SEQ ID NO: 4081149 - RNA, 13 nt, Variola virus
uuuagcauuucua

SEQ ID NO: 4081150 - RNA, 17 nt, Variola virus
uuuagcguggcuagaau

SEQ ID NO: 4081151 - RNA, 21 nt, Variola virus
uuuaggauucauuagacguag

SEQ ID NO: 4081152 - RNA, 14 nt, Variola virus
uuuaguauaaacag

SEQ ID NO: 4081153 - RNA, 15 nt, Variola virus
uuuaguauuaaacag

SEQ ID NO: 4081154 - RNA, 14 nt, Variola virus
uuuagucgagauau

SEQ ID NO: 4081155 - RNA, 14 nt, Variola virus
uuuaguguagauau

SEQ ID NO: 4081156 - RNA, 14 nt, Variola virus
uuuaguuuaucaaa

SEQ ID NO: 4081157 - RNA, 16 nt, Variola virus
uuuauaaaaaacuuuu

SEQ ID NO: 4081158 - RNA, 12 nt, Variola virus
uuuauacaagau

SEQ ID NO: 4081159 - RNA, 18 nt, Variola virus
uuuauacauauucuaaug

SEQ ID NO: 4081160 - RNA, 15 nt, Variola virus
uuuauacuucuaaug

SEQ ID NO: 4081161 - RNA, 20 nt, Variola virus
uuuauaucacauuguauaua

SEQ ID NO: 4081162 - RNA, 21 nt, Variola virus
uuuauaucauuuguuuuaauu

SEQ ID NO: 4081163 - RNA, 19 nt, Variola virus
uuuauaucugauuuuucuu

SEQ ID NO: 4081164 - RNA, 23 nt, Variola virus
uuuaucagaagauggauggauga

SEQ ID NO: 4081165 - RNA, 16 nt, Variola virus
uuuaucaguauguaua

SEQ ID NO: 4081166 - RNA, 17 nt, Variola virus
uuuauccuauuauguaa

SEQ ID NO: 4081167 - RNA, 15 nt, Variola virus
uuuauuaaguguauu

SEQ ID NO: 4081168 - RNA, 18 nt, Variola virus
uuuauuagcguacacauu

SEQ ID NO: 4081169 - RNA, 15 nt, Variola virus
uuuauuccaaucauu

SEQ ID NO: 4081170 - RNA, 16 nt, Variola virus
uuuauuccacaugagu

SEQ ID NO: 4081171 - RNA, 12 nt, Variola virus
uuuauucucaaa

SEQ ID NO: 4081172 - RNA, 11 nt, Variola virus
uuuauuucuag

SEQ ID NO: 4081173 - RNA, 15 nt, Variola virus
uuucaaaacaaacag

SEQ ID NO: 4081174 - RNA, 11 nt, Variola virus
uuucaaagaug

SEQ ID NO: 4081175 - RNA, 13 nt, Variola virus
uuucaaauaauaa

SEQ ID NO: 4081176 - RNA, 24 nt, Variola virus
uuucaagaucuaauauucuagauu

SEQ ID NO: 4081177 - RNA, 17 nt, Variola virus
uuucaaucucuucuauu

SEQ ID NO: 4081178 - RNA, 16 nt, Variola virus
uuucagaauuuucuaa

SEQ ID NO: 4081179 - RNA, 23 nt, Variola virus
uuucagcaaucuaacauuuuuaa

SEQ ID NO: 4081180 - RNA, 19 nt, Variola virus
uuucagcauggauuucuca

SEQ ID NO: 4081181 - RNA, 16 nt, Variola virus
uuucaucuauaucauu

SEQ ID NO: 4081182 - RNA, 22 nt, Variola virus
uuucaucuuucuccaauacuaa

SEQ ID NO: 4081183 - RNA, 14 nt, Variola virus
uuucauggauguag

SEQ ID NO: 4081184 - RNA, 14 nt, Variola virus
uuucauguucgaaa

SEQ ID NO: 4081185 - RNA, 18 nt, Variola virus
uuuccagacauuguugaa

SEQ ID NO: 4081186 - RNA, 13 nt, Variola virus
uuucccauacuaa

SEQ ID NO: 4081187 - RNA, 17 nt, Variola virus
uuucccauagaacauaa

SEQ ID NO: 4081188 - RNA, 16 nt, Variola virus
uuuccuuuuauugcuu

SEQ ID NO: 4081189 - RNA, 12 nt, Variola virus
uuucgauuucaa

SEQ ID NO: 4081190 - RNA, 16 nt, Variola virus
uuucguacauuuuuaa

SEQ ID NO: 4081191 - RNA, 17 nt, Variola virus
uuucguauaauuuuuaa

SEQ ID NO: 4081192 - RNA, 19 nt, Variola virus
uuucuacccauaaguuauc

SEQ ID NO: 4081193 - RNA, 16 nt, Variola virus
uuucuacuaacuuuuu

SEQ ID NO: 4081194 - RNA, 22 nt, Variola virus
uuucuagaauaaguuucaagau

SEQ ID NO: 4081195 - RNA, 19 nt, Variola virus
uuucucguucccuaucaag

SEQ ID NO: 4081196 - RNA, 21 nt, Variola virus
uuucugguuuucuauaaauaa

SEQ ID NO: 4081197 - RNA, 17 nt, Variola virus
uuucuguaucuaucaac

SEQ ID NO: 4081198 - RNA, 13 nt, Variola virus
uuucuuucgaauu

SEQ ID NO: 4081199 - RNA, 14 nt, Variola virus
uuugaacauguaga

SEQ ID NO: 4081200 - RNA, 16 nt, Variola virus
uuugauacccugauau

SEQ ID NO: 4081201 - RNA, 13 nt, Variola virus
uuugauucgaauu

SEQ ID NO: 4081202 - RNA, 15 nt, Variola virus
uuugauuucuuaucu

SEQ ID NO: 4081203 - RNA, 19 nt, Variola virus
uuugcaauuucuucauagg

SEQ ID NO: 4081204 - RNA, 17 nt, Variola virus
uuuggaaacuucaaaaa

SEQ ID NO: 4081205 - RNA, 23 nt, Variola virus
uuuggagaaaggagaaacuguuu

SEQ ID NO: 4081206 - RNA, 15 nt, Variola virus
uuuggauuuggaaaa

SEQ ID NO: 4081207 - RNA, 22 nt, Variola virus
uuuggcuaaauuauauaauucu

SEQ ID NO: 4081208 - RNA, 19 nt, Variola virus
uuuguaauaaaauuuagca

SEQ ID NO: 4081209 - RNA, 12 nt, Variola virus
uuuguaauuuua

SEQ ID NO: 4081210 - RNA, 13 nt, Variola virus
uuuguacauguaa

SEQ ID NO: 4081211 - RNA, 17 nt, Variola virus
uuuguaccuuuguacau

SEQ ID NO: 4081212 - RNA, 16 nt, Variola virus
uuuguauaacgucuuu

SEQ ID NO: 4081213 - RNA, 20 nt, Variola virus
uuuguccacguucuuuaauu

SEQ ID NO: 4081214 - RNA, 21 nt, Variola virus
uuugucuuugaacaacauuuu

SEQ ID NO: 4081215 - RNA, 14 nt, Variola virus
uuuguggacauuuu

SEQ ID NO: 4081216 - RNA, 22 nt, Variola virus
uuuguguuugacuguuuguacu

SEQ ID NO: 4081217 - RNA, 16 nt, Variola virus
uuuguucuuguagaua

SEQ ID NO: 4081218 - RNA, 15 nt, Variola virus
uuuuaaagguaucua

SEQ ID NO: 4081219 - RNA, 18 nt, Variola virus
uuuuaaauuuuguauuua

SEQ ID NO: 4081220 - RNA, 21 nt, Variola virus
uuuuaacguaucauagaugcc

SEQ ID NO: 4081221 - RNA, 21 nt, Variola virus
uuuuaauauaauacuuaaaaa

SEQ ID NO: 4081222 - RNA, 20 nt, Variola virus
uuuuacagaucuaguauaau

SEQ ID NO: 4081223 - RNA, 11 nt, Variola virus
uuuuauacauu

SEQ ID NO: 4081224 - RNA, 20 nt, Variola virus
uuuuauauccaauguauuua

SEQ ID NO: 4081225 - RNA, 20 nt, Variola virus
uuuuauauguguuugaucua

SEQ ID NO: 4081226 - RNA, 19 nt, Variola virus
uuuuaucaaccauucaaaa

SEQ ID NO: 4081227 - RNA, 11 nt, Variola virus
uuuucacuuua

SEQ ID NO: 4081228 - RNA, 23 nt, Variola virus
uuuucagcuccccuacguaucua

SEQ ID NO: 4081229 - RNA, 22 nt, Variola virus
uuuucaguaccauuaucuuugu

SEQ ID NO: 4081230 - RNA, 14 nt, Variola virus
uuuucguuguuuaa

SEQ ID NO: 4081231 - RNA, 20 nt, Variola virus
uuuucuugagagacaugauu

SEQ ID NO: 4081232 - RNA, 15 nt, Variola virus
uuuucuuuguuggaa

SEQ ID NO: 4081233 - RNA, 14 nt, Variola virus
uuuugguucuucuc

SEQ ID NO: 4081234 - RNA, 13 nt, Variola virus
uuuuuagcaaggu

SEQ ID NO: 4081235 - RNA, 21 nt, Variola virus
uuuuucgcgggauacaucauc

SEQ ID NO: 4081236 - RNA, 17 nt, Variola virus
uuuuucuuucgaauuca

SEQ ID NO: 4081237 - RNA, 16 nt, Variola virus
uuuuugaagauuccca

SEQ ID NO: 4081238 - RNA, 20 nt, Variola virus
uuuuugagccauauuccaca

SEQ ID NO: 4081239 - RNA, 19 nt, Variola virus
uuuuugccaaauuuaucua

SEQ ID NO: 4081240 - RNA, 23 nt, Variola virus
guaaauaguuuuacguuauuaau

SEQ ID NO: 4081241 - RNA, 18 nt, Variola virus
guaaauauucuaaaucaa

SEQ ID NO: 4081242 - RNA, 21 nt, Variola virus
guaaauccugcacuaugucca

SEQ ID NO: 4081243 - RNA, 14 nt, Variola virus
guaaaugaugaaau

SEQ ID NO: 4081244 - RNA, 20 nt, Variola virus
guaacgcguggaaaaagcuc

SEQ ID NO: 4081245 - RNA, 23 nt, Variola virus
guaacuccagaacaucuuccaua

SEQ ID NO: 4081246 - RNA, 23 nt, Variola virus
guaacuucgucguaaagcguuaa

SEQ ID NO: 4081247 - RNA, 17 nt, Variola virus
guaaguuuaaaaaagac

SEQ ID NO: 4081248 - RNA, 17 nt, Variola virus
guaauaacuauguuuua

SEQ ID NO: 4081249 - RNA, 16 nt, Variola virus
guaauaccaaaaugau

SEQ ID NO: 4081250 - RNA, 19 nt, Variola virus
guaauaccaguuauguuca

SEQ ID NO: 4081251 - RNA, 18 nt, Variola virus
guaauaucgaauauuuua

SEQ ID NO: 4081252 - RNA, 22 nt, Variola virus
guaauaucugauuuauuuccua

SEQ ID NO: 4081253 - RNA, 18 nt, Variola virus
guaauauggaauaguguu

SEQ ID NO: 4081254 - RNA, 20 nt, Variola virus
guaauauuguacgauguaau

SEQ ID NO: 4081255 - RNA, 17 nt, Variola virus
guaauuaaguuuggaug

SEQ ID NO: 4081256 - RNA, 13 nt, Variola virus
guaauuacuuauc

SEQ ID NO: 4081257 - RNA, 17 nt, Variola virus
guaauuaguuucugguu

SEQ ID NO: 4081258 - RNA, 23 nt, Variola virus
guaauugacaucuauauauccuu

SEQ ID NO: 4081259 - RNA, 12 nt, Variola virus
guaauuggauuc

SEQ ID NO: 4081260 - RNA, 17 nt, Variola virus
guaauuguauuauuucc

SEQ ID NO: 4081261 - RNA, 18 nt, Variola virus
guaauuuuuguuucaguu

SEQ ID NO: 4081262 - RNA, 18 nt, Variola virus
guaauuuuuuuuuccaaa

SEQ ID NO: 4081263 - RNA, 17 nt, Variola virus
guacaaauguuaaacau

SEQ ID NO: 4081264 - RNA, 14 nt, Variola virus
guacaacauuccaa

SEQ ID NO: 4081265 - RNA, 20 nt, Variola virus
guacaagaaauacuuccauc

SEQ ID NO: 4081266 - RNA, 22 nt, Variola virus
guacacauauggaauauaucua

SEQ ID NO: 4081267 - RNA, 18 nt, Variola virus
guacaccaucaaauuguu

SEQ ID NO: 4081268 - RNA, 18 nt, Variola virus
guacaggacguaacuaua

SEQ ID NO: 4081269 - RNA, 20 nt, Variola virus
guaccagaaggaacauacga

SEQ ID NO: 4081270 - RNA, 22 nt, Variola virus
guaccagcauuuguaauaaucc

SEQ ID NO: 4081271 - RNA, 22 nt, Variola virus
guacuaauaaggaacuagaauu

SEQ ID NO: 4081272 - RNA, 12 nt, Variola virus
guacuacagaua

SEQ ID NO: 4081273 - RNA, 23 nt, Variola virus
guacuguucauacaugaugagau

SEQ ID NO: 4081274 - RNA, 12 nt, Variola virus
guacuuggaaag

SEQ ID NO: 4081275 - RNA, 16 nt, Variola virus
guagaacguaaauuaa

SEQ ID NO: 4081276 - RNA, 19 nt, Variola virus
guagaagaacucuguuucu

SEQ ID NO: 4081277 - RNA, 22 nt, Variola virus
guagaauuguuugagauauguu

SEQ ID NO: 4081278 - RNA, 18 nt, Variola virus
guagacauagauauucua

SEQ ID NO: 4081279 - RNA, 21 nt, Variola virus
guagauaaaaaagauacgcau

SEQ ID NO: 4081280 - RNA, 22 nt, Variola virus
guagauaagaaugugauaagau

SEQ ID NO: 4081281 - RNA, 20 nt, Variola virus
guagcaaagaaauuaauaga

SEQ ID NO: 4081282 - RNA, 15 nt, Variola virus
guagcaaauuuccua

SEQ ID NO: 4081283 - RNA, 16 nt, Variola virus
guaguccuacguuauu

SEQ ID NO: 4081284 - RNA, 13 nt, Variola virus
guauaaaaauuaa

SEQ ID NO: 4081285 - RNA, 19 nt, Variola virus
guauaauagacauaaugac

SEQ ID NO: 4081286 - RNA, 17 nt, Variola virus
guauaauauuuaaacaa

SEQ ID NO: 4081287 - RNA, 11 nt, Variola virus
guauaaucaua

SEQ ID NO: 4081288 - RNA, 24 nt, Variola virus
guauaaugugauuguauguuguua

SEQ ID NO: 4081289 - RNA, 19 nt, Variola virus
guauaauuuuuauguuuua

SEQ ID NO: 4081290 - RNA, 13 nt, Variola virus
guauacauaauau

SEQ ID NO: 4081291 - RNA, 19 nt, Variola virus
guauacucccuugcaucau

SEQ ID NO: 4081292 - RNA, 14 nt, Variola virus
guauacuucaucag

SEQ ID NO: 4081293 - RNA, 17 nt, Variola virus
guauauacauagauaua

SEQ ID NO: 4081294 - RNA, 17 nt, Variola virus
guaucauaucuucgaaa

SEQ ID NO: 4081295 - RNA, 20 nt, Variola virus
guaucauccacauauuuaua

SEQ ID NO: 4081296 - RNA, 19 nt, Variola virus
guauccagguagacauaga

SEQ ID NO: 4081297 - RNA, 22 nt, Variola virus
guauccaguuccuuuucuaguu

SEQ ID NO: 4081298 - RNA, 19 nt, Variola virus
guauccggcaauauuuauu

SEQ ID NO: 4081299 - RNA, 19 nt, Variola virus
guaucgcauuaauacuguu

SEQ ID NO: 4081300 - RNA, 19 nt, Variola virus
guaucucgucuaaauuaga

SEQ ID NO: 4081301 - RNA, 17 nt, Variola virus
guaugaauaaucuucau

SEQ ID NO: 4081302 - RNA, 16 nt, Variola virus
guaugauacaaucaag

SEQ ID NO: 4081303 - RNA, 14 nt, Variola virus
guauuaauaauauc

SEQ ID NO: 4081304 - RNA, 16 nt, Variola virus
guauuauccaauacag

SEQ ID NO: 4081305 - RNA, 15 nt, Variola virus
guauuauuaaaucau

SEQ ID NO: 4081306 - RNA, 14 nt, Variola virus
guauuccuacuuuu

SEQ ID NO: 4081307 - RNA, 14 nt, Variola virus
guauugacaaauau

SEQ ID NO: 4081308 - RNA, 15 nt, Variola virus
guauuggauaaagga

SEQ ID NO: 4081309 - RNA, 16 nt, Variola virus
guauuucauuacccaa

SEQ ID NO: 4081310 - RNA, 20 nt, Variola virus
guauuuuaucucuauucauc

SEQ ID NO: 4081311 - RNA, 15 nt, Variola virus
gucaaaaacugaagu

SEQ ID NO: 4081312 - RNA, 15 nt, Variola virus
gucaaaacauaauac

SEQ ID NO: 4081313 - RNA, 12 nt, Variola virus
gucaauacugua

SEQ ID NO: 4081314 - RNA, 19 nt, Variola virus
gucacugaguuuacagaua

SEQ ID NO: 4081315 - RNA, 12 nt, Variola virus
gucauagauaua

SEQ ID NO: 4081316 - RNA, 14 nt, Variola virus
gucauguuggaaua

SEQ ID NO: 4081317 - RNA, 21 nt, Variola virus
gucauuaaauugugaaucauc

SEQ ID NO: 4081318 - RNA, 13 nt, Variola virus
guccaaaaugaug

SEQ ID NO: 4081319 - RNA, 13 nt, Variola virus
guccaauauuaau

SEQ ID NO: 4081320 - RNA, 17 nt, Variola virus
gucccucauaauaaauu

SEQ ID NO: 4081321 - RNA, 16 nt, Variola virus
gucgagguuuaaagaa

SEQ ID NO: 4081322 - RNA, 13 nt, Variola virus
gucguaugaugaa

SEQ ID NO: 4081323 - RNA, 13 nt, Variola virus
gucgucaaaauau

SEQ ID NO: 4081324 - RNA, 21 nt, Variola virus
gucuaaauccaacuauagaca

SEQ ID NO: 4081325 - RNA, 20 nt, Variola virus
gucuaaguauagaucaaaag

SEQ ID NO: 4081326 - RNA, 17 nt, Variola virus
gucuaauagaacaaaua

SEQ ID NO: 4081327 - RNA, 12 nt, Variola virus
gucuacaucauc

SEQ ID NO: 4081328 - RNA, 22 nt, Variola virus
gucuacauucuugacuguuuua

SEQ ID NO: 4081329 - RNA, 16 nt, Variola virus
gucuaguaaguagaaa

SEQ ID NO: 4081330 - RNA, 15 nt, Variola virus
gucuagucuuaaaug

SEQ ID NO: 4081331 - RNA, 11 nt, Variola virus
gucuaguuuug

SEQ ID NO: 4081332 - RNA, 22 nt, Variola virus
gucuauacaagucgucuaaacg

SEQ ID NO: 4081333 - RNA, 19 nt, Variola virus
gucuauauaugaauaagca

SEQ ID NO: 4081334 - RNA, 14 nt, Variola virus
gucuaugucucuua

SEQ ID NO: 4081335 - RNA, 20 nt, Variola virus
gucucauauaacaacaaaua

SEQ ID NO: 4081336 - RNA, 21 nt, Variola virus
gucucauauaacaacaaauaa

SEQ ID NO: 4081337 - RNA, 18 nt, Variola virus
gucucuggauuauuuuua

SEQ ID NO: 4081338 - RNA, 20 nt, Variola virus
gucuguaacucugauaaucu

SEQ ID NO: 4081339 - RNA, 11 nt, Variola virus
aaaaaaugaua

SEQ ID NO: 4081340 - RNA, 13 nt, Variola virus
aaaaaauuauacu

SEQ ID NO: 4081341 - RNA, 18 nt, Variola virus
aaaaacauaauagcuccc

SEQ ID NO: 4081342 - RNA, 14 nt, Variola virus
aaaaacaugucucu

SEQ ID NO: 4081343 - RNA, 13 nt, Variola virus
aaaaaggaaucua

SEQ ID NO: 4081344 - RNA, 15 nt, Variola virus
aaaaaguuuuaacau

SEQ ID NO: 4081345 - RNA, 17 nt, Variola virus
aaaaauaugggaaucua

SEQ ID NO: 4081346 - RNA, 17 nt, Variola virus
aaaaauccuuaaugaua

SEQ ID NO: 4081347 - RNA, 12 nt, Variola virus
aaaaauggaugu

SEQ ID NO: 4081348 - RNA, 15 nt, Variola virus
aacuauuuuaccguu

SEQ ID NO: 4081349 - RNA, 16 nt, Variola virus
aacucaggaacuauaa

SEQ ID NO: 4081350 - RNA, 20 nt, Variola virus
aacucaguuaacauacagga

SEQ ID NO: 4081351 - RNA, 19 nt, Variola virus
aacucauuuauauauuaaa

SEQ ID NO: 4081352 - RNA, 20 nt, Variola virus
aacuccggauagagaaauau

SEQ ID NO: 4081353 - RNA, 14 nt, Variola virus
aacuccucuagaug

SEQ ID NO: 4081354 - RNA, 15 nt, Variola virus
aacucguaaaaagau

SEQ ID NO: 4081355 - RNA, 23 nt, Variola virus
aacucguuuuucuuaagaaauau

SEQ ID NO: 4081356 - RNA, 23 nt, Variola virus
aacucuaaucaaaaucuuaauau

SEQ ID NO: 4081357 - RNA, 16 nt, Variola virus
aacucucaaaaugcug

SEQ ID NO: 4081358 - RNA, 18 nt, Variola virus
aacucuugcuacaaaaug

SEQ ID NO: 4081359 - RNA, 22 nt, Variola virus
aacugaaucaccuaccuuagau

SEQ ID NO: 4081360 - RNA, 23 nt, Variola virus
aacugcguuguuucaugacaauc

SEQ ID NO: 4081361 - RNA, 14 nt, Variola virus
aacuguauaaaaug

SEQ ID NO: 4081362 - RNA, 17 nt, Variola virus
aacuguguuucagguau

SEQ ID NO: 4081363 - RNA, 21 nt, Variola virus
aacuguucaucguuuagaaua

SEQ ID NO: 4081364 - RNA, 18 nt, Variola virus
aacuuaaaaaaaauaaua

SEQ ID NO: 4081365 - RNA, 21 nt, Variola virus
aacuucaggauuuuuuacagg

SEQ ID NO: 4081366 - RNA, 16 nt, Variola virus
aacuucuagucuagaa

SEQ ID NO: 4081367 - RNA, 14 nt, Variola virus
aacuuuaucaucuu

SEQ ID NO: 4081368 - RNA, 12 nt, Variola virus
aacuuucuagaa

SEQ ID NO: 4081369 - RNA, 14 nt, Variola virus
aacuuuuaaauaca

SEQ ID NO: 4081370 - RNA, 16 nt, Variola virus
aacuuuuagaaauaua

SEQ ID NO: 4081371 - RNA, 12 nt, Variola virus
aacuuuuuggua

SEQ ID NO: 4081372 - RNA, 23 nt, Variola virus
aagaaacugacuugauaaaaaug

SEQ ID NO: 4081373 - RNA, 12 nt, Variola virus
aagaaaugagug

SEQ ID NO: 4081374 - RNA, 12 nt, Variola virus
aagaaauuauuu

SEQ ID NO: 4081375 - RNA, 21 nt, Variola virus
aagaagcuggaugugggagau

SEQ ID NO: 4081376 - RNA, 12 nt, Variola virus
aagaauaaauua

SEQ ID NO: 4081377 - RNA, 19 nt, Variola virus
aagaauaauccagaaugua

SEQ ID NO: 4081378 - RNA, 20 nt, Variola virus
aagaauaauccagaauguac

SEQ ID NO: 4081379 - RNA, 17 nt, Variola virus
aagaauagaggcacuua

SEQ ID NO: 4081380 - RNA, 14 nt, Variola virus
aagaauauagaaau

SEQ ID NO: 4081381 - RNA, 19 nt, Variola virus
aagacaugauaauauuaaa

SEQ ID NO: 4081382 - RNA, 13 nt, Variola virus
aagaccaauaaua

SEQ ID NO: 4081383 - RNA, 17 nt, Variola virus
aagacuaauuuguaaac

SEQ ID NO: 4081384 - RNA, 15 nt, Variola virus
aagacuaugcaaaga

SEQ ID NO: 4081385 - RNA, 15 nt, Variola virus
aagacuuugaaauau

SEQ ID NO: 4081386 - RNA, 13 nt, Variola virus
aagagcaaacauc

SEQ ID NO: 4081387 - RNA, 15 nt, Variola virus
aagagcaaacaucug

SEQ ID NO: 4081388 - RNA, 15 nt, Variola virus
aagauaaaagaauuc

SEQ ID NO: 4081389 - RNA, 14 nt, Variola virus
aagauaaucuucuc

SEQ ID NO: 4081390 - RNA, 19 nt, Variola virus
aagauagcugaaacaaaga

SEQ ID NO: 4081391 - RNA, 12 nt, Variola virus
aagauauaugau

SEQ ID NO: 4081392 - RNA, 19 nt, Variola virus
aagauauaugauucuaaua

SEQ ID NO: 4081393 - RNA, 22 nt, Variola virus
aagauauccagaguuuagauua

SEQ ID NO: 4081394 - RNA, 22 nt, Variola virus
aagauaugggaguaguugaaau

SEQ ID NO: 4081395 - RNA, 13 nt, Variola virus
aagauauucuaaa

SEQ ID NO: 4081396 - RNA, 23 nt, Variola virus
aagaucguuggacauuggauaau

SEQ ID NO: 4081397 - RNA, 23 nt, Variola virus
aagaugcuacagcguuuacuauu

SEQ ID NO: 4081398 - RNA, 14 nt, Variola virus
aagauguuagaaaa

SEQ ID NO: 4081399 - RNA, 19 nt, Variola virus
aagauguuccguuaccguu

SEQ ID NO: 4081400 - RNA, 15 nt, Variola virus
aagauuguagaauca

SEQ ID NO: 4081401 - RNA, 19 nt, Variola virus
aagauugucauguggauua

SEQ ID NO: 4081402 - RNA, 14 nt, Variola virus
aagauuguuuaaga

SEQ ID NO: 4081403 - RNA, 14 nt, Variola virus
aagcaagaaagaua

SEQ ID NO: 4081404 - RNA, 15 nt, Variola virus
aagcccaaaaccaaa

SEQ ID NO: 4081405 - RNA, 17 nt, Variola virus
aagcgaauuacucuguc

SEQ ID NO: 4081406 - RNA, 22 nt, Variola virus
aagcggaacaauaaacaaaaua

SEQ ID NO: 4081407 - RNA, 14 nt, Variola virus
aagcguagaaguug

SEQ ID NO: 4081408 - RNA, 18 nt, Variola virus
aaggacagaaaaauguua

SEQ ID NO: 4081409 - RNA, 15 nt, Variola virus
aaggacagaaauaua

SEQ ID NO: 4081410 - RNA, 18 nt, Variola virus
aaggcaucaaaaaaugua

SEQ ID NO: 4081411 - RNA, 14 nt, Variola virus
aaggcgaacgcuau

SEQ ID NO: 4081412 - RNA, 14 nt, Variola virus
aagggaaaaugcua

SEQ ID NO: 4081413 - RNA, 16 nt, Variola virus
aagguauaaaauacuu

SEQ ID NO: 4081414 - RNA, 11 nt, Variola virus
aagguauauaa

SEQ ID NO: 4081415 - RNA, 20 nt, Variola virus
aaguaaaagauuuauaaugu

SEQ ID NO: 4081416 - RNA, 12 nt, Variola virus
aaguaaacuucg

SEQ ID NO: 4081417 - RNA, 21 nt, Variola virus
aaguaaagaaaagauauccag

SEQ ID NO: 4081418 - RNA, 15 nt, Variola virus
aaguaaauacugaau

SEQ ID NO: 4081419 - RNA, 16 nt, Variola virus
aaguaaguaugucgaa

SEQ ID NO: 4081420 - RNA, 16 nt, Variola virus
aaguaaucaauuuuuc

SEQ ID NO: 4081421 - RNA, 20 nt, Variola virus
aaguaauuauaguauaaugu

SEQ ID NO: 4081422 - RNA, 21 nt, Variola virus
aaguaauuuucuuuguuggaa

SEQ ID NO: 4081423 - RNA, 12 nt, Variola virus
aaguacaaaaua

SEQ ID NO: 4081424 - RNA, 14 nt, Variola virus
aaguacaaaauaua

SEQ ID NO: 4081425 - RNA, 14 nt, Variola virus
aaguacaucaucua

SEQ ID NO: 4081426 - RNA, 16 nt, Variola virus
aaguacaucaucugaa

SEQ ID NO: 4081427 - RNA, 22 nt, Variola virus
aaguacuguucauacaugauga

SEQ ID NO: 4081428 - RNA, 20 nt, Variola virus
aaguagaaauuaucaaaugu

SEQ ID NO: 4081429 - RNA, 23 nt, Variola virus
aaguauaaaaauuaaacaaaacg

SEQ ID NO: 4081430 - RNA, 17 nt, Variola virus
aaguauaacacaaaaua

SEQ ID NO: 4081431 - RNA, 16 nt, Variola virus
aaguauauaaauacuu

SEQ ID NO: 4081432 - RNA, 14 nt, Variola virus
aaguauauguagga

SEQ ID NO: 4081433 - RNA, 16 nt, Variola virus
aaguaucaaaucgaua

SEQ ID NO: 4081434 - RNA, 16 nt, Variola virus
aaguauccaucacuuc

SEQ ID NO: 4081435 - RNA, 18 nt, Variola virus
aaguauccauuuagcaaa

SEQ ID NO: 4081436 - RNA, 23 nt, Variola virus
aaguauccucuacucauuucauu

SEQ ID NO: 4081437 - RNA, 23 nt, Variola virus
aaguaucuacgauuuuuacaaaa

SEQ ID NO: 4081438 - RNA, 17 nt, Variola virus
aaguaugaagaaaaaug

SEQ ID NO: 4081439 - RNA, 13 nt, Variola virus
aaguauuuacauu

SEQ ID NO: 4081440 - RNA, 17 nt, Variola virus
aagucaacguuuacauu

SEQ ID NO: 4081441 - RNA, 20 nt, Variola virus
aagucacaaagcaagaccaa

SEQ ID NO: 4081442 - RNA, 19 nt, Variola virus
aagucacgcgauuuacugg

SEQ ID NO: 4081443 - RNA, 14 nt, Variola virus
aagucauaaaucau

SEQ ID NO: 4081444 - RNA, 18 nt, Variola virus
aagucgacaaccaaacgu

SEQ ID NO: 4081445 - RNA, 16 nt, Variola virus
aagucugucaaaucau

SEQ ID NO: 4081446 - RNA, 23 nt, Variola virus
aagucuuuagucacacaauacua

SEQ ID NO: 4081447 - RNA, 18 nt, Variola virus
aagugcacguuuacauau

SEQ ID NO: 4081448 - RNA, 17 nt, Variola virus
aagugcuuaaauauuuc

SEQ ID NO: 4081449 - RNA, 15 nt, Variola virus
aaguuaaauagaaug

SEQ ID NO: 4081450 - RNA, 18 nt, Variola virus
aaguuaauucagauacua

SEQ ID NO: 4081451 - RNA, 13 nt, Variola virus
aaguuagaaucuc

SEQ ID NO: 4081452 - RNA, 17 nt, Variola virus
aaguuaguuauuuuacg

SEQ ID NO: 4081453 - RNA, 21 nt, Variola virus
aaguuuauacucacaaaacau

SEQ ID NO: 4081454 - RNA, 23 nt, Variola virus
aaguuuauuaguguuuagauaau

SEQ ID NO: 4081455 - RNA, 15 nt, Variola virus
aaguuucguacaaau

SEQ ID NO: 4081456 - RNA, 22 nt, Variola virus
aaguuuuauagagauagaugaa

SEQ ID NO: 4081457 - RNA, 19 nt, Variola virus
aauaaaaguggaagucauu

SEQ ID NO: 4081458 - RNA, 21 nt, Variola virus
aauaaaauucugauuggucaa

SEQ ID NO: 4081459 - RNA, 21 nt, Variola virus
agucaauggagaaauacuuaa

SEQ ID NO: 4081460 - RNA, 22 nt, Variola virus
agucaccaaauuuuacaaaaaa

SEQ ID NO: 4081461 - RNA, 23 nt, Variola virus
agucagcuggucuaaaauuucca

SEQ ID NO: 4081462 - RNA, 17 nt, Variola virus
agucagguccaauauua

SEQ ID NO: 4081463 - RNA, 17 nt, Variola virus
agucauacguaaugaag

SEQ ID NO: 4081464 - RNA, 12 nt, Variola virus
agucauacuaga

SEQ ID NO: 4081465 - RNA, 13 nt, Variola virus
agucauaucuaga

SEQ ID NO: 4081466 - RNA, 19 nt, Variola virus
agucauaucuagaaugaag

SEQ ID NO: 4081467 - RNA, 20 nt, Variola virus
agucauaucuagaaugaaga

SEQ ID NO: 4081468 - RNA, 18 nt, Variola virus
agucauuaacgaacaaua

SEQ ID NO: 4081469 - RNA, 21 nt, Variola virus
agucauuccaucauuuaagaa

SEQ ID NO: 4081470 - RNA, 16 nt, Variola virus
agucgaaacauauucu

SEQ ID NO: 4081471 - RNA, 13 nt, Variola virus
agucgcuauuuuu

SEQ ID NO: 4081472 - RNA, 17 nt, Variola virus
agucuaccgaucucuuu

SEQ ID NO: 4081473 - RNA, 16 nt, Variola virus
agucuauaugaucaaa

SEQ ID NO: 4081474 - RNA, 13 nt, Variola virus
agucucaaaauua

SEQ ID NO: 4081475 - RNA, 15 nt, Variola virus
agucucaaaauuaua

SEQ ID NO: 4081476 - RNA, 16 nt, Variola virus
agucucaguuaacuga

SEQ ID NO: 4081477 - RNA, 19 nt, Variola virus
agucuccgccguucuaaug

SEQ ID NO: 4081478 - RNA, 13 nt, Variola virus
agucugucaaauc

SEQ ID NO: 4081479 - RNA, 18 nt, Variola virus
agucugucaaaucaucuu

SEQ ID NO: 4081480 - RNA, 14 nt, Variola virus
agucuuaaugauac

SEQ ID NO: 4081481 - RNA, 22 nt, Variola virus
agucuuggacuaauuauacuuu

SEQ ID NO: 4081482 - RNA, 16 nt, Variola virus
agucuuggucuauuau

SEQ ID NO: 4081483 - RNA, 14 nt, Variola virus
agucuuucuccaua

SEQ ID NO: 4081484 - RNA, 13 nt, Variola virus
agugaaacaaaau

SEQ ID NO: 4081485 - RNA, 17 nt, Variola virus
agugaaucgacuauaga

SEQ ID NO: 4081486 - RNA, 15 nt, Variola virus
agugacaaaaugcua

SEQ ID NO: 4081487 - RNA, 19 nt, Variola virus
agugacacucuauaucuag

SEQ ID NO: 4081488 - RNA, 16 nt, Variola virus
agugacagauauacaa

SEQ ID NO: 4081489 - RNA, 18 nt, Variola virus
agugacuuuguagcucuc

SEQ ID NO: 4081490 - RNA, 18 nt, Variola virus
agugauauugauaucuuu

SEQ ID NO: 4081491 - RNA, 16 nt, Variola virus
agugauucaaaaggac

SEQ ID NO: 4081492 - RNA, 20 nt, Variola virus
agugcagauaaucauuuaau

SEQ ID NO: 4081493 - RNA, 21 nt, Variola virus
agugcgguuuuaccuauuuua

SEQ ID NO: 4081494 - RNA, 14 nt, Variola virus
agugcuuguaugug

SEQ ID NO: 4081495 - RNA, 15 nt, Variola virus
aguggaauugaaaau

SEQ ID NO: 4081496 - RNA, 14 nt, Variola virus
aguggaguaauuua

SEQ ID NO: 4081497 - RNA, 20 nt, Variola virus
aguggauuaucucaaagaau

SEQ ID NO: 4081498 - RNA, 17 nt, Variola virus
agugggcuuacauguau

SEQ ID NO: 4081499 - RNA, 22 nt, Variola virus
agugguaggucauacuccauca

SEQ ID NO: 4081500 - RNA, 23 nt, Variola virus
agugguaggucauacuccaucaa

SEQ ID NO: 4081501 - RNA, 17 nt, Variola virus
aguguaccaauaugcga

SEQ ID NO: 4081502 - RNA, 20 nt, Variola virus
aguguauaacaaucuuauau

SEQ ID NO: 4081503 - RNA, 20 nt, Variola virus
aguguauaacggaaaugaua

SEQ ID NO: 4081504 - RNA, 16 nt, Variola virus
agugucuauaaaugua

SEQ ID NO: 4081505 - RNA, 22 nt, Variola virus
agugugagaaaaaauaucuugu

SEQ ID NO: 4081506 - RNA, 12 nt, Variola virus
aguuaaaacuug

SEQ ID NO: 4081507 - RNA, 18 nt, Variola virus
aguuaaaacuuuaucauc

SEQ ID NO: 4081508 - RNA, 18 nt, Variola virus
aguuaagagaauaauaga

SEQ ID NO: 4081509 - RNA, 16 nt, Variola virus
aguuaaggauaauaag

SEQ ID NO: 4081510 - RNA, 18 nt, Variola virus
aguuaaguuuuuuaagaa

SEQ ID NO: 4081511 - RNA, 15 nt, Variola virus
aguuaauauauuuaa

SEQ ID NO: 4081512 - RNA, 17 nt, Variola virus
aguuaauauuauugggu

SEQ ID NO: 4081513 - RNA, 17 nt, Variola virus
aguuaaucaauuuagau

SEQ ID NO: 4081514 - RNA, 23 nt, Variola virus
aguuaucgcugaucgucuagaug

SEQ ID NO: 4081515 - RNA, 19 nt, Variola virus
aguucauuguuuucaauau

SEQ ID NO: 4081516 - RNA, 17 nt, Variola virus
aguucugcauucaauuc

SEQ ID NO: 4081517 - RNA, 17 nt, Variola virus
aguucuuuuaugucaag

SEQ ID NO: 4081518 - RNA, 14 nt, Variola virus
aguugauuguaaac

SEQ ID NO: 4081519 - RNA, 14 nt, Variola virus
aguuguaucaucua

SEQ ID NO: 4081520 - RNA, 21 nt, Variola virus
aguuguuccaauaaauuauuu

SEQ ID NO: 4081521 - RNA, 19 nt, Variola virus
aguuuaaacugaaaaugac

SEQ ID NO: 4081522 - RNA, 18 nt, Variola virus
aguuuauaauaacaagua

SEQ ID NO: 4081523 - RNA, 19 nt, Variola virus
aguuuaucguuuacauaag

SEQ ID NO: 4081524 - RNA, 19 nt, Variola virus
aguuucaucaauaaaggau

SEQ ID NO: 4081525 - RNA, 21 nt, Variola virus
aguuucucaugucucuauaua

SEQ ID NO: 4081526 - RNA, 19 nt, Variola virus
aguuucugccauuuaucca

SEQ ID NO: 4081527 - RNA, 16 nt, Variola virus
aguuuguuuucauuau

SEQ ID NO: 4081528 - RNA, 23 nt, Variola virus
aguuuucccuaccaguuuauccc

SEQ ID NO: 4081529 - RNA, 22 nt, Variola virus
aguuuucuuucaaaauagcuau

SEQ ID NO: 4081530 - RNA, 18 nt, Variola virus
aguuuuggaucaaaugga

SEQ ID NO: 4081531 - RNA, 14 nt, Variola virus
aguuuuuaacuagu

SEQ ID NO: 4081532 - RNA, 12 nt, Variola virus
aguuuuuaagag

SEQ ID NO: 4081533 - RNA, 20 nt, Variola virus
auaaaaacaauacaguauau

SEQ ID NO: 4081534 - RNA, 12 nt, Variola virus
auaaaaaguaau

SEQ ID NO: 4081535 - RNA, 14 nt, Variola virus
auaaaaauaauauu

SEQ ID NO: 4081536 - RNA, 12 nt, Variola virus
auaaaaauaugg

SEQ ID NO: 4081537 - RNA, 16 nt, Variola virus
auaaaaauuauguuuu

SEQ ID NO: 4081538 - RNA, 13 nt, Variola virus
auaaaacauucuc

SEQ ID NO: 4081539 - RNA, 19 nt, Variola virus
auaaaacuauaaauaugca

SEQ ID NO: 4081540 - RNA, 16 nt, Variola virus
auaaaaucaaaauuac

SEQ ID NO: 4081541 - RNA, 17 nt, Variola virus
auaaaauguuaauacau

SEQ ID NO: 4081542 - RNA, 14 nt, Variola virus
auaaaauuauucac

SEQ ID NO: 4081543 - RNA, 19 nt, Variola virus
auaaaauucuuaguuauau

SEQ ID NO: 4081544 - RNA, 22 nt, Variola virus
auaaacaacuaaaaugugguau

SEQ ID NO: 4081545 - RNA, 14 nt, Variola virus
auaaacauaauaaa

SEQ ID NO: 4081546 - RNA, 17 nt, Variola virus
auaaacauuguuuguau

SEQ ID NO: 4081547 - RNA, 20 nt, Variola virus
auaaacauuuguguuuguau

SEQ ID NO: 4081548 - RNA, 21 nt, Variola virus
auaaaccaaaagcuuucuagu

SEQ ID NO: 4081549 - RNA, 22 nt, Variola virus
auaaaccauccauucauauaca

SEQ ID NO: 4081550 - RNA, 17 nt, Variola virus
auaaaccgcuauugaaa

SEQ ID NO: 4081551 - RNA, 17 nt, Variola virus
auaaacgcgucugcuaa

SEQ ID NO: 4081552 - RNA, 18 nt, Variola virus
auaaacggguguaaacaa

SEQ ID NO: 4081553 - RNA, 22 nt, Variola virus
auaaacguucacguaaauacaa

SEQ ID NO: 4081554 - RNA, 18 nt, Variola virus
auaaacuaacauuguuaa

SEQ ID NO: 4081555 - RNA, 23 nt, Variola virus
auaaacuacucgaacagauaguu

SEQ ID NO: 4081556 - RNA, 18 nt, Variola virus
auaaacuaucaguaaguu

SEQ ID NO: 4081557 - RNA, 14 nt, Variola virus
auaaagaaugaaug

SEQ ID NO: 4081558 - RNA, 14 nt, Variola virus
auaaagaugauaua

SEQ ID NO: 4081559 - RNA, 21 nt, Variola virus
auaaaggagaaggaaaaugaa

SEQ ID NO: 4081560 - RNA, 18 nt, Variola virus
auaaaggauacguuguau

SEQ ID NO: 4081561 - RNA, 16 nt, Variola virus
auacugauaaaguaga

SEQ ID NO: 4081562 - RNA, 17 nt, Variola virus
auacuguguaaagaaau

SEQ ID NO: 4081563 - RNA, 23 nt, Variola virus
auacuuaaaaauggauguugugu

SEQ ID NO: 4081564 - RNA, 22 nt, Variola virus
auacuugauaagauaaaaucua

SEQ ID NO: 4081565 - RNA, 18 nt, Variola virus
auacuugucaucauuucu

SEQ ID NO: 4081566 - RNA, 21 nt, Variola virus
auacuuugcccuuuaauacau

SEQ ID NO: 4081567 - RNA, 20 nt, Variola virus
auacuuuguccguaaaacau

SEQ ID NO: 4081568 - RNA, 17 nt, Variola virus
auacuuuucuaauucua

SEQ ID NO: 4081569 - RNA, 15 nt, Variola virus
auagaaacuauagau

SEQ ID NO: 4081570 - RNA, 19 nt, Variola virus
auagaaauaaaaauuauua

SEQ ID NO: 4081571 - RNA, 12 nt, Variola virus
auagaagauuac

SEQ ID NO: 4081572 - RNA, 19 nt, Variola virus
auagaagguuuauauaaca

SEQ ID NO: 4081573 - RNA, 20 nt, Variola virus
auagaauaaauauccuugga

SEQ ID NO: 4081574 - RNA, 19 nt, Variola virus
auagacaaugcuaauauau

SEQ ID NO: 4081575 - RNA, 14 nt, Variola virus
auagacuaguguau

SEQ ID NO: 4081576 - RNA, 14 nt, Variola virus
auagagaacauaau

SEQ ID NO: 4081577 - RNA, 13 nt, Variola virus
auagauauacaau

SEQ ID NO: 4081578 - RNA, 18 nt, Variola virus
auagauauaccagaacua

SEQ ID NO: 4081579 - RNA, 19 nt, Variola virus
auagauccgugagaaauac

SEQ ID NO: 4081580 - RNA, 15 nt, Variola virus
auagaugaaauacuc

SEQ ID NO: 4081581 - RNA, 16 nt, Variola virus
auagauggaguaagua

SEQ ID NO: 4081582 - RNA, 18 nt, Variola virus
auagauuguuuucaguaa

SEQ ID NO: 4081583 - RNA, 18 nt, Variola virus
auagauuuacucugaaaa

SEQ ID NO: 4081584 - RNA, 14 nt, Variola virus
auagcacaaaugug

SEQ ID NO: 4081585 - RNA, 22 nt, Variola virus
auagcauagauauagaaacgga

SEQ ID NO: 4081586 - RNA, 21 nt, Variola virus
auagcugaaacaaagaauugc

SEQ ID NO: 4081587 - RNA, 19 nt, Variola virus
auagcuuucacucauauaa

SEQ ID NO: 4081588 - RNA, 19 nt, Variola virus
auaggaucuauaauaaugu

SEQ ID NO: 4081589 - RNA, 15 nt, Variola virus
auaguaaaaaauaua

SEQ ID NO: 4081590 - RNA, 13 nt, Variola virus
auaguaaaaucua

SEQ ID NO: 4081591 - RNA, 19 nt, Variola virus
agaugugauggaaaaauga

SEQ ID NO: 4081592 - RNA, 17 nt, Variola virus
agaugugucauacuugu

SEQ ID NO: 4081593 - RNA, 13 nt, Variola virus
agauguuaaauga

SEQ ID NO: 4081594 - RNA, 18 nt, Variola virus
agauuaaaucauuaaaug

SEQ ID NO: 4081595 - RNA, 19 nt, Variola virus
agauuaauuuugaauuugu

SEQ ID NO: 4081596 - RNA, 18 nt, Variola virus
agauuaccuauucacuua

SEQ ID NO: 4081597 - RNA, 24 nt, Variola virus
agauuaucuagucagaacuaucau

SEQ ID NO: 4081598 - RNA, 20 nt, Variola virus
agauuauugucuuauauucu

SEQ ID NO: 4081599 - RNA, 22 nt, Variola virus
agauucgcauuucuauacuugu

SEQ ID NO: 4081600 - RNA, 22 nt, Variola virus
agauucucauuugauaaaaauu

SEQ ID NO: 4081601 - RNA, 13 nt, Variola virus
agauugaaauuau

SEQ ID NO: 4081602 - RNA, 22 nt, Variola virus
agauuggccagaaucaugguau

SEQ ID NO: 4081603 - RNA, 14 nt, Variola virus
agauuuuaauguau

SEQ ID NO: 4081604 - RNA, 17 nt, Variola virus
agauuuuaguccugugu

SEQ ID NO: 4081605 - RNA, 23 nt, Variola virus
agauuuuccauccacaauuauug

SEQ ID NO: 4081606 - RNA, 21 nt, Variola virus
agcaaaaaaugauagaaauau

SEQ ID NO: 4081607 - RNA, 12 nt, Variola virus
agcaaaaacaaa

SEQ ID NO: 4081608 - RNA, 18 nt, Variola virus
agcaaaaacaaaaaacuu

SEQ ID NO: 4081609 - RNA, 18 nt, Variola virus
agcaacggggaugaugau

SEQ ID NO: 4081610 - RNA, 21 nt, Variola virus
agcaagacuaacacacaaugu

SEQ ID NO: 4081611 - RNA, 20 nt, Variola virus
agcaaugaucuaaauuauau

SEQ ID NO: 4081612 - RNA, 14 nt, Variola virus
agcaauucauguac

SEQ ID NO: 4081613 - RNA, 12 nt, Variola virus
agcacaaaauaa

SEQ ID NO: 4081614 - RNA, 16 nt, Variola virus
agcaguuuauuaucca

SEQ ID NO: 4081615 - RNA, 13 nt, Variola virus
agcauaaaugcua

SEQ ID NO: 4081616 - RNA, 21 nt, Variola virus
agcauacgccaaauaucucaa

SEQ ID NO: 4081617 - RNA, 22 nt, Variola virus
agcauacgccaaauaucucaaa

SEQ ID NO: 4081618 - RNA, 18 nt, Variola virus
agcauauucuuaauauua

SEQ ID NO: 4081619 - RNA, 20 nt, Variola virus
agcauauuguaauaucuuaa

SEQ ID NO: 4081620 - RNA, 17 nt, Variola virus
agcaucuucuucauuau

SEQ ID NO: 4081621 - RNA, 19 nt, Variola virus
agcauugaaaauacguucu

SEQ ID NO: 4081622 - RNA, 22 nt, Variola virus
agccaacaaauauaaaaugaua

SEQ ID NO: 4081623 - RNA, 16 nt, Variola virus
agccaaguaucuuguc

SEQ ID NO: 4081624 - RNA, 22 nt, Variola virus
agccaauagaaauaucauuaag

SEQ ID NO: 4081625 - RNA, 22 nt, Variola virus
agccaguagauccaguuauuaa

SEQ ID NO: 4081626 - RNA, 18 nt, Variola virus
agccaugaaacgaacacu

SEQ ID NO: 4081627 - RNA, 15 nt, Variola virus
agccggacaaauaua

SEQ ID NO: 4081628 - RNA, 20 nt, Variola virus
agccugaagcucaucuuguu

SEQ ID NO: 4081629 - RNA, 17 nt, Variola virus
agccuuuugauaaaucu

SEQ ID NO: 4081630 - RNA, 12 nt, Variola virus
agcgaauuauuu

SEQ ID NO: 4081631 - RNA, 21 nt, Variola virus
agcgucuagucuuaaauggag

SEQ ID NO: 4081632 - RNA, 15 nt, Variola virus
agcuauauagaugac

SEQ ID NO: 4081633 - RNA, 22 nt, Variola virus
agcuaugaacuuguuuaaugau

SEQ ID NO: 4081634 - RNA, 21 nt, Variola virus
agcuaugcgauuggauaagaa

SEQ ID NO: 4081635 - RNA, 14 nt, Variola virus
agcuauguuaucau

SEQ ID NO: 4081636 - RNA, 21 nt, Variola virus
agcuauguuaucaugaaaugu

SEQ ID NO: 4081637 - RNA, 15 nt, Variola virus
agcucaauauaaaug

SEQ ID NO: 4081638 - RNA, 17 nt, Variola virus
agcuccguauuccaaac

SEQ ID NO: 4081639 - RNA, 19 nt, Variola virus
agcugucguucaagaucag

SEQ ID NO: 4081640 - RNA, 17 nt, Variola virus
agcuuacaauaaacucc

SEQ ID NO: 4081641 - RNA, 14 nt, Variola virus
aggaaaaaaacaac

SEQ ID NO: 4081642 - RNA, 17 nt, Variola virus
aggaaacuuaaaauaua

SEQ ID NO: 4081643 - RNA, 22 nt, Variola virus
aggaaauaucaucacaacuuaa

SEQ ID NO: 4081644 - RNA, 18 nt, Variola virus
aggaaauugauaaugagu

SEQ ID NO: 4081645 - RNA, 16 nt, Variola virus
aggaaguauaucugag

SEQ ID NO: 4081646 - RNA, 19 nt, Variola virus
aggaauacaauacauaccu

SEQ ID NO: 4081647 - RNA, 13 nt, Variola virus
aggaauauaacgu

SEQ ID NO: 4081648 - RNA, 16 nt, Variola virus
aggaaucguuuauccg

SEQ ID NO: 4081649 - RNA, 13 nt, Variola virus
aggaaucuaucca

SEQ ID NO: 4081650 - RNA, 11 nt, Variola virus
aggacauguaa

SEQ ID NO: 4081651 - RNA, 15 nt, Variola virus
aggacguaacuauaa

SEQ ID NO: 4081652 - RNA, 13 nt, Variola virus
aggagaaguaaua

SEQ ID NO: 4081653 - RNA, 14 nt, Variola virus
aggagauauugaaa

SEQ ID NO: 4081654 - RNA, 17 nt, Variola virus
aggagauuaaaggauaa

SEQ ID NO: 4081655 - RNA, 16 nt, Variola virus
aggauacugaucuucu

SEQ ID NO: 4081656 - RNA, 22 nt, Variola virus
aggauaugauaaaaauauaauu

SEQ ID NO: 4081657 - RNA, 20 nt, Variola virus
aggauucguuuacucucaga

SEQ ID NO: 4081658 - RNA, 20 nt, Variola virus
aggcaauaagucuuucucca

SEQ ID NO: 4081659 - RNA, 17 nt, Variola virus
aggcacauaauaucuuu

SEQ ID NO: 4081660 - RNA, 18 nt, Variola virus
aggccaagcgaauuauuu

SEQ ID NO: 4081661 - RNA, 21 nt, Variola virus
aggccgcucguggauacuuau

SEQ ID NO: 4081662 - RNA, 15 nt, Variola virus
aggcgcccauuucaa

SEQ ID NO: 4081663 - RNA, 14 nt, Variola virus
aggcgucaaaauua

SEQ ID NO: 4081664 - RNA, 16 nt, Variola virus
aggcuguagucuuggu

SEQ ID NO: 4081665 - RNA, 13 nt, Variola virus
agggaaauuuaau

SEQ ID NO: 4081666 - RNA, 18 nt, Variola virus
agggagccacagaaggau

SEQ ID NO: 4081667 - RNA, 16 nt, Variola virus
aggggagguaaauaua

SEQ ID NO: 4081668 - RNA, 23 nt, Variola virus
agggucaaacuuaauaaaggaua

SEQ ID NO: 4081669 - RNA, 19 nt, Variola virus
agggugaguuaauaugcau

SEQ ID NO: 4081670 - RNA, 17 nt, Variola virus
agguaacauaaaaacug

SEQ ID NO: 4081671 - RNA, 20 nt, Variola virus
agguaagauaucuacuagaa

SEQ ID NO: 4081672 - RNA, 15 nt, Variola virus
agguacaauaccuuu

SEQ ID NO: 4081673 - RNA, 14 nt, Variola virus
agguacuaggaaaa

SEQ ID NO: 4081674 - RNA, 20 nt, Variola virus
agguacuauaauauuaaaaa

SEQ ID NO: 4081675 - RNA, 15 nt, Variola virus
agguagcaaaaaaac

SEQ ID NO: 4081676 - RNA, 13 nt, Variola virus
agguauuuauuca

SEQ ID NO: 4081677 - RNA, 22 nt, Variola virus
aggucgccauacgucaaauuua

SEQ ID NO: 4081678 - RNA, 23 nt, Variola virus
agguggauucaguacaauguuau

SEQ ID NO: 4081679 - RNA, 17 nt, Variola virus
aggugucccgucaguau

SEQ ID NO: 4081680 - RNA, 21 nt, Variola virus
agguuaaaccuuuauaaacuu

SEQ ID NO: 4081681 - RNA, 17 nt, Variola virus
agguucauuguuaucca

SEQ ID NO: 4081682 - RNA, 15 nt, Variola virus
agguuuaguaucuca

SEQ ID NO: 4081683 - RNA, 14 nt, Variola virus
aguaaaaagacuaa

SEQ ID NO: 4081684 - RNA, 21 nt, Variola virus
aguaaacucgucgacaaagua

SEQ ID NO: 4081685 - RNA, 15 nt, Variola virus
aguaaagaaaagaua

SEQ ID NO: 4081686 - RNA, 19 nt, Variola virus
aguaaagauuucaaagaug

SEQ ID NO: 4081687 - RNA, 20 nt, Variola virus
aguaaagauuucaaagaugu

SEQ ID NO: 4081688 - RNA, 12 nt, Variola virus
aguaaauacaau

SEQ ID NO: 4081689 - RNA, 21 nt, Variola virus
aguaacggacuuaacaugaga

SEQ ID NO: 4081690 - RNA, 14 nt, Variola virus
aguaacuauguaaa

SEQ ID NO: 4081691 - RNA, 16 nt, Variola virus
aguaagaguuaugaau

SEQ ID NO: 4081692 - RNA, 21 nt, Variola virus
aguaaguacaucaucuagaga

SEQ ID NO: 4081693 - RNA, 20 nt, Variola virus
aguaaguaucuauaaaacuc

SEQ ID NO: 4081694 - RNA, 23 nt, Variola virus
aguaaguaucuauaaaacucaua

SEQ ID NO: 4081695 - RNA, 17 nt, Variola virus
aguaauaccaaaaugau

SEQ ID NO: 4081696 - RNA, 17 nt, Variola virus
aguaauaucaugucuaa

SEQ ID NO: 4081697 - RNA, 13 nt, Variola virus
aguaauaucugau

SEQ ID NO: 4081698 - RNA, 16 nt, Variola virus
aguaaucauguaaaug

SEQ ID NO: 4081699 - RNA, 14 nt, Variola virus
aguaaugauugcau

SEQ ID NO: 4081700 - RNA, 18 nt, Variola virus
aguaauuaaauauaucau

SEQ ID NO: 4081701 - RNA, 19 nt, Variola virus
aguaauuauaagaaauaua

SEQ ID NO: 4081702 - RNA, 14 nt, Variola virus
aguacagaauuuuc

SEQ ID NO: 4081703 - RNA, 17 nt, Variola virus
aguacaucaucuagaga

SEQ ID NO: 4081704 - RNA, 13 nt, Variola virus
aguacggauuaaa

SEQ ID NO: 4081705 - RNA, 20 nt, Variola virus
aguacuaauaaggaacuaga

SEQ ID NO: 4081706 - RNA, 16 nt, Variola virus
aguacuguuaagaaaa

SEQ ID NO: 4081707 - RNA, 22 nt, Variola virus
aguacuguucauacaugaugag

SEQ ID NO: 4081708 - RNA, 14 nt, Variola virus
aguacuuucacaag

SEQ ID NO: 4081709 - RNA, 19 nt, Variola virus
aguagaaaauaauauagau

SEQ ID NO: 4081710 - RNA, 14 nt, Variola virus
aguagaauaauaga

SEQ ID NO: 4081711 - RNA, 18 nt, Variola virus
aguagacauuuuuaacau

SEQ ID NO: 4081712 - RNA, 16 nt, Variola virus
aguagcaaauuuccua

SEQ ID NO: 4081713 - RNA, 13 nt, Variola virus
aguaguucauuau

SEQ ID NO: 4081714 - RNA, 17 nt, Variola virus
aguauagaucaaaagaa

SEQ ID NO: 4081715 - RNA, 16 nt, Variola virus
aguauaucuacuauau

SEQ ID NO: 4081716 - RNA, 21 nt, Variola virus
aguauccacaaauaguaaaug

SEQ ID NO: 4081717 - RNA, 19 nt, Variola virus
aaauguguggauuuuggug

SEQ ID NO: 4081718 - RNA, 15 nt, Variola virus
aaauguugucauuau

SEQ ID NO: 4081719 - RNA, 23 nt, Variola virus
aaauuaaaaaauaacuuaauuua

SEQ ID NO: 4081720 - RNA, 19 nt, Variola virus
aaauuaaaggagcauguau

SEQ ID NO: 4081721 - RNA, 22 nt, Variola virus
aaauuaauuuaccaucguguau

SEQ ID NO: 4081722 - RNA, 21 nt, Variola virus
aaauuacgagccaaaucuucu

SEQ ID NO: 4081723 - RNA, 23 nt, Variola virus
aaauuagagcucaucuaagaaau

SEQ ID NO: 4081724 - RNA, 15 nt, Variola virus
aaauuagaucaaaga

SEQ ID NO: 4081725 - RNA, 15 nt, Variola virus
aaauuauaaugaaua

SEQ ID NO: 4081726 - RNA, 14 nt, Variola virus
aaauuauccuauca

SEQ ID NO: 4081727 - RNA, 19 nt, Variola virus
aaauuauccuaucauguau

SEQ ID NO: 4081728 - RNA, 18 nt, Variola virus
aaauuaugaaaaaaagau

SEQ ID NO: 4081729 - RNA, 20 nt, Variola virus
aaauuauuccuaauuaagaa

SEQ ID NO: 4081730 - RNA, 19 nt, Variola virus
aaauucaguugcuggaauu

SEQ ID NO: 4081731 - RNA, 18 nt, Variola virus
aaauucuaggcucaguau

SEQ ID NO: 4081732 - RNA, 16 nt, Variola virus
aaauugguacauagau

SEQ ID NO: 4081733 - RNA, 14 nt, Variola virus
aaauugguucuuua

SEQ ID NO: 4081734 - RNA, 15 nt, Variola virus
aaauuuaaaaugagu

SEQ ID NO: 4081735 - RNA, 19 nt, Variola virus
aaauuucuagugcuuguau

SEQ ID NO: 4081736 - RNA, 17 nt, Variola virus
aaauuugaaagaacuac

SEQ ID NO: 4081737 - RNA, 16 nt, Variola virus
aaauuuuaaaaaaugg

SEQ ID NO: 4081738 - RNA, 21 nt, Variola virus
aaauuuuacaaaucuauaaca

SEQ ID NO: 4081739 - RNA, 17 nt, Variola virus
aaauuuuuugaaguaau

SEQ ID NO: 4081740 - RNA, 23 nt, Variola virus
aacaaaaucuaacagauacaaau

SEQ ID NO: 4081741 - RNA, 23 nt, Variola virus
aacaaacagacuauucuuuauua

SEQ ID NO: 4081742 - RNA, 23 nt, Variola virus
aacaaacuauuuaucagaacacu

SEQ ID NO: 4081743 - RNA, 16 nt, Variola virus
aacaaauauuggcaua

SEQ ID NO: 4081744 - RNA, 21 nt, Variola virus
aacaaauucuuuguugaacgu

SEQ ID NO: 4081745 - RNA, 23 nt, Variola virus
aacaacgaccgauaauaaaauua

SEQ ID NO: 4081746 - RNA, 20 nt, Variola virus
aacaagagaagagauuucaa

SEQ ID NO: 4081747 - RNA, 18 nt, Variola virus
aacaagagcagauaucua

SEQ ID NO: 4081748 - RNA, 19 nt, Variola virus
aacaagaucgauagacacu

SEQ ID NO: 4081749 - RNA, 21 nt, Variola virus
aacaaguaugacauuguaaaa

SEQ ID NO: 4081750 - RNA, 22 nt, Variola virus
aacaauacaguauauaacuauu

SEQ ID NO: 4081751 - RNA, 20 nt, Variola virus
aacaauaguuauuacuuuuc

SEQ ID NO: 4081752 - RNA, 13 nt, Variola virus
aacaaucuagaca

SEQ ID NO: 4081753 - RNA, 16 nt, Variola virus
aacaauguauacaaau

SEQ ID NO: 4081754 - RNA, 11 nt, Variola virus
aacaauguuuc

SEQ ID NO: 4081755 - RNA, 16 nt, Variola virus
aacaauuccacaaauu

SEQ ID NO: 4081756 - RNA, 11 nt, Variola virus
aacacaaauau

SEQ ID NO: 4081757 - RNA, 19 nt, Variola virus
aacacaagucuaauaaugu

SEQ ID NO: 4081758 - RNA, 20 nt, Variola virus
aacacacuaaacaguuuauu

SEQ ID NO: 4081759 - RNA, 21 nt, Variola virus
aacacccauuuauuguacaaa

SEQ ID NO: 4081760 - RNA, 16 nt, Variola virus
aacacuacaacagaua

SEQ ID NO: 4081761 - RNA, 17 nt, Variola virus
aacacugauucagaaau

SEQ ID NO: 4081762 - RNA, 13 nt, Variola virus
aacagaaaaaaca

SEQ ID NO: 4081763 - RNA, 17 nt, Variola virus
aacagaaaaaacaaugu

SEQ ID NO: 4081764 - RNA, 18 nt, Variola virus
aacagaaaacaaagucua

SEQ ID NO: 4081765 - RNA, 15 nt, Variola virus
auagacgguuccaaa

SEQ ID NO: 4081766 - RNA, 18 nt, Variola virus
auauucucuauuaaauac

SEQ ID NO: 4081767 - RNA, 21 nt, Variola virus
auauucugccguguuuaaaaa

SEQ ID NO: 4081768 - RNA, 17 nt, Variola virus
caggauacuaugcuauu

SEQ ID NO: 4081769 - RNA, 19 nt, Variola virus
caggaucuccaacaaauuu

SEQ ID NO: 4081770 - RNA, 22 nt, Variola virus
caggcaaauguuuauaguauua

SEQ ID NO: 4081771 - RNA, 15 nt, Variola virus
cagggagccacagaa

SEQ ID NO: 4081772 - RNA, 19 nt, Variola virus
cagguaaaaguacagaauu

SEQ ID NO: 4081773 - RNA, 20 nt, Variola virus
cagguaugauagcuccacca

SEQ ID NO: 4081774 - RNA, 19 nt, Variola virus
caggugcugauguaaaugg

SEQ ID NO: 4081775 - RNA, 19 nt, Variola virus
caguaaaaauaacuagaau

SEQ ID NO: 4081776 - RNA, 21 nt, Variola virus
caguaauagcuccauaaacug

SEQ ID NO: 4081777 - RNA, 14 nt, Variola virus
caguaauuaaugag

SEQ ID NO: 4081778 - RNA, 14 nt, Variola virus
caguaguucauuau

SEQ ID NO: 4081779 - RNA, 14 nt, Variola virus
caguauaaugauuu

SEQ ID NO: 4081780 - RNA, 16 nt, Variola virus
cagucaaauucgguaa

SEQ ID NO: 4081781 - RNA, 14 nt, Variola virus
cagucacagacacu

SEQ ID NO: 4081782 - RNA, 15 nt, Variola virus
cagucauuccaucau

SEQ ID NO: 4081783 - RNA, 18 nt, Variola virus
caguccgguucuuaauau

SEQ ID NO: 4081784 - RNA, 16 nt, Variola virus
cagugacagauauaca

SEQ ID NO: 4081785 - RNA, 15 nt, Variola virus
caguuaauauauuua

SEQ ID NO: 4081786 - RNA, 13 nt, Variola virus
caguuaucaucua

SEQ ID NO: 4081787 - RNA, 22 nt, Variola virus
caguuauguucaacuuugaaau

SEQ ID NO: 4081788 - RNA, 12 nt, Variola virus
caguugaacaga

SEQ ID NO: 4081789 - RNA, 22 nt, Variola virus
caguugcgaacaacaacaaaau

SEQ ID NO: 4081790 - RNA, 17 nt, Variola virus
caguuucucaucuuuua

SEQ ID NO: 4081791 - RNA, 13 nt, Variola virus
cauaaaacauaau

SEQ ID NO: 4081792 - RNA, 14 nt, Variola virus
cauaaaacaucauu

SEQ ID NO: 4081793 - RNA, 21 nt, Variola virus
cauaaaauaacucuguagacg

SEQ ID NO: 4081794 - RNA, 18 nt, Variola virus
cauaaaauacaagagaau

SEQ ID NO: 4081795 - RNA, 14 nt, Variola virus
cauaaaauuuaaga

SEQ ID NO: 4081796 - RNA, 13 nt, Variola virus
cauaaacauuauu

SEQ ID NO: 4081797 - RNA, 21 nt, Variola virus
cauaaacgauugcugcuguuc

SEQ ID NO: 4081798 - RNA, 18 nt, Variola virus
cauaaaggaauauacaaa

SEQ ID NO: 4081799 - RNA, 23 nt, Variola virus
cauaaaugagaugagaagauauu

SEQ ID NO: 4081800 - RNA, 14 nt, Variola virus
cauaacauuguuua

SEQ ID NO: 4081801 - RNA, 13 nt, Variola virus
cauaagcgcuaua

SEQ ID NO: 4081802 - RNA, 20 nt, Variola virus
cauaagcuugacuacauuug

SEQ ID NO: 4081803 - RNA, 17 nt, Variola virus
cauaagucuaauagacu

SEQ ID NO: 4081804 - RNA, 17 nt, Variola virus
cauaauaaauuuuucca

SEQ ID NO: 4081805 - RNA, 19 nt, Variola virus
cauaauacuaucuauguua

SEQ ID NO: 4081806 - RNA, 22 nt, Variola virus
cauaauacucccacaaauacug

SEQ ID NO: 4081807 - RNA, 16 nt, Variola virus
cauaauagaauguauu

SEQ ID NO: 4081808 - RNA, 13 nt, Variola virus
cauaauaucuuua

SEQ ID NO: 4081809 - RNA, 15 nt, Variola virus
cauaauauuaucaaa

SEQ ID NO: 4081810 - RNA, 20 nt, Variola virus
cauaaucaucacugucauca

SEQ ID NO: 4081811 - RNA, 21 nt, Variola virus
cauaaucaucacugucaucag

SEQ ID NO: 4081812 - RNA, 15 nt, Variola virus
cauaauccauuucca

SEQ ID NO: 4081813 - RNA, 12 nt, Variola virus
cauaauccucua

SEQ ID NO: 4081814 - RNA, 18 nt, Variola virus
cauaauccuuguaaugau

SEQ ID NO: 4081815 - RNA, 14 nt, Variola virus
gaaaucguauauaa

SEQ ID NO: 4081816 - RNA, 19 nt, Variola virus
gaaaugggucauauuauca

SEQ ID NO: 4081817 - RNA, 14 nt, Variola virus
gaaaugguacagaa

SEQ ID NO: 4081818 - RNA, 18 nt, Variola virus
gaaauugguuuauaaugu

SEQ ID NO: 4081819 - RNA, 18 nt, Variola virus
gaaauuugaaagaacuac

SEQ ID NO: 4081820 - RNA, 17 nt, Variola virus
gaacaauaaaagagaau

SEQ ID NO: 4081821 - RNA, 20 nt, Variola virus
gaacacauaaccaauuuaua

SEQ ID NO: 4081822 - RNA, 16 nt, Variola virus
gaacacguuaaacaaa

SEQ ID NO: 4081823 - RNA, 16 nt, Variola virus
gaacagauaguuuauc

SEQ ID NO: 4081824 - RNA, 20 nt, Variola virus
gaacauaucuauauaauuau

SEQ ID NO: 4081825 - RNA, 19 nt, Variola virus
gaacauggguuacauauca

SEQ ID NO: 4081826 - RNA, 21 nt, Variola virus
gaaccaguaccagaucuuaau

SEQ ID NO: 4081827 - RNA, 19 nt, Variola virus
gaaccauuacaaauauuau

SEQ ID NO: 4081828 - RNA, 23 nt, Variola virus
gaacccauaaauacaccaaauau

SEQ ID NO: 4081829 - RNA, 21 nt, Variola virus
gaacgauauuugugaaaauau

SEQ ID NO: 4081830 - RNA, 19 nt, Variola virus
gaacguauuaauacuuaau

SEQ ID NO: 4081831 - RNA, 19 nt, Variola virus
gaacuaaaaaacgaaauau

SEQ ID NO: 4081832 - RNA, 19 nt, Variola virus
gaacuaauccacauaugau

SEQ ID NO: 4081833 - RNA, 22 nt, Variola virus
gaacuauaaguguguuguaaac

SEQ ID NO: 4081834 - RNA, 18 nt, Variola virus
gaacuggacuguauaucu

SEQ ID NO: 4081835 - RNA, 21 nt, Variola virus
gaacuuacugacaaaguuaag

SEQ ID NO: 4081836 - RNA, 15 nt, Variola virus
gaacuuguuaaagaa

SEQ ID NO: 4081837 - RNA, 16 nt, Variola virus
gaagaacgauaaugaa

SEQ ID NO: 4081838 - RNA, 13 nt, Variola virus
gaagaaguuaaua

SEQ ID NO: 4081839 - RNA, 19 nt, Variola virus
gaagaauggaacuaaaaaa

SEQ ID NO: 4081840 - RNA, 20 nt, Variola virus
gaagaauucuagaucaagaa

SEQ ID NO: 4081841 - RNA, 14 nt, Variola virus
gaagacuccuggua

SEQ ID NO: 4081842 - RNA, 19 nt, Variola virus
gaagagauuucaacagacu

SEQ ID NO: 4081843 - RNA, 13 nt, Variola virus
gaagagguuauau

SEQ ID NO: 4081844 - RNA, 22 nt, Variola virus
gaagaugauuuugcuagagaua

SEQ ID NO: 4081845 - RNA, 12 nt, Variola virus
gaagcaaaauau

SEQ ID NO: 4081846 - RNA, 23 nt, Variola virus
gaagcagcugcagcaacuucugu

SEQ ID NO: 4081847 - RNA, 16 nt, Variola virus
gaagcauuggaagcaa

SEQ ID NO: 4081848 - RNA, 14 nt, Variola virus
gaagguauuuccau

SEQ ID NO: 4081849 - RNA, 17 nt, Variola virus
gaaguaaaagauuuaua

SEQ ID NO: 4081850 - RNA, 17 nt, Variola virus
gaagucggauuauguaa

SEQ ID NO: 4081851 - RNA, 15 nt, Variola virus
gaaguuguauacuau

SEQ ID NO: 4081852 - RNA, 21 nt, Variola virus
gaaguuuuguauuguauauac

SEQ ID NO: 4081853 - RNA, 21 nt, Variola virus
gaauaacuguaauuuuauucu

SEQ ID NO: 4081854 - RNA, 19 nt, Variola virus
gaauaagaguguaguauca

SEQ ID NO: 4081855 - RNA, 13 nt, Variola virus
gaauaagcuauau

SEQ ID NO: 4081856 - RNA, 18 nt, Variola virus
gaauaauguucaaaucua

SEQ ID NO: 4081857 - RNA, 17 nt, Variola virus
gaauacauaaagaacga

SEQ ID NO: 4081858 - RNA, 14 nt, Variola virus
gaauacuaaauuga

SEQ ID NO: 4081859 - RNA, 13 nt, Variola virus
gaauagaaaucuu

SEQ ID NO: 4081860 - RNA, 14 nt, Variola virus
gaauagacuuucug

SEQ ID NO: 4081861 - RNA, 23 nt, Variola virus
gaauagcagauagauaaagucuu

SEQ ID NO: 4081862 - RNA, 17 nt, Variola virus
gaauaguaguagcucua

SEQ ID NO: 4081863 - RNA, 16 nt, Variola virus
gaauauaaaauaacua

SEQ ID NO: 4081864 - RNA, 14 nt, Variola virus
gaauauacaaguau

SEQ ID NO: 4081865 - RNA, 12 nt, Variola virus
gaauauaugauu

SEQ ID NO: 4081866 - RNA, 15 nt, Variola virus
gaauauauguuuaua

SEQ ID NO: 4081867 - RNA, 13 nt, Variola virus
gaauauauuuaua

SEQ ID NO: 4081868 - RNA, 19 nt, Variola virus
gaauaucacauaucauguu

SEQ ID NO: 4081869 - RNA, 14 nt, Variola virus
gaauaucauauuac

SEQ ID NO: 4081870 - RNA, 17 nt, Variola virus
gaauaucuacaauauau

SEQ ID NO: 4081871 - RNA, 17 nt, Variola virus
gaauaucugaugauauu

SEQ ID NO: 4081872 - RNA, 16 nt, Variola virus
gaauaucuuuauucau

SEQ ID NO: 4081873 - RNA, 12 nt, Variola virus
gaauauugauuu

SEQ ID NO: 4081874 - RNA, 19 nt, Variola virus
gaauauuuugauaaugaac

SEQ ID NO: 4081875 - RNA, 22 nt, Variola virus
gaauauuuugauaaugaacgaa

SEQ ID NO: 4081876 - RNA, 13 nt, Variola virus
gaaucacaaacau

SEQ ID NO: 4081877 - RNA, 19 nt, Variola virus
gaaucaguuaauaaauuca

SEQ ID NO: 4081878 - RNA, 15 nt, Variola virus
gaaucauacaaaaau

SEQ ID NO: 4081879 - RNA, 14 nt, Variola virus
gaaucauuuuugca

SEQ ID NO: 4081880 - RNA, 15 nt, Variola virus
gaaucccuacauauu

SEQ ID NO: 4081881 - RNA, 15 nt, Variola virus
gaauccuauacucug

SEQ ID NO: 4081882 - RNA, 16 nt, Variola virus
gaaucggauaguuuaa

SEQ ID NO: 4081883 - RNA, 24 nt, Variola virus
gaaucuagaucgaugauaacuucu

SEQ ID NO: 4081884 - RNA, 22 nt, Variola virus
gaaugcuaaugucaaguuuauu

SEQ ID NO: 4081885 - RNA, 17 nt, Variola virus
gaaugggugucaucuau

SEQ ID NO: 4081886 - RNA, 18 nt, Variola virus
gaauguggaauuugcuau

SEQ ID NO: 4081887 - RNA, 14 nt, Variola virus
gaauguguauucuc

SEQ ID NO: 4081888 - RNA, 16 nt, Variola virus
gaauuaauagauauau

SEQ ID NO: 4081889 - RNA, 15 nt, Variola virus
gaauuaauguccuga

SEQ ID NO: 4081890 - RNA, 20 nt, Variola virus
gaauuagucgucgaauauau

SEQ ID NO: 4081891 - RNA, 22 nt, Variola virus
gaauuauuacuuaaguuguaaa

SEQ ID NO: 4081892 - RNA, 13 nt, Variola virus
gaauucaaaauau

SEQ ID NO: 4081893 - RNA, 14 nt, Variola virus
gaauugacaaauaa

SEQ ID NO: 4081894 - RNA, 14 nt, Variola virus
gaauuguaacuuga

SEQ ID NO: 4081895 - RNA, 12 nt, Variola virus
gaauuguauauu

SEQ ID NO: 4081896 - RNA, 14 nt, Variola virus
gaauuuagaaauau

SEQ ID NO: 4081897 - RNA, 14 nt, Variola virus
gaauuuaguaauau

SEQ ID NO: 4081898 - RNA, 15 nt, Variola virus
gaauuuauuaauaca

SEQ ID NO: 4081899 - RNA, 23 nt, Variola virus
gacaaaaucaacuacauaaucuu

SEQ ID NO: 4081900 - RNA, 13 nt, Variola virus
gacaaaaugugau

SEQ ID NO: 4081901 - RNA, 11 nt, Variola virus
gacaaauguaa

SEQ ID NO: 4081902 - RNA, 14 nt, Variola virus
gacaaauuauucua

SEQ ID NO: 4081903 - RNA, 20 nt, Variola virus
gacaacuuaaucugaugaau

SEQ ID NO: 4081904 - RNA, 20 nt, Variola virus
gacaagauauauauacucua

SEQ ID NO: 4081905 - RNA, 16 nt, Variola virus
gacaauacuguauuau

SEQ ID NO: 4081906 - RNA, 18 nt, Variola virus
gacaauaguguucugaau

SEQ ID NO: 4081907 - RNA, 20 nt, Variola virus
gacacauucuuuagaacuuc

SEQ ID NO: 4081908 - RNA, 17 nt, Variola virus
gacacuaguuaagaaca

SEQ ID NO: 4081909 - RNA, 17 nt, Variola virus
gacacuauucauguaau

SEQ ID NO: 4081910 - RNA, 22 nt, Variola virus
gacacucuauaucuagaaauaa

SEQ ID NO: 4081911 - RNA, 22 nt, Variola virus
gacacugccguauauaggaaaa

SEQ ID NO: 4081912 - RNA, 19 nt, Variola virus
gacagaagaauaugaugau

SEQ ID NO: 4081913 - RNA, 15 nt, Variola virus
gacauaguaauacau

SEQ ID NO: 4081914 - RNA, 17 nt, Variola virus
gacauauccgaugaugu

SEQ ID NO: 4081915 - RNA, 17 nt, Variola virus
gacaucaauaugccaau

SEQ ID NO: 4081916 - RNA, 23 nt, Variola virus
gacauccaugguggaauaaacua

SEQ ID NO: 4081917 - RNA, 11 nt, Variola virus
gacaugaugau

SEQ ID NO: 4081918 - RNA, 23 nt, Variola virus
gacauuaugcuaccaucaugaau

SEQ ID NO: 4081919 - RNA, 21 nt, Variola virus
gacauugauauauauauuaag

SEQ ID NO: 4081920 - RNA, 16 nt, Variola virus
gacauugucagaaauu

SEQ ID NO: 4081921 - RNA, 13 nt, Variola virus
gacauuuucuagu

SEQ ID NO: 4081922 - RNA, 20 nt, Variola virus
gaccaauuacugauaaugua

SEQ ID NO: 4081923 - RNA, 17 nt, Variola virus
gaccaauuuauuacuug

SEQ ID NO: 4081924 - RNA, 19 nt, Variola virus
gaccguccauaguuuguau

SEQ ID NO: 4081925 - RNA, 14 nt, Variola virus
gaccuccuccacca

SEQ ID NO: 4081926 - RNA, 14 nt, Variola virus
gaccuuuuccuuau

SEQ ID NO: 4081927 - RNA, 20 nt, Variola virus
gaccuuuuccuuaucuucau

SEQ ID NO: 4081928 - RNA, 17 nt, Variola virus
gacgaugauuucugaau

SEQ ID NO: 4081929 - RNA, 17 nt, Variola virus
gacgcguucauuggaaa

SEQ ID NO: 4081930 - RNA, 21 nt, Variola virus
gacgcuuguuaauaaguaaau

SEQ ID NO: 4081931 - RNA, 12 nt, Variola virus
gacguaaaugug

SEQ ID NO: 4081932 - RNA, 17 nt, Variola virus
gacgucucuucgugaau

SEQ ID NO: 4081933 - RNA, 22 nt, Variola virus
gacuaaaucagauuaugaggau

SEQ ID NO: 4081934 - RNA, 21 nt, Variola virus
gacuaccuggcucauugauua

SEQ ID NO: 4081935 - RNA, 15 nt, Variola virus
gacuaucuuuugaaa

SEQ ID NO: 4081936 - RNA, 21 nt, Variola virus
gacucgcguuuagaggaguga

SEQ ID NO: 4081937 - RNA, 23 nt, Variola virus
gacucucaguaagaguuaugaau

SEQ ID NO: 4081938 - RNA, 12 nt, Variola virus
gacuguacgaua

SEQ ID NO: 4081939 - RNA, 19 nt, Variola virus
gacuguagaacucaugaau

SEQ ID NO: 4081940 - RNA, 21 nt, Variola virus
gacuuauuaaaaaacauauau

SEQ ID NO: 4081941 - RNA, 22 nt, Variola virus
gacuuguuaaaucuauauacca

SEQ ID NO: 4081942 - RNA, 18 nt, Variola virus
gacuuuaaccuauacaug

SEQ ID NO: 4081943 - RNA, 15 nt, Variola virus
gagaaaauagauauc

SEQ ID NO: 4081944 - RNA, 14 nt, Variola virus
gagaaauuauuccu

SEQ ID NO: 4081945 - RNA, 23 nt, Variola virus
gagaacauacauuuguaaaagua

SEQ ID NO: 4081946 - RNA, 13 nt, Variola virus
gagaauaauagau

SEQ ID NO: 4081947 - RNA, 14 nt, Variola virus
gagacuuaaacaac

SEQ ID NO: 4081948 - RNA, 19 nt, Variola virus
gagagucaauaucauuaau

SEQ ID NO: 4081949 - RNA, 15 nt, Variola virus
gagauaauagaaaau

SEQ ID NO: 4081950 - RNA, 21 nt, Variola virus
gagauaucccguuagaaauau

SEQ ID NO: 4081951 - RNA, 20 nt, Variola virus
gagauccugcauagaaauau

SEQ ID NO: 4081952 - RNA, 18 nt, Variola virus
gagauguuauuaaauguu

SEQ ID NO: 4081953 - RNA, 21 nt, Variola virus
gagauuuguuuuguuaaacaa

SEQ ID NO: 4081954 - RNA, 20 nt, Variola virus
gagcaaaaguaguucaacau

SEQ ID NO: 4081955 - RNA, 23 nt, Variola virus
gagcuaauuuuuguaaauaacua

SEQ ID NO: 4081956 - RNA, 19 nt, Variola virus
gagcucaucuaagaaauag

SEQ ID NO: 4081957 - RNA, 20 nt, Variola virus
gaggaguuauugauauuaac

SEQ ID NO: 4081958 - RNA, 16 nt, Variola virus
gaggaugagagucaau

SEQ ID NO: 4081959 - RNA, 21 nt, Variola virus
gaguacauuucacagaaacac

SEQ ID NO: 4081960 - RNA, 16 nt, Variola virus
gaguaggugcaacaau

SEQ ID NO: 4081961 - RNA, 20 nt, Variola virus
gaguauaaaacauuaaaugu

SEQ ID NO: 4081962 - RNA, 14 nt, Variola virus
gaguauauauuaag

SEQ ID NO: 4081963 - RNA, 14 nt, Variola virus
gagugauucuaguu

SEQ ID NO: 4081964 - RNA, 19 nt, Variola virus
gaguuagauauuaauaaca

SEQ ID NO: 4081965 - RNA, 15 nt, Variola virus
gaguugauuguaaac

SEQ ID NO: 4081966 - RNA, 15 nt, Variola virus
gaguuggauaucauc

SEQ ID NO: 4081967 - RNA, 12 nt, Variola virus
gaguuuaaaacu

SEQ ID NO: 4081968 - RNA, 21 nt, Variola virus
gaguuuagauuaguuaauaca

SEQ ID NO: 4081969 - RNA, 20 nt, Variola virus
gaguuuaucacuaaguucug

SEQ ID NO: 4081970 - RNA, 22 nt, Variola virus
gauaaaagaugcauauauuaga

SEQ ID NO: 4081971 - RNA, 15 nt, Variola virus
gauaaaaucaaacuu

SEQ ID NO: 4081972 - RNA, 18 nt, Variola virus
gauaaaauccuccuauca

SEQ ID NO: 4081973 - RNA, 16 nt, Variola virus
gauaaacgugaacagg

SEQ ID NO: 4081974 - RNA, 15 nt, Variola virus
gauaaagauauauga

SEQ ID NO: 4081975 - RNA, 17 nt, Variola virus
gauaaauuaaugaucua

SEQ ID NO: 4081976 - RNA, 17 nt, Variola virus
gauaacaauuuguuaau

SEQ ID NO: 4081977 - RNA, 16 nt, Variola virus
gauaacacauuuucau

SEQ ID NO: 4081978 - RNA, 22 nt, Variola virus
gauaacagcauuuguguaguuu

SEQ ID NO: 4081979 - RNA, 21 nt, Variola virus
gauaacuagaaucagaaucua

SEQ ID NO: 4081980 - RNA, 16 nt, Variola virus
gauaagauaaaaucua

SEQ ID NO: 4081981 - RNA, 17 nt, Variola virus
gauaaguccuucaaaau

SEQ ID NO: 4081982 - RNA, 22 nt, Variola virus
gauaaguuuaaggcguuugcau

SEQ ID NO: 4081983 - RNA, 13 nt, Variola virus
gauaauaaaucaa

SEQ ID NO: 4081984 - RNA, 20 nt, Variola virus
gauaauacauuuucuuacaa

SEQ ID NO: 4081985 - RNA, 16 nt, Variola virus
gauaauauaaauauga

SEQ ID NO: 4081986 - RNA, 13 nt, Variola virus
gauaaucauuuaa

SEQ ID NO: 4081987 - RNA, 20 nt, Variola virus
gauaaugauacgauacuaua

SEQ ID NO: 4081988 - RNA, 13 nt, Variola virus
gauaauuauccau

SEQ ID NO: 4081989 - RNA, 23 nt, Variola virus
gauaccaauaaguuuuagauauu

SEQ ID NO: 4081990 - RNA, 21 nt, Variola virus
gauaccgaucacguucuaguu

SEQ ID NO: 4081991 - RNA, 19 nt, Variola virus
gauaccucauuuaucaugu

SEQ ID NO: 4081992 - RNA, 14 nt, Variola virus
gauacgaugaugac

SEQ ID NO: 4081993 - RNA, 15 nt, Variola virus
gauagaaacauaugc

SEQ ID NO: 4081994 - RNA, 15 nt, Variola virus
gauagaacaaaauac

SEQ ID NO: 4081995 - RNA, 13 nt, Variola virus
gauagacuuucuc

SEQ ID NO: 4081996 - RNA, 20 nt, Variola virus
gauagaugaacugacauaua

SEQ ID NO: 4081997 - RNA, 21 nt, Variola virus
gauagaugauucgauaaauaa

SEQ ID NO: 4081998 - RNA, 19 nt, Variola virus
gauagcuuccagauuuaaa

SEQ ID NO: 4081999 - RNA, 15 nt, Variola virus
gauaguaaaauaaag

SEQ ID NO: 4082000 - RNA, 19 nt, Variola virus
gauaguauucaagucaaag

SEQ ID NO: 4082001 - RNA, 16 nt, Variola virus
gauaguugaucagaau

SEQ ID NO: 4082002 - RNA, 16 nt, Variola virus
gauaguuguugugaca

SEQ ID NO: 4082003 - RNA, 16 nt, Variola virus
gauauacuacuucucc

SEQ ID NO: 4082004 - RNA, 20 nt, Variola virus
gauauagaaaucggaaauuu

SEQ ID NO: 4082005 - RNA, 20 nt, Variola virus
gauauaguauauuccaguuc

SEQ ID NO: 4082006 - RNA, 23 nt, Variola virus
gauauaucaaaauuagacuggag

SEQ ID NO: 4082007 - RNA, 22 nt, Variola virus
gauaucaacauggaguauauca

SEQ ID NO: 4082008 - RNA, 14 nt, Variola virus
gauaucuccauuaa

SEQ ID NO: 4082009 - RNA, 15 nt, Variola virus
gauauggauuuccag

SEQ ID NO: 4082010 - RNA, 12 nt, Variola virus
gauauuaguaca

SEQ ID NO: 4082011 - RNA, 21 nt, Variola virus
gauauucagaaagcuguggau

SEQ ID NO: 4082012 - RNA, 20 nt, Variola virus
gauauuuucguguuuuaguu

SEQ ID NO: 4082013 - RNA, 17 nt, Variola virus
gauauuuugcaaaauag

SEQ ID NO: 4082014 - RNA, 15 nt, Variola virus
gaucaaauuauugau

SEQ ID NO: 4082015 - RNA, 16 nt, Variola virus
gaucagguaaaacaau

SEQ ID NO: 4082016 - RNA, 15 nt, Variola virus
gaucauacauuauga

SEQ ID NO: 4082017 - RNA, 14 nt, Variola virus
gaucauucuuuuag

SEQ ID NO: 4082018 - RNA, 15 nt, Variola virus
gauccaaaacauaga

SEQ ID NO: 4082019 - RNA, 14 nt, Variola virus
gauccaacacuauu

SEQ ID NO: 4082020 - RNA, 21 nt, Variola virus
gauccaauaaauuaucaaaua

SEQ ID NO: 4082021 - RNA, 23 nt, Variola virus
gauccacaugcuguacaggccag

SEQ ID NO: 4082022 - RNA, 18 nt, Variola virus
gauccaucaaaaaacaac

SEQ ID NO: 4082023 - RNA, 13 nt, Variola virus
gaucguuaaugaa

SEQ ID NO: 4082024 - RNA, 15 nt, Variola virus
gaucuaaaaaaaacu

SEQ ID NO: 4082025 - RNA, 16 nt, Variola virus
gaucuaauagaugaau

SEQ ID NO: 4082026 - RNA, 22 nt, Variola virus
gaucuaauagaugaauauauca

SEQ ID NO: 4082027 - RNA, 12 nt, Variola virus
gaucuauaaaaa

SEQ ID NO: 4082028 - RNA, 20 nt, Variola virus
gaucuauauguuuuauuaau

SEQ ID NO: 4082029 - RNA, 23 nt, Variola virus
gaucuccucuaucuguacuaucu

SEQ ID NO: 4082030 - RNA, 14 nt, Variola virus
gaucuggaaaauaa

SEQ ID NO: 4082031 - RNA, 16 nt, Variola virus
gaucuuaccaucuucu

SEQ ID NO: 4082032 - RNA, 17 nt, Variola virus
gaugaaggaauaaucuc

SEQ ID NO: 4082033 - RNA, 19 nt, Variola virus
gaugaaggugggacuauau

SEQ ID NO: 4082034 - RNA, 18 nt, Variola virus
gaugaauugauuaauguu

SEQ ID NO: 4082035 - RNA, 17 nt, Variola virus
gaugagaacagaagcgu

SEQ ID NO: 4082036 - RNA, 17 nt, Variola virus
gaugaggaagcauauuc

SEQ ID NO: 4082037 - RNA, 18 nt, Variola virus
gaugaggugguugcagaa

SEQ ID NO: 4082038 - RNA, 13 nt, Variola virus
gaugaguauauau

SEQ ID NO: 4082039 - RNA, 22 nt, Variola virus
gaugauaucaguauauuauuau

SEQ ID NO: 4082040 - RNA, 14 nt, Variola virus
gaugccucuuuuag

SEQ ID NO: 4082041 - RNA, 22 nt, Variola virus
gauggauauauuaaagucaaau

SEQ ID NO: 4082042 - RNA, 18 nt, Variola virus
gauggguucgauauuaau

SEQ ID NO: 4082043 - RNA, 19 nt, Variola virus
gauguacugaagguauuau

SEQ ID NO: 4082044 - RNA, 18 nt, Variola virus
gaugucaaugguauguau

SEQ ID NO: 4082045 - RNA, 18 nt, Variola virus
gaugucuacucguauauu

SEQ ID NO: 4082046 - RNA, 16 nt, Variola virus
gaugucuugacuaccu

SEQ ID NO: 4082047 - RNA, 13 nt, Variola virus
gauguuagauaua

SEQ ID NO: 4082048 - RNA, 16 nt, Variola virus
gauguuuguaucaugc

SEQ ID NO: 4082049 - RNA, 14 nt, Variola virus
gauguuuguucauu

SEQ ID NO: 4082050 - RNA, 19 nt, Variola virus
gauuaaaaauaaaguuauc

SEQ ID NO: 4082051 - RNA, 14 nt, Variola virus
gauuaauaauucau

SEQ ID NO: 4082052 - RNA, 21 nt, Variola virus
gauuaauaguuuuauuugaag

SEQ ID NO: 4082053 - RNA, 23 nt, Variola virus
gauuaaugcuacagauauuauca

SEQ ID NO: 4082054 - RNA, 15 nt, Variola virus
gauuaauuagauaua

SEQ ID NO: 4082055 - RNA, 19 nt, Variola virus
gauuauaaauaucgauguu

SEQ ID NO: 4082056 - RNA, 20 nt, Variola virus
gauuauaauccuuauacauc

SEQ ID NO: 4082057 - RNA, 20 nt, Variola virus
gauucacaaaacguauauag

SEQ ID NO: 4082058 - RNA, 17 nt, Variola virus
gauucaugauaguuuua

SEQ ID NO: 4082059 - RNA, 17 nt, Variola virus
gauucuaguaucuuuug

SEQ ID NO: 4082060 - RNA, 13 nt, Variola virus
gauucuuauucac

SEQ ID NO: 4082061 - RNA, 19 nt, Variola virus
gauucuucacaagugaaau

SEQ ID NO: 4082062 - RNA, 22 nt, Variola virus
gauuggauaaacuaaaauuaaa

SEQ ID NO: 4082063 - RNA, 22 nt, Variola virus
gauuggauaagaaaacauaucu

SEQ ID NO: 4082064 - RNA, 21 nt, Variola virus
gauugggaaccagucaugaau

SEQ ID NO: 4082065 - RNA, 22 nt, Variola virus
gauuguacacccaucauggaau

SEQ ID NO: 4082066 - RNA, 22 nt, Variola virus
gauuguccggcauaucauguag

SEQ ID NO: 4082067 - RNA, 16 nt, Variola virus
gauuguugccguaaau

SEQ ID NO: 4082068 - RNA, 18 nt, Variola virus
gauuguuuaagaagagaa

SEQ ID NO: 4082069 - RNA, 17 nt, Variola virus
gauuuaucuaguuuauc

SEQ ID NO: 4082070 - RNA, 21 nt, Variola virus
gauuuauuugauaaucauguu

SEQ ID NO: 4082071 - RNA, 14 nt, Variola virus
gauuucuauuuuua

SEQ ID NO: 4082072 - RNA, 13 nt, Variola virus
acauuaauacaaa

SEQ ID NO: 4082073 - RNA, 19 nt, Variola virus
acauuaaucuauuagaauu

SEQ ID NO: 4082074 - RNA, 14 nt, Variola virus
acauuaauugauua

SEQ ID NO: 4082075 - RNA, 18 nt, Variola virus
acauuagauacaauggau

SEQ ID NO: 4082076 - RNA, 20 nt, Variola virus
acauuaguagggauagaaug

SEQ ID NO: 4082077 - RNA, 20 nt, Variola virus
acauuaguucccaaugaauc

SEQ ID NO: 4082078 - RNA, 15 nt, Variola virus
acauuauaugaugau

SEQ ID NO: 4082079 - RNA, 13 nt, Variola virus
acauucagaaaga

SEQ ID NO: 4082080 - RNA, 14 nt, Variola virus
acauucuaggaaug

SEQ ID NO: 4082081 - RNA, 21 nt, Variola virus
acauucuuaaccauauaucca

SEQ ID NO: 4082082 - RNA, 14 nt, Variola virus
acauugauuaaauu

SEQ ID NO: 4082083 - RNA, 17 nt, Variola virus
acauugugauuaaacau

SEQ ID NO: 4082084 - RNA, 15 nt, Variola virus
acauugugccaauaa

SEQ ID NO: 4082085 - RNA, 20 nt, Variola virus
acauuucagcaaucuaacau

SEQ ID NO: 4082086 - RNA, 13 nt, Variola virus
acauuuccuacau

SEQ ID NO: 4082087 - RNA, 16 nt, Variola virus
acauuuguauaaucuu

SEQ ID NO: 4082088 - RNA, 19 nt, Variola virus
acauuuuccauuuauaaca

SEQ ID NO: 4082089 - RNA, 17 nt, Variola virus
acauuuuuauaaauaga

SEQ ID NO: 4082090 - RNA, 20 nt, Variola virus
acauuuuuuaaagcuaaaau

SEQ ID NO: 4082091 - RNA, 15 nt, Variola virus
acauuuuuuaguaga

SEQ ID NO: 4082092 - RNA, 14 nt, Variola virus
accaaaaucaauau

SEQ ID NO: 4082093 - RNA, 12 nt, Variola virus
accaaauuauca

SEQ ID NO: 4082094 - RNA, 14 nt, Variola virus
accaaguagaaauu

SEQ ID NO: 4082095 - RNA, 21 nt, Variola virus
accaaguuaaauuuuacuuua

SEQ ID NO: 4082096 - RNA, 18 nt, Variola virus
accaauaauaguagaauu

SEQ ID NO: 4082097 - RNA, 22 nt, Variola virus
accaauaugucuguacaaaugu

SEQ ID NO: 4082098 - RNA, 23 nt, Variola virus
accaaucugggcguauaaugaau

SEQ ID NO: 4082099 - RNA, 23 nt, Variola virus
accaaugaauggauuaccguguu

SEQ ID NO: 4082100 - RNA, 19 nt, Variola virus
accaauuacugauaaugua

SEQ ID NO: 4082101 - RNA, 23 nt, Variola virus
accaauuacugauaauguagaaa

SEQ ID NO: 4082102 - RNA, 19 nt, Variola virus
accaauuguuuuuguacau

SEQ ID NO: 4082103 - RNA, 15 nt, Variola virus
accacaggagaaugg

SEQ ID NO: 4082104 - RNA, 14 nt, Variola virus
accacauaauacaa

SEQ ID NO: 4082105 - RNA, 17 nt, Variola virus
accaccaaauaaaauuc

SEQ ID NO: 4082106 - RNA, 13 nt, Variola virus
accacuucucuau

SEQ ID NO: 4082107 - RNA, 22 nt, Variola virus
accagaguuaucaagagaaaau

SEQ ID NO: 4082108 - RNA, 16 nt, Variola virus
accagcggcuacuaaa

SEQ ID NO: 4082109 - RNA, 22 nt, Variola virus
accauaacuguauaaaauggag

SEQ ID NO: 4082110 - RNA, 14 nt, Variola virus
accauauacugagu

SEQ ID NO: 4082111 - RNA, 21 nt, Variola virus
accauccuuuaaaaaaaauga

SEQ ID NO: 4082112 - RNA, 14 nt, Variola virus
accaucgauuguuu

SEQ ID NO: 4082113 - RNA, 14 nt, Variola virus
accauuaaaaauug

SEQ ID NO: 4082114 - RNA, 19 nt, Variola virus
accauuagauaaaguugau

SEQ ID NO: 4082115 - RNA, 19 nt, Variola virus
acccaaagagaccaaugaa

SEQ ID NO: 4082116 - RNA, 16 nt, Variola virus
acccaugauaaugaau

SEQ ID NO: 4082117 - RNA, 14 nt, Variola virus
acccauuacauaua

SEQ ID NO: 4082118 - RNA, 19 nt, Variola virus
acccgcauacuuuaacaaa

SEQ ID NO: 4082119 - RNA, 18 nt, Variola virus
accgaguuuaaaacuucu

SEQ ID NO: 4082120 - RNA, 22 nt, Variola virus
accggacgacauauuaaucuuu

SEQ ID NO: 4082121 - RNA, 19 nt, Variola virus
accguauuacucuacagua

SEQ ID NO: 4082122 - RNA, 18 nt, Variola virus
accgucggcguuaauagu

SEQ ID NO: 4082123 - RNA, 14 nt, Variola virus
accuagaacaaugu

SEQ ID NO: 4082124 - RNA, 13 nt, Variola virus
accucgagaaugu

SEQ ID NO: 4082125 - RNA, 17 nt, Variola virus
accucuaguuucagaau

SEQ ID NO: 4082126 - RNA, 21 nt, Variola virus
accugccauaaauaaaugcuu

SEQ ID NO: 4082127 - RNA, 14 nt, Variola virus
accuguauacugua

SEQ ID NO: 4082128 - RNA, 23 nt, Variola virus
accuuugguucuuuaaaagaaac

SEQ ID NO: 4082129 - RNA, 14 nt, Variola virus
acgaaagcaaagaa

SEQ ID NO: 4082130 - RNA, 20 nt, Variola virus
acgaaauaucucaucaagaa

SEQ ID NO: 4082131 - RNA, 23 nt, Variola virus
acgaacgucuccaauauaugaua

SEQ ID NO: 4082132 - RNA, 18 nt, Variola virus
acgacucuugagacuuua

SEQ ID NO: 4082133 - RNA, 19 nt, Variola virus
acgagaauacguaauaauu

SEQ ID NO: 4082134 - RNA, 18 nt, Variola virus
acgagugaacguaauaga

SEQ ID NO: 4082135 - RNA, 17 nt, Variola virus
acgauacuaugcauauu

SEQ ID NO: 4082136 - RNA, 22 nt, Variola virus
acgauauagacaacguagaauu

SEQ ID NO: 4082137 - RNA, 13 nt, Variola virus
acgaucaaccaaa

SEQ ID NO: 4082138 - RNA, 15 nt, Variola virus
acgaugaaaaugaug

SEQ ID NO: 4082139 - RNA, 17 nt, Variola virus
acgaugaaaaugugcuu

SEQ ID NO: 4082140 - RNA, 21 nt, Variola virus
acgaugguuuucacauuuaac

SEQ ID NO: 4082141 - RNA, 18 nt, Variola virus
acgaugucaauaaugccg

SEQ ID NO: 4082142 - RNA, 22 nt, Variola virus
acgauuacaucaccucuaacau

SEQ ID NO: 4082143 - RNA, 14 nt, Variola virus
acgcagauagcuau

SEQ ID NO: 4082144 - RNA, 17 nt, Variola virus
acgcauaaaaaugccac

SEQ ID NO: 4082145 - RNA, 15 nt, Variola virus
acgcauccauccaaa

SEQ ID NO: 4082146 - RNA, 23 nt, Variola virus
acgccauagacauugaaaaugaa

SEQ ID NO: 4082147 - RNA, 17 nt, Variola virus
acgcccuuguauguuuu

SEQ ID NO: 4082148 - RNA, 19 nt, Variola virus
acggagauacaucuucaau

SEQ ID NO: 4082149 - RNA, 22 nt, Variola virus
acggagucauaacuauuuuacc

SEQ ID NO: 4082150 - RNA, 21 nt, Variola virus
acggaugaaaauaagaaaaau

SEQ ID NO: 4082151 - RNA, 20 nt, Variola virus
acggcaaaccaaaaacauuu

SEQ ID NO: 4082152 - RNA, 17 nt, Variola virus
acggcaacuggaaaguc

SEQ ID NO: 4082153 - RNA, 22 nt, Variola virus
acgggaaaggaauuaauuauuc

SEQ ID NO: 4082154 - RNA, 15 nt, Variola virus
acggguucucaauau

SEQ ID NO: 4082155 - RNA, 15 nt, Variola virus
acgguaauaaaaugu

SEQ ID NO: 4082156 - RNA, 16 nt, Variola virus
acguaaccaagaaguu

SEQ ID NO: 4082157 - RNA, 18 nt, Variola virus
acguacauaacauuguuu

SEQ ID NO: 4082158 - RNA, 15 nt, Variola virus
acguagaaaacggau

SEQ ID NO: 4082159 - RNA, 19 nt, Variola virus
acguauacauuuaaugaau

SEQ ID NO: 4082160 - RNA, 17 nt, Variola virus
acguauugauaaauaga

SEQ ID NO: 4082161 - RNA, 21 nt, Variola virus
acgucaucgcuucaucuauca

SEQ ID NO: 4082162 - RNA, 19 nt, Variola virus
acguccaucagcauuguuu

SEQ ID NO: 4082163 - RNA, 21 nt, Variola virus
acgucuccaauauaugauaac

SEQ ID NO: 4082164 - RNA, 12 nt, Variola virus
acgucuguaguc

SEQ ID NO: 4082165 - RNA, 13 nt, Variola virus
acgugauagcucc

SEQ ID NO: 4082166 - RNA, 21 nt, Variola virus
acgugauggauauauuaaagu

SEQ ID NO: 4082167 - RNA, 23 nt, Variola virus
acgugucaauggcaguauuggga

SEQ ID NO: 4082168 - RNA, 22 nt, Variola virus
acguuuagccgccuuuaauaga

SEQ ID NO: 4082169 - RNA, 16 nt, Variola virus
acguuuauucucaaau

SEQ ID NO: 4082170 - RNA, 23 nt, Variola virus
acguuucauuuuuugucuauaau

SEQ ID NO: 4082171 - RNA, 19 nt, Variola virus
acguuucugucaacaaugu

SEQ ID NO: 4082172 - RNA, 13 nt, Variola virus
acuaaaacugaag

SEQ ID NO: 4082173 - RNA, 16 nt, Variola virus
acuaaacuaacuccuu

SEQ ID NO: 4082174 - RNA, 12 nt, Variola virus
acuaaagacuau

SEQ ID NO: 4082175 - RNA, 17 nt, Variola virus
acuaaauacauuaucau

SEQ ID NO: 4082176 - RNA, 14 nt, Variola virus
acuaaauccgagaa

SEQ ID NO: 4082177 - RNA, 15 nt, Variola virus
acuaaaucuucacau

SEQ ID NO: 4082178 - RNA, 14 nt, Variola virus
acuaaauugaacac

SEQ ID NO: 4082179 - RNA, 14 nt, Variola virus
acuaacacacaaug

SEQ ID NO: 4082180 - RNA, 13 nt, Variola virus
acuaacuauugaa

SEQ ID NO: 4082181 - RNA, 12 nt, Variola virus
acuaagaaaguu

SEQ ID NO: 4082182 - RNA, 21 nt, Variola virus
acuaauagaacaugugugaaa

SEQ ID NO: 4082183 - RNA, 23 nt, Variola virus
acuaauaucauuaguauacucua

SEQ ID NO: 4082184 - RNA, 18 nt, Variola virus
acuaauauuuuauuucaa

SEQ ID NO: 4082185 - RNA, 13 nt, Variola virus
acuaaucaaugaa

SEQ ID NO: 4082186 - RNA, 17 nt, Variola virus
acuaaucucuguaagau

SEQ ID NO: 4082187 - RNA, 20 nt, Variola virus
acuaauguauacauuuucca

SEQ ID NO: 4082188 - RNA, 15 nt, Variola virus
acuaauuauacuuug

SEQ ID NO: 4082189 - RNA, 20 nt, Variola virus
acuacaaagggaaaaugcua

SEQ ID NO: 4082190 - RNA, 16 nt, Variola virus
acuacaacuagugaag

SEQ ID NO: 4082191 - RNA, 12 nt, Variola virus
acuacaauaauu

SEQ ID NO: 4082192 - RNA, 22 nt, Variola virus
acuacauaaucuucgucuggaa

SEQ ID NO: 4082193 - RNA, 19 nt, Variola virus
acuaccgaguuuaaaacuu

SEQ ID NO: 4082194 - RNA, 14 nt, Variola virus
acuacuuuagaaga

SEQ ID NO: 4082195 - RNA, 18 nt, Variola virus
acuacuuuccuaucccuc

SEQ ID NO: 4082196 - RNA, 13 nt, Variola virus
acuagaagagaau

SEQ ID NO: 4082197 - RNA, 21 nt, Variola virus
acuagacguuuauucucaaau

SEQ ID NO: 4082198 - RNA, 23 nt, Variola virus
acuagaguaguauauugucacau

SEQ ID NO: 4082199 - RNA, 19 nt, Variola virus
acuagaguuguuaaaguua

SEQ ID NO: 4082200 - RNA, 20 nt, Variola virus
acuagauacaaaauuugcau

SEQ ID NO: 4082201 - RNA, 23 nt, Variola virus
acuaggaaauugguuuauaaugu

SEQ ID NO: 4082202 - RNA, 17 nt, Variola virus
acuaguaacagucugaa

SEQ ID NO: 4082203 - RNA, 23 nt, Variola virus
acuagugucuagcauuuuagagc

SEQ ID NO: 4082204 - RNA, 16 nt, Variola virus
acuaguuguagaauuu

SEQ ID NO: 4082205 - RNA, 17 nt, Variola virus
acuauaauaguacuaga

SEQ ID NO: 4082206 - RNA, 23 nt, Variola virus
acuauacauucuucuguuaauuu

SEQ ID NO: 4082207 - RNA, 16 nt, Variola virus
acuauacgaaauagau

SEQ ID NO: 4082208 - RNA, 15 nt, Variola virus
acuauagaucuuuca

SEQ ID NO: 4082209 - RNA, 16 nt, Variola virus
acuauauguaaauaau

SEQ ID NO: 4082210 - RNA, 21 nt, Variola virus
acuaucacuguagaaaaauuu

SEQ ID NO: 4082211 - RNA, 21 nt, Variola virus
acuaucauaauuaaauuauug

SEQ ID NO: 4082212 - RNA, 22 nt, Variola virus
acuauccaauaaacagucuuua

SEQ ID NO: 4082213 - RNA, 19 nt, Variola virus
acuaucguuggaaaaugau

SEQ ID NO: 4082214 - RNA, 21 nt, Variola virus
acuaucuccucuauucauaau

SEQ ID NO: 4082215 - RNA, 22 nt, Variola virus
acuaucugauaagauaucuucu

SEQ ID NO: 4082216 - RNA, 13 nt, Variola virus
acuaucuguaaaa

SEQ ID NO: 4082217 - RNA, 14 nt, Variola virus
acuaucuuuaacau

SEQ ID NO: 4082218 - RNA, 19 nt, Variola virus
acuaucuuuuuaggaaugu

SEQ ID NO: 4082219 - RNA, 20 nt, Variola virus
acuaugccaagcguaugcug

SEQ ID NO: 4082220 - RNA, 16 nt, Variola virus
acuauggcaauaauug

SEQ ID NO: 4082221 - RNA, 16 nt, Variola virus
acuauguguuaaaaga

SEQ ID NO: 4082222 - RNA, 12 nt, Variola virus
acuauuaaaacu

SEQ ID NO: 4082223 - RNA, 23 nt, Variola virus
acuauuaaaacuaacaaauccgu

SEQ ID NO: 4082224 - RNA, 13 nt, Variola virus
acuauuauugaag

SEQ ID NO: 4082225 - RNA, 16 nt, Variola virus
acuauuccaaaugaug

SEQ ID NO: 4082226 - RNA, 17 nt, Variola virus
acuauugacuuaauagg

SEQ ID NO: 4082227 - RNA, 12 nt, Variola virus
acuauugccauc

SEQ ID NO: 4082228 - RNA, 22 nt, Variola virus
acuauuuuaacgucuaaaugua

SEQ ID NO: 4082229 - RNA, 15 nt, Variola virus
acucauuaaaacuuc

SEQ ID NO: 4082230 - RNA, 22 nt, Variola virus
acucauuauuucccaaaauuug

SEQ ID NO: 4082231 - RNA, 18 nt, Variola virus
acucauugcuuucuagaa

SEQ ID NO: 4082232 - RNA, 18 nt, Variola virus
acuccagaacaucuucca

SEQ ID NO: 4082233 - RNA, 18 nt, Variola virus
acuccauccguaaaaaug

SEQ ID NO: 4082234 - RNA, 19 nt, Variola virus
acuccugguaauacugaug

SEQ ID NO: 4082235 - RNA, 22 nt, Variola virus
acucuaccaguuaagucaauaa

SEQ ID NO: 4082236 - RNA, 22 nt, Variola virus
acucuaucauggcaauaauaca

SEQ ID NO: 4082237 - RNA, 15 nt, Variola virus
acucucaaauuauua

SEQ ID NO: 4082238 - RNA, 20 nt, Variola virus
acucucuacccuaaacuuua

SEQ ID NO: 4082239 - RNA, 18 nt, Variola virus
acucucuauaacaaaugu

SEQ ID NO: 4082240 - RNA, 17 nt, Variola virus
acucugggucauauuau

SEQ ID NO: 4082241 - RNA, 13 nt, Variola virus
acucuuaauuaug

SEQ ID NO: 4082242 - RNA, 18 nt, Variola virus
acucuuggaauuaauagu

SEQ ID NO: 4082243 - RNA, 13 nt, Variola virus
acugaaacuauac

SEQ ID NO: 4082244 - RNA, 12 nt, Variola virus
aaaaaaauaaua

SEQ ID NO: 4082245 - RNA, 19 nt, Variola virus
aaaaacuguuuaacaaggu

SEQ ID NO: 4082246 - RNA, 18 nt, Variola virus
aaaaagacuaaaucuuca

SEQ ID NO: 4082247 - RNA, 20 nt, Variola virus
aaaaagcuccauauuacaaa

SEQ ID NO: 4082248 - RNA, 16 nt, Variola virus
aaaaaggagaauacua

SEQ ID NO: 4082249 - RNA, 15 nt, Variola virus
aaaaagugaaacaug

SEQ ID NO: 4082250 - RNA, 14 nt, Variola virus
aaaaauaauauuca

SEQ ID NO: 4082251 - RNA, 23 nt, Variola virus
aaaaauacaucuguuucagcuaa

SEQ ID NO: 4082252 - RNA, 12 nt, Variola virus
aaaaaucuguuu

SEQ ID NO: 4082253 - RNA, 20 nt, Variola virus
aaaaauuagaucaaagaaua

SEQ ID NO: 4082254 - RNA, 22 nt, Variola virus
aaaaauuauccuaucauguauu

SEQ ID NO: 4082255 - RNA, 20 nt, Variola virus
aaaaauugaauugaugauau

SEQ ID NO: 4082256 - RNA, 18 nt, Variola virus
aaaacauggauuugguaa

SEQ ID NO: 4082257 - RNA, 16 nt, Variola virus
aaaacauuaaucaaua

SEQ ID NO: 4082258 - RNA, 20 nt, Variola virus
aaaacauuauaauaauauaa

SEQ ID NO: 4082259 - RNA, 15 nt, Variola virus
aaaaccuaugauauc

SEQ ID NO: 4082260 - RNA, 15 nt, Variola virus
aaaacgauuaaacaa

SEQ ID NO: 4082261 - RNA, 19 nt, Variola virus
aaaacuuuuuagaaauguu

SEQ ID NO: 4082262 - RNA, 14 nt, Variola virus
aaaagaaaauuugu

SEQ ID NO: 4082263 - RNA, 20 nt, Variola virus
aaaagacuauacauuuccga

SEQ ID NO: 4082264 - RNA, 16 nt, Variola virus
aaaagauacguacugu

SEQ ID NO: 4082265 - RNA, 22 nt, Variola virus
aaaagauuuauaaugucuacau

SEQ ID NO: 4082266 - RNA, 17 nt, Variola virus
aaaaggucauaacaagu

SEQ ID NO: 4082267 - RNA, 19 nt, Variola virus
aaaaguacucaaucuguac

SEQ ID NO: 4082268 - RNA, 14 nt, Variola virus
aaaaguaggaauua

SEQ ID NO: 4082269 - RNA, 16 nt, Variola virus
aaaagugugcugauuu

SEQ ID NO: 4082270 - RNA, 12 nt, Variola virus
aaaaguuauuau

SEQ ID NO: 4082271 - RNA, 23 nt, Variola virus
aaaaguuuuccaucuauguagaa

SEQ ID NO: 4082272 - RNA, 13 nt, Variola virus
aaaauacauaaag

SEQ ID NO: 4082273 - RNA, 14 nt, Variola virus
aaaauauaaugaua

SEQ ID NO: 4082274 - RNA, 17 nt, Variola virus
aaaauauaguagaauuu

SEQ ID NO: 4082275 - RNA, 20 nt, Variola virus
aaaauaugaaauaaguacaa

SEQ ID NO: 4082276 - RNA, 13 nt, Variola virus
aaaauauguauaa

SEQ ID NO: 4082277 - RNA, 12 nt, Variola virus
aaaauauuagaa

SEQ ID NO: 4082278 - RNA, 18 nt, Variola virus
aaaauauuuauuagaaca

SEQ ID NO: 4082279 - RNA, 19 nt, Variola virus
aaaaucaauauaucaucua

SEQ ID NO: 4082280 - RNA, 16 nt, Variola virus
aaaaucauugggauuu

SEQ ID NO: 4082281 - RNA, 11 nt, Variola virus
aaaauccacuu

SEQ ID NO: 4082282 - RNA, 23 nt, Variola virus
aaaaugaaucuaaacaaaaucua

SEQ ID NO: 4082283 - RNA, 15 nt, Variola virus
aaaauggauuacuua

SEQ ID NO: 4082284 - RNA, 16 nt, Variola virus
aaaaugugauauagaa

SEQ ID NO: 4082285 - RNA, 11 nt, Variola virus
aaaauuauucu

SEQ ID NO: 4082286 - RNA, 18 nt, Variola virus
aaaauuauugauauguau

SEQ ID NO: 4082287 - RNA, 22 nt, Variola virus
aaaauucauuagaauauauguc

SEQ ID NO: 4082288 - RNA, 15 nt, Variola virus
aaaauuccuaaauua

SEQ ID NO: 4082289 - RNA, 17 nt, Variola virus
aaaauucuaagguagaa

SEQ ID NO: 4082290 - RNA, 12 nt, Variola virus
aaaauucuccac

SEQ ID NO: 4082291 - RNA, 20 nt, Variola virus
aaaauucuuaaaauaauuua

SEQ ID NO: 4082292 - RNA, 20 nt, Variola virus
aaaauuuaaagaauguauaa

SEQ ID NO: 4082293 - RNA, 18 nt, Variola virus
aaaauuuaagaaaaugau

SEQ ID NO: 4082294 - RNA, 21 nt, Variola virus
aaaauuuguauuuuuaaucua

SEQ ID NO: 4082295 - RNA, 16 nt, Variola virus
aaacaaaauuagaaag

SEQ ID NO: 4082296 - RNA, 14 nt, Variola virus
aaacaacauauaca

SEQ ID NO: 4082297 - RNA, 13 nt, Variola virus
agaaauauauauu

SEQ ID NO: 4082298 - RNA, 19 nt, Variola virus
agaaaucauccguuguuau

SEQ ID NO: 4082299 - RNA, 21 nt, Variola virus
agaaaucauguuauaguguuu

SEQ ID NO: 4082300 - RNA, 22 nt, Variola virus
agaaaugguaaauaaauacuuu

SEQ ID NO: 4082301 - RNA, 23 nt, Variola virus
agaaauuacauaaaaaaaaugua

SEQ ID NO: 4082302 - RNA, 14 nt, Variola virus
agaaauuauaacau

SEQ ID NO: 4082303 - RNA, 18 nt, Variola virus
agaaauuuaccaacgaua

SEQ ID NO: 4082304 - RNA, 16 nt, Variola virus
agaacaaaauaaacaa

SEQ ID NO: 4082305 - RNA, 18 nt, Variola virus
agaacaaaccaaauauau

SEQ ID NO: 4082306 - RNA, 16 nt, Variola virus
agaacaaauguuguag

SEQ ID NO: 4082307 - RNA, 17 nt, Variola virus
agaacaaugucaaaaua

SEQ ID NO: 4082308 - RNA, 15 nt, Variola virus
agaaccaaaugauua

SEQ ID NO: 4082309 - RNA, 17 nt, Variola virus
agaaccaguaacauaua

SEQ ID NO: 4082310 - RNA, 20 nt, Variola virus
agaacccauuagguuaaaug

SEQ ID NO: 4082311 - RNA, 13 nt, Variola virus
agaacccuuaaua

SEQ ID NO: 4082312 - RNA, 18 nt, Variola virus
agaacggagaauaucuau

SEQ ID NO: 4082313 - RNA, 13 nt, Variola virus
agaacguaaauua

SEQ ID NO: 4082314 - RNA, 17 nt, Variola virus
agaacuaccaauauguc

SEQ ID NO: 4082315 - RNA, 19 nt, Variola virus
agaacucuugaagaugauu

SEQ ID NO: 4082316 - RNA, 12 nt, Variola virus
agaacucuuuuc

SEQ ID NO: 4082317 - RNA, 22 nt, Variola virus
agaacuuaacuuuuucuuucuc

SEQ ID NO: 4082318 - RNA, 16 nt, Variola virus
agaacuuauuaaugaa

SEQ ID NO: 4082319 - RNA, 23 nt, Variola virus
agaagaauucaagucaggaacua

SEQ ID NO: 4082320 - RNA, 14 nt, Variola virus
agaaggaaacuucu

SEQ ID NO: 4082321 - RNA, 14 nt, Variola virus
agaaggaguguuuu

SEQ ID NO: 4082322 - RNA, 21 nt, Variola virus
agaaggauuggucuuaaaaga

SEQ ID NO: 4082323 - RNA, 16 nt, Variola virus
agaagucgucaagcau

SEQ ID NO: 4082324 - RNA, 18 nt, Variola virus
agaagugaguauacuugu

SEQ ID NO: 4082325 - RNA, 14 nt, Variola virus
agaaguuuuaucca

SEQ ID NO: 4082326 - RNA, 14 nt, Variola virus
agaauaaaaugauu

SEQ ID NO: 4082327 - RNA, 16 nt, Variola virus
agaauaauauacuucu

SEQ ID NO: 4082328 - RNA, 20 nt, Variola virus
agaauaccaguauuguuuaa

SEQ ID NO: 4082329 - RNA, 23 nt, Variola virus
agaauacgaugauauuaaaauua

SEQ ID NO: 4082330 - RNA, 21 nt, Variola virus
agaauagaaugcuaaugucaa

SEQ ID NO: 4082331 - RNA, 16 nt, Variola virus
agaauauaaauuauau

SEQ ID NO: 4082332 - RNA, 22 nt, Variola virus
agaauauaaauuauauauggau

SEQ ID NO: 4082333 - RNA, 12 nt, Variola virus
agaauauacucu

SEQ ID NO: 4082334 - RNA, 18 nt, Variola virus
agaauauacuuuguguuu

SEQ ID NO: 4082335 - RNA, 14 nt, Variola virus
agaauaucuauaca

SEQ ID NO: 4082336 - RNA, 21 nt, Variola virus
agaauaugucucuuaacuauu

SEQ ID NO: 4082337 - RNA, 13 nt, Variola virus
agaaucaaaggau

SEQ ID NO: 4082338 - RNA, 22 nt, Variola virus
agaaucaagcuaggcuggaaac

SEQ ID NO: 4082339 - RNA, 18 nt, Variola virus
agaaucaauauuaauauu

SEQ ID NO: 4082340 - RNA, 17 nt, Variola virus
agaaucagcucuagcua

SEQ ID NO: 4082341 - RNA, 19 nt, Variola virus
agaaucaugguauauggau

SEQ ID NO: 4082342 - RNA, 16 nt, Variola virus
agaauccauaaaacaa

SEQ ID NO: 4082343 - RNA, 17 nt, Variola virus
agaaugcauaaauuugu

SEQ ID NO: 4082344 - RNA, 20 nt, Variola virus
agaaugcucuuaaauaaugu

SEQ ID NO: 4082345 - RNA, 19 nt, Variola virus
agaaugcuguuauauacau

SEQ ID NO: 4082346 - RNA, 18 nt, Variola virus
agaauguuccuaauguau

SEQ ID NO: 4082347 - RNA, 19 nt, Variola virus
agaauuaaaucuaacgaga

SEQ ID NO: 4082348 - RNA, 19 nt, Variola virus
agaauuaacgaaacaaugu

SEQ ID NO: 4082349 - RNA, 19 nt, Variola virus
agaauuaauaggaacuauu

SEQ ID NO: 4082350 - RNA, 18 nt, Variola virus
agaauuaggagaacuuau

SEQ ID NO: 4082351 - RNA, 13 nt, Variola virus
agaauucuaaaug

SEQ ID NO: 4082352 - RNA, 21 nt, Variola virus
agaauugcaauuuugauguau

SEQ ID NO: 4082353 - RNA, 16 nt, Variola virus
agaauuucuacauaau

SEQ ID NO: 4082354 - RNA, 14 nt, Variola virus
agaauuucuguuca

SEQ ID NO: 4082355 - RNA, 21 nt, Variola virus
agacaaauggucaaugauaug

SEQ ID NO: 4082356 - RNA, 18 nt, Variola virus
agacaaugcuuuaauaaa

SEQ ID NO: 4082357 - RNA, 13 nt, Variola virus
agacacugucaca

SEQ ID NO: 4082358 - RNA, 15 nt, Variola virus
agacagagauacuaa

SEQ ID NO: 4082359 - RNA, 13 nt, Variola virus
agacauaauacua

SEQ ID NO: 4082360 - RNA, 17 nt, Variola virus
agacauaugauaaaacg

SEQ ID NO: 4082361 - RNA, 21 nt, Variola virus
agacaucaacacuuauauucu

SEQ ID NO: 4082362 - RNA, 22 nt, Variola virus
agacauuagaccguuuaauaga

SEQ ID NO: 4082363 - RNA, 14 nt, Variola virus
agacauucuaaauc

SEQ ID NO: 4082364 - RNA, 21 nt, Variola virus
agacauuguacaauauguguu

SEQ ID NO: 4082365 - RNA, 14 nt, Variola virus
agaccaauaauaaa

SEQ ID NO: 4082366 - RNA, 16 nt, Variola virus
agaccaucuaacagaa

SEQ ID NO: 4082367 - RNA, 22 nt, Variola virus
agacgaggagauuuagaaaugu

SEQ ID NO: 4082368 - RNA, 21 nt, Variola virus
agacgauccacaaucaaaaaa

SEQ ID NO: 4082369 - RNA, 19 nt, Variola virus
agacggauaagaaauauau

SEQ ID NO: 4082370 - RNA, 16 nt, Variola virus
agacguacuccagaua

SEQ ID NO: 4082371 - RNA, 13 nt, Variola virus
agacuaaagaaac

SEQ ID NO: 4082372 - RNA, 14 nt, Variola virus
agacuaugggaaua

SEQ ID NO: 4082373 - RNA, 20 nt, Variola virus
agacuaugucaaaguauuug

SEQ ID NO: 4082374 - RNA, 18 nt, Variola virus
agacuuacaggaauagau

SEQ ID NO: 4082375 - RNA, 16 nt, Variola virus
agacuuuaucuagauc

SEQ ID NO: 4082376 - RNA, 18 nt, Variola virus
agagaaaagucaauuaug

SEQ ID NO: 4082377 - RNA, 18 nt, Variola virus
agagaaggcuauaaagua

SEQ ID NO: 4082378 - RNA, 21 nt, Variola virus
agagaauugcugcaauauauu

SEQ ID NO: 4082379 - RNA, 17 nt, Variola virus
agagacaaaaugugaua

SEQ ID NO: 4082380 - RNA, 16 nt, Variola virus
agagacaaacuauuaa

SEQ ID NO: 4082381 - RNA, 17 nt, Variola virus
agagacggaaaaauagu

SEQ ID NO: 4082382 - RNA, 19 nt, Variola virus
agagacuuuauaacagaua

SEQ ID NO: 4082383 - RNA, 23 nt, Variola virus
agagauccacugucacuggaaag

SEQ ID NO: 4082384 - RNA, 20 nt, Variola virus
agagaucuucguuaaaaagu

SEQ ID NO: 4082385 - RNA, 14 nt, Variola virus
agagauuauaugau

SEQ ID NO: 4082386 - RNA, 12 nt, Variola virus
agagauuuuacu

SEQ ID NO: 4082387 - RNA, 13 nt, Variola virus
agagcaaacaucu

SEQ ID NO: 4082388 - RNA, 20 nt, Variola virus
agagcauauuucauuuccaa

SEQ ID NO: 4082389 - RNA, 22 nt, Variola virus
agaggaccguugggaauuuuau

SEQ ID NO: 4082390 - RNA, 13 nt, Variola virus
agaggauaaagua

SEQ ID NO: 4082391 - RNA, 15 nt, Variola virus
agaggauguuauuau

SEQ ID NO: 4082392 - RNA, 20 nt, Variola virus
agagguucccaauuccaaag

SEQ ID NO: 4082393 - RNA, 22 nt, Variola virus
agagguucccaauuccaaagau

SEQ ID NO: 4082394 - RNA, 21 nt, Variola virus
agaguauaaaacauuaaaugu

SEQ ID NO: 4082395 - RNA, 18 nt, Variola virus
agaguauuccaagaguuu

SEQ ID NO: 4082396 - RNA, 13 nt, Variola virus
agagucaauguuu

SEQ ID NO: 4082397 - RNA, 19 nt, Variola virus
agagugaucaaaucauuau

SEQ ID NO: 4082398 - RNA, 18 nt, Variola virus
agaguuaauaaauaucau

SEQ ID NO: 4082399 - RNA, 14 nt, Variola virus
agaguuuaauacua

SEQ ID NO: 4082400 - RNA, 16 nt, Variola virus
agaguuuccucauuau

SEQ ID NO: 4082401 - RNA, 12 nt, Variola virus
agauaaaacaag

SEQ ID NO: 4082402 - RNA, 19 nt, Variola virus
agauaaacuaggauuuaaa

SEQ ID NO: 4082403 - RNA, 13 nt, Variola virus
agauaaacuuuau

SEQ ID NO: 4082404 - RNA, 12 nt, Variola virus
agauaaauggaa

SEQ ID NO: 4082405 - RNA, 13 nt, Variola virus
agauaacaaccuu

SEQ ID NO: 4082406 - RNA, 15 nt, Variola virus
agauaauacaaaauu

SEQ ID NO: 4082407 - RNA, 13 nt, Variola virus
agauaaugauaua

SEQ ID NO: 4082408 - RNA, 14 nt, Variola virus
agauaaugugaauu

SEQ ID NO: 4082409 - RNA, 14 nt, Variola virus
agauacaaauaugu

SEQ ID NO: 4082410 - RNA, 23 nt, Variola virus
agauacaaauuuuaagaaauggu

SEQ ID NO: 4082411 - RNA, 22 nt, Variola virus
agauacuacaggaccguauuag

SEQ ID NO: 4082412 - RNA, 16 nt, Variola virus
agauacuaucaaaaua

SEQ ID NO: 4082413 - RNA, 19 nt, Variola virus
agauacuaucaaaauaucu

SEQ ID NO: 4082414 - RNA, 14 nt, Variola virus
agauacuguauaua

SEQ ID NO: 4082415 - RNA, 14 nt, Variola virus
agauagaaaugaau

SEQ ID NO: 4082416 - RNA, 18 nt, Variola virus
agauaguuuuaguuucca

SEQ ID NO: 4082417 - RNA, 20 nt, Variola virus
agauauaaaauagaaaauaa

SEQ ID NO: 4082418 - RNA, 23 nt, Variola virus
agauauacccgaagauauacaca

SEQ ID NO: 4082419 - RNA, 13 nt, Variola virus
agauauauauacu

SEQ ID NO: 4082420 - RNA, 15 nt, Variola virus
agauauauauacucu

SEQ ID NO: 4082421 - RNA, 14 nt, Variola virus
agauaucuucucaa

SEQ ID NO: 4082422 - RNA, 22 nt, Variola virus
agauaugauaaaacuauuguuu

SEQ ID NO: 4082423 - RNA, 20 nt, Variola virus
auaacaauaguuagauacaa

SEQ ID NO: 4082424 - RNA, 13 nt, Variola virus
auaacaauggcug

SEQ ID NO: 4082425 - RNA, 18 nt, Variola virus
auaacagcauuuguguag

SEQ ID NO: 4082426 - RNA, 22 nt, Variola virus
auaacagcuuagauuuaacguu

SEQ ID NO: 4082427 - RNA, 19 nt, Variola virus
auaacauguuaauuuccga

SEQ ID NO: 4082428 - RNA, 14 nt, Variola virus
auaacauuacuagu

SEQ ID NO: 4082429 - RNA, 18 nt, Variola virus
auaacauucuaggaaugu

SEQ ID NO: 4082430 - RNA, 22 nt, Variola virus
auaacauucuaggaauguuguu

SEQ ID NO: 4082431 - RNA, 18 nt, Variola virus
auaaccggcgcugucaug

SEQ ID NO: 4082432 - RNA, 19 nt, Variola virus
auaaccggcgcugucaugu

SEQ ID NO: 4082433 - RNA, 17 nt, Variola virus
auaaccuagaaaauaua

SEQ ID NO: 4082434 - RNA, 19 nt, Variola virus
auaaccucuccuauaugaa

SEQ ID NO: 4082435 - RNA, 21 nt, Variola virus
auaaccuuauuauuauaguac

SEQ ID NO: 4082436 - RNA, 18 nt, Variola virus
auaacguauuaaauauua

SEQ ID NO: 4082437 - RNA, 16 nt, Variola virus
auaacguuagccacca

SEQ ID NO: 4082438 - RNA, 20 nt, Variola virus
auaacguuaucauuuucuac

SEQ ID NO: 4082439 - RNA, 14 nt, Variola virus
auaacuaaaaaugu

SEQ ID NO: 4082440 - RNA, 15 nt, Variola virus
auaacuacauauucu

SEQ ID NO: 4082441 - RNA, 17 nt, Variola virus
auaacucugauuucuug

SEQ ID NO: 4082442 - RNA, 19 nt, Variola virus
auaacuggauauagaacug

SEQ ID NO: 4082443 - RNA, 16 nt, Variola virus
auaacuguuuagaaau

SEQ ID NO: 4082444 - RNA, 22 nt, Variola virus
auaacuuuuuaccucauaugaa

SEQ ID NO: 4082445 - RNA, 13 nt, Variola virus
auaagaaacaauu

SEQ ID NO: 4082446 - RNA, 14 nt, Variola virus
auaagaaacuauaa

SEQ ID NO: 4082447 - RNA, 16 nt, Variola virus
auaagaaauauauacu

SEQ ID NO: 4082448 - RNA, 16 nt, Variola virus
auaagaagagaaaagu

SEQ ID NO: 4082449 - RNA, 22 nt, Variola virus
auaagaguguaguaucauagau

SEQ ID NO: 4082450 - RNA, 22 nt, Variola virus
auaagcuauauaauaaauguau

SEQ ID NO: 4082451 - RNA, 15 nt, Variola virus
auaaguauuaucaaa

SEQ ID NO: 4082452 - RNA, 19 nt, Variola virus
auaagugcgaugauuguac

SEQ ID NO: 4082453 - RNA, 16 nt, Variola virus
auaauaaauuuuucca

SEQ ID NO: 4082454 - RNA, 18 nt, Variola virus
auaauaagaugcaaacau

SEQ ID NO: 4082455 - RNA, 22 nt, Variola virus
auaauaccuaucuauaagauua

SEQ ID NO: 4082456 - RNA, 15 nt, Variola virus
auaauacuauauaca

SEQ ID NO: 4082457 - RNA, 23 nt, Variola virus
auaauagguguaaaucuagaaau

SEQ ID NO: 4082458 - RNA, 12 nt, Variola virus
auaauauacaaa

SEQ ID NO: 4082459 - RNA, 20 nt, Variola virus
auaauauccauuuuguuuau

SEQ ID NO: 4082460 - RNA, 22 nt, Variola virus
auaauaucggucuuauucuuaa

SEQ ID NO: 4082461 - RNA, 17 nt, Variola virus
auaauaugacucaugau

SEQ ID NO: 4082462 - RNA, 21 nt, Variola virus
auaaucagucauaacaaaugu

SEQ ID NO: 4082463 - RNA, 14 nt, Variola virus
auaaucauaaauua

SEQ ID NO: 4082464 - RNA, 21 nt, Variola virus
auaaucccauucuaauacuuu

SEQ ID NO: 4082465 - RNA, 15 nt, Variola virus
auaauccuuguaaug

SEQ ID NO: 4082466 - RNA, 17 nt, Variola virus
auaaucgcuuuguuguu

SEQ ID NO: 4082467 - RNA, 16 nt, Variola virus
auaaucggagaauguu

SEQ ID NO: 4082468 - RNA, 19 nt, Variola virus
auaaucggguucugcuuca

SEQ ID NO: 4082469 - RNA, 18 nt, Variola virus
auaaucuaaaauaguucu

SEQ ID NO: 4082470 - RNA, 15 nt, Variola virus
auaaucuguguuguu

SEQ ID NO: 4082471 - RNA, 15 nt, Variola virus
auaaugauagaauua

SEQ ID NO: 4082472 - RNA, 14 nt, Variola virus
auaaugauauauau

SEQ ID NO: 4082473 - RNA, 15 nt, Variola virus
auaaugaucauauag

SEQ ID NO: 4082474 - RNA, 23 nt, Variola virus
auaauggugacaggguuagcauu

SEQ ID NO: 4082475 - RNA, 15 nt, Variola virus
auaaugugauuguau

SEQ ID NO: 4082476 - RNA, 13 nt, Variola virus
auaauguuucuau

SEQ ID NO: 4082477 - RNA, 18 nt, Variola virus
auaauuauuauaauacag

SEQ ID NO: 4082478 - RNA, 20 nt, Variola virus
auaauuauuucaauauacua

SEQ ID NO: 4082479 - RNA, 19 nt, Variola virus
auaauucauaagaaucuac

SEQ ID NO: 4082480 - RNA, 21 nt, Variola virus
auaauucuccagucgaaacau

SEQ ID NO: 4082481 - RNA, 15 nt, Variola virus
auaauucuucuguau

SEQ ID NO: 4082482 - RNA, 19 nt, Variola virus
auaauucuuuauaacugaa

SEQ ID NO: 4082483 - RNA, 19 nt, Variola virus
auaauugagauugauguaa

SEQ ID NO: 4082484 - RNA, 17 nt, Variola virus
auaauuuagauacuuua

SEQ ID NO: 4082485 - RNA, 21 nt, Variola virus
auaauuugaccugauuacauu

SEQ ID NO: 4082486 - RNA, 17 nt, Variola virus
auaauuuguauauacau

SEQ ID NO: 4082487 - RNA, 11 nt, Variola virus
auaauuuuacc

SEQ ID NO: 4082488 - RNA, 12 nt, Variola virus
auaauuuuacca

SEQ ID NO: 4082489 - RNA, 13 nt, Variola virus
auaauuuugugaa

SEQ ID NO: 4082490 - RNA, 18 nt, Variola virus
auaauuuuuggacaaaug

SEQ ID NO: 4082491 - RNA, 14 nt, Variola virus
auacaaaaguuaau

SEQ ID NO: 4082492 - RNA, 15 nt, Variola virus
auacaaaauaauaga

SEQ ID NO: 4082493 - RNA, 17 nt, Variola virus
auacaaaauuuucaguu

SEQ ID NO: 4082494 - RNA, 20 nt, Variola virus
auacaacgugaaauacuuua

SEQ ID NO: 4082495 - RNA, 14 nt, Variola virus
auacaauaaauguu

SEQ ID NO: 4082496 - RNA, 17 nt, Variola virus
auacaaucguucaaacu

SEQ ID NO: 4082497 - RNA, 18 nt, Variola virus
auacaauggaauacuuca

SEQ ID NO: 4082498 - RNA, 16 nt, Variola virus
auacacacaaaguaau

SEQ ID NO: 4082499 - RNA, 21 nt, Variola virus
auacacaugauugacaaauua

SEQ ID NO: 4082500 - RNA, 23 nt, Variola virus
auacacguuagauuauucucaaa

SEQ ID NO: 4082501 - RNA, 19 nt, Variola virus
auacauaauucuucuguua

SEQ ID NO: 4082502 - RNA, 22 nt, Variola virus
auacauagaguuaagagaaauu

SEQ ID NO: 4082503 - RNA, 14 nt, Variola virus
auacauauuguuua

SEQ ID NO: 4082504 - RNA, 22 nt, Variola virus
auacaucggcuaccaaaguuau

SEQ ID NO: 4082505 - RNA, 19 nt, Variola virus
auacauuauuacuaaacau

SEQ ID NO: 4082506 - RNA, 21 nt, Variola virus
auacauugaucuauguaguuu

SEQ ID NO: 4082507 - RNA, 14 nt, Variola virus
auaccaaucauuua

SEQ ID NO: 4082508 - RNA, 18 nt, Variola virus
auaccaucgauuguuuau

SEQ ID NO: 4082509 - RNA, 14 nt, Variola virus
auaccauuucuagu

SEQ ID NO: 4082510 - RNA, 17 nt, Variola virus
auacccuccuguauaug

SEQ ID NO: 4082511 - RNA, 19 nt, Variola virus
auaccuuuaacuucuggaa

SEQ ID NO: 4082512 - RNA, 19 nt, Variola virus
auaccuuuccuggaauauc

SEQ ID NO: 4082513 - RNA, 23 nt, Variola virus
auaccuuugguucuuuaaaagaa

SEQ ID NO: 4082514 - RNA, 14 nt, Variola virus
auacgaaaauagau

SEQ ID NO: 4082515 - RNA, 23 nt, Variola virus
auacgaagacagacauacaguag

SEQ ID NO: 4082516 - RNA, 14 nt, Variola virus
auacgauuaauagc

SEQ ID NO: 4082517 - RNA, 17 nt, Variola virus
auacgcauguagaaugu

SEQ ID NO: 4082518 - RNA, 19 nt, Variola virus
auacguaaaacucauuacu

SEQ ID NO: 4082519 - RNA, 19 nt, Variola virus
auacguaaacuuuaauagu

SEQ ID NO: 4082520 - RNA, 14 nt, Variola virus
auacguaaugaagu

SEQ ID NO: 4082521 - RNA, 15 nt, Variola virus
auacgucaaggaaag

SEQ ID NO: 4082522 - RNA, 13 nt, Variola virus
auacuaaagaaac

SEQ ID NO: 4082523 - RNA, 18 nt, Variola virus
auacuaauacuaauacua

SEQ ID NO: 4082524 - RNA, 21 nt, Variola virus
auacuacuacuuguaagaaug

SEQ ID NO: 4082525 - RNA, 23 nt, Variola virus
auacuauccaucagaauguuucc

SEQ ID NO: 4082526 - RNA, 21 nt, Variola virus
auacucccuugcaucauauac

SEQ ID NO: 4082527 - RNA, 14 nt, Variola virus
auacucuaaucuuu

SEQ ID NO: 4082528 - RNA, 16 nt, Variola virus
auacucuauucgaaaa

SEQ ID NO: 4082529 - RNA, 17 nt, Variola virus
auacugaguuggcuaug

SEQ ID NO: 4082530 - RNA, 18 nt, Variola virus
auacugcaauaaaacauu

SEQ ID NO: 4082531 - RNA, 16 nt, Variola virus
auacugucgaauuuga

SEQ ID NO: 4082532 - RNA, 14 nt, Variola virus
auacuuaaaaaugg

SEQ ID NO: 4082533 - RNA, 22 nt, Variola virus
auacuucauuucuaaaauagua

SEQ ID NO: 4082534 - RNA, 18 nt, Variola virus
auacuuuaaagcaaaaug

SEQ ID NO: 4082535 - RNA, 21 nt, Variola virus
auacuuuaaagcaaaaugguu

SEQ ID NO: 4082536 - RNA, 13 nt, Variola virus
auacuuuaacauc

SEQ ID NO: 4082537 - RNA, 21 nt, Variola virus
auacuuuguaaucuagacaua

SEQ ID NO: 4082538 - RNA, 13 nt, Variola virus
auagaaaaugauu

SEQ ID NO: 4082539 - RNA, 14 nt, Variola virus
auagaaacauauau

SEQ ID NO: 4082540 - RNA, 16 nt, Variola virus
auagaagauauuacau

SEQ ID NO: 4082541 - RNA, 23 nt, Variola virus
auagaagauguuagaaaaaugau

SEQ ID NO: 4082542 - RNA, 13 nt, Variola virus
auagacaaaauag

SEQ ID NO: 4082543 - RNA, 16 nt, Variola virus
auagacauugaaaaug

SEQ ID NO: 4082544 - RNA, 15 nt, Variola virus
auagagaacauaaug

SEQ ID NO: 4082545 - RNA, 23 nt, Variola virus
auagagccaagacgaacaaaauc

SEQ ID NO: 4082546 - RNA, 22 nt, Variola virus
auagagcccacguuuaaacauu

SEQ ID NO: 4082547 - RNA, 17 nt, Variola virus
auagagcccguaaaugc

SEQ ID NO: 4082548 - RNA, 22 nt, Variola virus
auguguguccggaguuagaaag

SEQ ID NO: 4082549 - RNA, 18 nt, Variola virus
auguguuuuaauauauau

SEQ ID NO: 4082550 - RNA, 20 nt, Variola virus
auguuaaaacuacaaaaaug

SEQ ID NO: 4082551 - RNA, 22 nt, Variola virus
auguuaauaacaucagaaaaug

SEQ ID NO: 4082552 - RNA, 22 nt, Variola virus
auguuaauugggguauuaauaa

SEQ ID NO: 4082553 - RNA, 17 nt, Variola virus
auguuagaaaaaugaug

SEQ ID NO: 4082554 - RNA, 18 nt, Variola virus
auguuagagaauauucaa

SEQ ID NO: 4082555 - RNA, 22 nt, Variola virus
auguuauagaauauaaauuaua

SEQ ID NO: 4082556 - RNA, 12 nt, Variola virus
auguucaagcag

SEQ ID NO: 4082557 - RNA, 14 nt, Variola virus
auguugauaaaaug

SEQ ID NO: 4082558 - RNA, 15 nt, Variola virus
auguuggaaauacua

SEQ ID NO: 4082559 - RNA, 16 nt, Variola virus
auguuguuaaaauaua

SEQ ID NO: 4082560 - RNA, 21 nt, Variola virus
auguuuauuagcguacacauu

SEQ ID NO: 4082561 - RNA, 21 nt, Variola virus
auguuugauaaaaauauguau

SEQ ID NO: 4082562 - RNA, 13 nt, Variola virus
auguuuguaucau

SEQ ID NO: 4082563 - RNA, 18 nt, Variola virus
auguuuucugucagaaaa

SEQ ID NO: 4082564 - RNA, 23 nt, Variola virus
auuaaaaacaaacuuuuuauccu

SEQ ID NO: 4082565 - RNA, 16 nt, Variola virus
auuaaaaguuaaugag

SEQ ID NO: 4082566 - RNA, 21 nt, Variola virus
auuaaaauucuuaaaauaauu

SEQ ID NO: 4082567 - RNA, 23 nt, Variola virus
auuaaacuuaccacguaaaacuu

SEQ ID NO: 4082568 - RNA, 21 nt, Variola virus
auuaaaggcuuuuuauaucau

SEQ ID NO: 4082569 - RNA, 18 nt, Variola virus
auuaaaguuaaauugugu

SEQ ID NO: 4082570 - RNA, 18 nt, Variola virus
auuaaauagaauauuuaa

SEQ ID NO: 4082571 - RNA, 16 nt, Variola virus
auuaaauauuaaugag

SEQ ID NO: 4082572 - RNA, 17 nt, Variola virus
auuaaauauuuuaaaau

SEQ ID NO: 4082573 - RNA, 17 nt, Variola virus
auuaaaucuuucauuuc

SEQ ID NO: 4082574 - RNA, 19 nt, Variola virus
auuaaauguauauuuucca

SEQ ID NO: 4082575 - RNA, 14 nt, Variola virus
auuaaauuauugau

SEQ ID NO: 4082576 - RNA, 16 nt, Variola virus
auuaaauuauugauau

SEQ ID NO: 4082577 - RNA, 19 nt, Variola virus
auuaacaaaagugaauaua

SEQ ID NO: 4082578 - RNA, 23 nt, Variola virus
auuaacacuccggaaaaauaauu

SEQ ID NO: 4082579 - RNA, 15 nt, Variola virus
auuaacagaaaaaac

SEQ ID NO: 4082580 - RNA, 20 nt, Variola virus
auuaacagauuaguaugaag

SEQ ID NO: 4082581 - RNA, 19 nt, Variola virus
auuaacaucuugaaccauu

SEQ ID NO: 4082582 - RNA, 18 nt, Variola virus
auuaacgaguucaaauau

SEQ ID NO: 4082583 - RNA, 17 nt, Variola virus
auuaacggguucucaau

SEQ ID NO: 4082584 - RNA, 22 nt, Variola virus
auuaacuacggauaacaaaaua

SEQ ID NO: 4082585 - RNA, 14 nt, Variola virus
auuaacuaucugua

SEQ ID NO: 4082586 - RNA, 18 nt, Variola virus
auuaacuucguuauuuau

SEQ ID NO: 4082587 - RNA, 22 nt, Variola virus
auuaagaacccguuuauacagu

SEQ ID NO: 4082588 - RNA, 15 nt, Variola virus
auuaagacauauauu

SEQ ID NO: 4082589 - RNA, 15 nt, Variola virus
auuaaguaaauccuu

SEQ ID NO: 4082590 - RNA, 12 nt, Variola virus
auuaaguucuuu

SEQ ID NO: 4082591 - RNA, 17 nt, Variola virus
auuaauaaugucuauau

SEQ ID NO: 4082592 - RNA, 18 nt, Variola virus
auuaauaauuguuuugaa

SEQ ID NO: 4082593 - RNA, 14 nt, Variola virus
auuaauacauuauu

SEQ ID NO: 4082594 - RNA, 19 nt, Variola virus
auuaauaguuuuauuugaa

SEQ ID NO: 4082595 - RNA, 18 nt, Variola virus
auuaauauuuaguaauua

SEQ ID NO: 4082596 - RNA, 13 nt, Variola virus
auuaaucauauac

SEQ ID NO: 4082597 - RNA, 18 nt, Variola virus
auuaaugggcuuaguaaa

SEQ ID NO: 4082598 - RNA, 14 nt, Variola virus
auuaauuaauacaa

SEQ ID NO: 4082599 - RNA, 12 nt, Variola virus
auuacaaacaug

SEQ ID NO: 4082600 - RNA, 14 nt, Variola virus
auuacaaaccuguc

SEQ ID NO: 4082601 - RNA, 16 nt, Variola virus
auuacaauacauagau

SEQ ID NO: 4082602 - RNA, 19 nt, Variola virus
auuaccacagccguauuuu

SEQ ID NO: 4082603 - RNA, 23 nt, Variola virus
auuaccauagaagauguuagaaa

SEQ ID NO: 4082604 - RNA, 18 nt, Variola virus
auuaccaucguuguugaa

SEQ ID NO: 4082605 - RNA, 13 nt, Variola virus
auuaccuuaauaa

SEQ ID NO: 4082606 - RNA, 13 nt, Variola virus
auuacguauuaua

SEQ ID NO: 4082607 - RNA, 14 nt, Variola virus
auuacuaaacauuu

SEQ ID NO: 4082608 - RNA, 23 nt, Variola virus
auuacuaucuuuaacauauguau

SEQ ID NO: 4082609 - RNA, 18 nt, Variola virus
auuacucuccuagguuuc

SEQ ID NO: 4082610 - RNA, 20 nt, Variola virus
auuacugcaacguucauaga

SEQ ID NO: 4082611 - RNA, 13 nt, Variola virus
auuacugcauauu

SEQ ID NO: 4082612 - RNA, 13 nt, Variola virus
auuacugucucca

SEQ ID NO: 4082613 - RNA, 12 nt, Variola virus
auuacuuaaaaa

SEQ ID NO: 4082614 - RNA, 13 nt, Variola virus
auuagaaauggau

SEQ ID NO: 4082615 - RNA, 14 nt, Variola virus
auuagacauuuaac

SEQ ID NO: 4082616 - RNA, 19 nt, Variola virus
auuagacguaguuuaucau

SEQ ID NO: 4082617 - RNA, 16 nt, Variola virus
auuagagguaaugaug

SEQ ID NO: 4082618 - RNA, 16 nt, Variola virus
auuagagguaugggau

SEQ ID NO: 4082619 - RNA, 15 nt, Variola virus
auuagaugagaaauu

SEQ ID NO: 4082620 - RNA, 19 nt, Variola virus
auuagauuauaucauaaau

SEQ ID NO: 4082621 - RNA, 22 nt, Variola virus
auuagcggcauaggaacauuuc

SEQ ID NO: 4082622 - RNA, 20 nt, Variola virus
auuaggcaugucgauggcaa

SEQ ID NO: 4082623 - RNA, 19 nt, Variola virus
auuaguaacgacuauuaaa

SEQ ID NO: 4082624 - RNA, 22 nt, Variola virus
auuaguaaggcuuuagaaacuu

SEQ ID NO: 4082625 - RNA, 15 nt, Variola virus
auuagugacggaaaa

SEQ ID NO: 4082626 - RNA, 13 nt, Variola virus
auuaguuaaauau

SEQ ID NO: 4082627 - RNA, 12 nt, Variola virus
auuaguuauuau

SEQ ID NO: 4082628 - RNA, 22 nt, Variola virus
auuaguuuccuuguuuagagau

SEQ ID NO: 4082629 - RNA, 18 nt, Variola virus
auuauaauaguuuaucau

SEQ ID NO: 4082630 - RNA, 15 nt, Variola virus
auuauaauauuuccu

SEQ ID NO: 4082631 - RNA, 13 nt, Variola virus
auuauaauuauua

SEQ ID NO: 4082632 - RNA, 14 nt, Variola virus
auuauaauuauuau

SEQ ID NO: 4082633 - RNA, 15 nt, Variola virus
auuauacaaaaauuu

SEQ ID NO: 4082634 - RNA, 14 nt, Variola virus
auuauacacauuau

SEQ ID NO: 4082635 - RNA, 12 nt, Variola virus
auuauaccaaaa

SEQ ID NO: 4082636 - RNA, 15 nt, Variola virus
auuauaccaauagau

SEQ ID NO: 4082637 - RNA, 15 nt, Variola virus
auuauaccuaaugag

SEQ ID NO: 4082638 - RNA, 18 nt, Variola virus
auuauacuuugguaaaug

SEQ ID NO: 4082639 - RNA, 13 nt, Variola virus
auuauagauguau

SEQ ID NO: 4082640 - RNA, 15 nt, Variola virus
auuauagauguguau

SEQ ID NO: 4082641 - RNA, 14 nt, Variola virus
auuauauauggauu

SEQ ID NO: 4082642 - RNA, 16 nt, Variola virus
auuauaucguuaucau

SEQ ID NO: 4082643 - RNA, 19 nt, Variola virus
auuauauucucaucuauca

SEQ ID NO: 4082644 - RNA, 13 nt, Variola virus
auuaucaaaauua

SEQ ID NO: 4082645 - RNA, 18 nt, Variola virus
auuaucaaaauuuggaaa

SEQ ID NO: 4082646 - RNA, 15 nt, Variola virus
auuaucaagaugugu

SEQ ID NO: 4082647 - RNA, 12 nt, Variola virus
auuaucaguaau

SEQ ID NO: 4082648 - RNA, 14 nt, Variola virus
auuauccaauagau

SEQ ID NO: 4082649 - RNA, 17 nt, Variola virus
auuauccaucuaacaaa

SEQ ID NO: 4082650 - RNA, 23 nt, Variola virus
auuaucguuccugguauauagau

SEQ ID NO: 4082651 - RNA, 21 nt, Variola virus
auuaugaaaauuauaaugaau

SEQ ID NO: 4082652 - RNA, 15 nt, Variola virus
auuaugauagaaauu

SEQ ID NO: 4082653 - RNA, 22 nt, Variola virus
auuaugaucuugauuuauagau

SEQ ID NO: 4082654 - RNA, 17 nt, Variola virus
auuaugaugauacauuu

SEQ ID NO: 4082655 - RNA, 17 nt, Variola virus
auuaugcaaauuugaau

SEQ ID NO: 4082656 - RNA, 20 nt, Variola virus
auuaugucucugaacuauau

SEQ ID NO: 4082657 - RNA, 12 nt, Variola virus
auuauuaaauau

SEQ ID NO: 4082658 - RNA, 16 nt, Variola virus
auuauuaauaugagug

SEQ ID NO: 4082659 - RNA, 17 nt, Variola virus
auuauuaaucagaauac

SEQ ID NO: 4082660 - RNA, 13 nt, Variola virus
auuauuacagagu

SEQ ID NO: 4082661 - RNA, 19 nt, Variola virus
auuauucagauacgucuau

SEQ ID NO: 4082662 - RNA, 12 nt, Variola virus
auuauucauuuu

SEQ ID NO: 4082663 - RNA, 18 nt, Variola virus
auuauucuacuaucaaag

SEQ ID NO: 4082664 - RNA, 21 nt, Variola virus
auuauucuuuggauccaaaug

SEQ ID NO: 4082665 - RNA, 23 nt, Variola virus
auuauugaacaggcauugcuaaa

SEQ ID NO: 4082666 - RNA, 20 nt, Variola virus
auuauugaguuaaaaucagu

SEQ ID NO: 4082667 - RNA, 13 nt, Variola virus
auuauugaugcaa

SEQ ID NO: 4082668 - RNA, 13 nt, Variola virus
auuauugcauaua

SEQ ID NO: 4082669 - RNA, 14 nt, Variola virus
auuauuuauaccuc

SEQ ID NO: 4082670 - RNA, 14 nt, Variola virus
auuauuucuaaauu

SEQ ID NO: 4082671 - RNA, 22 nt, Variola virus
auuauuuuaauuucugaugugc

SEQ ID NO: 4082672 - RNA, 21 nt, Variola virus
auuauuuugugcaaauagaug

SEQ ID NO: 4082673 - RNA, 21 nt, Variola virus
auuauuuuucaccauauagau

SEQ ID NO: 4082674 - RNA, 13 nt, Variola virus
auucaauaacuaa

SEQ ID NO: 4082675 - RNA, 18 nt, Variola virus
ggaaauguuauagaaaau

SEQ ID NO: 4082676 - RNA, 16 nt, Variola virus
ggaacaguaaugauug

SEQ ID NO: 4082677 - RNA, 22 nt, Variola virus
ggaacaguucuaccaccaguaa

SEQ ID NO: 4082678 - RNA, 18 nt, Variola virus
ggaacgugauaguuucuc

SEQ ID NO: 4082679 - RNA, 14 nt, Variola virus
ggaagaguaggaag

SEQ ID NO: 4082680 - RNA, 18 nt, Variola virus
ggaauaaauuauuaucca

SEQ ID NO: 4082681 - RNA, 21 nt, Variola virus
ggaauuaaucuaguagaaaag

SEQ ID NO: 4082682 - RNA, 14 nt, Variola virus
ggaauuguauuuuc

SEQ ID NO: 4082683 - RNA, 20 nt, Variola virus
ggacaaaauccauauuucuu

SEQ ID NO: 4082684 - RNA, 16 nt, Variola virus
ggacaaauucuuuuga

SEQ ID NO: 4082685 - RNA, 16 nt, Variola virus
ggacagcuauauucuc

SEQ ID NO: 4082686 - RNA, 21 nt, Variola virus
ggacaucaacgccuuagaaau

SEQ ID NO: 4082687 - RNA, 23 nt, Variola virus
ggaccuaaaucuaacauugauuu

SEQ ID NO: 4082688 - RNA, 17 nt, Variola virus
ggaccuauaauugauua

SEQ ID NO: 4082689 - RNA, 22 nt, Variola virus
ggacuacuuauucuauuuuaca

SEQ ID NO: 4082690 - RNA, 23 nt, Variola virus
ggagaauacaaagcguacagaua

SEQ ID NO: 4082691 - RNA, 12 nt, Variola virus
ggagaauguuuc

SEQ ID NO: 4082692 - RNA, 15 nt, Variola virus
ggagaucuaaagaua

SEQ ID NO: 4082693 - RNA, 20 nt, Variola virus
ggauaauuuuaccagaauac

SEQ ID NO: 4082694 - RNA, 18 nt, Variola virus
ggauaggagauuguauug

SEQ ID NO: 4082695 - RNA, 20 nt, Variola virus
ggauauaaacuaauauggau

SEQ ID NO: 4082696 - RNA, 23 nt, Variola virus
ggauaucuuagugcaaaaguaua

SEQ ID NO: 4082697 - RNA, 21 nt, Variola virus
ggauauuuguucauuggauug

SEQ ID NO: 4082698 - RNA, 22 nt, Variola virus
ggaucacaacaauuuauuucua

SEQ ID NO: 4082699 - RNA, 14 nt, Variola virus
ggaugauaugaaga

SEQ ID NO: 4082700 - RNA, 20 nt, Variola virus
ggauuagaauccauaaaaca

SEQ ID NO: 4082701 - RNA, 18 nt, Variola virus
ggauuaucaaaucuuuaa

SEQ ID NO: 4082702 - RNA, 22 nt, Variola virus
ggauuauuuuuauuauauucag

SEQ ID NO: 4082703 - RNA, 21 nt, Variola virus
ggauucauccuuaaauguuuu

SEQ ID NO: 4082704 - RNA, 18 nt, Variola virus
ggauuuggucauaauaga

SEQ ID NO: 4082705 - RNA, 23 nt, Variola virus
ggauuuuauucguagaaaguauc

SEQ ID NO: 4082706 - RNA, 16 nt, Variola virus
ggauuuuguauuaccu

SEQ ID NO: 4082707 - RNA, 13 nt, Variola virus
ggcaaaagaauac

SEQ ID NO: 4082708 - RNA, 17 nt, Variola virus
ggcaaagucaaaugauu

SEQ ID NO: 4082709 - RNA, 11 nt, Variola virus
ggcaucuuuuu

SEQ ID NO: 4082710 - RNA, 15 nt, Variola virus
ggccguuuguuuccu

SEQ ID NO: 4082711 - RNA, 19 nt, Variola virus
gggacgcguauauguuucu

SEQ ID NO: 4082712 - RNA, 14 nt, Variola virus
ggguuguaaacaac

SEQ ID NO: 4082713 - RNA, 23 nt, Variola virus
gguaacauuauagauucuuuuaa

SEQ ID NO: 4082714 - RNA, 19 nt, Variola virus
gguaaggucuuagaaauag

SEQ ID NO: 4082715 - RNA, 18 nt, Variola virus
gguauuggcgauugauuu

SEQ ID NO: 4082716 - RNA, 13 nt, Variola virus
ggucaauagcgac

SEQ ID NO: 4082717 - RNA, 16 nt, Variola virus
ggucuuaguauuuuua

SEQ ID NO: 4082718 - RNA, 14 nt, Variola virus
gguggauauuucug

SEQ ID NO: 4082719 - RNA, 22 nt, Variola virus
gguugccgcaaauagauagaac

SEQ ID NO: 4082720 - RNA, 15 nt, Variola virus
gguuuaaagaaauac

SEQ ID NO: 4082721 - RNA, 13 nt, Variola virus
guaaaaaauguac

SEQ ID NO: 4082722 - RNA, 16 nt, Variola virus
guaaaacaaaauuaga

SEQ ID NO: 4082723 - RNA, 14 nt, Variola virus
guaaaauaaucaua

SEQ ID NO: 4082724 - RNA, 22 nt, Variola virus
guaaaauggccaagaaaauaga

SEQ ID NO: 4082725 - RNA, 22 nt, Variola virus
guaaacauugacggauaaaaca

SEQ ID NO: 4082726 - RNA, 23 nt, Variola virus
guaaacauugacggauaaaacaa

SEQ ID NO: 4082727 - RNA, 18 nt, Variola virus
guaaaccgauuaaacguc

SEQ ID NO: 4082728 - RNA, 19 nt, Variola virus
guaaacuucgcguauacag

SEQ ID NO: 4082729 - RNA, 17 nt, Variola virus
guaaagcguuaaaucaa

SEQ ID NO: 4082730 - RNA, 21 nt, Variola virus
guaaauagaauaguauaaugu

SEQ ID NO: 4082731 - RNA, 13 nt, Variola virus
guaaauaguuuua

SEQ ID NO: 4082732 - RNA, 16 nt, Variola virus
guaaauccuaguucug

SEQ ID NO: 4082733 - RNA, 19 nt, Variola virus
guaaauguuuaauguuuua

SEQ ID NO: 4082734 - RNA, 13 nt, Variola virus
guaacacuuuuaa

SEQ ID NO: 4082735 - RNA, 17 nt, Variola virus
guaacuauguaaaugau

SEQ ID NO: 4082736 - RNA, 14 nt, Variola virus
guaagcauuuccuu

SEQ ID NO: 4082737 - RNA, 17 nt, Variola virus
guaauaauuuauguauu

SEQ ID NO: 4082738 - RNA, 16 nt, Variola virus
guaauacccauguuua

SEQ ID NO: 4082739 - RNA, 15 nt, Variola virus
guaauaucugauuua

SEQ ID NO: 4082740 - RNA, 22 nt, Variola virus
guaauauuguuaauuauuucua

SEQ ID NO: 4082741 - RNA, 16 nt, Variola virus
guaauuaauuguuuua

SEQ ID NO: 4082742 - RNA, 18 nt, Variola virus
guacaaacaggauaucua

SEQ ID NO: 4082743 - RNA, 12 nt, Variola virus
guacaaucagau

SEQ ID NO: 4082744 - RNA, 19 nt, Variola virus
guacagaauuaauuagacg

SEQ ID NO: 4082745 - RNA, 21 nt, Variola virus
guacagcguaguacauggcau

SEQ ID NO: 4082746 - RNA, 12 nt, Variola virus
guacauaauaga

SEQ ID NO: 4082747 - RNA, 21 nt, Variola virus
guacauuagccggacaaauau

SEQ ID NO: 4082748 - RNA, 19 nt, Variola virus
guacauugcucguaaaaga

SEQ ID NO: 4082749 - RNA, 18 nt, Variola virus
guacauuuuuaaacuguu

SEQ ID NO: 4082750 - RNA, 13 nt, Variola virus
guaccaaauuaau

SEQ ID NO: 4082751 - RNA, 17 nt, Variola virus
guacccacugaugagau

SEQ ID NO: 4082752 - RNA, 22 nt, Variola virus
guaccuaucaaggaacaaauau

SEQ ID NO: 4082753 - RNA, 18 nt, Variola virus
guaccuauucuagaaaau

SEQ ID NO: 4082754 - RNA, 18 nt, Variola virus
guacuacugaagaacuaa

SEQ ID NO: 4082755 - RNA, 13 nt, Variola virus
guacuauaauauu

SEQ ID NO: 4082756 - RNA, 14 nt, Variola virus
guacucuuaagaga

SEQ ID NO: 4082757 - RNA, 17 nt, Variola virus
guacuucucccauaaua

SEQ ID NO: 4082758 - RNA, 17 nt, Variola virus
guacuuugaugauuuuu

SEQ ID NO: 4082759 - RNA, 21 nt, Variola virus
guagaaacuauacgaaauaga

SEQ ID NO: 4082760 - RNA, 17 nt, Variola virus
guagaauuuuuuaaaaa

SEQ ID NO: 4082761 - RNA, 13 nt, Variola virus
guaguaacucuaa

SEQ ID NO: 4082762 - RNA, 16 nt, Variola virus
guagucaauaaaagag

SEQ ID NO: 4082763 - RNA, 19 nt, Variola virus
guagugaugguuuucuaaa

SEQ ID NO: 4082764 - RNA, 20 nt, Variola virus
guagugcgggcuuaaagcaa

SEQ ID NO: 4082765 - RNA, 17 nt, Variola virus
guaguugcguauuucuc

SEQ ID NO: 4082766 - RNA, 22 nt, Variola virus
guauaauagaccacgauaauau

SEQ ID NO: 4082767 - RNA, 18 nt, Variola virus
guauaauauuuaaacaau

SEQ ID NO: 4082768 - RNA, 23 nt, Variola virus
guauagaguuugcggauaaugau

SEQ ID NO: 4082769 - RNA, 14 nt, Variola virus
guauauaguuuaua

SEQ ID NO: 4082770 - RNA, 22 nt, Variola virus
guauaucaacaucuaccuuauu

SEQ ID NO: 4082771 - RNA, 15 nt, Variola virus
guauaucuauaucaa

SEQ ID NO: 4082772 - RNA, 13 nt, Variola virus
guauauguuucua

SEQ ID NO: 4082773 - RNA, 15 nt, Variola virus
guaucauuuaaacau

SEQ ID NO: 4082774 - RNA, 23 nt, Variola virus
guauccacuuuaauaauaucaua

SEQ ID NO: 4082775 - RNA, 15 nt, Variola virus
guauccguauaaaaa

SEQ ID NO: 4082776 - RNA, 19 nt, Variola virus
guaucgacgguaaauggaa

SEQ ID NO: 4082777 - RNA, 14 nt, Variola virus
guauuaauacauca

SEQ ID NO: 4082778 - RNA, 14 nt, Variola virus
guauuaguaggaaa

SEQ ID NO: 4082779 - RNA, 14 nt, Variola virus
guauuauauaugua

SEQ ID NO: 4082780 - RNA, 20 nt, Variola virus
guauucaguagccaauccua

SEQ ID NO: 4082781 - RNA, 14 nt, Variola virus
guauucuaauuuua

SEQ ID NO: 4082782 - RNA, 23 nt, Variola virus
guauucucagaguugacgaauau

SEQ ID NO: 4082783 - RNA, 13 nt, Variola virus
guauugauaaaau

SEQ ID NO: 4082784 - RNA, 18 nt, Variola virus
guauuguuuaauaaaaca

SEQ ID NO: 4082785 - RNA, 10 nt, Variola virus
guauuuccau

SEQ ID NO: 4082786 - RNA, 13 nt, Variola virus
guauuugauuuug

SEQ ID NO: 4082787 - RNA, 22 nt, Variola virus
guauuuggaucuuuuguacauc

SEQ ID NO: 4082788 - RNA, 22 nt, Variola virus
guauuuuaacacuaauuaagau

SEQ ID NO: 4082789 - RNA, 22 nt, Variola virus
guauuuuuuaugacaaacuuua

SEQ ID NO: 4082790 - RNA, 16 nt, Variola virus
gucaaaaucuaaacaa

SEQ ID NO: 4082791 - RNA, 19 nt, Variola virus
gucaaauuuaucuauuuua

SEQ ID NO: 4082792 - RNA, 22 nt, Variola virus
gucaacaaguuggaugauauua

SEQ ID NO: 4082793 - RNA, 12 nt, Variola virus
gucaauaaaaga

SEQ ID NO: 4082794 - RNA, 12 nt, Variola virus
gucaaucauguu

SEQ ID NO: 4082795 - RNA, 17 nt, Variola virus
gucaauuauuucaucaa

SEQ ID NO: 4082796 - RNA, 13 nt, Variola virus
gucaauugauucu

SEQ ID NO: 4082797 - RNA, 20 nt, Variola virus
gucaauuggaguaucaucua

SEQ ID NO: 4082798 - RNA, 16 nt, Variola virus
gucacauaguguuuua

SEQ ID NO: 4082799 - RNA, 20 nt, Variola virus
gucacauaucgcuacaaaac

SEQ ID NO: 4082800 - RNA, 16 nt, Variola virus
gucacguuuauacauc

SEQ ID NO: 4082801 - RNA, 15 nt, Variola virus
uaccuagaacaaugu

SEQ ID NO: 4082802 - RNA, 16 nt, Variola virus
uaccuagaacaauguc

SEQ ID NO: 4082803 - RNA, 20 nt, Variola virus
uaccuauauucuugauguag

SEQ ID NO: 4082804 - RNA, 19 nt, Variola virus
uaccuauuaauacaucgua

SEQ ID NO: 4082805 - RNA, 16 nt, Variola virus
uaccucuucugauauc

SEQ ID NO: 4082806 - RNA, 15 nt, Variola virus
uaccuggaauguaaa

SEQ ID NO: 4082807 - RNA, 19 nt, Variola virus
uaccuggaauguaaagccc

SEQ ID NO: 4082808 - RNA, 11 nt, Variola virus
uaccuguuuuu

SEQ ID NO: 4082809 - RNA, 19 nt, Variola virus
uaccuugaaaauaaauaca

SEQ ID NO: 4082810 - RNA, 15 nt, Variola virus
uaccuuuaaaauaua

SEQ ID NO: 4082811 - RNA, 18 nt, Variola virus
uaccuuucuacaugaaau

SEQ ID NO: 4082812 - RNA, 16 nt, Variola virus
uacgaacaauaucuua

SEQ ID NO: 4082813 - RNA, 20 nt, Variola virus
uacgaagggauugaaaauag

SEQ ID NO: 4082814 - RNA, 15 nt, Variola virus
uacgaggauucaaaa

SEQ ID NO: 4082815 - RNA, 14 nt, Variola virus
uacgauacuuauaa

SEQ ID NO: 4082816 - RNA, 22 nt, Variola virus
uacgcauucacucauacaugua

SEQ ID NO: 4082817 - RNA, 15 nt, Variola virus
uacgcgcacacaaua

SEQ ID NO: 4082818 - RNA, 17 nt, Variola virus
uacggauaucuaauaau

SEQ ID NO: 4082819 - RNA, 12 nt, Variola virus
uacguaaagaag

SEQ ID NO: 4082820 - RNA, 17 nt, Variola virus
uacguaucaccaacgga

SEQ ID NO: 4082821 - RNA, 20 nt, Variola virus
uacgucagcugcaucuaaau

SEQ ID NO: 4082822 - RNA, 20 nt, Variola virus
uacuaaaucuguauaucuuu

SEQ ID NO: 4082823 - RNA, 22 nt, Variola virus
uacuaauaggucuaaaaaccaa

SEQ ID NO: 4082824 - RNA, 23 nt, Variola virus
uacuacaauacgguuuaccgaaa

SEQ ID NO: 4082825 - RNA, 15 nt, Variola virus
uacuacuauuauuga

SEQ ID NO: 4082826 - RNA, 16 nt, Variola virus
uacuacuuuaccaaaa

SEQ ID NO: 4082827 - RNA, 17 nt, Variola virus
uacuaggagaauuauuu

SEQ ID NO: 4082828 - RNA, 17 nt, Variola virus
uacuauaauaguacuag

SEQ ID NO: 4082829 - RNA, 19 nt, Variola virus
uacuauauacaauaucacu

SEQ ID NO: 4082830 - RNA, 16 nt, Variola virus
uacuauccaucagaau

SEQ ID NO: 4082831 - RNA, 16 nt, Variola virus
uacuauuacagaaguu

SEQ ID NO: 4082832 - RNA, 17 nt, Variola virus
uacucaaucaauagcaa

SEQ ID NO: 4082833 - RNA, 15 nt, Variola virus
uacucagaggauuac

SEQ ID NO: 4082834 - RNA, 21 nt, Variola virus
uacucagauucaguuucucau

SEQ ID NO: 4082835 - RNA, 20 nt, Variola virus
uacucuuggucuaauacuga

SEQ ID NO: 4082836 - RNA, 22 nt, Variola virus
uacugaagaagaaaacaaacau

SEQ ID NO: 4082837 - RNA, 23 nt, Variola virus
uacugagaauuaacgaaacaaug

SEQ ID NO: 4082838 - RNA, 22 nt, Variola virus
uacuguuaaauguacuguauau

SEQ ID NO: 4082839 - RNA, 13 nt, Variola virus
uacuuacaucauu

SEQ ID NO: 4082840 - RNA, 13 nt, Variola virus
uacuuauguaugu

SEQ ID NO: 4082841 - RNA, 16 nt, Variola virus
uacuucucccauaaua

SEQ ID NO: 4082842 - RNA, 17 nt, Variola virus
uacuugaaauucuccag

SEQ ID NO: 4082843 - RNA, 19 nt, Variola virus
uacuugacugacuuaaaac

SEQ ID NO: 4082844 - RNA, 14 nt, Variola virus
uacuugauaagaua

SEQ ID NO: 4082845 - RNA, 22 nt, Variola virus
uacuuuaacauguguauuacau

SEQ ID NO: 4082846 - RNA, 18 nt, Variola virus
uacuuuauaauuaaugaa

SEQ ID NO: 4082847 - RNA, 23 nt, Variola virus
uacuuuaugaauggauaccugua

SEQ ID NO: 4082848 - RNA, 19 nt, Variola virus
uacuuucaaugagauaaau

SEQ ID NO: 4082849 - RNA, 15 nt, Variola virus
uacuuugacaaaugu

SEQ ID NO: 4082850 - RNA, 10 nt, Variola virus
uacuuuucua

SEQ ID NO: 4082851 - RNA, 16 nt, Variola virus
uacuuuuguuacuaau

SEQ ID NO: 4082852 - RNA, 14 nt, Variola virus
uacuuuuuacuaau

SEQ ID NO: 4082853 - RNA, 21 nt, Variola virus
uagaaaaaauuacuccaugga

SEQ ID NO: 4082854 - RNA, 19 nt, Variola virus
uagaaaaacuauaucuaug

SEQ ID NO: 4082855 - RNA, 22 nt, Variola virus
uagaaaacagagauaguaaaua

SEQ ID NO: 4082856 - RNA, 15 nt, Variola virus
uagaaaaucauacag

SEQ ID NO: 4082857 - RNA, 18 nt, Variola virus
uagaaaaugauucacaau

SEQ ID NO: 4082858 - RNA, 13 nt, Variola virus
uagaaaauggauu

SEQ ID NO: 4082859 - RNA, 21 nt, Variola virus
uagaaaccacggaucguaaua

SEQ ID NO: 4082860 - RNA, 17 nt, Variola virus
uagaaacuucaaagauu

SEQ ID NO: 4082861 - RNA, 21 nt, Variola virus
uagaaagcagauuagaugaca

SEQ ID NO: 4082862 - RNA, 18 nt, Variola virus
uagaaauaaaaauuauua

SEQ ID NO: 4082863 - RNA, 14 nt, Variola virus
uagaaaucaacaau

SEQ ID NO: 4082864 - RNA, 14 nt, Variola virus
uagaaaucauauau

SEQ ID NO: 4082865 - RNA, 12 nt, Variola virus
uagaaauuauuu

SEQ ID NO: 4082866 - RNA, 12 nt, Variola virus
uagaacaaaaua

SEQ ID NO: 4082867 - RNA, 13 nt, Variola virus
uagaacaacucuc

SEQ ID NO: 4082868 - RNA, 18 nt, Variola virus
uagaacaaugucaaaaua

SEQ ID NO: 4082869 - RNA, 14 nt, Variola virus
uagaacagaaauac

SEQ ID NO: 4082870 - RNA, 18 nt, Variola virus
uagaacagauuuaacaau

SEQ ID NO: 4082871 - RNA, 14 nt, Variola virus
uagaacauguguga

SEQ ID NO: 4082872 - RNA, 14 nt, Variola virus
uagaacucuuuuca

SEQ ID NO: 4082873 - RNA, 23 nt, Variola virus
uagaacuguagagggucaacaau

SEQ ID NO: 4082874 - RNA, 13 nt, Variola virus
uagaagagaauac

SEQ ID NO: 4082875 - RNA, 17 nt, Variola virus
uagaauauuguaacaau

SEQ ID NO: 4082876 - RNA, 19 nt, Variola virus
uagaauguauuuuaacacu

SEQ ID NO: 4082877 - RNA, 22 nt, Variola virus
uagaauuuauagacgacucauu

SEQ ID NO: 4082878 - RNA, 16 nt, Variola virus
uagaauuugaucuauu

SEQ ID NO: 4082879 - RNA, 15 nt, Variola virus
uagacauaauacuau

SEQ ID NO: 4082880 - RNA, 18 nt, Variola virus
uagacauuagauaugcca

SEQ ID NO: 4082881 - RNA, 13 nt, Variola virus
uagacauuuacca

SEQ ID NO: 4082882 - RNA, 13 nt, Variola virus
uagacgaugauuu

SEQ ID NO: 4082883 - RNA, 18 nt, Variola virus
uagacgguuccaaagauc

SEQ ID NO: 4082884 - RNA, 16 nt, Variola virus
uagacuugauuauucu

SEQ ID NO: 4082885 - RNA, 14 nt, Variola virus
uagacuuguuaaua

SEQ ID NO: 4082886 - RNA, 20 nt, Variola virus
uagacuuuaauggauauaca

SEQ ID NO: 4082887 - RNA, 14 nt, Variola virus
uagagaacauaaug

SEQ ID NO: 4082888 - RNA, 16 nt, Variola virus
uagagauaaaacaagu

SEQ ID NO: 4082889 - RNA, 22 nt, Variola virus
uagagauaaaacaaguuuucau

SEQ ID NO: 4082890 - RNA, 19 nt, Variola virus
uagagauaccaaagacuuu

SEQ ID NO: 4082891 - RNA, 12 nt, Variola virus
uagagaugaugc

SEQ ID NO: 4082892 - RNA, 14 nt, Variola virus
uagaggagaaguaa

SEQ ID NO: 4082893 - RNA, 22 nt, Variola virus
uagauaauaauaucguccuuaa

SEQ ID NO: 4082894 - RNA, 13 nt, Variola virus
uagauacaaaauc

SEQ ID NO: 4082895 - RNA, 20 nt, Variola virus
uagauacauuggccguaaua

SEQ ID NO: 4082896 - RNA, 21 nt, Variola virus
uagauacucuaccauuucugc

SEQ ID NO: 4082897 - RNA, 16 nt, Variola virus
uagauagaaauuuaua

SEQ ID NO: 4082898 - RNA, 14 nt, Variola virus
uagauauuaaacaa

SEQ ID NO: 4082899 - RNA, 17 nt, Variola virus
uagauauuaguaaauua

SEQ ID NO: 4082900 - RNA, 13 nt, Variola virus
uagaucaaacuua

SEQ ID NO: 4082901 - RNA, 17 nt, Variola virus
uagaucgucauauguca

SEQ ID NO: 4082902 - RNA, 14 nt, Variola virus
uagaucucuagaau

SEQ ID NO: 4082903 - RNA, 14 nt, Variola virus
uagaugaauuauua

SEQ ID NO: 4082904 - RNA, 15 nt, Variola virus
uagaugagaacagaa

SEQ ID NO: 4082905 - RNA, 20 nt, Variola virus
uagauguuaaaaaaacaucg

SEQ ID NO: 4082906 - RNA, 19 nt, Variola virus
uagauuauaucauaaauaa

SEQ ID NO: 4082907 - RNA, 17 nt, Variola virus
uagauuaugaagaauac

SEQ ID NO: 4082908 - RNA, 16 nt, Variola virus
uagauuauucuuaaau

SEQ ID NO: 4082909 - RNA, 17 nt, Variola virus
uagauucagaaaugcua

SEQ ID NO: 4082910 - RNA, 23 nt, Variola virus
uagauucuauugugucuguuaau

SEQ ID NO: 4082911 - RNA, 14 nt, Variola virus
uagauuguuuucag

SEQ ID NO: 4082912 - RNA, 13 nt, Variola virus
uagauuuacuaau

SEQ ID NO: 4082913 - RNA, 15 nt, Variola virus
uagauuuauuugaua

SEQ ID NO: 4082914 - RNA, 16 nt, Variola virus
uagauuucgaaaauac

SEQ ID NO: 4082915 - RNA, 13 nt, Variola virus
uagauuuuggaua

SEQ ID NO: 4082916 - RNA, 14 nt, Variola virus
uagcauaaaugcua

SEQ ID NO: 4082917 - RNA, 17 nt, Variola virus
uagcaugugguucuuca

SEQ ID NO: 4082918 - RNA, 18 nt, Variola virus
uagccgcgguaacuuuua

SEQ ID NO: 4082919 - RNA, 20 nt, Variola virus
uagcguguuuuaaauccuua

SEQ ID NO: 4082920 - RNA, 21 nt, Variola virus
uagcuaaagauuugucacaau

SEQ ID NO: 4082921 - RNA, 15 nt, Variola virus
uagcuaaugaugcag

SEQ ID NO: 4082922 - RNA, 21 nt, Variola virus
uagcuaucgguuuugucagau

SEQ ID NO: 4082923 - RNA, 18 nt, Variola virus
uagcuccccuguuuucau

SEQ ID NO: 4082924 - RNA, 18 nt, Variola virus
uagcucuguauucuguau

SEQ ID NO: 4082925 - RNA, 20 nt, Variola virus
uagcugaaacaaagaauugc

SEQ ID NO: 4082926 - RNA, 15 nt, Variola virus
uagcugaauguuaua

SEQ ID NO: 4082927 - RNA, 23 nt, Variola virus
uaggaaaacccucacacauaaac

SEQ ID NO: 4082928 - RNA, 20 nt, Variola virus
uuuucaauuaugcaucaaua

SEQ ID NO: 4082929 - RNA, 21 nt, Variola virus
uuuucacuuuuuauaauuuua

SEQ ID NO: 4082930 - RNA, 14 nt, Variola virus
uuuucaucauuuca

SEQ ID NO: 4082931 - RNA, 13 nt, Variola virus
uuuucaucuuuua

SEQ ID NO: 4082932 - RNA, 15 nt, Variola virus
uuuucggguuccaaa

SEQ ID NO: 4082933 - RNA, 22 nt, Variola virus
uuuucuacugaugcauguauuu

SEQ ID NO: 4082934 - RNA, 16 nt, Variola virus
uuuugauacuauccaa

SEQ ID NO: 4082935 - RNA, 23 nt, Variola virus
uuuuguucacaaaaauacauaaa

SEQ ID NO: 4082936 - RNA, 17 nt, Variola virus
uuuuguucuauaaacug

SEQ ID NO: 4082937 - RNA, 21 nt, Variola virus
uuuuuagaaaaaacaucauuu

SEQ ID NO: 4082938 - RNA, 23 nt, Variola virus
uuuuuagccggaauaacaucauc

SEQ ID NO: 4082939 - RNA, 19 nt, Variola virus
uuuuuauaaaaaaaucauu

SEQ ID NO: 4082940 - RNA, 23 nt, Variola virus
uuuuuauucaugguaucauagaa

SEQ ID NO: 4082941 - RNA, 15 nt, Variola virus
uuuuucaaauucuca

SEQ ID NO: 4082942 - RNA, 12 nt, Variola virus
uuuuucagauuu

SEQ ID NO: 4082943 - RNA, 16 nt, Variola virus
uuuuucaguuaucauc

SEQ ID NO: 4082944 - RNA, 23 nt, Variola virus
uuuuucguuuacaaaaucaaaua

SEQ ID NO: 4082945 - RNA, 19 nt, Variola virus
uuuuucuucauuuauuaua

SEQ ID NO: 4082946 - RNA, 22 nt, Variola virus
uuuuugugggaagugauucaaa

SEQ ID NO: 4082947 - RNA, 18 nt, Variola virus
uuuuuuagauguaguauc

SEQ ID NO: 4082948 - RNA, 11 nt, Variola virus
uuuuuuggaau

SEQ ID NO: 4082949 - RNA, 24 nt, Variola virus
aagacgagaucugaauggugaguu

SEQ ID NO: 4082950 - RNA, 14 nt, Variola virus
aagacggggauuuc

SEQ ID NO: 4082951 - RNA, 19 nt, Variola virus
aagacuccuaccgguguau

SEQ ID NO: 4082952 - RNA, 22 nt, Variola virus
aagaguuucaaaaauauucauu

SEQ ID NO: 4082953 - RNA, 13 nt, Variola virus
aagauaaugugaa

SEQ ID NO: 4082954 - RNA, 14 nt, Variola virus
aagauaaugugaau

SEQ ID NO: 4082955 - RNA, 21 nt, Variola virus
aagauacucuaccagcuaaag

SEQ ID NO: 4082956 - RNA, 14 nt, Variola virus
aagauauaaaugac

SEQ ID NO: 4082957 - RNA, 20 nt, Variola virus
aagauauagaugaggugguu

SEQ ID NO: 4082958 - RNA, 17 nt, Variola virus
aagauaugguaaaauua

SEQ ID NO: 4082959 - RNA, 19 nt, Variola virus
aagauauucuaaaauggua

SEQ ID NO: 4082960 - RNA, 17 nt, Variola virus
aagauauuuuucuaagc

SEQ ID NO: 4082961 - RNA, 23 nt, Variola virus
aagaucacuaauucuagucuuua

SEQ ID NO: 4082962 - RNA, 14 nt, Variola virus
aagaugaaaugauu

SEQ ID NO: 4082963 - RNA, 16 nt, Variola virus
aagaugagcauaaaca

SEQ ID NO: 4082964 - RNA, 16 nt, Variola virus
aagaugauauaaguua

SEQ ID NO: 4082965 - RNA, 19 nt, Variola virus
aagaugaugaaucuucauu

SEQ ID NO: 4082966 - RNA, 17 nt, Variola virus
aagaugcaaacauuaug

SEQ ID NO: 4082967 - RNA, 22 nt, Variola virus
aagaugcaaacauuauguagua

SEQ ID NO: 4082968 - RNA, 18 nt, Variola virus
aagauggaguauaaucuu

SEQ ID NO: 4082969 - RNA, 21 nt, Variola virus
aagauguuuucugucagaaaa

SEQ ID NO: 4082970 - RNA, 13 nt, Variola virus
aagauuaggaaau

SEQ ID NO: 4082971 - RNA, 16 nt, Variola virus
aagauucuacaaguaa

SEQ ID NO: 4082972 - RNA, 14 nt, Variola virus
aagauuguguagaa

SEQ ID NO: 4082973 - RNA, 15 nt, Variola virus
aagauuuaaauccua

SEQ ID NO: 4082974 - RNA, 13 nt, Variola virus
aagauuuguagaa

SEQ ID NO: 4082975 - RNA, 22 nt, Variola virus
aagcauauucuuaauauuagaa

SEQ ID NO: 4082976 - RNA, 22 nt, Variola virus
aagccacguaggaguuaucaca

SEQ ID NO: 4082977 - RNA, 18 nt, Variola virus
aagccuuaugcauccaaa

SEQ ID NO: 4082978 - RNA, 20 nt, Variola virus
aagcguguaaacgaaaacua

SEQ ID NO: 4082979 - RNA, 19 nt, Variola virus
aagcgugucccuaucuugu

SEQ ID NO: 4082980 - RNA, 21 nt, Variola virus
aaggaaugggguauggagaca

SEQ ID NO: 4082981 - RNA, 19 nt, Variola virus
aaggauaaaauauuaucca

SEQ ID NO: 4082982 - RNA, 14 nt, Variola virus
aaggaugauacauu

SEQ ID NO: 4082983 - RNA, 23 nt, Variola virus
aaggaugcaaacuuacagaaaca

SEQ ID NO: 4082984 - RNA, 18 nt, Variola virus
aaggauucauugacauau

SEQ ID NO: 4082985 - RNA, 20 nt, Variola virus
aaggcaacaaagaaauuuuu

SEQ ID NO: 4082986 - RNA, 12 nt, Variola virus
aaggcagaaaua

SEQ ID NO: 4082987 - RNA, 15 nt, Variola virus
aaggcuuuaaaagua

SEQ ID NO: 4082988 - RNA, 12 nt, Variola virus
aaguaaauacug

SEQ ID NO: 4082989 - RNA, 11 nt, Variola virus
aaguaaaugaa

SEQ ID NO: 4082990 - RNA, 14 nt, Variola virus
aaguacagaauuaa

SEQ ID NO: 4082991 - RNA, 20 nt, Variola virus
aaguagaucaucugaaaauc

SEQ ID NO: 4082992 - RNA, 13 nt, Variola virus
aaguauaaauacc

SEQ ID NO: 4082993 - RNA, 11 nt, Variola virus
aaguauaacga

SEQ ID NO: 4082994 - RNA, 20 nt, Variola virus
aaguauagcuaaugaugcag

SEQ ID NO: 4082995 - RNA, 21 nt, Variola virus
aaguauauaugagauacacgu

SEQ ID NO: 4082996 - RNA, 15 nt, Variola virus
aaguauuuauacaaa

SEQ ID NO: 4082997 - RNA, 19 nt, Variola virus
aaguauuugaacauguaga

SEQ ID NO: 4082998 - RNA, 20 nt, Variola virus
aaguauuugaacauguagau

SEQ ID NO: 4082999 - RNA, 16 nt, Variola virus
aagucacuaacugaua

SEQ ID NO: 4083000 - RNA, 19 nt, Variola virus
aagucugauauucagaaag

SEQ ID NO: 4083001 - RNA, 18 nt, Variola virus
aagucugcuaucagugau

SEQ ID NO: 4083002 - RNA, 21 nt, Variola virus
aagugacauuauaauuuuacc

SEQ ID NO: 4083003 - RNA, 20 nt, Variola virus
aagugaguauacuugucauc

SEQ ID NO: 4083004 - RNA, 21 nt, Variola virus
aaguuaucucuaacaaaacua

SEQ ID NO: 4083005 - RNA, 18 nt, Variola virus
aaguucauaaaaauaaua

SEQ ID NO: 4083006 - RNA, 20 nt, Variola virus
aaguuccuccuuguauuugu

SEQ ID NO: 4083007 - RNA, 19 nt, Variola virus
aaguuucaagauaaauaau

SEQ ID NO: 4083008 - RNA, 17 nt, Variola virus
aaguuucguacaaauac

SEQ ID NO: 4083009 - RNA, 23 nt, Variola virus
aaguuucuuuacuguaucuacua

SEQ ID NO: 4083010 - RNA, 21 nt, Variola virus
aaguuugaaacgagugaaaaa

SEQ ID NO: 4083011 - RNA, 19 nt, Variola virus
aaguuugagauuucauaau

SEQ ID NO: 4083012 - RNA, 19 nt, Variola virus
aaguuuggguaaauaacua

SEQ ID NO: 4083013 - RNA, 22 nt, Variola virus
aaguuuuaucucuuucucucuu

SEQ ID NO: 4083014 - RNA, 16 nt, Variola virus
aaguuuuuauucucuu

SEQ ID NO: 4083015 - RNA, 14 nt, Variola virus
aauaaaaauguuuu

SEQ ID NO: 4083016 - RNA, 12 nt, Variola virus
aauaaaauggau

SEQ ID NO: 4083017 - RNA, 20 nt, Variola virus
aauaaaauguuaauacauca

SEQ ID NO: 4083018 - RNA, 17 nt, Variola virus
aauaaacguucacguaa

SEQ ID NO: 4083019 - RNA, 18 nt, Variola virus
aauaaacuagaaaaacuu

SEQ ID NO: 4083020 - RNA, 16 nt, Variola virus
aauaaacuauuucuaa

SEQ ID NO: 4083021 - RNA, 15 nt, Variola virus
aauaaauaacaaugg

SEQ ID NO: 4083022 - RNA, 18 nt, Variola virus
aauaaauagauauaaaau

SEQ ID NO: 4083023 - RNA, 17 nt, Variola virus
aauaaauauaacuuauu

SEQ ID NO: 4083024 - RNA, 22 nt, Variola virus
aauaaauggagaauaauuggaa

SEQ ID NO: 4083025 - RNA, 20 nt, Variola virus
aauaaauguccacuauacau

SEQ ID NO: 4083026 - RNA, 21 nt, Variola virus
aauaaauuuucucuuaaaaau

SEQ ID NO: 4083027 - RNA, 13 nt, Variola virus
aauaacaggcuaa

SEQ ID NO: 4083028 - RNA, 19 nt, Variola virus
aauaacauaggauuaaaaa

SEQ ID NO: 4083029 - RNA, 15 nt, Variola virus
aauaacuaugauauc

SEQ ID NO: 4083030 - RNA, 14 nt, Variola virus
aauaagaacaaagu

SEQ ID NO: 4083031 - RNA, 23 nt, Variola virus
aauaagagcagcacaaacucauu

SEQ ID NO: 4083032 - RNA, 22 nt, Variola virus
aauaagcuauauaauaaaugua

SEQ ID NO: 4083033 - RNA, 19 nt, Variola virus
aauaaguuuuagauauuca

SEQ ID NO: 4083034 - RNA, 18 nt, Variola virus
aaugccacaucaaagaua

SEQ ID NO: 4083035 - RNA, 22 nt, Variola virus
aaugcgacgaguuagaaagaua

SEQ ID NO: 4083036 - RNA, 17 nt, Variola virus
aaugcgaggaaauguau

SEQ ID NO: 4083037 - RNA, 17 nt, Variola virus
aaugcggauuuagaaaa

SEQ ID NO: 4083038 - RNA, 20 nt, Variola virus
aaugcuaauauauucuuaca

SEQ ID NO: 4083039 - RNA, 13 nt, Variola virus
aaugcuaauguuc

SEQ ID NO: 4083040 - RNA, 17 nt, Variola virus
aaugcucaguaaaugua

SEQ ID NO: 4083041 - RNA, 18 nt, Variola virus
aauggauauucgaacauu

SEQ ID NO: 4083042 - RNA, 22 nt, Variola virus
aauggauuuugaugauauuaaa

SEQ ID NO: 4083043 - RNA, 22 nt, Variola virus
aauggcaauaacuaaaaaugua

SEQ ID NO: 4083044 - RNA, 21 nt, Variola virus
aaugguacuucuuaccaacau

SEQ ID NO: 4083045 - RNA, 18 nt, Variola virus
aaugguuucgaagaucuu

SEQ ID NO: 4083046 - RNA, 12 nt, Variola virus
aauguaaagaua

SEQ ID NO: 4083047 - RNA, 13 nt, Variola virus
aauguaacaucua

SEQ ID NO: 4083048 - RNA, 17 nt, Variola virus
aauguaaucauauaaau

SEQ ID NO: 4083049 - RNA, 14 nt, Variola virus
aauguaauucuaaa

SEQ ID NO: 4083050 - RNA, 12 nt, Variola virus
aauguauaacag

SEQ ID NO: 4083051 - RNA, 16 nt, Variola virus
aauguauacaaaugua

SEQ ID NO: 4083052 - RNA, 21 nt, Variola virus
aauguaugaacaucauggaau

SEQ ID NO: 4083053 - RNA, 18 nt, Variola virus
aauguauuaguaggaaau

SEQ ID NO: 4083054 - RNA, 22 nt, Variola virus
aauguauuaguuaaauauuaaa

SEQ ID NO: 4083055 - RNA, 14 nt, Variola virus
aauguccacaaaug

SEQ ID NO: 4083056 - RNA, 22 nt, Variola virus
aaugugaauuuagcauauagua

SEQ ID NO: 4083057 - RNA, 22 nt, Variola virus
aaugugguaugucuccauuaca

SEQ ID NO: 4083058 - RNA, 18 nt, Variola virus
aauguuagaauuagaaaa

SEQ ID NO: 4083059 - RNA, 15 nt, Variola virus
aauguuauagaaaau

SEQ ID NO: 4083060 - RNA, 15 nt, Variola virus
aauguucucaagaac

SEQ ID NO: 4083061 - RNA, 20 nt, Variola virus
aauguugauaaaaugcauga

SEQ ID NO: 4083062 - RNA, 17 nt, Variola virus
aauguuugaaaacauua

SEQ ID NO: 4083063 - RNA, 15 nt, Variola virus
aauuaaaaaucgaua

SEQ ID NO: 4083064 - RNA, 22 nt, Variola virus
aauuaauuuuuccuuacacaau

SEQ ID NO: 4083065 - RNA, 15 nt, Variola virus
aauuacacauuucca

SEQ ID NO: 4083066 - RNA, 20 nt, Variola virus
aauuacgacgagcauauuca

SEQ ID NO: 4083067 - RNA, 19 nt, Variola virus
aauuacgcucuacaaaaug

SEQ ID NO: 4083068 - RNA, 15 nt, Variola virus
aauuacuaaaauaua

SEQ ID NO: 4083069 - RNA, 15 nt, Variola virus
aauuacuuaaagaua

SEQ ID NO: 4083070 - RNA, 15 nt, Variola virus
aauuagaaagugaua

SEQ ID NO: 4083071 - RNA, 23 nt, Variola virus
aauuagaacagggaauuacuuua

SEQ ID NO: 4083072 - RNA, 19 nt, Variola virus
aauuaguagaaaauacaac

SEQ ID NO: 4083073 - RNA, 12 nt, Variola virus
aauuaguuuauu

SEQ ID NO: 4083074 - RNA, 15 nt, Variola virus
aauuauacaagagau

SEQ ID NO: 4083075 - RNA, 22 nt, Variola virus
aauuauaccaauagauaauugu

SEQ ID NO: 4083076 - RNA, 12 nt, Variola virus
aauuauauuguc

SEQ ID NO: 4083077 - RNA, 15 nt, Variola virus
aauuaucaaauacuu

SEQ ID NO: 4083078 - RNA, 15 nt, Variola virus
aauuaugauagaaau

SEQ ID NO: 4083079 - RNA, 17 nt, Variola virus
aauuaugauagaaauua

SEQ ID NO: 4083080 - RNA, 13 nt, Variola virus
aauuauuaccaua

SEQ ID NO: 4083081 - RNA, 21 nt, Variola virus
aauuauuccuaauuaagaaaa

SEQ ID NO: 4083082 - RNA, 13 nt, Variola virus
aauuauuuaacuu

SEQ ID NO: 4083083 - RNA, 14 nt, Variola virus
aauuauuuuuacua

SEQ ID NO: 4083084 - RNA, 17 nt, Variola virus
aauucaaauagauguuc

SEQ ID NO: 4083085 - RNA, 14 nt, Variola virus
aauucaauaucuuu

SEQ ID NO: 4083086 - RNA, 19 nt, Variola virus
aauucaccuucacaaaaua

SEQ ID NO: 4083087 - RNA, 18 nt, Variola virus
aauucauagcugagaaua

SEQ ID NO: 4083088 - RNA, 21 nt, Variola virus
aauucauccguccuucagaca

SEQ ID NO: 4083089 - RNA, 14 nt, Variola virus
aauucauuccuaua

SEQ ID NO: 4083090 - RNA, 16 nt, Variola virus
aauucauucucuagaa

SEQ ID NO: 4083091 - RNA, 13 nt, Variola virus
aauucauuuccau

SEQ ID NO: 4083092 - RNA, 17 nt, Variola virus
aauucgacaaugaugcg

SEQ ID NO: 4083093 - RNA, 15 nt, Variola virus
aauucgagaaagaua

SEQ ID NO: 4083094 - RNA, 14 nt, Variola virus
aauucggaaaugua

SEQ ID NO: 4083095 - RNA, 14 nt, Variola virus
aauucuaaaugaug

SEQ ID NO: 4083096 - RNA, 12 nt, Variola virus
aauucuagcauc

SEQ ID NO: 4083097 - RNA, 15 nt, Variola virus
aauucuaucucuaag

SEQ ID NO: 4083098 - RNA, 23 nt, Variola virus
aauucucuuacgucgauauuucu

SEQ ID NO: 4083099 - RNA, 22 nt, Variola virus
aauucuuaguuauauauacucu

SEQ ID NO: 4083100 - RNA, 17 nt, Variola virus
aauugaccguguaauau

SEQ ID NO: 4083101 - RNA, 22 nt, Variola virus
aauugauucuuauucacuauau

SEQ ID NO: 4083102 - RNA, 13 nt, Variola virus
aauugauucuuga

SEQ ID NO: 4083103 - RNA, 14 nt, Variola virus
aauuggacaaguau

SEQ ID NO: 4083104 - RNA, 13 nt, Variola virus
aauugguauaaau

SEQ ID NO: 4083105 - RNA, 13 nt, Variola virus
aauugucuagaua

SEQ ID NO: 4083106 - RNA, 16 nt, Variola virus
aauugucuauaaauua

SEQ ID NO: 4083107 - RNA, 14 nt, Variola virus
aauugucuguaaac

SEQ ID NO: 4083108 - RNA, 23 nt, Variola virus
aauuguguccgaaacuuagaaga

SEQ ID NO: 4083109 - RNA, 13 nt, Variola virus
aauuuaaaauaua

SEQ ID NO: 4083110 - RNA, 14 nt, Variola virus
aauuuaaagaaugu

SEQ ID NO: 4083111 - RNA, 17 nt, Variola virus
aauuuaagaaaaugauu

SEQ ID NO: 4083112 - RNA, 12 nt, Variola virus
aauuuauacaaa

SEQ ID NO: 4083113 - RNA, 23 nt, Variola virus
aauuuauagaugauggaagacaa

SEQ ID NO: 4083114 - RNA, 21 nt, Variola virus
aauuuauuucuaauucucaga

SEQ ID NO: 4083115 - RNA, 21 nt, Variola virus
aauuuccccauugauagaaaa

SEQ ID NO: 4083116 - RNA, 19 nt, Variola virus
aauuuccgucuaucaucua

SEQ ID NO: 4083117 - RNA, 18 nt, Variola virus
aauuuccugauucagaua

SEQ ID NO: 4083118 - RNA, 16 nt, Variola virus
aauuucguuagucaua

SEQ ID NO: 4083119 - RNA, 15 nt, Variola virus
aauuugauaaagaua

SEQ ID NO: 4083120 - RNA, 20 nt, Variola virus
aauuuguagauuuuguuaua

SEQ ID NO: 4083121 - RNA, 23 nt, Variola virus
aauuuguauguuugggagaauua

SEQ ID NO: 4083122 - RNA, 19 nt, Variola virus
aauuuguccacguucuuua

SEQ ID NO: 4083123 - RNA, 16 nt, Variola virus
aauuuguucaaaauag

SEQ ID NO: 4083124 - RNA, 17 nt, Variola virus
aauuuuaagaaauggug

SEQ ID NO: 4083125 - RNA, 13 nt, Variola virus
aauuuuagauaau

SEQ ID NO: 4083126 - RNA, 18 nt, Variola virus
aauuuuauucuagaauug

SEQ ID NO: 4083127 - RNA, 22 nt, Variola virus
aauuuuguuuuuguacuuucua

SEQ ID NO: 4083128 - RNA, 17 nt, Variola virus
aauuuuucuacagauau

SEQ ID NO: 4083129 - RNA, 12 nt, Variola virus
aauuuuucuuaa

SEQ ID NO: 4083130 - RNA, 23 nt, Variola virus
aauuuuuugguagguuuuagaga

SEQ ID NO: 4083131 - RNA, 15 nt, Variola virus
acaaaaaauaaaaga

SEQ ID NO: 4083132 - RNA, 15 nt, Variola virus
acaaaaauacauaaa

SEQ ID NO: 4083133 - RNA, 16 nt, Variola virus
acaaaaauuaugaaau

SEQ ID NO: 4083134 - RNA, 21 nt, Variola virus
acaaaaccgauaaauggaaau

SEQ ID NO: 4083135 - RNA, 13 nt, Variola virus
acaaaauaaugua

SEQ ID NO: 4083136 - RNA, 15 nt, Variola virus
acaaaaucaaauaau

SEQ ID NO: 4083137 - RNA, 22 nt, Variola virus
acaaaauccaaacauuacaaau

SEQ ID NO: 4083138 - RNA, 20 nt, Variola virus
acaaaauucauuagaauaua

SEQ ID NO: 4083139 - RNA, 17 nt, Variola virus
acaaacaacuaggaaau

SEQ ID NO: 4083140 - RNA, 18 nt, Variola virus
acaaacacuacaacagau

SEQ ID NO: 4083141 - RNA, 17 nt, Variola virus
acaaacauacucuaaua

SEQ ID NO: 4083142 - RNA, 15 nt, Variola virus
acaaacauauuacca

SEQ ID NO: 4083143 - RNA, 13 nt, Variola virus
acaaacaucucac

SEQ ID NO: 4083144 - RNA, 21 nt, Variola virus
acaaacauguucaaugcaaua

SEQ ID NO: 4083145 - RNA, 18 nt, Variola virus
acaaacgcuacuauauau

SEQ ID NO: 4083146 - RNA, 16 nt, Variola virus
acaaacuauagaaauu

SEQ ID NO: 4083147 - RNA, 23 nt, Variola virus
acaaaguacuguucauacaugau

SEQ ID NO: 4083148 - RNA, 17 nt, Variola virus
acaaauauaaaaugaua

SEQ ID NO: 4083149 - RNA, 21 nt, Variola virus
acaaauauaugcaaaauaaua

SEQ ID NO: 4083150 - RNA, 15 nt, Variola virus
acaaaucuauaacau

SEQ ID NO: 4083151 - RNA, 14 nt, Variola virus
acaaaugauaauca

SEQ ID NO: 4083152 - RNA, 19 nt, Variola virus
acaaaugcaccaaaguuau

SEQ ID NO: 4083153 - RNA, 18 nt, Variola virus
acaaauggauguuaaugu

SEQ ID NO: 4083154 - RNA, 17 nt, Variola virus
acaaauggucaaugaua

SEQ ID NO: 4083155 - RNA, 22 nt, Variola virus
acaaauguuaaacauuaauuga

SEQ ID NO: 4083156 - RNA, 19 nt, Variola virus
acaaauuaaauucuggaau

SEQ ID NO: 4083157 - RNA, 12 nt, Variola virus
acaacaaaugau

SEQ ID NO: 4083158 - RNA, 13 nt, Variola virus
acaacaaaugaua

SEQ ID NO: 4083159 - RNA, 18 nt, Variola virus
acaacaaugucucgaaau

SEQ ID NO: 4083160 - RNA, 18 nt, Variola virus
accaacuuaaacaaaaua

SEQ ID NO: 4083161 - RNA, 21 nt, Variola virus
accaauaaaaauaaacuagaa

SEQ ID NO: 4083162 - RNA, 18 nt, Variola virus
accaguaucaauuuauca

SEQ ID NO: 4083163 - RNA, 22 nt, Variola virus
accauaauccuauucuugaucu

SEQ ID NO: 4083164 - RNA, 23 nt, Variola virus
accauagauucauucuuuauaga

SEQ ID NO: 4083165 - RNA, 22 nt, Variola virus
accauccuuuaaaaaaaaugau

SEQ ID NO: 4083166 - RNA, 19 nt, Variola virus
accaucugugguacgaaug

SEQ ID NO: 4083167 - RNA, 14 nt, Variola virus
accaugaaagaaag

SEQ ID NO: 4083168 - RNA, 18 nt, Variola virus
accauggacauaaagaua

SEQ ID NO: 4083169 - RNA, 18 nt, Variola virus
accccauugaugacuuua

SEQ ID NO: 4083170 - RNA, 13 nt, Variola virus
accgaaauuauca

SEQ ID NO: 4083171 - RNA, 18 nt, Variola virus
accgaagagcagcuauau

SEQ ID NO: 4083172 - RNA, 19 nt, Variola virus
accgaaggagauacuauca

SEQ ID NO: 4083173 - RNA, 20 nt, Variola virus
accgacaucacuucagaaau

SEQ ID NO: 4083174 - RNA, 18 nt, Variola virus
accgauaauaaaauuacu

SEQ ID NO: 4083175 - RNA, 15 nt, Variola virus
accggucauauuaau

SEQ ID NO: 4083176 - RNA, 13 nt, Variola virus
accguacaaguau

SEQ ID NO: 4083177 - RNA, 22 nt, Variola virus
accuaaauaauuauacuuugua

SEQ ID NO: 4083178 - RNA, 13 nt, Variola virus
accuaagaagaau

SEQ ID NO: 4083179 - RNA, 17 nt, Variola virus
accuaagcaagaaagau

SEQ ID NO: 4083180 - RNA, 22 nt, Variola virus
accuacuuuagcauugaaaaua

SEQ ID NO: 4083181 - RNA, 21 nt, Variola virus
accuguagaucuuaucuaucc

SEQ ID NO: 4083182 - RNA, 24 nt, Variola virus
accuuuuccuuaucuucauaaaau

SEQ ID NO: 4083183 - RNA, 16 nt, Variola virus
acgaaaguaauuauua

SEQ ID NO: 4083184 - RNA, 19 nt, Variola virus
acgaagauacuauccauca

SEQ ID NO: 4083185 - RNA, 23 nt, Variola virus
acgaaucauccauaaauuauacu

SEQ ID NO: 4083186 - RNA, 21 nt, Variola virus
acgacgacauauuaguaacug

SEQ ID NO: 4083187 - RNA, 19 nt, Variola virus
acgagauugugaacauugu

SEQ ID NO: 4083188 - RNA, 13 nt, Variola virus
acgaguauagcau

SEQ ID NO: 4083189 - RNA, 17 nt, Variola virus
acgaguugaucuucaaa

SEQ ID NO: 4083190 - RNA, 11 nt, Variola virus
acgauaaaaga

SEQ ID NO: 4083191 - RNA, 17 nt, Variola virus
acgauaacauucuagga

SEQ ID NO: 4083192 - RNA, 18 nt, Variola virus
acgauauuuguuggauuu

SEQ ID NO: 4083193 - RNA, 19 nt, Variola virus
acgaucaaccaaaaaggau

SEQ ID NO: 4083194 - RNA, 14 nt, Variola virus
acgaucuauuagaa

SEQ ID NO: 4083195 - RNA, 17 nt, Variola virus
acgauuuauauucacca

SEQ ID NO: 4083196 - RNA, 22 nt, Variola virus
acgcagaaaagauaccacgagu

SEQ ID NO: 4083197 - RNA, 15 nt, Variola virus
acgcgucuuuaacuc

SEQ ID NO: 4083198 - RNA, 15 nt, Variola virus
acgcuauuaaucuuu

SEQ ID NO: 4083199 - RNA, 12 nt, Variola virus
acggagaagaau

SEQ ID NO: 4083200 - RNA, 18 nt, Variola virus
acggagccccaggaucuc

SEQ ID NO: 4083201 - RNA, 18 nt, Variola virus
acggaugcagaugucuuu

SEQ ID NO: 4083202 - RNA, 14 nt, Variola virus
acggugaauacaau

SEQ ID NO: 4083203 - RNA, 13 nt, Variola virus
acguacauggaaa

SEQ ID NO: 4083204 - RNA, 22 nt, Variola virus
acguauauagaugucaaugaag

SEQ ID NO: 4083205 - RNA, 13 nt, Variola virus
acguauuaaauau

SEQ ID NO: 4083206 - RNA, 18 nt, Variola virus
acgucauaaaaauguuua

SEQ ID NO: 4083207 - RNA, 21 nt, Variola virus
acguccugcaggguauuguuu

SEQ ID NO: 4083208 - RNA, 23 nt, Variola virus
acgucuagaguuuauaucaauaa

SEQ ID NO: 4083209 - RNA, 16 nt, Variola virus
acguugaaaaaaauug

SEQ ID NO: 4083210 - RNA, 15 nt, Variola virus
acguuggcacaugau

SEQ ID NO: 4083211 - RNA, 19 nt, Variola virus
acguuuuucgaaaaaauua

SEQ ID NO: 4083212 - RNA, 13 nt, Variola virus
acuaaacacauua

SEQ ID NO: 4083213 - RNA, 19 nt, Variola virus
acuaaacuaacuccuuggu

SEQ ID NO: 4083214 - RNA, 21 nt, Variola virus
acuaaacuaacuccuugguuu

SEQ ID NO: 4083215 - RNA, 18 nt, Variola virus
acuaaagacuaugucaaa

SEQ ID NO: 4083216 - RNA, 19 nt, Variola virus
acuaaaggcaacaaagaaa

SEQ ID NO: 4083217 - RNA, 12 nt, Variola virus
acuaaauacuac

SEQ ID NO: 4083218 - RNA, 18 nt, Variola virus
acuaacucucuaauggau

SEQ ID NO: 4083219 - RNA, 19 nt, Variola virus
acuaaguauauacacagaa

SEQ ID NO: 4083220 - RNA, 13 nt, Variola virus
acuaauaaagaag

SEQ ID NO: 4083221 - RNA, 17 nt, Variola virus
acuaaucgauuuugcau

SEQ ID NO: 4083222 - RNA, 23 nt, Variola virus
acuaaucgauuuugcauacucua

SEQ ID NO: 4083223 - RNA, 17 nt, Variola virus
acuaaugacaauaauua

SEQ ID NO: 4083224 - RNA, 19 nt, Variola virus
acuaaugcaucuauuucau

SEQ ID NO: 4083225 - RNA, 16 nt, Variola virus
acuaauguauauuuua

SEQ ID NO: 4083226 - RNA, 19 nt, Variola virus
acuaauuaguaacgacuau

SEQ ID NO: 4083227 - RNA, 16 nt, Variola virus
acuaauuauacacauu

SEQ ID NO: 4083228 - RNA, 23 nt, Variola virus
acuaauucauuuucaauaauaua

SEQ ID NO: 4083229 - RNA, 18 nt, Variola virus
acuacauacgcgacugua

SEQ ID NO: 4083230 - RNA, 20 nt, Variola virus
acuaccgaguuuaaaacuuc

SEQ ID NO: 4083231 - RNA, 18 nt, Variola virus
acuacgcgauuauuuuca

SEQ ID NO: 4083232 - RNA, 15 nt, Variola virus
acuacguugaagauc

SEQ ID NO: 4083233 - RNA, 13 nt, Variola virus
acuagaagaaagu

SEQ ID NO: 4083234 - RNA, 16 nt, Variola virus
acuagacuauuaauaa

SEQ ID NO: 4083235 - RNA, 17 nt, Variola virus
acuagacugauuucucu

SEQ ID NO: 4083236 - RNA, 14 nt, Variola virus
acuagaguauauaa

SEQ ID NO: 4083237 - RNA, 17 nt, Variola virus
acuagauaaaucguuug

SEQ ID NO: 4083238 - RNA, 17 nt, Variola virus
acuagauauauuaauaa

SEQ ID NO: 4083239 - RNA, 18 nt, Variola virus
acuaggauuagagaagau

SEQ ID NO: 4083240 - RNA, 18 nt, Variola virus
acuagucgcguuaauagu

SEQ ID NO: 4083241 - RNA, 21 nt, Variola virus
acuagugauaucauuaauaca

SEQ ID NO: 4083242 - RNA, 18 nt, Variola virus
acuauaaauggagaaugu

SEQ ID NO: 4083243 - RNA, 12 nt, Variola virus
acuauaaugaaa

SEQ ID NO: 4083244 - RNA, 15 nt, Variola virus
acuauaauuuuguga

SEQ ID NO: 4083245 - RNA, 22 nt, Variola virus
acuauacauuuccgaaugaaug

SEQ ID NO: 4083246 - RNA, 14 nt, Variola virus
acuauagacauaau

SEQ ID NO: 4083247 - RNA, 22 nt, Variola virus
acuauauaguuuaaauuaagca

SEQ ID NO: 4083248 - RNA, 19 nt, Variola virus
acuauaucgacauauuuca

SEQ ID NO: 4083249 - RNA, 18 nt, Variola virus
acuauccaauaaacaguc

SEQ ID NO: 4083250 - RNA, 20 nt, Variola virus
acuaucguuggaaaaugaug

SEQ ID NO: 4083251 - RNA, 18 nt, Variola virus
acuaugcgaugucuugga

SEQ ID NO: 4083252 - RNA, 22 nt, Variola virus
acuauggacgcaugauaagaau

SEQ ID NO: 4083253 - RNA, 19 nt, Variola virus
acuauuacagaaguuuuaa

SEQ ID NO: 4083254 - RNA, 17 nt, Variola virus
acuauuauguuuaaaga

SEQ ID NO: 4083255 - RNA, 18 nt, Variola virus
acuauuuagaaauugaaa

SEQ ID NO: 4083256 - RNA, 16 nt, Variola virus
acuauuuggauagaca

SEQ ID NO: 4083257 - RNA, 18 nt, Variola virus
acuauuugucuuaauaga

SEQ ID NO: 4083258 - RNA, 20 nt, Variola virus
acuauuuuaaauagcauaga

SEQ ID NO: 4083259 - RNA, 18 nt, Variola virus
acucaacggaaaacauuu

SEQ ID NO: 4083260 - RNA, 15 nt, Variola virus
acucaauuaguauau

SEQ ID NO: 4083261 - RNA, 18 nt, Variola virus
acucaggaagauauuuua

SEQ ID NO: 4083262 - RNA, 16 nt, Variola virus
acucauaaaauacaag

SEQ ID NO: 4083263 - RNA, 22 nt, Variola virus
acucaugaaucuaaaagaauug

SEQ ID NO: 4083264 - RNA, 22 nt, Variola virus
acuccaaugacugaauacauua

SEQ ID NO: 4083265 - RNA, 15 nt, Variola virus
acuccuauauuuccc

SEQ ID NO: 4083266 - RNA, 14 nt, Variola virus
acuccuugacuauc

SEQ ID NO: 4083267 - RNA, 22 nt, Variola virus
acucuaagaacuuauuaaugaa

SEQ ID NO: 4083268 - RNA, 16 nt, Variola virus
acucuacguaucucgu

SEQ ID NO: 4083269 - RNA, 16 nt, Variola virus
acucuauucuucaaga

SEQ ID NO: 4083270 - RNA, 18 nt, Variola virus
acucucuaucucuuaaug

SEQ ID NO: 4083271 - RNA, 20 nt, Variola virus
acucucuaucucuuaaugag

SEQ ID NO: 4083272 - RNA, 16 nt, Variola virus
acucugaaaagaaagu

SEQ ID NO: 4083273 - RNA, 21 nt, Variola virus
acucuguuucuguaucuauca

SEQ ID NO: 4083274 - RNA, 20 nt, Variola virus
acucuuggucuaauacugau

SEQ ID NO: 4083275 - RNA, 14 nt, Variola virus
acugaauauauuua

SEQ ID NO: 4083276 - RNA, 22 nt, Variola virus
acugauuaauaagaucuucuau

SEQ ID NO: 4083277 - RNA, 20 nt, Variola virus
acugcaaaacuuaaauguua

SEQ ID NO: 4083278 - RNA, 21 nt, Variola virus
acugcauauugucccaauguu

SEQ ID NO: 4083279 - RNA, 22 nt, Variola virus
acuggauauucgauaacagcau

SEQ ID NO: 4083280 - RNA, 15 nt, Variola virus
acuggcguuguucaa

SEQ ID NO: 4083281 - RNA, 19 nt, Variola virus
acuggucauagaaaaugau

SEQ ID NO: 4083282 - RNA, 17 nt, Variola virus
acuguauccucaaacau

SEQ ID NO: 4083283 - RNA, 18 nt, Variola virus
acuguauccucaaacauc

SEQ ID NO: 4083284 - RNA, 15 nt, Variola virus
acuguggauguaaua

SEQ ID NO: 4083285 - RNA, 20 nt, Variola virus
acucauauaguauugaacag

SEQ ID NO: 4083286 - RNA, 20 nt, Variola virus
acucauguagcauagguaau

SEQ ID NO: 4083287 - RNA, 16 nt, Variola virus
acucauuuaacagaug

SEQ ID NO: 4083288 - RNA, 23 nt, Variola virus
acucauuucauuauaauaguuua

SEQ ID NO: 4083289 - RNA, 14 nt, Variola virus
acuccguagagaaa

SEQ ID NO: 4083290 - RNA, 21 nt, Variola virus
acuccucuauuuaauacuuua

SEQ ID NO: 4083291 - RNA, 15 nt, Variola virus
acuccuugguuucaa

SEQ ID NO: 4083292 - RNA, 18 nt, Variola virus
acucgucgacaaaguacu

SEQ ID NO: 4083293 - RNA, 12 nt, Variola virus
acucuaaaauau

SEQ ID NO: 4083294 - RNA, 23 nt, Variola virus
acucuacaaggaauugaugaagu

SEQ ID NO: 4083295 - RNA, 21 nt, Variola virus
uauucaucgucgacuaucaac

SEQ ID NO: 4083296 - RNA, 14 nt, Variola virus
uauucauucaaugu

SEQ ID NO: 4083297 - RNA, 15 nt, Variola virus
uauuccaauguuuaa

SEQ ID NO: 4083298 - RNA, 24 nt, Variola virus
uauuccaugaauaagugcgaugau

SEQ ID NO: 4083299 - RNA, 20 nt, Variola virus
uauuccgacaaaggauugau

SEQ ID NO: 4083300 - RNA, 23 nt, Variola virus
uauuccgcucaucacuaaucaua

SEQ ID NO: 4083301 - RNA, 16 nt, Variola virus
uauuccuguuaucauc

SEQ ID NO: 4083302 - RNA, 13 nt, Variola virus
uauuccuuucauu

SEQ ID NO: 4083303 - RNA, 19 nt, Variola virus
uauucgagaugaacauuca

SEQ ID NO: 4083304 - RNA, 22 nt, Variola virus
uauucuaucccccguauuuaca

SEQ ID NO: 4083305 - RNA, 14 nt, Variola virus
uauucuauuucgaa

SEQ ID NO: 4083306 - RNA, 23 nt, Variola virus
uauucucuggagaaaagauauca

SEQ ID NO: 4083307 - RNA, 11 nt, Variola virus
uauucucuuuc

SEQ ID NO: 4083308 - RNA, 12 nt, Variola virus
uauucuucauaa

SEQ ID NO: 4083309 - RNA, 17 nt, Variola virus
uauucuuuauuaucaga

SEQ ID NO: 4083310 - RNA, 17 nt, Variola virus
uauugaaauuaaucaua

SEQ ID NO: 4083311 - RNA, 20 nt, Variola virus
uauugauaaagaucuaaaaa

SEQ ID NO: 4083312 - RNA, 21 nt, Variola virus
uauugccacguaccuuuaaaa

SEQ ID NO: 4083313 - RNA, 20 nt, Variola virus
uauuggaaaggcguuaucua

SEQ ID NO: 4083314 - RNA, 21 nt, Variola virus
uauuggauucguguaaucaua

SEQ ID NO: 4083315 - RNA, 14 nt, Variola virus
uauuguuacacaac

SEQ ID NO: 4083316 - RNA, 13 nt, Variola virus
uauuguuaucgua

SEQ ID NO: 4083317 - RNA, 21 nt, Variola virus
uauuguuuggguaaaacagau

SEQ ID NO: 4083318 - RNA, 14 nt, Variola virus
uauuguuuuauaua

SEQ ID NO: 4083319 - RNA, 15 nt, Variola virus
uauuuaacaauuugg

SEQ ID NO: 4083320 - RNA, 23 nt, Variola virus
uauuuacacacauaauccauucu

SEQ ID NO: 4083321 - RNA, 13 nt, Variola virus
uauuuauacuacu

SEQ ID NO: 4083322 - RNA, 18 nt, Variola virus
uauuuaucaauucuucua

SEQ ID NO: 4083323 - RNA, 14 nt, Variola virus
uauuuaucuaacau

SEQ ID NO: 4083324 - RNA, 17 nt, Variola virus
uauuucaggaacaggau

SEQ ID NO: 4083325 - RNA, 19 nt, Variola virus
uauuuccaguuuuauuaua

SEQ ID NO: 4083326 - RNA, 18 nt, Variola virus
uauuucguuucuuaaaua

SEQ ID NO: 4083327 - RNA, 14 nt, Variola virus
uauuucuaauaaca

SEQ ID NO: 4083328 - RNA, 17 nt, Variola virus
uauuucuauuucuacua

SEQ ID NO: 4083329 - RNA, 18 nt, Variola virus
uauuuggcuagucaagau

SEQ ID NO: 4083330 - RNA, 16 nt, Variola virus
uauuuguauuuaucua

SEQ ID NO: 4083331 - RNA, 21 nt, Variola virus
uauuuuaggaucauauuuaca

SEQ ID NO: 4083332 - RNA, 21 nt, Variola virus
uauuuucgaaacucguaaaaa

SEQ ID NO: 4083333 - RNA, 20 nt, Variola virus
uauuuucuggaaguggauau

SEQ ID NO: 4083334 - RNA, 21 nt, Variola virus
uauuuugcuacaccuguugaa

SEQ ID NO: 4083335 - RNA, 23 nt, Variola virus
uauuuuuaauagcugcucuuugu

SEQ ID NO: 4083336 - RNA, 14 nt, Variola virus
uauuuuucuaugau

SEQ ID NO: 4083337 - RNA, 21 nt, Variola virus
uauuuuugacgaugucaagau

SEQ ID NO: 4083338 - RNA, 15 nt, Variola virus
uauuuuuuuuaucaa

SEQ ID NO: 4083339 - RNA, 18 nt, Variola virus
ucaaaaaaagauuauucg

SEQ ID NO: 4083340 - RNA, 21 nt, Variola virus
ucaaaaaacaauuuauucaga

SEQ ID NO: 4083341 - RNA, 23 nt, Variola virus
ucaaaaagggugcgguacuacag

SEQ ID NO: 4083342 - RNA, 23 nt, Variola virus
ucaaaaaugucgaugaaauaucu

SEQ ID NO: 4083343 - RNA, 18 nt, Variola virus
ucaaaaguuaauuucuau

SEQ ID NO: 4083344 - RNA, 16 nt, Variola virus
ucaaaaucaucauuau

SEQ ID NO: 4083345 - RNA, 19 nt, Variola virus
ucaaacaucugcauuauca

SEQ ID NO: 4083346 - RNA, 16 nt, Variola virus
ucaaacgaauaaacaa

SEQ ID NO: 4083347 - RNA, 19 nt, Variola virus
ucaaagggaccuaaaucua

SEQ ID NO: 4083348 - RNA, 17 nt, Variola virus
ucaaaguauuugguauu

SEQ ID NO: 4083349 - RNA, 17 nt, Variola virus
ucaaagucacaaagcaa

SEQ ID NO: 4083350 - RNA, 19 nt, Variola virus
ucaaauagauguucaucau

SEQ ID NO: 4083351 - RNA, 21 nt, Variola virus
ucaaauccaugaauaaaguau

SEQ ID NO: 4083352 - RNA, 21 nt, Variola virus
ucaaaugccuuccaaaguuua

SEQ ID NO: 4083353 - RNA, 15 nt, Variola virus
ucaaauuagauuucg

SEQ ID NO: 4083354 - RNA, 21 nt, Variola virus
ucaacaaucguuaauaaaucu

SEQ ID NO: 4083355 - RNA, 15 nt, Variola virus
ucaacaccauuauua

SEQ ID NO: 4083356 - RNA, 19 nt, Variola virus
ucaacacuacccaauaaau

SEQ ID NO: 4083357 - RNA, 19 nt, Variola virus
ucaacacuacuauuauuga

SEQ ID NO: 4083358 - RNA, 21 nt, Variola virus
ucaacauaaugucauaguuga

SEQ ID NO: 4083359 - RNA, 22 nt, Variola virus
ucaacgcuggaaucaauacuca

SEQ ID NO: 4083360 - RNA, 22 nt, Variola virus
ucaagaacuacaaaaguuuucu

SEQ ID NO: 4083361 - RNA, 20 nt, Variola virus
ucaagaaggaaaucaaaucu

SEQ ID NO: 4083362 - RNA, 17 nt, Variola virus
ucaagccggcuauauau

SEQ ID NO: 4083363 - RNA, 20 nt, Variola virus
ucaagccggcuauauauucu

SEQ ID NO: 4083364 - RNA, 23 nt, Variola virus
ucaagccggcuauauauucugcu

SEQ ID NO: 4083365 - RNA, 15 nt, Variola virus
ucaagucaaagaaau

SEQ ID NO: 4083366 - RNA, 15 nt, Variola virus
ucaaguucuccgcgu

SEQ ID NO: 4083367 - RNA, 15 nt, Variola virus
ucaauaaaugauuca

SEQ ID NO: 4083368 - RNA, 14 nt, Variola virus
ucaauaacuacaca

SEQ ID NO: 4083369 - RNA, 22 nt, Variola virus
ucaauagaauaaaccauuuugu

SEQ ID NO: 4083370 - RNA, 18 nt, Variola virus
ucaauagcaaucaugaaa

SEQ ID NO: 4083371 - RNA, 21 nt, Variola virus
ucaauauacuauucuugugau

SEQ ID NO: 4083372 - RNA, 14 nt, Variola virus
ucaaucauguacua

SEQ ID NO: 4083373 - RNA, 20 nt, Variola virus
ucaaucggauacagacacuc

SEQ ID NO: 4083374 - RNA, 22 nt, Variola virus
ucaaucguuuaaaguaaacuuc

SEQ ID NO: 4083375 - RNA, 21 nt, Variola virus
ucaaugaguuuaauaacuuga

SEQ ID NO: 4083376 - RNA, 23 nt, Variola virus
ucaauguccugcuauacuucggc

SEQ ID NO: 4083377 - RNA, 22 nt, Variola virus
ucaaugucuuaauaagaagugu

SEQ ID NO: 4083378 - RNA, 16 nt, Variola virus
ucaauucgagaaagau

SEQ ID NO: 4083379 - RNA, 21 nt, Variola virus
ucaauuucccaaauaacacca

SEQ ID NO: 4083380 - RNA, 22 nt, Variola virus
ucacaaagauggcugaaauuag

SEQ ID NO: 4083381 - RNA, 15 nt, Variola virus
ucacaaauacuacaa

SEQ ID NO: 4083382 - RNA, 20 nt, Variola virus
ucacaacaauuuauuucuaa

SEQ ID NO: 4083383 - RNA, 17 nt, Variola virus
ucacaaguaugaagaaa

SEQ ID NO: 4083384 - RNA, 15 nt, Variola virus
ucacaccuccauuaa

SEQ ID NO: 4083385 - RNA, 18 nt, Variola virus
ucacacuacugaaaaaag

SEQ ID NO: 4083386 - RNA, 14 nt, Variola virus
ucacagucuguuuu

SEQ ID NO: 4083387 - RNA, 17 nt, Variola virus
ucacauaucgcuacaaa

SEQ ID NO: 4083388 - RNA, 21 nt, Variola virus
ucaccaauaaaaauaaacuag

SEQ ID NO: 4083389 - RNA, 17 nt, Variola virus
ucaccauggacauaaag

SEQ ID NO: 4083390 - RNA, 18 nt, Variola virus
ucaccugccauaaauaaa

SEQ ID NO: 4083391 - RNA, 15 nt, Variola virus
ucacuauagaaaaug

SEQ ID NO: 4083392 - RNA, 19 nt, Variola virus
ucacuauguguaagaagau

SEQ ID NO: 4083393 - RNA, 23 nt, Variola virus
ucacuuauagauagauaguacau

SEQ ID NO: 4083394 - RNA, 14 nt, Variola virus
ucacuucaauaaau

SEQ ID NO: 4083395 - RNA, 12 nt, Variola virus
ucacuucagaaa

SEQ ID NO: 4083396 - RNA, 21 nt, Variola virus
ucacuucucuucauuacuacu

SEQ ID NO: 4083397 - RNA, 18 nt, Variola virus
ucagaaaauaccauccaa

SEQ ID NO: 4083398 - RNA, 17 nt, Variola virus
ucagaaauacgguuuuu

SEQ ID NO: 4083399 - RNA, 23 nt, Variola virus
ucagaaauuacaaacacuacaac

SEQ ID NO: 4083400 - RNA, 17 nt, Variola virus
ucagaacuaucauagau

SEQ ID NO: 4083401 - RNA, 21 nt, Variola virus
ucagaauauucuuuucuaaga

SEQ ID NO: 4083402 - RNA, 16 nt, Variola virus
ucagaaucacauagau

SEQ ID NO: 4083403 - RNA, 22 nt, Variola virus
ucagaauuuucauggauguaga

SEQ ID NO: 4083404 - RNA, 14 nt, Variola virus
ucagacaaccaucu

SEQ ID NO: 4083405 - RNA, 23 nt, Variola virus
ucagauaacauguuaauuuccga

SEQ ID NO: 4083406 - RNA, 21 nt, Variola virus
ucagccgcuacagaaacauau

SEQ ID NO: 4083407 - RNA, 22 nt, Variola virus
ucagcugcuuuagaugauuuug

SEQ ID NO: 4083408 - RNA, 21 nt, Variola virus
ucaggaacauaaacaaauucu

SEQ ID NO: 4083409 - RNA, 20 nt, Variola virus
ucaggaauccaaagagcuau

SEQ ID NO: 4083410 - RNA, 22 nt, Variola virus
ucagguucaucgaucucuauaa

SEQ ID NO: 4083411 - RNA, 16 nt, Variola virus
ucaguaacuauguuca

SEQ ID NO: 4083412 - RNA, 21 nt, Variola virus
ucagugcaaagauuacuacac

SEQ ID NO: 4083413 - RNA, 18 nt, Variola virus
ucaguguagauaguaaau

SEQ ID NO: 4083414 - RNA, 20 nt, Variola virus
ucaguguccaucauuucauu

SEQ ID NO: 4083415 - RNA, 12 nt, Variola virus
ucaguuaucauc

SEQ ID NO: 4083416 - RNA, 13 nt, Variola virus
ucauaaaaaccau

SEQ ID NO: 4083417 - RNA, 18 nt, Variola virus
ucauaaaaucgucacaau

SEQ ID NO: 4083418 - RNA, 13 nt, Variola virus
ucauaaagaacag

SEQ ID NO: 4083419 - RNA, 20 nt, Variola virus
ucuaaugaugaacacaaaug

SEQ ID NO: 4083420 - RNA, 20 nt, Variola virus
ucuaauugugacauuauguu

SEQ ID NO: 4083421 - RNA, 22 nt, Variola virus
ucuacaaauagagauaaaacaa

SEQ ID NO: 4083422 - RNA, 20 nt, Variola virus
ucuacaguaauguccaaauc

SEQ ID NO: 4083423 - RNA, 21 nt, Variola virus
ucuacauaugguggauuagua

SEQ ID NO: 4083424 - RNA, 22 nt, Variola virus
ucuaccgcggagccgaaaauau

SEQ ID NO: 4083425 - RNA, 17 nt, Variola virus
ucuacuaaucucuguaa

SEQ ID NO: 4083426 - RNA, 12 nt, Variola virus
ucuagaaugaag

SEQ ID NO: 4083427 - RNA, 22 nt, Variola virus
ucuagacuccgcaucaacacca

SEQ ID NO: 4083428 - RNA, 15 nt, Variola virus
ucuagauagaaguau

SEQ ID NO: 4083429 - RNA, 14 nt, Variola virus
ucuagauguagaag

SEQ ID NO: 4083430 - RNA, 20 nt, Variola virus
ucuagauucgagaucucuaa

SEQ ID NO: 4083431 - RNA, 16 nt, Variola virus
ucuagcuuucacuuaa

SEQ ID NO: 4083432 - RNA, 22 nt, Variola virus
ucuaggcgguggauauuucuga

SEQ ID NO: 4083433 - RNA, 23 nt, Variola virus
ucuaggcgguggauauuucugaa

SEQ ID NO: 4083434 - RNA, 18 nt, Variola virus
ucuauaaaaaauaaguau

SEQ ID NO: 4083435 - RNA, 15 nt, Variola virus
ucuauaauagauggu

SEQ ID NO: 4083436 - RNA, 14 nt, Variola virus
ucuauagucagaau

SEQ ID NO: 4083437 - RNA, 19 nt, Variola virus
ucuauaucuagaaauaagu

SEQ ID NO: 4083438 - RNA, 19 nt, Variola virus
ucuauaugugagagaauau

SEQ ID NO: 4083439 - RNA, 13 nt, Variola virus
ucuaucaauaacu

SEQ ID NO: 4083440 - RNA, 22 nt, Variola virus
ucuaucccccguauuuacauua

SEQ ID NO: 4083441 - RNA, 16 nt, Variola virus
ucuaucuuuagaguau

SEQ ID NO: 4083442 - RNA, 18 nt, Variola virus
ucuaucuuuaguaguguu

SEQ ID NO: 4083443 - RNA, 16 nt, Variola virus
ucuaugaauaugauuu

SEQ ID NO: 4083444 - RNA, 19 nt, Variola virus
ucuauguuaauauguauau

SEQ ID NO: 4083445 - RNA, 19 nt, Variola virus
ucuauuaauuauagaugua

SEQ ID NO: 4083446 - RNA, 15 nt, Variola virus
ucuauuagaugugua

SEQ ID NO: 4083447 - RNA, 16 nt, Variola virus
ucuauuauugaugcaa

SEQ ID NO: 4083448 - RNA, 17 nt, Variola virus
ucuauuguuuguuuuaa

SEQ ID NO: 4083449 - RNA, 11 nt, Variola virus
ucuauuucuau

SEQ ID NO: 4083450 - RNA, 12 nt, Variola virus
ucuauuugcuaa

SEQ ID NO: 4083451 - RNA, 19 nt, Variola virus
ucuauuugucaauauguca

SEQ ID NO: 4083452 - RNA, 21 nt, Variola virus
ucucaaaugaauaaguuuauu

SEQ ID NO: 4083453 - RNA, 14 nt, Variola virus
ucucaaguuacauu

SEQ ID NO: 4083454 - RNA, 18 nt, Variola virus
ucucagaaucaaauauag

SEQ ID NO: 4083455 - RNA, 14 nt, Variola virus
ucucagguacagau

SEQ ID NO: 4083456 - RNA, 17 nt, Variola virus
ucucagguacagauuuu

SEQ ID NO: 4083457 - RNA, 14 nt, Variola virus
ucucauaaauacag

SEQ ID NO: 4083458 - RNA, 24 nt, Variola virus
ucucauaauguaaagauauucuaa

SEQ ID NO: 4083459 - RNA, 14 nt, Variola virus
ucucauguucuuaa

SEQ ID NO: 4083460 - RNA, 16 nt, Variola virus
ucuccaauauaugaua

SEQ ID NO: 4083461 - RNA, 14 nt, Variola virus
ucuccagaaaucug

SEQ ID NO: 4083462 - RNA, 16 nt, Variola virus
ucucccaauaccuguc

SEQ ID NO: 4083463 - RNA, 19 nt, Variola virus
ucuccggccacuauuauug

SEQ ID NO: 4083464 - RNA, 15 nt, Variola virus
ucucgaugaaaauaa

SEQ ID NO: 4083465 - RNA, 12 nt, Variola virus
ucucgauuucua

SEQ ID NO: 4083466 - RNA, 14 nt, Variola virus
ucucuaucaaugau

SEQ ID NO: 4083467 - RNA, 16 nt, Variola virus
ucucucaauacagauu

SEQ ID NO: 4083468 - RNA, 17 nt, Variola virus
ucucucagguacagauu

SEQ ID NO: 4083469 - RNA, 15 nt, Variola virus
ucucugguuugcuac

SEQ ID NO: 4083470 - RNA, 22 nt, Variola virus
ucucuguaauaguuuccaccaa

SEQ ID NO: 4083471 - RNA, 14 nt, Variola virus
ucugaaaauguaua

SEQ ID NO: 4083472 - RNA, 23 nt, Variola virus
ucugaaauaacguauuuaaacaa

SEQ ID NO: 4083473 - RNA, 15 nt, Variola virus
ucugaaauaaucaug

SEQ ID NO: 4083474 - RNA, 12 nt, Variola virus
ucugaauuauug

SEQ ID NO: 4083475 - RNA, 19 nt, Variola virus
ucugccuuuuuauacauau

SEQ ID NO: 4083476 - RNA, 22 nt, Variola virus
ucuggauauguuuuuaauaaag

SEQ ID NO: 4083477 - RNA, 14 nt, Variola virus
ucugguuuaggaaa

SEQ ID NO: 4083478 - RNA, 19 nt, Variola virus
ucuguaauaguuuccacca

SEQ ID NO: 4083479 - RNA, 16 nt, Variola virus
ucuguacaaauuauug

SEQ ID NO: 4083480 - RNA, 20 nt, Variola virus
ucuguugguuuucuuauaua

SEQ ID NO: 4083481 - RNA, 18 nt, Variola virus
ucuuaacaaguucucaau

SEQ ID NO: 4083482 - RNA, 12 nt, Variola virus
ucuuacaauguu

SEQ ID NO: 4083483 - RNA, 17 nt, Variola virus
ucuuacuuuguucuauu

SEQ ID NO: 4083484 - RNA, 18 nt, Variola virus
ucuuauauagauuucgaa

SEQ ID NO: 4083485 - RNA, 14 nt, Variola virus
ucuuaucaauaaca

SEQ ID NO: 4083486 - RNA, 13 nt, Variola virus
ucuuauucuuaaa

SEQ ID NO: 4083487 - RNA, 17 nt, Variola virus
ucuucaaaugaaguagg

SEQ ID NO: 4083488 - RNA, 14 nt, Variola virus
ucuucaacacaaag

SEQ ID NO: 4083489 - RNA, 13 nt, Variola virus
ucuucauuaauaa

SEQ ID NO: 4083490 - RNA, 17 nt, Variola virus
ucuuccaauaaaugucc

SEQ ID NO: 4083491 - RNA, 16 nt, Variola virus
ucuuccauuuaaauau

SEQ ID NO: 4083492 - RNA, 20 nt, Variola virus
ucuucccaaaauguuagaga

SEQ ID NO: 4083493 - RNA, 22 nt, Variola virus
ucuucgcccucaauuucccaaa

SEQ ID NO: 4083494 - RNA, 23 nt, Variola virus
ucuucguaaaaagauucuugaaa

SEQ ID NO: 4083495 - RNA, 14 nt, Variola virus
ucuucuacauuauu

SEQ ID NO: 4083496 - RNA, 13 nt, Variola virus
ucuucuauuucua

SEQ ID NO: 4083497 - RNA, 13 nt, Variola virus
ucuucucaaaaga

SEQ ID NO: 4083498 - RNA, 22 nt, Variola virus
ucuucucgcuaguuuacuaugu

SEQ ID NO: 4083499 - RNA, 19 nt, Variola virus
ucuucucuaagagcuacgu

SEQ ID NO: 4083500 - RNA, 14 nt, Variola virus
ucuucuucuacauu

SEQ ID NO: 4083501 - RNA, 16 nt, Variola virus
ucuuggauuucauaua

SEQ ID NO: 4083502 - RNA, 17 nt, Variola virus
ucuugugcuguuauaua

SEQ ID NO: 4083503 - RNA, 22 nt, Variola virus
ucuuuaaguuuuccguuagaaa

SEQ ID NO: 4083504 - RNA, 22 nt, Variola virus
ucuuuacuagagagaaagcuuu

SEQ ID NO: 4083505 - RNA, 17 nt, Variola virus
ucuuuagcuucugaaau

SEQ ID NO: 4083506 - RNA, 20 nt, Variola virus
ucuuugaugguguuagcaua

SEQ ID NO: 4083507 - RNA, 14 nt, Variola virus
ucuuuguuauuaua

SEQ ID NO: 4083508 - RNA, 22 nt, Variola virus
ucuuuuaaaucccaauucagaa

SEQ ID NO: 4083509 - RNA, 23 nt, Variola virus
ugaaaacagaaacaucuuauuca

SEQ ID NO: 4083510 - RNA, 12 nt, Variola virus
ugaaaauuggag

SEQ ID NO: 4083511 - RNA, 12 nt, Variola virus
ugaaacaaagaa

SEQ ID NO: 4083512 - RNA, 13 nt, Variola virus
ugaaauaacucuu

SEQ ID NO: 4083513 - RNA, 13 nt, Variola virus
ugaacaauugucu

SEQ ID NO: 4083514 - RNA, 17 nt, Variola virus
ugaacacacaacgcauc

SEQ ID NO: 4083515 - RNA, 21 nt, Variola virus
ugaacagacauuguauuauga

SEQ ID NO: 4083516 - RNA, 17 nt, Variola virus
ugaacauaguaagaaau

SEQ ID NO: 4083517 - RNA, 14 nt, Variola virus
ugaaccaaacauuc

SEQ ID NO: 4083518 - RNA, 23 nt, Variola virus
ugaacccguuaauguauaucuuu

SEQ ID NO: 4083519 - RNA, 22 nt, Variola virus
ugaaccguauuacucuacagua

SEQ ID NO: 4083520 - RNA, 23 nt, Variola virus
ugaacgguaucuucuugauuucu

SEQ ID NO: 4083521 - RNA, 20 nt, Variola virus
ugaacuauuucuugaaugag

SEQ ID NO: 4083522 - RNA, 21 nt, Variola virus
ugaagaagagguaagauaucu

SEQ ID NO: 4083523 - RNA, 22 nt, Variola virus
ugaagaagugucuauaaaugua

SEQ ID NO: 4083524 - RNA, 20 nt, Variola virus
ugaagaauuuauauaaauua

SEQ ID NO: 4083525 - RNA, 15 nt, Variola virus
ugaagauaaugugaa

SEQ ID NO: 4083526 - RNA, 18 nt, Variola virus
ugaagauguagcauucca

SEQ ID NO: 4083527 - RNA, 21 nt, Variola virus
ugaagauucccaaauaaucau

SEQ ID NO: 4083528 - RNA, 20 nt, Variola virus
ugaagcauuggaagcaacua

SEQ ID NO: 4083529 - RNA, 16 nt, Variola virus
ugaagccauugaaaac

SEQ ID NO: 4083530 - RNA, 14 nt, Variola virus
ugaauacauuauca

SEQ ID NO: 4083531 - RNA, 20 nt, Variola virus
ugaauaccauacaauuuaug

SEQ ID NO: 4083532 - RNA, 17 nt, Variola virus
ugaauaccauuaaacaa

SEQ ID NO: 4083533 - RNA, 22 nt, Variola virus
ugaauauagaacaucauuucca

SEQ ID NO: 4083534 - RNA, 20 nt, Variola virus
ugaauaucuacaaauuggag

SEQ ID NO: 4083535 - RNA, 14 nt, Variola virus
ugaauauuaaacac

SEQ ID NO: 4083536 - RNA, 22 nt, Variola virus
ugaaucaaauguaacuauucaa

SEQ ID NO: 4083537 - RNA, 14 nt, Variola virus
ugaaugaauacaga

SEQ ID NO: 4083538 - RNA, 20 nt, Variola virus
ugaaugcugaugaacagguu

SEQ ID NO: 4083539 - RNA, 15 nt, Variola virus
ugaauggauuuauca

SEQ ID NO: 4083540 - RNA, 17 nt, Variola virus
ugaauguucucaagaac

SEQ ID NO: 4083541 - RNA, 14 nt, Variola virus
ugaauuguuucuuu

SEQ ID NO: 4083542 - RNA, 15 nt, Variola virus
ugaauuuaccagaua

SEQ ID NO: 4083543 - RNA, 14 nt, Variola virus
ugacaaaaauugug

SEQ ID NO: 4083544 - RNA, 13 nt, Variola virus
ugacaaauuauuc

SEQ ID NO: 4083545 - RNA, 19 nt, Variola virus
cacaugaagaaaaacaccu

SEQ ID NO: 4083546 - RNA, 13 nt, Variola virus
cacaugaaugaaa

SEQ ID NO: 4083547 - RNA, 18 nt, Variola virus
cacauuguauauaguuua

SEQ ID NO: 4083548 - RNA, 20 nt, Variola virus
cacauuucagcaaucuaaca

SEQ ID NO: 4083549 - RNA, 13 nt, Variola virus
caccaaacauauu

SEQ ID NO: 4083550 - RNA, 19 nt, Variola virus
caccauauagaucaaucau

SEQ ID NO: 4083551 - RNA, 23 nt, Variola virus
cacggauccguaucuccaacaag

SEQ ID NO: 4083552 - RNA, 21 nt, Variola virus
cacguaaccauucuaaacaau

SEQ ID NO: 4083553 - RNA, 16 nt, Variola virus
cacguugucuuucaag

SEQ ID NO: 4083554 - RNA, 14 nt, Variola virus
cacguuuaaacauu

SEQ ID NO: 4083555 - RNA, 13 nt, Variola virus
cacuaauaucaau

SEQ ID NO: 4083556 - RNA, 14 nt, Variola virus
cacuagaaaccacg

SEQ ID NO: 4083557 - RNA, 13 nt, Variola virus
cacuaucauaauu

SEQ ID NO: 4083558 - RNA, 14 nt, Variola virus
cacuauucauguaa

SEQ ID NO: 4083559 - RNA, 17 nt, Variola virus
cacucucccuauaucuu

SEQ ID NO: 4083560 - RNA, 14 nt, Variola virus
cacugauauuauga

SEQ ID NO: 4083561 - RNA, 15 nt, Variola virus
cagaaagcuguggau

SEQ ID NO: 4083562 - RNA, 21 nt, Variola virus
cagaaauauaugagauguagu

SEQ ID NO: 4083563 - RNA, 12 nt, Variola virus
cagaaaugauuu

SEQ ID NO: 4083564 - RNA, 23 nt, Variola virus
cagaaaugauuuuggaaaaauug

SEQ ID NO: 4083565 - RNA, 21 nt, Variola virus
cagaaauugugucauugacau

SEQ ID NO: 4083566 - RNA, 21 nt, Variola virus
cagaacgaauuaugauagaaa

SEQ ID NO: 4083567 - RNA, 22 nt, Variola virus
cagaagucauacuagaauaaag

SEQ ID NO: 4083568 - RNA, 21 nt, Variola virus
cagaagugugaauaugaucuu

SEQ ID NO: 4083569 - RNA, 21 nt, Variola virus
cagaaucgcaacgcuaaaaga

SEQ ID NO: 4083570 - RNA, 22 nt, Variola virus
cagacaauaagagcagcacaaa

SEQ ID NO: 4083571 - RNA, 22 nt, Variola virus
cagacacugucacauacacuag

SEQ ID NO: 4083572 - RNA, 14 nt, Variola virus
cagaggaaacuaau

SEQ ID NO: 4083573 - RNA, 13 nt, Variola virus
cagauacauacua

SEQ ID NO: 4083574 - RNA, 21 nt, Variola virus
cagauauagggauagaaguag

SEQ ID NO: 4083575 - RNA, 13 nt, Variola virus
cagaugucauuau

SEQ ID NO: 4083576 - RNA, 21 nt, Variola virus
cagauuagaugacaugacauu

SEQ ID NO: 4083577 - RNA, 21 nt, Variola virus
cagauuagcagaauagauauu

SEQ ID NO: 4083578 - RNA, 18 nt, Variola virus
cagauuuugauauucuau

SEQ ID NO: 4083579 - RNA, 20 nt, Variola virus
cagcaacuucuguacuagug

SEQ ID NO: 4083580 - RNA, 19 nt, Variola virus
cagcaggaauaccaacaaa

SEQ ID NO: 4083581 - RNA, 15 nt, Variola virus
cagcauaaacacaaa

SEQ ID NO: 4083582 - RNA, 14 nt, Variola virus
cagcauuaacugau

SEQ ID NO: 4083583 - RNA, 22 nt, Variola virus
cagcauuugacuauuauguuua

SEQ ID NO: 4083584 - RNA, 21 nt, Variola virus
cagcuacuugagauaccaaag

SEQ ID NO: 4083585 - RNA, 22 nt, Variola virus
caggaaacgcuguauauggaaa

SEQ ID NO: 4083586 - RNA, 22 nt, Variola virus
caggaagauuagucagaccauu

SEQ ID NO: 4083587 - RNA, 16 nt, Variola virus
caggaauaugacuauu

SEQ ID NO: 4083588 - RNA, 21 nt, Variola virus
caggauuccuauucauuuuga

SEQ ID NO: 4083589 - RNA, 16 nt, Variola virus
cagguaggcaguuuua

SEQ ID NO: 4083590 - RNA, 17 nt, Variola virus
caguacaucuaucacag

SEQ ID NO: 4083591 - RNA, 16 nt, Variola virus
caguacuaauuuccaa

SEQ ID NO: 4083592 - RNA, 15 nt, Variola virus
caguacuuauacaau

SEQ ID NO: 4083593 - RNA, 14 nt, Variola virus
caguauccuuuuug

SEQ ID NO: 4083594 - RNA, 20 nt, Variola virus
caguauugacaauacuguau

SEQ ID NO: 4083595 - RNA, 15 nt, Variola virus
caguauuuuuggaau

SEQ ID NO: 4083596 - RNA, 23 nt, Variola virus
cagucauuccaucauuuaagaag

SEQ ID NO: 4083597 - RNA, 15 nt, Variola virus
cagucgaaacauauu

SEQ ID NO: 4083598 - RNA, 16 nt, Variola virus
cagucuaauauccauu

SEQ ID NO: 4083599 - RNA, 23 nt, Variola virus
cagucuggaaacuaucacguuua

SEQ ID NO: 4083600 - RNA, 17 nt, Variola virus
cagugacuguaucacac

SEQ ID NO: 4083601 - RNA, 22 nt, Variola virus
caguggaucgguucagcauuua

SEQ ID NO: 4083602 - RNA, 19 nt, Variola virus
caguuaagucaauaauauu

SEQ ID NO: 4083603 - RNA, 16 nt, Variola virus
caguucguuuaacgau

SEQ ID NO: 4083604 - RNA, 23 nt, Variola virus
caguuuuuaauuucuuugguaau

SEQ ID NO: 4083605 - RNA, 21 nt, Variola virus
cauaaaauuaucgaggauauu

SEQ ID NO: 4083606 - RNA, 12 nt, Variola virus
cauaaacaaauu

SEQ ID NO: 4083607 - RNA, 14 nt, Variola virus
cauaaacugauacg

SEQ ID NO: 4083608 - RNA, 21 nt, Variola virus
cauaaauaaaugcuugauauu

SEQ ID NO: 4083609 - RNA, 19 nt, Variola virus
cauaaauaguaaauacaau

SEQ ID NO: 4083610 - RNA, 14 nt, Variola virus
cauaacaaauguau

SEQ ID NO: 4083611 - RNA, 16 nt, Variola virus
cauaacagauaguuua

SEQ ID NO: 4083612 - RNA, 13 nt, Variola virus
cauaagcaucucc

SEQ ID NO: 4083613 - RNA, 14 nt, Variola virus
cauaaguguauaua

SEQ ID NO: 4083614 - RNA, 13 nt, Variola virus
cauaauauauaca

SEQ ID NO: 4083615 - RNA, 18 nt, Variola virus
cauaauauggauccucau

SEQ ID NO: 4083616 - RNA, 16 nt, Variola virus
cauaauauuaaacacu

SEQ ID NO: 4083617 - RNA, 21 nt, Variola virus
cauaaucgucgacaaaguacu

SEQ ID NO: 4083618 - RNA, 21 nt, Variola virus
cauacaugaaaugaucucuau

SEQ ID NO: 4083619 - RNA, 20 nt, Variola virus
cauacauguuauuaucacac

SEQ ID NO: 4083620 - RNA, 21 nt, Variola virus
cauacguaccagcuauguuua

SEQ ID NO: 4083621 - RNA, 13 nt, Variola virus
cauacuauguuuu

SEQ ID NO: 4083622 - RNA, 16 nt, Variola virus
cauacuguaccaauaa

SEQ ID NO: 4083623 - RNA, 15 nt, Variola virus
cauagaauaaauauc

SEQ ID NO: 4083624 - RNA, 15 nt, Variola virus
cauagauuuccgaag

SEQ ID NO: 4083625 - RNA, 16 nt, Variola virus
cauagcauuaauaauu

SEQ ID NO: 4083626 - RNA, 19 nt, Variola virus
cauaguggacaacauuaau

SEQ ID NO: 4083627 - RNA, 15 nt, Variola virus
cauaguugcucaaaa

SEQ ID NO: 4083628 - RNA, 13 nt, Variola virus
cauaguuggauuu

SEQ ID NO: 4083629 - RNA, 15 nt, Variola virus
cauauaaauauaauu

SEQ ID NO: 4083630 - RNA, 19 nt, Variola virus
cauauaacguaaccagaau

SEQ ID NO: 4083631 - RNA, 19 nt, Variola virus
cauauaagaaacuauaaag

SEQ ID NO: 4083632 - RNA, 16 nt, Variola virus
cauauagaucaaucau

SEQ ID NO: 4083633 - RNA, 22 nt, Variola virus
cauauaguuuggauuaauaauu

SEQ ID NO: 4083634 - RNA, 12 nt, Variola virus
cauauaucacau

SEQ ID NO: 4083635 - RNA, 17 nt, Variola virus
cauauauuagaaauaca

SEQ ID NO: 4083636 - RNA, 16 nt, Variola virus
cauaugccaacaugca

SEQ ID NO: 4083637 - RNA, 20 nt, Variola virus
cauauuaucaccuauugcca

SEQ ID NO: 4083638 - RNA, 13 nt, Variola virus
cauauucucauaa

SEQ ID NO: 4083639 - RNA, 19 nt, Variola virus
cauauuuauucuauggaug

SEQ ID NO: 4083640 - RNA, 15 nt, Variola virus
cauauuucauuucca

SEQ ID NO: 4083641 - RNA, 22 nt, Variola virus
caucaaaaauaaguaaaaagug

SEQ ID NO: 4083642 - RNA, 21 nt, Variola virus
caucauaugacauuucaugaa

SEQ ID NO: 4083643 - RNA, 15 nt, Variola virus
cauccaagucaauau

SEQ ID NO: 4083644 - RNA, 20 nt, Variola virus
cauccuuugauaauuuucca

SEQ ID NO: 4083645 - RNA, 16 nt, Variola virus
caucgaugaugcauuu

SEQ ID NO: 4083646 - RNA, 21 nt, Variola virus
caucgguacggguauucauuu

SEQ ID NO: 4083647 - RNA, 14 nt, Variola virus
caucuaacagaauu

SEQ ID NO: 4083648 - RNA, 24 nt, Variola virus
caucuaacuauaugauauccacua

SEQ ID NO: 4083649 - RNA, 14 nt, Variola virus
caucuacuuuucca

SEQ ID NO: 4083650 - RNA, 20 nt, Variola virus
caucuaguccuuuaauucca

SEQ ID NO: 4083651 - RNA, 19 nt, Variola virus
caucuauagacgaugauuu

SEQ ID NO: 4083652 - RNA, 16 nt, Variola virus
caucuaucacaguuaa

SEQ ID NO: 4083653 - RNA, 14 nt, Variola virus
caucugauuccaua

SEQ ID NO: 4083654 - RNA, 22 nt, Variola virus
caucuuuaguaaacauaucaua

SEQ ID NO: 4083655 - RNA, 20 nt, Variola virus
caucuuuugccaacacagag

SEQ ID NO: 4083656 - RNA, 16 nt, Variola virus
caugaagaaaaacacc

SEQ ID NO: 4083657 - RNA, 16 nt, Variola virus
caugaaucuaaaagaa

SEQ ID NO: 4083658 - RNA, 16 nt, Variola virus
caugauaagaauaauu

SEQ ID NO: 4083659 - RNA, 13 nt, Variola virus
caugauaguuuua

SEQ ID NO: 4083660 - RNA, 22 nt, Variola virus
caugauccuauucuaaauggau

SEQ ID NO: 4083661 - RNA, 17 nt, Variola virus
caugauuccguauucug

SEQ ID NO: 4083662 - RNA, 17 nt, Variola virus
cauggaaaaauauuaca

SEQ ID NO: 4083663 - RNA, 13 nt, Variola virus
cauggcaauaaua

SEQ ID NO: 4083664 - RNA, 17 nt, Variola virus
cauggcuucuuccauag

SEQ ID NO: 4083665 - RNA, 15 nt, Variola virus
caugggacuauauaa

SEQ ID NO: 4083666 - RNA, 12 nt, Variola virus
cauguauacaau

SEQ ID NO: 4083667 - RNA, 22 nt, Variola virus
caugucuaauguguuaaaaaaa

SEQ ID NO: 4083668 - RNA, 20 nt, Variola virus
caugugaauauaauaauaca

SEQ ID NO: 4083669 - RNA, 23 nt, Variola virus
caugugacuuuucucuaaaugau

SEQ ID NO: 4083670 - RNA, 16 nt, Variola virus
cauguugucuauuuuc

SEQ ID NO: 4083671 - RNA, 22 nt, Variola virus
cauuaaacccucgaucaugaau

SEQ ID NO: 4083672 - RNA, 18 nt, Variola virus
cauuaaaucuauuauauu

SEQ ID NO: 4083673 - RNA, 14 nt, Variola virus
cauuaaauguauuu

SEQ ID NO: 4083674 - RNA, 21 nt, Variola virus
cauuaacaucauacaucaauu

SEQ ID NO: 4083675 - RNA, 17 nt, Variola virus
cauuaacuuuaaugugu

SEQ ID NO: 4083676 - RNA, 20 nt, Variola virus
cauuaauugccauaauaauu

SEQ ID NO: 4083677 - RNA, 20 nt, Variola virus
cauuagaggauuuaucacau

SEQ ID NO: 4083678 - RNA, 17 nt, Variola virus
cauuaucauuuuguaau

SEQ ID NO: 4083679 - RNA, 11 nt, Variola virus
cauuaugaauu

SEQ ID NO: 4083680 - RNA, 18 nt, Variola virus
cauuauucuauuucgaau

SEQ ID NO: 4083681 - RNA, 11 nt, Variola virus
cauuauuggaa

SEQ ID NO: 4083682 - RNA, 20 nt, Variola virus
cauuauuuauuuaugauaua

SEQ ID NO: 4083683 - RNA, 20 nt, Variola virus
cauuccaagucacuaugugu

SEQ ID NO: 4083684 - RNA, 15 nt, Variola virus
cauuccaguauucuu

SEQ ID NO: 4083685 - RNA, 14 nt, Variola virus
cauuccaucauuua

SEQ ID NO: 4083686 - RNA, 17 nt, Variola virus
cauuccuaugaugaugu

SEQ ID NO: 4083687 - RNA, 15 nt, Variola virus
cauucgaagacgcua

SEQ ID NO: 4083688 - RNA, 17 nt, Variola virus
cauucuaauguucauaa

SEQ ID NO: 4083689 - RNA, 20 nt, Variola virus
cauucuacguccuauggaug

SEQ ID NO: 4083690 - RNA, 14 nt, Variola virus
cauucuaucucaaa

SEQ ID NO: 4083691 - RNA, 17 nt, Variola virus
cauugaugacacuagau

SEQ ID NO: 4083692 - RNA, 12 nt, Variola virus
cauuggaagcaa

SEQ ID NO: 4083693 - RNA, 14 nt, Variola virus
cauuguccuauuuc

SEQ ID NO: 4083694 - RNA, 12 nt, Variola virus
cauuuaaaguua

SEQ ID NO: 4083695 - RNA, 19 nt, Variola virus
cauuuaaaguuacaaacaa

SEQ ID NO: 4083696 - RNA, 11 nt, Variola virus
cauuuaauagg

SEQ ID NO: 4083697 - RNA, 16 nt, Variola virus
cauuuaucacaaaaaa

SEQ ID NO: 4083698 - RNA, 18 nt, Variola virus
cauuuggucuauacaaau

SEQ ID NO: 4083699 - RNA, 13 nt, Variola virus
cauuuguaauaau

SEQ ID NO: 4083700 - RNA, 17 nt, Variola virus
cauuuguauaaucuuua

SEQ ID NO: 4083701 - RNA, 18 nt, Variola virus
cauuuuaggauaugcuuu

SEQ ID NO: 4083702 - RNA, 19 nt, Variola virus
cauuuuauaaauauauaau

SEQ ID NO: 4083703 - RNA, 16 nt, Variola virus
cauuuuauuguggaau

SEQ ID NO: 4083704 - RNA, 15 nt, Variola virus
cauuuucuaucuuua

SEQ ID NO: 4083705 - RNA, 13 nt, Variola virus
cauuuucuucaac

SEQ ID NO: 4083706 - RNA, 17 nt, Variola virus
cauuuuuuaaguauuug

SEQ ID NO: 4083707 - RNA, 12 nt, Variola virus
ccaaaagacuau

SEQ ID NO: 4083708 - RNA, 17 nt, Variola virus
ccaaacauuaacagauu

SEQ ID NO: 4083709 - RNA, 17 nt, Variola virus
ccaaaucaaaacaaaau

SEQ ID NO: 4083710 - RNA, 19 nt, Variola virus
ccaaaucuaguuguggaaa

SEQ ID NO: 4083711 - RNA, 14 nt, Variola virus
ccaaauguuggaaa

SEQ ID NO: 4083712 - RNA, 13 nt, Variola virus
ccaaauuaaugag

SEQ ID NO: 4083713 - RNA, 14 nt, Variola virus
ccaaauuuaaauac

SEQ ID NO: 4083714 - RNA, 18 nt, Variola virus
ccaaauuuguuuuguuua

SEQ ID NO: 4083715 - RNA, 14 nt, Variola virus
ccaacaaacauauu

SEQ ID NO: 4083716 - RNA, 18 nt, Variola virus
ccaacauguauauuugga

SEQ ID NO: 4083717 - RNA, 17 nt, Variola virus
ccaacguaauaaugaag

SEQ ID NO: 4083718 - RNA, 21 nt, Variola virus
ccaacuguagacguaguucua

SEQ ID NO: 4083719 - RNA, 21 nt, Variola virus
ccaagaaaucguauauaacua

SEQ ID NO: 4083720 - RNA, 20 nt, Variola virus
ccaaggacagaaaaauguua

SEQ ID NO: 4083721 - RNA, 18 nt, Variola virus
ccaaguaaugaucaucua

SEQ ID NO: 4083722 - RNA, 16 nt, Variola virus
ccaagugcuuaaauau

SEQ ID NO: 4083723 - RNA, 14 nt, Variola virus
ccaaguuauugcuu

SEQ ID NO: 4083724 - RNA, 23 nt, Variola virus
ccaauaacggaaaucccaaaugu

SEQ ID NO: 4083725 - RNA, 16 nt, Variola virus
ccaauauggcaauuau

SEQ ID NO: 4083726 - RNA, 16 nt, Variola virus
ccaauuauuugaacaa

SEQ ID NO: 4083727 - RNA, 19 nt, Variola virus
ccacagauaauauuagaca

SEQ ID NO: 4083728 - RNA, 18 nt, Variola virus
ccacaugccgccacuacc

SEQ ID NO: 4083729 - RNA, 18 nt, Variola virus
ccaccuccgucaucaucu

SEQ ID NO: 4083730 - RNA, 19 nt, Variola virus
ccaccuccgucaucaucuc

SEQ ID NO: 4083731 - RNA, 16 nt, Variola virus
ccacuuugguaaaauc

SEQ ID NO: 4083732 - RNA, 15 nt, Variola virus
ccagaacuauuuuua

SEQ ID NO: 4083733 - RNA, 17 nt, Variola virus
ccagaauacuauuuggu

SEQ ID NO: 4083734 - RNA, 19 nt, Variola virus
ccagaguguucgaaugcca

SEQ ID NO: 4083735 - RNA, 16 nt, Variola virus
ccagauagaaaauauc

SEQ ID NO: 4083736 - RNA, 15 nt, Variola virus
ccagauauauaucuu

SEQ ID NO: 4083737 - RNA, 20 nt, Variola virus
ccagggaaaucaaagaagaa

SEQ ID NO: 4083738 - RNA, 20 nt, Variola virus
ccagucaugaaucaauuagu

SEQ ID NO: 4083739 - RNA, 20 nt, Variola virus
ccagucugaacaucaaucuu

SEQ ID NO: 4083740 - RNA, 20 nt, Variola virus
ccagugcuauaucucccugu

SEQ ID NO: 4083741 - RNA, 21 nt, Variola virus
ccauaaaacaaaaucuaacag

SEQ ID NO: 4083742 - RNA, 15 nt, Variola virus
ccauaaacuauuuua

SEQ ID NO: 4083743 - RNA, 17 nt, Variola virus
ccauaacauaauuuucu

SEQ ID NO: 4083744 - RNA, 17 nt, Variola virus
ccauauaucuguaucau

SEQ ID NO: 4083745 - RNA, 13 nt, Variola virus
ccauauauguuuu

SEQ ID NO: 4083746 - RNA, 22 nt, Variola virus
ccaucaaaagcauuaauacagu

SEQ ID NO: 4083747 - RNA, 19 nt, Variola virus
ccaucguguuaaauuuucu

SEQ ID NO: 4083748 - RNA, 17 nt, Variola virus
ccaucucuauguuucag

SEQ ID NO: 4083749 - RNA, 15 nt, Variola virus
ccaugaaagaaagaa

SEQ ID NO: 4083750 - RNA, 23 nt, Variola virus
ccaugagauuguagaagcuuugg

SEQ ID NO: 4083751 - RNA, 14 nt, Variola virus
ccaugguaaacucu

SEQ ID NO: 4083752 - RNA, 21 nt, Variola virus
ccaugucaaaacuuguucaau

SEQ ID NO: 4083753 - RNA, 16 nt, Variola virus
ccauuaaagaauucuu

SEQ ID NO: 4083754 - RNA, 17 nt, Variola virus
ccauuauuagaaauuua

SEQ ID NO: 4083755 - RNA, 14 nt, Variola virus
ccauugaaaacuau

SEQ ID NO: 4083756 - RNA, 16 nt, Variola virus
ccauuggcaaaguauc

SEQ ID NO: 4083757 - RNA, 17 nt, Variola virus
ccauuucaacaguuucu

SEQ ID NO: 4083758 - RNA, 19 nt, Variola virus
ccauuuuuaugaucgucuu

SEQ ID NO: 4083759 - RNA, 23 nt, Variola virus
cccagauguucuauaaacuuggc

SEQ ID NO: 4083760 - RNA, 17 nt, Variola virus
cccgcuucuauuuacuc

SEQ ID NO: 4083761 - RNA, 18 nt, Variola virus
cccguaguuuuaacugga

SEQ ID NO: 4083762 - RNA, 15 nt, Variola virus
ccgaaaauauugugu

SEQ ID NO: 4083763 - RNA, 23 nt, Variola virus
ccggcauuauagauguguauaca

SEQ ID NO: 4083764 - RNA, 17 nt, Variola virus
ccggugagaacaugaga

SEQ ID NO: 4083765 - RNA, 14 nt, Variola virus
ccguagaaauacua

SEQ ID NO: 4083766 - RNA, 14 nt, Variola virus
ccguucucugaaua

SEQ ID NO: 4083767 - RNA, 22 nt, Variola virus
ccguuuauuaucuuguuccaua

SEQ ID NO: 4083768 - RNA, 17 nt, Variola virus
ccuauaaacaugaauuu

SEQ ID NO: 4083769 - RNA, 18 nt, Variola virus
ccucagaggauauguuug

SEQ ID NO: 4083770 - RNA, 15 nt, Variola virus
ccucagguagguuua

SEQ ID NO: 4083771 - RNA, 22 nt, Variola virus
ccucuauuauacauuuaauguu

SEQ ID NO: 4083772 - RNA, 20 nt, Variola virus
ccugucuccuagcaauuagu

SEQ ID NO: 4083773 - RNA, 17 nt, Variola virus
ccuuaaauguaucuuua

SEQ ID NO: 4083774 - RNA, 15 nt, Variola virus
ccuuaagaauaucca

SEQ ID NO: 4083775 - RNA, 16 nt, Variola virus
ccuuggcuaauugucu

SEQ ID NO: 4083776 - RNA, 11 nt, Variola virus
ccuuguaacuu

SEQ ID NO: 4083777 - RNA, 21 nt, Variola virus
ccuuuaaaaguaaucaugaaa

SEQ ID NO: 4083778 - RNA, 20 nt, Variola virus
ccuuuacaucucgcaauaau

SEQ ID NO: 4083779 - RNA, 15 nt, Variola virus
ccuuugcuauuucua

SEQ ID NO: 4083780 - RNA, 15 nt, Variola virus
ccuuuuuauuuucua

SEQ ID NO: 4083781 - RNA, 18 nt, Variola virus
cgaaacacgucaaagguu

SEQ ID NO: 4083782 - RNA, 21 nt, Variola virus
cgaaauaguuaauaauucugu

SEQ ID NO: 4083783 - RNA, 16 nt, Variola virus
cgaacguauuacuaug

SEQ ID NO: 4083784 - RNA, 12 nt, Variola virus
cgaauaaaagau

SEQ ID NO: 4083785 - RNA, 18 nt, Variola virus
cgaauaaguuugcagaca

SEQ ID NO: 4083786 - RNA, 19 nt, Variola virus
cgaauaauucuaauaaacu

SEQ ID NO: 4083787 - RNA, 16 nt, Variola virus
cgaauaccauggauug

SEQ ID NO: 4083788 - RNA, 16 nt, Variola virus
cgaauauauaaaagac

SEQ ID NO: 4083789 - RNA, 22 nt, Variola virus
cgaauauuauaauaccaugacu

SEQ ID NO: 4083790 - RNA, 19 nt, Variola virus
cgaaugccaauguuaauuu

SEQ ID NO: 4083791 - RNA, 17 nt, Variola virus
cgacaaaaagauauaaa

SEQ ID NO: 4083792 - RNA, 20 nt, Variola virus
cgacgauaacgaaguauuua

SEQ ID NO: 4083793 - RNA, 16 nt, Variola virus
cgacucaguauacaaa

SEQ ID NO: 4083794 - RNA, 17 nt, Variola virus
cgagaauaugauagaaa

SEQ ID NO: 4083795 - RNA, 21 nt, Variola virus
cgagaauguugggauccagag

SEQ ID NO: 4083796 - RNA, 16 nt, Variola virus
uacaaaugauacugau

SEQ ID NO: 4083797 - RNA, 22 nt, Variola virus
uacaacacaggauaaauuauuu

SEQ ID NO: 4083798 - RNA, 15 nt, Variola virus
uacaacacuuuucua

SEQ ID NO: 4083799 - RNA, 11 nt, Variola virus
uacaacagaua

SEQ ID NO: 4083800 - RNA, 18 nt, Variola virus
uacaacauuccaaagauc

SEQ ID NO: 4083801 - RNA, 22 nt, Variola virus
uacaaccguuuccuccguuucc

SEQ ID NO: 4083802 - RNA, 22 nt, Variola virus
uacaagauugaaauuauauucu

SEQ ID NO: 4083803 - RNA, 17 nt, Variola virus
uacaaguggcugcuauu

SEQ ID NO: 4083804 - RNA, 15 nt, Variola virus
uacaauauuuacauu

SEQ ID NO: 4083805 - RNA, 22 nt, Variola virus
uacaaugaacgauaauauucua

SEQ ID NO: 4083806 - RNA, 14 nt, Variola virus
uacacaaauaauua

SEQ ID NO: 4083807 - RNA, 13 nt, Variola virus
uacacagaaucag

SEQ ID NO: 4083808 - RNA, 19 nt, Variola virus
uacacaucuaucaagugau

SEQ ID NO: 4083809 - RNA, 23 nt, Variola virus
uacaccauuaauagauaaaacga

SEQ ID NO: 4083810 - RNA, 20 nt, Variola virus
uacacguuagauuauucuca

SEQ ID NO: 4083811 - RNA, 13 nt, Variola virus
uacagaauuauug

SEQ ID NO: 4083812 - RNA, 21 nt, Variola virus
uacagauuguaguucuauaau

SEQ ID NO: 4083813 - RNA, 17 nt, Variola virus
uacagcguuuacuauuc

SEQ ID NO: 4083814 - RNA, 17 nt, Variola virus
uacaguaaaaauaacua

SEQ ID NO: 4083815 - RNA, 18 nt, Variola virus
uacagucuaauauccauu

SEQ ID NO: 4083816 - RNA, 13 nt, Variola virus
uacaguucuuggc

SEQ ID NO: 4083817 - RNA, 14 nt, Variola virus
uacauaacaucuuu

SEQ ID NO: 4083818 - RNA, 19 nt, Variola virus
uacauauaugcaauucgcu

SEQ ID NO: 4083819 - RNA, 17 nt, Variola virus
uacauauuauucaaaau

SEQ ID NO: 4083820 - RNA, 17 nt, Variola virus
uacauccaaaauacaaa

SEQ ID NO: 4083821 - RNA, 21 nt, Variola virus
uacauccugccauuaagaaac

SEQ ID NO: 4083822 - RNA, 20 nt, Variola virus
uacaucuaaauuuuuacuau

SEQ ID NO: 4083823 - RNA, 22 nt, Variola virus
uacaucugaaacauacaacaaa

SEQ ID NO: 4083824 - RNA, 18 nt, Variola virus
uacaugagcugaaugaca

SEQ ID NO: 4083825 - RNA, 18 nt, Variola virus
uacaugauaggaagaaaa

SEQ ID NO: 4083826 - RNA, 16 nt, Variola virus
uacaugauuaauacau

SEQ ID NO: 4083827 - RNA, 21 nt, Variola virus
uacaugguuaaaguacaugua

SEQ ID NO: 4083828 - RNA, 20 nt, Variola virus
uacauguaaugauuuaaaau

SEQ ID NO: 4083829 - RNA, 20 nt, Variola virus
uacauuauuacauagaugua

SEQ ID NO: 4083830 - RNA, 14 nt, Variola virus
uacauuuguaucua

SEQ ID NO: 4083831 - RNA, 18 nt, Variola virus
uaccaauaggaauacaag

SEQ ID NO: 4083832 - RNA, 20 nt, Variola virus
uaccacguaaaacuuaaaau

SEQ ID NO: 4083833 - RNA, 20 nt, Variola virus
uaccagauauuauacaaaau

SEQ ID NO: 4083834 - RNA, 11 nt, Variola virus
uaccauacuua

SEQ ID NO: 4083835 - RNA, 18 nt, Variola virus
uaccauggaaaaauauua

SEQ ID NO: 4083836 - RNA, 19 nt, Variola virus
uacccaaaucugaaaauaa

SEQ ID NO: 4083837 - RNA, 15 nt, Variola virus
uacccaauaaaaugu

SEQ ID NO: 4083838 - RNA, 13 nt, Variola virus
uacccaucuuaau

SEQ ID NO: 4083839 - RNA, 22 nt, Variola virus
uaccgcuaguacccuuaaucau

SEQ ID NO: 4083840 - RNA, 21 nt, Variola virus
uaccuaucaaggaacaaauau

SEQ ID NO: 4083841 - RNA, 13 nt, Variola virus
uaccuguuuuuau

SEQ ID NO: 4083842 - RNA, 13 nt, Variola virus
uaccuuaaucaug

SEQ ID NO: 4083843 - RNA, 21 nt, Variola virus
uaccuuugguucuuuaaaaga

SEQ ID NO: 4083844 - RNA, 22 nt, Variola virus
uacgaagaaaaaguaaauacug

SEQ ID NO: 4083845 - RNA, 13 nt, Variola virus
uacgaauaaaaga

SEQ ID NO: 4083846 - RNA, 21 nt, Variola virus
uacgagccaaaucuucuucua

SEQ ID NO: 4083847 - RNA, 18 nt, Variola virus
uacgauuuucuucuuuga

SEQ ID NO: 4083848 - RNA, 13 nt, Variola virus
uacgcguucucaa

SEQ ID NO: 4083849 - RNA, 21 nt, Variola virus
uacgcuauuaaucuuuaaaau

SEQ ID NO: 4083850 - RNA, 20 nt, Variola virus
uacgcucucuggaggauugu

SEQ ID NO: 4083851 - RNA, 14 nt, Variola virus
uacggaaagaacca

SEQ ID NO: 4083852 - RNA, 18 nt, Variola virus
uacgguugauucaaaaau

SEQ ID NO: 4083853 - RNA, 17 nt, Variola virus
uacguauuauauaugua

SEQ ID NO: 4083854 - RNA, 16 nt, Variola virus
uacgucuauacagaua

SEQ ID NO: 4083855 - RNA, 15 nt, Variola virus
uacgucuucuaaaaa

SEQ ID NO: 4083856 - RNA, 14 nt, Variola virus
uacguuacuaaaau

SEQ ID NO: 4083857 - RNA, 17 nt, Variola virus
uacguuauugucaaaau

SEQ ID NO: 4083858 - RNA, 20 nt, Variola virus
uacuaaacgaucaaccaaaa

SEQ ID NO: 4083859 - RNA, 15 nt, Variola virus
uacuaaagaaacugu

SEQ ID NO: 4083860 - RNA, 22 nt, Variola virus
uacuaaagacuaugucaaagua

SEQ ID NO: 4083861 - RNA, 12 nt, Variola virus
uacuaagaaagu

SEQ ID NO: 4083862 - RNA, 18 nt, Variola virus
uacuaauacuaauacuaa

SEQ ID NO: 4083863 - RNA, 16 nt, Variola virus
uacuacacauuauucc

SEQ ID NO: 4083864 - RNA, 15 nt, Variola virus
uacuaguuccaacau

SEQ ID NO: 4083865 - RNA, 13 nt, Variola virus
uacuauaauauua

SEQ ID NO: 4083866 - RNA, 22 nt, Variola virus
uacuauauuaacaucuaaacau

SEQ ID NO: 4083867 - RNA, 12 nt, Variola virus
uacuaucaaaau

SEQ ID NO: 4083868 - RNA, 15 nt, Variola virus
uacuaucuuuaacau

SEQ ID NO: 4083869 - RNA, 19 nt, Variola virus
uacuaugcacauuauucua

SEQ ID NO: 4083870 - RNA, 14 nt, Variola virus
uacuauuaaucagu

SEQ ID NO: 4083871 - RNA, 15 nt, Variola virus
uacuauuguacauua

SEQ ID NO: 4083872 - RNA, 14 nt, Variola virus
uacuauuuugguau

SEQ ID NO: 4083873 - RNA, 23 nt, Variola virus
uacucacggcuacggcauuagau

SEQ ID NO: 4083874 - RNA, 14 nt, Variola virus
uacucauuaucaua

SEQ ID NO: 4083875 - RNA, 17 nt, Variola virus
uacucccacaaauacug

SEQ ID NO: 4083876 - RNA, 13 nt, Variola virus
uacuccguuuuau

SEQ ID NO: 4083877 - RNA, 19 nt, Variola virus
uacuccuuucuuaaugcau

SEQ ID NO: 4083878 - RNA, 17 nt, Variola virus
uacucguguccauaauc

SEQ ID NO: 4083879 - RNA, 19 nt, Variola virus
uacucuagauaaaaucacu

SEQ ID NO: 4083880 - RNA, 17 nt, Variola virus
uacucuauaaaauacua

SEQ ID NO: 4083881 - RNA, 18 nt, Variola virus
uacugaggggaaaaucaa

SEQ ID NO: 4083882 - RNA, 21 nt, Variola virus
uacugcaauaauuuucaaaag

SEQ ID NO: 4083883 - RNA, 16 nt, Variola virus
uacugcuggaaaauaa

SEQ ID NO: 4083884 - RNA, 14 nt, Variola virus
uacugucuuuugug

SEQ ID NO: 4083885 - RNA, 14 nt, Variola virus
uacuguuaaaugua

SEQ ID NO: 4083886 - RNA, 16 nt, Variola virus
uacuguucauacauga

SEQ ID NO: 4083887 - RNA, 19 nt, Variola virus
uacuguugaguaaaucagu

SEQ ID NO: 4083888 - RNA, 11 nt, Variola virus
uacuuaaugaa

SEQ ID NO: 4083889 - RNA, 18 nt, Variola virus
uacuuauuaguaaaacua

SEQ ID NO: 4083890 - RNA, 17 nt, Variola virus
uacuucagguuucuuag

SEQ ID NO: 4083891 - RNA, 15 nt, Variola virus
uacuucuauacaaaa

SEQ ID NO: 4083892 - RNA, 17 nt, Variola virus
uacuugacaucuaaaaa

SEQ ID NO: 4083893 - RNA, 22 nt, Variola virus
uacuuggaaaguuuuauaugua

SEQ ID NO: 4083894 - RNA, 23 nt, Variola virus
uacuuuuucuuuaccuuaagaau

SEQ ID NO: 4083895 - RNA, 18 nt, Variola virus
uacuuuuugcguauacau

SEQ ID NO: 4083896 - RNA, 14 nt, Variola virus
uagaaaaaauuacu

SEQ ID NO: 4083897 - RNA, 13 nt, Variola virus
uagaaaaaugcua

SEQ ID NO: 4083898 - RNA, 19 nt, Variola virus
uagaaaauaauauagauuu

SEQ ID NO: 4083899 - RNA, 21 nt, Variola virus
uagaaagaaacgauuauuucu

SEQ ID NO: 4083900 - RNA, 22 nt, Variola virus
uagaaauaagagacuuaaacaa

SEQ ID NO: 4083901 - RNA, 14 nt, Variola virus
uagaaauacaaaag

SEQ ID NO: 4083902 - RNA, 19 nt, Variola virus
uagaaauaucuaggacaau

SEQ ID NO: 4083903 - RNA, 21 nt, Variola virus
uagaaaugugcuacuaagaua

SEQ ID NO: 4083904 - RNA, 20 nt, Variola virus
uagaaauuuaucaauaucca

SEQ ID NO: 4083905 - RNA, 22 nt, Variola virus
uagaacacauaaccaauuuaua

SEQ ID NO: 4083906 - RNA, 20 nt, Variola virus
uagaagaaauugaacuccuc

SEQ ID NO: 4083907 - RNA, 15 nt, Variola virus
uagaagcuaacauac

SEQ ID NO: 4083908 - RNA, 17 nt, Variola virus
uagaaggaguguuuucu

SEQ ID NO: 4083909 - RNA, 17 nt, Variola virus
uagaauaaauauccuug

SEQ ID NO: 4083910 - RNA, 13 nt, Variola virus
uagaauaucacau

SEQ ID NO: 4083911 - RNA, 18 nt, Variola virus
uagaauuuauaaacauca

SEQ ID NO: 4083912 - RNA, 16 nt, Variola virus
uagaauuucauuuugu

SEQ ID NO: 4083913 - RNA, 13 nt, Variola virus
uagacaaaacuau

SEQ ID NO: 4083914 - RNA, 21 nt, Variola virus
uagaccggauacuagacaucu

SEQ ID NO: 4083915 - RNA, 20 nt, Variola virus
uagacgagggguuagauggu

SEQ ID NO: 4083916 - RNA, 21 nt, Variola virus
uagacugaaugcuuucuugga

SEQ ID NO: 4083917 - RNA, 22 nt, Variola virus
uagagacaaacuauuaacuauc

SEQ ID NO: 4083918 - RNA, 20 nt, Variola virus
uagagaccgcgucuguuaua

SEQ ID NO: 4083919 - RNA, 14 nt, Variola virus
uagagagauucauu

SEQ ID NO: 4083920 - RNA, 21 nt, Variola virus
uagagaggcugcugaaaauaa

SEQ ID NO: 4083921 - RNA, 15 nt, Variola virus
uagagauaauuuauc

SEQ ID NO: 4083922 - RNA, 13 nt, Variola virus
uauaguuuggauu

SEQ ID NO: 4083923 - RNA, 22 nt, Variola virus
uauauaagacacagaaauacug

SEQ ID NO: 4083924 - RNA, 24 nt, Variola virus
uauauaagacacagaaauacugua

SEQ ID NO: 4083925 - RNA, 14 nt, Variola virus
uauauaagacguau

SEQ ID NO: 4083926 - RNA, 22 nt, Variola virus
uauauagcuauucuucuuuaaa

SEQ ID NO: 4083927 - RNA, 21 nt, Variola virus
uauauaguuuuuacacauaga

SEQ ID NO: 4083928 - RNA, 15 nt, Variola virus
uauauaucuauuaca

SEQ ID NO: 4083929 - RNA, 17 nt, Variola virus
uauauccuuauuaacuu

SEQ ID NO: 4083930 - RNA, 16 nt, Variola virus
uauaucuaacaucuug

SEQ ID NO: 4083931 - RNA, 21 nt, Variola virus
uauaucuagaguaauguuuaa

SEQ ID NO: 4083932 - RNA, 16 nt, Variola virus
uauaugagauguaguu

SEQ ID NO: 4083933 - RNA, 14 nt, Variola virus
uauaugauuaucaa

SEQ ID NO: 4083934 - RNA, 19 nt, Variola virus
uauaugcaugauagaagau

SEQ ID NO: 4083935 - RNA, 12 nt, Variola virus
uauaugucuacc

SEQ ID NO: 4083936 - RNA, 14 nt, Variola virus
auguaaagaaggag

SEQ ID NO: 4083937 - RNA, 13 nt, Variola virus
auguaacgcguau

SEQ ID NO: 4083938 - RNA, 17 nt, Variola virus
auguaauucuuucucca

SEQ ID NO: 4083939 - RNA, 17 nt, Variola virus
auguagugacgauguau

SEQ ID NO: 4083940 - RNA, 20 nt, Variola virus
auguauaaaacaacaaaauu

SEQ ID NO: 4083941 - RNA, 13 nt, Variola virus
auguauaaaccuu

SEQ ID NO: 4083942 - RNA, 23 nt, Variola virus
auguauaacaaaugcagaaauua

SEQ ID NO: 4083943 - RNA, 16 nt, Variola virus
auguaucgugccucau

SEQ ID NO: 4083944 - RNA, 16 nt, Variola virus
auguaugcuaauagcg

SEQ ID NO: 4083945 - RNA, 19 nt, Variola virus
auguauuuuuuaugauaua

SEQ ID NO: 4083946 - RNA, 18 nt, Variola virus
augucaaaacuuguucaa

SEQ ID NO: 4083947 - RNA, 22 nt, Variola virus
augucauaaacuguaaaugauu

SEQ ID NO: 4083948 - RNA, 15 nt, Variola virus
augucauaaauucuu

SEQ ID NO: 4083949 - RNA, 20 nt, Variola virus
augucugauggcgacauaau

SEQ ID NO: 4083950 - RNA, 18 nt, Variola virus
augucuguacaaauguua

SEQ ID NO: 4083951 - RNA, 13 nt, Variola virus
augugaaacagac

SEQ ID NO: 4083952 - RNA, 22 nt, Variola virus
augugacccaguaaugcauuua

SEQ ID NO: 4083953 - RNA, 23 nt, Variola virus
augugacuuuucucuaaaugaug

SEQ ID NO: 4083954 - RNA, 16 nt, Variola virus
augugcuaaaaucacu

SEQ ID NO: 4083955 - RNA, 21 nt, Variola virus
auguguauacaucgguaaaua

SEQ ID NO: 4083956 - RNA, 20 nt, Variola virus
augugucucucacucucucu

SEQ ID NO: 4083957 - RNA, 14 nt, Variola virus
auguuaauauguau

SEQ ID NO: 4083958 - RNA, 16 nt, Variola virus
auguuacaaugucuag

SEQ ID NO: 4083959 - RNA, 14 nt, Variola virus
auguuagaaaaaug

SEQ ID NO: 4083960 - RNA, 15 nt, Variola virus
auguuaggaaauauu

SEQ ID NO: 4083961 - RNA, 14 nt, Variola virus
auguuaguaggaau

SEQ ID NO: 4083962 - RNA, 14 nt, Variola virus
auguuauaaaaaug

SEQ ID NO: 4083963 - RNA, 21 nt, Variola virus
auguuaucuacauauuuacca

SEQ ID NO: 4083964 - RNA, 20 nt, Variola virus
auguuccauuuauaagaaau

SEQ ID NO: 4083965 - RNA, 22 nt, Variola virus
auguucucaagaacuacaaaag

SEQ ID NO: 4083966 - RNA, 23 nt, Variola virus
auguucuuaauagucuaggaaug

SEQ ID NO: 4083967 - RNA, 16 nt, Variola virus
auguugauagaaguua

SEQ ID NO: 4083968 - RNA, 17 nt, Variola virus
auguuggcaacgacaaa

SEQ ID NO: 4083969 - RNA, 19 nt, Variola virus
auguuuaaacaucaaacau

SEQ ID NO: 4083970 - RNA, 20 nt, Variola virus
auguuuaauguuuuaaauuu

SEQ ID NO: 4083971 - RNA, 23 nt, Variola virus
auguuuacggcugcguuaaacau

SEQ ID NO: 4083972 - RNA, 17 nt, Variola virus
auguuugacugaauaua

SEQ ID NO: 4083973 - RNA, 23 nt, Variola virus
auguuuggaaugacgaauccugu

SEQ ID NO: 4083974 - RNA, 17 nt, Variola virus
auguuugggagaauuaa

SEQ ID NO: 4083975 - RNA, 15 nt, Variola virus
auuccgcauuaaaug

SEQ ID NO: 4083976 - RNA, 20 nt, Variola virus
auuccuaccaaacaaaauuu

SEQ ID NO: 4083977 - RNA, 20 nt, Variola virus
auuccuuugcuauuucuaug

SEQ ID NO: 4083978 - RNA, 15 nt, Variola virus
auucgaauucaaaug

SEQ ID NO: 4083979 - RNA, 18 nt, Variola virus
auucgacucaacauaaau

SEQ ID NO: 4083980 - RNA, 16 nt, Variola virus
auucgauaagauagau

SEQ ID NO: 4083981 - RNA, 20 nt, Variola virus
auucgcaaacuauucuaaua

SEQ ID NO: 4083982 - RNA, 22 nt, Variola virus
auucuaccuuuuuauuuucuaa

SEQ ID NO: 4083983 - RNA, 15 nt, Variola virus
auucuagaccaaaaa

SEQ ID NO: 4083984 - RNA, 13 nt, Variola virus
auucuaugaugaa

SEQ ID NO: 4083985 - RNA, 18 nt, Variola virus
auucucucauuuaucaaa

SEQ ID NO: 4083986 - RNA, 15 nt, Variola virus
auucugaugcaucaa

SEQ ID NO: 4083987 - RNA, 22 nt, Variola virus
auucugccguguuuaaaaauuc

SEQ ID NO: 4083988 - RNA, 17 nt, Variola virus
auucuggagcuauuuuc

SEQ ID NO: 4083989 - RNA, 17 nt, Variola virus
auucuguuacuacuuua

SEQ ID NO: 4083990 - RNA, 14 nt, Variola virus
auucuuaucaauaa

SEQ ID NO: 4083991 - RNA, 16 nt, Variola virus
auucuucccaugaaug

SEQ ID NO: 4083992 - RNA, 22 nt, Variola virus
auucuugaaacuuuucagaaua

SEQ ID NO: 4083993 - RNA, 19 nt, Variola virus
auucuugguaauuaauaga

SEQ ID NO: 4083994 - RNA, 20 nt, Variola virus
auucuuuggauccaaaugcu

SEQ ID NO: 4083995 - RNA, 15 nt, Variola virus
auucuuuuaugaaua

SEQ ID NO: 4083996 - RNA, 20 nt, Variola virus
auugaaauuaaucauauaca

SEQ ID NO: 4083997 - RNA, 13 nt, Variola virus
auugaagaaggag

SEQ ID NO: 4083998 - RNA, 17 nt, Variola virus
auugaauaggaguuuga

SEQ ID NO: 4083999 - RNA, 17 nt, Variola virus
auugacauauguaaaua

SEQ ID NO: 4084000 - RNA, 14 nt, Variola virus
auugacgacuuugg

SEQ ID NO: 4084001 - RNA, 16 nt, Variola virus
auugacuaagaauuau

SEQ ID NO: 4084002 - RNA, 20 nt, Variola virus
auugacuaauaaauuaaaua

SEQ ID NO: 4084003 - RNA, 21 nt, Variola virus
auugacuaauaaauuaaauau

SEQ ID NO: 4084004 - RNA, 15 nt, Variola virus
auugagguuucugac

SEQ ID NO: 4084005 - RNA, 23 nt, Variola virus
auugauaacucugauuucuugaa

SEQ ID NO: 4084006 - RNA, 17 nt, Variola virus
auugcauauuuaucuuu

SEQ ID NO: 4084007 - RNA, 23 nt, Variola virus
auuggauucguguaaucauauau

SEQ ID NO: 4084008 - RNA, 15 nt, Variola virus
auuggauuggauaau

SEQ ID NO: 4084009 - RNA, 15 nt, Variola virus
auuggcuaguauuua

SEQ ID NO: 4084010 - RNA, 22 nt, Variola virus
auugguaaauuccauagaauau

SEQ ID NO: 4084011 - RNA, 14 nt, Variola virus
auugguacauagau

SEQ ID NO: 4084012 - RNA, 20 nt, Variola virus
auugguucuuuaccagaaaa

SEQ ID NO: 4084013 - RNA, 14 nt, Variola virus
auuguaacaauaug

SEQ ID NO: 4084014 - RNA, 20 nt, Variola virus
auuguacgguagaauugaua

SEQ ID NO: 4084015 - RNA, 16 nt, Variola virus
auuguagauaaugaaa

SEQ ID NO: 4084016 - RNA, 19 nt, Variola virus
auuguagcuauuuaaaugg

SEQ ID NO: 4084017 - RNA, 11 nt, Variola virus
auuguauauag

SEQ ID NO: 4084018 - RNA, 23 nt, Variola virus
auuguaugacuuaauagcaucau

SEQ ID NO: 4084019 - RNA, 23 nt, Variola virus
auuguccaucuauuacaaacaug

SEQ ID NO: 4084020 - RNA, 16 nt, Variola virus
auugucccaauguuuc

SEQ ID NO: 4084021 - RNA, 20 nt, Variola virus
auugucuagauaaaauacug

SEQ ID NO: 4084022 - RNA, 15 nt, Variola virus
auugugcgacacuag

SEQ ID NO: 4084023 - RNA, 15 nt, Variola virus
auuguuuaagaucac

SEQ ID NO: 4084024 - RNA, 13 nt, Variola virus
auuuaaaaugaua

SEQ ID NO: 4084025 - RNA, 12 nt, Variola virus
auuuaacuagau

SEQ ID NO: 4084026 - RNA, 16 nt, Variola virus
auuuaagguacuagau

SEQ ID NO: 4084027 - RNA, 17 nt, Variola virus
auuuaagugaugcauuc

SEQ ID NO: 4084028 - RNA, 16 nt, Variola virus
auuuaauuuuagauaa

SEQ ID NO: 4084029 - RNA, 19 nt, Variola virus
auuuacaggcuguuagcug

SEQ ID NO: 4084030 - RNA, 15 nt, Variola virus
auuuacgcgcacaca

SEQ ID NO: 4084031 - RNA, 15 nt, Variola virus
auuuacucucuauaa

SEQ ID NO: 4084032 - RNA, 22 nt, Variola virus
auuuagaaaacucucuaucucu

SEQ ID NO: 4084033 - RNA, 14 nt, Variola virus
auuuagaaauguug

SEQ ID NO: 4084034 - RNA, 15 nt, Variola virus
auuuagacgagagau

SEQ ID NO: 4084035 - RNA, 22 nt, Variola virus
auuuagauuaaauccagaaguu

SEQ ID NO: 4084036 - RNA, 13 nt, Variola virus
auuuauaaaaaug

SEQ ID NO: 4084037 - RNA, 17 nt, Variola virus
auuuauacguaucauuu

SEQ ID NO: 4084038 - RNA, 18 nt, Variola virus
auuuauaucuaaaaauua

SEQ ID NO: 4084039 - RNA, 17 nt, Variola virus
auuuauccaucgucaaa

SEQ ID NO: 4084040 - RNA, 19 nt, Variola virus
auuuaucgauuagucuuaa

SEQ ID NO: 4084041 - RNA, 21 nt, Variola virus
auuuaucgauuagucuuaaug

SEQ ID NO: 4084042 - RNA, 16 nt, Variola virus
auuuaucuaacauagu

SEQ ID NO: 4084043 - RNA, 14 nt, Variola virus
auuuaucuauuuua

SEQ ID NO: 4084044 - RNA, 20 nt, Variola virus
auuuauuaaugcuuuaguga

SEQ ID NO: 4084045 - RNA, 14 nt, Variola virus
auuuauuaucuugu

SEQ ID NO: 4084046 - RNA, 18 nt, Variola virus
auuuauuguaacaguauu

SEQ ID NO: 4084047 - RNA, 19 nt, Variola virus
auuuauuuucggguuuaaa

SEQ ID NO: 4084048 - RNA, 23 nt, Variola virus
auuuauuuucggguuuaaauucu

SEQ ID NO: 4084049 - RNA, 16 nt, Variola virus
auuucaaaaaaugauc

SEQ ID NO: 4084050 - RNA, 19 nt, Variola virus
auuucaaaauguuaaauca

SEQ ID NO: 4084051 - RNA, 21 nt, Variola virus
auuucaaauaggucuucgucu

SEQ ID NO: 4084052 - RNA, 16 nt, Variola virus
auuucaaucaaacaaa

SEQ ID NO: 4084053 - RNA, 15 nt, Variola virus
auuucacaaauggau

SEQ ID NO: 4084054 - RNA, 20 nt, Variola virus
auuucagauacuauauuugu

SEQ ID NO: 4084055 - RNA, 21 nt, Variola virus
auuucauagacuuuaucuaga

SEQ ID NO: 4084056 - RNA, 17 nt, Variola virus
auuucaucguuuuguau

SEQ ID NO: 4084057 - RNA, 20 nt, Variola virus
auuucaucuccguaaauaua

SEQ ID NO: 4084058 - RNA, 22 nt, Variola virus
auuuccacauuagaugguaaau

SEQ ID NO: 4084059 - RNA, 15 nt, Variola virus
auuucgaaaauacua

SEQ ID NO: 4084060 - RNA, 23 nt, Variola virus
auuucgauaauauacgguaaucu

SEQ ID NO: 4084061 - RNA, 17 nt, Variola virus
auuucguuaaaacauuc

SEQ ID NO: 4084062 - RNA, 23 nt, Variola virus
auuucuacauaauuauauauugu

SEQ ID NO: 4084063 - RNA, 23 nt, Variola virus
auuucuccaaagaauauaucuaa

SEQ ID NO: 4084064 - RNA, 14 nt, Variola virus
auuucuuacauaaa

SEQ ID NO: 4084065 - RNA, 13 nt, Variola virus
auuucuuaucugu

SEQ ID NO: 4084066 - RNA, 23 nt, Variola virus
auuucuuuaccacaggagaaugg

SEQ ID NO: 4084067 - RNA, 22 nt, Variola virus
auuucuuuuuucuggcauaacu

SEQ ID NO: 4084068 - RNA, 21 nt, Variola virus
auuugacuaaaucuuaauagu

SEQ ID NO: 4084069 - RNA, 16 nt, Variola virus
auuugauuauuuugaa

SEQ ID NO: 4084070 - RNA, 20 nt, Variola virus
auuugguuauuaaacaguau

SEQ ID NO: 4084071 - RNA, 17 nt, Variola virus
auuuguaggaaaaagau

SEQ ID NO: 4084072 - RNA, 13 nt, Variola virus
auuuguauauaca

SEQ ID NO: 4084073 - RNA, 16 nt, Variola virus
auuuguaucuuaguau

SEQ ID NO: 4084074 - RNA, 21 nt, Variola virus
auuugucuuccuuaacuauau

SEQ ID NO: 4084075 - RNA, 22 nt, Variola virus
auuuguuaaagugggacaugau

SEQ ID NO: 4084076 - RNA, 12 nt, Variola virus
auuuguuaauga

SEQ ID NO: 4084077 - RNA, 15 nt, Variola virus
auuuuaacauaugau

SEQ ID NO: 4084078 - RNA, 18 nt, Variola virus
auuuuaagauuuuaaaug

SEQ ID NO: 4084079 - RNA, 22 nt, Variola virus
auuuuaauucuccuauuacaua

SEQ ID NO: 4084080 - RNA, 22 nt, Variola virus
auuuuacccucaaucauguacu

SEQ ID NO: 4084081 - RNA, 19 nt, Variola virus
auuuuacucauuuuuuaua

SEQ ID NO: 4084082 - RNA, 13 nt, Variola virus
auuuuagacacua

SEQ ID NO: 4084083 - RNA, 15 nt, Variola virus
auuuuauauacuuuu

SEQ ID NO: 4084084 - RNA, 17 nt, Variola virus
auuuuaucuuuuagagg

SEQ ID NO: 4084085 - RNA, 17 nt, Variola virus
auuuuauguacagaggu

SEQ ID NO: 4084086 - RNA, 16 nt, Variola virus
auuuucauuuaaauga

SEQ ID NO: 4084087 - RNA, 16 nt, Variola virus
auuuucuauaacugaa

SEQ ID NO: 4084088 - RNA, 22 nt, Variola virus
auuuucugacaaaguuagaaaa

SEQ ID NO: 4084089 - RNA, 22 nt, Variola virus
auuuucuuacaauuaacgagaa

SEQ ID NO: 4084090 - RNA, 15 nt, Variola virus
auuuucuuucuaaua

SEQ ID NO: 4084091 - RNA, 17 nt, Variola virus
auuuugaagauauagau

SEQ ID NO: 4084092 - RNA, 14 nt, Variola virus
auuuugacaaagau

SEQ ID NO: 4084093 - RNA, 15 nt, Variola virus
auuuugacuuacaua

SEQ ID NO: 4084094 - RNA, 18 nt, Variola virus
auuuugacuuacauaaau

SEQ ID NO: 4084095 - RNA, 19 nt, Variola virus
auuuugcauuagauuuacu

SEQ ID NO: 4084096 - RNA, 15 nt, Variola virus
auuuuggaaaaauug

SEQ ID NO: 4084097 - RNA, 20 nt, Variola virus
auuuugggcaaaucuaaaua

SEQ ID NO: 4084098 - RNA, 12 nt, Variola virus
auuuuguaacug

SEQ ID NO: 4084099 - RNA, 21 nt, Variola virus
auuuugucuuuaaguauauac

SEQ ID NO: 4084100 - RNA, 17 nt, Variola virus
auuuuuagacauuagau

SEQ ID NO: 4084101 - RNA, 19 nt, Variola virus
auuuuuauucagcauuacu

SEQ ID NO: 4084102 - RNA, 19 nt, Variola virus
auuuuugauaacacuguau

SEQ ID NO: 4084103 - RNA, 18 nt, Variola virus
auuuuuguacauuaauaa

SEQ ID NO: 4084104 - RNA, 14 nt, Variola virus
auuuuuuacaauuu

SEQ ID NO: 4084105 - RNA, 18 nt, Variola virus
auuuuuuauaaacaugaa

SEQ ID NO: 4084106 - RNA, 16 nt, Variola virus
auuuuuuaugaauauc

SEQ ID NO: 4084107 - RNA, 22 nt, Variola virus
auuuuuuguucuauaaacugaa

SEQ ID NO: 4084108 - RNA, 23 nt, Variola virus
auuuuuuuaaaaaggaaauacuu

SEQ ID NO: 4084109 - RNA, 12 nt, Variola virus
caaaaaauaaua

SEQ ID NO: 4084110 - RNA, 16 nt, Variola virus
caaaaagauauaaaau

SEQ ID NO: 4084111 - RNA, 13 nt, Variola virus
caaaaauaaugac

SEQ ID NO: 4084112 - RNA, 18 nt, Variola virus
caaaaauuuaaaaugagu

SEQ ID NO: 4084113 - RNA, 13 nt, Variola virus
caaaacuauuuca

SEQ ID NO: 4084114 - RNA, 18 nt, Variola virus
caaaacuucacagaugau

SEQ ID NO: 4084115 - RNA, 13 nt, Variola virus
caaaagaacauga

SEQ ID NO: 4084116 - RNA, 20 nt, Variola virus
caaaaggcgguaauagaaua

SEQ ID NO: 4084117 - RNA, 18 nt, Variola virus
caaaaguaguauagcaau

SEQ ID NO: 4084118 - RNA, 23 nt, Variola virus
caaaaguaguucaacauaauauu

SEQ ID NO: 4084119 - RNA, 16 nt, Variola virus
caaaaguuaauuucua

SEQ ID NO: 4084120 - RNA, 15 nt, Variola virus
caaaauacaauuguu

SEQ ID NO: 4084121 - RNA, 20 nt, Variola virus
caaaauaguaaaguaacgau

SEQ ID NO: 4084122 - RNA, 17 nt, Variola virus
caaaauauaauguugua

SEQ ID NO: 4084123 - RNA, 17 nt, Variola virus
caaaauccuauauugua

SEQ ID NO: 4084124 - RNA, 21 nt, Variola virus
caaaauguauguguugaacau

SEQ ID NO: 4084125 - RNA, 14 nt, Variola virus
caaaaugugauauu

SEQ ID NO: 4084126 - RNA, 13 nt, Variola virus
caaaauuaucaau

SEQ ID NO: 4084127 - RNA, 16 nt, Variola virus
caaacaauuuuaacag

SEQ ID NO: 4084128 - RNA, 18 nt, Variola virus
caaacaggaaagaaguau

SEQ ID NO: 4084129 - RNA, 23 nt, Variola virus
caaacaucacucuucgaaaagaa

SEQ ID NO: 4084130 - RNA, 14 nt, Variola virus
caaacauccucuau

SEQ ID NO: 4084131 - RNA, 15 nt, Variola virus
caaacaugacauuuu

SEQ ID NO: 4084132 - RNA, 14 nt, Variola virus
caaacaugcgaaau

SEQ ID NO: 4084133 - RNA, 16 nt, Variola virus
caaacauuauguagua

SEQ ID NO: 4084134 - RNA, 14 nt, Variola virus
caaaccuagaugca

SEQ ID NO: 4084135 - RNA, 14 nt, Variola virus
caaacucuauuuua

SEQ ID NO: 4084136 - RNA, 16 nt, Variola virus
caaacucuauuuuaaa

SEQ ID NO: 4084137 - RNA, 20 nt, Variola virus
caaacuuaaucuuauuagaa

SEQ ID NO: 4084138 - RNA, 18 nt, Variola virus
caaacuuacagaaacaau

SEQ ID NO: 4084139 - RNA, 19 nt, Variola virus
caaagaauuuuagacacua

SEQ ID NO: 4084140 - RNA, 18 nt, Variola virus
caaagagaccaaugaauu

SEQ ID NO: 4084141 - RNA, 18 nt, Variola virus
caaaggaugaaagaaagc

SEQ ID NO: 4084142 - RNA, 16 nt, Variola virus
caaagguuauagugua

SEQ ID NO: 4084143 - RNA, 20 nt, Variola virus
caaauaaaauggauaauggu

SEQ ID NO: 4084144 - RNA, 23 nt, Variola virus
caaauacuugauuccuaggucua

SEQ ID NO: 4084145 - RNA, 20 nt, Variola virus
caaauagcuacaguaaaaau

SEQ ID NO: 4084146 - RNA, 13 nt, Variola virus
caaauaugauaug

SEQ ID NO: 4084147 - RNA, 14 nt, Variola virus
caaauauuauacau

SEQ ID NO: 4084148 - RNA, 22 nt, Variola virus
caaauccgugauuuugguaaug

SEQ ID NO: 4084149 - RNA, 16 nt, Variola virus
caaauggauguuaaug

SEQ ID NO: 4084150 - RNA, 14 nt, Variola virus
caaauuaaauucug

SEQ ID NO: 4084151 - RNA, 19 nt, Variola virus
caaauugcauauuuggaag

SEQ ID NO: 4084152 - RNA, 15 nt, Variola virus
caaauuuaucuacua

SEQ ID NO: 4084153 - RNA, 20 nt, Variola virus
caacaagucaaaacauaaua

SEQ ID NO: 4084154 - RNA, 19 nt, Variola virus
caacaaguuggaugauauu

SEQ ID NO: 4084155 - RNA, 13 nt, Variola virus
caacagaaaauau

SEQ ID NO: 4084156 - RNA, 18 nt, Variola virus
caacauaauauuaaacac

SEQ ID NO: 4084157 - RNA, 17 nt, Variola virus
caacaucuauaaaagua

SEQ ID NO: 4084158 - RNA, 22 nt, Variola virus
caacaucuuaagcguagaaguu

SEQ ID NO: 4084159 - RNA, 13 nt, Variola virus
caacauuccaaag

SEQ ID NO: 4084160 - RNA, 17 nt, Variola virus
caaccaaaaaggauaaa

SEQ ID NO: 4084161 - RNA, 15 nt, Variola virus
caaccgaaaucaugg

SEQ ID NO: 4084162 - RNA, 15 nt, Variola virus
caacguaauaaugaa

SEQ ID NO: 4084163 - RNA, 12 nt, Variola virus
caacuacaguag

SEQ ID NO: 4084164 - RNA, 18 nt, Variola virus
caacuaguaucaucucua

SEQ ID NO: 4084165 - RNA, 18 nt, Variola virus
caacucaucguuccauag

SEQ ID NO: 4084166 - RNA, 19 nt, Variola virus
caacucucaaguauccauc

SEQ ID NO: 4084167 - RNA, 13 nt, Variola virus
caacucucuuuuu

SEQ ID NO: 4084168 - RNA, 15 nt, Variola virus
caacugaaaaaguua

SEQ ID NO: 4084169 - RNA, 20 nt, Variola virus
caacuuauccauuuauacau

SEQ ID NO: 4084170 - RNA, 20 nt, Variola virus
caagaaauauggauccucua

SEQ ID NO: 4084171 - RNA, 22 nt, Variola virus
caagagugauuugagaacaucc

SEQ ID NO: 4084172 - RNA, 15 nt, Variola virus
caagauaagcaaacg

SEQ ID NO: 4084173 - RNA, 16 nt, Variola virus
caagauuuuuaaacaa

SEQ ID NO: 4084174 - RNA, 20 nt, Variola virus
caaguaggauuuuuccaaag

SEQ ID NO: 4084175 - RNA, 13 nt, Variola virus
caaguauaaugau

SEQ ID NO: 4084176 - RNA, 21 nt, Variola virus
caaguaugaagaaaaauguug

SEQ ID NO: 4084177 - RNA, 16 nt, Variola virus
caaguaugacauugua

SEQ ID NO: 4084178 - RNA, 15 nt, Variola virus
caagucauaaaucau

SEQ ID NO: 4084179 - RNA, 15 nt, Variola virus
caagugacuauuauc

SEQ ID NO: 4084180 - RNA, 15 nt, Variola virus
caauaaaaaaaauug

SEQ ID NO: 4084181 - RNA, 20 nt, Variola virus
caauaacacaaucaugauuu

SEQ ID NO: 4084182 - RNA, 16 nt, Variola virus
caauaagcauuaugau

SEQ ID NO: 4084183 - RNA, 19 nt, Variola virus
caauaagcauuaugauuug

SEQ ID NO: 4084184 - RNA, 13 nt, Variola virus
caauaaguaguau

SEQ ID NO: 4084185 - RNA, 22 nt, Variola virus
caauacagauuguacuauacau

SEQ ID NO: 4084186 - RNA, 19 nt, Variola virus
caauacguguugauaauau

SEQ ID NO: 4084187 - RNA, 13 nt, Variola virus
caauagaaucugu

SEQ ID NO: 4084188 - RNA, 20 nt, Variola virus
caauagauaauuguaacaau

SEQ ID NO: 4084189 - RNA, 15 nt, Variola virus
caauagauuauacau

SEQ ID NO: 4084190 - RNA, 23 nt, Variola virus
caauauagucuguguuacauaau

SEQ ID NO: 4084191 - RNA, 13 nt, Variola virus
caauauauucuau

SEQ ID NO: 4084192 - RNA, 21 nt, Variola virus
caauaucuucguaaaaagauu

SEQ ID NO: 4084193 - RNA, 17 nt, Variola virus
caauaugcgaaucauuu

SEQ ID NO: 4084194 - RNA, 13 nt, Variola virus
caauauuuacaau

SEQ ID NO: 4084195 - RNA, 18 nt, Variola virus
caaucaaaccuauaacau

SEQ ID NO: 4084196 - RNA, 18 nt, Variola virus
aaaaaugcauacuuguua

SEQ ID NO: 4084197 - RNA, 21 nt, Variola virus
aaaaauguaaaauauuuuucu

SEQ ID NO: 4084198 - RNA, 15 nt, Variola virus
aaaaauguuaauuua

SEQ ID NO: 4084199 - RNA, 17 nt, Variola virus
aaaaauuuaaagaaugu

SEQ ID NO: 4084200 - RNA, 14 nt, Variola virus
aaaacaauacagug

SEQ ID NO: 4084201 - RNA, 18 nt, Variola virus
aaaacagaauaucccaaa

SEQ ID NO: 4084202 - RNA, 16 nt, Variola virus
aaaacagauaaugaua

SEQ ID NO: 4084203 - RNA, 22 nt, Variola virus
aaaacagggacguguuaauaaa

SEQ ID NO: 4084204 - RNA, 21 nt, Variola virus
aaaacauaaaggaauauacaa

SEQ ID NO: 4084205 - RNA, 11 nt, Variola virus
aaaacauaaua

SEQ ID NO: 4084206 - RNA, 16 nt, Variola virus
aaaacauucaaauguu

SEQ ID NO: 4084207 - RNA, 13 nt, Variola virus
aaaaccaaaucuu

SEQ ID NO: 4084208 - RNA, 16 nt, Variola virus
aaaaccguuaaaaugu

SEQ ID NO: 4084209 - RNA, 14 nt, Variola virus
aaaacgaaauauau

SEQ ID NO: 4084210 - RNA, 20 nt, Variola virus
aaaacuauaugucuguagaa

SEQ ID NO: 4084211 - RNA, 22 nt, Variola virus
aaaacuauuacuaggagaauua

SEQ ID NO: 4084212 - RNA, 21 nt, Variola virus
aaaacucugauuauugucuaa

SEQ ID NO: 4084213 - RNA, 22 nt, Variola virus
aaaacugguuuagcuaauacua

SEQ ID NO: 4084214 - RNA, 16 nt, Variola virus
aaaacuuuaauaacaa

SEQ ID NO: 4084215 - RNA, 20 nt, Variola virus
aaaagaaauauauguggugu

SEQ ID NO: 4084216 - RNA, 13 nt, Variola virus
aaaagagaauaua

SEQ ID NO: 4084217 - RNA, 13 nt, Variola virus
aaaagauaauaca

SEQ ID NO: 4084218 - RNA, 14 nt, Variola virus
aaaagauauccaga

SEQ ID NO: 4084219 - RNA, 13 nt, Variola virus
aaaagaucaacau

SEQ ID NO: 4084220 - RNA, 14 nt, Variola virus
aaaagcauacguac

SEQ ID NO: 4084221 - RNA, 23 nt, Variola virus
aaaaggaauuuaccagugauuau

SEQ ID NO: 4084222 - RNA, 15 nt, Variola virus
aaaaguacagaauua

SEQ ID NO: 4084223 - RNA, 16 nt, Variola virus
aaaaguccuagaauua

SEQ ID NO: 4084224 - RNA, 18 nt, Variola virus
aaaaguuccagaaaaugu

SEQ ID NO: 4084225 - RNA, 18 nt, Variola virus
aaaauaaacacauagaaa

SEQ ID NO: 4084226 - RNA, 20 nt, Variola virus
aaaauaaacacauagaaaua

SEQ ID NO: 4084227 - RNA, 13 nt, Variola virus
aaaauaaaguuau

SEQ ID NO: 4084228 - RNA, 15 nt, Variola virus
aaaauaauaugauua

SEQ ID NO: 4084229 - RNA, 19 nt, Variola virus
aaaauaaucauacaaucua

SEQ ID NO: 4084230 - RNA, 15 nt, Variola virus
aaaauaguucuguaa

SEQ ID NO: 4084231 - RNA, 16 nt, Variola virus
aaaauauuuauuagaa

SEQ ID NO: 4084232 - RNA, 13 nt, Variola virus
aaaauauuuuacu

SEQ ID NO: 4084233 - RNA, 14 nt, Variola virus
aaaaucaauccacu

SEQ ID NO: 4084234 - RNA, 21 nt, Variola virus
aaaaucgucuucauaaagcau

SEQ ID NO: 4084235 - RNA, 21 nt, Variola virus
aaaaucguguuuguguaguuu

SEQ ID NO: 4084236 - RNA, 17 nt, Variola virus
aaaaucuaaacaaauau

SEQ ID NO: 4084237 - RNA, 15 nt, Variola virus
aaaaucuacagauga

SEQ ID NO: 4084238 - RNA, 24 nt, Variola virus
aaaaugaaaacacuuuaguaauua

SEQ ID NO: 4084239 - RNA, 21 nt, Variola virus
aaaaugaagauccaagauuug

SEQ ID NO: 4084240 - RNA, 22 nt, Variola virus
aaaaugaugcuauuagaauuua

SEQ ID NO: 4084241 - RNA, 19 nt, Variola virus
aaaaugcauguacagaauc

SEQ ID NO: 4084242 - RNA, 15 nt, Variola virus
aaaaugcuaauauua

SEQ ID NO: 4084243 - RNA, 20 nt, Variola virus
aaaaugcuacuuuagcuaag

SEQ ID NO: 4084244 - RNA, 18 nt, Variola virus
aaaauggcauaugcuuua

SEQ ID NO: 4084245 - RNA, 19 nt, Variola virus
aaaauguauagauaaacua

SEQ ID NO: 4084246 - RNA, 20 nt, Variola virus
aaaaugugauauugguguag

SEQ ID NO: 4084247 - RNA, 20 nt, Variola virus
aaaauguucuuaauagucua

SEQ ID NO: 4084248 - RNA, 22 nt, Variola virus
aaaauuauuaaacaauacucua

SEQ ID NO: 4084249 - RNA, 20 nt, Variola virus
aaaauuauuacuagaaucuc

SEQ ID NO: 4084250 - RNA, 13 nt, Variola virus
aaaauuauucucc

SEQ ID NO: 4084251 - RNA, 15 nt, Variola virus
aaaauuuaaagaaug

SEQ ID NO: 4084252 - RNA, 14 nt, Variola virus
aaaauuuugaucau

SEQ ID NO: 4084253 - RNA, 20 nt, Variola virus
aaaauuuuuuagauguagua

SEQ ID NO: 4084254 - RNA, 12 nt, Variola virus
aaacaacucuuc

SEQ ID NO: 4084255 - RNA, 18 nt, Variola virus
aaacaaguuuucauauca

SEQ ID NO: 4084256 - RNA, 20 nt, Variola virus
aaacacauauugaugugucu

SEQ ID NO: 4084257 - RNA, 18 nt, Variola virus
aaacacugauucagaaau

SEQ ID NO: 4084258 - RNA, 20 nt, Variola virus
aaacacugauucagaaaugg

SEQ ID NO: 4084259 - RNA, 23 nt, Variola virus
aaacagauauaguuuuucuggaa

SEQ ID NO: 4084260 - RNA, 16 nt, Variola virus
aaacaguauguuguac

SEQ ID NO: 4084261 - RNA, 14 nt, Variola virus
aaacauauucuaug

SEQ ID NO: 4084262 - RNA, 13 nt, Variola virus
aaacaucucuucu

SEQ ID NO: 4084263 - RNA, 20 nt, Variola virus
aaacauuauaucguuaucau

SEQ ID NO: 4084264 - RNA, 17 nt, Variola virus
aaacauucaaccacucu

SEQ ID NO: 4084265 - RNA, 22 nt, Variola virus
aaacauucuuuauuaaguguuu

SEQ ID NO: 4084266 - RNA, 20 nt, Variola virus
aaacauuuuauauacuuuuc

SEQ ID NO: 4084267 - RNA, 22 nt, Variola virus
aaacauuuuauauacuuuucua

SEQ ID NO: 4084268 - RNA, 18 nt, Variola virus
aaacauuuugacugaaua

SEQ ID NO: 4084269 - RNA, 20 nt, Variola virus
aaaccaauguaggucuaaau

SEQ ID NO: 4084270 - RNA, 19 nt, Variola virus
aaaccaauuaacaagaaua

SEQ ID NO: 4084271 - RNA, 14 nt, Variola virus
aaaccaauuuguau

SEQ ID NO: 4084272 - RNA, 16 nt, Variola virus
aaaccaucgucugaau

SEQ ID NO: 4084273 - RNA, 20 nt, Variola virus
aaaccuauaacauuaauauc

SEQ ID NO: 4084274 - RNA, 23 nt, Variola virus
aaaccuuugacuaguuguagaau

SEQ ID NO: 4084275 - RNA, 21 nt, Variola virus
aaacgaacgucuccaauauau

SEQ ID NO: 4084276 - RNA, 20 nt, Variola virus
aaacgacauacuauauguaa

SEQ ID NO: 4084277 - RNA, 15 nt, Variola virus
aaacgacuuaccgaa

SEQ ID NO: 4084278 - RNA, 17 nt, Variola virus
aaacgauuaaacaauau

SEQ ID NO: 4084279 - RNA, 18 nt, Variola virus
aaacgauuauuucuaaau

SEQ ID NO: 4084280 - RNA, 23 nt, Variola virus
aaacggcaaaccaaaaacauuug

SEQ ID NO: 4084281 - RNA, 17 nt, Variola virus
aaacuaguucugagaaa

SEQ ID NO: 4084282 - RNA, 17 nt, Variola virus
aaacucaauuauacucu

SEQ ID NO: 4084283 - RNA, 16 nt, Variola virus
aaacucgcuuaauauc

SEQ ID NO: 4084284 - RNA, 18 nt, Variola virus
aaacucguaaaaagauua

SEQ ID NO: 4084285 - RNA, 18 nt, Variola virus
aaacugguuaaaacagua

SEQ ID NO: 4084286 - RNA, 17 nt, Variola virus
aaacuguaaauguagua

SEQ ID NO: 4084287 - RNA, 19 nt, Variola virus
aaacuuuacgauagacuuu

SEQ ID NO: 4084288 - RNA, 22 nt, Variola virus
aaacuuucuagaacauacugag

SEQ ID NO: 4084289 - RNA, 17 nt, Variola virus
aaacuuuucagaauauc

SEQ ID NO: 4084290 - RNA, 15 nt, Variola virus
aaacuuuuuagaaau

SEQ ID NO: 4084291 - RNA, 17 nt, Variola virus
aaagaacggagaauugu

SEQ ID NO: 4084292 - RNA, 14 nt, Variola virus
aaagaauccuacau

SEQ ID NO: 4084293 - RNA, 16 nt, Variola virus
aaagacuaugcaaaga

SEQ ID NO: 4084294 - RNA, 22 nt, Variola virus
aaagacuuucguuaauuugucu

SEQ ID NO: 4084295 - RNA, 14 nt, Variola virus
aaagagaauuauau

SEQ ID NO: 4084296 - RNA, 22 nt, Variola virus
aaagaguaugguaaaugacucu

SEQ ID NO: 4084297 - RNA, 20 nt, Variola virus
aaagauauuaccaguugugg

SEQ ID NO: 4084298 - RNA, 12 nt, Variola virus
aaagauauuguu

SEQ ID NO: 4084299 - RNA, 15 nt, Variola virus
aaagauguauuaccu

SEQ ID NO: 4084300 - RNA, 16 nt, Variola virus
aaagauuaauacauua

SEQ ID NO: 4084301 - RNA, 16 nt, Variola virus
aaagauuguguagaaa

SEQ ID NO: 4084302 - RNA, 19 nt, Variola virus
aaagauuugcuucuaaaau

SEQ ID NO: 4084303 - RNA, 19 nt, Variola virus
aaagcaauugacuaauaaa

SEQ ID NO: 4084304 - RNA, 12 nt, Variola virus
aaagcauauguu

SEQ ID NO: 4084305 - RNA, 16 nt, Variola virus
aaagcgugauuuuaau

SEQ ID NO: 4084306 - RNA, 17 nt, Variola virus
aaagggaccuaaaucua

SEQ ID NO: 4084307 - RNA, 15 nt, Variola virus
aaagguagaccuaau

SEQ ID NO: 4084308 - RNA, 14 nt, Variola virus
aaaguaauaaucuu

SEQ ID NO: 4084309 - RNA, 18 nt, Variola virus
aaaguacuguucauacau

SEQ ID NO: 4084310 - RNA, 20 nt, Variola virus
aaaguagaaaauauauucua

SEQ ID NO: 4084311 - RNA, 12 nt, Variola virus
aaaguauaugua

SEQ ID NO: 4084312 - RNA, 13 nt, Variola virus
aaaguauauguag

SEQ ID NO: 4084313 - RNA, 19 nt, Variola virus
aaaguauccucuacucauu

SEQ ID NO: 4084314 - RNA, 20 nt, Variola virus
aaaguaucgcccuaauauua

SEQ ID NO: 4084315 - RNA, 18 nt, Variola virus
aaagucuacauugucauu

SEQ ID NO: 4084316 - RNA, 20 nt, Variola virus
aaagucuacauugucauuau

SEQ ID NO: 4084317 - RNA, 12 nt, Variola virus
aaaguggauaaa

SEQ ID NO: 4084318 - RNA, 22 nt, Variola virus
aaaguuaaggugcgaguauuaa

SEQ ID NO: 4084319 - RNA, 16 nt, Variola virus
aaaguuaauauuuucu

SEQ ID NO: 4084320 - RNA, 12 nt, Variola virus
aaaguuuaagaa

SEQ ID NO: 4084321 - RNA, 22 nt, Variola virus
aaauaaaacaaggauucguuua

SEQ ID NO: 4084322 - RNA, 18 nt, Variola virus
aacucaucuaccauuuca

SEQ ID NO: 4084323 - RNA, 18 nt, Variola virus
aacuccauauauguuuuc

SEQ ID NO: 4084324 - RNA, 18 nt, Variola virus
aacuccguagagaaauau

SEQ ID NO: 4084325 - RNA, 19 nt, Variola virus
aacucgcuuaauaucuucu

SEQ ID NO: 4084326 - RNA, 15 nt, Variola virus
aacucgguuguguau

SEQ ID NO: 4084327 - RNA, 13 nt, Variola virus
aacucuaaucaaa

SEQ ID NO: 4084328 - RNA, 12 nt, Variola virus
aacucuguuuua

SEQ ID NO: 4084329 - RNA, 16 nt, Variola virus
aacucuugaagaugau

SEQ ID NO: 4084330 - RNA, 16 nt, Variola virus
aacucuuuaaacgaua

SEQ ID NO: 4084331 - RNA, 18 nt, Variola virus
aacucuuuagucgagaua

SEQ ID NO: 4084332 - RNA, 22 nt, Variola virus
aacugacguauuggaugaugca

SEQ ID NO: 4084333 - RNA, 22 nt, Variola virus
aacugcguugauuaaaaaagau

SEQ ID NO: 4084334 - RNA, 16 nt, Variola virus
aacuguugugaauauu

SEQ ID NO: 4084335 - RNA, 12 nt, Variola virus
aacuuaaaagaa

SEQ ID NO: 4084336 - RNA, 14 nt, Variola virus
aacuuaaacaaaau

SEQ ID NO: 4084337 - RNA, 20 nt, Variola virus
aacuuaacaaaucuuaauau

SEQ ID NO: 4084338 - RNA, 21 nt, Variola virus
aacuuaggcauggacauacua

SEQ ID NO: 4084339 - RNA, 13 nt, Variola virus
aacuuaucaaaga

SEQ ID NO: 4084340 - RNA, 17 nt, Variola virus
aacuucucuaaaugagu

SEQ ID NO: 4084341 - RNA, 16 nt, Variola virus
aacuugauuucaaaau

SEQ ID NO: 4084342 - RNA, 19 nt, Variola virus
aacuuuaaacagaaauaua

SEQ ID NO: 4084343 - RNA, 23 nt, Variola virus
aacuuuaaauaauuuacaaaaau

SEQ ID NO: 4084344 - RNA, 15 nt, Variola virus
aacuuucaucuaaua

SEQ ID NO: 4084345 - RNA, 15 nt, Variola virus
aacuuugauuauccu

SEQ ID NO: 4084346 - RNA, 15 nt, Variola virus
aacuuuguucauuua

SEQ ID NO: 4084347 - RNA, 19 nt, Variola virus
aacuuuuaaauacaaauau

SEQ ID NO: 4084348 - RNA, 13 nt, Variola virus
aacuuuucagaau

SEQ ID NO: 4084349 - RNA, 15 nt, Variola virus
aagaaaacaaacauu

SEQ ID NO: 4084350 - RNA, 18 nt, Variola virus
aagaacgauguacaacug

SEQ ID NO: 4084351 - RNA, 18 nt, Variola virus
aagaagagaauuaaaaga

SEQ ID NO: 4084352 - RNA, 18 nt, Variola virus
aagaagaugguuaaaaau

SEQ ID NO: 4084353 - RNA, 15 nt, Variola virus
aagaagccauuuuau

SEQ ID NO: 4084354 - RNA, 15 nt, Variola virus
aagaaguuagaaagu

SEQ ID NO: 4084355 - RNA, 19 nt, Variola virus
aagaaugcuguuauauaca

SEQ ID NO: 4084356 - RNA, 13 nt, Variola virus
aagaauucuuaug

SEQ ID NO: 4084357 - RNA, 13 nt, Variola virus
aagacauaugcac

SEQ ID NO: 4084358 - RNA, 17 nt, Variola virus
gauuucugauuauucac

SEQ ID NO: 4084359 - RNA, 18 nt, Variola virus
gauuugagaacauccucc

SEQ ID NO: 4084360 - RNA, 19 nt, Variola virus
gauuugucacaauaugaau

SEQ ID NO: 4084361 - RNA, 20 nt, Variola virus
gauuuuccaaaucaguaacu

SEQ ID NO: 4084362 - RNA, 14 nt, Variola virus
gauuuuuccaaagu

SEQ ID NO: 4084363 - RNA, 22 nt, Variola virus
gauuuuuuuaucccauguuuca

SEQ ID NO: 4084364 - RNA, 22 nt, Variola virus
gcaaaaaaucugauagaaagaa

SEQ ID NO: 4084365 - RNA, 23 nt, Variola virus
gcaaacaauguauacaaauguac

SEQ ID NO: 4084366 - RNA, 20 nt, Variola virus
gcaaacacuuuccugauuua

SEQ ID NO: 4084367 - RNA, 15 nt, Variola virus
gcaaagaaugaugac

SEQ ID NO: 4084368 - RNA, 18 nt, Variola virus
gcaaaucuaguaaaucaa

SEQ ID NO: 4084369 - RNA, 17 nt, Variola virus
gcaaauguauaaaacaa

SEQ ID NO: 4084370 - RNA, 21 nt, Variola virus
gcaaauuauuucuucugaauu

SEQ ID NO: 4084371 - RNA, 22 nt, Variola virus
gcaacgaauaacaaaauacaag

SEQ ID NO: 4084372 - RNA, 15 nt, Variola virus
gcaacuaguaauaaa

SEQ ID NO: 4084373 - RNA, 23 nt, Variola virus
gcaacuauauaguuuaaauuaag

SEQ ID NO: 4084374 - RNA, 15 nt, Variola virus
gcaacuaucauuuua

SEQ ID NO: 4084375 - RNA, 16 nt, Variola virus
gcaagacuaacacaca

SEQ ID NO: 4084376 - RNA, 14 nt, Variola virus
gcaauaaauaugau

SEQ ID NO: 4084377 - RNA, 23 nt, Variola virus
gcaauagucagacuguaguucua

SEQ ID NO: 4084378 - RNA, 16 nt, Variola virus
gcaauuucugauucua

SEQ ID NO: 4084379 - RNA, 23 nt, Variola virus
gcaauuuuauugcuaauaaugac

SEQ ID NO: 4084380 - RNA, 13 nt, Variola virus
gcacaaugauaau

SEQ ID NO: 4084381 - RNA, 12 nt, Variola virus
gcacuauuucua

SEQ ID NO: 4084382 - RNA, 16 nt, Variola virus
gcagaauaauuagaaa

SEQ ID NO: 4084383 - RNA, 12 nt, Variola virus
gcagaugaugau

SEQ ID NO: 4084384 - RNA, 13 nt, Variola virus
gcagccauuuaac

SEQ ID NO: 4084385 - RNA, 16 nt, Variola virus
gcaggagauagauauc

SEQ ID NO: 4084386 - RNA, 17 nt, Variola virus
gcaggcaaauguuuaua

SEQ ID NO: 4084387 - RNA, 17 nt, Variola virus
gcagucggauuggaaca

SEQ ID NO: 4084388 - RNA, 19 nt, Variola virus
gcaguggaguuauaugaau

SEQ ID NO: 4084389 - RNA, 18 nt, Variola virus
gcaguuacaagauuuuua

SEQ ID NO: 4084390 - RNA, 21 nt, Variola virus
gcaguuuuauuuuaucuuuua

SEQ ID NO: 4084391 - RNA, 18 nt, Variola virus
gcauaaacuauacuauga

SEQ ID NO: 4084392 - RNA, 17 nt, Variola virus
gcauaagucauaacugu

SEQ ID NO: 4084393 - RNA, 22 nt, Variola virus
gcauaauaccuaucuauaagau

SEQ ID NO: 4084394 - RNA, 17 nt, Variola virus
gcauauauuagaaauac

SEQ ID NO: 4084395 - RNA, 13 nt, Variola virus
gcauaucaugaaa

SEQ ID NO: 4084396 - RNA, 20 nt, Variola virus
gcauauucuauagucagaau

SEQ ID NO: 4084397 - RNA, 15 nt, Variola virus
gcaucauauaacuaa

SEQ ID NO: 4084398 - RNA, 23 nt, Variola virus
gcauccacucauauagaagaugc

SEQ ID NO: 4084399 - RNA, 14 nt, Variola virus
gcaucuguaaaaga

SEQ ID NO: 4084400 - RNA, 15 nt, Variola virus
gcaucuucacaaauu

SEQ ID NO: 4084401 - RNA, 21 nt, Variola virus
gcaucuuggaaacauaaaaua

SEQ ID NO: 4084402 - RNA, 15 nt, Variola virus
gcauuaaaugaugaa

SEQ ID NO: 4084403 - RNA, 14 nt, Variola virus
gcauuaauaacauc

SEQ ID NO: 4084404 - RNA, 13 nt, Variola virus
gcauuaauaaugu

SEQ ID NO: 4084405 - RNA, 13 nt, Variola virus
gcauuaauacagu

SEQ ID NO: 4084406 - RNA, 18 nt, Variola virus
gcauuaauacuguuuucu

SEQ ID NO: 4084407 - RNA, 17 nt, Variola virus
gcauuaaugagaagaau

SEQ ID NO: 4084408 - RNA, 17 nt, Variola virus
gcauuacagaauaauau

SEQ ID NO: 4084409 - RNA, 21 nt, Variola virus
gcauucuauucgaauaaugag

SEQ ID NO: 4084410 - RNA, 17 nt, Variola virus
gcauuggcaucaaaaga

SEQ ID NO: 4084411 - RNA, 15 nt, Variola virus
gcauugugaauauau

SEQ ID NO: 4084412 - RNA, 17 nt, Variola virus
gcauuugucgauaaaga

SEQ ID NO: 4084413 - RNA, 15 nt, Variola virus
gccaaaaugauagau

SEQ ID NO: 4084414 - RNA, 14 nt, Variola virus
gccaaaucuucuuc

SEQ ID NO: 4084415 - RNA, 14 nt, Variola virus
gccaacuauacauc

SEQ ID NO: 4084416 - RNA, 21 nt, Variola virus
gccaacucucaaaaugcugau

SEQ ID NO: 4084417 - RNA, 21 nt, Variola virus
gccaagauaucuauauaauua

SEQ ID NO: 4084418 - RNA, 22 nt, Variola virus
gccaauucuuccauugauguua

SEQ ID NO: 4084419 - RNA, 15 nt, Variola virus
gccagauuuaagaaa

SEQ ID NO: 4084420 - RNA, 16 nt, Variola virus
gccauggacuaagaua

SEQ ID NO: 4084421 - RNA, 20 nt, Variola virus
gccauuaagaaacuaguuua

SEQ ID NO: 4084422 - RNA, 23 nt, Variola virus
gccauuuaguuauugaaauuaau

SEQ ID NO: 4084423 - RNA, 22 nt, Variola virus
gccccaggaucuccaacaaauu

SEQ ID NO: 4084424 - RNA, 22 nt, Variola virus
gccccgcuucuauuuacucccg

SEQ ID NO: 4084425 - RNA, 14 nt, Variola virus
gccgaacuaaaaaa

SEQ ID NO: 4084426 - RNA, 15 nt, Variola virus
gccgauaaacaaauc

SEQ ID NO: 4084427 - RNA, 22 nt, Variola virus
gccgcuuggaccauuauuuuua

SEQ ID NO: 4084428 - RNA, 19 nt, Variola virus
gccuauaaaguaauaaucu

SEQ ID NO: 4084429 - RNA, 18 nt, Variola virus
gccuccacuagaagagaa

SEQ ID NO: 4084430 - RNA, 19 nt, Variola virus
gccuccacuagaagagaau

SEQ ID NO: 4084431 - RNA, 17 nt, Variola virus
gccuuauauagcacuuu

SEQ ID NO: 4084432 - RNA, 14 nt, Variola virus
gcgaauuacucugu

SEQ ID NO: 4084433 - RNA, 20 nt, Variola virus
gcgacacgguauauuagaug

SEQ ID NO: 4084434 - RNA, 23 nt, Variola virus
gcgauaucuccauuaauaaugau

SEQ ID NO: 4084435 - RNA, 16 nt, Variola virus
gcgaugucuuggaagc

SEQ ID NO: 4084436 - RNA, 14 nt, Variola virus
gcgcauaucuuuuu

SEQ ID NO: 4084437 - RNA, 13 nt, Variola virus
gcgcuauaguauu

SEQ ID NO: 4084438 - RNA, 21 nt, Variola virus
gcggguguuauucacaacauc

SEQ ID NO: 4084439 - RNA, 22 nt, Variola virus
gcgguuaaaauaguuuauaaca

SEQ ID NO: 4084440 - RNA, 23 nt, Variola virus
gcgguugccauagaauauacguc

SEQ ID NO: 4084441 - RNA, 14 nt, Variola virus
gcguauauagucua

SEQ ID NO: 4084442 - RNA, 13 nt, Variola virus
gcguauuuaagag

SEQ ID NO: 4084443 - RNA, 17 nt, Variola virus
gcgucauuguaaaggaa

SEQ ID NO: 4084444 - RNA, 13 nt, Variola virus
gcgucuaaaucaa

SEQ ID NO: 4084445 - RNA, 22 nt, Variola virus
gcguucaacauuuuauggaaac

SEQ ID NO: 4084446 - RNA, 19 nt, Variola virus
gcguucaagauuaucuuua

SEQ ID NO: 4084447 - RNA, 21 nt, Variola virus
gcguugauuaaaaaagaucaa

SEQ ID NO: 4084448 - RNA, 17 nt, Variola virus
gcuaaaaucuucaucaa

SEQ ID NO: 4084449 - RNA, 18 nt, Variola virus
gcuaaagauuugucacaa

SEQ ID NO: 4084450 - RNA, 20 nt, Variola virus
gcuaacauacgagacauguu

SEQ ID NO: 4084451 - RNA, 17 nt, Variola virus
gcuaauaucuauauauu

SEQ ID NO: 4084452 - RNA, 13 nt, Variola virus
gcuaaugaugcag

SEQ ID NO: 4084453 - RNA, 16 nt, Variola virus
gcuacagaaacauaua

SEQ ID NO: 4084454 - RNA, 20 nt, Variola virus
gcuaguuaauaguaaaugaa

SEQ ID NO: 4084455 - RNA, 22 nt, Variola virus
gcuauagaggacaauaauauua

SEQ ID NO: 4084456 - RNA, 17 nt, Variola virus
gcuauguuaucaugaaa

SEQ ID NO: 4084457 - RNA, 13 nt, Variola virus
gcucuaucuuuua

SEQ ID NO: 4084458 - RNA, 21 nt, Variola virus
gcucuuuguccauuauuucua

SEQ ID NO: 4084459 - RNA, 12 nt, Variola virus
gcugaaaugaga

SEQ ID NO: 4084460 - RNA, 15 nt, Variola virus
gcugacuauaacaga

SEQ ID NO: 4084461 - RNA, 17 nt, Variola virus
gcugguucaaaauuaau

SEQ ID NO: 4084462 - RNA, 12 nt, Variola virus
gcugucauguau

SEQ ID NO: 4084463 - RNA, 16 nt, Variola virus
gcuguccguauuguau

SEQ ID NO: 4084464 - RNA, 13 nt, Variola virus
gcuuccauaauau

SEQ ID NO: 4084465 - RNA, 19 nt, Variola virus
gcuucuuccaacucuguuu

SEQ ID NO: 4084466 - RNA, 18 nt, Variola virus
gcuugauaauuagauaua

SEQ ID NO: 4084467 - RNA, 14 nt, Variola virus
gcuugauauuaaag

SEQ ID NO: 4084468 - RNA, 22 nt, Variola virus
gcuugcauuacagaauaauauu

SEQ ID NO: 4084469 - RNA, 21 nt, Variola virus
gcuuuucuauaaucauuuuua

SEQ ID NO: 4084470 - RNA, 15 nt, Variola virus
gcuuuucucuuuuaa

SEQ ID NO: 4084471 - RNA, 21 nt, Variola virus
ggaaaagucaaagucguuuaa

SEQ ID NO: 4084472 - RNA, 11 nt, Variola virus
ggaaaaugcua

SEQ ID NO: 4084473 - RNA, 23 nt, Variola virus
ggaaagcuagacuugauuauucu

SEQ ID NO: 4084474 - RNA, 19 nt, Variola virus
ggaaaggaugauucaucaa

SEQ ID NO: 4084475 - RNA, 21 nt, Variola virus
ggaagcaauuacagauuucuc

SEQ ID NO: 4084476 - RNA, 22 nt, Variola virus
ggaauacuaauuauacacauua

SEQ ID NO: 4084477 - RNA, 17 nt, Variola virus
ggaauaugacuauuuuc

SEQ ID NO: 4084478 - RNA, 16 nt, Variola virus
ggacaaauauaugcaa

SEQ ID NO: 4084479 - RNA, 19 nt, Variola virus
ggacaaccuuaauugguug

SEQ ID NO: 4084480 - RNA, 23 nt, Variola virus
ggacacgguguauuguauuucuc

SEQ ID NO: 4084481 - RNA, 23 nt, Variola virus
ggacauaagucgccucaaagaua

SEQ ID NO: 4084482 - RNA, 22 nt, Variola virus
ggagaguauccucuaugaagaa

SEQ ID NO: 4084483 - RNA, 14 nt, Variola virus
ggaguaauugauua

SEQ ID NO: 4084484 - RNA, 14 nt, Variola virus
ggauagagaaauau

SEQ ID NO: 4084485 - RNA, 20 nt, Variola virus
ggauauagauauuaaacaag

SEQ ID NO: 4084486 - RNA, 15 nt, Variola virus
ggauaugucuagaac

SEQ ID NO: 4084487 - RNA, 16 nt, Variola virus
ggaucuaguauuauug

SEQ ID NO: 4084488 - RNA, 20 nt, Variola virus
ggaucuccaucauccacaug

SEQ ID NO: 4084489 - RNA, 14 nt, Variola virus
ggaucuuaccaucu

SEQ ID NO: 4084490 - RNA, 18 nt, Variola virus
ggaucuucuaauggauug

SEQ ID NO: 4084491 - RNA, 15 nt, Variola virus
ggaugaaaauaagaa

SEQ ID NO: 4084492 - RNA, 20 nt, Variola virus
ggaugucauagauucuuuaa

SEQ ID NO: 4084493 - RNA, 18 nt, Variola virus
ggauuaauauaugucaua

SEQ ID NO: 4084494 - RNA, 13 nt, Variola virus
ggauucaaaaaga

SEQ ID NO: 4084495 - RNA, 19 nt, Variola virus
ggcaauaacuaaaaaugua

SEQ ID NO: 4084496 - RNA, 16 nt, Variola virus
ggcaauuguagauaua

SEQ ID NO: 4084497 - RNA, 14 nt, Variola virus
ggcauguguuuccc

SEQ ID NO: 4084498 - RNA, 13 nt, Variola virus
ggccaaaaugaua

SEQ ID NO: 4084499 - RNA, 18 nt, Variola virus
ggcuaaaacauauuucuu

SEQ ID NO: 4084500 - RNA, 15 nt, Variola virus
gggaggcuugaagug

SEQ ID NO: 4084501 - RNA, 11 nt, Variola virus
gguaauacuua

SEQ ID NO: 4084502 - RNA, 15 nt, Variola virus
gguacaacauuccaa

SEQ ID NO: 4084503 - RNA, 13 nt, Variola virus
gguacuauuucua

SEQ ID NO: 4084504 - RNA, 13 nt, Variola virus
gguaggagaaaga

SEQ ID NO: 4084505 - RNA, 17 nt, Variola virus
ggucuaaagaauaucuu

SEQ ID NO: 4084506 - RNA, 23 nt, Variola virus
ggugccgcggcaagcauacagac

SEQ ID NO: 4084507 - RNA, 12 nt, Variola virus
gguguaaaagau

SEQ ID NO: 4084508 - RNA, 21 nt, Variola virus
gguuuauauaacauagaaaaa

SEQ ID NO: 4084509 - RNA, 22 nt, Variola virus
gguuucgaagaucuucuuauuu

SEQ ID NO: 4084510 - RNA, 20 nt, Variola virus
guaaaaaaaccuauaaugau

SEQ ID NO: 4084511 - RNA, 17 nt, Variola virus
guaaaagucaaauuaga

SEQ ID NO: 4084512 - RNA, 14 nt, Variola virus
guaaacauaucaua

SEQ ID NO: 4084513 - RNA, 20 nt, Variola virus
guaaagacaccgaauacaaa

SEQ ID NO: 4084514 - RNA, 19 nt, Variola virus
guaaagauaucuauacuua

SEQ ID NO: 4084515 - RNA, 15 nt, Variola virus
guaaauaaauacuuu

SEQ ID NO: 4084516 - RNA, 19 nt, Variola virus
uaugaugauuuacaaaugg

SEQ ID NO: 4084517 - RNA, 17 nt, Variola virus
uaugaugucguuaaauu

SEQ ID NO: 4084518 - RNA, 16 nt, Variola virus
uaugcaaagaauuugg

SEQ ID NO: 4084519 - RNA, 21 nt, Variola virus
uaugccacaccaucuucauaa

SEQ ID NO: 4084520 - RNA, 14 nt, Variola virus
uaugcucuagauac

SEQ ID NO: 4084521 - RNA, 13 nt, Variola virus
uauggaacucaug

SEQ ID NO: 4084522 - RNA, 21 nt, Variola virus
uauggaugccaacguaguauc

SEQ ID NO: 4084523 - RNA, 21 nt, Variola virus
uauggauuuuuuuaaaaagga

SEQ ID NO: 4084524 - RNA, 17 nt, Variola virus
uauggcauucauugucu

SEQ ID NO: 4084525 - RNA, 14 nt, Variola virus
uauguauacauaau

SEQ ID NO: 4084526 - RNA, 15 nt, Variola virus
uauguaucaaucaaa

SEQ ID NO: 4084527 - RNA, 14 nt, Variola virus
uauguauucagaau

SEQ ID NO: 4084528 - RNA, 14 nt, Variola virus
uaugucacguuuau

SEQ ID NO: 4084529 - RNA, 17 nt, Variola virus
uaugucucuuaacuauu

SEQ ID NO: 4084530 - RNA, 13 nt, Variola virus
uaugugauagcaa

SEQ ID NO: 4084531 - RNA, 16 nt, Variola virus
uauguguugaacauca

SEQ ID NO: 4084532 - RNA, 17 nt, Variola virus
uauguugauuuauuaua

SEQ ID NO: 4084533 - RNA, 19 nt, Variola virus
uauguugugauucuagaau

SEQ ID NO: 4084534 - RNA, 21 nt, Variola virus
uauguuuauuagcguacacau

SEQ ID NO: 4084535 - RNA, 23 nt, Variola virus
uauuaacacuaaaaaauaaacac

SEQ ID NO: 4084536 - RNA, 17 nt, Variola virus
uauuaacgaguuccauu

SEQ ID NO: 4084537 - RNA, 21 nt, Variola virus
uauuaacgguaauacauuuau

SEQ ID NO: 4084538 - RNA, 20 nt, Variola virus
uauuaacuuuguucauuuau

SEQ ID NO: 4084539 - RNA, 19 nt, Variola virus
uauuaagaaauacaucaaa

SEQ ID NO: 4084540 - RNA, 12 nt, Variola virus
uauuaauacagg

SEQ ID NO: 4084541 - RNA, 23 nt, Variola virus
uauuaauccuuuuuucuugagau

SEQ ID NO: 4084542 - RNA, 20 nt, Variola virus
uauuaauuaauuaauuaaac

SEQ ID NO: 4084543 - RNA, 16 nt, Variola virus
uauuacaaugcucauu

SEQ ID NO: 4084544 - RNA, 22 nt, Variola virus
uauuaccaaaaaaaauaacauu

SEQ ID NO: 4084545 - RNA, 17 nt, Variola virus
uauuaccauauuucuaa

SEQ ID NO: 4084546 - RNA, 14 nt, Variola virus
uauuaccuuaauaa

SEQ ID NO: 4084547 - RNA, 16 nt, Variola virus
uauuacgaauuacauu

SEQ ID NO: 4084548 - RNA, 14 nt, Variola virus
uauuacuaaacauu

SEQ ID NO: 4084549 - RNA, 12 nt, Variola virus
uauuacuuuagu

SEQ ID NO: 4084550 - RNA, 17 nt, Variola virus
uauuacuuuucaaugcu

SEQ ID NO: 4084551 - RNA, 20 nt, Variola virus
uauuagaaauuuaucaauau

SEQ ID NO: 4084552 - RNA, 17 nt, Variola virus
uauuagagauaccaaag

SEQ ID NO: 4084553 - RNA, 22 nt, Variola virus
uauuagauaauaaacagaauag

SEQ ID NO: 4084554 - RNA, 22 nt, Variola virus
uauuagaucuccagauuucaua

SEQ ID NO: 4084555 - RNA, 21 nt, Variola virus
uauuagauuugguaaaaugaa

SEQ ID NO: 4084556 - RNA, 19 nt, Variola virus
uauuaucaucauuaucauu

SEQ ID NO: 4084557 - RNA, 22 nt, Variola virus
uauuaucuucaucgauuucuau

SEQ ID NO: 4084558 - RNA, 19 nt, Variola virus
uauuaugaugauuaugaua

SEQ ID NO: 4084559 - RNA, 20 nt, Variola virus
uauuaugcgauguaaucaua

SEQ ID NO: 4084560 - RNA, 19 nt, Variola virus
uauuaugucuagcaaugau

SEQ ID NO: 4084561 - RNA, 13 nt, Variola virus
uauuauugaagau

SEQ ID NO: 4084562 - RNA, 21 nt, Variola virus
uauucaaacuaauacaucuga

SEQ ID NO: 4084563 - RNA, 17 nt, Variola virus
uauucaagucaaagaaa

SEQ ID NO: 4084564 - RNA, 16 nt, Variola virus
uauucagauuaucaug

SEQ ID NO: 4084565 - RNA, 15 nt, Variola virus
uauucauucaacaac

SEQ ID NO: 4084566 - RNA, 14 nt, Variola virus
uauucauucaauau

SEQ ID NO: 4084567 - RNA, 15 nt, Variola virus
uauuccauuaaugac

SEQ ID NO: 4084568 - RNA, 21 nt, Variola virus
uauuccguguggcuuuccauu

SEQ ID NO: 4084569 - RNA, 17 nt, Variola virus
uauucgagaugaacauu

SEQ ID NO: 4084570 - RNA, 20 nt, Variola virus
uauucucccaccguuauaua

SEQ ID NO: 4084571 - RNA, 19 nt, Variola virus
uauucugaaacaguaugau

SEQ ID NO: 4084572 - RNA, 18 nt, Variola virus
uauucuggacuagcgaua

SEQ ID NO: 4084573 - RNA, 13 nt, Variola virus
uauucuuaaaugu

SEQ ID NO: 4084574 - RNA, 19 nt, Variola virus
uauugacuuaauaggcauc

SEQ ID NO: 4084575 - RNA, 18 nt, Variola virus
uauugagaagcauuuagu

SEQ ID NO: 4084576 - RNA, 18 nt, Variola virus
uauugauaaaauuaauga

SEQ ID NO: 4084577 - RNA, 13 nt, Variola virus
uauugauucuaga

SEQ ID NO: 4084578 - RNA, 16 nt, Variola virus
uauugcaaaucacuca

SEQ ID NO: 4084579 - RNA, 16 nt, Variola virus
uauugcauauaucucu

SEQ ID NO: 4084580 - RNA, 18 nt, Variola virus
uauugcuguauuuguaau

SEQ ID NO: 4084581 - RNA, 16 nt, Variola virus
uauuggaauuauaaua

SEQ ID NO: 4084582 - RNA, 16 nt, Variola virus
uauuggcuuuucuuua

SEQ ID NO: 4084583 - RNA, 17 nt, Variola virus
uauuguacaaaaagccc

SEQ ID NO: 4084584 - RNA, 20 nt, Variola virus
uauugugcaucgauaucuuu

SEQ ID NO: 4084585 - RNA, 19 nt, Variola virus
uauugugucuguuaauaga

SEQ ID NO: 4084586 - RNA, 14 nt, Variola virus
uauuguuacagaug

SEQ ID NO: 4084587 - RNA, 12 nt, Variola virus
uauuguuauaua

SEQ ID NO: 4084588 - RNA, 11 nt, Variola virus
uauuguuuuca

SEQ ID NO: 4084589 - RNA, 17 nt, Variola virus
uauuuaacgauucuuca

SEQ ID NO: 4084590 - RNA, 20 nt, Variola virus
uauuuacaucgcauacaaaa

SEQ ID NO: 4084591 - RNA, 22 nt, Variola virus
uauuuaccuuucuacaugaaau

SEQ ID NO: 4084592 - RNA, 13 nt, Variola virus
uauuuccauaaua

SEQ ID NO: 4084593 - RNA, 14 nt, Variola virus
uauuucguacauuu

SEQ ID NO: 4084594 - RNA, 12 nt, Variola virus
uauuucuaaaau

SEQ ID NO: 4084595 - RNA, 16 nt, Variola virus
uauuucuaauaacacu

SEQ ID NO: 4084596 - RNA, 16 nt, Variola virus
uauuucuccacuacau

SEQ ID NO: 4084597 - RNA, 20 nt, Variola virus
uauuucugucauuaaaucuu

SEQ ID NO: 4084598 - RNA, 20 nt, Variola virus
uauuuguaauuuuucucaua

SEQ ID NO: 4084599 - RNA, 20 nt, Variola virus
uauuuguacacaucuaucaa

SEQ ID NO: 4084600 - RNA, 21 nt, Variola virus
uauuuguacagguaccuacau

SEQ ID NO: 4084601 - RNA, 14 nt, Variola virus
uauuugucuuugaa

SEQ ID NO: 4084602 - RNA, 14 nt, Variola virus
uauuuguuaucaug

SEQ ID NO: 4084603 - RNA, 14 nt, Variola virus
uauuuguucaagau

SEQ ID NO: 4084604 - RNA, 19 nt, Variola virus
uauuuuaaaguuaaucaua

SEQ ID NO: 4084605 - RNA, 22 nt, Variola virus
uauuuuacauggauuuaucaua

SEQ ID NO: 4084606 - RNA, 13 nt, Variola virus
uauuuuauacauu

SEQ ID NO: 4084607 - RNA, 12 nt, Variola virus
uauuuuaucauu

SEQ ID NO: 4084608 - RNA, 16 nt, Variola virus
uauuuucuucuacaua

SEQ ID NO: 4084609 - RNA, 16 nt, Variola virus
uauuuugacauacuug

SEQ ID NO: 4084610 - RNA, 18 nt, Variola virus
uauuuuuaaaaauuacca

SEQ ID NO: 4084611 - RNA, 16 nt, Variola virus
uauuuuucuaacguug

SEQ ID NO: 4084612 - RNA, 12 nt, Variola virus
uauuuuucuuua

SEQ ID NO: 4084613 - RNA, 14 nt, Variola virus
uauuuuuuaugaua

SEQ ID NO: 4084614 - RNA, 14 nt, Variola virus
uauuuuuuauuaua

SEQ ID NO: 4084615 - RNA, 15 nt, Variola virus
uauuuuuuucuaaau

SEQ ID NO: 4084616 - RNA, 17 nt, Variola virus
ucaaaaaauaaauuaga

SEQ ID NO: 4084617 - RNA, 18 nt, Variola virus
ucaaaaauauucauuaau

SEQ ID NO: 4084618 - RNA, 13 nt, Variola virus
ucaaaaauuuaga

SEQ ID NO: 4084619 - RNA, 21 nt, Variola virus
ucaaaagaaggaauuaaacga

SEQ ID NO: 4084620 - RNA, 18 nt, Variola virus
ucaaaaucuuaauaucuu

SEQ ID NO: 4084621 - RNA, 23 nt, Variola virus
ucaaacacaucuacgaacaauau

SEQ ID NO: 4084622 - RNA, 18 nt, Variola virus
ucaaacucgauauauuca

SEQ ID NO: 4084623 - RNA, 13 nt, Variola virus
ucaaagauaauag

SEQ ID NO: 4084624 - RNA, 17 nt, Variola virus
ucaaagcaucaaaauag

SEQ ID NO: 4084625 - RNA, 19 nt, Variola virus
ucaaaggaugaaagaaagc

SEQ ID NO: 4084626 - RNA, 23 nt, Variola virus
ucaaauauagaucuuauuuagua

SEQ ID NO: 4084627 - RNA, 17 nt, Variola virus
ucaaauccgaaauuaga

SEQ ID NO: 4084628 - RNA, 17 nt, Variola virus
ucaaaucgauaguguag

SEQ ID NO: 4084629 - RNA, 19 nt, Variola virus
ucaaaugauuaauaaguau

SEQ ID NO: 4084630 - RNA, 21 nt, Variola virus
ucaaaugccacaucaaagaua

SEQ ID NO: 4084631 - RNA, 11 nt, Variola virus
ucaaauuauua

SEQ ID NO: 4084632 - RNA, 23 nt, Variola virus
ucaacaaauucugcaauaucuuc

SEQ ID NO: 4084633 - RNA, 15 nt, Variola virus
ucaacaaucguuaau

SEQ ID NO: 4084634 - RNA, 22 nt, Variola virus
ucaacauccgucaaaaccaauu

SEQ ID NO: 4084635 - RNA, 17 nt, Variola virus
ucaaccgcguuaacaua

SEQ ID NO: 4084636 - RNA, 18 nt, Variola virus
ucaacguagaaaaaauag

SEQ ID NO: 4084637 - RNA, 22 nt, Variola virus
ucaacgugauuauucuccacca

SEQ ID NO: 4084638 - RNA, 20 nt, Variola virus
ucaacuaucguuggaaaaug

SEQ ID NO: 4084639 - RNA, 13 nt, Variola virus
ucaacuuauucuu

SEQ ID NO: 4084640 - RNA, 17 nt, Variola virus
ucaagaauauagucuug

SEQ ID NO: 4084641 - RNA, 22 nt, Variola virus
ucaagccggcuauauauucugc

SEQ ID NO: 4084642 - RNA, 16 nt, Variola virus
uccuaacuuuaaacaa

SEQ ID NO: 4084643 - RNA, 15 nt, Variola virus
uccuaguacacaaua

SEQ ID NO: 4084644 - RNA, 16 nt, Variola virus
uccuauccuuguacaa

SEQ ID NO: 4084645 - RNA, 22 nt, Variola virus
uccuaucgaaugugacucugau

SEQ ID NO: 4084646 - RNA, 20 nt, Variola virus
uccucaacgugauuauucuc

SEQ ID NO: 4084647 - RNA, 12 nt, Variola virus
uccucaauaacg

SEQ ID NO: 4084648 - RNA, 18 nt, Variola virus
uccucauuacguuucauu

SEQ ID NO: 4084649 - RNA, 20 nt, Variola virus
uccuugugcuuaauguuucc

SEQ ID NO: 4084650 - RNA, 13 nt, Variola virus
uuuuuuaugauuu

SEQ ID NO: 4084651 - RNA, 12 nt, Variola virus
ucuguucaaaaa

SEQ ID NO: 4084652 - RNA, 16 nt, Variola virus
ucuguuuccuauaauc

SEQ ID NO: 4084653 - RNA, 15 nt, Variola virus
ucuuaaaaauacuua

SEQ ID NO: 4084654 - RNA, 17 nt, Variola virus
ucuuaaaagguuucaua

SEQ ID NO: 4084655 - RNA, 13 nt, Variola virus
ucuuaaaaugguu

SEQ ID NO: 4084656 - RNA, 17 nt, Variola virus
ucuuaaaauuggaucua

SEQ ID NO: 4084657 - RNA, 12 nt, Variola virus
ucuuaaaugaau

SEQ ID NO: 4084658 - RNA, 22 nt, Variola virus
ucuuaauagacauaucugccau

SEQ ID NO: 4084659 - RNA, 23 nt, Variola virus
ucuuaguaacucuaguaaaauaa

SEQ ID NO: 4084660 - RNA, 15 nt, Variola virus
ucuuauuauuaauaa

SEQ ID NO: 4084661 - RNA, 16 nt, Variola virus
ucuucaaaugaaguag

SEQ ID NO: 4084662 - RNA, 17 nt, Variola virus
ucuucaaauuccaccau

SEQ ID NO: 4084663 - RNA, 20 nt, Variola virus
ucuucaguucuaucuucuaa

SEQ ID NO: 4084664 - RNA, 14 nt, Variola virus
ucuucaucaaacag

SEQ ID NO: 4084665 - RNA, 13 nt, Variola virus
ucuucaucaucca

SEQ ID NO: 4084666 - RNA, 18 nt, Variola virus
ucuuccaucaacuuauua

SEQ ID NO: 4084667 - RNA, 16 nt, Variola virus
ucuucuaaauucauaa

SEQ ID NO: 4084668 - RNA, 17 nt, Variola virus
ucuucuauuuuaucauu

SEQ ID NO: 4084669 - RNA, 18 nt, Variola virus
ucuucuuugauuaaugau

SEQ ID NO: 4084670 - RNA, 22 nt, Variola virus
ucuugaggguuguguuaaauug

SEQ ID NO: 4084671 - RNA, 18 nt, Variola virus
ucuugauaaauuguacaa

SEQ ID NO: 4084672 - RNA, 18 nt, Variola virus
ucuugauuacaaaaccaa

SEQ ID NO: 4084673 - RNA, 15 nt, Variola virus
ucuuguauaucuuaa

SEQ ID NO: 4084674 - RNA, 17 nt, Variola virus
ucuuuaauagugucauu

SEQ ID NO: 4084675 - RNA, 23 nt, Variola virus
ucuuuaauaucgacaauuucaua

SEQ ID NO: 4084676 - RNA, 21 nt, Variola virus
ucuuuaccauaacuguauaaa

SEQ ID NO: 4084677 - RNA, 17 nt, Variola virus
ucuuucuaauacuauau

SEQ ID NO: 4084678 - RNA, 17 nt, Variola virus
ucuuucuugggaaacuc

SEQ ID NO: 4084679 - RNA, 17 nt, Variola virus
ucuuugaacuguuuaag

SEQ ID NO: 4084680 - RNA, 19 nt, Variola virus
ucuuugaucacuaccgagu

SEQ ID NO: 4084681 - RNA, 19 nt, Variola virus
ucuuuguccauuauuucua

SEQ ID NO: 4084682 - RNA, 20 nt, Variola virus
ucuuuguugaacguuucaaa

SEQ ID NO: 4084683 - RNA, 12 nt, Variola virus
ucuuuuaaccag

SEQ ID NO: 4084684 - RNA, 16 nt, Variola virus
ucuuuuucccagcauu

SEQ ID NO: 4084685 - RNA, 22 nt, Variola virus
ucuuuuugauuaccuuacucau

SEQ ID NO: 4084686 - RNA, 14 nt, Variola virus
ucuuuuuuacacau

SEQ ID NO: 4084687 - RNA, 13 nt, Variola virus
ugaaaauguaaua

SEQ ID NO: 4084688 - RNA, 21 nt, Variola virus
ugaaaauuaugugaaacagac

SEQ ID NO: 4084689 - RNA, 19 nt, Variola virus
ugaaacauacaacaaagaa

SEQ ID NO: 4084690 - RNA, 16 nt, Variola virus
ugaaacgaacacuauu

SEQ ID NO: 4084691 - RNA, 18 nt, Variola virus
ugaaacuaugucaaaaau

SEQ ID NO: 4084692 - RNA, 13 nt, Variola virus
ugaaauagaagau

SEQ ID NO: 4084693 - RNA, 24 nt, Variola virus
ugaaaugauaccaguaauuuacug

SEQ ID NO: 4084694 - RNA, 16 nt, Variola virus
ugaaaugcuacauaac

SEQ ID NO: 4084695 - RNA, 21 nt, Variola virus
ugaacaagagauauauuggag

SEQ ID NO: 4084696 - RNA, 22 nt, Variola virus
ugaacacuuuauacuucuccaa

SEQ ID NO: 4084697 - RNA, 22 nt, Variola virus
ugaacaggcauugcuaaaacuu

SEQ ID NO: 4084698 - RNA, 13 nt, Variola virus
ugaacaggcauuu

SEQ ID NO: 4084699 - RNA, 18 nt, Variola virus
ugaacauaaaacuaauau

SEQ ID NO: 4084700 - RNA, 13 nt, Variola virus
ugaacauucaucu

SEQ ID NO: 4084701 - RNA, 17 nt, Variola virus
ugaacgcuauuaaacau

SEQ ID NO: 4084702 - RNA, 13 nt, Variola virus
ugaagauacuguu

SEQ ID NO: 4084703 - RNA, 17 nt, Variola virus
ugaagauauagaugagg

SEQ ID NO: 4084704 - RNA, 16 nt, Variola virus
ugaagauaucauuaau

SEQ ID NO: 4084705 - RNA, 21 nt, Variola virus
ugaagauggauucauccuuaa

SEQ ID NO: 4084706 - RNA, 15 nt, Variola virus
ugaagcauuggaagc

SEQ ID NO: 4084707 - RNA, 14 nt, Variola virus
ugaagcucaucuug

SEQ ID NO: 4084708 - RNA, 18 nt, Variola virus
ugaauauaauagauguau

SEQ ID NO: 4084709 - RNA, 20 nt, Variola virus
ugaauaucuaggaguaauua

SEQ ID NO: 4084710 - RNA, 22 nt, Variola virus
ugaaucuauuucugucauuaaa

SEQ ID NO: 4084711 - RNA, 16 nt, Variola virus
ugaaugaauacagauc

SEQ ID NO: 4084712 - RNA, 17 nt, Variola virus
ugaaugguaaagaaugc

SEQ ID NO: 4084713 - RNA, 21 nt, Variola virus
ugaauguuuccuucuuuacca

SEQ ID NO: 4084714 - RNA, 15 nt, Variola virus
ugaauguuugaaaac

SEQ ID NO: 4084715 - RNA, 14 nt, Variola virus
ugaauguuuucaau

SEQ ID NO: 4084716 - RNA, 13 nt, Variola virus
ugaauuaauguaa

SEQ ID NO: 4084717 - RNA, 23 nt, Variola virus
ugaauuuauuucagaaauuauuc

SEQ ID NO: 4084718 - RNA, 17 nt, Variola virus
ugacaaauguaguaaau

SEQ ID NO: 4084719 - RNA, 12 nt, Variola virus
ugacacauauca

SEQ ID NO: 4084720 - RNA, 20 nt, Variola virus
ugacauggcuucuuccauag

SEQ ID NO: 4084721 - RNA, 15 nt, Variola virus
ugacauucaaagauu

SEQ ID NO: 4084722 - RNA, 20 nt, Variola virus
ugacauuuuccuuguaucca

SEQ ID NO: 4084723 - RNA, 20 nt, Variola virus
ugacgaacguauuacuauga

SEQ ID NO: 4084724 - RNA, 18 nt, Variola virus
ugacggaugaucauacau

SEQ ID NO: 4084725 - RNA, 17 nt, Variola virus
ugacguuagacauaaaa

SEQ ID NO: 4084726 - RNA, 17 nt, Variola virus
ugacuagacugauuucu

SEQ ID NO: 4084727 - RNA, 20 nt, Variola virus
ugacuaguuguagaauuuga

SEQ ID NO: 4084728 - RNA, 20 nt, Variola virus
ugacuaucuuuugaaaauau

SEQ ID NO: 4084729 - RNA, 21 nt, Variola virus
ugacuauuguguguaaaguau

SEQ ID NO: 4084730 - RNA, 16 nt, Variola virus
ugacugcuaaagaugc

SEQ ID NO: 4084731 - RNA, 20 nt, Variola virus
ugacuguagaacucaugaau

SEQ ID NO: 4084732 - RNA, 17 nt, Variola virus
ugacuuucgaaccaauu

SEQ ID NO: 4084733 - RNA, 19 nt, Variola virus
ugagauaaauaucaucaau

SEQ ID NO: 4084734 - RNA, 14 nt, Variola virus
ugagauauauacac

SEQ ID NO: 4084735 - RNA, 22 nt, Variola virus
ugagauauuacucaaaauacua

SEQ ID NO: 4084736 - RNA, 17 nt, Variola virus
ugagaucuguaaugcua

SEQ ID NO: 4084737 - RNA, 18 nt, Variola virus
ugagaugacuggaaauca

SEQ ID NO: 4084738 - RNA, 20 nt, Variola virus
ugagauguuauuaaauguug

SEQ ID NO: 4084739 - RNA, 19 nt, Variola virus
ugagauuaaauguaauaac

SEQ ID NO: 4084740 - RNA, 23 nt, Variola virus
ugagauuuguuuuguuaaacaau

SEQ ID NO: 4084741 - RNA, 14 nt, Variola virus
ugaggaaauugaua

SEQ ID NO: 4084742 - RNA, 16 nt, Variola virus
ugaggauuuaaaacuc

SEQ ID NO: 4084743 - RNA, 21 nt, Variola virus
ugaggauuuacuaaguaauua

SEQ ID NO: 4084744 - RNA, 23 nt, Variola virus
ugaguaagacuugacuaaaucgu

SEQ ID NO: 4084745 - RNA, 17 nt, Variola virus
ugaguauaucagaucau

SEQ ID NO: 4084746 - RNA, 17 nt, Variola virus
ugagucuauaucccauu

SEQ ID NO: 4084747 - RNA, 21 nt, Variola virus
ugaguuccuuguuuuugcuaa

SEQ ID NO: 4084748 - RNA, 16 nt, Variola virus
ugaguuuuuaggaaau

SEQ ID NO: 4084749 - RNA, 21 nt, Variola virus
ugauaacguuggcaauacuaa

SEQ ID NO: 4084750 - RNA, 19 nt, Variola virus
ugauaacucguuuuucuua

SEQ ID NO: 4084751 - RNA, 16 nt, Variola virus
ugauaauagauggaua

SEQ ID NO: 4084752 - RNA, 17 nt, Variola virus
ugauaaucaaacacauc

SEQ ID NO: 4084753 - RNA, 16 nt, Variola virus
ugauaauccagucuuu

SEQ ID NO: 4084754 - RNA, 13 nt, Variola virus
ugauaauuuccag

SEQ ID NO: 4084755 - RNA, 16 nt, Variola virus
ugauacaccuguaauc

SEQ ID NO: 4084756 - RNA, 16 nt, Variola virus
ugauacagaaaaucuu

SEQ ID NO: 4084757 - RNA, 20 nt, Variola virus
ugauacggugaugguuuuua

SEQ ID NO: 4084758 - RNA, 16 nt, Variola virus
ugauacuaaguauaau

SEQ ID NO: 4084759 - RNA, 18 nt, Variola virus
ugauagagguagacuucu

SEQ ID NO: 4084760 - RNA, 23 nt, Variola virus
ugauagauacgcguucucuggag

SEQ ID NO: 4084761 - RNA, 11 nt, Variola virus
ugauagauauu

SEQ ID NO: 4084762 - RNA, 21 nt, Variola virus
ugauauacaaugcucaguaaa

SEQ ID NO: 4084763 - RNA, 16 nt, Variola virus
ugauauaguaauauua

SEQ ID NO: 4084764 - RNA, 21 nt, Variola virus
ugauauauccagauuacuaac

SEQ ID NO: 4084765 - RNA, 21 nt, Variola virus
ugauaucaaauggauauugcc

SEQ ID NO: 4084766 - RNA, 22 nt, Variola virus
ugauaugaacagacauuguauu

SEQ ID NO: 4084767 - RNA, 14 nt, Variola virus
ugauaugcauacua

SEQ ID NO: 4084768 - RNA, 18 nt, Variola virus
ugauauguauauuauuca

SEQ ID NO: 4084769 - RNA, 15 nt, Variola virus
ugauauguaugucca

SEQ ID NO: 4084770 - RNA, 19 nt, Variola virus
ugauauuuauuuugcuauc

SEQ ID NO: 4084771 - RNA, 22 nt, Variola virus
ugaucagggcuaacaauaauag

SEQ ID NO: 4084772 - RNA, 20 nt, Variola virus
ugaucauuggcaaaauccua

SEQ ID NO: 4084773 - RNA, 17 nt, Variola virus
ugaucgccauggauggu

SEQ ID NO: 4084774 - RNA, 17 nt, Variola virus
ugaucuauauguuuuau

SEQ ID NO: 4084775 - RNA, 22 nt, Variola virus
ugaucuucaucuaccaaagaaa

SEQ ID NO: 4084776 - RNA, 15 nt, Variola virus
aaaaauuauaauauu

SEQ ID NO: 4084777 - RNA, 12 nt, Variola virus
aaaaauuauccu

SEQ ID NO: 4084778 - RNA, 21 nt, Variola virus
aaaaauugaauugaugauaua

SEQ ID NO: 4084779 - RNA, 21 nt, Variola virus
aaaacauuauucuauuucgaa

SEQ ID NO: 4084780 - RNA, 22 nt, Variola virus
aaaacccuuacaacuacaguag

SEQ ID NO: 4084781 - RNA, 21 nt, Variola virus
aaaacgacuuacaauauguac

SEQ ID NO: 4084782 - RNA, 17 nt, Variola virus
aaaacgauuggaaucua

SEQ ID NO: 4084783 - RNA, 18 nt, Variola virus
aaaacuaucaaugauaug

SEQ ID NO: 4084784 - RNA, 22 nt, Variola virus
aaaacuguccaaauagauguac

SEQ ID NO: 4084785 - RNA, 14 nt, Variola virus
aaaacuuaaauguu

SEQ ID NO: 4084786 - RNA, 19 nt, Variola virus
aaaagacaugauaauauua

SEQ ID NO: 4084787 - RNA, 14 nt, Variola virus
aaaagacuauacau

SEQ ID NO: 4084788 - RNA, 14 nt, Variola virus
aaaagaucauacaa

SEQ ID NO: 4084789 - RNA, 14 nt, Variola virus
aaaagauuauacaa

SEQ ID NO: 4084790 - RNA, 13 nt, Variola virus
aaaagcuuaaaau

SEQ ID NO: 4084791 - RNA, 18 nt, Variola virus
aaaaggaguucaaauagu

SEQ ID NO: 4084792 - RNA, 19 nt, Variola virus
aaaaggcgguaauagaaua

SEQ ID NO: 4084793 - RNA, 13 nt, Variola virus
aaaaguuaaaacu

SEQ ID NO: 4084794 - RNA, 15 nt, Variola virus
aaaaguuaagaauua

SEQ ID NO: 4084795 - RNA, 21 nt, Variola virus
aaaaguuccagaaaauguaga

SEQ ID NO: 4084796 - RNA, 23 nt, Variola virus
aaaauaaauuagucauacguaau

SEQ ID NO: 4084797 - RNA, 16 nt, Variola virus
aaaauaauaucguucu

SEQ ID NO: 4084798 - RNA, 13 nt, Variola virus
aaaauaauaucua

SEQ ID NO: 4084799 - RNA, 16 nt, Variola virus
aaaauacuuaaaaugu

SEQ ID NO: 4084800 - RNA, 13 nt, Variola virus
aaaauauuaucua

SEQ ID NO: 4084801 - RNA, 23 nt, Variola virus
aaaaucaggguuaucaaaguguu

SEQ ID NO: 4084802 - RNA, 18 nt, Variola virus
aaaauccaucaaaaaugu

SEQ ID NO: 4084803 - RNA, 15 nt, Variola virus
aaaaucgauaaacug

SEQ ID NO: 4084804 - RNA, 18 nt, Variola virus
aaaaucuaaacaaauauu

SEQ ID NO: 4084805 - RNA, 18 nt, Variola virus
aaaaugaugcuauuagaa

SEQ ID NO: 4084806 - RNA, 15 nt, Variola virus
aaaaugauuaaauua

SEQ ID NO: 4084807 - RNA, 18 nt, Variola virus
aaaaugcgauguuaauuu

SEQ ID NO: 4084808 - RNA, 17 nt, Variola virus
aaaauguauaacaaaug

SEQ ID NO: 4084809 - RNA, 22 nt, Variola virus
aaaauguauaacaaaugcagaa

SEQ ID NO: 4084810 - RNA, 15 nt, Variola virus
aaaauguuagaauua

SEQ ID NO: 4084811 - RNA, 13 nt, Variola virus
aaaauuauaacua

SEQ ID NO: 4084812 - RNA, 22 nt, Variola virus
aaaauuauacuguaacacaaug

SEQ ID NO: 4084813 - RNA, 13 nt, Variola virus
aaaauuaugugaa

SEQ ID NO: 4084814 - RNA, 14 nt, Variola virus
aaaauucauuagaa

SEQ ID NO: 4084815 - RNA, 16 nt, Variola virus
aaaauucauuagaaua

SEQ ID NO: 4084816 - RNA, 17 nt, Variola virus
aaaauucuaauggauga

SEQ ID NO: 4084817 - RNA, 23 nt, Variola virus
aaacaaggauucguuuacucuca

SEQ ID NO: 4084818 - RNA, 13 nt, Variola virus
aaacaauacagug

SEQ ID NO: 4084819 - RNA, 22 nt, Variola virus
aaacaauuucacaaauggaugu

SEQ ID NO: 4084820 - RNA, 16 nt, Variola virus
aaacacagauagugaa

SEQ ID NO: 4084821 - RNA, 23 nt, Variola virus
aaacacguuuauuuuauauguca

SEQ ID NO: 4084822 - RNA, 19 nt, Variola virus
aaacacuuggauauuguau

SEQ ID NO: 4084823 - RNA, 13 nt, Variola virus
aaacaugugguau

SEQ ID NO: 4084824 - RNA, 21 nt, Variola virus
aaacauugacggauaaaacaa

SEQ ID NO: 4084825 - RNA, 19 nt, Variola virus
aaacauuguucaugauaua

SEQ ID NO: 4084826 - RNA, 21 nt, Variola virus
aaaccaaaucuugauuacaaa

SEQ ID NO: 4084827 - RNA, 22 nt, Variola virus
aaaccaaucaauuauguaaaua

SEQ ID NO: 4084828 - RNA, 20 nt, Variola virus
aaaccaggcgaguguagaaa

SEQ ID NO: 4084829 - RNA, 20 nt, Variola virus
aaaccauuuuucagaaagua

SEQ ID NO: 4084830 - RNA, 21 nt, Variola virus
aaacgaacacuauuagaauua

SEQ ID NO: 4084831 - RNA, 19 nt, Variola virus
aaacgacuuaauuacagag

SEQ ID NO: 4084832 - RNA, 18 nt, Variola virus
aaacgauauucuugaaau

SEQ ID NO: 4084833 - RNA, 14 nt, Variola virus
aaacuaaacuuauu

SEQ ID NO: 4084834 - RNA, 22 nt, Variola virus
aaacucuuuagcgguauaauua

SEQ ID NO: 4084835 - RNA, 24 nt, Variola virus
aaacugguaauccacauaguugua

SEQ ID NO: 4084836 - RNA, 12 nt, Variola virus
aaacuuacagaa

SEQ ID NO: 4084837 - RNA, 21 nt, Variola virus
aaacuuagauuaaaugcugaa

SEQ ID NO: 4084838 - RNA, 18 nt, Variola virus
aaacuuauuuagaauauc

SEQ ID NO: 4084839 - RNA, 22 nt, Variola virus
aaacuucaaucuguuaagauua

SEQ ID NO: 4084840 - RNA, 20 nt, Variola virus
aaacuuccucauuaagauug

SEQ ID NO: 4084841 - RNA, 19 nt, Variola virus
aaacuucguaaaauauucu

SEQ ID NO: 4084842 - RNA, 19 nt, Variola virus
aaacuugauaauuaauaau

SEQ ID NO: 4084843 - RNA, 13 nt, Variola virus
aaacuugcaaaga

SEQ ID NO: 4084844 - RNA, 21 nt, Variola virus
aaacuuuaauaacaaagaaag

SEQ ID NO: 4084845 - RNA, 22 nt, Variola virus
aaacuuuagaagaauaucucaa

SEQ ID NO: 4084846 - RNA, 14 nt, Variola virus
aaacuuuuagaaau

SEQ ID NO: 4084847 - RNA, 14 nt, Variola virus
aaagaaccauuaca

SEQ ID NO: 4084848 - RNA, 17 nt, Variola virus
aaagaaugagauacaua

SEQ ID NO: 4084849 - RNA, 21 nt, Variola virus
aaagacaucauauauagaaug

SEQ ID NO: 4084850 - RNA, 17 nt, Variola virus
aaagacuguagaagcua

SEQ ID NO: 4084851 - RNA, 12 nt, Variola virus
aaagaucauauu

SEQ ID NO: 4084852 - RNA, 16 nt, Variola virus
aaagauuaauuauccg

SEQ ID NO: 4084853 - RNA, 13 nt, Variola virus
aaagauuuaagaa

SEQ ID NO: 4084854 - RNA, 19 nt, Variola virus
aaagcaagaccaaacaccg

SEQ ID NO: 4084855 - RNA, 13 nt, Variola virus
aaagcuguuguau

SEQ ID NO: 4084856 - RNA, 17 nt, Variola virus
aaaggacagaaauauau

SEQ ID NO: 4084857 - RNA, 16 nt, Variola virus
aaaggaugauacauua

SEQ ID NO: 4084858 - RNA, 16 nt, Variola virus
aaaggccuuguaacuu

SEQ ID NO: 4084859 - RNA, 18 nt, Variola virus
aaagggauauauauugca

SEQ ID NO: 4084860 - RNA, 19 nt, Variola virus
aaagggcaauaguuugcgu

SEQ ID NO: 4084861 - RNA, 13 nt, Variola virus
aaagguguguacu

SEQ ID NO: 4084862 - RNA, 19 nt, Variola virus
aaaguaauauucauaugua

SEQ ID NO: 4084863 - RNA, 13 nt, Variola virus
aaaguaauucauu

SEQ ID NO: 4084864 - RNA, 16 nt, Variola virus
aaaguauacauguuag

SEQ ID NO: 4084865 - RNA, 16 nt, Variola virus
aaaguaucacagaauc

SEQ ID NO: 4084866 - RNA, 22 nt, Variola virus
aaaguauccaucacuucuaucu

SEQ ID NO: 4084867 - RNA, 17 nt, Variola virus
aaagucaucucuuguau

SEQ ID NO: 4084868 - RNA, 15 nt, Variola virus
aaagucugaucuuaa

SEQ ID NO: 4084869 - RNA, 14 nt, Variola virus
aaagucuuuaguau

SEQ ID NO: 4084870 - RNA, 12 nt, Variola virus
aaaguuaaaagu

SEQ ID NO: 4084871 - RNA, 16 nt, Variola virus
aaaguuaaucauauag

SEQ ID NO: 4084872 - RNA, 16 nt, Variola virus
aacgucauaaaaaugu

SEQ ID NO: 4084873 - RNA, 14 nt, Variola virus
aacgucuaaaugua

SEQ ID NO: 4084874 - RNA, 16 nt, Variola virus
aacgugauggauauau

SEQ ID NO: 4084875 - RNA, 12 nt, Variola virus
aacgugucaucu

SEQ ID NO: 4084876 - RNA, 16 nt, Variola virus
aacguuccguaucugu

SEQ ID NO: 4084877 - RNA, 16 nt, Variola virus
aacuaaaaaucaaacu

SEQ ID NO: 4084878 - RNA, 16 nt, Variola virus
aacuaaaauuaaacau

SEQ ID NO: 4084879 - RNA, 16 nt, Variola virus
aacuaauacaucugaa

SEQ ID NO: 4084880 - RNA, 13 nt, Variola virus
aacuacuuuauca

SEQ ID NO: 4084881 - RNA, 16 nt, Variola virus
aacuagaguaaaaauc

SEQ ID NO: 4084882 - RNA, 14 nt, Variola virus
aacuaggaaauugg

SEQ ID NO: 4084883 - RNA, 21 nt, Variola virus
aacuauaaguguguuguaaac

SEQ ID NO: 4084884 - RNA, 20 nt, Variola virus
aacuauaauggugcuuguau

SEQ ID NO: 4084885 - RNA, 14 nt, Variola virus
aacuauauaaugaa

SEQ ID NO: 4084886 - RNA, 13 nt, Variola virus
aacuaucaaacaa

SEQ ID NO: 4084887 - RNA, 14 nt, Variola virus
aacuaucuguaaaa

SEQ ID NO: 4084888 - RNA, 16 nt, Variola virus
aacuauuaauauuaac

SEQ ID NO: 4084889 - RNA, 14 nt, Variola virus
aacuauucaguagu

SEQ ID NO: 4084890 - RNA, 17 nt, Variola virus
aacuauuccaauguuua

SEQ ID NO: 4084891 - RNA, 16 nt, Variola virus
aaaguuuuauauguag

SEQ ID NO: 4084892 - RNA, 22 nt, Variola virus
aaaguuuuuaagagauaaucua

SEQ ID NO: 4084893 - RNA, 20 nt, Variola virus
aaauaaaaagguagauguuc

SEQ ID NO: 4084894 - RNA, 14 nt, Variola virus
aaauaaaacuauag

SEQ ID NO: 4084895 - RNA, 16 nt, Variola virus
aaauaaaauacauuua

SEQ ID NO: 4084896 - RNA, 23 nt, Variola virus
aaauaaaccuuuggaauuaguau

SEQ ID NO: 4084897 - RNA, 15 nt, Variola virus
aaauaauuagaacua

SEQ ID NO: 4084898 - RNA, 13 nt, Variola virus
aaauacauaaaga

SEQ ID NO: 4084899 - RNA, 16 nt, Variola virus
aaauacauguaacaaa

SEQ ID NO: 4084900 - RNA, 15 nt, Variola virus
aaauagauagaacua

SEQ ID NO: 4084901 - RNA, 16 nt, Variola virus
aaauagauagaacuac

SEQ ID NO: 4084902 - RNA, 22 nt, Variola virus
aaauaggaguuagaauaauaau

SEQ ID NO: 4084903 - RNA, 16 nt, Variola virus
aaauagguacucuguu

SEQ ID NO: 4084904 - RNA, 12 nt, Variola virus
aaauauauuguu

SEQ ID NO: 4084905 - RNA, 17 nt, Variola virus
aaauaucauaaauauau

SEQ ID NO: 4084906 - RNA, 15 nt, Variola virus
aaauaucuauaugau

SEQ ID NO: 4084907 - RNA, 14 nt, Variola virus
aaauaucucaaaga

SEQ ID NO: 4084908 - RNA, 17 nt, Variola virus
aaauaucuuuaauacag

SEQ ID NO: 4084909 - RNA, 17 nt, Variola virus
aaauaugucuuuguuaa

SEQ ID NO: 4084910 - RNA, 19 nt, Variola virus
aaauauuaauaaaguauau

SEQ ID NO: 4084911 - RNA, 21 nt, Variola virus
aaaucaaaacaaaauucauua

SEQ ID NO: 4084912 - RNA, 18 nt, Variola virus
aaaucaaaauccauauca

SEQ ID NO: 4084913 - RNA, 19 nt, Variola virus
aaaucagaugcuguaaauu

SEQ ID NO: 4084914 - RNA, 20 nt, Variola virus
aaaucauuaaaugauuguau

SEQ ID NO: 4084915 - RNA, 24 nt, Variola virus
aaauccaaauugcgacacuauuca

SEQ ID NO: 4084916 - RNA, 20 nt, Variola virus
aaauccacuugauacagcca

SEQ ID NO: 4084917 - RNA, 20 nt, Variola virus
aaauccauguaaaaaaaugu

SEQ ID NO: 4084918 - RNA, 14 nt, Variola virus
aaaucccaaauguu

SEQ ID NO: 4084919 - RNA, 23 nt, Variola virus
aaaucggauggauugguaacauu

SEQ ID NO: 4084920 - RNA, 13 nt, Variola virus
aaaucuaacuucu

SEQ ID NO: 4084921 - RNA, 15 nt, Variola virus
aaaucuugauuacaa

SEQ ID NO: 4084922 - RNA, 23 nt, Variola virus
aaaugauucuaucuacaucuuca

SEQ ID NO: 4084923 - RNA, 13 nt, Variola virus
aaaugcauacuug

SEQ ID NO: 4084924 - RNA, 14 nt, Variola virus
aaauggaucucaua

SEQ ID NO: 4084925 - RNA, 17 nt, Variola virus
aaaugguaaauacugua

SEQ ID NO: 4084926 - RNA, 22 nt, Variola virus
aaaugguguaacucucuggaag

SEQ ID NO: 4084927 - RNA, 22 nt, Variola virus
aaauguauguguugaacaucag

SEQ ID NO: 4084928 - RNA, 17 nt, Variola virus
aaauguuuauaguauua

SEQ ID NO: 4084929 - RNA, 22 nt, Variola virus
aaauguuugauaaaaauaugua

SEQ ID NO: 4084930 - RNA, 14 nt, Variola virus
aaauuaaaaaagau

SEQ ID NO: 4084931 - RNA, 12 nt, Variola virus
aaauuaaagucu

SEQ ID NO: 4084932 - RNA, 14 nt, Variola virus
aaauuaauauuucu

SEQ ID NO: 4084933 - RNA, 20 nt, Variola virus
aaauuauaucuaguggauua

SEQ ID NO: 4084934 - RNA, 15 nt, Variola virus
aaauuaucaaauguu

SEQ ID NO: 4084935 - RNA, 14 nt, Variola virus
aaauuauucguuua

SEQ ID NO: 4084936 - RNA, 21 nt, Variola virus
aaauucuuaguuauauauacu

SEQ ID NO: 4084937 - RNA, 22 nt, Variola virus
aaauugcgacacuauucaugua

SEQ ID NO: 4084938 - RNA, 23 nt, Variola virus
aaauugcgacacuauucauguaa

SEQ ID NO: 4084939 - RNA, 21 nt, Variola virus
aaauugguacucuaucauaau

SEQ ID NO: 4084940 - RNA, 13 nt, Variola virus
aaauuuaccacua

SEQ ID NO: 4084941 - RNA, 14 nt, Variola virus
aaauuuauuauuua

SEQ ID NO: 4084942 - RNA, 20 nt, Variola virus
aaauuuauuuaucaauuuua

SEQ ID NO: 4084943 - RNA, 17 nt, Variola virus
aaauuuccauuagauua

SEQ ID NO: 4084944 - RNA, 19 nt, Variola virus
aaauuugcaucuacaucau

SEQ ID NO: 4084945 - RNA, 22 nt, Variola virus
aaauuuguucgucugucaugau

SEQ ID NO: 4084946 - RNA, 16 nt, Variola virus
aaauuuuuaauccaaa

SEQ ID NO: 4084947 - RNA, 19 nt, Variola virus
aaauuuuuuauuucaguau

SEQ ID NO: 4084948 - RNA, 20 nt, Variola virus
aaauuuuuuuuacaaacauu

SEQ ID NO: 4084949 - RNA, 12 nt, Variola virus
aacaaaauacuc

SEQ ID NO: 4084950 - RNA, 14 nt, Variola virus
aacaaacaucucac

SEQ ID NO: 4084951 - RNA, 17 nt, Variola virus
aacaaauagacuuuuua

SEQ ID NO: 4084952 - RNA, 17 nt, Variola virus
aacaaauguuggagaaa

SEQ ID NO: 4084953 - RNA, 18 nt, Variola virus
aacaacaaauaaaaaggu

SEQ ID NO: 4084954 - RNA, 17 nt, Variola virus
aacaaccaaaaaaauau

SEQ ID NO: 4084955 - RNA, 14 nt, Variola virus
aacaagaaaguuau

SEQ ID NO: 4084956 - RNA, 18 nt, Variola virus
aacaagguaccgaaucua

SEQ ID NO: 4084957 - RNA, 19 nt, Variola virus
aacaaggugacuauaaagu

SEQ ID NO: 4084958 - RNA, 17 nt, Variola virus
aacaauaucguuauuau

SEQ ID NO: 4084959 - RNA, 15 nt, Variola virus
aacaaucugucgaaa

SEQ ID NO: 4084960 - RNA, 14 nt, Variola virus
aacaaugucaaaau

SEQ ID NO: 4084961 - RNA, 16 nt, Variola virus
aacaauuuugucagua

SEQ ID NO: 4084962 - RNA, 16 nt, Variola virus
aacacaacaaaugaua

SEQ ID NO: 4084963 - RNA, 23 nt, Variola virus
aacacacacugagaaacagcaua

SEQ ID NO: 4084964 - RNA, 17 nt, Variola virus
aacacacgaugaaaaug

SEQ ID NO: 4084965 - RNA, 12 nt, Variola virus
aacacagccaua

SEQ ID NO: 4084966 - RNA, 17 nt, Variola virus
aacacauccgucaaaga

SEQ ID NO: 4084967 - RNA, 22 nt, Variola virus
aacaccuugugcauuauguaaa

SEQ ID NO: 4084968 - RNA, 20 nt, Variola virus
aacacguuaaacaaaaaucu

SEQ ID NO: 4084969 - RNA, 22 nt, Variola virus
aacacuaaaaaauaaacacaua

SEQ ID NO: 4084970 - RNA, 13 nt, Variola virus
aacacuauuagaa

SEQ ID NO: 4084971 - RNA, 20 nt, Variola virus
aacacuuuauacuucuccaa

SEQ ID NO: 4084972 - RNA, 15 nt, Variola virus
aacagaaaaaacaau

SEQ ID NO: 4084973 - RNA, 15 nt, Variola virus
aacagauaguuuauu

SEQ ID NO: 4084974 - RNA, 21 nt, Variola virus
aacagauauaguuuuucugga

SEQ ID NO: 4084975 - RNA, 21 nt, Variola virus
aacaggucgcuauauccacca

SEQ ID NO: 4084976 - RNA, 12 nt, Variola virus
aacaguauuauu

SEQ ID NO: 4084977 - RNA, 19 nt, Variola virus
aacagucacgauaucucuu

SEQ ID NO: 4084978 - RNA, 23 nt, Variola virus
aacagucuccuaauauaacagua

SEQ ID NO: 4084979 - RNA, 15 nt, Variola virus
aacagugaguuuauc

SEQ ID NO: 4084980 - RNA, 21 nt, Variola virus
aacaguucuaccaccaguaau

SEQ ID NO: 4084981 - RNA, 14 nt, Variola virus
aacauaaaaacugu

SEQ ID NO: 4084982 - RNA, 16 nt, Variola virus
aacaucacgaaaucua

SEQ ID NO: 4084983 - RNA, 12 nt, Variola virus
aacaucagaaac

SEQ ID NO: 4084984 - RNA, 22 nt, Variola virus
aacaucguaucuucaaaaaggu

SEQ ID NO: 4084985 - RNA, 15 nt, Variola virus
aacaucuaacuauau

SEQ ID NO: 4084986 - RNA, 22 nt, Variola virus
aacaucucagacagucuggucu

SEQ ID NO: 4084987 - RNA, 14 nt, Variola virus
aacaucuuuaaucu

SEQ ID NO: 4084988 - RNA, 21 nt, Variola virus
aacaucuuuguaaacagauau

SEQ ID NO: 4084989 - RNA, 14 nt, Variola virus
aacauuaacagauu

SEQ ID NO: 4084990 - RNA, 19 nt, Variola virus
aacauuaauacaaacgaua

SEQ ID NO: 4084991 - RNA, 20 nt, Variola virus
aacauuauaucguuaucauu

SEQ ID NO: 4084992 - RNA, 16 nt, Variola virus
aacauuccaaagauca

SEQ ID NO: 4084993 - RNA, 16 nt, Variola virus
aacauucuuucaaaga

SEQ ID NO: 4084994 - RNA, 17 nt, Variola virus
aacauuuccuacauaua

SEQ ID NO: 4084995 - RNA, 17 nt, Variola virus
aacauuuuauuucuaga

SEQ ID NO: 4084996 - RNA, 14 nt, Variola virus
aaccaacuacagaa

SEQ ID NO: 4084997 - RNA, 20 nt, Variola virus
aaccagguaggcaguuuuau

SEQ ID NO: 4084998 - RNA, 16 nt, Variola virus
aaccaugagugugaaa

SEQ ID NO: 4084999 - RNA, 14 nt, Variola virus
aaccauucauuaau

SEQ ID NO: 4085000 - RNA, 21 nt, Variola virus
aaccauucauuaauuucugau

SEQ ID NO: 4085001 - RNA, 14 nt, Variola virus
aaccauucuaaaca

SEQ ID NO: 4085002 - RNA, 22 nt, Variola virus
aaccucacuguuaaaaauaugu

SEQ ID NO: 4085003 - RNA, 15 nt, Variola virus
aacgaauaaacaauu

SEQ ID NO: 4085004 - RNA, 15 nt, Variola virus
aacgaggacaaacua

SEQ ID NO: 4085005 - RNA, 17 nt, Variola virus
aacgauaccaucuucug

SEQ ID NO: 4085006 - RNA, 14 nt, Variola virus
aacgauauuaaccu

SEQ ID NO: 4085007 - RNA, 15 nt, Variola virus
aacgauauuugugaa

SEQ ID NO: 4085008 - RNA, 19 nt, Variola virus
aacgaugccuuuuguaaau

SEQ ID NO: 4085009 - RNA, 16 nt, Variola virus
aacgauuauuucuaaa

SEQ ID NO: 4085010 - RNA, 23 nt, Variola virus
aacgauugguauuuguacaggua

SEQ ID NO: 4085011 - RNA, 22 nt, Variola virus
aacgccuauucgaaauuagaaa

SEQ ID NO: 4085012 - RNA, 14 nt, Variola virus
aacgccuuagaaau

SEQ ID NO: 4085013 - RNA, 14 nt, Variola virus
aacgccuuuagaaa

SEQ ID NO: 4085014 - RNA, 22 nt, Variola virus
aacgcguaauugguauauguau

SEQ ID NO: 4085015 - RNA, 21 nt, Variola virus
aacggagaauaucuauacaua

SEQ ID NO: 4085016 - RNA, 22 nt, Variola virus
aacggcgagaagacaauauuau

SEQ ID NO: 4085017 - RNA, 14 nt, Variola virus
aacgguauaugaau

SEQ ID NO: 4085018 - RNA, 16 nt, Variola virus
aacguacaaauggaua

SEQ ID NO: 4085019 - RNA, 18 nt, Variola virus
aacguauuaaauauuaau

SEQ ID NO: 4085020 - RNA, 19 nt, Variola virus
uucccaaauaaucauucau

SEQ ID NO: 4085021 - RNA, 15 nt, Variola virus
uucccaaauaguuuu

SEQ ID NO: 4085022 - RNA, 17 nt, Variola virus
uuccgccguauccauaa

SEQ ID NO: 4085023 - RNA, 23 nt, Variola virus
uuccuagauauuuaaaauaaucc

SEQ ID NO: 4085024 - RNA, 13 nt, Variola virus
uuccuccauaauu

SEQ ID NO: 4085025 - RNA, 21 nt, Variola virus
uuccuuuacgugauaaaucau

SEQ ID NO: 4085026 - RNA, 21 nt, Variola virus
uucgaggaauaauaagaacaa

SEQ ID NO: 4085027 - RNA, 16 nt, Variola virus
uucgauagauauucuu

SEQ ID NO: 4085028 - RNA, 15 nt, Variola virus
uucgauauauguucc

SEQ ID NO: 4085029 - RNA, 18 nt, Variola virus
uucggaucguaaaucugu

SEQ ID NO: 4085030 - RNA, 23 nt, Variola virus
uucguaaaaaaguuaaaacuugu

SEQ ID NO: 4085031 - RNA, 16 nt, Variola virus
uucgucgaauaaugua

SEQ ID NO: 4085032 - RNA, 19 nt, Variola virus
uucgucuucccaaaauguu

SEQ ID NO: 4085033 - RNA, 21 nt, Variola virus
uucuaaacccaaaauguaugu

SEQ ID NO: 4085034 - RNA, 16 nt, Variola virus
uucuaagguagaaucu

SEQ ID NO: 4085035 - RNA, 18 nt, Variola virus
uucuaauacauaauucuu

SEQ ID NO: 4085036 - RNA, 12 nt, Variola virus
uucuaauacuau

SEQ ID NO: 4085037 - RNA, 16 nt, Variola virus
uucuacaacauuauua

SEQ ID NO: 4085038 - RNA, 20 nt, Variola virus
uucuacgaaaggagagaaug

SEQ ID NO: 4085039 - RNA, 19 nt, Variola virus
uucuacgauuuuauuucuu

SEQ ID NO: 4085040 - RNA, 22 nt, Variola virus
uucuacuaugcaauuaccaaaa

SEQ ID NO: 4085041 - RNA, 22 nt, Variola virus
uucuagaaguugauacaacaua

SEQ ID NO: 4085042 - RNA, 14 nt, Variola virus
uucuagucuagaaa

SEQ ID NO: 4085043 - RNA, 22 nt, Variola virus
uucuauaacuugagacuugaua

SEQ ID NO: 4085044 - RNA, 15 nt, Variola virus
uucuauacauagaug

SEQ ID NO: 4085045 - RNA, 20 nt, Variola virus
uucuauaccaauauuauucu

SEQ ID NO: 4085046 - RNA, 13 nt, Variola virus
uucuauuauuaca

SEQ ID NO: 4085047 - RNA, 16 nt, Variola virus
uucuauuuuuaauuuu

SEQ ID NO: 4085048 - RNA, 23 nt, Variola virus
uucuccaugaauuaauacauauu

SEQ ID NO: 4085049 - RNA, 19 nt, Variola virus
uucuccggccacuauuauu

SEQ ID NO: 4085050 - RNA, 12 nt, Variola virus
uucucuagauac

SEQ ID NO: 4085051 - RNA, 13 nt, Variola virus
uucugaauuauug

SEQ ID NO: 4085052 - RNA, 21 nt, Variola virus
uucuggaauaggauaauaauu

SEQ ID NO: 4085053 - RNA, 16 nt, Variola virus
uucuggauauguuuuu

SEQ ID NO: 4085054 - RNA, 16 nt, Variola virus
uucugucaacaauguc

SEQ ID NO: 4085055 - RNA, 12 nt, Variola virus
uucuuacaauua

SEQ ID NO: 4085056 - RNA, 17 nt, Variola virus
uucuuaccaacaucuua

SEQ ID NO: 4085057 - RNA, 18 nt, Variola virus
uucuucaauaaaaugaaa

SEQ ID NO: 4085058 - RNA, 16 nt, Variola virus
uucuucagaauaauag

SEQ ID NO: 4085059 - RNA, 23 nt, Variola virus
uucuucauuuauggguaucaaaa

SEQ ID NO: 4085060 - RNA, 20 nt, Variola virus
uucuuccaacucuguuuuaa

SEQ ID NO: 4085061 - RNA, 15 nt, Variola virus
uucuuggauaaaagc

SEQ ID NO: 4085062 - RNA, 20 nt, Variola virus
uucuuggauauagaauccaa

SEQ ID NO: 4085063 - RNA, 20 nt, Variola virus
uugaaauuguuuuuuauuuu

SEQ ID NO: 4085064 - RNA, 19 nt, Variola virus
uugaauaggaguuugaaua

SEQ ID NO: 4085065 - RNA, 22 nt, Variola virus
uugaaucucuguggaaauuaga

SEQ ID NO: 4085066 - RNA, 19 nt, Variola virus
uugaauggauacuaguuuu

SEQ ID NO: 4085067 - RNA, 15 nt, Variola virus
uugacaaauuauucu

SEQ ID NO: 4085068 - RNA, 16 nt, Variola virus
uugacggccgucauca

SEQ ID NO: 4085069 - RNA, 21 nt, Variola virus
uugacuacauucaggaaacua

SEQ ID NO: 4085070 - RNA, 21 nt, Variola virus
uugacucaugacuucauugau

SEQ ID NO: 4085071 - RNA, 21 nt, Variola virus
uugagaaaagguucuaucaac

SEQ ID NO: 4085072 - RNA, 16 nt, Variola virus
uugagacuaucaacag

SEQ ID NO: 4085073 - RNA, 18 nt, Variola virus
uugauaaagauagaugau

SEQ ID NO: 4085074 - RNA, 18 nt, Variola virus
uugauaacucguuuuucu

SEQ ID NO: 4085075 - RNA, 16 nt, Variola virus
uugauacggcuauucu

SEQ ID NO: 4085076 - RNA, 15 nt, Variola virus
uugaucauguagaaa

SEQ ID NO: 4085077 - RNA, 20 nt, Variola virus
uugauccuagaacuagauau

SEQ ID NO: 4085078 - RNA, 18 nt, Variola virus
uugaugaaguucgaugau

SEQ ID NO: 4085079 - RNA, 14 nt, Variola virus
uugauuaguauaac

SEQ ID NO: 4085080 - RNA, 13 nt, Variola virus
uugauuuuggaua

SEQ ID NO: 4085081 - RNA, 20 nt, Variola virus
uugcacaauccaaacuuuuu

SEQ ID NO: 4085082 - RNA, 22 nt, Variola virus
uugccuccggagucauaaaagg

SEQ ID NO: 4085083 - RNA, 13 nt, Variola virus
uugcgacacuauu

SEQ ID NO: 4085084 - RNA, 20 nt, Variola virus
uugcguacauugcucguaaa

SEQ ID NO: 4085085 - RNA, 19 nt, Variola virus
uugcucaaauaauacuaua

SEQ ID NO: 4085086 - RNA, 22 nt, Variola virus
uuggagaaacggcaacuggaaa

SEQ ID NO: 4085087 - RNA, 13 nt, Variola virus
uugguuucuaaau

SEQ ID NO: 4085088 - RNA, 15 nt, Variola virus
uuguacauguaauga

SEQ ID NO: 4085089 - RNA, 13 nt, Variola virus
uuguauaugugau

SEQ ID NO: 4085090 - RNA, 16 nt, Variola virus
uuguauccuuaucuau

SEQ ID NO: 4085091 - RNA, 12 nt, Variola virus
uugucagauuca

SEQ ID NO: 4085092 - RNA, 13 nt, Variola virus
uugucgcacuaua

SEQ ID NO: 4085093 - RNA, 12 nt, Variola virus
uugucuagauaa

SEQ ID NO: 4085094 - RNA, 19 nt, Variola virus
uugucuccuccuccguaaa

SEQ ID NO: 4085095 - RNA, 24 nt, Variola virus
uugucuuuaaguauauacgauaag

SEQ ID NO: 4085096 - RNA, 14 nt, Variola virus
uugugauuguauuu

SEQ ID NO: 4085097 - RNA, 11 nt, Variola virus
uuuaaaaucau

SEQ ID NO: 4085098 - RNA, 19 nt, Variola virus
cacuaguuaagaacauguc

SEQ ID NO: 4085099 - RNA, 21 nt, Variola virus
cacuaucaaucgauaacaagg

SEQ ID NO: 4085100 - RNA, 19 nt, Variola virus
cacuauguuagcauuucua

SEQ ID NO: 4085101 - RNA, 16 nt, Variola virus
cacucuucgaaaagaa

SEQ ID NO: 4085102 - RNA, 13 nt, Variola virus
cacugcagcauuu

SEQ ID NO: 4085103 - RNA, 23 nt, Variola virus
cacugggguaaaguaaguaucua

SEQ ID NO: 4085104 - RNA, 21 nt, Variola virus
cacugucuggcaauaaaugau

SEQ ID NO: 4085105 - RNA, 15 nt, Variola virus
cacuguggaugugac

SEQ ID NO: 4085106 - RNA, 20 nt, Variola virus
cacuuaaaucgauauaacag

SEQ ID NO: 4085107 - RNA, 19 nt, Variola virus
cacuuaauggcauaaugau

SEQ ID NO: 4085108 - RNA, 16 nt, Variola virus
cacuuacagaaaagau

SEQ ID NO: 4085109 - RNA, 16 nt, Variola virus
cacuucuauaguaucu

SEQ ID NO: 4085110 - RNA, 13 nt, Variola virus
cagaaaaaacaau

SEQ ID NO: 4085111 - RNA, 13 nt, Variola virus
cagaaaagauauu

SEQ ID NO: 4085112 - RNA, 17 nt, Variola virus
cagaaagcuguggaugu

SEQ ID NO: 4085113 - RNA, 16 nt, Variola virus
cagaaauauauauauu

SEQ ID NO: 4085114 - RNA, 22 nt, Variola virus
cagaaauuaguuuagagucaaa

SEQ ID NO: 4085115 - RNA, 20 nt, Variola virus
cagaaauugguauaaauguu

SEQ ID NO: 4085116 - RNA, 12 nt, Variola virus
cagaacuauuag

SEQ ID NO: 4085117 - RNA, 13 nt, Variola virus
cagaacuauuuuu

SEQ ID NO: 4085118 - RNA, 18 nt, Variola virus
cagaagaauaugaugauu

SEQ ID NO: 4085119 - RNA, 22 nt, Variola virus
cagaauagcggauauagauauu

SEQ ID NO: 4085120 - RNA, 18 nt, Variola virus
cagaauauauaagacaca

SEQ ID NO: 4085121 - RNA, 17 nt, Variola virus
cagaaucaguauauauu

SEQ ID NO: 4085122 - RNA, 17 nt, Variola virus
cagaaucccuuuccaaa

SEQ ID NO: 4085123 - RNA, 21 nt, Variola virus
cagacaaucacguacaaagaa

SEQ ID NO: 4085124 - RNA, 17 nt, Variola virus
cagacacagacgauauu

SEQ ID NO: 4085125 - RNA, 14 nt, Variola virus
cagacauacaguag

SEQ ID NO: 4085126 - RNA, 14 nt, Variola virus
cagaccucucuuaa

SEQ ID NO: 4085127 - RNA, 17 nt, Variola virus
cagacucauuauuuccc

SEQ ID NO: 4085128 - RNA, 12 nt, Variola virus
cagacugugcau

SEQ ID NO: 4085129 - RNA, 21 nt, Variola virus
cagagaggcggucuugauauu

SEQ ID NO: 4085130 - RNA, 19 nt, Variola virus
cagagcagucuuucuaaag

SEQ ID NO: 4085131 - RNA, 14 nt, Variola virus
cagaggaacgccau

SEQ ID NO: 4085132 - RNA, 15 nt, Variola virus
cagaggaguuauuua

SEQ ID NO: 4085133 - RNA, 15 nt, Variola virus
cagagguuguauuua

SEQ ID NO: 4085134 - RNA, 14 nt, Variola virus
cagaguuauccauu

SEQ ID NO: 4085135 - RNA, 14 nt, Variola virus
cagaguuuagauua

SEQ ID NO: 4085136 - RNA, 17 nt, Variola virus
cagauacauuauaugau

SEQ ID NO: 4085137 - RNA, 12 nt, Variola virus
cagauagaaaau

SEQ ID NO: 4085138 - RNA, 21 nt, Variola virus
cagauauuccgacaaaggauu

SEQ ID NO: 4085139 - RNA, 22 nt, Variola virus
cagaucaaaaaauauaguucca

SEQ ID NO: 4085140 - RNA, 11 nt, Variola virus
cagaugauauc

SEQ ID NO: 4085141 - RNA, 17 nt, Variola virus
cagaugcuguaaauuau

SEQ ID NO: 4085142 - RNA, 22 nt, Variola virus
cagauguaaauauaucuacaau

SEQ ID NO: 4085143 - RNA, 16 nt, Variola virus
cagaugucaugauauu

SEQ ID NO: 4085144 - RNA, 16 nt, Variola virus
cagauuuuaaaaacug

SEQ ID NO: 4085145 - RNA, 13 nt, Variola virus
cagauuuuaauau

SEQ ID NO: 4085146 - RNA, 19 nt, Variola virus
cagcacggugguagauaua

SEQ ID NO: 4085147 - RNA, 21 nt, Variola virus
cagcauagacuuugccacaac

SEQ ID NO: 4085148 - RNA, 14 nt, Variola virus
cagcaucagcauuu

SEQ ID NO: 4085149 - RNA, 19 nt, Variola virus
cagcuauguuaucaugaaa

SEQ ID NO: 4085150 - RNA, 21 nt, Variola virus
cagcuccccuacguaucuaua

SEQ ID NO: 4085151 - RNA, 13 nt, Variola virus
caggaacuaugac

SEQ ID NO: 4085152 - RNA, 13 nt, Variola virus
caggaacuauuaa

SEQ ID NO: 4085153 - RNA, 14 nt, Variola virus
caggaauagaugua

SEQ ID NO: 4085154 - RNA, 19 nt, Variola virus
caggauuuccaaucuuuug

SEQ ID NO: 4085155 - RNA, 15 nt, Variola virus
caggcucuauuuuca

SEQ ID NO: 4085156 - RNA, 23 nt, Variola virus
cagggacacucaaacuaaauguc

SEQ ID NO: 4085157 - RNA, 16 nt, Variola virus
caggggaaugaacagc

SEQ ID NO: 4085158 - RNA, 16 nt, Variola virus
cagguauacuguucag

SEQ ID NO: 4085159 - RNA, 15 nt, Variola virus
caguaagaacauaau

SEQ ID NO: 4085160 - RNA, 20 nt, Variola virus
caguaauauacugaucccua

SEQ ID NO: 4085161 - RNA, 17 nt, Variola virus
caguacacgaaugauuu

SEQ ID NO: 4085162 - RNA, 17 nt, Variola virus
caguaccauuaucuuug

SEQ ID NO: 4085163 - RNA, 23 nt, Variola virus
caguaccuugacuaaagucuuua

SEQ ID NO: 4085164 - RNA, 17 nt, Variola virus
caguacucauuaucaua

SEQ ID NO: 4085165 - RNA, 13 nt, Variola virus
caguagucauugu

SEQ ID NO: 4085166 - RNA, 23 nt, Variola virus
caguauugggacaacuuaaucug

SEQ ID NO: 4085167 - RNA, 14 nt, Variola virus
cagucuuuaaugaa

SEQ ID NO: 4085168 - RNA, 22 nt, Variola virus
cagugaagaagugucuauaaau

SEQ ID NO: 4085169 - RNA, 17 nt, Variola virus
cagugacgucuguggau

SEQ ID NO: 4085170 - RNA, 20 nt, Variola virus
cagugacgucuguggaugga

SEQ ID NO: 4085171 - RNA, 21 nt, Variola virus
cagugggugguucuguaucac

SEQ ID NO: 4085172 - RNA, 22 nt, Variola virus
cagugguuuuauuuuauccuug

SEQ ID NO: 4085173 - RNA, 21 nt, Variola virus
caguguccgaugauuaaugac

SEQ ID NO: 4085174 - RNA, 17 nt, Variola virus
caguuuauuauccacua

SEQ ID NO: 4085175 - RNA, 16 nt, Variola virus
cauaaacaauauaaau

SEQ ID NO: 4085176 - RNA, 21 nt, Variola virus
cauaaacaauauuaaggagau

SEQ ID NO: 4085177 - RNA, 22 nt, Variola virus
cauaaauaguaaauacaauaau

SEQ ID NO: 4085178 - RNA, 19 nt, Variola virus
cauaacaaauguauacuau

SEQ ID NO: 4085179 - RNA, 12 nt, Variola virus
cauaacauaauu

SEQ ID NO: 4085180 - RNA, 15 nt, Variola virus
cauaacauguaucaa

SEQ ID NO: 4085181 - RNA, 13 nt, Variola virus
cauaauuacagaa

SEQ ID NO: 4085182 - RNA, 16 nt, Variola virus
cauacacuacaguaag

SEQ ID NO: 4085183 - RNA, 18 nt, Variola virus
cauacauuuguaaaagua

SEQ ID NO: 4085184 - RNA, 20 nt, Variola virus
cauacuaggagccaucauuu

SEQ ID NO: 4085185 - RNA, 20 nt, Variola virus
cauacuccaucaauuucaaa

SEQ ID NO: 4085186 - RNA, 13 nt, Variola virus
cauagaaaaugau

SEQ ID NO: 4085187 - RNA, 20 nt, Variola virus
cauagauauaauuaucacau

SEQ ID NO: 4085188 - RNA, 17 nt, Variola virus
cauagaugcccucuaua

SEQ ID NO: 4085189 - RNA, 15 nt, Variola virus
cauagggcuaaaugu

SEQ ID NO: 4085190 - RNA, 19 nt, Variola virus
cauaguaaaaaauauacau

SEQ ID NO: 4085191 - RNA, 18 nt, Variola virus
cauaguggacaacauuaa

SEQ ID NO: 4085192 - RNA, 20 nt, Variola virus
cauaguuuguaucaauaaua

SEQ ID NO: 4085193 - RNA, 23 nt, Variola virus
cauauacuauuacuuaucacgau

SEQ ID NO: 4085194 - RNA, 22 nt, Variola virus
cauauaguauucuuguauucua

SEQ ID NO: 4085195 - RNA, 20 nt, Variola virus
cauauauguuuucaucauuu

SEQ ID NO: 4085196 - RNA, 21 nt, Variola virus
cauauauuucgugauauacau

SEQ ID NO: 4085197 - RNA, 22 nt, Variola virus
cauaugauccaaauucuggaau

SEQ ID NO: 4085198 - RNA, 16 nt, Variola virus
caucaaaauauguuuc

SEQ ID NO: 4085199 - RNA, 23 nt, Variola virus
caucagcaaaacaguuacuauua

SEQ ID NO: 4085200 - RNA, 21 nt, Variola virus
caucauacgaaaauagauucu

SEQ ID NO: 4085201 - RNA, 21 nt, Variola virus
caucaucaaaagacuuaugau

SEQ ID NO: 4085202 - RNA, 12 nt, Variola virus
caucaucaucuu

SEQ ID NO: 4085203 - RNA, 15 nt, Variola virus
caucauuccauaauu

SEQ ID NO: 4085204 - RNA, 17 nt, Variola virus
cauccaagucaauaucu

SEQ ID NO: 4085205 - RNA, 18 nt, Variola virus
cauccuuuuuuauaucca

SEQ ID NO: 4085206 - RNA, 13 nt, Variola virus
caucgaacuucug

SEQ ID NO: 4085207 - RNA, 23 nt, Variola virus
caucgcuaaucaacacuauuuua

SEQ ID NO: 4085208 - RNA, 20 nt, Variola virus
caucggaaaaaaaucuuuuu

SEQ ID NO: 4085209 - RNA, 19 nt, Variola virus
caucguuguugaaucuauu

SEQ ID NO: 4085210 - RNA, 12 nt, Variola virus
caucuaauaauu

SEQ ID NO: 4085211 - RNA, 15 nt, Variola virus
caucuaccaauucau

SEQ ID NO: 4085212 - RNA, 20 nt, Variola virus
caucuacgccuuuaaauccu

SEQ ID NO: 4085213 - RNA, 15 nt, Variola virus
caucuauaucaucua

SEQ ID NO: 4085214 - RNA, 18 nt, Variola virus
caucuaucaaacaaaauu

SEQ ID NO: 4085215 - RNA, 13 nt, Variola virus
caucuaucaucuc

SEQ ID NO: 4085216 - RNA, 12 nt, Variola virus
caucuaugaaug

SEQ ID NO: 4085217 - RNA, 20 nt, Variola virus
caucuauuguuauauaacaa

SEQ ID NO: 4085218 - RNA, 18 nt, Variola virus
caucugaucccaaauacg

SEQ ID NO: 4085219 - RNA, 17 nt, Variola virus
aauaaauauccuuggaa

SEQ ID NO: 4085220 - RNA, 12 nt, Variola virus
aauaaaucaugg

SEQ ID NO: 4085221 - RNA, 23 nt, Variola virus
aauaaccguuagacauaaaauug

SEQ ID NO: 4085222 - RNA, 17 nt, Variola virus
aauaacuaguauaaaau

SEQ ID NO: 4085223 - RNA, 23 nt, Variola virus
aauaacuucgugaauaauguuuc

SEQ ID NO: 4085224 - RNA, 18 nt, Variola virus
aauaagagacuuaaacaa

SEQ ID NO: 4085225 - RNA, 23 nt, Variola virus
aauaagauaguucgcaacaaagu

SEQ ID NO: 4085226 - RNA, 14 nt, Variola virus
aauaaguaaaaagu

SEQ ID NO: 4085227 - RNA, 16 nt, Variola virus
aauaaguauagcaaau

SEQ ID NO: 4085228 - RNA, 23 nt, Variola virus
aauaauacaauauuuuucguuua

SEQ ID NO: 4085229 - RNA, 19 nt, Variola virus
aauaaucggagaauguuuc

SEQ ID NO: 4085230 - RNA, 15 nt, Variola virus
aauaauuauguagua

SEQ ID NO: 4085231 - RNA, 16 nt, Variola virus
aauaauucauggaaau

SEQ ID NO: 4085232 - RNA, 14 nt, Variola virus
auaaaguguucauc

SEQ ID NO: 4085233 - RNA, 17 nt, Variola virus
auaaauacaccaaauau

SEQ ID NO: 4085234 - RNA, 15 nt, Variola virus
auaaauacauuuaca

SEQ ID NO: 4085235 - RNA, 22 nt, Variola virus
auaaauacccuuccaaauaaua

SEQ ID NO: 4085236 - RNA, 13 nt, Variola virus
auaaauagacaaa

SEQ ID NO: 4085237 - RNA, 22 nt, Variola virus
auaaauaggaguuagaauaaua

SEQ ID NO: 4085238 - RNA, 23 nt, Variola virus
auaaaucacuaaauaauauccca

SEQ ID NO: 4085239 - RNA, 22 nt, Variola virus
auaaaucuacuuagauuauucu

SEQ ID NO: 4085240 - RNA, 13 nt, Variola virus
auaaaucugaugu

SEQ ID NO: 4085241 - RNA, 16 nt, Variola virus
auaaauggaauacuaa

SEQ ID NO: 4085242 - RNA, 15 nt, Variola virus
auaaauuuauucucu

SEQ ID NO: 4085243 - RNA, 22 nt, Variola virus
auaacaaccucuuuaauagccg

SEQ ID NO: 4085244 - RNA, 18 nt, Variola virus
auaacagccaauaugaga

SEQ ID NO: 4085245 - RNA, 18 nt, Variola virus
auaacaggggaaugaaca

SEQ ID NO: 4085246 - RNA, 20 nt, Variola virus
auaacaguaguuuaacuagu

SEQ ID NO: 4085247 - RNA, 23 nt, Variola virus
auaacauaggauuaaaaauaaag

SEQ ID NO: 4085248 - RNA, 14 nt, Variola virus
auaacauuguuuau

SEQ ID NO: 4085249 - RNA, 16 nt, Variola virus
auaacauuuuuuguaa

SEQ ID NO: 4085250 - RNA, 14 nt, Variola virus
auaaccauuucuau

SEQ ID NO: 4085251 - RNA, 19 nt, Variola virus
auaacuaaaguuaauacua

SEQ ID NO: 4085252 - RNA, 17 nt, Variola virus
auaacuaaauuaacaau

SEQ ID NO: 4085253 - RNA, 16 nt, Variola virus
auaacuagauuuuagu

SEQ ID NO: 4085254 - RNA, 15 nt, Variola virus
auaacuauguuuuaa

SEQ ID NO: 4085255 - RNA, 21 nt, Variola virus
auaacucauuuuuugaauaua

SEQ ID NO: 4085256 - RNA, 16 nt, Variola virus
auaacucuucgucaaa

SEQ ID NO: 4085257 - RNA, 16 nt, Variola virus
auaacuggauauagaa

SEQ ID NO: 4085258 - RNA, 14 nt, Variola virus
auaacuuuuucaau

SEQ ID NO: 4085259 - RNA, 13 nt, Variola virus
auaagaaauauga

SEQ ID NO: 4085260 - RNA, 18 nt, Variola virus
auaagaaaucaagacuac

SEQ ID NO: 4085261 - RNA, 13 nt, Variola virus
auaagaacuauau

SEQ ID NO: 4085262 - RNA, 19 nt, Variola virus
auaagaaggaugacaauaa

SEQ ID NO: 4085263 - RNA, 19 nt, Variola virus
auaagacacagaaauacug

SEQ ID NO: 4085264 - RNA, 21 nt, Variola virus
auaagacuuuacucuucuaaa

SEQ ID NO: 4085265 - RNA, 14 nt, Variola virus
auaagaugucuaug

SEQ ID NO: 4085266 - RNA, 19 nt, Variola virus
auaagaugucuaugaauau

SEQ ID NO: 4085267 - RNA, 14 nt, Variola virus
auaagauuaucaaa

SEQ ID NO: 4085268 - RNA, 15 nt, Variola virus
auaagccaaagcauu

SEQ ID NO: 4085269 - RNA, 20 nt, Variola virus
auaagcuauauaauaaaugu

SEQ ID NO: 4085270 - RNA, 17 nt, Variola virus
auaaggaacuagaauug

SEQ ID NO: 4085271 - RNA, 19 nt, Variola virus
auaaggaagugugcaaaua

SEQ ID NO: 4085272 - RNA, 14 nt, Variola virus
auaaguaaaugaaa

SEQ ID NO: 4085273 - RNA, 15 nt, Variola virus
auaaguguugucaaa

SEQ ID NO: 4085274 - RNA, 17 nt, Variola virus
auaauaaaaguuaucca

SEQ ID NO: 4085275 - RNA, 14 nt, Variola virus
auaauaaaguauau

SEQ ID NO: 4085276 - RNA, 20 nt, Variola virus
auaauaacaaguaugacauu

SEQ ID NO: 4085277 - RNA, 14 nt, Variola virus
auaauagacauaau

SEQ ID NO: 4085278 - RNA, 16 nt, Variola virus
auaauagauuuaucua

SEQ ID NO: 4085279 - RNA, 18 nt, Variola virus
auaauagauuuaucuagu

SEQ ID NO: 4085280 - RNA, 20 nt, Variola virus
auaauaggcaggagauagau

SEQ ID NO: 4085281 - RNA, 17 nt, Variola virus
auaauauaaaaacuuau

SEQ ID NO: 4085282 - RNA, 14 nt, Variola virus
auaauauacauaag

SEQ ID NO: 4085283 - RNA, 19 nt, Variola virus
auaauauauacgaagacag

SEQ ID NO: 4085284 - RNA, 18 nt, Variola virus
auaauauauuagauauuu

SEQ ID NO: 4085285 - RNA, 14 nt, Variola virus
auaauaucagaaug

SEQ ID NO: 4085286 - RNA, 22 nt, Variola virus
auaauauccugaacagcauuga

SEQ ID NO: 4085287 - RNA, 18 nt, Variola virus
auaauaucucuaauagau

SEQ ID NO: 4085288 - RNA, 15 nt, Variola virus
auaauaucuuguucu

SEQ ID NO: 4085289 - RNA, 14 nt, Variola virus
auaauauuaaauau

SEQ ID NO: 4085290 - RNA, 18 nt, Variola virus
auaauauuaucaugaauu

SEQ ID NO: 4085291 - RNA, 12 nt, Variola virus
auaaucaaacac

SEQ ID NO: 4085292 - RNA, 14 nt, Variola virus
auaaucauguugau

SEQ ID NO: 4085293 - RNA, 17 nt, Variola virus
auaaucgcgaguauuaa

SEQ ID NO: 4085294 - RNA, 16 nt, Variola virus
auaaucguauacuuca

SEQ ID NO: 4085295 - RNA, 18 nt, Variola virus
auaaucguauuuguguga

SEQ ID NO: 4085296 - RNA, 18 nt, Variola virus
auaaucucaauuagaaua

SEQ ID NO: 4085297 - RNA, 19 nt, Variola virus
auaaucugguggauacucu

SEQ ID NO: 4085298 - RNA, 20 nt, Variola virus
auaaugacauggacguagau

SEQ ID NO: 4085299 - RNA, 17 nt, Variola virus
auaaugacgauaacauu

SEQ ID NO: 4085300 - RNA, 16 nt, Variola virus
auaaugaguuagauua

SEQ ID NO: 4085301 - RNA, 15 nt, Variola virus
auaaugauuaauauu

SEQ ID NO: 4085302 - RNA, 18 nt, Variola virus
auaauguaaaaucaugau

SEQ ID NO: 4085303 - RNA, 17 nt, Variola virus
auaaugucugacaagau

SEQ ID NO: 4085304 - RNA, 22 nt, Variola virus
auaauguuguccauuguaguau

SEQ ID NO: 4085305 - RNA, 22 nt, Variola virus
auaauguuucuauguuuucuac

SEQ ID NO: 4085306 - RNA, 14 nt, Variola virus
auaauuacagaauu

SEQ ID NO: 4085307 - RNA, 16 nt, Variola virus
auaauuacagaauuau

SEQ ID NO: 4085308 - RNA, 22 nt, Variola virus
auaauuaucgcguucagauugu

SEQ ID NO: 4085309 - RNA, 15 nt, Variola virus
auaauuccaucuacu

SEQ ID NO: 4085310 - RNA, 15 nt, Variola virus
auaauucucauauau

SEQ ID NO: 4085311 - RNA, 17 nt, Variola virus
auaauugcuuuucuaau

SEQ ID NO: 4085312 - RNA, 21 nt, Variola virus
auaauuuaacauuuuggcaaa

SEQ ID NO: 4085313 - RNA, 20 nt, Variola virus
auaauuucuacuuacuuaau

SEQ ID NO: 4085314 - RNA, 12 nt, Variola virus
auaauuucuaga

SEQ ID NO: 4085315 - RNA, 13 nt, Variola virus
auaauuugaucca

SEQ ID NO: 4085316 - RNA, 18 nt, Variola virus
auaauuuuaccagaauac

SEQ ID NO: 4085317 - RNA, 12 nt, Variola virus
auaauuuucuau

SEQ ID NO: 4085318 - RNA, 16 nt, Variola virus
auacaaacuguuguua

SEQ ID NO: 4085319 - RNA, 20 nt, Variola virus
auacaaauuuuaagaaaugg

SEQ ID NO: 4085320 - RNA, 15 nt, Variola virus
auacaacaaagaaaa

SEQ ID NO: 4085321 - RNA, 15 nt, Variola virus
auacaagaacaauua

SEQ ID NO: 4085322 - RNA, 17 nt, Variola virus
auacaagcgagugcuuc

SEQ ID NO: 4085323 - RNA, 15 nt, Variola virus
auacacacuaauaaa

SEQ ID NO: 4085324 - RNA, 16 nt, Variola virus
auacaccgaacaucca

SEQ ID NO: 4085325 - RNA, 20 nt, Variola virus
auacagaagauuuaacuaga

SEQ ID NO: 4085326 - RNA, 15 nt, Variola virus
auacagaauuuguaa

SEQ ID NO: 4085327 - RNA, 21 nt, Variola virus
auacagauuguaguucuauaa

SEQ ID NO: 4085328 - RNA, 16 nt, Variola virus
auacauaaagaaaugu

SEQ ID NO: 4085329 - RNA, 21 nt, Variola virus
auacauaccugauuagaauuc

SEQ ID NO: 4085330 - RNA, 14 nt, Variola virus
auacauaguuguga

SEQ ID NO: 4085331 - RNA, 18 nt, Variola virus
auacauaguugugaucau

SEQ ID NO: 4085332 - RNA, 17 nt, Variola virus
auacaucuccaaaacua

SEQ ID NO: 4085333 - RNA, 19 nt, Variola virus
auacaugucuuagauguuc

SEQ ID NO: 4085334 - RNA, 19 nt, Variola virus
auacauuaaguaaaguaaa

SEQ ID NO: 4085335 - RNA, 14 nt, Variola virus
auacauugaauauu

SEQ ID NO: 4085336 - RNA, 15 nt, Variola virus
auacauuucucaaau

SEQ ID NO: 4085337 - RNA, 13 nt, Variola virus
auacauuuucaaa

SEQ ID NO: 4085338 - RNA, 18 nt, Variola virus
auaccacauacaaaacua

SEQ ID NO: 4085339 - RNA, 22 nt, Variola virus
auaccacuuaaugacaaaauca

SEQ ID NO: 4085340 - RNA, 15 nt, Variola virus
auaccguuaaauaua

SEQ ID NO: 4085341 - RNA, 22 nt, Variola virus
auaccuuugguucuuuaaaaga

SEQ ID NO: 4085342 - RNA, 15 nt, Variola virus
auacgaaauaaacau

SEQ ID NO: 4085343 - RNA, 22 nt, Variola virus
auacgaauaucguucucuaaau

SEQ ID NO: 4085344 - RNA, 19 nt, Variola virus
auacgaauguaucaaacag

SEQ ID NO: 4085345 - RNA, 15 nt, Variola virus
auacuaaaacugaag

SEQ ID NO: 4085346 - RNA, 21 nt, Variola virus
auacuaauaugacacgauugu

SEQ ID NO: 4085347 - RNA, 22 nt, Variola virus
auacuacauuaaaacuuaaaaa

SEQ ID NO: 4085348 - RNA, 15 nt, Variola virus
auacuagaacuauaa

SEQ ID NO: 4085349 - RNA, 14 nt, Variola virus
auacuaguaugaug

SEQ ID NO: 4085350 - RNA, 12 nt, Variola virus
auacuauauaca

SEQ ID NO: 4085351 - RNA, 19 nt, Variola virus
auacuauauaguaauacca

SEQ ID NO: 4085352 - RNA, 13 nt, Variola virus
auacuauaucuuc

SEQ ID NO: 4085353 - RNA, 20 nt, Variola virus
auacuaucuggaucuucaca

SEQ ID NO: 4085354 - RNA, 14 nt, Variola virus
auacuccaaauaca

SEQ ID NO: 4085355 - RNA, 17 nt, Variola virus
auacucuacagaguuga

SEQ ID NO: 4085356 - RNA, 21 nt, Variola virus
auacucuuuaaaguuucugaa

SEQ ID NO: 4085357 - RNA, 22 nt, Variola virus
auacucuuuaaaguuucugaaa

SEQ ID NO: 4085358 - RNA, 18 nt, Variola virus
caaaaucguuaagaaguu

SEQ ID NO: 4085359 - RNA, 15 nt, Variola virus
caaaaugaugauaua

SEQ ID NO: 4085360 - RNA, 22 nt, Variola virus
caaaauucagauucuaucuuua

SEQ ID NO: 4085361 - RNA, 21 nt, Variola virus
caaacaaguuaaugagauauu

SEQ ID NO: 4085362 - RNA, 17 nt, Variola virus
caaacaauguauacaaa

SEQ ID NO: 4085363 - RNA, 16 nt, Variola virus
caaacacuuguaaaau

SEQ ID NO: 4085364 - RNA, 16 nt, Variola virus
caaacaggauaucuau

SEQ ID NO: 4085365 - RNA, 11 nt, Variola virus
caaacauaaua

SEQ ID NO: 4085366 - RNA, 16 nt, Variola virus
caaacguuuguuaaag

SEQ ID NO: 4085367 - RNA, 23 nt, Variola virus
caaacugcguuaauguauucucu

SEQ ID NO: 4085368 - RNA, 14 nt, Variola virus
caaacuuuacucuu

SEQ ID NO: 4085369 - RNA, 18 nt, Variola virus
caaacuuuuucacagagc

SEQ ID NO: 4085370 - RNA, 21 nt, Variola virus
caaagaauuuuagacacuaac

SEQ ID NO: 4085371 - RNA, 20 nt, Variola virus
caaagauauagaacacauaa

SEQ ID NO: 4085372 - RNA, 15 nt, Variola virus
caaaggaugaaagaa

SEQ ID NO: 4085373 - RNA, 15 nt, Variola virus
caaagucguuuaaug

SEQ ID NO: 4085374 - RNA, 17 nt, Variola virus
caaaguguccuccuauu

SEQ ID NO: 4085375 - RNA, 17 nt, Variola virus
caaauaaaacuauaaau

SEQ ID NO: 4085376 - RNA, 22 nt, Variola virus
caaauaacucuugcaccaucag

SEQ ID NO: 4085377 - RNA, 22 nt, Variola virus
caaauaauaaacuaaacaaaac

SEQ ID NO: 4085378 - RNA, 23 nt, Variola virus
caaauaucuuuaugaauuacuuu

SEQ ID NO: 4085379 - RNA, 17 nt, Variola virus
caaauauuauacaugau

SEQ ID NO: 4085380 - RNA, 14 nt, Variola virus
caaaucuauuugga

SEQ ID NO: 4085381 - RNA, 11 nt, Variola virus
caaaucuucuu

SEQ ID NO: 4085382 - RNA, 22 nt, Variola virus
caaaugauaaucaaacacaucu

SEQ ID NO: 4085383 - RNA, 21 nt, Variola virus
caaaugauacugauaaaguag

SEQ ID NO: 4085384 - RNA, 21 nt, Variola virus
caaauggauguuaauguauua

SEQ ID NO: 4085385 - RNA, 15 nt, Variola virus
caaauggucaaugau

SEQ ID NO: 4085386 - RNA, 16 nt, Variola virus
caaauguaguaaauau

SEQ ID NO: 4085387 - RNA, 15 nt, Variola virus
caaauguuaaacauu

SEQ ID NO: 4085388 - RNA, 23 nt, Variola virus
caaauuacgagccaaaucuucuu

SEQ ID NO: 4085389 - RNA, 19 nt, Variola virus
caaauuauuucuucugaau

SEQ ID NO: 4085390 - RNA, 22 nt, Variola virus
caaauuccuacuuacagaagau

SEQ ID NO: 4085391 - RNA, 18 nt, Variola virus
caaauucugcaauaucuu

SEQ ID NO: 4085392 - RNA, 20 nt, Variola virus
caaauuugacuacauucagg

SEQ ID NO: 4085393 - RNA, 23 nt, Variola virus
caaauuuguuuuguuuauuaaca

SEQ ID NO: 4085394 - RNA, 14 nt, Variola virus
caacaaauuuggaa

SEQ ID NO: 4085395 - RNA, 15 nt, Variola virus
caacaaguauacaau

SEQ ID NO: 4085396 - RNA, 18 nt, Variola virus
caacaaguuggaugauau

SEQ ID NO: 4085397 - RNA, 23 nt, Variola virus
caacagguggaauaucaauuaau

SEQ ID NO: 4085398 - RNA, 24 nt, Variola virus
caacaugauuauucuacuaucaaa

SEQ ID NO: 4085399 - RNA, 16 nt, Variola virus
caacauuggaauaaua

SEQ ID NO: 4085400 - RNA, 19 nt, Variola virus
caaccaucucauaaaauag

SEQ ID NO: 4085401 - RNA, 13 nt, Variola virus
caacgaaucccua

SEQ ID NO: 4085402 - RNA, 21 nt, Variola virus
caacgugauuauucuccacca

SEQ ID NO: 4085403 - RNA, 15 nt, Variola virus
caacuacauaaucuu

SEQ ID NO: 4085404 - RNA, 16 nt, Variola virus
caacuaguaucaucuc

SEQ ID NO: 4085405 - RNA, 12 nt, Variola virus
caacucucaaaa

SEQ ID NO: 4085406 - RNA, 23 nt, Variola virus
caacugauuaauaagaucuucua

SEQ ID NO: 4085407 - RNA, 15 nt, Variola virus
caacugucuuucaag

SEQ ID NO: 4085408 - RNA, 17 nt, Variola virus
caacuuugaauccauuu

SEQ ID NO: 4085409 - RNA, 14 nt, Variola virus
caacuuuuaaauac

SEQ ID NO: 4085410 - RNA, 20 nt, Variola virus
caagaaacaccaaguagaaa

SEQ ID NO: 4085411 - RNA, 16 nt, Variola virus
caagagauauauugga

SEQ ID NO: 4085412 - RNA, 18 nt, Variola virus
caagaucgauagacacug

SEQ ID NO: 4085413 - RNA, 21 nt, Variola virus
agaaaugguguacaauuguuu

SEQ ID NO: 4085414 - RNA, 22 nt, Variola virus
agaaauuacauaaaaaaaaugu

SEQ ID NO: 4085415 - RNA, 16 nt, Variola virus
agaaauuaucaaaugu

SEQ ID NO: 4085416 - RNA, 23 nt, Variola virus
agaaauuauuuuuacuaauagaa

SEQ ID NO: 4085417 - RNA, 12 nt, Variola virus
agaacaaaauaa

SEQ ID NO: 4085418 - RNA, 12 nt, Variola virus
agaacaaauguu

SEQ ID NO: 4085419 - RNA, 20 nt, Variola virus
agaacaaugucaaaauauga

SEQ ID NO: 4085420 - RNA, 16 nt, Variola virus
agaacacacuuuucuc

SEQ ID NO: 4085421 - RNA, 15 nt, Variola virus
agaacacaugucuua

SEQ ID NO: 4085422 - RNA, 17 nt, Variola virus
agaacauaauaauauau

SEQ ID NO: 4085423 - RNA, 19 nt, Variola virus
agaacauacauuuguaaaa

SEQ ID NO: 4085424 - RNA, 23 nt, Variola virus
agaaccacuauguuaauacuuau

SEQ ID NO: 4085425 - RNA, 18 nt, Variola virus
agaaccauuacaaauauu

SEQ ID NO: 4085426 - RNA, 15 nt, Variola virus
agaacggagaauugu

SEQ ID NO: 4085427 - RNA, 22 nt, Variola virus
agaacuggacuguauaucucau

SEQ ID NO: 4085428 - RNA, 12 nt, Variola virus
agaagaacauau

SEQ ID NO: 4085429 - RNA, 13 nt, Variola virus
agaagaauaugau

SEQ ID NO: 4085430 - RNA, 23 nt, Variola virus
agaagacguggauaguuucuuaa

SEQ ID NO: 4085431 - RNA, 16 nt, Variola virus
agaagauuaaacauau

SEQ ID NO: 4085432 - RNA, 21 nt, Variola virus
agaagcauacgccaaauaucu

SEQ ID NO: 4085433 - RNA, 13 nt, Variola virus
agaaggagaagau

SEQ ID NO: 4085434 - RNA, 23 nt, Variola virus
agaagucguuuauauaacaauga

SEQ ID NO: 4085435 - RNA, 13 nt, Variola virus
agaauaauuagaa

SEQ ID NO: 4085436 - RNA, 16 nt, Variola virus
agaauaauuagaaauu

SEQ ID NO: 4085437 - RNA, 15 nt, Variola virus
agaauacgaugauau

SEQ ID NO: 4085438 - RNA, 12 nt, Variola virus
agaauacucuac

SEQ ID NO: 4085439 - RNA, 19 nt, Variola virus
agaauauaaaaaaaugauu

SEQ ID NO: 4085440 - RNA, 13 nt, Variola virus
agaauauauguau

SEQ ID NO: 4085441 - RNA, 18 nt, Variola virus
agaaucuauuuuaaugag

SEQ ID NO: 4085442 - RNA, 16 nt, Variola virus
agaaugcagaaaugau

SEQ ID NO: 4085443 - RNA, 16 nt, Variola virus
agaaugcauacugucu

SEQ ID NO: 4085444 - RNA, 21 nt, Variola virus
agaauggaaaggaaacuaucu

SEQ ID NO: 4085445 - RNA, 15 nt, Variola virus
agaauggaugauauu

SEQ ID NO: 4085446 - RNA, 14 nt, Variola virus
agaauuaaauggau

SEQ ID NO: 4085447 - RNA, 12 nt, Variola virus
agaauuagaauu

SEQ ID NO: 4085448 - RNA, 22 nt, Variola virus
agaauuaguuaaucuuauucaa

SEQ ID NO: 4085449 - RNA, 19 nt, Variola virus
agaauuauaccaauagaua

SEQ ID NO: 4085450 - RNA, 21 nt, Variola virus
agaauuauaccaauagauaau

SEQ ID NO: 4085451 - RNA, 15 nt, Variola virus
agaauucaaaauauu

SEQ ID NO: 4085452 - RNA, 15 nt, Variola virus
agaauucaacuauau

SEQ ID NO: 4085453 - RNA, 22 nt, Variola virus
agaauucuuagucaauggagaa

SEQ ID NO: 4085454 - RNA, 18 nt, Variola virus
agaauugcugcaauauau

SEQ ID NO: 4085455 - RNA, 22 nt, Variola virus
agaauugggcaagcauaagaca

SEQ ID NO: 4085456 - RNA, 13 nt, Variola virus
agaauugucuauc

SEQ ID NO: 4085457 - RNA, 15 nt, Variola virus
agaauuuucauggau

SEQ ID NO: 4085458 - RNA, 23 nt, Variola virus
agacaaaacuauuccaauguuua

SEQ ID NO: 4085459 - RNA, 21 nt, Variola virus
agacaauugacaaaauucaca

SEQ ID NO: 4085460 - RNA, 21 nt, Variola virus
agacacauaugcgaucagaua

SEQ ID NO: 4085461 - RNA, 13 nt, Variola virus
agacauaauauaa

SEQ ID NO: 4085462 - RNA, 12 nt, Variola virus
agacaucugaca

SEQ ID NO: 4085463 - RNA, 22 nt, Variola virus
agacaugauaauauuaaagaua

SEQ ID NO: 4085464 - RNA, 19 nt, Variola virus
agacauucccacaguguug

SEQ ID NO: 4085465 - RNA, 21 nt, Variola virus
agacauuguugaauucuguga

SEQ ID NO: 4085466 - RNA, 22 nt, Variola virus
agaccaagcuucgucguagaaa

SEQ ID NO: 4085467 - RNA, 16 nt, Variola virus
agaccauuuaauacga

SEQ ID NO: 4085468 - RNA, 15 nt, Variola virus
agacgaacaaaauca

SEQ ID NO: 4085469 - RNA, 23 nt, Variola virus
agacgaguuuaguauucgagaca

SEQ ID NO: 4085470 - RNA, 19 nt, Variola virus
agacgcuauaucaaaauau

SEQ ID NO: 4085471 - RNA, 23 nt, Variola virus
agacgcuauggcacgaaauaucu

SEQ ID NO: 4085472 - RNA, 18 nt, Variola virus
agacguaguucuaguaca

SEQ ID NO: 4085473 - RNA, 15 nt, Variola virus
agacgucacuauuac

SEQ ID NO: 4085474 - RNA, 18 nt, Variola virus
agacuaacaguaugcauu

SEQ ID NO: 4085475 - RNA, 17 nt, Variola virus
agacuacgaaacugaua

SEQ ID NO: 4085476 - RNA, 23 nt, Variola virus
agacuacguagacuagacuguuu

SEQ ID NO: 4085477 - RNA, 17 nt, Variola virus
agacuaugggaauauau

SEQ ID NO: 4085478 - RNA, 12 nt, Variola virus
agacucaguaau

SEQ ID NO: 4085479 - RNA, 21 nt, Variola virus
agacucuaucgcgugucuaua

SEQ ID NO: 4085480 - RNA, 15 nt, Variola virus
agacugcggacuuua

SEQ ID NO: 4085481 - RNA, 20 nt, Variola virus
agacuuuaagcuaaaauauu

SEQ ID NO: 4085482 - RNA, 20 nt, Variola virus
agacuuuauaauuucaucua

SEQ ID NO: 4085483 - RNA, 18 nt, Variola virus
agagaacauauaaaugua

SEQ ID NO: 4085484 - RNA, 15 nt, Variola virus
agagaaguauuuuau

SEQ ID NO: 4085485 - RNA, 17 nt, Variola virus
agagaagucgucaagca

SEQ ID NO: 4085486 - RNA, 17 nt, Variola virus
agagaauugcugcaaua

SEQ ID NO: 4085487 - RNA, 14 nt, Variola virus
agagacaaacuauu

SEQ ID NO: 4085488 - RNA, 19 nt, Variola virus
agagacaaacuauuaacua

SEQ ID NO: 4085489 - RNA, 15 nt, Variola virus
agagacggaaauagu

SEQ ID NO: 4085490 - RNA, 20 nt, Variola virus
agagaggcugcugaaaauaa

SEQ ID NO: 4085491 - RNA, 14 nt, Variola virus
agagauaucuaucu

SEQ ID NO: 4085492 - RNA, 22 nt, Variola virus
agagauuggguuaauaaauaca

SEQ ID NO: 4085493 - RNA, 15 nt, Variola virus
agagauuuugaaaau

SEQ ID NO: 4085494 - RNA, 22 nt, Variola virus
agagcuaccgaaggagauacua

SEQ ID NO: 4085495 - RNA, 15 nt, Variola virus
agagcuauucuugga

SEQ ID NO: 4085496 - RNA, 12 nt, Variola virus
agaggagaagua

SEQ ID NO: 4085497 - RNA, 20 nt, Variola virus
agaguauccacuaaacuauu

SEQ ID NO: 4085498 - RNA, 17 nt, Variola virus
agaguauucuuauguau

SEQ ID NO: 4085499 - RNA, 14 nt, Variola virus
agaguauuguacag

SEQ ID NO: 4085500 - RNA, 22 nt, Variola virus
agagucgacaaugaaaauggau

SEQ ID NO: 4085501 - RNA, 22 nt, Variola virus
agaguucgauccuaaagguaaa

SEQ ID NO: 4085502 - RNA, 20 nt, Variola virus
agauaaaccguuuauguauu

SEQ ID NO: 4085503 - RNA, 18 nt, Variola virus
agauaaacuuuauguauu

SEQ ID NO: 4085504 - RNA, 21 nt, Variola virus
agauaaagaguccuauauauu

SEQ ID NO: 4085505 - RNA, 12 nt, Variola virus
agauaaauaugg

SEQ ID NO: 4085506 - RNA, 21 nt, Variola virus
agauaaauuuaccacuagaac

SEQ ID NO: 4085507 - RNA, 12 nt, Variola virus
agauaauacaaa

SEQ ID NO: 4085508 - RNA, 17 nt, Variola virus
agauaauauuagacaua

SEQ ID NO: 4085509 - RNA, 21 nt, Variola virus
agauaaugacguuaauaacaa

SEQ ID NO: 4085510 - RNA, 21 nt, Variola virus
agauaaugauauauuaaacaa

SEQ ID NO: 4085511 - RNA, 13 nt, Variola virus
agauaaugugaau

SEQ ID NO: 4085512 - RNA, 18 nt, Variola virus
agauaauuguaacaauau

SEQ ID NO: 4085513 - RNA, 14 nt, Variola virus
agauacaucuauau

SEQ ID NO: 4085514 - RNA, 22 nt, Variola virus
agauacguauuagauaaaugga

SEQ ID NO: 4085515 - RNA, 16 nt, Variola virus
agauacuauccaucag

SEQ ID NO: 4085516 - RNA, 15 nt, Variola virus
agauagaaaugaauu

SEQ ID NO: 4085517 - RNA, 14 nt, Variola virus
agauagaugaugau

SEQ ID NO: 4085518 - RNA, 19 nt, Variola virus
agauagauuuccaaagaua

SEQ ID NO: 4085519 - RNA, 16 nt, Variola virus
agauaguuuucucuau

SEQ ID NO: 4085520 - RNA, 17 nt, Variola virus
agauauaguauauucca

SEQ ID NO: 4085521 - RNA, 18 nt, Variola virus
agauaucagagaacuucu

SEQ ID NO: 4085522 - RNA, 17 nt, Variola virus
agauaucuauacuuacu

SEQ ID NO: 4085523 - RNA, 14 nt, Variola virus
agauaucucauuaa

SEQ ID NO: 4085524 - RNA, 15 nt, Variola virus
agauaucucuggaua

SEQ ID NO: 4085525 - RNA, 18 nt, Variola virus
agauaugauaaaacuauu

SEQ ID NO: 4085526 - RNA, 13 nt, Variola virus
agauauguaugug

SEQ ID NO: 4085527 - RNA, 16 nt, Variola virus
agauauuuuaugggaa

SEQ ID NO: 4085528 - RNA, 17 nt, Variola virus
agaucauuugaaauuau

SEQ ID NO: 4085529 - RNA, 17 nt, Variola virus
agauccacugagaugac

SEQ ID NO: 4085530 - RNA, 15 nt, Variola virus
agauccuguuagaua

SEQ ID NO: 4085531 - RNA, 21 nt, Variola virus
agauccuuuucuucagaauaa

SEQ ID NO: 4085532 - RNA, 15 nt, Variola virus
agaucgauagacacu

SEQ ID NO: 4085533 - RNA, 18 nt, Variola virus
agaucggcaaucuuucuc

SEQ ID NO: 4085534 - RNA, 16 nt, Variola virus
agaucugagaauggau

SEQ ID NO: 4085535 - RNA, 22 nt, Variola virus
agaucugagaauggauaauucu

SEQ ID NO: 4085536 - RNA, 17 nt, Variola virus
agaugaacugacauaua

SEQ ID NO: 4085537 - RNA, 22 nt, Variola virus
agaugaaucaaauguaacuauu

SEQ ID NO: 4085538 - RNA, 14 nt, Variola virus
agaugaccauagau

SEQ ID NO: 4085539 - RNA, 18 nt, Variola virus
agaugacugauauucagg

SEQ ID NO: 4085540 - RNA, 14 nt, Variola virus
agaugacuggaaau

SEQ ID NO: 4085541 - RNA, 21 nt, Variola virus
agaugagcauaaacauaauaa

SEQ ID NO: 4085542 - RNA, 19 nt, Variola virus
auaacucggaucugcuaua

SEQ ID NO: 4085543 - RNA, 18 nt, Variola virus
auaacucguuuuucuuaa

SEQ ID NO: 4085544 - RNA, 13 nt, Variola virus
auaacuguaaaua

SEQ ID NO: 4085545 - RNA, 15 nt, Variola virus
auaacuuacuuucca

SEQ ID NO: 4085546 - RNA, 14 nt, Variola virus
auaacuuauccgaa

SEQ ID NO: 4085547 - RNA, 18 nt, Variola virus
auaacuuccgacuacaua

SEQ ID NO: 4085548 - RNA, 19 nt, Variola virus
auaacuucuagauguagaa

SEQ ID NO: 4085549 - RNA, 21 nt, Variola virus
auaacuuggaaaaaauaacua

SEQ ID NO: 4085550 - RNA, 22 nt, Variola virus
auaacuuuaccccaaucagaua

SEQ ID NO: 4085551 - RNA, 19 nt, Variola virus
auaacuuugacaaauauua

SEQ ID NO: 4085552 - RNA, 16 nt, Variola virus
auaagaaauaugaaau

SEQ ID NO: 4085553 - RNA, 14 nt, Variola virus
auaagaacaaagua

SEQ ID NO: 4085554 - RNA, 19 nt, Variola virus
auaagaagaggacaaaguu

SEQ ID NO: 4085555 - RNA, 15 nt, Variola virus
auaagaugcaaacau

SEQ ID NO: 4085556 - RNA, 15 nt, Variola virus
auaaguaaaugaaaa

SEQ ID NO: 4085557 - RNA, 14 nt, Variola virus
auaaguaauaacua

SEQ ID NO: 4085558 - RNA, 16 nt, Variola virus
auaaguguagaaauua

SEQ ID NO: 4085559 - RNA, 22 nt, Variola virus
auaauaauuuaggacuuuguaa

SEQ ID NO: 4085560 - RNA, 20 nt, Variola virus
auaauacacacguaauagau

SEQ ID NO: 4085561 - RNA, 15 nt, Variola virus
auaauacgaauauau

SEQ ID NO: 4085562 - RNA, 22 nt, Variola virus
auaauacucggccgacauaaug

SEQ ID NO: 4085563 - RNA, 19 nt, Variola virus
auaauacuggagaacuuau

SEQ ID NO: 4085564 - RNA, 11 nt, Variola virus
auaauacuuug

SEQ ID NO: 4085565 - RNA, 14 nt, Variola virus
auaauagcacuguu

SEQ ID NO: 4085566 - RNA, 16 nt, Variola virus
auaauaggguaucuaa

SEQ ID NO: 4085567 - RNA, 15 nt, Variola virus
auaauaguaacauau

SEQ ID NO: 4085568 - RNA, 13 nt, Variola virus
auaauauaaucua

SEQ ID NO: 4085569 - RNA, 14 nt, Variola virus
auaauauuaauauu

SEQ ID NO: 4085570 - RNA, 15 nt, Variola virus
auaauauuaauauua

SEQ ID NO: 4085571 - RNA, 17 nt, Variola virus
auaauauuaucaugaau

SEQ ID NO: 4085572 - RNA, 15 nt, Variola virus
auaauauucaugucu

SEQ ID NO: 4085573 - RNA, 17 nt, Variola virus
auaauauuuuaauagau

SEQ ID NO: 4085574 - RNA, 19 nt, Variola virus
auaauauuuuaauagauua

SEQ ID NO: 4085575 - RNA, 14 nt, Variola virus
auaaucagauuuac

SEQ ID NO: 4085576 - RNA, 22 nt, Variola virus
auaaucagucauaacaaaugua

SEQ ID NO: 4085577 - RNA, 22 nt, Variola virus
auaaucauuauuaacuuuauca

SEQ ID NO: 4085578 - RNA, 14 nt, Variola virus
auaaucauucuuaa

SEQ ID NO: 4085579 - RNA, 14 nt, Variola virus
auaauccagauuuu

SEQ ID NO: 4085580 - RNA, 22 nt, Variola virus
auaaucuaaaauaguucuguaa

SEQ ID NO: 4085581 - RNA, 16 nt, Variola virus
auaaucuuuaguauua

SEQ ID NO: 4085582 - RNA, 13 nt, Variola virus
auaaugaacauau

SEQ ID NO: 4085583 - RNA, 17 nt, Variola virus
auaaugauagacaagau

SEQ ID NO: 4085584 - RNA, 14 nt, Variola virus
auaaugaucauaua

SEQ ID NO: 4085585 - RNA, 23 nt, Variola virus
auaauggcuguuuguauaauaga

SEQ ID NO: 4085586 - RNA, 20 nt, Variola virus
auaaugucugacaagauccg

SEQ ID NO: 4085587 - RNA, 15 nt, Variola virus
auaauguuacucaau

SEQ ID NO: 4085588 - RNA, 21 nt, Variola virus
auaauguuauuacuuguggua

SEQ ID NO: 4085589 - RNA, 14 nt, Variola virus
auaauuauaagacu

SEQ ID NO: 4085590 - RNA, 13 nt, Variola virus
auaauuauacuuu

SEQ ID NO: 4085591 - RNA, 15 nt, Variola virus
auaauuauagaucag

SEQ ID NO: 4085592 - RNA, 15 nt, Variola virus
auaauuauuuuguaa

SEQ ID NO: 4085593 - RNA, 13 nt, Variola virus
auaauuuaacaau

SEQ ID NO: 4085594 - RNA, 16 nt, Variola virus
auaauuuagauacuuu

SEQ ID NO: 4085595 - RNA, 20 nt, Variola virus
auaauuuuaccagaauacua

SEQ ID NO: 4085596 - RNA, 22 nt, Variola virus
auaauuuuuuaagcacaaaaua

SEQ ID NO: 4085597 - RNA, 18 nt, Variola virus
auaauuuuuuuauugcau

SEQ ID NO: 4085598 - RNA, 20 nt, Variola virus
auacaaauaugucuuuguua

SEQ ID NO: 4085599 - RNA, 23 nt, Variola virus
auacaacggcguuaauuaucuaa

SEQ ID NO: 4085600 - RNA, 21 nt, Variola virus
auacaauaaauguuuaaacau

SEQ ID NO: 4085601 - RNA, 17 nt, Variola virus
auacaauggaugauaug

SEQ ID NO: 4085602 - RNA, 22 nt, Variola virus
auacacaucucuucaucuguaa

SEQ ID NO: 4085603 - RNA, 20 nt, Variola virus
auacaccauuccauuuguau

SEQ ID NO: 4085604 - RNA, 21 nt, Variola virus
auacauaucgcacauuauacu

SEQ ID NO: 4085605 - RNA, 12 nt, Variola virus
auacauauuuua

SEQ ID NO: 4085606 - RNA, 23 nt, Variola virus
auacaucgaauauaaaauaacua

SEQ ID NO: 4085607 - RNA, 15 nt, Variola virus
auacaucuuuaaucu

SEQ ID NO: 4085608 - RNA, 17 nt, Variola virus
auacauggaagaauuag

SEQ ID NO: 4085609 - RNA, 20 nt, Variola virus
auacauuauuacuaaacauu

SEQ ID NO: 4085610 - RNA, 20 nt, Variola virus
auacauuuccgaaugaaugu

SEQ ID NO: 4085611 - RNA, 16 nt, Variola virus
auacauuugaguuacu

SEQ ID NO: 4085612 - RNA, 22 nt, Variola virus
auacauuuugcauuagauuuac

SEQ ID NO: 4085613 - RNA, 23 nt, Variola virus
auaccaaaucugguaaaaguuaa

SEQ ID NO: 4085614 - RNA, 16 nt, Variola virus
auaccacuuaaugaca

SEQ ID NO: 4085615 - RNA, 22 nt, Variola virus
auaccauauccuccuguagaua

SEQ ID NO: 4085616 - RNA, 16 nt, Variola virus
auaccaucuucuggaa

SEQ ID NO: 4085617 - RNA, 19 nt, Variola virus
auaccauggaaaaauauua

SEQ ID NO: 4085618 - RNA, 15 nt, Variola virus
auaccgaaucuacau

SEQ ID NO: 4085619 - RNA, 19 nt, Variola virus
auaccgaucacguucuagu

SEQ ID NO: 4085620 - RNA, 14 nt, Variola virus
auaccgauuuuaca

SEQ ID NO: 4085621 - RNA, 20 nt, Variola virus
auaccucauaaaacaaaaaa

SEQ ID NO: 4085622 - RNA, 21 nt, Variola virus
auaccuuaccgccuucauaag

SEQ ID NO: 4085623 - RNA, 19 nt, Variola virus
auacgaaauaaauaaugaa

SEQ ID NO: 4085624 - RNA, 21 nt, Variola virus
auacgaaauaaauaaugaauu

SEQ ID NO: 4085625 - RNA, 20 nt, Variola virus
auacgaauaucguucucuaa

SEQ ID NO: 4085626 - RNA, 14 nt, Variola virus
auacgagucauuau

SEQ ID NO: 4085627 - RNA, 14 nt, Variola virus
auacgauaaacauu

SEQ ID NO: 4085628 - RNA, 17 nt, Variola virus
auacgcuccuuaucaaa

SEQ ID NO: 4085629 - RNA, 23 nt, Variola virus
auacgggaaauuacaaaaggaag

SEQ ID NO: 4085630 - RNA, 19 nt, Variola virus
auacgucuuuauuuucuau

SEQ ID NO: 4085631 - RNA, 20 nt, Variola virus
auacguuuauauucuuuuaa

SEQ ID NO: 4085632 - RNA, 13 nt, Variola virus
auacuaaacauug

SEQ ID NO: 4085633 - RNA, 21 nt, Variola virus
auacuaaaggcaacaaagaaa

SEQ ID NO: 4085634 - RNA, 21 nt, Variola virus
auacuaccaaccuacacuauu

SEQ ID NO: 4085635 - RNA, 18 nt, Variola virus
auacuacgacuuuguuaa

SEQ ID NO: 4085636 - RNA, 15 nt, Variola virus
auacuacuaaugaca

SEQ ID NO: 4085637 - RNA, 18 nt, Variola virus
auacuacuauuugucuaa

SEQ ID NO: 4085638 - RNA, 18 nt, Variola virus
auacuacuucuccaacau

SEQ ID NO: 4085639 - RNA, 19 nt, Variola virus
auacuauccaucagaaugu

SEQ ID NO: 4085640 - RNA, 16 nt, Variola virus
auacuaugaugucuag

SEQ ID NO: 4085641 - RNA, 14 nt, Variola virus
auacuauguuauau

SEQ ID NO: 4085642 - RNA, 20 nt, Variola virus
auacugcaauaauuuucaaa

SEQ ID NO: 4085643 - RNA, 21 nt, Variola virus
auacugcuccagaauuaauaa

SEQ ID NO: 4085644 - RNA, 15 nt, Variola virus
auacuguauauacua

SEQ ID NO: 4085645 - RNA, 22 nt, Variola virus
auacuguauauacuauuauaga

SEQ ID NO: 4085646 - RNA, 13 nt, Variola virus
auacugucuguaa

SEQ ID NO: 4085647 - RNA, 15 nt, Variola virus
auacuuaaaaaauga

SEQ ID NO: 4085648 - RNA, 23 nt, Variola virus
auacuucauaaaagaaaauacua

SEQ ID NO: 4085649 - RNA, 21 nt, Variola virus
auacuuuuaauugaacaaaag

SEQ ID NO: 4085650 - RNA, 15 nt, Variola virus
auacuuuuucuagaa

SEQ ID NO: 4085651 - RNA, 21 nt, Variola virus
auagaaaauaacagauauuac

SEQ ID NO: 4085652 - RNA, 18 nt, Variola virus
auagaaaauaucauaaau

SEQ ID NO: 4085653 - RNA, 22 nt, Variola virus
auagaaacauauucuaugaauu

SEQ ID NO: 4085654 - RNA, 14 nt, Variola virus
auagaaauauauau

SEQ ID NO: 4085655 - RNA, 23 nt, Variola virus
auagaacacccguagaaauacua

SEQ ID NO: 4085656 - RNA, 21 nt, Variola virus
auagaagagcaaauaucucau

SEQ ID NO: 4085657 - RNA, 22 nt, Variola virus
auagaaguuaaacugugaaugu

SEQ ID NO: 4085658 - RNA, 13 nt, Variola virus
auagaauaaauua

SEQ ID NO: 4085659 - RNA, 18 nt, Variola virus
auagaauuuauaacauga

SEQ ID NO: 4085660 - RNA, 20 nt, Variola virus
auagacagcuucuagaaguu

SEQ ID NO: 4085661 - RNA, 16 nt, Variola virus
aaagauggucugaaau

SEQ ID NO: 4085662 - RNA, 20 nt, Variola virus
aaagauucuauaauaaugaa

SEQ ID NO: 4085663 - RNA, 15 nt, Variola virus
aaagcauuaauacag

SEQ ID NO: 4085664 - RNA, 15 nt, Variola virus
aaagcuauuaucaaa

SEQ ID NO: 4085665 - RNA, 19 nt, Variola virus
aaaggauacuaaacauugu

SEQ ID NO: 4085666 - RNA, 24 nt, Variola virus
aaaggggugagaacguuccagagu

SEQ ID NO: 4085667 - RNA, 21 nt, Variola virus
aaaguacucaauaaauuaaag

SEQ ID NO: 4085668 - RNA, 22 nt, Variola virus
aaaguaucuuauauacacagua

SEQ ID NO: 4085669 - RNA, 13 nt, Variola virus
aaagucaucucuu

SEQ ID NO: 4085670 - RNA, 14 nt, Variola virus
aaagugcaaaugag

SEQ ID NO: 4085671 - RNA, 16 nt, Variola virus
aaaguuaguacagaag

SEQ ID NO: 4085672 - RNA, 15 nt, Variola virus
aaaguuucacaugaa

SEQ ID NO: 4085673 - RNA, 15 nt, Variola virus
aaaguuuuauaugua

SEQ ID NO: 4085674 - RNA, 20 nt, Variola virus
aaaguuuucuuucaaaauag

SEQ ID NO: 4085675 - RNA, 14 nt, Variola virus
aaauaaaacuauaa

SEQ ID NO: 4085676 - RNA, 15 nt, Variola virus
aaauaaaauaauaau

SEQ ID NO: 4085677 - RNA, 16 nt, Variola virus
aaauaauaauggaagu

SEQ ID NO: 4085678 - RNA, 13 nt, Variola virus
aaauaauaugauu

SEQ ID NO: 4085679 - RNA, 14 nt, Variola virus
aaauaaucauguaa

SEQ ID NO: 4085680 - RNA, 12 nt, Variola virus
aaauaauccaac

SEQ ID NO: 4085681 - RNA, 13 nt, Variola virus
aaauaaugaccaa

SEQ ID NO: 4085682 - RNA, 23 nt, Variola virus
aaauaauguaagaaauaauauua

SEQ ID NO: 4085683 - RNA, 15 nt, Variola virus
aaauaauuuaacaau

SEQ ID NO: 4085684 - RNA, 18 nt, Variola virus
aaauacaaaauaauagau

SEQ ID NO: 4085685 - RNA, 14 nt, Variola virus
aaauacaaauauau

SEQ ID NO: 4085686 - RNA, 15 nt, Variola virus
aaauacgaacuuuau

SEQ ID NO: 4085687 - RNA, 21 nt, Variola virus
aaauacgaagguccuuuuacu

SEQ ID NO: 4085688 - RNA, 19 nt, Variola virus
aaauacuacagaaacuaau

SEQ ID NO: 4085689 - RNA, 12 nt, Variola virus
aaauacuaguau

SEQ ID NO: 4085690 - RNA, 14 nt, Variola virus
aaauagaaacauau

SEQ ID NO: 4085691 - RNA, 16 nt, Variola virus
aaauagauagaaucua

SEQ ID NO: 4085692 - RNA, 14 nt, Variola virus
aaauagauuauuua

SEQ ID NO: 4085693 - RNA, 18 nt, Variola virus
aaauaggcguacaaaagg

SEQ ID NO: 4085694 - RNA, 14 nt, Variola virus
aaauagggauguuu

SEQ ID NO: 4085695 - RNA, 15 nt, Variola virus
aaauaguuauuagaa

SEQ ID NO: 4085696 - RNA, 19 nt, Variola virus
aaauauaaaaccaacuaau

SEQ ID NO: 4085697 - RNA, 15 nt, Variola virus
aaauauaaaauauau

SEQ ID NO: 4085698 - RNA, 15 nt, Variola virus
aaauauaguagaauu

SEQ ID NO: 4085699 - RNA, 14 nt, Variola virus
aaauauauaacaau

SEQ ID NO: 4085700 - RNA, 14 nt, Variola virus
aaauauauaaugaa

SEQ ID NO: 4085701 - RNA, 22 nt, Variola virus
aaauaucauuauguauaaucau

SEQ ID NO: 4085702 - RNA, 12 nt, Variola virus
aaauaucucauc

SEQ ID NO: 4085703 - RNA, 22 nt, Variola virus
aaauaucuuaaggagaaugaaa

SEQ ID NO: 4085704 - RNA, 13 nt, Variola virus
aaauaucuuguau

SEQ ID NO: 4085705 - RNA, 17 nt, Variola virus
aaauaugaaaucuaucu

SEQ ID NO: 4085706 - RNA, 16 nt, Variola virus
aaauaugauuuuguaa

SEQ ID NO: 4085707 - RNA, 14 nt, Variola virus
aaauauuaauaaca

SEQ ID NO: 4085708 - RNA, 16 nt, Variola virus
aaauauuacagauuuu

SEQ ID NO: 4085709 - RNA, 13 nt, Variola virus
aaauauucaguau

SEQ ID NO: 4085710 - RNA, 12 nt, Variola virus
aaauauuguuaa

SEQ ID NO: 4085711 - RNA, 17 nt, Variola virus
aaaucaggaaaaaagau

SEQ ID NO: 4085712 - RNA, 13 nt, Variola virus
aaaucaguaacua

SEQ ID NO: 4085713 - RNA, 23 nt, Variola virus
aaaucaguaacuauguucauuuu

SEQ ID NO: 4085714 - RNA, 18 nt, Variola virus
aaauccauuaauacggaa

SEQ ID NO: 4085715 - RNA, 22 nt, Variola virus
aaauccuuguuugauaaaugua

SEQ ID NO: 4085716 - RNA, 14 nt, Variola virus
aaaucgucaguagu

SEQ ID NO: 4085717 - RNA, 17 nt, Variola virus
aaaucguguuuguguag

SEQ ID NO: 4085718 - RNA, 16 nt, Variola virus
aaaucuagagguagaa

SEQ ID NO: 4085719 - RNA, 16 nt, Variola virus
aaaucuaguuguggaa

SEQ ID NO: 4085720 - RNA, 14 nt, Variola virus
aaaucuauacugca

SEQ ID NO: 4085721 - RNA, 19 nt, Variola virus
aaaucuucuuauaagauug

SEQ ID NO: 4085722 - RNA, 21 nt, Variola virus
aaaucuucuucuacauuuuca

SEQ ID NO: 4085723 - RNA, 22 nt, Variola virus
aaaucuugucugcuuaauacac

SEQ ID NO: 4085724 - RNA, 21 nt, Variola virus
aaaugaacuuuuacagaucua

SEQ ID NO: 4085725 - RNA, 22 nt, Variola virus
aaaugaagauccaagauuugua

SEQ ID NO: 4085726 - RNA, 17 nt, Variola virus
aaaugaguucugugcag

SEQ ID NO: 4085727 - RNA, 17 nt, Variola virus
aaaugauagaaauauau

SEQ ID NO: 4085728 - RNA, 17 nt, Variola virus
aaaugauaucuuagaau

SEQ ID NO: 4085729 - RNA, 18 nt, Variola virus
aaaugauaucuuagaaua

SEQ ID NO: 4085730 - RNA, 14 nt, Variola virus
aaaugauuuuggaa

SEQ ID NO: 4085731 - RNA, 19 nt, Variola virus
aaauggaugcgguuauuag

SEQ ID NO: 4085732 - RNA, 14 nt, Variola virus
aaaugguguaacuc

SEQ ID NO: 4085733 - RNA, 17 nt, Variola virus
aaaugguugauaccauu

SEQ ID NO: 4085734 - RNA, 18 nt, Variola virus
aaauguacuguauauaau

SEQ ID NO: 4085735 - RNA, 15 nt, Variola virus
aaauguaucuuccac

SEQ ID NO: 4085736 - RNA, 18 nt, Variola virus
aaaugucaugauuaguau

SEQ ID NO: 4085737 - RNA, 16 nt, Variola virus
aaauguccaauauguc

SEQ ID NO: 4085738 - RNA, 18 nt, Variola virus
aaauguccguuauauaau

SEQ ID NO: 4085739 - RNA, 20 nt, Variola virus
aaaugucuagcgauauuucu

SEQ ID NO: 4085740 - RNA, 13 nt, Variola virus
aaaugugauguau

SEQ ID NO: 4085741 - RNA, 23 nt, Variola virus
aaaugugguaugucuccauuaca

SEQ ID NO: 4085742 - RNA, 15 nt, Variola virus
acugaacaggcauuu

SEQ ID NO: 4085743 - RNA, 14 nt, Variola virus
acugaaucauauau

SEQ ID NO: 4085744 - RNA, 15 nt, Variola virus
acugacagauguguu

SEQ ID NO: 4085745 - RNA, 18 nt, Variola virus
acugaguuuuuaggaaau

SEQ ID NO: 4085746 - RNA, 16 nt, Variola virus
acugaucccuaauuuc

SEQ ID NO: 4085747 - RNA, 15 nt, Variola virus
acugauuaacaaaug

SEQ ID NO: 4085748 - RNA, 15 nt, Variola virus
acugauucagaaaug

SEQ ID NO: 4085749 - RNA, 17 nt, Variola virus
acugcauccuucuaaga

SEQ ID NO: 4085750 - RNA, 20 nt, Variola virus
acuggagccauugucuuaac

SEQ ID NO: 4085751 - RNA, 16 nt, Variola virus
acuguauuaagaacag

SEQ ID NO: 4085752 - RNA, 22 nt, Variola virus
acuguauuuggaucuuuuguac

SEQ ID NO: 4085753 - RNA, 21 nt, Variola virus
acugucacuggaaagaugaua

SEQ ID NO: 4085754 - RNA, 16 nt, Variola virus
acuguccaaaaugaug

SEQ ID NO: 4085755 - RNA, 21 nt, Variola virus
acugucucauacacuacagua

SEQ ID NO: 4085756 - RNA, 21 nt, Variola virus
acugucuggcaauaaaugaua

SEQ ID NO: 4085757 - RNA, 15 nt, Variola virus
acuguggaauuauuu

SEQ ID NO: 4085758 - RNA, 15 nt, Variola virus
acuguucaaaauaua

SEQ ID NO: 4085759 - RNA, 18 nt, Variola virus
acuguucccgucaauaga

SEQ ID NO: 4085760 - RNA, 21 nt, Variola virus
acuuacagauggauaaaacuu

SEQ ID NO: 4085761 - RNA, 17 nt, Variola virus
acuuacgauagaaauag

SEQ ID NO: 4085762 - RNA, 19 nt, Variola virus
acuuagucuguacaaaagu

SEQ ID NO: 4085763 - RNA, 20 nt, Variola virus
acuuagucuguacaaaaguu

SEQ ID NO: 4085764 - RNA, 14 nt, Variola virus
acuuauuuaacucu

SEQ ID NO: 4085765 - RNA, 15 nt, Variola virus
acuucacagaugaua

SEQ ID NO: 4085766 - RNA, 21 nt, Variola virus
acuucagguuucuuagcuugu

SEQ ID NO: 4085767 - RNA, 13 nt, Variola virus
acuuccauggaaa

SEQ ID NO: 4085768 - RNA, 21 nt, Variola virus
acuucuaaaacagcugugaau

SEQ ID NO: 4085769 - RNA, 23 nt, Variola virus
acuucuaaugagcaaguagaaaa

SEQ ID NO: 4085770 - RNA, 13 nt, Variola virus
acuucucuaaaug

SEQ ID NO: 4085771 - RNA, 15 nt, Variola virus
acuucucuaaaugag

SEQ ID NO: 4085772 - RNA, 15 nt, Variola virus
acuucucuaucaaug

SEQ ID NO: 4085773 - RNA, 20 nt, Variola virus
acuucucuguccuuaauaag

SEQ ID NO: 4085774 - RNA, 16 nt, Variola virus
acuucugaagaaauug

SEQ ID NO: 4085775 - RNA, 22 nt, Variola virus
acuucugcagaauaauuagaaa

SEQ ID NO: 4085776 - RNA, 15 nt, Variola virus
acuugaagacauucc

SEQ ID NO: 4085777 - RNA, 20 nt, Variola virus
acuugaaucaccauccuuua

SEQ ID NO: 4085778 - RNA, 14 nt, Variola virus
acuugauacagcca

SEQ ID NO: 4085779 - RNA, 23 nt, Variola virus
acuuguauaugccaaaguuuaaa

SEQ ID NO: 4085780 - RNA, 14 nt, Variola virus
acuuguuaaagaag

SEQ ID NO: 4085781 - RNA, 14 nt, Variola virus
acuuguuggugaaa

SEQ ID NO: 4085782 - RNA, 17 nt, Variola virus
acuuguuuaacaaaguu

SEQ ID NO: 4085783 - RNA, 19 nt, Variola virus
acuuuaaagcaaaaugguu

SEQ ID NO: 4085784 - RNA, 15 nt, Variola virus
acuuuaagcuaaaau

SEQ ID NO: 4085785 - RNA, 23 nt, Variola virus
acuuuacaaacgauguacugaag

SEQ ID NO: 4085786 - RNA, 14 nt, Variola virus
acuuuacucuucua

SEQ ID NO: 4085787 - RNA, 14 nt, Variola virus
acuuuauauuuccu

SEQ ID NO: 4085788 - RNA, 18 nt, Variola virus
acuuuaucagaucaaaau

SEQ ID NO: 4085789 - RNA, 14 nt, Variola virus
acuuugauaauaag

SEQ ID NO: 4085790 - RNA, 16 nt, Variola virus
acuuugauuucuuauc

SEQ ID NO: 4085791 - RNA, 15 nt, Variola virus
acuuugguaaauguu

SEQ ID NO: 4085792 - RNA, 17 nt, Variola virus
acuuuguggaugaugau

SEQ ID NO: 4085793 - RNA, 20 nt, Variola virus
acuuuuaacacaccuaaaug

SEQ ID NO: 4085794 - RNA, 22 nt, Variola virus
acuuuuuaacgaaauuagaaaa

SEQ ID NO: 4085795 - RNA, 15 nt, Variola virus
acuuuuuauacuaau

SEQ ID NO: 4085796 - RNA, 22 nt, Variola virus
acuuuuuguuuauauuaaauau

SEQ ID NO: 4085797 - RNA, 22 nt, Variola virus
acuuuuuuacccacuauaaaau

SEQ ID NO: 4085798 - RNA, 15 nt, Variola virus
agaaaaaauaucuug

SEQ ID NO: 4085799 - RNA, 14 nt, Variola virus
agaaaaaaugauuu

SEQ ID NO: 4085800 - RNA, 17 nt, Variola virus
agaaaaacuuaguacua

SEQ ID NO: 4085801 - RNA, 20 nt, Variola virus
agaaaaaucauuaaaaagau

SEQ ID NO: 4085802 - RNA, 17 nt, Variola virus
agaaaacucguuauuaa

SEQ ID NO: 4085803 - RNA, 20 nt, Variola virus
agaaaacucguuauuaacua

SEQ ID NO: 4085804 - RNA, 15 nt, Variola virus
agaaaaggauguauu

SEQ ID NO: 4085805 - RNA, 14 nt, Variola virus
agaaaauacuauau

SEQ ID NO: 4085806 - RNA, 14 nt, Variola virus
agaaaauauaaauu

SEQ ID NO: 4085807 - RNA, 21 nt, Variola virus
agaaaaucagaucugauaaua

SEQ ID NO: 4085808 - RNA, 15 nt, Variola virus
agaaaauuuaauaaa

SEQ ID NO: 4085809 - RNA, 18 nt, Variola virus
agaaacagauagauaugu

SEQ ID NO: 4085810 - RNA, 13 nt, Variola virus
agaaacauauucu

SEQ ID NO: 4085811 - RNA, 19 nt, Variola virus
agaaacgauaccaucuucu

SEQ ID NO: 4085812 - RNA, 18 nt, Variola virus
agaaacuaauauaguuaa

SEQ ID NO: 4085813 - RNA, 22 nt, Variola virus
agaaacuauagauaaugauaua

SEQ ID NO: 4085814 - RNA, 23 nt, Variola virus
agaaacugacuugauaaaaaugg

SEQ ID NO: 4085815 - RNA, 15 nt, Variola virus
agaaacuuuuucgaa

SEQ ID NO: 4085816 - RNA, 18 nt, Variola virus
agaaagcuguggauguuu

SEQ ID NO: 4085817 - RNA, 14 nt, Variola virus
agaaaguaugauau

SEQ ID NO: 4085818 - RNA, 15 nt, Variola virus
agaaaguaugauaua

SEQ ID NO: 4085819 - RNA, 12 nt, Variola virus
agaaauaaagua

SEQ ID NO: 4085820 - RNA, 14 nt, Variola virus
agaaauaauauuaa

SEQ ID NO: 4085821 - RNA, 16 nt, Variola virus
agaaauaucuauaauu

SEQ ID NO: 4085822 - RNA, 14 nt, Variola virus
agaaaucaacuuau

SEQ ID NO: 4085823 - RNA, 16 nt, Variola virus
agaaaucaaucuaucu

SEQ ID NO: 4085824 - RNA, 22 nt, Variola virus
agaaaucauauaugauauuccu

SEQ ID NO: 4085825 - RNA, 20 nt, Variola virus
agaaaugaaguuaugacauu

SEQ ID NO: 4085826 - RNA, 12 nt, Variola virus
agaaaugauauc

SEQ ID NO: 4085827 - RNA, 21 nt, Variola virus
agaaauggaagaguuaauaaa

SEQ ID NO: 4085828 - RNA, 23 nt, Variola virus
auauucuucuacgaucucacuaa

SEQ ID NO: 4085829 - RNA, 17 nt, Variola virus
auauucuuuuuuauaga

SEQ ID NO: 4085830 - RNA, 14 nt, Variola virus
auauuguacaguac

SEQ ID NO: 4085831 - RNA, 16 nt, Variola virus
auauugucacaugucu

SEQ ID NO: 4085832 - RNA, 15 nt, Variola virus
auauuguuacagcca

SEQ ID NO: 4085833 - RNA, 18 nt, Variola virus
auauuuauaaaaaugcua

SEQ ID NO: 4085834 - RNA, 16 nt, Variola virus
auauuuauaaaguauu

SEQ ID NO: 4085835 - RNA, 17 nt, Variola virus
auauuucuaguuuguaa

SEQ ID NO: 4085836 - RNA, 12 nt, Variola virus
auauuucugaag

SEQ ID NO: 4085837 - RNA, 15 nt, Variola virus
auauuugcuaauaau

SEQ ID NO: 4085838 - RNA, 22 nt, Variola virus
auauuuggcuaaauuauauaau

SEQ ID NO: 4085839 - RNA, 21 nt, Variola virus
auauuuuucguuuacaaaauc

SEQ ID NO: 4085840 - RNA, 21 nt, Variola virus
auauuuuugauggguaagcca

SEQ ID NO: 4085841 - RNA, 14 nt, Variola virus
auauuuuuuaacua

SEQ ID NO: 4085842 - RNA, 21 nt, Variola virus
aucaaaaauaaaauacauuua

SEQ ID NO: 4085843 - RNA, 15 nt, Variola virus
aucaaaagaaugauu

SEQ ID NO: 4085844 - RNA, 19 nt, Variola virus
aucaaaaucguauaaaguu

SEQ ID NO: 4085845 - RNA, 22 nt, Variola virus
aucaaacaaaaaagcucaauaa

SEQ ID NO: 4085846 - RNA, 15 nt, Variola virus
aucaaagaagaaguu

SEQ ID NO: 4085847 - RNA, 13 nt, Variola virus
aucaaauacuuca

SEQ ID NO: 4085848 - RNA, 20 nt, Variola virus
aucaaaugguaaauacugua

SEQ ID NO: 4085849 - RNA, 21 nt, Variola virus
aucaaauuugguguuguuaaa

SEQ ID NO: 4085850 - RNA, 18 nt, Variola virus
aucaacagaaguuaauaa

SEQ ID NO: 4085851 - RNA, 24 nt, Variola virus
aucaacauaaugucauaguugaac

SEQ ID NO: 4085852 - RNA, 15 nt, Variola virus
aucaacauauagaac

SEQ ID NO: 4085853 - RNA, 13 nt, Variola virus
aucaacauauuaa

SEQ ID NO: 4085854 - RNA, 15 nt, Variola virus
aucaacauauuaaug

SEQ ID NO: 4085855 - RNA, 16 nt, Variola virus
aucaacgaguuaaaaa

SEQ ID NO: 4085856 - RNA, 20 nt, Variola virus
aucaacgauucuagaacguc

SEQ ID NO: 4085857 - RNA, 21 nt, Variola virus
aucaacguagaaaaaauagaa

SEQ ID NO: 4085858 - RNA, 21 nt, Variola virus
aucaacuucuugcgugucuuu

SEQ ID NO: 4085859 - RNA, 18 nt, Variola virus
aucaacuuuauuagauaa

SEQ ID NO: 4085860 - RNA, 21 nt, Variola virus
aucaagucuuuauacaaugac

SEQ ID NO: 4085861 - RNA, 23 nt, Variola virus
aucaaguuuguaggaaaggacaa

SEQ ID NO: 4085862 - RNA, 16 nt, Variola virus
aucaauaauaguaaca

SEQ ID NO: 4085863 - RNA, 17 nt, Variola virus
aucaauauaucaucuau

SEQ ID NO: 4085864 - RNA, 17 nt, Variola virus
aucaaugaguaagacuu

SEQ ID NO: 4085865 - RNA, 15 nt, Variola virus
aucaaugauaugauu

SEQ ID NO: 4085866 - RNA, 19 nt, Variola virus
aucaauguguguaacucca

SEQ ID NO: 4085867 - RNA, 22 nt, Variola virus
aucaauuauguaaauaucuuua

SEQ ID NO: 4085868 - RNA, 19 nt, Variola virus
aucaauuuuaaagguauaa

SEQ ID NO: 4085869 - RNA, 19 nt, Variola virus
aucaauuuugaaaauacuu

SEQ ID NO: 4085870 - RNA, 21 nt, Variola virus
aucaauuuugaaaauacuuag

SEQ ID NO: 4085871 - RNA, 15 nt, Variola virus
aucacaaaaaaaacu

SEQ ID NO: 4085872 - RNA, 13 nt, Variola virus
aucacaagaaguu

SEQ ID NO: 4085873 - RNA, 22 nt, Variola virus
aucacauuauaugauucuguaa

SEQ ID NO: 4085874 - RNA, 22 nt, Variola virus
aucaccauggacauaaagauag

SEQ ID NO: 4085875 - RNA, 13 nt, Variola virus
aucacuaauucca

SEQ ID NO: 4085876 - RNA, 16 nt, Variola virus
aucacuacaauaauua

SEQ ID NO: 4085877 - RNA, 23 nt, Variola virus
aucacuaccgaguuuaaaacuuc

SEQ ID NO: 4085878 - RNA, 22 nt, Variola virus
aucacuaucuucaucauauuca

SEQ ID NO: 4085879 - RNA, 18 nt, Variola virus
aucagaaaggauagagca

SEQ ID NO: 4085880 - RNA, 13 nt, Variola virus
aucagagaacuuc

SEQ ID NO: 4085881 - RNA, 19 nt, Variola virus
aucagagagauagaagaac

SEQ ID NO: 4085882 - RNA, 17 nt, Variola virus
aucagauaaguaugaag

SEQ ID NO: 4085883 - RNA, 15 nt, Variola virus
aucagaucaaaauua

SEQ ID NO: 4085884 - RNA, 13 nt, Variola virus
aucagaucauauu

SEQ ID NO: 4085885 - RNA, 20 nt, Variola virus
aucagaugauaucaguauau

SEQ ID NO: 4085886 - RNA, 20 nt, Variola virus
aucagcauccacucauauag

SEQ ID NO: 4085887 - RNA, 14 nt, Variola virus
aucagcgauuccua

SEQ ID NO: 4085888 - RNA, 21 nt, Variola virus
aucaggauccaagcuuucuaa

SEQ ID NO: 4085889 - RNA, 20 nt, Variola virus
aucaguauauaaaaagaaug

SEQ ID NO: 4085890 - RNA, 20 nt, Variola virus
aucaguuauaaaaaauaaag

SEQ ID NO: 4085891 - RNA, 17 nt, Variola virus
aucauaaauaaaaauag

SEQ ID NO: 4085892 - RNA, 15 nt, Variola virus
aucauacaaugaauu

SEQ ID NO: 4085893 - RNA, 15 nt, Variola virus
aucauauauagaaug

SEQ ID NO: 4085894 - RNA, 13 nt, Variola virus
aucauaucuguaa

SEQ ID NO: 4085895 - RNA, 20 nt, Variola virus
aucaucaaccgucacauaau

SEQ ID NO: 4085896 - RNA, 18 nt, Variola virus
aucaucgaucuaauagau

SEQ ID NO: 4085897 - RNA, 18 nt, Variola virus
aucaucgugugauaugaa

SEQ ID NO: 4085898 - RNA, 21 nt, Variola virus
aucaucguuaggauuugguaa

SEQ ID NO: 4085899 - RNA, 15 nt, Variola virus
aucaugaaacaauau

SEQ ID NO: 4085900 - RNA, 14 nt, Variola virus
aucauguaaauguu

SEQ ID NO: 4085901 - RNA, 21 nt, Variola virus
aucauguagauaguuaccauc

SEQ ID NO: 4085902 - RNA, 16 nt, Variola virus
aucauguguaaaaagu

SEQ ID NO: 4085903 - RNA, 16 nt, Variola virus
aucauguuaaugucuu

SEQ ID NO: 4085904 - RNA, 15 nt, Variola virus
aucauuaauacagua

SEQ ID NO: 4085905 - RNA, 15 nt, Variola virus
aucauuaaugauaua

SEQ ID NO: 4085906 - RNA, 18 nt, Variola virus
aucauuaggaaucuaucc

SEQ ID NO: 4085907 - RNA, 17 nt, Variola virus
aucauuauaauaugaug

SEQ ID NO: 4085908 - RNA, 16 nt, Variola virus
aucauuauuuacugaa

SEQ ID NO: 4085909 - RNA, 22 nt, Variola virus
aucauuucgacauuaauuccuu

SEQ ID NO: 4085910 - RNA, 18 nt, Variola virus
auccaaaauacaaaaugu

SEQ ID NO: 4085911 - RNA, 15 nt, Variola virus
auccaaaauauuaau

SEQ ID NO: 4085912 - RNA, 12 nt, Variola virus
auccaaacauua

SEQ ID NO: 4085913 - RNA, 17 nt, Variola virus
auccaaacccuugaucu

SEQ ID NO: 4085914 - RNA, 13 nt, Variola virus
auccaauaauuua

SEQ ID NO: 4085915 - RNA, 20 nt, Variola virus
auccaauguguuuaauauau

SEQ ID NO: 4085916 - RNA, 19 nt, Variola virus
auccaauuguuugauauau

SEQ ID NO: 4085917 - RNA, 22 nt, Variola virus
auccacuauuaucaauucugga

SEQ ID NO: 4085918 - RNA, 19 nt, Variola virus
auccagaauguacacuauu

SEQ ID NO: 4085919 - RNA, 13 nt, Variola virus
auccauuucuaga

SEQ ID NO: 4085920 - RNA, 13 nt, Variola virus
aucccaaacauug

SEQ ID NO: 4085921 - RNA, 15 nt, Variola virus
aucccggauacuuuu

SEQ ID NO: 4085922 - RNA, 15 nt, Variola virus
auccgauaaacauug

SEQ ID NO: 4085923 - RNA, 19 nt, Variola virus
auccggauuuccaaagaau

SEQ ID NO: 4085924 - RNA, 22 nt, Variola virus
auccuaaagguaaauguaaauu

SEQ ID NO: 4085925 - RNA, 13 nt, Variola virus
auccuaacaauga

SEQ ID NO: 4085926 - RNA, 16 nt, Variola virus
auccucagacacagau

SEQ ID NO: 4085927 - RNA, 17 nt, Variola virus
auccucgcuuuguguau

SEQ ID NO: 4085928 - RNA, 14 nt, Variola virus
auccugauauuaau

SEQ ID NO: 4085929 - RNA, 20 nt, Variola virus
auccuucagauaaucugaaa

SEQ ID NO: 4085930 - RNA, 15 nt, Variola virus
auccuucuagaauua

SEQ ID NO: 4085931 - RNA, 20 nt, Variola virus
aucgaagugacacucuauau

SEQ ID NO: 4085932 - RNA, 14 nt, Variola virus
aucgauagacacug

SEQ ID NO: 4085933 - RNA, 18 nt, Variola virus
aucgauauugaaaaugac

SEQ ID NO: 4085934 - RNA, 20 nt, Variola virus
aucgauccucacuucgaaga

SEQ ID NO: 4085935 - RNA, 14 nt, Variola virus
aucgcaauauccuu

SEQ ID NO: 4085936 - RNA, 19 nt, Variola virus
aucgcuacaaaacuacuau

SEQ ID NO: 4085937 - RNA, 21 nt, Variola virus
aucgcuauaauucauauuaau

SEQ ID NO: 4085938 - RNA, 22 nt, Variola virus
aucggaacacuugguaguugaa

SEQ ID NO: 4085939 - RNA, 17 nt, Variola virus
aucggauacagacacuc

SEQ ID NO: 4085940 - RNA, 19 nt, Variola virus
aucggccuucuuuuuuaca

SEQ ID NO: 4085941 - RNA, 14 nt, Variola virus
aucguaaaucuguu

SEQ ID NO: 4085942 - RNA, 13 nt, Variola virus
aucguauauuaag

SEQ ID NO: 4085943 - RNA, 12 nt, Variola virus
aucguccuaaua

SEQ ID NO: 4085944 - RNA, 19 nt, Variola virus
aucgucguacguuuacaca

SEQ ID NO: 4085945 - RNA, 18 nt, Variola virus
aucgucuauauaugaaua

SEQ ID NO: 4085946 - RNA, 15 nt, Variola virus
aucguuaagaauugu

SEQ ID NO: 4085947 - RNA, 13 nt, Variola virus
aucguuacaaaag

SEQ ID NO: 4085948 - RNA, 15 nt, Variola virus
aucguuuaaaguaaa

SEQ ID NO: 4085949 - RNA, 16 nt, Variola virus
aucuaaaauugcauuu

SEQ ID NO: 4085950 - RNA, 20 nt, Variola virus
aucuaaagauaaucuucucu

SEQ ID NO: 4085951 - RNA, 23 nt, Variola virus
aucuaacaaaaauuaugaaauaa

SEQ ID NO: 4085952 - RNA, 16 nt, Variola virus
aucuaacagaaacguu

SEQ ID NO: 4085953 - RNA, 16 nt, Variola virus
aucuaacauaguuuua

SEQ ID NO: 4085954 - RNA, 16 nt, Variola virus
aucuaacaucuugauu

SEQ ID NO: 4085955 - RNA, 22 nt, Variola virus
aucuaauaaguugcgaugaaau

SEQ ID NO: 4085956 - RNA, 16 nt, Variola virus
aucuaaucagaaucuu

SEQ ID NO: 4085957 - RNA, 16 nt, Variola virus
aucuaauuuacuaucu

SEQ ID NO: 4085958 - RNA, 21 nt, Variola virus
aucuaccauaguuacagaauu

SEQ ID NO: 4085959 - RNA, 21 nt, Variola virus
aucuacgauccaucaaaaaac

SEQ ID NO: 4085960 - RNA, 18 nt, Variola virus
aucuacguucauauguau

SEQ ID NO: 4085961 - RNA, 14 nt, Variola virus
aucuagacauagau

SEQ ID NO: 4085962 - RNA, 15 nt, Variola virus
aucuagacucuauau

SEQ ID NO: 4085963 - RNA, 20 nt, Variola virus
aucuagauuguuuaauauau

SEQ ID NO: 4085964 - RNA, 20 nt, Variola virus
aucuagucaccgagggaaaa

SEQ ID NO: 4085965 - RNA, 13 nt, Variola virus
aucuaguuaccuu

SEQ ID NO: 4085966 - RNA, 20 nt, Variola virus
aucuauaaaauuuuaauuaa

SEQ ID NO: 4085967 - RNA, 21 nt, Variola virus
aucuauaaaauuuuaauuaag

SEQ ID NO: 4085968 - RNA, 21 nt, Variola virus
aucuauaauuugugaguuuuc

SEQ ID NO: 4085969 - RNA, 14 nt, Variola virus
aucuauauauguau

SEQ ID NO: 4085970 - RNA, 20 nt, Variola virus
aucuauauuuaucacagucu

SEQ ID NO: 4085971 - RNA, 17 nt, Variola virus
aucuaucaaacaaaauu

SEQ ID NO: 4085972 - RNA, 18 nt, Variola virus
aucuaucuuaaagacuau

SEQ ID NO: 4085973 - RNA, 13 nt, Variola virus
aucuauguagaau

SEQ ID NO: 4085974 - RNA, 19 nt, Variola virus
aucuauuaaagacagagau

SEQ ID NO: 4085975 - RNA, 23 nt, Variola virus
aucuauuagaagcuaacaaaauu

SEQ ID NO: 4085976 - RNA, 17 nt, Variola virus
aucuauuauugaugcaa

SEQ ID NO: 4085977 - RNA, 18 nt, Variola virus
aucuauucauaugcaucu

SEQ ID NO: 4085978 - RNA, 15 nt, Variola virus
aucuauuuuaaauac

SEQ ID NO: 4085979 - RNA, 15 nt, Variola virus
aucucaacaaaauuc

SEQ ID NO: 4085980 - RNA, 17 nt, Variola virus
aucucagugcaaagauu

SEQ ID NO: 4085981 - RNA, 14 nt, Variola virus
aucucaucauucca

SEQ ID NO: 4085982 - RNA, 22 nt, Variola virus
aucuccacacagucaaauccgu

SEQ ID NO: 4085983 - RNA, 19 nt, Variola virus
aucuccuuauuuuuaaaaa

SEQ ID NO: 4085984 - RNA, 14 nt, Variola virus
aucucgccaaaaua

SEQ ID NO: 4085985 - RNA, 16 nt, Variola virus
aucucguccuugguuu

SEQ ID NO: 4085986 - RNA, 22 nt, Variola virus
aucucuaacgagugaucaaauu

SEQ ID NO: 4085987 - RNA, 15 nt, Variola virus
aucucuuaaaugcua

SEQ ID NO: 4085988 - RNA, 16 nt, Variola virus
aucucuugacaaaaau

SEQ ID NO: 4085989 - RNA, 13 nt, Variola virus
aucucuuucagua

SEQ ID NO: 4085990 - RNA, 16 nt, Variola virus
aucucuuuuuaacuaa

SEQ ID NO: 4085991 - RNA, 20 nt, Variola virus
aucugaaauaacauauagau

SEQ ID NO: 4085992 - RNA, 13 nt, Variola virus
aucugaucuuguu

SEQ ID NO: 4085993 - RNA, 15 nt, Variola virus
aucugaugaauaauu

SEQ ID NO: 4085994 - RNA, 19 nt, Variola virus
aucuggaggauguauauau

SEQ ID NO: 4085995 - RNA, 18 nt, Variola virus
aucugguagcaaagaaau

SEQ ID NO: 4085996 - RNA, 20 nt, Variola virus
aucugguuuaggaaagacag

SEQ ID NO: 4085997 - RNA, 17 nt, Variola virus
aucuguacuucuauaca

SEQ ID NO: 4085998 - RNA, 17 nt, Variola virus
aucuguggcguugcaua

SEQ ID NO: 4085999 - RNA, 14 nt, Variola virus
aucuguuuaucauu

SEQ ID NO: 4086000 - RNA, 21 nt, Variola virus
aucuuaauccuucuagaauua

SEQ ID NO: 4086001 - RNA, 16 nt, Variola virus
aucuuaccaucuucuu

SEQ ID NO: 4086002 - RNA, 17 nt, Variola virus
aucuuauaaaacuguca

SEQ ID NO: 4086003 - RNA, 19 nt, Variola virus
aucuuauauacacauaauu

SEQ ID NO: 4086004 - RNA, 15 nt, Variola virus
aucuuauucaagcaa

SEQ ID NO: 4086005 - RNA, 14 nt, Variola virus
aucuuauuuagaga

SEQ ID NO: 4086006 - RNA, 20 nt, Variola virus
aucuucacauuguaacuauu

SEQ ID NO: 4086007 - RNA, 17 nt, Variola virus
aucuucauaaaauacua

SEQ ID NO: 4086008 - RNA, 18 nt, Variola virus
aucuucuauaucuagauu

SEQ ID NO: 4086009 - RNA, 20 nt, Variola virus
aucuucucuccgguuaauaa

SEQ ID NO: 4086010 - RNA, 20 nt, Variola virus
aucuucucuccuuucaaacu

SEQ ID NO: 4086011 - RNA, 19 nt, Variola virus
aucuugcaaguuaaauaga

SEQ ID NO: 4086012 - RNA, 15 nt, Variola virus
aucuuguucagaaau

SEQ ID NO: 4086013 - RNA, 23 nt, Variola virus
aucuuuaacgauaccuauaccua

SEQ ID NO: 4086014 - RNA, 17 nt, Variola virus
aucuuuaauagaacucu

SEQ ID NO: 4086015 - RNA, 19 nt, Variola virus
aucuuuucacguuaaauga

SEQ ID NO: 4086016 - RNA, 17 nt, Variola virus
aucuuuucacuaaauaa

SEQ ID NO: 4086017 - RNA, 17 nt, Variola virus
aucuuuuguucuagaug

SEQ ID NO: 4086018 - RNA, 21 nt, Variola virus
aucuuuuuguuggaaaaauga

SEQ ID NO: 4086019 - RNA, 14 nt, Variola virus
augaaaaaaaacac

SEQ ID NO: 4086020 - RNA, 13 nt, Variola virus
augaaaaaaagau

SEQ ID NO: 4086021 - RNA, 18 nt, Variola virus
augaaauaaguacaauga

SEQ ID NO: 4086022 - RNA, 22 nt, Variola virus
augaaauagcguucgucaacau

SEQ ID NO: 4086023 - RNA, 18 nt, Variola virus
augaaaucuaucuuauau

SEQ ID NO: 4086024 - RNA, 12 nt, Variola virus
augaaauguuug

SEQ ID NO: 4086025 - RNA, 17 nt, Variola virus
augaaauuuaaguaaca

SEQ ID NO: 4086026 - RNA, 15 nt, Variola virus
augaacaaaucaaua

SEQ ID NO: 4086027 - RNA, 19 nt, Variola virus
augaacacaaaugguguau

SEQ ID NO: 4086028 - RNA, 19 nt, Variola virus
augaacuagacaauaaugu

SEQ ID NO: 4086029 - RNA, 14 nt, Variola virus
augaacuuguuuaa

SEQ ID NO: 4086030 - RNA, 16 nt, Variola virus
augaagaauggaugau

SEQ ID NO: 4086031 - RNA, 18 nt, Variola virus
augaaguaguugcauaga

SEQ ID NO: 4086032 - RNA, 18 nt, Variola virus
augaauaucacauaucau

SEQ ID NO: 4086033 - RNA, 22 nt, Variola virus
augaauaucaggaaauguauaa

SEQ ID NO: 4086034 - RNA, 21 nt, Variola virus
augaaugcaagacucacgcau

SEQ ID NO: 4086035 - RNA, 22 nt, Variola virus
augacaucaacuacaaaugaua

SEQ ID NO: 4086036 - RNA, 22 nt, Variola virus
augacuccucuucauacagccu

SEQ ID NO: 4086037 - RNA, 16 nt, Variola virus
augacuggaaaucacu

SEQ ID NO: 4086038 - RNA, 14 nt, Variola virus
augagagucaauau

SEQ ID NO: 4086039 - RNA, 16 nt, Variola virus
augaggugguugcaga

SEQ ID NO: 4086040 - RNA, 18 nt, Variola virus
augaggugguugcagaau

SEQ ID NO: 4086041 - RNA, 15 nt, Variola virus
augaguaaugggguu

SEQ ID NO: 4086042 - RNA, 16 nt, Variola virus
augagucuuauagcau

SEQ ID NO: 4086043 - RNA, 14 nt, Variola virus
augaguuaauguau

SEQ ID NO: 4086044 - RNA, 14 nt, Variola virus
augaguuagauuac

SEQ ID NO: 4086045 - RNA, 20 nt, Variola virus
augaguuauuaagaaauaca

SEQ ID NO: 4086046 - RNA, 19 nt, Variola virus
augauaaaaacacguuuau

SEQ ID NO: 4086047 - RNA, 15 nt, Variola virus
augauaaacuaacua

SEQ ID NO: 4086048 - RNA, 18 nt, Variola virus
augauaaacuuaaugaaa

SEQ ID NO: 4086049 - RNA, 16 nt, Variola virus
augauaccugcauaug

SEQ ID NO: 4086050 - RNA, 19 nt, Variola virus
augauauacagucuuaaau

SEQ ID NO: 4086051 - RNA, 19 nt, Variola virus
augauauauuaaacaacga

SEQ ID NO: 4086052 - RNA, 21 nt, Variola virus
augauauccacuaguuuccuu

SEQ ID NO: 4086053 - RNA, 17 nt, Variola virus
augauguuuuuagaaaa

SEQ ID NO: 4086054 - RNA, 17 nt, Variola virus
augauucgauaaauaaa

SEQ ID NO: 4086055 - RNA, 16 nt, Variola virus
augauugauuagaaaa

SEQ ID NO: 4086056 - RNA, 13 nt, Variola virus
augauugcauauu

SEQ ID NO: 4086057 - RNA, 23 nt, Variola virus
augauugcauauuuaucuuucuu

SEQ ID NO: 4086058 - RNA, 16 nt, Variola virus
augauugggaaccagu

SEQ ID NO: 4086059 - RNA, 15 nt, Variola virus
augauuguaaugaac

SEQ ID NO: 4086060 - RNA, 12 nt, Variola virus
augcaaacauua

SEQ ID NO: 4086061 - RNA, 23 nt, Variola virus
augcaaacuuacagaaacaauga

SEQ ID NO: 4086062 - RNA, 14 nt, Variola virus
augcaacauuuccu

SEQ ID NO: 4086063 - RNA, 14 nt, Variola virus
augcagaaaugauu

SEQ ID NO: 4086064 - RNA, 16 nt, Variola virus
augcagacaaaaugaa

SEQ ID NO: 4086065 - RNA, 14 nt, Variola virus
augccaaaaucaua

SEQ ID NO: 4086066 - RNA, 22 nt, Variola virus
augccuauuaggacagauacua

SEQ ID NO: 4086067 - RNA, 18 nt, Variola virus
augccucagguucaucga

SEQ ID NO: 4086068 - RNA, 19 nt, Variola virus
augcuagugcucaaacaaa

SEQ ID NO: 4086069 - RNA, 13 nt, Variola virus
augcugugcuaua

SEQ ID NO: 4086070 - RNA, 20 nt, Variola virus
auggaacaauaaaagagaau

SEQ ID NO: 4086071 - RNA, 19 nt, Variola virus
auggagaauguuccuaaug

SEQ ID NO: 4086072 - RNA, 16 nt, Variola virus
auggaucuauucaaga

SEQ ID NO: 4086073 - RNA, 18 nt, Variola virus
auggaugagaacacguau

SEQ ID NO: 4086074 - RNA, 14 nt, Variola virus
auggauuacgugau

SEQ ID NO: 4086075 - RNA, 13 nt, Variola virus
caagaaugauauc

SEQ ID NO: 4086076 - RNA, 17 nt, Variola virus
caagaguaacuauugac

SEQ ID NO: 4086077 - RNA, 23 nt, Variola virus
caagauccucucuuaaaugaauc

SEQ ID NO: 4086078 - RNA, 18 nt, Variola virus
caagauuuguagaagcau

SEQ ID NO: 4086079 - RNA, 17 nt, Variola virus
caagcuaggcuggaaac

SEQ ID NO: 4086080 - RNA, 20 nt, Variola virus
caaggaacuaaauagauuua

SEQ ID NO: 4086081 - RNA, 19 nt, Variola virus
caaggacagaaaaauguua

SEQ ID NO: 4086082 - RNA, 13 nt, Variola virus
caaggaucuucua

SEQ ID NO: 4086083 - RNA, 14 nt, Variola virus
caaguauacaauuu

SEQ ID NO: 4086084 - RNA, 17 nt, Variola virus
caagucaaagaaauacg

SEQ ID NO: 4086085 - RNA, 15 nt, Variola virus
caagucauuacuaau

SEQ ID NO: 4086086 - RNA, 16 nt, Variola virus
caaguuugagauuuca

SEQ ID NO: 4086087 - RNA, 19 nt, Variola virus
caaguuuggagaaauggag

SEQ ID NO: 4086088 - RNA, 19 nt, Variola virus
caaguuuucauaucaucuu

SEQ ID NO: 4086089 - RNA, 17 nt, Variola virus
caauaaacaaaauacuc

SEQ ID NO: 4086090 - RNA, 23 nt, Variola virus
caauaaauaugauuuuguaaagu

SEQ ID NO: 4086091 - RNA, 19 nt, Variola virus
caauaaaugcauuaguuua

SEQ ID NO: 4086092 - RNA, 17 nt, Variola virus
caauaauauuaugucua

SEQ ID NO: 4086093 - RNA, 20 nt, Variola virus
caauacauguuuuauaaaau

SEQ ID NO: 4086094 - RNA, 14 nt, Variola virus
caauagauagucua

SEQ ID NO: 4086095 - RNA, 18 nt, Variola virus
caauagaugauagaauau

SEQ ID NO: 4086096 - RNA, 16 nt, Variola virus
caauaguagcuauuac

SEQ ID NO: 4086097 - RNA, 17 nt, Variola virus
caauagugguaacgcua

SEQ ID NO: 4086098 - RNA, 22 nt, Variola virus
caauagugucuacuuaaaugua

SEQ ID NO: 4086099 - RNA, 14 nt, Variola virus
caauauaucaucua

SEQ ID NO: 4086100 - RNA, 19 nt, Variola virus
caauaugccacaccaucuu

SEQ ID NO: 4086101 - RNA, 17 nt, Variola virus
caauauuaauauuucua

SEQ ID NO: 4086102 - RNA, 18 nt, Variola virus
caaucaacggauaaucug

SEQ ID NO: 4086103 - RNA, 22 nt, Variola virus
caaucuuacagaaguucaugau

SEQ ID NO: 4086104 - RNA, 22 nt, Variola virus
caaucuuuuucuacgucaaauu

SEQ ID NO: 4086105 - RNA, 17 nt, Variola virus
caaugaacuaauauuua

SEQ ID NO: 4086106 - RNA, 14 nt, Variola virus
caaugaauuaacuu

SEQ ID NO: 4086107 - RNA, 23 nt, Variola virus
caaugaauuauggaauuguauau

SEQ ID NO: 4086108 - RNA, 19 nt, Variola virus
caaugacauggaaauaucu

SEQ ID NO: 4086109 - RNA, 16 nt, Variola virus
caaugacgaugauaug

SEQ ID NO: 4086110 - RNA, 15 nt, Variola virus
caaugagauaaauau

SEQ ID NO: 4086111 - RNA, 16 nt, Variola virus
caaugagauguaucau

SEQ ID NO: 4086112 - RNA, 18 nt, Variola virus
caauguacaccguguggu

SEQ ID NO: 4086113 - RNA, 18 nt, Variola virus
auagacuuguauaugcca

SEQ ID NO: 4086114 - RNA, 16 nt, Variola virus
auagaggauauuucau

SEQ ID NO: 4086115 - RNA, 17 nt, Variola virus
auagaguauaagaaauu

SEQ ID NO: 4086116 - RNA, 20 nt, Variola virus
auagaguuaaauucauauaa

SEQ ID NO: 4086117 - RNA, 14 nt, Variola virus
auagauagaacuac

SEQ ID NO: 4086118 - RNA, 21 nt, Variola virus
auagauauaauuaucacauau

SEQ ID NO: 4086119 - RNA, 15 nt, Variola virus
auagauaucaaaaua

SEQ ID NO: 4086120 - RNA, 15 nt, Variola virus
auagauucuugguaa

SEQ ID NO: 4086121 - RNA, 15 nt, Variola virus
auagcauaaaugcua

SEQ ID NO: 4086122 - RNA, 16 nt, Variola virus
auagcaugugaauaua

SEQ ID NO: 4086123 - RNA, 21 nt, Variola virus
auagcauuguuauguauuuca

SEQ ID NO: 4086124 - RNA, 18 nt, Variola virus
auagcauuguuauuagca

SEQ ID NO: 4086125 - RNA, 15 nt, Variola virus
auagccaaaagacua

SEQ ID NO: 4086126 - RNA, 18 nt, Variola virus
auagcuuccuucaaucua

SEQ ID NO: 4086127 - RNA, 15 nt, Variola virus
auaggaccauacauu

SEQ ID NO: 4086128 - RNA, 19 nt, Variola virus
auaggauuaacaacaaugu

SEQ ID NO: 4086129 - RNA, 15 nt, Variola virus
auagguaucaaagau

SEQ ID NO: 4086130 - RNA, 14 nt, Variola virus
auaggugaaaagau

SEQ ID NO: 4086131 - RNA, 23 nt, Variola virus
auagguguaaaucuagaaauuac

SEQ ID NO: 4086132 - RNA, 15 nt, Variola virus
auaguaaaaagacua

SEQ ID NO: 4086133 - RNA, 20 nt, Variola virus
auaguauacgcagaaaagau

SEQ ID NO: 4086134 - RNA, 13 nt, Variola virus
auaguaucaaacu

SEQ ID NO: 4086135 - RNA, 18 nt, Variola virus
auagugaaacaaaauaua

SEQ ID NO: 4086136 - RNA, 21 nt, Variola virus
auaguggauacgaagauacua

SEQ ID NO: 4086137 - RNA, 14 nt, Variola virus
auaguguauacaau

SEQ ID NO: 4086138 - RNA, 17 nt, Variola virus
auaguuaucuaucuuaa

SEQ ID NO: 4086139 - RNA, 19 nt, Variola virus
auaguuaucuaucuuaaag

SEQ ID NO: 4086140 - RNA, 18 nt, Variola virus
auaguuauuacuuuucuc

SEQ ID NO: 4086141 - RNA, 17 nt, Variola virus
auaguuccauuaucuaa

SEQ ID NO: 4086142 - RNA, 21 nt, Variola virus
auaguuccccauuucaaaaug

SEQ ID NO: 4086143 - RNA, 16 nt, Variola virus
auaguuuaucuuuccc

SEQ ID NO: 4086144 - RNA, 15 nt, Variola virus
auaguuucuauuuuu

SEQ ID NO: 4086145 - RNA, 12 nt, Variola virus
auauaaagaaau

SEQ ID NO: 4086146 - RNA, 12 nt, Variola virus
auauaaauacuu

SEQ ID NO: 4086147 - RNA, 16 nt, Variola virus
auauaaauuuaauaag

SEQ ID NO: 4086148 - RNA, 19 nt, Variola virus
auauaacaauaacauaacu

SEQ ID NO: 4086149 - RNA, 13 nt, Variola virus
auauaacauaggu

SEQ ID NO: 4086150 - RNA, 15 nt, Variola virus
auauaaguaguguaa

SEQ ID NO: 4086151 - RNA, 14 nt, Variola virus
auauaaucuagaca

SEQ ID NO: 4086152 - RNA, 15 nt, Variola virus
auauacaauaucacu

SEQ ID NO: 4086153 - RNA, 13 nt, Variola virus
auauacacauaau

SEQ ID NO: 4086154 - RNA, 20 nt, Variola virus
auauacauuuucaaauaaua

SEQ ID NO: 4086155 - RNA, 17 nt, Variola virus
auauaccgauauguaca

SEQ ID NO: 4086156 - RNA, 17 nt, Variola virus
auauaccgccucaaacu

SEQ ID NO: 4086157 - RNA, 21 nt, Variola virus
auauaccgccucaaacucuau

SEQ ID NO: 4086158 - RNA, 18 nt, Variola virus
auauaccuauuaauacau

SEQ ID NO: 4086159 - RNA, 14 nt, Variola virus
auauaccucauuaa

SEQ ID NO: 4086160 - RNA, 20 nt, Variola virus
auauacgaaauaaaauagac

SEQ ID NO: 4086161 - RNA, 20 nt, Variola virus
auauacuauucuugugauaa

SEQ ID NO: 4086162 - RNA, 22 nt, Variola virus
auauacucuaaucuuuaauaga

SEQ ID NO: 4086163 - RNA, 15 nt, Variola virus
auauacucuauuuca

SEQ ID NO: 4086164 - RNA, 21 nt, Variola virus
auauagaaccugaucuggaaa

SEQ ID NO: 4086165 - RNA, 14 nt, Variola virus
auauagacaaaaau

SEQ ID NO: 4086166 - RNA, 18 nt, Variola virus
auauagcuuuuauuucca

SEQ ID NO: 4086167 - RNA, 19 nt, Variola virus
auauagucuuguuaaacgu

SEQ ID NO: 4086168 - RNA, 14 nt, Variola virus
auauaguuuaaauu

SEQ ID NO: 4086169 - RNA, 11 nt, Variola virus
auauaguuuuu

SEQ ID NO: 4086170 - RNA, 13 nt, Variola virus
auauauaaugaau

SEQ ID NO: 4086171 - RNA, 13 nt, Variola virus
auauaucuaauaa

SEQ ID NO: 4086172 - RNA, 16 nt, Variola virus
auauaucuuauaucuc

SEQ ID NO: 4086173 - RNA, 20 nt, Variola virus
auauauuaauacacauaaug

SEQ ID NO: 4086174 - RNA, 15 nt, Variola virus
auauauuauauagau

SEQ ID NO: 4086175 - RNA, 20 nt, Variola virus
auauauuauuagagguauau

SEQ ID NO: 4086176 - RNA, 15 nt, Variola virus
auauauucgcauaua

SEQ ID NO: 4086177 - RNA, 16 nt, Variola virus
auauauuuauuuccag

SEQ ID NO: 4086178 - RNA, 18 nt, Variola virus
auauauuugaaaaucguu

SEQ ID NO: 4086179 - RNA, 20 nt, Variola virus
auaucaaacaauccaaaaaa

SEQ ID NO: 4086180 - RNA, 18 nt, Variola virus
auaucaaauacgcauaua

SEQ ID NO: 4086181 - RNA, 20 nt, Variola virus
auaucacaggggcaauguuu

SEQ ID NO: 4086182 - RNA, 14 nt, Variola virus
auaucaucaaaaua

SEQ ID NO: 4086183 - RNA, 16 nt, Variola virus
auaucaucgacaaaga

SEQ ID NO: 4086184 - RNA, 23 nt, Variola virus
auaucaugaugauuugguuguau

SEQ ID NO: 4086185 - RNA, 20 nt, Variola virus
auaucauuaaguucacuaga

SEQ ID NO: 4086186 - RNA, 23 nt, Variola virus
auaucauuaggauuuaacuccuu

SEQ ID NO: 4086187 - RNA, 21 nt, Variola virus
auaucauugaaugagauacua

SEQ ID NO: 4086188 - RNA, 16 nt, Variola virus
auauccagaauguuuc

SEQ ID NO: 4086189 - RNA, 13 nt, Variola virus
auauccaucacua

SEQ ID NO: 4086190 - RNA, 19 nt, Variola virus
auauccuccuuuaaaauua

SEQ ID NO: 4086191 - RNA, 19 nt, Variola virus
auauccucguucuaauugu

SEQ ID NO: 4086192 - RNA, 22 nt, Variola virus
auauccuuuagaguauuucuca

SEQ ID NO: 4086193 - RNA, 24 nt, Variola virus
auauccuuugcauucuauuuacca

SEQ ID NO: 4086194 - RNA, 20 nt, Variola virus
auaucggacgcagaaauugg

SEQ ID NO: 4086195 - RNA, 19 nt, Variola virus
auaucgguaccguuaaaga

SEQ ID NO: 4086196 - RNA, 16 nt, Variola virus
auaucuacuagaaaga

SEQ ID NO: 4086197 - RNA, 19 nt, Variola virus
auaucuacugauaaaacug

SEQ ID NO: 4086198 - RNA, 14 nt, Variola virus
auaucuagacacaa

SEQ ID NO: 4086199 - RNA, 15 nt, Variola virus
auaucuauaggaaag

SEQ ID NO: 4086200 - RNA, 14 nt, Variola virus
auaucuauguuuaa

SEQ ID NO: 4086201 - RNA, 16 nt, Variola virus
auaucuauucauaugc

SEQ ID NO: 4086202 - RNA, 18 nt, Variola virus
auaucugagcuaucuaga

SEQ ID NO: 4086203 - RNA, 18 nt, Variola virus
auaucugaguaugaugau

SEQ ID NO: 4086204 - RNA, 15 nt, Variola virus
auaucuuguucuaug

SEQ ID NO: 4086205 - RNA, 20 nt, Variola virus
auaucuuuacuaagaaaguu

SEQ ID NO: 4086206 - RNA, 16 nt, Variola virus
auaucuuugguguaaa

SEQ ID NO: 4086207 - RNA, 18 nt, Variola virus
auaugaaccugacaugau

SEQ ID NO: 4086208 - RNA, 20 nt, Variola virus
auaugacgcgcguucaacau

SEQ ID NO: 4086209 - RNA, 12 nt, Variola virus
auaugacuguau

SEQ ID NO: 4086210 - RNA, 19 nt, Variola virus
auaugcaaagaacaaaaua

SEQ ID NO: 4086211 - RNA, 23 nt, Variola virus
auaugccgugggaugaugucaaa

SEQ ID NO: 4086212 - RNA, 17 nt, Variola virus
auaugccuccagaaguu

SEQ ID NO: 4086213 - RNA, 15 nt, Variola virus
auaugcuacauguaa

SEQ ID NO: 4086214 - RNA, 14 nt, Variola virus
auaugcucuagaua

SEQ ID NO: 4086215 - RNA, 22 nt, Variola virus
auaugggauuuuacuuaauaua

SEQ ID NO: 4086216 - RNA, 18 nt, Variola virus
auauguagcaaacaugau

SEQ ID NO: 4086217 - RNA, 14 nt, Variola virus
auauguaucauaau

SEQ ID NO: 4086218 - RNA, 13 nt, Variola virus
auauguauuuccu

SEQ ID NO: 4086219 - RNA, 12 nt, Variola virus
auauguuaauaa

SEQ ID NO: 4086220 - RNA, 14 nt, Variola virus
auauguucguguau

SEQ ID NO: 4086221 - RNA, 21 nt, Variola virus
auauguuuuaauauuuacaag

SEQ ID NO: 4086222 - RNA, 18 nt, Variola virus
auauuaaaauucacacau

SEQ ID NO: 4086223 - RNA, 21 nt, Variola virus
auauuaacaaaagugaauaua

SEQ ID NO: 4086224 - RNA, 13 nt, Variola virus
auauuaaggagau

SEQ ID NO: 4086225 - RNA, 22 nt, Variola virus
auauuaaugcagggugcauauu

SEQ ID NO: 4086226 - RNA, 15 nt, Variola virus
auauuaaugucguau

SEQ ID NO: 4086227 - RNA, 15 nt, Variola virus
auauuacaaauacuu

SEQ ID NO: 4086228 - RNA, 15 nt, Variola virus
auauuacguaauaga

SEQ ID NO: 4086229 - RNA, 20 nt, Variola virus
auauuacuauuggcaauugu

SEQ ID NO: 4086230 - RNA, 15 nt, Variola virus
auauuauacaaaaua

SEQ ID NO: 4086231 - RNA, 20 nt, Variola virus
auauuauuacacauaaacau

SEQ ID NO: 4086232 - RNA, 17 nt, Variola virus
auauucaacauguuuaa

SEQ ID NO: 4086233 - RNA, 21 nt, Variola virus
auauucauuaauuuagauaga

SEQ ID NO: 4086234 - RNA, 15 nt, Variola virus
auauuccuagaauua

SEQ ID NO: 4086235 - RNA, 15 nt, Variola virus
auauucgaguucauu

SEQ ID NO: 4086236 - RNA, 19 nt, Variola virus
auauucuaacgauaauaga

SEQ ID NO: 4086237 - RNA, 14 nt, Variola virus
auauucuaugacug

SEQ ID NO: 4086238 - RNA, 20 nt, Variola virus
auauucucauggaaauauua

SEQ ID NO: 4086239 - RNA, 19 nt, Variola virus
caauguauauuuauacaga

SEQ ID NO: 4086240 - RNA, 14 nt, Variola virus
caauguuagaguau

SEQ ID NO: 4086241 - RNA, 11 nt, Variola virus
caauuaaugau

SEQ ID NO: 4086242 - RNA, 13 nt, Variola virus
caauuacaaaaac

SEQ ID NO: 4086243 - RNA, 21 nt, Variola virus
caauuacguggauuauaacau

SEQ ID NO: 4086244 - RNA, 22 nt, Variola virus
caauuaguagaguuuuauaacg

SEQ ID NO: 4086245 - RNA, 20 nt, Variola virus
caauuauaacaauuauaaca

SEQ ID NO: 4086246 - RNA, 18 nt, Variola virus
caauuauacuagaacuau

SEQ ID NO: 4086247 - RNA, 21 nt, Variola virus
caauucauuccuauaaguuua

SEQ ID NO: 4086248 - RNA, 13 nt, Variola virus
caauuccaaagau

SEQ ID NO: 4086249 - RNA, 22 nt, Variola virus
caauugguuaugauaucaugua

SEQ ID NO: 4086250 - RNA, 21 nt, Variola virus
caauuguauuauugauacaau

SEQ ID NO: 4086251 - RNA, 16 nt, Variola virus
caauugucuauacaag

SEQ ID NO: 4086252 - RNA, 19 nt, Variola virus
caauuguggacucacuaua

SEQ ID NO: 4086253 - RNA, 12 nt, Variola virus
caauuuacaaau

SEQ ID NO: 4086254 - RNA, 23 nt, Variola virus
caauuucauacgcuccucuuuug

SEQ ID NO: 4086255 - RNA, 18 nt, Variola virus
caauuuguauuauccaau

SEQ ID NO: 4086256 - RNA, 21 nt, Variola virus
caauuuuacccucaaucaugu

SEQ ID NO: 4086257 - RNA, 18 nt, Variola virus
caauuuuaucaucuucua

SEQ ID NO: 4086258 - RNA, 22 nt, Variola virus
caauuuucaguaccauuaucuu

SEQ ID NO: 4086259 - RNA, 21 nt, Variola virus
caauuuuguauuauucugaau

SEQ ID NO: 4086260 - RNA, 21 nt, Variola virus
cacaaagaauuuuagacacua

SEQ ID NO: 4086261 - RNA, 14 nt, Variola virus
cacaacuuaaugaa

SEQ ID NO: 4086262 - RNA, 17 nt, Variola virus
cacacacgauuaauuuu

SEQ ID NO: 4086263 - RNA, 20 nt, Variola virus
cacauagaccuccuccacca

SEQ ID NO: 4086264 - RNA, 11 nt, Variola virus
cacaucaucug

SEQ ID NO: 4086265 - RNA, 13 nt, Variola virus
cacaugaugauuu

SEQ ID NO: 4086266 - RNA, 23 nt, Variola virus
cacaugucacacaggauccauuu

SEQ ID NO: 4086267 - RNA, 16 nt, Variola virus
caccaagaaagcugua

SEQ ID NO: 4086268 - RNA, 20 nt, Variola virus
caccaucauaugacauuuca

SEQ ID NO: 4086269 - RNA, 18 nt, Variola virus
caccaucuucauaauaaa

SEQ ID NO: 4086270 - RNA, 15 nt, Variola virus
caccguaguguauau

SEQ ID NO: 4086271 - RNA, 19 nt, Variola virus
caccuuauccucagacaca

SEQ ID NO: 4086272 - RNA, 22 nt, Variola virus
cacgaccaaaucgauuacuaug

SEQ ID NO: 4086273 - RNA, 22 nt, Variola virus
cacguguagugggaacuauugc

SEQ ID NO: 4086274 - RNA, 20 nt, Variola virus
cacuaaaaugauuaaacaau

SEQ ID NO: 4086275 - RNA, 18 nt, Variola virus
cacuaacgcgcaugauuu

SEQ ID NO: 4086276 - RNA, 23 nt, Variola virus
cacuacaguaaguacaucaucug

SEQ ID NO: 4086277 - RNA, 12 nt, Variola virus
cacuacaucuuu

SEQ ID NO: 4086278 - RNA, 16 nt, Variola virus
cacuagguacaucauu

SEQ ID NO: 4086279 - RNA, 12 nt, Variola virus
cacuaucuucug

SEQ ID NO: 4086280 - RNA, 15 nt, Variola virus
cacucucgaaaucac

SEQ ID NO: 4086281 - RNA, 14 nt, Variola virus
cacugagaaacagc

SEQ ID NO: 4086282 - RNA, 15 nt, Variola virus
cacugucuaaaugua

SEQ ID NO: 4086283 - RNA, 23 nt, Variola virus
cacugucucauacacuacaguaa

SEQ ID NO: 4086284 - RNA, 20 nt, Variola virus
cacugucuggcaauaaauga

SEQ ID NO: 4086285 - RNA, 22 nt, Variola virus
cacuuagaacagauuuaacaau

SEQ ID NO: 4086286 - RNA, 21 nt, Variola virus
cacuucuucaacuaccaaaaa

SEQ ID NO: 4086287 - RNA, 15 nt, Variola virus
cacuuggauauugua

SEQ ID NO: 4086288 - RNA, 18 nt, Variola virus
cacuuuuuuauaaagaug

SEQ ID NO: 4086289 - RNA, 22 nt, Variola virus
cagaaagaggaucguacaucca

SEQ ID NO: 4086290 - RNA, 20 nt, Variola virus
cagaaccuguguuuauagug

SEQ ID NO: 4086291 - RNA, 22 nt, Variola virus
cagaagauagcaaagagaugau

SEQ ID NO: 4086292 - RNA, 15 nt, Variola virus
cagaaggaaacuucu

SEQ ID NO: 4086293 - RNA, 16 nt, Variola virus
cagaaggaaacuucuu

SEQ ID NO: 4086294 - RNA, 18 nt, Variola virus
cagaaucccuuuccaaag

SEQ ID NO: 4086295 - RNA, 15 nt, Variola virus
cagaauguuucaaag

SEQ ID NO: 4086296 - RNA, 20 nt, Variola virus
cagaauuguaacaacaaugu

SEQ ID NO: 4086297 - RNA, 18 nt, Variola virus
cagaauuucuacauaauu

SEQ ID NO: 4086298 - RNA, 15 nt, Variola virus
cagacaaaaugaaga

SEQ ID NO: 4086299 - RNA, 16 nt, Variola virus
cagacuauaccuagug

SEQ ID NO: 4086300 - RNA, 14 nt, Variola virus
cagagaaguauuuu

SEQ ID NO: 4086301 - RNA, 15 nt, Variola virus
cagagaccauguauu

SEQ ID NO: 4086302 - RNA, 15 nt, Variola virus
cagagcuugcucuau

SEQ ID NO: 4086303 - RNA, 19 nt, Variola virus
cagaggaacgccauauauu

SEQ ID NO: 4086304 - RNA, 14 nt, Variola virus
cagauaauaacaga

SEQ ID NO: 4086305 - RNA, 21 nt, Variola virus
cagauaauaaccuccugaaaa

SEQ ID NO: 4086306 - RNA, 19 nt, Variola virus
cagauaaucagccauaauu

SEQ ID NO: 4086307 - RNA, 17 nt, Variola virus
cagauaugguuaaauca

SEQ ID NO: 4086308 - RNA, 17 nt, Variola virus
cagaugcaccauauuua

SEQ ID NO: 4086309 - RNA, 17 nt, Variola virus
cagauguauaaguuuua

SEQ ID NO: 4086310 - RNA, 22 nt, Variola virus
cagauuaauaguuuuauuugaa

SEQ ID NO: 4086311 - RNA, 16 nt, Variola virus
cagauuauuuaacaau

SEQ ID NO: 4086312 - RNA, 16 nt, Variola virus
cagauucuuauauacc

SEQ ID NO: 4086313 - RNA, 23 nt, Variola virus
cagauuguugccguaaauccugc

SEQ ID NO: 4086314 - RNA, 22 nt, Variola virus
cagauuuaguauuaaacagauc

SEQ ID NO: 4086315 - RNA, 13 nt, Variola virus
cagccaacaaaua

SEQ ID NO: 4086316 - RNA, 16 nt, Variola virus
cagcgaacuugauauu

SEQ ID NO: 4086317 - RNA, 14 nt, Variola virus
cagcguaaaacaca

SEQ ID NO: 4086318 - RNA, 20 nt, Variola virus
cagcuauaugcaacuauaaa

SEQ ID NO: 4086319 - RNA, 22 nt, Variola virus
cagcuucccucuauacucucau

SEQ ID NO: 4086320 - RNA, 16 nt, Variola virus
aaacaacuaaacagua

SEQ ID NO: 4086321 - RNA, 23 nt, Variola virus
aaacaacugaagaaaauucucca

SEQ ID NO: 4086322 - RNA, 17 nt, Variola virus
aaacaauacagugauug

SEQ ID NO: 4086323 - RNA, 14 nt, Variola virus
aaacaauacucuac

SEQ ID NO: 4086324 - RNA, 19 nt, Variola virus
aaacaauacucuacuauua

SEQ ID NO: 4086325 - RNA, 17 nt, Variola virus
aaacaccuauggagaag

SEQ ID NO: 4086326 - RNA, 13 nt, Variola virus
aaacacgauguuu

SEQ ID NO: 4086327 - RNA, 14 nt, Variola virus
aaacagauaaugau

SEQ ID NO: 4086328 - RNA, 17 nt, Variola virus
aaacagucuuuaaguuc

SEQ ID NO: 4086329 - RNA, 15 nt, Variola virus
aaacauauauggucu

SEQ ID NO: 4086330 - RNA, 20 nt, Variola virus
aaacaucguuaucagauaac

SEQ ID NO: 4086331 - RNA, 14 nt, Variola virus
aaacauucauguac

SEQ ID NO: 4086332 - RNA, 21 nt, Variola virus
aaaccaacgaggaggaauauc

SEQ ID NO: 4086333 - RNA, 19 nt, Variola virus
aaaccaggcgaguguagaa

SEQ ID NO: 4086334 - RNA, 23 nt, Variola virus
aaaccaucuuacuuaaaauaugu

SEQ ID NO: 4086335 - RNA, 22 nt, Variola virus
aaaccauguugugaaagaguuu

SEQ ID NO: 4086336 - RNA, 16 nt, Variola virus
aaacgaauagaauaua

SEQ ID NO: 4086337 - RNA, 20 nt, Variola virus
aaacgacauugucagaaauu

SEQ ID NO: 4086338 - RNA, 14 nt, Variola virus
aaacggauaugucu

SEQ ID NO: 4086339 - RNA, 19 nt, Variola virus
aaacggauuaauauauguc

SEQ ID NO: 4086340 - RNA, 18 nt, Variola virus
aaacuaauuuuagcagaa

SEQ ID NO: 4086341 - RNA, 13 nt, Variola virus
aaacuagauacaa

SEQ ID NO: 4086342 - RNA, 17 nt, Variola virus
aaacuauaaaacagaua

SEQ ID NO: 4086343 - RNA, 12 nt, Variola virus
aaacuauacgaa

SEQ ID NO: 4086344 - RNA, 18 nt, Variola virus
aaacuaucugauguagga

SEQ ID NO: 4086345 - RNA, 23 nt, Variola virus
aaacuaugucaaaaauuguagaa

SEQ ID NO: 4086346 - RNA, 16 nt, Variola virus
aaacuccaacgagaua

SEQ ID NO: 4086347 - RNA, 20 nt, Variola virus
aaacucgcuuaauaucuucu

SEQ ID NO: 4086348 - RNA, 21 nt, Variola virus
aaacucgucuccccaaacauu

SEQ ID NO: 4086349 - RNA, 19 nt, Variola virus
aaacuuagaaccaaaugau

SEQ ID NO: 4086350 - RNA, 11 nt, Variola virus
aaacuuuaucu

SEQ ID NO: 4086351 - RNA, 14 nt, Variola virus
aaacuuuuuagaaa

SEQ ID NO: 4086352 - RNA, 24 nt, Variola virus
aaagaacggagaauaucuauacau

SEQ ID NO: 4086353 - RNA, 14 nt, Variola virus
aaagaaguauacua

SEQ ID NO: 4086354 - RNA, 15 nt, Variola virus
aaagacaucauauau

SEQ ID NO: 4086355 - RNA, 13 nt, Variola virus
aaagagacuacaa

SEQ ID NO: 4086356 - RNA, 16 nt, Variola virus
aaagaggaucguacau

SEQ ID NO: 4086357 - RNA, 14 nt, Variola virus
aaagaguuugugaa

SEQ ID NO: 4086358 - RNA, 18 nt, Variola virus
aaagauaauacauuuucu

SEQ ID NO: 4086359 - RNA, 14 nt, Variola virus
aaagauagaaauga

SEQ ID NO: 4086360 - RNA, 15 nt, Variola virus
aaagauauuccaaga

SEQ ID NO: 4086361 - RNA, 22 nt, Variola virus
ccaauaauguauagacaauuau

SEQ ID NO: 4086362 - RNA, 12 nt, Variola virus
ccaauacauguu

SEQ ID NO: 4086363 - RNA, 20 nt, Variola virus
ccaauauauaucaugaucuu

SEQ ID NO: 4086364 - RNA, 20 nt, Variola virus
ccaaucaacgaauuaaugau

SEQ ID NO: 4086365 - RNA, 15 nt, Variola virus
ccaaugaguaaaauc

SEQ ID NO: 4086366 - RNA, 17 nt, Variola virus
ccaauuacaaaaacuac

SEQ ID NO: 4086367 - RNA, 20 nt, Variola virus
ccacaaauugcauauuugga

SEQ ID NO: 4086368 - RNA, 22 nt, Variola virus
ccacuagaagagaauacacaug

SEQ ID NO: 4086369 - RNA, 20 nt, Variola virus
ccacugagaugacuggaaau

SEQ ID NO: 4086370 - RNA, 12 nt, Variola virus
ccacuuaaauau

SEQ ID NO: 4086371 - RNA, 22 nt, Variola virus
ccagaaaacgacgaagagcaaa

SEQ ID NO: 4086372 - RNA, 21 nt, Variola virus
ccagaguauuuguacacaucu

SEQ ID NO: 4086373 - RNA, 15 nt, Variola virus
ccagcauuaacugau

SEQ ID NO: 4086374 - RNA, 14 nt, Variola virus
ccaggcuauguuuc

SEQ ID NO: 4086375 - RNA, 16 nt, Variola virus
ccaguguauaaacgca

SEQ ID NO: 4086376 - RNA, 15 nt, Variola virus
ccaguuauguucaac

SEQ ID NO: 4086377 - RNA, 14 nt, Variola virus
ccaguuccuuuucu

SEQ ID NO: 4086378 - RNA, 15 nt, Variola virus
ccauaauuuucucuc

SEQ ID NO: 4086379 - RNA, 14 nt, Variola virus
ccauacuaacugau

SEQ ID NO: 4086380 - RNA, 21 nt, Variola virus
ccauagucuucaauaauucua

SEQ ID NO: 4086381 - RNA, 15 nt, Variola virus
ccauaguuuuucuac

SEQ ID NO: 4086382 - RNA, 17 nt, Variola virus
ccauauauccaauaaag

SEQ ID NO: 4086383 - RNA, 14 nt, Variola virus
ccauauuuuuugca

SEQ ID NO: 4086384 - RNA, 15 nt, Variola virus
ccaucaaauuguuua

SEQ ID NO: 4086385 - RNA, 21 nt, Variola virus
ccauccauugcguugaaugau

SEQ ID NO: 4086386 - RNA, 23 nt, Variola virus
ccauccauuuuaugcgauguuua

SEQ ID NO: 4086387 - RNA, 21 nt, Variola virus
ccaucguaauacccauguuua

SEQ ID NO: 4086388 - RNA, 17 nt, Variola virus
ccaucuccuuauuuuua

SEQ ID NO: 4086389 - RNA, 16 nt, Variola virus
ccaucugguuuaauau

SEQ ID NO: 4086390 - RNA, 18 nt, Variola virus
ccaucugucauauuuaga

SEQ ID NO: 4086391 - RNA, 21 nt, Variola virus
ccaucuuuaggcauaaacgau

SEQ ID NO: 4086392 - RNA, 17 nt, Variola virus
ccaugaaacgaacacua

SEQ ID NO: 4086393 - RNA, 17 nt, Variola virus
ccaugcaacauuuccua

SEQ ID NO: 4086394 - RNA, 21 nt, Variola virus
ccaugucaaauagaguuuaua

SEQ ID NO: 4086395 - RNA, 22 nt, Variola virus
ccaugucugaaacgagacgcua

SEQ ID NO: 4086396 - RNA, 15 nt, Variola virus
ccauuaaucacugau

SEQ ID NO: 4086397 - RNA, 19 nt, Variola virus
ccauuauuucuauauuuga

SEQ ID NO: 4086398 - RNA, 16 nt, Variola virus
ccauucuaauacuuua

SEQ ID NO: 4086399 - RNA, 18 nt, Variola virus
ccauugcuagucacuuua

SEQ ID NO: 4086400 - RNA, 12 nt, Variola virus
ccauuuaaauau

SEQ ID NO: 4086401 - RNA, 12 nt, Variola virus
ccauuuuagaga

SEQ ID NO: 4086402 - RNA, 22 nt, Variola virus
cccaauagaauaguauucucag

SEQ ID NO: 4086403 - RNA, 13 nt, Variola virus
cccaccaaucaac

SEQ ID NO: 4086404 - RNA, 16 nt, Variola virus
cccacugaugagaugu

SEQ ID NO: 4086405 - RNA, 22 nt, Variola virus
cccauuuuuugcuuucuguauc

SEQ ID NO: 4086406 - RNA, 23 nt, Variola virus
cccccguauuuacauuaaaugua

SEQ ID NO: 4086407 - RNA, 19 nt, Variola virus
cccggguacguggauauca

SEQ ID NO: 4086408 - RNA, 21 nt, Variola virus
ccgaaauugaccgagaaagaa

SEQ ID NO: 4086409 - RNA, 22 nt, Variola virus
ccggaagaucgcuauuguauuu

SEQ ID NO: 4086410 - RNA, 20 nt, Variola virus
ccggacgacauauuaaucuu

SEQ ID NO: 4086411 - RNA, 18 nt, Variola virus
ccggaguaauugauuaua

SEQ ID NO: 4086412 - RNA, 15 nt, Variola virus
ccgucuuuaucucuu

SEQ ID NO: 4086413 - RNA, 23 nt, Variola virus
ccguuuuguucuuggauuucaua

SEQ ID NO: 4086414 - RNA, 13 nt, Variola virus
ccuaauauaacag

SEQ ID NO: 4086415 - RNA, 17 nt, Variola virus
uguuauaagauuacuua

SEQ ID NO: 4086416 - RNA, 22 nt, Variola virus
uguuauacacggucuagagcau

SEQ ID NO: 4086417 - RNA, 12 nt, Variola virus
uguuauauacau

SEQ ID NO: 4086418 - RNA, 12 nt, Variola virus
uguuauauguaa

SEQ ID NO: 4086419 - RNA, 22 nt, Variola virus
uguuaucaugaaauguuugaua

SEQ ID NO: 4086420 - RNA, 22 nt, Variola virus
uguuauguauuucauuguucau

SEQ ID NO: 4086421 - RNA, 19 nt, Variola virus
uguuauuuccuuguuuuua

SEQ ID NO: 4086422 - RNA, 21 nt, Variola virus
uguucaaaaauuuagaaugau

SEQ ID NO: 4086423 - RNA, 22 nt, Variola virus
uguucaagaauauacaaguauu

SEQ ID NO: 4086424 - RNA, 20 nt, Variola virus
uguucacaaaaauacauaaa

SEQ ID NO: 4086425 - RNA, 20 nt, Variola virus
uguucccgucaauagagcaa

SEQ ID NO: 4086426 - RNA, 13 nt, Variola virus
uguucgaggauau

SEQ ID NO: 4086427 - RNA, 17 nt, Variola virus
uguucgucugucaugau

SEQ ID NO: 4086428 - RNA, 17 nt, Variola virus
uguucuaaccuaucaac

SEQ ID NO: 4086429 - RNA, 15 nt, Variola virus
uguugauaaaaugca

SEQ ID NO: 4086430 - RNA, 22 nt, Variola virus
uguugguggcauugucuaaaac

SEQ ID NO: 4086431 - RNA, 17 nt, Variola virus
uguuguaaacacauauu

SEQ ID NO: 4086432 - RNA, 19 nt, Variola virus
uguuuacggagacaaaauu

SEQ ID NO: 4086433 - RNA, 23 nt, Variola virus
uguuuaucgcacgcguuuggauc

SEQ ID NO: 4086434 - RNA, 17 nt, Variola virus
uguuuaucuauacuauu

SEQ ID NO: 4086435 - RNA, 15 nt, Variola virus
uguuuguucauugga

SEQ ID NO: 4086436 - RNA, 17 nt, Variola virus
uguuuucaccaugacuu

SEQ ID NO: 4086437 - RNA, 13 nt, Variola virus
uguuuucaucauu

SEQ ID NO: 4086438 - RNA, 14 nt, Variola virus
uguuuucaucauuu

SEQ ID NO: 4086439 - RNA, 19 nt, Variola virus
uguuuucaucauuucacaa

SEQ ID NO: 4086440 - RNA, 22 nt, Variola virus
uguuuugaauuucuuagucaua

SEQ ID NO: 4086441 - RNA, 13 nt, Variola virus
uguuuuuguacau

SEQ ID NO: 4086442 - RNA, 14 nt, Variola virus
uguuuuuuaucaua

SEQ ID NO: 4086443 - RNA, 15 nt, Variola virus
uuaaaaacaaacuuu

SEQ ID NO: 4086444 - RNA, 23 nt, Variola virus
uuaaaaacaaacuuuuuauccuu

SEQ ID NO: 4086445 - RNA, 21 nt, Variola virus
uuaaaaauaagaaugaaauaa

SEQ ID NO: 4086446 - RNA, 11 nt, Variola virus
uuaaaacauuc

SEQ ID NO: 4086447 - RNA, 15 nt, Variola virus
uuaaaacguccucua

SEQ ID NO: 4086448 - RNA, 12 nt, Variola virus
uuaaaauaucua

SEQ ID NO: 4086449 - RNA, 17 nt, Variola virus
uuaaaauauuauuuaga

SEQ ID NO: 4086450 - RNA, 15 nt, Variola virus
uuaaaauuauuaaac

SEQ ID NO: 4086451 - RNA, 14 nt, Variola virus
uuaaacuguaucga

SEQ ID NO: 4086452 - RNA, 13 nt, Variola virus
uuaaacuuauucu

SEQ ID NO: 4086453 - RNA, 18 nt, Variola virus
uuaaagucuucuauuucu

SEQ ID NO: 4086454 - RNA, 22 nt, Variola virus
uuaaauaacccaaguauugaaa

SEQ ID NO: 4086455 - RNA, 14 nt, Variola virus
uuaaauaucauaau

SEQ ID NO: 4086456 - RNA, 15 nt, Variola virus
uuaaauaucugugaa

SEQ ID NO: 4086457 - RNA, 13 nt, Variola virus
uuaaauccuuaau

SEQ ID NO: 4086458 - RNA, 23 nt, Variola virus
uuaaaugaguguccauauuuugc

SEQ ID NO: 4086459 - RNA, 16 nt, Variola virus
uuaaaugccuuauucu

SEQ ID NO: 4086460 - RNA, 11 nt, Variola virus
uuaaauuauug

SEQ ID NO: 4086461 - RNA, 16 nt, Variola virus
uuaacaaaguuauuca

SEQ ID NO: 4086462 - RNA, 17 nt, Variola virus
uuaacaauuccuuuuuu

SEQ ID NO: 4086463 - RNA, 20 nt, Variola virus
uuaacacguugucuuucaag

SEQ ID NO: 4086464 - RNA, 22 nt, Variola virus
uuaacacuauacuuauauuaau

SEQ ID NO: 4086465 - RNA, 21 nt, Variola virus
uuaacauguguauuacaugca

SEQ ID NO: 4086466 - RNA, 15 nt, Variola virus
uuaaccgauaauaga

SEQ ID NO: 4086467 - RNA, 18 nt, Variola virus
uuaacgaguucaaauaug

SEQ ID NO: 4086468 - RNA, 22 nt, Variola virus
uuaacguaucgcauuaauacug

SEQ ID NO: 4086469 - RNA, 13 nt, Variola virus
uuaacuauuuuag

SEQ ID NO: 4086470 - RNA, 22 nt, Variola virus
uuaacucauugcuuucuagaau

SEQ ID NO: 4086471 - RNA, 13 nt, Variola virus
uuaacuugacauu

SEQ ID NO: 4086472 - RNA, 17 nt, Variola virus
uuaagcauauucuuaau

SEQ ID NO: 4086473 - RNA, 22 nt, Variola virus
uuaagcauauucuuaauauuag

SEQ ID NO: 4086474 - RNA, 19 nt, Variola virus
uuaauaaaaauaauauuca

SEQ ID NO: 4086475 - RNA, 23 nt, Variola virus
uuaauaaacacggguucgucuuu

SEQ ID NO: 4086476 - RNA, 17 nt, Variola virus
uuaauaaaguaugaaca

SEQ ID NO: 4086477 - RNA, 22 nt, Variola virus
uuaauaaauccggaacuguaaa

SEQ ID NO: 4086478 - RNA, 13 nt, Variola virus
uuaauaauuguua

SEQ ID NO: 4086479 - RNA, 14 nt, Variola virus
uuaauacauuauua

SEQ ID NO: 4086480 - RNA, 15 nt, Variola virus
uuaauagaacucuuu

SEQ ID NO: 4086481 - RNA, 23 nt, Variola virus
uuaauagggauuugauguacgua

SEQ ID NO: 4086482 - RNA, 21 nt, Variola virus
uuaauagugcgaaaucauuca

SEQ ID NO: 4086483 - RNA, 13 nt, Variola virus
uuaauauauguca

SEQ ID NO: 4086484 - RNA, 15 nt, Variola virus
uuaauaucuauauau

SEQ ID NO: 4086485 - RNA, 22 nt, Variola virus
uuaauauuaaaaauacaucugu

SEQ ID NO: 4086486 - RNA, 15 nt, Variola virus
uuaauauuagaguua

SEQ ID NO: 4086487 - RNA, 14 nt, Variola virus
uuaaucaauguaca

SEQ ID NO: 4086488 - RNA, 14 nt, Variola virus
uuaauccaaauaug

SEQ ID NO: 4086489 - RNA, 13 nt, Variola virus
uuaaucuuauuca

SEQ ID NO: 4086490 - RNA, 22 nt, Variola virus
uuaaucuuggcuccauacugua

SEQ ID NO: 4086491 - RNA, 21 nt, Variola virus
uuaaugccgauuuaauacguu

SEQ ID NO: 4086492 - RNA, 16 nt, Variola virus
uuaaugcuacagauau

SEQ ID NO: 4086493 - RNA, 15 nt, Variola virus
uuaauguuuuaaauu

SEQ ID NO: 4086494 - RNA, 19 nt, Variola virus
uuaauucguucgaugagua

SEQ ID NO: 4086495 - RNA, 19 nt, Variola virus
uuaauuguuauuuuauuca

SEQ ID NO: 4086496 - RNA, 15 nt, Variola virus
uuaauuuauuauuga

SEQ ID NO: 4086497 - RNA, 15 nt, Variola virus
uuaauuucuuuggua

SEQ ID NO: 4086498 - RNA, 19 nt, Variola virus
uuaauuuggucauucuuaa

SEQ ID NO: 4086499 - RNA, 15 nt, Variola virus
uuaauuuuuuaaauu

SEQ ID NO: 4086500 - RNA, 16 nt, Variola virus
uuacaaaauucaucaa

SEQ ID NO: 4086501 - RNA, 12 nt, Variola virus
uuacaaaucuag

SEQ ID NO: 4086502 - RNA, 14 nt, Variola virus
uuacaacauaauaa

SEQ ID NO: 4086503 - RNA, 21 nt, Variola virus
uuacaagauaucucuggauau

SEQ ID NO: 4086504 - RNA, 14 nt, Variola virus
uuacaauacauaga

SEQ ID NO: 4086505 - RNA, 20 nt, Variola virus
uuacaauauauguaaucauu

SEQ ID NO: 4086506 - RNA, 14 nt, Variola virus
uuacaaucaauaau

SEQ ID NO: 4086507 - RNA, 19 nt, Variola virus
uuacaauguagaaauuaga

SEQ ID NO: 4086508 - RNA, 22 nt, Variola virus
uuacacuacauuuuuaucauaa

SEQ ID NO: 4086509 - RNA, 17 nt, Variola virus
uuacauaaaugaaaaga

SEQ ID NO: 4086510 - RNA, 22 nt, Variola virus
uuacauaggcaacaucagaaac

SEQ ID NO: 4086511 - RNA, 16 nt, Variola virus
uuacaucuaguucuuu

SEQ ID NO: 4086512 - RNA, 12 nt, Variola virus
uuacaugugauu

SEQ ID NO: 4086513 - RNA, 15 nt, Variola virus
uuacauucucauuaa

SEQ ID NO: 4086514 - RNA, 16 nt, Variola virus
uuacauucucauuaau

SEQ ID NO: 4086515 - RNA, 9 nt, Variola virus
uuaccaucg

SEQ ID NO: 4086516 - RNA, 23 nt, Variola virus
uuacggauaucuaauaauauuag

SEQ ID NO: 4086517 - RNA, 21 nt, Variola virus
uuacggcugcguuaaacauuc

SEQ ID NO: 4086518 - RNA, 17 nt, Variola virus
uuacuacauucauuaau

SEQ ID NO: 4086519 - RNA, 16 nt, Variola virus
uuacucgguuaccauu

SEQ ID NO: 4086520 - RNA, 20 nt, Variola virus
uuacucuuggucuaauacug

SEQ ID NO: 4086521 - RNA, 21 nt, Variola virus
uuacuuugacaaauguaguaa

SEQ ID NO: 4086522 - RNA, 13 nt, Variola virus
uuacuuuuggaau

SEQ ID NO: 4086523 - RNA, 9 nt, Variola virus
uuagaaaaa

SEQ ID NO: 4086524 - RNA, 20 nt, Variola virus
uuagaaauuggucuguguua

SEQ ID NO: 4086525 - RNA, 17 nt, Variola virus
uuagaagagucauuaaa

SEQ ID NO: 4086526 - RNA, 16 nt, Variola virus
uuagaagauaaugaau

SEQ ID NO: 4086527 - RNA, 17 nt, Variola virus
uuagaauagucucuuua

SEQ ID NO: 4086528 - RNA, 18 nt, Variola virus
uuagacaugaauguggua

SEQ ID NO: 4086529 - RNA, 18 nt, Variola virus
uuagacguaguucguaaa

SEQ ID NO: 4086530 - RNA, 20 nt, Variola virus
uuagagaugaugcggaauca

SEQ ID NO: 4086531 - RNA, 21 nt, Variola virus
uuagaggaacauuaaacaucg

SEQ ID NO: 4086532 - RNA, 12 nt, Variola virus
uuagaguauaaa

SEQ ID NO: 4086533 - RNA, 17 nt, Variola virus
uuagauaaaugcgguaa

SEQ ID NO: 4086534 - RNA, 20 nt, Variola virus
uuagauaaauggaauacuaa

SEQ ID NO: 4086535 - RNA, 17 nt, Variola virus
uuagauaauugugguaa

SEQ ID NO: 4086536 - RNA, 15 nt, Variola virus
uuagaugaauuauua

SEQ ID NO: 4086537 - RNA, 19 nt, Variola virus
uuagauuaguuaauacagg

SEQ ID NO: 4086538 - RNA, 16 nt, Variola virus
uuagcaauuucugauu

SEQ ID NO: 4086539 - RNA, 21 nt, Variola virus
gucuguaacucugauaaucuc

SEQ ID NO: 4086540 - RNA, 23 nt, Variola virus
gucuguauaguaacuauguaaau

SEQ ID NO: 4086541 - RNA, 19 nt, Variola virus
gucuucuaaaaauaaaagu

SEQ ID NO: 4086542 - RNA, 17 nt, Variola virus
gucuuuaaguauauacg

SEQ ID NO: 4086543 - RNA, 13 nt, Variola virus
gucuuuacagauu

SEQ ID NO: 4086544 - RNA, 15 nt, Variola virus
gugaagaauggaaac

SEQ ID NO: 4086545 - RNA, 14 nt, Variola virus
gugaaucuguucaa

SEQ ID NO: 4086546 - RNA, 21 nt, Variola virus
gugaauguauucacuuaacaa

SEQ ID NO: 4086547 - RNA, 15 nt, Variola virus
gugaauuuagaaaau

SEQ ID NO: 4086548 - RNA, 18 nt, Variola virus
gugacagauauacaaaac

SEQ ID NO: 4086549 - RNA, 19 nt, Variola virus
gugaguacggauuaaacau

SEQ ID NO: 4086550 - RNA, 21 nt, Variola virus
gugauagauaugauaaacaaa

SEQ ID NO: 4086551 - RNA, 13 nt, Variola virus
gugauaguuuaua

SEQ ID NO: 4086552 - RNA, 16 nt, Variola virus
gugauauuaucuucau

SEQ ID NO: 4086553 - RNA, 12 nt, Variola virus
gugauuaaacau

SEQ ID NO: 4086554 - RNA, 13 nt, Variola virus
gugauuguauguu

SEQ ID NO: 4086555 - RNA, 15 nt, Variola virus
gugcaguauuagaau

SEQ ID NO: 4086556 - RNA, 12 nt, Variola virus
gugcuacaaaac

SEQ ID NO: 4086557 - RNA, 20 nt, Variola virus
gugcuuguaucgaaaaacuu

SEQ ID NO: 4086558 - RNA, 22 nt, Variola virus
gugguaaguuauacacuaaaag

SEQ ID NO: 4086559 - RNA, 18 nt, Variola virus
gugguuagcauauaccuc

SEQ ID NO: 4086560 - RNA, 15 nt, Variola virus
guguauaacaucuuu

SEQ ID NO: 4086561 - RNA, 23 nt, Variola virus
guguauacaccaacuguaugaaa

SEQ ID NO: 4086562 - RNA, 17 nt, Variola virus
guguauuguucaaauca

SEQ ID NO: 4086563 - RNA, 13 nt, Variola virus
guguccauuuuua

SEQ ID NO: 4086564 - RNA, 19 nt, Variola virus
guguccguauaccaacaug

SEQ ID NO: 4086565 - RNA, 16 nt, Variola virus
guguuaucuuagauau

SEQ ID NO: 4086566 - RNA, 22 nt, Variola virus
guguucauccaaggaucuucua

SEQ ID NO: 4086567 - RNA, 19 nt, Variola virus
guguuuuauuaaucaauca

SEQ ID NO: 4086568 - RNA, 16 nt, Variola virus
guuaaaacuacaaaaa

SEQ ID NO: 4086569 - RNA, 15 nt, Variola virus
guuaaaguaaucauu

SEQ ID NO: 4086570 - RNA, 17 nt, Variola virus
guuaaauaaauccuuca

SEQ ID NO: 4086571 - RNA, 20 nt, Variola virus
guuaaauguugguauaucaa

SEQ ID NO: 4086572 - RNA, 11 nt, Variola virus
guuaaauuaau

SEQ ID NO: 4086573 - RNA, 15 nt, Variola virus
guuaagcauauccug

SEQ ID NO: 4086574 - RNA, 21 nt, Variola virus
guuaaggucuuccauuuaaau

SEQ ID NO: 4086575 - RNA, 14 nt, Variola virus
guuaaguuacucau

SEQ ID NO: 4086576 - RNA, 23 nt, Variola virus
guuaauaacugccggauaaaagu

SEQ ID NO: 4086577 - RNA, 11 nt, Variola virus
guuaauaaucu

SEQ ID NO: 4086578 - RNA, 12 nt, Variola virus
guuaauaaucuc

SEQ ID NO: 4086579 - RNA, 16 nt, Variola virus
guuaauaguaaaugaa

SEQ ID NO: 4086580 - RNA, 19 nt, Variola virus
guuaaugcaucuaaaacaa

SEQ ID NO: 4086581 - RNA, 17 nt, Variola virus
guuacauguuuaaauaa

SEQ ID NO: 4086582 - RNA, 18 nt, Variola virus
guuacauuuauacuucuu

SEQ ID NO: 4086583 - RNA, 17 nt, Variola virus
guuacguuuauaaacga

SEQ ID NO: 4086584 - RNA, 10 nt, Variola virus
guuagaaaag

SEQ ID NO: 4086585 - RNA, 19 nt, Variola virus
guuagaugauuauaaagga

SEQ ID NO: 4086586 - RNA, 17 nt, Variola virus
guuagcaauuucaaaau

SEQ ID NO: 4086587 - RNA, 15 nt, Variola virus
guuaguaaucaugua

SEQ ID NO: 4086588 - RNA, 17 nt, Variola virus
guuaguacuacugaaga

SEQ ID NO: 4086589 - RNA, 17 nt, Variola virus
guuagugaugaauaucu

SEQ ID NO: 4086590 - RNA, 14 nt, Variola virus
guuauaaucaaaga

SEQ ID NO: 4086591 - RNA, 19 nt, Variola virus
guuauacgucauuucaucu

SEQ ID NO: 4086592 - RNA, 14 nt, Variola virus
guuauauaauuauc

SEQ ID NO: 4086593 - RNA, 21 nt, Variola virus
guuauaucacaugaugauuua

SEQ ID NO: 4086594 - RNA, 18 nt, Variola virus
guuauauuauuagauauc

SEQ ID NO: 4086595 - RNA, 18 nt, Variola virus
guuaucaugaaauguuug

SEQ ID NO: 4086596 - RNA, 13 nt, Variola virus
guuauuaaauguu

SEQ ID NO: 4086597 - RNA, 15 nt, Variola virus
guuauuaucaucauu

SEQ ID NO: 4086598 - RNA, 18 nt, Variola virus
guuauuuauguugcuaaa

SEQ ID NO: 4086599 - RNA, 20 nt, Variola virus
guuauuuuguuuuauucaaa

SEQ ID NO: 4086600 - RNA, 16 nt, Variola virus
guucaaaaauaaacga

SEQ ID NO: 4086601 - RNA, 14 nt, Variola virus
guucaaauauauga

SEQ ID NO: 4086602 - RNA, 21 nt, Variola virus
guucaaaugccacaucaaaga

SEQ ID NO: 4086603 - RNA, 19 nt, Variola virus
guucacguaaauacaaaac

SEQ ID NO: 4086604 - RNA, 18 nt, Variola virus
guucaucauauaaucauc

SEQ ID NO: 4086605 - RNA, 19 nt, Variola virus
guucauccuuguucaucau

SEQ ID NO: 4086606 - RNA, 21 nt, Variola virus
guucauuaaaaacaaacuuuu

SEQ ID NO: 4086607 - RNA, 14 nt, Variola virus
guuccaacaucaua

SEQ ID NO: 4086608 - RNA, 20 nt, Variola virus
guuccaauagguaucaaaga

SEQ ID NO: 4086609 - RNA, 18 nt, Variola virus
guuccguaucuguauuua

SEQ ID NO: 4086610 - RNA, 19 nt, Variola virus
guuccguguguaauaaccu

SEQ ID NO: 4086611 - RNA, 19 nt, Variola virus
guuccuguagauaauaacu

SEQ ID NO: 4086612 - RNA, 22 nt, Variola virus
guucgaggauaucauccaaaac

SEQ ID NO: 4086613 - RNA, 13 nt, Variola virus
guucguaaacgaa

SEQ ID NO: 4086614 - RNA, 17 nt, Variola virus
guucguaaauaauaacu

SEQ ID NO: 4086615 - RNA, 13 nt, Variola virus
guucguucuggga

SEQ ID NO: 4086616 - RNA, 13 nt, Variola virus
guucuaacaucau

SEQ ID NO: 4086617 - RNA, 20 nt, Variola virus
guucuaaugccgaucuuuga

SEQ ID NO: 4086618 - RNA, 19 nt, Variola virus
guucuacauaaaacaucau

SEQ ID NO: 4086619 - RNA, 21 nt, Variola virus
guucuagcccucuucaagaac

SEQ ID NO: 4086620 - RNA, 21 nt, Variola virus
guucuaucuucuaaaaaaucu

SEQ ID NO: 4086621 - RNA, 16 nt, Variola virus
guucucaauacaccaa

SEQ ID NO: 4086622 - RNA, 18 nt, Variola virus
guucucaauauuacuuuu

SEQ ID NO: 4086623 - RNA, 19 nt, Variola virus
guucugauuuuaucuuuua

SEQ ID NO: 4086624 - RNA, 19 nt, Variola virus
guucuucgcagaugaugau

SEQ ID NO: 4086625 - RNA, 22 nt, Variola virus
guugaaucaacauauagaaaag

SEQ ID NO: 4086626 - RNA, 21 nt, Variola virus
guugauaauaucuauauauga

SEQ ID NO: 4086627 - RNA, 13 nt, Variola virus
guugauaaucauc

SEQ ID NO: 4086628 - RNA, 22 nt, Variola virus
guugaugaggcacauaauaucu

SEQ ID NO: 4086629 - RNA, 16 nt, Variola virus
guugauuacucuuuuu

SEQ ID NO: 4086630 - RNA, 21 nt, Variola virus
guugcaauaauaaaaguuauc

SEQ ID NO: 4086631 - RNA, 18 nt, Variola virus
guuggcuaugaucuugua

SEQ ID NO: 4086632 - RNA, 21 nt, Variola virus
guuguaugaguuuaucguuua

SEQ ID NO: 4086633 - RNA, 17 nt, Variola virus
guuguuaaaaaauuaag

SEQ ID NO: 4086634 - RNA, 19 nt, Variola virus
guuuaaaaauauagauauu

SEQ ID NO: 4086635 - RNA, 14 nt, Variola virus
guuuaaaacuucua

SEQ ID NO: 4086636 - RNA, 19 nt, Variola virus
guuuaaaaugaucuauaug

SEQ ID NO: 4086637 - RNA, 20 nt, Variola virus
guuuaaaguaaacuucguaa

SEQ ID NO: 4086638 - RNA, 16 nt, Variola virus
guuuaaauuaagcauc

SEQ ID NO: 4086639 - RNA, 18 nt, Variola virus
guuuaagagauucaauuu

SEQ ID NO: 4086640 - RNA, 14 nt, Variola virus
guuuagaugucgaa

SEQ ID NO: 4086641 - RNA, 19 nt, Variola virus
guuuauuuagauacagaug

SEQ ID NO: 4086642 - RNA, 19 nt, Variola virus
guuucacuaguaccuuuau

SEQ ID NO: 4086643 - RNA, 15 nt, Variola virus
guuucagcgugauuu

SEQ ID NO: 4086644 - RNA, 23 nt, Variola virus
guuuccacauuaaccaaguaaug

SEQ ID NO: 4086645 - RNA, 14 nt, Variola virus
guuuccuguauucu

SEQ ID NO: 4086646 - RNA, 15 nt, Variola virus
guuucucaucuuuua

SEQ ID NO: 4086647 - RNA, 16 nt, Variola virus
guuuggauuaauaauu

SEQ ID NO: 4086648 - RNA, 22 nt, Variola virus
guuuuaacgaauuauauagucu

SEQ ID NO: 4086649 - RNA, 20 nt, Variola virus
guuuuaccuauuuuaucauc

SEQ ID NO: 4086650 - RNA, 20 nt, Variola virus
guuuuagagacuuugaagcu

SEQ ID NO: 4086651 - RNA, 19 nt, Variola virus
guuuuggauuauaaucauc

SEQ ID NO: 4086652 - RNA, 23 nt, Variola virus
uaaaaaaaugauugaagaaggag

SEQ ID NO: 4086653 - RNA, 16 nt, Variola virus
uaaaaaccaucgucug

SEQ ID NO: 4086654 - RNA, 20 nt, Variola virus
uaaaaaguuuaaguuucuca

SEQ ID NO: 4086655 - RNA, 17 nt, Variola virus
uaaaaaguuuuaacaug

SEQ ID NO: 4086656 - RNA, 19 nt, Variola virus
uaaaaauaaacaucaacau

SEQ ID NO: 4086657 - RNA, 16 nt, Variola virus
uaaaaauaauauuguu

SEQ ID NO: 4086658 - RNA, 21 nt, Variola virus
uaaaaauagagcccaaagcua

SEQ ID NO: 4086659 - RNA, 14 nt, Variola virus
uaaaaauaugugcu

SEQ ID NO: 4086660 - RNA, 15 nt, Variola virus
uaaaaauuaauacau

SEQ ID NO: 4086661 - RNA, 12 nt, Variola virus
uaaaaauuauua

SEQ ID NO: 4086662 - RNA, 22 nt, Variola virus
uaaaaauuuuuuagauguagua

SEQ ID NO: 4086663 - RNA, 14 nt, Variola virus
uaaaacagauuucu

SEQ ID NO: 4086664 - RNA, 13 nt, Variola virus
uaaaacaugguga

SEQ ID NO: 4086665 - RNA, 16 nt, Variola virus
uaaaacgauuaaacaa

SEQ ID NO: 4086666 - RNA, 23 nt, Variola virus
uaaaacuaucguuauaucugucu

SEQ ID NO: 4086667 - RNA, 13 nt, Variola virus
uaaaagaaaauac

SEQ ID NO: 4086668 - RNA, 21 nt, Variola virus
uaaaagaauuuuuucggguuc

SEQ ID NO: 4086669 - RNA, 17 nt, Variola virus
uaaaaguaucaaaucuu

SEQ ID NO: 4086670 - RNA, 13 nt, Variola virus
uaaaagucaacau

SEQ ID NO: 4086671 - RNA, 23 nt, Variola virus
uaaaagucugaucuuaacuccuc

SEQ ID NO: 4086672 - RNA, 15 nt, Variola virus
uaaaaguuaggguuc

SEQ ID NO: 4086673 - RNA, 16 nt, Variola virus
uaaaaguuuuacuaua

SEQ ID NO: 4086674 - RNA, 13 nt, Variola virus
uaaaauaaauauu

SEQ ID NO: 4086675 - RNA, 15 nt, Variola virus
uaaaauaaauauucu

SEQ ID NO: 4086676 - RNA, 23 nt, Variola virus
uaaaauaacucuguagacgauac

SEQ ID NO: 4086677 - RNA, 12 nt, Variola virus
uaaaauaguucu

SEQ ID NO: 4086678 - RNA, 18 nt, Variola virus
uaaaauccuccuaucaau

SEQ ID NO: 4086679 - RNA, 18 nt, Variola virus
uaaaaugaucuauauguu

SEQ ID NO: 4086680 - RNA, 19 nt, Variola virus
uaaaaugguaaacuuuugc

SEQ ID NO: 4086681 - RNA, 14 nt, Variola virus
uaaaauuacaaaca

SEQ ID NO: 4086682 - RNA, 22 nt, Variola virus
uaaaauuaucuacacaaauaga

SEQ ID NO: 4086683 - RNA, 11 nt, Variola virus
uaaaauuauug

SEQ ID NO: 4086684 - RNA, 23 nt, Variola virus
uaaaauuauuuaauuuaauacau

SEQ ID NO: 4086685 - RNA, 14 nt, Variola virus
uaaaauucacacau

SEQ ID NO: 4086686 - RNA, 21 nt, Variola virus
uaaaauuuaaaaaguauuuac

SEQ ID NO: 4086687 - RNA, 14 nt, Variola virus
uaaaauuuagcauu

SEQ ID NO: 4086688 - RNA, 16 nt, Variola virus
uaaaauuuauaacauu

SEQ ID NO: 4086689 - RNA, 21 nt, Variola virus
uaaacaaacuaauaaacauuc

SEQ ID NO: 4086690 - RNA, 23 nt, Variola virus
uaaacaacaaugccaucuuacau

SEQ ID NO: 4086691 - RNA, 20 nt, Variola virus
uaaacaaucugucgaaaaag

SEQ ID NO: 4086692 - RNA, 17 nt, Variola virus
uaaacacgauauagaca

SEQ ID NO: 4086693 - RNA, 18 nt, Variola virus
uaaacaguuuaauagucu

SEQ ID NO: 4086694 - RNA, 17 nt, Variola virus
uaaacauugauuaaauu

SEQ ID NO: 4086695 - RNA, 16 nt, Variola virus
uaaacgaaaacuauau

SEQ ID NO: 4086696 - RNA, 14 nt, Variola virus
uaaacgcguguaau

SEQ ID NO: 4086697 - RNA, 23 nt, Variola virus
uaaacuaauucauuuucaauaau

SEQ ID NO: 4086698 - RNA, 13 nt, Variola virus
uaaacuauucucg

SEQ ID NO: 4086699 - RNA, 16 nt, Variola virus
uaaacucagauaauag

SEQ ID NO: 4086700 - RNA, 23 nt, Variola virus
uaaacucuccaccauuuccgcau

SEQ ID NO: 4086701 - RNA, 16 nt, Variola virus
uaaacuguuuguauaa

SEQ ID NO: 4086702 - RNA, 12 nt, Variola virus
uaaacuuuaaug

SEQ ID NO: 4086703 - RNA, 16 nt, Variola virus
uaaagaacaaauguug

SEQ ID NO: 4086704 - RNA, 22 nt, Variola virus
uaaagaaugcuguuauauacau

SEQ ID NO: 4086705 - RNA, 18 nt, Variola virus
uaaagacacuccacaugc

SEQ ID NO: 4086706 - RNA, 19 nt, Variola virus
uaaagauacaaauaugucu

SEQ ID NO: 4086707 - RNA, 12 nt, Variola virus
uaaagauauucu

SEQ ID NO: 4086708 - RNA, 18 nt, Variola virus
uaaagccgguguaacauu

SEQ ID NO: 4086709 - RNA, 17 nt, Variola virus
uaaagcuaaaauagucu

SEQ ID NO: 4086710 - RNA, 14 nt, Variola virus
uaaagguaaaugua

SEQ ID NO: 4086711 - RNA, 23 nt, Variola virus
uaaaguggaagaguauuguacag

SEQ ID NO: 4086712 - RNA, 16 nt, Variola virus
uaaauaaauccaaauu

SEQ ID NO: 4086713 - RNA, 13 nt, Variola virus
uaaauaaaugucc

SEQ ID NO: 4086714 - RNA, 16 nt, Variola virus
uaaauaccauuaauca

SEQ ID NO: 4086715 - RNA, 15 nt, Variola virus
uaaauagacaaacaa

SEQ ID NO: 4086716 - RNA, 16 nt, Variola virus
uaaauaggacuauugu

SEQ ID NO: 4086717 - RNA, 13 nt, Variola virus
uaaauauaaacac

SEQ ID NO: 4086718 - RNA, 20 nt, Variola virus
uaaauaucauaaucuaaaau

SEQ ID NO: 4086719 - RNA, 18 nt, Variola virus
uaaauauuaauaaaguau

SEQ ID NO: 4086720 - RNA, 13 nt, Variola virus
uaaauauuucauu

SEQ ID NO: 4086721 - RNA, 20 nt, Variola virus
uaaauauuuuaaaauuuaua

SEQ ID NO: 4086722 - RNA, 22 nt, Variola virus
uaaauauuuuucuaccuuuuca

SEQ ID NO: 4086723 - RNA, 17 nt, Variola virus
uaaaucaucgauuuuca

SEQ ID NO: 4086724 - RNA, 14 nt, Variola virus
uaaaucauggauuu

SEQ ID NO: 4086725 - RNA, 15 nt, Variola virus
uaaauccgagaauau

SEQ ID NO: 4086726 - RNA, 23 nt, Variola virus
uaaauccucuauuuauugacauu

SEQ ID NO: 4086727 - RNA, 18 nt, Variola virus
uaaaucuguuucuaaaga

SEQ ID NO: 4086728 - RNA, 18 nt, Variola virus
uaaaugaaaaaaaacuag

SEQ ID NO: 4086729 - RNA, 20 nt, Variola virus
uaaaugaaucccaaacauug

SEQ ID NO: 4086730 - RNA, 16 nt, Variola virus
uaaaugaauucucauu

SEQ ID NO: 4086731 - RNA, 13 nt, Variola virus
uaaauguauacau

SEQ ID NO: 4086732 - RNA, 18 nt, Variola virus
uaaauguuguaauuguau

SEQ ID NO: 4086733 - RNA, 19 nt, Variola virus
uaaauguuuaaacaucaaa

SEQ ID NO: 4086734 - RNA, 22 nt, Variola virus
uaaauguuuaaacaucaaacau

SEQ ID NO: 4086735 - RNA, 18 nt, Variola virus
uaaauuauauauggauuu

SEQ ID NO: 4086736 - RNA, 22 nt, Variola virus
uaaauuauuccaucgauacauc

SEQ ID NO: 4086737 - RNA, 20 nt, Variola virus
uaaauucagaauuucuacau

SEQ ID NO: 4086738 - RNA, 17 nt, Variola virus
uaaauuccauagaauau

SEQ ID NO: 4086739 - RNA, 18 nt, Variola virus
uaaauuuacgaauuaaga

SEQ ID NO: 4086740 - RNA, 17 nt, Variola virus
uaaauuuaucaauaaau

SEQ ID NO: 4086741 - RNA, 20 nt, Variola virus
uaaauuuaucaauaaaugug

SEQ ID NO: 4086742 - RNA, 18 nt, Variola virus
uaacaaaaauuaugaaau

SEQ ID NO: 4086743 - RNA, 17 nt, Variola virus
uaacaacaucuauucca

SEQ ID NO: 4086744 - RNA, 17 nt, Variola virus
uaacaacucaaacaucu

SEQ ID NO: 4086745 - RNA, 19 nt, Variola virus
uaacaacugucaaugaauu

SEQ ID NO: 4086746 - RNA, 15 nt, Variola virus
uaacaacuuccguaa

SEQ ID NO: 4086747 - RNA, 21 nt, Variola virus
uaacaagaucgauagacacug

SEQ ID NO: 4086748 - RNA, 22 nt, Variola virus
uaacagaacauuugcaaagauu

SEQ ID NO: 4086749 - RNA, 18 nt, Variola virus
uaacaugcgguucaaaau

SEQ ID NO: 4086750 - RNA, 17 nt, Variola virus
uaacauuaaguaaaucc

SEQ ID NO: 4086751 - RNA, 18 nt, Variola virus
uaacauuacauauuauau

SEQ ID NO: 4086752 - RNA, 14 nt, Variola virus
uaacauucauuagu

SEQ ID NO: 4086753 - RNA, 17 nt, Variola virus
uaaccaugaaagaaaga

SEQ ID NO: 4086754 - RNA, 18 nt, Variola virus
uaacccauuauaaaacuu

SEQ ID NO: 4086755 - RNA, 23 nt, Variola virus
uaaccuuggcugucucauucaau

SEQ ID NO: 4086756 - RNA, 18 nt, Variola virus
uaacgaauuauauagucu

SEQ ID NO: 4086757 - RNA, 21 nt, Variola virus
uaacgagugaucaaauuauug

SEQ ID NO: 4086758 - RNA, 21 nt, Variola virus
uaacgaguucaaauaugaaau

SEQ ID NO: 4086759 - RNA, 19 nt, Variola virus
uaacgaguuccauuuauau

SEQ ID NO: 4086760 - RNA, 15 nt, Variola virus
uaacgaugucuauau

SEQ ID NO: 4086761 - RNA, 21 nt, Variola virus
uaacgcaccuauaaagacuuu

SEQ ID NO: 4086762 - RNA, 15 nt, Variola virus
uaacgcauuaaugag

SEQ ID NO: 4086763 - RNA, 21 nt, Variola virus
uaacggaugaaaauaagaaaa

SEQ ID NO: 4086764 - RNA, 15 nt, Variola virus
uaacguuaaacauua

SEQ ID NO: 4086765 - RNA, 20 nt, Variola virus
uaacuacgcgauuauuuuca

SEQ ID NO: 4086766 - RNA, 22 nt, Variola virus
uaacuaucuguaaaagcauaug

SEQ ID NO: 4086767 - RNA, 13 nt, Variola virus
uaacuauuugcau

SEQ ID NO: 4086768 - RNA, 17 nt, Variola virus
uaacuccucuauuaaug

SEQ ID NO: 4086769 - RNA, 13 nt, Variola virus
uaacuccuugguu

SEQ ID NO: 4086770 - RNA, 14 nt, Variola virus
uaacucuguuuuau

SEQ ID NO: 4086771 - RNA, 11 nt, Variola virus
uaacugaagaa

SEQ ID NO: 4086772 - RNA, 12 nt, Variola virus
uaacugaagaaa

SEQ ID NO: 4086773 - RNA, 15 nt, Variola virus
uaacuguuaucucuu

SEQ ID NO: 4086774 - RNA, 20 nt, Variola virus
uaacuuaaaagaauuacuua

SEQ ID NO: 4086775 - RNA, 22 nt, Variola virus
uaacuuuuauuuuuagaaagua

SEQ ID NO: 4086776 - RNA, 23 nt, Variola virus
uaacuuuuuaccucauaugaacu

SEQ ID NO: 4086777 - RNA, 22 nt, Variola virus
uaagaaauccaaauaaaaugga

SEQ ID NO: 4086778 - RNA, 21 nt, Variola virus
uaagaacuccuaauauguucg

SEQ ID NO: 4086779 - RNA, 12 nt, Variola virus
uaagaauugucu

SEQ ID NO: 4086780 - RNA, 23 nt, Variola virus
uaagacguuguaucucuuuuucc

SEQ ID NO: 4086781 - RNA, 16 nt, Variola virus
uaagagaucaaagcau

SEQ ID NO: 4086782 - RNA, 21 nt, Variola virus
uaagaguguaguaucauagau

SEQ ID NO: 4086783 - RNA, 12 nt, Variola virus
uaagauacugug

SEQ ID NO: 4086784 - RNA, 18 nt, Variola virus
uaagauguuugagaauau

SEQ ID NO: 4086785 - RNA, 17 nt, Variola virus
uaagauuguagaaucag

SEQ ID NO: 4086786 - RNA, 19 nt, Variola virus
uaagauuuccuccuccgcu

SEQ ID NO: 4086787 - RNA, 12 nt, Variola virus
uaagcauauucu

SEQ ID NO: 4086788 - RNA, 12 nt, Variola virus
uaaggauucauu

SEQ ID NO: 4086789 - RNA, 18 nt, Variola virus
uaagguagaaucucuauu

SEQ ID NO: 4086790 - RNA, 23 nt, Variola virus
uaaguagagauucggguacugua

SEQ ID NO: 4086791 - RNA, 21 nt, Variola virus
uaaguaucuauaaaacucaua

SEQ ID NO: 4086792 - RNA, 19 nt, Variola virus
uaaguucauuaucugaaau

SEQ ID NO: 4086793 - RNA, 19 nt, Variola virus
uaauaaaaaaaauuauuua

SEQ ID NO: 4086794 - RNA, 22 nt, Variola virus
uaauaaacauuccacauucaga

SEQ ID NO: 4086795 - RNA, 16 nt, Variola virus
uaauaaauugguaaau

SEQ ID NO: 4086796 - RNA, 23 nt, Variola virus
ugcagcaacuucuguacuagugg

SEQ ID NO: 4086797 - RNA, 13 nt, Variola virus
ugccaaaaugaua

SEQ ID NO: 4086798 - RNA, 12 nt, Variola virus
ugccaauaauga

SEQ ID NO: 4086799 - RNA, 21 nt, Variola virus
ugccacgaauaaaaaauacuu

SEQ ID NO: 4086800 - RNA, 22 nt, Variola virus
ugccacgaauaaaaaauacuua

SEQ ID NO: 4086801 - RNA, 15 nt, Variola virus
ugccacgguuccaag

SEQ ID NO: 4086802 - RNA, 17 nt, Variola virus
ugccauaucauacauga

SEQ ID NO: 4086803 - RNA, 21 nt, Variola virus
ugccauauguuggaaauacua

SEQ ID NO: 4086804 - RNA, 22 nt, Variola virus
ugccauauguuggaaauacuag

SEQ ID NO: 4086805 - RNA, 13 nt, Variola virus
ugccauuaugaua

SEQ ID NO: 4086806 - RNA, 22 nt, Variola virus
ugccauugcuggauuacaucua

SEQ ID NO: 4086807 - RNA, 17 nt, Variola virus
ugccauuuuuaacguag

SEQ ID NO: 4086808 - RNA, 19 nt, Variola virus
ugcccccauucuuaauaau

SEQ ID NO: 4086809 - RNA, 19 nt, Variola virus
ugccgguauugguauacag

SEQ ID NO: 4086810 - RNA, 18 nt, Variola virus
ugccuauuaggacagaua

SEQ ID NO: 4086811 - RNA, 13 nt, Variola virus
ugccuccacauau

SEQ ID NO: 4086812 - RNA, 15 nt, Variola virus
ugccuccacauaucg

SEQ ID NO: 4086813 - RNA, 22 nt, Variola virus
ugcgaaccgauuaaacauaaau

SEQ ID NO: 4086814 - RNA, 15 nt, Variola virus
ugcgacacuauucau

SEQ ID NO: 4086815 - RNA, 11 nt, Variola virus
ugcgauacauu

SEQ ID NO: 4086816 - RNA, 18 nt, Variola virus
ugcguuaagaucuaauau

SEQ ID NO: 4086817 - RNA, 21 nt, Variola virus
ugcuaauauucccaaacauac

SEQ ID NO: 4086818 - RNA, 21 nt, Variola virus
ugcuauuucggcugucagagu

SEQ ID NO: 4086819 - RNA, 12 nt, Variola virus
ugcucuuuacau

SEQ ID NO: 4086820 - RNA, 17 nt, Variola virus
ugcuguuccucuguaaa

SEQ ID NO: 4086821 - RNA, 15 nt, Variola virus
ugcuuaauguuucca

SEQ ID NO: 4086822 - RNA, 18 nt, Variola virus
ugcuucaacgaggaagau

SEQ ID NO: 4086823 - RNA, 21 nt, Variola virus
ugcuugcaacauuaacaucuu

SEQ ID NO: 4086824 - RNA, 19 nt, Variola virus
ugcuugcuagacaccuuuu

SEQ ID NO: 4086825 - RNA, 20 nt, Variola virus
uggaaagauaucagauaagu

SEQ ID NO: 4086826 - RNA, 16 nt, Variola virus
uggaaaggaaauuaug

SEQ ID NO: 4086827 - RNA, 19 nt, Variola virus
uggaaauguuauagaaaau

SEQ ID NO: 4086828 - RNA, 20 nt, Variola virus
uggaaauuacacuguaucca

SEQ ID NO: 4086829 - RNA, 23 nt, Variola virus
uggaacuccuauuggaauuauuu

SEQ ID NO: 4086830 - RNA, 15 nt, Variola virus
uggaagguauuucca

SEQ ID NO: 4086831 - RNA, 21 nt, Variola virus
uggaaucagaagaugauucca

SEQ ID NO: 4086832 - RNA, 15 nt, Variola virus
uggacauacuaauau

SEQ ID NO: 4086833 - RNA, 22 nt, Variola virus
uggagaauguuccuaauguaua

SEQ ID NO: 4086834 - RNA, 14 nt, Variola virus
uggaggaauuuaua

SEQ ID NO: 4086835 - RNA, 15 nt, Variola virus
uggaggcucaacaag

SEQ ID NO: 4086836 - RNA, 16 nt, Variola virus
uggaguaucaucuauu

SEQ ID NO: 4086837 - RNA, 17 nt, Variola virus
uggaucagauguagaua

SEQ ID NO: 4086838 - RNA, 23 nt, Variola virus
uggaucaucgugugauaugaaca

SEQ ID NO: 4086839 - RNA, 15 nt, Variola virus
uggaucguuuagaau

SEQ ID NO: 4086840 - RNA, 22 nt, Variola virus
uggauucaguacaauguuauau

SEQ ID NO: 4086841 - RNA, 14 nt, Variola virus
uggauuucauauaa

SEQ ID NO: 4086842 - RNA, 15 nt, Variola virus
uggcaauguuucaua

SEQ ID NO: 4086843 - RNA, 22 nt, Variola virus
uggccauuauuagaaauuuauc

SEQ ID NO: 4086844 - RNA, 22 nt, Variola virus
uggcuaauugucuuucucuuuu

SEQ ID NO: 4086845 - RNA, 18 nt, Variola virus
ugggguaaaguaaguauc

SEQ ID NO: 4086846 - RNA, 15 nt, Variola virus
uggguguaaggaaau

SEQ ID NO: 4086847 - RNA, 18 nt, Variola virus
uggguuaauaaauacaga

SEQ ID NO: 4086848 - RNA, 19 nt, Variola virus
ugguaaguucauuaucuga

SEQ ID NO: 4086849 - RNA, 15 nt, Variola virus
uggucaaaaacugaa

SEQ ID NO: 4086850 - RNA, 20 nt, Variola virus
uggucaaucccuaagucuuu

SEQ ID NO: 4086851 - RNA, 23 nt, Variola virus
ugguguaauaaaaaaaauuauuu

SEQ ID NO: 4086852 - RNA, 16 nt, Variola virus
ugguuaaaaccuuugc

SEQ ID NO: 4086853 - RNA, 16 nt, Variola virus
ugguucgcucaagaau

SEQ ID NO: 4086854 - RNA, 15 nt, Variola virus
ugguugauaguuguu

SEQ ID NO: 4086855 - RNA, 12 nt, Variola virus
ugguuucaauuc

SEQ ID NO: 4086856 - RNA, 18 nt, Variola virus
uguaaaaaauuauacugu

SEQ ID NO: 4086857 - RNA, 18 nt, Variola virus
uguaaaaguaaaaaagaa

SEQ ID NO: 4086858 - RNA, 22 nt, Variola virus
uguaaaguaucuagcaaagauu

SEQ ID NO: 4086859 - RNA, 13 nt, Variola virus
uguaaauguagua

SEQ ID NO: 4086860 - RNA, 19 nt, Variola virus
uguaacugucggaguagua

SEQ ID NO: 4086861 - RNA, 12 nt, Variola virus
uguaagaaauaa

SEQ ID NO: 4086862 - RNA, 22 nt, Variola virus
uguaauauuguacgauguaaua

SEQ ID NO: 4086863 - RNA, 23 nt, Variola virus
uguaaucgauaacacaauuuaug

SEQ ID NO: 4086864 - RNA, 13 nt, Variola virus
uguaauuaaauuu

SEQ ID NO: 4086865 - RNA, 17 nt, Variola virus
uguaauugugacaucau

SEQ ID NO: 4086866 - RNA, 21 nt, Variola virus
uguaauugugggaacauaauu

SEQ ID NO: 4086867 - RNA, 14 nt, Variola virus
uguaauuuuauucu

SEQ ID NO: 4086868 - RNA, 15 nt, Variola virus
uguaauuuuauucuu

SEQ ID NO: 4086869 - RNA, 16 nt, Variola virus
uguaauuuuuguuuca

SEQ ID NO: 4086870 - RNA, 17 nt, Variola virus
uguacaauacauguaca

SEQ ID NO: 4086871 - RNA, 21 nt, Variola virus
uguacauauuuguacauuauu

SEQ ID NO: 4086872 - RNA, 18 nt, Variola virus
uguacccuguuuaacaug

SEQ ID NO: 4086873 - RNA, 13 nt, Variola virus
uguacuuaacaug

SEQ ID NO: 4086874 - RNA, 10 nt, Variola virus
uguagaaaag

SEQ ID NO: 4086875 - RNA, 22 nt, Variola virus
uguagaacucaugaaucuaaaa

SEQ ID NO: 4086876 - RNA, 15 nt, Variola virus
uguagauaugugaua

SEQ ID NO: 4086877 - RNA, 14 nt, Variola virus
uguagauuuggaua

SEQ ID NO: 4086878 - RNA, 20 nt, Variola virus
uguagcauuacgcucucugg

SEQ ID NO: 4086879 - RNA, 16 nt, Variola virus
uguaguaaagaugcua

SEQ ID NO: 4086880 - RNA, 14 nt, Variola virus
uguauaaauaauua

SEQ ID NO: 4086881 - RNA, 21 nt, Variola virus
uguauaacaaucuuauaucuu

SEQ ID NO: 4086882 - RNA, 19 nt, Variola virus
uguauaacaugacauuuau

SEQ ID NO: 4086883 - RNA, 20 nt, Variola virus
uguauaauaagaugcaaaca

SEQ ID NO: 4086884 - RNA, 14 nt, Variola virus
uguauacacaugau

SEQ ID NO: 4086885 - RNA, 13 nt, Variola virus
uguauauacuguc

SEQ ID NO: 4086886 - RNA, 20 nt, Variola virus
uguauauaucaugaugauuu

SEQ ID NO: 4086887 - RNA, 18 nt, Variola virus
uguauaugugaauaugac

SEQ ID NO: 4086888 - RNA, 14 nt, Variola virus
uguaucaaucaaaa

SEQ ID NO: 4086889 - RNA, 22 nt, Variola virus
uguaucaaucgguguguagaaa

SEQ ID NO: 4086890 - RNA, 20 nt, Variola virus
uguaucauuuagcgauucaa

SEQ ID NO: 4086891 - RNA, 23 nt, Variola virus
uguaucgauugcguuguaacauu

SEQ ID NO: 4086892 - RNA, 14 nt, Variola virus
uguaucuauaucug

SEQ ID NO: 4086893 - RNA, 13 nt, Variola virus
uguaugagugaua

SEQ ID NO: 4086894 - RNA, 19 nt, Variola virus
uguaugagugauauugaua

SEQ ID NO: 4086895 - RNA, 17 nt, Variola virus
uguaugcguuaauauua

SEQ ID NO: 4086896 - RNA, 21 nt, Variola virus
uaauaaggaaggcgucaaaau

SEQ ID NO: 4086897 - RNA, 20 nt, Variola virus
uaauaauaaacggaagagau

SEQ ID NO: 4086898 - RNA, 18 nt, Variola virus
uaauaccaguuauguuca

SEQ ID NO: 4086899 - RNA, 15 nt, Variola virus
uaauacuaucuggau

SEQ ID NO: 4086900 - RNA, 14 nt, Variola virus
uaauacuguuuucu

SEQ ID NO: 4086901 - RNA, 22 nt, Variola virus
uaauacuuauucauauuuuagu

SEQ ID NO: 4086902 - RNA, 13 nt, Variola virus
uaauagaacucuu

SEQ ID NO: 4086903 - RNA, 23 nt, Variola virus
uaauagcagaaagcuauaacuug

SEQ ID NO: 4086904 - RNA, 15 nt, Variola virus
uaauagcgucuacau

SEQ ID NO: 4086905 - RNA, 17 nt, Variola virus
uaauaguuuaucauacu

SEQ ID NO: 4086906 - RNA, 23 nt, Variola virus
uaauauaaaauucccaaucuugu

SEQ ID NO: 4086907 - RNA, 15 nt, Variola virus
uaauauccaaucuua

SEQ ID NO: 4086908 - RNA, 19 nt, Variola virus
uaauaucuuggaucuuauu

SEQ ID NO: 4086909 - RNA, 20 nt, Variola virus
uaauaugagugauaaaaucc

SEQ ID NO: 4086910 - RNA, 19 nt, Variola virus
uaauauuaaagauaaagcg

SEQ ID NO: 4086911 - RNA, 19 nt, Variola virus
uaauauucccagaaaagau

SEQ ID NO: 4086912 - RNA, 17 nt, Variola virus
uaauauugaaaauacua

SEQ ID NO: 4086913 - RNA, 22 nt, Variola virus
uaauauuuaugauuuaauguau

SEQ ID NO: 4086914 - RNA, 12 nt, Variola virus
uaaucauuauua

SEQ ID NO: 4086915 - RNA, 12 nt, Variola virus
uaauccaaauau

SEQ ID NO: 4086916 - RNA, 17 nt, Variola virus
uaauccagucuuuaaug

SEQ ID NO: 4086917 - RNA, 17 nt, Variola virus
uaauccaucaacaaugu

SEQ ID NO: 4086918 - RNA, 23 nt, Variola virus
uaauccugaauauauugauuuuc

SEQ ID NO: 4086919 - RNA, 17 nt, Variola virus
uaauccugguacauacg

SEQ ID NO: 4086920 - RNA, 14 nt, Variola virus
uaauccuuguaaug

SEQ ID NO: 4086921 - RNA, 15 nt, Variola virus
uaaucgaguacgcca

SEQ ID NO: 4086922 - RNA, 17 nt, Variola virus
uaaucggagaauguuuc

SEQ ID NO: 4086923 - RNA, 19 nt, Variola virus
uaaucuauaggcaacgaug

SEQ ID NO: 4086924 - RNA, 23 nt, Variola virus
uaaucuauuuuaccucuucugau

SEQ ID NO: 4086925 - RNA, 17 nt, Variola virus
uaaucucuccagaguau

SEQ ID NO: 4086926 - RNA, 13 nt, Variola virus
uaaucugaugaau

SEQ ID NO: 4086927 - RNA, 15 nt, Variola virus
uaaugaauagauguc

SEQ ID NO: 4086928 - RNA, 22 nt, Variola virus
uaaugacguuaauaacaaaaau

SEQ ID NO: 4086929 - RNA, 15 nt, Variola virus
uaaugaucaucuauu

SEQ ID NO: 4086930 - RNA, 22 nt, Variola virus
uaaugauguauguuuaaacacu

SEQ ID NO: 4086931 - RNA, 22 nt, Variola virus
uaaugcagggugcauauuauua

SEQ ID NO: 4086932 - RNA, 22 nt, Variola virus
uaaugccuuacucgguguauau

SEQ ID NO: 4086933 - RNA, 14 nt, Variola virus
uaaugcuacagaua

SEQ ID NO: 4086934 - RNA, 18 nt, Variola virus
uaauggauauucugaaua

SEQ ID NO: 4086935 - RNA, 15 nt, Variola virus
uaauggaucuucuag

SEQ ID NO: 4086936 - RNA, 17 nt, Variola virus
uaauguuguauuucauu

SEQ ID NO: 4086937 - RNA, 21 nt, Variola virus
uaauguugugaaccauguacu

SEQ ID NO: 4086938 - RNA, 14 nt, Variola virus
uaauuaaauuauug

SEQ ID NO: 4086939 - RNA, 15 nt, Variola virus
uaauuaaucuaaaau

SEQ ID NO: 4086940 - RNA, 16 nt, Variola virus
uaauuagguuguuuau

SEQ ID NO: 4086941 - RNA, 19 nt, Variola virus
uaauucaaauuguuaaauu

SEQ ID NO: 4086942 - RNA, 15 nt, Variola virus
uaauuccuuugcuau

SEQ ID NO: 4086943 - RNA, 17 nt, Variola virus
uaauucuccuauuacau

SEQ ID NO: 4086944 - RNA, 15 nt, Variola virus
uaauucucuauagaa

SEQ ID NO: 4086945 - RNA, 22 nt, Variola virus
uaauucuuaucaauaacauauu

SEQ ID NO: 4086946 - RNA, 16 nt, Variola virus
uaauugggugaagaau

SEQ ID NO: 4086947 - RNA, 15 nt, Variola virus
uaauugucuauaaau

SEQ ID NO: 4086948 - RNA, 20 nt, Variola virus
uaauuguuauuuuauucaua

SEQ ID NO: 4086949 - RNA, 21 nt, Variola virus
uaauuuacaaaaauuuaaaau

SEQ ID NO: 4086950 - RNA, 13 nt, Variola virus
uaauuucacgaau

SEQ ID NO: 4086951 - RNA, 16 nt, Variola virus
uaauuucaucuacaau

SEQ ID NO: 4086952 - RNA, 22 nt, Variola virus
uaauuuccaacccuucagaaua

SEQ ID NO: 4086953 - RNA, 15 nt, Variola virus
uaauuucuagaauau

SEQ ID NO: 4086954 - RNA, 15 nt, Variola virus
uaauuuguucaaaau

SEQ ID NO: 4086955 - RNA, 17 nt, Variola virus
uaauuuuagcagaauau

SEQ ID NO: 4086956 - RNA, 23 nt, Variola virus
uaauuuuauuaacgguaauacau

SEQ ID NO: 4086957 - RNA, 22 nt, Variola virus
uaauuuucuauaacugaacgau

SEQ ID NO: 4086958 - RNA, 17 nt, Variola virus
uacaaaauguugauaau

SEQ ID NO: 4086959 - RNA, 22 nt, Variola virus
uacaaaauguugauaauccuug

SEQ ID NO: 4086960 - RNA, 20 nt, Variola virus
uacaaaauuugcaucuacau

SEQ ID NO: 4086961 - RNA, 18 nt, Variola virus
uacaaacaacuaggaaau

SEQ ID NO: 4086962 - RNA, 21 nt, Variola virus
uacaaacuauagaaauuauuu

SEQ ID NO: 4086963 - RNA, 12 nt, Variola virus
uacaaauuauug

SEQ ID NO: 4086964 - RNA, 19 nt, Variola virus
uacaacuaguuuucaucaa

SEQ ID NO: 4086965 - RNA, 20 nt, Variola virus
uacaauaauuauaauuauua

SEQ ID NO: 4086966 - RNA, 21 nt, Variola virus
uacaaucaaaccuauaacauu

SEQ ID NO: 4086967 - RNA, 17 nt, Variola virus
uacaauuucauaaugag

SEQ ID NO: 4086968 - RNA, 16 nt, Variola virus
uacacaauauaaacac

SEQ ID NO: 4086969 - RNA, 18 nt, Variola virus
uacacaucagcaucuuga

SEQ ID NO: 4086970 - RNA, 19 nt, Variola virus
uacacaugguguuacaaaa

SEQ ID NO: 4086971 - RNA, 17 nt, Variola virus
uacacggacucauuaaa

SEQ ID NO: 4086972 - RNA, 16 nt, Variola virus
uacagaacgaauuaug

SEQ ID NO: 4086973 - RNA, 23 nt, Variola virus
uacagaagcugccaauauagucu

SEQ ID NO: 4086974 - RNA, 22 nt, Variola virus
uacagauauauucauaguaguu

SEQ ID NO: 4086975 - RNA, 19 nt, Variola virus
uacaggaguucaguuuuau

SEQ ID NO: 4086976 - RNA, 16 nt, Variola virus
uacaguaauuaaugag

SEQ ID NO: 4086977 - RNA, 14 nt, Variola virus
uacauaagaaucaa

SEQ ID NO: 4086978 - RNA, 12 nt, Variola virus
uacauaauauua

SEQ ID NO: 4086979 - RNA, 16 nt, Variola virus
uacauaauucuucugu

SEQ ID NO: 4086980 - RNA, 18 nt, Variola virus
uacauacgaauaacaaaa

SEQ ID NO: 4086981 - RNA, 15 nt, Variola virus
uacauacuaauauua

SEQ ID NO: 4086982 - RNA, 16 nt, Variola virus
uacaucaaucuuacag

SEQ ID NO: 4086983 - RNA, 23 nt, Variola virus
uacauucucauuaauuaaccauu

SEQ ID NO: 4086984 - RNA, 17 nt, Variola virus
uacauuguauaaaaagc

SEQ ID NO: 4086985 - RNA, 14 nt, Variola virus
uacauuucucaaau

SEQ ID NO: 4086986 - RNA, 15 nt, Variola virus
uacauuuucuuacaa

SEQ ID NO: 4086987 - RNA, 13 nt, Variola virus
uaccaauaugucu

SEQ ID NO: 4086988 - RNA, 23 nt, Variola virus
uaccaauaugucuguacaaaugu

SEQ ID NO: 4086989 - RNA, 14 nt, Variola virus
uaccacauacaaaa

SEQ ID NO: 4086990 - RNA, 18 nt, Variola virus
uaccacuuauuacuccau

SEQ ID NO: 4086991 - RNA, 21 nt, Variola virus
uaccacuuauuacuccauuau

SEQ ID NO: 4086992 - RNA, 16 nt, Variola virus
uaccagaauacuauuu

SEQ ID NO: 4086993 - RNA, 19 nt, Variola virus
uaccaguuaagucaauaau

SEQ ID NO: 4086994 - RNA, 15 nt, Variola virus
uaccaucuucuuuga

SEQ ID NO: 4086995 - RNA, 19 nt, Variola virus
uaccauuaaagaauucuua

SEQ ID NO: 4086996 - RNA, 18 nt, Variola virus
uaccauuagauaaucuag

SEQ ID NO: 4086997 - RNA, 15 nt, Variola virus
uaccauuucauugau

SEQ ID NO: 4086998 - RNA, 21 nt, Variola virus
uaccgauuuaucaucauacac

SEQ ID NO: 4086999 - RNA, 13 nt, Variola virus
uaccuaauacuaa

SEQ ID NO: 4087000 - RNA, 16 nt, Variola virus
uaccucauuuaucaug

SEQ ID NO: 4087001 - RNA, 15 nt, Variola virus
uaccucucuuaaaau

SEQ ID NO: 4087002 - RNA, 14 nt, Variola virus
uacgaaaaaacuuu

SEQ ID NO: 4087003 - RNA, 16 nt, Variola virus
uacgaggauucaaaaa

SEQ ID NO: 4087004 - RNA, 19 nt, Variola virus
uacgcauucacucauacau

SEQ ID NO: 4087005 - RNA, 19 nt, Variola virus
uacgcgcauuaaacuuuuc

SEQ ID NO: 4087006 - RNA, 20 nt, Variola virus
uacgguuccacagacucauu

SEQ ID NO: 4087007 - RNA, 16 nt, Variola virus
uacguaucauaucuuc

SEQ ID NO: 4087008 - RNA, 20 nt, Variola virus
uacgucgcagaauucuaaau

SEQ ID NO: 4087009 - RNA, 14 nt, Variola virus
uacgucgucaaaau

SEQ ID NO: 4087010 - RNA, 16 nt, Variola virus
uacguugauuucuagc

SEQ ID NO: 4087011 - RNA, 21 nt, Variola virus
uacguuuaucgauguacacau

SEQ ID NO: 4087012 - RNA, 22 nt, Variola virus
uacguuugauucguucaaaaau

SEQ ID NO: 4087013 - RNA, 14 nt, Variola virus
uacuaaaggaugag

SEQ ID NO: 4087014 - RNA, 19 nt, Variola virus
uacuaaauucaauaucuuu

SEQ ID NO: 4087015 - RNA, 18 nt, Variola virus
uacuaagccaacaaauau

SEQ ID NO: 4087016 - RNA, 18 nt, Variola virus
uacuaaugacaauaauua

SEQ ID NO: 4087017 - RNA, 18 nt, Variola virus
uacuaauuacaaaccugu

SEQ ID NO: 4087018 - RNA, 15 nt, Variola virus
uacuacuucauuaau

SEQ ID NO: 4087019 - RNA, 14 nt, Variola virus
uacuagaguacuua

SEQ ID NO: 4087020 - RNA, 14 nt, Variola virus
uacuagcauauuug

SEQ ID NO: 4087021 - RNA, 19 nt, Variola virus
uacuagugguaucaagaag

SEQ ID NO: 4087022 - RNA, 14 nt, Variola virus
uacuauacacaaug

SEQ ID NO: 4087023 - RNA, 24 nt, Variola virus
uacuauacacaauguuacucacau

SEQ ID NO: 4087024 - RNA, 16 nt, Variola virus
uacuauuuuauaccuu

SEQ ID NO: 4087025 - RNA, 14 nt, Variola virus
uacucaaauagcac

SEQ ID NO: 4087026 - RNA, 20 nt, Variola virus
uacucaguugaacagaugau

SEQ ID NO: 4087027 - RNA, 20 nt, Variola virus
uacuccucauuacguuucau

SEQ ID NO: 4087028 - RNA, 13 nt, Variola virus
uacugcaauaaaa

SEQ ID NO: 4087029 - RNA, 17 nt, Variola virus
uacuggagccauugucu

SEQ ID NO: 4087030 - RNA, 18 nt, Variola virus
uacugggauaagauuucu

SEQ ID NO: 4087031 - RNA, 17 nt, Variola virus
uacuguauuaagaacag

SEQ ID NO: 4087032 - RNA, 16 nt, Variola virus
uacugucgcuaucauu

SEQ ID NO: 4087033 - RNA, 15 nt, Variola virus
uacuuaaaaaaugaa

SEQ ID NO: 4087034 - RNA, 15 nt, Variola virus
uacuuaugacaaagu

SEQ ID NO: 4087035 - RNA, 22 nt, Variola virus
uacuuauucuauuuuacaaaua

SEQ ID NO: 4087036 - RNA, 19 nt, Variola virus
uacuucuuuacgguaucua

SEQ ID NO: 4087037 - RNA, 15 nt, Variola virus
uacuugaaauaaucg

SEQ ID NO: 4087038 - RNA, 20 nt, Variola virus
uacuuguuaguaguuagaua

SEQ ID NO: 4087039 - RNA, 16 nt, Variola virus
uacuuguuggugaaau

SEQ ID NO: 4087040 - RNA, 21 nt, Variola virus
uacuuuaauaaccguuagaca

SEQ ID NO: 4087041 - RNA, 13 nt, Variola virus
uacuuuacauaua

SEQ ID NO: 4087042 - RNA, 16 nt, Variola virus
uacuuuauuacuccau

SEQ ID NO: 4087043 - RNA, 17 nt, Variola virus
uacuuuuuaauucucua

SEQ ID NO: 4087044 - RNA, 16 nt, Variola virus
uagaaaaauucuugga

SEQ ID NO: 4087045 - RNA, 18 nt, Variola virus
uagaaacaugucuagaaa

SEQ ID NO: 4087046 - RNA, 21 nt, Variola virus
uagaaacgauaccaucuucug

SEQ ID NO: 4087047 - RNA, 17 nt, Variola virus
uagaaacuauacgaaau

SEQ ID NO: 4087048 - RNA, 20 nt, Variola virus
uagaaacuauacgaaauaga

SEQ ID NO: 4087049 - RNA, 21 nt, Variola virus
uagaacguuuaacgaggauuu

SEQ ID NO: 4087050 - RNA, 19 nt, Variola virus
uagaacuaccaauaugucu

SEQ ID NO: 4087051 - RNA, 13 nt, Variola virus
uagaacuuaacuu

SEQ ID NO: 4087052 - RNA, 21 nt, Variola virus
uagaacuuacugacaaaguua

SEQ ID NO: 4087053 - RNA, 18 nt, Variola virus
uagaauuauaccaauaga

SEQ ID NO: 4087054 - RNA, 17 nt, Variola virus
uagaauuguauaguucu

SEQ ID NO: 4087055 - RNA, 20 nt, Variola virus
uagaauuuagcauaucucuu

SEQ ID NO: 4087056 - RNA, 19 nt, Variola virus
uagaauuuauauaucuauu

SEQ ID NO: 4087057 - RNA, 12 nt, Variola virus
uagaauuuccaa

SEQ ID NO: 4087058 - RNA, 15 nt, Variola virus
uagacauaauaguca

SEQ ID NO: 4087059 - RNA, 12 nt, Variola virus
uagacauaucug

SEQ ID NO: 4087060 - RNA, 22 nt, Variola virus
uagacugacuucuaacaaacau

SEQ ID NO: 4087061 - RNA, 19 nt, Variola virus
uagagacagauuaaguucu

SEQ ID NO: 4087062 - RNA, 17 nt, Variola virus
uagagauacaauauuua

SEQ ID NO: 4087063 - RNA, 20 nt, Variola virus
uagaggaacauuaaacaucg

SEQ ID NO: 4087064 - RNA, 24 nt, Variola virus
uagaggaagggacggauacugucu

SEQ ID NO: 4087065 - RNA, 23 nt, Variola virus
uagaggaaguauaaaaauuaaac

SEQ ID NO: 4087066 - RNA, 14 nt, Variola virus
uagaggaugaauuu

SEQ ID NO: 4087067 - RNA, 20 nt, Variola virus
uagagugaguuuaggauuca

SEQ ID NO: 4087068 - RNA, 23 nt, Variola virus
uagauaguuuuuuugagccauau

SEQ ID NO: 4087069 - RNA, 16 nt, Variola virus
uagauauaacuucugg

SEQ ID NO: 4087070 - RNA, 16 nt, Variola virus
uagauauaccagaacu

SEQ ID NO: 4087071 - RNA, 18 nt, Variola virus
uagaucacccuaaucuua

SEQ ID NO: 4087072 - RNA, 16 nt, Variola virus
uagaucugaauuaaau

SEQ ID NO: 4087073 - RNA, 20 nt, Variola virus
uagaugauaauuuauacaaa

SEQ ID NO: 4087074 - RNA, 15 nt, Variola virus
uagaugauauuguaa

SEQ ID NO: 4087075 - RNA, 13 nt, Variola virus
uagauuuaucuag

SEQ ID NO: 4087076 - RNA, 16 nt, Variola virus
uagauuuguaucucuu

SEQ ID NO: 4087077 - RNA, 18 nt, Variola virus
uagauuuguaucucuuuu

SEQ ID NO: 4087078 - RNA, 16 nt, Variola virus
uagauuuuccauccac

SEQ ID NO: 4087079 - RNA, 15 nt, Variola virus
uagauuuuguugaga

SEQ ID NO: 4087080 - RNA, 13 nt, Variola virus
uagcaaaauuaac

SEQ ID NO: 4087081 - RNA, 23 nt, Variola virus
uagcaaacaugauagcugugaua

SEQ ID NO: 4087082 - RNA, 18 nt, Variola virus
uagcaaaggaaauugugc

SEQ ID NO: 4087083 - RNA, 13 nt, Variola virus
uagcaaauauucu

SEQ ID NO: 4087084 - RNA, 13 nt, Variola virus
uagcaauugcauu

SEQ ID NO: 4087085 - RNA, 20 nt, Variola virus
uagcaauuucugauucuaga

SEQ ID NO: 4087086 - RNA, 22 nt, Variola virus
uagcagcugauacgucauuaac

SEQ ID NO: 4087087 - RNA, 14 nt, Variola virus
uagcaucaaaacua

SEQ ID NO: 4087088 - RNA, 21 nt, Variola virus
uagcauuguuauguauuucau

SEQ ID NO: 4087089 - RNA, 23 nt, Variola virus
uagcauuucuaccaaccaagaau

SEQ ID NO: 4087090 - RNA, 17 nt, Variola virus
uagcccucuucaagaac

SEQ ID NO: 4087091 - RNA, 14 nt, Variola virus
uagcgacaggugau

SEQ ID NO: 4087092 - RNA, 17 nt, Variola virus
uagcugagaauaucuuu

SEQ ID NO: 4087093 - RNA, 13 nt, Variola virus
uagcuguuuucau

SEQ ID NO: 4087094 - RNA, 15 nt, Variola virus
uaggaccacuagcaa

SEQ ID NO: 4087095 - RNA, 14 nt, Variola virus
uaggauaauaauua

SEQ ID NO: 4087096 - RNA, 14 nt, Variola virus
uaggauacaagauc

SEQ ID NO: 4087097 - RNA, 21 nt, Variola virus
uaggcauaccauuagauaauc

SEQ ID NO: 4087098 - RNA, 16 nt, Variola virus
uaggcuauaaauauua

SEQ ID NO: 4087099 - RNA, 21 nt, Variola virus
uagggagaguauaaaacauua

SEQ ID NO: 4087100 - RNA, 19 nt, Variola virus
uagggaugauaaauauuua

SEQ ID NO: 4087101 - RNA, 14 nt, Variola virus
uaggguaucuaauu

SEQ ID NO: 4087102 - RNA, 15 nt, Variola virus
uagguaucaaagaua

SEQ ID NO: 4087103 - RNA, 16 nt, Variola virus
uagguauuguuuucac

SEQ ID NO: 4087104 - RNA, 18 nt, Variola virus
uagguuuaguaucucaau

SEQ ID NO: 4087105 - RNA, 14 nt, Variola virus
uagguuucuauaau

SEQ ID NO: 4087106 - RNA, 20 nt, Variola virus
uaguaaaauaaucauacaau

SEQ ID NO: 4087107 - RNA, 17 nt, Variola virus
uaguaacugacuuaaua

SEQ ID NO: 4087108 - RNA, 16 nt, Variola virus
uaguaauaaaauuucu

SEQ ID NO: 4087109 - RNA, 20 nt, Variola virus
uaguaauuaaauauaucaug

SEQ ID NO: 4087110 - RNA, 13 nt, Variola virus
uaguacaugaaug

SEQ ID NO: 4087111 - RNA, 17 nt, Variola virus
uaguaccuagaacaaug

SEQ ID NO: 4087112 - RNA, 12 nt, Variola virus
uaguagaugcua

SEQ ID NO: 4087113 - RNA, 18 nt, Variola virus
uaguagcgaaaacuauau

SEQ ID NO: 4087114 - RNA, 14 nt, Variola virus
uaguauaauauuua

SEQ ID NO: 4087115 - RNA, 17 nt, Variola virus
uaguaucauccacauau

SEQ ID NO: 4087116 - RNA, 13 nt, Variola virus
uaguaucuaaaac

SEQ ID NO: 4087117 - RNA, 16 nt, Variola virus
uaguaucuaaaacuac

SEQ ID NO: 4087118 - RNA, 19 nt, Variola virus
uaguaucuagcucuguaaa

SEQ ID NO: 4087119 - RNA, 21 nt, Variola virus
uaguaugaagauaaacacuca

SEQ ID NO: 4087120 - RNA, 16 nt, Variola virus
uaguauugacaaauau

SEQ ID NO: 4087121 - RNA, 19 nt, Variola virus
uagucgguuaauguuguau

SEQ ID NO: 4087122 - RNA, 15 nt, Variola virus
uagucuauaugauca

SEQ ID NO: 4087123 - RNA, 15 nt, Variola virus
uagucuguacaaaag

SEQ ID NO: 4087124 - RNA, 15 nt, Variola virus
uagugaaacaaaaua

SEQ ID NO: 4087125 - RNA, 15 nt, Variola virus
uagugacaauacuau

SEQ ID NO: 4087126 - RNA, 13 nt, Variola virus
uagugauagauuu

SEQ ID NO: 4087127 - RNA, 23 nt, Variola virus
uagugccaucagaauaggaugaa

SEQ ID NO: 4087128 - RNA, 13 nt, Variola virus
uaguggacaacau

SEQ ID NO: 4087129 - RNA, 17 nt, Variola virus
uaguggaucucaaugac

SEQ ID NO: 4087130 - RNA, 18 nt, Variola virus
uaguguaaagaacaaaug

SEQ ID NO: 4087131 - RNA, 17 nt, Variola virus
uaguguaucgacaucuu

SEQ ID NO: 4087132 - RNA, 16 nt, Variola virus
uaguuaauaaaaucua

SEQ ID NO: 4087133 - RNA, 17 nt, Variola virus
uaguuacuuuaauaacc

SEQ ID NO: 4087134 - RNA, 20 nt, Variola virus
uaguuagggaucacaugaau

SEQ ID NO: 4087135 - RNA, 19 nt, Variola virus
uaguuauagguaauacgcu

SEQ ID NO: 4087136 - RNA, 17 nt, Variola virus
uaguuauaucacaugau

SEQ ID NO: 4087137 - RNA, 17 nt, Variola virus
uaguuauuacuuuucuc

SEQ ID NO: 4087138 - RNA, 18 nt, Variola virus
uaguucguguacuaguca

SEQ ID NO: 4087139 - RNA, 22 nt, Variola virus
uaguugauagaacaaaauacau

SEQ ID NO: 4087140 - RNA, 18 nt, Variola virus
uaguuguaaaguuaaaau

SEQ ID NO: 4087141 - RNA, 21 nt, Variola virus
uaguuguauacugagaauuaa

SEQ ID NO: 4087142 - RNA, 16 nt, Variola virus
uaguuuaucauacuua

SEQ ID NO: 4087143 - RNA, 18 nt, Variola virus
uaguuucagaauuuucua

SEQ ID NO: 4087144 - RNA, 20 nt, Variola virus
uaguuuguaauuuuaacaua

SEQ ID NO: 4087145 - RNA, 15 nt, Variola virus
uaguuuuacuaucau

SEQ ID NO: 4087146 - RNA, 16 nt, Variola virus
uaguuuuacuaucaua

SEQ ID NO: 4087147 - RNA, 21 nt, Variola virus
uaguuuucucuauucugaaau

SEQ ID NO: 4087148 - RNA, 22 nt, Variola virus
uaguuuucucuuuuuauccuca

SEQ ID NO: 4087149 - RNA, 14 nt, Variola virus
uauaaaauauucua

SEQ ID NO: 4087150 - RNA, 17 nt, Variola virus
uauaaaaucuguaucga

SEQ ID NO: 4087151 - RNA, 21 nt, Variola virus
uauaaagucugucaaaucauc

SEQ ID NO: 4087152 - RNA, 22 nt, Variola virus
uauaaauaaaagacaaaucuug

SEQ ID NO: 4087153 - RNA, 23 nt, Variola virus
aauacuccucauuacguuucauu

SEQ ID NO: 4087154 - RNA, 14 nt, Variola virus
aauacuuaaaaaug

SEQ ID NO: 4087155 - RNA, 15 nt, Variola virus
aauacuuaaaaugua

SEQ ID NO: 4087156 - RNA, 20 nt, Variola virus
aauacuuaccccuugaucgu

SEQ ID NO: 4087157 - RNA, 15 nt, Variola virus
aauacuuaguuucca

SEQ ID NO: 4087158 - RNA, 15 nt, Variola virus
aauacuuuacgcuau

SEQ ID NO: 4087159 - RNA, 21 nt, Variola virus
aauacuuuuguuacuaauauc

SEQ ID NO: 4087160 - RNA, 22 nt, Variola virus
aauacuuuuuuuauuaaaugac

SEQ ID NO: 4087161 - RNA, 17 nt, Variola virus
aauagaaaaaacaugug

SEQ ID NO: 4087162 - RNA, 18 nt, Variola virus
aauagauagucuaccauu

SEQ ID NO: 4087163 - RNA, 19 nt, Variola virus
aauagcauagauauagaaa

SEQ ID NO: 4087164 - RNA, 21 nt, Variola virus
aauagcaucaucuuuaucauu

SEQ ID NO: 4087165 - RNA, 15 nt, Variola virus
aauagccguuucaug

SEQ ID NO: 4087166 - RNA, 15 nt, Variola virus
aauagcucaauauaa

SEQ ID NO: 4087167 - RNA, 16 nt, Variola virus
aauaggaauggauaau

SEQ ID NO: 4087168 - RNA, 19 nt, Variola virus
aauaggagugauagaacug

SEQ ID NO: 4087169 - RNA, 16 nt, Variola virus
aauaggugaugaugca

SEQ ID NO: 4087170 - RNA, 18 nt, Variola virus
aauaguauacgcagaaaa

SEQ ID NO: 4087171 - RNA, 22 nt, Variola virus
aauaguauacgcagaaaagaua

SEQ ID NO: 4087172 - RNA, 13 nt, Variola virus
aauaguaucaucu

SEQ ID NO: 4087173 - RNA, 17 nt, Variola virus
aauagugccaucagaau

SEQ ID NO: 4087174 - RNA, 15 nt, Variola virus
aauaguguuagauaa

SEQ ID NO: 4087175 - RNA, 16 nt, Variola virus
aauaguuauuagaaua

SEQ ID NO: 4087176 - RNA, 23 nt, Variola virus
aauaguucucccuuuuuaaaggu

SEQ ID NO: 4087177 - RNA, 22 nt, Variola virus
aauaguuuacagauauuuucca

SEQ ID NO: 4087178 - RNA, 17 nt, Variola virus
aauaguuuauaacauua

SEQ ID NO: 4087179 - RNA, 14 nt, Variola virus
aauaguuucauaau

SEQ ID NO: 4087180 - RNA, 23 nt, Variola virus
aauaguuuguuuuggaaauagau

SEQ ID NO: 4087181 - RNA, 12 nt, Variola virus
aauauaaaacua

SEQ ID NO: 4087182 - RNA, 16 nt, Variola virus
aauauaaugaaagaua

SEQ ID NO: 4087183 - RNA, 18 nt, Variola virus
aauauaaugauauacaau

SEQ ID NO: 4087184 - RNA, 12 nt, Variola virus
aauauagaauau

SEQ ID NO: 4087185 - RNA, 14 nt, Variola virus
aauauaugauuauc

SEQ ID NO: 4087186 - RNA, 21 nt, Variola virus
aauauauguaaucauuaucca

SEQ ID NO: 4087187 - RNA, 17 nt, Variola virus
aauaucacauaucaugu

SEQ ID NO: 4087188 - RNA, 15 nt, Variola virus
aauaucagaaaggau

SEQ ID NO: 4087189 - RNA, 14 nt, Variola virus
aauaucagagagau

SEQ ID NO: 4087190 - RNA, 16 nt, Variola virus
aauaucaggaaaugua

SEQ ID NO: 4087191 - RNA, 23 nt, Variola virus
aauauccaaguauuuuaauucua

SEQ ID NO: 4087192 - RNA, 17 nt, Variola virus
aauauccauuuuacauu

SEQ ID NO: 4087193 - RNA, 19 nt, Variola virus
aauaucccacauugucauc

SEQ ID NO: 4087194 - RNA, 14 nt, Variola virus
aauaucuuaaauaa

SEQ ID NO: 4087195 - RNA, 22 nt, Variola virus
aauauggagagguguauuucca

SEQ ID NO: 4087196 - RNA, 23 nt, Variola virus
aauauggagagguguauuuccau

SEQ ID NO: 4087197 - RNA, 20 nt, Variola virus
aauauggauccgguuaauuu

SEQ ID NO: 4087198 - RNA, 21 nt, Variola virus
aauaugguauggguucugaua

SEQ ID NO: 4087199 - RNA, 21 nt, Variola virus
aauaugucaucuauggaauua

SEQ ID NO: 4087200 - RNA, 18 nt, Variola virus
aauauuacgaauuacauu

SEQ ID NO: 4087201 - RNA, 13 nt, Variola virus
aauauuacuacau

SEQ ID NO: 4087202 - RNA, 12 nt, Variola virus
aauauuaggaau

SEQ ID NO: 4087203 - RNA, 19 nt, Variola virus
aauauuauauaaacauuug

SEQ ID NO: 4087204 - RNA, 13 nt, Variola virus
aauauuauuacca

SEQ ID NO: 4087205 - RNA, 14 nt, Variola virus
aauauuauuaucca

SEQ ID NO: 4087206 - RNA, 19 nt, Variola virus
aauauuauucuuugauucg

SEQ ID NO: 4087207 - RNA, 13 nt, Variola virus
aauauucagaaaa

SEQ ID NO: 4087208 - RNA, 13 nt, Variola virus
aauauucauuaau

SEQ ID NO: 4087209 - RNA, 21 nt, Variola virus
aauauucauucaauauuuaca

SEQ ID NO: 4087210 - RNA, 17 nt, Variola virus
aauauucuuuucuaaga

SEQ ID NO: 4087211 - RNA, 16 nt, Variola virus
aguaaucucaauaauu

SEQ ID NO: 4087212 - RNA, 20 nt, Variola virus
aguaauggguuauuguggau

SEQ ID NO: 4087213 - RNA, 14 nt, Variola virus
aguaauuauaagaa

SEQ ID NO: 4087214 - RNA, 18 nt, Variola virus
aguaauucagacacuucu

SEQ ID NO: 4087215 - RNA, 16 nt, Variola virus
aguacaaugaacgaua

SEQ ID NO: 4087216 - RNA, 18 nt, Variola virus
aguacagaauuaauuaga

SEQ ID NO: 4087217 - RNA, 15 nt, Variola virus
aguacaucuaucaca

SEQ ID NO: 4087218 - RNA, 22 nt, Variola virus
aguacuacugaagaacuaaaag

SEQ ID NO: 4087219 - RNA, 14 nt, Variola virus
aguacuuauuaaaa

SEQ ID NO: 4087220 - RNA, 18 nt, Variola virus
aguaggauauauuaaagu

SEQ ID NO: 4087221 - RNA, 19 nt, Variola virus
aguaguuuaacuagucuuc

SEQ ID NO: 4087222 - RNA, 17 nt, Variola virus
aguauaaaguuuauaca

SEQ ID NO: 4087223 - RNA, 12 nt, Variola virus
aguauacauguu

SEQ ID NO: 4087224 - RNA, 17 nt, Variola virus
aguauaccaaacauagu

SEQ ID NO: 4087225 - RNA, 19 nt, Variola virus
aguauaguuuuaaacuaau

SEQ ID NO: 4087226 - RNA, 14 nt, Variola virus
aguauauaauaaag

SEQ ID NO: 4087227 - RNA, 15 nt, Variola virus
aguaucauuaaaucu

SEQ ID NO: 4087228 - RNA, 20 nt, Variola virus
aguaucuuuuguucuagaug

SEQ ID NO: 4087229 - RNA, 16 nt, Variola virus
aguauggcgacauuga

SEQ ID NO: 4087230 - RNA, 17 nt, Variola virus
aguauggcgacauugau

SEQ ID NO: 4087231 - RNA, 13 nt, Variola virus
aguauguaacaga

SEQ ID NO: 4087232 - RNA, 23 nt, Variola virus
aguaugucgaaucuaaacuagug

SEQ ID NO: 4087233 - RNA, 15 nt, Variola virus
aguaugucuuaauaa

SEQ ID NO: 4087234 - RNA, 15 nt, Variola virus
aguaugugaauagau

SEQ ID NO: 4087235 - RNA, 22 nt, Variola virus
aguauuaaccaugaaagaaaga

SEQ ID NO: 4087236 - RNA, 18 nt, Variola virus
aguauugacaauacugua

SEQ ID NO: 4087237 - RNA, 16 nt, Variola virus
aguauuucuuacucaa

SEQ ID NO: 4087238 - RNA, 13 nt, Variola virus
aguauuugucaaa

SEQ ID NO: 4087239 - RNA, 16 nt, Variola virus
aguauuuuuaccuaau

SEQ ID NO: 4087240 - RNA, 15 nt, Variola virus
agucaacaucuaaag

SEQ ID NO: 4087241 - RNA, 15 nt, Variola virus
agucaauauauuaag

SEQ ID NO: 4087242 - RNA, 20 nt, Variola virus
agucaauggagaaauacuua

SEQ ID NO: 4087243 - RNA, 22 nt, Variola virus
agucacgaucaccacuuucaua

SEQ ID NO: 4087244 - RNA, 21 nt, Variola virus
agucaucuuauguuuuuaaga

SEQ ID NO: 4087245 - RNA, 21 nt, Variola virus
agucaugcuuauugauaaaga

SEQ ID NO: 4087246 - RNA, 15 nt, Variola virus
agucauguuaaaaau

SEQ ID NO: 4087247 - RNA, 16 nt, Variola virus
agucauuacuaauaga

SEQ ID NO: 4087248 - RNA, 19 nt, Variola virus
aguccuaguuguauacuga

SEQ ID NO: 4087249 - RNA, 16 nt, Variola virus
aguccuauauauuuga

SEQ ID NO: 4087250 - RNA, 21 nt, Variola virus
agucguaugugguaugauaca

SEQ ID NO: 4087251 - RNA, 18 nt, Variola virus
agucuacauugucauuau

SEQ ID NO: 4087252 - RNA, 24 nt, Variola virus
agucuagagucuuugcaaacauaa

SEQ ID NO: 4087253 - RNA, 20 nt, Variola virus
agucuagcagccaauacuuu

SEQ ID NO: 4087254 - RNA, 23 nt, Variola virus
agucuauaugaucaaaaagagau

SEQ ID NO: 4087255 - RNA, 17 nt, Variola virus
agucuccagaaaucugu

SEQ ID NO: 4087256 - RNA, 16 nt, Variola virus
agucugucuguagaua

SEQ ID NO: 4087257 - RNA, 20 nt, Variola virus
agucuguugagcuugaucau

SEQ ID NO: 4087258 - RNA, 23 nt, Variola virus
agugauauagaucccaaaucuuc

SEQ ID NO: 4087259 - RNA, 15 nt, Variola virus
agugcaaugaauauc

SEQ ID NO: 4087260 - RNA, 15 nt, Variola virus
agugcacuuagucca

SEQ ID NO: 4087261 - RNA, 18 nt, Variola virus
agugcagauaaucauuua

SEQ ID NO: 4087262 - RNA, 18 nt, Variola virus
agugcgaugauuguacac

SEQ ID NO: 4087263 - RNA, 22 nt, Variola virus
agugcuacaaaacagaaauaug

SEQ ID NO: 4087264 - RNA, 23 nt, Variola virus
aguggaucgguucagcauuuaau

SEQ ID NO: 4087265 - RNA, 14 nt, Variola virus
aguggauucuucua

SEQ ID NO: 4087266 - RNA, 22 nt, Variola virus
agugggaugaaauccuauuuua

SEQ ID NO: 4087267 - RNA, 19 nt, Variola virus
agugguuaaucuuagaaau

SEQ ID NO: 4087268 - RNA, 15 nt, Variola virus
aguguaaaacuauau

SEQ ID NO: 4087269 - RNA, 16 nt, Variola virus
aguguaccaauaugcg

SEQ ID NO: 4087270 - RNA, 16 nt, Variola virus
agugucuacuuaaaug

SEQ ID NO: 4087271 - RNA, 18 nt, Variola virus
agugucuacuuaaaugua

SEQ ID NO: 4087272 - RNA, 23 nt, Variola virus
agugugaauaugaucuucaucua

SEQ ID NO: 4087273 - RNA, 17 nt, Variola virus
aguguuaaaaaauggau

SEQ ID NO: 4087274 - RNA, 19 nt, Variola virus
aguuaaaacuuguaagaag

SEQ ID NO: 4087275 - RNA, 20 nt, Variola virus
aguuaauggaauaucaaauc

SEQ ID NO: 4087276 - RNA, 17 nt, Variola virus
aguuacaacuauuacaa

SEQ ID NO: 4087277 - RNA, 16 nt, Variola virus
aguuacaggaacuuaa

SEQ ID NO: 4087278 - RNA, 17 nt, Variola virus
aguuacgacugaaauaa

SEQ ID NO: 4087279 - RNA, 16 nt, Variola virus
aguuagaaaguauuuu

SEQ ID NO: 4087280 - RNA, 14 nt, Variola virus
aguuaguuuuagau

SEQ ID NO: 4087281 - RNA, 22 nt, Variola virus
aguuaucugguaaguucauuau

SEQ ID NO: 4087282 - RNA, 15 nt, Variola virus
aguuauuuacuuuga

SEQ ID NO: 4087283 - RNA, 19 nt, Variola virus
aguucauauuuauuagaua

SEQ ID NO: 4087284 - RNA, 17 nt, Variola virus
aguucauuauaaauucu

SEQ ID NO: 4087285 - RNA, 15 nt, Variola virus
aguucauuaucugaa

SEQ ID NO: 4087286 - RNA, 14 nt, Variola virus
aguuccuuuucuag

SEQ ID NO: 4087287 - RNA, 17 nt, Variola virus
aguucugcgcaaggcau

SEQ ID NO: 4087288 - RNA, 18 nt, Variola virus
aguugaacagaugauaua

SEQ ID NO: 4087289 - RNA, 12 nt, Variola virus
aguuguaaaugu

SEQ ID NO: 4087290 - RNA, 19 nt, Variola virus
aguugucuauauuaacucu

SEQ ID NO: 4087291 - RNA, 19 nt, Variola virus
aguuuaauacuaauacuaa

SEQ ID NO: 4087292 - RNA, 16 nt, Variola virus
aguuuaucauacuuag

SEQ ID NO: 4087293 - RNA, 18 nt, Variola virus
aguuuauuaucuuuacca

SEQ ID NO: 4087294 - RNA, 19 nt, Variola virus
aguuucauaucguaacuga

SEQ ID NO: 4087295 - RNA, 16 nt, Variola virus
aguuucuauacugucu

SEQ ID NO: 4087296 - RNA, 20 nt, Variola virus
aguuugccuuuuuuaguaga

SEQ ID NO: 4087297 - RNA, 14 nt, Variola virus
aguuuuaacuggua

SEQ ID NO: 4087298 - RNA, 20 nt, Variola virus
aguuuuauauccuuuagagu

SEQ ID NO: 4087299 - RNA, 13 nt, Variola virus
aguuuuauuggga

SEQ ID NO: 4087300 - RNA, 21 nt, Variola virus
aguuuucagaagauaauuauc

SEQ ID NO: 4087301 - RNA, 15 nt, Variola virus
aguuuuuacacauag

SEQ ID NO: 4087302 - RNA, 15 nt, Variola virus
auaaaaaauauaaca

SEQ ID NO: 4087303 - RNA, 15 nt, Variola virus
auaaaacaaaaucua

SEQ ID NO: 4087304 - RNA, 20 nt, Variola virus
auaaaacaauggaacaauua

SEQ ID NO: 4087305 - RNA, 11 nt, Variola virus
auaaaacauua

SEQ ID NO: 4087306 - RNA, 20 nt, Variola virus
auaaaaccaugaaauauauu

SEQ ID NO: 4087307 - RNA, 19 nt, Variola virus
auaaaacucauauaguuaa

SEQ ID NO: 4087308 - RNA, 19 nt, Variola virus
auaaaauccaugagaucua

SEQ ID NO: 4087309 - RNA, 13 nt, Variola virus
auaaaaucuauau

SEQ ID NO: 4087310 - RNA, 15 nt, Variola virus
auaaaauuaauaaua

SEQ ID NO: 4087311 - RNA, 17 nt, Variola virus
auaaaauuaaugagauu

SEQ ID NO: 4087312 - RNA, 17 nt, Variola virus
auaaacaacuaaaaugu

SEQ ID NO: 4087313 - RNA, 21 nt, Variola virus
auaaacagucuccuaauauaa

SEQ ID NO: 4087314 - RNA, 15 nt, Variola virus
auaaacaugucuauu

SEQ ID NO: 4087315 - RNA, 16 nt, Variola virus
auaaaccauuguauaa

SEQ ID NO: 4087316 - RNA, 23 nt, Variola virus
auaaacucacauuucaaauauau

SEQ ID NO: 4087317 - RNA, 20 nt, Variola virus
auaaacucagauaauagcaa

SEQ ID NO: 4087318 - RNA, 22 nt, Variola virus
auaaagaaaugucuacauaaau

SEQ ID NO: 4087319 - RNA, 17 nt, Variola virus
auaaagauaaaaacgau

SEQ ID NO: 4087320 - RNA, 17 nt, Variola virus
auaaagguagaccuaau

SEQ ID NO: 4087321 - RNA, 17 nt, Variola virus
auaaaguauauaugaga

SEQ ID NO: 4087322 - RNA, 20 nt, Variola virus
auaaagucuuuaguaugaca

SEQ ID NO: 4087323 - RNA, 21 nt, Variola virus
auaaauacccuuccaaauaau

SEQ ID NO: 4087324 - RNA, 17 nt, Variola virus
auaaauaguaaauacaa

SEQ ID NO: 4087325 - RNA, 18 nt, Variola virus
auaaauaguaucaucuau

SEQ ID NO: 4087326 - RNA, 19 nt, Variola virus
auaaauaucauuaauauau

SEQ ID NO: 4087327 - RNA, 13 nt, Variola virus
auaaaucauauaa

SEQ ID NO: 4087328 - RNA, 20 nt, Variola virus
auaaaucauauaaaaaauga

SEQ ID NO: 4087329 - RNA, 21 nt, Variola virus
auaaaugcucugcaauaacua

SEQ ID NO: 4087330 - RNA, 15 nt, Variola virus
auaaauuaaaauaca

SEQ ID NO: 4087331 - RNA, 13 nt, Variola virus
auaaauuuauuau

SEQ ID NO: 4087332 - RNA, 14 nt, Variola virus
auaacaaaauacaa

SEQ ID NO: 4087333 - RNA, 14 nt, Variola virus
auaacaaauguaua

SEQ ID NO: 4087334 - RNA, 16 nt, Variola virus
auaacaacucaaacau

SEQ ID NO: 4087335 - RNA, 23 nt, Variola virus
auaacaagagauuuauuguguau

SEQ ID NO: 4087336 - RNA, 22 nt, Variola virus
auaacaauuaacaauuaucaaa

SEQ ID NO: 4087337 - RNA, 17 nt, Variola virus
auaacacuaauuuguaa

SEQ ID NO: 4087338 - RNA, 17 nt, Variola virus
auaacaggcuaaaaugu

SEQ ID NO: 4087339 - RNA, 18 nt, Variola virus
auaacauauuuuucuaug

SEQ ID NO: 4087340 - RNA, 17 nt, Variola virus
auaacauguaucaauau

SEQ ID NO: 4087341 - RNA, 15 nt, Variola virus
auaacauguuaauuu

SEQ ID NO: 4087342 - RNA, 16 nt, Variola virus
auaacauuaauaucaa

SEQ ID NO: 4087343 - RNA, 18 nt, Variola virus
auaacauuuuuuguaaau

SEQ ID NO: 4087344 - RNA, 18 nt, Variola virus
auaacccaaguauugaaa

SEQ ID NO: 4087345 - RNA, 21 nt, Variola virus
auaaccgguaagaauaguaaa

SEQ ID NO: 4087346 - RNA, 17 nt, Variola virus
auaaccuccugaaaaug

SEQ ID NO: 4087347 - RNA, 19 nt, Variola virus
auaacguaaccagaauugu

SEQ ID NO: 4087348 - RNA, 18 nt, Variola virus
auguagagguaaaaagac

SEQ ID NO: 4087349 - RNA, 18 nt, Variola virus
auguagauaaaaaagaua

SEQ ID NO: 4087350 - RNA, 16 nt, Variola virus
auguagcaaacaugau

SEQ ID NO: 4087351 - RNA, 14 nt, Variola virus
auguauacauuuau

SEQ ID NO: 4087352 - RNA, 19 nt, Variola virus
auguauauauccaggaauu

SEQ ID NO: 4087353 - RNA, 14 nt, Variola virus
auguauauuuucca

SEQ ID NO: 4087354 - RNA, 19 nt, Variola virus
auguauuguuuaguuacuc

SEQ ID NO: 4087355 - RNA, 21 nt, Variola virus
auguauuugagagucuuauau

SEQ ID NO: 4087356 - RNA, 22 nt, Variola virus
auguauuuugaggaaauugaua

SEQ ID NO: 4087357 - RNA, 21 nt, Variola virus
auguauuuuuuucuaaauaua

SEQ ID NO: 4087358 - RNA, 20 nt, Variola virus
augucaaaacuuguucaauu

SEQ ID NO: 4087359 - RNA, 13 nt, Variola virus
augucauuuguau

SEQ ID NO: 4087360 - RNA, 18 nt, Variola virus
augucauuuuuuuauccg

SEQ ID NO: 4087361 - RNA, 22 nt, Variola virus
auguccaaaucuaguuguggaa

SEQ ID NO: 4087362 - RNA, 17 nt, Variola virus
augucgccgacaugaau

SEQ ID NO: 4087363 - RNA, 21 nt, Variola virus
augucgguuggcauucuauuu

SEQ ID NO: 4087364 - RNA, 18 nt, Variola virus
augucguuauucugaaac

SEQ ID NO: 4087365 - RNA, 18 nt, Variola virus
augugaauuuagcauaua

SEQ ID NO: 4087366 - RNA, 23 nt, Variola virus
augugauuguucaaucaauauua

SEQ ID NO: 4087367 - RNA, 20 nt, Variola virus
auguggaaauuacacuguau

SEQ ID NO: 4087368 - RNA, 13 nt, Variola virus
auguguagaauua

SEQ ID NO: 4087369 - RNA, 15 nt, Variola virus
auguguuaaaaagaa

SEQ ID NO: 4087370 - RNA, 21 nt, Variola virus
auguguuuacacuaacuguau

SEQ ID NO: 4087371 - RNA, 21 nt, Variola virus
auguguuucccaaacaaaaug

SEQ ID NO: 4087372 - RNA, 14 nt, Variola virus
auguuaaaaaaaca

SEQ ID NO: 4087373 - RNA, 14 nt, Variola virus
auguuaaaaaugac

SEQ ID NO: 4087374 - RNA, 19 nt, Variola virus
auguuaaaacuacaaaaau

SEQ ID NO: 4087375 - RNA, 17 nt, Variola virus
auguuacucacauuuau

SEQ ID NO: 4087376 - RNA, 15 nt, Variola virus
auguuauaaaaucua

SEQ ID NO: 4087377 - RNA, 14 nt, Variola virus
auguuauuaaaugu

SEQ ID NO: 4087378 - RNA, 19 nt, Variola virus
auguucugauuuuaucuuu

SEQ ID NO: 4087379 - RNA, 14 nt, Variola virus
auguuggaaauacu

SEQ ID NO: 4087380 - RNA, 14 nt, Variola virus
auguuuaucuucuu

SEQ ID NO: 4087381 - RNA, 13 nt, Variola virus
auguuucaaucau

SEQ ID NO: 4087382 - RNA, 15 nt, Variola virus
auguuucauaaaaug

SEQ ID NO: 4087383 - RNA, 18 nt, Variola virus
auguuuccgagaaauaua

SEQ ID NO: 4087384 - RNA, 19 nt, Variola virus
auguuucuuuaaaagucaa

SEQ ID NO: 4087385 - RNA, 23 nt, Variola virus
auguuugcugaagucaaauacga

SEQ ID NO: 4087386 - RNA, 13 nt, Variola virus
auguuuucacaau

SEQ ID NO: 4087387 - RNA, 14 nt, Variola virus
auguuuuuaauagc

SEQ ID NO: 4087388 - RNA, 18 nt, Variola virus
auguuuuuagaaaaucua

SEQ ID NO: 4087389 - RNA, 12 nt, Variola virus
auuaaaaaagau

SEQ ID NO: 4087390 - RNA, 17 nt, Variola virus
auuaaaaaauaacuuaa

SEQ ID NO: 4087391 - RNA, 14 nt, Variola virus
auuaaaaaaucacu

SEQ ID NO: 4087392 - RNA, 21 nt, Variola virus
auuaaaacuaccaauaagaag

SEQ ID NO: 4087393 - RNA, 21 nt, Variola virus
auuaaaauaaauauucuucau

SEQ ID NO: 4087394 - RNA, 19 nt, Variola virus
auuaaauauagguauauuu

SEQ ID NO: 4087395 - RNA, 14 nt, Variola virus
auuaaaucaugaag

SEQ ID NO: 4087396 - RNA, 19 nt, Variola virus
auuaaaugauuguauuaac

SEQ ID NO: 4087397 - RNA, 19 nt, Variola virus
auuaacaaauuuuaaacaa

SEQ ID NO: 4087398 - RNA, 14 nt, Variola virus
auuaacauuuugaa

SEQ ID NO: 4087399 - RNA, 18 nt, Variola virus
auuaaccgauaaaaagac

SEQ ID NO: 4087400 - RNA, 20 nt, Variola virus
auuaacgaguucaaauauga

SEQ ID NO: 4087401 - RNA, 20 nt, Variola virus
auuaacgcaccuauaaagac

SEQ ID NO: 4087402 - RNA, 20 nt, Variola virus
auuaacucuuuuauuuucca

SEQ ID NO: 4087403 - RNA, 15 nt, Variola virus
auuaacugaggauga

SEQ ID NO: 4087404 - RNA, 20 nt, Variola virus
auuaacuguugccaaugaug

SEQ ID NO: 4087405 - RNA, 14 nt, Variola virus
auuaagacauauau

SEQ ID NO: 4087406 - RNA, 16 nt, Variola virus
auuaagcaacaugucu

SEQ ID NO: 4087407 - RNA, 19 nt, Variola virus
auuaagccgccauugauua

SEQ ID NO: 4087408 - RNA, 15 nt, Variola virus
auuaagugacauuau

SEQ ID NO: 4087409 - RNA, 17 nt, Variola virus
auuaaguguuauaagau

SEQ ID NO: 4087410 - RNA, 15 nt, Variola virus
auuaauaagaaugac

SEQ ID NO: 4087411 - RNA, 18 nt, Variola virus
auuaauacacauaaugaa

SEQ ID NO: 4087412 - RNA, 13 nt, Variola virus
auuaauacauuua

SEQ ID NO: 4087413 - RNA, 19 nt, Variola virus
auuaauacggcagcaacua

SEQ ID NO: 4087414 - RNA, 12 nt, Variola virus
auuaauacuuuu

SEQ ID NO: 4087415 - RNA, 12 nt, Variola virus
auuaauauuaac

SEQ ID NO: 4087416 - RNA, 18 nt, Variola virus
auuaauauuacuguuaau

SEQ ID NO: 4087417 - RNA, 23 nt, Variola virus
auuaauauuacuguuaauaacug

SEQ ID NO: 4087418 - RNA, 16 nt, Variola virus
auuaauauuuaugauu

SEQ ID NO: 4087419 - RNA, 19 nt, Variola virus
auuaaucauucuaaaacua

SEQ ID NO: 4087420 - RNA, 16 nt, Variola virus
auuaaucguuuuugaa

SEQ ID NO: 4087421 - RNA, 14 nt, Variola virus
auuaaucuuuacca

SEQ ID NO: 4087422 - RNA, 13 nt, Variola virus
auuaaugagauug

SEQ ID NO: 4087423 - RNA, 12 nt, Variola virus
auuaauuacaau

SEQ ID NO: 4087424 - RNA, 14 nt, Variola virus
auuaauuauacuau

SEQ ID NO: 4087425 - RNA, 23 nt, Variola virus
auuaauuucuaaaggagcaaaug

SEQ ID NO: 4087426 - RNA, 14 nt, Variola virus
auuacaaaaucacc

SEQ ID NO: 4087427 - RNA, 19 nt, Variola virus
auuacaaacuauagaaauu

SEQ ID NO: 4087428 - RNA, 23 nt, Variola virus
auuacaaaucuagagguagaacu

SEQ ID NO: 4087429 - RNA, 14 nt, Variola virus
auuacaacauaaua

SEQ ID NO: 4087430 - RNA, 21 nt, Variola virus
auuacaacauggccaaaauuu

SEQ ID NO: 4087431 - RNA, 19 nt, Variola virus
auuacaagaaauauggauc

SEQ ID NO: 4087432 - RNA, 15 nt, Variola virus
auuacaagucaaaga

SEQ ID NO: 4087433 - RNA, 20 nt, Variola virus
auuacauucucauuaauuaa

SEQ ID NO: 4087434 - RNA, 17 nt, Variola virus
auuaccugugguuaaaa

SEQ ID NO: 4087435 - RNA, 18 nt, Variola virus
auuacgcaucuguaaaag

SEQ ID NO: 4087436 - RNA, 14 nt, Variola virus
auuacgugauguga

SEQ ID NO: 4087437 - RNA, 16 nt, Variola virus
auuacguucuaccaau

SEQ ID NO: 4087438 - RNA, 19 nt, Variola virus
auuacuaaaucuguauauc

SEQ ID NO: 4087439 - RNA, 20 nt, Variola virus
auuacuuuacauauaauauc

SEQ ID NO: 4087440 - RNA, 12 nt, Variola virus
auuagaauguau

SEQ ID NO: 4087441 - RNA, 15 nt, Variola virus
auuagcauccuuaua

SEQ ID NO: 4087442 - RNA, 14 nt, Variola virus
auuagguacagaaa

SEQ ID NO: 4087443 - RNA, 16 nt, Variola virus
auuagguuaaaugauu

SEQ ID NO: 4087444 - RNA, 15 nt, Variola virus
auuaguaaaaaauuu

SEQ ID NO: 4087445 - RNA, 20 nt, Variola virus
auuaguaaggcuuuagaaac

SEQ ID NO: 4087446 - RNA, 18 nt, Variola virus
auuaguuuauauuacuga

SEQ ID NO: 4087447 - RNA, 22 nt, Variola virus
auuauacacauuauaauaggug

SEQ ID NO: 4087448 - RNA, 12 nt, Variola virus
auuauacaugau

SEQ ID NO: 4087449 - RNA, 22 nt, Variola virus
auuauacuguaacacaaugaag

SEQ ID NO: 4087450 - RNA, 13 nt, Variola virus
auuauacuuguau

SEQ ID NO: 4087451 - RNA, 19 nt, Variola virus
auuauagcaauauguguaa

SEQ ID NO: 4087452 - RNA, 19 nt, Variola virus
auuauagcuucuggauaua

SEQ ID NO: 4087453 - RNA, 14 nt, Variola virus
auuauauaauguau

SEQ ID NO: 4087454 - RNA, 19 nt, Variola virus
auuauauaauguauaaaug

SEQ ID NO: 4087455 - RNA, 16 nt, Variola virus
auuaucaaauguuguu

SEQ ID NO: 4087456 - RNA, 23 nt, Variola virus
auuaucaggaacauuaucaauuu

SEQ ID NO: 4087457 - RNA, 12 nt, Variola virus
auuaucaucaaa

SEQ ID NO: 4087458 - RNA, 12 nt, Variola virus
auuauccuaauc

SEQ ID NO: 4087459 - RNA, 15 nt, Variola virus
auuaucgacauaggu

SEQ ID NO: 4087460 - RNA, 20 nt, Variola virus
auuaucgaggauauuucaaa

SEQ ID NO: 4087461 - RNA, 19 nt, Variola virus
auuaucgcuaauugacaca

SEQ ID NO: 4087462 - RNA, 19 nt, Variola virus
auuaucuagucacugacug

SEQ ID NO: 4087463 - RNA, 13 nt, Variola virus
auuaucugaaaug

SEQ ID NO: 4087464 - RNA, 16 nt, Variola virus
auuaucuugucuuggu

SEQ ID NO: 4087465 - RNA, 20 nt, Variola virus
auuaugaaaaaaagauguau

SEQ ID NO: 4087466 - RNA, 17 nt, Variola virus
auuauuaaacaauacuc

SEQ ID NO: 4087467 - RNA, 18 nt, Variola virus
auuauuagauuuaauagc

SEQ ID NO: 4087468 - RNA, 18 nt, Variola virus
auuauuaucuuuagaaau

SEQ ID NO: 4087469 - RNA, 14 nt, Variola virus
auuauucuauccaa

SEQ ID NO: 4087470 - RNA, 21 nt, Variola virus
auuauucuccaccacauagac

SEQ ID NO: 4087471 - RNA, 14 nt, Variola virus
auuauucuuuggau

SEQ ID NO: 4087472 - RNA, 15 nt, Variola virus
auuauuugacuuugu

SEQ ID NO: 4087473 - RNA, 13 nt, Variola virus
auucaaaaaagaa

SEQ ID NO: 4087474 - RNA, 20 nt, Variola virus
auucaaaaaggaauuuacca

SEQ ID NO: 4087475 - RNA, 16 nt, Variola virus
auucacaaauaugacg

SEQ ID NO: 4087476 - RNA, 19 nt, Variola virus
auucacagacucucaagau

SEQ ID NO: 4087477 - RNA, 15 nt, Variola virus
auucacgcuuccaaa

SEQ ID NO: 4087478 - RNA, 13 nt, Variola virus
auucagaaaugga

SEQ ID NO: 4087479 - RNA, 19 nt, Variola virus
auucagaguccucuaauug

SEQ ID NO: 4087480 - RNA, 23 nt, Variola virus
auucagauaaucagccauaauua

SEQ ID NO: 4087481 - RNA, 16 nt, Variola virus
auucauaaaacauaau

SEQ ID NO: 4087482 - RNA, 18 nt, Variola virus
auucauaacgucauugau

SEQ ID NO: 4087483 - RNA, 15 nt, Variola virus
auucauaagaaucua

SEQ ID NO: 4087484 - RNA, 18 nt, Variola virus
auucauaguaguugugac

SEQ ID NO: 4087485 - RNA, 15 nt, Variola virus
auucaugaaaaugua

SEQ ID NO: 4087486 - RNA, 18 nt, Variola virus
auucauggaguuagaaaa

SEQ ID NO: 4087487 - RNA, 18 nt, Variola virus
auucauuaauuuucaguc

SEQ ID NO: 4087488 - RNA, 22 nt, Variola virus
auucauuacucuugauaaauug

SEQ ID NO: 4087489 - RNA, 22 nt, Variola virus
auuccaaauuuguggcaaugaa

SEQ ID NO: 4087490 - RNA, 17 nt, Variola virus
auuccaauuauuugaac

SEQ ID NO: 4087491 - RNA, 22 nt, Variola virus
auuccaguuuuaaacaaaauac

SEQ ID NO: 4087492 - RNA, 13 nt, Variola virus
auucccaaaauuu

SEQ ID NO: 4087493 - RNA, 22 nt, Variola virus
auuccuagagguacaacucauu

SEQ ID NO: 4087494 - RNA, 21 nt, Variola virus
auuccuucucguaggcacaca

SEQ ID NO: 4087495 - RNA, 17 nt, Variola virus
auucgaaaacucuaaga

SEQ ID NO: 4087496 - RNA, 16 nt, Variola virus
auucgaaauuagaaag

SEQ ID NO: 4087497 - RNA, 15 nt, Variola virus
auucgauacaaacuc

SEQ ID NO: 4087498 - RNA, 15 nt, Variola virus
auucgcauuucuaua

SEQ ID NO: 4087499 - RNA, 14 nt, Variola virus
auucguagaaagua

SEQ ID NO: 4087500 - RNA, 23 nt, Variola virus
auucgugacagauccaugucuga

SEQ ID NO: 4087501 - RNA, 19 nt, Variola virus
auucuaaaacuauaaaaca

SEQ ID NO: 4087502 - RNA, 18 nt, Variola virus
auucuaacgauaauagau

SEQ ID NO: 4087503 - RNA, 12 nt, Variola virus
auucuaaugaug

SEQ ID NO: 4087504 - RNA, 23 nt, Variola virus
auucuacaaguaacaacaaaaaa

SEQ ID NO: 4087505 - RNA, 19 nt, Variola virus
auucuagacuccgcaucaa

SEQ ID NO: 4087506 - RNA, 14 nt, Variola virus
auucuagucuuaac

SEQ ID NO: 4087507 - RNA, 22 nt, Variola virus
auucuagugccgaacauuaaca

SEQ ID NO: 4087508 - RNA, 14 nt, Variola virus
auucuaucucuaag

SEQ ID NO: 4087509 - RNA, 15 nt, Variola virus
auucuaucucuaaga

SEQ ID NO: 4087510 - RNA, 13 nt, Variola virus
auucuaugauggu

SEQ ID NO: 4087511 - RNA, 16 nt, Variola virus
auucuaugucuauuau

SEQ ID NO: 4087512 - RNA, 19 nt, Variola virus
auucucaaauccgaaauua

SEQ ID NO: 4087513 - RNA, 22 nt, Variola virus
auucucaucuaucaucuccaca

SEQ ID NO: 4087514 - RNA, 19 nt, Variola virus
auucucugaaaauguaaau

SEQ ID NO: 4087515 - RNA, 20 nt, Variola virus
auucucugacauucagaaag

SEQ ID NO: 4087516 - RNA, 23 nt, Variola virus
auucucuuacaaauauucacaag

SEQ ID NO: 4087517 - RNA, 19 nt, Variola virus
auucugaugauauuagaac

SEQ ID NO: 4087518 - RNA, 18 nt, Variola virus
auucugauuggucaaugu

SEQ ID NO: 4087519 - RNA, 23 nt, Variola virus
auucugauuggucaaugugaaug

SEQ ID NO: 4087520 - RNA, 15 nt, Variola virus
auucuucgguaacuu

SEQ ID NO: 4087521 - RNA, 21 nt, Variola virus
auucuugcacacuauugacga

SEQ ID NO: 4087522 - RNA, 16 nt, Variola virus
auucuugguaauuaau

SEQ ID NO: 4087523 - RNA, 13 nt, Variola virus
auucuugguuaaa

SEQ ID NO: 4087524 - RNA, 19 nt, Variola virus
auucuuuguauuuuggcau

SEQ ID NO: 4087525 - RNA, 18 nt, Variola virus
auucuuuuucauuaacua

SEQ ID NO: 4087526 - RNA, 14 nt, Variola virus
auugaaaauacuaa

SEQ ID NO: 4087527 - RNA, 14 nt, Variola virus
auugaaaauuauuu

SEQ ID NO: 4087528 - RNA, 18 nt, Variola virus
auugacauaguuaaauaa

SEQ ID NO: 4087529 - RNA, 15 nt, Variola virus
auugacgaugucaau

SEQ ID NO: 4087530 - RNA, 15 nt, Variola virus
auugaguggaaaguu

SEQ ID NO: 4087531 - RNA, 13 nt, Variola virus
auugauagauuac

SEQ ID NO: 4087532 - RNA, 19 nt, Variola virus
auugauccuagaacuagau

SEQ ID NO: 4087533 - RNA, 20 nt, Variola virus
auugaucuauuauuuaauga

SEQ ID NO: 4087534 - RNA, 17 nt, Variola virus
auugaugcgaauagcag

SEQ ID NO: 4087535 - RNA, 16 nt, Variola virus
auugccaacucucaaa

SEQ ID NO: 4087536 - RNA, 14 nt, Variola virus
auugccuuuaagac

SEQ ID NO: 4087537 - RNA, 14 nt, Variola virus
auugcgacacuauu

SEQ ID NO: 4087538 - RNA, 15 nt, Variola virus
auugcucaaauaaua

SEQ ID NO: 4087539 - RNA, 18 nt, Variola virus
auuggaaaucauuaacgg

SEQ ID NO: 4087540 - RNA, 15 nt, Variola virus
auuggaacauaagau

SEQ ID NO: 4087541 - RNA, 13 nt, Variola virus
auuggaauuauuu

SEQ ID NO: 4087542 - RNA, 15 nt, Variola virus
auuggcaaauuauuu

SEQ ID NO: 4087543 - RNA, 16 nt, Variola virus
auugggagucaaugaa

SEQ ID NO: 4087544 - RNA, 14 nt, Variola virus
auugguaaauccua

SEQ ID NO: 4087545 - RNA, 14 nt, Variola virus
auugguauaaaugu

SEQ ID NO: 4087546 - RNA, 19 nt, Variola virus
auugguuacucuugucauu

SEQ ID NO: 4087547 - RNA, 19 nt, Variola virus
auugguuuauaauguauaa

SEQ ID NO: 4087548 - RNA, 15 nt, Variola virus
auuguaaacacagau

SEQ ID NO: 4087549 - RNA, 15 nt, Variola virus
auuguauuaugauga

SEQ ID NO: 4087550 - RNA, 22 nt, Variola virus
auugucagaaauuacaaacacu

SEQ ID NO: 4087551 - RNA, 21 nt, Variola virus
auugucucgucaaugucuaua

SEQ ID NO: 4087552 - RNA, 19 nt, Variola virus
auugucuuuacaaaucaua

SEQ ID NO: 4087553 - RNA, 20 nt, Variola virus
auugugauuuaguauaguau

SEQ ID NO: 4087554 - RNA, 18 nt, Variola virus
auuguuuugaagaaauga

SEQ ID NO: 4087555 - RNA, 16 nt, Variola virus
auuuaaauuuaucauc

SEQ ID NO: 4087556 - RNA, 16 nt, Variola virus
auuuaacgaugucuau

SEQ ID NO: 4087557 - RNA, 22 nt, Variola virus
auuuaagagaucaaagcaucaa

SEQ ID NO: 4087558 - RNA, 17 nt, Variola virus
auuuaauacguucauua

SEQ ID NO: 4087559 - RNA, 21 nt, Variola virus
auuuaauacguucauuaaaaa

SEQ ID NO: 4087560 - RNA, 13 nt, Variola virus
auuuaauauagau

SEQ ID NO: 4087561 - RNA, 14 nt, Variola virus
auuuacaaaaauuu

SEQ ID NO: 4087562 - RNA, 21 nt, Variola virus
auuuacgaaacuaucaaaaug

SEQ ID NO: 4087563 - RNA, 17 nt, Variola virus
auuuacuaucuguaaug

SEQ ID NO: 4087564 - RNA, 21 nt, Variola virus
auuuacucugaaaagaaagua

SEQ ID NO: 4087565 - RNA, 15 nt, Variola virus
auuuagaaaaaagau

SEQ ID NO: 4087566 - RNA, 14 nt, Variola virus
auuuagaaaugaag

SEQ ID NO: 4087567 - RNA, 20 nt, Variola virus
auuuagcgauuaugaaaauu

SEQ ID NO: 4087568 - RNA, 15 nt, Variola virus
auuuaguauuaaaug

SEQ ID NO: 4087569 - RNA, 15 nt, Variola virus
auuuauaaaaugcuu

SEQ ID NO: 4087570 - RNA, 15 nt, Variola virus
auuuauauaacucau

SEQ ID NO: 4087571 - RNA, 16 nt, Variola virus
auuuauauauuaaaaa

SEQ ID NO: 4087572 - RNA, 12 nt, Variola virus
auuuaucuuucu

SEQ ID NO: 4087573 - RNA, 21 nt, Variola virus
auuuauugcacgguaaggaag

SEQ ID NO: 4087574 - RNA, 16 nt, Variola virus
auuuauuuaaaaugau

SEQ ID NO: 4087575 - RNA, 19 nt, Variola virus
auuuauuuaguauuaaaug

SEQ ID NO: 4087576 - RNA, 14 nt, Variola virus
auuucaaaauguua

SEQ ID NO: 4087577 - RNA, 15 nt, Variola virus
auuucaucuacaaug

SEQ ID NO: 4087578 - RNA, 14 nt, Variola virus
auuucauuaauagu

SEQ ID NO: 4087579 - RNA, 21 nt, Variola virus
auuucauuauaauaguuuauc

SEQ ID NO: 4087580 - RNA, 23 nt, Variola virus
auuuccaucaggaauguuugcug

SEQ ID NO: 4087581 - RNA, 17 nt, Variola virus
auuuccaucuaucuagu

SEQ ID NO: 4087582 - RNA, 15 nt, Variola virus
auuucguuagucaua

SEQ ID NO: 4087583 - RNA, 17 nt, Variola virus
auuucguucucugaaaa

SEQ ID NO: 4087584 - RNA, 14 nt, Variola virus
auuucuaauguuuc

SEQ ID NO: 4087585 - RNA, 18 nt, Variola virus
auuucucucauaaauaca

SEQ ID NO: 4087586 - RNA, 19 nt, Variola virus
auuucucucauaaauacag

SEQ ID NO: 4087587 - RNA, 22 nt, Variola virus
auuucugaacccguuaauguau

SEQ ID NO: 4087588 - RNA, 18 nt, Variola virus
auuucuucucuucguaua

SEQ ID NO: 4087589 - RNA, 18 nt, Variola virus
auuugaaauucuaucucu

SEQ ID NO: 4087590 - RNA, 15 nt, Variola virus
auuugagaaaacauu

SEQ ID NO: 4087591 - RNA, 13 nt, Variola virus
auuuggaaaagaa

SEQ ID NO: 4087592 - RNA, 11 nt, Variola virus
auuuggagaac

SEQ ID NO: 4087593 - RNA, 16 nt, Variola virus
auuuggauuaauuaga

SEQ ID NO: 4087594 - RNA, 15 nt, Variola virus
auuugguaaaaugaa

SEQ ID NO: 4087595 - RNA, 21 nt, Variola virus
auuugguauaaagagauagau

SEQ ID NO: 4087596 - RNA, 16 nt, Variola virus
auuuggucauaauaga

SEQ ID NO: 4087597 - RNA, 13 nt, Variola virus
auuuguacauuau

SEQ ID NO: 4087598 - RNA, 21 nt, Variola virus
auuuguauaaucuuuaacaaa

SEQ ID NO: 4087599 - RNA, 13 nt, Variola virus
auuuguucuugua

SEQ ID NO: 4087600 - RNA, 18 nt, Variola virus
auuuuaacacuaauuaag

SEQ ID NO: 4087601 - RNA, 21 nt, Variola virus
auuuuacuacauaguuaucua

SEQ ID NO: 4087602 - RNA, 23 nt, Variola virus
auuuuagaagaacgauaaugaau

SEQ ID NO: 4087603 - RNA, 18 nt, Variola virus
auuuuagcagugaaauaa

SEQ ID NO: 4087604 - RNA, 19 nt, Variola virus
auuuuaguuaacaacuauu

SEQ ID NO: 4087605 - RNA, 22 nt, Variola virus
auuuuauaacguuaguuaauaa

SEQ ID NO: 4087606 - RNA, 15 nt, Variola virus
auuuuauacuagagu

SEQ ID NO: 4087607 - RNA, 16 nt, Variola virus
aauauuuacuaauauc

SEQ ID NO: 4087608 - RNA, 17 nt, Variola virus
aauauuucauuagaugu

SEQ ID NO: 4087609 - RNA, 17 nt, Variola virus
aauauuuuaauagauua

SEQ ID NO: 4087610 - RNA, 20 nt, Variola virus
aauauuuuucguuuacaaaa

SEQ ID NO: 4087611 - RNA, 16 nt, Variola virus
aauauuuuuuagagaa

SEQ ID NO: 4087612 - RNA, 13 nt, Variola virus
aaucaaaaaauaa

SEQ ID NO: 4087613 - RNA, 19 nt, Variola virus
aaucaaaagaaugauucca

SEQ ID NO: 4087614 - RNA, 14 nt, Variola virus
aaucaaacaaaaaa

SEQ ID NO: 4087615 - RNA, 17 nt, Variola virus
aaucaaaccuuacugaa

SEQ ID NO: 4087616 - RNA, 16 nt, Variola virus
aaucaagauucauuuu

SEQ ID NO: 4087617 - RNA, 19 nt, Variola virus
aaucaaggaacuaaauaga

SEQ ID NO: 4087618 - RNA, 20 nt, Variola virus
aaucaccgucuaagaugaua

SEQ ID NO: 4087619 - RNA, 18 nt, Variola virus
aaucagugauagacuaga

SEQ ID NO: 4087620 - RNA, 19 nt, Variola virus
aaucauucuaaaacuauaa

SEQ ID NO: 4087621 - RNA, 19 nt, Variola virus
aaucauuuuuuuaaaacug

SEQ ID NO: 4087622 - RNA, 18 nt, Variola virus
aauccaaaaaaugaaauc

SEQ ID NO: 4087623 - RNA, 15 nt, Variola virus
aauccagauaauaac

SEQ ID NO: 4087624 - RNA, 18 nt, Variola virus
aauccagauuuuaaaacu

SEQ ID NO: 4087625 - RNA, 19 nt, Variola virus
aauccagcuagugaauaua

SEQ ID NO: 4087626 - RNA, 15 nt, Variola virus
aauccauucuaauga

SEQ ID NO: 4087627 - RNA, 18 nt, Variola virus
aauccuuaaguucauaau

SEQ ID NO: 4087628 - RNA, 18 nt, Variola virus
aaucgcauccgauaaagc

SEQ ID NO: 4087629 - RNA, 14 nt, Variola virus
aaucuaagaaauuu

SEQ ID NO: 4087630 - RNA, 16 nt, Variola virus
aaucuaauauuaagaa

SEQ ID NO: 4087631 - RNA, 16 nt, Variola virus
aaucuacugauauugu

SEQ ID NO: 4087632 - RNA, 19 nt, Variola virus
aaucuaguacucgaaauaa

SEQ ID NO: 4087633 - RNA, 16 nt, Variola virus
aaucuauaguauuauc

SEQ ID NO: 4087634 - RNA, 16 nt, Variola virus
aaucucuaucgucaca

SEQ ID NO: 4087635 - RNA, 16 nt, Variola virus
aaucucucucaaauau

SEQ ID NO: 4087636 - RNA, 14 nt, Variola virus
aaucugaaaaugua

SEQ ID NO: 4087637 - RNA, 14 nt, Variola virus
aaucugaacuuuaa

SEQ ID NO: 4087638 - RNA, 16 nt, Variola virus
aaucuguacuucuaua

SEQ ID NO: 4087639 - RNA, 18 nt, Variola virus
aaucuguauaucuuucca

SEQ ID NO: 4087640 - RNA, 14 nt, Variola virus
aaucuguuucuaaa

SEQ ID NO: 4087641 - RNA, 18 nt, Variola virus
aaucuuacugaguuuauc

SEQ ID NO: 4087642 - RNA, 15 nt, Variola virus
aaucuuauuagaaua

SEQ ID NO: 4087643 - RNA, 15 nt, Variola virus
aaucuucuuauaaga

SEQ ID NO: 4087644 - RNA, 16 nt, Variola virus
aaucuugauuacaaaa

SEQ ID NO: 4087645 - RNA, 14 nt, Variola virus
aaugaaaauggaua

SEQ ID NO: 4087646 - RNA, 17 nt, Variola virus
aaugaaacagaauuaac

SEQ ID NO: 4087647 - RNA, 19 nt, Variola virus
aaugaacauaguaagaaau

SEQ ID NO: 4087648 - RNA, 19 nt, Variola virus
aaugaacaucggaaauaua

SEQ ID NO: 4087649 - RNA, 23 nt, Variola virus
aaugaacaucggaaauauagaau

SEQ ID NO: 4087650 - RNA, 15 nt, Variola virus
aaugaauuuagaaau

SEQ ID NO: 4087651 - RNA, 19 nt, Variola virus
aaugacaaguauaaugaua

SEQ ID NO: 4087652 - RNA, 18 nt, Variola virus
aaugacaucgcauuuaua

SEQ ID NO: 4087653 - RNA, 15 nt, Variola virus
aaugacgaugauaug

SEQ ID NO: 4087654 - RNA, 22 nt, Variola virus
aaugagauuauuaaguauuuau

SEQ ID NO: 4087655 - RNA, 20 nt, Variola virus
aaugauaacuguuuagaaau

SEQ ID NO: 4087656 - RNA, 21 nt, Variola virus
aaugauacacuaaguauauac

SEQ ID NO: 4087657 - RNA, 15 nt, Variola virus
aaugauauaucuugu

SEQ ID NO: 4087658 - RNA, 14 nt, Variola virus
aaugauauauuaaa

SEQ ID NO: 4087659 - RNA, 18 nt, Variola virus
aaugaugaugaaaugaua

SEQ ID NO: 4087660 - RNA, 23 nt, Variola virus
aaugaugccucugccuuuuuaua

SEQ ID NO: 4087661 - RNA, 16 nt, Variola virus
aaugauguuaggaaau

SEQ ID NO: 4087662 - RNA, 23 nt, Variola virus
aaugauuacuaacgcaacuauau

SEQ ID NO: 4087663 - RNA, 22 nt, Variola virus
aaugcagaucuaauaaauggag

SEQ ID NO: 4087664 - RNA, 15 nt, Variola virus
aaugcauuaaauaau

SEQ ID NO: 4087665 - RNA, 18 nt, Variola virus
aaugcauuuuauaccgaa

SEQ ID NO: 4087666 - RNA, 21 nt, Variola virus
aaugccacgguugacaauaac

SEQ ID NO: 4087667 - RNA, 19 nt, Variola virus
aaugccugccuguauuaua

SEQ ID NO: 4087668 - RNA, 16 nt, Variola virus
aaugccuuauucucug

SEQ ID NO: 4087669 - RNA, 17 nt, Variola virus
agauuuaucauauuucu

SEQ ID NO: 4087670 - RNA, 15 nt, Variola virus
agauuucaaagaugu

SEQ ID NO: 4087671 - RNA, 17 nt, Variola virus
agauuucaaagauguuu

SEQ ID NO: 4087672 - RNA, 15 nt, Variola virus
agauuucgucuaaua

SEQ ID NO: 4087673 - RNA, 19 nt, Variola virus
agauuuuuagcguauuauc

SEQ ID NO: 4087674 - RNA, 16 nt, Variola virus
agauuuuuuaaaggau

SEQ ID NO: 4087675 - RNA, 12 nt, Variola virus
agcaaaaaauga

SEQ ID NO: 4087676 - RNA, 18 nt, Variola virus
agcaagauuuuuaaacaa

SEQ ID NO: 4087677 - RNA, 15 nt, Variola virus
agcaauacaacagaa

SEQ ID NO: 4087678 - RNA, 17 nt, Variola virus
agcacaugaagaaaaac

SEQ ID NO: 4087679 - RNA, 18 nt, Variola virus
agcacauggaaaaaaagu

SEQ ID NO: 4087680 - RNA, 15 nt, Variola virus
agcacgauaacuuau

SEQ ID NO: 4087681 - RNA, 22 nt, Variola virus
agcaguugcgaacaacaacaaa

SEQ ID NO: 4087682 - RNA, 19 nt, Variola virus
agcauaaacauaauaaaca

SEQ ID NO: 4087683 - RNA, 17 nt, Variola virus
agcauagaggaugaauu

SEQ ID NO: 4087684 - RNA, 21 nt, Variola virus
agcauauuccauauaaauaua

SEQ ID NO: 4087685 - RNA, 19 nt, Variola virus
agcauauuguaauaucuua

SEQ ID NO: 4087686 - RNA, 18 nt, Variola virus
agcaucaugaauacagua

SEQ ID NO: 4087687 - RNA, 22 nt, Variola virus
agcaucauguccauuuaacuaa

SEQ ID NO: 4087688 - RNA, 16 nt, Variola virus
agcauccaguaugaau

SEQ ID NO: 4087689 - RNA, 18 nt, Variola virus
agcauccucaaaaaauau

SEQ ID NO: 4087690 - RNA, 19 nt, Variola virus
agcaucuucuauaucuaga

SEQ ID NO: 4087691 - RNA, 17 nt, Variola virus
agcauuaauaauuguuu

SEQ ID NO: 4087692 - RNA, 23 nt, Variola virus
agcauuaauaauuguuuugaauu

SEQ ID NO: 4087693 - RNA, 14 nt, Variola virus
agcauuacuugaua

SEQ ID NO: 4087694 - RNA, 22 nt, Variola virus
agcauucuuuccagaacuauau

SEQ ID NO: 4087695 - RNA, 16 nt, Variola virus
agcauuguuauguauu

SEQ ID NO: 4087696 - RNA, 12 nt, Variola virus
agccaauacuuu

SEQ ID NO: 4087697 - RNA, 16 nt, Variola virus
agccaauccuaacucu

SEQ ID NO: 4087698 - RNA, 18 nt, Variola virus
agccauauuccacagaua

SEQ ID NO: 4087699 - RNA, 19 nt, Variola virus
agcgaaaaauaauuauucu

SEQ ID NO: 4087700 - RNA, 22 nt, Variola virus
agcgacuaucaucuaaacagua

SEQ ID NO: 4087701 - RNA, 23 nt, Variola virus
agcgcauguacauauuuguacau

SEQ ID NO: 4087702 - RNA, 13 nt, Variola virus
agcggaugaaaaa

SEQ ID NO: 4087703 - RNA, 19 nt, Variola virus
agcuagaggaaaugaaaga

SEQ ID NO: 4087704 - RNA, 15 nt, Variola virus
agcuaggcuggaaac

SEQ ID NO: 4087705 - RNA, 13 nt, Variola virus
agcuauuuaaaug

SEQ ID NO: 4087706 - RNA, 14 nt, Variola virus
agcuauuuaaaugg

SEQ ID NO: 4087707 - RNA, 16 nt, Variola virus
agcucgcguuuaagag

SEQ ID NO: 4087708 - RNA, 16 nt, Variola virus
agcucuuaguauggga

SEQ ID NO: 4087709 - RNA, 12 nt, Variola virus
agcugaaaugag

SEQ ID NO: 4087710 - RNA, 15 nt, Variola virus
agcugcaucuaaauu

SEQ ID NO: 4087711 - RNA, 18 nt, Variola virus
agcugugguguaaucuua

SEQ ID NO: 4087712 - RNA, 22 nt, Variola virus
agcuguuuaucuauacuauuaa

SEQ ID NO: 4087713 - RNA, 19 nt, Variola virus
agcuucuccuccuauuugu

SEQ ID NO: 4087714 - RNA, 18 nt, Variola virus
aggaaaaugauuaaauua

SEQ ID NO: 4087715 - RNA, 20 nt, Variola virus
aggaaaguuuaucaaaaaua

SEQ ID NO: 4087716 - RNA, 23 nt, Variola virus
aggaaauuaauaucgaugauauu

SEQ ID NO: 4087717 - RNA, 15 nt, Variola virus
aggaaauuaugagaa

SEQ ID NO: 4087718 - RNA, 14 nt, Variola virus
aggaagaauaucau

SEQ ID NO: 4087719 - RNA, 24 nt, Variola virus
aggaagaggaaauauucaguauau

SEQ ID NO: 4087720 - RNA, 15 nt, Variola virus
aggaauuaauuauuc

SEQ ID NO: 4087721 - RNA, 18 nt, Variola virus
aggaauucuuuuaugaau

SEQ ID NO: 4087722 - RNA, 13 nt, Variola virus
aggacaugaugau

SEQ ID NO: 4087723 - RNA, 22 nt, Variola virus
aggaccacuagcaaaagauaaa

SEQ ID NO: 4087724 - RNA, 21 nt, Variola virus
aggaccuuccaacuguggaua

SEQ ID NO: 4087725 - RNA, 15 nt, Variola virus
aggacgguauaugua

SEQ ID NO: 4087726 - RNA, 13 nt, Variola virus
aggagaccaugga

SEQ ID NO: 4087727 - RNA, 14 nt, Variola virus
aggagauuaaagga

SEQ ID NO: 4087728 - RNA, 17 nt, Variola virus
aggagcaccagaaguau

SEQ ID NO: 4087729 - RNA, 19 nt, Variola virus
aggauaaaauauuauccaa

SEQ ID NO: 4087730 - RNA, 16 nt, Variola virus
aggauacuuuaugaau

SEQ ID NO: 4087731 - RNA, 17 nt, Variola virus
aggauacuuuaugaaug

SEQ ID NO: 4087732 - RNA, 20 nt, Variola virus
aggauacuuuaugaauggau

SEQ ID NO: 4087733 - RNA, 19 nt, Variola virus
aggauauaaguagauguuc

SEQ ID NO: 4087734 - RNA, 17 nt, Variola virus
aggauauauuaaagucu

SEQ ID NO: 4087735 - RNA, 18 nt, Variola virus
aggauaucaaauacgcau

SEQ ID NO: 4087736 - RNA, 21 nt, Variola virus
aggauauuucaaaaaauaaua

SEQ ID NO: 4087737 - RNA, 18 nt, Variola virus
aggaucuagcaaaggaaa

SEQ ID NO: 4087738 - RNA, 22 nt, Variola virus
aggauguauauaucaugaugau

SEQ ID NO: 4087739 - RNA, 23 nt, Variola virus
aggauugauuacuauaaauggag

SEQ ID NO: 4087740 - RNA, 18 nt, Variola virus
aggauuggucuuaaaaga

SEQ ID NO: 4087741 - RNA, 17 nt, Variola virus
aggcaaaagaugucaag

SEQ ID NO: 4087742 - RNA, 18 nt, Variola virus
aggcacuaaugcaaauua

SEQ ID NO: 4087743 - RNA, 16 nt, Variola virus
aggcaguuaaggauaa

SEQ ID NO: 4087744 - RNA, 14 nt, Variola virus
aggcgucaaagaua

SEQ ID NO: 4087745 - RNA, 14 nt, Variola virus
aggcguuaacuaga

SEQ ID NO: 4087746 - RNA, 19 nt, Variola virus
agggaaaucaaagaagaag

SEQ ID NO: 4087747 - RNA, 23 nt, Variola virus
agggaaaucaaagaagaaguuaa

SEQ ID NO: 4087748 - RNA, 22 nt, Variola virus
agggaacuaauccacauaugau

SEQ ID NO: 4087749 - RNA, 22 nt, Variola virus
agggacacucaaacuaaauguc

SEQ ID NO: 4087750 - RNA, 16 nt, Variola virus
agggcuaaaugucuag

SEQ ID NO: 4087751 - RNA, 16 nt, Variola virus
aggggaugaaucauug

SEQ ID NO: 4087752 - RNA, 18 nt, Variola virus
aggguaucuaauuuccug

SEQ ID NO: 4087753 - RNA, 19 nt, Variola virus
agguacucaucuacucuac

SEQ ID NO: 4087754 - RNA, 12 nt, Variola virus
agguauaugcau

SEQ ID NO: 4087755 - RNA, 14 nt, Variola virus
agguauuacucuag

SEQ ID NO: 4087756 - RNA, 19 nt, Variola virus
aggucauauggaagauguu

SEQ ID NO: 4087757 - RNA, 15 nt, Variola virus
aggugacacauguac

SEQ ID NO: 4087758 - RNA, 19 nt, Variola virus
agguguguuuuuuaccauu

SEQ ID NO: 4087759 - RNA, 22 nt, Variola virus
agguguuauuuuguuuuauuca

SEQ ID NO: 4087760 - RNA, 23 nt, Variola virus
agguguuccggagaaucaguaaa

SEQ ID NO: 4087761 - RNA, 16 nt, Variola virus
agguucccaauuccaa

SEQ ID NO: 4087762 - RNA, 14 nt, Variola virus
aguaaaaucuauca

SEQ ID NO: 4087763 - RNA, 15 nt, Variola virus
aguaaccaaaaugaa

SEQ ID NO: 4087764 - RNA, 15 nt, Variola virus
aguaacgcaauacaa

SEQ ID NO: 4087765 - RNA, 19 nt, Variola virus
aguaacgcguggaaaaagc

SEQ ID NO: 4087766 - RNA, 16 nt, Variola virus
aguaacuauguaaaug

SEQ ID NO: 4087767 - RNA, 17 nt, Variola virus
aguaacuuuuuuucuau

SEQ ID NO: 4087768 - RNA, 14 nt, Variola virus
aguaagaauaagac

SEQ ID NO: 4087769 - RNA, 18 nt, Variola virus
aguaaguaucuuauguau

SEQ ID NO: 4087770 - RNA, 20 nt, Variola virus
aguaauaagaaauaugaaau

SEQ ID NO: 4087771 - RNA, 13 nt, Variola virus
aguaaucauguaa

SEQ ID NO: 4087772 - RNA, 23 nt, Variola virus
uuuucgguacucagauucaguuu

SEQ ID NO: 4087773 - RNA, 12 nt, Variola virus
uuuucuuaaaac

SEQ ID NO: 4087774 - RNA, 21 nt, Variola virus
uuuugaaggauuggacaaauc

SEQ ID NO: 4087775 - RNA, 23 nt, Variola virus
uuuugauacuauccaauaaacag

SEQ ID NO: 4087776 - RNA, 17 nt, Variola virus
uuuugccaacacagagg

SEQ ID NO: 4087777 - RNA, 16 nt, Variola virus
uuuuggugaaauccaa

SEQ ID NO: 4087778 - RNA, 12 nt, Variola virus
uuuuguaauaag

SEQ ID NO: 4087779 - RNA, 16 nt, Variola virus
uuuuguauuguauaua

SEQ ID NO: 4087780 - RNA, 18 nt, Variola virus
uuuuguggacauuuucua

SEQ ID NO: 4087781 - RNA, 19 nt, Variola virus
uuuuuaaagguaucuaaug

SEQ ID NO: 4087782 - RNA, 21 nt, Variola virus
uuuuuauaaaaugacaucguu

SEQ ID NO: 4087783 - RNA, 13 nt, Variola virus
uuuuugacauauu

SEQ ID NO: 4087784 - RNA, 19 nt, Variola virus
uuuuugcaggaaguauauc

SEQ ID NO: 4087785 - RNA, 15 nt, Variola virus
uuuuuggauuucaua

SEQ ID NO: 4087786 - RNA, 21 nt, Variola virus
uugaugacacuaguuaagaac

SEQ ID NO: 4087787 - RNA, 13 nt, Variola virus
uugaugauagcaa

SEQ ID NO: 4087788 - RNA, 13 nt, Variola virus
uugaugcaucuua

SEQ ID NO: 4087789 - RNA, 20 nt, Variola virus
uugauggaaguaaaagauuu

SEQ ID NO: 4087790 - RNA, 17 nt, Variola virus
uugaugucguuauucug

SEQ ID NO: 4087791 - RNA, 16 nt, Variola virus
uugauguuacauuaua

SEQ ID NO: 4087792 - RNA, 22 nt, Variola virus
uugauuucgaauacgauacuua

SEQ ID NO: 4087793 - RNA, 16 nt, Variola virus
uugcaaaauaugcucu

SEQ ID NO: 4087794 - RNA, 22 nt, Variola virus
uugcaaauuccggauacaugaa

SEQ ID NO: 4087795 - RNA, 13 nt, Variola virus
uugccaaguuauc

SEQ ID NO: 4087796 - RNA, 13 nt, Variola virus
uugccguaaaucc

SEQ ID NO: 4087797 - RNA, 20 nt, Variola virus
uugccguugucuguauucau

SEQ ID NO: 4087798 - RNA, 12 nt, Variola virus
uugcguauacau

SEQ ID NO: 4087799 - RNA, 16 nt, Variola virus
uugcguuuacaacacu

SEQ ID NO: 4087800 - RNA, 17 nt, Variola virus
uugcuaucgucauuaau

SEQ ID NO: 4087801 - RNA, 22 nt, Variola virus
uugcuguugaagaggcaaaaga

SEQ ID NO: 4087802 - RNA, 14 nt, Variola virus
uugcuuuucuaauc

SEQ ID NO: 4087803 - RNA, 22 nt, Variola virus
uuggaaaaaugaugaauuaaug

SEQ ID NO: 4087804 - RNA, 22 nt, Variola virus
uuggaauaaucucaauuagaau

SEQ ID NO: 4087805 - RNA, 12 nt, Variola virus
uuggaauuauuu

SEQ ID NO: 4087806 - RNA, 22 nt, Variola virus
uuggacucuauguauucagaau

SEQ ID NO: 4087807 - RNA, 20 nt, Variola virus
uuggagacgucaucuguucu

SEQ ID NO: 4087808 - RNA, 14 nt, Variola virus
uuggcaaaaacgga

SEQ ID NO: 4087809 - RNA, 15 nt, Variola virus
uugguacauuuuuca

SEQ ID NO: 4087810 - RNA, 13 nt, Variola virus
uugguauuagaau

SEQ ID NO: 4087811 - RNA, 12 nt, Variola virus
uugguuguauug

SEQ ID NO: 4087812 - RNA, 18 nt, Variola virus
uuguaaaguuaaaauugu

SEQ ID NO: 4087813 - RNA, 18 nt, Variola virus
uuguaaauguaacguauu

SEQ ID NO: 4087814 - RNA, 19 nt, Variola virus
uuguaagguuguaaauuuu

SEQ ID NO: 4087815 - RNA, 18 nt, Variola virus
uuguacauucuuaaccau

SEQ ID NO: 4087816 - RNA, 16 nt, Variola virus
uuguacuaaacacacu

SEQ ID NO: 4087817 - RNA, 16 nt, Variola virus
uuguagauuuaucaua

SEQ ID NO: 4087818 - RNA, 21 nt, Variola virus
uuguauaauaaguauaguuuu

SEQ ID NO: 4087819 - RNA, 23 nt, Variola virus
uugucauugagugauaaacuugu

SEQ ID NO: 4087820 - RNA, 15 nt, Variola virus
uuguccggcauauca

SEQ ID NO: 4087821 - RNA, 22 nt, Variola virus
uugugaucggauaguauucaag

SEQ ID NO: 4087822 - RNA, 15 nt, Variola virus
uuguuauuaacguga

SEQ ID NO: 4087823 - RNA, 16 nt, Variola virus
uuuaaaaaguuaucuu

SEQ ID NO: 4087824 - RNA, 17 nt, Variola virus
uuuaaaguaaacuucgu

SEQ ID NO: 4087825 - RNA, 16 nt, Variola virus
uuuaaauuuuguauuu

SEQ ID NO: 4087826 - RNA, 21 nt, Variola virus
uuuaaauuuuucuacagauau

SEQ ID NO: 4087827 - RNA, 11 nt, Variola virus
uuuaacuuuuc

SEQ ID NO: 4087828 - RNA, 18 nt, Variola virus
uuuaagccaucuguauua

SEQ ID NO: 4087829 - RNA, 13 nt, Variola virus
uuuaaucuaucua

SEQ ID NO: 4087830 - RNA, 13 nt, Variola virus
uuuacccacuaua

SEQ ID NO: 4087831 - RNA, 17 nt, Variola virus
uuuacgguaucuaauau

SEQ ID NO: 4087832 - RNA, 17 nt, Variola virus
uuuacuaaagauacaaa

SEQ ID NO: 4087833 - RNA, 17 nt, Variola virus
uuuacuuuaucuauuca

SEQ ID NO: 4087834 - RNA, 14 nt, Variola virus
uuuagaaaaacuuu

SEQ ID NO: 4087835 - RNA, 19 nt, Variola virus
uuuagaaaaaugcuaauau

SEQ ID NO: 4087836 - RNA, 15 nt, Variola virus
uuuagaaacuucaaa

SEQ ID NO: 4087837 - RNA, 13 nt, Variola virus
uuuagaauacuaa

SEQ ID NO: 4087838 - RNA, 14 nt, Variola virus
uuuagaauuuccaa

SEQ ID NO: 4087839 - RNA, 20 nt, Variola virus
uuuagcaaggucccuaauau

SEQ ID NO: 4087840 - RNA, 12 nt, Variola virus
uuuaguuucuuc

SEQ ID NO: 4087841 - RNA, 17 nt, Variola virus
uuuauaaaaaacuuuua

SEQ ID NO: 4087842 - RNA, 19 nt, Variola virus
uuuauaaacuuaacccauu

SEQ ID NO: 4087843 - RNA, 24 nt, Variola virus
uuuauaaagaaauacauaucgcac

SEQ ID NO: 4087844 - RNA, 22 nt, Variola virus
uuuauauccagauccuuuucuu

SEQ ID NO: 4087845 - RNA, 17 nt, Variola virus
uuuauaugguguuucua

SEQ ID NO: 4087846 - RNA, 14 nt, Variola virus
uuuauauuaaauau

SEQ ID NO: 4087847 - RNA, 20 nt, Variola virus
uuuaucauagucuaaagaug

SEQ ID NO: 4087848 - RNA, 14 nt, Variola virus
uuuaucgauguaca

SEQ ID NO: 4087849 - RNA, 21 nt, Variola virus
uuuaucuuucccccuagauac

SEQ ID NO: 4087850 - RNA, 13 nt, Variola virus
uuucaaauaccag

SEQ ID NO: 4087851 - RNA, 19 nt, Variola virus
uuucaagccggcuauauau

SEQ ID NO: 4087852 - RNA, 18 nt, Variola virus
uuucacaucguauuuuaa

SEQ ID NO: 4087853 - RNA, 14 nt, Variola virus
uuucagucauugau

SEQ ID NO: 4087854 - RNA, 19 nt, Variola virus
uuucauaguuagauacaua

SEQ ID NO: 4087855 - RNA, 21 nt, Variola virus
uuucaugaagucuaacguauu

SEQ ID NO: 4087856 - RNA, 20 nt, Variola virus
uuucauuuguauacacauaa

SEQ ID NO: 4087857 - RNA, 18 nt, Variola virus
uuuccaaguagugugcuc

SEQ ID NO: 4087858 - RNA, 15 nt, Variola virus
uuuccccacauagaa

SEQ ID NO: 4087859 - RNA, 21 nt, Variola virus
uuuccggagauagauuuccaa

SEQ ID NO: 4087860 - RNA, 19 nt, Variola virus
uuuccuaguauuugucaaa

SEQ ID NO: 4087861 - RNA, 15 nt, Variola virus
uuucgaauacuuauu

SEQ ID NO: 4087862 - RNA, 16 nt, Variola virus
uuucgaggaauaauaa

SEQ ID NO: 4087863 - RNA, 21 nt, Variola virus
uuucgauucuggcuauuucaa

SEQ ID NO: 4087864 - RNA, 17 nt, Variola virus
uuucgcgggauacauca

SEQ ID NO: 4087865 - RNA, 16 nt, Variola virus
uuucgcuguauaauaa

SEQ ID NO: 4087866 - RNA, 12 nt, Variola virus
uuucuaaauuca

SEQ ID NO: 4087867 - RNA, 12 nt, Variola virus
uuucuacauaau

SEQ ID NO: 4087868 - RNA, 15 nt, Variola virus
uuucuacuagacuau

SEQ ID NO: 4087869 - RNA, 11 nt, Variola virus
uuucuagauac

SEQ ID NO: 4087870 - RNA, 15 nt, Variola virus
uuucugguucuaauu

SEQ ID NO: 4087871 - RNA, 15 nt, Variola virus
uuucuucaacaaauu

SEQ ID NO: 4087872 - RNA, 22 nt, Variola virus
uuucuucauuuauuauauauaa

SEQ ID NO: 4087873 - RNA, 19 nt, Variola virus
uuucuugagagacaugauu

SEQ ID NO: 4087874 - RNA, 22 nt, Variola virus
uuucuugagaucccacaucauu

SEQ ID NO: 4087875 - RNA, 20 nt, Variola virus
uuugaaugaaugaauacaga

SEQ ID NO: 4087876 - RNA, 19 nt, Variola virus
uuugaauuaguuuauaauu

SEQ ID NO: 4087877 - RNA, 12 nt, Variola virus
uuugacacuauc

SEQ ID NO: 4087878 - RNA, 16 nt, Variola virus
uuugacauauuaacgu

SEQ ID NO: 4087879 - RNA, 22 nt, Variola virus
uuugacuagggaagauacauua

SEQ ID NO: 4087880 - RNA, 21 nt, Variola virus
uuugauaaagauagaugauga

SEQ ID NO: 4087881 - RNA, 18 nt, Variola virus
uuugauaaaucucuucuu

SEQ ID NO: 4087882 - RNA, 18 nt, Variola virus
uuugauagggacaaagua

SEQ ID NO: 4087883 - RNA, 18 nt, Variola virus
uuugauauaggugcaaaa

SEQ ID NO: 4087884 - RNA, 23 nt, Variola virus
uuugauauaucaguuaaugcauc

SEQ ID NO: 4087885 - RNA, 21 nt, Variola virus
uuugauuaccuuacucaugau

SEQ ID NO: 4087886 - RNA, 18 nt, Variola virus
uuugccaaccaauacaua

SEQ ID NO: 4087887 - RNA, 14 nt, Variola virus
uuugcuaauaauaa

SEQ ID NO: 4087888 - RNA, 18 nt, Variola virus
uuuggaaucguucaaaac

SEQ ID NO: 4087889 - RNA, 18 nt, Variola virus
uuuggaucuuuuguacau

SEQ ID NO: 4087890 - RNA, 14 nt, Variola virus
uuuggcauuucuaa

SEQ ID NO: 4087891 - RNA, 18 nt, Variola virus
uuugguaauggcaaugua

SEQ ID NO: 4087892 - RNA, 20 nt, Variola virus
uuugguacguugauuucuag

SEQ ID NO: 4087893 - RNA, 16 nt, Variola virus
uuugguagauucuauu

SEQ ID NO: 4087894 - RNA, 14 nt, Variola virus
uuuguauacacaua

SEQ ID NO: 4087895 - RNA, 17 nt, Variola virus
uuuguuaagaauuuaga

SEQ ID NO: 4087896 - RNA, 17 nt, Variola virus
uuuuaaauccuguauca

SEQ ID NO: 4087897 - RNA, 22 nt, Variola virus
uuuuaaauuuccgucuaucauc

SEQ ID NO: 4087898 - RNA, 14 nt, Variola virus
uuuuaauauaaacg

SEQ ID NO: 4087899 - RNA, 17 nt, Variola virus
uuuuacaauuucaucca

SEQ ID NO: 4087900 - RNA, 23 nt, Variola virus
uuuuacacaaggcauugucucua

SEQ ID NO: 4087901 - RNA, 18 nt, Variola virus
uuuuacgaacuaguugua

SEQ ID NO: 4087902 - RNA, 14 nt, Variola virus
uuuuacuaaucaua

SEQ ID NO: 4087903 - RNA, 20 nt, Variola virus
uuuuacuacauaguuaucua

SEQ ID NO: 4087904 - RNA, 16 nt, Variola virus
uuuuagaaauauacag

SEQ ID NO: 4087905 - RNA, 20 nt, Variola virus
uuuuaggauaugcuuucaua

SEQ ID NO: 4087906 - RNA, 12 nt, Variola virus
uuuuauaaacaa

SEQ ID NO: 4087907 - RNA, 13 nt, Variola virus
uuuuauguaucca

SEQ ID NO: 4087908 - RNA, 21 nt, Variola virus
uuuuauuuuuggaauaaucuc

SEQ ID NO: 4087909 - RNA, 17 nt, Variola virus
uuuucaguuaucaucua

SEQ ID NO: 4087910 - RNA, 18 nt, Variola virus
uuuucaucuuuacauacu

SEQ ID NO: 4087911 - RNA, 15 nt, Variola virus
uuuuccaaaguuuua

SEQ ID NO: 4087912 - RNA, 20 nt, Variola virus
uuuuccauaggauacuuugu

SEQ ID NO: 4087913 - RNA, 19 nt, Variola virus
uuuuccaucuauguagaau

SEQ ID NO: 4087914 - RNA, 12 nt, Variola virus
uuuuccaugaua

SEQ ID NO: 4087915 - RNA, 12 nt, Variola virus
uuagcauacaaa

SEQ ID NO: 4087916 - RNA, 20 nt, Variola virus
uuagcauauaccucauuaac

SEQ ID NO: 4087917 - RNA, 15 nt, Variola virus
uuagcaucuauuuuu

SEQ ID NO: 4087918 - RNA, 16 nt, Variola virus
uuagccguuguuugag

SEQ ID NO: 4087919 - RNA, 18 nt, Variola virus
uuagcuguuuucauuaag

SEQ ID NO: 4087920 - RNA, 16 nt, Variola virus
uuaggaucuucuaaug

SEQ ID NO: 4087921 - RNA, 17 nt, Variola virus
uuaguaacucuaguaaa

SEQ ID NO: 4087922 - RNA, 14 nt, Variola virus
uuaguaaggcuuua

SEQ ID NO: 4087923 - RNA, 15 nt, Variola virus
uuaguaaucauguaa

SEQ ID NO: 4087924 - RNA, 14 nt, Variola virus
uuagugaaacauuc

SEQ ID NO: 4087925 - RNA, 20 nt, Variola virus
uuaguguauaauuuugucau

SEQ ID NO: 4087926 - RNA, 18 nt, Variola virus
uuaguuauugcaauauag

SEQ ID NO: 4087927 - RNA, 19 nt, Variola virus
uuauaaaaaauuuuauuca

SEQ ID NO: 4087928 - RNA, 15 nt, Variola virus
uuauaaaaauacuaa

SEQ ID NO: 4087929 - RNA, 21 nt, Variola virus
uuauaaaaauuaaaaaaucac

SEQ ID NO: 4087930 - RNA, 14 nt, Variola virus
uuauaaacacagau

SEQ ID NO: 4087931 - RNA, 18 nt, Variola virus
uuauaaagauauguaugu

SEQ ID NO: 4087932 - RNA, 20 nt, Variola virus
uuauaaagaugguaaacugu

SEQ ID NO: 4087933 - RNA, 15 nt, Variola virus
uuauaauauucaugu

SEQ ID NO: 4087934 - RNA, 15 nt, Variola virus
uuauaaucaaagauu

SEQ ID NO: 4087935 - RNA, 12 nt, Variola virus
uuauacaucuua

SEQ ID NO: 4087936 - RNA, 22 nt, Variola virus
uuauacgaaaaaaaucauuaaa

SEQ ID NO: 4087937 - RNA, 20 nt, Variola virus
uuauacgcauaaauuguaaa

SEQ ID NO: 4087938 - RNA, 17 nt, Variola virus
uuauacuaugucauuaa

SEQ ID NO: 4087939 - RNA, 14 nt, Variola virus
uuauagagauagau

SEQ ID NO: 4087940 - RNA, 17 nt, Variola virus
uuauagauuuguaucuc

SEQ ID NO: 4087941 - RNA, 20 nt, Variola virus
uuauaguguuuaacaaagau

SEQ ID NO: 4087942 - RNA, 14 nt, Variola virus
uuauauaauguaua

SEQ ID NO: 4087943 - RNA, 14 nt, Variola virus
uuauauauguaaua

SEQ ID NO: 4087944 - RNA, 20 nt, Variola virus
uuauaucaauaccaaagaag

SEQ ID NO: 4087945 - RNA, 18 nt, Variola virus
uuauaucguuaucauuaa

SEQ ID NO: 4087946 - RNA, 20 nt, Variola virus
uuauaugcuugcauuacaga

SEQ ID NO: 4087947 - RNA, 21 nt, Variola virus
uuauauggcuacaauuucaua

SEQ ID NO: 4087948 - RNA, 14 nt, Variola virus
uuauauuuuucuua

SEQ ID NO: 4087949 - RNA, 15 nt, Variola virus
uuauauuuuucuuaa

SEQ ID NO: 4087950 - RNA, 19 nt, Variola virus
uuauauuuuuucauuauua

SEQ ID NO: 4087951 - RNA, 22 nt, Variola virus
uuaucaaaucuuuaaucuuauu

SEQ ID NO: 4087952 - RNA, 22 nt, Variola virus
uuaucacaaugaaauauuuugg

SEQ ID NO: 4087953 - RNA, 20 nt, Variola virus
uuaucagaagauggauggau

SEQ ID NO: 4087954 - RNA, 13 nt, Variola virus
uuaucauacuguc

SEQ ID NO: 4087955 - RNA, 13 nt, Variola virus
uuaucaucauuau

SEQ ID NO: 4087956 - RNA, 17 nt, Variola virus
uuauccaaaauauuaau

SEQ ID NO: 4087957 - RNA, 23 nt, Variola virus
uuauccacggauaccucauuuau

SEQ ID NO: 4087958 - RNA, 22 nt, Variola virus
uuauccguauuuccauaauaag

SEQ ID NO: 4087959 - RNA, 18 nt, Variola virus
uuaucgauuagucuuaau

SEQ ID NO: 4087960 - RNA, 16 nt, Variola virus
uuaucguuuacauaag

SEQ ID NO: 4087961 - RNA, 17 nt, Variola virus
uuaucguuuucaucuuu

SEQ ID NO: 4087962 - RNA, 14 nt, Variola virus
uuaucuauuauuua

SEQ ID NO: 4087963 - RNA, 17 nt, Variola virus
uuaucucauuugaaaau

SEQ ID NO: 4087964 - RNA, 20 nt, Variola virus
uuaucuucauaaaauacuaa

SEQ ID NO: 4087965 - RNA, 15 nt, Variola virus
uuaugaaucauuaaa

SEQ ID NO: 4087966 - RNA, 23 nt, Variola virus
uuaugauauaaggaaacagcuuu

SEQ ID NO: 4087967 - RNA, 14 nt, Variola virus
uuauguuauuuugu

SEQ ID NO: 4087968 - RNA, 18 nt, Variola virus
uuauuaaaggaacuaaag

SEQ ID NO: 4087969 - RNA, 17 nt, Variola virus
uuauuaauaauuguaaa

SEQ ID NO: 4087970 - RNA, 16 nt, Variola virus
uuauuagaauaagagu

SEQ ID NO: 4087971 - RNA, 17 nt, Variola virus
uuauuagagauuucagc

SEQ ID NO: 4087972 - RNA, 15 nt, Variola virus
uuauuagauuuggua

SEQ ID NO: 4087973 - RNA, 23 nt, Variola virus
uuauuauagugguggaauucagu

SEQ ID NO: 4087974 - RNA, 14 nt, Variola virus
uuauuaugaagacu

SEQ ID NO: 4087975 - RNA, 21 nt, Variola virus
uuauuccacacacucuacaau

SEQ ID NO: 4087976 - RNA, 15 nt, Variola virus
uuauucucuacgagu

SEQ ID NO: 4087977 - RNA, 15 nt, Variola virus
uuauugauauguaua

SEQ ID NO: 4087978 - RNA, 12 nt, Variola virus
uuauuguaacag

SEQ ID NO: 4087979 - RNA, 14 nt, Variola virus
uuauuguuugggua

SEQ ID NO: 4087980 - RNA, 12 nt, Variola virus
uuauuuauguca

SEQ ID NO: 4087981 - RNA, 23 nt, Variola virus
uuauuucagucgcugauuaauca

SEQ ID NO: 4087982 - RNA, 13 nt, Variola virus
uuauuucuaaaau

SEQ ID NO: 4087983 - RNA, 14 nt, Variola virus
uuauuuuugaagau

SEQ ID NO: 4087984 - RNA, 18 nt, Variola virus
uucaaaaauauucauuaa

SEQ ID NO: 4087985 - RNA, 13 nt, Variola virus
uucaaaauuauuu

SEQ ID NO: 4087986 - RNA, 16 nt, Variola virus
uucaaaauuauuuacc

SEQ ID NO: 4087987 - RNA, 15 nt, Variola virus
uucaaauaaaucacu

SEQ ID NO: 4087988 - RNA, 14 nt, Variola virus
uucaaaucuagauu

SEQ ID NO: 4087989 - RNA, 10 nt, Variola virus
uucaacaaug

SEQ ID NO: 4087990 - RNA, 14 nt, Variola virus
uucaacauguuuaa

SEQ ID NO: 4087991 - RNA, 21 nt, Variola virus
uucaagaucuaauauucuaga

SEQ ID NO: 4087992 - RNA, 15 nt, Variola virus
uucaagauuaucuuu

SEQ ID NO: 4087993 - RNA, 16 nt, Variola virus
uucaagcgaauuacuc

SEQ ID NO: 4087994 - RNA, 19 nt, Variola virus
uucaaugcugguugcaaga

SEQ ID NO: 4087995 - RNA, 13 nt, Variola virus
uucacaaauacua

SEQ ID NO: 4087996 - RNA, 21 nt, Variola virus
uucacaaucggauuaauaucu

SEQ ID NO: 4087997 - RNA, 16 nt, Variola virus
uucacuaaauaguuuu

SEQ ID NO: 4087998 - RNA, 17 nt, Variola virus
uucacuuuaauagauau

SEQ ID NO: 4087999 - RNA, 22 nt, Variola virus
uucacuuuuuauaauuuuacca

SEQ ID NO: 4088000 - RNA, 21 nt, Variola virus
uucagaaaguaauucauuaau

SEQ ID NO: 4088001 - RNA, 14 nt, Variola virus
uucagaaauuauuc

SEQ ID NO: 4088002 - RNA, 22 nt, Variola virus
uucauaauuguuagcuguuuuc

SEQ ID NO: 4088003 - RNA, 21 nt, Variola virus
uucaucagauuauuuaacaau

SEQ ID NO: 4088004 - RNA, 20 nt, Variola virus
uucaucauccaccuguuuua

SEQ ID NO: 4088005 - RNA, 22 nt, Variola virus
uucauccuuugauaauuuucca

SEQ ID NO: 4088006 - RNA, 18 nt, Variola virus
uucaucguaucuagauaa

SEQ ID NO: 4088007 - RNA, 14 nt, Variola virus
uucaugacaaucaa

SEQ ID NO: 4088008 - RNA, 21 nt, Variola virus
uucauuaaaaacaaacuuuuu

SEQ ID NO: 4088009 - RNA, 12 nt, Variola virus
uucauuaaggag

SEQ ID NO: 4088010 - RNA, 22 nt, Variola virus
uuccaaaguugggauaguauuu

SEQ ID NO: 4088011 - RNA, 15 nt, Variola virus
uuccaacucuguuuu

SEQ ID NO: 4088012 - RNA, 16 nt, Variola virus
uuccaaucuuuugcaa

SEQ ID NO: 4088013 - RNA, 17 nt, Variola virus
uuccacagacucauuau

SEQ ID NO: 4088014 - RNA, 16 nt, Variola virus
uuccacauuaauacag

SEQ ID NO: 4088015 - RNA, 20 nt, Variola virus
uuccacgaaaguaauuauua

SEQ ID NO: 4088016 - RNA, 18 nt, Variola virus
uuccacgaacuucuaauu

SEQ ID NO: 4088017 - RNA, 19 nt, Variola virus
uuccauagaauauauuaau

SEQ ID NO: 4088018 - RNA, 20 nt, Variola virus
uuccauaggauacuuuguaa

SEQ ID NO: 4088019 - RNA, 21 nt, Variola virus
uuccaucgguauaaaaaucau

SEQ ID NO: 4088020 - RNA, 19 nt, Variola virus
uuccauuguacaaacgaag

SEQ ID NO: 4088021 - RNA, 23 nt, Variola virus
uucccauagcugguucaaaauua

SEQ ID NO: 4088022 - RNA, 18 nt, Variola virus
uucccaucauuucucaau

SEQ ID NO: 4088023 - RNA, 14 nt, Variola virus
uucccauucuaaug

SEQ ID NO: 4088024 - RNA, 22 nt, Variola virus
uuccgggugccgccaacaaggg

SEQ ID NO: 4088025 - RNA, 16 nt, Variola virus
uuccguaucuguauuu

SEQ ID NO: 4088026 - RNA, 14 nt, Variola virus
uuccuaaaucgagu

SEQ ID NO: 4088027 - RNA, 23 nt, Variola virus
uuccuauagccguucuuguaauu

SEQ ID NO: 4088028 - RNA, 19 nt, Variola virus
uuccugacgucuagaguuu

SEQ ID NO: 4088029 - RNA, 19 nt, Variola virus
uuccuggaauaucauuaac

SEQ ID NO: 4088030 - RNA, 18 nt, Variola virus
uucgcaauauucauuaau

SEQ ID NO: 4088031 - RNA, 14 nt, Variola virus
uucguuuucuaauu

SEQ ID NO: 4088032 - RNA, 18 nt, Variola virus
uucguuuuuauaugugac

SEQ ID NO: 4088033 - RNA, 13 nt, Variola virus
uucuacaauaacu

SEQ ID NO: 4088034 - RNA, 14 nt, Variola virus
uucuacaauaacua

SEQ ID NO: 4088035 - RNA, 21 nt, Variola virus
uucuacuacuucauuaaucuu

SEQ ID NO: 4088036 - RNA, 21 nt, Variola virus
uucuacuaugcacauuauucu

SEQ ID NO: 4088037 - RNA, 19 nt, Variola virus
uucuacugaugcauguauu

SEQ ID NO: 4088038 - RNA, 23 nt, Variola virus
uucuagaaaacgaaaacauccua

SEQ ID NO: 4088039 - RNA, 22 nt, Variola virus
uucuagaauuagaauuacaaaa

SEQ ID NO: 4088040 - RNA, 19 nt, Variola virus
uucuaguauacggaaacac

SEQ ID NO: 4088041 - RNA, 21 nt, Variola virus
uucuagugcuuguauguguua

SEQ ID NO: 4088042 - RNA, 16 nt, Variola virus
uucuaguuaucaugua

SEQ ID NO: 4088043 - RNA, 16 nt, Variola virus
uucuauaauaaacuuu

SEQ ID NO: 4088044 - RNA, 21 nt, Variola virus
uucuauccaaggacaaggaug

SEQ ID NO: 4088045 - RNA, 20 nt, Variola virus
uucuaucccccguauuuaca

SEQ ID NO: 4088046 - RNA, 17 nt, Variola virus
uucuauuuuuaauauag

SEQ ID NO: 4088047 - RNA, 21 nt, Variola virus
uucuccaccaaacauauucuu

SEQ ID NO: 4088048 - RNA, 15 nt, Variola virus
uucucguuuccaaaa

SEQ ID NO: 4088049 - RNA, 14 nt, Variola virus
uucucuaaaugaug

SEQ ID NO: 4088050 - RNA, 15 nt, Variola virus
uucugauuuuaucuu

SEQ ID NO: 4088051 - RNA, 15 nt, Variola virus
uucugcuaaauuuuc

SEQ ID NO: 4088052 - RNA, 18 nt, Variola virus
uucuggaauauuaucauc

SEQ ID NO: 4088053 - RNA, 16 nt, Variola virus
uucuuaaacuuauucu

SEQ ID NO: 4088054 - RNA, 22 nt, Variola virus
uucuuaacaaagagaacguauu

SEQ ID NO: 4088055 - RNA, 15 nt, Variola virus
uucuuaagacacauu

SEQ ID NO: 4088056 - RNA, 14 nt, Variola virus
uucuucauuauuuu

SEQ ID NO: 4088057 - RNA, 12 nt, Variola virus
uucuucuguauc

SEQ ID NO: 4088058 - RNA, 17 nt, Variola virus
uucuuguugcacuguaa

SEQ ID NO: 4088059 - RNA, 17 nt, Variola virus
uucuuuagcgaaacagu

SEQ ID NO: 4088060 - RNA, 12 nt, Variola virus
uucuuucaaaau

SEQ ID NO: 4088061 - RNA, 12 nt, Variola virus
uucuuuguguag

SEQ ID NO: 4088062 - RNA, 14 nt, Variola virus
uucuuuuucaaaga

SEQ ID NO: 4088063 - RNA, 15 nt, Variola virus
uucuuuuucauuaac

SEQ ID NO: 4088064 - RNA, 15 nt, Variola virus
uugaaaacuauuucu

SEQ ID NO: 4088065 - RNA, 23 nt, Variola virus
uugaaacugaauagaugcaucua

SEQ ID NO: 4088066 - RNA, 14 nt, Variola virus
uugaaguaauuuuc

SEQ ID NO: 4088067 - RNA, 13 nt, Variola virus
uugaauugcgauu

SEQ ID NO: 4088068 - RNA, 21 nt, Variola virus
uugacauauguaaauauuaau

SEQ ID NO: 4088069 - RNA, 15 nt, Variola virus
uugacaucuauauau

SEQ ID NO: 4088070 - RNA, 20 nt, Variola virus
uugaguggaaaguucaaaaa

SEQ ID NO: 4088071 - RNA, 21 nt, Variola virus
uugauaaagccuuccuugcaa

SEQ ID NO: 4088072 - RNA, 21 nt, Variola virus
uugauaaauagaaucagauuu

SEQ ID NO: 4088073 - RNA, 14 nt, Variola virus
uugauaauaaauca

SEQ ID NO: 4088074 - RNA, 17 nt, Variola virus
uugauaauuacgcguau

SEQ ID NO: 4088075 - RNA, 16 nt, Variola virus
uugauaucuuuagaua

SEQ ID NO: 4088076 - RNA, 15 nt, Variola virus
uugaucagaaugaau

SEQ ID NO: 4088077 - RNA, 22 nt, Variola virus
uugaucucaucauuccauaauu

SEQ ID NO: 4088078 - RNA, 16 nt, Variola virus
uugaucuuauuauaca

SEQ ID NO: 4088079 - RNA, 17 nt, Variola virus
uugaucuuuauuaaauu

SEQ ID NO: 4088080 - RNA, 21 nt, Variola virus
uaggugccaccaauaaacuau

SEQ ID NO: 4088081 - RNA, 16 nt, Variola virus
uagguuguaauacaua

SEQ ID NO: 4088082 - RNA, 19 nt, Variola virus
uaguaaaccgauaguguau

SEQ ID NO: 4088083 - RNA, 21 nt, Variola virus
uaguaaguagaaauuaucaaa

SEQ ID NO: 4088084 - RNA, 21 nt, Variola virus
uaguaauaaugauucaacaau

SEQ ID NO: 4088085 - RNA, 19 nt, Variola virus
uaguacgggcgcuguaauu

SEQ ID NO: 4088086 - RNA, 20 nt, Variola virus
uaguacuaaaauuuguauuu

SEQ ID NO: 4088087 - RNA, 19 nt, Variola virus
uaguagucauugaucuauu

SEQ ID NO: 4088088 - RNA, 14 nt, Variola virus
uaguaguguuuccc

SEQ ID NO: 4088089 - RNA, 15 nt, Variola virus
uaguauaaauaguua

SEQ ID NO: 4088090 - RNA, 18 nt, Variola virus
uaguauauaauaaagaua

SEQ ID NO: 4088091 - RNA, 15 nt, Variola virus
uaguauauacguuau

SEQ ID NO: 4088092 - RNA, 16 nt, Variola virus
uaguauauggacaaac

SEQ ID NO: 4088093 - RNA, 21 nt, Variola virus
uaguaucaauaacacaaucau

SEQ ID NO: 4088094 - RNA, 16 nt, Variola virus
uagucagaauuuucau

SEQ ID NO: 4088095 - RNA, 17 nt, Variola virus
uagucagaccauucuug

SEQ ID NO: 4088096 - RNA, 20 nt, Variola virus
uagucaucucauuaacuauu

SEQ ID NO: 4088097 - RNA, 16 nt, Variola virus
uagucuguguuacaua

SEQ ID NO: 4088098 - RNA, 13 nt, Variola virus
uagugauuuugaa

SEQ ID NO: 4088099 - RNA, 20 nt, Variola virus
uagugguauaucuuguucua

SEQ ID NO: 4088100 - RNA, 22 nt, Variola virus
uaguuauggcacucuuauuaua

SEQ ID NO: 4088101 - RNA, 18 nt, Variola virus
uaguucaucuaugaaugu

SEQ ID NO: 4088102 - RNA, 19 nt, Variola virus
uaguucucuuuuguagaac

SEQ ID NO: 4088103 - RNA, 19 nt, Variola virus
uaguugauagaacaaaaua

SEQ ID NO: 4088104 - RNA, 23 nt, Variola virus
uaguugauagaacaaaauacaua

SEQ ID NO: 4088105 - RNA, 15 nt, Variola virus
uaguuuaucaaaaau

SEQ ID NO: 4088106 - RNA, 17 nt, Variola virus
uaguuuaucuuuuucua

SEQ ID NO: 4088107 - RNA, 13 nt, Variola virus
uaguuucuaagau

SEQ ID NO: 4088108 - RNA, 17 nt, Variola virus
uaguuucugguuuucua

SEQ ID NO: 4088109 - RNA, 14 nt, Variola virus
uaguuuuuacacau

SEQ ID NO: 4088110 - RNA, 14 nt, Variola virus
uauaaaaaacuuuu

SEQ ID NO: 4088111 - RNA, 21 nt, Variola virus
uauaaaaauuuuuuauacauu

SEQ ID NO: 4088112 - RNA, 16 nt, Variola virus
uauaaaaguguauuua

SEQ ID NO: 4088113 - RNA, 14 nt, Variola virus
uauaaaauaaacau

SEQ ID NO: 4088114 - RNA, 21 nt, Variola virus
uauaaaauacuaaugcaucua

SEQ ID NO: 4088115 - RNA, 12 nt, Variola virus
uauaaaauacuu

SEQ ID NO: 4088116 - RNA, 13 nt, Variola virus
uauaaaaugacau

SEQ ID NO: 4088117 - RNA, 22 nt, Variola virus
uauaaaccgcuauugaaacuga

SEQ ID NO: 4088118 - RNA, 20 nt, Variola virus
uauaaaggaauaaaauauga

SEQ ID NO: 4088119 - RNA, 15 nt, Variola virus
uauaaauguagacuc

SEQ ID NO: 4088120 - RNA, 12 nt, Variola virus
uauaaauuaaag

SEQ ID NO: 4088121 - RNA, 14 nt, Variola virus
uauaacaaugacuu

SEQ ID NO: 4088122 - RNA, 20 nt, Variola virus
uauaaccaccgauaaaucua

SEQ ID NO: 4088123 - RNA, 13 nt, Variola virus
uauaaccuuaaua

SEQ ID NO: 4088124 - RNA, 17 nt, Variola virus
uauaacuucuaaucuug

SEQ ID NO: 4088125 - RNA, 17 nt, Variola virus
uauaagauuaucaaaau

SEQ ID NO: 4088126 - RNA, 22 nt, Variola virus
uauaaucaguagcguguuuuaa

SEQ ID NO: 4088127 - RNA, 18 nt, Variola virus
uauaaucauuauuaacuu

SEQ ID NO: 4088128 - RNA, 20 nt, Variola virus
uauaaugcguauaauauguu

SEQ ID NO: 4088129 - RNA, 16 nt, Variola virus
uauaauguauguuuaa

SEQ ID NO: 4088130 - RNA, 23 nt, Variola virus
uauaauuaucacauauuaaaauu

SEQ ID NO: 4088131 - RNA, 22 nt, Variola virus
uauaauuauuauugauagcauu

SEQ ID NO: 4088132 - RNA, 21 nt, Variola virus
uauaauucguuuuuauaugug

SEQ ID NO: 4088133 - RNA, 15 nt, Variola virus
uauaauuuuaccauu

SEQ ID NO: 4088134 - RNA, 22 nt, Variola virus
uauacaaugcucaguaaaugua

SEQ ID NO: 4088135 - RNA, 20 nt, Variola virus
uauacagugaacacacaaua

SEQ ID NO: 4088136 - RNA, 23 nt, Variola virus
uauacauauuccagaugucauga

SEQ ID NO: 4088137 - RNA, 17 nt, Variola virus
uauaccaacaugucuga

SEQ ID NO: 4088138 - RNA, 19 nt, Variola virus
uauaccuuguaauuaaauu

SEQ ID NO: 4088139 - RNA, 17 nt, Variola virus
uauacggcaacagcuuc

SEQ ID NO: 4088140 - RNA, 17 nt, Variola virus
uauacguuauugucaaa

SEQ ID NO: 4088141 - RNA, 16 nt, Variola virus
uauacucuuauuauca

SEQ ID NO: 4088142 - RNA, 21 nt, Variola virus
uauacuugucaucauuucuaa

SEQ ID NO: 4088143 - RNA, 16 nt, Variola virus
uauagaccguuacauu

SEQ ID NO: 4088144 - RNA, 19 nt, Variola virus
uauagagcacuauuucuaa

SEQ ID NO: 4088145 - RNA, 21 nt, Variola virus
uauagagcacuauuucuaaau

SEQ ID NO: 4088146 - RNA, 22 nt, Variola virus
uauagaugaggugguugcagaa

SEQ ID NO: 4088147 - RNA, 16 nt, Variola virus
uauagguauauuugcg

SEQ ID NO: 4088148 - RNA, 17 nt, Variola virus
uauaguagaauuucauu

SEQ ID NO: 4088149 - RNA, 14 nt, Variola virus
uauaguuaacauuu

SEQ ID NO: 4088150 - RNA, 13 nt, Variola virus
uauaguuuaaauu

SEQ ID NO: 4088151 - RNA, 15 nt, Variola virus
uauauaaaaauauca

SEQ ID NO: 4088152 - RNA, 13 nt, Variola virus
uauauaaauacuu

SEQ ID NO: 4088153 - RNA, 19 nt, Variola virus
uauauaaguaauaccaaaa

SEQ ID NO: 4088154 - RNA, 22 nt, Variola virus
uauauaauuuuuggacaaaugu

SEQ ID NO: 4088155 - RNA, 17 nt, Variola virus
uauauacucuauuucaa

SEQ ID NO: 4088156 - RNA, 12 nt, Variola virus
uauauacugaaa

SEQ ID NO: 4088157 - RNA, 17 nt, Variola virus
uauauagauauuaucua

SEQ ID NO: 4088158 - RNA, 12 nt, Variola virus
uauauagaugua

SEQ ID NO: 4088159 - RNA, 14 nt, Variola virus
uauauagaugucaa

SEQ ID NO: 4088160 - RNA, 23 nt, Variola virus
uauauagccgucgccaauugugu

SEQ ID NO: 4088161 - RNA, 17 nt, Variola virus
uauauauagauggagua

SEQ ID NO: 4088162 - RNA, 13 nt, Variola virus
uauauauguagug

SEQ ID NO: 4088163 - RNA, 18 nt, Variola virus
uauauauuagauacaguu

SEQ ID NO: 4088164 - RNA, 17 nt, Variola virus
uauauccuuuagaguau

SEQ ID NO: 4088165 - RNA, 17 nt, Variola virus
uauaucuauaucuacau

SEQ ID NO: 4088166 - RNA, 17 nt, Variola virus
uauaugaaguaaaguau

SEQ ID NO: 4088167 - RNA, 15 nt, Variola virus
uauaugacuguauuu

SEQ ID NO: 4088168 - RNA, 14 nt, Variola virus
uauaugauaucuuu

SEQ ID NO: 4088169 - RNA, 17 nt, Variola virus
uauaugauauuccugga

SEQ ID NO: 4088170 - RNA, 17 nt, Variola virus
uauauuagacaauacua

SEQ ID NO: 4088171 - RNA, 16 nt, Variola virus
uauauuccgauuucaa

SEQ ID NO: 4088172 - RNA, 17 nt, Variola virus
uauauuccugagcauau

SEQ ID NO: 4088173 - RNA, 19 nt, Variola virus
uauauuucgugauauacau

SEQ ID NO: 4088174 - RNA, 15 nt, Variola virus
uauauuuuauacauu

SEQ ID NO: 4088175 - RNA, 17 nt, Variola virus
uaucaacagauagcuug

SEQ ID NO: 4088176 - RNA, 16 nt, Variola virus
uaucaagauccaugau

SEQ ID NO: 4088177 - RNA, 20 nt, Variola virus
uaucaagauguaaaauacuu

SEQ ID NO: 4088178 - RNA, 20 nt, Variola virus
uaucaagcgauucuuucaau

SEQ ID NO: 4088179 - RNA, 23 nt, Variola virus
uaucaauaacacaaucaugauuu

SEQ ID NO: 4088180 - RNA, 20 nt, Variola virus
uaucaaugauuaguuucuua

SEQ ID NO: 4088181 - RNA, 20 nt, Variola virus
uaucaccaguaagaacauaa

SEQ ID NO: 4088182 - RNA, 24 nt, Variola virus
uaucacuucaacgacaauagucaa

SEQ ID NO: 4088183 - RNA, 20 nt, Variola virus
uaucagagcagucuuucuaa

SEQ ID NO: 4088184 - RNA, 20 nt, Variola virus
uaucaucacaacuuaaugaa

SEQ ID NO: 4088185 - RNA, 16 nt, Variola virus
uaucaucauuaucauu

SEQ ID NO: 4088186 - RNA, 15 nt, Variola virus
uaucauccaauauua

SEQ ID NO: 4088187 - RNA, 17 nt, Variola virus
uaucaucucuaucauaa

SEQ ID NO: 4088188 - RNA, 16 nt, Variola virus
uaucaugucuaaugau

SEQ ID NO: 4088189 - RNA, 16 nt, Variola virus
uaucauuaauacagua

SEQ ID NO: 4088190 - RNA, 15 nt, Variola virus
uaucauuuaaacauu

SEQ ID NO: 4088191 - RNA, 20 nt, Variola virus
uauccaacuuaacaaaucuu

SEQ ID NO: 4088192 - RNA, 14 nt, Variola virus
uauccaagaaaaag

SEQ ID NO: 4088193 - RNA, 18 nt, Variola virus
uauccagucaacacuaug

SEQ ID NO: 4088194 - RNA, 21 nt, Variola virus
uauccagugcguuucuacaaa

SEQ ID NO: 4088195 - RNA, 16 nt, Variola virus
uauccaucuaacaaaa

SEQ ID NO: 4088196 - RNA, 23 nt, Variola virus
uauccauuauuugccuguuaauc

SEQ ID NO: 4088197 - RNA, 17 nt, Variola virus
uauccuauauacgaaaa

SEQ ID NO: 4088198 - RNA, 21 nt, Variola virus
uauccucaauaacguuaucau

SEQ ID NO: 4088199 - RNA, 11 nt, Variola virus
uauccuuaucc

SEQ ID NO: 4088200 - RNA, 20 nt, Variola virus
uaucgcauagaaauacaaaa

SEQ ID NO: 4088201 - RNA, 12 nt, Variola virus
uaucguuuucau

SEQ ID NO: 4088202 - RNA, 15 nt, Variola virus
uaucuaacucguaaa

SEQ ID NO: 4088203 - RNA, 17 nt, Variola virus
uaucuacacaaauagaa

SEQ ID NO: 4088204 - RNA, 18 nt, Variola virus
uaucuauaucuacaucua

SEQ ID NO: 4088205 - RNA, 20 nt, Variola virus
uaucuauuuuaacaaagcau

SEQ ID NO: 4088206 - RNA, 23 nt, Variola virus
uaucuccacucucgauaaaucua

SEQ ID NO: 4088207 - RNA, 21 nt, Variola virus
uaucucguccuugguuuacau

SEQ ID NO: 4088208 - RNA, 24 nt, Variola virus
uacauaccucuuaaauggacuagu

SEQ ID NO: 4088209 - RNA, 22 nt, Variola virus
uaggcuuccaaaaauuuuucau

SEQ ID NO: 4088210 - RNA, 16 nt, Variola virus
uaggugcaucuggagc

SEQ ID NO: 4088211 - RNA, 13 nt, Variola virus
gaauauuauaauu

SEQ ID NO: 4088212 - RNA, 21 nt, Variola virus
gaauauugggcaaagauauuu

SEQ ID NO: 4088213 - RNA, 12 nt, Variola virus
gaaucaaaaagu

SEQ ID NO: 4088214 - RNA, 13 nt, Variola virus
gaaucaguauaua

SEQ ID NO: 4088215 - RNA, 14 nt, Variola virus
gaaucauacaauga

SEQ ID NO: 4088216 - RNA, 20 nt, Variola virus
gaauccaucucuauguuuca

SEQ ID NO: 4088217 - RNA, 20 nt, Variola virus
gaauccauuuucccaaauau

SEQ ID NO: 4088218 - RNA, 13 nt, Variola virus
gaaucguauauau

SEQ ID NO: 4088219 - RNA, 15 nt, Variola virus
gaaucuaaacaaaau

SEQ ID NO: 4088220 - RNA, 17 nt, Variola virus
gaaucuagguauuucuu

SEQ ID NO: 4088221 - RNA, 19 nt, Variola virus
gaaucuauuacugacuuua

SEQ ID NO: 4088222 - RNA, 12 nt, Variola virus
gaaucuauuuua

SEQ ID NO: 4088223 - RNA, 14 nt, Variola virus
gaaucugaaaaugu

SEQ ID NO: 4088224 - RNA, 16 nt, Variola virus
gaaugagauacuaaca

SEQ ID NO: 4088225 - RNA, 16 nt, Variola virus
gaaugcccgcauauau

SEQ ID NO: 4088226 - RNA, 22 nt, Variola virus
gaaugcggugccauucaugaaa

SEQ ID NO: 4088227 - RNA, 14 nt, Variola virus
gaaugcuguuauau

SEQ ID NO: 4088228 - RNA, 17 nt, Variola virus
gaauguuauaaaaaugc

SEQ ID NO: 4088229 - RNA, 14 nt, Variola virus
gaauuaauaauauc

SEQ ID NO: 4088230 - RNA, 12 nt, Variola virus
gaauuaauacau

SEQ ID NO: 4088231 - RNA, 12 nt, Variola virus
gaauuagaaaag

SEQ ID NO: 4088232 - RNA, 16 nt, Variola virus
gaauuauuuacaaaau

SEQ ID NO: 4088233 - RNA, 17 nt, Variola virus
gaauucauuugauguau

SEQ ID NO: 4088234 - RNA, 16 nt, Variola virus
gaauuguuucuuuuag

SEQ ID NO: 4088235 - RNA, 21 nt, Variola virus
gaauuguuucuuuuagaagug

SEQ ID NO: 4088236 - RNA, 16 nt, Variola virus
gaauuuauuucuaauu

SEQ ID NO: 4088237 - RNA, 15 nt, Variola virus
gaauuugauacuguc

SEQ ID NO: 4088238 - RNA, 18 nt, Variola virus
gaauuugauccuaccaaa

SEQ ID NO: 4088239 - RNA, 13 nt, Variola virus
gacaaauuauucu

SEQ ID NO: 4088240 - RNA, 22 nt, Variola virus
gacaacaaggcuuuaauaucua

SEQ ID NO: 4088241 - RNA, 17 nt, Variola virus
gacaacauuaauacaaa

SEQ ID NO: 4088242 - RNA, 21 nt, Variola virus
gacaauaacagagugcagaua

SEQ ID NO: 4088243 - RNA, 12 nt, Variola virus
gacaauaaucuc

SEQ ID NO: 4088244 - RNA, 14 nt, Variola virus
gacaauauuuaguu

SEQ ID NO: 4088245 - RNA, 16 nt, Variola virus
gacaaugaauugcaua

SEQ ID NO: 4088246 - RNA, 15 nt, Variola virus
gacacgacauagaga

SEQ ID NO: 4088247 - RNA, 15 nt, Variola virus
gacacucuauaucua

SEQ ID NO: 4088248 - RNA, 22 nt, Variola virus
gacauaagucgccucaaagaua

SEQ ID NO: 4088249 - RNA, 23 nt, Variola virus
gacauaaugacuccauagagaua

SEQ ID NO: 4088250 - RNA, 21 nt, Variola virus
gacauagagagcuucaucaau

SEQ ID NO: 4088251 - RNA, 22 nt, Variola virus
gacauauuucgacaaaaagaua

SEQ ID NO: 4088252 - RNA, 19 nt, Variola virus
gacaugcuacaaaauaugu

SEQ ID NO: 4088253 - RNA, 18 nt, Variola virus
gacauggcuucuuccaua

SEQ ID NO: 4088254 - RNA, 12 nt, Variola virus
gacauuagaccg

SEQ ID NO: 4088255 - RNA, 13 nt, Variola virus
gacauucaucaau

SEQ ID NO: 4088256 - RNA, 23 nt, Variola virus
gacauucccacaguguugccauu

SEQ ID NO: 4088257 - RNA, 17 nt, Variola virus
gacauuccuaugaugau

SEQ ID NO: 4088258 - RNA, 19 nt, Variola virus
gacauuguauuaugaugaa

SEQ ID NO: 4088259 - RNA, 16 nt, Variola virus
gacauuuucacaaaua

SEQ ID NO: 4088260 - RNA, 13 nt, Variola virus
gacgcacauaugc

SEQ ID NO: 4088261 - RNA, 20 nt, Variola virus
gacgcagauagcuauaugau

SEQ ID NO: 4088262 - RNA, 20 nt, Variola virus
gacgcauuauauaguuuuua

SEQ ID NO: 4088263 - RNA, 16 nt, Variola virus
gacgcuuauuauuaau

SEQ ID NO: 4088264 - RNA, 18 nt, Variola virus
gacguguuaauaaaaaca

SEQ ID NO: 4088265 - RNA, 23 nt, Variola virus
gacguugccaaaaaauccuguaa

SEQ ID NO: 4088266 - RNA, 13 nt, Variola virus
gacuauaaaauau

SEQ ID NO: 4088267 - RNA, 13 nt, Variola virus
gacuauaaaugua

SEQ ID NO: 4088268 - RNA, 14 nt, Variola virus
gacuauaacagaua

SEQ ID NO: 4088269 - RNA, 19 nt, Variola virus
gacuauagacauaauacua

SEQ ID NO: 4088270 - RNA, 13 nt, Variola virus
gacuaucaacaau

SEQ ID NO: 4088271 - RNA, 22 nt, Variola virus
gacuauuggaauguguuaaaaa

SEQ ID NO: 4088272 - RNA, 19 nt, Variola virus
gacucauaagaaagagaau

SEQ ID NO: 4088273 - RNA, 21 nt, Variola virus
gacuccaucaucgaucuaaua

SEQ ID NO: 4088274 - RNA, 23 nt, Variola virus
gacugauuauugaguuaaaauca

SEQ ID NO: 4088275 - RNA, 21 nt, Variola virus
gacugcgaauccuauauuaaa

SEQ ID NO: 4088276 - RNA, 18 nt, Variola virus
gacuguacgauacauaau

SEQ ID NO: 4088277 - RNA, 13 nt, Variola virus
gacuguauuugga

SEQ ID NO: 4088278 - RNA, 16 nt, Variola virus
gacuguuuauacaaga

SEQ ID NO: 4088279 - RNA, 16 nt, Variola virus
gacuucuaacaaacau

SEQ ID NO: 4088280 - RNA, 18 nt, Variola virus
gacuuguauaugccaaag

SEQ ID NO: 4088281 - RNA, 18 nt, Variola virus
gagaaggaauagaaauaa

SEQ ID NO: 4088282 - RNA, 23 nt, Variola virus
gagaaguuuuauccaauaauuua

SEQ ID NO: 4088283 - RNA, 14 nt, Variola virus
gagaauuaaaagag

SEQ ID NO: 4088284 - RNA, 17 nt, Variola virus
gagacgaucuacuauca

SEQ ID NO: 4088285 - RNA, 20 nt, Variola virus
gagacuugauagauauuaau

SEQ ID NO: 4088286 - RNA, 13 nt, Variola virus
gagagagaaauac

SEQ ID NO: 4088287 - RNA, 18 nt, Variola virus
gagauauuggaugaugau

SEQ ID NO: 4088288 - RNA, 13 nt, Variola virus
gagauuaaugcua

SEQ ID NO: 4088289 - RNA, 13 nt, Variola virus
gagauuuucuauu

SEQ ID NO: 4088290 - RNA, 16 nt, Variola virus
gagcguaaaaguaaac

SEQ ID NO: 4088291 - RNA, 15 nt, Variola virus
gaggaagacacauua

SEQ ID NO: 4088292 - RNA, 14 nt, Variola virus
gaggacguauauaa

SEQ ID NO: 4088293 - RNA, 18 nt, Variola virus
gaggacuuggauguuugu

SEQ ID NO: 4088294 - RNA, 20 nt, Variola virus
gaggaguugcugaugaugaa

SEQ ID NO: 4088295 - RNA, 19 nt, Variola virus
gaggauguauauaucauga

SEQ ID NO: 4088296 - RNA, 23 nt, Variola virus
gaguaauauccucuauuauacau

SEQ ID NO: 4088297 - RNA, 18 nt, Variola virus
gaguaguacaagaaauac

SEQ ID NO: 4088298 - RNA, 19 nt, Variola virus
gaguauuaaccaugaaaga

SEQ ID NO: 4088299 - RNA, 13 nt, Variola virus
gagucacaaauaa

SEQ ID NO: 4088300 - RNA, 14 nt, Variola virus
gauaaaaaauuaua

SEQ ID NO: 4088301 - RNA, 18 nt, Variola virus
gauaaaacaaguuuucau

SEQ ID NO: 4088302 - RNA, 18 nt, Variola virus
gauaaaacgauaaaagau

SEQ ID NO: 4088303 - RNA, 14 nt, Variola virus
gauaaaauaucaua

SEQ ID NO: 4088304 - RNA, 15 nt, Variola virus
gauaaaauuaaugag

SEQ ID NO: 4088305 - RNA, 19 nt, Variola virus
gauaaagauagaugaugau

SEQ ID NO: 4088306 - RNA, 18 nt, Variola virus
gauaaauaguaucaucua

SEQ ID NO: 4088307 - RNA, 15 nt, Variola virus
gauaacaaauuaaag

SEQ ID NO: 4088308 - RNA, 22 nt, Variola virus
gauaacuacaauauuucaucau

SEQ ID NO: 4088309 - RNA, 11 nt, Variola virus
gauaacuguau

SEQ ID NO: 4088310 - RNA, 21 nt, Variola virus
gauaaguuucggcacauauua

SEQ ID NO: 4088311 - RNA, 22 nt, Variola virus
gauaauaaaauuacuaguauca

SEQ ID NO: 4088312 - RNA, 14 nt, Variola virus
gauaauauuauuau

SEQ ID NO: 4088313 - RNA, 17 nt, Variola virus
gauaaucguauacuuca

SEQ ID NO: 4088314 - RNA, 15 nt, Variola virus
gauaaugaacauaua

SEQ ID NO: 4088315 - RNA, 15 nt, Variola virus
gauaaugauaaugac

SEQ ID NO: 4088316 - RNA, 12 nt, Variola virus
gauaauuuccau

SEQ ID NO: 4088317 - RNA, 11 nt, Variola virus
gauacaaauau

SEQ ID NO: 4088318 - RNA, 20 nt, Variola virus
gauacaauuagauauaucua

SEQ ID NO: 4088319 - RNA, 21 nt, Variola virus
gauacacuagacauuuuuuaa

SEQ ID NO: 4088320 - RNA, 18 nt, Variola virus
gauacaugauuaauacau

SEQ ID NO: 4088321 - RNA, 14 nt, Variola virus
gauacuauaaugaa

SEQ ID NO: 4088322 - RNA, 21 nt, Variola virus
gauagguuagaagauaaugaa

SEQ ID NO: 4088323 - RNA, 13 nt, Variola virus
gauaguaaugcau

SEQ ID NO: 4088324 - RNA, 15 nt, Variola virus
gauaguguauaaaga

SEQ ID NO: 4088325 - RNA, 22 nt, Variola virus
gauaguuuucucuauucugaaa

SEQ ID NO: 4088326 - RNA, 14 nt, Variola virus
gauauaaauaauau

SEQ ID NO: 4088327 - RNA, 20 nt, Variola virus
gauauaauauauuagauauu

SEQ ID NO: 4088328 - RNA, 18 nt, Variola virus
gauauacaguauaaugau

SEQ ID NO: 4088329 - RNA, 15 nt, Variola virus
gauauauaucuuuuc

SEQ ID NO: 4088330 - RNA, 17 nt, Variola virus
gauauaucaaaauuaga

SEQ ID NO: 4088331 - RNA, 15 nt, Variola virus
gauauauuaaacaac

SEQ ID NO: 4088332 - RNA, 13 nt, Variola virus
gauauauucaaac

SEQ ID NO: 4088333 - RNA, 12 nt, Variola virus
gauaucaacaag

SEQ ID NO: 4088334 - RNA, 18 nt, Variola virus
gauauccuaucuauuauu

SEQ ID NO: 4088335 - RNA, 19 nt, Variola virus
gauaucuuuacuaagaaag

SEQ ID NO: 4088336 - RNA, 21 nt, Variola virus
gauaucuuuagauauauccac

SEQ ID NO: 4088337 - RNA, 15 nt, Variola virus
gauauuaauaaugau

SEQ ID NO: 4088338 - RNA, 17 nt, Variola virus
gauauugauaucuuuuu

SEQ ID NO: 4088339 - RNA, 13 nt, Variola virus
gauauuugcuaau

SEQ ID NO: 4088340 - RNA, 14 nt, Variola virus
gaucagacaaauaa

SEQ ID NO: 4088341 - RNA, 22 nt, Variola virus
auuaaucaaaugguaaauacug

SEQ ID NO: 4088342 - RNA, 16 nt, Variola virus
auuaaugacgauagau

SEQ ID NO: 4088343 - RNA, 19 nt, Variola virus
auuaaugucguauuugaac

SEQ ID NO: 4088344 - RNA, 15 nt, Variola virus
auuaauuuuauuaac

SEQ ID NO: 4088345 - RNA, 13 nt, Variola virus
auuacaacauaau

SEQ ID NO: 4088346 - RNA, 19 nt, Variola virus
auuacagcguaaaacacau

SEQ ID NO: 4088347 - RNA, 14 nt, Variola virus
auuaccacuuucca

SEQ ID NO: 4088348 - RNA, 17 nt, Variola virus
auuaccauagaagaugu

SEQ ID NO: 4088349 - RNA, 19 nt, Variola virus
auuaccauguaugauaaaa

SEQ ID NO: 4088350 - RNA, 18 nt, Variola virus
auuaccgacgauugucca

SEQ ID NO: 4088351 - RNA, 20 nt, Variola virus
auuaccggucauauuaauaa

SEQ ID NO: 4088352 - RNA, 20 nt, Variola virus
auuacgaauauauaaaagac

SEQ ID NO: 4088353 - RNA, 15 nt, Variola virus
auuacgcucuacaaa

SEQ ID NO: 4088354 - RNA, 19 nt, Variola virus
auuacgguaucuacuagau

SEQ ID NO: 4088355 - RNA, 21 nt, Variola virus
auuacuacauuauuaaaucau

SEQ ID NO: 4088356 - RNA, 17 nt, Variola virus
auuacuacguaaagaag

SEQ ID NO: 4088357 - RNA, 17 nt, Variola virus
auuacuaggagaauuau

SEQ ID NO: 4088358 - RNA, 13 nt, Variola virus
auuacuauaaaug

SEQ ID NO: 4088359 - RNA, 21 nt, Variola virus
auuacuauaaauggagaaugu

SEQ ID NO: 4088360 - RNA, 15 nt, Variola virus
auuacuuaucauuua

SEQ ID NO: 4088361 - RNA, 16 nt, Variola virus
auuacuuuaauaguug

SEQ ID NO: 4088362 - RNA, 14 nt, Variola virus
auuagacauaugau

SEQ ID NO: 4088363 - RNA, 13 nt, Variola virus
auuagauaaaguu

SEQ ID NO: 4088364 - RNA, 23 nt, Variola virus
auuagauauuuuaugggaaaacg

SEQ ID NO: 4088365 - RNA, 14 nt, Variola virus
auuagauccaagga

SEQ ID NO: 4088366 - RNA, 14 nt, Variola virus
auuagaucuuuuac

SEQ ID NO: 4088367 - RNA, 22 nt, Variola virus
auuaggcacagucaaacauuca

SEQ ID NO: 4088368 - RNA, 22 nt, Variola virus
auuaguaaaacuaguauugugu

SEQ ID NO: 4088369 - RNA, 17 nt, Variola virus
auuagucauguuaaaaa

SEQ ID NO: 4088370 - RNA, 22 nt, Variola virus
auuaguguauacaccaacugua

SEQ ID NO: 4088371 - RNA, 20 nt, Variola virus
auuauaaguaguaguguuuc

SEQ ID NO: 4088372 - RNA, 18 nt, Variola virus
auuauaaucauuauuaac

SEQ ID NO: 4088373 - RNA, 12 nt, Variola virus
auuauaauguau

SEQ ID NO: 4088374 - RNA, 14 nt, Variola virus
auuauacuuuguaa

SEQ ID NO: 4088375 - RNA, 19 nt, Variola virus
auuauauggcacuguguau

SEQ ID NO: 4088376 - RNA, 14 nt, Variola virus
auuaucaaaagaca

SEQ ID NO: 4088377 - RNA, 14 nt, Variola virus
auuaucaaauguug

SEQ ID NO: 4088378 - RNA, 11 nt, Variola virus
auuaucaucug

SEQ ID NO: 4088379 - RNA, 16 nt, Variola virus
auuauccguauuucca

SEQ ID NO: 4088380 - RNA, 17 nt, Variola virus
auuauccuaucauguau

SEQ ID NO: 4088381 - RNA, 14 nt, Variola virus
auuaucuacagaug

SEQ ID NO: 4088382 - RNA, 21 nt, Variola virus
auuauggggaaauaaagaaaa

SEQ ID NO: 4088383 - RNA, 14 nt, Variola virus
auuauguauaccuu

SEQ ID NO: 4088384 - RNA, 12 nt, Variola virus
auuauuagaaau

SEQ ID NO: 4088385 - RNA, 18 nt, Variola virus
auuauucauuuucuauuu

SEQ ID NO: 4088386 - RNA, 15 nt, Variola virus
auuauucgagugaaa

SEQ ID NO: 4088387 - RNA, 17 nt, Variola virus
auuauucuuaaaugccu

SEQ ID NO: 4088388 - RNA, 19 nt, Variola virus
auuauugcaugauagaaug

SEQ ID NO: 4088389 - RNA, 21 nt, Variola virus
auuauuggguaaguuuaaaaa

SEQ ID NO: 4088390 - RNA, 19 nt, Variola virus
auuauugguucauuggaau

SEQ ID NO: 4088391 - RNA, 20 nt, Variola virus
auuauugucauaaacauuau

SEQ ID NO: 4088392 - RNA, 16 nt, Variola virus
auuauuuuuacagcga

SEQ ID NO: 4088393 - RNA, 21 nt, Variola virus
auuauuuuugacgaugucaag

SEQ ID NO: 4088394 - RNA, 14 nt, Variola virus
auuauuuuuggaag

SEQ ID NO: 4088395 - RNA, 20 nt, Variola virus
auucaagauuuuauuaucga

SEQ ID NO: 4088396 - RNA, 21 nt, Variola virus
auucaagcaaaaacaaaaaac

SEQ ID NO: 4088397 - RNA, 20 nt, Variola virus
auucaauuacuacaaaaauu

SEQ ID NO: 4088398 - RNA, 21 nt, Variola virus
auucaauuacuacaaaaauua

SEQ ID NO: 4088399 - RNA, 12 nt, Variola virus
auucagacacuu

SEQ ID NO: 4088400 - RNA, 16 nt, Variola virus
auucagacacuucuua

SEQ ID NO: 4088401 - RNA, 20 nt, Variola virus
auucagacacuucuuaacga

SEQ ID NO: 4088402 - RNA, 19 nt, Variola virus
auucagauaaucagccaua

SEQ ID NO: 4088403 - RNA, 13 nt, Variola virus
auucaucaaugau

SEQ ID NO: 4088404 - RNA, 14 nt, Variola virus
auucaucaaugaug

SEQ ID NO: 4088405 - RNA, 21 nt, Variola virus
auuccaacaacaucaacugaa

SEQ ID NO: 4088406 - RNA, 19 nt, Variola virus
auuccaaugaacaagauua

SEQ ID NO: 4088407 - RNA, 20 nt, Variola virus
auuccacgaacuucuaauug

SEQ ID NO: 4088408 - RNA, 23 nt, Variola virus
auuccaggaucuagauaauuaau

SEQ ID NO: 4088409 - RNA, 13 nt, Variola virus
auuccuugauauc

SEQ ID NO: 4088410 - RNA, 18 nt, Variola virus
auucgaaauuagaaagua

SEQ ID NO: 4088411 - RNA, 15 nt, Variola virus
auucgguuaugaaug

SEQ ID NO: 4088412 - RNA, 13 nt, Variola virus
auucguaaaucuu

SEQ ID NO: 4088413 - RNA, 15 nt, Variola virus
auucuaauacauaau

SEQ ID NO: 4088414 - RNA, 19 nt, Variola virus
auucuacucccuuguguaa

SEQ ID NO: 4088415 - RNA, 16 nt, Variola virus
auucuagauacaagau

SEQ ID NO: 4088416 - RNA, 13 nt, Variola virus
auucuauacuuaa

SEQ ID NO: 4088417 - RNA, 15 nt, Variola virus
auucuccuauuacau

SEQ ID NO: 4088418 - RNA, 17 nt, Variola virus
cugaaacaguaugauuu

SEQ ID NO: 4088419 - RNA, 17 nt, Variola virus
cugaaauuagagcucau

SEQ ID NO: 4088420 - RNA, 14 nt, Variola virus
cugacauucagaaa

SEQ ID NO: 4088421 - RNA, 16 nt, Variola virus
cugaguaugaugauuu

SEQ ID NO: 4088422 - RNA, 21 nt, Variola virus
cugauaagauaucuucucaaa

SEQ ID NO: 4088423 - RNA, 20 nt, Variola virus
cugauaucauuaaugauaua

SEQ ID NO: 4088424 - RNA, 16 nt, Variola virus
cugauguuuguuuucg

SEQ ID NO: 4088425 - RNA, 17 nt, Variola virus
cugauuauucacuauaa

SEQ ID NO: 4088426 - RNA, 14 nt, Variola virus
cugauuuauguuuu

SEQ ID NO: 4088427 - RNA, 13 nt, Variola virus
cugcaauaaaaca

SEQ ID NO: 4088428 - RNA, 19 nt, Variola virus
cugcagccauuuuuaugau

SEQ ID NO: 4088429 - RNA, 13 nt, Variola virus
cugcaguaauauu

SEQ ID NO: 4088430 - RNA, 18 nt, Variola virus
cugcauuaucaauaaaua

SEQ ID NO: 4088431 - RNA, 13 nt, Variola virus
cugcauuaucuac

SEQ ID NO: 4088432 - RNA, 18 nt, Variola virus
cugccauuuauccagucu

SEQ ID NO: 4088433 - RNA, 17 nt, Variola virus
cugccauuuuagagauu

SEQ ID NO: 4088434 - RNA, 24 nt, Variola virus
cugcuagaaaucauauaugauauu

SEQ ID NO: 4088435 - RNA, 15 nt, Variola virus
cugcuagaacaucca

SEQ ID NO: 4088436 - RNA, 12 nt, Variola virus
cugcugaaaaua

SEQ ID NO: 4088437 - RNA, 17 nt, Variola virus
cuggaaccucaacaauc

SEQ ID NO: 4088438 - RNA, 15 nt, Variola virus
cuggaauagguauau

SEQ ID NO: 4088439 - RNA, 16 nt, Variola virus
cuggaggagauggauu

SEQ ID NO: 4088440 - RNA, 13 nt, Variola virus
cuggauauguuuu

SEQ ID NO: 4088441 - RNA, 20 nt, Variola virus
cuggcauuggcuagguauau

SEQ ID NO: 4088442 - RNA, 18 nt, Variola virus
cugguacaggaguucagu

SEQ ID NO: 4088443 - RNA, 19 nt, Variola virus
cugguauuuauaugugcau

SEQ ID NO: 4088444 - RNA, 14 nt, Variola virus
cugguuuagauauu

SEQ ID NO: 4088445 - RNA, 19 nt, Variola virus
cuguaaauagaacauacuu

SEQ ID NO: 4088446 - RNA, 11 nt, Variola virus
cuguagaaaaa

SEQ ID NO: 4088447 - RNA, 22 nt, Variola virus
cuguagagggucaacaaucguu

SEQ ID NO: 4088448 - RNA, 13 nt, Variola virus
cuguauagauaua

SEQ ID NO: 4088449 - RNA, 20 nt, Variola virus
cuguaucaaccggauuuaaa

SEQ ID NO: 4088450 - RNA, 17 nt, Variola virus
cuguaucaguugcauuu

SEQ ID NO: 4088451 - RNA, 16 nt, Variola virus
cugucauuaaaucuuu

SEQ ID NO: 4088452 - RNA, 16 nt, Variola virus
cugucuggcaauaaau

SEQ ID NO: 4088453 - RNA, 18 nt, Variola virus
cugucuuucgauguucau

SEQ ID NO: 4088454 - RNA, 19 nt, Variola virus
cugugaauucguaaauaca

SEQ ID NO: 4088455 - RNA, 15 nt, Variola virus
cugugacagauauca

SEQ ID NO: 4088456 - RNA, 14 nt, Variola virus
cuguuaauaucaau

SEQ ID NO: 4088457 - RNA, 13 nt, Variola virus
cuguuaaucuuua

SEQ ID NO: 4088458 - RNA, 13 nt, Variola virus
cuguuagaugagg

SEQ ID NO: 4088459 - RNA, 12 nt, Variola virus
cuguuauauaca

SEQ ID NO: 4088460 - RNA, 23 nt, Variola virus
cuguucuaucaucuacaucacug

SEQ ID NO: 4088461 - RNA, 13 nt, Variola virus
cuguuuauuuuag

SEQ ID NO: 4088462 - RNA, 16 nt, Variola virus
cuguuucgaaacuuua

SEQ ID NO: 4088463 - RNA, 18 nt, Variola virus
cuguuuuagcaucuuuuu

SEQ ID NO: 4088464 - RNA, 19 nt, Variola virus
cuuaaaauauaaugauaua

SEQ ID NO: 4088465 - RNA, 18 nt, Variola virus
cuuaaaauauguaacaau

SEQ ID NO: 4088466 - RNA, 23 nt, Variola virus
cuuaaaaucgguagaaucauauu

SEQ ID NO: 4088467 - RNA, 21 nt, Variola virus
cuuaaaauuuaaaaugguauu

SEQ ID NO: 4088468 - RNA, 17 nt, Variola virus
cuuaaagacuauaccau

SEQ ID NO: 4088469 - RNA, 20 nt, Variola virus
cuuaaauguaucuuuacuag

SEQ ID NO: 4088470 - RNA, 18 nt, Variola virus
cuuaacaucuucuacauu

SEQ ID NO: 4088471 - RNA, 18 nt, Variola virus
cuuaaccauauauccaau

SEQ ID NO: 4088472 - RNA, 19 nt, Variola virus
cuuaacuugcaaaauguaa

SEQ ID NO: 4088473 - RNA, 21 nt, Variola virus
cuuaagucuccaaucuuuugu

SEQ ID NO: 4088474 - RNA, 19 nt, Variola virus
cuuaauaacaaaacuaauu

SEQ ID NO: 4088475 - RNA, 19 nt, Variola virus
cuuaauacccugguagaag

SEQ ID NO: 4088476 - RNA, 16 nt, Variola virus
cuuaauagacaaacug

SEQ ID NO: 4088477 - RNA, 13 nt, Variola virus
cuuaaucauguga

SEQ ID NO: 4088478 - RNA, 14 nt, Variola virus
cuuaauuauaacga

SEQ ID NO: 4088479 - RNA, 16 nt, Variola virus
cuuacaaauauucaca

SEQ ID NO: 4088480 - RNA, 14 nt, Variola virus
cuuacuaucuuuuu

SEQ ID NO: 4088481 - RNA, 20 nt, Variola virus
cuuaguauuuuuagauauca

SEQ ID NO: 4088482 - RNA, 20 nt, Variola virus
cuuaucuucuauaucaucua

SEQ ID NO: 4088483 - RNA, 14 nt, Variola virus
cuuauguaugugca

SEQ ID NO: 4088484 - RNA, 20 nt, Variola virus
cuuauuaacuuuaacauguc

SEQ ID NO: 4088485 - RNA, 17 nt, Variola virus
cuuauuacuuuuggaau

SEQ ID NO: 4088486 - RNA, 22 nt, Variola virus
cuuauuaguaacugacuuaaua

SEQ ID NO: 4088487 - RNA, 17 nt, Variola virus
cuuauuuuuaacaaaug

SEQ ID NO: 4088488 - RNA, 15 nt, Variola virus
cuucaauaaaaugaa

SEQ ID NO: 4088489 - RNA, 16 nt, Variola virus
cuucagacaacaucuc

SEQ ID NO: 4088490 - RNA, 19 nt, Variola virus
cuucagacaacaucucaga

SEQ ID NO: 4088491 - RNA, 16 nt, Variola virus
cuucauuaaucuuuuc

SEQ ID NO: 4088492 - RNA, 12 nt, Variola virus
cuucauuauuuu

SEQ ID NO: 4088493 - RNA, 12 nt, Variola virus
cuucauuucuaa

SEQ ID NO: 4088494 - RNA, 14 nt, Variola virus
cuuccaacauaaua

SEQ ID NO: 4088495 - RNA, 15 nt, Variola virus
cuuccaacucuguuu

SEQ ID NO: 4088496 - RNA, 20 nt, Variola virus
cuuccacuguccaaaaugau

SEQ ID NO: 4088497 - RNA, 14 nt, Variola virus
cuucgauagauauu

SEQ ID NO: 4088498 - RNA, 17 nt, Variola virus
cuucgccgcgacuuucu

SEQ ID NO: 4088499 - RNA, 22 nt, Variola virus
cuucuaaaauuacaaacaacug

SEQ ID NO: 4088500 - RNA, 14 nt, Variola virus
cuucuaucuuuagu

SEQ ID NO: 4088501 - RNA, 20 nt, Variola virus
cuucuauuaaccacauaucu

SEQ ID NO: 4088502 - RNA, 23 nt, Variola virus
cuucuggaagguuuguauucuga

SEQ ID NO: 4088503 - RNA, 15 nt, Variola virus
augacgauaacauuc

SEQ ID NO: 4088504 - RNA, 18 nt, Variola virus
augacgauccuuuaagag

SEQ ID NO: 4088505 - RNA, 14 nt, Variola virus
augacuaaacauuu

SEQ ID NO: 4088506 - RNA, 15 nt, Variola virus
augacucucaaauua

SEQ ID NO: 4088507 - RNA, 21 nt, Variola virus
augacuucguaagaaauaaua

SEQ ID NO: 4088508 - RNA, 18 nt, Variola virus
augacuuuaguaaaucau

SEQ ID NO: 4088509 - RNA, 23 nt, Variola virus
augacuuuaucagaucaaaauua

SEQ ID NO: 4088510 - RNA, 13 nt, Variola virus
augagaacauagu

SEQ ID NO: 4088511 - RNA, 15 nt, Variola virus
augagaacauaguau

SEQ ID NO: 4088512 - RNA, 18 nt, Variola virus
augagacagauuaucaua

SEQ ID NO: 4088513 - RNA, 19 nt, Variola virus
augagauguuaaaugaauu

SEQ ID NO: 4088514 - RNA, 20 nt, Variola virus
augagauuauuaaguauuua

SEQ ID NO: 4088515 - RNA, 14 nt, Variola virus
augaguauauguau

SEQ ID NO: 4088516 - RNA, 21 nt, Variola virus
augauacgauacuauauguau

SEQ ID NO: 4088517 - RNA, 18 nt, Variola virus
augauagaaaugaugaag

SEQ ID NO: 4088518 - RNA, 13 nt, Variola virus
augauagaaucug

SEQ ID NO: 4088519 - RNA, 16 nt, Variola virus
augauauuagaacuac

SEQ ID NO: 4088520 - RNA, 14 nt, Variola virus
augaucaaaaagac

SEQ ID NO: 4088521 - RNA, 16 nt, Variola virus
augauccuauucuaaa

SEQ ID NO: 4088522 - RNA, 13 nt, Variola virus
augaucuguuuau

SEQ ID NO: 4088523 - RNA, 20 nt, Variola virus
augaugaaacacaagaucaa

SEQ ID NO: 4088524 - RNA, 17 nt, Variola virus
augaugaauacauuuau

SEQ ID NO: 4088525 - RNA, 13 nt, Variola virus
augaugacgguau

SEQ ID NO: 4088526 - RNA, 17 nt, Variola virus
augaugaugaaaugaua

SEQ ID NO: 4088527 - RNA, 22 nt, Variola virus
augauguguuauuuuuuaacug

SEQ ID NO: 4088528 - RNA, 23 nt, Variola virus
augauuaaugacgauagauuuac

SEQ ID NO: 4088529 - RNA, 18 nt, Variola virus
augauucgucgacauguu

SEQ ID NO: 4088530 - RNA, 21 nt, Variola virus
augauucuaaccuagaauuac

SEQ ID NO: 4088531 - RNA, 17 nt, Variola virus
augauugauuagaaaau

SEQ ID NO: 4088532 - RNA, 17 nt, Variola virus
augauuuacaaaugguu

SEQ ID NO: 4088533 - RNA, 23 nt, Variola virus
augauuuucugggacuauuggaa

SEQ ID NO: 4088534 - RNA, 18 nt, Variola virus
augauuuuuaaucaagau

SEQ ID NO: 4088535 - RNA, 16 nt, Variola virus
augcaaagucuaaaua

SEQ ID NO: 4088536 - RNA, 21 nt, Variola virus
augcaacucuaucauguagua

SEQ ID NO: 4088537 - RNA, 18 nt, Variola virus
augcacagcgaagaauuc

SEQ ID NO: 4088538 - RNA, 17 nt, Variola virus
augcaucgguaaauaua

SEQ ID NO: 4088539 - RNA, 17 nt, Variola virus
augcauuuuuauauaca

SEQ ID NO: 4088540 - RNA, 15 nt, Variola virus
augccuauaaaguaa

SEQ ID NO: 4088541 - RNA, 23 nt, Variola virus
augccuauaaaguaauaaucuuc

SEQ ID NO: 4088542 - RNA, 14 nt, Variola virus
augcgauucaaaaa

SEQ ID NO: 4088543 - RNA, 18 nt, Variola virus
augcgauucaaaaaagaa

SEQ ID NO: 4088544 - RNA, 20 nt, Variola virus
augcggaaccucgagaaugu

SEQ ID NO: 4088545 - RNA, 14 nt, Variola virus
augcguacauaacu

SEQ ID NO: 4088546 - RNA, 18 nt, Variola virus
augcuagugcucaaacaa

SEQ ID NO: 4088547 - RNA, 22 nt, Variola virus
augcuaguuaauaguaaaugaa

SEQ ID NO: 4088548 - RNA, 18 nt, Variola virus
augcuauaccuaauacua

SEQ ID NO: 4088549 - RNA, 17 nt, Variola virus
augcugguuauuacaca

SEQ ID NO: 4088550 - RNA, 14 nt, Variola virus
augcuuaaaaugcu

SEQ ID NO: 4088551 - RNA, 16 nt, Variola virus
auggaaaaauauuaca

SEQ ID NO: 4088552 - RNA, 14 nt, Variola virus
auggaaaucaacau

SEQ ID NO: 4088553 - RNA, 19 nt, Variola virus
auggaaaucaacauaaugu

SEQ ID NO: 4088554 - RNA, 14 nt, Variola virus
auggaagaaacaga

SEQ ID NO: 4088555 - RNA, 15 nt, Variola virus
auggauauauuaaag

SEQ ID NO: 4088556 - RNA, 22 nt, Variola virus
auggauaucuucagggaaaucg

SEQ ID NO: 4088557 - RNA, 20 nt, Variola virus
auggauuuaucauaucaugg

SEQ ID NO: 4088558 - RNA, 15 nt, Variola virus
auggcacgaaauauc

SEQ ID NO: 4088559 - RNA, 14 nt, Variola virus
augguaaaggauaa

SEQ ID NO: 4088560 - RNA, 23 nt, Variola virus
augguaaggucuuagaaauagac

SEQ ID NO: 4088561 - RNA, 21 nt, Variola virus
augguacguaaccgaaucuuc

SEQ ID NO: 4088562 - RNA, 22 nt, Variola virus
auggucagugcauaauaaagua

SEQ ID NO: 4088563 - RNA, 12 nt, Variola virus
auguaaaugaua

SEQ ID NO: 4088564 - RNA, 18 nt, Variola virus
auguaacccgugcauauu

SEQ ID NO: 4088565 - RNA, 23 nt, Variola virus
auguaauaauugcucaaauaaua

SEQ ID NO: 4088566 - RNA, 14 nt, Variola virus
auguaaucauauaa

SEQ ID NO: 4088567 - RNA, 21 nt, Variola virus
auguacaaauucuuggauaua

SEQ ID NO: 4088568 - RNA, 22 nt, Variola virus
auguacguagcguacaaaauua

SEQ ID NO: 4088569 - RNA, 22 nt, Variola virus
auguacuguauauaauaguuuc

SEQ ID NO: 4088570 - RNA, 17 nt, Variola virus
auguaguagaaauaaua

SEQ ID NO: 4088571 - RNA, 15 nt, Variola virus
auguauaacuuuacu

SEQ ID NO: 4088572 - RNA, 19 nt, Variola virus
auguauuacgaagaagaca

SEQ ID NO: 4088573 - RNA, 15 nt, Variola virus
augucaaaaaaagau

SEQ ID NO: 4088574 - RNA, 18 nt, Variola virus
augucaaaaauuguagaa

SEQ ID NO: 4088575 - RNA, 15 nt, Variola virus
augucauauacucaa

SEQ ID NO: 4088576 - RNA, 17 nt, Variola virus
augucaucgaaauggua

SEQ ID NO: 4088577 - RNA, 19 nt, Variola virus
auguccucaaauaaauacu

SEQ ID NO: 4088578 - RNA, 20 nt, Variola virus
auguccucaaauaaauacuc

SEQ ID NO: 4088579 - RNA, 15 nt, Variola virus
augucuccaauuuuu

SEQ ID NO: 4088580 - RNA, 17 nt, Variola virus
augucuggaauaguaaa

SEQ ID NO: 4088581 - RNA, 17 nt, Variola virus
augucugucauauguau

SEQ ID NO: 4088582 - RNA, 12 nt, Variola virus
augugaauguau

SEQ ID NO: 4088583 - RNA, 19 nt, Variola virus
augugagagagaaauacuu

SEQ ID NO: 4088584 - RNA, 19 nt, Variola virus
augugaucuaugacaucau

SEQ ID NO: 4088585 - RNA, 18 nt, Variola virus
aucacuuuuuauacuaau

SEQ ID NO: 4088586 - RNA, 14 nt, Variola virus
aucagauucuauau

SEQ ID NO: 4088587 - RNA, 15 nt, Variola virus
aucagauucuuauau

SEQ ID NO: 4088588 - RNA, 19 nt, Variola virus
aucaggaauguuugcugaa

SEQ ID NO: 4088589 - RNA, 18 nt, Variola virus
aucaggauauaaagaaaa

SEQ ID NO: 4088590 - RNA, 21 nt, Variola virus
aucaguacguucuucauuuau

SEQ ID NO: 4088591 - RNA, 19 nt, Variola virus
aucaguaucuucuuuaucu

SEQ ID NO: 4088592 - RNA, 21 nt, Variola virus
aucagucaccaguuaauauau

SEQ ID NO: 4088593 - RNA, 18 nt, Variola virus
aucauaaauuauuucauu

SEQ ID NO: 4088594 - RNA, 21 nt, Variola virus
aucauacaaugaauuaauuaa

SEQ ID NO: 4088595 - RNA, 17 nt, Variola virus
aucauacauuaugaacu

SEQ ID NO: 4088596 - RNA, 14 nt, Variola virus
aucauauauguauu

SEQ ID NO: 4088597 - RNA, 21 nt, Variola virus
aucauauuccggcguaugaau

SEQ ID NO: 4088598 - RNA, 14 nt, Variola virus
aucaucaaauggau

SEQ ID NO: 4088599 - RNA, 17 nt, Variola virus
aucauccauuaauauaa

SEQ ID NO: 4088600 - RNA, 20 nt, Variola virus
aucaucugugggaaauggaa

SEQ ID NO: 4088601 - RNA, 19 nt, Variola virus
aucauguaaggcauacauu

SEQ ID NO: 4088602 - RNA, 15 nt, Variola virus
aucauguagauaguu

SEQ ID NO: 4088603 - RNA, 17 nt, Variola virus
aucauguguaaaaaguu

SEQ ID NO: 4088604 - RNA, 13 nt, Variola virus
aucauuaaaugau

SEQ ID NO: 4088605 - RNA, 19 nt, Variola virus
auccaaacccuugaucucc

SEQ ID NO: 4088606 - RNA, 15 nt, Variola virus
auccaaauucuggaa

SEQ ID NO: 4088607 - RNA, 21 nt, Variola virus
auccaacuuaacaaaucuuaa

SEQ ID NO: 4088608 - RNA, 21 nt, Variola virus
auccaaguuaaaggauauuau

SEQ ID NO: 4088609 - RNA, 14 nt, Variola virus
auccacaauuauug

SEQ ID NO: 4088610 - RNA, 14 nt, Variola virus
auccacuucuucca

SEQ ID NO: 4088611 - RNA, 17 nt, Variola virus
auccagauaauaaccuc

SEQ ID NO: 4088612 - RNA, 19 nt, Variola virus
auccaugggugacauaauu

SEQ ID NO: 4088613 - RNA, 14 nt, Variola virus
aucccauuguaaag

SEQ ID NO: 4088614 - RNA, 22 nt, Variola virus
auccgugguuagcauauaccuc

SEQ ID NO: 4088615 - RNA, 21 nt, Variola virus
auccguuaguuuaauauccuu

SEQ ID NO: 4088616 - RNA, 19 nt, Variola virus
auccuccggaguauuaaug

SEQ ID NO: 4088617 - RNA, 15 nt, Variola virus
auccugaauaguaaa

SEQ ID NO: 4088618 - RNA, 16 nt, Variola virus
auccuguaauacuuuu

SEQ ID NO: 4088619 - RNA, 19 nt, Variola virus
auccugugcauaaauuaaa

SEQ ID NO: 4088620 - RNA, 15 nt, Variola virus
auccuuaaauguuuu

SEQ ID NO: 4088621 - RNA, 20 nt, Variola virus
auccuuauaaagaaugaaug

SEQ ID NO: 4088622 - RNA, 13 nt, Variola virus
aucgacuauuuua

SEQ ID NO: 4088623 - RNA, 17 nt, Variola virus
aucgacuauuuuaaaua

SEQ ID NO: 4088624 - RNA, 19 nt, Variola virus
aucgacuugggucuucuca

SEQ ID NO: 4088625 - RNA, 16 nt, Variola virus
aucgaguuuaucagag

SEQ ID NO: 4088626 - RNA, 21 nt, Variola virus
aucgauaauuguuucauaugu

SEQ ID NO: 4088627 - RNA, 20 nt, Variola virus
aucgauggagcguaaaagua

SEQ ID NO: 4088628 - RNA, 21 nt, Variola virus
aucgauguuauuaucaaaguc

SEQ ID NO: 4088629 - RNA, 18 nt, Variola virus
aucgauuauauucuaaga

SEQ ID NO: 4088630 - RNA, 23 nt, Variola virus
aucgauuguuuauuguauauacu

SEQ ID NO: 4088631 - RNA, 19 nt, Variola virus
aucggacuuugugcauaug

SEQ ID NO: 4088632 - RNA, 15 nt, Variola virus
aucguacuauauaca

SEQ ID NO: 4088633 - RNA, 15 nt, Variola virus
aucguauaaauacug

SEQ ID NO: 4088634 - RNA, 18 nt, Variola virus
aucguauaaauacugucu

SEQ ID NO: 4088635 - RNA, 23 nt, Variola virus
aucgucaccgaugucaaaaaaag

SEQ ID NO: 4088636 - RNA, 14 nt, Variola virus
aucguuacaaaaga

SEQ ID NO: 4088637 - RNA, 17 nt, Variola virus
aucguuaucauuaauaa

SEQ ID NO: 4088638 - RNA, 12 nt, Variola virus
aucuaaaaaacu

SEQ ID NO: 4088639 - RNA, 13 nt, Variola virus
aucuaauacaaaa

SEQ ID NO: 4088640 - RNA, 13 nt, Variola virus
aucuaauauaauu

SEQ ID NO: 4088641 - RNA, 15 nt, Variola virus
aucuaauauaucacu

SEQ ID NO: 4088642 - RNA, 11 nt, Variola virus
aucuaauuaau

SEQ ID NO: 4088643 - RNA, 15 nt, Variola virus
aucuacaauauauau

SEQ ID NO: 4088644 - RNA, 22 nt, Variola virus
aucuaccucuccaaaaagaaaa

SEQ ID NO: 4088645 - RNA, 18 nt, Variola virus
aucuacucauagaaaggu

SEQ ID NO: 4088646 - RNA, 17 nt, Variola virus
aucuagaaauuacauaa

SEQ ID NO: 4088647 - RNA, 18 nt, Variola virus
aucuagaaauuacauaaa

SEQ ID NO: 4088648 - RNA, 19 nt, Variola virus
aucuagcgucgacaucuau

SEQ ID NO: 4088649 - RNA, 18 nt, Variola virus
aucuaguccuuuaauucc

SEQ ID NO: 4088650 - RNA, 21 nt, Variola virus
aucuauaaaacgauuaaacaa

SEQ ID NO: 4088651 - RNA, 12 nt, Variola virus
aucuauaaaagu

SEQ ID NO: 4088652 - RNA, 21 nt, Variola virus
aucuauaacaugcuaaaccuu

SEQ ID NO: 4088653 - RNA, 21 nt, Variola virus
aucuauaauguuauuaaccuc

SEQ ID NO: 4088654 - RNA, 21 nt, Variola virus
aucuauacgaccgauaagaga

SEQ ID NO: 4088655 - RNA, 22 nt, Variola virus
aucuauauauguauuuuaauaa

SEQ ID NO: 4088656 - RNA, 20 nt, Variola virus
aucuaucagagaccauguau

SEQ ID NO: 4088657 - RNA, 22 nt, Variola virus
aucuaucuuugcauucugaaac

SEQ ID NO: 4088658 - RNA, 19 nt, Variola virus
aucuaugguuuccauaauu

SEQ ID NO: 4088659 - RNA, 17 nt, Variola virus
aucuaugucuuuaucca

SEQ ID NO: 4088660 - RNA, 21 nt, Variola virus
aucuauuaaacagaaauggug

SEQ ID NO: 4088661 - RNA, 18 nt, Variola virus
aucuauuuucuugucaug

SEQ ID NO: 4088662 - RNA, 20 nt, Variola virus
aucucaccugccauaaauaa

SEQ ID NO: 4088663 - RNA, 15 nt, Variola virus
aucucagugcaaaga

SEQ ID NO: 4088664 - RNA, 19 nt, Variola virus
aucucauuaagcuaauaga

SEQ ID NO: 4088665 - RNA, 19 nt, Variola virus
aucuccacuuuugcuuuac

SEQ ID NO: 4088666 - RNA, 14 nt, Variola virus
aucuccaucaaaug

SEQ ID NO: 4088667 - RNA, 15 nt, Variola virus
aucucgccaaaauau

SEQ ID NO: 4088668 - RNA, 14 nt, Variola virus
aucucgucuaaauu

SEQ ID NO: 4088669 - RNA, 15 nt, Variola virus
aucucguuuagaaaa

SEQ ID NO: 4088670 - RNA, 23 nt, Variola virus
aucucuaaauaccucauaaaaca

SEQ ID NO: 4088671 - RNA, 15 nt, Variola virus
aucucuagacaauuu

SEQ ID NO: 4088672 - RNA, 21 nt, Variola virus
aucucugacaccaaccuguau

SEQ ID NO: 4088673 - RNA, 13 nt, Variola virus
auaguaaaguaac

SEQ ID NO: 4088674 - RNA, 19 nt, Variola virus
auaguaacuauguaaauga

SEQ ID NO: 4088675 - RNA, 18 nt, Variola virus
auaguauuaaugauugcc

SEQ ID NO: 4088676 - RNA, 15 nt, Variola virus
auaguauucuuguau

SEQ ID NO: 4088677 - RNA, 13 nt, Variola virus
auagucauagcau

SEQ ID NO: 4088678 - RNA, 14 nt, Variola virus
auaguccagaaaug

SEQ ID NO: 4088679 - RNA, 14 nt, Variola virus
auaguccauagcaa

SEQ ID NO: 4088680 - RNA, 20 nt, Variola virus
auagugacauaaacauagaa

SEQ ID NO: 4088681 - RNA, 14 nt, Variola virus
auagugauaaguaa

SEQ ID NO: 4088682 - RNA, 19 nt, Variola virus
auaguuacagaauuuguau

SEQ ID NO: 4088683 - RNA, 23 nt, Variola virus
auaguuaucuaucuuaaagacua

SEQ ID NO: 4088684 - RNA, 22 nt, Variola virus
auaguuguaauaaaaagggaaa

SEQ ID NO: 4088685 - RNA, 22 nt, Variola virus
auaguuuucucuauucugaaau

SEQ ID NO: 4088686 - RNA, 14 nt, Variola virus
auauaaaaaaauga

SEQ ID NO: 4088687 - RNA, 20 nt, Variola virus
auauaaauccaguaauauca

SEQ ID NO: 4088688 - RNA, 14 nt, Variola virus
auauaauuguugua

SEQ ID NO: 4088689 - RNA, 16 nt, Variola virus
auauacaaaugcaaua

SEQ ID NO: 4088690 - RNA, 15 nt, Variola virus
auauacauuguauaa

SEQ ID NO: 4088691 - RNA, 22 nt, Variola virus
auauacauuuucaaauaauaaa

SEQ ID NO: 4088692 - RNA, 17 nt, Variola virus
auauacguguacuguau

SEQ ID NO: 4088693 - RNA, 11 nt, Variola virus
auauagacaaa

SEQ ID NO: 4088694 - RNA, 21 nt, Variola virus
auauagagaucgaaaaaagag

SEQ ID NO: 4088695 - RNA, 15 nt, Variola virus
auauagaucaaucau

SEQ ID NO: 4088696 - RNA, 14 nt, Variola virus
auauagaugucaau

SEQ ID NO: 4088697 - RNA, 22 nt, Variola virus
auauagcggaugaaaaauuugu

SEQ ID NO: 4088698 - RNA, 15 nt, Variola virus
auauagguuacuaga

SEQ ID NO: 4088699 - RNA, 14 nt, Variola virus
auauaguaccuaga

SEQ ID NO: 4088700 - RNA, 21 nt, Variola virus
auauagucuguguuacauaau

SEQ ID NO: 4088701 - RNA, 18 nt, Variola virus
auauagugaaacaaaaua

SEQ ID NO: 4088702 - RNA, 14 nt, Variola virus
auauaguuaauagu

SEQ ID NO: 4088703 - RNA, 23 nt, Variola virus
auauaguuuuggaucaaauggau

SEQ ID NO: 4088704 - RNA, 21 nt, Variola virus
auauaguuuuuacacauagau

SEQ ID NO: 4088705 - RNA, 13 nt, Variola virus
auauauagaauga

SEQ ID NO: 4088706 - RNA, 20 nt, Variola virus
auauaucaguuaaugcaucu

SEQ ID NO: 4088707 - RNA, 18 nt, Variola virus
auauaucccuuaaaaauu

SEQ ID NO: 4088708 - RNA, 15 nt, Variola virus
auauaugacauaaua

SEQ ID NO: 4088709 - RNA, 17 nt, Variola virus
auauauucgaauucaaa

SEQ ID NO: 4088710 - RNA, 24 nt, Variola virus
auauauucuuacaguacauaguau

SEQ ID NO: 4088711 - RNA, 12 nt, Variola virus
auauauuguuaa

SEQ ID NO: 4088712 - RNA, 23 nt, Variola virus
auauauuuucacuuuaucucauu

SEQ ID NO: 4088713 - RNA, 12 nt, Variola virus
auauauuuucca

SEQ ID NO: 4088714 - RNA, 15 nt, Variola virus
auaucaaauggauau

SEQ ID NO: 4088715 - RNA, 15 nt, Variola virus
auaucacaaaaauaa

SEQ ID NO: 4088716 - RNA, 17 nt, Variola virus
auaucacauuguauaua

SEQ ID NO: 4088717 - RNA, 17 nt, Variola virus
auaucagacgauccaca

SEQ ID NO: 4088718 - RNA, 14 nt, Variola virus
auaucaggaaaugu

SEQ ID NO: 4088719 - RNA, 11 nt, Variola virus
auaucauauau

SEQ ID NO: 4088720 - RNA, 12 nt, Variola virus
auaucauauucu

SEQ ID NO: 4088721 - RNA, 23 nt, Variola virus
auaucaucacaacuuaaugaaga

SEQ ID NO: 4088722 - RNA, 20 nt, Variola virus
auaucauuaggauuuaacuc

SEQ ID NO: 4088723 - RNA, 22 nt, Variola virus
auauccgguguuaaaaaaauua

SEQ ID NO: 4088724 - RNA, 19 nt, Variola virus
auauccguuaaguuuguau

SEQ ID NO: 4088725 - RNA, 17 nt, Variola virus
auauccguuaugucuuc

SEQ ID NO: 4088726 - RNA, 16 nt, Variola virus
auaucgauguuaauaa

SEQ ID NO: 4088727 - RNA, 17 nt, Variola virus
auaucggaauaaguaga

SEQ ID NO: 4088728 - RNA, 21 nt, Variola virus
auaucgguaccguuaaagaug

SEQ ID NO: 4088729 - RNA, 19 nt, Variola virus
auaucuacaaauuggagau

SEQ ID NO: 4088730 - RNA, 16 nt, Variola virus
auaucuauaugagaug

SEQ ID NO: 4088731 - RNA, 16 nt, Variola virus
auaucuauucagauac

SEQ ID NO: 4088732 - RNA, 12 nt, Variola virus
auaucugaugau

SEQ ID NO: 4088733 - RNA, 22 nt, Variola virus
auaucugauuuuucuucauuua

SEQ ID NO: 4088734 - RNA, 18 nt, Variola virus
auaucuuaaucauauucu

SEQ ID NO: 4088735 - RNA, 17 nt, Variola virus
auaucuuagaauauugu

SEQ ID NO: 4088736 - RNA, 19 nt, Variola virus
auaucuuuagauauaucca

SEQ ID NO: 4088737 - RNA, 15 nt, Variola virus
auaucuuuaugaauu

SEQ ID NO: 4088738 - RNA, 12 nt, Variola virus
auaugacauaau

SEQ ID NO: 4088739 - RNA, 12 nt, Variola virus
auaugacaugau

SEQ ID NO: 4088740 - RNA, 15 nt, Variola virus
auaugacuaacuuau

SEQ ID NO: 4088741 - RNA, 18 nt, Variola virus
auaugauucuaaccuaga

SEQ ID NO: 4088742 - RNA, 17 nt, Variola virus
auaugcuaguuaauagu

SEQ ID NO: 4088743 - RNA, 22 nt, Variola virus
auauggaaaaguucaacaugau

SEQ ID NO: 4088744 - RNA, 18 nt, Variola virus
auauggauauucauagau

SEQ ID NO: 4088745 - RNA, 18 nt, Variola virus
auauguaaauauuaauaa

SEQ ID NO: 4088746 - RNA, 17 nt, Variola virus
auaugucuguacaaaug

SEQ ID NO: 4088747 - RNA, 15 nt, Variola virus
auauguuauaauaga

SEQ ID NO: 4088748 - RNA, 17 nt, Variola virus
auauuaaacacuaguau

SEQ ID NO: 4088749 - RNA, 17 nt, Variola virus
auauuaaagucaaauaa

SEQ ID NO: 4088750 - RNA, 18 nt, Variola virus
auauuaaugacgaauuga

SEQ ID NO: 4088751 - RNA, 21 nt, Variola virus
auauuaggcacagucaaacau

SEQ ID NO: 4088752 - RNA, 12 nt, Variola virus
auauuauacaaa

SEQ ID NO: 4088753 - RNA, 15 nt, Variola virus
auauuauauaaacau

SEQ ID NO: 4088754 - RNA, 18 nt, Variola virus
auauuaucaccuauugcc

SEQ ID NO: 4088755 - RNA, 20 nt, Variola virus
auauucaguaaccaaauaca

SEQ ID NO: 4088756 - RNA, 15 nt, Variola virus
auauucccaaacaua

SEQ ID NO: 4088757 - RNA, 18 nt, Variola virus
auauucgauaacagcauu

SEQ ID NO: 4088758 - RNA, 18 nt, Variola virus
auauucguucaauacaaa

SEQ ID NO: 4088759 - RNA, 23 nt, Variola virus
auauucuauaacuugagacuuga

SEQ ID NO: 4088760 - RNA, 13 nt, Variola virus
auauucuaugaug

SEQ ID NO: 4088761 - RNA, 16 nt, Variola virus
auauucucauggaaau

SEQ ID NO: 4088762 - RNA, 14 nt, Variola virus
auauucuguugugu

SEQ ID NO: 4088763 - RNA, 16 nt, Variola virus
auauucuguuguguca

SEQ ID NO: 4088764 - RNA, 14 nt, Variola virus
auauucuuucuugu

SEQ ID NO: 4088765 - RNA, 20 nt, Variola virus
auauugauaucuuuuugaau

SEQ ID NO: 4088766 - RNA, 19 nt, Variola virus
auauuggagcaaaauccua

SEQ ID NO: 4088767 - RNA, 19 nt, Variola virus
acauugcuaugugaugaau

SEQ ID NO: 4088768 - RNA, 23 nt, Variola virus
acauuggcgccguuuaauuuccu

SEQ ID NO: 4088769 - RNA, 16 nt, Variola virus
acauuguauuaugaug

SEQ ID NO: 4088770 - RNA, 15 nt, Variola virus
acauuuccuacauau

SEQ ID NO: 4088771 - RNA, 16 nt, Variola virus
acauuuuuuguuuugg

SEQ ID NO: 4088772 - RNA, 15 nt, Variola virus
accaaaaaaaauaac

SEQ ID NO: 4088773 - RNA, 18 nt, Variola virus
accaaaaucaauauauca

SEQ ID NO: 4088774 - RNA, 13 nt, Variola virus
accaaacauucuu

SEQ ID NO: 4088775 - RNA, 13 nt, Variola virus
accaaauuuuaca

SEQ ID NO: 4088776 - RNA, 17 nt, Variola virus
accaagaaaucguauau

SEQ ID NO: 4088777 - RNA, 20 nt, Variola virus
accaaguaaugaucaucuau

SEQ ID NO: 4088778 - RNA, 14 nt, Variola virus
accaauaaacuauu

SEQ ID NO: 4088779 - RNA, 23 nt, Variola virus
accaccuauagauuuugaauauu

SEQ ID NO: 4088780 - RNA, 13 nt, Variola virus
accacuagcaaaa

SEQ ID NO: 4088781 - RNA, 18 nt, Variola virus
accacuuauuacuccauu

SEQ ID NO: 4088782 - RNA, 15 nt, Variola virus
accagaugucauuau

SEQ ID NO: 4088783 - RNA, 17 nt, Variola virus
accaggguuuauuucau

SEQ ID NO: 4088784 - RNA, 22 nt, Variola virus
accaguucauucaagauaagca

SEQ ID NO: 4088785 - RNA, 16 nt, Variola virus
accauagaagauguua

SEQ ID NO: 4088786 - RNA, 21 nt, Variola virus
accaucucauaaaauaguucu

SEQ ID NO: 4088787 - RNA, 13 nt, Variola virus
accaugaaauaua

SEQ ID NO: 4088788 - RNA, 19 nt, Variola virus
accaugucguuaacuauaa

SEQ ID NO: 4088789 - RNA, 17 nt, Variola virus
acccaacaauacauuua

SEQ ID NO: 4088790 - RNA, 15 nt, Variola virus
acccaagaacaaugu

SEQ ID NO: 4088791 - RNA, 15 nt, Variola virus
acccaguuaguuuua

SEQ ID NO: 4088792 - RNA, 17 nt, Variola virus
acccguaguuuuaacug

SEQ ID NO: 4088793 - RNA, 15 nt, Variola virus
accgaaauuaucacu

SEQ ID NO: 4088794 - RNA, 14 nt, Variola virus
accuaagggauuuu

SEQ ID NO: 4088795 - RNA, 21 nt, Variola virus
accuagaaucgauaaaaccau

SEQ ID NO: 4088796 - RNA, 14 nt, Variola virus
accucuacaaauau

SEQ ID NO: 4088797 - RNA, 18 nt, Variola virus
accucuccuauaugaaua

SEQ ID NO: 4088798 - RNA, 16 nt, Variola virus
accuguauuauuugcg

SEQ ID NO: 4088799 - RNA, 23 nt, Variola virus
accuucuaaugauauauuuucca

SEQ ID NO: 4088800 - RNA, 15 nt, Variola virus
acgaaccaaaaugaa

SEQ ID NO: 4088801 - RNA, 21 nt, Variola virus
acgaaccagaaagugcaaaug

SEQ ID NO: 4088802 - RNA, 13 nt, Variola virus
acgaauaaaagaa

SEQ ID NO: 4088803 - RNA, 12 nt, Variola virus
acgaauaaagcg

SEQ ID NO: 4088804 - RNA, 23 nt, Variola virus
acgaauauaaaucauauuuagaa

SEQ ID NO: 4088805 - RNA, 15 nt, Variola virus
acgaaugguuucauc

SEQ ID NO: 4088806 - RNA, 16 nt, Variola virus
acgacucacaauagaa

SEQ ID NO: 4088807 - RNA, 19 nt, Variola virus
acgacucauuuaguuuauu

SEQ ID NO: 4088808 - RNA, 16 nt, Variola virus
acgacuuauaauuaau

SEQ ID NO: 4088809 - RNA, 22 nt, Variola virus
acgacuuucucgcgucauauau

SEQ ID NO: 4088810 - RNA, 18 nt, Variola virus
acgagccacuacuccucg

SEQ ID NO: 4088811 - RNA, 16 nt, Variola virus
acgaguauagcaucau

SEQ ID NO: 4088812 - RNA, 21 nt, Variola virus
acgauaaugugguuacucuuc

SEQ ID NO: 4088813 - RNA, 15 nt, Variola virus
acgauacaucuguuu

SEQ ID NO: 4088814 - RNA, 14 nt, Variola virus
acgauauuagaauu

SEQ ID NO: 4088815 - RNA, 21 nt, Variola virus
acgauauuaucgacuaugaau

SEQ ID NO: 4088816 - RNA, 20 nt, Variola virus
acgauccaaacaauguuucu

SEQ ID NO: 4088817 - RNA, 22 nt, Variola virus
acgaucgauacuuugguuuauu

SEQ ID NO: 4088818 - RNA, 21 nt, Variola virus
acgaugauauuaaaauuauuu

SEQ ID NO: 4088819 - RNA, 15 nt, Variola virus
acgaugauuucugaa

SEQ ID NO: 4088820 - RNA, 21 nt, Variola virus
acgaugguuaaaauuaacaag

SEQ ID NO: 4088821 - RNA, 18 nt, Variola virus
acgauuaucuauuaaaga

SEQ ID NO: 4088822 - RNA, 21 nt, Variola virus
acgauuauuucuaaauuauuc

SEQ ID NO: 4088823 - RNA, 15 nt, Variola virus
acgcaauaucucaau

SEQ ID NO: 4088824 - RNA, 14 nt, Variola virus
acgcauccauccaa

SEQ ID NO: 4088825 - RNA, 17 nt, Variola virus
acgcaucuguaaaagaa

SEQ ID NO: 4088826 - RNA, 17 nt, Variola virus
acgccaauacauguuuu

SEQ ID NO: 4088827 - RNA, 14 nt, Variola virus
acgcgaaaaaagau

SEQ ID NO: 4088828 - RNA, 14 nt, Variola virus
acgcguauauguuu

SEQ ID NO: 4088829 - RNA, 15 nt, Variola virus
acggaaguaaacgaa

SEQ ID NO: 4088830 - RNA, 16 nt, Variola virus
acggacaaucuaaaaa

SEQ ID NO: 4088831 - RNA, 13 nt, Variola virus
acggauauggaug

SEQ ID NO: 4088832 - RNA, 16 nt, Variola virus
acggcaaaagauauau

SEQ ID NO: 4088833 - RNA, 14 nt, Variola virus
acggcgucauauag

SEQ ID NO: 4088834 - RNA, 18 nt, Variola virus
acgggcgcuguaauuaau

SEQ ID NO: 4088835 - RNA, 22 nt, Variola virus
acguaaaugugugcgaaaauac

SEQ ID NO: 4088836 - RNA, 18 nt, Variola virus
acguaaugaaguuaauga

SEQ ID NO: 4088837 - RNA, 15 nt, Variola virus
acguagaaaauggau

SEQ ID NO: 4088838 - RNA, 15 nt, Variola virus
acgucaucaaaaaua

SEQ ID NO: 4088839 - RNA, 16 nt, Variola virus
acgucaucaaaaauag

SEQ ID NO: 4088840 - RNA, 13 nt, Variola virus
acguuaaacauua

SEQ ID NO: 4088841 - RNA, 13 nt, Variola virus
acguuaauacaaa

SEQ ID NO: 4088842 - RNA, 18 nt, Variola virus
acguuguacguuaaagca

SEQ ID NO: 4088843 - RNA, 22 nt, Variola virus
acguuugguaauggcaauguau

SEQ ID NO: 4088844 - RNA, 18 nt, Variola virus
acuaaaaaacgaaauaua

SEQ ID NO: 4088845 - RNA, 22 nt, Variola virus
acuaaacuaugcgaugucuugg

SEQ ID NO: 4088846 - RNA, 16 nt, Variola virus
acuaaagaaacgaaua

SEQ ID NO: 4088847 - RNA, 13 nt, Variola virus
acuaaauacauua

SEQ ID NO: 4088848 - RNA, 15 nt, Variola virus
acuaacacauuucaa

SEQ ID NO: 4088849 - RNA, 16 nt, Variola virus
acuaacuaauguuucu

SEQ ID NO: 4088850 - RNA, 17 nt, Variola virus
acuaaguucugcauuca

SEQ ID NO: 4088851 - RNA, 14 nt, Variola virus
acuaauaaacauuc

SEQ ID NO: 4088852 - RNA, 17 nt, Variola virus
acuaauucauuuucaau

SEQ ID NO: 4088853 - RNA, 14 nt, Variola virus
acuacaauauuuca

SEQ ID NO: 4088854 - RNA, 18 nt, Variola virus
acuacaauauuucaucau

SEQ ID NO: 4088855 - RNA, 22 nt, Variola virus
acuacauaguuaucuaucuuaa

SEQ ID NO: 4088856 - RNA, 11 nt, Variola virus
acuacauaucc

SEQ ID NO: 4088857 - RNA, 16 nt, Variola virus
acuaccgaguuuaaaa

SEQ ID NO: 4088858 - RNA, 17 nt, Variola virus
acuacguucauauucca

SEQ ID NO: 4088859 - RNA, 16 nt, Variola virus
acuacugaagaacuaa

SEQ ID NO: 4088860 - RNA, 18 nt, Variola virus
acuacugccauuaauauc

SEQ ID NO: 4088861 - RNA, 20 nt, Variola virus
acuacuuuaucauagucuaa

SEQ ID NO: 4088862 - RNA, 23 nt, Variola virus
acuagauaaacuaucaguaaguu

SEQ ID NO: 4088863 - RNA, 16 nt, Variola virus
acuagauuauacaaug

SEQ ID NO: 4088864 - RNA, 21 nt, Variola virus
acuaguauaaaaucuguaucg

SEQ ID NO: 4088865 - RNA, 20 nt, Variola virus
acuaguggcagacugugcau

SEQ ID NO: 4088866 - RNA, 16 nt, Variola virus
acuauaaaauaaaaga

SEQ ID NO: 4088867 - RNA, 18 nt, Variola virus
acuauaaacuaaaaauua

SEQ ID NO: 4088868 - RNA, 22 nt, Variola virus
acuauaggugucccgucaguau

SEQ ID NO: 4088869 - RNA, 14 nt, Variola virus
acuaugcacauuau

SEQ ID NO: 4088870 - RNA, 16 nt, Variola virus
acuaugucaaaaauug

SEQ ID NO: 4088871 - RNA, 14 nt, Variola virus
acuauguuagcauu

SEQ ID NO: 4088872 - RNA, 19 nt, Variola virus
acuauguuagcauuucuau

SEQ ID NO: 4088873 - RNA, 19 nt, Variola virus
acuauuagaauuaaguaga

SEQ ID NO: 4088874 - RNA, 16 nt, Variola virus
acuauuauuuguuaua

SEQ ID NO: 4088875 - RNA, 22 nt, Variola virus
acuauuccuagcaucagcaaaa

SEQ ID NO: 4088876 - RNA, 20 nt, Variola virus
acuauugaaguacuuaauga

SEQ ID NO: 4088877 - RNA, 22 nt, Variola virus
acuauugaaguacuuaaugaag

SEQ ID NO: 4088878 - RNA, 19 nt, Variola virus
acuauugcaucaaaaggau

SEQ ID NO: 4088879 - RNA, 15 nt, Variola virus
acuauuuuauaccuu

SEQ ID NO: 4088880 - RNA, 16 nt, Variola virus
acucaauuauacucua

SEQ ID NO: 4088881 - RNA, 14 nt, Variola virus
acucacguuaauaa

SEQ ID NO: 4088882 - RNA, 14 nt, Variola virus
acucagaagacuau

SEQ ID NO: 4088883 - RNA, 17 nt, Variola virus
acucauaaauaaaaaug

SEQ ID NO: 4088884 - RNA, 18 nt, Variola virus
acucauaagaaagagaau

SEQ ID NO: 4088885 - RNA, 18 nt, Variola virus
acucauauaguauugaac

SEQ ID NO: 4088886 - RNA, 10 nt, Variola virus
aaaaaacaac

SEQ ID NO: 4088887 - RNA, 12 nt, Variola virus
aaaaaagaauca

SEQ ID NO: 4088888 - RNA, 11 nt, Variola virus
aaaaaaugauc

SEQ ID NO: 4088889 - RNA, 18 nt, Variola virus
aaaaaauuacuccaugga

SEQ ID NO: 4088890 - RNA, 19 nt, Variola virus
aaaaacaucacgaaaucua

SEQ ID NO: 4088891 - RNA, 14 nt, Variola virus
aaaaacgaugauau

SEQ ID NO: 4088892 - RNA, 16 nt, Variola virus
aaaaagaaagaauaua

SEQ ID NO: 4088893 - RNA, 15 nt, Variola virus
aaaaagaauguauca

SEQ ID NO: 4088894 - RNA, 13 nt, Variola virus
aaaaagauguauu

SEQ ID NO: 4088895 - RNA, 19 nt, Variola virus
aaaaagauuucagaaucua

SEQ ID NO: 4088896 - RNA, 19 nt, Variola virus
aaaaagcuccauauuacaa

SEQ ID NO: 4088897 - RNA, 16 nt, Variola virus
aaaaaguuaagaauua

SEQ ID NO: 4088898 - RNA, 13 nt, Variola virus
aaaaauaacaauu

SEQ ID NO: 4088899 - RNA, 15 nt, Variola virus
aaaaaucgauuuuau

SEQ ID NO: 4088900 - RNA, 12 nt, Variola virus
aaaaaucucacc

SEQ ID NO: 4088901 - RNA, 21 nt, Variola virus
aaaaaucugauagaaagaaua

SEQ ID NO: 4088902 - RNA, 17 nt, Variola virus
aaaaaugaaaauaaaua

SEQ ID NO: 4088903 - RNA, 14 nt, Variola virus
aaaaaugaugaauu

SEQ ID NO: 4088904 - RNA, 19 nt, Variola virus
agcgcugaaaauaaagaua

SEQ ID NO: 4088905 - RNA, 19 nt, Variola virus
agcggauaaugauagaauu

SEQ ID NO: 4088906 - RNA, 14 nt, Variola virus
agcgguguuauuau

SEQ ID NO: 4088907 - RNA, 18 nt, Variola virus
agcuaaaauauuuucuag

SEQ ID NO: 4088908 - RNA, 15 nt, Variola virus
agcuaauaccaauuu

SEQ ID NO: 4088909 - RNA, 17 nt, Variola virus
agcuaucaagucuuuau

SEQ ID NO: 4088910 - RNA, 14 nt, Variola virus
agcuaugaacuugu

SEQ ID NO: 4088911 - RNA, 17 nt, Variola virus
agcuauguuuacggcug

SEQ ID NO: 4088912 - RNA, 19 nt, Variola virus
agcuauugcauaauacaag

SEQ ID NO: 4088913 - RNA, 23 nt, Variola virus
agcuccuaauggagauuuucuau

SEQ ID NO: 4088914 - RNA, 16 nt, Variola virus
agcugaaaaacuaugu

SEQ ID NO: 4088915 - RNA, 21 nt, Variola virus
agcugaggguguuaaaaauga

SEQ ID NO: 4088916 - RNA, 19 nt, Variola virus
agcugauagcaauucaugu

SEQ ID NO: 4088917 - RNA, 14 nt, Variola virus
agcugcaucuaaau

SEQ ID NO: 4088918 - RNA, 20 nt, Variola virus
agcuggaaaaaguuguucca

SEQ ID NO: 4088919 - RNA, 18 nt, Variola virus
agcuguacaccauagcac

SEQ ID NO: 4088920 - RNA, 19 nt, Variola virus
agcugugaguauuaaugau

SEQ ID NO: 4088921 - RNA, 15 nt, Variola virus
agcuucguauacucu

SEQ ID NO: 4088922 - RNA, 12 nt, Variola virus
aggaaauacuug

SEQ ID NO: 4088923 - RNA, 14 nt, Variola virus
aggaacauacgaca

SEQ ID NO: 4088924 - RNA, 14 nt, Variola virus
aggaagaaaauauu

SEQ ID NO: 4088925 - RNA, 14 nt, Variola virus
aggaagcauauucu

SEQ ID NO: 4088926 - RNA, 20 nt, Variola virus
aggaauagaaaucuugaaua

SEQ ID NO: 4088927 - RNA, 13 nt, Variola virus
aggaauaugguuu

SEQ ID NO: 4088928 - RNA, 20 nt, Variola virus
aggaauuaaucuaguagaaa

SEQ ID NO: 4088929 - RNA, 19 nt, Variola virus
aggacauguaaacuugaca

SEQ ID NO: 4088930 - RNA, 13 nt, Variola virus
aggacuauuagaa

SEQ ID NO: 4088931 - RNA, 22 nt, Variola virus
aggagaugauagcuauuuaacu

SEQ ID NO: 4088932 - RNA, 13 nt, Variola virus
aggaguauacaga

SEQ ID NO: 4088933 - RNA, 21 nt, Variola virus
aggaguucaguuuuauaugau

SEQ ID NO: 4088934 - RNA, 14 nt, Variola virus
aggauaaauuauuu

SEQ ID NO: 4088935 - RNA, 12 nt, Variola virus
aggauaauacau

SEQ ID NO: 4088936 - RNA, 21 nt, Variola virus
aggauauacucaauagaauuu

SEQ ID NO: 4088937 - RNA, 19 nt, Variola virus
aggauaugauaaaaauaua

SEQ ID NO: 4088938 - RNA, 16 nt, Variola virus
aggauccauuuauagu

SEQ ID NO: 4088939 - RNA, 15 nt, Variola virus
aggaucgacuccaua

SEQ ID NO: 4088940 - RNA, 14 nt, Variola virus
aggaucuccaucaa

SEQ ID NO: 4088941 - RNA, 21 nt, Variola virus
aggaugaauuaucguuauuau

SEQ ID NO: 4088942 - RNA, 18 nt, Variola virus
aggauggaaagauaucag

SEQ ID NO: 4088943 - RNA, 19 nt, Variola virus
aggauggaauuaucaucaa

SEQ ID NO: 4088944 - RNA, 19 nt, Variola virus
aggauguauauaucaugau

SEQ ID NO: 4088945 - RNA, 18 nt, Variola virus
aggauguuauuaugaauc

SEQ ID NO: 4088946 - RNA, 19 nt, Variola virus
aggauuaacggguucucaa

SEQ ID NO: 4088947 - RNA, 19 nt, Variola virus
aggauuauaugauauaauu

SEQ ID NO: 4088948 - RNA, 18 nt, Variola virus
aggauucuccuaaauacg

SEQ ID NO: 4088949 - RNA, 12 nt, Variola virus
aggauucuuaau

SEQ ID NO: 4088950 - RNA, 17 nt, Variola virus
aggauuguauaaauuac

SEQ ID NO: 4088951 - RNA, 20 nt, Variola virus
aggauuuacuaaguaauuac

SEQ ID NO: 4088952 - RNA, 16 nt, Variola virus
aggcuacacaauagua

SEQ ID NO: 4088953 - RNA, 19 nt, Variola virus
aggcuuuaauaucuaaaua

SEQ ID NO: 4088954 - RNA, 14 nt, Variola virus
agggguauacuucu

SEQ ID NO: 4088955 - RNA, 19 nt, Variola virus
aggguauuggauauaucaa

SEQ ID NO: 4088956 - RNA, 20 nt, Variola virus
agguaauguauauuuaucca

SEQ ID NO: 4088957 - RNA, 13 nt, Variola virus
agguagcaaaaaa

SEQ ID NO: 4088958 - RNA, 16 nt, Variola virus
agguaguaaaaaauaa

SEQ ID NO: 4088959 - RNA, 14 nt, Variola virus
aggugaacaagaga

SEQ ID NO: 4088960 - RNA, 16 nt, Variola virus
aggugcaacaauuuuu

SEQ ID NO: 4088961 - RNA, 16 nt, Variola virus
aggugcugauguaaau

SEQ ID NO: 4088962 - RNA, 17 nt, Variola virus
agguguguuuuuuacca

SEQ ID NO: 4088963 - RNA, 21 nt, Variola virus
agguuacguauagucuauaug

SEQ ID NO: 4088964 - RNA, 20 nt, Variola virus
aguaaacauaucauaauauu

SEQ ID NO: 4088965 - RNA, 14 nt, Variola virus
aguaaaugcauaua

SEQ ID NO: 4088966 - RNA, 19 nt, Variola virus
aguaacuauugacuuaaua

SEQ ID NO: 4088967 - RNA, 14 nt, Variola virus
aguaagaacauaau

SEQ ID NO: 4088968 - RNA, 15 nt, Variola virus
aguaaguaugucgaa

SEQ ID NO: 4088969 - RNA, 13 nt, Variola virus
aguaaucaugaaa

SEQ ID NO: 4088970 - RNA, 18 nt, Variola virus
aguaaucauguaaauguu

SEQ ID NO: 4088971 - RNA, 16 nt, Variola virus
aguaaugaucaucuau

SEQ ID NO: 4088972 - RNA, 17 nt, Variola virus
aguaauuuguucaaaau

SEQ ID NO: 4088973 - RNA, 17 nt, Variola virus
aguacccuacuaccaac

SEQ ID NO: 4088974 - RNA, 17 nt, Variola virus
aguaccgauucuagaua

SEQ ID NO: 4088975 - RNA, 21 nt, Variola virus
aguacugcuuuuuucgaaaug

SEQ ID NO: 4088976 - RNA, 22 nt, Variola virus
aguacuucucccauaauacuuu

SEQ ID NO: 4088977 - RNA, 21 nt, Variola virus
aguacuuugaugauuuuucca

SEQ ID NO: 4088978 - RNA, 19 nt, Variola virus
aguagauaauauagaaaau

SEQ ID NO: 4088979 - RNA, 14 nt, Variola virus
aguagguuuaagaa

SEQ ID NO: 4088980 - RNA, 18 nt, Variola virus
aguagguuuaagaaguug

SEQ ID NO: 4088981 - RNA, 18 nt, Variola virus
aguagugauuuugaagau

SEQ ID NO: 4088982 - RNA, 15 nt, Variola virus
aguaguucaacauaa

SEQ ID NO: 4088983 - RNA, 13 nt, Variola virus
aguauaaaaauua

SEQ ID NO: 4088984 - RNA, 17 nt, Variola virus
aguauaaacgacauaau

SEQ ID NO: 4088985 - RNA, 22 nt, Variola virus
aguauaaacgacauaauacuca

SEQ ID NO: 4088986 - RNA, 14 nt, Variola virus
aguauaaacuauaa

SEQ ID NO: 4088987 - RNA, 19 nt, Variola virus
aguauaaaguccaacuauu

SEQ ID NO: 4088988 - RNA, 18 nt, Variola virus
aguauaagaaauuuacca

SEQ ID NO: 4088989 - RNA, 14 nt, Variola virus
aguauaaugauauc

SEQ ID NO: 4088990 - RNA, 16 nt, Variola virus
aguauaccaacuauau

SEQ ID NO: 4088991 - RNA, 22 nt, Variola virus
aguauaccaugaccuucuucau

SEQ ID NO: 4088992 - RNA, 18 nt, Variola virus
aguauacuaucgucauuu

SEQ ID NO: 4088993 - RNA, 12 nt, Variola virus
aguauacucuac

SEQ ID NO: 4088994 - RNA, 19 nt, Variola virus
aguauaucuacacauauau

SEQ ID NO: 4088995 - RNA, 18 nt, Variola virus
aguauauggacaaacgug

SEQ ID NO: 4088996 - RNA, 19 nt, Variola virus
aguauaugggcgauauucu

SEQ ID NO: 4088997 - RNA, 16 nt, Variola virus
aguaucaauaacacaa

SEQ ID NO: 4088998 - RNA, 16 nt, Variola virus
aguauccaucacuucu

SEQ ID NO: 4088999 - RNA, 18 nt, Variola virus
aguaucgcccuaauauua

SEQ ID NO: 4089000 - RNA, 14 nt, Variola virus
aguaucuaauggau

SEQ ID NO: 4089001 - RNA, 17 nt, Variola virus
aguaugaagaaaaaugu

SEQ ID NO: 4089002 - RNA, 19 nt, Variola virus
aguaugacguugaacuaau

SEQ ID NO: 4089003 - RNA, 18 nt, Variola virus
aguaugcagacaaaauga

SEQ ID NO: 4089004 - RNA, 17 nt, Variola virus
aguaugcuaaacuuuau

SEQ ID NO: 4089005 - RNA, 17 nt, Variola virus
aguauguauaucuauau

SEQ ID NO: 4089006 - RNA, 14 nt, Variola virus
aguaugugaauaga

SEQ ID NO: 4089007 - RNA, 12 nt, Variola virus
aguauuaaugau

SEQ ID NO: 4089008 - RNA, 20 nt, Variola virus
aguauugucaucaucaugau

SEQ ID NO: 4089009 - RNA, 15 nt, Variola virus
aguauuguuuaauaa

SEQ ID NO: 4089010 - RNA, 18 nt, Variola virus
aguauuguuuaguauuuu

SEQ ID NO: 4089011 - RNA, 22 nt, Variola virus
aguauuucuguggauuaauaga

SEQ ID NO: 4089012 - RNA, 20 nt, Variola virus
aguauuugagaaauauguau

SEQ ID NO: 4089013 - RNA, 16 nt, Variola virus
aguauuugauaaaaca

SEQ ID NO: 4089014 - RNA, 19 nt, Variola virus
aguauuuuucaaaaaaugu

SEQ ID NO: 4089015 - RNA, 17 nt, Variola virus
aguauuuuuuuucagua

SEQ ID NO: 4089016 - RNA, 15 nt, Variola virus
agucaaacauucaac

SEQ ID NO: 4089017 - RNA, 22 nt, Variola virus
agucaaauaaagcgaaaaauaa

SEQ ID NO: 4089018 - RNA, 16 nt, Variola virus
agucaaccaaauaaua

SEQ ID NO: 4089019 - RNA, 21 nt, Variola virus
agucacgauaucucuuaaaug

SEQ ID NO: 4089020 - RNA, 19 nt, Variola virus
agucagacuuguauucaac

SEQ ID NO: 4089021 - RNA, 20 nt, Variola virus
agucagcaucagcauuugac

SEQ ID NO: 4089022 - RNA, 16 nt, Variola virus
agucauaacaaaugua

SEQ ID NO: 4089023 - RNA, 16 nt, Variola virus
agucauaucuagaaug

SEQ ID NO: 4089024 - RNA, 17 nt, Variola virus
agucauguuaaaaauga

SEQ ID NO: 4089025 - RNA, 23 nt, Variola virus
agucauuugacuagauaaacuau

SEQ ID NO: 4089026 - RNA, 13 nt, Variola virus
agucgucaagcau

SEQ ID NO: 4089027 - RNA, 17 nt, Variola virus
agucuacugcuagaaaa

SEQ ID NO: 4089028 - RNA, 16 nt, Variola virus
agucuagguucacaau

SEQ ID NO: 4089029 - RNA, 22 nt, Variola virus
agucuauugccuuagauacuuu

SEQ ID NO: 4089030 - RNA, 17 nt, Variola virus
aucacauauuaaaauuc

SEQ ID NO: 4089031 - RNA, 18 nt, Variola virus
aucacuaucucccaggag

SEQ ID NO: 4089032 - RNA, 15 nt, Variola virus
aucacucuucgaaaa

SEQ ID NO: 4089033 - RNA, 18 nt, Variola virus
aucagaauaaaucaauau

SEQ ID NO: 4089034 - RNA, 17 nt, Variola virus
aucagaugauaucagua

SEQ ID NO: 4089035 - RNA, 15 nt, Variola virus
aucagauuauuuaac

SEQ ID NO: 4089036 - RNA, 18 nt, Variola virus
aucagauuauuuaacaau

SEQ ID NO: 4089037 - RNA, 20 nt, Variola virus
aucagcaucuugaauagaaa

SEQ ID NO: 4089038 - RNA, 16 nt, Variola virus
aucagcugaaaaacua

SEQ ID NO: 4089039 - RNA, 17 nt, Variola virus
aucaggaauccaaagag

SEQ ID NO: 4089040 - RNA, 15 nt, Variola virus
aucagguaaaacaau

SEQ ID NO: 4089041 - RNA, 19 nt, Variola virus
aucagucaagauacagaaa

SEQ ID NO: 4089042 - RNA, 14 nt, Variola virus
aucauaaagaacag

SEQ ID NO: 4089043 - RNA, 14 nt, Variola virus
aucauaaguuuaua

SEQ ID NO: 4089044 - RNA, 14 nt, Variola virus
aucauaccuccauc

SEQ ID NO: 4089045 - RNA, 14 nt, Variola virus
aucauauaucugaa

SEQ ID NO: 4089046 - RNA, 18 nt, Variola virus
aucauaucuucgaaaguu

SEQ ID NO: 4089047 - RNA, 19 nt, Variola virus
aucauauguagugguguaa

SEQ ID NO: 4089048 - RNA, 19 nt, Variola virus
aucauauuauaaagaugau

SEQ ID NO: 4089049 - RNA, 22 nt, Variola virus
aucauauuccggcguaugaauu

SEQ ID NO: 4089050 - RNA, 17 nt, Variola virus
aucaucaccuaucuugu

SEQ ID NO: 4089051 - RNA, 15 nt, Variola virus
aucaucaucugaaau

SEQ ID NO: 4089052 - RNA, 15 nt, Variola virus
aucauccguaucuuc

SEQ ID NO: 4089053 - RNA, 16 nt, Variola virus
aucauccguaucuucu

SEQ ID NO: 4089054 - RNA, 15 nt, Variola virus
aucaucuacaucacu

SEQ ID NO: 4089055 - RNA, 20 nt, Variola virus
aucaucuauagaucauguaa

SEQ ID NO: 4089056 - RNA, 13 nt, Variola virus
aucaucuuuauca

SEQ ID NO: 4089057 - RNA, 15 nt, Variola virus
aucaucuuuaucauu

SEQ ID NO: 4089058 - RNA, 15 nt, Variola virus
aucaugaauggauuu

SEQ ID NO: 4089059 - RNA, 21 nt, Variola virus
aucaugaauggauuuaucauc

SEQ ID NO: 4089060 - RNA, 13 nt, Variola virus
aucaugaugauuu

SEQ ID NO: 4089061 - RNA, 18 nt, Variola virus
aucaugcagagaaaaguu

SEQ ID NO: 4089062 - RNA, 20 nt, Variola virus
aucauggauuuuacauagau

SEQ ID NO: 4089063 - RNA, 17 nt, Variola virus
aucauguagaaaaauuc

SEQ ID NO: 4089064 - RNA, 15 nt, Variola virus
aucaugucacauagu

SEQ ID NO: 4089065 - RNA, 11 nt, Variola virus
aucaugucuaa

SEQ ID NO: 4089066 - RNA, 18 nt, Variola virus
aucaugucuaaugaugaa

SEQ ID NO: 4089067 - RNA, 21 nt, Variola virus
aucauuaaugauauaguuuuu

SEQ ID NO: 4089068 - RNA, 18 nt, Variola virus
aucauuaauuaauacaau

SEQ ID NO: 4089069 - RNA, 18 nt, Variola virus
aucauucauuccuccaua

SEQ ID NO: 4089070 - RNA, 23 nt, Variola virus
aucauucgauaagauagauucca

SEQ ID NO: 4089071 - RNA, 15 nt, Variola virus
aucauuuaaacauuu

SEQ ID NO: 4089072 - RNA, 19 nt, Variola virus
aucauuuaaacauuuaacu

SEQ ID NO: 4089073 - RNA, 13 nt, Variola virus
aucauuucuauaa

SEQ ID NO: 4089074 - RNA, 13 nt, Variola virus
aucauuucucaau

SEQ ID NO: 4089075 - RNA, 20 nt, Variola virus
aucauuugaugauauguuug

SEQ ID NO: 4089076 - RNA, 18 nt, Variola virus
auccaaauggaucucaua

SEQ ID NO: 4089077 - RNA, 15 nt, Variola virus
auccaagaaaaaguc

SEQ ID NO: 4089078 - RNA, 14 nt, Variola virus
auccaagauacuua

SEQ ID NO: 4089079 - RNA, 17 nt, Variola virus
auccaauauuauugaaa

SEQ ID NO: 4089080 - RNA, 21 nt, Variola virus
auccagauccuuuucuucaga

SEQ ID NO: 4089081 - RNA, 15 nt, Variola virus
auccaucaaaaaaca

SEQ ID NO: 4089082 - RNA, 15 nt, Variola virus
auccauucuaaugau

SEQ ID NO: 4089083 - RNA, 21 nt, Variola virus
aucccaaaaccguuaaaaugu

SEQ ID NO: 4089084 - RNA, 22 nt, Variola virus
aucccguacucccaauauguau

SEQ ID NO: 4089085 - RNA, 11 nt, Variola virus
aucccuuauca

SEQ ID NO: 4089086 - RNA, 19 nt, Variola virus
aucccuuugauaaauagua

SEQ ID NO: 4089087 - RNA, 16 nt, Variola virus
auccgacuagaauuag

SEQ ID NO: 4089088 - RNA, 17 nt, Variola virus
auccggauauucuucua

SEQ ID NO: 4089089 - RNA, 14 nt, Variola virus
auccggauucauga

SEQ ID NO: 4089090 - RNA, 15 nt, Variola virus
auccguucuuaacuu

SEQ ID NO: 4089091 - RNA, 17 nt, Variola virus
auccuaacuuuaaacaa

SEQ ID NO: 4089092 - RNA, 13 nt, Variola virus
auccuaaucagga

SEQ ID NO: 4089093 - RNA, 13 nt, Variola virus
auccuauaacuuc

SEQ ID NO: 4089094 - RNA, 17 nt, Variola virus
auccuauaacuucuaau

SEQ ID NO: 4089095 - RNA, 14 nt, Variola virus
auccuauacucuga

SEQ ID NO: 4089096 - RNA, 15 nt, Variola virus
auccuauucuaaaug

SEQ ID NO: 4089097 - RNA, 16 nt, Variola virus
auccuccaguaaauga

SEQ ID NO: 4089098 - RNA, 13 nt, Variola virus
auccuugacuauc

SEQ ID NO: 4089099 - RNA, 18 nt, Variola virus
auccuuguucagauacua

SEQ ID NO: 4089100 - RNA, 18 nt, Variola virus
auccuuuaagaucaacau

SEQ ID NO: 4089101 - RNA, 19 nt, Variola virus
aucgaauauaaaauaacua

SEQ ID NO: 4089102 - RNA, 18 nt, Variola virus
aucgagucuagauucgag

SEQ ID NO: 4089103 - RNA, 14 nt, Variola virus
aucgauaauuauuu

SEQ ID NO: 4089104 - RNA, 16 nt, Variola virus
aucgcauagaaauaca

SEQ ID NO: 4089105 - RNA, 22 nt, Variola virus
aucgcaucaaauaaaauuauug

SEQ ID NO: 4089106 - RNA, 21 nt, Variola virus
aucgcccgcgagcgagagaag

SEQ ID NO: 4089107 - RNA, 15 nt, Variola virus
aucgcuacaaaacua

SEQ ID NO: 4089108 - RNA, 16 nt, Variola virus
aucggacgcagaaauu

SEQ ID NO: 4089109 - RNA, 17 nt, Variola virus
aucggagcuacauuacc

SEQ ID NO: 4089110 - RNA, 13 nt, Variola virus
aucggcucaaaga

SEQ ID NO: 4089111 - RNA, 15 nt, Variola virus
aucggguucugcuuc

SEQ ID NO: 4089112 - RNA, 16 nt, Variola virus
aucguuuagaauacua

SEQ ID NO: 4089113 - RNA, 17 nt, Variola virus
aucguuucuacaaaauc

SEQ ID NO: 4089114 - RNA, 13 nt, Variola virus
aucuaaaaaacua

SEQ ID NO: 4089115 - RNA, 16 nt, Variola virus
aucuaaacaauaccuc

SEQ ID NO: 4089116 - RNA, 15 nt, Variola virus
aucuaaauuaaauau

SEQ ID NO: 4089117 - RNA, 21 nt, Variola virus
aucuaacaucuugauuaauaa

SEQ ID NO: 4089118 - RNA, 17 nt, Variola virus
aucuaauggauaaacug

SEQ ID NO: 4089119 - RNA, 23 nt, Variola virus
aucuacaaguagucaauaaaaga

SEQ ID NO: 4089120 - RNA, 14 nt, Variola virus
aucuacaauuauug

SEQ ID NO: 4089121 - RNA, 15 nt, Variola virus
aucuacuagaaagau

SEQ ID NO: 4089122 - RNA, 17 nt, Variola virus
aucuaggaguaauuaag

SEQ ID NO: 4089123 - RNA, 16 nt, Variola virus
aucuaguuagcaauuu

SEQ ID NO: 4089124 - RNA, 19 nt, Variola virus
aucuauacugcagaauaga

SEQ ID NO: 4089125 - RNA, 15 nt, Variola virus
aucuauauauguauu

SEQ ID NO: 4089126 - RNA, 19 nt, Variola virus
aucuauauugcuacauaau

SEQ ID NO: 4089127 - RNA, 22 nt, Variola virus
aucuaucuuuagcuucugaaau

SEQ ID NO: 4089128 - RNA, 18 nt, Variola virus
aucuauggaauuaccacu

SEQ ID NO: 4089129 - RNA, 15 nt, Variola virus
aucuauuacaaacau

SEQ ID NO: 4089130 - RNA, 13 nt, Variola virus
aucuauuagaaaa

SEQ ID NO: 4089131 - RNA, 18 nt, Variola virus
aucuauuucugucauuaa

SEQ ID NO: 4089132 - RNA, 21 nt, Variola virus
aucucaaaauagguacucugu

SEQ ID NO: 4089133 - RNA, 20 nt, Variola virus
aucucaugucuaagaauuac

SEQ ID NO: 4089134 - RNA, 17 nt, Variola virus
aucucauucaaauccau

SEQ ID NO: 4089135 - RNA, 16 nt, Variola virus
aucucauuugaaaaua

SEQ ID NO: 4089136 - RNA, 17 nt, Variola virus
aucucccauuaucuugg

SEQ ID NO: 4089137 - RNA, 21 nt, Variola virus
aucuccucuaugcaacuguaa

SEQ ID NO: 4089138 - RNA, 15 nt, Variola virus
aucucgaugaaaaua

SEQ ID NO: 4089139 - RNA, 19 nt, Variola virus
aucucguuuagaaaaaugc

SEQ ID NO: 4089140 - RNA, 17 nt, Variola virus
aucucuacauuguuuac

SEQ ID NO: 4089141 - RNA, 20 nt, Variola virus
aucucuucuaguuucacuag

SEQ ID NO: 4089142 - RNA, 16 nt, Variola virus
aucugaaaauaaauaa

SEQ ID NO: 4089143 - RNA, 14 nt, Variola virus
aucugaagaaagua

SEQ ID NO: 4089144 - RNA, 15 nt, Variola virus
aucugaauaaaacau

SEQ ID NO: 4089145 - RNA, 14 nt, Variola virus
aucugaauuaaaua

SEQ ID NO: 4089146 - RNA, 22 nt, Variola virus
aucugauaaauauacaauagau

SEQ ID NO: 4089147 - RNA, 18 nt, Variola virus
aucugauaauauuaaaaa

SEQ ID NO: 4089148 - RNA, 14 nt, Variola virus
aucugauagaaaga

SEQ ID NO: 4089149 - RNA, 14 nt, Variola virus
aucuggcucucucu

SEQ ID NO: 4089150 - RNA, 16 nt, Variola virus
aucugggaauaaaaua

SEQ ID NO: 4089151 - RNA, 15 nt, Variola virus
aucuguaaaaguugu

SEQ ID NO: 4089152 - RNA, 16 nt, Variola virus
aucuguuuccuauaau

SEQ ID NO: 4089153 - RNA, 14 nt, Variola virus
aucuguuuguugag

SEQ ID NO: 4089154 - RNA, 22 nt, Variola virus
aucuucaacguauaguuguuga

SEQ ID NO: 4089155 - RNA, 17 nt, Variola virus
aucuucauaauaaauaa

SEQ ID NO: 4089156 - RNA, 16 nt, Variola virus
aucuucauuaucugau

SEQ ID NO: 4089157 - RNA, 18 nt, Variola virus
gaauacgaggaugaugau

SEQ ID NO: 4089158 - RNA, 20 nt, Variola virus
gaauagaguaggaaguuuaa

SEQ ID NO: 4089159 - RNA, 14 nt, Variola virus
gaauagauauuaau

SEQ ID NO: 4089160 - RNA, 15 nt, Variola virus
gaauagauuacucau

SEQ ID NO: 4089161 - RNA, 20 nt, Variola virus
gaauauaaaauaacuacagu

SEQ ID NO: 4089162 - RNA, 15 nt, Variola virus
gaauauaaaccauau

SEQ ID NO: 4089163 - RNA, 17 nt, Variola virus
gaauauaaauuauauau

SEQ ID NO: 4089164 - RNA, 21 nt, Variola virus
gaauauaacgugguaucuucu

SEQ ID NO: 4089165 - RNA, 12 nt, Variola virus
gaauauaaugaa

SEQ ID NO: 4089166 - RNA, 17 nt, Variola virus
gaauauacaaguauuau

SEQ ID NO: 4089167 - RNA, 20 nt, Variola virus
gaauauacuucauaaaagaa

SEQ ID NO: 4089168 - RNA, 14 nt, Variola virus
gaauauauaaaaga

SEQ ID NO: 4089169 - RNA, 15 nt, Variola virus
gaauauauaauucuu

SEQ ID NO: 4089170 - RNA, 12 nt, Variola virus
gaauauauuaau

SEQ ID NO: 4089171 - RNA, 14 nt, Variola virus
gaauaucaaaucua

SEQ ID NO: 4089172 - RNA, 18 nt, Variola virus
gaauaucaggaaauguau

SEQ ID NO: 4089173 - RNA, 14 nt, Variola virus
gaauaucuacaaua

SEQ ID NO: 4089174 - RNA, 22 nt, Variola virus
gaauaucuguaggcuucuuguu

SEQ ID NO: 4089175 - RNA, 21 nt, Variola virus
gaauauggggaaaauauucua

SEQ ID NO: 4089176 - RNA, 21 nt, Variola virus
gaauauguuauaauagagaua

SEQ ID NO: 4089177 - RNA, 21 nt, Variola virus
gaauauuccucuaacagauau

SEQ ID NO: 4089178 - RNA, 18 nt, Variola virus
gaauauugauuuacuaaa

SEQ ID NO: 4089179 - RNA, 14 nt, Variola virus
gaauauuucuaguu

SEQ ID NO: 4089180 - RNA, 16 nt, Variola virus
gaauauuuuauguaca

SEQ ID NO: 4089181 - RNA, 18 nt, Variola virus
gaauauuuugauaaugaa

SEQ ID NO: 4089182 - RNA, 18 nt, Variola virus
gaaucaaauauagaucuu

SEQ ID NO: 4089183 - RNA, 13 nt, Variola virus
gaaucaacauaua

SEQ ID NO: 4089184 - RNA, 21 nt, Variola virus
gaaucauaaaaaaaaguuuua

SEQ ID NO: 4089185 - RNA, 19 nt, Variola virus
gaauccgcugcauauuauu

SEQ ID NO: 4089186 - RNA, 13 nt, Variola virus
gaaucuaaacaaa

SEQ ID NO: 4089187 - RNA, 15 nt, Variola virus
gaaucuaaugaugac

SEQ ID NO: 4089188 - RNA, 20 nt, Variola virus
gaaucugaaaauguauaaau

SEQ ID NO: 4089189 - RNA, 20 nt, Variola virus
gaaucugaaccaucaucugu

SEQ ID NO: 4089190 - RNA, 17 nt, Variola virus
gaaucuguucaaaaauu

SEQ ID NO: 4089191 - RNA, 22 nt, Variola virus
gaaucuucauuaucugauauau

SEQ ID NO: 4089192 - RNA, 23 nt, Variola virus
gaaugagauacauaaaacuuuau

SEQ ID NO: 4089193 - RNA, 19 nt, Variola virus
gaaugcagaaaugauuuug

SEQ ID NO: 4089194 - RNA, 19 nt, Variola virus
gaaugccugccuguauuau

SEQ ID NO: 4089195 - RNA, 21 nt, Variola virus
gaaugcucucccggauauuau

SEQ ID NO: 4089196 - RNA, 18 nt, Variola virus
gaauggcguuugauauau

SEQ ID NO: 4089197 - RNA, 19 nt, Variola virus
gaauguucucaagaacuac

SEQ ID NO: 4089198 - RNA, 22 nt, Variola virus
gaauguuuauuggcguuggaaa

SEQ ID NO: 4089199 - RNA, 21 nt, Variola virus
gaauuaacgaaacaauguuuc

SEQ ID NO: 4089200 - RNA, 17 nt, Variola virus
gaauuaacgagauauau

SEQ ID NO: 4089201 - RNA, 13 nt, Variola virus
gaauuaauaauau

SEQ ID NO: 4089202 - RNA, 17 nt, Variola virus
gaauuaauguaaucauu

SEQ ID NO: 4089203 - RNA, 14 nt, Variola virus
gaauuauagacacu

SEQ ID NO: 4089204 - RNA, 20 nt, Variola virus
gaauucauccguccuucaga

SEQ ID NO: 4089205 - RNA, 15 nt, Variola virus
gaauuccucugaaaa

SEQ ID NO: 4089206 - RNA, 21 nt, Variola virus
gaauucuuuuucgacuuuuug

SEQ ID NO: 4089207 - RNA, 20 nt, Variola virus
gaauuguugucgguaaacga

SEQ ID NO: 4089208 - RNA, 15 nt, Variola virus
gaauuuucuaacgaa

SEQ ID NO: 4089209 - RNA, 22 nt, Variola virus
gacaaaagacguaaauauucua

SEQ ID NO: 4089210 - RNA, 18 nt, Variola virus
gacaaaguccuaguugua

SEQ ID NO: 4089211 - RNA, 14 nt, Variola virus
gacacagauaucua

SEQ ID NO: 4089212 - RNA, 18 nt, Variola virus
gacaccuaagaagaaugu

SEQ ID NO: 4089213 - RNA, 17 nt, Variola virus
gacagcuauguuaucau

SEQ ID NO: 4089214 - RNA, 13 nt, Variola virus
gacaguaauacau

SEQ ID NO: 4089215 - RNA, 16 nt, Variola virus
gacauaacuaaucaua

SEQ ID NO: 4089216 - RNA, 13 nt, Variola virus
gacauaagaacag

SEQ ID NO: 4089217 - RNA, 22 nt, Variola virus
gacauaccugaucuacguucua

SEQ ID NO: 4089218 - RNA, 22 nt, Variola virus
gacauaguuucaaaacaaacag

SEQ ID NO: 4089219 - RNA, 15 nt, Variola virus
gacauaucugccaua

SEQ ID NO: 4089220 - RNA, 21 nt, Variola virus
gacauaugccuauuuauauau

SEQ ID NO: 4089221 - RNA, 12 nt, Variola virus
gacaucaugaac

SEQ ID NO: 4089222 - RNA, 13 nt, Variola virus
gacaucucagaau

SEQ ID NO: 4089223 - RNA, 15 nt, Variola virus
gacaugcaaaaaugc

SEQ ID NO: 4089224 - RNA, 19 nt, Variola virus
gacaugguaucaacagaua

SEQ ID NO: 4089225 - RNA, 21 nt, Variola virus
gacauuauaauuuuaccaaua

SEQ ID NO: 4089226 - RNA, 20 nt, Variola virus
gacauuauguuguuaaaaua

SEQ ID NO: 4089227 - RNA, 21 nt, Variola virus
gacauuuuuagagagaacuac

SEQ ID NO: 4089228 - RNA, 14 nt, Variola virus
gaccacauccuuca

SEQ ID NO: 4089229 - RNA, 18 nt, Variola virus
gaccgguuuaucauuaau

SEQ ID NO: 4089230 - RNA, 20 nt, Variola virus
gaccguaccagugacagaua

SEQ ID NO: 4089231 - RNA, 23 nt, Variola virus
gaccguaccagugacagauauac

SEQ ID NO: 4089232 - RNA, 16 nt, Variola virus
gacgaguguaaacacu

SEQ ID NO: 4089233 - RNA, 12 nt, Variola virus
gacguagaaaac

SEQ ID NO: 4089234 - RNA, 22 nt, Variola virus
gacgucuagaguuuauaucaau

SEQ ID NO: 4089235 - RNA, 22 nt, Variola virus
gacuaauaaauuaaauauuaau

SEQ ID NO: 4089236 - RNA, 14 nt, Variola virus
gacuagacauuuac

SEQ ID NO: 4089237 - RNA, 19 nt, Variola virus
gacuagauaaacuaucagu

SEQ ID NO: 4089238 - RNA, 12 nt, Variola virus
gacuagauggac

SEQ ID NO: 4089239 - RNA, 17 nt, Variola virus
gacuauaaaauauucua

SEQ ID NO: 4089240 - RNA, 16 nt, Variola virus
gacuaugggaauauau

SEQ ID NO: 4089241 - RNA, 18 nt, Variola virus
gacucaguauacaaaaau

SEQ ID NO: 4089242 - RNA, 14 nt, Variola virus
gacucauuaaaacu

SEQ ID NO: 4089243 - RNA, 18 nt, Variola virus
gacucauuauuucccaaa

SEQ ID NO: 4089244 - RNA, 18 nt, Variola virus
gacuccgggaccaauuac

SEQ ID NO: 4089245 - RNA, 21 nt, Variola virus
gacucgcaaaaaauacaauau

SEQ ID NO: 4089246 - RNA, 15 nt, Variola virus
gacucugguauuuau

SEQ ID NO: 4089247 - RNA, 20 nt, Variola virus
gacugaugaccauuuaaaaa

SEQ ID NO: 4089248 - RNA, 21 nt, Variola virus
gacugccacguuagaggauga

SEQ ID NO: 4089249 - RNA, 15 nt, Variola virus
gacuggaguauauau

SEQ ID NO: 4089250 - RNA, 20 nt, Variola virus
gacuucauugauaucuuuau

SEQ ID NO: 4089251 - RNA, 15 nt, Variola virus
gagcaagugguggug

SEQ ID NO: 4089252 - RNA, 17 nt, Variola virus
gagcacuauuucuaaau

SEQ ID NO: 4089253 - RNA, 21 nt, Variola virus
gagcuaaccacauuagauauu

SEQ ID NO: 4089254 - RNA, 20 nt, Variola virus
gagcugauuauuuauuucuu

SEQ ID NO: 4089255 - RNA, 19 nt, Variola virus
gaggaaaucguauaaauac

SEQ ID NO: 4089256 - RNA, 14 nt, Variola virus
gaggaagaagaugg

SEQ ID NO: 4089257 - RNA, 20 nt, Variola virus
gaggaaguauaaaaauuaaa

SEQ ID NO: 4089258 - RNA, 17 nt, Variola virus
gagguagguauuacuuu

SEQ ID NO: 4089259 - RNA, 11 nt, Variola virus
gagguauauau

SEQ ID NO: 4089260 - RNA, 21 nt, Variola virus
gaguauaaauuuuagaaauaa

SEQ ID NO: 4089261 - RNA, 21 nt, Variola virus
gaguauugguaauguacaaac

SEQ ID NO: 4089262 - RNA, 11 nt, Variola virus
gaguauuucuc

SEQ ID NO: 4089263 - RNA, 14 nt, Variola virus
gagugcuguggaaa

SEQ ID NO: 4089264 - RNA, 21 nt, Variola virus
gaguuaagccaauagaaauau

SEQ ID NO: 4089265 - RNA, 21 nt, Variola virus
gauaaaaaauuauauacugaa

SEQ ID NO: 4089266 - RNA, 20 nt, Variola virus
gauaaagacgguacuuauga

SEQ ID NO: 4089267 - RNA, 16 nt, Variola virus
gauaaagauauaugau

SEQ ID NO: 4089268 - RNA, 14 nt, Variola virus
gauaaauaguauca

SEQ ID NO: 4089269 - RNA, 19 nt, Variola virus
gauaacaauagucuuguaa

SEQ ID NO: 4089270 - RNA, 18 nt, Variola virus
gauaacacauuuucaucu

SEQ ID NO: 4089271 - RNA, 13 nt, Variola virus
gauaacauaaaaa

SEQ ID NO: 4089272 - RNA, 16 nt, Variola virus
gauaacgcgucuuuaa

SEQ ID NO: 4089273 - RNA, 16 nt, Variola virus
gauaagagacguguua

SEQ ID NO: 4089274 - RNA, 15 nt, Variola virus
gauaaguaauaacua

SEQ ID NO: 4089275 - RNA, 22 nt, Variola virus
gauaaguuucggcacauauuaa

SEQ ID NO: 4089276 - RNA, 13 nt, Variola virus
gauaauaaaucau

SEQ ID NO: 4089277 - RNA, 18 nt, Variola virus
gauaauauccugaacagc

SEQ ID NO: 4089278 - RNA, 18 nt, Variola virus
gauaaucagccauaauua

SEQ ID NO: 4089279 - RNA, 23 nt, Variola virus
gauaauggaagacgcuauaucaa

SEQ ID NO: 4089280 - RNA, 16 nt, Variola virus
gauaaugguacucuag

SEQ ID NO: 4089281 - RNA, 16 nt, Variola virus
gauaauuaauaauaua

SEQ ID NO: 4089282 - RNA, 21 nt, Variola virus
gauaauucgcacaccaacaau

SEQ ID NO: 4089283 - RNA, 18 nt, Variola virus
guuaguacuacugaagaa

SEQ ID NO: 4089284 - RNA, 16 nt, Variola virus
guuauaaacgggugua

SEQ ID NO: 4089285 - RNA, 13 nt, Variola virus
guuauaaauuagg

SEQ ID NO: 4089286 - RNA, 14 nt, Variola virus
guuauaauagagau

SEQ ID NO: 4089287 - RNA, 17 nt, Variola virus
guuauaauuaugaugau

SEQ ID NO: 4089288 - RNA, 23 nt, Variola virus
guuauauguaacauuaaguaaau

SEQ ID NO: 4089289 - RNA, 16 nt, Variola virus
guuaucugaugaaaga

SEQ ID NO: 4089290 - RNA, 15 nt, Variola virus
guuauuauaaacucu

SEQ ID NO: 4089291 - RNA, 20 nt, Variola virus
guuauugguauuucuuacau

SEQ ID NO: 4089292 - RNA, 16 nt, Variola virus
guuauugucaaaaucu

SEQ ID NO: 4089293 - RNA, 20 nt, Variola virus
guuauuuggcaguacucauu

SEQ ID NO: 4089294 - RNA, 14 nt, Variola virus
guuauuuuguuaaa

SEQ ID NO: 4089295 - RNA, 15 nt, Variola virus
guucaaaucuagauu

SEQ ID NO: 4089296 - RNA, 13 nt, Variola virus
guucaacaaacua

SEQ ID NO: 4089297 - RNA, 16 nt, Variola virus
guucaccuucuauaga

SEQ ID NO: 4089298 - RNA, 19 nt, Variola virus
guucagaggaugaaauaga

SEQ ID NO: 4089299 - RNA, 18 nt, Variola virus
guucauaagucuaauaga

SEQ ID NO: 4089300 - RNA, 15 nt, Variola virus
guucaucacauaugc

SEQ ID NO: 4089301 - RNA, 16 nt, Variola virus
guuccggaucuauaga

SEQ ID NO: 4089302 - RNA, 19 nt, Variola virus
guucguacccaucuuaaug

SEQ ID NO: 4089303 - RNA, 13 nt, Variola virus
guucuaaauggau

SEQ ID NO: 4089304 - RNA, 21 nt, Variola virus
guucuaauuccgcauuaaaug

SEQ ID NO: 4089305 - RNA, 23 nt, Variola virus
guucuagucgguauuucaucauu

SEQ ID NO: 4089306 - RNA, 22 nt, Variola virus
guucucgccuaagagauaaaaa

SEQ ID NO: 4089307 - RNA, 12 nt, Variola virus
guucugauuuua

SEQ ID NO: 4089308 - RNA, 20 nt, Variola virus
guugagcuaauuuuuguaaa

SEQ ID NO: 4089309 - RNA, 19 nt, Variola virus
guugaucuucaaauuccac

SEQ ID NO: 4089310 - RNA, 21 nt, Variola virus
guugaucuucaaauuccacca

SEQ ID NO: 4089311 - RNA, 13 nt, Variola virus
guugguagauauu

SEQ ID NO: 4089312 - RNA, 18 nt, Variola virus
guuguaaauuuuaauauu

SEQ ID NO: 4089313 - RNA, 19 nt, Variola virus
guuuaaauucuuuaauauc

SEQ ID NO: 4089314 - RNA, 22 nt, Variola virus
guuuaacaauaaaauuaaucac

SEQ ID NO: 4089315 - RNA, 12 nt, Variola virus
guuuaauaacuu

SEQ ID NO: 4089316 - RNA, 14 nt, Variola virus
guuuaauacauuga

SEQ ID NO: 4089317 - RNA, 12 nt, Variola virus
guuuacauaaau

SEQ ID NO: 4089318 - RNA, 18 nt, Variola virus
guuuacauuuuuggauuu

SEQ ID NO: 4089319 - RNA, 19 nt, Variola virus
guuuaccacaauguauaau

SEQ ID NO: 4089320 - RNA, 22 nt, Variola virus
guuuauaauuacaacauaauaa

SEQ ID NO: 4089321 - RNA, 21 nt, Variola virus
guuuaucuuuuuguuggaaaa

SEQ ID NO: 4089322 - RNA, 17 nt, Variola virus
guuuauguacuaugcca

SEQ ID NO: 4089323 - RNA, 13 nt, Variola virus
guuuauuugaccu

SEQ ID NO: 4089324 - RNA, 22 nt, Variola virus
guuucaagauaaauaaucaaaa

SEQ ID NO: 4089325 - RNA, 17 nt, Variola virus
guuucaucaauagaaga

SEQ ID NO: 4089326 - RNA, 15 nt, Variola virus
guuuccaaaaaaugu

SEQ ID NO: 4089327 - RNA, 18 nt, Variola virus
guuuccaguuauaaaaca

SEQ ID NO: 4089328 - RNA, 23 nt, Variola virus
guuucccuauuaaaauucuuaaa

SEQ ID NO: 4089329 - RNA, 22 nt, Variola virus
guuucucaucuuuuacuugauu

SEQ ID NO: 4089330 - RNA, 15 nt, Variola virus
guuugaaucaucauc

SEQ ID NO: 4089331 - RNA, 19 nt, Variola virus
guuugaugcgauucaaaaa

SEQ ID NO: 4089332 - RNA, 14 nt, Variola virus
guuuggauuaaucu

SEQ ID NO: 4089333 - RNA, 14 nt, Variola virus
guuuuaaauuggua

SEQ ID NO: 4089334 - RNA, 19 nt, Variola virus
guuuuacguuauuaaucau

SEQ ID NO: 4089335 - RNA, 16 nt, Variola virus
guuuuauauacaucuu

SEQ ID NO: 4089336 - RNA, 14 nt, Variola virus
guuuuguaauaucu

SEQ ID NO: 4089337 - RNA, 20 nt, Variola virus
guuuuugaacuguucaaaau

SEQ ID NO: 4089338 - RNA, 13 nt, Variola virus
guuuuuuagaucu

SEQ ID NO: 4089339 - RNA, 15 nt, Variola virus
uaaaaaaaauuauuu

SEQ ID NO: 4089340 - RNA, 23 nt, Variola virus
uaaaaaaauaggugaugaugcaa

SEQ ID NO: 4089341 - RNA, 14 nt, Variola virus
uaaaaaaaugauug

SEQ ID NO: 4089342 - RNA, 18 nt, Variola virus
uaaaaaauauauuguucu

SEQ ID NO: 4089343 - RNA, 17 nt, Variola virus
uaaaaaaucugaugagu

SEQ ID NO: 4089344 - RNA, 15 nt, Variola virus
uaaaaaauucccauu

SEQ ID NO: 4089345 - RNA, 16 nt, Variola virus
uaaaaaccaaaucuug

SEQ ID NO: 4089346 - RNA, 22 nt, Variola virus
uaaaaaccaauuuguauaugug

SEQ ID NO: 4089347 - RNA, 17 nt, Variola virus
uaaaaagauaaacuuua

SEQ ID NO: 4089348 - RNA, 16 nt, Variola virus
uaaaaagguagauguu

SEQ ID NO: 4089349 - RNA, 16 nt, Variola virus
uaaaaauacaucuguu

SEQ ID NO: 4089350 - RNA, 12 nt, Variola virus
uaaaaauauguu

SEQ ID NO: 4089351 - RNA, 14 nt, Variola virus
uaaaaauguuaauu

SEQ ID NO: 4089352 - RNA, 14 nt, Variola virus
uaaaacauuugcau

SEQ ID NO: 4089353 - RNA, 21 nt, Variola virus
uaaaacuuccucauuaagauu

SEQ ID NO: 4089354 - RNA, 17 nt, Variola virus
uaaaacuuuauuaucca

SEQ ID NO: 4089355 - RNA, 16 nt, Variola virus
uaaaauaaaagaguau

SEQ ID NO: 4089356 - RNA, 18 nt, Variola virus
uaaaauaaauauucuuca

SEQ ID NO: 4089357 - RNA, 22 nt, Variola virus
uaaaauagacaauggaauucau

SEQ ID NO: 4089358 - RNA, 23 nt, Variola virus
uaaaauagcguucacauauccuc

SEQ ID NO: 4089359 - RNA, 18 nt, Variola virus
uaaaauaggaaguaaugu

SEQ ID NO: 4089360 - RNA, 19 nt, Variola virus
uaaaauaguuuauaacauu

SEQ ID NO: 4089361 - RNA, 16 nt, Variola virus
uaaaauaucauacgau

SEQ ID NO: 4089362 - RNA, 16 nt, Variola virus
uaaaauggauaauggu

SEQ ID NO: 4089363 - RNA, 20 nt, Variola virus
uaaaaugucuccaauuuuug

SEQ ID NO: 4089364 - RNA, 14 nt, Variola virus
uaaaauuaaacauu

SEQ ID NO: 4089365 - RNA, 18 nt, Variola virus
uaaaauuaaauaguagua

SEQ ID NO: 4089366 - RNA, 16 nt, Variola virus
uaaaauuccuacucau

SEQ ID NO: 4089367 - RNA, 18 nt, Variola virus
uaaaauuucauagacuuu

SEQ ID NO: 4089368 - RNA, 14 nt, Variola virus
uaaacaaaauacuc

SEQ ID NO: 4089369 - RNA, 18 nt, Variola virus
uaaacaagcuaucucuug

SEQ ID NO: 4089370 - RNA, 14 nt, Variola virus
uaaacaccaagaaa

SEQ ID NO: 4089371 - RNA, 18 nt, Variola virus
uaaacacccuuauauuca

SEQ ID NO: 4089372 - RNA, 21 nt, Variola virus
uaaacacuaguauagcagaag

SEQ ID NO: 4089373 - RNA, 17 nt, Variola virus
uaaacagaaauauauga

SEQ ID NO: 4089374 - RNA, 16 nt, Variola virus
uaaacaugaauuuauu

SEQ ID NO: 4089375 - RNA, 15 nt, Variola virus
uaaaccauguuguga

SEQ ID NO: 4089376 - RNA, 14 nt, Variola virus
uaaaccauuuuuca

SEQ ID NO: 4089377 - RNA, 22 nt, Variola virus
uaaacgacuauaaaauuauuga

SEQ ID NO: 4089378 - RNA, 20 nt, Variola virus
uaaacgcgucaaauuuuuca

SEQ ID NO: 4089379 - RNA, 19 nt, Variola virus
uaaacguuccguguguaau

SEQ ID NO: 4089380 - RNA, 22 nt, Variola virus
uaaacguuguuuacucauauag

SEQ ID NO: 4089381 - RNA, 19 nt, Variola virus
uaaagaaaaaugauugucu

SEQ ID NO: 4089382 - RNA, 17 nt, Variola virus
uaaagaaaugucuacau

SEQ ID NO: 4089383 - RNA, 18 nt, Variola virus
uaaagaacgauuguguaa

SEQ ID NO: 4089384 - RNA, 16 nt, Variola virus
uaaagaauaucuuugg

SEQ ID NO: 4089385 - RNA, 15 nt, Variola virus
uaaagacuaugucaa

SEQ ID NO: 4089386 - RNA, 18 nt, Variola virus
uaaagauagaaaugaauu

SEQ ID NO: 4089387 - RNA, 13 nt, Variola virus
uaaagaugcuauu

SEQ ID NO: 4089388 - RNA, 14 nt, Variola virus
uaaagcauuauucu

SEQ ID NO: 4089389 - RNA, 20 nt, Variola virus
uaaagcgugugcguguauag

SEQ ID NO: 4089390 - RNA, 18 nt, Variola virus
uaaaggauauuauauguu

SEQ ID NO: 4089391 - RNA, 15 nt, Variola virus
uaaagguaacaauau

SEQ ID NO: 4089392 - RNA, 22 nt, Variola virus
uaaaguauaugggcgauauucu

SEQ ID NO: 4089393 - RNA, 13 nt, Variola virus
uaaaguuaucaug

SEQ ID NO: 4089394 - RNA, 16 nt, Variola virus
uaaaguuucugaaaua

SEQ ID NO: 4089395 - RNA, 14 nt, Variola virus
uaaauaaagaagau

SEQ ID NO: 4089396 - RNA, 20 nt, Variola virus
uaaauaacaaugagauguau

SEQ ID NO: 4089397 - RNA, 16 nt, Variola virus
uaaauacauuaucaug

SEQ ID NO: 4089398 - RNA, 22 nt, Variola virus
uaaauacuuuuuauuuacggua

SEQ ID NO: 4089399 - RNA, 16 nt, Variola virus
uaaaucaacagaaguu

SEQ ID NO: 4089400 - RNA, 19 nt, Variola virus
uaaauccuuaauauauuca

SEQ ID NO: 4089401 - RNA, 23 nt, Variola virus
uaaauccuuguuugauaaaugua

SEQ ID NO: 4089402 - RNA, 21 nt, Variola virus
uaaaucuacuuagauuauucu

SEQ ID NO: 4089403 - RNA, 18 nt, Variola virus
uaaaucuauuauauuuua

SEQ ID NO: 4089404 - RNA, 18 nt, Variola virus
uaaaugcgugacuauaaa

SEQ ID NO: 4089405 - RNA, 14 nt, Variola virus
uaaauguaaauuca

SEQ ID NO: 4089406 - RNA, 18 nt, Variola virus
uaaauguauaaaaacuaa

SEQ ID NO: 4089407 - RNA, 20 nt, Variola virus
uaaauguuuucucuguaaua

SEQ ID NO: 4089408 - RNA, 11 nt, Variola virus
uaaauuagaag

SEQ ID NO: 4089409 - RNA, 11 nt, Variola virus
aaaaaauggaa

SEQ ID NO: 4089410 - RNA, 12 nt, Variola virus
aaaaaauuucca

SEQ ID NO: 4089411 - RNA, 21 nt, Variola virus
aaaaacaucacgaaaucuaua

SEQ ID NO: 4089412 - RNA, 14 nt, Variola virus
aaaaagaaugagua

SEQ ID NO: 4089413 - RNA, 19 nt, Variola virus
aaaaagaccaguucauuca

SEQ ID NO: 4089414 - RNA, 21 nt, Variola virus
aaaaagauuaccguaugauau

SEQ ID NO: 4089415 - RNA, 22 nt, Variola virus
aaaaagauuaccguaugauaug

SEQ ID NO: 4089416 - RNA, 15 nt, Variola virus
aaaaagcuauuauca

SEQ ID NO: 4089417 - RNA, 21 nt, Variola virus
aaaaauacucaguuugauauu

SEQ ID NO: 4089418 - RNA, 17 nt, Variola virus
aaaaaugauagaaauau

SEQ ID NO: 4089419 - RNA, 22 nt, Variola virus
aaaaauggauuuugaugauauu

SEQ ID NO: 4089420 - RNA, 19 nt, Variola virus
aaaaauuaauacaucauca

SEQ ID NO: 4089421 - RNA, 21 nt, Variola virus
aaaaauuauacuguaacacaa

SEQ ID NO: 4089422 - RNA, 23 nt, Variola virus
aaaacagaauaugagaaugaaua

SEQ ID NO: 4089423 - RNA, 13 nt, Variola virus
aaaacauaaucaa

SEQ ID NO: 4089424 - RNA, 14 nt, Variola virus
aaaacauaaucaag

SEQ ID NO: 4089425 - RNA, 19 nt, Variola virus
aaaacauauauaauaaaua

SEQ ID NO: 4089426 - RNA, 18 nt, Variola virus
aaaacgauauuagaauuu

SEQ ID NO: 4089427 - RNA, 22 nt, Variola virus
aaaacggugcugaccuggaaaa

SEQ ID NO: 4089428 - RNA, 19 nt, Variola virus
aaaacguggaaagaaucua

SEQ ID NO: 4089429 - RNA, 19 nt, Variola virus
aaaacuauaucuauguuga

SEQ ID NO: 4089430 - RNA, 16 nt, Variola virus
aaaacugaaaauauau

SEQ ID NO: 4089431 - RNA, 19 nt, Variola virus
aaaacugguuaaaacagua

SEQ ID NO: 4089432 - RNA, 14 nt, Variola virus
aaaagaauauguau

SEQ ID NO: 4089433 - RNA, 14 nt, Variola virus
aaaagaaucaucau

SEQ ID NO: 4089434 - RNA, 21 nt, Variola virus
aaaagacgcuuguuaauaagu

SEQ ID NO: 4089435 - RNA, 16 nt, Variola virus
aaaagacguaaauauu

SEQ ID NO: 4089436 - RNA, 19 nt, Variola virus
aaaagacuuucguuaauuu

SEQ ID NO: 4089437 - RNA, 15 nt, Variola virus
aaaagccccaauuua

SEQ ID NO: 4089438 - RNA, 22 nt, Variola virus
aaaagcuauuaucaaauacugu

SEQ ID NO: 4089439 - RNA, 14 nt, Variola virus
aaaaguaaauacug

SEQ ID NO: 4089440 - RNA, 17 nt, Variola virus
aaaaguagaaaauauau

SEQ ID NO: 4089441 - RNA, 22 nt, Variola virus
aaaaguauuaauacaugucuua

SEQ ID NO: 4089442 - RNA, 13 nt, Variola virus
aaaauaauaauua

SEQ ID NO: 4089443 - RNA, 15 nt, Variola virus
aaaauacaacaaugu

SEQ ID NO: 4089444 - RNA, 10 nt, Variola virus
aaaauacuua

SEQ ID NO: 4089445 - RNA, 17 nt, Variola virus
aaaauauauaaugaaua

SEQ ID NO: 4089446 - RNA, 22 nt, Variola virus
aaaauauggaauuguauuuucu

SEQ ID NO: 4089447 - RNA, 12 nt, Variola virus
aaaauauguaga

SEQ ID NO: 4089448 - RNA, 16 nt, Variola virus
aaaauauguauaacgu

SEQ ID NO: 4089449 - RNA, 11 nt, Variola virus
aaaauauugug

SEQ ID NO: 4089450 - RNA, 13 nt, Variola virus
aaaaucaaugggu

SEQ ID NO: 4089451 - RNA, 19 nt, Variola virus
aaaaucaggguuaucaaag

SEQ ID NO: 4089452 - RNA, 22 nt, Variola virus
aaaaugacaucguugcccggau

SEQ ID NO: 4089453 - RNA, 15 nt, Variola virus
aaaaugauagaaaua

SEQ ID NO: 4089454 - RNA, 21 nt, Variola virus
aaaaugaugcuauuagaauuu

SEQ ID NO: 4089455 - RNA, 17 nt, Variola virus
aaaaugguaaacuuuug

SEQ ID NO: 4089456 - RNA, 22 nt, Variola virus
aaaaugguguauuggaccuggu

SEQ ID NO: 4089457 - RNA, 21 nt, Variola virus
aaaauuaauauuuaugauuua

SEQ ID NO: 4089458 - RNA, 14 nt, Variola virus
aaaauuauaugacc

SEQ ID NO: 4089459 - RNA, 19 nt, Variola virus
aaaauuguugaucauauag

SEQ ID NO: 4089460 - RNA, 15 nt, Variola virus
aaacaaaauuuuacu

SEQ ID NO: 4089461 - RNA, 18 nt, Variola virus
aaacaacaaaauuauacu

SEQ ID NO: 4089462 - RNA, 15 nt, Variola virus
aaacaauguauacaa

SEQ ID NO: 4089463 - RNA, 12 nt, Variola virus
aaacaauguuuc

SEQ ID NO: 4089464 - RNA, 22 nt, Variola virus
aaacacgucaaagguuaacauc

SEQ ID NO: 4089465 - RNA, 13 nt, Variola virus
aaacacuguuguu

SEQ ID NO: 4089466 - RNA, 22 nt, Variola virus
aaacacuguuguuagagauuuu

SEQ ID NO: 4089467 - RNA, 18 nt, Variola virus
aaacaguuauuuucugaa

SEQ ID NO: 4089468 - RNA, 22 nt, Variola virus
aaacaguuugguauuagaauca

SEQ ID NO: 4089469 - RNA, 21 nt, Variola virus
aaacaguuuuaccguuuguau

SEQ ID NO: 4089470 - RNA, 19 nt, Variola virus
aaacauguaugagaaaaac

SEQ ID NO: 4089471 - RNA, 21 nt, Variola virus
aaacauguucaaugcaauaga

SEQ ID NO: 4089472 - RNA, 18 nt, Variola virus
aaacauuuuauuucuaga

SEQ ID NO: 4089473 - RNA, 14 nt, Variola virus
aaaccaaaucuuga

SEQ ID NO: 4089474 - RNA, 16 nt, Variola virus
aaaccauguugugaaa

SEQ ID NO: 4089475 - RNA, 14 nt, Variola virus
aaaccuaugauauc

SEQ ID NO: 4089476 - RNA, 13 nt, Variola virus
aaacgaaaaauac

SEQ ID NO: 4089477 - RNA, 15 nt, Variola virus
aaacgaaaacuauau

SEQ ID NO: 4089478 - RNA, 13 nt, Variola virus
aaacgaacuauau

SEQ ID NO: 4089479 - RNA, 19 nt, Variola virus
aaacgaguacuuuaaagaa

SEQ ID NO: 4089480 - RNA, 18 nt, Variola virus
aaacgcucuacgaauauc

SEQ ID NO: 4089481 - RNA, 16 nt, Variola virus
aaacuaaacuuauuua

SEQ ID NO: 4089482 - RNA, 20 nt, Variola virus
aaacuaacauuguuaauuga

SEQ ID NO: 4089483 - RNA, 12 nt, Variola virus
aaacuaauacau

SEQ ID NO: 4089484 - RNA, 15 nt, Variola virus
aaacuaauucauuuu

SEQ ID NO: 4089485 - RNA, 14 nt, Variola virus
aaacuaauucuguc

SEQ ID NO: 4089486 - RNA, 15 nt, Variola virus
aaacuacagguguga

SEQ ID NO: 4089487 - RNA, 20 nt, Variola virus
aaacuagaaaaacuuaguac

SEQ ID NO: 4089488 - RNA, 21 nt, Variola virus
aaacuauuacuaggagaauua

SEQ ID NO: 4089489 - RNA, 15 nt, Variola virus
aaacucagaacaaua

SEQ ID NO: 4089490 - RNA, 22 nt, Variola virus
aaacucgucuccccaaacauug

SEQ ID NO: 4089491 - RNA, 22 nt, Variola virus
aaacucuuuuauagagaaaugu

SEQ ID NO: 4089492 - RNA, 18 nt, Variola virus
aaacugaaaauauauuga

SEQ ID NO: 4089493 - RNA, 12 nt, Variola virus
aaacugaaaaug

SEQ ID NO: 4089494 - RNA, 14 nt, Variola virus
aaacugguaaucca

SEQ ID NO: 4089495 - RNA, 16 nt, Variola virus
aaacuguuuaagaaaa

SEQ ID NO: 4089496 - RNA, 17 nt, Variola virus
aaacuucucuaaaugag

SEQ ID NO: 4089497 - RNA, 23 nt, Variola virus
aaggauuugcuuaaaggaagaau

SEQ ID NO: 4089498 - RNA, 23 nt, Variola virus
aagguggauucgguaguauuuau

SEQ ID NO: 4089499 - RNA, 15 nt, Variola virus
aagguuaacaucuua

SEQ ID NO: 4089500 - RNA, 12 nt, Variola virus
aagguucuuaua

SEQ ID NO: 4089501 - RNA, 12 nt, Variola virus
aagguuguaaau

SEQ ID NO: 4089502 - RNA, 11 nt, Variola virus
aaguaaauacu

SEQ ID NO: 4089503 - RNA, 15 nt, Variola virus
aaguacucaauaaau

SEQ ID NO: 4089504 - RNA, 19 nt, Variola virus
aaguauacauguuagagaa

SEQ ID NO: 4089505 - RNA, 17 nt, Variola virus
aaguaucaaaucuucua

SEQ ID NO: 4089506 - RNA, 21 nt, Variola virus
aaguauuuuuagagcucuugg

SEQ ID NO: 4089507 - RNA, 13 nt, Variola virus
aagucaaaugauu

SEQ ID NO: 4089508 - RNA, 16 nt, Variola virus
aagucauaugugguau

SEQ ID NO: 4089509 - RNA, 20 nt, Variola virus
aagucccucauagaaugaua

SEQ ID NO: 4089510 - RNA, 17 nt, Variola virus
aagucgccucaaagaua

SEQ ID NO: 4089511 - RNA, 19 nt, Variola virus
aagucucguucguaaauaa

SEQ ID NO: 4089512 - RNA, 17 nt, Variola virus
aagugucuauaaaugua

SEQ ID NO: 4089513 - RNA, 16 nt, Variola virus
aaguuaaauagaaugc

SEQ ID NO: 4089514 - RNA, 18 nt, Variola virus
aaguuagaaaaaaugauu

SEQ ID NO: 4089515 - RNA, 19 nt, Variola virus
aaguucauuaucugaaaua

SEQ ID NO: 4089516 - RNA, 18 nt, Variola virus
aaguucuggcaauguuuc

SEQ ID NO: 4089517 - RNA, 22 nt, Variola virus
aaguugcgaugaaauaggagau

SEQ ID NO: 4089518 - RNA, 15 nt, Variola virus
aaguuucuuuacugu

SEQ ID NO: 4089519 - RNA, 20 nt, Variola virus
aaguuuggacaguucccauu

SEQ ID NO: 4089520 - RNA, 13 nt, Variola virus
aaguuuuaccauu

SEQ ID NO: 4089521 - RNA, 23 nt, Variola virus
aaguuuuucacccauaaauagua

SEQ ID NO: 4089522 - RNA, 11 nt, Variola virus
aauaaaaauua

SEQ ID NO: 4089523 - RNA, 16 nt, Variola virus
aauaaaacaucaaugu

SEQ ID NO: 4089524 - RNA, 12 nt, Variola virus
aauaaaacauuu

SEQ ID NO: 4089525 - RNA, 13 nt, Variola virus
aauaaaagaacua

SEQ ID NO: 4089526 - RNA, 19 nt, Variola virus
aauaaaaugucacaaccuu

SEQ ID NO: 4089527 - RNA, 19 nt, Variola virus
aauaaacuaaacaaaacug

SEQ ID NO: 4089528 - RNA, 22 nt, Variola virus
aauaaacuccguagagaaauau

SEQ ID NO: 4089529 - RNA, 21 nt, Variola virus
aauaaagaugccauuuagaga

SEQ ID NO: 4089530 - RNA, 20 nt, Variola virus
aauaaaguuaaacaacuauu

SEQ ID NO: 4089531 - RNA, 11 nt, Variola virus
aauaaauggau

SEQ ID NO: 4089532 - RNA, 16 nt, Variola virus
aauaaaugguuucgaa

SEQ ID NO: 4089533 - RNA, 15 nt, Variola virus
aauaaauuuuuccaa

SEQ ID NO: 4089534 - RNA, 15 nt, Variola virus
aauaacauaggauua

SEQ ID NO: 4089535 - RNA, 15 nt, Variola virus
aauaacaucagaaaa

SEQ ID NO: 4089536 - RNA, 18 nt, Variola virus
aauaacuaaaaauguaaa

SEQ ID NO: 4089537 - RNA, 19 nt, Variola virus
aauaacuacaguuugaaaa

SEQ ID NO: 4089538 - RNA, 14 nt, Variola virus
aauaacuagaucau

SEQ ID NO: 4089539 - RNA, 19 nt, Variola virus
aauaacuauguuuuaaaaa

SEQ ID NO: 4089540 - RNA, 23 nt, Variola virus
aauaacucauuuauauauuaaaa

SEQ ID NO: 4089541 - RNA, 21 nt, Variola virus
aauaacugccggauaaaagug

SEQ ID NO: 4089542 - RNA, 17 nt, Variola virus
aauaagacuuugaacau

SEQ ID NO: 4089543 - RNA, 13 nt, Variola virus
aauaaguauauaa

SEQ ID NO: 4089544 - RNA, 15 nt, Variola virus
aauaaguauauaaau

SEQ ID NO: 4089545 - RNA, 18 nt, Variola virus
aauaauacaacaaccauu

SEQ ID NO: 4089546 - RNA, 19 nt, Variola virus
aauaauauaaaauucccaa

SEQ ID NO: 4089547 - RNA, 18 nt, Variola virus
aauaaucuaguaaaacuu

SEQ ID NO: 4089548 - RNA, 14 nt, Variola virus
aauaaucucaauua

SEQ ID NO: 4089549 - RNA, 14 nt, Variola virus
aauaauuaaugccc

SEQ ID NO: 4089550 - RNA, 24 nt, Variola virus
aauaauuacuuuacaaacgaugua

SEQ ID NO: 4089551 - RNA, 12 nt, Variola virus
aauaauuauucu

SEQ ID NO: 4089552 - RNA, 21 nt, Variola virus
aauaauuuugaagcauuggaa

SEQ ID NO: 4089553 - RNA, 14 nt, Variola virus
aauacaaaauaaua

SEQ ID NO: 4089554 - RNA, 14 nt, Variola virus
aauacaaaauguua

SEQ ID NO: 4089555 - RNA, 16 nt, Variola virus
aauacacccaauaaua

SEQ ID NO: 4089556 - RNA, 22 nt, Variola virus
aauacacuuagguuuuuagaaa

SEQ ID NO: 4089557 - RNA, 20 nt, Variola virus
aauacauauuguuuagcaaa

SEQ ID NO: 4089558 - RNA, 14 nt, Variola virus
aauacauguacaaa

SEQ ID NO: 4089559 - RNA, 21 nt, Variola virus
aauacauuucucaaaugaaua

SEQ ID NO: 4089560 - RNA, 18 nt, Variola virus
aauacccugaugaaaaug

SEQ ID NO: 4089561 - RNA, 22 nt, Variola virus
aauaccgacgcgucugaauauc

SEQ ID NO: 4089562 - RNA, 23 nt, Variola virus
aauacguccaucagcauuguuuc

SEQ ID NO: 4089563 - RNA, 23 nt, Variola virus
aauacgucuugcacguaaucuau

SEQ ID NO: 4089564 - RNA, 19 nt, Variola virus
aauacuauuacagaaguuu

SEQ ID NO: 4089565 - RNA, 11 nt, Variola virus
aauacuauuau

SEQ ID NO: 4089566 - RNA, 19 nt, Variola virus
aauacugaugcuuuuucca

SEQ ID NO: 4089567 - RNA, 17 nt, Variola virus
aauacuuaaaaauggau

SEQ ID NO: 4089568 - RNA, 18 nt, Variola virus
aauacuuaccuaaugccu

SEQ ID NO: 4089569 - RNA, 22 nt, Variola virus
aauagaaaccaaaucaaaacaa

SEQ ID NO: 4089570 - RNA, 11 nt, Variola virus
aauagaaucua

SEQ ID NO: 4089571 - RNA, 21 nt, Variola virus
aauagaggagccauuaaaugu

SEQ ID NO: 4089572 - RNA, 15 nt, Variola virus
aauagaguauuccaa

SEQ ID NO: 4089573 - RNA, 18 nt, Variola virus
aauagaugauagaauauc

SEQ ID NO: 4089574 - RNA, 21 nt, Variola virus
aauagauuggaugguugacau

SEQ ID NO: 4089575 - RNA, 15 nt, Variola virus
aauagauuuuucaua

SEQ ID NO: 4089576 - RNA, 23 nt, Variola virus
aauagcaaccaauguuugaucau

SEQ ID NO: 4089577 - RNA, 22 nt, Variola virus
aauaggaggaauugauauguau

SEQ ID NO: 4089578 - RNA, 23 nt, Variola virus
aauagguguaaaucuagaaauua

SEQ ID NO: 4089579 - RNA, 16 nt, Variola virus
aauaguacauuuucca

SEQ ID NO: 4089580 - RNA, 17 nt, Variola virus
aauagugcgaaaucauu

SEQ ID NO: 4089581 - RNA, 14 nt, Variola virus
aauauaaaaugaua

SEQ ID NO: 4089582 - RNA, 12 nt, Variola virus
aauauaacagua

SEQ ID NO: 4089583 - RNA, 16 nt, Variola virus
aauauaccauuaaaaa

SEQ ID NO: 4089584 - RNA, 21 nt, Variola virus
aauauagguauauuuauucca

SEQ ID NO: 4089585 - RNA, 17 nt, Variola virus
aauauaucccuuaaaaa

SEQ ID NO: 4089586 - RNA, 20 nt, Variola virus
aauauaugcaaaauaauauc

SEQ ID NO: 4089587 - RNA, 11 nt, Variola virus
aauauauguau

SEQ ID NO: 4089588 - RNA, 14 nt, Variola virus
aauauauugaucau

SEQ ID NO: 4089589 - RNA, 17 nt, Variola virus
aauauauugaucauaau

SEQ ID NO: 4089590 - RNA, 17 nt, Variola virus
aauaucaaacaauccaa

SEQ ID NO: 4089591 - RNA, 13 nt, Variola virus
aauaucaggaaau

SEQ ID NO: 4089592 - RNA, 20 nt, Variola virus
aauaucaggaaauguauaaa

SEQ ID NO: 4089593 - RNA, 14 nt, Variola virus
aauaucauaaucua

SEQ ID NO: 4089594 - RNA, 14 nt, Variola virus
aauaucauauguag

SEQ ID NO: 4089595 - RNA, 18 nt, Variola virus
aauaucauauuacgaaau

SEQ ID NO: 4089596 - RNA, 13 nt, Variola virus
aauauccucaaua

SEQ ID NO: 4089597 - RNA, 16 nt, Variola virus
aauaucuagauuauaa

SEQ ID NO: 4089598 - RNA, 15 nt, Variola virus
aauaucuaggacaau

SEQ ID NO: 4089599 - RNA, 13 nt, Variola virus
aauaucucaauga

SEQ ID NO: 4089600 - RNA, 20 nt, Variola virus
aauaugaaaucuaucuuaua

SEQ ID NO: 4089601 - RNA, 22 nt, Variola virus
aauaugaggaaaaugauuaaau

SEQ ID NO: 4089602 - RNA, 16 nt, Variola virus
aauaugcucaugaaga

SEQ ID NO: 4089603 - RNA, 17 nt, Variola virus
aauauggucuuuaaaaa

SEQ ID NO: 4089604 - RNA, 13 nt, Variola virus
aauauguauauau

SEQ ID NO: 4089605 - RNA, 21 nt, Variola virus
aauauuauuaccaucuuccgc

SEQ ID NO: 4089606 - RNA, 13 nt, Variola virus
aauauuauuuccc

SEQ ID NO: 4089607 - RNA, 16 nt, Variola virus
aauauucaguauauag

SEQ ID NO: 4089608 - RNA, 20 nt, Variola virus
aauauucuaugacugaaugu

SEQ ID NO: 4089609 - RNA, 13 nt, Variola virus
aauauucuguucu

SEQ ID NO: 4089610 - RNA, 21 nt, Variola virus
aauauuggcuuuucuuuauca

SEQ ID NO: 4089611 - RNA, 18 nt, Variola virus
aauauuguguuagccauu

SEQ ID NO: 4089612 - RNA, 16 nt, Variola virus
aauauuguuuuacugu

SEQ ID NO: 4089613 - RNA, 21 nt, Variola virus
aauauuguuuuacugucucaa

SEQ ID NO: 4089614 - RNA, 23 nt, Variola virus
aauauuguuuuucacuuuuuaua

SEQ ID NO: 4089615 - RNA, 21 nt, Variola virus
aauauuuaguuuauucauaau

SEQ ID NO: 4089616 - RNA, 17 nt, Variola virus
aauauuuguuaucauga

SEQ ID NO: 4089617 - RNA, 13 nt, Variola virus
aauauuuuaccuu

SEQ ID NO: 4089618 - RNA, 20 nt, Variola virus
aauauuuuuuauaaacauga

SEQ ID NO: 4089619 - RNA, 12 nt, Variola virus
aaucaaauacuu

SEQ ID NO: 4089620 - RNA, 21 nt, Variola virus
aaucaaaucucuaucgucaca

SEQ ID NO: 4089621 - RNA, 18 nt, Variola virus
aaucaacagaaguuaaua

SEQ ID NO: 4089622 - RNA, 19 nt, Variola virus
aaucaccauccuuuaaaaa

SEQ ID NO: 4089623 - RNA, 18 nt, Variola virus
acaucgaauauaaaauaa

SEQ ID NO: 4089624 - RNA, 16 nt, Variola virus
acaucgaugccuuaac

SEQ ID NO: 4089625 - RNA, 23 nt, Variola virus
acaucggugagugauaugccuau

SEQ ID NO: 4089626 - RNA, 21 nt, Variola virus
acaucguaaucaaaagaauug

SEQ ID NO: 4089627 - RNA, 23 nt, Variola virus
acaucuaaaaaauccuuaaugau

SEQ ID NO: 4089628 - RNA, 13 nt, Variola virus
acaucuaaaaaug

SEQ ID NO: 4089629 - RNA, 20 nt, Variola virus
acaucuagguuucaaaagac

SEQ ID NO: 4089630 - RNA, 14 nt, Variola virus
acaucucgcaauaa

SEQ ID NO: 4089631 - RNA, 16 nt, Variola virus
acaucucgcaauaauc

SEQ ID NO: 4089632 - RNA, 15 nt, Variola virus
acaugauauucaugu

SEQ ID NO: 4089633 - RNA, 14 nt, Variola virus
acaugauuaauaca

SEQ ID NO: 4089634 - RNA, 15 nt, Variola virus
acaugcaaggcauuu

SEQ ID NO: 4089635 - RNA, 23 nt, Variola virus
acaugcgguaaagauauuucuca

SEQ ID NO: 4089636 - RNA, 18 nt, Variola virus
acauggaauaaauuauua

SEQ ID NO: 4089637 - RNA, 13 nt, Variola virus
acaugguuaaagu

SEQ ID NO: 4089638 - RNA, 23 nt, Variola virus
acaugguuaaaguacauguacaa

SEQ ID NO: 4089639 - RNA, 19 nt, Variola virus
acauguuacuauagcauua

SEQ ID NO: 4089640 - RNA, 15 nt, Variola virus
acauguuuaaauaau

SEQ ID NO: 4089641 - RNA, 21 nt, Variola virus
acauuaaauguauauuuucca

SEQ ID NO: 4089642 - RNA, 20 nt, Variola virus
acauuaacaucuugaaccau

SEQ ID NO: 4089643 - RNA, 17 nt, Variola virus
acauuaacauuuugaaa

SEQ ID NO: 4089644 - RNA, 23 nt, Variola virus
acauuaaguaaauccuuaaguuc

SEQ ID NO: 4089645 - RNA, 13 nt, Variola virus
acauuauaugauu

SEQ ID NO: 4089646 - RNA, 17 nt, Variola virus
acauuauuaaucagaau

SEQ ID NO: 4089647 - RNA, 16 nt, Variola virus
acauucaaagauuuga

SEQ ID NO: 4089648 - RNA, 22 nt, Variola virus
acauucaugauaaacuuaauga

SEQ ID NO: 4089649 - RNA, 14 nt, Variola virus
acauucauuaauaa

SEQ ID NO: 4089650 - RNA, 17 nt, Variola virus
acauucauugucuauua

SEQ ID NO: 4089651 - RNA, 17 nt, Variola virus
acauugacauauuucga

SEQ ID NO: 4089652 - RNA, 14 nt, Variola virus
acauugauuaaaga

SEQ ID NO: 4089653 - RNA, 13 nt, Variola virus
acauuuauaucca

SEQ ID NO: 4089654 - RNA, 14 nt, Variola virus
acauuuaugauaug

SEQ ID NO: 4089655 - RNA, 15 nt, Variola virus
acauuuccuacuacu

SEQ ID NO: 4089656 - RNA, 13 nt, Variola virus
acauuuuaaaaua

SEQ ID NO: 4089657 - RNA, 14 nt, Variola virus
acauuuuauuucua

SEQ ID NO: 4089658 - RNA, 17 nt, Variola virus
acauuuucaucuagaua

SEQ ID NO: 4089659 - RNA, 14 nt, Variola virus
acauuuuccauuua

SEQ ID NO: 4089660 - RNA, 20 nt, Variola virus
acauuuuggcaaauugauua

SEQ ID NO: 4089661 - RNA, 13 nt, Variola virus
acauuuuuaaaga

SEQ ID NO: 4089662 - RNA, 18 nt, Variola virus
acauuuuuauaaauagau

SEQ ID NO: 4089663 - RNA, 18 nt, Variola virus
acauuuuuggauuucaua

SEQ ID NO: 4089664 - RNA, 17 nt, Variola virus
accaaaaacucauauaa

SEQ ID NO: 4089665 - RNA, 16 nt, Variola virus
accaaaucaaaacaaa

SEQ ID NO: 4089666 - RNA, 16 nt, Variola virus
accaaauuaaugaaua

SEQ ID NO: 4089667 - RNA, 16 nt, Variola virus
accaacaacuguaaaa

SEQ ID NO: 4089668 - RNA, 17 nt, Variola virus
accaacacuuaucaauu

SEQ ID NO: 4089669 - RNA, 19 nt, Variola virus
accaacagcagaaaaagac

SEQ ID NO: 4089670 - RNA, 18 nt, Variola virus
accaauaaaaauaaacua

SEQ ID NO: 4089671 - RNA, 21 nt, Variola virus
accaauagaaguuuucccaaa

SEQ ID NO: 4089672 - RNA, 23 nt, Variola virus
accaauauuggaauuauaauaua

SEQ ID NO: 4089673 - RNA, 12 nt, Variola virus
accaaugucucu

SEQ ID NO: 4089674 - RNA, 20 nt, Variola virus
accacuucucuaucaaugau

SEQ ID NO: 4089675 - RNA, 17 nt, Variola virus
accauauagaucaauca

SEQ ID NO: 4089676 - RNA, 22 nt, Variola virus
accauccguuaucgaagaaugg

SEQ ID NO: 4089677 - RNA, 21 nt, Variola virus
accaucguacucuacagcaua

SEQ ID NO: 4089678 - RNA, 19 nt, Variola virus
accaugaaauugagaagau

SEQ ID NO: 4089679 - RNA, 16 nt, Variola virus
accauuaauaggaaaa

SEQ ID NO: 4089680 - RNA, 16 nt, Variola virus
accauuaucuuuguuu

SEQ ID NO: 4089681 - RNA, 17 nt, Variola virus
accauuuuaaaaucauu

SEQ ID NO: 4089682 - RNA, 21 nt, Variola virus
acccaaguuugagauuucaua

SEQ ID NO: 4089683 - RNA, 17 nt, Variola virus
acccaugauaaugaaua

SEQ ID NO: 4089684 - RNA, 16 nt, Variola virus
acccauguuuaagaua

SEQ ID NO: 4089685 - RNA, 19 nt, Variola virus
acccauuagguuaaaugau

SEQ ID NO: 4089686 - RNA, 23 nt, Variola virus
acccuuccuuaaacgugaaugau

SEQ ID NO: 4089687 - RNA, 18 nt, Variola virus
accgauaauagacuauca

SEQ ID NO: 4089688 - RNA, 22 nt, Variola virus
accguauguucugauuuuaucu

SEQ ID NO: 4089689 - RNA, 17 nt, Variola virus
accguguguaaaaugac

SEQ ID NO: 4089690 - RNA, 16 nt, Variola virus
accguuguuaaauacu

SEQ ID NO: 4089691 - RNA, 21 nt, Variola virus
accuaaucccgcauuuauaca

SEQ ID NO: 4089692 - RNA, 21 nt, Variola virus
accuauaacauuaauaucaaa

SEQ ID NO: 4089693 - RNA, 15 nt, Variola virus
accuaugauaaagga

SEQ ID NO: 4089694 - RNA, 22 nt, Variola virus
accuauggauacgguacacgua

SEQ ID NO: 4089695 - RNA, 15 nt, Variola virus
accuauuuacuggug

SEQ ID NO: 4089696 - RNA, 16 nt, Variola virus
acgaaaggagagaaug

SEQ ID NO: 4089697 - RNA, 20 nt, Variola virus
acgaaaguauagcuaaugau

SEQ ID NO: 4089698 - RNA, 20 nt, Variola virus
acgaacauuuauaucauuug

SEQ ID NO: 4089699 - RNA, 19 nt, Variola virus
acgaaguauuuauacuuuu

SEQ ID NO: 4089700 - RNA, 20 nt, Variola virus
acgaauauugggcaaagaua

SEQ ID NO: 4089701 - RNA, 17 nt, Variola virus
acgaauucuaugaugaa

SEQ ID NO: 4089702 - RNA, 14 nt, Variola virus
acgacgagaaucuu

SEQ ID NO: 4089703 - RNA, 17 nt, Variola virus
acgacuauuaaaauaaa

SEQ ID NO: 4089704 - RNA, 21 nt, Variola virus
acgagaauggcguuugauaua

SEQ ID NO: 4089705 - RNA, 21 nt, Variola virus
acgauaaaaauaauauuguuu

SEQ ID NO: 4089706 - RNA, 23 nt, Variola virus
acgauaaaccaaaagcuuucuag

SEQ ID NO: 4089707 - RNA, 18 nt, Variola virus
acgauaaugucucuauaa

SEQ ID NO: 4089708 - RNA, 17 nt, Variola virus
acgauauaaauugauua

SEQ ID NO: 4089709 - RNA, 23 nt, Variola virus
acgauauuuguuggauuucugau

SEQ ID NO: 4089710 - RNA, 19 nt, Variola virus
acgaucuuuuauuucugau

SEQ ID NO: 4089711 - RNA, 12 nt, Variola virus
acgaugaaaaug

SEQ ID NO: 4089712 - RNA, 14 nt, Variola virus
acgaugauauguau

SEQ ID NO: 4089713 - RNA, 18 nt, Variola virus
acgauguaguuagauaga

SEQ ID NO: 4089714 - RNA, 15 nt, Variola virus
acgaugucaauaaug

SEQ ID NO: 4089715 - RNA, 16 nt, Variola virus
acgauuauuucuaaau

SEQ ID NO: 4089716 - RNA, 20 nt, Variola virus
acgauucuucacaagugaaa

SEQ ID NO: 4089717 - RNA, 17 nt, Variola virus
acgauugucaauacuuu

SEQ ID NO: 4089718 - RNA, 23 nt, Variola virus
acgcagaaauugguauaaauguu

SEQ ID NO: 4089719 - RNA, 14 nt, Variola virus
acgcgaacaucuuu

SEQ ID NO: 4089720 - RNA, 19 nt, Variola virus
acguaaauacaaaacagaa

SEQ ID NO: 4089721 - RNA, 14 nt, Variola virus
acguaauaaugaag

SEQ ID NO: 4089722 - RNA, 23 nt, Variola virus
acguaucaccaacggaaauggua

SEQ ID NO: 4089723 - RNA, 17 nt, Variola virus
acguaucucgucuaaau

SEQ ID NO: 4089724 - RNA, 22 nt, Variola virus
acguauuuggcagaguuaucca

SEQ ID NO: 4089725 - RNA, 17 nt, Variola virus
acgucaaagguuaacau

SEQ ID NO: 4089726 - RNA, 15 nt, Variola virus
acgucauucuaaaag

SEQ ID NO: 4089727 - RNA, 13 nt, Variola virus
acgucauuucauc

SEQ ID NO: 4089728 - RNA, 13 nt, Variola virus
acguuaacagaga

SEQ ID NO: 4089729 - RNA, 19 nt, Variola virus
acguuaauugucuauaaau

SEQ ID NO: 4089730 - RNA, 18 nt, Variola virus
acguucacuaauaaauug

SEQ ID NO: 4089731 - RNA, 14 nt, Variola virus
acguucauuaaaaa

SEQ ID NO: 4089732 - RNA, 12 nt, Variola virus
acguugucuuuc

SEQ ID NO: 4089733 - RNA, 16 nt, Variola virus
acguuuaaacauucuu

SEQ ID NO: 4089734 - RNA, 17 nt, Variola virus
acuaaaaauaaacauug

SEQ ID NO: 4089735 - RNA, 15 nt, Variola virus
acuaaaagacauaau

SEQ ID NO: 4089736 - RNA, 14 nt, Variola virus
acuaaaauauuuua

SEQ ID NO: 4089737 - RNA, 17 nt, Variola virus
acuaaacacacauuauu

SEQ ID NO: 4089738 - RNA, 18 nt, Variola virus
acuaaacacauuauuaau

SEQ ID NO: 4089739 - RNA, 18 nt, Variola virus
acuaaacaguuuauugau

SEQ ID NO: 4089740 - RNA, 14 nt, Variola virus
acuaaaucuucaca

SEQ ID NO: 4089741 - RNA, 16 nt, Variola virus
acuaacaauaacuaga

SEQ ID NO: 4089742 - RNA, 19 nt, Variola virus
acuaacgaaauuaauauga

SEQ ID NO: 4089743 - RNA, 17 nt, Variola virus
acuaagcccaaaaccaa

SEQ ID NO: 4089744 - RNA, 15 nt, Variola virus
acuaauacaucugaa

SEQ ID NO: 4089745 - RNA, 16 nt, Variola virus
acuaauacaucugaaa

SEQ ID NO: 4089746 - RNA, 16 nt, Variola virus
acuaauauaacuuauu

SEQ ID NO: 4089747 - RNA, 21 nt, Variola virus
acuaauuaagcauauucuuaa

SEQ ID NO: 4089748 - RNA, 19 nt, Variola virus
acuaauucauuuucaauaa

SEQ ID NO: 4089749 - RNA, 15 nt, Variola virus
auuuuaauauugaaa

SEQ ID NO: 4089750 - RNA, 19 nt, Variola virus
auuuuacaaauaauggcug

SEQ ID NO: 4089751 - RNA, 13 nt, Variola virus
auuuuacauuauu

SEQ ID NO: 4089752 - RNA, 20 nt, Variola virus
auuuuaccuuauuuuuuaua

SEQ ID NO: 4089753 - RNA, 14 nt, Variola virus
auuuuauugcuaau

SEQ ID NO: 4089754 - RNA, 15 nt, Variola virus
auuuuauuuuggaaa

SEQ ID NO: 4089755 - RNA, 16 nt, Variola virus
auuuucacaaauacua

SEQ ID NO: 4089756 - RNA, 16 nt, Variola virus
auuuucauucacuauu

SEQ ID NO: 4089757 - RNA, 18 nt, Variola virus
auuuuccaaauacaucca

SEQ ID NO: 4089758 - RNA, 18 nt, Variola virus
auuuugcauaacauguau

SEQ ID NO: 4089759 - RNA, 22 nt, Variola virus
auuuuguaguuaauuuaucaca

SEQ ID NO: 4089760 - RNA, 17 nt, Variola virus
auuuugugcaaauagau

SEQ ID NO: 4089761 - RNA, 17 nt, Variola virus
auuuuguggugcaacuu

SEQ ID NO: 4089762 - RNA, 16 nt, Variola virus
auuuuuaauagcugcu

SEQ ID NO: 4089763 - RNA, 22 nt, Variola virus
auuuuuagugaaacauuccaca

SEQ ID NO: 4089764 - RNA, 12 nt, Variola virus
auuuuucaauua

SEQ ID NO: 4089765 - RNA, 20 nt, Variola virus
auuuuucuucauuuauuaua

SEQ ID NO: 4089766 - RNA, 22 nt, Variola virus
auuuuuggaagacagccgucgc

SEQ ID NO: 4089767 - RNA, 15 nt, Variola virus
auuuuuguugauaaa

SEQ ID NO: 4089768 - RNA, 13 nt, Variola virus
auuuuuuaucaua

SEQ ID NO: 4089769 - RNA, 21 nt, Variola virus
caaaaaacuuuacgauagacu

SEQ ID NO: 4089770 - RNA, 20 nt, Variola virus
caaaaaauaaaagaugauuu

SEQ ID NO: 4089771 - RNA, 13 nt, Variola virus
caaaaaauacaau

SEQ ID NO: 4089772 - RNA, 13 nt, Variola virus
caaaaaauauauu

SEQ ID NO: 4089773 - RNA, 13 nt, Variola virus
caaaaaauguaua

SEQ ID NO: 4089774 - RNA, 13 nt, Variola virus
caaaaacgauauu

SEQ ID NO: 4089775 - RNA, 12 nt, Variola virus
caaaaagagagu

SEQ ID NO: 4089776 - RNA, 11 nt, Variola virus
caaaaagcaua

SEQ ID NO: 4089777 - RNA, 18 nt, Variola virus
caaaaagggugcgguacu

SEQ ID NO: 4089778 - RNA, 12 nt, Variola virus
caaaaauauauu

SEQ ID NO: 4089779 - RNA, 13 nt, Variola virus
caaaaaucuauca

SEQ ID NO: 4089780 - RNA, 16 nt, Variola virus
caaaaauguucuuaau

SEQ ID NO: 4089781 - RNA, 19 nt, Variola virus
caaaacaacauauacacau

SEQ ID NO: 4089782 - RNA, 15 nt, Variola virus
caaaacugaaaauau

SEQ ID NO: 4089783 - RNA, 18 nt, Variola virus
caaaagacaugauaauau

SEQ ID NO: 4089784 - RNA, 20 nt, Variola virus
caaaagacguaaauauucua

SEQ ID NO: 4089785 - RNA, 17 nt, Variola virus
caaaagauuaaggagau

SEQ ID NO: 4089786 - RNA, 19 nt, Variola virus
caaaaguaagcauuuccuu

SEQ ID NO: 4089787 - RNA, 13 nt, Variola virus
caaaaguauacau

SEQ ID NO: 4089788 - RNA, 15 nt, Variola virus
caaaaguuaauaaca

SEQ ID NO: 4089789 - RNA, 17 nt, Variola virus
caaaauaacaaauacua

SEQ ID NO: 4089790 - RNA, 16 nt, Variola virus
caaaauacaaaauguu

SEQ ID NO: 4089791 - RNA, 14 nt, Variola virus
caaaaucuuaauau

SEQ ID NO: 4089792 - RNA, 16 nt, Variola virus
caaaaugauagauauu

SEQ ID NO: 4089793 - RNA, 12 nt, Variola virus
caaaaugauaua

SEQ ID NO: 4089794 - RNA, 19 nt, Variola virus
caaaaugaugauauacgau

SEQ ID NO: 4089795 - RNA, 23 nt, Variola virus
caaaauuaaccgauaaaaagacu

SEQ ID NO: 4089796 - RNA, 12 nt, Variola virus
caaaauuacaau

SEQ ID NO: 4089797 - RNA, 19 nt, Variola virus
caaaauugucuaugauauc

SEQ ID NO: 4089798 - RNA, 16 nt, Variola virus
caaaauuuauauauca

SEQ ID NO: 4089799 - RNA, 19 nt, Variola virus
caaacaaguuaaugagaua

SEQ ID NO: 4089800 - RNA, 14 nt, Variola virus
caaacaauguuucu

SEQ ID NO: 4089801 - RNA, 15 nt, Variola virus
caaacauacaucuau

SEQ ID NO: 4089802 - RNA, 14 nt, Variola virus
caaacugcugaagu

SEQ ID NO: 4089803 - RNA, 20 nt, Variola virus
caaacuuagaaccaaaugau

SEQ ID NO: 4089804 - RNA, 11 nt, Variola virus
caaagaaagag

SEQ ID NO: 4089805 - RNA, 13 nt, Variola virus
caaagauauggaa

SEQ ID NO: 4089806 - RNA, 18 nt, Variola virus
caaagauucuguguauaa

SEQ ID NO: 4089807 - RNA, 19 nt, Variola virus
caaagauuuaaauccuaau

SEQ ID NO: 4089808 - RNA, 21 nt, Variola virus
caaagcggguuauaaaguaaa

SEQ ID NO: 4089809 - RNA, 19 nt, Variola virus
caaaggauguuuaacauuc

SEQ ID NO: 4089810 - RNA, 18 nt, Variola virus
caaagguacuauuucuac

SEQ ID NO: 4089811 - RNA, 14 nt, Variola virus
caaagugaaacaau

SEQ ID NO: 4089812 - RNA, 14 nt, Variola virus
caaauaaaaaguau

SEQ ID NO: 4089813 - RNA, 21 nt, Variola virus
caaauaaagcgaaaaauaauu

SEQ ID NO: 4089814 - RNA, 23 nt, Variola virus
caaauaaagcgaaaaauaauuau

SEQ ID NO: 4089815 - RNA, 22 nt, Variola virus
caaauaaaucacuaaauaauau

SEQ ID NO: 4089816 - RNA, 18 nt, Variola virus
caaauaagaagguacaau

SEQ ID NO: 4089817 - RNA, 10 nt, Variola virus
caaauacuug

SEQ ID NO: 4089818 - RNA, 19 nt, Variola virus
caaauagagauaaaacaag

SEQ ID NO: 4089819 - RNA, 23 nt, Variola virus
caaauaucggaauaaguagacau

SEQ ID NO: 4089820 - RNA, 22 nt, Variola virus
caaauaucggcauuuauguuuc

SEQ ID NO: 4089821 - RNA, 17 nt, Variola virus
caaauaucuuuaugaau

SEQ ID NO: 4089822 - RNA, 18 nt, Variola virus
caaauaucuuuaugaauu

SEQ ID NO: 4089823 - RNA, 21 nt, Variola virus
caaauauucacaagaugaauu

SEQ ID NO: 4089824 - RNA, 14 nt, Variola virus
caaaucaaaacaaa

SEQ ID NO: 4089825 - RNA, 15 nt, Variola virus
caaaucaaaaguauu

SEQ ID NO: 4089826 - RNA, 22 nt, Variola virus
caaaucuaaauucacaucuuca

SEQ ID NO: 4089827 - RNA, 18 nt, Variola virus
caaaucuauaacaugcua

SEQ ID NO: 4089828 - RNA, 13 nt, Variola virus
caaaucuggaaaa

SEQ ID NO: 4089829 - RNA, 18 nt, Variola virus
caaaucuucuuauaagau

SEQ ID NO: 4089830 - RNA, 20 nt, Variola virus
caaaugauauaagacuaaca

SEQ ID NO: 4089831 - RNA, 14 nt, Variola virus
caaauguuaaacau

SEQ ID NO: 4089832 - RNA, 22 nt, Variola virus
caaauguuaaacauuaauugau

SEQ ID NO: 4089833 - RNA, 14 nt, Variola virus
caaauguugucaaa

SEQ ID NO: 4089834 - RNA, 17 nt, Variola virus
caaauguugucaaauga

SEQ ID NO: 4089835 - RNA, 18 nt, Variola virus
caaauuaaauucuggaau

SEQ ID NO: 4089836 - RNA, 12 nt, Variola virus
caaauuauucua

SEQ ID NO: 4089837 - RNA, 13 nt, Variola virus
caaauuuaucuac

SEQ ID NO: 4089838 - RNA, 20 nt, Variola virus
caaauuuauuccauauuuua

SEQ ID NO: 4089839 - RNA, 23 nt, Variola virus
caaauuuuuucuuuaauauuuua

SEQ ID NO: 4089840 - RNA, 13 nt, Variola virus
caacaaacauauu

SEQ ID NO: 4089841 - RNA, 15 nt, Variola virus
caacaacauauaauu

SEQ ID NO: 4089842 - RNA, 13 nt, Variola virus
caacacuauguua

SEQ ID NO: 4089843 - RNA, 19 nt, Variola virus
caacauaaauaauucuaga

SEQ ID NO: 4089844 - RNA, 13 nt, Variola virus
caacauuguagaa

SEQ ID NO: 4089845 - RNA, 23 nt, Variola virus
caaccauuaacggaugaaaauaa

SEQ ID NO: 4089846 - RNA, 16 nt, Variola virus
caaccuguauacugua

SEQ ID NO: 4089847 - RNA, 21 nt, Variola virus
caacuaucguuggaaaaugau

SEQ ID NO: 4089848 - RNA, 17 nt, Variola virus
caacucucucauuuucu

SEQ ID NO: 4089849 - RNA, 12 nt, Variola virus
caacucucuuuu

SEQ ID NO: 4089850 - RNA, 20 nt, Variola virus
caacuuaaacaaaauacaau

SEQ ID NO: 4089851 - RNA, 13 nt, Variola virus
caacuuaaugaag

SEQ ID NO: 4089852 - RNA, 16 nt, Variola virus
caacuuacuaggcagc

SEQ ID NO: 4089853 - RNA, 16 nt, Variola virus
caagaaguuuaucuac

SEQ ID NO: 4089854 - RNA, 23 nt, Variola virus
caagaauccgaucccacuucugu

SEQ ID NO: 4089855 - RNA, 16 nt, Variola virus
caagacuaacacacaa

SEQ ID NO: 4089856 - RNA, 21 nt, Variola virus
caagagaaugaaauauauaca

SEQ ID NO: 4089857 - RNA, 17 nt, Variola virus
caagagagcagaaauaa

SEQ ID NO: 4089858 - RNA, 15 nt, Variola virus
caagauauauauacu

SEQ ID NO: 4089859 - RNA, 21 nt, Variola virus
caagauccucucuuaaaugaa

SEQ ID NO: 4089860 - RNA, 16 nt, Variola virus
caagauuccuuuucua

SEQ ID NO: 4089861 - RNA, 17 nt, Variola virus
caaggaacuaaauagau

SEQ ID NO: 4089862 - RNA, 20 nt, Variola virus
caagguaaccucuuaggaag

SEQ ID NO: 4089863 - RNA, 12 nt, Variola virus
caaguacauaaa

SEQ ID NO: 4089864 - RNA, 14 nt, Variola virus
caaguauccaucau

SEQ ID NO: 4089865 - RNA, 22 nt, Variola virus
caaguauuauuuuuggaagaca

SEQ ID NO: 4089866 - RNA, 22 nt, Variola virus
caaguuuccuguaaauuuucua

SEQ ID NO: 4089867 - RNA, 19 nt, Variola virus
caauaaaaauaaacuagaa

SEQ ID NO: 4089868 - RNA, 20 nt, Variola virus
caauaaaaauaaacuagaaa

SEQ ID NO: 4089869 - RNA, 14 nt, Variola virus
caauaaauguccaa

SEQ ID NO: 4089870 - RNA, 18 nt, Variola virus
caauaacacaaucaugau

SEQ ID NO: 4089871 - RNA, 15 nt, Variola virus
caauaacauaacucu

SEQ ID NO: 4089872 - RNA, 18 nt, Variola virus
caauaaguuuuagauauu

SEQ ID NO: 4089873 - RNA, 18 nt, Variola virus
caauaauaguaacauauu

SEQ ID NO: 4089874 - RNA, 18 nt, Variola virus
caauacacacaauagaca

SEQ ID NO: 4089875 - RNA, 19 nt, Variola virus
caauacaccaauagaugau

SEQ ID NO: 4089876 - RNA, 15 nt, Variola virus
ccauuaagugacauu

SEQ ID NO: 4089877 - RNA, 21 nt, Variola virus
ccauuauaaaacuuaugauua

SEQ ID NO: 4089878 - RNA, 16 nt, Variola virus
ccauuucaaaauguua

SEQ ID NO: 4089879 - RNA, 17 nt, Variola virus
ccauuuguguaucuaua

SEQ ID NO: 4089880 - RNA, 22 nt, Variola virus
cccaaucuuguuauaaacacac

SEQ ID NO: 4089881 - RNA, 24 nt, Variola virus
cccaugcuauauuccuguuaucau

SEQ ID NO: 4089882 - RNA, 13 nt, Variola virus
ccggcgaaaagau

SEQ ID NO: 4089883 - RNA, 21 nt, Variola virus
ccgguucuuaauauuguauug

SEQ ID NO: 4089884 - RNA, 19 nt, Variola virus
ccgucaagagaguuaucug

SEQ ID NO: 4089885 - RNA, 20 nt, Variola virus
ccguuaguuuaauauccuua

SEQ ID NO: 4089886 - RNA, 18 nt, Variola virus
ccguuuuccccucucugu

SEQ ID NO: 4089887 - RNA, 20 nt, Variola virus
ccuacacuauuauaugauua

SEQ ID NO: 4089888 - RNA, 22 nt, Variola virus
ccuaccaaaaucaauauaucau

SEQ ID NO: 4089889 - RNA, 15 nt, Variola virus
ccuagaacaauguca

SEQ ID NO: 4089890 - RNA, 14 nt, Variola virus
ccuauuuguagaag

SEQ ID NO: 4089891 - RNA, 19 nt, Variola virus
ccucaaucauguacuagcu

SEQ ID NO: 4089892 - RNA, 19 nt, Variola virus
ccucauuuaucauguuguc

SEQ ID NO: 4089893 - RNA, 12 nt, Variola virus
ccuccuccacca

SEQ ID NO: 4089894 - RNA, 20 nt, Variola virus
ccucugccuuuuuauacaua

SEQ ID NO: 4089895 - RNA, 15 nt, Variola virus
ccuggaaaaauacuu

SEQ ID NO: 4089896 - RNA, 19 nt, Variola virus
ccuguauucuuuuuaagau

SEQ ID NO: 4089897 - RNA, 20 nt, Variola virus
ccuuaugcauccaaaguauu

SEQ ID NO: 4089898 - RNA, 18 nt, Variola virus
ccuuguuugauaaaugua

SEQ ID NO: 4089899 - RNA, 16 nt, Variola virus
ccuuuacagugaauaa

SEQ ID NO: 4089900 - RNA, 17 nt, Variola virus
ccuuuauuaauucucuc

SEQ ID NO: 4089901 - RNA, 23 nt, Variola virus
ccuuugauaaauaguaucaucua

SEQ ID NO: 4089902 - RNA, 21 nt, Variola virus
ccuuuggugaauccaucucua

SEQ ID NO: 4089903 - RNA, 20 nt, Variola virus
ccuuugucuaccaucuccuc

SEQ ID NO: 4089904 - RNA, 21 nt, Variola virus
cgaaaaacuuuaauguagaua

SEQ ID NO: 4089905 - RNA, 18 nt, Variola virus
cgaaauauauuuguagua

SEQ ID NO: 4089906 - RNA, 14 nt, Variola virus
cgaaccagaaagug

SEQ ID NO: 4089907 - RNA, 22 nt, Variola virus
cgaacuccauaaauuucuccaa

SEQ ID NO: 4089908 - RNA, 14 nt, Variola virus
cgaacuuuaaacag

SEQ ID NO: 4089909 - RNA, 22 nt, Variola virus
cgaauacgauacuuauaaggcu

SEQ ID NO: 4089910 - RNA, 18 nt, Variola virus
cgaauauaucaaaacuac

SEQ ID NO: 4089911 - RNA, 22 nt, Variola virus
cgaauaucguucucuaaauguc

SEQ ID NO: 4089912 - RNA, 21 nt, Variola virus
cgaauauugggcaaagauauu

SEQ ID NO: 4089913 - RNA, 14 nt, Variola virus
cgaaugaauguuuu

SEQ ID NO: 4089914 - RNA, 13 nt, Variola virus
cgacaagauaucg

SEQ ID NO: 4089915 - RNA, 18 nt, Variola virus
cgacaucuggauuucaga

SEQ ID NO: 4089916 - RNA, 20 nt, Variola virus
cgacuacucuggguaacaaa

SEQ ID NO: 4089917 - RNA, 12 nt, Variola virus
cgagacuauuau

SEQ ID NO: 4089918 - RNA, 18 nt, Variola virus
cgagauacccaauagaau

SEQ ID NO: 4089919 - RNA, 16 nt, Variola virus
cgaguuuaaaacuucu

SEQ ID NO: 4089920 - RNA, 21 nt, Variola virus
cgauaaaauccuccuaucaau

SEQ ID NO: 4089921 - RNA, 17 nt, Variola virus
cgauaacuugauuucaa

SEQ ID NO: 4089922 - RNA, 19 nt, Variola virus
cgauauuaaccuaaaagag

SEQ ID NO: 4089923 - RNA, 15 nt, Variola virus
cgauauuaguacaga

SEQ ID NO: 4089924 - RNA, 15 nt, Variola virus
cgaucuaauaacaau

SEQ ID NO: 4089925 - RNA, 16 nt, Variola virus
cgaugaugcugcuaua

SEQ ID NO: 4089926 - RNA, 16 nt, Variola virus
cgauguggaaauuaca

SEQ ID NO: 4089927 - RNA, 17 nt, Variola virus
cgaugugucuacauaaa

SEQ ID NO: 4089928 - RNA, 17 nt, Variola virus
cgauucaucuauacgau

SEQ ID NO: 4089929 - RNA, 19 nt, Variola virus
cgauucuauauauacucuu

SEQ ID NO: 4089930 - RNA, 22 nt, Variola virus
cgauugagauuuugcauacaau

SEQ ID NO: 4089931 - RNA, 19 nt, Variola virus
cgauugauuuggaauucuu

SEQ ID NO: 4089932 - RNA, 18 nt, Variola virus
cgauuguauaguuaauaa

SEQ ID NO: 4089933 - RNA, 20 nt, Variola virus
cgauuuauaaaaaaauaccg

SEQ ID NO: 4089934 - RNA, 14 nt, Variola virus
cgcagaaaauaucu

SEQ ID NO: 4089935 - RNA, 13 nt, Variola virus
cgcauuaaaugau

SEQ ID NO: 4089936 - RNA, 16 nt, Variola virus
cgcauuaacaaaaucu

SEQ ID NO: 4089937 - RNA, 21 nt, Variola virus
cgcauuaguaagugcuacaaa

SEQ ID NO: 4089938 - RNA, 14 nt, Variola virus
cgcccuuguauguu

SEQ ID NO: 4089939 - RNA, 19 nt, Variola virus
cgcggaaaaaacauaauag

SEQ ID NO: 4089940 - RNA, 20 nt, Variola virus
cgcuacaauuauagaacgaa

SEQ ID NO: 4089941 - RNA, 14 nt, Variola virus
cgcuauagcauugu

SEQ ID NO: 4089942 - RNA, 23 nt, Variola virus
cggaaaaucgucuucauaaagca

SEQ ID NO: 4089943 - RNA, 14 nt, Variola virus
cggaagacaaucaa

SEQ ID NO: 4089944 - RNA, 18 nt, Variola virus
cggagauuuaaucuguaa

SEQ ID NO: 4089945 - RNA, 13 nt, Variola virus
cggauacgacauc

SEQ ID NO: 4089946 - RNA, 18 nt, Variola virus
cggauuaauaucucuauc

SEQ ID NO: 4089947 - RNA, 15 nt, Variola virus
cggcauuagaugaga

SEQ ID NO: 4089948 - RNA, 20 nt, Variola virus
cggcgauucuuuuucuuucg

SEQ ID NO: 4089949 - RNA, 21 nt, Variola virus
cgggucaucugguuuaggaaa

SEQ ID NO: 4089950 - RNA, 15 nt, Variola virus
cgguacaacauucca

SEQ ID NO: 4089951 - RNA, 17 nt, Variola virus
cgguguaauagaauuua

SEQ ID NO: 4089952 - RNA, 23 nt, Variola virus
cguaaaccauuuuucagaaagua

SEQ ID NO: 4089953 - RNA, 18 nt, Variola virus
cguaauacccauguuuaa

SEQ ID NO: 4089954 - RNA, 14 nt, Variola virus
cguaauuuuuuaua

SEQ ID NO: 4089955 - RNA, 16 nt, Variola virus
cguagaaaacuauuac

SEQ ID NO: 4089956 - RNA, 15 nt, Variola virus
cguagacuuucuugc

SEQ ID NO: 4089957 - RNA, 12 nt, Variola virus
cguauacaguau

SEQ ID NO: 4089958 - RNA, 16 nt, Variola virus
cguauaucaucaucug

SEQ ID NO: 4089959 - RNA, 18 nt, Variola virus
cguauauuuuauacauuu

SEQ ID NO: 4089960 - RNA, 14 nt, Variola virus
cguaucuucugaaa

SEQ ID NO: 4089961 - RNA, 23 nt, Variola virus
cguaugugguaugauacaaucaa

SEQ ID NO: 4089962 - RNA, 22 nt, Variola virus
cgucaauguacuuaacaugauu

SEQ ID NO: 4089963 - RNA, 16 nt, Variola virus
cguccaucagcauugu

SEQ ID NO: 4089964 - RNA, 15 nt, Variola virus
cgucuagaugauaua

SEQ ID NO: 4089965 - RNA, 17 nt, Variola virus
cgucuauauaguauuuu

SEQ ID NO: 4089966 - RNA, 12 nt, Variola virus
cgucuauccauu

SEQ ID NO: 4089967 - RNA, 12 nt, Variola virus
cgucucuguauu

SEQ ID NO: 4089968 - RNA, 22 nt, Variola virus
cgucugucaugauaaaaauuua

SEQ ID NO: 4089969 - RNA, 12 nt, Variola virus
cgucuguggaug

SEQ ID NO: 4089970 - RNA, 15 nt, Variola virus
cgucuuuauuuucua

SEQ ID NO: 4089971 - RNA, 21 nt, Variola virus
cgucuuuauuuucuauuuuua

SEQ ID NO: 4089972 - RNA, 18 nt, Variola virus
cguggauaauauuucuag

SEQ ID NO: 4089973 - RNA, 22 nt, Variola virus
cguguauuaaauagaauauuua

SEQ ID NO: 4089974 - RNA, 15 nt, Variola virus
cguguguuucaggau

SEQ ID NO: 4089975 - RNA, 12 nt, Variola virus
cguuacuauuau

SEQ ID NO: 4089976 - RNA, 13 nt, Variola virus
cguuagacauaaa

SEQ ID NO: 4089977 - RNA, 20 nt, Variola virus
cguuaucauuugaugauaug

SEQ ID NO: 4089978 - RNA, 21 nt, Variola virus
cguucaacaacguacauacua

SEQ ID NO: 4089979 - RNA, 13 nt, Variola virus
cguuguuaagaua

SEQ ID NO: 4089980 - RNA, 16 nt, Variola virus
cguuuaaagucauuau

SEQ ID NO: 4089981 - RNA, 14 nt, Variola virus
cguuuauagauguu

SEQ ID NO: 4089982 - RNA, 22 nt, Variola virus
cguuucauaaagagaucaggaa

SEQ ID NO: 4089983 - RNA, 22 nt, Variola virus
cuaaaaguauagcaucuggagu

SEQ ID NO: 4089984 - RNA, 17 nt, Variola virus
cuaaaauuuugaucauc

SEQ ID NO: 4089985 - RNA, 15 nt, Variola virus
cuaaacaagcuaucu

SEQ ID NO: 4089986 - RNA, 12 nt, Variola virus
cuaaacuagugg

SEQ ID NO: 4089987 - RNA, 20 nt, Variola virus
cuaaagacucuaaaugguug

SEQ ID NO: 4089988 - RNA, 20 nt, Variola virus
cuaaaggaucugacccuaau

SEQ ID NO: 4089989 - RNA, 14 nt, Variola virus
cuaaaggaugagua

SEQ ID NO: 4089990 - RNA, 12 nt, Variola virus
cuaaauccucau

SEQ ID NO: 4089991 - RNA, 12 nt, Variola virus
cuaaauuagaac

SEQ ID NO: 4089992 - RNA, 22 nt, Variola virus
cuaaauuuuguugauuacucuu

SEQ ID NO: 4089993 - RNA, 13 nt, Variola virus
cuaacaaaacuau

SEQ ID NO: 4089994 - RNA, 23 nt, Variola virus
cuaacauacgagacauguuagua

SEQ ID NO: 4089995 - RNA, 17 nt, Variola virus
cuaacauuaaaaugucu

SEQ ID NO: 4089996 - RNA, 19 nt, Variola virus
cuaagagaaaucuuuagac

SEQ ID NO: 4089997 - RNA, 16 nt, Variola virus
cuaaggaguaaaauag

SEQ ID NO: 4089998 - RNA, 21 nt, Variola virus
cuaaguucuuugaucucuuuu

SEQ ID NO: 4089999 - RNA, 15 nt, Variola virus
cuaaguuucuuuccu

SEQ ID NO: 4090000 - RNA, 22 nt, Variola virus
cuaauaacguuuuuauuuguaa

SEQ ID NO: 4090001 - RNA, 15 nt, Variola virus
cuaauagacggcauu

SEQ ID NO: 4090002 - RNA, 23 nt, Variola virus
gaaaauaaaucacugacgauauu

SEQ ID NO: 4090003 - RNA, 21 nt, Variola virus
gaaaauaauccugaauauauu

SEQ ID NO: 4090004 - RNA, 22 nt, Variola virus
gaaaauaaugacgcguacgaua

SEQ ID NO: 4090005 - RNA, 16 nt, Variola virus
gaaaauacuaaaucag

SEQ ID NO: 4090006 - RNA, 12 nt, Variola virus
gaaaauacuaua

SEQ ID NO: 4090007 - RNA, 11 nt, Variola virus
gaaaauacuua

SEQ ID NO: 4090008 - RNA, 15 nt, Variola virus
gaaaauauaaauuaa

SEQ ID NO: 4090009 - RNA, 21 nt, Variola virus
gaaaauauuguguuuaaucuu

SEQ ID NO: 4090010 - RNA, 15 nt, Variola virus
gaaaaucuaauaacu

SEQ ID NO: 4090011 - RNA, 21 nt, Variola virus
gaaaaugugcuucuaugagau

SEQ ID NO: 4090012 - RNA, 18 nt, Variola virus
gaaacaauucauaauuau

SEQ ID NO: 4090013 - RNA, 20 nt, Variola virus
gaaacacuuauuaaguucuu

SEQ ID NO: 4090014 - RNA, 18 nt, Variola virus
gaaacaguuccauaugau

SEQ ID NO: 4090015 - RNA, 22 nt, Variola virus
gaaacauccaucgauacauaua

SEQ ID NO: 4090016 - RNA, 18 nt, Variola virus
gaaacaucucuucuaguu

SEQ ID NO: 4090017 - RNA, 23 nt, Variola virus
gaaacguaauauccucaauaacg

SEQ ID NO: 4090018 - RNA, 14 nt, Variola virus
gaaacuaucuuuuu

SEQ ID NO: 4090019 - RNA, 15 nt, Variola virus
gaaagauuaaaucau

SEQ ID NO: 4090020 - RNA, 22 nt, Variola virus
gaaagauuaaaucauuaaauga

SEQ ID NO: 4090021 - RNA, 21 nt, Variola virus
gaaagauucuauaauaaugaa

SEQ ID NO: 4090022 - RNA, 15 nt, Variola virus
gaaagcgagaaauaa

SEQ ID NO: 4090023 - RNA, 21 nt, Variola virus
gaaaguaugauauaauacuua

SEQ ID NO: 4090024 - RNA, 23 nt, Variola virus
gaaaguauuuuuguguuaaaaca

SEQ ID NO: 4090025 - RNA, 15 nt, Variola virus
gaaauaaauaaugaa

SEQ ID NO: 4090026 - RNA, 21 nt, Variola virus
gaaauaaccgcaugauuauuu

SEQ ID NO: 4090027 - RNA, 16 nt, Variola virus
gaaauaauuuuuaguu

SEQ ID NO: 4090028 - RNA, 18 nt, Variola virus
gaaauagaggaagacaca

SEQ ID NO: 4090029 - RNA, 17 nt, Variola virus
gaaauagauagaaucua

SEQ ID NO: 4090030 - RNA, 19 nt, Variola virus
gaaauagcucguuucuauu

SEQ ID NO: 4090031 - RNA, 13 nt, Variola virus
gaaauauauuaag

SEQ ID NO: 4090032 - RNA, 20 nt, Variola virus
gaaauauauuuguaguacaa

SEQ ID NO: 4090033 - RNA, 18 nt, Variola virus
gaaauauguaauaaucau

SEQ ID NO: 4090034 - RNA, 16 nt, Variola virus
gaaaucaacauaaugu

SEQ ID NO: 4090035 - RNA, 23 nt, Variola virus
gaaaucuuuagacgguugagaaa

SEQ ID NO: 4090036 - RNA, 20 nt, Variola virus
gaaauggcguauuuaagagu

SEQ ID NO: 4090037 - RNA, 15 nt, Variola virus
gaaaugguacaauca

SEQ ID NO: 4090038 - RNA, 20 nt, Variola virus
gaaaugucuacauaaaucua

SEQ ID NO: 4090039 - RNA, 14 nt, Variola virus
gaaauuaauaugau

SEQ ID NO: 4090040 - RNA, 17 nt, Variola virus
gaaauuagaaaguaaug

SEQ ID NO: 4090041 - RNA, 17 nt, Variola virus
gaaauuguuauaaugcu

SEQ ID NO: 4090042 - RNA, 17 nt, Variola virus
gaacaaacgcuacuaua

SEQ ID NO: 4090043 - RNA, 14 nt, Variola virus
gaacaauaaaagag

SEQ ID NO: 4090044 - RNA, 18 nt, Variola virus
gaacaauaaacaaaauac

SEQ ID NO: 4090045 - RNA, 19 nt, Variola virus
gaacagcuuuuguauauac

SEQ ID NO: 4090046 - RNA, 15 nt, Variola virus
gaacauaaacaaauu

SEQ ID NO: 4090047 - RNA, 15 nt, Variola virus
gaacauaauaauaua

SEQ ID NO: 4090048 - RNA, 20 nt, Variola virus
gaacauacuuuccuguagua

SEQ ID NO: 4090049 - RNA, 16 nt, Variola virus
gaacauauaaauguag

SEQ ID NO: 4090050 - RNA, 14 nt, Variola virus
gaacaucuuccaua

SEQ ID NO: 4090051 - RNA, 21 nt, Variola virus
gaaccacuauguuaauacuua

SEQ ID NO: 4090052 - RNA, 15 nt, Variola virus
gaacgauaauaacuu

SEQ ID NO: 4090053 - RNA, 14 nt, Variola virus
gaacgauaaugaau

SEQ ID NO: 4090054 - RNA, 13 nt, Variola virus
gaacgccauaaua

SEQ ID NO: 4090055 - RNA, 16 nt, Variola virus
gaacgccgguauauag

SEQ ID NO: 4090056 - RNA, 22 nt, Variola virus
gaacguaguaguaaguauuuau

SEQ ID NO: 4090057 - RNA, 13 nt, Variola virus
gaacuaccaauau

SEQ ID NO: 4090058 - RNA, 24 nt, Variola virus
gaacuauauuaagauuaucuauca

SEQ ID NO: 4090059 - RNA, 19 nt, Variola virus
gaacuaucauagaugagaa

SEQ ID NO: 4090060 - RNA, 22 nt, Variola virus
gaacucuaaucaaaaucuuaau

SEQ ID NO: 4090061 - RNA, 21 nt, Variola virus
gaacucuguuucuguaucuau

SEQ ID NO: 4090062 - RNA, 18 nt, Variola virus
gaacuucugaucauuaau

SEQ ID NO: 4090063 - RNA, 20 nt, Variola virus
gaacuuguuuaaugaugaau

SEQ ID NO: 4090064 - RNA, 22 nt, Variola virus
gaagaacguguauuaaauagaa

SEQ ID NO: 4090065 - RNA, 16 nt, Variola virus
gaagacaauauuauca

SEQ ID NO: 4090066 - RNA, 23 nt, Variola virus
gaagagcuguacaauaguuuuua

SEQ ID NO: 4090067 - RNA, 13 nt, Variola virus
gaagauauuacau

SEQ ID NO: 4090068 - RNA, 20 nt, Variola virus
gaagaucgcguuaaucaugu

SEQ ID NO: 4090069 - RNA, 15 nt, Variola virus
gaagauuauauucua

SEQ ID NO: 4090070 - RNA, 19 nt, Variola virus
gaaggaugacaauaaugac

SEQ ID NO: 4090071 - RNA, 13 nt, Variola virus
gaagguauuucca

SEQ ID NO: 4090072 - RNA, 18 nt, Variola virus
gaaguacuuauuaaaacc

SEQ ID NO: 4090073 - RNA, 23 nt, Variola virus
gaaguauaucugaguaugaugau

SEQ ID NO: 4090074 - RNA, 16 nt, Variola virus
gaagugauauuugaaa

SEQ ID NO: 4090075 - RNA, 16 nt, Variola virus
gaaguggauauacaua

SEQ ID NO: 4090076 - RNA, 21 nt, Variola virus
gaaguuccgguugccauguau

SEQ ID NO: 4090077 - RNA, 20 nt, Variola virus
gaaguuuucccaaaaaauau

SEQ ID NO: 4090078 - RNA, 14 nt, Variola virus
gaauaaauauccuu

SEQ ID NO: 4090079 - RNA, 14 nt, Variola virus
gaauaaauuauuau

SEQ ID NO: 4090080 - RNA, 11 nt, Variola virus
gaauaagaaca

SEQ ID NO: 4090081 - RNA, 22 nt, Variola virus
gaauaauaugacucaugaucua

SEQ ID NO: 4090082 - RNA, 13 nt, Variola virus
gaauaauguuucu

SEQ ID NO: 4090083 - RNA, 15 nt, Variola virus
gaauacauggaagaa

SEQ ID NO: 4090084 - RNA, 22 nt, Variola virus
gaauacucuacagaguugauug

SEQ ID NO: 4090085 - RNA, 23 nt, Variola virus
gaauagccaccggaaacuuucua

SEQ ID NO: 4090086 - RNA, 23 nt, Variola virus
gaauagcggauauagauauuaaa

SEQ ID NO: 4090087 - RNA, 17 nt, Variola virus
gaauagguuuuugaauu

SEQ ID NO: 4090088 - RNA, 19 nt, Variola virus
gaauaguuuguuuuggaaa

SEQ ID NO: 4090089 - RNA, 15 nt, Variola virus
gaauauaauaaucua

SEQ ID NO: 4090090 - RNA, 12 nt, Variola virus
gaauauaaucuu

SEQ ID NO: 4090091 - RNA, 20 nt, Variola virus
gaauauacaaaguuaguaca

SEQ ID NO: 4090092 - RNA, 13 nt, Variola virus
gaauauaguuaua

SEQ ID NO: 4090093 - RNA, 16 nt, Variola virus
gaauauaucuauaauu

SEQ ID NO: 4090094 - RNA, 22 nt, Variola virus
gaauauauguauguaaaaauau

SEQ ID NO: 4090095 - RNA, 18 nt, Variola virus
gaauaucacauaucaugu

SEQ ID NO: 4090096 - RNA, 18 nt, Variola virus
gaauaucccuaaguucuu

SEQ ID NO: 4090097 - RNA, 22 nt, Variola virus
gaauaugauuucagauacuaua

SEQ ID NO: 4090098 - RNA, 17 nt, Variola virus
gaauauguuauaauaga

SEQ ID NO: 4090099 - RNA, 20 nt, Variola virus
gaauauuagcacauucauug

SEQ ID NO: 4090100 - RNA, 18 nt, Variola virus
gaauauuauuaugaugau

SEQ ID NO: 4090101 - RNA, 14 nt, Variola virus
gaaucaauauuaau

SEQ ID NO: 4090102 - RNA, 15 nt, Variola virus
gaaucauaaagaaca

SEQ ID NO: 4090103 - RNA, 18 nt, Variola virus
gaaucccuacauauuuua

SEQ ID NO: 4090104 - RNA, 14 nt, Variola virus
gaauccuauacucu

SEQ ID NO: 4090105 - RNA, 19 nt, Variola virus
gaaucgguuuuauacuguu

SEQ ID NO: 4090106 - RNA, 13 nt, Variola virus
gaaucugugaaau

SEQ ID NO: 4090107 - RNA, 19 nt, Variola virus
gaaugaagauaucauuaau

SEQ ID NO: 4090108 - RNA, 16 nt, Variola virus
gaaugcgauacauuga

SEQ ID NO: 4090109 - RNA, 23 nt, Variola virus
gaauggaaaccuuuaaucuauau

SEQ ID NO: 4090110 - RNA, 21 nt, Variola virus
gaaugucauuuguauuuuaua

SEQ ID NO: 4090111 - RNA, 17 nt, Variola virus
gaauguuuuacucugga

SEQ ID NO: 4090112 - RNA, 17 nt, Variola virus
gaauuacauuucuuguu

SEQ ID NO: 4090113 - RNA, 23 nt, Variola virus
gaauuacuuuacauauaauauca

SEQ ID NO: 4090114 - RNA, 15 nt, Variola virus
gaauuaguuaaucuu

SEQ ID NO: 4090115 - RNA, 19 nt, Variola virus
gaauugauaauauaaauau

SEQ ID NO: 4090116 - RNA, 20 nt, Variola virus
gaauuggaacuaguauuuau

SEQ ID NO: 4090117 - RNA, 12 nt, Variola virus
gaauuucccaaa

SEQ ID NO: 4090118 - RNA, 20 nt, Variola virus
gaauuugaucuauugcccua

SEQ ID NO: 4090119 - RNA, 18 nt, Variola virus
gacaaaauauuagaaaaa

SEQ ID NO: 4090120 - RNA, 19 nt, Variola virus
gacaagauccguuaguuua

SEQ ID NO: 4090121 - RNA, 21 nt, Variola virus
gacaauauuuaguuuauucau

SEQ ID NO: 4090122 - RNA, 15 nt, Variola virus
gacaaugaauugcau

SEQ ID NO: 4090123 - RNA, 16 nt, Variola virus
gacacaccaaaaaaga

SEQ ID NO: 4090124 - RNA, 13 nt, Variola virus
gacagaaaaaugu

SEQ ID NO: 4090125 - RNA, 18 nt, Variola virus
gacagaaccuugugucau

SEQ ID NO: 4090126 - RNA, 23 nt, Variola virus
gacaguaauuucuuuauuaucua

SEQ ID NO: 4090127 - RNA, 16 nt, Variola virus
ucaaaauauuaaacca

SEQ ID NO: 4090128 - RNA, 16 nt, Variola virus
ucaaacacgauauuca

SEQ ID NO: 4090129 - RNA, 23 nt, Variola virus
ucaaacgaauaaacaauuucaca

SEQ ID NO: 4090130 - RNA, 19 nt, Variola virus
ucaaacggugcagacguau

SEQ ID NO: 4090131 - RNA, 12 nt, Variola virus
ucaaagaaauaa

SEQ ID NO: 4090132 - RNA, 19 nt, Variola virus
ucaaaguccggauguauua

SEQ ID NO: 4090133 - RNA, 14 nt, Variola virus
ucaaauacuucaaa

SEQ ID NO: 4090134 - RNA, 16 nt, Variola virus
ucaaauaggagauauu

SEQ ID NO: 4090135 - RNA, 19 nt, Variola virus
ucaaauggauaauuuaaga

SEQ ID NO: 4090136 - RNA, 12 nt, Variola virus
ucaaauguagug

SEQ ID NO: 4090137 - RNA, 20 nt, Variola virus
ucaaauucucauucauguau

SEQ ID NO: 4090138 - RNA, 20 nt, Variola virus
ucaacaaucuaauacaaaau

SEQ ID NO: 4090139 - RNA, 13 nt, Variola virus
ucaacauauuaau

SEQ ID NO: 4090140 - RNA, 14 nt, Variola virus
ucaacaucuuuaau

SEQ ID NO: 4090141 - RNA, 16 nt, Variola virus
ucaacggaaaacauuu

SEQ ID NO: 4090142 - RNA, 18 nt, Variola virus
ucaacuaaagggauuuua

SEQ ID NO: 4090143 - RNA, 14 nt, Variola virus
ucaacucaugugua

SEQ ID NO: 4090144 - RNA, 14 nt, Variola virus
ucaacuuucauagc

SEQ ID NO: 4090145 - RNA, 17 nt, Variola virus
ucaaggaugucauagau

SEQ ID NO: 4090146 - RNA, 14 nt, Variola virus
ucaagucaauuauc

SEQ ID NO: 4090147 - RNA, 17 nt, Variola virus
ucaaguuaugaaaauag

SEQ ID NO: 4090148 - RNA, 12 nt, Variola virus
ucaauaaaugug

SEQ ID NO: 4090149 - RNA, 17 nt, Variola virus
ucaauagauugguaaau

SEQ ID NO: 4090150 - RNA, 16 nt, Variola virus
ucaauaugucaucuau

SEQ ID NO: 4090151 - RNA, 18 nt, Variola virus
ucaaucaaggaacuaaau

SEQ ID NO: 4090152 - RNA, 20 nt, Variola virus
ucaaucauccuaaagaguau

SEQ ID NO: 4090153 - RNA, 19 nt, Variola virus
ucaaucucuucuauuuuca

SEQ ID NO: 4090154 - RNA, 19 nt, Variola virus
ucaaugauuaguuucuuaa

SEQ ID NO: 4090155 - RNA, 19 nt, Variola virus
ucaaugcggguguuauuca

SEQ ID NO: 4090156 - RNA, 21 nt, Variola virus
ucaauggaccccaacaucuuu

SEQ ID NO: 4090157 - RNA, 23 nt, Variola virus
ucaaugugaauguauucacuuaa

SEQ ID NO: 4090158 - RNA, 20 nt, Variola virus
ucaauguguguaacuccaga

SEQ ID NO: 4090159 - RNA, 23 nt, Variola virus
ucaauuaacauucuuauaacauc

SEQ ID NO: 4090160 - RNA, 21 nt, Variola virus
ucaauuggcacgaacaaaaau

SEQ ID NO: 4090161 - RNA, 13 nt, Variola virus
ucaauuuguacau

SEQ ID NO: 4090162 - RNA, 19 nt, Variola virus
ucaauuuugaaaauacuua

SEQ ID NO: 4090163 - RNA, 21 nt, Variola virus
ucacaaaaauaaauccacauu

SEQ ID NO: 4090164 - RNA, 19 nt, Variola virus
ucacaacaucuauaaaagu

SEQ ID NO: 4090165 - RNA, 19 nt, Variola virus
ucacaacuuuacuguuuuu

SEQ ID NO: 4090166 - RNA, 16 nt, Variola virus
ucacaaucacugugag

SEQ ID NO: 4090167 - RNA, 15 nt, Variola virus
ucacacaauguagug

SEQ ID NO: 4090168 - RNA, 19 nt, Variola virus
ucacagaauccgaguaaaa

SEQ ID NO: 4090169 - RNA, 12 nt, Variola virus
ucacauacuuug

SEQ ID NO: 4090170 - RNA, 21 nt, Variola virus
ucacaucaucgaacuucugau

SEQ ID NO: 4090171 - RNA, 23 nt, Variola virus
ucaccgaugaacgucauuucucu

SEQ ID NO: 4090172 - RNA, 24 nt, Variola virus
ucacgcucucuacguagacuuucu

SEQ ID NO: 4090173 - RNA, 14 nt, Variola virus
ucacguuaauaacg

SEQ ID NO: 4090174 - RNA, 21 nt, Variola virus
ucacuaacugauaccaugaaa

SEQ ID NO: 4090175 - RNA, 15 nt, Variola virus
ucacuaauaaauugg

SEQ ID NO: 4090176 - RNA, 19 nt, Variola virus
ucacuauaauauaaucuag

SEQ ID NO: 4090177 - RNA, 22 nt, Variola virus
ucacucucauaauguaaagaua

SEQ ID NO: 4090178 - RNA, 16 nt, Variola virus
ucacucuucgaaaaga

SEQ ID NO: 4090179 - RNA, 17 nt, Variola virus
ucagaaaagucaaauau

SEQ ID NO: 4090180 - RNA, 21 nt, Variola virus
ucagaaacgacaucaugaaca

SEQ ID NO: 4090181 - RNA, 18 nt, Variola virus
ucagaaauauauaacaau

SEQ ID NO: 4090182 - RNA, 16 nt, Variola virus
ucagaaauuacaaaca

SEQ ID NO: 4090183 - RNA, 18 nt, Variola virus
ucagaacacacuuuucuc

SEQ ID NO: 4090184 - RNA, 21 nt, Variola virus
ucagaagugugaauaugaucu

SEQ ID NO: 4090185 - RNA, 14 nt, Variola virus
ucagaauaucucau

SEQ ID NO: 4090186 - RNA, 18 nt, Variola virus
ucagaauaucucauucaa

SEQ ID NO: 4090187 - RNA, 17 nt, Variola virus
ucagacaacaucucaga

SEQ ID NO: 4090188 - RNA, 19 nt, Variola virus
ucagacgaguguaaacacu

SEQ ID NO: 4090189 - RNA, 12 nt, Variola virus
ucagaguucagu

SEQ ID NO: 4090190 - RNA, 12 nt, Variola virus
ucagaucaaagu

SEQ ID NO: 4090191 - RNA, 19 nt, Variola virus
ucagauuauuaaguauaau

SEQ ID NO: 4090192 - RNA, 16 nt, Variola virus
ucagauuauuuaacaa

SEQ ID NO: 4090193 - RNA, 14 nt, Variola virus
ucagcgugauuuuc

SEQ ID NO: 4090194 - RNA, 19 nt, Variola virus
ucaguacauagauuaucca

SEQ ID NO: 4090195 - RNA, 15 nt, Variola virus
ucaguaucuucuuua

SEQ ID NO: 4090196 - RNA, 22 nt, Variola virus
ucagucuccacacuauucuuaa

SEQ ID NO: 4090197 - RNA, 21 nt, Variola virus
ucagugcacucauguaaccaa

SEQ ID NO: 4090198 - RNA, 20 nt, Variola virus
ucaguuccggaucuauagaa

SEQ ID NO: 4090199 - RNA, 13 nt, Variola virus
ucauaaauacaga

SEQ ID NO: 4090200 - RNA, 16 nt, Variola virus
ucauaauagaauguau

SEQ ID NO: 4090201 - RNA, 20 nt, Variola virus
ucauagccgcucuuagaguu

SEQ ID NO: 4090202 - RNA, 16 nt, Variola virus
ucauagcugagaauau

SEQ ID NO: 4090203 - RNA, 20 nt, Variola virus
ucauauaacuucuagaugua

SEQ ID NO: 4090204 - RNA, 21 nt, Variola virus
ucauauacguucgucaccaga

SEQ ID NO: 4090205 - RNA, 17 nt, Variola virus
ucauauacucaauuagu

SEQ ID NO: 4090206 - RNA, 17 nt, Variola virus
ucauauaguuauguaua

SEQ ID NO: 4090207 - RNA, 18 nt, Variola virus
ucauauaucugcucuuaa

SEQ ID NO: 4090208 - RNA, 12 nt, Variola virus
ucauaucuguaa

SEQ ID NO: 4090209 - RNA, 14 nt, Variola virus
ucauaucuguaauu

SEQ ID NO: 4090210 - RNA, 16 nt, Variola virus
ucauauggaagauguu

SEQ ID NO: 4090211 - RNA, 16 nt, Variola virus
ucauauuauaaagaug

SEQ ID NO: 4090212 - RNA, 15 nt, Variola virus
ucauauuauagauuu

SEQ ID NO: 4090213 - RNA, 17 nt, Variola virus
ucauauuccaauucacg

SEQ ID NO: 4090214 - RNA, 14 nt, Variola virus
ucauauuuagauuu

SEQ ID NO: 4090215 - RNA, 16 nt, Variola virus
ucaucaaacaacugaa

SEQ ID NO: 4090216 - RNA, 22 nt, Variola virus
ucaucacugucaucaguuaugu

SEQ ID NO: 4090217 - RNA, 19 nt, Variola virus
ucaucacuuagaacagauu

SEQ ID NO: 4090218 - RNA, 20 nt, Variola virus
ucaucaugauccuauucuaa

SEQ ID NO: 4090219 - RNA, 23 nt, Variola virus
ucaucauuaacaauccaauaaua

SEQ ID NO: 4090220 - RNA, 15 nt, Variola virus
ucauccaugguuuua

SEQ ID NO: 4090221 - RNA, 16 nt, Variola virus
ucauccgaucauuaau

SEQ ID NO: 4090222 - RNA, 18 nt, Variola virus
ucauccguggauauuuga

SEQ ID NO: 4090223 - RNA, 16 nt, Variola virus
ucauccguuguuauau

SEQ ID NO: 4090224 - RNA, 18 nt, Variola virus
ucauccuuaaauguuuuc

SEQ ID NO: 4090225 - RNA, 13 nt, Variola virus
ucaucuacaaaaa

SEQ ID NO: 4090226 - RNA, 15 nt, Variola virus
ucaucuacucuacaa

SEQ ID NO: 4090227 - RNA, 23 nt, Variola virus
ucaucugaaauugucacuacuaa

SEQ ID NO: 4090228 - RNA, 22 nt, Variola virus
ucaucugggaauaaaauacuac

SEQ ID NO: 4090229 - RNA, 19 nt, Variola virus
ucaucuuguucagaaauau

SEQ ID NO: 4090230 - RNA, 15 nt, Variola virus
ucaugaagagauguu

SEQ ID NO: 4090231 - RNA, 17 nt, Variola virus
ucaugacuucauugaua

SEQ ID NO: 4090232 - RNA, 17 nt, Variola virus
ucaugauggaugugugu

SEQ ID NO: 4090233 - RNA, 18 nt, Variola virus
ucauguagauaguuacca

SEQ ID NO: 4090234 - RNA, 17 nt, Variola virus
ucauguguucaaaguau

SEQ ID NO: 4090235 - RNA, 23 nt, Variola virus
ucauguuaaaaaaucuugauaga

SEQ ID NO: 4090236 - RNA, 15 nt, Variola virus
ucauguuaacacucu

SEQ ID NO: 4090237 - RNA, 17 nt, Variola virus
ucauuaaaaaaauuaac

SEQ ID NO: 4090238 - RNA, 20 nt, Variola virus
ucauuaagguucuuauaauc

SEQ ID NO: 4090239 - RNA, 17 nt, Variola virus
ucauuaaguucacuaga

SEQ ID NO: 4090240 - RNA, 13 nt, Variola virus
ucauuaauacagu

SEQ ID NO: 4090241 - RNA, 13 nt, Variola virus
ucauuaucugaaa

SEQ ID NO: 4090242 - RNA, 16 nt, Variola virus
ucauuauuuaaguuuu

SEQ ID NO: 4090243 - RNA, 18 nt, Variola virus
ucauucacggaacuacau

SEQ ID NO: 4090244 - RNA, 16 nt, Variola virus
ucauucucuagaagau

SEQ ID NO: 4090245 - RNA, 19 nt, Variola virus
ucauugaugaugugagaga

SEQ ID NO: 4090246 - RNA, 14 nt, Variola virus
ucauuggaaaauau

SEQ ID NO: 4090247 - RNA, 20 nt, Variola virus
ucauuuacuaaggaguaaaa

SEQ ID NO: 4090248 - RNA, 19 nt, Variola virus
ucauuuauuauauauaaug

SEQ ID NO: 4090249 - RNA, 19 nt, Variola virus
ucauuuauugauaauaacu

SEQ ID NO: 4090250 - RNA, 12 nt, Variola virus
ucauuugaaaau

SEQ ID NO: 4090251 - RNA, 22 nt, Variola virus
ucauuugcucggcaguaaucaa

SEQ ID NO: 4090252 - RNA, 19 nt, Variola virus
uccaaauuuaaauacuuua

SEQ ID NO: 4090253 - RNA, 12 nt, Variola virus
ugacuucaucau

SEQ ID NO: 4090254 - RNA, 16 nt, Variola virus
ugagaagauauucucu

SEQ ID NO: 4090255 - RNA, 20 nt, Variola virus
ugagaauaucuuuauucauu

SEQ ID NO: 4090256 - RNA, 23 nt, Variola virus
ugagaaugaauacgaauucuaug

SEQ ID NO: 4090257 - RNA, 13 nt, Variola virus
ugagauaagaaca

SEQ ID NO: 4090258 - RNA, 22 nt, Variola virus
ugagauacuaacacauuucaac

SEQ ID NO: 4090259 - RNA, 21 nt, Variola virus
ugagauguguuuacacuaacu

SEQ ID NO: 4090260 - RNA, 13 nt, Variola virus
ugagauuuugcau

SEQ ID NO: 4090261 - RNA, 19 nt, Variola virus
ugagcauaaacauaauaaa

SEQ ID NO: 4090262 - RNA, 19 nt, Variola virus
ugaggaaauaaaucauaua

SEQ ID NO: 4090263 - RNA, 21 nt, Variola virus
ugaguaucggagcuacauuac

SEQ ID NO: 4090264 - RNA, 15 nt, Variola virus
ugagugcagaugcug

SEQ ID NO: 4090265 - RNA, 16 nt, Variola virus
ugaguucugugcagau

SEQ ID NO: 4090266 - RNA, 14 nt, Variola virus
ugaguuuaauaacu

SEQ ID NO: 4090267 - RNA, 20 nt, Variola virus
ugauacacuaaguauauaca

SEQ ID NO: 4090268 - RNA, 16 nt, Variola virus
ugauacguauauacac

SEQ ID NO: 4090269 - RNA, 16 nt, Variola virus
ugauagaauuauacca

SEQ ID NO: 4090270 - RNA, 17 nt, Variola virus
ugauaguaauucucgga

SEQ ID NO: 4090271 - RNA, 22 nt, Variola virus
ugauaguauuccaauaucugag

SEQ ID NO: 4090272 - RNA, 14 nt, Variola virus
ugauauaauacuua

SEQ ID NO: 4090273 - RNA, 16 nt, Variola virus
ugauauauucuuuaaa

SEQ ID NO: 4090274 - RNA, 14 nt, Variola virus
ugauauauuuucca

SEQ ID NO: 4090275 - RNA, 19 nt, Variola virus
ugauaucauuaauacagua

SEQ ID NO: 4090276 - RNA, 22 nt, Variola virus
ugauaucuacaucguuuggauu

SEQ ID NO: 4090277 - RNA, 23 nt, Variola virus
ugauaucuauaauaggguaucua

SEQ ID NO: 4090278 - RNA, 14 nt, Variola virus
ugauauuguuacag

SEQ ID NO: 4090279 - RNA, 22 nt, Variola virus
ugaucuaguuacaacuauuaca

SEQ ID NO: 4090280 - RNA, 21 nt, Variola virus
ugaucuaucgaaaauugcuau

SEQ ID NO: 4090281 - RNA, 15 nt, Variola virus
ugaucugguuuugag

SEQ ID NO: 4090282 - RNA, 21 nt, Variola virus
ugaucuuuauuuuuuguguau

SEQ ID NO: 4090283 - RNA, 23 nt, Variola virus
ugaugaaucuucauuaucugaua

SEQ ID NO: 4090284 - RNA, 14 nt, Variola virus
ugaugaauuuacca

SEQ ID NO: 4090285 - RNA, 18 nt, Variola virus
ugaugcgaauagcagaua

SEQ ID NO: 4090286 - RNA, 15 nt, Variola virus
ugaugcgauucaaaa

SEQ ID NO: 4090287 - RNA, 21 nt, Variola virus
ugaugcguuccauuuguguau

SEQ ID NO: 4090288 - RNA, 16 nt, Variola virus
ugaugcugguucugga

SEQ ID NO: 4090289 - RNA, 20 nt, Variola virus
ugauguauaacaacugucaa

SEQ ID NO: 4090290 - RNA, 16 nt, Variola virus
ugauuaggcaugucga

SEQ ID NO: 4090291 - RNA, 15 nt, Variola virus
ugauugauucuucca

SEQ ID NO: 4090292 - RNA, 17 nt, Variola virus
ugauuguuugacaaauc

SEQ ID NO: 4090293 - RNA, 18 nt, Variola virus
ugauuucagauacuauau

SEQ ID NO: 4090294 - RNA, 22 nt, Variola virus
ugauuucucucauaaauacaga

SEQ ID NO: 4090295 - RNA, 17 nt, Variola virus
ugauuucugaauuauug

SEQ ID NO: 4090296 - RNA, 18 nt, Variola virus
ugauuucuggugauacgu

SEQ ID NO: 4090297 - RNA, 18 nt, Variola virus
ugauuuucguaacagaua

SEQ ID NO: 4090298 - RNA, 13 nt, Variola virus
ugauuuugaagau

SEQ ID NO: 4090299 - RNA, 15 nt, Variola virus
ugcaaagaacaaaau

SEQ ID NO: 4090300 - RNA, 15 nt, Variola virus
ugcaacauuaacauc

SEQ ID NO: 4090301 - RNA, 21 nt, Variola virus
ugcaacgaauuauuagucugu

SEQ ID NO: 4090302 - RNA, 17 nt, Variola virus
ugcacguuuacauaucu

SEQ ID NO: 4090303 - RNA, 17 nt, Variola virus
ugcacuugccaugauuc

SEQ ID NO: 4090304 - RNA, 14 nt, Variola virus
ugcagaauauuucu

SEQ ID NO: 4090305 - RNA, 17 nt, Variola virus
ugcagauaucguucuua

SEQ ID NO: 4090306 - RNA, 16 nt, Variola virus
ugcauaaucagauucu

SEQ ID NO: 4090307 - RNA, 20 nt, Variola virus
ugcaucuuauuagaauauua

SEQ ID NO: 4090308 - RNA, 15 nt, Variola virus
ugcauuauccaaaau

SEQ ID NO: 4090309 - RNA, 17 nt, Variola virus
ugcauucguuuaaagau

SEQ ID NO: 4090310 - RNA, 19 nt, Variola virus
ugccaaaucuauaagaaaa

SEQ ID NO: 4090311 - RNA, 20 nt, Variola virus
ugccaaugauguuaggaaau

SEQ ID NO: 4090312 - RNA, 16 nt, Variola virus
ugccaauguuaauuuc

SEQ ID NO: 4090313 - RNA, 18 nt, Variola virus
ugccauaaauaaaugcuu

SEQ ID NO: 4090314 - RNA, 22 nt, Variola virus
ugccaucacucucauaauguaa

SEQ ID NO: 4090315 - RNA, 21 nt, Variola virus
ugcgagagacaaaaugugaua

SEQ ID NO: 4090316 - RNA, 14 nt, Variola virus
ugcgaucaauaaau

SEQ ID NO: 4090317 - RNA, 15 nt, Variola virus
ugcgauguuaauuua

SEQ ID NO: 4090318 - RNA, 18 nt, Variola virus
ugcuaaacuuuauguacu

SEQ ID NO: 4090319 - RNA, 17 nt, Variola virus
ugcuaauacgaauauua

SEQ ID NO: 4090320 - RNA, 18 nt, Variola virus
ugcuauguugauucuauu

SEQ ID NO: 4090321 - RNA, 15 nt, Variola virus
ugcucaaacaaaaug

SEQ ID NO: 4090322 - RNA, 20 nt, Variola virus
ugcucaaacaaaaugugaua

SEQ ID NO: 4090323 - RNA, 18 nt, Variola virus
ugcugaugaugaauacau

SEQ ID NO: 4090324 - RNA, 14 nt, Variola virus
ugcugcguguauaa

SEQ ID NO: 4090325 - RNA, 14 nt, Variola virus
ugcuuugaauaauu

SEQ ID NO: 4090326 - RNA, 16 nt, Variola virus
ugcuuuuuugacauau

SEQ ID NO: 4090327 - RNA, 17 nt, Variola virus
uggaagguuuguauucu

SEQ ID NO: 4090328 - RNA, 19 nt, Variola virus
uggaauagaugaaggaaua

SEQ ID NO: 4090329 - RNA, 20 nt, Variola virus
uggaauccaauuguuugaua

SEQ ID NO: 4090330 - RNA, 11 nt, Variola virus
uggaauuauuu

SEQ ID NO: 4090331 - RNA, 17 nt, Variola virus
uggaauuguauauuaca

SEQ ID NO: 4090332 - RNA, 21 nt, Variola virus
uggacaacggugagaaugacg

SEQ ID NO: 4090333 - RNA, 19 nt, Variola virus
uggaccauuaauaggaaaa

SEQ ID NO: 4090334 - RNA, 18 nt, Variola virus
uggagacauccauugaua

SEQ ID NO: 4090335 - RNA, 13 nt, Variola virus
uggagaugaaugc

SEQ ID NO: 4090336 - RNA, 17 nt, Variola virus
uggaggauuauaugaua

SEQ ID NO: 4090337 - RNA, 14 nt, Variola virus
uggaguacagaauu

SEQ ID NO: 4090338 - RNA, 16 nt, Variola virus
uggauacuaauuguag

SEQ ID NO: 4090339 - RNA, 18 nt, Variola virus
uggaucugugauguaugc

SEQ ID NO: 4090340 - RNA, 17 nt, Variola virus
uggaugaggaagugaua

SEQ ID NO: 4090341 - RNA, 20 nt, Variola virus
uggauggaucauaauugaug

SEQ ID NO: 4090342 - RNA, 16 nt, Variola virus
uggauuaaacauacua

SEQ ID NO: 4090343 - RNA, 14 nt, Variola virus
uggauuucauauag

SEQ ID NO: 4090344 - RNA, 12 nt, Variola virus
uggauuuggauu

SEQ ID NO: 4090345 - RNA, 14 nt, Variola virus
uggcgaaauuauug

SEQ ID NO: 4090346 - RNA, 23 nt, Variola virus
uggcuaagaagucauauguggua

SEQ ID NO: 4090347 - RNA, 21 nt, Variola virus
uggcuucuuccauaguuagaa

SEQ ID NO: 4090348 - RNA, 14 nt, Variola virus
ugguaauauggaua

SEQ ID NO: 4090349 - RNA, 22 nt, Variola virus
ugguaauggguuccgucaaaau

SEQ ID NO: 4090350 - RNA, 19 nt, Variola virus
ugguacagaaaauaucaug

SEQ ID NO: 4090351 - RNA, 18 nt, Variola virus
ugguaguugaaucaacau

SEQ ID NO: 4090352 - RNA, 14 nt, Variola virus
ugguauaucaacau

SEQ ID NO: 4090353 - RNA, 15 nt, Variola virus
ugguaucaacagaua

SEQ ID NO: 4090354 - RNA, 13 nt, Variola virus
ugguauuauucua

SEQ ID NO: 4090355 - RNA, 18 nt, Variola virus
ugguauuucuuacauaaa

SEQ ID NO: 4090356 - RNA, 16 nt, Variola virus
uggucaaaaacugaag

SEQ ID NO: 4090357 - RNA, 21 nt, Variola virus
uggucuagauguaaaaaaugu

SEQ ID NO: 4090358 - RNA, 21 nt, Variola virus
uggucucaacgcaaacuuuuu

SEQ ID NO: 4090359 - RNA, 17 nt, Variola virus
uggucuuguauaucuua

SEQ ID NO: 4090360 - RNA, 15 nt, Variola virus
uggugcauucauagc

SEQ ID NO: 4090361 - RNA, 13 nt, Variola virus
ugguguagcauau

SEQ ID NO: 4090362 - RNA, 14 nt, Variola virus
ugguguuacaguua

SEQ ID NO: 4090363 - RNA, 13 nt, Variola virus
ugguugcaagauc

SEQ ID NO: 4090364 - RNA, 16 nt, Variola virus
ugguuuaaaaauacuc

SEQ ID NO: 4090365 - RNA, 14 nt, Variola virus
ugguuuaauuauuu

SEQ ID NO: 4090366 - RNA, 13 nt, Variola virus
ugguuucaaugag

SEQ ID NO: 4090367 - RNA, 19 nt, Variola virus
uguaaaaagauaaacuuua

SEQ ID NO: 4090368 - RNA, 14 nt, Variola virus
uguaaaaauauguu

SEQ ID NO: 4090369 - RNA, 13 nt, Variola virus
uguaaaaugacuc

SEQ ID NO: 4090370 - RNA, 20 nt, Variola virus
uguaaacaagaauauauguu

SEQ ID NO: 4090371 - RNA, 23 nt, Variola virus
uguaaacagauaugguguagcau

SEQ ID NO: 4090372 - RNA, 22 nt, Variola virus
uguaaacuguugaugauaucua

SEQ ID NO: 4090373 - RNA, 19 nt, Variola virus
uguaaagacgaaacaaaau

SEQ ID NO: 4090374 - RNA, 20 nt, Variola virus
uguaaaggauauuauauguu

SEQ ID NO: 4090375 - RNA, 21 nt, Variola virus
uguaaaggauauuauauguug

SEQ ID NO: 4090376 - RNA, 20 nt, Variola virus
uguaaauauccauugucuua

SEQ ID NO: 4090377 - RNA, 19 nt, Variola virus
uguaaauauuacugguaua

SEQ ID NO: 4090378 - RNA, 15 nt, Variola virus
uguaaaucuagaaau

SEQ ID NO: 4090379 - RNA, 18 nt, Variola virus
uuaagaauugucuguaaa

SEQ ID NO: 4090380 - RNA, 18 nt, Variola virus
uuaagacauauauuauua

SEQ ID NO: 4090381 - RNA, 13 nt, Variola virus
uuaagagauaucu

SEQ ID NO: 4090382 - RNA, 19 nt, Variola virus
uuaaguagaucaucugaaa

SEQ ID NO: 4090383 - RNA, 13 nt, Variola virus
uuaagugaugcau

SEQ ID NO: 4090384 - RNA, 21 nt, Variola virus
uuaaguucaccaaacaacuuu

SEQ ID NO: 4090385 - RNA, 22 nt, Variola virus
uuaauaaaaauaauuuaguguu

SEQ ID NO: 4090386 - RNA, 17 nt, Variola virus
uuaauaaacuuagugua

SEQ ID NO: 4090387 - RNA, 13 nt, Variola virus
uuaauaaauacag

SEQ ID NO: 4090388 - RNA, 21 nt, Variola virus
uuaauaauuguuauuauuuca

SEQ ID NO: 4090389 - RNA, 22 nt, Variola virus
uuaauacagaguuuaauacuaa

SEQ ID NO: 4090390 - RNA, 22 nt, Variola virus
uuaauacccguuuguuuaaauu

SEQ ID NO: 4090391 - RNA, 22 nt, Variola virus
uuaauagaugacguauuauaca

SEQ ID NO: 4090392 - RNA, 17 nt, Variola virus
uuaauauaugauuauca

SEQ ID NO: 4090393 - RNA, 13 nt, Variola virus
uuaauauuucuau

SEQ ID NO: 4090394 - RNA, 17 nt, Variola virus
uuaaucguacucauuau

SEQ ID NO: 4090395 - RNA, 15 nt, Variola virus
uuaaucuauuagaau

SEQ ID NO: 4090396 - RNA, 11 nt, Variola virus
uuaaucucaca

SEQ ID NO: 4090397 - RNA, 15 nt, Variola virus
uuaaucuuuaaaauu

SEQ ID NO: 4090398 - RNA, 16 nt, Variola virus
uuaaugaaacaucguu

SEQ ID NO: 4090399 - RNA, 13 nt, Variola virus
uuaauuaaccauu

SEQ ID NO: 4090400 - RNA, 16 nt, Variola virus
uuaauuacauauuguu

SEQ ID NO: 4090401 - RNA, 17 nt, Variola virus
uuaauucuccuauuaca

SEQ ID NO: 4090402 - RNA, 15 nt, Variola virus
uuaauucucucaggu

SEQ ID NO: 4090403 - RNA, 22 nt, Variola virus
uuaauuuccggaucuacauuuu

SEQ ID NO: 4090404 - RNA, 13 nt, Variola virus
uuaauuuguacau

SEQ ID NO: 4090405 - RNA, 15 nt, Variola virus
uuacaagucaaagag

SEQ ID NO: 4090406 - RNA, 21 nt, Variola virus
uuacaauguagaaauuagaaa

SEQ ID NO: 4090407 - RNA, 23 nt, Variola virus
uuacaccggccaaguaugcauaa

SEQ ID NO: 4090408 - RNA, 19 nt, Variola virus
uuacacuauuugucuuaau

SEQ ID NO: 4090409 - RNA, 17 nt, Variola virus
uuacauaucuacguucu

SEQ ID NO: 4090410 - RNA, 22 nt, Variola virus
uuacaucaccucuaacaucauc

SEQ ID NO: 4090411 - RNA, 13 nt, Variola virus
uuacaucauuaag

SEQ ID NO: 4090412 - RNA, 14 nt, Variola virus
uuacaucuugauau

SEQ ID NO: 4090413 - RNA, 16 nt, Variola virus
uuacauuauaagaaau

SEQ ID NO: 4090414 - RNA, 13 nt, Variola virus
uuacauucucauu

SEQ ID NO: 4090415 - RNA, 21 nt, Variola virus
uuacauuuguauaaucuuuaa

SEQ ID NO: 4090416 - RNA, 23 nt, Variola virus
uuaccacaauguauaauauaaga

SEQ ID NO: 4090417 - RNA, 15 nt, Variola virus
uuaccagaauacuau

SEQ ID NO: 4090418 - RNA, 13 nt, Variola virus
uuaccagauaucu

SEQ ID NO: 4090419 - RNA, 19 nt, Variola virus
uuaccaguuccagauuuca

SEQ ID NO: 4090420 - RNA, 20 nt, Variola virus
uuaccaucaaaagcauuaau

SEQ ID NO: 4090421 - RNA, 22 nt, Variola virus
uuaccaucuuccgccaauauag

SEQ ID NO: 4090422 - RNA, 21 nt, Variola virus
uuaccaucuucuuugauuaau

SEQ ID NO: 4090423 - RNA, 17 nt, Variola virus
uuaccggucauauuaau

SEQ ID NO: 4090424 - RNA, 12 nt, Variola virus
uuacgaaacuau

SEQ ID NO: 4090425 - RNA, 14 nt, Variola virus
uuacgaauaaaaga

SEQ ID NO: 4090426 - RNA, 23 nt, Variola virus
uuacgacgagcauauucauaaau

SEQ ID NO: 4090427 - RNA, 24 nt, Variola virus
uuacuaucuuuaacauauguauca

SEQ ID NO: 4090428 - RNA, 13 nt, Variola virus
uuacuauuacuag

SEQ ID NO: 4090429 - RNA, 20 nt, Variola virus
uuacucauuuuuuauaaaaa

SEQ ID NO: 4090430 - RNA, 14 nt, Variola virus
uuacucuucuaaau

SEQ ID NO: 4090431 - RNA, 20 nt, Variola virus
uuacugaggggaaaaucaau

SEQ ID NO: 4090432 - RNA, 13 nt, Variola virus
uuacuugugguaa

SEQ ID NO: 4090433 - RNA, 18 nt, Variola virus
uuagaaacuucaaagauu

SEQ ID NO: 4090434 - RNA, 14 nt, Variola virus
uuagaauagucucu

SEQ ID NO: 4090435 - RNA, 23 nt, Variola virus
uuagacauaaaaacuaauauuag

SEQ ID NO: 4090436 - RNA, 20 nt, Variola virus
uuagacauaugauaaaacga

SEQ ID NO: 4090437 - RNA, 17 nt, Variola virus
uuagacgcuuauuauua

SEQ ID NO: 4090438 - RNA, 18 nt, Variola virus
uuagacguagaaaacgga

SEQ ID NO: 4090439 - RNA, 22 nt, Variola virus
uuagacuaucucugacacuaca

SEQ ID NO: 4090440 - RNA, 20 nt, Variola virus
uuagacugacagacagaaca

SEQ ID NO: 4090441 - RNA, 14 nt, Variola virus
uuagacuuguauuc

SEQ ID NO: 4090442 - RNA, 22 nt, Variola virus
uuagagaacauacauuuguaaa

SEQ ID NO: 4090443 - RNA, 21 nt, Variola virus
uuagagauaauauccugaaca

SEQ ID NO: 4090444 - RNA, 16 nt, Variola virus
uuagauaauuguggua

SEQ ID NO: 4090445 - RNA, 19 nt, Variola virus
uuagauaguugaucagaau

SEQ ID NO: 4090446 - RNA, 23 nt, Variola virus
uuagauauagaagguaaacauca

SEQ ID NO: 4090447 - RNA, 18 nt, Variola virus
uuagaucucauaugugcu

SEQ ID NO: 4090448 - RNA, 19 nt, Variola virus
uuagaucuuuuacacuguu

SEQ ID NO: 4090449 - RNA, 15 nt, Variola virus
uuagauuauucuuaa

SEQ ID NO: 4090450 - RNA, 17 nt, Variola virus
uuagcaaaguuauuaau

SEQ ID NO: 4090451 - RNA, 17 nt, Variola virus
uuagcagaauauauaag

SEQ ID NO: 4090452 - RNA, 22 nt, Variola virus
uuagcgagguauuuauucauaa

SEQ ID NO: 4090453 - RNA, 21 nt, Variola virus
uuaggacgcgaauaaauagau

SEQ ID NO: 4090454 - RNA, 20 nt, Variola virus
uuaggcacagucaaacauuc

SEQ ID NO: 4090455 - RNA, 19 nt, Variola virus
uuagguagcauuuucuuaa

SEQ ID NO: 4090456 - RNA, 15 nt, Variola virus
uuaguauaacuaaag

SEQ ID NO: 4090457 - RNA, 23 nt, Variola virus
uuaguauauaacauuaauacuau

SEQ ID NO: 4090458 - RNA, 16 nt, Variola virus
uuagucauaaccguaa

SEQ ID NO: 4090459 - RNA, 17 nt, Variola virus
uuagucgucucaaagag

SEQ ID NO: 4090460 - RNA, 23 nt, Variola virus
uuagugaaacauuccacaucguu

SEQ ID NO: 4090461 - RNA, 15 nt, Variola virus
uuagugggcaucuuu

SEQ ID NO: 4090462 - RNA, 19 nt, Variola virus
uuaguuuuuuguuacugac

SEQ ID NO: 4090463 - RNA, 14 nt, Variola virus
uuauaaaaaacuuu

SEQ ID NO: 4090464 - RNA, 21 nt, Variola virus
uuauaacgauaacgucauuaa

SEQ ID NO: 4090465 - RNA, 16 nt, Variola virus
uuauaagaaauauaga

SEQ ID NO: 4090466 - RNA, 20 nt, Variola virus
uuauaagaaugauuguuuga

SEQ ID NO: 4090467 - RNA, 18 nt, Variola virus
uuauaagacuuuacucuu

SEQ ID NO: 4090468 - RNA, 16 nt, Variola virus
uuauacaguguaugua

SEQ ID NO: 4090469 - RNA, 16 nt, Variola virus
uuauacauauuccaga

SEQ ID NO: 4090470 - RNA, 16 nt, Variola virus
uuauagagauagauga

SEQ ID NO: 4090471 - RNA, 20 nt, Variola virus
uuauagaugccaagauaucu

SEQ ID NO: 4090472 - RNA, 15 nt, Variola virus
uuauaguagauauca

SEQ ID NO: 4090473 - RNA, 17 nt, Variola virus
uuauauaaaaacauuuu

SEQ ID NO: 4090474 - RNA, 16 nt, Variola virus
uuauauacaucuuuaa

SEQ ID NO: 4090475 - RNA, 18 nt, Variola virus
uuauauacucuaaucuuu

SEQ ID NO: 4090476 - RNA, 19 nt, Variola virus
uuauaucguguucauuaac

SEQ ID NO: 4090477 - RNA, 23 nt, Variola virus
uuauaucguuaucauuaauaaag

SEQ ID NO: 4090478 - RNA, 21 nt, Variola virus
uuauaugauaucuuuacuaag

SEQ ID NO: 4090479 - RNA, 12 nt, Variola virus
uuauauguaguu

SEQ ID NO: 4090480 - RNA, 17 nt, Variola virus
uuaucaaaauuuggaaa

SEQ ID NO: 4090481 - RNA, 19 nt, Variola virus
uuaucaauauacuauucuu

SEQ ID NO: 4090482 - RNA, 20 nt, Variola virus
uuaucacauaucacauuaau

SEQ ID NO: 4090483 - RNA, 18 nt, Variola virus
uuaucaucauccauuaau

SEQ ID NO: 4090484 - RNA, 18 nt, Variola virus
uuaucaucccauuguaaa

SEQ ID NO: 4090485 - RNA, 12 nt, Variola virus
uuaucaugaauu

SEQ ID NO: 4090486 - RNA, 23 nt, Variola virus
uuauccaaaauauuaauaacauu

SEQ ID NO: 4090487 - RNA, 17 nt, Variola virus
uuauccauuuauacauu

SEQ ID NO: 4090488 - RNA, 17 nt, Variola virus
uuauccgcuaaaaauuu

SEQ ID NO: 4090489 - RNA, 17 nt, Variola virus
uuaucgauucaucuaau

SEQ ID NO: 4090490 - RNA, 22 nt, Variola virus
uuaucguuuaagaauaauacag

SEQ ID NO: 4090491 - RNA, 14 nt, Variola virus
uuaucuaacucuuu

SEQ ID NO: 4090492 - RNA, 14 nt, Variola virus
uuaucuaucuuaaa

SEQ ID NO: 4090493 - RNA, 16 nt, Variola virus
uuaucuauuucaaaaa

SEQ ID NO: 4090494 - RNA, 23 nt, Variola virus
uuaucuccucuaugcaacuguaa

SEQ ID NO: 4090495 - RNA, 21 nt, Variola virus
uuaugagucacguuacacuuu

SEQ ID NO: 4090496 - RNA, 22 nt, Variola virus
uuaugauuaguuacgacugaaa

SEQ ID NO: 4090497 - RNA, 20 nt, Variola virus
uuauggaucuauucaagaug

SEQ ID NO: 4090498 - RNA, 16 nt, Variola virus
uuauguaaauaucuuu

SEQ ID NO: 4090499 - RNA, 19 nt, Variola virus
uuauguauauguuuguaaa

SEQ ID NO: 4090500 - RNA, 12 nt, Variola virus
uuaugugaaaca

SEQ ID NO: 4090501 - RNA, 22 nt, Variola virus
uuauuaaaguacguaaaucuag

SEQ ID NO: 4090502 - RNA, 20 nt, Variola virus
uuauuaacaaauuuuuugaa

SEQ ID NO: 4090503 - RNA, 14 nt, Variola virus
uuauuaaguauaau

SEQ ID NO: 4090504 - RNA, 20 nt, Variola virus
agauaugugauaaaaaucgu

SEQ ID NO: 4090505 - RNA, 17 nt, Variola virus
agauauuaguaaaagau

SEQ ID NO: 4090506 - RNA, 17 nt, Variola virus
agauauuggaugaugau

SEQ ID NO: 4090507 - RNA, 17 nt, Variola virus
agaucaucaaaauaugu

SEQ ID NO: 4090508 - RNA, 17 nt, Variola virus
agaucauguaacaauau

SEQ ID NO: 4090509 - RNA, 21 nt, Variola virus
agauccacugucacuggaaag

SEQ ID NO: 4090510 - RNA, 15 nt, Variola virus
agauccaucuacuuu

SEQ ID NO: 4090511 - RNA, 13 nt, Variola virus
agaucccacauca

SEQ ID NO: 4090512 - RNA, 21 nt, Variola virus
agaucccuuaucacacuuaaa

SEQ ID NO: 4090513 - RNA, 20 nt, Variola virus
agauccugcauagaaauauc

SEQ ID NO: 4090514 - RNA, 18 nt, Variola virus
agaucgucuauauaugaa

SEQ ID NO: 4090515 - RNA, 20 nt, Variola virus
agaucuaaagauaaucuucu

SEQ ID NO: 4090516 - RNA, 18 nt, Variola virus
agaucuaaggaugaugag

SEQ ID NO: 4090517 - RNA, 17 nt, Variola virus
agaucuaauaaauggag

SEQ ID NO: 4090518 - RNA, 18 nt, Variola virus
agaucuaauuuuucauua

SEQ ID NO: 4090519 - RNA, 19 nt, Variola virus
agaucugcguguaaaaagu

SEQ ID NO: 4090520 - RNA, 13 nt, Variola virus
agaugaaaaaugg

SEQ ID NO: 4090521 - RNA, 23 nt, Variola virus
agaugaaaauaauccugaauaua

SEQ ID NO: 4090522 - RNA, 16 nt, Variola virus
agaugaaucaaaugua

SEQ ID NO: 4090523 - RNA, 15 nt, Variola virus
agaugauaucaguau

SEQ ID NO: 4090524 - RNA, 18 nt, Variola virus
agaugauguuaacuaugu

SEQ ID NO: 4090525 - RNA, 16 nt, Variola virus
agauggaaauauuguu

SEQ ID NO: 4090526 - RNA, 19 nt, Variola virus
agauggaagggucaaacuu

SEQ ID NO: 4090527 - RNA, 14 nt, Variola virus
agauguauacuccu

SEQ ID NO: 4090528 - RNA, 17 nt, Variola virus
agauguuaaaugaauua

SEQ ID NO: 4090529 - RNA, 17 nt, Variola virus
agauguuagaaaaauga

SEQ ID NO: 4090530 - RNA, 20 nt, Variola virus
agauguuagaaaaaugaugc

SEQ ID NO: 4090531 - RNA, 18 nt, Variola virus
agauuagcuuugauguuu

SEQ ID NO: 4090532 - RNA, 14 nt, Variola virus
agauuaggaaaugu

SEQ ID NO: 4090533 - RNA, 13 nt, Variola virus
agauuaugauacu

SEQ ID NO: 4090534 - RNA, 19 nt, Variola virus
agauucauguuaacacucu

SEQ ID NO: 4090535 - RNA, 19 nt, Variola virus
agauuccugacuacuaacg

SEQ ID NO: 4090536 - RNA, 16 nt, Variola virus
agauuuauaauacuuu

SEQ ID NO: 4090537 - RNA, 22 nt, Variola virus
agauuuauuugauaaucauguu

SEQ ID NO: 4090538 - RNA, 16 nt, Variola virus
agauuucaaagauguu

SEQ ID NO: 4090539 - RNA, 22 nt, Variola virus
agauuugguaaaaugaaauauc

SEQ ID NO: 4090540 - RNA, 15 nt, Variola virus
agauuuuaaaaaacu

SEQ ID NO: 4090541 - RNA, 14 nt, Variola virus
agauuuuaaaugua

SEQ ID NO: 4090542 - RNA, 12 nt, Variola virus
agcaaaaaaacu

SEQ ID NO: 4090543 - RNA, 13 nt, Variola virus
agcaaaaaaacug

SEQ ID NO: 4090544 - RNA, 14 nt, Variola virus
agcaaaguuauuaa

SEQ ID NO: 4090545 - RNA, 15 nt, Variola virus
agcaaccguaugaau

SEQ ID NO: 4090546 - RNA, 19 nt, Variola virus
agcaauagugauagauuuu

SEQ ID NO: 4090547 - RNA, 19 nt, Variola virus
agcaauuacuaaacauaaa

SEQ ID NO: 4090548 - RNA, 23 nt, Variola virus
agcaauuagugccguauacuuua

SEQ ID NO: 4090549 - RNA, 13 nt, Variola virus
agcagaaaaagac

SEQ ID NO: 4090550 - RNA, 19 nt, Variola virus
agcauauuccauuaaugac

SEQ ID NO: 4090551 - RNA, 19 nt, Variola virus
agcaucagcaaaacaguua

SEQ ID NO: 4090552 - RNA, 18 nt, Variola virus
agcaucuccaauacguua

SEQ ID NO: 4090553 - RNA, 22 nt, Variola virus
agcaucuugaauagaaacgaua

SEQ ID NO: 4090554 - RNA, 19 nt, Variola virus
agcauguauuuuuuucuaa

SEQ ID NO: 4090555 - RNA, 22 nt, Variola virus
agcaugugaauauaauaauaca

SEQ ID NO: 4090556 - RNA, 21 nt, Variola virus
agcauuagcuaaaaaaauagu

SEQ ID NO: 4090557 - RNA, 14 nt, Variola virus
agcauugaaaauac

SEQ ID NO: 4090558 - RNA, 16 nt, Variola virus
agcauuuaaauccgaa

SEQ ID NO: 4090559 - RNA, 18 nt, Variola virus
agcauuuguaauaauccu

SEQ ID NO: 4090560 - RNA, 20 nt, Variola virus
agccacuauagaguuucuaa

SEQ ID NO: 4090561 - RNA, 20 nt, Variola virus
agccaucuguauuaaagaua

SEQ ID NO: 4090562 - RNA, 13 nt, Variola virus
agccauuuucuau

SEQ ID NO: 4090563 - RNA, 18 nt, Variola virus
agccgggaaaaagaagau

SEQ ID NO: 4090564 - RNA, 12 nt, Variola virus
agccuguaacug

SEQ ID NO: 4090565 - RNA, 22 nt, Variola virus
agcgacucuauuggauauggau

SEQ ID NO: 4090566 - RNA, 15 nt, Variola virus
agcgauuguuuaaga

SEQ ID NO: 4090567 - RNA, 20 nt, Variola virus
agcgcauguacauauuugua

SEQ ID NO: 4090568 - RNA, 18 nt, Variola virus
agcgggguugaucuugug

SEQ ID NO: 4090569 - RNA, 16 nt, Variola virus
agcuaagcaacuaaga

SEQ ID NO: 4090570 - RNA, 15 nt, Variola virus
agcuaagucuauuau

SEQ ID NO: 4090571 - RNA, 14 nt, Variola virus
agcuacucuagauu

SEQ ID NO: 4090572 - RNA, 13 nt, Variola virus
agcuauucaagau

SEQ ID NO: 4090573 - RNA, 16 nt, Variola virus
agcuauuuaaaugggu

SEQ ID NO: 4090574 - RNA, 18 nt, Variola virus
agcucaauauaaaugcgu

SEQ ID NO: 4090575 - RNA, 21 nt, Variola virus
agcuccuacaggaauaucuuu

SEQ ID NO: 4090576 - RNA, 13 nt, Variola virus
agcugaaaugaga

SEQ ID NO: 4090577 - RNA, 18 nt, Variola virus
agcuuccagauuuaaaaa

SEQ ID NO: 4090578 - RNA, 14 nt, Variola virus
agcuucugaaauaa

SEQ ID NO: 4090579 - RNA, 17 nt, Variola virus
agcuugauaauuagaua

SEQ ID NO: 4090580 - RNA, 22 nt, Variola virus
agcuuuuguucacaaaaauaca

SEQ ID NO: 4090581 - RNA, 14 nt, Variola virus
aggaaacgaaagac

SEQ ID NO: 4090582 - RNA, 13 nt, Variola virus
aggaacaaauauu

SEQ ID NO: 4090583 - RNA, 14 nt, Variola virus
aggaacauaaacaa

SEQ ID NO: 4090584 - RNA, 12 nt, Variola virus
aggaacuagaau

SEQ ID NO: 4090585 - RNA, 17 nt, Variola virus
aggaagaauaucauauu

SEQ ID NO: 4090586 - RNA, 19 nt, Variola virus
aggaaguuuaauaauacaa

SEQ ID NO: 4090587 - RNA, 12 nt, Variola virus
aggaauccaugu

SEQ ID NO: 4090588 - RNA, 22 nt, Variola virus
aggaauuggaauccaauuguuu

SEQ ID NO: 4090589 - RNA, 17 nt, Variola virus
aggacagaaaaauguua

SEQ ID NO: 4090590 - RNA, 17 nt, Variola virus
aggagucgccaaaugua

SEQ ID NO: 4090591 - RNA, 14 nt, Variola virus
aggaguuuuauuca

SEQ ID NO: 4090592 - RNA, 13 nt, Variola virus
aggauaaagaaaa

SEQ ID NO: 4090593 - RNA, 13 nt, Variola virus
aggauaaaguaaa

SEQ ID NO: 4090594 - RNA, 20 nt, Variola virus
aggauauacucaauagaauu

SEQ ID NO: 4090595 - RNA, 13 nt, Variola virus
aggauaucaaaua

SEQ ID NO: 4090596 - RNA, 23 nt, Variola virus
aggauauuagcgaauauaucaaa

SEQ ID NO: 4090597 - RNA, 22 nt, Variola virus
aggauauucucauggaaauauu

SEQ ID NO: 4090598 - RNA, 17 nt, Variola virus
aggauccagaaggaaga

SEQ ID NO: 4090599 - RNA, 14 nt, Variola virus
aggaucuagcaaag

SEQ ID NO: 4090600 - RNA, 13 nt, Variola virus
aggaugaauuuga

SEQ ID NO: 4090601 - RNA, 16 nt, Variola virus
aggaugacucucaaau

SEQ ID NO: 4090602 - RNA, 21 nt, Variola virus
aggaugacucucaaauuauua

SEQ ID NO: 4090603 - RNA, 20 nt, Variola virus
aggcacagucaaacauucaa

SEQ ID NO: 4090604 - RNA, 16 nt, Variola virus
aggcaucaaaaaaugu

SEQ ID NO: 4090605 - RNA, 17 nt, Variola virus
aggcucaguauguaaac

SEQ ID NO: 4090606 - RNA, 23 nt, Variola virus
agggguuguauuguuauuuuaca

SEQ ID NO: 4090607 - RNA, 21 nt, Variola virus
aggguauauccaucacuaaaa

SEQ ID NO: 4090608 - RNA, 20 nt, Variola virus
aggguccauuuucuguaaau

SEQ ID NO: 4090609 - RNA, 13 nt, Variola virus
agguaaauguaaa

SEQ ID NO: 4090610 - RNA, 14 nt, Variola virus
agguaaauguaaau

SEQ ID NO: 4090611 - RNA, 21 nt, Variola virus
agguaaguauaguacuaaaga

SEQ ID NO: 4090612 - RNA, 22 nt, Variola virus
agguacauggucuagauguaaa

SEQ ID NO: 4090613 - RNA, 19 nt, Variola virus
agguacuauaauauuaaaa

SEQ ID NO: 4090614 - RNA, 16 nt, Variola virus
agguauauuuauucca

SEQ ID NO: 4090615 - RNA, 19 nt, Variola virus
aggucacaucguauacuuu

SEQ ID NO: 4090616 - RNA, 22 nt, Variola virus
agguuuugcaacauguuaaaau

SEQ ID NO: 4090617 - RNA, 14 nt, Variola virus
aguaaaguaaacaa

SEQ ID NO: 4090618 - RNA, 17 nt, Variola virus
aguaaaugaaaaaaaac

SEQ ID NO: 4090619 - RNA, 21 nt, Variola virus
aguaacuauguaaaugauaac

SEQ ID NO: 4090620 - RNA, 14 nt, Variola virus
aguaagcauuuccu

SEQ ID NO: 4090621 - RNA, 16 nt, Variola virus
aguaaguauuuauaca

SEQ ID NO: 4090622 - RNA, 17 nt, Variola virus
aguaagugucauuuaac

SEQ ID NO: 4090623 - RNA, 15 nt, Variola virus
aguaauaaaacuaau

SEQ ID NO: 4090624 - RNA, 23 nt, Variola virus
aguaauaucgaauauuuuaucca

SEQ ID NO: 4090625 - RNA, 13 nt, Variola virus
aguaaucaacaau

SEQ ID NO: 4090626 - RNA, 20 nt, Variola virus
aguaaucauguaaauguuua

SEQ ID NO: 4090627 - RNA, 16 nt, Variola virus
aguaaugguauguauu

SEQ ID NO: 4090628 - RNA, 13 nt, Variola virus
aguacauuucaca

SEQ ID NO: 4090629 - RNA, 22 nt, Variola virus
aguacccacugaugagauguua

SEQ ID NO: 4090630 - RNA, 13 nt, Variola virus
auagauagaacua

SEQ ID NO: 4090631 - RNA, 19 nt, Variola virus
auagauguucaucauauaa

SEQ ID NO: 4090632 - RNA, 23 nt, Variola virus
auagauucauucuuuauagaaug

SEQ ID NO: 4090633 - RNA, 17 nt, Variola virus
auagauuuuccauccac

SEQ ID NO: 4090634 - RNA, 22 nt, Variola virus
auagcuacaguaaaaauaacua

SEQ ID NO: 4090635 - RNA, 15 nt, Variola virus
auaggagauauauau

SEQ ID NO: 4090636 - RNA, 17 nt, Variola virus
auaggagcuagaagaac

SEQ ID NO: 4090637 - RNA, 20 nt, Variola virus
auaggauacuuuaugaaugg

SEQ ID NO: 4090638 - RNA, 16 nt, Variola virus
auaggauacuuuguaa

SEQ ID NO: 4090639 - RNA, 13 nt, Variola virus
auaggaucuauau

SEQ ID NO: 4090640 - RNA, 21 nt, Variola virus
auaggauuaaaaauaaaguua

SEQ ID NO: 4090641 - RNA, 20 nt, Variola virus
auaggucuucgucuacagua

SEQ ID NO: 4090642 - RNA, 22 nt, Variola virus
auagguuacuagauuaaaaaug

SEQ ID NO: 4090643 - RNA, 17 nt, Variola virus
auaguaaauacaauaau

SEQ ID NO: 4090644 - RNA, 13 nt, Variola virus
auaguacauuccc

SEQ ID NO: 4090645 - RNA, 13 nt, Variola virus
auaguagaaucua

SEQ ID NO: 4090646 - RNA, 16 nt, Variola virus
auaguagguauggauc

SEQ ID NO: 4090647 - RNA, 23 nt, Variola virus
auaguagguauggaucuggaaaa

SEQ ID NO: 4090648 - RNA, 18 nt, Variola virus
auagucaaccaaauaaua

SEQ ID NO: 4090649 - RNA, 16 nt, Variola virus
auagucuccagaaauc

SEQ ID NO: 4090650 - RNA, 16 nt, Variola virus
auagugaaacaaaaua

SEQ ID NO: 4090651 - RNA, 17 nt, Variola virus
auagugguacaauacua

SEQ ID NO: 4090652 - RNA, 20 nt, Variola virus
auagugucuacuuaaaugua

SEQ ID NO: 4090653 - RNA, 22 nt, Variola virus
auaguuagcgucaacuuucaua

SEQ ID NO: 4090654 - RNA, 18 nt, Variola virus
auaguuugggaaaagaaa

SEQ ID NO: 4090655 - RNA, 22 nt, Variola virus
auauaaaaacuuauuacauagu

SEQ ID NO: 4090656 - RNA, 22 nt, Variola virus
auauaaaauagaaaauaacaga

SEQ ID NO: 4090657 - RNA, 13 nt, Variola virus
auauaaaauggau

SEQ ID NO: 4090658 - RNA, 13 nt, Variola virus
auauaaauuauuc

SEQ ID NO: 4090659 - RNA, 17 nt, Variola virus
auauaacuucugguaaa

SEQ ID NO: 4090660 - RNA, 21 nt, Variola virus
auauaagacacagaaauacug

SEQ ID NO: 4090661 - RNA, 18 nt, Variola virus
auauaagacuaacaguau

SEQ ID NO: 4090662 - RNA, 13 nt, Variola virus
auauaauacuuaa

SEQ ID NO: 4090663 - RNA, 13 nt, Variola virus
auauaauucuuua

SEQ ID NO: 4090664 - RNA, 18 nt, Variola virus
auauacucugagauaaaa

SEQ ID NO: 4090665 - RNA, 21 nt, Variola virus
auauagacaacguagaauugu

SEQ ID NO: 4090666 - RNA, 20 nt, Variola virus
auauagcggaugaaaaauuu

SEQ ID NO: 4090667 - RNA, 15 nt, Variola virus
auauagcuuauucca

SEQ ID NO: 4090668 - RNA, 23 nt, Variola virus
auauaguauaaauaguuauuaga

SEQ ID NO: 4090669 - RNA, 15 nt, Variola virus
auauaguauuaauga

SEQ ID NO: 4090670 - RNA, 22 nt, Variola virus
auauagucuguguuacauaaua

SEQ ID NO: 4090671 - RNA, 13 nt, Variola virus
auauauacaguag

SEQ ID NO: 4090672 - RNA, 14 nt, Variola virus
auauaucaaaauua

SEQ ID NO: 4090673 - RNA, 11 nt, Variola virus
auauaugggag

SEQ ID NO: 4090674 - RNA, 12 nt, Variola virus
auauauguuuau

SEQ ID NO: 4090675 - RNA, 13 nt, Variola virus
auauauuagaaau

SEQ ID NO: 4090676 - RNA, 18 nt, Variola virus
auauauuccaacgcauuu

SEQ ID NO: 4090677 - RNA, 21 nt, Variola virus
auauauucgcauauauuccca

SEQ ID NO: 4090678 - RNA, 18 nt, Variola virus
auauauuguagauaagaa

SEQ ID NO: 4090679 - RNA, 19 nt, Variola virus
auauauuuucacuuuaucu

SEQ ID NO: 4090680 - RNA, 14 nt, Variola virus
auaucaacaaaauu

SEQ ID NO: 4090681 - RNA, 18 nt, Variola virus
auaucaacucauguguaa

SEQ ID NO: 4090682 - RNA, 14 nt, Variola virus
auaucacaaaaaua

SEQ ID NO: 4090683 - RNA, 19 nt, Variola virus
auaucacaaccuuuguuaa

SEQ ID NO: 4090684 - RNA, 21 nt, Variola virus
auaucauaaauaaaaauagua

SEQ ID NO: 4090685 - RNA, 14 nt, Variola virus
auaucauacaugau

SEQ ID NO: 4090686 - RNA, 19 nt, Variola virus
auaucauacaugauauuca

SEQ ID NO: 4090687 - RNA, 19 nt, Variola virus
auaucaucaaaauacugga

SEQ ID NO: 4090688 - RNA, 17 nt, Variola virus
auaucaucaucugaaau

SEQ ID NO: 4090689 - RNA, 22 nt, Variola virus
auaucaucuuuucacuaaauaa

SEQ ID NO: 4090690 - RNA, 15 nt, Variola virus
auaucaugaaauaua

SEQ ID NO: 4090691 - RNA, 15 nt, Variola virus
auaucauuaauacag

SEQ ID NO: 4090692 - RNA, 16 nt, Variola virus
auauccauuuuacauu

SEQ ID NO: 4090693 - RNA, 17 nt, Variola virus
auaucccuuaaaaauua

SEQ ID NO: 4090694 - RNA, 16 nt, Variola virus
auauccuccuguagau

SEQ ID NO: 4090695 - RNA, 19 nt, Variola virus
auauccuuaagauguuuga

SEQ ID NO: 4090696 - RNA, 20 nt, Variola virus
auaucgucaccgaugucaaa

SEQ ID NO: 4090697 - RNA, 17 nt, Variola virus
auaucguucuuaauaga

SEQ ID NO: 4090698 - RNA, 22 nt, Variola virus
auaucuaacguauucuagcaua

SEQ ID NO: 4090699 - RNA, 23 nt, Variola virus
auaucuaggcgguggauauuucu

SEQ ID NO: 4090700 - RNA, 12 nt, Variola virus
auaucuauaaug

SEQ ID NO: 4090701 - RNA, 21 nt, Variola virus
auaucuaucgacuucagauga

SEQ ID NO: 4090702 - RNA, 14 nt, Variola virus
auaucucaauaaug

SEQ ID NO: 4090703 - RNA, 23 nt, Variola virus
auaucucguuuagaaaaaugcua

SEQ ID NO: 4090704 - RNA, 23 nt, Variola virus
auaucugcgacggagcauuuucu

SEQ ID NO: 4090705 - RNA, 13 nt, Variola virus
auaucuuaaauaa

SEQ ID NO: 4090706 - RNA, 14 nt, Variola virus
auaucuucucaaaa

SEQ ID NO: 4090707 - RNA, 20 nt, Variola virus
auaucuucuuuuuauaucca

SEQ ID NO: 4090708 - RNA, 20 nt, Variola virus
auaucuuguucugguuuaaa

SEQ ID NO: 4090709 - RNA, 15 nt, Variola virus
auaugauagaaauga

SEQ ID NO: 4090710 - RNA, 22 nt, Variola virus
auaugcaaagucuaaauauuuu

SEQ ID NO: 4090711 - RNA, 22 nt, Variola virus
auaugcaucuauauaaucuuuu

SEQ ID NO: 4090712 - RNA, 13 nt, Variola virus
auaugccuauaaa

SEQ ID NO: 4090713 - RNA, 17 nt, Variola virus
auaugccuuagcaucau

SEQ ID NO: 4090714 - RNA, 14 nt, Variola virus
auaugcucauauau

SEQ ID NO: 4090715 - RNA, 11 nt, Variola virus
auauggaugag

SEQ ID NO: 4090716 - RNA, 14 nt, Variola virus
auauggauuuccag

SEQ ID NO: 4090717 - RNA, 21 nt, Variola virus
auauggucucaacgcaaacuu

SEQ ID NO: 4090718 - RNA, 23 nt, Variola virus
auaugguuuuuggccaaaaugau

SEQ ID NO: 4090719 - RNA, 22 nt, Variola virus
auauguaggaggaauaucugau

SEQ ID NO: 4090720 - RNA, 16 nt, Variola virus
auaugucauagaauuu

SEQ ID NO: 4090721 - RNA, 19 nt, Variola virus
auaugucuagaacggcaau

SEQ ID NO: 4090722 - RNA, 13 nt, Variola virus
auaugugcacaua

SEQ ID NO: 4090723 - RNA, 12 nt, Variola virus
auaugugcauua

SEQ ID NO: 4090724 - RNA, 14 nt, Variola virus
auauguuccaguaa

SEQ ID NO: 4090725 - RNA, 13 nt, Variola virus
auauuaaaaaaug

SEQ ID NO: 4090726 - RNA, 19 nt, Variola virus
auauuaaaauucacacauu

SEQ ID NO: 4090727 - RNA, 15 nt, Variola virus
auauuaauaggagau

SEQ ID NO: 4090728 - RNA, 18 nt, Variola virus
auauuacuaauugauaga

SEQ ID NO: 4090729 - RNA, 16 nt, Variola virus
auauuacuguuaauaa

SEQ ID NO: 4090730 - RNA, 14 nt, Variola virus
auauuagaaauaca

SEQ ID NO: 4090731 - RNA, 16 nt, Variola virus
auauuagacaauacua

SEQ ID NO: 4090732 - RNA, 16 nt, Variola virus
auauuauauaaacauu

SEQ ID NO: 4090733 - RNA, 19 nt, Variola virus
auauuaucucaacaaaauu

SEQ ID NO: 4090734 - RNA, 14 nt, Variola virus
auauuauuaugaag

SEQ ID NO: 4090735 - RNA, 17 nt, Variola virus
auauucaagcgaauuac

SEQ ID NO: 4090736 - RNA, 15 nt, Variola virus
auauucacaaauaua

SEQ ID NO: 4090737 - RNA, 13 nt, Variola virus
auauucauagagg

SEQ ID NO: 4090738 - RNA, 15 nt, Variola virus
auauucauagauuga

SEQ ID NO: 4090739 - RNA, 15 nt, Variola virus
auauuccauuaauga

SEQ ID NO: 4090740 - RNA, 15 nt, Variola virus
auauucuaaaauggu

SEQ ID NO: 4090741 - RNA, 17 nt, Variola virus
auauucuguaguuguau

SEQ ID NO: 4090742 - RNA, 14 nt, Variola virus
auauucuguucuau

SEQ ID NO: 4090743 - RNA, 19 nt, Variola virus
auauucuugucauguugau

SEQ ID NO: 4090744 - RNA, 22 nt, Variola virus
auauugauacguauauuaauga

SEQ ID NO: 4090745 - RNA, 15 nt, Variola virus
auauuguagcauuac

SEQ ID NO: 4090746 - RNA, 18 nt, Variola virus
auauugucccaauguuuc

SEQ ID NO: 4090747 - RNA, 19 nt, Variola virus
auauugucccaauguuucg

SEQ ID NO: 4090748 - RNA, 18 nt, Variola virus
auauuguuacagccaaga

SEQ ID NO: 4090749 - RNA, 22 nt, Variola virus
auauuuaagugauauaaaacau

SEQ ID NO: 4090750 - RNA, 18 nt, Variola virus
auauuuacaguuacuaaa

SEQ ID NO: 4090751 - RNA, 16 nt, Variola virus
auauuuaccaaagcaa

SEQ ID NO: 4090752 - RNA, 20 nt, Variola virus
auauuuacggaacuucuaaa

SEQ ID NO: 4090753 - RNA, 19 nt, Variola virus
auauuuccccuauaaucuu

SEQ ID NO: 4090754 - RNA, 16 nt, Variola virus
auauuucuauuucuau

SEQ ID NO: 4090755 - RNA, 19 nt, Variola virus
auauuucuccacuacauau

SEQ ID NO: 4090756 - RNA, 13 nt, Variola virus
auauuugaaaauc

SEQ ID NO: 4090757 - RNA, 19 nt, Variola virus
auauuugagaguauuggua

SEQ ID NO: 4090758 - RNA, 15 nt, Variola virus
auauuuguaugagug

SEQ ID NO: 4090759 - RNA, 18 nt, Variola virus
auauuugugaaaauauua

SEQ ID NO: 4090760 - RNA, 19 nt, Variola virus
auauuuguucauuggauug

SEQ ID NO: 4090761 - RNA, 18 nt, Variola virus
auauuuugggcaaaucua

SEQ ID NO: 4090762 - RNA, 13 nt, Variola virus
aucaaaaaguaag

SEQ ID NO: 4090763 - RNA, 14 nt, Variola virus
aucaaaagaagaau

SEQ ID NO: 4090764 - RNA, 23 nt, Variola virus
aucaaacucuaaugaccacaucu

SEQ ID NO: 4090765 - RNA, 19 nt, Variola virus
aucaaagauuaauacauua

SEQ ID NO: 4090766 - RNA, 17 nt, Variola virus
aucaaaugguucauaau

SEQ ID NO: 4090767 - RNA, 13 nt, Variola virus
aucaaaugucuaa

SEQ ID NO: 4090768 - RNA, 16 nt, Variola virus
aucaaauuauugauac

SEQ ID NO: 4090769 - RNA, 16 nt, Variola virus
aucaacagauagcuug

SEQ ID NO: 4090770 - RNA, 19 nt, Variola virus
aucaacucauguguaaauu

SEQ ID NO: 4090771 - RNA, 20 nt, Variola virus
aucaagagagcagaaauaac

SEQ ID NO: 4090772 - RNA, 19 nt, Variola virus
aucaaggacaguuaaaacu

SEQ ID NO: 4090773 - RNA, 17 nt, Variola virus
aucaagucucucauauu

SEQ ID NO: 4090774 - RNA, 13 nt, Variola virus
aucaauaaauagu

SEQ ID NO: 4090775 - RNA, 14 nt, Variola virus
aucaauaaauggau

SEQ ID NO: 4090776 - RNA, 13 nt, Variola virus
aucaauaagcauu

SEQ ID NO: 4090777 - RNA, 17 nt, Variola virus
aucaauagaauaaacca

SEQ ID NO: 4090778 - RNA, 12 nt, Variola virus
aucaauauuaac

SEQ ID NO: 4090779 - RNA, 23 nt, Variola virus
aucaaucaaaagacuauacauuu

SEQ ID NO: 4090780 - RNA, 19 nt, Variola virus
aucaaucgguguguagaaa

SEQ ID NO: 4090781 - RNA, 20 nt, Variola virus
aucaaugauuaguuucuuaa

SEQ ID NO: 4090782 - RNA, 13 nt, Variola virus
aucaauuaaauaa

SEQ ID NO: 4090783 - RNA, 17 nt, Variola virus
aucaauuaaauaauuaa

SEQ ID NO: 4090784 - RNA, 18 nt, Variola virus
aucaauuaaauaauuaau

SEQ ID NO: 4090785 - RNA, 19 nt, Variola virus
aucaauucuggauuauccc

SEQ ID NO: 4090786 - RNA, 17 nt, Variola virus
aucaauuucaaaaagag

SEQ ID NO: 4090787 - RNA, 21 nt, Variola virus
aucacaacaucuauaaaagua

SEQ ID NO: 4090788 - RNA, 19 nt, Variola virus
aucacaagaaguuagaaag

SEQ ID NO: 4090789 - RNA, 16 nt, Variola virus
aucacacuuaaaauaa

SEQ ID NO: 4090790 - RNA, 13 nt, Variola virus
aucacaugaugau

SEQ ID NO: 4090791 - RNA, 17 nt, Variola virus
aucacuaucuuugaaaa

SEQ ID NO: 4090792 - RNA, 19 nt, Variola virus
aucacucucauaauguaaa

SEQ ID NO: 4090793 - RNA, 20 nt, Variola virus
aucacucuucgaaaagaaac

SEQ ID NO: 4090794 - RNA, 13 nt, Variola virus
aucacuucaauaa

SEQ ID NO: 4090795 - RNA, 18 nt, Variola virus
aucagagucugaggauau

SEQ ID NO: 4090796 - RNA, 14 nt, Variola virus
aucagauaacaugu

SEQ ID NO: 4090797 - RNA, 18 nt, Variola virus
aucagcacaugaagaaaa

SEQ ID NO: 4090798 - RNA, 20 nt, Variola virus
aucagcauugcuuucauuau

SEQ ID NO: 4090799 - RNA, 13 nt, Variola virus
aucaggaaaaaag

SEQ ID NO: 4090800 - RNA, 15 nt, Variola virus
aucaggaaaaaagau

SEQ ID NO: 4090801 - RNA, 20 nt, Variola virus
aucaggauauaaagaaaaau

SEQ ID NO: 4090802 - RNA, 20 nt, Variola virus
aucaguauguauaucuauau

SEQ ID NO: 4090803 - RNA, 23 nt, Variola virus
aucagucuuguauuccaaauuaa

SEQ ID NO: 4090804 - RNA, 23 nt, Variola virus
aucagugauagacuagaagaaag

SEQ ID NO: 4090805 - RNA, 16 nt, Variola virus
aucauaauaugagaug

SEQ ID NO: 4090806 - RNA, 19 nt, Variola virus
aucauaauccugugcauaa

SEQ ID NO: 4090807 - RNA, 15 nt, Variola virus
aucauacuuagaauu

SEQ ID NO: 4090808 - RNA, 19 nt, Variola virus
aucauauaguuauguauau

SEQ ID NO: 4090809 - RNA, 17 nt, Variola virus
aucauauauauacugaa

SEQ ID NO: 4090810 - RNA, 21 nt, Variola virus
aucauauaucugaagauauac

SEQ ID NO: 4090811 - RNA, 21 nt, Variola virus
aucaucaccuaucuuguguau

SEQ ID NO: 4090812 - RNA, 20 nt, Variola virus
aucauccaauauuauugaaa

SEQ ID NO: 4090813 - RNA, 21 nt, Variola virus
aucauccaccuguuuuaacau

SEQ ID NO: 4090814 - RNA, 19 nt, Variola virus
aucaucuagagaauccaca

SEQ ID NO: 4090815 - RNA, 15 nt, Variola virus
aucaucuauaugacu

SEQ ID NO: 4090816 - RNA, 16 nt, Variola virus
aucaucuauaugacug

SEQ ID NO: 4090817 - RNA, 13 nt, Variola virus
aucaugaaauaua

SEQ ID NO: 4090818 - RNA, 21 nt, Variola virus
aucauggcggugccagaaauu

SEQ ID NO: 4090819 - RNA, 12 nt, Variola virus
aucauguagaaa

SEQ ID NO: 4090820 - RNA, 18 nt, Variola virus
aucauguccauggauaaa

SEQ ID NO: 4090821 - RNA, 16 nt, Variola virus
aucauuaaaaaaauua

SEQ ID NO: 4090822 - RNA, 13 nt, Variola virus
aucauuaaaggau

SEQ ID NO: 4090823 - RNA, 11 nt, Variola virus
aucauuaacga

SEQ ID NO: 4090824 - RNA, 15 nt, Variola virus
aucauucgguaacuu

SEQ ID NO: 4090825 - RNA, 22 nt, Variola virus
aucauucuacguccuauggaug

SEQ ID NO: 4090826 - RNA, 16 nt, Variola virus
aucauugacugcuaaa

SEQ ID NO: 4090827 - RNA, 12 nt, Variola virus
aucauuucacaa

SEQ ID NO: 4090828 - RNA, 22 nt, Variola virus
auccaaaaguuccgagauaauu

SEQ ID NO: 4090829 - RNA, 14 nt, Variola virus
auccaagucaauau

SEQ ID NO: 4090830 - RNA, 14 nt, Variola virus
auccaaucauauau

SEQ ID NO: 4090831 - RNA, 17 nt, Variola virus
auccaaucuaagaaauu

SEQ ID NO: 4090832 - RNA, 23 nt, Variola virus
auccaauuguuugauauauaauu

SEQ ID NO: 4090833 - RNA, 19 nt, Variola virus
auccacugcugaacaguua

SEQ ID NO: 4090834 - RNA, 21 nt, Variola virus
auccagcuagugaauauauau

SEQ ID NO: 4090835 - RNA, 15 nt, Variola virus
auccauaucguauau

SEQ ID NO: 4090836 - RNA, 15 nt, Variola virus
auccauauuucuuaa

SEQ ID NO: 4090837 - RNA, 15 nt, Variola virus
auccaugucugaaac

SEQ ID NO: 4090838 - RNA, 16 nt, Variola virus
aucccauauaauacag

SEQ ID NO: 4090839 - RNA, 19 nt, Variola virus
aucccauucuaauacuuua

SEQ ID NO: 4090840 - RNA, 15 nt, Variola virus
aucccuuaaaaauua

SEQ ID NO: 4090841 - RNA, 21 nt, Variola virus
auccgaaacaaucucaaauau

SEQ ID NO: 4090842 - RNA, 17 nt, Variola virus
auccgauacuuguaaga

SEQ ID NO: 4090843 - RNA, 14 nt, Variola virus
auccuaacaaugag

SEQ ID NO: 4090844 - RNA, 15 nt, Variola virus
auccuaucuaagaug

SEQ ID NO: 4090845 - RNA, 17 nt, Variola virus
auccuguuucuacuaac

SEQ ID NO: 4090846 - RNA, 21 nt, Variola virus
auccuuagucaucuugucuag

SEQ ID NO: 4090847 - RNA, 22 nt, Variola virus
auccuuauauuuguuaacuaca

SEQ ID NO: 4090848 - RNA, 13 nt, Variola virus
auccuucagaauc

SEQ ID NO: 4090849 - RNA, 12 nt, Variola virus
aucgaguuuauc

SEQ ID NO: 4090850 - RNA, 17 nt, Variola virus
aucgauacauauaugca

SEQ ID NO: 4090851 - RNA, 18 nt, Variola virus
aucgauaguaaugcauuc

SEQ ID NO: 4090852 - RNA, 15 nt, Variola virus
aucgauauugaaaau

SEQ ID NO: 4090853 - RNA, 18 nt, Variola virus
aucgauuuucaaauccau

SEQ ID NO: 4090854 - RNA, 17 nt, Variola virus
aucgcuuaauagacaaa

SEQ ID NO: 4090855 - RNA, 22 nt, Variola virus
aucggcauuuauguuucuuuaa

SEQ ID NO: 4090856 - RNA, 23 nt, Variola virus
aucgucauuuuuuucucuagauc

SEQ ID NO: 4090857 - RNA, 16 nt, Variola virus
aucguuaaauuuuaca

SEQ ID NO: 4090858 - RNA, 15 nt, Variola virus
aucguuauuauauaa

SEQ ID NO: 4090859 - RNA, 14 nt, Variola virus
aucuaaaaacaaua

SEQ ID NO: 4090860 - RNA, 22 nt, Variola virus
aucuaaaacuacguucgaugaa

SEQ ID NO: 4090861 - RNA, 19 nt, Variola virus
aucuaaacgcguuagauaa

SEQ ID NO: 4090862 - RNA, 20 nt, Variola virus
aucuaaagaugaugcuauuu

SEQ ID NO: 4090863 - RNA, 14 nt, Variola virus
aucuaacauaaaca

SEQ ID NO: 4090864 - RNA, 15 nt, Variola virus
aucuaauaacaaugu

SEQ ID NO: 4090865 - RNA, 24 nt, Variola virus
aucuaauaacaauguagguacuau

SEQ ID NO: 4090866 - RNA, 19 nt, Variola virus
aucuaaucuguucauauac

SEQ ID NO: 4090867 - RNA, 14 nt, Variola virus
aucuacacaaauag

SEQ ID NO: 4090868 - RNA, 21 nt, Variola virus
aucuacugauaaaacuggaag

SEQ ID NO: 4090869 - RNA, 21 nt, Variola virus
aucuagacuuucuguuauuau

SEQ ID NO: 4090870 - RNA, 17 nt, Variola virus
aucuagauaauuaauaa

SEQ ID NO: 4090871 - RNA, 13 nt, Variola virus
aucuagccauuau

SEQ ID NO: 4090872 - RNA, 15 nt, Variola virus
aucuauaucaucuau

SEQ ID NO: 4090873 - RNA, 20 nt, Variola virus
aucuauaucugacacaagau

SEQ ID NO: 4090874 - RNA, 15 nt, Variola virus
aucuauguuuaacuu

SEQ ID NO: 4090875 - RNA, 17 nt, Variola virus
aucuauucauaaaacau

SEQ ID NO: 4090876 - RNA, 18 nt, Variola virus
aucuauugacuauaacuc

SEQ ID NO: 4090877 - RNA, 12 nt, Variola virus
aucucaaaauag

SEQ ID NO: 4090878 - RNA, 19 nt, Variola virus
aucucguccuugguuuaca

SEQ ID NO: 4090879 - RNA, 18 nt, Variola virus
aucucuauaauaucuagu

SEQ ID NO: 4090880 - RNA, 13 nt, Variola virus
aucucuugcuucu

SEQ ID NO: 4090881 - RNA, 18 nt, Variola virus
aucucuuuuccaugccuc

SEQ ID NO: 4090882 - RNA, 16 nt, Variola virus
gacauaccaucuauca

SEQ ID NO: 4090883 - RNA, 19 nt, Variola virus
gacaucuggauuucagaua

SEQ ID NO: 4090884 - RNA, 23 nt, Variola virus
gacauguucgugguguuaugaaa

SEQ ID NO: 4090885 - RNA, 17 nt, Variola virus
gacauuuucacaaauac

SEQ ID NO: 4090886 - RNA, 17 nt, Variola virus
gaccaagacacauaugg

SEQ ID NO: 4090887 - RNA, 15 nt, Variola virus
gaccaauuacugaua

SEQ ID NO: 4090888 - RNA, 15 nt, Variola virus
gaccacauccuucag

SEQ ID NO: 4090889 - RNA, 22 nt, Variola virus
gaccacucuccgucauccuuca

SEQ ID NO: 4090890 - RNA, 15 nt, Variola virus
gaccgaauacauaac

SEQ ID NO: 4090891 - RNA, 12 nt, Variola virus
gaccguguuucu

SEQ ID NO: 4090892 - RNA, 22 nt, Variola virus
gacgauauuagaugauaauuua

SEQ ID NO: 4090893 - RNA, 21 nt, Variola virus
gacguauaagucuauuugaaa

SEQ ID NO: 4090894 - RNA, 14 nt, Variola virus
gacgugcguaauau

SEQ ID NO: 4090895 - RNA, 20 nt, Variola virus
gacguuggcacaugaugaau

SEQ ID NO: 4090896 - RNA, 14 nt, Variola virus
gacuaaauacuaca

SEQ ID NO: 4090897 - RNA, 19 nt, Variola virus
gacuacaaagaauguucua

SEQ ID NO: 4090898 - RNA, 14 nt, Variola virus
gacuacuuauucua

SEQ ID NO: 4090899 - RNA, 14 nt, Variola virus
gacuagcauauuau

SEQ ID NO: 4090900 - RNA, 20 nt, Variola virus
gacuaucaacaauuuuguau

SEQ ID NO: 4090901 - RNA, 19 nt, Variola virus
gacuaucagacucuucuau

SEQ ID NO: 4090902 - RNA, 21 nt, Variola virus
gacuauggacgcaugauaaga

SEQ ID NO: 4090903 - RNA, 17 nt, Variola virus
gacucauuuaguuuauu

SEQ ID NO: 4090904 - RNA, 17 nt, Variola virus
gacuucguaagaaauaa

SEQ ID NO: 4090905 - RNA, 19 nt, Variola virus
gacuuguuaaaucuauaua

SEQ ID NO: 4090906 - RNA, 17 nt, Variola virus
gacuuuauaauuucauc

SEQ ID NO: 4090907 - RNA, 18 nt, Variola virus
gagaaguaauaaaacgaa

SEQ ID NO: 4090908 - RNA, 23 nt, Variola virus
gagaccauguauugcuguauuug

SEQ ID NO: 4090909 - RNA, 14 nt, Variola virus
gagagauagaagaa

SEQ ID NO: 4090910 - RNA, 22 nt, Variola virus
gagagaucauuucuauaauuua

SEQ ID NO: 4090911 - RNA, 11 nt, Variola virus
gagauaaaaga

SEQ ID NO: 4090912 - RNA, 16 nt, Variola virus
gagauaaucuauauca

SEQ ID NO: 4090913 - RNA, 20 nt, Variola virus
gagaucuaaacgaucuaguu

SEQ ID NO: 4090914 - RNA, 23 nt, Variola virus
gagaucuaaagccgguguaacau

SEQ ID NO: 4090915 - RNA, 20 nt, Variola virus
gagauuggguuaauaaauac

SEQ ID NO: 4090916 - RNA, 15 nt, Variola virus
gagcaaguagaaaac

SEQ ID NO: 4090917 - RNA, 18 nt, Variola virus
gaggaaaaaggacacauu

SEQ ID NO: 4090918 - RNA, 13 nt, Variola virus
gaggagaaguaau

SEQ ID NO: 4090919 - RNA, 15 nt, Variola virus
gaggauguuaaacaa

SEQ ID NO: 4090920 - RNA, 14 nt, Variola virus
gagggaaaagucau

SEQ ID NO: 4090921 - RNA, 22 nt, Variola virus
gaguaguaaaugcguacauaac

SEQ ID NO: 4090922 - RNA, 12 nt, Variola virus
gaguaguuuaug

SEQ ID NO: 4090923 - RNA, 13 nt, Variola virus
gaguguagaaaac

SEQ ID NO: 4090924 - RNA, 23 nt, Variola virus
gaguuaucacaugcaaggcauuu

SEQ ID NO: 4090925 - RNA, 17 nt, Variola virus
gaguuauuaagaaauac

SEQ ID NO: 4090926 - RNA, 20 nt, Variola virus
gauaaaaaggaaucuauuaa

SEQ ID NO: 4090927 - RNA, 14 nt, Variola virus
gauaaaauacugaa

SEQ ID NO: 4090928 - RNA, 17 nt, Variola virus
gauaaaauuaaugagau

SEQ ID NO: 4090929 - RNA, 18 nt, Variola virus
gauaaacacucauauuau

SEQ ID NO: 4090930 - RNA, 15 nt, Variola virus
gauaaagauaaaaga

SEQ ID NO: 4090931 - RNA, 14 nt, Variola virus
gauaaaguuaucau

SEQ ID NO: 4090932 - RNA, 14 nt, Variola virus
gauaaauuguacaa

SEQ ID NO: 4090933 - RNA, 16 nt, Variola virus
gauaacaaauuaaaga

SEQ ID NO: 4090934 - RNA, 18 nt, Variola virus
gauaacguauuaaauauu

SEQ ID NO: 4090935 - RNA, 20 nt, Variola virus
gauaagauauguuuauucau

SEQ ID NO: 4090936 - RNA, 13 nt, Variola virus
gauaauaaacaaa

SEQ ID NO: 4090937 - RNA, 13 nt, Variola virus
gauaauaauacac

SEQ ID NO: 4090938 - RNA, 22 nt, Variola virus
gauaauaauguuguuauaucua

SEQ ID NO: 4090939 - RNA, 18 nt, Variola virus
gauaauaauuaauaucua

SEQ ID NO: 4090940 - RNA, 19 nt, Variola virus
gauaauagggagaaaugac

SEQ ID NO: 4090941 - RNA, 13 nt, Variola virus
gauaauagucacg

SEQ ID NO: 4090942 - RNA, 19 nt, Variola virus
gauaauauuagacauauga

SEQ ID NO: 4090943 - RNA, 14 nt, Variola virus
gauaauauuaucua

SEQ ID NO: 4090944 - RNA, 20 nt, Variola virus
gauaaugauauauuaaacaa

SEQ ID NO: 4090945 - RNA, 18 nt, Variola virus
gauaauuuauacguauca

SEQ ID NO: 4090946 - RNA, 17 nt, Variola virus
gauacaauggaugauau

SEQ ID NO: 4090947 - RNA, 18 nt, Variola virus
gauacaguaucguuuuaa

SEQ ID NO: 4090948 - RNA, 18 nt, Variola virus
gauacauuauaugaugau

SEQ ID NO: 4090949 - RNA, 14 nt, Variola virus
gauacauuuugcau

SEQ ID NO: 4090950 - RNA, 17 nt, Variola virus
gauacccugauauuaau

SEQ ID NO: 4090951 - RNA, 19 nt, Variola virus
gauacuaauuguagcuauu

SEQ ID NO: 4090952 - RNA, 15 nt, Variola virus
gauacuauaaugaaa

SEQ ID NO: 4090953 - RNA, 20 nt, Variola virus
gauagaagauuuaucuuucu

SEQ ID NO: 4090954 - RNA, 15 nt, Variola virus
gauagacacauaugc

SEQ ID NO: 4090955 - RNA, 17 nt, Variola virus
gauagacuagaagaaag

SEQ ID NO: 4090956 - RNA, 18 nt, Variola virus
gauagauaugauaaacaa

SEQ ID NO: 4090957 - RNA, 16 nt, Variola virus
gauagcaaagagauga

SEQ ID NO: 4090958 - RNA, 23 nt, Variola virus
gauagcugauacguuauaaaggu

SEQ ID NO: 4090959 - RNA, 19 nt, Variola virus
gauagguauugaugaagga

SEQ ID NO: 4090960 - RNA, 23 nt, Variola virus
gauaguuuuuuucauuacuaucu

SEQ ID NO: 4090961 - RNA, 21 nt, Variola virus
gauauacccgaagauauacac

SEQ ID NO: 4090962 - RNA, 24 nt, Variola virus
gauauaggguucuuuauaaugcau

SEQ ID NO: 4090963 - RNA, 14 nt, Variola virus
gauauauauugcac

SEQ ID NO: 4090964 - RNA, 22 nt, Variola virus
gauauauauugcacgauaaugu

SEQ ID NO: 4090965 - RNA, 17 nt, Variola virus
gauauauccacuucuuc

SEQ ID NO: 4090966 - RNA, 13 nt, Variola virus
gauauaugaugaa

SEQ ID NO: 4090967 - RNA, 18 nt, Variola virus
gauaucauuaauacagua

SEQ ID NO: 4090968 - RNA, 16 nt, Variola virus
gauaucuauacuuacu

SEQ ID NO: 4090969 - RNA, 18 nt, Variola virus
gauaucucauuaaaauau

SEQ ID NO: 4090970 - RNA, 19 nt, Variola virus
gauauuaucgacuaugaau

SEQ ID NO: 4090971 - RNA, 15 nt, Variola virus
gauauucuaugaauu

SEQ ID NO: 4090972 - RNA, 12 nt, Variola virus
gaucaaauggau

SEQ ID NO: 4090973 - RNA, 15 nt, Variola virus
gaucaaccucuggag

SEQ ID NO: 4090974 - RNA, 17 nt, Variola virus
gaucacuguagugcuau

SEQ ID NO: 4090975 - RNA, 17 nt, Variola virus
gaucaggaauccaaaga

SEQ ID NO: 4090976 - RNA, 21 nt, Variola virus
gaucagguaaaacaauaaucg

SEQ ID NO: 4090977 - RNA, 18 nt, Variola virus
gaucaucaauccuucaga

SEQ ID NO: 4090978 - RNA, 13 nt, Variola virus
gaucaucuagaua

SEQ ID NO: 4090979 - RNA, 18 nt, Variola virus
gaucauuaauaaaaauac

SEQ ID NO: 4090980 - RNA, 17 nt, Variola virus
gauccaaacaauguuuc

SEQ ID NO: 4090981 - RNA, 16 nt, Variola virus
gauccaggguauuaua

SEQ ID NO: 4090982 - RNA, 17 nt, Variola virus
gauccuaauuuacaaua

SEQ ID NO: 4090983 - RNA, 19 nt, Variola virus
gauccuagaacuagauaua

SEQ ID NO: 4090984 - RNA, 15 nt, Variola virus
gaucgguucagcauu

SEQ ID NO: 4090985 - RNA, 13 nt, Variola virus
gaucgucuagaug

SEQ ID NO: 4090986 - RNA, 21 nt, Variola virus
gaucuagcaaaggaaauugug

SEQ ID NO: 4090987 - RNA, 20 nt, Variola virus
gaucuauagaaaacuacagg

SEQ ID NO: 4090988 - RNA, 21 nt, Variola virus
gaucuauuagaaaauucucuu

SEQ ID NO: 4090989 - RNA, 14 nt, Variola virus
gaucucgaugaaaa

SEQ ID NO: 4090990 - RNA, 10 nt, Variola virus
gaucugaaga

SEQ ID NO: 4090991 - RNA, 17 nt, Variola virus
gaucuggaaaauaaucu

SEQ ID NO: 4090992 - RNA, 21 nt, Variola virus
gaucuuaacuccucuauuaau

SEQ ID NO: 4090993 - RNA, 21 nt, Variola virus
gaucuuacuguuucuucacuc

SEQ ID NO: 4090994 - RNA, 23 nt, Variola virus
gaucuuuauuuuuuguguauuuu

SEQ ID NO: 4090995 - RNA, 14 nt, Variola virus
gaucuuuuguacau
